United States Patent Application Publication US 2007/0042381 A1 - sequence listing, part 55

SEQ ID NO: 2485715 - RNA, 21 nt, Human
acuuuuuugaaauaauaaauc

SEQ ID NO: 2485716 - RNA, 22 nt, Human
acuuuuuugaguggaugauguu

SEQ ID NO: 2485717 - RNA, 21 nt, Human
acuuuuuuggggauaugcuua

SEQ ID NO: 2485718 - RNA, 23 nt, Human
acuuuuuugcuauccagcuauuu

SEQ ID NO: 2485719 - RNA, 13 nt, Human
acuuuuuuccaca

SEQ ID NO: 2485720 - RNA, 18 nt, Human
acuuuuugguuugcagau

SEQ ID NO: 2485721 - RNA, 13 nt, Human
acuuuuugcauuu

SEQ ID NO: 2485722 - RNA, 15 nt, Human
acuuuuucuuuaugu

SEQ ID NO: 2485723 - RNA, 18 nt, Human
acuuuaccuuuuuuauac

SEQ ID NO: 2485724 - RNA, 21 nt, Human
acuuguuguuuuacuaaagaa

SEQ ID NO: 2485725 - RNA, 19 nt, Human
acuuuaccuuuuuuauaca

SEQ ID NO: 2485726 - RNA, 22 nt, Human
acuuuaccuuuuuuauacauaa

SEQ ID NO: 2485727 - RNA, 23 nt, Human
acuuuaccuuuuuuauacauaaa

SEQ ID NO: 2485728 - RNA, 13 nt, Human
acuuguuuccaau

SEQ ID NO: 2485729 - RNA, 19 nt, Human
acuuugaccucugcagcaa

SEQ ID NO: 2485730 - RNA, 23 nt, Human
acuuugaccucugcagcaauaaa

SEQ ID NO: 2485731 - RNA, 15 nt, Human
acuuugacuuuuugc

SEQ ID NO: 2485732 - RNA, 20 nt, Human
acuuugacuuuuugcauuua

SEQ ID NO: 2485733 - RNA, 17 nt, Human
acuuguuuuaugcucag

SEQ ID NO: 2485734 - RNA, 14 nt, Human
acuuuggaaagacu

SEQ ID NO: 2485735 - RNA, 13 nt, Human
acuuuggaaagac

SEQ ID NO: 2485736 - RNA, 21 nt, Human
acuuugacuuuuugcauuuaa

SEQ ID NO: 2485737 - RNA, 12 nt, Human
acuuuggaaaga

SEQ ID NO: 2485738 - RNA, 14 nt, Human
acuuuggcugcaug

SEQ ID NO: 2485739 - RNA, 17 nt, Human
acuuuggcugcaugcga

SEQ ID NO: 2485740 - RNA, 13 nt, Human
acuuuggcugcau

SEQ ID NO: 2485741 - RNA, 17 nt, Human
acuuuggaaagacuuuu

SEQ ID NO: 2485742 - RNA, 12 nt, Human
acuuugggaggc

SEQ ID NO: 2485743 - RNA, 15 nt, Human
acuuugggaggccaa

SEQ ID NO: 2485744 - RNA, 14 nt, Human
acuuugggaggcca

SEQ ID NO: 2485745 - RNA, 20 nt, Human
acuuugggaggccaaggugg

SEQ ID NO: 2485746 - RNA, 17 nt, Human
acuuugggaggcugagg

SEQ ID NO: 2485747 - RNA, 19 nt, Human
acuuugggaggccaaggug

SEQ ID NO: 2485748 - RNA, 16 nt, Human
acuuugggaggccaag

SEQ ID NO: 2485749 - RNA, 17 nt, Human
acuuugggaggccaagg

SEQ ID NO: 2485750 - RNA, 19 nt, Human
agccugagcgacagugaga

SEQ ID NO: 2485751 - RNA, 17 nt, Human
ugcagccggcacagggu

SEQ ID NO: 2485752 - RNA, 14 nt, Human
ugcagccgcugagc

SEQ ID NO: 2485753 - RNA, 19 nt, Human
ugcagccucaaccuccugg

SEQ ID NO: 2485754 - RNA, 18 nt, Human
ugcagccucaaccuccug

SEQ ID NO: 2485755 - RNA, 19 nt, Human
ugcagccggcacagggucu

SEQ ID NO: 2485756 - RNA, 18 nt, Human
ugcagccggcacaggguc

SEQ ID NO: 2485757 - RNA, 21 nt, Human
ugcagcugaccucuguugucc

SEQ ID NO: 2485758 - RNA, 19 nt, Human
ugcagcugagagaaaauaa

SEQ ID NO: 2485759 - RNA, 16 nt, Human
ugcagcugauguugga

SEQ ID NO: 2485760 - RNA, 14 nt, Human
ugcagcugauuuua

SEQ ID NO: 2485761 - RNA, 15 nt, Human
ugcagcugauuuuaa

SEQ ID NO: 2485762 - RNA, 16 nt, Human
ugcagcugauuuuaac

SEQ ID NO: 2485763 - RNA, 18 nt, Human
ugcagcugauuuuaacaa

SEQ ID NO: 2485764 - RNA, 19 nt, Human
ugcagcugauuuuaacaau

SEQ ID NO: 2485765 - RNA, 19 nt, Human
ugcagcuggaaaagggucu

SEQ ID NO: 2485766 - RNA, 20 nt, Human
ugcagcugauuuuaacaaua

SEQ ID NO: 2485767 - RNA, 22 nt, Human
ugcagcugauuuuaacaauaac

SEQ ID NO: 2485768 - RNA, 15 nt, Human
ugcagcuucuguccu

SEQ ID NO: 2485769 - RNA, 18 nt, Human
agccugagcgacagugag

SEQ ID NO: 2485770 - RNA, 16 nt, Human
agccugagcaacucuu

SEQ ID NO: 2485771 - RNA, 21 nt, Human
agccugagcaacucuugauua

SEQ ID NO: 2485772 - RNA, 15 nt, Human
agccucagcauccug

SEQ ID NO: 2485773 - RNA, 14 nt, Human
agccucagcauccu

SEQ ID NO: 2485774 - RNA, 13 nt, Human
agccucagcaucc

SEQ ID NO: 2485775 - RNA, 18 nt, Human
agccucaaccuccugggc

SEQ ID NO: 2485776 - RNA, 17 nt, Human
agccucaaccuccuggg

SEQ ID NO: 2485777 - RNA, 16 nt, Human
ugcaguuuuucagagu

SEQ ID NO: 2485778 - RNA, 15 nt, Human
ugcaguuuuucagag

SEQ ID NO: 2485779 - RNA, 14 nt, Human
ugcaguuuuucaga

SEQ ID NO: 2485780 - RNA, 15 nt, Human
ugcagugagccaaga

SEQ ID NO: 2485781 - RNA, 22 nt, Human
ugcagugacgugcaccuguacu

SEQ ID NO: 2485782 - RNA, 11 nt, Human
ugcauaaaaug

SEQ ID NO: 2485783 - RNA, 13 nt, Human
ugcauaaauaugc

SEQ ID NO: 2485784 - RNA, 12 nt, Human
ugcauaaauaug

SEQ ID NO: 2485785 - RNA, 17 nt, Human
ugcauaaagucagugcc

SEQ ID NO: 2485786 - RNA, 19 nt, Human
ugcagugagccgagauugu

SEQ ID NO: 2485787 - RNA, 12 nt, Human
ugcaguuuuccu

SEQ ID NO: 2485788 - RNA, 15 nt, Human
ugcauaauggucaga

SEQ ID NO: 2485789 - RNA, 23 nt, Human
ugcauaauaagcuaaagaggcug

SEQ ID NO: 2485790 - RNA, 24 nt, Human
ugcauaauaagcuaaagaggcuga

SEQ ID NO: 2485791 - RNA, 19 nt, Human
ugcauaaauaugcagugau

SEQ ID NO: 2485792 - RNA, 15 nt, Human
ugcauaaauaugcag

SEQ ID NO: 2485793 - RNA, 14 nt, Human
ugcauaaauaugca

SEQ ID NO: 2485794 - RNA, 17 nt, Human
ugcauaacaauuccucu

SEQ ID NO: 2485795 - RNA, 18 nt, Human
ugcauaacaauuccucua

SEQ ID NO: 2485796 - RNA, 19 nt, Human
ugcauaauaagcuaaagag

SEQ ID NO: 2485797 - RNA, 22 nt, Human
ugcauaauaagcuaaagaggcu

SEQ ID NO: 2485798 - RNA, 20 nt, Human
ugcaggucccuaauaaagcu

SEQ ID NO: 2485799 - RNA, 19 nt, Human
ugcaggucccuaauaaagc

SEQ ID NO: 2485800 - RNA, 16 nt, Human
ugcagcuucuguccug

SEQ ID NO: 2485801 - RNA, 18 nt, Human
ugcaggucccuaauaaag

SEQ ID NO: 2485802 - RNA, 14 nt, Human
ugcagugagccgag

SEQ ID NO: 2485803 - RNA, 17 nt, Human
ugcaggucccuaauaaa

SEQ ID NO: 2485804 - RNA, 21 nt, Human
ugcaggucccuaauaaagcug

SEQ ID NO: 2485805 - RNA, 13 nt, Human
ugcagucugggug

SEQ ID NO: 2485806 - RNA, 18 nt, Human
ugcagugacgugcaccug

SEQ ID NO: 2485807 - RNA, 19 nt, Human
ugcagugacgugcaccugu

SEQ ID NO: 2485808 - RNA, 13 nt, Human
ugcagugaauugu

SEQ ID NO: 2485809 - RNA, 12 nt, Human
agccugcagagc

SEQ ID NO: 2485810 - RNA, 13 nt, Human
agccugcagagcu

SEQ ID NO: 2485811 - RNA, 14 nt, Human
agccugcagagcug

SEQ ID NO: 2485812 - RNA, 15 nt, Human
agccugcagagcugc

SEQ ID NO: 2485813 - RNA, 21 nt, Human
agccugcaauuucauaugcug

SEQ ID NO: 2485814 - RNA, 19 nt, Human
agccugcaaacucacugcu

SEQ ID NO: 2485815 - RNA, 18 nt, Human
agccugcaaacucacugc

SEQ ID NO: 2485816 - RNA, 21 nt, Human
agccugcaacucaucuuucau

SEQ ID NO: 2485817 - RNA, 16 nt, Human
ugcaugcugucccuua

SEQ ID NO: 2485818 - RNA, 18 nt, Human
agccugagucuccugugc

SEQ ID NO: 2485819 - RNA, 17 nt, Human
agccugagucuccugug

SEQ ID NO: 2485820 - RNA, 16 nt, Human
agccugagucuccugu

SEQ ID NO: 2485821 - RNA, 14 nt, Human
ugcaugauguauuu

SEQ ID NO: 2485822 - RNA, 18 nt, Human
agccugaucaccugcccu

SEQ ID NO: 2485823 - RNA, 17 nt, Human
agccugcaaacucacug

SEQ ID NO: 2485824 - RNA, 19 nt, Human
agccugcaauuucauaugc

SEQ ID NO: 2485825 - RNA, 19 nt, Human
agccugaucaccugcccug

SEQ ID NO: 2485826 - RNA, 21 nt, Human
agccugcaggguggugcuggg

SEQ ID NO: 2485827 - RNA, 19 nt, Human
agccugcaggguggugcug

SEQ ID NO: 2485828 - RNA, 18 nt, Human
agccugcaggguggugcu

SEQ ID NO: 2485829 - RNA, 12 nt, Human
agccugcagggu

SEQ ID NO: 2485830 - RNA, 15 nt, Human
agccugagucuccug

SEQ ID NO: 2485831 - RNA, 22 nt, Human
agccugcaggugcugcugcgug

SEQ ID NO: 2485832 - RNA, 20 nt, Human
agccugcaggugcugcugcg

SEQ ID NO: 2485833 - RNA, 19 nt, Human
agccugcaggugcugcugc

SEQ ID NO: 2485834 - RNA, 18 nt, Human
agccugcaggugcugcug

SEQ ID NO: 2485835 - RNA, 17 nt, Human
agccugcaggugcugcu

SEQ ID NO: 2485836 - RNA, 15 nt, Human
agccugcaggugcug

SEQ ID NO: 2485837 - RNA, 23 nt, Human
agccugcaggguggugcugggac

SEQ ID NO: 2485838 - RNA, 22 nt, Human
agccugcaggguggugcuggga

SEQ ID NO: 2485839 - RNA, 23 nt, Human
agccugcaguuauuaacacuaac

SEQ ID NO: 2485840 - RNA, 18 nt, Human
agccugccacucaggccc

SEQ ID NO: 2485841 - RNA, 12 nt, Human
agccugcccucc

SEQ ID NO: 2485842 - RNA, 16 nt, Human
agccugccucuucucu

SEQ ID NO: 2485843 - RNA, 19 nt, Human
agccugccucuucucuacu

SEQ ID NO: 2485844 - RNA, 21 nt, Human
ugcaugaggcuaguguggugu

SEQ ID NO: 2485845 - RNA, 22 nt, Human
ugcaugaaguaauaugcacaca

SEQ ID NO: 2485846 - RNA, 20 nt, Human
ugcaugaaguaauaugcaca

SEQ ID NO: 2485847 - RNA, 22 nt, Human
ugcaucuguauaaguaagaaaa

SEQ ID NO: 2485848 - RNA, 21 nt, Human
ugcaucuguauaaguaagaaa

SEQ ID NO: 2485849 - RNA, 20 nt, Human
ugcaucuguauaaguaagaa

SEQ ID NO: 2485850 - RNA, 11 nt, Human
ugcaucuguau

SEQ ID NO: 2485851 - RNA, 20 nt, Human
ugcaucuggguagcuguaag

SEQ ID NO: 2485852 - RNA, 21 nt, Human
ugcaucuggguagcuguaagg

SEQ ID NO: 2485853 - RNA, 15 nt, Human
ugcaugcugucccuu

SEQ ID NO: 2485854 - RNA, 14 nt, Human
ugcaugcugucccu

SEQ ID NO: 2485855 - RNA, 13 nt, Human
ugcaugcuguccc

SEQ ID NO: 2485856 - RNA, 21 nt, Human
ugcaugagcuacgccugccuc

SEQ ID NO: 2485857 - RNA, 23 nt, Human
ugcaucuguauaaguaagaaaau

SEQ ID NO: 2485858 - RNA, 19 nt, Human
ugcaugaauaaaauuauuc

SEQ ID NO: 2485859 - RNA, 15 nt, Human
ugcaugagcuuuuau

SEQ ID NO: 2485860 - RNA, 22 nt, Human
ugcaugagcuacgccugccucc

SEQ ID NO: 2485861 - RNA, 15 nt, Human
ugcaucucagcccac

SEQ ID NO: 2485862 - RNA, 13 nt, Human
ugcaucuccaccu

SEQ ID NO: 2485863 - RNA, 13 nt, Human
ugcauacacacac

SEQ ID NO: 2485864 - RNA, 14 nt, Human
ugcaucuccaccug

SEQ ID NO: 2485865 - RNA, 13 nt, Human
ugcaucucccaga

SEQ ID NO: 2485866 - RNA, 18 nt, Human
ugcaucucccagauaaug

SEQ ID NO: 2485867 - RNA, 15 nt, Human
ugcaucugaccagca

SEQ ID NO: 2485868 - RNA, 17 nt, Human
ugcaucugaccagcagc

SEQ ID NO: 2485869 - RNA, 22 nt, Human
ugcaucugaccagcagcgccuu

SEQ ID NO: 2485870 - RNA, 18 nt, Human
ugcaucugaccagcagcg

SEQ ID NO: 2485871 - RNA, 21 nt, Human
ugcaucugaccagcagcgccu

SEQ ID NO: 2485872 - RNA, 23 nt, Human
ugcaucugggauucccaccaagg

SEQ ID NO: 2485873 - RNA, 20 nt, Human
ugcaucugggauucccacca

SEQ ID NO: 2485874 - RNA, 19 nt, Human
ugcaucugggauucccacc

SEQ ID NO: 2485875 - RNA, 18 nt, Human
ugcaucuggguagcugua

SEQ ID NO: 2485876 - RNA, 19 nt, Human
ugcaucuggguagcuguaa

SEQ ID NO: 2485877 - RNA, 12 nt, Human
ugcauacacaca

SEQ ID NO: 2485878 - RNA, 22 nt, Human
ugcauaccacuuuuguucuugg

SEQ ID NO: 2485879 - RNA, 10 nt, Human
ugcauacaca

SEQ ID NO: 2485880 - RNA, 11 nt, Human
ugcauacacac

SEQ ID NO: 2485881 - RNA, 21 nt, Human
ugcauaccacuuuuguucuug

SEQ ID NO: 2485882 - RNA, 9 nt, Human
ugcauacac

SEQ ID NO: 2485883 - RNA, 23 nt, Human
ugcacaagcuccaagcucccagg

SEQ ID NO: 2485884 - RNA, 22 nt, Human
ugcacaagcuccaagcucccag

SEQ ID NO: 2485885 - RNA, 20 nt, Human
ugcacaagcuccaagcuccc

SEQ ID NO: 2485886 - RNA, 18 nt, Human
ugcacaagcuccaagcuc

SEQ ID NO: 2485887 - RNA, 16 nt, Human
ugcacaagcuccaagc

SEQ ID NO: 2485888 - RNA, 15 nt, Human
ugcacaagcuccaag

SEQ ID NO: 2485889 - RNA, 21 nt, Human
ugcacaaccaucugucccugc

SEQ ID NO: 2485890 - RNA, 18 nt, Human
agcagcaccguucugugc

SEQ ID NO: 2485891 - RNA, 14 nt, Human
ugcacaacauuaca

SEQ ID NO: 2485892 - RNA, 23 nt, Human
ugcacaugaaucccacccacaug

SEQ ID NO: 2485893 - RNA, 12 nt, Human
ugcacaugucuu

SEQ ID NO: 2485894 - RNA, 21 nt, Human
ugcacaugacucggggguggg

SEQ ID NO: 2485895 - RNA, 19 nt, Human
ugcacaauauugaacuuuu

SEQ ID NO: 2485896 - RNA, 17 nt, Human
ugcacaauauugaacuu

SEQ ID NO: 2485897 - RNA, 15 nt, Human
ugcacacaccagagc

SEQ ID NO: 2485898 - RNA, 15 nt, Human
ugcacaauaaaaaug

SEQ ID NO: 2485899 - RNA, 20 nt, Human
ugcacaauaaaaauguuuaa

SEQ ID NO: 2485900 - RNA, 21 nt, Human
ugcacaauaaaaauguuuaac

SEQ ID NO: 2485901 - RNA, 14 nt, Human
ugcacaagcugcac

SEQ ID NO: 2485902 - RNA, 13 nt, Human
ugcacuccccugc

SEQ ID NO: 2485903 - RNA, 12 nt, Human
ugcacuccccug

SEQ ID NO: 2485904 - RNA, 16 nt, Human
ugcacuacugacaugu

SEQ ID NO: 2485905 - RNA, 15 nt, Human
ugcacuacugacaug

SEQ ID NO: 2485906 - RNA, 22 nt, Human
ugcacuauagccuaggugacag

SEQ ID NO: 2485907 - RNA, 18 nt, Human
ugcacuacugacaugugg

SEQ ID NO: 2485908 - RNA, 19 nt, Human
ugcacuccagccugggcga

SEQ ID NO: 2485909 - RNA, 17 nt, Human
ugcacuaaggggcccgg

SEQ ID NO: 2485910 - RNA, 22 nt, Human
ugcacuaaggggcccggccagc

SEQ ID NO: 2485911 - RNA, 23 nt, Human
ugcacuaaggggcccggccagcc

SEQ ID NO: 2485912 - RNA, 15 nt, Human
ugcacuaaggggccc

SEQ ID NO: 2485913 - RNA, 23 nt, Human
ugcacuacuccucugcagugccu

SEQ ID NO: 2485914 - RNA, 19 nt, Human
ugcacuacuccucugcagu

SEQ ID NO: 2485915 - RNA, 14 nt, Human
ugcacuacugacau

SEQ ID NO: 2485916 - RNA, 18 nt, Human
ugcacuacuccucugcag

SEQ ID NO: 2485917 - RNA, 16 nt, Human
ugcacuacuccucugc

SEQ ID NO: 2485918 - RNA, 15 nt, Human
ugcacuacuccucug

SEQ ID NO: 2485919 - RNA, 18 nt, Human
ugcacuaaaguauguaaa

SEQ ID NO: 2485920 - RNA, 20 nt, Human
ugcacguuaugguguuucuc

SEQ ID NO: 2485921 - RNA, 16 nt, Human
ugcacguggccucuug

SEQ ID NO: 2485922 - RNA, 15 nt, Human
ugcacguggccucuu

SEQ ID NO: 2485923 - RNA, 14 nt, Human
ugcacguggccucu

SEQ ID NO: 2485924 - RNA, 23 nt, Human
ugcacguggcauguggccugugg

SEQ ID NO: 2485925 - RNA, 16 nt, Human
ugcacguggcaugugg

SEQ ID NO: 2485926 - RNA, 21 nt, Human
ugcacguggagagcuggugcc

SEQ ID NO: 2485927 - RNA, 15 nt, Human
ugcacaugucuuaau

SEQ ID NO: 2485928 - RNA, 14 nt, Human
ugcacaugucuuaa

SEQ ID NO: 2485929 - RNA, 16 nt, Human
ugcacaugucuuaaug

SEQ ID NO: 2485930 - RNA, 15 nt, Human
ugcacaugucuugua

SEQ ID NO: 2485931 - RNA, 23 nt, Human
ugcaccaacccagccgcugcccg

SEQ ID NO: 2485932 - RNA, 22 nt, Human
ugcaccaacccagccgcugccc

SEQ ID NO: 2485933 - RNA, 14 nt, Human
ugcaccaagcagga

SEQ ID NO: 2485934 - RNA, 20 nt, Human
ugcaccaacccagccgcugc

SEQ ID NO: 2485935 - RNA, 19 nt, Human
ugcaccaacccagccgcug

SEQ ID NO: 2485936 - RNA, 19 nt, Human
ugcacaugucuuguacaug

SEQ ID NO: 2485937 - RNA, 15 nt, Human
ugcaccaccaagcca

SEQ ID NO: 2485938 - RNA, 14 nt, Human
ugcaccaccaagcc

SEQ ID NO: 2485939 - RNA, 12 nt, Human
ugcaccaccaag

SEQ ID NO: 2485940 - RNA, 22 nt, Human
ugcaccaagcaggaaaugaaaa

SEQ ID NO: 2485941 - RNA, 14 nt, Human
ugcaccacugcacu

SEQ ID NO: 2485942 - RNA, 19 nt, Human
ugcacguacacacacauac

SEQ ID NO: 2485943 - RNA, 18 nt, Human
ugcaccaccaagccaagg

SEQ ID NO: 2485944 - RNA, 16 nt, Human
ugcaccaccaagccaa

SEQ ID NO: 2485945 - RNA, 19 nt, Human
ugcaccaccaagccaaggg

SEQ ID NO: 2485946 - RNA, 19 nt, Human
ugcacguaguagggucagg

SEQ ID NO: 2485947 - RNA, 16 nt, Human
ugcacguggagagcug

SEQ ID NO: 2485948 - RNA, 17 nt, Human
ugcacguggagagcugg

SEQ ID NO: 2485949 - RNA, 18 nt, Human
ugcacguggagagcuggu

SEQ ID NO: 2485950 - RNA, 20 nt, Human
ugcacguggagagcuggugc

SEQ ID NO: 2485951 - RNA, 12 nt, Human
ugcacguggaga

SEQ ID NO: 2485952 - RNA, 22 nt, Human
ugcacguaguagggucaggcca

SEQ ID NO: 2485953 - RNA, 15 nt, Human
ugcacgucaugggag

SEQ ID NO: 2485954 - RNA, 18 nt, Human
ugcagacucuacagaggc

SEQ ID NO: 2485955 - RNA, 20 nt, Human
ugcagacucuacagaggcca

SEQ ID NO: 2485956 - RNA, 19 nt, Human
ugcagacucuacagaggcc

SEQ ID NO: 2485957 - RNA, 15 nt, Human
ugcacuccccugcug

SEQ ID NO: 2485958 - RNA, 13 nt, Human
ugcagaaaacauu

SEQ ID NO: 2485959 - RNA, 12 nt, Human
ugcagaaaacau

SEQ ID NO: 2485960 - RNA, 15 nt, Human
ugcagaaaacauugu

SEQ ID NO: 2485961 - RNA, 14 nt, Human
ugcagaaaacauug

SEQ ID NO: 2485962 - RNA, 16 nt, Human
ugcagaaaacauuguu

SEQ ID NO: 2485963 - RNA, 16 nt, Human
ugcagaaaagcaccug

SEQ ID NO: 2485964 - RNA, 21 nt, Human
ugcagaaaagcaccugccgac

SEQ ID NO: 2485965 - RNA, 22 nt, Human
ugcagaaaagcaccugccgacc

SEQ ID NO: 2485966 - RNA, 17 nt, Human
ugcagaaaagcaccugc

SEQ ID NO: 2485967 - RNA, 18 nt, Human
ugcagaaaagcaccugcc

SEQ ID NO: 2485968 - RNA, 19 nt, Human
ugcagaaaagcaccugccg

SEQ ID NO: 2485969 - RNA, 20 nt, Human
ugcagaaaagcaccugccga

SEQ ID NO: 2485970 - RNA, 14 nt, Human
agcccuucauuugg

SEQ ID NO: 2485971 - RNA, 13 nt, Human
agcccuucauuug

SEQ ID NO: 2485972 - RNA, 22 nt, Human
ugcagagagccauuuugugaau

SEQ ID NO: 2485973 - RNA, 21 nt, Human
ugcagagagccauuuugugaa

SEQ ID NO: 2485974 - RNA, 23 nt, Human
ugcagagagccauuuugugaaug

SEQ ID NO: 2485975 - RNA, 23 nt, Human
agcccuuccaugucgccucugca

SEQ ID NO: 2485976 - RNA, 22 nt, Human
agcccuuccaugucgccucugc

SEQ ID NO: 2485977 - RNA, 19 nt, Human
agcccuuccaugucgccuc

SEQ ID NO: 2485978 - RNA, 22 nt, Human
ugcagacucuacagaggccaug

SEQ ID NO: 2485979 - RNA, 22 nt, Human
ugcagacugcugcuagagccag

SEQ ID NO: 2485980 - RNA, 13 nt, Human
ugcagacuggagg

SEQ ID NO: 2485981 - RNA, 17 nt, Human
ugcagacuggaggggac

SEQ ID NO: 2485982 - RNA, 14 nt, Human
ugcagacuggaggg

SEQ ID NO: 2485983 - RNA, 16 nt, Human
ugcagacuggagggga

SEQ ID NO: 2485984 - RNA, 18 nt, Human
ugcagagagccauuuugu

SEQ ID NO: 2485985 - RNA, 17 nt, Human
ugcagagagccauuuug

SEQ ID NO: 2485986 - RNA, 16 nt, Human
ugcagagagccauuuu

SEQ ID NO: 2485987 - RNA, 15 nt, Human
ugcagagagccauuu

SEQ ID NO: 2485988 - RNA, 15 nt, Human
ugcagagagaagccu

SEQ ID NO: 2485989 - RNA, 14 nt, Human
ugcagagagaagcc

SEQ ID NO: 2485990 - RNA, 13 nt, Human
ugcagagagaagc

SEQ ID NO: 2485991 - RNA, 17 nt, Human
ugcagagacaggaccug

SEQ ID NO: 2485992 - RNA, 20 nt, Human
ugcagagacaggaccugacu

SEQ ID NO: 2485993 - RNA, 24 nt, Human
ugcagagacagagaggacgugggc

SEQ ID NO: 2485994 - RNA, 19 nt, Human
agcccuucuuuccacagaa

SEQ ID NO: 2485995 - RNA, 18 nt, Human
agcccuucuuuccacaga

SEQ ID NO: 2485996 - RNA, 23 nt, Human
agccguuuguuccccaagacauu

SEQ ID NO: 2485997 - RNA, 19 nt, Human
agccguuuguuccccaaga

SEQ ID NO: 2485998 - RNA, 20 nt, Human
agcccuugagcuccccaaaa

SEQ ID NO: 2485999 - RNA, 16 nt, Human
agcccuugaagauauc

SEQ ID NO: 2486000 - RNA, 18 nt, Human
agcccuuaucugugcuca

SEQ ID NO: 2486001 - RNA, 17 nt, Human
agcccuugagcucccca

SEQ ID NO: 2486002 - RNA, 15 nt, Human
agccuaauacaacau

SEQ ID NO: 2486003 - RNA, 18 nt, Human
agccuaagaugaagagga

SEQ ID NO: 2486004 - RNA, 15 nt, Human
agccuaaucccuggg

SEQ ID NO: 2486005 - RNA, 22 nt, Human
agccuaaucccugggcauugcu

SEQ ID NO: 2486006 - RNA, 14 nt, Human
agccuaggggucag

SEQ ID NO: 2486007 - RNA, 23 nt, Human
agccuaaucccugggcauugcuu

SEQ ID NO: 2486008 - RNA, 17 nt, Human
agccuaggugacagagu

SEQ ID NO: 2486009 - RNA, 15 nt, Human
agccuaggugacaga

SEQ ID NO: 2486010 - RNA, 20 nt, Human
agccuagugaaggcuucucu

SEQ ID NO: 2486011 - RNA, 14 nt, Human
agccuaguucaucc

SEQ ID NO: 2486012 - RNA, 15 nt, Human
agccuaguucaucca

SEQ ID NO: 2486013 - RNA, 17 nt, Human
agccuaguucauccaau

SEQ ID NO: 2486014 - RNA, 20 nt, Human
agccuaguucauccaauccu

SEQ ID NO: 2486015 - RNA, 23 nt, Human
agccuaguucauccaauccucac

SEQ ID NO: 2486016 - RNA, 23 nt, Human
agccuagugaaggcuucucucug

SEQ ID NO: 2486017 - RNA, 14 nt, Human
agccuagugaaggc

SEQ ID NO: 2486018 - RNA, 20 nt, Human
agccuaggggucagggacca

SEQ ID NO: 2486019 - RNA, 23 nt, Human
agccuaggggucagggaccaagg

SEQ ID NO: 2486020 - RNA, 15 nt, Human
agccucaaccuccug

SEQ ID NO: 2486021 - RNA, 17 nt, Human
agccuaucaaagaccuu

SEQ ID NO: 2486022 - RNA, 14 nt, Human
agccuauauuuaca

SEQ ID NO: 2486023 - RNA, 22 nt, Human
agccuaguucauccaauccuca

SEQ ID NO: 2486024 - RNA, 18 nt, Human
agccuauauuuacaguga

SEQ ID NO: 2486025 - RNA, 19 nt, Human
ugccauagucacauggccu

SEQ ID NO: 2486026 - RNA, 18 nt, Human
ugccauagucacauggcc

SEQ ID NO: 2486027 - RNA, 15 nt, Human
ugccauauucuguug

SEQ ID NO: 2486028 - RNA, 17 nt, Human
ugccauauucuguuggc

SEQ ID NO: 2486029 - RNA, 16 nt, Human
ugccauauucuguugg

SEQ ID NO: 2486030 - RNA, 23 nt, Human
ugccagucaccccggccaccugc

SEQ ID NO: 2486031 - RNA, 22 nt, Human
ugccagucaccccggccaccug

SEQ ID NO: 2486032 - RNA, 17 nt, Human
ugccagucccccugccc

SEQ ID NO: 2486033 - RNA, 20 nt, Human
ugccacuucacuccagccug

SEQ ID NO: 2486034 - RNA, 19 nt, Human
ugccagucccccugcccca

SEQ ID NO: 2486035 - RNA, 20 nt, Human
ugccagucaccccggccacc

SEQ ID NO: 2486036 - RNA, 18 nt, Human
ugccagucaccccggcca

SEQ ID NO: 2486037 - RNA, 16 nt, Human
ugccagucaccccggc

SEQ ID NO: 2486038 - RNA, 15 nt, Human
ugccagucaccccgg

SEQ ID NO: 2486039 - RNA, 16 nt, Human
ugccacuucccaggua

SEQ ID NO: 2486040 - RNA, 21 nt, Human
ugccacugccuucgcuucuug

SEQ ID NO: 2486041 - RNA, 19 nt, Human
ugccacugccuucgcuucu

SEQ ID NO: 2486042 - RNA, 22 nt, Human
ugccacugccuucgcuucuugc

SEQ ID NO: 2486043 - RNA, 12 nt, Human
ugccacacuuca

SEQ ID NO: 2486044 - RNA, 23 nt, Human
ugccacugccucuuccucccuca

SEQ ID NO: 2486045 - RNA, 23 nt, Human
agcgugguggacaugcacagcua

SEQ ID NO: 2486046 - RNA, 23 nt, Human
agcgugucuguauuuauguguga

SEQ ID NO: 2486047 - RNA, 21 nt, Human
agcuacucaagaggcugaggc

SEQ ID NO: 2486048 - RNA, 14 nt, Human
agcuacucagaagc

SEQ ID NO: 2486049 - RNA, 15 nt, Human
agcuacucagaagcc

SEQ ID NO: 2486050 - RNA, 18 nt, Human
agcuacucagaagccuga

SEQ ID NO: 2486051 - RNA, 19 nt, Human
agcuacucagaagccugag

SEQ ID NO: 2486052 - RNA, 20 nt, Human
agcuacucagaagccugagg

SEQ ID NO: 2486053 - RNA, 15 nt, Human
agcguggacaggugu

SEQ ID NO: 2486054 - RNA, 20 nt, Human
agcgugcuccagccuggcuc

SEQ ID NO: 2486055 - RNA, 19 nt, Human
agcgugcuccagccuggcu

SEQ ID NO: 2486056 - RNA, 17 nt, Human
agcgugcuuuaaaaaau

SEQ ID NO: 2486057 - RNA, 20 nt, Human
agcgugguggacaugcacag

SEQ ID NO: 2486058 - RNA, 17 nt, Human
agcgugagccacugcac

SEQ ID NO: 2486059 - RNA, 16 nt, Human
agcgugagccacugca

SEQ ID NO: 2486060 - RNA, 21 nt, Human
ugccauauucuguuggccagu

SEQ ID NO: 2486061 - RNA, 20 nt, Human
ugccauauucuguuggccag

SEQ ID NO: 2486062 - RNA, 19 nt, Human
ugccauauugcacaugucu

SEQ ID NO: 2486063 - RNA, 16 nt, Human
ugccauauugcacaug

SEQ ID NO: 2486064 - RNA, 15 nt, Human
ugccauauugcacau

SEQ ID NO: 2486065 - RNA, 15 nt, Human
agcggggacagcucc

SEQ ID NO: 2486066 - RNA, 17 nt, Human
agcggggacagcuccuu

SEQ ID NO: 2486067 - RNA, 16 nt, Human
agcggggacagcuccu

SEQ ID NO: 2486068 - RNA, 15 nt, Human
agcgugagccacugc

SEQ ID NO: 2486069 - RNA, 13 nt, Human
agcgggcgccugu

SEQ ID NO: 2486070 - RNA, 13 nt, Human
agcgugagccacu

SEQ ID NO: 2486071 - RNA, 19 nt, Human
ugcauuugaaaauuuugau

SEQ ID NO: 2486072 - RNA, 23 nt, Human
ugcauuugaaaauuuugauguuu

SEQ ID NO: 2486073 - RNA, 14 nt, Human
ugcauuucucuggg

SEQ ID NO: 2486074 - RNA, 14 nt, Human
ugcauuuccugaca

SEQ ID NO: 2486075 - RNA, 19 nt, Human
ugcauugaacacaaacugu

SEQ ID NO: 2486076 - RNA, 21 nt, Human
ugcauugaacacaaacuguaa

SEQ ID NO: 2486077 - RNA, 13 nt, Human
ugcauuuccugac

SEQ ID NO: 2486078 - RNA, 21 nt, Human
ugcauucuuuuaaaagacaag

SEQ ID NO: 2486079 - RNA, 16 nt, Human
ugcauucuuuuaaaag

SEQ ID NO: 2486080 - RNA, 22 nt, Human
ugcauucuuuuaaaagacaaga

SEQ ID NO: 2486081 - RNA, 13 nt, Human
ugcauugaacaca

SEQ ID NO: 2486082 - RNA, 14 nt, Human
ugcauugaacacaa

SEQ ID NO: 2486083 - RNA, 15 nt, Human
ugcauugaacacaaa

SEQ ID NO: 2486084 - RNA, 17 nt, Human
ugcauugaacacaaacu

SEQ ID NO: 2486085 - RNA, 18 nt, Human
ugcauugaacacaaacug

SEQ ID NO: 2486086 - RNA, 20 nt, Human
agcggcuggaauuggguggg

SEQ ID NO: 2486087 - RNA, 17 nt, Human
agcggcuggacuuggag

SEQ ID NO: 2486088 - RNA, 16 nt, Human
ugcauucuuucuguau

SEQ ID NO: 2486089 - RNA, 20 nt, Human
ugcauucuugguuggcuggc

SEQ ID NO: 2486090 - RNA, 21 nt, Human
agcggcugagucaugaucucc

SEQ ID NO: 2486091 - RNA, 19 nt, Human
ugccaauauguauuguaaa

SEQ ID NO: 2486092 - RNA, 16 nt, Human
ugccaauauguauugu

SEQ ID NO: 2486093 - RNA, 18 nt, Human
ugccaauauuaaaucugc

SEQ ID NO: 2486094 - RNA, 19 nt, Human
ugccacaaggacuuccugu

SEQ ID NO: 2486095 - RNA, 16 nt, Human
ugccacaaggacuucc

SEQ ID NO: 2486096 - RNA, 14 nt, Human
ugccacacaaacgu

SEQ ID NO: 2486097 - RNA, 22 nt, Human
ugccacacaaggauagaugcug

SEQ ID NO: 2486098 - RNA, 13 nt, Human
ugccacacagagu

SEQ ID NO: 2486099 - RNA, 20 nt, Human
ugccacacagaguggucuuu

SEQ ID NO: 2486100 - RNA, 19 nt, Human
ugccacaccaagcugugcc

SEQ ID NO: 2486101 - RNA, 23 nt, Human
ugccacacagaguggucuuucug

SEQ ID NO: 2486102 - RNA, 23 nt, Human
ugccacaccaagcugugccaccc

SEQ ID NO: 2486103 - RNA, 22 nt, Human
ugccacaccaagcugugccacc

SEQ ID NO: 2486104 - RNA, 21 nt, Human
ugccacaccaagcugugccac

SEQ ID NO: 2486105 - RNA, 20 nt, Human
ugccacaccaagcugugcca

SEQ ID NO: 2486106 - RNA, 13 nt, Human
ugccacacccucc

SEQ ID NO: 2486107 - RNA, 22 nt, Human
ugccacacccucccccgccacu

SEQ ID NO: 2486108 - RNA, 14 nt, Human
ugccacacccuccc

SEQ ID NO: 2486109 - RNA, 16 nt, Human
ugccacacgucugacc

SEQ ID NO: 2486110 - RNA, 15 nt, Human
ugccaauauguauug

SEQ ID NO: 2486111 - RNA, 13 nt, Human
ugcauuugagguc

SEQ ID NO: 2486112 - RNA, 22 nt, Human
agcgcccaguuggguggaugcc

SEQ ID NO: 2486113 - RNA, 14 nt, Human
agcgcccaguuggg

SEQ ID NO: 2486114 - RNA, 12 nt, Human
agcgccaggcug

SEQ ID NO: 2486115 - RNA, 21 nt, Human
agcgccaggcugaccacagca

SEQ ID NO: 2486116 - RNA, 20 nt, Human
agcgcccacuagacccacug

SEQ ID NO: 2486117 - RNA, 18 nt, Human
agcgccagccugucccau

SEQ ID NO: 2486118 - RNA, 18 nt, Human
agccugcggccugcugga

SEQ ID NO: 2486119 - RNA, 14 nt, Human
agccugcccuuguc

SEQ ID NO: 2486120 - RNA, 13 nt, Human
agccugcccuugu

SEQ ID NO: 2486121 - RNA, 23 nt, Human
agccugcccuugucugagaugcu

SEQ ID NO: 2486122 - RNA, 17 nt, Human
agccugcccuugucuga

SEQ ID NO: 2486123 - RNA, 13 nt, Human
agccugccuggag

SEQ ID NO: 2486124 - RNA, 21 nt, Human
agccugcgccaccgcccagag

SEQ ID NO: 2486125 - RNA, 14 nt, Human
agccugccuggagc

SEQ ID NO: 2486126 - RNA, 15 nt, Human
agccugccuggagcg

SEQ ID NO: 2486127 - RNA, 14 nt, Human
agccugccuggcag

SEQ ID NO: 2486128 - RNA, 22 nt, Human
agcgcgccacucgcuuccccca

SEQ ID NO: 2486129 - RNA, 12 nt, Human
agcgcgccacuc

SEQ ID NO: 2486130 - RNA, 19 nt, Human
agcgcgccacucgcuuccc

SEQ ID NO: 2486131 - RNA, 20 nt, Human
agcgcgccacucgcuucccc

SEQ ID NO: 2486132 - RNA, 21 nt, Human
agcgcuccugccgcagagcug

SEQ ID NO: 2486133 - RNA, 20 nt, Human
agcgcuccugccgcagagcu

SEQ ID NO: 2486134 - RNA, 17 nt, Human
agcgcuccugccgcaga

SEQ ID NO: 2486135 - RNA, 18 nt, Human
agcggccccucccacaca

SEQ ID NO: 2486136 - RNA, 14 nt, Human
agcggccccuccca

SEQ ID NO: 2486137 - RNA, 13 nt, Human
agcggccccuccc

SEQ ID NO: 2486138 - RNA, 12 nt, Human
agcggccccucc

SEQ ID NO: 2486139 - RNA, 22 nt, Human
agcgcuccugccgcagagcugg

SEQ ID NO: 2486140 - RNA, 17 nt, Human
agcgcugccgcacccca

SEQ ID NO: 2486141 - RNA, 18 nt, Human
agcgcugccgcaccccag

SEQ ID NO: 2486142 - RNA, 11 nt, Human
agcggccggcc

SEQ ID NO: 2486143 - RNA, 18 nt, Human
agcggccggccagccccu

SEQ ID NO: 2486144 - RNA, 23 nt, Human
agcggccccuugacucuggggac

SEQ ID NO: 2486145 - RNA, 20 nt, Human
agcggccccuugacucuggg

SEQ ID NO: 2486146 - RNA, 22 nt, Human
agcggccggccagccccuggcc

SEQ ID NO: 2486147 - RNA, 16 nt, Human
agcggcugagucauga

SEQ ID NO: 2486148 - RNA, 19 nt, Human
agcggcugagucaugaucu

SEQ ID NO: 2486149 - RNA, 16 nt, Human
ugccccgucccccucu

SEQ ID NO: 2486150 - RNA, 18 nt, Human
ugccccgucccccucugg

SEQ ID NO: 2486151 - RNA, 16 nt, Human
ugccccgugcagacug

SEQ ID NO: 2486152 - RNA, 18 nt, Human
ugccccgugcagacugga

SEQ ID NO: 2486153 - RNA, 22 nt, Human
ugccccguccacggcucuaggu

SEQ ID NO: 2486154 - RNA, 20 nt, Human
ugccccgucaccaucucagg

SEQ ID NO: 2486155 - RNA, 21 nt, Human
ugccccgucaccaucucaggc

SEQ ID NO: 2486156 - RNA, 22 nt, Human
ugcccccugguggacaguccug

SEQ ID NO: 2486157 - RNA, 12 nt, Human
ugcccccuucuc

SEQ ID NO: 2486158 - RNA, 13 nt, Human
ugcccccuucucc

SEQ ID NO: 2486159 - RNA, 15 nt, Human
ugcccccuucuccca

SEQ ID NO: 2486160 - RNA, 16 nt, Human
ugcccccuucucccac

SEQ ID NO: 2486161 - RNA, 17 nt, Human
ugcccccuucucccaca

SEQ ID NO: 2486162 - RNA, 18 nt, Human
ugcccccuucucccacac

SEQ ID NO: 2486163 - RNA, 19 nt, Human
ugcccccuucucccacacu

SEQ ID NO: 2486164 - RNA, 20 nt, Human
ugcccccuucucccacacug

SEQ ID NO: 2486165 - RNA, 22 nt, Human
ugcccccuucucccacacugcu

SEQ ID NO: 2486166 - RNA, 17 nt, Human
ugccccgucaccaucuc

SEQ ID NO: 2486167 - RNA, 18 nt, Human
ugccccgucaccaucuca

SEQ ID NO: 2486168 - RNA, 19 nt, Human
ugccccgucaccaucucag

SEQ ID NO: 2486169 - RNA, 16 nt, Human
ugccccuagcuuagag

SEQ ID NO: 2486170 - RNA, 17 nt, Human
ugcccuagagcacacug

SEQ ID NO: 2486171 - RNA, 23 nt, Human
ugccccuagcuuagagccucccu

SEQ ID NO: 2486172 - RNA, 21 nt, Human
ugccccgugcagacuggaggg

SEQ ID NO: 2486173 - RNA, 23 nt, Human
ugcccuagagcacacuguagcau

SEQ ID NO: 2486174 - RNA, 13 nt, Human
ugcccuagcucca

SEQ ID NO: 2486175 - RNA, 14 nt, Human
ugcccuagcuccac

SEQ ID NO: 2486176 - RNA, 14 nt, Human
ugcccuaggcuccg

SEQ ID NO: 2486177 - RNA, 23 nt, Human
ugcccucauggccccucugaccu

SEQ ID NO: 2486178 - RNA, 19 nt, Human
ugcccucauggccccucug

SEQ ID NO: 2486179 - RNA, 17 nt, Human
ugcccucauggccccuc

SEQ ID NO: 2486180 - RNA, 12 nt, Human
ugcccucaggga

SEQ ID NO: 2486181 - RNA, 12 nt, Human
ugcccucagggg

SEQ ID NO: 2486182 - RNA, 16 nt, Human
ugcccucaaucccagc

SEQ ID NO: 2486183 - RNA, 18 nt, Human
ugcccuaggcuccgucag

SEQ ID NO: 2486184 - RNA, 14 nt, Human
ugcccccagggcac

SEQ ID NO: 2486185 - RNA, 16 nt, Human
ugcccccagcuggccc

SEQ ID NO: 2486186 - RNA, 19 nt, Human
ugcccccaggacugggcca

SEQ ID NO: 2486187 - RNA, 17 nt, Human
ugcccccaggacugggc

SEQ ID NO: 2486188 - RNA, 16 nt, Human
ugcccccaggacuggg

SEQ ID NO: 2486189 - RNA, 15 nt, Human
ugcccccaggacugg

SEQ ID NO: 2486190 - RNA, 14 nt, Human
ugcccccaggacug

SEQ ID NO: 2486191 - RNA, 13 nt, Human
ugcccccaggacu

SEQ ID NO: 2486192 - RNA, 12 nt, Human
ugcccccaggac

SEQ ID NO: 2486193 - RNA, 12 nt, Human
ugccccccagcc

SEQ ID NO: 2486194 - RNA, 14 nt, Human
ugccccccacccca

SEQ ID NO: 2486195 - RNA, 15 nt, Human
ugccccccaccccag

SEQ ID NO: 2486196 - RNA, 16 nt, Human
ugccccccaccccagc

SEQ ID NO: 2486197 - RNA, 17 nt, Human
ugccccccaccccagcc

SEQ ID NO: 2486198 - RNA, 15 nt, Human
ugcccccagggcacu

SEQ ID NO: 2486199 - RNA, 12 nt, Human
ugccccccaccc

SEQ ID NO: 2486200 - RNA, 13 nt, Human
ugccccccacccc

SEQ ID NO: 2486201 - RNA, 14 nt, Human
ugccccccauccug

SEQ ID NO: 2486202 - RNA, 13 nt, Human
ugccccccauccu

SEQ ID NO: 2486203 - RNA, 16 nt, Human
ugccccccauccuggc

SEQ ID NO: 2486204 - RNA, 20 nt, Human
ugccccccagccucuggcau

SEQ ID NO: 2486205 - RNA, 12 nt, Human
ugccccccaucc

SEQ ID NO: 2486206 - RNA, 19 nt, Human
ugccccccagccucuggca

SEQ ID NO: 2486207 - RNA, 15 nt, Human
ugccccccagccucu

SEQ ID NO: 2486208 - RNA, 14 nt, Human
ugccccccagccuc

SEQ ID NO: 2486209 - RNA, 18 nt, Human
ugccccccaccccagccu

SEQ ID NO: 2486210 - RNA, 20 nt, Human
ugccccccaccccagccuaa

SEQ ID NO: 2486211 - RNA, 14 nt, Human
ugcccccugcuggc

SEQ ID NO: 2486212 - RNA, 13 nt, Human
ugcccccugcugg

SEQ ID NO: 2486213 - RNA, 22 nt, Human
ugcccccugcuggcucuucugc

SEQ ID NO: 2486214 - RNA, 16 nt, Human
ugcccccugcuggcuc

SEQ ID NO: 2486215 - RNA, 12 nt, Human
ugcccccuggug

SEQ ID NO: 2486216 - RNA, 13 nt, Human
ugcccccuggugg

SEQ ID NO: 2486217 - RNA, 21 nt, Human
ugcccccugguggacaguccu

SEQ ID NO: 2486218 - RNA, 22 nt, Human
ugcccaggccccugccacccug

SEQ ID NO: 2486219 - RNA, 20 nt, Human
ugcccaggccccugccaccc

SEQ ID NO: 2486220 - RNA, 21 nt, Human
ugcccaauuggaggaaagcaa

SEQ ID NO: 2486221 - RNA, 16 nt, Human
ugcccaauuggaggaa

SEQ ID NO: 2486222 - RNA, 14 nt, Human
ugcccaggccccug

SEQ ID NO: 2486223 - RNA, 12 nt, Human
ugcccaggcccc

SEQ ID NO: 2486224 - RNA, 20 nt, Human
ugcccccagccccgggguga

SEQ ID NO: 2486225 - RNA, 16 nt, Human
ugcccccagccccggg

SEQ ID NO: 2486226 - RNA, 14 nt, Human
ugcccccagccccg

SEQ ID NO: 2486227 - RNA, 14 nt, Human
ugcccccagcuggc

SEQ ID NO: 2486228 - RNA, 13 nt, Human
ugcccccagcugg

SEQ ID NO: 2486229 - RNA, 11 nt, Human
ugcccccagga

SEQ ID NO: 2486230 - RNA, 23 nt, Human
ugcccccaccccggggacccugu

SEQ ID NO: 2486231 - RNA, 17 nt, Human
ugcccccacugaccaga

SEQ ID NO: 2486232 - RNA, 22 nt, Human
ugcccccaccccggggacccug

SEQ ID NO: 2486233 - RNA, 15 nt, Human
ugcccaggcccagac

SEQ ID NO: 2486234 - RNA, 17 nt, Human
ugcccaggccugccugu

SEQ ID NO: 2486235 - RNA, 15 nt, Human
ugcccaggccugccu

SEQ ID NO: 2486236 - RNA, 14 nt, Human
ugcccaggcccaga

SEQ ID NO: 2486237 - RNA, 11 nt, Human
ugcccaggccc

SEQ ID NO: 2486238 - RNA, 20 nt, Human
ugcccaggcaggucuugaac

SEQ ID NO: 2486239 - RNA, 17 nt, Human
ugcccaggcaggucuug

SEQ ID NO: 2486240 - RNA, 16 nt, Human
ugcccaggcaggucuu

SEQ ID NO: 2486241 - RNA, 15 nt, Human
ugcccaggcaggucu

SEQ ID NO: 2486242 - RNA, 14 nt, Human
ugcccacaggauca

SEQ ID NO: 2486243 - RNA, 22 nt, Human
ugcccaagccagaggcuggguu

SEQ ID NO: 2486244 - RNA, 14 nt, Human
ugcccaagggaaag

SEQ ID NO: 2486245 - RNA, 22 nt, Human
ugcccaauaugcaguucugcag

SEQ ID NO: 2486246 - RNA, 22 nt, Human
ugcccaaguuguggugcugaca

SEQ ID NO: 2486247 - RNA, 14 nt, Human
ugcccaacuguuau

SEQ ID NO: 2486248 - RNA, 20 nt, Human
ugcccaauaugcaguucugc

SEQ ID NO: 2486249 - RNA, 15 nt, Human
ugcccaauuggagga

SEQ ID NO: 2486250 - RNA, 16 nt, Human
ugcccacacaccccaa

SEQ ID NO: 2486251 - RNA, 21 nt, Human
ugccauguuggccaggcuggu

SEQ ID NO: 2486252 - RNA, 20 nt, Human
ugccauguuggccaggcugg

SEQ ID NO: 2486253 - RNA, 16 nt, Human
ugccauucacuucaua

SEQ ID NO: 2486254 - RNA, 16 nt, Human
ugccauuaucccugaa

SEQ ID NO: 2486255 - RNA, 21 nt, Human
agcuauuuuuacuagaacaca

SEQ ID NO: 2486256 - RNA, 24 nt, Human
ugcccaaccugcucuccucuugcc

SEQ ID NO: 2486257 - RNA, 23 nt, Human
ugcccaaccugcucuccucuugc

SEQ ID NO: 2486258 - RNA, 23 nt, Human
ugcccaagccagaggcuggguuc

SEQ ID NO: 2486259 - RNA, 19 nt, Human
ugcccaacccuucccucac

SEQ ID NO: 2486260 - RNA, 23 nt, Human
ugccauuaucccugaaucccccu

SEQ ID NO: 2486261 - RNA, 18 nt, Human
ugccauucccugccuggg

SEQ ID NO: 2486262 - RNA, 20 nt, Human
ugcccaacccuucccucacc

SEQ ID NO: 2486263 - RNA, 22 nt, Human
ugcccaacccuucccucaccuu

SEQ ID NO: 2486264 - RNA, 22 nt, Human
ugcccaaccugcucuccucuug

SEQ ID NO: 2486265 - RNA, 18 nt, Human
ugcccaaccugcucuccu

SEQ ID NO: 2486266 - RNA, 19 nt, Human
ugccauguuggccaggcug

SEQ ID NO: 2486267 - RNA, 18 nt, Human
ugccauguuggccaggcu

SEQ ID NO: 2486268 - RNA, 17 nt, Human
agcucagggccuggcuc

SEQ ID NO: 2486269 - RNA, 17 nt, Human
ugccauguuggccaggc

SEQ ID NO: 2486270 - RNA, 16 nt, Human
agcucagggccuggcu

SEQ ID NO: 2486271 - RNA, 15 nt, Human
agcucagggccuggc

SEQ ID NO: 2486272 - RNA, 20 nt, Human
agcuauuuccauuccagaau

SEQ ID NO: 2486273 - RNA, 10 nt, Human
agcuauuuuu

SEQ ID NO: 2486274 - RNA, 16 nt, Human
agcuauuuuuacuaga

SEQ ID NO: 2486275 - RNA, 22 nt, Human
agcuauuuuuauuuguuugugc

SEQ ID NO: 2486276 - RNA, 18 nt, Human
agcuauaaaaugaauaca

SEQ ID NO: 2486277 - RNA, 12 nt, Human
agcuaguuuucu

SEQ ID NO: 2486278 - RNA, 15 nt, Human
agcuauaccugugcc

SEQ ID NO: 2486279 - RNA, 16 nt, Human
agcuauaccugugccu

SEQ ID NO: 2486280 - RNA, 23 nt, Human
agcuauaaauuccucuuugcuuu

SEQ ID NO: 2486281 - RNA, 16 nt, Human
agcuacuuccuccucc

SEQ ID NO: 2486282 - RNA, 15 nt, Human
agcuacuuccuccuc

SEQ ID NO: 2486283 - RNA, 23 nt, Human
agcuacugugugugugaaugaac

SEQ ID NO: 2486284 - RNA, 22 nt, Human
agcuacuugggaagcugaggcg

SEQ ID NO: 2486285 - RNA, 21 nt, Human
agcuacuuccuccuccccacu

SEQ ID NO: 2486286 - RNA, 16 nt, Human
agcuacugauuuuugu

SEQ ID NO: 2486287 - RNA, 18 nt, Human
agcuacugcggaaaagga

SEQ ID NO: 2486288 - RNA, 19 nt, Human
agcuacugcggaaaaggaa

SEQ ID NO: 2486289 - RNA, 15 nt, Human
agcuacugugugugu

SEQ ID NO: 2486290 - RNA, 19 nt, Human
agcuacugugugugugaau

SEQ ID NO: 2486291 - RNA, 20 nt, Human
agcuacugugugugugaaug

SEQ ID NO: 2486292 - RNA, 21 nt, Human
agcuacucagaagccugaggc

SEQ ID NO: 2486293 - RNA, 22 nt, Human
agcuacucaagaggcugaggca

SEQ ID NO: 2486294 - RNA, 13 nt, Human
agcuacucaggag

SEQ ID NO: 2486295 - RNA, 15 nt, Human
agcuacucaggaggc

SEQ ID NO: 2486296 - RNA, 17 nt, Human
agcuacucaggaggcug

SEQ ID NO: 2486297 - RNA, 18 nt, Human
agcuacucaggaggcuga

SEQ ID NO: 2486298 - RNA, 23 nt, Human
agcuacugauuuccuuuggagcu

SEQ ID NO: 2486299 - RNA, 20 nt, Human
agcuacugauuuccuuugga

SEQ ID NO: 2486300 - RNA, 17 nt, Human
agcuauggugagaugca

SEQ ID NO: 2486301 - RNA, 22 nt, Human
agcuaugggagccccagggucu

SEQ ID NO: 2486302 - RNA, 18 nt, Human
agcuaugggagccccagg

SEQ ID NO: 2486303 - RNA, 19 nt, Human
agcuaugggagccccaggg

SEQ ID NO: 2486304 - RNA, 23 nt, Human
agcuaugcugguaggcuccugcc

SEQ ID NO: 2486305 - RNA, 17 nt, Human
agcuaugggagccccag

SEQ ID NO: 2486306 - RNA, 24 nt, Human
agcuaucuggucaaccuccuggac

SEQ ID NO: 2486307 - RNA, 14 nt, Human
agcuauauccaugu

SEQ ID NO: 2486308 - RNA, 15 nt, Human
agcuauauccaugua

SEQ ID NO: 2486309 - RNA, 19 nt, Human
agcuauagacccgaggaaa

SEQ ID NO: 2486310 - RNA, 17 nt, Human
agcuauaccugugccuc

SEQ ID NO: 2486311 - RNA, 17 nt, Human
agcuauagacccgagga

SEQ ID NO: 2486312 - RNA, 18 nt, Human
agcuauagacccgaggaa

SEQ ID NO: 2486313 - RNA, 19 nt, Human
agcuauggugucauaggcu

SEQ ID NO: 2486314 - RNA, 14 nt, Human
agcuauuucaucua

SEQ ID NO: 2486315 - RNA, 17 nt, Human
agcuauuucaucuauuu

SEQ ID NO: 2486316 - RNA, 18 nt, Human
agcuauuuccauuccaga

SEQ ID NO: 2486317 - RNA, 20 nt, Human
agcuauggugagaugcagcu

SEQ ID NO: 2486318 - RNA, 21 nt, Human
agcuauuucaucuauuuuugg

SEQ ID NO: 2486319 - RNA, 13 nt, Human
agcuauuucaucu

SEQ ID NO: 2486320 - RNA, 17 nt, Human
agcuauugauauaaaua

SEQ ID NO: 2486321 - RNA, 23 nt, Human
agcuauugauauaaauaaaacau

SEQ ID NO: 2486322 - RNA, 20 nt, Human
agcugccuccccucuccuuc

SEQ ID NO: 2486323 - RNA, 14 nt, Human
agcugccucuucug

SEQ ID NO: 2486324 - RNA, 16 nt, Human
agcugccucuucugug

SEQ ID NO: 2486325 - RNA, 23 nt, Human
agcugccugcuuuucacugcugc

SEQ ID NO: 2486326 - RNA, 12 nt, Human
agcugccugcuu

SEQ ID NO: 2486327 - RNA, 23 nt, Human
agcugccuccccucuccuuccug

SEQ ID NO: 2486328 - RNA, 20 nt, Human
agcugccucucgguggccag

SEQ ID NO: 2486329 - RNA, 22 nt, Human
ugccucugacacacagcucugu

SEQ ID NO: 2486330 - RNA, 19 nt, Human
agcugccugggaucccuca

SEQ ID NO: 2486331 - RNA, 13 nt, Human
agcugccugggau

SEQ ID NO: 2486332 - RNA, 21 nt, Human
agcugccugggaucccucauc

SEQ ID NO: 2486333 - RNA, 15 nt, Human
agcugccugguauau

SEQ ID NO: 2486334 - RNA, 13 nt, Human
agcuggaaaagua

SEQ ID NO: 2486335 - RNA, 12 nt, Human
agcuggaagcac

SEQ ID NO: 2486336 - RNA, 16 nt, Human
agcuggacuacccacg

SEQ ID NO: 2486337 - RNA, 15 nt, Human
agcuggacuacccac

SEQ ID NO: 2486338 - RNA, 17 nt, Human
agcuggagaaauauggu

SEQ ID NO: 2486339 - RNA, 15 nt, Human
agcuggagaagaccc

SEQ ID NO: 2486340 - RNA, 12 nt, Human
agcugggaggaa

SEQ ID NO: 2486341 - RNA, 13 nt, Human
agcugggaggaaa

SEQ ID NO: 2486342 - RNA, 14 nt, Human
agcugggaggaaaa

SEQ ID NO: 2486343 - RNA, 15 nt, Human
agcugggaggaaaag

SEQ ID NO: 2486344 - RNA, 13 nt, Human
agcugggaggcaa

SEQ ID NO: 2486345 - RNA, 18 nt, Human
agcugggaggaaaagaaa

SEQ ID NO: 2486346 - RNA, 19 nt, Human
agcugggacuacaggugug

SEQ ID NO: 2486347 - RNA, 17 nt, Human
agcugggacuacaggug

SEQ ID NO: 2486348 - RNA, 23 nt, Human
agcugggaugauuggagggggga

SEQ ID NO: 2486349 - RNA, 18 nt, Human
agcugggauuacaggcuc

SEQ ID NO: 2486350 - RNA, 21 nt, Human
agcugggauuacaggcuccug

SEQ ID NO: 2486351 - RNA, 20 nt, Human
agcugggaggcauggcccug

SEQ ID NO: 2486352 - RNA, 19 nt, Human
agcugggaggcauggcccu

SEQ ID NO: 2486353 - RNA, 16 nt, Human
agcugggaggcauggc

SEQ ID NO: 2486354 - RNA, 14 nt, Human
agcugggaggcaug

SEQ ID NO: 2486355 - RNA, 23 nt, Human
agcugggaggcaagaggggugga

SEQ ID NO: 2486356 - RNA, 19 nt, Human
agcugggaggcaagagggg

SEQ ID NO: 2486357 - RNA, 17 nt, Human
agcugggaggcaagagg

SEQ ID NO: 2486358 - RNA, 16 nt, Human
agcugggaggcaagag

SEQ ID NO: 2486359 - RNA, 22 nt, Human
agcugggaucacauguggacuu

SEQ ID NO: 2486360 - RNA, 22 nt, Human
agcugggaggcauggcccuggg

SEQ ID NO: 2486361 - RNA, 21 nt, Human
agcugggaggcauggcccugg

SEQ ID NO: 2486362 - RNA, 22 nt, Human
agcugggcucugccacccuacc

SEQ ID NO: 2486363 - RNA, 14 nt, Human
agcugggcucugcc

SEQ ID NO: 2486364 - RNA, 15 nt, Human
agcugggcucugcaa

SEQ ID NO: 2486365 - RNA, 22 nt, Human
agcugggccccagcccacccuc

SEQ ID NO: 2486366 - RNA, 18 nt, Human
agcugggccccagcccac

SEQ ID NO: 2486367 - RNA, 17 nt, Human
agcugggccccagccca

SEQ ID NO: 2486368 - RNA, 20 nt, Human
agcugggccccagcccaccc

SEQ ID NO: 2486369 - RNA, 11 nt, Human
agcugggcugu

SEQ ID NO: 2486370 - RNA, 15 nt, Human
agcugggcucugcca

SEQ ID NO: 2486371 - RNA, 14 nt, Human
agcuggggaccugg

SEQ ID NO: 2486372 - RNA, 15 nt, Human
agcuggggaucccuc

SEQ ID NO: 2486373 - RNA, 22 nt, Human
agcuggggaucccuccccccca

SEQ ID NO: 2486374 - RNA, 17 nt, Human
agcuggggccaggcugg

SEQ ID NO: 2486375 - RNA, 22 nt, Human
agcugggauuacaggcuccugc

SEQ ID NO: 2486376 - RNA, 23 nt, Human
agcugggauuacaggcuccugcc

SEQ ID NO: 2486377 - RNA, 14 nt, Human
agcugggcagguug

SEQ ID NO: 2486378 - RNA, 16 nt, Human
agcugggccccagccc

SEQ ID NO: 2486379 - RNA, 15 nt, Human
agcugggccccagcc

SEQ ID NO: 2486380 - RNA, 14 nt, Human
agcugggccccagc

SEQ ID NO: 2486381 - RNA, 13 nt, Human
agcugggccccag

SEQ ID NO: 2486382 - RNA, 21 nt, Human
agcugggcccaacccugucug

SEQ ID NO: 2486383 - RNA, 20 nt, Human
agcugggcccaacccugucu

SEQ ID NO: 2486384 - RNA, 15 nt, Human
agcugggcccaaccc

SEQ ID NO: 2486385 - RNA, 12 nt, Human
agcugggcccaa

SEQ ID NO: 2486386 - RNA, 18 nt, Human
agcugggcagaaggccaa

SEQ ID NO: 2486387 - RNA, 16 nt, Human
agcugggcagaaggcc

SEQ ID NO: 2486388 - RNA, 17 nt, Human
agcugggauguuucugu

SEQ ID NO: 2486389 - RNA, 17 nt, Human
ugccuguucagcuccag

SEQ ID NO: 2486390 - RNA, 18 nt, Human
ugccuuaccuccugccca

SEQ ID NO: 2486391 - RNA, 19 nt, Human
ugccuuaccuccugcccag

SEQ ID NO: 2486392 - RNA, 20 nt, Human
ugccuuaccuccugcccagg

SEQ ID NO: 2486393 - RNA, 21 nt, Human
ugccuuaccuccugcccagga

SEQ ID NO: 2486394 - RNA, 16 nt, Human
ugccuguucagcucca

SEQ ID NO: 2486395 - RNA, 15 nt, Human
ugccuguucagcucc

SEQ ID NO: 2486396 - RNA, 11 nt, Human
ugccuguucag

SEQ ID NO: 2486397 - RNA, 20 nt, Human
ugccuguuauaacucugcac

SEQ ID NO: 2486398 - RNA, 19 nt, Human
ugccuguuauaacucugca

SEQ ID NO: 2486399 - RNA, 18 nt, Human
ugccuguuauaacucugc

SEQ ID NO: 2486400 - RNA, 14 nt, Human
ugccugugucuucu

SEQ ID NO: 2486401 - RNA, 21 nt, Human
ugccugugugacaucaguggc

SEQ ID NO: 2486402 - RNA, 17 nt, Human
ugccuuagaaccuuucu

SEQ ID NO: 2486403 - RNA, 14 nt, Human
ugccuuagaaccuu

SEQ ID NO: 2486404 - RNA, 15 nt, Human
ugccuuacucuucuu

SEQ ID NO: 2486405 - RNA, 18 nt, Human
ugccuuacucuucuugaa

SEQ ID NO: 2486406 - RNA, 19 nt, Human
ugccuuacucuucuugaaa

SEQ ID NO: 2486407 - RNA, 21 nt, Human
ugccuuagaaccuuucuuaca

SEQ ID NO: 2486408 - RNA, 19 nt, Human
ugccuugugaaggaauuau

SEQ ID NO: 2486409 - RNA, 19 nt, Human
ugccuuguguacaguuauu

SEQ ID NO: 2486410 - RNA, 15 nt, Human
ugccuuagagccagg

SEQ ID NO: 2486411 - RNA, 23 nt, Human
ugccuuaccuccugcccaggaga

SEQ ID NO: 2486412 - RNA, 20 nt, Human
agcuggggccaggcuggguc

SEQ ID NO: 2486413 - RNA, 15 nt, Human
agcuggggaugucuc

SEQ ID NO: 2486414 - RNA, 20 nt, Human
agcuggggcguggggagggc

SEQ ID NO: 2486415 - RNA, 18 nt, Human
agcuggggcguggggagg

SEQ ID NO: 2486416 - RNA, 16 nt, Human
agcuggggcgugggga

SEQ ID NO: 2486417 - RNA, 20 nt, Human
agcuggggaagcuucuuaaa

SEQ ID NO: 2486418 - RNA, 20 nt, Human
agcugggggugggccaggcu

SEQ ID NO: 2486419 - RNA, 21 nt, Human
agcugggggugggccaggcug

SEQ ID NO: 2486420 - RNA, 18 nt, Human
agcugggggugggccagg

SEQ ID NO: 2486421 - RNA, 19 nt, Human
agcugggggugggccaggc

SEQ ID NO: 2486422 - RNA, 17 nt, Human
agcugggggugggccag

SEQ ID NO: 2486423 - RNA, 20 nt, Human
agcugggggccaugagcucc

SEQ ID NO: 2486424 - RNA, 16 nt, Human
agcugggggccaugag

SEQ ID NO: 2486425 - RNA, 17 nt, Human
agcuggggcugagggau

SEQ ID NO: 2486426 - RNA, 18 nt, Human
agcugggggccaugagcu

SEQ ID NO: 2486427 - RNA, 19 nt, Human
agcugugagacagugggaa

SEQ ID NO: 2486428 - RNA, 18 nt, Human
agcugugagacaguggga

SEQ ID NO: 2486429 - RNA, 18 nt, Human
agcugugacuucuccagg

SEQ ID NO: 2486430 - RNA, 17 nt, Human
agcugugaacauggacu

SEQ ID NO: 2486431 - RNA, 17 nt, Human
agcugugaccucucccc

SEQ ID NO: 2486432 - RNA, 10 nt, Human
agcugugcag

SEQ ID NO: 2486433 - RNA, 12 nt, Human
agcugugcaggu

SEQ ID NO: 2486434 - RNA, 18 nt, Human
agcugugcagguggggag

SEQ ID NO: 2486435 - RNA, 22 nt, Human
ugccuguguccaugcgcucagg

SEQ ID NO: 2486436 - RNA, 17 nt, Human
agcugugagccuuggcu

SEQ ID NO: 2486437 - RNA, 16 nt, Human
agcugugagccuuggc

SEQ ID NO: 2486438 - RNA, 15 nt, Human
agcugugagccuugg

SEQ ID NO: 2486439 - RNA, 21 nt, Human
agcugugagacagugggaaau

SEQ ID NO: 2486440 - RNA, 18 nt, Human
agcugugagccuuggcug

SEQ ID NO: 2486441 - RNA, 20 nt, Human
ugccuuuuuucacggaaguu

SEQ ID NO: 2486442 - RNA, 13 nt, Human
ugcgaaaggauga

SEQ ID NO: 2486443 - RNA, 21 nt, Human
ugccuuuauuguguuugucau

SEQ ID NO: 2486444 - RNA, 20 nt, Human
ugccuuuauuguguuuguca

SEQ ID NO: 2486445 - RNA, 14 nt, Human
ugccuuuaaaucug

SEQ ID NO: 2486446 - RNA, 18 nt, Human
ugccuuuaaaguaugaau

SEQ ID NO: 2486447 - RNA, 17 nt, Human
ugccuuuaaaguaugaa

SEQ ID NO: 2486448 - RNA, 16 nt, Human
ugccuuuaaaguauga

SEQ ID NO: 2486449 - RNA, 14 nt, Human
ugccuuuauugugu

SEQ ID NO: 2486450 - RNA, 18 nt, Human
ugccuuuaaaucugugau

SEQ ID NO: 2486451 - RNA, 15 nt, Human
ugccuuuaaaucugu

SEQ ID NO: 2486452 - RNA, 19 nt, Human
ugccuuuaaaucugugaug

SEQ ID NO: 2486453 - RNA, 17 nt, Human
ugcggacagccacggcc

SEQ ID NO: 2486454 - RNA, 18 nt, Human
ugcggacagccacggcca

SEQ ID NO: 2486455 - RNA, 21 nt, Human
ugcgacuuucugccuggagug

SEQ ID NO: 2486456 - RNA, 18 nt, Human
ugcgacuuucugccugga

SEQ ID NO: 2486457 - RNA, 17 nt, Human
ugcgacuuucugccugg

SEQ ID NO: 2486458 - RNA, 16 nt, Human
ugcgacuuucugccug

SEQ ID NO: 2486459 - RNA, 15 nt, Human
ugcgacuuucugccu

SEQ ID NO: 2486460 - RNA, 19 nt, Human
ugcgaaaggaugaaaguga

SEQ ID NO: 2486461 - RNA, 21 nt, Human
ugccuuuuuucacggaaguuu

SEQ ID NO: 2486462 - RNA, 14 nt, Human
ugccuuuuuugauc

SEQ ID NO: 2486463 - RNA, 16 nt, Human
ugcgaaggggcccugg

SEQ ID NO: 2486464 - RNA, 21 nt, Human
ugcgaaggggcccugguccuu

SEQ ID NO: 2486465 - RNA, 18 nt, Human
ugcgaaggggcccugguc

SEQ ID NO: 2486466 - RNA, 22 nt, Human
ugcgaaugguuccauucucucu

SEQ ID NO: 2486467 - RNA, 20 nt, Human
ugcgaccccaucugcccagg

SEQ ID NO: 2486468 - RNA, 19 nt, Human
ugcgaccccaucugcccag

SEQ ID NO: 2486469 - RNA, 18 nt, Human
ugcgaccccaucugccca

SEQ ID NO: 2486470 - RNA, 15 nt, Human
ugcgaccccaucugc

SEQ ID NO: 2486471 - RNA, 14 nt, Human
ugcgaccccaucug

SEQ ID NO: 2486472 - RNA, 12 nt, Human
agcucugcuccu

SEQ ID NO: 2486473 - RNA, 17 nt, Human
agcucugccgcaauggc

SEQ ID NO: 2486474 - RNA, 20 nt, Human
agcucugguccauagagagc

SEQ ID NO: 2486475 - RNA, 22 nt, Human
agcucugcuccucuccccagca

SEQ ID NO: 2486476 - RNA, 17 nt, Human
agcucucggaacugcau

SEQ ID NO: 2486477 - RNA, 18 nt, Human
agcucucggaacugcaug

SEQ ID NO: 2486478 - RNA, 20 nt, Human
agcucucggaacugcaugcu

SEQ ID NO: 2486479 - RNA, 22 nt, Human
agcucucggaacugcaugcugc

SEQ ID NO: 2486480 - RNA, 23 nt, Human
agcucucggaacugcaugcugcu

SEQ ID NO: 2486481 - RNA, 16 nt, Human
agcucucuccucccuu

SEQ ID NO: 2486482 - RNA, 18 nt, Human
agcucuccggucucucuc

SEQ ID NO: 2486483 - RNA, 19 nt, Human
agcucucccucuggcccug

SEQ ID NO: 2486484 - RNA, 20 nt, Human
agcucucccucuggcccugc

SEQ ID NO: 2486485 - RNA, 22 nt, Human
agcucucccucuggcccugccu

SEQ ID NO: 2486486 - RNA, 23 nt, Human
agcucucccucuggcccugccuu

SEQ ID NO: 2486487 - RNA, 19 nt, Human
agcucuccagucaggaggc

SEQ ID NO: 2486488 - RNA, 11 nt, Human
agcucucccuc

SEQ ID NO: 2486489 - RNA, 13 nt, Human
agcucucccucug

SEQ ID NO: 2486490 - RNA, 14 nt, Human
agcucucccucugg

SEQ ID NO: 2486491 - RNA, 15 nt, Human
agcucucccucuggc

SEQ ID NO: 2486492 - RNA, 16 nt, Human
agcucucccucuggcc

SEQ ID NO: 2486493 - RNA, 17 nt, Human
agcucucccucuggccc

SEQ ID NO: 2486494 - RNA, 18 nt, Human
agcucucccucuggcccu

SEQ ID NO: 2486495 - RNA, 20 nt, Human
ugcccuccaagaccuucucc

SEQ ID NO: 2486496 - RNA, 19 nt, Human
ugcccuccaagaccuucuc

SEQ ID NO: 2486497 - RNA, 22 nt, Human
ugcccuccaagaccuucuccuu

SEQ ID NO: 2486498 - RNA, 21 nt, Human
ugcccucauggccccucugac

SEQ ID NO: 2486499 - RNA, 18 nt, Human
ugcccucauuuuauguca

SEQ ID NO: 2486500 - RNA, 18 nt, Human
ugcccuccacagccgcag

SEQ ID NO: 2486501 - RNA, 21 nt, Human
ugcccuccacagccgcagccu

SEQ ID NO: 2486502 - RNA, 22 nt, Human
agcucuauuaagauuuccaagu

SEQ ID NO: 2486503 - RNA, 20 nt, Human
agcucuauuaagauuuccaa

SEQ ID NO: 2486504 - RNA, 22 nt, Human
agcucuauguuuacaaauggac

SEQ ID NO: 2486505 - RNA, 22 nt, Human
agcucuaucaccaaggagccaa

SEQ ID NO: 2486506 - RNA, 17 nt, Human
agcucuaucaccaagga

SEQ ID NO: 2486507 - RNA, 18 nt, Human
ugcccuccagcucuuucc

SEQ ID NO: 2486508 - RNA, 19 nt, Human
ugcccuccagcucuuuccu

SEQ ID NO: 2486509 - RNA, 12 nt, Human
agcucucagcca

SEQ ID NO: 2486510 - RNA, 13 nt, Human
agcucucagccaa

SEQ ID NO: 2486511 - RNA, 14 nt, Human
agcucuccagcucc

SEQ ID NO: 2486512 - RNA, 13 nt, Human
agcucuccagcuc

SEQ ID NO: 2486513 - RNA, 17 nt, Human
agcucuccagcuccaag

SEQ ID NO: 2486514 - RNA, 16 nt, Human
agcucuccagcuccaa

SEQ ID NO: 2486515 - RNA, 15 nt, Human
agcucuccccucaga

SEQ ID NO: 2486516 - RNA, 18 nt, Human
agcugcacccucaggcag

SEQ ID NO: 2486517 - RNA, 19 nt, Human
agcugcacccucaggcagg

SEQ ID NO: 2486518 - RNA, 20 nt, Human
agcugcacccucaggcaggu

SEQ ID NO: 2486519 - RNA, 22 nt, Human
agcugcacccucaggcaggugg

SEQ ID NO: 2486520 - RNA, 13 nt, Human
agcugcacccuca

SEQ ID NO: 2486521 - RNA, 17 nt, Human
agcugcacccucaggca

SEQ ID NO: 2486522 - RNA, 14 nt, Human
agcugauuuuaaca

SEQ ID NO: 2486523 - RNA, 17 nt, Human
agcugauguuggaagag

SEQ ID NO: 2486524 - RNA, 12 nt, Human
agcucuguccug

SEQ ID NO: 2486525 - RNA, 17 nt, Human
agcucuucuccaggcug

SEQ ID NO: 2486526 - RNA, 22 nt, Human
agcucuguaucaggacccagag

SEQ ID NO: 2486527 - RNA, 23 nt, Human
agcucuguaucaggacccagagg

SEQ ID NO: 2486528 - RNA, 12 nt, Human
agcucuguauca

SEQ ID NO: 2486529 - RNA, 23 nt, Human
agcucuggugagucuuggcggca

SEQ ID NO: 2486530 - RNA, 21 nt, Human
agcucuggugacaccagccuu

SEQ ID NO: 2486531 - RNA, 17 nt, Human
agcucuggugacaccag

SEQ ID NO: 2486532 - RNA, 19 nt, Human
agcucuggugacaccagcc

SEQ ID NO: 2486533 - RNA, 20 nt, Human
agcucuggugacaccagccu

SEQ ID NO: 2486534 - RNA, 18 nt, Human
agcucuucuccaggcugu

SEQ ID NO: 2486535 - RNA, 20 nt, Human
agcucuucuccccaggugug

SEQ ID NO: 2486536 - RNA, 17 nt, Human
agcucuucuccccaggu

SEQ ID NO: 2486537 - RNA, 16 nt, Human
agcucuucuccccagg

SEQ ID NO: 2486538 - RNA, 20 nt, Human
agcucuucugccggcccugg

SEQ ID NO: 2486539 - RNA, 21 nt, Human
agcucuucugccggcccuggg

SEQ ID NO: 2486540 - RNA, 22 nt, Human
agcucuucugccggcccugggg

SEQ ID NO: 2486541 - RNA, 23 nt, Human
agcucuucugccggcccuggggc

SEQ ID NO: 2486542 - RNA, 15 nt, Human
agcugauccagagca

SEQ ID NO: 2486543 - RNA, 15 nt, Human
agcucuugcccuucc

SEQ ID NO: 2486544 - RNA, 14 nt, Human
agcucuugcccuuc

SEQ ID NO: 2486545 - RNA, 12 nt, Human
agcucuugcccu

SEQ ID NO: 2486546 - RNA, 18 nt, Human
agcucuucuuaaaguauu

SEQ ID NO: 2486547 - RNA, 19 nt, Human
agcucuugaagacacugaa

SEQ ID NO: 2486548 - RNA, 19 nt, Human
agcugauccagagcacaga

SEQ ID NO: 2486549 - RNA, 22 nt, Human
agcugaugaacuuauucuguag

SEQ ID NO: 2486550 - RNA, 20 nt, Human
agcugaugaacuuauucugu

SEQ ID NO: 2486551 - RNA, 14 nt, Human
ugccucucucaggc

SEQ ID NO: 2486552 - RNA, 13 nt, Human
ugccucucucagg

SEQ ID NO: 2486553 - RNA, 19 nt, Human
ugccucccaucacccgcua

SEQ ID NO: 2486554 - RNA, 14 nt, Human
ugccucccaucacc

SEQ ID NO: 2486555 - RNA, 13 nt, Human
ugccucccaucac

SEQ ID NO: 2486556 - RNA, 15 nt, Human
ugccuccaggugugc

SEQ ID NO: 2486557 - RNA, 13 nt, Human
ugccuccaggugu

SEQ ID NO: 2486558 - RNA, 23 nt, Human
ugccuccaccaccacuggccacc

SEQ ID NO: 2486559 - RNA, 22 nt, Human
ugccuccaccaccacuggccac

SEQ ID NO: 2486560 - RNA, 21 nt, Human
ugccuccaccaccacuggcca

SEQ ID NO: 2486561 - RNA, 20 nt, Human
ugccuccaccaccacuggcc

SEQ ID NO: 2486562 - RNA, 14 nt, Human
ugccuccacccucu

SEQ ID NO: 2486563 - RNA, 13 nt, Human
ugccuccacccuc

SEQ ID NO: 2486564 - RNA, 12 nt, Human
ugccuccacccu

SEQ ID NO: 2486565 - RNA, 18 nt, Human
ugccuccaccccccagaa

SEQ ID NO: 2486566 - RNA, 16 nt, Human
ugccuccacccucuga

SEQ ID NO: 2486567 - RNA, 15 nt, Human
ugccuccacccucug

SEQ ID NO: 2486568 - RNA, 17 nt, Human
ugccuccacccucugag

SEQ ID NO: 2486569 - RNA, 11 nt, Human
ugccuccaccg

SEQ ID NO: 2486570 - RNA, 13 nt, Human
ugccuccaccgcu

SEQ ID NO: 2486571 - RNA, 16 nt, Human
ugccuccaccgcugcc

SEQ ID NO: 2486572 - RNA, 17 nt, Human
ugccuccaccgcugccu

SEQ ID NO: 2486573 - RNA, 18 nt, Human
ugccuccaccgcugccua

SEQ ID NO: 2486574 - RNA, 20 nt, Human
ugccucucugcaggucccua

SEQ ID NO: 2486575 - RNA, 19 nt, Human
ugccucucugcaggucccu

SEQ ID NO: 2486576 - RNA, 21 nt, Human
ugccucugacacacagcucug

SEQ ID NO: 2486577 - RNA, 20 nt, Human
ugccucugacacacagcucu

SEQ ID NO: 2486578 - RNA, 18 nt, Human
ugccucucugcagguccc

SEQ ID NO: 2486579 - RNA, 16 nt, Human
ugccucucugcagguc

SEQ ID NO: 2486580 - RNA, 15 nt, Human
ugccucucucaggcc

SEQ ID NO: 2486581 - RNA, 17 nt, Human
ugccuccaggugugcac

SEQ ID NO: 2486582 - RNA, 19 nt, Human
ugccuccaccaccacuggc

SEQ ID NO: 2486583 - RNA, 17 nt, Human
ugccuccaccaccacug

SEQ ID NO: 2486584 - RNA, 16 nt, Human
ugccuccaccaccacu

SEQ ID NO: 2486585 - RNA, 15 nt, Human
ugccuccaccaccac

SEQ ID NO: 2486586 - RNA, 14 nt, Human
ugccuccaccacca

SEQ ID NO: 2486587 - RNA, 12 nt, Human
ugccuccaccac

SEQ ID NO: 2486588 - RNA, 15 nt, Human
ugccucaguguauuu

SEQ ID NO: 2486589 - RNA, 18 nt, Human
ugccucaguaaaaugaac

SEQ ID NO: 2486590 - RNA, 19 nt, Human
ugccggguucuagucuccu

SEQ ID NO: 2486591 - RNA, 21 nt, Human
ugccucauuuuagaaccacca

SEQ ID NO: 2486592 - RNA, 22 nt, Human
ugccucauuuagagaggaaaag

SEQ ID NO: 2486593 - RNA, 19 nt, Human
ugccucaguguauuuguau

SEQ ID NO: 2486594 - RNA, 20 nt, Human
ugccucaucuauaacaugca

SEQ ID NO: 2486595 - RNA, 14 nt, Human
ugccggcccugggg

SEQ ID NO: 2486596 - RNA, 16 nt, Human
ugccggccggggcuga

SEQ ID NO: 2486597 - RNA, 15 nt, Human
ugccggcccuggggc

SEQ ID NO: 2486598 - RNA, 20 nt, Human
ugccggcucuuuccuugcuc

SEQ ID NO: 2486599 - RNA, 14 nt, Human
ugccggaugugcuu

SEQ ID NO: 2486600 - RNA, 12 nt, Human
ugccgccugccc

SEQ ID NO: 2486601 - RNA, 20 nt, Human
ugccgcgucgcccucccagg

SEQ ID NO: 2486602 - RNA, 15 nt, Human
ugcccuuucugggca

SEQ ID NO: 2486603 - RNA, 13 nt, Human
ugccgaaccagga

SEQ ID NO: 2486604 - RNA, 16 nt, Human
ugccgccucccagccu

SEQ ID NO: 2486605 - RNA, 19 nt, Human
ugccgaaugugcagguuug

SEQ ID NO: 2486606 - RNA, 17 nt, Human
ugccgccucccagccug

SEQ ID NO: 2486607 - RNA, 10 nt, Human
ugccgccugc

SEQ ID NO: 2486608 - RNA, 18 nt, Human
ugccgccucccagccugg

SEQ ID NO: 2486609 - RNA, 24 nt, Human
ugccgccuccccacggccgcucca

SEQ ID NO: 2486610 - RNA, 16 nt, Human
ugccgcgucgcccucc

SEQ ID NO: 2486611 - RNA, 21 nt, Human
ugccgcgucgcccucccaggc

SEQ ID NO: 2486612 - RNA, 22 nt, Human
agcugcaccugccagccuggcu

SEQ ID NO: 2486613 - RNA, 18 nt, Human
agcugcaccugccagccu

SEQ ID NO: 2486614 - RNA, 21 nt, Human
agcugcaccugccagccuggc

SEQ ID NO: 2486615 - RNA, 21 nt, Human
agcugcauccuccaagaaucu

SEQ ID NO: 2486616 - RNA, 19 nt, Human
agcugcauccuccaagaau

SEQ ID NO: 2486617 - RNA, 18 nt, Human
agcugcauccuccaagaa

SEQ ID NO: 2486618 - RNA, 22 nt, Human
agcugcauccuccaagaaucua

SEQ ID NO: 2486619 - RNA, 18 nt, Human
agcugcauacaguuugca

SEQ ID NO: 2486620 - RNA, 16 nt, Human
agcugcaccugccagc

SEQ ID NO: 2486621 - RNA, 21 nt, Human
agcugauguuggaagagaaag

SEQ ID NO: 2486622 - RNA, 20 nt, Human
agcugauguuggaagagaaa

SEQ ID NO: 2486623 - RNA, 15 nt, Human
agcugauuuuaacaa

SEQ ID NO: 2486624 - RNA, 16 nt, Human
agcugauuuuaacaau

SEQ ID NO: 2486625 - RNA, 13 nt, Human
agcugccaccugc

SEQ ID NO: 2486626 - RNA, 12 nt, Human
agcugccagaga

SEQ ID NO: 2486627 - RNA, 13 nt, Human
agcugccagagaa

SEQ ID NO: 2486628 - RNA, 15 nt, Human
ugcccuugcccugac

SEQ ID NO: 2486629 - RNA, 14 nt, Human
ugcccuugcccuga

SEQ ID NO: 2486630 - RNA, 13 nt, Human
ugcccuugcccug

SEQ ID NO: 2486631 - RNA, 14 nt, Human
agcugccagagaag

SEQ ID NO: 2486632 - RNA, 18 nt, Human
ugcccuugcccugaccuc

SEQ ID NO: 2486633 - RNA, 17 nt, Human
ugcccuugcccugaccu

SEQ ID NO: 2486634 - RNA, 19 nt, Human
ugcccuugcccugaccucc

SEQ ID NO: 2486635 - RNA, 17 nt, Human
ugcccuuggaggccagc

SEQ ID NO: 2486636 - RNA, 15 nt, Human
ugcccuugucugaga

SEQ ID NO: 2486637 - RNA, 14 nt, Human
ugcccuugucugag

SEQ ID NO: 2486638 - RNA, 13 nt, Human
ugcccuugucuga

SEQ ID NO: 2486639 - RNA, 17 nt, Human
ugcccuugucccacuca

SEQ ID NO: 2486640 - RNA, 19 nt, Human
ugcccuuggaggccagcca

SEQ ID NO: 2486641 - RNA, 16 nt, Human
ugcccuugucccacuc

SEQ ID NO: 2486642 - RNA, 23 nt, Human
aggaauccagacccggcugcgug

SEQ ID NO: 2486643 - RNA, 16 nt, Human
aggaagcucucuuucc

SEQ ID NO: 2486644 - RNA, 15 nt, Human
aggaagcuccacugu

SEQ ID NO: 2486645 - RNA, 19 nt, Human
aggaaucgaggaaccagag

SEQ ID NO: 2486646 - RNA, 20 nt, Human
aggaaucgaggaaccagagc

SEQ ID NO: 2486647 - RNA, 19 nt, Human
aggaauugacccacaagaa

SEQ ID NO: 2486648 - RNA, 20 nt, Human
aggaauuuuauuuuuuucug

SEQ ID NO: 2486649 - RNA, 23 nt, Human
aggaaugaaauccugcuucagug

SEQ ID NO: 2486650 - RNA, 22 nt, Human
aggaagcucagggccuggcuca

SEQ ID NO: 2486651 - RNA, 18 nt, Human
aggaagcucagggccugg

SEQ ID NO: 2486652 - RNA, 17 nt, Human
aggaagcucagggccug

SEQ ID NO: 2486653 - RNA, 14 nt, Human
aggaagagagcaug

SEQ ID NO: 2486654 - RNA, 12 nt, Human
aggaagagcagg

SEQ ID NO: 2486655 - RNA, 17 nt, Human
aggaagagcaggcacau

SEQ ID NO: 2486656 - RNA, 20 nt, Human
aggaagagcaggcacaugga

SEQ ID NO: 2486657 - RNA, 14 nt, Human
aggaagagaaaaaa

SEQ ID NO: 2486658 - RNA, 14 nt, Human
aggaagagaaacca

SEQ ID NO: 2486659 - RNA, 15 nt, Human
aggaagacuuuggaa

SEQ ID NO: 2486660 - RNA, 19 nt, Human
aggaaaucaaauaugcaaa

SEQ ID NO: 2486661 - RNA, 21 nt, Human
aggaaaggccagcuggcagca

SEQ ID NO: 2486662 - RNA, 17 nt, Human
aggaaaggccagcuggc

SEQ ID NO: 2486663 - RNA, 18 nt, Human
aggaaaggccagcuggca

SEQ ID NO: 2486664 - RNA, 15 nt, Human
ugcugccauccaggu

SEQ ID NO: 2486665 - RNA, 14 nt, Human
ugcugccauccagg

SEQ ID NO: 2486666 - RNA, 13 nt, Human
ugcugccauccag

SEQ ID NO: 2486667 - RNA, 12 nt, Human
ugcugccaucca

SEQ ID NO: 2486668 - RNA, 16 nt, Human
ugcugcccaugccacc

SEQ ID NO: 2486669 - RNA, 14 nt, Human
ugcugcccaugcca

SEQ ID NO: 2486670 - RNA, 16 nt, Human
ugcugcccaggcccag

SEQ ID NO: 2486671 - RNA, 16 nt, Human
ugcugcccagccucca

SEQ ID NO: 2486672 - RNA, 14 nt, Human
ugcugcccagccuc

SEQ ID NO: 2486673 - RNA, 22 nt, Human
ugcugccauccagguucagcuu

SEQ ID NO: 2486674 - RNA, 21 nt, Human
ugcugccauccagguucagcu

SEQ ID NO: 2486675 - RNA, 19 nt, Human
ugcugccacacuucaggcu

SEQ ID NO: 2486676 - RNA, 16 nt, Human
ugcugccacacuucag

SEQ ID NO: 2486677 - RNA, 15 nt, Human
ugcugccacacuuca

SEQ ID NO: 2486678 - RNA, 14 nt, Human
ugcugccacuuuuu

SEQ ID NO: 2486679 - RNA, 22 nt, Human
ugcugccacacuucaggcucuu

SEQ ID NO: 2486680 - RNA, 11 nt, Human
ugcugccaucc

SEQ ID NO: 2486681 - RNA, 14 nt, Human
aggacaaccauucc

SEQ ID NO: 2486682 - RNA, 19 nt, Human
aggacaaaaaugaacugaa

SEQ ID NO: 2486683 - RNA, 16 nt, Human
aggacaaacagcucag

SEQ ID NO: 2486684 - RNA, 18 nt, Human
aggacaaaaaugaacuga

SEQ ID NO: 2486685 - RNA, 22 nt, Human
aggaauuuuauuuuuuucugaa

SEQ ID NO: 2486686 - RNA, 14 nt, Human
aggaauuuucuuug

SEQ ID NO: 2486687 - RNA, 16 nt, Human
aggaauuuucuuugug

SEQ ID NO: 2486688 - RNA, 15 nt, Human
ugcugagucccaggc

SEQ ID NO: 2486689 - RNA, 18 nt, Human
ugcugagucccaggcuga

SEQ ID NO: 2486690 - RNA, 22 nt, Human
ugcugagucccaggcugagccu

SEQ ID NO: 2486691 - RNA, 17 nt, Human
ugcugagucucccaagg

SEQ ID NO: 2486692 - RNA, 16 nt, Human
ugcugagucucccaag

SEQ ID NO: 2486693 - RNA, 15 nt, Human
ugcugagucucccaa

SEQ ID NO: 2486694 - RNA, 22 nt, Human
aggaaagcaauaaaugaauggg

SEQ ID NO: 2486695 - RNA, 18 nt, Human
aggaaagcaauaaaugaa

SEQ ID NO: 2486696 - RNA, 19 nt, Human
aggaaagcaauaaaugaau

SEQ ID NO: 2486697 - RNA, 16 nt, Human
aggaaagcaauaaaug

SEQ ID NO: 2486698 - RNA, 21 nt, Human
ugcugacuguuuucucuugag

SEQ ID NO: 2486699 - RNA, 24 nt, Human
ugcugacuguuuucucuugagagg

SEQ ID NO: 2486700 - RNA, 21 nt, Human
ugcugaguauguuaagcucuu

SEQ ID NO: 2486701 - RNA, 17 nt, Human
ugcugagggaccagcca

SEQ ID NO: 2486702 - RNA, 19 nt, Human
ugcugagggaccagccaag

SEQ ID NO: 2486703 - RNA, 20 nt, Human
ugcugagggaccagccaaga

SEQ ID NO: 2486704 - RNA, 12 nt, Human
ugcucuuagcug

SEQ ID NO: 2486705 - RNA, 14 nt, Human
ugcugagggaccag

SEQ ID NO: 2486706 - RNA, 16 nt, Human
ugcugagggaccagcc

SEQ ID NO: 2486707 - RNA, 18 nt, Human
aggaaauauuuauuuuaa

SEQ ID NO: 2486708 - RNA, 14 nt, Human
aggaaauauuuauu

SEQ ID NO: 2486709 - RNA, 22 nt, Human
aggaaaggcuccaggagcagcc

SEQ ID NO: 2486710 - RNA, 20 nt, Human
aggaaaggcuccaggagcag

SEQ ID NO: 2486711 - RNA, 18 nt, Human
aggaaaggcuccaggagc

SEQ ID NO: 2486712 - RNA, 13 nt, Human
aggaaaggccagc

SEQ ID NO: 2486713 - RNA, 14 nt, Human
aggaaaggccagcu

SEQ ID NO: 2486714 - RNA, 15 nt, Human
aggaaaggccagcug

SEQ ID NO: 2486715 - RNA, 16 nt, Human
aggaaaggccagcugg

SEQ ID NO: 2486716 - RNA, 19 nt, Human
aggaaagccccagcacuaa

SEQ ID NO: 2486717 - RNA, 20 nt, Human
aggaaagccccagcacuaac

SEQ ID NO: 2486718 - RNA, 18 nt, Human
ugcucugaugaagaggag

SEQ ID NO: 2486719 - RNA, 19 nt, Human
ugcucugaugaagaggagu

SEQ ID NO: 2486720 - RNA, 19 nt, Human
ugcucugcaggcaccuuag

SEQ ID NO: 2486721 - RNA, 16 nt, Human
ugcucugcaggcaccu

SEQ ID NO: 2486722 - RNA, 15 nt, Human
ugcucugcaggcacc

SEQ ID NO: 2486723 - RNA, 13 nt, Human
ugcucugaucccu

SEQ ID NO: 2486724 - RNA, 14 nt, Human
ugcucugaucccuc

SEQ ID NO: 2486725 - RNA, 16 nt, Human
ugcucugaucccucua

SEQ ID NO: 2486726 - RNA, 19 nt, Human
ugcucugaucccucuacag

SEQ ID NO: 2486727 - RNA, 22 nt, Human
ugcucugaucauccacugugcc

SEQ ID NO: 2486728 - RNA, 14 nt, Human
ugcuaucacacagu

SEQ ID NO: 2486729 - RNA, 15 nt, Human
ugcuauccauuucuc

SEQ ID NO: 2486730 - RNA, 22 nt, Human
ugcuauccauuucucauguuuu

SEQ ID NO: 2486731 - RNA, 20 nt, Human
ugcuauccugccaaaaucau

SEQ ID NO: 2486732 - RNA, 19 nt, Human
ugcucugaucauccacugu

SEQ ID NO: 2486733 - RNA, 20 nt, Human
ugcuauaggcuggagaagcu

SEQ ID NO: 2486734 - RNA, 19 nt, Human
ugcuauaggcuggagaagc

SEQ ID NO: 2486735 - RNA, 23 nt, Human
ugcuauaggcuggagaagcucac

SEQ ID NO: 2486736 - RNA, 18 nt, Human
ugcuauauuuucaugacu

SEQ ID NO: 2486737 - RNA, 16 nt, Human
ugcuauauuuucauga

SEQ ID NO: 2486738 - RNA, 22 nt, Human
ugcuauauuuucaugacuuuuc

SEQ ID NO: 2486739 - RNA, 19 nt, Human
ugcuauccagcuauuuuua

SEQ ID NO: 2486740 - RNA, 15 nt, Human
ugcucugcauguuac

SEQ ID NO: 2486741 - RNA, 18 nt, Human
ugcucugcauguuacaua

SEQ ID NO: 2486742 - RNA, 17 nt, Human
ugcucuggacaggcaug

SEQ ID NO: 2486743 - RNA, 20 nt, Human
ugcucugcaggcaccuuagu

SEQ ID NO: 2486744 - RNA, 17 nt, Human
ugcugacuguuuucucu

SEQ ID NO: 2486745 - RNA, 22 nt, Human
ugcucugucuucuuugcccaca

SEQ ID NO: 2486746 - RNA, 22 nt, Human
ugcucuguaaucucguuucaaa

SEQ ID NO: 2486747 - RNA, 19 nt, Human
ugcucugugcccacccucc

SEQ ID NO: 2486748 - RNA, 21 nt, Human
ugcggacagccacggccaggc

SEQ ID NO: 2486749 - RNA, 20 nt, Human
ugcggacagccacggccagg

SEQ ID NO: 2486750 - RNA, 23 nt, Human
ugcuacccucccugcuguccccu

SEQ ID NO: 2486751 - RNA, 20 nt, Human
ugcuacccucccugcugucc

SEQ ID NO: 2486752 - RNA, 19 nt, Human
ugcuacccucccugcuguc

SEQ ID NO: 2486753 - RNA, 18 nt, Human
ugcuacccucccugcugu

SEQ ID NO: 2486754 - RNA, 17 nt, Human
ugcuacccucccugcug

SEQ ID NO: 2486755 - RNA, 15 nt, Human
ugcgaguauguguuu

SEQ ID NO: 2486756 - RNA, 14 nt, Human
ugcgaguauguguu

SEQ ID NO: 2486757 - RNA, 14 nt, Human
ugcuaccucacugg

SEQ ID NO: 2486758 - RNA, 15 nt, Human
ugcuaccucacuggg

SEQ ID NO: 2486759 - RNA, 16 nt, Human
ugcuaccucacugggg

SEQ ID NO: 2486760 - RNA, 22 nt, Human
ugcuaccucacugggguccugg

SEQ ID NO: 2486761 - RNA, 16 nt, Human
ugcuacgugugauuuu

SEQ ID NO: 2486762 - RNA, 15 nt, Human
ugcuacgugugauuu

SEQ ID NO: 2486763 - RNA, 14 nt, Human
ugcuacgugugauu

SEQ ID NO: 2486764 - RNA, 13 nt, Human
ugcuacgugugau

SEQ ID NO: 2486765 - RNA, 14 nt, Human
agcuguuuccauag

SEQ ID NO: 2486766 - RNA, 13 nt, Human
agcuguuugucau

SEQ ID NO: 2486767 - RNA, 20 nt, Human
agcuguuuuaguuaaauuuc

SEQ ID NO: 2486768 - RNA, 18 nt, Human
agcuguuuuaguuaaauu

SEQ ID NO: 2486769 - RNA, 15 nt, Human
agcuguuuucccuga

SEQ ID NO: 2486770 - RNA, 13 nt, Human
ugcuacgccugca

SEQ ID NO: 2486771 - RNA, 16 nt, Human
ugcuacgccugcaugu

SEQ ID NO: 2486772 - RNA, 19 nt, Human
ugcuacguacaugugaggc

SEQ ID NO: 2486773 - RNA, 20 nt, Human
ugcuacgccugcauguaaac

SEQ ID NO: 2486774 - RNA, 23 nt, Human
ugcuaccuggguccuuuucagaa

SEQ ID NO: 2486775 - RNA, 22 nt, Human
ugcuaccuggguccuuuucaga

SEQ ID NO: 2486776 - RNA, 16 nt, Human
ugcuaccucagucagu

SEQ ID NO: 2486777 - RNA, 13 nt, Human
ugcuaccucaguc

SEQ ID NO: 2486778 - RNA, 21 nt, Human
ugcuacccucccugcuguccc

SEQ ID NO: 2486779 - RNA, 19 nt, Human
ugcuaccuggguccuuuuc

SEQ ID NO: 2486780 - RNA, 15 nt, Human
agcuuagagccuccc

SEQ ID NO: 2486781 - RNA, 14 nt, Human
agcuuagcaggaga

SEQ ID NO: 2486782 - RNA, 22 nt, Human
agcuuagcaggagaggagagcc

SEQ ID NO: 2486783 - RNA, 16 nt, Human
agcuuagcaggagagg

SEQ ID NO: 2486784 - RNA, 17 nt, Human
agcuuagccaauguggg

SEQ ID NO: 2486785 - RNA, 14 nt, Human
agcuguuuucuucu

SEQ ID NO: 2486786 - RNA, 18 nt, Human
agcuguuuucccugaccu

SEQ ID NO: 2486787 - RNA, 12 nt, Human
agcuuaucucag

SEQ ID NO: 2486788 - RNA, 13 nt, Human
agcuuaggcaggg

SEQ ID NO: 2486789 - RNA, 15 nt, Human
agcuuaucaugcugu

SEQ ID NO: 2486790 - RNA, 14 nt, Human
agcuuaucucaggg

SEQ ID NO: 2486791 - RNA, 15 nt, Human
agcuuaucucagggg

SEQ ID NO: 2486792 - RNA, 20 nt, Human
agcuuauuaaaacucauuuu

SEQ ID NO: 2486793 - RNA, 15 nt, Human
agcuuauuaaaacuc

SEQ ID NO: 2486794 - RNA, 19 nt, Human
agcuuaucaugcugucuuu

SEQ ID NO: 2486795 - RNA, 21 nt, Human
agcuuauugucuagugaaacu

SEQ ID NO: 2486796 - RNA, 22 nt, Human
agcuuauucaucuguuuuucuu

SEQ ID NO: 2486797 - RNA, 20 nt, Human
agcuugcugcccuaggcucc

SEQ ID NO: 2486798 - RNA, 15 nt, Human
agcuuggcagccgag

SEQ ID NO: 2486799 - RNA, 14 nt, Human
agcuuggcagccga

SEQ ID NO: 2486800 - RNA, 13 nt, Human
agcuuggcagccg

SEQ ID NO: 2486801 - RNA, 12 nt, Human
agcuuggcagcc

SEQ ID NO: 2486802 - RNA, 20 nt, Human
agcuuggcagccgagcucgu

SEQ ID NO: 2486803 - RNA, 17 nt, Human
agcuuggcagccgagcu

SEQ ID NO: 2486804 - RNA, 21 nt, Human
agcuuggcagccgagcucgug

SEQ ID NO: 2486805 - RNA, 14 nt, Human
agcuuggccagaag

SEQ ID NO: 2486806 - RNA, 18 nt, Human
agcuuggaagagccugca

SEQ ID NO: 2486807 - RNA, 17 nt, Human
agcuuggaagagccugc

SEQ ID NO: 2486808 - RNA, 16 nt, Human
agcuuggaagagccug

SEQ ID NO: 2486809 - RNA, 17 nt, Human
agcuuggaaaggaccag

SEQ ID NO: 2486810 - RNA, 23 nt, Human
agcuuggaaacuggaugagguca

SEQ ID NO: 2486811 - RNA, 21 nt, Human
agcuuguaaauagcucaggug

SEQ ID NO: 2486812 - RNA, 20 nt, Human
agcuuguaaauagcucaggu

SEQ ID NO: 2486813 - RNA, 12 nt, Human
agcuugggaaug

SEQ ID NO: 2486814 - RNA, 14 nt, Human
agcuugggaaugga

SEQ ID NO: 2486815 - RNA, 16 nt, Human
agcuuggcuguagaag

SEQ ID NO: 2486816 - RNA, 23 nt, Human
agcuuggcuguagaaggagacag

SEQ ID NO: 2486817 - RNA, 19 nt, Human
agcuuguaaauagcucagg

SEQ ID NO: 2486818 - RNA, 16 nt, Human
agcuugggacaaauca

SEQ ID NO: 2486819 - RNA, 23 nt, Human
agcuuuccugccccaggccugaa

SEQ ID NO: 2486820 - RNA, 20 nt, Human
agcuuucuguccuuuuggca

SEQ ID NO: 2486821 - RNA, 22 nt, Human
agcuuucuguccuuuuggcacu

SEQ ID NO: 2486822 - RNA, 19 nt, Human
aggaaagagaacuuccaga

SEQ ID NO: 2486823 - RNA, 13 nt, Human
aggaaagagaacu

SEQ ID NO: 2486824 - RNA, 13 nt, Human
aggaaagaggcuc

SEQ ID NO: 2486825 - RNA, 12 nt, Human
aggaaagaggcu

SEQ ID NO: 2486826 - RNA, 21 nt, Human
aggaaacuccacaucugccuu

SEQ ID NO: 2486827 - RNA, 20 nt, Human
aggaaacuccacaucugccu

SEQ ID NO: 2486828 - RNA, 19 nt, Human
aggaaacuccacaucugcc

SEQ ID NO: 2486829 - RNA, 16 nt, Human
aggaaacuccacaucu

SEQ ID NO: 2486830 - RNA, 20 nt, Human
aggaaacuccugacagucuu

SEQ ID NO: 2486831 - RNA, 22 nt, Human
aggaaacuccacaucugccuua

SEQ ID NO: 2486832 - RNA, 21 nt, Human
aggaaacucugcauucuagua

SEQ ID NO: 2486833 - RNA, 16 nt, Human
aggaaacucaccugcu

SEQ ID NO: 2486834 - RNA, 17 nt, Human
aggaaacucaccugcug

SEQ ID NO: 2486835 - RNA, 20 nt, Human
aggaaacucaccugcuggcc

SEQ ID NO: 2486836 - RNA, 21 nt, Human
aggaaacucaccugcuggccc

SEQ ID NO: 2486837 - RNA, 22 nt, Human
aggaaacucaccugcuggcccc

SEQ ID NO: 2486838 - RNA, 23 nt, Human
aggaaacucaccugcuggccccu

SEQ ID NO: 2486839 - RNA, 17 nt, Human
aggaaacucuuaucuca

SEQ ID NO: 2486840 - RNA, 13 nt, Human
aggaaacucuuau

SEQ ID NO: 2486841 - RNA, 12 nt, Human
aggaaacucuua

SEQ ID NO: 2486842 - RNA, 19 nt, Human
aggaaacuggguuccugca

SEQ ID NO: 2486843 - RNA, 22 nt, Human
aggaaacucuuaucucagucau

SEQ ID NO: 2486844 - RNA, 18 nt, Human
aggaaacucuuaucucag

SEQ ID NO: 2486845 - RNA, 17 nt, Human
aggaaagaaagaaggaa

SEQ ID NO: 2486846 - RNA, 14 nt, Human
ugcuaguaauugga

SEQ ID NO: 2486847 - RNA, 19 nt, Human
aggaaagcaaaggagauug

SEQ ID NO: 2486848 - RNA, 17 nt, Human
aggaaagcaaaggagau

SEQ ID NO: 2486849 - RNA, 16 nt, Human
aggaaagaggcucugg

SEQ ID NO: 2486850 - RNA, 16 nt, Human
ugcuaguaauuggaaa

SEQ ID NO: 2486851 - RNA, 20 nt, Human
aggaaagaaugaaagaguaa

SEQ ID NO: 2486852 - RNA, 16 nt, Human
ugcuagucuuaagaac

SEQ ID NO: 2486853 - RNA, 21 nt, Human
ugcuauaacuauguugauaaa

SEQ ID NO: 2486854 - RNA, 13 nt, Human
ugcuauacugcau

SEQ ID NO: 2486855 - RNA, 14 nt, Human
ugcuauagccuggg

SEQ ID NO: 2486856 - RNA, 22 nt, Human
aggaaagauuuuuguuguuauu

SEQ ID NO: 2486857 - RNA, 12 nt, Human
agcuuugaaaau

SEQ ID NO: 2486858 - RNA, 16 nt, Human
agcuuugaaaauucag

SEQ ID NO: 2486859 - RNA, 18 nt, Human
agcuuugaaaauucagug

SEQ ID NO: 2486860 - RNA, 19 nt, Human
agcuuugaaaauucagugg

SEQ ID NO: 2486861 - RNA, 16 nt, Human
aggaaaaguacauuua

SEQ ID NO: 2486862 - RNA, 21 nt, Human
aggaaaaggugauauccauuc

SEQ ID NO: 2486863 - RNA, 18 nt, Human
aggaaaaggugauaucca

SEQ ID NO: 2486864 - RNA, 22 nt, Human
agcuuugaaggccgaaggcagu

SEQ ID NO: 2486865 - RNA, 19 nt, Human
agcuuugaaggccgaaggc

SEQ ID NO: 2486866 - RNA, 20 nt, Human
aggaaacccagcucuggucc

SEQ ID NO: 2486867 - RNA, 18 nt, Human
aggaaacccagcucuggu

SEQ ID NO: 2486868 - RNA, 21 nt, Human
aggaaacccagcucuggucca

SEQ ID NO: 2486869 - RNA, 23 nt, Human
aggaaaccaguuaggucucaaua

SEQ ID NO: 2486870 - RNA, 14 nt, Human
aggaaaauccucug

SEQ ID NO: 2486871 - RNA, 17 nt, Human
aggaaacccagcucugg

SEQ ID NO: 2486872 - RNA, 16 nt, Human
aggaaacccagcucug

SEQ ID NO: 2486873 - RNA, 15 nt, Human
aggaaacccagcucu

SEQ ID NO: 2486874 - RNA, 22 nt, Human
aggaaaaguacauuuaauacag

SEQ ID NO: 2486875 - RNA, 19 nt, Human
aggaaaaguacauuuaaua

SEQ ID NO: 2486876 - RNA, 16 nt, Human
aggaaaauaguaaugu

SEQ ID NO: 2486877 - RNA, 13 nt, Human
aggcacaaaauga

SEQ ID NO: 2486878 - RNA, 17 nt, Human
aggcacaaaaugaugga

SEQ ID NO: 2486879 - RNA, 22 nt, Human
aggcaaugucaggaacagaagg

SEQ ID NO: 2486880 - RNA, 23 nt, Human
aggcaaugucaggaacagaagga

SEQ ID NO: 2486881 - RNA, 17 nt, Human
aggcacagugaaggcug

SEQ ID NO: 2486882 - RNA, 13 nt, Human
aggcacauggagg

SEQ ID NO: 2486883 - RNA, 14 nt, Human
aggcacauggagga

SEQ ID NO: 2486884 - RNA, 17 nt, Human
aggcacauggaggagcu

SEQ ID NO: 2486885 - RNA, 16 nt, Human
aggcaaugcuggcugu

SEQ ID NO: 2486886 - RNA, 13 nt, Human
uggaggaaagcaa

SEQ ID NO: 2486887 - RNA, 21 nt, Human
uggagcuuuuuucuuuaagau

SEQ ID NO: 2486888 - RNA, 16 nt, Human
uggagcuuuuuucuuu

SEQ ID NO: 2486889 - RNA, 14 nt, Human
uggagcuuuuuucc

SEQ ID NO: 2486890 - RNA, 17 nt, Human
aggcaaugucaggaaca

SEQ ID NO: 2486891 - RNA, 19 nt, Human
aggcaaugucaggaacaga

SEQ ID NO: 2486892 - RNA, 23 nt, Human
uggaggaaaaccaagccguggcu

SEQ ID NO: 2486893 - RNA, 21 nt, Human
uggaggaaaaccaagccgugg

SEQ ID NO: 2486894 - RNA, 15 nt, Human
aggcaaugcuggcug

SEQ ID NO: 2486895 - RNA, 13 nt, Human
uggagccuggugc

SEQ ID NO: 2486896 - RNA, 15 nt, Human
uggagccugcagggu

SEQ ID NO: 2486897 - RNA, 23 nt, Human
uggagccugcaggguggugcugg

SEQ ID NO: 2486898 - RNA, 16 nt, Human
uggagccugcagagcu

SEQ ID NO: 2486899 - RNA, 13 nt, Human
uggagccugcagg

SEQ ID NO: 2486900 - RNA, 12 nt, Human
uggagccugugu

SEQ ID NO: 2486901 - RNA, 14 nt, Human
uggagccuggugcc

SEQ ID NO: 2486902 - RNA, 13 nt, Human
uggagcugagccu

SEQ ID NO: 2486903 - RNA, 15 nt, Human
uggagcugagccucu

SEQ ID NO: 2486904 - RNA, 14 nt, Human
uggagccuguguaa

SEQ ID NO: 2486905 - RNA, 17 nt, Human
uggagcugagccucuca

SEQ ID NO: 2486906 - RNA, 15 nt, Human
uggagcugccugaua

SEQ ID NO: 2486907 - RNA, 13 nt, Human
uggagcugccuga

SEQ ID NO: 2486908 - RNA, 21 nt, Human
uggagcuucauggcagaaggc

SEQ ID NO: 2486909 - RNA, 18 nt, Human
uggagcuggcgucugucu

SEQ ID NO: 2486910 - RNA, 11 nt, Human
uggagccugca

SEQ ID NO: 2486911 - RNA, 20 nt, Human
uggagccggacuuucggagu

SEQ ID NO: 2486912 - RNA, 15 nt, Human
uggagcccuuggguu

SEQ ID NO: 2486913 - RNA, 17 nt, Human
uggagccgaggccuacc

SEQ ID NO: 2486914 - RNA, 23 nt, Human
uggagccggacuuucggaguugg

SEQ ID NO: 2486915 - RNA, 22 nt, Human
uggagccggacuuucggaguug

SEQ ID NO: 2486916 - RNA, 22 nt, Human
uggagccuagagugagggccug

SEQ ID NO: 2486917 - RNA, 23 nt, Human
uggagcccagaggagggcagcag

SEQ ID NO: 2486918 - RNA, 20 nt, Human
uggagcccagaggagggcag

SEQ ID NO: 2486919 - RNA, 12 nt, Human
uggagccgaggc

SEQ ID NO: 2486920 - RNA, 13 nt, Human
uggagcccaggcg

SEQ ID NO: 2486921 - RNA, 19 nt, Human
uggagcccagaggagggca

SEQ ID NO: 2486922 - RNA, 15 nt, Human
uggagcccagaggag

SEQ ID NO: 2486923 - RNA, 21 nt, Human
uggagaagccacaggccugag

SEQ ID NO: 2486924 - RNA, 11 nt, Human
uggagaagcca

SEQ ID NO: 2486925 - RNA, 16 nt, Human
uggacccgcucuggac

SEQ ID NO: 2486926 - RNA, 15 nt, Human
uggacccgcucugga

SEQ ID NO: 2486927 - RNA, 19 nt, Human
uggacccgcucuggaccaa

SEQ ID NO: 2486928 - RNA, 14 nt, Human
uggacccgcucugg

SEQ ID NO: 2486929 - RNA, 11 nt, Human
uggacuuuguu

SEQ ID NO: 2486930 - RNA, 22 nt, Human
uggacuuuguuaguuucuccaa

SEQ ID NO: 2486931 - RNA, 23 nt, Human
uggacaccccuuauccaggacuc

SEQ ID NO: 2486932 - RNA, 20 nt, Human
uggaccccagcugggaggca

SEQ ID NO: 2486933 - RNA, 19 nt, Human
uggaccccagcugggaggc

SEQ ID NO: 2486934 - RNA, 18 nt, Human
uggaccccagcugggagg

SEQ ID NO: 2486935 - RNA, 16 nt, Human
uggaccccagcuggga

SEQ ID NO: 2486936 - RNA, 15 nt, Human
uggaccccagcuggg

SEQ ID NO: 2486937 - RNA, 14 nt, Human
uggaccccagcugg

SEQ ID NO: 2486938 - RNA, 13 nt, Human
uggaccccagcug

SEQ ID NO: 2486939 - RNA, 13 nt, Human
uggacccccagcu

SEQ ID NO: 2486940 - RNA, 23 nt, Human
uggaccccagcugggaggcaaga

SEQ ID NO: 2486941 - RNA, 14 nt, Human
uggacccccagcuu

SEQ ID NO: 2486942 - RNA, 16 nt, Human
uggaccccaucuguga

SEQ ID NO: 2486943 - RNA, 18 nt, Human
uggaccccaucugugaau

SEQ ID NO: 2486944 - RNA, 20 nt, Human
uggaccccaucugugaauaa

SEQ ID NO: 2486945 - RNA, 21 nt, Human
uggaccccaucugugaauaag

SEQ ID NO: 2486946 - RNA, 23 nt, Human
uggagcccacuguacuugcucuu

SEQ ID NO: 2486947 - RNA, 19 nt, Human
uggagcccacuguacuugc

SEQ ID NO: 2486948 - RNA, 16 nt, Human
uggagcccacuguacu

SEQ ID NO: 2486949 - RNA, 20 nt, Human
uggagaagccacaggccuga

SEQ ID NO: 2486950 - RNA, 19 nt, Human
uggagaagccacaggccug

SEQ ID NO: 2486951 - RNA, 18 nt, Human
uggagaagccacaggccu

SEQ ID NO: 2486952 - RNA, 16 nt, Human
uggagaagagaggaga

SEQ ID NO: 2486953 - RNA, 13 nt, Human
uggagaagcagug

SEQ ID NO: 2486954 - RNA, 16 nt, Human
uggagaagaacugaaa

SEQ ID NO: 2486955 - RNA, 19 nt, Human
uggagaagagaggagagga

SEQ ID NO: 2486956 - RNA, 14 nt, Human
uggagaagagagga

SEQ ID NO: 2486957 - RNA, 20 nt, Human
uggagaagagagaggaaagg

SEQ ID NO: 2486958 - RNA, 17 nt, Human
uggagaagacccucccc

SEQ ID NO: 2486959 - RNA, 12 nt, Human
uggagaagagag

SEQ ID NO: 2486960 - RNA, 24 nt, Human
uggacuuuguuaguuucuccaagc

SEQ ID NO: 2486961 - RNA, 14 nt, Human
uggacuuuguucac

SEQ ID NO: 2486962 - RNA, 20 nt, Human
aggcagcucuaaaugucaau

SEQ ID NO: 2486963 - RNA, 22 nt, Human
aggcagccuggacauagagagg

SEQ ID NO: 2486964 - RNA, 20 nt, Human
aggcagccuggacauagaga

SEQ ID NO: 2486965 - RNA, 22 nt, Human
aggcagccccauucugccugcc

SEQ ID NO: 2486966 - RNA, 20 nt, Human
aggcagcccugucugaagga

SEQ ID NO: 2486967 - RNA, 21 nt, Human
aggcagccccauucugccugc

SEQ ID NO: 2486968 - RNA, 20 nt, Human
aggcagccccauucugccug

SEQ ID NO: 2486969 - RNA, 19 nt, Human
aggcagccccauucugccu

SEQ ID NO: 2486970 - RNA, 15 nt, Human
aggcacccaccauca

SEQ ID NO: 2486971 - RNA, 23 nt, Human
aggcaggacaugcugaagccaaa

SEQ ID NO: 2486972 - RNA, 21 nt, Human
aggcaggacaugcugaagcca

SEQ ID NO: 2486973 - RNA, 17 nt, Human
aggcaggagaaucacuu

SEQ ID NO: 2486974 - RNA, 12 nt, Human
aggcagggaagu

SEQ ID NO: 2486975 - RNA, 21 nt, Human
aggcagggaaguguaagaaac

SEQ ID NO: 2486976 - RNA, 13 nt, Human
aggcagggaaguc

SEQ ID NO: 2486977 - RNA, 19 nt, Human
aggcagggaaguccccagg

SEQ ID NO: 2486978 - RNA, 23 nt, Human
aggcagggaaguccccaggcccc

SEQ ID NO: 2486979 - RNA, 16 nt, Human
aggcagggauuugagg

SEQ ID NO: 2486980 - RNA, 15 nt, Human
aggcagggauuugag

SEQ ID NO: 2486981 - RNA, 14 nt, Human
aggcagggauuuga

SEQ ID NO: 2486982 - RNA, 16 nt, Human
aggcagggagggccug

SEQ ID NO: 2486983 - RNA, 12 nt, Human
aggcagggaggg

SEQ ID NO: 2486984 - RNA, 13 nt, Human
aggcagggagggg

SEQ ID NO: 2486985 - RNA, 14 nt, Human
aggcagggagggga

SEQ ID NO: 2486986 - RNA, 16 nt, Human
aggcagggaggggacu

SEQ ID NO: 2486987 - RNA, 20 nt, Human
aggcagcgccaagcaaccug

SEQ ID NO: 2486988 - RNA, 19 nt, Human
aggcagcgccaagcaaccu

SEQ ID NO: 2486989 - RNA, 14 nt, Human
aggcagcgccaagc

SEQ ID NO: 2486990 - RNA, 21 nt, Human
aggcaggaccuucgggcugug

SEQ ID NO: 2486991 - RNA, 22 nt, Human
aggcaggaccuucgggcugugc

SEQ ID NO: 2486992 - RNA, 23 nt, Human
aggcaggaccuucgggcugugcc

SEQ ID NO: 2486993 - RNA, 20 nt, Human
aggcaggaguuucguuuuca

SEQ ID NO: 2486994 - RNA, 12 nt, Human
aggcaggauggc

SEQ ID NO: 2486995 - RNA, 21 nt, Human
aggcagggucucacucugucg

SEQ ID NO: 2486996 - RNA, 20 nt, Human
aggcagggucucacucuguc

SEQ ID NO: 2486997 - RNA, 18 nt, Human
aggcagggucucacucug

SEQ ID NO: 2486998 - RNA, 19 nt, Human
aggcagggucucacucugu

SEQ ID NO: 2486999 - RNA, 14 nt, Human
aggcagguccaggg

SEQ ID NO: 2487000 - RNA, 11 nt, Human
aggcagguccc

SEQ ID NO: 2487001 - RNA, 15 nt, Human
aggcagguagccagg

SEQ ID NO: 2487002 - RNA, 14 nt, Human
aggcagguagccag

SEQ ID NO: 2487003 - RNA, 22 nt, Human
aggcagggucucacucugucgc

SEQ ID NO: 2487004 - RNA, 19 nt, Human
aggcagggccuugcccaga

SEQ ID NO: 2487005 - RNA, 14 nt, Human
aggcagggugcagu

SEQ ID NO: 2487006 - RNA, 20 nt, Human
aggcagggccuugcccagag

SEQ ID NO: 2487007 - RNA, 22 nt, Human
aggcagucgggggcuggccuag

SEQ ID NO: 2487008 - RNA, 21 nt, Human
aggcagucgggggcuggccua

SEQ ID NO: 2487009 - RNA, 20 nt, Human
aggcagucgggggcuggccu

SEQ ID NO: 2487010 - RNA, 19 nt, Human
aggcagucgggggcuggcc

SEQ ID NO: 2487011 - RNA, 18 nt, Human
aggcagucgggggcuggc

SEQ ID NO: 2487012 - RNA, 23 nt, Human
aggcagucgggggcuggccuagg

SEQ ID NO: 2487013 - RNA, 22 nt, Human
aggcagugcaagagacucuggc

SEQ ID NO: 2487014 - RNA, 19 nt, Human
aggcagugaugcuggaugc

SEQ ID NO: 2487015 - RNA, 19 nt, Human
aggcagugggucccacuuc

SEQ ID NO: 2487016 - RNA, 18 nt, Human
aggcagugggucccacuu

SEQ ID NO: 2487017 - RNA, 16 nt, Human
aggcagugggucccac

SEQ ID NO: 2487018 - RNA, 12 nt, Human
aggcaggucccc

SEQ ID NO: 2487019 - RNA, 13 nt, Human
aggcaggucccca

SEQ ID NO: 2487020 - RNA, 14 nt, Human
aggcagguccccag

SEQ ID NO: 2487021 - RNA, 15 nt, Human
aggcagguccccaga

SEQ ID NO: 2487022 - RNA, 16 nt, Human
aggcagguccccagac

SEQ ID NO: 2487023 - RNA, 19 nt, Human
aggcaguaauaaaaagauu

SEQ ID NO: 2487024 - RNA, 16 nt, Human
aggcagguagccaggg

SEQ ID NO: 2487025 - RNA, 21 nt, Human
aggcaggucuugaacuccugg

SEQ ID NO: 2487026 - RNA, 18 nt, Human
aggaugcuuguacauaau

SEQ ID NO: 2487027 - RNA, 22 nt, Human
aggauugcuacuguccuaccca

SEQ ID NO: 2487028 - RNA, 13 nt, Human
aggauuguaaaaa

SEQ ID NO: 2487029 - RNA, 21 nt, Human
aggauugcuugagcccaggag

SEQ ID NO: 2487030 - RNA, 22 nt, Human
aggauugcuugagcccaggagu

SEQ ID NO: 2487031 - RNA, 17 nt, Human
aggauugcuugagccca

SEQ ID NO: 2487032 - RNA, 18 nt, Human
aggauugcuugagcccag

SEQ ID NO: 2487033 - RNA, 19 nt, Human
aggauugcuugagcccagg

SEQ ID NO: 2487034 - RNA, 20 nt, Human
aggauugcuugagcccagga

SEQ ID NO: 2487035 - RNA, 23 nt, Human
aggauuuuaacaaaagcaagacu

SEQ ID NO: 2487036 - RNA, 11 nt, Human
aggauuuuaug

SEQ ID NO: 2487037 - RNA, 14 nt, Human
aggauuuuaugcuu

SEQ ID NO: 2487038 - RNA, 15 nt, Human
aggauuuuaugcuuu

SEQ ID NO: 2487039 - RNA, 19 nt, Human
aggauuuuaacaaaagcaa

SEQ ID NO: 2487040 - RNA, 13 nt, Human
aggauuucguggg

SEQ ID NO: 2487041 - RNA, 20 nt, Human
aggauuucaugauuucauuu

SEQ ID NO: 2487042 - RNA, 19 nt, Human
aggauuucaugauuucauu

SEQ ID NO: 2487043 - RNA, 20 nt, Human
aggauuuaacagucauuuaa

SEQ ID NO: 2487044 - RNA, 18 nt, Human
aggauuuaacagucauuu

SEQ ID NO: 2487045 - RNA, 12 nt, Human
aggauuucaagc

SEQ ID NO: 2487046 - RNA, 21 nt, Human
aggauuuaacagucauuuaaa

SEQ ID NO: 2487047 - RNA, 14 nt, Human
aggauuucaagccu

SEQ ID NO: 2487048 - RNA, 15 nt, Human
aggauuucaagccug

SEQ ID NO: 2487049 - RNA, 16 nt, Human
aggauuucaagccugc

SEQ ID NO: 2487050 - RNA, 16 nt, Human
aggauuuaacagucau

SEQ ID NO: 2487051 - RNA, 12 nt, Human
aggauuuaacag

SEQ ID NO: 2487052 - RNA, 23 nt, Human
aggauuguaaaaaaaaaugccuu

SEQ ID NO: 2487053 - RNA, 19 nt, Human
aggauuguaaaaaaaaaug

SEQ ID NO: 2487054 - RNA, 16 nt, Human
aggauugugauauuuu

SEQ ID NO: 2487055 - RNA, 13 nt, Human
aggaucucucagg

SEQ ID NO: 2487056 - RNA, 22 nt, Human
aggaucuagaauguguuuucug

SEQ ID NO: 2487057 - RNA, 16 nt, Human
aggaucuagaaugugu

SEQ ID NO: 2487058 - RNA, 14 nt, Human
aggaucuagagggg

SEQ ID NO: 2487059 - RNA, 18 nt, Human
aggaucacagugcugaga

SEQ ID NO: 2487060 - RNA, 16 nt, Human
aggaucagauugcaug

SEQ ID NO: 2487061 - RNA, 21 nt, Human
aggauccugagccagauuuca

SEQ ID NO: 2487062 - RNA, 12 nt, Human
aggaucagucug

SEQ ID NO: 2487063 - RNA, 15 nt, Human
aggaugcuuguacau

SEQ ID NO: 2487064 - RNA, 16 nt, Human
aggaugcuuguacaua

SEQ ID NO: 2487065 - RNA, 23 nt, Human
aggaugcuaacaucuaaaaauag

SEQ ID NO: 2487066 - RNA, 22 nt, Human
aggaucucucaggagcacaggc

SEQ ID NO: 2487067 - RNA, 21 nt, Human
aggaucucucaggagcacagg

SEQ ID NO: 2487068 - RNA, 22 nt, Human
aggaugcuaacaucuaaaaaua

SEQ ID NO: 2487069 - RNA, 20 nt, Human
aggaucucucaggagcacag

SEQ ID NO: 2487070 - RNA, 19 nt, Human
aggaucucucaggagcaca

SEQ ID NO: 2487071 - RNA, 15 nt, Human
aggaucucucaggag

SEQ ID NO: 2487072 - RNA, 14 nt, Human
aggaucucucagga

SEQ ID NO: 2487073 - RNA, 22 nt, Human
uggacaccccuuauccaggacu

SEQ ID NO: 2487074 - RNA, 21 nt, Human
uggacaccccuuauccaggac

SEQ ID NO: 2487075 - RNA, 15 nt, Human
uggacaccggaaaca

SEQ ID NO: 2487076 - RNA, 20 nt, Human
uggacaccaggagucccugg

SEQ ID NO: 2487077 - RNA, 20 nt, Human
uggacaccccuuauccagga

SEQ ID NO: 2487078 - RNA, 22 nt, Human
uggacaagcagagguggccaga

SEQ ID NO: 2487079 - RNA, 21 nt, Human
uggacaccaggagucccuggu

SEQ ID NO: 2487080 - RNA, 23 nt, Human
uggaauuuuucauugauaugaaa

SEQ ID NO: 2487081 - RNA, 12 nt, Human
uggaauuuuuca

SEQ ID NO: 2487082 - RNA, 16 nt, Human
uggaauuuguaaguuu

SEQ ID NO: 2487083 - RNA, 14 nt, Human
uggaauuuguaagu

SEQ ID NO: 2487084 - RNA, 19 nt, Human
uggaauuuguaaccucagc

SEQ ID NO: 2487085 - RNA, 18 nt, Human
uggaauuuguaaccucag

SEQ ID NO: 2487086 - RNA, 17 nt, Human
uggaauuuguaaccuca

SEQ ID NO: 2487087 - RNA, 16 nt, Human
uggaauuuguaaccuc

SEQ ID NO: 2487088 - RNA, 22 nt, Human
uggaauuugcaagucauggcug

SEQ ID NO: 2487089 - RNA, 14 nt, Human
uggaauuugaaaca

SEQ ID NO: 2487090 - RNA, 13 nt, Human
aggcaagaggggu

SEQ ID NO: 2487091 - RNA, 21 nt, Human
aggcaagaggggguggagggg

SEQ ID NO: 2487092 - RNA, 17 nt, Human
aggcaagagggggugga

SEQ ID NO: 2487093 - RNA, 24 nt, Human
aggcaagagggguggagacugcuu

SEQ ID NO: 2487094 - RNA, 14 nt, Human
aggcaagcaccucc

SEQ ID NO: 2487095 - RNA, 19 nt, Human
aggcaacugcauuggcuuu

SEQ ID NO: 2487096 - RNA, 16 nt, Human
aggcaacuugggaacu

SEQ ID NO: 2487097 - RNA, 16 nt, Human
aggauuuuaugcuuua

SEQ ID NO: 2487098 - RNA, 12 nt, Human
aggcaagagaau

SEQ ID NO: 2487099 - RNA, 21 nt, Human
aggauauguucacaccuagcg

SEQ ID NO: 2487100 - RNA, 23 nt, Human
aggauauguucacaccuagcguc

SEQ ID NO: 2487101 - RNA, 15 nt, Human
aggaucaagaaagug

SEQ ID NO: 2487102 - RNA, 24 nt, Human
aggaguuugaggcugcagcgagcu

SEQ ID NO: 2487103 - RNA, 14 nt, Human
aggaucacuggagc

SEQ ID NO: 2487104 - RNA, 15 nt, Human
aggaucacuggagcc

SEQ ID NO: 2487105 - RNA, 16 nt, Human
aggaucacuggagccc

SEQ ID NO: 2487106 - RNA, 18 nt, Human
aggaucacuggagcccag

SEQ ID NO: 2487107 - RNA, 19 nt, Human
aggaucacuggagcccagg

SEQ ID NO: 2487108 - RNA, 20 nt, Human
aggaucacuggagcccagga

SEQ ID NO: 2487109 - RNA, 22 nt, Human
aggaucacuggagcccaggagu

SEQ ID NO: 2487110 - RNA, 19 nt, Human
aggaguuucguuuucaaaa

SEQ ID NO: 2487111 - RNA, 12 nt, Human
aggaggccucca

SEQ ID NO: 2487112 - RNA, 16 nt, Human
aggaggccggggccgg

SEQ ID NO: 2487113 - RNA, 18 nt, Human
aggaggccccuggcccag

SEQ ID NO: 2487114 - RNA, 17 nt, Human
aggaggccccuggccca

SEQ ID NO: 2487115 - RNA, 17 nt, Human
aggaggccuccaucuca

SEQ ID NO: 2487116 - RNA, 15 nt, Human
aggaggccuccaucu

SEQ ID NO: 2487117 - RNA, 21 nt, Human
aggaguuugagaccaaccugg

SEQ ID NO: 2487118 - RNA, 16 nt, Human
aggaguuugagaccag

SEQ ID NO: 2487119 - RNA, 19 nt, Human
aggaguuugagaccagccu

SEQ ID NO: 2487120 - RNA, 19 nt, Human
aggaguuugaggcugcagc

SEQ ID NO: 2487121 - RNA, 20 nt, Human
aggaguuugaggcugcagcg

SEQ ID NO: 2487122 - RNA, 23 nt, Human
aggaggccaccucuccaagggcu

SEQ ID NO: 2487123 - RNA, 22 nt, Human
aggaggccaccucuccaagggc

SEQ ID NO: 2487124 - RNA, 20 nt, Human
aggaggccaccucuccaagg

SEQ ID NO: 2487125 - RNA, 19 nt, Human
aggaggccaccucuccaag

SEQ ID NO: 2487126 - RNA, 18 nt, Human
aggaggccaccucuccaa

SEQ ID NO: 2487127 - RNA, 17 nt, Human
aggaggccaccucucca

SEQ ID NO: 2487128 - RNA, 16 nt, Human
aggaggccaccucucc

SEQ ID NO: 2487129 - RNA, 15 nt, Human
aggaggccaccucuc

SEQ ID NO: 2487130 - RNA, 20 nt, Human
uggaagugugggucugugug

SEQ ID NO: 2487131 - RNA, 14 nt, Human
aggaggccaccucu

SEQ ID NO: 2487132 - RNA, 19 nt, Human
aggaggccacgugaugugg

SEQ ID NO: 2487133 - RNA, 14 nt, Human
aggaggccacguga

SEQ ID NO: 2487134 - RNA, 13 nt, Human
aggaggccaggcc

SEQ ID NO: 2487135 - RNA, 12 nt, Human
aggaggccccug

SEQ ID NO: 2487136 - RNA, 16 nt, Human
aggaggccaggcucag

SEQ ID NO: 2487137 - RNA, 22 nt, Human
aggaggccaggccggcgagccc

SEQ ID NO: 2487138 - RNA, 15 nt, Human
aggaggccagccuug

SEQ ID NO: 2487139 - RNA, 13 nt, Human
uggaagugugggu

SEQ ID NO: 2487140 - RNA, 14 nt, Human
uggaaguguggguc

SEQ ID NO: 2487141 - RNA, 14 nt, Human
uggaagugcuaauu

SEQ ID NO: 2487142 - RNA, 15 nt, Human
uggaagugacuuugg

SEQ ID NO: 2487143 - RNA, 17 nt, Human
uggaagugacuuuggcu

SEQ ID NO: 2487144 - RNA, 23 nt, Human
uggaagugacuuuggcugcaugc

SEQ ID NO: 2487145 - RNA, 14 nt, Human
uggaagugaggcau

SEQ ID NO: 2487146 - RNA, 15 nt, Human
uggaagcuguguccu

SEQ ID NO: 2487147 - RNA, 16 nt, Human
uggaagugaggcauug

SEQ ID NO: 2487148 - RNA, 18 nt, Human
uggaagugagggucagag

SEQ ID NO: 2487149 - RNA, 19 nt, Human
uggaagugagggucagaga

SEQ ID NO: 2487150 - RNA, 21 nt, Human
uggaagugagggucagagagg

SEQ ID NO: 2487151 - RNA, 10 nt, Human
ugcugcccug

SEQ ID NO: 2487152 - RNA, 17 nt, Human
ugcugcccgucuucagc

SEQ ID NO: 2487153 - RNA, 20 nt, Human
ugcugcccgucuucagccua

SEQ ID NO: 2487154 - RNA, 21 nt, Human
ugcugcccgucuucagccuag

SEQ ID NO: 2487155 - RNA, 21 nt, Human
ugcugcccaugccaccgcuuc

SEQ ID NO: 2487156 - RNA, 18 nt, Human
ugcugccccaucagugcu

SEQ ID NO: 2487157 - RNA, 19 nt, Human
ugcugccccaucagugcuc

SEQ ID NO: 2487158 - RNA, 21 nt, Human
ugcugccccaucagugcuccc

SEQ ID NO: 2487159 - RNA, 20 nt, Human
ugcugcccccaccccgggga

SEQ ID NO: 2487160 - RNA, 22 nt, Human
ugcugcccccaccccggggacc

SEQ ID NO: 2487161 - RNA, 15 nt, Human
ugcugcccccacccc

SEQ ID NO: 2487162 - RNA, 14 nt, Human
ugcugcccccaccc

SEQ ID NO: 2487163 - RNA, 17 nt, Human
uggaacacggccacauc

SEQ ID NO: 2487164 - RNA, 21 nt, Human
uggaacaaucuaaaaguuuaa

SEQ ID NO: 2487165 - RNA, 22 nt, Human
uggaacaccuaccaaaaaauaa

SEQ ID NO: 2487166 - RNA, 15 nt, Human
uggaacacggccaca

SEQ ID NO: 2487167 - RNA, 12 nt, Human
ugcugcccugcc

SEQ ID NO: 2487168 - RNA, 13 nt, Human
ugcugcccuccau

SEQ ID NO: 2487169 - RNA, 22 nt, Human
ugcugcccgucuucagccuagc

SEQ ID NO: 2487170 - RNA, 17 nt, Human
ugcugcccgcucugcag

SEQ ID NO: 2487171 - RNA, 14 nt, Human
ugcugcccuaggcu

SEQ ID NO: 2487172 - RNA, 12 nt, Human
uggaacacucug

SEQ ID NO: 2487173 - RNA, 16 nt, Human
uggaagcuaauuugca

SEQ ID NO: 2487174 - RNA, 17 nt, Human
uggaagcuaauuugcau

SEQ ID NO: 2487175 - RNA, 14 nt, Human
uggaacacucugag

SEQ ID NO: 2487176 - RNA, 14 nt, Human
uggaagcuagcucc

SEQ ID NO: 2487177 - RNA, 12 nt, Human
uggaagcuagcu

SEQ ID NO: 2487178 - RNA, 18 nt, Human
uggaagcuaauuugcauu

SEQ ID NO: 2487179 - RNA, 13 nt, Human
uggaagcuccgcu

SEQ ID NO: 2487180 - RNA, 17 nt, Human
uggaagcugcccugccc

SEQ ID NO: 2487181 - RNA, 18 nt, Human
uggaagcugcccugccca

SEQ ID NO: 2487182 - RNA, 20 nt, Human
uggaagcuagcuccccuccu

SEQ ID NO: 2487183 - RNA, 18 nt, Human
uggaagcuagcuccccuc

SEQ ID NO: 2487184 - RNA, 22 nt, Human
uggaagcuagcuccccuccucu

SEQ ID NO: 2487185 - RNA, 17 nt, Human
uggaagccggcggccca

SEQ ID NO: 2487186 - RNA, 20 nt, Human
uggaaguacuauaauuuacc

SEQ ID NO: 2487187 - RNA, 17 nt, Human
uggaaguccaauguggc

SEQ ID NO: 2487188 - RNA, 16 nt, Human
uggaagcuguguccuu

SEQ ID NO: 2487189 - RNA, 16 nt, Human
aggccugacucucagc

SEQ ID NO: 2487190 - RNA, 22 nt, Human
aggccuggacuuuccugcaacu

SEQ ID NO: 2487191 - RNA, 19 nt, Human
aggccuggacuuuccugca

SEQ ID NO: 2487192 - RNA, 18 nt, Human
aggccuggacuuuccugc

SEQ ID NO: 2487193 - RNA, 12 nt, Human
aggccuggccag

SEQ ID NO: 2487194 - RNA, 15 nt, Human
aggccuggcacagug

SEQ ID NO: 2487195 - RNA, 14 nt, Human
aggccuggcacagu

SEQ ID NO: 2487196 - RNA, 13 nt, Human
aggccuggcacag

SEQ ID NO: 2487197 - RNA, 17 nt, Human
aggccuggacuuuccug

SEQ ID NO: 2487198 - RNA, 18 nt, Human
aggccuggcacagugucu

SEQ ID NO: 2487199 - RNA, 16 nt, Human
aggccuggcacagugu

SEQ ID NO: 2487200 - RNA, 23 nt, Human
aggccuggcacagugucugggcu

SEQ ID NO: 2487201 - RNA, 11 nt, Human
aggccuggcca

SEQ ID NO: 2487202 - RNA, 18 nt, Human
uggcaucagcuggcguca

SEQ ID NO: 2487203 - RNA, 15 nt, Human
uggcaucagcuggcg

SEQ ID NO: 2487204 - RNA, 13 nt, Human
aggccuggccaga

SEQ ID NO: 2487205 - RNA, 15 nt, Human
uggcaucacagggca

SEQ ID NO: 2487206 - RNA, 18 nt, Human
uggcaucacagggcagag

SEQ ID NO: 2487207 - RNA, 20 nt, Human
uggcaucacagggcagagcc

SEQ ID NO: 2487208 - RNA, 14 nt, Human
uggcaucagcuggc

SEQ ID NO: 2487209 - RNA, 23 nt, Human
uggcaucaccuuaggcagggaag

SEQ ID NO: 2487210 - RNA, 24 nt, Human
aggccucuuggaccucugcucuga

SEQ ID NO: 2487211 - RNA, 23 nt, Human
aggccucuuggaccucugcucug

SEQ ID NO: 2487212 - RNA, 22 nt, Human
aggccucuuggaccucugcucu

SEQ ID NO: 2487213 - RNA, 21 nt, Human
aggccucuuggaccucugcuc

SEQ ID NO: 2487214 - RNA, 18 nt, Human
aggccucuuggaccucug

SEQ ID NO: 2487215 - RNA, 23 nt, Human
aggccucuguguccuucccugca

SEQ ID NO: 2487216 - RNA, 22 nt, Human
aggccucuguguccuucccugc

SEQ ID NO: 2487217 - RNA, 21 nt, Human
aggccugaaagaggcugaggc

SEQ ID NO: 2487218 - RNA, 17 nt, Human
aggccugaaagaggcug

SEQ ID NO: 2487219 - RNA, 23 nt, Human
aggccugaaagaggcugaggccu

SEQ ID NO: 2487220 - RNA, 18 nt, Human
aggccugaaaggagcccu

SEQ ID NO: 2487221 - RNA, 20 nt, Human
aggccucuguguccuucccu

SEQ ID NO: 2487222 - RNA, 16 nt, Human
aggccucuguguccuu

SEQ ID NO: 2487223 - RNA, 15 nt, Human
aggccucuguguccu

SEQ ID NO: 2487224 - RNA, 14 nt, Human
aggccucugugucc

SEQ ID NO: 2487225 - RNA, 16 nt, Human
aggccuauaaccccag

SEQ ID NO: 2487226 - RNA, 16 nt, Human
aggccuaaaaguaaac

SEQ ID NO: 2487227 - RNA, 22 nt, Human
aggccuaccccgcagacaccuu

SEQ ID NO: 2487228 - RNA, 19 nt, Human
aggccuaccccgcagacac

SEQ ID NO: 2487229 - RNA, 16 nt, Human
aggccuaccccgcaga

SEQ ID NO: 2487230 - RNA, 23 nt, Human
aggccuacaugcuuugugaacaa

SEQ ID NO: 2487231 - RNA, 17 nt, Human
aggccuaaaaguaaaca

SEQ ID NO: 2487232 - RNA, 22 nt, Human
aggccuacaugcuuugugaaca

SEQ ID NO: 2487233 - RNA, 20 nt, Human
aggccguggcugcccacaca

SEQ ID NO: 2487234 - RNA, 12 nt, Human
aggccccuggcc

SEQ ID NO: 2487235 - RNA, 21 nt, Human
aggccccugccacccugggga

SEQ ID NO: 2487236 - RNA, 18 nt, Human
aggccccugccacccugg

SEQ ID NO: 2487237 - RNA, 17 nt, Human
aggccccugccacccug

SEQ ID NO: 2487238 - RNA, 20 nt, Human
aggcccagagggccugcaag

SEQ ID NO: 2487239 - RNA, 19 nt, Human
aggcccagagggccugcaa

SEQ ID NO: 2487240 - RNA, 15 nt, Human
aggccccugccaccc

SEQ ID NO: 2487241 - RNA, 13 nt, Human
aggccccugccac

SEQ ID NO: 2487242 - RNA, 21 nt, Human
aggccgggccgaauccccucc

SEQ ID NO: 2487243 - RNA, 20 nt, Human
aggccccuggcccagcggcc

SEQ ID NO: 2487244 - RNA, 16 nt, Human
aggccccuggcccagc

SEQ ID NO: 2487245 - RNA, 21 nt, Human
aggccguccucccgggcccuc

SEQ ID NO: 2487246 - RNA, 17 nt, Human
aggccguccucccgggc

SEQ ID NO: 2487247 - RNA, 16 nt, Human
aggccguccucccggg

SEQ ID NO: 2487248 - RNA, 13 nt, Human
aggccguccuccc

SEQ ID NO: 2487249 - RNA, 19 nt, Human
aggccggggccggguacug

SEQ ID NO: 2487250 - RNA, 15 nt, Human
aggccggggccgggu

SEQ ID NO: 2487251 - RNA, 20 nt, Human
aggccgggugcucagggcug

SEQ ID NO: 2487252 - RNA, 22 nt, Human
aggccguccucccgggcccucc

SEQ ID NO: 2487253 - RNA, 12 nt, Human
aggccguggcug

SEQ ID NO: 2487254 - RNA, 16 nt, Human
aggcccggcuccaggc

SEQ ID NO: 2487255 - RNA, 15 nt, Human
aggcccggcuccagg

SEQ ID NO: 2487256 - RNA, 14 nt, Human
aggcccggcuccag

SEQ ID NO: 2487257 - RNA, 15 nt, Human
aggccccuggcccag

SEQ ID NO: 2487258 - RNA, 14 nt, Human
aggccccuggccca

SEQ ID NO: 2487259 - RNA, 17 nt, Human
aggccccuggacaagca

SEQ ID NO: 2487260 - RNA, 21 nt, Human
aggccccugucucagggugag

SEQ ID NO: 2487261 - RNA, 16 nt, Human
aggcccagagggccug

SEQ ID NO: 2487262 - RNA, 15 nt, Human
aggcccagagggccu

SEQ ID NO: 2487263 - RNA, 23 nt, Human
aggccauguuccaauaaacagga

SEQ ID NO: 2487264 - RNA, 13 nt, Human
aggccauuauugu

SEQ ID NO: 2487265 - RNA, 20 nt, Human
aggccauuccccgucucugg

SEQ ID NO: 2487266 - RNA, 23 nt, Human
aggccagagacacaagccuucgg

SEQ ID NO: 2487267 - RNA, 21 nt, Human
aggccauguuccaauaaacag

SEQ ID NO: 2487268 - RNA, 20 nt, Human
aggccauguuccaauaaaca

SEQ ID NO: 2487269 - RNA, 18 nt, Human
aggccaugggccuccugu

SEQ ID NO: 2487270 - RNA, 18 nt, Human
aggccagagacacaagcc

SEQ ID NO: 2487271 - RNA, 13 nt, Human
aggccagagacac

SEQ ID NO: 2487272 - RNA, 18 nt, Human
uggcagcucagagagggu

SEQ ID NO: 2487273 - RNA, 16 nt, Human
uggcagcucagagagg

SEQ ID NO: 2487274 - RNA, 15 nt, Human
uggcagcucagagag

SEQ ID NO: 2487275 - RNA, 14 nt, Human
uggcagcucagaga

SEQ ID NO: 2487276 - RNA, 21 nt, Human
uggcagccgugccuucagcuc

SEQ ID NO: 2487277 - RNA, 20 nt, Human
uggcagccgugccuucagcu

SEQ ID NO: 2487278 - RNA, 19 nt, Human
uggcagccgugccuucagc

SEQ ID NO: 2487279 - RNA, 18 nt, Human
uggcagccgugccuucag

SEQ ID NO: 2487280 - RNA, 16 nt, Human
aggcaucaugcagagu

SEQ ID NO: 2487281 - RNA, 20 nt, Human
aggcaucagucccuauguau

SEQ ID NO: 2487282 - RNA, 19 nt, Human
aggcaucagucccuaugua

SEQ ID NO: 2487283 - RNA, 14 nt, Human
aggcaucacagcua

SEQ ID NO: 2487284 - RNA, 22 nt, Human
aggcauauugcuuuuucuaaug

SEQ ID NO: 2487285 - RNA, 20 nt, Human
aggcauauugcuuuuucuaa

SEQ ID NO: 2487286 - RNA, 20 nt, Human
aggcauaucagucucugagg

SEQ ID NO: 2487287 - RNA, 20 nt, Human
aggcauaggccugggugcug

SEQ ID NO: 2487288 - RNA, 16 nt, Human
aggcauaggccugggu

SEQ ID NO: 2487289 - RNA, 17 nt, Human
aggcauaggccugggug

SEQ ID NO: 2487290 - RNA, 18 nt, Human
aggcauaggccugggugc

SEQ ID NO: 2487291 - RNA, 19 nt, Human
aggcauaggccugggugcu

SEQ ID NO: 2487292 - RNA, 13 nt, Human
aggcaucccaggg

SEQ ID NO: 2487293 - RNA, 16 nt, Human
aggcaucccaggggac

SEQ ID NO: 2487294 - RNA, 17 nt, Human
aggcaucccaggggacc

SEQ ID NO: 2487295 - RNA, 18 nt, Human
aggcaucccaggggacca

SEQ ID NO: 2487296 - RNA, 18 nt, Human
aggcauccuuccucacac

SEQ ID NO: 2487297 - RNA, 22 nt, Human
uggcacacaccuguagucccag

SEQ ID NO: 2487298 - RNA, 23 nt, Human
aggcaucccaggggaccacaccu

SEQ ID NO: 2487299 - RNA, 14 nt, Human
uggcacagaaacac

SEQ ID NO: 2487300 - RNA, 20 nt, Human
aggcauccuuccucacacca

SEQ ID NO: 2487301 - RNA, 16 nt, Human
uggcacaggcccccuu

SEQ ID NO: 2487302 - RNA, 15 nt, Human
uggcacagggcagug

SEQ ID NO: 2487303 - RNA, 20 nt, Human
uggcaccagacacccaggac

SEQ ID NO: 2487304 - RNA, 21 nt, Human
uggcaccagacacccaggacu

SEQ ID NO: 2487305 - RNA, 14 nt, Human
uggcacaggacaug

SEQ ID NO: 2487306 - RNA, 18 nt, Human
uggcacagcccaaagaag

SEQ ID NO: 2487307 - RNA, 22 nt, Human
uggcacagaaaccucuacuaaa

SEQ ID NO: 2487308 - RNA, 20 nt, Human
uggcacagcccaaagaagga

SEQ ID NO: 2487309 - RNA, 23 nt, Human
uggcaccagacacccaggacuua

SEQ ID NO: 2487310 - RNA, 14 nt, Human
uggcaccagaggcu

SEQ ID NO: 2487311 - RNA, 17 nt, Human
uggcaccagacacccag

SEQ ID NO: 2487312 - RNA, 20 nt, Human
uggcaccagaggcugcagaa

SEQ ID NO: 2487313 - RNA, 19 nt, Human
uggcaccagaggcugcaga

SEQ ID NO: 2487314 - RNA, 23 nt, Human
uggcaccagaggcugcagaaggc

SEQ ID NO: 2487315 - RNA, 16 nt, Human
uggcaccagcagccug

SEQ ID NO: 2487316 - RNA, 17 nt, Human
uggcaccagcagccugg

SEQ ID NO: 2487317 - RNA, 14 nt, Human
uggcagcauaaagg

SEQ ID NO: 2487318 - RNA, 13 nt, Human
uggcagcauaaag

SEQ ID NO: 2487319 - RNA, 21 nt, Human
uggcagcaggugcugcuaccc

SEQ ID NO: 2487320 - RNA, 20 nt, Human
uggcagcaggugcugcuacc

SEQ ID NO: 2487321 - RNA, 17 nt, Human
uggcagccgugccuuca

SEQ ID NO: 2487322 - RNA, 17 nt, Human
uggcagcaggugcugcu

SEQ ID NO: 2487323 - RNA, 16 nt, Human
uggcagcaggugcugc

SEQ ID NO: 2487324 - RNA, 15 nt, Human
uggcagcaggugcug

SEQ ID NO: 2487325 - RNA, 11 nt, Human
uggcagcagau

SEQ ID NO: 2487326 - RNA, 14 nt, Human
uggcagcagagugu

SEQ ID NO: 2487327 - RNA, 20 nt, Human
uggcagcagaguguggccuu

SEQ ID NO: 2487328 - RNA, 13 nt, Human
uggcagcaggugc

SEQ ID NO: 2487329 - RNA, 18 nt, Human
uggcagcaccugucuccu

SEQ ID NO: 2487330 - RNA, 22 nt, Human
uggcagauuuagugaaagcuag

SEQ ID NO: 2487331 - RNA, 22 nt, Human
uggcaugggaaugaaugucagu

SEQ ID NO: 2487332 - RNA, 15 nt, Human
uggcaucccaguggc

SEQ ID NO: 2487333 - RNA, 19 nt, Human
uggcaucccaguggccuca

SEQ ID NO: 2487334 - RNA, 19 nt, Human
uggcauuacagcuggagaa

SEQ ID NO: 2487335 - RNA, 17 nt, Human
uggcauuagaauuauuu

SEQ ID NO: 2487336 - RNA, 13 nt, Human
uggcauuaugucc

SEQ ID NO: 2487337 - RNA, 18 nt, Human
uggcauguggccuguggc

SEQ ID NO: 2487338 - RNA, 17 nt, Human
uggcauguggccugugg

SEQ ID NO: 2487339 - RNA, 12 nt, Human
uggcauguguuu

SEQ ID NO: 2487340 - RNA, 16 nt, Human
uggcauguggccugug

SEQ ID NO: 2487341 - RNA, 15 nt, Human
uggcauguggccugu

SEQ ID NO: 2487342 - RNA, 14 nt, Human
uggcauguggccug

SEQ ID NO: 2487343 - RNA, 19 nt, Human
uggcccacgcacuucggga

SEQ ID NO: 2487344 - RNA, 13 nt, Human
uggcauuggcagc

SEQ ID NO: 2487345 - RNA, 23 nt, Human
uggcauuauguccacuguguaua

SEQ ID NO: 2487346 - RNA, 20 nt, Human
uggcccacgccuguaauccc

SEQ ID NO: 2487347 - RNA, 13 nt, Human
uggcccacugcau

SEQ ID NO: 2487348 - RNA, 14 nt, Human
uggcccacugcauc

SEQ ID NO: 2487349 - RNA, 21 nt, Human
uggcccugccaucuucccagc

SEQ ID NO: 2487350 - RNA, 19 nt, Human
uggcccugccaucuuccca

SEQ ID NO: 2487351 - RNA, 15 nt, Human
uggcccugcaaaagg

SEQ ID NO: 2487352 - RNA, 12 nt, Human
uggcccugcccu

SEQ ID NO: 2487353 - RNA, 15 nt, Human
uggcccucuguguug

SEQ ID NO: 2487354 - RNA, 23 nt, Human
uggcccugaggugugggggcugc

SEQ ID NO: 2487355 - RNA, 18 nt, Human
uggcccugaggugugggg

SEQ ID NO: 2487356 - RNA, 16 nt, Human
uggcccugaggugugg

SEQ ID NO: 2487357 - RNA, 17 nt, Human
uggcccaggaccaucau

SEQ ID NO: 2487358 - RNA, 23 nt, Human
uggcccucaaggccucccacagu

SEQ ID NO: 2487359 - RNA, 16 nt, Human
uggcccucaccccugc

SEQ ID NO: 2487360 - RNA, 18 nt, Human
uggcccucaccccugccc

SEQ ID NO: 2487361 - RNA, 14 nt, Human
uggcccucuacccc

SEQ ID NO: 2487362 - RNA, 21 nt, Human
uggcccucccaguaccuccug

SEQ ID NO: 2487363 - RNA, 20 nt, Human
uggcccucaccccugcccug

SEQ ID NO: 2487364 - RNA, 14 nt, Human
uggcccucaguuuc

SEQ ID NO: 2487365 - RNA, 22 nt, Human
uggcccagcucccccgggaggg

SEQ ID NO: 2487366 - RNA, 15 nt, Human
uggcccagcucccca

SEQ ID NO: 2487367 - RNA, 14 nt, Human
uggcccagcucccc

SEQ ID NO: 2487368 - RNA, 13 nt, Human
uggcccagcuccc

SEQ ID NO: 2487369 - RNA, 12 nt, Human
uggcccagcucc

SEQ ID NO: 2487370 - RNA, 21 nt, Human
uggcccagcggccccucccac

SEQ ID NO: 2487371 - RNA, 20 nt, Human
uggcccagcggccccuccca

SEQ ID NO: 2487372 - RNA, 19 nt, Human
uggcccagcggccccuccc

SEQ ID NO: 2487373 - RNA, 17 nt, Human
uggcccagcggccccuc

SEQ ID NO: 2487374 - RNA, 16 nt, Human
uggcccagcggccccu

SEQ ID NO: 2487375 - RNA, 14 nt, Human
uggcccagcggccc

SEQ ID NO: 2487376 - RNA, 23 nt, Human
uggcccagccggccucucuggcc

SEQ ID NO: 2487377 - RNA, 22 nt, Human
uggcccagccggccucucuggc

SEQ ID NO: 2487378 - RNA, 18 nt, Human
uggcccagccggccucuc

SEQ ID NO: 2487379 - RNA, 17 nt, Human
uggcccagccggccucu

SEQ ID NO: 2487380 - RNA, 15 nt, Human
uggcccagccggccu

SEQ ID NO: 2487381 - RNA, 13 nt, Human
uggcccagccggc

SEQ ID NO: 2487382 - RNA, 11 nt, Human
uggcccagccg

SEQ ID NO: 2487383 - RNA, 20 nt, Human
uggcccagcccugcuggccg

SEQ ID NO: 2487384 - RNA, 19 nt, Human
uggcccagcccugcuggcc

SEQ ID NO: 2487385 - RNA, 17 nt, Human
uggcccagcccugcugg

SEQ ID NO: 2487386 - RNA, 15 nt, Human
uggcccagcccugcu

SEQ ID NO: 2487387 - RNA, 14 nt, Human
uggcccagcccugc

SEQ ID NO: 2487388 - RNA, 13 nt, Human
uggcccagcccug

SEQ ID NO: 2487389 - RNA, 12 nt, Human
uggcccagcccu

SEQ ID NO: 2487390 - RNA, 10 nt, Human
uggcccagcc

SEQ ID NO: 2487391 - RNA, 18 nt, Human
uggcauuauguccacugu

SEQ ID NO: 2487392 - RNA, 22 nt, Human
uggcccagccaaacccugucug

SEQ ID NO: 2487393 - RNA, 23 nt, Human
uggcccugucccucccaccucug

SEQ ID NO: 2487394 - RNA, 22 nt, Human
uggcccugucccucccaccucu

SEQ ID NO: 2487395 - RNA, 21 nt, Human
uggcccugucccucccaccuc

SEQ ID NO: 2487396 - RNA, 19 nt, Human
uggcccuucccacuggagg

SEQ ID NO: 2487397 - RNA, 20 nt, Human
uggcccugucccucccaccu

SEQ ID NO: 2487398 - RNA, 19 nt, Human
uggcccugucccucccacc

SEQ ID NO: 2487399 - RNA, 17 nt, Human
uggcccugucccuccca

SEQ ID NO: 2487400 - RNA, 13 nt, Human
uggcccugcccug

SEQ ID NO: 2487401 - RNA, 18 nt, Human
uggccgaggguccuggcu

SEQ ID NO: 2487402 - RNA, 23 nt, Human
uggcccuugcaguucagcaccac

SEQ ID NO: 2487403 - RNA, 22 nt, Human
uggcccuugcaguucagcacca

SEQ ID NO: 2487404 - RNA, 20 nt, Human
uggccucugcacuccccugc

SEQ ID NO: 2487405 - RNA, 15 nt, Human
uggccgaguccaagc

SEQ ID NO: 2487406 - RNA, 21 nt, Human
uggccucugcugauccuccca

SEQ ID NO: 2487407 - RNA, 19 nt, Human
uggccucugcacuccccug

SEQ ID NO: 2487408 - RNA, 18 nt, Human
uggccucugcacuccccu

SEQ ID NO: 2487409 - RNA, 19 nt, Human
uggccgaggguccuggcuc

SEQ ID NO: 2487410 - RNA, 20 nt, Human
uggccgaggguccuggcucc

SEQ ID NO: 2487411 - RNA, 15 nt, Human
uggccuguggccugu

SEQ ID NO: 2487412 - RNA, 14 nt, Human
uggccuguguccca

SEQ ID NO: 2487413 - RNA, 24 nt, Human
uggccugucucauccccagggguc

SEQ ID NO: 2487414 - RNA, 14 nt, Human
uggccugucucauc

SEQ ID NO: 2487415 - RNA, 16 nt, Human
uggccugucucauccc

SEQ ID NO: 2487416 - RNA, 18 nt, Human
uggccugucucaucccca

SEQ ID NO: 2487417 - RNA, 20 nt, Human
uggccugucucauccccagg

SEQ ID NO: 2487418 - RNA, 17 nt, Human
uggccugggccuccuca

SEQ ID NO: 2487419 - RNA, 14 nt, Human
uggccugggccucc

SEQ ID NO: 2487420 - RNA, 12 nt, Human
uggccugucuca

SEQ ID NO: 2487421 - RNA, 12 nt, Human
uggccugcugug

SEQ ID NO: 2487422 - RNA, 13 nt, Human
uggccuggacugu

SEQ ID NO: 2487423 - RNA, 17 nt, Human
uggccugggagagcugg

SEQ ID NO: 2487424 - RNA, 11 nt, Human
uggccugggca

SEQ ID NO: 2487425 - RNA, 22 nt, Human
uggccugaucagaccacggcuc

SEQ ID NO: 2487426 - RNA, 18 nt, Human
uggccugagcugggauga

SEQ ID NO: 2487427 - RNA, 16 nt, Human
uggccucuggcucuca

SEQ ID NO: 2487428 - RNA, 23 nt, Human
uggccucuguggagccccagcau

SEQ ID NO: 2487429 - RNA, 23 nt, Human
uggccugcacggugggccuugcu

SEQ ID NO: 2487430 - RNA, 21 nt, Human
uggccugcacggugggccuug

SEQ ID NO: 2487431 - RNA, 14 nt, Human
uggccugcacuaau

SEQ ID NO: 2487432 - RNA, 16 nt, Human
uggccugcacuaauuu

SEQ ID NO: 2487433 - RNA, 20 nt, Human
uggccugcugggcucuccac

SEQ ID NO: 2487434 - RNA, 18 nt, Human
uggccugccuugaagcca

SEQ ID NO: 2487435 - RNA, 24 nt, Human
uggccugcacggugggccuugcug

SEQ ID NO: 2487436 - RNA, 21 nt, Human
uggccugcugggcucuccacc

SEQ ID NO: 2487437 - RNA, 11 nt, Human
uggccugcugu

SEQ ID NO: 2487438 - RNA, 22 nt, Human
uggccugcugggcucuccaccu

SEQ ID NO: 2487439 - RNA, 14 nt, Human
aggcgccggcgggc

SEQ ID NO: 2487440 - RNA, 14 nt, Human
aggcgccccuuccc

SEQ ID NO: 2487441 - RNA, 23 nt, Human
aggcgcacuuuccuccuggcaga

SEQ ID NO: 2487442 - RNA, 22 nt, Human
aggcgcacuuuccuccuggcag

SEQ ID NO: 2487443 - RNA, 21 nt, Human
aggcgcagugcuucucuacag

SEQ ID NO: 2487444 - RNA, 22 nt, Human
aggcgcacugugacccccagcu

SEQ ID NO: 2487445 - RNA, 21 nt, Human
aggcgcacuuuccuccuggca

SEQ ID NO: 2487446 - RNA, 21 nt, Human
aggcgcacugugacccccagc

SEQ ID NO: 2487447 - RNA, 24 nt, Human
aggcgagugccaggacuccccagg

SEQ ID NO: 2487448 - RNA, 20 nt, Human
aggcgaucacaacgugcauu

SEQ ID NO: 2487449 - RNA, 19 nt, Human
aggcgaucacaacgugcau

SEQ ID NO: 2487450 - RNA, 21 nt, Human
aggcgaucacaacgugcauug

SEQ ID NO: 2487451 - RNA, 23 nt, Human
aggcgauccaccugucucagccu

SEQ ID NO: 2487452 - RNA, 14 nt, Human
aggcggccccuccc

SEQ ID NO: 2487453 - RNA, 24 nt, Human
aggcggagaguacagugagccaag

SEQ ID NO: 2487454 - RNA, 20 nt, Human
aggcggagaguacagugagc

SEQ ID NO: 2487455 - RNA, 15 nt, Human
aggcggagaguacag

SEQ ID NO: 2487456 - RNA, 18 nt, Human
aggcggacguuccagccg

SEQ ID NO: 2487457 - RNA, 17 nt, Human
aggcggacguuccagcc

SEQ ID NO: 2487458 - RNA, 15 nt, Human
aggcggacguuccag

SEQ ID NO: 2487459 - RNA, 12 nt, Human
aggcggccccuc

SEQ ID NO: 2487460 - RNA, 16 nt, Human
aggcuauuauuuucac

SEQ ID NO: 2487461 - RNA, 18 nt, Human
aggcuauuauuuucacug

SEQ ID NO: 2487462 - RNA, 19 nt, Human
aggcuauuauuuucacugu

SEQ ID NO: 2487463 - RNA, 21 nt, Human
aggcuauuguccccuaaacca

SEQ ID NO: 2487464 - RNA, 15 nt, Human
aggccuugcgcuguu

SEQ ID NO: 2487465 - RNA, 21 nt, Human
uggccugugucccaugaccca

SEQ ID NO: 2487466 - RNA, 11 nt, Human
aggccuugcuc

SEQ ID NO: 2487467 - RNA, 22 nt, Human
uggccugugucccaugacccac

SEQ ID NO: 2487468 - RNA, 20 nt, Human
uggccugugucccaugaccc

SEQ ID NO: 2487469 - RNA, 16 nt, Human
uggccugugucccaug

SEQ ID NO: 2487470 - RNA, 13 nt, Human
uggccuguucugu

SEQ ID NO: 2487471 - RNA, 9 nt, Human
aggccuugc

SEQ ID NO: 2487472 - RNA, 18 nt, Human
aggccuucucugaaggac

SEQ ID NO: 2487473 - RNA, 17 nt, Human
aggccuucucugaagga

SEQ ID NO: 2487474 - RNA, 16 nt, Human
aggccuuuuggaaugu

SEQ ID NO: 2487475 - RNA, 18 nt, Human
aggcgagugccaggacuc

SEQ ID NO: 2487476 - RNA, 17 nt, Human
aggcgagugccaggacu

SEQ ID NO: 2487477 - RNA, 15 nt, Human
aggcgagugccagga

SEQ ID NO: 2487478 - RNA, 14 nt, Human
aggcgagugccagg

SEQ ID NO: 2487479 - RNA, 14 nt, Human
aggccuugucccag

SEQ ID NO: 2487480 - RNA, 14 nt, Human
aggccuuuaaaauu

SEQ ID NO: 2487481 - RNA, 15 nt, Human
aggccuuuaaaauuu

SEQ ID NO: 2487482 - RNA, 21 nt, Human
aggccuuuagauauuauucau

SEQ ID NO: 2487483 - RNA, 24 nt, Human
aggcucacugccaggccagccucc

SEQ ID NO: 2487484 - RNA, 23 nt, Human
aggcucacugccaggccagccuc

SEQ ID NO: 2487485 - RNA, 22 nt, Human
aggcucacugccaggccagccu

SEQ ID NO: 2487486 - RNA, 21 nt, Human
aggcucacugccaggccagcc

SEQ ID NO: 2487487 - RNA, 20 nt, Human
aggcucacugccaggccagc

SEQ ID NO: 2487488 - RNA, 19 nt, Human
aggcucacugccaggccag

SEQ ID NO: 2487489 - RNA, 17 nt, Human
aggcucacugccaggcc

SEQ ID NO: 2487490 - RNA, 16 nt, Human
aggcucacugccaggc

SEQ ID NO: 2487491 - RNA, 14 nt, Human
aggcucagagaugu

SEQ ID NO: 2487492 - RNA, 13 nt, Human
aggcucagagaug

SEQ ID NO: 2487493 - RNA, 11 nt, Human
aggcucagaga

SEQ ID NO: 2487494 - RNA, 16 nt, Human
aggcucaacuagggag

SEQ ID NO: 2487495 - RNA, 15 nt, Human
aggcucaacuaggga

SEQ ID NO: 2487496 - RNA, 16 nt, Human
aggcucacccccuucu

SEQ ID NO: 2487497 - RNA, 19 nt, Human
aggcucacccccuucucca

SEQ ID NO: 2487498 - RNA, 15 nt, Human
aggcucacugccagg

SEQ ID NO: 2487499 - RNA, 14 nt, Human
aggcucacugccag

SEQ ID NO: 2487500 - RNA, 13 nt, Human
aggcucacugcca

SEQ ID NO: 2487501 - RNA, 12 nt, Human
aggcucacugcc

SEQ ID NO: 2487502 - RNA, 21 nt, Human
aggcucacccccuucuccauc

SEQ ID NO: 2487503 - RNA, 23 nt, Human
aggcucacccccuucuccaucca

SEQ ID NO: 2487504 - RNA, 16 nt, Human
aggcucaggucccugg

SEQ ID NO: 2487505 - RNA, 16 nt, Human
aggcucagucucagga

SEQ ID NO: 2487506 - RNA, 17 nt, Human
aggcucagucucaggag

SEQ ID NO: 2487507 - RNA, 18 nt, Human
aggcucagucucaggagc

SEQ ID NO: 2487508 - RNA, 20 nt, Human
aggcucauagggaagaccug

SEQ ID NO: 2487509 - RNA, 21 nt, Human
aggcucauagggaagaccugc

SEQ ID NO: 2487510 - RNA, 22 nt, Human
aggcucauagggaagaccugcu

SEQ ID NO: 2487511 - RNA, 19 nt, Human
aggcucagucucaggagca

SEQ ID NO: 2487512 - RNA, 23 nt, Human
aggcucagucucaggagcauggg

SEQ ID NO: 2487513 - RNA, 24 nt, Human
aggcucagagaugugcacccaugg

SEQ ID NO: 2487514 - RNA, 21 nt, Human
aggcucagagaugugcaccca

SEQ ID NO: 2487515 - RNA, 10 nt, Human
aggcucaggu

SEQ ID NO: 2487516 - RNA, 11 nt, Human
aggcuccacuu

SEQ ID NO: 2487517 - RNA, 17 nt, Human
aggcuccacuuggucug

SEQ ID NO: 2487518 - RNA, 21 nt, Human
aggcuccacuuggucugugag

SEQ ID NO: 2487519 - RNA, 22 nt, Human
aggcuccacuuggucugugaga

SEQ ID NO: 2487520 - RNA, 16 nt, Human
aggcuccaggagcagc

SEQ ID NO: 2487521 - RNA, 14 nt, Human
aggcuccaggagca

SEQ ID NO: 2487522 - RNA, 13 nt, Human
aggcuccaggagc

SEQ ID NO: 2487523 - RNA, 13 nt, Human
aggcuccagaggg

SEQ ID NO: 2487524 - RNA, 14 nt, Human
aggcuccagagggc

SEQ ID NO: 2487525 - RNA, 22 nt, Human
aggcuccaccccauccaguuca

SEQ ID NO: 2487526 - RNA, 23 nt, Human
aggcuccaggagcagccacauuc

SEQ ID NO: 2487527 - RNA, 19 nt, Human
aggcuccaggagcagccac

SEQ ID NO: 2487528 - RNA, 18 nt, Human
aggcuccaggagcagcca

SEQ ID NO: 2487529 - RNA, 17 nt, Human
aggcuccaggagcagcc

SEQ ID NO: 2487530 - RNA, 21 nt, Human
uggcuaacuauauuugcuuuu

SEQ ID NO: 2487531 - RNA, 14 nt, Human
uggcuaaauucaug

SEQ ID NO: 2487532 - RNA, 18 nt, Human
uggcuaagcaaaauguga

SEQ ID NO: 2487533 - RNA, 15 nt, Human
aggcuccagagggca

SEQ ID NO: 2487534 - RNA, 16 nt, Human
aggcuccagagggcac

SEQ ID NO: 2487535 - RNA, 12 nt, Human
aggcucauuuua

SEQ ID NO: 2487536 - RNA, 14 nt, Human
aggcuccauuagga

SEQ ID NO: 2487537 - RNA, 17 nt, Human
uggcuaauguacugcau

SEQ ID NO: 2487538 - RNA, 19 nt, Human
uggcuaauguacugcauau

SEQ ID NO: 2487539 - RNA, 15 nt, Human
uggcuaauucccaga

SEQ ID NO: 2487540 - RNA, 15 nt, Human
uggcuaagagugucc

SEQ ID NO: 2487541 - RNA, 15 nt, Human
uggcuauaggugcua

SEQ ID NO: 2487542 - RNA, 19 nt, Human
uggcuauaggugcuacaaa

SEQ ID NO: 2487543 - RNA, 19 nt, Human
uggcuagaggccagcccca

SEQ ID NO: 2487544 - RNA, 20 nt, Human
uggcuagaauauccuacuuc

SEQ ID NO: 2487545 - RNA, 19 nt, Human
uggcuauaaauauauaaaa

SEQ ID NO: 2487546 - RNA, 23 nt, Human
uggcuagaggccagccccaccca

SEQ ID NO: 2487547 - RNA, 21 nt, Human
uggcuagaggccagccccacc

SEQ ID NO: 2487548 - RNA, 22 nt, Human
uggcuagaggccagccccaccc

SEQ ID NO: 2487549 - RNA, 21 nt, Human
uggcucuugauaccccccucu

SEQ ID NO: 2487550 - RNA, 20 nt, Human
uggcucuugauaccccccuc

SEQ ID NO: 2487551 - RNA, 19 nt, Human
uggcucuugauaccccccu

SEQ ID NO: 2487552 - RNA, 12 nt, Human
uggcucagccag

SEQ ID NO: 2487553 - RNA, 18 nt, Human
uggcucagacauguuuuc

SEQ ID NO: 2487554 - RNA, 13 nt, Human
uggcucagccagc

SEQ ID NO: 2487555 - RNA, 16 nt, Human
uggcucagccagcacu

SEQ ID NO: 2487556 - RNA, 20 nt, Human
uggcugaaauucuccuggag

SEQ ID NO: 2487557 - RNA, 19 nt, Human
uggcugaaauucuccugga

SEQ ID NO: 2487558 - RNA, 18 nt, Human
uggcugaaauucuccugg

SEQ ID NO: 2487559 - RNA, 16 nt, Human
uggcugaaauucuccu

SEQ ID NO: 2487560 - RNA, 19 nt, Human
uggcucuuuggagaucaag

SEQ ID NO: 2487561 - RNA, 23 nt, Human
uggcucuugauaccccccucugu

SEQ ID NO: 2487562 - RNA, 15 nt, Human
uggcugaaggacugu

SEQ ID NO: 2487563 - RNA, 14 nt, Human
uggcugaaggacug

SEQ ID NO: 2487564 - RNA, 13 nt, Human
uggcugaaggacu

SEQ ID NO: 2487565 - RNA, 12 nt, Human
uggcugaaggac

SEQ ID NO: 2487566 - RNA, 11 nt, Human
uggcugaagga

SEQ ID NO: 2487567 - RNA, 23 nt, Human
uggcugaacccugugcugguguc

SEQ ID NO: 2487568 - RNA, 13 nt, Human
uggcugaacucau

SEQ ID NO: 2487569 - RNA, 20 nt, Human
uggcugaacccugugcuggu

SEQ ID NO: 2487570 - RNA, 18 nt, Human
uggcugaacccugugcug

SEQ ID NO: 2487571 - RNA, 16 nt, Human
uggcugaacccugugc

SEQ ID NO: 2487572 - RNA, 15 nt, Human
uggcugaacccugug

SEQ ID NO: 2487573 - RNA, 22 nt, Human
uggcugaaauucuccuggaggu

SEQ ID NO: 2487574 - RNA, 21 nt, Human
uggcugaaauucuccuggagg

SEQ ID NO: 2487575 - RNA, 16 nt, Human
uggcugaaggacugug

SEQ ID NO: 2487576 - RNA, 15 nt, Human
uggcugacccagucc

SEQ ID NO: 2487577 - RNA, 16 nt, Human
uggcugacccaguccc

SEQ ID NO: 2487578 - RNA, 17 nt, Human
uggcugacccagucccu

SEQ ID NO: 2487579 - RNA, 19 nt, Human
uggcugacccagucccugg

SEQ ID NO: 2487580 - RNA, 20 nt, Human
uggcugacccagucccuggg

SEQ ID NO: 2487581 - RNA, 22 nt, Human
uggcugaccccaaagagccugg

SEQ ID NO: 2487582 - RNA, 21 nt, Human
uggcugaccccaaagagccug

SEQ ID NO: 2487583 - RNA, 20 nt, Human
uggcugaccccaaagagccu

SEQ ID NO: 2487584 - RNA, 21 nt, Human
uggcugacccagucccugggg

SEQ ID NO: 2487585 - RNA, 16 nt, Human
uggcugacuuugcucu

SEQ ID NO: 2487586 - RNA, 13 nt, Human
uggcucacgccug

SEQ ID NO: 2487587 - RNA, 15 nt, Human
uggcucacccaagca

SEQ ID NO: 2487588 - RNA, 17 nt, Human
uggcucacgccuguaau

SEQ ID NO: 2487589 - RNA, 19 nt, Human
uggcucacgccuguaaucc

SEQ ID NO: 2487590 - RNA, 18 nt, Human
uggcucacuauggugcca

SEQ ID NO: 2487591 - RNA, 20 nt, Human
uggcucacuaugaaucuauu

SEQ ID NO: 2487592 - RNA, 16 nt, Human
uggcucacgccuguaa

SEQ ID NO: 2487593 - RNA, 16 nt, Human
uggcucacguguguga

SEQ ID NO: 2487594 - RNA, 21 nt, Human
uggcucacuauggugccaaug

SEQ ID NO: 2487595 - RNA, 21 nt, Human
uggcucacugcaacuucugcc

SEQ ID NO: 2487596 - RNA, 23 nt, Human
uggcuauaggugcuacaaaaaca

SEQ ID NO: 2487597 - RNA, 21 nt, Human
uggcuauauggcaagaaagcu

SEQ ID NO: 2487598 - RNA, 16 nt, Human
uggcucacacugagaa

SEQ ID NO: 2487599 - RNA, 15 nt, Human
uggcucacacugaga

SEQ ID NO: 2487600 - RNA, 14 nt, Human
uggcucacacugag

SEQ ID NO: 2487601 - RNA, 13 nt, Human
uggcucacacuga

SEQ ID NO: 2487602 - RNA, 12 nt, Human
uggcucacacug

SEQ ID NO: 2487603 - RNA, 19 nt, Human
uggcucacaccuguaaucc

SEQ ID NO: 2487604 - RNA, 16 nt, Human
uggcucaauccucuaa

SEQ ID NO: 2487605 - RNA, 16 nt, Human
uggcucacaccuguaa

SEQ ID NO: 2487606 - RNA, 23 nt, Human
uggcugcagcagcgguggccucu

SEQ ID NO: 2487607 - RNA, 21 nt, Human
uggcugcagcagcgguggccu

SEQ ID NO: 2487608 - RNA, 15 nt, Human
uggcugugaggcccc

SEQ ID NO: 2487609 - RNA, 12 nt, Human
uggcugugagga

SEQ ID NO: 2487610 - RNA, 23 nt, Human
uggcuguccagugcccauuccuc

SEQ ID NO: 2487611 - RNA, 18 nt, Human
uggcuguccagugcccau

SEQ ID NO: 2487612 - RNA, 17 nt, Human
uggcugugccucugccu

SEQ ID NO: 2487613 - RNA, 16 nt, Human
uggcugugccucugcc

SEQ ID NO: 2487614 - RNA, 15 nt, Human
uggcugugccucugc

SEQ ID NO: 2487615 - RNA, 14 nt, Human
uggcugugccucug

SEQ ID NO: 2487616 - RNA, 15 nt, Human
uggcugcagagcagu

SEQ ID NO: 2487617 - RNA, 18 nt, Human
uggcugcagagcaguggg

SEQ ID NO: 2487618 - RNA, 13 nt, Human
uggcugcagcagc

SEQ ID NO: 2487619 - RNA, 12 nt, Human
uggcugcagcag

SEQ ID NO: 2487620 - RNA, 19 nt, Human
uggcugagcggaugcaucu

SEQ ID NO: 2487621 - RNA, 19 nt, Human
uggcugagccuggcuggca

SEQ ID NO: 2487622 - RNA, 22 nt, Human
uggcugcagagcagugggccug

SEQ ID NO: 2487623 - RNA, 20 nt, Human
uggcugagagaguggcauug

SEQ ID NO: 2487624 - RNA, 19 nt, Human
uggcugagauaugaacaua

SEQ ID NO: 2487625 - RNA, 16 nt, Human
uggcugagccuggcug

SEQ ID NO: 2487626 - RNA, 13 nt, Human
uggcugagcccug

SEQ ID NO: 2487627 - RNA, 13 nt, Human
uggcugagccccu

SEQ ID NO: 2487628 - RNA, 17 nt, Human
uggcugagccccugucu

SEQ ID NO: 2487629 - RNA, 23 nt, Human
uggcugcaaaggguaucaggugc

SEQ ID NO: 2487630 - RNA, 23 nt, Human
uggcuguuggcugggggccucag

SEQ ID NO: 2487631 - RNA, 14 nt, Human
uggcuucacggaag

SEQ ID NO: 2487632 - RNA, 18 nt, Human
uggcuguuggcugggggc

SEQ ID NO: 2487633 - RNA, 16 nt, Human
uggcuguuggcugggg

SEQ ID NO: 2487634 - RNA, 17 nt, Human
uggcugugucuaaacug

SEQ ID NO: 2487635 - RNA, 15 nt, Human
uggcugugucuaaac

SEQ ID NO: 2487636 - RNA, 14 nt, Human
uggcugugucuaaa

SEQ ID NO: 2487637 - RNA, 19 nt, Human
uggcugugccucugccugu

SEQ ID NO: 2487638 - RNA, 18 nt, Human
uggcugugccucugccug

SEQ ID NO: 2487639 - RNA, 16 nt, Human
uggcuguggagugugg

SEQ ID NO: 2487640 - RNA, 22 nt, Human
uggcugugccucugccugucuc

SEQ ID NO: 2487641 - RNA, 18 nt, Human
ugggaaacaaaaggauaa

SEQ ID NO: 2487642 - RNA, 21 nt, Human
uggcuuuugugcauuaucuag

SEQ ID NO: 2487643 - RNA, 17 nt, Human
uggcuucaaaauagaga

SEQ ID NO: 2487644 - RNA, 23 nt, Human
ugggaaaaaugcccuuaaaucau

SEQ ID NO: 2487645 - RNA, 19 nt, Human
uggcuuuuuuccuccugug

SEQ ID NO: 2487646 - RNA, 15 nt, Human
uggcuuuugugcauu

SEQ ID NO: 2487647 - RNA, 16 nt, Human
uggcuuuugugcauua

SEQ ID NO: 2487648 - RNA, 17 nt, Human
uggcuucacggaagagc

SEQ ID NO: 2487649 - RNA, 20 nt, Human
uggcuucacggaagagccuu

SEQ ID NO: 2487650 - RNA, 17 nt, Human
ugggaaagcauuguaaa

SEQ ID NO: 2487651 - RNA, 18 nt, Human
ugggaaagcauuguaaau

SEQ ID NO: 2487652 - RNA, 21 nt, Human
ugggaaagcauuguaaaugug

SEQ ID NO: 2487653 - RNA, 19 nt, Human
ugggaaaugagaaggcagc

SEQ ID NO: 2487654 - RNA, 20 nt, Human
ugggaaauauuuagcaaaua

SEQ ID NO: 2487655 - RNA, 19 nt, Human
ugggaaauauuuagcaaau

SEQ ID NO: 2487656 - RNA, 20 nt, Human
ugggaacaccauaggucacc

SEQ ID NO: 2487657 - RNA, 20 nt, Human
ugggaaaugagaaggcagcc

SEQ ID NO: 2487658 - RNA, 15 nt, Human
ugggaaauggcuuga

SEQ ID NO: 2487659 - RNA, 14 nt, Human
ugggaaagcauugu

SEQ ID NO: 2487660 - RNA, 16 nt, Human
ugggaaagcauuguaa

SEQ ID NO: 2487661 - RNA, 23 nt, Human
ugggaaagacauccauaaagaag

SEQ ID NO: 2487662 - RNA, 21 nt, Human
ugggaaagaaggcaaaguccc

SEQ ID NO: 2487663 - RNA, 23 nt, Human
ugggaaaauaccccaucauucau

SEQ ID NO: 2487664 - RNA, 18 nt, Human
ugggaaacuuggcucgaa

SEQ ID NO: 2487665 - RNA, 16 nt, Human
ugggaaaacacugcca

SEQ ID NO: 2487666 - RNA, 15 nt, Human
ugggaaacagaggcu

SEQ ID NO: 2487667 - RNA, 15 nt, Human
aggcuuaguuugugu

SEQ ID NO: 2487668 - RNA, 20 nt, Human
aggcuucagcauauuuauag

SEQ ID NO: 2487669 - RNA, 12 nt, Human
aggcuucacccu

SEQ ID NO: 2487670 - RNA, 14 nt, Human
aggcuuccuucauu

SEQ ID NO: 2487671 - RNA, 16 nt, Human
aggcuuccuucauuuc

SEQ ID NO: 2487672 - RNA, 18 nt, Human
aggcuuccuucauuuccu

SEQ ID NO: 2487673 - RNA, 19 nt, Human
aggcuuccuucauuuccuc

SEQ ID NO: 2487674 - RNA, 21 nt, Human
aggcuuccugcguccuccuca

SEQ ID NO: 2487675 - RNA, 20 nt, Human
aggcuuccugcguccuccuc

SEQ ID NO: 2487676 - RNA, 10 nt, Human
aggcuuccug

SEQ ID NO: 2487677 - RNA, 23 nt, Human
aggcuuccagagaguccucugga

SEQ ID NO: 2487678 - RNA, 14 nt, Human
aggcuuccagagag

SEQ ID NO: 2487679 - RNA, 13 nt, Human
aggcuuccagaga

SEQ ID NO: 2487680 - RNA, 14 nt, Human
aggcuuaguuugug

SEQ ID NO: 2487681 - RNA, 23 nt, Human
aggcuuagucacugagacagccc

SEQ ID NO: 2487682 - RNA, 22 nt, Human
aggcuuagucacugagacagcc

SEQ ID NO: 2487683 - RNA, 21 nt, Human
aggcuuagucacugagacagc

SEQ ID NO: 2487684 - RNA, 21 nt, Human
aggcuggggcugaccuuccuc

SEQ ID NO: 2487685 - RNA, 16 nt, Human
aggcuggggcugaccu

SEQ ID NO: 2487686 - RNA, 16 nt, Human
aggcuucucucucacc

SEQ ID NO: 2487687 - RNA, 14 nt, Human
aggcuucucucuca

SEQ ID NO: 2487688 - RNA, 13 nt, Human
aggcuucucucuc

SEQ ID NO: 2487689 - RNA, 12 nt, Human
aggcuucucucu

SEQ ID NO: 2487690 - RNA, 18 nt, Human
aggcuucucucucaccag

SEQ ID NO: 2487691 - RNA, 16 nt, Human
aggcuucucucugugg

SEQ ID NO: 2487692 - RNA, 23 nt, Human
aggcuucugguugaugccuguga

SEQ ID NO: 2487693 - RNA, 23 nt, Human
aggcuucuccgccagccuccucu

SEQ ID NO: 2487694 - RNA, 22 nt, Human
aggcuucuccgccagccuccuc

SEQ ID NO: 2487695 - RNA, 21 nt, Human
aggcuucuccgccagccuccu

SEQ ID NO: 2487696 - RNA, 20 nt, Human
aggcuucuccgccagccucc

SEQ ID NO: 2487697 - RNA, 19 nt, Human
aggcuucuccgccagccuc

SEQ ID NO: 2487698 - RNA, 18 nt, Human
aggcuucuccgccagccu

SEQ ID NO: 2487699 - RNA, 17 nt, Human
aggcuucuccgccagcc

SEQ ID NO: 2487700 - RNA, 16 nt, Human
aggcuucuccgccagc

SEQ ID NO: 2487701 - RNA, 15 nt, Human
aggcuucuccgccag

SEQ ID NO: 2487702 - RNA, 14 nt, Human
aggcuucuccgcca

SEQ ID NO: 2487703 - RNA, 22 nt, Human
aggcuucuccaauucugcccaa

SEQ ID NO: 2487704 - RNA, 22 nt, Human
aggcuuccugcguccuccucac

SEQ ID NO: 2487705 - RNA, 21 nt, Human
aggcuuccuucauuuccuccg

SEQ ID NO: 2487706 - RNA, 13 nt, Human
aggcuuccuuggc

SEQ ID NO: 2487707 - RNA, 16 nt, Human
aggcuucuucagauca

SEQ ID NO: 2487708 - RNA, 22 nt, Human
aggcuucuucagaucagugcuu

SEQ ID NO: 2487709 - RNA, 23 nt, Human
aggcuucuucagaucagugcuug

SEQ ID NO: 2487710 - RNA, 18 nt, Human
aggcuugcauaauaagcu

SEQ ID NO: 2487711 - RNA, 16 nt, Human
aggcuugccugcaggc

SEQ ID NO: 2487712 - RNA, 15 nt, Human
aggcuugccugcagg

SEQ ID NO: 2487713 - RNA, 22 nt, Human
aggcuugggaccgccagauggg

SEQ ID NO: 2487714 - RNA, 15 nt, Human
aggcuugucagagcu

SEQ ID NO: 2487715 - RNA, 20 nt, Human
aggcuugcugagaggggcug

SEQ ID NO: 2487716 - RNA, 19 nt, Human
aggcuugcugagaggggcu

SEQ ID NO: 2487717 - RNA, 14 nt, Human
aggcuugcugagag

SEQ ID NO: 2487718 - RNA, 17 nt, Human
aggcuugccugcaggca

SEQ ID NO: 2487719 - RNA, 21 nt, Human
aggcuuuuuuaucaugugaaa

SEQ ID NO: 2487720 - RNA, 18 nt, Human
aggcuuuuuuaucaugug

SEQ ID NO: 2487721 - RNA, 15 nt, Human
agggaaaacauucca

SEQ ID NO: 2487722 - RNA, 16 nt, Human
agggaaaacauuccau

SEQ ID NO: 2487723 - RNA, 18 nt, Human
agggaaaacauuccaucc

SEQ ID NO: 2487724 - RNA, 19 nt, Human
aggcuuuggauuugacauu

SEQ ID NO: 2487725 - RNA, 15 nt, Human
aggcuuuuuuaucau

SEQ ID NO: 2487726 - RNA, 19 nt, Human
aggcuuucacuauuuccuu

SEQ ID NO: 2487727 - RNA, 20 nt, Human
aggcuuucacuauuuccuuu

SEQ ID NO: 2487728 - RNA, 15 nt, Human
aggcuuucacuauuu

SEQ ID NO: 2487729 - RNA, 18 nt, Human
aggcuugucagagcuggg

SEQ ID NO: 2487730 - RNA, 16 nt, Human
aggcuugucagagcug

SEQ ID NO: 2487731 - RNA, 17 nt, Human
aggcuugucagagcugg

SEQ ID NO: 2487732 - RNA, 20 nt, Human
aggcuugucagagcugggag

SEQ ID NO: 2487733 - RNA, 16 nt, Human
agggaaacugccagca

SEQ ID NO: 2487734 - RNA, 19 nt, Human
agggaaacugccagcaacg

SEQ ID NO: 2487735 - RNA, 21 nt, Human
agggaaacugccagcaacgca

SEQ ID NO: 2487736 - RNA, 23 nt, Human
agggaaacugccagcaacgcagg

SEQ ID NO: 2487737 - RNA, 14 nt, Human
agggaaacugccag

SEQ ID NO: 2487738 - RNA, 15 nt, Human
agggaaacugccagc

SEQ ID NO: 2487739 - RNA, 18 nt, Human
agggaaaauuauuugcau

SEQ ID NO: 2487740 - RNA, 17 nt, Human
agggaaaaugcagcagg

SEQ ID NO: 2487741 - RNA, 22 nt, Human
agggaaaaugcagcagggaugc

SEQ ID NO: 2487742 - RNA, 16 nt, Human
agggaaacuauugucc

SEQ ID NO: 2487743 - RNA, 16 nt, Human
agggaaaagcagcucu

SEQ ID NO: 2487744 - RNA, 23 nt, Human
aggcugggcuucaguggcagcug

SEQ ID NO: 2487745 - RNA, 22 nt, Human
aggcugggcuucaguggcagcu

SEQ ID NO: 2487746 - RNA, 12 nt, Human
aggcuggggcug

SEQ ID NO: 2487747 - RNA, 22 nt, Human
aggcuggggaaguccucugggu

SEQ ID NO: 2487748 - RNA, 21 nt, Human
aggcuggggaaguccucuggg

SEQ ID NO: 2487749 - RNA, 18 nt, Human
aggcuggggaaguccucu

SEQ ID NO: 2487750 - RNA, 16 nt, Human
aggcuggggaaguccu

SEQ ID NO: 2487751 - RNA, 17 nt, Human
aggcugggggaagaagc

SEQ ID NO: 2487752 - RNA, 21 nt, Human
aggcugggcuucaguggcagc

SEQ ID NO: 2487753 - RNA, 20 nt, Human
aggcugggcuucaguggcag

SEQ ID NO: 2487754 - RNA, 19 nt, Human
aggcugggcuucaguggca

SEQ ID NO: 2487755 - RNA, 18 nt, Human
aggcugggcuucaguggc

SEQ ID NO: 2487756 - RNA, 17 nt, Human
aggcuggguucugaucc

SEQ ID NO: 2487757 - RNA, 14 nt, Human
aggcuggguucuga

SEQ ID NO: 2487758 - RNA, 21 nt, Human
aggcugggucgcccuggacug

SEQ ID NO: 2487759 - RNA, 20 nt, Human
aggcugggucgcccuggacu

SEQ ID NO: 2487760 - RNA, 18 nt, Human
aggcugggucgcccugga

SEQ ID NO: 2487761 - RNA, 15 nt, Human
aggcugggucgcccu

SEQ ID NO: 2487762 - RNA, 10 nt, Human
aggcuggguc

SEQ ID NO: 2487763 - RNA, 22 nt, Human
aggcugggggaagaagcucucu

SEQ ID NO: 2487764 - RNA, 21 nt, Human
aggcugggagagccuuccagg

SEQ ID NO: 2487765 - RNA, 20 nt, Human
aggcugggagagccuuccag

SEQ ID NO: 2487766 - RNA, 13 nt, Human
aggcugggcaagg

SEQ ID NO: 2487767 - RNA, 21 nt, Human
ugggaaccccccucccaccca

SEQ ID NO: 2487768 - RNA, 22 nt, Human
aggcugggagagccuuccaggg

SEQ ID NO: 2487769 - RNA, 20 nt, Human
ugggaacccaaguccaagca

SEQ ID NO: 2487770 - RNA, 23 nt, Human
ugggaaaugguaugagcugaggg

SEQ ID NO: 2487771 - RNA, 22 nt, Human
ugggaaaugguaugagcugagg

SEQ ID NO: 2487772 - RNA, 22 nt, Human
ugggaaccccuucauccucuga

SEQ ID NO: 2487773 - RNA, 20 nt, Human
ugggaaccccuucauccucu

SEQ ID NO: 2487774 - RNA, 16 nt, Human
aggcugggagagccuu

SEQ ID NO: 2487775 - RNA, 19 nt, Human
aggcugggagagccuucca

SEQ ID NO: 2487776 - RNA, 18 nt, Human
aggcugggcucccuuccc

SEQ ID NO: 2487777 - RNA, 14 nt, Human
aggcugggcucccu

SEQ ID NO: 2487778 - RNA, 13 nt, Human
aggcugggcuccc

SEQ ID NO: 2487779 - RNA, 23 nt, Human
aggcugggcucccuucccaccuc

SEQ ID NO: 2487780 - RNA, 21 nt, Human
aggcugggcucccuucccacc

SEQ ID NO: 2487781 - RNA, 14 nt, Human
aggcugggcuucag

SEQ ID NO: 2487782 - RNA, 18 nt, Human
aggcugggcguaguggcu

SEQ ID NO: 2487783 - RNA, 20 nt, Human
agggagugaguugauagcac

SEQ ID NO: 2487784 - RNA, 20 nt, Human
agggagugacagaggcagcc

SEQ ID NO: 2487785 - RNA, 16 nt, Human
agggaguccccucccc

SEQ ID NO: 2487786 - RNA, 15 nt, Human
agggaguccccuccc

SEQ ID NO: 2487787 - RNA, 22 nt, Human
agggaguccccuccccggcccu

SEQ ID NO: 2487788 - RNA, 14 nt, Human
agggaguccccucc

SEQ ID NO: 2487789 - RNA, 23 nt, Human
agggaguccgaaagggacuugga

SEQ ID NO: 2487790 - RNA, 22 nt, Human
agggagggcuccagacacaugu

SEQ ID NO: 2487791 - RNA, 15 nt, Human
agggagggcugucau

SEQ ID NO: 2487792 - RNA, 21 nt, Human
agggagguggggaugagaaga

SEQ ID NO: 2487793 - RNA, 23 nt, Human
agggagguguuuaaagagagguu

SEQ ID NO: 2487794 - RNA, 22 nt, Human
agggagguguuuaaagagaggu

SEQ ID NO: 2487795 - RNA, 20 nt, Human
agggagguguuuaaagagag

SEQ ID NO: 2487796 - RNA, 20 nt, Human
agggaguccgaaagggacuu

SEQ ID NO: 2487797 - RNA, 19 nt, Human
agggagggcuccagacaca

SEQ ID NO: 2487798 - RNA, 17 nt, Human
agggagggcuccagaca

SEQ ID NO: 2487799 - RNA, 12 nt, Human
agggagggcucc

SEQ ID NO: 2487800 - RNA, 13 nt, Human
agggagggccugg

SEQ ID NO: 2487801 - RNA, 15 nt, Human
agggagggccugggc

SEQ ID NO: 2487802 - RNA, 17 nt, Human
agggagggagggcucca

SEQ ID NO: 2487803 - RNA, 16 nt, Human
ugggccaacucaccug

SEQ ID NO: 2487804 - RNA, 20 nt, Human
ugggccaagucaaagacauu

SEQ ID NO: 2487805 - RNA, 17 nt, Human
ugggcauugauggggaa

SEQ ID NO: 2487806 - RNA, 18 nt, Human
ugggcauugauggggaag

SEQ ID NO: 2487807 - RNA, 23 nt, Human
ugggcauugauggggaaggaggc

SEQ ID NO: 2487808 - RNA, 12 nt, Human
ugggcauugcuu

SEQ ID NO: 2487809 - RNA, 13 nt, Human
ugggcauugcuuu

SEQ ID NO: 2487810 - RNA, 23 nt, Human
ugggccaacaaagaacacuaacu

SEQ ID NO: 2487811 - RNA, 16 nt, Human
ugggcauuugugaggc

SEQ ID NO: 2487812 - RNA, 14 nt, Human
ugggcauugcuuuc

SEQ ID NO: 2487813 - RNA, 15 nt, Human
ugggcauugcuuucc

SEQ ID NO: 2487814 - RNA, 20 nt, Human
ugggcauugcuuuccacuga

SEQ ID NO: 2487815 - RNA, 15 nt, Human
ugggcauuugugagg

SEQ ID NO: 2487816 - RNA, 13 nt, Human
agggcauuggcca

SEQ ID NO: 2487817 - RNA, 22 nt, Human
agggcaucuccaggaaggcggg

SEQ ID NO: 2487818 - RNA, 22 nt, Human
agggcauuugagaaaugcauau

SEQ ID NO: 2487819 - RNA, 19 nt, Human
agggcauuugagaaaugca

SEQ ID NO: 2487820 - RNA, 17 nt, Human
agggcauggccaggugg

SEQ ID NO: 2487821 - RNA, 19 nt, Human
agggcaucuccaggaaggc

SEQ ID NO: 2487822 - RNA, 16 nt, Human
agggcaucuccaggaa

SEQ ID NO: 2487823 - RNA, 19 nt, Human
agggcauaaugaugauggg

SEQ ID NO: 2487824 - RNA, 15 nt, Human
agggcauaaugauga

SEQ ID NO: 2487825 - RNA, 15 nt, Human
agggcaucuccagga

SEQ ID NO: 2487826 - RNA, 14 nt, Human
agggcaucuccagg

SEQ ID NO: 2487827 - RNA, 13 nt, Human
agggcaucuccag

SEQ ID NO: 2487828 - RNA, 18 nt, Human
agggcauccuucugccuu

SEQ ID NO: 2487829 - RNA, 22 nt, Human
agggcauaaugaugaugggaau

SEQ ID NO: 2487830 - RNA, 17 nt, Human
agggcaucaugcaucuu

SEQ ID NO: 2487831 - RNA, 13 nt, Human
agggcccagagag

SEQ ID NO: 2487832 - RNA, 12 nt, Human
agggcccagaga

SEQ ID NO: 2487833 - RNA, 16 nt, Human
agggccaacccuucuc

SEQ ID NO: 2487834 - RNA, 15 nt, Human
agggccaacccuucu

SEQ ID NO: 2487835 - RNA, 23 nt, Human
agggccaacuugagggcccagag

SEQ ID NO: 2487836 - RNA, 21 nt, Human
agggccaagcccagcacugcu

SEQ ID NO: 2487837 - RNA, 21 nt, Human
agggccaacccuucuccucuu

SEQ ID NO: 2487838 - RNA, 17 nt, Human
agggccaacccuucucc

SEQ ID NO: 2487839 - RNA, 18 nt, Human
agggcaguguuuccuuuu

SEQ ID NO: 2487840 - RNA, 17 nt, Human
agggcaguguuuccuuu

SEQ ID NO: 2487841 - RNA, 16 nt, Human
agggcaguguuuccuu

SEQ ID NO: 2487842 - RNA, 15 nt, Human
agggcaguguuuccu

SEQ ID NO: 2487843 - RNA, 13 nt, Human
agggcaguguuuc

SEQ ID NO: 2487844 - RNA, 12 nt, Human
agggcagaguga

SEQ ID NO: 2487845 - RNA, 20 nt, Human
agggcagucgauagagcugu

SEQ ID NO: 2487846 - RNA, 17 nt, Human
agggcagaggcuggagg

SEQ ID NO: 2487847 - RNA, 20 nt, Human
agggcagaggcuggaggcag

SEQ ID NO: 2487848 - RNA, 17 nt, Human
agggcagagucacacgg

SEQ ID NO: 2487849 - RNA, 22 nt, Human
agggcagaggcuggaggcaggg

SEQ ID NO: 2487850 - RNA, 14 nt, Human
agggcagaggcugg

SEQ ID NO: 2487851 - RNA, 15 nt, Human
agggcagaggcugga

SEQ ID NO: 2487852 - RNA, 20 nt, Human
agggcagaaagguucugccc

SEQ ID NO: 2487853 - RNA, 19 nt, Human
agggcagaaagguucugcc

SEQ ID NO: 2487854 - RNA, 23 nt, Human
agggcacuucacagagugugcug

SEQ ID NO: 2487855 - RNA, 17 nt, Human
agggcacuucacagagu

SEQ ID NO: 2487856 - RNA, 16 nt, Human
agggcacuucacagag

SEQ ID NO: 2487857 - RNA, 17 nt, Human
agggcagaacacuaacc

SEQ ID NO: 2487858 - RNA, 15 nt, Human
agggcagaacacuaa

SEQ ID NO: 2487859 - RNA, 22 nt, Human
agggcagaacacuaaccugacc

SEQ ID NO: 2487860 - RNA, 15 nt, Human
agggcagagccggga

SEQ ID NO: 2487861 - RNA, 17 nt, Human
agggcacugguggcccg

SEQ ID NO: 2487862 - RNA, 15 nt, Human
agggauaagguaccu

SEQ ID NO: 2487863 - RNA, 16 nt, Human
agggauacaugcucuu

SEQ ID NO: 2487864 - RNA, 14 nt, Human
agggauacacugaa

SEQ ID NO: 2487865 - RNA, 21 nt, Human
agggaguuaucuaaaagaaau

SEQ ID NO: 2487866 - RNA, 14 nt, Human
agggcccagagagg

SEQ ID NO: 2487867 - RNA, 24 nt, Human
agggccacacuauuaccaugagaa

SEQ ID NO: 2487868 - RNA, 18 nt, Human
agggccacacuauuacca

SEQ ID NO: 2487869 - RNA, 16 nt, Human
agggccaagacuuggc

SEQ ID NO: 2487870 - RNA, 16 nt, Human
agggcccagagcccag

SEQ ID NO: 2487871 - RNA, 17 nt, Human
agggcccagagcccagc

SEQ ID NO: 2487872 - RNA, 11 nt, Human
agggcccagag

SEQ ID NO: 2487873 - RNA, 18 nt, Human
agggcccagagcccagcu

SEQ ID NO: 2487874 - RNA, 19 nt, Human
agggcccagagcccagcuc

SEQ ID NO: 2487875 - RNA, 20 nt, Human
agggcccagagcccagcucc

SEQ ID NO: 2487876 - RNA, 21 nt, Human
agggcccagagcccagcucca

SEQ ID NO: 2487877 - RNA, 14 nt, Human
agggcccaggcagg

SEQ ID NO: 2487878 - RNA, 15 nt, Human
agggcccaggcaggc

SEQ ID NO: 2487879 - RNA, 11 nt, Human
agggccccucu

SEQ ID NO: 2487880 - RNA, 20 nt, Human
agggcuccagacacaugucc

SEQ ID NO: 2487881 - RNA, 19 nt, Human
agggccccucacccugccu

SEQ ID NO: 2487882 - RNA, 14 nt, Human
agggccccagcacu

SEQ ID NO: 2487883 - RNA, 18 nt, Human
agggccccagcacuaaag

SEQ ID NO: 2487884 - RNA, 18 nt, Human
agggccccagaaggcagg

SEQ ID NO: 2487885 - RNA, 12 nt, Human
agggccccagca

SEQ ID NO: 2487886 - RNA, 17 nt, Human
agggcccaggcaggcca

SEQ ID NO: 2487887 - RNA, 20 nt, Human
agggcuggacugaggccuga

SEQ ID NO: 2487888 - RNA, 18 nt, Human
agggcuggacugaggccu

SEQ ID NO: 2487889 - RNA, 17 nt, Human
agggcuggacugaggcc

SEQ ID NO: 2487890 - RNA, 16 nt, Human
agggcuggacugaggc

SEQ ID NO: 2487891 - RNA, 13 nt, Human
agggcuggaccua

SEQ ID NO: 2487892 - RNA, 12 nt, Human
agggcuggaccu

SEQ ID NO: 2487893 - RNA, 22 nt, Human
agggcuggaaucuggagagcua

SEQ ID NO: 2487894 - RNA, 15 nt, Human
agggcuggacugagg

SEQ ID NO: 2487895 - RNA, 14 nt, Human
agggcuggacugag

SEQ ID NO: 2487896 - RNA, 13 nt, Human
agggcugcuguga

SEQ ID NO: 2487897 - RNA, 17 nt, Human
agggcugcuagacggag

SEQ ID NO: 2487898 - RNA, 13 nt, Human
agggcugccacca

SEQ ID NO: 2487899 - RNA, 20 nt, Human
agggcugacacguccacccc

SEQ ID NO: 2487900 - RNA, 16 nt, Human
agggcugagcugggga

SEQ ID NO: 2487901 - RNA, 17 nt, Human
agggcugagcucucugu

SEQ ID NO: 2487902 - RNA, 22 nt, Human
agggcuccugccuucuguccug

SEQ ID NO: 2487903 - RNA, 15 nt, Human
agggcuccugccuuc

SEQ ID NO: 2487904 - RNA, 12 nt, Human
agggcuccuggg

SEQ ID NO: 2487905 - RNA, 21 nt, Human
agggcugacacguccacccca

SEQ ID NO: 2487906 - RNA, 14 nt, Human
agggcuccugccuu

SEQ ID NO: 2487907 - RNA, 12 nt, Human
agggcuccugcc

SEQ ID NO: 2487908 - RNA, 11 nt, Human
agggcuccugc

SEQ ID NO: 2487909 - RNA, 20 nt, Human
agggcuccccacugccuacu

SEQ ID NO: 2487910 - RNA, 11 nt, Human
agggcucccca

SEQ ID NO: 2487911 - RNA, 15 nt, Human
agggcucccugcccu

SEQ ID NO: 2487912 - RNA, 15 nt, Human
ugggcucccugacug

SEQ ID NO: 2487913 - RNA, 19 nt, Human
ugggcucccugacugggag

SEQ ID NO: 2487914 - RNA, 15 nt, Human
ugggcucccuuccca

SEQ ID NO: 2487915 - RNA, 21 nt, Human
ugggcucccuucccaccucuc

SEQ ID NO: 2487916 - RNA, 17 nt, Human
ugggcucccuugugcgu

SEQ ID NO: 2487917 - RNA, 14 nt, Human
ugggcucccuuccc

SEQ ID NO: 2487918 - RNA, 11 nt, Human
ugggcucccug

SEQ ID NO: 2487919 - RNA, 16 nt, Human
ugggcucaagcagucu

SEQ ID NO: 2487920 - RNA, 16 nt, Human
ugggcucgucuuugca

SEQ ID NO: 2487921 - RNA, 15 nt, Human
ugggcucgucuuugc

SEQ ID NO: 2487922 - RNA, 17 nt, Human
ugggcucggaggcugcc

SEQ ID NO: 2487923 - RNA, 14 nt, Human
ugggcucgcccacc

SEQ ID NO: 2487924 - RNA, 23 nt, Human
ugggcuccuccagggugugugcu

SEQ ID NO: 2487925 - RNA, 13 nt, Human
ugggcuccuccag

SEQ ID NO: 2487926 - RNA, 15 nt, Human
ugggcuccuccaggg

SEQ ID NO: 2487927 - RNA, 23 nt, Human
ugggcucuccaccucagccuugg

SEQ ID NO: 2487928 - RNA, 19 nt, Human
ugggcucugacagaaagca

SEQ ID NO: 2487929 - RNA, 21 nt, Human
ugggcucuccaccucagccuu

SEQ ID NO: 2487930 - RNA, 17 nt, Human
ugggcucgucuuugcag

SEQ ID NO: 2487931 - RNA, 14 nt, Human
ugggcucuccaccu

SEQ ID NO: 2487932 - RNA, 15 nt, Human
ugggcucuccaccuc

SEQ ID NO: 2487933 - RNA, 16 nt, Human
ugggcucuccaccuca

SEQ ID NO: 2487934 - RNA, 17 nt, Human
ugggcucuccaccucag

SEQ ID NO: 2487935 - RNA, 18 nt, Human
ugggcucuccaccucagc

SEQ ID NO: 2487936 - RNA, 19 nt, Human
ugggcucuccaccucagcc

SEQ ID NO: 2487937 - RNA, 20 nt, Human
ugggcucuccaccucagccu

SEQ ID NO: 2487938 - RNA, 22 nt, Human
agggcuggcccagcccugcugg

SEQ ID NO: 2487939 - RNA, 20 nt, Human
agggcuggcccagcccugcu

SEQ ID NO: 2487940 - RNA, 19 nt, Human
agggcuggcccagcccugc

SEQ ID NO: 2487941 - RNA, 18 nt, Human
agggcuggcccagcccug

SEQ ID NO: 2487942 - RNA, 17 nt, Human
agggcuggcccagcccu

SEQ ID NO: 2487943 - RNA, 16 nt, Human
agggcuggcccagccc

SEQ ID NO: 2487944 - RNA, 15 nt, Human
agggcuggcccagcc

SEQ ID NO: 2487945 - RNA, 14 nt, Human
agggcuggcccagc

SEQ ID NO: 2487946 - RNA, 13 nt, Human
agggcuggcccag

SEQ ID NO: 2487947 - RNA, 22 nt, Human
agggcuggaccuauguccuaag

SEQ ID NO: 2487948 - RNA, 23 nt, Human
agggcuggcccagcccugcuggc

SEQ ID NO: 2487949 - RNA, 16 nt, Human
agggcuggucucugcu

SEQ ID NO: 2487950 - RNA, 22 nt, Human
agggcuguuauaaucuuucaca

SEQ ID NO: 2487951 - RNA, 18 nt, Human
agggcugucaucugugca

SEQ ID NO: 2487952 - RNA, 19 nt, Human
agggcugucaucugugcac

SEQ ID NO: 2487953 - RNA, 20 nt, Human
agggcugucaucugugcacu

SEQ ID NO: 2487954 - RNA, 19 nt, Human
agggaaagaaaaggaaggc

SEQ ID NO: 2487955 - RNA, 15 nt, Human
agggaaacuucccgu

SEQ ID NO: 2487956 - RNA, 12 nt, Human
agggaaagaaaa

SEQ ID NO: 2487957 - RNA, 23 nt, Human
agggaaagaaaguugcacggcug

SEQ ID NO: 2487958 - RNA, 18 nt, Human
agggaaaggauauuuucu

SEQ ID NO: 2487959 - RNA, 18 nt, Human
agggaaaggggugcuuuu

SEQ ID NO: 2487960 - RNA, 15 nt, Human
agggaaaggggugcu

SEQ ID NO: 2487961 - RNA, 22 nt, Human
agggaaaggcucugaaagccag

SEQ ID NO: 2487962 - RNA, 22 nt, Human
agggaaauagaaaaacccugcc

SEQ ID NO: 2487963 - RNA, 15 nt, Human
agggaaauagaaaaa

SEQ ID NO: 2487964 - RNA, 19 nt, Human
agggaaaggggugcuuuua

SEQ ID NO: 2487965 - RNA, 15 nt, Human
agggaaauaucauuu

SEQ ID NO: 2487966 - RNA, 14 nt, Human
agggaaaugaaaga

SEQ ID NO: 2487967 - RNA, 23 nt, Human
agggacuucugucuucacaacag

SEQ ID NO: 2487968 - RNA, 15 nt, Human
agggacuuggaagcu

SEQ ID NO: 2487969 - RNA, 19 nt, Human
agggacuuggaagcuccgc

SEQ ID NO: 2487970 - RNA, 18 nt, Human
agggacuuggaagcuccg

SEQ ID NO: 2487971 - RNA, 16 nt, Human
agggagaagaaaggug

SEQ ID NO: 2487972 - RNA, 13 nt, Human
agggagaaauguu

SEQ ID NO: 2487973 - RNA, 16 nt, Human
agggacuugaaguugu

SEQ ID NO: 2487974 - RNA, 15 nt, Human
agggacuugaaguug

SEQ ID NO: 2487975 - RNA, 14 nt, Human
agggacuugaaguu

SEQ ID NO: 2487976 - RNA, 23 nt, Human
agggaaauagaaaaacccugccc

SEQ ID NO: 2487977 - RNA, 16 nt, Human
agggaaaugaucaguu

SEQ ID NO: 2487978 - RNA, 20 nt, Human
agggacuuggaagcuccgcu

SEQ ID NO: 2487979 - RNA, 20 nt, Human
agggagacacuggccccuca

SEQ ID NO: 2487980 - RNA, 18 nt, Human
agggagaagggauggagg

SEQ ID NO: 2487981 - RNA, 12 nt, Human
agggagacagag

SEQ ID NO: 2487982 - RNA, 19 nt, Human
agggagacccguccauuug

SEQ ID NO: 2487983 - RNA, 22 nt, Human
agggagaaggaucuagaaugug

SEQ ID NO: 2487984 - RNA, 16 nt, Human
agggagaaggaucuag

SEQ ID NO: 2487985 - RNA, 15 nt, Human
agggagaaggaucua

SEQ ID NO: 2487986 - RNA, 15 nt, Human
agggagaagaaguca

SEQ ID NO: 2487987 - RNA, 13 nt, Human
agggagaagcucc

SEQ ID NO: 2487988 - RNA, 21 nt, Human
agggagaagacuauauuguac

SEQ ID NO: 2487989 - RNA, 13 nt, Human
agggagagaagau

SEQ ID NO: 2487990 - RNA, 14 nt, Human
agggagagaagaua

SEQ ID NO: 2487991 - RNA, 11 nt, Human
agggagagaga

SEQ ID NO: 2487992 - RNA, 17 nt, Human
agggagcagacaggagg

SEQ ID NO: 2487993 - RNA, 19 nt, Human
agggagcaggcggugggca

SEQ ID NO: 2487994 - RNA, 23 nt, Human
agggagagaccucaucaggauga

SEQ ID NO: 2487995 - RNA, 16 nt, Human
agggagagaccucauc

SEQ ID NO: 2487996 - RNA, 15 nt, Human
ugggacuucuuuuca

SEQ ID NO: 2487997 - RNA, 13 nt, Human
ugggacuucuuuu

SEQ ID NO: 2487998 - RNA, 20 nt, Human
ugggacuuccuugcucuccc

SEQ ID NO: 2487999 - RNA, 19 nt, Human
ugggacuuccuugcucucc

SEQ ID NO: 2488000 - RNA, 19 nt, Human
ugggacuggguuuggaccc

SEQ ID NO: 2488001 - RNA, 17 nt, Human
ugggacuuccuugcucu

SEQ ID NO: 2488002 - RNA, 14 nt, Human
ugggacuuaacucc

SEQ ID NO: 2488003 - RNA, 15 nt, Human
ugggagaaaugaaaa

SEQ ID NO: 2488004 - RNA, 14 nt, Human
ugggacuggccucu

SEQ ID NO: 2488005 - RNA, 16 nt, Human
ugggacuggccucugc

SEQ ID NO: 2488006 - RNA, 12 nt, Human
ugggacugggag

SEQ ID NO: 2488007 - RNA, 13 nt, Human
ugggacugggagg

SEQ ID NO: 2488008 - RNA, 15 nt, Human
ugggacugggagggc

SEQ ID NO: 2488009 - RNA, 16 nt, Human
ugggacugggagggcc

SEQ ID NO: 2488010 - RNA, 18 nt, Human
ugggacugggagggccca

SEQ ID NO: 2488011 - RNA, 13 nt, Human
ugggacuggccuc

SEQ ID NO: 2488012 - RNA, 18 nt, Human
ugggacucaaugcacuga

SEQ ID NO: 2488013 - RNA, 16 nt, Human
ugggacuacaggugug

SEQ ID NO: 2488014 - RNA, 13 nt, Human
agggagccuccug

SEQ ID NO: 2488015 - RNA, 11 nt, Human
agggagccucc

SEQ ID NO: 2488016 - RNA, 17 nt, Human
agggagccccuuugaug

SEQ ID NO: 2488017 - RNA, 18 nt, Human
agggagcaucagugcccu

SEQ ID NO: 2488018 - RNA, 19 nt, Human
agggagcauagaaggcagg

SEQ ID NO: 2488019 - RNA, 17 nt, Human
agggagcauagaaggca

SEQ ID NO: 2488020 - RNA, 21 nt, Human
agggagcauagaaggcaggug

SEQ ID NO: 2488021 - RNA, 20 nt, Human
agggagcauagaaggcaggu

SEQ ID NO: 2488022 - RNA, 14 nt, Human
agggagcauggcug

SEQ ID NO: 2488023 - RNA, 17 nt, Human
agggagcauuuuccucc

SEQ ID NO: 2488024 - RNA, 15 nt, Human
agggagcauuuuccu

SEQ ID NO: 2488025 - RNA, 17 nt, Human
agggagccuccugccca

SEQ ID NO: 2488026 - RNA, 16 nt, Human
agggagccuccugccc

SEQ ID NO: 2488027 - RNA, 15 nt, Human
agggagccuccugcc

SEQ ID NO: 2488028 - RNA, 14 nt, Human
agggagccuccugc

SEQ ID NO: 2488029 - RNA, 14 nt, Human
agggagccuggccc

SEQ ID NO: 2488030 - RNA, 18 nt, Human
agggagccuuugguucug

SEQ ID NO: 2488031 - RNA, 19 nt, Human
agggagcggccggccagcc

SEQ ID NO: 2488032 - RNA, 17 nt, Human
agggagcggaaagcagc

SEQ ID NO: 2488033 - RNA, 18 nt, Human
agggagcggaaagcagcu

SEQ ID NO: 2488034 - RNA, 22 nt, Human
agggagccuccugcccaguccc

SEQ ID NO: 2488035 - RNA, 14 nt, Human
agggagcggaaagc

SEQ ID NO: 2488036 - RNA, 16 nt, Human
agggagcgagggagaa

SEQ ID NO: 2488037 - RNA, 18 nt, Human
ugggacuacaggcaccca

SEQ ID NO: 2488038 - RNA, 21 nt, Human
agggagcggccggccagcccc

SEQ ID NO: 2488039 - RNA, 22 nt, Human
agggagcggccggccagccccu

SEQ ID NO: 2488040 - RNA, 21 nt, Human
ugggagaaccaaaaagaggcu

SEQ ID NO: 2488041 - RNA, 22 nt, Human
ugggacuucuuuucacauucuu

SEQ ID NO: 2488042 - RNA, 21 nt, Human
ugggacuucuuuucacauucu

SEQ ID NO: 2488043 - RNA, 20 nt, Human
ugggacuucuuuucacauuc

SEQ ID NO: 2488044 - RNA, 18 nt, Human
ugggacuucuuuucacau

SEQ ID NO: 2488045 - RNA, 19 nt, Human
ugggagaaauugacagauc

SEQ ID NO: 2488046 - RNA, 18 nt, Human
ugggagaaauugacagau

SEQ ID NO: 2488047 - RNA, 16 nt, Human
ugggagaaaugaaaaa

SEQ ID NO: 2488048 - RNA, 22 nt, Human
ugggaggauugcuugagcucag

SEQ ID NO: 2488049 - RNA, 17 nt, Human
ugggaggcgggagugga

SEQ ID NO: 2488050 - RNA, 22 nt, Human
ugggaggcggagaguacaguga

SEQ ID NO: 2488051 - RNA, 13 nt, Human
ugggaggcucacc

SEQ ID NO: 2488052 - RNA, 14 nt, Human
ugggaggcgcgagc

SEQ ID NO: 2488053 - RNA, 20 nt, Human
ugggaggauucuaugaggca

SEQ ID NO: 2488054 - RNA, 18 nt, Human
ugggaggauugcuugagc

SEQ ID NO: 2488055 - RNA, 21 nt, Human
ugggaggauugcuugagcuca

SEQ ID NO: 2488056 - RNA, 19 nt, Human
ugggaggcugagaugggag

SEQ ID NO: 2488057 - RNA, 11 nt, Human
ugggaggcuga

SEQ ID NO: 2488058 - RNA, 13 nt, Human
ugggaggcugagg

SEQ ID NO: 2488059 - RNA, 14 nt, Human
ugggaggcugaggc

SEQ ID NO: 2488060 - RNA, 15 nt, Human
ugggaggcugaggcg

SEQ ID NO: 2488061 - RNA, 19 nt, Human
ugggagggagcagacagga

SEQ ID NO: 2488062 - RNA, 18 nt, Human
ugggagggagcagacagg

SEQ ID NO: 2488063 - RNA, 17 nt, Human
ugggagggagcagacag

SEQ ID NO: 2488064 - RNA, 14 nt, Human
ugggaggcuucccc

SEQ ID NO: 2488065 - RNA, 18 nt, Human
ugggaggccuaggcgggc

SEQ ID NO: 2488066 - RNA, 16 nt, Human
ugggagggaggcucag

SEQ ID NO: 2488067 - RNA, 17 nt, Human
ugggagggaggcucagg

SEQ ID NO: 2488068 - RNA, 22 nt, Human
ugggagggaggcucaggucccu

SEQ ID NO: 2488069 - RNA, 18 nt, Human
ugggagggauagaggggg

SEQ ID NO: 2488070 - RNA, 23 nt, Human
ugggaggcucuggagcccacugu

SEQ ID NO: 2488071 - RNA, 17 nt, Human
ugggaggcucuggagcc

SEQ ID NO: 2488072 - RNA, 14 nt, Human
ugggaggcucugga

SEQ ID NO: 2488073 - RNA, 20 nt, Human
ugggaggcucacccccuucu

SEQ ID NO: 2488074 - RNA, 22 nt, Human
ugggaggcucacccccuucucc

SEQ ID NO: 2488075 - RNA, 21 nt, Human
ugggcaacccccagccugcua

SEQ ID NO: 2488076 - RNA, 14 nt, Human
ugggcaaggaggcc

SEQ ID NO: 2488077 - RNA, 16 nt, Human
ugggcaacauugcugg

SEQ ID NO: 2488078 - RNA, 15 nt, Human
ugggcaaagagugua

SEQ ID NO: 2488079 - RNA, 16 nt, Human
ugggcaacagagcaag

SEQ ID NO: 2488080 - RNA, 22 nt, Human
ugggcaaaacugaauuauaaga

SEQ ID NO: 2488081 - RNA, 14 nt, Human
ugggcaaacaggca

SEQ ID NO: 2488082 - RNA, 15 nt, Human
ugggcaaacaggcag

SEQ ID NO: 2488083 - RNA, 16 nt, Human
ugggcaaacaggcagu

SEQ ID NO: 2488084 - RNA, 15 nt, Human
ugggcaaagccuagu

SEQ ID NO: 2488085 - RNA, 21 nt, Human
ugggcaaagccuagugaaggc

SEQ ID NO: 2488086 - RNA, 12 nt, Human
ugggcaacagag

SEQ ID NO: 2488087 - RNA, 14 nt, Human
ugggcaacagagca

SEQ ID NO: 2488088 - RNA, 23 nt, Human
ugggaggggcgcccaccucccca

SEQ ID NO: 2488089 - RNA, 19 nt, Human
ugggaggggcgcccaccuc

SEQ ID NO: 2488090 - RNA, 19 nt, Human
ugggaggggcaggcugaca

SEQ ID NO: 2488091 - RNA, 23 nt, Human
ugggagggggcuugaagccaaag

SEQ ID NO: 2488092 - RNA, 16 nt, Human
ugggcaaaaaacucga

SEQ ID NO: 2488093 - RNA, 15 nt, Human
ugggcaaaaaacucg

SEQ ID NO: 2488094 - RNA, 20 nt, Human
ugggaggggcgcccaccucc

SEQ ID NO: 2488095 - RNA, 16 nt, Human
ugggauuuggucaaca

SEQ ID NO: 2488096 - RNA, 14 nt, Human
ugggagggcagcag

SEQ ID NO: 2488097 - RNA, 17 nt, Human
ugggagggcagcagggc

SEQ ID NO: 2488098 - RNA, 18 nt, Human
ugggagggcagcagggcu

SEQ ID NO: 2488099 - RNA, 19 nt, Human
ugggagggcagcagggcua

SEQ ID NO: 2488100 - RNA, 18 nt, Human
ugggaggggcaggcugac

SEQ ID NO: 2488101 - RNA, 17 nt, Human
ugggaggggcaggcuga

SEQ ID NO: 2488102 - RNA, 16 nt, Human
ugggaggggcaggcug

SEQ ID NO: 2488103 - RNA, 15 nt, Human
ugggaggggcaggcu

SEQ ID NO: 2488104 - RNA, 14 nt, Human
ugggaggggcaggc

SEQ ID NO: 2488105 - RNA, 12 nt, Human
ugggaggggcag

SEQ ID NO: 2488106 - RNA, 11 nt, Human
ugggaggggca

SEQ ID NO: 2488107 - RNA, 12 nt, Human
ugggagggccca

SEQ ID NO: 2488108 - RNA, 20 nt, Human
ugggcagaaggaagacuuca

SEQ ID NO: 2488109 - RNA, 16 nt, Human
ugggcagaaggaagac

SEQ ID NO: 2488110 - RNA, 23 nt, Human
ugggcagaaggaagacuucaucc

SEQ ID NO: 2488111 - RNA, 15 nt, Human
ugggcaagugauuga

SEQ ID NO: 2488112 - RNA, 15 nt, Human
ugggcaauauagcaa

SEQ ID NO: 2488113 - RNA, 16 nt, Human
ugggcaauauagcaag

SEQ ID NO: 2488114 - RNA, 13 nt, Human
ugggcagaaggaa

SEQ ID NO: 2488115 - RNA, 21 nt, Human
ugggcacacgccucccacugg

SEQ ID NO: 2488116 - RNA, 16 nt, Human
ugggcacacgccuccc

SEQ ID NO: 2488117 - RNA, 19 nt, Human
ugggcaaugauggcaauuu

SEQ ID NO: 2488118 - RNA, 18 nt, Human
uguacaucuauuuuggau

SEQ ID NO: 2488119 - RNA, 19 nt, Human
uguacaucuauuuuggauu

SEQ ID NO: 2488120 - RNA, 20 nt, Human
uguacaucuauuuuggauug

SEQ ID NO: 2488121 - RNA, 21 nt, Human
uguacaucuauuuuggauugu

SEQ ID NO: 2488122 - RNA, 14 nt, Human
uguacaugaaaaca

SEQ ID NO: 2488123 - RNA, 16 nt, Human
uguacaugaaaacaca

SEQ ID NO: 2488124 - RNA, 23 nt, Human
uguacaucuauuuuggauuguau

SEQ ID NO: 2488125 - RNA, 14 nt, Human
uguacaucuggccu

SEQ ID NO: 2488126 - RNA, 22 nt, Human
uguacauagccuauauuuacag

SEQ ID NO: 2488127 - RNA, 16 nt, Human
uguacauagccuauau

SEQ ID NO: 2488128 - RNA, 15 nt, Human
uguacauagccuaua

SEQ ID NO: 2488129 - RNA, 11 nt, Human
uguacauagcc

SEQ ID NO: 2488130 - RNA, 23 nt, Human
uguacauagccuauauuuacagu

SEQ ID NO: 2488131 - RNA, 18 nt, Human
uguacauaguuauuuauu

SEQ ID NO: 2488132 - RNA, 21 nt, Human
uguacauacccuggccgcccc

SEQ ID NO: 2488133 - RNA, 17 nt, Human
uguacauaacugaaaau

SEQ ID NO: 2488134 - RNA, 18 nt, Human
uguacauaacugaaaaug

SEQ ID NO: 2488135 - RNA, 19 nt, Human
uguacauaacugaaaaugu

SEQ ID NO: 2488136 - RNA, 23 nt, Human
uguaauuuuguucuaguuuucag

SEQ ID NO: 2488137 - RNA, 16 nt, Human
uguaauuguuguuugu

SEQ ID NO: 2488138 - RNA, 20 nt, Human
uguaauuuuuuuaucgucac

SEQ ID NO: 2488139 - RNA, 13 nt, Human
uguacaaaauaaa

SEQ ID NO: 2488140 - RNA, 19 nt, Human
uguacauaaugcgugcaua

SEQ ID NO: 2488141 - RNA, 20 nt, Human
uguacauaaugcgugcauac

SEQ ID NO: 2488142 - RNA, 17 nt, Human
uguacaaaauaaacaaa

SEQ ID NO: 2488143 - RNA, 13 nt, Human
uguacauaacuga

SEQ ID NO: 2488144 - RNA, 14 nt, Human
uguacauaacugaa

SEQ ID NO: 2488145 - RNA, 15 nt, Human
uguacauaacugaaa

SEQ ID NO: 2488146 - RNA, 12 nt, Human
uguacaguuuuu

SEQ ID NO: 2488147 - RNA, 21 nt, Human
uguaauuccuaccucccugca

SEQ ID NO: 2488148 - RNA, 15 nt, Human
uguaauuccuaccuc

SEQ ID NO: 2488149 - RNA, 14 nt, Human
uguaauucuaaaug

SEQ ID NO: 2488150 - RNA, 13 nt, Human
uguaauucuaaau

SEQ ID NO: 2488151 - RNA, 23 nt, Human
uguaauugcuuacauuuuuacaa

SEQ ID NO: 2488152 - RNA, 18 nt, Human
uguaauugcuuacauuuu

SEQ ID NO: 2488153 - RNA, 17 nt, Human
uguaauugcuuacauuu

SEQ ID NO: 2488154 - RNA, 16 nt, Human
uguaauugcuuacauu

SEQ ID NO: 2488155 - RNA, 15 nt, Human
uguaauugcuuacau

SEQ ID NO: 2488156 - RNA, 14 nt, Human
uguaauugcuuaca

SEQ ID NO: 2488157 - RNA, 16 nt, Human
uguaauucuaaaugaa

SEQ ID NO: 2488158 - RNA, 15 nt, Human
uguaauucuaaauga

SEQ ID NO: 2488159 - RNA, 15 nt, Human
uguaauugaauaaag

SEQ ID NO: 2488160 - RNA, 19 nt, Human
uguaauuaaguacuaugua

SEQ ID NO: 2488161 - RNA, 21 nt, Human
uguaauuaaguacuauguauc

SEQ ID NO: 2488162 - RNA, 19 nt, Human
uguaagggaaacugccagc

SEQ ID NO: 2488163 - RNA, 18 nt, Human
uguaauuaaguacuaugu

SEQ ID NO: 2488164 - RNA, 19 nt, Human
agguuggaagcuagcuccc

SEQ ID NO: 2488165 - RNA, 18 nt, Human
agguuggaagcuagcucc

SEQ ID NO: 2488166 - RNA, 20 nt, Human
agguuggcaaaaaggcagga

SEQ ID NO: 2488167 - RNA, 21 nt, Human
agguuucauacucuagauuuu

SEQ ID NO: 2488168 - RNA, 12 nt, Human
agguuucauacu

SEQ ID NO: 2488169 - RNA, 17 nt, Human
agguuucguuucuguau

SEQ ID NO: 2488170 - RNA, 14 nt, Human
agguuucugaaaau

SEQ ID NO: 2488171 - RNA, 13 nt, Human
uguaagggaaacu

SEQ ID NO: 2488172 - RNA, 18 nt, Human
uguaagggaaacugccag

SEQ ID NO: 2488173 - RNA, 18 nt, Human
agguuucuggucucuagg

SEQ ID NO: 2488174 - RNA, 19 nt, Human
agguuucugaguuccugca

SEQ ID NO: 2488175 - RNA, 21 nt, Human
agguuucugaguuccugcaug

SEQ ID NO: 2488176 - RNA, 23 nt, Human
agguuucugaaaauuaacacugc

SEQ ID NO: 2488177 - RNA, 15 nt, Human
agguuucugaaaauu

SEQ ID NO: 2488178 - RNA, 12 nt, Human
ugggcugaggga

SEQ ID NO: 2488179 - RNA, 16 nt, Human
ugggcugagggagccu

SEQ ID NO: 2488180 - RNA, 11 nt, Human
ugggcugaggg

SEQ ID NO: 2488181 - RNA, 14 nt, Human
ugggcucugggagc

SEQ ID NO: 2488182 - RNA, 23 nt, Human
ugggcucugccccagcucuggcu

SEQ ID NO: 2488183 - RNA, 20 nt, Human
ugggcucugccccagcucug

SEQ ID NO: 2488184 - RNA, 21 nt, Human
ugggcucugccccagcucugg

SEQ ID NO: 2488185 - RNA, 18 nt, Human
ugggcucugccacccuac

SEQ ID NO: 2488186 - RNA, 15 nt, Human
ugggcucugccaccc

SEQ ID NO: 2488187 - RNA, 13 nt, Human
ugggcucugccac

SEQ ID NO: 2488188 - RNA, 22 nt, Human
ugggcucugcaauuccccucug

SEQ ID NO: 2488189 - RNA, 20 nt, Human
ugggcucugcaauuccccuc

SEQ ID NO: 2488190 - RNA, 12 nt, Human
ugggcucugccc

SEQ ID NO: 2488191 - RNA, 15 nt, Human
ugggcucugccccag

SEQ ID NO: 2488192 - RNA, 17 nt, Human
ugggcucugccccagcu

SEQ ID NO: 2488193 - RNA, 19 nt, Human
ugggcucugccccagcucu

SEQ ID NO: 2488194 - RNA, 18 nt, Human
aggugccugugaggcagg

SEQ ID NO: 2488195 - RNA, 15 nt, Human
ugggcugcccuggug

SEQ ID NO: 2488196 - RNA, 19 nt, Human
aggugccugugaggcaggg

SEQ ID NO: 2488197 - RNA, 20 nt, Human
aggugccugugaggcagggg

SEQ ID NO: 2488198 - RNA, 22 nt, Human
aggugccugugaggcaggggcg

SEQ ID NO: 2488199 - RNA, 23 nt, Human
aggugccuucuuauucucacucc

SEQ ID NO: 2488200 - RNA, 14 nt, Human
ugggcugcccuggu

SEQ ID NO: 2488201 - RNA, 13 nt, Human
ugggcugcccugg

SEQ ID NO: 2488202 - RNA, 20 nt, Human
ugggcugcacucugugccca

SEQ ID NO: 2488203 - RNA, 19 nt, Human
ugggcugcacucugugccc

SEQ ID NO: 2488204 - RNA, 18 nt, Human
ugggcugcacucugugcc

SEQ ID NO: 2488205 - RNA, 17 nt, Human
ugggcugcacucugugc

SEQ ID NO: 2488206 - RNA, 22 nt, Human
ugggcugcacucugugcccaug

SEQ ID NO: 2488207 - RNA, 21 nt, Human
ugggcugcacucugugcccau

SEQ ID NO: 2488208 - RNA, 21 nt, Human
ugggcugcagcagaggcacug

SEQ ID NO: 2488209 - RNA, 16 nt, Human
ugggcugccaugugaa

SEQ ID NO: 2488210 - RNA, 17 nt, Human
aggugggagcaggagau

SEQ ID NO: 2488211 - RNA, 16 nt, Human
aggugggagcaggaga

SEQ ID NO: 2488212 - RNA, 15 nt, Human
aggugggagcaggag

SEQ ID NO: 2488213 - RNA, 14 nt, Human
aggugggagcagga

SEQ ID NO: 2488214 - RNA, 13 nt, Human
aggugggagcagg

SEQ ID NO: 2488215 - RNA, 19 nt, Human
agguggcugagccccuguc

SEQ ID NO: 2488216 - RNA, 23 nt, Human
aggugggaaaugguaugagcuga

SEQ ID NO: 2488217 - RNA, 21 nt, Human
aggugccuuggagggucccaa

SEQ ID NO: 2488218 - RNA, 15 nt, Human
agguggcugagcccc

SEQ ID NO: 2488219 - RNA, 17 nt, Human
agguggcugagccccug

SEQ ID NO: 2488220 - RNA, 14 nt, Human
agguggcugagccc

SEQ ID NO: 2488221 - RNA, 23 nt, Human
agguggcugacccagucccuggg

SEQ ID NO: 2488222 - RNA, 16 nt, Human
aggugcuacaaaaaca

SEQ ID NO: 2488223 - RNA, 21 nt, Human
aggugccugugaggcaggggc

SEQ ID NO: 2488224 - RNA, 13 nt, Human
aggugccuucuua

SEQ ID NO: 2488225 - RNA, 10 nt, Human
aggugccuug

SEQ ID NO: 2488226 - RNA, 22 nt, Human
aggugccuucuuauucucacuc

SEQ ID NO: 2488227 - RNA, 23 nt, Human
aggugccuuggagggucccaagc

SEQ ID NO: 2488228 - RNA, 23 nt, Human
aggugcuaaauggucgcccagga

SEQ ID NO: 2488229 - RNA, 12 nt, Human
aggugggaggau

SEQ ID NO: 2488230 - RNA, 20 nt, Human
aggugggagcaggagauuga

SEQ ID NO: 2488231 - RNA, 13 nt, Human
aggugggagcuug

SEQ ID NO: 2488232 - RNA, 20 nt, Human
aggugggcgggcagcacagc

SEQ ID NO: 2488233 - RNA, 19 nt, Human
aggugggcgggcagcacag

SEQ ID NO: 2488234 - RNA, 18 nt, Human
aggugggcgggcagcaca

SEQ ID NO: 2488235 - RNA, 16 nt, Human
aggugggcgggcagca

SEQ ID NO: 2488236 - RNA, 15 nt, Human
aggugggccuugcua

SEQ ID NO: 2488237 - RNA, 19 nt, Human
aggugggccuugcuaccuc

SEQ ID NO: 2488238 - RNA, 21 nt, Human
aggugggccuugcuaccucaa

SEQ ID NO: 2488239 - RNA, 22 nt, Human
aggugggccuugcuaccucaag

SEQ ID NO: 2488240 - RNA, 16 nt, Human
aggugggcugagcccu

SEQ ID NO: 2488241 - RNA, 17 nt, Human
aggugggcugagcccug

SEQ ID NO: 2488242 - RNA, 15 nt, Human
aggugggcugagccc

SEQ ID NO: 2488243 - RNA, 22 nt, Human
aggugggcguggucacugcugu

SEQ ID NO: 2488244 - RNA, 22 nt, Human
aggugugagucaccaagcccag

SEQ ID NO: 2488245 - RNA, 21 nt, Human
aggugugagucaccaagccca

SEQ ID NO: 2488246 - RNA, 20 nt, Human
aggugucccugcacuugcag

SEQ ID NO: 2488247 - RNA, 16 nt, Human
aggugucccugcacuu

SEQ ID NO: 2488248 - RNA, 19 nt, Human
aggugucaggcugcuggcg

SEQ ID NO: 2488249 - RNA, 18 nt, Human
aggugucaggcugcuggc

SEQ ID NO: 2488250 - RNA, 17 nt, Human
aggugucaggcugcugg

SEQ ID NO: 2488251 - RNA, 17 nt, Human
agguggggacagggaug

SEQ ID NO: 2488252 - RNA, 20 nt, Human
agguguauggagagaaaaca

SEQ ID NO: 2488253 - RNA, 15 nt, Human
aggugucauacagau

SEQ ID NO: 2488254 - RNA, 21 nt, Human
aggugucauacagauuugcaa

SEQ ID NO: 2488255 - RNA, 15 nt, Human
aggugucauuuccau

SEQ ID NO: 2488256 - RNA, 17 nt, Human
aggugucauuuccauua

SEQ ID NO: 2488257 - RNA, 14 nt, Human
agguggggacaggg

SEQ ID NO: 2488258 - RNA, 13 nt, Human
agguggggacagg

SEQ ID NO: 2488259 - RNA, 18 nt, Human
agguggggagacugggcu

SEQ ID NO: 2488260 - RNA, 21 nt, Human
aggugggcuucccaguggcug

SEQ ID NO: 2488261 - RNA, 15 nt, Human
aggugggcuucccag

SEQ ID NO: 2488262 - RNA, 18 nt, Human
aggugggcugagcccugg

SEQ ID NO: 2488263 - RNA, 19 nt, Human
aggugggcugagcccuggc

SEQ ID NO: 2488264 - RNA, 22 nt, Human
aggugggcgggcagcacagcaa

SEQ ID NO: 2488265 - RNA, 22 nt, Human
agguggcugacccagucccugg

SEQ ID NO: 2488266 - RNA, 20 nt, Human
aggugggcugagcccuggca

SEQ ID NO: 2488267 - RNA, 12 nt, Human
aggugugcucug

SEQ ID NO: 2488268 - RNA, 14 nt, Human
aggugugcaagaga

SEQ ID NO: 2488269 - RNA, 19 nt, Human
agguucuucccuuuuacau

SEQ ID NO: 2488270 - RNA, 12 nt, Human
agguugaaagac

SEQ ID NO: 2488271 - RNA, 21 nt, Human
agguucuucuuccugaagcug

SEQ ID NO: 2488272 - RNA, 19 nt, Human
agguucuucuuccugaagc

SEQ ID NO: 2488273 - RNA, 23 nt, Human
agguucuucuuccugaagcugag

SEQ ID NO: 2488274 - RNA, 23 nt, Human
agguucuucccuuuuacauacug

SEQ ID NO: 2488275 - RNA, 16 nt, Human
agguucuucuuccuga

SEQ ID NO: 2488276 - RNA, 14 nt, Human
agguugaagcacca

SEQ ID NO: 2488277 - RNA, 14 nt, Human
agguugcagugagc

SEQ ID NO: 2488278 - RNA, 19 nt, Human
agguugcagugagccaaga

SEQ ID NO: 2488279 - RNA, 18 nt, Human
agguugcagugagccaag

SEQ ID NO: 2488280 - RNA, 17 nt, Human
agguugcagugagcuga

SEQ ID NO: 2488281 - RNA, 24 nt, Human
agguugcugguugcugugugguuu

SEQ ID NO: 2488282 - RNA, 17 nt, Human
agguugcugguugcugu

SEQ ID NO: 2488283 - RNA, 15 nt, Human
agguugaagccaagu

SEQ ID NO: 2488284 - RNA, 13 nt, Human
agguugaagccaa

SEQ ID NO: 2488285 - RNA, 12 nt, Human
agguugaagcca

SEQ ID NO: 2488286 - RNA, 12 nt, Human
agguugaagagg

SEQ ID NO: 2488287 - RNA, 23 nt, Human
agguugaagccaaguggggugcu

SEQ ID NO: 2488288 - RNA, 13 nt, Human
uguauauaugugu

SEQ ID NO: 2488289 - RNA, 14 nt, Human
uguauauaugugug

SEQ ID NO: 2488290 - RNA, 12 nt, Human
uguauauaugug

SEQ ID NO: 2488291 - RNA, 17 nt, Human
uguauauaucugcuuca

SEQ ID NO: 2488292 - RNA, 18 nt, Human
uguauauauuuccuauau

SEQ ID NO: 2488293 - RNA, 21 nt, Human
uguauauacgcaucuauaaau

SEQ ID NO: 2488294 - RNA, 17 nt, Human
uguauauacgcaucuau

SEQ ID NO: 2488295 - RNA, 12 nt, Human
uguauauacuuu

SEQ ID NO: 2488296 - RNA, 13 nt, Human
uguauauacuuuu

SEQ ID NO: 2488297 - RNA, 17 nt, Human
uguauauauauuaagag

SEQ ID NO: 2488298 - RNA, 18 nt, Human
uguauaucagaaaaggga

SEQ ID NO: 2488299 - RNA, 14 nt, Human
uguauaucagaaaa

SEQ ID NO: 2488300 - RNA, 13 nt, Human
uguauaucagaaa

SEQ ID NO: 2488301 - RNA, 18 nt, Human
uguauauccuuucuaaca

SEQ ID NO: 2488302 - RNA, 20 nt, Human
uguauauauguguguuuaaa

SEQ ID NO: 2488303 - RNA, 19 nt, Human
uguauauauguguguuuaa

SEQ ID NO: 2488304 - RNA, 18 nt, Human
uguauauauguguguuua

SEQ ID NO: 2488305 - RNA, 15 nt, Human
uguauauaugugugu

SEQ ID NO: 2488306 - RNA, 22 nt, Human
uguauauauuuccuauauuguu

SEQ ID NO: 2488307 - RNA, 18 nt, Human
uguaguguuggagaagaa

SEQ ID NO: 2488308 - RNA, 17 nt, Human
uguaguguuggagaaga

SEQ ID NO: 2488309 - RNA, 24 nt, Human
uguauaguguaaaauaagaaugau

SEQ ID NO: 2488310 - RNA, 16 nt, Human
uguauaguguaaaaua

SEQ ID NO: 2488311 - RNA, 15 nt, Human
uguauaguguaaaau

SEQ ID NO: 2488312 - RNA, 17 nt, Human
uguagugagauagcauu

SEQ ID NO: 2488313 - RNA, 22 nt, Human
uguauaguugcuugccugauau

SEQ ID NO: 2488314 - RNA, 16 nt, Human
uguauaguugcuugcc

SEQ ID NO: 2488315 - RNA, 14 nt, Human
uguauaguugcuug

SEQ ID NO: 2488316 - RNA, 14 nt, Human
uguauaguucacgu

SEQ ID NO: 2488317 - RNA, 13 nt, Human
uguauaguugcuu

SEQ ID NO: 2488318 - RNA, 20 nt, Human
uguauaguuaggauagcauu

SEQ ID NO: 2488319 - RNA, 19 nt, Human
uguauauaaaauauuuuca

SEQ ID NO: 2488320 - RNA, 21 nt, Human
uguauaguuguggacauuuaa

SEQ ID NO: 2488321 - RNA, 15 nt, Human
uguauauacaauaac

SEQ ID NO: 2488322 - RNA, 16 nt, Human
uguauauacaauaaca

SEQ ID NO: 2488323 - RNA, 18 nt, Human
uguauauacaauaacaua

SEQ ID NO: 2488324 - RNA, 22 nt, Human
uguauauacauuuaugaauuaa

SEQ ID NO: 2488325 - RNA, 18 nt, Human
uguauaguugcuugccug

SEQ ID NO: 2488326 - RNA, 17 nt, Human
uguauauacaauaacau

SEQ ID NO: 2488327 - RNA, 16 nt, Human
uguaguguuggagaag

SEQ ID NO: 2488328 - RNA, 22 nt, Human
uguaguccgugcugacagcugc

SEQ ID NO: 2488329 - RNA, 17 nt, Human
uguaguccucauaaaaa

SEQ ID NO: 2488330 - RNA, 23 nt, Human
uguaguccuagccacucaggagg

SEQ ID NO: 2488331 - RNA, 20 nt, Human
uguaguccgugcugacagcu

SEQ ID NO: 2488332 - RNA, 14 nt, Human
uguagucccagcua

SEQ ID NO: 2488333 - RNA, 17 nt, Human
uguagucccagcuacuc

SEQ ID NO: 2488334 - RNA, 21 nt, Human
uguagugagauagcauuguga

SEQ ID NO: 2488335 - RNA, 21 nt, Human
uguaguccucauaaaaagcaa

SEQ ID NO: 2488336 - RNA, 14 nt, Human
uguagucucaggac

SEQ ID NO: 2488337 - RNA, 22 nt, Human
uguagugaaucacguaaagcua

SEQ ID NO: 2488338 - RNA, 16 nt, Human
uguaggguuauaauaa

SEQ ID NO: 2488339 - RNA, 16 nt, Human
uguagggcuggaccua

SEQ ID NO: 2488340 - RNA, 15 nt, Human
uguagggcuggaccu

SEQ ID NO: 2488341 - RNA, 19 nt, Human
uguaggggacgagaaagau

SEQ ID NO: 2488342 - RNA, 18 nt, Human
uguaggguaaggugccuu

SEQ ID NO: 2488343 - RNA, 17 nt, Human
uguaggguuauaauaau

SEQ ID NO: 2488344 - RNA, 15 nt, Human
uguagucccagccac

SEQ ID NO: 2488345 - RNA, 21 nt, Human
aguagauuuucuuuaaaagaa

SEQ ID NO: 2488346 - RNA, 20 nt, Human
aguagauuuucuuuaaaaga

SEQ ID NO: 2488347 - RNA, 18 nt, Human
aguagauuuucuuuaaaa

SEQ ID NO: 2488348 - RNA, 17 nt, Human
aguagauuuucuuuaaa

SEQ ID NO: 2488349 - RNA, 16 nt, Human
aguagauuuucuuuaa

SEQ ID NO: 2488350 - RNA, 13 nt, Human
aguagauuuucuu

SEQ ID NO: 2488351 - RNA, 15 nt, Human
aguagauuuuccaaa

SEQ ID NO: 2488352 - RNA, 22 nt, Human
aguagcaaguucuagagaagag

SEQ ID NO: 2488353 - RNA, 20 nt, Human
aguagcaaguucuagagaag

SEQ ID NO: 2488354 - RNA, 16 nt, Human
aguagcaaguucuaga

SEQ ID NO: 2488355 - RNA, 23 nt, Human
aguagauuuucuuuaaaagaaug

SEQ ID NO: 2488356 - RNA, 14 nt, Human
aguagcaugagaga

SEQ ID NO: 2488357 - RNA, 23 nt, Human
aguagcaugagagaauuguauca

SEQ ID NO: 2488358 - RNA, 19 nt, Human
aguagcauguugagccagg

SEQ ID NO: 2488359 - RNA, 22 nt, Human
uguagggagggcggcaggggcc

SEQ ID NO: 2488360 - RNA, 12 nt, Human
uguagggcugga

SEQ ID NO: 2488361 - RNA, 18 nt, Human
aguagcacccuggauuga

SEQ ID NO: 2488362 - RNA, 20 nt, Human
aguagcaguagaugcaugua

SEQ ID NO: 2488363 - RNA, 19 nt, Human
aguaccauaguaccauuua

SEQ ID NO: 2488364 - RNA, 15 nt, Human
aguaccacucaggcc

SEQ ID NO: 2488365 - RNA, 21 nt, Human
aguaccauaguaccauuuaua

SEQ ID NO: 2488366 - RNA, 23 nt, Human
aguaccauaguaccauuuauaca

SEQ ID NO: 2488367 - RNA, 19 nt, Human
aguacaggcagcacagaga

SEQ ID NO: 2488368 - RNA, 14 nt, Human
aguaccaaaugcuu

SEQ ID NO: 2488369 - RNA, 15 nt, Human
aguaccaaucauuuu

SEQ ID NO: 2488370 - RNA, 16 nt, Human
aguaccaaucauuuua

SEQ ID NO: 2488371 - RNA, 16 nt, Human
aguaaaaccacagcag

SEQ ID NO: 2488372 - RNA, 17 nt, Human
aguaaaaccacagcagu

SEQ ID NO: 2488373 - RNA, 19 nt, Human
aguaaaaccacagcaguug

SEQ ID NO: 2488374 - RNA, 20 nt, Human
aguaaaaccacagcaguuga

SEQ ID NO: 2488375 - RNA, 20 nt, Human
aguaaguaccacucaggcca

SEQ ID NO: 2488376 - RNA, 19 nt, Human
aguaaguaccacucaggcc

SEQ ID NO: 2488377 - RNA, 23 nt, Human
aguaagugggguugcaaccacug

SEQ ID NO: 2488378 - RNA, 15 nt, Human
aguaagugccuucca

SEQ ID NO: 2488379 - RNA, 13 nt, Human
aguaagugccuuc

SEQ ID NO: 2488380 - RNA, 16 nt, Human
aguaagugccuuccau

SEQ ID NO: 2488381 - RNA, 16 nt, Human
aguaauaaacuguguu

SEQ ID NO: 2488382 - RNA, 13 nt, Human
aguaauagagcaa

SEQ ID NO: 2488383 - RNA, 22 nt, Human
aguaaucccgccaccuaucucg

SEQ ID NO: 2488384 - RNA, 17 nt, Human
aguaauaaacuguguuu

SEQ ID NO: 2488385 - RNA, 18 nt, Human
agguuuuuuuccuucuga

SEQ ID NO: 2488386 - RNA, 16 nt, Human
agguuuuuuuccuucu

SEQ ID NO: 2488387 - RNA, 15 nt, Human
uguacauguguagcc

SEQ ID NO: 2488388 - RNA, 11 nt, Human
uguacaugugu

SEQ ID NO: 2488389 - RNA, 19 nt, Human
uguacauggcagaguuugu

SEQ ID NO: 2488390 - RNA, 17 nt, Human
uguacauggcagaguuu

SEQ ID NO: 2488391 - RNA, 22 nt, Human
uguacaugaagaagcuaaaucc

SEQ ID NO: 2488392 - RNA, 14 nt, Human
uguacaugcauuca

SEQ ID NO: 2488393 - RNA, 16 nt, Human
uguacaugagaaggaa

SEQ ID NO: 2488394 - RNA, 21 nt, Human
uguacauggaauaacauguaa

SEQ ID NO: 2488395 - RNA, 16 nt, Human
aguaaaaacaaagaaa

SEQ ID NO: 2488396 - RNA, 21 nt, Human
agguuuuuuuguauaguaaag

SEQ ID NO: 2488397 - RNA, 22 nt, Human
agguuuuuuuguauaguaaagu

SEQ ID NO: 2488398 - RNA, 23 nt, Human
aguaaaaacaaagaaauuaugug

SEQ ID NO: 2488399 - RNA, 19 nt, Human
agguuuuuuuccuucugaa

SEQ ID NO: 2488400 - RNA, 19 nt, Human
aguaaaaaacaacuucuuu

SEQ ID NO: 2488401 - RNA, 16 nt, Human
aguaauugugaaaaag

SEQ ID NO: 2488402 - RNA, 13 nt, Human
aguaauugugaaa

SEQ ID NO: 2488403 - RNA, 15 nt, Human
aguaauugugaaaaa

SEQ ID NO: 2488404 - RNA, 22 nt, Human
aguaauugguccgaucuuugac

SEQ ID NO: 2488405 - RNA, 12 nt, Human
aguaauugugaa

SEQ ID NO: 2488406 - RNA, 21 nt, Human
aguacacuguuucaaacuuua

SEQ ID NO: 2488407 - RNA, 19 nt, Human
aguaauuguugguuaucuu

SEQ ID NO: 2488408 - RNA, 13 nt, Human
aguaauuuauugu

SEQ ID NO: 2488409 - RNA, 23 nt, Human
aguacacuguuucaaacuuuacu

SEQ ID NO: 2488410 - RNA, 23 nt, Human
aguaauuuauuguuuuuccuugu

SEQ ID NO: 2488411 - RNA, 22 nt, Human
aguaauuuauuguuuuuccuug

SEQ ID NO: 2488412 - RNA, 19 nt, Human
aguacauuuggagacacaa

SEQ ID NO: 2488413 - RNA, 14 nt, Human
aguacaggcagcac

SEQ ID NO: 2488414 - RNA, 17 nt, Human
aguacaggcagcacaga

SEQ ID NO: 2488415 - RNA, 18 nt, Human
aguacaggcagcacagag

SEQ ID NO: 2488416 - RNA, 13 nt, Human
aguaauuggaaag

SEQ ID NO: 2488417 - RNA, 12 nt, Human
aguaauuggaaa

SEQ ID NO: 2488418 - RNA, 19 nt, Human
aguaauucaagaaaacaac

SEQ ID NO: 2488419 - RNA, 17 nt, Human
aguaauucugcugucuc

SEQ ID NO: 2488420 - RNA, 14 nt, Human
aguaauucucaggc

SEQ ID NO: 2488421 - RNA, 21 nt, Human
aguaaucuguguacaaagaaa

SEQ ID NO: 2488422 - RNA, 18 nt, Human
aguaauugacaugugcca

SEQ ID NO: 2488423 - RNA, 20 nt, Human
aguaauugacaugugccagg

SEQ ID NO: 2488424 - RNA, 13 nt, Human
aguaaugauaacu

SEQ ID NO: 2488425 - RNA, 12 nt, Human
aguaaugaauuu

SEQ ID NO: 2488426 - RNA, 21 nt, Human
aguaaugaauuuuuaugauau

SEQ ID NO: 2488427 - RNA, 22 nt, Human
aguaaugaauuuuuaugauauu

SEQ ID NO: 2488428 - RNA, 17 nt, Human
aguaaucgcuuaaagau

SEQ ID NO: 2488429 - RNA, 19 nt, Human
aguaaucuaauauggccac

SEQ ID NO: 2488430 - RNA, 19 nt, Human
aguaaucuguguacaaaga

SEQ ID NO: 2488431 - RNA, 13 nt, Human
aguaaucugugua

SEQ ID NO: 2488432 - RNA, 23 nt, Human
ugucccugcacuugcagacucua

SEQ ID NO: 2488433 - RNA, 22 nt, Human
ugucccugcacuugcagacucu

SEQ ID NO: 2488434 - RNA, 20 nt, Human
ugucccugcacuugcagacu

SEQ ID NO: 2488435 - RNA, 22 nt, Human
uguccccuucucucaucucuua

SEQ ID NO: 2488436 - RNA, 16 nt, Human
ugucccgggguccugu

SEQ ID NO: 2488437 - RNA, 21 nt, Human
ugucccgggguccuguggcag

SEQ ID NO: 2488438 - RNA, 20 nt, Human
ugucccgggguccuguggca

SEQ ID NO: 2488439 - RNA, 19 nt, Human
ugucccgggguccuguggc

SEQ ID NO: 2488440 - RNA, 21 nt, Human
uguccccucuugccccaaccc

SEQ ID NO: 2488441 - RNA, 17 nt, Human
uguccccucuugcccca

SEQ ID NO: 2488442 - RNA, 20 nt, Human
uguccccuucucucaucucu

SEQ ID NO: 2488443 - RNA, 16 nt, Human
uguccccuucucucau

SEQ ID NO: 2488444 - RNA, 14 nt, Human
uguccccuucucuc

SEQ ID NO: 2488445 - RNA, 11 nt, Human
uguccccuucu

SEQ ID NO: 2488446 - RNA, 15 nt, Human
uguccccucuugccc

SEQ ID NO: 2488447 - RNA, 14 nt, Human
uguccccucuugcc

SEQ ID NO: 2488448 - RNA, 14 nt, Human
uguccccucuugac

SEQ ID NO: 2488449 - RNA, 11 nt, Human
uguccccucuu

SEQ ID NO: 2488450 - RNA, 21 nt, Human
uguccccuccucacucccuuc

SEQ ID NO: 2488451 - RNA, 14 nt, Human
uguccagcgccuag

SEQ ID NO: 2488452 - RNA, 14 nt, Human
uguccagccugggc

SEQ ID NO: 2488453 - RNA, 19 nt, Human
uguccagccugggcagcca

SEQ ID NO: 2488454 - RNA, 22 nt, Human
uguccagccugggcagccaggc

SEQ ID NO: 2488455 - RNA, 23 nt, Human
uguccagccugggcagccaggcu

SEQ ID NO: 2488456 - RNA, 22 nt, Human
uguccaagaagcccaggaaagg

SEQ ID NO: 2488457 - RNA, 18 nt, Human
uguccaagaagcccagga

SEQ ID NO: 2488458 - RNA, 17 nt, Human
uguccaagaagcccagg

SEQ ID NO: 2488459 - RNA, 16 nt, Human
uguccaagaagcccag

SEQ ID NO: 2488460 - RNA, 12 nt, Human
uguccagccugg

SEQ ID NO: 2488461 - RNA, 17 nt, Human
uguccagacagccugua

SEQ ID NO: 2488462 - RNA, 16 nt, Human
uguccagacagccugu

SEQ ID NO: 2488463 - RNA, 11 nt, Human
uguccagagag

SEQ ID NO: 2488464 - RNA, 21 nt, Human
uguccagagagcaacucugag

SEQ ID NO: 2488465 - RNA, 23 nt, Human
uguccagagagagaagugccccu

SEQ ID NO: 2488466 - RNA, 15 nt, Human
uguccagacagccug

SEQ ID NO: 2488467 - RNA, 14 nt, Human
uguccagacagccu

SEQ ID NO: 2488468 - RNA, 13 nt, Human
uguccagacagcc

SEQ ID NO: 2488469 - RNA, 15 nt, Human
uguccacacccagcu

SEQ ID NO: 2488470 - RNA, 23 nt, Human
uguccaauuguugacaguucuga

SEQ ID NO: 2488471 - RNA, 12 nt, Human
uguccagacagc

SEQ ID NO: 2488472 - RNA, 14 nt, Human
uguccaauccuaug

SEQ ID NO: 2488473 - RNA, 16 nt, Human
uguccaauucucuuua

SEQ ID NO: 2488474 - RNA, 18 nt, Human
uguccaagugugugugcg

SEQ ID NO: 2488475 - RNA, 14 nt, Human
uguccaaggaaacu

SEQ ID NO: 2488476 - RNA, 17 nt, Human
uguccaagugugugugc

SEQ ID NO: 2488477 - RNA, 22 nt, Human
ugucauuugagcagggcucagc

SEQ ID NO: 2488478 - RNA, 21 nt, Human
ugucauuugagcagggcucag

SEQ ID NO: 2488479 - RNA, 20 nt, Human
ugucauuugagcagggcuca

SEQ ID NO: 2488480 - RNA, 20 nt, Human
ugucagguggggcagcuuga

SEQ ID NO: 2488481 - RNA, 18 nt, Human
ugucagguggggcagcuu

SEQ ID NO: 2488482 - RNA, 17 nt, Human
ugucagguggggcagcu

SEQ ID NO: 2488483 - RNA, 23 nt, Human
ugucagcaaaaagcaaaaucauu

SEQ ID NO: 2488484 - RNA, 22 nt, Human
ugucagcaaaaagcaaaaucau

SEQ ID NO: 2488485 - RNA, 19 nt, Human
ugucagcaaaaagcaaaau

SEQ ID NO: 2488486 - RNA, 18 nt, Human
ugucagcaaaaagcaaaa

SEQ ID NO: 2488487 - RNA, 14 nt, Human
ugucagcaaaaagc

SEQ ID NO: 2488488 - RNA, 13 nt, Human
ugucagcaaaaag

SEQ ID NO: 2488489 - RNA, 15 nt, Human
uguccaagaagccca

SEQ ID NO: 2488490 - RNA, 14 nt, Human
uguccaagaagccc

SEQ ID NO: 2488491 - RNA, 21 nt, Human
uguccaaccuaaccccuuucc

SEQ ID NO: 2488492 - RNA, 19 nt, Human
uguccaaagcagggucugg

SEQ ID NO: 2488493 - RNA, 15 nt, Human
uguccaaccuaaccc

SEQ ID NO: 2488494 - RNA, 22 nt, Human
uguccaaccuaaccccuuuccu

SEQ ID NO: 2488495 - RNA, 18 nt, Human
uguccaacccgaggcccg

SEQ ID NO: 2488496 - RNA, 19 nt, Human
uguccaaaggaggcuggca

SEQ ID NO: 2488497 - RNA, 18 nt, Human
uguccaaagcagggucug

SEQ ID NO: 2488498 - RNA, 17 nt, Human
uguccaaagcagggucu

SEQ ID NO: 2488499 - RNA, 12 nt, Human
uguccaaagcag

SEQ ID NO: 2488500 - RNA, 13 nt, Human
ugucagcaggaag

SEQ ID NO: 2488501 - RNA, 15 nt, Human
uguccaaaacugccu

SEQ ID NO: 2488502 - RNA, 23 nt, Human
uguccaaaccaaccgcacaugca

SEQ ID NO: 2488503 - RNA, 16 nt, Human
uguccaaaacugccuc

SEQ ID NO: 2488504 - RNA, 17 nt, Human
uguccaaacugccuaag

SEQ ID NO: 2488505 - RNA, 15 nt, Human
uguccaaacugccua

SEQ ID NO: 2488506 - RNA, 22 nt, Human
uguccaaacugccuaagcccuc

SEQ ID NO: 2488507 - RNA, 19 nt, Human
aguauucuuauuuaaugaa

SEQ ID NO: 2488508 - RNA, 12 nt, Human
aguauuuauaua

SEQ ID NO: 2488509 - RNA, 13 nt, Human
aguauuuauauau

SEQ ID NO: 2488510 - RNA, 14 nt, Human
aguauuuauauauu

SEQ ID NO: 2488511 - RNA, 15 nt, Human
aguauuuauauauuu

SEQ ID NO: 2488512 - RNA, 16 nt, Human
aguauuuauauauuua

SEQ ID NO: 2488513 - RNA, 16 nt, Human
aguauuucaaauugga

SEQ ID NO: 2488514 - RNA, 14 nt, Human
aguauuugugggga

SEQ ID NO: 2488515 - RNA, 21 nt, Human
aguauuugggaagugaagacu

SEQ ID NO: 2488516 - RNA, 17 nt, Human
aguauuuauauauuuau

SEQ ID NO: 2488517 - RNA, 19 nt, Human
aguauuuauauauuuauaa

SEQ ID NO: 2488518 - RNA, 20 nt, Human
aguauuuauauauuuauaac

SEQ ID NO: 2488519 - RNA, 23 nt, Human
aguauuuauauauuuauaacuca

SEQ ID NO: 2488520 - RNA, 20 nt, Human
aguauuuauuuaauguuaug

SEQ ID NO: 2488521 - RNA, 15 nt, Human
aguauuuauuuaaug

SEQ ID NO: 2488522 - RNA, 17 nt, Human
aguauuuugcuggaaua

SEQ ID NO: 2488523 - RNA, 14 nt, Human
aguauuuuccugua

SEQ ID NO: 2488524 - RNA, 12 nt, Human
aguauuuuccug

SEQ ID NO: 2488525 - RNA, 19 nt, Human
aguauuuucccugcuaggg

SEQ ID NO: 2488526 - RNA, 23 nt, Human
aguauuuugguucuuaguucuca

SEQ ID NO: 2488527 - RNA, 18 nt, Human
aguauuuugguucuuagu

SEQ ID NO: 2488528 - RNA, 17 nt, Human
aguauuuugguucuuag

SEQ ID NO: 2488529 - RNA, 16 nt, Human
aguauuuuccuguaaa

SEQ ID NO: 2488530 - RNA, 15 nt, Human
agucaccaagcccag

SEQ ID NO: 2488531 - RNA, 17 nt, Human
agucaccccggccaccu

SEQ ID NO: 2488532 - RNA, 13 nt, Human
agucaccaggaau

SEQ ID NO: 2488533 - RNA, 16 nt, Human
agucacccaugaagac

SEQ ID NO: 2488534 - RNA, 17 nt, Human
agucacccaugaagaca

SEQ ID NO: 2488535 - RNA, 20 nt, Human
agucacccaugaagacagga

SEQ ID NO: 2488536 - RNA, 13 nt, Human
agucaccccagga

SEQ ID NO: 2488537 - RNA, 19 nt, Human
agucaccaggaauguuaaa

SEQ ID NO: 2488538 - RNA, 12 nt, Human
ugucagagcugg

SEQ ID NO: 2488539 - RNA, 13 nt, Human
ugucagagcuggg

SEQ ID NO: 2488540 - RNA, 14 nt, Human
ugucagagcuggga

SEQ ID NO: 2488541 - RNA, 15 nt, Human
ugucagagcugggag

SEQ ID NO: 2488542 - RNA, 16 nt, Human
ugucagauacaaugua

SEQ ID NO: 2488543 - RNA, 15 nt, Human
ugucagauacaaugu

SEQ ID NO: 2488544 - RNA, 16 nt, Human
ugucagaguucugcuc

SEQ ID NO: 2488545 - RNA, 20 nt, Human
ugucagaggcacaaaagggu

SEQ ID NO: 2488546 - RNA, 15 nt, Human
ugucagauaugauau

SEQ ID NO: 2488547 - RNA, 20 nt, Human
ugucagauauuuuuucagaa

SEQ ID NO: 2488548 - RNA, 21 nt, Human
ugucagauauuuuuucagaaa

SEQ ID NO: 2488549 - RNA, 23 nt, Human
ugucagauauuuuuucagaaaua

SEQ ID NO: 2488550 - RNA, 15 nt, Human
uguauauuuguacaa

SEQ ID NO: 2488551 - RNA, 14 nt, Human
uguauauuuguaca

SEQ ID NO: 2488552 - RNA, 21 nt, Human
uguauauuugugauagcacuu

SEQ ID NO: 2488553 - RNA, 14 nt, Human
uguauauucacuuu

SEQ ID NO: 2488554 - RNA, 12 nt, Human
uguauauucacu

SEQ ID NO: 2488555 - RNA, 20 nt, Human
uguauauuguguuuguguau

SEQ ID NO: 2488556 - RNA, 19 nt, Human
uguauauugucagauauuu

SEQ ID NO: 2488557 - RNA, 18 nt, Human
uguauauuuaaaagaaag

SEQ ID NO: 2488558 - RNA, 22 nt, Human
uguauauuauuucuaggaagaa

SEQ ID NO: 2488559 - RNA, 21 nt, Human
uguauauuauuucuaggaaga

SEQ ID NO: 2488560 - RNA, 16 nt, Human
uguauauuauuucuag

SEQ ID NO: 2488561 - RNA, 15 nt, Human
uguauauuauuucua

SEQ ID NO: 2488562 - RNA, 14 nt, Human
uguauauuauuucu

SEQ ID NO: 2488563 - RNA, 21 nt, Human
uguauauuauggaagauuuua

SEQ ID NO: 2488564 - RNA, 12 nt, Human
uguauauuauuu

SEQ ID NO: 2488565 - RNA, 23 nt, Human
uguauauuauggaagauuuuaaa

SEQ ID NO: 2488566 - RNA, 18 nt, Human
aguauguugucaaagaga

SEQ ID NO: 2488567 - RNA, 15 nt, Human
aguauguugucaaag

SEQ ID NO: 2488568 - RNA, 14 nt, Human
aguauguugucaaa

SEQ ID NO: 2488569 - RNA, 16 nt, Human
aguauguuuuagcaug

SEQ ID NO: 2488570 - RNA, 18 nt, Human
aguauguuuuagcaugug

SEQ ID NO: 2488571 - RNA, 19 nt, Human
aguauguuuuagcaugugu

SEQ ID NO: 2488572 - RNA, 20 nt, Human
aguauguuuuagcauguguu

SEQ ID NO: 2488573 - RNA, 15 nt, Human
aguauaccugauuuu

SEQ ID NO: 2488574 - RNA, 16 nt, Human
uguauauuuguacaaa

SEQ ID NO: 2488575 - RNA, 13 nt, Human
aguauuauuuucc

SEQ ID NO: 2488576 - RNA, 14 nt, Human
aguauuauuuucca

SEQ ID NO: 2488577 - RNA, 15 nt, Human
aguauuauuuuccaa

SEQ ID NO: 2488578 - RNA, 18 nt, Human
aguauuauuuuccaaaag

SEQ ID NO: 2488579 - RNA, 20 nt, Human
aguauuccagaccugaagaa

SEQ ID NO: 2488580 - RNA, 19 nt, Human
aguauuccauugugugagu

SEQ ID NO: 2488581 - RNA, 20 nt, Human
aguauuccauugugugagug

SEQ ID NO: 2488582 - RNA, 22 nt, Human
aguauuccauugugugagugua

SEQ ID NO: 2488583 - RNA, 16 nt, Human
agucgucgcacagucu

SEQ ID NO: 2488584 - RNA, 22 nt, Human
agucgucaucacuuuucaguga

SEQ ID NO: 2488585 - RNA, 18 nt, Human
agucguacagaaagcugc

SEQ ID NO: 2488586 - RNA, 12 nt, Human
agucuaaaguuu

SEQ ID NO: 2488587 - RNA, 17 nt, Human
agucuaaaguuuacagu

SEQ ID NO: 2488588 - RNA, 14 nt, Human
agucuaaaguuuac

SEQ ID NO: 2488589 - RNA, 13 nt, Human
agucuaaaguuua

SEQ ID NO: 2488590 - RNA, 21 nt, Human
agucgggggcuggccuaggag

SEQ ID NO: 2488591 - RNA, 20 nt, Human
agucgggggcuggccuagga

SEQ ID NO: 2488592 - RNA, 17 nt, Human
agucgggggcuggccua

SEQ ID NO: 2488593 - RNA, 16 nt, Human
agucgggggcuggccu

SEQ ID NO: 2488594 - RNA, 15 nt, Human
agucgggggcuggcc

SEQ ID NO: 2488595 - RNA, 20 nt, Human
agucggaacggagaaaggug

SEQ ID NO: 2488596 - RNA, 19 nt, Human
agucgcugugguuguuuua

SEQ ID NO: 2488597 - RNA, 18 nt, Human
agucgcgcugccugugug

SEQ ID NO: 2488598 - RNA, 13 nt, Human
agucgcugaggaa

SEQ ID NO: 2488599 - RNA, 15 nt, Human
agucgcugaggaaaa

SEQ ID NO: 2488600 - RNA, 16 nt, Human
agucgcugaggaaaaa

SEQ ID NO: 2488601 - RNA, 16 nt, Human
aguccucccaucucac

SEQ ID NO: 2488602 - RNA, 14 nt, Human
aguccucccaucuc

SEQ ID NO: 2488603 - RNA, 19 nt, Human
aguccuccccucacagccu

SEQ ID NO: 2488604 - RNA, 18 nt, Human
aguccuccccucacagcc

SEQ ID NO: 2488605 - RNA, 16 nt, Human
aguccuccccucacag

SEQ ID NO: 2488606 - RNA, 15 nt, Human
aguccuccccucaca

SEQ ID NO: 2488607 - RNA, 14 nt, Human
aguccuccccucac

SEQ ID NO: 2488608 - RNA, 13 nt, Human
aguccuccccuca

SEQ ID NO: 2488609 - RNA, 12 nt, Human
aguccuccccuc

SEQ ID NO: 2488610 - RNA, 17 nt, Human
agucgcgcugccugugu

SEQ ID NO: 2488611 - RNA, 14 nt, Human
agucgcgcugccug

SEQ ID NO: 2488612 - RNA, 13 nt, Human
agucgcgcugccu

SEQ ID NO: 2488613 - RNA, 19 nt, Human
agucgcaucucagugcagg

SEQ ID NO: 2488614 - RNA, 15 nt, Human
agucgaugaacuauu

SEQ ID NO: 2488615 - RNA, 18 nt, Human
aguccccucccaucuggg

SEQ ID NO: 2488616 - RNA, 16 nt, Human
aguccccucccaucug

SEQ ID NO: 2488617 - RNA, 13 nt, Human
aguccccucccau

SEQ ID NO: 2488618 - RNA, 20 nt, Human
aguccccgugccccgccucc

SEQ ID NO: 2488619 - RNA, 23 nt, Human
aguccccgugccccgccuccccg

SEQ ID NO: 2488620 - RNA, 16 nt, Human
aguccccucaccuccu

SEQ ID NO: 2488621 - RNA, 18 nt, Human
aguccccgugccccgccu

SEQ ID NO: 2488622 - RNA, 15 nt, Human
aguccccgugccccg

SEQ ID NO: 2488623 - RNA, 19 nt, Human
aguccccgaguuuccccag

SEQ ID NO: 2488624 - RNA, 16 nt, Human
agucccccugccccag

SEQ ID NO: 2488625 - RNA, 21 nt, Human
aguccccuccccggcccuacc

SEQ ID NO: 2488626 - RNA, 18 nt, Human
aguccccuccccggcccu

SEQ ID NO: 2488627 - RNA, 21 nt, Human
aguccccucccaucugggagu

SEQ ID NO: 2488628 - RNA, 20 nt, Human
aguccuacaagcuaaaauua

SEQ ID NO: 2488629 - RNA, 19 nt, Human
aguccccuccccggcccua

SEQ ID NO: 2488630 - RNA, 20 nt, Human
aguccuagcugcacagggca

SEQ ID NO: 2488631 - RNA, 16 nt, Human
aguccuagcugcacag

SEQ ID NO: 2488632 - RNA, 15 nt, Human
aguccuagcugcaca

SEQ ID NO: 2488633 - RNA, 14 nt, Human
aguccuagcugcac

SEQ ID NO: 2488634 - RNA, 13 nt, Human
aguccuagcugca

SEQ ID NO: 2488635 - RNA, 12 nt, Human
aguccuagcugc

SEQ ID NO: 2488636 - RNA, 17 nt, Human
aguccuagccacucagg

SEQ ID NO: 2488637 - RNA, 22 nt, Human
aguccuagcugcacagggcagc

SEQ ID NO: 2488638 - RNA, 21 nt, Human
aguccuagcugcacagggcag

SEQ ID NO: 2488639 - RNA, 16 nt, Human
aguccuauucuauugc

SEQ ID NO: 2488640 - RNA, 20 nt, Human
aguccucaaggggccauccu

SEQ ID NO: 2488641 - RNA, 17 nt, Human
aguccucauaaaaagca

SEQ ID NO: 2488642 - RNA, 18 nt, Human
aguccucauaaaaagcaa

SEQ ID NO: 2488643 - RNA, 15 nt, Human
aguccucacucccag

SEQ ID NO: 2488644 - RNA, 16 nt, Human
aguccucacucccagu

SEQ ID NO: 2488645 - RNA, 17 nt, Human
aguccucacucccaguc

SEQ ID NO: 2488646 - RNA, 18 nt, Human
aguccucacucccagucc

SEQ ID NO: 2488647 - RNA, 17 nt, Human
agucuaaauauuuccuu

SEQ ID NO: 2488648 - RNA, 23 nt, Human
agucuaaauauuuccuuaaacug

SEQ ID NO: 2488649 - RNA, 20 nt, Human
agucuaaaguuuacaguaaa

SEQ ID NO: 2488650 - RNA, 18 nt, Human
agucuaaaguuuacagua

SEQ ID NO: 2488651 - RNA, 23 nt, Human
agucuaaaguuuacaguaaauaa

SEQ ID NO: 2488652 - RNA, 16 nt, Human
agucuaaauauuuccu

SEQ ID NO: 2488653 - RNA, 20 nt, Human
agucuaauuuuuauucauaa

SEQ ID NO: 2488654 - RNA, 17 nt, Human
agucuaauuuuuauuca

SEQ ID NO: 2488655 - RNA, 14 nt, Human
agucuacagaguga

SEQ ID NO: 2488656 - RNA, 13 nt, Human
agucuaauuuuua

SEQ ID NO: 2488657 - RNA, 14 nt, Human
agucuacccagaga

SEQ ID NO: 2488658 - RNA, 13 nt, Human
agucuacccagag

SEQ ID NO: 2488659 - RNA, 14 nt, Human
agucuacgcucucc

SEQ ID NO: 2488660 - RNA, 15 nt, Human
agucuacgcucuccu

SEQ ID NO: 2488661 - RNA, 17 nt, Human
agucuacgcucuccuuu

SEQ ID NO: 2488662 - RNA, 18 nt, Human
agucuaggagcugggagg

SEQ ID NO: 2488663 - RNA, 22 nt, Human
agucuaggagcugggaggaaaa

SEQ ID NO: 2488664 - RNA, 20 nt, Human
agucuaggagcugggaggaa

SEQ ID NO: 2488665 - RNA, 18 nt, Human
agucuaucaaucaacuua

SEQ ID NO: 2488666 - RNA, 14 nt, Human
agucuauccacaga

SEQ ID NO: 2488667 - RNA, 18 nt, Human
agucuauaugaaaaacaa

SEQ ID NO: 2488668 - RNA, 15 nt, Human
agucuauccacagag

SEQ ID NO: 2488669 - RNA, 16 nt, Human
agucuauccacagaga

SEQ ID NO: 2488670 - RNA, 17 nt, Human
agucuauucauuauauu

SEQ ID NO: 2488671 - RNA, 14 nt, Human
agucuauucauuau

SEQ ID NO: 2488672 - RNA, 14 nt, Human
agucuauuagccac

SEQ ID NO: 2488673 - RNA, 23 nt, Human
agucucacuguugcccaggcugg

SEQ ID NO: 2488674 - RNA, 16 nt, Human
agucucaggaaaucaa

SEQ ID NO: 2488675 - RNA, 11 nt, Human
ugucucaucca

SEQ ID NO: 2488676 - RNA, 16 nt, Human
ugucucauccaucauc

SEQ ID NO: 2488677 - RNA, 17 nt, Human
ugucucauccaucauca

SEQ ID NO: 2488678 - RNA, 13 nt, Human
agucucaggaaau

SEQ ID NO: 2488679 - RNA, 19 nt, Human
agucucacuuugucgccca

SEQ ID NO: 2488680 - RNA, 23 nt, Human
ugucuccaaccccccagcacuga

SEQ ID NO: 2488681 - RNA, 22 nt, Human
ugucuccaaccccccagcacug

SEQ ID NO: 2488682 - RNA, 21 nt, Human
ugucuccaaccccccagcacu

SEQ ID NO: 2488683 - RNA, 20 nt, Human
ugucuccaaccccccagcac

SEQ ID NO: 2488684 - RNA, 19 nt, Human
ugucuccaaccccccagca

SEQ ID NO: 2488685 - RNA, 17 nt, Human
ugucuccaaccccccag

SEQ ID NO: 2488686 - RNA, 16 nt, Human
ugucuccaacccccca

SEQ ID NO: 2488687 - RNA, 11 nt, Human
ugucuccaacc

SEQ ID NO: 2488688 - RNA, 12 nt, Human
ugucucauccca

SEQ ID NO: 2488689 - RNA, 11 nt, Human
ugucucauccc

SEQ ID NO: 2488690 - RNA, 21 nt, Human
ugucucauccaucaucaugug

SEQ ID NO: 2488691 - RNA, 13 nt, Human
ugucucaucccca

SEQ ID NO: 2488692 - RNA, 16 nt, Human
ugucucauccccaggg

SEQ ID NO: 2488693 - RNA, 20 nt, Human
ugucucaugugugcucuucu

SEQ ID NO: 2488694 - RNA, 13 nt, Human
ugucucaugugug

SEQ ID NO: 2488695 - RNA, 23 nt, Human
ugucucauccccaggggucccag

SEQ ID NO: 2488696 - RNA, 20 nt, Human
agucccaggagcugcccaga

SEQ ID NO: 2488697 - RNA, 21 nt, Human
aguccccaggccccaggaagc

SEQ ID NO: 2488698 - RNA, 19 nt, Human
agucccaggcugagccuca

SEQ ID NO: 2488699 - RNA, 18 nt, Human
agucccccaaccccagcc

SEQ ID NO: 2488700 - RNA, 22 nt, Human
agucccccaacagaugcuuuuc

SEQ ID NO: 2488701 - RNA, 15 nt, Human
agucccccaacccca

SEQ ID NO: 2488702 - RNA, 17 nt, Human
agucccaggcugagccu

SEQ ID NO: 2488703 - RNA, 18 nt, Human
agucccaggcugagccuc

SEQ ID NO: 2488704 - RNA, 18 nt, Human
agucccagcuacucagga

SEQ ID NO: 2488705 - RNA, 19 nt, Human
agucccagcuacucaggag

SEQ ID NO: 2488706 - RNA, 22 nt, Human
agucccagcuacucagaagccu

SEQ ID NO: 2488707 - RNA, 23 nt, Human
agucccagagcaggaggccccug

SEQ ID NO: 2488708 - RNA, 12 nt, Human
agucccagagca

SEQ ID NO: 2488709 - RNA, 23 nt, Human
agucccacugccucagguuccua

SEQ ID NO: 2488710 - RNA, 20 nt, Human
agucccaaggaaagccccag

SEQ ID NO: 2488711 - RNA, 21 nt, Human
agucccaaggaaagccccagc

SEQ ID NO: 2488712 - RNA, 20 nt, Human
agucccacugccucagguuc

SEQ ID NO: 2488713 - RNA, 19 nt, Human
agucccaccuuggcugcag

SEQ ID NO: 2488714 - RNA, 18 nt, Human
agucccaccuuggcugca

SEQ ID NO: 2488715 - RNA, 16 nt, Human
agucccaccuuggcug

SEQ ID NO: 2488716 - RNA, 15 nt, Human
agucccaccuuggcu

SEQ ID NO: 2488717 - RNA, 19 nt, Human
aguccauucucccagguac

SEQ ID NO: 2488718 - RNA, 15 nt, Human
aguccauucucccag

SEQ ID NO: 2488719 - RNA, 14 nt, Human
aguccauucuccca

SEQ ID NO: 2488720 - RNA, 20 nt, Human
agucauauuuugauuauugu

SEQ ID NO: 2488721 - RNA, 17 nt, Human
aguccauucucccaggu

SEQ ID NO: 2488722 - RNA, 16 nt, Human
aguccauucucccagg

SEQ ID NO: 2488723 - RNA, 14 nt, Human
agucccaaggaaag

SEQ ID NO: 2488724 - RNA, 17 nt, Human
agucccaaggaaagccc

SEQ ID NO: 2488725 - RNA, 22 nt, Human
agucauagguuaauauuuaaga

SEQ ID NO: 2488726 - RNA, 16 nt, Human
agucauagguuaauau

SEQ ID NO: 2488727 - RNA, 17 nt, Human
agucauaccaaugaaaa

SEQ ID NO: 2488728 - RNA, 23 nt, Human
agucauaccaaugaaaaaaugua

SEQ ID NO: 2488729 - RNA, 21 nt, Human
agucauauuuugauuauugua

SEQ ID NO: 2488730 - RNA, 15 nt, Human
agucauauuuugauu

SEQ ID NO: 2488731 - RNA, 18 nt, Human
agucauauaaaagcuaug

SEQ ID NO: 2488732 - RNA, 18 nt, Human
agucauaaaccuuaagua

SEQ ID NO: 2488733 - RNA, 15 nt, Human
agucauaaaccuuaa

SEQ ID NO: 2488734 - RNA, 20 nt, Human
agucauaaaccuuaaguaag

SEQ ID NO: 2488735 - RNA, 21 nt, Human
agucauaaucauuagggggaa

SEQ ID NO: 2488736 - RNA, 14 nt, Human
agucauaccaauga

SEQ ID NO: 2488737 - RNA, 14 nt, Human
agucaguuugcagu

SEQ ID NO: 2488738 - RNA, 16 nt, Human
agucaguugaaauucu

SEQ ID NO: 2488739 - RNA, 14 nt, Human
agucauaaaccuua

SEQ ID NO: 2488740 - RNA, 13 nt, Human
agucauaaaccuu

SEQ ID NO: 2488741 - RNA, 14 nt, Human
ugucggccucuaac

SEQ ID NO: 2488742 - RNA, 12 nt, Human
ugucggccucua

SEQ ID NO: 2488743 - RNA, 19 nt, Human
ugucgcucugcuggccugg

SEQ ID NO: 2488744 - RNA, 17 nt, Human
ugucgcucugcuggccu

SEQ ID NO: 2488745 - RNA, 22 nt, Human
ugucgcucaugugugcaacagg

SEQ ID NO: 2488746 - RNA, 16 nt, Human
ugucgcucaugugugc

SEQ ID NO: 2488747 - RNA, 14 nt, Human
ugucgcgcucagca

SEQ ID NO: 2488748 - RNA, 20 nt, Human
ugucgcgccuucuccccccc

SEQ ID NO: 2488749 - RNA, 14 nt, Human
ugucgcgccuucuc

SEQ ID NO: 2488750 - RNA, 17 nt, Human
ugucccuucacauaguu

SEQ ID NO: 2488751 - RNA, 15 nt, Human
ugucgcucaugugug

SEQ ID NO: 2488752 - RNA, 14 nt, Human
ugucgcucaugugu

SEQ ID NO: 2488753 - RNA, 16 nt, Human
ugucccuuaaacaaaa

SEQ ID NO: 2488754 - RNA, 13 nt, Human
ugucgccucugca

SEQ ID NO: 2488755 - RNA, 14 nt, Human
ugucgccucugcau

SEQ ID NO: 2488756 - RNA, 23 nt, Human
ugucccuuacgugaguccuggca

SEQ ID NO: 2488757 - RNA, 19 nt, Human
ugucccuuacgugaguccu

SEQ ID NO: 2488758 - RNA, 12 nt, Human
ugucccuacacc

SEQ ID NO: 2488759 - RNA, 13 nt, Human
ugucccugucacc

SEQ ID NO: 2488760 - RNA, 14 nt, Human
ugucccugugccua

SEQ ID NO: 2488761 - RNA, 16 nt, Human
ugucccugucaccaag

SEQ ID NO: 2488762 - RNA, 21 nt, Human
ugucccugucaccaagcucac

SEQ ID NO: 2488763 - RNA, 18 nt, Human
agucagccucucucccag

SEQ ID NO: 2488764 - RNA, 17 nt, Human
agucagccucucuccca

SEQ ID NO: 2488765 - RNA, 16 nt, Human
agucagccucucuccc

SEQ ID NO: 2488766 - RNA, 15 nt, Human
agucagccucucucc

SEQ ID NO: 2488767 - RNA, 11 nt, Human
agucagccucu

SEQ ID NO: 2488768 - RNA, 21 nt, Human
agucagccucucucccagucu

SEQ ID NO: 2488769 - RNA, 22 nt, Human
agucagccuucccccucccagg

SEQ ID NO: 2488770 - RNA, 23 nt, Human
agucagccuucccccucccaggg

SEQ ID NO: 2488771 - RNA, 14 nt, Human
agucaggaaagaga

SEQ ID NO: 2488772 - RNA, 19 nt, Human
agucagcuuugccuuccac

SEQ ID NO: 2488773 - RNA, 22 nt, Human
agucagcuuugccuuccacgcu

SEQ ID NO: 2488774 - RNA, 22 nt, Human
agucagugggaacgugacugcc

SEQ ID NO: 2488775 - RNA, 23 nt, Human
agucacuugaugugccauuuuaa

SEQ ID NO: 2488776 - RNA, 21 nt, Human
agucacuugaugugccauuuu

SEQ ID NO: 2488777 - RNA, 20 nt, Human
agucacuugaugugccauuu

SEQ ID NO: 2488778 - RNA, 24 nt, Human
agucacuucgugggaucugccccu

SEQ ID NO: 2488779 - RNA, 19 nt, Human
agucacuuuuuuuuuccaa

SEQ ID NO: 2488780 - RNA, 17 nt, Human
agucacuuuuuuuuucc

SEQ ID NO: 2488781 - RNA, 14 nt, Human
agucagcagaacug

SEQ ID NO: 2488782 - RNA, 14 nt, Human
agucacugccugca

SEQ ID NO: 2488783 - RNA, 21 nt, Human
agucacugccucucccuggcc

SEQ ID NO: 2488784 - RNA, 22 nt, Human
ugucggccucuaaccccaggcc

SEQ ID NO: 2488785 - RNA, 21 nt, Human
ugucggccucuaaccccaggc

SEQ ID NO: 2488786 - RNA, 22 nt, Human
agucacuggagguugaagccaa

SEQ ID NO: 2488787 - RNA, 16 nt, Human
agucacugccugcaga

SEQ ID NO: 2488788 - RNA, 21 nt, Human
agucacuggagguugaagcca

SEQ ID NO: 2488789 - RNA, 16 nt, Human
agucacuuauuucaua

SEQ ID NO: 2488790 - RNA, 10 nt, Human
agucacuguc

SEQ ID NO: 2488791 - RNA, 23 nt, Human
agucacuggagguugaagccaag

SEQ ID NO: 2488792 - RNA, 22 nt, Human
uguguuaucacccagaagaaaa

SEQ ID NO: 2488793 - RNA, 19 nt, Human
uguguguuuaaauaaagua

SEQ ID NO: 2488794 - RNA, 18 nt, Human
uguguguuuaaauaaagu

SEQ ID NO: 2488795 - RNA, 16 nt, Human
uguguguuuaaauaaa

SEQ ID NO: 2488796 - RNA, 15 nt, Human
uguguguuuaaauaa

SEQ ID NO: 2488797 - RNA, 22 nt, Human
uguguuaaguauguguaaaaug

SEQ ID NO: 2488798 - RNA, 19 nt, Human
uguguuacccuccuguaaa

SEQ ID NO: 2488799 - RNA, 23 nt, Human
uguguuaccugaaaacacugugc

SEQ ID NO: 2488800 - RNA, 22 nt, Human
uguguguuuaaauaaaguauca

SEQ ID NO: 2488801 - RNA, 17 nt, Human
uguguuaguucccaaca

SEQ ID NO: 2488802 - RNA, 14 nt, Human
uguguuaguuccca

SEQ ID NO: 2488803 - RNA, 16 nt, Human
uguuaacugagugccu

SEQ ID NO: 2488804 - RNA, 22 nt, Human
uguuaacugagugccuuuuggu

SEQ ID NO: 2488805 - RNA, 23 nt, Human
uguuaagcagauggaaugcugug

SEQ ID NO: 2488806 - RNA, 22 nt, Human
uguuaacuuaauaguauuuaug

SEQ ID NO: 2488807 - RNA, 14 nt, Human
uguuaacuuagcuu

SEQ ID NO: 2488808 - RNA, 18 nt, Human
uguuacaaauuguagaag

SEQ ID NO: 2488809 - RNA, 17 nt, Human
uguuacaaauuguagaa

SEQ ID NO: 2488810 - RNA, 19 nt, Human
uguuacauaagauaaaugu

SEQ ID NO: 2488811 - RNA, 18 nt, Human
uguuaauacuaguuguga

SEQ ID NO: 2488812 - RNA, 19 nt, Human
uguuaauaaaaguacaugu

SEQ ID NO: 2488813 - RNA, 17 nt, Human
uguuaaguauuuucaua

SEQ ID NO: 2488814 - RNA, 22 nt, Human
uguuaaguugauggugaugaaa

SEQ ID NO: 2488815 - RNA, 18 nt, Human
uguuaauaaaaguacaug

SEQ ID NO: 2488816 - RNA, 13 nt, Human
uguuaauaaaagu

SEQ ID NO: 2488817 - RNA, 17 nt, Human
agugggcugcaucuggg

SEQ ID NO: 2488818 - RNA, 19 nt, Human
agugggcccuccgacagcc

SEQ ID NO: 2488819 - RNA, 22 nt, Human
agugggcccaaugcacuuuguu

SEQ ID NO: 2488820 - RNA, 16 nt, Human
agugggcuugauucug

SEQ ID NO: 2488821 - RNA, 22 nt, Human
agugggcuugauucugcaguaa

SEQ ID NO: 2488822 - RNA, 14 nt, Human
aguggggaggggcu

SEQ ID NO: 2488823 - RNA, 15 nt, Human
aguggggacagagca

SEQ ID NO: 2488824 - RNA, 16 nt, Human
agugggguagguuggg

SEQ ID NO: 2488825 - RNA, 21 nt, Human
aguggggugcugggaggaggg

SEQ ID NO: 2488826 - RNA, 18 nt, Human
aguggggugcugggagga

SEQ ID NO: 2488827 - RNA, 18 nt, Human
agugggguuaucucugug

SEQ ID NO: 2488828 - RNA, 19 nt, Human
agugggguuaucucugugu

SEQ ID NO: 2488829 - RNA, 18 nt, Human
aguggggucucccucucc

SEQ ID NO: 2488830 - RNA, 19 nt, Human
aguggggucucccucuccu

SEQ ID NO: 2488831 - RNA, 20 nt, Human
aguggggucucccucuccug

SEQ ID NO: 2488832 - RNA, 16 nt, Human
aguggggugcugggag

SEQ ID NO: 2488833 - RNA, 14 nt, Human
aguggggugcuggg

SEQ ID NO: 2488834 - RNA, 22 nt, Human
aguggggucucccucuccugcc

SEQ ID NO: 2488835 - RNA, 23 nt, Human
aguggggucucccucuccugccu

SEQ ID NO: 2488836 - RNA, 18 nt, Human
aguggacuggccccuggg

SEQ ID NO: 2488837 - RNA, 17 nt, Human
aguggacuggccccugg

SEQ ID NO: 2488838 - RNA, 21 nt, Human
aguggacuguucccugaggug

SEQ ID NO: 2488839 - RNA, 16 nt, Human
aguggacuggccccug

SEQ ID NO: 2488840 - RNA, 15 nt, Human
aguggacuggccccu

SEQ ID NO: 2488841 - RNA, 19 nt, Human
aguggacuggaguggagca

SEQ ID NO: 2488842 - RNA, 16 nt, Human
aguggacucagggcag

SEQ ID NO: 2488843 - RNA, 18 nt, Human
aguggacucuuugguggc

SEQ ID NO: 2488844 - RNA, 19 nt, Human
aguggaccuugagaccaca

SEQ ID NO: 2488845 - RNA, 13 nt, Human
aguggacucaggg

SEQ ID NO: 2488846 - RNA, 18 nt, Human
aguggaccuugagaccac

SEQ ID NO: 2488847 - RNA, 17 nt, Human
aguggaccuuaggccuu

SEQ ID NO: 2488848 - RNA, 19 nt, Human
aguggaccuuaggccuucc

SEQ ID NO: 2488849 - RNA, 20 nt, Human
aguggaccuuaggccuuccu

SEQ ID NO: 2488850 - RNA, 23 nt, Human
aguggaccuuaggccuuccucuc

SEQ ID NO: 2488851 - RNA, 23 nt, Human
uguuacaggcaccgagaauguug

SEQ ID NO: 2488852 - RNA, 21 nt, Human
uguuacaggcaccgagaaugu

SEQ ID NO: 2488853 - RNA, 17 nt, Human
aguggauggaaggggcu

SEQ ID NO: 2488854 - RNA, 14 nt, Human
aguggauugcauuu

SEQ ID NO: 2488855 - RNA, 13 nt, Human
aguggaugauguu

SEQ ID NO: 2488856 - RNA, 23 nt, Human
aguggaucuccaaggaccagguu

SEQ ID NO: 2488857 - RNA, 15 nt, Human
aguggaugauguuuc

SEQ ID NO: 2488858 - RNA, 20 nt, Human
aguggaugauguuucgugaa

SEQ ID NO: 2488859 - RNA, 20 nt, Human
aguggcacgucaucuaguuu

SEQ ID NO: 2488860 - RNA, 17 nt, Human
aguggcaauauagaaac

SEQ ID NO: 2488861 - RNA, 12 nt, Human
uguguaacacag

SEQ ID NO: 2488862 - RNA, 20 nt, Human
ugugucagguggggcagcuu

SEQ ID NO: 2488863 - RNA, 17 nt, Human
uguguaaaguuagucua

SEQ ID NO: 2488864 - RNA, 14 nt, Human
uguguaaaguuagu

SEQ ID NO: 2488865 - RNA, 21 nt, Human
uguguaacaauuuuaaugcua

SEQ ID NO: 2488866 - RNA, 21 nt, Human
uguguaaaguguaaauccuuu

SEQ ID NO: 2488867 - RNA, 23 nt, Human
uguggucacagcggaggugugga

SEQ ID NO: 2488868 - RNA, 14 nt, Human
uguguaaaauguga

SEQ ID NO: 2488869 - RNA, 15 nt, Human
uguguaaaaagagag

SEQ ID NO: 2488870 - RNA, 22 nt, Human
ugugguuuuccccucccugggu

SEQ ID NO: 2488871 - RNA, 21 nt, Human
ugugguuuuccccucccuggg

SEQ ID NO: 2488872 - RNA, 18 nt, Human
ugugguuuuccccucccu

SEQ ID NO: 2488873 - RNA, 16 nt, Human
ugugguuuuccccucc

SEQ ID NO: 2488874 - RNA, 23 nt, Human
ugugguuuuccccucccuggguu

SEQ ID NO: 2488875 - RNA, 16 nt, Human
agugcccuccaggaua

SEQ ID NO: 2488876 - RNA, 22 nt, Human
agugccccugcugccuccccaa

SEQ ID NO: 2488877 - RNA, 20 nt, Human
agugccccugcugccucccc

SEQ ID NO: 2488878 - RNA, 21 nt, Human
agugccccugcugccucccca

SEQ ID NO: 2488879 - RNA, 16 nt, Human
agugcccuccacagcc

SEQ ID NO: 2488880 - RNA, 17 nt, Human
agugcccuccacagccg

SEQ ID NO: 2488881 - RNA, 21 nt, Human
agugcccuccacagccgcagc

SEQ ID NO: 2488882 - RNA, 11 nt, Human
agugccccugc

SEQ ID NO: 2488883 - RNA, 12 nt, Human
agugccccugcu

SEQ ID NO: 2488884 - RNA, 13 nt, Human
agugccccugcug

SEQ ID NO: 2488885 - RNA, 14 nt, Human
agugccccugcugc

SEQ ID NO: 2488886 - RNA, 19 nt, Human
agugccccugcugccuccc

SEQ ID NO: 2488887 - RNA, 18 nt, Human
agugcccccacugaccag

SEQ ID NO: 2488888 - RNA, 20 nt, Human
agugccagucuugugucugc

SEQ ID NO: 2488889 - RNA, 14 nt, Human
agugcccaacuguu

SEQ ID NO: 2488890 - RNA, 16 nt, Human
ugugguacaaucucaa

SEQ ID NO: 2488891 - RNA, 21 nt, Human
ugugguacaagcauucugucu

SEQ ID NO: 2488892 - RNA, 18 nt, Human
ugugguagggggugucuc

SEQ ID NO: 2488893 - RNA, 22 nt, Human
ugugguagggacuuaaaaaacu

SEQ ID NO: 2488894 - RNA, 19 nt, Human
uguguccuggugcucucug

SEQ ID NO: 2488895 - RNA, 15 nt, Human
uguguccuggugcuc

SEQ ID NO: 2488896 - RNA, 16 nt, Human
ugugucccccucuguc

SEQ ID NO: 2488897 - RNA, 18 nt, Human
ugugucccccucugucca

SEQ ID NO: 2488898 - RNA, 21 nt, Human
ugugucccccucuguccaggc

SEQ ID NO: 2488899 - RNA, 22 nt, Human
uguguccuggugcucucugcca

SEQ ID NO: 2488900 - RNA, 20 nt, Human
uguguccuggugcucucugc

SEQ ID NO: 2488901 - RNA, 14 nt, Human
uguguccugguucc

SEQ ID NO: 2488902 - RNA, 16 nt, Human
uguguccuucccugca

SEQ ID NO: 2488903 - RNA, 14 nt, Human
uguguccuucccug

SEQ ID NO: 2488904 - RNA, 17 nt, Human
uguguccuucccugcau

SEQ ID NO: 2488905 - RNA, 14 nt, Human
uguguccuugcacc

SEQ ID NO: 2488906 - RNA, 17 nt, Human
ugugucuaaacugcauu

SEQ ID NO: 2488907 - RNA, 15 nt, Human
ugugucuaaacugca

SEQ ID NO: 2488908 - RNA, 13 nt, Human
ugugucuaaacug

SEQ ID NO: 2488909 - RNA, 12 nt, Human
ugugucuaaacu

SEQ ID NO: 2488910 - RNA, 18 nt, Human
uguguccuugcaccugca

SEQ ID NO: 2488911 - RNA, 19 nt, Human
uguguccuugcaccugcau

SEQ ID NO: 2488912 - RNA, 16 nt, Human
uguguccuugugcaug

SEQ ID NO: 2488913 - RNA, 20 nt, Human
uguguccuugcaccugcauc

SEQ ID NO: 2488914 - RNA, 17 nt, Human
uguguccacgacugucu

SEQ ID NO: 2488915 - RNA, 18 nt, Human
uguguccacgacugucuc

SEQ ID NO: 2488916 - RNA, 20 nt, Human
uguguccaugcgcucagggc

SEQ ID NO: 2488917 - RNA, 19 nt, Human
uguguccacgacugucucc

SEQ ID NO: 2488918 - RNA, 16 nt, Human
uguguccaaaacugcc

SEQ ID NO: 2488919 - RNA, 19 nt, Human
uguguccaagugugugugc

SEQ ID NO: 2488920 - RNA, 22 nt, Human
ugugucccaugacccaccccug

SEQ ID NO: 2488921 - RNA, 21 nt, Human
ugugucccaugacccaccccu

SEQ ID NO: 2488922 - RNA, 19 nt, Human
ugugucccaugacccaccc

SEQ ID NO: 2488923 - RNA, 14 nt, Human
ugugucccaugacc

SEQ ID NO: 2488924 - RNA, 20 nt, Human
ugugucccaugaucccugug

SEQ ID NO: 2488925 - RNA, 19 nt, Human
ugugucccaugaucccugu

SEQ ID NO: 2488926 - RNA, 18 nt, Human
uguguccaugugugugca

SEQ ID NO: 2488927 - RNA, 14 nt, Human
uguguccaugugug

SEQ ID NO: 2488928 - RNA, 16 nt, Human
uguguccaugugugug

SEQ ID NO: 2488929 - RNA, 17 nt, Human
uguguccaugugugugc

SEQ ID NO: 2488930 - RNA, 20 nt, Human
ugugucuugcaauggcagcc

SEQ ID NO: 2488931 - RNA, 19 nt, Human
uguguguugccacaggaca

SEQ ID NO: 2488932 - RNA, 20 nt, Human
uguguguugccacaggacac

SEQ ID NO: 2488933 - RNA, 16 nt, Human
uguguguugccacagg

SEQ ID NO: 2488934 - RNA, 17 nt, Human
uguguguugccacagga

SEQ ID NO: 2488935 - RNA, 22 nt, Human
uguguguugaucccaagacaau

SEQ ID NO: 2488936 - RNA, 11 nt, Human
uguguguuuau

SEQ ID NO: 2488937 - RNA, 18 nt, Human
uguguguuguguguggga

SEQ ID NO: 2488938 - RNA, 18 nt, Human
uguguguugucucuugag

SEQ ID NO: 2488939 - RNA, 18 nt, Human
uguguguugucuugaaag

SEQ ID NO: 2488940 - RNA, 16 nt, Human
ugugucuuaauuauua

SEQ ID NO: 2488941 - RNA, 14 nt, Human
ugugucuuaauuau

SEQ ID NO: 2488942 - RNA, 21 nt, Human
ugugucuguacacguguccug

SEQ ID NO: 2488943 - RNA, 14 nt, Human
ugugucuguacacg

SEQ ID NO: 2488944 - RNA, 14 nt, Human
ugugucugcucagu

SEQ ID NO: 2488945 - RNA, 13 nt, Human
ugugucuguacac

SEQ ID NO: 2488946 - RNA, 16 nt, Human
ugugucucuuuucucu

SEQ ID NO: 2488947 - RNA, 19 nt, Human
ugugucugcgucuguguug

SEQ ID NO: 2488948 - RNA, 22 nt, Human
ugugucuaaauuugaauguuaa

SEQ ID NO: 2488949 - RNA, 19 nt, Human
ugugucuaaauuugaaugu

SEQ ID NO: 2488950 - RNA, 22 nt, Human
ugugucucuugguccugcugca

SEQ ID NO: 2488951 - RNA, 21 nt, Human
ugugucuaaacugcauuaccg

SEQ ID NO: 2488952 - RNA, 14 nt, Human
ugugucucuuuucu

SEQ ID NO: 2488953 - RNA, 12 nt, Human
ugugucugcagg

SEQ ID NO: 2488954 - RNA, 21 nt, Human
aguguucauaaauaaaguuug

SEQ ID NO: 2488955 - RNA, 18 nt, Human
aguguguguuuuucauaa

SEQ ID NO: 2488956 - RNA, 21 nt, Human
aguguuccccuuccacugagg

SEQ ID NO: 2488957 - RNA, 21 nt, Human
aguguuccgugguuaaacucg

SEQ ID NO: 2488958 - RNA, 16 nt, Human
aguguuccccuuccac

SEQ ID NO: 2488959 - RNA, 12 nt, Human
agugugugugcg

SEQ ID NO: 2488960 - RNA, 16 nt, Human
aguguuguggauuuaa

SEQ ID NO: 2488961 - RNA, 16 nt, Human
aguguugaaaauguuc

SEQ ID NO: 2488962 - RNA, 15 nt, Human
aguguucuguuuaau

SEQ ID NO: 2488963 - RNA, 20 nt, Human
aguguuccuauuuggggcuu

SEQ ID NO: 2488964 - RNA, 17 nt, Human
aguguucugcaaaaaua

SEQ ID NO: 2488965 - RNA, 16 nt, Human
aguguuccuauuuggg

SEQ ID NO: 2488966 - RNA, 18 nt, Human
aguguucccuuuccuacu

SEQ ID NO: 2488967 - RNA, 11 nt, Human
aguuagcacca

SEQ ID NO: 2488968 - RNA, 14 nt, Human
aguuagcucaggag

SEQ ID NO: 2488969 - RNA, 16 nt, Human
aguuagcucaggaggc

SEQ ID NO: 2488970 - RNA, 22 nt, Human
aguuagcaaacuuuguauguca

SEQ ID NO: 2488971 - RNA, 16 nt, Human
aguuagcaaacuuugu

SEQ ID NO: 2488972 - RNA, 15 nt, Human
aguuagcaaacuuug

SEQ ID NO: 2488973 - RNA, 19 nt, Human
aguuagaggccagccuggc

SEQ ID NO: 2488974 - RNA, 12 nt, Human
aguuagagcuga

SEQ ID NO: 2488975 - RNA, 23 nt, Human
aguuacuaucaugucaaacguga

SEQ ID NO: 2488976 - RNA, 12 nt, Human
aguuacucagcc

SEQ ID NO: 2488977 - RNA, 13 nt, Human
aguuacucagccc

SEQ ID NO: 2488978 - RNA, 14 nt, Human
aguuacucagcccu

SEQ ID NO: 2488979 - RNA, 13 nt, Human
aguuagacuguug

SEQ ID NO: 2488980 - RNA, 19 nt, Human
aguuacucagcccugggcc

SEQ ID NO: 2488981 - RNA, 15 nt, Human
aguuacucagcccug

SEQ ID NO: 2488982 - RNA, 16 nt, Human
aguuacucagcccugg

SEQ ID NO: 2488983 - RNA, 17 nt, Human
aguuacucagcccuggg

SEQ ID NO: 2488984 - RNA, 18 nt, Human
aguuacucagcccugggc

SEQ ID NO: 2488985 - RNA, 19 nt, Human
aguguuguggauuuaacag

SEQ ID NO: 2488986 - RNA, 20 nt, Human
aguguuguggauuuaacaga

SEQ ID NO: 2488987 - RNA, 13 nt, Human
aguuacucagaau

SEQ ID NO: 2488988 - RNA, 17 nt, Human
aguuacuagguaacuuc

SEQ ID NO: 2488989 - RNA, 18 nt, Human
aguuacuagguaacuuca

SEQ ID NO: 2488990 - RNA, 19 nt, Human
aguuacuagguaacuucau

SEQ ID NO: 2488991 - RNA, 22 nt, Human
aguuacuagguaacuucauauu

SEQ ID NO: 2488992 - RNA, 16 nt, Human
aguuacuagguaacuu

SEQ ID NO: 2488993 - RNA, 15 nt, Human
uguucuaagaaguga

SEQ ID NO: 2488994 - RNA, 15 nt, Human
uguugcacccagccc

SEQ ID NO: 2488995 - RNA, 14 nt, Human
uguugcacccagcc

SEQ ID NO: 2488996 - RNA, 23 nt, Human
uguugcacacccacucagcuccg

SEQ ID NO: 2488997 - RNA, 19 nt, Human
uguugcacccagcccuggu

SEQ ID NO: 2488998 - RNA, 18 nt, Human
uguugcacccagcccugg

SEQ ID NO: 2488999 - RNA, 17 nt, Human
uguugcacccagcccug

SEQ ID NO: 2489000 - RNA, 16 nt, Human
uguugcacccagcccu

SEQ ID NO: 2489001 - RNA, 15 nt, Human
uguugcauagaauaa

SEQ ID NO: 2489002 - RNA, 14 nt, Human
uguugcaugggcua

SEQ ID NO: 2489003 - RNA, 17 nt, Human
uguugcauggauguuuu

SEQ ID NO: 2489004 - RNA, 14 nt, Human
uguugcauggaugu

SEQ ID NO: 2489005 - RNA, 17 nt, Human
uguugcaugauguauuu

SEQ ID NO: 2489006 - RNA, 22 nt, Human
uguugccaaauauguccugggg

SEQ ID NO: 2489007 - RNA, 20 nt, Human
uguugccaaauauguccugg

SEQ ID NO: 2489008 - RNA, 20 nt, Human
uguugcaugggcuaaugaag

SEQ ID NO: 2489009 - RNA, 19 nt, Human
uguugccaaauauguccug

SEQ ID NO: 2489010 - RNA, 20 nt, Human
uguugccaagcuccaagccc

SEQ ID NO: 2489011 - RNA, 18 nt, Human
uguugccaagcuccaagc

SEQ ID NO: 2489012 - RNA, 23 nt, Human
uguugccaaauauguccuggggu

SEQ ID NO: 2489013 - RNA, 13 nt, Human
uguugcccugagu

SEQ ID NO: 2489014 - RNA, 12 nt, Human
uguugcccuggg

SEQ ID NO: 2489015 - RNA, 20 nt, Human
uguugccuugaaccacuucc

SEQ ID NO: 2489016 - RNA, 22 nt, Human
agugugugcacaugugugcgug

SEQ ID NO: 2489017 - RNA, 20 nt, Human
agugugugcacaugugugcg

SEQ ID NO: 2489018 - RNA, 14 nt, Human
agugugugcaugug

SEQ ID NO: 2489019 - RNA, 16 nt, Human
agugugugcaugugug

SEQ ID NO: 2489020 - RNA, 17 nt, Human
agugugugcaugugugc

SEQ ID NO: 2489021 - RNA, 23 nt, Human
agugugugcaugugugugcucag

SEQ ID NO: 2489022 - RNA, 14 nt, Human
agugugugggucua

SEQ ID NO: 2489023 - RNA, 17 nt, Human
agugugugcaugugugu

SEQ ID NO: 2489024 - RNA, 18 nt, Human
agugugugcaugugugug

SEQ ID NO: 2489025 - RNA, 20 nt, Human
uguugcccaggcuggcgugc

SEQ ID NO: 2489026 - RNA, 23 nt, Human
uguugcccaggcuggcgugcagu

SEQ ID NO: 2489027 - RNA, 22 nt, Human
uguugcccacagcuguaugauu

SEQ ID NO: 2489028 - RNA, 14 nt, Human
uguugccaagcugg

SEQ ID NO: 2489029 - RNA, 14 nt, Human
uguugccacaggac

SEQ ID NO: 2489030 - RNA, 15 nt, Human
uguugccacaggaca

SEQ ID NO: 2489031 - RNA, 16 nt, Human
uguugccacaggacac

SEQ ID NO: 2489032 - RNA, 12 nt, Human
uguugccagaga

SEQ ID NO: 2489033 - RNA, 20 nt, Human
agugugacugaucucucgug

SEQ ID NO: 2489034 - RNA, 14 nt, Human
agugugaccaggca

SEQ ID NO: 2489035 - RNA, 12 nt, Human
agugugagaauc

SEQ ID NO: 2489036 - RNA, 20 nt, Human
agugugccugaagucccaga

SEQ ID NO: 2489037 - RNA, 21 nt, Human
agugugagcagugaguuacag

SEQ ID NO: 2489038 - RNA, 16 nt, Human
agugugagcagugagu

SEQ ID NO: 2489039 - RNA, 15 nt, Human
agugugaggccaggg

SEQ ID NO: 2489040 - RNA, 12 nt, Human
agugugaguaag

SEQ ID NO: 2489041 - RNA, 19 nt, Human
agugguccauggaaugcuu

SEQ ID NO: 2489042 - RNA, 18 nt, Human
agugguccauggaaugcu

SEQ ID NO: 2489043 - RNA, 17 nt, Human
agugguccacaucccgg

SEQ ID NO: 2489044 - RNA, 16 nt, Human
aguggucccugcccuc

SEQ ID NO: 2489045 - RNA, 15 nt, Human
aguggucccugcccu

SEQ ID NO: 2489046 - RNA, 23 nt, Human
aguggucaaaccgcacucaccca

SEQ ID NO: 2489047 - RNA, 19 nt, Human
agugguaagcucuggcuuu

SEQ ID NO: 2489048 - RNA, 22 nt, Human
aguggucaaaccgcacucaccc

SEQ ID NO: 2489049 - RNA, 18 nt, Human
agugguauagaaaugcug

SEQ ID NO: 2489050 - RNA, 16 nt, Human
agugguauagaaaugc

SEQ ID NO: 2489051 - RNA, 15 nt, Human
agugguauagaaaug

SEQ ID NO: 2489052 - RNA, 16 nt, Human
agugguaagcucuggc

SEQ ID NO: 2489053 - RNA, 14 nt, Human
agugguauagaaau

SEQ ID NO: 2489054 - RNA, 15 nt, Human
agugugcuggaggac

SEQ ID NO: 2489055 - RNA, 13 nt, Human
agugugcuggagg

SEQ ID NO: 2489056 - RNA, 12 nt, Human
agugugcuggag

SEQ ID NO: 2489057 - RNA, 12 nt, Human
agugugcuuuau

SEQ ID NO: 2489058 - RNA, 18 nt, Human
agugugcuuuaugcugaa

SEQ ID NO: 2489059 - RNA, 21 nt, Human
agugugcuuuaugcugaaaca

SEQ ID NO: 2489060 - RNA, 17 nt, Human
aguguggaaauuaagaa

SEQ ID NO: 2489061 - RNA, 19 nt, Human
aguguggaaauuaagaaga

SEQ ID NO: 2489062 - RNA, 21 nt, Human
agugugccugaagucccagau

SEQ ID NO: 2489063 - RNA, 18 nt, Human
agugugaggccagggcag

SEQ ID NO: 2489064 - RNA, 16 nt, Human
agugugaguaagagcu

SEQ ID NO: 2489065 - RNA, 17 nt, Human
agugugaguaagagcug

SEQ ID NO: 2489066 - RNA, 18 nt, Human
agugugaguaagagcugg

SEQ ID NO: 2489067 - RNA, 19 nt, Human
agugugaguaagagcuggu

SEQ ID NO: 2489068 - RNA, 15 nt, Human
agugugggaagggag

SEQ ID NO: 2489069 - RNA, 17 nt, Human
agugugggaagggagag

SEQ ID NO: 2489070 - RNA, 14 nt, Human
agugugggaaugcg

SEQ ID NO: 2489071 - RNA, 20 nt, Human
agugugguguuuccuggcac

SEQ ID NO: 2489072 - RNA, 16 nt, Human
aguguggcuccccucu

SEQ ID NO: 2489073 - RNA, 17 nt, Human
aguguggcuccccucua

SEQ ID NO: 2489074 - RNA, 20 nt, Human
aguguggcugaggaggccuc

SEQ ID NO: 2489075 - RNA, 21 nt, Human
aguguggcuccccucuauuua

SEQ ID NO: 2489076 - RNA, 14 nt, Human
aguguggcuccccu

SEQ ID NO: 2489077 - RNA, 16 nt, Human
aguguggcaguuuggc

SEQ ID NO: 2489078 - RNA, 17 nt, Human
aguguggcaguuuggca

SEQ ID NO: 2489079 - RNA, 20 nt, Human
aguguggaagccggagggug

SEQ ID NO: 2489080 - RNA, 13 nt, Human
uguuaugacucca

SEQ ID NO: 2489081 - RNA, 17 nt, Human
uguuaugacuccagaau

SEQ ID NO: 2489082 - RNA, 20 nt, Human
uguucauuuugagcugaaau

SEQ ID NO: 2489083 - RNA, 18 nt, Human
uguucauuuugagcugaa

SEQ ID NO: 2489084 - RNA, 17 nt, Human
uguuccaaaugaauguu

SEQ ID NO: 2489085 - RNA, 14 nt, Human
uguucauuuccuca

SEQ ID NO: 2489086 - RNA, 17 nt, Human
uguucauuuugagcuga

SEQ ID NO: 2489087 - RNA, 9 nt, Human
aguguguaa

SEQ ID NO: 2489088 - RNA, 22 nt, Human
agugugguguuuccuggcacug

SEQ ID NO: 2489089 - RNA, 11 nt, Human
aguguguaaag

SEQ ID NO: 2489090 - RNA, 16 nt, Human
aguguguaugugcgug

SEQ ID NO: 2489091 - RNA, 19 nt, Human
aguguguaugugcgugugu

SEQ ID NO: 2489092 - RNA, 11 nt, Human
aguguguauua

SEQ ID NO: 2489093 - RNA, 20 nt, Human
aguguguaugugcgugugug

SEQ ID NO: 2489094 - RNA, 19 nt, Human
aguguguauuaaaaaaaac

SEQ ID NO: 2489095 - RNA, 14 nt, Human
aguguguauuaaaa

SEQ ID NO: 2489096 - RNA, 21 nt, Human
uguuaugaaauaaagaaauug

SEQ ID NO: 2489097 - RNA, 16 nt, Human
uguuaugaaauaaaga

SEQ ID NO: 2489098 - RNA, 13 nt, Human
uguuaugaaauaa

SEQ ID NO: 2489099 - RNA, 22 nt, Human
uguuccugaauucuauuugcug

SEQ ID NO: 2489100 - RNA, 20 nt, Human
uguuccaagacauugucaau

SEQ ID NO: 2489101 - RNA, 19 nt, Human
uguuccacaaguuaaauaa

SEQ ID NO: 2489102 - RNA, 14 nt, Human
uguuccaacugccc

SEQ ID NO: 2489103 - RNA, 11 nt, Human
uguuccaagac

SEQ ID NO: 2489104 - RNA, 14 nt, Human
uguuccaagacauu

SEQ ID NO: 2489105 - RNA, 15 nt, Human
uguuccaagacauug

SEQ ID NO: 2489106 - RNA, 18 nt, Human
uguuccaagacauuguca

SEQ ID NO: 2489107 - RNA, 19 nt, Human
uguuccaagacauugucaa

SEQ ID NO: 2489108 - RNA, 15 nt, Human
uguuccaauaaacag

SEQ ID NO: 2489109 - RNA, 21 nt, Human
uguuccaagacauugucaaua

SEQ ID NO: 2489110 - RNA, 22 nt, Human
uguucgcauggucacacacuga

SEQ ID NO: 2489111 - RNA, 23 nt, Human
uguucgcauggucacacacugau

SEQ ID NO: 2489112 - RNA, 23 nt, Human
uguucgcguguguggguggauau

SEQ ID NO: 2489113 - RNA, 15 nt, Human
uguucgcgugugugg

SEQ ID NO: 2489114 - RNA, 15 nt, Human
uguuccuggcaguuu

SEQ ID NO: 2489115 - RNA, 19 nt, Human
uguuccuggcaguuuaaaa

SEQ ID NO: 2489116 - RNA, 14 nt, Human
uguuccuggcaaua

SEQ ID NO: 2489117 - RNA, 21 nt, Human
uguuccuggcaauaguguguu

SEQ ID NO: 2489118 - RNA, 18 nt, Human
uguuccuucacauccugu

SEQ ID NO: 2489119 - RNA, 19 nt, Human
uguuccuuagaccuuccau

SEQ ID NO: 2489120 - RNA, 20 nt, Human
uguucgcauggucacacacu

SEQ ID NO: 2489121 - RNA, 18 nt, Human
agucugaacagcuguaau

SEQ ID NO: 2489122 - RNA, 16 nt, Human
agucugaacagcugua

SEQ ID NO: 2489123 - RNA, 15 nt, Human
agucugaacagcugu

SEQ ID NO: 2489124 - RNA, 23 nt, Human
agucucuuuucuuuagagcauug

SEQ ID NO: 2489125 - RNA, 12 nt, Human
agucugaaggcu

SEQ ID NO: 2489126 - RNA, 21 nt, Human
agucugaagcagaugcaaaga

SEQ ID NO: 2489127 - RNA, 14 nt, Human
agucugaagcagau

SEQ ID NO: 2489128 - RNA, 13 nt, Human
agucuuagaugua

SEQ ID NO: 2489129 - RNA, 14 nt, Human
agucuuagauguau

SEQ ID NO: 2489130 - RNA, 16 nt, Human
agucuuagauguauau

SEQ ID NO: 2489131 - RNA, 23 nt, Human
agucuuagauguauauauuuccu

SEQ ID NO: 2489132 - RNA, 17 nt, Human
agucucuugauucauaa

SEQ ID NO: 2489133 - RNA, 16 nt, Human
agucucuugauucaua

SEQ ID NO: 2489134 - RNA, 21 nt, Human
agucucuucuccacuggaugg

SEQ ID NO: 2489135 - RNA, 18 nt, Human
agucucuucuccacugga

SEQ ID NO: 2489136 - RNA, 17 nt, Human
agucucuuguauuaaac

SEQ ID NO: 2489137 - RNA, 15 nt, Human
agucucuuuaaucuu

SEQ ID NO: 2489138 - RNA, 17 nt, Human
agucucuuuaaucuuca

SEQ ID NO: 2489139 - RNA, 21 nt, Human
agucucuuuaaucuucaguuu

SEQ ID NO: 2489140 - RNA, 23 nt, Human
agucucuuuaaucuucaguuuua

SEQ ID NO: 2489141 - RNA, 22 nt, Human
agucucuuuucuuuagagcauu

SEQ ID NO: 2489142 - RNA, 21 nt, Human
agucucuuuucuuuagagcau

SEQ ID NO: 2489143 - RNA, 15 nt, Human
agucucuuuucuuua

SEQ ID NO: 2489144 - RNA, 22 nt, Human
agucucuuuaaucuucaguuuu

SEQ ID NO: 2489145 - RNA, 17 nt, Human
agucucccuuucccuuc

SEQ ID NO: 2489146 - RNA, 23 nt, Human
agucuccuuugcacugagggcca

SEQ ID NO: 2489147 - RNA, 22 nt, Human
agucuccuuugcacugagggcc

SEQ ID NO: 2489148 - RNA, 21 nt, Human
agucuccuuugcacugagggc

SEQ ID NO: 2489149 - RNA, 19 nt, Human
agucuccuuugcacugagg

SEQ ID NO: 2489150 - RNA, 18 nt, Human
agucuccuuugcacugag

SEQ ID NO: 2489151 - RNA, 17 nt, Human
agucuccuuugcacuga

SEQ ID NO: 2489152 - RNA, 17 nt, Human
agucucccuucucccau

SEQ ID NO: 2489153 - RNA, 14 nt, Human
agucuccuuccccu

SEQ ID NO: 2489154 - RNA, 19 nt, Human
agucucuucuccacuggau

SEQ ID NO: 2489155 - RNA, 16 nt, Human
agucucuagguucuga

SEQ ID NO: 2489156 - RNA, 20 nt, Human
agucucgcucugucacccag

SEQ ID NO: 2489157 - RNA, 15 nt, Human
agucucgcucuguca

SEQ ID NO: 2489158 - RNA, 19 nt, Human
agucucgcucuguugccca

SEQ ID NO: 2489159 - RNA, 24 nt, Human
ugugagaagugaaugcugggacuc

SEQ ID NO: 2489160 - RNA, 23 nt, Human
ugugagaagugaaugcugggacu

SEQ ID NO: 2489161 - RNA, 22 nt, Human
ugugagaagugaaugcugggac

SEQ ID NO: 2489162 - RNA, 21 nt, Human
ugugagaagugaaugcuggga

SEQ ID NO: 2489163 - RNA, 19 nt, Human
ugugagacagugggaaaua

SEQ ID NO: 2489164 - RNA, 18 nt, Human
ugugagacagugggaaau

SEQ ID NO: 2489165 - RNA, 14 nt, Human
ugugagaaucaaaa

SEQ ID NO: 2489166 - RNA, 13 nt, Human
ugugagaccccca

SEQ ID NO: 2489167 - RNA, 14 nt, Human
ugugagacccccac

SEQ ID NO: 2489168 - RNA, 19 nt, Human
ugugagacucgagaacuuu

SEQ ID NO: 2489169 - RNA, 18 nt, Human
ugugagcccagcuggguc

SEQ ID NO: 2489170 - RNA, 17 nt, Human
ugugagccccugguccu

SEQ ID NO: 2489171 - RNA, 14 nt, Human
ugugagccccuggu

SEQ ID NO: 2489172 - RNA, 12 nt, Human
ugugagccccug

SEQ ID NO: 2489173 - RNA, 13 nt, Human
ugugagagaaagu

SEQ ID NO: 2489174 - RNA, 15 nt, Human
ugugagacccccaca

SEQ ID NO: 2489175 - RNA, 16 nt, Human
ugugagacccccacac

SEQ ID NO: 2489176 - RNA, 18 nt, Human
ugugagacccccacaccu

SEQ ID NO: 2489177 - RNA, 19 nt, Human
ugugagacccccacaccuc

SEQ ID NO: 2489178 - RNA, 11 nt, Human
ugugaggaagc

SEQ ID NO: 2489179 - RNA, 14 nt, Human
agucucccuucucc

SEQ ID NO: 2489180 - RNA, 23 nt, Human
ugugaggaaagucauuggcuuua

SEQ ID NO: 2489181 - RNA, 22 nt, Human
ugugaggaaagucauuggcuuu

SEQ ID NO: 2489182 - RNA, 16 nt, Human
ugugaggaaagucauu

SEQ ID NO: 2489183 - RNA, 14 nt, Human
ugugagccuuggcu

SEQ ID NO: 2489184 - RNA, 22 nt, Human
ugugagccccugguccugaggg

SEQ ID NO: 2489185 - RNA, 21 nt, Human
ugugagccccugguccugagg

SEQ ID NO: 2489186 - RNA, 16 nt, Human
ugugacugaucucucg

SEQ ID NO: 2489187 - RNA, 16 nt, Human
ugucucccuggcccuc

SEQ ID NO: 2489188 - RNA, 15 nt, Human
ugucucccuggcccu

SEQ ID NO: 2489189 - RNA, 15 nt, Human
ugucuccauggcccu

SEQ ID NO: 2489190 - RNA, 22 nt, Human
ugucuccagacccccaccccuu

SEQ ID NO: 2489191 - RNA, 23 nt, Human
ugucuccagacccccaccccuuc

SEQ ID NO: 2489192 - RNA, 14 nt, Human
ugucucccuggccc

SEQ ID NO: 2489193 - RNA, 11 nt, Human
ugucuccagac

SEQ ID NO: 2489194 - RNA, 12 nt, Human
ugucuccagacc

SEQ ID NO: 2489195 - RNA, 14 nt, Human
ugucuccagacccc

SEQ ID NO: 2489196 - RNA, 16 nt, Human
ugucuccagaccccca

SEQ ID NO: 2489197 - RNA, 17 nt, Human
ugucuccagacccccac

SEQ ID NO: 2489198 - RNA, 19 nt, Human
ugucuccagacccccaccc

SEQ ID NO: 2489199 - RNA, 20 nt, Human
ugucuccagacccccacccc

SEQ ID NO: 2489200 - RNA, 15 nt, Human
ugugacuucuccagg

SEQ ID NO: 2489201 - RNA, 23 nt, Human
ugugacuugcaucguggagacag

SEQ ID NO: 2489202 - RNA, 19 nt, Human
ugugacuucagcucuguuu

SEQ ID NO: 2489203 - RNA, 18 nt, Human
ugugacuucagcucuguu

SEQ ID NO: 2489204 - RNA, 22 nt, Human
ugugacugauguuacaucacag

SEQ ID NO: 2489205 - RNA, 20 nt, Human
agucuuuacagcugagcaca

SEQ ID NO: 2489206 - RNA, 20 nt, Human
agucuugugcuuuuccuauu

SEQ ID NO: 2489207 - RNA, 21 nt, Human
agugaacaaauuuacagagac

SEQ ID NO: 2489208 - RNA, 18 nt, Human
agucuuucacauuuaaau

SEQ ID NO: 2489209 - RNA, 16 nt, Human
agucuuucacauuuaa

SEQ ID NO: 2489210 - RNA, 22 nt, Human
agucuuguauuaaguuguuaau

SEQ ID NO: 2489211 - RNA, 12 nt, Human
agucuugugcuu

SEQ ID NO: 2489212 - RNA, 15 nt, Human
agucuugugcuuuuc

SEQ ID NO: 2489213 - RNA, 21 nt, Human
agugacucgggcuccugugcc

SEQ ID NO: 2489214 - RNA, 20 nt, Human
agugacucgggcuccugugc

SEQ ID NO: 2489215 - RNA, 19 nt, Human
agugacucgggcuccugug

SEQ ID NO: 2489216 - RNA, 17 nt, Human
agugacucgggcuccug

SEQ ID NO: 2489217 - RNA, 15 nt, Human
agugacucgggcucc

SEQ ID NO: 2489218 - RNA, 14 nt, Human
agugacucgagggu

SEQ ID NO: 2489219 - RNA, 17 nt, Human
agugacuccaggagagg

SEQ ID NO: 2489220 - RNA, 13 nt, Human
agugacuccagga

SEQ ID NO: 2489221 - RNA, 21 nt, Human
agugacugauggcuaauguac

SEQ ID NO: 2489222 - RNA, 20 nt, Human
agugaacuacgcuugcucau

SEQ ID NO: 2489223 - RNA, 17 nt, Human
agugaaccuaccuucau

SEQ ID NO: 2489224 - RNA, 15 nt, Human
agugaaccuguauaa

SEQ ID NO: 2489225 - RNA, 13 nt, Human
agugaaccaucau

SEQ ID NO: 2489226 - RNA, 21 nt, Human
agugaaccaucauuauaaacg

SEQ ID NO: 2489227 - RNA, 22 nt, Human
agugacuaugaacuucucucag

SEQ ID NO: 2489228 - RNA, 18 nt, Human
agugacucauccucuuga

SEQ ID NO: 2489229 - RNA, 23 nt, Human
agugacucauccucuugaagaug

SEQ ID NO: 2489230 - RNA, 22 nt, Human
agugaacaaauuuacagagaca

SEQ ID NO: 2489231 - RNA, 23 nt, Human
agugaacaaauuuacagagacag

SEQ ID NO: 2489232 - RNA, 17 nt, Human
agugaacacuagccaga

SEQ ID NO: 2489233 - RNA, 16 nt, Human
agugaacacuagccag

SEQ ID NO: 2489234 - RNA, 23 nt, Human
agugaaccaaagagacuggagca

SEQ ID NO: 2489235 - RNA, 22 nt, Human
agugaaccaaagagacuggagc

SEQ ID NO: 2489236 - RNA, 15 nt, Human
agugaaccaaagaga

SEQ ID NO: 2489237 - RNA, 13 nt, Human
agugaaccaaaga

SEQ ID NO: 2489238 - RNA, 16 nt, Human
agugaacuugggccac

SEQ ID NO: 2489239 - RNA, 18 nt, Human
agugacuugugucccaug

SEQ ID NO: 2489240 - RNA, 16 nt, Human
agugacuuguguccca

SEQ ID NO: 2489241 - RNA, 15 nt, Human
agugacuugcccagu

SEQ ID NO: 2489242 - RNA, 14 nt, Human
agugacuugcccag

SEQ ID NO: 2489243 - RNA, 22 nt, Human
agugagaaaaagcuccuguccu

SEQ ID NO: 2489244 - RNA, 19 nt, Human
agugagaaaaagcuccugu

SEQ ID NO: 2489245 - RNA, 18 nt, Human
agugagaaaaagcuccug

SEQ ID NO: 2489246 - RNA, 18 nt, Human
agugacuuuggcugcaug

SEQ ID NO: 2489247 - RNA, 14 nt, Human
agugagaaaaagcu

SEQ ID NO: 2489248 - RNA, 22 nt, Human
agugacucgggcuccugugccc

SEQ ID NO: 2489249 - RNA, 21 nt, Human
agugacuuagcagaugcuggu

SEQ ID NO: 2489250 - RNA, 20 nt, Human
agugacuguucaagagcaca

SEQ ID NO: 2489251 - RNA, 19 nt, Human
agugacuguucaagagcac

SEQ ID NO: 2489252 - RNA, 17 nt, Human
agugacuguucaagagc

SEQ ID NO: 2489253 - RNA, 22 nt, Human
agugagagggcaugcgcacaag

SEQ ID NO: 2489254 - RNA, 20 nt, Human
agugagaagcuuugcccucc

SEQ ID NO: 2489255 - RNA, 14 nt, Human
agugagagggcaug

SEQ ID NO: 2489256 - RNA, 13 nt, Human
agugagagggcau

SEQ ID NO: 2489257 - RNA, 12 nt, Human
agugagacagaa

SEQ ID NO: 2489258 - RNA, 17 nt, Human
agugagaauaggcagcc

SEQ ID NO: 2489259 - RNA, 20 nt, Human
agugagaaaaagcuccuguc

SEQ ID NO: 2489260 - RNA, 16 nt, Human
agugagaagcuuugcc

SEQ ID NO: 2489261 - RNA, 22 nt, Human
agugagcacuaaggugugcucu

SEQ ID NO: 2489262 - RNA, 14 nt, Human
agugagcacuaagg

SEQ ID NO: 2489263 - RNA, 22 nt, Human
ugugaugaugaaaugaggucag

SEQ ID NO: 2489264 - RNA, 15 nt, Human
ugugauucaaucugu

SEQ ID NO: 2489265 - RNA, 15 nt, Human
ugugaugccacacag

SEQ ID NO: 2489266 - RNA, 17 nt, Human
ugugaugccacacagag

SEQ ID NO: 2489267 - RNA, 16 nt, Human
ugugaugaggggaggg

SEQ ID NO: 2489268 - RNA, 16 nt, Human
ugugaugaggcagagg

SEQ ID NO: 2489269 - RNA, 14 nt, Human
ugugaugaggggag

SEQ ID NO: 2489270 - RNA, 19 nt, Human
ugugaugagaggaaaucac

SEQ ID NO: 2489271 - RNA, 23 nt, Human
agugagcugagaucgugccguua

SEQ ID NO: 2489272 - RNA, 18 nt, Human
ugugaugagaggaaauca

SEQ ID NO: 2489273 - RNA, 22 nt, Human
agugagauagcauugugaacug

SEQ ID NO: 2489274 - RNA, 16 nt, Human
agugagauagcauugu

SEQ ID NO: 2489275 - RNA, 12 nt, Human
agugagaugcau

SEQ ID NO: 2489276 - RNA, 19 nt, Human
agugagauagcauugugaa

SEQ ID NO: 2489277 - RNA, 16 nt, Human
agugagaugcauucuu

SEQ ID NO: 2489278 - RNA, 19 nt, Human
agugagccgcaucuucucc

SEQ ID NO: 2489279 - RNA, 21 nt, Human
agugagccugaauuuuguugc

SEQ ID NO: 2489280 - RNA, 13 nt, Human
agugagccuggcu

SEQ ID NO: 2489281 - RNA, 24 nt, Human
agugagccgcaucuucuccaucug

SEQ ID NO: 2489282 - RNA, 11 nt, Human
agugagccuga

SEQ ID NO: 2489283 - RNA, 20 nt, Human
agugagccgcaucuucucca

SEQ ID NO: 2489284 - RNA, 22 nt, Human
agugagccgcaucuucuccauc

SEQ ID NO: 2489285 - RNA, 12 nt, Human
agugagcugguu

SEQ ID NO: 2489286 - RNA, 17 nt, Human
agugagcucuaugggca

SEQ ID NO: 2489287 - RNA, 16 nt, Human
agugagcucuaugggc

SEQ ID NO: 2489288 - RNA, 23 nt, Human
agugagcggugcuguccucaggu

SEQ ID NO: 2489289 - RNA, 15 nt, Human
agugagccuggcucu

SEQ ID NO: 2489290 - RNA, 14 nt, Human
agugagccuggcuc

SEQ ID NO: 2489291 - RNA, 22 nt, Human
agugagcggugcuguccucagg

SEQ ID NO: 2489292 - RNA, 19 nt, Human
ugugcucuccaagcccagu

SEQ ID NO: 2489293 - RNA, 20 nt, Human
ugugcuccgugccuccacca

SEQ ID NO: 2489294 - RNA, 16 nt, Human
ugugcuccgugccucc

SEQ ID NO: 2489295 - RNA, 16 nt, Human
ugugcuccuccuuggu

SEQ ID NO: 2489296 - RNA, 14 nt, Human
ugugcucuccaagc

SEQ ID NO: 2489297 - RNA, 21 nt, Human
ugugcucaggagcccugggag

SEQ ID NO: 2489298 - RNA, 16 nt, Human
ugugccuaacaccagc

SEQ ID NO: 2489299 - RNA, 14 nt, Human
ugugcuccgugccu

SEQ ID NO: 2489300 - RNA, 21 nt, Human
ugugcucccugguucugauga

SEQ ID NO: 2489301 - RNA, 17 nt, Human
ugugcuccccuuugccu

SEQ ID NO: 2489302 - RNA, 21 nt, Human
ugugcugaggccuuaucauuc

SEQ ID NO: 2489303 - RNA, 14 nt, Human
ugugcugaggccuu

SEQ ID NO: 2489304 - RNA, 21 nt, Human
ugugcugacggaagccaacuu

SEQ ID NO: 2489305 - RNA, 17 nt, Human
ugugcugacccuccugu

SEQ ID NO: 2489306 - RNA, 14 nt, Human
ugugcugacccucc

SEQ ID NO: 2489307 - RNA, 19 nt, Human
ugugcugaauucugcaaug

SEQ ID NO: 2489308 - RNA, 23 nt, Human
ugugcuccgugccuccaccacca

SEQ ID NO: 2489309 - RNA, 18 nt, Human
ugugcugagucugaaggc

SEQ ID NO: 2489310 - RNA, 19 nt, Human
ugugcugagucugaaggcu

SEQ ID NO: 2489311 - RNA, 20 nt, Human
ugugcugcccgucuucagcc

SEQ ID NO: 2489312 - RNA, 16 nt, Human
ugugccgaaugugcag

SEQ ID NO: 2489313 - RNA, 15 nt, Human
ugugccgaaugugca

SEQ ID NO: 2489314 - RNA, 14 nt, Human
ugugcccuggugga

SEQ ID NO: 2489315 - RNA, 13 nt, Human
ugugcccuggugg

SEQ ID NO: 2489316 - RNA, 11 nt, Human
ugugcccuggu

SEQ ID NO: 2489317 - RNA, 14 nt, Human
ugugcccucuugau

SEQ ID NO: 2489318 - RNA, 20 nt, Human
ugugcucaggagcccuggga

SEQ ID NO: 2489319 - RNA, 15 nt, Human
ugugccgacagaagg

SEQ ID NO: 2489320 - RNA, 15 nt, Human
ugugccuaacaccag

SEQ ID NO: 2489321 - RNA, 16 nt, Human
ugugauucuaaugucu

SEQ ID NO: 2489322 - RNA, 14 nt, Human
ugugauucuaaugu

SEQ ID NO: 2489323 - RNA, 21 nt, Human
ugugauuccuuugaagaggaa

SEQ ID NO: 2489324 - RNA, 20 nt, Human
ugugauuccuuugaagagga

SEQ ID NO: 2489325 - RNA, 19 nt, Human
ugugauuccuuugaagagg

SEQ ID NO: 2489326 - RNA, 22 nt, Human
ugugauuccacuacaccuggcu

SEQ ID NO: 2489327 - RNA, 16 nt, Human
ugugauucaaucugua

SEQ ID NO: 2489328 - RNA, 20 nt, Human
ugugauucaaucuguaaacu

SEQ ID NO: 2489329 - RNA, 22 nt, Human
ugugauucaaucuguaaacugu

SEQ ID NO: 2489330 - RNA, 13 nt, Human
ugugauugaaucu

SEQ ID NO: 2489331 - RNA, 17 nt, Human
ugugauucuaaugucuu

SEQ ID NO: 2489332 - RNA, 21 nt, Human
ugugauucuaaugucuucauu

SEQ ID NO: 2489333 - RNA, 15 nt, Human
ugugauugaaucuga

SEQ ID NO: 2489334 - RNA, 16 nt, Human
ugugauugacagcuuu

SEQ ID NO: 2489335 - RNA, 22 nt, Human
ugugauugacagcuuugcugcu

SEQ ID NO: 2489336 - RNA, 23 nt, Human
ugugauugacagcuuugcugcug

SEQ ID NO: 2489337 - RNA, 15 nt, Human
ugugauugggaauaa

SEQ ID NO: 2489338 - RNA, 19 nt, Human
ugugauugggaauaaauau

SEQ ID NO: 2489339 - RNA, 17 nt, Human
ugugauugggaauaaau

SEQ ID NO: 2489340 - RNA, 19 nt, Human
uguggauuuaacagaaaug

SEQ ID NO: 2489341 - RNA, 20 nt, Human
uguggauuuaacagaaaugu

SEQ ID NO: 2489342 - RNA, 22 nt, Human
uguggauuuaacagaaauguac

SEQ ID NO: 2489343 - RNA, 23 nt, Human
agugagcugguuuuuagcggaga

SEQ ID NO: 2489344 - RNA, 17 nt, Human
uguggaucagagaugca

SEQ ID NO: 2489345 - RNA, 19 nt, Human
uguggaucaaccaucgcuu

SEQ ID NO: 2489346 - RNA, 20 nt, Human
uguggaucaaccaucgcuuu

SEQ ID NO: 2489347 - RNA, 21 nt, Human
uguggaucaaauccagccugc

SEQ ID NO: 2489348 - RNA, 14 nt, Human
uguggaucagagau

SEQ ID NO: 2489349 - RNA, 19 nt, Human
uguggaugagcccucagaa

SEQ ID NO: 2489350 - RNA, 23 nt, Human
uguggaugagcccucagaacccu

SEQ ID NO: 2489351 - RNA, 14 nt, Human
uguggaugauaaaa

SEQ ID NO: 2489352 - RNA, 21 nt, Human
ugugcugcccugcccaccugg

SEQ ID NO: 2489353 - RNA, 20 nt, Human
ugugcugcccugcccaccug

SEQ ID NO: 2489354 - RNA, 19 nt, Human
ugugcugcccugcccaccu

SEQ ID NO: 2489355 - RNA, 18 nt, Human
ugugcugcccugcccacc

SEQ ID NO: 2489356 - RNA, 23 nt, Human
ugugcuguguaaaguuagucuac

SEQ ID NO: 2489357 - RNA, 16 nt, Human
ugugcuguguaaaguu

SEQ ID NO: 2489358 - RNA, 12 nt, Human
ugugcugugugu

SEQ ID NO: 2489359 - RNA, 15 nt, Human
ugugcugugugugac

SEQ ID NO: 2489360 - RNA, 15 nt, Human
ugugcuguguaaagu

SEQ ID NO: 2489361 - RNA, 14 nt, Human
ugugcuguguaaag

SEQ ID NO: 2489362 - RNA, 13 nt, Human
ugugcuguguaaa

SEQ ID NO: 2489363 - RNA, 20 nt, Human
ugugcuguggggcugguagc

SEQ ID NO: 2489364 - RNA, 17 nt, Human
ugugcuguggggcuggu

SEQ ID NO: 2489365 - RNA, 17 nt, Human
ugugcuguggaagcaac

SEQ ID NO: 2489366 - RNA, 12 nt, Human
ugugcuguguaa

SEQ ID NO: 2489367 - RNA, 16 nt, Human
ugugcuguggaagcaa

SEQ ID NO: 2489368 - RNA, 17 nt, Human
ugugcugugcccaaguu

SEQ ID NO: 2489369 - RNA, 14 nt, Human
ugugcuguggaagc

SEQ ID NO: 2489370 - RNA, 19 nt, Human
ugugcugguguccugacca

SEQ ID NO: 2489371 - RNA, 23 nt, Human
ugugcugguguccugaccacccu

SEQ ID NO: 2489372 - RNA, 16 nt, Human
agugaggaugaaaaaa

SEQ ID NO: 2489373 - RNA, 20 nt, Human
agugaggaaggcaggaagag

SEQ ID NO: 2489374 - RNA, 14 nt, Human
agugaggaaggcag

SEQ ID NO: 2489375 - RNA, 19 nt, Human
agugaggaagccaggucca

SEQ ID NO: 2489376 - RNA, 20 nt, Human
agugaggaauaguugagccc

SEQ ID NO: 2489377 - RNA, 22 nt, Human
agugaggaaggcaggaagagag

SEQ ID NO: 2489378 - RNA, 21 nt, Human
agugaggaauaguugagcccc

SEQ ID NO: 2489379 - RNA, 20 nt, Human
agugagcuuugcugcuacag

SEQ ID NO: 2489380 - RNA, 19 nt, Human
agugagcuuugcugcuaca

SEQ ID NO: 2489381 - RNA, 16 nt, Human
agugagcuuugcugcu

SEQ ID NO: 2489382 - RNA, 14 nt, Human
agugagcuuugcug

SEQ ID NO: 2489383 - RNA, 17 nt, Human
agugagcuguaggugug

SEQ ID NO: 2489384 - RNA, 19 nt, Human
uguggauguuuuaauucca

SEQ ID NO: 2489385 - RNA, 15 nt, Human
uguggaugucuuccu

SEQ ID NO: 2489386 - RNA, 22 nt, Human
uguggauguuuuaauuccauga

SEQ ID NO: 2489387 - RNA, 21 nt, Human
agugagcuuggaaaggaccag

SEQ ID NO: 2489388 - RNA, 14 nt, Human
agugaggaugucug

SEQ ID NO: 2489389 - RNA, 22 nt, Human
agugaggcauugcacagggaga

SEQ ID NO: 2489390 - RNA, 18 nt, Human
agugaggcauugcacagg

SEQ ID NO: 2489391 - RNA, 12 nt, Human
agugaggcucug

SEQ ID NO: 2489392 - RNA, 13 nt, Human
agugaggcucugc

SEQ ID NO: 2489393 - RNA, 13 nt, Human
agugaggcccagg

SEQ ID NO: 2489394 - RNA, 15 nt, Human
agugaggcccaggga

SEQ ID NO: 2489395 - RNA, 17 nt, Human
agugauauggcagaaga

SEQ ID NO: 2489396 - RNA, 14 nt, Human
agugauauggcaga

SEQ ID NO: 2489397 - RNA, 14 nt, Human
agugauauaaauca

SEQ ID NO: 2489398 - RNA, 21 nt, Human
agugauagucuuuugcuuuug

SEQ ID NO: 2489399 - RNA, 20 nt, Human
agugauagucuuuugcuuuu

SEQ ID NO: 2489400 - RNA, 19 nt, Human
agugaguuguugcccuggg

SEQ ID NO: 2489401 - RNA, 18 nt, Human
agugaguuguugcccugg

SEQ ID NO: 2489402 - RNA, 20 nt, Human
agugaguuguugcccugggu

SEQ ID NO: 2489403 - RNA, 19 nt, Human
agugauaauuucuggaauu

SEQ ID NO: 2489404 - RNA, 17 nt, Human
agugauagucuuuugcu

SEQ ID NO: 2489405 - RNA, 15 nt, Human
agugauagucuuuug

SEQ ID NO: 2489406 - RNA, 23 nt, Human
agugauacaacuucaagugcaug

SEQ ID NO: 2489407 - RNA, 20 nt, Human
agugauagagcuaacccuua

SEQ ID NO: 2489408 - RNA, 17 nt, Human
agugauacaacuucaag

SEQ ID NO: 2489409 - RNA, 14 nt, Human
agugcaaauuguca

SEQ ID NO: 2489410 - RNA, 20 nt, Human
agugcaacagcacuggcucu

SEQ ID NO: 2489411 - RNA, 15 nt, Human
agugcaacaguagca

SEQ ID NO: 2489412 - RNA, 18 nt, Human
agugcaaaucauagcugg

SEQ ID NO: 2489413 - RNA, 17 nt, Human
agugcaaaucauagcug

SEQ ID NO: 2489414 - RNA, 21 nt, Human
agugcaaagauuugcuuuaau

SEQ ID NO: 2489415 - RNA, 18 nt, Human
agugcaaauuugauacau

SEQ ID NO: 2489416 - RNA, 17 nt, Human
agugcaacacugaagcu

SEQ ID NO: 2489417 - RNA, 21 nt, Human
agugcauccaaaggugcucag

SEQ ID NO: 2489418 - RNA, 15 nt, Human
agugcauccaaaggu

SEQ ID NO: 2489419 - RNA, 14 nt, Human
agugcauccaaagg

SEQ ID NO: 2489420 - RNA, 20 nt, Human
agugcauauuccuuucuauc

SEQ ID NO: 2489421 - RNA, 19 nt, Human
agugcauauuccuuucuau

SEQ ID NO: 2489422 - RNA, 18 nt, Human
agugcauauuccuuucua

SEQ ID NO: 2489423 - RNA, 16 nt, Human
agugcauauuccuuuc

SEQ ID NO: 2489424 - RNA, 14 nt, Human
agugcauauuccuu

SEQ ID NO: 2489425 - RNA, 14 nt, Human
agugcaugcugucc

SEQ ID NO: 2489426 - RNA, 22 nt, Human
agugcauuuaugagcucuucau

SEQ ID NO: 2489427 - RNA, 16 nt, Human
agugcaugcugucccu

SEQ ID NO: 2489428 - RNA, 19 nt, Human
agugccagaggugggcagg

SEQ ID NO: 2489429 - RNA, 18 nt, Human
agugccagaggugggcag

SEQ ID NO: 2489430 - RNA, 16 nt, Human
agugccagaggugggc

SEQ ID NO: 2489431 - RNA, 15 nt, Human
agugccagagguggg

SEQ ID NO: 2489432 - RNA, 21 nt, Human
agugccagaggugggcaggug

SEQ ID NO: 2489433 - RNA, 20 nt, Human
agugccagaggugggcaggu

SEQ ID NO: 2489434 - RNA, 13 nt, Human
agugccaggacuc

SEQ ID NO: 2489435 - RNA, 24 nt, Human
agugccaggacuccccaggccagg

SEQ ID NO: 2489436 - RNA, 23 nt, Human
agugccaggacuccccaggccag

SEQ ID NO: 2489437 - RNA, 19 nt, Human
agugccaggacuccccagg

SEQ ID NO: 2489438 - RNA, 22 nt, Human
agugccagaggugggcaggugg

SEQ ID NO: 2489439 - RNA, 18 nt, Human
agugccaggauggaauga

SEQ ID NO: 2489440 - RNA, 14 nt, Human
agugccaaaaacaa

SEQ ID NO: 2489441 - RNA, 15 nt, Human
agugcauuuucccag

SEQ ID NO: 2489442 - RNA, 17 nt, Human
agugcauuuucccagau

SEQ ID NO: 2489443 - RNA, 23 nt, Human
agugcaguccugaucagagccgu

SEQ ID NO: 2489444 - RNA, 17 nt, Human
agugcagugagccgaga

SEQ ID NO: 2489445 - RNA, 21 nt, Human
agugcaauaaaucugacccag

SEQ ID NO: 2489446 - RNA, 22 nt, Human
agugcaauaaaucugacccagu

SEQ ID NO: 2489447 - RNA, 23 nt, Human
agugcaauaaaucugacccagug

SEQ ID NO: 2489448 - RNA, 20 nt, Human
agugcaauaaaucugaccca

SEQ ID NO: 2489449 - RNA, 18 nt, Human
agugcaagccccugcucc

SEQ ID NO: 2489450 - RNA, 15 nt, Human
agugcaagccccugc

SEQ ID NO: 2489451 - RNA, 17 nt, Human
agugcaagccccugcuc

SEQ ID NO: 2489452 - RNA, 13 nt, Human
auagaaguaaaaa

SEQ ID NO: 2489453 - RNA, 13 nt, Human
auagaaggcaggu

SEQ ID NO: 2489454 - RNA, 16 nt, Human
auagaagcuguaguag

SEQ ID NO: 2489455 - RNA, 18 nt, Human
auagaauaaaauauaauu

SEQ ID NO: 2489456 - RNA, 19 nt, Human
auagaagaacugcaaaggu

SEQ ID NO: 2489457 - RNA, 20 nt, Human
auagaagaauacaaacauau

SEQ ID NO: 2489458 - RNA, 15 nt, Human
auagaagaacugcaa

SEQ ID NO: 2489459 - RNA, 14 nt, Human
auagaacugaauga

SEQ ID NO: 2489460 - RNA, 18 nt, Human
auagaacucugaaaugaa

SEQ ID NO: 2489461 - RNA, 13 nt, Human
auagaacagugcu

SEQ ID NO: 2489462 - RNA, 15 nt, Human
auagaacucugggcu

SEQ ID NO: 2489463 - RNA, 13 nt, Human
auagaagcuguag

SEQ ID NO: 2489464 - RNA, 14 nt, Human
auagaagcuguagu

SEQ ID NO: 2489465 - RNA, 19 nt, Human
auagaaggcuauggggaua

SEQ ID NO: 2489466 - RNA, 19 nt, Human
auagaaggauguacauuuc

SEQ ID NO: 2489467 - RNA, 16 nt, Human
auagaaauuuccagag

SEQ ID NO: 2489468 - RNA, 17 nt, Human
auagaacagagaaagag

SEQ ID NO: 2489469 - RNA, 21 nt, Human
auagaacucaguuuuaacuag

SEQ ID NO: 2489470 - RNA, 22 nt, Human
auagaaaugcugguuuuucagu

SEQ ID NO: 2489471 - RNA, 22 nt, Human
auacuguauuaagagugaaaau

SEQ ID NO: 2489472 - RNA, 20 nt, Human
auacuguauuaagagugaaa

SEQ ID NO: 2489473 - RNA, 15 nt, Human
auagaaauuuccaga

SEQ ID NO: 2489474 - RNA, 19 nt, Human
auagaaaugcugguuuuuc

SEQ ID NO: 2489475 - RNA, 16 nt, Human
auacuguaaagaaaga

SEQ ID NO: 2489476 - RNA, 18 nt, Human
auacuguaaagaaagaga

SEQ ID NO: 2489477 - RNA, 19 nt, Human
auacuguaaagaaagagag

SEQ ID NO: 2489478 - RNA, 20 nt, Human
auacuguaaagaaagagaga

SEQ ID NO: 2489479 - RNA, 21 nt, Human
auacuguaaagaaagagagaa

SEQ ID NO: 2489480 - RNA, 22 nt, Human
auacuguaaagaaagagagaaa

SEQ ID NO: 2489481 - RNA, 12 nt, Human
auacuguaacac

SEQ ID NO: 2489482 - RNA, 23 nt, Human
auacuguaaagaaagagagaaaa

SEQ ID NO: 2489483 - RNA, 22 nt, Human
auacuggccucgccuggccuga

SEQ ID NO: 2489484 - RNA, 20 nt, Human
auacuguacaaugacuuuau

SEQ ID NO: 2489485 - RNA, 16 nt, Human
auacuguacuuaauaa

SEQ ID NO: 2489486 - RNA, 17 nt, Human
auacuguacuuaauaaa

SEQ ID NO: 2489487 - RNA, 16 nt, Human
auacuguauuaagagu

SEQ ID NO: 2489488 - RNA, 15 nt, Human
auacuguauuaagag

SEQ ID NO: 2489489 - RNA, 13 nt, Human
auacuguauuaag

SEQ ID NO: 2489490 - RNA, 13 nt, Human
auagaaaugcugg

SEQ ID NO: 2489491 - RNA, 22 nt, Human
auagaauaaaauuuuuaaucuu

SEQ ID NO: 2489492 - RNA, 19 nt, Human
auagaauaaaauuuuuaau

SEQ ID NO: 2489493 - RNA, 14 nt, Human
auagaauaaaauuu

SEQ ID NO: 2489494 - RNA, 17 nt, Human
auagaauuaacacauga

SEQ ID NO: 2489495 - RNA, 19 nt, Human
auagaauauaauuaucgga

SEQ ID NO: 2489496 - RNA, 22 nt, Human
auagaauauuuauuaccucuga

SEQ ID NO: 2489497 - RNA, 19 nt, Human
auagaauauuuauuaccuc

SEQ ID NO: 2489498 - RNA, 13 nt, Human
auagaauauuuau

SEQ ID NO: 2489499 - RNA, 12 nt, Human
auagaauauuua

SEQ ID NO: 2489500 - RNA, 16 nt, Human
auagacaauuuauuau

SEQ ID NO: 2489501 - RNA, 22 nt, Human
auagacaauuuauuauggcaca

SEQ ID NO: 2489502 - RNA, 14 nt, Human
auagaauuuccaau

SEQ ID NO: 2489503 - RNA, 22 nt, Human
auagacacuccccgaagucuuu

SEQ ID NO: 2489504 - RNA, 23 nt, Human
auagacaauuuauuauggcacau

SEQ ID NO: 2489505 - RNA, 20 nt, Human
auagacaguauauuuauagu

SEQ ID NO: 2489506 - RNA, 21 nt, Human
auagaguguacuuaacuauuc

SEQ ID NO: 2489507 - RNA, 19 nt, Human
auagaguguacuuaacuau

SEQ ID NO: 2489508 - RNA, 14 nt, Human
auagaguguacuua

SEQ ID NO: 2489509 - RNA, 18 nt, Human
auagauaggucagugcaa

SEQ ID NO: 2489510 - RNA, 18 nt, Human
auagaggcuucuccgcca

SEQ ID NO: 2489511 - RNA, 20 nt, Human
auagaggcuagcuucugcuu

SEQ ID NO: 2489512 - RNA, 19 nt, Human
auagaggcuagcuucugcu

SEQ ID NO: 2489513 - RNA, 12 nt, Human
auagaggcuagc

SEQ ID NO: 2489514 - RNA, 13 nt, Human
auagagcuguauu

SEQ ID NO: 2489515 - RNA, 19 nt, Human
auagaggcuaaauuacuca

SEQ ID NO: 2489516 - RNA, 14 nt, Human
auagaguauaugca

SEQ ID NO: 2489517 - RNA, 13 nt, Human
auagagucuugcu

SEQ ID NO: 2489518 - RNA, 15 nt, Human
auagaguauaugcac

SEQ ID NO: 2489519 - RNA, 14 nt, Human
auagagggccaaga

SEQ ID NO: 2489520 - RNA, 23 nt, Human
auagaggcuucuccgccagccuc

SEQ ID NO: 2489521 - RNA, 22 nt, Human
auagaggcuucuccgccagccu

SEQ ID NO: 2489522 - RNA, 21 nt, Human
auagaggcuucuccgccagcc

SEQ ID NO: 2489523 - RNA, 16 nt, Human
auagagguaccagcaa

SEQ ID NO: 2489524 - RNA, 15 nt, Human
auagaggugagggaa

SEQ ID NO: 2489525 - RNA, 22 nt, Human
auagaggugagggaagccugaa

SEQ ID NO: 2489526 - RNA, 22 nt, Human
auagagcaaaauugauguguuu

SEQ ID NO: 2489527 - RNA, 21 nt, Human
auagagcaaaauugauguguu

SEQ ID NO: 2489528 - RNA, 17 nt, Human
auagagcaaaauugaug

SEQ ID NO: 2489529 - RNA, 15 nt, Human
auagagcaaaauuga

SEQ ID NO: 2489530 - RNA, 13 nt, Human
auagagccugagg

SEQ ID NO: 2489531 - RNA, 15 nt, Human
auagagccugaggga

SEQ ID NO: 2489532 - RNA, 14 nt, Human
auagagcuguauua

SEQ ID NO: 2489533 - RNA, 21 nt, Human
auagagcaccuaguccaguga

SEQ ID NO: 2489534 - RNA, 21 nt, Human
auagagagggagaagaaguca

SEQ ID NO: 2489535 - RNA, 14 nt, Human
auagagagagacca

SEQ ID NO: 2489536 - RNA, 16 nt, Human
auagagauguuuuuaa

SEQ ID NO: 2489537 - RNA, 14 nt, Human
auagagaucauccu

SEQ ID NO: 2489538 - RNA, 18 nt, Human
auagagagggagaagaag

SEQ ID NO: 2489539 - RNA, 18 nt, Human
auagacccacaagaggca

SEQ ID NO: 2489540 - RNA, 15 nt, Human
auagacccucucaag

SEQ ID NO: 2489541 - RNA, 16 nt, Human
auagacauuuguaaau

SEQ ID NO: 2489542 - RNA, 15 nt, Human
auagacuuaaaucuc

SEQ ID NO: 2489543 - RNA, 12 nt, Human
auagaugugugg

SEQ ID NO: 2489544 - RNA, 13 nt, Human
auagaugugugga

SEQ ID NO: 2489545 - RNA, 11 nt, Human
auagaugugug

SEQ ID NO: 2489546 - RNA, 15 nt, Human
auagaugggaaugaa

SEQ ID NO: 2489547 - RNA, 13 nt, Human
auagaugggaaug

SEQ ID NO: 2489548 - RNA, 13 nt, Human
auagaugggucug

SEQ ID NO: 2489549 - RNA, 23 nt, Human
auagaugcuggcccagggcccag

SEQ ID NO: 2489550 - RNA, 12 nt, Human
auagaugggaau

SEQ ID NO: 2489551 - RNA, 22 nt, Human
auagaugggucuggcugagcug

SEQ ID NO: 2489552 - RNA, 19 nt, Human
auagaugggaaugaagcuu

SEQ ID NO: 2489553 - RNA, 22 nt, Human
auagauguagauaaacucagaa

SEQ ID NO: 2489554 - RNA, 23 nt, Human
auagaugggucuggcugagcuga

SEQ ID NO: 2489555 - RNA, 19 nt, Human
auagaugucccuuucuugg

SEQ ID NO: 2489556 - RNA, 22 nt, Human
auagaugucccuuucuuggcca

SEQ ID NO: 2489557 - RNA, 23 nt, Human
auagaugucccuuucuuggccag

SEQ ID NO: 2489558 - RNA, 21 nt, Human
auagaugcaagauauuuauau

SEQ ID NO: 2489559 - RNA, 19 nt, Human
auagaugcaagauauuuau

SEQ ID NO: 2489560 - RNA, 16 nt, Human
auagaugcaagauauu

SEQ ID NO: 2489561 - RNA, 16 nt, Human
auagaucccccagacu

SEQ ID NO: 2489562 - RNA, 15 nt, Human
auagaugcuggccca

SEQ ID NO: 2489563 - RNA, 16 nt, Human
auagaugcuggcccag

SEQ ID NO: 2489564 - RNA, 17 nt, Human
auagaugcuggcccagg

SEQ ID NO: 2489565 - RNA, 20 nt, Human
auagaugcuggcccagggcc

SEQ ID NO: 2489566 - RNA, 20 nt, Human
auagauaagaguagaaacug

SEQ ID NO: 2489567 - RNA, 15 nt, Human
auagaguuugcuauu

SEQ ID NO: 2489568 - RNA, 16 nt, Human
auagaguuuaacacaa

SEQ ID NO: 2489569 - RNA, 14 nt, Human
auagaguguuauca

SEQ ID NO: 2489570 - RNA, 15 nt, Human
auagaucccccagac

SEQ ID NO: 2489571 - RNA, 13 nt, Human
auagauuugaccu

SEQ ID NO: 2489572 - RNA, 23 nt, Human
auagauuggagccaccaugccca

SEQ ID NO: 2489573 - RNA, 21 nt, Human
auagauuauaacuugucuaaa

SEQ ID NO: 2489574 - RNA, 15 nt, Human
auagauuauaacuug

SEQ ID NO: 2489575 - RNA, 14 nt, Human
auagauuauaacuu

SEQ ID NO: 2489576 - RNA, 18 nt, Human
auagaugucuagguacuu

SEQ ID NO: 2489577 - RNA, 14 nt, Human
auagauguguggac

SEQ ID NO: 2489578 - RNA, 15 nt, Human
auacucauguguaug

SEQ ID NO: 2489579 - RNA, 13 nt, Human
auacucaugugua

SEQ ID NO: 2489580 - RNA, 20 nt, Human
uuauuccugauaauaauuga

SEQ ID NO: 2489581 - RNA, 14 nt, Human
auacucauguguau

SEQ ID NO: 2489582 - RNA, 11 nt, Human
auacucccauc

SEQ ID NO: 2489583 - RNA, 16 nt, Human
auacucauuaggaugg

SEQ ID NO: 2489584 - RNA, 17 nt, Human
uuauuccugauaauaau

SEQ ID NO: 2489585 - RNA, 20 nt, Human
uuauuccuccugcucauauu

SEQ ID NO: 2489586 - RNA, 16 nt, Human
uuauuccuccugcuca

SEQ ID NO: 2489587 - RNA, 22 nt, Human
uuauuccuauauaguuuauuga

SEQ ID NO: 2489588 - RNA, 19 nt, Human
uuauuccacaucuacguuu

SEQ ID NO: 2489589 - RNA, 13 nt, Human
uuauuccacaucu

SEQ ID NO: 2489590 - RNA, 12 nt, Human
uuauuccacauc

SEQ ID NO: 2489591 - RNA, 14 nt, Human
uuauucauuugagu

SEQ ID NO: 2489592 - RNA, 20 nt, Human
uuauucauuuaaaaugauua

SEQ ID NO: 2489593 - RNA, 18 nt, Human
uuauucauuuaaaaugau

SEQ ID NO: 2489594 - RNA, 17 nt, Human
uuauucauuuaaaauga

SEQ ID NO: 2489595 - RNA, 17 nt, Human
uuauuccagaaugcugu

SEQ ID NO: 2489596 - RNA, 20 nt, Human
uuauuccagaaugcuguaca

SEQ ID NO: 2489597 - RNA, 22 nt, Human
uuauuccagaaugcuguacauc

SEQ ID NO: 2489598 - RNA, 20 nt, Human
uuauuccauauucauguaaa

SEQ ID NO: 2489599 - RNA, 19 nt, Human
uuauuccauauucauguaa

SEQ ID NO: 2489600 - RNA, 20 nt, Human
uuauuccccauucuuccuag

SEQ ID NO: 2489601 - RNA, 16 nt, Human
uuauucccuguacaau

SEQ ID NO: 2489602 - RNA, 19 nt, Human
uuauucccuuucacaaaau

SEQ ID NO: 2489603 - RNA, 20 nt, Human
uuauuccuauauaguuuauu

SEQ ID NO: 2489604 - RNA, 18 nt, Human
auacucuuauagacaaca

SEQ ID NO: 2489605 - RNA, 22 nt, Human
auacucuuaggaagagaaacca

SEQ ID NO: 2489606 - RNA, 21 nt, Human
auacucuuaggaagagaaacc

SEQ ID NO: 2489607 - RNA, 16 nt, Human
auacucugcuuagaau

SEQ ID NO: 2489608 - RNA, 19 nt, Human
auacucuuaggaagagaaa

SEQ ID NO: 2489609 - RNA, 15 nt, Human
auacucugucagaug

SEQ ID NO: 2489610 - RNA, 16 nt, Human
auacucugucagaugg

SEQ ID NO: 2489611 - RNA, 12 nt, Human
auacucugucag

SEQ ID NO: 2489612 - RNA, 13 nt, Human
auacucugucaga

SEQ ID NO: 2489613 - RNA, 14 nt, Human
auacucugucagau

SEQ ID NO: 2489614 - RNA, 14 nt, Human
auacucccaucugu

SEQ ID NO: 2489615 - RNA, 17 nt, Human
auacuccuccaagguua

SEQ ID NO: 2489616 - RNA, 22 nt, Human
auacucuagauuuuguuuugcu

SEQ ID NO: 2489617 - RNA, 21 nt, Human
auacucuagauuuuguuuugc

SEQ ID NO: 2489618 - RNA, 20 nt, Human
auacucuagauuuuguuuug

SEQ ID NO: 2489619 - RNA, 15 nt, Human
auacucuagauuuug

SEQ ID NO: 2489620 - RNA, 17 nt, Human
auacucuagaugaaguu

SEQ ID NO: 2489621 - RNA, 23 nt, Human
auacucuagaugaaguuuuacau

SEQ ID NO: 2489622 - RNA, 22 nt, Human
auacugcgacuuucugccugga

SEQ ID NO: 2489623 - RNA, 20 nt, Human
auacugcgacuuucugccug

SEQ ID NO: 2489624 - RNA, 15 nt, Human
auacugcuacuguaa

SEQ ID NO: 2489625 - RNA, 19 nt, Human
auacugcgacuuucugccu

SEQ ID NO: 2489626 - RNA, 16 nt, Human
auacugcuacuguaau

SEQ ID NO: 2489627 - RNA, 19 nt, Human
auacugcuacuguaauuuu

SEQ ID NO: 2489628 - RNA, 20 nt, Human
auacugcuacuguaauuuua

SEQ ID NO: 2489629 - RNA, 22 nt, Human
auacugcuacuguaauuuuaua

SEQ ID NO: 2489630 - RNA, 13 nt, Human
auacuggaaguuu

SEQ ID NO: 2489631 - RNA, 12 nt, Human
auacuguaaaga

SEQ ID NO: 2489632 - RNA, 13 nt, Human
auacuguaaagaa

SEQ ID NO: 2489633 - RNA, 14 nt, Human
auacuguaaagaaa

SEQ ID NO: 2489634 - RNA, 15 nt, Human
auacuguaaagaaag

SEQ ID NO: 2489635 - RNA, 15 nt, Human
auacuggccuggacu

SEQ ID NO: 2489636 - RNA, 14 nt, Human
auacuggccuggac

SEQ ID NO: 2489637 - RNA, 14 nt, Human
auacuggcugguga

SEQ ID NO: 2489638 - RNA, 21 nt, Human
auacuggugcagucauuauga

SEQ ID NO: 2489639 - RNA, 14 nt, Human
auacuggaaguuuu

SEQ ID NO: 2489640 - RNA, 16 nt, Human
auacuggaaguuuugc

SEQ ID NO: 2489641 - RNA, 17 nt, Human
auacuggaaguuuugca

SEQ ID NO: 2489642 - RNA, 18 nt, Human
auacuggaaguuuugcau

SEQ ID NO: 2489643 - RNA, 19 nt, Human
auacuggaaguuuugcauu

SEQ ID NO: 2489644 - RNA, 20 nt, Human
auacuggaaguuuugcauuu

SEQ ID NO: 2489645 - RNA, 17 nt, Human
auacuggccucgccugg

SEQ ID NO: 2489646 - RNA, 23 nt, Human
auacugcaauuaaagugauacug

SEQ ID NO: 2489647 - RNA, 14 nt, Human
auacugcaagaaaa

SEQ ID NO: 2489648 - RNA, 16 nt, Human
auacugcaagaaaaug

SEQ ID NO: 2489649 - RNA, 22 nt, Human
auacugagggaccaacugggcc

SEQ ID NO: 2489650 - RNA, 20 nt, Human
auacugaaggaaaaacacaa

SEQ ID NO: 2489651 - RNA, 14 nt, Human
auacugagggacca

SEQ ID NO: 2489652 - RNA, 19 nt, Human
auacugcagggccaggacu

SEQ ID NO: 2489653 - RNA, 17 nt, Human
auacugcagggccagga

SEQ ID NO: 2489654 - RNA, 15 nt, Human
auacugcagggccag

SEQ ID NO: 2489655 - RNA, 14 nt, Human
auacugcagggcca

SEQ ID NO: 2489656 - RNA, 15 nt, Human
auacugcauacuuuu

SEQ ID NO: 2489657 - RNA, 21 nt, Human
auacugcauacuuuuuaaaug

SEQ ID NO: 2489658 - RNA, 17 nt, Human
auacugccagaugcuga

SEQ ID NO: 2489659 - RNA, 16 nt, Human
auacugccagaugcug

SEQ ID NO: 2489660 - RNA, 15 nt, Human
auacugccagaugcu

SEQ ID NO: 2489661 - RNA, 19 nt, Human
auacugccagaugcugaug

SEQ ID NO: 2489662 - RNA, 18 nt, Human
auacugccagaugcugau

SEQ ID NO: 2489663 - RNA, 21 nt, Human
auacugccagaugcugauguu

SEQ ID NO: 2489664 - RNA, 22 nt, Human
auacugcccggggcagcugcca

SEQ ID NO: 2489665 - RNA, 17 nt, Human
auacucuuucuguauau

SEQ ID NO: 2489666 - RNA, 22 nt, Human
auacucuuucuguauauacuuu

SEQ ID NO: 2489667 - RNA, 23 nt, Human
auacucuuucuguauauacuuuu

SEQ ID NO: 2489668 - RNA, 15 nt, Human
auacucuuucuguau

SEQ ID NO: 2489669 - RNA, 16 nt, Human
auacucuuucuguaua

SEQ ID NO: 2489670 - RNA, 14 nt, Human
auacucuuucugua

SEQ ID NO: 2489671 - RNA, 13 nt, Human
auacugaagaugc

SEQ ID NO: 2489672 - RNA, 11 nt, Human
auacugaagau

SEQ ID NO: 2489673 - RNA, 15 nt, Human
auacugaaggaaaaa

SEQ ID NO: 2489674 - RNA, 14 nt, Human
auacugaaggaaaa

SEQ ID NO: 2489675 - RNA, 13 nt, Human
auacugaaggaaa

SEQ ID NO: 2489676 - RNA, 12 nt, Human
auacugaaggaa

SEQ ID NO: 2489677 - RNA, 22 nt, Human
auacugaaggaaaaacacaagc

SEQ ID NO: 2489678 - RNA, 19 nt, Human
auacugacugagaauauaa

SEQ ID NO: 2489679 - RNA, 22 nt, Human
uuauuaucuaaaguguguuguu

SEQ ID NO: 2489680 - RNA, 16 nt, Human
uuauuauuauuuuuua

SEQ ID NO: 2489681 - RNA, 13 nt, Human
uuauuaugcauga

SEQ ID NO: 2489682 - RNA, 16 nt, Human
uuauuauuuucaccug

SEQ ID NO: 2489683 - RNA, 12 nt, Human
uuauucaauaaa

SEQ ID NO: 2489684 - RNA, 16 nt, Human
uuauucaaguuauugu

SEQ ID NO: 2489685 - RNA, 16 nt, Human
uuauuauugaaauugu

SEQ ID NO: 2489686 - RNA, 15 nt, Human
uuauuauugaaauug

SEQ ID NO: 2489687 - RNA, 14 nt, Human
uuauuauuacuguu

SEQ ID NO: 2489688 - RNA, 22 nt, Human
uuauuauuuguguuuuaauuua

SEQ ID NO: 2489689 - RNA, 23 nt, Human
uuauucaggaaaagccucugugu

SEQ ID NO: 2489690 - RNA, 22 nt, Human
uuauucaggaaaagccucugug

SEQ ID NO: 2489691 - RNA, 21 nt, Human
uuauucaggaaaagccucugu

SEQ ID NO: 2489692 - RNA, 20 nt, Human
uuauucaggaaaagccucug

SEQ ID NO: 2489693 - RNA, 13 nt, Human
uuauucaguguca

SEQ ID NO: 2489694 - RNA, 14 nt, Human
uuauucagugucac

SEQ ID NO: 2489695 - RNA, 12 nt, Human
uuauucauaauu

SEQ ID NO: 2489696 - RNA, 23 nt, Human
uuauucauaagccaauuuuucug

SEQ ID NO: 2489697 - RNA, 16 nt, Human
uuauucauuuaaaaug

SEQ ID NO: 2489698 - RNA, 13 nt, Human
uuauucauuuaaa

SEQ ID NO: 2489699 - RNA, 12 nt, Human
uuauucauuuaa

SEQ ID NO: 2489700 - RNA, 20 nt, Human
uuauucacuuuuauuuagca

SEQ ID NO: 2489701 - RNA, 20 nt, Human
uuauucagcuucauuugugu

SEQ ID NO: 2489702 - RNA, 15 nt, Human
uuauucagcuucauu

SEQ ID NO: 2489703 - RNA, 21 nt, Human
uuauucaauaaaguauuuaau

SEQ ID NO: 2489704 - RNA, 20 nt, Human
uuauucaauaaaguauuuaa

SEQ ID NO: 2489705 - RNA, 19 nt, Human
uuauucaauuccucuggga

SEQ ID NO: 2489706 - RNA, 18 nt, Human
uuauucaauuccucuggg

SEQ ID NO: 2489707 - RNA, 19 nt, Human
uuauucaauaaaguauuua

SEQ ID NO: 2489708 - RNA, 17 nt, Human
uuauucaauaaaguauu

SEQ ID NO: 2489709 - RNA, 14 nt, Human
uuauucaauaaagu

SEQ ID NO: 2489710 - RNA, 15 nt, Human
uuauuaguuaauaua

SEQ ID NO: 2489711 - RNA, 14 nt, Human
uuauuaguuuacau

SEQ ID NO: 2489712 - RNA, 20 nt, Human
uuauuaguguaugcuuugaa

SEQ ID NO: 2489713 - RNA, 24 nt, Human
uuauuaguaccauaguaccauuua

SEQ ID NO: 2489714 - RNA, 20 nt, Human
uuauuaguaagaaaacauca

SEQ ID NO: 2489715 - RNA, 14 nt, Human
uuauuauauuuaca

SEQ ID NO: 2489716 - RNA, 19 nt, Human
uuauguuaaaacugggaca

SEQ ID NO: 2489717 - RNA, 13 nt, Human
uuauguuaaacua

SEQ ID NO: 2489718 - RNA, 12 nt, Human
uuauguuaaacu

SEQ ID NO: 2489719 - RNA, 11 nt, Human
uuauguuaaac

SEQ ID NO: 2489720 - RNA, 10 nt, Human
uuauguuaaa

SEQ ID NO: 2489721 - RNA, 17 nt, Human
uuauguuaaaucaauaa

SEQ ID NO: 2489722 - RNA, 14 nt, Human
uuauguuaaacuag

SEQ ID NO: 2489723 - RNA, 22 nt, Human
uuauguuaagggaagaauucca

SEQ ID NO: 2489724 - RNA, 15 nt, Human
uuauguuacaucugu

SEQ ID NO: 2489725 - RNA, 20 nt, Human
uuauguuauuuauauauugg

SEQ ID NO: 2489726 - RNA, 12 nt, Human
uuauuaugcaug

SEQ ID NO: 2489727 - RNA, 16 nt, Human
uuauuaucuaaagugu

SEQ ID NO: 2489728 - RNA, 15 nt, Human
uuauuauauuuacaa

SEQ ID NO: 2489729 - RNA, 18 nt, Human
uuauuauaauuguaucag

SEQ ID NO: 2489730 - RNA, 15 nt, Human
uuauuauaauuguau

SEQ ID NO: 2489731 - RNA, 20 nt, Human
uuauuauaauuguaucagag

SEQ ID NO: 2489732 - RNA, 12 nt, Human
uuauuauaauug

SEQ ID NO: 2489733 - RNA, 18 nt, Human
uuauuaguuuacaucauu

SEQ ID NO: 2489734 - RNA, 15 nt, Human
uuauuaguuuacauc

SEQ ID NO: 2489735 - RNA, 15 nt, Human
auaccuuugccuugg

SEQ ID NO: 2489736 - RNA, 14 nt, Human
auaccuuuuuuaga

SEQ ID NO: 2489737 - RNA, 13 nt, Human
auacgacuuuauu

SEQ ID NO: 2489738 - RNA, 17 nt, Human
auaccacuuuuguucuu

SEQ ID NO: 2489739 - RNA, 18 nt, Human
auaccacuuuuguucuug

SEQ ID NO: 2489740 - RNA, 16 nt, Human
auaccacccaaugcug

SEQ ID NO: 2489741 - RNA, 14 nt, Human
auacaugguuguga

SEQ ID NO: 2489742 - RNA, 20 nt, Human
auacaugguugugaccugag

SEQ ID NO: 2489743 - RNA, 14 nt, Human
auacguacacauuu

SEQ ID NO: 2489744 - RNA, 15 nt, Human
auacguacacauuuu

SEQ ID NO: 2489745 - RNA, 16 nt, Human
auacguacacauuuua

SEQ ID NO: 2489746 - RNA, 17 nt, Human
auacgcacuacaugugg

SEQ ID NO: 2489747 - RNA, 13 nt, Human
auacguacacauu

SEQ ID NO: 2489748 - RNA, 23 nt, Human
auacgcaacauaauuaaauuuug

SEQ ID NO: 2489749 - RNA, 16 nt, Human
auacgcacuacaugug

SEQ ID NO: 2489750 - RNA, 21 nt, Human
auacgccuguaguccuagcca

SEQ ID NO: 2489751 - RNA, 17 nt, Human
auacgacuuuauuuucu

SEQ ID NO: 2489752 - RNA, 13 nt, Human
auacgauaaauaa

SEQ ID NO: 2489753 - RNA, 13 nt, Human
auacuaaccagca

SEQ ID NO: 2489754 - RNA, 13 nt, Human
auacguguagcua

SEQ ID NO: 2489755 - RNA, 21 nt, Human
auacgugaaaauuauuugaaa

SEQ ID NO: 2489756 - RNA, 14 nt, Human
auacguccaccaug

SEQ ID NO: 2489757 - RNA, 19 nt, Human
auacuaaccagcagaaaug

SEQ ID NO: 2489758 - RNA, 20 nt, Human
auacuaaccagcagaaaugc

SEQ ID NO: 2489759 - RNA, 15 nt, Human
auacuauauuuuagg

SEQ ID NO: 2489760 - RNA, 17 nt, Human
auacuauggaauuucuc

SEQ ID NO: 2489761 - RNA, 20 nt, Human
auacuaguugugaccuuagu

SEQ ID NO: 2489762 - RNA, 16 nt, Human
auacuaguugugaccu

SEQ ID NO: 2489763 - RNA, 14 nt, Human
auacuaguugugac

SEQ ID NO: 2489764 - RNA, 14 nt, Human
auacuauauuuaug

SEQ ID NO: 2489765 - RNA, 21 nt, Human
auacuaaaaguucuucuccaa

SEQ ID NO: 2489766 - RNA, 13 nt, Human
auacuaguuguga

SEQ ID NO: 2489767 - RNA, 13 nt, Human
auacuaaaaauca

SEQ ID NO: 2489768 - RNA, 18 nt, Human
auacuaaaaaucaugaga

SEQ ID NO: 2489769 - RNA, 19 nt, Human
uuauauuugaaauauugac

SEQ ID NO: 2489770 - RNA, 19 nt, Human
uuauauuuuacuacugugg

SEQ ID NO: 2489771 - RNA, 13 nt, Human
uuauauuuuuaaa

SEQ ID NO: 2489772 - RNA, 15 nt, Human
uuauauuuuuauaga

SEQ ID NO: 2489773 - RNA, 15 nt, Human
uuaucaagugucuuc

SEQ ID NO: 2489774 - RNA, 17 nt, Human
uuaucaagugucuucca

SEQ ID NO: 2489775 - RNA, 16 nt, Human
uuaucaaaaauuucau

SEQ ID NO: 2489776 - RNA, 19 nt, Human
uuaucaccagcugccucuu

SEQ ID NO: 2489777 - RNA, 17 nt, Human
uuaucaccagcugccuc

SEQ ID NO: 2489778 - RNA, 20 nt, Human
uuaucaccagagagggacug

SEQ ID NO: 2489779 - RNA, 22 nt, Human
uuaucaccacaguaaguuccua

SEQ ID NO: 2489780 - RNA, 19 nt, Human
uuaucacauguauguuuug

SEQ ID NO: 2489781 - RNA, 18 nt, Human
uuaucacauguauguuuu

SEQ ID NO: 2489782 - RNA, 18 nt, Human
uuaucaccacaguaaguu

SEQ ID NO: 2489783 - RNA, 18 nt, Human
uuaucacauuauuugcau

SEQ ID NO: 2489784 - RNA, 17 nt, Human
uuaucacauguauguuu

SEQ ID NO: 2489785 - RNA, 16 nt, Human
uuaucacauguauguu

SEQ ID NO: 2489786 - RNA, 15 nt, Human
uuaucacauguaugu

SEQ ID NO: 2489787 - RNA, 17 nt, Human
uuauaaacuuuaccuuu

SEQ ID NO: 2489788 - RNA, 18 nt, Human
uuauaaacuuuaccuuuu

SEQ ID NO: 2489789 - RNA, 16 nt, Human
uuauaaacuuuuuucu

SEQ ID NO: 2489790 - RNA, 12 nt, Human
uuauaaacuuuu

SEQ ID NO: 2489791 - RNA, 22 nt, Human
auacaacccuggcauuaugucc

SEQ ID NO: 2489792 - RNA, 20 nt, Human
auacaacauguagcugaguu

SEQ ID NO: 2489793 - RNA, 21 nt, Human
auacaacagugcuaaaaaugg

SEQ ID NO: 2489794 - RNA, 20 nt, Human
auacaacagugcuaaaaaug

SEQ ID NO: 2489795 - RNA, 18 nt, Human
auacaacagugcuaaaaa

SEQ ID NO: 2489796 - RNA, 16 nt, Human
auacaacagugcuaaa

SEQ ID NO: 2489797 - RNA, 15 nt, Human
auacaacagugcuaa

SEQ ID NO: 2489798 - RNA, 14 nt, Human
auacaacagugcua

SEQ ID NO: 2489799 - RNA, 12 nt, Human
auacaacagugc

SEQ ID NO: 2489800 - RNA, 15 nt, Human
uuauaaauauauuua

SEQ ID NO: 2489801 - RNA, 22 nt, Human
uuauaaacuuuuuucuuacugu

SEQ ID NO: 2489802 - RNA, 23 nt, Human
auacagacacuaaguuauaguau

SEQ ID NO: 2489803 - RNA, 19 nt, Human
auacagacacuaaguuaua

SEQ ID NO: 2489804 - RNA, 18 nt, Human
auacagacacuaaguuau

SEQ ID NO: 2489805 - RNA, 15 nt, Human
auacagacacuaagu

SEQ ID NO: 2489806 - RNA, 14 nt, Human
auacagacacuaag

SEQ ID NO: 2489807 - RNA, 12 nt, Human
auacagacacua

SEQ ID NO: 2489808 - RNA, 22 nt, Human
auacagaauugugucugcagga

SEQ ID NO: 2489809 - RNA, 21 nt, Human
auacagaauugugucugcagg

SEQ ID NO: 2489810 - RNA, 21 nt, Human
auacagaccgaacuguuguau

SEQ ID NO: 2489811 - RNA, 18 nt, Human
auacagaccgaacuguug

SEQ ID NO: 2489812 - RNA, 20 nt, Human
auacagaccgaacuguugua

SEQ ID NO: 2489813 - RNA, 16 nt, Human
auacagaggcaacugc

SEQ ID NO: 2489814 - RNA, 17 nt, Human
auacagaggcaacugca

SEQ ID NO: 2489815 - RNA, 20 nt, Human
auacagaauugugucugcag

SEQ ID NO: 2489816 - RNA, 23 nt, Human
auacagaacucuuucaaaaccuu

SEQ ID NO: 2489817 - RNA, 18 nt, Human
auacagaacucuuucaaa

SEQ ID NO: 2489818 - RNA, 20 nt, Human
auacagaacucuuucaaaac

SEQ ID NO: 2489819 - RNA, 15 nt, Human
auacagaacucuuuc

SEQ ID NO: 2489820 - RNA, 16 nt, Human
auacagaacucuuuca

SEQ ID NO: 2489821 - RNA, 14 nt, Human
auacagaacucuuu

SEQ ID NO: 2489822 - RNA, 14 nt, Human
auacaauaacauaa

SEQ ID NO: 2489823 - RNA, 23 nt, Human
auacagaaagauggaugugcuuu

SEQ ID NO: 2489824 - RNA, 14 nt, Human
auacaaccugcuug

SEQ ID NO: 2489825 - RNA, 22 nt, Human
auacaagccauucuaaggaaau

SEQ ID NO: 2489826 - RNA, 18 nt, Human
auacaaccugcuugggug

SEQ ID NO: 2489827 - RNA, 16 nt, Human
auacaacuuaaauaau

SEQ ID NO: 2489828 - RNA, 16 nt, Human
auacagggaugguguu

SEQ ID NO: 2489829 - RNA, 17 nt, Human
auacaggaaugaagccu

SEQ ID NO: 2489830 - RNA, 21 nt, Human
auacaggauuugaacucagau

SEQ ID NO: 2489831 - RNA, 21 nt, Human
auacaggaugaugacuaugga

SEQ ID NO: 2489832 - RNA, 19 nt, Human
auacagucuuccauuugca

SEQ ID NO: 2489833 - RNA, 20 nt, Human
auacagucuuccauuugcaa

SEQ ID NO: 2489834 - RNA, 18 nt, Human
auacaguuacucagaauu

SEQ ID NO: 2489835 - RNA, 23 nt, Human
auacaggaaaagcugcugacagu

SEQ ID NO: 2489836 - RNA, 22 nt, Human
auacaggaaaagcugcugacag

SEQ ID NO: 2489837 - RNA, 23 nt, Human
auacagauagauauaugcucugc

SEQ ID NO: 2489838 - RNA, 20 nt, Human
auacaguuacucagaauucu

SEQ ID NO: 2489839 - RNA, 20 nt, Human
auacauaaacaagaccacgu

SEQ ID NO: 2489840 - RNA, 14 nt, Human
auacaguguuauuu

SEQ ID NO: 2489841 - RNA, 15 nt, Human
auacaguguuauuuu

SEQ ID NO: 2489842 - RNA, 23 nt, Human
auacauacaccagcauuccuuuu

SEQ ID NO: 2489843 - RNA, 15 nt, Human
auacauacaccagca

SEQ ID NO: 2489844 - RNA, 21 nt, Human
auacauaagcggcguaaguuu

SEQ ID NO: 2489845 - RNA, 23 nt, Human
auacaguguuauuuucuuugaaa

SEQ ID NO: 2489846 - RNA, 21 nt, Human
auacaugugccgaaugugcag

SEQ ID NO: 2489847 - RNA, 15 nt, Human
auacaugcucuuaga

SEQ ID NO: 2489848 - RNA, 13 nt, Human
auacaugcugcua

SEQ ID NO: 2489849 - RNA, 14 nt, Human
auacauggauaaca

SEQ ID NO: 2489850 - RNA, 15 nt, Human
auacaugcugcuaau

SEQ ID NO: 2489851 - RNA, 22 nt, Human
auacaugguagccaguugaauu

SEQ ID NO: 2489852 - RNA, 10 nt, Human
auacaugcca

SEQ ID NO: 2489853 - RNA, 17 nt, Human
auacauaucuuuauuaa

SEQ ID NO: 2489854 - RNA, 20 nt, Human
auacauaucuuuauuaauca

SEQ ID NO: 2489855 - RNA, 13 nt, Human
auacauaucuuua

SEQ ID NO: 2489856 - RNA, 14 nt, Human
auacauaucuuuau

SEQ ID NO: 2489857 - RNA, 16 nt, Human
auacauaucuuuauua

SEQ ID NO: 2489858 - RNA, 17 nt, Human
uuaucacccagaagaaa

SEQ ID NO: 2489859 - RNA, 18 nt, Human
uuaucacccagaagaaaa

SEQ ID NO: 2489860 - RNA, 19 nt, Human
uuaucacccagaagaaaau

SEQ ID NO: 2489861 - RNA, 21 nt, Human
uuaucacccagaagaaaauag

SEQ ID NO: 2489862 - RNA, 18 nt, Human
uuaucaccgugggcuccc

SEQ ID NO: 2489863 - RNA, 12 nt, Human
uuaucauuuuca

SEQ ID NO: 2489864 - RNA, 16 nt, Human
uuaucauuuucaaaau

SEQ ID NO: 2489865 - RNA, 21 nt, Human
uuaucaccagcugccucuucu

SEQ ID NO: 2489866 - RNA, 19 nt, Human
uuauccacagaaacauuuu

SEQ ID NO: 2489867 - RNA, 18 nt, Human
uuauccaggacucuguca

SEQ ID NO: 2489868 - RNA, 12 nt, Human
uuauccaggacu

SEQ ID NO: 2489869 - RNA, 16 nt, Human
uuauccaccuccaucu

SEQ ID NO: 2489870 - RNA, 22 nt, Human
uuauccaagguguaacucuaau

SEQ ID NO: 2489871 - RNA, 20 nt, Human
uuaucccucaccuguagcag

SEQ ID NO: 2489872 - RNA, 17 nt, Human
uuaucccucaccuguag

SEQ ID NO: 2489873 - RNA, 15 nt, Human
uuaucccucaccugu

SEQ ID NO: 2489874 - RNA, 17 nt, Human
uuauccauauugaguca

SEQ ID NO: 2489875 - RNA, 19 nt, Human
uuauccauauugagucaaa

SEQ ID NO: 2489876 - RNA, 18 nt, Human
uuauccauggggaaggga

SEQ ID NO: 2489877 - RNA, 20 nt, Human
uuaugaagcuuuuaugugaa

SEQ ID NO: 2489878 - RNA, 19 nt, Human
uuaugaaauucacccccuu

SEQ ID NO: 2489879 - RNA, 20 nt, Human
uuaugaaauaaagaaauugc

SEQ ID NO: 2489880 - RNA, 18 nt, Human
uuaugaagaaaaaauaca

SEQ ID NO: 2489881 - RNA, 23 nt, Human
uuaugaagaaaaaauacauuuua

SEQ ID NO: 2489882 - RNA, 14 nt, Human
uuaugaaauaaaga

SEQ ID NO: 2489883 - RNA, 18 nt, Human
uuaugaaagguuuacauu

SEQ ID NO: 2489884 - RNA, 17 nt, Human
uuaugaauuacauuugu

SEQ ID NO: 2489885 - RNA, 16 nt, Human
uuaugaauuacauuug

SEQ ID NO: 2489886 - RNA, 14 nt, Human
uuaugaauuacauu

SEQ ID NO: 2489887 - RNA, 19 nt, Human
uuaugaauauuuacguuuu

SEQ ID NO: 2489888 - RNA, 14 nt, Human
uuaugaaugaaaaa

SEQ ID NO: 2489889 - RNA, 16 nt, Human
uuaugacaucacuugu

SEQ ID NO: 2489890 - RNA, 18 nt, Human
uuaugacaucacuuguac

SEQ ID NO: 2489891 - RNA, 21 nt, Human
uuaugacaucacuuguacaaa

SEQ ID NO: 2489892 - RNA, 23 nt, Human
uuaugacaucacuuguacaaaau

SEQ ID NO: 2489893 - RNA, 11 nt, Human
uuaugacucca

SEQ ID NO: 2489894 - RNA, 21 nt, Human
uuaugaauuacauuuguauaa

SEQ ID NO: 2489895 - RNA, 14 nt, Human
uuaugacaguuaua

SEQ ID NO: 2489896 - RNA, 15 nt, Human
uuaugaguuugcuua

SEQ ID NO: 2489897 - RNA, 20 nt, Human
uuaugauacuugaaaauuaa

SEQ ID NO: 2489898 - RNA, 13 nt, Human
uuaugaguuuuug

SEQ ID NO: 2489899 - RNA, 15 nt, Human
uuaugaguuuuugau

SEQ ID NO: 2489900 - RNA, 21 nt, Human
uuaugaguuuuugauagcuuu

SEQ ID NO: 2489901 - RNA, 23 nt, Human
uuaugaguuuuugauagcuuuau

SEQ ID NO: 2489902 - RNA, 19 nt, Human
uuaugacuucauuaauaau

SEQ ID NO: 2489903 - RNA, 22 nt, Human
uuaugacuucauuaauaauaaa

SEQ ID NO: 2489904 - RNA, 18 nt, Human
uuaugaccucuuccuuua

SEQ ID NO: 2489905 - RNA, 18 nt, Human
uuaugagcucuucauguu

SEQ ID NO: 2489906 - RNA, 18 nt, Human
uuaugagggccacggguc

SEQ ID NO: 2489907 - RNA, 13 nt, Human
uuaugagggccac

SEQ ID NO: 2489908 - RNA, 17 nt, Human
uuaugucaucauacaug

SEQ ID NO: 2489909 - RNA, 18 nt, Human
uuauguccacuguguaua

SEQ ID NO: 2489910 - RNA, 17 nt, Human
uuauguccacuguguau

SEQ ID NO: 2489911 - RNA, 15 nt, Human
uuauguccacugugu

SEQ ID NO: 2489912 - RNA, 22 nt, Human
uuaugucccuucacauaguuuu

SEQ ID NO: 2489913 - RNA, 18 nt, Human
uuaugucccuucacauag

SEQ ID NO: 2489914 - RNA, 17 nt, Human
uuaugucccuucacaua

SEQ ID NO: 2489915 - RNA, 15 nt, Human
uuaugucucuucuga

SEQ ID NO: 2489916 - RNA, 17 nt, Human
uuaugucuauuuaagcc

SEQ ID NO: 2489917 - RNA, 13 nt, Human
uuaugucuaaaga

SEQ ID NO: 2489918 - RNA, 13 nt, Human
uuaugugaaacau

SEQ ID NO: 2489919 - RNA, 19 nt, Human
uuaugucugcugaauaaua

SEQ ID NO: 2489920 - RNA, 21 nt, Human
uuaugucugcugaauaauaaa

SEQ ID NO: 2489921 - RNA, 18 nt, Human
uuauguaagagcaccuuc

SEQ ID NO: 2489922 - RNA, 16 nt, Human
uuauguaauaauguga

SEQ ID NO: 2489923 - RNA, 17 nt, Human
uuauguaauaaugugaa

SEQ ID NO: 2489924 - RNA, 15 nt, Human
uuauguagaugugca

SEQ ID NO: 2489925 - RNA, 15 nt, Human
uuauguaaucuaugu

SEQ ID NO: 2489926 - RNA, 21 nt, Human
uuauguaauaaugugaaucau

SEQ ID NO: 2489927 - RNA, 19 nt, Human
uuauguaguaauugacaug

SEQ ID NO: 2489928 - RNA, 21 nt, Human
uuauguauauuuaaaagaaag

SEQ ID NO: 2489929 - RNA, 15 nt, Human
uuauguaguaauuga

SEQ ID NO: 2489930 - RNA, 16 nt, Human
uuauguaguaauugac

SEQ ID NO: 2489931 - RNA, 16 nt, Human
uuauguagaugugcau

SEQ ID NO: 2489932 - RNA, 15 nt, Human
uuaugugaaacaugu

SEQ ID NO: 2489933 - RNA, 23 nt, Human
uuaugugaaugaucucucugaau

SEQ ID NO: 2489934 - RNA, 22 nt, Human
uuaugugccagauuuaugcaua

SEQ ID NO: 2489935 - RNA, 13 nt, Human
uuaugugagagaa

SEQ ID NO: 2489936 - RNA, 19 nt, Human
uuaugugugaggagcugcu

SEQ ID NO: 2489937 - RNA, 15 nt, Human
uuauguguaaauaca

SEQ ID NO: 2489938 - RNA, 18 nt, Human
uuaugugccguguuauug

SEQ ID NO: 2489939 - RNA, 12 nt, Human
uuaugugugugu

SEQ ID NO: 2489940 - RNA, 14 nt, Human
uuaugugugugugu

SEQ ID NO: 2489941 - RNA, 10 nt, Human
uuaugugugu

SEQ ID NO: 2489942 - RNA, 12 nt, Human
uuauguguguau

SEQ ID NO: 2489943 - RNA, 18 nt, Human
uuauguguguauauguau

SEQ ID NO: 2489944 - RNA, 22 nt, Human
uuauguguguauauguaugugu

SEQ ID NO: 2489945 - RNA, 22 nt, Human
uuaugggcuggguucuacccag

SEQ ID NO: 2489946 - RNA, 13 nt, Human
uuaugguguuucu

SEQ ID NO: 2489947 - RNA, 20 nt, Human
uuaugguguuucucccucuc

SEQ ID NO: 2489948 - RNA, 11 nt, Human
uuaugguuuug

SEQ ID NO: 2489949 - RNA, 20 nt, Human
uuauguaaaauguuuuagca

SEQ ID NO: 2489950 - RNA, 16 nt, Human
uuauguaaaauguuuu

SEQ ID NO: 2489951 - RNA, 20 nt, Human
uuauguaaaaggccaaaccu

SEQ ID NO: 2489952 - RNA, 22 nt, Human
uuauguaaaaggccaaaccucu

SEQ ID NO: 2489953 - RNA, 17 nt, Human
uuaugguuuugugaugu

SEQ ID NO: 2489954 - RNA, 19 nt, Human
uuaugauuaaguaaugaua

SEQ ID NO: 2489955 - RNA, 16 nt, Human
uuaugauguauauuua

SEQ ID NO: 2489956 - RNA, 22 nt, Human
uuaugauuaaguaaugauaacu

SEQ ID NO: 2489957 - RNA, 19 nt, Human
uuauggcuuuugugcauua

SEQ ID NO: 2489958 - RNA, 13 nt, Human
uuaugggcugggu

SEQ ID NO: 2489959 - RNA, 17 nt, Human
uuaugggaaucaagauu

SEQ ID NO: 2489960 - RNA, 23 nt, Human
uuaugggaaccccuucauccucu

SEQ ID NO: 2489961 - RNA, 21 nt, Human
uuaugaugugggucaaggaau

SEQ ID NO: 2489962 - RNA, 20 nt, Human
uuaugaugugggucaaggaa

SEQ ID NO: 2489963 - RNA, 21 nt, Human
aguuuuaucacauguauguuu

SEQ ID NO: 2489964 - RNA, 20 nt, Human
aguuuuaucacauguauguu

SEQ ID NO: 2489965 - RNA, 12 nt, Human
aguuuuaucauu

SEQ ID NO: 2489966 - RNA, 13 nt, Human
aguuuuaucauuu

SEQ ID NO: 2489967 - RNA, 19 nt, Human
aguuuuaucacauguaugu

SEQ ID NO: 2489968 - RNA, 17 nt, Human
aguuuuaucacauguau

SEQ ID NO: 2489969 - RNA, 13 nt, Human
aguuuuaucacau

SEQ ID NO: 2489970 - RNA, 16 nt, Human
aguuuuauaugcuucu

SEQ ID NO: 2489971 - RNA, 19 nt, Human
aguuuuacuuuuaaacugu

SEQ ID NO: 2489972 - RNA, 20 nt, Human
aguuuuacuuuuaaacugug

SEQ ID NO: 2489973 - RNA, 16 nt, Human
aguuuuaccagaugau

SEQ ID NO: 2489974 - RNA, 20 nt, Human
aguuuuacucugcugcaaaa

SEQ ID NO: 2489975 - RNA, 21 nt, Human
aguuuuaguugcagaaacauu

SEQ ID NO: 2489976 - RNA, 15 nt, Human
aguuuuaguugcaga

SEQ ID NO: 2489977 - RNA, 20 nt, Human
aguuuuuguucuuaauugca

SEQ ID NO: 2489978 - RNA, 12 nt, Human
aguuuuuguucu

SEQ ID NO: 2489979 - RNA, 19 nt, Human
aguuuuuguacuguaaaga

SEQ ID NO: 2489980 - RNA, 18 nt, Human
aguuuuuguacuguaaag

SEQ ID NO: 2489981 - RNA, 12 nt, Human
aguuuuuguacu

SEQ ID NO: 2489982 - RNA, 16 nt, Human
aguuuuuguaauuuau

SEQ ID NO: 2489983 - RNA, 15 nt, Human
aguuuuuuuuauaca

SEQ ID NO: 2489984 - RNA, 17 nt, Human
aguuuuuucucuugggc

SEQ ID NO: 2489985 - RNA, 18 nt, Human
aguuuuuucucuugggcu

SEQ ID NO: 2489986 - RNA, 18 nt, Human
aguuuuguuuuaaaauua

SEQ ID NO: 2489987 - RNA, 17 nt, Human
aguuuuuaaaauaucuu

SEQ ID NO: 2489988 - RNA, 22 nt, Human
aguuuuucagaguggaaugcuu

SEQ ID NO: 2489989 - RNA, 17 nt, Human
aguuuuucagaaagcau

SEQ ID NO: 2489990 - RNA, 20 nt, Human
aguuuuuauugcuuguugga

SEQ ID NO: 2489991 - RNA, 13 nt, Human
aguuuuucuguca

SEQ ID NO: 2489992 - RNA, 12 nt, Human
aguuuuucuguc

SEQ ID NO: 2489993 - RNA, 16 nt, Human
aguuuuucuguauuuu

SEQ ID NO: 2489994 - RNA, 16 nt, Human
aguuuuugauagcuuu

SEQ ID NO: 2489995 - RNA, 23 nt, Human
aguuuuucccagcuacaccuuuc

SEQ ID NO: 2489996 - RNA, 22 nt, Human
aguuuuucccagcuacaccuuu

SEQ ID NO: 2489997 - RNA, 20 nt, Human
uuaagacacugaaaaaucua

SEQ ID NO: 2489998 - RNA, 14 nt, Human
uuaagaaugaaaua

SEQ ID NO: 2489999 - RNA, 20 nt, Human
uuaagaaugaaauacuguuu

SEQ ID NO: 2490000 - RNA, 22 nt, Human
uuaagaaugaaauacuguuuga

SEQ ID NO: 2490001 - RNA, 18 nt, Human
uuaagaaggcaaaaaugu

SEQ ID NO: 2490002 - RNA, 21 nt, Human
uuaagaaaaaauaacacacau

SEQ ID NO: 2490003 - RNA, 20 nt, Human
uuaagaaaaaauaacacaca

SEQ ID NO: 2490004 - RNA, 11 nt, Human
uuaagaccugg

SEQ ID NO: 2490005 - RNA, 14 nt, Human
uuaagaccuggcag

SEQ ID NO: 2490006 - RNA, 18 nt, Human
uuaagaccuggcagcucu

SEQ ID NO: 2490007 - RNA, 19 nt, Human
uuaagacgaaacauuuguu

SEQ ID NO: 2490008 - RNA, 16 nt, Human
uuaagacaugauuucc

SEQ ID NO: 2490009 - RNA, 18 nt, Human
uuaagacauuuuuggaag

SEQ ID NO: 2490010 - RNA, 23 nt, Human
uuaagacauuuuuggaaggggac

SEQ ID NO: 2490011 - RNA, 18 nt, Human
uuaagacaugauuuccuu

SEQ ID NO: 2490012 - RNA, 20 nt, Human
auaaaaggcaaauguguaca

SEQ ID NO: 2490013 - RNA, 19 nt, Human
auaaaaggcaaauguguac

SEQ ID NO: 2490014 - RNA, 19 nt, Human
auaaaaggaagccaaagag

SEQ ID NO: 2490015 - RNA, 20 nt, Human
auaaaaggaagccaaagagu

SEQ ID NO: 2490016 - RNA, 23 nt, Human
uuaacuuuuauaaacuuuaccuu

SEQ ID NO: 2490017 - RNA, 22 nt, Human
uuaacuuuuauaaacuuuaccu

SEQ ID NO: 2490018 - RNA, 15 nt, Human
auaaaagcuauggug

SEQ ID NO: 2490019 - RNA, 12 nt, Human
auaaaaggaaaa

SEQ ID NO: 2490020 - RNA, 15 nt, Human
auaaaaggaagccaa

SEQ ID NO: 2490021 - RNA, 17 nt, Human
auaaaaggaagccaaag

SEQ ID NO: 2490022 - RNA, 20 nt, Human
auaaaagccuguuuaagaga

SEQ ID NO: 2490023 - RNA, 23 nt, Human
aguuuuuuuuuauacacuguaau

SEQ ID NO: 2490024 - RNA, 19 nt, Human
auaaaagccuguuuaagag

SEQ ID NO: 2490025 - RNA, 20 nt, Human
uuaaucaauuuaaacccauu

SEQ ID NO: 2490026 - RNA, 18 nt, Human
uuaaucaauuuaaaccca

SEQ ID NO: 2490027 - RNA, 17 nt, Human
uuaaucaauuaauuuuu

SEQ ID NO: 2490028 - RNA, 16 nt, Human
uuaaucaauuaauuuu

SEQ ID NO: 2490029 - RNA, 20 nt, Human
uuaauaaaauaauucuaaag

SEQ ID NO: 2490030 - RNA, 16 nt, Human
uuaauaaaauaauucu

SEQ ID NO: 2490031 - RNA, 17 nt, Human
uuaaucacuauuguucc

SEQ ID NO: 2490032 - RNA, 15 nt, Human
uuaaucaucuauaaa

SEQ ID NO: 2490033 - RNA, 20 nt, Human
uuaaucagguccucagagaa

SEQ ID NO: 2490034 - RNA, 16 nt, Human
uuaaucagacaaagua

SEQ ID NO: 2490035 - RNA, 21 nt, Human
uuaauccccaguaaaauugcc

SEQ ID NO: 2490036 - RNA, 18 nt, Human
uuaauccccaguaaaauu

SEQ ID NO: 2490037 - RNA, 23 nt, Human
uuaauccagaauaacuagcacca

SEQ ID NO: 2490038 - RNA, 17 nt, Human
uuaauccccaguaaaau

SEQ ID NO: 2490039 - RNA, 22 nt, Human
uuaaucauuuugccucuuuucu

SEQ ID NO: 2490040 - RNA, 18 nt, Human
uuaaucaucuauaaagaa

SEQ ID NO: 2490041 - RNA, 12 nt, Human
uuaauccaaugg

SEQ ID NO: 2490042 - RNA, 20 nt, Human
uuaauccagaauaacuagca

SEQ ID NO: 2490043 - RNA, 18 nt, Human
uuaauccagaauaacuag

SEQ ID NO: 2490044 - RNA, 15 nt, Human
uuaaucuaaauggaa

SEQ ID NO: 2490045 - RNA, 20 nt, Human
uuaauccuucuaguuuccca

SEQ ID NO: 2490046 - RNA, 14 nt, Human
uuaauccuucuagu

SEQ ID NO: 2490047 - RNA, 11 nt, Human
uuaauaaaaag

SEQ ID NO: 2490048 - RNA, 14 nt, Human
uuaauaaaaaggca

SEQ ID NO: 2490049 - RNA, 15 nt, Human
uuaauaaaaaggcac

SEQ ID NO: 2490050 - RNA, 16 nt, Human
uuaauaaaaguacaug

SEQ ID NO: 2490051 - RNA, 20 nt, Human
uuaauaaaaaaacaaucauu

SEQ ID NO: 2490052 - RNA, 15 nt, Human
uuaaguuucucagcu

SEQ ID NO: 2490053 - RNA, 12 nt, Human
uuaaguuucuca

SEQ ID NO: 2490054 - RNA, 11 nt, Human
uuaaguuucuc

SEQ ID NO: 2490055 - RNA, 19 nt, Human
uuaaguuguuugcauguga

SEQ ID NO: 2490056 - RNA, 22 nt, Human
uuaagagccauauaaguuugaa

SEQ ID NO: 2490057 - RNA, 15 nt, Human
uuaaguuucaggaua

SEQ ID NO: 2490058 - RNA, 16 nt, Human
uuaaguuguuugcaug

SEQ ID NO: 2490059 - RNA, 22 nt, Human
uuaagacgaaacauuuguucua

SEQ ID NO: 2490060 - RNA, 21 nt, Human
uuaagacugagcaccugcuuc

SEQ ID NO: 2490061 - RNA, 17 nt, Human
uuaagacguguuugugu

SEQ ID NO: 2490062 - RNA, 16 nt, Human
uuaagacguguuugug

SEQ ID NO: 2490063 - RNA, 13 nt, Human
uuaagacguguuu

SEQ ID NO: 2490064 - RNA, 17 nt, Human
uuaauuuuguauuuucc

SEQ ID NO: 2490065 - RNA, 16 nt, Human
uuaauuuuguauuuuc

SEQ ID NO: 2490066 - RNA, 15 nt, Human
uuaauuuuguauuuu

SEQ ID NO: 2490067 - RNA, 14 nt, Human
uuaauuuuguauuu

SEQ ID NO: 2490068 - RNA, 18 nt, Human
uuaauuuuguauuuucca

SEQ ID NO: 2490069 - RNA, 22 nt, Human
uuaauuuugacacuauaucugu

SEQ ID NO: 2490070 - RNA, 17 nt, Human
uuaauuuugguuguauu

SEQ ID NO: 2490071 - RNA, 13 nt, Human
uuaauuuucagua

SEQ ID NO: 2490072 - RNA, 20 nt, Human
uuaauuuugguuguauucuu

SEQ ID NO: 2490073 - RNA, 18 nt, Human
uuaauuuugguuguauuc

SEQ ID NO: 2490074 - RNA, 23 nt, Human
uuaauuuugguuguauucuuuga

SEQ ID NO: 2490075 - RNA, 13 nt, Human
uuaauuuuguauu

SEQ ID NO: 2490076 - RNA, 13 nt, Human
uuaauuuuccugg

SEQ ID NO: 2490077 - RNA, 20 nt, Human
uuaauuugauaucacagucu

SEQ ID NO: 2490078 - RNA, 14 nt, Human
uuaauuuauuuuug

SEQ ID NO: 2490079 - RNA, 19 nt, Human
uuaauuuauuauugaaauu

SEQ ID NO: 2490080 - RNA, 20 nt, Human
uuaauuuaugaguuuuugau

SEQ ID NO: 2490081 - RNA, 24 nt, Human
uuaaucuuucuuuaccugagacca

SEQ ID NO: 2490082 - RNA, 15 nt, Human
uuaauuuaugaguuu

SEQ ID NO: 2490083 - RNA, 18 nt, Human
uuaauuuaugaguuuuug

SEQ ID NO: 2490084 - RNA, 17 nt, Human
uuaaucuuuaauuuuac

SEQ ID NO: 2490085 - RNA, 23 nt, Human
uuaaucuuucuuuaccugagacc

SEQ ID NO: 2490086 - RNA, 21 nt, Human
uuaaucuuucuuuaccugaga

SEQ ID NO: 2490087 - RNA, 16 nt, Human
uuaaucuuuucacaaa

SEQ ID NO: 2490088 - RNA, 17 nt, Human
uuaaucuuucuuuaccu

SEQ ID NO: 2490089 - RNA, 14 nt, Human
uuaaucuuuccuga

SEQ ID NO: 2490090 - RNA, 22 nt, Human
uuaaucuucaguuuuaucuuua

SEQ ID NO: 2490091 - RNA, 13 nt, Human
uuaaucuuuaauu

SEQ ID NO: 2490092 - RNA, 15 nt, Human
uuaaucuucaguuuu

SEQ ID NO: 2490093 - RNA, 17 nt, Human
uuaaucuucaguuuuau

SEQ ID NO: 2490094 - RNA, 15 nt, Human
aguuuagcuggaaaa

SEQ ID NO: 2490095 - RNA, 14 nt, Human
aguuuagaggaaaa

SEQ ID NO: 2490096 - RNA, 16 nt, Human
aguuuacuauuuuacu

SEQ ID NO: 2490097 - RNA, 14 nt, Human
aguuuacuauuuua

SEQ ID NO: 2490098 - RNA, 15 nt, Human
aguuuacuauuuuac

SEQ ID NO: 2490099 - RNA, 20 nt, Human
aguuuaccucuuuaaaaaca

SEQ ID NO: 2490100 - RNA, 16 nt, Human
aguuuaccucuuuaaa

SEQ ID NO: 2490101 - RNA, 12 nt, Human
aguuuaacacaa

SEQ ID NO: 2490102 - RNA, 20 nt, Human
aguuuaccuuguauacugua

SEQ ID NO: 2490103 - RNA, 14 nt, Human
aguuuaccuuguau

SEQ ID NO: 2490104 - RNA, 19 nt, Human
uuaaaaaagaaacauuugg

SEQ ID NO: 2490105 - RNA, 16 nt, Human
aguuuagcuggaaaag

SEQ ID NO: 2490106 - RNA, 21 nt, Human
aguuuagaggaaaaaaaugac

SEQ ID NO: 2490107 - RNA, 19 nt, Human
aguuuagaggaaaaaaaug

SEQ ID NO: 2490108 - RNA, 17 nt, Human
aguuuaaauuguaauag

SEQ ID NO: 2490109 - RNA, 20 nt, Human
aguuuaaauuguaauaggcg

SEQ ID NO: 2490110 - RNA, 13 nt, Human
aguuuacauugua

SEQ ID NO: 2490111 - RNA, 13 nt, Human
aguuaggaaauaa

SEQ ID NO: 2490112 - RNA, 14 nt, Human
aguuaggaaauaaa

SEQ ID NO: 2490113 - RNA, 12 nt, Human
aguuaggaaaua

SEQ ID NO: 2490114 - RNA, 19 nt, Human
aguuagcucaggaggcuug

SEQ ID NO: 2490115 - RNA, 22 nt, Human
aguuagcucaggaggcuuggaa

SEQ ID NO: 2490116 - RNA, 17 nt, Human
aguuuacauuguaaaua

SEQ ID NO: 2490117 - RNA, 15 nt, Human
aguuuacauuguaaa

SEQ ID NO: 2490118 - RNA, 16 nt, Human
uuaaaaaauggaacau

SEQ ID NO: 2490119 - RNA, 19 nt, Human
uuaaaaaucucaaauuucu

SEQ ID NO: 2490120 - RNA, 20 nt, Human
uuaaaaaucucaaauuucua

SEQ ID NO: 2490121 - RNA, 12 nt, Human
uuaaaaaugcaa

SEQ ID NO: 2490122 - RNA, 17 nt, Human
uuaaaaaucucaaauuu

SEQ ID NO: 2490123 - RNA, 22 nt, Human
uuaaaaucauuucugcaucagc

SEQ ID NO: 2490124 - RNA, 14 nt, Human
uuaaaaucauuucu

SEQ ID NO: 2490125 - RNA, 13 nt, Human
uuaaaauccucaa

SEQ ID NO: 2490126 - RNA, 11 nt, Human
uuaaaaucuua

SEQ ID NO: 2490127 - RNA, 14 nt, Human
uuaaaaucuuaaac

SEQ ID NO: 2490128 - RNA, 12 nt, Human
uuaaaauccuca

SEQ ID NO: 2490129 - RNA, 15 nt, Human
uuaaaaaugcaaauc

SEQ ID NO: 2490130 - RNA, 19 nt, Human
uuaaaaugagaaaucuaaa

SEQ ID NO: 2490131 - RNA, 12 nt, Human
uuaaaaugagaa

SEQ ID NO: 2490132 - RNA, 16 nt, Human
uuaaaaugcaacaugu

SEQ ID NO: 2490133 - RNA, 16 nt, Human
uuaaaaugauuguaaa

SEQ ID NO: 2490134 - RNA, 18 nt, Human
uuaaaaugauuguaaaau

SEQ ID NO: 2490135 - RNA, 19 nt, Human
uuaaaccauaaaaagcuga

SEQ ID NO: 2490136 - RNA, 22 nt, Human
uuaaacauugguucuuguauua

SEQ ID NO: 2490137 - RNA, 18 nt, Human
uuaaacauugguucuugu

SEQ ID NO: 2490138 - RNA, 20 nt, Human
uuaaacauugguucuuguau

SEQ ID NO: 2490139 - RNA, 23 nt, Human
uuaaaauguauucuuaaauucau

SEQ ID NO: 2490140 - RNA, 11 nt, Human
aguuucucagc

SEQ ID NO: 2490141 - RNA, 23 nt, Human
aguuucucagauccuuguuucaa

SEQ ID NO: 2490142 - RNA, 22 nt, Human
aguuucucagauccuuguuuca

SEQ ID NO: 2490143 - RNA, 18 nt, Human
aguuucucagauccuugu

SEQ ID NO: 2490144 - RNA, 15 nt, Human
aguuucucagauccu

SEQ ID NO: 2490145 - RNA, 21 nt, Human
aguuucuagcuagaaauauga

SEQ ID NO: 2490146 - RNA, 16 nt, Human
aguuucuagcuagaaa

SEQ ID NO: 2490147 - RNA, 22 nt, Human
aguuuauuuccaaauaaaauga

SEQ ID NO: 2490148 - RNA, 22 nt, Human
aguuuauugacaauaauuucag

SEQ ID NO: 2490149 - RNA, 14 nt, Human
aguuucucagcucc

SEQ ID NO: 2490150 - RNA, 12 nt, Human
aguuucucagcu

SEQ ID NO: 2490151 - RNA, 15 nt, Human
aguuucugccgcagc

SEQ ID NO: 2490152 - RNA, 13 nt, Human
aguuucucagcuc

SEQ ID NO: 2490153 - RNA, 14 nt, Human
aguuucucuuuuca

SEQ ID NO: 2490154 - RNA, 16 nt, Human
aguuugugugucuuaa

SEQ ID NO: 2490155 - RNA, 15 nt, Human
aguuugugugucuua

SEQ ID NO: 2490156 - RNA, 14 nt, Human
aguuugugugucuu

SEQ ID NO: 2490157 - RNA, 19 nt, Human
aguuucugccgcagcccug

SEQ ID NO: 2490158 - RNA, 18 nt, Human
aguuuguguguugucuug

SEQ ID NO: 2490159 - RNA, 16 nt, Human
aguuuguguguugucu

SEQ ID NO: 2490160 - RNA, 21 nt, Human
aguuuguguguugucucuuga

SEQ ID NO: 2490161 - RNA, 14 nt, Human
aguuuguguguugu

SEQ ID NO: 2490162 - RNA, 22 nt, Human
aguuugugugucuuaauuauua

SEQ ID NO: 2490163 - RNA, 22 nt, Human
aguuuguuaguaugaggcauuu

SEQ ID NO: 2490164 - RNA, 15 nt, Human
aguuuguugaaacac

SEQ ID NO: 2490165 - RNA, 14 nt, Human
aguuuguuuacaca

SEQ ID NO: 2490166 - RNA, 20 nt, Human
aguuuguguguugucuugaa

SEQ ID NO: 2490167 - RNA, 19 nt, Human
aguuuguguguugucuuga

SEQ ID NO: 2490168 - RNA, 23 nt, Human
aguuuuaaaaaaauaaaacauuu

SEQ ID NO: 2490169 - RNA, 22 nt, Human
aguuuuaaaaaaauaaaacauu

SEQ ID NO: 2490170 - RNA, 16 nt, Human
aguuuuaaaaaaauaa

SEQ ID NO: 2490171 - RNA, 16 nt, Human
aguuuuaauccagaau

SEQ ID NO: 2490172 - RNA, 18 nt, Human
aguuuuaacuagaauuua

SEQ ID NO: 2490173 - RNA, 13 nt, Human
uuaaauaaaagaa

SEQ ID NO: 2490174 - RNA, 11 nt, Human
uuaaauaaaag

SEQ ID NO: 2490175 - RNA, 20 nt, Human
uuaaauuuugaguucuacau

SEQ ID NO: 2490176 - RNA, 16 nt, Human
uuaaauuuugugucuc

SEQ ID NO: 2490177 - RNA, 14 nt, Human
uuaaauuuuguguc

SEQ ID NO: 2490178 - RNA, 15 nt, Human
uuaaauuuugaguuc

SEQ ID NO: 2490179 - RNA, 20 nt, Human
uuaaauuuuacccuuuagac

SEQ ID NO: 2490180 - RNA, 16 nt, Human
uuaaauuuuacccuuu

SEQ ID NO: 2490181 - RNA, 23 nt, Human
uuaaauuuuacccuuuagacugu

SEQ ID NO: 2490182 - RNA, 15 nt, Human
uuaaaguucuguaaa

SEQ ID NO: 2490183 - RNA, 13 nt, Human
uuaacagaaaugu

SEQ ID NO: 2490184 - RNA, 14 nt, Human
uuaacagaaaugua

SEQ ID NO: 2490185 - RNA, 12 nt, Human
uuaacagaaaug

SEQ ID NO: 2490186 - RNA, 16 nt, Human
uuaacagaaauguaca

SEQ ID NO: 2490187 - RNA, 19 nt, Human
uuaacacugcuuguguuuu

SEQ ID NO: 2490188 - RNA, 17 nt, Human
aguuuaucauucaagug

SEQ ID NO: 2490189 - RNA, 16 nt, Human
aguuuaucauucaagu

SEQ ID NO: 2490190 - RNA, 15 nt, Human
aguuuaucauucaag

SEQ ID NO: 2490191 - RNA, 14 nt, Human
aguuuaucauucaa

SEQ ID NO: 2490192 - RNA, 16 nt, Human
aguuuaugucuaaaga

SEQ ID NO: 2490193 - RNA, 15 nt, Human
aguuuaugucuaaag

SEQ ID NO: 2490194 - RNA, 21 nt, Human
aguuuaugucuaaagagcuuu

SEQ ID NO: 2490195 - RNA, 15 nt, Human
auaacuauguugaua

SEQ ID NO: 2490196 - RNA, 16 nt, Human
auaacuaguguugcuu

SEQ ID NO: 2490197 - RNA, 19 nt, Human
auaacuaguguugcuugga

SEQ ID NO: 2490198 - RNA, 13 nt, Human
auaaauuguauau

SEQ ID NO: 2490199 - RNA, 19 nt, Human
auaaauuguaauuguaaag

SEQ ID NO: 2490200 - RNA, 18 nt, Human
auaaauugcuccuugaca

SEQ ID NO: 2490201 - RNA, 15 nt, Human
auaacucaucauaaa

SEQ ID NO: 2490202 - RNA, 16 nt, Human
auaacucaucauaaaa

SEQ ID NO: 2490203 - RNA, 17 nt, Human
auaacucaucauaaaau

SEQ ID NO: 2490204 - RNA, 18 nt, Human
auaacucaucauaaaaua

SEQ ID NO: 2490205 - RNA, 19 nt, Human
auaacucaucauaaaauaa

SEQ ID NO: 2490206 - RNA, 11 nt, Human
auaacucugca

SEQ ID NO: 2490207 - RNA, 20 nt, Human
auaacuccuucuuguaguag

SEQ ID NO: 2490208 - RNA, 12 nt, Human
auaacuccuucu

SEQ ID NO: 2490209 - RNA, 20 nt, Human
uuacagggagccuccugccc

SEQ ID NO: 2490210 - RNA, 19 nt, Human
auaacucugcacuacuccu

SEQ ID NO: 2490211 - RNA, 21 nt, Human
auaacucugcacuacuccucu

SEQ ID NO: 2490212 - RNA, 20 nt, Human
uuacagggaugagccaccgc

SEQ ID NO: 2490213 - RNA, 14 nt, Human
uuacaggugugaac

SEQ ID NO: 2490214 - RNA, 18 nt, Human
uuacagguggacacacaa

SEQ ID NO: 2490215 - RNA, 21 nt, Human
uuacagggagccuccugccca

SEQ ID NO: 2490216 - RNA, 18 nt, Human
uuacagggagcugggaca

SEQ ID NO: 2490217 - RNA, 18 nt, Human
uuacaguuucaaaaacug

SEQ ID NO: 2490218 - RNA, 19 nt, Human
uuaccagcagagcaccuua

SEQ ID NO: 2490219 - RNA, 22 nt, Human
uuaccagccuccguauuucaga

SEQ ID NO: 2490220 - RNA, 20 nt, Human
uuaccagccuccguauuuca

SEQ ID NO: 2490221 - RNA, 21 nt, Human
uuaccagccuccguauuucag

SEQ ID NO: 2490222 - RNA, 23 nt, Human
uuaccagccuccguauuucagac

SEQ ID NO: 2490223 - RNA, 17 nt, Human
uuacaguaggagcccag

SEQ ID NO: 2490224 - RNA, 22 nt, Human
uuacaguaaauaaauuguuuga

SEQ ID NO: 2490225 - RNA, 18 nt, Human
uuacaguaaauaaauugu

SEQ ID NO: 2490226 - RNA, 17 nt, Human
uuacaguaaauaaauug

SEQ ID NO: 2490227 - RNA, 16 nt, Human
uuacaguaaauaaauu

SEQ ID NO: 2490228 - RNA, 15 nt, Human
uuacaguaaauaaau

SEQ ID NO: 2490229 - RNA, 13 nt, Human
uuacaguaaauaa

SEQ ID NO: 2490230 - RNA, 13 nt, Human
uuacaguguuccg

SEQ ID NO: 2490231 - RNA, 18 nt, Human
auaaaugauucuuaguga

SEQ ID NO: 2490232 - RNA, 16 nt, Human
auaaaugauucuuagu

SEQ ID NO: 2490233 - RNA, 17 nt, Human
auaaaugcaauauguau

SEQ ID NO: 2490234 - RNA, 18 nt, Human
auaaaugcaauauguauu

SEQ ID NO: 2490235 - RNA, 20 nt, Human
auaaaugcaauauguauuaa

SEQ ID NO: 2490236 - RNA, 22 nt, Human
auaaaugcaauauguauuaaua

SEQ ID NO: 2490237 - RNA, 16 nt, Human
auaaauugcuccuuga

SEQ ID NO: 2490238 - RNA, 13 nt, Human
auaaauugcuccu

SEQ ID NO: 2490239 - RNA, 21 nt, Human
auaaauuccucuuugcuuugc

SEQ ID NO: 2490240 - RNA, 21 nt, Human
auaaaugcuuuuaaaaaucua

SEQ ID NO: 2490241 - RNA, 23 nt, Human
auaaaugcuauuuuuuauuuuac

SEQ ID NO: 2490242 - RNA, 21 nt, Human
auaaaugcuauuuuuuauuuu

SEQ ID NO: 2490243 - RNA, 19 nt, Human
auaaaugcuauuuuuuauu

SEQ ID NO: 2490244 - RNA, 15 nt, Human
auaaaugcaauauua

SEQ ID NO: 2490245 - RNA, 23 nt, Human
auaaaugcaauauuaaugccuuu

SEQ ID NO: 2490246 - RNA, 16 nt, Human
auaaauggcugguuuu

SEQ ID NO: 2490247 - RNA, 13 nt, Human
auaaauggcuggu

SEQ ID NO: 2490248 - RNA, 13 nt, Human
auaaaugcuuuua

SEQ ID NO: 2490249 - RNA, 16 nt, Human
auaaauucuauaggaa

SEQ ID NO: 2490250 - RNA, 21 nt, Human
auaaauucuauaggaacauau

SEQ ID NO: 2490251 - RNA, 15 nt, Human
auaaaucugacccag

SEQ ID NO: 2490252 - RNA, 16 nt, Human
auaaaucugacccagu

SEQ ID NO: 2490253 - RNA, 18 nt, Human
auaaaucugacccagugc

SEQ ID NO: 2490254 - RNA, 19 nt, Human
auaaaucugacccagugcc

SEQ ID NO: 2490255 - RNA, 16 nt, Human
auaaaucgcuuuugau

SEQ ID NO: 2490256 - RNA, 19 nt, Human
auaaaucgcuuuugauaau

SEQ ID NO: 2490257 - RNA, 21 nt, Human
auaaaucgcuuuugauaauca

SEQ ID NO: 2490258 - RNA, 14 nt, Human
auaaaucgcuuuug

SEQ ID NO: 2490259 - RNA, 22 nt, Human
uuacaaaguguguauuaaaaaa

SEQ ID NO: 2490260 - RNA, 18 nt, Human
uuacaaaguguguauuaa

SEQ ID NO: 2490261 - RNA, 17 nt, Human
uuacaaaguguguauua

SEQ ID NO: 2490262 - RNA, 16 nt, Human
uuacaaaguguguauu

SEQ ID NO: 2490263 - RNA, 15 nt, Human
uuacaaaguguguau

SEQ ID NO: 2490264 - RNA, 14 nt, Human
uuacaaagugugua

SEQ ID NO: 2490265 - RNA, 13 nt, Human
uuacaaagugugu

SEQ ID NO: 2490266 - RNA, 12 nt, Human
uuacaaacaugu

SEQ ID NO: 2490267 - RNA, 13 nt, Human
uuaauuuuuccua

SEQ ID NO: 2490268 - RNA, 15 nt, Human
uuacaaacauguggu

SEQ ID NO: 2490269 - RNA, 11 nt, Human
uuacuccccuu

SEQ ID NO: 2490270 - RNA, 20 nt, Human
uuacuccccuugagcugaga

SEQ ID NO: 2490271 - RNA, 15 nt, Human
uuacugcagcuuugu

SEQ ID NO: 2490272 - RNA, 22 nt, Human
uuacugcagccuuugccucccc

SEQ ID NO: 2490273 - RNA, 21 nt, Human
uuacugcuaaguauuucccag

SEQ ID NO: 2490274 - RNA, 20 nt, Human
uuacugcuaaguauuuccca

SEQ ID NO: 2490275 - RNA, 17 nt, Human
uuacugcuaaguauuuc

SEQ ID NO: 2490276 - RNA, 11 nt, Human
uuacugccacu

SEQ ID NO: 2490277 - RNA, 21 nt, Human
uuacugccaaagggaaauauc

SEQ ID NO: 2490278 - RNA, 20 nt, Human
uuaccaugagaagagggccu

SEQ ID NO: 2490279 - RNA, 11 nt, Human
uuaccaugaga

SEQ ID NO: 2490280 - RNA, 15 nt, Human
uuaccauaugugcuu

SEQ ID NO: 2490281 - RNA, 13 nt, Human
uuacucagcccug

SEQ ID NO: 2490282 - RNA, 14 nt, Human
uuacucagcccugg

SEQ ID NO: 2490283 - RNA, 22 nt, Human
uuacucagcccugggccccacc

SEQ ID NO: 2490284 - RNA, 18 nt, Human
uuacucauagcacuuccc

SEQ ID NO: 2490285 - RNA, 14 nt, Human
uuacucaggaagaa

SEQ ID NO: 2490286 - RNA, 17 nt, Human
uuacucaggaagaacac

SEQ ID NO: 2490287 - RNA, 21 nt, Human
uuacucauuuuuuuaauuuau

SEQ ID NO: 2490288 - RNA, 17 nt, Human
uuacucaugaucuugug

SEQ ID NO: 2490289 - RNA, 13 nt, Human
uuacuguacauga

SEQ ID NO: 2490290 - RNA, 14 nt, Human
uuacuguacaugaa

SEQ ID NO: 2490291 - RNA, 22 nt, Human
uuacuguacaugaaaacacauu

SEQ ID NO: 2490292 - RNA, 23 nt, Human
uuacuguacaugaaaacacauuu

SEQ ID NO: 2490293 - RNA, 12 nt, Human
uuacuguacaug

SEQ ID NO: 2490294 - RNA, 23 nt, Human
uuacuguacagacagaaaaaacu

SEQ ID NO: 2490295 - RNA, 23 nt, Human
uuacugcuaaguauuucccagca

SEQ ID NO: 2490296 - RNA, 22 nt, Human
uuacugcuaaguauuucccagc

SEQ ID NO: 2490297 - RNA, 16 nt, Human
auaagauauuuuucau

SEQ ID NO: 2490298 - RNA, 18 nt, Human
auaagauauuuuucauga

SEQ ID NO: 2490299 - RNA, 16 nt, Human
auaagaaaaaucaugu

SEQ ID NO: 2490300 - RNA, 22 nt, Human
auaagaaaagauguagauuuau

SEQ ID NO: 2490301 - RNA, 17 nt, Human
auaagauuagaaugaaa

SEQ ID NO: 2490302 - RNA, 13 nt, Human
auaagauuagaau

SEQ ID NO: 2490303 - RNA, 14 nt, Human
auaagauucauauu

SEQ ID NO: 2490304 - RNA, 17 nt, Human
auaagaaaaaucauguu

SEQ ID NO: 2490305 - RNA, 15 nt, Human
auaagaaaaaucaug

SEQ ID NO: 2490306 - RNA, 11 nt, Human
auaagaaaaga

SEQ ID NO: 2490307 - RNA, 12 nt, Human
auaagaaaagau

SEQ ID NO: 2490308 - RNA, 18 nt, Human
auaagaaaagauguagau

SEQ ID NO: 2490309 - RNA, 21 nt, Human
auaagaaaagauguagauuua

SEQ ID NO: 2490310 - RNA, 18 nt, Human
auaacuuuuuuuuaaguu

SEQ ID NO: 2490311 - RNA, 18 nt, Human
uuagaauuccuucagggu

SEQ ID NO: 2490312 - RNA, 16 nt, Human
uuagaauuaaaaguug

SEQ ID NO: 2490313 - RNA, 16 nt, Human
uuagaauuauuuaaac

SEQ ID NO: 2490314 - RNA, 15 nt, Human
uuagaauuauuuaaa

SEQ ID NO: 2490315 - RNA, 13 nt, Human
uuagaauuauuua

SEQ ID NO: 2490316 - RNA, 13 nt, Human
uuagaaugaaaau

SEQ ID NO: 2490317 - RNA, 12 nt, Human
uuagaauuauuu

SEQ ID NO: 2490318 - RNA, 22 nt, Human
uuagaauccaaacuuggauuuu

SEQ ID NO: 2490319 - RNA, 12 nt, Human
uuagaaugaaaa

SEQ ID NO: 2490320 - RNA, 18 nt, Human
uuagaauccaaacuugga

SEQ ID NO: 2490321 - RNA, 21 nt, Human
uuagaaucagccuugaaacau

SEQ ID NO: 2490322 - RNA, 23 nt, Human
uuacugucugguuuuaacaauuu

SEQ ID NO: 2490323 - RNA, 18 nt, Human
uuagaagguucucuccuc

SEQ ID NO: 2490324 - RNA, 23 nt, Human
uuacugucaaggcugcuuagaau

SEQ ID NO: 2490325 - RNA, 15 nt, Human
uuacuguaauuccuc

SEQ ID NO: 2490326 - RNA, 22 nt, Human
uuacugucugguuuuaacaauu

SEQ ID NO: 2490327 - RNA, 13 nt, Human
uuacuguaccugu

SEQ ID NO: 2490328 - RNA, 16 nt, Human
uuagaagucacacagu

SEQ ID NO: 2490329 - RNA, 14 nt, Human
uuagaauaaaauug

SEQ ID NO: 2490330 - RNA, 13 nt, Human
uuagaaguguuaa

SEQ ID NO: 2490331 - RNA, 15 nt, Human
uuagaauaaaauugu

SEQ ID NO: 2490332 - RNA, 16 nt, Human
uuaggguuaugauuaa

SEQ ID NO: 2490333 - RNA, 14 nt, Human
uuaggguuaugauu

SEQ ID NO: 2490334 - RNA, 12 nt, Human
uuagggcagcuu

SEQ ID NO: 2490335 - RNA, 17 nt, Human
uuagggcaccagggguu

SEQ ID NO: 2490336 - RNA, 15 nt, Human
uuaggggaacugggu

SEQ ID NO: 2490337 - RNA, 15 nt, Human
uuagggccaggcagg

SEQ ID NO: 2490338 - RNA, 14 nt, Human
uuagggcagcuugc

SEQ ID NO: 2490339 - RNA, 22 nt, Human
uuagauguucucuaucauuuaa

SEQ ID NO: 2490340 - RNA, 21 nt, Human
uuagauguucucuaucauuua

SEQ ID NO: 2490341 - RNA, 23 nt, Human
uuagauguucucuaucauuuaau

SEQ ID NO: 2490342 - RNA, 15 nt, Human
uuagggagagaagau

SEQ ID NO: 2490343 - RNA, 18 nt, Human
uuagggagagucauauuu

SEQ ID NO: 2490344 - RNA, 23 nt, Human
uuagggagagucauauuuugauu

SEQ ID NO: 2490345 - RNA, 21 nt, Human
uuagggagagucauauuuuga

SEQ ID NO: 2490346 - RNA, 12 nt, Human
uuagggaggggu

SEQ ID NO: 2490347 - RNA, 19 nt, Human
uuaggugugggggaagcac

SEQ ID NO: 2490348 - RNA, 13 nt, Human
uuaggucaagaag

SEQ ID NO: 2490349 - RNA, 20 nt, Human
uuagguuaaaaaaaggcauu

SEQ ID NO: 2490350 - RNA, 19 nt, Human
uuagguguugauuuucugu

SEQ ID NO: 2490351 - RNA, 14 nt, Human
uuaggucucuuccc

SEQ ID NO: 2490352 - RNA, 14 nt, Human
uuaguaaucauauu

SEQ ID NO: 2490353 - RNA, 14 nt, Human
uuaguaaggcugug

SEQ ID NO: 2490354 - RNA, 20 nt, Human
uuaguaaggcuguguacacu

SEQ ID NO: 2490355 - RNA, 13 nt, Human
uuaguaaucauau

SEQ ID NO: 2490356 - RNA, 23 nt, Human
uuaguaacauguguuaaguauuu

SEQ ID NO: 2490357 - RNA, 21 nt, Human
uuaguaaugcuacgugugauu

SEQ ID NO: 2490358 - RNA, 20 nt, Human
uuaguaaugcuacgugugau

SEQ ID NO: 2490359 - RNA, 22 nt, Human
uuaguaaugcuacgugugauuu

SEQ ID NO: 2490360 - RNA, 13 nt, Human
uuaguagagacag

SEQ ID NO: 2490361 - RNA, 19 nt, Human
uuaguacuccccuccuuga

SEQ ID NO: 2490362 - RNA, 12 nt, Human
uuaguaaugcua

SEQ ID NO: 2490363 - RNA, 15 nt, Human
uuauaaaaauaaaaa

SEQ ID NO: 2490364 - RNA, 19 nt, Human
uuauaaaaaauggugccug

SEQ ID NO: 2490365 - RNA, 21 nt, Human
uuaguuuuugugaaguuuaau

SEQ ID NO: 2490366 - RNA, 14 nt, Human
uuaguagagacagg

SEQ ID NO: 2490367 - RNA, 18 nt, Human
uuaguuuuugugaaguuu

SEQ ID NO: 2490368 - RNA, 13 nt, Human
uuauaaacuuuac

SEQ ID NO: 2490369 - RNA, 17 nt, Human
uuauaaaccucuaauuu

SEQ ID NO: 2490370 - RNA, 16 nt, Human
uuauaaaccucuaauu

SEQ ID NO: 2490371 - RNA, 23 nt, Human
uuauaaaccucuaauuuauuuug

SEQ ID NO: 2490372 - RNA, 13 nt, Human
uuauaaaagugau

SEQ ID NO: 2490373 - RNA, 13 nt, Human
uuauaaaacuucu

SEQ ID NO: 2490374 - RNA, 16 nt, Human
uuauaaaauuaagcaa

SEQ ID NO: 2490375 - RNA, 22 nt, Human
uuauaaaaauaaaaaacacugg

SEQ ID NO: 2490376 - RNA, 21 nt, Human
uuauaaaaauaaaaaacacug

SEQ ID NO: 2490377 - RNA, 23 nt, Human
uuauaaaagaauaaaauugcacu

SEQ ID NO: 2490378 - RNA, 12 nt, Human
uuauaaaacuuc

SEQ ID NO: 2490379 - RNA, 22 nt, Human
uuauaaaaccaucaaaaauauu

SEQ ID NO: 2490380 - RNA, 20 nt, Human
uuauaaaaaauggugccuga

SEQ ID NO: 2490381 - RNA, 18 nt, Human
auaauuuaccugaagucu

SEQ ID NO: 2490382 - RNA, 23 nt, Human
auaauucacauuguauucagagu

SEQ ID NO: 2490383 - RNA, 21 nt, Human
auaauuauuuauuuaauaaca

SEQ ID NO: 2490384 - RNA, 18 nt, Human
auaauuauuuauuuaaua

SEQ ID NO: 2490385 - RNA, 17 nt, Human
auaauuauuuauuuaau

SEQ ID NO: 2490386 - RNA, 16 nt, Human
auaauuauuuauuuaa

SEQ ID NO: 2490387 - RNA, 14 nt, Human
auaaucuuucacag

SEQ ID NO: 2490388 - RNA, 23 nt, Human
auaaucuuauuagggagaaaauu

SEQ ID NO: 2490389 - RNA, 19 nt, Human
auaauuaugacaguuauac

SEQ ID NO: 2490390 - RNA, 21 nt, Human
auaauuaugaguuugcuuaug

SEQ ID NO: 2490391 - RNA, 20 nt, Human
auaauuaugacaguuauacu

SEQ ID NO: 2490392 - RNA, 20 nt, Human
auaaucuucugccuucucau

SEQ ID NO: 2490393 - RNA, 18 nt, Human
auaauuaugacaguuaua

SEQ ID NO: 2490394 - RNA, 20 nt, Human
uuagauguucucuaucauuu

SEQ ID NO: 2490395 - RNA, 19 nt, Human
uuagauguucucuaucauu

SEQ ID NO: 2490396 - RNA, 15 nt, Human
uuagauguucucuau

SEQ ID NO: 2490397 - RNA, 22 nt, Human
uuagauguucuaagucuuucca

SEQ ID NO: 2490398 - RNA, 13 nt, Human
uuagauguucuaa

SEQ ID NO: 2490399 - RNA, 20 nt, Human
uuagauguucuaagucuuuc

SEQ ID NO: 2490400 - RNA, 21 nt, Human
uuagauguuccaguaaucuaa

SEQ ID NO: 2490401 - RNA, 22 nt, Human
uuagauguuccaguaaucuaau

SEQ ID NO: 2490402 - RNA, 14 nt, Human
auaauuuuaaaugu

SEQ ID NO: 2490403 - RNA, 20 nt, Human
uuagaugugauuuaauagug

SEQ ID NO: 2490404 - RNA, 21 nt, Human
uuagaugugauuuaauagugu

SEQ ID NO: 2490405 - RNA, 13 nt, Human
uuagaugugauuu

SEQ ID NO: 2490406 - RNA, 13 nt, Human
auaauuuuaaaug

SEQ ID NO: 2490407 - RNA, 12 nt, Human
auaauuuuaaau

SEQ ID NO: 2490408 - RNA, 15 nt, Human
auaauuuuaaacaaa

SEQ ID NO: 2490409 - RNA, 19 nt, Human
auaauuuguacauauguaa

SEQ ID NO: 2490410 - RNA, 22 nt, Human
auaauuuguacauauguaaaau

SEQ ID NO: 2490411 - RNA, 18 nt, Human
auaauuucuuacuaaaca

SEQ ID NO: 2490412 - RNA, 21 nt, Human
auaauuucccaauuaggaagu

SEQ ID NO: 2490413 - RNA, 11 nt, Human
auaauuuccca

SEQ ID NO: 2490414 - RNA, 18 nt, Human
auaauuucccaauuagga

SEQ ID NO: 2490415 - RNA, 22 nt, Human
auaauuucccaauuaggaagug

SEQ ID NO: 2490416 - RNA, 15 nt, Human
auaauauauuuucug

SEQ ID NO: 2490417 - RNA, 22 nt, Human
auaauauauguuuaccuuuuaa

SEQ ID NO: 2490418 - RNA, 12 nt, Human
auaauaugagaa

SEQ ID NO: 2490419 - RNA, 15 nt, Human
auaauaugagaauca

SEQ ID NO: 2490420 - RNA, 12 nt, Human
auaauaugcaca

SEQ ID NO: 2490421 - RNA, 20 nt, Human
auaauaugcacacagugcuu

SEQ ID NO: 2490422 - RNA, 21 nt, Human
auaauaugcugccaaauuuug

SEQ ID NO: 2490423 - RNA, 18 nt, Human
auaauauuuuuaauauau

SEQ ID NO: 2490424 - RNA, 14 nt, Human
auaauauuuuuaau

SEQ ID NO: 2490425 - RNA, 15 nt, Human
auaaucuucugccuu

SEQ ID NO: 2490426 - RNA, 17 nt, Human
auaaucuucugccuucu

SEQ ID NO: 2490427 - RNA, 14 nt, Human
auaaucuucugccu

SEQ ID NO: 2490428 - RNA, 15 nt, Human
auaaucuuauuaggg

SEQ ID NO: 2490429 - RNA, 17 nt, Human
auaaucuguacaaugaa

SEQ ID NO: 2490430 - RNA, 14 nt, Human
auaaucuguacaau

SEQ ID NO: 2490431 - RNA, 18 nt, Human
auaaucacaacccuucag

SEQ ID NO: 2490432 - RNA, 22 nt, Human
auaaucuggacuccucugucca

SEQ ID NO: 2490433 - RNA, 20 nt, Human
auaauauuuuuaauuaaaua

SEQ ID NO: 2490434 - RNA, 20 nt, Human
auaagauuagaaugaaaauu

SEQ ID NO: 2490435 - RNA, 21 nt, Human
auaagauucauauuuacuucu

SEQ ID NO: 2490436 - RNA, 22 nt, Human
auaagccaaaaaaugcuugcuu

SEQ ID NO: 2490437 - RNA, 16 nt, Human
auaagcaucaaacucu

SEQ ID NO: 2490438 - RNA, 17 nt, Human
auaagcaucaaacucuu

SEQ ID NO: 2490439 - RNA, 14 nt, Human
auaagccagacauc

SEQ ID NO: 2490440 - RNA, 18 nt, Human
auaauauaccaaugcuuu

SEQ ID NO: 2490441 - RNA, 23 nt, Human
auaagccaauuuuucugcacuga

SEQ ID NO: 2490442 - RNA, 22 nt, Human
auaagccaauuuuucugcacug

SEQ ID NO: 2490443 - RNA, 19 nt, Human
auaagccaauuuuucugca

SEQ ID NO: 2490444 - RNA, 18 nt, Human
auaagccaauuuuucugc

SEQ ID NO: 2490445 - RNA, 14 nt, Human
auaagccaauuuuu

SEQ ID NO: 2490446 - RNA, 20 nt, Human
auaauauacuuguggacuaa

SEQ ID NO: 2490447 - RNA, 14 nt, Human
auaauauacuugug

SEQ ID NO: 2490448 - RNA, 13 nt, Human
auaauauacuugu

SEQ ID NO: 2490449 - RNA, 13 nt, Human
auaauauauuuuc

SEQ ID NO: 2490450 - RNA, 19 nt, Human
auaauauauuuuaaauauu

SEQ ID NO: 2490451 - RNA, 14 nt, Human
auaauauauuugug

SEQ ID NO: 2490452 - RNA, 22 nt, Human
augaagacuguuaaaugaaacc

SEQ ID NO: 2490453 - RNA, 21 nt, Human
augaagacuguuaaaugaaac

SEQ ID NO: 2490454 - RNA, 20 nt, Human
augaagagauuuuucaugau

SEQ ID NO: 2490455 - RNA, 11 nt, Human
augaagaggag

SEQ ID NO: 2490456 - RNA, 16 nt, Human
augaauauuuaguguu

SEQ ID NO: 2490457 - RNA, 16 nt, Human
augaagagauuuuuca

SEQ ID NO: 2490458 - RNA, 18 nt, Human
augaagagugagagggca

SEQ ID NO: 2490459 - RNA, 19 nt, Human
augaagagugagagggcau

SEQ ID NO: 2490460 - RNA, 15 nt, Human
augaagaacugagga

SEQ ID NO: 2490461 - RNA, 23 nt, Human
augaacuucgcaucaaaagacaa

SEQ ID NO: 2490462 - RNA, 16 nt, Human
augaagacaggacagu

SEQ ID NO: 2490463 - RNA, 21 nt, Human
augaagacaggacagugcuuc

SEQ ID NO: 2490464 - RNA, 21 nt, Human
augaaagguuuacauugucaa

SEQ ID NO: 2490465 - RNA, 16 nt, Human
augaaaugguuaagaa

SEQ ID NO: 2490466 - RNA, 19 nt, Human
augaaagggcccagagagg

SEQ ID NO: 2490467 - RNA, 16 nt, Human
augaaagguuuacauu

SEQ ID NO: 2490468 - RNA, 20 nt, Human
augaaauugucuagcagagc

SEQ ID NO: 2490469 - RNA, 22 nt, Human
augaaauugucuagcagagcag

SEQ ID NO: 2490470 - RNA, 23 nt, Human
augaaauuacuuaucauccacau

SEQ ID NO: 2490471 - RNA, 16 nt, Human
augaaauuacuuauca

SEQ ID NO: 2490472 - RNA, 22 nt, Human
augaacuucgcaucaaaagaca

SEQ ID NO: 2490473 - RNA, 20 nt, Human
augaacuucgcaucaaaaga

SEQ ID NO: 2490474 - RNA, 17 nt, Human
augaacuucgcaucaaa

SEQ ID NO: 2490475 - RNA, 13 nt, Human
augaacuucgcau

SEQ ID NO: 2490476 - RNA, 23 nt, Human
augaaauugucuagcagagcagg

SEQ ID NO: 2490477 - RNA, 18 nt, Human
augaacuuauucuguaga

SEQ ID NO: 2490478 - RNA, 17 nt, Human
augaacuuauucuguag

SEQ ID NO: 2490479 - RNA, 17 nt, Human
augaaauuuaauauagc

SEQ ID NO: 2490480 - RNA, 12 nt, Human
augaaucaaugg

SEQ ID NO: 2490481 - RNA, 14 nt, Human
augaaucaaagaca

SEQ ID NO: 2490482 - RNA, 23 nt, Human
augaauggcuaagcaaaauguga

SEQ ID NO: 2490483 - RNA, 21 nt, Human
augaauauuuaguguucauaa

SEQ ID NO: 2490484 - RNA, 18 nt, Human
augaaugggcaaaacuga

SEQ ID NO: 2490485 - RNA, 17 nt, Human
augaaugggcaaaacug

SEQ ID NO: 2490486 - RNA, 23 nt, Human
augaauggcucacuauggugcca

SEQ ID NO: 2490487 - RNA, 23 nt, Human
augaauggagauuugaaggucug

SEQ ID NO: 2490488 - RNA, 23 nt, Human
augaauggacucaaacugccuug

SEQ ID NO: 2490489 - RNA, 21 nt, Human
augaaugggcaaaacugaauu

SEQ ID NO: 2490490 - RNA, 21 nt, Human
augaaugggcugagcugccug

SEQ ID NO: 2490491 - RNA, 21 nt, Human
augaaugguauggaacucucu

SEQ ID NO: 2490492 - RNA, 15 nt, Human
augaauuacauuugu

SEQ ID NO: 2490493 - RNA, 15 nt, Human
augaauuaaguuuuu

SEQ ID NO: 2490494 - RNA, 13 nt, Human
augaauguaucag

SEQ ID NO: 2490495 - RNA, 17 nt, Human
augaauuacauuuguau

SEQ ID NO: 2490496 - RNA, 16 nt, Human
augaauuacauuugua

SEQ ID NO: 2490497 - RNA, 15 nt, Human
uuggggaauuuccuc

SEQ ID NO: 2490498 - RNA, 19 nt, Human
uuggggacaucucuuugaa

SEQ ID NO: 2490499 - RNA, 23 nt, Human
uuggggacaggggcaggaggaag

SEQ ID NO: 2490500 - RNA, 18 nt, Human
uuggggaccagagcugcc

SEQ ID NO: 2490501 - RNA, 18 nt, Human
uuggugcacagugauuuu

SEQ ID NO: 2490502 - RNA, 17 nt, Human
uuggugcacagugauuu

SEQ ID NO: 2490503 - RNA, 13 nt, Human
uuggugccuggcc

SEQ ID NO: 2490504 - RNA, 12 nt, Human
uuggugccuggc

SEQ ID NO: 2490505 - RNA, 16 nt, Human
uuggugcaacccuuac

SEQ ID NO: 2490506 - RNA, 15 nt, Human
uuggugcacagugau

SEQ ID NO: 2490507 - RNA, 21 nt, Human
uuggugcaacccuuaccccuu

SEQ ID NO: 2490508 - RNA, 17 nt, Human
uuggggaguuaagaccu

SEQ ID NO: 2490509 - RNA, 19 nt, Human
uuggggaguuaagaccugg

SEQ ID NO: 2490510 - RNA, 20 nt, Human
uuggggaguuaagaccuggc

SEQ ID NO: 2490511 - RNA, 21 nt, Human
uuggggaguuaagaccuggca

SEQ ID NO: 2490512 - RNA, 17 nt, Human
uuggcucacacugagaa

SEQ ID NO: 2490513 - RNA, 16 nt, Human
uuggcucacacugaga

SEQ ID NO: 2490514 - RNA, 22 nt, Human
uuggcucacccaagcaaggcca

SEQ ID NO: 2490515 - RNA, 12 nt, Human
uuggcucaccca

SEQ ID NO: 2490516 - RNA, 13 nt, Human
uuggcucagacau

SEQ ID NO: 2490517 - RNA, 14 nt, Human
uuggcucagacaug

SEQ ID NO: 2490518 - RNA, 17 nt, Human
uuggcucgaaucucugu

SEQ ID NO: 2490519 - RNA, 22 nt, Human
uuggcucccauucacucuucca

SEQ ID NO: 2490520 - RNA, 18 nt, Human
aucuuucuugaucaacau

SEQ ID NO: 2490521 - RNA, 13 nt, Human
aucuuucuugauc

SEQ ID NO: 2490522 - RNA, 19 nt, Human
aucuuucuucuauuuuauu

SEQ ID NO: 2490523 - RNA, 22 nt, Human
aucuuucuucuauuuuauuccc

SEQ ID NO: 2490524 - RNA, 21 nt, Human
uuggcucgaaucucugugccu

SEQ ID NO: 2490525 - RNA, 20 nt, Human
uuggcucgaaucucugugcc

SEQ ID NO: 2490526 - RNA, 11 nt, Human
aucuuucuucu

SEQ ID NO: 2490527 - RNA, 13 nt, Human
aucuuucugcaga

SEQ ID NO: 2490528 - RNA, 15 nt, Human
aucuuugauucuccu

SEQ ID NO: 2490529 - RNA, 14 nt, Human
aucuuugauucucc

SEQ ID NO: 2490530 - RNA, 20 nt, Human
aucuuucuuuaccugagacc

SEQ ID NO: 2490531 - RNA, 18 nt, Human
aucuuucuuuaccugaga

SEQ ID NO: 2490532 - RNA, 17 nt, Human
aucuuucuuuaccugag

SEQ ID NO: 2490533 - RNA, 14 nt, Human
aucuuucuuuaccu

SEQ ID NO: 2490534 - RNA, 22 nt, Human
aucuuucuuuaccugagaccag

SEQ ID NO: 2490535 - RNA, 21 nt, Human
aucuuucuuuaccugagacca

SEQ ID NO: 2490536 - RNA, 15 nt, Human
aucuuucuuucuuag

SEQ ID NO: 2490537 - RNA, 20 nt, Human
aucuuucuuucuuagaaauu

SEQ ID NO: 2490538 - RNA, 17 nt, Human
aucuuucuuucuuagaa

SEQ ID NO: 2490539 - RNA, 21 nt, Human
aucuuucuuucuuagaaauuu

SEQ ID NO: 2490540 - RNA, 21 nt, Human
aucuuucuuuugauucuuccu

SEQ ID NO: 2490541 - RNA, 17 nt, Human
aucuuuucacaaauaaa

SEQ ID NO: 2490542 - RNA, 20 nt, Human
aucuuugauucuccuucagc

SEQ ID NO: 2490543 - RNA, 22 nt, Human
aucuuuucauuuaggugaggaa

SEQ ID NO: 2490544 - RNA, 19 nt, Human
aucuuugauucuccuucag

SEQ ID NO: 2490545 - RNA, 18 nt, Human
aucuuugauucuccuuca

SEQ ID NO: 2490546 - RNA, 17 nt, Human
aucuuugauucuccuuc

SEQ ID NO: 2490547 - RNA, 16 nt, Human
aucuuugauucuccuu

SEQ ID NO: 2490548 - RNA, 17 nt, Human
aucuuugcagacaggca

SEQ ID NO: 2490549 - RNA, 19 nt, Human
aucuuuugaccuguggugc

SEQ ID NO: 2490550 - RNA, 15 nt, Human
aucuuuuguauaguu

SEQ ID NO: 2490551 - RNA, 18 nt, Human
augaaagggcccagagag

SEQ ID NO: 2490552 - RNA, 23 nt, Human
aucuuuucuugccucuguccccu

SEQ ID NO: 2490553 - RNA, 14 nt, Human
aucuuuucuugccu

SEQ ID NO: 2490554 - RNA, 11 nt, Human
aucuuuugaac

SEQ ID NO: 2490555 - RNA, 13 nt, Human
aucuuuucuauuu

SEQ ID NO: 2490556 - RNA, 11 nt, Human
uuggagacaga

SEQ ID NO: 2490557 - RNA, 17 nt, Human
uuggagacauuccuggg

SEQ ID NO: 2490558 - RNA, 18 nt, Human
uugcuugagcccaggagu

SEQ ID NO: 2490559 - RNA, 20 nt, Human
uuggagacacaacuauuuuu

SEQ ID NO: 2490560 - RNA, 16 nt, Human
uugcuugagcccagga

SEQ ID NO: 2490561 - RNA, 17 nt, Human
uugcuugagcccaggag

SEQ ID NO: 2490562 - RNA, 14 nt, Human
uugcuugaaagaaa

SEQ ID NO: 2490563 - RNA, 22 nt, Human
uugcuugaaagaaaauaugcau

SEQ ID NO: 2490564 - RNA, 14 nt, Human
uugcuugagcccag

SEQ ID NO: 2490565 - RNA, 12 nt, Human
uugcuugaaaga

SEQ ID NO: 2490566 - RNA, 15 nt, Human
uugcuugaaagaaaa

SEQ ID NO: 2490567 - RNA, 15 nt, Human
uuggaggggggagcc

SEQ ID NO: 2490568 - RNA, 16 nt, Human
uuggagaguuuccuga

SEQ ID NO: 2490569 - RNA, 17 nt, Human
uuggaggccuuucaucc

SEQ ID NO: 2490570 - RNA, 22 nt, Human
uuggagggucccaagcugggcc

SEQ ID NO: 2490571 - RNA, 21 nt, Human
uuggagggucccaagcugggc

SEQ ID NO: 2490572 - RNA, 17 nt, Human
uuggagggucccaagcu

SEQ ID NO: 2490573 - RNA, 19 nt, Human
uuggagggguuuaugcuca

SEQ ID NO: 2490574 - RNA, 22 nt, Human
uuggagggugggagagcccagc

SEQ ID NO: 2490575 - RNA, 23 nt, Human
uuggagggugggagagcccagcc

SEQ ID NO: 2490576 - RNA, 15 nt, Human
uuggagaguuuccug

SEQ ID NO: 2490577 - RNA, 18 nt, Human
uuggagaguaaaaacuga

SEQ ID NO: 2490578 - RNA, 20 nt, Human
uuggagaguaaaaacugaau

SEQ ID NO: 2490579 - RNA, 22 nt, Human
uuggagagcuagaaccuggaga

SEQ ID NO: 2490580 - RNA, 13 nt, Human
uuggagaguaaaa

SEQ ID NO: 2490581 - RNA, 17 nt, Human
uuggagaguaaaaacug

SEQ ID NO: 2490582 - RNA, 20 nt, Human
uuggagacucuguggggccu

SEQ ID NO: 2490583 - RNA, 13 nt, Human
uuggagacucugu

SEQ ID NO: 2490584 - RNA, 15 nt, Human
uuggagacucugugg

SEQ ID NO: 2490585 - RNA, 19 nt, Human
uuggccuccggccuccccu

SEQ ID NO: 2490586 - RNA, 13 nt, Human
uuggccuccggcc

SEQ ID NO: 2490587 - RNA, 22 nt, Human
uuggccucugcaaaggaaauac

SEQ ID NO: 2490588 - RNA, 17 nt, Human
uuggccuccccugcuga

SEQ ID NO: 2490589 - RNA, 12 nt, Human
uuggccucagaa

SEQ ID NO: 2490590 - RNA, 22 nt, Human
uuggccgggugcgguggcucac

SEQ ID NO: 2490591 - RNA, 19 nt, Human
uuggcccccgagcuggggg

SEQ ID NO: 2490592 - RNA, 23 nt, Human
uuggcuauuagagaucaaccccu

SEQ ID NO: 2490593 - RNA, 17 nt, Human
uuggcuauuuaaaacuu

SEQ ID NO: 2490594 - RNA, 16 nt, Human
uuggcuauuuaaaacu

SEQ ID NO: 2490595 - RNA, 13 nt, Human
uuggcucaauccu

SEQ ID NO: 2490596 - RNA, 14 nt, Human
uuggcucaauccuc

SEQ ID NO: 2490597 - RNA, 23 nt, Human
uuggaguccccucaccuccucua

SEQ ID NO: 2490598 - RNA, 18 nt, Human
uuggaggugcuuaagcag

SEQ ID NO: 2490599 - RNA, 23 nt, Human
uuggagggucccaagcugggccc

SEQ ID NO: 2490600 - RNA, 23 nt, Human
uuggaggugcuuaagcagaagca

SEQ ID NO: 2490601 - RNA, 16 nt, Human
uuggagggugucccaa

SEQ ID NO: 2490602 - RNA, 18 nt, Human
uuggccccugcccggcug

SEQ ID NO: 2490603 - RNA, 15 nt, Human
uuggagucuuccaaa

SEQ ID NO: 2490604 - RNA, 20 nt, Human
uuggagugaguguggcuccc

SEQ ID NO: 2490605 - RNA, 15 nt, Human
uuggcccccgagcug

SEQ ID NO: 2490606 - RNA, 16 nt, Human
uuggcccccgagcugg

SEQ ID NO: 2490607 - RNA, 12 nt, Human
aucugcccagga

SEQ ID NO: 2490608 - RNA, 23 nt, Human
aucugcccaggggugcccccucc

SEQ ID NO: 2490609 - RNA, 22 nt, Human
aucugcccaggggugcccccuc

SEQ ID NO: 2490610 - RNA, 21 nt, Human
aucugcccaggggugcccccu

SEQ ID NO: 2490611 - RNA, 19 nt, Human
aucugcccaggggugcccc

SEQ ID NO: 2490612 - RNA, 16 nt, Human
aucugcccaggggugc

SEQ ID NO: 2490613 - RNA, 15 nt, Human
aucugcccaggggug

SEQ ID NO: 2490614 - RNA, 13 nt, Human
aucugcccagggg

SEQ ID NO: 2490615 - RNA, 13 nt, Human
aucugcccaggac

SEQ ID NO: 2490616 - RNA, 11 nt, Human
aucugccccuc

SEQ ID NO: 2490617 - RNA, 12 nt, Human
aucugccccucc

SEQ ID NO: 2490618 - RNA, 15 nt, Human
aucugccccuccccc

SEQ ID NO: 2490619 - RNA, 16 nt, Human
aucugccccuccccca

SEQ ID NO: 2490620 - RNA, 17 nt, Human
uugcauuuuaaaaauga

SEQ ID NO: 2490621 - RNA, 12 nt, Human
uugcauuuuugc

SEQ ID NO: 2490622 - RNA, 22 nt, Human
uugcauuuaaaacagacacugg

SEQ ID NO: 2490623 - RNA, 15 nt, Human
uugcauuuaugguca

SEQ ID NO: 2490624 - RNA, 15 nt, Human
uugcauuugcucuuu

SEQ ID NO: 2490625 - RNA, 21 nt, Human
uugcauuuggauugggguccc

SEQ ID NO: 2490626 - RNA, 15 nt, Human
uugcauuuggucaag

SEQ ID NO: 2490627 - RNA, 17 nt, Human
aucugccuuaaaaccaa

SEQ ID NO: 2490628 - RNA, 19 nt, Human
aucugccuuaaaaccaaag

SEQ ID NO: 2490629 - RNA, 18 nt, Human
aucugccuuaaaaccaaa

SEQ ID NO: 2490630 - RNA, 16 nt, Human
aucugccuuuauugug

SEQ ID NO: 2490631 - RNA, 16 nt, Human
aucugccccucccugc

SEQ ID NO: 2490632 - RNA, 14 nt, Human
aucugccccucccu

SEQ ID NO: 2490633 - RNA, 17 nt, Human
aucugccccucccccaa

SEQ ID NO: 2490634 - RNA, 16 nt, Human
aucugcgugacaauaa

SEQ ID NO: 2490635 - RNA, 21 nt, Human
aucugccuuaaaaccaaagag

SEQ ID NO: 2490636 - RNA, 22 nt, Human
aucugccuuuauuguguuuguc

SEQ ID NO: 2490637 - RNA, 21 nt, Human
aucugccuuuauuguguuugu

SEQ ID NO: 2490638 - RNA, 19 nt, Human
aucugccuuuauuguguuu

SEQ ID NO: 2490639 - RNA, 23 nt, Human
aucugcgugacaauaaaacauua

SEQ ID NO: 2490640 - RNA, 22 nt, Human
aucugcgugacaauaaaacauu

SEQ ID NO: 2490641 - RNA, 21 nt, Human
aucugcgugacaauaaaacau

SEQ ID NO: 2490642 - RNA, 17 nt, Human
aucugcgugacaauaaa

SEQ ID NO: 2490643 - RNA, 14 nt, Human
aucugcuaauaaaa

SEQ ID NO: 2490644 - RNA, 20 nt, Human
aucugcuagggaauaucaau

SEQ ID NO: 2490645 - RNA, 15 nt, Human
aucuguccucagccu

SEQ ID NO: 2490646 - RNA, 16 nt, Human
aucuguccucagccuu

SEQ ID NO: 2490647 - RNA, 17 nt, Human
aucuguccucagccuug

SEQ ID NO: 2490648 - RNA, 18 nt, Human
aucuguccucagccuugc

SEQ ID NO: 2490649 - RNA, 21 nt, Human
aucuguccucagccuugccag

SEQ ID NO: 2490650 - RNA, 17 nt, Human
aucugugaaaggaaaga

SEQ ID NO: 2490651 - RNA, 16 nt, Human
aucugucugguggccc

SEQ ID NO: 2490652 - RNA, 14 nt, Human
aucugucugguggc

SEQ ID NO: 2490653 - RNA, 13 nt, Human
aucuguccaagga

SEQ ID NO: 2490654 - RNA, 17 nt, Human
aucuguauuuaauuuug

SEQ ID NO: 2490655 - RNA, 14 nt, Human
aucuguccaaggaa

SEQ ID NO: 2490656 - RNA, 16 nt, Human
aucugucccugccuca

SEQ ID NO: 2490657 - RNA, 14 nt, Human
aucuguccucagcc

SEQ ID NO: 2490658 - RNA, 18 nt, Human
aucuguccaaaggaggcu

SEQ ID NO: 2490659 - RNA, 19 nt, Human
aucuguccaaaggaggcug

SEQ ID NO: 2490660 - RNA, 21 nt, Human
aucuguccaaaggaggcuggc

SEQ ID NO: 2490661 - RNA, 23 nt, Human
aucuguccaaaggaggcuggcag

SEQ ID NO: 2490662 - RNA, 18 nt, Human
aucuguauuuaauuuuga

SEQ ID NO: 2490663 - RNA, 15 nt, Human
aucuguauuuaauuu

SEQ ID NO: 2490664 - RNA, 13 nt, Human
aucuguaucucuc

SEQ ID NO: 2490665 - RNA, 22 nt, Human
aucuguauauaaaauauuuuca

SEQ ID NO: 2490666 - RNA, 21 nt, Human
aucuguauauacaauaacaua

SEQ ID NO: 2490667 - RNA, 15 nt, Human
aucuguaucucucuc

SEQ ID NO: 2490668 - RNA, 14 nt, Human
aucuguaucucucu

SEQ ID NO: 2490669 - RNA, 17 nt, Human
aucuggugacuuuccuc

SEQ ID NO: 2490670 - RNA, 16 nt, Human
aucuggugacuuuccu

SEQ ID NO: 2490671 - RNA, 10 nt, Human
aucuggugac

SEQ ID NO: 2490672 - RNA, 16 nt, Human
aucugcucagcccugg

SEQ ID NO: 2490673 - RNA, 15 nt, Human
aucugcucagcccug

SEQ ID NO: 2490674 - RNA, 14 nt, Human
aucugcucagcccu

SEQ ID NO: 2490675 - RNA, 13 nt, Human
aucugcucagccc

SEQ ID NO: 2490676 - RNA, 15 nt, Human
aucugcucagcagcu

SEQ ID NO: 2490677 - RNA, 14 nt, Human
aucugcucagcagc

SEQ ID NO: 2490678 - RNA, 23 nt, Human
aucuguauaaguaagaaaauauu

SEQ ID NO: 2490679 - RNA, 20 nt, Human
aucuguauaaguaagaaaau

SEQ ID NO: 2490680 - RNA, 19 nt, Human
aucuguauaaguaagaaaa

SEQ ID NO: 2490681 - RNA, 18 nt, Human
aucuguauacccucuguu

SEQ ID NO: 2490682 - RNA, 19 nt, Human
aucuguauauaaaauauuu

SEQ ID NO: 2490683 - RNA, 17 nt, Human
aucuguauauaaaauau

SEQ ID NO: 2490684 - RNA, 16 nt, Human
aucuguauauaaaaua

SEQ ID NO: 2490685 - RNA, 21 nt, Human
aucuguauaaguaagaaaaua

SEQ ID NO: 2490686 - RNA, 14 nt, Human
aucuguauauacaa

SEQ ID NO: 2490687 - RNA, 20 nt, Human
aucuguauauacaauaacau

SEQ ID NO: 2490688 - RNA, 17 nt, Human
aucuguauaaguaagaa

SEQ ID NO: 2490689 - RNA, 18 nt, Human
aucuguagggcuggaccu

SEQ ID NO: 2490690 - RNA, 17 nt, Human
aucuguagggcuggacc

SEQ ID NO: 2490691 - RNA, 15 nt, Human
aucuguagggcugga

SEQ ID NO: 2490692 - RNA, 22 nt, Human
aucugguuugacuccgcuggag

SEQ ID NO: 2490693 - RNA, 14 nt, Human
aucuguagggcugg

SEQ ID NO: 2490694 - RNA, 18 nt, Human
aucugcucagcccuggag

SEQ ID NO: 2490695 - RNA, 17 nt, Human
aucugcucagcccugga

SEQ ID NO: 2490696 - RNA, 14 nt, Human
aucuuauaauuuaa

SEQ ID NO: 2490697 - RNA, 23 nt, Human
aucuuaguuuggauucuuaugua

SEQ ID NO: 2490698 - RNA, 24 nt, Human
aucuugcaccccaaagcuuuccug

SEQ ID NO: 2490699 - RNA, 23 nt, Human
aucuugaucugcucagcccugga

SEQ ID NO: 2490700 - RNA, 23 nt, Human
aucuugguaaauuuccccaacag

SEQ ID NO: 2490701 - RNA, 19 nt, Human
aucuugguccaggaaaugu

SEQ ID NO: 2490702 - RNA, 22 nt, Human
aucuugguacuacuagaugucu

SEQ ID NO: 2490703 - RNA, 23 nt, Human
aucuugguccaggaaaugugcac

SEQ ID NO: 2490704 - RNA, 13 nt, Human
aucuugcucugcu

SEQ ID NO: 2490705 - RNA, 20 nt, Human
aucuuggucagauuugaacu

SEQ ID NO: 2490706 - RNA, 18 nt, Human
aucugugaaaggaaagag

SEQ ID NO: 2490707 - RNA, 15 nt, Human
aucuguuuacagugu

SEQ ID NO: 2490708 - RNA, 17 nt, Human
aucuguuuacaguguuc

SEQ ID NO: 2490709 - RNA, 14 nt, Human
aucuguuucccagc

SEQ ID NO: 2490710 - RNA, 13 nt, Human
aucuguuucccag

SEQ ID NO: 2490711 - RNA, 14 nt, Human
aucuguuuuaaauu

SEQ ID NO: 2490712 - RNA, 17 nt, Human
aucuguuuugaaggcaa

SEQ ID NO: 2490713 - RNA, 18 nt, Human
aucuguuuugaaggcaaa

SEQ ID NO: 2490714 - RNA, 22 nt, Human
aucuguuuuaaauuuauuucaa

SEQ ID NO: 2490715 - RNA, 19 nt, Human
aucuguuuugaaggcaaaa

SEQ ID NO: 2490716 - RNA, 18 nt, Human
aucuguuuuuaaaaauca

SEQ ID NO: 2490717 - RNA, 19 nt, Human
aucuguuuuuaaaaaucau

SEQ ID NO: 2490718 - RNA, 20 nt, Human
aucuuaggggagagcuuucu

SEQ ID NO: 2490719 - RNA, 22 nt, Human
aucuuaguuuggauucuuaugu

SEQ ID NO: 2490720 - RNA, 14 nt, Human
aucuuaguuuggau

SEQ ID NO: 2490721 - RNA, 16 nt, Human
aucuuaguauuugcau

SEQ ID NO: 2490722 - RNA, 18 nt, Human
aucuuagugccugagagu

SEQ ID NO: 2490723 - RNA, 12 nt, Human
aucuuagugguu

SEQ ID NO: 2490724 - RNA, 21 nt, Human
aucuuagugccugagaguauu

SEQ ID NO: 2490725 - RNA, 17 nt, Human
uugcuauuagagcauug

SEQ ID NO: 2490726 - RNA, 14 nt, Human
uugcuauuagagca

SEQ ID NO: 2490727 - RNA, 22 nt, Human
uugcuauuagacuguaggaaga

SEQ ID NO: 2490728 - RNA, 12 nt, Human
uugcuauuguaa

SEQ ID NO: 2490729 - RNA, 19 nt, Human
uugcuauuguaaauauguu

SEQ ID NO: 2490730 - RNA, 15 nt, Human
uugcuauuguaaaua

SEQ ID NO: 2490731 - RNA, 17 nt, Human
uugcucaaaaaaugagc

SEQ ID NO: 2490732 - RNA, 15 nt, Human
aucuugucucugggc

SEQ ID NO: 2490733 - RNA, 23 nt, Human
aucuugucucaaugcucauaacg

SEQ ID NO: 2490734 - RNA, 14 nt, Human
aucuugucucuggg

SEQ ID NO: 2490735 - RNA, 20 nt, Human
aucuugucucaaugcucaua

SEQ ID NO: 2490736 - RNA, 16 nt, Human
aucuugucucaaugcu

SEQ ID NO: 2490737 - RNA, 15 nt, Human
aucuugucucaaugc

SEQ ID NO: 2490738 - RNA, 14 nt, Human
aucuugucucaaug

SEQ ID NO: 2490739 - RNA, 13 nt, Human
aucuugucucaau

SEQ ID NO: 2490740 - RNA, 19 nt, Human
uugcucaaaucuauucaga

SEQ ID NO: 2490741 - RNA, 16 nt, Human
uugcucaaaaaucugu

SEQ ID NO: 2490742 - RNA, 18 nt, Human
uugcucaaaaaaugagcu

SEQ ID NO: 2490743 - RNA, 13 nt, Human
uugcucaccuggg

SEQ ID NO: 2490744 - RNA, 15 nt, Human
uugcucaccuggggu

SEQ ID NO: 2490745 - RNA, 21 nt, Human
uugcucuccccugcccugcug

SEQ ID NO: 2490746 - RNA, 13 nt, Human
uugcucagucucc

SEQ ID NO: 2490747 - RNA, 12 nt, Human
uugcuccuugac

SEQ ID NO: 2490748 - RNA, 16 nt, Human
uugcucucccucuucu

SEQ ID NO: 2490749 - RNA, 13 nt, Human
uugcucucccucu

SEQ ID NO: 2490750 - RNA, 23 nt, Human
uugcucucccgguucuuccagug

SEQ ID NO: 2490751 - RNA, 22 nt, Human
uugcucucccgguucuuccagu

SEQ ID NO: 2490752 - RNA, 21 nt, Human
uugcucucccgguucuuccag

SEQ ID NO: 2490753 - RNA, 20 nt, Human
uugcucucccgguucuucca

SEQ ID NO: 2490754 - RNA, 13 nt, Human
uugcucucccggu

SEQ ID NO: 2490755 - RNA, 17 nt, Human
uugcucugcaggcaccu

SEQ ID NO: 2490756 - RNA, 15 nt, Human
uugcucugcaggcac

SEQ ID NO: 2490757 - RNA, 13 nt, Human
uugcucugcaccc

SEQ ID NO: 2490758 - RNA, 12 nt, Human
uugcucugcacc

SEQ ID NO: 2490759 - RNA, 23 nt, Human
uugcucucccucuucucaagugc

SEQ ID NO: 2490760 - RNA, 18 nt, Human
uugcucucccucuucuca

SEQ ID NO: 2490761 - RNA, 20 nt, Human
uugcucucuggccuuuuccu

SEQ ID NO: 2490762 - RNA, 13 nt, Human
uugcuugaaacca

SEQ ID NO: 2490763 - RNA, 20 nt, Human
uugcucugccaacuucuuca

SEQ ID NO: 2490764 - RNA, 22 nt, Human
uugcuucuucuccuauguguaa

SEQ ID NO: 2490765 - RNA, 11 nt, Human
auccuccugca

SEQ ID NO: 2490766 - RNA, 14 nt, Human
auccuccucccacc

SEQ ID NO: 2490767 - RNA, 23 nt, Human
auccuagccuuauccucugaucu

SEQ ID NO: 2490768 - RNA, 20 nt, Human
auccucucaaccaccuuuca

SEQ ID NO: 2490769 - RNA, 18 nt, Human
auccucugagugugacca

SEQ ID NO: 2490770 - RNA, 12 nt, Human
auccucugaucu

SEQ ID NO: 2490771 - RNA, 10 nt, Human
auccucuggc

SEQ ID NO: 2490772 - RNA, 17 nt, Human
auccucuguacagagcc

SEQ ID NO: 2490773 - RNA, 16 nt, Human
auccucuguacagagc

SEQ ID NO: 2490774 - RNA, 20 nt, Human
auccucuguaaacuuuuugu

SEQ ID NO: 2490775 - RNA, 19 nt, Human
aucgugccguuacucucca

SEQ ID NO: 2490776 - RNA, 14 nt, Human
auccucuggcuggc

SEQ ID NO: 2490777 - RNA, 23 nt, Human
aucgugccguuacucuccaaccu

SEQ ID NO: 2490778 - RNA, 12 nt, Human
aucgugcuaaau

SEQ ID NO: 2490779 - RNA, 15 nt, Human
aucgugcuaaauuuu

SEQ ID NO: 2490780 - RNA, 17 nt, Human
aucgugcuaaauuuuca

SEQ ID NO: 2490781 - RNA, 12 nt, Human
aucguggagaca

SEQ ID NO: 2490782 - RNA, 16 nt, Human
aucgugcuaaauuuuc

SEQ ID NO: 2490783 - RNA, 22 nt, Human
aucguuaguaucuaacauguau

SEQ ID NO: 2490784 - RNA, 17 nt, Human
aucuaaauggaaccacu

SEQ ID NO: 2490785 - RNA, 18 nt, Human
aucuaaauggaaccacuc

SEQ ID NO: 2490786 - RNA, 15 nt, Human
uugaagccaaagaaa

SEQ ID NO: 2490787 - RNA, 14 nt, Human
uugaagccaaagaa

SEQ ID NO: 2490788 - RNA, 11 nt, Human
uugaagccaaa

SEQ ID NO: 2490789 - RNA, 23 nt, Human
uugaagcauuuuauaaaucgcuu

SEQ ID NO: 2490790 - RNA, 20 nt, Human
uugaagccaaguggggugcu

SEQ ID NO: 2490791 - RNA, 23 nt, Human
uugaagccaagucagcuuugccu

SEQ ID NO: 2490792 - RNA, 13 nt, Human
uugaagccacuga

SEQ ID NO: 2490793 - RNA, 17 nt, Human
uugaagccacugaagcu

SEQ ID NO: 2490794 - RNA, 21 nt, Human
uugaagccacugaagcuggga

SEQ ID NO: 2490795 - RNA, 13 nt, Human
aucuaaauggaac

SEQ ID NO: 2490796 - RNA, 21 nt, Human
aucguuauguguguauaugua

SEQ ID NO: 2490797 - RNA, 15 nt, Human
aucguuccaguuccc

SEQ ID NO: 2490798 - RNA, 14 nt, Human
aucguuaugugugu

SEQ ID NO: 2490799 - RNA, 15 nt, Human
aucguuaugugugua

SEQ ID NO: 2490800 - RNA, 16 nt, Human
aucguuauguguguau

SEQ ID NO: 2490801 - RNA, 18 nt, Human
aucguuauguguguauau

SEQ ID NO: 2490802 - RNA, 14 nt, Human
aucguucucugccu

SEQ ID NO: 2490803 - RNA, 10 nt, Human
uugaaucaau

SEQ ID NO: 2490804 - RNA, 22 nt, Human
uugaaucaauaauauauuuucu

SEQ ID NO: 2490805 - RNA, 14 nt, Human
uugaaucaauaaua

SEQ ID NO: 2490806 - RNA, 13 nt, Human
uugaaucacagua

SEQ ID NO: 2490807 - RNA, 22 nt, Human
uugaauaaugguaccagauaaa

SEQ ID NO: 2490808 - RNA, 19 nt, Human
uugaauaaugguaccagau

SEQ ID NO: 2490809 - RNA, 12 nt, Human
uugaauaauggu

SEQ ID NO: 2490810 - RNA, 12 nt, Human
uugaauaaauaa

SEQ ID NO: 2490811 - RNA, 17 nt, Human
uugacagaacacugucu

SEQ ID NO: 2490812 - RNA, 16 nt, Human
uugacagaacacuguc

SEQ ID NO: 2490813 - RNA, 15 nt, Human
uugacagaacacugu

SEQ ID NO: 2490814 - RNA, 14 nt, Human
uugacagaacacug

SEQ ID NO: 2490815 - RNA, 23 nt, Human
uugaaucaauaauauauuuucug

SEQ ID NO: 2490816 - RNA, 17 nt, Human
uugaaucaguauaaaca

SEQ ID NO: 2490817 - RNA, 23 nt, Human
uugaaucauguaguaucaaauau

SEQ ID NO: 2490818 - RNA, 22 nt, Human
uugaaucauguaguaucaaaua

SEQ ID NO: 2490819 - RNA, 17 nt, Human
uugaauccaugcuuggg

SEQ ID NO: 2490820 - RNA, 19 nt, Human
uugaauccaugcuugggug

SEQ ID NO: 2490821 - RNA, 17 nt, Human
uugaaucuauuuaagua

SEQ ID NO: 2490822 - RNA, 15 nt, Human
uugaauccucucucu

SEQ ID NO: 2490823 - RNA, 15 nt, Human
uugaaucuauuuaag

SEQ ID NO: 2490824 - RNA, 13 nt, Human
uugaagccugccc

SEQ ID NO: 2490825 - RNA, 21 nt, Human
uugaagccugcccuugucuga

SEQ ID NO: 2490826 - RNA, 13 nt, Human
uugaagccuuugu

SEQ ID NO: 2490827 - RNA, 14 nt, Human
uugaagcuaagauu

SEQ ID NO: 2490828 - RNA, 13 nt, Human
uugaagcucuggu

SEQ ID NO: 2490829 - RNA, 17 nt, Human
uugaaggcaaaauugca

SEQ ID NO: 2490830 - RNA, 15 nt, Human
uugaaggcagaaagc

SEQ ID NO: 2490831 - RNA, 17 nt, Human
uugaaggcagaaagcaa

SEQ ID NO: 2490832 - RNA, 12 nt, Human
uugaaggcaaaa

SEQ ID NO: 2490833 - RNA, 15 nt, Human
uugaaggcaaaauug

SEQ ID NO: 2490834 - RNA, 23 nt, Human
uugaagcucuggugacaccagcc

SEQ ID NO: 2490835 - RNA, 17 nt, Human
uugaagggaaauuucag

SEQ ID NO: 2490836 - RNA, 12 nt, Human
uugaauaaacua

SEQ ID NO: 2490837 - RNA, 19 nt, Human
uugaauaaaguugaagcua

SEQ ID NO: 2490838 - RNA, 21 nt, Human
uugaauaaagccugcuuuuua

SEQ ID NO: 2490839 - RNA, 16 nt, Human
uugaauaaaaaugcac

SEQ ID NO: 2490840 - RNA, 20 nt, Human
uugaauaaaaauauguacaa

SEQ ID NO: 2490841 - RNA, 21 nt, Human
uugaauaaaaacuuugcuaaa

SEQ ID NO: 2490842 - RNA, 14 nt, Human
uugacagcuuugcu

SEQ ID NO: 2490843 - RNA, 17 nt, Human
uugacagcuuugcugcu

SEQ ID NO: 2490844 - RNA, 18 nt, Human
uugacagcuuugcugcug

SEQ ID NO: 2490845 - RNA, 19 nt, Human
uugacuguuuuuacccaua

SEQ ID NO: 2490846 - RNA, 18 nt, Human
uugacagaucaagcugug

SEQ ID NO: 2490847 - RNA, 17 nt, Human
uugacagaucaagcugu

SEQ ID NO: 2490848 - RNA, 19 nt, Human
uugacagaucaagcuguga

SEQ ID NO: 2490849 - RNA, 16 nt, Human
uugacuuauuuucucu

SEQ ID NO: 2490850 - RNA, 12 nt, Human
uugacuuucagg

SEQ ID NO: 2490851 - RNA, 21 nt, Human
uugacuugacagaacacuguc

SEQ ID NO: 2490852 - RNA, 15 nt, Human
uugacuuauuuucuc

SEQ ID NO: 2490853 - RNA, 23 nt, Human
uugacuguuuuuacccauauccc

SEQ ID NO: 2490854 - RNA, 20 nt, Human
uugacuugacagaacacugu

SEQ ID NO: 2490855 - RNA, 19 nt, Human
uugacuugacagaacacug

SEQ ID NO: 2490856 - RNA, 12 nt, Human
uugagacagagu

SEQ ID NO: 2490857 - RNA, 13 nt, Human
uugacuuucaggu

SEQ ID NO: 2490858 - RNA, 14 nt, Human
uugacuuucaggua

SEQ ID NO: 2490859 - RNA, 15 nt, Human
uugacuuucagguac

SEQ ID NO: 2490860 - RNA, 21 nt, Human
uugacuuucagguacuaaaua

SEQ ID NO: 2490861 - RNA, 19 nt, Human
uugagacaguuucuuagcu

SEQ ID NO: 2490862 - RNA, 17 nt, Human
uugagacaguuucuuag

SEQ ID NO: 2490863 - RNA, 13 nt, Human
uugagacaguuuc

SEQ ID NO: 2490864 - RNA, 12 nt, Human
uugagacaguuu

SEQ ID NO: 2490865 - RNA, 13 nt, Human
uugagaccagccu

SEQ ID NO: 2490866 - RNA, 15 nt, Human
uugagaccagccugg

SEQ ID NO: 2490867 - RNA, 11 nt, Human
uugacuuuguc

SEQ ID NO: 2490868 - RNA, 12 nt, Human
uugacuuugucu

SEQ ID NO: 2490869 - RNA, 17 nt, Human
uugagauuagagggagg

SEQ ID NO: 2490870 - RNA, 17 nt, Human
uugagauguauuucaac

SEQ ID NO: 2490871 - RNA, 16 nt, Human
uugagauguguucaca

SEQ ID NO: 2490872 - RNA, 13 nt, Human
uugaguagaggcu

SEQ ID NO: 2490873 - RNA, 12 nt, Human
uugagauuagag

SEQ ID NO: 2490874 - RNA, 16 nt, Human
uugagucaaaaaaucu

SEQ ID NO: 2490875 - RNA, 22 nt, Human
uugagucauuauccuugcuaug

SEQ ID NO: 2490876 - RNA, 14 nt, Human
uugagucugugcca

SEQ ID NO: 2490877 - RNA, 22 nt, Human
uugagacaguuucuuagcuuuu

SEQ ID NO: 2490878 - RNA, 14 nt, Human
uugagaccucagcc

SEQ ID NO: 2490879 - RNA, 15 nt, Human
uugagaccucagcca

SEQ ID NO: 2490880 - RNA, 14 nt, Human
uugagacuaguuuu

SEQ ID NO: 2490881 - RNA, 15 nt, Human
uugagaucagccugg

SEQ ID NO: 2490882 - RNA, 16 nt, Human
uugagaucagccuggg

SEQ ID NO: 2490883 - RNA, 17 nt, Human
uugagaccucagccaug

SEQ ID NO: 2490884 - RNA, 19 nt, Human
aucuacacuccagugagac

SEQ ID NO: 2490885 - RNA, 20 nt, Human
aucuacaucuuuuuucacaa

SEQ ID NO: 2490886 - RNA, 17 nt, Human
aucuacaucuuuuuuca

SEQ ID NO: 2490887 - RNA, 14 nt, Human
aucuacaucuuuuu

SEQ ID NO: 2490888 - RNA, 21 nt, Human
aucuacaucuuuuuucacaaa

SEQ ID NO: 2490889 - RNA, 18 nt, Human
aucuacacuccagugaga

SEQ ID NO: 2490890 - RNA, 23 nt, Human
aucuaauauggccacaguagucu

SEQ ID NO: 2490891 - RNA, 15 nt, Human
uugauaccccccucu

SEQ ID NO: 2490892 - RNA, 13 nt, Human
uugauaccccccu

SEQ ID NO: 2490893 - RNA, 21 nt, Human
aucuaauagcggguuacuuuc

SEQ ID NO: 2490894 - RNA, 22 nt, Human
aucuaauaccucugugugcucc

SEQ ID NO: 2490895 - RNA, 22 nt, Human
aucuaauagcggguuacuuuca

SEQ ID NO: 2490896 - RNA, 16 nt, Human
aucuaauauggccaca

SEQ ID NO: 2490897 - RNA, 18 nt, Human
aucuaauauguaacaagc

SEQ ID NO: 2490898 - RNA, 22 nt, Human
uugauaauguuaaauuuguaag

SEQ ID NO: 2490899 - RNA, 21 nt, Human
uugauaauguuaaauuuguaa

SEQ ID NO: 2490900 - RNA, 20 nt, Human
uugauaauguuaaauuugua

SEQ ID NO: 2490901 - RNA, 19 nt, Human
uugauaauguuaaauuugu

SEQ ID NO: 2490902 - RNA, 18 nt, Human
uugauaauguuaaauuug

SEQ ID NO: 2490903 - RNA, 15 nt, Human
uugauaauguuaaau

SEQ ID NO: 2490904 - RNA, 14 nt, Human
uugauaauguuaaa

SEQ ID NO: 2490905 - RNA, 23 nt, Human
uugauaauugcauucaucuugug

SEQ ID NO: 2490906 - RNA, 15 nt, Human
uugauaauugcauuc

SEQ ID NO: 2490907 - RNA, 13 nt, Human
uugauaauguuaa

SEQ ID NO: 2490908 - RNA, 18 nt, Human
uugaguuuucuucuguga

SEQ ID NO: 2490909 - RNA, 19 nt, Human
uugaguuuucuucugugau

SEQ ID NO: 2490910 - RNA, 14 nt, Human
uugaguuuucagug

SEQ ID NO: 2490911 - RNA, 19 nt, Human
uugaguuuucaguggggca

SEQ ID NO: 2490912 - RNA, 20 nt, Human
uugaguuuuauuuauuuuau

SEQ ID NO: 2490913 - RNA, 16 nt, Human
uugaguuuuauuuauu

SEQ ID NO: 2490914 - RNA, 23 nt, Human
uugaguuugucgcucaugugugc

SEQ ID NO: 2490915 - RNA, 11 nt, Human
uugaguuuguc

SEQ ID NO: 2490916 - RNA, 22 nt, Human
uugaguuuccucaggcugcugg

SEQ ID NO: 2490917 - RNA, 12 nt, Human
uugagugauuau

SEQ ID NO: 2490918 - RNA, 19 nt, Human
uugaguuuccucaggcugc

SEQ ID NO: 2490919 - RNA, 16 nt, Human
uugaguucagguagcu

SEQ ID NO: 2490920 - RNA, 20 nt, Human
uugaguugauucagcucugc

SEQ ID NO: 2490921 - RNA, 20 nt, Human
uugagugaagcugggagaac

SEQ ID NO: 2490922 - RNA, 20 nt, Human
uugagugacucgaggguugg

SEQ ID NO: 2490923 - RNA, 14 nt, Human
uugagugacucgag

SEQ ID NO: 2490924 - RNA, 16 nt, Human
aucugaaaauguaugu

SEQ ID NO: 2490925 - RNA, 19 nt, Human
aucugaaaauguaugugua

SEQ ID NO: 2490926 - RNA, 20 nt, Human
aucugaaaauguauguguaa

SEQ ID NO: 2490927 - RNA, 22 nt, Human
aucugaaaauguauguguaagu

SEQ ID NO: 2490928 - RNA, 18 nt, Human
aucucuugagccugggag

SEQ ID NO: 2490929 - RNA, 14 nt, Human
aucugaaaauguau

SEQ ID NO: 2490930 - RNA, 14 nt, Human
aucucuucuuuuaa

SEQ ID NO: 2490931 - RNA, 20 nt, Human
aucucuucuuuuggcuucca

SEQ ID NO: 2490932 - RNA, 15 nt, Human
aucucuugagccugg

SEQ ID NO: 2490933 - RNA, 17 nt, Human
aucucccccagccccau

SEQ ID NO: 2490934 - RNA, 16 nt, Human
aucucccccagcccca

SEQ ID NO: 2490935 - RNA, 21 nt, Human
aucucuucuggguuccuuccu

SEQ ID NO: 2490936 - RNA, 19 nt, Human
aucuccaccugcucccagg

SEQ ID NO: 2490937 - RNA, 14 nt, Human
aucucccccagccc

SEQ ID NO: 2490938 - RNA, 15 nt, Human
aucucccccagcccc

SEQ ID NO: 2490939 - RNA, 15 nt, Human
aucuccaccugcucc

SEQ ID NO: 2490940 - RNA, 13 nt, Human
aucuccaccugcu

SEQ ID NO: 2490941 - RNA, 22 nt, Human
aucuccacccccagcugcuugu

SEQ ID NO: 2490942 - RNA, 21 nt, Human
aucuccacccccagcugcuug

SEQ ID NO: 2490943 - RNA, 19 nt, Human
aucuccacccccagcugcu

SEQ ID NO: 2490944 - RNA, 15 nt, Human
aucuccacccccagc

SEQ ID NO: 2490945 - RNA, 12 nt, Human
aucuccaaggac

SEQ ID NO: 2490946 - RNA, 16 nt, Human
aucuccaaggaccagg

SEQ ID NO: 2490947 - RNA, 19 nt, Human
aucuccacagucaaagaag

SEQ ID NO: 2490948 - RNA, 18 nt, Human
aucuccaagaaugcugaa

SEQ ID NO: 2490949 - RNA, 17 nt, Human
aucuccaagaaugcuga

SEQ ID NO: 2490950 - RNA, 16 nt, Human
aucuccaagaaugcug

SEQ ID NO: 2490951 - RNA, 15 nt, Human
aucuccaagaaugcu

SEQ ID NO: 2490952 - RNA, 22 nt, Human
aucuccaagaaugcugaaacca

SEQ ID NO: 2490953 - RNA, 20 nt, Human
aucuccaagaaugcugaaac

SEQ ID NO: 2490954 - RNA, 18 nt, Human
aucuccaagaccagagau

SEQ ID NO: 2490955 - RNA, 19 nt, Human
aucucauguaucaucugga

SEQ ID NO: 2490956 - RNA, 16 nt, Human
aucucauguaucaucu

SEQ ID NO: 2490957 - RNA, 16 nt, Human
aucucauugcuuacaa

SEQ ID NO: 2490958 - RNA, 17 nt, Human
aucucauugcuuacaag

SEQ ID NO: 2490959 - RNA, 14 nt, Human
aucucauuggaccc

SEQ ID NO: 2490960 - RNA, 15 nt, Human
aucucauuggacccu

SEQ ID NO: 2490961 - RNA, 19 nt, Human
aucucauuggacccuucca

SEQ ID NO: 2490962 - RNA, 20 nt, Human
aucucauuggacccuuccau

SEQ ID NO: 2490963 - RNA, 14 nt, Human
aucucauuuccaag

SEQ ID NO: 2490964 - RNA, 14 nt, Human
aucuccaaaauaaa

SEQ ID NO: 2490965 - RNA, 17 nt, Human
aucuccaaaauaaaacu

SEQ ID NO: 2490966 - RNA, 20 nt, Human
aucuccaaaauaaaacuuuu

SEQ ID NO: 2490967 - RNA, 21 nt, Human
aucuccaaaauaaaacuuuuu

SEQ ID NO: 2490968 - RNA, 14 nt, Human
aucuccaagaaugc

SEQ ID NO: 2490969 - RNA, 13 nt, Human
aucuccaagaaug

SEQ ID NO: 2490970 - RNA, 13 nt, Human
aucuccaaaauaa

SEQ ID NO: 2490971 - RNA, 21 nt, Human
aucucaggggcuguuugagga

SEQ ID NO: 2490972 - RNA, 20 nt, Human
aucucaggggcuguuugagg

SEQ ID NO: 2490973 - RNA, 17 nt, Human
aucucaggggcuguuug

SEQ ID NO: 2490974 - RNA, 23 nt, Human
aucucaggggccagaggaacugu

SEQ ID NO: 2490975 - RNA, 17 nt, Human
aucucaggggccagagg

SEQ ID NO: 2490976 - RNA, 16 nt, Human
aucucaggggccagag

SEQ ID NO: 2490977 - RNA, 15 nt, Human
aucucaggggccaga

SEQ ID NO: 2490978 - RNA, 20 nt, Human
aucuagagcuugaugccagu

SEQ ID NO: 2490979 - RNA, 16 nt, Human
aucucagggccugguc

SEQ ID NO: 2490980 - RNA, 21 nt, Human
aucucagucaugcauaaauau

SEQ ID NO: 2490981 - RNA, 21 nt, Human
aucucaugccccuggcuggga

SEQ ID NO: 2490982 - RNA, 24 nt, Human
aucucauggagaagcagaaauaca

SEQ ID NO: 2490983 - RNA, 22 nt, Human
aucucauggagaagcagaaaua

SEQ ID NO: 2490984 - RNA, 23 nt, Human
aucucaugccccuggcugggacg

SEQ ID NO: 2490985 - RNA, 20 nt, Human
aucucagucaugcauaaaua

SEQ ID NO: 2490986 - RNA, 18 nt, Human
aucucagucaugcauaaa

SEQ ID NO: 2490987 - RNA, 16 nt, Human
aucucagucaugcaua

SEQ ID NO: 2490988 - RNA, 15 nt, Human
aucucagucaugcau

SEQ ID NO: 2490989 - RNA, 16 nt, Human
aucucagguucuccuu

SEQ ID NO: 2490990 - RNA, 14 nt, Human
aucucagggccugg

SEQ ID NO: 2490991 - RNA, 17 nt, Human
aucuagaggcuuccuuc

SEQ ID NO: 2490992 - RNA, 19 nt, Human
aucuagaggcuuccuucau

SEQ ID NO: 2490993 - RNA, 18 nt, Human
aucuagagcuugaugcca

SEQ ID NO: 2490994 - RNA, 21 nt, Human
aucuagacucaagguucccag

SEQ ID NO: 2490995 - RNA, 19 nt, Human
aucuagacccaucuucuuu

SEQ ID NO: 2490996 - RNA, 21 nt, Human
aucuagaauguguuuucugaa

SEQ ID NO: 2490997 - RNA, 21 nt, Human
aucuagaacacaggcaaaauc

SEQ ID NO: 2490998 - RNA, 12 nt, Human
aucuagaagacu

SEQ ID NO: 2490999 - RNA, 16 nt, Human
aucugacauccccacu

SEQ ID NO: 2491000 - RNA, 18 nt, Human
aucugacaugauuccuuc

SEQ ID NO: 2491001 - RNA, 19 nt, Human
aucugacaugauuccuucc

SEQ ID NO: 2491002 - RNA, 20 nt, Human
aucugacaugauuccuuccu

SEQ ID NO: 2491003 - RNA, 23 nt, Human
aucugacaugauuccuuccuguu

SEQ ID NO: 2491004 - RNA, 14 nt, Human
aucugaccagcagc

SEQ ID NO: 2491005 - RNA, 15 nt, Human
aucugaccagcagcg

SEQ ID NO: 2491006 - RNA, 16 nt, Human
aucugaccagcagcgc

SEQ ID NO: 2491007 - RNA, 23 nt, Human
uugauguuuuaaggaugcuugua

SEQ ID NO: 2491008 - RNA, 13 nt, Human
uugauuaaauucu

SEQ ID NO: 2491009 - RNA, 12 nt, Human
aucugacccagu

SEQ ID NO: 2491010 - RNA, 20 nt, Human
uugauguuuguggccucaga

SEQ ID NO: 2491011 - RNA, 22 nt, Human
uugauguuuguggccucagaau

SEQ ID NO: 2491012 - RNA, 13 nt, Human
aucugaaauguga

SEQ ID NO: 2491013 - RNA, 16 nt, Human
aucugacaucucugca

SEQ ID NO: 2491014 - RNA, 20 nt, Human
aucugacaucucugcaaucu

SEQ ID NO: 2491015 - RNA, 15 nt, Human
aucugacaucucugc

SEQ ID NO: 2491016 - RNA, 14 nt, Human
aucugacaucccca

SEQ ID NO: 2491017 - RNA, 23 nt, Human
aucugaaaauguauguguaagua

SEQ ID NO: 2491018 - RNA, 14 nt, Human
aucugaaaauguga

SEQ ID NO: 2491019 - RNA, 12 nt, Human
aucugaaaaugu

SEQ ID NO: 2491020 - RNA, 22 nt, Human
uugauuaagaucucagugguua

SEQ ID NO: 2491021 - RNA, 14 nt, Human
uugauuaaauucuu

SEQ ID NO: 2491022 - RNA, 18 nt, Human
uugauuaauccagaauaa

SEQ ID NO: 2491023 - RNA, 20 nt, Human
aucugaccagcagcgccuuu

SEQ ID NO: 2491024 - RNA, 21 nt, Human
uugauuauccauauugaguca

SEQ ID NO: 2491025 - RNA, 13 nt, Human
uugauuaugcaua

SEQ ID NO: 2491026 - RNA, 13 nt, Human
uugauuaugcaga

SEQ ID NO: 2491027 - RNA, 16 nt, Human
uugauuauuagccagg

SEQ ID NO: 2491028 - RNA, 22 nt, Human
uugcaagccagauuuuccugaa

SEQ ID NO: 2491029 - RNA, 20 nt, Human
uugauuauucugauuccacu

SEQ ID NO: 2491030 - RNA, 15 nt, Human
uugauuauucagugu

SEQ ID NO: 2491031 - RNA, 17 nt, Human
uugauuauucaguguca

SEQ ID NO: 2491032 - RNA, 13 nt, Human
uugcaagggaaaa

SEQ ID NO: 2491033 - RNA, 19 nt, Human
uugcaagggaaaagucucu

SEQ ID NO: 2491034 - RNA, 14 nt, Human
uugcaaggccgcug

SEQ ID NO: 2491035 - RNA, 17 nt, Human
uugcaaggccgcuguuc

SEQ ID NO: 2491036 - RNA, 23 nt, Human
uugcaaggccgcuguucacccac

SEQ ID NO: 2491037 - RNA, 13 nt, Human
uugcaaggaagcc

SEQ ID NO: 2491038 - RNA, 12 nt, Human
uugauuauucug

SEQ ID NO: 2491039 - RNA, 12 nt, Human
uugcaaggaagc

SEQ ID NO: 2491040 - RNA, 19 nt, Human
uugcaauggcagccuuggc

SEQ ID NO: 2491041 - RNA, 17 nt, Human
uugcaauggcagccuug

SEQ ID NO: 2491042 - RNA, 22 nt, Human
uugcaagggaaaagucucuugu

SEQ ID NO: 2491043 - RNA, 16 nt, Human
uugcaauggcagccuu

SEQ ID NO: 2491044 - RNA, 14 nt, Human
uugcaccacugcac

SEQ ID NO: 2491045 - RNA, 15 nt, Human
uugcaccacugcacu

SEQ ID NO: 2491046 - RNA, 16 nt, Human
uugcaccacugcacuc

SEQ ID NO: 2491047 - RNA, 18 nt, Human
uugcaccacugcacucca

SEQ ID NO: 2491048 - RNA, 15 nt, Human
uugcauuuaaaacag

SEQ ID NO: 2491049 - RNA, 20 nt, Human
uugcauuuaaaacagacacu

SEQ ID NO: 2491050 - RNA, 21 nt, Human
uugcauuuaaaacagacacug

SEQ ID NO: 2491051 - RNA, 21 nt, Human
uugcauugaccgcgacuaauu

SEQ ID NO: 2491052 - RNA, 14 nt, Human
uugcauugaauaua

SEQ ID NO: 2491053 - RNA, 23 nt, Human
uugcauugaacacaaacuguaaa

SEQ ID NO: 2491054 - RNA, 17 nt, Human
uugcauugaauauauua

SEQ ID NO: 2491055 - RNA, 14 nt, Human
uugcauugaacaca

SEQ ID NO: 2491056 - RNA, 15 nt, Human
uugcauugaacacaa

SEQ ID NO: 2491057 - RNA, 18 nt, Human
uugcauugaacacaaacu

SEQ ID NO: 2491058 - RNA, 22 nt, Human
uugcauugaacacaaacuguaa

SEQ ID NO: 2491059 - RNA, 20 nt, Human
uugcaaugguguugcccuga

SEQ ID NO: 2491060 - RNA, 14 nt, Human
uugcauauaacuua

SEQ ID NO: 2491061 - RNA, 17 nt, Human
uugcauauaacuuauau

SEQ ID NO: 2491062 - RNA, 22 nt, Human
uugcauauaacuuauauuguaa

SEQ ID NO: 2491063 - RNA, 19 nt, Human
uugcaauggcuauauggca

SEQ ID NO: 2491064 - RNA, 15 nt, Human
uugcaagucauggcu

SEQ ID NO: 2491065 - RNA, 23 nt, Human
uugcauaguaccaaucauuuuaa

SEQ ID NO: 2491066 - RNA, 21 nt, Human
uugcaaguauguuuuagcaug

SEQ ID NO: 2491067 - RNA, 22 nt, Human
uugcaaguauguuuuagcaugu

SEQ ID NO: 2491068 - RNA, 13 nt, Human
uugcaucaauuuu

SEQ ID NO: 2491069 - RNA, 14 nt, Human
uugcauauguauga

SEQ ID NO: 2491070 - RNA, 23 nt, Human
uugcauauaacuuauauuguaag

SEQ ID NO: 2491071 - RNA, 14 nt, Human
uugcauauauacau

SEQ ID NO: 2491072 - RNA, 19 nt, Human
uuccucugcagcugaccuc

SEQ ID NO: 2491073 - RNA, 17 nt, Human
uuccucugcagcugacc

SEQ ID NO: 2491074 - RNA, 13 nt, Human
uuccucugcagcu

SEQ ID NO: 2491075 - RNA, 10 nt, Human
uuccucugca

SEQ ID NO: 2491076 - RNA, 12 nt, Human
uuccucugccug

SEQ ID NO: 2491077 - RNA, 22 nt, Human
uuccucugcagcugaccucugu

SEQ ID NO: 2491078 - RNA, 21 nt, Human
uuccucugaggcugaaauuca

SEQ ID NO: 2491079 - RNA, 21 nt, Human
uuccucugaggcuggauccua

SEQ ID NO: 2491080 - RNA, 13 nt, Human
uuccucugaggcu

SEQ ID NO: 2491081 - RNA, 14 nt, Human
uuccucugagccuu

SEQ ID NO: 2491082 - RNA, 17 nt, Human
uuccucugagccuuggg

SEQ ID NO: 2491083 - RNA, 20 nt, Human
uuccuacaagagcagccugu

SEQ ID NO: 2491084 - RNA, 22 nt, Human
uuccuacaagagcagccugugg

SEQ ID NO: 2491085 - RNA, 23 nt, Human
uuccuacaagagcagccuguggc

SEQ ID NO: 2491086 - RNA, 16 nt, Human
uuccuacaaagauguu

SEQ ID NO: 2491087 - RNA, 17 nt, Human
uuccuaauccucuagga

SEQ ID NO: 2491088 - RNA, 16 nt, Human
uuccuaauuccacagc

SEQ ID NO: 2491089 - RNA, 17 nt, Human
uuccuaauuccacagcu

SEQ ID NO: 2491090 - RNA, 18 nt, Human
uuccuaauuccacagcug

SEQ ID NO: 2491091 - RNA, 23 nt, Human
uuccuaauuuuagugacagcucu

SEQ ID NO: 2491092 - RNA, 14 nt, Human
uuccuaauuuuagu

SEQ ID NO: 2491093 - RNA, 13 nt, Human
uuccuaauuuuag

SEQ ID NO: 2491094 - RNA, 15 nt, Human
uuccugaagaaccag

SEQ ID NO: 2491095 - RNA, 13 nt, Human
uuccucuuugcuu

SEQ ID NO: 2491096 - RNA, 16 nt, Human
uuccugaagaaccagu

SEQ ID NO: 2491097 - RNA, 19 nt, Human
uuccugaagaaccaguccc

SEQ ID NO: 2491098 - RNA, 18 nt, Human
uuccugaagaauugaaaa

SEQ ID NO: 2491099 - RNA, 17 nt, Human
uuccucuuugcauggaa

SEQ ID NO: 2491100 - RNA, 15 nt, Human
uuccucuuugcaugg

SEQ ID NO: 2491101 - RNA, 12 nt, Human
uuccucuuugca

SEQ ID NO: 2491102 - RNA, 14 nt, Human
uuccugaaccgaug

SEQ ID NO: 2491103 - RNA, 16 nt, Human
uuccucugccugcccc

SEQ ID NO: 2491104 - RNA, 15 nt, Human
uuccucugccugccc

SEQ ID NO: 2491105 - RNA, 14 nt, Human
uuccucugccugcc

SEQ ID NO: 2491106 - RNA, 13 nt, Human
uuccucugccugc

SEQ ID NO: 2491107 - RNA, 13 nt, Human
uuccucuuuccau

SEQ ID NO: 2491108 - RNA, 17 nt, Human
uuccucuuuccaucuac

SEQ ID NO: 2491109 - RNA, 22 nt, Human
uuccucuuuccaucuacccucc

SEQ ID NO: 2491110 - RNA, 14 nt, Human
uuccggcuccugug

SEQ ID NO: 2491111 - RNA, 17 nt, Human
uuccguaacccaacucu

SEQ ID NO: 2491112 - RNA, 18 nt, Human
uuccguagccagcugcuc

SEQ ID NO: 2491113 - RNA, 18 nt, Human
uuccgugacgucacugga

SEQ ID NO: 2491114 - RNA, 17 nt, Human
uuccgugaaaacggagc

SEQ ID NO: 2491115 - RNA, 14 nt, Human
uuccguuaaaauac

SEQ ID NO: 2491116 - RNA, 16 nt, Human
uuccguuaaaauacca

SEQ ID NO: 2491117 - RNA, 19 nt, Human
uuccguagguuauuuucag

SEQ ID NO: 2491118 - RNA, 15 nt, Human
uucccucaucucucc

SEQ ID NO: 2491119 - RNA, 21 nt, Human
uucccgucccauauccugccu

SEQ ID NO: 2491120 - RNA, 17 nt, Human
uucccucaucucuccuc

SEQ ID NO: 2491121 - RNA, 23 nt, Human
uuccggauuggcuuguguguuuc

SEQ ID NO: 2491122 - RNA, 16 nt, Human
auagcaaacuuggaau

SEQ ID NO: 2491123 - RNA, 22 nt, Human
uucccgcucagcccucccugcc

SEQ ID NO: 2491124 - RNA, 21 nt, Human
uucccgcucagcccucccugc

SEQ ID NO: 2491125 - RNA, 18 nt, Human
uucccgcucagcccuccc

SEQ ID NO: 2491126 - RNA, 16 nt, Human
uucccgcucagcccuc

SEQ ID NO: 2491127 - RNA, 20 nt, Human
uucccucaccuuucccaucu

SEQ ID NO: 2491128 - RNA, 21 nt, Human
uucccucaccuuggcaccaga

SEQ ID NO: 2491129 - RNA, 15 nt, Human
uucccuauuagagaa

SEQ ID NO: 2491130 - RNA, 20 nt, Human
uucccgucccauauccugcc

SEQ ID NO: 2491131 - RNA, 21 nt, Human
uucccggacugcaagcagggc

SEQ ID NO: 2491132 - RNA, 23 nt, Human
uucccguggaacguuuuuccugu

SEQ ID NO: 2491133 - RNA, 23 nt, Human
aucaagggaauguaacugcugaa

SEQ ID NO: 2491134 - RNA, 22 nt, Human
aucaaucaucugugugaaaaug

SEQ ID NO: 2491135 - RNA, 16 nt, Human
aucaaucauuguacag

SEQ ID NO: 2491136 - RNA, 15 nt, Human
aucaaucauuguaca

SEQ ID NO: 2491137 - RNA, 14 nt, Human
aucaaucauuguac

SEQ ID NO: 2491138 - RNA, 13 nt, Human
aucaaucauugua

SEQ ID NO: 2491139 - RNA, 19 nt, Human
aucaaucauuguacaguuu

SEQ ID NO: 2491140 - RNA, 17 nt, Human
aucaaucauuguacagu

SEQ ID NO: 2491141 - RNA, 14 nt, Human
aucaaggcacugcc

SEQ ID NO: 2491142 - RNA, 13 nt, Human
aucaaggcacugc

SEQ ID NO: 2491143 - RNA, 22 nt, Human
aucaagcuucaguuuccugguc

SEQ ID NO: 2491144 - RNA, 16 nt, Human
aucaaggcacugccug

SEQ ID NO: 2491145 - RNA, 15 nt, Human
aucaaggcacugccu

SEQ ID NO: 2491146 - RNA, 21 nt, Human
aucaagcuucaguuuccuggu

SEQ ID NO: 2491147 - RNA, 12 nt, Human
aucaagcuguga

SEQ ID NO: 2491148 - RNA, 11 nt, Human
aucaagcugug

SEQ ID NO: 2491149 - RNA, 20 nt, Human
aucaagcuagaaggccacau

SEQ ID NO: 2491150 - RNA, 16 nt, Human
aucaagcuagaaggcc

SEQ ID NO: 2491151 - RNA, 17 nt, Human
aucaagcuagaaggcca

SEQ ID NO: 2491152 - RNA, 21 nt, Human
aucaauggcgcagugccucug

SEQ ID NO: 2491153 - RNA, 12 nt, Human
aucaaugacaga

SEQ ID NO: 2491154 - RNA, 15 nt, Human
aucaccuuaggcagg

SEQ ID NO: 2491155 - RNA, 14 nt, Human
aucaaugaguaaca

SEQ ID NO: 2491156 - RNA, 21 nt, Human
aucaaucauuguacaguuugu

SEQ ID NO: 2491157 - RNA, 16 nt, Human
aucaauccuuguucag

SEQ ID NO: 2491158 - RNA, 15 nt, Human
aucacggcucacugc

SEQ ID NO: 2491159 - RNA, 14 nt, Human
aucacgcuuuccug

SEQ ID NO: 2491160 - RNA, 13 nt, Human
aucacgccacugc

SEQ ID NO: 2491161 - RNA, 20 nt, Human
aucaccuuaggcagggaagu

SEQ ID NO: 2491162 - RNA, 16 nt, Human
aucaccuuaggcaggg

SEQ ID NO: 2491163 - RNA, 17 nt, Human
aucaccuuaggcaggga

SEQ ID NO: 2491164 - RNA, 18 nt, Human
aucaccuuaggcagggaa

SEQ ID NO: 2491165 - RNA, 18 nt, Human
aucacgcuuuccugaauc

SEQ ID NO: 2491166 - RNA, 21 nt, Human
aucacugaacuuugcugagcc

SEQ ID NO: 2491167 - RNA, 19 nt, Human
aucacggcucacugcagcc

SEQ ID NO: 2491168 - RNA, 18 nt, Human
aucacggcucacugcagc

SEQ ID NO: 2491169 - RNA, 14 nt, Human
aucaacagauaaau

SEQ ID NO: 2491170 - RNA, 18 nt, Human
aucaacaagaguugucuu

SEQ ID NO: 2491171 - RNA, 16 nt, Human
aucaacaaaaauuguc

SEQ ID NO: 2491172 - RNA, 22 nt, Human
aucaaauuucacgucgucuucu

SEQ ID NO: 2491173 - RNA, 21 nt, Human
aucaagaugugacauguuuua

SEQ ID NO: 2491174 - RNA, 14 nt, Human
aucaagcagccaag

SEQ ID NO: 2491175 - RNA, 13 nt, Human
aucaagcccuuua

SEQ ID NO: 2491176 - RNA, 16 nt, Human
aucaagcacagaagga

SEQ ID NO: 2491177 - RNA, 13 nt, Human
aucaacaucuuuu

SEQ ID NO: 2491178 - RNA, 15 nt, Human
aucaacaucuuuucu

SEQ ID NO: 2491179 - RNA, 18 nt, Human
auauuuuuuguuaaauga

SEQ ID NO: 2491180 - RNA, 18 nt, Human
auauuuuuucagaaauau

SEQ ID NO: 2491181 - RNA, 16 nt, Human
auauuuuuauuuuauu

SEQ ID NO: 2491182 - RNA, 18 nt, Human
auauuuuuauauuuaguu

SEQ ID NO: 2491183 - RNA, 20 nt, Human
auauuuuuuauauauacagu

SEQ ID NO: 2491184 - RNA, 20 nt, Human
auauuuuuuguuaaaugauu

SEQ ID NO: 2491185 - RNA, 15 nt, Human
auauuuuuucugaau

SEQ ID NO: 2491186 - RNA, 21 nt, Human
auauuuuuuuaaaauguuaaa

SEQ ID NO: 2491187 - RNA, 20 nt, Human
aucaaauuucacgucgucuu

SEQ ID NO: 2491188 - RNA, 20 nt, Human
auauuuuuaucuuuauauga

SEQ ID NO: 2491189 - RNA, 22 nt, Human
auauuuuuaucuuuauaugaag

SEQ ID NO: 2491190 - RNA, 14 nt, Human
auauuuuuaucuuu

SEQ ID NO: 2491191 - RNA, 15 nt, Human
auauuuuuaucuuua

SEQ ID NO: 2491192 - RNA, 21 nt, Human
uuccuguggauguaaagugau

SEQ ID NO: 2491193 - RNA, 11 nt, Human
uuccugugucu

SEQ ID NO: 2491194 - RNA, 14 nt, Human
uuccugucuuccug

SEQ ID NO: 2491195 - RNA, 24 nt, Human
uuccuguccuucucucaccuccua

SEQ ID NO: 2491196 - RNA, 23 nt, Human
uuccuguccuucucucaccuccu

SEQ ID NO: 2491197 - RNA, 15 nt, Human
uuccugaaccugaug

SEQ ID NO: 2491198 - RNA, 18 nt, Human
aucagggaggucauuuug

SEQ ID NO: 2491199 - RNA, 16 nt, Human
aucagguccucagaga

SEQ ID NO: 2491200 - RNA, 20 nt, Human
aucagguccucagagaauuu

SEQ ID NO: 2491201 - RNA, 17 nt, Human
aucaggguuaguauugu

SEQ ID NO: 2491202 - RNA, 21 nt, Human
aucagggcaaucccaacacau

SEQ ID NO: 2491203 - RNA, 13 nt, Human
aucaggccauugu

SEQ ID NO: 2491204 - RNA, 16 nt, Human
aucaggccauuguccc

SEQ ID NO: 2491205 - RNA, 14 nt, Human
aucaggccaggccc

SEQ ID NO: 2491206 - RNA, 13 nt, Human
aucaggcugaggu

SEQ ID NO: 2491207 - RNA, 16 nt, Human
aucaggcucugccuca

SEQ ID NO: 2491208 - RNA, 21 nt, Human
aucagcaagucucuuuauaug

SEQ ID NO: 2491209 - RNA, 16 nt, Human
aucaggccugccagac

SEQ ID NO: 2491210 - RNA, 15 nt, Human
aucaggcuauguaug

SEQ ID NO: 2491211 - RNA, 18 nt, Human
aucaggccaggcccucug

SEQ ID NO: 2491212 - RNA, 16 nt, Human
aucaggccaggcccuc

SEQ ID NO: 2491213 - RNA, 15 nt, Human
aucaggccaggcccu

SEQ ID NO: 2491214 - RNA, 13 nt, Human
aucagcacgauuu

SEQ ID NO: 2491215 - RNA, 22 nt, Human
aucagaauagccacauuuggaa

SEQ ID NO: 2491216 - RNA, 12 nt, Human
aucagaauucuc

SEQ ID NO: 2491217 - RNA, 14 nt, Human
aucagauugcaugu

SEQ ID NO: 2491218 - RNA, 15 nt, Human
aucagauugcaugug

SEQ ID NO: 2491219 - RNA, 16 nt, Human
aucagauugcauguga

SEQ ID NO: 2491220 - RNA, 18 nt, Human
aucagauugcaugugacu

SEQ ID NO: 2491221 - RNA, 21 nt, Human
aucagauugcaugugacucug

SEQ ID NO: 2491222 - RNA, 21 nt, Human
aucagcaaaccggggccuacu

SEQ ID NO: 2491223 - RNA, 23 nt, Human
aucagcaacaaccagcaucccuu

SEQ ID NO: 2491224 - RNA, 17 nt, Human
uucucaggcaugaacau

SEQ ID NO: 2491225 - RNA, 18 nt, Human
uucucagcucuucugacu

SEQ ID NO: 2491226 - RNA, 14 nt, Human
uucucagcucuucu

SEQ ID NO: 2491227 - RNA, 20 nt, Human
uucucagcucccccuguccc

SEQ ID NO: 2491228 - RNA, 18 nt, Human
uucucagcucccccuguc

SEQ ID NO: 2491229 - RNA, 17 nt, Human
uucucagcucccccugu

SEQ ID NO: 2491230 - RNA, 18 nt, Human
uucucacuccuaccuggu

SEQ ID NO: 2491231 - RNA, 13 nt, Human
uucucaccaggaa

SEQ ID NO: 2491232 - RNA, 12 nt, Human
uucucaccagga

SEQ ID NO: 2491233 - RNA, 16 nt, Human
uucucacuccuaccug

SEQ ID NO: 2491234 - RNA, 14 nt, Human
uucucacuccacca

SEQ ID NO: 2491235 - RNA, 15 nt, Human
uucucacuccaccac

SEQ ID NO: 2491236 - RNA, 16 nt, Human
uucucacuccaccacc

SEQ ID NO: 2491237 - RNA, 23 nt, Human
uucuaggaagaauuuuaaaaaug

SEQ ID NO: 2491238 - RNA, 19 nt, Human
uucuaggaagaauuuuaaa

SEQ ID NO: 2491239 - RNA, 18 nt, Human
uucuaggaagaauuuuaa

SEQ ID NO: 2491240 - RNA, 14 nt, Human
uucuaggaagaauu

SEQ ID NO: 2491241 - RNA, 22 nt, Human
uucucacagugggagccagggc

SEQ ID NO: 2491242 - RNA, 21 nt, Human
uucucacagugggagccaggg

SEQ ID NO: 2491243 - RNA, 19 nt, Human
uucucacagugggagccag

SEQ ID NO: 2491244 - RNA, 13 nt, Human
aucacuuguuguu

SEQ ID NO: 2491245 - RNA, 19 nt, Human
aucacuugagacaaaucua

SEQ ID NO: 2491246 - RNA, 21 nt, Human
aucacuuguacaaaauaaaca

SEQ ID NO: 2491247 - RNA, 17 nt, Human
aucacuuguuguuuuac

SEQ ID NO: 2491248 - RNA, 16 nt, Human
aucacuuucucaguuu

SEQ ID NO: 2491249 - RNA, 22 nt, Human
aucacuugucaauaaaauccau

SEQ ID NO: 2491250 - RNA, 19 nt, Human
aucagaauagccacauuug

SEQ ID NO: 2491251 - RNA, 18 nt, Human
aucagaaguuucucagcu

SEQ ID NO: 2491252 - RNA, 11 nt, Human
aucagaauucu

SEQ ID NO: 2491253 - RNA, 14 nt, Human
aucacuuguacaaa

SEQ ID NO: 2491254 - RNA, 16 nt, Human
aucacuuguacaaaau

SEQ ID NO: 2491255 - RNA, 17 nt, Human
aucacuuguacaaaaua

SEQ ID NO: 2491256 - RNA, 18 nt, Human
aucacuuguacaaaauaa

SEQ ID NO: 2491257 - RNA, 19 nt, Human
uucucagguguugccaaau

SEQ ID NO: 2491258 - RNA, 17 nt, Human
uucucagguguugccaa

SEQ ID NO: 2491259 - RNA, 17 nt, Human
aucacuugaauccuagg

SEQ ID NO: 2491260 - RNA, 21 nt, Human
uucucagggucucugcugccg

SEQ ID NO: 2491261 - RNA, 19 nt, Human
aucacuugaggucaggagu

SEQ ID NO: 2491262 - RNA, 18 nt, Human
uucucagggucucugcug

SEQ ID NO: 2491263 - RNA, 17 nt, Human
uucucagggucucugcu

SEQ ID NO: 2491264 - RNA, 16 nt, Human
uucucagggucucugc

SEQ ID NO: 2491265 - RNA, 13 nt, Human
uucucagggucuc

SEQ ID NO: 2491266 - RNA, 20 nt, Human
uucucagggucucugcugcc

SEQ ID NO: 2491267 - RNA, 19 nt, Human
uucucagggucucugcugc

SEQ ID NO: 2491268 - RNA, 16 nt, Human
uucucagguguugcca

SEQ ID NO: 2491269 - RNA, 18 nt, Human
uucucagggcuccugccu

SEQ ID NO: 2491270 - RNA, 17 nt, Human
uucucagggcuccugcc

SEQ ID NO: 2491271 - RNA, 16 nt, Human
uucucagggcuccugc

SEQ ID NO: 2491272 - RNA, 15 nt, Human
uucucagggcuccug

SEQ ID NO: 2491273 - RNA, 13 nt, Human
uucucagggcucc

SEQ ID NO: 2491274 - RNA, 12 nt, Human
uucucagggcuc

SEQ ID NO: 2491275 - RNA, 17 nt, Human
uucucaggccaucauca

SEQ ID NO: 2491276 - RNA, 20 nt, Human
uucucaggcucugcccugcc

SEQ ID NO: 2491277 - RNA, 21 nt, Human
uucuagcccgaauacaaacac

SEQ ID NO: 2491278 - RNA, 18 nt, Human
uucuagcccgaauacaaa

SEQ ID NO: 2491279 - RNA, 18 nt, Human
uucuagcccauggacuuc

SEQ ID NO: 2491280 - RNA, 16 nt, Human
uucuagcauggcugcc

SEQ ID NO: 2491281 - RNA, 21 nt, Human
uucuagcuguugagcuguuuu

SEQ ID NO: 2491282 - RNA, 20 nt, Human
uucuagcuguugagcuguuu

SEQ ID NO: 2491283 - RNA, 22 nt, Human
uucuagcuagaaauaugauuuu

SEQ ID NO: 2491284 - RNA, 19 nt, Human
uucuagcuagaaauaugau

SEQ ID NO: 2491285 - RNA, 12 nt, Human
uucuagcuguug

SEQ ID NO: 2491286 - RNA, 17 nt, Human
uucuagcuaauguaaua

SEQ ID NO: 2491287 - RNA, 18 nt, Human
uucuagcuagaaauauga

SEQ ID NO: 2491288 - RNA, 17 nt, Human
uucuagcuagaaauaug

SEQ ID NO: 2491289 - RNA, 16 nt, Human
uucuagcuagaaauau

SEQ ID NO: 2491290 - RNA, 17 nt, Human
uucuagcacuggccugc

SEQ ID NO: 2491291 - RNA, 16 nt, Human
uucuagcacuggccug

SEQ ID NO: 2491292 - RNA, 15 nt, Human
uucuagcacuggccu

SEQ ID NO: 2491293 - RNA, 14 nt, Human
uucuagcacuggcc

SEQ ID NO: 2491294 - RNA, 12 nt, Human
uucuagcacugg

SEQ ID NO: 2491295 - RNA, 15 nt, Human
uucuaaguaaaacca

SEQ ID NO: 2491296 - RNA, 16 nt, Human
uucuaaguaaaaccac

SEQ ID NO: 2491297 - RNA, 23 nt, Human
uucuaagaagugaaaaucuacac

SEQ ID NO: 2491298 - RNA, 13 nt, Human
uucuaagaaguga

SEQ ID NO: 2491299 - RNA, 13 nt, Human
uucuaagagaagu

SEQ ID NO: 2491300 - RNA, 12 nt, Human
uucuaagagaag

SEQ ID NO: 2491301 - RNA, 20 nt, Human
uucuaaaugcauauccugag

SEQ ID NO: 2491302 - RNA, 15 nt, Human
uucggccuccauccu

SEQ ID NO: 2491303 - RNA, 19 nt, Human
uucuaaaggcuaccuuugu

SEQ ID NO: 2491304 - RNA, 15 nt, Human
uucggaguugggggu

SEQ ID NO: 2491305 - RNA, 20 nt, Human
uucuaaaggcuaccuuugua

SEQ ID NO: 2491306 - RNA, 21 nt, Human
uucuaaaggcuaccuuuguau

SEQ ID NO: 2491307 - RNA, 21 nt, Human
uucuaaaucuccaaaauaaaa

SEQ ID NO: 2491308 - RNA, 15 nt, Human
uucuaaaugaauguu

SEQ ID NO: 2491309 - RNA, 12 nt, Human
uucuaaaugaau

SEQ ID NO: 2491310 - RNA, 20 nt, Human
uucuaaagguguugucccuu

SEQ ID NO: 2491311 - RNA, 14 nt, Human
uucuaaaugaagug

SEQ ID NO: 2491312 - RNA, 21 nt, Human
uucuaaaugaauguuuacacu

SEQ ID NO: 2491313 - RNA, 18 nt, Human
uucuaaaugaauguuuac

SEQ ID NO: 2491314 - RNA, 22 nt, Human
uucuaaagguguugucccuucu

SEQ ID NO: 2491315 - RNA, 13 nt, Human
uucuaaaugcaua

SEQ ID NO: 2491316 - RNA, 23 nt, Human
uucuaaaugcauauccugagcca

SEQ ID NO: 2491317 - RNA, 19 nt, Human
uucgcuccugugucuugca

SEQ ID NO: 2491318 - RNA, 15 nt, Human
uucgcuccugugucu

SEQ ID NO: 2491319 - RNA, 10 nt, Human
aucacuggag

SEQ ID NO: 2491320 - RNA, 17 nt, Human
aucacuggagcaccagg

SEQ ID NO: 2491321 - RNA, 19 nt, Human
aucacuggagcaccaggca

SEQ ID NO: 2491322 - RNA, 23 nt, Human
aucacuggagcaccaggcacgaa

SEQ ID NO: 2491323 - RNA, 12 nt, Human
aucacuggagcc

SEQ ID NO: 2491324 - RNA, 13 nt, Human
aucacuggagccc

SEQ ID NO: 2491325 - RNA, 14 nt, Human
aucacuggagccca

SEQ ID NO: 2491326 - RNA, 15 nt, Human
aucacuggagcccag

SEQ ID NO: 2491327 - RNA, 12 nt, Human
uucgcugcaacc

SEQ ID NO: 2491328 - RNA, 16 nt, Human
aucacuggagcccagg

SEQ ID NO: 2491329 - RNA, 17 nt, Human
aucacuggagcccagga

SEQ ID NO: 2491330 - RNA, 22 nt, Human
uucgcuucuugccucugugcug

SEQ ID NO: 2491331 - RNA, 13 nt, Human
aucacuggaugaa

SEQ ID NO: 2491332 - RNA, 12 nt, Human
uucggaaaccuu

SEQ ID NO: 2491333 - RNA, 14 nt, Human
uucggccuccaucc

SEQ ID NO: 2491334 - RNA, 18 nt, Human
uucggaaaccuuggugua

SEQ ID NO: 2491335 - RNA, 17 nt, Human
uucggauuuggggugga

SEQ ID NO: 2491336 - RNA, 20 nt, Human
uucggcagauacugucucuu

SEQ ID NO: 2491337 - RNA, 22 nt, Human
uucuuuuuugugugauuuaaga

SEQ ID NO: 2491338 - RNA, 17 nt, Human
uugaaagagaaccaguu

SEQ ID NO: 2491339 - RNA, 14 nt, Human
uugaaagagauggc

SEQ ID NO: 2491340 - RNA, 20 nt, Human
uugaaagagaaccaguuuca

SEQ ID NO: 2491341 - RNA, 14 nt, Human
uugaaagaguccua

SEQ ID NO: 2491342 - RNA, 15 nt, Human
uugaaagauucaggu

SEQ ID NO: 2491343 - RNA, 14 nt, Human
uucuuuuuuuguga

SEQ ID NO: 2491344 - RNA, 13 nt, Human
uugaaagaccuuc

SEQ ID NO: 2491345 - RNA, 14 nt, Human
uucuuuuugcuguu

SEQ ID NO: 2491346 - RNA, 13 nt, Human
uucuuuuugcugu

SEQ ID NO: 2491347 - RNA, 23 nt, Human
uucuuuuugcuguuguuucuaaa

SEQ ID NO: 2491348 - RNA, 15 nt, Human
uucuuuguaaugaaa

SEQ ID NO: 2491349 - RNA, 22 nt, Human
uucuuugggaauauuugaaucu

SEQ ID NO: 2491350 - RNA, 13 nt, Human
uucuuugggccag

SEQ ID NO: 2491351 - RNA, 22 nt, Human
uucuuugguggagauaaagauu

SEQ ID NO: 2491352 - RNA, 13 nt, Human
uucuucuguauuu

SEQ ID NO: 2491353 - RNA, 22 nt, Human
uucuucuuccaacguggcccag

SEQ ID NO: 2491354 - RNA, 13 nt, Human
uucuucuucagaa

SEQ ID NO: 2491355 - RNA, 16 nt, Human
uucuucuuuuugcugu

SEQ ID NO: 2491356 - RNA, 15 nt, Human
uucuucuuuuugcug

SEQ ID NO: 2491357 - RNA, 14 nt, Human
uucuucuuccugaa

SEQ ID NO: 2491358 - RNA, 13 nt, Human
uucuucuuccuga

SEQ ID NO: 2491359 - RNA, 13 nt, Human
uucuucuucccuc

SEQ ID NO: 2491360 - RNA, 15 nt, Human
uucuucuucagaaga

SEQ ID NO: 2491361 - RNA, 20 nt, Human
uucuucugaacucaaacuga

SEQ ID NO: 2491362 - RNA, 23 nt, Human
uucuucugaacucaaacugagga

SEQ ID NO: 2491363 - RNA, 20 nt, Human
uucuucugcuucagccuccc

SEQ ID NO: 2491364 - RNA, 17 nt, Human
uucuuugccuguucagu

SEQ ID NO: 2491365 - RNA, 20 nt, Human
uucuuugggaauauuugaau

SEQ ID NO: 2491366 - RNA, 18 nt, Human
uucuuugggaauauuuga

SEQ ID NO: 2491367 - RNA, 20 nt, Human
uucuugaacacucaugcuga

SEQ ID NO: 2491368 - RNA, 14 nt, Human
uucuuugccuguuc

SEQ ID NO: 2491369 - RNA, 18 nt, Human
uucuuugccuguucaguu

SEQ ID NO: 2491370 - RNA, 21 nt, Human
uucuugaacacucaugcugaa

SEQ ID NO: 2491371 - RNA, 15 nt, Human
uucuugaaagcugug

SEQ ID NO: 2491372 - RNA, 14 nt, Human
uucuugaaagcugu

SEQ ID NO: 2491373 - RNA, 13 nt, Human
uucuugaaagcug

SEQ ID NO: 2491374 - RNA, 21 nt, Human
uucuucuuuuugcuucaaaaa

SEQ ID NO: 2491375 - RNA, 17 nt, Human
uucuucuuuuugcuuca

SEQ ID NO: 2491376 - RNA, 23 nt, Human
aucccucauccucauacccaccc

SEQ ID NO: 2491377 - RNA, 21 nt, Human
aucccucauccucauacccac

SEQ ID NO: 2491378 - RNA, 13 nt, Human
aucccucauccuc

SEQ ID NO: 2491379 - RNA, 13 nt, Human
uucuuaaccaucu

SEQ ID NO: 2491380 - RNA, 23 nt, Human
uucuuaaccagaucauugugaaa

SEQ ID NO: 2491381 - RNA, 18 nt, Human
uucuuaagacauguauca

SEQ ID NO: 2491382 - RNA, 14 nt, Human
aucccucauccuca

SEQ ID NO: 2491383 - RNA, 18 nt, Human
aucccaugaacacacugu

SEQ ID NO: 2491384 - RNA, 16 nt, Human
aucccaugaacacacu

SEQ ID NO: 2491385 - RNA, 24 nt, Human
aucccauaugccugggcagaagga

SEQ ID NO: 2491386 - RNA, 22 nt, Human
aucccaggacaccacacccagc

SEQ ID NO: 2491387 - RNA, 21 nt, Human
aucccaggacaccacacccag

SEQ ID NO: 2491388 - RNA, 15 nt, Human
uucuucugcuucagc

SEQ ID NO: 2491389 - RNA, 13 nt, Human
uucuucugcuuca

SEQ ID NO: 2491390 - RNA, 14 nt, Human
uucuucucuagcug

SEQ ID NO: 2491391 - RNA, 18 nt, Human
uucuucuccuauguguaa

SEQ ID NO: 2491392 - RNA, 17 nt, Human
uucuucuccuaugugua

SEQ ID NO: 2491393 - RNA, 15 nt, Human
uucuucuccuaugug

SEQ ID NO: 2491394 - RNA, 14 nt, Human
uucuucucugcugc

SEQ ID NO: 2491395 - RNA, 13 nt, Human
uucuucugaacuc

SEQ ID NO: 2491396 - RNA, 14 nt, Human
uucuucucccucag

SEQ ID NO: 2491397 - RNA, 21 nt, Human
uucuuaaucuuuucacaaaua

SEQ ID NO: 2491398 - RNA, 20 nt, Human
uucuuaaucuuuucacaaau

SEQ ID NO: 2491399 - RNA, 19 nt, Human
uucuuaaucuuuucacaaa

SEQ ID NO: 2491400 - RNA, 13 nt, Human
uucuucucccuca

SEQ ID NO: 2491401 - RNA, 22 nt, Human
uucuuaaguauguuauuuucug

SEQ ID NO: 2491402 - RNA, 20 nt, Human
uucuuaaggauugugauauu

SEQ ID NO: 2491403 - RNA, 22 nt, Human
uucuuaaggauugugauauuuu

SEQ ID NO: 2491404 - RNA, 23 nt, Human
uucuuaagacgugauuuugcugu

SEQ ID NO: 2491405 - RNA, 21 nt, Human
uucuuaagacgugauuuugcu

SEQ ID NO: 2491406 - RNA, 23 nt, Human
uugaaauuauguauguuuacaua

SEQ ID NO: 2491407 - RNA, 21 nt, Human
uugaaauuauguauguuuaca

SEQ ID NO: 2491408 - RNA, 19 nt, Human
uugaaauuauguauguuua

SEQ ID NO: 2491409 - RNA, 18 nt, Human
uugaaauuauguauguuu

SEQ ID NO: 2491410 - RNA, 18 nt, Human
uugaaauuaaccucucac

SEQ ID NO: 2491411 - RNA, 19 nt, Human
uugaaauguguuucuguau

SEQ ID NO: 2491412 - RNA, 18 nt, Human
uugaaauguguuucugua

SEQ ID NO: 2491413 - RNA, 20 nt, Human
uugaaauuaagaaggcaaaa

SEQ ID NO: 2491414 - RNA, 21 nt, Human
uugaaagggguugugaagagg

SEQ ID NO: 2491415 - RNA, 22 nt, Human
uugaaagcuguggccagcuugu

SEQ ID NO: 2491416 - RNA, 19 nt, Human
uugaaaggcauucucugaa

SEQ ID NO: 2491417 - RNA, 20 nt, Human
uugaaaggcauucucugaag

SEQ ID NO: 2491418 - RNA, 21 nt, Human
uugaaaggcauucucugaaga

SEQ ID NO: 2491419 - RNA, 22 nt, Human
uugaaagauucagguauguugc

SEQ ID NO: 2491420 - RNA, 12 nt, Human
uugaaagcugug

SEQ ID NO: 2491421 - RNA, 16 nt, Human
uugaaagcauccaugu

SEQ ID NO: 2491422 - RNA, 17 nt, Human
uugaaauuguauuacaa

SEQ ID NO: 2491423 - RNA, 22 nt, Human
uugaacgcccccccccaccccu

SEQ ID NO: 2491424 - RNA, 17 nt, Human
auccgacugcuuuggac

SEQ ID NO: 2491425 - RNA, 12 nt, Human
auccgaggcagg

SEQ ID NO: 2491426 - RNA, 14 nt, Human
auccgaaucucuuu

SEQ ID NO: 2491427 - RNA, 19 nt, Human
uugaacccgggaggcagag

SEQ ID NO: 2491428 - RNA, 15 nt, Human
uugaaauuguacaua

SEQ ID NO: 2491429 - RNA, 14 nt, Human
auccuacuucucca

SEQ ID NO: 2491430 - RNA, 23 nt, Human
auccuagagauuugguguacaau

SEQ ID NO: 2491431 - RNA, 21 nt, Human
auccuagagauuugguguaca

SEQ ID NO: 2491432 - RNA, 16 nt, Human
auccuaccuguuuugu

SEQ ID NO: 2491433 - RNA, 22 nt, Human
auccuacccucgggcccaccug

SEQ ID NO: 2491434 - RNA, 21 nt, Human
auccuacccucgggcccaccu

SEQ ID NO: 2491435 - RNA, 21 nt, Human
auccuaccccaauuccuugua

SEQ ID NO: 2491436 - RNA, 18 nt, Human
auccuaccaaugcaugca

SEQ ID NO: 2491437 - RNA, 17 nt, Human
auccuaccaaugcaugc

SEQ ID NO: 2491438 - RNA, 16 nt, Human
auccuaccaaugcaug

SEQ ID NO: 2491439 - RNA, 15 nt, Human
auccuaccaaugcau

SEQ ID NO: 2491440 - RNA, 22 nt, Human
auccuacacaccuaagggacau

SEQ ID NO: 2491441 - RNA, 14 nt, Human
auccuaccaaugca

SEQ ID NO: 2491442 - RNA, 16 nt, Human
auccuccucagaucuu

SEQ ID NO: 2491443 - RNA, 11 nt, Human
auccuccuccc

SEQ ID NO: 2491444 - RNA, 22 nt, Human
auccuagccuuauccucugauc

SEQ ID NO: 2491445 - RNA, 21 nt, Human
auccuagccuuauccucugau

SEQ ID NO: 2491446 - RNA, 20 nt, Human
auccuagccuuauccucuga

SEQ ID NO: 2491447 - RNA, 19 nt, Human
auccuagccuuauccucug

SEQ ID NO: 2491448 - RNA, 16 nt, Human
auccuaggcauuugcu

SEQ ID NO: 2491449 - RNA, 18 nt, Human
auccuacaagacacagug

SEQ ID NO: 2491450 - RNA, 19 nt, Human
auccuacaagacacaguga

SEQ ID NO: 2491451 - RNA, 14 nt, Human
auccuacaagacac

SEQ ID NO: 2491452 - RNA, 14 nt, Human
auccuaaaacaaau

SEQ ID NO: 2491453 - RNA, 12 nt, Human
auccuaagcuau

SEQ ID NO: 2491454 - RNA, 15 nt, Human
auccgccagggccca

SEQ ID NO: 2491455 - RNA, 19 nt, Human
auccgccagggcccacacc

SEQ ID NO: 2491456 - RNA, 14 nt, Human
auccgccagggccc

SEQ ID NO: 2491457 - RNA, 23 nt, Human
auccgacuugaauuuucccacug

SEQ ID NO: 2491458 - RNA, 13 nt, Human
auccgccagggcc

SEQ ID NO: 2491459 - RNA, 13 nt, Human
auccgaggcaggg

SEQ ID NO: 2491460 - RNA, 20 nt, Human
auccggcccccagagcgccc

SEQ ID NO: 2491461 - RNA, 16 nt, Human
auccguaguucccuga

SEQ ID NO: 2491462 - RNA, 22 nt, Human
auccggcaacaucaacccgagu

SEQ ID NO: 2491463 - RNA, 15 nt, Human
auccggcagccugga

SEQ ID NO: 2491464 - RNA, 19 nt, Human
auccuaaaacaaaagcuca

SEQ ID NO: 2491465 - RNA, 23 nt, Human
auccuaaaacaaaagcucaucca

SEQ ID NO: 2491466 - RNA, 21 nt, Human
auccgucuuuggccuccucca

SEQ ID NO: 2491467 - RNA, 17 nt, Human
auccguaguucccugaa

SEQ ID NO: 2491468 - RNA, 17 nt, Human
uucuggcucuuccaggc

SEQ ID NO: 2491469 - RNA, 16 nt, Human
uucuggcucuuccagg

SEQ ID NO: 2491470 - RNA, 14 nt, Human
uucugggagggcag

SEQ ID NO: 2491471 - RNA, 21 nt, Human
uucugggagggcagcagggcu

SEQ ID NO: 2491472 - RNA, 20 nt, Human
uucuggcuuccuucucucaa

SEQ ID NO: 2491473 - RNA, 17 nt, Human
uucugggaaauggcuug

SEQ ID NO: 2491474 - RNA, 16 nt, Human
uucugggaggaagcag

SEQ ID NO: 2491475 - RNA, 20 nt, Human
uucuggcugccccaaccugc

SEQ ID NO: 2491476 - RNA, 11 nt, Human
uucuggcugcc

SEQ ID NO: 2491477 - RNA, 22 nt, Human
uucuggcuggagccuagaacag

SEQ ID NO: 2491478 - RNA, 14 nt, Human
uucugccuguuaua

SEQ ID NO: 2491479 - RNA, 19 nt, Human
uucuggcugaacacuggca

SEQ ID NO: 2491480 - RNA, 18 nt, Human
uucugccugcccaggccc

SEQ ID NO: 2491481 - RNA, 17 nt, Human
uucugccugcccaggcc

SEQ ID NO: 2491482 - RNA, 13 nt, Human
uucugccuguuau

SEQ ID NO: 2491483 - RNA, 16 nt, Human
uucugcccuggcugcu

SEQ ID NO: 2491484 - RNA, 14 nt, Human
uucugccuggagac

SEQ ID NO: 2491485 - RNA, 15 nt, Human
uucuggcucuuccag

SEQ ID NO: 2491486 - RNA, 21 nt, Human
uucugccugcccaggccccug

SEQ ID NO: 2491487 - RNA, 23 nt, Human
uucugaacuuggcgcugccccug

SEQ ID NO: 2491488 - RNA, 15 nt, Human
uucugccauauucug

SEQ ID NO: 2491489 - RNA, 19 nt, Human
uucugcccaauuggaggaa

SEQ ID NO: 2491490 - RNA, 14 nt, Human
uucugcccuggcug

SEQ ID NO: 2491491 - RNA, 13 nt, Human
uucugcccuggcu

SEQ ID NO: 2491492 - RNA, 15 nt, Human
uucugccagggagcu

SEQ ID NO: 2491493 - RNA, 16 nt, Human
uucugccagggagcuu

SEQ ID NO: 2491494 - RNA, 19 nt, Human
uucugcccaaaaauauggu

SEQ ID NO: 2491495 - RNA, 19 nt, Human
uucugcccacauuggaccc

SEQ ID NO: 2491496 - RNA, 22 nt, Human
uucugaacuuggcgcugccccu

SEQ ID NO: 2491497 - RNA, 19 nt, Human
uucugaacuuggcgcugcc

SEQ ID NO: 2491498 - RNA, 16 nt, Human
uucugaacucaaacug

SEQ ID NO: 2491499 - RNA, 17 nt, Human
uucugaacucaaacuga

SEQ ID NO: 2491500 - RNA, 18 nt, Human
uucugaacucaaacugag

SEQ ID NO: 2491501 - RNA, 22 nt, Human
uucugaacucaaacugaggaau

SEQ ID NO: 2491502 - RNA, 17 nt, Human
uucucuugggaacugaa

SEQ ID NO: 2491503 - RNA, 22 nt, Human
uucucuugggaacugaacucac

SEQ ID NO: 2491504 - RNA, 15 nt, Human
uucucuugggcugag

SEQ ID NO: 2491505 - RNA, 14 nt, Human
uucucuucucuguu

SEQ ID NO: 2491506 - RNA, 14 nt, Human
uucucuucuugaac

SEQ ID NO: 2491507 - RNA, 12 nt, Human
uucucuucucug

SEQ ID NO: 2491508 - RNA, 20 nt, Human
uucucuuccuuuuaucagua

SEQ ID NO: 2491509 - RNA, 12 nt, Human
uucucuuccugu

SEQ ID NO: 2491510 - RNA, 13 nt, Human
uucucuuccugua

SEQ ID NO: 2491511 - RNA, 20 nt, Human
uucucuaguuugauuaaauu

SEQ ID NO: 2491512 - RNA, 21 nt, Human
uucucuuccacucuccuugcu

SEQ ID NO: 2491513 - RNA, 15 nt, Human
uucucuaguuugauu

SEQ ID NO: 2491514 - RNA, 17 nt, Human
uucucuaguuugauuaa

SEQ ID NO: 2491515 - RNA, 12 nt, Human
uucucuaggaaa

SEQ ID NO: 2491516 - RNA, 20 nt, Human
uucuccuuagucuucucaua

SEQ ID NO: 2491517 - RNA, 21 nt, Human
uucuccuuguguuacuaaguu

SEQ ID NO: 2491518 - RNA, 20 nt, Human
uucuccuucagcccucaccc

SEQ ID NO: 2491519 - RNA, 15 nt, Human
uucuccuucagcccu

SEQ ID NO: 2491520 - RNA, 12 nt, Human
uucuccugugcu

SEQ ID NO: 2491521 - RNA, 15 nt, Human
uucuccuuagucuuc

SEQ ID NO: 2491522 - RNA, 10 nt, Human
uucuccugga

SEQ ID NO: 2491523 - RNA, 14 nt, Human
aucaguauaaacaa

SEQ ID NO: 2491524 - RNA, 15 nt, Human
aucagguuccauccc

SEQ ID NO: 2491525 - RNA, 20 nt, Human
aucaggugcccaucccugga

SEQ ID NO: 2491526 - RNA, 13 nt, Human
aucaggucuccca

SEQ ID NO: 2491527 - RNA, 13 nt, Human
aucagguggggag

SEQ ID NO: 2491528 - RNA, 15 nt, Human
aucaguaauauuuau

SEQ ID NO: 2491529 - RNA, 19 nt, Human
aucaguaagaaaaagaaga

SEQ ID NO: 2491530 - RNA, 18 nt, Human
aucaguagccagcaucug

SEQ ID NO: 2491531 - RNA, 16 nt, Human
auccagugauccuuac

SEQ ID NO: 2491532 - RNA, 21 nt, Human
auccagugauccuuacaaguu

SEQ ID NO: 2491533 - RNA, 17 nt, Human
auccagugucucacagc

SEQ ID NO: 2491534 - RNA, 16 nt, Human
auccaguucaugagaa

SEQ ID NO: 2491535 - RNA, 19 nt, Human
auccauagcaccuccacau

SEQ ID NO: 2491536 - RNA, 17 nt, Human
auccaccaccucccuca

SEQ ID NO: 2491537 - RNA, 14 nt, Human
auccaccaccuccc

SEQ ID NO: 2491538 - RNA, 19 nt, Human
auccacauuguuuuaaaaa

SEQ ID NO: 2491539 - RNA, 18 nt, Human
auccacauuguuuuaaaa

SEQ ID NO: 2491540 - RNA, 21 nt, Human
auccaguaucuugaagacuuu

SEQ ID NO: 2491541 - RNA, 20 nt, Human
auccauauugagucaaaugg

SEQ ID NO: 2491542 - RNA, 18 nt, Human
auccauauugagucaaau

SEQ ID NO: 2491543 - RNA, 16 nt, Human
auccauaguaguauga

SEQ ID NO: 2491544 - RNA, 19 nt, Human
auccauaguggacauuguu

SEQ ID NO: 2491545 - RNA, 13 nt, Human
auccaucaggcca

SEQ ID NO: 2491546 - RNA, 20 nt, Human
aucccaaacccuucagugcc

SEQ ID NO: 2491547 - RNA, 19 nt, Human
aucccaaacccuucagugc

SEQ ID NO: 2491548 - RNA, 12 nt, Human
aucccagcccca

SEQ ID NO: 2491549 - RNA, 22 nt, Human
aucccaaagccuugugucuaca

SEQ ID NO: 2491550 - RNA, 18 nt, Human
aucccauaugccugggca

SEQ ID NO: 2491551 - RNA, 17 nt, Human
aucccaggacaccacac

SEQ ID NO: 2491552 - RNA, 12 nt, Human
aucccaggacac

SEQ ID NO: 2491553 - RNA, 20 nt, Human
aucccagcuacuugggaagc

SEQ ID NO: 2491554 - RNA, 13 nt, Human
aucccagcucacg

SEQ ID NO: 2491555 - RNA, 22 nt, Human
aucccagcuacuugggaggcug

SEQ ID NO: 2491556 - RNA, 18 nt, Human
aucccagcuacuugggaa

SEQ ID NO: 2491557 - RNA, 20 nt, Human
aucccagcuacucaggaggc

SEQ ID NO: 2491558 - RNA, 15 nt, Human
aucccagccuuggca

SEQ ID NO: 2491559 - RNA, 23 nt, Human
aucccagcuacucaagaggcuga

SEQ ID NO: 2491560 - RNA, 17 nt, Human
aucccagcuacucagga

SEQ ID NO: 2491561 - RNA, 18 nt, Human
aucccagcuacucaggag

SEQ ID NO: 2491562 - RNA, 23 nt, Human
aucccagcccuuugggaggcuga

SEQ ID NO: 2491563 - RNA, 13 nt, Human
aucccagccuugg

SEQ ID NO: 2491564 - RNA, 20 nt, Human
aucccagcuacucaagaggc

SEQ ID NO: 2491565 - RNA, 16 nt, Human
uucugggcuucaucug

SEQ ID NO: 2491566 - RNA, 19 nt, Human
uucugggcaucuguucugg

SEQ ID NO: 2491567 - RNA, 21 nt, Human
uucuggggccccuuuuuacuc

SEQ ID NO: 2491568 - RNA, 14 nt, Human
uucuggggccccuu

SEQ ID NO: 2491569 - RNA, 20 nt, Human
aucauuuuaccuuugacaaa

SEQ ID NO: 2491570 - RNA, 23 nt, Human
uucuggggccccuuuuuacuccc

SEQ ID NO: 2491571 - RNA, 14 nt, Human
aucauuuuuccuuc

SEQ ID NO: 2491572 - RNA, 19 nt, Human
aucauuuugcauucaaauu

SEQ ID NO: 2491573 - RNA, 19 nt, Human
aucauuuugccucuuuucu

SEQ ID NO: 2491574 - RNA, 18 nt, Human
auccaagcaaaugugaau

SEQ ID NO: 2491575 - RNA, 17 nt, Human
aucauuuugcauucaaa

SEQ ID NO: 2491576 - RNA, 15 nt, Human
aucauuuugcauuca

SEQ ID NO: 2491577 - RNA, 13 nt, Human
aucauuuugcauu

SEQ ID NO: 2491578 - RNA, 22 nt, Human
aucauuuucuuaucuucugcaa

SEQ ID NO: 2491579 - RNA, 17 nt, Human
aucauuuuccccccacu

SEQ ID NO: 2491580 - RNA, 23 nt, Human
aucauuuuagaagacucuaccag

SEQ ID NO: 2491581 - RNA, 22 nt, Human
aucauuuuagaagacucuacca

SEQ ID NO: 2491582 - RNA, 16 nt, Human
aucauuuuagaagacu

SEQ ID NO: 2491583 - RNA, 18 nt, Human
aucauuuuauaugucaaa

SEQ ID NO: 2491584 - RNA, 17 nt, Human
aucauuuuauaugucaa

SEQ ID NO: 2491585 - RNA, 19 nt, Human
aucauuuuauaugucaaag

SEQ ID NO: 2491586 - RNA, 13 nt, Human
aucauuuuccccc

SEQ ID NO: 2491587 - RNA, 14 nt, Human
aucauuuucccccc

SEQ ID NO: 2491588 - RNA, 15 nt, Human
aucauuuucccccca

SEQ ID NO: 2491589 - RNA, 16 nt, Human
auccaguaucuugaag

SEQ ID NO: 2491590 - RNA, 15 nt, Human
auccacccaccucag

SEQ ID NO: 2491591 - RNA, 13 nt, Human
auccacccaccuc

SEQ ID NO: 2491592 - RNA, 21 nt, Human
auccaagcuggucccacucag

SEQ ID NO: 2491593 - RNA, 18 nt, Human
auccaagcuggucccacu

SEQ ID NO: 2491594 - RNA, 23 nt, Human
aucauuuuuccuucccuucucca

SEQ ID NO: 2491595 - RNA, 16 nt, Human
auguccacugguucuu

SEQ ID NO: 2491596 - RNA, 17 nt, Human
auguccacugguucuuc

SEQ ID NO: 2491597 - RNA, 13 nt, Human
augucagugugac

SEQ ID NO: 2491598 - RNA, 12 nt, Human
augucaguguga

SEQ ID NO: 2491599 - RNA, 21 nt, Human
auguccagaagaauauucagg

SEQ ID NO: 2491600 - RNA, 12 nt, Human
auguccagaaga

SEQ ID NO: 2491601 - RNA, 17 nt, Human
auguccacuguguauag

SEQ ID NO: 2491602 - RNA, 16 nt, Human
auguccacuguguaua

SEQ ID NO: 2491603 - RNA, 23 nt, Human
auguccagaagaauauucaggac

SEQ ID NO: 2491604 - RNA, 22 nt, Human
auguccagaagaauauucagga

SEQ ID NO: 2491605 - RNA, 14 nt, Human
auguccacugugua

SEQ ID NO: 2491606 - RNA, 13 nt, Human
auguccuguaaag

SEQ ID NO: 2491607 - RNA, 22 nt, Human
augucucaggucccugcagggc

SEQ ID NO: 2491608 - RNA, 17 nt, Human
augucucaggucccugc

SEQ ID NO: 2491609 - RNA, 14 nt, Human
auguccuguaaagg

SEQ ID NO: 2491610 - RNA, 14 nt, Human
augucgccucugca

SEQ ID NO: 2491611 - RNA, 13 nt, Human
augucgccucugc

SEQ ID NO: 2491612 - RNA, 16 nt, Human
augucucgugguagga

SEQ ID NO: 2491613 - RNA, 15 nt, Human
augucucgugguagg

SEQ ID NO: 2491614 - RNA, 23 nt, Human
augucucugugagacucgagaac

SEQ ID NO: 2491615 - RNA, 21 nt, Human
augucucugugagacucgaga

SEQ ID NO: 2491616 - RNA, 17 nt, Human
augucucugagcauuag

SEQ ID NO: 2491617 - RNA, 13 nt, Human
augucucucagaa

SEQ ID NO: 2491618 - RNA, 16 nt, Human
augucucucagaauuc

SEQ ID NO: 2491619 - RNA, 17 nt, Human
augucucucagaauucu

SEQ ID NO: 2491620 - RNA, 21 nt, Human
augucucucagaauucuucag

SEQ ID NO: 2491621 - RNA, 19 nt, Human
augucucgugguaggacug

SEQ ID NO: 2491622 - RNA, 18 nt, Human
auguaugagguacaaccu

SEQ ID NO: 2491623 - RNA, 19 nt, Human
auguaugaggaauuucugu

SEQ ID NO: 2491624 - RNA, 13 nt, Human
uuuggcaggugca

SEQ ID NO: 2491625 - RNA, 22 nt, Human
uuuggcaggggcagaaaacucu

SEQ ID NO: 2491626 - RNA, 17 nt, Human
uuuggcacuggggcacu

SEQ ID NO: 2491627 - RNA, 11 nt, Human
uuuggcacugg

SEQ ID NO: 2491628 - RNA, 20 nt, Human
uuuggcagagcuucuuccag

SEQ ID NO: 2491629 - RNA, 13 nt, Human
uuuggcagaguuc

SEQ ID NO: 2491630 - RNA, 15 nt, Human
auguaugcuucauac

SEQ ID NO: 2491631 - RNA, 16 nt, Human
auguaugcuucauaca

SEQ ID NO: 2491632 - RNA, 15 nt, Human
auguauguguaagua

SEQ ID NO: 2491633 - RNA, 14 nt, Human
auguaugcuucaua

SEQ ID NO: 2491634 - RNA, 17 nt, Human
auguaugcagcuaucug

SEQ ID NO: 2491635 - RNA, 14 nt, Human
auguaugcagcuau

SEQ ID NO: 2491636 - RNA, 14 nt, Human
auguaugauuacau

SEQ ID NO: 2491637 - RNA, 20 nt, Human
auguauguuuugguaucugu

SEQ ID NO: 2491638 - RNA, 17 nt, Human
auguauguuuacauauc

SEQ ID NO: 2491639 - RNA, 18 nt, Human
auguauguuuacauauca

SEQ ID NO: 2491640 - RNA, 16 nt, Human
auguauuaauauucau

SEQ ID NO: 2491641 - RNA, 17 nt, Human
auguauuaauauucauu

SEQ ID NO: 2491642 - RNA, 16 nt, Human
augucaguauguggaa

SEQ ID NO: 2491643 - RNA, 13 nt, Human
auguauuauucug

SEQ ID NO: 2491644 - RNA, 14 nt, Human
auguauuauucugc

SEQ ID NO: 2491645 - RNA, 16 nt, Human
auguauuauucugcag

SEQ ID NO: 2491646 - RNA, 17 nt, Human
auguauuauucugcagc

SEQ ID NO: 2491647 - RNA, 15 nt, Human
auguauguguguaug

SEQ ID NO: 2491648 - RNA, 14 nt, Human
auguauguguguau

SEQ ID NO: 2491649 - RNA, 16 nt, Human
auguauguguaaguau

SEQ ID NO: 2491650 - RNA, 16 nt, Human
auguauguuuacauau

SEQ ID NO: 2491651 - RNA, 13 nt, Human
auguauguuuaca

SEQ ID NO: 2491652 - RNA, 14 nt, Human
auguauguuuacau

SEQ ID NO: 2491653 - RNA, 12 nt, Human
auguauguuuac

SEQ ID NO: 2491654 - RNA, 21 nt, Human
uuuguaguguuggagaagaac

SEQ ID NO: 2491655 - RNA, 19 nt, Human
uuuguaguguuggagaaga

SEQ ID NO: 2491656 - RNA, 20 nt, Human
uuuguaauugcuuacauuuu

SEQ ID NO: 2491657 - RNA, 16 nt, Human
uuugucuucuccccag

SEQ ID NO: 2491658 - RNA, 15 nt, Human
uuugucuucucccca

SEQ ID NO: 2491659 - RNA, 12 nt, Human
uuuguauaaaag

SEQ ID NO: 2491660 - RNA, 14 nt, Human
uuuguaaugaaaac

SEQ ID NO: 2491661 - RNA, 13 nt, Human
uuuguaaugaaaa

SEQ ID NO: 2491662 - RNA, 16 nt, Human
augugcacccaugggc

SEQ ID NO: 2491663 - RNA, 18 nt, Human
uuuguaaucguuaugugu

SEQ ID NO: 2491664 - RNA, 21 nt, Human
uuuguaaucguuaugugugua

SEQ ID NO: 2491665 - RNA, 18 nt, Human
uuuguaauugcuuacauu

SEQ ID NO: 2491666 - RNA, 14 nt, Human
uuuguaauuauugu

SEQ ID NO: 2491667 - RNA, 12 nt, Human
uuuguaauuauu

SEQ ID NO: 2491668 - RNA, 23 nt, Human
uuuguaaugucaccaccuuccca

SEQ ID NO: 2491669 - RNA, 17 nt, Human
uuugugaagcaaaauuu

SEQ ID NO: 2491670 - RNA, 22 nt, Human
uuugugaacaagucccuguaau

SEQ ID NO: 2491671 - RNA, 20 nt, Human
uuugugaacucagccaagca

SEQ ID NO: 2491672 - RNA, 16 nt, Human
uuugucuugaaugucu

SEQ ID NO: 2491673 - RNA, 17 nt, Human
uuugucuuuaacuguca

SEQ ID NO: 2491674 - RNA, 22 nt, Human
uuugugaaaugauggugaaagu

SEQ ID NO: 2491675 - RNA, 21 nt, Human
uuugucuuguguuucuuuagu

SEQ ID NO: 2491676 - RNA, 14 nt, Human
uuugugacuauaua

SEQ ID NO: 2491677 - RNA, 22 nt, Human
uuugugacuaauuguauaacag

SEQ ID NO: 2491678 - RNA, 23 nt, Human
uuugugaauggauuggauuauuu

SEQ ID NO: 2491679 - RNA, 18 nt, Human
uuugugacuaauuguaua

SEQ ID NO: 2491680 - RNA, 19 nt, Human
uuugugaauggauuggauu

SEQ ID NO: 2491681 - RNA, 20 nt, Human
uuugugaagguggaaauaaa

SEQ ID NO: 2491682 - RNA, 18 nt, Human
uuugugaauagaacucug

SEQ ID NO: 2491683 - RNA, 17 nt, Human
uuugugaauggauugga

SEQ ID NO: 2491684 - RNA, 19 nt, Human
augugaugagaggaaauca

SEQ ID NO: 2491685 - RNA, 17 nt, Human
augugaugagaggaaau

SEQ ID NO: 2491686 - RNA, 23 nt, Human
augugacuugcaucguggagaca

SEQ ID NO: 2491687 - RNA, 15 nt, Human
augugaugagaggaa

SEQ ID NO: 2491688 - RNA, 16 nt, Human
augugaugagaggaaa

SEQ ID NO: 2491689 - RNA, 19 nt, Human
augugaccacucugucuug

SEQ ID NO: 2491690 - RNA, 20 nt, Human
augugacccagauccucaca

SEQ ID NO: 2491691 - RNA, 12 nt, Human
augugacucuga

SEQ ID NO: 2491692 - RNA, 13 nt, Human
augugacucugaa

SEQ ID NO: 2491693 - RNA, 23 nt, Human
augucucuuuaaugucacaggca

SEQ ID NO: 2491694 - RNA, 16 nt, Human
augucucuucugagcu

SEQ ID NO: 2491695 - RNA, 17 nt, Human
augucucuucugagcua

SEQ ID NO: 2491696 - RNA, 13 nt, Human
augucucuucuga

SEQ ID NO: 2491697 - RNA, 15 nt, Human
augugauuuuucuga

SEQ ID NO: 2491698 - RNA, 14 nt, Human
augugcaaaugcaa

SEQ ID NO: 2491699 - RNA, 16 nt, Human
augugcaaguguaugc

SEQ ID NO: 2491700 - RNA, 14 nt, Human
augugcaaaacagc

SEQ ID NO: 2491701 - RNA, 13 nt, Human
augugcaaaacag

SEQ ID NO: 2491702 - RNA, 21 nt, Human
augugauuuaauaguguuaau

SEQ ID NO: 2491703 - RNA, 14 nt, Human
augugauuuuaacu

SEQ ID NO: 2491704 - RNA, 15 nt, Human
augugauuuuaacuc

SEQ ID NO: 2491705 - RNA, 16 nt, Human
augugauuuuaacucu

SEQ ID NO: 2491706 - RNA, 18 nt, Human
augugauuuuaacucugu

SEQ ID NO: 2491707 - RNA, 19 nt, Human
augugauuuuaacucuguc

SEQ ID NO: 2491708 - RNA, 20 nt, Human
augugauuuuaacucugucu

SEQ ID NO: 2491709 - RNA, 14 nt, Human
augugauuuuucug

SEQ ID NO: 2491710 - RNA, 23 nt, Human
augugcacaugcacgugugugca

SEQ ID NO: 2491711 - RNA, 20 nt, Human
augugauuccuuugaagagg

SEQ ID NO: 2491712 - RNA, 18 nt, Human
augugacucugaagcuga

SEQ ID NO: 2491713 - RNA, 15 nt, Human
augugauucuaaugu

SEQ ID NO: 2491714 - RNA, 23 nt, Human
augugauuccuuugaagaggaaa

SEQ ID NO: 2491715 - RNA, 14 nt, Human
augugauuguggaa

SEQ ID NO: 2491716 - RNA, 15 nt, Human
augugauuguggaau

SEQ ID NO: 2491717 - RNA, 17 nt, Human
augugauuguggaaugg

SEQ ID NO: 2491718 - RNA, 20 nt, Human
augugauuuaauaguguuaa

SEQ ID NO: 2491719 - RNA, 18 nt, Human
augugauuuaauaguguu

SEQ ID NO: 2491720 - RNA, 17 nt, Human
augugauuuaauagugu

SEQ ID NO: 2491721 - RNA, 16 nt, Human
augugauuuaauagug

SEQ ID NO: 2491722 - RNA, 22 nt, Human
augugauuguggaauggagauu

SEQ ID NO: 2491723 - RNA, 13 nt, Human
augugauuuaaua

SEQ ID NO: 2491724 - RNA, 19 nt, Human
auguagccccucuccugga

SEQ ID NO: 2491725 - RNA, 22 nt, Human
auguaggaaagaccauuuuucc

SEQ ID NO: 2491726 - RNA, 14 nt, Human
auguaggaaguagg

SEQ ID NO: 2491727 - RNA, 23 nt, Human
auguaggagcugccuuggcucag

SEQ ID NO: 2491728 - RNA, 12 nt, Human
auguagccaugg

SEQ ID NO: 2491729 - RNA, 14 nt, Human
auguagcugguuuc

SEQ ID NO: 2491730 - RNA, 15 nt, Human
auguagcugguuucc

SEQ ID NO: 2491731 - RNA, 16 nt, Human
auguagauuuauuuca

SEQ ID NO: 2491732 - RNA, 17 nt, Human
auguagauuuauuucau

SEQ ID NO: 2491733 - RNA, 17 nt, Human
auguagaugugcauuuu

SEQ ID NO: 2491734 - RNA, 20 nt, Human
auguagauuuauuucaucau

SEQ ID NO: 2491735 - RNA, 17 nt, Human
auguagcaaaacgcaug

SEQ ID NO: 2491736 - RNA, 21 nt, Human
auguagcaaaauacaugacau

SEQ ID NO: 2491737 - RNA, 20 nt, Human
auguagcaaaacgcauggag

SEQ ID NO: 2491738 - RNA, 18 nt, Human
auguagcccccuggccuc

SEQ ID NO: 2491739 - RNA, 19 nt, Human
auguagcccccuggccucu

SEQ ID NO: 2491740 - RNA, 21 nt, Human
auguagcccccuggccucugu

SEQ ID NO: 2491741 - RNA, 23 nt, Human
auguagcccccuggccucugugc

SEQ ID NO: 2491742 - RNA, 16 nt, Human
auguagccaugggacc

SEQ ID NO: 2491743 - RNA, 23 nt, Human
auguagccaugaccuuacauuuc

SEQ ID NO: 2491744 - RNA, 19 nt, Human
uuugacaguguugaaaaug

SEQ ID NO: 2491745 - RNA, 18 nt, Human
uuugacaguguugaaaau

SEQ ID NO: 2491746 - RNA, 21 nt, Human
auguaguaucaaauauuagau

SEQ ID NO: 2491747 - RNA, 23 nt, Human
auguaguaucaaauauuagaugu

SEQ ID NO: 2491748 - RNA, 19 nt, Human
auguaguauaaagaaaagu

SEQ ID NO: 2491749 - RNA, 12 nt, Human
uuugaccucugc

SEQ ID NO: 2491750 - RNA, 20 nt, Human
uuugacauugcguuugaccu

SEQ ID NO: 2491751 - RNA, 13 nt, Human
uuugacaugugga

SEQ ID NO: 2491752 - RNA, 16 nt, Human
auguaguaaguaaauu

SEQ ID NO: 2491753 - RNA, 13 nt, Human
auguaguaauuga

SEQ ID NO: 2491754 - RNA, 16 nt, Human
auguaguaauugacau

SEQ ID NO: 2491755 - RNA, 17 nt, Human
auguaguaauugacaug

SEQ ID NO: 2491756 - RNA, 14 nt, Human
auguaguaguacuu

SEQ ID NO: 2491757 - RNA, 18 nt, Human
auguaguaauugacaugu

SEQ ID NO: 2491758 - RNA, 16 nt, Human
auguaguauaaagaaa

SEQ ID NO: 2491759 - RNA, 17 nt, Human
auguaguauaaagaaaa

SEQ ID NO: 2491760 - RNA, 21 nt, Human
auguaggugucugcacccagg

SEQ ID NO: 2491761 - RNA, 15 nt, Human
auguaggugucugca

SEQ ID NO: 2491762 - RNA, 17 nt, Human
auguaggcauucuggag

SEQ ID NO: 2491763 - RNA, 18 nt, Human
auguaggguaaggugccu

SEQ ID NO: 2491764 - RNA, 20 nt, Human
auguagggcauaaugaugau

SEQ ID NO: 2491765 - RNA, 16 nt, Human
auguagguaugaauaa

SEQ ID NO: 2491766 - RNA, 17 nt, Human
auguagguaugaauaag

SEQ ID NO: 2491767 - RNA, 12 nt, Human
auguagaggaga

SEQ ID NO: 2491768 - RNA, 13 nt, Human
auguagaggagaa

SEQ ID NO: 2491769 - RNA, 14 nt, Human
auguagaaaauuug

SEQ ID NO: 2491770 - RNA, 13 nt, Human
auguagaagcugc

SEQ ID NO: 2491771 - RNA, 12 nt, Human
auguagaaagcu

SEQ ID NO: 2491772 - RNA, 17 nt, Human
auguagaggagaaacug

SEQ ID NO: 2491773 - RNA, 19 nt, Human
auguagaggagaaacugga

SEQ ID NO: 2491774 - RNA, 19 nt, Human
auguagaggggaaaagaga

SEQ ID NO: 2491775 - RNA, 18 nt, Human
auguagauaaacucagaa

SEQ ID NO: 2491776 - RNA, 19 nt, Human
auguagauaaacucagaaa

SEQ ID NO: 2491777 - RNA, 19 nt, Human
auguagauaacaagaccuc

SEQ ID NO: 2491778 - RNA, 22 nt, Human
auguagauauugugaaguacau

SEQ ID NO: 2491779 - RNA, 23 nt, Human
auguagauauugugaaguacaua

SEQ ID NO: 2491780 - RNA, 22 nt, Human
auguacucuacugauaucuaaa

SEQ ID NO: 2491781 - RNA, 16 nt, Human
auguacucuacugaua

SEQ ID NO: 2491782 - RNA, 14 nt, Human
auguacugagauuu

SEQ ID NO: 2491783 - RNA, 18 nt, Human
auguacugagccuuguaa

SEQ ID NO: 2491784 - RNA, 20 nt, Human
auguacuccucuuuacacug

SEQ ID NO: 2491785 - RNA, 17 nt, Human
auguacuccucuuuaca

SEQ ID NO: 2491786 - RNA, 16 nt, Human
auguacuucaugcugu

SEQ ID NO: 2491787 - RNA, 19 nt, Human
auguacuugucaaagaagg

SEQ ID NO: 2491788 - RNA, 18 nt, Human
auguacuugucaaagaag

SEQ ID NO: 2491789 - RNA, 17 nt, Human
auguacuugucaaagaa

SEQ ID NO: 2491790 - RNA, 16 nt, Human
auguacuugucaaaga

SEQ ID NO: 2491791 - RNA, 16 nt, Human
auguacuguaguuuuu

SEQ ID NO: 2491792 - RNA, 19 nt, Human
auguacuguaguuuuucuu

SEQ ID NO: 2491793 - RNA, 22 nt, Human
auguaccauuugcauggcucca

SEQ ID NO: 2491794 - RNA, 18 nt, Human
auguaccauuugcauggc

SEQ ID NO: 2491795 - RNA, 21 nt, Human
auguaccauguacaugaagaa

SEQ ID NO: 2491796 - RNA, 15 nt, Human
auguaccauuugcau

SEQ ID NO: 2491797 - RNA, 15 nt, Human
auguaccauguacau

SEQ ID NO: 2491798 - RNA, 18 nt, Human
auguaccaugaaacaaag

SEQ ID NO: 2491799 - RNA, 21 nt, Human
auguacguuuguaugugugua

SEQ ID NO: 2491800 - RNA, 14 nt, Human
auguacguuuguau

SEQ ID NO: 2491801 - RNA, 19 nt, Human
uuugcugagcauguacuga

SEQ ID NO: 2491802 - RNA, 20 nt, Human
uuugcucuucaagaaaucug

SEQ ID NO: 2491803 - RNA, 12 nt, Human
uuugcucugcca

SEQ ID NO: 2491804 - RNA, 13 nt, Human
uuugcucuuucuu

SEQ ID NO: 2491805 - RNA, 23 nt, Human
uuuggcaaacucuccaccacacg

SEQ ID NO: 2491806 - RNA, 17 nt, Human
uuuggcaaugccaucau

SEQ ID NO: 2491807 - RNA, 15 nt, Human
uuugcuggaauaagu

SEQ ID NO: 2491808 - RNA, 10 nt, Human
uuugcugcca

SEQ ID NO: 2491809 - RNA, 18 nt, Human
uuugcucuucaagaaauc

SEQ ID NO: 2491810 - RNA, 20 nt, Human
uuugcucucccgguucuucc

SEQ ID NO: 2491811 - RNA, 11 nt, Human
uuugccugugc

SEQ ID NO: 2491812 - RNA, 13 nt, Human
uuugccucugccu

SEQ ID NO: 2491813 - RNA, 17 nt, Human
uuugccucuuccagucu

SEQ ID NO: 2491814 - RNA, 20 nt, Human
uuugccucuuuucucugugc

SEQ ID NO: 2491815 - RNA, 14 nt, Human
uuugccugagggcg

SEQ ID NO: 2491816 - RNA, 14 nt, Human
uuugcaaccucgcu

SEQ ID NO: 2491817 - RNA, 16 nt, Human
uuugauucuccuucag

SEQ ID NO: 2491818 - RNA, 14 nt, Human
uuugauucuccuuc

SEQ ID NO: 2491819 - RNA, 13 nt, Human
uuugauucuccuu

SEQ ID NO: 2491820 - RNA, 12 nt, Human
uuugauucuccu

SEQ ID NO: 2491821 - RNA, 22 nt, Human
uuugauucagacagcugccugg

SEQ ID NO: 2491822 - RNA, 15 nt, Human
uuugauucauaguaa

SEQ ID NO: 2491823 - RNA, 20 nt, Human
uuugauucauaguaacuucu

SEQ ID NO: 2491824 - RNA, 17 nt, Human
uuugauguuuguggccu

SEQ ID NO: 2491825 - RNA, 19 nt, Human
uuugauguuuguggccuca

SEQ ID NO: 2491826 - RNA, 20 nt, Human
uuugcaagggaaaagucucu

SEQ ID NO: 2491827 - RNA, 21 nt, Human
uuugcaagggaaaagucucuu

SEQ ID NO: 2491828 - RNA, 12 nt, Human
uuugcccuuuga

SEQ ID NO: 2491829 - RNA, 15 nt, Human
uuugccguuauuaaa

SEQ ID NO: 2491830 - RNA, 14 nt, Human
uuugcaagccagau

SEQ ID NO: 2491831 - RNA, 21 nt, Human
uuugcaaggaagccacagcug

SEQ ID NO: 2491832 - RNA, 14 nt, Human
uuugcaaggaagcc

SEQ ID NO: 2491833 - RNA, 12 nt, Human
uuugcaaggaag

SEQ ID NO: 2491834 - RNA, 22 nt, Human
uuugauguucuuucacccuuuu

SEQ ID NO: 2491835 - RNA, 13 nt, Human
uuugauuaaauuc

SEQ ID NO: 2491836 - RNA, 17 nt, Human
uuugauguuaacacauu

SEQ ID NO: 2491837 - RNA, 16 nt, Human
uuugauguuaacacau

SEQ ID NO: 2491838 - RNA, 15 nt, Human
uuugauguuaacaca

SEQ ID NO: 2491839 - RNA, 14 nt, Human
uuugauguuaacac

SEQ ID NO: 2491840 - RNA, 11 nt, Human
uuugauguuaa

SEQ ID NO: 2491841 - RNA, 18 nt, Human
uuugauuaaauucuugca

SEQ ID NO: 2491842 - RNA, 21 nt, Human
uuugauuaaauucuugcaaag

SEQ ID NO: 2491843 - RNA, 21 nt, Human
uuugauucagacagcugccug

SEQ ID NO: 2491844 - RNA, 23 nt, Human
uuugauuaaauucuugcaaagua

SEQ ID NO: 2491845 - RNA, 19 nt, Human
uuugacgccaucccagccc

SEQ ID NO: 2491846 - RNA, 16 nt, Human
uuugacgccaucccag

SEQ ID NO: 2491847 - RNA, 14 nt, Human
uuugacgccauccc

SEQ ID NO: 2491848 - RNA, 13 nt, Human
uuugacgccaucc

SEQ ID NO: 2491849 - RNA, 15 nt, Human
uuugacuggauauuc

SEQ ID NO: 2491850 - RNA, 19 nt, Human
uuugacugaagaugcagcu

SEQ ID NO: 2491851 - RNA, 12 nt, Human
uuugacucuuuu

SEQ ID NO: 2491852 - RNA, 15 nt, Human
uuugaugcuguuuga

SEQ ID NO: 2491853 - RNA, 19 nt, Human
uuugaugcuggagagguua

SEQ ID NO: 2491854 - RNA, 19 nt, Human
uuugacucuggcaaagcuu

SEQ ID NO: 2491855 - RNA, 20 nt, Human
uuugacucuggcaaagcuuu

SEQ ID NO: 2491856 - RNA, 18 nt, Human
uuugacucuugcaaucca

SEQ ID NO: 2491857 - RNA, 21 nt, Human
uuugacucuggcaaagcuuuu

SEQ ID NO: 2491858 - RNA, 19 nt, Human
uuugacuagaugauggaug

SEQ ID NO: 2491859 - RNA, 21 nt, Human
uuugacuagggauucaggcug

SEQ ID NO: 2491860 - RNA, 20 nt, Human
uuugacgccaucccagcccc

SEQ ID NO: 2491861 - RNA, 19 nt, Human
uuugaccuuuuauguagua

SEQ ID NO: 2491862 - RNA, 14 nt, Human
uuugacggaugauu

SEQ ID NO: 2491863 - RNA, 17 nt, Human
uuugacauguggaaagu

SEQ ID NO: 2491864 - RNA, 19 nt, Human
uuugacgggaaacaaaacu

SEQ ID NO: 2491865 - RNA, 14 nt, Human
auguacauuaauua

SEQ ID NO: 2491866 - RNA, 20 nt, Human
auguacauuuccaaauucac

SEQ ID NO: 2491867 - RNA, 19 nt, Human
auguacauuucugaaauga

SEQ ID NO: 2491868 - RNA, 14 nt, Human
auguaaaugugcau

SEQ ID NO: 2491869 - RNA, 17 nt, Human
auguacauguacugauu

SEQ ID NO: 2491870 - RNA, 12 nt, Human
auguaaaugugc

SEQ ID NO: 2491871 - RNA, 13 nt, Human
auguaaaugugca

SEQ ID NO: 2491872 - RNA, 21 nt, Human
auguaaaugcaucuguccuca

SEQ ID NO: 2491873 - RNA, 15 nt, Human
auguaaauauucuau

SEQ ID NO: 2491874 - RNA, 12 nt, Human
auguaaauauuc

SEQ ID NO: 2491875 - RNA, 18 nt, Human
auguaaaguauguaaaca

SEQ ID NO: 2491876 - RNA, 17 nt, Human
auguaaauagugcagaa

SEQ ID NO: 2491877 - RNA, 12 nt, Human
auguaaauagug

SEQ ID NO: 2491878 - RNA, 17 nt, Human
auguaaaguauguaaac

SEQ ID NO: 2491879 - RNA, 13 nt, Human
auguaaaguaugu

SEQ ID NO: 2491880 - RNA, 20 nt, Human
auguaaaggagucaaaacua

SEQ ID NO: 2491881 - RNA, 16 nt, Human
auguaaagugauauuu

SEQ ID NO: 2491882 - RNA, 21 nt, Human
auguaaagauauuuuuaucuu

SEQ ID NO: 2491883 - RNA, 19 nt, Human
auguaaagaacauaaauaa

SEQ ID NO: 2491884 - RNA, 14 nt, Human
auguaaagauauuu

SEQ ID NO: 2491885 - RNA, 14 nt, Human
auguaaacaggaga

SEQ ID NO: 2491886 - RNA, 15 nt, Human
auguaaacagugccu

SEQ ID NO: 2491887 - RNA, 16 nt, Human
auguaaacagugccug

SEQ ID NO: 2491888 - RNA, 17 nt, Human
auguaaacagugccugc

SEQ ID NO: 2491889 - RNA, 14 nt, Human
auguaaacugugca

SEQ ID NO: 2491890 - RNA, 20 nt, Human
auguaaacagugccugcuga

SEQ ID NO: 2491891 - RNA, 22 nt, Human
auguaaacagugccugcugaau

SEQ ID NO: 2491892 - RNA, 23 nt, Human
auguaaacauaauucuuguauau

SEQ ID NO: 2491893 - RNA, 17 nt, Human
auguaaaauguugaaua

SEQ ID NO: 2491894 - RNA, 16 nt, Human
auguaaaauguugaau

SEQ ID NO: 2491895 - RNA, 19 nt, Human
auguaaacaaaauuuaguu

SEQ ID NO: 2491896 - RNA, 13 nt, Human
auguaaaauguuu

SEQ ID NO: 2491897 - RNA, 18 nt, Human
auguaaacaaaauuuagu

SEQ ID NO: 2491898 - RNA, 21 nt, Human
auguaaaagguauuaaauuga

SEQ ID NO: 2491899 - RNA, 22 nt, Human
auguaaaaggccaaaccucugu

SEQ ID NO: 2491900 - RNA, 23 nt, Human
auguaaaaggccaaaccucuguu

SEQ ID NO: 2491901 - RNA, 15 nt, Human
auguaaaaggccaaa

SEQ ID NO: 2491902 - RNA, 18 nt, Human
auguaaaaggccaaaccu

SEQ ID NO: 2491903 - RNA, 21 nt, Human
auguaaaagagucaucuggua

SEQ ID NO: 2491904 - RNA, 17 nt, Human
auguaaaagacuuuuuu

SEQ ID NO: 2491905 - RNA, 14 nt, Human
augguuuucuugug

SEQ ID NO: 2491906 - RNA, 16 nt, Human
augguuuucaaaauaa

SEQ ID NO: 2491907 - RNA, 14 nt, Human
augguuuucaaaau

SEQ ID NO: 2491908 - RNA, 15 nt, Human
augguuuucaaaaua

SEQ ID NO: 2491909 - RNA, 18 nt, Human
augguuugcaaggaagcc

SEQ ID NO: 2491910 - RNA, 17 nt, Human
augguuugcaaggaagc

SEQ ID NO: 2491911 - RNA, 16 nt, Human
augguuugcaaggaag

SEQ ID NO: 2491912 - RNA, 22 nt, Human
augguuugacucccgaacauca

SEQ ID NO: 2491913 - RNA, 22 nt, Human
augguuugaauauaaacacuau

SEQ ID NO: 2491914 - RNA, 21 nt, Human
augguucccuugaugaagaag

SEQ ID NO: 2491915 - RNA, 20 nt, Human
augguuccccuguucacucu

SEQ ID NO: 2491916 - RNA, 19 nt, Human
augguuccccuguucacuc

SEQ ID NO: 2491917 - RNA, 18 nt, Human
augguucguucuguuuac

SEQ ID NO: 2491918 - RNA, 16 nt, Human
augguucguucuguuu

SEQ ID NO: 2491919 - RNA, 16 nt, Human
augguucucaggccug

SEQ ID NO: 2491920 - RNA, 13 nt, Human
augguucugugcc

SEQ ID NO: 2491921 - RNA, 19 nt, Human
augguugagaaaugaauaa

SEQ ID NO: 2491922 - RNA, 18 nt, Human
augguugccuuaaagaaa

SEQ ID NO: 2491923 - RNA, 17 nt, Human
augguugccuuaaagaa

SEQ ID NO: 2491924 - RNA, 15 nt, Human
augguugccuuaaag

SEQ ID NO: 2491925 - RNA, 16 nt, Human
augguugagaaaugaa

SEQ ID NO: 2491926 - RNA, 16 nt, Human
augguuguauuagaug

SEQ ID NO: 2491927 - RNA, 14 nt, Human
augguuguauuaga

SEQ ID NO: 2491928 - RNA, 13 nt, Human
augguuguauuag

SEQ ID NO: 2491929 - RNA, 12 nt, Human
augguuguauua

SEQ ID NO: 2491930 - RNA, 13 nt, Human
augguuguacaua

SEQ ID NO: 2491931 - RNA, 18 nt, Human
augguugucuguuuuugu

SEQ ID NO: 2491932 - RNA, 23 nt, Human
augguugguaacacaaauuuuca

SEQ ID NO: 2491933 - RNA, 21 nt, Human
augguuguauuagauguucuc

SEQ ID NO: 2491934 - RNA, 18 nt, Human
augguuguauuagauguu

SEQ ID NO: 2491935 - RNA, 13 nt, Human
augguuucaaaga

SEQ ID NO: 2491936 - RNA, 21 nt, Human
augguuugaauauaaacacua

SEQ ID NO: 2491937 - RNA, 20 nt, Human
auggugagggauacccaucc

SEQ ID NO: 2491938 - RNA, 15 nt, Human
augggugcuuggagg

SEQ ID NO: 2491939 - RNA, 14 nt, Human
auggugaugaaaug

SEQ ID NO: 2491940 - RNA, 19 nt, Human
augggucuggcugagcuga

SEQ ID NO: 2491941 - RNA, 22 nt, Human
augggugaagggagagccagcu

SEQ ID NO: 2491942 - RNA, 17 nt, Human
auggugaugaaauguaa

SEQ ID NO: 2491943 - RNA, 16 nt, Human
auggugaugaaaugua

SEQ ID NO: 2491944 - RNA, 15 nt, Human
auggugcaaugaccu

SEQ ID NO: 2491945 - RNA, 13 nt, Human
auggugcaaugac

SEQ ID NO: 2491946 - RNA, 12 nt, Human
auggugcaauga

SEQ ID NO: 2491947 - RNA, 19 nt, Human
auggugagaugcagcugga

SEQ ID NO: 2491948 - RNA, 17 nt, Human
auggugcaaugaccuuu

SEQ ID NO: 2491949 - RNA, 16 nt, Human
auggugcaaugaccuu

SEQ ID NO: 2491950 - RNA, 14 nt, Human
auggugccccagga

SEQ ID NO: 2491951 - RNA, 18 nt, Human
auggugcaguugacagca

SEQ ID NO: 2491952 - RNA, 19 nt, Human
auggugcaaugaccuuuca

SEQ ID NO: 2491953 - RNA, 15 nt, Human
auggugccccaggac

SEQ ID NO: 2491954 - RNA, 16 nt, Human
auggugccccaggacc

SEQ ID NO: 2491955 - RNA, 17 nt, Human
auggugccccaggacca

SEQ ID NO: 2491956 - RNA, 18 nt, Human
auggugccccaggaccag

SEQ ID NO: 2491957 - RNA, 19 nt, Human
auggugccccaggaccagc

SEQ ID NO: 2491958 - RNA, 20 nt, Human
auggugccccaggaccagcu

SEQ ID NO: 2491959 - RNA, 21 nt, Human
auggugccccaggaccagcuc

SEQ ID NO: 2491960 - RNA, 22 nt, Human
auggugccccaggaccagcuca

SEQ ID NO: 2491961 - RNA, 21 nt, Human
auggugccugagaggcaggca

SEQ ID NO: 2491962 - RNA, 20 nt, Human
auggugccugagaggcaggc

SEQ ID NO: 2491963 - RNA, 18 nt, Human
auggugccugagaggcag

SEQ ID NO: 2491964 - RNA, 17 nt, Human
auggugccugagaggca

SEQ ID NO: 2491965 - RNA, 16 nt, Human
auggugccugagaggc

SEQ ID NO: 2491966 - RNA, 15 nt, Human
auggugccugagagg

SEQ ID NO: 2491967 - RNA, 14 nt, Human
auggugccugagag

SEQ ID NO: 2491968 - RNA, 9 nt, Human
auggugccu

SEQ ID NO: 2491969 - RNA, 20 nt, Human
auggugcaguugacagcagg

SEQ ID NO: 2491970 - RNA, 11 nt, Human
auggugccuga

SEQ ID NO: 2491971 - RNA, 22 nt, Human
augguuccaugccugagggugg

SEQ ID NO: 2491972 - RNA, 20 nt, Human
augguuccaugccugagggu

SEQ ID NO: 2491973 - RNA, 18 nt, Human
augguuccaugccugagg

SEQ ID NO: 2491974 - RNA, 17 nt, Human
augguuccaugccugag

SEQ ID NO: 2491975 - RNA, 16 nt, Human
augguuccaugccuga

SEQ ID NO: 2491976 - RNA, 16 nt, Human
augguuauaaaaguga

SEQ ID NO: 2491977 - RNA, 14 nt, Human
augguuauaaaagu

SEQ ID NO: 2491978 - RNA, 20 nt, Human
augguuacaaucauugcuga

SEQ ID NO: 2491979 - RNA, 20 nt, Human
augguguugcccugagugga

SEQ ID NO: 2491980 - RNA, 21 nt, Human
augguguuuucuuaugcagga

SEQ ID NO: 2491981 - RNA, 16 nt, Human
augguguuucucccuc

SEQ ID NO: 2491982 - RNA, 19 nt, Human
augguuacaaucauugcug

SEQ ID NO: 2491983 - RNA, 15 nt, Human
augguuacaaucauu

SEQ ID NO: 2491984 - RNA, 18 nt, Human
augguguacauaauguau

SEQ ID NO: 2491985 - RNA, 13 nt, Human
augguguacauaa

SEQ ID NO: 2491986 - RNA, 22 nt, Human
augguguaauaagacauaacgu

SEQ ID NO: 2491987 - RNA, 20 nt, Human
augguguaauaagacauaac

SEQ ID NO: 2491988 - RNA, 18 nt, Human
augguguaauaagacaua

SEQ ID NO: 2491989 - RNA, 16 nt, Human
augguguaauaagaca

SEQ ID NO: 2491990 - RNA, 14 nt, Human
augguguaauaaga

SEQ ID NO: 2491991 - RNA, 21 nt, Human
augguggugcaugucugcaaa

SEQ ID NO: 2491992 - RNA, 22 nt, Human
auggugguaaacauucucucag

SEQ ID NO: 2491993 - RNA, 12 nt, Human
augguguaauaa

SEQ ID NO: 2491994 - RNA, 19 nt, Human
augguguucaaaaaacuug

SEQ ID NO: 2491995 - RNA, 18 nt, Human
auggugugaaagucagau

SEQ ID NO: 2491996 - RNA, 22 nt, Human
auggugugaaagucagaugccc

SEQ ID NO: 2491997 - RNA, 17 nt, Human
augguggcuggguugga

SEQ ID NO: 2491998 - RNA, 16 nt, Human
augguggcgcgcaccu

SEQ ID NO: 2491999 - RNA, 15 nt, Human
augguggcuggguug

SEQ ID NO: 2492000 - RNA, 13 nt, Human
augguggcugggu

SEQ ID NO: 2492001 - RNA, 14 nt, Human
augguggagggcca

SEQ ID NO: 2492002 - RNA, 20 nt, Human
augguggacucgccuguaau

SEQ ID NO: 2492003 - RNA, 13 nt, Human
augguggagggcc

SEQ ID NO: 2492004 - RNA, 12 nt, Human
augguggcuggg

SEQ ID NO: 2492005 - RNA, 22 nt, Human
auggugccugauucggcugucu

SEQ ID NO: 2492006 - RNA, 23 nt, Human
auggugccugagaggcaggcaua

SEQ ID NO: 2492007 - RNA, 14 nt, Human
auggugccuucauu

SEQ ID NO: 2492008 - RNA, 16 nt, Human
auggugccuucauuug

SEQ ID NO: 2492009 - RNA, 20 nt, Human
auggugcuacgccugcaugu

SEQ ID NO: 2492010 - RNA, 13 nt, Human
auggugcugagaa

SEQ ID NO: 2492011 - RNA, 14 nt, Human
auggugcugagaag

SEQ ID NO: 2492012 - RNA, 12 nt, Human
auggugcugaga

SEQ ID NO: 2492013 - RNA, 14 nt, Human
auggugcugaccuc

SEQ ID NO: 2492014 - RNA, 16 nt, Human
auggugcugagaagcu

SEQ ID NO: 2492015 - RNA, 16 nt, Human
augggagugagacaga

SEQ ID NO: 2492016 - RNA, 23 nt, Human
augggagggggcuugaagccaaa

SEQ ID NO: 2492017 - RNA, 22 nt, Human
augggagggggcuugaagccaa

SEQ ID NO: 2492018 - RNA, 15 nt, Human
augggauccuggagu

SEQ ID NO: 2492019 - RNA, 18 nt, Human
augggaugguggagggcc

SEQ ID NO: 2492020 - RNA, 23 nt, Human
augggauucagugcuucuuaaag

SEQ ID NO: 2492021 - RNA, 17 nt, Human
uuucucccagucauuua

SEQ ID NO: 2492022 - RNA, 14 nt, Human
augggcaaaacuga

SEQ ID NO: 2492023 - RNA, 17 nt, Human
augggcaaaacugaauu

SEQ ID NO: 2492024 - RNA, 18 nt, Human
uuucucccagucauuuaa

SEQ ID NO: 2492025 - RNA, 12 nt, Human
uuucuccccagg

SEQ ID NO: 2492026 - RNA, 13 nt, Human
uuucucccccugg

SEQ ID NO: 2492027 - RNA, 14 nt, Human
uuucucccccuggg

SEQ ID NO: 2492028 - RNA, 15 nt, Human
uuucucccccugggc

SEQ ID NO: 2492029 - RNA, 15 nt, Human
uuucuggcuaugcau

SEQ ID NO: 2492030 - RNA, 16 nt, Human
uuucuggcuaugcauu

SEQ ID NO: 2492031 - RNA, 18 nt, Human
uuucuggcuaugcauuug

SEQ ID NO: 2492032 - RNA, 19 nt, Human
uuucuggcuaugcauuuga

SEQ ID NO: 2492033 - RNA, 17 nt, Human
uuucuccccugccccca

SEQ ID NO: 2492034 - RNA, 16 nt, Human
uuucuccccugccccc

SEQ ID NO: 2492035 - RNA, 14 nt, Human
uuucuccccugccc

SEQ ID NO: 2492036 - RNA, 13 nt, Human
uuucuccccugcc

SEQ ID NO: 2492037 - RNA, 23 nt, Human
uuucugauuguaacguugcugug

SEQ ID NO: 2492038 - RNA, 11 nt, Human
uuucugauugu

SEQ ID NO: 2492039 - RNA, 19 nt, Human
uuucugcagccacuauugu

SEQ ID NO: 2492040 - RNA, 22 nt, Human
uuucugauuguaacguugcugu

SEQ ID NO: 2492041 - RNA, 13 nt, Human
uuucugcacugag

SEQ ID NO: 2492042 - RNA, 14 nt, Human
uuucugcagaaaca

SEQ ID NO: 2492043 - RNA, 18 nt, Human
uuucugcacugagcagag

SEQ ID NO: 2492044 - RNA, 17 nt, Human
uuucugcacugagcaga

SEQ ID NO: 2492045 - RNA, 23 nt, Human
uuucugggagacagaaaacaugu

SEQ ID NO: 2492046 - RNA, 21 nt, Human
uuucugcagccacuauuguua

SEQ ID NO: 2492047 - RNA, 19 nt, Human
uuucugggcugucuauucu

SEQ ID NO: 2492048 - RNA, 16 nt, Human
uuucugggauaaguaa

SEQ ID NO: 2492049 - RNA, 23 nt, Human
uuucugggcaccggggccucgga

SEQ ID NO: 2492050 - RNA, 19 nt, Human
uuucuggcuggagccuaga

SEQ ID NO: 2492051 - RNA, 21 nt, Human
uuucugggcugucuauucuag

SEQ ID NO: 2492052 - RNA, 20 nt, Human
uuucugguggucuguuggca

SEQ ID NO: 2492053 - RNA, 17 nt, Human
uuucugguggucuguug

SEQ ID NO: 2492054 - RNA, 15 nt, Human
uuucugguggucugu

SEQ ID NO: 2492055 - RNA, 15 nt, Human
uuucugguagauaga

SEQ ID NO: 2492056 - RNA, 17 nt, Human
uuucugguagauagaaa

SEQ ID NO: 2492057 - RNA, 15 nt, Human
uuucugucaagaaga

SEQ ID NO: 2492058 - RNA, 17 nt, Human
uuucuguauauacuuuu

SEQ ID NO: 2492059 - RNA, 19 nt, Human
uuucugguagauagaaaua

SEQ ID NO: 2492060 - RNA, 19 nt, Human
uuucuguuauauaaauggu

SEQ ID NO: 2492061 - RNA, 22 nt, Human
uuucugugugcaccuuaccaac

SEQ ID NO: 2492062 - RNA, 20 nt, Human
uuucugugugcaccuuacca

SEQ ID NO: 2492063 - RNA, 11 nt, Human
uuucugugugc

SEQ ID NO: 2492064 - RNA, 17 nt, Human
uuucugugccugaauau

SEQ ID NO: 2492065 - RNA, 15 nt, Human
uuucugucucugccu

SEQ ID NO: 2492066 - RNA, 15 nt, Human
uuucugucccuucug

SEQ ID NO: 2492067 - RNA, 23 nt, Human
uuucuguccuuuuggcacugaga

SEQ ID NO: 2492068 - RNA, 22 nt, Human
uuucuuugaaugcuuuuugaau

SEQ ID NO: 2492069 - RNA, 16 nt, Human
uuucuuugaaugcuuu

SEQ ID NO: 2492070 - RNA, 15 nt, Human
uuucuuucuuagaaa

SEQ ID NO: 2492071 - RNA, 13 nt, Human
uuucuuucuuaga

SEQ ID NO: 2492072 - RNA, 13 nt, Human
uuucuuucuagug

SEQ ID NO: 2492073 - RNA, 13 nt, Human
uuucuuuccagag

SEQ ID NO: 2492074 - RNA, 12 nt, Human
uuucuuucuagu

SEQ ID NO: 2492075 - RNA, 17 nt, Human
uuucuguucuguggaaa

SEQ ID NO: 2492076 - RNA, 16 nt, Human
uuucuguucuguggaa

SEQ ID NO: 2492077 - RNA, 15 nt, Human
uuucuguucugugga

SEQ ID NO: 2492078 - RNA, 19 nt, Human
uuucuguucuguggaaagu

SEQ ID NO: 2492079 - RNA, 18 nt, Human
uuugaaauuaaccucuca

SEQ ID NO: 2492080 - RNA, 16 nt, Human
uuugaaauguguuucu

SEQ ID NO: 2492081 - RNA, 20 nt, Human
augggccuggccaccucucu

SEQ ID NO: 2492082 - RNA, 19 nt, Human
augggccugcuuccugucu

SEQ ID NO: 2492083 - RNA, 18 nt, Human
augggccuccugugugug

SEQ ID NO: 2492084 - RNA, 20 nt, Human
augggcuggguucuacccag

SEQ ID NO: 2492085 - RNA, 21 nt, Human
augggcucugacagaaagcag

SEQ ID NO: 2492086 - RNA, 17 nt, Human
augggcuaaugaagauc

SEQ ID NO: 2492087 - RNA, 16 nt, Human
augggcuaaugaagau

SEQ ID NO: 2492088 - RNA, 19 nt, Human
augggcugcagcagaggca

SEQ ID NO: 2492089 - RNA, 19 nt, Human
auggggaucacagagacau

SEQ ID NO: 2492090 - RNA, 17 nt, Human
auggggaucacagagac

SEQ ID NO: 2492091 - RNA, 16 nt, Human
auggggaucacagaga

SEQ ID NO: 2492092 - RNA, 20 nt, Human
auggggauagauguguggac

SEQ ID NO: 2492093 - RNA, 12 nt, Human
auggggaugcag

SEQ ID NO: 2492094 - RNA, 15 nt, Human
uuugaaauauugacu

SEQ ID NO: 2492095 - RNA, 22 nt, Human
uuugaaaaauuccuauugugau

SEQ ID NO: 2492096 - RNA, 16 nt, Human
uuugaaaaauuccuau

SEQ ID NO: 2492097 - RNA, 15 nt, Human
uuugaaaacauauaa

SEQ ID NO: 2492098 - RNA, 15 nt, Human
uuugaaaucagcaua

SEQ ID NO: 2492099 - RNA, 21 nt, Human
uuucuuugggaauauuugaau

SEQ ID NO: 2492100 - RNA, 19 nt, Human
uuucuuugggaauauuuga

SEQ ID NO: 2492101 - RNA, 17 nt, Human
uuucuuugggaauauuu

SEQ ID NO: 2492102 - RNA, 21 nt, Human
uuucuuugccuguucaguuac

SEQ ID NO: 2492103 - RNA, 23 nt, Human
uuucuuugggaauauuugaaucu

SEQ ID NO: 2492104 - RNA, 19 nt, Human
uuucuuuuucuucuucccu

SEQ ID NO: 2492105 - RNA, 14 nt, Human
uuucuuuuucuucu

SEQ ID NO: 2492106 - RNA, 13 nt, Human
auggggccagauc

SEQ ID NO: 2492107 - RNA, 14 nt, Human
auggggccagaucc

SEQ ID NO: 2492108 - RNA, 15 nt, Human
auggggccagaucca

SEQ ID NO: 2492109 - RNA, 19 nt, Human
auggggccagauccagccu

SEQ ID NO: 2492110 - RNA, 12 nt, Human
auggggcugcac

SEQ ID NO: 2492111 - RNA, 16 nt, Human
augggggaaagcacag

SEQ ID NO: 2492112 - RNA, 11 nt, Human
augggggaaag

SEQ ID NO: 2492113 - RNA, 21 nt, Human
auggggccagauccagccugg

SEQ ID NO: 2492114 - RNA, 22 nt, Human
auggggccagauccagccuggg

SEQ ID NO: 2492115 - RNA, 24 nt, Human
auggggcugcaccggcuggccugg

SEQ ID NO: 2492116 - RNA, 14 nt, Human
augggggugcauuu

SEQ ID NO: 2492117 - RNA, 17 nt, Human
augggggcacugaggac

SEQ ID NO: 2492118 - RNA, 15 nt, Human
augggggccuggauu

SEQ ID NO: 2492119 - RNA, 18 nt, Human
augggggaaauggugccu

SEQ ID NO: 2492120 - RNA, 22 nt, Human
augggggaaagcacaggugggc

SEQ ID NO: 2492121 - RNA, 18 nt, Human
augggggaacucagaucc

SEQ ID NO: 2492122 - RNA, 19 nt, Human
augggggaacucagaucca

SEQ ID NO: 2492123 - RNA, 21 nt, Human
augggggaacucagauccagg

SEQ ID NO: 2492124 - RNA, 19 nt, Human
augggggaggggggaagga

SEQ ID NO: 2492125 - RNA, 19 nt, Human
augggggagucugaagcag

SEQ ID NO: 2492126 - RNA, 20 nt, Human
augggggagucugaagcaga

SEQ ID NO: 2492127 - RNA, 14 nt, Human
augggggcaagaag

SEQ ID NO: 2492128 - RNA, 15 nt, Human
augggggcaagaaga

SEQ ID NO: 2492129 - RNA, 21 nt, Human
augggggagucugaagcagau

SEQ ID NO: 2492130 - RNA, 19 nt, Human
auggggguagcagcuggac

SEQ ID NO: 2492131 - RNA, 16 nt, Human
augggguccuggccau

SEQ ID NO: 2492132 - RNA, 17 nt, Human
augggguccuggccauc

SEQ ID NO: 2492133 - RNA, 16 nt, Human
auggggucuguaaaau

SEQ ID NO: 2492134 - RNA, 18 nt, Human
auggggucuguaaaaucu

SEQ ID NO: 2492135 - RNA, 17 nt, Human
auggggucuguaaaauc

SEQ ID NO: 2492136 - RNA, 15 nt, Human
auggggugggccucu

SEQ ID NO: 2492137 - RNA, 21 nt, Human
auggggugaugcugggcuggc

SEQ ID NO: 2492138 - RNA, 15 nt, Human
augggggugcauuug

SEQ ID NO: 2492139 - RNA, 18 nt, Human
auggggguagcagcugga

SEQ ID NO: 2492140 - RNA, 17 nt, Human
auggggguagcagcugg

SEQ ID NO: 2492141 - RNA, 16 nt, Human
auggggguagcagcug

SEQ ID NO: 2492142 - RNA, 16 nt, Human
auggggggccaacacc

SEQ ID NO: 2492143 - RNA, 22 nt, Human
auggggggccaacaccagggau

SEQ ID NO: 2492144 - RNA, 17 nt, Human
auggguagagaaacacu

SEQ ID NO: 2492145 - RNA, 18 nt, Human
auggggugggccucuggu

SEQ ID NO: 2492146 - RNA, 16 nt, Human
auggggugggccucug

SEQ ID NO: 2492147 - RNA, 19 nt, Human
auggggugggguagggcug

SEQ ID NO: 2492148 - RNA, 19 nt, Human
auggggugggccucugguu

SEQ ID NO: 2492149 - RNA, 18 nt, Human
augggguuggcugggccc

SEQ ID NO: 2492150 - RNA, 18 nt, Human
auggguaauauaaagugu

SEQ ID NO: 2492151 - RNA, 21 nt, Human
augggguuggcugggcccaga

SEQ ID NO: 2492152 - RNA, 17 nt, Human
augggucuggcugagcu

SEQ ID NO: 2492153 - RNA, 15 nt, Human
augcggucuagggaa

SEQ ID NO: 2492154 - RNA, 20 nt, Human
augcgguagccagcacacag

SEQ ID NO: 2492155 - RNA, 21 nt, Human
augcgguagccagcacacagg

SEQ ID NO: 2492156 - RNA, 15 nt, Human
augcgguagccagca

SEQ ID NO: 2492157 - RNA, 18 nt, Human
augcgguagccagcacac

SEQ ID NO: 2492158 - RNA, 14 nt, Human
augcgguagccagc

SEQ ID NO: 2492159 - RNA, 19 nt, Human
augcgggcugggcagcugu

SEQ ID NO: 2492160 - RNA, 21 nt, Human
augcguacguuuccugagaag

SEQ ID NO: 2492161 - RNA, 22 nt, Human
augcuaaaccuuaguacugagu

SEQ ID NO: 2492162 - RNA, 23 nt, Human
augcuaaaccuuaguacugaguu

SEQ ID NO: 2492163 - RNA, 22 nt, Human
augcuaaagaaaaagucaucca

SEQ ID NO: 2492164 - RNA, 14 nt, Human
augcuaaagaaaaa

SEQ ID NO: 2492165 - RNA, 23 nt, Human
augcuaaagguuguauugcauau

SEQ ID NO: 2492166 - RNA, 18 nt, Human
augcgggcugggcagcug

SEQ ID NO: 2492167 - RNA, 17 nt, Human
augcgggcugggcagcu

SEQ ID NO: 2492168 - RNA, 12 nt, Human
augccuccaccg

SEQ ID NO: 2492169 - RNA, 13 nt, Human
augccuccaccgc

SEQ ID NO: 2492170 - RNA, 17 nt, Human
augccuccaccgcugcc

SEQ ID NO: 2492171 - RNA, 21 nt, Human
augccuccaccgcugccuaag

SEQ ID NO: 2492172 - RNA, 19 nt, Human
augccucaguguauuugua

SEQ ID NO: 2492173 - RNA, 16 nt, Human
augccucaguguauuu

SEQ ID NO: 2492174 - RNA, 20 nt, Human
augccucaguguauuuguau

SEQ ID NO: 2492175 - RNA, 20 nt, Human
augccuccaccccccagaac

SEQ ID NO: 2492176 - RNA, 14 nt, Human
augccucaguguau

SEQ ID NO: 2492177 - RNA, 13 nt, Human
augccucagcccu

SEQ ID NO: 2492178 - RNA, 24 nt, Human
augccucagcccugacccugugga

SEQ ID NO: 2492179 - RNA, 13 nt, Human
augcccagccccu

SEQ ID NO: 2492180 - RNA, 12 nt, Human
augcccagcccc

SEQ ID NO: 2492181 - RNA, 14 nt, Human
augcccagccccuu

SEQ ID NO: 2492182 - RNA, 15 nt, Human
augcccuccucuccc

SEQ ID NO: 2492183 - RNA, 23 nt, Human
augcccuccucucccauuguccc

SEQ ID NO: 2492184 - RNA, 14 nt, Human
augcccuccucucc

SEQ ID NO: 2492185 - RNA, 13 nt, Human
augcccuccucuc

SEQ ID NO: 2492186 - RNA, 12 nt, Human
augcccugugca

SEQ ID NO: 2492187 - RNA, 14 nt, Human
augcccuggaggug

SEQ ID NO: 2492188 - RNA, 15 nt, Human
augcccuggaggugg

SEQ ID NO: 2492189 - RNA, 13 nt, Human
augcccugugcaa

SEQ ID NO: 2492190 - RNA, 23 nt, Human
augcccugugcaaccucuuggcc

SEQ ID NO: 2492191 - RNA, 14 nt, Human
augcccuggaucca

SEQ ID NO: 2492192 - RNA, 16 nt, Human
augcccuggagguggc

SEQ ID NO: 2492193 - RNA, 15 nt, Human
augcccuuaaaucau

SEQ ID NO: 2492194 - RNA, 21 nt, Human
augccgaaugcccucagggga

SEQ ID NO: 2492195 - RNA, 16 nt, Human
augccucagccuccug

SEQ ID NO: 2492196 - RNA, 19 nt, Human
augccgauauacucuagau

SEQ ID NO: 2492197 - RNA, 20 nt, Human
augccucagcccugacccug

SEQ ID NO: 2492198 - RNA, 13 nt, Human
augcaguucugaa

SEQ ID NO: 2492199 - RNA, 14 nt, Human
augcauuugcauuu

SEQ ID NO: 2492200 - RNA, 23 nt, Human
augcauuugaggucaaguaagaa

SEQ ID NO: 2492201 - RNA, 18 nt, Human
augcagggauugcugcca

SEQ ID NO: 2492202 - RNA, 23 nt, Human
augcagugguaugaucacggcuc

SEQ ID NO: 2492203 - RNA, 13 nt, Human
augcagugcuucc

SEQ ID NO: 2492204 - RNA, 23 nt, Human
augcauuuuauuuuagacacaaa

SEQ ID NO: 2492205 - RNA, 22 nt, Human
augcauuuuguuugguauugua

SEQ ID NO: 2492206 - RNA, 19 nt, Human
augcauuuuguuugguauu

SEQ ID NO: 2492207 - RNA, 12 nt, Human
augcauuuugca

SEQ ID NO: 2492208 - RNA, 13 nt, Human
augcauuuugcag

SEQ ID NO: 2492209 - RNA, 18 nt, Human
augcauuuugcagcagug

SEQ ID NO: 2492210 - RNA, 19 nt, Human
augcauuuugcagcaguga

SEQ ID NO: 2492211 - RNA, 20 nt, Human
augccaaagaucacuuguug

SEQ ID NO: 2492212 - RNA, 18 nt, Human
augccaaagaucacuugu

SEQ ID NO: 2492213 - RNA, 16 nt, Human
augccaaagaucacuu

SEQ ID NO: 2492214 - RNA, 17 nt, Human
augccaauauuaaaucu

SEQ ID NO: 2492215 - RNA, 23 nt, Human
augcauuuuguuugguauuguau

SEQ ID NO: 2492216 - RNA, 18 nt, Human
augccaaaaaaagacagg

SEQ ID NO: 2492217 - RNA, 16 nt, Human
augccacaaggacuuc

SEQ ID NO: 2492218 - RNA, 19 nt, Human
augccacaaggacuuccug

SEQ ID NO: 2492219 - RNA, 22 nt, Human
augccaauuagcaauugacugu

SEQ ID NO: 2492220 - RNA, 23 nt, Human
augccaaagaucacuuguuguuu

SEQ ID NO: 2492221 - RNA, 21 nt, Human
augccacaccaagcugugcca

SEQ ID NO: 2492222 - RNA, 20 nt, Human
augccacaccaagcugugcc

SEQ ID NO: 2492223 - RNA, 17 nt, Human
augccacaccaagcugu

SEQ ID NO: 2492224 - RNA, 15 nt, Human
augccacaccaagcu

SEQ ID NO: 2492225 - RNA, 15 nt, Human
augccacacagagug

SEQ ID NO: 2492226 - RNA, 16 nt, Human
augccacacagagugg

SEQ ID NO: 2492227 - RNA, 16 nt, Human
augccacacaucaccc

SEQ ID NO: 2492228 - RNA, 18 nt, Human
augccacacagagugguc

SEQ ID NO: 2492229 - RNA, 23 nt, Human
augccacaccaagcugugccacc

SEQ ID NO: 2492230 - RNA, 22 nt, Human
augccacaccaagcugugccac

SEQ ID NO: 2492231 - RNA, 17 nt, Human
augccauggacagaaga

SEQ ID NO: 2492232 - RNA, 17 nt, Human
augccauuuaaagcuua

SEQ ID NO: 2492233 - RNA, 21 nt, Human
augccauuuaaagcuuauuaa

SEQ ID NO: 2492234 - RNA, 11 nt, Human
augcccagccc

SEQ ID NO: 2492235 - RNA, 15 nt, Human
augcccaagggaaag

SEQ ID NO: 2492236 - RNA, 12 nt, Human
augcccaaggga

SEQ ID NO: 2492237 - RNA, 19 nt, Human
augccauggacagaagaag

SEQ ID NO: 2492238 - RNA, 18 nt, Human
augccauggacagaagaa

SEQ ID NO: 2492239 - RNA, 15 nt, Human
augcagcccaugccc

SEQ ID NO: 2492240 - RNA, 21 nt, Human
augcagcccaugcccaccugc

SEQ ID NO: 2492241 - RNA, 16 nt, Human
augcagccgugaucaa

SEQ ID NO: 2492242 - RNA, 23 nt, Human
augcagcccaugcccaccugccc

SEQ ID NO: 2492243 - RNA, 22 nt, Human
augcagauuuugcccuugacaa

SEQ ID NO: 2492244 - RNA, 16 nt, Human
augcagcaaaauguga

SEQ ID NO: 2492245 - RNA, 17 nt, Human
augcagcaucuaaguaa

SEQ ID NO: 2492246 - RNA, 19 nt, Human
augcagcagggaugcccug

SEQ ID NO: 2492247 - RNA, 20 nt, Human
augcagcagggaugcccugg

SEQ ID NO: 2492248 - RNA, 23 nt, Human
augcagauggggcucccgcccgu

SEQ ID NO: 2492249 - RNA, 21 nt, Human
augcagcugcacccucccucc

SEQ ID NO: 2492250 - RNA, 13 nt, Human
augcagcgugaag

SEQ ID NO: 2492251 - RNA, 15 nt, Human
augcagcugcacccu

SEQ ID NO: 2492252 - RNA, 18 nt, Human
augcagccucacaguccu

SEQ ID NO: 2492253 - RNA, 14 nt, Human
augcagcuaucugg

SEQ ID NO: 2492254 - RNA, 22 nt, Human
augcagcccaugcccaccugcc

SEQ ID NO: 2492255 - RNA, 20 nt, Human
augcagcgaaccaauauuug

SEQ ID NO: 2492256 - RNA, 22 nt, Human
augcagcgaaccaauauuugua

SEQ ID NO: 2492257 - RNA, 18 nt, Human
uuuacaaaguguguauua

SEQ ID NO: 2492258 - RNA, 16 nt, Human
uuuacaaaguguguau

SEQ ID NO: 2492259 - RNA, 12 nt, Human
uuuacaaagugu

SEQ ID NO: 2492260 - RNA, 16 nt, Human
uuuacaaaaauauaaa

SEQ ID NO: 2492261 - RNA, 15 nt, Human
uuuacaaaaauauaa

SEQ ID NO: 2492262 - RNA, 19 nt, Human
uuuacaaaacuacaugaga

SEQ ID NO: 2492263 - RNA, 19 nt, Human
uuuaauuuauuuauuaaga

SEQ ID NO: 2492264 - RNA, 20 nt, Human
uuuaauuuauuuauuaagau

SEQ ID NO: 2492265 - RNA, 19 nt, Human
uuuaauuuuuuugagacag

SEQ ID NO: 2492266 - RNA, 21 nt, Human
uuuaauuuauuaauugcuuug

SEQ ID NO: 2492267 - RNA, 22 nt, Human
uuuaauuuauuaauugcuuuga

SEQ ID NO: 2492268 - RNA, 16 nt, Human
uuuaauuuauuuauua

SEQ ID NO: 2492269 - RNA, 16 nt, Human
uuuaauuuaugaguuu

SEQ ID NO: 2492270 - RNA, 22 nt, Human
uuuaauuguuguuucuuucuag

SEQ ID NO: 2492271 - RNA, 21 nt, Human
uuuaauuguuguuucuuucua

SEQ ID NO: 2492272 - RNA, 18 nt, Human
uuuaauuguuguuucuuu

SEQ ID NO: 2492273 - RNA, 16 nt, Human
uuuaauuguuguuucu

SEQ ID NO: 2492274 - RNA, 24 nt, Human
uuuaauuguuguuucuuucuagug

SEQ ID NO: 2492275 - RNA, 23 nt, Human
uuuaauuguuguuucuuucuagu

SEQ ID NO: 2492276 - RNA, 20 nt, Human
uuuaaauacgcacuacaugu

SEQ ID NO: 2492277 - RNA, 18 nt, Human
uuuaaauauaauucugua

SEQ ID NO: 2492278 - RNA, 16 nt, Human
uuuaaauauaauucug

SEQ ID NO: 2492279 - RNA, 15 nt, Human
uuuaaauauaauucu

SEQ ID NO: 2492280 - RNA, 13 nt, Human
uuuaaauauaauu

SEQ ID NO: 2492281 - RNA, 12 nt, Human
uuuaaauauaau

SEQ ID NO: 2492282 - RNA, 20 nt, Human
uuuaaauacagucuuccauu

SEQ ID NO: 2492283 - RNA, 18 nt, Human
uuuaaauauaugcuaagu

SEQ ID NO: 2492284 - RNA, 21 nt, Human
uuuaaguauugcaucuguaua

SEQ ID NO: 2492285 - RNA, 13 nt, Human
uuuaaguauuuau

SEQ ID NO: 2492286 - RNA, 14 nt, Human
uuuaaguauuuaua

SEQ ID NO: 2492287 - RNA, 15 nt, Human
uuuaaguauuuauau

SEQ ID NO: 2492288 - RNA, 20 nt, Human
uuuaaguauuuauauauuua

SEQ ID NO: 2492289 - RNA, 13 nt, Human
uuuaaguauuuag

SEQ ID NO: 2492290 - RNA, 18 nt, Human
uuuaaguauuuagguuuu

SEQ ID NO: 2492291 - RNA, 16 nt, Human
uuuaagguuuuuacug

SEQ ID NO: 2492292 - RNA, 12 nt, Human
uuuaaguauuua

SEQ ID NO: 2492293 - RNA, 21 nt, Human
uuuaagguuauuuauuuaaau

SEQ ID NO: 2492294 - RNA, 20 nt, Human
uuuaagguuauuuauuuaaa

SEQ ID NO: 2492295 - RNA, 21 nt, Human
uuuaaauauaauucuguaaau

SEQ ID NO: 2492296 - RNA, 22 nt, Human
uuuaauuagugcuaagugugaa

SEQ ID NO: 2492297 - RNA, 21 nt, Human
uuuaauuagugcuaaguguga

SEQ ID NO: 2492298 - RNA, 23 nt, Human
uuuaauuauuauucuucauaaca

SEQ ID NO: 2492299 - RNA, 14 nt, Human
uuuaauuauuauuc

SEQ ID NO: 2492300 - RNA, 23 nt, Human
uuuaauuauuauuuauauaugua

SEQ ID NO: 2492301 - RNA, 17 nt, Human
uuuaauucaccaaagua

SEQ ID NO: 2492302 - RNA, 18 nt, Human
uuuaauuguuaagauaug

SEQ ID NO: 2492303 - RNA, 20 nt, Human
uuuaauuagugcuaagugug

SEQ ID NO: 2492304 - RNA, 19 nt, Human
uuuaauuagugcuaagugu

SEQ ID NO: 2492305 - RNA, 17 nt, Human
uuuaauuagugcuaagu

SEQ ID NO: 2492306 - RNA, 15 nt, Human
uuuaauuagugcuaa

SEQ ID NO: 2492307 - RNA, 14 nt, Human
uuuaauuagugcua

SEQ ID NO: 2492308 - RNA, 22 nt, Human
uuuaauuaaugaaauaucugua

SEQ ID NO: 2492309 - RNA, 21 nt, Human
uuuaauuagggguugcuaaga

SEQ ID NO: 2492310 - RNA, 15 nt, Human
uuuaaugugcugugu

SEQ ID NO: 2492311 - RNA, 21 nt, Human
uuuaagugcguguguagaguu

SEQ ID NO: 2492312 - RNA, 20 nt, Human
uuuaagugcguguguagagu

SEQ ID NO: 2492313 - RNA, 18 nt, Human
uuuaagugcguguguaga

SEQ ID NO: 2492314 - RNA, 19 nt, Human
uuuaaugugcuguguaaag

SEQ ID NO: 2492315 - RNA, 18 nt, Human
uuuaaugugcuguguaaa

SEQ ID NO: 2492316 - RNA, 17 nt, Human
uuuaaugugcuguguaa

SEQ ID NO: 2492317 - RNA, 16 nt, Human
uuuaaugugcugugua

SEQ ID NO: 2492318 - RNA, 21 nt, Human
uuuaaugugcuguguaaaguu

SEQ ID NO: 2492319 - RNA, 20 nt, Human
uuuaaugugcuguguaaagu

SEQ ID NO: 2492320 - RNA, 22 nt, Human
uuuaaugugcuguguaaaguua

SEQ ID NO: 2492321 - RNA, 19 nt, Human
uuuaauuaaugaaauaucu

SEQ ID NO: 2492322 - RNA, 17 nt, Human
uuuaauuaaugaaauau

SEQ ID NO: 2492323 - RNA, 22 nt, Human
uuuaauuaaucaugaaugugua

SEQ ID NO: 2492324 - RNA, 19 nt, Human
uuuaauuaaucaugaaugu

SEQ ID NO: 2492325 - RNA, 20 nt, Human
uuuaauuaaaugcucaucug

SEQ ID NO: 2492326 - RNA, 15 nt, Human
uuuaauuaaaugcuc

SEQ ID NO: 2492327 - RNA, 13 nt, Human
uuuaauuaaauaa

SEQ ID NO: 2492328 - RNA, 15 nt, Human
uuguguuacuaaguu

SEQ ID NO: 2492329 - RNA, 20 nt, Human
uuguguuacuaaguuuuuau

SEQ ID NO: 2492330 - RNA, 13 nt, Human
uuguguuacuaag

SEQ ID NO: 2492331 - RNA, 22 nt, Human
uuggugccuggccuggcacaca

SEQ ID NO: 2492332 - RNA, 20 nt, Human
uuggugccuggccuggcaca

SEQ ID NO: 2492333 - RNA, 15 nt, Human
uuguucauagcccag

SEQ ID NO: 2492334 - RNA, 22 nt, Human
uuggugcuuacacaucucagac

SEQ ID NO: 2492335 - RNA, 16 nt, Human
uugguggagauaaaga

SEQ ID NO: 2492336 - RNA, 15 nt, Human
uuguucaucuguaac

SEQ ID NO: 2492337 - RNA, 17 nt, Human
uuguucauuuugagcug

SEQ ID NO: 2492338 - RNA, 16 nt, Human
uuguuccaagacauug

SEQ ID NO: 2492339 - RNA, 19 nt, Human
uuguucauuuugagcugaa

SEQ ID NO: 2492340 - RNA, 17 nt, Human
uuguuccaagacauugu

SEQ ID NO: 2492341 - RNA, 21 nt, Human
uuguuccacaaguuaaauaaa

SEQ ID NO: 2492342 - RNA, 17 nt, Human
augauaaguaaaugcua

SEQ ID NO: 2492343 - RNA, 14 nt, Human
uuguugacuuauuu

SEQ ID NO: 2492344 - RNA, 17 nt, Human
uuguugacuuauuuucu

SEQ ID NO: 2492345 - RNA, 17 nt, Human
augauacaagauuagaa

SEQ ID NO: 2492346 - RNA, 18 nt, Human
uuguugagcuauugcugu

SEQ ID NO: 2492347 - RNA, 15 nt, Human
augauaacuggaaac

SEQ ID NO: 2492348 - RNA, 21 nt, Human
uuguugacaguucugaagaau

SEQ ID NO: 2492349 - RNA, 18 nt, Human
uuguugacaguucugaag

SEQ ID NO: 2492350 - RNA, 14 nt, Human
uuguucuuuaaagu

SEQ ID NO: 2492351 - RNA, 15 nt, Human
uuguucuuuguucuu

SEQ ID NO: 2492352 - RNA, 13 nt, Human
uuguucuuuuuau

SEQ ID NO: 2492353 - RNA, 13 nt, Human
uuguuccagauuc

SEQ ID NO: 2492354 - RNA, 12 nt, Human
uuguuccagcuc

SEQ ID NO: 2492355 - RNA, 21 nt, Human
uuguuccaagacauugucaau

SEQ ID NO: 2492356 - RNA, 22 nt, Human
uuguuccaagacauugucaaua

SEQ ID NO: 2492357 - RNA, 20 nt, Human
uuguucuugguuuguaaauu

SEQ ID NO: 2492358 - RNA, 11 nt, Human
uuguucccagu

SEQ ID NO: 2492359 - RNA, 20 nt, Human
augaucuaggaagacuuugg

SEQ ID NO: 2492360 - RNA, 17 nt, Human
augaucuaggaagacuu

SEQ ID NO: 2492361 - RNA, 15 nt, Human
augaucuaggaagac

SEQ ID NO: 2492362 - RNA, 21 nt, Human
augauccaugaguuugcccug

SEQ ID NO: 2492363 - RNA, 22 nt, Human
augauccaugaguuugcccugg

SEQ ID NO: 2492364 - RNA, 14 nt, Human
augauuaaguaaug

SEQ ID NO: 2492365 - RNA, 19 nt, Human
augaucuagguuuaacuca

SEQ ID NO: 2492366 - RNA, 17 nt, Human
augaucuagguuuaacu

SEQ ID NO: 2492367 - RNA, 16 nt, Human
augaucuagguuuaac

SEQ ID NO: 2492368 - RNA, 15 nt, Human
augaucuagguuuaa

SEQ ID NO: 2492369 - RNA, 22 nt, Human
augaucuagguuuaacucagau

SEQ ID NO: 2492370 - RNA, 21 nt, Human
augaucuagguuuaacucaga

SEQ ID NO: 2492371 - RNA, 12 nt, Human
augaucucccug

SEQ ID NO: 2492372 - RNA, 14 nt, Human
augaucucccugcc

SEQ ID NO: 2492373 - RNA, 18 nt, Human
augauuaaguaaugauaa

SEQ ID NO: 2492374 - RNA, 16 nt, Human
augauuaauucaccuu

SEQ ID NO: 2492375 - RNA, 15 nt, Human
augaucucccugccg

SEQ ID NO: 2492376 - RNA, 19 nt, Human
augauuacucuuugagaua

SEQ ID NO: 2492377 - RNA, 17 nt, Human
augauaguaagaaaagu

SEQ ID NO: 2492378 - RNA, 21 nt, Human
augauacuugaaaauuaacau

SEQ ID NO: 2492379 - RNA, 17 nt, Human
augauacuugaaaauua

SEQ ID NO: 2492380 - RNA, 15 nt, Human
augauacauccaaag

SEQ ID NO: 2492381 - RNA, 22 nt, Human
augauacccugaauuuggccug

SEQ ID NO: 2492382 - RNA, 13 nt, Human
augauauguaaac

SEQ ID NO: 2492383 - RNA, 21 nt, Human
augauauguaaacauaauucu

SEQ ID NO: 2492384 - RNA, 22 nt, Human
augaucauuugcccuuaaggac

SEQ ID NO: 2492385 - RNA, 15 nt, Human
augaucaguuuuuuu

SEQ ID NO: 2492386 - RNA, 21 nt, Human
augauccaacuaaugccuuac

SEQ ID NO: 2492387 - RNA, 13 nt, Human
augaucaguuuuu

SEQ ID NO: 2492388 - RNA, 22 nt, Human
augauauguaaacauaauucuu

SEQ ID NO: 2492389 - RNA, 20 nt, Human
augcacuuuguucuggcucu

SEQ ID NO: 2492390 - RNA, 19 nt, Human
augcacuuuguucuggcuc

SEQ ID NO: 2492391 - RNA, 17 nt, Human
augcacuuuguucuggc

SEQ ID NO: 2492392 - RNA, 16 nt, Human
augcacuuuguucugg

SEQ ID NO: 2492393 - RNA, 22 nt, Human
augcaccagcccuuagcaggga

SEQ ID NO: 2492394 - RNA, 18 nt, Human
augcaaggaaggaaagaa

SEQ ID NO: 2492395 - RNA, 20 nt, Human
augcaaggaaggaaagaaag

SEQ ID NO: 2492396 - RNA, 14 nt, Human
augcaaggaccagg

SEQ ID NO: 2492397 - RNA, 15 nt, Human
augcaaggaccagga

SEQ ID NO: 2492398 - RNA, 13 nt, Human
augcaccuggaau

SEQ ID NO: 2492399 - RNA, 14 nt, Human
augcaccauuagaa

SEQ ID NO: 2492400 - RNA, 23 nt, Human
augcaagcuaguggcuucaaaau

SEQ ID NO: 2492401 - RNA, 23 nt, Human
augcaagauaguuuaucuaacuu

SEQ ID NO: 2492402 - RNA, 19 nt, Human
augcaacauguguacuuaa

SEQ ID NO: 2492403 - RNA, 21 nt, Human
augcaacaacauguauaauau

SEQ ID NO: 2492404 - RNA, 22 nt, Human
augauuggauuauucauuuaaa

SEQ ID NO: 2492405 - RNA, 21 nt, Human
augauuggauuauucauuuaa

SEQ ID NO: 2492406 - RNA, 16 nt, Human
augauuggauuauuca

SEQ ID NO: 2492407 - RNA, 15 nt, Human
augauuggauuauuc

SEQ ID NO: 2492408 - RNA, 14 nt, Human
augauuggauuauu

SEQ ID NO: 2492409 - RNA, 13 nt, Human
augauuggauuau

SEQ ID NO: 2492410 - RNA, 12 nt, Human
augcaagauauu

SEQ ID NO: 2492411 - RNA, 16 nt, Human
augcaacaggcacuca

SEQ ID NO: 2492412 - RNA, 13 nt, Human
augcaaggaagga

SEQ ID NO: 2492413 - RNA, 14 nt, Human
augcaaggaaggaa

SEQ ID NO: 2492414 - RNA, 15 nt, Human
augcaaggaaggaaa

SEQ ID NO: 2492415 - RNA, 16 nt, Human
augcaaggaaggaaag

SEQ ID NO: 2492416 - RNA, 15 nt, Human
augauucugcuuuua

SEQ ID NO: 2492417 - RNA, 22 nt, Human
augauuccuugauggagauauu

SEQ ID NO: 2492418 - RNA, 23 nt, Human
augauucugcuuuuaccaugccc

SEQ ID NO: 2492419 - RNA, 20 nt, Human
augauucuuuguuacaggca

SEQ ID NO: 2492420 - RNA, 15 nt, Human
augauuccuuccugu

SEQ ID NO: 2492421 - RNA, 22 nt, Human
augauucuauuuauauguacau

SEQ ID NO: 2492422 - RNA, 23 nt, Human
augauucuauuuauauguacaug

SEQ ID NO: 2492423 - RNA, 23 nt, Human
augauucuaauuuuuaagcaaaa

SEQ ID NO: 2492424 - RNA, 23 nt, Human
augauucgcccaaagccagacag

SEQ ID NO: 2492425 - RNA, 23 nt, Human
uuuaaaguaugaaucuaugccaa

SEQ ID NO: 2492426 - RNA, 16 nt, Human
uuuaaaguagauuaga

SEQ ID NO: 2492427 - RNA, 16 nt, Human
uuuaaaggggcagaaa

SEQ ID NO: 2492428 - RNA, 22 nt, Human
uuuaaaggggcagaaaaacucu

SEQ ID NO: 2492429 - RNA, 17 nt, Human
uuuaaagugauuaaacg

SEQ ID NO: 2492430 - RNA, 18 nt, Human
uuuaaagugauuaaacgu

SEQ ID NO: 2492431 - RNA, 19 nt, Human
uuuaaaguguuucuguuau

SEQ ID NO: 2492432 - RNA, 23 nt, Human
uuuaaauaaaagaaaaaauaucu

SEQ ID NO: 2492433 - RNA, 16 nt, Human
uuuaaauaaaacccuu

SEQ ID NO: 2492434 - RNA, 20 nt, Human
uuuaaaguguuucuguuauu

SEQ ID NO: 2492435 - RNA, 23 nt, Human
uuuaaauaaaguaucaugcauuc

SEQ ID NO: 2492436 - RNA, 22 nt, Human
uuuaaauaaaguaucaugcauu

SEQ ID NO: 2492437 - RNA, 21 nt, Human
uuuaaauaaaguaucaugcau

SEQ ID NO: 2492438 - RNA, 13 nt, Human
uuuaaauaaagua

SEQ ID NO: 2492439 - RNA, 19 nt, Human
uuuaaauaaaagugaucaa

SEQ ID NO: 2492440 - RNA, 15 nt, Human
uuuaaagagagguua

SEQ ID NO: 2492441 - RNA, 14 nt, Human
uuuaaagagagguu

SEQ ID NO: 2492442 - RNA, 13 nt, Human
uuuaaagaaugcu

SEQ ID NO: 2492443 - RNA, 18 nt, Human
uuuaaagaagaaacgucu

SEQ ID NO: 2492444 - RNA, 22 nt, Human
uuuaaaaaucuaccuucuguag

SEQ ID NO: 2492445 - RNA, 20 nt, Human
uuuaaaaaucauuguaugga

SEQ ID NO: 2492446 - RNA, 12 nt, Human
uuuaaaaaugaa

SEQ ID NO: 2492447 - RNA, 11 nt, Human
uuuaaaaauga

SEQ ID NO: 2492448 - RNA, 12 nt, Human
uuuaaaaaugca

SEQ ID NO: 2492449 - RNA, 14 nt, Human
uuuaaaaaugaaau

SEQ ID NO: 2492450 - RNA, 22 nt, Human
uuguuuuggcugaaauucuccu

SEQ ID NO: 2492451 - RNA, 17 nt, Human
uuuaaaaauagacacuc

SEQ ID NO: 2492452 - RNA, 14 nt, Human
uuuaaaaauauuuu

SEQ ID NO: 2492453 - RNA, 12 nt, Human
uuuaaaaaucau

SEQ ID NO: 2492454 - RNA, 13 nt, Human
uuuaaaaaucaua

SEQ ID NO: 2492455 - RNA, 15 nt, Human
uuuaaaaaucauaaa

SEQ ID NO: 2492456 - RNA, 16 nt, Human
uuuaaaaaucauaaac

SEQ ID NO: 2492457 - RNA, 19 nt, Human
uuuaaaaaucauaaacugu

SEQ ID NO: 2492458 - RNA, 18 nt, Human
uuguuuugccaacauugc

SEQ ID NO: 2492459 - RNA, 15 nt, Human
uuguuuugcacuuuu

SEQ ID NO: 2492460 - RNA, 14 nt, Human
uuguuuugcacuuu

SEQ ID NO: 2492461 - RNA, 20 nt, Human
uuguuuugcacacuuugcca

SEQ ID NO: 2492462 - RNA, 16 nt, Human
uuguuuugcacuuuuu

SEQ ID NO: 2492463 - RNA, 19 nt, Human
uuguuuugcuuuuucugac

SEQ ID NO: 2492464 - RNA, 18 nt, Human
uuguuuugcuuuuucuga

SEQ ID NO: 2492465 - RNA, 15 nt, Human
uuguuuugcuuuuuc

SEQ ID NO: 2492466 - RNA, 17 nt, Human
uuguuuugagcuuucca

SEQ ID NO: 2492467 - RNA, 19 nt, Human
uuguuuugacggaugauug

SEQ ID NO: 2492468 - RNA, 20 nt, Human
uuguuuucuucuguauguua

SEQ ID NO: 2492469 - RNA, 24 nt, Human
uuguuuugagcuuuccauguugcu

SEQ ID NO: 2492470 - RNA, 20 nt, Human
uuguuuugagcuuuccaugu

SEQ ID NO: 2492471 - RNA, 23 nt, Human
uuguuuugauguuuguggccuca

SEQ ID NO: 2492472 - RNA, 18 nt, Human
uuguuuucuucuguaugu

SEQ ID NO: 2492473 - RNA, 24 nt, Human
augcaccugaauguuagauaguua

SEQ ID NO: 2492474 - RNA, 15 nt, Human
uuuauuuuucuaaaa

SEQ ID NO: 2492475 - RNA, 22 nt, Human
uuuauuuuuccauuuacaacaa

SEQ ID NO: 2492476 - RNA, 17 nt, Human
uuuauuuuucauauugu

SEQ ID NO: 2492477 - RNA, 16 nt, Human
uuuauuuuucauauug

SEQ ID NO: 2492478 - RNA, 17 nt, Human
uuuauuuuucauuuagu

SEQ ID NO: 2492479 - RNA, 16 nt, Human
uuucaaaaauauaacu

SEQ ID NO: 2492480 - RNA, 20 nt, Human
uuuauuuuucauauugugcc

SEQ ID NO: 2492481 - RNA, 18 nt, Human
uuucaaaaauauaacuua

SEQ ID NO: 2492482 - RNA, 17 nt, Human
uuucaaaaauauaacuu

SEQ ID NO: 2492483 - RNA, 21 nt, Human
uuucaaaaauauaacuuaaaa

SEQ ID NO: 2492484 - RNA, 23 nt, Human
uuucaaaacacaucuuuccuguc

SEQ ID NO: 2492485 - RNA, 18 nt, Human
uuucaaaaccuuuugaaa

SEQ ID NO: 2492486 - RNA, 20 nt, Human
uuucaaaacucauuuccuau

SEQ ID NO: 2492487 - RNA, 20 nt, Human
uuuauuuuguguuuaggaac

SEQ ID NO: 2492488 - RNA, 12 nt, Human
uuuauuuuucau

SEQ ID NO: 2492489 - RNA, 15 nt, Human
uuuauuuuucauauu

SEQ ID NO: 2492490 - RNA, 16 nt, Human
uuuauuuuguguuuag

SEQ ID NO: 2492491 - RNA, 21 nt, Human
auggaaccugacguagcugca

SEQ ID NO: 2492492 - RNA, 17 nt, Human
uuucaaacauauauaac

SEQ ID NO: 2492493 - RNA, 16 nt, Human
uuucaaacuuuacuau

SEQ ID NO: 2492494 - RNA, 16 nt, Human
uuucaaacacaaaugc

SEQ ID NO: 2492495 - RNA, 17 nt, Human
uuucaaacacaaaugca

SEQ ID NO: 2492496 - RNA, 15 nt, Human
uuucaaacuuuacua

SEQ ID NO: 2492497 - RNA, 22 nt, Human
uuucaaacuuuacuauggcccu

SEQ ID NO: 2492498 - RNA, 16 nt, Human
uuucaaacauauauaa

SEQ ID NO: 2492499 - RNA, 22 nt, Human
uuucaaaauuguuacaaauugu

SEQ ID NO: 2492500 - RNA, 12 nt, Human
uuucaaaaugcu

SEQ ID NO: 2492501 - RNA, 13 nt, Human
uuucaaaaugcuu

SEQ ID NO: 2492502 - RNA, 15 nt, Human
uuucaaaaugcuuuu

SEQ ID NO: 2492503 - RNA, 20 nt, Human
uuucaaaauaaaaaccaaga

SEQ ID NO: 2492504 - RNA, 18 nt, Human
augcugugcuaugaauuu

SEQ ID NO: 2492505 - RNA, 23 nt, Human
augcugcuuuccccuguggggau

SEQ ID NO: 2492506 - RNA, 17 nt, Human
augcugugcuaugaauu

SEQ ID NO: 2492507 - RNA, 22 nt, Human
augcugugcccuaaaguguauu

SEQ ID NO: 2492508 - RNA, 20 nt, Human
augcugcuuuccccuguggg

SEQ ID NO: 2492509 - RNA, 18 nt, Human
augcugcuuuccccugug

SEQ ID NO: 2492510 - RNA, 17 nt, Human
augcugcuuuccccugu

SEQ ID NO: 2492511 - RNA, 13 nt, Human
augcugcuuuccc

SEQ ID NO: 2492512 - RNA, 23 nt, Human
augcugcucauccccaccugucu

SEQ ID NO: 2492513 - RNA, 21 nt, Human
augcugcuacuuaauuccuuu

SEQ ID NO: 2492514 - RNA, 13 nt, Human
augcugcuacuua

SEQ ID NO: 2492515 - RNA, 13 nt, Human
augcugcuggaca

SEQ ID NO: 2492516 - RNA, 14 nt, Human
augcucccuccccu

SEQ ID NO: 2492517 - RNA, 19 nt, Human
augcugcuaauucaaagcu

SEQ ID NO: 2492518 - RNA, 23 nt, Human
augcucccccauccuccccuucc

SEQ ID NO: 2492519 - RNA, 21 nt, Human
augcucccccauccuccccuu

SEQ ID NO: 2492520 - RNA, 22 nt, Human
augcucccccauccuccccuuc

SEQ ID NO: 2492521 - RNA, 24 nt, Human
augcuccagucaacaaacuauuuc

SEQ ID NO: 2492522 - RNA, 13 nt, Human
augcuccagucaa

SEQ ID NO: 2492523 - RNA, 15 nt, Human
augcucccccauccu

SEQ ID NO: 2492524 - RNA, 18 nt, Human
augcucccccauccuccc

SEQ ID NO: 2492525 - RNA, 20 nt, Human
augcucccccauccuccccu

SEQ ID NO: 2492526 - RNA, 14 nt, Human
auggaaccuccuuu

SEQ ID NO: 2492527 - RNA, 13 nt, Human
auggaaccuccuu

SEQ ID NO: 2492528 - RNA, 21 nt, Human
auggaaccuccuuucucuucu

SEQ ID NO: 2492529 - RNA, 18 nt, Human
auggaaccugacguagcu

SEQ ID NO: 2492530 - RNA, 13 nt, Human
augcuucucacug

SEQ ID NO: 2492531 - RNA, 17 nt, Human
auggaaccgcaggaagc

SEQ ID NO: 2492532 - RNA, 18 nt, Human
auggaaccgcaggaagcu

SEQ ID NO: 2492533 - RNA, 19 nt, Human
auggaaccgcaggaagcug

SEQ ID NO: 2492534 - RNA, 20 nt, Human
auggaaccgcaggaagcugc

SEQ ID NO: 2492535 - RNA, 23 nt, Human
augcuuccuagaaguuacugaau

SEQ ID NO: 2492536 - RNA, 21 nt, Human
augcuuccuagaaguuacuga

SEQ ID NO: 2492537 - RNA, 17 nt, Human
augcuuccuagaaguua

SEQ ID NO: 2492538 - RNA, 16 nt, Human
augcuuccuagaaguu

SEQ ID NO: 2492539 - RNA, 15 nt, Human
augcuuccuagaagu

SEQ ID NO: 2492540 - RNA, 15 nt, Human
augcuuccugacaau

SEQ ID NO: 2492541 - RNA, 16 nt, Human
augcuuccugacaauc

SEQ ID NO: 2492542 - RNA, 20 nt, Human
augcuuccugacaaucaacu

SEQ ID NO: 2492543 - RNA, 22 nt, Human
augcuuccugacaaucaacucu

SEQ ID NO: 2492544 - RNA, 14 nt, Human
augcugugugacuc

SEQ ID NO: 2492545 - RNA, 14 nt, Human
uuuauauuuaguua

SEQ ID NO: 2492546 - RNA, 14 nt, Human
uuuauauuuaguga

SEQ ID NO: 2492547 - RNA, 14 nt, Human
uuuauaugucaaag

SEQ ID NO: 2492548 - RNA, 16 nt, Human
uuuauauuagaagugu

SEQ ID NO: 2492549 - RNA, 16 nt, Human
augcuaagacucagug

SEQ ID NO: 2492550 - RNA, 19 nt, Human
augcuaacaucuaaaaaua

SEQ ID NO: 2492551 - RNA, 17 nt, Human
augcuaacaucuaaaaa

SEQ ID NO: 2492552 - RNA, 16 nt, Human
augcuaacaucuaaaa

SEQ ID NO: 2492553 - RNA, 14 nt, Human
augcuaacaucuaa

SEQ ID NO: 2492554 - RNA, 23 nt, Human
augcuaaagaaaaagucauccaa

SEQ ID NO: 2492555 - RNA, 15 nt, Human
uuuaucaugacaugu

SEQ ID NO: 2492556 - RNA, 14 nt, Human
uuuaucaugacaug

SEQ ID NO: 2492557 - RNA, 16 nt, Human
uuuaucaugcaugucc

SEQ ID NO: 2492558 - RNA, 22 nt, Human
uuuaucaugcauguccuguaaa

SEQ ID NO: 2492559 - RNA, 23 nt, Human
uuuaucaugcauguccuguaaag

SEQ ID NO: 2492560 - RNA, 17 nt, Human
uuuaucaugugaaauca

SEQ ID NO: 2492561 - RNA, 15 nt, Human
uuuaucauucaagug

SEQ ID NO: 2492562 - RNA, 14 nt, Human
uuuaucauucaagu

SEQ ID NO: 2492563 - RNA, 17 nt, Human
uuuaucauucaagugua

SEQ ID NO: 2492564 - RNA, 15 nt, Human
uuuauuaagauggau

SEQ ID NO: 2492565 - RNA, 18 nt, Human
uuuaucaugugaaaucau

SEQ ID NO: 2492566 - RNA, 22 nt, Human
uuuaucaaacagaauuuuaaag

SEQ ID NO: 2492567 - RNA, 12 nt, Human
uuuauauuuuua

SEQ ID NO: 2492568 - RNA, 21 nt, Human
uuuaucaaucaguauaauucu

SEQ ID NO: 2492569 - RNA, 14 nt, Human
uuuaucaaaucagu

SEQ ID NO: 2492570 - RNA, 18 nt, Human
uuuaucaaucaguauaau

SEQ ID NO: 2492571 - RNA, 15 nt, Human
uuuaucacacuucug

SEQ ID NO: 2492572 - RNA, 18 nt, Human
uuuaucacauguauguuu

SEQ ID NO: 2492573 - RNA, 16 nt, Human
uuuaucacauguaugu

SEQ ID NO: 2492574 - RNA, 14 nt, Human
uuuaucacauguau

SEQ ID NO: 2492575 - RNA, 17 nt, Human
uuuaucacacuucugug

SEQ ID NO: 2492576 - RNA, 18 nt, Human
uuuaucacacuucuguga

SEQ ID NO: 2492577 - RNA, 20 nt, Human
augcuagaacucccuuucaa

SEQ ID NO: 2492578 - RNA, 21 nt, Human
augcuagaacucccuuucaac

SEQ ID NO: 2492579 - RNA, 15 nt, Human
augcuaggucucgga

SEQ ID NO: 2492580 - RNA, 16 nt, Human
augcuagcucugagcc

SEQ ID NO: 2492581 - RNA, 22 nt, Human
augcuagaacucccuuucaaca

SEQ ID NO: 2492582 - RNA, 12 nt, Human
uuuauuaaugca

SEQ ID NO: 2492583 - RNA, 17 nt, Human
uuuauuaaugcacuuuc

SEQ ID NO: 2492584 - RNA, 17 nt, Human
uuuauuaauugcuuuga

SEQ ID NO: 2492585 - RNA, 21 nt, Human
uuuauuaauaaacauucuauc

SEQ ID NO: 2492586 - RNA, 16 nt, Human
uuuauuaauaaacauu

SEQ ID NO: 2492587 - RNA, 23 nt, Human
uuuaucaugacauguuauauauu

SEQ ID NO: 2492588 - RNA, 22 nt, Human
uuuauuaagauggauucucaga

SEQ ID NO: 2492589 - RNA, 13 nt, Human
augcuaucucugu

SEQ ID NO: 2492590 - RNA, 18 nt, Human
augcuagguuaauuccaa

SEQ ID NO: 2492591 - RNA, 12 nt, Human
augcuccagcca

SEQ ID NO: 2492592 - RNA, 17 nt, Human
augcuccagccaacccc

SEQ ID NO: 2492593 - RNA, 18 nt, Human
augcuccagccaaccccu

SEQ ID NO: 2492594 - RNA, 19 nt, Human
augcuccagccaaccccug

SEQ ID NO: 2492595 - RNA, 20 nt, Human
augcuccagccaaccccugu

SEQ ID NO: 2492596 - RNA, 21 nt, Human
augcuccagccaaccccugug

SEQ ID NO: 2492597 - RNA, 17 nt, Human
auggacacuccagugcc

SEQ ID NO: 2492598 - RNA, 15 nt, Human
auggacacuccagug

SEQ ID NO: 2492599 - RNA, 13 nt, Human
auggacacuccag

SEQ ID NO: 2492600 - RNA, 23 nt, Human
auggacaccccuuauccaggacu

SEQ ID NO: 2492601 - RNA, 11 nt, Human
auggacacucc

SEQ ID NO: 2492602 - RNA, 19 nt, Human
auggacuaacuugucuuug

SEQ ID NO: 2492603 - RNA, 23 nt, Human
auggacacuuugaaauguguuuc

SEQ ID NO: 2492604 - RNA, 15 nt, Human
auggacacuuugaaa

SEQ ID NO: 2492605 - RNA, 19 nt, Human
auggacacuccagugccag

SEQ ID NO: 2492606 - RNA, 17 nt, Human
auggacuaucugucugg

SEQ ID NO: 2492607 - RNA, 13 nt, Human
auggacuaucugu

SEQ ID NO: 2492608 - RNA, 21 nt, Human
auggacuaucugucugguggc

SEQ ID NO: 2492609 - RNA, 20 nt, Human
auggacuaucugucuggugg

SEQ ID NO: 2492610 - RNA, 22 nt, Human
auggacuaucugucugguggcc

SEQ ID NO: 2492611 - RNA, 22 nt, Human
auggacacuuugaaauguguuu

SEQ ID NO: 2492612 - RNA, 22 nt, Human
auggacaccccuuauccaggac

SEQ ID NO: 2492613 - RNA, 21 nt, Human
auggacaccccuuauccagga

SEQ ID NO: 2492614 - RNA, 22 nt, Human
uuucccgagcaaagucuaaagu

SEQ ID NO: 2492615 - RNA, 21 nt, Human
uuuccccuguggggaucucag

SEQ ID NO: 2492616 - RNA, 23 nt, Human
uuuccccuguccugauggucagc

SEQ ID NO: 2492617 - RNA, 14 nt, Human
uuuccccuguccug

SEQ ID NO: 2492618 - RNA, 16 nt, Human
uuucccguggccccag

SEQ ID NO: 2492619 - RNA, 15 nt, Human
uuucccguggcccca

SEQ ID NO: 2492620 - RNA, 13 nt, Human
uuucccgccaagc

SEQ ID NO: 2492621 - RNA, 21 nt, Human
uuucccguggccccagccugg

SEQ ID NO: 2492622 - RNA, 20 nt, Human
uuucccguggccccagccug

SEQ ID NO: 2492623 - RNA, 19 nt, Human
uuucccguggccccagccu

SEQ ID NO: 2492624 - RNA, 18 nt, Human
uuucccguggccccagcc

SEQ ID NO: 2492625 - RNA, 12 nt, Human
auggacuuuguu

SEQ ID NO: 2492626 - RNA, 11 nt, Human
auggacuuugu

SEQ ID NO: 2492627 - RNA, 22 nt, Human
auggagaagcagaaauacauau

SEQ ID NO: 2492628 - RNA, 22 nt, Human
auggacuuguauauuuguacaa

SEQ ID NO: 2492629 - RNA, 14 nt, Human
auggagaaacccug

SEQ ID NO: 2492630 - RNA, 23 nt, Human
auggacuuguauauuuguacaaa

SEQ ID NO: 2492631 - RNA, 17 nt, Human
auggacuuguauauuug

SEQ ID NO: 2492632 - RNA, 16 nt, Human
auggacuuguauauuu

SEQ ID NO: 2492633 - RNA, 16 nt, Human
auggacugaugcuuuu

SEQ ID NO: 2492634 - RNA, 17 nt, Human
auggacucuucccccac

SEQ ID NO: 2492635 - RNA, 15 nt, Human
auggacucugcacau

SEQ ID NO: 2492636 - RNA, 21 nt, Human
auggacuccagccugccuggc

SEQ ID NO: 2492637 - RNA, 14 nt, Human
auggacucuacacu

SEQ ID NO: 2492638 - RNA, 16 nt, Human
auggacucuacacugu

SEQ ID NO: 2492639 - RNA, 18 nt, Human
auggacucuacacuguga

SEQ ID NO: 2492640 - RNA, 19 nt, Human
uuucaaauagggucuaacu

SEQ ID NO: 2492641 - RNA, 20 nt, Human
uuucaaauagggucuaacuc

SEQ ID NO: 2492642 - RNA, 14 nt, Human
uuucaaaugugcug

SEQ ID NO: 2492643 - RNA, 13 nt, Human
uuucaaauaucac

SEQ ID NO: 2492644 - RNA, 21 nt, Human
uuucaaauuggagcuucaugg

SEQ ID NO: 2492645 - RNA, 16 nt, Human
uuucaaauugagagaa

SEQ ID NO: 2492646 - RNA, 14 nt, Human
uuucaaauuguauc

SEQ ID NO: 2492647 - RNA, 17 nt, Human
uuucaaagcuuuuucca

SEQ ID NO: 2492648 - RNA, 16 nt, Human
uuucaaagauucaaaa

SEQ ID NO: 2492649 - RNA, 17 nt, Human
uuucaaagggagagaga

SEQ ID NO: 2492650 - RNA, 14 nt, Human
uuucaaagaaggaa

SEQ ID NO: 2492651 - RNA, 20 nt, Human
uuucauuauguaaaauguuu

SEQ ID NO: 2492652 - RNA, 18 nt, Human
uuucauuauguaaaaugu

SEQ ID NO: 2492653 - RNA, 21 nt, Human
uuucauuaauacagggcauuu

SEQ ID NO: 2492654 - RNA, 23 nt, Human
uuucaacaaguagcuaaagucug

SEQ ID NO: 2492655 - RNA, 14 nt, Human
uuucaaauuucaca

SEQ ID NO: 2492656 - RNA, 18 nt, Human
uuuccaugaguccccugu

SEQ ID NO: 2492657 - RNA, 17 nt, Human
uuuccaugaguccccug

SEQ ID NO: 2492658 - RNA, 12 nt, Human
uuuccaucuuua

SEQ ID NO: 2492659 - RNA, 21 nt, Human
uuucauuauuaguacugcucu

SEQ ID NO: 2492660 - RNA, 13 nt, Human
uuucauuauuagu

SEQ ID NO: 2492661 - RNA, 23 nt, Human
uuucccccugcauucuuucugua

SEQ ID NO: 2492662 - RNA, 16 nt, Human
uuucccccuucuacau

SEQ ID NO: 2492663 - RNA, 23 nt, Human
uuuccccccacucuccccacacu

SEQ ID NO: 2492664 - RNA, 17 nt, Human
uuuccaugaaguuugaa

SEQ ID NO: 2492665 - RNA, 16 nt, Human
uuuccaugaaaacguu

SEQ ID NO: 2492666 - RNA, 17 nt, Human
uuuccaugaaaaugcaa

SEQ ID NO: 2492667 - RNA, 21 nt, Human
uuucccccuuuucugcauuuu

SEQ ID NO: 2492668 - RNA, 18 nt, Human
uuuccccggucccuugag

SEQ ID NO: 2492669 - RNA, 16 nt, Human
uuuccccucccugggu

SEQ ID NO: 2492670 - RNA, 13 nt, Human
uuuccccucccug

SEQ ID NO: 2492671 - RNA, 20 nt, Human
uuuccccugcccccagaccu

SEQ ID NO: 2492672 - RNA, 21 nt, Human
uuucccgagcaaagucuaaag

SEQ ID NO: 2492673 - RNA, 18 nt, Human
augggagggaggcucagg

SEQ ID NO: 2492674 - RNA, 20 nt, Human
augggagggggcuugaagcc

SEQ ID NO: 2492675 - RNA, 21 nt, Human
augggagcugguuagaaaugc

SEQ ID NO: 2492676 - RNA, 23 nt, Human
augggaggcucacccccuucucc

SEQ ID NO: 2492677 - RNA, 23 nt, Human
augggagcugaggccacacucag

SEQ ID NO: 2492678 - RNA, 15 nt, Human
augggagaguagaug

SEQ ID NO: 2492679 - RNA, 20 nt, Human
augggagcugguuagaaaug

SEQ ID NO: 2492680 - RNA, 22 nt, Human
augggagcugguuagaaaugca

SEQ ID NO: 2492681 - RNA, 19 nt, Human
augggagagaagagaaugc

SEQ ID NO: 2492682 - RNA, 15 nt, Human
augggagagaagaga

SEQ ID NO: 2492683 - RNA, 18 nt, Human
augggagacccuugacac

SEQ ID NO: 2492684 - RNA, 17 nt, Human
augggagacccuugaca

SEQ ID NO: 2492685 - RNA, 23 nt, Human
augggacuucuuuucacauucuu

SEQ ID NO: 2492686 - RNA, 20 nt, Human
augggacuucuuuucacauu

SEQ ID NO: 2492687 - RNA, 22 nt, Human
augggagaaauaguguggaaau

SEQ ID NO: 2492688 - RNA, 17 nt, Human
auggcucccacaggagu

SEQ ID NO: 2492689 - RNA, 23 nt, Human
auggcuccagucugcugcccucc

SEQ ID NO: 2492690 - RNA, 17 nt, Human
auggcuccagaaauguc

SEQ ID NO: 2492691 - RNA, 13 nt, Human
auggcuccagucu

SEQ ID NO: 2492692 - RNA, 20 nt, Human
auggcuccagucugcugccc

SEQ ID NO: 2492693 - RNA, 22 nt, Human
auggcuccagucugcugcccuc

SEQ ID NO: 2492694 - RNA, 23 nt, Human
auggcuccgaacacccucgaagc

SEQ ID NO: 2492695 - RNA, 13 nt, Human
augggacugggag

SEQ ID NO: 2492696 - RNA, 14 nt, Human
augggacugggagg

SEQ ID NO: 2492697 - RNA, 15 nt, Human
augggacugggaggg

SEQ ID NO: 2492698 - RNA, 19 nt, Human
augggacuucuuuucacau

SEQ ID NO: 2492699 - RNA, 13 nt, Human
augggacuucuuu

SEQ ID NO: 2492700 - RNA, 16 nt, Human
augggacugggagggc

SEQ ID NO: 2492701 - RNA, 17 nt, Human
augggacugggagggcc

SEQ ID NO: 2492702 - RNA, 18 nt, Human
auggcuaauguacugcau

SEQ ID NO: 2492703 - RNA, 14 nt, Human
auggcuauauggca

SEQ ID NO: 2492704 - RNA, 18 nt, Human
auggcguggucaagcacu

SEQ ID NO: 2492705 - RNA, 19 nt, Human
auggcuauauggcaagaaa

SEQ ID NO: 2492706 - RNA, 20 nt, Human
auggcucacuaugaaucuau

SEQ ID NO: 2492707 - RNA, 18 nt, Human
auggcucacuaugaaucu

SEQ ID NO: 2492708 - RNA, 16 nt, Human
auggcucacuaugaau

SEQ ID NO: 2492709 - RNA, 16 nt, Human
auggcuccagaaaugu

SEQ ID NO: 2492710 - RNA, 15 nt, Human
auggcuccagaaaug

SEQ ID NO: 2492711 - RNA, 22 nt, Human
auggcucacuauggugccaaug

SEQ ID NO: 2492712 - RNA, 19 nt, Human
auggcucacuauggugcca

SEQ ID NO: 2492713 - RNA, 18 nt, Human
auggcucacuauggugcc

SEQ ID NO: 2492714 - RNA, 19 nt, Human
auggcuaagcaaaauguga

SEQ ID NO: 2492715 - RNA, 17 nt, Human
auggcgugaucucggcu

SEQ ID NO: 2492716 - RNA, 20 nt, Human
auggcgugucccucucggaa

SEQ ID NO: 2492717 - RNA, 23 nt, Human
auggccccucugaccugcacugg

SEQ ID NO: 2492718 - RNA, 18 nt, Human
auggccccucugaccugc

SEQ ID NO: 2492719 - RNA, 11 nt, Human
auggccccucu

SEQ ID NO: 2492720 - RNA, 20 nt, Human
auggcggguggggguggaau

SEQ ID NO: 2492721 - RNA, 15 nt, Human
auggcgggugggggu

SEQ ID NO: 2492722 - RNA, 11 nt, Human
auggcccuggg

SEQ ID NO: 2492723 - RNA, 18 nt, Human
auggcaguguuccuauuu

SEQ ID NO: 2492724 - RNA, 15 nt, Human
auggcagugucuuuc

SEQ ID NO: 2492725 - RNA, 17 nt, Human
auggcauccaagagugc

SEQ ID NO: 2492726 - RNA, 15 nt, Human
auggcauccugugaa

SEQ ID NO: 2492727 - RNA, 16 nt, Human
auggcauccugugaag

SEQ ID NO: 2492728 - RNA, 15 nt, Human
auggcaucaccucca

SEQ ID NO: 2492729 - RNA, 17 nt, Human
auggcauccugugaagu

SEQ ID NO: 2492730 - RNA, 22 nt, Human
auggccagugucugucccgggg

SEQ ID NO: 2492731 - RNA, 17 nt, Human
auggccagugucugucc

SEQ ID NO: 2492732 - RNA, 16 nt, Human
auggccagugucuguc

SEQ ID NO: 2492733 - RNA, 14 nt, Human
auggcccaguguca

SEQ ID NO: 2492734 - RNA, 15 nt, Human
auggccaugguaccc

SEQ ID NO: 2492735 - RNA, 22 nt, Human
auggccauggaguguacaagua

SEQ ID NO: 2492736 - RNA, 20 nt, Human
auggccccagcacagcuuga

SEQ ID NO: 2492737 - RNA, 18 nt, Human
auggccccagcacagcuu

SEQ ID NO: 2492738 - RNA, 17 nt, Human
auggccccagcacagcu

SEQ ID NO: 2492739 - RNA, 15 nt, Human
auggccccagcacag

SEQ ID NO: 2492740 - RNA, 14 nt, Human
auggccccagcaca

SEQ ID NO: 2492741 - RNA, 16 nt, Human
auggcacuaguauuuc

SEQ ID NO: 2492742 - RNA, 14 nt, Human
auggcacuaguauu

SEQ ID NO: 2492743 - RNA, 21 nt, Human
auggagacugguccugugugc

SEQ ID NO: 2492744 - RNA, 20 nt, Human
auggagacuccugcccuguu

SEQ ID NO: 2492745 - RNA, 18 nt, Human
auggagacugucucaaga

SEQ ID NO: 2492746 - RNA, 18 nt, Human
auggagacuccugcccug

SEQ ID NO: 2492747 - RNA, 14 nt, Human
auggagacuccugc

SEQ ID NO: 2492748 - RNA, 22 nt, Human
auggagaagaaaggccaucaga

SEQ ID NO: 2492749 - RNA, 20 nt, Human
auggagacuccaugagaagc

SEQ ID NO: 2492750 - RNA, 22 nt, Human
auggcacuuagcuaucagaaga

SEQ ID NO: 2492751 - RNA, 20 nt, Human
auggcacuuagcuaucagaa

SEQ ID NO: 2492752 - RNA, 21 nt, Human
auggcaccuucagacuuugcu

SEQ ID NO: 2492753 - RNA, 17 nt, Human
auggcaccuucagacuu

SEQ ID NO: 2492754 - RNA, 13 nt, Human
auggcacccagug

SEQ ID NO: 2492755 - RNA, 14 nt, Human
auggcaccagaggc

SEQ ID NO: 2492756 - RNA, 17 nt, Human
auggcacuugcaucugu

SEQ ID NO: 2492757 - RNA, 16 nt, Human
auggcacuugcaucug

SEQ ID NO: 2492758 - RNA, 22 nt, Human
auggcaggauggccuggccagg

SEQ ID NO: 2492759 - RNA, 17 nt, Human
auggcaggauggccugg

SEQ ID NO: 2492760 - RNA, 20 nt, Human
auggcagcuguuuaaauguu

SEQ ID NO: 2492761 - RNA, 14 nt, Human
auggcagcugccac

SEQ ID NO: 2492762 - RNA, 16 nt, Human
auggcaggauggccug

SEQ ID NO: 2492763 - RNA, 19 nt, Human
auucagacagcugccuggg

SEQ ID NO: 2492764 - RNA, 19 nt, Human
auuauacccccugcaaagc

SEQ ID NO: 2492765 - RNA, 22 nt, Human
auuauacagaccgaacuguugu

SEQ ID NO: 2492766 - RNA, 14 nt, Human
auuauauuaaaaua

SEQ ID NO: 2492767 - RNA, 13 nt, Human
auuauauuaaaau

SEQ ID NO: 2492768 - RNA, 18 nt, Human
auuauacuguauuaagag

SEQ ID NO: 2492769 - RNA, 12 nt, Human
auuauacuguau

SEQ ID NO: 2492770 - RNA, 15 nt, Human
auuauacuaagaaaa

SEQ ID NO: 2492771 - RNA, 17 nt, Human
auuauacuaagaaaaga

SEQ ID NO: 2492772 - RNA, 19 nt, Human
auuauacuaagaaaagaua

SEQ ID NO: 2492773 - RNA, 15 nt, Human
auuauauuuacaaau

SEQ ID NO: 2492774 - RNA, 14 nt, Human
auuauauuaugaag

SEQ ID NO: 2492775 - RNA, 20 nt, Human
auuauauuauuaguuuugau

SEQ ID NO: 2492776 - RNA, 18 nt, Human
auuauauuguuaaucaau

SEQ ID NO: 2492777 - RNA, 12 nt, Human
uuugugcuucua

SEQ ID NO: 2492778 - RNA, 13 nt, Human
uuugugcuguggg

SEQ ID NO: 2492779 - RNA, 11 nt, Human
uuuguggaaaa

SEQ ID NO: 2492780 - RNA, 14 nt, Human
uuuguggaugucuu

SEQ ID NO: 2492781 - RNA, 12 nt, Human
uuuguggaauaa

SEQ ID NO: 2492782 - RNA, 20 nt, Human
uuuguggaaagucacagguc

SEQ ID NO: 2492783 - RNA, 14 nt, Human
uuugugcuucuaau

SEQ ID NO: 2492784 - RNA, 17 nt, Human
uuuguggcaccuuuucu

SEQ ID NO: 2492785 - RNA, 17 nt, Human
uuuguggaugucuuccu

SEQ ID NO: 2492786 - RNA, 11 nt, Human
uuuguggccaa

SEQ ID NO: 2492787 - RNA, 18 nt, Human
uuuguggccaaggagcug

SEQ ID NO: 2492788 - RNA, 20 nt, Human
uuuguggccaaggagcugcu

SEQ ID NO: 2492789 - RNA, 21 nt, Human
uuuguggccaaggagcugcua

SEQ ID NO: 2492790 - RNA, 22 nt, Human
uuuguggccaaggagcugcuau

SEQ ID NO: 2492791 - RNA, 12 nt, Human
uuuguggccuca

SEQ ID NO: 2492792 - RNA, 14 nt, Human
uuuguggccucaga

SEQ ID NO: 2492793 - RNA, 22 nt, Human
auuagugcuaagugugaacugg

SEQ ID NO: 2492794 - RNA, 20 nt, Human
auuagugcuaagugugaacu

SEQ ID NO: 2492795 - RNA, 18 nt, Human
auuagugcuaagugugaa

SEQ ID NO: 2492796 - RNA, 17 nt, Human
auuagugcuaaguguga

SEQ ID NO: 2492797 - RNA, 22 nt, Human
auuaguguaugcuuugaaugua

SEQ ID NO: 2492798 - RNA, 18 nt, Human
auuaguuuacaucauuuu

SEQ ID NO: 2492799 - RNA, 14 nt, Human
auuaguuaauauau

SEQ ID NO: 2492800 - RNA, 17 nt, Human
auuauaauuuaaugcau

SEQ ID NO: 2492801 - RNA, 23 nt, Human
auuauaauuuuuuucaauauuua

SEQ ID NO: 2492802 - RNA, 22 nt, Human
auuauaauuuuuuucaauauuu

SEQ ID NO: 2492803 - RNA, 16 nt, Human
auucuaguuuugucaa

SEQ ID NO: 2492804 - RNA, 19 nt, Human
auuauuuugguacuuuuau

SEQ ID NO: 2492805 - RNA, 17 nt, Human
auuauuuguguaauaga

SEQ ID NO: 2492806 - RNA, 16 nt, Human
auucaaacagucucag

SEQ ID NO: 2492807 - RNA, 18 nt, Human
auucaaacagucucagga

SEQ ID NO: 2492808 - RNA, 19 nt, Human
auucaaacagucucaggaa

SEQ ID NO: 2492809 - RNA, 20 nt, Human
auucaaacagucucaggaaa

SEQ ID NO: 2492810 - RNA, 17 nt, Human
auucacaucuaaccuca

SEQ ID NO: 2492811 - RNA, 20 nt, Human
auucacaucuaaccucaucu

SEQ ID NO: 2492812 - RNA, 22 nt, Human
auucacaguucuuugggccaga

SEQ ID NO: 2492813 - RNA, 20 nt, Human
auuauuuugguacuuuuaug

SEQ ID NO: 2492814 - RNA, 23 nt, Human
auucacaguucuuugggccagac

SEQ ID NO: 2492815 - RNA, 12 nt, Human
auuauuuugaug

SEQ ID NO: 2492816 - RNA, 15 nt, Human
auuauuuguguaaua

SEQ ID NO: 2492817 - RNA, 11 nt, Human
auuauuugcau

SEQ ID NO: 2492818 - RNA, 23 nt, Human
auuauuugaaaacauauaaagca

SEQ ID NO: 2492819 - RNA, 14 nt, Human
auuauuugaaaaca

SEQ ID NO: 2492820 - RNA, 15 nt, Human
auuauuauuuguguu

SEQ ID NO: 2492821 - RNA, 16 nt, Human
auuauuauucuucaua

SEQ ID NO: 2492822 - RNA, 14 nt, Human
auuauuuauuuaau

SEQ ID NO: 2492823 - RNA, 23 nt, Human
auuauuuauucagcuucauuugu

SEQ ID NO: 2492824 - RNA, 15 nt, Human
auuauuuauuuauuu

SEQ ID NO: 2492825 - RNA, 22 nt, Human
auuauuucuaggaagaauuuua

SEQ ID NO: 2492826 - RNA, 20 nt, Human
auuauuucuaggaagaauuu

SEQ ID NO: 2492827 - RNA, 16 nt, Human
auuauuucuaggaaga

SEQ ID NO: 2492828 - RNA, 18 nt, Human
auuauuucacuuuagaug

SEQ ID NO: 2492829 - RNA, 17 nt, Human
auuauuuauuuaauaac

SEQ ID NO: 2492830 - RNA, 21 nt, Human
auuauuucacuuuagaugcug

SEQ ID NO: 2492831 - RNA, 11 nt, Human
auuauuucaga

SEQ ID NO: 2492832 - RNA, 22 nt, Human
auuauguuaaacuagcauaucu

SEQ ID NO: 2492833 - RNA, 14 nt, Human
auuauguuaaacua

SEQ ID NO: 2492834 - RNA, 13 nt, Human
auuauguuaaacu

SEQ ID NO: 2492835 - RNA, 12 nt, Human
auuauguuaaac

SEQ ID NO: 2492836 - RNA, 23 nt, Human
auuauguuaaacuagcauaucug

SEQ ID NO: 2492837 - RNA, 20 nt, Human
auuauuacuuauuuuugaca

SEQ ID NO: 2492838 - RNA, 21 nt, Human
auuauuacuuauuuuugacag

SEQ ID NO: 2492839 - RNA, 13 nt, Human
auuauuacuguuu

SEQ ID NO: 2492840 - RNA, 15 nt, Human
auuauuauuuggccc

SEQ ID NO: 2492841 - RNA, 22 nt, Human
auuauuaguuuacaucauuuuu

SEQ ID NO: 2492842 - RNA, 15 nt, Human
auuauuauucuucau

SEQ ID NO: 2492843 - RNA, 17 nt, Human
auuauuauuaaaaauau

SEQ ID NO: 2492844 - RNA, 22 nt, Human
auuauuaguuuugauuuaaugu

SEQ ID NO: 2492845 - RNA, 15 nt, Human
auuauuaguacugcu

SEQ ID NO: 2492846 - RNA, 22 nt, Human
auuauuagccagguaaugugaa

SEQ ID NO: 2492847 - RNA, 21 nt, Human
auuauuaguaagaaaacauca

SEQ ID NO: 2492848 - RNA, 18 nt, Human
auuauauuuauuacugua

SEQ ID NO: 2492849 - RNA, 15 nt, Human
auuauauuuauuacu

SEQ ID NO: 2492850 - RNA, 23 nt, Human
auuaucuaaaguguguuguugcu

SEQ ID NO: 2492851 - RNA, 17 nt, Human
auuaucuaaaguguguu

SEQ ID NO: 2492852 - RNA, 19 nt, Human
auuaucuaaaaucugcuag

SEQ ID NO: 2492853 - RNA, 14 nt, Human
auuaucuagauacu

SEQ ID NO: 2492854 - RNA, 18 nt, Human
auuaucuagauacuguau

SEQ ID NO: 2492855 - RNA, 21 nt, Human
auuauguuaaaacugggacag

SEQ ID NO: 2492856 - RNA, 20 nt, Human
auuaucuauacauaucuuua

SEQ ID NO: 2492857 - RNA, 14 nt, Human
auuaucuauacaua

SEQ ID NO: 2492858 - RNA, 19 nt, Human
auuaucuauacauaucuuu

SEQ ID NO: 2492859 - RNA, 13 nt, Human
auucagacagcug

SEQ ID NO: 2492860 - RNA, 12 nt, Human
auucagacagcu

SEQ ID NO: 2492861 - RNA, 15 nt, Human
auucagaaggggagg

SEQ ID NO: 2492862 - RNA, 13 nt, Human
auucagacaagca

SEQ ID NO: 2492863 - RNA, 11 nt, Human
auucagacagc

SEQ ID NO: 2492864 - RNA, 20 nt, Human
auucacauuguauucagagu

SEQ ID NO: 2492865 - RNA, 13 nt, Human
auucacauuguau

SEQ ID NO: 2492866 - RNA, 14 nt, Human
auucagaaauugga

SEQ ID NO: 2492867 - RNA, 13 nt, Human
auucagaaauugg

SEQ ID NO: 2492868 - RNA, 17 nt, Human
auucagacagcugccug

SEQ ID NO: 2492869 - RNA, 16 nt, Human
auucagacagcugccu

SEQ ID NO: 2492870 - RNA, 15 nt, Human
auucagacagcugcc

SEQ ID NO: 2492871 - RNA, 14 nt, Human
auucagacagcugc

SEQ ID NO: 2492872 - RNA, 18 nt, Human
auucagacagcugccugg

SEQ ID NO: 2492873 - RNA, 12 nt, Human
auucagcuucau

SEQ ID NO: 2492874 - RNA, 19 nt, Human
auucaggaaaagccucugu

SEQ ID NO: 2492875 - RNA, 20 nt, Human
auucagcuucauuuguguca

SEQ ID NO: 2492876 - RNA, 22 nt, Human
auucaggaaaacugacagagga

SEQ ID NO: 2492877 - RNA, 12 nt, Human
auucaggaagcu

SEQ ID NO: 2492878 - RNA, 22 nt, Human
auucaggaagcagcuuucccca

SEQ ID NO: 2492879 - RNA, 16 nt, Human
auucaggaagaugaaa

SEQ ID NO: 2492880 - RNA, 13 nt, Human
auucaggaagcuc

SEQ ID NO: 2492881 - RNA, 19 nt, Human
auuccagagaguggcuccu

SEQ ID NO: 2492882 - RNA, 21 nt, Human
auuccagagaguggcuccucc

SEQ ID NO: 2492883 - RNA, 20 nt, Human
auuccagaucugcagucacu

SEQ ID NO: 2492884 - RNA, 12 nt, Human
auuccagaggaa

SEQ ID NO: 2492885 - RNA, 19 nt, Human
auuccagagcguguaguga

SEQ ID NO: 2492886 - RNA, 17 nt, Human
auucccagagcaaaaua

SEQ ID NO: 2492887 - RNA, 19 nt, Human
auucccagagcaaaauaau

SEQ ID NO: 2492888 - RNA, 12 nt, Human
auucccagccca

SEQ ID NO: 2492889 - RNA, 14 nt, Human
auuccagccccucu

SEQ ID NO: 2492890 - RNA, 13 nt, Human
auuccagccccuc

SEQ ID NO: 2492891 - RNA, 12 nt, Human
auucccagagac

SEQ ID NO: 2492892 - RNA, 16 nt, Human
auucccagagacagga

SEQ ID NO: 2492893 - RNA, 19 nt, Human
auucccagagacaggaaaa

SEQ ID NO: 2492894 - RNA, 23 nt, Human
auucccagagacaggaaaauccu

SEQ ID NO: 2492895 - RNA, 23 nt, Human
auucccauuuugcaaaauuucca

SEQ ID NO: 2492896 - RNA, 18 nt, Human
auucccauuuugcaaaau

SEQ ID NO: 2492897 - RNA, 20 nt, Human
auucccauuuugcaaaauuu

SEQ ID NO: 2492898 - RNA, 15 nt, Human
auucccaucugucac

SEQ ID NO: 2492899 - RNA, 15 nt, Human
auucccauuuugcaa

SEQ ID NO: 2492900 - RNA, 22 nt, Human
auucccagggaagugcucugau

SEQ ID NO: 2492901 - RNA, 20 nt, Human
auucccagggaagugcucug

SEQ ID NO: 2492902 - RNA, 17 nt, Human
auucccuagaaacuucc

SEQ ID NO: 2492903 - RNA, 20 nt, Human
auucccuagaaacuuccaaa

SEQ ID NO: 2492904 - RNA, 21 nt, Human
auucccuagaaacuuccaaau

SEQ ID NO: 2492905 - RNA, 23 nt, Human
auucccccuggccaccacccccc

SEQ ID NO: 2492906 - RNA, 23 nt, Human
auuccccgucucugguuccuccc

SEQ ID NO: 2492907 - RNA, 22 nt, Human
auuccccucugcugcugucccu

SEQ ID NO: 2492908 - RNA, 15 nt, Human
auuccccucugcugc

SEQ ID NO: 2492909 - RNA, 13 nt, Human
auuccccucugcu

SEQ ID NO: 2492910 - RNA, 20 nt, Human
auuccccggggcguuucuuu

SEQ ID NO: 2492911 - RNA, 21 nt, Human
auuccccuaucucuagaauuu

SEQ ID NO: 2492912 - RNA, 17 nt, Human
auucccuagaucuuucu

SEQ ID NO: 2492913 - RNA, 18 nt, Human
auucuaagacuaaugcuc

SEQ ID NO: 2492914 - RNA, 19 nt, Human
auucuaacuuuuuugcuau

SEQ ID NO: 2492915 - RNA, 15 nt, Human
auucuaagugaaauu

SEQ ID NO: 2492916 - RNA, 13 nt, Human
auucuaaugucuu

SEQ ID NO: 2492917 - RNA, 12 nt, Human
auucuaaugucu

SEQ ID NO: 2492918 - RNA, 13 nt, Human
auuggcagcagau

SEQ ID NO: 2492919 - RNA, 14 nt, Human
auucuuaaauaugu

SEQ ID NO: 2492920 - RNA, 17 nt, Human
auucuguagauucugug

SEQ ID NO: 2492921 - RNA, 21 nt, Human
auucuuacaaacaugugguua

SEQ ID NO: 2492922 - RNA, 16 nt, Human
auucuuacaaacaugu

SEQ ID NO: 2492923 - RNA, 22 nt, Human
auucuuaagggaacuuccacau

SEQ ID NO: 2492924 - RNA, 21 nt, Human
auucuucccuaucuuugccac

SEQ ID NO: 2492925 - RNA, 12 nt, Human
auucuuccuagu

SEQ ID NO: 2492926 - RNA, 20 nt, Human
auucuucccuaucuuugcca

SEQ ID NO: 2492927 - RNA, 17 nt, Human
auucuuccuaguuuucu

SEQ ID NO: 2492928 - RNA, 19 nt, Human
auucuuccuaguuuucucc

SEQ ID NO: 2492929 - RNA, 14 nt, Human
auucuuccaucuga

SEQ ID NO: 2492930 - RNA, 15 nt, Human
auucuuccaucugau

SEQ ID NO: 2492931 - RNA, 13 nt, Human
auucuuccaucug

SEQ ID NO: 2492932 - RNA, 17 nt, Human
auucuuacaaacaugug

SEQ ID NO: 2492933 - RNA, 23 nt, Human
auucuuccaucugauugugaugu

SEQ ID NO: 2492934 - RNA, 18 nt, Human
auugaaaucuuuuugcuu

SEQ ID NO: 2492935 - RNA, 17 nt, Human
auugaaaucuuuuugcu

SEQ ID NO: 2492936 - RNA, 20 nt, Human
auugaaaucuuuuugcuuug

SEQ ID NO: 2492937 - RNA, 16 nt, Human
auugaaaugacuaaaa

SEQ ID NO: 2492938 - RNA, 12 nt, Human
auugaaaucuuu

SEQ ID NO: 2492939 - RNA, 19 nt, Human
auugaaaaaauagagccug

SEQ ID NO: 2492940 - RNA, 22 nt, Human
auugaaaaaauagagccugagg

SEQ ID NO: 2492941 - RNA, 15 nt, Human
auugaaaaaccauuu

SEQ ID NO: 2492942 - RNA, 14 nt, Human
auugaaaaaauaga

SEQ ID NO: 2492943 - RNA, 18 nt, Human
auugaaaaaauagagccu

SEQ ID NO: 2492944 - RNA, 15 nt, Human
auugaagcccuccaa

SEQ ID NO: 2492945 - RNA, 14 nt, Human
auugacaaacucuc

SEQ ID NO: 2492946 - RNA, 22 nt, Human
auugaagcauuuuauaaaucgc

SEQ ID NO: 2492947 - RNA, 15 nt, Human
auugaacucuuugaa

SEQ ID NO: 2492948 - RNA, 23 nt, Human
auugaacucuuugaaugacaaag

SEQ ID NO: 2492949 - RNA, 19 nt, Human
auugaacuuaaauaaaugu

SEQ ID NO: 2492950 - RNA, 15 nt, Human
auugacacuuaaaaa

SEQ ID NO: 2492951 - RNA, 17 nt, Human
auugacacuuaaaaaug

SEQ ID NO: 2492952 - RNA, 15 nt, Human
auugacaagaacuga

SEQ ID NO: 2492953 - RNA, 15 nt, Human
auugacaagucauuu

SEQ ID NO: 2492954 - RNA, 17 nt, Human
auugacaauaauuucag

SEQ ID NO: 2492955 - RNA, 12 nt, Human
auugacacagaa

SEQ ID NO: 2492956 - RNA, 14 nt, Human
auugacacagaaaa

SEQ ID NO: 2492957 - RNA, 18 nt, Human
auugacaauaauuucagg

SEQ ID NO: 2492958 - RNA, 20 nt, Human
auugacaauaauuucagguu

SEQ ID NO: 2492959 - RNA, 21 nt, Human
auugacgacaagugcugaaca

SEQ ID NO: 2492960 - RNA, 22 nt, Human
auugacgacaagugcugaacag

SEQ ID NO: 2492961 - RNA, 17 nt, Human
auugacacagaaaaugu

SEQ ID NO: 2492962 - RNA, 19 nt, Human
auugacacuuaaaaauggu

SEQ ID NO: 2492963 - RNA, 17 nt, Human
auugaccugaggcccuu

SEQ ID NO: 2492964 - RNA, 22 nt, Human
auugacucaaaucuccaguauu

SEQ ID NO: 2492965 - RNA, 18 nt, Human
auugacuaucaaacugaa

SEQ ID NO: 2492966 - RNA, 21 nt, Human
auugacuaucaaacugaagcc

SEQ ID NO: 2492967 - RNA, 11 nt, Human
auugacuucuu

SEQ ID NO: 2492968 - RNA, 18 nt, Human
auugacuucaaugauagu

SEQ ID NO: 2492969 - RNA, 14 nt, Human
auugacuucaauga

SEQ ID NO: 2492970 - RNA, 14 nt, Human
auugacuuguauau

SEQ ID NO: 2492971 - RNA, 13 nt, Human
auugacuuugucu

SEQ ID NO: 2492972 - RNA, 14 nt, Human
auucuguuggccag

SEQ ID NO: 2492973 - RNA, 21 nt, Human
auucuguuggccagugugaca

SEQ ID NO: 2492974 - RNA, 19 nt, Human
auucuguuggccaguguga

SEQ ID NO: 2492975 - RNA, 15 nt, Human
auucuguagauucug

SEQ ID NO: 2492976 - RNA, 21 nt, Human
auucuguacugauuuuuguaa

SEQ ID NO: 2492977 - RNA, 15 nt, Human
auucuguacugauuu

SEQ ID NO: 2492978 - RNA, 13 nt, Human
auucuguacugau

SEQ ID NO: 2492979 - RNA, 19 nt, Human
auucuguacauagccuaua

SEQ ID NO: 2492980 - RNA, 18 nt, Human
auucuguacauagccuau

SEQ ID NO: 2492981 - RNA, 20 nt, Human
auucuguacauagccuauau

SEQ ID NO: 2492982 - RNA, 14 nt, Human
auucuguacucuua

SEQ ID NO: 2492983 - RNA, 14 nt, Human
auucuguaaaaugu

SEQ ID NO: 2492984 - RNA, 15 nt, Human
auucuguacauagcc

SEQ ID NO: 2492985 - RNA, 12 nt, Human
auucuguacaua

SEQ ID NO: 2492986 - RNA, 12 nt, Human
auucuguaaaug

SEQ ID NO: 2492987 - RNA, 20 nt, Human
auucuguaaaaugucuguua

SEQ ID NO: 2492988 - RNA, 23 nt, Human
auucugguuccagggucccucug

SEQ ID NO: 2492989 - RNA, 19 nt, Human
auucugcuaccucacuggg

SEQ ID NO: 2492990 - RNA, 22 nt, Human
auucugcgucaugcuuguguua

SEQ ID NO: 2492991 - RNA, 15 nt, Human
auucugcuaccucac

SEQ ID NO: 2492992 - RNA, 22 nt, Human
auucugcucacauaucugucau

SEQ ID NO: 2492993 - RNA, 21 nt, Human
auucugcucacauaucuguca

SEQ ID NO: 2492994 - RNA, 20 nt, Human
auucugcucacauaucuguc

SEQ ID NO: 2492995 - RNA, 19 nt, Human
auucugcucacauaucugu

SEQ ID NO: 2492996 - RNA, 21 nt, Human
auucugccugcccaggccccu

SEQ ID NO: 2492997 - RNA, 20 nt, Human
auucugccugcccaggcccc

SEQ ID NO: 2492998 - RNA, 18 nt, Human
auucugcucacauaucug

SEQ ID NO: 2492999 - RNA, 22 nt, Human
auucugccgugugcccucgggc

SEQ ID NO: 2493000 - RNA, 19 nt, Human
auucugccugcccaggccc

SEQ ID NO: 2493001 - RNA, 18 nt, Human
auucugccugcccaggcc

SEQ ID NO: 2493002 - RNA, 17 nt, Human
auucugccugcccaggc

SEQ ID NO: 2493003 - RNA, 16 nt, Human
auucugccugcccagg

SEQ ID NO: 2493004 - RNA, 15 nt, Human
auucugccugcccag

SEQ ID NO: 2493005 - RNA, 14 nt, Human
auucugccugccca

SEQ ID NO: 2493006 - RNA, 13 nt, Human
auucugccugccc

SEQ ID NO: 2493007 - RNA, 11 nt, Human
auucugccugc

SEQ ID NO: 2493008 - RNA, 12 nt, Human
auucucauguga

SEQ ID NO: 2493009 - RNA, 16 nt, Human
auucucauggagaagu

SEQ ID NO: 2493010 - RNA, 17 nt, Human
auucuagugcugcugaa

SEQ ID NO: 2493011 - RNA, 15 nt, Human
auucuagugcugcug

SEQ ID NO: 2493012 - RNA, 22 nt, Human
auucucaugccucagccuccug

SEQ ID NO: 2493013 - RNA, 15 nt, Human
auucucaugugaucc

SEQ ID NO: 2493014 - RNA, 13 nt, Human
auucuccacagca

SEQ ID NO: 2493015 - RNA, 14 nt, Human
auucuccacagcaa

SEQ ID NO: 2493016 - RNA, 17 nt, Human
auucucauuugucacac

SEQ ID NO: 2493017 - RNA, 18 nt, Human
auucuagcuaauguaaua

SEQ ID NO: 2493018 - RNA, 15 nt, Human
auucuagcuaaugua

SEQ ID NO: 2493019 - RNA, 16 nt, Human
auucuaaugucuucau

SEQ ID NO: 2493020 - RNA, 14 nt, Human
auucuaaugucuuc

SEQ ID NO: 2493021 - RNA, 15 nt, Human
auucuagcuuugagc

SEQ ID NO: 2493022 - RNA, 13 nt, Human
auucuaggcaucc

SEQ ID NO: 2493023 - RNA, 16 nt, Human
auucuaggcaucccag

SEQ ID NO: 2493024 - RNA, 20 nt, Human
auucuaggcaucccagggga

SEQ ID NO: 2493025 - RNA, 21 nt, Human
auucucaugccucagccuccu

SEQ ID NO: 2493026 - RNA, 14 nt, Human
auucuagugcugcu

SEQ ID NO: 2493027 - RNA, 12 nt, Human
auucuagugcug

SEQ ID NO: 2493028 - RNA, 20 nt, Human
auuuuuguacaguuugcugu

SEQ ID NO: 2493029 - RNA, 12 nt, Human
auuuuuguacag

SEQ ID NO: 2493030 - RNA, 11 nt, Human
auuuuuguaca

SEQ ID NO: 2493031 - RNA, 22 nt, Human
auuuuuguaagacaauccaugu

SEQ ID NO: 2493032 - RNA, 20 nt, Human
auuuuuguacccuuccuaca

SEQ ID NO: 2493033 - RNA, 12 nt, Human
auuuuuguaauu

SEQ ID NO: 2493034 - RNA, 19 nt, Human
auuuuuguagagccagggu

SEQ ID NO: 2493035 - RNA, 22 nt, Human
auuuuugugauuuugugauuga

SEQ ID NO: 2493036 - RNA, 16 nt, Human
auuuuuguuucuaccu

SEQ ID NO: 2493037 - RNA, 17 nt, Human
auuuuuguuucuuccaa

SEQ ID NO: 2493038 - RNA, 23 nt, Human
auuuuugucuuauauauauuucu

SEQ ID NO: 2493039 - RNA, 20 nt, Human
auuuuugugaaaugaaaaca

SEQ ID NO: 2493040 - RNA, 13 nt, Human
auuuuuguaucua

SEQ ID NO: 2493041 - RNA, 21 nt, Human
auuuuuguacaguuugcugua

SEQ ID NO: 2493042 - RNA, 21 nt, Human
auuuuuguaucuacaucuuuu

SEQ ID NO: 2493043 - RNA, 14 nt, Human
auuuuugucuugug

SEQ ID NO: 2493044 - RNA, 21 nt, Human
auuuuuguuuucauuaucuca

SEQ ID NO: 2493045 - RNA, 22 nt, Human
auuuuuguuucuuccaaagcac

SEQ ID NO: 2493046 - RNA, 13 nt, Human
auuuuuuaaaugc

SEQ ID NO: 2493047 - RNA, 14 nt, Human
auuuuuuaaaugca

SEQ ID NO: 2493048 - RNA, 17 nt, Human
auuuuuuaaggaaacaa

SEQ ID NO: 2493049 - RNA, 16 nt, Human
auuuuuuaaggaaaca

SEQ ID NO: 2493050 - RNA, 11 nt, Human
auuuuuuaagu

SEQ ID NO: 2493051 - RNA, 18 nt, Human
auuuuuuaaauugaauuc

SEQ ID NO: 2493052 - RNA, 20 nt, Human
auuuuuuaaaguuacuuugu

SEQ ID NO: 2493053 - RNA, 14 nt, Human
auuuuuucagaccg

SEQ ID NO: 2493054 - RNA, 13 nt, Human
auuuuuucagacc

SEQ ID NO: 2493055 - RNA, 16 nt, Human
auuuuuucagaccgaa

SEQ ID NO: 2493056 - RNA, 13 nt, Human
auuuuuucccaaa

SEQ ID NO: 2493057 - RNA, 16 nt, Human
auuuuuuaucaugcau

SEQ ID NO: 2493058 - RNA, 21 nt, Human
auuuuuuaucaugcauguccu

SEQ ID NO: 2493059 - RNA, 18 nt, Human
auuuuuuauauauacagu

SEQ ID NO: 2493060 - RNA, 13 nt, Human
auuuuuuauuguu

SEQ ID NO: 2493061 - RNA, 12 nt, Human
auuuuuuauugu

SEQ ID NO: 2493062 - RNA, 15 nt, Human
auuuuuuauuuuacu

SEQ ID NO: 2493063 - RNA, 13 nt, Human
auuuuuucagaaa

SEQ ID NO: 2493064 - RNA, 12 nt, Human
auuuuuucagac

SEQ ID NO: 2493065 - RNA, 22 nt, Human
auuuuuucagaaauaugugguu

SEQ ID NO: 2493066 - RNA, 20 nt, Human
auuuuuuaaguauuuauaua

SEQ ID NO: 2493067 - RNA, 22 nt, Human
auuuuuuaaguauuuauauauu

SEQ ID NO: 2493068 - RNA, 16 nt, Human
auuuuuuaaguauuua

SEQ ID NO: 2493069 - RNA, 17 nt, Human
auuuuuuaaguauuuau

SEQ ID NO: 2493070 - RNA, 18 nt, Human
auuuuuuaaguauuuaua

SEQ ID NO: 2493071 - RNA, 19 nt, Human
auuuuuuaaguauuuauau

SEQ ID NO: 2493072 - RNA, 20 nt, Human
auuuuuuaauuauuauuuau

SEQ ID NO: 2493073 - RNA, 15 nt, Human
auuuuuuaauuauua

SEQ ID NO: 2493074 - RNA, 19 nt, Human
auuuuuuacagcugccugc

SEQ ID NO: 2493075 - RNA, 13 nt, Human
auuuuuuauauau

SEQ ID NO: 2493076 - RNA, 23 nt, Human
auuuuuucucuaggaaauauuua

SEQ ID NO: 2493077 - RNA, 20 nt, Human
auuuuuucucuaggaaauau

SEQ ID NO: 2493078 - RNA, 13 nt, Human
auuuuuucugaau

SEQ ID NO: 2493079 - RNA, 21 nt, Human
auuuuuuuaaccaaaggugaa

SEQ ID NO: 2493080 - RNA, 19 nt, Human
auuuuuuuaaccaaaggug

SEQ ID NO: 2493081 - RNA, 18 nt, Human
auuuuuuuaaccaaaggu

SEQ ID NO: 2493082 - RNA, 16 nt, Human
auuuuuuuaaccaaag

SEQ ID NO: 2493083 - RNA, 15 nt, Human
auuuuuuuaaccaaa

SEQ ID NO: 2493084 - RNA, 18 nt, Human
auuuuuuuaaaauguuaa

SEQ ID NO: 2493085 - RNA, 18 nt, Human
auuuuuuguuaaaugauu

SEQ ID NO: 2493086 - RNA, 22 nt, Human
auuuuugcccugaguccaagag

SEQ ID NO: 2493087 - RNA, 12 nt, Human
auuuuugccucu

SEQ ID NO: 2493088 - RNA, 14 nt, Human
auuuuugcaggagc

SEQ ID NO: 2493089 - RNA, 18 nt, Human
auuuuugccucuuccagu

SEQ ID NO: 2493090 - RNA, 21 nt, Human
auuuuugccucuuccagucuu

SEQ ID NO: 2493091 - RNA, 15 nt, Human
auuuuugccuucauu

SEQ ID NO: 2493092 - RNA, 14 nt, Human
auuuuugccuucau

SEQ ID NO: 2493093 - RNA, 15 nt, Human
auuuuugaaugugau

SEQ ID NO: 2493094 - RNA, 22 nt, Human
auuuuugaauguaguaaguaaa

SEQ ID NO: 2493095 - RNA, 15 nt, Human
auuuuugacaguguu

SEQ ID NO: 2493096 - RNA, 13 nt, Human
auuuuugauuuau

SEQ ID NO: 2493097 - RNA, 23 nt, Human
auuuuugauuuaugcauggaaac

SEQ ID NO: 2493098 - RNA, 17 nt, Human
auuuuugaaugugauuu

SEQ ID NO: 2493099 - RNA, 18 nt, Human
auuuuuggucauuguaau

SEQ ID NO: 2493100 - RNA, 19 nt, Human
auuuuuggcagucugaauu

SEQ ID NO: 2493101 - RNA, 15 nt, Human
auuuuugguugaaua

SEQ ID NO: 2493102 - RNA, 19 nt, Human
auuuuugguugucaauauu

SEQ ID NO: 2493103 - RNA, 17 nt, Human
auuuuugguugaauaaa

SEQ ID NO: 2493104 - RNA, 19 nt, Human
auuuuugguugaauaaacu

SEQ ID NO: 2493105 - RNA, 23 nt, Human
auuuuuggaagaggacuccuuaa

SEQ ID NO: 2493106 - RNA, 19 nt, Human
auuuuucuuauuucauuuc

SEQ ID NO: 2493107 - RNA, 20 nt, Human
auuuuucuuauuucauuucu

SEQ ID NO: 2493108 - RNA, 15 nt, Human
auuuuucuuauuuca

SEQ ID NO: 2493109 - RNA, 22 nt, Human
auuuuucuuagggaaggauaca

SEQ ID NO: 2493110 - RNA, 21 nt, Human
auuuuucuggagguugauaac

SEQ ID NO: 2493111 - RNA, 19 nt, Human
auuuuucuggagguugaua

SEQ ID NO: 2493112 - RNA, 16 nt, Human
auuuuucugcacugag

SEQ ID NO: 2493113 - RNA, 15 nt, Human
auuuuucugcacuga

SEQ ID NO: 2493114 - RNA, 22 nt, Human
auuuuucuggagguugauaacu

SEQ ID NO: 2493115 - RNA, 17 nt, Human
auuuuugaauguaguaa

SEQ ID NO: 2493116 - RNA, 21 nt, Human
auuuuucaauaaagcauuuau

SEQ ID NO: 2493117 - RNA, 16 nt, Human
auuuuucaauaaagca

SEQ ID NO: 2493118 - RNA, 17 nt, Human
auuuuucaauaaagcau

SEQ ID NO: 2493119 - RNA, 21 nt, Human
auuuuguuuuugucuuaaaaa

SEQ ID NO: 2493120 - RNA, 19 nt, Human
auuuuguuugguauuguau

SEQ ID NO: 2493121 - RNA, 18 nt, Human
auuuuguuugguauugua

SEQ ID NO: 2493122 - RNA, 17 nt, Human
auuuuguuugguauugu

SEQ ID NO: 2493123 - RNA, 14 nt, Human
auuuuguuugguau

SEQ ID NO: 2493124 - RNA, 14 nt, Human
auuuuguuuugcuu

SEQ ID NO: 2493125 - RNA, 22 nt, Human
auuuuguuugguauuguauuua

SEQ ID NO: 2493126 - RNA, 21 nt, Human
auuuuguuugguauuguauuu

SEQ ID NO: 2493127 - RNA, 20 nt, Human
auuuuguuugguauuguauu

SEQ ID NO: 2493128 - RNA, 22 nt, Human
auuuuguuuugcuuuuucugac

SEQ ID NO: 2493129 - RNA, 21 nt, Human
auuuuguuuugcuuuuucuga

SEQ ID NO: 2493130 - RNA, 19 nt, Human
auuuuguuuugcuuuuucu

SEQ ID NO: 2493131 - RNA, 18 nt, Human
auuuuguuuugcuuuuuc

SEQ ID NO: 2493132 - RNA, 24 nt, Human
auuuuguuuugcuuuuucugacuc

SEQ ID NO: 2493133 - RNA, 23 nt, Human
auuuuguuuugcuuuuucugacu

SEQ ID NO: 2493134 - RNA, 14 nt, Human
auuuuucugcacug

SEQ ID NO: 2493135 - RNA, 12 nt, Human
auuuuucugcac

SEQ ID NO: 2493136 - RNA, 17 nt, Human
auuuuucucaaaguuuu

SEQ ID NO: 2493137 - RNA, 12 nt, Human
auuuuucucaug

SEQ ID NO: 2493138 - RNA, 21 nt, Human
auuuuucuuagggaaggauac

SEQ ID NO: 2493139 - RNA, 17 nt, Human
auuuuucuaaaaaaaga

SEQ ID NO: 2493140 - RNA, 12 nt, Human
auuuuucuaaaa

SEQ ID NO: 2493141 - RNA, 21 nt, Human
auuuuucucaaaguuuugaaa

SEQ ID NO: 2493142 - RNA, 10 nt, Human
auuuuuccua

SEQ ID NO: 2493143 - RNA, 20 nt, Human
auuuuuccuccacugaacua

SEQ ID NO: 2493144 - RNA, 22 nt, Human
auuuuucauugauaugaaaaau

SEQ ID NO: 2493145 - RNA, 19 nt, Human
auuuuucaugauuuugaaa

SEQ ID NO: 2493146 - RNA, 18 nt, Human
auuuuucauauugugcca

SEQ ID NO: 2493147 - RNA, 13 nt, Human
auuuuucauauug

SEQ ID NO: 2493148 - RNA, 15 nt, Human
auuuuuccaaaauaa

SEQ ID NO: 2493149 - RNA, 19 nt, Human
auuuuucauauugugccaa

SEQ ID NO: 2493150 - RNA, 19 nt, Human
auuuuucauugauaugaaa

SEQ ID NO: 2493151 - RNA, 16 nt, Human
auuuuucagauauaaa

SEQ ID NO: 2493152 - RNA, 18 nt, Human
auuuuucagaugcuucug

SEQ ID NO: 2493153 - RNA, 14 nt, Human
auuuuucagaugcu

SEQ ID NO: 2493154 - RNA, 15 nt, Human
auuuuucagaugcuu

SEQ ID NO: 2493155 - RNA, 20 nt, Human
auuuuguugcuuuugugaac

SEQ ID NO: 2493156 - RNA, 15 nt, Human
auuuuguuuaaauua

SEQ ID NO: 2493157 - RNA, 19 nt, Human
auuuuguugcuuuugugaa

SEQ ID NO: 2493158 - RNA, 18 nt, Human
auuuuguucuaguuuuca

SEQ ID NO: 2493159 - RNA, 23 nt, Human
auuuuguugcuguuuugauuugu

SEQ ID NO: 2493160 - RNA, 19 nt, Human
auuuuguugcuguuuugau

SEQ ID NO: 2493161 - RNA, 17 nt, Human
auuuuguguuuaggaac

SEQ ID NO: 2493162 - RNA, 20 nt, Human
auuuuguggcuuucuuucuu

SEQ ID NO: 2493163 - RNA, 19 nt, Human
auuuugugauauggagccc

SEQ ID NO: 2493164 - RNA, 19 nt, Human
auuuugugcccccauguaa

SEQ ID NO: 2493165 - RNA, 12 nt, Human
auuuugucuaaa

SEQ ID NO: 2493166 - RNA, 14 nt, Human
auuuugucgaauuu

SEQ ID NO: 2493167 - RNA, 22 nt, Human
auuuuguauuuuccaagugugc

SEQ ID NO: 2493168 - RNA, 16 nt, Human
auuuugucuaaaaugc

SEQ ID NO: 2493169 - RNA, 13 nt, Human
auuuugucuaaaa

SEQ ID NO: 2493170 - RNA, 21 nt, Human
auuuugucuaaaaugccucag

SEQ ID NO: 2493171 - RNA, 23 nt, Human
auuuugucauauaagauucauau

SEQ ID NO: 2493172 - RNA, 21 nt, Human
auuuugugaagacugggaagu

SEQ ID NO: 2493173 - RNA, 15 nt, Human
auuuugugaauggau

SEQ ID NO: 2493174 - RNA, 13 nt, Human
auuuugugaaugg

SEQ ID NO: 2493175 - RNA, 12 nt, Human
auuuugugaaug

SEQ ID NO: 2493176 - RNA, 14 nt, Human
auuuuggaaaauaa

SEQ ID NO: 2493177 - RNA, 19 nt, Human
auuuuggaaaauaaauuau

SEQ ID NO: 2493178 - RNA, 23 nt, Human
auuuuggaaagcuccuagcagag

SEQ ID NO: 2493179 - RNA, 20 nt, Human
auuuuggaaaauaaauuauu

SEQ ID NO: 2493180 - RNA, 18 nt, Human
auuuugcuuugugauuuu

SEQ ID NO: 2493181 - RNA, 20 nt, Human
auuuugcuuugugauuuuug

SEQ ID NO: 2493182 - RNA, 12 nt, Human
auuuugcuuugu

SEQ ID NO: 2493183 - RNA, 23 nt, Human
auuuugcuauuguaaauauguuu

SEQ ID NO: 2493184 - RNA, 12 nt, Human
auuuugcuguau

SEQ ID NO: 2493185 - RNA, 14 nt, Human
auuuugcuguauau

SEQ ID NO: 2493186 - RNA, 20 nt, Human
auuuugcuguagaagauggc

SEQ ID NO: 2493187 - RNA, 20 nt, Human
auuuuguauuuuccaagugu

SEQ ID NO: 2493188 - RNA, 16 nt, Human
auuuuguauuuuccaa

SEQ ID NO: 2493189 - RNA, 15 nt, Human
auuuuguauuuucca

SEQ ID NO: 2493190 - RNA, 12 nt, Human
auuuuguauuuu

SEQ ID NO: 2493191 - RNA, 19 nt, Human
auuuuguauuguuucaauu

SEQ ID NO: 2493192 - RNA, 10 nt, Human
auuuuguauu

SEQ ID NO: 2493193 - RNA, 14 nt, Human
auuuuguauauauc

SEQ ID NO: 2493194 - RNA, 20 nt, Human
auuuuguauaauuguaucgu

SEQ ID NO: 2493195 - RNA, 17 nt, Human
auuuuguauaauuguau

SEQ ID NO: 2493196 - RNA, 22 nt, Human
auuuuguaauuauugugauuuc

SEQ ID NO: 2493197 - RNA, 20 nt, Human
auuuuguacaaauuuguuau

SEQ ID NO: 2493198 - RNA, 23 nt, Human
auuuuguaucugcaggcagacac

SEQ ID NO: 2493199 - RNA, 21 nt, Human
auuuuguaucugcaggcagac

SEQ ID NO: 2493200 - RNA, 15 nt, Human
auuuuguaucugcag

SEQ ID NO: 2493201 - RNA, 14 nt, Human
auuuuguaucugca

SEQ ID NO: 2493202 - RNA, 13 nt, Human
auuuuguaucugc

SEQ ID NO: 2493203 - RNA, 18 nt, Human
auuuuguaacgaagacac

SEQ ID NO: 2493204 - RNA, 19 nt, Human
auuuuguaacgaagacaca

SEQ ID NO: 2493205 - RNA, 17 nt, Human
auuuuguaacuuucucu

SEQ ID NO: 2493206 - RNA, 19 nt, Human
auuuuguaaacucaaaaua

SEQ ID NO: 2493207 - RNA, 20 nt, Human
auuuuggaaguuuucaggac

SEQ ID NO: 2493208 - RNA, 20 nt, Human
auuuuguaaacucaaaauau

SEQ ID NO: 2493209 - RNA, 21 nt, Human
auuuuguaauuauugugauuu

SEQ ID NO: 2493210 - RNA, 16 nt, Human
auuuuguaauuauugu

SEQ ID NO: 2493211 - RNA, 21 nt, Human
auuuugcugucccuuuuccuu

SEQ ID NO: 2493212 - RNA, 22 nt, Human
auuuugcuauuguaaauauguu

SEQ ID NO: 2493213 - RNA, 21 nt, Human
auuuugcuauuguaaauaugu

SEQ ID NO: 2493214 - RNA, 14 nt, Human
auuuugcuggaaua

SEQ ID NO: 2493215 - RNA, 19 nt, Human
auuuugcuauuguaaauau

SEQ ID NO: 2493216 - RNA, 17 nt, Human
auuuugcuauuguaaau

SEQ ID NO: 2493217 - RNA, 13 nt, Human
auuuugccugugu

SEQ ID NO: 2493218 - RNA, 21 nt, Human
auuuugccucuuuucucugug

SEQ ID NO: 2493219 - RNA, 22 nt, Human
auuuugcccuuccauagccuaa

SEQ ID NO: 2493220 - RNA, 18 nt, Human
auuuugccucuuuucucu

SEQ ID NO: 2493221 - RNA, 20 nt, Human
auuuugcuaaaugugaauga

SEQ ID NO: 2493222 - RNA, 15 nt, Human
auuuugcccuugaca

SEQ ID NO: 2493223 - RNA, 23 nt, Human
auuuugcccuugacaaagucaag

SEQ ID NO: 2493224 - RNA, 18 nt, Human
auuuugccagugggaacu

SEQ ID NO: 2493225 - RNA, 15 nt, Human
auuuugcauucaaau

SEQ ID NO: 2493226 - RNA, 16 nt, Human
auuuugcauuugaaua

SEQ ID NO: 2493227 - RNA, 12 nt, Human
auuuugcagcag

SEQ ID NO: 2493228 - RNA, 14 nt, Human
auuuugcagcagug

SEQ ID NO: 2493229 - RNA, 15 nt, Human
auuuugcagcaguga

SEQ ID NO: 2493230 - RNA, 16 nt, Human
auuuugcagcagugag

SEQ ID NO: 2493231 - RNA, 14 nt, Human
auuuugcauucaaa

SEQ ID NO: 2493232 - RNA, 17 nt, Human
auuuugauguuuuaagg

SEQ ID NO: 2493233 - RNA, 22 nt, Human
auuuugauuauuguauuuauuc

SEQ ID NO: 2493234 - RNA, 18 nt, Human
auuuugauuauuguauuu

SEQ ID NO: 2493235 - RNA, 16 nt, Human
auuuugauuauuguau

SEQ ID NO: 2493236 - RNA, 14 nt, Human
auuuugauuauugu

SEQ ID NO: 2493237 - RNA, 14 nt, Human
auuuugcaaaauuu

SEQ ID NO: 2493238 - RNA, 15 nt, Human
auuuugcaaaauuuc

SEQ ID NO: 2493239 - RNA, 18 nt, Human
auuuugcaaaauuuccag

SEQ ID NO: 2493240 - RNA, 19 nt, Human
auuuugcaaaauuuccagu

SEQ ID NO: 2493241 - RNA, 15 nt, Human
auuuugauguuuuaa

SEQ ID NO: 2493242 - RNA, 23 nt, Human
auuuuccuggugccaauuucaag

SEQ ID NO: 2493243 - RNA, 19 nt, Human
auuuugauccaagcugguc

SEQ ID NO: 2493244 - RNA, 14 nt, Human
auuuugaugaacaa

SEQ ID NO: 2493245 - RNA, 12 nt, Human
auuuuccuugaa

SEQ ID NO: 2493246 - RNA, 14 nt, Human
auuuucuauaauuu

SEQ ID NO: 2493247 - RNA, 15 nt, Human
auuuucuauaauuua

SEQ ID NO: 2493248 - RNA, 18 nt, Human
auuuuccuggugccaauu

SEQ ID NO: 2493249 - RNA, 22 nt, Human
auuuuccuggugccaauuucaa

SEQ ID NO: 2493250 - RNA, 22 nt, Human
auuuucccccuuuucugcauuu

SEQ ID NO: 2493251 - RNA, 13 nt, Human
auuuucccugcua

SEQ ID NO: 2493252 - RNA, 16 nt, Human
auuuuccugccaggca

SEQ ID NO: 2493253 - RNA, 14 nt, Human
auuuuccugaaaac

SEQ ID NO: 2493254 - RNA, 19 nt, Human
auuuucccuauuagagaag

SEQ ID NO: 2493255 - RNA, 20 nt, Human
auuuucccccuuuucugcau

SEQ ID NO: 2493256 - RNA, 22 nt, Human
auuuuccccccacucuccccac

SEQ ID NO: 2493257 - RNA, 20 nt, Human
auuuuccccccacucucccc

SEQ ID NO: 2493258 - RNA, 21 nt, Human
auuuuccccccacucucccca

SEQ ID NO: 2493259 - RNA, 17 nt, Human
auuuucccacugcaccc

SEQ ID NO: 2493260 - RNA, 14 nt, Human
auuuucccacugca

SEQ ID NO: 2493261 - RNA, 14 nt, Human
auuuuccccccacu

SEQ ID NO: 2493262 - RNA, 15 nt, Human
auuuuccccccacuc

SEQ ID NO: 2493263 - RNA, 12 nt, Human
auuuuaauaaug

SEQ ID NO: 2493264 - RNA, 21 nt, Human
auuuuccauuuuuauuucaaa

SEQ ID NO: 2493265 - RNA, 13 nt, Human
auuuuaauaauau

SEQ ID NO: 2493266 - RNA, 15 nt, Human
auuuuccaugaaaau

SEQ ID NO: 2493267 - RNA, 17 nt, Human
auuuuaauaaacacucu

SEQ ID NO: 2493268 - RNA, 16 nt, Human
auuuuaauaaacacuc

SEQ ID NO: 2493269 - RNA, 15 nt, Human
auuuuaauaaacacu

SEQ ID NO: 2493270 - RNA, 20 nt, Human
auuuuaagugcuuuguaaug

SEQ ID NO: 2493271 - RNA, 19 nt, Human
auuuuaacuuuaucacauu

SEQ ID NO: 2493272 - RNA, 15 nt, Human
auuuuaacuuuauca

SEQ ID NO: 2493273 - RNA, 17 nt, Human
auuuuaacuuuaucaca

SEQ ID NO: 2493274 - RNA, 19 nt, Human
auuuuaagacguguuugug

SEQ ID NO: 2493275 - RNA, 17 nt, Human
auuuaaacccauuuuag

SEQ ID NO: 2493276 - RNA, 15 nt, Human
auuuaaacccauuuu

SEQ ID NO: 2493277 - RNA, 14 nt, Human
auuuaaacccauuu

SEQ ID NO: 2493278 - RNA, 13 nt, Human
auuuaaacccauu

SEQ ID NO: 2493279 - RNA, 20 nt, Human
auuuaaacccauuuuaguca

SEQ ID NO: 2493280 - RNA, 18 nt, Human
auuuaaacccauuuuagu

SEQ ID NO: 2493281 - RNA, 19 nt, Human
auuuaaagaacacccuaua

SEQ ID NO: 2493282 - RNA, 13 nt, Human
auuuauuuaaaag

SEQ ID NO: 2493283 - RNA, 22 nt, Human
auuuauuguuuauuuaucagug

SEQ ID NO: 2493284 - RNA, 16 nt, Human
auuuaaagacaaagac

SEQ ID NO: 2493285 - RNA, 14 nt, Human
auuuaaaagauaca

SEQ ID NO: 2493286 - RNA, 16 nt, Human
auuuaaaagauacagu

SEQ ID NO: 2493287 - RNA, 13 nt, Human
auuuaaaagauuc

SEQ ID NO: 2493288 - RNA, 22 nt, Human
auuguuuuaaaaagaaacaaga

SEQ ID NO: 2493289 - RNA, 17 nt, Human
auuuaaaagauacaguu

SEQ ID NO: 2493290 - RNA, 23 nt, Human
auuguuuuaaaaagaaacaagau

SEQ ID NO: 2493291 - RNA, 14 nt, Human
auuguuuuaaaaag

SEQ ID NO: 2493292 - RNA, 21 nt, Human
auuguuugucuuuaacuguca

SEQ ID NO: 2493293 - RNA, 13 nt, Human
auuuaaaagauac

SEQ ID NO: 2493294 - RNA, 21 nt, Human
auuguuuggggaugagaaagg

SEQ ID NO: 2493295 - RNA, 19 nt, Human
auugugguacaaucucaaa

SEQ ID NO: 2493296 - RNA, 20 nt, Human
auugugggucuauuucuagu

SEQ ID NO: 2493297 - RNA, 18 nt, Human
auugugguacaaucucaa

SEQ ID NO: 2493298 - RNA, 16 nt, Human
auuguuugucuuuaac

SEQ ID NO: 2493299 - RNA, 20 nt, Human
auuguuugucugucuucaua

SEQ ID NO: 2493300 - RNA, 14 nt, Human
auugugggaagggg

SEQ ID NO: 2493301 - RNA, 21 nt, Human
auuguggggaugaugaaauaa

SEQ ID NO: 2493302 - RNA, 20 nt, Human
auuguggggaugaugaaaua

SEQ ID NO: 2493303 - RNA, 17 nt, Human
auuguggcugucagcag

SEQ ID NO: 2493304 - RNA, 18 nt, Human
auuguggcugucagcagg

SEQ ID NO: 2493305 - RNA, 19 nt, Human
auuguggcugucagcagga

SEQ ID NO: 2493306 - RNA, 13 nt, Human
auugugggaaggg

SEQ ID NO: 2493307 - RNA, 20 nt, Human
auuguggcuccuaucugugu

SEQ ID NO: 2493308 - RNA, 19 nt, Human
auuguggcuccuaucugug

SEQ ID NO: 2493309 - RNA, 12 nt, Human
auuguggcuccu

SEQ ID NO: 2493310 - RNA, 17 nt, Human
auugucccucugcccca

SEQ ID NO: 2493311 - RNA, 23 nt, Human
auugucccucugccccauccucc

SEQ ID NO: 2493312 - RNA, 15 nt, Human
auugucauuccugua

SEQ ID NO: 2493313 - RNA, 12 nt, Human
auugucccucug

SEQ ID NO: 2493314 - RNA, 15 nt, Human
auugucauuaaaggu

SEQ ID NO: 2493315 - RNA, 13 nt, Human
auugucauuaaag

SEQ ID NO: 2493316 - RNA, 15 nt, Human
auugucaucaggaga

SEQ ID NO: 2493317 - RNA, 19 nt, Human
auugucagcuacuaaugau

SEQ ID NO: 2493318 - RNA, 13 nt, Human
auugucuagugaa

SEQ ID NO: 2493319 - RNA, 16 nt, Human
auugucaaagugguga

SEQ ID NO: 2493320 - RNA, 23 nt, Human
auugucaaaguggugagaggcau

SEQ ID NO: 2493321 - RNA, 22 nt, Human
auuguaccuuuuaacaccugau

SEQ ID NO: 2493322 - RNA, 19 nt, Human
auugucagaguucugcucu

SEQ ID NO: 2493323 - RNA, 14 nt, Human
auugucagauauuu

SEQ ID NO: 2493324 - RNA, 23 nt, Human
auugucagauauuuuuucagaaa

SEQ ID NO: 2493325 - RNA, 13 nt, Human
auugucagcuacu

SEQ ID NO: 2493326 - RNA, 17 nt, Human
auuguaccuuuuaacac

SEQ ID NO: 2493327 - RNA, 16 nt, Human
auuguaccuuuuaaca

SEQ ID NO: 2493328 - RNA, 15 nt, Human
auuguaccuuuuaac

SEQ ID NO: 2493329 - RNA, 14 nt, Human
auuguaccuuuuaa

SEQ ID NO: 2493330 - RNA, 19 nt, Human
auuguaccucucuuauaga

SEQ ID NO: 2493331 - RNA, 18 nt, Human
auuguaccucucuuauag

SEQ ID NO: 2493332 - RNA, 20 nt, Human
auuguacauauuuguggaau

SEQ ID NO: 2493333 - RNA, 15 nt, Human
auuguacauauuugu

SEQ ID NO: 2493334 - RNA, 12 nt, Human
auuguaccucuc

SEQ ID NO: 2493335 - RNA, 21 nt, Human
auuguacaguuuuuauugcuu

SEQ ID NO: 2493336 - RNA, 23 nt, Human
auuguaaaaaaaaaugccuuuga

SEQ ID NO: 2493337 - RNA, 13 nt, Human
auuguacaguuuu

SEQ ID NO: 2493338 - RNA, 22 nt, Human
auuguaaaaaaaaaugccuuug

SEQ ID NO: 2493339 - RNA, 21 nt, Human
auuguaaaaaaaaaugccuuu

SEQ ID NO: 2493340 - RNA, 20 nt, Human
auuguaaaaaaaaaugccuu

SEQ ID NO: 2493341 - RNA, 17 nt, Human
auuguaaaaaaaaaugc

SEQ ID NO: 2493342 - RNA, 15 nt, Human
auuguacaguuuuua

SEQ ID NO: 2493343 - RNA, 14 nt, Human
auuguacaguuuuu

SEQ ID NO: 2493344 - RNA, 21 nt, Human
auuuaaagacagggaagagca

SEQ ID NO: 2493345 - RNA, 22 nt, Human
auuggaggguaaaugauguggu

SEQ ID NO: 2493346 - RNA, 23 nt, Human
auuggagggugggagagcccagc

SEQ ID NO: 2493347 - RNA, 23 nt, Human
auuggaggaaagcaaccggugga

SEQ ID NO: 2493348 - RNA, 15 nt, Human
auuggaggaaagcaa

SEQ ID NO: 2493349 - RNA, 22 nt, Human
auuggagggugggagagcccag

SEQ ID NO: 2493350 - RNA, 19 nt, Human
auuggagcucgugggacag

SEQ ID NO: 2493351 - RNA, 14 nt, Human
auuggacccuucca

SEQ ID NO: 2493352 - RNA, 17 nt, Human
auuggacauuuucuuca

SEQ ID NO: 2493353 - RNA, 19 nt, Human
auuggacaguaaaauccac

SEQ ID NO: 2493354 - RNA, 20 nt, Human
auugcuuuuucuaauguggu

SEQ ID NO: 2493355 - RNA, 15 nt, Human
auugcuuuuucuaau

SEQ ID NO: 2493356 - RNA, 14 nt, Human
auuggaauuaaccu

SEQ ID NO: 2493357 - RNA, 12 nt, Human
auuggaauuaac

SEQ ID NO: 2493358 - RNA, 15 nt, Human
auuggaauuaaccug

SEQ ID NO: 2493359 - RNA, 16 nt, Human
auuggaauuaaccugg

SEQ ID NO: 2493360 - RNA, 19 nt, Human
auuggaauuaaccuggugc

SEQ ID NO: 2493361 - RNA, 20 nt, Human
auuggaauuaaccuggugcu

SEQ ID NO: 2493362 - RNA, 21 nt, Human
auugcuuugauuaauccagaa

SEQ ID NO: 2493363 - RNA, 12 nt, Human
auugcuuugagc

SEQ ID NO: 2493364 - RNA, 14 nt, Human
auugcuuuggucau

SEQ ID NO: 2493365 - RNA, 21 nt, Human
auugauuuccguuaaaauacc

SEQ ID NO: 2493366 - RNA, 18 nt, Human
auugcuuuggucauauga

SEQ ID NO: 2493367 - RNA, 13 nt, Human
auugauuucaaga

SEQ ID NO: 2493368 - RNA, 16 nt, Human
auugauuucaagaccu

SEQ ID NO: 2493369 - RNA, 22 nt, Human
auugauuauucugauuccacuu

SEQ ID NO: 2493370 - RNA, 13 nt, Human
auugacuuuuuau

SEQ ID NO: 2493371 - RNA, 20 nt, Human
auugauuauuacuggcaaaa

SEQ ID NO: 2493372 - RNA, 12 nt, Human
auugauuagaaa

SEQ ID NO: 2493373 - RNA, 16 nt, Human
auugacuucgacugug

SEQ ID NO: 2493374 - RNA, 20 nt, Human
auuggcaccuaauccaggca

SEQ ID NO: 2493375 - RNA, 11 nt, Human
auuggcagcag

SEQ ID NO: 2493376 - RNA, 12 nt, Human
auuggcagcaga

SEQ ID NO: 2493377 - RNA, 18 nt, Human
auuggauuauuuaauaac

SEQ ID NO: 2493378 - RNA, 17 nt, Human
auuggauuauuuaauaa

SEQ ID NO: 2493379 - RNA, 16 nt, Human
auuggauuauuuaaua

SEQ ID NO: 2493380 - RNA, 14 nt, Human
auuggauuauuuaa

SEQ ID NO: 2493381 - RNA, 22 nt, Human
auuggauuauucauuuaaaaug

SEQ ID NO: 2493382 - RNA, 21 nt, Human
auuggauuauucauuuaaaau

SEQ ID NO: 2493383 - RNA, 19 nt, Human
auuggauuauucauuuaaa

SEQ ID NO: 2493384 - RNA, 18 nt, Human
auuggauuauucauuuaa

SEQ ID NO: 2493385 - RNA, 19 nt, Human
auuggauucugagagcugu

SEQ ID NO: 2493386 - RNA, 22 nt, Human
auuggauucugagagcugugca

SEQ ID NO: 2493387 - RNA, 20 nt, Human
auuggauuauuuaauaacau

SEQ ID NO: 2493388 - RNA, 19 nt, Human
auuggauuauuuaauaaca

SEQ ID NO: 2493389 - RNA, 22 nt, Human
auuggauuauuuaauaacauua

SEQ ID NO: 2493390 - RNA, 17 nt, Human
auugguaucaagaaagu

SEQ ID NO: 2493391 - RNA, 18 nt, Human
auugguauucacuaaucu

SEQ ID NO: 2493392 - RNA, 18 nt, Human
auugguaucaagaaaguc

SEQ ID NO: 2493393 - RNA, 14 nt, Human
auugguccagcuug

SEQ ID NO: 2493394 - RNA, 15 nt, Human
auugguccagcuugc

SEQ ID NO: 2493395 - RNA, 16 nt, Human
auugguucuuguauua

SEQ ID NO: 2493396 - RNA, 15 nt, Human
auugguucuuguauu

SEQ ID NO: 2493397 - RNA, 18 nt, Human
auugggagcuugggaaug

SEQ ID NO: 2493398 - RNA, 23 nt, Human
auuggguggggggcuucauacac

SEQ ID NO: 2493399 - RNA, 17 nt, Human
auugggacuggggcuga

SEQ ID NO: 2493400 - RNA, 20 nt, Human
auugggaauaaauaugccuc

SEQ ID NO: 2493401 - RNA, 17 nt, Human
auugggaauaaauaugc

SEQ ID NO: 2493402 - RNA, 16 nt, Human
auugggaauaaauaug

SEQ ID NO: 2493403 - RNA, 15 nt, Human
auugggaauaaauau

SEQ ID NO: 2493404 - RNA, 13 nt, Human
auugggaaaucuu

SEQ ID NO: 2493405 - RNA, 20 nt, Human
auugggaaggggacccccgc

SEQ ID NO: 2493406 - RNA, 16 nt, Human
auugguaacauccuuu

SEQ ID NO: 2493407 - RNA, 15 nt, Human
auugguaacauccuu

SEQ ID NO: 2493408 - RNA, 18 nt, Human
auugguaaagaauggaag

SEQ ID NO: 2493409 - RNA, 17 nt, Human
auuggguuaugaauauu

SEQ ID NO: 2493410 - RNA, 13 nt, Human
auuggguuaugaa

SEQ ID NO: 2493411 - RNA, 18 nt, Human
auuggguggguaaauuca

SEQ ID NO: 2493412 - RNA, 13 nt, Human
auuggguucauua

SEQ ID NO: 2493413 - RNA, 23 nt, Human
auuucccguggccccagccuggc

SEQ ID NO: 2493414 - RNA, 21 nt, Human
auuucccguggccccagccug

SEQ ID NO: 2493415 - RNA, 20 nt, Human
auuucccguggccccagccu

SEQ ID NO: 2493416 - RNA, 22 nt, Human
auuucccguggccccagccugg

SEQ ID NO: 2493417 - RNA, 17 nt, Human
auuucccugaaggaacc

SEQ ID NO: 2493418 - RNA, 23 nt, Human
auuucccugaaggaaccaaagcg

SEQ ID NO: 2493419 - RNA, 18 nt, Human
auuucccugacuccucua

SEQ ID NO: 2493420 - RNA, 23 nt, Human
auuucuuccacaagagcccaggc

SEQ ID NO: 2493421 - RNA, 20 nt, Human
auuucuuccacaagagccca

SEQ ID NO: 2493422 - RNA, 13 nt, Human
auuugaccuacaa

SEQ ID NO: 2493423 - RNA, 18 nt, Human
auuugaaacacuuugcau

SEQ ID NO: 2493424 - RNA, 14 nt, Human
auuugaaagaaagg

SEQ ID NO: 2493425 - RNA, 11 nt, Human
auuugaaagaa

SEQ ID NO: 2493426 - RNA, 15 nt, Human
auuugaaaauuuuga

SEQ ID NO: 2493427 - RNA, 16 nt, Human
auuugaaaauuuugau

SEQ ID NO: 2493428 - RNA, 23 nt, Human
auuuauuuccuaguucuguagaa

SEQ ID NO: 2493429 - RNA, 18 nt, Human
auuuauuuccuaguucug

SEQ ID NO: 2493430 - RNA, 13 nt, Human
auuuauuuccuag

SEQ ID NO: 2493431 - RNA, 14 nt, Human
auuuauuucaucau

SEQ ID NO: 2493432 - RNA, 14 nt, Human
auuuauuuuaauaa

SEQ ID NO: 2493433 - RNA, 15 nt, Human
auuuccaaauaaaau

SEQ ID NO: 2493434 - RNA, 13 nt, Human
auuuccaaauaaa

SEQ ID NO: 2493435 - RNA, 16 nt, Human
auuuccaaagagaaaa

SEQ ID NO: 2493436 - RNA, 16 nt, Human
auuuauuuaaaagauu

SEQ ID NO: 2493437 - RNA, 14 nt, Human
auuuauuuaaaaga

SEQ ID NO: 2493438 - RNA, 20 nt, Human
auuuauuuaaaagauucauu

SEQ ID NO: 2493439 - RNA, 12 nt, Human
auuuauuuaaua

SEQ ID NO: 2493440 - RNA, 20 nt, Human
auuuauuuaauaacaauugu

SEQ ID NO: 2493441 - RNA, 13 nt, Human
auuuauuuaauaa

SEQ ID NO: 2493442 - RNA, 14 nt, Human
auuuauuuaaaugu

SEQ ID NO: 2493443 - RNA, 16 nt, Human
auuuauuuaauaacaa

SEQ ID NO: 2493444 - RNA, 14 nt, Human
auuuauuucaaaaa

SEQ ID NO: 2493445 - RNA, 12 nt, Human
auuuauuuaaau

SEQ ID NO: 2493446 - RNA, 14 nt, Human
auuuauuuaaauuu

SEQ ID NO: 2493447 - RNA, 19 nt, Human
auuucccaaagcagugcau

SEQ ID NO: 2493448 - RNA, 16 nt, Human
auuuccaagagcugag

SEQ ID NO: 2493449 - RNA, 17 nt, Human
auuuccaaaugaaugac

SEQ ID NO: 2493450 - RNA, 13 nt, Human
auuuccaaaugaa

SEQ ID NO: 2493451 - RNA, 18 nt, Human
auuuccaaauaaaaugag

SEQ ID NO: 2493452 - RNA, 17 nt, Human
auuuccaaauaaaauga

SEQ ID NO: 2493453 - RNA, 20 nt, Human
auuuccaacaccacagacac

SEQ ID NO: 2493454 - RNA, 19 nt, Human
auuuccaacaccacagaca

SEQ ID NO: 2493455 - RNA, 17 nt, Human
auuuccaaauucacaag

SEQ ID NO: 2493456 - RNA, 22 nt, Human
auuuccaacaccacagacacac

SEQ ID NO: 2493457 - RNA, 21 nt, Human
auuuccaacaccacagacaca

SEQ ID NO: 2493458 - RNA, 23 nt, Human
auuuccaacaccacagacacaca

SEQ ID NO: 2493459 - RNA, 15 nt, Human
auuuccaagagcuga

SEQ ID NO: 2493460 - RNA, 17 nt, Human
auuucccaauuaggaag

SEQ ID NO: 2493461 - RNA, 12 nt, Human
auuucccaggac

SEQ ID NO: 2493462 - RNA, 13 nt, Human
auuucccaggacc

SEQ ID NO: 2493463 - RNA, 20 nt, Human
auuucccagcacaugaaacc

SEQ ID NO: 2493464 - RNA, 23 nt, Human
auuucccacaccguguaaaccaa

SEQ ID NO: 2493465 - RNA, 14 nt, Human
auuuccacaccaag

SEQ ID NO: 2493466 - RNA, 18 nt, Human
auuucccaauuaggaagu

SEQ ID NO: 2493467 - RNA, 14 nt, Human
auuucccaggaccc

SEQ ID NO: 2493468 - RNA, 16 nt, Human
auuucccaggacccug

SEQ ID NO: 2493469 - RNA, 19 nt, Human
auuucccaggacccugaag

SEQ ID NO: 2493470 - RNA, 21 nt, Human
auuucccaggcugaauuggga

SEQ ID NO: 2493471 - RNA, 15 nt, Human
auuucccaggguuaa

SEQ ID NO: 2493472 - RNA, 15 nt, Human
auuucccguggcccc

SEQ ID NO: 2493473 - RNA, 19 nt, Human
auuucccguggccccagcc

SEQ ID NO: 2493474 - RNA, 18 nt, Human
auuucccguggccccagc

SEQ ID NO: 2493475 - RNA, 16 nt, Human
auuucccguggcccca

SEQ ID NO: 2493476 - RNA, 14 nt, Human
auuuguauaaaaua

SEQ ID NO: 2493477 - RNA, 22 nt, Human
auuuguaguguuggagaagaac

SEQ ID NO: 2493478 - RNA, 22 nt, Human
auuuguaaguuuaugucuaaag

SEQ ID NO: 2493479 - RNA, 14 nt, Human
auuuguaaguuuau

SEQ ID NO: 2493480 - RNA, 20 nt, Human
auuuguaaccucagcucugg

SEQ ID NO: 2493481 - RNA, 21 nt, Human
auuuguaaccucagcucuggg

SEQ ID NO: 2493482 - RNA, 19 nt, Human
auuuguaaccucagcucug

SEQ ID NO: 2493483 - RNA, 17 nt, Human
auuuguaaccucagcuc

SEQ ID NO: 2493484 - RNA, 19 nt, Human
auuuguaguguuggagaag

SEQ ID NO: 2493485 - RNA, 17 nt, Human
auuuguaaguuucaggu

SEQ ID NO: 2493486 - RNA, 15 nt, Human
auuuguaaguuucag

SEQ ID NO: 2493487 - RNA, 14 nt, Human
auuuguaaguuuca

SEQ ID NO: 2493488 - RNA, 23 nt, Human
auuuguaaguuuaugucuaaaga

SEQ ID NO: 2493489 - RNA, 21 nt, Human
auuuguauuuuuuugcaagug

SEQ ID NO: 2493490 - RNA, 17 nt, Human
auuuguauuuuuuugca

SEQ ID NO: 2493491 - RNA, 21 nt, Human
auuuguaaguuucaggugaca

SEQ ID NO: 2493492 - RNA, 18 nt, Human
auuuguaaguuucaggug

SEQ ID NO: 2493493 - RNA, 14 nt, Human
auuugucaaugaca

SEQ ID NO: 2493494 - RNA, 17 nt, Human
auuugucaaugacaguu

SEQ ID NO: 2493495 - RNA, 13 nt, Human
auuugucaacaaa

SEQ ID NO: 2493496 - RNA, 15 nt, Human
auuugucaacaaagu

SEQ ID NO: 2493497 - RNA, 21 nt, Human
auuugggccugcuccagaccu

SEQ ID NO: 2493498 - RNA, 22 nt, Human
auuugggccugcuccagaccug

SEQ ID NO: 2493499 - RNA, 23 nt, Human
auuugggccugcuccagaccuga

SEQ ID NO: 2493500 - RNA, 19 nt, Human
auuugggagacaugugaca

SEQ ID NO: 2493501 - RNA, 19 nt, Human
auuugggccugcuccagac

SEQ ID NO: 2493502 - RNA, 17 nt, Human
auuugggagacauguga

SEQ ID NO: 2493503 - RNA, 18 nt, Human
auuuguaaauuuauguga

SEQ ID NO: 2493504 - RNA, 16 nt, Human
auuuguaaccucagcu

SEQ ID NO: 2493505 - RNA, 19 nt, Human
auuuguaaauuuaugugau

SEQ ID NO: 2493506 - RNA, 19 nt, Human
auuugacuguuuuuaccca

SEQ ID NO: 2493507 - RNA, 19 nt, Human
auuuggcauuuauuuguga

SEQ ID NO: 2493508 - RNA, 14 nt, Human
auuugacugaagau

SEQ ID NO: 2493509 - RNA, 23 nt, Human
auuugacaaaauuuguugaaauu

SEQ ID NO: 2493510 - RNA, 18 nt, Human
auuugacuguuuuuaccc

SEQ ID NO: 2493511 - RNA, 17 nt, Human
auuugacuguuuuuacc

SEQ ID NO: 2493512 - RNA, 13 nt, Human
auuugacuguuuu

SEQ ID NO: 2493513 - RNA, 14 nt, Human
auuugggaagugaa

SEQ ID NO: 2493514 - RNA, 18 nt, Human
auuugggaagugaagacu

SEQ ID NO: 2493515 - RNA, 16 nt, Human
auuuggccugcacuaa

SEQ ID NO: 2493516 - RNA, 19 nt, Human
auuuggccugcacuaauuu

SEQ ID NO: 2493517 - RNA, 23 nt, Human
auuuuaaaagaaugauuaugaau

SEQ ID NO: 2493518 - RNA, 23 nt, Human
auuuuaaaaauguuaaaauguau

SEQ ID NO: 2493519 - RNA, 14 nt, Human
auuuuaaaaaugaa

SEQ ID NO: 2493520 - RNA, 17 nt, Human
auuuuaaaaaugaaauu

SEQ ID NO: 2493521 - RNA, 20 nt, Human
auuuuaaaagauaaauauua

SEQ ID NO: 2493522 - RNA, 20 nt, Human
auuuuaaaagaugcaaugua

SEQ ID NO: 2493523 - RNA, 14 nt, Human
auuuuaaaaugaga

SEQ ID NO: 2493524 - RNA, 14 nt, Human
auuuuaacaauaac

SEQ ID NO: 2493525 - RNA, 15 nt, Human
auuuuaacaauaacu

SEQ ID NO: 2493526 - RNA, 16 nt, Human
auuuuaacaauaacua

SEQ ID NO: 2493527 - RNA, 16 nt, Human
auuuuaacucugucuu

SEQ ID NO: 2493528 - RNA, 15 nt, Human
auuuuaacucugucu

SEQ ID NO: 2493529 - RNA, 13 nt, Human
auuuuaacucugu

SEQ ID NO: 2493530 - RNA, 14 nt, Human
auuuuaacucuguc

SEQ ID NO: 2493531 - RNA, 13 nt, Human
auuuuaacucaua

SEQ ID NO: 2493532 - RNA, 22 nt, Human
auuuuaacaauaacuacugugu

SEQ ID NO: 2493533 - RNA, 22 nt, Human
auuuuaaccuaugauauuuucu

SEQ ID NO: 2493534 - RNA, 16 nt, Human
auuuuaaccaaaacau

SEQ ID NO: 2493535 - RNA, 13 nt, Human
auuuuaaaaauga

SEQ ID NO: 2493536 - RNA, 21 nt, Human
auuuuaaaaagucuucacucu

SEQ ID NO: 2493537 - RNA, 18 nt, Human
auuuuaaaaagucuucac

SEQ ID NO: 2493538 - RNA, 21 nt, Human
auuugugaacucagccaagca

SEQ ID NO: 2493539 - RNA, 20 nt, Human
auuugugaacucagccaagc

SEQ ID NO: 2493540 - RNA, 17 nt, Human
auuugugaacucagcca

SEQ ID NO: 2493541 - RNA, 16 nt, Human
auuuuaaaagaaugau

SEQ ID NO: 2493542 - RNA, 23 nt, Human
auuugugaaaugauggugaaagu

SEQ ID NO: 2493543 - RNA, 14 nt, Human
auuuuaaaaagucu

SEQ ID NO: 2493544 - RNA, 22 nt, Human
auuuuaaaaauacagauagaua

SEQ ID NO: 2493545 - RNA, 21 nt, Human
auuugugaagguggaaauaaa

SEQ ID NO: 2493546 - RNA, 18 nt, Human
auuugugaagguggaaau

SEQ ID NO: 2493547 - RNA, 15 nt, Human
auuuguccaauucuc

SEQ ID NO: 2493548 - RNA, 15 nt, Human
auuugucuuucagga

SEQ ID NO: 2493549 - RNA, 15 nt, Human
auuugucuugccuua

SEQ ID NO: 2493550 - RNA, 17 nt, Human
auuugucuauucuccag

SEQ ID NO: 2493551 - RNA, 19 nt, Human
caaugugaaaagaaaaaug

SEQ ID NO: 2493552 - RNA, 11 nt, Human
caauaugcuua

SEQ ID NO: 2493553 - RNA, 15 nt, Human
caauaugcaguucug

SEQ ID NO: 2493554 - RNA, 18 nt, Human
caauaguaauucucaggc

SEQ ID NO: 2493555 - RNA, 21 nt, Human
caauauguaaauagugcagaa

SEQ ID NO: 2493556 - RNA, 12 nt, Human
caauaugcuuac

SEQ ID NO: 2493557 - RNA, 15 nt, Human
caauauguaaauagu

SEQ ID NO: 2493558 - RNA, 15 nt, Human
caauaggcuguuccc

SEQ ID NO: 2493559 - RNA, 21 nt, Human
caauaggaaaaacugauuuuu

SEQ ID NO: 2493560 - RNA, 22 nt, Human
caauaggcagacuggguuucua

SEQ ID NO: 2493561 - RNA, 23 nt, Human
caauaggcaaaggggggaaggga

SEQ ID NO: 2493562 - RNA, 19 nt, Human
caaguguuguuuuuuaagu

SEQ ID NO: 2493563 - RNA, 11 nt, Human
caagugugugu

SEQ ID NO: 2493564 - RNA, 18 nt, Human
caaguuaaagugaauaac

SEQ ID NO: 2493565 - RNA, 20 nt, Human
caauaggaaaaacugauuuu

SEQ ID NO: 2493566 - RNA, 20 nt, Human
caagugugugcaugugugcg

SEQ ID NO: 2493567 - RNA, 17 nt, Human
caagugugugugcgugu

SEQ ID NO: 2493568 - RNA, 16 nt, Human
caaguguaaaauauuu

SEQ ID NO: 2493569 - RNA, 15 nt, Human
caaguguaaaauauu

SEQ ID NO: 2493570 - RNA, 22 nt, Human
caagugugguagggacuuaaaa

SEQ ID NO: 2493571 - RNA, 23 nt, Human
caagugugguagggacuuaaaaa

SEQ ID NO: 2493572 - RNA, 23 nt, Human
caaguguguaugugcgugugugc

SEQ ID NO: 2493573 - RNA, 11 nt, Human
caagugugugc

SEQ ID NO: 2493574 - RNA, 14 nt, Human
caagugugugcaca

SEQ ID NO: 2493575 - RNA, 19 nt, Human
caagugugugcacaugugu

SEQ ID NO: 2493576 - RNA, 20 nt, Human
caagugugugcacaugugug

SEQ ID NO: 2493577 - RNA, 21 nt, Human
caagugugugcacaugugugc

SEQ ID NO: 2493578 - RNA, 22 nt, Human
caagugugugcacaugugugcg

SEQ ID NO: 2493579 - RNA, 16 nt, Human
caagugugugcaugug

SEQ ID NO: 2493580 - RNA, 17 nt, Human
caagugugugcaugugu

SEQ ID NO: 2493581 - RNA, 22 nt, Human
caauauuaaauacagacacuaa

SEQ ID NO: 2493582 - RNA, 21 nt, Human
caauauuaaauacagacacua

SEQ ID NO: 2493583 - RNA, 17 nt, Human
caauccuagguaggguu

SEQ ID NO: 2493584 - RNA, 21 nt, Human
caauccuaauuucuccucccu

SEQ ID NO: 2493585 - RNA, 15 nt, Human
caauccuagugcuuu

SEQ ID NO: 2493586 - RNA, 14 nt, Human
caauccuauguuuu

SEQ ID NO: 2493587 - RNA, 20 nt, Human
caauccuauguuuuuguuca

SEQ ID NO: 2493588 - RNA, 20 nt, Human
caauauuaaauacagacacu

SEQ ID NO: 2493589 - RNA, 15 nt, Human
caauauuaaauacag

SEQ ID NO: 2493590 - RNA, 14 nt, Human
caauauuaaauaca

SEQ ID NO: 2493591 - RNA, 12 nt, Human
caauauuaaaua

SEQ ID NO: 2493592 - RNA, 23 nt, Human
caauauguauuguaaacaugugu

SEQ ID NO: 2493593 - RNA, 22 nt, Human
caauauguauuguaaacaugug

SEQ ID NO: 2493594 - RNA, 21 nt, Human
caauauguauuguaaacaugu

SEQ ID NO: 2493595 - RNA, 16 nt, Human
caauauguauuguaaa

SEQ ID NO: 2493596 - RNA, 15 nt, Human
caauauguauuguaa

SEQ ID NO: 2493597 - RNA, 14 nt, Human
caauauguauugua

SEQ ID NO: 2493598 - RNA, 13 nt, Human
caauauguauugu

SEQ ID NO: 2493599 - RNA, 16 nt, Human
caauauguauuaauau

SEQ ID NO: 2493600 - RNA, 22 nt, Human
caauauguauuaauauucauug

SEQ ID NO: 2493601 - RNA, 21 nt, Human
caaugaaaugaauuaaagugg

SEQ ID NO: 2493602 - RNA, 23 nt, Human
caaugaaaugaauuaaaguggac

SEQ ID NO: 2493603 - RNA, 11 nt, Human
caauccuggac

SEQ ID NO: 2493604 - RNA, 13 nt, Human
caauccugccccc

SEQ ID NO: 2493605 - RNA, 19 nt, Human
caaugaaaugaauuaaagu

SEQ ID NO: 2493606 - RNA, 19 nt, Human
caaugaaaugcucuccuuu

SEQ ID NO: 2493607 - RNA, 21 nt, Human
caaugaaaugcucuccuuucc

SEQ ID NO: 2493608 - RNA, 14 nt, Human
caauccucacuggg

SEQ ID NO: 2493609 - RNA, 16 nt, Human
caauccucacugggug

SEQ ID NO: 2493610 - RNA, 17 nt, Human
caauccucacugggugg

SEQ ID NO: 2493611 - RNA, 13 nt, Human
caauccucuaagc

SEQ ID NO: 2493612 - RNA, 12 nt, Human
caauccugcccc

SEQ ID NO: 2493613 - RNA, 11 nt, Human
caauccugccc

SEQ ID NO: 2493614 - RNA, 18 nt, Human
caauccucacuggguggg

SEQ ID NO: 2493615 - RNA, 16 nt, Human
caaugaucuagguuua

SEQ ID NO: 2493616 - RNA, 20 nt, Human
caaugauauauggauaaugc

SEQ ID NO: 2493617 - RNA, 14 nt, Human
caaugaucuagguu

SEQ ID NO: 2493618 - RNA, 20 nt, Human
caaugauaguaagaaaagug

SEQ ID NO: 2493619 - RNA, 21 nt, Human
caaugaucuagguuuaacuca

SEQ ID NO: 2493620 - RNA, 20 nt, Human
caaugaucuagguuuaacuc

SEQ ID NO: 2493621 - RNA, 18 nt, Human
caaugaucuagguuuaac

SEQ ID NO: 2493622 - RNA, 17 nt, Human
caaugaucuagguuuaa

SEQ ID NO: 2493623 - RNA, 23 nt, Human
caaugaucuagguuuaacucaga

SEQ ID NO: 2493624 - RNA, 22 nt, Human
caaugaucuagguuuaacucag

SEQ ID NO: 2493625 - RNA, 14 nt, Human
caaugaugaaugag

SEQ ID NO: 2493626 - RNA, 18 nt, Human
caaugauaguaagaaaag

SEQ ID NO: 2493627 - RNA, 19 nt, Human
caaugaggucugaaaugga

SEQ ID NO: 2493628 - RNA, 22 nt, Human
caaugacaucucaggggccaga

SEQ ID NO: 2493629 - RNA, 19 nt, Human
caaugacaucucaggggcc

SEQ ID NO: 2493630 - RNA, 17 nt, Human
caaugacaucucagggg

SEQ ID NO: 2493631 - RNA, 16 nt, Human
caaugacaucucaggg

SEQ ID NO: 2493632 - RNA, 15 nt, Human
caaugacaucuucaa

SEQ ID NO: 2493633 - RNA, 19 nt, Human
caaugacaucuucaaagcu

SEQ ID NO: 2493634 - RNA, 22 nt, Human
caaugaaugaaugaauggcuaa

SEQ ID NO: 2493635 - RNA, 20 nt, Human
caaugaacccccaugaugua

SEQ ID NO: 2493636 - RNA, 13 nt, Human
caaugaaccccca

SEQ ID NO: 2493637 - RNA, 21 nt, Human
caaugacacagucuuggcuca

SEQ ID NO: 2493638 - RNA, 19 nt, Human
caaugacacagucuuggcu

SEQ ID NO: 2493639 - RNA, 14 nt, Human
caaugacacagucu

SEQ ID NO: 2493640 - RNA, 19 nt, Human
caaugcaaaccaucauuga

SEQ ID NO: 2493641 - RNA, 23 nt, Human
caaugcacuuuguucuggcucuu

SEQ ID NO: 2493642 - RNA, 18 nt, Human
caaugcaaaccaucauug

SEQ ID NO: 2493643 - RNA, 17 nt, Human
caaugcaaaccaucauu

SEQ ID NO: 2493644 - RNA, 13 nt, Human
caaugauggcaau

SEQ ID NO: 2493645 - RNA, 16 nt, Human
caaugauggcaauuuu

SEQ ID NO: 2493646 - RNA, 21 nt, Human
caaugaugaaugagaaucuac

SEQ ID NO: 2493647 - RNA, 24 nt, Human
caaugaucuagguuuaacucagau

SEQ ID NO: 2493648 - RNA, 10 nt, Human
caauuuuccu

SEQ ID NO: 2493649 - RNA, 11 nt, Human
caauuuuccuu

SEQ ID NO: 2493650 - RNA, 15 nt, Human
caauuuuccuugaag

SEQ ID NO: 2493651 - RNA, 14 nt, Human
caauuuuccuugaa

SEQ ID NO: 2493652 - RNA, 13 nt, Human
caauuuuccuuga

SEQ ID NO: 2493653 - RNA, 17 nt, Human
caauuuuaaugcuauuu

SEQ ID NO: 2493654 - RNA, 21 nt, Human
caauuuuaucccucaccugua

SEQ ID NO: 2493655 - RNA, 14 nt, Human
caauucagacaggc

SEQ ID NO: 2493656 - RNA, 15 nt, Human
caauucagacaggca

SEQ ID NO: 2493657 - RNA, 23 nt, Human
caauucagacaggcaaauaaaag

SEQ ID NO: 2493658 - RNA, 21 nt, Human
caauucagugcuguacuugau

SEQ ID NO: 2493659 - RNA, 13 nt, Human
caauucaugaacu

SEQ ID NO: 2493660 - RNA, 14 nt, Human
caauucaacccuuu

SEQ ID NO: 2493661 - RNA, 15 nt, Human
caauucaugaacuuc

SEQ ID NO: 2493662 - RNA, 14 nt, Human
caauucaugaacuu

SEQ ID NO: 2493663 - RNA, 21 nt, Human
caauucaugaacuucgcauca

SEQ ID NO: 2493664 - RNA, 15 nt, Human
caauuccaaaggaau

SEQ ID NO: 2493665 - RNA, 20 nt, Human
caauucacaucuaaccucau

SEQ ID NO: 2493666 - RNA, 13 nt, Human
caauucagacagg

SEQ ID NO: 2493667 - RNA, 14 nt, Human
caauucaacacucc

SEQ ID NO: 2493668 - RNA, 17 nt, Human
caauucaacccuuugcc

SEQ ID NO: 2493669 - RNA, 21 nt, Human
caauuaaggauuuuaugcuuu

SEQ ID NO: 2493670 - RNA, 22 nt, Human
caauuaaggauuuuaugcuuua

SEQ ID NO: 2493671 - RNA, 22 nt, Human
caauuaaauguagguaugaaua

SEQ ID NO: 2493672 - RNA, 23 nt, Human
caauuaaacggauuauuuuuuca

SEQ ID NO: 2493673 - RNA, 20 nt, Human
caauuaaacggauuauuuuu

SEQ ID NO: 2493674 - RNA, 12 nt, Human
caauuaaaugua

SEQ ID NO: 2493675 - RNA, 15 nt, Human
caauuaaggauuuua

SEQ ID NO: 2493676 - RNA, 20 nt, Human
caauuaaggauuuuaugcuu

SEQ ID NO: 2493677 - RNA, 13 nt, Human
caauuaaggauuu

SEQ ID NO: 2493678 - RNA, 13 nt, Human
caauuaaauguag

SEQ ID NO: 2493679 - RNA, 14 nt, Human
caauuaaauguagg

SEQ ID NO: 2493680 - RNA, 20 nt, Human
caaugucugugcuagggaaa

SEQ ID NO: 2493681 - RNA, 14 nt, Human
caaugucugugcua

SEQ ID NO: 2493682 - RNA, 11 nt, Human
caaugucuuga

SEQ ID NO: 2493683 - RNA, 21 nt, Human
caaugucuugaugcaugcacu

SEQ ID NO: 2493684 - RNA, 23 nt, Human
caaugucuugaugcaugcacugu

SEQ ID NO: 2493685 - RNA, 19 nt, Human
caauuaaacggauuauuuu

SEQ ID NO: 2493686 - RNA, 18 nt, Human
caauuaaacggauuauuu

SEQ ID NO: 2493687 - RNA, 17 nt, Human
caauuaaacggauuauu

SEQ ID NO: 2493688 - RNA, 16 nt, Human
caauuaaacggauuau

SEQ ID NO: 2493689 - RNA, 15 nt, Human
caauuaaacggauua

SEQ ID NO: 2493690 - RNA, 14 nt, Human
caauuaaacggauu

SEQ ID NO: 2493691 - RNA, 13 nt, Human
caaugucugugcu

SEQ ID NO: 2493692 - RNA, 12 nt, Human
caaugucugugc

SEQ ID NO: 2493693 - RNA, 20 nt, Human
caaugucugagugaaccugu

SEQ ID NO: 2493694 - RNA, 15 nt, Human
caaugucugagugaa

SEQ ID NO: 2493695 - RNA, 16 nt, Human
caaugucugagugaac

SEQ ID NO: 2493696 - RNA, 21 nt, Human
caaugucaggaacagaaggau

SEQ ID NO: 2493697 - RNA, 13 nt, Human
caaugcauuuugg

SEQ ID NO: 2493698 - RNA, 12 nt, Human
caaugcauuuug

SEQ ID NO: 2493699 - RNA, 20 nt, Human
caaugcaugcagccacugug

SEQ ID NO: 2493700 - RNA, 16 nt, Human
caaugcaugcagccac

SEQ ID NO: 2493701 - RNA, 21 nt, Human
caaugcauuuuggaaagcucc

SEQ ID NO: 2493702 - RNA, 22 nt, Human
caaugccaaaaaaagacagggc

SEQ ID NO: 2493703 - RNA, 22 nt, Human
cacaacacacagauuugagcuc

SEQ ID NO: 2493704 - RNA, 23 nt, Human
cacaaccaucugucccugccuca

SEQ ID NO: 2493705 - RNA, 23 nt, Human
cacaaccuucuguggcucacaga

SEQ ID NO: 2493706 - RNA, 19 nt, Human
cacaaccuucuguggcuca

SEQ ID NO: 2493707 - RNA, 18 nt, Human
cacaaccuucuguggcuc

SEQ ID NO: 2493708 - RNA, 17 nt, Human
cacaaccuucuguggcu

SEQ ID NO: 2493709 - RNA, 11 nt, Human
cacaacagauu

SEQ ID NO: 2493710 - RNA, 20 nt, Human
cacaaauuauuaaugaaaau

SEQ ID NO: 2493711 - RNA, 16 nt, Human
cacaacacacacacuc

SEQ ID NO: 2493712 - RNA, 21 nt, Human
cacaaauucugucucuggauu

SEQ ID NO: 2493713 - RNA, 17 nt, Human
cacaaauuauuaaugaa

SEQ ID NO: 2493714 - RNA, 12 nt, Human
cacaaagcccaa

SEQ ID NO: 2493715 - RNA, 14 nt, Human
cacaaagcccaagg

SEQ ID NO: 2493716 - RNA, 11 nt, Human
cacaaagccca

SEQ ID NO: 2493717 - RNA, 15 nt, Human
cacaaacuguaaaua

SEQ ID NO: 2493718 - RNA, 23 nt, Human
cacaaacuguaaauaaaaagaaa

SEQ ID NO: 2493719 - RNA, 16 nt, Human
cacaaaacccagaccu

SEQ ID NO: 2493720 - RNA, 14 nt, Human
cacaaacuguaaau

SEQ ID NO: 2493721 - RNA, 15 nt, Human
cacaaaacaacccua

SEQ ID NO: 2493722 - RNA, 18 nt, Human
cacaaaaguuagcugagc

SEQ ID NO: 2493723 - RNA, 22 nt, Human
cacaaagcacaguuugaacaaa

SEQ ID NO: 2493724 - RNA, 18 nt, Human
cacaaagcacaguuugaa

SEQ ID NO: 2493725 - RNA, 19 nt, Human
cacaaacuuuuauacucuu

SEQ ID NO: 2493726 - RNA, 18 nt, Human
cacaaaaguuucucuuuu

SEQ ID NO: 2493727 - RNA, 16 nt, Human
cacaaaaguuucucuu

SEQ ID NO: 2493728 - RNA, 19 nt, Human
caauuuuccuugaagccga

SEQ ID NO: 2493729 - RNA, 17 nt, Human
caauuuuccuugaagcc

SEQ ID NO: 2493730 - RNA, 16 nt, Human
caauuuuccuugaagc

SEQ ID NO: 2493731 - RNA, 13 nt, Human
caauuuucuccca

SEQ ID NO: 2493732 - RNA, 18 nt, Human
caauuuuccuugaagccg

SEQ ID NO: 2493733 - RNA, 19 nt, Human
caauuuucuggaauacaug

SEQ ID NO: 2493734 - RNA, 22 nt, Human
cacaaaacaaaugccacacauc

SEQ ID NO: 2493735 - RNA, 12 nt, Human
cacaaaaaugaa

SEQ ID NO: 2493736 - RNA, 17 nt, Human
caauuuucucccaggaa

SEQ ID NO: 2493737 - RNA, 13 nt, Human
cacacuugugugu

SEQ ID NO: 2493738 - RNA, 19 nt, Human
cacacuugugugugggcug

SEQ ID NO: 2493739 - RNA, 21 nt, Human
cacacuugugugugggcugug

SEQ ID NO: 2493740 - RNA, 23 nt, Human
cacacuugugugugggcugugag

SEQ ID NO: 2493741 - RNA, 15 nt, Human
cacacuuguuccagc

SEQ ID NO: 2493742 - RNA, 21 nt, Human
cacacuuggcccaaguggcag

SEQ ID NO: 2493743 - RNA, 21 nt, Human
cacacuugagaggaugaaugu

SEQ ID NO: 2493744 - RNA, 19 nt, Human
cacacuugagaggaugaau

SEQ ID NO: 2493745 - RNA, 22 nt, Human
cacacuugguuggguccucaca

SEQ ID NO: 2493746 - RNA, 22 nt, Human
cacagaccuggagccccugggu

SEQ ID NO: 2493747 - RNA, 21 nt, Human
cacagaccuggagccccuggg

SEQ ID NO: 2493748 - RNA, 20 nt, Human
cacagaccuggagccccugg

SEQ ID NO: 2493749 - RNA, 19 nt, Human
cacagaccuggagccccug

SEQ ID NO: 2493750 - RNA, 18 nt, Human
cacagaccuggagccccu

SEQ ID NO: 2493751 - RNA, 16 nt, Human
cacagaccuggagccc

SEQ ID NO: 2493752 - RNA, 15 nt, Human
cacagaccuggagcc

SEQ ID NO: 2493753 - RNA, 14 nt, Human
cacagaccuggagc

SEQ ID NO: 2493754 - RNA, 16 nt, Human
cacacuuguuccagcu

SEQ ID NO: 2493755 - RNA, 17 nt, Human
cacacuuguuccagcuc

SEQ ID NO: 2493756 - RNA, 22 nt, Human
cacagacccugcccugugggcc

SEQ ID NO: 2493757 - RNA, 21 nt, Human
cacacuugacaucaacugcau

SEQ ID NO: 2493758 - RNA, 18 nt, Human
cacacuugagaggaugaa

SEQ ID NO: 2493759 - RNA, 17 nt, Human
cacacuugagaggauga

SEQ ID NO: 2493760 - RNA, 15 nt, Human
cacacuucugugaga

SEQ ID NO: 2493761 - RNA, 22 nt, Human
cacacuucugugagacccccac

SEQ ID NO: 2493762 - RNA, 16 nt, Human
cacacuuccaccagcc

SEQ ID NO: 2493763 - RNA, 18 nt, Human
cacacuuccaccagccug

SEQ ID NO: 2493764 - RNA, 19 nt, Human
cacacuuccaccagccugc

SEQ ID NO: 2493765 - RNA, 23 nt, Human
cacacuuccuguccagagagaga

SEQ ID NO: 2493766 - RNA, 19 nt, Human
cacacuuccuguccagaga

SEQ ID NO: 2493767 - RNA, 20 nt, Human
cacacuuccuguccagagag

SEQ ID NO: 2493768 - RNA, 13 nt, Human
cacacuuccuguc

SEQ ID NO: 2493769 - RNA, 14 nt, Human
cacacuuccugucc

SEQ ID NO: 2493770 - RNA, 15 nt, Human
cacacuuccugucca

SEQ ID NO: 2493771 - RNA, 16 nt, Human
cacacuuccuguccag

SEQ ID NO: 2493772 - RNA, 16 nt, Human
cacagaguuguuacau

SEQ ID NO: 2493773 - RNA, 17 nt, Human
cacagaguuguuacauu

SEQ ID NO: 2493774 - RNA, 14 nt, Human
cacagagcaggacu

SEQ ID NO: 2493775 - RNA, 19 nt, Human
cacagagagucccacugcc

SEQ ID NO: 2493776 - RNA, 18 nt, Human
cacagagagucccacugc

SEQ ID NO: 2493777 - RNA, 16 nt, Human
cacagagagucccacu

SEQ ID NO: 2493778 - RNA, 12 nt, Human
cacagagagucc

SEQ ID NO: 2493779 - RNA, 14 nt, Human
cacagagagaguca

SEQ ID NO: 2493780 - RNA, 22 nt, Human
cacagagacccccggaacaagc

SEQ ID NO: 2493781 - RNA, 23 nt, Human
cacagagacccccggaacaagcc

SEQ ID NO: 2493782 - RNA, 22 nt, Human
cacagagagggggccaccuccc

SEQ ID NO: 2493783 - RNA, 24 nt, Human
cacagaccuggagccccugggugg

SEQ ID NO: 2493784 - RNA, 23 nt, Human
cacagaccuggagccccugggug

SEQ ID NO: 2493785 - RNA, 16 nt, Human
cacagacgucccucca

SEQ ID NO: 2493786 - RNA, 18 nt, Human
cacagacucaaaugcuca

SEQ ID NO: 2493787 - RNA, 22 nt, Human
cacagagaagacaaaauuagca

SEQ ID NO: 2493788 - RNA, 17 nt, Human
cacagagaagacaaaau

SEQ ID NO: 2493789 - RNA, 15 nt, Human
cacagagaagacaaa

SEQ ID NO: 2493790 - RNA, 16 nt, Human
cacagagacauuccuc

SEQ ID NO: 2493791 - RNA, 21 nt, Human
cacagagacauuccuccgagc

SEQ ID NO: 2493792 - RNA, 14 nt, Human
cacagagacccccg

SEQ ID NO: 2493793 - RNA, 14 nt, Human
cacagagaagacaa

SEQ ID NO: 2493794 - RNA, 24 nt, Human
cacacuguguccuggugcucucug

SEQ ID NO: 2493795 - RNA, 23 nt, Human
cacacuguguccuggugcucucu

SEQ ID NO: 2493796 - RNA, 20 nt, Human
cacacuguguccuggugcuc

SEQ ID NO: 2493797 - RNA, 19 nt, Human
cacacuguguccuggugcu

SEQ ID NO: 2493798 - RNA, 17 nt, Human
cacacuucaggcucuuc

SEQ ID NO: 2493799 - RNA, 14 nt, Human
cacacuucaggcuc

SEQ ID NO: 2493800 - RNA, 22 nt, Human
cacacuucaggcucuucuccuu

SEQ ID NO: 2493801 - RNA, 21 nt, Human
cacacuucaggcucuucuccu

SEQ ID NO: 2493802 - RNA, 20 nt, Human
cacacuucaggcucuucucc

SEQ ID NO: 2493803 - RNA, 18 nt, Human
cacacuucaggcucuucu

SEQ ID NO: 2493804 - RNA, 23 nt, Human
cacacugguguggauuaaccugc

SEQ ID NO: 2493805 - RNA, 15 nt, Human
cacacuggugacugc

SEQ ID NO: 2493806 - RNA, 21 nt, Human
cacacugggugcccaagcuca

SEQ ID NO: 2493807 - RNA, 22 nt, Human
cacacuggggugccgccugccc

SEQ ID NO: 2493808 - RNA, 19 nt, Human
cacacuggggugccgccug

SEQ ID NO: 2493809 - RNA, 19 nt, Human
cacacugggacuugcaaaa

SEQ ID NO: 2493810 - RNA, 23 nt, Human
cacacugcuaggugggccagccc

SEQ ID NO: 2493811 - RNA, 16 nt, Human
cacacuguguccuggu

SEQ ID NO: 2493812 - RNA, 23 nt, Human
cacacugugcuuucuauuguaca

SEQ ID NO: 2493813 - RNA, 22 nt, Human
cacacugugcuuucuauuguac

SEQ ID NO: 2493814 - RNA, 20 nt, Human
cacacugugcuuucuauugu

SEQ ID NO: 2493815 - RNA, 16 nt, Human
cacacugugcuuucua

SEQ ID NO: 2493816 - RNA, 15 nt, Human
cacacugugcuuucu

SEQ ID NO: 2493817 - RNA, 14 nt, Human
cacacugugcuuuc

SEQ ID NO: 2493818 - RNA, 23 nt, Human
cacacuguagcauuacagugggu

SEQ ID NO: 2493819 - RNA, 19 nt, Human
cacacucacuccugagacc

SEQ ID NO: 2493820 - RNA, 18 nt, Human
cacacucacuccugagac

SEQ ID NO: 2493821 - RNA, 17 nt, Human
cacacucacuccugaga

SEQ ID NO: 2493822 - RNA, 19 nt, Human
cacacuauuaccaugagaa

SEQ ID NO: 2493823 - RNA, 20 nt, Human
cacacuauuaccaugagaag

SEQ ID NO: 2493824 - RNA, 18 nt, Human
cacacuauuaccaugaga

SEQ ID NO: 2493825 - RNA, 17 nt, Human
cacacuauuaccaugag

SEQ ID NO: 2493826 - RNA, 14 nt, Human
cacacugaagaagc

SEQ ID NO: 2493827 - RNA, 19 nt, Human
cacacucaaaucaagaaac

SEQ ID NO: 2493828 - RNA, 17 nt, Human
cacacuagccucuccag

SEQ ID NO: 2493829 - RNA, 18 nt, Human
cacacuagccucuccagg

SEQ ID NO: 2493830 - RNA, 19 nt, Human
cacacuagccucuccagga

SEQ ID NO: 2493831 - RNA, 21 nt, Human
cacacugcaagagccuuggug

SEQ ID NO: 2493832 - RNA, 19 nt, Human
cacacugcaagagccuugg

SEQ ID NO: 2493833 - RNA, 20 nt, Human
cacacugcaagagccuuggu

SEQ ID NO: 2493834 - RNA, 16 nt, Human
cacacugcaagagccu

SEQ ID NO: 2493835 - RNA, 17 nt, Human
cacacugcaagagccuu

SEQ ID NO: 2493836 - RNA, 18 nt, Human
cacacugcaagagccuug

SEQ ID NO: 2493837 - RNA, 20 nt, Human
cacacuggacuccggcccuc

SEQ ID NO: 2493838 - RNA, 19 nt, Human
cacacuggacuccggcccu

SEQ ID NO: 2493839 - RNA, 13 nt, Human
cacacuggacucc

SEQ ID NO: 2493840 - RNA, 14 nt, Human
cacacugaugcuua

SEQ ID NO: 2493841 - RNA, 18 nt, Human
cacacugaugcuuagaug

SEQ ID NO: 2493842 - RNA, 15 nt, Human
cacacugaggcaggg

SEQ ID NO: 2493843 - RNA, 16 nt, Human
cacacugaggcaggga

SEQ ID NO: 2493844 - RNA, 17 nt, Human
cacacugaggcagggaa

SEQ ID NO: 2493845 - RNA, 18 nt, Human
cacacugaggcagggaag

SEQ ID NO: 2493846 - RNA, 12 nt, Human
cacacucacugc

SEQ ID NO: 2493847 - RNA, 13 nt, Human
cacacugaggcag

SEQ ID NO: 2493848 - RNA, 14 nt, Human
cacacugaggcagg

SEQ ID NO: 2493849 - RNA, 14 nt, Human
cacacucauccccu

SEQ ID NO: 2493850 - RNA, 12 nt, Human
cacacagccaca

SEQ ID NO: 2493851 - RNA, 13 nt, Human
cacacagccacac

SEQ ID NO: 2493852 - RNA, 14 nt, Human
cacacagccacaca

SEQ ID NO: 2493853 - RNA, 15 nt, Human
cacacagccacacac

SEQ ID NO: 2493854 - RNA, 16 nt, Human
cacacagccacacaca

SEQ ID NO: 2493855 - RNA, 17 nt, Human
cacacagccacacacac

SEQ ID NO: 2493856 - RNA, 19 nt, Human
cacacagccacacacacag

SEQ ID NO: 2493857 - RNA, 20 nt, Human
cacacagccacacacacaga

SEQ ID NO: 2493858 - RNA, 21 nt, Human
cacacagccaggugccuugga

SEQ ID NO: 2493859 - RNA, 19 nt, Human
cacacagccaggugccuug

SEQ ID NO: 2493860 - RNA, 15 nt, Human
cacacagccaggugc

SEQ ID NO: 2493861 - RNA, 14 nt, Human
cacacagccaggug

SEQ ID NO: 2493862 - RNA, 21 nt, Human
cacacagccacacacacagaa

SEQ ID NO: 2493863 - RNA, 22 nt, Human
cacacagccacacacacagaaa

SEQ ID NO: 2493864 - RNA, 12 nt, Human
cacacagcucug

SEQ ID NO: 2493865 - RNA, 19 nt, Human
cacacagaggcugccucuc

SEQ ID NO: 2493866 - RNA, 11 nt, Human
cacacagccac

SEQ ID NO: 2493867 - RNA, 18 nt, Human
cacacagaggaagagcag

SEQ ID NO: 2493868 - RNA, 22 nt, Human
cacacagaggaagagcaggcac

SEQ ID NO: 2493869 - RNA, 12 nt, Human
cacacagaggaa

SEQ ID NO: 2493870 - RNA, 15 nt, Human
cacacagaaacucuu

SEQ ID NO: 2493871 - RNA, 21 nt, Human
cacacagaaaauauacuguaa

SEQ ID NO: 2493872 - RNA, 22 nt, Human
cacacagaaaauauacuguaaa

SEQ ID NO: 2493873 - RNA, 23 nt, Human
cacacagaaaauauacuguaaag

SEQ ID NO: 2493874 - RNA, 20 nt, Human
cacacagaaaauauacugua

SEQ ID NO: 2493875 - RNA, 14 nt, Human
cacacaccagagcc

SEQ ID NO: 2493876 - RNA, 12 nt, Human
cacacacaugca

SEQ ID NO: 2493877 - RNA, 16 nt, Human
cacacacaugcauaca

SEQ ID NO: 2493878 - RNA, 17 nt, Human
cacacacaugcauacac

SEQ ID NO: 2493879 - RNA, 18 nt, Human
cacacacaugcauacaca

SEQ ID NO: 2493880 - RNA, 19 nt, Human
cacacacauacacacauau

SEQ ID NO: 2493881 - RNA, 15 nt, Human
cacacacaggagcau

SEQ ID NO: 2493882 - RNA, 13 nt, Human
cacacacaggcaa

SEQ ID NO: 2493883 - RNA, 21 nt, Human
cacacacaggcaacugaggca

SEQ ID NO: 2493884 - RNA, 19 nt, Human
cacaacuauuuuuccaaaa

SEQ ID NO: 2493885 - RNA, 14 nt, Human
cacaacuauuuuuc

SEQ ID NO: 2493886 - RNA, 17 nt, Human
cacaacccuguuuuaua

SEQ ID NO: 2493887 - RNA, 13 nt, Human
cacacacaggagc

SEQ ID NO: 2493888 - RNA, 15 nt, Human
cacacacagcugggc

SEQ ID NO: 2493889 - RNA, 12 nt, Human
cacacacaggag

SEQ ID NO: 2493890 - RNA, 13 nt, Human
cacaacuauauug

SEQ ID NO: 2493891 - RNA, 19 nt, Human
cacaacgugcauugugcuu

SEQ ID NO: 2493892 - RNA, 17 nt, Human
cacaacgugcauugugc

SEQ ID NO: 2493893 - RNA, 14 nt, Human
cacaacgugcauug

SEQ ID NO: 2493894 - RNA, 14 nt, Human
cacaaccugaaccu

SEQ ID NO: 2493895 - RNA, 13 nt, Human
cacaccagagccc

SEQ ID NO: 2493896 - RNA, 12 nt, Human
cacaccagagcc

SEQ ID NO: 2493897 - RNA, 15 nt, Human
cacaccagagcccac

SEQ ID NO: 2493898 - RNA, 13 nt, Human
cacacagcuccca

SEQ ID NO: 2493899 - RNA, 16 nt, Human
cacaccacaucuaagc

SEQ ID NO: 2493900 - RNA, 21 nt, Human
cacaccaggcugugggccuca

SEQ ID NO: 2493901 - RNA, 21 nt, Human
cacacccaccguccgcccugc

SEQ ID NO: 2493902 - RNA, 14 nt, Human
cacacccaccgucc

SEQ ID NO: 2493903 - RNA, 14 nt, Human
cacacccacucagc

SEQ ID NO: 2493904 - RNA, 15 nt, Human
cacacccacucagcu

SEQ ID NO: 2493905 - RNA, 22 nt, Human
cacacccaccguccgcccugcu

SEQ ID NO: 2493906 - RNA, 14 nt, Human
cacacccagcuacu

SEQ ID NO: 2493907 - RNA, 16 nt, Human
cacacccacucagcuc

SEQ ID NO: 2493908 - RNA, 13 nt, Human
cacacccagccca

SEQ ID NO: 2493909 - RNA, 22 nt, Human
cacaccaggcugugggccucaa

SEQ ID NO: 2493910 - RNA, 22 nt, Human
cacaccaggcuugccugcaggc

SEQ ID NO: 2493911 - RNA, 21 nt, Human
cacaccaggcuugccugcagg

SEQ ID NO: 2493912 - RNA, 23 nt, Human
cacacccccaccccuugcucuca

SEQ ID NO: 2493913 - RNA, 13 nt, Human
cacacccccaccc

SEQ ID NO: 2493914 - RNA, 18 nt, Human
cacacccucucccaggac

SEQ ID NO: 2493915 - RNA, 14 nt, Human
cacacccuguuuua

SEQ ID NO: 2493916 - RNA, 21 nt, Human
cacacccuguacuguucugug

SEQ ID NO: 2493917 - RNA, 21 nt, Human
cacacccucccccgccacucc

SEQ ID NO: 2493918 - RNA, 17 nt, Human
cacacccucucccagga

SEQ ID NO: 2493919 - RNA, 17 nt, Human
cacaccgggcacucaga

SEQ ID NO: 2493920 - RNA, 16 nt, Human
cacaccuguagcacuu

SEQ ID NO: 2493921 - RNA, 17 nt, Human
cacaccugagccagccu

SEQ ID NO: 2493922 - RNA, 22 nt, Human
cacaccuuuuauugacacagaa

SEQ ID NO: 2493923 - RNA, 16 nt, Human
cacaccuguaguccca

SEQ ID NO: 2493924 - RNA, 19 nt, Human
cacaccuguagucccagcu

SEQ ID NO: 2493925 - RNA, 23 nt, Human
cacaccuuuuauugacacagaaa

SEQ ID NO: 2493926 - RNA, 14 nt, Human
cacacgcacacaca

SEQ ID NO: 2493927 - RNA, 20 nt, Human
cacaccuguagucccagcua

SEQ ID NO: 2493928 - RNA, 15 nt, Human
cacacgcacacacac

SEQ ID NO: 2493929 - RNA, 14 nt, Human
cacaccucugccag

SEQ ID NO: 2493930 - RNA, 13 nt, Human
cacaccucugcca

SEQ ID NO: 2493931 - RNA, 12 nt, Human
cacaccucugcc

SEQ ID NO: 2493932 - RNA, 20 nt, Human
cacaccgagggcgaccccgu

SEQ ID NO: 2493933 - RNA, 11 nt, Human
cacaccugagc

SEQ ID NO: 2493934 - RNA, 16 nt, Human
cacaccugacucugaa

SEQ ID NO: 2493935 - RNA, 22 nt, Human
cacaccuguaaucccagcacuu

SEQ ID NO: 2493936 - RNA, 20 nt, Human
cacagcacgggggccaagga

SEQ ID NO: 2493937 - RNA, 12 nt, Human
cacagcagccug

SEQ ID NO: 2493938 - RNA, 16 nt, Human
cacagcagccccugca

SEQ ID NO: 2493939 - RNA, 20 nt, Human
cacagaugggugcuuggagg

SEQ ID NO: 2493940 - RNA, 19 nt, Human
cacagagugugcuggagga

SEQ ID NO: 2493941 - RNA, 14 nt, Human
cacagagcggggac

SEQ ID NO: 2493942 - RNA, 18 nt, Human
cacagaguggucuuucug

SEQ ID NO: 2493943 - RNA, 20 nt, Human
cacagauggauuugccugug

SEQ ID NO: 2493944 - RNA, 23 nt, Human
cacagauggauuugccugugcca

SEQ ID NO: 2493945 - RNA, 18 nt, Human
cacagaugggugcuugga

SEQ ID NO: 2493946 - RNA, 14 nt, Human
cacagaugggugcu

SEQ ID NO: 2493947 - RNA, 20 nt, Human
cacagaguuguuacauuuuu

SEQ ID NO: 2493948 - RNA, 19 nt, Human
cacagauggauuugccugu

SEQ ID NO: 2493949 - RNA, 13 nt, Human
cacagagcgggga

SEQ ID NO: 2493950 - RNA, 21 nt, Human
cacagagcaggacugcacagc

SEQ ID NO: 2493951 - RNA, 22 nt, Human
cacagaguggucuuucuggaga

SEQ ID NO: 2493952 - RNA, 20 nt, Human
cacagcaucauuuugcauuc

SEQ ID NO: 2493953 - RNA, 19 nt, Human
cacagcagcuucaccagag

SEQ ID NO: 2493954 - RNA, 18 nt, Human
cacagcagcuucaccaga

SEQ ID NO: 2493955 - RNA, 15 nt, Human
cacagcagcuucacc

SEQ ID NO: 2493956 - RNA, 23 nt, Human
cacagcaucauuuugcauucaaa

SEQ ID NO: 2493957 - RNA, 13 nt, Human
cacagcaugugua

SEQ ID NO: 2493958 - RNA, 22 nt, Human
cacagcaguugaaaagacucca

SEQ ID NO: 2493959 - RNA, 18 nt, Human
cacagcagcaucuucaaa

SEQ ID NO: 2493960 - RNA, 14 nt, Human
cacagcagccuggg

SEQ ID NO: 2493961 - RNA, 13 nt, Human
cacagcagcuuca

SEQ ID NO: 2493962 - RNA, 19 nt, Human
cacagcagcugaacagcca

SEQ ID NO: 2493963 - RNA, 16 nt, Human
cacagcagcugaacag

SEQ ID NO: 2493964 - RNA, 11 nt, Human
cacagccacac

SEQ ID NO: 2493965 - RNA, 12 nt, Human
cacagccacaca

SEQ ID NO: 2493966 - RNA, 10 nt, Human
cacagccaca

SEQ ID NO: 2493967 - RNA, 22 nt, Human
cacagccaacacgcaccugccu

SEQ ID NO: 2493968 - RNA, 13 nt, Human
cacagccacacac

SEQ ID NO: 2493969 - RNA, 14 nt, Human
cacagccacacaca

SEQ ID NO: 2493970 - RNA, 14 nt, Human
cacagccaaggacu

SEQ ID NO: 2493971 - RNA, 14 nt, Human
cacagccgcagccu

SEQ ID NO: 2493972 - RNA, 17 nt, Human
cacagccuccccugcca

SEQ ID NO: 2493973 - RNA, 19 nt, Human
cacagccuccccugccagg

SEQ ID NO: 2493974 - RNA, 14 nt, Human
cacagccuccccug

SEQ ID NO: 2493975 - RNA, 23 nt, Human
cacagccgcagccucccucugac

SEQ ID NO: 2493976 - RNA, 21 nt, Human
cacagccgcagccucccucug

SEQ ID NO: 2493977 - RNA, 22 nt, Human
cacagccgcagccucccucuga

SEQ ID NO: 2493978 - RNA, 19 nt, Human
cacaggaaccacaagacug

SEQ ID NO: 2493979 - RNA, 20 nt, Human
cacagccuccccugccaggg

SEQ ID NO: 2493980 - RNA, 21 nt, Human
cacagccuccccugccagggc

SEQ ID NO: 2493981 - RNA, 15 nt, Human
cacagccuccucugu

SEQ ID NO: 2493982 - RNA, 14 nt, Human
cacagccuccucug

SEQ ID NO: 2493983 - RNA, 23 nt, Human
cacagccuccccugccagggcag

SEQ ID NO: 2493984 - RNA, 20 nt, Human
cacaggaaccacaagacugc

SEQ ID NO: 2493985 - RNA, 15 nt, Human
cacaggaaguagagg

SEQ ID NO: 2493986 - RNA, 16 nt, Human
cacaggaucagucuga

SEQ ID NO: 2493987 - RNA, 15 nt, Human
cacaggaucagucug

SEQ ID NO: 2493988 - RNA, 23 nt, Human
cacagccuccucugucugcccuu

SEQ ID NO: 2493989 - RNA, 21 nt, Human
cacagccuccucugucugccc

SEQ ID NO: 2493990 - RNA, 20 nt, Human
cacagccuccucugucugcc

SEQ ID NO: 2493991 - RNA, 19 nt, Human
cacagccuccucugucugc

SEQ ID NO: 2493992 - RNA, 10 nt, Human
cacagccucu

SEQ ID NO: 2493993 - RNA, 22 nt, Human
cacaggaagccugcaguccugg

SEQ ID NO: 2493994 - RNA, 12 nt, Human
cacaggaucagu

SEQ ID NO: 2493995 - RNA, 19 nt, Human
cacaggcccggcuccaggc

SEQ ID NO: 2493996 - RNA, 18 nt, Human
cacaggcccggcuccagg

SEQ ID NO: 2493997 - RNA, 17 nt, Human
cacaggcccggcuccag

SEQ ID NO: 2493998 - RNA, 16 nt, Human
cacaggcccggcucca

SEQ ID NO: 2493999 - RNA, 12 nt, Human
cacaggcagcuu

SEQ ID NO: 2494000 - RNA, 21 nt, Human
cacaggcagcuggaugagacu

SEQ ID NO: 2494001 - RNA, 16 nt, Human
cacaggcagcuggaug

SEQ ID NO: 2494002 - RNA, 11 nt, Human
cacaggcagcu

SEQ ID NO: 2494003 - RNA, 10 nt, Human
cacaggcagg

SEQ ID NO: 2494004 - RNA, 22 nt, Human
cacaggcaacugaggcagacag

SEQ ID NO: 2494005 - RNA, 23 nt, Human
cacaggcaacugaggcagacagc

SEQ ID NO: 2494006 - RNA, 20 nt, Human
cacaggcaacugaggcagac

SEQ ID NO: 2494007 - RNA, 14 nt, Human
cacaggcagcauuu

SEQ ID NO: 2494008 - RNA, 15 nt, Human
cacaggcagcauuua

SEQ ID NO: 2494009 - RNA, 23 nt, Human
cacaggcccggcuccaggcuccu

SEQ ID NO: 2494010 - RNA, 20 nt, Human
cacaggcccggcuccaggcu

SEQ ID NO: 2494011 - RNA, 18 nt, Human
cacagugagucgaggaca

SEQ ID NO: 2494012 - RNA, 17 nt, Human
cacaguuggcuggauga

SEQ ID NO: 2494013 - RNA, 23 nt, Human
cacaguuggccuucagaaccauc

SEQ ID NO: 2494014 - RNA, 15 nt, Human
cacaguuggccuuca

SEQ ID NO: 2494015 - RNA, 12 nt, Human
cacaguuggccu

SEQ ID NO: 2494016 - RNA, 23 nt, Human
cacaguucuuugggccagacaug

SEQ ID NO: 2494017 - RNA, 13 nt, Human
cacaggcccuccc

SEQ ID NO: 2494018 - RNA, 21 nt, Human
cacaguucuuugggccagaca

SEQ ID NO: 2494019 - RNA, 20 nt, Human
cacagugagucgaggacagg

SEQ ID NO: 2494020 - RNA, 19 nt, Human
cacagugagucgaggacag

SEQ ID NO: 2494021 - RNA, 22 nt, Human
cacaguuggcuggaugaaauuu

SEQ ID NO: 2494022 - RNA, 21 nt, Human
cacaguuuccucaucugucca

SEQ ID NO: 2494023 - RNA, 15 nt, Human
cacaguuuucugaga

SEQ ID NO: 2494024 - RNA, 14 nt, Human
cacaguuuucugag

SEQ ID NO: 2494025 - RNA, 22 nt, Human
cacauaauuaaaguguccauug

SEQ ID NO: 2494026 - RNA, 18 nt, Human
cacauaauuaaagugucc

SEQ ID NO: 2494027 - RNA, 19 nt, Human
cacauaagcucagaaucca

SEQ ID NO: 2494028 - RNA, 22 nt, Human
cacauaauucaggaagcagcuu

SEQ ID NO: 2494029 - RNA, 12 nt, Human
cacaguuugaac

SEQ ID NO: 2494030 - RNA, 23 nt, Human
cacaguuuugguugcuuuaauau

SEQ ID NO: 2494031 - RNA, 22 nt, Human
cacauaguuuuuaagguuauuu

SEQ ID NO: 2494032 - RNA, 21 nt, Human
cacauauaaacaucacacaca

SEQ ID NO: 2494033 - RNA, 21 nt, Human
cacauagugaugguuccccug

SEQ ID NO: 2494034 - RNA, 17 nt, Human
cacauacacacacacgc

SEQ ID NO: 2494035 - RNA, 15 nt, Human
cacauacacacauau

SEQ ID NO: 2494036 - RNA, 14 nt, Human
cacauaauuuuucu

SEQ ID NO: 2494037 - RNA, 23 nt, Human
cacauucuuauaaauaugaagcu

SEQ ID NO: 2494038 - RNA, 16 nt, Human
cacauucuuauaaaua

SEQ ID NO: 2494039 - RNA, 15 nt, Human
cacauucuuauaaau

SEQ ID NO: 2494040 - RNA, 22 nt, Human
cacauucuuaacacauguccuu

SEQ ID NO: 2494041 - RNA, 21 nt, Human
cacauucuggcucagggaggu

SEQ ID NO: 2494042 - RNA, 20 nt, Human
cacauucuggcucagggagg

SEQ ID NO: 2494043 - RNA, 16 nt, Human
cacauucuggcucagg

SEQ ID NO: 2494044 - RNA, 21 nt, Human
cacauucggcucccuggagcc

SEQ ID NO: 2494045 - RNA, 17 nt, Human
cacauucggcucccugg

SEQ ID NO: 2494046 - RNA, 18 nt, Human
cacauucuuauaaauaug

SEQ ID NO: 2494047 - RNA, 17 nt, Human
cacauucuuauaaauau

SEQ ID NO: 2494048 - RNA, 19 nt, Human
cacauucuuauaaauauga

SEQ ID NO: 2494049 - RNA, 18 nt, Human
cacauuggagauguuuag

SEQ ID NO: 2494050 - RNA, 15 nt, Human
caccaagcccaguua

SEQ ID NO: 2494051 - RNA, 22 nt, Human
cacauugggcagcgcccuuccu

SEQ ID NO: 2494052 - RNA, 18 nt, Human
cacauugggcagcgcccu

SEQ ID NO: 2494053 - RNA, 20 nt, Human
caccaagccuggucagccca

SEQ ID NO: 2494054 - RNA, 21 nt, Human
caccaagccuggucagcccaa

SEQ ID NO: 2494055 - RNA, 19 nt, Human
caccaagccuggucagccc

SEQ ID NO: 2494056 - RNA, 17 nt, Human
caccacacccagcccac

SEQ ID NO: 2494057 - RNA, 19 nt, Human
caccacagacacacacacg

SEQ ID NO: 2494058 - RNA, 16 nt, Human
caccacagacacacac

SEQ ID NO: 2494059 - RNA, 14 nt, Human
caccacacccagcc

SEQ ID NO: 2494060 - RNA, 20 nt, Human
caccaagcucacaguuccuc

SEQ ID NO: 2494061 - RNA, 19 nt, Human
caccacagccagcaccugg

SEQ ID NO: 2494062 - RNA, 17 nt, Human
caccacagccagcaccu

SEQ ID NO: 2494063 - RNA, 21 nt, Human
caccacagacacacacacgca

SEQ ID NO: 2494064 - RNA, 20 nt, Human
caccacagacacacacacgc

SEQ ID NO: 2494065 - RNA, 13 nt, Human
caccacagccagc

SEQ ID NO: 2494066 - RNA, 17 nt, Human
caccacaguaaguuccu

SEQ ID NO: 2494067 - RNA, 23 nt, Human
caccacaggcccuuuccucaggc

SEQ ID NO: 2494068 - RNA, 21 nt, Human
caccacaggcccuuuccucag

SEQ ID NO: 2494069 - RNA, 13 nt, Human
caccacagcaggu

SEQ ID NO: 2494070 - RNA, 18 nt, Human
caccacauccuccgucca

SEQ ID NO: 2494071 - RNA, 21 nt, Human
caccacauccuccguccagcc

SEQ ID NO: 2494072 - RNA, 15 nt, Human
caccacacccagccc

SEQ ID NO: 2494073 - RNA, 13 nt, Human
caccacacccagc

SEQ ID NO: 2494074 - RNA, 22 nt, Human
caccaagccuggucagcccaaa

SEQ ID NO: 2494075 - RNA, 23 nt, Human
cacauugggcagcgcccuuccuc

SEQ ID NO: 2494076 - RNA, 13 nt, Human
caccaagcucaaa

SEQ ID NO: 2494077 - RNA, 16 nt, Human
caccaagcucaaagcg

SEQ ID NO: 2494078 - RNA, 14 nt, Human
caccaagcucacag

SEQ ID NO: 2494079 - RNA, 15 nt, Human
caccaagcucacagu

SEQ ID NO: 2494080 - RNA, 19 nt, Human
caccaagcucacaguuccu

SEQ ID NO: 2494081 - RNA, 24 nt, Human
caccaauugguuaaucuuuccuga

SEQ ID NO: 2494082 - RNA, 23 nt, Human
caccacccgcuuucuugcugguu

SEQ ID NO: 2494083 - RNA, 22 nt, Human
caccacccuagucccuuccccu

SEQ ID NO: 2494084 - RNA, 22 nt, Human
caccaccuaggccacuccucca

SEQ ID NO: 2494085 - RNA, 16 nt, Human
caccaccucacuccug

SEQ ID NO: 2494086 - RNA, 23 nt, Human
caccaccuaggccacuccuccaa

SEQ ID NO: 2494087 - RNA, 14 nt, Human
caccaccucagagu

SEQ ID NO: 2494088 - RNA, 13 nt, Human
caccaccucagag

SEQ ID NO: 2494089 - RNA, 18 nt, Human
caccaccucacuccuguu

SEQ ID NO: 2494090 - RNA, 17 nt, Human
caccaccucacuccugu

SEQ ID NO: 2494091 - RNA, 14 nt, Human
caccaccucccuca

SEQ ID NO: 2494092 - RNA, 13 nt, Human
caccaccucccuc

SEQ ID NO: 2494093 - RNA, 12 nt, Human
caccaccucucc

SEQ ID NO: 2494094 - RNA, 11 nt, Human
caccacccaaa

SEQ ID NO: 2494095 - RNA, 18 nt, Human
caccaccacuggccacca

SEQ ID NO: 2494096 - RNA, 16 nt, Human
caccaccacuggccac

SEQ ID NO: 2494097 - RNA, 23 nt, Human
caccaccacuggccaccaggcug

SEQ ID NO: 2494098 - RNA, 14 nt, Human
caccaccccagcug

SEQ ID NO: 2494099 - RNA, 22 nt, Human
caccaccccccacucugugccu

SEQ ID NO: 2494100 - RNA, 20 nt, Human
caccaccccccacucugugc

SEQ ID NO: 2494101 - RNA, 18 nt, Human
caccaccccccacucugu

SEQ ID NO: 2494102 - RNA, 16 nt, Human
caccaccccccacucu

SEQ ID NO: 2494103 - RNA, 15 nt, Human
caccaccccccacuc

SEQ ID NO: 2494104 - RNA, 14 nt, Human
caccaccccccacu

SEQ ID NO: 2494105 - RNA, 21 nt, Human
caccaccccagcugcuccccu

SEQ ID NO: 2494106 - RNA, 16 nt, Human
caccaccccagcugcu

SEQ ID NO: 2494107 - RNA, 18 nt, Human
caccacaugugcacaugc

SEQ ID NO: 2494108 - RNA, 15 nt, Human
caccacaugugcaca

SEQ ID NO: 2494109 - RNA, 15 nt, Human
caccaccacuggcca

SEQ ID NO: 2494110 - RNA, 13 nt, Human
caccaccacuggc

SEQ ID NO: 2494111 - RNA, 18 nt, Human
caccaccacgguggucac

SEQ ID NO: 2494112 - RNA, 13 nt, Human
caccaccaagcca

SEQ ID NO: 2494113 - RNA, 14 nt, Human
caccacaucuaagc

SEQ ID NO: 2494114 - RNA, 19 nt, Human
caccacaugugcacaugca

SEQ ID NO: 2494115 - RNA, 14 nt, Human
caccaccucuuugg

SEQ ID NO: 2494116 - RNA, 16 nt, Human
caccacuacauucugu

SEQ ID NO: 2494117 - RNA, 17 nt, Human
caccacuacauucuguu

SEQ ID NO: 2494118 - RNA, 18 nt, Human
caccacuacauucuguua

SEQ ID NO: 2494119 - RNA, 19 nt, Human
caccacuacauucuguuaa

SEQ ID NO: 2494120 - RNA, 20 nt, Human
caccacuacauucuguuaau

SEQ ID NO: 2494121 - RNA, 15 nt, Human
caccacgguggucac

SEQ ID NO: 2494122 - RNA, 15 nt, Human
caccacguccagcug

SEQ ID NO: 2494123 - RNA, 17 nt, Human
caccacgguagugccug

SEQ ID NO: 2494124 - RNA, 16 nt, Human
caccacggccacuggc

SEQ ID NO: 2494125 - RNA, 20 nt, Human
caccacuaggacucugaggc

SEQ ID NO: 2494126 - RNA, 18 nt, Human
cacaugccucucucaggc

SEQ ID NO: 2494127 - RNA, 17 nt, Human
cacaugccucucucagg

SEQ ID NO: 2494128 - RNA, 13 nt, Human
cacaugccucucu

SEQ ID NO: 2494129 - RNA, 19 nt, Human
cacaucagcacgauuucug

SEQ ID NO: 2494130 - RNA, 18 nt, Human
cacaucagcacgauuucu

SEQ ID NO: 2494131 - RNA, 15 nt, Human
cacauauuugauagu

SEQ ID NO: 2494132 - RNA, 12 nt, Human
cacauaucuguc

SEQ ID NO: 2494133 - RNA, 15 nt, Human
cacaugucuuaauga

SEQ ID NO: 2494134 - RNA, 14 nt, Human
cacaugucuuaaug

SEQ ID NO: 2494135 - RNA, 13 nt, Human
cacaugucuuaau

SEQ ID NO: 2494136 - RNA, 12 nt, Human
cacaugucuuaa

SEQ ID NO: 2494137 - RNA, 17 nt, Human
cacauguccuugugugu

SEQ ID NO: 2494138 - RNA, 14 nt, Human
cacauguauguuuu

SEQ ID NO: 2494139 - RNA, 23 nt, Human
cacauguccaagaagcccaggaa

SEQ ID NO: 2494140 - RNA, 17 nt, Human
cacauguaucuaugcau

SEQ ID NO: 2494141 - RNA, 22 nt, Human
cacauggugcuacgccugcaug

SEQ ID NO: 2494142 - RNA, 20 nt, Human
cacauggugcuacgccugca

SEQ ID NO: 2494143 - RNA, 22 nt, Human
cacauggugacuuuugaaaaga

SEQ ID NO: 2494144 - RNA, 20 nt, Human
cacauggggcugggcagcua

SEQ ID NO: 2494145 - RNA, 19 nt, Human
cacaugccucucucaggcc

SEQ ID NO: 2494146 - RNA, 13 nt, Human
cacaucaaagagg

SEQ ID NO: 2494147 - RNA, 19 nt, Human
cacauggggcugggcagcu

SEQ ID NO: 2494148 - RNA, 19 nt, Human
cacauggcuuccuccugcg

SEQ ID NO: 2494149 - RNA, 20 nt, Human
cacauggcuuccuccugcgc

SEQ ID NO: 2494150 - RNA, 18 nt, Human
cacauggcuuccuccugc

SEQ ID NO: 2494151 - RNA, 14 nt, Human
cacauggcuuccuc

SEQ ID NO: 2494152 - RNA, 12 nt, Human
cacauggcuucc

SEQ ID NO: 2494153 - RNA, 15 nt, Human
cacaucagaaaggaa

SEQ ID NO: 2494154 - RNA, 19 nt, Human
cacaucacccuuaccaugu

SEQ ID NO: 2494155 - RNA, 23 nt, Human
cacauggccccucccccugccag

SEQ ID NO: 2494156 - RNA, 15 nt, Human
cacauggccuaugca

SEQ ID NO: 2494157 - RNA, 18 nt, Human
cacauggcuauguuuuag

SEQ ID NO: 2494158 - RNA, 15 nt, Human
cacauguuuccucua

SEQ ID NO: 2494159 - RNA, 14 nt, Human
cacauguuuccucu

SEQ ID NO: 2494160 - RNA, 21 nt, Human
cacauguuuagaguugcaauc

SEQ ID NO: 2494161 - RNA, 18 nt, Human
cacauguuuagaguugca

SEQ ID NO: 2494162 - RNA, 12 nt, Human
cacauguuuccu

SEQ ID NO: 2494163 - RNA, 11 nt, Human
cacaugugugc

SEQ ID NO: 2494164 - RNA, 15 nt, Human
cacaugugacacaua

SEQ ID NO: 2494165 - RNA, 13 nt, Human
cacauguggacuu

SEQ ID NO: 2494166 - RNA, 17 nt, Human
cacaugugcacaugcac

SEQ ID NO: 2494167 - RNA, 22 nt, Human
cacaugucuuaaugaaguuuga

SEQ ID NO: 2494168 - RNA, 18 nt, Human
cacaugucuuaaugaagu

SEQ ID NO: 2494169 - RNA, 17 nt, Human
cacaugucuuaaugaag

SEQ ID NO: 2494170 - RNA, 16 nt, Human
cacaugucuuaaugaa

SEQ ID NO: 2494171 - RNA, 13 nt, Human
cacaugugacaca

SEQ ID NO: 2494172 - RNA, 20 nt, Human
cacaugucuuguacaugugu

SEQ ID NO: 2494173 - RNA, 23 nt, Human
cacaugucuuaaugaaguuugaa

SEQ ID NO: 2494174 - RNA, 15 nt, Human
cacaugucuuguaca

SEQ ID NO: 2494175 - RNA, 15 nt, Human
cacaugugcacaugc

SEQ ID NO: 2494176 - RNA, 14 nt, Human
cacaugugcacaug

SEQ ID NO: 2494177 - RNA, 16 nt, Human
cacauucggcucccug

SEQ ID NO: 2494178 - RNA, 19 nt, Human
cacauuccuugccugcaca

SEQ ID NO: 2494179 - RNA, 18 nt, Human
cacauuccuugccugcac

SEQ ID NO: 2494180 - RNA, 17 nt, Human
cacauucaggaagauga

SEQ ID NO: 2494181 - RNA, 16 nt, Human
cacauuccugaugcuu

SEQ ID NO: 2494182 - RNA, 14 nt, Human
cacauucaggaaga

SEQ ID NO: 2494183 - RNA, 12 nt, Human
cacauucaggaa

SEQ ID NO: 2494184 - RNA, 19 nt, Human
cacauucaacccuggagag

SEQ ID NO: 2494185 - RNA, 15 nt, Human
cacauuauuugcaug

SEQ ID NO: 2494186 - RNA, 20 nt, Human
cacauucaacccuggagagu

SEQ ID NO: 2494187 - RNA, 16 nt, Human
cacauucaauaagcau

SEQ ID NO: 2494188 - RNA, 17 nt, Human
cacauucaacccuggag

SEQ ID NO: 2494189 - RNA, 13 nt, Human
cacauuauuugca

SEQ ID NO: 2494190 - RNA, 14 nt, Human
cacauuauuugcau

SEQ ID NO: 2494191 - RNA, 23 nt, Human
cacauuaucgggagcagugucuu

SEQ ID NO: 2494192 - RNA, 22 nt, Human
cacauuaucgggagcagugucu

SEQ ID NO: 2494193 - RNA, 15 nt, Human
cacauguuuucucug

SEQ ID NO: 2494194 - RNA, 16 nt, Human
cacauuaucgggagca

SEQ ID NO: 2494195 - RNA, 17 nt, Human
cacauuaucgggagcag

SEQ ID NO: 2494196 - RNA, 20 nt, Human
cacauuaucgggagcagugu

SEQ ID NO: 2494197 - RNA, 19 nt, Human
cacauuaauauuugcugac

SEQ ID NO: 2494198 - RNA, 18 nt, Human
cacauuaauauuugcuga

SEQ ID NO: 2494199 - RNA, 23 nt, Human
cacauuaagccuuccacacucac

SEQ ID NO: 2494200 - RNA, 16 nt, Human
caaggucuucagccau

SEQ ID NO: 2494201 - RNA, 18 nt, Human
caaggucuggccucaggu

SEQ ID NO: 2494202 - RNA, 23 nt, Human
caaggugaagaugggaacgcaga

SEQ ID NO: 2494203 - RNA, 14 nt, Human
caaggucuuugguu

SEQ ID NO: 2494204 - RNA, 15 nt, Human
caaggugcaaaucaa

SEQ ID NO: 2494205 - RNA, 13 nt, Human
caaggucuggccu

SEQ ID NO: 2494206 - RNA, 20 nt, Human
caagggcuuuguuuugcaca

SEQ ID NO: 2494207 - RNA, 23 nt, Human
caagggcuucugcacccuccacc

SEQ ID NO: 2494208 - RNA, 21 nt, Human
caagggcuucugcacccucca

SEQ ID NO: 2494209 - RNA, 20 nt, Human
caagggcuucugcacccucc

SEQ ID NO: 2494210 - RNA, 19 nt, Human
caagggcuucugcacccuc

SEQ ID NO: 2494211 - RNA, 18 nt, Human
caagggcuucugcacccu

SEQ ID NO: 2494212 - RNA, 19 nt, Human
caagggcuccccacugccu

SEQ ID NO: 2494213 - RNA, 21 nt, Human
caagggcuuacacguggagga

SEQ ID NO: 2494214 - RNA, 22 nt, Human
caagggcuuacacguggaggaa

SEQ ID NO: 2494215 - RNA, 19 nt, Human
caagggccuggccugagcu

SEQ ID NO: 2494216 - RNA, 23 nt, Human
caaggaguuccaugaagaccaca

SEQ ID NO: 2494217 - RNA, 16 nt, Human
caagggcgcaagagua

SEQ ID NO: 2494218 - RNA, 17 nt, Human
caagggcuccccacugc

SEQ ID NO: 2494219 - RNA, 14 nt, Human
caagggcuccccac

SEQ ID NO: 2494220 - RNA, 16 nt, Human
caagggccuggccuga

SEQ ID NO: 2494221 - RNA, 15 nt, Human
caaggauugcuacug

SEQ ID NO: 2494222 - RNA, 19 nt, Human
caagguggcuccagcacca

SEQ ID NO: 2494223 - RNA, 19 nt, Human
caagguggccaaauuauuu

SEQ ID NO: 2494224 - RNA, 13 nt, Human
caaggugcucaca

SEQ ID NO: 2494225 - RNA, 17 nt, Human
caagguggccaaauuau

SEQ ID NO: 2494226 - RNA, 12 nt, Human
caaggugggagg

SEQ ID NO: 2494227 - RNA, 23 nt, Human
caaggugggaggauugcuugagc

SEQ ID NO: 2494228 - RNA, 22 nt, Human
caaggugggccuugcuaccuca

SEQ ID NO: 2494229 - RNA, 12 nt, Human
caaggugggcug

SEQ ID NO: 2494230 - RNA, 16 nt, Human
caaggugggcugagcc

SEQ ID NO: 2494231 - RNA, 17 nt, Human
caaggugggcugagccc

SEQ ID NO: 2494232 - RNA, 18 nt, Human
caaguccugugaauuucu

SEQ ID NO: 2494233 - RNA, 17 nt, Human
caaguccugugaauuuc

SEQ ID NO: 2494234 - RNA, 15 nt, Human
caaguccugugaauu

SEQ ID NO: 2494235 - RNA, 23 nt, Human
caaguccugaagaggcgggccag

SEQ ID NO: 2494236 - RNA, 20 nt, Human
caaguccugaagaggcgggc

SEQ ID NO: 2494237 - RNA, 19 nt, Human
caaguccugaagaggcggg

SEQ ID NO: 2494238 - RNA, 15 nt, Human
caaguccuuaccucu

SEQ ID NO: 2494239 - RNA, 18 nt, Human
caaguccuuaccucuucc

SEQ ID NO: 2494240 - RNA, 23 nt, Human
caaguccuuaccucuuccggaga

SEQ ID NO: 2494241 - RNA, 17 nt, Human
caagucgaugaacuauu

SEQ ID NO: 2494242 - RNA, 15 nt, Human
caagucuacagagug

SEQ ID NO: 2494243 - RNA, 22 nt, Human
caaguccuuaccucuuccggag

SEQ ID NO: 2494244 - RNA, 18 nt, Human
caaggugggcugagcccu

SEQ ID NO: 2494245 - RNA, 19 nt, Human
caaggugggcugagcccug

SEQ ID NO: 2494246 - RNA, 20 nt, Human
caaggugggcugagcccugg

SEQ ID NO: 2494247 - RNA, 21 nt, Human
caaggugggcugagcccuggc

SEQ ID NO: 2494248 - RNA, 23 nt, Human
caagguggucugcucgggcccag

SEQ ID NO: 2494249 - RNA, 20 nt, Human
caagguggucugcucgggcc

SEQ ID NO: 2494250 - RNA, 22 nt, Human
caagguggggggaucacaaggu

SEQ ID NO: 2494251 - RNA, 23 nt, Human
caaggugggcugagcccuggcag

SEQ ID NO: 2494252 - RNA, 24 nt, Human
caaggugggcugagcccuggcagg

SEQ ID NO: 2494253 - RNA, 20 nt, Human
caagugguagcaagaaguga

SEQ ID NO: 2494254 - RNA, 13 nt, Human
caaguggugccua

SEQ ID NO: 2494255 - RNA, 18 nt, Human
caaguggugguaacccug

SEQ ID NO: 2494256 - RNA, 19 nt, Human
caaguggugguaacccugg

SEQ ID NO: 2494257 - RNA, 20 nt, Human
caaguggugguaacccuggu

SEQ ID NO: 2494258 - RNA, 22 nt, Human
caaguggugguaacccuggugg

SEQ ID NO: 2494259 - RNA, 22 nt, Human
caagugugguagagugugccug

SEQ ID NO: 2494260 - RNA, 19 nt, Human
caaguggggugcugggagg

SEQ ID NO: 2494261 - RNA, 18 nt, Human
caaguggggugcugggag

SEQ ID NO: 2494262 - RNA, 21 nt, Human
caaguggggugcugggaggag

SEQ ID NO: 2494263 - RNA, 17 nt, Human
caaguggggugcuggga

SEQ ID NO: 2494264 - RNA, 15 nt, Human
caaguggggugcugg

SEQ ID NO: 2494265 - RNA, 14 nt, Human
caagugggggcaga

SEQ ID NO: 2494266 - RNA, 20 nt, Human
caagugggggcagagggcag

SEQ ID NO: 2494267 - RNA, 22 nt, Human
caagugggaucugucacaccag

SEQ ID NO: 2494268 - RNA, 20 nt, Human
caagugggaucugucacacc

SEQ ID NO: 2494269 - RNA, 14 nt, Human
caagugcaggcugg

SEQ ID NO: 2494270 - RNA, 20 nt, Human
caagugcaggcuggcaccgc

SEQ ID NO: 2494271 - RNA, 17 nt, Human
caaguggggcucgccau

SEQ ID NO: 2494272 - RNA, 16 nt, Human
caaguggggcucgcca

SEQ ID NO: 2494273 - RNA, 21 nt, Human
caaguggggcucgccaugccg

SEQ ID NO: 2494274 - RNA, 13 nt, Human
caagugggggcag

SEQ ID NO: 2494275 - RNA, 17 nt, Human
caagugggaucugucac

SEQ ID NO: 2494276 - RNA, 19 nt, Human
caagugauugggacagagg

SEQ ID NO: 2494277 - RNA, 18 nt, Human
caagugauugggacagag

SEQ ID NO: 2494278 - RNA, 13 nt, Human
caagugcaggcug

SEQ ID NO: 2494279 - RNA, 19 nt, Human
caagugauugaaaauagua

SEQ ID NO: 2494280 - RNA, 15 nt, Human
caagugauugaaaau

SEQ ID NO: 2494281 - RNA, 14 nt, Human
caagugauucuccu

SEQ ID NO: 2494282 - RNA, 21 nt, Human
caagugauucuccugccucag

SEQ ID NO: 2494283 - RNA, 22 nt, Human
caagugauucuccugccucagc

SEQ ID NO: 2494284 - RNA, 14 nt, Human
caagucuucccuga

SEQ ID NO: 2494285 - RNA, 15 nt, Human
caagucuucccugau

SEQ ID NO: 2494286 - RNA, 12 nt, Human
caagucugcagg

SEQ ID NO: 2494287 - RNA, 13 nt, Human
caagucugcagcc

SEQ ID NO: 2494288 - RNA, 23 nt, Human
caagucucugcuggcccagccaa

SEQ ID NO: 2494289 - RNA, 17 nt, Human
caagucugcaggugcac

SEQ ID NO: 2494290 - RNA, 13 nt, Human
caagucuggaucu

SEQ ID NO: 2494291 - RNA, 18 nt, Human
caagucuggaucugggac

SEQ ID NO: 2494292 - RNA, 19 nt, Human
caagucuggaucugggacc

SEQ ID NO: 2494293 - RNA, 23 nt, Human
caagucucaguggcuucaucugu

SEQ ID NO: 2494294 - RNA, 16 nt, Human
caagucucaguggcuu

SEQ ID NO: 2494295 - RNA, 21 nt, Human
caagucuaugaugcuguugcc

SEQ ID NO: 2494296 - RNA, 20 nt, Human
caagucuaugaugcuguugc

SEQ ID NO: 2494297 - RNA, 19 nt, Human
caagucuacagagugauag

SEQ ID NO: 2494298 - RNA, 16 nt, Human
caagucuacagaguga

SEQ ID NO: 2494299 - RNA, 18 nt, Human
caagucuaugaugcuguu

SEQ ID NO: 2494300 - RNA, 14 nt, Human
caagucuccuuccc

SEQ ID NO: 2494301 - RNA, 17 nt, Human
caagucuccuuccccuu

SEQ ID NO: 2494302 - RNA, 18 nt, Human
caagucucugcuggccca

SEQ ID NO: 2494303 - RNA, 19 nt, Human
caagucucugcuggcccag

SEQ ID NO: 2494304 - RNA, 22 nt, Human
caagucucugcuggcccagcca

SEQ ID NO: 2494305 - RNA, 22 nt, Human
caagugauucucaugccucagc

SEQ ID NO: 2494306 - RNA, 19 nt, Human
caagugaaaaaggaggaag

SEQ ID NO: 2494307 - RNA, 17 nt, Human
caagugauucuccugcc

SEQ ID NO: 2494308 - RNA, 16 nt, Human
caagugauucuccugc

SEQ ID NO: 2494309 - RNA, 21 nt, Human
caaggaugaucuaggaagacu

SEQ ID NO: 2494310 - RNA, 19 nt, Human
caaggaugccccguccccc

SEQ ID NO: 2494311 - RNA, 22 nt, Human
caaggauccugagccagauuuc

SEQ ID NO: 2494312 - RNA, 20 nt, Human
caaggauagaugcuggccca

SEQ ID NO: 2494313 - RNA, 21 nt, Human
caaggauagaugcuggcccag

SEQ ID NO: 2494314 - RNA, 22 nt, Human
caaggauagaugcuggcccagg

SEQ ID NO: 2494315 - RNA, 23 nt, Human
caaggauagaugcuggcccaggg

SEQ ID NO: 2494316 - RNA, 13 nt, Human
caaggauccugag

SEQ ID NO: 2494317 - RNA, 21 nt, Human
caaggaguuccaugaagacca

SEQ ID NO: 2494318 - RNA, 19 nt, Human
caaggaguuccaugaagac

SEQ ID NO: 2494319 - RNA, 16 nt, Human
caaggagucagacauu

SEQ ID NO: 2494320 - RNA, 21 nt, Human
caaggacuacguuaagggaag

SEQ ID NO: 2494321 - RNA, 17 nt, Human
caaggauagaaguauac

SEQ ID NO: 2494322 - RNA, 15 nt, Human
caaggauagaugcug

SEQ ID NO: 2494323 - RNA, 16 nt, Human
caaggauagaugcugg

SEQ ID NO: 2494324 - RNA, 17 nt, Human
caaggauagaugcuggc

SEQ ID NO: 2494325 - RNA, 20 nt, Human
caaggacuacguuaagggaa

SEQ ID NO: 2494326 - RNA, 22 nt, Human
caaggacccagccugagauggu

SEQ ID NO: 2494327 - RNA, 13 nt, Human
caaggaccccuca

SEQ ID NO: 2494328 - RNA, 14 nt, Human
caaggaccccucac

SEQ ID NO: 2494329 - RNA, 15 nt, Human
caaggaccccucacc

SEQ ID NO: 2494330 - RNA, 17 nt, Human
caaggaccccucaccuu

SEQ ID NO: 2494331 - RNA, 20 nt, Human
caaggaccccucaccuugca

SEQ ID NO: 2494332 - RNA, 18 nt, Human
caagcgugagccacugca

SEQ ID NO: 2494333 - RNA, 17 nt, Human
caagcgugagccacugc

SEQ ID NO: 2494334 - RNA, 14 nt, Human
caaggaaaccacag

SEQ ID NO: 2494335 - RNA, 15 nt, Human
caaggaaaaacaggu

SEQ ID NO: 2494336 - RNA, 21 nt, Human
caaggaaaccacagcugcugg

SEQ ID NO: 2494337 - RNA, 20 nt, Human
caaggaaaccacagcugcug

SEQ ID NO: 2494338 - RNA, 18 nt, Human
caaggaaaccacagcugc

SEQ ID NO: 2494339 - RNA, 17 nt, Human
caaggaaaccacagcug

SEQ ID NO: 2494340 - RNA, 22 nt, Human
caaggaaaccacagcugcugga

SEQ ID NO: 2494341 - RNA, 17 nt, Human
caaggaaagccccagca

SEQ ID NO: 2494342 - RNA, 13 nt, Human
caaggaccaggac

SEQ ID NO: 2494343 - RNA, 14 nt, Human
caaggaccaggacu

SEQ ID NO: 2494344 - RNA, 15 nt, Human
caaggaccaggacuc

SEQ ID NO: 2494345 - RNA, 16 nt, Human
caaggaccaggacucc

SEQ ID NO: 2494346 - RNA, 18 nt, Human
caaggaccaggacucccu

SEQ ID NO: 2494347 - RNA, 20 nt, Human
caaggaccaggacucccucc

SEQ ID NO: 2494348 - RNA, 21 nt, Human
caaggaccaggacucccuccu

SEQ ID NO: 2494349 - RNA, 23 nt, Human
caaggaaagggggucccaguggg

SEQ ID NO: 2494350 - RNA, 20 nt, Human
caaggaaagggggucccagu

SEQ ID NO: 2494351 - RNA, 15 nt, Human
caaggaaaggcaaau

SEQ ID NO: 2494352 - RNA, 14 nt, Human
caaggaaaggccug

SEQ ID NO: 2494353 - RNA, 20 nt, Human
caaggaaagccccagcacua

SEQ ID NO: 2494354 - RNA, 22 nt, Human
caaggaaagggggucccagugg

SEQ ID NO: 2494355 - RNA, 18 nt, Human
caaggacagccccuccuc

SEQ ID NO: 2494356 - RNA, 17 nt, Human
caagcacuaaacaaaga

SEQ ID NO: 2494357 - RNA, 17 nt, Human
caagcacugugcucagg

SEQ ID NO: 2494358 - RNA, 18 nt, Human
caagccaagcagccaagc

SEQ ID NO: 2494359 - RNA, 18 nt, Human
caagccaagggaaccugu

SEQ ID NO: 2494360 - RNA, 19 nt, Human
caagccaagcagccaagcu

SEQ ID NO: 2494361 - RNA, 21 nt, Human
caagccaagcagccaagcucc

SEQ ID NO: 2494362 - RNA, 13 nt, Human
caagcacugugcu

SEQ ID NO: 2494363 - RNA, 12 nt, Human
caagcacugugc

SEQ ID NO: 2494364 - RNA, 23 nt, Human
caagcacugcuaggcgagugcca

SEQ ID NO: 2494365 - RNA, 18 nt, Human
caagcacugcuaggcgag

SEQ ID NO: 2494366 - RNA, 15 nt, Human
caagaaagaaacccg

SEQ ID NO: 2494367 - RNA, 18 nt, Human
caagaaacugaggaauuu

SEQ ID NO: 2494368 - RNA, 15 nt, Human
caagaaacucacccc

SEQ ID NO: 2494369 - RNA, 17 nt, Human
caagaaacucaccccca

SEQ ID NO: 2494370 - RNA, 18 nt, Human
caagcaccuccugccucg

SEQ ID NO: 2494371 - RNA, 19 nt, Human
caagaaacugaggaauuuu

SEQ ID NO: 2494372 - RNA, 22 nt, Human
caagaaagaaacccgacagagg

SEQ ID NO: 2494373 - RNA, 16 nt, Human
caagaaagcugguaaa

SEQ ID NO: 2494374 - RNA, 16 nt, Human
caagccguggcuuccc

SEQ ID NO: 2494375 - RNA, 15 nt, Human
caagccguggcuucc

SEQ ID NO: 2494376 - RNA, 14 nt, Human
caagccguggcuuc

SEQ ID NO: 2494377 - RNA, 21 nt, Human
caagcccgacuugcuguuuug

SEQ ID NO: 2494378 - RNA, 21 nt, Human
caagcccuccccaucccaugu

SEQ ID NO: 2494379 - RNA, 21 nt, Human
caagcccuggagccaacugcu

SEQ ID NO: 2494380 - RNA, 16 nt, Human
caagcgugagccacug

SEQ ID NO: 2494381 - RNA, 22 nt, Human
caagccacagaagccaggagca

SEQ ID NO: 2494382 - RNA, 19 nt, Human
caagccacagaagccagga

SEQ ID NO: 2494383 - RNA, 14 nt, Human
caagccacagaagc

SEQ ID NO: 2494384 - RNA, 13 nt, Human
caagccacagaag

SEQ ID NO: 2494385 - RNA, 11 nt, Human
caagccacaga

SEQ ID NO: 2494386 - RNA, 17 nt, Human
caagccaauccccuccu

SEQ ID NO: 2494387 - RNA, 22 nt, Human
caagccaauccccuccuugggc

SEQ ID NO: 2494388 - RNA, 15 nt, Human
caagccaauccccuc

SEQ ID NO: 2494389 - RNA, 14 nt, Human
caagccaauccccu

SEQ ID NO: 2494390 - RNA, 23 nt, Human
caagccaagggaaccuguguccg

SEQ ID NO: 2494391 - RNA, 22 nt, Human
caagccaagggaaccugugucc

SEQ ID NO: 2494392 - RNA, 21 nt, Human
caagccaagggaaccuguguc

SEQ ID NO: 2494393 - RNA, 21 nt, Human
caagccaccaacauacuccca

SEQ ID NO: 2494394 - RNA, 18 nt, Human
caagccccugcccaucug

SEQ ID NO: 2494395 - RNA, 17 nt, Human
caagccccugcccaucu

SEQ ID NO: 2494396 - RNA, 21 nt, Human
caagccccugcuccagaagau

SEQ ID NO: 2494397 - RNA, 13 nt, Human
caagccccugccc

SEQ ID NO: 2494398 - RNA, 17 nt, Human
caagcccccccuuccac

SEQ ID NO: 2494399 - RNA, 18 nt, Human
caagcccccccuuccacu

SEQ ID NO: 2494400 - RNA, 15 nt, Human
caacgcagcccugcu

SEQ ID NO: 2494401 - RNA, 13 nt, Human
caacgcagcccug

SEQ ID NO: 2494402 - RNA, 15 nt, Human
caacgaggaagcccu

SEQ ID NO: 2494403 - RNA, 12 nt, Human
caacgcagcccu

SEQ ID NO: 2494404 - RNA, 19 nt, Human
caacucuccuccagaguca

SEQ ID NO: 2494405 - RNA, 18 nt, Human
caacgcagcccugcuuug

SEQ ID NO: 2494406 - RNA, 16 nt, Human
caaccugauugugucu

SEQ ID NO: 2494407 - RNA, 21 nt, Human
caaccugaccaacauggagaa

SEQ ID NO: 2494408 - RNA, 12 nt, Human
caacgaggaagc

SEQ ID NO: 2494409 - RNA, 13 nt, Human
caacgaggaagcc

SEQ ID NO: 2494410 - RNA, 20 nt, Human
caaccugaccaacauggaga

SEQ ID NO: 2494411 - RNA, 23 nt, Human
caaccugaccaacauggagaaac

SEQ ID NO: 2494412 - RNA, 13 nt, Human
caaccucuuggcc

SEQ ID NO: 2494413 - RNA, 15 nt, Human
caaccucuuggccug

SEQ ID NO: 2494414 - RNA, 17 nt, Human
caaccucuucuggcuca

SEQ ID NO: 2494415 - RNA, 18 nt, Human
caaccucuucuggcucaa

SEQ ID NO: 2494416 - RNA, 15 nt, Human
caaccugaccaacau

SEQ ID NO: 2494417 - RNA, 16 nt, Human
caaccugaaccuagga

SEQ ID NO: 2494418 - RNA, 13 nt, Human
caaccugaaccua

SEQ ID NO: 2494419 - RNA, 12 nt, Human
caaccugaaccu

SEQ ID NO: 2494420 - RNA, 15 nt, Human
caacccucaucacca

SEQ ID NO: 2494421 - RNA, 12 nt, Human
caacccucauca

SEQ ID NO: 2494422 - RNA, 16 nt, Human
caacccuguuuccuga

SEQ ID NO: 2494423 - RNA, 15 nt, Human
caacccuguuuccug

SEQ ID NO: 2494424 - RNA, 13 nt, Human
caacccuguuucc

SEQ ID NO: 2494425 - RNA, 12 nt, Human
caacccugucug

SEQ ID NO: 2494426 - RNA, 11 nt, Human
caacccugucu

SEQ ID NO: 2494427 - RNA, 17 nt, Human
caacccucccucagccc

SEQ ID NO: 2494428 - RNA, 14 nt, Human
caaccaccgcuccc

SEQ ID NO: 2494429 - RNA, 14 nt, Human
caacccucccucag

SEQ ID NO: 2494430 - RNA, 13 nt, Human
caacccuucccca

SEQ ID NO: 2494431 - RNA, 12 nt, Human
caacccuucccc

SEQ ID NO: 2494432 - RNA, 17 nt, Human
caacccuucccucaccu

SEQ ID NO: 2494433 - RNA, 22 nt, Human
caacccuuaccccuuagccucc

SEQ ID NO: 2494434 - RNA, 11 nt, Human
caacccuuccc

SEQ ID NO: 2494435 - RNA, 19 nt, Human
caacccuguuuuauacugu

SEQ ID NO: 2494436 - RNA, 17 nt, Human
caacccuguuuccugag

SEQ ID NO: 2494437 - RNA, 17 nt, Human
caacccuguuuuauacu

SEQ ID NO: 2494438 - RNA, 15 nt, Human
caacccuuaccccuu

SEQ ID NO: 2494439 - RNA, 19 nt, Human
caacccuuaccccuuagcc

SEQ ID NO: 2494440 - RNA, 20 nt, Human
caacccuuaccccuuagccu

SEQ ID NO: 2494441 - RNA, 16 nt, Human
caaccucuucuggcuc

SEQ ID NO: 2494442 - RNA, 19 nt, Human
caacccuuuugucugccuc

SEQ ID NO: 2494443 - RNA, 23 nt, Human
caacccuucuccucuuguaaaua

SEQ ID NO: 2494444 - RNA, 21 nt, Human
caacccuucuccucuuguaaa

SEQ ID NO: 2494445 - RNA, 20 nt, Human
caacccuucuccucuuguaa

SEQ ID NO: 2494446 - RNA, 18 nt, Human
caacccuucccucaccuu

SEQ ID NO: 2494447 - RNA, 10 nt, Human
caacccuucu

SEQ ID NO: 2494448 - RNA, 23 nt, Human
caacuuucuguaaacucaaaacu

SEQ ID NO: 2494449 - RNA, 12 nt, Human
caacuuuguaua

SEQ ID NO: 2494450 - RNA, 11 nt, Human
caacuuuguau

SEQ ID NO: 2494451 - RNA, 16 nt, Human
caacuuucuguaaacu

SEQ ID NO: 2494452 - RNA, 12 nt, Human
caacuuucugua

SEQ ID NO: 2494453 - RNA, 11 nt, Human
caacuuucugu

SEQ ID NO: 2494454 - RNA, 14 nt, Human
caacuuacuacuga

SEQ ID NO: 2494455 - RNA, 18 nt, Human
caacuuagaucuccagga

SEQ ID NO: 2494456 - RNA, 21 nt, Human
caacuuaauguucugaauaau

SEQ ID NO: 2494457 - RNA, 16 nt, Human
caacuucaagugcaug

SEQ ID NO: 2494458 - RNA, 17 nt, Human
caacuucaagugcaugc

SEQ ID NO: 2494459 - RNA, 18 nt, Human
caacuucaagugcaugcu

SEQ ID NO: 2494460 - RNA, 18 nt, Human
caacuucagcaguaccua

SEQ ID NO: 2494461 - RNA, 22 nt, Human
caacuucaagugcaugcucucu

SEQ ID NO: 2494462 - RNA, 22 nt, Human
caacuuuaagcagcucuugcua

SEQ ID NO: 2494463 - RNA, 22 nt, Human
caacuugucuuuuucuggacug

SEQ ID NO: 2494464 - RNA, 21 nt, Human
caacuuuaagcagcucuugcu

SEQ ID NO: 2494465 - RNA, 18 nt, Human
caacuuuaagcagcucuu

SEQ ID NO: 2494466 - RNA, 16 nt, Human
caacuuuaagaggaca

SEQ ID NO: 2494467 - RNA, 19 nt, Human
caacuucaugucaacuucu

SEQ ID NO: 2494468 - RNA, 23 nt, Human
caacuucccaguucaggaguccc

SEQ ID NO: 2494469 - RNA, 20 nt, Human
caacucuccuccagagucag

SEQ ID NO: 2494470 - RNA, 14 nt, Human
caacugccuacucc

SEQ ID NO: 2494471 - RNA, 15 nt, Human
caacugccuacucca

SEQ ID NO: 2494472 - RNA, 16 nt, Human
caacugcauuggcuuu

SEQ ID NO: 2494473 - RNA, 18 nt, Human
caacugccuacuccaaaa

SEQ ID NO: 2494474 - RNA, 22 nt, Human
caacugccuacuccaaaauguu

SEQ ID NO: 2494475 - RNA, 21 nt, Human
caacugccucgaaacacagaa

SEQ ID NO: 2494476 - RNA, 23 nt, Human
caacugccucgaaacacagaaac

SEQ ID NO: 2494477 - RNA, 14 nt, Human
caacugcugcuuuu

SEQ ID NO: 2494478 - RNA, 12 nt, Human
caacugcugcuu

SEQ ID NO: 2494479 - RNA, 19 nt, Human
caacuguuaugaaauaaag

SEQ ID NO: 2494480 - RNA, 19 nt, Human
caacuguugauugcaggaa

SEQ ID NO: 2494481 - RNA, 19 nt, Human
caacuguuguaacuaggcu

SEQ ID NO: 2494482 - RNA, 15 nt, Human
caacuuaauguucug

SEQ ID NO: 2494483 - RNA, 21 nt, Human
caacauguguacuuaauuucu

SEQ ID NO: 2494484 - RNA, 20 nt, Human
caacauguagcugaguuuaa

SEQ ID NO: 2494485 - RNA, 17 nt, Human
caacauguuacugacca

SEQ ID NO: 2494486 - RNA, 18 nt, Human
caacauguuacugaccag

SEQ ID NO: 2494487 - RNA, 20 nt, Human
caacauguuacugaccagca

SEQ ID NO: 2494488 - RNA, 23 nt, Human
caacauguauaauauuuuuaauu

SEQ ID NO: 2494489 - RNA, 19 nt, Human
caacauguauaauauuuuu

SEQ ID NO: 2494490 - RNA, 18 nt, Human
caacauguauaauauuuu

SEQ ID NO: 2494491 - RNA, 17 nt, Human
caacauguauaauauuu

SEQ ID NO: 2494492 - RNA, 22 nt, Human
caacauguugggaaacuuggcu

SEQ ID NO: 2494493 - RNA, 19 nt, Human
caacauguugggaaacuug

SEQ ID NO: 2494494 - RNA, 23 nt, Human
caacauguugggaaacuuggcuc

SEQ ID NO: 2494495 - RNA, 20 nt, Human
caacauuaaaacaauauugu

SEQ ID NO: 2494496 - RNA, 21 nt, Human
caacauuacagggaaugccug

SEQ ID NO: 2494497 - RNA, 17 nt, Human
caacauugcuugugcca

SEQ ID NO: 2494498 - RNA, 22 nt, Human
caacauugcuggcuggaaggga

SEQ ID NO: 2494499 - RNA, 15 nt, Human
caacauugccuauuu

SEQ ID NO: 2494500 - RNA, 15 nt, Human
caacaugagucaaga

SEQ ID NO: 2494501 - RNA, 14 nt, Human
caacaucugagugc

SEQ ID NO: 2494502 - RNA, 13 nt, Human
caacaucuuuucu

SEQ ID NO: 2494503 - RNA, 13 nt, Human
caacaucuagcaa

SEQ ID NO: 2494504 - RNA, 18 nt, Human
caacaucccauugcccug

SEQ ID NO: 2494505 - RNA, 19 nt, Human
caacaucccauugcccugg

SEQ ID NO: 2494506 - RNA, 20 nt, Human
caacaucccauugcccuggu

SEQ ID NO: 2494507 - RNA, 23 nt, Human
caacauggagaaacccugucucu

SEQ ID NO: 2494508 - RNA, 22 nt, Human
caacauggagaaacccugucuc

SEQ ID NO: 2494509 - RNA, 23 nt, Human
caacaugccugccccaaacaaau

SEQ ID NO: 2494510 - RNA, 13 nt, Human
caacauggagaaa

SEQ ID NO: 2494511 - RNA, 18 nt, Human
caacauggugaaaccccg

SEQ ID NO: 2494512 - RNA, 16 nt, Human
caacauggugucugga

SEQ ID NO: 2494513 - RNA, 15 nt, Human
caacauggugucugg

SEQ ID NO: 2494514 - RNA, 13 nt, Human
caacauguauaau

SEQ ID NO: 2494515 - RNA, 19 nt, Human
caaccccuucgcuccugug

SEQ ID NO: 2494516 - RNA, 18 nt, Human
caaccccuucgcuccugu

SEQ ID NO: 2494517 - RNA, 18 nt, Human
caacccucagagccaccc

SEQ ID NO: 2494518 - RNA, 21 nt, Human
caacccucagagccaccccua

SEQ ID NO: 2494519 - RNA, 21 nt, Human
caaccccuucgcuccuguguc

SEQ ID NO: 2494520 - RNA, 14 nt, Human
caacauuucucaau

SEQ ID NO: 2494521 - RNA, 17 nt, Human
caacauuucucaauaau

SEQ ID NO: 2494522 - RNA, 16 nt, Human
caacauuucucaauaa

SEQ ID NO: 2494523 - RNA, 20 nt, Human
caaccaagucaugugcauuu

SEQ ID NO: 2494524 - RNA, 18 nt, Human
caaccaagucaugugcau

SEQ ID NO: 2494525 - RNA, 16 nt, Human
caaccaauguagaaag

SEQ ID NO: 2494526 - RNA, 15 nt, Human
caacagguuuuccug

SEQ ID NO: 2494527 - RNA, 18 nt, Human
caacaggguuuuuuucca

SEQ ID NO: 2494528 - RNA, 19 nt, Human
caacagguuuuccugaaga

SEQ ID NO: 2494529 - RNA, 23 nt, Human
caacagguggcaggaccaggacu

SEQ ID NO: 2494530 - RNA, 22 nt, Human
caacagguggcaggaccaggac

SEQ ID NO: 2494531 - RNA, 13 nt, Human
caacagguuuuau

SEQ ID NO: 2494532 - RNA, 21 nt, Human
caacagguggcaggaccagga

SEQ ID NO: 2494533 - RNA, 18 nt, Human
caacagguggcaggacca

SEQ ID NO: 2494534 - RNA, 15 nt, Human
caacaucccauugcc

SEQ ID NO: 2494535 - RNA, 17 nt, Human
caacaucccauugcccu

SEQ ID NO: 2494536 - RNA, 22 nt, Human
caacaucuuggucagauuugaa

SEQ ID NO: 2494537 - RNA, 18 nt, Human
caacagucaaaacagaga

SEQ ID NO: 2494538 - RNA, 20 nt, Human
caacaguagcauaggacccu

SEQ ID NO: 2494539 - RNA, 14 nt, Human
caacagucaaaaca

SEQ ID NO: 2494540 - RNA, 18 nt, Human
caacaucaauguucauug

SEQ ID NO: 2494541 - RNA, 22 nt, Human
caacaucaauguucauuguaau

SEQ ID NO: 2494542 - RNA, 13 nt, Human
caacaucaauguu

SEQ ID NO: 2494543 - RNA, 15 nt, Human
caacaucaauguuca

SEQ ID NO: 2494544 - RNA, 16 nt, Human
caacaucaauguucau

SEQ ID NO: 2494545 - RNA, 17 nt, Human
caacaucaauguucauu

SEQ ID NO: 2494546 - RNA, 24 nt, Human
caacaggcugggcuucaguggcag

SEQ ID NO: 2494547 - RNA, 15 nt, Human
caaauuuacagagac

SEQ ID NO: 2494548 - RNA, 23 nt, Human
caacaggcugggcuucaguggca

SEQ ID NO: 2494549 - RNA, 15 nt, Human
caaauucugucucug

SEQ ID NO: 2494550 - RNA, 14 nt, Human
caaauuuacagaga

SEQ ID NO: 2494551 - RNA, 16 nt, Human
caaauucgcaaacuuu

SEQ ID NO: 2494552 - RNA, 22 nt, Human
caaauucucaaccuaccacccc

SEQ ID NO: 2494553 - RNA, 21 nt, Human
caaauucucaaccuaccaccc

SEQ ID NO: 2494554 - RNA, 15 nt, Human
caaauucucaccaaa

SEQ ID NO: 2494555 - RNA, 17 nt, Human
caacuucuacuucugcc

SEQ ID NO: 2494556 - RNA, 18 nt, Human
caaagcuaggccuggcca

SEQ ID NO: 2494557 - RNA, 17 nt, Human
caaagcuaggccuggcc

SEQ ID NO: 2494558 - RNA, 16 nt, Human
caaagcuaggccuggc

SEQ ID NO: 2494559 - RNA, 15 nt, Human
caaagcuaggccugg

SEQ ID NO: 2494560 - RNA, 21 nt, Human
caaagccaaagcuaggccugg

SEQ ID NO: 2494561 - RNA, 17 nt, Human
caaagcauugagcaaag

SEQ ID NO: 2494562 - RNA, 17 nt, Human
caaagccaaacucugcc

SEQ ID NO: 2494563 - RNA, 18 nt, Human
caaagccaaacucugcca

SEQ ID NO: 2494564 - RNA, 22 nt, Human
caaagccaaacucugccagcca

SEQ ID NO: 2494565 - RNA, 20 nt, Human
caaagccaaagcuaggccug

SEQ ID NO: 2494566 - RNA, 20 nt, Human
caaagcuucuaucccaggag

SEQ ID NO: 2494567 - RNA, 19 nt, Human
caaagcuucuaucccagga

SEQ ID NO: 2494568 - RNA, 18 nt, Human
caaagcuucuaucccagg

SEQ ID NO: 2494569 - RNA, 21 nt, Human
caaagcuucuaucccaggagg

SEQ ID NO: 2494570 - RNA, 14 nt, Human
caaagcuugaagau

SEQ ID NO: 2494571 - RNA, 19 nt, Human
caaagcuuggaagagccug

SEQ ID NO: 2494572 - RNA, 19 nt, Human
caaagcuugaagaucguua

SEQ ID NO: 2494573 - RNA, 16 nt, Human
caaagcuuagcaggag

SEQ ID NO: 2494574 - RNA, 15 nt, Human
caaagcuuagcagga

SEQ ID NO: 2494575 - RNA, 14 nt, Human
caaagcuuagcagg

SEQ ID NO: 2494576 - RNA, 18 nt, Human
caaagcuuagcaggagag

SEQ ID NO: 2494577 - RNA, 17 nt, Human
caaagcuuagcaggaga

SEQ ID NO: 2494578 - RNA, 22 nt, Human
caaagcuuagcaggagaggaga

SEQ ID NO: 2494579 - RNA, 16 nt, Human
caaagcuuuccugccc

SEQ ID NO: 2494580 - RNA, 14 nt, Human
caaagcuuuccugc

SEQ ID NO: 2494581 - RNA, 22 nt, Human
caaagcuuggaagagccugcag

SEQ ID NO: 2494582 - RNA, 13 nt, Human
caaagcuuuccug

SEQ ID NO: 2494583 - RNA, 16 nt, Human
caaagcuuguuaagau

SEQ ID NO: 2494584 - RNA, 16 nt, Human
caaagcuuuuuccaga

SEQ ID NO: 2494585 - RNA, 20 nt, Human
caaagcuuuuagaaauacug

SEQ ID NO: 2494586 - RNA, 22 nt, Human
caaagcuuuccugccccaggcc

SEQ ID NO: 2494587 - RNA, 18 nt, Human
caaagcuuuccugcccca

SEQ ID NO: 2494588 - RNA, 23 nt, Human
caaagcuuuccugccccaggccu

SEQ ID NO: 2494589 - RNA, 21 nt, Human
caaagcuuggaagagccugca

SEQ ID NO: 2494590 - RNA, 21 nt, Human
caaaggaaaaagcacaagaag

SEQ ID NO: 2494591 - RNA, 18 nt, Human
caaaggaaaaagcacaag

SEQ ID NO: 2494592 - RNA, 16 nt, Human
caaagcuuuuagaaau

SEQ ID NO: 2494593 - RNA, 22 nt, Human
caaaggaaaauaguaauguuuu

SEQ ID NO: 2494594 - RNA, 22 nt, Human
caaaggaaaaagcacaagaagc

SEQ ID NO: 2494595 - RNA, 17 nt, Human
caaaggaggcuggcagg

SEQ ID NO: 2494596 - RNA, 20 nt, Human
caaaggagggucaggaagga

SEQ ID NO: 2494597 - RNA, 16 nt, Human
caaaggaguagaaaga

SEQ ID NO: 2494598 - RNA, 18 nt, Human
caaacuuuuauacucuuu

SEQ ID NO: 2494599 - RNA, 17 nt, Human
caaacuuggauuuuuga

SEQ ID NO: 2494600 - RNA, 12 nt, Human
caaacuuuauuu

SEQ ID NO: 2494601 - RNA, 22 nt, Human
caaacuuggaauuuguaaccuc

SEQ ID NO: 2494602 - RNA, 15 nt, Human
caaacuucagacuga

SEQ ID NO: 2494603 - RNA, 19 nt, Human
caaacuuuuccccuguccu

SEQ ID NO: 2494604 - RNA, 13 nt, Human
caaagaaacccaa

SEQ ID NO: 2494605 - RNA, 13 nt, Human
caaagaggcaaga

SEQ ID NO: 2494606 - RNA, 14 nt, Human
caaagaggcaagag

SEQ ID NO: 2494607 - RNA, 20 nt, Human
caaagaggcugaggcuggca

SEQ ID NO: 2494608 - RNA, 22 nt, Human
caaagaggcugaggcuggcaca

SEQ ID NO: 2494609 - RNA, 15 nt, Human
caaagaggcaagagg

SEQ ID NO: 2494610 - RNA, 20 nt, Human
caaagaggcaagaggcugga

SEQ ID NO: 2494611 - RNA, 22 nt, Human
caaagagggcuuccucuagaag

SEQ ID NO: 2494612 - RNA, 18 nt, Human
caaagagggcuuccucua

SEQ ID NO: 2494613 - RNA, 16 nt, Human
caaagagggcuuccuc

SEQ ID NO: 2494614 - RNA, 15 nt, Human
caaagagggcuuccu

SEQ ID NO: 2494615 - RNA, 13 nt, Human
caaagagguauuu

SEQ ID NO: 2494616 - RNA, 14 nt, Human
caaagagggcuucc

SEQ ID NO: 2494617 - RNA, 18 nt, Human
auuuuuuuacuaauagac

SEQ ID NO: 2494618 - RNA, 17 nt, Human
auuuuuuuaauuuugua

SEQ ID NO: 2494619 - RNA, 16 nt, Human
auuuuuuuaauuuugu

SEQ ID NO: 2494620 - RNA, 18 nt, Human
auuuuuuuaauuuacaaa

SEQ ID NO: 2494621 - RNA, 13 nt, Human
auuuuuuuaagcu

SEQ ID NO: 2494622 - RNA, 12 nt, Human
auuuuuuuaagc

SEQ ID NO: 2494623 - RNA, 18 nt, Human
auuuuuuuaagcuguaaa

SEQ ID NO: 2494624 - RNA, 22 nt, Human
auuuuuuuauuguuuaaagcaa

SEQ ID NO: 2494625 - RNA, 18 nt, Human
auuuuuuuauuguuuaaa

SEQ ID NO: 2494626 - RNA, 16 nt, Human
auuuuuuuauuacuga

SEQ ID NO: 2494627 - RNA, 21 nt, Human
auuuuuuuaucuugggacugg

SEQ ID NO: 2494628 - RNA, 23 nt, Human
auuuuuuuagaaagcauuugaau

SEQ ID NO: 2494629 - RNA, 17 nt, Human
auuuuuuuagaaagcau

SEQ ID NO: 2494630 - RNA, 23 nt, Human
caaaaaaauauauuuaaugauaa

SEQ ID NO: 2494631 - RNA, 21 nt, Human
auuuuuuucacuggaguuaca

SEQ ID NO: 2494632 - RNA, 14 nt, Human
auuuuuuucaccuc

SEQ ID NO: 2494633 - RNA, 15 nt, Human
auuuuuuucaauauu

SEQ ID NO: 2494634 - RNA, 21 nt, Human
caaaaaaaucugcagaaggaa

SEQ ID NO: 2494635 - RNA, 17 nt, Human
caaaaaaaucugcagaa

SEQ ID NO: 2494636 - RNA, 16 nt, Human
caaaaaaaucugcaga

SEQ ID NO: 2494637 - RNA, 14 nt, Human
caaaaaacugcagu

SEQ ID NO: 2494638 - RNA, 21 nt, Human
caaaaaacucgaggacuguau

SEQ ID NO: 2494639 - RNA, 15 nt, Human
caaaaaacucgagga

SEQ ID NO: 2494640 - RNA, 14 nt, Human
caaaaaaauuaaau

SEQ ID NO: 2494641 - RNA, 15 nt, Human
caaaaaacugcagug

SEQ ID NO: 2494642 - RNA, 12 nt, Human
caaaaaaugagc

SEQ ID NO: 2494643 - RNA, 13 nt, Human
caaacuugcuuua

SEQ ID NO: 2494644 - RNA, 23 nt, Human
caaacuuccagugcaacacugaa

SEQ ID NO: 2494645 - RNA, 22 nt, Human
caaauucugcuugcuugcuuuu

SEQ ID NO: 2494646 - RNA, 16 nt, Human
caaauucauauucugu

SEQ ID NO: 2494647 - RNA, 14 nt, Human
caaauucauuuuuu

SEQ ID NO: 2494648 - RNA, 21 nt, Human
caaauguucaucaaugaauga

SEQ ID NO: 2494649 - RNA, 20 nt, Human
caaauguucaucaaugaaug

SEQ ID NO: 2494650 - RNA, 14 nt, Human
caaauguggcuccu

SEQ ID NO: 2494651 - RNA, 23 nt, Human
caaauguguacauggcagaguuu

SEQ ID NO: 2494652 - RNA, 20 nt, Human
caaauguguacauggcagag

SEQ ID NO: 2494653 - RNA, 20 nt, Human
caaauguguaucggaugcuu

SEQ ID NO: 2494654 - RNA, 17 nt, Human
caaaugugaccuguguc

SEQ ID NO: 2494655 - RNA, 13 nt, Human
caaaucagccaug

SEQ ID NO: 2494656 - RNA, 14 nt, Human
caaaugugaccugu

SEQ ID NO: 2494657 - RNA, 14 nt, Human
caaaucacugaacu

SEQ ID NO: 2494658 - RNA, 22 nt, Human
caaauauaagaauaaaauguug

SEQ ID NO: 2494659 - RNA, 18 nt, Human
caaauaugcaaagcacug

SEQ ID NO: 2494660 - RNA, 16 nt, Human
caaauaugcaaagcac

SEQ ID NO: 2494661 - RNA, 17 nt, Human
caaauaugcaaagcacu

SEQ ID NO: 2494662 - RNA, 15 nt, Human
caaaucacugaacuu

SEQ ID NO: 2494663 - RNA, 13 nt, Human
caaaucagcugcu

SEQ ID NO: 2494664 - RNA, 15 nt, Human
caaaugucuuccugg

SEQ ID NO: 2494665 - RNA, 18 nt, Human
caaaugucuuccuggauu

SEQ ID NO: 2494666 - RNA, 16 nt, Human
caaaucagcugcuacu

SEQ ID NO: 2494667 - RNA, 21 nt, Human
caaauaaaaacuaaauuguaa

SEQ ID NO: 2494668 - RNA, 19 nt, Human
caaauaaaaacuaaauugu

SEQ ID NO: 2494669 - RNA, 22 nt, Human
caaauaaaaacuaaauuguaaa

SEQ ID NO: 2494670 - RNA, 17 nt, Human
caaauaaaaacuaaauu

SEQ ID NO: 2494671 - RNA, 21 nt, Human
caaaguuuugaaaagcuauua

SEQ ID NO: 2494672 - RNA, 20 nt, Human
caaaguuuugaaaagcuauu

SEQ ID NO: 2494673 - RNA, 19 nt, Human
caaaguuuugaaaagcuau

SEQ ID NO: 2494674 - RNA, 18 nt, Human
caaaguuuugaaaagcua

SEQ ID NO: 2494675 - RNA, 17 nt, Human
caaaguuuugaaaagcu

SEQ ID NO: 2494676 - RNA, 14 nt, Human
caaaguuuugaaaa

SEQ ID NO: 2494677 - RNA, 13 nt, Human
caaaguuuugaaa

SEQ ID NO: 2494678 - RNA, 13 nt, Human
caaaggauacugu

SEQ ID NO: 2494679 - RNA, 13 nt, Human
caaaggaugugau

SEQ ID NO: 2494680 - RNA, 21 nt, Human
caaaggaugcccaaagaugca

SEQ ID NO: 2494681 - RNA, 17 nt, Human
caaaggaugugauauau

SEQ ID NO: 2494682 - RNA, 14 nt, Human
caaaggaugugaua

SEQ ID NO: 2494683 - RNA, 21 nt, Human
caaaggaugugauauauaagu

SEQ ID NO: 2494684 - RNA, 15 nt, Human
caaaggcaagcacuu

SEQ ID NO: 2494685 - RNA, 17 nt, Human
caaaguuggggcaggcu

SEQ ID NO: 2494686 - RNA, 12 nt, Human
caaauacuuuaa

SEQ ID NO: 2494687 - RNA, 21 nt, Human
caaauacuguguuucagaagc

SEQ ID NO: 2494688 - RNA, 16 nt, Human
caaauacuuuaaagga

SEQ ID NO: 2494689 - RNA, 23 nt, Human
caaauaaugucucugugagacuc

SEQ ID NO: 2494690 - RNA, 20 nt, Human
caaauaaugucucugugaga

SEQ ID NO: 2494691 - RNA, 16 nt, Human
caaauaaugucucugu

SEQ ID NO: 2494692 - RNA, 13 nt, Human
caaauaaugucuc

SEQ ID NO: 2494693 - RNA, 14 nt, Human
caaauaauaagcaa

SEQ ID NO: 2494694 - RNA, 12 nt, Human
caaauauauuca

SEQ ID NO: 2494695 - RNA, 14 nt, Human
caaauaugcaaagc

SEQ ID NO: 2494696 - RNA, 18 nt, Human
caaauauaagaauaaaau

SEQ ID NO: 2494697 - RNA, 14 nt, Human
caaauauaagaaua

SEQ ID NO: 2494698 - RNA, 15 nt, Human
caaauagugcucgcu

SEQ ID NO: 2494699 - RNA, 20 nt, Human
caaauaguuuauaaauguga

SEQ ID NO: 2494700 - RNA, 19 nt, Human
caaauacuuuaaaggaaaa

SEQ ID NO: 2494701 - RNA, 15 nt, Human
caaauagcauaaguu

SEQ ID NO: 2494702 - RNA, 22 nt, Human
cacccccacccaagggccuggc

SEQ ID NO: 2494703 - RNA, 15 nt, Human
cacccccaccaaggg

SEQ ID NO: 2494704 - RNA, 11 nt, Human
cacccccacca

SEQ ID NO: 2494705 - RNA, 12 nt, Human
cacccccacacc

SEQ ID NO: 2494706 - RNA, 17 nt, Human
caccccauuuucugugg

SEQ ID NO: 2494707 - RNA, 12 nt, Human
cacccccaaggg

SEQ ID NO: 2494708 - RNA, 19 nt, Human
cacccccaaggggcagucu

SEQ ID NO: 2494709 - RNA, 14 nt, Human
cacccccaccccuu

SEQ ID NO: 2494710 - RNA, 17 nt, Human
cacccccacccccagcu

SEQ ID NO: 2494711 - RNA, 14 nt, Human
cacccccaccccca

SEQ ID NO: 2494712 - RNA, 11 nt, Human
cacccccaccc

SEQ ID NO: 2494713 - RNA, 18 nt, Human
caccccccacacucacuc

SEQ ID NO: 2494714 - RNA, 13 nt, Human
caccccccacacu

SEQ ID NO: 2494715 - RNA, 15 nt, Human
caccccccaagcugu

SEQ ID NO: 2494716 - RNA, 16 nt, Human
caccccccacucugug

SEQ ID NO: 2494717 - RNA, 23 nt, Human
caccccccacacucacuccugag

SEQ ID NO: 2494718 - RNA, 13 nt, Human
caccccccagaac

SEQ ID NO: 2494719 - RNA, 18 nt, Human
caccccccagaaccuguc

SEQ ID NO: 2494720 - RNA, 19 nt, Human
caccccccagaaccugucc

SEQ ID NO: 2494721 - RNA, 20 nt, Human
caccccccagaaccuguccu

SEQ ID NO: 2494722 - RNA, 21 nt, Human
caccccccagaaccuguccuu

SEQ ID NO: 2494723 - RNA, 13 nt, Human
caccccccugggc

SEQ ID NO: 2494724 - RNA, 12 nt, Human
caccccccucau

SEQ ID NO: 2494725 - RNA, 17 nt, Human
cacccccagcugcuugu

SEQ ID NO: 2494726 - RNA, 13 nt, Human
cacccccagcugc

SEQ ID NO: 2494727 - RNA, 14 nt, Human
cacccccagcucaa

SEQ ID NO: 2494728 - RNA, 13 nt, Human
cacccccagcuca

SEQ ID NO: 2494729 - RNA, 12 nt, Human
cacccccagcuc

SEQ ID NO: 2494730 - RNA, 14 nt, Human
caccccccaagcug

SEQ ID NO: 2494731 - RNA, 17 nt, Human
cacccccaucucucccu

SEQ ID NO: 2494732 - RNA, 12 nt, Human
cacccccagcuu

SEQ ID NO: 2494733 - RNA, 13 nt, Human
cacccccaucucu

SEQ ID NO: 2494734 - RNA, 16 nt, Human
cacccccuccccgccc

SEQ ID NO: 2494735 - RNA, 18 nt, Human
cacccccuccccagggga

SEQ ID NO: 2494736 - RNA, 13 nt, Human
cacccccucccug

SEQ ID NO: 2494737 - RNA, 14 nt, Human
cacccccuccccag

SEQ ID NO: 2494738 - RNA, 15 nt, Human
cacccccuccccagg

SEQ ID NO: 2494739 - RNA, 16 nt, Human
cacccccuccccaggg

SEQ ID NO: 2494740 - RNA, 17 nt, Human
cacccccuccccagggg

SEQ ID NO: 2494741 - RNA, 20 nt, Human
cacccccucaagccaauccc

SEQ ID NO: 2494742 - RNA, 11 nt, Human
cacccccuccc

SEQ ID NO: 2494743 - RNA, 16 nt, Human
cacccccuccugcugc

SEQ ID NO: 2494744 - RNA, 15 nt, Human
cacccccuccugcug

SEQ ID NO: 2494745 - RNA, 17 nt, Human
cacccccuccugcugca

SEQ ID NO: 2494746 - RNA, 14 nt, Human
cacccccucccugg

SEQ ID NO: 2494747 - RNA, 16 nt, Human
cacccccucccuggcc

SEQ ID NO: 2494748 - RNA, 14 nt, Human
cacccccuccugcu

SEQ ID NO: 2494749 - RNA, 23 nt, Human
cacccccucccuggccuguucug

SEQ ID NO: 2494750 - RNA, 13 nt, Human
cacccccugcccu

SEQ ID NO: 2494751 - RNA, 16 nt, Human
cacccccugcccugca

SEQ ID NO: 2494752 - RNA, 14 nt, Human
cacccccugcccug

SEQ ID NO: 2494753 - RNA, 17 nt, Human
cacccccugcccugcac

SEQ ID NO: 2494754 - RNA, 16 nt, Human
cacccccuucagugcc

SEQ ID NO: 2494755 - RNA, 14 nt, Human
cacccccuuuccug

SEQ ID NO: 2494756 - RNA, 12 nt, Human
cacccccuuucc

SEQ ID NO: 2494757 - RNA, 14 nt, Human
caccccgcucugca

SEQ ID NO: 2494758 - RNA, 13 nt, Human
caccccgcucugc

SEQ ID NO: 2494759 - RNA, 16 nt, Human
caccccgccugcccuc

SEQ ID NO: 2494760 - RNA, 18 nt, Human
cacccccuucuccaucca

SEQ ID NO: 2494761 - RNA, 13 nt, Human
cacccccuucucu

SEQ ID NO: 2494762 - RNA, 17 nt, Human
cacccccuucagugccc

SEQ ID NO: 2494763 - RNA, 20 nt, Human
cacccccuucagugcccacc

SEQ ID NO: 2494764 - RNA, 21 nt, Human
cacccccuucagugcccacca

SEQ ID NO: 2494765 - RNA, 16 nt, Human
cacccccuucucugcu

SEQ ID NO: 2494766 - RNA, 17 nt, Human
cacccccuucucugcuc

SEQ ID NO: 2494767 - RNA, 18 nt, Human
cacccccuucucugcucc

SEQ ID NO: 2494768 - RNA, 22 nt, Human
cacccccuucucugcuccacca

SEQ ID NO: 2494769 - RNA, 17 nt, Human
caccccggccaccugcg

SEQ ID NO: 2494770 - RNA, 16 nt, Human
caccccggccaccugc

SEQ ID NO: 2494771 - RNA, 15 nt, Human
caccccggccaccug

SEQ ID NO: 2494772 - RNA, 14 nt, Human
caccccggccaccu

SEQ ID NO: 2494773 - RNA, 14 nt, Human
caccccuaaagaga

SEQ ID NO: 2494774 - RNA, 23 nt, Human
caccccgucugggguucagcccc

SEQ ID NO: 2494775 - RNA, 15 nt, Human
caccccgcucugcau

SEQ ID NO: 2494776 - RNA, 15 nt, Human
caccccgggcucucu

SEQ ID NO: 2494777 - RNA, 18 nt, Human
caccccggggacccugug

SEQ ID NO: 2494778 - RNA, 17 nt, Human
caccccggggacccugu

SEQ ID NO: 2494779 - RNA, 18 nt, Human
caccccgggcucucugcu

SEQ ID NO: 2494780 - RNA, 20 nt, Human
caccccggggacccugugac

SEQ ID NO: 2494781 - RNA, 19 nt, Human
caccccggggacccuguga

SEQ ID NO: 2494782 - RNA, 15 nt, Human
caccccguagauucc

SEQ ID NO: 2494783 - RNA, 22 nt, Human
caccccgucugggguucagccc

SEQ ID NO: 2494784 - RNA, 23 nt, Human
cacccaagggccuggccugagcu

SEQ ID NO: 2494785 - RNA, 21 nt, Human
cacccaagggccuggccugag

SEQ ID NO: 2494786 - RNA, 20 nt, Human
cacccaagggccuggccuga

SEQ ID NO: 2494787 - RNA, 19 nt, Human
cacccaagggccuggccug

SEQ ID NO: 2494788 - RNA, 19 nt, Human
cacccacaugugacacaua

SEQ ID NO: 2494789 - RNA, 13 nt, Human
cacccacauguga

SEQ ID NO: 2494790 - RNA, 12 nt, Human
cacccacaugug

SEQ ID NO: 2494791 - RNA, 21 nt, Human
cacccacaugugacacauaug

SEQ ID NO: 2494792 - RNA, 13 nt, Human
cacccacagggcu

SEQ ID NO: 2494793 - RNA, 15 nt, Human
cacccaccagggcga

SEQ ID NO: 2494794 - RNA, 23 nt, Human
cacccaauaaacauuaagauuga

SEQ ID NO: 2494795 - RNA, 12 nt, Human
caccagaauaaa

SEQ ID NO: 2494796 - RNA, 21 nt, Human
caccacuggccaccaggcugg

SEQ ID NO: 2494797 - RNA, 16 nt, Human
caccacuucuuuuaua

SEQ ID NO: 2494798 - RNA, 23 nt, Human
cacccacacacucgcccgcccac

SEQ ID NO: 2494799 - RNA, 21 nt, Human
cacccacacacucgcccgccc

SEQ ID NO: 2494800 - RNA, 17 nt, Human
cacccacacacucgccc

SEQ ID NO: 2494801 - RNA, 15 nt, Human
cacccacacacucgc

SEQ ID NO: 2494802 - RNA, 20 nt, Human
cacccacaagugccacugcc

SEQ ID NO: 2494803 - RNA, 18 nt, Human
cacccaagggccuggccu

SEQ ID NO: 2494804 - RNA, 17 nt, Human
cacccaagggccuggcc

SEQ ID NO: 2494805 - RNA, 16 nt, Human
caccagaagcccagaa

SEQ ID NO: 2494806 - RNA, 17 nt, Human
caccagaagcccagaau

SEQ ID NO: 2494807 - RNA, 16 nt, Human
cacccaagggccuggc

SEQ ID NO: 2494808 - RNA, 20 nt, Human
caccacuggccaccaggcug

SEQ ID NO: 2494809 - RNA, 19 nt, Human
caccacuggccaccaggcu

SEQ ID NO: 2494810 - RNA, 18 nt, Human
caccacuggccaccaggc

SEQ ID NO: 2494811 - RNA, 16 nt, Human
caccacuggccaccag

SEQ ID NO: 2494812 - RNA, 13 nt, Human
caccagaagccca

SEQ ID NO: 2494813 - RNA, 14 nt, Human
caccagaagcccag

SEQ ID NO: 2494814 - RNA, 15 nt, Human
caccagaagcccaga

SEQ ID NO: 2494815 - RNA, 15 nt, Human
caccacuggccacca

SEQ ID NO: 2494816 - RNA, 14 nt, Human
caccacuggccacc

SEQ ID NO: 2494817 - RNA, 13 nt, Human
caccacuggccac

SEQ ID NO: 2494818 - RNA, 13 nt, Human
caccacugcacuc

SEQ ID NO: 2494819 - RNA, 18 nt, Human
caccacugcacuccagcc

SEQ ID NO: 2494820 - RNA, 22 nt, Human
caccccaugcuguugauugcua

SEQ ID NO: 2494821 - RNA, 12 nt, Human
caccccaugcug

SEQ ID NO: 2494822 - RNA, 16 nt, Human
caccccaugcuguuga

SEQ ID NO: 2494823 - RNA, 22 nt, Human
caccccauagugaccggcugcu

SEQ ID NO: 2494824 - RNA, 12 nt, Human
caccccaugcca

SEQ ID NO: 2494825 - RNA, 15 nt, Human
caccccaugccaaag

SEQ ID NO: 2494826 - RNA, 17 nt, Human
caccccaugccaaagcu

SEQ ID NO: 2494827 - RNA, 16 nt, Human
caccccagggccugag

SEQ ID NO: 2494828 - RNA, 17 nt, Human
caccccagggccugagc

SEQ ID NO: 2494829 - RNA, 22 nt, Human
caccccagggccugagccuggc

SEQ ID NO: 2494830 - RNA, 17 nt, Human
caccccagugcacccac

SEQ ID NO: 2494831 - RNA, 18 nt, Human
caccccagugcacccacu

SEQ ID NO: 2494832 - RNA, 20 nt, Human
caccccagugcacccacucu

SEQ ID NO: 2494833 - RNA, 12 nt, Human
caccccauccca

SEQ ID NO: 2494834 - RNA, 15 nt, Human
caccccaucccacac

SEQ ID NO: 2494835 - RNA, 21 nt, Human
caccccaucccacacccugga

SEQ ID NO: 2494836 - RNA, 13 nt, Human
caccccagcccca

SEQ ID NO: 2494837 - RNA, 12 nt, Human
caccccagcccc

SEQ ID NO: 2494838 - RNA, 15 nt, Human
caccccagggccuga

SEQ ID NO: 2494839 - RNA, 13 nt, Human
caccccaggacuc

SEQ ID NO: 2494840 - RNA, 22 nt, Human
caccccagcugcuccccucccu

SEQ ID NO: 2494841 - RNA, 16 nt, Human
cacccaccguggagga

SEQ ID NO: 2494842 - RNA, 11 nt, Human
caccccagccu

SEQ ID NO: 2494843 - RNA, 19 nt, Human
caccccagccuaagaugaa

SEQ ID NO: 2494844 - RNA, 13 nt, Human
caccccagcugcu

SEQ ID NO: 2494845 - RNA, 16 nt, Human
caccccagcugcuccc

SEQ ID NO: 2494846 - RNA, 18 nt, Human
caccccagcugcuccccu

SEQ ID NO: 2494847 - RNA, 19 nt, Human
caccccagcugcuccccuc

SEQ ID NO: 2494848 - RNA, 20 nt, Human
caccccagcugcuccccucc

SEQ ID NO: 2494849 - RNA, 16 nt, Human
cacccaccucagccuc

SEQ ID NO: 2494850 - RNA, 14 nt, Human
cacccaccucagcc

SEQ ID NO: 2494851 - RNA, 13 nt, Human
cacccaccucagc

SEQ ID NO: 2494852 - RNA, 12 nt, Human
cacccaccucag

SEQ ID NO: 2494853 - RNA, 22 nt, Human
cacccaccaucaugucuggcua

SEQ ID NO: 2494854 - RNA, 20 nt, Human
cacccaccaucaugucuggc

SEQ ID NO: 2494855 - RNA, 13 nt, Human
cacccaccgugga

SEQ ID NO: 2494856 - RNA, 23 nt, Human
cacccaccguccgcccugcuccu

SEQ ID NO: 2494857 - RNA, 22 nt, Human
cacccaccguccgcccugcucc

SEQ ID NO: 2494858 - RNA, 20 nt, Human
cacccaccguccgcccugcu

SEQ ID NO: 2494859 - RNA, 14 nt, Human
cacccacccagcac

SEQ ID NO: 2494860 - RNA, 14 nt, Human
cacccacccuggga

SEQ ID NO: 2494861 - RNA, 13 nt, Human
cacccacccuggg

SEQ ID NO: 2494862 - RNA, 21 nt, Human
ccaggcccggggcuggcggcu

SEQ ID NO: 2494863 - RNA, 16 nt, Human
ccaggccaccuccaga

SEQ ID NO: 2494864 - RNA, 21 nt, Human
ccaggccaccuccccagcauu

SEQ ID NO: 2494865 - RNA, 23 nt, Human
ccaggccacuggccccugagauc

SEQ ID NO: 2494866 - RNA, 14 nt, Human
ccaggcccucugcc

SEQ ID NO: 2494867 - RNA, 13 nt, Human
ccaggcccucugc

SEQ ID NO: 2494868 - RNA, 16 nt, Human
ccaggccccugccacc

SEQ ID NO: 2494869 - RNA, 15 nt, Human
ccaggccccugccac

SEQ ID NO: 2494870 - RNA, 14 nt, Human
ccaggccccugcca

SEQ ID NO: 2494871 - RNA, 12 nt, Human
ccaggccagagg

SEQ ID NO: 2494872 - RNA, 18 nt, Human
ccaggaggccagccuuga

SEQ ID NO: 2494873 - RNA, 15 nt, Human
ccaggaggccagccu

SEQ ID NO: 2494874 - RNA, 14 nt, Human
ccagcuccuucgcu

SEQ ID NO: 2494875 - RNA, 20 nt, Human
ccagcuccuccgugcuuccu

SEQ ID NO: 2494876 - RNA, 17 nt, Human
ccagcucuagacaaccc

SEQ ID NO: 2494877 - RNA, 18 nt, Human
ccagcucuagacaacccu

SEQ ID NO: 2494878 - RNA, 15 nt, Human
ccaggccaccaggau

SEQ ID NO: 2494879 - RNA, 14 nt, Human
ccaggccaccagga

SEQ ID NO: 2494880 - RNA, 13 nt, Human
ccaggccaccucc

SEQ ID NO: 2494881 - RNA, 12 nt, Human
ccaggccaccag

SEQ ID NO: 2494882 - RNA, 19 nt, Human
ccaggccacauggggcugg

SEQ ID NO: 2494883 - RNA, 17 nt, Human
ccaggccaccuccccag

SEQ ID NO: 2494884 - RNA, 16 nt, Human
ccaggccaccucccca

SEQ ID NO: 2494885 - RNA, 16 nt, Human
ccaggccacuggcccc

SEQ ID NO: 2494886 - RNA, 20 nt, Human
ccaggaggccagccuugacc

SEQ ID NO: 2494887 - RNA, 21 nt, Human
ccaggccacaagacccuugug

SEQ ID NO: 2494888 - RNA, 19 nt, Human
ccagcucuagacaacccug

SEQ ID NO: 2494889 - RNA, 21 nt, Human
ccagcucuagacaacccugca

SEQ ID NO: 2494890 - RNA, 23 nt, Human
ccaggcugggagagccuuccagg

SEQ ID NO: 2494891 - RNA, 15 nt, Human
ccaggcccucugccc

SEQ ID NO: 2494892 - RNA, 16 nt, Human
ccaggcugggucgccc

SEQ ID NO: 2494893 - RNA, 12 nt, Human
ccaggcuggguc

SEQ ID NO: 2494894 - RNA, 24 nt, Human
ccaggcugggucgcccuggacugu

SEQ ID NO: 2494895 - RNA, 23 nt, Human
ccaggcugggucgcccuggacug

SEQ ID NO: 2494896 - RNA, 22 nt, Human
ccaggcugggucgcccuggacu

SEQ ID NO: 2494897 - RNA, 21 nt, Human
ccaggcugggucgcccuggac

SEQ ID NO: 2494898 - RNA, 23 nt, Human
ccaggcuuagucacugagacagc

SEQ ID NO: 2494899 - RNA, 22 nt, Human
ccaggcuuagucacugagacag

SEQ ID NO: 2494900 - RNA, 21 nt, Human
ccaggcuuagucacugagaca

SEQ ID NO: 2494901 - RNA, 14 nt, Human
ccaggcuggucuca

SEQ ID NO: 2494902 - RNA, 21 nt, Human
ccaggguggacuuagaaagca

SEQ ID NO: 2494903 - RNA, 20 nt, Human
ccaggguggacuuagaaagc

SEQ ID NO: 2494904 - RNA, 23 nt, Human
ccagggugagagcugcucuggaa

SEQ ID NO: 2494905 - RNA, 22 nt, Human
ccagggugagagcugcucugga

SEQ ID NO: 2494906 - RNA, 17 nt, Human
ccagggugagagcugcu

SEQ ID NO: 2494907 - RNA, 16 nt, Human
ccagggugagagcugc

SEQ ID NO: 2494908 - RNA, 15 nt, Human
ccagggugagagcug

SEQ ID NO: 2494909 - RNA, 20 nt, Human
ccagguagaggguguguaag

SEQ ID NO: 2494910 - RNA, 21 nt, Human
ccaggguguggcccugccauc

SEQ ID NO: 2494911 - RNA, 19 nt, Human
ccaggguguggcccugcca

SEQ ID NO: 2494912 - RNA, 22 nt, Human
ccaggguggacuuagaaagcag

SEQ ID NO: 2494913 - RNA, 17 nt, Human
ccagggccugagccugg

SEQ ID NO: 2494914 - RNA, 18 nt, Human
ccagggccugagccuggc

SEQ ID NO: 2494915 - RNA, 19 nt, Human
ccagggccugagccuggcc

SEQ ID NO: 2494916 - RNA, 23 nt, Human
ccagggccugcaggaccugccug

SEQ ID NO: 2494917 - RNA, 14 nt, Human
ccagggccugagcc

SEQ ID NO: 2494918 - RNA, 16 nt, Human
ccagggccugagccug

SEQ ID NO: 2494919 - RNA, 14 nt, Human
ccagggcccugcag

SEQ ID NO: 2494920 - RNA, 15 nt, Human
ccagggcccugcaga

SEQ ID NO: 2494921 - RNA, 14 nt, Human
ccagggucuucccu

SEQ ID NO: 2494922 - RNA, 14 nt, Human
ccagggugagagcu

SEQ ID NO: 2494923 - RNA, 23 nt, Human
ccagggucuucccuaccucaggc

SEQ ID NO: 2494924 - RNA, 18 nt, Human
ccagggccugagccaagc

SEQ ID NO: 2494925 - RNA, 22 nt, Human
ccagggccccucacccugccuu

SEQ ID NO: 2494926 - RNA, 21 nt, Human
ccagggccccucacccugccu

SEQ ID NO: 2494927 - RNA, 17 nt, Human
ccagggcccccaucuca

SEQ ID NO: 2494928 - RNA, 15 nt, Human
ccagggcccugagcu

SEQ ID NO: 2494929 - RNA, 18 nt, Human
ccagggcccugagcucgg

SEQ ID NO: 2494930 - RNA, 17 nt, Human
ccagggcccaggcaaau

SEQ ID NO: 2494931 - RNA, 23 nt, Human
ccagggcccagagcccagcucca

SEQ ID NO: 2494932 - RNA, 18 nt, Human
ccaggcuucacccugaau

SEQ ID NO: 2494933 - RNA, 16 nt, Human
ccaggcuucacccuga

SEQ ID NO: 2494934 - RNA, 20 nt, Human
ccaggcugggcaaggaggcc

SEQ ID NO: 2494935 - RNA, 18 nt, Human
ccaggcugggcaaggagg

SEQ ID NO: 2494936 - RNA, 22 nt, Human
ccagggagccuuugguucuggc

SEQ ID NO: 2494937 - RNA, 17 nt, Human
ccagggaguccccuccc

SEQ ID NO: 2494938 - RNA, 16 nt, Human
ccagggaguccccucc

SEQ ID NO: 2494939 - RNA, 23 nt, Human
ccagggaugccaucugugggcac

SEQ ID NO: 2494940 - RNA, 13 nt, Human
ccagggagucccc

SEQ ID NO: 2494941 - RNA, 18 nt, Human
ccagggagcggaaagcag

SEQ ID NO: 2494942 - RNA, 19 nt, Human
ccagggagcggaaagcagc

SEQ ID NO: 2494943 - RNA, 20 nt, Human
ccagggagcggaaagcagcu

SEQ ID NO: 2494944 - RNA, 23 nt, Human
ccagggagcggaaagcagcucaa

SEQ ID NO: 2494945 - RNA, 22 nt, Human
ccagggagcuugaaaguuuuca

SEQ ID NO: 2494946 - RNA, 23 nt, Human
ccagugugacaaggauugcuacu

SEQ ID NO: 2494947 - RNA, 14 nt, Human
ccagugugacaagg

SEQ ID NO: 2494948 - RNA, 13 nt, Human
ccauaugccuggg

SEQ ID NO: 2494949 - RNA, 15 nt, Human
ccagugugaucccaa

SEQ ID NO: 2494950 - RNA, 22 nt, Human
ccagugugaucccaagugccag

SEQ ID NO: 2494951 - RNA, 12 nt, Human
ccaguguggaac

SEQ ID NO: 2494952 - RNA, 12 nt, Human
ccaucaagccac

SEQ ID NO: 2494953 - RNA, 12 nt, Human
ccauaugugcuu

SEQ ID NO: 2494954 - RNA, 14 nt, Human
ccauauguuacacu

SEQ ID NO: 2494955 - RNA, 15 nt, Human
ccauaugccugggca

SEQ ID NO: 2494956 - RNA, 22 nt, Human
ccauauggauuuucuauuguua

SEQ ID NO: 2494957 - RNA, 14 nt, Human
ccaucaagccacca

SEQ ID NO: 2494958 - RNA, 13 nt, Human
ccaucaagccacc

SEQ ID NO: 2494959 - RNA, 16 nt, Human
ccaucaucccagcugc

SEQ ID NO: 2494960 - RNA, 15 nt, Human
ccaucaucccagcug

SEQ ID NO: 2494961 - RNA, 14 nt, Human
ccaucaucccagcu

SEQ ID NO: 2494962 - RNA, 16 nt, Human
ccaucaagccaccaac

SEQ ID NO: 2494963 - RNA, 12 nt, Human
ccaucauugaaa

SEQ ID NO: 2494964 - RNA, 13 nt, Human
ccaucaugucugg

SEQ ID NO: 2494965 - RNA, 13 nt, Human
ccaucaucuccug

SEQ ID NO: 2494966 - RNA, 13 nt, Human
ccaucauccuacu

SEQ ID NO: 2494967 - RNA, 12 nt, Human
ccaucaugucug

SEQ ID NO: 2494968 - RNA, 18 nt, Human
ccaucucacacaugagca

SEQ ID NO: 2494969 - RNA, 17 nt, Human
ccaucucacacaugagc

SEQ ID NO: 2494970 - RNA, 15 nt, Human
ccaucucacacauga

SEQ ID NO: 2494971 - RNA, 14 nt, Human
ccaucucacacaug

SEQ ID NO: 2494972 - RNA, 21 nt, Human
ccaucucacacaugagcauca

SEQ ID NO: 2494973 - RNA, 20 nt, Human
ccaucucacacaugagcauc

SEQ ID NO: 2494974 - RNA, 15 nt, Human
ccaucucuccuccuu

SEQ ID NO: 2494975 - RNA, 17 nt, Human
ccaucucucccuccccu

SEQ ID NO: 2494976 - RNA, 23 nt, Human
ccaucucucccuccccugccauu

SEQ ID NO: 2494977 - RNA, 14 nt, Human
ccaucucucccucc

SEQ ID NO: 2494978 - RNA, 18 nt, Human
ccauccugaggcuccacu

SEQ ID NO: 2494979 - RNA, 17 nt, Human
ccaucauugaaaucuuu

SEQ ID NO: 2494980 - RNA, 16 nt, Human
ccaucauugaaaucuu

SEQ ID NO: 2494981 - RNA, 14 nt, Human
ccaucauugaaauc

SEQ ID NO: 2494982 - RNA, 15 nt, Human
ccauccugcagccuc

SEQ ID NO: 2494983 - RNA, 17 nt, Human
ccaucauuauaaacgug

SEQ ID NO: 2494984 - RNA, 14 nt, Human
ccaucaugucccca

SEQ ID NO: 2494985 - RNA, 20 nt, Human
ccauccugaggcuccacuug

SEQ ID NO: 2494986 - RNA, 13 nt, Human
ccauccuggccca

SEQ ID NO: 2494987 - RNA, 22 nt, Human
ccauccugcagccuccuccuga

SEQ ID NO: 2494988 - RNA, 21 nt, Human
ccauccugcagccuccuccug

SEQ ID NO: 2494989 - RNA, 18 nt, Human
ccauccugcagccuccuc

SEQ ID NO: 2494990 - RNA, 16 nt, Human
ccauccugcagccucc

SEQ ID NO: 2494991 - RNA, 14 nt, Human
ccaucuaccuucca

SEQ ID NO: 2494992 - RNA, 13 nt, Human
ccaucuaccuucc

SEQ ID NO: 2494993 - RNA, 12 nt, Human
ccauccuggccc

SEQ ID NO: 2494994 - RNA, 20 nt, Human
ccaucuaugucccuugcugu

SEQ ID NO: 2494995 - RNA, 22 nt, Human
ccaucuaugucccuugcuguga

SEQ ID NO: 2494996 - RNA, 20 nt, Human
ccaguaaaugggggugcauu

SEQ ID NO: 2494997 - RNA, 22 nt, Human
ccagguuucuggucucuaggcu

SEQ ID NO: 2494998 - RNA, 17 nt, Human
ccagguuucuggucucu

SEQ ID NO: 2494999 - RNA, 16 nt, Human
ccagguuuagacagua

SEQ ID NO: 2495000 - RNA, 19 nt, Human
ccagguuuucugggugucc

SEQ ID NO: 2495001 - RNA, 16 nt, Human
ccagguuuucugggug

SEQ ID NO: 2495002 - RNA, 20 nt, Human
ccagguuuucugggugucca

SEQ ID NO: 2495003 - RNA, 21 nt, Human
ccaguaaaugggggugcauuu

SEQ ID NO: 2495004 - RNA, 22 nt, Human
ccaguaaaugggggugcauuug

SEQ ID NO: 2495005 - RNA, 23 nt, Human
ccaggugggcgggcagcacagca

SEQ ID NO: 2495006 - RNA, 22 nt, Human
ccaggugggcgggcagcacagc

SEQ ID NO: 2495007 - RNA, 20 nt, Human
ccaggugggcgggcagcaca

SEQ ID NO: 2495008 - RNA, 19 nt, Human
ccaggugggcgggcagcac

SEQ ID NO: 2495009 - RNA, 16 nt, Human
ccagguggcugaccca

SEQ ID NO: 2495010 - RNA, 17 nt, Human
ccagguggcugacccag

SEQ ID NO: 2495011 - RNA, 19 nt, Human
ccagguggcugacccaguc

SEQ ID NO: 2495012 - RNA, 20 nt, Human
ccagguggcugacccagucc

SEQ ID NO: 2495013 - RNA, 21 nt, Human
ccagguggcugacccaguccc

SEQ ID NO: 2495014 - RNA, 22 nt, Human
ccagguggcugacccagucccu

SEQ ID NO: 2495015 - RNA, 23 nt, Human
ccagguggcugacccagucccug

SEQ ID NO: 2495016 - RNA, 16 nt, Human
ccagguuucuaugugu

SEQ ID NO: 2495017 - RNA, 13 nt, Human
ccagguuuaagcu

SEQ ID NO: 2495018 - RNA, 16 nt, Human
ccaggugcacagacgu

SEQ ID NO: 2495019 - RNA, 13 nt, Human
ccaggugcacaga

SEQ ID NO: 2495020 - RNA, 19 nt, Human
ccaggugcacagacguccc

SEQ ID NO: 2495021 - RNA, 15 nt, Human
ccagguaucuccagg

SEQ ID NO: 2495022 - RNA, 18 nt, Human
ccagguaucuccaggauu

SEQ ID NO: 2495023 - RNA, 16 nt, Human
ccagguaucuccagga

SEQ ID NO: 2495024 - RNA, 14 nt, Human
ccagguagaacaca

SEQ ID NO: 2495025 - RNA, 21 nt, Human
ccagguggccacuccagaccc

SEQ ID NO: 2495026 - RNA, 16 nt, Human
ccagguggccacucca

SEQ ID NO: 2495027 - RNA, 21 nt, Human
ccaggugcuaggaacacuccu

SEQ ID NO: 2495028 - RNA, 17 nt, Human
ccagguaucuccaggau

SEQ ID NO: 2495029 - RNA, 22 nt, Human
ccaggugcaguggcucacgccu

SEQ ID NO: 2495030 - RNA, 12 nt, Human
ccaggugccagu

SEQ ID NO: 2495031 - RNA, 13 nt, Human
ccaggugccaguu

SEQ ID NO: 2495032 - RNA, 14 nt, Human
ccaggugcaguggc

SEQ ID NO: 2495033 - RNA, 17 nt, Human
ccagugacuuuuucuaa

SEQ ID NO: 2495034 - RNA, 15 nt, Human
ccagugacuccagga

SEQ ID NO: 2495035 - RNA, 13 nt, Human
ccagugacuccag

SEQ ID NO: 2495036 - RNA, 12 nt, Human
ccagugacucca

SEQ ID NO: 2495037 - RNA, 18 nt, Human
ccagugagcacucccaag

SEQ ID NO: 2495038 - RNA, 16 nt, Human
ccagugagcacuccca

SEQ ID NO: 2495039 - RNA, 21 nt, Human
ccagugagaugcauucuuggu

SEQ ID NO: 2495040 - RNA, 17 nt, Human
ccagugagaugcauucu

SEQ ID NO: 2495041 - RNA, 14 nt, Human
ccagugagaugcau

SEQ ID NO: 2495042 - RNA, 13 nt, Human
ccagugagaugca

SEQ ID NO: 2495043 - RNA, 16 nt, Human
ccagugacuccaggag

SEQ ID NO: 2495044 - RNA, 22 nt, Human
ccagugaccugcuggguaaacu

SEQ ID NO: 2495045 - RNA, 20 nt, Human
ccagugaccugcuggguaaa

SEQ ID NO: 2495046 - RNA, 17 nt, Human
ccagugaccugaggaag

SEQ ID NO: 2495047 - RNA, 18 nt, Human
ccagugaccugaggaagc

SEQ ID NO: 2495048 - RNA, 18 nt, Human
ccagugaccugcugggua

SEQ ID NO: 2495049 - RNA, 19 nt, Human
ccagugaccugaggaagcg

SEQ ID NO: 2495050 - RNA, 15 nt, Human
ccagugaccugagga

SEQ ID NO: 2495051 - RNA, 23 nt, Human
ccaguaaaugggggugcauuuga

SEQ ID NO: 2495052 - RNA, 12 nt, Human
ccagguuuuuca

SEQ ID NO: 2495053 - RNA, 23 nt, Human
ccagugaauucuugaaggaaaau

SEQ ID NO: 2495054 - RNA, 11 nt, Human
ccagugacacu

SEQ ID NO: 2495055 - RNA, 19 nt, Human
ccagugacagacaggcucu

SEQ ID NO: 2495056 - RNA, 18 nt, Human
ccagugacagacaggcuc

SEQ ID NO: 2495057 - RNA, 21 nt, Human
ccagugacagacaggcucuua

SEQ ID NO: 2495058 - RNA, 24 nt, Human
ccagugacacuucagagagcuggu

SEQ ID NO: 2495059 - RNA, 17 nt, Human
ccagugacagacaggcu

SEQ ID NO: 2495060 - RNA, 15 nt, Human
ccagugacagacagg

SEQ ID NO: 2495061 - RNA, 16 nt, Human
ccagugacacuucaga

SEQ ID NO: 2495062 - RNA, 19 nt, Human
ccagugacacuucagagag

SEQ ID NO: 2495063 - RNA, 20 nt, Human
ccagugacacuucagagagc

SEQ ID NO: 2495064 - RNA, 23 nt, Human
ccagugacacuucagagagcugg

SEQ ID NO: 2495065 - RNA, 17 nt, Human
ccagugucuuccugugg

SEQ ID NO: 2495066 - RNA, 16 nt, Human
ccagugucuuccugug

SEQ ID NO: 2495067 - RNA, 15 nt, Human
ccagugucuuccugu

SEQ ID NO: 2495068 - RNA, 14 nt, Human
ccagugucuuccug

SEQ ID NO: 2495069 - RNA, 13 nt, Human
ccagugucuuccu

SEQ ID NO: 2495070 - RNA, 18 nt, Human
ccaguggcugcugcccag

SEQ ID NO: 2495071 - RNA, 17 nt, Human
ccaguggcugcugccca

SEQ ID NO: 2495072 - RNA, 16 nt, Human
ccaguggcugcugccc

SEQ ID NO: 2495073 - RNA, 15 nt, Human
ccaguggcugcugcc

SEQ ID NO: 2495074 - RNA, 14 nt, Human
ccaguggcugcugc

SEQ ID NO: 2495075 - RNA, 13 nt, Human
ccaguggcugcug

SEQ ID NO: 2495076 - RNA, 24 nt, Human
ccaguggccucaacccucccucag

SEQ ID NO: 2495077 - RNA, 17 nt, Human
ccaguggccacucagcu

SEQ ID NO: 2495078 - RNA, 16 nt, Human
ccaguggccacucagc

SEQ ID NO: 2495079 - RNA, 15 nt, Human
ccaguggccacucag

SEQ ID NO: 2495080 - RNA, 21 nt, Human
ccaguggccacucagcuuccu

SEQ ID NO: 2495081 - RNA, 16 nt, Human
ccaguggccucaaccc

SEQ ID NO: 2495082 - RNA, 17 nt, Human
ccaguggccucaacccu

SEQ ID NO: 2495083 - RNA, 23 nt, Human
ccaguggccucaacccucccuca

SEQ ID NO: 2495084 - RNA, 22 nt, Human
ccagugcccaaagucuguguga

SEQ ID NO: 2495085 - RNA, 19 nt, Human
ccagugcccaaagucugug

SEQ ID NO: 2495086 - RNA, 14 nt, Human
ccagugcacccacu

SEQ ID NO: 2495087 - RNA, 20 nt, Human
ccagugagcacucccaaguc

SEQ ID NO: 2495088 - RNA, 19 nt, Human
ccagugagcacucccaagu

SEQ ID NO: 2495089 - RNA, 18 nt, Human
ccagugcaacagcacugg

SEQ ID NO: 2495090 - RNA, 15 nt, Human
ccagugcaacagcac

SEQ ID NO: 2495091 - RNA, 14 nt, Human
ccagugcaacagca

SEQ ID NO: 2495092 - RNA, 21 nt, Human
ccagugaugcuaaagguugua

SEQ ID NO: 2495093 - RNA, 14 nt, Human
ccagugcaacacug

SEQ ID NO: 2495094 - RNA, 13 nt, Human
ccauucugacucg

SEQ ID NO: 2495095 - RNA, 12 nt, Human
ccauucugacuc

SEQ ID NO: 2495096 - RNA, 16 nt, Human
ccauucucucuccugu

SEQ ID NO: 2495097 - RNA, 19 nt, Human
ccauucucucuccugucca

SEQ ID NO: 2495098 - RNA, 20 nt, Human
ccauucucucuccuguccaa

SEQ ID NO: 2495099 - RNA, 16 nt, Human
ccauucugaccauuuc

SEQ ID NO: 2495100 - RNA, 14 nt, Human
ccauucucucuccu

SEQ ID NO: 2495101 - RNA, 23 nt, Human
ccauucucccagguaccagcugc

SEQ ID NO: 2495102 - RNA, 13 nt, Human
ccauucuccacag

SEQ ID NO: 2495103 - RNA, 15 nt, Human
ccauucuccacagca

SEQ ID NO: 2495104 - RNA, 16 nt, Human
ccauucuccacagcaa

SEQ ID NO: 2495105 - RNA, 18 nt, Human
ccauucuccacagcaacc

SEQ ID NO: 2495106 - RNA, 18 nt, Human
ccauucucaagcccugca

SEQ ID NO: 2495107 - RNA, 17 nt, Human
ccauucucaagcccugc

SEQ ID NO: 2495108 - RNA, 22 nt, Human
ccauuaggacaaucaguccccu

SEQ ID NO: 2495109 - RNA, 13 nt, Human
ccauuaucaugug

SEQ ID NO: 2495110 - RNA, 19 nt, Human
ccauuagcuuucaauuccg

SEQ ID NO: 2495111 - RNA, 16 nt, Human
ccauuagagucagccu

SEQ ID NO: 2495112 - RNA, 16 nt, Human
ccauuaucauguguaa

SEQ ID NO: 2495113 - RNA, 15 nt, Human
ccauuaucaugugua

SEQ ID NO: 2495114 - RNA, 14 nt, Human
ccauuaucaugugu

SEQ ID NO: 2495115 - RNA, 21 nt, Human
ccauuaucccugaaucccccu

SEQ ID NO: 2495116 - RNA, 14 nt, Human
ccauuaucccugaa

SEQ ID NO: 2495117 - RNA, 17 nt, Human
ccauuaugaagaagaga

SEQ ID NO: 2495118 - RNA, 14 nt, Human
ccauucuacacaga

SEQ ID NO: 2495119 - RNA, 24 nt, Human
ccauuccugguacccagccaucug

SEQ ID NO: 2495120 - RNA, 21 nt, Human
ccauuugcguuccaugaugcu

SEQ ID NO: 2495121 - RNA, 13 nt, Human
ccauuugcuccuu

SEQ ID NO: 2495122 - RNA, 16 nt, Human
ccauuugcuuuuucac

SEQ ID NO: 2495123 - RNA, 19 nt, Human
ccauuuuagucacuuuuuu

SEQ ID NO: 2495124 - RNA, 18 nt, Human
ccauuuuagucacuuuuu

SEQ ID NO: 2495125 - RNA, 20 nt, Human
ccauuugcagaguccugcac

SEQ ID NO: 2495126 - RNA, 15 nt, Human
ccauuugaaagaaag

SEQ ID NO: 2495127 - RNA, 20 nt, Human
ccauucugccuccauucuga

SEQ ID NO: 2495128 - RNA, 21 nt, Human
ccauuccugguacccagccau

SEQ ID NO: 2495129 - RNA, 15 nt, Human
ccauucugccugccc

SEQ ID NO: 2495130 - RNA, 20 nt, Human
ccauucugacucgguuucuc

SEQ ID NO: 2495131 - RNA, 17 nt, Human
ccauucugaccauuuca

SEQ ID NO: 2495132 - RNA, 22 nt, Human
ccauuaaaacugaagucugaaa

SEQ ID NO: 2495133 - RNA, 15 nt, Human
ccauuaaaguucuca

SEQ ID NO: 2495134 - RNA, 22 nt, Human
ccauuaaagucgagcuuuucua

SEQ ID NO: 2495135 - RNA, 23 nt, Human
ccauuagaagauauuagucuugg

SEQ ID NO: 2495136 - RNA, 12 nt, Human
ccauuacccuca

SEQ ID NO: 2495137 - RNA, 14 nt, Human
ccauuaccauggag

SEQ ID NO: 2495138 - RNA, 23 nt, Human
ccauuaaaacugaagucugaaau

SEQ ID NO: 2495139 - RNA, 21 nt, Human
ccauuaaaacugaagucugaa

SEQ ID NO: 2495140 - RNA, 20 nt, Human
ccauuaaaacugaagucuga

SEQ ID NO: 2495141 - RNA, 15 nt, Human
ccauuaaaacugaag

SEQ ID NO: 2495142 - RNA, 14 nt, Human
ccauguugcugcca

SEQ ID NO: 2495143 - RNA, 13 nt, Human
ccauguugcugcc

SEQ ID NO: 2495144 - RNA, 18 nt, Human
ccauguuuuguuuacggu

SEQ ID NO: 2495145 - RNA, 23 nt, Human
ccauguucuauuucagugccaau

SEQ ID NO: 2495146 - RNA, 17 nt, Human
ccauguuccaauaaaca

SEQ ID NO: 2495147 - RNA, 22 nt, Human
ccauguucacaccgcugcacuc

SEQ ID NO: 2495148 - RNA, 18 nt, Human
ccauguuccaauaaacag

SEQ ID NO: 2495149 - RNA, 22 nt, Human
ccauguuaauuucaugugucaa

SEQ ID NO: 2495150 - RNA, 18 nt, Human
ccauguuaguuuuuacuu

SEQ ID NO: 2495151 - RNA, 19 nt, Human
ccaugugugugcaagugug

SEQ ID NO: 2495152 - RNA, 21 nt, Human
ccaucuugcuucccuaaucua

SEQ ID NO: 2495153 - RNA, 20 nt, Human
ccaucuugcuucccuaaucu

SEQ ID NO: 2495154 - RNA, 14 nt, Human
ccauguguccuggu

SEQ ID NO: 2495155 - RNA, 17 nt, Human
ccauguguccugguucc

SEQ ID NO: 2495156 - RNA, 11 nt, Human
ccaugugugag

SEQ ID NO: 2495157 - RNA, 17 nt, Human
ccaugugugagugugug

SEQ ID NO: 2495158 - RNA, 18 nt, Human
ccaugugugagugugugc

SEQ ID NO: 2495159 - RNA, 15 nt, Human
ccauguguggacuca

SEQ ID NO: 2495160 - RNA, 10 nt, Human
ccaugugugu

SEQ ID NO: 2495161 - RNA, 12 nt, Human
ccaugugugugc

SEQ ID NO: 2495162 - RNA, 16 nt, Human
ccaucuuccagguggg

SEQ ID NO: 2495163 - RNA, 15 nt, Human
ccaucuuccaggugg

SEQ ID NO: 2495164 - RNA, 13 nt, Human
ccaucuucccagc

SEQ ID NO: 2495165 - RNA, 14 nt, Human
ccaucuuccaggug

SEQ ID NO: 2495166 - RNA, 15 nt, Human
ccaucuucagcuucu

SEQ ID NO: 2495167 - RNA, 15 nt, Human
ccaucuuaguuugga

SEQ ID NO: 2495168 - RNA, 19 nt, Human
ccaucuguuuggugggggu

SEQ ID NO: 2495169 - RNA, 22 nt, Human
ccaucucuggaugccugauugc

SEQ ID NO: 2495170 - RNA, 18 nt, Human
ccaucucuggaugccuga

SEQ ID NO: 2495171 - RNA, 15 nt, Human
ccaucucuggaugcc

SEQ ID NO: 2495172 - RNA, 12 nt, Human
ccaucucuggau

SEQ ID NO: 2495173 - RNA, 23 nt, Human
ccaucucugauuuucaaagcuuu

SEQ ID NO: 2495174 - RNA, 18 nt, Human
ccaucucugauuuucaaa

SEQ ID NO: 2495175 - RNA, 16 nt, Human
ccaucucucuggcccu

SEQ ID NO: 2495176 - RNA, 14 nt, Human
ccaucucucuggcc

SEQ ID NO: 2495177 - RNA, 13 nt, Human
ccaucucucuggc

SEQ ID NO: 2495178 - RNA, 20 nt, Human
ccaucucucuacuccuaccu

SEQ ID NO: 2495179 - RNA, 14 nt, Human
ccaucugugaauaa

SEQ ID NO: 2495180 - RNA, 15 nt, Human
ccaucugugaauaag

SEQ ID NO: 2495181 - RNA, 16 nt, Human
ccaucugugcacgcag

SEQ ID NO: 2495182 - RNA, 14 nt, Human
ccaucugucccugc

SEQ ID NO: 2495183 - RNA, 22 nt, Human
ccaucugugggcacgcuguggg

SEQ ID NO: 2495184 - RNA, 12 nt, Human
ccaucugugaau

SEQ ID NO: 2495185 - RNA, 21 nt, Human
ccaucucuuccuacccaacca

SEQ ID NO: 2495186 - RNA, 13 nt, Human
ccaucucuuccua

SEQ ID NO: 2495187 - RNA, 18 nt, Human
cccacaugaggacaugau

SEQ ID NO: 2495188 - RNA, 19 nt, Human
cccaccguggaggaggaag

SEQ ID NO: 2495189 - RNA, 23 nt, Human
cccaccguccgcccugcuccucc

SEQ ID NO: 2495190 - RNA, 21 nt, Human
cccaccguccgcccugcuccu

SEQ ID NO: 2495191 - RNA, 19 nt, Human
cccaccguccgcccugcuc

SEQ ID NO: 2495192 - RNA, 15 nt, Human
cccaccgugggcagg

SEQ ID NO: 2495193 - RNA, 17 nt, Human
cccaccgugggcaggga

SEQ ID NO: 2495194 - RNA, 17 nt, Human
cccaccguccgcccugc

SEQ ID NO: 2495195 - RNA, 15 nt, Human
cccaccguccgcccu

SEQ ID NO: 2495196 - RNA, 15 nt, Human
cccaccucagccucc

SEQ ID NO: 2495197 - RNA, 14 nt, Human
cccaccucagccuc

SEQ ID NO: 2495198 - RNA, 12 nt, Human
cccaccucagcc

SEQ ID NO: 2495199 - RNA, 20 nt, Human
cccaccguggaggaggaagg

SEQ ID NO: 2495200 - RNA, 19 nt, Human
cccaccgugggcagggagc

SEQ ID NO: 2495201 - RNA, 16 nt, Human
cccaccuaugugccaa

SEQ ID NO: 2495202 - RNA, 17 nt, Human
cccaccucucucacucc

SEQ ID NO: 2495203 - RNA, 14 nt, Human
cccaccucucucac

SEQ ID NO: 2495204 - RNA, 13 nt, Human
cccaccucucuca

SEQ ID NO: 2495205 - RNA, 21 nt, Human
cccaccucagccucccaaagu

SEQ ID NO: 2495206 - RNA, 12 nt, Human
cccaccuuggcu

SEQ ID NO: 2495207 - RNA, 22 nt, Human
cccaccugucaaacaaagccag

SEQ ID NO: 2495208 - RNA, 23 nt, Human
cccaccugucaaacaaagccaga

SEQ ID NO: 2495209 - RNA, 19 nt, Human
cccaccuucaauuccuggg

SEQ ID NO: 2495210 - RNA, 20 nt, Human
cccaccuucaauuccugggc

SEQ ID NO: 2495211 - RNA, 21 nt, Human
cccaccuucaauuccugggcc

SEQ ID NO: 2495212 - RNA, 19 nt, Human
cccaccucucucacuccuu

SEQ ID NO: 2495213 - RNA, 22 nt, Human
cccaccucuccccaccuuaccc

SEQ ID NO: 2495214 - RNA, 13 nt, Human
cccaccugggacc

SEQ ID NO: 2495215 - RNA, 20 nt, Human
cccaccugguggccucugcc

SEQ ID NO: 2495216 - RNA, 15 nt, Human
cccaccuuggcugca

SEQ ID NO: 2495217 - RNA, 14 nt, Human
cccaccuuggcugc

SEQ ID NO: 2495218 - RNA, 22 nt, Human
cccaccuuggcucaaguccucu

SEQ ID NO: 2495219 - RNA, 15 nt, Human
cccaccuuggcucaa

SEQ ID NO: 2495220 - RNA, 19 nt, Human
cccacgcccccacugguga

SEQ ID NO: 2495221 - RNA, 17 nt, Human
cccacgcccccacuggu

SEQ ID NO: 2495222 - RNA, 12 nt, Human
cccaccugucuu

SEQ ID NO: 2495223 - RNA, 22 nt, Human
cccaccuucaauuccugggccc

SEQ ID NO: 2495224 - RNA, 17 nt, Human
cccacgcccuccccucc

SEQ ID NO: 2495225 - RNA, 12 nt, Human
cccacgugggag

SEQ ID NO: 2495226 - RNA, 22 nt, Human
cccacguccugucagugccgcc

SEQ ID NO: 2495227 - RNA, 19 nt, Human
cccacguccugucagugcc

SEQ ID NO: 2495228 - RNA, 22 nt, Human
cccagaauaaacuggcagcuca

SEQ ID NO: 2495229 - RNA, 22 nt, Human
cccagaaggcauaucagucucu

SEQ ID NO: 2495230 - RNA, 15 nt, Human
cccacguucucacac

SEQ ID NO: 2495231 - RNA, 19 nt, Human
cccagaauaaguuauugca

SEQ ID NO: 2495232 - RNA, 24 nt, Human
cccagaauaaacuggcagcucagc

SEQ ID NO: 2495233 - RNA, 16 nt, Human
cccagaaugaggcugc

SEQ ID NO: 2495234 - RNA, 12 nt, Human
cccagaaucaaa

SEQ ID NO: 2495235 - RNA, 22 nt, Human
cccagaauaaguuauugcaguu

SEQ ID NO: 2495236 - RNA, 21 nt, Human
cccacggccgcuccaggggug

SEQ ID NO: 2495237 - RNA, 17 nt, Human
cccacggccgcuccagg

SEQ ID NO: 2495238 - RNA, 16 nt, Human
cccacggccgcuccag

SEQ ID NO: 2495239 - RNA, 14 nt, Human
cccacggccgcucc

SEQ ID NO: 2495240 - RNA, 20 nt, Human
cccacggagucguggggugu

SEQ ID NO: 2495241 - RNA, 13 nt, Human
cccacgcuucucu

SEQ ID NO: 2495242 - RNA, 19 nt, Human
cccacggggccucgggacc

SEQ ID NO: 2495243 - RNA, 17 nt, Human
cccacguccugucagug

SEQ ID NO: 2495244 - RNA, 15 nt, Human
cccacguccugucag

SEQ ID NO: 2495245 - RNA, 13 nt, Human
cccacguccuguc

SEQ ID NO: 2495246 - RNA, 21 nt, Human
cccaacacugugcccuggugg

SEQ ID NO: 2495247 - RNA, 20 nt, Human
cccaacacugugcccuggug

SEQ ID NO: 2495248 - RNA, 19 nt, Human
cccaacacugugcccuggu

SEQ ID NO: 2495249 - RNA, 18 nt, Human
cccaacacugugcccugg

SEQ ID NO: 2495250 - RNA, 16 nt, Human
cccaacacugugcccu

SEQ ID NO: 2495251 - RNA, 15 nt, Human
cccaacacugugccc

SEQ ID NO: 2495252 - RNA, 13 nt, Human
cccaacacugugc

SEQ ID NO: 2495253 - RNA, 12 nt, Human
cccaacacugug

SEQ ID NO: 2495254 - RNA, 23 nt, Human
cccaacagcgacauagcccaucc

SEQ ID NO: 2495255 - RNA, 19 nt, Human
cccaacagcgacauagccc

SEQ ID NO: 2495256 - RNA, 19 nt, Human
cccaacagaugcuuuucug

SEQ ID NO: 2495257 - RNA, 22 nt, Human
cccaacacugugcccuggugga

SEQ ID NO: 2495258 - RNA, 17 nt, Human
cccaacaggaggacaau

SEQ ID NO: 2495259 - RNA, 16 nt, Human
cccaacaggaggacaa

SEQ ID NO: 2495260 - RNA, 16 nt, Human
cccaacagugugaagu

SEQ ID NO: 2495261 - RNA, 15 nt, Human
cccaacagugugaag

SEQ ID NO: 2495262 - RNA, 14 nt, Human
cccaacagugugaa

SEQ ID NO: 2495263 - RNA, 13 nt, Human
cccaacaguguga

SEQ ID NO: 2495264 - RNA, 12 nt, Human
cccaacagugug

SEQ ID NO: 2495265 - RNA, 20 nt, Human
cccaacaggaggacaauuca

SEQ ID NO: 2495266 - RNA, 19 nt, Human
cccaacaggaggacaauuc

SEQ ID NO: 2495267 - RNA, 18 nt, Human
cccaacaggaggacaauu

SEQ ID NO: 2495268 - RNA, 19 nt, Human
cccaacagugugaaguuag

SEQ ID NO: 2495269 - RNA, 12 nt, Human
cccaaccccagc

SEQ ID NO: 2495270 - RNA, 14 nt, Human
cccaagggccuggc

SEQ ID NO: 2495271 - RNA, 12 nt, Human
cccaagggccug

SEQ ID NO: 2495272 - RNA, 16 nt, Human
cccaaccccugaggaa

SEQ ID NO: 2495273 - RNA, 15 nt, Human
cccaaccccugagga

SEQ ID NO: 2495274 - RNA, 14 nt, Human
cccaaccccugagg

SEQ ID NO: 2495275 - RNA, 13 nt, Human
cccaaccccugag

SEQ ID NO: 2495276 - RNA, 12 nt, Human
cccaaccccuga

SEQ ID NO: 2495277 - RNA, 15 nt, Human
cccaacccccagcac

SEQ ID NO: 2495278 - RNA, 14 nt, Human
cccaacccccagca

SEQ ID NO: 2495279 - RNA, 13 nt, Human
cccaacccccagc

SEQ ID NO: 2495280 - RNA, 12 nt, Human
cccaacccccac

SEQ ID NO: 2495281 - RNA, 13 nt, Human
cccaacccccacc

SEQ ID NO: 2495282 - RNA, 12 nt, Human
cccaacccccag

SEQ ID NO: 2495283 - RNA, 22 nt, Human
cccaaccccagccgcucggagg

SEQ ID NO: 2495284 - RNA, 14 nt, Human
cccaacccccaccc

SEQ ID NO: 2495285 - RNA, 20 nt, Human
ccauuuugcugucccuuuuc

SEQ ID NO: 2495286 - RNA, 13 nt, Human
ccauuuucugugg

SEQ ID NO: 2495287 - RNA, 12 nt, Human
ccauuuucugug

SEQ ID NO: 2495288 - RNA, 14 nt, Human
ccauuuugcaaaau

SEQ ID NO: 2495289 - RNA, 17 nt, Human
ccauuuugcaaaauuuc

SEQ ID NO: 2495290 - RNA, 21 nt, Human
ccauuuugcaaaauuuccagu

SEQ ID NO: 2495291 - RNA, 16 nt, Human
ccauuuugcccuucca

SEQ ID NO: 2495292 - RNA, 21 nt, Human
ccauuuuguauuuuacuaaua

SEQ ID NO: 2495293 - RNA, 12 nt, Human
ccauuuugugaa

SEQ ID NO: 2495294 - RNA, 14 nt, Human
ccauuuugugaaug

SEQ ID NO: 2495295 - RNA, 13 nt, Human
ccauuuugugaau

SEQ ID NO: 2495296 - RNA, 19 nt, Human
ccauuuugcccuuccauag

SEQ ID NO: 2495297 - RNA, 12 nt, Human
ccauuuuuuccu

SEQ ID NO: 2495298 - RNA, 19 nt, Human
ccauuuuuuaaggaaacaa

SEQ ID NO: 2495299 - RNA, 17 nt, Human
ccauuuuuuaaggaaac

SEQ ID NO: 2495300 - RNA, 11 nt, Human
ccauuuuuccu

SEQ ID NO: 2495301 - RNA, 19 nt, Human
cccaagggcaaaauuccca

SEQ ID NO: 2495302 - RNA, 23 nt, Human
cccaagggaucugguccuaccca

SEQ ID NO: 2495303 - RNA, 13 nt, Human
cccaagggaucug

SEQ ID NO: 2495304 - RNA, 12 nt, Human
cccaaggggcag

SEQ ID NO: 2495305 - RNA, 16 nt, Human
cccaagggccuggccu

SEQ ID NO: 2495306 - RNA, 22 nt, Human
cccaagggcaaaauucccaggg

SEQ ID NO: 2495307 - RNA, 21 nt, Human
cccaagggcaaaauucccagg

SEQ ID NO: 2495308 - RNA, 15 nt, Human
cccaaggggcagucu

SEQ ID NO: 2495309 - RNA, 21 nt, Human
cccaaggggcagucuggaggg

SEQ ID NO: 2495310 - RNA, 22 nt, Human
cccaaguagggggucuaaaauu

SEQ ID NO: 2495311 - RNA, 23 nt, Human
cccaagguuuaaacuucucugaa

SEQ ID NO: 2495312 - RNA, 12 nt, Human
cccaaguccaaa

SEQ ID NO: 2495313 - RNA, 20 nt, Human
cccaaguccaaauguuuaca

SEQ ID NO: 2495314 - RNA, 18 nt, Human
cccaagucccuguuuucu

SEQ ID NO: 2495315 - RNA, 19 nt, Human
cccacacuugagaggauga

SEQ ID NO: 2495316 - RNA, 23 nt, Human
cccacagaaagacugagcucaag

SEQ ID NO: 2495317 - RNA, 19 nt, Human
cccacacuuguuccagcuc

SEQ ID NO: 2495318 - RNA, 21 nt, Human
cccacagaaagacugagcuca

SEQ ID NO: 2495319 - RNA, 19 nt, Human
cccacacuggggugccgcc

SEQ ID NO: 2495320 - RNA, 14 nt, Human
cccacacuccuaca

SEQ ID NO: 2495321 - RNA, 11 nt, Human
cccacacuccu

SEQ ID NO: 2495322 - RNA, 22 nt, Human
cccacacuggggugccgccugc

SEQ ID NO: 2495323 - RNA, 17 nt, Human
cccacacuuguuccagc

SEQ ID NO: 2495324 - RNA, 17 nt, Human
cccaaguccugaagagg

SEQ ID NO: 2495325 - RNA, 16 nt, Human
cccaaguccugaagag

SEQ ID NO: 2495326 - RNA, 13 nt, Human
cccaaguccugaa

SEQ ID NO: 2495327 - RNA, 23 nt, Human
cccaagucccuguuuucugagcc

SEQ ID NO: 2495328 - RNA, 23 nt, Human
cccaaguccugaagaggcgggcc

SEQ ID NO: 2495329 - RNA, 15 nt, Human
cccaagugccagucu

SEQ ID NO: 2495330 - RNA, 18 nt, Human
cccaagugccagucuugu

SEQ ID NO: 2495331 - RNA, 16 nt, Human
cccaaguggcagagcu

SEQ ID NO: 2495332 - RNA, 14 nt, Human
cccaagugggggca

SEQ ID NO: 2495333 - RNA, 19 nt, Human
cccaagugggggcagaggg

SEQ ID NO: 2495334 - RNA, 18 nt, Human
cccacaggcccuuccucu

SEQ ID NO: 2495335 - RNA, 16 nt, Human
cccacaggcccuuccu

SEQ ID NO: 2495336 - RNA, 15 nt, Human
cccacagugcugucu

SEQ ID NO: 2495337 - RNA, 23 nt, Human
cccacagugacucgggcuccugu

SEQ ID NO: 2495338 - RNA, 22 nt, Human
cccacagugacucgggcuccug

SEQ ID NO: 2495339 - RNA, 13 nt, Human
cccacaggcagcu

SEQ ID NO: 2495340 - RNA, 12 nt, Human
cccacaggcagc

SEQ ID NO: 2495341 - RNA, 14 nt, Human
cccacaggcagcuu

SEQ ID NO: 2495342 - RNA, 16 nt, Human
cccacaucccaggcuu

SEQ ID NO: 2495343 - RNA, 14 nt, Human
cccacaucccaggc

SEQ ID NO: 2495344 - RNA, 13 nt, Human
cccacaucccagg

SEQ ID NO: 2495345 - RNA, 20 nt, Human
cccacaucccaggcuucacc

SEQ ID NO: 2495346 - RNA, 19 nt, Human
cccacauagugaugguucc

SEQ ID NO: 2495347 - RNA, 13 nt, Human
cccacaggaucag

SEQ ID NO: 2495348 - RNA, 17 nt, Human
cccacaggaucagucug

SEQ ID NO: 2495349 - RNA, 22 nt, Human
cccacagcccacguccugucag

SEQ ID NO: 2495350 - RNA, 19 nt, Human
cccacagcccacguccugu

SEQ ID NO: 2495351 - RNA, 18 nt, Human
cccacagcccacguccug

SEQ ID NO: 2495352 - RNA, 15 nt, Human
cccacagcccacguc

SEQ ID NO: 2495353 - RNA, 11 nt, Human
cccacagccca

SEQ ID NO: 2495354 - RNA, 13 nt, Human
cccacagacucaa

SEQ ID NO: 2495355 - RNA, 23 nt, Human
cccacagacucaaaugcucagac

SEQ ID NO: 2495356 - RNA, 22 nt, Human
ccagauuggcucacacugagaa

SEQ ID NO: 2495357 - RNA, 21 nt, Human
ccagauuggcucacacugaga

SEQ ID NO: 2495358 - RNA, 20 nt, Human
ccagauuggcucacacugag

SEQ ID NO: 2495359 - RNA, 19 nt, Human
ccagauuggcucacacuga

SEQ ID NO: 2495360 - RNA, 15 nt, Human
ccagauuucacucuc

SEQ ID NO: 2495361 - RNA, 19 nt, Human
ccagauuucacucuccuug

SEQ ID NO: 2495362 - RNA, 18 nt, Human
ccagauuucacucuccuu

SEQ ID NO: 2495363 - RNA, 22 nt, Human
ccagauugcaacaggcugggcu

SEQ ID NO: 2495364 - RNA, 18 nt, Human
ccagauugcaacaggcug

SEQ ID NO: 2495365 - RNA, 19 nt, Human
ccagauugacgacaagugc

SEQ ID NO: 2495366 - RNA, 18 nt, Human
ccagauugacgacaagug

SEQ ID NO: 2495367 - RNA, 21 nt, Human
ccagauugacgacaagugcug

SEQ ID NO: 2495368 - RNA, 16 nt, Human
ccagauuggcucacac

SEQ ID NO: 2495369 - RNA, 23 nt, Human
ccagauugcaacaggcugggcuu

SEQ ID NO: 2495370 - RNA, 13 nt, Human
ccagauugacgac

SEQ ID NO: 2495371 - RNA, 19 nt, Human
ccagagcgugggagacggu

SEQ ID NO: 2495372 - RNA, 21 nt, Human
ccagagcgccccucccuagug

SEQ ID NO: 2495373 - RNA, 16 nt, Human
ccagauugcaacaggc

SEQ ID NO: 2495374 - RNA, 14 nt, Human
ccagauugcaacag

SEQ ID NO: 2495375 - RNA, 14 nt, Human
ccagagcccaccuu

SEQ ID NO: 2495376 - RNA, 17 nt, Human
ccagagcccagcuccaa

SEQ ID NO: 2495377 - RNA, 18 nt, Human
ccagagcccagcuccaag

SEQ ID NO: 2495378 - RNA, 21 nt, Human
ccagagccauggacucuacac

SEQ ID NO: 2495379 - RNA, 13 nt, Human
ccagagccaugga

SEQ ID NO: 2495380 - RNA, 15 nt, Human
ccagagccauggacu

SEQ ID NO: 2495381 - RNA, 16 nt, Human
ccagagcccagcucca

SEQ ID NO: 2495382 - RNA, 14 nt, Human
ccagagccccacac

SEQ ID NO: 2495383 - RNA, 18 nt, Human
ccagagccccacacggag

SEQ ID NO: 2495384 - RNA, 19 nt, Human
ccagagccccacacggagg

SEQ ID NO: 2495385 - RNA, 18 nt, Human
ccagcaccaucucuccuc

SEQ ID NO: 2495386 - RNA, 17 nt, Human
ccagcaccaucucuccu

SEQ ID NO: 2495387 - RNA, 20 nt, Human
ccagcacccgggcucaggga

SEQ ID NO: 2495388 - RNA, 18 nt, Human
ccagcacccgggcucagg

SEQ ID NO: 2495389 - RNA, 23 nt, Human
ccagcacccgggcucagggacca

SEQ ID NO: 2495390 - RNA, 22 nt, Human
ccagcaccauccgccagggccc

SEQ ID NO: 2495391 - RNA, 14 nt, Human
ccagcacccagcaa

SEQ ID NO: 2495392 - RNA, 14 nt, Human
ccagcacccgggcu

SEQ ID NO: 2495393 - RNA, 17 nt, Human
ccagcacccgggcucag

SEQ ID NO: 2495394 - RNA, 18 nt, Human
ccagcacccagcaacucc

SEQ ID NO: 2495395 - RNA, 18 nt, Human
ccagcaggcucucaggcc

SEQ ID NO: 2495396 - RNA, 17 nt, Human
ccagcaggcucucaggc

SEQ ID NO: 2495397 - RNA, 16 nt, Human
ccagcaggcucucagg

SEQ ID NO: 2495398 - RNA, 15 nt, Human
ccagcaccuggcauc

SEQ ID NO: 2495399 - RNA, 19 nt, Human
ccagcaagugagagcuggg

SEQ ID NO: 2495400 - RNA, 18 nt, Human
ccagcaagugagagcugg

SEQ ID NO: 2495401 - RNA, 21 nt, Human
ccagcaacacaagcuggaagc

SEQ ID NO: 2495402 - RNA, 17 nt, Human
ccagcaagugagagcug

SEQ ID NO: 2495403 - RNA, 17 nt, Human
ccagcacagcuugaccu

SEQ ID NO: 2495404 - RNA, 13 nt, Human
ccagcacagcuug

SEQ ID NO: 2495405 - RNA, 19 nt, Human
ccagcaccaacaccacggu

SEQ ID NO: 2495406 - RNA, 13 nt, Human
ccagcacaugaaa

SEQ ID NO: 2495407 - RNA, 16 nt, Human
ccagcacacagggcag

SEQ ID NO: 2495408 - RNA, 17 nt, Human
ccagcaacccuccuauc

SEQ ID NO: 2495409 - RNA, 21 nt, Human
ccagcaauucuccugccucag

SEQ ID NO: 2495410 - RNA, 15 nt, Human
ccagcaacccuccua

SEQ ID NO: 2495411 - RNA, 15 nt, Human
ccagcaacacaagcu

SEQ ID NO: 2495412 - RNA, 22 nt, Human
ccagcaaagccccaugcuggag

SEQ ID NO: 2495413 - RNA, 21 nt, Human
ccagcaaagccccaugcugga

SEQ ID NO: 2495414 - RNA, 19 nt, Human
ccagcaaagccccaugcug

SEQ ID NO: 2495415 - RNA, 14 nt, Human
ccagcaaagcccca

SEQ ID NO: 2495416 - RNA, 13 nt, Human
ccagcaaagcccc

SEQ ID NO: 2495417 - RNA, 15 nt, Human
ccagcaaaagguugu

SEQ ID NO: 2495418 - RNA, 21 nt, Human
ccagcaaagagugggcugcau

SEQ ID NO: 2495419 - RNA, 16 nt, Human
ccagauuuuuacacau

SEQ ID NO: 2495420 - RNA, 15 nt, Human
ccagauuuugcugua

SEQ ID NO: 2495421 - RNA, 24 nt, Human
ccagauuuuuuacagcugccugca

SEQ ID NO: 2495422 - RNA, 18 nt, Human
ccagauuuugcuguauau

SEQ ID NO: 2495423 - RNA, 21 nt, Human
ccagauuugcuaauuuauccu

SEQ ID NO: 2495424 - RNA, 13 nt, Human
ccagauuuacacu

SEQ ID NO: 2495425 - RNA, 22 nt, Human
ccagccgagauagccaaggcca

SEQ ID NO: 2495426 - RNA, 20 nt, Human
ccagccgagauagccaaggc

SEQ ID NO: 2495427 - RNA, 20 nt, Human
ccagcccuggucucagcagc

SEQ ID NO: 2495428 - RNA, 13 nt, Human
ccagcccuggucu

SEQ ID NO: 2495429 - RNA, 21 nt, Human
ccagcccuggcugaaggacug

SEQ ID NO: 2495430 - RNA, 17 nt, Human
ccagccgagauagccaa

SEQ ID NO: 2495431 - RNA, 22 nt, Human
ccagccggccucucuggccucc

SEQ ID NO: 2495432 - RNA, 20 nt, Human
ccagccggccucucuggccu

SEQ ID NO: 2495433 - RNA, 14 nt, Human
ccagccggccucuc

SEQ ID NO: 2495434 - RNA, 13 nt, Human
ccagccggccucu

SEQ ID NO: 2495435 - RNA, 14 nt, Human
ccagccggcauggc

SEQ ID NO: 2495436 - RNA, 13 nt, Human
ccagccggcaugg

SEQ ID NO: 2495437 - RNA, 19 nt, Human
ccagccgugaugcucaggc

SEQ ID NO: 2495438 - RNA, 18 nt, Human
ccagccgugaugcucagg

SEQ ID NO: 2495439 - RNA, 22 nt, Human
ccagccgguaccugggaagggg

SEQ ID NO: 2495440 - RNA, 23 nt, Human
ccagccggccucucuggccuccc

SEQ ID NO: 2495441 - RNA, 16 nt, Human
ccagccgcugcccggc

SEQ ID NO: 2495442 - RNA, 14 nt, Human
ccagccgcugcccg

SEQ ID NO: 2495443 - RNA, 23 nt, Human
ccagccgcugcccggcgcccucu

SEQ ID NO: 2495444 - RNA, 19 nt, Human
ccagccgcucggaggcccc

SEQ ID NO: 2495445 - RNA, 16 nt, Human
ccagccgcucggaggc

SEQ ID NO: 2495446 - RNA, 20 nt, Human
ccagccgccauugccaccag

SEQ ID NO: 2495447 - RNA, 23 nt, Human
ccagccgccauugccaccaggag

SEQ ID NO: 2495448 - RNA, 18 nt, Human
ccagcccuggcugaagga

SEQ ID NO: 2495449 - RNA, 17 nt, Human
ccagcccuggcugaagg

SEQ ID NO: 2495450 - RNA, 14 nt, Human
ccagcccuggcuga

SEQ ID NO: 2495451 - RNA, 17 nt, Human
ccagcccuggcucugca

SEQ ID NO: 2495452 - RNA, 13 nt, Human
ccagcccuggcuc

SEQ ID NO: 2495453 - RNA, 21 nt, Human
ccagcccugcuggccgccuca

SEQ ID NO: 2495454 - RNA, 18 nt, Human
ccagcccugcuggccgcc

SEQ ID NO: 2495455 - RNA, 16 nt, Human
ccagcccugcuggccg

SEQ ID NO: 2495456 - RNA, 24 nt, Human
ccagcccugcuggccgccucaccc

SEQ ID NO: 2495457 - RNA, 15 nt, Human
ccagcccugcuggcc

SEQ ID NO: 2495458 - RNA, 14 nt, Human
ccagcccugcuggc

SEQ ID NO: 2495459 - RNA, 13 nt, Human
ccagcccugcugg

SEQ ID NO: 2495460 - RNA, 11 nt, Human
ccagcccugcu

SEQ ID NO: 2495461 - RNA, 14 nt, Human
ccagcccugaguuc

SEQ ID NO: 2495462 - RNA, 18 nt, Human
ccagcccugaguuccuag

SEQ ID NO: 2495463 - RNA, 19 nt, Human
ccagccccaaaacucuccu

SEQ ID NO: 2495464 - RNA, 22 nt, Human
ccagcccauucucucuccuguc

SEQ ID NO: 2495465 - RNA, 17 nt, Human
ccagcccauucucucuc

SEQ ID NO: 2495466 - RNA, 19 nt, Human
ccagcccauucucucuccu

SEQ ID NO: 2495467 - RNA, 21 nt, Human
ccagcccauucucucuccugu

SEQ ID NO: 2495468 - RNA, 19 nt, Human
ccagcccagggcuccugca

SEQ ID NO: 2495469 - RNA, 17 nt, Human
ccagcccagggcuccug

SEQ ID NO: 2495470 - RNA, 21 nt, Human
ccagcccagggcuccugcacu

SEQ ID NO: 2495471 - RNA, 18 nt, Human
ccagcccagcccagcugg

SEQ ID NO: 2495472 - RNA, 12 nt, Human
ccagcccagggu

SEQ ID NO: 2495473 - RNA, 14 nt, Human
ccagcccagggugg

SEQ ID NO: 2495474 - RNA, 18 nt, Human
ccagcccaggguuccccc

SEQ ID NO: 2495475 - RNA, 21 nt, Human
ccagcccaggguucccccagc

SEQ ID NO: 2495476 - RNA, 14 nt, Human
ccagcccaagucca

SEQ ID NO: 2495477 - RNA, 14 nt, Human
ccagcccacccucc

SEQ ID NO: 2495478 - RNA, 13 nt, Human
ccagcccacccuc

SEQ ID NO: 2495479 - RNA, 19 nt, Human
ccagcccacccuccugucu

SEQ ID NO: 2495480 - RNA, 18 nt, Human
ccagcccacccuccuguc

SEQ ID NO: 2495481 - RNA, 22 nt, Human
ccagcccacccuccugucuucc

SEQ ID NO: 2495482 - RNA, 17 nt, Human
ccagcccacuucugcca

SEQ ID NO: 2495483 - RNA, 16 nt, Human
ccagcccacuucugcc

SEQ ID NO: 2495484 - RNA, 11 nt, Human
ccagcccagag

SEQ ID NO: 2495485 - RNA, 12 nt, Human
ccagcccagaga

SEQ ID NO: 2495486 - RNA, 13 nt, Human
ccagcccagagac

SEQ ID NO: 2495487 - RNA, 14 nt, Human
ccagcccagagaca

SEQ ID NO: 2495488 - RNA, 22 nt, Human
ccagcccagagacauacuugaa

SEQ ID NO: 2495489 - RNA, 23 nt, Human
ccagcccagagacauacuugaag

SEQ ID NO: 2495490 - RNA, 14 nt, Human
ccagcccagauguu

SEQ ID NO: 2495491 - RNA, 15 nt, Human
ccagcccagauguuu

SEQ ID NO: 2495492 - RNA, 12 nt, Human
ccagcccagccc

SEQ ID NO: 2495493 - RNA, 14 nt, Human
ccagcccagcccag

SEQ ID NO: 2495494 - RNA, 13 nt, Human
ccagcccagcugg

SEQ ID NO: 2495495 - RNA, 15 nt, Human
ccagcccagggcucc

SEQ ID NO: 2495496 - RNA, 14 nt, Human
ccagcccagggcuc

SEQ ID NO: 2495497 - RNA, 13 nt, Human
ccagcccagggcu

SEQ ID NO: 2495498 - RNA, 16 nt, Human
ccagcccagcccagcu

SEQ ID NO: 2495499 - RNA, 23 nt, Human
ccagcaggcucucaggccagcug

SEQ ID NO: 2495500 - RNA, 21 nt, Human
ccagcaggcucucaggccagc

SEQ ID NO: 2495501 - RNA, 20 nt, Human
ccagcaggcucucaggccag

SEQ ID NO: 2495502 - RNA, 19 nt, Human
ccagcaggcucucaggcca

SEQ ID NO: 2495503 - RNA, 22 nt, Human
ccagccauacuuaucucucugu

SEQ ID NO: 2495504 - RNA, 15 nt, Human
ccagccaucugccca

SEQ ID NO: 2495505 - RNA, 18 nt, Human
ccagccaucugcccaggg

SEQ ID NO: 2495506 - RNA, 17 nt, Human
ccagccaucugcccagg

SEQ ID NO: 2495507 - RNA, 16 nt, Human
ccagccaucugcccag

SEQ ID NO: 2495508 - RNA, 23 nt, Human
ccagcagggucuuuucaucuggg

SEQ ID NO: 2495509 - RNA, 22 nt, Human
ccagcagggucuuuucaucugg

SEQ ID NO: 2495510 - RNA, 21 nt, Human
ccagcagggucuuuucaucug

SEQ ID NO: 2495511 - RNA, 20 nt, Human
ccagcagggucuuuucaucu

SEQ ID NO: 2495512 - RNA, 16 nt, Human
ccagccaucaaaaugc

SEQ ID NO: 2495513 - RNA, 18 nt, Human
ccagccaucaaaaugcuu

SEQ ID NO: 2495514 - RNA, 21 nt, Human
ccagccaucugcccaggggug

SEQ ID NO: 2495515 - RNA, 20 nt, Human
ccagccaucugcccaggggu

SEQ ID NO: 2495516 - RNA, 19 nt, Human
ccagccaucugcccagggg

SEQ ID NO: 2495517 - RNA, 14 nt, Human
ccagccaugucugc

SEQ ID NO: 2495518 - RNA, 16 nt, Human
ccagccaugucugcau

SEQ ID NO: 2495519 - RNA, 17 nt, Human
ccagccaugucugcauu

SEQ ID NO: 2495520 - RNA, 18 nt, Human
ccagccaugucugcauuu

SEQ ID NO: 2495521 - RNA, 21 nt, Human
ccagccauuaccauggagaca

SEQ ID NO: 2495522 - RNA, 13 nt, Human
ccagcccaagucc

SEQ ID NO: 2495523 - RNA, 12 nt, Human
ccagcccaaguc

SEQ ID NO: 2495524 - RNA, 19 nt, Human
ccagccauuaccauggaga

SEQ ID NO: 2495525 - RNA, 19 nt, Human
ccagccugccuggcaggcu

SEQ ID NO: 2495526 - RNA, 18 nt, Human
ccagccugccuggcaggc

SEQ ID NO: 2495527 - RNA, 16 nt, Human
ccagccugccuggcag

SEQ ID NO: 2495528 - RNA, 23 nt, Human
ccagccgugaugcucaggcuuga

SEQ ID NO: 2495529 - RNA, 21 nt, Human
ccagccgugaugcucaggcuu

SEQ ID NO: 2495530 - RNA, 20 nt, Human
ccagccgugaugcucaggcu

SEQ ID NO: 2495531 - RNA, 21 nt, Human
ccagccugccuggcaggcugu

SEQ ID NO: 2495532 - RNA, 20 nt, Human
ccagccugccuggcaggcug

SEQ ID NO: 2495533 - RNA, 10 nt, Human
ccagccugcc

SEQ ID NO: 2495534 - RNA, 19 nt, Human
ccagccugagcgacaguga

SEQ ID NO: 2495535 - RNA, 17 nt, Human
ccagccuaagaugaaga

SEQ ID NO: 2495536 - RNA, 23 nt, Human
ccagccuggcucccacaggcagc

SEQ ID NO: 2495537 - RNA, 21 nt, Human
ccagccuggcucccacaggca

SEQ ID NO: 2495538 - RNA, 12 nt, Human
ccagccuggcuc

SEQ ID NO: 2495539 - RNA, 21 nt, Human
ccagccuggcuucuggagccc

SEQ ID NO: 2495540 - RNA, 19 nt, Human
ccagccuggcuucuggagc

SEQ ID NO: 2495541 - RNA, 20 nt, Human
ccagccuggcuucuggagcc

SEQ ID NO: 2495542 - RNA, 13 nt, Human
ccagccuggcuuc

SEQ ID NO: 2495543 - RNA, 15 nt, Human
ccagccuggcuucug

SEQ ID NO: 2495544 - RNA, 17 nt, Human
ccagccuggcuucugga

SEQ ID NO: 2495545 - RNA, 18 nt, Human
ccagccuggcuucuggag

SEQ ID NO: 2495546 - RNA, 19 nt, Human
ccagccugggcaacagagc

SEQ ID NO: 2495547 - RNA, 16 nt, Human
ccagccugggcagcca

SEQ ID NO: 2495548 - RNA, 18 nt, Human
ccagccugggcagccagg

SEQ ID NO: 2495549 - RNA, 22 nt, Human
ccagccugggcagccaggcugc

SEQ ID NO: 2495550 - RNA, 23 nt, Human
ccagccugggcagccaggcugcc

SEQ ID NO: 2495551 - RNA, 13 nt, Human
ccagccuggguga

SEQ ID NO: 2495552 - RNA, 19 nt, Human
ccagccugggcgacagagc

SEQ ID NO: 2495553 - RNA, 23 nt, Human
ccagccuugaccauucuccaccu

SEQ ID NO: 2495554 - RNA, 18 nt, Human
ccagccuuggcaucuaga

SEQ ID NO: 2495555 - RNA, 15 nt, Human
ccagccuuucuccca

SEQ ID NO: 2495556 - RNA, 18 nt, Human
ccagccuuucucccaggc

SEQ ID NO: 2495557 - RNA, 19 nt, Human
ccagccuuucucccaggcc

SEQ ID NO: 2495558 - RNA, 20 nt, Human
ccagccuuucucccaggcca

SEQ ID NO: 2495559 - RNA, 21 nt, Human
ccagccuuucucccaggccag

SEQ ID NO: 2495560 - RNA, 16 nt, Human
ccagccuuccucugca

SEQ ID NO: 2495561 - RNA, 15 nt, Human
ccagccuuccucugc

SEQ ID NO: 2495562 - RNA, 20 nt, Human
ccagccuguuggacccgcuc

SEQ ID NO: 2495563 - RNA, 14 nt, Human
ccagccuguuggac

SEQ ID NO: 2495564 - RNA, 23 nt, Human
ccagccugucccauggacacucc

SEQ ID NO: 2495565 - RNA, 19 nt, Human
ccagccugucccauggaca

SEQ ID NO: 2495566 - RNA, 13 nt, Human
ccagccugggguc

SEQ ID NO: 2495567 - RNA, 16 nt, Human
ccagccugggcgacag

SEQ ID NO: 2495568 - RNA, 13 nt, Human
ccagcgagcccug

SEQ ID NO: 2495569 - RNA, 16 nt, Human
ccagcucccucuauuu

SEQ ID NO: 2495570 - RNA, 20 nt, Human
ccagccuuugaucagguggg

SEQ ID NO: 2495571 - RNA, 18 nt, Human
ccagcuccggccuguccu

SEQ ID NO: 2495572 - RNA, 19 nt, Human
ccagcuccggccuguccuc

SEQ ID NO: 2495573 - RNA, 20 nt, Human
ccagcuccucccuuguucuc

SEQ ID NO: 2495574 - RNA, 14 nt, Human
ccagcuccucccuu

SEQ ID NO: 2495575 - RNA, 23 nt, Human
ccagcuccucauccagggcucug

SEQ ID NO: 2495576 - RNA, 20 nt, Human
ccagcuccggccuguccucc

SEQ ID NO: 2495577 - RNA, 12 nt, Human
ccagcuccucau

SEQ ID NO: 2495578 - RNA, 23 nt, Human
ccacccuccugucuucccagggu

SEQ ID NO: 2495579 - RNA, 22 nt, Human
ccacccuccugucuucccaggg

SEQ ID NO: 2495580 - RNA, 21 nt, Human
ccacccuccugucuucccagg

SEQ ID NO: 2495581 - RNA, 20 nt, Human
ccacccuccugucuucccag

SEQ ID NO: 2495582 - RNA, 19 nt, Human
ccacccuccugucuuccca

SEQ ID NO: 2495583 - RNA, 17 nt, Human
ccacccuccugucuucc

SEQ ID NO: 2495584 - RNA, 15 nt, Human
ccacccuccugucuu

SEQ ID NO: 2495585 - RNA, 14 nt, Human
ccacccuccugucu

SEQ ID NO: 2495586 - RNA, 14 nt, Human
ccacccuccuuuca

SEQ ID NO: 2495587 - RNA, 22 nt, Human
ccaccccugccuccacccucug

SEQ ID NO: 2495588 - RNA, 18 nt, Human
ccaccccugccuccaccc

SEQ ID NO: 2495589 - RNA, 16 nt, Human
ccaccccugccuccac

SEQ ID NO: 2495590 - RNA, 15 nt, Human
ccaccccugccucca

SEQ ID NO: 2495591 - RNA, 17 nt, Human
ccaccccugggggcucu

SEQ ID NO: 2495592 - RNA, 12 nt, Human
ccaccccugugc

SEQ ID NO: 2495593 - RNA, 20 nt, Human
ccaccccugggggcucucau

SEQ ID NO: 2495594 - RNA, 14 nt, Human
ccaccccugccucc

SEQ ID NO: 2495595 - RNA, 12 nt, Human
ccaccccugccu

SEQ ID NO: 2495596 - RNA, 22 nt, Human
ccaccccugcccccagccccgg

SEQ ID NO: 2495597 - RNA, 13 nt, Human
ccaccccugcccc

SEQ ID NO: 2495598 - RNA, 14 nt, Human
ccaccccuccccau

SEQ ID NO: 2495599 - RNA, 15 nt, Human
ccaccccuccuuccu

SEQ ID NO: 2495600 - RNA, 16 nt, Human
ccaccccuccuuccuu

SEQ ID NO: 2495601 - RNA, 13 nt, Human
ccacccuccuguc

SEQ ID NO: 2495602 - RNA, 12 nt, Human
ccacccuccugu

SEQ ID NO: 2495603 - RNA, 17 nt, Human
ccacccucccuggagug

SEQ ID NO: 2495604 - RNA, 16 nt, Human
ccacccucccuggagu

SEQ ID NO: 2495605 - RNA, 13 nt, Human
ccaccccuugcuc

SEQ ID NO: 2495606 - RNA, 15 nt, Human
ccaccccuuccuguc

SEQ ID NO: 2495607 - RNA, 14 nt, Human
ccaccccuuccugu

SEQ ID NO: 2495608 - RNA, 15 nt, Human
ccaccccugugcucc

SEQ ID NO: 2495609 - RNA, 14 nt, Human
ccaccccugugcuc

SEQ ID NO: 2495610 - RNA, 13 nt, Human
ccaccccugugcu

SEQ ID NO: 2495611 - RNA, 13 nt, Human
ccaccccuucccc

SEQ ID NO: 2495612 - RNA, 15 nt, Human
ccaccccuuccccac

SEQ ID NO: 2495613 - RNA, 13 nt, Human
ccaccccuuccug

SEQ ID NO: 2495614 - RNA, 16 nt, Human
ccaccccuuccccacu

SEQ ID NO: 2495615 - RNA, 16 nt, Human
ccacccccagcucaau

SEQ ID NO: 2495616 - RNA, 13 nt, Human
ccacccccagcuc

SEQ ID NO: 2495617 - RNA, 15 nt, Human
ccacccccaccccca

SEQ ID NO: 2495618 - RNA, 19 nt, Human
ccacccccacccaagggcc

SEQ ID NO: 2495619 - RNA, 16 nt, Human
ccacccccaggacccc

SEQ ID NO: 2495620 - RNA, 18 nt, Human
ccacccccaggaccccug

SEQ ID NO: 2495621 - RNA, 19 nt, Human
ccacccccaggaccccuga

SEQ ID NO: 2495622 - RNA, 18 nt, Human
ccaccccccacucugugc

SEQ ID NO: 2495623 - RNA, 15 nt, Human
ccacccccagcugcu

SEQ ID NO: 2495624 - RNA, 22 nt, Human
ccaccccccagaaccuguccuu

SEQ ID NO: 2495625 - RNA, 21 nt, Human
ccaccccccagaaccuguccu

SEQ ID NO: 2495626 - RNA, 15 nt, Human
ccacccccucaagcc

SEQ ID NO: 2495627 - RNA, 14 nt, Human
ccacccccucaagc

SEQ ID NO: 2495628 - RNA, 12 nt, Human
ccacccccucaa

SEQ ID NO: 2495629 - RNA, 13 nt, Human
ccaccccccucau

SEQ ID NO: 2495630 - RNA, 16 nt, Human
ccacccccuccccagg

SEQ ID NO: 2495631 - RNA, 17 nt, Human
ccacccccuccccaggg

SEQ ID NO: 2495632 - RNA, 18 nt, Human
ccacccccuccccagggg

SEQ ID NO: 2495633 - RNA, 19 nt, Human
ccacccccuccccagggga

SEQ ID NO: 2495634 - RNA, 15 nt, Human
ccacccccugcccug

SEQ ID NO: 2495635 - RNA, 14 nt, Human
ccacccccugcccu

SEQ ID NO: 2495636 - RNA, 13 nt, Human
ccacccccugccc

SEQ ID NO: 2495637 - RNA, 22 nt, Human
ccacccccucccuggccuguuc

SEQ ID NO: 2495638 - RNA, 17 nt, Human
ccacccccugcccugca

SEQ ID NO: 2495639 - RNA, 16 nt, Human
ccacccccugcccugc

SEQ ID NO: 2495640 - RNA, 18 nt, Human
ccacccccugcccugcac

SEQ ID NO: 2495641 - RNA, 12 nt, Human
ccacccccuuca

SEQ ID NO: 2495642 - RNA, 17 nt, Human
ccacccccuucagugcc

SEQ ID NO: 2495643 - RNA, 18 nt, Human
ccacccccuucagugccc

SEQ ID NO: 2495644 - RNA, 20 nt, Human
ccacccccuucagugcccac

SEQ ID NO: 2495645 - RNA, 22 nt, Human
ccacccccuucagugcccacca

SEQ ID NO: 2495646 - RNA, 13 nt, Human
ccacccccuucuc

SEQ ID NO: 2495647 - RNA, 18 nt, Human
ccacccccuucucugcuc

SEQ ID NO: 2495648 - RNA, 19 nt, Human
ccacccccuucucugcucc

SEQ ID NO: 2495649 - RNA, 22 nt, Human
ccaccugggcauauccaccacc

SEQ ID NO: 2495650 - RNA, 14 nt, Human
ccaccuggggcagu

SEQ ID NO: 2495651 - RNA, 20 nt, Human
ccaccuggggcagucaccug

SEQ ID NO: 2495652 - RNA, 15 nt, Human
ccaccuggggcaguc

SEQ ID NO: 2495653 - RNA, 16 nt, Human
ccaccuggggcaguca

SEQ ID NO: 2495654 - RNA, 17 nt, Human
ccaccuucaauuccugg

SEQ ID NO: 2495655 - RNA, 14 nt, Human
ccaccugucuucaa

SEQ ID NO: 2495656 - RNA, 18 nt, Human
ccaccuucaauuccuggg

SEQ ID NO: 2495657 - RNA, 19 nt, Human
ccaccuucaauuccugggc

SEQ ID NO: 2495658 - RNA, 20 nt, Human
ccaccuucaauuccugggcc

SEQ ID NO: 2495659 - RNA, 20 nt, Human
ccaccuggccucugcacucc

SEQ ID NO: 2495660 - RNA, 18 nt, Human
ccaccuggccucugcacu

SEQ ID NO: 2495661 - RNA, 13 nt, Human
ccaccuggccucu

SEQ ID NO: 2495662 - RNA, 21 nt, Human
ccaccuggccccaugucucuc

SEQ ID NO: 2495663 - RNA, 22 nt, Human
ccaccuggccccaugucucuca

SEQ ID NO: 2495664 - RNA, 15 nt, Human
ccaccuggccaccug

SEQ ID NO: 2495665 - RNA, 14 nt, Human
ccaccuggccaccu

SEQ ID NO: 2495666 - RNA, 18 nt, Human
ccaccuggccaccugagg

SEQ ID NO: 2495667 - RNA, 12 nt, Human
ccaccuggcccc

SEQ ID NO: 2495668 - RNA, 14 nt, Human
ccaccugccaggga

SEQ ID NO: 2495669 - RNA, 13 nt, Human
ccaccugccaggg

SEQ ID NO: 2495670 - RNA, 18 nt, Human
ccaccucugugaccucag

SEQ ID NO: 2495671 - RNA, 17 nt, Human
ccaccucugugaccuca

SEQ ID NO: 2495672 - RNA, 15 nt, Human
ccaccucugugaccu

SEQ ID NO: 2495673 - RNA, 20 nt, Human
ccaccucugcggaccccagc

SEQ ID NO: 2495674 - RNA, 19 nt, Human
ccaccucugcggaccccag

SEQ ID NO: 2495675 - RNA, 22 nt, Human
ccaccucugcggaccccagcug

SEQ ID NO: 2495676 - RNA, 23 nt, Human
ccaccucugugaccucaggcacu

SEQ ID NO: 2495677 - RNA, 22 nt, Human
ccaccucugugaccucaggcac

SEQ ID NO: 2495678 - RNA, 19 nt, Human
ccaccucugugaccucagg

SEQ ID NO: 2495679 - RNA, 18 nt, Human
ccaccucuucucuuccug

SEQ ID NO: 2495680 - RNA, 16 nt, Human
ccaccucuucucuucc

SEQ ID NO: 2495681 - RNA, 15 nt, Human
ccaccugccagggac

SEQ ID NO: 2495682 - RNA, 12 nt, Human
ccaccugccagg

SEQ ID NO: 2495683 - RNA, 13 nt, Human
ccaccuggccacc

SEQ ID NO: 2495684 - RNA, 12 nt, Human
ccaccuggccac

SEQ ID NO: 2495685 - RNA, 22 nt, Human
ccaccugcugagagacccaagg

SEQ ID NO: 2495686 - RNA, 23 nt, Human
ccaccugcugagagacccaagga

SEQ ID NO: 2495687 - RNA, 20 nt, Human
ccaccucuucucuuccugua

SEQ ID NO: 2495688 - RNA, 19 nt, Human
ccaccucuucucuuccugu

SEQ ID NO: 2495689 - RNA, 15 nt, Human
ccaccugcugagaga

SEQ ID NO: 2495690 - RNA, 14 nt, Human
ccaccucccugccu

SEQ ID NO: 2495691 - RNA, 16 nt, Human
ccaccucccugccucc

SEQ ID NO: 2495692 - RNA, 18 nt, Human
ccaccucccugccuccag

SEQ ID NO: 2495693 - RNA, 18 nt, Human
ccaccuccuucucugucu

SEQ ID NO: 2495694 - RNA, 17 nt, Human
ccaccuccuucucuguc

SEQ ID NO: 2495695 - RNA, 13 nt, Human
ccaccuccuucuc

SEQ ID NO: 2495696 - RNA, 12 nt, Human
ccaccuccuucu

SEQ ID NO: 2495697 - RNA, 12 nt, Human
ccacccugcucu

SEQ ID NO: 2495698 - RNA, 11 nt, Human
ccacccugcuc

SEQ ID NO: 2495699 - RNA, 13 nt, Human
ccaccucucccuc

SEQ ID NO: 2495700 - RNA, 12 nt, Human
ccaccucucccu

SEQ ID NO: 2495701 - RNA, 17 nt, Human
ccaccucuccccaccuu

SEQ ID NO: 2495702 - RNA, 17 nt, Human
ccaccucuccaagggcu

SEQ ID NO: 2495703 - RNA, 16 nt, Human
ccaccucuccaagggc

SEQ ID NO: 2495704 - RNA, 15 nt, Human
ccaccucuccaaggg

SEQ ID NO: 2495705 - RNA, 14 nt, Human
ccaccucuccaagg

SEQ ID NO: 2495706 - RNA, 13 nt, Human
ccaccucuccaag

SEQ ID NO: 2495707 - RNA, 12 nt, Human
ccaccucuccaa

SEQ ID NO: 2495708 - RNA, 16 nt, Human
ccaccucucucacucc

SEQ ID NO: 2495709 - RNA, 14 nt, Human
ccaccucucucacu

SEQ ID NO: 2495710 - RNA, 20 nt, Human
ccaccucucucacuccuuga

SEQ ID NO: 2495711 - RNA, 19 nt, Human
ccaccucucucacuccuug

SEQ ID NO: 2495712 - RNA, 18 nt, Human
ccaccucugcggacccca

SEQ ID NO: 2495713 - RNA, 13 nt, Human
ccaccucugcgga

SEQ ID NO: 2495714 - RNA, 11 nt, Human
ccaccucugcg

SEQ ID NO: 2495715 - RNA, 10 nt, Human
ccaccucugc

SEQ ID NO: 2495716 - RNA, 24 nt, Human
ccaccucucuccuuugcugaggcc

SEQ ID NO: 2495717 - RNA, 19 nt, Human
ccaccucucuccuuugcug

SEQ ID NO: 2495718 - RNA, 15 nt, Human
ccaccucucuuuuuc

SEQ ID NO: 2495719 - RNA, 17 nt, Human
ccaccucucuccuuugc

SEQ ID NO: 2495720 - RNA, 14 nt, Human
ccaccucucuccuu

SEQ ID NO: 2495721 - RNA, 18 nt, Human
ccaccucucccugacccu

SEQ ID NO: 2495722 - RNA, 17 nt, Human
ccaccucucccugaccc

SEQ ID NO: 2495723 - RNA, 16 nt, Human
ccaccucucccugacc

SEQ ID NO: 2495724 - RNA, 14 nt, Human
ccagacaugccaca

SEQ ID NO: 2495725 - RNA, 20 nt, Human
ccagacaugccacaaggacu

SEQ ID NO: 2495726 - RNA, 14 nt, Human
ccagacaucaacag

SEQ ID NO: 2495727 - RNA, 18 nt, Human
ccagaccccuggcuuuuc

SEQ ID NO: 2495728 - RNA, 24 nt, Human
ccagaccccuggcuuuucacugcu

SEQ ID NO: 2495729 - RNA, 19 nt, Human
ccagacauguggugggaca

SEQ ID NO: 2495730 - RNA, 23 nt, Human
ccagacauguggugggacaggga

SEQ ID NO: 2495731 - RNA, 20 nt, Human
ccagacacauguccaagaag

SEQ ID NO: 2495732 - RNA, 17 nt, Human
ccagacacauguccaag

SEQ ID NO: 2495733 - RNA, 22 nt, Human
ccagacacauguccaagaagcc

SEQ ID NO: 2495734 - RNA, 13 nt, Human
ccagacacccagg

SEQ ID NO: 2495735 - RNA, 10 nt, Human
ccagacaccc

SEQ ID NO: 2495736 - RNA, 15 nt, Human
ccagacacaggcccu

SEQ ID NO: 2495737 - RNA, 17 nt, Human
ccagacagccuguaucu

SEQ ID NO: 2495738 - RNA, 13 nt, Human
ccagacagcuccc

SEQ ID NO: 2495739 - RNA, 20 nt, Human
ccagacagcucccucugccu

SEQ ID NO: 2495740 - RNA, 15 nt, Human
ccagacccggcugcg

SEQ ID NO: 2495741 - RNA, 14 nt, Human
ccagacccggcugc

SEQ ID NO: 2495742 - RNA, 16 nt, Human
ccagagaguggcuccu

SEQ ID NO: 2495743 - RNA, 15 nt, Human
ccagagaguggcucc

SEQ ID NO: 2495744 - RNA, 14 nt, Human
ccagagaguggcuc

SEQ ID NO: 2495745 - RNA, 14 nt, Human
ccagagaguccucu

SEQ ID NO: 2495746 - RNA, 11 nt, Human
ccagagccagg

SEQ ID NO: 2495747 - RNA, 12 nt, Human
ccagagccaggg

SEQ ID NO: 2495748 - RNA, 22 nt, Human
ccagagccaggggggugaggag

SEQ ID NO: 2495749 - RNA, 23 nt, Human
ccagagccaggggggugaggagc

SEQ ID NO: 2495750 - RNA, 23 nt, Human
ccagagcauuuccaacaccacag

SEQ ID NO: 2495751 - RNA, 22 nt, Human
ccagagcauuuccaacaccaca

SEQ ID NO: 2495752 - RNA, 21 nt, Human
ccagagcauuuccaacaccac

SEQ ID NO: 2495753 - RNA, 18 nt, Human
ccagagaguccucuggau

SEQ ID NO: 2495754 - RNA, 17 nt, Human
ccagagaguccucugga

SEQ ID NO: 2495755 - RNA, 15 nt, Human
ccagagaguccucug

SEQ ID NO: 2495756 - RNA, 22 nt, Human
ccagagaguggcuccucccggu

SEQ ID NO: 2495757 - RNA, 18 nt, Human
ccagagaguggcuccucc

SEQ ID NO: 2495758 - RNA, 16 nt, Human
ccagaaugcuguacau

SEQ ID NO: 2495759 - RNA, 17 nt, Human
ccagaaugcuguacauc

SEQ ID NO: 2495760 - RNA, 19 nt, Human
ccagacacaggcccucccu

SEQ ID NO: 2495761 - RNA, 15 nt, Human
ccagaaugaggcugc

SEQ ID NO: 2495762 - RNA, 12 nt, Human
ccagaaucaaag

SEQ ID NO: 2495763 - RNA, 16 nt, Human
ccagaaucuaaagcca

SEQ ID NO: 2495764 - RNA, 21 nt, Human
ccagaauaaguuauugcaguu

SEQ ID NO: 2495765 - RNA, 19 nt, Human
ccagaauaaguuauugcag

SEQ ID NO: 2495766 - RNA, 15 nt, Human
ccagaauaaguuauu

SEQ ID NO: 2495767 - RNA, 23 nt, Human
ccagaauaaguuauugcaguuua

SEQ ID NO: 2495768 - RNA, 22 nt, Human
ccagaauaaguuauugcaguuu

SEQ ID NO: 2495769 - RNA, 15 nt, Human
ccagaagcuuccaua

SEQ ID NO: 2495770 - RNA, 20 nt, Human
ccagaagcugagcaccaggg

SEQ ID NO: 2495771 - RNA, 15 nt, Human
ccagaagccucuggc

SEQ ID NO: 2495772 - RNA, 16 nt, Human
ccagaagccucuggcu

SEQ ID NO: 2495773 - RNA, 19 nt, Human
ccagaagccucuggcuaga

SEQ ID NO: 2495774 - RNA, 20 nt, Human
ccagaagccucuggcuagag

SEQ ID NO: 2495775 - RNA, 14 nt, Human
ccagaagggguuug

SEQ ID NO: 2495776 - RNA, 22 nt, Human
ccagaaggcauaucagucucug

SEQ ID NO: 2495777 - RNA, 15 nt, Human
ccagaagggggccau

SEQ ID NO: 2495778 - RNA, 16 nt, Human
ccagaagcuuccauag

SEQ ID NO: 2495779 - RNA, 12 nt, Human
ccagaaggcagg

SEQ ID NO: 2495780 - RNA, 19 nt, Human
ccacugugcugaauucugc

SEQ ID NO: 2495781 - RNA, 17 nt, Human
ccacugugcugaauucu

SEQ ID NO: 2495782 - RNA, 12 nt, Human
ccacuguguaua

SEQ ID NO: 2495783 - RNA, 14 nt, Human
ccacuguuaucaaa

SEQ ID NO: 2495784 - RNA, 12 nt, Human
ccacuuuuuaac

SEQ ID NO: 2495785 - RNA, 16 nt, Human
ccacugugccaugugc

SEQ ID NO: 2495786 - RNA, 15 nt, Human
ccacugugccaugug

SEQ ID NO: 2495787 - RNA, 22 nt, Human
ccacuguccugggcgcccugga

SEQ ID NO: 2495788 - RNA, 16 nt, Human
ccacuguccugggcgc

SEQ ID NO: 2495789 - RNA, 15 nt, Human
ccacuguccugggcg

SEQ ID NO: 2495790 - RNA, 14 nt, Human
ccacuguccugggc

SEQ ID NO: 2495791 - RNA, 14 nt, Human
ccacugucuucuuc

SEQ ID NO: 2495792 - RNA, 19 nt, Human
ccacugugccaugugccag

SEQ ID NO: 2495793 - RNA, 18 nt, Human
ccagaaaccuuuguuugc

SEQ ID NO: 2495794 - RNA, 16 nt, Human
ccagaaaaggacagaa

SEQ ID NO: 2495795 - RNA, 15 nt, Human
ccagaaaaggacaga

SEQ ID NO: 2495796 - RNA, 14 nt, Human
ccagaaccuguccu

SEQ ID NO: 2495797 - RNA, 19 nt, Human
ccagaaaaaaaaaaacuua

SEQ ID NO: 2495798 - RNA, 15 nt, Human
ccagaaaaccccagc

SEQ ID NO: 2495799 - RNA, 14 nt, Human
ccagaaaaggacag

SEQ ID NO: 2495800 - RNA, 16 nt, Human
ccagaaaaccccagca

SEQ ID NO: 2495801 - RNA, 22 nt, Human
ccagaagaaaauagugguguga

SEQ ID NO: 2495802 - RNA, 15 nt, Human
ccagaagcccagaau

SEQ ID NO: 2495803 - RNA, 12 nt, Human
ccagaacuggac

SEQ ID NO: 2495804 - RNA, 21 nt, Human
ccagaacguggcucugcuggc

SEQ ID NO: 2495805 - RNA, 20 nt, Human
ccagaacguggcucugcugg

SEQ ID NO: 2495806 - RNA, 19 nt, Human
ccagaacucacuggggccu

SEQ ID NO: 2495807 - RNA, 19 nt, Human
ccagaacguggcucugcug

SEQ ID NO: 2495808 - RNA, 18 nt, Human
ccagaacguggcucugcu

SEQ ID NO: 2495809 - RNA, 17 nt, Human
ccagaacaguuuguaca

SEQ ID NO: 2495810 - RNA, 15 nt, Human
ccagaaccuguccuu

SEQ ID NO: 2495811 - RNA, 21 nt, Human
ccacugcaucguuucaucuuc

SEQ ID NO: 2495812 - RNA, 23 nt, Human
ccacugcaucguuucaucuucca

SEQ ID NO: 2495813 - RNA, 11 nt, Human
ccaccuuccca

SEQ ID NO: 2495814 - RNA, 12 nt, Human
ccaccuucccag

SEQ ID NO: 2495815 - RNA, 13 nt, Human
ccaccuucccagc

SEQ ID NO: 2495816 - RNA, 14 nt, Human
ccaccuucccagcu

SEQ ID NO: 2495817 - RNA, 15 nt, Human
ccaccuucccagcuc

SEQ ID NO: 2495818 - RNA, 16 nt, Human
ccaccuucccagcucu

SEQ ID NO: 2495819 - RNA, 19 nt, Human
ccaccuucccagcucuccc

SEQ ID NO: 2495820 - RNA, 14 nt, Human
ccaccuucccaugc

SEQ ID NO: 2495821 - RNA, 14 nt, Human
ccaccuugcgggga

SEQ ID NO: 2495822 - RNA, 21 nt, Human
ccaccuucccagcucucccuc

SEQ ID NO: 2495823 - RNA, 18 nt, Human
ccacugcauaccaaccug

SEQ ID NO: 2495824 - RNA, 16 nt, Human
ccacugccucuuccuc

SEQ ID NO: 2495825 - RNA, 11 nt, Human
ccacugccugc

SEQ ID NO: 2495826 - RNA, 12 nt, Human
ccacugccugcc

SEQ ID NO: 2495827 - RNA, 12 nt, Human
ccacugccuucg

SEQ ID NO: 2495828 - RNA, 17 nt, Human
ccacugccugcccaccc

SEQ ID NO: 2495829 - RNA, 23 nt, Human
ccacugccugcccacccguggag

SEQ ID NO: 2495830 - RNA, 13 nt, Human
ccacugccugccc

SEQ ID NO: 2495831 - RNA, 14 nt, Human
ccacugccugccca

SEQ ID NO: 2495832 - RNA, 15 nt, Human
ccacugccugcccac

SEQ ID NO: 2495833 - RNA, 16 nt, Human
ccacugccugcccacc

SEQ ID NO: 2495834 - RNA, 13 nt, Human
ccacugccucuuc

SEQ ID NO: 2495835 - RNA, 23 nt, Human
ccacugccacacgucugacccuc

SEQ ID NO: 2495836 - RNA, 19 nt, Human
ccacugcauaccaaccugg

SEQ ID NO: 2495837 - RNA, 14 nt, Human
ccacugugaagaga

SEQ ID NO: 2495838 - RNA, 15 nt, Human
ccacugugaagagaa

SEQ ID NO: 2495839 - RNA, 15 nt, Human
ccacuguccugggcc

SEQ ID NO: 2495840 - RNA, 19 nt, Human
ccacuguccugggccugca

SEQ ID NO: 2495841 - RNA, 20 nt, Human
ccacuguccugggccugcag

SEQ ID NO: 2495842 - RNA, 21 nt, Human
ccacuguccugggccugcaga

SEQ ID NO: 2495843 - RNA, 13 nt, Human
ccacuguccuggg

SEQ ID NO: 2495844 - RNA, 12 nt, Human
ccacuguccugg

SEQ ID NO: 2495845 - RNA, 11 nt, Human
ccacuguccug

SEQ ID NO: 2495846 - RNA, 17 nt, Human
ccacugcaggccccgcu

SEQ ID NO: 2495847 - RNA, 23 nt, Human
ccacugucacuguuucucugcug

SEQ ID NO: 2495848 - RNA, 24 nt, Human
ccacugucacuguuucucugcugu

SEQ ID NO: 2495849 - RNA, 15 nt, Human
ccacugguucuucuu

SEQ ID NO: 2495850 - RNA, 17 nt, Human
ccacugucacccuccac

SEQ ID NO: 2495851 - RNA, 19 nt, Human
ccacugucacuguuucucu

SEQ ID NO: 2495852 - RNA, 22 nt, Human
ccacugucacuguuucucugcu

SEQ ID NO: 2495853 - RNA, 23 nt, Human
ccacuggugacaugucuuuucuu

SEQ ID NO: 2495854 - RNA, 22 nt, Human
ccacugggguccagggagcagg

SEQ ID NO: 2495855 - RNA, 19 nt, Human
ccacugggguccagggagc

SEQ ID NO: 2495856 - RNA, 18 nt, Human
ccacugggguccagggag

SEQ ID NO: 2495857 - RNA, 15 nt, Human
ccacugcucugguua

SEQ ID NO: 2495858 - RNA, 13 nt, Human
ccacugcucuggu

SEQ ID NO: 2495859 - RNA, 12 nt, Human
ccacugcucugg

SEQ ID NO: 2495860 - RNA, 11 nt, Human
ccacugcucug

SEQ ID NO: 2495861 - RNA, 21 nt, Human
ccacugccuucgauacaccgg

SEQ ID NO: 2495862 - RNA, 20 nt, Human
ccacugcuuuuggucugugu

SEQ ID NO: 2495863 - RNA, 22 nt, Human
ccacugcuuuuggucuguguga

SEQ ID NO: 2495864 - RNA, 19 nt, Human
ccacugcugcuucuccaug

SEQ ID NO: 2495865 - RNA, 16 nt, Human
ccacugcugcuucucc

SEQ ID NO: 2495866 - RNA, 15 nt, Human
ccacuggaagggcag

SEQ ID NO: 2495867 - RNA, 18 nt, Human
ccuagucucccucacagc

SEQ ID NO: 2495868 - RNA, 14 nt, Human
ccguggcuucccgc

SEQ ID NO: 2495869 - RNA, 17 nt, Human
ccgugaguucucagggc

SEQ ID NO: 2495870 - RNA, 16 nt, Human
ccgugaguucucaggg

SEQ ID NO: 2495871 - RNA, 14 nt, Human
ccgugaguucucag

SEQ ID NO: 2495872 - RNA, 22 nt, Human
ccgggucaucuguaccucugcc

SEQ ID NO: 2495873 - RNA, 23 nt, Human
ccgugaguucucagggcuccugc

SEQ ID NO: 2495874 - RNA, 20 nt, Human
ccgugaguucucagggcucc

SEQ ID NO: 2495875 - RNA, 19 nt, Human
ccgugaguucucagggcuc

SEQ ID NO: 2495876 - RNA, 18 nt, Human
ccgugaguucucagggcu

SEQ ID NO: 2495877 - RNA, 17 nt, Human
ccgugaugcucaggcuu

SEQ ID NO: 2495878 - RNA, 23 nt, Human
ccgugauguaggguaaggugccu

SEQ ID NO: 2495879 - RNA, 13 nt, Human
ccgugcagacugg

SEQ ID NO: 2495880 - RNA, 14 nt, Human
ccgugcagacugga

SEQ ID NO: 2495881 - RNA, 23 nt, Human
ccguggccccagccuggcccagc

SEQ ID NO: 2495882 - RNA, 21 nt, Human
ccguggccccagccuggccca

SEQ ID NO: 2495883 - RNA, 20 nt, Human
ccguggccccagccuggccc

SEQ ID NO: 2495884 - RNA, 19 nt, Human
ccguggccccagccuggcc

SEQ ID NO: 2495885 - RNA, 15 nt, Human
ccgugccccgccucc

SEQ ID NO: 2495886 - RNA, 20 nt, Human
ccgugcccaggggcccacag

SEQ ID NO: 2495887 - RNA, 12 nt, Human
ccgugcccaggg

SEQ ID NO: 2495888 - RNA, 18 nt, Human
ccgugcagcuucuguccu

SEQ ID NO: 2495889 - RNA, 19 nt, Human
ccgugcagcuucuguccug

SEQ ID NO: 2495890 - RNA, 17 nt, Human
ccgugcagacuggaggg

SEQ ID NO: 2495891 - RNA, 19 nt, Human
ccgugcagacuggagggga

SEQ ID NO: 2495892 - RNA, 14 nt, Human
ccguucacauuuuu

SEQ ID NO: 2495893 - RNA, 20 nt, Human
ccguuauuauaauuguauca

SEQ ID NO: 2495894 - RNA, 21 nt, Human
ccguuauuauaauuguaucag

SEQ ID NO: 2495895 - RNA, 11 nt, Human
ccguggcuucc

SEQ ID NO: 2495896 - RNA, 22 nt, Human
ccguggccccagccuggcccag

SEQ ID NO: 2495897 - RNA, 14 nt, Human
ccguggcugcggca

SEQ ID NO: 2495898 - RNA, 18 nt, Human
ccguugauguuggcuggg

SEQ ID NO: 2495899 - RNA, 23 nt, Human
ccguucugcuggccuggaucucc

SEQ ID NO: 2495900 - RNA, 18 nt, Human
ccguucugcuggccugga

SEQ ID NO: 2495901 - RNA, 15 nt, Human
ccguucugcuggccu

SEQ ID NO: 2495902 - RNA, 19 nt, Human
ccguugauguuggcuggga

SEQ ID NO: 2495903 - RNA, 20 nt, Human
ccguugggccccagccuucu

SEQ ID NO: 2495904 - RNA, 11 nt, Human
ccguuggccac

SEQ ID NO: 2495905 - RNA, 23 nt, Human
ccguuggaaacauaaccauuaca

SEQ ID NO: 2495906 - RNA, 18 nt, Human
ccguugucucccuggccc

SEQ ID NO: 2495907 - RNA, 14 nt, Human
ccguugucucccug

SEQ ID NO: 2495908 - RNA, 20 nt, Human
ccguuggggauuggggaaga

SEQ ID NO: 2495909 - RNA, 21 nt, Human
ccguugucucccuggcccuca

SEQ ID NO: 2495910 - RNA, 20 nt, Human
ccguugucucccuggcccuc

SEQ ID NO: 2495911 - RNA, 19 nt, Human
ccguugucucccuggcccu

SEQ ID NO: 2495912 - RNA, 15 nt, Human
ccuaaccccuuuccu

SEQ ID NO: 2495913 - RNA, 12 nt, Human
ccuaaccccuuu

SEQ ID NO: 2495914 - RNA, 15 nt, Human
ccuaacgaaguaucc

SEQ ID NO: 2495915 - RNA, 18 nt, Human
ccuacaggagugagcacu

SEQ ID NO: 2495916 - RNA, 15 nt, Human
ccuacaguguacagu

SEQ ID NO: 2495917 - RNA, 20 nt, Human
ccuaccgagucucuucucca

SEQ ID NO: 2495918 - RNA, 19 nt, Human
ccuaccgagucucuucucc

SEQ ID NO: 2495919 - RNA, 21 nt, Human
ccuaccgagucucuucuccac

SEQ ID NO: 2495920 - RNA, 13 nt, Human
ccuacgcugaaga

SEQ ID NO: 2495921 - RNA, 20 nt, Human
ccuaccgaaaccuugccuuu

SEQ ID NO: 2495922 - RNA, 20 nt, Human
ccuacgucaaacaugaagug

SEQ ID NO: 2495923 - RNA, 16 nt, Human
ccuacuccaaaauguu

SEQ ID NO: 2495924 - RNA, 20 nt, Human
ccuacuacaucgcccuccac

SEQ ID NO: 2495925 - RNA, 21 nt, Human
ccuacgucaaacaugaagugu

SEQ ID NO: 2495926 - RNA, 17 nt, Human
ccuacuacaucgcccuc

SEQ ID NO: 2495927 - RNA, 18 nt, Human
ccuacuacaucgcccucc

SEQ ID NO: 2495928 - RNA, 17 nt, Human
ccuaccgagucucuucu

SEQ ID NO: 2495929 - RNA, 16 nt, Human
ccuaccgagucucuuc

SEQ ID NO: 2495930 - RNA, 17 nt, Human
ccuaccgaaaccuugcc

SEQ ID NO: 2495931 - RNA, 23 nt, Human
ccuacccucgggcccaccuggcc

SEQ ID NO: 2495932 - RNA, 21 nt, Human
ccuacaguugaaaaacagcug

SEQ ID NO: 2495933 - RNA, 20 nt, Human
ccuacaguguacagucuugu

SEQ ID NO: 2495934 - RNA, 16 nt, Human
ccuacaguguacaguc

SEQ ID NO: 2495935 - RNA, 23 nt, Human
ccuaggcauuugcugaauacaga

SEQ ID NO: 2495936 - RNA, 23 nt, Human
ccuaggccacaccaucuccuuuc

SEQ ID NO: 2495937 - RNA, 13 nt, Human
ccuacugaaugcu

SEQ ID NO: 2495938 - RNA, 14 nt, Human
ccuaggccacuccu

SEQ ID NO: 2495939 - RNA, 15 nt, Human
ccuaggccacuccuc

SEQ ID NO: 2495940 - RNA, 16 nt, Human
ccuaggccacuccucc

SEQ ID NO: 2495941 - RNA, 17 nt, Human
ccuaggccacuccucca

SEQ ID NO: 2495942 - RNA, 18 nt, Human
ccuaggccacuccuccaa

SEQ ID NO: 2495943 - RNA, 19 nt, Human
ccuaggccacuccuccaaa

SEQ ID NO: 2495944 - RNA, 20 nt, Human
ccuaggccacuccuccaaag

SEQ ID NO: 2495945 - RNA, 14 nt, Human
ccuaggccucagcc

SEQ ID NO: 2495946 - RNA, 18 nt, Human
ccuaguaagugccuucca

SEQ ID NO: 2495947 - RNA, 16 nt, Human
ccuaguaagugccuuc

SEQ ID NO: 2495948 - RNA, 15 nt, Human
ccuaguaagugccuu

SEQ ID NO: 2495949 - RNA, 19 nt, Human
ccuaguaagugccuuccau

SEQ ID NO: 2495950 - RNA, 16 nt, Human
ccuaguccagugaccu

SEQ ID NO: 2495951 - RNA, 18 nt, Human
ccuaggugacagagugag

SEQ ID NO: 2495952 - RNA, 14 nt, Human
ccuaggcgggcggu

SEQ ID NO: 2495953 - RNA, 19 nt, Human
ccuaggccucagccagaga

SEQ ID NO: 2495954 - RNA, 20 nt, Human
ccuaggccucagccagagaa

SEQ ID NO: 2495955 - RNA, 18 nt, Human
ccuaggccucagccagag

SEQ ID NO: 2495956 - RNA, 20 nt, Human
ccgcucuacaucuucugccu

SEQ ID NO: 2495957 - RNA, 23 nt, Human
cccuuggaaaccugcccugccug

SEQ ID NO: 2495958 - RNA, 14 nt, Human
ccgacugcuuugga

SEQ ID NO: 2495959 - RNA, 20 nt, Human
ccgacuccuggguugagcug

SEQ ID NO: 2495960 - RNA, 17 nt, Human
ccgacgcgucuccuguu

SEQ ID NO: 2495961 - RNA, 16 nt, Human
ccgacgcgucuccugu

SEQ ID NO: 2495962 - RNA, 14 nt, Human
ccgacggagccggg

SEQ ID NO: 2495963 - RNA, 23 nt, Human
ccgacggugggcauuugugaggc

SEQ ID NO: 2495964 - RNA, 19 nt, Human
cccuuggaaaccugcccug

SEQ ID NO: 2495965 - RNA, 18 nt, Human
cccuuggaaaccugcccu

SEQ ID NO: 2495966 - RNA, 22 nt, Human
cccuuggaaaccugcccugccu

SEQ ID NO: 2495967 - RNA, 23 nt, Human
ccgaccucguccucccccugcca

SEQ ID NO: 2495968 - RNA, 22 nt, Human
ccgaccucguccucccccugcc

SEQ ID NO: 2495969 - RNA, 21 nt, Human
ccgagauugcaccacugcacu

SEQ ID NO: 2495970 - RNA, 15 nt, Human
ccgagcaaagaucaa

SEQ ID NO: 2495971 - RNA, 23 nt, Human
ccgagcucguguauccuggggcu

SEQ ID NO: 2495972 - RNA, 11 nt, Human
ccgagcugggg

SEQ ID NO: 2495973 - RNA, 16 nt, Human
ccgagcugggggccau

SEQ ID NO: 2495974 - RNA, 18 nt, Human
ccgagcugggggccauga

SEQ ID NO: 2495975 - RNA, 19 nt, Human
ccgagcugggggccaugag

SEQ ID NO: 2495976 - RNA, 21 nt, Human
ccgagcugggggccaugagcu

SEQ ID NO: 2495977 - RNA, 15 nt, Human
ccgagauugcaccac

SEQ ID NO: 2495978 - RNA, 19 nt, Human
ccgagauugcaccacugca

SEQ ID NO: 2495979 - RNA, 21 nt, Human
ccgagaucacgccacugcacu

SEQ ID NO: 2495980 - RNA, 16 nt, Human
ccgagaguagccgaga

SEQ ID NO: 2495981 - RNA, 20 nt, Human
ccgagaguagccgagagccu

SEQ ID NO: 2495982 - RNA, 21 nt, Human
ccgagaguagccgagagccug

SEQ ID NO: 2495983 - RNA, 22 nt, Human
ccgagaguagccgagagccugc

SEQ ID NO: 2495984 - RNA, 17 nt, Human
ccgacugcuuuggaccu

SEQ ID NO: 2495985 - RNA, 16 nt, Human
ccgacugcuuuggacc

SEQ ID NO: 2495986 - RNA, 13 nt, Human
ccgagagccugcu

SEQ ID NO: 2495987 - RNA, 23 nt, Human
ccgacugcacagcggccccugca

SEQ ID NO: 2495988 - RNA, 14 nt, Human
ccgagagccugcuc

SEQ ID NO: 2495989 - RNA, 15 nt, Human
ccgagagccugcucc

SEQ ID NO: 2495990 - RNA, 21 nt, Human
ccgagaggugggccagucugu

SEQ ID NO: 2495991 - RNA, 19 nt, Human
ccgagaggugggccagucu

SEQ ID NO: 2495992 - RNA, 15 nt, Human
ccgagaggugggcca

SEQ ID NO: 2495993 - RNA, 13 nt, Human
ccgagagggagag

SEQ ID NO: 2495994 - RNA, 20 nt, Human
ccgagagccugcucccccac

SEQ ID NO: 2495995 - RNA, 19 nt, Human
ccgagcuuugaaaauucag

SEQ ID NO: 2495996 - RNA, 15 nt, Human
ccgaggacccagacc

SEQ ID NO: 2495997 - RNA, 13 nt, Human
ccgaggacccaga

SEQ ID NO: 2495998 - RNA, 14 nt, Human
ccgaggaaacucag

SEQ ID NO: 2495999 - RNA, 16 nt, Human
ccgagcuggugcauua

SEQ ID NO: 2496000 - RNA, 17 nt, Human
ccgagcuggugcauuac

SEQ ID NO: 2496001 - RNA, 20 nt, Human
ccgagcuggugcauuacaga

SEQ ID NO: 2496002 - RNA, 19 nt, Human
ccgaggacgcucccugcuc

SEQ ID NO: 2496003 - RNA, 17 nt, Human
ccgaggguccuggcucc

SEQ ID NO: 2496004 - RNA, 17 nt, Human
ccgaggacccagaccca

SEQ ID NO: 2496005 - RNA, 16 nt, Human
ccgaggacccagaccc

SEQ ID NO: 2496006 - RNA, 18 nt, Human
ccgaggacccagacccag

SEQ ID NO: 2496007 - RNA, 19 nt, Human
ccgaggguccuggcuccug

SEQ ID NO: 2496008 - RNA, 21 nt, Human
ccgaggguccuggcuccugag

SEQ ID NO: 2496009 - RNA, 23 nt, Human
ccgaggguccuggcuccugaggg

SEQ ID NO: 2496010 - RNA, 18 nt, Human
ccgagucucuucuccacu

SEQ ID NO: 2496011 - RNA, 16 nt, Human
ccgagucucuucucca

SEQ ID NO: 2496012 - RNA, 20 nt, Human
ccgaguagcugagauuauag

SEQ ID NO: 2496013 - RNA, 14 nt, Human
ccgagucucuucuc

SEQ ID NO: 2496014 - RNA, 16 nt, Human
ccgaguagcugggacu

SEQ ID NO: 2496015 - RNA, 14 nt, Human
ccgaguagcuggga

SEQ ID NO: 2496016 - RNA, 14 nt, Human
ccgcagacaccuug

SEQ ID NO: 2496017 - RNA, 16 nt, Human
ccgcagacaccuugga

SEQ ID NO: 2496018 - RNA, 15 nt, Human
ccgcagacaccuugg

SEQ ID NO: 2496019 - RNA, 20 nt, Human
ccgccgacuuuguacccccc

SEQ ID NO: 2496020 - RNA, 17 nt, Human
ccgccgccucgcccacc

SEQ ID NO: 2496021 - RNA, 16 nt, Human
ccgccgccucgcccac

SEQ ID NO: 2496022 - RNA, 15 nt, Human
ccgccgccucgccca

SEQ ID NO: 2496023 - RNA, 14 nt, Human
ccgccgccucgccc

SEQ ID NO: 2496024 - RNA, 18 nt, Human
ccgccgcuuuucuccucu

SEQ ID NO: 2496025 - RNA, 13 nt, Human
ccgccgcuuuucu

SEQ ID NO: 2496026 - RNA, 14 nt, Human
ccgccucccagccu

SEQ ID NO: 2496027 - RNA, 14 nt, Human
ccgcagaagcagac

SEQ ID NO: 2496028 - RNA, 15 nt, Human
ccgaguccaagcugg

SEQ ID NO: 2496029 - RNA, 22 nt, Human
ccgcagaagccuccccagcuca

SEQ ID NO: 2496030 - RNA, 20 nt, Human
ccgcagaagccuccccagcu

SEQ ID NO: 2496031 - RNA, 16 nt, Human
ccgcagaagccucccc

SEQ ID NO: 2496032 - RNA, 23 nt, Human
ccgcacugggcuuggggaccaga

SEQ ID NO: 2496033 - RNA, 20 nt, Human
ccgagucucuucuccacugg

SEQ ID NO: 2496034 - RNA, 19 nt, Human
ccgagucucuucuccacug

SEQ ID NO: 2496035 - RNA, 14 nt, Human
ccggaggggccugg

SEQ ID NO: 2496036 - RNA, 15 nt, Human
ccggagcuuucaaag

SEQ ID NO: 2496037 - RNA, 21 nt, Human
ccggagcuuucaaagaaggaa

SEQ ID NO: 2496038 - RNA, 16 nt, Human
ccggaggggccuggca

SEQ ID NO: 2496039 - RNA, 15 nt, Human
ccggaggggccuggc

SEQ ID NO: 2496040 - RNA, 14 nt, Human
ccgcuggggccagu

SEQ ID NO: 2496041 - RNA, 16 nt, Human
ccggagcuaacacugg

SEQ ID NO: 2496042 - RNA, 17 nt, Human
ccggagcuaacacuggc

SEQ ID NO: 2496043 - RNA, 19 nt, Human
ccggagcuaacacuggccc

SEQ ID NO: 2496044 - RNA, 20 nt, Human
ccggagcuaacacuggcccc

SEQ ID NO: 2496045 - RNA, 22 nt, Human
ccggagcuaacacuggccccua

SEQ ID NO: 2496046 - RNA, 11 nt, Human
ccgcuggggcc

SEQ ID NO: 2496047 - RNA, 19 nt, Human
ccgcuggagguggggccug

SEQ ID NO: 2496048 - RNA, 11 nt, Human
ccgcuggaggu

SEQ ID NO: 2496049 - RNA, 21 nt, Human
ccgcugggcugagccccuacc

SEQ ID NO: 2496050 - RNA, 19 nt, Human
ccgcugggcugagccccua

SEQ ID NO: 2496051 - RNA, 14 nt, Human
ccgcugggcugagc

SEQ ID NO: 2496052 - RNA, 23 nt, Human
ccgcucggaggccccaaaggaaa

SEQ ID NO: 2496053 - RNA, 22 nt, Human
ccgcucggaggccccaaaggaa

SEQ ID NO: 2496054 - RNA, 21 nt, Human
ccgcucggaggccccaaagga

SEQ ID NO: 2496055 - RNA, 20 nt, Human
ccgcucggaggccccaaagg

SEQ ID NO: 2496056 - RNA, 19 nt, Human
ccgcucuacaucuucugcc

SEQ ID NO: 2496057 - RNA, 18 nt, Human
ccgcucuacaucuucugc

SEQ ID NO: 2496058 - RNA, 23 nt, Human
ccgcugcccggcgcccucugucc

SEQ ID NO: 2496059 - RNA, 20 nt, Human
ccgcugccuaaguggcugcu

SEQ ID NO: 2496060 - RNA, 16 nt, Human
ccgcugcugcugcugc

SEQ ID NO: 2496061 - RNA, 14 nt, Human
ccgcugcugcugcu

SEQ ID NO: 2496062 - RNA, 11 nt, Human
ccgcugcugcu

SEQ ID NO: 2496063 - RNA, 19 nt, Human
ccgcugccuaaguggcugc

SEQ ID NO: 2496064 - RNA, 22 nt, Human
ccgccugcccgucucucuccca

SEQ ID NO: 2496065 - RNA, 21 nt, Human
ccgccugccaguccuagcugc

SEQ ID NO: 2496066 - RNA, 15 nt, Human
ccgccugccaguccu

SEQ ID NO: 2496067 - RNA, 14 nt, Human
ccgccugccagucc

SEQ ID NO: 2496068 - RNA, 22 nt, Human
ccgccugccaguccuagcugca

SEQ ID NO: 2496069 - RNA, 11 nt, Human
ccgccugccag

SEQ ID NO: 2496070 - RNA, 16 nt, Human
ccgccugaaucauucu

SEQ ID NO: 2496071 - RNA, 14 nt, Human
ccgccucugcuggc

SEQ ID NO: 2496072 - RNA, 13 nt, Human
ccgccucucccgu

SEQ ID NO: 2496073 - RNA, 21 nt, Human
ccgccucgcccaccgcaugcc

SEQ ID NO: 2496074 - RNA, 20 nt, Human
ccgccucucccgucagggcc

SEQ ID NO: 2496075 - RNA, 11 nt, Human
ccgccucugcu

SEQ ID NO: 2496076 - RNA, 17 nt, Human
ccgccuccuacagccca

SEQ ID NO: 2496077 - RNA, 18 nt, Human
ccgccucacccccucggg

SEQ ID NO: 2496078 - RNA, 23 nt, Human
ccgccucaaugugguugcaaggc

SEQ ID NO: 2496079 - RNA, 15 nt, Human
ccgccucccagccug

SEQ ID NO: 2496080 - RNA, 19 nt, Human
ccgccucgcccaccgcaug

SEQ ID NO: 2496081 - RNA, 18 nt, Human
ccgccucgcccaccgcau

SEQ ID NO: 2496082 - RNA, 17 nt, Human
ccgccucgcccaccgca

SEQ ID NO: 2496083 - RNA, 15 nt, Human
ccgccucgcccaccg

SEQ ID NO: 2496084 - RNA, 14 nt, Human
ccgccucgcccacc

SEQ ID NO: 2496085 - RNA, 23 nt, Human
ccgccuccccacggccgcuccag

SEQ ID NO: 2496086 - RNA, 20 nt, Human
ccgcucccagugucuuccug

SEQ ID NO: 2496087 - RNA, 15 nt, Human
ccgcucccagugucu

SEQ ID NO: 2496088 - RNA, 12 nt, Human
ccgcuccccagc

SEQ ID NO: 2496089 - RNA, 13 nt, Human
ccgcuccccagcc

SEQ ID NO: 2496090 - RNA, 14 nt, Human
ccgcuccccagccc

SEQ ID NO: 2496091 - RNA, 15 nt, Human
ccgcuccccagccca

SEQ ID NO: 2496092 - RNA, 14 nt, Human
ccgcuccugucugc

SEQ ID NO: 2496093 - RNA, 15 nt, Human
ccgcuccugucugcc

SEQ ID NO: 2496094 - RNA, 17 nt, Human
ccgcuccugucugccag

SEQ ID NO: 2496095 - RNA, 18 nt, Human
ccgcucggaggccccaaa

SEQ ID NO: 2496096 - RNA, 16 nt, Human
ccgcucggaggcccca

SEQ ID NO: 2496097 - RNA, 15 nt, Human
ccgcucggaggcccc

SEQ ID NO: 2496098 - RNA, 16 nt, Human
ccgcuccccagcccag

SEQ ID NO: 2496099 - RNA, 16 nt, Human
ccgccugcccucaugg

SEQ ID NO: 2496100 - RNA, 14 nt, Human
ccgccugcccucau

SEQ ID NO: 2496101 - RNA, 22 nt, Human
ccgccuggaugcggauggccgg

SEQ ID NO: 2496102 - RNA, 12 nt, Human
ccgccuggcaga

SEQ ID NO: 2496103 - RNA, 16 nt, Human
ccgccuggcagaacug

SEQ ID NO: 2496104 - RNA, 21 nt, Human
ccgccuggcagaacugagcuc

SEQ ID NO: 2496105 - RNA, 14 nt, Human
ccgcucccaguguc

SEQ ID NO: 2496106 - RNA, 12 nt, Human
ccgcucccagug

SEQ ID NO: 2496107 - RNA, 15 nt, Human
ccgggcucugccucc

SEQ ID NO: 2496108 - RNA, 14 nt, Human
ccgggcucugccuc

SEQ ID NO: 2496109 - RNA, 13 nt, Human
ccgggcucugccu

SEQ ID NO: 2496110 - RNA, 18 nt, Human
ccgggcucugccucccau

SEQ ID NO: 2496111 - RNA, 21 nt, Human
ccgggguggagcaugggccug

SEQ ID NO: 2496112 - RNA, 23 nt, Human
ccgggguccuguggcaggcagcg

SEQ ID NO: 2496113 - RNA, 20 nt, Human
ccggggugcccacaggccgc

SEQ ID NO: 2496114 - RNA, 18 nt, Human
ccgugaggccagagacac

SEQ ID NO: 2496115 - RNA, 21 nt, Human
ccgggguccuguggcaggcag

SEQ ID NO: 2496116 - RNA, 22 nt, Human
ccgggggcagcucuggaggggg

SEQ ID NO: 2496117 - RNA, 12 nt, Human
ccgggguccugu

SEQ ID NO: 2496118 - RNA, 15 nt, Human
ccggggcuggguugg

SEQ ID NO: 2496119 - RNA, 13 nt, Human
ccggggcuggguu

SEQ ID NO: 2496120 - RNA, 19 nt, Human
ccggggcuggcggcuacuc

SEQ ID NO: 2496121 - RNA, 21 nt, Human
ccggcuccaggcuccuuuagc

SEQ ID NO: 2496122 - RNA, 16 nt, Human
ccggcuccaggcuccu

SEQ ID NO: 2496123 - RNA, 12 nt, Human
ccggagggcccu

SEQ ID NO: 2496124 - RNA, 19 nt, Human
ccggcucccaccgaggcgc

SEQ ID NO: 2496125 - RNA, 16 nt, Human
ccggcuccugugcuuu

SEQ ID NO: 2496126 - RNA, 23 nt, Human
ccggcucgagcaguccugccuca

SEQ ID NO: 2496127 - RNA, 22 nt, Human
ccgggcacucagaagacacuga

SEQ ID NO: 2496128 - RNA, 13 nt, Human
ccgggccacagag

SEQ ID NO: 2496129 - RNA, 22 nt, Human
ccgggcaugguggcgcaagccu

SEQ ID NO: 2496130 - RNA, 19 nt, Human
cccucugcccagcuugggc

SEQ ID NO: 2496131 - RNA, 18 nt, Human
cccucugcccagcuuggg

SEQ ID NO: 2496132 - RNA, 23 nt, Human
cccucugcccagcuugggcccag

SEQ ID NO: 2496133 - RNA, 13 nt, Human
cccucugccccau

SEQ ID NO: 2496134 - RNA, 12 nt, Human
cccucugcccug

SEQ ID NO: 2496135 - RNA, 13 nt, Human
cccucugcccugc

SEQ ID NO: 2496136 - RNA, 14 nt, Human
cccucugcccugcg

SEQ ID NO: 2496137 - RNA, 16 nt, Human
cccucugcccagcuug

SEQ ID NO: 2496138 - RNA, 15 nt, Human
cccucugcccagcuu

SEQ ID NO: 2496139 - RNA, 14 nt, Human
cccucugcccagcu

SEQ ID NO: 2496140 - RNA, 13 nt, Human
cccucugcccagc

SEQ ID NO: 2496141 - RNA, 12 nt, Human
cccucugcccag

SEQ ID NO: 2496142 - RNA, 19 nt, Human
cccucugccaccagagacc

SEQ ID NO: 2496143 - RNA, 19 nt, Human
cccucugcccacucccugc

SEQ ID NO: 2496144 - RNA, 18 nt, Human
cccucugcccacucccug

SEQ ID NO: 2496145 - RNA, 15 nt, Human
cccucugcccacucc

SEQ ID NO: 2496146 - RNA, 14 nt, Human
cccucuccuuccug

SEQ ID NO: 2496147 - RNA, 11 nt, Human
cccucugccca

SEQ ID NO: 2496148 - RNA, 18 nt, Human
cccucuccauaaccccac

SEQ ID NO: 2496149 - RNA, 13 nt, Human
cccucucccagga

SEQ ID NO: 2496150 - RNA, 16 nt, Human
cccucuaaagcaauaa

SEQ ID NO: 2496151 - RNA, 23 nt, Human
cccucgugguccccaacagcgac

SEQ ID NO: 2496152 - RNA, 21 nt, Human
cccucucaggugaccaaaauc

SEQ ID NO: 2496153 - RNA, 22 nt, Human
cccucucaggcaugccugugug

SEQ ID NO: 2496154 - RNA, 21 nt, Human
cccucucaggcaugccugugu

SEQ ID NO: 2496155 - RNA, 20 nt, Human
cccucguggccagcccggcu

SEQ ID NO: 2496156 - RNA, 19 nt, Human
cccucguggccagcccggc

SEQ ID NO: 2496157 - RNA, 17 nt, Human
cccucguggccagcccg

SEQ ID NO: 2496158 - RNA, 16 nt, Human
cccucguggccagccc

SEQ ID NO: 2496159 - RNA, 20 nt, Human
cccucgugguccccaacagc

SEQ ID NO: 2496160 - RNA, 18 nt, Human
cccucgugguccccaaca

SEQ ID NO: 2496161 - RNA, 15 nt, Human
cccucguggccuucc

SEQ ID NO: 2496162 - RNA, 16 nt, Human
cccucguggccuuccc

SEQ ID NO: 2496163 - RNA, 13 nt, Human
cccucuccgagcu

SEQ ID NO: 2496164 - RNA, 21 nt, Human
cccucuccccccccccuccaa

SEQ ID NO: 2496165 - RNA, 19 nt, Human
cccucuccccccccccucc

SEQ ID NO: 2496166 - RNA, 11 nt, Human
cccucucccug

SEQ ID NO: 2496167 - RNA, 22 nt, Human
cccucuugccccaacccccagc

SEQ ID NO: 2496168 - RNA, 19 nt, Human
cccucuugccccaaccccc

SEQ ID NO: 2496169 - RNA, 18 nt, Human
cccucuugccccaacccc

SEQ ID NO: 2496170 - RNA, 13 nt, Human
cccucuugcccca

SEQ ID NO: 2496171 - RNA, 12 nt, Human
cccucuugcccc

SEQ ID NO: 2496172 - RNA, 19 nt, Human
cccucuugacccaucuccc

SEQ ID NO: 2496173 - RNA, 22 nt, Human
cccucuugacccaucucccccu

SEQ ID NO: 2496174 - RNA, 20 nt, Human
cccucuucucaagugccuua

SEQ ID NO: 2496175 - RNA, 16 nt, Human
cccucuucucaagugc

SEQ ID NO: 2496176 - RNA, 15 nt, Human
cccucuucucaagug

SEQ ID NO: 2496177 - RNA, 12 nt, Human
cccucuuucccu

SEQ ID NO: 2496178 - RNA, 18 nt, Human
cccucuuggucuucccag

SEQ ID NO: 2496179 - RNA, 22 nt, Human
cccucuugccccccaccccagc

SEQ ID NO: 2496180 - RNA, 23 nt, Human
cccucuugccccaacccccagca

SEQ ID NO: 2496181 - RNA, 16 nt, Human
cccucuugccccccac

SEQ ID NO: 2496182 - RNA, 21 nt, Human
cccucuuuggcuccccuguac

SEQ ID NO: 2496183 - RNA, 20 nt, Human
cccucuuuggcuccccugua

SEQ ID NO: 2496184 - RNA, 19 nt, Human
cccucuuuggcuccccugu

SEQ ID NO: 2496185 - RNA, 17 nt, Human
cccucuuuggcuccccu

SEQ ID NO: 2496186 - RNA, 17 nt, Human
cccucuuucccucccuu

SEQ ID NO: 2496187 - RNA, 20 nt, Human
cccucuuucccucccuuccu

SEQ ID NO: 2496188 - RNA, 13 nt, Human
cccucuuccauca

SEQ ID NO: 2496189 - RNA, 20 nt, Human
cccucuguuucucuuuccuu

SEQ ID NO: 2496190 - RNA, 18 nt, Human
cccucuguugccaggcua

SEQ ID NO: 2496191 - RNA, 11 nt, Human
cccucuuccau

SEQ ID NO: 2496192 - RNA, 20 nt, Human
cccucuguucugcacacagc

SEQ ID NO: 2496193 - RNA, 21 nt, Human
cccucuguucugcacacagca

SEQ ID NO: 2496194 - RNA, 20 nt, Human
cccucuguguauuugcuuuu

SEQ ID NO: 2496195 - RNA, 16 nt, Human
cccucuggcuccagcu

SEQ ID NO: 2496196 - RNA, 17 nt, Human
cccucuggcuccagcug

SEQ ID NO: 2496197 - RNA, 12 nt, Human
cccucuggcucc

SEQ ID NO: 2496198 - RNA, 18 nt, Human
cccucugccccauccucc

SEQ ID NO: 2496199 - RNA, 21 nt, Human
cccucugccugaaccuuccau

SEQ ID NO: 2496200 - RNA, 22 nt, Human
cccucuggcuccagcuggccgg

SEQ ID NO: 2496201 - RNA, 16 nt, Human
cccucuggcccugccu

SEQ ID NO: 2496202 - RNA, 13 nt, Human
cccucugggcacu

SEQ ID NO: 2496203 - RNA, 15 nt, Human
cccucugccccaucc

SEQ ID NO: 2496204 - RNA, 13 nt, Human
cccucugccuguc

SEQ ID NO: 2496205 - RNA, 13 nt, Human
cccgcucagcccu

SEQ ID NO: 2496206 - RNA, 12 nt, Human
cccgcucagccc

SEQ ID NO: 2496207 - RNA, 12 nt, Human
cccucccacagc

SEQ ID NO: 2496208 - RNA, 14 nt, Human
cccgcucagcccuc

SEQ ID NO: 2496209 - RNA, 14 nt, Human
cccucccacagcgc

SEQ ID NO: 2496210 - RNA, 12 nt, Human
cccucccaccac

SEQ ID NO: 2496211 - RNA, 14 nt, Human
cccucccaccacag

SEQ ID NO: 2496212 - RNA, 12 nt, Human
cccucccaccca

SEQ ID NO: 2496213 - RNA, 17 nt, Human
cccucccaccacagcag

SEQ ID NO: 2496214 - RNA, 15 nt, Human
cccucccacccaccg

SEQ ID NO: 2496215 - RNA, 14 nt, Human
cccucccacccacc

SEQ ID NO: 2496216 - RNA, 12 nt, Human
cccucccacccc

SEQ ID NO: 2496217 - RNA, 13 nt, Human
cccucccaccccc

SEQ ID NO: 2496218 - RNA, 20 nt, Human
cccucccagcugacaguccu

SEQ ID NO: 2496219 - RNA, 17 nt, Human
cccucccagcugacagu

SEQ ID NO: 2496220 - RNA, 13 nt, Human
cccucccagcuga

SEQ ID NO: 2496221 - RNA, 24 nt, Human
cccuccccucucuugcacccgccu

SEQ ID NO: 2496222 - RNA, 16 nt, Human
cccuccccucucuugc

SEQ ID NO: 2496223 - RNA, 13 nt, Human
cccuccccugcca

SEQ ID NO: 2496224 - RNA, 17 nt, Human
cccucccaccucuguga

SEQ ID NO: 2496225 - RNA, 15 nt, Human
cccucccaccucugu

SEQ ID NO: 2496226 - RNA, 14 nt, Human
cccucccaccucug

SEQ ID NO: 2496227 - RNA, 13 nt, Human
cccucccaccucu

SEQ ID NO: 2496228 - RNA, 19 nt, Human
cccucccaccucugugacc

SEQ ID NO: 2496229 - RNA, 12 nt, Human
cccucccagcug

SEQ ID NO: 2496230 - RNA, 15 nt, Human
cccucccgccccuuc

SEQ ID NO: 2496231 - RNA, 14 nt, Human
cccucccgccccuu

SEQ ID NO: 2496232 - RNA, 15 nt, Human
cccuccccuggggac

SEQ ID NO: 2496233 - RNA, 16 nt, Human
cccuccccugcugcag

SEQ ID NO: 2496234 - RNA, 13 nt, Human
cccuccccugccc

SEQ ID NO: 2496235 - RNA, 14 nt, Human
cccuccccugcccu

SEQ ID NO: 2496236 - RNA, 14 nt, Human
cccuccccugcugc

SEQ ID NO: 2496237 - RNA, 13 nt, Human
cccuccccugcug

SEQ ID NO: 2496238 - RNA, 16 nt, Human
cccuccccugcccuag

SEQ ID NO: 2496239 - RNA, 23 nt, Human
cccucgugccagucgcgcugccu

SEQ ID NO: 2496240 - RNA, 22 nt, Human
cccucgugccagucgcgcugcc

SEQ ID NO: 2496241 - RNA, 15 nt, Human
cccucguggccagcc

SEQ ID NO: 2496242 - RNA, 14 nt, Human
cccucguggccagc

SEQ ID NO: 2496243 - RNA, 13 nt, Human
cccucguggccag

SEQ ID NO: 2496244 - RNA, 16 nt, Human
cccucgugccagucgc

SEQ ID NO: 2496245 - RNA, 14 nt, Human
cccucgugccaguc

SEQ ID NO: 2496246 - RNA, 13 nt, Human
cccucgugccagu

SEQ ID NO: 2496247 - RNA, 16 nt, Human
cccucccuggcuccca

SEQ ID NO: 2496248 - RNA, 19 nt, Human
cccucccuggcucccauga

SEQ ID NO: 2496249 - RNA, 14 nt, Human
cccucccuggagug

SEQ ID NO: 2496250 - RNA, 13 nt, Human
cccucccuggagu

SEQ ID NO: 2496251 - RNA, 12 nt, Human
cccucccuggag

SEQ ID NO: 2496252 - RNA, 14 nt, Human
cccucccugcuuca

SEQ ID NO: 2496253 - RNA, 15 nt, Human
cccucccuggccugu

SEQ ID NO: 2496254 - RNA, 17 nt, Human
cccucccuggccuguuc

SEQ ID NO: 2496255 - RNA, 14 nt, Human
cccucccuggcucc

SEQ ID NO: 2496256 - RNA, 14 nt, Human
cccucccugccccu

SEQ ID NO: 2496257 - RNA, 22 nt, Human
cccucccgucuacucauucccc

SEQ ID NO: 2496258 - RNA, 16 nt, Human
cccucccucagccccu

SEQ ID NO: 2496259 - RNA, 19 nt, Human
cccucccugcuguccccuc

SEQ ID NO: 2496260 - RNA, 17 nt, Human
cccucccugcugucccc

SEQ ID NO: 2496261 - RNA, 15 nt, Human
cccucccugcugucc

SEQ ID NO: 2496262 - RNA, 14 nt, Human
cccucccugcuguc

SEQ ID NO: 2496263 - RNA, 13 nt, Human
cccucccugcugu

SEQ ID NO: 2496264 - RNA, 12 nt, Human
cccucccugcug

SEQ ID NO: 2496265 - RNA, 23 nt, Human
cccucccgccccuucccacucac

SEQ ID NO: 2496266 - RNA, 16 nt, Human
cccucccgccccuucc

SEQ ID NO: 2496267 - RNA, 16 nt, Human
cccucccggcauggga

SEQ ID NO: 2496268 - RNA, 13 nt, Human
cccucccucagcc

SEQ ID NO: 2496269 - RNA, 23 nt, Human
cccucccucuuucccucccuucc

SEQ ID NO: 2496270 - RNA, 16 nt, Human
cccuggugcugccaca

SEQ ID NO: 2496271 - RNA, 21 nt, Human
cccugaggcagguccccagac

SEQ ID NO: 2496272 - RNA, 18 nt, Human
cccugaggcaggucccca

SEQ ID NO: 2496273 - RNA, 20 nt, Human
cccugaggcagguccccaga

SEQ ID NO: 2496274 - RNA, 12 nt, Human
cccugaggccca

SEQ ID NO: 2496275 - RNA, 17 nt, Human
cccugaggcaggucccc

SEQ ID NO: 2496276 - RNA, 14 nt, Human
cccugaaaacccag

SEQ ID NO: 2496277 - RNA, 19 nt, Human
cccugaggagccaggccgg

SEQ ID NO: 2496278 - RNA, 22 nt, Human
cccugccucucaucaacugaau

SEQ ID NO: 2496279 - RNA, 11 nt, Human
cccugccuccu

SEQ ID NO: 2496280 - RNA, 14 nt, Human
cccugccucucugc

SEQ ID NO: 2496281 - RNA, 13 nt, Human
cccugccucucug

SEQ ID NO: 2496282 - RNA, 13 nt, Human
cccugcauccccu

SEQ ID NO: 2496283 - RNA, 16 nt, Human
cccugcaucugaccag

SEQ ID NO: 2496284 - RNA, 18 nt, Human
cccugcaucugaccagca

SEQ ID NO: 2496285 - RNA, 19 nt, Human
cccugcaucugaccagcag

SEQ ID NO: 2496286 - RNA, 12 nt, Human
cccugcaucccc

SEQ ID NO: 2496287 - RNA, 13 nt, Human
cccugccggccgg

SEQ ID NO: 2496288 - RNA, 13 nt, Human
cccugccgccuca

SEQ ID NO: 2496289 - RNA, 14 nt, Human
cccugccgccucaa

SEQ ID NO: 2496290 - RNA, 15 nt, Human
cccugccuccacccu

SEQ ID NO: 2496291 - RNA, 14 nt, Human
cccugccuccaccc

SEQ ID NO: 2496292 - RNA, 12 nt, Human
cccugccuccac

SEQ ID NO: 2496293 - RNA, 21 nt, Human
cccugccuccacccucugagc

SEQ ID NO: 2496294 - RNA, 20 nt, Human
cccugccuccacccucugag

SEQ ID NO: 2496295 - RNA, 19 nt, Human
cccugccuccacccucuga

SEQ ID NO: 2496296 - RNA, 16 nt, Human
cccugccuccacccuc

SEQ ID NO: 2496297 - RNA, 22 nt, Human
cccugccuccacccucugagcu

SEQ ID NO: 2496298 - RNA, 15 nt, Human
cccugcugcaggggc

SEQ ID NO: 2496299 - RNA, 13 nt, Human
cccugcugcaggg

SEQ ID NO: 2496300 - RNA, 21 nt, Human
cccugcuccucccuggcugcc

SEQ ID NO: 2496301 - RNA, 23 nt, Human
cccugcugagucccaggcugagc

SEQ ID NO: 2496302 - RNA, 22 nt, Human
cccugcugcaggggcucuggag

SEQ ID NO: 2496303 - RNA, 21 nt, Human
cccugcugcaggggcucugga

SEQ ID NO: 2496304 - RNA, 19 nt, Human
cccugcugcaggggcucug

SEQ ID NO: 2496305 - RNA, 16 nt, Human
cccugcugcaggggcu

SEQ ID NO: 2496306 - RNA, 19 nt, Human
cccugcugccgccucccag

SEQ ID NO: 2496307 - RNA, 14 nt, Human
cccugcugccuccc

SEQ ID NO: 2496308 - RNA, 16 nt, Human
cccugcugccucccca

SEQ ID NO: 2496309 - RNA, 20 nt, Human
cccugcugccgccucccagc

SEQ ID NO: 2496310 - RNA, 22 nt, Human
cccugcugccgccucccagccu

SEQ ID NO: 2496311 - RNA, 23 nt, Human
cccugcugccgccucccagccug

SEQ ID NO: 2496312 - RNA, 11 nt, Human
cccugcugccu

SEQ ID NO: 2496313 - RNA, 12 nt, Human
cccugcugccuc

SEQ ID NO: 2496314 - RNA, 20 nt, Human
cccugcuccucccuggcugc

SEQ ID NO: 2496315 - RNA, 19 nt, Human
cccugcuccucccuggcug

SEQ ID NO: 2496316 - RNA, 18 nt, Human
cccugcuccucccuggcu

SEQ ID NO: 2496317 - RNA, 17 nt, Human
cccugcuccucccuggc

SEQ ID NO: 2496318 - RNA, 16 nt, Human
cccugcuccucccugg

SEQ ID NO: 2496319 - RNA, 15 nt, Human
cccugcuccucccug

SEQ ID NO: 2496320 - RNA, 13 nt, Human
cccugcuccuccc

SEQ ID NO: 2496321 - RNA, 21 nt, Human
cccugcucuccgaccagacac

SEQ ID NO: 2496322 - RNA, 22 nt, Human
cccugcuccucccuggcugccc

SEQ ID NO: 2496323 - RNA, 21 nt, Human
cccugcugagucccaggcuga

SEQ ID NO: 2496324 - RNA, 22 nt, Human
cccugcucuccgaccagacacc

SEQ ID NO: 2496325 - RNA, 15 nt, Human
cccugccucucugca

SEQ ID NO: 2496326 - RNA, 23 nt, Human
cccugccuggggcgggccccuca

SEQ ID NO: 2496327 - RNA, 13 nt, Human
cccugccugguca

SEQ ID NO: 2496328 - RNA, 22 nt, Human
cccugccuuaucuugcacccca

SEQ ID NO: 2496329 - RNA, 17 nt, Human
cccugcgaaggggcccu

SEQ ID NO: 2496330 - RNA, 21 nt, Human
cccugcgaaggggcccugguc

SEQ ID NO: 2496331 - RNA, 19 nt, Human
cccugcgaaggggcccugg

SEQ ID NO: 2496332 - RNA, 20 nt, Human
cccugcgaaggggcccuggu

SEQ ID NO: 2496333 - RNA, 22 nt, Human
cccugcgggugaacaaagcagc

SEQ ID NO: 2496334 - RNA, 15 nt, Human
cccugcguggggaca

SEQ ID NO: 2496335 - RNA, 22 nt, Human
cccugcggccccgucuguggcu

SEQ ID NO: 2496336 - RNA, 17 nt, Human
cccugcgguagauggga

SEQ ID NO: 2496337 - RNA, 19 nt, Human
cccugcgggucacaggagg

SEQ ID NO: 2496338 - RNA, 21 nt, Human
cccugcgggucacaggaggga

SEQ ID NO: 2496339 - RNA, 21 nt, Human
cccugcuccacgucugcgccg

SEQ ID NO: 2496340 - RNA, 16 nt, Human
cccugcucaguaaagc

SEQ ID NO: 2496341 - RNA, 17 nt, Human
cccugcucccucccauc

SEQ ID NO: 2496342 - RNA, 19 nt, Human
cccugcuccagaagauagc

SEQ ID NO: 2496343 - RNA, 23 nt, Human
cccuugcccagggcucagccugg

SEQ ID NO: 2496344 - RNA, 21 nt, Human
cccuugcccagggcucagccu

SEQ ID NO: 2496345 - RNA, 22 nt, Human
cccuugcccagggcucagccug

SEQ ID NO: 2496346 - RNA, 14 nt, Human
cccuugcccagggc

SEQ ID NO: 2496347 - RNA, 15 nt, Human
cccuugcccagggcu

SEQ ID NO: 2496348 - RNA, 19 nt, Human
cccuugcccagggcucagc

SEQ ID NO: 2496349 - RNA, 20 nt, Human
cccuugcccagggcucagcc

SEQ ID NO: 2496350 - RNA, 12 nt, Human
cccuugcccagg

SEQ ID NO: 2496351 - RNA, 15 nt, Human
cccuugccagacaug

SEQ ID NO: 2496352 - RNA, 20 nt, Human
cccuugagcuccccaaaaac

SEQ ID NO: 2496353 - RNA, 13 nt, Human
cccuugccagaca

SEQ ID NO: 2496354 - RNA, 19 nt, Human
cccuugccuccccauuucc

SEQ ID NO: 2496355 - RNA, 18 nt, Human
cccuugccuccccauuuc

SEQ ID NO: 2496356 - RNA, 15 nt, Human
cccuugccuccccau

SEQ ID NO: 2496357 - RNA, 13 nt, Human
cccuugccucccc

SEQ ID NO: 2496358 - RNA, 23 nt, Human
cccuugccuccccauuucccauc

SEQ ID NO: 2496359 - RNA, 20 nt, Human
cccuugccuccccauuuccc

SEQ ID NO: 2496360 - RNA, 12 nt, Human
cccuugccuccc

SEQ ID NO: 2496361 - RNA, 12 nt, Human
cccuugcccuga

SEQ ID NO: 2496362 - RNA, 13 nt, Human
cccuugcccugac

SEQ ID NO: 2496363 - RNA, 18 nt, Human
cccuugcucuccccugcc

SEQ ID NO: 2496364 - RNA, 17 nt, Human
cccuuggaaaccugccc

SEQ ID NO: 2496365 - RNA, 13 nt, Human
cccuuggaaaccu

SEQ ID NO: 2496366 - RNA, 19 nt, Human
cccuugcucuccccugccc

SEQ ID NO: 2496367 - RNA, 21 nt, Human
cccuuccccuacccccuccuc

SEQ ID NO: 2496368 - RNA, 22 nt, Human
cccuuccccucccuggcuccca

SEQ ID NO: 2496369 - RNA, 13 nt, Human
cccuuccccuccu

SEQ ID NO: 2496370 - RNA, 13 nt, Human
cccuucccucacc

SEQ ID NO: 2496371 - RNA, 15 nt, Human
cccuucccugcaaac

SEQ ID NO: 2496372 - RNA, 15 nt, Human
cccuucccugucccu

SEQ ID NO: 2496373 - RNA, 14 nt, Human
cccuucccuguccc

SEQ ID NO: 2496374 - RNA, 13 nt, Human
cccuucccugucc

SEQ ID NO: 2496375 - RNA, 13 nt, Human
cccuucccugcaa

SEQ ID NO: 2496376 - RNA, 17 nt, Human
cccuuccccgagggaug

SEQ ID NO: 2496377 - RNA, 14 nt, Human
cccuuccccgaggg

SEQ ID NO: 2496378 - RNA, 12 nt, Human
cccuuccccucc

SEQ ID NO: 2496379 - RNA, 14 nt, Human
cccuuccccucccu

SEQ ID NO: 2496380 - RNA, 15 nt, Human
cccuuccccucccug

SEQ ID NO: 2496381 - RNA, 16 nt, Human
cccuuccccucccugg

SEQ ID NO: 2496382 - RNA, 17 nt, Human
cccuuccccucccuggc

SEQ ID NO: 2496383 - RNA, 19 nt, Human
cccuuccccucccuggcuc

SEQ ID NO: 2496384 - RNA, 22 nt, Human
cccuugagaaaccuuauuguac

SEQ ID NO: 2496385 - RNA, 14 nt, Human
cccuugagaaaccu

SEQ ID NO: 2496386 - RNA, 16 nt, Human
cccuucccugucccuc

SEQ ID NO: 2496387 - RNA, 17 nt, Human
cccuucccuugagcccu

SEQ ID NO: 2496388 - RNA, 23 nt, Human
cccuugacgucaagucuccuucc

SEQ ID NO: 2496389 - RNA, 13 nt, Human
cccuugagaccuc

SEQ ID NO: 2496390 - RNA, 14 nt, Human
cccuugagaccuca

SEQ ID NO: 2496391 - RNA, 15 nt, Human
cccuugagaccucag

SEQ ID NO: 2496392 - RNA, 16 nt, Human
cccuugagaccucagc

SEQ ID NO: 2496393 - RNA, 20 nt, Human
cccuugagaccucagccaug

SEQ ID NO: 2496394 - RNA, 17 nt, Human
cccuugagcccucuaug

SEQ ID NO: 2496395 - RNA, 17 nt, Human
cccuugagaccucagcc

SEQ ID NO: 2496396 - RNA, 18 nt, Human
cccuugagaccucagcca

SEQ ID NO: 2496397 - RNA, 19 nt, Human
cccuugagaccucagccau

SEQ ID NO: 2496398 - RNA, 18 nt, Human
cccuugagcuccccaaaa

SEQ ID NO: 2496399 - RNA, 22 nt, Human
cccuugaggaaacaacagcuuu

SEQ ID NO: 2496400 - RNA, 17 nt, Human
cccuuacgugaguccug

SEQ ID NO: 2496401 - RNA, 15 nt, Human
cccuuacgugagucc

SEQ ID NO: 2496402 - RNA, 20 nt, Human
cccuuagaaguuuguuguga

SEQ ID NO: 2496403 - RNA, 13 nt, Human
cccuuaccuuccc

SEQ ID NO: 2496404 - RNA, 14 nt, Human
cccuuagcagggaa

SEQ ID NO: 2496405 - RNA, 14 nt, Human
cccuuauccaggac

SEQ ID NO: 2496406 - RNA, 13 nt, Human
cccuuauccagga

SEQ ID NO: 2496407 - RNA, 12 nt, Human
cccuuauccagg

SEQ ID NO: 2496408 - RNA, 15 nt, Human
cccuuaucaccagcu

SEQ ID NO: 2496409 - RNA, 16 nt, Human
cccuuauccaggacuc

SEQ ID NO: 2496410 - RNA, 15 nt, Human
cccuuauccaggacu

SEQ ID NO: 2496411 - RNA, 17 nt, Human
cccuuagccucccugaa

SEQ ID NO: 2496412 - RNA, 22 nt, Human
cccuuagcccccacccacuucc

SEQ ID NO: 2496413 - RNA, 14 nt, Human
cccuuagccucccu

SEQ ID NO: 2496414 - RNA, 21 nt, Human
cccuuagcccccacccacuuc

SEQ ID NO: 2496415 - RNA, 19 nt, Human
cccuuagcccccacccacu

SEQ ID NO: 2496416 - RNA, 14 nt, Human
cccuuagcccccac

SEQ ID NO: 2496417 - RNA, 23 nt, Human
cccuuagcagggaaacagcuaau

SEQ ID NO: 2496418 - RNA, 16 nt, Human
cccuuaucugugcuca

SEQ ID NO: 2496419 - RNA, 20 nt, Human
cccuuaucugugcucaggac

SEQ ID NO: 2496420 - RNA, 20 nt, Human
cccuuauuacacggaaaacg

SEQ ID NO: 2496421 - RNA, 16 nt, Human
cccuuauuacacggaa

SEQ ID NO: 2496422 - RNA, 12 nt, Human
cccuuauuuccu

SEQ ID NO: 2496423 - RNA, 14 nt, Human
cccuucaaccauuc

SEQ ID NO: 2496424 - RNA, 12 nt, Human
cccuuauuuuca

SEQ ID NO: 2496425 - RNA, 13 nt, Human
cccuucacaaagc

SEQ ID NO: 2496426 - RNA, 18 nt, Human
cccuucacaaagcccaag

SEQ ID NO: 2496427 - RNA, 18 nt, Human
cccuucaaccauucccca

SEQ ID NO: 2496428 - RNA, 15 nt, Human
cccuucacauaguuu

SEQ ID NO: 2496429 - RNA, 20 nt, Human
cccuucacaaagcccaaggg

SEQ ID NO: 2496430 - RNA, 16 nt, Human
cccuucacaguguuuc

SEQ ID NO: 2496431 - RNA, 18 nt, Human
cccuucacugccuuugcu

SEQ ID NO: 2496432 - RNA, 17 nt, Human
cccuucacugccuuugc

SEQ ID NO: 2496433 - RNA, 12 nt, Human
cccuuccaugga

SEQ ID NO: 2496434 - RNA, 20 nt, Human
cccuuccaugucgccucugc

SEQ ID NO: 2496435 - RNA, 16 nt, Human
cccuuccacugagggc

SEQ ID NO: 2496436 - RNA, 17 nt, Human
cccuuccacacccccac

SEQ ID NO: 2496437 - RNA, 17 nt, Human
cccuucacuucugacca

SEQ ID NO: 2496438 - RNA, 13 nt, Human
cccuuccacugag

SEQ ID NO: 2496439 - RNA, 15 nt, Human
cccugcuggccgccu

SEQ ID NO: 2496440 - RNA, 13 nt, Human
cccugcuggccgc

SEQ ID NO: 2496441 - RNA, 12 nt, Human
cccugcuggccg

SEQ ID NO: 2496442 - RNA, 17 nt, Human
cccugcugcugacccag

SEQ ID NO: 2496443 - RNA, 13 nt, Human
cccugcugucccc

SEQ ID NO: 2496444 - RNA, 12 nt, Human
cccugcuguccc

SEQ ID NO: 2496445 - RNA, 17 nt, Human
cccugcuggccgccuca

SEQ ID NO: 2496446 - RNA, 19 nt, Human
cccugcuguccccucuugc

SEQ ID NO: 2496447 - RNA, 18 nt, Human
cccugcuguccccucuug

SEQ ID NO: 2496448 - RNA, 17 nt, Human
cccugcuguccccucuu

SEQ ID NO: 2496449 - RNA, 16 nt, Human
cccugcuguccccucu

SEQ ID NO: 2496450 - RNA, 21 nt, Human
cccugcuucaauacccaaauc

SEQ ID NO: 2496451 - RNA, 23 nt, Human
cccugcuguccccucuugcccca

SEQ ID NO: 2496452 - RNA, 15 nt, Human
cccugcuuccaggaa

SEQ ID NO: 2496453 - RNA, 14 nt, Human
cccugcuuccagga

SEQ ID NO: 2496454 - RNA, 21 nt, Human
cccugcuuccaccucacccca

SEQ ID NO: 2496455 - RNA, 18 nt, Human
cccugcuuccaccucacc

SEQ ID NO: 2496456 - RNA, 17 nt, Human
cccugcuuccaccucac

SEQ ID NO: 2496457 - RNA, 15 nt, Human
cccugcuuccaccuc

SEQ ID NO: 2496458 - RNA, 14 nt, Human
cccugcuuccaccu

SEQ ID NO: 2496459 - RNA, 16 nt, Human
cccugcuucuccagcc

SEQ ID NO: 2496460 - RNA, 15 nt, Human
cccugcuucuccagc

SEQ ID NO: 2496461 - RNA, 12 nt, Human
cccugcuucucc

SEQ ID NO: 2496462 - RNA, 11 nt, Human
cccugcuucuc

SEQ ID NO: 2496463 - RNA, 16 nt, Human
cccugcuuccaggaaa

SEQ ID NO: 2496464 - RNA, 23 nt, Human
cccugcuucuccagccuggaccc

SEQ ID NO: 2496465 - RNA, 21 nt, Human
cccugcuucuccagccuggac

SEQ ID NO: 2496466 - RNA, 18 nt, Human
cccugcuucuccagccug

SEQ ID NO: 2496467 - RNA, 17 nt, Human
cccugcuucuccagccu

SEQ ID NO: 2496468 - RNA, 20 nt, Human
cccugggcucugugggcugc

SEQ ID NO: 2496469 - RNA, 21 nt, Human
cccugggcuuggccugcugug

SEQ ID NO: 2496470 - RNA, 20 nt, Human
cccugggcuuggccugcugu

SEQ ID NO: 2496471 - RNA, 19 nt, Human
cccugggcuuggccugcug

SEQ ID NO: 2496472 - RNA, 18 nt, Human
cccugggcuuggccugcu

SEQ ID NO: 2496473 - RNA, 19 nt, Human
cccuggggacagcaagggc

SEQ ID NO: 2496474 - RNA, 22 nt, Human
cccugggcuuggccugcuguga

SEQ ID NO: 2496475 - RNA, 17 nt, Human
cccuggggacagcaagg

SEQ ID NO: 2496476 - RNA, 17 nt, Human
cccugggcuuggccugc

SEQ ID NO: 2496477 - RNA, 15 nt, Human
cccugggcugugcua

SEQ ID NO: 2496478 - RNA, 14 nt, Human
cccugggcuggaau

SEQ ID NO: 2496479 - RNA, 13 nt, Human
cccugggcuggaa

SEQ ID NO: 2496480 - RNA, 13 nt, Human
cccugggcugaga

SEQ ID NO: 2496481 - RNA, 14 nt, Human
cccugguggcagug

SEQ ID NO: 2496482 - RNA, 21 nt, Human
cccuguagagugggagcugag

SEQ ID NO: 2496483 - RNA, 21 nt, Human
cccugguggcagcucaccucu

SEQ ID NO: 2496484 - RNA, 13 nt, Human
cccugguggcagu

SEQ ID NO: 2496485 - RNA, 17 nt, Human
cccuggggccuggaccu

SEQ ID NO: 2496486 - RNA, 14 nt, Human
cccuggggccugga

SEQ ID NO: 2496487 - RNA, 20 nt, Human
cccuggggacagcaagggcu

SEQ ID NO: 2496488 - RNA, 13 nt, Human
cccuggggccugg

SEQ ID NO: 2496489 - RNA, 21 nt, Human
cccuggugaccagcaccaucu

SEQ ID NO: 2496490 - RNA, 14 nt, Human
cccuggugcugcca

SEQ ID NO: 2496491 - RNA, 13 nt, Human
cccuggugcugcc

SEQ ID NO: 2496492 - RNA, 21 nt, Human
cccuggggccuggaccugccu

SEQ ID NO: 2496493 - RNA, 18 nt, Human
cccuggggccuggaccug

SEQ ID NO: 2496494 - RNA, 23 nt, Human
cccuggggccuggaccugccucc

SEQ ID NO: 2496495 - RNA, 23 nt, Human
cccuuaccugccaggaagccagc

SEQ ID NO: 2496496 - RNA, 20 nt, Human
cccuuaccugccaggaagcc

SEQ ID NO: 2496497 - RNA, 17 nt, Human
cccuuaccugccaggaa

SEQ ID NO: 2496498 - RNA, 19 nt, Human
cccuguuuguuucugaaag

SEQ ID NO: 2496499 - RNA, 14 nt, Human
cccuguuuuauacu

SEQ ID NO: 2496500 - RNA, 18 nt, Human
cccuguuuucugagcccg

SEQ ID NO: 2496501 - RNA, 17 nt, Human
cccuguuuucugagccc

SEQ ID NO: 2496502 - RNA, 16 nt, Human
cccuguuuucugagcc

SEQ ID NO: 2496503 - RNA, 15 nt, Human
cccuguuuucugagc

SEQ ID NO: 2496504 - RNA, 14 nt, Human
cccuguuuucugag

SEQ ID NO: 2496505 - RNA, 14 nt, Human
cccuuaaaauagaa

SEQ ID NO: 2496506 - RNA, 23 nt, Human
cccuguuuucugagcccgggcug

SEQ ID NO: 2496507 - RNA, 22 nt, Human
cccuguuuucugagcccgggcu

SEQ ID NO: 2496508 - RNA, 20 nt, Human
cccuguuuucugagcccggg

SEQ ID NO: 2496509 - RNA, 14 nt, Human
cccuguucuggcag

SEQ ID NO: 2496510 - RNA, 13 nt, Human
cccuguucuggca

SEQ ID NO: 2496511 - RNA, 16 nt, Human
cccuguuccccagaga

SEQ ID NO: 2496512 - RNA, 17 nt, Human
cccuguuccccagagaa

SEQ ID NO: 2496513 - RNA, 14 nt, Human
cccuguuccccaga

SEQ ID NO: 2496514 - RNA, 22 nt, Human
cccugucagugcagcccgugug

SEQ ID NO: 2496515 - RNA, 14 nt, Human
cccugucagugcag

SEQ ID NO: 2496516 - RNA, 14 nt, Human
cccuguccaaacug

SEQ ID NO: 2496517 - RNA, 17 nt, Human
cccugucagugcagccc

SEQ ID NO: 2496518 - RNA, 21 nt, Human
cccugucagugcagcccgugu

SEQ ID NO: 2496519 - RNA, 14 nt, Human
cccuguauggcacu

SEQ ID NO: 2496520 - RNA, 20 nt, Human
cccuguauuuucuuucucua

SEQ ID NO: 2496521 - RNA, 19 nt, Human
cccugucaccaagcucaca

SEQ ID NO: 2496522 - RNA, 14 nt, Human
cccugucaccaagc

SEQ ID NO: 2496523 - RNA, 15 nt, Human
cccuggugcugccac

SEQ ID NO: 2496524 - RNA, 15 nt, Human
cccuguauauagccc

SEQ ID NO: 2496525 - RNA, 18 nt, Human
cccuguauauagcccagc

SEQ ID NO: 2496526 - RNA, 17 nt, Human
cccuguauauagcccag

SEQ ID NO: 2496527 - RNA, 13 nt, Human
cccaugccugucc

SEQ ID NO: 2496528 - RNA, 22 nt, Human
cccauucauuccauucuggaag

SEQ ID NO: 2496529 - RNA, 18 nt, Human
cccauucauuccauucug

SEQ ID NO: 2496530 - RNA, 12 nt, Human
cccauuccugaa

SEQ ID NO: 2496531 - RNA, 13 nt, Human
cccauuccugaag

SEQ ID NO: 2496532 - RNA, 22 nt, Human
ccccaagggcaaaauucccagg

SEQ ID NO: 2496533 - RNA, 22 nt, Human
cccauggacacuccagugccag

SEQ ID NO: 2496534 - RNA, 21 nt, Human
cccauucauuccauucuggaa

SEQ ID NO: 2496535 - RNA, 12 nt, Human
ccccacacacac

SEQ ID NO: 2496536 - RNA, 14 nt, Human
ccccacacacacac

SEQ ID NO: 2496537 - RNA, 11 nt, Human
ccccacacaca

SEQ ID NO: 2496538 - RNA, 15 nt, Human
ccccaauuccuugua

SEQ ID NO: 2496539 - RNA, 14 nt, Human
ccccacaccaggcc

SEQ ID NO: 2496540 - RNA, 14 nt, Human
ccccacaccucagu

SEQ ID NO: 2496541 - RNA, 16 nt, Human
ccccacaccucaguuc

SEQ ID NO: 2496542 - RNA, 15 nt, Human
ccccacacucacucc

SEQ ID NO: 2496543 - RNA, 18 nt, Human
ccccaaggggcagucugg

SEQ ID NO: 2496544 - RNA, 22 nt, Human
ccccaaggggcagucuggaggg

SEQ ID NO: 2496545 - RNA, 14 nt, Human
cccauuccucaccu

SEQ ID NO: 2496546 - RNA, 14 nt, Human
ccccaaggggcagu

SEQ ID NO: 2496547 - RNA, 15 nt, Human
ccccaaggggcaguc

SEQ ID NO: 2496548 - RNA, 16 nt, Human
ccccaaggggcagucu

SEQ ID NO: 2496549 - RNA, 15 nt, Human
ccccaauaauugcag

SEQ ID NO: 2496550 - RNA, 14 nt, Human
ccccaauuccuugu

SEQ ID NO: 2496551 - RNA, 13 nt, Human
ccccaaucccagc

SEQ ID NO: 2496552 - RNA, 16 nt, Human
ccccacccugggcucu

SEQ ID NO: 2496553 - RNA, 15 nt, Human
ccccacccugggcuc

SEQ ID NO: 2496554 - RNA, 14 nt, Human
ccccacccugggcu

SEQ ID NO: 2496555 - RNA, 20 nt, Human
ccccacccugggcccugggc

SEQ ID NO: 2496556 - RNA, 15 nt, Human
ccccacccugggccc

SEQ ID NO: 2496557 - RNA, 14 nt, Human
ccccacccugggcc

SEQ ID NO: 2496558 - RNA, 12 nt, Human
ccccacccuggg

SEQ ID NO: 2496559 - RNA, 18 nt, Human
ccccacccucccuggagu

SEQ ID NO: 2496560 - RNA, 16 nt, Human
ccccacccucccugga

SEQ ID NO: 2496561 - RNA, 15 nt, Human
ccccacccucccugg

SEQ ID NO: 2496562 - RNA, 12 nt, Human
ccccacccucau

SEQ ID NO: 2496563 - RNA, 12 nt, Human
ccccacacuccu

SEQ ID NO: 2496564 - RNA, 21 nt, Human
ccccacccaagggccuggccu

SEQ ID NO: 2496565 - RNA, 14 nt, Human
ccccaccccacacu

SEQ ID NO: 2496566 - RNA, 12 nt, Human
ccccacccagga

SEQ ID NO: 2496567 - RNA, 13 nt, Human
ccccacccaggag

SEQ ID NO: 2496568 - RNA, 20 nt, Human
ccccacccccagcucaaugg

SEQ ID NO: 2496569 - RNA, 17 nt, Human
ccccacccccagcucaa

SEQ ID NO: 2496570 - RNA, 16 nt, Human
ccccacccccagcuca

SEQ ID NO: 2496571 - RNA, 13 nt, Human
ccccacccccagc

SEQ ID NO: 2496572 - RNA, 13 nt, Human
ccccaccccagcc

SEQ ID NO: 2496573 - RNA, 16 nt, Human
ccccaccccacacuug

SEQ ID NO: 2496574 - RNA, 21 nt, Human
ccccacuugccucuuccuuga

SEQ ID NO: 2496575 - RNA, 16 nt, Human
ccccacuugccucuuc

SEQ ID NO: 2496576 - RNA, 15 nt, Human
ccccacuugccucuu

SEQ ID NO: 2496577 - RNA, 14 nt, Human
ccccacuugccucu

SEQ ID NO: 2496578 - RNA, 16 nt, Human
ccccagaaggcaggga

SEQ ID NO: 2496579 - RNA, 21 nt, Human
ccccagaaccuguccuugcac

SEQ ID NO: 2496580 - RNA, 15 nt, Human
ccccagaaccugucc

SEQ ID NO: 2496581 - RNA, 20 nt, Human
ccccagaaccuguccuugca

SEQ ID NO: 2496582 - RNA, 15 nt, Human
ccccacucucauucc

SEQ ID NO: 2496583 - RNA, 20 nt, Human
ccccacucucauuccccagg

SEQ ID NO: 2496584 - RNA, 12 nt, Human
ccccacucuccc

SEQ ID NO: 2496585 - RNA, 15 nt, Human
ccccacucuccccac

SEQ ID NO: 2496586 - RNA, 13 nt, Human
ccccacuugccuc

SEQ ID NO: 2496587 - RNA, 18 nt, Human
ccccacuuaucccucucc

SEQ ID NO: 2496588 - RNA, 18 nt, Human
ccccacucuccccacacu

SEQ ID NO: 2496589 - RNA, 21 nt, Human
ccccacucuaggggucaggcu

SEQ ID NO: 2496590 - RNA, 23 nt, Human
ccccacucccuggcucucagaag

SEQ ID NO: 2496591 - RNA, 13 nt, Human
ccccacuccagcu

SEQ ID NO: 2496592 - RNA, 14 nt, Human
ccccacuccccacc

SEQ ID NO: 2496593 - RNA, 18 nt, Human
ccccacucaccagugucc

SEQ ID NO: 2496594 - RNA, 22 nt, Human
ccccacggccgcuccaggggug

SEQ ID NO: 2496595 - RNA, 19 nt, Human
ccccacggccgcuccaggg

SEQ ID NO: 2496596 - RNA, 18 nt, Human
ccccacggccgcuccagg

SEQ ID NO: 2496597 - RNA, 22 nt, Human
ccccacggggccucgggaccuc

SEQ ID NO: 2496598 - RNA, 21 nt, Human
ccccacggggccucgggaccu

SEQ ID NO: 2496599 - RNA, 19 nt, Human
ccccacgugacagugccug

SEQ ID NO: 2496600 - RNA, 20 nt, Human
ccccacccugggcucuggga

SEQ ID NO: 2496601 - RNA, 20 nt, Human
ccccacccuggugggccaac

SEQ ID NO: 2496602 - RNA, 15 nt, Human
ccccaccgcagacag

SEQ ID NO: 2496603 - RNA, 19 nt, Human
ccccaccgcagacaggacc

SEQ ID NO: 2496604 - RNA, 14 nt, Human
ccccacccuuuggg

SEQ ID NO: 2496605 - RNA, 17 nt, Human
ccccacgagggucagga

SEQ ID NO: 2496606 - RNA, 14 nt, Human
ccccacgcccuccc

SEQ ID NO: 2496607 - RNA, 11 nt, Human
ccccaccuggg

SEQ ID NO: 2496608 - RNA, 21 nt, Human
ccccaccuucaauuccugggc

SEQ ID NO: 2496609 - RNA, 12 nt, Human
ccccaccugcca

SEQ ID NO: 2496610 - RNA, 17 nt, Human
ccccaccucucccugac

SEQ ID NO: 2496611 - RNA, 12 nt, Human
ccccaccuccac

SEQ ID NO: 2496612 - RNA, 12 nt, Human
ccccaccucucc

SEQ ID NO: 2496613 - RNA, 23 nt, Human
cccaugacccaccccugugcucc

SEQ ID NO: 2496614 - RNA, 22 nt, Human
cccaugacccaccccugugcuc

SEQ ID NO: 2496615 - RNA, 21 nt, Human
cccaugacccaccccugugcu

SEQ ID NO: 2496616 - RNA, 20 nt, Human
cccaugacccaccccugugc

SEQ ID NO: 2496617 - RNA, 18 nt, Human
cccaugacccaggcuggg

SEQ ID NO: 2496618 - RNA, 17 nt, Human
cccaugacccaggcugg

SEQ ID NO: 2496619 - RNA, 19 nt, Human
cccaugacccaggcugggc

SEQ ID NO: 2496620 - RNA, 14 nt, Human
cccaugagccucag

SEQ ID NO: 2496621 - RNA, 22 nt, Human
cccaucuggguccuugcacccc

SEQ ID NO: 2496622 - RNA, 12 nt, Human
cccaucugugaa

SEQ ID NO: 2496623 - RNA, 19 nt, Human
cccaugacccaccccugug

SEQ ID NO: 2496624 - RNA, 17 nt, Human
cccaugacccaccccug

SEQ ID NO: 2496625 - RNA, 16 nt, Human
cccaugacccaccccu

SEQ ID NO: 2496626 - RNA, 15 nt, Human
cccaugacccacccc

SEQ ID NO: 2496627 - RNA, 14 nt, Human
cccaugacccaccc

SEQ ID NO: 2496628 - RNA, 13 nt, Human
cccaugacccacc

SEQ ID NO: 2496629 - RNA, 19 nt, Human
cccaugaccauacugaggg

SEQ ID NO: 2496630 - RNA, 22 nt, Human
cccaugacuuuauauggaugau

SEQ ID NO: 2496631 - RNA, 22 nt, Human
cccaugagccucagcauccugg

SEQ ID NO: 2496632 - RNA, 21 nt, Human
cccauggacacuccagugcca

SEQ ID NO: 2496633 - RNA, 20 nt, Human
cccauggacacuccagugcc

SEQ ID NO: 2496634 - RNA, 16 nt, Human
cccauggacacuccag

SEQ ID NO: 2496635 - RNA, 15 nt, Human
cccauggacacucca

SEQ ID NO: 2496636 - RNA, 22 nt, Human
cccaugcuguugauugcuaaau

SEQ ID NO: 2496637 - RNA, 15 nt, Human
cccauggacaggcug

SEQ ID NO: 2496638 - RNA, 20 nt, Human
cccauggacaggcuggcucc

SEQ ID NO: 2496639 - RNA, 22 nt, Human
cccauggacaggcuggcuccag

SEQ ID NO: 2496640 - RNA, 18 nt, Human
cccaugcuggagccugug

SEQ ID NO: 2496641 - RNA, 17 nt, Human
cccaugcuggagccugu

SEQ ID NO: 2496642 - RNA, 16 nt, Human
cccaugcuggagccug

SEQ ID NO: 2496643 - RNA, 15 nt, Human
cccaugcuggagccu

SEQ ID NO: 2496644 - RNA, 14 nt, Human
cccaugcuggagcc

SEQ ID NO: 2496645 - RNA, 13 nt, Human
cccaugcuggagc

SEQ ID NO: 2496646 - RNA, 21 nt, Human
cccaugcuguugauugcuaaa

SEQ ID NO: 2496647 - RNA, 19 nt, Human
cccaugcuguugauugcua

SEQ ID NO: 2496648 - RNA, 14 nt, Human
cccaugcuguugau

SEQ ID NO: 2496649 - RNA, 20 nt, Human
cccaugcuggagccugugua

SEQ ID NO: 2496650 - RNA, 19 nt, Human
cccaugcuggagccugugu

SEQ ID NO: 2496651 - RNA, 21 nt, Human
cccaugcuggagccuguguaa

SEQ ID NO: 2496652 - RNA, 15 nt, Human
cccaugaucccugug

SEQ ID NO: 2496653 - RNA, 23 nt, Human
cccaugaguuggggucuggcagc

SEQ ID NO: 2496654 - RNA, 12 nt, Human
cccaugcacugu

SEQ ID NO: 2496655 - RNA, 14 nt, Human
cccaugcacuguga

SEQ ID NO: 2496656 - RNA, 16 nt, Human
cccaugcacugugaag

SEQ ID NO: 2496657 - RNA, 18 nt, Human
cccaugcacugugaagga

SEQ ID NO: 2496658 - RNA, 19 nt, Human
cccaugcacugugaaggac

SEQ ID NO: 2496659 - RNA, 20 nt, Human
cccaugcacugugaaggacc

SEQ ID NO: 2496660 - RNA, 22 nt, Human
cccaugcacugugaaggacccu

SEQ ID NO: 2496661 - RNA, 21 nt, Human
cccaugccaaagcuagggugg

SEQ ID NO: 2496662 - RNA, 14 nt, Human
cccaugcccaccug

SEQ ID NO: 2496663 - RNA, 15 nt, Human
cccaugcccaccugc

SEQ ID NO: 2496664 - RNA, 18 nt, Human
cccaugcccaccugccca

SEQ ID NO: 2496665 - RNA, 14 nt, Human
cccaucucuucugg

SEQ ID NO: 2496666 - RNA, 13 nt, Human
cccaucugcaccc

SEQ ID NO: 2496667 - RNA, 18 nt, Human
cccaucucuuccuaccca

SEQ ID NO: 2496668 - RNA, 23 nt, Human
cccaucucucccuccccugccau

SEQ ID NO: 2496669 - RNA, 13 nt, Human
cccaucucucccu

SEQ ID NO: 2496670 - RNA, 18 nt, Human
cccaucucucccuccccu

SEQ ID NO: 2496671 - RNA, 21 nt, Human
cccaucucucccuccccugcc

SEQ ID NO: 2496672 - RNA, 18 nt, Human
cccaucuggguccuugca

SEQ ID NO: 2496673 - RNA, 23 nt, Human
cccaucugggaguccccuuuucu

SEQ ID NO: 2496674 - RNA, 16 nt, Human
cccaucugggaguccc

SEQ ID NO: 2496675 - RNA, 16 nt, Human
cccaucugcccaggac

SEQ ID NO: 2496676 - RNA, 15 nt, Human
cccaucugcccagga

SEQ ID NO: 2496677 - RNA, 14 nt, Human
cccaucugcccagg

SEQ ID NO: 2496678 - RNA, 13 nt, Human
cccaucugcccag

SEQ ID NO: 2496679 - RNA, 12 nt, Human
cccaucugccca

SEQ ID NO: 2496680 - RNA, 19 nt, Human
cccaucugcaccccuucuc

SEQ ID NO: 2496681 - RNA, 17 nt, Human
cccaucugcagggcccc

SEQ ID NO: 2496682 - RNA, 21 nt, Human
cccaucugcaccccccugggc

SEQ ID NO: 2496683 - RNA, 22 nt, Human
cccaucugcaccccccugggcu

SEQ ID NO: 2496684 - RNA, 13 nt, Human
cccaucucccccu

SEQ ID NO: 2496685 - RNA, 19 nt, Human
cccaucucuacaaaaagca

SEQ ID NO: 2496686 - RNA, 22 nt, Human
cccaucucaugccccuggcugg

SEQ ID NO: 2496687 - RNA, 21 nt, Human
cccaucucaugccccuggcug

SEQ ID NO: 2496688 - RNA, 20 nt, Human
cccaucucaugccccuggcu

SEQ ID NO: 2496689 - RNA, 14 nt, Human
cccaguugggugga

SEQ ID NO: 2496690 - RNA, 17 nt, Human
cccaguugccaucugcg

SEQ ID NO: 2496691 - RNA, 22 nt, Human
cccaguucugcuccucuccagg

SEQ ID NO: 2496692 - RNA, 21 nt, Human
cccaguucugcuccucuccag

SEQ ID NO: 2496693 - RNA, 20 nt, Human
cccaguucugcuccucucca

SEQ ID NO: 2496694 - RNA, 16 nt, Human
cccaguucugcuccuc

SEQ ID NO: 2496695 - RNA, 15 nt, Human
cccaguugccaucug

SEQ ID NO: 2496696 - RNA, 23 nt, Human
cccaguucugcuccucuccaggc

SEQ ID NO: 2496697 - RNA, 15 nt, Human
cccaguucugcuccu

SEQ ID NO: 2496698 - RNA, 14 nt, Human
cccaguucugcucc

SEQ ID NO: 2496699 - RNA, 13 nt, Human
cccaguucugcuc

SEQ ID NO: 2496700 - RNA, 18 nt, Human
cccagagacauacuugaa

SEQ ID NO: 2496701 - RNA, 21 nt, Human
cccagagacauacuugaaggg

SEQ ID NO: 2496702 - RNA, 22 nt, Human
cccagagacauacuugaagggc

SEQ ID NO: 2496703 - RNA, 23 nt, Human
cccagagacauacuugaagggcc

SEQ ID NO: 2496704 - RNA, 21 nt, Human
cccagagaagccccuucccca

SEQ ID NO: 2496705 - RNA, 16 nt, Human
cccagagaagccccuu

SEQ ID NO: 2496706 - RNA, 22 nt, Human
cccagagaagccccuuccccau

SEQ ID NO: 2496707 - RNA, 13 nt, Human
cccagagacagga

SEQ ID NO: 2496708 - RNA, 14 nt, Human
cccagagacaggaa

SEQ ID NO: 2496709 - RNA, 15 nt, Human
cccagagacaggaaa

SEQ ID NO: 2496710 - RNA, 16 nt, Human
cccagagacaggaaaa

SEQ ID NO: 2496711 - RNA, 17 nt, Human
cccagagacaggaaaau

SEQ ID NO: 2496712 - RNA, 17 nt, Human
cccagaaugaggcugcu

SEQ ID NO: 2496713 - RNA, 15 nt, Human
cccagagaagccccu

SEQ ID NO: 2496714 - RNA, 14 nt, Human
cccagagaagcccc

SEQ ID NO: 2496715 - RNA, 13 nt, Human
cccagagaagcca

SEQ ID NO: 2496716 - RNA, 22 nt, Human
cccagagaaaggggagcccacu

SEQ ID NO: 2496717 - RNA, 12 nt, Human
cccagagaagcc

SEQ ID NO: 2496718 - RNA, 22 nt, Human
ccccauaauuuuuuuuuuccuu

SEQ ID NO: 2496719 - RNA, 12 nt, Human
ccccauagccac

SEQ ID NO: 2496720 - RNA, 14 nt, Human
ccccauagccaccc

SEQ ID NO: 2496721 - RNA, 14 nt, Human
ccccaucagugcuc

SEQ ID NO: 2496722 - RNA, 20 nt, Human
ccccaucagugcucccucac

SEQ ID NO: 2496723 - RNA, 13 nt, Human
ccccaucagugcu

SEQ ID NO: 2496724 - RNA, 14 nt, Human
ccccauauggucau

SEQ ID NO: 2496725 - RNA, 16 nt, Human
ccccaguucugcuccu

SEQ ID NO: 2496726 - RNA, 15 nt, Human
ccccaguucugcucc

SEQ ID NO: 2496727 - RNA, 14 nt, Human
ccccaguucugcuc

SEQ ID NO: 2496728 - RNA, 16 nt, Human
ccccagugcacccacu

SEQ ID NO: 2496729 - RNA, 20 nt, Human
ccccaguucugcuccucucc

SEQ ID NO: 2496730 - RNA, 19 nt, Human
ccccaguucugcuccucuc

SEQ ID NO: 2496731 - RNA, 18 nt, Human
ccccaguucugcuccucu

SEQ ID NO: 2496732 - RNA, 17 nt, Human
ccccaguucugcuccuc

SEQ ID NO: 2496733 - RNA, 23 nt, Human
ccccaguucugcuccucuccagg

SEQ ID NO: 2496734 - RNA, 21 nt, Human
ccccaguucugcuccucucca

SEQ ID NO: 2496735 - RNA, 23 nt, Human
ccccaguuugcagaaaagcaccu

SEQ ID NO: 2496736 - RNA, 20 nt, Human
ccccagugcccacaggauca

SEQ ID NO: 2496737 - RNA, 16 nt, Human
ccccagugcccacagg

SEQ ID NO: 2496738 - RNA, 15 nt, Human
ccccagugcccacag

SEQ ID NO: 2496739 - RNA, 14 nt, Human
ccccagugcccaca

SEQ ID NO: 2496740 - RNA, 23 nt, Human
ccccagguguguuggggccuugg

SEQ ID NO: 2496741 - RNA, 14 nt, Human
ccccaguaaaauug

SEQ ID NO: 2496742 - RNA, 13 nt, Human
ccccaguaaaauu

SEQ ID NO: 2496743 - RNA, 21 nt, Human
ccccagucagccucucuccca

SEQ ID NO: 2496744 - RNA, 17 nt, Human
ccccagucagccucucu

SEQ ID NO: 2496745 - RNA, 16 nt, Human
ccccagucagccucuc

SEQ ID NO: 2496746 - RNA, 15 nt, Human
ccccagucagccucu

SEQ ID NO: 2496747 - RNA, 18 nt, Human
ccccaguccccaccccug

SEQ ID NO: 2496748 - RNA, 23 nt, Human
ccccagucagccucucucccagu

SEQ ID NO: 2496749 - RNA, 19 nt, Human
ccccaguccccaccccugc

SEQ ID NO: 2496750 - RNA, 14 nt, Human
ccccagucagccuc

SEQ ID NO: 2496751 - RNA, 17 nt, Human
ccccaguaaaauugcca

SEQ ID NO: 2496752 - RNA, 16 nt, Human
ccccaguaagccacug

SEQ ID NO: 2496753 - RNA, 18 nt, Human
ccccaguaagccacugcc

SEQ ID NO: 2496754 - RNA, 23 nt, Human
ccccaggccugaaagaggcugag

SEQ ID NO: 2496755 - RNA, 17 nt, Human
ccccaggccucuguguc

SEQ ID NO: 2496756 - RNA, 15 nt, Human
ccccaggccucugug

SEQ ID NO: 2496757 - RNA, 21 nt, Human
ccccaggccugaaagaggcug

SEQ ID NO: 2496758 - RNA, 13 nt, Human
ccccaggcugaag

SEQ ID NO: 2496759 - RNA, 11 nt, Human
ccccagggcac

SEQ ID NO: 2496760 - RNA, 15 nt, Human
ccccagaccugagcu

SEQ ID NO: 2496761 - RNA, 18 nt, Human
ccccagacaccgccacau

SEQ ID NO: 2496762 - RNA, 19 nt, Human
ccccagaccugagcucccc

SEQ ID NO: 2496763 - RNA, 11 nt, Human
ccccaggcccc

SEQ ID NO: 2496764 - RNA, 12 nt, Human
ccccaggcccca

SEQ ID NO: 2496765 - RNA, 18 nt, Human
ccccaggccccaggaagc

SEQ ID NO: 2496766 - RNA, 20 nt, Human
ccccaggccccgaggaccca

SEQ ID NO: 2496767 - RNA, 13 nt, Human
ccccaggccccga

SEQ ID NO: 2496768 - RNA, 12 nt, Human
ccccaggccccg

SEQ ID NO: 2496769 - RNA, 19 nt, Human
ccccaggccccaggaagcc

SEQ ID NO: 2496770 - RNA, 17 nt, Human
ccccaucauugguaccc

SEQ ID NO: 2496771 - RNA, 13 nt, Human
ccccaucauucau

SEQ ID NO: 2496772 - RNA, 19 nt, Human
ccccaucaggacucuugug

SEQ ID NO: 2496773 - RNA, 12 nt, Human
ccccauccucca

SEQ ID NO: 2496774 - RNA, 16 nt, Human
ccccaucccacacccu

SEQ ID NO: 2496775 - RNA, 14 nt, Human
ccccauccucugua

SEQ ID NO: 2496776 - RNA, 16 nt, Human
ccccauccuccagcuu

SEQ ID NO: 2496777 - RNA, 15 nt, Human
ccccauccuccagcu

SEQ ID NO: 2496778 - RNA, 14 nt, Human
ccccauccuccagc

SEQ ID NO: 2496779 - RNA, 15 nt, Human
ccccauccuccagca

SEQ ID NO: 2496780 - RNA, 18 nt, Human
ccccauccuccagcuucu

SEQ ID NO: 2496781 - RNA, 17 nt, Human
ccccauccuccagcuuc

SEQ ID NO: 2496782 - RNA, 13 nt, Human
ccccauccucccc

SEQ ID NO: 2496783 - RNA, 17 nt, Human
ccccauccuccccuucc

SEQ ID NO: 2496784 - RNA, 24 nt, Human
cccccacccaagggccuggccuga

SEQ ID NO: 2496785 - RNA, 22 nt, Human
cccccaccacggccacuggcca

SEQ ID NO: 2496786 - RNA, 16 nt, Human
cccccacagugcuguc

SEQ ID NO: 2496787 - RNA, 14 nt, Human
cccccacccccagc

SEQ ID NO: 2496788 - RNA, 15 nt, Human
cccccaccacuagga

SEQ ID NO: 2496789 - RNA, 13 nt, Human
cccccacccaagg

SEQ ID NO: 2496790 - RNA, 18 nt, Human
ccccauccuccccuuccc

SEQ ID NO: 2496791 - RNA, 19 nt, Human
ccccauccuccccuucccu

SEQ ID NO: 2496792 - RNA, 17 nt, Human
cccccacaccucaguuc

SEQ ID NO: 2496793 - RNA, 13 nt, Human
cccccacugguga

SEQ ID NO: 2496794 - RNA, 11 nt, Human
cccccacuggu

SEQ ID NO: 2496795 - RNA, 15 nt, Human
cccccacuggugaca

SEQ ID NO: 2496796 - RNA, 15 nt, Human
cccccagaaccuguc

SEQ ID NO: 2496797 - RNA, 22 nt, Human
cccccacuugccucuuccuuga

SEQ ID NO: 2496798 - RNA, 22 nt, Human
cccccagaaccuguccuugcac

SEQ ID NO: 2496799 - RNA, 17 nt, Human
cccccacccccagcuca

SEQ ID NO: 2496800 - RNA, 15 nt, Human
cccccacccccagcu

SEQ ID NO: 2496801 - RNA, 20 nt, Human
cccccaccccggggacccug

SEQ ID NO: 2496802 - RNA, 13 nt, Human
cccccacccacuu

SEQ ID NO: 2496803 - RNA, 12 nt, Human
cccccacccccu

SEQ ID NO: 2496804 - RNA, 15 nt, Human
cccccaccccuuccc

SEQ ID NO: 2496805 - RNA, 17 nt, Human
cccccaccccuucccca

SEQ ID NO: 2496806 - RNA, 12 nt, Human
cccccacccuuu

SEQ ID NO: 2496807 - RNA, 14 nt, Human
cccccacugcaggc

SEQ ID NO: 2496808 - RNA, 21 nt, Human
cccccacucucauuccccagg

SEQ ID NO: 2496809 - RNA, 17 nt, Human
cccccacugccuuugac

SEQ ID NO: 2496810 - RNA, 14 nt, Human
cccccacuccagcu

SEQ ID NO: 2496811 - RNA, 22 nt, Human
cccccaccucucccugacccug

SEQ ID NO: 2496812 - RNA, 17 nt, Human
cccccugacaacacuca

SEQ ID NO: 2496813 - RNA, 16 nt, Human
cccccucugucuugug

SEQ ID NO: 2496814 - RNA, 12 nt, Human
cccccucugucc

SEQ ID NO: 2496815 - RNA, 21 nt, Human
cccccucuggcuccagcuggc

SEQ ID NO: 2496816 - RNA, 12 nt, Human
cccccucuggcu

SEQ ID NO: 2496817 - RNA, 19 nt, Human
cccccucuggcuccagcug

SEQ ID NO: 2496818 - RNA, 19 nt, Human
cccccuccgcccugccacu

SEQ ID NO: 2496819 - RNA, 12 nt, Human
cccccuccucuc

SEQ ID NO: 2496820 - RNA, 14 nt, Human
cccccucccuggcc

SEQ ID NO: 2496821 - RNA, 19 nt, Human
cccccugacaacacucauu

SEQ ID NO: 2496822 - RNA, 18 nt, Human
cccccugcaaagcccagc

SEQ ID NO: 2496823 - RNA, 19 nt, Human
cccccugcaaagcccagcu

SEQ ID NO: 2496824 - RNA, 21 nt, Human
cccccugcaaagcccagcuug

SEQ ID NO: 2496825 - RNA, 13 nt, Human
cccccucugccgc

SEQ ID NO: 2496826 - RNA, 16 nt, Human
cccccugccccccagc

SEQ ID NO: 2496827 - RNA, 14 nt, Human
cccccugccagugc

SEQ ID NO: 2496828 - RNA, 15 nt, Human
cccccagccucuggc

SEQ ID NO: 2496829 - RNA, 13 nt, Human
cccccagcuaaga

SEQ ID NO: 2496830 - RNA, 18 nt, Human
cccccagcuaagaaccug

SEQ ID NO: 2496831 - RNA, 21 nt, Human
cccccagcuaagaaccuggaa

SEQ ID NO: 2496832 - RNA, 12 nt, Human
cccccagccugc

SEQ ID NO: 2496833 - RNA, 16 nt, Human
cccccagcaacccucc

SEQ ID NO: 2496834 - RNA, 13 nt, Human
cccccuccccagg

SEQ ID NO: 2496835 - RNA, 12 nt, Human
cccccucccacc

SEQ ID NO: 2496836 - RNA, 13 nt, Human
cccccucccaggg

SEQ ID NO: 2496837 - RNA, 18 nt, Human
cccccuccaauccugccc

SEQ ID NO: 2496838 - RNA, 16 nt, Human
cccccuccaauccugc

SEQ ID NO: 2496839 - RNA, 15 nt, Human
cccccuccaauccug

SEQ ID NO: 2496840 - RNA, 19 nt, Human
cccccucaaaccuccucuu

SEQ ID NO: 2496841 - RNA, 16 nt, Human
cccccucaaaccuccu

SEQ ID NO: 2496842 - RNA, 21 nt, Human
cccccucaucucauucaaacc

SEQ ID NO: 2496843 - RNA, 12 nt, Human
cccccagcuggc

SEQ ID NO: 2496844 - RNA, 11 nt, Human
cccccagcugg

SEQ ID NO: 2496845 - RNA, 14 nt, Human
cccccagcucuggu

SEQ ID NO: 2496846 - RNA, 12 nt, Human
cccccagcucug

SEQ ID NO: 2496847 - RNA, 15 nt, Human
cccccagcuccggcc

SEQ ID NO: 2496848 - RNA, 23 nt, Human
cccccgggccgacggagccggga

SEQ ID NO: 2496849 - RNA, 18 nt, Human
cccccgggccgacggagc

SEQ ID NO: 2496850 - RNA, 22 nt, Human
cccccgggaggggcccgcuugc

SEQ ID NO: 2496851 - RNA, 20 nt, Human
cccccgggaggggcccgcuu

SEQ ID NO: 2496852 - RNA, 16 nt, Human
cccccggggcuggguu

SEQ ID NO: 2496853 - RNA, 15 nt, Human
cccccggggcugggu

SEQ ID NO: 2496854 - RNA, 24 nt, Human
cccccggguuuggcgggccaagga

SEQ ID NO: 2496855 - RNA, 23 nt, Human
ccccucaacucuccuccagaguc

SEQ ID NO: 2496856 - RNA, 16 nt, Human
ccccucaacaccucug

SEQ ID NO: 2496857 - RNA, 20 nt, Human
ccccucacagccucugaccc

SEQ ID NO: 2496858 - RNA, 18 nt, Human
ccccucacagccucugac

SEQ ID NO: 2496859 - RNA, 17 nt, Human
ccccucacagccucuga

SEQ ID NO: 2496860 - RNA, 14 nt, Human
ccccucacagccuc

SEQ ID NO: 2496861 - RNA, 17 nt, Human
ccccucaccaggggcag

SEQ ID NO: 2496862 - RNA, 16 nt, Human
ccccucaccaggggca

SEQ ID NO: 2496863 - RNA, 21 nt, Human
ccccucaaaccuccucuucug

SEQ ID NO: 2496864 - RNA, 13 nt, Human
ccccucacagccu

SEQ ID NO: 2496865 - RNA, 18 nt, Human
ccccucaaaucguccagc

SEQ ID NO: 2496866 - RNA, 21 nt, Human
ccccuauccacccagcccauu

SEQ ID NO: 2496867 - RNA, 15 nt, Human
ccccucaacaccucu

SEQ ID NO: 2496868 - RNA, 20 nt, Human
ccccuaguaagugccuucca

SEQ ID NO: 2496869 - RNA, 19 nt, Human
ccccuaguaagugccuucc

SEQ ID NO: 2496870 - RNA, 14 nt, Human
ccccuauccaccca

SEQ ID NO: 2496871 - RNA, 16 nt, Human
ccccuauccacccagc

SEQ ID NO: 2496872 - RNA, 17 nt, Human
ccccuauccacccagcc

SEQ ID NO: 2496873 - RNA, 19 nt, Human
ccccuauccacccagccca

SEQ ID NO: 2496874 - RNA, 20 nt, Human
ccccuauccacccagcccau

SEQ ID NO: 2496875 - RNA, 21 nt, Human
ccccuagcuuagagccucccu

SEQ ID NO: 2496876 - RNA, 18 nt, Human
ccccuaguaagugccuuc

SEQ ID NO: 2496877 - RNA, 20 nt, Human
ccccuagcccaggagagaga

SEQ ID NO: 2496878 - RNA, 18 nt, Human
ccccuagcccaggagaga

SEQ ID NO: 2496879 - RNA, 15 nt, Human
ccccggucccuugag

SEQ ID NO: 2496880 - RNA, 16 nt, Human
ccccggucccuugaga

SEQ ID NO: 2496881 - RNA, 24 nt, Human
ccccggucccuugagaccucagcc

SEQ ID NO: 2496882 - RNA, 19 nt, Human
cccccuguccccucagcuc

SEQ ID NO: 2496883 - RNA, 18 nt, Human
cccccuguccccucagcu

SEQ ID NO: 2496884 - RNA, 15 nt, Human
cccccuguccccuca

SEQ ID NO: 2496885 - RNA, 12 nt, Human
cccccuguccuc

SEQ ID NO: 2496886 - RNA, 21 nt, Human
cccccuguccccucagcucca

SEQ ID NO: 2496887 - RNA, 12 nt, Human
cccccugugcag

SEQ ID NO: 2496888 - RNA, 12 nt, Human
cccccugucccc

SEQ ID NO: 2496889 - RNA, 16 nt, Human
cccccuggucucuggu

SEQ ID NO: 2496890 - RNA, 21 nt, Human
cccccugguggacaguccugg

SEQ ID NO: 2496891 - RNA, 23 nt, Human
cccccugguggacaguccuggga

SEQ ID NO: 2496892 - RNA, 11 nt, Human
cccccugggcu

SEQ ID NO: 2496893 - RNA, 13 nt, Human
cccccugggcucu

SEQ ID NO: 2496894 - RNA, 21 nt, Human
cccccuggggcuucuccugac

SEQ ID NO: 2496895 - RNA, 20 nt, Human
cccccuggggcuucuccuga

SEQ ID NO: 2496896 - RNA, 19 nt, Human
cccccuggggcuucuccug

SEQ ID NO: 2496897 - RNA, 16 nt, Human
cccccugccagugccu

SEQ ID NO: 2496898 - RNA, 15 nt, Human
cccccuggucucugg

SEQ ID NO: 2496899 - RNA, 23 nt, Human
cccccuggggcuucuccugaccc

SEQ ID NO: 2496900 - RNA, 19 nt, Human
cccccugguggacaguccu

SEQ ID NO: 2496901 - RNA, 20 nt, Human
cccccugguggacaguccug

SEQ ID NO: 2496902 - RNA, 12 nt, Human
ccccggcccugg

SEQ ID NO: 2496903 - RNA, 13 nt, Human
ccccggcccuggg

SEQ ID NO: 2496904 - RNA, 21 nt, Human
cccccugugcagccgcugagc

SEQ ID NO: 2496905 - RNA, 15 nt, Human
ccccggcggcgccgg

SEQ ID NO: 2496906 - RNA, 14 nt, Human
ccccggccucagca

SEQ ID NO: 2496907 - RNA, 21 nt, Human
ccccggcccugggcucggagg

SEQ ID NO: 2496908 - RNA, 23 nt, Human
ccccgggaggggcccgcuugccu

SEQ ID NO: 2496909 - RNA, 16 nt, Human
ccccgggaggggcccg

SEQ ID NO: 2496910 - RNA, 15 nt, Human
ccccgggcucucugc

SEQ ID NO: 2496911 - RNA, 16 nt, Human
ccccgggcucucugcu

SEQ ID NO: 2496912 - RNA, 17 nt, Human
ccccgggcucucugcug

SEQ ID NO: 2496913 - RNA, 17 nt, Human
ccccggggacccuguga

SEQ ID NO: 2496914 - RNA, 18 nt, Human
ccccgggcucucugcugu

SEQ ID NO: 2496915 - RNA, 22 nt, Human
ccccggggugaguccauucucc

SEQ ID NO: 2496916 - RNA, 15 nt, Human
ccccggggcuggguu

SEQ ID NO: 2496917 - RNA, 21 nt, Human
ccccggggcguuucuuugccg

SEQ ID NO: 2496918 - RNA, 16 nt, Human
ccccggggacccugug

SEQ ID NO: 2496919 - RNA, 18 nt, Human
ccccggguuuggcgggcc

SEQ ID NO: 2496920 - RNA, 19 nt, Human
ccccggguuuggcgggcca

SEQ ID NO: 2496921 - RNA, 23 nt, Human
ccccggguuuggcgggccaagga

SEQ ID NO: 2496922 - RNA, 12 nt, Human
ccccuccaugug

SEQ ID NO: 2496923 - RNA, 15 nt, Human
ccccuccagcuugug

SEQ ID NO: 2496924 - RNA, 13 nt, Human
ccccuccagcuug

SEQ ID NO: 2496925 - RNA, 11 nt, Human
ccccuccagcu

SEQ ID NO: 2496926 - RNA, 14 nt, Human
ccccuccacuguca

SEQ ID NO: 2496927 - RNA, 11 nt, Human
ccccuccagga

SEQ ID NO: 2496928 - RNA, 22 nt, Human
ccccuccagcuuguggagcccc

SEQ ID NO: 2496929 - RNA, 11 nt, Human
ccccucccacc

SEQ ID NO: 2496930 - RNA, 13 nt, Human
ccccucccagcug

SEQ ID NO: 2496931 - RNA, 12 nt, Human
ccccucccagcu

SEQ ID NO: 2496932 - RNA, 22 nt, Human
ccccucccagcugacaguccuc

SEQ ID NO: 2496933 - RNA, 14 nt, Human
ccccucccagcuga

SEQ ID NO: 2496934 - RNA, 12 nt, Human
ccccucccaggg

SEQ ID NO: 2496935 - RNA, 16 nt, Human
ccccucccacccaccg

SEQ ID NO: 2496936 - RNA, 16 nt, Human
ccccucccaccacagc

SEQ ID NO: 2496937 - RNA, 12 nt, Human
ccccucccacca

SEQ ID NO: 2496938 - RNA, 11 nt, Human
ccccucccaga

SEQ ID NO: 2496939 - RNA, 12 nt, Human
ccccucccagaa

SEQ ID NO: 2496940 - RNA, 13 nt, Human
ccccucccagaac

SEQ ID NO: 2496941 - RNA, 12 nt, Human
ccccucccuggc

SEQ ID NO: 2496942 - RNA, 14 nt, Human
ccccucccugcuuc

SEQ ID NO: 2496943 - RNA, 15 nt, Human
ccccucccuggccug

SEQ ID NO: 2496944 - RNA, 16 nt, Human
ccccucccuggccugu

SEQ ID NO: 2496945 - RNA, 17 nt, Human
ccccucccuggccuguu

SEQ ID NO: 2496946 - RNA, 13 nt, Human
ccccucccuggcu

SEQ ID NO: 2496947 - RNA, 14 nt, Human
ccccucccuggcuc

SEQ ID NO: 2496948 - RNA, 15 nt, Human
ccccucccuggcucc

SEQ ID NO: 2496949 - RNA, 13 nt, Human
ccccucccuguca

SEQ ID NO: 2496950 - RNA, 14 nt, Human
ccccucccuggguu

SEQ ID NO: 2496951 - RNA, 12 nt, Human
ccccucccuuuc

SEQ ID NO: 2496952 - RNA, 16 nt, Human
ccccuccgcccugcca

SEQ ID NO: 2496953 - RNA, 15 nt, Human
ccccucccuuucucc

SEQ ID NO: 2496954 - RNA, 15 nt, Human
ccccucccuucaacc

SEQ ID NO: 2496955 - RNA, 13 nt, Human
ccccucccugggu

SEQ ID NO: 2496956 - RNA, 12 nt, Human
ccccucccuggg

SEQ ID NO: 2496957 - RNA, 22 nt, Human
ccccucccuggcucccaugacc

SEQ ID NO: 2496958 - RNA, 16 nt, Human
ccccucagggucccug

SEQ ID NO: 2496959 - RNA, 17 nt, Human
ccccucagcuccagacg

SEQ ID NO: 2496960 - RNA, 13 nt, Human
ccccucagcucca

SEQ ID NO: 2496961 - RNA, 12 nt, Human
ccccucagcucc

SEQ ID NO: 2496962 - RNA, 15 nt, Human
ccccucaggacugca

SEQ ID NO: 2496963 - RNA, 13 nt, Human
ccccucaccuccu

SEQ ID NO: 2496964 - RNA, 12 nt, Human
ccccucaccucc

SEQ ID NO: 2496965 - RNA, 16 nt, Human
ccccucacccugccuu

SEQ ID NO: 2496966 - RNA, 13 nt, Human
ccccucacccugc

SEQ ID NO: 2496967 - RNA, 14 nt, Human
ccccucaccuccuc

SEQ ID NO: 2496968 - RNA, 15 nt, Human
ccccucaccugggca

SEQ ID NO: 2496969 - RNA, 13 nt, Human
ccccucaccuugc

SEQ ID NO: 2496970 - RNA, 14 nt, Human
ccccucacucuggc

SEQ ID NO: 2496971 - RNA, 12 nt, Human
ccccucacucug

SEQ ID NO: 2496972 - RNA, 14 nt, Human
ccccucaccuugca

SEQ ID NO: 2496973 - RNA, 15 nt, Human
ccccucaccuugcaa

SEQ ID NO: 2496974 - RNA, 17 nt, Human
ccccuccaauccugccc

SEQ ID NO: 2496975 - RNA, 16 nt, Human
ccccuccaauccugcc

SEQ ID NO: 2496976 - RNA, 12 nt, Human
ccccuccacugu

SEQ ID NO: 2496977 - RNA, 15 nt, Human
ccccuccaauccugc

SEQ ID NO: 2496978 - RNA, 14 nt, Human
ccccuccaaccugg

SEQ ID NO: 2496979 - RNA, 13 nt, Human
ccccuccaccugc

SEQ ID NO: 2496980 - RNA, 20 nt, Human
ccccucauagcccucacccu

SEQ ID NO: 2496981 - RNA, 20 nt, Human
ccccucaucucucugcccaa

SEQ ID NO: 2496982 - RNA, 23 nt, Human
ccccuccaaucccaccaacccuc

SEQ ID NO: 2496983 - RNA, 18 nt, Human
ccccuccgcccugccacu

SEQ ID NO: 2496984 - RNA, 17 nt, Human
ccccuccgcccugccac

SEQ ID NO: 2496985 - RNA, 19 nt, Human
ccccuccgcccugccacuc

SEQ ID NO: 2496986 - RNA, 19 nt, Human
ccccuccuaccccucccag

SEQ ID NO: 2496987 - RNA, 13 nt, Human
ccccuccucacug

SEQ ID NO: 2496988 - RNA, 12 nt, Human
ccccuccucacu

SEQ ID NO: 2496989 - RNA, 23 nt, Human
ccccuccuaccccucccagcuga

SEQ ID NO: 2496990 - RNA, 15 nt, Human
ccccuccuccacucu

SEQ ID NO: 2496991 - RNA, 12 nt, Human
ccccuccuccac

SEQ ID NO: 2496992 - RNA, 13 nt, Human
ccccuccucccuu

SEQ ID NO: 2496993 - RNA, 23 nt, Human
ccccuccucacuggccaucccuc

SEQ ID NO: 2496994 - RNA, 18 nt, Human
ccccuccuccacucuccc

SEQ ID NO: 2496995 - RNA, 18 nt, Human
ccccuccuccuggacucc

SEQ ID NO: 2496996 - RNA, 19 nt, Human
ccccuccucuagcuguggg

SEQ ID NO: 2496997 - RNA, 17 nt, Human
ccccuccucuagcugug

SEQ ID NO: 2496998 - RNA, 22 nt, Human
ccccuccuccuggacuccugca

SEQ ID NO: 2496999 - RNA, 23 nt, Human
ccccuccucuccccuaccacugu

SEQ ID NO: 2497000 - RNA, 18 nt, Human
ccccuccucucccauccc

SEQ ID NO: 2497001 - RNA, 15 nt, Human
ccccuccucucccau

SEQ ID NO: 2497002 - RNA, 13 nt, Human
ccccuccucuccc

SEQ ID NO: 2497003 - RNA, 11 nt, Human
ccccuccucuc

SEQ ID NO: 2497004 - RNA, 22 nt, Human
ccccuccucccuuuuuccuugu

SEQ ID NO: 2497005 - RNA, 21 nt, Human
ccccuccucuagcuguggggg

SEQ ID NO: 2497006 - RNA, 15 nt, Human
ccccuccucucugcc

SEQ ID NO: 2497007 - RNA, 17 nt, Human
ccccuccucucugcccu

SEQ ID NO: 2497008 - RNA, 13 nt, Human
ccccuccucugcc

SEQ ID NO: 2497009 - RNA, 13 nt, Human
ccccuccucucug

SEQ ID NO: 2497010 - RNA, 11 nt, Human
ccccuccucug

SEQ ID NO: 2497011 - RNA, 15 nt, Human
ccccucggagaagag

SEQ ID NO: 2497012 - RNA, 13 nt, Human
ccccuccuugggc

SEQ ID NO: 2497013 - RNA, 14 nt, Human
ccccuccuugcucu

SEQ ID NO: 2497014 - RNA, 15 nt, Human
ccccuccuugggcac

SEQ ID NO: 2497015 - RNA, 20 nt, Human
ccccuccuuccuugaccagc

SEQ ID NO: 2497016 - RNA, 15 nt, Human
ccccuccuugccucc

SEQ ID NO: 2497017 - RNA, 18 nt, Human
ccccuccuugccuccugu

SEQ ID NO: 2497018 - RNA, 20 nt, Human
ccccuccuugccuccugugu

SEQ ID NO: 2497019 - RNA, 22 nt, Human
ccccuccugcugcagaggggca

SEQ ID NO: 2497020 - RNA, 13 nt, Human
ccccuccuucaga

SEQ ID NO: 2497021 - RNA, 13 nt, Human
ccccuccugcugc

SEQ ID NO: 2497022 - RNA, 12 nt, Human
ccccuccugcug

SEQ ID NO: 2497023 - RNA, 14 nt, Human
ccccuccucugcca

SEQ ID NO: 2497024 - RNA, 15 nt, Human
ccccuccuuccuuga

SEQ ID NO: 2497025 - RNA, 14 nt, Human
ccccuccugcugca

SEQ ID NO: 2497026 - RNA, 17 nt, Human
ccccuccuuccuugacc

SEQ ID NO: 2497027 - RNA, 12 nt, Human
ccccuccuucuc

SEQ ID NO: 2497028 - RNA, 14 nt, Human
ccccucuccuuccu

SEQ ID NO: 2497029 - RNA, 19 nt, Human
ccccucuccuuccugugug

SEQ ID NO: 2497030 - RNA, 11 nt, Human
ccccucucugc

SEQ ID NO: 2497031 - RNA, 12 nt, Human
ccccucucuccu

SEQ ID NO: 2497032 - RNA, 17 nt, Human
ccccucgugccagucgc

SEQ ID NO: 2497033 - RNA, 20 nt, Human
ccccucuccaggcgccggcg

SEQ ID NO: 2497034 - RNA, 15 nt, Human
ccccucgugccaguc

SEQ ID NO: 2497035 - RNA, 14 nt, Human
ccccucgugccagu

SEQ ID NO: 2497036 - RNA, 21 nt, Human
ccccucgcuuggacggcuggg

SEQ ID NO: 2497037 - RNA, 19 nt, Human
ccccuggaugcagccucac

SEQ ID NO: 2497038 - RNA, 18 nt, Human
ccccuggaugcagccuca

SEQ ID NO: 2497039 - RNA, 13 nt, Human
ccccuggccuccg

SEQ ID NO: 2497040 - RNA, 19 nt, Human
ccccuggccuccggcguca

SEQ ID NO: 2497041 - RNA, 12 nt, Human
ccccuggccucc

SEQ ID NO: 2497042 - RNA, 12 nt, Human
ccccuggccucu

SEQ ID NO: 2497043 - RNA, 15 nt, Human
ccccuggagagaagu

SEQ ID NO: 2497044 - RNA, 15 nt, Human
ccccuggacugggag

SEQ ID NO: 2497045 - RNA, 20 nt, Human
ccccuggaggcacugaagug

SEQ ID NO: 2497046 - RNA, 15 nt, Human
ccccuggaugcagcc

SEQ ID NO: 2497047 - RNA, 19 nt, Human
ccccugcuucuccagccug

SEQ ID NO: 2497048 - RNA, 18 nt, Human
ccccugcuucuccagccu

SEQ ID NO: 2497049 - RNA, 15 nt, Human
ccccugcuucuccag

SEQ ID NO: 2497050 - RNA, 13 nt, Human
ccccugcuucucc

SEQ ID NO: 2497051 - RNA, 11 nt, Human
ccccugcuucu

SEQ ID NO: 2497052 - RNA, 19 nt, Human
ccccugcuuccaccucacc

SEQ ID NO: 2497053 - RNA, 22 nt, Human
ccccugcuggcucuucugccca

SEQ ID NO: 2497054 - RNA, 20 nt, Human
ccccugcugguucaggguug

SEQ ID NO: 2497055 - RNA, 15 nt, Human
ccccugcugguucag

SEQ ID NO: 2497056 - RNA, 13 nt, Human
ccccugcugguuc

SEQ ID NO: 2497057 - RNA, 11 nt, Human
ccccugcuggu

SEQ ID NO: 2497058 - RNA, 17 nt, Human
ccccugcuggguguggc

SEQ ID NO: 2497059 - RNA, 14 nt, Human
ccccugcugggugu

SEQ ID NO: 2497060 - RNA, 23 nt, Human
ccccugcugcaggggcucuggag

SEQ ID NO: 2497061 - RNA, 22 nt, Human
ccccugcugcaggggcucugga

SEQ ID NO: 2497062 - RNA, 19 nt, Human
ccccugcugcaggggcucu

SEQ ID NO: 2497063 - RNA, 12 nt, Human
ccccugcugccu

SEQ ID NO: 2497064 - RNA, 13 nt, Human
ccccugcugccuc

SEQ ID NO: 2497065 - RNA, 14 nt, Human
ccccugcugccucc

SEQ ID NO: 2497066 - RNA, 18 nt, Human
ccccugcugccuccccaa

SEQ ID NO: 2497067 - RNA, 21 nt, Human
ccccugcuggcucuucugccc

SEQ ID NO: 2497068 - RNA, 14 nt, Human
ccccugcuggcucu

SEQ ID NO: 2497069 - RNA, 20 nt, Human
ccccugcugccuccccaacc

SEQ ID NO: 2497070 - RNA, 15 nt, Human
ccccugccucucugc

SEQ ID NO: 2497071 - RNA, 14 nt, Human
ccccugccucucug

SEQ ID NO: 2497072 - RNA, 15 nt, Human
ccccugccuccaccc

SEQ ID NO: 2497073 - RNA, 12 nt, Human
ccccugccucca

SEQ ID NO: 2497074 - RNA, 11 nt, Human
ccccugccucc

SEQ ID NO: 2497075 - RNA, 17 nt, Human
ccccugccggccggggc

SEQ ID NO: 2497076 - RNA, 13 nt, Human
ccccugcccuggg

SEQ ID NO: 2497077 - RNA, 14 nt, Human
ccccugcccugcug

SEQ ID NO: 2497078 - RNA, 15 nt, Human
ccccugcccugcugc

SEQ ID NO: 2497079 - RNA, 13 nt, Human
ccccugcccuggu

SEQ ID NO: 2497080 - RNA, 17 nt, Human
ccccugcccugguccag

SEQ ID NO: 2497081 - RNA, 17 nt, Human
ccccugccucucugcag

SEQ ID NO: 2497082 - RNA, 16 nt, Human
ccccugccucucugca

SEQ ID NO: 2497083 - RNA, 19 nt, Human
ccccugccucucugcaggu

SEQ ID NO: 2497084 - RNA, 21 nt, Human
ccccugccuccacccucugag

SEQ ID NO: 2497085 - RNA, 18 nt, Human
ccccugccuccacccucu

SEQ ID NO: 2497086 - RNA, 22 nt, Human
ccccugccuccacccucugagc

SEQ ID NO: 2497087 - RNA, 12 nt, Human
ccccucugccca

SEQ ID NO: 2497088 - RNA, 18 nt, Human
ccccucugaccugcacug

SEQ ID NO: 2497089 - RNA, 19 nt, Human
ccccucucugcaucugacc

SEQ ID NO: 2497090 - RNA, 15 nt, Human
ccccucugaccugca

SEQ ID NO: 2497091 - RNA, 18 nt, Human
ccccucugcccagcuugg

SEQ ID NO: 2497092 - RNA, 17 nt, Human
ccccucugcccagcuug

SEQ ID NO: 2497093 - RNA, 15 nt, Human
ccccucugcccagcu

SEQ ID NO: 2497094 - RNA, 13 nt, Human
ccccucugcccag

SEQ ID NO: 2497095 - RNA, 12 nt, Human
ccccucugcccu

SEQ ID NO: 2497096 - RNA, 13 nt, Human
ccccucugcccug

SEQ ID NO: 2497097 - RNA, 22 nt, Human
ccccucugcccagcuugggccc

SEQ ID NO: 2497098 - RNA, 14 nt, Human
ccccugccccguca

SEQ ID NO: 2497099 - RNA, 15 nt, Human
ccccugccccgucac

SEQ ID NO: 2497100 - RNA, 22 nt, Human
ccccugccccgucaccaucuca

SEQ ID NO: 2497101 - RNA, 19 nt, Human
ccccugcccggcugcggaa

SEQ ID NO: 2497102 - RNA, 17 nt, Human
ccccugcccggcugcgg

SEQ ID NO: 2497103 - RNA, 12 nt, Human
ccccugcccugc

SEQ ID NO: 2497104 - RNA, 23 nt, Human
ccccugcccucguggccagcccg

SEQ ID NO: 2497105 - RNA, 22 nt, Human
ccccugcccucguggccagccc

SEQ ID NO: 2497106 - RNA, 21 nt, Human
ccccugcccucguggccagcc

SEQ ID NO: 2497107 - RNA, 14 nt, Human
ccccugcccugcac

SEQ ID NO: 2497108 - RNA, 13 nt, Human
ccccugcccugca

SEQ ID NO: 2497109 - RNA, 13 nt, Human
ccccugcccugcu

SEQ ID NO: 2497110 - RNA, 19 nt, Human
ccccugcccucguggccag

SEQ ID NO: 2497111 - RNA, 15 nt, Human
ccccugcccucgugg

SEQ ID NO: 2497112 - RNA, 14 nt, Human
ccccugcccucgug

SEQ ID NO: 2497113 - RNA, 13 nt, Human
ccccugcccucgu

SEQ ID NO: 2497114 - RNA, 23 nt, Human
ccccugcccuccccucucugcac

SEQ ID NO: 2497115 - RNA, 20 nt, Human
ccccuguggggaucucaggg

SEQ ID NO: 2497116 - RNA, 18 nt, Human
ccccuguggggaucucag

SEQ ID NO: 2497117 - RNA, 12 nt, Human
ccccugugggga

SEQ ID NO: 2497118 - RNA, 11 nt, Human
ccccugugcuc

SEQ ID NO: 2497119 - RNA, 19 nt, Human
ccccugugcuccgugccuc

SEQ ID NO: 2497120 - RNA, 19 nt, Human
ccccugugcagccgcugag

SEQ ID NO: 2497121 - RNA, 20 nt, Human
ccccugugcagccgcugagc

SEQ ID NO: 2497122 - RNA, 16 nt, Human
ccccuuccaucccaga

SEQ ID NO: 2497123 - RNA, 14 nt, Human
ccccuuccacugag

SEQ ID NO: 2497124 - RNA, 16 nt, Human
ccccuucauccucuga

SEQ ID NO: 2497125 - RNA, 14 nt, Human
ccccuucagugccc

SEQ ID NO: 2497126 - RNA, 24 nt, Human
ccccuguggggaucucaggggcug

SEQ ID NO: 2497127 - RNA, 21 nt, Human
ccccuguggggaucucagggg

SEQ ID NO: 2497128 - RNA, 15 nt, Human
ccccuguucacucua

SEQ ID NO: 2497129 - RNA, 20 nt, Human
ccccuuccauggacuuuguu

SEQ ID NO: 2497130 - RNA, 13 nt, Human
ccccuuccaugga

SEQ ID NO: 2497131 - RNA, 14 nt, Human
ccccuuccaugugg

SEQ ID NO: 2497132 - RNA, 13 nt, Human
ccccuuccaugug

SEQ ID NO: 2497133 - RNA, 13 nt, Human
ccccuuccccacu

SEQ ID NO: 2497134 - RNA, 15 nt, Human
ccccuuccccacugc

SEQ ID NO: 2497135 - RNA, 19 nt, Human
ccccuuccccacugccugc

SEQ ID NO: 2497136 - RNA, 21 nt, Human
ccccuuccccacugccugccc

SEQ ID NO: 2497137 - RNA, 14 nt, Human
cccgacagccuggc

SEQ ID NO: 2497138 - RNA, 22 nt, Human
cccgaauagcugggacuacagg

SEQ ID NO: 2497139 - RNA, 23 nt, Human
ccccugggugggugguggggagg

SEQ ID NO: 2497140 - RNA, 21 nt, Human
ccccuggguggguggugggga

SEQ ID NO: 2497141 - RNA, 20 nt, Human
ccccuggguggguggugggg

SEQ ID NO: 2497142 - RNA, 21 nt, Human
ccccugggucagucugguggg

SEQ ID NO: 2497143 - RNA, 20 nt, Human
ccccugggucagucuggugg

SEQ ID NO: 2497144 - RNA, 20 nt, Human
ccccuggcuuuucacugcug

SEQ ID NO: 2497145 - RNA, 14 nt, Human
ccccuggccucugu

SEQ ID NO: 2497146 - RNA, 20 nt, Human
ccccuggcuccaggccaggg

SEQ ID NO: 2497147 - RNA, 22 nt, Human
ccccuggcugggacguggcuca

SEQ ID NO: 2497148 - RNA, 23 nt, Human
ccccuggcugggacguggcucag

SEQ ID NO: 2497149 - RNA, 18 nt, Human
ccccuggcuuuucacugc

SEQ ID NO: 2497150 - RNA, 11 nt, Human
ccccugugcag

SEQ ID NO: 2497151 - RNA, 23 nt, Human
ccccugguggacaguccugggag

SEQ ID NO: 2497152 - RNA, 18 nt, Human
ccccugucuagagaggga

SEQ ID NO: 2497153 - RNA, 12 nt, Human
ccccuggugguu

SEQ ID NO: 2497154 - RNA, 21 nt, Human
ccccugguggacaguccuggg

SEQ ID NO: 2497155 - RNA, 22 nt, Human
ccccugguggacaguccuggga

SEQ ID NO: 2497156 - RNA, 15 nt, Human
ccccuggucucuggu

SEQ ID NO: 2497157 - RNA, 15 nt, Human
ccccugguggacagu

SEQ ID NO: 2497158 - RNA, 19 nt, Human
ccccugguggacaguccug

SEQ ID NO: 2497159 - RNA, 20 nt, Human
ccccugguggacaguccugg

SEQ ID NO: 2497160 - RNA, 13 nt, Human
cccgacuugcugu

SEQ ID NO: 2497161 - RNA, 12 nt, Human
cccgacuccuca

SEQ ID NO: 2497162 - RNA, 14 nt, Human
cccgacuccucaaa

SEQ ID NO: 2497163 - RNA, 18 nt, Human
cccgacagccuggcacag

SEQ ID NO: 2497164 - RNA, 15 nt, Human
cccgacagccuggca

SEQ ID NO: 2497165 - RNA, 20 nt, Human
cccgacauggacccggagcu

SEQ ID NO: 2497166 - RNA, 12 nt, Human
cccgacagaggg

SEQ ID NO: 2497167 - RNA, 15 nt, Human
cccgacagagggaag

SEQ ID NO: 2497168 - RNA, 23 nt, Human
cccgacauggacccggagcuaac

SEQ ID NO: 2497169 - RNA, 13 nt, Human
cccgagccuggcu

SEQ ID NO: 2497170 - RNA, 15 nt, Human
cccgagccuggcucc

SEQ ID NO: 2497171 - RNA, 11 nt, Human
cccgagcuggg

SEQ ID NO: 2497172 - RNA, 20 nt, Human
cccgagcugggggccaugag

SEQ ID NO: 2497173 - RNA, 22 nt, Human
cccgagcugggggccaugagcu

SEQ ID NO: 2497174 - RNA, 23 nt, Human
cccgagcugggggccaugagcuc

SEQ ID NO: 2497175 - RNA, 12 nt, Human
cccgagcuggug

SEQ ID NO: 2497176 - RNA, 14 nt, Human
cccgagcuggugca

SEQ ID NO: 2497177 - RNA, 20 nt, Human
cccgcagaccuccccagccc

SEQ ID NO: 2497178 - RNA, 19 nt, Human
cccgcagaccuccccagcc

SEQ ID NO: 2497179 - RNA, 18 nt, Human
cccgcagaccuccccagc

SEQ ID NO: 2497180 - RNA, 14 nt, Human
cccgcagaccuccc

SEQ ID NO: 2497181 - RNA, 12 nt, Human
cccgcagaccuc

SEQ ID NO: 2497182 - RNA, 17 nt, Human
cccgaggacccagaccc

SEQ ID NO: 2497183 - RNA, 16 nt, Human
cccgcagacaccuugg

SEQ ID NO: 2497184 - RNA, 15 nt, Human
cccgcagacaccuug

SEQ ID NO: 2497185 - RNA, 16 nt, Human
cccgaggacccagacc

SEQ ID NO: 2497186 - RNA, 15 nt, Human
cccgaggacccagac

SEQ ID NO: 2497187 - RNA, 22 nt, Human
cccgagcuggugcauuacagag

SEQ ID NO: 2497188 - RNA, 22 nt, Human
cccgcccaggcuggccagcccc

SEQ ID NO: 2497189 - RNA, 20 nt, Human
cccgcccaggcuggccagcc

SEQ ID NO: 2497190 - RNA, 18 nt, Human
cccgcccaggcuggccag

SEQ ID NO: 2497191 - RNA, 17 nt, Human
cccgcccaggcuggcca

SEQ ID NO: 2497192 - RNA, 15 nt, Human
cccgcccaggcuggc

SEQ ID NO: 2497193 - RNA, 23 nt, Human
cccgcuaagagggagggagggcu

SEQ ID NO: 2497194 - RNA, 22 nt, Human
cccgcccaggcuuagucacuga

SEQ ID NO: 2497195 - RNA, 20 nt, Human
cccgcccaggcuuagucacu

SEQ ID NO: 2497196 - RNA, 21 nt, Human
cccgcagaccuccccagcccc

SEQ ID NO: 2497197 - RNA, 19 nt, Human
cccgcagugugcacuaagg

SEQ ID NO: 2497198 - RNA, 22 nt, Human
cccgcagugugcacuaaggggc

SEQ ID NO: 2497199 - RNA, 20 nt, Human
cccgcccacuguccugggcg

SEQ ID NO: 2497200 - RNA, 19 nt, Human
cccgcccacuguccugggc

SEQ ID NO: 2497201 - RNA, 18 nt, Human
cccgcccacuguccuggg

SEQ ID NO: 2497202 - RNA, 17 nt, Human
cccgcccacuguccugg

SEQ ID NO: 2497203 - RNA, 14 nt, Human
cccgcccaggcugg

SEQ ID NO: 2497204 - RNA, 12 nt, Human
cccgcccaggcu

SEQ ID NO: 2497205 - RNA, 13 nt, Human
cccgcccagcugc

SEQ ID NO: 2497206 - RNA, 16 nt, Human
cccgcccacuguccug

SEQ ID NO: 2497207 - RNA, 12 nt, Human
cccgcccacugu

SEQ ID NO: 2497208 - RNA, 23 nt, Human
cccgccaccuaucucgugggaga

SEQ ID NO: 2497209 - RNA, 15 nt, Human
cccgccaaaagcugc

SEQ ID NO: 2497210 - RNA, 13 nt, Human
cuccacuggaugg

SEQ ID NO: 2497211 - RNA, 16 nt, Human
cuccacugccuucgau

SEQ ID NO: 2497212 - RNA, 15 nt, Human
cuccacugccuucga

SEQ ID NO: 2497213 - RNA, 14 nt, Human
cuccacugccuucg

SEQ ID NO: 2497214 - RNA, 14 nt, Human
cuccacucuccucu

SEQ ID NO: 2497215 - RNA, 13 nt, Human
cuccacugccuuc

SEQ ID NO: 2497216 - RNA, 15 nt, Human
cuccacucuccccca

SEQ ID NO: 2497217 - RNA, 13 nt, Human
cuccacucucccc

SEQ ID NO: 2497218 - RNA, 12 nt, Human
cuccacuccuuc

SEQ ID NO: 2497219 - RNA, 14 nt, Human
cuccacuccuuccu

SEQ ID NO: 2497220 - RNA, 15 nt, Human
cuccacuccuuccug

SEQ ID NO: 2497221 - RNA, 19 nt, Human
cuccacuccuuccugccac

SEQ ID NO: 2497222 - RNA, 20 nt, Human
cuccacguucugcucaucau

SEQ ID NO: 2497223 - RNA, 14 nt, Human
cuccacucccacuu

SEQ ID NO: 2497224 - RNA, 13 nt, Human
cuccacucccacu

SEQ ID NO: 2497225 - RNA, 13 nt, Human
cuccaccucagcc

SEQ ID NO: 2497226 - RNA, 14 nt, Human
cuccaccucagccu

SEQ ID NO: 2497227 - RNA, 16 nt, Human
cuccaccgccauggcu

SEQ ID NO: 2497228 - RNA, 20 nt, Human
cuccaccgccauggcuucca

SEQ ID NO: 2497229 - RNA, 14 nt, Human
cuccaccgcugccu

SEQ ID NO: 2497230 - RNA, 15 nt, Human
cuccaccgcugccua

SEQ ID NO: 2497231 - RNA, 16 nt, Human
cuccaccgcugccuaa

SEQ ID NO: 2497232 - RNA, 19 nt, Human
cuccaccgcugccuaagug

SEQ ID NO: 2497233 - RNA, 20 nt, Human
cuccaccuaguggcugucca

SEQ ID NO: 2497234 - RNA, 15 nt, Human
cuccaccuaguggcu

SEQ ID NO: 2497235 - RNA, 15 nt, Human
cuccaccuagacugu

SEQ ID NO: 2497236 - RNA, 22 nt, Human
cuccaccuaguggcuguccagu

SEQ ID NO: 2497237 - RNA, 21 nt, Human
cuccaccuaguggcuguccag

SEQ ID NO: 2497238 - RNA, 23 nt, Human
cuccaccuaguggcuguccagug

SEQ ID NO: 2497239 - RNA, 12 nt, Human
cuccaccucagc

SEQ ID NO: 2497240 - RNA, 13 nt, Human
cuccaccaggaac

SEQ ID NO: 2497241 - RNA, 14 nt, Human
cuccaccaggaacc

SEQ ID NO: 2497242 - RNA, 15 nt, Human
cuccaccaggaaccu

SEQ ID NO: 2497243 - RNA, 13 nt, Human
cuccaccacccaa

SEQ ID NO: 2497244 - RNA, 14 nt, Human
cuccaccacccaaa

SEQ ID NO: 2497245 - RNA, 21 nt, Human
cuccaccaccacuggccacca

SEQ ID NO: 2497246 - RNA, 19 nt, Human
cuccaccaccacuggccac

SEQ ID NO: 2497247 - RNA, 23 nt, Human
cuccaccaccacuggccaccagg

SEQ ID NO: 2497248 - RNA, 12 nt, Human
cuccaccaccca

SEQ ID NO: 2497249 - RNA, 16 nt, Human
cuccaccacccaaaag

SEQ ID NO: 2497250 - RNA, 23 nt, Human
cuccaagggcuucugcacccucc

SEQ ID NO: 2497251 - RNA, 22 nt, Human
cuccaagggcuucugcacccuc

SEQ ID NO: 2497252 - RNA, 20 nt, Human
cuccaagggcuucugcaccc

SEQ ID NO: 2497253 - RNA, 19 nt, Human
cuccaagggcuucugcacc

SEQ ID NO: 2497254 - RNA, 18 nt, Human
cuccaagggcuucugcac

SEQ ID NO: 2497255 - RNA, 20 nt, Human
cuccaaggggaaucagaacu

SEQ ID NO: 2497256 - RNA, 15 nt, Human
cuccaaggugggguc

SEQ ID NO: 2497257 - RNA, 17 nt, Human
cuccaccaccacuggcc

SEQ ID NO: 2497258 - RNA, 17 nt, Human
cuccacccuuggccugu

SEQ ID NO: 2497259 - RNA, 21 nt, Human
cuccacccuuggccugucuca

SEQ ID NO: 2497260 - RNA, 13 nt, Human
cuccacccuuggc

SEQ ID NO: 2497261 - RNA, 18 nt, Human
cuccacccccagcugcuu

SEQ ID NO: 2497262 - RNA, 14 nt, Human
cuccacccuuggcc

SEQ ID NO: 2497263 - RNA, 15 nt, Human
cuccacccuuggccu

SEQ ID NO: 2497264 - RNA, 16 nt, Human
cuccacccuuggccug

SEQ ID NO: 2497265 - RNA, 17 nt, Human
cuccacccccagcugcu

SEQ ID NO: 2497266 - RNA, 15 nt, Human
cuccacccccagcug

SEQ ID NO: 2497267 - RNA, 14 nt, Human
cuccacccccagcu

SEQ ID NO: 2497268 - RNA, 13 nt, Human
cuccacccccagc

SEQ ID NO: 2497269 - RNA, 23 nt, Human
cuccacccauccuaucagccugu

SEQ ID NO: 2497270 - RNA, 21 nt, Human
cuccacccauccuaucagccu

SEQ ID NO: 2497271 - RNA, 14 nt, Human
cuccacccauccua

SEQ ID NO: 2497272 - RNA, 18 nt, Human
cuccagcucaccagcccc

SEQ ID NO: 2497273 - RNA, 16 nt, Human
cuccagcucaccagcc

SEQ ID NO: 2497274 - RNA, 15 nt, Human
cuccagcucaccagc

SEQ ID NO: 2497275 - RNA, 14 nt, Human
cuccagccccugga

SEQ ID NO: 2497276 - RNA, 13 nt, Human
cuccagccccugg

SEQ ID NO: 2497277 - RNA, 11 nt, Human
cuccagccccu

SEQ ID NO: 2497278 - RNA, 19 nt, Human
cuccagauguuuccagacu

SEQ ID NO: 2497279 - RNA, 16 nt, Human
cuccacucucccccac

SEQ ID NO: 2497280 - RNA, 11 nt, Human
cuccagaccug

SEQ ID NO: 2497281 - RNA, 12 nt, Human
cuccagaccuga

SEQ ID NO: 2497282 - RNA, 14 nt, Human
cuccagaccugauc

SEQ ID NO: 2497283 - RNA, 14 nt, Human
cuccacuggaugga

SEQ ID NO: 2497284 - RNA, 21 nt, Human
cuccagaccccuggcuuuuca

SEQ ID NO: 2497285 - RNA, 19 nt, Human
cuccagaccugauccugga

SEQ ID NO: 2497286 - RNA, 23 nt, Human
cuccagaccugauccuggaggcc

SEQ ID NO: 2497287 - RNA, 13 nt, Human
cuccagacucucu

SEQ ID NO: 2497288 - RNA, 20 nt, Human
cuccagacguaggggagggg

SEQ ID NO: 2497289 - RNA, 19 nt, Human
cuccagacguaggggaggg

SEQ ID NO: 2497290 - RNA, 22 nt, Human
cuccacuccuuccugccaccug

SEQ ID NO: 2497291 - RNA, 18 nt, Human
cuccagacucucugugaa

SEQ ID NO: 2497292 - RNA, 16 nt, Human
cuccagacucucugug

SEQ ID NO: 2497293 - RNA, 15 nt, Human
cuccagacucucugu

SEQ ID NO: 2497294 - RNA, 14 nt, Human
cuccagacucucug

SEQ ID NO: 2497295 - RNA, 13 nt, Human
cuccagagggcac

SEQ ID NO: 2497296 - RNA, 20 nt, Human
cuccagagggcacucugcuu

SEQ ID NO: 2497297 - RNA, 21 nt, Human
cuccagagggcacucugcuug

SEQ ID NO: 2497298 - RNA, 16 nt, Human
cuccagagucagaagu

SEQ ID NO: 2497299 - RNA, 17 nt, Human
cuccagaugcagggcag

SEQ ID NO: 2497300 - RNA, 18 nt, Human
cuccagaugcagggcagu

SEQ ID NO: 2497301 - RNA, 21 nt, Human
cuccagaugcagggcagucau

SEQ ID NO: 2497302 - RNA, 17 nt, Human
cuccagauguuuccaga

SEQ ID NO: 2497303 - RNA, 16 nt, Human
cuccagaugcagggca

SEQ ID NO: 2497304 - RNA, 21 nt, Human
cuccagauagcucauuucauu

SEQ ID NO: 2497305 - RNA, 20 nt, Human
cuccagaguggggaugacau

SEQ ID NO: 2497306 - RNA, 14 nt, Human
cucauuuccaagca

SEQ ID NO: 2497307 - RNA, 13 nt, Human
cucauuuccaagc

SEQ ID NO: 2497308 - RNA, 12 nt, Human
cucauuuccaag

SEQ ID NO: 2497309 - RNA, 13 nt, Human
cucauuucaggau

SEQ ID NO: 2497310 - RNA, 12 nt, Human
cucauuucagga

SEQ ID NO: 2497311 - RNA, 23 nt, Human
cucauuucaccccucccuuucuc

SEQ ID NO: 2497312 - RNA, 17 nt, Human
cucauuuccaagcaagu

SEQ ID NO: 2497313 - RNA, 18 nt, Human
cucauuugucacacacuu

SEQ ID NO: 2497314 - RNA, 16 nt, Human
cucauuucaggagcag

SEQ ID NO: 2497315 - RNA, 21 nt, Human
cucauuucaggagcagccuca

SEQ ID NO: 2497316 - RNA, 21 nt, Human
cucauuugucacacacuuugg

SEQ ID NO: 2497317 - RNA, 22 nt, Human
cuccaaaauguuggucauuuua

SEQ ID NO: 2497318 - RNA, 15 nt, Human
cuccaaacccucgag

SEQ ID NO: 2497319 - RNA, 17 nt, Human
cuccaaacccucgaggc

SEQ ID NO: 2497320 - RNA, 18 nt, Human
cuccaaaauaaaacuuuu

SEQ ID NO: 2497321 - RNA, 19 nt, Human
cuccaaggaggggcuguaa

SEQ ID NO: 2497322 - RNA, 20 nt, Human
cuccaaggaggggcuguaaa

SEQ ID NO: 2497323 - RNA, 21 nt, Human
cuccaaggaggggcuguaaaa

SEQ ID NO: 2497324 - RNA, 22 nt, Human
cuccaaggaggggcuguaaaau

SEQ ID NO: 2497325 - RNA, 22 nt, Human
cuccaaacugaagcagccucuc

SEQ ID NO: 2497326 - RNA, 15 nt, Human
cuccaaggaccaggu

SEQ ID NO: 2497327 - RNA, 14 nt, Human
cuccaaggaccagg

SEQ ID NO: 2497328 - RNA, 12 nt, Human
cuccaaggacca

SEQ ID NO: 2497329 - RNA, 21 nt, Human
cuccaaacccucgaggcggau

SEQ ID NO: 2497330 - RNA, 22 nt, Human
cuccaaaccuccuguuagcugu

SEQ ID NO: 2497331 - RNA, 17 nt, Human
cuccaagcucccaggca

SEQ ID NO: 2497332 - RNA, 18 nt, Human
cuccaaacugaagcagcc

SEQ ID NO: 2497333 - RNA, 18 nt, Human
cucauucuccuuguguua

SEQ ID NO: 2497334 - RNA, 22 nt, Human
cucauucuccuuguguuacuaa

SEQ ID NO: 2497335 - RNA, 17 nt, Human
cucauugaccugaggcc

SEQ ID NO: 2497336 - RNA, 17 nt, Human
cucauucugaaggagcc

SEQ ID NO: 2497337 - RNA, 19 nt, Human
cucauucugaaggagcccc

SEQ ID NO: 2497338 - RNA, 21 nt, Human
cucauugaccugaggcccuuc

SEQ ID NO: 2497339 - RNA, 19 nt, Human
cucauugaccugaggcccu

SEQ ID NO: 2497340 - RNA, 22 nt, Human
cucauuucaccccucccuuucu

SEQ ID NO: 2497341 - RNA, 19 nt, Human
cucauuucaccccucccuu

SEQ ID NO: 2497342 - RNA, 17 nt, Human
cucauuucaccccuccc

SEQ ID NO: 2497343 - RNA, 14 nt, Human
cucauuucaccccu

SEQ ID NO: 2497344 - RNA, 15 nt, Human
cucauugcugagccu

SEQ ID NO: 2497345 - RNA, 16 nt, Human
cucauugcugagccuc

SEQ ID NO: 2497346 - RNA, 16 nt, Human
cucaguucucuucacu

SEQ ID NO: 2497347 - RNA, 17 nt, Human
cucaguucucuucacuc

SEQ ID NO: 2497348 - RNA, 22 nt, Human
cucaguuccgauuucccaggcu

SEQ ID NO: 2497349 - RNA, 20 nt, Human
cucaguuccgauuucccagg

SEQ ID NO: 2497350 - RNA, 22 nt, Human
cucaguucccuuggccucagaa

SEQ ID NO: 2497351 - RNA, 21 nt, Human
cucaguucuagucucucuggg

SEQ ID NO: 2497352 - RNA, 20 nt, Human
cucaguucuagucucucugg

SEQ ID NO: 2497353 - RNA, 19 nt, Human
cucaguucuagucucucug

SEQ ID NO: 2497354 - RNA, 15 nt, Human
cucaguucuagucuc

SEQ ID NO: 2497355 - RNA, 15 nt, Human
cucaguuuaauccuu

SEQ ID NO: 2497356 - RNA, 21 nt, Human
cucaguuguagaauguauugu

SEQ ID NO: 2497357 - RNA, 16 nt, Human
cucaguuguagaaugu

SEQ ID NO: 2497358 - RNA, 14 nt, Human
cucaguuguagaau

SEQ ID NO: 2497359 - RNA, 11 nt, Human
cucaguuguag

SEQ ID NO: 2497360 - RNA, 22 nt, Human
cucaguuugugugucuuaauua

SEQ ID NO: 2497361 - RNA, 17 nt, Human
cucaguuuuaucauuuu

SEQ ID NO: 2497362 - RNA, 13 nt, Human
cucaguuuucaua

SEQ ID NO: 2497363 - RNA, 18 nt, Human
cucaguuuuaucauuuuc

SEQ ID NO: 2497364 - RNA, 13 nt, Human
cucaguuugucag

SEQ ID NO: 2497365 - RNA, 13 nt, Human
cucaguuucccua

SEQ ID NO: 2497366 - RNA, 16 nt, Human
cucaguuucccuaucu

SEQ ID NO: 2497367 - RNA, 18 nt, Human
cucaguuuaauccuucua

SEQ ID NO: 2497368 - RNA, 17 nt, Human
cucaguuuaauccuucu

SEQ ID NO: 2497369 - RNA, 21 nt, Human
cucaguuuaauccuucuaguu

SEQ ID NO: 2497370 - RNA, 12 nt, Human
cucaguuucccu

SEQ ID NO: 2497371 - RNA, 21 nt, Human
cucauaaaaagccugcaauuu

SEQ ID NO: 2497372 - RNA, 14 nt, Human
cucaguuuucauaa

SEQ ID NO: 2497373 - RNA, 20 nt, Human
cucauuccugccugucuccu

SEQ ID NO: 2497374 - RNA, 17 nt, Human
cucauaaaaagcaaaac

SEQ ID NO: 2497375 - RNA, 14 nt, Human
cucauaaaaagcaa

SEQ ID NO: 2497376 - RNA, 12 nt, Human
cucauuccugua

SEQ ID NO: 2497377 - RNA, 21 nt, Human
cucccuauuuuuuuucuguua

SEQ ID NO: 2497378 - RNA, 22 nt, Human
cucccuauuuuuuuucuguuau

SEQ ID NO: 2497379 - RNA, 15 nt, Human
cucccucaaagcaca

SEQ ID NO: 2497380 - RNA, 15 nt, Human
cucccucacccugag

SEQ ID NO: 2497381 - RNA, 17 nt, Human
cucccucaauucccccu

SEQ ID NO: 2497382 - RNA, 18 nt, Human
cucccucacccugagccc

SEQ ID NO: 2497383 - RNA, 13 nt, Human
cucccucacccug

SEQ ID NO: 2497384 - RNA, 14 nt, Human
cucccucaacccca

SEQ ID NO: 2497385 - RNA, 22 nt, Human
cuccccuggaacugucucucau

SEQ ID NO: 2497386 - RNA, 23 nt, Human
cuccccuggggacagcaagggcu

SEQ ID NO: 2497387 - RNA, 14 nt, Human
cuccccuguaccuu

SEQ ID NO: 2497388 - RNA, 19 nt, Human
cuccccugugcaguccugg

SEQ ID NO: 2497389 - RNA, 19 nt, Human
cucccgaauagcugggacu

SEQ ID NO: 2497390 - RNA, 23 nt, Human
cucccgaauagcugggacuacag

SEQ ID NO: 2497391 - RNA, 20 nt, Human
cucccgaauagcugggacua

SEQ ID NO: 2497392 - RNA, 23 nt, Human
cucccuggaguguggcugaggag

SEQ ID NO: 2497393 - RNA, 21 nt, Human
cucccuucaaccauuccccau

SEQ ID NO: 2497394 - RNA, 15 nt, Human
cucccuggcccucaa

SEQ ID NO: 2497395 - RNA, 14 nt, Human
cucccuggcccuca

SEQ ID NO: 2497396 - RNA, 13 nt, Human
cucccuggcccuc

SEQ ID NO: 2497397 - RNA, 12 nt, Human
cucccuggcccu

SEQ ID NO: 2497398 - RNA, 15 nt, Human
cucccuucauccuuc

SEQ ID NO: 2497399 - RNA, 23 nt, Human
cucccuucaaccauuccccaugg

SEQ ID NO: 2497400 - RNA, 22 nt, Human
cucccuucaaccauuccccaug

SEQ ID NO: 2497401 - RNA, 22 nt, Human
cucccuggaguguggcugagga

SEQ ID NO: 2497402 - RNA, 22 nt, Human
cucccuggagugcaguuuccaa

SEQ ID NO: 2497403 - RNA, 12 nt, Human
cucccuggagug

SEQ ID NO: 2497404 - RNA, 11 nt, Human
cucccuggagu

SEQ ID NO: 2497405 - RNA, 21 nt, Human
cucccuggagccagacucugg

SEQ ID NO: 2497406 - RNA, 19 nt, Human
cucccuggagccagacucu

SEQ ID NO: 2497407 - RNA, 18 nt, Human
cucccuggagccagacuc

SEQ ID NO: 2497408 - RNA, 18 nt, Human
cucccugcuguccccucu

SEQ ID NO: 2497409 - RNA, 16 nt, Human
cucccugcuguccccu

SEQ ID NO: 2497410 - RNA, 14 nt, Human
cucccugcuguccc

SEQ ID NO: 2497411 - RNA, 11 nt, Human
cucccugcugu

SEQ ID NO: 2497412 - RNA, 20 nt, Human
cucccugcuguccccucuug

SEQ ID NO: 2497413 - RNA, 19 nt, Human
cucccugcuguccccucuu

SEQ ID NO: 2497414 - RNA, 12 nt, Human
cucccuggagcc

SEQ ID NO: 2497415 - RNA, 18 nt, Human
cucccucagucuggcccu

SEQ ID NO: 2497416 - RNA, 12 nt, Human
cucccucagccc

SEQ ID NO: 2497417 - RNA, 13 nt, Human
cucccucagcccc

SEQ ID NO: 2497418 - RNA, 14 nt, Human
cucccucagccccu

SEQ ID NO: 2497419 - RNA, 15 nt, Human
cucccucagccccuc

SEQ ID NO: 2497420 - RNA, 16 nt, Human
cucccucagccccucu

SEQ ID NO: 2497421 - RNA, 18 nt, Human
cucccucagccccucuug

SEQ ID NO: 2497422 - RNA, 14 nt, Human
cuccccagcccaga

SEQ ID NO: 2497423 - RNA, 15 nt, Human
cuccccagcccagag

SEQ ID NO: 2497424 - RNA, 16 nt, Human
cuccccagcccagaga

SEQ ID NO: 2497425 - RNA, 17 nt, Human
cuccccagcccagagac

SEQ ID NO: 2497426 - RNA, 16 nt, Human
cuccccuccuugccuc

SEQ ID NO: 2497427 - RNA, 18 nt, Human
cuccccagcccagagaca

SEQ ID NO: 2497428 - RNA, 11 nt, Human
cuccccagccc

SEQ ID NO: 2497429 - RNA, 15 nt, Human
cuccccagcccaggg

SEQ ID NO: 2497430 - RNA, 14 nt, Human
cuccccucggagaa

SEQ ID NO: 2497431 - RNA, 16 nt, Human
cuccccucuccuuccu

SEQ ID NO: 2497432 - RNA, 16 nt, Human
cuccccagcccagggu

SEQ ID NO: 2497433 - RNA, 22 nt, Human
cuccccagcccaggguuccccc

SEQ ID NO: 2497434 - RNA, 19 nt, Human
cuccccuccuugccuccug

SEQ ID NO: 2497435 - RNA, 20 nt, Human
cuccccuccuugccuccugu

SEQ ID NO: 2497436 - RNA, 12 nt, Human
cuccccacucua

SEQ ID NO: 2497437 - RNA, 23 nt, Human
cuccccacggggccucgggaccu

SEQ ID NO: 2497438 - RNA, 22 nt, Human
cuccccacggccgcuccagggg

SEQ ID NO: 2497439 - RNA, 21 nt, Human
cuccccacggccgcuccaggg

SEQ ID NO: 2497440 - RNA, 13 nt, Human
cuccccacucuag

SEQ ID NO: 2497441 - RNA, 20 nt, Human
cuccccacggccgcuccagg

SEQ ID NO: 2497442 - RNA, 17 nt, Human
cuccccacggccgcucc

SEQ ID NO: 2497443 - RNA, 15 nt, Human
cuccccacgcccucc

SEQ ID NO: 2497444 - RNA, 23 nt, Human
cuccccagcauuccagccccucu

SEQ ID NO: 2497445 - RNA, 22 nt, Human
cuccccagcauuccagccccuc

SEQ ID NO: 2497446 - RNA, 21 nt, Human
cuccccagcauuccagccccu

SEQ ID NO: 2497447 - RNA, 13 nt, Human
cuccccagcccag

SEQ ID NO: 2497448 - RNA, 23 nt, Human
cuccccugcuggguguggcgcag

SEQ ID NO: 2497449 - RNA, 21 nt, Human
cuccccugcuggguguggcgc

SEQ ID NO: 2497450 - RNA, 23 nt, Human
cuccccugccaccaggccaccuc

SEQ ID NO: 2497451 - RNA, 18 nt, Human
cuccccugccaccaggcc

SEQ ID NO: 2497452 - RNA, 13 nt, Human
cuccccugccacc

SEQ ID NO: 2497453 - RNA, 12 nt, Human
cuccccugccac

SEQ ID NO: 2497454 - RNA, 15 nt, Human
cuccccugccagggc

SEQ ID NO: 2497455 - RNA, 16 nt, Human
cuccccugccagggca

SEQ ID NO: 2497456 - RNA, 14 nt, Human
cuccccugcugggu

SEQ ID NO: 2497457 - RNA, 17 nt, Human
cuccccugaccugugag

SEQ ID NO: 2497458 - RNA, 22 nt, Human
cuccccugaccugugagcccag

SEQ ID NO: 2497459 - RNA, 16 nt, Human
cuccccugaccuguga

SEQ ID NO: 2497460 - RNA, 22 nt, Human
cuccccuccuugccuccugugu

SEQ ID NO: 2497461 - RNA, 10 nt, Human
cuccccucua

SEQ ID NO: 2497462 - RNA, 12 nt, Human
cuccccucucuu

SEQ ID NO: 2497463 - RNA, 21 nt, Human
cuccccucuauuuagcaugac

SEQ ID NO: 2497464 - RNA, 17 nt, Human
cuccccucucuugcacc

SEQ ID NO: 2497465 - RNA, 21 nt, Human
cuccccugcacuggaguccag

SEQ ID NO: 2497466 - RNA, 22 nt, Human
cuccccugaggcucagggaaag

SEQ ID NO: 2497467 - RNA, 13 nt, Human
cuccccugaggcu

SEQ ID NO: 2497468 - RNA, 15 nt, Human
cuccccucucuugca

SEQ ID NO: 2497469 - RNA, 22 nt, Human
cuccccugauuacaccagccuc

SEQ ID NO: 2497470 - RNA, 15 nt, Human
cuccccugcacugga

SEQ ID NO: 2497471 - RNA, 15 nt, Human
cuccauuuaguucuu

SEQ ID NO: 2497472 - RNA, 23 nt, Human
cucccaaagugcugggauuacag

SEQ ID NO: 2497473 - RNA, 16 nt, Human
cucccaaagugcuggg

SEQ ID NO: 2497474 - RNA, 15 nt, Human
cucccaacucacccc

SEQ ID NO: 2497475 - RNA, 14 nt, Human
cucccaacucaccc

SEQ ID NO: 2497476 - RNA, 20 nt, Human
cucccaaguuuuaggacaaa

SEQ ID NO: 2497477 - RNA, 15 nt, Human
cucccaaaugagcca

SEQ ID NO: 2497478 - RNA, 15 nt, Human
cucccacaaaggaga

SEQ ID NO: 2497479 - RNA, 21 nt, Human
cuccaugcuuagucacugccu

SEQ ID NO: 2497480 - RNA, 20 nt, Human
cuccaugcuuagucacugcc

SEQ ID NO: 2497481 - RNA, 17 nt, Human
cuccaugcugccuccag

SEQ ID NO: 2497482 - RNA, 16 nt, Human
cuccaugcugccucca

SEQ ID NO: 2497483 - RNA, 15 nt, Human
cuccaugcugccucc

SEQ ID NO: 2497484 - RNA, 14 nt, Human
cuccaugcugccuc

SEQ ID NO: 2497485 - RNA, 13 nt, Human
cuccaugcugccu

SEQ ID NO: 2497486 - RNA, 20 nt, Human
cuccagcugggcucugcaau

SEQ ID NO: 2497487 - RNA, 19 nt, Human
cuccagcugggcucugcaa

SEQ ID NO: 2497488 - RNA, 15 nt, Human
cuccagcugggcucu

SEQ ID NO: 2497489 - RNA, 22 nt, Human
cuccagcuggccgggagccuga

SEQ ID NO: 2497490 - RNA, 23 nt, Human
cuccagcuggccgggagccugau

SEQ ID NO: 2497491 - RNA, 15 nt, Human
cuccagcucuuuccu

SEQ ID NO: 2497492 - RNA, 20 nt, Human
cuccagcugcucugucuucu

SEQ ID NO: 2497493 - RNA, 21 nt, Human
cucccauggcuuaaugcuucu

SEQ ID NO: 2497494 - RNA, 20 nt, Human
cucccauggcuuaaugcuuc

SEQ ID NO: 2497495 - RNA, 14 nt, Human
cucccauggcaccu

SEQ ID NO: 2497496 - RNA, 23 nt, Human
cucccauggagccccagcccccu

SEQ ID NO: 2497497 - RNA, 20 nt, Human
cucccauggagccccagccc

SEQ ID NO: 2497498 - RNA, 19 nt, Human
cucccauggagccccagcc

SEQ ID NO: 2497499 - RNA, 18 nt, Human
cucccauggagccccagc

SEQ ID NO: 2497500 - RNA, 17 nt, Human
cucccauggagccccag

SEQ ID NO: 2497501 - RNA, 16 nt, Human
cucccauggagcccca

SEQ ID NO: 2497502 - RNA, 15 nt, Human
cucccauggagcccc

SEQ ID NO: 2497503 - RNA, 14 nt, Human
cucccauggagccc

SEQ ID NO: 2497504 - RNA, 16 nt, Human
cucccauccccuggac

SEQ ID NO: 2497505 - RNA, 15 nt, Human
cucccauccccugga

SEQ ID NO: 2497506 - RNA, 13 nt, Human
cucccauccccug

SEQ ID NO: 2497507 - RNA, 24 nt, Human
cucccaucccccugcccucguggc

SEQ ID NO: 2497508 - RNA, 19 nt, Human
cucccaucccccugcccuc

SEQ ID NO: 2497509 - RNA, 18 nt, Human
cucccaucccccugcccu

SEQ ID NO: 2497510 - RNA, 17 nt, Human
cucccaucccccugccc

SEQ ID NO: 2497511 - RNA, 16 nt, Human
cucccaucccccugcc

SEQ ID NO: 2497512 - RNA, 14 nt, Human
cucccaucccccug

SEQ ID NO: 2497513 - RNA, 12 nt, Human
cucccauccccc

SEQ ID NO: 2497514 - RNA, 14 nt, Human
cucccauccagggc

SEQ ID NO: 2497515 - RNA, 15 nt, Human
cucccauccagggcc

SEQ ID NO: 2497516 - RNA, 22 nt, Human
cucccauccagggcccccaucu

SEQ ID NO: 2497517 - RNA, 20 nt, Human
cucccauucacucuuccaga

SEQ ID NO: 2497518 - RNA, 19 nt, Human
cucccauuaggacaaucag

SEQ ID NO: 2497519 - RNA, 19 nt, Human
cucccauucacucuuccag

SEQ ID NO: 2497520 - RNA, 14 nt, Human
cucccauuccugaa

SEQ ID NO: 2497521 - RNA, 15 nt, Human
cucccauuccugaag

SEQ ID NO: 2497522 - RNA, 16 nt, Human
cucccauuccugaaga

SEQ ID NO: 2497523 - RNA, 17 nt, Human
cucccauuccugaagaa

SEQ ID NO: 2497524 - RNA, 19 nt, Human
cucccauuccugaagaacc

SEQ ID NO: 2497525 - RNA, 17 nt, Human
cucccauugucccucug

SEQ ID NO: 2497526 - RNA, 19 nt, Human
cucccauugucccucugcc

SEQ ID NO: 2497527 - RNA, 18 nt, Human
cuccccacaggagcccug

SEQ ID NO: 2497528 - RNA, 22 nt, Human
cucccauugucccucugcccca

SEQ ID NO: 2497529 - RNA, 19 nt, Human
cuccccaccaccccagcug

SEQ ID NO: 2497530 - RNA, 14 nt, Human
cuccccacccgccc

SEQ ID NO: 2497531 - RNA, 20 nt, Human
cuccccaccaccccagcugc

SEQ ID NO: 2497532 - RNA, 12 nt, Human
cuccccacgccc

SEQ ID NO: 2497533 - RNA, 21 nt, Human
cuccccaccuucaauuccugg

SEQ ID NO: 2497534 - RNA, 23 nt, Human
cuccccaccuucaauuccugggc

SEQ ID NO: 2497535 - RNA, 19 nt, Human
cucccaggcgccccuuccc

SEQ ID NO: 2497536 - RNA, 17 nt, Human
cucccaggcgccccuuc

SEQ ID NO: 2497537 - RNA, 17 nt, Human
cucccacaggcagcuuu

SEQ ID NO: 2497538 - RNA, 16 nt, Human
cucccacaggcagcuu

SEQ ID NO: 2497539 - RNA, 15 nt, Human
cucccacaggcagcu

SEQ ID NO: 2497540 - RNA, 14 nt, Human
cucccacaggcagc

SEQ ID NO: 2497541 - RNA, 15 nt, Human
cucccacacugcuag

SEQ ID NO: 2497542 - RNA, 21 nt, Human
cucccaauuucagacucccau

SEQ ID NO: 2497543 - RNA, 19 nt, Human
cucccaauuucagacuccc

SEQ ID NO: 2497544 - RNA, 14 nt, Human
cucccacacugcua

SEQ ID NO: 2497545 - RNA, 14 nt, Human
cucccaucacccgc

SEQ ID NO: 2497546 - RNA, 19 nt, Human
cucccagggccagggcccu

SEQ ID NO: 2497547 - RNA, 16 nt, Human
cucccaucacuucccu

SEQ ID NO: 2497548 - RNA, 22 nt, Human
cucccaggcgccccuucccccu

SEQ ID NO: 2497549 - RNA, 20 nt, Human
cucccaggcgccccuucccc

SEQ ID NO: 2497550 - RNA, 18 nt, Human
cucccacaggcagcuuua

SEQ ID NO: 2497551 - RNA, 16 nt, Human
cucccagggccagggc

SEQ ID NO: 2497552 - RNA, 12 nt, Human
cucccaggcucu

SEQ ID NO: 2497553 - RNA, 13 nt, Human
cucccaggcucuc

SEQ ID NO: 2497554 - RNA, 19 nt, Human
cucacuguugcccaggcug

SEQ ID NO: 2497555 - RNA, 18 nt, Human
cucacuguugcccaggcu

SEQ ID NO: 2497556 - RNA, 17 nt, Human
cucacuguugcccaggc

SEQ ID NO: 2497557 - RNA, 16 nt, Human
cucacuguugcccagg

SEQ ID NO: 2497558 - RNA, 23 nt, Human
cucagagagggugggagugggcc

SEQ ID NO: 2497559 - RNA, 15 nt, Human
cucagagccaccccu

SEQ ID NO: 2497560 - RNA, 20 nt, Human
cucagagaugugcacccaug

SEQ ID NO: 2497561 - RNA, 21 nt, Human
cucacuguugaauuuucucua

SEQ ID NO: 2497562 - RNA, 19 nt, Human
cucagagagggugggagug

SEQ ID NO: 2497563 - RNA, 18 nt, Human
cucagagagggugggagu

SEQ ID NO: 2497564 - RNA, 21 nt, Human
cucacuguucuauucaucuca

SEQ ID NO: 2497565 - RNA, 21 nt, Human
cucacuguucccucugcuccu

SEQ ID NO: 2497566 - RNA, 15 nt, Human
cucacuguugaauuu

SEQ ID NO: 2497567 - RNA, 16 nt, Human
cucagaucuucugugg

SEQ ID NO: 2497568 - RNA, 16 nt, Human
cucagauggaaccgca

SEQ ID NO: 2497569 - RNA, 20 nt, Human
cucagauggaaccgcaggaa

SEQ ID NO: 2497570 - RNA, 23 nt, Human
cucagauggaaccgcaggaagcu

SEQ ID NO: 2497571 - RNA, 21 nt, Human
cucagauggaaccgcaggaag

SEQ ID NO: 2497572 - RNA, 22 nt, Human
cucagauggaaccgcaggaagc

SEQ ID NO: 2497573 - RNA, 17 nt, Human
cucagaggcgcacugug

SEQ ID NO: 2497574 - RNA, 18 nt, Human
cucagaggcgcacuguga

SEQ ID NO: 2497575 - RNA, 19 nt, Human
cucagagcuacuugggcca

SEQ ID NO: 2497576 - RNA, 12 nt, Human
cucagagccagu

SEQ ID NO: 2497577 - RNA, 22 nt, Human
cucagagaugugcacccauggg

SEQ ID NO: 2497578 - RNA, 15 nt, Human
cucagagccagucuu

SEQ ID NO: 2497579 - RNA, 18 nt, Human
cucagagcuacuugggcc

SEQ ID NO: 2497580 - RNA, 16 nt, Human
cucagaggcuguucuu

SEQ ID NO: 2497581 - RNA, 19 nt, Human
cucagaggcgcacugugac

SEQ ID NO: 2497582 - RNA, 18 nt, Human
cucagaggguuguucucc

SEQ ID NO: 2497583 - RNA, 21 nt, Human
cucagaggguuguucuccuag

SEQ ID NO: 2497584 - RNA, 19 nt, Human
cucagagguagggcugcca

SEQ ID NO: 2497585 - RNA, 17 nt, Human
cucagaguauggagcuc

SEQ ID NO: 2497586 - RNA, 16 nt, Human
cucagaguauggagcu

SEQ ID NO: 2497587 - RNA, 18 nt, Human
cucagaguauggagcuca

SEQ ID NO: 2497588 - RNA, 14 nt, Human
cucagaguccaggc

SEQ ID NO: 2497589 - RNA, 23 nt, Human
cucacagaccuggagccccuggg

SEQ ID NO: 2497590 - RNA, 22 nt, Human
cucacagaccuggagccccugg

SEQ ID NO: 2497591 - RNA, 20 nt, Human
cucacagaccuggagccccu

SEQ ID NO: 2497592 - RNA, 17 nt, Human
cucacagaccuggagcc

SEQ ID NO: 2497593 - RNA, 14 nt, Human
cucacagaccugga

SEQ ID NO: 2497594 - RNA, 15 nt, Human
cucacagcacagaga

SEQ ID NO: 2497595 - RNA, 16 nt, Human
cucacugcagccucaa

SEQ ID NO: 2497596 - RNA, 15 nt, Human
cucacugcagccuca

SEQ ID NO: 2497597 - RNA, 20 nt, Human
cucacugcuaagaauauuug

SEQ ID NO: 2497598 - RNA, 21 nt, Human
cucacugcuaagaauauuuga

SEQ ID NO: 2497599 - RNA, 22 nt, Human
cucacugcuaagaauauuugaa

SEQ ID NO: 2497600 - RNA, 23 nt, Human
cucacugcuaagaauauuugaau

SEQ ID NO: 2497601 - RNA, 20 nt, Human
cucacugcauccuccgccuc

SEQ ID NO: 2497602 - RNA, 12 nt, Human
cucacugccagg

SEQ ID NO: 2497603 - RNA, 11 nt, Human
cucacugccag

SEQ ID NO: 2497604 - RNA, 22 nt, Human
cucacugcggagaaccuugugc

SEQ ID NO: 2497605 - RNA, 14 nt, Human
cucacugcagccuc

SEQ ID NO: 2497606 - RNA, 14 nt, Human
cucacagcacagag

SEQ ID NO: 2497607 - RNA, 13 nt, Human
cucacagcacaga

SEQ ID NO: 2497608 - RNA, 20 nt, Human
cucacuguucccucugcucc

SEQ ID NO: 2497609 - RNA, 18 nt, Human
cucacuguucccucugcu

SEQ ID NO: 2497610 - RNA, 12 nt, Human
cucacuguuccc

SEQ ID NO: 2497611 - RNA, 24 nt, Human
cucacugugggaaggccagcugcc

SEQ ID NO: 2497612 - RNA, 20 nt, Human
cucacuguggugucuguguu

SEQ ID NO: 2497613 - RNA, 23 nt, Human
cucacugugggaaggccagcugc

SEQ ID NO: 2497614 - RNA, 12 nt, Human
cucacugucuga

SEQ ID NO: 2497615 - RNA, 13 nt, Human
cucacugucugag

SEQ ID NO: 2497616 - RNA, 22 nt, Human
cucacugggguccuggggccuc

SEQ ID NO: 2497617 - RNA, 12 nt, Human
cucacugggugg

SEQ ID NO: 2497618 - RNA, 13 nt, Human
cucacuggguggg

SEQ ID NO: 2497619 - RNA, 15 nt, Human
cucacuguugcccag

SEQ ID NO: 2497620 - RNA, 14 nt, Human
cucacuguugccca

SEQ ID NO: 2497621 - RNA, 21 nt, Human
cucacuggccaucccucgugg

SEQ ID NO: 2497622 - RNA, 16 nt, Human
cucacuggccaucccu

SEQ ID NO: 2497623 - RNA, 13 nt, Human
cucacuggggccu

SEQ ID NO: 2497624 - RNA, 16 nt, Human
cucacuggggccuaca

SEQ ID NO: 2497625 - RNA, 18 nt, Human
cucacuggggccuacagc

SEQ ID NO: 2497626 - RNA, 17 nt, Human
cucacugggguccuggg

SEQ ID NO: 2497627 - RNA, 20 nt, Human
cucacugggguccuggggcc

SEQ ID NO: 2497628 - RNA, 17 nt, Human
cucacugcucccugaag

SEQ ID NO: 2497629 - RNA, 15 nt, Human
cucacugcucccuga

SEQ ID NO: 2497630 - RNA, 21 nt, Human
cucacugcucaagaagacaug

SEQ ID NO: 2497631 - RNA, 20 nt, Human
cucacugcucaagaagacau

SEQ ID NO: 2497632 - RNA, 19 nt, Human
cucacugcucaagaagaca

SEQ ID NO: 2497633 - RNA, 16 nt, Human
cucacugcucaagaag

SEQ ID NO: 2497634 - RNA, 14 nt, Human
cucacugcucaaga

SEQ ID NO: 2497635 - RNA, 12 nt, Human
cucacugcucaa

SEQ ID NO: 2497636 - RNA, 20 nt, Human
cucacugcucccugaagcca

SEQ ID NO: 2497637 - RNA, 19 nt, Human
cucacugcucccugaagcc

SEQ ID NO: 2497638 - RNA, 23 nt, Human
cucacugcucccugaagccagcc

SEQ ID NO: 2497639 - RNA, 14 nt, Human
cucacuggccaucc

SEQ ID NO: 2497640 - RNA, 22 nt, Human
cucagcauccuggcacccggcc

SEQ ID NO: 2497641 - RNA, 21 nt, Human
cucagcauccuggcacccggc

SEQ ID NO: 2497642 - RNA, 13 nt, Human
cucagcauccugg

SEQ ID NO: 2497643 - RNA, 18 nt, Human
cucagcauauuuguauag

SEQ ID NO: 2497644 - RNA, 16 nt, Human
cucagcauauuuguau

SEQ ID NO: 2497645 - RNA, 14 nt, Human
cucagcauauuugu

SEQ ID NO: 2497646 - RNA, 16 nt, Human
cucagcauaccugcug

SEQ ID NO: 2497647 - RNA, 12 nt, Human
cucagcauaccu

SEQ ID NO: 2497648 - RNA, 20 nt, Human
cucagcagcugguaaucuug

SEQ ID NO: 2497649 - RNA, 19 nt, Human
cucagcaaaagaugcuucu

SEQ ID NO: 2497650 - RNA, 20 nt, Human
cucagcaaaagaugcuucuc

SEQ ID NO: 2497651 - RNA, 16 nt, Human
cucagcaggggagggu

SEQ ID NO: 2497652 - RNA, 21 nt, Human
cucagcaaaagaugcuucuca

SEQ ID NO: 2497653 - RNA, 21 nt, Human
cucagcccucccugccccucc

SEQ ID NO: 2497654 - RNA, 20 nt, Human
cucagcccucccugccccuc

SEQ ID NO: 2497655 - RNA, 19 nt, Human
cucagcccucccugccccu

SEQ ID NO: 2497656 - RNA, 14 nt, Human
cucagcccucccug

SEQ ID NO: 2497657 - RNA, 17 nt, Human
cucagccccaccccagg

SEQ ID NO: 2497658 - RNA, 11 nt, Human
cucagccccuc

SEQ ID NO: 2497659 - RNA, 13 nt, Human
cucagccccucuu

SEQ ID NO: 2497660 - RNA, 16 nt, Human
cucagccccucuugcc

SEQ ID NO: 2497661 - RNA, 23 nt, Human
cucagccccugauccugugaagu

SEQ ID NO: 2497662 - RNA, 22 nt, Human
cucagccccugauccugugaag

SEQ ID NO: 2497663 - RNA, 20 nt, Human
cucagccccugauccuguga

SEQ ID NO: 2497664 - RNA, 18 nt, Human
cucagccccucuugcccc

SEQ ID NO: 2497665 - RNA, 19 nt, Human
cucagccccucuugccccc

SEQ ID NO: 2497666 - RNA, 15 nt, Human
cucagccaagcacag

SEQ ID NO: 2497667 - RNA, 14 nt, Human
cucagccaagcaca

SEQ ID NO: 2497668 - RNA, 13 nt, Human
cucagccaagcac

SEQ ID NO: 2497669 - RNA, 16 nt, Human
cucagcaugcauccuu

SEQ ID NO: 2497670 - RNA, 13 nt, Human
cucagcaugcauc

SEQ ID NO: 2497671 - RNA, 23 nt, Human
cucagcauauuuguauaguugcu

SEQ ID NO: 2497672 - RNA, 19 nt, Human
cucagcauauuuguauagu

SEQ ID NO: 2497673 - RNA, 15 nt, Human
cucagcauccuggca

SEQ ID NO: 2497674 - RNA, 17 nt, Human
cucagccaagcacagug

SEQ ID NO: 2497675 - RNA, 21 nt, Human
cucagcccacauagugauggu

SEQ ID NO: 2497676 - RNA, 16 nt, Human
cucagccaagcacagu

SEQ ID NO: 2497677 - RNA, 11 nt, Human
cucagcccacc

SEQ ID NO: 2497678 - RNA, 16 nt, Human
cucagcccaccccccu

SEQ ID NO: 2497679 - RNA, 17 nt, Human
cucagcccaccccccuc

SEQ ID NO: 2497680 - RNA, 19 nt, Human
cucagcccaccccccucau

SEQ ID NO: 2497681 - RNA, 21 nt, Human
cucagcggggacagcuccuuc

SEQ ID NO: 2497682 - RNA, 20 nt, Human
cucagcggggacagcuccuu

SEQ ID NO: 2497683 - RNA, 19 nt, Human
cucagcggggacagcuccu

SEQ ID NO: 2497684 - RNA, 18 nt, Human
cucagcggggacagcucc

SEQ ID NO: 2497685 - RNA, 16 nt, Human
cucagcggggacagcu

SEQ ID NO: 2497686 - RNA, 15 nt, Human
cucagcggggacagc

SEQ ID NO: 2497687 - RNA, 14 nt, Human
cucagcggggacag

SEQ ID NO: 2497688 - RNA, 11 nt, Human
cucagcccuga

SEQ ID NO: 2497689 - RNA, 13 nt, Human
cucagcccugacc

SEQ ID NO: 2497690 - RNA, 15 nt, Human
cucagcccugacccu

SEQ ID NO: 2497691 - RNA, 14 nt, Human
cucagcccugaccc

SEQ ID NO: 2497692 - RNA, 17 nt, Human
cucagcucccccugucc

SEQ ID NO: 2497693 - RNA, 16 nt, Human
cucagcucccccuguc

SEQ ID NO: 2497694 - RNA, 15 nt, Human
cucagcucccccugu

SEQ ID NO: 2497695 - RNA, 14 nt, Human
cucagcucccccug

SEQ ID NO: 2497696 - RNA, 12 nt, Human
cucagcuccccc

SEQ ID NO: 2497697 - RNA, 19 nt, Human
cucagcuccccagaguccu

SEQ ID NO: 2497698 - RNA, 16 nt, Human
cucagcuccccagagu

SEQ ID NO: 2497699 - RNA, 14 nt, Human
cucagcuccccaga

SEQ ID NO: 2497700 - RNA, 12 nt, Human
cucagcucccca

SEQ ID NO: 2497701 - RNA, 11 nt, Human
cucagcucccc

SEQ ID NO: 2497702 - RNA, 21 nt, Human
cucagcucccauuucuacucu

SEQ ID NO: 2497703 - RNA, 18 nt, Human
cucagcucccauuucuac

SEQ ID NO: 2497704 - RNA, 17 nt, Human
cucagcucccauuucua

SEQ ID NO: 2497705 - RNA, 16 nt, Human
cucagcucccauuucu

SEQ ID NO: 2497706 - RNA, 20 nt, Human
cucagcuccagguggcucug

SEQ ID NO: 2497707 - RNA, 19 nt, Human
cucagcuccagguggcucu

SEQ ID NO: 2497708 - RNA, 15 nt, Human
cucagcucccaaggc

SEQ ID NO: 2497709 - RNA, 10 nt, Human
cucagcuccc

SEQ ID NO: 2497710 - RNA, 19 nt, Human
cucagcucccaaggcucug

SEQ ID NO: 2497711 - RNA, 13 nt, Human
cucagcucagcgc

SEQ ID NO: 2497712 - RNA, 15 nt, Human
cucagcucagcgcca

SEQ ID NO: 2497713 - RNA, 17 nt, Human
cucagcucagcgccagc

SEQ ID NO: 2497714 - RNA, 16 nt, Human
cucagcucagcgccag

SEQ ID NO: 2497715 - RNA, 22 nt, Human
cucagcuccagacguaggggag

SEQ ID NO: 2497716 - RNA, 23 nt, Human
cucagcggggacagcuccuucug

SEQ ID NO: 2497717 - RNA, 23 nt, Human
cucagcguuuuuuuguuuuuaau

SEQ ID NO: 2497718 - RNA, 17 nt, Human
cucagcccugacccugu

SEQ ID NO: 2497719 - RNA, 22 nt, Human
cucaggagcacaggcagcugga

SEQ ID NO: 2497720 - RNA, 16 nt, Human
cucaggaggcaggacc

SEQ ID NO: 2497721 - RNA, 17 nt, Human
cucaggaggcaggaccu

SEQ ID NO: 2497722 - RNA, 18 nt, Human
cucaggaggcaggaccuu

SEQ ID NO: 2497723 - RNA, 18 nt, Human
cucaggagcacaggcagc

SEQ ID NO: 2497724 - RNA, 17 nt, Human
cucaggagcacaggcag

SEQ ID NO: 2497725 - RNA, 15 nt, Human
cucaggagcacaggc

SEQ ID NO: 2497726 - RNA, 14 nt, Human
cucaggagcacagg

SEQ ID NO: 2497727 - RNA, 16 nt, Human
cucaggagccucugcu

SEQ ID NO: 2497728 - RNA, 24 nt, Human
cucaggagcccugggaggcucugg

SEQ ID NO: 2497729 - RNA, 15 nt, Human
cucaggcagguggga

SEQ ID NO: 2497730 - RNA, 14 nt, Human
cucaggaggcugag

SEQ ID NO: 2497731 - RNA, 15 nt, Human
cucaggaggcugagg

SEQ ID NO: 2497732 - RNA, 17 nt, Human
cucaggaggcugaggca

SEQ ID NO: 2497733 - RNA, 18 nt, Human
cucaggcaggugggaugg

SEQ ID NO: 2497734 - RNA, 18 nt, Human
cucaggaggcugaggcag

SEQ ID NO: 2497735 - RNA, 13 nt, Human
cucaggaggcuga

SEQ ID NO: 2497736 - RNA, 16 nt, Human
cucaggcauaggccug

SEQ ID NO: 2497737 - RNA, 17 nt, Human
cucaggcauaggccugg

SEQ ID NO: 2497738 - RNA, 20 nt, Human
cucaggcauaggccugggug

SEQ ID NO: 2497739 - RNA, 21 nt, Human
cucaggcauaggccugggugc

SEQ ID NO: 2497740 - RNA, 20 nt, Human
cucagggccuggcucaggug

SEQ ID NO: 2497741 - RNA, 19 nt, Human
cucagggccuggcucaggu

SEQ ID NO: 2497742 - RNA, 18 nt, Human
cucagggccuggcucagg

SEQ ID NO: 2497743 - RNA, 18 nt, Human
cucagggccccagcacua

SEQ ID NO: 2497744 - RNA, 14 nt, Human
cucagggccccagc

SEQ ID NO: 2497745 - RNA, 16 nt, Human
cucagggccccagcac

SEQ ID NO: 2497746 - RNA, 13 nt, Human
cucagggccaugc

SEQ ID NO: 2497747 - RNA, 20 nt, Human
cucagggcagcgccaggcug

SEQ ID NO: 2497748 - RNA, 18 nt, Human
cucaggcaugccugugug

SEQ ID NO: 2497749 - RNA, 22 nt, Human
cucaggcauaggccugggugcu

SEQ ID NO: 2497750 - RNA, 23 nt, Human
cucaggcauaggccugggugcug

SEQ ID NO: 2497751 - RNA, 15 nt, Human
cucaggcaugccugu

SEQ ID NO: 2497752 - RNA, 16 nt, Human
cucaggcaugccugug

SEQ ID NO: 2497753 - RNA, 17 nt, Human
cucaggcaugccugugu

SEQ ID NO: 2497754 - RNA, 18 nt, Human
cucagggccaugcugagg

SEQ ID NO: 2497755 - RNA, 17 nt, Human
cucagggccaugcugag

SEQ ID NO: 2497756 - RNA, 15 nt, Human
cucagggccaugcug

SEQ ID NO: 2497757 - RNA, 20 nt, Human
cucagggccaugccugcccc

SEQ ID NO: 2497758 - RNA, 20 nt, Human
cucagggccaugcugaggcc

SEQ ID NO: 2497759 - RNA, 19 nt, Human
cucagggccaugcugaggc

SEQ ID NO: 2497760 - RNA, 12 nt, Human
cucagggcccca

SEQ ID NO: 2497761 - RNA, 13 nt, Human
cucagggccccag

SEQ ID NO: 2497762 - RNA, 17 nt, Human
cucagggucucugcugc

SEQ ID NO: 2497763 - RNA, 16 nt, Human
cucagggucucugcug

SEQ ID NO: 2497764 - RNA, 14 nt, Human
cucagggucucugc

SEQ ID NO: 2497765 - RNA, 13 nt, Human
cucagggucucug

SEQ ID NO: 2497766 - RNA, 24 nt, Human
cucagggucccugguggcagcuca

SEQ ID NO: 2497767 - RNA, 18 nt, Human
cucagggucucugcugcc

SEQ ID NO: 2497768 - RNA, 19 nt, Human
cucagggucucugcugccg

SEQ ID NO: 2497769 - RNA, 20 nt, Human
cucagguaaucgaccugccu

SEQ ID NO: 2497770 - RNA, 22 nt, Human
cucagguaaucgaccugccucg

SEQ ID NO: 2497771 - RNA, 24 nt, Human
cucagguaaucgaccugccucggc

SEQ ID NO: 2497772 - RNA, 22 nt, Human
cucagggucccugguggcagcu

SEQ ID NO: 2497773 - RNA, 21 nt, Human
cucagggucccugguggcagc

SEQ ID NO: 2497774 - RNA, 20 nt, Human
cucagggucccugguggcag

SEQ ID NO: 2497775 - RNA, 14 nt, Human
cucagggccugguc

SEQ ID NO: 2497776 - RNA, 20 nt, Human
cucagguggggucacucugg

SEQ ID NO: 2497777 - RNA, 19 nt, Human
cucagguggggucacucug

SEQ ID NO: 2497778 - RNA, 21 nt, Human
cucagguggggucacucuggc

SEQ ID NO: 2497779 - RNA, 20 nt, Human
cucaguucccuuggccucag

SEQ ID NO: 2497780 - RNA, 21 nt, Human
cucaguucccuuggccucaga

SEQ ID NO: 2497781 - RNA, 13 nt, Human
cucaggugggcgu

SEQ ID NO: 2497782 - RNA, 21 nt, Human
cucagguggccaugccucagc

SEQ ID NO: 2497783 - RNA, 23 nt, Human
cucaggugauccacccaccucag

SEQ ID NO: 2497784 - RNA, 20 nt, Human
cucaggugaucuaccugccu

SEQ ID NO: 2497785 - RNA, 20 nt, Human
cucaggugauccaccugccu

SEQ ID NO: 2497786 - RNA, 22 nt, Human
cucaggugauccacccaccuca

SEQ ID NO: 2497787 - RNA, 20 nt, Human
cucagguggccaugccucag

SEQ ID NO: 2497788 - RNA, 19 nt, Human
cucagguggccaugccuca

SEQ ID NO: 2497789 - RNA, 18 nt, Human
cucagguggccaugccuc

SEQ ID NO: 2497790 - RNA, 15 nt, Human
cucagguggccaugc

SEQ ID NO: 2497791 - RNA, 22 nt, Human
cucagguggccagccuggaucu

SEQ ID NO: 2497792 - RNA, 21 nt, Human
cucagguggccagccuggauc

SEQ ID NO: 2497793 - RNA, 13 nt, Human
cucagguggccau

SEQ ID NO: 2497794 - RNA, 20 nt, Human
cucagguggccagccuggau

SEQ ID NO: 2497795 - RNA, 12 nt, Human
cucagguggcca

SEQ ID NO: 2497796 - RNA, 23 nt, Human
cucaggagcccugggaggcucug

SEQ ID NO: 2497797 - RNA, 22 nt, Human
cucaggagcccugggaggcucu

SEQ ID NO: 2497798 - RNA, 21 nt, Human
cucaggagcccugggaggcuc

SEQ ID NO: 2497799 - RNA, 20 nt, Human
cucaggagcccugggaggcu

SEQ ID NO: 2497800 - RNA, 17 nt, Human
cucaggagcccugggag

SEQ ID NO: 2497801 - RNA, 16 nt, Human
cucaggagcccuggga

SEQ ID NO: 2497802 - RNA, 15 nt, Human
cucaggagcccuggg

SEQ ID NO: 2497803 - RNA, 14 nt, Human
cucaggagcccugg

SEQ ID NO: 2497804 - RNA, 13 nt, Human
cucaggagcccug

SEQ ID NO: 2497805 - RNA, 12 nt, Human
cucaggagcccu

SEQ ID NO: 2497806 - RNA, 12 nt, Human
cucaggagcaca

SEQ ID NO: 2497807 - RNA, 19 nt, Human
cucaggacugcaacaggcu

SEQ ID NO: 2497808 - RNA, 17 nt, Human
cucaggacugcaacagg

SEQ ID NO: 2497809 - RNA, 14 nt, Human
cucaggacugcgac

SEQ ID NO: 2497810 - RNA, 15 nt, Human
cucaggacuccucuc

SEQ ID NO: 2497811 - RNA, 16 nt, Human
cucaggacugcaacag

SEQ ID NO: 2497812 - RNA, 22 nt, Human
cucaggaccugggaccuccccu

SEQ ID NO: 2497813 - RNA, 16 nt, Human
cucaggacuccucucc

SEQ ID NO: 2497814 - RNA, 21 nt, Human
cucaggaccaaagcuuucaug

SEQ ID NO: 2497815 - RNA, 22 nt, Human
cucaggaccaaagcuuucaugu

SEQ ID NO: 2497816 - RNA, 20 nt, Human
cucaggaccaaagcuuucau

SEQ ID NO: 2497817 - RNA, 19 nt, Human
cucaggacagaugccacac

SEQ ID NO: 2497818 - RNA, 12 nt, Human
cucaggacagau

SEQ ID NO: 2497819 - RNA, 14 nt, Human
cucaggacagaugc

SEQ ID NO: 2497820 - RNA, 16 nt, Human
cucaggacagaugcca

SEQ ID NO: 2497821 - RNA, 18 nt, Human
cucaggacagaugccaca

SEQ ID NO: 2497822 - RNA, 16 nt, Human
cucaggaccugggacc

SEQ ID NO: 2497823 - RNA, 15 nt, Human
cucaggaccaggcaa

SEQ ID NO: 2497824 - RNA, 14 nt, Human
cucaggacucagaa

SEQ ID NO: 2497825 - RNA, 16 nt, Human
cucaggacucagaagc

SEQ ID NO: 2497826 - RNA, 21 nt, Human
cucaggacucagaagccucug

SEQ ID NO: 2497827 - RNA, 14 nt, Human
cucaggaccaggca

SEQ ID NO: 2497828 - RNA, 12 nt, Human
cucaggaccagg

SEQ ID NO: 2497829 - RNA, 12 nt, Human
cucaggaccuag

SEQ ID NO: 2497830 - RNA, 22 nt, Human
cucaggaaaucaaauaugcaaa

SEQ ID NO: 2497831 - RNA, 12 nt, Human
cucaggaaaacg

SEQ ID NO: 2497832 - RNA, 17 nt, Human
cucaggaaaacgggacc

SEQ ID NO: 2497833 - RNA, 14 nt, Human
cucagcuuccuacc

SEQ ID NO: 2497834 - RNA, 22 nt, Human
cucagcuuccuacccacaccuc

SEQ ID NO: 2497835 - RNA, 16 nt, Human
cucagcuuccuaccca

SEQ ID NO: 2497836 - RNA, 16 nt, Human
cucagcuucuccugug

SEQ ID NO: 2497837 - RNA, 17 nt, Human
cucagcuuuuugucuuu

SEQ ID NO: 2497838 - RNA, 21 nt, Human
cucagcuuuuugucuuuucug

SEQ ID NO: 2497839 - RNA, 16 nt, Human
cucaggaaugggcugu

SEQ ID NO: 2497840 - RNA, 15 nt, Human
cucaggaaugggcug

SEQ ID NO: 2497841 - RNA, 19 nt, Human
cucaggaagcccccaaguu

SEQ ID NO: 2497842 - RNA, 15 nt, Human
cucaggaagccccca

SEQ ID NO: 2497843 - RNA, 13 nt, Human
cucaggaagaaca

SEQ ID NO: 2497844 - RNA, 14 nt, Human
cucaggaagaacac

SEQ ID NO: 2497845 - RNA, 12 nt, Human
cucaggaagaac

SEQ ID NO: 2497846 - RNA, 19 nt, Human
cucagcucccccugucccc

SEQ ID NO: 2497847 - RNA, 18 nt, Human
cucagcucccccuguccc

SEQ ID NO: 2497848 - RNA, 20 nt, Human
cucagcucccccuguccccu

SEQ ID NO: 2497849 - RNA, 12 nt, Human
cucagcucuggg

SEQ ID NO: 2497850 - RNA, 22 nt, Human
cucagcucugggagaggauuuu

SEQ ID NO: 2497851 - RNA, 18 nt, Human
cucagcucugggagagga

SEQ ID NO: 2497852 - RNA, 16 nt, Human
cucagcucugggagag

SEQ ID NO: 2497853 - RNA, 15 nt, Human
cucagcucugggaga

SEQ ID NO: 2497854 - RNA, 14 nt, Human
cucagcucugggag

SEQ ID NO: 2497855 - RNA, 13 nt, Human
cucagcucuggga

SEQ ID NO: 2497856 - RNA, 14 nt, Human
cucagcucugggcc

SEQ ID NO: 2497857 - RNA, 23 nt, Human
cucagcucugggccauucuccac

SEQ ID NO: 2497858 - RNA, 17 nt, Human
cucagcucuuggcucca

SEQ ID NO: 2497859 - RNA, 18 nt, Human
cucagcucuuggcuccac

SEQ ID NO: 2497860 - RNA, 17 nt, Human
cucagcugcuucuccca

SEQ ID NO: 2497861 - RNA, 16 nt, Human
cucagcugcuucuccc

SEQ ID NO: 2497862 - RNA, 15 nt, Human
cucagcugcuucucc

SEQ ID NO: 2497863 - RNA, 13 nt, Human
cucagcugcuucu

SEQ ID NO: 2497864 - RNA, 12 nt, Human
cucagcugcuuc

SEQ ID NO: 2497865 - RNA, 16 nt, Human
cucagcucuucugacu

SEQ ID NO: 2497866 - RNA, 18 nt, Human
cucagcugccucacuucc

SEQ ID NO: 2497867 - RNA, 14 nt, Human
cucagcugccucac

SEQ ID NO: 2497868 - RNA, 16 nt, Human
cucagcugccucacuu

SEQ ID NO: 2497869 - RNA, 12 nt, Human
cucagcugccuc

SEQ ID NO: 2497870 - RNA, 20 nt, Human
cucagcucuuggcuccacug

SEQ ID NO: 2497871 - RNA, 23 nt, Human
cucagcuggaugauggucuucag

SEQ ID NO: 2497872 - RNA, 21 nt, Human
cucagcugcuucucccacuug

SEQ ID NO: 2497873 - RNA, 12 nt, Human
cuauugcccagg

SEQ ID NO: 2497874 - RNA, 22 nt, Human
cuauugcaaagguuccaacugu

SEQ ID NO: 2497875 - RNA, 21 nt, Human
cuauugcaaagguuccaacug

SEQ ID NO: 2497876 - RNA, 18 nt, Human
cuauugcaguuauagaaa

SEQ ID NO: 2497877 - RNA, 16 nt, Human
cuauugcugcuugagg

SEQ ID NO: 2497878 - RNA, 21 nt, Human
cuauuguuucuuuaagaaagu

SEQ ID NO: 2497879 - RNA, 22 nt, Human
cuauuguuuauucuuuuuaaag

SEQ ID NO: 2497880 - RNA, 14 nt, Human
cuauuguuuauucu

SEQ ID NO: 2497881 - RNA, 14 nt, Human
cuauuguaaauaug

SEQ ID NO: 2497882 - RNA, 18 nt, Human
cuauuguuagucucuuga

SEQ ID NO: 2497883 - RNA, 11 nt, Human
cuauugguaaa

SEQ ID NO: 2497884 - RNA, 15 nt, Human
cuauuggguucauua

SEQ ID NO: 2497885 - RNA, 16 nt, Human
cuauuggguucauuau

SEQ ID NO: 2497886 - RNA, 13 nt, Human
cuauuguaaauau

SEQ ID NO: 2497887 - RNA, 23 nt, Human
cuauuggguucauuauuggaauu

SEQ ID NO: 2497888 - RNA, 17 nt, Human
cuauuuaaaacuuguaa

SEQ ID NO: 2497889 - RNA, 16 nt, Human
cuauuuaaaacuugua

SEQ ID NO: 2497890 - RNA, 15 nt, Human
cuauuuaaagccucc

SEQ ID NO: 2497891 - RNA, 15 nt, Human
cuauuuaaaaaagag

SEQ ID NO: 2497892 - RNA, 15 nt, Human
cuauuuaacuugagg

SEQ ID NO: 2497893 - RNA, 14 nt, Human
cuauuuaacuugag

SEQ ID NO: 2497894 - RNA, 22 nt, Human
cuauuuaacuggcuucagccuc

SEQ ID NO: 2497895 - RNA, 15 nt, Human
cuauuuaauauuuau

SEQ ID NO: 2497896 - RNA, 22 nt, Human
cuauuuaugugauccuuuugga

SEQ ID NO: 2497897 - RNA, 14 nt, Human
cuauuuaauauuua

SEQ ID NO: 2497898 - RNA, 12 nt, Human
cuauuuaauauu

SEQ ID NO: 2497899 - RNA, 9 nt, Human
cuauuuaag

SEQ ID NO: 2497900 - RNA, 13 nt, Human
cucacagaaauga

SEQ ID NO: 2497901 - RNA, 17 nt, Human
cucacagaacccuugga

SEQ ID NO: 2497902 - RNA, 13 nt, Human
cucacagaagaau

SEQ ID NO: 2497903 - RNA, 20 nt, Human
cucacacugagaauguaaga

SEQ ID NO: 2497904 - RNA, 14 nt, Human
cucacacugagaau

SEQ ID NO: 2497905 - RNA, 13 nt, Human
cucacacugagaa

SEQ ID NO: 2497906 - RNA, 12 nt, Human
cucacacugaga

SEQ ID NO: 2497907 - RNA, 23 nt, Human
cucacacggacacucaaaagcug

SEQ ID NO: 2497908 - RNA, 13 nt, Human
cucacacucaccc

SEQ ID NO: 2497909 - RNA, 20 nt, Human
cucaagucacucccaagccc

SEQ ID NO: 2497910 - RNA, 21 nt, Human
cucacaccgcgucuggugaca

SEQ ID NO: 2497911 - RNA, 18 nt, Human
cucaagggggacugucuu

SEQ ID NO: 2497912 - RNA, 19 nt, Human
cucaaggugggccuugcua

SEQ ID NO: 2497913 - RNA, 14 nt, Human
cucaaguccucuuu

SEQ ID NO: 2497914 - RNA, 19 nt, Human
cucaagucacucccaagcc

SEQ ID NO: 2497915 - RNA, 20 nt, Human
cucaaggccucccacaguga

SEQ ID NO: 2497916 - RNA, 19 nt, Human
cucaaggccucccacagug

SEQ ID NO: 2497917 - RNA, 13 nt, Human
cucaagcccugca

SEQ ID NO: 2497918 - RNA, 12 nt, Human
cucaagcccugc

SEQ ID NO: 2497919 - RNA, 23 nt, Human
cucaaggggccauccugucccac

SEQ ID NO: 2497920 - RNA, 22 nt, Human
cucaaggggccauccuguccca

SEQ ID NO: 2497921 - RNA, 20 nt, Human
cucaaggggccauccugucc

SEQ ID NO: 2497922 - RNA, 21 nt, Human
cucaagggcuagcaucccuga

SEQ ID NO: 2497923 - RNA, 15 nt, Human
cucaaggcgugagga

SEQ ID NO: 2497924 - RNA, 16 nt, Human
cucaaggcgugaggau

SEQ ID NO: 2497925 - RNA, 23 nt, Human
cucaagcagcgaccgcccccucc

SEQ ID NO: 2497926 - RNA, 14 nt, Human
cucaagcagucuac

SEQ ID NO: 2497927 - RNA, 23 nt, Human
cucaagcagucuacccaccucag

SEQ ID NO: 2497928 - RNA, 16 nt, Human
cucaagccaagcagcc

SEQ ID NO: 2497929 - RNA, 18 nt, Human
cucaagccaagcagccaa

SEQ ID NO: 2497930 - RNA, 21 nt, Human
cucaagccaagcagccaagcu

SEQ ID NO: 2497931 - RNA, 22 nt, Human
cucaagccaagcagccaagcuc

SEQ ID NO: 2497932 - RNA, 20 nt, Human
cucaagccaauccccuccuu

SEQ ID NO: 2497933 - RNA, 18 nt, Human
cucaagccaauccccucc

SEQ ID NO: 2497934 - RNA, 17 nt, Human
cucaagcccgcggggac

SEQ ID NO: 2497935 - RNA, 18 nt, Human
cucaacucuccuccagag

SEQ ID NO: 2497936 - RNA, 16 nt, Human
cucaacucuccuccag

SEQ ID NO: 2497937 - RNA, 17 nt, Human
cucaacucaccuaaugu

SEQ ID NO: 2497938 - RNA, 16 nt, Human
cucaagaugaaggcaa

SEQ ID NO: 2497939 - RNA, 22 nt, Human
cucaagcagcgaccgcccccuc

SEQ ID NO: 2497940 - RNA, 15 nt, Human
cuauuucuaugagaa

SEQ ID NO: 2497941 - RNA, 18 nt, Human
cuauuuauuuacugagcu

SEQ ID NO: 2497942 - RNA, 15 nt, Human
cuauuuauuuacuga

SEQ ID NO: 2497943 - RNA, 14 nt, Human
cuauuuauuuacug

SEQ ID NO: 2497944 - RNA, 21 nt, Human
cuauuucugcugaauuuucac

SEQ ID NO: 2497945 - RNA, 20 nt, Human
cuauuucugcugaauuuuca

SEQ ID NO: 2497946 - RNA, 13 nt, Human
cuauuucugcuga

SEQ ID NO: 2497947 - RNA, 12 nt, Human
cuauuucugcug

SEQ ID NO: 2497948 - RNA, 23 nt, Human
cuauuucugagaagguccuuaau

SEQ ID NO: 2497949 - RNA, 15 nt, Human
cuauuucuccuccau

SEQ ID NO: 2497950 - RNA, 16 nt, Human
cuauuucuccuccaug

SEQ ID NO: 2497951 - RNA, 13 nt, Human
cuauuucugagaa

SEQ ID NO: 2497952 - RNA, 14 nt, Human
cucaaauuucuaaa

SEQ ID NO: 2497953 - RNA, 14 nt, Human
cucaacucuccucc

SEQ ID NO: 2497954 - RNA, 20 nt, Human
cucaaccuaccaccccuucc

SEQ ID NO: 2497955 - RNA, 18 nt, Human
cucaacuagcagauacag

SEQ ID NO: 2497956 - RNA, 13 nt, Human
cucaacccucuca

SEQ ID NO: 2497957 - RNA, 18 nt, Human
cucaacccucccucagcc

SEQ ID NO: 2497958 - RNA, 19 nt, Human
cucaacccucccucagccc

SEQ ID NO: 2497959 - RNA, 21 nt, Human
cucaacccucccucagccccu

SEQ ID NO: 2497960 - RNA, 22 nt, Human
cucaacccucccucagccccuc

SEQ ID NO: 2497961 - RNA, 18 nt, Human
cucaaccaccuuucagau

SEQ ID NO: 2497962 - RNA, 15 nt, Human
cucaaccauccccuc

SEQ ID NO: 2497963 - RNA, 20 nt, Human
cucaaccauccccuccgugg

SEQ ID NO: 2497964 - RNA, 18 nt, Human
cucaaccccaccacuucu

SEQ ID NO: 2497965 - RNA, 22 nt, Human
cucaacccccauuucuauuuau

SEQ ID NO: 2497966 - RNA, 19 nt, Human
cucaacccccauuucuauu

SEQ ID NO: 2497967 - RNA, 16 nt, Human
cucaacccucccucag

SEQ ID NO: 2497968 - RNA, 15 nt, Human
cucaaauuucuaaau

SEQ ID NO: 2497969 - RNA, 17 nt, Human
cucaaauuucuaaaucu

SEQ ID NO: 2497970 - RNA, 18 nt, Human
cucaacaugagucaagag

SEQ ID NO: 2497971 - RNA, 15 nt, Human
cucaacaugagucaa

SEQ ID NO: 2497972 - RNA, 20 nt, Human
cucaacaugagucaagagca

SEQ ID NO: 2497973 - RNA, 16 nt, Human
cucaacauguuacuga

SEQ ID NO: 2497974 - RNA, 20 nt, Human
cucaacauguuacugaccag

SEQ ID NO: 2497975 - RNA, 12 nt, Human
cucaaauuugga

SEQ ID NO: 2497976 - RNA, 13 nt, Human
cucaaauuucuaa

SEQ ID NO: 2497977 - RNA, 19 nt, Human
cuauacugcauacuuuuua

SEQ ID NO: 2497978 - RNA, 21 nt, Human
cuauacugcauacuuuuuaaa

SEQ ID NO: 2497979 - RNA, 17 nt, Human
cuauacugcauacuuuu

SEQ ID NO: 2497980 - RNA, 19 nt, Human
cuauacgcagcgugcuuua

SEQ ID NO: 2497981 - RNA, 21 nt, Human
cuauaccugggcauacuaaua

SEQ ID NO: 2497982 - RNA, 19 nt, Human
cuauaccugugccucggcu

SEQ ID NO: 2497983 - RNA, 22 nt, Human
cuauaauucccuaucuuuuagu

SEQ ID NO: 2497984 - RNA, 14 nt, Human
cuauaccugugccu

SEQ ID NO: 2497985 - RNA, 15 nt, Human
cuauaccugugccuc

SEQ ID NO: 2497986 - RNA, 20 nt, Human
cuauaccugggcauacuaau

SEQ ID NO: 2497987 - RNA, 21 nt, Human
cuauagccuaggugacagagu

SEQ ID NO: 2497988 - RNA, 20 nt, Human
cuauagccuaggugacagag

SEQ ID NO: 2497989 - RNA, 18 nt, Human
cuauagccuaggugacag

SEQ ID NO: 2497990 - RNA, 19 nt, Human
cuauagccuaggugacaga

SEQ ID NO: 2497991 - RNA, 12 nt, Human
cuauaauuuaaa

SEQ ID NO: 2497992 - RNA, 13 nt, Human
cuauaauuuaaau

SEQ ID NO: 2497993 - RNA, 22 nt, Human
cuaggaagaauuuuaaaaauga

SEQ ID NO: 2497994 - RNA, 21 nt, Human
cuaggaagaauuuuaaaaaug

SEQ ID NO: 2497995 - RNA, 23 nt, Human
cuaggaagaauuuuaaaaaugaa

SEQ ID NO: 2497996 - RNA, 20 nt, Human
cuauaauucccuaucuuuua

SEQ ID NO: 2497997 - RNA, 17 nt, Human
cuaggaagacuuuggaa

SEQ ID NO: 2497998 - RNA, 15 nt, Human
cuaggaagacuuugg

SEQ ID NO: 2497999 - RNA, 20 nt, Human
cuaggaacacuccuucacag

SEQ ID NO: 2498000 - RNA, 20 nt, Human
cuaggaagaauuuuaaaaau

SEQ ID NO: 2498001 - RNA, 19 nt, Human
cuaggaagaauuuuaaaaa

SEQ ID NO: 2498002 - RNA, 15 nt, Human
cuaggaagaauuuua

SEQ ID NO: 2498003 - RNA, 14 nt, Human
cuaggaagaauuuu

SEQ ID NO: 2498004 - RNA, 11 nt, Human
cuaggaagaau

SEQ ID NO: 2498005 - RNA, 17 nt, Human
cuaugaacuucucucag

SEQ ID NO: 2498006 - RNA, 13 nt, Human
cuaugaaggcugu

SEQ ID NO: 2498007 - RNA, 15 nt, Human
cuauauagagauguu

SEQ ID NO: 2498008 - RNA, 19 nt, Human
cuaugaacucuguuuucuu

SEQ ID NO: 2498009 - RNA, 22 nt, Human
cuaugaaguuuuuuuuauacag

SEQ ID NO: 2498010 - RNA, 16 nt, Human
cuaugaugcuguugcc

SEQ ID NO: 2498011 - RNA, 17 nt, Human
cuaugaucucagguucu

SEQ ID NO: 2498012 - RNA, 14 nt, Human
cuaugaucucaggu

SEQ ID NO: 2498013 - RNA, 20 nt, Human
cuaugaaucuauuauacugu

SEQ ID NO: 2498014 - RNA, 23 nt, Human
cuaugaaguauauaaugguuuca

SEQ ID NO: 2498015 - RNA, 18 nt, Human
cuaugaaguauauaaugg

SEQ ID NO: 2498016 - RNA, 13 nt, Human
cuaugaacuacaa

SEQ ID NO: 2498017 - RNA, 15 nt, Human
cuaugauuuggaaaa

SEQ ID NO: 2498018 - RNA, 12 nt, Human
cuaugcacauau

SEQ ID NO: 2498019 - RNA, 20 nt, Human
cuaugcaauauaucuaaauu

SEQ ID NO: 2498020 - RNA, 19 nt, Human
cuaugauuuggaaaauaaa

SEQ ID NO: 2498021 - RNA, 18 nt, Human
cuaugccaaagaucacuu

SEQ ID NO: 2498022 - RNA, 17 nt, Human
cuaugccaaagaucacu

SEQ ID NO: 2498023 - RNA, 22 nt, Human
cuaugcaauauaucuaaauuga

SEQ ID NO: 2498024 - RNA, 15 nt, Human
cuaugccaaagauca

SEQ ID NO: 2498025 - RNA, 21 nt, Human
cuaugcauuugaaaauuuuga

SEQ ID NO: 2498026 - RNA, 22 nt, Human
cuaugccaaagaucacuuguug

SEQ ID NO: 2498027 - RNA, 14 nt, Human
cuaugccugugucu

SEQ ID NO: 2498028 - RNA, 19 nt, Human
cuaugccagcucaguccca

SEQ ID NO: 2498029 - RNA, 20 nt, Human
cuaugccagcucagucccau

SEQ ID NO: 2498030 - RNA, 21 nt, Human
cuauauacucacuuucuagau

SEQ ID NO: 2498031 - RNA, 19 nt, Human
cuaugaaauauuauguuaa

SEQ ID NO: 2498032 - RNA, 14 nt, Human
cuauauagagaugu

SEQ ID NO: 2498033 - RNA, 23 nt, Human
cuauauaggcaucacauuuuugu

SEQ ID NO: 2498034 - RNA, 17 nt, Human
cuauaggcuggagaagc

SEQ ID NO: 2498035 - RNA, 16 nt, Human
cuauaggcuggagaag

SEQ ID NO: 2498036 - RNA, 15 nt, Human
cuauaggcuggagaa

SEQ ID NO: 2498037 - RNA, 22 nt, Human
cuauaggcuggagaagcucacc

SEQ ID NO: 2498038 - RNA, 18 nt, Human
cuauaggcuggagaagcu

SEQ ID NO: 2498039 - RNA, 19 nt, Human
cuauaggucauacaaucca

SEQ ID NO: 2498040 - RNA, 21 nt, Human
cuauaguccagcuuuguucuu

SEQ ID NO: 2498041 - RNA, 23 nt, Human
cuauagcucaggaccugggaccu

SEQ ID NO: 2498042 - RNA, 16 nt, Human
cuauagcucaggaccu

SEQ ID NO: 2498043 - RNA, 14 nt, Human
cuauagcucaggac

SEQ ID NO: 2498044 - RNA, 21 nt, Human
cuauagccuggggugggguca

SEQ ID NO: 2498045 - RNA, 12 nt, Human
cuauagccuggg

SEQ ID NO: 2498046 - RNA, 13 nt, Human
cuauagccugggg

SEQ ID NO: 2498047 - RNA, 14 nt, Human
cuauagccuggggu

SEQ ID NO: 2498048 - RNA, 18 nt, Human
cuauagccuggggugggg

SEQ ID NO: 2498049 - RNA, 22 nt, Human
cuauguaacauguaggaaguag

SEQ ID NO: 2498050 - RNA, 15 nt, Human
cuauguaacugcauu

SEQ ID NO: 2498051 - RNA, 21 nt, Human
cuauggggauagaugugugga

SEQ ID NO: 2498052 - RNA, 15 nt, Human
cuauggggauggucc

SEQ ID NO: 2498053 - RNA, 18 nt, Human
cuauggggaugguccacu

SEQ ID NO: 2498054 - RNA, 23 nt, Human
cuauguaggaaagaccauuuuuc

SEQ ID NO: 2498055 - RNA, 20 nt, Human
cuauguaguccgugcugaca

SEQ ID NO: 2498056 - RNA, 22 nt, Human
cuauguaggaaagaccauuuuu

SEQ ID NO: 2498057 - RNA, 21 nt, Human
cuauguaacugcauugagaac

SEQ ID NO: 2498058 - RNA, 19 nt, Human
cuauggggauagaugugug

SEQ ID NO: 2498059 - RNA, 20 nt, Human
cuauggggauagaugugugg

SEQ ID NO: 2498060 - RNA, 19 nt, Human
cuaugggagccccaggguc

SEQ ID NO: 2498061 - RNA, 17 nt, Human
cuauggggagaaaagac

SEQ ID NO: 2498062 - RNA, 21 nt, Human
cuauggggagaaaagacauga

SEQ ID NO: 2498063 - RNA, 13 nt, Human
cuaugcguuuuua

SEQ ID NO: 2498064 - RNA, 13 nt, Human
cuauguaucaaug

SEQ ID NO: 2498065 - RNA, 15 nt, Human
cuauuauaauuuaau

SEQ ID NO: 2498066 - RNA, 14 nt, Human
cuauuauauuaaaa

SEQ ID NO: 2498067 - RNA, 18 nt, Human
cuauuauagccacauccc

SEQ ID NO: 2498068 - RNA, 16 nt, Human
cuauuauccccauuuc

SEQ ID NO: 2498069 - RNA, 17 nt, Human
cuauuauccccauuucu

SEQ ID NO: 2498070 - RNA, 16 nt, Human
cuauuauaauuuaaug

SEQ ID NO: 2498071 - RNA, 17 nt, Human
cuauuauaauuuaaugc

SEQ ID NO: 2498072 - RNA, 14 nt, Human
cuauuauagccaca

SEQ ID NO: 2498073 - RNA, 16 nt, Human
cuauuauacuguauua

SEQ ID NO: 2498074 - RNA, 21 nt, Human
cuauuauaauuuaaugcaugu

SEQ ID NO: 2498075 - RNA, 20 nt, Human
cuauuauuuucacuguagaa

SEQ ID NO: 2498076 - RNA, 22 nt, Human
cuauuauuuucacuguagaaug

SEQ ID NO: 2498077 - RNA, 15 nt, Human
cuauucagacaagca

SEQ ID NO: 2498078 - RNA, 14 nt, Human
cuauucagacaagc

SEQ ID NO: 2498079 - RNA, 17 nt, Human
cuauucagacaagcaac

SEQ ID NO: 2498080 - RNA, 21 nt, Human
cuauucaggagaguagaacag

SEQ ID NO: 2498081 - RNA, 17 nt, Human
cuauucaguaauaacuc

SEQ ID NO: 2498082 - RNA, 23 nt, Human
cuauucaguaauaacucuacccu

SEQ ID NO: 2498083 - RNA, 23 nt, Human
cuauucagcuucguuuauuuuca

SEQ ID NO: 2498084 - RNA, 15 nt, Human
cuauucuccagcuga

SEQ ID NO: 2498085 - RNA, 14 nt, Human
cuauucuccagcug

SEQ ID NO: 2498086 - RNA, 14 nt, Human
cuauucucuccaaa

SEQ ID NO: 2498087 - RNA, 21 nt, Human
cuauucucuccaaaaaugcac

SEQ ID NO: 2498088 - RNA, 12 nt, Human
cuauucucucuu

SEQ ID NO: 2498089 - RNA, 13 nt, Human
cuauugacuucaa

SEQ ID NO: 2498090 - RNA, 16 nt, Human
cuauugacaagucauu

SEQ ID NO: 2498091 - RNA, 23 nt, Human
cuauugauguacagucugucaug

SEQ ID NO: 2498092 - RNA, 21 nt, Human
cuauugauguacagucuguca

SEQ ID NO: 2498093 - RNA, 20 nt, Human
cuauugauguacagucuguc

SEQ ID NO: 2498094 - RNA, 19 nt, Human
cuauugauguacagucugu

SEQ ID NO: 2498095 - RNA, 17 nt, Human
cuauugauguacagucu

SEQ ID NO: 2498096 - RNA, 15 nt, Human
cuauugauguacagu

SEQ ID NO: 2498097 - RNA, 16 nt, Human
cuauugacuucaauga

SEQ ID NO: 2498098 - RNA, 14 nt, Human
cuauugacuucaau

SEQ ID NO: 2498099 - RNA, 17 nt, Human
cuauugacaagucauuu

SEQ ID NO: 2498100 - RNA, 21 nt, Human
cuauugauauaaauaaaacau

SEQ ID NO: 2498101 - RNA, 15 nt, Human
cuauaggugcuacaa

SEQ ID NO: 2498102 - RNA, 16 nt, Human
cuagcuagaaauauga

SEQ ID NO: 2498103 - RNA, 15 nt, Human
cuagcuagaaauaug

SEQ ID NO: 2498104 - RNA, 14 nt, Human
cuagcuagaaauau

SEQ ID NO: 2498105 - RNA, 22 nt, Human
cuagcuaauguaauaacuguga

SEQ ID NO: 2498106 - RNA, 16 nt, Human
cuagcgcugccgcacc

SEQ ID NO: 2498107 - RNA, 23 nt, Human
cuagccuuuggcucuggagacag

SEQ ID NO: 2498108 - RNA, 21 nt, Human
cuagccuuuggcucuggagac

SEQ ID NO: 2498109 - RNA, 20 nt, Human
cuagccuuuggcucuggaga

SEQ ID NO: 2498110 - RNA, 19 nt, Human
cuagccuuuggcucuggag

SEQ ID NO: 2498111 - RNA, 18 nt, Human
cuagccuuuggcucugga

SEQ ID NO: 2498112 - RNA, 17 nt, Human
cuagccuuuggcucugg

SEQ ID NO: 2498113 - RNA, 12 nt, Human
cuagcgcugccg

SEQ ID NO: 2498114 - RNA, 22 nt, Human
cuagcgcugccgcaccccagag

SEQ ID NO: 2498115 - RNA, 23 nt, Human
cuagccuuagaagucacacagua

SEQ ID NO: 2498116 - RNA, 22 nt, Human
cuagccuuagaagucacacagu

SEQ ID NO: 2498117 - RNA, 22 nt, Human
cuagccuuauccucugaucucc

SEQ ID NO: 2498118 - RNA, 21 nt, Human
cuagccuuauccucugaucuc

SEQ ID NO: 2498119 - RNA, 19 nt, Human
cuagccuuauccucugauc

SEQ ID NO: 2498120 - RNA, 18 nt, Human
cuagccuuauccucugau

SEQ ID NO: 2498121 - RNA, 22 nt, Human
cuagccuuaaucagguccucag

SEQ ID NO: 2498122 - RNA, 17 nt, Human
cuagccuuauccucuga

SEQ ID NO: 2498123 - RNA, 16 nt, Human
cuagccuuuggcucug

SEQ ID NO: 2498124 - RNA, 15 nt, Human
cuagccuuuggcucu

SEQ ID NO: 2498125 - RNA, 19 nt, Human
cuagccuugaggaguguga

SEQ ID NO: 2498126 - RNA, 21 nt, Human
cuagccuuagaagucacacag

SEQ ID NO: 2498127 - RNA, 22 nt, Human
cuagccugugccucugggacug

SEQ ID NO: 2498128 - RNA, 21 nt, Human
cuagccugugccucugggacu

SEQ ID NO: 2498129 - RNA, 19 nt, Human
cuagccugugccucuggga

SEQ ID NO: 2498130 - RNA, 13 nt, Human
cuagauacuguau

SEQ ID NO: 2498131 - RNA, 16 nt, Human
cuagauacuguaucau

SEQ ID NO: 2498132 - RNA, 24 nt, Human
cuagauacuguaucaugacaaaga

SEQ ID NO: 2498133 - RNA, 21 nt, Human
cuagauaucgacuuguuuuug

SEQ ID NO: 2498134 - RNA, 14 nt, Human
cuagauaucgacuu

SEQ ID NO: 2498135 - RNA, 14 nt, Human
cuagcucgugauug

SEQ ID NO: 2498136 - RNA, 23 nt, Human
cuagcuccccuccucuccccuac

SEQ ID NO: 2498137 - RNA, 19 nt, Human
cuagcucuauguuuacaaa

SEQ ID NO: 2498138 - RNA, 20 nt, Human
cuagcucuauguuuacaaau

SEQ ID NO: 2498139 - RNA, 19 nt, Human
cuagcucugagccaguuca

SEQ ID NO: 2498140 - RNA, 14 nt, Human
cuagcucugagcca

SEQ ID NO: 2498141 - RNA, 23 nt, Human
cuagcucuauguuuacaaaugga

SEQ ID NO: 2498142 - RNA, 16 nt, Human
cuagcugcacagggca

SEQ ID NO: 2498143 - RNA, 20 nt, Human
cuagcucugagccaguucag

SEQ ID NO: 2498144 - RNA, 21 nt, Human
cuagcuagaaauaugauuuua

SEQ ID NO: 2498145 - RNA, 17 nt, Human
cuagcuagaaauaugau

SEQ ID NO: 2498146 - RNA, 19 nt, Human
cuagcuagaagugggccag

SEQ ID NO: 2498147 - RNA, 23 nt, Human
cuagcuagaagugggccaggaca

SEQ ID NO: 2498148 - RNA, 21 nt, Human
cuagcuccccuccucuccccu

SEQ ID NO: 2498149 - RNA, 19 nt, Human
cuagcuccccuccucuccc

SEQ ID NO: 2498150 - RNA, 16 nt, Human
cuagcuccccuccucu

SEQ ID NO: 2498151 - RNA, 15 nt, Human
cuagcuccccuccuc

SEQ ID NO: 2498152 - RNA, 14 nt, Human
cuagcuccccuccu

SEQ ID NO: 2498153 - RNA, 13 nt, Human
cuagcuccccucc

SEQ ID NO: 2498154 - RNA, 10 nt, Human
cuagcucccc

SEQ ID NO: 2498155 - RNA, 22 nt, Human
cuagcuccacacccucucccag

SEQ ID NO: 2498156 - RNA, 14 nt, Human
cuagcugugggggu

SEQ ID NO: 2498157 - RNA, 22 nt, Human
cuagcuggugguuucacggugc

SEQ ID NO: 2498158 - RNA, 17 nt, Human
cuagcuggugguuucac

SEQ ID NO: 2498159 - RNA, 15 nt, Human
cuagcuggugguuuc

SEQ ID NO: 2498160 - RNA, 21 nt, Human
cuagcugggggugggccaggc

SEQ ID NO: 2498161 - RNA, 22 nt, Human
cuagcugggggugggccaggcu

SEQ ID NO: 2498162 - RNA, 18 nt, Human
cuagcugggggugggcca

SEQ ID NO: 2498163 - RNA, 19 nt, Human
cuagcugggggugggccag

SEQ ID NO: 2498164 - RNA, 20 nt, Human
cuagcugggggugggccagg

SEQ ID NO: 2498165 - RNA, 12 nt, Human
cuagcugggggu

SEQ ID NO: 2498166 - RNA, 18 nt, Human
cuagcugcuacaaagaag

SEQ ID NO: 2498167 - RNA, 16 nt, Human
cuagcugcuacaaaga

SEQ ID NO: 2498168 - RNA, 15 nt, Human
cuagcugcuacaaag

SEQ ID NO: 2498169 - RNA, 14 nt, Human
cuagcugcuacaaa

SEQ ID NO: 2498170 - RNA, 21 nt, Human
cuagcugcacagggcagcugg

SEQ ID NO: 2498171 - RNA, 20 nt, Human
cuagcugcacagggcagcug

SEQ ID NO: 2498172 - RNA, 17 nt, Human
cuagcugcacagggcag

SEQ ID NO: 2498173 - RNA, 23 nt, Human
cuagcugcuacaaagaagacaug

SEQ ID NO: 2498174 - RNA, 21 nt, Human
cuagcugcuacaaagaagaca

SEQ ID NO: 2498175 - RNA, 20 nt, Human
cuaggaaauauuuauuuuaa

SEQ ID NO: 2498176 - RNA, 19 nt, Human
cuaggaaauauuuauuuua

SEQ ID NO: 2498177 - RNA, 15 nt, Human
cuaggaaauauuuau

SEQ ID NO: 2498178 - RNA, 14 nt, Human
cuaggaaauauuua

SEQ ID NO: 2498179 - RNA, 12 nt, Human
cuaggaaaauac

SEQ ID NO: 2498180 - RNA, 18 nt, Human
cuagcuuuagacccuggg

SEQ ID NO: 2498181 - RNA, 19 nt, Human
cuagcuuuagacccugggu

SEQ ID NO: 2498182 - RNA, 15 nt, Human
cuagcuuuagacccu

SEQ ID NO: 2498183 - RNA, 23 nt, Human
cuagcuucugcuuuucugcccug

SEQ ID NO: 2498184 - RNA, 20 nt, Human
cuagcuugggaggcuucccc

SEQ ID NO: 2498185 - RNA, 22 nt, Human
cuagcuucugcuuuucugcccu

SEQ ID NO: 2498186 - RNA, 21 nt, Human
cuagcuucugcuuuucugccc

SEQ ID NO: 2498187 - RNA, 18 nt, Human
cuagcuucugcuuuucug

SEQ ID NO: 2498188 - RNA, 16 nt, Human
cuagcuucugcuuuuc

SEQ ID NO: 2498189 - RNA, 15 nt, Human
cuagcuucugcuuuu

SEQ ID NO: 2498190 - RNA, 14 nt, Human
cuagcuucugcuuu

SEQ ID NO: 2498191 - RNA, 13 nt, Human
cuagcuucugcuu

SEQ ID NO: 2498192 - RNA, 22 nt, Human
cuagcuuagagccucccucaau

SEQ ID NO: 2498193 - RNA, 18 nt, Human
cuagcuguugagcuguuu

SEQ ID NO: 2498194 - RNA, 20 nt, Human
cuagcuuagagccucccuca

SEQ ID NO: 2498195 - RNA, 19 nt, Human
cuagcuuagagccucccuc

SEQ ID NO: 2498196 - RNA, 15 nt, Human
cuagcuuagagccuc

SEQ ID NO: 2498197 - RNA, 17 nt, Human
cuaccucagguugcugg

SEQ ID NO: 2498198 - RNA, 15 nt, Human
cuaccucagguugcu

SEQ ID NO: 2498199 - RNA, 14 nt, Human
cuaccucagguugc

SEQ ID NO: 2498200 - RNA, 13 nt, Human
cuaccucagguug

SEQ ID NO: 2498201 - RNA, 12 nt, Human
cuaccucagguu

SEQ ID NO: 2498202 - RNA, 23 nt, Human
cuaccucaggcaggaagggcagg

SEQ ID NO: 2498203 - RNA, 18 nt, Human
cuaccucaggcagcucaa

SEQ ID NO: 2498204 - RNA, 17 nt, Human
cuaccucaggcagcuca

SEQ ID NO: 2498205 - RNA, 14 nt, Human
cuaccucaggcagg

SEQ ID NO: 2498206 - RNA, 20 nt, Human
cuaccucaggcaggaagggc

SEQ ID NO: 2498207 - RNA, 15 nt, Human
cuaccgcucuuggga

SEQ ID NO: 2498208 - RNA, 22 nt, Human
cuaccucacuauucaaguauua

SEQ ID NO: 2498209 - RNA, 17 nt, Human
cuaccucacuggggucc

SEQ ID NO: 2498210 - RNA, 11 nt, Human
cuaccucagcc

SEQ ID NO: 2498211 - RNA, 12 nt, Human
cuaccucagccu

SEQ ID NO: 2498212 - RNA, 14 nt, Human
cuaccucagccuag

SEQ ID NO: 2498213 - RNA, 15 nt, Human
cuaccucagccuaga

SEQ ID NO: 2498214 - RNA, 13 nt, Human
cuaccucaggcag

SEQ ID NO: 2498215 - RNA, 22 nt, Human
cuaccgagucucuucuccacug

SEQ ID NO: 2498216 - RNA, 21 nt, Human
cuaccgagucucuucuccacu

SEQ ID NO: 2498217 - RNA, 23 nt, Human
cuaccgagucucuucuccacugg

SEQ ID NO: 2498218 - RNA, 19 nt, Human
cuacccuuuuucuccagcu

SEQ ID NO: 2498219 - RNA, 18 nt, Human
cuacccuuuuucuccagc

SEQ ID NO: 2498220 - RNA, 18 nt, Human
cuaccgaaaccuugccuu

SEQ ID NO: 2498221 - RNA, 19 nt, Human
cuaccgagucucuucucca

SEQ ID NO: 2498222 - RNA, 17 nt, Human
cuaccgagucucuucuc

SEQ ID NO: 2498223 - RNA, 19 nt, Human
cuacucgaguuacagacaa

SEQ ID NO: 2498224 - RNA, 16 nt, Human
cuacucgaguuacaga

SEQ ID NO: 2498225 - RNA, 15 nt, Human
cuacucgaguuacag

SEQ ID NO: 2498226 - RNA, 18 nt, Human
cuacuccuguaauuccua

SEQ ID NO: 2498227 - RNA, 20 nt, Human
cuacuccucugcagugccuu

SEQ ID NO: 2498228 - RNA, 21 nt, Human
cuacuccucugcagugccuug

SEQ ID NO: 2498229 - RNA, 22 nt, Human
cuaccucagguugcugguugcu

SEQ ID NO: 2498230 - RNA, 20 nt, Human
cuaccucagguugcugguug

SEQ ID NO: 2498231 - RNA, 19 nt, Human
cuaccucagguugcugguu

SEQ ID NO: 2498232 - RNA, 18 nt, Human
cuaccucagguugcuggu

SEQ ID NO: 2498233 - RNA, 14 nt, Human
cuaccuccucaggg

SEQ ID NO: 2498234 - RNA, 15 nt, Human
cuacucccagacacc

SEQ ID NO: 2498235 - RNA, 17 nt, Human
cuacucccagacaccca

SEQ ID NO: 2498236 - RNA, 16 nt, Human
cuacucauuccccggg

SEQ ID NO: 2498237 - RNA, 15 nt, Human
cuaccucagucagua

SEQ ID NO: 2498238 - RNA, 16 nt, Human
cuacuccggagacagg

SEQ ID NO: 2498239 - RNA, 15 nt, Human
cuacuccuaccucag

SEQ ID NO: 2498240 - RNA, 16 nt, Human
cuacuccuaccucagc

SEQ ID NO: 2498241 - RNA, 17 nt, Human
cuacuccuaccucagcc

SEQ ID NO: 2498242 - RNA, 18 nt, Human
cuacuccuaccucagccu

SEQ ID NO: 2498243 - RNA, 15 nt, Human
cuacuccucugcagu

SEQ ID NO: 2498244 - RNA, 14 nt, Human
cuacuccucugcag

SEQ ID NO: 2498245 - RNA, 21 nt, Human
cuacuccuaccucagccuaga

SEQ ID NO: 2498246 - RNA, 18 nt, Human
cuacugggagccuaccca

SEQ ID NO: 2498247 - RNA, 21 nt, Human
cuacuguaauuugugauacaa

SEQ ID NO: 2498248 - RNA, 16 nt, Human
cuacuguaauuuuaua

SEQ ID NO: 2498249 - RNA, 19 nt, Human
cuacuguccuacccacccu

SEQ ID NO: 2498250 - RNA, 17 nt, Human
cuacugcagcuuuacau

SEQ ID NO: 2498251 - RNA, 14 nt, Human
cuacugggagccua

SEQ ID NO: 2498252 - RNA, 15 nt, Human
cuacugggagccuac

SEQ ID NO: 2498253 - RNA, 14 nt, Human
cuacucugugccag

SEQ ID NO: 2498254 - RNA, 17 nt, Human
cuacucuccucggcccc

SEQ ID NO: 2498255 - RNA, 17 nt, Human
cuacucuccucaucucu

SEQ ID NO: 2498256 - RNA, 12 nt, Human
cuacucuccuca

SEQ ID NO: 2498257 - RNA, 13 nt, Human
cuacucuccucau

SEQ ID NO: 2498258 - RNA, 22 nt, Human
cuacucuggagguuuguuuaga

SEQ ID NO: 2498259 - RNA, 18 nt, Human
cuacucucccauggcuua

SEQ ID NO: 2498260 - RNA, 22 nt, Human
cuacucucaggaucaagaaagu

SEQ ID NO: 2498261 - RNA, 12 nt, Human
cuacucuguguc

SEQ ID NO: 2498262 - RNA, 16 nt, Human
cuacugauuguuucau

SEQ ID NO: 2498263 - RNA, 16 nt, Human
cuacugauuuuuguga

SEQ ID NO: 2498264 - RNA, 16 nt, Human
cuacugauuuccuuug

SEQ ID NO: 2498265 - RNA, 17 nt, Human
cuacugauaaagaaaga

SEQ ID NO: 2498266 - RNA, 17 nt, Human
cuacugauuguuucauu

SEQ ID NO: 2498267 - RNA, 14 nt, Human
cuacugcagcuuua

SEQ ID NO: 2498268 - RNA, 22 nt, Human
cuagagaucugguuuugcuauu

SEQ ID NO: 2498269 - RNA, 21 nt, Human
cuagagaucugguuuugcuau

SEQ ID NO: 2498270 - RNA, 15 nt, Human
cuagagcagcccugg

SEQ ID NO: 2498271 - RNA, 13 nt, Human
cuagagagggagg

SEQ ID NO: 2498272 - RNA, 21 nt, Human
cuagagagggaggcaagcccu

SEQ ID NO: 2498273 - RNA, 22 nt, Human
cuagagagggaggcaagcccug

SEQ ID NO: 2498274 - RNA, 23 nt, Human
cuagagagggaggcaagcccugu

SEQ ID NO: 2498275 - RNA, 17 nt, Human
cuagagaucugguuuug

SEQ ID NO: 2498276 - RNA, 17 nt, Human
cuagagauauggcagcg

SEQ ID NO: 2498277 - RNA, 19 nt, Human
cuagagaagaggcuggugc

SEQ ID NO: 2498278 - RNA, 17 nt, Human
cuagagaagaggcuggu

SEQ ID NO: 2498279 - RNA, 20 nt, Human
cuagagacagaagcaggcug

SEQ ID NO: 2498280 - RNA, 15 nt, Human
cuagagacagaagca

SEQ ID NO: 2498281 - RNA, 19 nt, Human
cuagagaauguuagaggau

SEQ ID NO: 2498282 - RNA, 23 nt, Human
cuagagacagaagcaggcuggag

SEQ ID NO: 2498283 - RNA, 22 nt, Human
cuagagacagaagcaggcugga

SEQ ID NO: 2498284 - RNA, 12 nt, Human
cuagagagggag

SEQ ID NO: 2498285 - RNA, 18 nt, Human
cuagaggcuuccuucauu

SEQ ID NO: 2498286 - RNA, 19 nt, Human
cuagaggcuuccuucauuu

SEQ ID NO: 2498287 - RNA, 21 nt, Human
cuagaggcuuccuucauuucc

SEQ ID NO: 2498288 - RNA, 23 nt, Human
cuagaggcuuccuucauuuccuc

SEQ ID NO: 2498289 - RNA, 22 nt, Human
cuagaggccugaggaugagcug

SEQ ID NO: 2498290 - RNA, 20 nt, Human
cuagaggccugaggaugagc

SEQ ID NO: 2498291 - RNA, 18 nt, Human
cuagaggccugaggauga

SEQ ID NO: 2498292 - RNA, 16 nt, Human
cuagaggccugaggau

SEQ ID NO: 2498293 - RNA, 15 nt, Human
cuagaggccugagga

SEQ ID NO: 2498294 - RNA, 13 nt, Human
cuagaggccugag

SEQ ID NO: 2498295 - RNA, 13 nt, Human
cuagagccugccu

SEQ ID NO: 2498296 - RNA, 12 nt, Human
cuagagccugcc

SEQ ID NO: 2498297 - RNA, 11 nt, Human
cuagagccugc

SEQ ID NO: 2498298 - RNA, 17 nt, Human
cuagagcagcccuggag

SEQ ID NO: 2498299 - RNA, 15 nt, Human
cuagagcagggauua

SEQ ID NO: 2498300 - RNA, 14 nt, Human
cuagagcagggauu

SEQ ID NO: 2498301 - RNA, 12 nt, Human
cuagaggccuga

SEQ ID NO: 2498302 - RNA, 23 nt, Human
cuagaggccagccccacccagga

SEQ ID NO: 2498303 - RNA, 14 nt, Human
cuagagccugccug

SEQ ID NO: 2498304 - RNA, 22 nt, Human
cuagaggccagccccacccagg

SEQ ID NO: 2498305 - RNA, 19 nt, Human
cuagaguuuagcuggaaaa

SEQ ID NO: 2498306 - RNA, 18 nt, Human
cuagagugagggccugag

SEQ ID NO: 2498307 - RNA, 17 nt, Human
cuagagugagggccuga

SEQ ID NO: 2498308 - RNA, 16 nt, Human
cuagagugagggccug

SEQ ID NO: 2498309 - RNA, 18 nt, Human
cuagaguuuagcuggaaa

SEQ ID NO: 2498310 - RNA, 15 nt, Human
cuagagguucaaaga

SEQ ID NO: 2498311 - RNA, 18 nt, Human
cuagagguucaaagauau

SEQ ID NO: 2498312 - RNA, 21 nt, Human
cuagagguucaaagauauuuu

SEQ ID NO: 2498313 - RNA, 17 nt, Human
cuagagguucaaagaua

SEQ ID NO: 2498314 - RNA, 22 nt, Human
cuagaggcuugcauaauaagcu

SEQ ID NO: 2498315 - RNA, 14 nt, Human
cuagagggaccucu

SEQ ID NO: 2498316 - RNA, 15 nt, Human
cuagagggaccucuc

SEQ ID NO: 2498317 - RNA, 16 nt, Human
cuagagggaccucucc

SEQ ID NO: 2498318 - RNA, 12 nt, Human
cuagacuuucug

SEQ ID NO: 2498319 - RNA, 15 nt, Human
cuagagaagaggcug

SEQ ID NO: 2498320 - RNA, 12 nt, Human
cuagagaagagg

SEQ ID NO: 2498321 - RNA, 18 nt, Human
cuagagaacgcagcccua

SEQ ID NO: 2498322 - RNA, 17 nt, Human
cuagagaacgcagcccu

SEQ ID NO: 2498323 - RNA, 16 nt, Human
cuagagaacgcagccc

SEQ ID NO: 2498324 - RNA, 15 nt, Human
cuagagaacgcagcc

SEQ ID NO: 2498325 - RNA, 14 nt, Human
cuagacuuucuguu

SEQ ID NO: 2498326 - RNA, 13 nt, Human
cuagacuuucugu

SEQ ID NO: 2498327 - RNA, 17 nt, Human
cuagaaauaugauuuua

SEQ ID NO: 2498328 - RNA, 15 nt, Human
cuagaaauaugauuu

SEQ ID NO: 2498329 - RNA, 13 nt, Human
cuagaaauaugau

SEQ ID NO: 2498330 - RNA, 18 nt, Human
cuagacucccaagcugga

SEQ ID NO: 2498331 - RNA, 14 nt, Human
cuagaaacuuccaa

SEQ ID NO: 2498332 - RNA, 16 nt, Human
cuagaaacuuccaaau

SEQ ID NO: 2498333 - RNA, 22 nt, Human
cuagaaagccuguuccccucac

SEQ ID NO: 2498334 - RNA, 16 nt, Human
cuagaaacagaucuug

SEQ ID NO: 2498335 - RNA, 18 nt, Human
cuacuuuugcaugaaaau

SEQ ID NO: 2498336 - RNA, 17 nt, Human
cuacuuuugcaugaaaa

SEQ ID NO: 2498337 - RNA, 18 nt, Human
cuacuuugucuaaaaaua

SEQ ID NO: 2498338 - RNA, 19 nt, Human
cuacuuaccauaugugcuu

SEQ ID NO: 2498339 - RNA, 17 nt, Human
cuacuuagcaugucccu

SEQ ID NO: 2498340 - RNA, 19 nt, Human
cuacuguaauuuuauauga

SEQ ID NO: 2498341 - RNA, 20 nt, Human
cuacugucucacugaaacau

SEQ ID NO: 2498342 - RNA, 17 nt, Human
cuacuguaauuuuauau

SEQ ID NO: 2498343 - RNA, 20 nt, Human
cuacuguccuacccacccuc

SEQ ID NO: 2498344 - RNA, 22 nt, Human
cuacuuacaugcauuacugcau

SEQ ID NO: 2498345 - RNA, 21 nt, Human
cuacuuaccuaccacaugcca

SEQ ID NO: 2498346 - RNA, 19 nt, Human
cuacuuaauuccuuucuca

SEQ ID NO: 2498347 - RNA, 15 nt, Human
cuacuuaauuccuuu

SEQ ID NO: 2498348 - RNA, 22 nt, Human
cuacuuaauuccuuucucaucc

SEQ ID NO: 2498349 - RNA, 15 nt, Human
cuaaugcgcaggcug

SEQ ID NO: 2498350 - RNA, 16 nt, Human
cuaaugcgcaggcugg

SEQ ID NO: 2498351 - RNA, 19 nt, Human
cuaaugcgcaggcuggccc

SEQ ID NO: 2498352 - RNA, 20 nt, Human
cuaaugcgcaggcuggcccu

SEQ ID NO: 2498353 - RNA, 20 nt, Human
cuaaucagugucucacacug

SEQ ID NO: 2498354 - RNA, 18 nt, Human
cuaaucagugucucacac

SEQ ID NO: 2498355 - RNA, 17 nt, Human
cuaaucagugucucaca

SEQ ID NO: 2498356 - RNA, 16 nt, Human
cuaaucagugucucac

SEQ ID NO: 2498357 - RNA, 15 nt, Human
cuaaucagugucuca

SEQ ID NO: 2498358 - RNA, 13 nt, Human
cuaaucagugucu

SEQ ID NO: 2498359 - RNA, 12 nt, Human
cuaaucaguguc

SEQ ID NO: 2498360 - RNA, 20 nt, Human
cuaaucaggcugaggugucu

SEQ ID NO: 2498361 - RNA, 13 nt, Human
cuaauccaaccca

SEQ ID NO: 2498362 - RNA, 21 nt, Human
cuaaucagugucucacacugg

SEQ ID NO: 2498363 - RNA, 16 nt, Human
cuaaucauccaaugcu

SEQ ID NO: 2498364 - RNA, 15 nt, Human
cuaauccaacccaug

SEQ ID NO: 2498365 - RNA, 21 nt, Human
cuaaucagggaggucauuuug

SEQ ID NO: 2498366 - RNA, 20 nt, Human
cuaaucagggaggucauuuu

SEQ ID NO: 2498367 - RNA, 19 nt, Human
cuaaucagggaggucauuu

SEQ ID NO: 2498368 - RNA, 20 nt, Human
cuaauauggccacaguaguc

SEQ ID NO: 2498369 - RNA, 21 nt, Human
cuaaucagcauucucacuccu

SEQ ID NO: 2498370 - RNA, 20 nt, Human
cuaaucagcauucucacucc

SEQ ID NO: 2498371 - RNA, 13 nt, Human
cuaauauggcaaa

SEQ ID NO: 2498372 - RNA, 18 nt, Human
cuaauauguaacaagcca

SEQ ID NO: 2498373 - RNA, 13 nt, Human
cuaaugggacacu

SEQ ID NO: 2498374 - RNA, 12 nt, Human
cuaaugggacac

SEQ ID NO: 2498375 - RNA, 22 nt, Human
cuaaugcgcaggcuggcccugc

SEQ ID NO: 2498376 - RNA, 23 nt, Human
cuaaugcgcaggcuggcccugcc

SEQ ID NO: 2498377 - RNA, 18 nt, Human
cuaaugccuuacucuucu

SEQ ID NO: 2498378 - RNA, 12 nt, Human
cuaaugcuccuu

SEQ ID NO: 2498379 - RNA, 18 nt, Human
cuaaugcuccuuguuccu

SEQ ID NO: 2498380 - RNA, 23 nt, Human
cuaaugcugcagauuugggcugg

SEQ ID NO: 2498381 - RNA, 19 nt, Human
cuaaugcuccuuguuccua

SEQ ID NO: 2498382 - RNA, 18 nt, Human
cuaauuauauaauauuuu

SEQ ID NO: 2498383 - RNA, 16 nt, Human
cuaauuauauaauauu

SEQ ID NO: 2498384 - RNA, 19 nt, Human
cuaauggguauuuaaacaa

SEQ ID NO: 2498385 - RNA, 22 nt, Human
cuaauuauacccccugcaaagc

SEQ ID NO: 2498386 - RNA, 14 nt, Human
cuaauuagagcaga

SEQ ID NO: 2498387 - RNA, 13 nt, Human
cuaauucauuuau

SEQ ID NO: 2498388 - RNA, 15 nt, Human
cuaauuccacaccuu

SEQ ID NO: 2498389 - RNA, 17 nt, Human
cuaauuccacaccuuuu

SEQ ID NO: 2498390 - RNA, 14 nt, Human
cuaauuccacagcu

SEQ ID NO: 2498391 - RNA, 15 nt, Human
cuaauuccacagcug

SEQ ID NO: 2498392 - RNA, 16 nt, Human
cuaauuccacagcugc

SEQ ID NO: 2498393 - RNA, 14 nt, Human
cuaauucccagagu

SEQ ID NO: 2498394 - RNA, 16 nt, Human
cuaauucccagagugu

SEQ ID NO: 2498395 - RNA, 17 nt, Human
cuaauucccauuuugca

SEQ ID NO: 2498396 - RNA, 18 nt, Human
cuaauucccauuuugcaa

SEQ ID NO: 2498397 - RNA, 19 nt, Human
cuaauucccauuuugcaaa

SEQ ID NO: 2498398 - RNA, 20 nt, Human
cuaauucccauuuugcaaaa

SEQ ID NO: 2498399 - RNA, 21 nt, Human
cuaauucccauuuugcaaaau

SEQ ID NO: 2498400 - RNA, 23 nt, Human
cuacacagucugcaagauucuga

SEQ ID NO: 2498401 - RNA, 21 nt, Human
cuacacagggauguacaaggc

SEQ ID NO: 2498402 - RNA, 14 nt, Human
cuacacagggaugu

SEQ ID NO: 2498403 - RNA, 21 nt, Human
cuacacauauguauuccugau

SEQ ID NO: 2498404 - RNA, 21 nt, Human
cuacacaggggaaaagaggag

SEQ ID NO: 2498405 - RNA, 15 nt, Human
cuaauuccuuucuau

SEQ ID NO: 2498406 - RNA, 21 nt, Human
cuacacacugcauguuuguga

SEQ ID NO: 2498407 - RNA, 22 nt, Human
cuacaccccuccccugcccuag

SEQ ID NO: 2498408 - RNA, 20 nt, Human
cuacacccuuggacuugagg

SEQ ID NO: 2498409 - RNA, 16 nt, Human
cuacacccuuggacuu

SEQ ID NO: 2498410 - RNA, 16 nt, Human
cuacacccuuuuccag

SEQ ID NO: 2498411 - RNA, 14 nt, Human
cuacaccuaacuca

SEQ ID NO: 2498412 - RNA, 13 nt, Human
cuacaccuaacuc

SEQ ID NO: 2498413 - RNA, 18 nt, Human
cuacacccuuuuccagcu

SEQ ID NO: 2498414 - RNA, 12 nt, Human
cuacaccuggcu

SEQ ID NO: 2498415 - RNA, 15 nt, Human
cuacaccuggcugag

SEQ ID NO: 2498416 - RNA, 13 nt, Human
cuacaccuggcug

SEQ ID NO: 2498417 - RNA, 15 nt, Human
cuacaccuuucuccu

SEQ ID NO: 2498418 - RNA, 23 nt, Human
cuacacgagauacagaauuuuau

SEQ ID NO: 2498419 - RNA, 14 nt, Human
cuacacuaagagag

SEQ ID NO: 2498420 - RNA, 13 nt, Human
cuacaccuugagg

SEQ ID NO: 2498421 - RNA, 14 nt, Human
cuacacuccagccu

SEQ ID NO: 2498422 - RNA, 20 nt, Human
cuacaccuuucuccuuugua

SEQ ID NO: 2498423 - RNA, 18 nt, Human
cuacaccuuucuccuuug

SEQ ID NO: 2498424 - RNA, 14 nt, Human
cuaaggacacacua

SEQ ID NO: 2498425 - RNA, 13 nt, Human
cuaaggacacacu

SEQ ID NO: 2498426 - RNA, 12 nt, Human
cuaaggacacac

SEQ ID NO: 2498427 - RNA, 11 nt, Human
cuaaggacaca

SEQ ID NO: 2498428 - RNA, 16 nt, Human
cuaaggacacacuaau

SEQ ID NO: 2498429 - RNA, 16 nt, Human
cuaaggacauuuccca

SEQ ID NO: 2498430 - RNA, 17 nt, Human
cuaaggacauuucccag

SEQ ID NO: 2498431 - RNA, 19 nt, Human
cuaaggacauuucccaggg

SEQ ID NO: 2498432 - RNA, 14 nt, Human
cuaagguucucaua

SEQ ID NO: 2498433 - RNA, 20 nt, Human
cuaaggcguggagcugccug

SEQ ID NO: 2498434 - RNA, 19 nt, Human
cuaaggcguggagcugccu

SEQ ID NO: 2498435 - RNA, 18 nt, Human
cuaaggcguggagcugcc

SEQ ID NO: 2498436 - RNA, 17 nt, Human
cuaaggcguggagcugc

SEQ ID NO: 2498437 - RNA, 22 nt, Human
cuaaggcguggagcugccugau

SEQ ID NO: 2498438 - RNA, 21 nt, Human
cuaaggcguggagcugccuga

SEQ ID NO: 2498439 - RNA, 16 nt, Human
cuaaggcguggagcug

SEQ ID NO: 2498440 - RNA, 19 nt, Human
cuaaggccgaagaaggguc

SEQ ID NO: 2498441 - RNA, 20 nt, Human
cuaagaugacauugcuaaga

SEQ ID NO: 2498442 - RNA, 19 nt, Human
cuaagaugacauugcuaag

SEQ ID NO: 2498443 - RNA, 18 nt, Human
cuaagaugacauugcuaa

SEQ ID NO: 2498444 - RNA, 15 nt, Human
cuaagaugacauugc

SEQ ID NO: 2498445 - RNA, 11 nt, Human
cuaagaugcuc

SEQ ID NO: 2498446 - RNA, 22 nt, Human
cuaagcuauucaguaauaacuc

SEQ ID NO: 2498447 - RNA, 21 nt, Human
cuaagcuucacuguaaaauaa

SEQ ID NO: 2498448 - RNA, 22 nt, Human
cuaagcuuugccagcugcugcu

SEQ ID NO: 2498449 - RNA, 20 nt, Human
cuaagcuuugccagcugcug

SEQ ID NO: 2498450 - RNA, 19 nt, Human
cuaagcuuugccagcugcu

SEQ ID NO: 2498451 - RNA, 22 nt, Human
cuaagcucaaggcgugaggaug

SEQ ID NO: 2498452 - RNA, 14 nt, Human
cuaaguaaaaccac

SEQ ID NO: 2498453 - RNA, 18 nt, Human
cuaaguaaaaccacagca

SEQ ID NO: 2498454 - RNA, 19 nt, Human
cuaaguaaaaccacagcag

SEQ ID NO: 2498455 - RNA, 14 nt, Human
cuaauaaagcugug

SEQ ID NO: 2498456 - RNA, 17 nt, Human
cuaauaccucugugugc

SEQ ID NO: 2498457 - RNA, 16 nt, Human
cuaauaccucugugug

SEQ ID NO: 2498458 - RNA, 15 nt, Human
cuaauaccucugugu

SEQ ID NO: 2498459 - RNA, 13 nt, Human
cuaauaccucugu

SEQ ID NO: 2498460 - RNA, 19 nt, Human
cuaauacagcaacaauuua

SEQ ID NO: 2498461 - RNA, 23 nt, Human
cuaauacagcaacaauuuaugaa

SEQ ID NO: 2498462 - RNA, 18 nt, Human
cuaauaaucauuggauuc

SEQ ID NO: 2498463 - RNA, 12 nt, Human
cuaauacaccag

SEQ ID NO: 2498464 - RNA, 19 nt, Human
cuaauagacaauuuauuau

SEQ ID NO: 2498465 - RNA, 23 nt, Human
cuaauagacaauuuauuauggca

SEQ ID NO: 2498466 - RNA, 17 nt, Human
cuaauagacaauuuauu

SEQ ID NO: 2498467 - RNA, 20 nt, Human
cuaauagaacucaguuuuaa

SEQ ID NO: 2498468 - RNA, 13 nt, Human
cuaauagaacuca

SEQ ID NO: 2498469 - RNA, 11 nt, Human
cuaauauauuu

SEQ ID NO: 2498470 - RNA, 21 nt, Human
cuaauauauuuuuauauuuag

SEQ ID NO: 2498471 - RNA, 12 nt, Human
cuaauauauuuu

SEQ ID NO: 2498472 - RNA, 12 nt, Human
cuaauaucagca

SEQ ID NO: 2498473 - RNA, 15 nt, Human
cuaauauauuuuuau

SEQ ID NO: 2498474 - RNA, 23 nt, Human
cuaauaguuuuauuaauaaacau

SEQ ID NO: 2498475 - RNA, 22 nt, Human
cuaauauaaguuucuuugcuuc

SEQ ID NO: 2498476 - RNA, 17 nt, Human
cuaauauacaggguagc

SEQ ID NO: 2498477 - RNA, 23 nt, Human
cuaauagcggguuacuuucacau

SEQ ID NO: 2498478 - RNA, 13 nt, Human
cguuuucaaaauu

SEQ ID NO: 2498479 - RNA, 14 nt, Human
cuaaauugaauaau

SEQ ID NO: 2498480 - RNA, 13 nt, Human
cuaaauugaauaa

SEQ ID NO: 2498481 - RNA, 12 nt, Human
cuaaauugaaua

SEQ ID NO: 2498482 - RNA, 17 nt, Human
cuaaauugaaaccugga

SEQ ID NO: 2498483 - RNA, 19 nt, Human
cuaaauugacacuuaaaaa

SEQ ID NO: 2498484 - RNA, 16 nt, Human
cuaaauucaugcugcu

SEQ ID NO: 2498485 - RNA, 14 nt, Human
cuaaauuccacacu

SEQ ID NO: 2498486 - RNA, 14 nt, Human
cuaaaugaauguuu

SEQ ID NO: 2498487 - RNA, 12 nt, Human
cuaaaugaaugu

SEQ ID NO: 2498488 - RNA, 13 nt, Human
cuaaaugaagugc

SEQ ID NO: 2498489 - RNA, 17 nt, Human
cuaacagcucaggaucu

SEQ ID NO: 2498490 - RNA, 23 nt, Human
cuaacauauaauguuguuauuua

SEQ ID NO: 2498491 - RNA, 22 nt, Human
cuaacauauaauguuguuauuu

SEQ ID NO: 2498492 - RNA, 12 nt, Human
cuaacauauaau

SEQ ID NO: 2498493 - RNA, 22 nt, Human
cuaacaagucauagguuaauau

SEQ ID NO: 2498494 - RNA, 17 nt, Human
cuaacacuggccccuag

SEQ ID NO: 2498495 - RNA, 18 nt, Human
cuaacagauaagcaagag

SEQ ID NO: 2498496 - RNA, 16 nt, Human
cuaacacuggccccua

SEQ ID NO: 2498497 - RNA, 17 nt, Human
cuaacagauaagcaaga

SEQ ID NO: 2498498 - RNA, 21 nt, Human
cuaacauuuuaaauaaaagaa

SEQ ID NO: 2498499 - RNA, 18 nt, Human
cuaacauuuuaaauaaaa

SEQ ID NO: 2498500 - RNA, 12 nt, Human
cuaacaucagaa

SEQ ID NO: 2498501 - RNA, 14 nt, Human
cuaaccacgcugga

SEQ ID NO: 2498502 - RNA, 12 nt, Human
cuaaccacgcug

SEQ ID NO: 2498503 - RNA, 15 nt, Human
cuaaccccaggcccc

SEQ ID NO: 2498504 - RNA, 13 nt, Human
cuaaccccaggcc

SEQ ID NO: 2498505 - RNA, 13 nt, Human
cuaaccacaucaa

SEQ ID NO: 2498506 - RNA, 16 nt, Human
cuaaccccaggccccg

SEQ ID NO: 2498507 - RNA, 16 nt, Human
cuaaccccgggcgggu

SEQ ID NO: 2498508 - RNA, 13 nt, Human
cuaaccccuuucc

SEQ ID NO: 2498509 - RNA, 14 nt, Human
cuaaccccuuuccu

SEQ ID NO: 2498510 - RNA, 16 nt, Human
cuaaccccuuuccugc

SEQ ID NO: 2498511 - RNA, 15 nt, Human
cuaaccucaucuucu

SEQ ID NO: 2498512 - RNA, 19 nt, Human
cuaacccuuaucaccagcu

SEQ ID NO: 2498513 - RNA, 20 nt, Human
cuaacccucccauggcaccu

SEQ ID NO: 2498514 - RNA, 21 nt, Human
cuaacccucagaaacacuggg

SEQ ID NO: 2498515 - RNA, 12 nt, Human
cuaaccucaucu

SEQ ID NO: 2498516 - RNA, 15 nt, Human
cuaagagagaaugag

SEQ ID NO: 2498517 - RNA, 14 nt, Human
cuaagagagaauga

SEQ ID NO: 2498518 - RNA, 14 nt, Human
cuaagagagagaga

SEQ ID NO: 2498519 - RNA, 22 nt, Human
cuaagagaaguuauuuucuaca

SEQ ID NO: 2498520 - RNA, 21 nt, Human
cuaaccugaccgugggcgggg

SEQ ID NO: 2498521 - RNA, 11 nt, Human
cuaaccugacc

SEQ ID NO: 2498522 - RNA, 19 nt, Human
cuaagagaaguuauuuucu

SEQ ID NO: 2498523 - RNA, 11 nt, Human
cuaagagccau

SEQ ID NO: 2498524 - RNA, 20 nt, Human
cuaagagccauuuaggggcc

SEQ ID NO: 2498525 - RNA, 16 nt, Human
cuaagagcuagcgcug

SEQ ID NO: 2498526 - RNA, 18 nt, Human
cuaagagcuagcgcugcc

SEQ ID NO: 2498527 - RNA, 22 nt, Human
cuaagagggagggagggcucca

SEQ ID NO: 2498528 - RNA, 15 nt, Human
cuaagagggagggag

SEQ ID NO: 2498529 - RNA, 13 nt, Human
cuaagagggaggg

SEQ ID NO: 2498530 - RNA, 13 nt, Human
cuaagagcucccg

SEQ ID NO: 2498531 - RNA, 19 nt, Human
cuaagagcuagcgcugccg

SEQ ID NO: 2498532 - RNA, 20 nt, Human
cuaagagcuagcgcugccgc

SEQ ID NO: 2498533 - RNA, 23 nt, Human
cuaagagggagggagggcuccag

SEQ ID NO: 2498534 - RNA, 16 nt, Human
cuaagauaguaacaau

SEQ ID NO: 2498535 - RNA, 22 nt, Human
cuaagagugcugggcauuuuua

SEQ ID NO: 2498536 - RNA, 12 nt, Human
cuaagagugucc

SEQ ID NO: 2498537 - RNA, 12 nt, Human
cuaagaugacau

SEQ ID NO: 2498538 - RNA, 21 nt, Human
cuaagaguugagcucucggaa

SEQ ID NO: 2498539 - RNA, 18 nt, Human
cuaagaguugagcucucg

SEQ ID NO: 2498540 - RNA, 18 nt, Human
cuaagaguguccuaggag

SEQ ID NO: 2498541 - RNA, 24 nt, Human
cuaaaguuuacaguaaauaaauug

SEQ ID NO: 2498542 - RNA, 11 nt, Human
cuaaacugcau

SEQ ID NO: 2498543 - RNA, 21 nt, Human
cuaaacugcccccucugcccu

SEQ ID NO: 2498544 - RNA, 21 nt, Human
cuaaaguuuacaguaaauaaa

SEQ ID NO: 2498545 - RNA, 20 nt, Human
cuaaauaaaauuuguugcau

SEQ ID NO: 2498546 - RNA, 15 nt, Human
cuaaauaaaauuugu

SEQ ID NO: 2498547 - RNA, 23 nt, Human
cuaaauaaagcuugcaacaaaau

SEQ ID NO: 2498548 - RNA, 14 nt, Human
cuaaauagcaugua

SEQ ID NO: 2498549 - RNA, 24 nt, Human
cuaaauaccugcccugacaugcac

SEQ ID NO: 2498550 - RNA, 21 nt, Human
cuaaaucuccaaaauaaaacu

SEQ ID NO: 2498551 - RNA, 22 nt, Human
cuaaaugaaaaucgugacaaca

SEQ ID NO: 2498552 - RNA, 22 nt, Human
cuaaauagcauguauugugucu

SEQ ID NO: 2498553 - RNA, 20 nt, Human
cuaaauagcauguauugugu

SEQ ID NO: 2498554 - RNA, 17 nt, Human
cuaaauagcauguauug

SEQ ID NO: 2498555 - RNA, 15 nt, Human
cuaaauagcauguau

SEQ ID NO: 2498556 - RNA, 15 nt, Human
cuaaaucucuaauau

SEQ ID NO: 2498557 - RNA, 23 nt, Human
cuaaauagcauguauugugucuu

SEQ ID NO: 2498558 - RNA, 15 nt, Human
cuaaacuaucuuuuu

SEQ ID NO: 2498559 - RNA, 14 nt, Human
cuaaacuaucuuuu

SEQ ID NO: 2498560 - RNA, 14 nt, Human
cuaaacucauuuau

SEQ ID NO: 2498561 - RNA, 15 nt, Human
cuaaacucauuuaua

SEQ ID NO: 2498562 - RNA, 22 nt, Human
cuaaacucucuuugggaauguu

SEQ ID NO: 2498563 - RNA, 17 nt, Human
cuaaacucauuuauaaa

SEQ ID NO: 2498564 - RNA, 22 nt, Human
cuaaacucauuuauaaagcuaa

SEQ ID NO: 2498565 - RNA, 12 nt, Human
cuaaacugcccc

SEQ ID NO: 2498566 - RNA, 13 nt, Human
cuaaacugccccc

SEQ ID NO: 2498567 - RNA, 22 nt, Human
cuaaaaugccucaguguauuug

SEQ ID NO: 2498568 - RNA, 23 nt, Human
cuaaaaugauuuuaucugugaau

SEQ ID NO: 2498569 - RNA, 14 nt, Human
cuaaaaugauuuua

SEQ ID NO: 2498570 - RNA, 15 nt, Human
cuaaaauauuuauuu

SEQ ID NO: 2498571 - RNA, 23 nt, Human
cuaaaauauuuauuuuuuuuaag

SEQ ID NO: 2498572 - RNA, 14 nt, Human
cuaaaauauuuauu

SEQ ID NO: 2498573 - RNA, 19 nt, Human
cuaaaauagccacuuaccu

SEQ ID NO: 2498574 - RNA, 13 nt, Human
cuaaaauagccac

SEQ ID NO: 2498575 - RNA, 18 nt, Human
cgggacaccugcccugcc

SEQ ID NO: 2498576 - RNA, 14 nt, Human
cgggaccuguggcu

SEQ ID NO: 2498577 - RNA, 13 nt, Human
cgggaccuguggc

SEQ ID NO: 2498578 - RNA, 13 nt, Human
cgggaccuggugc

SEQ ID NO: 2498579 - RNA, 23 nt, Human
cgggaccccgagccuggcuccaa

SEQ ID NO: 2498580 - RNA, 20 nt, Human
cgggaggcagagguugcagu

SEQ ID NO: 2498581 - RNA, 15 nt, Human
cguuuguaugugugu

SEQ ID NO: 2498582 - RNA, 14 nt, Human
cguuuguaugugug

SEQ ID NO: 2498583 - RNA, 20 nt, Human
cguuuguuccccaagacauu

SEQ ID NO: 2498584 - RNA, 21 nt, Human
cgggacgagacccuacaggag

SEQ ID NO: 2498585 - RNA, 22 nt, Human
cgggaggcagagguugcagugu

SEQ ID NO: 2498586 - RNA, 21 nt, Human
cgggaggauguucugggacac

SEQ ID NO: 2498587 - RNA, 23 nt, Human
cgggaggauguucugggacacag

SEQ ID NO: 2498588 - RNA, 12 nt, Human
cguuuuauugug

SEQ ID NO: 2498589 - RNA, 18 nt, Human
cuaaaaaaaaaaaaguau

SEQ ID NO: 2498590 - RNA, 20 nt, Human
cuaaaaaaaaaaaaguauua

SEQ ID NO: 2498591 - RNA, 14 nt, Human
cguuuuauuguguu

SEQ ID NO: 2498592 - RNA, 18 nt, Human
cguuuuauuguguuuuua

SEQ ID NO: 2498593 - RNA, 11 nt, Human
cuaaaaaacag

SEQ ID NO: 2498594 - RNA, 21 nt, Human
cuaaaaagaaggaaaaugauc

SEQ ID NO: 2498595 - RNA, 22 nt, Human
cuaaaaaagauauauuaaaaau

SEQ ID NO: 2498596 - RNA, 21 nt, Human
cguuugagaagaaaacaucua

SEQ ID NO: 2498597 - RNA, 19 nt, Human
cuaaaaaagauauauuaaa

SEQ ID NO: 2498598 - RNA, 15 nt, Human
cuaaaaaagauauau

SEQ ID NO: 2498599 - RNA, 13 nt, Human
cuaaaaaagauau

SEQ ID NO: 2498600 - RNA, 11 nt, Human
cuaaaaaagau

SEQ ID NO: 2498601 - RNA, 17 nt, Human
cuaaaaaacagaggcca

SEQ ID NO: 2498602 - RNA, 22 nt, Human
cuaaaaaacauaaauuucuuua

SEQ ID NO: 2498603 - RNA, 22 nt, Human
cuaaaauaagggcagagucaca

SEQ ID NO: 2498604 - RNA, 20 nt, Human
cuaaaagugggcuugauucu

SEQ ID NO: 2498605 - RNA, 11 nt, Human
cuaaaaauaaa

SEQ ID NO: 2498606 - RNA, 23 nt, Human
cuaaaagugggcuugauucugca

SEQ ID NO: 2498607 - RNA, 21 nt, Human
cuaaaaauagacuuaaaucuc

SEQ ID NO: 2498608 - RNA, 22 nt, Human
cuaggaaauauuuauuuuaaua

SEQ ID NO: 2498609 - RNA, 18 nt, Human
cuaccaauagauucccca

SEQ ID NO: 2498610 - RNA, 15 nt, Human
cuaccaaagcaccuu

SEQ ID NO: 2498611 - RNA, 19 nt, Human
cuaccaagcuauccuggcu

SEQ ID NO: 2498612 - RNA, 13 nt, Human
cuaccaaugcaug

SEQ ID NO: 2498613 - RNA, 15 nt, Human
cuaccaaugcaugca

SEQ ID NO: 2498614 - RNA, 14 nt, Human
cuaccaaugcaugc

SEQ ID NO: 2498615 - RNA, 13 nt, Human
cuaccacaguguc

SEQ ID NO: 2498616 - RNA, 14 nt, Human
cuaccacagugucu

SEQ ID NO: 2498617 - RNA, 14 nt, Human
cuaccaccccuucc

SEQ ID NO: 2498618 - RNA, 18 nt, Human
cuaccacaugccaagcac

SEQ ID NO: 2498619 - RNA, 15 nt, Human
cuaccacagugucug

SEQ ID NO: 2498620 - RNA, 18 nt, Human
cuaccauccccuguagag

SEQ ID NO: 2498621 - RNA, 18 nt, Human
cuaccaccccuuccuguc

SEQ ID NO: 2498622 - RNA, 17 nt, Human
cuaccaccccuuccugu

SEQ ID NO: 2498623 - RNA, 16 nt, Human
cuaccaccccuuccug

SEQ ID NO: 2498624 - RNA, 22 nt, Human
cuaccaccccuuccugucccac

SEQ ID NO: 2498625 - RNA, 11 nt, Human
cuaccaccucc

SEQ ID NO: 2498626 - RNA, 14 nt, Human
cuaccaccucccca

SEQ ID NO: 2498627 - RNA, 15 nt, Human
cuaccaccuccccag

SEQ ID NO: 2498628 - RNA, 12 nt, Human
cuaccauuucag

SEQ ID NO: 2498629 - RNA, 13 nt, Human
cuaccauuucaga

SEQ ID NO: 2498630 - RNA, 20 nt, Human
cuaccauuugcagaguccug

SEQ ID NO: 2498631 - RNA, 12 nt, Human
cuacccaaagga

SEQ ID NO: 2498632 - RNA, 16 nt, Human
cuaccaccuccccagc

SEQ ID NO: 2498633 - RNA, 17 nt, Human
cuaccaccuccccagcc

SEQ ID NO: 2498634 - RNA, 13 nt, Human
cuaccauucagug

SEQ ID NO: 2498635 - RNA, 19 nt, Human
cuaccaugaacagaaaaca

SEQ ID NO: 2498636 - RNA, 13 nt, Human
cuacauucuguua

SEQ ID NO: 2498637 - RNA, 14 nt, Human
cuacauucuguuaa

SEQ ID NO: 2498638 - RNA, 14 nt, Human
cuaccaaagcaccu

SEQ ID NO: 2498639 - RNA, 12 nt, Human
cuacauucauuu

SEQ ID NO: 2498640 - RNA, 22 nt, Human
cuacauuauaaaugucucuuua

SEQ ID NO: 2498641 - RNA, 17 nt, Human
cuacaugugggagcuuu

SEQ ID NO: 2498642 - RNA, 13 nt, Human
cuacauguauugc

SEQ ID NO: 2498643 - RNA, 23 nt, Human
cuacaugguugaaaccccaucuc

SEQ ID NO: 2498644 - RNA, 17 nt, Human
cuacaugcuuugugaac

SEQ ID NO: 2498645 - RNA, 21 nt, Human
cuacauguauugcacauugua

SEQ ID NO: 2498646 - RNA, 18 nt, Human
cuacauguauugcacauu

SEQ ID NO: 2498647 - RNA, 22 nt, Human
cuacauguauugcacauuguaa

SEQ ID NO: 2498648 - RNA, 16 nt, Human
cuacaugugggagcuu

SEQ ID NO: 2498649 - RNA, 17 nt, Human
cuacccagcgagcccug

SEQ ID NO: 2498650 - RNA, 15 nt, Human
cuacccagcgagccc

SEQ ID NO: 2498651 - RNA, 20 nt, Human
cuacccacaccucugccaga

SEQ ID NO: 2498652 - RNA, 19 nt, Human
cuacccacaccucugccag

SEQ ID NO: 2498653 - RNA, 18 nt, Human
cuacccacaccucugcca

SEQ ID NO: 2498654 - RNA, 16 nt, Human
cuacccacaccucugc

SEQ ID NO: 2498655 - RNA, 16 nt, Human
cuacccaaccacucaa

SEQ ID NO: 2498656 - RNA, 15 nt, Human
cuacccaaccacuca

SEQ ID NO: 2498657 - RNA, 14 nt, Human
cuacccaaccacuc

SEQ ID NO: 2498658 - RNA, 13 nt, Human
cuacccaaccacu

SEQ ID NO: 2498659 - RNA, 13 nt, Human
cuacccacccucc

SEQ ID NO: 2498660 - RNA, 21 nt, Human
cuacccagagaagccccuucc

SEQ ID NO: 2498661 - RNA, 13 nt, Human
cuacccaggugcu

SEQ ID NO: 2498662 - RNA, 18 nt, Human
cuacccagcgagcccugg

SEQ ID NO: 2498663 - RNA, 15 nt, Human
cuacccauccccgca

SEQ ID NO: 2498664 - RNA, 16 nt, Human
cuaccccaauuccuug

SEQ ID NO: 2498665 - RNA, 13 nt, Human
cuacccauccccg

SEQ ID NO: 2498666 - RNA, 21 nt, Human
cuaccccacaccaggccgucc

SEQ ID NO: 2498667 - RNA, 17 nt, Human
cuaccccacaccaggcc

SEQ ID NO: 2498668 - RNA, 12 nt, Human
cuaccccacacc

SEQ ID NO: 2498669 - RNA, 17 nt, Human
cuaccccaauuccuugu

SEQ ID NO: 2498670 - RNA, 13 nt, Human
cuaccccaccacg

SEQ ID NO: 2498671 - RNA, 14 nt, Human
cuaccccaccacga

SEQ ID NO: 2498672 - RNA, 16 nt, Human
cuacccuuuuucucca

SEQ ID NO: 2498673 - RNA, 18 nt, Human
cuacccugagcugaggca

SEQ ID NO: 2498674 - RNA, 23 nt, Human
cuacccucgggcccaccuggcca

SEQ ID NO: 2498675 - RNA, 12 nt, Human
cuacccugagcu

SEQ ID NO: 2498676 - RNA, 17 nt, Human
cuacccugagcugaggc

SEQ ID NO: 2498677 - RNA, 22 nt, Human
cuacccucgggcccaccuggcc

SEQ ID NO: 2498678 - RNA, 20 nt, Human
cuacccucgggcccaccugg

SEQ ID NO: 2498679 - RNA, 19 nt, Human
cuacccucgggcccaccug

SEQ ID NO: 2498680 - RNA, 17 nt, Human
cuacccucgggcccacc

SEQ ID NO: 2498681 - RNA, 16 nt, Human
cuacccucgggcccac

SEQ ID NO: 2498682 - RNA, 15 nt, Human
cuacccucgggccca

SEQ ID NO: 2498683 - RNA, 23 nt, Human
cuacccucccugcuguccccucu

SEQ ID NO: 2498684 - RNA, 17 nt, Human
cuacccucuuagaaaaa

SEQ ID NO: 2498685 - RNA, 13 nt, Human
cuacccucccacc

SEQ ID NO: 2498686 - RNA, 14 nt, Human
cuacccucccaccc

SEQ ID NO: 2498687 - RNA, 16 nt, Human
cuacccucccaccccc

SEQ ID NO: 2498688 - RNA, 19 nt, Human
cuacccucccacccccuuc

SEQ ID NO: 2498689 - RNA, 20 nt, Human
cuacccucccugcugucccc

SEQ ID NO: 2498690 - RNA, 18 nt, Human
cuacccucccugcugucc

SEQ ID NO: 2498691 - RNA, 16 nt, Human
cuacccucccugcugu

SEQ ID NO: 2498692 - RNA, 15 nt, Human
cuacccucccugcug

SEQ ID NO: 2498693 - RNA, 14 nt, Human
cuacccucccugcu

SEQ ID NO: 2498694 - RNA, 13 nt, Human
cuacccucccugc

SEQ ID NO: 2498695 - RNA, 14 nt, Human
cuacccucccccag

SEQ ID NO: 2498696 - RNA, 19 nt, Human
cuacccccuccucucugcc

SEQ ID NO: 2498697 - RNA, 17 nt, Human
cuacccccuccucucug

SEQ ID NO: 2498698 - RNA, 15 nt, Human
cuacccccuccucuc

SEQ ID NO: 2498699 - RNA, 19 nt, Human
cuacccccaggguugaggg

SEQ ID NO: 2498700 - RNA, 17 nt, Human
cuacccccuaagagcca

SEQ ID NO: 2498701 - RNA, 18 nt, Human
cuacccuagccauuccug

SEQ ID NO: 2498702 - RNA, 12 nt, Human
cuacccucccac

SEQ ID NO: 2498703 - RNA, 19 nt, Human
cuacccuagccauuccugg

SEQ ID NO: 2498704 - RNA, 20 nt, Human
cuacagaggccaugggccuc

SEQ ID NO: 2498705 - RNA, 18 nt, Human
cuacagaggccaugggcc

SEQ ID NO: 2498706 - RNA, 22 nt, Human
cuacagaggccaugggccuccu

SEQ ID NO: 2498707 - RNA, 20 nt, Human
cuacagaggucucugccggc

SEQ ID NO: 2498708 - RNA, 20 nt, Human
cuacacugugaacuugggga

SEQ ID NO: 2498709 - RNA, 16 nt, Human
cuacacugacacuggu

SEQ ID NO: 2498710 - RNA, 15 nt, Human
cuacacugacacugg

SEQ ID NO: 2498711 - RNA, 14 nt, Human
cuacacugugcuga

SEQ ID NO: 2498712 - RNA, 13 nt, Human
cuacacugugcug

SEQ ID NO: 2498713 - RNA, 17 nt, Human
cuacacugugcugaguc

SEQ ID NO: 2498714 - RNA, 17 nt, Human
cuacagaggccaugggc

SEQ ID NO: 2498715 - RNA, 22 nt, Human
cuacagcuugaccgugaggcca

SEQ ID NO: 2498716 - RNA, 19 nt, Human
cuacagcuugaccgugagg

SEQ ID NO: 2498717 - RNA, 18 nt, Human
cuacagcuuugugacugu

SEQ ID NO: 2498718 - RNA, 19 nt, Human
cuacagcuuugaucccuga

SEQ ID NO: 2498719 - RNA, 23 nt, Human
cuacagcuugaccgugaggccag

SEQ ID NO: 2498720 - RNA, 19 nt, Human
cuacagcuaaucagcauuc

SEQ ID NO: 2498721 - RNA, 18 nt, Human
cuacagcuaaucagcauu

SEQ ID NO: 2498722 - RNA, 14 nt, Human
cuacagauagucaa

SEQ ID NO: 2498723 - RNA, 23 nt, Human
cuacagaggucucugccggcucu

SEQ ID NO: 2498724 - RNA, 15 nt, Human
cuacagauagucaaa

SEQ ID NO: 2498725 - RNA, 22 nt, Human
cuacagcuaaucagcauucuca

SEQ ID NO: 2498726 - RNA, 21 nt, Human
cuacagcuaaucagcauucuc

SEQ ID NO: 2498727 - RNA, 16 nt, Human
cuacaggagugagcac

SEQ ID NO: 2498728 - RNA, 15 nt, Human
cuacaggagugagca

SEQ ID NO: 2498729 - RNA, 14 nt, Human
cuacaggagugagc

SEQ ID NO: 2498730 - RNA, 18 nt, Human
cuacaggaagcaccccau

SEQ ID NO: 2498731 - RNA, 20 nt, Human
cuacaggaagcaccccaugc

SEQ ID NO: 2498732 - RNA, 22 nt, Human
cuacaggaagcaccccaugcca

SEQ ID NO: 2498733 - RNA, 22 nt, Human
cuacagcuuugugacuguauau

SEQ ID NO: 2498734 - RNA, 18 nt, Human
cuacaggagagggaagag

SEQ ID NO: 2498735 - RNA, 17 nt, Human
cuacaggcacccaccau

SEQ ID NO: 2498736 - RNA, 15 nt, Human
cuacaggcacccacc

SEQ ID NO: 2498737 - RNA, 22 nt, Human
cuacaggcacacgccaccucgc

SEQ ID NO: 2498738 - RNA, 21 nt, Human
cuacaggagagggaagagugc

SEQ ID NO: 2498739 - RNA, 18 nt, Human
cuacaggggaagguggcc

SEQ ID NO: 2498740 - RNA, 22 nt, Human
cuacaggggaagguggccucug

SEQ ID NO: 2498741 - RNA, 14 nt, Human
cuacagucaggaaa

SEQ ID NO: 2498742 - RNA, 15 nt, Human
cuacagucaggaaag

SEQ ID NO: 2498743 - RNA, 18 nt, Human
cuacagucaggaaaggaa

SEQ ID NO: 2498744 - RNA, 21 nt, Human
cuacagucaggaaaggaauca

SEQ ID NO: 2498745 - RNA, 13 nt, Human
cuacaguccuccc

SEQ ID NO: 2498746 - RNA, 18 nt, Human
cuacauggaguauauguc

SEQ ID NO: 2498747 - RNA, 20 nt, Human
cuacauggaguauaugucaa

SEQ ID NO: 2498748 - RNA, 14 nt, Human
cuacaggugugagu

SEQ ID NO: 2498749 - RNA, 16 nt, Human
cuacaggugugaguca

SEQ ID NO: 2498750 - RNA, 18 nt, Human
cuacagguuacaacagau

SEQ ID NO: 2498751 - RNA, 17 nt, Human
cuacagguuacaacaga

SEQ ID NO: 2498752 - RNA, 14 nt, Human
cuacagguuacaac

SEQ ID NO: 2498753 - RNA, 11 nt, Human
cuacagguuac

SEQ ID NO: 2498754 - RNA, 20 nt, Human
cuacagguuacaacagauuu

SEQ ID NO: 2498755 - RNA, 22 nt, Human
ccugccuguugggccaggagcc

SEQ ID NO: 2498756 - RNA, 14 nt, Human
ccugccuguugggc

SEQ ID NO: 2498757 - RNA, 22 nt, Human
ccugccuguucccauucuugca

SEQ ID NO: 2498758 - RNA, 22 nt, Human
ccugccugucugucucuccauc

SEQ ID NO: 2498759 - RNA, 16 nt, Human
ccugccuguagcccac

SEQ ID NO: 2498760 - RNA, 17 nt, Human
ccugccgcagagcuggc

SEQ ID NO: 2498761 - RNA, 18 nt, Human
ccugccugucugucucuc

SEQ ID NO: 2498762 - RNA, 17 nt, Human
ccugccugucugucucu

SEQ ID NO: 2498763 - RNA, 13 nt, Human
ccugccugucugu

SEQ ID NO: 2498764 - RNA, 13 nt, Human
ccugccugucucc

SEQ ID NO: 2498765 - RNA, 14 nt, Human
ccugccugucuccu

SEQ ID NO: 2498766 - RNA, 12 nt, Human
ccugccugucug

SEQ ID NO: 2498767 - RNA, 15 nt, Human
ccugccugucuccuu

SEQ ID NO: 2498768 - RNA, 16 nt, Human
ccugccgcagagcugg

SEQ ID NO: 2498769 - RNA, 15 nt, Human
ccugccgcagagcug

SEQ ID NO: 2498770 - RNA, 14 nt, Human
ccugccgcagagcu

SEQ ID NO: 2498771 - RNA, 13 nt, Human
ccugccgcagagc

SEQ ID NO: 2498772 - RNA, 12 nt, Human
ccugccucagcc

SEQ ID NO: 2498773 - RNA, 14 nt, Human
ccugccucagccuc

SEQ ID NO: 2498774 - RNA, 13 nt, Human
ccugccucagccu

SEQ ID NO: 2498775 - RNA, 22 nt, Human
ccugcccuuaccugccaggaag

SEQ ID NO: 2498776 - RNA, 21 nt, Human
ccugcccuuaccugccaggaa

SEQ ID NO: 2498777 - RNA, 19 nt, Human
ccugcccuuaccugccagg

SEQ ID NO: 2498778 - RNA, 15 nt, Human
ccugcccugugggcc

SEQ ID NO: 2498779 - RNA, 16 nt, Human
ccugccgacuccuggg

SEQ ID NO: 2498780 - RNA, 14 nt, Human
ccugccgacuccug

SEQ ID NO: 2498781 - RNA, 17 nt, Human
ccugcccuugucugaga

SEQ ID NO: 2498782 - RNA, 16 nt, Human
ccugcccuugucugag

SEQ ID NO: 2498783 - RNA, 18 nt, Human
ccugccgaccucguccuc

SEQ ID NO: 2498784 - RNA, 15 nt, Human
ccugcccuuguccca

SEQ ID NO: 2498785 - RNA, 16 nt, Human
ccugcccuugucccac

SEQ ID NO: 2498786 - RNA, 13 nt, Human
ccugcccuugucu

SEQ ID NO: 2498787 - RNA, 19 nt, Human
ccugcccuugucccacuca

SEQ ID NO: 2498788 - RNA, 21 nt, Human
ccugcccuguuguguauagau

SEQ ID NO: 2498789 - RNA, 19 nt, Human
ccugcccugguuuccugcc

SEQ ID NO: 2498790 - RNA, 20 nt, Human
ccugcccugguuuccugccc

SEQ ID NO: 2498791 - RNA, 21 nt, Human
ccugcccugguuuccugcccu

SEQ ID NO: 2498792 - RNA, 22 nt, Human
ccugcccugguuuccugcccug

SEQ ID NO: 2498793 - RNA, 20 nt, Human
ccugcccugggaggcaguga

SEQ ID NO: 2498794 - RNA, 22 nt, Human
ccugcccugggaggcagugaug

SEQ ID NO: 2498795 - RNA, 14 nt, Human
ccugcccugguuuc

SEQ ID NO: 2498796 - RNA, 20 nt, Human
ccugcccugcugccgccucc

SEQ ID NO: 2498797 - RNA, 12 nt, Human
ccugcccugguc

SEQ ID NO: 2498798 - RNA, 14 nt, Human
ccugcccugugggc

SEQ ID NO: 2498799 - RNA, 12 nt, Human
ccugcccugugg

SEQ ID NO: 2498800 - RNA, 11 nt, Human
ccugcccugug

SEQ ID NO: 2498801 - RNA, 23 nt, Human
ccugcccugguuuccugcccugg

SEQ ID NO: 2498802 - RNA, 15 nt, Human
ccugcccugguccag

SEQ ID NO: 2498803 - RNA, 10 nt, Human
ccugcccugg

SEQ ID NO: 2498804 - RNA, 12 nt, Human
ccugcccuggga

SEQ ID NO: 2498805 - RNA, 14 nt, Human
ccugcccugggagg

SEQ ID NO: 2498806 - RNA, 15 nt, Human
ccugcccugggaggc

SEQ ID NO: 2498807 - RNA, 15 nt, Human
ccugcccugccccca

SEQ ID NO: 2498808 - RNA, 13 nt, Human
ccugcccugccug

SEQ ID NO: 2498809 - RNA, 15 nt, Human
ccugcccugccugag

SEQ ID NO: 2498810 - RNA, 14 nt, Human
ccugcccugccuga

SEQ ID NO: 2498811 - RNA, 13 nt, Human
ccugcccugcugc

SEQ ID NO: 2498812 - RNA, 23 nt, Human
ccugcccucguggccagcccggc

SEQ ID NO: 2498813 - RNA, 22 nt, Human
ccugcccucguggccagcccgg

SEQ ID NO: 2498814 - RNA, 20 nt, Human
ccugcccucguggccagccc

SEQ ID NO: 2498815 - RNA, 19 nt, Human
ccugcccucguggccagcc

SEQ ID NO: 2498816 - RNA, 13 nt, Human
ccugcccugcacg

SEQ ID NO: 2498817 - RNA, 11 nt, Human
ccugcccugca

SEQ ID NO: 2498818 - RNA, 18 nt, Human
ccugcccucguggccagc

SEQ ID NO: 2498819 - RNA, 17 nt, Human
ccugcccucguggccag

SEQ ID NO: 2498820 - RNA, 16 nt, Human
ccugcccucguggcca

SEQ ID NO: 2498821 - RNA, 15 nt, Human
ccugcccucguggcc

SEQ ID NO: 2498822 - RNA, 14 nt, Human
ccugcccucguggc

SEQ ID NO: 2498823 - RNA, 13 nt, Human
ccugcccucgugg

SEQ ID NO: 2498824 - RNA, 12 nt, Human
ccugcccucgug

SEQ ID NO: 2498825 - RNA, 22 nt, Human
ccugcccuccccagagcacugg

SEQ ID NO: 2498826 - RNA, 19 nt, Human
ccugcccuccccagagcac

SEQ ID NO: 2498827 - RNA, 16 nt, Human
ccugcccuccccagag

SEQ ID NO: 2498828 - RNA, 15 nt, Human
ccugcccuccccaga

SEQ ID NO: 2498829 - RNA, 14 nt, Human
ccugcccuccccag

SEQ ID NO: 2498830 - RNA, 21 nt, Human
ccugcccuccccagagcacug

SEQ ID NO: 2498831 - RNA, 20 nt, Human
ccugcccuccccagagcacu

SEQ ID NO: 2498832 - RNA, 13 nt, Human
ccugcccuccccu

SEQ ID NO: 2498833 - RNA, 15 nt, Human
ccugcccguaaacac

SEQ ID NO: 2498834 - RNA, 20 nt, Human
ccugcccguaaacacgccug

SEQ ID NO: 2498835 - RNA, 21 nt, Human
ccugcccguaaacacgccugc

SEQ ID NO: 2498836 - RNA, 22 nt, Human
ccugcccguaaacacgccugca

SEQ ID NO: 2498837 - RNA, 14 nt, Human
ccugccccuguucu

SEQ ID NO: 2498838 - RNA, 10 nt, Human
ccugcccggg

SEQ ID NO: 2498839 - RNA, 16 nt, Human
ccugcccggcugcgga

SEQ ID NO: 2498840 - RNA, 14 nt, Human
ccugcccggcugcg

SEQ ID NO: 2498841 - RNA, 20 nt, Human
ccugcccgucucucucccau

SEQ ID NO: 2498842 - RNA, 19 nt, Human
ccugcccgucucucuccca

SEQ ID NO: 2498843 - RNA, 17 nt, Human
ccugcccgucucucucc

SEQ ID NO: 2498844 - RNA, 13 nt, Human
ccugcccgucucu

SEQ ID NO: 2498845 - RNA, 12 nt, Human
ccugcccgucuc

SEQ ID NO: 2498846 - RNA, 22 nt, Human
ccugcccgggcgcggccagccc

SEQ ID NO: 2498847 - RNA, 23 nt, Human
ccugcccguaaacacgccugcaa

SEQ ID NO: 2498848 - RNA, 22 nt, Human
ccugcccgucucucucccaugg

SEQ ID NO: 2498849 - RNA, 23 nt, Human
ccugcccgucucucucccaugga

SEQ ID NO: 2498850 - RNA, 23 nt, Human
ccugcccuacagaggucucugcc

SEQ ID NO: 2498851 - RNA, 20 nt, Human
ccugcccuacagaggucucu

SEQ ID NO: 2498852 - RNA, 18 nt, Human
ccugcccuagagcacacu

SEQ ID NO: 2498853 - RNA, 23 nt, Human
ccugcccucauggccccucugac

SEQ ID NO: 2498854 - RNA, 21 nt, Human
ccugcccucauggccccucug

SEQ ID NO: 2498855 - RNA, 19 nt, Human
ccugcccucaucucucucc

SEQ ID NO: 2498856 - RNA, 15 nt, Human
ccugcccucagggau

SEQ ID NO: 2498857 - RNA, 14 nt, Human
ccugcccucaggga

SEQ ID NO: 2498858 - RNA, 14 nt, Human
ccugcccuagcucc

SEQ ID NO: 2498859 - RNA, 19 nt, Human
ccugcccuagagcacacug

SEQ ID NO: 2498860 - RNA, 22 nt, Human
ccugcccuagagcacacuguag

SEQ ID NO: 2498861 - RNA, 24 nt, Human
ccugcccuagagcacacuguagca

SEQ ID NO: 2498862 - RNA, 16 nt, Human
ccugcccuagcuccac

SEQ ID NO: 2498863 - RNA, 14 nt, Human
ccugccccucccuu

SEQ ID NO: 2498864 - RNA, 12 nt, Human
ccugcccccuuc

SEQ ID NO: 2498865 - RNA, 13 nt, Human
ccugcccccuucu

SEQ ID NO: 2498866 - RNA, 13 nt, Human
ccugcccccuggu

SEQ ID NO: 2498867 - RNA, 14 nt, Human
ccugcccccuggug

SEQ ID NO: 2498868 - RNA, 15 nt, Human
ccugcccccuggugg

SEQ ID NO: 2498869 - RNA, 16 nt, Human
ccugcccccuggugga

SEQ ID NO: 2498870 - RNA, 18 nt, Human
ccugccccuccucucugc

SEQ ID NO: 2498871 - RNA, 18 nt, Human
ccugccccucccuucaac

SEQ ID NO: 2498872 - RNA, 16 nt, Human
ccugccccucccuuca

SEQ ID NO: 2498873 - RNA, 15 nt, Human
ccugccccucccuuc

SEQ ID NO: 2498874 - RNA, 19 nt, Human
ccugccccuccucucugcc

SEQ ID NO: 2498875 - RNA, 20 nt, Human
ccugccccuccucucugccc

SEQ ID NO: 2498876 - RNA, 21 nt, Human
ccugccccuccucucugcccu

SEQ ID NO: 2498877 - RNA, 22 nt, Human
ccugccccuccucucugcccua

SEQ ID NO: 2498878 - RNA, 17 nt, Human
ccugccccugagcccau

SEQ ID NO: 2498879 - RNA, 16 nt, Human
ccugccccucucccgc

SEQ ID NO: 2498880 - RNA, 15 nt, Human
ccugccccucucccg

SEQ ID NO: 2498881 - RNA, 11 nt, Human
ccugccccugc

SEQ ID NO: 2498882 - RNA, 17 nt, Human
ccugccccugccccguc

SEQ ID NO: 2498883 - RNA, 18 nt, Human
ccugccacucacuaggcc

SEQ ID NO: 2498884 - RNA, 16 nt, Human
ccugccacucacuagg

SEQ ID NO: 2498885 - RNA, 15 nt, Human
ccugccacucacuag

SEQ ID NO: 2498886 - RNA, 13 nt, Human
ccugccacucacu

SEQ ID NO: 2498887 - RNA, 22 nt, Human
ccugccacucacuaggccccca

SEQ ID NO: 2498888 - RNA, 21 nt, Human
ccugccacucacuaggccccc

SEQ ID NO: 2498889 - RNA, 12 nt, Human
ccugccaggcau

SEQ ID NO: 2498890 - RNA, 23 nt, Human
ccugccacucacacagccaggug

SEQ ID NO: 2498891 - RNA, 22 nt, Human
ccugccacucacacagccaggu

SEQ ID NO: 2498892 - RNA, 21 nt, Human
ccugccacucacacagccagg

SEQ ID NO: 2498893 - RNA, 20 nt, Human
ccugccacucacacagccag

SEQ ID NO: 2498894 - RNA, 17 nt, Human
ccugccacucacacagc

SEQ ID NO: 2498895 - RNA, 16 nt, Human
ccugccacucacacag

SEQ ID NO: 2498896 - RNA, 14 nt, Human
ccugccacucacac

SEQ ID NO: 2498897 - RNA, 13 nt, Human
ccugccacucaca

SEQ ID NO: 2498898 - RNA, 12 nt, Human
ccugccacucac

SEQ ID NO: 2498899 - RNA, 16 nt, Human
ccugccaccuggggca

SEQ ID NO: 2498900 - RNA, 13 nt, Human
ccugccaccuggg

SEQ ID NO: 2498901 - RNA, 21 nt, Human
ccugccaguccuagcugcaca

SEQ ID NO: 2498902 - RNA, 20 nt, Human
ccugccaguccuagcugcac

SEQ ID NO: 2498903 - RNA, 19 nt, Human
ccugccaguccuagcugca

SEQ ID NO: 2498904 - RNA, 16 nt, Human
ccugccaguccuagcu

SEQ ID NO: 2498905 - RNA, 15 nt, Human
ccugccaguccuagc

SEQ ID NO: 2498906 - RNA, 14 nt, Human
ccugccaguccuag

SEQ ID NO: 2498907 - RNA, 12 nt, Human
ccugccaguccu

SEQ ID NO: 2498908 - RNA, 20 nt, Human
ccugccagggagacagagcu

SEQ ID NO: 2498909 - RNA, 19 nt, Human
ccugccagggagacagagc

SEQ ID NO: 2498910 - RNA, 17 nt, Human
ccugccagggagacaga

SEQ ID NO: 2498911 - RNA, 13 nt, Human
ccugccagggcag

SEQ ID NO: 2498912 - RNA, 17 nt, Human
ccugccagggcagggcc

SEQ ID NO: 2498913 - RNA, 19 nt, Human
ccugccagggcagggcccc

SEQ ID NO: 2498914 - RNA, 16 nt, Human
ccugccagggagacag

SEQ ID NO: 2498915 - RNA, 22 nt, Human
ccugccaggcaggggugggggu

SEQ ID NO: 2498916 - RNA, 19 nt, Human
ccugccaggcagggguggg

SEQ ID NO: 2498917 - RNA, 15 nt, Human
ccugccaggcagggg

SEQ ID NO: 2498918 - RNA, 22 nt, Human
ccugccagggacagagggggug

SEQ ID NO: 2498919 - RNA, 14 nt, Human
ccugccaggcaggg

SEQ ID NO: 2498920 - RNA, 13 nt, Human
ccugccaggcagg

SEQ ID NO: 2498921 - RNA, 15 nt, Human
ccugccaggcauggu

SEQ ID NO: 2498922 - RNA, 17 nt, Human
ccugccccccagccucu

SEQ ID NO: 2498923 - RNA, 15 nt, Human
ccugccccccagccu

SEQ ID NO: 2498924 - RNA, 14 nt, Human
ccugccccccagcc

SEQ ID NO: 2498925 - RNA, 22 nt, Human
ccugccaguccuagcugcacag

SEQ ID NO: 2498926 - RNA, 13 nt, Human
ccugccagugccu

SEQ ID NO: 2498927 - RNA, 14 nt, Human
ccugccagugccuu

SEQ ID NO: 2498928 - RNA, 17 nt, Human
ccugccagugccuuacc

SEQ ID NO: 2498929 - RNA, 18 nt, Human
ccugccagugccuuaccu

SEQ ID NO: 2498930 - RNA, 20 nt, Human
ccugccagugccuuaccucc

SEQ ID NO: 2498931 - RNA, 21 nt, Human
ccugccagugccuuaccuccu

SEQ ID NO: 2498932 - RNA, 22 nt, Human
ccugccagugccuuaccuccug

SEQ ID NO: 2498933 - RNA, 22 nt, Human
ccugccccccagccucuggcau

SEQ ID NO: 2498934 - RNA, 18 nt, Human
ccugccccccagccucug

SEQ ID NO: 2498935 - RNA, 12 nt, Human
ccugcccccugg

SEQ ID NO: 2498936 - RNA, 18 nt, Human
ccugcccccugaaacuua

SEQ ID NO: 2498937 - RNA, 15 nt, Human
ccugcccccugaaac

SEQ ID NO: 2498938 - RNA, 15 nt, Human
ccugagcugggauga

SEQ ID NO: 2498939 - RNA, 13 nt, Human
ccuaucuuugcca

SEQ ID NO: 2498940 - RNA, 15 nt, Human
ccuaucuuugccacc

SEQ ID NO: 2498941 - RNA, 19 nt, Human
ccuaucuuugccacccuca

SEQ ID NO: 2498942 - RNA, 20 nt, Human
ccuaucuuugccacccucau

SEQ ID NO: 2498943 - RNA, 18 nt, Human
ccuaucuuuuaguuuuag

SEQ ID NO: 2498944 - RNA, 12 nt, Human
ccuaucuuugcc

SEQ ID NO: 2498945 - RNA, 21 nt, Human
ccuagucccuuccccucccug

SEQ ID NO: 2498946 - RNA, 16 nt, Human
ccuagucccuuccccu

SEQ ID NO: 2498947 - RNA, 19 nt, Human
ccuagucccuuccccuccc

SEQ ID NO: 2498948 - RNA, 19 nt, Human
ccuagucccuuccacaccc

SEQ ID NO: 2498949 - RNA, 18 nt, Human
ccuagucccuuccacacc

SEQ ID NO: 2498950 - RNA, 13 nt, Human
ccuagucccuucc

SEQ ID NO: 2498951 - RNA, 14 nt, Human
ccuaguagucauuu

SEQ ID NO: 2498952 - RNA, 14 nt, Human
ccuagucccuuccc

SEQ ID NO: 2498953 - RNA, 15 nt, Human
ccuagucccuucccc

SEQ ID NO: 2498954 - RNA, 16 nt, Human
ccucuucagaggcccu

SEQ ID NO: 2498955 - RNA, 18 nt, Human
ccucuucauggauggggg

SEQ ID NO: 2498956 - RNA, 15 nt, Human
ccucuuccaggcccc

SEQ ID NO: 2498957 - RNA, 12 nt, Human
ccucuuccaguc

SEQ ID NO: 2498958 - RNA, 14 nt, Human
ccucuuccagucuu

SEQ ID NO: 2498959 - RNA, 11 nt, Human
ccucuucccca

SEQ ID NO: 2498960 - RNA, 12 nt, Human
ccucuuccccac

SEQ ID NO: 2498961 - RNA, 13 nt, Human
ccucuucagaggc

SEQ ID NO: 2498962 - RNA, 14 nt, Human
ccucuucagaggcc

SEQ ID NO: 2498963 - RNA, 17 nt, Human
ccuaugauauuuucugu

SEQ ID NO: 2498964 - RNA, 13 nt, Human
ccuaugaucccag

SEQ ID NO: 2498965 - RNA, 14 nt, Human
ccuaugaucccagc

SEQ ID NO: 2498966 - RNA, 15 nt, Human
ccuaugaucccagca

SEQ ID NO: 2498967 - RNA, 16 nt, Human
ccucuucucaagugcc

SEQ ID NO: 2498968 - RNA, 15 nt, Human
ccucuucucaagugc

SEQ ID NO: 2498969 - RNA, 14 nt, Human
ccucuucucaagug

SEQ ID NO: 2498970 - RNA, 18 nt, Human
ccucuucucaagugccuu

SEQ ID NO: 2498971 - RNA, 17 nt, Human
ccucuucucaagugccu

SEQ ID NO: 2498972 - RNA, 18 nt, Human
ccugaaaacacugugcac

SEQ ID NO: 2498973 - RNA, 17 nt, Human
ccucuucuauuuuguaa

SEQ ID NO: 2498974 - RNA, 18 nt, Human
ccucuucuauuuuguaaa

SEQ ID NO: 2498975 - RNA, 15 nt, Human
ccucuuccuuuagga

SEQ ID NO: 2498976 - RNA, 22 nt, Human
ccugaaaaguaacuuggcuuuc

SEQ ID NO: 2498977 - RNA, 19 nt, Human
ccucuucucaagugccuua

SEQ ID NO: 2498978 - RNA, 13 nt, Human
ccugaaaacccag

SEQ ID NO: 2498979 - RNA, 16 nt, Human
ccugaaaacccagaga

SEQ ID NO: 2498980 - RNA, 17 nt, Human
ccugaaaacccagagag

SEQ ID NO: 2498981 - RNA, 15 nt, Human
ccugaaacaacuugg

SEQ ID NO: 2498982 - RNA, 23 nt, Human
ccugaaaauguuuuucugccagg

SEQ ID NO: 2498983 - RNA, 21 nt, Human
ccugaaaauguuuuucugcca

SEQ ID NO: 2498984 - RNA, 22 nt, Human
ccugaaaauguuuuucugccag

SEQ ID NO: 2498985 - RNA, 15 nt, Human
ccucuuccucugagg

SEQ ID NO: 2498986 - RNA, 14 nt, Human
ccucuuccucugag

SEQ ID NO: 2498987 - RNA, 15 nt, Human
ccucuuccccuugcc

SEQ ID NO: 2498988 - RNA, 15 nt, Human
ccucuucccccugcu

SEQ ID NO: 2498989 - RNA, 18 nt, Human
ccucuuccaucauguccc

SEQ ID NO: 2498990 - RNA, 13 nt, Human
ccucuuccccaga

SEQ ID NO: 2498991 - RNA, 14 nt, Human
ccucuuccccagaa

SEQ ID NO: 2498992 - RNA, 22 nt, Human
ccucuuccccagaaaggagacu

SEQ ID NO: 2498993 - RNA, 22 nt, Human
ccucuuccucugaggcuggauc

SEQ ID NO: 2498994 - RNA, 16 nt, Human
ccucuuccuugcugug

SEQ ID NO: 2498995 - RNA, 11 nt, Human
ccucuuccuga

SEQ ID NO: 2498996 - RNA, 21 nt, Human
ccugaaggccccgcccaggcu

SEQ ID NO: 2498997 - RNA, 20 nt, Human
ccugaaggccccgcccaggc

SEQ ID NO: 2498998 - RNA, 20 nt, Human
ccugaaggggccaugauggc

SEQ ID NO: 2498999 - RNA, 14 nt, Human
ccugaaggggcguc

SEQ ID NO: 2499000 - RNA, 16 nt, Human
ccugaaggggcgucug

SEQ ID NO: 2499001 - RNA, 22 nt, Human
ccugaaggggcgucuguucccc

SEQ ID NO: 2499002 - RNA, 22 nt, Human
ccugaaggccccgcccaggcuu

SEQ ID NO: 2499003 - RNA, 19 nt, Human
ccugaaggccccgcccagg

SEQ ID NO: 2499004 - RNA, 18 nt, Human
ccugaaggccccgcccag

SEQ ID NO: 2499005 - RNA, 16 nt, Human
ccugaagccagccuuc

SEQ ID NO: 2499006 - RNA, 15 nt, Human
ccugaagccagccuu

SEQ ID NO: 2499007 - RNA, 14 nt, Human
ccugaagccagccu

SEQ ID NO: 2499008 - RNA, 12 nt, Human
ccugaagccagc

SEQ ID NO: 2499009 - RNA, 18 nt, Human
ccugaagccagccuucuu

SEQ ID NO: 2499010 - RNA, 17 nt, Human
ccugaagccagccuucu

SEQ ID NO: 2499011 - RNA, 21 nt, Human
ccugaagccaggccauggcua

SEQ ID NO: 2499012 - RNA, 14 nt, Human
ccugaaggccccgc

SEQ ID NO: 2499013 - RNA, 13 nt, Human
ccugaaagaggaa

SEQ ID NO: 2499014 - RNA, 22 nt, Human
ccugaaacuuauuuuuuucuga

SEQ ID NO: 2499015 - RNA, 16 nt, Human
ccugaaacuuauuuuu

SEQ ID NO: 2499016 - RNA, 15 nt, Human
ccugaaacuuauuuu

SEQ ID NO: 2499017 - RNA, 18 nt, Human
ccugaaacuuacacacaa

SEQ ID NO: 2499018 - RNA, 13 nt, Human
ccugaaagcccug

SEQ ID NO: 2499019 - RNA, 14 nt, Human
ccugaaagcccuga

SEQ ID NO: 2499020 - RNA, 18 nt, Human
ccugaaagcccugagcuu

SEQ ID NO: 2499021 - RNA, 19 nt, Human
ccugaagagaagggcaggg

SEQ ID NO: 2499022 - RNA, 17 nt, Human
ccugaagaggcgggcca

SEQ ID NO: 2499023 - RNA, 22 nt, Human
ccugaaagaggcugaggccugg

SEQ ID NO: 2499024 - RNA, 21 nt, Human
ccugaagaggcgggccagcca

SEQ ID NO: 2499025 - RNA, 20 nt, Human
ccugaagaggcgggccagcc

SEQ ID NO: 2499026 - RNA, 19 nt, Human
ccugaagaggcgggccagc

SEQ ID NO: 2499027 - RNA, 18 nt, Human
ccugaagaggcgggccag

SEQ ID NO: 2499028 - RNA, 23 nt, Human
ccugaagaggcgggccagccagg

SEQ ID NO: 2499029 - RNA, 22 nt, Human
ccugaagaggcgggccagccag

SEQ ID NO: 2499030 - RNA, 21 nt, Human
ccugaagaguccucugaauga

SEQ ID NO: 2499031 - RNA, 18 nt, Human
ccugagccagauuucacu

SEQ ID NO: 2499032 - RNA, 16 nt, Human
ccugagccagauuuca

SEQ ID NO: 2499033 - RNA, 12 nt, Human
ccugaaucauuc

SEQ ID NO: 2499034 - RNA, 15 nt, Human
ccugagccagauuuc

SEQ ID NO: 2499035 - RNA, 19 nt, Human
ccugaagucacacagugag

SEQ ID NO: 2499036 - RNA, 20 nt, Human
ccugaagucacacagugagu

SEQ ID NO: 2499037 - RNA, 22 nt, Human
ccugaagucuuuguacagacaa

SEQ ID NO: 2499038 - RNA, 17 nt, Human
ccugaaguucaccauua

SEQ ID NO: 2499039 - RNA, 19 nt, Human
ccugaaguaagcaaagacu

SEQ ID NO: 2499040 - RNA, 20 nt, Human
ccugagccccuuccuugcuc

SEQ ID NO: 2499041 - RNA, 23 nt, Human
ccugagccccuuccuugcucugc

SEQ ID NO: 2499042 - RNA, 16 nt, Human
ccugagccccuuccuu

SEQ ID NO: 2499043 - RNA, 15 nt, Human
ccugagccccuuccu

SEQ ID NO: 2499044 - RNA, 14 nt, Human
ccugagccccuucc

SEQ ID NO: 2499045 - RNA, 13 nt, Human
ccugagccccuuc

SEQ ID NO: 2499046 - RNA, 12 nt, Human
ccugagccccuu

SEQ ID NO: 2499047 - RNA, 12 nt, Human
ccugagccuggc

SEQ ID NO: 2499048 - RNA, 13 nt, Human
ccugagccuggcc

SEQ ID NO: 2499049 - RNA, 14 nt, Human
ccugagccuggcca

SEQ ID NO: 2499050 - RNA, 15 nt, Human
ccugagccuggccag

SEQ ID NO: 2499051 - RNA, 16 nt, Human
ccugagccuggccagc

SEQ ID NO: 2499052 - RNA, 13 nt, Human
ccugagcucacuc

SEQ ID NO: 2499053 - RNA, 21 nt, Human
ccugagcuagaagcuggagga

SEQ ID NO: 2499054 - RNA, 18 nt, Human
ccugagcuagaagcugga

SEQ ID NO: 2499055 - RNA, 11 nt, Human
ccugagcuaga

SEQ ID NO: 2499056 - RNA, 23 nt, Human
ccugagcgcuccugccgcagagc

SEQ ID NO: 2499057 - RNA, 21 nt, Human
ccugagcgcuccugccgcaga

SEQ ID NO: 2499058 - RNA, 16 nt, Human
ccugagcgcuccugcc

SEQ ID NO: 2499059 - RNA, 12 nt, Human
ccugagcgcucc

SEQ ID NO: 2499060 - RNA, 18 nt, Human
ccugaggcccagagggcc

SEQ ID NO: 2499061 - RNA, 17 nt, Human
ccugaggcccagagggc

SEQ ID NO: 2499062 - RNA, 16 nt, Human
ccugaggcccagaggg

SEQ ID NO: 2499063 - RNA, 15 nt, Human
ccugaggcccagagg

SEQ ID NO: 2499064 - RNA, 12 nt, Human
ccugagcuggga

SEQ ID NO: 2499065 - RNA, 15 nt, Human
ccugagcugaggcag

SEQ ID NO: 2499066 - RNA, 16 nt, Human
ccugagcugaggcagc

SEQ ID NO: 2499067 - RNA, 14 nt, Human
ccugagcucugaua

SEQ ID NO: 2499068 - RNA, 15 nt, Human
ccugagcuccccacc

SEQ ID NO: 2499069 - RNA, 12 nt, Human
ccugagcucccc

SEQ ID NO: 2499070 - RNA, 15 nt, Human
ccugagcucggugga

SEQ ID NO: 2499071 - RNA, 16 nt, Human
ccugagcucgguggac

SEQ ID NO: 2499072 - RNA, 18 nt, Human
ccugagcucgguggaccc

SEQ ID NO: 2499073 - RNA, 19 nt, Human
ccugagcucgguggaccca

SEQ ID NO: 2499074 - RNA, 20 nt, Human
ccugagcucgguggacccag

SEQ ID NO: 2499075 - RNA, 21 nt, Human
ccugagcucgguggacccagg

SEQ ID NO: 2499076 - RNA, 22 nt, Human
ccugagcucgguggacccaggg

SEQ ID NO: 2499077 - RNA, 14 nt, Human
ccugaggcugggcu

SEQ ID NO: 2499078 - RNA, 13 nt, Human
ccugaggcugggc

SEQ ID NO: 2499079 - RNA, 15 nt, Human
ccugaggcugggcuc

SEQ ID NO: 2499080 - RNA, 17 nt, Human
ccugaggcucagggaaa

SEQ ID NO: 2499081 - RNA, 14 nt, Human
ccugaucaaugaca

SEQ ID NO: 2499082 - RNA, 20 nt, Human
ccugaucaagucaccggagc

SEQ ID NO: 2499083 - RNA, 13 nt, Human
ccugaggcuccac

SEQ ID NO: 2499084 - RNA, 14 nt, Human
ccugaggcuccacu

SEQ ID NO: 2499085 - RNA, 17 nt, Human
ccugaggcuccacuugg

SEQ ID NO: 2499086 - RNA, 18 nt, Human
ccugagcugaggcagcag

SEQ ID NO: 2499087 - RNA, 17 nt, Human
ccugagcugccauccag

SEQ ID NO: 2499088 - RNA, 21 nt, Human
ccugaggcugagacugcggga

SEQ ID NO: 2499089 - RNA, 15 nt, Human
ccugaggcucaggga

SEQ ID NO: 2499090 - RNA, 14 nt, Human
ccugcaccuccccc

SEQ ID NO: 2499091 - RNA, 17 nt, Human
ccugcaccuccccccac

SEQ ID NO: 2499092 - RNA, 18 nt, Human
ccugcaccuccccccacu

SEQ ID NO: 2499093 - RNA, 19 nt, Human
ccugcaccuccccccacug

SEQ ID NO: 2499094 - RNA, 21 nt, Human
ccugcacuggggagcccgucu

SEQ ID NO: 2499095 - RNA, 14 nt, Human
ccugcacuggggag

SEQ ID NO: 2499096 - RNA, 20 nt, Human
ccugcaccuccccccacugc

SEQ ID NO: 2499097 - RNA, 15 nt, Human
ccugcacuggagucc

SEQ ID NO: 2499098 - RNA, 17 nt, Human
ccugcacuggaguccag

SEQ ID NO: 2499099 - RNA, 20 nt, Human
ccugcacuggaguccagucu

SEQ ID NO: 2499100 - RNA, 23 nt, Human
ccugcacuggaguccagucucuu

SEQ ID NO: 2499101 - RNA, 19 nt, Human
ccugcacaauaaaaauguu

SEQ ID NO: 2499102 - RNA, 20 nt, Human
ccugcacaauaaaaauguuu

SEQ ID NO: 2499103 - RNA, 21 nt, Human
ccugcacacgcuccuuccucu

SEQ ID NO: 2499104 - RNA, 23 nt, Human
ccugcacaaagcccuuccauguc

SEQ ID NO: 2499105 - RNA, 15 nt, Human
ccugcaaagcccagc

SEQ ID NO: 2499106 - RNA, 16 nt, Human
ccugcaaagcccagcu

SEQ ID NO: 2499107 - RNA, 14 nt, Human
ccugcaaagcccag

SEQ ID NO: 2499108 - RNA, 17 nt, Human
ccugcaaagcccagcuu

SEQ ID NO: 2499109 - RNA, 18 nt, Human
ccugcaaagcccagcuug

SEQ ID NO: 2499110 - RNA, 20 nt, Human
ccugcacaaagcccuuccau

SEQ ID NO: 2499111 - RNA, 22 nt, Human
ccugcacaaagcccuuccaugu

SEQ ID NO: 2499112 - RNA, 19 nt, Human
ccugauccuggaggcccag

SEQ ID NO: 2499113 - RNA, 20 nt, Human
ccugauccuggaggcccagu

SEQ ID NO: 2499114 - RNA, 22 nt, Human
ccugcaaacucacugcucaaga

SEQ ID NO: 2499115 - RNA, 15 nt, Human
ccugauccugugaag

SEQ ID NO: 2499116 - RNA, 15 nt, Human
ccugauccuggaggc

SEQ ID NO: 2499117 - RNA, 18 nt, Human
ccugauccuggaggccca

SEQ ID NO: 2499118 - RNA, 13 nt, Human
ccugauccuggag

SEQ ID NO: 2499119 - RNA, 17 nt, Human
ccugaucaaugacagag

SEQ ID NO: 2499120 - RNA, 15 nt, Human
ccugaucaaugacag

SEQ ID NO: 2499121 - RNA, 14 nt, Human
ccugaucagaccac

SEQ ID NO: 2499122 - RNA, 18 nt, Human
ccugaucagaccacggcu

SEQ ID NO: 2499123 - RNA, 19 nt, Human
ccugaucagaccacggcuc

SEQ ID NO: 2499124 - RNA, 13 nt, Human
ccugaucagagcc

SEQ ID NO: 2499125 - RNA, 15 nt, Human
ccugauccagccucu

SEQ ID NO: 2499126 - RNA, 14 nt, Human
ccugccaccaguca

SEQ ID NO: 2499127 - RNA, 16 nt, Human
ccugcauuucugaguu

SEQ ID NO: 2499128 - RNA, 19 nt, Human
ccugccaccaggccaccuc

SEQ ID NO: 2499129 - RNA, 18 nt, Human
ccugccaccaggccaccu

SEQ ID NO: 2499130 - RNA, 15 nt, Human
ccugccaccaggcca

SEQ ID NO: 2499131 - RNA, 14 nt, Human
ccugccaccaggcc

SEQ ID NO: 2499132 - RNA, 13 nt, Human
ccugccaccaggc

SEQ ID NO: 2499133 - RNA, 12 nt, Human
ccugccaccagg

SEQ ID NO: 2499134 - RNA, 12 nt, Human
ccugccacagcc

SEQ ID NO: 2499135 - RNA, 19 nt, Human
ccugccaauggacuaacuu

SEQ ID NO: 2499136 - RNA, 15 nt, Human
ccugccaccacgccc

SEQ ID NO: 2499137 - RNA, 19 nt, Human
ccugccaccacgcccggcu

SEQ ID NO: 2499138 - RNA, 23 nt, Human
ccugcacuguccugcuccacagu

SEQ ID NO: 2499139 - RNA, 21 nt, Human
ccugcacuguccugcuccaca

SEQ ID NO: 2499140 - RNA, 20 nt, Human
ccugcacuguccugcuccac

SEQ ID NO: 2499141 - RNA, 19 nt, Human
ccugcacuguccugcucca

SEQ ID NO: 2499142 - RNA, 17 nt, Human
ccugcacuuacuugcuu

SEQ ID NO: 2499143 - RNA, 14 nt, Human
ccugcacuuacuug

SEQ ID NO: 2499144 - RNA, 17 nt, Human
ccugcacuguccugcuc

SEQ ID NO: 2499145 - RNA, 16 nt, Human
ccugcacuguccugcu

SEQ ID NO: 2499146 - RNA, 15 nt, Human
ccugcacuguccugc

SEQ ID NO: 2499147 - RNA, 14 nt, Human
ccugcacuguccug

SEQ ID NO: 2499148 - RNA, 12 nt, Human
ccugcacugucc

SEQ ID NO: 2499149 - RNA, 13 nt, Human
ccugcacuguccu

SEQ ID NO: 2499150 - RNA, 18 nt, Human
ccugcauucuuucuguau

SEQ ID NO: 2499151 - RNA, 14 nt, Human
ccugcauuucugag

SEQ ID NO: 2499152 - RNA, 23 nt, Human
ccugcauuugugaaaugauggug

SEQ ID NO: 2499153 - RNA, 13 nt, Human
ccugccacccugg

SEQ ID NO: 2499154 - RNA, 12 nt, Human
ccugccacccug

SEQ ID NO: 2499155 - RNA, 14 nt, Human
ccugccacccuggg

SEQ ID NO: 2499156 - RNA, 19 nt, Human
ccugccaccagucacuguc

SEQ ID NO: 2499157 - RNA, 22 nt, Human
ccugccacccuggggagaaagu

SEQ ID NO: 2499158 - RNA, 16 nt, Human
ccugccacccugggga

SEQ ID NO: 2499159 - RNA, 16 nt, Human
ccugccaccugcugcu

SEQ ID NO: 2499160 - RNA, 16 nt, Human
ccugccaccucccuga

SEQ ID NO: 2499161 - RNA, 14 nt, Human
ccugccaccucccu

SEQ ID NO: 2499162 - RNA, 13 nt, Human
ccugccaccuccc

SEQ ID NO: 2499163 - RNA, 18 nt, Human
ccuguggauguaaaguga

SEQ ID NO: 2499164 - RNA, 18 nt, Human
ccugguggcagcugcggu

SEQ ID NO: 2499165 - RNA, 17 nt, Human
ccugguggcagcugcgg

SEQ ID NO: 2499166 - RNA, 16 nt, Human
ccugguggcagcugcg

SEQ ID NO: 2499167 - RNA, 15 nt, Human
ccugguggcagcugc

SEQ ID NO: 2499168 - RNA, 21 nt, Human
ccugguggcagcucaccucuc

SEQ ID NO: 2499169 - RNA, 19 nt, Human
ccugguggcagcucaccuc

SEQ ID NO: 2499170 - RNA, 22 nt, Human
ccugguggcagcucaccucucc

SEQ ID NO: 2499171 - RNA, 14 nt, Human
ccugguggcagcug

SEQ ID NO: 2499172 - RNA, 23 nt, Human
ccugguccugaggguccccaccu

SEQ ID NO: 2499173 - RNA, 19 nt, Human
ccugguccuuccaggcccc

SEQ ID NO: 2499174 - RNA, 14 nt, Human
ccuggucucugguc

SEQ ID NO: 2499175 - RNA, 23 nt, Human
ccuggucucagcagcgaccaccc

SEQ ID NO: 2499176 - RNA, 13 nt, Human
ccuggucucuggu

SEQ ID NO: 2499177 - RNA, 20 nt, Human
ccugguccucacacucaccc

SEQ ID NO: 2499178 - RNA, 23 nt, Human
ccuggguucagaaaugcugccug

SEQ ID NO: 2499179 - RNA, 22 nt, Human
ccuggguucagaaaugcugccu

SEQ ID NO: 2499180 - RNA, 14 nt, Human
ccugguccugaggg

SEQ ID NO: 2499181 - RNA, 14 nt, Human
ccuggucccuggga

SEQ ID NO: 2499182 - RNA, 16 nt, Human
ccuggucccugggagg

SEQ ID NO: 2499183 - RNA, 15 nt, Human
ccugguccuuccagg

SEQ ID NO: 2499184 - RNA, 18 nt, Human
ccugguccuuccaggccc

SEQ ID NO: 2499185 - RNA, 19 nt, Human
ccuggguucagaaaugcug

SEQ ID NO: 2499186 - RNA, 21 nt, Human
ccuggguggucugcaggcagg

SEQ ID NO: 2499187 - RNA, 23 nt, Human
ccugggugggugguggggagggg

SEQ ID NO: 2499188 - RNA, 22 nt, Human
ccugggugggugguggggaggg

SEQ ID NO: 2499189 - RNA, 14 nt, Human
ccuggguggucugc

SEQ ID NO: 2499190 - RNA, 18 nt, Human
ccuggguggucugcaggc

SEQ ID NO: 2499191 - RNA, 19 nt, Human
ccuggguggucugcaggca

SEQ ID NO: 2499192 - RNA, 20 nt, Human
ccuggguggucugcaggcag

SEQ ID NO: 2499193 - RNA, 22 nt, Human
ccuggguggucugcaggcaggg

SEQ ID NO: 2499194 - RNA, 21 nt, Human
ccugggugggugguggggagg

SEQ ID NO: 2499195 - RNA, 20 nt, Human
ccugggugggugguggggag

SEQ ID NO: 2499196 - RNA, 19 nt, Human
ccuggguggguggugggga

SEQ ID NO: 2499197 - RNA, 17 nt, Human
ccugggugggugguggg

SEQ ID NO: 2499198 - RNA, 21 nt, Human
ccuggguggggcugcuccucc

SEQ ID NO: 2499199 - RNA, 22 nt, Human
ccuggguggggcugcuccucca

SEQ ID NO: 2499200 - RNA, 13 nt, Human
ccugggugggugg

SEQ ID NO: 2499201 - RNA, 23 nt, Human
ccuggguggggcugcuccuccag

SEQ ID NO: 2499202 - RNA, 20 nt, Human
ccuggguccaaauaaaaacu

SEQ ID NO: 2499203 - RNA, 17 nt, Human
ccuggguggggcugcuc

SEQ ID NO: 2499204 - RNA, 19 nt, Human
ccuggguggggcugcuccu

SEQ ID NO: 2499205 - RNA, 20 nt, Human
ccuggguggggcugcuccuc

SEQ ID NO: 2499206 - RNA, 17 nt, Human
ccuggguccaaauaaaa

SEQ ID NO: 2499207 - RNA, 15 nt, Human
ccuggguccaaauaa

SEQ ID NO: 2499208 - RNA, 21 nt, Human
ccuguagcaucuucuggaguc

SEQ ID NO: 2499209 - RNA, 16 nt, Human
ccuguagccuucugua

SEQ ID NO: 2499210 - RNA, 20 nt, Human
ccuguaguugcguggacucu

SEQ ID NO: 2499211 - RNA, 19 nt, Human
ccuguagccuucuguagga

SEQ ID NO: 2499212 - RNA, 21 nt, Human
ccuguaguugcguggacucug

SEQ ID NO: 2499213 - RNA, 16 nt, Human
ccuguauaaguggagg

SEQ ID NO: 2499214 - RNA, 18 nt, Human
ccuguauaaguggaggca

SEQ ID NO: 2499215 - RNA, 23 nt, Human
ccuguaguugcguggacucugca

SEQ ID NO: 2499216 - RNA, 19 nt, Human
ccuguagcccacucugcuc

SEQ ID NO: 2499217 - RNA, 22 nt, Human
ccuguagcccacucugcucgcc

SEQ ID NO: 2499218 - RNA, 23 nt, Human
ccuguagcccacucugcucgccu

SEQ ID NO: 2499219 - RNA, 24 nt, Human
ccuguagcccacucugcucgccuu

SEQ ID NO: 2499220 - RNA, 13 nt, Human
ccuguagcccuaa

SEQ ID NO: 2499221 - RNA, 15 nt, Human
ccuguagagugggag

SEQ ID NO: 2499222 - RNA, 16 nt, Human
ccuguagagugggagc

SEQ ID NO: 2499223 - RNA, 18 nt, Human
ccuguagcaucuucugga

SEQ ID NO: 2499224 - RNA, 15 nt, Human
ccuguagcaucuucu

SEQ ID NO: 2499225 - RNA, 13 nt, Human
ccuguagcaucuu

SEQ ID NO: 2499226 - RNA, 21 nt, Human
ccuguagcagugagaaaaagc

SEQ ID NO: 2499227 - RNA, 12 nt, Human
ccuguagcccac

SEQ ID NO: 2499228 - RNA, 16 nt, Human
ccuguagcccacucug

SEQ ID NO: 2499229 - RNA, 13 nt, Human
ccuguagcaguga

SEQ ID NO: 2499230 - RNA, 14 nt, Human
ccuguagagcuaga

SEQ ID NO: 2499231 - RNA, 17 nt, Human
ccuguagcacuuacugg

SEQ ID NO: 2499232 - RNA, 22 nt, Human
ccuguagaccuagggaggaccu

SEQ ID NO: 2499233 - RNA, 23 nt, Human
ccuguagaccuagggaggaccuu

SEQ ID NO: 2499234 - RNA, 14 nt, Human
ccugguggcagugg

SEQ ID NO: 2499235 - RNA, 13 nt, Human
ccugguggcagug

SEQ ID NO: 2499236 - RNA, 21 nt, Human
ccuguacaguagauuuuccaa

SEQ ID NO: 2499237 - RNA, 20 nt, Human
ccuguacaguagauuuucca

SEQ ID NO: 2499238 - RNA, 14 nt, Human
ccuguacaguagau

SEQ ID NO: 2499239 - RNA, 21 nt, Human
ccuguacacugaauauuuaua

SEQ ID NO: 2499240 - RNA, 14 nt, Human
ccuggucuguagaa

SEQ ID NO: 2499241 - RNA, 16 nt, Human
ccuggucuuuccucug

SEQ ID NO: 2499242 - RNA, 16 nt, Human
ccuggucuugagaugu

SEQ ID NO: 2499243 - RNA, 16 nt, Human
ccuguacauuguggga

SEQ ID NO: 2499244 - RNA, 22 nt, Human
ccuguacaguagauuuuccaaa

SEQ ID NO: 2499245 - RNA, 10 nt, Human
ccuguaccuc

SEQ ID NO: 2499246 - RNA, 14 nt, Human
ccuguaccccagca

SEQ ID NO: 2499247 - RNA, 17 nt, Human
ccuguaccccagcacuu

SEQ ID NO: 2499248 - RNA, 12 nt, Human
ccuguaccucuu

SEQ ID NO: 2499249 - RNA, 20 nt, Human
ccuguacuguucugugucuu

SEQ ID NO: 2499250 - RNA, 12 nt, Human
ccuguacuuuuu

SEQ ID NO: 2499251 - RNA, 13 nt, Human
ccuguagaccuag

SEQ ID NO: 2499252 - RNA, 18 nt, Human
ccuguagaccuagggagg

SEQ ID NO: 2499253 - RNA, 15 nt, Human
ccugucccucccacc

SEQ ID NO: 2499254 - RNA, 14 nt, Human
ccugucccucccac

SEQ ID NO: 2499255 - RNA, 19 nt, Human
ccugucccccagcucuggu

SEQ ID NO: 2499256 - RNA, 17 nt, Human
ccugucccccagcucug

SEQ ID NO: 2499257 - RNA, 13 nt, Human
ccugucccuccca

SEQ ID NO: 2499258 - RNA, 15 nt, Human
ccugucccccugaca

SEQ ID NO: 2499259 - RNA, 14 nt, Human
ccugucccccugac

SEQ ID NO: 2499260 - RNA, 13 nt, Human
ccugucccccuga

SEQ ID NO: 2499261 - RNA, 16 nt, Human
ccugucccccagcucu

SEQ ID NO: 2499262 - RNA, 15 nt, Human
ccugucccccagcuc

SEQ ID NO: 2499263 - RNA, 14 nt, Human
ccugucccccagcu

SEQ ID NO: 2499264 - RNA, 13 nt, Human
ccugucccccagc

SEQ ID NO: 2499265 - RNA, 12 nt, Human
ccugucccccug

SEQ ID NO: 2499266 - RNA, 18 nt, Human
ccugucccacccccaccc

SEQ ID NO: 2499267 - RNA, 17 nt, Human
ccugucccacccccacc

SEQ ID NO: 2499268 - RNA, 15 nt, Human
ccugucccaccccca

SEQ ID NO: 2499269 - RNA, 16 nt, Human
ccugucccaccucuuc

SEQ ID NO: 2499270 - RNA, 13 nt, Human
ccugucccaccuc

SEQ ID NO: 2499271 - RNA, 23 nt, Human
ccugucccauggacacuccagug

SEQ ID NO: 2499272 - RNA, 19 nt, Human
ccugucccauggacacucc

SEQ ID NO: 2499273 - RNA, 16 nt, Human
ccugucccauggacac

SEQ ID NO: 2499274 - RNA, 14 nt, Human
ccugucccaccucu

SEQ ID NO: 2499275 - RNA, 19 nt, Human
ccugucaugccccccucaa

SEQ ID NO: 2499276 - RNA, 18 nt, Human
ccugucaugccccccuca

SEQ ID NO: 2499277 - RNA, 16 nt, Human
ccugucaugccccccu

SEQ ID NO: 2499278 - RNA, 15 nt, Human
ccugucaugcccccc

SEQ ID NO: 2499279 - RNA, 14 nt, Human
ccugucaugccccc

SEQ ID NO: 2499280 - RNA, 12 nt, Human
ccugucaugccc

SEQ ID NO: 2499281 - RNA, 13 nt, Human
ccugucccacccc

SEQ ID NO: 2499282 - RNA, 11 nt, Human
ccugucccacc

SEQ ID NO: 2499283 - RNA, 22 nt, Human
ccugucauucccaccacccuga

SEQ ID NO: 2499284 - RNA, 21 nt, Human
ccugucaugccccccucaaac

SEQ ID NO: 2499285 - RNA, 14 nt, Human
ccugucagugcagc

SEQ ID NO: 2499286 - RNA, 16 nt, Human
ccugucagugcagccc

SEQ ID NO: 2499287 - RNA, 19 nt, Human
ccugucagugccgccgccu

SEQ ID NO: 2499288 - RNA, 15 nt, Human
ccugucagugccgcc

SEQ ID NO: 2499289 - RNA, 14 nt, Human
ccugucagugccgc

SEQ ID NO: 2499290 - RNA, 13 nt, Human
ccugucagugccg

SEQ ID NO: 2499291 - RNA, 12 nt, Human
ccugucagugcc

SEQ ID NO: 2499292 - RNA, 19 nt, Human
ccugucagugcagcccgug

SEQ ID NO: 2499293 - RNA, 22 nt, Human
ccuguauaaguggaggcacuuu

SEQ ID NO: 2499294 - RNA, 23 nt, Human
ccuguauaaguggaggcacuuua

SEQ ID NO: 2499295 - RNA, 21 nt, Human
ccuguauauagcccagccagg

SEQ ID NO: 2499296 - RNA, 16 nt, Human
ccuguauauagcccag

SEQ ID NO: 2499297 - RNA, 22 nt, Human
ccuguauaguuaggauagcauu

SEQ ID NO: 2499298 - RNA, 12 nt, Human
ccuguauaguua

SEQ ID NO: 2499299 - RNA, 13 nt, Human
ccuguauauagcc

SEQ ID NO: 2499300 - RNA, 19 nt, Human
ccuguaugcaacaggcacu

SEQ ID NO: 2499301 - RNA, 14 nt, Human
ccugucaccaagcu

SEQ ID NO: 2499302 - RNA, 23 nt, Human
ccuguauauagcccagccaggcc

SEQ ID NO: 2499303 - RNA, 14 nt, Human
ccuggcaugggaau

SEQ ID NO: 2499304 - RNA, 13 nt, Human
ccuggccacgccc

SEQ ID NO: 2499305 - RNA, 17 nt, Human
ccuggccaucccacaag

SEQ ID NO: 2499306 - RNA, 19 nt, Human
ccuggccaucccacaagug

SEQ ID NO: 2499307 - RNA, 21 nt, Human
ccuggcccacagcaggugcug

SEQ ID NO: 2499308 - RNA, 15 nt, Human
ccuggccagccuaca

SEQ ID NO: 2499309 - RNA, 13 nt, Human
ccuggccaggagc

SEQ ID NO: 2499310 - RNA, 13 nt, Human
ccuggcccacugc

SEQ ID NO: 2499311 - RNA, 14 nt, Human
ccuggcccacugca

SEQ ID NO: 2499312 - RNA, 16 nt, Human
ccuggccaccugaggu

SEQ ID NO: 2499313 - RNA, 13 nt, Human
ccuggccaccuga

SEQ ID NO: 2499314 - RNA, 12 nt, Human
ccuggccaccug

SEQ ID NO: 2499315 - RNA, 18 nt, Human
ccuggccaccucucuccu

SEQ ID NO: 2499316 - RNA, 18 nt, Human
ccuggccaccugaggugg

SEQ ID NO: 2499317 - RNA, 17 nt, Human
ccuggccaccugaggug

SEQ ID NO: 2499318 - RNA, 20 nt, Human
ccuggccagaugcaccagcc

SEQ ID NO: 2499319 - RNA, 23 nt, Human
ccuggccagaugcaccagcccuu

SEQ ID NO: 2499320 - RNA, 21 nt, Human
ccuggccagaugcaccagccc

SEQ ID NO: 2499321 - RNA, 16 nt, Human
ccuggcacugcuucca

SEQ ID NO: 2499322 - RNA, 13 nt, Human
ccuggcacugcuu

SEQ ID NO: 2499323 - RNA, 17 nt, Human
ccuggcacugcugugcu

SEQ ID NO: 2499324 - RNA, 15 nt, Human
ccuggcacugcugug

SEQ ID NO: 2499325 - RNA, 11 nt, Human
ccuggagaagc

SEQ ID NO: 2499326 - RNA, 22 nt, Human
ccuggcaggaugacccugcgaa

SEQ ID NO: 2499327 - RNA, 21 nt, Human
ccuggcaggcugucuggccag

SEQ ID NO: 2499328 - RNA, 23 nt, Human
ccuggcaucgcaccauucugacu

SEQ ID NO: 2499329 - RNA, 21 nt, Human
ccuggcaucgcaccauucuga

SEQ ID NO: 2499330 - RNA, 20 nt, Human
ccuggcagguuagaaccuag

SEQ ID NO: 2499331 - RNA, 19 nt, Human
ccuggcagguuagaaccua

SEQ ID NO: 2499332 - RNA, 21 nt, Human
ccuggcagguuagaaccuaga

SEQ ID NO: 2499333 - RNA, 13 nt, Human
ccuggcaugggaa

SEQ ID NO: 2499334 - RNA, 19 nt, Human
ccuggcauuauguccacug

SEQ ID NO: 2499335 - RNA, 23 nt, Human
ccuggcaugggaaugaaugucag

SEQ ID NO: 2499336 - RNA, 15 nt, Human
ccuggccaccucucu

SEQ ID NO: 2499337 - RNA, 14 nt, Human
ccuggccaccucuc

SEQ ID NO: 2499338 - RNA, 13 nt, Human
ccuggccaccucu

SEQ ID NO: 2499339 - RNA, 21 nt, Human
ccuggccaccaccccccacuc

SEQ ID NO: 2499340 - RNA, 17 nt, Human
ccuggccaccacccccc

SEQ ID NO: 2499341 - RNA, 15 nt, Human
ccuggccaccacccc

SEQ ID NO: 2499342 - RNA, 22 nt, Human
ccuggcacuauaauguaagcuc

SEQ ID NO: 2499343 - RNA, 18 nt, Human
ccuggcacccggccccug

SEQ ID NO: 2499344 - RNA, 12 nt, Human
ccuggcacugcu

SEQ ID NO: 2499345 - RNA, 21 nt, Human
ccuggcacccggccccugcug

SEQ ID NO: 2499346 - RNA, 20 nt, Human
ccuggcacccggccccugcu

SEQ ID NO: 2499347 - RNA, 19 nt, Human
ccuggacuuuccugcaacu

SEQ ID NO: 2499348 - RNA, 17 nt, Human
ccuggacuuuccugcaa

SEQ ID NO: 2499349 - RNA, 16 nt, Human
ccuggacuuuccugca

SEQ ID NO: 2499350 - RNA, 15 nt, Human
ccuggacuuuccugc

SEQ ID NO: 2499351 - RNA, 13 nt, Human
ccuggagaacuag

SEQ ID NO: 2499352 - RNA, 12 nt, Human
ccuggagaacua

SEQ ID NO: 2499353 - RNA, 17 nt, Human
ccuggagaagcugaugc

SEQ ID NO: 2499354 - RNA, 23 nt, Human
ccuggagaacuagaaccuggagg

SEQ ID NO: 2499355 - RNA, 16 nt, Human
ccuggagaacuagaga

SEQ ID NO: 2499356 - RNA, 19 nt, Human
ccuggcacccggccccugc

SEQ ID NO: 2499357 - RNA, 17 nt, Human
ccugcuaauuccccaga

SEQ ID NO: 2499358 - RNA, 20 nt, Human
ccugcuacaacuucagcagu

SEQ ID NO: 2499359 - RNA, 19 nt, Human
ccugcuacaacuucagcag

SEQ ID NO: 2499360 - RNA, 23 nt, Human
ccugccuguggcgccgucuccag

SEQ ID NO: 2499361 - RNA, 16 nt, Human
ccugcuacucuguucc

SEQ ID NO: 2499362 - RNA, 13 nt, Human
ccugcuacucugu

SEQ ID NO: 2499363 - RNA, 14 nt, Human
ccuggacuuuccug

SEQ ID NO: 2499364 - RNA, 13 nt, Human
ccuggacuuuccu

SEQ ID NO: 2499365 - RNA, 18 nt, Human
ccugcuagacacauuuuu

SEQ ID NO: 2499366 - RNA, 19 nt, Human
ccugccuguugggccagga

SEQ ID NO: 2499367 - RNA, 18 nt, Human
ccugccuguugggccagg

SEQ ID NO: 2499368 - RNA, 20 nt, Human
ccugccuguugggccaggag

SEQ ID NO: 2499369 - RNA, 21 nt, Human
ccugcuaauuccccagauugc

SEQ ID NO: 2499370 - RNA, 14 nt, Human
ccugggaauguauu

SEQ ID NO: 2499371 - RNA, 17 nt, Human
ccugggaaauauucccu

SEQ ID NO: 2499372 - RNA, 18 nt, Human
ccugggaaauauucccua

SEQ ID NO: 2499373 - RNA, 12 nt, Human
ccugggaagggg

SEQ ID NO: 2499374 - RNA, 16 nt, Human
ccuggcuuuucacugc

SEQ ID NO: 2499375 - RNA, 17 nt, Human
ccuggcuuuucacugcu

SEQ ID NO: 2499376 - RNA, 18 nt, Human
ccuggcuuguaacuccac

SEQ ID NO: 2499377 - RNA, 20 nt, Human
ccuggcuuguaacuccacca

SEQ ID NO: 2499378 - RNA, 22 nt, Human
ccuggcuuguaacuccaccaac

SEQ ID NO: 2499379 - RNA, 20 nt, Human
ccuggcuucuggagcccuug

SEQ ID NO: 2499380 - RNA, 21 nt, Human
ccuggcuucuggagcccuugg

SEQ ID NO: 2499381 - RNA, 22 nt, Human
ccuggcuucuggagcccuuggg

SEQ ID NO: 2499382 - RNA, 23 nt, Human
ccuggcuucuggagcccuugggu

SEQ ID NO: 2499383 - RNA, 21 nt, Human
ccuggcuccguccaggagccu

SEQ ID NO: 2499384 - RNA, 18 nt, Human
ccuggcuccuacccaccg

SEQ ID NO: 2499385 - RNA, 15 nt, Human
ccuggcuccugaggg

SEQ ID NO: 2499386 - RNA, 23 nt, Human
ccuggcuccugaggggcaucugc

SEQ ID NO: 2499387 - RNA, 21 nt, Human
ccuggcucccaugaccauacu

SEQ ID NO: 2499388 - RNA, 14 nt, Human
ccuggcucccauga

SEQ ID NO: 2499389 - RNA, 15 nt, Human
ccuggcucccaugac

SEQ ID NO: 2499390 - RNA, 22 nt, Human
ccuggcucccaugaccauacug

SEQ ID NO: 2499391 - RNA, 20 nt, Human
ccuggcccaucaguguaccc

SEQ ID NO: 2499392 - RNA, 18 nt, Human
ccuggcccaucaguguac

SEQ ID NO: 2499393 - RNA, 17 nt, Human
ccuggcccaucagugua

SEQ ID NO: 2499394 - RNA, 12 nt, Human
ccuggccccagg

SEQ ID NO: 2499395 - RNA, 13 nt, Human
ccuggccccagga

SEQ ID NO: 2499396 - RNA, 12 nt, Human
ccuggccccaug

SEQ ID NO: 2499397 - RNA, 16 nt, Human
ccuggcccagcucccc

SEQ ID NO: 2499398 - RNA, 20 nt, Human
ccuggcccagcucccccggg

SEQ ID NO: 2499399 - RNA, 15 nt, Human
ccuggcccagcuccc

SEQ ID NO: 2499400 - RNA, 14 nt, Human
ccuggcccagcucc

SEQ ID NO: 2499401 - RNA, 13 nt, Human
ccuggcccagcuc

SEQ ID NO: 2499402 - RNA, 12 nt, Human
ccuggcccagcu

SEQ ID NO: 2499403 - RNA, 21 nt, Human
ccuggcccagcggccccuccc

SEQ ID NO: 2499404 - RNA, 20 nt, Human
ccuggcccagcggccccucc

SEQ ID NO: 2499405 - RNA, 15 nt, Human
ccuggcccagcggcc

SEQ ID NO: 2499406 - RNA, 16 nt, Human
ccuggcccacugcauc

SEQ ID NO: 2499407 - RNA, 15 nt, Human
ccugggcagaaggaa

SEQ ID NO: 2499408 - RNA, 18 nt, Human
ccugggagugagcugguu

SEQ ID NO: 2499409 - RNA, 16 nt, Human
ccugggcagaaggaag

SEQ ID NO: 2499410 - RNA, 23 nt, Human
ccugggagguggagguugcagug

SEQ ID NO: 2499411 - RNA, 17 nt, Human
ccugggcagccaggcug

SEQ ID NO: 2499412 - RNA, 18 nt, Human
ccugggcagccaggcugc

SEQ ID NO: 2499413 - RNA, 19 nt, Human
ccugggcagccaggcugcc

SEQ ID NO: 2499414 - RNA, 16 nt, Human
ccugggagugagcugg

SEQ ID NO: 2499415 - RNA, 22 nt, Human
ccugggaggucaaggcugcagu

SEQ ID NO: 2499416 - RNA, 19 nt, Human
ccugggaggaaauuugaau

SEQ ID NO: 2499417 - RNA, 18 nt, Human
ccugggagaaccucaggc

SEQ ID NO: 2499418 - RNA, 19 nt, Human
ccugggagaaccucaggcu

SEQ ID NO: 2499419 - RNA, 19 nt, Human
ccugggaccuccccugagg

SEQ ID NO: 2499420 - RNA, 17 nt, Human
ccugggaccuccccuga

SEQ ID NO: 2499421 - RNA, 17 nt, Human
ccugggagaaccucagg

SEQ ID NO: 2499422 - RNA, 20 nt, Human
ccugggaccuccccugaggc

SEQ ID NO: 2499423 - RNA, 17 nt, Human
ccugggacugcugcuuc

SEQ ID NO: 2499424 - RNA, 19 nt, Human
ccugggggcugggcagagg

SEQ ID NO: 2499425 - RNA, 21 nt, Human
ccugggggcugggcagaggaa

SEQ ID NO: 2499426 - RNA, 20 nt, Human
ccugggggcugggcagagga

SEQ ID NO: 2499427 - RNA, 14 nt, Human
ccuggggucuggag

SEQ ID NO: 2499428 - RNA, 22 nt, Human
ccugggguauaaaacuuuccuc

SEQ ID NO: 2499429 - RNA, 23 nt, Human
ccugggaguuuuguauucaucuu

SEQ ID NO: 2499430 - RNA, 18 nt, Human
ccugggggcugggcagag

SEQ ID NO: 2499431 - RNA, 21 nt, Human
ccugggguauaaaacuuuccu

SEQ ID NO: 2499432 - RNA, 23 nt, Human
ccugggcagccaggcugccaagg

SEQ ID NO: 2499433 - RNA, 22 nt, Human
ccugggucagucuggugggagg

SEQ ID NO: 2499434 - RNA, 21 nt, Human
ccugggucagucuggugggag

SEQ ID NO: 2499435 - RNA, 19 nt, Human
ccugggucagucugguggg

SEQ ID NO: 2499436 - RNA, 15 nt, Human
ccugggucagucugg

SEQ ID NO: 2499437 - RNA, 14 nt, Human
ccugggucagucug

SEQ ID NO: 2499438 - RNA, 22 nt, Human
ccuggguaaaugcagcgugaag

SEQ ID NO: 2499439 - RNA, 20 nt, Human
ccuggguaaaugcagcguga

SEQ ID NO: 2499440 - RNA, 15 nt, Human
ccuggggugggguca

SEQ ID NO: 2499441 - RNA, 20 nt, Human
ccuggggugugggaggcccg

SEQ ID NO: 2499442 - RNA, 21 nt, Human
ccugggguggggauagggagc

SEQ ID NO: 2499443 - RNA, 18 nt, Human
cgcccacaggaagccugc

SEQ ID NO: 2499444 - RNA, 16 nt, Human
cgcacgcacacacaca

SEQ ID NO: 2499445 - RNA, 15 nt, Human
cgcacgcacacacac

SEQ ID NO: 2499446 - RNA, 14 nt, Human
cgcacgcacacaca

SEQ ID NO: 2499447 - RNA, 13 nt, Human
cgcacgcacacac

SEQ ID NO: 2499448 - RNA, 16 nt, Human
cgcaccugccucagga

SEQ ID NO: 2499449 - RNA, 11 nt, Human
cgcacgcacac

SEQ ID NO: 2499450 - RNA, 18 nt, Human
cgcaccucccauccuaau

SEQ ID NO: 2499451 - RNA, 14 nt, Human
cgcaccugccucag

SEQ ID NO: 2499452 - RNA, 15 nt, Human
cgcaccugccucagg

SEQ ID NO: 2499453 - RNA, 16 nt, Human
cgcaccugcccccugg

SEQ ID NO: 2499454 - RNA, 17 nt, Human
cgcaccugcccccuggu

SEQ ID NO: 2499455 - RNA, 13 nt, Human
cgcacugggcuug

SEQ ID NO: 2499456 - RNA, 17 nt, Human
cgcacuccaugagcacc

SEQ ID NO: 2499457 - RNA, 16 nt, Human
cgcacuccaugagcac

SEQ ID NO: 2499458 - RNA, 18 nt, Human
cgcacucacccaugugcc

SEQ ID NO: 2499459 - RNA, 22 nt, Human
cgcacuacaugugguuuauaga

SEQ ID NO: 2499460 - RNA, 18 nt, Human
cgcacgugggucuucagg

SEQ ID NO: 2499461 - RNA, 14 nt, Human
cgaugcuccagcca

SEQ ID NO: 2499462 - RNA, 21 nt, Human
cgaugcugcuuuccccugugg

SEQ ID NO: 2499463 - RNA, 20 nt, Human
cgaugcugcuuuccccugug

SEQ ID NO: 2499464 - RNA, 18 nt, Human
cgaugcugcuuuccccug

SEQ ID NO: 2499465 - RNA, 12 nt, Human
cgaugcugcuuu

SEQ ID NO: 2499466 - RNA, 18 nt, Human
cgaugcuccagccaaccc

SEQ ID NO: 2499467 - RNA, 20 nt, Human
cgaugcuccagccaaccccu

SEQ ID NO: 2499468 - RNA, 22 nt, Human
cgaugcuccagccaaccccugu

SEQ ID NO: 2499469 - RNA, 23 nt, Human
cgaugcuccagccaaccccugug

SEQ ID NO: 2499470 - RNA, 19 nt, Human
cgcaccuaccaucagggac

SEQ ID NO: 2499471 - RNA, 12 nt, Human
cgcaccucccau

SEQ ID NO: 2499472 - RNA, 16 nt, Human
cgcaccucccauccua

SEQ ID NO: 2499473 - RNA, 16 nt, Human
cgcaccuaccaucagg

SEQ ID NO: 2499474 - RNA, 22 nt, Human
cgaugcugcuuuccccuguggg

SEQ ID NO: 2499475 - RNA, 18 nt, Human
cgauggauauauguuuuu

SEQ ID NO: 2499476 - RNA, 18 nt, Human
cgauggcuuugccagcuu

SEQ ID NO: 2499477 - RNA, 21 nt, Human
cgaugggcccaauucuuacaa

SEQ ID NO: 2499478 - RNA, 17 nt, Human
cgcagcccugcagaggg

SEQ ID NO: 2499479 - RNA, 15 nt, Human
cgcagcccugcagag

SEQ ID NO: 2499480 - RNA, 20 nt, Human
cgcagcauauucaggaagcu

SEQ ID NO: 2499481 - RNA, 19 nt, Human
cgcagcauauucaggaagc

SEQ ID NO: 2499482 - RNA, 17 nt, Human
cgcagcaggaggccagg

SEQ ID NO: 2499483 - RNA, 18 nt, Human
cgcagcaggaggccaggc

SEQ ID NO: 2499484 - RNA, 16 nt, Human
cgcagcaggaggccag

SEQ ID NO: 2499485 - RNA, 14 nt, Human
cgcagagcuggccg

SEQ ID NO: 2499486 - RNA, 22 nt, Human
cgcacugugacccccagcuccg

SEQ ID NO: 2499487 - RNA, 14 nt, Human
cgcagaugauccau

SEQ ID NO: 2499488 - RNA, 17 nt, Human
cgcacugggcuugggga

SEQ ID NO: 2499489 - RNA, 23 nt, Human
cgcacuucgggaggucgaggcag

SEQ ID NO: 2499490 - RNA, 17 nt, Human
cgcacugugacccccag

SEQ ID NO: 2499491 - RNA, 14 nt, Human
cgagagggagagag

SEQ ID NO: 2499492 - RNA, 13 nt, Human
cgagagggagaga

SEQ ID NO: 2499493 - RNA, 15 nt, Human
cgagaggcagagaaa

SEQ ID NO: 2499494 - RNA, 14 nt, Human
cgagaggcagagaa

SEQ ID NO: 2499495 - RNA, 15 nt, Human
cgagaggaggggccc

SEQ ID NO: 2499496 - RNA, 14 nt, Human
cgagaggaggggcc

SEQ ID NO: 2499497 - RNA, 21 nt, Human
cgagagccugcucccccaccc

SEQ ID NO: 2499498 - RNA, 19 nt, Human
cgagcccugguggcagugg

SEQ ID NO: 2499499 - RNA, 21 nt, Human
cgagagagcaccccucucugc

SEQ ID NO: 2499500 - RNA, 21 nt, Human
cgagagacuuguggccuggga

SEQ ID NO: 2499501 - RNA, 13 nt, Human
cgagagccugcuc

SEQ ID NO: 2499502 - RNA, 14 nt, Human
cgagagccugcucc

SEQ ID NO: 2499503 - RNA, 15 nt, Human
cgagagccugcuccc

SEQ ID NO: 2499504 - RNA, 19 nt, Human
cgagagccugcucccccac

SEQ ID NO: 2499505 - RNA, 20 nt, Human
cgagagccugcucccccacc

SEQ ID NO: 2499506 - RNA, 23 nt, Human
cgagccucugucacugcaggcac

SEQ ID NO: 2499507 - RNA, 20 nt, Human
cgagccucugucacugcagg

SEQ ID NO: 2499508 - RNA, 19 nt, Human
cgagccucugucacugcag

SEQ ID NO: 2499509 - RNA, 22 nt, Human
cgagccggggaguuucuuuccu

SEQ ID NO: 2499510 - RNA, 18 nt, Human
cgagccggggaguuucuu

SEQ ID NO: 2499511 - RNA, 17 nt, Human
cgagccgggccuggggc

SEQ ID NO: 2499512 - RNA, 15 nt, Human
cgagccgggccuggg

SEQ ID NO: 2499513 - RNA, 14 nt, Human
cgagccgggccugg

SEQ ID NO: 2499514 - RNA, 23 nt, Human
cgagcccuguggaugagcccuca

SEQ ID NO: 2499515 - RNA, 16 nt, Human
cgagagggagagagag

SEQ ID NO: 2499516 - RNA, 18 nt, Human
cgagcccugguggcagug

SEQ ID NO: 2499517 - RNA, 13 nt, Human
cgagccuggcucc

SEQ ID NO: 2499518 - RNA, 14 nt, Human
cgaggacagggagg

SEQ ID NO: 2499519 - RNA, 12 nt, Human
cgaggcagagga

SEQ ID NO: 2499520 - RNA, 15 nt, Human
cgaggcagaggacag

SEQ ID NO: 2499521 - RNA, 13 nt, Human
cgaggcagaggac

SEQ ID NO: 2499522 - RNA, 14 nt, Human
cgaggcagggucag

SEQ ID NO: 2499523 - RNA, 19 nt, Human
cgaggccaguaccuuucca

SEQ ID NO: 2499524 - RNA, 11 nt, Human
cgaggccagua

SEQ ID NO: 2499525 - RNA, 22 nt, Human
cgaggcagggucaggagagggg

SEQ ID NO: 2499526 - RNA, 21 nt, Human
cgaggcccucgggcccagccc

SEQ ID NO: 2499527 - RNA, 17 nt, Human
cgaggccuaccccgcag

SEQ ID NO: 2499528 - RNA, 20 nt, Human
cgaggcccucgggcccagcc

SEQ ID NO: 2499529 - RNA, 19 nt, Human
cgaggcccucgggcccagc

SEQ ID NO: 2499530 - RNA, 13 nt, Human
cgaggcccgcaug

SEQ ID NO: 2499531 - RNA, 23 nt, Human
cgaggccuaccccgcagacaccu

SEQ ID NO: 2499532 - RNA, 23 nt, Human
cgaugaauuuggagacucugugg

SEQ ID NO: 2499533 - RNA, 15 nt, Human
cgaugcaaugaacac

SEQ ID NO: 2499534 - RNA, 14 nt, Human
cgaggacccagacc

SEQ ID NO: 2499535 - RNA, 13 nt, Human
cgaggacccagac

SEQ ID NO: 2499536 - RNA, 12 nt, Human
cgaggacccaga

SEQ ID NO: 2499537 - RNA, 21 nt, Human
cgaggacaugaaacuccaccu

SEQ ID NO: 2499538 - RNA, 20 nt, Human
cgaggacccagacccagugg

SEQ ID NO: 2499539 - RNA, 17 nt, Human
cgaggacccagacccag

SEQ ID NO: 2499540 - RNA, 18 nt, Human
cgaggacuguauuuguga

SEQ ID NO: 2499541 - RNA, 16 nt, Human
cgaggacagggaggug

SEQ ID NO: 2499542 - RNA, 21 nt, Human
cgaggacuguauuugugacua

SEQ ID NO: 2499543 - RNA, 20 nt, Human
cgaggacuguauuugugacu

SEQ ID NO: 2499544 - RNA, 19 nt, Human
cgaggacuguauuugugac

SEQ ID NO: 2499545 - RNA, 19 nt, Human
cgaggaggcuccagagggc

SEQ ID NO: 2499546 - RNA, 20 nt, Human
cgaggaggcuccagagggca

SEQ ID NO: 2499547 - RNA, 17 nt, Human
cgaggagguaaugaauu

SEQ ID NO: 2499548 - RNA, 17 nt, Human
cgcuuaaaggugucuuc

SEQ ID NO: 2499549 - RNA, 14 nt, Human
cgcuguucacccac

SEQ ID NO: 2499550 - RNA, 13 nt, Human
cgcuucccccaua

SEQ ID NO: 2499551 - RNA, 16 nt, Human
cgcuucccccauagcc

SEQ ID NO: 2499552 - RNA, 17 nt, Human
cgcuguugcugaauagg

SEQ ID NO: 2499553 - RNA, 14 nt, Human
cgcuguugcugaau

SEQ ID NO: 2499554 - RNA, 13 nt, Human
cgcuguugcugaa

SEQ ID NO: 2499555 - RNA, 20 nt, Human
cgcuguguguuaguucccaa

SEQ ID NO: 2499556 - RNA, 14 nt, Human
cgcugugggcaggu

SEQ ID NO: 2499557 - RNA, 20 nt, Human
cgcuuccggcuccugugcuu

SEQ ID NO: 2499558 - RNA, 17 nt, Human
cgcuuccggcuccugug

SEQ ID NO: 2499559 - RNA, 18 nt, Human
cgcuucccccauagccac

SEQ ID NO: 2499560 - RNA, 20 nt, Human
cgcuucccccauagccaccc

SEQ ID NO: 2499561 - RNA, 14 nt, Human
cgcuucugccugca

SEQ ID NO: 2499562 - RNA, 15 nt, Human
cgcuucuugccucug

SEQ ID NO: 2499563 - RNA, 12 nt, Human
cgcuucugacug

SEQ ID NO: 2499564 - RNA, 23 nt, Human
cgcugugcugcccugcccaccug

SEQ ID NO: 2499565 - RNA, 21 nt, Human
cgcugugcugcccugcccacc

SEQ ID NO: 2499566 - RNA, 19 nt, Human
cgcugugcugcccugccca

SEQ ID NO: 2499567 - RNA, 19 nt, Human
cgcugugagccccuggucc

SEQ ID NO: 2499568 - RNA, 16 nt, Human
cgcugugagccccugg

SEQ ID NO: 2499569 - RNA, 20 nt, Human
cgcugucuccagacccccac

SEQ ID NO: 2499570 - RNA, 22 nt, Human
cgcugucuccagacccccaccc

SEQ ID NO: 2499571 - RNA, 14 nt, Human
cgcugugcugcccu

SEQ ID NO: 2499572 - RNA, 13 nt, Human
cgcugugcugccc

SEQ ID NO: 2499573 - RNA, 11 nt, Human
cgcugugcugc

SEQ ID NO: 2499574 - RNA, 16 nt, Human
cgcugucuccagaccc

SEQ ID NO: 2499575 - RNA, 14 nt, Human
cgcuccugucugcc

SEQ ID NO: 2499576 - RNA, 18 nt, Human
cgcuccccgccuguuccc

SEQ ID NO: 2499577 - RNA, 17 nt, Human
cgcuccccgccuguucc

SEQ ID NO: 2499578 - RNA, 16 nt, Human
cgcuccccgccuguuc

SEQ ID NO: 2499579 - RNA, 14 nt, Human
cgcuccccgccugu

SEQ ID NO: 2499580 - RNA, 22 nt, Human
cgcucccagugucuuccugugg

SEQ ID NO: 2499581 - RNA, 21 nt, Human
cgcucccagugucuuccugug

SEQ ID NO: 2499582 - RNA, 14 nt, Human
cgcucccagugucu

SEQ ID NO: 2499583 - RNA, 20 nt, Human
cgcuccugccgcagagcugg

SEQ ID NO: 2499584 - RNA, 19 nt, Human
cgcuccugccgcagagcug

SEQ ID NO: 2499585 - RNA, 22 nt, Human
cgcuccucccucugaggcugua

SEQ ID NO: 2499586 - RNA, 18 nt, Human
cgcuccugccgcagagcu

SEQ ID NO: 2499587 - RNA, 19 nt, Human
cgcuccccgccuguucccc

SEQ ID NO: 2499588 - RNA, 22 nt, Human
cgcuugugcagaaaacauuguu

SEQ ID NO: 2499589 - RNA, 17 nt, Human
cgcuucuugccucugug

SEQ ID NO: 2499590 - RNA, 16 nt, Human
cgcuucuugccucugu

SEQ ID NO: 2499591 - RNA, 14 nt, Human
cgcuuucuacccag

SEQ ID NO: 2499592 - RNA, 16 nt, Human
cgcuuucuacccagcg

SEQ ID NO: 2499593 - RNA, 22 nt, Human
cgcuuucuagcuguugagcugu

SEQ ID NO: 2499594 - RNA, 16 nt, Human
cgcuuucuagcuguug

SEQ ID NO: 2499595 - RNA, 14 nt, Human
cgcuuuccugaauc

SEQ ID NO: 2499596 - RNA, 20 nt, Human
cgcuugugcagaaaacauug

SEQ ID NO: 2499597 - RNA, 17 nt, Human
cgcuucugaaugcugcu

SEQ ID NO: 2499598 - RNA, 17 nt, Human
cggaauaguuggcuagg

SEQ ID NO: 2499599 - RNA, 16 nt, Human
cggaauaguuggcuag

SEQ ID NO: 2499600 - RNA, 21 nt, Human
cggaaucacucuguccuugga

SEQ ID NO: 2499601 - RNA, 20 nt, Human
cggacagccacggccaggcc

SEQ ID NO: 2499602 - RNA, 22 nt, Human
cgcuuucuggaaaagaggaguu

SEQ ID NO: 2499603 - RNA, 13 nt, Human
cgcuuucuaugua

SEQ ID NO: 2499604 - RNA, 15 nt, Human
cggaauccuguccuc

SEQ ID NO: 2499605 - RNA, 14 nt, Human
cggagugaagaggg

SEQ ID NO: 2499606 - RNA, 23 nt, Human
cggagucguggggugugcuggga

SEQ ID NO: 2499607 - RNA, 22 nt, Human
cggagucguggggugugcuggg

SEQ ID NO: 2499608 - RNA, 16 nt, Human
cggacuuuucugcaaa

SEQ ID NO: 2499609 - RNA, 17 nt, Human
cggagaaaggaagggcu

SEQ ID NO: 2499610 - RNA, 15 nt, Human
cggagaaaggaaggg

SEQ ID NO: 2499611 - RNA, 15 nt, Human
cggacuuuucugcaa

SEQ ID NO: 2499612 - RNA, 14 nt, Human
cggacuuuucugca

SEQ ID NO: 2499613 - RNA, 17 nt, Human
cggacuuagcugggaga

SEQ ID NO: 2499614 - RNA, 22 nt, Human
cggacagccacggccaggccag

SEQ ID NO: 2499615 - RNA, 21 nt, Human
cggacagccacggccaggcca

SEQ ID NO: 2499616 - RNA, 16 nt, Human
cggacuuagcugggag

SEQ ID NO: 2499617 - RNA, 17 nt, Human
cggaauccuguccucag

SEQ ID NO: 2499618 - RNA, 18 nt, Human
cgcaggaacucccagcaa

SEQ ID NO: 2499619 - RNA, 17 nt, Human
cgcaggaacucccagca

SEQ ID NO: 2499620 - RNA, 15 nt, Human
cgcaggaacucccag

SEQ ID NO: 2499621 - RNA, 20 nt, Human
cgcagcucuugcccuucccu

SEQ ID NO: 2499622 - RNA, 23 nt, Human
cgcagcucuugcccuucccuguc

SEQ ID NO: 2499623 - RNA, 19 nt, Human
cgcagcucuugcccuuccc

SEQ ID NO: 2499624 - RNA, 18 nt, Human
cgcagcucuugcccuucc

SEQ ID NO: 2499625 - RNA, 17 nt, Human
cgcagcucuugcccuuc

SEQ ID NO: 2499626 - RNA, 13 nt, Human
cgcagcucuugcc

SEQ ID NO: 2499627 - RNA, 16 nt, Human
cgcagccucccucuga

SEQ ID NO: 2499628 - RNA, 19 nt, Human
cgccauugcacuccagccu

SEQ ID NO: 2499629 - RNA, 18 nt, Human
cgccauugccaccaggag

SEQ ID NO: 2499630 - RNA, 16 nt, Human
cgccauugccaccagg

SEQ ID NO: 2499631 - RNA, 17 nt, Human
cgccauugccaccagga

SEQ ID NO: 2499632 - RNA, 20 nt, Human
cgccauggcuuccaaggugg

SEQ ID NO: 2499633 - RNA, 15 nt, Human
cgccauugcacucca

SEQ ID NO: 2499634 - RNA, 14 nt, Human
cgccauugccacca

SEQ ID NO: 2499635 - RNA, 18 nt, Human
cgccauucucaagcccug

SEQ ID NO: 2499636 - RNA, 12 nt, Human
cgcaggaagcug

SEQ ID NO: 2499637 - RNA, 19 nt, Human
cgcagcccugcagagggca

SEQ ID NO: 2499638 - RNA, 18 nt, Human
cgcagcccugcagagggc

SEQ ID NO: 2499639 - RNA, 24 nt, Human
cgcagcccugcuuugggcugcccu

SEQ ID NO: 2499640 - RNA, 15 nt, Human
cgcagcccugcuuug

SEQ ID NO: 2499641 - RNA, 13 nt, Human
cgcagcccugcuu

SEQ ID NO: 2499642 - RNA, 13 nt, Human
cgcagccaaggcc

SEQ ID NO: 2499643 - RNA, 12 nt, Human
cgcagccaaggc

SEQ ID NO: 2499644 - RNA, 23 nt, Human
cgcccgcugggcugagccccuac

SEQ ID NO: 2499645 - RNA, 16 nt, Human
cgcccgcugggcugag

SEQ ID NO: 2499646 - RNA, 14 nt, Human
cgcccgcugggcug

SEQ ID NO: 2499647 - RNA, 13 nt, Human
cgcccgcugggcu

SEQ ID NO: 2499648 - RNA, 18 nt, Human
cgcccggcuaauuuuugu

SEQ ID NO: 2499649 - RNA, 12 nt, Human
cgcccgcgcccu

SEQ ID NO: 2499650 - RNA, 13 nt, Human
cgcccgcgcccgc

SEQ ID NO: 2499651 - RNA, 21 nt, Human
cgcccgcccacuguccugggc

SEQ ID NO: 2499652 - RNA, 19 nt, Human
cgcccgcccacuguccugg

SEQ ID NO: 2499653 - RNA, 18 nt, Human
cgcccgcccacuguccug

SEQ ID NO: 2499654 - RNA, 16 nt, Human
cgcccgcccacugucc

SEQ ID NO: 2499655 - RNA, 14 nt, Human
cgcccgcccacugu

SEQ ID NO: 2499656 - RNA, 13 nt, Human
cgccccuuccccc

SEQ ID NO: 2499657 - RNA, 21 nt, Human
cgcccagucuggaaugcagug

SEQ ID NO: 2499658 - RNA, 19 nt, Human
cgcccagucuggaaugcag

SEQ ID NO: 2499659 - RNA, 13 nt, Human
cgcccagucugga

SEQ ID NO: 2499660 - RNA, 16 nt, Human
cgcccaacccuucccc

SEQ ID NO: 2499661 - RNA, 15 nt, Human
cgcccaacccuuccc

SEQ ID NO: 2499662 - RNA, 14 nt, Human
cgcccaacccuucc

SEQ ID NO: 2499663 - RNA, 17 nt, Human
cgcccaaagccagacag

SEQ ID NO: 2499664 - RNA, 18 nt, Human
cgcccaacuaauuuuugu

SEQ ID NO: 2499665 - RNA, 12 nt, Human
cgcccaaggccc

SEQ ID NO: 2499666 - RNA, 15 nt, Human
cgcccguccugccug

SEQ ID NO: 2499667 - RNA, 21 nt, Human
cgccuucucccccccggggcu

SEQ ID NO: 2499668 - RNA, 13 nt, Human
cgccuucuccccc

SEQ ID NO: 2499669 - RNA, 14 nt, Human
cgcccguccugccu

SEQ ID NO: 2499670 - RNA, 12 nt, Human
cgcccguccugc

SEQ ID NO: 2499671 - RNA, 14 nt, Human
cgcgacaaugcaaa

SEQ ID NO: 2499672 - RNA, 19 nt, Human
cgccuucucccccccgggg

SEQ ID NO: 2499673 - RNA, 14 nt, Human
cgccuuucccaacu

SEQ ID NO: 2499674 - RNA, 12 nt, Human
cgccuuguucuu

SEQ ID NO: 2499675 - RNA, 13 nt, Human
cgccuuucccagg

SEQ ID NO: 2499676 - RNA, 15 nt, Human
cgcgacaaugcaaac

SEQ ID NO: 2499677 - RNA, 23 nt, Human
cgcgggagccaugcgcccccucc

SEQ ID NO: 2499678 - RNA, 19 nt, Human
cgcgguggcucacgccugu

SEQ ID NO: 2499679 - RNA, 24 nt, Human
cgcuacccgggaagggggcuggga

SEQ ID NO: 2499680 - RNA, 21 nt, Human
cgcuacccgggaagggggcug

SEQ ID NO: 2499681 - RNA, 17 nt, Human
cgcuacccgggaagggg

SEQ ID NO: 2499682 - RNA, 22 nt, Human
cgcuaaagagcccuugccuccc

SEQ ID NO: 2499683 - RNA, 18 nt, Human
cgcuacccgggaaggggg

SEQ ID NO: 2499684 - RNA, 21 nt, Human
cgcuaaagagcccuugccucc

SEQ ID NO: 2499685 - RNA, 19 nt, Human
cgcuaaagagcccuugccu

SEQ ID NO: 2499686 - RNA, 15 nt, Human
cgcuaaagagcccuu

SEQ ID NO: 2499687 - RNA, 17 nt, Human
cgcguuguaaaauauag

SEQ ID NO: 2499688 - RNA, 16 nt, Human
cgcguuguaaaauaua

SEQ ID NO: 2499689 - RNA, 22 nt, Human
cgcgaaaguaucaccagggugc

SEQ ID NO: 2499690 - RNA, 15 nt, Human
cgcggggacauuggg

SEQ ID NO: 2499691 - RNA, 16 nt, Human
cggcuucaugccagcu

SEQ ID NO: 2499692 - RNA, 15 nt, Human
cggcuucaugccagc

SEQ ID NO: 2499693 - RNA, 23 nt, Human
cggcuuagacuucgacucaggau

SEQ ID NO: 2499694 - RNA, 20 nt, Human
cggccucucuggccucccac

SEQ ID NO: 2499695 - RNA, 13 nt, Human
cggcuggccuggc

SEQ ID NO: 2499696 - RNA, 23 nt, Human
cggcuggcagcccaccccucaac

SEQ ID NO: 2499697 - RNA, 14 nt, Human
cgggaagagaggag

SEQ ID NO: 2499698 - RNA, 12 nt, Human
cgggaagagagg

SEQ ID NO: 2499699 - RNA, 20 nt, Human
cgggaaccucacucuugcca

SEQ ID NO: 2499700 - RNA, 14 nt, Human
cgggaaccucacuc

SEQ ID NO: 2499701 - RNA, 20 nt, Human
cgggaacaguguuucccaua

SEQ ID NO: 2499702 - RNA, 22 nt, Human
cgggaaagccagugacuccagg

SEQ ID NO: 2499703 - RNA, 13 nt, Human
cgggaacaguguu

SEQ ID NO: 2499704 - RNA, 22 nt, Human
cgggaacaguguuucccauaau

SEQ ID NO: 2499705 - RNA, 19 nt, Human
cggcuucaugccagcuacu

SEQ ID NO: 2499706 - RNA, 16 nt, Human
cggcuuuucucagcug

SEQ ID NO: 2499707 - RNA, 23 nt, Human
cgggaaaagcagcccuuggccag

SEQ ID NO: 2499708 - RNA, 22 nt, Human
cgggaaaagcagcccuuggcca

SEQ ID NO: 2499709 - RNA, 20 nt, Human
cgggaaagccagugacucca

SEQ ID NO: 2499710 - RNA, 14 nt, Human
cgggaaagaagagc

SEQ ID NO: 2499711 - RNA, 15 nt, Human
cgggaacagacaaca

SEQ ID NO: 2499712 - RNA, 20 nt, Human
cgggaaggucaccagcacca

SEQ ID NO: 2499713 - RNA, 15 nt, Human
cgggacaccugcccu

SEQ ID NO: 2499714 - RNA, 17 nt, Human
cgggaaggucaccagca

SEQ ID NO: 2499715 - RNA, 20 nt, Human
cgggaauuuucaucuaggau

SEQ ID NO: 2499716 - RNA, 18 nt, Human
cgggaauuuucaucuagg

SEQ ID NO: 2499717 - RNA, 12 nt, Human
cgggaaggaggg

SEQ ID NO: 2499718 - RNA, 14 nt, Human
cgggaaggaggguu

SEQ ID NO: 2499719 - RNA, 16 nt, Human
cgggaaggucaccagc

SEQ ID NO: 2499720 - RNA, 23 nt, Human
cgggaagcaucuuccagaagugu

SEQ ID NO: 2499721 - RNA, 23 nt, Human
cgggaaggaggguuagggagggg

SEQ ID NO: 2499722 - RNA, 20 nt, Human
cgggaagggggcugggacau

SEQ ID NO: 2499723 - RNA, 19 nt, Human
cgggaagggggcugggaca

SEQ ID NO: 2499724 - RNA, 16 nt, Human
cgggaagggggcuggg

SEQ ID NO: 2499725 - RNA, 22 nt, Human
cgggaagagaggaguucaauga

SEQ ID NO: 2499726 - RNA, 20 nt, Human
cgggaagagaggaguucaau

SEQ ID NO: 2499727 - RNA, 19 nt, Human
cgggaagagaggaguucaa

SEQ ID NO: 2499728 - RNA, 18 nt, Human
cgggaagagaggaguuca

SEQ ID NO: 2499729 - RNA, 24 nt, Human
cgggaagagaggaguucaaugauc

SEQ ID NO: 2499730 - RNA, 23 nt, Human
cgggaagagaggaguucaaugau

SEQ ID NO: 2499731 - RNA, 12 nt, Human
cgggaagcggag

SEQ ID NO: 2499732 - RNA, 20 nt, Human
cggccaggccagagggagug

SEQ ID NO: 2499733 - RNA, 12 nt, Human
cggccaggccag

SEQ ID NO: 2499734 - RNA, 14 nt, Human
cggcccuaugcaug

SEQ ID NO: 2499735 - RNA, 20 nt, Human
cggcccuaccagcgcccgcu

SEQ ID NO: 2499736 - RNA, 21 nt, Human
cggcccuaccagcgcccgcug

SEQ ID NO: 2499737 - RNA, 18 nt, Human
cggcccuaccagcgcccg

SEQ ID NO: 2499738 - RNA, 22 nt, Human
cggccagccccuggccccagga

SEQ ID NO: 2499739 - RNA, 22 nt, Human
cggccagccccggcccugggcu

SEQ ID NO: 2499740 - RNA, 11 nt, Human
cggccaggcca

SEQ ID NO: 2499741 - RNA, 22 nt, Human
cggagugaagaggggcagcccu

SEQ ID NO: 2499742 - RNA, 20 nt, Human
cggagugaagaggggcagcc

SEQ ID NO: 2499743 - RNA, 19 nt, Human
cggagugaagaggggcagc

SEQ ID NO: 2499744 - RNA, 18 nt, Human
cggagugaagaggggcag

SEQ ID NO: 2499745 - RNA, 23 nt, Human
cggagugaagaggggcagcccuu

SEQ ID NO: 2499746 - RNA, 19 nt, Human
cggagugagaagcuuugcc

SEQ ID NO: 2499747 - RNA, 13 nt, Human
cggaguugggggu

SEQ ID NO: 2499748 - RNA, 18 nt, Human
cggaucaccgagaguagc

SEQ ID NO: 2499749 - RNA, 23 nt, Human
cggaucaccgagaguagccgaga

SEQ ID NO: 2499750 - RNA, 19 nt, Human
cggccucucuggccuccca

SEQ ID NO: 2499751 - RNA, 18 nt, Human
cggccucucuggccuccc

SEQ ID NO: 2499752 - RNA, 16 nt, Human
cggccucucuggccuc

SEQ ID NO: 2499753 - RNA, 15 nt, Human
cggccucucuggccu

SEQ ID NO: 2499754 - RNA, 14 nt, Human
cggccucucuggcc

SEQ ID NO: 2499755 - RNA, 13 nt, Human
cggccucucuggc

SEQ ID NO: 2499756 - RNA, 22 nt, Human
cggccucuaaccccaggccccg

SEQ ID NO: 2499757 - RNA, 21 nt, Human
cggccucuaaccccaggcccc

SEQ ID NO: 2499758 - RNA, 20 nt, Human
cggccucuaaccccaggccc

SEQ ID NO: 2499759 - RNA, 19 nt, Human
cggccucuaaccccaggcc

SEQ ID NO: 2499760 - RNA, 18 nt, Human
cggccucuaaccccaggc

SEQ ID NO: 2499761 - RNA, 17 nt, Human
cggccucuaaccccagg

SEQ ID NO: 2499762 - RNA, 15 nt, Human
cggccucuaacccca

SEQ ID NO: 2499763 - RNA, 13 nt, Human
cggccucuaaccc

SEQ ID NO: 2499764 - RNA, 14 nt, Human
cggcuggcagccca

SEQ ID NO: 2499765 - RNA, 21 nt, Human
cggccucucuggccucccacc

SEQ ID NO: 2499766 - RNA, 15 nt, Human
cggccugaugcuccc

SEQ ID NO: 2499767 - RNA, 16 nt, Human
cggccugaugcucccu

SEQ ID NO: 2499768 - RNA, 22 nt, Human
cggccuccguccaggagccugg

SEQ ID NO: 2499769 - RNA, 21 nt, Human
cggccuccguccaggagccug

SEQ ID NO: 2499770 - RNA, 15 nt, Human
cggccucccaaagug

SEQ ID NO: 2499771 - RNA, 12 nt, Human
cggccgcuccag

SEQ ID NO: 2499772 - RNA, 16 nt, Human
cggccgcauucccuga

SEQ ID NO: 2499773 - RNA, 13 nt, Human
cggccgcauuccc

SEQ ID NO: 2499774 - RNA, 15 nt, Human
cggccgcauucccug

SEQ ID NO: 2499775 - RNA, 18 nt, Human
cggccgcauucccugagu

SEQ ID NO: 2499776 - RNA, 22 nt, Human
cggcccugggcucggaggcugc

SEQ ID NO: 2499777 - RNA, 11 nt, Human
cggcccugggg

SEQ ID NO: 2499778 - RNA, 12 nt, Human
cggcccuggggc

SEQ ID NO: 2499779 - RNA, 18 nt, Human
cggcccugggcucggagg

SEQ ID NO: 2499780 - RNA, 13 nt, Human
cggcccugggcuc

SEQ ID NO: 2499781 - RNA, 22 nt, Human
cggcccuccuacccugcgccca

SEQ ID NO: 2499782 - RNA, 23 nt, Human
cggcccuccuacccugcgcccag

SEQ ID NO: 2499783 - RNA, 20 nt, Human
cggcccuccuacccugcgcc

SEQ ID NO: 2499784 - RNA, 23 nt, Human
ccuuugugaggaagccgcugggg

SEQ ID NO: 2499785 - RNA, 17 nt, Human
ccuuugugaggaagccg

SEQ ID NO: 2499786 - RNA, 16 nt, Human
ccuuugugaggaagcc

SEQ ID NO: 2499787 - RNA, 15 nt, Human
ccuuugugaggaagc

SEQ ID NO: 2499788 - RNA, 23 nt, Human
ccuuuguccccaccgcagacagg

SEQ ID NO: 2499789 - RNA, 22 nt, Human
ccuuuguccccaccgcagacag

SEQ ID NO: 2499790 - RNA, 14 nt, Human
ccuuugugaggaag

SEQ ID NO: 2499791 - RNA, 14 nt, Human
ccuuugucuuguca

SEQ ID NO: 2499792 - RNA, 23 nt, Human
ccuuugucaucuuucuucuauuu

SEQ ID NO: 2499793 - RNA, 13 nt, Human
ccuuuuuugauca

SEQ ID NO: 2499794 - RNA, 12 nt, Human
ccuuuuuugauc

SEQ ID NO: 2499795 - RNA, 15 nt, Human
ccuuuuuuggcugcu

SEQ ID NO: 2499796 - RNA, 22 nt, Human
ccuuuuuucacggaaguuuuca

SEQ ID NO: 2499797 - RNA, 22 nt, Human
ccuuuuuuauuuuuuuaagcug

SEQ ID NO: 2499798 - RNA, 20 nt, Human
ccuuuguuuuuaugaagaaa

SEQ ID NO: 2499799 - RNA, 19 nt, Human
ccuuuuuuauacauaaaca

SEQ ID NO: 2499800 - RNA, 18 nt, Human
ccuuuuaacaccugaugu

SEQ ID NO: 2499801 - RNA, 13 nt, Human
ccuuugugcugug

SEQ ID NO: 2499802 - RNA, 12 nt, Human
ccuuugugcugu

SEQ ID NO: 2499803 - RNA, 13 nt, Human
ccuuuguguuucu

SEQ ID NO: 2499804 - RNA, 23 nt, Human
ccuuuguuuugauguuuguggcc

SEQ ID NO: 2499805 - RNA, 19 nt, Human
ccuuuguuuuuaugaagaa

SEQ ID NO: 2499806 - RNA, 19 nt, Human
ccuuuguuuuuuuuuccug

SEQ ID NO: 2499807 - RNA, 22 nt, Human
ccuuuguauucucuccuguacc

SEQ ID NO: 2499808 - RNA, 23 nt, Human
ccuuuguauucucuccuguaccu

SEQ ID NO: 2499809 - RNA, 24 nt, Human
ccuuuguauucucuccuguaccuc

SEQ ID NO: 2499810 - RNA, 16 nt, Human
ccuuugguuuuuuucu

SEQ ID NO: 2499811 - RNA, 18 nt, Human
ccuuuguccccaccgcag

SEQ ID NO: 2499812 - RNA, 16 nt, Human
ccuuuguccccaccgc

SEQ ID NO: 2499813 - RNA, 14 nt, Human
ccuuuguccccacc

SEQ ID NO: 2499814 - RNA, 14 nt, Human
ccuuugucccagaa

SEQ ID NO: 2499815 - RNA, 23 nt, Human
ccuuugucaucauuguauauaug

SEQ ID NO: 2499816 - RNA, 19 nt, Human
ccuuugucaucauuguaua

SEQ ID NO: 2499817 - RNA, 18 nt, Human
ccuuugucaucuuucuuc

SEQ ID NO: 2499818 - RNA, 17 nt, Human
ccuuugggcccagggac

SEQ ID NO: 2499819 - RNA, 16 nt, Human
ccuuugggcccaggga

SEQ ID NO: 2499820 - RNA, 14 nt, Human
ccuuugggcccagg

SEQ ID NO: 2499821 - RNA, 14 nt, Human
ccuuugggaagggg

SEQ ID NO: 2499822 - RNA, 19 nt, Human
ccuuugggaggcugaggcg

SEQ ID NO: 2499823 - RNA, 15 nt, Human
ccuuugguucuggcc

SEQ ID NO: 2499824 - RNA, 20 nt, Human
ccuuugguucuggccagaau

SEQ ID NO: 2499825 - RNA, 21 nt, Human
ccuuuguaaauugucagaugc

SEQ ID NO: 2499826 - RNA, 14 nt, Human
ccuuugguucuggc

SEQ ID NO: 2499827 - RNA, 18 nt, Human
ccuuuggggggggcccgc

SEQ ID NO: 2499828 - RNA, 16 nt, Human
ccuugugccuggcuca

SEQ ID NO: 2499829 - RNA, 11 nt, Human
ccuugugccug

SEQ ID NO: 2499830 - RNA, 23 nt, Human
ccuugugauguggcaauaaauuu

SEQ ID NO: 2499831 - RNA, 22 nt, Human
ccuuguggccugggccuccuca

SEQ ID NO: 2499832 - RNA, 17 nt, Human
ccuugggcccuuugagu

SEQ ID NO: 2499833 - RNA, 16 nt, Human
ccuuguggccugggcc

SEQ ID NO: 2499834 - RNA, 17 nt, Human
ccuugugccuggcucag

SEQ ID NO: 2499835 - RNA, 18 nt, Human
ccuugugccuggcucaga

SEQ ID NO: 2499836 - RNA, 13 nt, Human
ccuugucugagau

SEQ ID NO: 2499837 - RNA, 16 nt, Human
ccuuguauuuaaauau

SEQ ID NO: 2499838 - RNA, 21 nt, Human
ccuuguauuuaaauauuaaau

SEQ ID NO: 2499839 - RNA, 21 nt, Human
ccuugucguugacuuuaggga

SEQ ID NO: 2499840 - RNA, 22 nt, Human
ccuuuuuuggcugcugaaggcu

SEQ ID NO: 2499841 - RNA, 20 nt, Human
ccuuuuuuggcugcugaagg

SEQ ID NO: 2499842 - RNA, 18 nt, Human
ccuuuuuuggcugcugaa

SEQ ID NO: 2499843 - RNA, 17 nt, Human
ccuuuuuuggcugcuga

SEQ ID NO: 2499844 - RNA, 20 nt, Human
cgaaauaacaauguuaagga

SEQ ID NO: 2499845 - RNA, 17 nt, Human
cgaaauaacaauguuaa

SEQ ID NO: 2499846 - RNA, 16 nt, Human
cgaaauaacaauguua

SEQ ID NO: 2499847 - RNA, 11 nt, Human
cgaaauaacaa

SEQ ID NO: 2499848 - RNA, 20 nt, Human
ccuuuuuuggcuuuagacac

SEQ ID NO: 2499849 - RNA, 23 nt, Human
ccuuuuuugauaaaguuucucag

SEQ ID NO: 2499850 - RNA, 23 nt, Human
cgaaagggacuuggaagcuccgc

SEQ ID NO: 2499851 - RNA, 21 nt, Human
cgaacauguuuuucuucuccc

SEQ ID NO: 2499852 - RNA, 23 nt, Human
cgaacauguuuuucuucucccuc

SEQ ID NO: 2499853 - RNA, 22 nt, Human
cgaaauguuauuuuuuaauuau

SEQ ID NO: 2499854 - RNA, 14 nt, Human
cgaaauguuauuuu

SEQ ID NO: 2499855 - RNA, 13 nt, Human
cgaaauguuauuu

SEQ ID NO: 2499856 - RNA, 19 nt, Human
cgaacauccaaccuuccca

SEQ ID NO: 2499857 - RNA, 22 nt, Human
cgaacacccucgaagcgcgcca

SEQ ID NO: 2499858 - RNA, 18 nt, Human
cgaacacccucgaagcgc

SEQ ID NO: 2499859 - RNA, 21 nt, Human
cgaacacccucgaagcgcgcc

SEQ ID NO: 2499860 - RNA, 11 nt, Human
cgaagcgcgcc

SEQ ID NO: 2499861 - RNA, 14 nt, Human
cgaagcccaggccc

SEQ ID NO: 2499862 - RNA, 16 nt, Human
cgaagcgcgccacucg

SEQ ID NO: 2499863 - RNA, 20 nt, Human
cgaacauggaacucauuccu

SEQ ID NO: 2499864 - RNA, 22 nt, Human
cgaacauggaacucauuccugc

SEQ ID NO: 2499865 - RNA, 15 nt, Human
cgaauagcugggacu

SEQ ID NO: 2499866 - RNA, 13 nt, Human
cgaaggggcccug

SEQ ID NO: 2499867 - RNA, 13 nt, Human
cgaaggugcugga

SEQ ID NO: 2499868 - RNA, 16 nt, Human
cgaaggugcuggaggu

SEQ ID NO: 2499869 - RNA, 18 nt, Human
cgaagcuuugaaggccga

SEQ ID NO: 2499870 - RNA, 20 nt, Human
cgaagcucuggcugaacccu

SEQ ID NO: 2499871 - RNA, 23 nt, Human
cgaaggcagugcaagagacucug

SEQ ID NO: 2499872 - RNA, 15 nt, Human
cgaagcucuggcuga

SEQ ID NO: 2499873 - RNA, 14 nt, Human
cgaagcucuggcug

SEQ ID NO: 2499874 - RNA, 12 nt, Human
cgaagcucuggc

SEQ ID NO: 2499875 - RNA, 18 nt, Human
cgaagcucagcccacccc

SEQ ID NO: 2499876 - RNA, 13 nt, Human
cgaagcucagccc

SEQ ID NO: 2499877 - RNA, 23 nt, Human
cgaagcgcgccacucgcuucccc

SEQ ID NO: 2499878 - RNA, 15 nt, Human
cgaagcucagcccac

SEQ ID NO: 2499879 - RNA, 16 nt, Human
cgaagcucagcccacc

SEQ ID NO: 2499880 - RNA, 17 nt, Human
cgaagcucagcccaccc

SEQ ID NO: 2499881 - RNA, 14 nt, Human
cgaauauugcugau

SEQ ID NO: 2499882 - RNA, 12 nt, Human
cgaauauugcug

SEQ ID NO: 2499883 - RNA, 11 nt, Human
cgaauauugcu

SEQ ID NO: 2499884 - RNA, 16 nt, Human
cgaauagcugggacua

SEQ ID NO: 2499885 - RNA, 17 nt, Human
cgaauauugcugauggu

SEQ ID NO: 2499886 - RNA, 15 nt, Human
cgaauauugcugaug

SEQ ID NO: 2499887 - RNA, 18 nt, Human
cgaauccccucccuguca

SEQ ID NO: 2499888 - RNA, 17 nt, Human
cgaaucuacuaauucca

SEQ ID NO: 2499889 - RNA, 14 nt, Human
cgaaucauuuguuc

SEQ ID NO: 2499890 - RNA, 17 nt, Human
cgaaucauuuguucaaa

SEQ ID NO: 2499891 - RNA, 19 nt, Human
cgaaguggacuggccccug

SEQ ID NO: 2499892 - RNA, 21 nt, Human
cgaauauuaugcccaguuucu

SEQ ID NO: 2499893 - RNA, 18 nt, Human
cgaaucagcuauuuacug

SEQ ID NO: 2499894 - RNA, 14 nt, Human
cgaauuaauagcuu

SEQ ID NO: 2499895 - RNA, 23 nt, Human
cgaauguguacaacuuaaguugg

SEQ ID NO: 2499896 - RNA, 15 nt, Human
cgaauguguacaacu

SEQ ID NO: 2499897 - RNA, 16 nt, Human
cgaauuaauagcuuuu

SEQ ID NO: 2499898 - RNA, 18 nt, Human
cgagacuugguuucaaaa

SEQ ID NO: 2499899 - RNA, 21 nt, Human
cgaaugugcagguuuguuaca

SEQ ID NO: 2499900 - RNA, 13 nt, Human
cgaaugugcaggu

SEQ ID NO: 2499901 - RNA, 15 nt, Human
cgaaugaucuuucuu

SEQ ID NO: 2499902 - RNA, 16 nt, Human
cgaaucucugugccuu

SEQ ID NO: 2499903 - RNA, 12 nt, Human
cgaaucucugug

SEQ ID NO: 2499904 - RNA, 22 nt, Human
cgaaucucuuuuugcuuucgaa

SEQ ID NO: 2499905 - RNA, 19 nt, Human
cgaauccccucccugucaa

SEQ ID NO: 2499906 - RNA, 22 nt, Human
ccuuccuguuuuucacauuuuc

SEQ ID NO: 2499907 - RNA, 13 nt, Human
ccuuccuucccac

SEQ ID NO: 2499908 - RNA, 17 nt, Human
ccuuccuguucugaacu

SEQ ID NO: 2499909 - RNA, 14 nt, Human
ccuucgggcugugc

SEQ ID NO: 2499910 - RNA, 18 nt, Human
ccuucggccuccauccug

SEQ ID NO: 2499911 - RNA, 15 nt, Human
ccuucgggcugugcc

SEQ ID NO: 2499912 - RNA, 16 nt, Human
ccuucgggcugugccc

SEQ ID NO: 2499913 - RNA, 17 nt, Human
ccuucgucuuucccaug

SEQ ID NO: 2499914 - RNA, 16 nt, Human
ccuucgucuuucccau

SEQ ID NO: 2499915 - RNA, 14 nt, Human
ccuuccuucccugg

SEQ ID NO: 2499916 - RNA, 16 nt, Human
ccuucggccuccaucc

SEQ ID NO: 2499917 - RNA, 17 nt, Human
ccuucggccuccauccu

SEQ ID NO: 2499918 - RNA, 19 nt, Human
ccuuccugucccaccucuu

SEQ ID NO: 2499919 - RNA, 16 nt, Human
ccuuccugucccaccu

SEQ ID NO: 2499920 - RNA, 19 nt, Human
ccuuccuggggcaucuggc

SEQ ID NO: 2499921 - RNA, 17 nt, Human
ccuuccuguuuuucaca

SEQ ID NO: 2499922 - RNA, 19 nt, Human
ccuuccuguuuuucacauu

SEQ ID NO: 2499923 - RNA, 15 nt, Human
ccuuccuguucugaa

SEQ ID NO: 2499924 - RNA, 19 nt, Human
ccuuccugucuuccugcau

SEQ ID NO: 2499925 - RNA, 17 nt, Human
ccuuccugucuuccugc

SEQ ID NO: 2499926 - RNA, 20 nt, Human
ccuuccuggagacugcccag

SEQ ID NO: 2499927 - RNA, 21 nt, Human
ccuuccuggagcccagaggag

SEQ ID NO: 2499928 - RNA, 18 nt, Human
ccuuccaugucgccucug

SEQ ID NO: 2499929 - RNA, 17 nt, Human
ccuuccauggacuuugu

SEQ ID NO: 2499930 - RNA, 23 nt, Human
ccuuccauggugugaucgucuga

SEQ ID NO: 2499931 - RNA, 17 nt, Human
ccuuccaucucgccacc

SEQ ID NO: 2499932 - RNA, 12 nt, Human
ccuuccaucccu

SEQ ID NO: 2499933 - RNA, 19 nt, Human
ccuuccaucccuacccccu

SEQ ID NO: 2499934 - RNA, 16 nt, Human
ccuuccagcuccugua

SEQ ID NO: 2499935 - RNA, 15 nt, Human
ccuuccagcuccugu

SEQ ID NO: 2499936 - RNA, 13 nt, Human
ccuuccagcuccu

SEQ ID NO: 2499937 - RNA, 12 nt, Human
ccuuccagcucc

SEQ ID NO: 2499938 - RNA, 13 nt, Human
ccuuccaggggug

SEQ ID NO: 2499939 - RNA, 16 nt, Human
ccuuccagucaggaug

SEQ ID NO: 2499940 - RNA, 22 nt, Human
ccuuccaguguccuuagaacau

SEQ ID NO: 2499941 - RNA, 11 nt, Human
ccuuccauaau

SEQ ID NO: 2499942 - RNA, 12 nt, Human
ccuuccauaauu

SEQ ID NO: 2499943 - RNA, 15 nt, Human
ccuuccauaauuaug

SEQ ID NO: 2499944 - RNA, 15 nt, Human
ccuuccaucccagag

SEQ ID NO: 2499945 - RNA, 23 nt, Human
ccuuccauagccuaaucccuggg

SEQ ID NO: 2499946 - RNA, 17 nt, Human
ccuuccagcuccuguaa

SEQ ID NO: 2499947 - RNA, 13 nt, Human
ccuuccaggcccc

SEQ ID NO: 2499948 - RNA, 20 nt, Human
ccuucguuuacuaugccugu

SEQ ID NO: 2499949 - RNA, 22 nt, Human
ccuucguuuacuaugccugugu

SEQ ID NO: 2499950 - RNA, 23 nt, Human
ccuucguuuacuaugccuguguc

SEQ ID NO: 2499951 - RNA, 13 nt, Human
ccuucuaaaggug

SEQ ID NO: 2499952 - RNA, 14 nt, Human
ccuucuaaaggugu

SEQ ID NO: 2499953 - RNA, 17 nt, Human
ccuucguuuacuaugcc

SEQ ID NO: 2499954 - RNA, 19 nt, Human
ccuucguuuacuaugccug

SEQ ID NO: 2499955 - RNA, 22 nt, Human
ccuucuaaagguguugucccuu

SEQ ID NO: 2499956 - RNA, 14 nt, Human
ccuucucagaaucu

SEQ ID NO: 2499957 - RNA, 17 nt, Human
ccuucucaucacucccc

SEQ ID NO: 2499958 - RNA, 13 nt, Human
ccuucucaucacu

SEQ ID NO: 2499959 - RNA, 15 nt, Human
ccuucuccaaaugag

SEQ ID NO: 2499960 - RNA, 11 nt, Human
ccuucuccauc

SEQ ID NO: 2499961 - RNA, 13 nt, Human
ccuucuccaucca

SEQ ID NO: 2499962 - RNA, 16 nt, Human
ccuucuccauccacau

SEQ ID NO: 2499963 - RNA, 22 nt, Human
ccuucuccauccacaugggagc

SEQ ID NO: 2499964 - RNA, 21 nt, Human
ccuucuccaucucucuggccc

SEQ ID NO: 2499965 - RNA, 17 nt, Human
ccuucuccaucucucug

SEQ ID NO: 2499966 - RNA, 14 nt, Human
ccuucuccaucucu

SEQ ID NO: 2499967 - RNA, 21 nt, Human
ccuucucaucacuccccucca

SEQ ID NO: 2499968 - RNA, 14 nt, Human
ccuucucccacacu

SEQ ID NO: 2499969 - RNA, 14 nt, Human
ccuucucccaugag

SEQ ID NO: 2499970 - RNA, 16 nt, Human
ccuucucccaccccug

SEQ ID NO: 2499971 - RNA, 22 nt, Human
ccuucuccaucucucuggcccu

SEQ ID NO: 2499972 - RNA, 16 nt, Human
ccuucucccacacugc

SEQ ID NO: 2499973 - RNA, 16 nt, Human
ccuucucuccagcccc

SEQ ID NO: 2499974 - RNA, 15 nt, Human
ccuucucuccagccc

SEQ ID NO: 2499975 - RNA, 13 nt, Human
ccuucucuccagc

SEQ ID NO: 2499976 - RNA, 12 nt, Human
ccuucucuccag

SEQ ID NO: 2499977 - RNA, 22 nt, Human
ccuucucccccccggggcuggg

SEQ ID NO: 2499978 - RNA, 16 nt, Human
ccuucucccccccggg

SEQ ID NO: 2499979 - RNA, 14 nt, Human
ccuucucccccccg

SEQ ID NO: 2499980 - RNA, 23 nt, Human
ccuucucccccccggggcugggu

SEQ ID NO: 2499981 - RNA, 16 nt, Human
ccuucucccucauuuc

SEQ ID NO: 2499982 - RNA, 21 nt, Human
ccuucuccuccccacccgccc

SEQ ID NO: 2499983 - RNA, 16 nt, Human
ccuucuccucuuguaa

SEQ ID NO: 2499984 - RNA, 15 nt, Human
ccuucuccucuugua

SEQ ID NO: 2499985 - RNA, 21 nt, Human
ccuucucucaucucuuagcuc

SEQ ID NO: 2499986 - RNA, 17 nt, Human
ccuucucucaucucuua

SEQ ID NO: 2499987 - RNA, 16 nt, Human
ccuucucucaucucuu

SEQ ID NO: 2499988 - RNA, 15 nt, Human
ccuucucucaucucu

SEQ ID NO: 2499989 - RNA, 12 nt, Human
ccuguccucacu

SEQ ID NO: 2499990 - RNA, 15 nt, Human
ccuguccucacugcu

SEQ ID NO: 2499991 - RNA, 14 nt, Human
ccuguccucacugc

SEQ ID NO: 2499992 - RNA, 13 nt, Human
ccuguccucacug

SEQ ID NO: 2499993 - RNA, 20 nt, Human
ccugugccucugggacugga

SEQ ID NO: 2499994 - RNA, 22 nt, Human
ccugucccucucaggcaugccu

SEQ ID NO: 2499995 - RNA, 23 nt, Human
ccugucccuucucuuaauuuaau

SEQ ID NO: 2499996 - RNA, 19 nt, Human
ccugucccucccaccucug

SEQ ID NO: 2499997 - RNA, 18 nt, Human
ccugucccucccaccucu

SEQ ID NO: 2499998 - RNA, 17 nt, Human
ccugucccucccaccuc

SEQ ID NO: 2499999 - RNA, 16 nt, Human
ccugucccucccaccu

SEQ ID NO: 2500000 - RNA, 21 nt, Human
ccugucccucccaccucugug

SEQ ID NO: 2500001 - RNA, 20 nt, Human
ccugucccucccaccucugu

SEQ ID NO: 2500002 - RNA, 15 nt, Human
ccugucccucucagg

SEQ ID NO: 2500003 - RNA, 16 nt, Human
ccugucccucucaggc

SEQ ID NO: 2500004 - RNA, 19 nt, Human
ccugugcuacuuugccuuu

SEQ ID NO: 2500005 - RNA, 17 nt, Human
ccugugcuacuuugccu

SEQ ID NO: 2500006 - RNA, 15 nt, Human
ccugugcuacuuugc

SEQ ID NO: 2500007 - RNA, 16 nt, Human
ccuguccucacugcuc

SEQ ID NO: 2500008 - RNA, 23 nt, Human
ccugugcuacuuugccuuuugca

SEQ ID NO: 2500009 - RNA, 21 nt, Human
ccuguccucacugcucccuga

SEQ ID NO: 2500010 - RNA, 15 nt, Human
ccugugccugacccu

SEQ ID NO: 2500011 - RNA, 17 nt, Human
ccugugccuuuugccau

SEQ ID NO: 2500012 - RNA, 18 nt, Human
ccugugcugacggaagcc

SEQ ID NO: 2500013 - RNA, 22 nt, Human
ccugugcuccgugccuccacca

SEQ ID NO: 2500014 - RNA, 21 nt, Human
ccugugcuccgugccuccacc

SEQ ID NO: 2500015 - RNA, 20 nt, Human
ccugugcuccgugccuccac

SEQ ID NO: 2500016 - RNA, 19 nt, Human
ccugugcuccgugccucca

SEQ ID NO: 2500017 - RNA, 18 nt, Human
ccugugcuccgugccucc

SEQ ID NO: 2500018 - RNA, 17 nt, Human
ccugugcuccgugccuc

SEQ ID NO: 2500019 - RNA, 11 nt, Human
ccuguggagac

SEQ ID NO: 2500020 - RNA, 14 nt, Human
ccuguggagacugg

SEQ ID NO: 2500021 - RNA, 15 nt, Human
ccuguggagcccgca

SEQ ID NO: 2500022 - RNA, 18 nt, Human
ccuguggagcccgcaccc

SEQ ID NO: 2500023 - RNA, 18 nt, Human
ccuguggccuguguccca

SEQ ID NO: 2500024 - RNA, 15 nt, Human
ccuguggccuguguc

SEQ ID NO: 2500025 - RNA, 14 nt, Human
ccuguggccugugu

SEQ ID NO: 2500026 - RNA, 13 nt, Human
ccuguggccugug

SEQ ID NO: 2500027 - RNA, 21 nt, Human
ccuguggccugugucccauga

SEQ ID NO: 2500028 - RNA, 19 nt, Human
ccuguggccugugucccau

SEQ ID NO: 2500029 - RNA, 21 nt, Human
ccuguggcgccgucuccaggg

SEQ ID NO: 2500030 - RNA, 20 nt, Human
ccuguggaugagcccucaga

SEQ ID NO: 2500031 - RNA, 17 nt, Human
ccuguggagcccgcacc

SEQ ID NO: 2500032 - RNA, 18 nt, Human
ccuguggaucaaauccag

SEQ ID NO: 2500033 - RNA, 20 nt, Human
ccuguggaugauaaaacaca

SEQ ID NO: 2500034 - RNA, 22 nt, Human
ccuguggggaucucaggggcug

SEQ ID NO: 2500035 - RNA, 20 nt, Human
ccuguggggaucucaggggc

SEQ ID NO: 2500036 - RNA, 18 nt, Human
ccuguggggaucucaggg

SEQ ID NO: 2500037 - RNA, 15 nt, Human
ccugugggagccugc

SEQ ID NO: 2500038 - RNA, 14 nt, Human
ccugugggagccug

SEQ ID NO: 2500039 - RNA, 20 nt, Human
ccugugggcccccaaaugga

SEQ ID NO: 2500040 - RNA, 22 nt, Human
ccuguggcgccgucuccagggg

SEQ ID NO: 2500041 - RNA, 23 nt, Human
ccuguggccugugucccaugacc

SEQ ID NO: 2500042 - RNA, 15 nt, Human
ccuguggcggugccu

SEQ ID NO: 2500043 - RNA, 16 nt, Human
ccuguggcggugccug

SEQ ID NO: 2500044 - RNA, 17 nt, Human
ccuguggcggugccugg

SEQ ID NO: 2500045 - RNA, 18 nt, Human
ccuguggcggugccuggg

SEQ ID NO: 2500046 - RNA, 19 nt, Human
ccuguggcggugccugggu

SEQ ID NO: 2500047 - RNA, 23 nt, Human
ccuguggcucuacaacugagucc

SEQ ID NO: 2500048 - RNA, 11 nt, Human
ccuguggcucu

SEQ ID NO: 2500049 - RNA, 20 nt, Human
ccuguggcggugccugggug

SEQ ID NO: 2500050 - RNA, 21 nt, Human
ccuguguaaucauuucuuggg

SEQ ID NO: 2500051 - RNA, 12 nt, Human
ccuucaugcaug

SEQ ID NO: 2500052 - RNA, 21 nt, Human
ccuucaugcauggaaauuccc

SEQ ID NO: 2500053 - RNA, 18 nt, Human
ccuguguaacagcuccuu

SEQ ID NO: 2500054 - RNA, 17 nt, Human
ccuguguaacagcuccu

SEQ ID NO: 2500055 - RNA, 16 nt, Human
ccuguguaacagcucc

SEQ ID NO: 2500056 - RNA, 15 nt, Human
ccuguguaacagcuc

SEQ ID NO: 2500057 - RNA, 21 nt, Human
ccuguguaacagcuccuuggg

SEQ ID NO: 2500058 - RNA, 20 nt, Human
ccuguguaacagcuccuugg

SEQ ID NO: 2500059 - RNA, 22 nt, Human
ccuguguaacagcuccuuggga

SEQ ID NO: 2500060 - RNA, 12 nt, Human
ccuguggugcaa

SEQ ID NO: 2500061 - RNA, 13 nt, Human
ccuguguaacagc

SEQ ID NO: 2500062 - RNA, 22 nt, Human
ccugugggggaagagcacagcc

SEQ ID NO: 2500063 - RNA, 21 nt, Human
ccugugggggaagagcacagc

SEQ ID NO: 2500064 - RNA, 23 nt, Human
ccugugggggaagagcacagccc

SEQ ID NO: 2500065 - RNA, 19 nt, Human
ccuguggggauuucuccca

SEQ ID NO: 2500066 - RNA, 20 nt, Human
ccuguggggauuucucccag

SEQ ID NO: 2500067 - RNA, 20 nt, Human
ccugugggggaagagcacag

SEQ ID NO: 2500068 - RNA, 22 nt, Human
ccuguggggauuucucccagcu

SEQ ID NO: 2500069 - RNA, 21 nt, Human
ccuucauuaccuuuuuugaua

SEQ ID NO: 2500070 - RNA, 15 nt, Human
ccuucaugcauggaa

SEQ ID NO: 2500071 - RNA, 20 nt, Human
ccuucauugccuuaacugga

SEQ ID NO: 2500072 - RNA, 12 nt, Human
ccuucauuuccu

SEQ ID NO: 2500073 - RNA, 13 nt, Human
ccuucauuuccuc

SEQ ID NO: 2500074 - RNA, 19 nt, Human
ccuucauuucaggagggau

SEQ ID NO: 2500075 - RNA, 18 nt, Human
ccuucauuucaggaggga

SEQ ID NO: 2500076 - RNA, 23 nt, Human
ccuucauugccuuaacuggagcc

SEQ ID NO: 2500077 - RNA, 14 nt, Human
ccuucauuuccucc

SEQ ID NO: 2500078 - RNA, 15 nt, Human
ccuucauuuccuccg

SEQ ID NO: 2500079 - RNA, 17 nt, Human
ccuuccagcacccugca

SEQ ID NO: 2500080 - RNA, 16 nt, Human
ccuuccagcacccugc

SEQ ID NO: 2500081 - RNA, 19 nt, Human
ccuucucuccagccccugg

SEQ ID NO: 2500082 - RNA, 19 nt, Human
ccuuguaauucuaaaugaa

SEQ ID NO: 2500083 - RNA, 16 nt, Human
ccuuguaauucuaaau

SEQ ID NO: 2500084 - RNA, 13 nt, Human
ccuuguauuuaaa

SEQ ID NO: 2500085 - RNA, 14 nt, Human
ccuuguauuuaaau

SEQ ID NO: 2500086 - RNA, 16 nt, Human
ccuugguucccccacu

SEQ ID NO: 2500087 - RNA, 17 nt, Human
ccuugguucccuugugu

SEQ ID NO: 2500088 - RNA, 20 nt, Human
ccuuggugucgggcaugaca

SEQ ID NO: 2500089 - RNA, 19 nt, Human
ccuuggugucgggcaugac

SEQ ID NO: 2500090 - RNA, 23 nt, Human
ccuuggggaauuuccucuauuga

SEQ ID NO: 2500091 - RNA, 22 nt, Human
ccuuggggaauuuccucuauug

SEQ ID NO: 2500092 - RNA, 17 nt, Human
ccuuggggaauuuccuc

SEQ ID NO: 2500093 - RNA, 18 nt, Human
ccuugggcugcuccucau

SEQ ID NO: 2500094 - RNA, 18 nt, Human
ccuugguguaguugaacu

SEQ ID NO: 2500095 - RNA, 15 nt, Human
ccuugguguccaccu

SEQ ID NO: 2500096 - RNA, 16 nt, Human
ccuugguguccaccug

SEQ ID NO: 2500097 - RNA, 17 nt, Human
ccuugguguccaccugg

SEQ ID NO: 2500098 - RNA, 18 nt, Human
ccuugguguccaccuggc

SEQ ID NO: 2500099 - RNA, 19 nt, Human
ccuugguguccaccuggcc

SEQ ID NO: 2500100 - RNA, 20 nt, Human
ccuugguguccaccuggccc

SEQ ID NO: 2500101 - RNA, 21 nt, Human
ccuugguguccaccuggcccc

SEQ ID NO: 2500102 - RNA, 16 nt, Human
ccuuggcugcagggag

SEQ ID NO: 2500103 - RNA, 22 nt, Human
ccuuggccugucucauccccag

SEQ ID NO: 2500104 - RNA, 23 nt, Human
ccuuggccugucucauccccagg

SEQ ID NO: 2500105 - RNA, 14 nt, Human
ccuuggcugcaggg

SEQ ID NO: 2500106 - RNA, 21 nt, Human
ccuuggcuguuggcagugagu

SEQ ID NO: 2500107 - RNA, 21 nt, Human
ccuuggcugugaggccccugg

SEQ ID NO: 2500108 - RNA, 14 nt, Human
ccuuggcuggugca

SEQ ID NO: 2500109 - RNA, 13 nt, Human
ccuuggcuggugc

SEQ ID NO: 2500110 - RNA, 12 nt, Human
ccuuggcuggug

SEQ ID NO: 2500111 - RNA, 15 nt, Human
ccuuggcuugcccac

SEQ ID NO: 2500112 - RNA, 16 nt, Human
ccuuggcuugcccacg

SEQ ID NO: 2500113 - RNA, 13 nt, Human
ccuuggcuugccc

SEQ ID NO: 2500114 - RNA, 20 nt, Human
ccuuggcuucaggggagucc

SEQ ID NO: 2500115 - RNA, 17 nt, Human
ccuugggcggcugagag

SEQ ID NO: 2500116 - RNA, 14 nt, Human
ccuugggcggcuga

SEQ ID NO: 2500117 - RNA, 12 nt, Human
ccuugggcuccc

SEQ ID NO: 2500118 - RNA, 18 nt, Human
ccuuggcuugcccacgug

SEQ ID NO: 2500119 - RNA, 18 nt, Human
ccuugggcggcugagagc

SEQ ID NO: 2500120 - RNA, 13 nt, Human
ccuugggcucccu

SEQ ID NO: 2500121 - RNA, 14 nt, Human
ccuuggggagcagg

SEQ ID NO: 2500122 - RNA, 14 nt, Human
ccuugggcugcucc

SEQ ID NO: 2500123 - RNA, 15 nt, Human
ccuugggcugcuccu

SEQ ID NO: 2500124 - RNA, 17 nt, Human
ccuugggcugcuccuca

SEQ ID NO: 2500125 - RNA, 18 nt, Human
ccuucucuccagccccug

SEQ ID NO: 2500126 - RNA, 17 nt, Human
ccuucucuccagccccu

SEQ ID NO: 2500127 - RNA, 21 nt, Human
ccuugacagggcacaccgggc

SEQ ID NO: 2500128 - RNA, 18 nt, Human
ccuugacagggcacaccg

SEQ ID NO: 2500129 - RNA, 11 nt, Human
ccuugagacca

SEQ ID NO: 2500130 - RNA, 16 nt, Human
ccuugagaccacaggg

SEQ ID NO: 2500131 - RNA, 14 nt, Human
ccuugagaccucag

SEQ ID NO: 2500132 - RNA, 16 nt, Human
ccuugagaccucagcc

SEQ ID NO: 2500133 - RNA, 17 nt, Human
ccuugagaccucagcca

SEQ ID NO: 2500134 - RNA, 18 nt, Human
ccuugagaccucagccau

SEQ ID NO: 2500135 - RNA, 16 nt, Human
ccuugagagaccaggc

SEQ ID NO: 2500136 - RNA, 19 nt, Human
ccuugagaccucagccaug

SEQ ID NO: 2500137 - RNA, 21 nt, Human
ccuugagaguaucaggucucc

SEQ ID NO: 2500138 - RNA, 20 nt, Human
ccuugagagaccaggcaaag

SEQ ID NO: 2500139 - RNA, 18 nt, Human
ccuugagagaccaggcaa

SEQ ID NO: 2500140 - RNA, 21 nt, Human
ccuugagagaccaggcaaagc

SEQ ID NO: 2500141 - RNA, 17 nt, Human
ccuugagcuccccaaaa

SEQ ID NO: 2500142 - RNA, 23 nt, Human
ccuugacauuguagagcuucugg

SEQ ID NO: 2500143 - RNA, 12 nt, Human
ccuugaccagca

SEQ ID NO: 2500144 - RNA, 20 nt, Human
ccuugaccagcagaucccag

SEQ ID NO: 2500145 - RNA, 21 nt, Human
ccuugaccagcagaucccagc

SEQ ID NO: 2500146 - RNA, 14 nt, Human
ccuugagaaaccuu

SEQ ID NO: 2500147 - RNA, 12 nt, Human
ccuugaccaggc

SEQ ID NO: 2500148 - RNA, 23 nt, Human
ccuugaccagcagaucccagcuc

SEQ ID NO: 2500149 - RNA, 19 nt, Human
ccuugagaaaccuuauugu

SEQ ID NO: 2500150 - RNA, 14 nt, Human
ccuugagacagcuu

SEQ ID NO: 2500151 - RNA, 22 nt, Human
ccuuggcucaaguccucuuuuc

SEQ ID NO: 2500152 - RNA, 15 nt, Human
ccuuggccugucuca

SEQ ID NO: 2500153 - RNA, 19 nt, Human
ccuuggccugucucauccc

SEQ ID NO: 2500154 - RNA, 14 nt, Human
ccuuggccucagaa

SEQ ID NO: 2500155 - RNA, 11 nt, Human
ccuuggccuca

SEQ ID NO: 2500156 - RNA, 13 nt, Human
ccuuggccucaga

SEQ ID NO: 2500157 - RNA, 15 nt, Human
ccuuggauugucccc

SEQ ID NO: 2500158 - RNA, 13 nt, Human
ccuuggacuugag

SEQ ID NO: 2500159 - RNA, 12 nt, Human
ccuuggaggcca

SEQ ID NO: 2500160 - RNA, 16 nt, Human
ccuuggaggccagcca

SEQ ID NO: 2500161 - RNA, 18 nt, Human
ccuuggaggcugucuucu

SEQ ID NO: 2500162 - RNA, 23 nt, Human
ccuuggagggucccaagcugggc

SEQ ID NO: 2500163 - RNA, 18 nt, Human
ccuuggauaaugcuguug

SEQ ID NO: 2500164 - RNA, 22 nt, Human
ccuuggauaaugcuguugccuc

SEQ ID NO: 2500165 - RNA, 23 nt, Human
ccuuggauaaugcuguugccuca

SEQ ID NO: 2500166 - RNA, 15 nt, Human
ccuuggacucauuuu

SEQ ID NO: 2500167 - RNA, 12 nt, Human
ccuugagcugag

SEQ ID NO: 2500168 - RNA, 14 nt, Human
ccuugagcugagau

SEQ ID NO: 2500169 - RNA, 18 nt, Human
ccuugaggaaacaacagc

SEQ ID NO: 2500170 - RNA, 15 nt, Human
ccuuggacuugagga

SEQ ID NO: 2500171 - RNA, 18 nt, Human
gaaaaucuuauaauuuaa

SEQ ID NO: 2500172 - RNA, 13 nt, Human
gaaaaugaauaau

SEQ ID NO: 2500173 - RNA, 23 nt, Human
gaaaaucuaauauuaaaaauaug

SEQ ID NO: 2500174 - RNA, 21 nt, Human
gaaaaucuaauauuaaaaaua

SEQ ID NO: 2500175 - RNA, 20 nt, Human
gaaaaucuaauauuaaaaau

SEQ ID NO: 2500176 - RNA, 14 nt, Human
gaaaaucuaauauu

SEQ ID NO: 2500177 - RNA, 14 nt, Human
gaaaauccucuggc

SEQ ID NO: 2500178 - RNA, 15 nt, Human
gaaaauccucuggcu

SEQ ID NO: 2500179 - RNA, 22 nt, Human
gaaaaucuacacuccagugaga

SEQ ID NO: 2500180 - RNA, 13 nt, Human
gaaaauccucugg

SEQ ID NO: 2500181 - RNA, 14 nt, Human
gaaaaucauauugc

SEQ ID NO: 2500182 - RNA, 20 nt, Human
gaaaaucagccugcuccagc

SEQ ID NO: 2500183 - RNA, 22 nt, Human
gaaaaucagccugcuccagcug

SEQ ID NO: 2500184 - RNA, 12 nt, Human
gaaaauaaaaag

SEQ ID NO: 2500185 - RNA, 13 nt, Human
gaaaauaaaaagu

SEQ ID NO: 2500186 - RNA, 22 nt, Human
gaaaauaaaaaaaagaaaaaag

SEQ ID NO: 2500187 - RNA, 17 nt, Human
gaaaauaaaaaaaagaa

SEQ ID NO: 2500188 - RNA, 18 nt, Human
gaaaauaaaaaaaagaaa

SEQ ID NO: 2500189 - RNA, 19 nt, Human
gaaaauaaaaaaaagaaaa

SEQ ID NO: 2500190 - RNA, 21 nt, Human
gaaaauaaaaaaaagaaaaaa

SEQ ID NO: 2500191 - RNA, 12 nt, Human
gaaaaguucaua

SEQ ID NO: 2500192 - RNA, 11 nt, Human
gaaaauaaaaa

SEQ ID NO: 2500193 - RNA, 16 nt, Human
gaaaauaaaaaaaaga

SEQ ID NO: 2500194 - RNA, 14 nt, Human
gaaaauaaaaaguu

SEQ ID NO: 2500195 - RNA, 21 nt, Human
gaaaauauuauguguuuccau

SEQ ID NO: 2500196 - RNA, 18 nt, Human
gaaaauauuuguaucaca

SEQ ID NO: 2500197 - RNA, 13 nt, Human
gaaaauauuuaaa

SEQ ID NO: 2500198 - RNA, 21 nt, Human
gaaaauauuuugucuaaaaug

SEQ ID NO: 2500199 - RNA, 20 nt, Human
gaaaauauuuugucuaaaau

SEQ ID NO: 2500200 - RNA, 19 nt, Human
gaaaauauuuugucuaaaa

SEQ ID NO: 2500201 - RNA, 18 nt, Human
gaaaauauuuugucuaaa

SEQ ID NO: 2500202 - RNA, 17 nt, Human
gaaaauauuuugucuaa

SEQ ID NO: 2500203 - RNA, 22 nt, Human
gaaaacguggcugcuucaagga

SEQ ID NO: 2500204 - RNA, 20 nt, Human
gaaaacguggcugcuucaag

SEQ ID NO: 2500205 - RNA, 19 nt, Human
gaaaacguggcugcuucaa

SEQ ID NO: 2500206 - RNA, 14 nt, Human
gaaaacguuuuauu

SEQ ID NO: 2500207 - RNA, 16 nt, Human
gaaaacguuuuauugu

SEQ ID NO: 2500208 - RNA, 18 nt, Human
gaaaacguuuuauugugu

SEQ ID NO: 2500209 - RNA, 19 nt, Human
gaaaagcugcugacagugu

SEQ ID NO: 2500210 - RNA, 24 nt, Human
gaaaacacuguucucugcccucca

SEQ ID NO: 2500211 - RNA, 22 nt, Human
gaaaacacuguucucugcccuc

SEQ ID NO: 2500212 - RNA, 21 nt, Human
gaaaacagaacaucauuagaa

SEQ ID NO: 2500213 - RNA, 13 nt, Human
gaaaacagaccua

SEQ ID NO: 2500214 - RNA, 21 nt, Human
gaaaacagaccuaaugcuccu

SEQ ID NO: 2500215 - RNA, 17 nt, Human
gaaaacagacucagguu

SEQ ID NO: 2500216 - RNA, 16 nt, Human
gaaaagugaaugcuca

SEQ ID NO: 2500217 - RNA, 20 nt, Human
gaaaaggaagacuagaggcu

SEQ ID NO: 2500218 - RNA, 13 nt, Human
gaaaaggaagacu

SEQ ID NO: 2500219 - RNA, 15 nt, Human
gaaaaggaagacuag

SEQ ID NO: 2500220 - RNA, 19 nt, Human
gaaaacguuuuauuguguu

SEQ ID NO: 2500221 - RNA, 20 nt, Human
gaaaacguuuuauuguguuu

SEQ ID NO: 2500222 - RNA, 11 nt, Human
gaaaaggcagg

SEQ ID NO: 2500223 - RNA, 11 nt, Human
cuuuuguucuu

SEQ ID NO: 2500224 - RNA, 12 nt, Human
cuuuuguucuug

SEQ ID NO: 2500225 - RNA, 22 nt, Human
cuuuguuauuuuuguuucuucc

SEQ ID NO: 2500226 - RNA, 20 nt, Human
cuuuguuauuuuuguuucuu

SEQ ID NO: 2500227 - RNA, 22 nt, Human
cuuuuguucagggcugugaucg

SEQ ID NO: 2500228 - RNA, 15 nt, Human
cuuuguuacaggcac

SEQ ID NO: 2500229 - RNA, 18 nt, Human
cuuuguuaguuucuccaa

SEQ ID NO: 2500230 - RNA, 23 nt, Human
cuuuguguuucuauugacuucaa

SEQ ID NO: 2500231 - RNA, 14 nt, Human
cuuuguguuucuau

SEQ ID NO: 2500232 - RNA, 20 nt, Human
cuuuguggaugucuuccuug

SEQ ID NO: 2500233 - RNA, 17 nt, Human
cuuuguggaugucuucc

SEQ ID NO: 2500234 - RNA, 16 nt, Human
cuuuguggaugucuuc

SEQ ID NO: 2500235 - RNA, 17 nt, Human
cuuugugcuguggggcu

SEQ ID NO: 2500236 - RNA, 15 nt, Human
cuuugugugauugaa

SEQ ID NO: 2500237 - RNA, 19 nt, Human
cuuuuucuucuucccuccc

SEQ ID NO: 2500238 - RNA, 15 nt, Human
cuuuuucuucuuccc

SEQ ID NO: 2500239 - RNA, 12 nt, Human
cuuuuucuuuau

SEQ ID NO: 2500240 - RNA, 16 nt, Human
cuuuuucuuuauaaac

SEQ ID NO: 2500241 - RNA, 22 nt, Human
cuuuuucuggacugaagccugc

SEQ ID NO: 2500242 - RNA, 17 nt, Human
cuuuuucugacuccagu

SEQ ID NO: 2500243 - RNA, 11 nt, Human
cuuuuucugac

SEQ ID NO: 2500244 - RNA, 19 nt, Human
cuuuuuauugaaucuauuu

SEQ ID NO: 2500245 - RNA, 17 nt, Human
cuuuuuauggccuguga

SEQ ID NO: 2500246 - RNA, 13 nt, Human
cuuuuguucgcau

SEQ ID NO: 2500247 - RNA, 14 nt, Human
cuuuuuauugaauc

SEQ ID NO: 2500248 - RNA, 13 nt, Human
cuuuuuauugaau

SEQ ID NO: 2500249 - RNA, 22 nt, Human
cuuuuuauguugccaguuuaau

SEQ ID NO: 2500250 - RNA, 17 nt, Human
cuuuuuauugaaucuau

SEQ ID NO: 2500251 - RNA, 15 nt, Human
cuuuuuauugaaucu

SEQ ID NO: 2500252 - RNA, 19 nt, Human
gaaaacacauuuuucuuag

SEQ ID NO: 2500253 - RNA, 14 nt, Human
gaaaacacugugca

SEQ ID NO: 2500254 - RNA, 21 nt, Human
gaaaacacugugcacaucugu

SEQ ID NO: 2500255 - RNA, 18 nt, Human
gaaaacacuguucucugc

SEQ ID NO: 2500256 - RNA, 18 nt, Human
gaaaacacauuuuucuua

SEQ ID NO: 2500257 - RNA, 14 nt, Human
gaaaacacauuuuu

SEQ ID NO: 2500258 - RNA, 21 nt, Human
gaaaaagcuccuguccuccca

SEQ ID NO: 2500259 - RNA, 22 nt, Human
gaaaaagcauguacaguguucu

SEQ ID NO: 2500260 - RNA, 17 nt, Human
gaaaaagcauguacagu

SEQ ID NO: 2500261 - RNA, 16 nt, Human
gaaaaagcauguacag

SEQ ID NO: 2500262 - RNA, 15 nt, Human
gaaaaagcauguaca

SEQ ID NO: 2500263 - RNA, 14 nt, Human
gaaaaagcauguac

SEQ ID NO: 2500264 - RNA, 20 nt, Human
gaaaaagcauguacaguguu

SEQ ID NO: 2500265 - RNA, 18 nt, Human
gaaaaagcauguacagug

SEQ ID NO: 2500266 - RNA, 13 nt, Human
gaaaaagcaugua

SEQ ID NO: 2500267 - RNA, 16 nt, Human
cuuuuuuggcugcuga

SEQ ID NO: 2500268 - RNA, 12 nt, Human
gaaaaaggagga

SEQ ID NO: 2500269 - RNA, 15 nt, Human
gaaaaaggaggaaga

SEQ ID NO: 2500270 - RNA, 22 nt, Human
cuuuuuuggcugcugaaggcuc

SEQ ID NO: 2500271 - RNA, 20 nt, Human
cuuuuuuggcugcugaaggc

SEQ ID NO: 2500272 - RNA, 11 nt, Human
cuuuuuguagg

SEQ ID NO: 2500273 - RNA, 16 nt, Human
cuuuuuguaccuggug

SEQ ID NO: 2500274 - RNA, 14 nt, Human
cuuuuuguaccugg

SEQ ID NO: 2500275 - RNA, 17 nt, Human
cuuuuuuggcugcugaa

SEQ ID NO: 2500276 - RNA, 21 nt, Human
cuuuuuggaggugcuuaagca

SEQ ID NO: 2500277 - RNA, 15 nt, Human
cuuuuugaaaucagc

SEQ ID NO: 2500278 - RNA, 17 nt, Human
cuuuuugguuugcagau

SEQ ID NO: 2500279 - RNA, 18 nt, Human
cuuuuugaaaucagcaua

SEQ ID NO: 2500280 - RNA, 18 nt, Human
cuuuuucuuuauaaacuu

SEQ ID NO: 2500281 - RNA, 21 nt, Human
gaaagaggaaugaaguacuca

SEQ ID NO: 2500282 - RNA, 21 nt, Human
gaaacucuuaucucagucaug

SEQ ID NO: 2500283 - RNA, 15 nt, Human
gaaagagaagguggg

SEQ ID NO: 2500284 - RNA, 14 nt, Human
gaaagagaaggugg

SEQ ID NO: 2500285 - RNA, 23 nt, Human
gaaagagcacuuaagagaauauu

SEQ ID NO: 2500286 - RNA, 20 nt, Human
gaaagaggcagcuugaaacu

SEQ ID NO: 2500287 - RNA, 17 nt, Human
gaaagaggagugcuugu

SEQ ID NO: 2500288 - RNA, 17 nt, Human
gaaagagaacuuccaga

SEQ ID NO: 2500289 - RNA, 19 nt, Human
gaaagacuuuuccaacccu

SEQ ID NO: 2500290 - RNA, 20 nt, Human
gaaacucuuaucucagucau

SEQ ID NO: 2500291 - RNA, 16 nt, Human
gaaacucuuaucucag

SEQ ID NO: 2500292 - RNA, 15 nt, Human
gaaacucuuaucuca

SEQ ID NO: 2500293 - RNA, 14 nt, Human
gaaacucuuaucuc

SEQ ID NO: 2500294 - RNA, 22 nt, Human
gaaacuccgucuuagaagugga

SEQ ID NO: 2500295 - RNA, 21 nt, Human
gaaacuccaccuugcggggau

SEQ ID NO: 2500296 - RNA, 18 nt, Human
gaaacuccgucuuagaag

SEQ ID NO: 2500297 - RNA, 23 nt, Human
gaaacucuuaucucagucaugca

SEQ ID NO: 2500298 - RNA, 17 nt, Human
gaaagacuguacaaagu

SEQ ID NO: 2500299 - RNA, 16 nt, Human
gaaagaguaggaagac

SEQ ID NO: 2500300 - RNA, 15 nt, Human
gaaagaguaggaaga

SEQ ID NO: 2500301 - RNA, 21 nt, Human
gaaagaguacucuuguuuccu

SEQ ID NO: 2500302 - RNA, 22 nt, Human
gaaagaggcugaggccuggacu

SEQ ID NO: 2500303 - RNA, 21 nt, Human
gaaagaggcugaggccuggac

SEQ ID NO: 2500304 - RNA, 20 nt, Human
gaaagaggcugaggccugga

SEQ ID NO: 2500305 - RNA, 17 nt, Human
gaaagcagaacagugau

SEQ ID NO: 2500306 - RNA, 22 nt, Human
gaaagcagaacagugauuacca

SEQ ID NO: 2500307 - RNA, 15 nt, Human
gaaagaguaaaggaa

SEQ ID NO: 2500308 - RNA, 20 nt, Human
gaaagcagauaccucacccu

SEQ ID NO: 2500309 - RNA, 22 nt, Human
gaaagcagauaccucacccugc

SEQ ID NO: 2500310 - RNA, 19 nt, Human
gaaagcagcucaaaggcac

SEQ ID NO: 2500311 - RNA, 14 nt, Human
gaaagcagggacuu

SEQ ID NO: 2500312 - RNA, 23 nt, Human
gaaagcaggggcuacaagaggga

SEQ ID NO: 2500313 - RNA, 19 nt, Human
gaaagcaggggcuacaaga

SEQ ID NO: 2500314 - RNA, 14 nt, Human
gaaagcaggggcua

SEQ ID NO: 2500315 - RNA, 13 nt, Human
gaaagcaggggcu

SEQ ID NO: 2500316 - RNA, 12 nt, Human
gaaagcaggggc

SEQ ID NO: 2500317 - RNA, 14 nt, Human
gaaagcagcugaac

SEQ ID NO: 2500318 - RNA, 20 nt, Human
gaaagcagcucaaaggcaca

SEQ ID NO: 2500319 - RNA, 16 nt, Human
gaaagcaucaccucag

SEQ ID NO: 2500320 - RNA, 17 nt, Human
gaaagcaucaccucagg

SEQ ID NO: 2500321 - RNA, 18 nt, Human
gaaagcaucaccucaggc

SEQ ID NO: 2500322 - RNA, 19 nt, Human
gaaagcaucaccucaggcc

SEQ ID NO: 2500323 - RNA, 21 nt, Human
gaaagcccagaaaaggacaga

SEQ ID NO: 2500324 - RNA, 20 nt, Human
gaaagcccagaaaaggacag

SEQ ID NO: 2500325 - RNA, 15 nt, Human
gaaagcauccaugug

SEQ ID NO: 2500326 - RNA, 14 nt, Human
gaaagccauuuguu

SEQ ID NO: 2500327 - RNA, 21 nt, Human
gaaagcccugagcuuucugcu

SEQ ID NO: 2500328 - RNA, 22 nt, Human
gaaagcccugagcuuucugcua

SEQ ID NO: 2500329 - RNA, 17 nt, Human
gaaagcccugagcuuuc

SEQ ID NO: 2500330 - RNA, 14 nt, Human
gaaagccccagcac

SEQ ID NO: 2500331 - RNA, 18 nt, Human
gaaagccccagcacuaac

SEQ ID NO: 2500332 - RNA, 17 nt, Human
gaaagcuucaaacugca

SEQ ID NO: 2500333 - RNA, 16 nt, Human
gaaaggcauucucuga

SEQ ID NO: 2500334 - RNA, 21 nt, Human
gaaagcugguaaacuauuugu

SEQ ID NO: 2500335 - RNA, 17 nt, Human
gaaagcugccugguaua

SEQ ID NO: 2500336 - RNA, 22 nt, Human
gaaagcuccucgagggcaggga

SEQ ID NO: 2500337 - RNA, 20 nt, Human
gaaagcuccuagcagagaga

SEQ ID NO: 2500338 - RNA, 18 nt, Human
gaaagcuccuagcagaga

SEQ ID NO: 2500339 - RNA, 16 nt, Human
gaaagcuagagauaug

SEQ ID NO: 2500340 - RNA, 16 nt, Human
gaaagccuaucaaaga

SEQ ID NO: 2500341 - RNA, 15 nt, Human
gaaagccucugcugc

SEQ ID NO: 2500342 - RNA, 21 nt, Human
gaaagccuguuccccucacug

SEQ ID NO: 2500343 - RNA, 20 nt, Human
gaaagccuguuccccucacu

SEQ ID NO: 2500344 - RNA, 18 nt, Human
gaaagccuguuccccuca

SEQ ID NO: 2500345 - RNA, 16 nt, Human
gaaagccucugcugcc

SEQ ID NO: 2500346 - RNA, 24 nt, Human
gaaagccuguuccccucacuggau

SEQ ID NO: 2500347 - RNA, 13 nt, Human
gaaagcuagagau

SEQ ID NO: 2500348 - RNA, 19 nt, Human
gaaacccagcucuggucca

SEQ ID NO: 2500349 - RNA, 18 nt, Human
gaaacccagcucuggucc

SEQ ID NO: 2500350 - RNA, 16 nt, Human
gaaacccagcucuggu

SEQ ID NO: 2500351 - RNA, 15 nt, Human
gaaacccagcucugg

SEQ ID NO: 2500352 - RNA, 14 nt, Human
gaaacccagcucug

SEQ ID NO: 2500353 - RNA, 13 nt, Human
gaaacccagcucu

SEQ ID NO: 2500354 - RNA, 18 nt, Human
gaaaccagugcaacagca

SEQ ID NO: 2500355 - RNA, 20 nt, Human
gaaaccagggccugagccaa

SEQ ID NO: 2500356 - RNA, 14 nt, Human
gaaaccagggccug

SEQ ID NO: 2500357 - RNA, 18 nt, Human
gaaaccacagcugcugga

SEQ ID NO: 2500358 - RNA, 17 nt, Human
gaaaccacagcugcugg

SEQ ID NO: 2500359 - RNA, 20 nt, Human
gaaaccacagcugcuggaga

SEQ ID NO: 2500360 - RNA, 15 nt, Human
gaaaccacagcugcu

SEQ ID NO: 2500361 - RNA, 14 nt, Human
gaaaccacagcugc

SEQ ID NO: 2500362 - RNA, 11 nt, Human
gaaacauuugg

SEQ ID NO: 2500363 - RNA, 13 nt, Human
gaaacauuuucau

SEQ ID NO: 2500364 - RNA, 15 nt, Human
gaaaccaaagaagaa

SEQ ID NO: 2500365 - RNA, 22 nt, Human
gaaaccaaagauauauacacag

SEQ ID NO: 2500366 - RNA, 16 nt, Human
gaaaccaaagaagaaa

SEQ ID NO: 2500367 - RNA, 13 nt, Human
gaaacacagaaac

SEQ ID NO: 2500368 - RNA, 21 nt, Human
gaaacacacugaggcagggaa

SEQ ID NO: 2500369 - RNA, 23 nt, Human
gaaacacacugaggcagggaagu

SEQ ID NO: 2500370 - RNA, 16 nt, Human
gaaacacaacuauauu

SEQ ID NO: 2500371 - RNA, 14 nt, Human
gaaacacaauauuu

SEQ ID NO: 2500372 - RNA, 15 nt, Human
gaaacacaauauuuu

SEQ ID NO: 2500373 - RNA, 16 nt, Human
gaaacacaccaggcug

SEQ ID NO: 2500374 - RNA, 17 nt, Human
gaaacacaccaggcugu

SEQ ID NO: 2500375 - RNA, 23 nt, Human
gaaacacaccaggcugugggccu

SEQ ID NO: 2500376 - RNA, 16 nt, Human
gaaacacacugaggca

SEQ ID NO: 2500377 - RNA, 19 nt, Human
gaaacacacugaggcaggg

SEQ ID NO: 2500378 - RNA, 20 nt, Human
gaaacacacugaggcaggga

SEQ ID NO: 2500379 - RNA, 20 nt, Human
gaaaaugauacgcaacauaa

SEQ ID NO: 2500380 - RNA, 12 nt, Human
gaaaaugaauaa

SEQ ID NO: 2500381 - RNA, 23 nt, Human
gaaaaugaguuuuuauggggcug

SEQ ID NO: 2500382 - RNA, 16 nt, Human
gaaaaugaaucccucu

SEQ ID NO: 2500383 - RNA, 14 nt, Human
gaaaaugcagcagg

SEQ ID NO: 2500384 - RNA, 21 nt, Human
gaaacaauacucauaauguga

SEQ ID NO: 2500385 - RNA, 15 nt, Human
gaaacaauaaagaga

SEQ ID NO: 2500386 - RNA, 22 nt, Human
gaaacaauacucauaaugugaa

SEQ ID NO: 2500387 - RNA, 16 nt, Human
gaaaaugaucugaguc

SEQ ID NO: 2500388 - RNA, 14 nt, Human
gaaaaugaucugag

SEQ ID NO: 2500389 - RNA, 22 nt, Human
gaaaaugaucugagucccagga

SEQ ID NO: 2500390 - RNA, 23 nt, Human
gaaaaugauguguacccaaacgu

SEQ ID NO: 2500391 - RNA, 20 nt, Human
gaaaaugcaacaacauguau

SEQ ID NO: 2500392 - RNA, 18 nt, Human
gaaaaugcaacaacaugu

SEQ ID NO: 2500393 - RNA, 23 nt, Human
gaaacucguuaauuuguaguguu

SEQ ID NO: 2500394 - RNA, 20 nt, Human
gaaacuccaccuugcgggga

SEQ ID NO: 2500395 - RNA, 20 nt, Human
gaaacuccacaucugccuua

SEQ ID NO: 2500396 - RNA, 18 nt, Human
gaaacuaggucugauauu

SEQ ID NO: 2500397 - RNA, 19 nt, Human
gaaacuccacaucugccuu

SEQ ID NO: 2500398 - RNA, 13 nt, Human
gaaacuaggucug

SEQ ID NO: 2500399 - RNA, 18 nt, Human
gaaacuccacaucugccu

SEQ ID NO: 2500400 - RNA, 22 nt, Human
gaaaccuuauuuuuucccaaag

SEQ ID NO: 2500401 - RNA, 12 nt, Human
gaaacuaacaga

SEQ ID NO: 2500402 - RNA, 17 nt, Human
gaaaccugcccugccug

SEQ ID NO: 2500403 - RNA, 14 nt, Human
gaaaccugcccugc

SEQ ID NO: 2500404 - RNA, 18 nt, Human
gaaaccugcccugccuga

SEQ ID NO: 2500405 - RNA, 19 nt, Human
gaaaccuuauuguaccucu

SEQ ID NO: 2500406 - RNA, 17 nt, Human
gaaaccuuauuguaccu

SEQ ID NO: 2500407 - RNA, 13 nt, Human
gaaaccuuauuuu

SEQ ID NO: 2500408 - RNA, 13 nt, Human
gaaaccuuaauau

SEQ ID NO: 2500409 - RNA, 20 nt, Human
gaaaccuuauuguaccucuc

SEQ ID NO: 2500410 - RNA, 16 nt, Human
gaaacgucuucuaaac

SEQ ID NO: 2500411 - RNA, 15 nt, Human
gaaacuaacagauaa

SEQ ID NO: 2500412 - RNA, 14 nt, Human
gaaacccugucucu

SEQ ID NO: 2500413 - RNA, 14 nt, Human
gaaacccuggacca

SEQ ID NO: 2500414 - RNA, 21 nt, Human
gaaacccuggaccaguggucu

SEQ ID NO: 2500415 - RNA, 17 nt, Human
gaaacccuugaaaagac

SEQ ID NO: 2500416 - RNA, 13 nt, Human
gaaaccugcccug

SEQ ID NO: 2500417 - RNA, 12 nt, Human
gaaaccugcccu

SEQ ID NO: 2500418 - RNA, 18 nt, Human
gaaaccugaaaaaaaguu

SEQ ID NO: 2500419 - RNA, 13 nt, Human
gaaaccugaaaaa

SEQ ID NO: 2500420 - RNA, 16 nt, Human
gaaaccugggauucag

SEQ ID NO: 2500421 - RNA, 20 nt, Human
gaaaccucuacuaaaaagaa

SEQ ID NO: 2500422 - RNA, 23 nt, Human
gaaacccccacacacacacacau

SEQ ID NO: 2500423 - RNA, 15 nt, Human
gaaacccuauuuccc

SEQ ID NO: 2500424 - RNA, 16 nt, Human
gaaacccgacagaggg

SEQ ID NO: 2500425 - RNA, 16 nt, Human
gaaacccccacacaca

SEQ ID NO: 2500426 - RNA, 17 nt, Human
gaaacccccacacacac

SEQ ID NO: 2500427 - RNA, 15 nt, Human
gaaacccccacacac

SEQ ID NO: 2500428 - RNA, 21 nt, Human
gaaacccagacugaacuuacc

SEQ ID NO: 2500429 - RNA, 17 nt, Human
gaaaccccaucucuacu

SEQ ID NO: 2500430 - RNA, 23 nt, Human
gaaacccagcucugguccauaga

SEQ ID NO: 2500431 - RNA, 19 nt, Human
gaaaccaguguagccuugc

SEQ ID NO: 2500432 - RNA, 21 nt, Human
gaaaccauuaugaagaagaga

SEQ ID NO: 2500433 - RNA, 19 nt, Human
cuuuggcuaugagggccuu

SEQ ID NO: 2500434 - RNA, 19 nt, Human
cuuuggcuauuagagauca

SEQ ID NO: 2500435 - RNA, 23 nt, Human
cuuugccuugggcugcuccucau

SEQ ID NO: 2500436 - RNA, 14 nt, Human
cuuugccuuuugca

SEQ ID NO: 2500437 - RNA, 17 nt, Human
cuuuggccauuccaaca

SEQ ID NO: 2500438 - RNA, 14 nt, Human
cuuuggcugcaugc

SEQ ID NO: 2500439 - RNA, 15 nt, Human
cuuuggcuccccugu

SEQ ID NO: 2500440 - RNA, 13 nt, Human
cuuuggcuccccu

SEQ ID NO: 2500441 - RNA, 15 nt, Human
cuuuggcucuggaga

SEQ ID NO: 2500442 - RNA, 14 nt, Human
cuuuggcucuggag

SEQ ID NO: 2500443 - RNA, 13 nt, Human
cuuuggcucugga

SEQ ID NO: 2500444 - RNA, 14 nt, Human
cuuuguccccaccg

SEQ ID NO: 2500445 - RNA, 23 nt, Human
cuuuguauuuuuacuuuuaaaug

SEQ ID NO: 2500446 - RNA, 20 nt, Human
cuuuguauuuuuacuuuuaa

SEQ ID NO: 2500447 - RNA, 18 nt, Human
cuuugucaucuuucuucu

SEQ ID NO: 2500448 - RNA, 16 nt, Human
cuuugucaaaaggaag

SEQ ID NO: 2500449 - RNA, 15 nt, Human
cuuugugaggaagcc

SEQ ID NO: 2500450 - RNA, 13 nt, Human
cuuugugcugugg

SEQ ID NO: 2500451 - RNA, 15 nt, Human
cuuugucugaaaaau

SEQ ID NO: 2500452 - RNA, 22 nt, Human
cuuugugaauagaacucugaaa

SEQ ID NO: 2500453 - RNA, 15 nt, Human
cuuugugacuguaua

SEQ ID NO: 2500454 - RNA, 23 nt, Human
cuuugugacuguauauaaaggaa

SEQ ID NO: 2500455 - RNA, 19 nt, Human
cuuugugagagugagcugu

SEQ ID NO: 2500456 - RNA, 15 nt, Human
cuuuguccccaccgc

SEQ ID NO: 2500457 - RNA, 14 nt, Human
cuuugucccauuuc

SEQ ID NO: 2500458 - RNA, 20 nt, Human
cuuugcagacaggcaagcac

SEQ ID NO: 2500459 - RNA, 22 nt, Human
cuuugcagccggcacagggucu

SEQ ID NO: 2500460 - RNA, 13 nt, Human
cuuugcaggcuca

SEQ ID NO: 2500461 - RNA, 14 nt, Human
cuuugaccugccuc

SEQ ID NO: 2500462 - RNA, 15 nt, Human
cuuugaccugccucc

SEQ ID NO: 2500463 - RNA, 13 nt, Human
cuuugaccucugc

SEQ ID NO: 2500464 - RNA, 16 nt, Human
cuuugcagacaggcaa

SEQ ID NO: 2500465 - RNA, 15 nt, Human
cuuugcagguugcuu

SEQ ID NO: 2500466 - RNA, 12 nt, Human
cuuugcaggcau

SEQ ID NO: 2500467 - RNA, 17 nt, Human
cuuugcagguugcuuug

SEQ ID NO: 2500468 - RNA, 14 nt, Human
cuuugccuguucag

SEQ ID NO: 2500469 - RNA, 11 nt, Human
cuuugccuggu

SEQ ID NO: 2500470 - RNA, 13 nt, Human
cuuugccuccccg

SEQ ID NO: 2500471 - RNA, 16 nt, Human
cuuugccuguucaguu

SEQ ID NO: 2500472 - RNA, 15 nt, Human
cuuugccuguucagu

SEQ ID NO: 2500473 - RNA, 22 nt, Human
cuuugccuguucaguuacagaa

SEQ ID NO: 2500474 - RNA, 22 nt, Human
cuuugccuuccacgcugucucc

SEQ ID NO: 2500475 - RNA, 23 nt, Human
cuuugccuuccacgcugucucca

SEQ ID NO: 2500476 - RNA, 13 nt, Human
cuuugccuugggc

SEQ ID NO: 2500477 - RNA, 16 nt, Human
cuuugccuugggcugc

SEQ ID NO: 2500478 - RNA, 18 nt, Human
cuuugccuugggcugcuc

SEQ ID NO: 2500479 - RNA, 19 nt, Human
cuuugccuugggcugcucc

SEQ ID NO: 2500480 - RNA, 22 nt, Human
cuuugccuugggcugcuccuca

SEQ ID NO: 2500481 - RNA, 17 nt, Human
cuuugaccucugcagca

SEQ ID NO: 2500482 - RNA, 18 nt, Human
cuuugaccucugcagcaa

SEQ ID NO: 2500483 - RNA, 20 nt, Human
cuuugaccucugcagcaaua

SEQ ID NO: 2500484 - RNA, 24 nt, Human
cuuugaccucugcagcaauaaagc

SEQ ID NO: 2500485 - RNA, 14 nt, Human
cuuugaccucugca

SEQ ID NO: 2500486 - RNA, 15 nt, Human
cuuugaccucugcag

SEQ ID NO: 2500487 - RNA, 15 nt, Human
cuuucuuccucugcu

SEQ ID NO: 2500488 - RNA, 14 nt, Human
cuuucuuccucugc

SEQ ID NO: 2500489 - RNA, 13 nt, Human
cuuucuuccucug

SEQ ID NO: 2500490 - RNA, 12 nt, Human
cuuucuuccucu

SEQ ID NO: 2500491 - RNA, 17 nt, Human
cuuucuggcuaugcauu

SEQ ID NO: 2500492 - RNA, 18 nt, Human
cuuucuggcuaugcauuu

SEQ ID NO: 2500493 - RNA, 19 nt, Human
cuuucuggcuaugcauuug

SEQ ID NO: 2500494 - RNA, 20 nt, Human
cuuucuggcuaugcauuuga

SEQ ID NO: 2500495 - RNA, 13 nt, Human
cuuucuggcucuc

SEQ ID NO: 2500496 - RNA, 16 nt, Human
cuuucuguaaccauaa

SEQ ID NO: 2500497 - RNA, 20 nt, Human
cuuucugggcaccggggccu

SEQ ID NO: 2500498 - RNA, 14 nt, Human
cuuucugggccaag

SEQ ID NO: 2500499 - RNA, 11 nt, Human
cuuucuuccuc

SEQ ID NO: 2500500 - RNA, 13 nt, Human
cuuucuguauaua

SEQ ID NO: 2500501 - RNA, 13 nt, Human
cuuucuguaaacu

SEQ ID NO: 2500502 - RNA, 15 nt, Human
cuuuccugaggcugg

SEQ ID NO: 2500503 - RNA, 13 nt, Human
cuuuccugaggcu

SEQ ID NO: 2500504 - RNA, 16 nt, Human
cuuucucuacuuugag

SEQ ID NO: 2500505 - RNA, 15 nt, Human
cuuuccugaauccaa

SEQ ID NO: 2500506 - RNA, 22 nt, Human
cuuuccugaauccaaacuaauc

SEQ ID NO: 2500507 - RNA, 16 nt, Human
cuuucucuccuuucuu

SEQ ID NO: 2500508 - RNA, 17 nt, Human
cuuucucuccuuucuuu

SEQ ID NO: 2500509 - RNA, 15 nt, Human
cuuucucuccuuucu

SEQ ID NO: 2500510 - RNA, 14 nt, Human
cuuucucugccagu

SEQ ID NO: 2500511 - RNA, 13 nt, Human
cuuucucugccag

SEQ ID NO: 2500512 - RNA, 18 nt, Human
cuuucucugccagugaca

SEQ ID NO: 2500513 - RNA, 16 nt, Human
cuuucucugccaguga

SEQ ID NO: 2500514 - RNA, 15 nt, Human
cuuucucuucucugu

SEQ ID NO: 2500515 - RNA, 17 nt, Human
cuuucucuucucuguuc

SEQ ID NO: 2500516 - RNA, 16 nt, Human
cuuucugcuuguguua

SEQ ID NO: 2500517 - RNA, 19 nt, Human
cuuucugcucagcuucucc

SEQ ID NO: 2500518 - RNA, 17 nt, Human
cuuucugcucagcuucu

SEQ ID NO: 2500519 - RNA, 11 nt, Human
cuuucccuccc

SEQ ID NO: 2500520 - RNA, 13 nt, Human
cuuucccucccuu

SEQ ID NO: 2500521 - RNA, 14 nt, Human
cuuucccucccuuc

SEQ ID NO: 2500522 - RNA, 16 nt, Human
cuuucccucccuuccu

SEQ ID NO: 2500523 - RNA, 12 nt, Human
cuuuccugaggc

SEQ ID NO: 2500524 - RNA, 13 nt, Human
cuuucccugccuc

SEQ ID NO: 2500525 - RNA, 13 nt, Human
cuuucccugaacu

SEQ ID NO: 2500526 - RNA, 13 nt, Human
cuuucccuccacu

SEQ ID NO: 2500527 - RNA, 17 nt, Human
cuuucccuucaguaccc

SEQ ID NO: 2500528 - RNA, 20 nt, Human
cuuucccugaacugggaccu

SEQ ID NO: 2500529 - RNA, 15 nt, Human
cuuucccuuaucaaa

SEQ ID NO: 2500530 - RNA, 19 nt, Human
cuuucccugcuuaaugaaa

SEQ ID NO: 2500531 - RNA, 18 nt, Human
cuuuccauguugcugcca

SEQ ID NO: 2500532 - RNA, 17 nt, Human
cuuuccauguugcugcc

SEQ ID NO: 2500533 - RNA, 14 nt, Human
cuuuccauguugcu

SEQ ID NO: 2500534 - RNA, 18 nt, Human
cuuuccauuggaucucau

SEQ ID NO: 2500535 - RNA, 18 nt, Human
cuuucccggacugcaagc

SEQ ID NO: 2500536 - RNA, 17 nt, Human
cuuuccccuguggggau

SEQ ID NO: 2500537 - RNA, 15 nt, Human
cuuuccccugugggg

SEQ ID NO: 2500538 - RNA, 14 nt, Human
cuuuccccuguggg

SEQ ID NO: 2500539 - RNA, 15 nt, Human
cuuuccaggaaggcu

SEQ ID NO: 2500540 - RNA, 15 nt, Human
cuuuccaucuacccu

SEQ ID NO: 2500541 - RNA, 16 nt, Human
cuuuaugguaaagaug

SEQ ID NO: 2500542 - RNA, 12 nt, Human
cuuuaugcugaa

SEQ ID NO: 2500543 - RNA, 15 nt, Human
cuuuaugcugaaaca

SEQ ID NO: 2500544 - RNA, 13 nt, Human
cuuuaugguuucu

SEQ ID NO: 2500545 - RNA, 16 nt, Human
cuuuauguaauaaugu

SEQ ID NO: 2500546 - RNA, 19 nt, Human
cuuguacauaaugcgugca

SEQ ID NO: 2500547 - RNA, 21 nt, Human
cuuguacauaaugcgugcaua

SEQ ID NO: 2500548 - RNA, 22 nt, Human
cuuguacauaaugcgugcauac

SEQ ID NO: 2500549 - RNA, 13 nt, Human
cuuguacaugugu

SEQ ID NO: 2500550 - RNA, 15 nt, Human
cuuguacauaaugcg

SEQ ID NO: 2500551 - RNA, 12 nt, Human
cuuguacauaau

SEQ ID NO: 2500552 - RNA, 18 nt, Human
cuuguaaauagcucaggu

SEQ ID NO: 2500553 - RNA, 17 nt, Human
cuuguaaauagcucagg

SEQ ID NO: 2500554 - RNA, 19 nt, Human
cuugaguuuaaauuguaau

SEQ ID NO: 2500555 - RNA, 12 nt, Human
cuugaguuuguc

SEQ ID NO: 2500556 - RNA, 23 nt, Human
cuuggggggcugaggugggagga

SEQ ID NO: 2500557 - RNA, 22 nt, Human
cuuggggggguggccgcugagu

SEQ ID NO: 2500558 - RNA, 19 nt, Human
cuuggggggguggccgcug

SEQ ID NO: 2500559 - RNA, 18 nt, Human
cuuggggggguggccgcu

SEQ ID NO: 2500560 - RNA, 16 nt, Human
cuuggggggguggccg

SEQ ID NO: 2500561 - RNA, 14 nt, Human
cuuggggggguggc

SEQ ID NO: 2500562 - RNA, 13 nt, Human
cuugaguuugucg

SEQ ID NO: 2500563 - RNA, 23 nt, Human
cuugggggguuuuuacuccagug

SEQ ID NO: 2500564 - RNA, 22 nt, Human
cuugggggguuuuuacuccagu

SEQ ID NO: 2500565 - RNA, 16 nt, Human
cuuguaaauagcucag

SEQ ID NO: 2500566 - RNA, 22 nt, Human
cuugucaauauuuaaacauggu

SEQ ID NO: 2500567 - RNA, 20 nt, Human
cuuguccaacccgaggcccg

SEQ ID NO: 2500568 - RNA, 15 nt, Human
cuuguccacccaccu

SEQ ID NO: 2500569 - RNA, 14 nt, Human
cuuguccagcgccu

SEQ ID NO: 2500570 - RNA, 18 nt, Human
cuuguccagcgccuagug

SEQ ID NO: 2500571 - RNA, 19 nt, Human
cuugucaauauuuaaacau

SEQ ID NO: 2500572 - RNA, 15 nt, Human
cuugucaauauuuaa

SEQ ID NO: 2500573 - RNA, 14 nt, Human
cuuguguauccauu

SEQ ID NO: 2500574 - RNA, 14 nt, Human
cuugugguuuaugu

SEQ ID NO: 2500575 - RNA, 12 nt, Human
cuuguccagcug

SEQ ID NO: 2500576 - RNA, 13 nt, Human
cuuguccagcuga

SEQ ID NO: 2500577 - RNA, 18 nt, Human
cuugucccacuaucuggg

SEQ ID NO: 2500578 - RNA, 16 nt, Human
cuugucccacucaagc

SEQ ID NO: 2500579 - RNA, 18 nt, Human
cuugucccacucaagcca

SEQ ID NO: 2500580 - RNA, 19 nt, Human
cuugucccacucaagccaa

SEQ ID NO: 2500581 - RNA, 19 nt, Human
cuugucccagaggcugccc

SEQ ID NO: 2500582 - RNA, 14 nt, Human
cuuguccccaaauc

SEQ ID NO: 2500583 - RNA, 15 nt, Human
cuugucccagaggcu

SEQ ID NO: 2500584 - RNA, 21 nt, Human
cuugucccacucaagccaagc

SEQ ID NO: 2500585 - RNA, 22 nt, Human
cuuguacauguguagccugugc

SEQ ID NO: 2500586 - RNA, 20 nt, Human
cuuguacauguguagccugu

SEQ ID NO: 2500587 - RNA, 19 nt, Human
cuuguacauguguagccug

SEQ ID NO: 2500588 - RNA, 14 nt, Human
cuuguacaugugua

SEQ ID NO: 2500589 - RNA, 23 nt, Human
cuuguacauguguagccugugca

SEQ ID NO: 2500590 - RNA, 17 nt, Human
cuuguagggaugccuuu

SEQ ID NO: 2500591 - RNA, 21 nt, Human
cuuguaguuuaccucuuuaaa

SEQ ID NO: 2500592 - RNA, 15 nt, Human
cuugucaaagaaggu

SEQ ID NO: 2500593 - RNA, 19 nt, Human
cuuguauauuuguacaaaa

SEQ ID NO: 2500594 - RNA, 14 nt, Human
cuugucaaagaagg

SEQ ID NO: 2500595 - RNA, 18 nt, Human
cuuguauauuuguacaaa

SEQ ID NO: 2500596 - RNA, 17 nt, Human
cuuguauauuuguacaa

SEQ ID NO: 2500597 - RNA, 17 nt, Human
cuuguauauuuuaagaa

SEQ ID NO: 2500598 - RNA, 23 nt, Human
cuugucaauaaaauccauacauu

SEQ ID NO: 2500599 - RNA, 16 nt, Human
cuuguauauuuguaca

SEQ ID NO: 2500600 - RNA, 14 nt, Human
cuuguauauuugua

SEQ ID NO: 2500601 - RNA, 12 nt, Human
cuuguauauuug

SEQ ID NO: 2500602 - RNA, 11 nt, Human
cuuguauauuu

SEQ ID NO: 2500603 - RNA, 17 nt, Human
cuuguauaucuuguuuu

SEQ ID NO: 2500604 - RNA, 20 nt, Human
cuuguauauacgcaucuaua

SEQ ID NO: 2500605 - RNA, 17 nt, Human
cuuguauaguguaaaau

SEQ ID NO: 2500606 - RNA, 16 nt, Human
cuuguauaguguaaaa

SEQ ID NO: 2500607 - RNA, 15 nt, Human
cuuguauaguguaaa

SEQ ID NO: 2500608 - RNA, 22 nt, Human
cuuguauagguuuuaaagaccu

SEQ ID NO: 2500609 - RNA, 21 nt, Human
cuuuaucuugaauaauguaag

SEQ ID NO: 2500610 - RNA, 18 nt, Human
cuuuaucuugaauaaugu

SEQ ID NO: 2500611 - RNA, 16 nt, Human
cuuuauccucuuuaga

SEQ ID NO: 2500612 - RNA, 14 nt, Human
cuuuauccucuuua

SEQ ID NO: 2500613 - RNA, 22 nt, Human
cuuuaucuaauaccucugugug

SEQ ID NO: 2500614 - RNA, 21 nt, Human
cuuuaucuaauaccucugugu

SEQ ID NO: 2500615 - RNA, 12 nt, Human
cuuuauauuuag

SEQ ID NO: 2500616 - RNA, 13 nt, Human
cuuuauauuuagu

SEQ ID NO: 2500617 - RNA, 19 nt, Human
cuuuaucacauuauuugca

SEQ ID NO: 2500618 - RNA, 23 nt, Human
cuuuaucuugaauaauguaagac

SEQ ID NO: 2500619 - RNA, 18 nt, Human
cuuuaucuguucuugcua

SEQ ID NO: 2500620 - RNA, 13 nt, Human
cuuuaucuguucu

SEQ ID NO: 2500621 - RNA, 22 nt, Human
cuuuaugaaugaaaaaacaguc

SEQ ID NO: 2500622 - RNA, 15 nt, Human
cuuuaugcacaaaau

SEQ ID NO: 2500623 - RNA, 23 nt, Human
cuuuaugacuguuuuuguagugg

SEQ ID NO: 2500624 - RNA, 14 nt, Human
cuuuaucuugacau

SEQ ID NO: 2500625 - RNA, 22 nt, Human
cuuuaugccggaugugcuuuuc

SEQ ID NO: 2500626 - RNA, 20 nt, Human
cuuuaugccggaugugcuuu

SEQ ID NO: 2500627 - RNA, 19 nt, Human
cuuuaugccggaugugcuu

SEQ ID NO: 2500628 - RNA, 15 nt, Human
cuuuagcgcccaguu

SEQ ID NO: 2500629 - RNA, 14 nt, Human
cuuuagcgcccagu

SEQ ID NO: 2500630 - RNA, 13 nt, Human
cuuuauaauucua

SEQ ID NO: 2500631 - RNA, 19 nt, Human
cuuuauaauucuacuuuga

SEQ ID NO: 2500632 - RNA, 22 nt, Human
cuuuauaugaagaaaaucacuu

SEQ ID NO: 2500633 - RNA, 20 nt, Human
cuuuauauggccucaagauc

SEQ ID NO: 2500634 - RNA, 13 nt, Human
cuuuauaugaaga

SEQ ID NO: 2500635 - RNA, 19 nt, Human
cuuuauacguguagcuaua

SEQ ID NO: 2500636 - RNA, 18 nt, Human
cuuuauacaacagugcua

SEQ ID NO: 2500637 - RNA, 17 nt, Human
cuuuauacaacagugcu

SEQ ID NO: 2500638 - RNA, 15 nt, Human
cuuuauacaacagug

SEQ ID NO: 2500639 - RNA, 13 nt, Human
cuuuauacaacag

SEQ ID NO: 2500640 - RNA, 23 nt, Human
cuuuauacaacagugcuaaaaau

SEQ ID NO: 2500641 - RNA, 20 nt, Human
cuuuauacaacagugcuaaa

SEQ ID NO: 2500642 - RNA, 18 nt, Human
cuuuauacguguagcuau

SEQ ID NO: 2500643 - RNA, 23 nt, Human
cuuguguauccauuaucaugugu

SEQ ID NO: 2500644 - RNA, 22 nt, Human
cuuguguauccauuaucaugug

SEQ ID NO: 2500645 - RNA, 16 nt, Human
cuuguguauccauuau

SEQ ID NO: 2500646 - RNA, 15 nt, Human
cuuguguauccauua

SEQ ID NO: 2500647 - RNA, 14 nt, Human
cuugugucccauga

SEQ ID NO: 2500648 - RNA, 16 nt, Human
cuugugucaaacagua

SEQ ID NO: 2500649 - RNA, 15 nt, Human
cuugugucuacagag

SEQ ID NO: 2500650 - RNA, 22 nt, Human
cuugugucccuccugggaucug

SEQ ID NO: 2500651 - RNA, 20 nt, Human
cuuguucaaaauauguucuu

SEQ ID NO: 2500652 - RNA, 15 nt, Human
cuuguuauuuauaac

SEQ ID NO: 2500653 - RNA, 13 nt, Human
cuuguuauuuaua

SEQ ID NO: 2500654 - RNA, 16 nt, Human
cuuguucacacucuca

SEQ ID NO: 2500655 - RNA, 13 nt, Human
cuuguuccagcuc

SEQ ID NO: 2500656 - RNA, 21 nt, Human
cuuguucgugggucaucggga

SEQ ID NO: 2500657 - RNA, 12 nt, Human
cuuguuccuaga

SEQ ID NO: 2500658 - RNA, 14 nt, Human
cuuguucccucucc

SEQ ID NO: 2500659 - RNA, 16 nt, Human
cuuguuccagcucuuu

SEQ ID NO: 2500660 - RNA, 21 nt, Human
cuuguuccccacugacagccu

SEQ ID NO: 2500661 - RNA, 21 nt, Human
cuuguucucuaaguuccacug

SEQ ID NO: 2500662 - RNA, 13 nt, Human
cuuguucuacuca

SEQ ID NO: 2500663 - RNA, 22 nt, Human
cuuguucuacucauauauaucu

SEQ ID NO: 2500664 - RNA, 14 nt, Human
cuuuagaugcugau

SEQ ID NO: 2500665 - RNA, 13 nt, Human
cuuuagaugcuga

SEQ ID NO: 2500666 - RNA, 12 nt, Human
cuuuagaugcug

SEQ ID NO: 2500667 - RNA, 16 nt, Human
cuuuagccaaacccuu

SEQ ID NO: 2500668 - RNA, 17 nt, Human
cuuuagaugcugaugau

SEQ ID NO: 2500669 - RNA, 15 nt, Human
cuuuagccaaacccu

SEQ ID NO: 2500670 - RNA, 16 nt, Human
cuuuaccuuuuuucuu

SEQ ID NO: 2500671 - RNA, 18 nt, Human
cuuuacuaagaugacauu

SEQ ID NO: 2500672 - RNA, 15 nt, Human
cuuuacugucaaaau

SEQ ID NO: 2500673 - RNA, 22 nt, Human
cuuuacuaagaugacauugcua

SEQ ID NO: 2500674 - RNA, 19 nt, Human
cuuuacugucaaaauaauu

SEQ ID NO: 2500675 - RNA, 20 nt, Human
cuuuagaguuagacuguugg

SEQ ID NO: 2500676 - RNA, 22 nt, Human
cuuuaccuuuuuuauacauaaa

SEQ ID NO: 2500677 - RNA, 23 nt, Human
cuuuaaaauuuuuuuagaaagca

SEQ ID NO: 2500678 - RNA, 21 nt, Human
cuuuaaaauuuuuuuagaaag

SEQ ID NO: 2500679 - RNA, 18 nt, Human
cuuuaaaauuuuuuuaga

SEQ ID NO: 2500680 - RNA, 13 nt, Human
cuuuacuauggcc

SEQ ID NO: 2500681 - RNA, 21 nt, Human
cuuuaaacauugguucuugua

SEQ ID NO: 2500682 - RNA, 18 nt, Human
cuuuacggacacccccuc

SEQ ID NO: 2500683 - RNA, 21 nt, Human
cuucugggcaucuguucuggu

SEQ ID NO: 2500684 - RNA, 21 nt, Human
cuucugggcuucaucuggcaa

SEQ ID NO: 2500685 - RNA, 22 nt, Human
cuucugggcuucaucuggcaac

SEQ ID NO: 2500686 - RNA, 22 nt, Human
cuucugggagggcagcagggcu

SEQ ID NO: 2500687 - RNA, 18 nt, Human
cuucugcuuaggagagac

SEQ ID NO: 2500688 - RNA, 19 nt, Human
cuucugggagggcagcagg

SEQ ID NO: 2500689 - RNA, 20 nt, Human
cuucugggcaucuguucugg

SEQ ID NO: 2500690 - RNA, 19 nt, Human
cuucugggcaucuguucug

SEQ ID NO: 2500691 - RNA, 23 nt, Human
cuucugggagggcagcagggcua

SEQ ID NO: 2500692 - RNA, 15 nt, Human
cuucuggguggggca

SEQ ID NO: 2500693 - RNA, 18 nt, Human
cuucuggugaccuuccaa

SEQ ID NO: 2500694 - RNA, 20 nt, Human
cuucuggugaccuuccaaga

SEQ ID NO: 2500695 - RNA, 21 nt, Human
cuucuggugaccuuccaagag

SEQ ID NO: 2500696 - RNA, 14 nt, Human
cuucugguugaugc

SEQ ID NO: 2500697 - RNA, 16 nt, Human
cuucuggguuccuucc

SEQ ID NO: 2500698 - RNA, 17 nt, Human
cuucuggguuccuuccu

SEQ ID NO: 2500699 - RNA, 18 nt, Human
cuucugguacucuccuag

SEQ ID NO: 2500700 - RNA, 17 nt, Human
cuucugguacucuccua

SEQ ID NO: 2500701 - RNA, 16 nt, Human
cuucugguacucuccu

SEQ ID NO: 2500702 - RNA, 15 nt, Human
cuucugguacucucc

SEQ ID NO: 2500703 - RNA, 23 nt, Human
cuucuggguuccuuccucugagc

SEQ ID NO: 2500704 - RNA, 16 nt, Human
cuucugccuggagacu

SEQ ID NO: 2500705 - RNA, 15 nt, Human
cuucugccuggagac

SEQ ID NO: 2500706 - RNA, 14 nt, Human
cuucugccuggaga

SEQ ID NO: 2500707 - RNA, 13 nt, Human
cuucugccuggag

SEQ ID NO: 2500708 - RNA, 18 nt, Human
cuucugccuuagucucag

SEQ ID NO: 2500709 - RNA, 18 nt, Human
cuucugccuguggaacug

SEQ ID NO: 2500710 - RNA, 15 nt, Human
cuucugcuccacccu

SEQ ID NO: 2500711 - RNA, 17 nt, Human
cuucugcuccacccuug

SEQ ID NO: 2500712 - RNA, 15 nt, Human
cuucugccugagcuu

SEQ ID NO: 2500713 - RNA, 14 nt, Human
cuucugccugagcu

SEQ ID NO: 2500714 - RNA, 12 nt, Human
cuucugccugca

SEQ ID NO: 2500715 - RNA, 15 nt, Human
cuucugcccuugcca

SEQ ID NO: 2500716 - RNA, 17 nt, Human
cuucugccggcccuggg

SEQ ID NO: 2500717 - RNA, 18 nt, Human
cuucugccggcccugggg

SEQ ID NO: 2500718 - RNA, 19 nt, Human
cuucugccggcccuggggc

SEQ ID NO: 2500719 - RNA, 23 nt, Human
cuucugcccaauuggaggaaagc

SEQ ID NO: 2500720 - RNA, 17 nt, Human
cuucucugaagggaggu

SEQ ID NO: 2500721 - RNA, 21 nt, Human
cuucucugacuucugccugga

SEQ ID NO: 2500722 - RNA, 16 nt, Human
cuucugcuuaggagag

SEQ ID NO: 2500723 - RNA, 15 nt, Human
cuucugcuuaggaga

SEQ ID NO: 2500724 - RNA, 19 nt, Human
cuucugcugggcuggggcc

SEQ ID NO: 2500725 - RNA, 13 nt, Human
cuucugcuucagc

SEQ ID NO: 2500726 - RNA, 19 nt, Human
cuucugcuccacccuuggc

SEQ ID NO: 2500727 - RNA, 21 nt, Human
cuucugcuccacccuuggccu

SEQ ID NO: 2500728 - RNA, 23 nt, Human
cuucugcuccacccuuggccugu

SEQ ID NO: 2500729 - RNA, 14 nt, Human
cuucugccuguuau

SEQ ID NO: 2500730 - RNA, 15 nt, Human
cuucugcuggauaaa

SEQ ID NO: 2500731 - RNA, 17 nt, Human
cuucugcugggcugggg

SEQ ID NO: 2500732 - RNA, 16 nt, Human
cuucugcugggcuggg

SEQ ID NO: 2500733 - RNA, 15 nt, Human
cuucugcugggcugg

SEQ ID NO: 2500734 - RNA, 14 nt, Human
cuucugcugggcug

SEQ ID NO: 2500735 - RNA, 13 nt, Human
cuucugcugggcu

SEQ ID NO: 2500736 - RNA, 11 nt, Human
cuucugcuggg

SEQ ID NO: 2500737 - RNA, 17 nt, Human
cuucugcuggauaaaau

SEQ ID NO: 2500738 - RNA, 19 nt, Human
cuucugcuggauaaaauga

SEQ ID NO: 2500739 - RNA, 21 nt, Human
cuucugucuucacaacagauu

SEQ ID NO: 2500740 - RNA, 22 nt, Human
cuucugucuucacaacagauua

SEQ ID NO: 2500741 - RNA, 18 nt, Human
cuucugucuucacaacag

SEQ ID NO: 2500742 - RNA, 21 nt, Human
cuucuguccuacucuguguca

SEQ ID NO: 2500743 - RNA, 19 nt, Human
cuucuguccuacucugugu

SEQ ID NO: 2500744 - RNA, 18 nt, Human
cuucuguccuacucugug

SEQ ID NO: 2500745 - RNA, 17 nt, Human
cuucuguccuacucugu

SEQ ID NO: 2500746 - RNA, 16 nt, Human
cuucuguccuacucug

SEQ ID NO: 2500747 - RNA, 20 nt, Human
cuucuguacgucugacaggc

SEQ ID NO: 2500748 - RNA, 18 nt, Human
cuucuguacgucugacag

SEQ ID NO: 2500749 - RNA, 15 nt, Human
cuucuguacgucuga

SEQ ID NO: 2500750 - RNA, 14 nt, Human
cuucuguacgucug

SEQ ID NO: 2500751 - RNA, 21 nt, Human
cuucuguacgucugacaggca

SEQ ID NO: 2500752 - RNA, 20 nt, Human
cuucugguacucuccuagag

SEQ ID NO: 2500753 - RNA, 19 nt, Human
cuucugguacucuccuaga

SEQ ID NO: 2500754 - RNA, 18 nt, Human
cuucuguaggaauucuuu

SEQ ID NO: 2500755 - RNA, 11 nt, Human
cuucuguaguu

SEQ ID NO: 2500756 - RNA, 14 nt, Human
cuucugucccucac

SEQ ID NO: 2500757 - RNA, 15 nt, Human
cuucugucccucaca

SEQ ID NO: 2500758 - RNA, 20 nt, Human
cuucuguauuuuuuuuucua

SEQ ID NO: 2500759 - RNA, 19 nt, Human
cuucuguauucacuuauau

SEQ ID NO: 2500760 - RNA, 22 nt, Human
cuucuguauuuuuuuuucuaag

SEQ ID NO: 2500761 - RNA, 15 nt, Human
cuucuguauucacuu

SEQ ID NO: 2500762 - RNA, 21 nt, Human
cuucuguaguuuuaucacaug

SEQ ID NO: 2500763 - RNA, 17 nt, Human
cuucuguaguuuuauca

SEQ ID NO: 2500764 - RNA, 14 nt, Human
cuucuguaguuuua

SEQ ID NO: 2500765 - RNA, 18 nt, Human
cuucuguauacuguggag

SEQ ID NO: 2500766 - RNA, 24 nt, Human
cuucuccgccagccuccucuggac

SEQ ID NO: 2500767 - RNA, 23 nt, Human
cuucuccgccagccuccucugga

SEQ ID NO: 2500768 - RNA, 21 nt, Human
cuucuccgccagccuccucug

SEQ ID NO: 2500769 - RNA, 19 nt, Human
cuucuccgccagccuccuc

SEQ ID NO: 2500770 - RNA, 18 nt, Human
cuucuccgccagccuccu

SEQ ID NO: 2500771 - RNA, 17 nt, Human
cuucuccgccagccucc

SEQ ID NO: 2500772 - RNA, 16 nt, Human
cuucuccgccagccuc

SEQ ID NO: 2500773 - RNA, 15 nt, Human
cuucuccgccagccu

SEQ ID NO: 2500774 - RNA, 14 nt, Human
cuucuccgccagcc

SEQ ID NO: 2500775 - RNA, 13 nt, Human
cuucuccgccagc

SEQ ID NO: 2500776 - RNA, 12 nt, Human
cuucuccgccag

SEQ ID NO: 2500777 - RNA, 22 nt, Human
cuucucccucauuucaggagca

SEQ ID NO: 2500778 - RNA, 22 nt, Human
cuucucccccccggggcugggu

SEQ ID NO: 2500779 - RNA, 20 nt, Human
cuucucccccccggggcugg

SEQ ID NO: 2500780 - RNA, 18 nt, Human
cuucucccccccggggcu

SEQ ID NO: 2500781 - RNA, 15 nt, Human
cuucuccagccuaga

SEQ ID NO: 2500782 - RNA, 13 nt, Human
cuucuccaggcug

SEQ ID NO: 2500783 - RNA, 17 nt, Human
cuucuccacuggaugga

SEQ ID NO: 2500784 - RNA, 23 nt, Human
cuucuccagacaaaccagaagca

SEQ ID NO: 2500785 - RNA, 12 nt, Human
cuucuccagccu

SEQ ID NO: 2500786 - RNA, 17 nt, Human
cuucuccagacaaacca

SEQ ID NO: 2500787 - RNA, 12 nt, Human
cuucuccaggcu

SEQ ID NO: 2500788 - RNA, 20 nt, Human
cuuccuggggcaucuggcga

SEQ ID NO: 2500789 - RNA, 23 nt, Human
cuuccuggggcaucuggcgaauc

SEQ ID NO: 2500790 - RNA, 22 nt, Human
cuuccuguaacacaagccacag

SEQ ID NO: 2500791 - RNA, 23 nt, Human
cuuccuguaacacaagccacaga

SEQ ID NO: 2500792 - RNA, 15 nt, Human
cuuccuguccagaga

SEQ ID NO: 2500793 - RNA, 16 nt, Human
cuuccuguccagagag

SEQ ID NO: 2500794 - RNA, 22 nt, Human
cuuccuggagcccagaggaggg

SEQ ID NO: 2500795 - RNA, 17 nt, Human
cuuccuggagcccagag

SEQ ID NO: 2500796 - RNA, 16 nt, Human
cuuccuggagcccaga

SEQ ID NO: 2500797 - RNA, 20 nt, Human
cuucuccacuuucuagccag

SEQ ID NO: 2500798 - RNA, 11 nt, Human
cuucuccacuu

SEQ ID NO: 2500799 - RNA, 15 nt, Human
cuucuccacuggaug

SEQ ID NO: 2500800 - RNA, 14 nt, Human
cuucuccacuggau

SEQ ID NO: 2500801 - RNA, 13 nt, Human
cuucuccacugga

SEQ ID NO: 2500802 - RNA, 16 nt, Human
cuuccuguccagcucc

SEQ ID NO: 2500803 - RNA, 17 nt, Human
cuuccuguccagagaga

SEQ ID NO: 2500804 - RNA, 19 nt, Human
cuuccuguccagagagaga

SEQ ID NO: 2500805 - RNA, 19 nt, Human
cuucucuccagccccugga

SEQ ID NO: 2500806 - RNA, 17 nt, Human
cuucucuccagccccug

SEQ ID NO: 2500807 - RNA, 15 nt, Human
cuucucuccagcccc

SEQ ID NO: 2500808 - RNA, 13 nt, Human
cuucucuccagcc

SEQ ID NO: 2500809 - RNA, 12 nt, Human
cuucucuccagc

SEQ ID NO: 2500810 - RNA, 19 nt, Human
cuucuccuucaccuuuguc

SEQ ID NO: 2500811 - RNA, 23 nt, Human
cuucuccucuuguaaauaaagcc

SEQ ID NO: 2500812 - RNA, 18 nt, Human
cuucuccucuuguaaaua

SEQ ID NO: 2500813 - RNA, 17 nt, Human
cuucuccucuuguaaau

SEQ ID NO: 2500814 - RNA, 15 nt, Human
cuucuccucuuguaa

SEQ ID NO: 2500815 - RNA, 16 nt, Human
cuucuccuauguguaa

SEQ ID NO: 2500816 - RNA, 15 nt, Human
cuucuccuaugugua

SEQ ID NO: 2500817 - RNA, 14 nt, Human
cuucuccuaugugu

SEQ ID NO: 2500818 - RNA, 18 nt, Human
cuucuccuccccacccgc

SEQ ID NO: 2500819 - RNA, 22 nt, Human
cuucuccuauguguaaggugaa

SEQ ID NO: 2500820 - RNA, 14 nt, Human
cuucuccucuugua

SEQ ID NO: 2500821 - RNA, 20 nt, Human
cuucucugacuucugccugg

SEQ ID NO: 2500822 - RNA, 17 nt, Human
cuucucugacuucugcc

SEQ ID NO: 2500823 - RNA, 20 nt, Human
cuucugccauuucugagauc

SEQ ID NO: 2500824 - RNA, 16 nt, Human
cuucucugacuucugc

SEQ ID NO: 2500825 - RNA, 15 nt, Human
cuucucugacuucug

SEQ ID NO: 2500826 - RNA, 14 nt, Human
cuucucugacuucu

SEQ ID NO: 2500827 - RNA, 12 nt, Human
cuucucugacuu

SEQ ID NO: 2500828 - RNA, 16 nt, Human
cuucucugaagggagg

SEQ ID NO: 2500829 - RNA, 13 nt, Human
cuucucugaaggg

SEQ ID NO: 2500830 - RNA, 12 nt, Human
cuucucugaagg

SEQ ID NO: 2500831 - RNA, 11 nt, Human
cuucucugaag

SEQ ID NO: 2500832 - RNA, 13 nt, Human
cuucucucugugg

SEQ ID NO: 2500833 - RNA, 13 nt, Human
cuucucugaagga

SEQ ID NO: 2500834 - RNA, 16 nt, Human
cuucucucugugggau

SEQ ID NO: 2500835 - RNA, 15 nt, Human
cuucucucucaccag

SEQ ID NO: 2500836 - RNA, 13 nt, Human
cuucucucucacc

SEQ ID NO: 2500837 - RNA, 15 nt, Human
cuucucuccucccca

SEQ ID NO: 2500838 - RNA, 13 nt, Human
cuucucuccuccc

SEQ ID NO: 2500839 - RNA, 18 nt, Human
cuucucucucuaaaauga

SEQ ID NO: 2500840 - RNA, 19 nt, Human
cuucuccugacccaguccc

SEQ ID NO: 2500841 - RNA, 15 nt, Human
cuucuugccucugug

SEQ ID NO: 2500842 - RNA, 13 nt, Human
cuucuugccucug

SEQ ID NO: 2500843 - RNA, 21 nt, Human
cuucugugggugacccagguc

SEQ ID NO: 2500844 - RNA, 14 nt, Human
cuucuguucugccu

SEQ ID NO: 2500845 - RNA, 18 nt, Human
cuucuugccucugugcug

SEQ ID NO: 2500846 - RNA, 17 nt, Human
cuucuugccucugugcu

SEQ ID NO: 2500847 - RNA, 16 nt, Human
cuucuugccucugugc

SEQ ID NO: 2500848 - RNA, 13 nt, Human
cuucuuguucccc

SEQ ID NO: 2500849 - RNA, 20 nt, Human
cuucuuggucuuauuuauua

SEQ ID NO: 2500850 - RNA, 23 nt, Human
cuucuuggugcuuacacaucuca

SEQ ID NO: 2500851 - RNA, 16 nt, Human
cuucuuggucuuauuu

SEQ ID NO: 2500852 - RNA, 14 nt, Human
cuucugugaaagua

SEQ ID NO: 2500853 - RNA, 17 nt, Human
cuucuguccugguguca

SEQ ID NO: 2500854 - RNA, 19 nt, Human
cuucugugagacccccaca

SEQ ID NO: 2500855 - RNA, 22 nt, Human
cuucugugagacccccacaccu

SEQ ID NO: 2500856 - RNA, 20 nt, Human
cuucugugagacccccacac

SEQ ID NO: 2500857 - RNA, 21 nt, Human
cuucugugagacccccacacc

SEQ ID NO: 2500858 - RNA, 13 nt, Human
cuucuguggcuca

SEQ ID NO: 2500859 - RNA, 21 nt, Human
cuucuguggguuucuaaagcu

SEQ ID NO: 2500860 - RNA, 14 nt, Human
cuucuguggguuuc

SEQ ID NO: 2500861 - RNA, 13 nt, Human
cuucuguggguuu

SEQ ID NO: 2500862 - RNA, 22 nt, Human
cuucuguggcucacagaacccu

SEQ ID NO: 2500863 - RNA, 15 nt, Human
cuucuguggcucaca

SEQ ID NO: 2500864 - RNA, 16 nt, Human
cuugaaaauaagaaua

SEQ ID NO: 2500865 - RNA, 15 nt, Human
cuugaaaaggguguu

SEQ ID NO: 2500866 - RNA, 22 nt, Human
cuugaaaaaugugcaaaacagc

SEQ ID NO: 2500867 - RNA, 21 nt, Human
cuugaaaaaugugcaaaacag

SEQ ID NO: 2500868 - RNA, 23 nt, Human
cuugaaaacacuguucucugccc

SEQ ID NO: 2500869 - RNA, 18 nt, Human
cuugaaaaaugugcaaaa

SEQ ID NO: 2500870 - RNA, 13 nt, Human
cuugaaaaaugug

SEQ ID NO: 2500871 - RNA, 12 nt, Human
cuugaaaaaugu

SEQ ID NO: 2500872 - RNA, 14 nt, Human
cuugaaaacacugu

SEQ ID NO: 2500873 - RNA, 18 nt, Human
cuugaaaaaugcauguug

SEQ ID NO: 2500874 - RNA, 12 nt, Human
cuugaaaaaugc

SEQ ID NO: 2500875 - RNA, 17 nt, Human
cuucuuuuuuugugaug

SEQ ID NO: 2500876 - RNA, 17 nt, Human
cuucuuuaauugaucua

SEQ ID NO: 2500877 - RNA, 16 nt, Human
cuucuuuuuuuucauu

SEQ ID NO: 2500878 - RNA, 13 nt, Human
cuugaaaauuaac

SEQ ID NO: 2500879 - RNA, 12 nt, Human
cuugaaaauuaa

SEQ ID NO: 2500880 - RNA, 18 nt, Human
cuugaaaauuaacaugaa

SEQ ID NO: 2500881 - RNA, 20 nt, Human
cuugaaaauuuuauuaaaaa

SEQ ID NO: 2500882 - RNA, 22 nt, Human
cuugaaaauaagaauagaaaua

SEQ ID NO: 2500883 - RNA, 23 nt, Human
cuugaaaauauuuuuuauauaua

SEQ ID NO: 2500884 - RNA, 13 nt, Human
cuugaaagaaaau

SEQ ID NO: 2500885 - RNA, 13 nt, Human
cuugaaagcugug

SEQ ID NO: 2500886 - RNA, 17 nt, Human
cuugaaagcauccaugu

SEQ ID NO: 2500887 - RNA, 18 nt, Human
cuugaaagcauccaugug

SEQ ID NO: 2500888 - RNA, 16 nt, Human
cuugaaagcauccaug

SEQ ID NO: 2500889 - RNA, 15 nt, Human
cuugaaauuuuaacc

SEQ ID NO: 2500890 - RNA, 16 nt, Human
cuugaaauuuuaaccu

SEQ ID NO: 2500891 - RNA, 17 nt, Human
cuugaaauaccagugaa

SEQ ID NO: 2500892 - RNA, 22 nt, Human
cuugaaauaccagugaaccaaa

SEQ ID NO: 2500893 - RNA, 14 nt, Human
cuugaaauuuuaac

SEQ ID NO: 2500894 - RNA, 20 nt, Human
cuugaaagcauccaugugug

SEQ ID NO: 2500895 - RNA, 17 nt, Human
cuugaaauuuuaaccua

SEQ ID NO: 2500896 - RNA, 23 nt, Human
cuugaacacucaugcugaaagcc

SEQ ID NO: 2500897 - RNA, 20 nt, Human
cuugaacacucaugcugaaa

SEQ ID NO: 2500898 - RNA, 19 nt, Human
cuugaacacucaugcugaa

SEQ ID NO: 2500899 - RNA, 13 nt, Human
cuugaacacuggg

SEQ ID NO: 2500900 - RNA, 15 nt, Human
cuugaacacuggggg

SEQ ID NO: 2500901 - RNA, 18 nt, Human
cuugaacauguuuuguau

SEQ ID NO: 2500902 - RNA, 16 nt, Human
cuugaacacuggggga

SEQ ID NO: 2500903 - RNA, 17 nt, Human
cuugaacuuugaccucu

SEQ ID NO: 2500904 - RNA, 21 nt, Human
cuugaacuuugaccucugcag

SEQ ID NO: 2500905 - RNA, 22 nt, Human
cuugaagaacugcaggcccugg

SEQ ID NO: 2500906 - RNA, 20 nt, Human
cuugaagaacugcaggcccu

SEQ ID NO: 2500907 - RNA, 18 nt, Human
cuugaagaacugcaggcc

SEQ ID NO: 2500908 - RNA, 17 nt, Human
cuugaagaacugcaggc

SEQ ID NO: 2500909 - RNA, 12 nt, Human
cuugaagaacug

SEQ ID NO: 2500910 - RNA, 18 nt, Human
cuugaacuccugaccuca

SEQ ID NO: 2500911 - RNA, 13 nt, Human
cuugaacuccuga

SEQ ID NO: 2500912 - RNA, 16 nt, Human
cuugaacuccugaccu

SEQ ID NO: 2500913 - RNA, 13 nt, Human
cuugaacuccugg

SEQ ID NO: 2500914 - RNA, 15 nt, Human
cuugaaccacuuccc

SEQ ID NO: 2500915 - RNA, 14 nt, Human
cuugaaccacuucc

SEQ ID NO: 2500916 - RNA, 15 nt, Human
cuugaacccaggaga

SEQ ID NO: 2500917 - RNA, 23 nt, Human
cuugaccauucuccaccugccag

SEQ ID NO: 2500918 - RNA, 22 nt, Human
cuugaccauucuccaccugcca

SEQ ID NO: 2500919 - RNA, 17 nt, Human
cuugaccgugaggccag

SEQ ID NO: 2500920 - RNA, 13 nt, Human
cuugacccaucuc

SEQ ID NO: 2500921 - RNA, 16 nt, Human
cuugacccaucucccc

SEQ ID NO: 2500922 - RNA, 20 nt, Human
cuugaccgugaggccagaga

SEQ ID NO: 2500923 - RNA, 18 nt, Human
cuugaccgugaggccaga

SEQ ID NO: 2500924 - RNA, 21 nt, Human
cuugaccgugaggccagagac

SEQ ID NO: 2500925 - RNA, 13 nt, Human
cuugaccucaggu

SEQ ID NO: 2500926 - RNA, 20 nt, Human
cuugaccugaggcugugguc

SEQ ID NO: 2500927 - RNA, 17 nt, Human
cuugaccugaggcugug

SEQ ID NO: 2500928 - RNA, 23 nt, Human
cuugaccugaggcuguggucaca

SEQ ID NO: 2500929 - RNA, 14 nt, Human
cuugaccugaggcu

SEQ ID NO: 2500930 - RNA, 12 nt, Human
cuugaccuccua

SEQ ID NO: 2500931 - RNA, 16 nt, Human
cuugagccugggaggu

SEQ ID NO: 2500932 - RNA, 17 nt, Human
cuugagccuugaacuuu

SEQ ID NO: 2500933 - RNA, 18 nt, Human
cuugagccuugaacuuug

SEQ ID NO: 2500934 - RNA, 15 nt, Human
cuugagccuugaacu

SEQ ID NO: 2500935 - RNA, 20 nt, Human
cuugacuuuagucugcaaaa

SEQ ID NO: 2500936 - RNA, 22 nt, Human
cuugacuugcaauuucuaccua

SEQ ID NO: 2500937 - RNA, 13 nt, Human
cuugacuccuugu

SEQ ID NO: 2500938 - RNA, 20 nt, Human
cuugacuaaaaaaaaaagaa

SEQ ID NO: 2500939 - RNA, 14 nt, Human
cuugagcuccccaa

SEQ ID NO: 2500940 - RNA, 10 nt, Human
cuugagcuga

SEQ ID NO: 2500941 - RNA, 16 nt, Human
cuugagcugagaugga

SEQ ID NO: 2500942 - RNA, 13 nt, Human
cuugagcugagau

SEQ ID NO: 2500943 - RNA, 12 nt, Human
cuugagcuuggc

SEQ ID NO: 2500944 - RNA, 20 nt, Human
cuugagcuuggcagcugaac

SEQ ID NO: 2500945 - RNA, 21 nt, Human
cuugagcuuggcagcugaacu

SEQ ID NO: 2500946 - RNA, 13 nt, Human
cuugaggaaacaa

SEQ ID NO: 2500947 - RNA, 18 nt, Human
cuugaggaaacaacagcu

SEQ ID NO: 2500948 - RNA, 20 nt, Human
cuugaggaaacaacagcuuu

SEQ ID NO: 2500949 - RNA, 20 nt, Human
cuugaggguugggcuggugu

SEQ ID NO: 2500950 - RNA, 19 nt, Human
cuugaggguugggcuggug

SEQ ID NO: 2500951 - RNA, 21 nt, Human
cuugaggguugggcugguguc

SEQ ID NO: 2500952 - RNA, 21 nt, Human
cuugaggaaacaacagcuuua

SEQ ID NO: 2500953 - RNA, 16 nt, Human
cuguucuggcagaguu

SEQ ID NO: 2500954 - RNA, 21 nt, Human
cuguucucuugggaacugaac

SEQ ID NO: 2500955 - RNA, 16 nt, Human
cuguucugcacacagc

SEQ ID NO: 2500956 - RNA, 20 nt, Human
cuuagaugcaguucugaaga

SEQ ID NO: 2500957 - RNA, 11 nt, Human
cuguucuggaa

SEQ ID NO: 2500958 - RNA, 16 nt, Human
cuuagucacugagaca

SEQ ID NO: 2500959 - RNA, 11 nt, Human
cuguucugugg

SEQ ID NO: 2500960 - RNA, 19 nt, Human
cuguucugucccuuggagc

SEQ ID NO: 2500961 - RNA, 22 nt, Human
cuguucugguuuuuaaccauug

SEQ ID NO: 2500962 - RNA, 22 nt, Human
cuuagaugcaguucugaagaag

SEQ ID NO: 2500963 - RNA, 13 nt, Human
cuuagauguauau

SEQ ID NO: 2500964 - RNA, 19 nt, Human
cuuagucucaguuugugug

SEQ ID NO: 2500965 - RNA, 18 nt, Human
cuuagucucaguuugugu

SEQ ID NO: 2500966 - RNA, 13 nt, Human
cuuagucucaguu

SEQ ID NO: 2500967 - RNA, 12 nt, Human
cuuagucucagu

SEQ ID NO: 2500968 - RNA, 16 nt, Human
cuuagauggauucucc

SEQ ID NO: 2500969 - RNA, 14 nt, Human
cuuagucacugaga

SEQ ID NO: 2500970 - RNA, 19 nt, Human
cuuagucacugagacagcc

SEQ ID NO: 2500971 - RNA, 18 nt, Human
cuuagucacugagacagc

SEQ ID NO: 2500972 - RNA, 13 nt, Human
cuuaguggcuuuu

SEQ ID NO: 2500973 - RNA, 17 nt, Human
cuuagugguuccccacc

SEQ ID NO: 2500974 - RNA, 22 nt, Human
cuuaguggcuuuuuuccuccug

SEQ ID NO: 2500975 - RNA, 22 nt, Human
cuuagugcggacaaguuuuaau

SEQ ID NO: 2500976 - RNA, 21 nt, Human
cuuagucuucucauagcauua

SEQ ID NO: 2500977 - RNA, 20 nt, Human
cuuagugcggacaaguuuua

SEQ ID NO: 2500978 - RNA, 19 nt, Human
cuuagugcggacaaguuuu

SEQ ID NO: 2500979 - RNA, 17 nt, Human
cuuagugaaauuacuuc

SEQ ID NO: 2500980 - RNA, 23 nt, Human
cuuagucucaguuugugugucuu

SEQ ID NO: 2500981 - RNA, 20 nt, Human
cuuagucucaguuugugugu

SEQ ID NO: 2500982 - RNA, 15 nt, Human
cuuagucuucucaua

SEQ ID NO: 2500983 - RNA, 16 nt, Human
cuuagucuucucauag

SEQ ID NO: 2500984 - RNA, 20 nt, Human
cuuagucuucucauagcauu

SEQ ID NO: 2500985 - RNA, 23 nt, Human
cuuaguuuguguguugucucuug

SEQ ID NO: 2500986 - RNA, 19 nt, Human
cuuaguuuggauucuuaug

SEQ ID NO: 2500987 - RNA, 14 nt, Human
cuuauacccaugaa

SEQ ID NO: 2500988 - RNA, 22 nt, Human
cuuaguuuggauucuuauguag

SEQ ID NO: 2500989 - RNA, 16 nt, Human
cuuaguucucacuguu

SEQ ID NO: 2500990 - RNA, 15 nt, Human
cuuaguucucacugu

SEQ ID NO: 2500991 - RNA, 22 nt, Human
cuuaguuuguguguugucucuu

SEQ ID NO: 2500992 - RNA, 17 nt, Human
cuuaguuuguguguugu

SEQ ID NO: 2500993 - RNA, 18 nt, Human
cuuaguguuucugugcau

SEQ ID NO: 2500994 - RNA, 17 nt, Human
cuuaguguuucugugca

SEQ ID NO: 2500995 - RNA, 16 nt, Human
cuuaguguuucugugc

SEQ ID NO: 2500996 - RNA, 13 nt, Human
cuuaguguuucug

SEQ ID NO: 2500997 - RNA, 16 nt, Human
cuuaguuaucagcuuu

SEQ ID NO: 2500998 - RNA, 19 nt, Human
cuuaguguuucugugcaug

SEQ ID NO: 2500999 - RNA, 14 nt, Human
cuuaguucucacug

SEQ ID NO: 2501000 - RNA, 14 nt, Human
cuuauagacaacau

SEQ ID NO: 2501001 - RNA, 16 nt, Human
cuuauagaauauuuau

SEQ ID NO: 2501002 - RNA, 15 nt, Human
cuuauagaauauuua

SEQ ID NO: 2501003 - RNA, 14 nt, Human
cuuauagaauauuu

SEQ ID NO: 2501004 - RNA, 13 nt, Human
cuuauagaauauu

SEQ ID NO: 2501005 - RNA, 20 nt, Human
cuuauagaauauuuauuacc

SEQ ID NO: 2501006 - RNA, 20 nt, Human
cuuauauaguuuacuauuuu

SEQ ID NO: 2501007 - RNA, 18 nt, Human
cuuauauaguuuacuauu

SEQ ID NO: 2501008 - RNA, 14 nt, Human
cuuaucauggucuc

SEQ ID NO: 2501009 - RNA, 15 nt, Human
cuuaucauggucuca

SEQ ID NO: 2501010 - RNA, 15 nt, Human
cuuaucauucauucu

SEQ ID NO: 2501011 - RNA, 19 nt, Human
cuuaucauccacauuguuu

SEQ ID NO: 2501012 - RNA, 15 nt, Human
cuuaucauccacauu

SEQ ID NO: 2501013 - RNA, 21 nt, Human
cuuaucauccacauuguuuua

SEQ ID NO: 2501014 - RNA, 20 nt, Human
cuuaucaugcugucuuuaca

SEQ ID NO: 2501015 - RNA, 22 nt, Human
cuuaucaccagcugccucuucu

SEQ ID NO: 2501016 - RNA, 19 nt, Human
cuuaucaccagcugccucu

SEQ ID NO: 2501017 - RNA, 17 nt, Human
cuuaucaccagcugccu

SEQ ID NO: 2501018 - RNA, 16 nt, Human
cuuaucaccagcugcc

SEQ ID NO: 2501019 - RNA, 18 nt, Human
cuuaucacugacacaaaa

SEQ ID NO: 2501020 - RNA, 12 nt, Human
cuuaucccucuc

SEQ ID NO: 2501021 - RNA, 19 nt, Human
cuuauccaggacucuguca

SEQ ID NO: 2501022 - RNA, 13 nt, Human
cuuauccaggacu

SEQ ID NO: 2501023 - RNA, 12 nt, Human
cuuauccaggac

SEQ ID NO: 2501024 - RNA, 15 nt, Human
cuuauccagcuggug

SEQ ID NO: 2501025 - RNA, 21 nt, Human
cuuauccuaaaacaaauaguu

SEQ ID NO: 2501026 - RNA, 15 nt, Human
cuuauccaggacucu

SEQ ID NO: 2501027 - RNA, 18 nt, Human
cuuauauguguauugcua

SEQ ID NO: 2501028 - RNA, 21 nt, Human
cuuauauuaauauuccucagu

SEQ ID NO: 2501029 - RNA, 21 nt, Human
cuuauaucaucagcauaccuu

SEQ ID NO: 2501030 - RNA, 17 nt, Human
cuuauauaugugaacau

SEQ ID NO: 2501031 - RNA, 14 nt, Human
cuuauauaugugaa

SEQ ID NO: 2501032 - RNA, 19 nt, Human
cuuauauaguuuacuauuu

SEQ ID NO: 2501033 - RNA, 13 nt, Human
cuuauauuaugga

SEQ ID NO: 2501034 - RNA, 19 nt, Human
cuuaucaagugucuuccau

SEQ ID NO: 2501035 - RNA, 13 nt, Human
cuuaucaccagcu

SEQ ID NO: 2501036 - RNA, 23 nt, Human
cuuaucaccacaguaaguuccua

SEQ ID NO: 2501037 - RNA, 22 nt, Human
cuuaucaccacaguaaguuccu

SEQ ID NO: 2501038 - RNA, 17 nt, Human
cuuauuuaaugaaagac

SEQ ID NO: 2501039 - RNA, 14 nt, Human
cuuauccucugauc

SEQ ID NO: 2501040 - RNA, 13 nt, Human
cuuauccucugau

SEQ ID NO: 2501041 - RNA, 22 nt, Human
cuuauccucugaucuccauggc

SEQ ID NO: 2501042 - RNA, 16 nt, Human
cuuauccucugaucuc

SEQ ID NO: 2501043 - RNA, 15 nt, Human
cuuauccucugaucu

SEQ ID NO: 2501044 - RNA, 18 nt, Human
cuuauccucugaucucca

SEQ ID NO: 2501045 - RNA, 14 nt, Human
cuuauuucauuucu

SEQ ID NO: 2501046 - RNA, 21 nt, Human
cuuauuuauucauauuuucuu

SEQ ID NO: 2501047 - RNA, 20 nt, Human
cuuaucucagucaugcauaa

SEQ ID NO: 2501048 - RNA, 19 nt, Human
cuuaucucagucaugcaua

SEQ ID NO: 2501049 - RNA, 13 nt, Human
cuuauuuauuauu

SEQ ID NO: 2501050 - RNA, 17 nt, Human
cuuaucaagugucuucc

SEQ ID NO: 2501051 - RNA, 18 nt, Human
cuuauuuaaugaaagacu

SEQ ID NO: 2501052 - RNA, 21 nt, Human
cuucaaaaguauuuuccugua

SEQ ID NO: 2501053 - RNA, 17 nt, Human
cuucaaaaguauuuucc

SEQ ID NO: 2501054 - RNA, 16 nt, Human
cuucaaaaguauuuuc

SEQ ID NO: 2501055 - RNA, 15 nt, Human
cuucaaaaguauuuu

SEQ ID NO: 2501056 - RNA, 23 nt, Human
cuuauuugcugccacaccugagc

SEQ ID NO: 2501057 - RNA, 13 nt, Human
cuuauuugaguga

SEQ ID NO: 2501058 - RNA, 12 nt, Human
cuuauuugagug

SEQ ID NO: 2501059 - RNA, 23 nt, Human
cuuauuuuaaaauuuuaucucuu

SEQ ID NO: 2501060 - RNA, 15 nt, Human
cuuauuucauuucuu

SEQ ID NO: 2501061 - RNA, 17 nt, Human
cuuauuucaugaaaauu

SEQ ID NO: 2501062 - RNA, 11 nt, Human
cuuauuugagu

SEQ ID NO: 2501063 - RNA, 17 nt, Human
cuucaacagcuccccau

SEQ ID NO: 2501064 - RNA, 16 nt, Human
cuucaacagcucccca

SEQ ID NO: 2501065 - RNA, 24 nt, Human
cuucaacagacccccucuagaaau

SEQ ID NO: 2501066 - RNA, 16 nt, Human
cuucaacaucaauguu

SEQ ID NO: 2501067 - RNA, 18 nt, Human
cuucaacaucaauguuca

SEQ ID NO: 2501068 - RNA, 19 nt, Human
cuucaacaucaauguucau

SEQ ID NO: 2501069 - RNA, 20 nt, Human
cuucaacaucaauguucauu

SEQ ID NO: 2501070 - RNA, 16 nt, Human
cuucaaagcuugaaga

SEQ ID NO: 2501071 - RNA, 18 nt, Human
cuucaaagcuugaagauc

SEQ ID NO: 2501072 - RNA, 22 nt, Human
cuucaaacagaacugcagucag

SEQ ID NO: 2501073 - RNA, 17 nt, Human
cuucaaagcaaaugucu

SEQ ID NO: 2501074 - RNA, 23 nt, Human
cuucaaacuagggccaagcccag

SEQ ID NO: 2501075 - RNA, 22 nt, Human
cuucaauacccaaauccucucc

SEQ ID NO: 2501076 - RNA, 21 nt, Human
cuucaauaaaugguauagcaa

SEQ ID NO: 2501077 - RNA, 12 nt, Human
cuucaauaaagu

SEQ ID NO: 2501078 - RNA, 20 nt, Human
cuucaaguuagcucaggagg

SEQ ID NO: 2501079 - RNA, 14 nt, Human
cuucaauaaaguau

SEQ ID NO: 2501080 - RNA, 16 nt, Human
cuucaaguuagcucag

SEQ ID NO: 2501081 - RNA, 17 nt, Human
cuucaaguuagcucagg

SEQ ID NO: 2501082 - RNA, 18 nt, Human
cuucaaguuagcucagga

SEQ ID NO: 2501083 - RNA, 19 nt, Human
cuucaaguuagcucaggag

SEQ ID NO: 2501084 - RNA, 15 nt, Human
cuucaauuccugggc

SEQ ID NO: 2501085 - RNA, 16 nt, Human
cuucaauuccugggcc

SEQ ID NO: 2501086 - RNA, 21 nt, Human
cuucacacacaggcaacugag

SEQ ID NO: 2501087 - RNA, 15 nt, Human
cuucaauuaauaaaa

SEQ ID NO: 2501088 - RNA, 22 nt, Human
cuucacacacaggcaacugagg

SEQ ID NO: 2501089 - RNA, 23 nt, Human
cuucacagaugggugcuuggagg

SEQ ID NO: 2501090 - RNA, 12 nt, Human
cuucacacugca

SEQ ID NO: 2501091 - RNA, 13 nt, Human
cuucacacugcaa

SEQ ID NO: 2501092 - RNA, 15 nt, Human
cuucacacugcaaga

SEQ ID NO: 2501093 - RNA, 18 nt, Human
cuucacacugcaagagcc

SEQ ID NO: 2501094 - RNA, 20 nt, Human
cuucacacugcaagagccuu

SEQ ID NO: 2501095 - RNA, 11 nt, Human
cuucacagagu

SEQ ID NO: 2501096 - RNA, 21 nt, Human
cuucacacugcaagagccuug

SEQ ID NO: 2501097 - RNA, 22 nt, Human
cuucaccagaggaaucacucuu

SEQ ID NO: 2501098 - RNA, 17 nt, Human
cuucaccauuuggcaau

SEQ ID NO: 2501099 - RNA, 21 nt, Human
cuucacauccuguguuucuag

SEQ ID NO: 2501100 - RNA, 22 nt, Human
cuucacagagugugcuggagga

SEQ ID NO: 2501101 - RNA, 20 nt, Human
cuucacagagugugcuggag

SEQ ID NO: 2501102 - RNA, 17 nt, Human
cuucacagagugugcug

SEQ ID NO: 2501103 - RNA, 13 nt, Human
cuucacagagugu

SEQ ID NO: 2501104 - RNA, 23 nt, Human
cuucacagagugugcuggaggac

SEQ ID NO: 2501105 - RNA, 16 nt, Human
cuucacagcucugugu

SEQ ID NO: 2501106 - RNA, 15 nt, Human
cuucaaggauccuga

SEQ ID NO: 2501107 - RNA, 13 nt, Human
cuucaaggauccu

SEQ ID NO: 2501108 - RNA, 16 nt, Human
cuucaaggauccugag

SEQ ID NO: 2501109 - RNA, 22 nt, Human
cuucaagugcaugcucucugca

SEQ ID NO: 2501110 - RNA, 18 nt, Human
cuucaaguuaaagugaau

SEQ ID NO: 2501111 - RNA, 16 nt, Human
cuucaaccauucccca

SEQ ID NO: 2501112 - RNA, 22 nt, Human
cuucaacaucaauguucauugu

SEQ ID NO: 2501113 - RNA, 20 nt, Human
cuucaaccauuccccauggg

SEQ ID NO: 2501114 - RNA, 17 nt, Human
cuucaaccuugagacag

SEQ ID NO: 2501115 - RNA, 15 nt, Human
cuucaacauuuacau

SEQ ID NO: 2501116 - RNA, 10 nt, Human
cuucaaggau

SEQ ID NO: 2501117 - RNA, 13 nt, Human
cuuccuaauucca

SEQ ID NO: 2501118 - RNA, 17 nt, Human
cuuccuaauuccacagc

SEQ ID NO: 2501119 - RNA, 18 nt, Human
cuuccuaauuccacagcu

SEQ ID NO: 2501120 - RNA, 19 nt, Human
cuuccuaauuccacagcug

SEQ ID NO: 2501121 - RNA, 23 nt, Human
cuuccguaacccaacucuccugg

SEQ ID NO: 2501122 - RNA, 17 nt, Human
cuuccguaacccaacuc

SEQ ID NO: 2501123 - RNA, 15 nt, Human
cuucccuugagcccu

SEQ ID NO: 2501124 - RNA, 20 nt, Human
cuuccucaguuuaauccuuc

SEQ ID NO: 2501125 - RNA, 18 nt, Human
cuuccucaguuuaauccu

SEQ ID NO: 2501126 - RNA, 17 nt, Human
cuuccucaguuacacaa

SEQ ID NO: 2501127 - RNA, 22 nt, Human
cuuccucauccaccccaucccu

SEQ ID NO: 2501128 - RNA, 18 nt, Human
cuuccucauccaccccau

SEQ ID NO: 2501129 - RNA, 23 nt, Human
cuuccucauccaccccaucccuc

SEQ ID NO: 2501130 - RNA, 21 nt, Human
cuuccuccacauccuuucuaa

SEQ ID NO: 2501131 - RNA, 15 nt, Human
cuuccuccacauccu

SEQ ID NO: 2501132 - RNA, 23 nt, Human
cuuccucccaaguggugccuaaa

SEQ ID NO: 2501133 - RNA, 21 nt, Human
cuuccucccaaguggugccua

SEQ ID NO: 2501134 - RNA, 20 nt, Human
cuuccucccaaguggugccu

SEQ ID NO: 2501135 - RNA, 12 nt, Human
cuuccucccaag

SEQ ID NO: 2501136 - RNA, 13 nt, Human
cuuccucccucau

SEQ ID NO: 2501137 - RNA, 14 nt, Human
cuucccugucccuc

SEQ ID NO: 2501138 - RNA, 13 nt, Human
cuucccugucccu

SEQ ID NO: 2501139 - RNA, 12 nt, Human
cuucccuguccc

SEQ ID NO: 2501140 - RNA, 22 nt, Human
cuucccuguauuuucuuucucu

SEQ ID NO: 2501141 - RNA, 12 nt, Human
cuucccuaaucu

SEQ ID NO: 2501142 - RNA, 22 nt, Human
cuucccuguaugauuccuugau

SEQ ID NO: 2501143 - RNA, 16 nt, Human
cuucccugucccucua

SEQ ID NO: 2501144 - RNA, 15 nt, Human
cuucccugucccucu

SEQ ID NO: 2501145 - RNA, 13 nt, Human
cuucccuuucugc

SEQ ID NO: 2501146 - RNA, 16 nt, Human
cuucccuucuccaucu

SEQ ID NO: 2501147 - RNA, 16 nt, Human
cuucccuugagcccuc

SEQ ID NO: 2501148 - RNA, 12 nt, Human
cuuccccuugcc

SEQ ID NO: 2501149 - RNA, 13 nt, Human
cuuccccuugccc

SEQ ID NO: 2501150 - RNA, 19 nt, Human
cuucccgcucagcccuccc

SEQ ID NO: 2501151 - RNA, 14 nt, Human
cuucccgucccaua

SEQ ID NO: 2501152 - RNA, 18 nt, Human
cuucccgcucagcccucc

SEQ ID NO: 2501153 - RNA, 23 nt, Human
cuucccgcucagcccucccugcc

SEQ ID NO: 2501154 - RNA, 16 nt, Human
cuucccuaaaaucagg

SEQ ID NO: 2501155 - RNA, 23 nt, Human
cuucccgucccauauccugccuc

SEQ ID NO: 2501156 - RNA, 22 nt, Human
cuucccgucccauauccugccu

SEQ ID NO: 2501157 - RNA, 21 nt, Human
cuucccgucccauauccugcc

SEQ ID NO: 2501158 - RNA, 20 nt, Human
cuucccgucccauauccugc

SEQ ID NO: 2501159 - RNA, 19 nt, Human
cuucccgucccauauccug

SEQ ID NO: 2501160 - RNA, 15 nt, Human
cuucccgucccauau

SEQ ID NO: 2501161 - RNA, 17 nt, Human
cuucccuacaguugaaa

SEQ ID NO: 2501162 - RNA, 22 nt, Human
cuuccccgagggaugaugccac

SEQ ID NO: 2501163 - RNA, 18 nt, Human
cuucccccugcuuccacc

SEQ ID NO: 2501164 - RNA, 23 nt, Human
cuuccccgagggaugaugccaca

SEQ ID NO: 2501165 - RNA, 12 nt, Human
cuuccccucacu

SEQ ID NO: 2501166 - RNA, 14 nt, Human
cuuccccucccugg

SEQ ID NO: 2501167 - RNA, 16 nt, Human
cuuccccucccuggcu

SEQ ID NO: 2501168 - RNA, 14 nt, Human
cuuccccugggccc

SEQ ID NO: 2501169 - RNA, 23 nt, Human
cuuccccuccuaccccucccagc

SEQ ID NO: 2501170 - RNA, 22 nt, Human
cuuccccuccuaccccucccag

SEQ ID NO: 2501171 - RNA, 13 nt, Human
cuuccccuccuac

SEQ ID NO: 2501172 - RNA, 15 nt, Human
cuuccccugggcccu

SEQ ID NO: 2501173 - RNA, 18 nt, Human
cuuccccucccuggcucc

SEQ ID NO: 2501174 - RNA, 20 nt, Human
cuuccccucccuggcuccca

SEQ ID NO: 2501175 - RNA, 20 nt, Human
cuuccccucucuccuccugc

SEQ ID NO: 2501176 - RNA, 22 nt, Human
cuucccaugacccaggcugggc

SEQ ID NO: 2501177 - RNA, 21 nt, Human
cuucccaugacccaggcuggg

SEQ ID NO: 2501178 - RNA, 20 nt, Human
cuucccaugacccaggcugg

SEQ ID NO: 2501179 - RNA, 19 nt, Human
cuucccaugacccaggcug

SEQ ID NO: 2501180 - RNA, 17 nt, Human
cuucccaugacccaggc

SEQ ID NO: 2501181 - RNA, 15 nt, Human
cuucccaugacccag

SEQ ID NO: 2501182 - RNA, 15 nt, Human
cuucccaucgcuguc

SEQ ID NO: 2501183 - RNA, 19 nt, Human
cuucccauccuacccucgg

SEQ ID NO: 2501184 - RNA, 16 nt, Human
cuucccauccuacccu

SEQ ID NO: 2501185 - RNA, 15 nt, Human
cuucccauccuaccc

SEQ ID NO: 2501186 - RNA, 12 nt, Human
cuucccauccua

SEQ ID NO: 2501187 - RNA, 11 nt, Human
cuucccauccu

SEQ ID NO: 2501188 - RNA, 17 nt, Human
cuucccaguggcugcug

SEQ ID NO: 2501189 - RNA, 15 nt, Human
cuucccaguggcugc

SEQ ID NO: 2501190 - RNA, 19 nt, Human
cuucccaguggcugcugcc

SEQ ID NO: 2501191 - RNA, 18 nt, Human
cuucccaguggcugcugc

SEQ ID NO: 2501192 - RNA, 22 nt, Human
cuucccaguucaggagucccaa

SEQ ID NO: 2501193 - RNA, 20 nt, Human
cuucccauaccacccaaugc

SEQ ID NO: 2501194 - RNA, 20 nt, Human
cuucccaguggcugcugccc

SEQ ID NO: 2501195 - RNA, 23 nt, Human
cuucccaguucaggagucccaag

SEQ ID NO: 2501196 - RNA, 11 nt, Human
cuucccaucac

SEQ ID NO: 2501197 - RNA, 16 nt, Human
cuucccaucacuggag

SEQ ID NO: 2501198 - RNA, 17 nt, Human
cuucccaucacuggagc

SEQ ID NO: 2501199 - RNA, 18 nt, Human
cuucccaucacuggagca

SEQ ID NO: 2501200 - RNA, 16 nt, Human
cuuccaggcugggaga

SEQ ID NO: 2501201 - RNA, 15 nt, Human
cuuccaggcugggag

SEQ ID NO: 2501202 - RNA, 19 nt, Human
cuuccaggcugggagagcc

SEQ ID NO: 2501203 - RNA, 16 nt, Human
cuuccaggcccccacc

SEQ ID NO: 2501204 - RNA, 19 nt, Human
cuuccaggcccccaccacu

SEQ ID NO: 2501205 - RNA, 15 nt, Human
cuuccagggguggga

SEQ ID NO: 2501206 - RNA, 14 nt, Human
cuuccagggguggg

SEQ ID NO: 2501207 - RNA, 17 nt, Human
cuuccaggggugggaca

SEQ ID NO: 2501208 - RNA, 21 nt, Human
cuuccaggggugggacacccu

SEQ ID NO: 2501209 - RNA, 17 nt, Human
cuucaguggcagcugcu

SEQ ID NO: 2501210 - RNA, 20 nt, Human
cuucauucaacccaccugcg

SEQ ID NO: 2501211 - RNA, 21 nt, Human
cuucauugagaguuuugucuu

SEQ ID NO: 2501212 - RNA, 17 nt, Human
cuucaguggagaauuau

SEQ ID NO: 2501213 - RNA, 14 nt, Human
cuucauugagaguu

SEQ ID NO: 2501214 - RNA, 21 nt, Human
cuucauucuugaaagcugugg

SEQ ID NO: 2501215 - RNA, 20 nt, Human
cuucauucuugaaagcugug

SEQ ID NO: 2501216 - RNA, 22 nt, Human
cuucauucaagucuaugaugcu

SEQ ID NO: 2501217 - RNA, 21 nt, Human
cuuccacaagagcccaggccu

SEQ ID NO: 2501218 - RNA, 19 nt, Human
cuuccacaagagcccaggc

SEQ ID NO: 2501219 - RNA, 17 nt, Human
cuuccacaagagcccag

SEQ ID NO: 2501220 - RNA, 23 nt, Human
cuucauugagaguuuugucuuga

SEQ ID NO: 2501221 - RNA, 19 nt, Human
cuucauugccuuaacugga

SEQ ID NO: 2501222 - RNA, 15 nt, Human
cuuccaccucccucc

SEQ ID NO: 2501223 - RNA, 14 nt, Human
cuuccaccucccuc

SEQ ID NO: 2501224 - RNA, 13 nt, Human
cuuccaccucccu

SEQ ID NO: 2501225 - RNA, 20 nt, Human
cuuccaccucaccccacuua

SEQ ID NO: 2501226 - RNA, 17 nt, Human
cuuccacgcugucucca

SEQ ID NO: 2501227 - RNA, 16 nt, Human
cuuccacgcugucucc

SEQ ID NO: 2501228 - RNA, 18 nt, Human
cuuccacgcugucuccag

SEQ ID NO: 2501229 - RNA, 20 nt, Human
cuuccacgcugucuccagac

SEQ ID NO: 2501230 - RNA, 21 nt, Human
cuuccacgcugucuccagacc

SEQ ID NO: 2501231 - RNA, 22 nt, Human
cuuccacgcugucuccagaccc

SEQ ID NO: 2501232 - RNA, 18 nt, Human
cuuccaccucaccccacu

SEQ ID NO: 2501233 - RNA, 17 nt, Human
cuuccaccucaccccac

SEQ ID NO: 2501234 - RNA, 16 nt, Human
cuuccaccucacccca

SEQ ID NO: 2501235 - RNA, 14 nt, Human
cuuccaccucaccc

SEQ ID NO: 2501236 - RNA, 16 nt, Human
cuuccacaagagccca

SEQ ID NO: 2501237 - RNA, 21 nt, Human
cuuccaccagccugcacuacu

SEQ ID NO: 2501238 - RNA, 17 nt, Human
cuuccaccagccugcac

SEQ ID NO: 2501239 - RNA, 14 nt, Human
cuuccaggcuggga

SEQ ID NO: 2501240 - RNA, 12 nt, Human
cuuccaggcugg

SEQ ID NO: 2501241 - RNA, 21 nt, Human
cuuccaggaaacuccacaucu

SEQ ID NO: 2501242 - RNA, 19 nt, Human
cuuccaggaaacuccacau

SEQ ID NO: 2501243 - RNA, 18 nt, Human
cuuccaggaaacuccaca

SEQ ID NO: 2501244 - RNA, 17 nt, Human
cuuccaggaaacuccac

SEQ ID NO: 2501245 - RNA, 23 nt, Human
cuuccaggaaacuccacaucugc

SEQ ID NO: 2501246 - RNA, 22 nt, Human
cuuccaggaaacuccacaucug

SEQ ID NO: 2501247 - RNA, 14 nt, Human
cuuccacugagggc

SEQ ID NO: 2501248 - RNA, 13 nt, Human
cuuccaggaaacu

SEQ ID NO: 2501249 - RNA, 16 nt, Human
cuucaguggcagcugc

SEQ ID NO: 2501250 - RNA, 15 nt, Human
cuucaguggcagcug

SEQ ID NO: 2501251 - RNA, 14 nt, Human
cuucaguggcagcu

SEQ ID NO: 2501252 - RNA, 13 nt, Human
cuucaguggcagc

SEQ ID NO: 2501253 - RNA, 22 nt, Human
cuucagugccuuauggaacacu

SEQ ID NO: 2501254 - RNA, 18 nt, Human
cuucagugccuuauggaa

SEQ ID NO: 2501255 - RNA, 18 nt, Human
cuucaguauguugucaaa

SEQ ID NO: 2501256 - RNA, 15 nt, Human
cuucaguauguuguc

SEQ ID NO: 2501257 - RNA, 14 nt, Human
cuucaguauguugu

SEQ ID NO: 2501258 - RNA, 23 nt, Human
cuucaguacccucucagcuccag

SEQ ID NO: 2501259 - RNA, 22 nt, Human
cuucaguacccucucagcucca

SEQ ID NO: 2501260 - RNA, 19 nt, Human
cuucaguacccucucagcu

SEQ ID NO: 2501261 - RNA, 18 nt, Human
cuucagggcagggcucug

SEQ ID NO: 2501262 - RNA, 19 nt, Human
cuucagggcagggcucuga

SEQ ID NO: 2501263 - RNA, 16 nt, Human
cuucagggcagggcuc

SEQ ID NO: 2501264 - RNA, 17 nt, Human
cuucagggcagggcucu

SEQ ID NO: 2501265 - RNA, 20 nt, Human
cuucagggcagggcucugau

SEQ ID NO: 2501266 - RNA, 15 nt, Human
cuucagggagugagg

SEQ ID NO: 2501267 - RNA, 19 nt, Human
cuucagggcacugcugcug

SEQ ID NO: 2501268 - RNA, 16 nt, Human
cuucaguaagccguga

SEQ ID NO: 2501269 - RNA, 23 nt, Human
cuucaguaagccgugauuuucau

SEQ ID NO: 2501270 - RNA, 22 nt, Human
cuucaggcucuucuccuuucac

SEQ ID NO: 2501271 - RNA, 19 nt, Human
cuucaggcucuucuccuuu

SEQ ID NO: 2501272 - RNA, 15 nt, Human
cuucacccuggagcc

SEQ ID NO: 2501273 - RNA, 21 nt, Human
cuucacccugaaugguuccau

SEQ ID NO: 2501274 - RNA, 23 nt, Human
cuucaccccaguggccacucagc

SEQ ID NO: 2501275 - RNA, 19 nt, Human
cuucaccccaguggccacu

SEQ ID NO: 2501276 - RNA, 14 nt, Human
cuucaccccagugg

SEQ ID NO: 2501277 - RNA, 15 nt, Human
cuucaccccccacuc

SEQ ID NO: 2501278 - RNA, 22 nt, Human
cuucacccagcuaaucuguagg

SEQ ID NO: 2501279 - RNA, 19 nt, Human
cuucaccagagcauuucca

SEQ ID NO: 2501280 - RNA, 21 nt, Human
cuucaccauuuggcaaugcca

SEQ ID NO: 2501281 - RNA, 24 nt, Human
cuucacccagcuaaucuguagggc

SEQ ID NO: 2501282 - RNA, 18 nt, Human
cuucaccccaaucccagc

SEQ ID NO: 2501283 - RNA, 21 nt, Human
cugugggcgugagaccugccc

SEQ ID NO: 2501284 - RNA, 22 nt, Human
cugugggcgugagaccugcccc

SEQ ID NO: 2501285 - RNA, 14 nt, Human
cuguggcggugccu

SEQ ID NO: 2501286 - RNA, 15 nt, Human
cuguggcggugccug

SEQ ID NO: 2501287 - RNA, 17 nt, Human
cuguggcugcuagcacu

SEQ ID NO: 2501288 - RNA, 14 nt, Human
cugugggccucaag

SEQ ID NO: 2501289 - RNA, 20 nt, Human
cugugggccucaaggacuug

SEQ ID NO: 2501290 - RNA, 14 nt, Human
cugugggcccccaa

SEQ ID NO: 2501291 - RNA, 24 nt, Human
cuguggcgccgucuccaggggcug

SEQ ID NO: 2501292 - RNA, 21 nt, Human
cuguggcgccgucuccagggg

SEQ ID NO: 2501293 - RNA, 18 nt, Human
cuguggcggugccugggu

SEQ ID NO: 2501294 - RNA, 20 nt, Human
cuguggcgccgucuccaggg

SEQ ID NO: 2501295 - RNA, 19 nt, Human
cuguggcgccgucuccagg

SEQ ID NO: 2501296 - RNA, 23 nt, Human
cuguggccugugucccaugaccc

SEQ ID NO: 2501297 - RNA, 17 nt, Human
cuguggcgccgucucca

SEQ ID NO: 2501298 - RNA, 17 nt, Human
cuguggccuguguccca

SEQ ID NO: 2501299 - RNA, 14 nt, Human
cuguggccuguguc

SEQ ID NO: 2501300 - RNA, 16 nt, Human
cuguggccugggcaag

SEQ ID NO: 2501301 - RNA, 22 nt, Human
cuguggccugugucccaugacc

SEQ ID NO: 2501302 - RNA, 20 nt, Human
cuguggccugugucccauga

SEQ ID NO: 2501303 - RNA, 23 nt, Human
cuguggccagcuuguuauuuaua

SEQ ID NO: 2501304 - RNA, 13 nt, Human
cuguggccaaagg

SEQ ID NO: 2501305 - RNA, 13 nt, Human
cuguggccugggc

SEQ ID NO: 2501306 - RNA, 14 nt, Human
cuguggccugggca

SEQ ID NO: 2501307 - RNA, 22 nt, Human
cuguggccagcuuguuauuuau

SEQ ID NO: 2501308 - RNA, 18 nt, Human
cuguggccaaguucuuag

SEQ ID NO: 2501309 - RNA, 13 nt, Human
cuguggcaggcag

SEQ ID NO: 2501310 - RNA, 21 nt, Human
cuguggcaggcagcgccaagc

SEQ ID NO: 2501311 - RNA, 18 nt, Human
cuguggcaggcagcgcca

SEQ ID NO: 2501312 - RNA, 17 nt, Human
cuguggcaggcagcgcc

SEQ ID NO: 2501313 - RNA, 14 nt, Human
cuguggcaggcagc

SEQ ID NO: 2501314 - RNA, 23 nt, Human
cuguggcaggcagcgccaagcaa

SEQ ID NO: 2501315 - RNA, 17 nt, Human
cuguggcaucuuugccu

SEQ ID NO: 2501316 - RNA, 16 nt, Human
cuguggccaaguucuu

SEQ ID NO: 2501317 - RNA, 19 nt, Human
cuguggaugagcccucaga

SEQ ID NO: 2501318 - RNA, 21 nt, Human
cuguggaaaguguaaagcauu

SEQ ID NO: 2501319 - RNA, 20 nt, Human
cuguggaaaguguaaagcau

SEQ ID NO: 2501320 - RNA, 18 nt, Human
cuguggaaaguguaaagc

SEQ ID NO: 2501321 - RNA, 20 nt, Human
cuguggaugagcccucagaa

SEQ ID NO: 2501322 - RNA, 17 nt, Human
cuguggaugauaaaaca

SEQ ID NO: 2501323 - RNA, 17 nt, Human
cuguggaaaguguaaag

SEQ ID NO: 2501324 - RNA, 16 nt, Human
cuguggaaaguguaaa

SEQ ID NO: 2501325 - RNA, 15 nt, Human
cuguggaaaguguaa

SEQ ID NO: 2501326 - RNA, 14 nt, Human
cuguggaaagugua

SEQ ID NO: 2501327 - RNA, 13 nt, Human
cuguggaaagugu

SEQ ID NO: 2501328 - RNA, 19 nt, Human
cuguggaaaaauauuuaag

SEQ ID NO: 2501329 - RNA, 22 nt, Human
cuguggaaaagaaacacgcacu

SEQ ID NO: 2501330 - RNA, 13 nt, Human
cugugccucggcu

SEQ ID NO: 2501331 - RNA, 22 nt, Human
cugugccucggcuuuucucagc

SEQ ID NO: 2501332 - RNA, 23 nt, Human
cugugccucggcuuuucucagcu

SEQ ID NO: 2501333 - RNA, 14 nt, Human
cugugccucuggga

SEQ ID NO: 2501334 - RNA, 16 nt, Human
cugugccucugggacu

SEQ ID NO: 2501335 - RNA, 15 nt, Human
cugugcuggagccac

SEQ ID NO: 2501336 - RNA, 14 nt, Human
cugugcuggagcca

SEQ ID NO: 2501337 - RNA, 13 nt, Human
cugugcuggagcc

SEQ ID NO: 2501338 - RNA, 21 nt, Human
cugugcuggagccacuaacua

SEQ ID NO: 2501339 - RNA, 16 nt, Human
cugugcuggagccacu

SEQ ID NO: 2501340 - RNA, 22 nt, Human
cugugcugcccugcccaccugg

SEQ ID NO: 2501341 - RNA, 17 nt, Human
cugugccucugggacug

SEQ ID NO: 2501342 - RNA, 18 nt, Human
cugugccucugggacugg

SEQ ID NO: 2501343 - RNA, 21 nt, Human
cugugcugcccugcccaccug

SEQ ID NO: 2501344 - RNA, 17 nt, Human
cugugcuucaauuaaua

SEQ ID NO: 2501345 - RNA, 18 nt, Human
cugugcugugugugacgu

SEQ ID NO: 2501346 - RNA, 21 nt, Human
cugugcuguggaagcaacagg

SEQ ID NO: 2501347 - RNA, 18 nt, Human
cugugcuucaauuaauaa

SEQ ID NO: 2501348 - RNA, 17 nt, Human
cugugcuucgggcccuu

SEQ ID NO: 2501349 - RNA, 19 nt, Human
cugugcuucgggcccuucc

SEQ ID NO: 2501350 - RNA, 15 nt, Human
cugugcuguggaagc

SEQ ID NO: 2501351 - RNA, 12 nt, Human
cugugcugugga

SEQ ID NO: 2501352 - RNA, 18 nt, Human
cugugcugugcccaaguu

SEQ ID NO: 2501353 - RNA, 23 nt, Human
cugugcugguguccugaccaccc

SEQ ID NO: 2501354 - RNA, 13 nt, Human
cugugcugugugu

SEQ ID NO: 2501355 - RNA, 11 nt, Human
cugugcugugu

SEQ ID NO: 2501356 - RNA, 21 nt, Human
cugugcugguguccugaccac

SEQ ID NO: 2501357 - RNA, 20 nt, Human
cugugcugguguccugacca

SEQ ID NO: 2501358 - RNA, 19 nt, Human
cugugcugguguccugacc

SEQ ID NO: 2501359 - RNA, 18 nt, Human
cugugcugguguccugac

SEQ ID NO: 2501360 - RNA, 17 nt, Human
cugugcugguguccuga

SEQ ID NO: 2501361 - RNA, 12 nt, Human
cugugcuggugu

SEQ ID NO: 2501362 - RNA, 19 nt, Human
cugugcuuucccugaacug

SEQ ID NO: 2501363 - RNA, 14 nt, Human
cugugcuuucccug

SEQ ID NO: 2501364 - RNA, 22 nt, Human
cugugcuuuccagcucaccccc

SEQ ID NO: 2501365 - RNA, 21 nt, Human
cugugcuuuccagcucacccc

SEQ ID NO: 2501366 - RNA, 20 nt, Human
cugugcuuuccagcucaccc

SEQ ID NO: 2501367 - RNA, 17 nt, Human
cugugcuuuccagcuca

SEQ ID NO: 2501368 - RNA, 16 nt, Human
cugugcuuuccagcuc

SEQ ID NO: 2501369 - RNA, 20 nt, Human
cugugcuucgggcccuuccc

SEQ ID NO: 2501370 - RNA, 21 nt, Human
cugugcuucgggcccuuccca

SEQ ID NO: 2501371 - RNA, 15 nt, Human
cugugcuuuccagcu

SEQ ID NO: 2501372 - RNA, 18 nt, Human
cugugcuuugacucaccu

SEQ ID NO: 2501373 - RNA, 16 nt, Human
cugugcuuugacucac

SEQ ID NO: 2501374 - RNA, 22 nt, Human
cugugcuuucuauuguacagaa

SEQ ID NO: 2501375 - RNA, 20 nt, Human
cugugcuuucuauuguacag

SEQ ID NO: 2501376 - RNA, 16 nt, Human
cugugcuuucuauugu

SEQ ID NO: 2501377 - RNA, 15 nt, Human
cugugcuuucuauug

SEQ ID NO: 2501378 - RNA, 13 nt, Human
cugugcuuucuau

SEQ ID NO: 2501379 - RNA, 12 nt, Human
cugugcuuucua

SEQ ID NO: 2501380 - RNA, 21 nt, Human
cugugcuuugacucaccuguu

SEQ ID NO: 2501381 - RNA, 19 nt, Human
cugugcuuugacucaccug

SEQ ID NO: 2501382 - RNA, 17 nt, Human
cugugcuuuuaaaugca

SEQ ID NO: 2501383 - RNA, 14 nt, Human
cuguggaaaaauau

SEQ ID NO: 2501384 - RNA, 18 nt, Human
cuguggaaaaauauuuaa

SEQ ID NO: 2501385 - RNA, 19 nt, Human
cuguggaaaagaaacacgc

SEQ ID NO: 2501386 - RNA, 17 nt, Human
cugugauggggcccugc

SEQ ID NO: 2501387 - RNA, 18 nt, Human
cugugauggggcccugcc

SEQ ID NO: 2501388 - RNA, 17 nt, Human
cugugaguuuaaagcaa

SEQ ID NO: 2501389 - RNA, 21 nt, Human
cugugaguguaagugugagua

SEQ ID NO: 2501390 - RNA, 19 nt, Human
cugugaguguaagugugag

SEQ ID NO: 2501391 - RNA, 20 nt, Human
cugugaguguaagugugagu

SEQ ID NO: 2501392 - RNA, 21 nt, Human
cugugaguacuacaguccucc

SEQ ID NO: 2501393 - RNA, 20 nt, Human
cugugaguacuacaguccuc

SEQ ID NO: 2501394 - RNA, 23 nt, Human
cugugaguacuacaguccuccca

SEQ ID NO: 2501395 - RNA, 22 nt, Human
cugugaggugcagagugcccag

SEQ ID NO: 2501396 - RNA, 17 nt, Human
cugugaggcuguccugu

SEQ ID NO: 2501397 - RNA, 14 nt, Human
cugugaguguaagu

SEQ ID NO: 2501398 - RNA, 18 nt, Human
cugucuccauguuugaug

SEQ ID NO: 2501399 - RNA, 20 nt, Human
cugucuccauggcccugcaa

SEQ ID NO: 2501400 - RNA, 19 nt, Human
cugucuccagacccccacc

SEQ ID NO: 2501401 - RNA, 22 nt, Human
cugucuccagacccccaccccu

SEQ ID NO: 2501402 - RNA, 19 nt, Human
cugugaggggcucucucau

SEQ ID NO: 2501403 - RNA, 23 nt, Human
cugugaggugcagagugcccaga

SEQ ID NO: 2501404 - RNA, 13 nt, Human
cugucuccuagga

SEQ ID NO: 2501405 - RNA, 23 nt, Human
cugucucaagagggcacuggugg

SEQ ID NO: 2501406 - RNA, 13 nt, Human
cugucucagacuc

SEQ ID NO: 2501407 - RNA, 12 nt, Human
cugucucagccu

SEQ ID NO: 2501408 - RNA, 14 nt, Human
cugucucagccucc

SEQ ID NO: 2501409 - RNA, 15 nt, Human
cugucucagccuccc

SEQ ID NO: 2501410 - RNA, 16 nt, Human
cugucucagccuccca

SEQ ID NO: 2501411 - RNA, 17 nt, Human
cugucucagccucccag

SEQ ID NO: 2501412 - RNA, 13 nt, Human
cugucucagccuc

SEQ ID NO: 2501413 - RNA, 15 nt, Human
cugucuccagacccc

SEQ ID NO: 2501414 - RNA, 16 nt, Human
cugucuccagaccccc

SEQ ID NO: 2501415 - RNA, 18 nt, Human
cugucuccagacccccac

SEQ ID NO: 2501416 - RNA, 13 nt, Human
cugucuccagacc

SEQ ID NO: 2501417 - RNA, 13 nt, Human
cugucucagggug

SEQ ID NO: 2501418 - RNA, 19 nt, Human
cugugcacaaaacccagac

SEQ ID NO: 2501419 - RNA, 20 nt, Human
cugugcacaaaacccagacc

SEQ ID NO: 2501420 - RNA, 21 nt, Human
cugugcaaccucuuggccuga

SEQ ID NO: 2501421 - RNA, 20 nt, Human
cugugauggggcccugccuc

SEQ ID NO: 2501422 - RNA, 19 nt, Human
cugugauggggcccugccu

SEQ ID NO: 2501423 - RNA, 16 nt, Human
cugugcauguaugucu

SEQ ID NO: 2501424 - RNA, 15 nt, Human
cugugcauguauguc

SEQ ID NO: 2501425 - RNA, 14 nt, Human
cugugcauggguga

SEQ ID NO: 2501426 - RNA, 17 nt, Human
cugugcaugggugaagg

SEQ ID NO: 2501427 - RNA, 20 nt, Human
cugugcaugggugaagggag

SEQ ID NO: 2501428 - RNA, 22 nt, Human
cugugcaugggugaagggagag

SEQ ID NO: 2501429 - RNA, 20 nt, Human
cugugcacaucugugucuug

SEQ ID NO: 2501430 - RNA, 18 nt, Human
cugugcagucacuggagg

SEQ ID NO: 2501431 - RNA, 23 nt, Human
cugugcaguggcccccacagaaa

SEQ ID NO: 2501432 - RNA, 18 nt, Human
cugugcacaucugugucu

SEQ ID NO: 2501433 - RNA, 19 nt, Human
cugugcacaucugugucuu

SEQ ID NO: 2501434 - RNA, 22 nt, Human
cugugcacaaaacccagaccug

SEQ ID NO: 2501435 - RNA, 18 nt, Human
cugugccaugugccaggu

SEQ ID NO: 2501436 - RNA, 16 nt, Human
cugugccaugugccag

SEQ ID NO: 2501437 - RNA, 11 nt, Human
cugugccaccc

SEQ ID NO: 2501438 - RNA, 17 nt, Human
cugugcauguaugucuu

SEQ ID NO: 2501439 - RNA, 18 nt, Human
cugugccacccugggcuc

SEQ ID NO: 2501440 - RNA, 17 nt, Human
cugugccacccugggcu

SEQ ID NO: 2501441 - RNA, 16 nt, Human
cugugccacccugggc

SEQ ID NO: 2501442 - RNA, 15 nt, Human
cugugccacccuggg

SEQ ID NO: 2501443 - RNA, 17 nt, Human
cugugcaugguggcacc

SEQ ID NO: 2501444 - RNA, 13 nt, Human
cugugccacccac

SEQ ID NO: 2501445 - RNA, 13 nt, Human
cugugccacccug

SEQ ID NO: 2501446 - RNA, 18 nt, Human
cugugccacccaccaggg

SEQ ID NO: 2501447 - RNA, 20 nt, Human
cugugccacccugggcucug

SEQ ID NO: 2501448 - RNA, 14 nt, Human
cugugccauuuugu

SEQ ID NO: 2501449 - RNA, 15 nt, Human
cugugccuccucacc

SEQ ID NO: 2501450 - RNA, 16 nt, Human
cugugccuccucaccc

SEQ ID NO: 2501451 - RNA, 14 nt, Human
cugugccucccaaa

SEQ ID NO: 2501452 - RNA, 13 nt, Human
cugugccuccuca

SEQ ID NO: 2501453 - RNA, 17 nt, Human
cuguucucugcccucca

SEQ ID NO: 2501454 - RNA, 16 nt, Human
cuguucucugcccucc

SEQ ID NO: 2501455 - RNA, 15 nt, Human
cuguucucugcccuc

SEQ ID NO: 2501456 - RNA, 14 nt, Human
cuguucucugcccu

SEQ ID NO: 2501457 - RNA, 19 nt, Human
cuguucucugcccuccaag

SEQ ID NO: 2501458 - RNA, 18 nt, Human
cuguucucugcccuccaa

SEQ ID NO: 2501459 - RNA, 19 nt, Human
cuguucuacauagaugcuu

SEQ ID NO: 2501460 - RNA, 15 nt, Human
cuguucucuugggaa

SEQ ID NO: 2501461 - RNA, 20 nt, Human
cuguucucugcccuccaaga

SEQ ID NO: 2501462 - RNA, 14 nt, Human
cuguucccucugcu

SEQ ID NO: 2501463 - RNA, 17 nt, Human
cuguuccccucacugga

SEQ ID NO: 2501464 - RNA, 15 nt, Human
cuguuccccucacug

SEQ ID NO: 2501465 - RNA, 14 nt, Human
cuguuccccucacu

SEQ ID NO: 2501466 - RNA, 22 nt, Human
cuguuccccucacuggaugaaa

SEQ ID NO: 2501467 - RNA, 19 nt, Human
cuguucccucugcuccugg

SEQ ID NO: 2501468 - RNA, 17 nt, Human
cuguucccucugcuccu

SEQ ID NO: 2501469 - RNA, 20 nt, Human
cuguucccucugcuccugga

SEQ ID NO: 2501470 - RNA, 12 nt, Human
cuguucccccug

SEQ ID NO: 2501471 - RNA, 15 nt, Human
cuguucccccugugc

SEQ ID NO: 2501472 - RNA, 16 nt, Human
cuguucccccugugca

SEQ ID NO: 2501473 - RNA, 17 nt, Human
cuguucccccugugcag

SEQ ID NO: 2501474 - RNA, 14 nt, Human
cuguucccccuuca

SEQ ID NO: 2501475 - RNA, 15 nt, Human
cuguucccccuucac

SEQ ID NO: 2501476 - RNA, 16 nt, Human
cuguucccccuucaca

SEQ ID NO: 2501477 - RNA, 17 nt, Human
cuguucccccuucacaa

SEQ ID NO: 2501478 - RNA, 12 nt, Human
cuguuccccuca

SEQ ID NO: 2501479 - RNA, 23 nt, Human
cuguuccccuaguaagugccuuc

SEQ ID NO: 2501480 - RNA, 22 nt, Human
cuguuccccuaguaagugccuu

SEQ ID NO: 2501481 - RNA, 23 nt, Human
cuguucccccuucacaaagccca

SEQ ID NO: 2501482 - RNA, 20 nt, Human
cuguucuacauagaugcuua

SEQ ID NO: 2501483 - RNA, 13 nt, Human
cuguucucugccc

SEQ ID NO: 2501484 - RNA, 16 nt, Human
cuguuccuuagaccuu

SEQ ID NO: 2501485 - RNA, 15 nt, Human
cuguuccuuagaccu

SEQ ID NO: 2501486 - RNA, 15 nt, Human
cuguuccuucacauc

SEQ ID NO: 2501487 - RNA, 18 nt, Human
cuguuccuucacauccug

SEQ ID NO: 2501488 - RNA, 21 nt, Human
cuguuccuucacauccugugu

SEQ ID NO: 2501489 - RNA, 13 nt, Human
cuguuacacugga

SEQ ID NO: 2501490 - RNA, 19 nt, Human
cuguuaccaugucacugug

SEQ ID NO: 2501491 - RNA, 18 nt, Human
cuguuaccaugucacugu

SEQ ID NO: 2501492 - RNA, 16 nt, Human
cuguuaccaugucacu

SEQ ID NO: 2501493 - RNA, 15 nt, Human
cuguuaccaugucac

SEQ ID NO: 2501494 - RNA, 16 nt, Human
cuguuacacuggagga

SEQ ID NO: 2501495 - RNA, 20 nt, Human
cuguuaccaugucacugugg

SEQ ID NO: 2501496 - RNA, 18 nt, Human
cuguuacccagagaauau

SEQ ID NO: 2501497 - RNA, 21 nt, Human
cuguuaccugaucaaugacag

SEQ ID NO: 2501498 - RNA, 20 nt, Human
cuguuaccugaucaaugaca

SEQ ID NO: 2501499 - RNA, 13 nt, Human
cuguuacugucuu

SEQ ID NO: 2501500 - RNA, 15 nt, Human
cuguucaguuacaga

SEQ ID NO: 2501501 - RNA, 14 nt, Human
cuguucaguuacag

SEQ ID NO: 2501502 - RNA, 13 nt, Human
cuguucaguuaca

SEQ ID NO: 2501503 - RNA, 12 nt, Human
cuguucaguuac

SEQ ID NO: 2501504 - RNA, 20 nt, Human
cuguucagugucccgggccc

SEQ ID NO: 2501505 - RNA, 16 nt, Human
cuguucagugucccgg

SEQ ID NO: 2501506 - RNA, 18 nt, Human
cuguucagcugguugagg

SEQ ID NO: 2501507 - RNA, 19 nt, Human
cuguucagcugguugaggu

SEQ ID NO: 2501508 - RNA, 21 nt, Human
cuguucagcugguugagguuu

SEQ ID NO: 2501509 - RNA, 21 nt, Human
cuguucaguuacagaaagugg

SEQ ID NO: 2501510 - RNA, 19 nt, Human
cuguucaguuacagaaagu

SEQ ID NO: 2501511 - RNA, 18 nt, Human
cuguucaguuacagaaag

SEQ ID NO: 2501512 - RNA, 17 nt, Human
cuguucaguuacagaaa

SEQ ID NO: 2501513 - RNA, 14 nt, Human
cuguucauuuccuc

SEQ ID NO: 2501514 - RNA, 17 nt, Human
cuguucauuuccucaaa

SEQ ID NO: 2501515 - RNA, 14 nt, Human
cuguuccccagaga

SEQ ID NO: 2501516 - RNA, 15 nt, Human
cuguuccccagagaa

SEQ ID NO: 2501517 - RNA, 23 nt, Human
cuguucccccgccgcuuuucucc

SEQ ID NO: 2501518 - RNA, 12 nt, Human
cuguucccccgc

SEQ ID NO: 2501519 - RNA, 16 nt, Human
cuguuccccagagaaa

SEQ ID NO: 2501520 - RNA, 13 nt, Human
cuguuccccagag

SEQ ID NO: 2501521 - RNA, 20 nt, Human
cuguucccauguagcccccu

SEQ ID NO: 2501522 - RNA, 18 nt, Human
cuguucccauucuugcau

SEQ ID NO: 2501523 - RNA, 23 nt, Human
cuguuccagccugcccucuucau

SEQ ID NO: 2501524 - RNA, 17 nt, Human
cuguuccagccugcccu

SEQ ID NO: 2501525 - RNA, 14 nt, Human
cuguuccagccugc

SEQ ID NO: 2501526 - RNA, 18 nt, Human
cuguucccaaauuuucua

SEQ ID NO: 2501527 - RNA, 17 nt, Human
cuguucccaccugcugg

SEQ ID NO: 2501528 - RNA, 21 nt, Human
cuguuaaaagaugaaaauauu

SEQ ID NO: 2501529 - RNA, 23 nt, Human
cuguuaaaagaugaaaauauuug

SEQ ID NO: 2501530 - RNA, 14 nt, Human
cuguguuuguuccu

SEQ ID NO: 2501531 - RNA, 15 nt, Human
cuguguuuguuccua

SEQ ID NO: 2501532 - RNA, 13 nt, Human
cuguguuuuaaua

SEQ ID NO: 2501533 - RNA, 20 nt, Human
cuguuaaaagaugaaaauau

SEQ ID NO: 2501534 - RNA, 22 nt, Human
cuguguuugagcucugcagccc

SEQ ID NO: 2501535 - RNA, 19 nt, Human
cuguguuucaaguggggcu

SEQ ID NO: 2501536 - RNA, 19 nt, Human
cuguguuucuuuugguucc

SEQ ID NO: 2501537 - RNA, 20 nt, Human
cuguguuugagcucugcagc

SEQ ID NO: 2501538 - RNA, 12 nt, Human
cuguguguuagu

SEQ ID NO: 2501539 - RNA, 21 nt, Human
cugugugugugaaugaacacu

SEQ ID NO: 2501540 - RNA, 21 nt, Human
cuguguguuaguucccaacau

SEQ ID NO: 2501541 - RNA, 18 nt, Human
cuguguguuaguucccaa

SEQ ID NO: 2501542 - RNA, 16 nt, Human
cuguguguuaguuccc

SEQ ID NO: 2501543 - RNA, 19 nt, Human
cuguguguuaguucccaac

SEQ ID NO: 2501544 - RNA, 13 nt, Human
cuguguguugcca

SEQ ID NO: 2501545 - RNA, 19 nt, Human
cuguguguugccacaggac

SEQ ID NO: 2501546 - RNA, 20 nt, Human
cuguguguugccacaggaca

SEQ ID NO: 2501547 - RNA, 22 nt, Human
cuguguugucucuagagcaggg

SEQ ID NO: 2501548 - RNA, 21 nt, Human
cuguguguugccacaggacac

SEQ ID NO: 2501549 - RNA, 22 nt, Human
cuguguguugccacaggacaca

SEQ ID NO: 2501550 - RNA, 16 nt, Human
cuguguguuuaugugu

SEQ ID NO: 2501551 - RNA, 17 nt, Human
cuguguguuuaugugug

SEQ ID NO: 2501552 - RNA, 20 nt, Human
cugugugugcgccuacagga

SEQ ID NO: 2501553 - RNA, 22 nt, Human
cuguguggugucgcgccuucuc

SEQ ID NO: 2501554 - RNA, 12 nt, Human
cugugugguuug

SEQ ID NO: 2501555 - RNA, 18 nt, Human
cugugugugcgccuacag

SEQ ID NO: 2501556 - RNA, 17 nt, Human
cugugugugugaaugaa

SEQ ID NO: 2501557 - RNA, 18 nt, Human
cugugugugugaaugaac

SEQ ID NO: 2501558 - RNA, 23 nt, Human
cugugugugugaaugaacacucu

SEQ ID NO: 2501559 - RNA, 14 nt, Human
cugugugugugaau

SEQ ID NO: 2501560 - RNA, 16 nt, Human
cugugugugugaauga

SEQ ID NO: 2501561 - RNA, 12 nt, Human
cuguguguguga

SEQ ID NO: 2501562 - RNA, 21 nt, Human
cugugugguuugguguguucc

SEQ ID NO: 2501563 - RNA, 21 nt, Human
cugugugcucaggagcccugg

SEQ ID NO: 2501564 - RNA, 20 nt, Human
cugugugcucaggagcccug

SEQ ID NO: 2501565 - RNA, 16 nt, Human
cugugugcucaggagc

SEQ ID NO: 2501566 - RNA, 19 nt, Human
cugugugcucaggagcccu

SEQ ID NO: 2501567 - RNA, 23 nt, Human
cugugugcucaggagcccuggga

SEQ ID NO: 2501568 - RNA, 23 nt, Human
cugugugcuccuccuuggugccu

SEQ ID NO: 2501569 - RNA, 18 nt, Human
cugugugcuccuccuugg

SEQ ID NO: 2501570 - RNA, 23 nt, Human
cugugggggaagagcacagcccu

SEQ ID NO: 2501571 - RNA, 15 nt, Human
cuguguggcagucug

SEQ ID NO: 2501572 - RNA, 18 nt, Human
cuguguggacugugaugc

SEQ ID NO: 2501573 - RNA, 16 nt, Human
cuguguggacugugau

SEQ ID NO: 2501574 - RNA, 23 nt, Human
cugugucuugcaauggcagccuu

SEQ ID NO: 2501575 - RNA, 22 nt, Human
cugugucuugcaauggcagccu

SEQ ID NO: 2501576 - RNA, 22 nt, Human
cugugggggaagagcacagccc

SEQ ID NO: 2501577 - RNA, 21 nt, Human
cugugggggaagagcacagcc

SEQ ID NO: 2501578 - RNA, 20 nt, Human
cugugggggaagagcacagc

SEQ ID NO: 2501579 - RNA, 19 nt, Human
cugugggggaagagcacag

SEQ ID NO: 2501580 - RNA, 20 nt, Human
cugugucuugcaauggcagc

SEQ ID NO: 2501581 - RNA, 21 nt, Human
cugugucuugcaauggcagcc

SEQ ID NO: 2501582 - RNA, 22 nt, Human
cuguggggcugguagcucaggu

SEQ ID NO: 2501583 - RNA, 21 nt, Human
cuguggggcugguagcucagg

SEQ ID NO: 2501584 - RNA, 17 nt, Human
cuguggggcugguagcu

SEQ ID NO: 2501585 - RNA, 14 nt, Human
cuguggggcuggua

SEQ ID NO: 2501586 - RNA, 19 nt, Human
cuguggggccuugguuccc

SEQ ID NO: 2501587 - RNA, 20 nt, Human
cuguggggauuucucccagc

SEQ ID NO: 2501588 - RNA, 21 nt, Human
cuguggggauuucucccagcu

SEQ ID NO: 2501589 - RNA, 20 nt, Human
cuguggggaucucaggggcu

SEQ ID NO: 2501590 - RNA, 17 nt, Human
cuguggggaucucaggg

SEQ ID NO: 2501591 - RNA, 16 nt, Human
cuguggggaucucagg

SEQ ID NO: 2501592 - RNA, 21 nt, Human
cuguggggaucucaggggcug

SEQ ID NO: 2501593 - RNA, 17 nt, Human
cuguggggauuucuccc

SEQ ID NO: 2501594 - RNA, 18 nt, Human
cuguggggauuucuccca

SEQ ID NO: 2501595 - RNA, 19 nt, Human
cuguggggauuucucccag

SEQ ID NO: 2501596 - RNA, 23 nt, Human
cugugggcgugagaccugccccu

SEQ ID NO: 2501597 - RNA, 14 nt, Human
cugugggcugcacu

SEQ ID NO: 2501598 - RNA, 15 nt, Human
cugugggcugcacuc

SEQ ID NO: 2501599 - RNA, 19 nt, Human
cugugggccucaaggacuu

SEQ ID NO: 2501600 - RNA, 22 nt, Human
cugugggcugcacucugugccc

SEQ ID NO: 2501601 - RNA, 21 nt, Human
cugugggcugcacucugugcc

SEQ ID NO: 2501602 - RNA, 20 nt, Human
cugugggcugcacucugugc

SEQ ID NO: 2501603 - RNA, 18 nt, Human
cugugggcugcacucugu

SEQ ID NO: 2501604 - RNA, 15 nt, Human
cugugggcuggcagu

SEQ ID NO: 2501605 - RNA, 23 nt, Human
cugugggcugcacucugugccca

SEQ ID NO: 2501606 - RNA, 22 nt, Human
cugucccuuacgugaguccugg

SEQ ID NO: 2501607 - RNA, 15 nt, Human
cugucccugucacca

SEQ ID NO: 2501608 - RNA, 15 nt, Human
cuguccgagcuuuga

SEQ ID NO: 2501609 - RNA, 14 nt, Human
cuguccuacccacc

SEQ ID NO: 2501610 - RNA, 13 nt, Human
cuguccucagccu

SEQ ID NO: 2501611 - RNA, 17 nt, Human
cugucccugucaccaag

SEQ ID NO: 2501612 - RNA, 18 nt, Human
cuguccguuuacuccaag

SEQ ID NO: 2501613 - RNA, 14 nt, Human
cuguccucagccuu

SEQ ID NO: 2501614 - RNA, 18 nt, Human
cuguccucagccuugcca

SEQ ID NO: 2501615 - RNA, 20 nt, Human
cuguccucagccuugccaga

SEQ ID NO: 2501616 - RNA, 21 nt, Human
cuguccucagccuugccagag

SEQ ID NO: 2501617 - RNA, 22 nt, Human
cuguccucagccuugccagaga

SEQ ID NO: 2501618 - RNA, 15 nt, Human
cuguccucagcuucu

SEQ ID NO: 2501619 - RNA, 17 nt, Human
cuguccucagcuucuua

SEQ ID NO: 2501620 - RNA, 12 nt, Human
cuguccucaggu

SEQ ID NO: 2501621 - RNA, 20 nt, Human
cugucuacacuaagagagaa

SEQ ID NO: 2501622 - RNA, 18 nt, Human
cuguccucagguggccau

SEQ ID NO: 2501623 - RNA, 17 nt, Human
cuguccucagguggcca

SEQ ID NO: 2501624 - RNA, 16 nt, Human
cuguccucagguggcc

SEQ ID NO: 2501625 - RNA, 15 nt, Human
cuguccucagguggc

SEQ ID NO: 2501626 - RNA, 23 nt, Human
cugucucaaaaaaacacaaaagu

SEQ ID NO: 2501627 - RNA, 16 nt, Human
cugucucaaaaaaaga

SEQ ID NO: 2501628 - RNA, 19 nt, Human
cugucuauuucugcugaau

SEQ ID NO: 2501629 - RNA, 18 nt, Human
cugucuauuucugcugaa

SEQ ID NO: 2501630 - RNA, 17 nt, Human
cugucuauuucugcuga

SEQ ID NO: 2501631 - RNA, 16 nt, Human
cugucuauuucugcug

SEQ ID NO: 2501632 - RNA, 22 nt, Human
cugucucaagagggcacuggug

SEQ ID NO: 2501633 - RNA, 18 nt, Human
cugucucaaaaaaagaaa

SEQ ID NO: 2501634 - RNA, 12 nt, Human
cugucuagagua

SEQ ID NO: 2501635 - RNA, 18 nt, Human
cugucuagagagggaggc

SEQ ID NO: 2501636 - RNA, 15 nt, Human
cugucuauuucugcu

SEQ ID NO: 2501637 - RNA, 14 nt, Human
cugucuauuucugc

SEQ ID NO: 2501638 - RNA, 13 nt, Human
cugucuauucuag

SEQ ID NO: 2501639 - RNA, 14 nt, Human
cugucuagagaggg

SEQ ID NO: 2501640 - RNA, 16 nt, Human
cugucuagagagggag

SEQ ID NO: 2501641 - RNA, 17 nt, Human
cugucuagagagggagg

SEQ ID NO: 2501642 - RNA, 13 nt, Human
cugucuagagagg

SEQ ID NO: 2501643 - RNA, 15 nt, Human
cuguccuccaacacc

SEQ ID NO: 2501644 - RNA, 23 nt, Human
cuguccuccaacaccaagcacag

SEQ ID NO: 2501645 - RNA, 12 nt, Human
cuguccuccaag

SEQ ID NO: 2501646 - RNA, 12 nt, Human
cuguccccucuu

SEQ ID NO: 2501647 - RNA, 20 nt, Human
cuguccccucagcuccagac

SEQ ID NO: 2501648 - RNA, 17 nt, Human
cuguccccucagcucca

SEQ ID NO: 2501649 - RNA, 16 nt, Human
cuguccccucagcucc

SEQ ID NO: 2501650 - RNA, 15 nt, Human
cuguccccucagcuc

SEQ ID NO: 2501651 - RNA, 14 nt, Human
cuguccccucagcu

SEQ ID NO: 2501652 - RNA, 18 nt, Human
cuguccccucuugcccca

SEQ ID NO: 2501653 - RNA, 17 nt, Human
cuguccccucuugcccc

SEQ ID NO: 2501654 - RNA, 16 nt, Human
cuguccccucuugccc

SEQ ID NO: 2501655 - RNA, 15 nt, Human
cuguccccucuugcc

SEQ ID NO: 2501656 - RNA, 20 nt, Human
cuguccccucuugccccaac

SEQ ID NO: 2501657 - RNA, 19 nt, Human
cuguccccucuugccccaa

SEQ ID NO: 2501658 - RNA, 18 nt, Human
cugucccgggguccugug

SEQ ID NO: 2501659 - RNA, 17 nt, Human
cugucccgggguccugu

SEQ ID NO: 2501660 - RNA, 23 nt, Human
cuguccccuucucucaucucuua

SEQ ID NO: 2501661 - RNA, 22 nt, Human
cuguccccuucucucaucucuu

SEQ ID NO: 2501662 - RNA, 21 nt, Human
cuguccccuucucucaucucu

SEQ ID NO: 2501663 - RNA, 20 nt, Human
cuguccccuucucucaucuc

SEQ ID NO: 2501664 - RNA, 19 nt, Human
cuguccccuucucucaucu

SEQ ID NO: 2501665 - RNA, 16 nt, Human
cuguccccuucucuca

SEQ ID NO: 2501666 - RNA, 14 nt, Human
cuguccccuucucu

SEQ ID NO: 2501667 - RNA, 14 nt, Human
cugucccugccuca

SEQ ID NO: 2501668 - RNA, 16 nt, Human
cugucccucucaggca

SEQ ID NO: 2501669 - RNA, 12 nt, Human
cugucccuguca

SEQ ID NO: 2501670 - RNA, 21 nt, Human
cugucccuccgggaccuggug

SEQ ID NO: 2501671 - RNA, 17 nt, Human
cugucccuccgggaccu

SEQ ID NO: 2501672 - RNA, 21 nt, Human
cugucccgggguccuguggca

SEQ ID NO: 2501673 - RNA, 15 nt, Human
cugucccucucaggc

SEQ ID NO: 2501674 - RNA, 20 nt, Human
cugucccuuacgugaguccu

SEQ ID NO: 2501675 - RNA, 14 nt, Human
cuguccgagcuuug

SEQ ID NO: 2501676 - RNA, 20 nt, Human
cuguccaguucccagaaggc

SEQ ID NO: 2501677 - RNA, 19 nt, Human
cuguccaguucccagaagg

SEQ ID NO: 2501678 - RNA, 18 nt, Human
cuguccaguucccagaag

SEQ ID NO: 2501679 - RNA, 21 nt, Human
cuguccaguucccagaaggca

SEQ ID NO: 2501680 - RNA, 22 nt, Human
cuguccccgcacugggcuuggg

SEQ ID NO: 2501681 - RNA, 19 nt, Human
cuguccccgcacugggcuu

SEQ ID NO: 2501682 - RNA, 18 nt, Human
cuguccccgcacugggcu

SEQ ID NO: 2501683 - RNA, 16 nt, Human
cuguccaguucccaga

SEQ ID NO: 2501684 - RNA, 15 nt, Human
cuguccaguucccag

SEQ ID NO: 2501685 - RNA, 14 nt, Human
cuguccaguuccca

SEQ ID NO: 2501686 - RNA, 14 nt, Human
cuguccagugggua

SEQ ID NO: 2501687 - RNA, 18 nt, Human
cuguccagugcccauucc

SEQ ID NO: 2501688 - RNA, 15 nt, Human
cuguccagugcccau

SEQ ID NO: 2501689 - RNA, 14 nt, Human
cuguccagugccca

SEQ ID NO: 2501690 - RNA, 13 nt, Human
cuguccagugccc

SEQ ID NO: 2501691 - RNA, 17 nt, Human
cuguccccgcacugggc

SEQ ID NO: 2501692 - RNA, 19 nt, Human
cuguccagggcccugagcu

SEQ ID NO: 2501693 - RNA, 20 nt, Human
cuguccagggcccugagcuc

SEQ ID NO: 2501694 - RNA, 22 nt, Human
cuguccagggcccugagcucgg

SEQ ID NO: 2501695 - RNA, 23 nt, Human
cuguccagggcccugagcucggu

SEQ ID NO: 2501696 - RNA, 18 nt, Human
cuguccagggcccugagc

SEQ ID NO: 2501697 - RNA, 19 nt, Human
cuguccaggcacugagaua

SEQ ID NO: 2501698 - RNA, 16 nt, Human
cuguccaggcacugag

SEQ ID NO: 2501699 - RNA, 21 nt, Human
cuguccagcuccaaccugcaa

SEQ ID NO: 2501700 - RNA, 17 nt, Human
cuguccagcuccaaccu

SEQ ID NO: 2501701 - RNA, 18 nt, Human
cuguccagcuccaaccug

SEQ ID NO: 2501702 - RNA, 23 nt, Human
cuguccaggcacugcugcccagc

SEQ ID NO: 2501703 - RNA, 13 nt, Human
cuguccagcucca

SEQ ID NO: 2501704 - RNA, 14 nt, Human
cuguccagcuccaa

SEQ ID NO: 2501705 - RNA, 12 nt, Human
cuguccagcucc

SEQ ID NO: 2501706 - RNA, 18 nt, Human
cuguccagccugggcagc

SEQ ID NO: 2501707 - RNA, 18 nt, Human
cuguccagagagagaagu

SEQ ID NO: 2501708 - RNA, 13 nt, Human
cuguccagccugg

SEQ ID NO: 2501709 - RNA, 15 nt, Human
cuguccagccugggc

SEQ ID NO: 2501710 - RNA, 17 nt, Human
cuguccagccugggcag

SEQ ID NO: 2501711 - RNA, 14 nt, Human
cugucaagaagaug

SEQ ID NO: 2501712 - RNA, 12 nt, Human
cugucaagaaga

SEQ ID NO: 2501713 - RNA, 11 nt, Human
cuguccagaga

SEQ ID NO: 2501714 - RNA, 21 nt, Human
cuguccagacagccuguaucu

SEQ ID NO: 2501715 - RNA, 17 nt, Human
cuguccagacagccugu

SEQ ID NO: 2501716 - RNA, 16 nt, Human
cuguccagacagccug

SEQ ID NO: 2501717 - RNA, 19 nt, Human
cugucaaggcugcuuagaa

SEQ ID NO: 2501718 - RNA, 20 nt, Human
cugucaaggcugcuuagaau

SEQ ID NO: 2501719 - RNA, 17 nt, Human
cugucaaggcugcuuag

SEQ ID NO: 2501720 - RNA, 19 nt, Human
cugucaaguuccuuugggu

SEQ ID NO: 2501721 - RNA, 21 nt, Human
cugucaagugggaucugucac

SEQ ID NO: 2501722 - RNA, 19 nt, Human
cuguauuuuaaaagaauga

SEQ ID NO: 2501723 - RNA, 20 nt, Human
cuguauuuuaaaagaaugau

SEQ ID NO: 2501724 - RNA, 22 nt, Human
cuguauuuuaaaagaaugauua

SEQ ID NO: 2501725 - RNA, 22 nt, Human
cuguauuuuauuuagacaagag

SEQ ID NO: 2501726 - RNA, 21 nt, Human
cuguauuuuauuuagacaaga

SEQ ID NO: 2501727 - RNA, 18 nt, Human
cugucaaacaaagccaga

SEQ ID NO: 2501728 - RNA, 19 nt, Human
cugucaaacaaagccagaa

SEQ ID NO: 2501729 - RNA, 22 nt, Human
cugucaaacaaagccagaagcu

SEQ ID NO: 2501730 - RNA, 22 nt, Human
cuguaucuugggggacagggcu

SEQ ID NO: 2501731 - RNA, 17 nt, Human
cuguaucuguagugaga

SEQ ID NO: 2501732 - RNA, 18 nt, Human
cuguaucggagacaguga

SEQ ID NO: 2501733 - RNA, 23 nt, Human
cuguaucuguagugagauagcau

SEQ ID NO: 2501734 - RNA, 18 nt, Human
cuguaucuuguuuuucca

SEQ ID NO: 2501735 - RNA, 23 nt, Human
cuguaucccaugagccucagcau

SEQ ID NO: 2501736 - RNA, 17 nt, Human
cuguaucggagacagug

SEQ ID NO: 2501737 - RNA, 15 nt, Human
cuguacaaugacuuu

SEQ ID NO: 2501738 - RNA, 21 nt, Human
cuguacaauauuuaaaauuua

SEQ ID NO: 2501739 - RNA, 19 nt, Human
cuguacaaauauaagaaua

SEQ ID NO: 2501740 - RNA, 17 nt, Human
cuguacaaauauaagaa

SEQ ID NO: 2501741 - RNA, 20 nt, Human
cuguacaaauauaagaauaa

SEQ ID NO: 2501742 - RNA, 14 nt, Human
cuguacaauauuua

SEQ ID NO: 2501743 - RNA, 15 nt, Human
cuguacaauauuuaa

SEQ ID NO: 2501744 - RNA, 16 nt, Human
cuguacaauauuuaaa

SEQ ID NO: 2501745 - RNA, 17 nt, Human
cuguacaauauuuaaaa

SEQ ID NO: 2501746 - RNA, 18 nt, Human
cuguacaauauuuaaaau

SEQ ID NO: 2501747 - RNA, 13 nt, Human
cuguacagagccc

SEQ ID NO: 2501748 - RNA, 17 nt, Human
cuguacacguguccugu

SEQ ID NO: 2501749 - RNA, 16 nt, Human
cuguacacguguccug

SEQ ID NO: 2501750 - RNA, 18 nt, Human
cuguacacguguccugua

SEQ ID NO: 2501751 - RNA, 19 nt, Human
cuguacacugaauauuuau

SEQ ID NO: 2501752 - RNA, 13 nt, Human
cuguaguuaggaa

SEQ ID NO: 2501753 - RNA, 14 nt, Human
cuguaguuaggaaa

SEQ ID NO: 2501754 - RNA, 15 nt, Human
cuguaguuaggaaau

SEQ ID NO: 2501755 - RNA, 23 nt, Human
cuguaguccuagccacucaggag

SEQ ID NO: 2501756 - RNA, 14 nt, Human
cuguagucucagga

SEQ ID NO: 2501757 - RNA, 15 nt, Human
cuguagucucaggac

SEQ ID NO: 2501758 - RNA, 22 nt, Human
cuguagugagauagcauuguga

SEQ ID NO: 2501759 - RNA, 20 nt, Human
cuguagugagauagcauugu

SEQ ID NO: 2501760 - RNA, 18 nt, Human
cuguagugagauagcauu

SEQ ID NO: 2501761 - RNA, 20 nt, Human
cuguagucucaggaccuagg

SEQ ID NO: 2501762 - RNA, 13 nt, Human
cuguacacugcac

SEQ ID NO: 2501763 - RNA, 15 nt, Human
cuguacacugcacga

SEQ ID NO: 2501764 - RNA, 14 nt, Human
cuguagucccagcu

SEQ ID NO: 2501765 - RNA, 15 nt, Human
cuguagucccagcua

SEQ ID NO: 2501766 - RNA, 18 nt, Human
cuguagucccagcuacuc

SEQ ID NO: 2501767 - RNA, 22 nt, Human
cuguagucccagcuacucagga

SEQ ID NO: 2501768 - RNA, 23 nt, Human
cuguagucccagcuacucaggag

SEQ ID NO: 2501769 - RNA, 22 nt, Human
cuguagucccagcuacucggga

SEQ ID NO: 2501770 - RNA, 20 nt, Human
cuguaguccuagccacucag

SEQ ID NO: 2501771 - RNA, 22 nt, Human
cuguaguccuagccacucagga

SEQ ID NO: 2501772 - RNA, 19 nt, Human
cuguauacaacccuggcau

SEQ ID NO: 2501773 - RNA, 22 nt, Human
cuguauaaguggaggcacuuua

SEQ ID NO: 2501774 - RNA, 19 nt, Human
cuguauaaguaagaaaaua

SEQ ID NO: 2501775 - RNA, 18 nt, Human
cuguauaaguaagaaaau

SEQ ID NO: 2501776 - RNA, 21 nt, Human
cuguauaaguaagaaaauauu

SEQ ID NO: 2501777 - RNA, 21 nt, Human
cuguauaaguggaggcacuuu

SEQ ID NO: 2501778 - RNA, 23 nt, Human
cuggugcuauaggcuggagaagc

SEQ ID NO: 2501779 - RNA, 17 nt, Human
cuguauaaguaagaaaa

SEQ ID NO: 2501780 - RNA, 16 nt, Human
cuguauaaguaagaaa

SEQ ID NO: 2501781 - RNA, 15 nt, Human
cuguauaaguaagaa

SEQ ID NO: 2501782 - RNA, 14 nt, Human
cuguauaaguaaga

SEQ ID NO: 2501783 - RNA, 13 nt, Human
cuguauaaguaag

SEQ ID NO: 2501784 - RNA, 12 nt, Human
cuguauaaguaa

SEQ ID NO: 2501785 - RNA, 21 nt, Human
cuguauaaauaggagaggaug

SEQ ID NO: 2501786 - RNA, 17 nt, Human
cuguaguuaggaaauaa

SEQ ID NO: 2501787 - RNA, 18 nt, Human
cuguaguuaggaaauaaa

SEQ ID NO: 2501788 - RNA, 22 nt, Human
cuguauauuugugauagcacuu

SEQ ID NO: 2501789 - RNA, 23 nt, Human
cuguauauuugugauagcacuuu

SEQ ID NO: 2501790 - RNA, 16 nt, Human
cuguaucaggacccag

SEQ ID NO: 2501791 - RNA, 22 nt, Human
cuguaucaggacccagaggaag

SEQ ID NO: 2501792 - RNA, 23 nt, Human
cuguaucaggacccagaggaagg

SEQ ID NO: 2501793 - RNA, 14 nt, Human
cuguauauacuuuu

SEQ ID NO: 2501794 - RNA, 15 nt, Human
cuguauauacuuuuu

SEQ ID NO: 2501795 - RNA, 16 nt, Human
cuguauauagcccagc

SEQ ID NO: 2501796 - RNA, 14 nt, Human
cuguaaucuaugaa

SEQ ID NO: 2501797 - RNA, 20 nt, Human
cuguaaucgcccuacuauuc

SEQ ID NO: 2501798 - RNA, 22 nt, Human
cuguaaucucguuucaaaaaca

SEQ ID NO: 2501799 - RNA, 20 nt, Human
cuguaaucucguuucaaaaa

SEQ ID NO: 2501800 - RNA, 19 nt, Human
cuguaaucucguuucaaaa

SEQ ID NO: 2501801 - RNA, 15 nt, Human
cuguaaugaaucuaa

SEQ ID NO: 2501802 - RNA, 21 nt, Human
cuguaaugaaccgcugaauau

SEQ ID NO: 2501803 - RNA, 20 nt, Human
cuguaaugaaccgcugaaua

SEQ ID NO: 2501804 - RNA, 21 nt, Human
cuguaaugaaacaccuucucu

SEQ ID NO: 2501805 - RNA, 21 nt, Human
cuguaaugaaucuaagcagca

SEQ ID NO: 2501806 - RNA, 19 nt, Human
cuguaaucauauaauaaau

SEQ ID NO: 2501807 - RNA, 20 nt, Human
cuguaauccuagcacuuugg

SEQ ID NO: 2501808 - RNA, 13 nt, Human
cuguacaaaguag

SEQ ID NO: 2501809 - RNA, 15 nt, Human
cuguacaaaguagaa

SEQ ID NO: 2501810 - RNA, 13 nt, Human
cuguaauuuuaua

SEQ ID NO: 2501811 - RNA, 16 nt, Human
cuguacaaauauaaga

SEQ ID NO: 2501812 - RNA, 15 nt, Human
cuguacaaauauaag

SEQ ID NO: 2501813 - RNA, 20 nt, Human
cuguaauuuuuuucuuauau

SEQ ID NO: 2501814 - RNA, 17 nt, Human
cuguaauaaauaugagu

SEQ ID NO: 2501815 - RNA, 16 nt, Human
cuguaauaaauaugag

SEQ ID NO: 2501816 - RNA, 15 nt, Human
cuguaauaaauauga

SEQ ID NO: 2501817 - RNA, 14 nt, Human
cuguaauaaauaug

SEQ ID NO: 2501818 - RNA, 13 nt, Human
cuguaauaaauau

SEQ ID NO: 2501819 - RNA, 12 nt, Human
cuguaauaaaua

SEQ ID NO: 2501820 - RNA, 23 nt, Human
cuguaaucacagcuacuugggag

SEQ ID NO: 2501821 - RNA, 23 nt, Human
cugguucggauuugggguggauu

SEQ ID NO: 2501822 - RNA, 21 nt, Human
cugguucggauuuggggugga

SEQ ID NO: 2501823 - RNA, 13 nt, Human
cugguuccucccc

SEQ ID NO: 2501824 - RNA, 18 nt, Human
cugguucuauuuaaugga

SEQ ID NO: 2501825 - RNA, 17 nt, Human
cugguucuauuuaaugg

SEQ ID NO: 2501826 - RNA, 20 nt, Human
cuguaauaaagaugauugug

SEQ ID NO: 2501827 - RNA, 16 nt, Human
cugguucuauuuaaug

SEQ ID NO: 2501828 - RNA, 12 nt, Human
cuggugcugcug

SEQ ID NO: 2501829 - RNA, 14 nt, Human
cugguggccucugc

SEQ ID NO: 2501830 - RNA, 16 nt, Human
cugguuccauggccuc

SEQ ID NO: 2501831 - RNA, 22 nt, Human
cuggugggaggggcgcccaccu

SEQ ID NO: 2501832 - RNA, 23 nt, Human
cugguggcucccggagggcccug

SEQ ID NO: 2501833 - RNA, 15 nt, Human
cugguggcucccgga

SEQ ID NO: 2501834 - RNA, 15 nt, Human
cugguggccucugcc

SEQ ID NO: 2501835 - RNA, 18 nt, Human
cugguucccguuucucca

SEQ ID NO: 2501836 - RNA, 23 nt, Human
cuggugggaggggcgcccaccuc

SEQ ID NO: 2501837 - RNA, 21 nt, Human
cugguucccguuucuccaccu

SEQ ID NO: 2501838 - RNA, 17 nt, Human
cugguuccggaauccug

SEQ ID NO: 2501839 - RNA, 12 nt, Human
cugguuccuccc

SEQ ID NO: 2501840 - RNA, 18 nt, Human
cugguuccggaauccugu

SEQ ID NO: 2501841 - RNA, 23 nt, Human
cugguggcccgacagccuggcac

SEQ ID NO: 2501842 - RNA, 22 nt, Human
cugguggcccgacagccuggca

SEQ ID NO: 2501843 - RNA, 21 nt, Human
cugguggcccgacagccuggc

SEQ ID NO: 2501844 - RNA, 20 nt, Human
cugguggcccgacagccugg

SEQ ID NO: 2501845 - RNA, 14 nt, Human
cugguggcagcugc

SEQ ID NO: 2501846 - RNA, 13 nt, Human
cugguggcagcug

SEQ ID NO: 2501847 - RNA, 23 nt, Human
cugguggcagcucaccucucccu

SEQ ID NO: 2501848 - RNA, 14 nt, Human
cuggugcugccucu

SEQ ID NO: 2501849 - RNA, 19 nt, Human
cuggugcugccucuaccug

SEQ ID NO: 2501850 - RNA, 21 nt, Human
cugguggcagcucaccucucc

SEQ ID NO: 2501851 - RNA, 22 nt, Human
cuggugcugccacacuucaggc

SEQ ID NO: 2501852 - RNA, 20 nt, Human
cuggugcugccacacuucag

SEQ ID NO: 2501853 - RNA, 13 nt, Human
cuggugcugccac

SEQ ID NO: 2501854 - RNA, 12 nt, Human
cuggugcugcca

SEQ ID NO: 2501855 - RNA, 21 nt, Human
cugguccgugggacggugccc

SEQ ID NO: 2501856 - RNA, 19 nt, Human
cugguccgugggacggugc

SEQ ID NO: 2501857 - RNA, 13 nt, Human
cugguccuaccca

SEQ ID NO: 2501858 - RNA, 16 nt, Human
cugguccuacccaucc

SEQ ID NO: 2501859 - RNA, 22 nt, Human
cugguccuacccauccccgcag

SEQ ID NO: 2501860 - RNA, 18 nt, Human
cuggugcucucugccacu

SEQ ID NO: 2501861 - RNA, 16 nt, Human
cuggugcucucugcca

SEQ ID NO: 2501862 - RNA, 14 nt, Human
cuggugcucucugc

SEQ ID NO: 2501863 - RNA, 19 nt, Human
cugguccugagggucccca

SEQ ID NO: 2501864 - RNA, 16 nt, Human
cugguccugagggucc

SEQ ID NO: 2501865 - RNA, 17 nt, Human
cugguccuacccauccc

SEQ ID NO: 2501866 - RNA, 16 nt, Human
cugguccgugggacgg

SEQ ID NO: 2501867 - RNA, 15 nt, Human
cugguccgugggacg

SEQ ID NO: 2501868 - RNA, 22 nt, Human
cugguccggacacuccuagaga

SEQ ID NO: 2501869 - RNA, 21 nt, Human
cugguccggacacuccuagag

SEQ ID NO: 2501870 - RNA, 20 nt, Human
cugguccggacacuccuaga

SEQ ID NO: 2501871 - RNA, 16 nt, Human
cugguccggacacucc

SEQ ID NO: 2501872 - RNA, 19 nt, Human
cuggucacagccuccucug

SEQ ID NO: 2501873 - RNA, 17 nt, Human
cuggucccuugcagcua

SEQ ID NO: 2501874 - RNA, 21 nt, Human
cuggucccuugcagcuaguuu

SEQ ID NO: 2501875 - RNA, 18 nt, Human
cuggucacaggacucugc

SEQ ID NO: 2501876 - RNA, 15 nt, Human
cuggucccugggagg

SEQ ID NO: 2501877 - RNA, 18 nt, Human
cuggucacagccuccucu

SEQ ID NO: 2501878 - RNA, 17 nt, Human
cuggucacagccuccuc

SEQ ID NO: 2501879 - RNA, 16 nt, Human
cuggucacagccuccu

SEQ ID NO: 2501880 - RNA, 15 nt, Human
cuggucacagccucc

SEQ ID NO: 2501881 - RNA, 19 nt, Human
cuggucaaccuccuggaca

SEQ ID NO: 2501882 - RNA, 17 nt, Human
cuggucaaccuccugga

SEQ ID NO: 2501883 - RNA, 16 nt, Human
cuggucaaccuccugg

SEQ ID NO: 2501884 - RNA, 15 nt, Human
cuggucaaccuccug

SEQ ID NO: 2501885 - RNA, 18 nt, Human
cuggucaaacaaacucuc

SEQ ID NO: 2501886 - RNA, 23 nt, Human
cuggucaaacaaacucucugaac

SEQ ID NO: 2501887 - RNA, 16 nt, Human
cugguacucuccuaga

SEQ ID NO: 2501888 - RNA, 13 nt, Human
cugguacucuccu

SEQ ID NO: 2501889 - RNA, 14 nt, Human
cugguauuuuaucu

SEQ ID NO: 2501890 - RNA, 17 nt, Human
cuggucaaacaaacucu

SEQ ID NO: 2501891 - RNA, 14 nt, Human
cugggggaguggaa

SEQ ID NO: 2501892 - RNA, 13 nt, Human
cugggggagugga

SEQ ID NO: 2501893 - RNA, 16 nt, Human
cugggggaagcccugg

SEQ ID NO: 2501894 - RNA, 12 nt, Human
cugggggcagga

SEQ ID NO: 2501895 - RNA, 14 nt, Human
cugggggcaggagg

SEQ ID NO: 2501896 - RNA, 19 nt, Human
cugggggcaggagggcccu

SEQ ID NO: 2501897 - RNA, 15 nt, Human
cugggggaagaagcu

SEQ ID NO: 2501898 - RNA, 20 nt, Human
cugggggacccaauguagga

SEQ ID NO: 2501899 - RNA, 17 nt, Human
cugggggaagcccugga

SEQ ID NO: 2501900 - RNA, 19 nt, Human
cuggggcuucuccugaccc

SEQ ID NO: 2501901 - RNA, 16 nt, Human
cuggggcuucuccuga

SEQ ID NO: 2501902 - RNA, 20 nt, Human
cuggggcuucuccugaccca

SEQ ID NO: 2501903 - RNA, 14 nt, Human
cugggggaagcccu

SEQ ID NO: 2501904 - RNA, 13 nt, Human
cuggggggcagug

SEQ ID NO: 2501905 - RNA, 16 nt, Human
cuggggggcaguggug

SEQ ID NO: 2501906 - RNA, 22 nt, Human
cugggggggauuguaaaauggu

SEQ ID NO: 2501907 - RNA, 19 nt, Human
cugggggcugggcagagga

SEQ ID NO: 2501908 - RNA, 14 nt, Human
cugggggccaugag

SEQ ID NO: 2501909 - RNA, 16 nt, Human
cugggggccaugagcu

SEQ ID NO: 2501910 - RNA, 17 nt, Human
cugggggccaugagcuc

SEQ ID NO: 2501911 - RNA, 18 nt, Human
cugggggccaugagcucc

SEQ ID NO: 2501912 - RNA, 18 nt, Human
cugggcuuggccugcugu

SEQ ID NO: 2501913 - RNA, 17 nt, Human
cugggcuuggccugcug

SEQ ID NO: 2501914 - RNA, 12 nt, Human
cuggggcugcug

SEQ ID NO: 2501915 - RNA, 16 nt, Human
cugggcuuggccugcu

SEQ ID NO: 2501916 - RNA, 15 nt, Human
cugggcuuggccugc

SEQ ID NO: 2501917 - RNA, 14 nt, Human
cugggcuuggccug

SEQ ID NO: 2501918 - RNA, 16 nt, Human
cuggggcugcuggccu

SEQ ID NO: 2501919 - RNA, 15 nt, Human
cuggggcugcuggcc

SEQ ID NO: 2501920 - RNA, 14 nt, Human
cuggggcugcuggc

SEQ ID NO: 2501921 - RNA, 20 nt, Human
cugggcuuggccugcuguga

SEQ ID NO: 2501922 - RNA, 14 nt, Human
cuggggcuggccuc

SEQ ID NO: 2501923 - RNA, 15 nt, Human
cuggggcuggcacaa

SEQ ID NO: 2501924 - RNA, 15 nt, Human
cuggggcuucuccug

SEQ ID NO: 2501925 - RNA, 15 nt, Human
cuggggcuggccucc

SEQ ID NO: 2501926 - RNA, 18 nt, Human
cuggggcuggccucccaa

SEQ ID NO: 2501927 - RNA, 13 nt, Human
cugggggaagaag

SEQ ID NO: 2501928 - RNA, 13 nt, Human
cugggcuuggccu

SEQ ID NO: 2501929 - RNA, 21 nt, Human
cuggcugccccaaccugcuga

SEQ ID NO: 2501930 - RNA, 20 nt, Human
cuggcugccccaaccugcug

SEQ ID NO: 2501931 - RNA, 19 nt, Human
cuggcugccccaaccugcu

SEQ ID NO: 2501932 - RNA, 15 nt, Human
cugggcuucaucugg

SEQ ID NO: 2501933 - RNA, 19 nt, Human
cugggcuucaucuggcaac

SEQ ID NO: 2501934 - RNA, 24 nt, Human
cugggcuucaguggcagcugcuuu

SEQ ID NO: 2501935 - RNA, 13 nt, Human
cuggcugcaguga

SEQ ID NO: 2501936 - RNA, 16 nt, Human
cuggcugccagcuauu

SEQ ID NO: 2501937 - RNA, 12 nt, Human
cuggcugcccag

SEQ ID NO: 2501938 - RNA, 18 nt, Human
cuggcugccccaaccugc

SEQ ID NO: 2501939 - RNA, 16 nt, Human
cuggcugccccaaccu

SEQ ID NO: 2501940 - RNA, 13 nt, Human
cuggcugcccaga

SEQ ID NO: 2501941 - RNA, 18 nt, Human
cuggcugcccagaccccu

SEQ ID NO: 2501942 - RNA, 22 nt, Human
cuggguaacuagggaagauaau

SEQ ID NO: 2501943 - RNA, 20 nt, Human
cuggguaacuagggaagaua

SEQ ID NO: 2501944 - RNA, 15 nt, Human
cuggguacuucuuga

SEQ ID NO: 2501945 - RNA, 17 nt, Human
cuggguacuucuugaag

SEQ ID NO: 2501946 - RNA, 20 nt, Human
cuggguacuucuugaaggug

SEQ ID NO: 2501947 - RNA, 23 nt, Human
cuggguacuucuugaaggugcug

SEQ ID NO: 2501948 - RNA, 17 nt, Human
cuggcugagccuggcug

SEQ ID NO: 2501949 - RNA, 13 nt, Human
cugggguccccca

SEQ ID NO: 2501950 - RNA, 22 nt, Human
cuggggucuggaguugaucugg

SEQ ID NO: 2501951 - RNA, 15 nt, Human
cuggggugccgccug

SEQ ID NO: 2501952 - RNA, 13 nt, Human
cuggggucuggag

SEQ ID NO: 2501953 - RNA, 19 nt, Human
cugggguccuggggccucg

SEQ ID NO: 2501954 - RNA, 15 nt, Human
cugggguccuggggc

SEQ ID NO: 2501955 - RNA, 18 nt, Human
cugggguccuggggccuc

SEQ ID NO: 2501956 - RNA, 20 nt, Human
cugggguauaaaacuuuccu

SEQ ID NO: 2501957 - RNA, 16 nt, Human
cugggguccagggagc

SEQ ID NO: 2501958 - RNA, 15 nt, Human
cugggguccagggag

SEQ ID NO: 2501959 - RNA, 17 nt, Human
cuggguucuacccaggu

SEQ ID NO: 2501960 - RNA, 16 nt, Human
cuggguucuacccagg

SEQ ID NO: 2501961 - RNA, 15 nt, Human
cuggguucuacccag

SEQ ID NO: 2501962 - RNA, 14 nt, Human
cuggguucuaccca

SEQ ID NO: 2501963 - RNA, 18 nt, Human
cugguaauuuguaucuga

SEQ ID NO: 2501964 - RNA, 21 nt, Human
cugguaauuuguaucugaagg

SEQ ID NO: 2501965 - RNA, 22 nt, Human
cugguaauuuguaucugaagga

SEQ ID NO: 2501966 - RNA, 17 nt, Human
cugguacccagccaucu

SEQ ID NO: 2501967 - RNA, 16 nt, Human
cugguacccagccauc

SEQ ID NO: 2501968 - RNA, 14 nt, Human
cugguacccagcca

SEQ ID NO: 2501969 - RNA, 13 nt, Human
cugguacccagcc

SEQ ID NO: 2501970 - RNA, 22 nt, Human
cugguacccagccaucugccca

SEQ ID NO: 2501971 - RNA, 21 nt, Human
cugguacccagccaucugccc

SEQ ID NO: 2501972 - RNA, 19 nt, Human
cugguacccagccaucugc

SEQ ID NO: 2501973 - RNA, 18 nt, Human
cugguacccagccaucug

SEQ ID NO: 2501974 - RNA, 15 nt, Human
cugguacccuccugg

SEQ ID NO: 2501975 - RNA, 14 nt, Human
cugguacccuccug

SEQ ID NO: 2501976 - RNA, 23 nt, Human
cugguacccagccaucugcccag

SEQ ID NO: 2501977 - RNA, 16 nt, Human
cugguacccuccuggc

SEQ ID NO: 2501978 - RNA, 14 nt, Human
cugguacucaagcc

SEQ ID NO: 2501979 - RNA, 21 nt, Human
cuggcacuuggagacuuguau

SEQ ID NO: 2501980 - RNA, 23 nt, Human
cuggcagaaagcaaaugugaccu

SEQ ID NO: 2501981 - RNA, 21 nt, Human
cuggcagaaagcaaaugugac

SEQ ID NO: 2501982 - RNA, 13 nt, Human
cuggcagaacuga

SEQ ID NO: 2501983 - RNA, 16 nt, Human
cuggcagaacugagcu

SEQ ID NO: 2501984 - RNA, 17 nt, Human
cuggcagaacugagcuc

SEQ ID NO: 2501985 - RNA, 18 nt, Human
cuggcagaacugagcucc

SEQ ID NO: 2501986 - RNA, 19 nt, Human
cuggcagaacugagcuccu

SEQ ID NO: 2501987 - RNA, 20 nt, Human
cuggcagaacugagcuccuc

SEQ ID NO: 2501988 - RNA, 21 nt, Human
cuggcagaacugagcuccucu

SEQ ID NO: 2501989 - RNA, 18 nt, Human
cuggcacugcuuccagug

SEQ ID NO: 2501990 - RNA, 14 nt, Human
cuggcacuuggaga

SEQ ID NO: 2501991 - RNA, 21 nt, Human
cuggcacuggaugcagaaaca

SEQ ID NO: 2501992 - RNA, 23 nt, Human
cuggcacugcuuccagugaggcu

SEQ ID NO: 2501993 - RNA, 20 nt, Human
cuggcacugcuuccagugag

SEQ ID NO: 2501994 - RNA, 19 nt, Human
cuggcacugcuuccaguga

SEQ ID NO: 2501995 - RNA, 17 nt, Human
cuggcacauuuccccag

SEQ ID NO: 2501996 - RNA, 19 nt, Human
cuggcacauuuccccagac

SEQ ID NO: 2501997 - RNA, 22 nt, Human
cuggcacauuuccccagaccug

SEQ ID NO: 2501998 - RNA, 23 nt, Human
cuggcacauuuccccagaccuga

SEQ ID NO: 2501999 - RNA, 21 nt, Human
cuggcacaguuuucugagaaa

SEQ ID NO: 2502000 - RNA, 22 nt, Human
cuggcacaguuuucugagaaag

SEQ ID NO: 2502001 - RNA, 20 nt, Human
cuggcacaguuuucugagaa

SEQ ID NO: 2502002 - RNA, 20 nt, Human
cuggagugcagugagccgag

SEQ ID NO: 2502003 - RNA, 19 nt, Human
cuggcacaucagaaaggaa

SEQ ID NO: 2502004 - RNA, 14 nt, Human
cuggcacaucagaa

SEQ ID NO: 2502005 - RNA, 13 nt, Human
cuggagugcaguu

SEQ ID NO: 2502006 - RNA, 14 nt, Human
cuggagugcagugg

SEQ ID NO: 2502007 - RNA, 19 nt, Human
cuggcacccggccccugcu

SEQ ID NO: 2502008 - RNA, 21 nt, Human
cuggcacccggccccugcugg

SEQ ID NO: 2502009 - RNA, 20 nt, Human
cuggcacccggccccugcug

SEQ ID NO: 2502010 - RNA, 21 nt, Human
cuggccacugcacagagcucu

SEQ ID NO: 2502011 - RNA, 20 nt, Human
cuggccacugcacagagcuc

SEQ ID NO: 2502012 - RNA, 19 nt, Human
cuggccacugcacagagcu

SEQ ID NO: 2502013 - RNA, 18 nt, Human
cuggccacugcacagagc

SEQ ID NO: 2502014 - RNA, 13 nt, Human
cuggccagacaca

SEQ ID NO: 2502015 - RNA, 13 nt, Human
cuggccagaaugc

SEQ ID NO: 2502016 - RNA, 15 nt, Human
cuggccagacacagg

SEQ ID NO: 2502017 - RNA, 17 nt, Human
cuggccagacacaggcc

SEQ ID NO: 2502018 - RNA, 18 nt, Human
cuggccagacacaggccc

SEQ ID NO: 2502019 - RNA, 19 nt, Human
cuggccagacacaggcccu

SEQ ID NO: 2502020 - RNA, 14 nt, Human
cuggccagaugcac

SEQ ID NO: 2502021 - RNA, 21 nt, Human
cuggccaguccaggcugccgu

SEQ ID NO: 2502022 - RNA, 19 nt, Human
cuggccaguccaggcugcc

SEQ ID NO: 2502023 - RNA, 21 nt, Human
cuggccagacacaggcccucc

SEQ ID NO: 2502024 - RNA, 22 nt, Human
cuggccacugcacagagcucuc

SEQ ID NO: 2502025 - RNA, 13 nt, Human
cuggccagaggcu

SEQ ID NO: 2502026 - RNA, 19 nt, Human
cuggcaucgcaccauucug

SEQ ID NO: 2502027 - RNA, 18 nt, Human
cuggcaucgcaccauucu

SEQ ID NO: 2502028 - RNA, 17 nt, Human
cuggcaucgcaccauuc

SEQ ID NO: 2502029 - RNA, 22 nt, Human
cuggcaucgcaccauucugacu

SEQ ID NO: 2502030 - RNA, 20 nt, Human
cuggcaucgcaccauucuga

SEQ ID NO: 2502031 - RNA, 12 nt, Human
cuggccacugca

SEQ ID NO: 2502032 - RNA, 15 nt, Human
cuggccacugcacag

SEQ ID NO: 2502033 - RNA, 19 nt, Human
cuggcaguuuaaaaaaauu

SEQ ID NO: 2502034 - RNA, 15 nt, Human
cuggcaguuuaaaaa

SEQ ID NO: 2502035 - RNA, 15 nt, Human
cuggcaguuuuccau

SEQ ID NO: 2502036 - RNA, 13 nt, Human
cuggcagaaggga

SEQ ID NO: 2502037 - RNA, 22 nt, Human
cuggcaguccuggaagccagcu

SEQ ID NO: 2502038 - RNA, 19 nt, Human
cuggcaguggaacuaagaa

SEQ ID NO: 2502039 - RNA, 22 nt, Human
cuggcccagcccugcuggccgc

SEQ ID NO: 2502040 - RNA, 20 nt, Human
cuggcccagcccugcuggcc

SEQ ID NO: 2502041 - RNA, 19 nt, Human
cuggcccagcccugcuggc

SEQ ID NO: 2502042 - RNA, 18 nt, Human
cuggcccagcccugcugg

SEQ ID NO: 2502043 - RNA, 17 nt, Human
cuggcccagcccugcug

SEQ ID NO: 2502044 - RNA, 16 nt, Human
cuggcccagcccugcu

SEQ ID NO: 2502045 - RNA, 15 nt, Human
cuggcccagcccugc

SEQ ID NO: 2502046 - RNA, 14 nt, Human
cuggcccagcccug

SEQ ID NO: 2502047 - RNA, 15 nt, Human
cuggcccagccggcc

SEQ ID NO: 2502048 - RNA, 14 nt, Human
cuggcccagccggc

SEQ ID NO: 2502049 - RNA, 13 nt, Human
cuggcccagccgg

SEQ ID NO: 2502050 - RNA, 12 nt, Human
cuggcccagccg

SEQ ID NO: 2502051 - RNA, 18 nt, Human
cuggcccagccggccucu

SEQ ID NO: 2502052 - RNA, 16 nt, Human
cuggcccagccggccu

SEQ ID NO: 2502053 - RNA, 16 nt, Human
cuggcccagggcccag

SEQ ID NO: 2502054 - RNA, 11 nt, Human
cuggcccagcc

SEQ ID NO: 2502055 - RNA, 13 nt, Human
cuggcccagccaa

SEQ ID NO: 2502056 - RNA, 17 nt, Human
cuggcccagccaaaccc

SEQ ID NO: 2502057 - RNA, 20 nt, Human
cuggcccagccaaacccugu

SEQ ID NO: 2502058 - RNA, 13 nt, Human
cuggcccagcccu

SEQ ID NO: 2502059 - RNA, 10 nt, Human
cuggcccagc

SEQ ID NO: 2502060 - RNA, 23 nt, Human
cuggcccagccaaacccugucug

SEQ ID NO: 2502061 - RNA, 23 nt, Human
cuggccaguccaggcugccgugg

SEQ ID NO: 2502062 - RNA, 22 nt, Human
cuggccaguccaggcugccgug

SEQ ID NO: 2502063 - RNA, 21 nt, Human
cuggccaguggcuggaucugu

SEQ ID NO: 2502064 - RNA, 15 nt, Human
cuggcccacugcauc

SEQ ID NO: 2502065 - RNA, 17 nt, Human
cuggccaucccucgugg

SEQ ID NO: 2502066 - RNA, 18 nt, Human
cuggccaucccacaagug

SEQ ID NO: 2502067 - RNA, 16 nt, Human
cuggccaucuccaccc

SEQ ID NO: 2502068 - RNA, 23 nt, Human
cuggccaucccucguggucccca

SEQ ID NO: 2502069 - RNA, 17 nt, Human
cuggcccagggcccaga

SEQ ID NO: 2502070 - RNA, 18 nt, Human
cuggcccagggcccagag

SEQ ID NO: 2502071 - RNA, 19 nt, Human
cuggcccagggcccagagc

SEQ ID NO: 2502072 - RNA, 20 nt, Human
cuggcccagggcccagagcc

SEQ ID NO: 2502073 - RNA, 21 nt, Human
cuggcccagggcccagagccc

SEQ ID NO: 2502074 - RNA, 22 nt, Human
cuggcccagggcccagagccca

SEQ ID NO: 2502075 - RNA, 23 nt, Human
cuggcccagggcccagagcccag

SEQ ID NO: 2502076 - RNA, 16 nt, Human
cuggcccaucagugua

SEQ ID NO: 2502077 - RNA, 20 nt, Human
cuggccucugcacuccccug

SEQ ID NO: 2502078 - RNA, 18 nt, Human
cuggccucugcacucccc

SEQ ID NO: 2502079 - RNA, 21 nt, Human
cuggccucugcacuccccugc

SEQ ID NO: 2502080 - RNA, 18 nt, Human
cuggccuggacuguuuuc

SEQ ID NO: 2502081 - RNA, 14 nt, Human
cuggccuggacugu

SEQ ID NO: 2502082 - RNA, 16 nt, Human
cuggccucugcacucc

SEQ ID NO: 2502083 - RNA, 22 nt, Human
cuggccuucggccuccauccug

SEQ ID NO: 2502084 - RNA, 17 nt, Human
cuggccuggcuucuccu

SEQ ID NO: 2502085 - RNA, 14 nt, Human
cuggccuggcuucu

SEQ ID NO: 2502086 - RNA, 13 nt, Human
cuggccuggcuuc

SEQ ID NO: 2502087 - RNA, 14 nt, Human
cuggccuggccggc

SEQ ID NO: 2502088 - RNA, 15 nt, Human
cuggccuggccggca

SEQ ID NO: 2502089 - RNA, 24 nt, Human
cuggccuggccccucagggucccu

SEQ ID NO: 2502090 - RNA, 22 nt, Human
cuggccuggaucuccccacucu

SEQ ID NO: 2502091 - RNA, 21 nt, Human
cuggccuggaucuccccacuc

SEQ ID NO: 2502092 - RNA, 15 nt, Human
cuggccuggaucucc

SEQ ID NO: 2502093 - RNA, 14 nt, Human
cuggccuggaucuc

SEQ ID NO: 2502094 - RNA, 12 nt, Human
cuggccuggauc

SEQ ID NO: 2502095 - RNA, 22 nt, Human
cuggccuggacuguuuucucuc

SEQ ID NO: 2502096 - RNA, 17 nt, Human
cuggccuggcacacauc

SEQ ID NO: 2502097 - RNA, 16 nt, Human
cuggccuggcacacau

SEQ ID NO: 2502098 - RNA, 14 nt, Human
cuggccuggcacac

SEQ ID NO: 2502099 - RNA, 13 nt, Human
cuggccuggcaca

SEQ ID NO: 2502100 - RNA, 22 nt, Human
cuggccuggcacacaucaggag

SEQ ID NO: 2502101 - RNA, 18 nt, Human
cuggccuggcacacauca

SEQ ID NO: 2502102 - RNA, 19 nt, Human
cuggccuggccccucaggg

SEQ ID NO: 2502103 - RNA, 22 nt, Human
cuggcucuuccaggcugggaga

SEQ ID NO: 2502104 - RNA, 21 nt, Human
cuggcucuuccaggcugggag

SEQ ID NO: 2502105 - RNA, 13 nt, Human
cuggcgugugggu

SEQ ID NO: 2502106 - RNA, 15 nt, Human
cuggcgucugucuuc

SEQ ID NO: 2502107 - RNA, 22 nt, Human
cuggcgucugucuucaagggcu

SEQ ID NO: 2502108 - RNA, 23 nt, Human
cuggcgucugucuucaagggcuu

SEQ ID NO: 2502109 - RNA, 16 nt, Human
cuggcuaacuggaagc

SEQ ID NO: 2502110 - RNA, 20 nt, Human
cuggcuagaggccagcccca

SEQ ID NO: 2502111 - RNA, 21 nt, Human
cuggcuagaggccagccccac

SEQ ID NO: 2502112 - RNA, 22 nt, Human
cuggcuagaggccagccccacc

SEQ ID NO: 2502113 - RNA, 24 nt, Human
cuggcucuuccaggcugggagagc

SEQ ID NO: 2502114 - RNA, 13 nt, Human
cuggcugagcuga

SEQ ID NO: 2502115 - RNA, 18 nt, Human
cuggcugagccuggcugg

SEQ ID NO: 2502116 - RNA, 17 nt, Human
cuggcucuucugcccaa

SEQ ID NO: 2502117 - RNA, 16 nt, Human
cuggcucuucugccca

SEQ ID NO: 2502118 - RNA, 15 nt, Human
cuggcucuucugccc

SEQ ID NO: 2502119 - RNA, 17 nt, Human
cuggcuaacuggaagca

SEQ ID NO: 2502120 - RNA, 23 nt, Human
cuggcugagguuccucugccugc

SEQ ID NO: 2502121 - RNA, 22 nt, Human
cuggcugagguuccucugccug

SEQ ID NO: 2502122 - RNA, 21 nt, Human
cuggcugagguuccucugccu

SEQ ID NO: 2502123 - RNA, 20 nt, Human
cuggcugagguuccucugcc

SEQ ID NO: 2502124 - RNA, 23 nt, Human
cuggcugcagagcagugggccug

SEQ ID NO: 2502125 - RNA, 19 nt, Human
cuggcugagguuccucugc

SEQ ID NO: 2502126 - RNA, 17 nt, Human
cuggcugagguuccucu

SEQ ID NO: 2502127 - RNA, 21 nt, Human
cuggcugaggauuucaagccu

SEQ ID NO: 2502128 - RNA, 22 nt, Human
cuggcugaggauuucaagccug

SEQ ID NO: 2502129 - RNA, 15 nt, Human
cuggcgugcaguggu

SEQ ID NO: 2502130 - RNA, 14 nt, Human
cuggcgugcagugg

SEQ ID NO: 2502131 - RNA, 20 nt, Human
cuggcgggaugggccaccgc

SEQ ID NO: 2502132 - RNA, 19 nt, Human
cuggcgggaugggccaccg

SEQ ID NO: 2502133 - RNA, 16 nt, Human
cuggcgggaugggcca

SEQ ID NO: 2502134 - RNA, 13 nt, Human
cuggcgggauggg

SEQ ID NO: 2502135 - RNA, 22 nt, Human
cuggcguagaaguuuuuguacu

SEQ ID NO: 2502136 - RNA, 21 nt, Human
cuggcguagaaguuuuuguac

SEQ ID NO: 2502137 - RNA, 19 nt, Human
cuggcgucaugcaaaguca

SEQ ID NO: 2502138 - RNA, 18 nt, Human
cuggcgucaugcaaaguc

SEQ ID NO: 2502139 - RNA, 13 nt, Human
cuggcgucugucu

SEQ ID NO: 2502140 - RNA, 14 nt, Human
cuggcgucugucuu

SEQ ID NO: 2502141 - RNA, 23 nt, Human
cuggccuucggccuccauccuga

SEQ ID NO: 2502142 - RNA, 14 nt, Human
cuggccugugucua

SEQ ID NO: 2502143 - RNA, 19 nt, Human
cuggccuugaaaccaccuu

SEQ ID NO: 2502144 - RNA, 20 nt, Human
cuggcgccucugcaagggca

SEQ ID NO: 2502145 - RNA, 16 nt, Human
cuggcggcuacucagc

SEQ ID NO: 2502146 - RNA, 17 nt, Human
cuggcggcuacucagca

SEQ ID NO: 2502147 - RNA, 18 nt, Human
cuggcggcuacucagcag

SEQ ID NO: 2502148 - RNA, 20 nt, Human
cuggcggcuacucagcagcc

SEQ ID NO: 2502149 - RNA, 22 nt, Human
cuggcggcuacucagcagcccu

SEQ ID NO: 2502150 - RNA, 23 nt, Human
cuggcggcuacucagcagcccuc

SEQ ID NO: 2502151 - RNA, 15 nt, Human
cuggcgccucugcaa

SEQ ID NO: 2502152 - RNA, 14 nt, Human
cuggcgccucugca

SEQ ID NO: 2502153 - RNA, 13 nt, Human
cuggcgccucugc

SEQ ID NO: 2502154 - RNA, 12 nt, Human
cuggcgccucug

SEQ ID NO: 2502155 - RNA, 12 nt, Human
cuggagcucugc

SEQ ID NO: 2502156 - RNA, 13 nt, Human
cuggagcucugcc

SEQ ID NO: 2502157 - RNA, 16 nt, Human
cuggagcucugcccau

SEQ ID NO: 2502158 - RNA, 12 nt, Human
cuggaggcaggg

SEQ ID NO: 2502159 - RNA, 11 nt, Human
cuggagccugu

SEQ ID NO: 2502160 - RNA, 13 nt, Human
cuggaggcagggc

SEQ ID NO: 2502161 - RNA, 14 nt, Human
cuggaggcagggcc

SEQ ID NO: 2502162 - RNA, 15 nt, Human
cuggaggcagggccu

SEQ ID NO: 2502163 - RNA, 13 nt, Human
cuggaggcccagu

SEQ ID NO: 2502164 - RNA, 14 nt, Human
cuggaggcccaguu

SEQ ID NO: 2502165 - RNA, 15 nt, Human
cuggaggcccaguuc

SEQ ID NO: 2502166 - RNA, 20 nt, Human
cuggagggcuggaaucugga

SEQ ID NO: 2502167 - RNA, 19 nt, Human
cuggagggcuggaaucugg

SEQ ID NO: 2502168 - RNA, 21 nt, Human
cuggaggcccaguucacccug

SEQ ID NO: 2502169 - RNA, 22 nt, Human
cuggagggcuggaaucuggaga

SEQ ID NO: 2502170 - RNA, 15 nt, Human
cuggaggggacgcug

SEQ ID NO: 2502171 - RNA, 16 nt, Human
cuggaggggacgcugg

SEQ ID NO: 2502172 - RNA, 21 nt, Human
cuggaggggacgcugguagag

SEQ ID NO: 2502173 - RNA, 12 nt, Human
cuggaggcccag

SEQ ID NO: 2502174 - RNA, 23 nt, Human
cuggaggcagggccuugcccaga

SEQ ID NO: 2502175 - RNA, 16 nt, Human
cuggaggcagggccuu

SEQ ID NO: 2502176 - RNA, 19 nt, Human
cuggaggcagggccuugcc

SEQ ID NO: 2502177 - RNA, 20 nt, Human
cuggaggcagggccuugccc

SEQ ID NO: 2502178 - RNA, 22 nt, Human
cuggaggcagggccuugcccag

SEQ ID NO: 2502179 - RNA, 17 nt, Human
cuggagauccuccugca

SEQ ID NO: 2502180 - RNA, 16 nt, Human
cuggagauccuccugc

SEQ ID NO: 2502181 - RNA, 15 nt, Human
cuggagauccuccug

SEQ ID NO: 2502182 - RNA, 14 nt, Human
cuggagauccuccu

SEQ ID NO: 2502183 - RNA, 20 nt, Human
cuggagauccuccugcagac

SEQ ID NO: 2502184 - RNA, 18 nt, Human
cuggagauccuccugcag

SEQ ID NO: 2502185 - RNA, 23 nt, Human
cuggagauccuccugcagaccac

SEQ ID NO: 2502186 - RNA, 18 nt, Human
cuggagauguuuuagagu

SEQ ID NO: 2502187 - RNA, 23 nt, Human
cuggagcccagaggagggcagca

SEQ ID NO: 2502188 - RNA, 21 nt, Human
cuggagcccagaggagggcag

SEQ ID NO: 2502189 - RNA, 12 nt, Human
cuggagcccagg

SEQ ID NO: 2502190 - RNA, 13 nt, Human
cuggagcccagga

SEQ ID NO: 2502191 - RNA, 13 nt, Human
cuggagccccauc

SEQ ID NO: 2502192 - RNA, 14 nt, Human
cuggagcccaggga

SEQ ID NO: 2502193 - RNA, 13 nt, Human
cuggagcccaggg

SEQ ID NO: 2502194 - RNA, 17 nt, Human
cuggagcccagaggagg

SEQ ID NO: 2502195 - RNA, 15 nt, Human
cuggagcccaggagu

SEQ ID NO: 2502196 - RNA, 17 nt, Human
cuggagccuggugcccu

SEQ ID NO: 2502197 - RNA, 16 nt, Human
cuggagccuggugccc

SEQ ID NO: 2502198 - RNA, 15 nt, Human
cuggagccuggugcc

SEQ ID NO: 2502199 - RNA, 15 nt, Human
cuggagcccuugggu

SEQ ID NO: 2502200 - RNA, 16 nt, Human
cuggagccccugggug

SEQ ID NO: 2502201 - RNA, 15 nt, Human
cuggagccccugggu

SEQ ID NO: 2502202 - RNA, 14 nt, Human
cuggagccccuggg

SEQ ID NO: 2502203 - RNA, 12 nt, Human
cuggagccccug

SEQ ID NO: 2502204 - RNA, 18 nt, Human
cuggagccccuggguggg

SEQ ID NO: 2502205 - RNA, 17 nt, Human
cuggagccccugggugg

SEQ ID NO: 2502206 - RNA, 16 nt, Human
cuggagguugaagcca

SEQ ID NO: 2502207 - RNA, 22 nt, Human
cuggaggugggguugggauugg

SEQ ID NO: 2502208 - RNA, 20 nt, Human
cuggaggugggguugggauu

SEQ ID NO: 2502209 - RNA, 15 nt, Human
cuggaggugggguug

SEQ ID NO: 2502210 - RNA, 22 nt, Human
cuggagguggggccuggagcag

SEQ ID NO: 2502211 - RNA, 18 nt, Human
cuggagguggggccugga

SEQ ID NO: 2502212 - RNA, 22 nt, Human
cuggaggugggagcaggagauu

SEQ ID NO: 2502213 - RNA, 21 nt, Human
cuggaggugggagcaggagau

SEQ ID NO: 2502214 - RNA, 20 nt, Human
cuggaggugggagcaggaga

SEQ ID NO: 2502215 - RNA, 19 nt, Human
cuggaggugggagcaggag

SEQ ID NO: 2502216 - RNA, 18 nt, Human
cuggaggugggagcagga

SEQ ID NO: 2502217 - RNA, 17 nt, Human
cuggaggugggagcagg

SEQ ID NO: 2502218 - RNA, 16 nt, Human
cuggaggugggagcag

SEQ ID NO: 2502219 - RNA, 14 nt, Human
cuggaggugggagc

SEQ ID NO: 2502220 - RNA, 20 nt, Human
cuggagguggcugagccccu

SEQ ID NO: 2502221 - RNA, 23 nt, Human
cuggaggugccagcaaagcccca

SEQ ID NO: 2502222 - RNA, 22 nt, Human
cuggaggugccagcaaagcccc

SEQ ID NO: 2502223 - RNA, 19 nt, Human
cuggaggugccagcaaagc

SEQ ID NO: 2502224 - RNA, 16 nt, Human
cuggaggugccagcaa

SEQ ID NO: 2502225 - RNA, 21 nt, Human
cuggaggucacauucaggaag

SEQ ID NO: 2502226 - RNA, 19 nt, Human
cuggaggucacauucagga

SEQ ID NO: 2502227 - RNA, 22 nt, Human
cuggaggucacauucaggaaga

SEQ ID NO: 2502228 - RNA, 13 nt, Human
cuggaggugccag

SEQ ID NO: 2502229 - RNA, 22 nt, Human
cuggagguacgaaaagagggga

SEQ ID NO: 2502230 - RNA, 20 nt, Human
cuggagguaaggccuuugag

SEQ ID NO: 2502231 - RNA, 16 nt, Human
cuggagguaaggccuu

SEQ ID NO: 2502232 - RNA, 20 nt, Human
cuggagggguguggcuccuu

SEQ ID NO: 2502233 - RNA, 16 nt, Human
cuggagggguguggcu

SEQ ID NO: 2502234 - RNA, 17 nt, Human
cuggagguacgaaaaga

SEQ ID NO: 2502235 - RNA, 23 nt, Human
cuggaggggccccugcuucucca

SEQ ID NO: 2502236 - RNA, 17 nt, Human
cuggaggggccccugcu

SEQ ID NO: 2502237 - RNA, 16 nt, Human
cuggaggggccccugc

SEQ ID NO: 2502238 - RNA, 15 nt, Human
cuggaggggccccug

SEQ ID NO: 2502239 - RNA, 21 nt, Human
cuggaggggcuagaaccuaga

SEQ ID NO: 2502240 - RNA, 13 nt, Human
cuggaggggaggg

SEQ ID NO: 2502241 - RNA, 14 nt, Human
cuggaggggcaugg

SEQ ID NO: 2502242 - RNA, 14 nt, Human
cuggaggggccccu

SEQ ID NO: 2502243 - RNA, 12 nt, Human
cuggaggggccc

SEQ ID NO: 2502244 - RNA, 22 nt, Human
cuggaggggcauggccagcagc

SEQ ID NO: 2502245 - RNA, 23 nt, Human
cuggaggggcauggccagcagcu

SEQ ID NO: 2502246 - RNA, 17 nt, Human
cuggagugcagugagcc

SEQ ID NO: 2502247 - RNA, 16 nt, Human
cuggagugcagugagc

SEQ ID NO: 2502248 - RNA, 15 nt, Human
cuggagugcagugag

SEQ ID NO: 2502249 - RNA, 14 nt, Human
cuggagugcaguga

SEQ ID NO: 2502250 - RNA, 22 nt, Human
cuggagguugauaacuuugcuu

SEQ ID NO: 2502251 - RNA, 21 nt, Human
cuggagguugauaacuuugcu

SEQ ID NO: 2502252 - RNA, 19 nt, Human
cuggagguugauaacuuug

SEQ ID NO: 2502253 - RNA, 18 nt, Human
cuggagguugauaacuuu

SEQ ID NO: 2502254 - RNA, 17 nt, Human
cuggagguugauaacuu

SEQ ID NO: 2502255 - RNA, 15 nt, Human
cuggagguugauaac

SEQ ID NO: 2502256 - RNA, 19 nt, Human
cuggagguugaagccaagu

SEQ ID NO: 2502257 - RNA, 17 nt, Human
cuggagguugaagccaa

SEQ ID NO: 2502258 - RNA, 12 nt, Human
cuggagguuugu

SEQ ID NO: 2502259 - RNA, 17 nt, Human
cuggagguuuguuuaga

SEQ ID NO: 2502260 - RNA, 16 nt, Human
cuggagugcagggagg

SEQ ID NO: 2502261 - RNA, 12 nt, Human
cuggagugcagg

SEQ ID NO: 2502262 - RNA, 14 nt, Human
cuggagugaggggu

SEQ ID NO: 2502263 - RNA, 16 nt, Human
cuggaguccagucucu

SEQ ID NO: 2502264 - RNA, 14 nt, Human
cuggagucuccagu

SEQ ID NO: 2502265 - RNA, 15 nt, Human
cuggagugaggaaaa

SEQ ID NO: 2502266 - RNA, 15 nt, Human
cuggagucuccagug

SEQ ID NO: 2502267 - RNA, 15 nt, Human
cuggaguccagucuc

SEQ ID NO: 2502268 - RNA, 20 nt, Human
cuggagucaugccaagcauu

SEQ ID NO: 2502269 - RNA, 19 nt, Human
cuggaccccaucugugaau

SEQ ID NO: 2502270 - RNA, 20 nt, Human
cuggaccccaucugugaaua

SEQ ID NO: 2502271 - RNA, 22 nt, Human
cuggaccccaucugugaauaag

SEQ ID NO: 2502272 - RNA, 14 nt, Human
cuggacccccagcu

SEQ ID NO: 2502273 - RNA, 14 nt, Human
cuggacccuguugc

SEQ ID NO: 2502274 - RNA, 15 nt, Human
cuggacccuguggau

SEQ ID NO: 2502275 - RNA, 18 nt, Human
cuggacccuguugcuaag

SEQ ID NO: 2502276 - RNA, 17 nt, Human
cuggacccuguugcuaa

SEQ ID NO: 2502277 - RNA, 16 nt, Human
cuggacccuguugcua

SEQ ID NO: 2502278 - RNA, 15 nt, Human
cuggacccuguugcu

SEQ ID NO: 2502279 - RNA, 20 nt, Human
cuggaccuauguccuaagga

SEQ ID NO: 2502280 - RNA, 19 nt, Human
cuggaccuauguccuaagg

SEQ ID NO: 2502281 - RNA, 15 nt, Human
cuggaccuauguccu

SEQ ID NO: 2502282 - RNA, 16 nt, Human
cuggaccuugaacugg

SEQ ID NO: 2502283 - RNA, 12 nt, Human
cuggaccugccu

SEQ ID NO: 2502284 - RNA, 13 nt, Human
cuggacggcaggc

SEQ ID NO: 2502285 - RNA, 20 nt, Human
cuggaccugccuccugccug

SEQ ID NO: 2502286 - RNA, 21 nt, Human
cuggaccugccuccugccugc

SEQ ID NO: 2502287 - RNA, 17 nt, Human
cuggaccugccuccugc

SEQ ID NO: 2502288 - RNA, 15 nt, Human
cuggaccugccuccu

SEQ ID NO: 2502289 - RNA, 21 nt, Human
cuggaccuugaacuggguacu

SEQ ID NO: 2502290 - RNA, 20 nt, Human
cuggaccuugaacuggguac

SEQ ID NO: 2502291 - RNA, 17 nt, Human
cuggaccuugaacuggg

SEQ ID NO: 2502292 - RNA, 19 nt, Human
cuggacuccucuguccagg

SEQ ID NO: 2502293 - RNA, 18 nt, Human
cuggacuccucuguccag

SEQ ID NO: 2502294 - RNA, 18 nt, Human
cuggacuccggcccuccu

SEQ ID NO: 2502295 - RNA, 17 nt, Human
cuggacuccucugucca

SEQ ID NO: 2502296 - RNA, 14 nt, Human
cuggacuccucugu

SEQ ID NO: 2502297 - RNA, 22 nt, Human
cuggacggcaggcucacugcca

SEQ ID NO: 2502298 - RNA, 21 nt, Human
cuggacggcaggcucacugcc

SEQ ID NO: 2502299 - RNA, 20 nt, Human
cuggacggcaggcucacugc

SEQ ID NO: 2502300 - RNA, 14 nt, Human
cuggacggcaggcu

SEQ ID NO: 2502301 - RNA, 15 nt, Human
cuggacuccggcccu

SEQ ID NO: 2502302 - RNA, 13 nt, Human
cuggacuccggcc

SEQ ID NO: 2502303 - RNA, 17 nt, Human
cuggaccccaucuguga

SEQ ID NO: 2502304 - RNA, 18 nt, Human
cuggaccccaucugugaa

SEQ ID NO: 2502305 - RNA, 21 nt, Human
cuggaccaguggucucacaug

SEQ ID NO: 2502306 - RNA, 17 nt, Human
cuggacaggcauguucu

SEQ ID NO: 2502307 - RNA, 14 nt, Human
cuggacaggcaugu

SEQ ID NO: 2502308 - RNA, 16 nt, Human
cuggacacucagaccu

SEQ ID NO: 2502309 - RNA, 15 nt, Human
cuggacacucagacc

SEQ ID NO: 2502310 - RNA, 23 nt, Human
cuggacaggcauguucucugagg

SEQ ID NO: 2502311 - RNA, 14 nt, Human
cugcuuccuccugg

SEQ ID NO: 2502312 - RNA, 13 nt, Human
cugcuuccuccug

SEQ ID NO: 2502313 - RNA, 12 nt, Human
cugcuuccuccu

SEQ ID NO: 2502314 - RNA, 22 nt, Human
cugcuucccucugccugucccu

SEQ ID NO: 2502315 - RNA, 23 nt, Human
cugcuucccucugccugucccuc

SEQ ID NO: 2502316 - RNA, 14 nt, Human
cugcuucccauccu

SEQ ID NO: 2502317 - RNA, 13 nt, Human
cugcuucccaucc

SEQ ID NO: 2502318 - RNA, 12 nt, Human
cugcuucccauc

SEQ ID NO: 2502319 - RNA, 11 nt, Human
cugcuucccau

SEQ ID NO: 2502320 - RNA, 24 nt, Human
cugcuucccauccuacccucgggc

SEQ ID NO: 2502321 - RNA, 19 nt, Human
cugcuucccauccuacccu

SEQ ID NO: 2502322 - RNA, 18 nt, Human
cugcuucccauccuaccc

SEQ ID NO: 2502323 - RNA, 15 nt, Human
cugcuucccauccua

SEQ ID NO: 2502324 - RNA, 14 nt, Human
cugcuucccucugc

SEQ ID NO: 2502325 - RNA, 18 nt, Human
cugcuucccucugccugu

SEQ ID NO: 2502326 - RNA, 20 nt, Human
cugcuucccucugccugucc

SEQ ID NO: 2502327 - RNA, 21 nt, Human
cugcuucccucugccuguccc

SEQ ID NO: 2502328 - RNA, 23 nt, Human
cuggaauuugcaagucauggcug

SEQ ID NO: 2502329 - RNA, 22 nt, Human
cuggaauuugcaagucauggcu

SEQ ID NO: 2502330 - RNA, 21 nt, Human
cuggaauuugcaagucauggc

SEQ ID NO: 2502331 - RNA, 16 nt, Human
cugcuuccuccuggaa

SEQ ID NO: 2502332 - RNA, 15 nt, Human
cugcuuccuccugga

SEQ ID NO: 2502333 - RNA, 13 nt, Human
cuggaauuugaaa

SEQ ID NO: 2502334 - RNA, 21 nt, Human
cuggacaagccaacuuguaaa

SEQ ID NO: 2502335 - RNA, 15 nt, Human
cuggacaagccaacu

SEQ ID NO: 2502336 - RNA, 11 nt, Human
cuggacaagcc

SEQ ID NO: 2502337 - RNA, 18 nt, Human
cuggacaagcagaggugg

SEQ ID NO: 2502338 - RNA, 15 nt, Human
cuggacaagcagagg

SEQ ID NO: 2502339 - RNA, 22 nt, Human
cuggacaccgggccaguaucua

SEQ ID NO: 2502340 - RNA, 23 nt, Human
cuggacaagccaacuuguaaaua

SEQ ID NO: 2502341 - RNA, 17 nt, Human
cuggacaccgggccagu

SEQ ID NO: 2502342 - RNA, 14 nt, Human
cugcugcugucccu

SEQ ID NO: 2502343 - RNA, 15 nt, Human
cugcugcuggcuggu

SEQ ID NO: 2502344 - RNA, 21 nt, Human
cugcugcuaaucuucagggca

SEQ ID NO: 2502345 - RNA, 19 nt, Human
cugcugccgccccacccag

SEQ ID NO: 2502346 - RNA, 14 nt, Human
cugcugccgccucc

SEQ ID NO: 2502347 - RNA, 17 nt, Human
cugcugccgccucccag

SEQ ID NO: 2502348 - RNA, 19 nt, Human
cugcugccgccucccagcc

SEQ ID NO: 2502349 - RNA, 21 nt, Human
cugcugcgcccuuaccuuccc

SEQ ID NO: 2502350 - RNA, 20 nt, Human
cugcugcgcccuuaccuucc

SEQ ID NO: 2502351 - RNA, 17 nt, Human
cugcugcgcccuuaccu

SEQ ID NO: 2502352 - RNA, 18 nt, Human
cugcugcgcccugggcuc

SEQ ID NO: 2502353 - RNA, 17 nt, Human
cugcugcgcccugggcu

SEQ ID NO: 2502354 - RNA, 20 nt, Human
cugcugccgccccacccaga

SEQ ID NO: 2502355 - RNA, 16 nt, Human
cugcugcgcccugggc

SEQ ID NO: 2502356 - RNA, 15 nt, Human
cugcuggccuggauc

SEQ ID NO: 2502357 - RNA, 14 nt, Human
cugcuggccuggau

SEQ ID NO: 2502358 - RNA, 13 nt, Human
cugcuggccugga

SEQ ID NO: 2502359 - RNA, 12 nt, Human
cugcuggccugg

SEQ ID NO: 2502360 - RNA, 18 nt, Human
cugcuggccgccucaccc

SEQ ID NO: 2502361 - RNA, 15 nt, Human
cugcuggccgccuca

SEQ ID NO: 2502362 - RNA, 20 nt, Human
cugcuggccgccucaccccc

SEQ ID NO: 2502363 - RNA, 16 nt, Human
cugcuggccggagcaa

SEQ ID NO: 2502364 - RNA, 15 nt, Human
cugcuggccggagca

SEQ ID NO: 2502365 - RNA, 11 nt, Human
cugcuggcccc

SEQ ID NO: 2502366 - RNA, 14 nt, Human
cugcuggccccuca

SEQ ID NO: 2502367 - RNA, 15 nt, Human
cugcuggccccucac

SEQ ID NO: 2502368 - RNA, 16 nt, Human
cugcuggccccucacc

SEQ ID NO: 2502369 - RNA, 17 nt, Human
cugcuggccccucaccu

SEQ ID NO: 2502370 - RNA, 13 nt, Human
cugcuggccgccu

SEQ ID NO: 2502371 - RNA, 23 nt, Human
cugcuggccccucaccugggcac

SEQ ID NO: 2502372 - RNA, 17 nt, Human
cugcuggcacccaccgu

SEQ ID NO: 2502373 - RNA, 16 nt, Human
cugcuggcacccaccg

SEQ ID NO: 2502374 - RNA, 15 nt, Human
cugcuggcccagcca

SEQ ID NO: 2502375 - RNA, 16 nt, Human
cugcuggcccagccaa

SEQ ID NO: 2502376 - RNA, 22 nt, Human
cugcuggcccagccaaacccug

SEQ ID NO: 2502377 - RNA, 21 nt, Human
cugcuggaucacagcugcuuu

SEQ ID NO: 2502378 - RNA, 21 nt, Human
cugcuggaguuucauguacaa

SEQ ID NO: 2502379 - RNA, 14 nt, Human
cugcuggcacccac

SEQ ID NO: 2502380 - RNA, 23 nt, Human
cugcuggaucacagcugcuuucu

SEQ ID NO: 2502381 - RNA, 21 nt, Human
cugcuggcacauuuccccaga

SEQ ID NO: 2502382 - RNA, 20 nt, Human
cugcuggaguuucauguaca

SEQ ID NO: 2502383 - RNA, 11 nt, Human
cugcuggagga

SEQ ID NO: 2502384 - RNA, 13 nt, Human
cugcugcuguguu

SEQ ID NO: 2502385 - RNA, 13 nt, Human
cugcugcuucuua

SEQ ID NO: 2502386 - RNA, 15 nt, Human
cugcuggacaguauc

SEQ ID NO: 2502387 - RNA, 20 nt, Human
cugcuggacaguaucacugu

SEQ ID NO: 2502388 - RNA, 22 nt, Human
cugcuggacaguaucacugucu

SEQ ID NO: 2502389 - RNA, 22 nt, Human
cugcugcuuuuugagguggcac

SEQ ID NO: 2502390 - RNA, 20 nt, Human
cugcugcuuuuugagguggc

SEQ ID NO: 2502391 - RNA, 15 nt, Human
cugcuggaaacagac

SEQ ID NO: 2502392 - RNA, 23 nt, Human
cugcugguucaggguuggccccu

SEQ ID NO: 2502393 - RNA, 15 nt, Human
cugcugguucagggu

SEQ ID NO: 2502394 - RNA, 19 nt, Human
cugcugggcuggggccuga

SEQ ID NO: 2502395 - RNA, 18 nt, Human
cugcugggcuggggccug

SEQ ID NO: 2502396 - RNA, 21 nt, Human
cugcugggcuggggccugaug

SEQ ID NO: 2502397 - RNA, 13 nt, Human
cugcugguucagg

SEQ ID NO: 2502398 - RNA, 17 nt, Human
cugcuggcgccucugca

SEQ ID NO: 2502399 - RNA, 16 nt, Human
cugcuggcgccucugc

SEQ ID NO: 2502400 - RNA, 15 nt, Human
cugcuggcgccucug

SEQ ID NO: 2502401 - RNA, 14 nt, Human
cugcuggcgccucu

SEQ ID NO: 2502402 - RNA, 20 nt, Human
cugcuggccuggccggcaac

SEQ ID NO: 2502403 - RNA, 16 nt, Human
cugcuggccuggccgg

SEQ ID NO: 2502404 - RNA, 13 nt, Human
cugcuggccuggc

SEQ ID NO: 2502405 - RNA, 16 nt, Human
cugcuggccuggaucu

SEQ ID NO: 2502406 - RNA, 19 nt, Human
cugcuggcucuucugccca

SEQ ID NO: 2502407 - RNA, 12 nt, Human
cugcuggcucuu

SEQ ID NO: 2502408 - RNA, 20 nt, Human
cugcuggcgccucugcaagg

SEQ ID NO: 2502409 - RNA, 18 nt, Human
cugcuggcgccucugcaa

SEQ ID NO: 2502410 - RNA, 15 nt, Human
cugcugggcucucca

SEQ ID NO: 2502411 - RNA, 17 nt, Human
cugcugggcuggggccu

SEQ ID NO: 2502412 - RNA, 15 nt, Human
cugcugggcuggggc

SEQ ID NO: 2502413 - RNA, 14 nt, Human
cugcugggcugggg

SEQ ID NO: 2502414 - RNA, 13 nt, Human
cugcugggcuggg

SEQ ID NO: 2502415 - RNA, 11 nt, Human
cugcugggcuu

SEQ ID NO: 2502416 - RNA, 16 nt, Human
cugcugggcucuccac

SEQ ID NO: 2502417 - RNA, 17 nt, Human
cugcugggcucuccacc

SEQ ID NO: 2502418 - RNA, 18 nt, Human
cugcugggcucuccaccu

SEQ ID NO: 2502419 - RNA, 19 nt, Human
cugcugggcucuccaccuc

SEQ ID NO: 2502420 - RNA, 21 nt, Human
cugcugggcucuccaccucag

SEQ ID NO: 2502421 - RNA, 22 nt, Human
cugcugggcucuccaccucagc

SEQ ID NO: 2502422 - RNA, 12 nt, Human
cugcugggcugg

SEQ ID NO: 2502423 - RNA, 23 nt, Human
cugcugggcucuccaccucagcc

SEQ ID NO: 2502424 - RNA, 23 nt, Human
cugcuuccagugaggcucugccc

SEQ ID NO: 2502425 - RNA, 21 nt, Human
cugcuuccagugaggcucugc

SEQ ID NO: 2502426 - RNA, 20 nt, Human
cugcuuccagugaggcucug

SEQ ID NO: 2502427 - RNA, 19 nt, Human
cugcuuccagugaggcucu

SEQ ID NO: 2502428 - RNA, 18 nt, Human
cugcuuccagugaggcuc

SEQ ID NO: 2502429 - RNA, 16 nt, Human
cugcuuccagugaggc

SEQ ID NO: 2502430 - RNA, 15 nt, Human
cugcuuccagugagg

SEQ ID NO: 2502431 - RNA, 21 nt, Human
cugcugguuaacuuguuuggc

SEQ ID NO: 2502432 - RNA, 18 nt, Human
cugcugcaggggcucugg

SEQ ID NO: 2502433 - RNA, 17 nt, Human
cugcugcaggggcucug

SEQ ID NO: 2502434 - RNA, 16 nt, Human
cugcugcaggggcucu

SEQ ID NO: 2502435 - RNA, 14 nt, Human
cugcugcaggggcu

SEQ ID NO: 2502436 - RNA, 13 nt, Human
cugcugcaggggc

SEQ ID NO: 2502437 - RNA, 12 nt, Human
cugcugcagggg

SEQ ID NO: 2502438 - RNA, 11 nt, Human
cugcugcaggg

SEQ ID NO: 2502439 - RNA, 23 nt, Human
cugcugcagaggggcaggcccug

SEQ ID NO: 2502440 - RNA, 20 nt, Human
cugcugcaggggcucuggag

SEQ ID NO: 2502441 - RNA, 19 nt, Human
cugcugcaggggcucugga

SEQ ID NO: 2502442 - RNA, 22 nt, Human
cugcugccauggcgugucccuc

SEQ ID NO: 2502443 - RNA, 16 nt, Human
cugcugcauggggugg

SEQ ID NO: 2502444 - RNA, 21 nt, Human
cugcugcccccaccccgggga

SEQ ID NO: 2502445 - RNA, 22 nt, Human
cugcugcccccaccccggggac

SEQ ID NO: 2502446 - RNA, 12 nt, Human
cugcugcccagg

SEQ ID NO: 2502447 - RNA, 15 nt, Human
cugcugcccccaccc

SEQ ID NO: 2502448 - RNA, 12 nt, Human
cugcugcccucc

SEQ ID NO: 2502449 - RNA, 17 nt, Human
cugcugcccuccauccc

SEQ ID NO: 2502450 - RNA, 13 nt, Human
cugcugcccucca

SEQ ID NO: 2502451 - RNA, 14 nt, Human
cugcugcccuccau

SEQ ID NO: 2502452 - RNA, 22 nt, Human
cugcugcccagccuccaagcuc

SEQ ID NO: 2502453 - RNA, 14 nt, Human
cugcugcccccacc

SEQ ID NO: 2502454 - RNA, 15 nt, Human
cugcugcccagccuc

SEQ ID NO: 2502455 - RNA, 12 nt, Human
cugcugcccagc

SEQ ID NO: 2502456 - RNA, 21 nt, Human
cugcugcaaggccuuucugug

SEQ ID NO: 2502457 - RNA, 19 nt, Human
cugcugcaaggccuuucug

SEQ ID NO: 2502458 - RNA, 16 nt, Human
cugcugcaaggccuuu

SEQ ID NO: 2502459 - RNA, 15 nt, Human
cugcugcaaggccuu

SEQ ID NO: 2502460 - RNA, 13 nt, Human
cugcugcaaggcc

SEQ ID NO: 2502461 - RNA, 11 nt, Human
cugcugaaggc

SEQ ID NO: 2502462 - RNA, 23 nt, Human
cugcugcaccaacccagccgcug

SEQ ID NO: 2502463 - RNA, 20 nt, Human
cugcugcaccaacccagccg

SEQ ID NO: 2502464 - RNA, 19 nt, Human
cugcugcaccaacccagcc

SEQ ID NO: 2502465 - RNA, 18 nt, Human
cugcugcaccaacccagc

SEQ ID NO: 2502466 - RNA, 17 nt, Human
cugcugcaccaacccag

SEQ ID NO: 2502467 - RNA, 15 nt, Human
cugcugcaccaaccc

SEQ ID NO: 2502468 - RNA, 23 nt, Human
cugcugcaaggccuuucugugug

SEQ ID NO: 2502469 - RNA, 22 nt, Human
cugcugcaaggccuuucugugu

SEQ ID NO: 2502470 - RNA, 22 nt, Human
cugcugcagaggggcaggcccu

SEQ ID NO: 2502471 - RNA, 21 nt, Human
cugcugcagaggggcaggccc

SEQ ID NO: 2502472 - RNA, 18 nt, Human
cugcugcagaggggcagg

SEQ ID NO: 2502473 - RNA, 17 nt, Human
cugcugcagaggggcag

SEQ ID NO: 2502474 - RNA, 16 nt, Human
cugcugcagaggggca

SEQ ID NO: 2502475 - RNA, 20 nt, Human
cugcugaagcugccugcuuu

SEQ ID NO: 2502476 - RNA, 19 nt, Human
cugcugaagcugccugcuu

SEQ ID NO: 2502477 - RNA, 16 nt, Human
cugcugaagcugccug

SEQ ID NO: 2502478 - RNA, 15 nt, Human
cugcugaagcugccu

SEQ ID NO: 2502479 - RNA, 21 nt, Human
cugcugaagaugaaucaaugg

SEQ ID NO: 2502480 - RNA, 15 nt, Human
cugcucuccuuccug

SEQ ID NO: 2502481 - RNA, 18 nt, Human
cugcugaaggaauaaauu

SEQ ID NO: 2502482 - RNA, 17 nt, Human
cugcugaaggaauaaau

SEQ ID NO: 2502483 - RNA, 13 nt, Human
cugcucuccuucc

SEQ ID NO: 2502484 - RNA, 12 nt, Human
cugcucuccuuc

SEQ ID NO: 2502485 - RNA, 21 nt, Human
cugcucuccucuugccacugc

SEQ ID NO: 2502486 - RNA, 18 nt, Human
cugcugaaacaacaaaua

SEQ ID NO: 2502487 - RNA, 23 nt, Human
cugcuccucccuggcugcccugg

SEQ ID NO: 2502488 - RNA, 22 nt, Human
cugcuccucccuggcugcccug

SEQ ID NO: 2502489 - RNA, 13 nt, Human
cugcuccucucca

SEQ ID NO: 2502490 - RNA, 20 nt, Human
cugcucuccucuugccacug

SEQ ID NO: 2502491 - RNA, 14 nt, Human
cugcucuccucuug

SEQ ID NO: 2502492 - RNA, 21 nt, Human
cugcuccucccuggcugcccu

SEQ ID NO: 2502493 - RNA, 20 nt, Human
cugcuccucccuggcugccc

SEQ ID NO: 2502494 - RNA, 19 nt, Human
cugcuccucccuggcugcc

SEQ ID NO: 2502495 - RNA, 18 nt, Human
cugcuccucccuggcugc

SEQ ID NO: 2502496 - RNA, 17 nt, Human
cugcuccucccuggcug

SEQ ID NO: 2502497 - RNA, 16 nt, Human
cugcuccucccuggcu

SEQ ID NO: 2502498 - RNA, 15 nt, Human
cugcuccucccuggc

SEQ ID NO: 2502499 - RNA, 14 nt, Human
cugcuccucccugg

SEQ ID NO: 2502500 - RNA, 19 nt, Human
cugcucuccgaccagacac

SEQ ID NO: 2502501 - RNA, 20 nt, Human
cugcgaucuucagagcaggg

SEQ ID NO: 2502502 - RNA, 14 nt, Human
cugcuccuagaggg

SEQ ID NO: 2502503 - RNA, 15 nt, Human
cugcuccuagaggga

SEQ ID NO: 2502504 - RNA, 17 nt, Human
cugcuccuagagggagg

SEQ ID NO: 2502505 - RNA, 21 nt, Human
cugcuccuagagggaggggcc

SEQ ID NO: 2502506 - RNA, 22 nt, Human
cugcuccuagagggaggggccu

SEQ ID NO: 2502507 - RNA, 12 nt, Human
cugcuccuccag

SEQ ID NO: 2502508 - RNA, 11 nt, Human
cugcuccucca

SEQ ID NO: 2502509 - RNA, 13 nt, Human
cugcuccucaugg

SEQ ID NO: 2502510 - RNA, 14 nt, Human
cugcuccucauggu

SEQ ID NO: 2502511 - RNA, 13 nt, Human
cugcuccuccagg

SEQ ID NO: 2502512 - RNA, 14 nt, Human
cugcuccuccaggg

SEQ ID NO: 2502513 - RNA, 16 nt, Human
cugcuccuccagggcc

SEQ ID NO: 2502514 - RNA, 17 nt, Human
cugcuccuccagggcca

SEQ ID NO: 2502515 - RNA, 13 nt, Human
cugcuccucccug

SEQ ID NO: 2502516 - RNA, 12 nt, Human
cugcuccucccu

SEQ ID NO: 2502517 - RNA, 22 nt, Human
cugcuccuccagggccacgugc

SEQ ID NO: 2502518 - RNA, 24 nt, Human
cugcuccuccagggccacgugcca

SEQ ID NO: 2502519 - RNA, 18 nt, Human
cugccuuuauuguguuug

SEQ ID NO: 2502520 - RNA, 17 nt, Human
cugccuuuauuguguuu

SEQ ID NO: 2502521 - RNA, 15 nt, Human
cugccuuuauugugu

SEQ ID NO: 2502522 - RNA, 17 nt, Human
cugcgacuuucugccug

SEQ ID NO: 2502523 - RNA, 16 nt, Human
cugcgacuuucugccu

SEQ ID NO: 2502524 - RNA, 14 nt, Human
cugcgacuuucugc

SEQ ID NO: 2502525 - RNA, 19 nt, Human
cugcgaccacaagaaggau

SEQ ID NO: 2502526 - RNA, 14 nt, Human
cugccuuguguaca

SEQ ID NO: 2502527 - RNA, 12 nt, Human
cugccuuuauug

SEQ ID NO: 2502528 - RNA, 20 nt, Human
cugccuuuagucgcugagga

SEQ ID NO: 2502529 - RNA, 17 nt, Human
cugcgauuuugccugug

SEQ ID NO: 2502530 - RNA, 19 nt, Human
cugcgaucuucagagcagg

SEQ ID NO: 2502531 - RNA, 17 nt, Human
cugcgaucuucagagca

SEQ ID NO: 2502532 - RNA, 14 nt, Human
cugcgaucuucaga

SEQ ID NO: 2502533 - RNA, 20 nt, Human
cugcuccagcuguucagcug

SEQ ID NO: 2502534 - RNA, 19 nt, Human
cugcuccagcuguucagcu

SEQ ID NO: 2502535 - RNA, 19 nt, Human
cugcgacuuucugccugga

SEQ ID NO: 2502536 - RNA, 18 nt, Human
cugcgacuuucugccugg

SEQ ID NO: 2502537 - RNA, 20 nt, Human
cugcgacuuucugccuggag

SEQ ID NO: 2502538 - RNA, 15 nt, Human
cugccgaccagagcc

SEQ ID NO: 2502539 - RNA, 16 nt, Human
cugccgaccagagccc

SEQ ID NO: 2502540 - RNA, 16 nt, Human
cugccgaccgaggcug

SEQ ID NO: 2502541 - RNA, 21 nt, Human
cugccgaccgaggcuggagcu

SEQ ID NO: 2502542 - RNA, 22 nt, Human
cugccgaccgaggcuggagcug

SEQ ID NO: 2502543 - RNA, 13 nt, Human
cugccgaccagag

SEQ ID NO: 2502544 - RNA, 21 nt, Human
cugcccuuucugggcaccggg

SEQ ID NO: 2502545 - RNA, 16 nt, Human
cugcccuugucugaga

SEQ ID NO: 2502546 - RNA, 23 nt, Human
cugcccuugucccacucaagcca

SEQ ID NO: 2502547 - RNA, 22 nt, Human
cugcccuuccucaguuuaaucc

SEQ ID NO: 2502548 - RNA, 15 nt, Human
cugcccuugucccac

SEQ ID NO: 2502549 - RNA, 17 nt, Human
cugcccuugucccacuc

SEQ ID NO: 2502550 - RNA, 18 nt, Human
cugcccuugucccacuca

SEQ ID NO: 2502551 - RNA, 15 nt, Human
cugccgcagcccugc

SEQ ID NO: 2502552 - RNA, 17 nt, Human
cugccgcaacaguuuuu

SEQ ID NO: 2502553 - RNA, 14 nt, Human
cugccgcagcccug

SEQ ID NO: 2502554 - RNA, 15 nt, Human
cugccgacuccuggg

SEQ ID NO: 2502555 - RNA, 14 nt, Human
cugccgacuccugg

SEQ ID NO: 2502556 - RNA, 19 nt, Human
cugccgacuccuggguuga

SEQ ID NO: 2502557 - RNA, 23 nt, Human
cugccgaccgaggcuggagcugg

SEQ ID NO: 2502558 - RNA, 15 nt, Human
cugccgaccucgucc

SEQ ID NO: 2502559 - RNA, 17 nt, Human
cugccgaccucguccuc

SEQ ID NO: 2502560 - RNA, 19 nt, Human
cugccgaccucguccuccc

SEQ ID NO: 2502561 - RNA, 18 nt, Human
cugccgcagcccugcaga

SEQ ID NO: 2502562 - RNA, 17 nt, Human
cugccgcagcccugcag

SEQ ID NO: 2502563 - RNA, 14 nt, Human
cugccggguucuag

SEQ ID NO: 2502564 - RNA, 18 nt, Human
cugccgcaauacaggaac

SEQ ID NO: 2502565 - RNA, 17 nt, Human
cugccgcaauacaggaa

SEQ ID NO: 2502566 - RNA, 19 nt, Human
cugccgcaauacaggaacc

SEQ ID NO: 2502567 - RNA, 22 nt, Human
cugccggcucuuuccuugcuca

SEQ ID NO: 2502568 - RNA, 20 nt, Human
cugccggcucuuuccuugcu

SEQ ID NO: 2502569 - RNA, 14 nt, Human
cugccggcucuuuc

SEQ ID NO: 2502570 - RNA, 21 nt, Human
cugccguggggccgccgccuc

SEQ ID NO: 2502571 - RNA, 20 nt, Human
cugccguggggccgccgccu

SEQ ID NO: 2502572 - RNA, 13 nt, Human
cugccguggggcc

SEQ ID NO: 2502573 - RNA, 23 nt, Human
cugccggguucuagucuccuuug

SEQ ID NO: 2502574 - RNA, 21 nt, Human
cugccggguucuagucuccuu

SEQ ID NO: 2502575 - RNA, 20 nt, Human
cugccggguucuagucuccu

SEQ ID NO: 2502576 - RNA, 19 nt, Human
cugccggguucuagucucc

SEQ ID NO: 2502577 - RNA, 18 nt, Human
cugccgguaaacacgccu

SEQ ID NO: 2502578 - RNA, 21 nt, Human
cugccgguaaacacgccugca

SEQ ID NO: 2502579 - RNA, 12 nt, Human
cugcccucaugg

SEQ ID NO: 2502580 - RNA, 20 nt, Human
cugcccugcgggucacagga

SEQ ID NO: 2502581 - RNA, 13 nt, Human
cugcccucaggga

SEQ ID NO: 2502582 - RNA, 11 nt, Human
cugcccugcug

SEQ ID NO: 2502583 - RNA, 15 nt, Human
cugcccuggcccuga

SEQ ID NO: 2502584 - RNA, 14 nt, Human
cugcccuggcccug

SEQ ID NO: 2502585 - RNA, 13 nt, Human
cugcccuggcccu

SEQ ID NO: 2502586 - RNA, 12 nt, Human
cugcccuggccc

SEQ ID NO: 2502587 - RNA, 16 nt, Human
cugcccugccugaggg

SEQ ID NO: 2502588 - RNA, 22 nt, Human
cugcccugcugagucccaggcu

SEQ ID NO: 2502589 - RNA, 21 nt, Human
cugcccugcugccgccuccca

SEQ ID NO: 2502590 - RNA, 22 nt, Human
cugcccugcugccgccucccag

SEQ ID NO: 2502591 - RNA, 22 nt, Human
cugcccuggcccugaggugugg

SEQ ID NO: 2502592 - RNA, 18 nt, Human
cugcccuggcccugaggu

SEQ ID NO: 2502593 - RNA, 17 nt, Human
cugcccuggcccugagg

SEQ ID NO: 2502594 - RNA, 16 nt, Human
cugcccuggcccugag

SEQ ID NO: 2502595 - RNA, 14 nt, Human
cugcccuggcugcu

SEQ ID NO: 2502596 - RNA, 23 nt, Human
cugcccuggcccugagguguggg

SEQ ID NO: 2502597 - RNA, 12 nt, Human
cugcccuggcug

SEQ ID NO: 2502598 - RNA, 15 nt, Human
cugcccuuccucagu

SEQ ID NO: 2502599 - RNA, 14 nt, Human
cugcccuuccucag

SEQ ID NO: 2502600 - RNA, 17 nt, Human
cugcccuggcugcugcc

SEQ ID NO: 2502601 - RNA, 16 nt, Human
cugcccuggcugcugc

SEQ ID NO: 2502602 - RNA, 12 nt, Human
cugcccuuccuc

SEQ ID NO: 2502603 - RNA, 17 nt, Human
cucccuucccaccucuc

SEQ ID NO: 2502604 - RNA, 16 nt, Human
cucccuucccaccucu

SEQ ID NO: 2502605 - RNA, 15 nt, Human
cucccuucccaccuc

SEQ ID NO: 2502606 - RNA, 14 nt, Human
cucccuucccaccu

SEQ ID NO: 2502607 - RNA, 12 nt, Human
cugcccuccaag

SEQ ID NO: 2502608 - RNA, 19 nt, Human
cugcccucauggccccucu

SEQ ID NO: 2502609 - RNA, 12 nt, Human
cugcccucaggg

SEQ ID NO: 2502610 - RNA, 18 nt, Human
cugcccuaggcuccguca

SEQ ID NO: 2502611 - RNA, 15 nt, Human
cugcccuagagcaca

SEQ ID NO: 2502612 - RNA, 19 nt, Human
cucccuucaugcauggaaa

SEQ ID NO: 2502613 - RNA, 19 nt, Human
cugcccuagagcacacugu

SEQ ID NO: 2502614 - RNA, 21 nt, Human
cugcccuagagcacacuguag

SEQ ID NO: 2502615 - RNA, 15 nt, Human
cugcccuagcuccac

SEQ ID NO: 2502616 - RNA, 16 nt, Human
cugcccuagcuccaca

SEQ ID NO: 2502617 - RNA, 22 nt, Human
cugcccuagcuccacacccucu

SEQ ID NO: 2502618 - RNA, 12 nt, Human
cugcccuaggcu

SEQ ID NO: 2502619 - RNA, 19 nt, Human
cugccucucugcagguccc

SEQ ID NO: 2502620 - RNA, 15 nt, Human
cugccucugagggaa

SEQ ID NO: 2502621 - RNA, 14 nt, Human
cugccucugaggga

SEQ ID NO: 2502622 - RNA, 22 nt, Human
cugccuccccaacccugccccu

SEQ ID NO: 2502623 - RNA, 21 nt, Human
cugccucugagggaaagccca

SEQ ID NO: 2502624 - RNA, 14 nt, Human
cugccucugccugc

SEQ ID NO: 2502625 - RNA, 17 nt, Human
cugccucugccugcauu

SEQ ID NO: 2502626 - RNA, 20 nt, Human
cugccucugccugcauucug

SEQ ID NO: 2502627 - RNA, 16 nt, Human
cugccucuucugggag

SEQ ID NO: 2502628 - RNA, 17 nt, Human
cugccucuucugggagg

SEQ ID NO: 2502629 - RNA, 15 nt, Human
cugccucuucucuac

SEQ ID NO: 2502630 - RNA, 17 nt, Human
cugccugcccaggcccc

SEQ ID NO: 2502631 - RNA, 16 nt, Human
cugccugcccaggccc

SEQ ID NO: 2502632 - RNA, 16 nt, Human
cugccucuucuguggg

SEQ ID NO: 2502633 - RNA, 22 nt, Human
cugccucuucugggagggcagc

SEQ ID NO: 2502634 - RNA, 15 nt, Human
cugccugaagucaca

SEQ ID NO: 2502635 - RNA, 20 nt, Human
cugccugcccaggccccugc

SEQ ID NO: 2502636 - RNA, 18 nt, Human
cugccucugccugcauuc

SEQ ID NO: 2502637 - RNA, 17 nt, Human
cugccugaaccuuccau

SEQ ID NO: 2502638 - RNA, 12 nt, Human
cugccuggccag

SEQ ID NO: 2502639 - RNA, 13 nt, Human
cugccuggccagg

SEQ ID NO: 2502640 - RNA, 15 nt, Human
cugccuggccaggca

SEQ ID NO: 2502641 - RNA, 21 nt, Human
cugccuggccaggcagaucug

SEQ ID NO: 2502642 - RNA, 16 nt, Human
cugccuggccaggcag

SEQ ID NO: 2502643 - RNA, 17 nt, Human
cugccuggccaggcaga

SEQ ID NO: 2502644 - RNA, 18 nt, Human
cugccuggcccccugucc

SEQ ID NO: 2502645 - RNA, 14 nt, Human
cugccuggccccca

SEQ ID NO: 2502646 - RNA, 16 nt, Human
cugccuggcccccagc

SEQ ID NO: 2502647 - RNA, 20 nt, Human
cugccuggcccccagcugug

SEQ ID NO: 2502648 - RNA, 21 nt, Human
cugccugggaucccucauccu

SEQ ID NO: 2502649 - RNA, 15 nt, Human
cugccuuggcucaga

SEQ ID NO: 2502650 - RNA, 17 nt, Human
cugccuuggcucagaca

SEQ ID NO: 2502651 - RNA, 18 nt, Human
cugccuuggcucagacau

SEQ ID NO: 2502652 - RNA, 22 nt, Human
cugccuuggcucagacauguuu

SEQ ID NO: 2502653 - RNA, 14 nt, Human
cugccuuggcucag

SEQ ID NO: 2502654 - RNA, 19 nt, Human
cugccucccaucacccgcu

SEQ ID NO: 2502655 - RNA, 16 nt, Human
cugccucccaucaccc

SEQ ID NO: 2502656 - RNA, 14 nt, Human
cugccucccaucac

SEQ ID NO: 2502657 - RNA, 12 nt, Human
cugccucccauc

SEQ ID NO: 2502658 - RNA, 14 nt, Human
cugccgugugcccu

SEQ ID NO: 2502659 - RNA, 11 nt, Human
cugccucccau

SEQ ID NO: 2502660 - RNA, 13 nt, Human
cugccuaagcccu

SEQ ID NO: 2502661 - RNA, 23 nt, Human
cugccucugacacacagcucugu

SEQ ID NO: 2502662 - RNA, 22 nt, Human
cugccucugacacacagcucug

SEQ ID NO: 2502663 - RNA, 22 nt, Human
cugccucucugcaggucccuaa

SEQ ID NO: 2502664 - RNA, 15 nt, Human
cugccucugacacac

SEQ ID NO: 2502665 - RNA, 21 nt, Human
cugccucucugcaggucccua

SEQ ID NO: 2502666 - RNA, 20 nt, Human
cugccucucugcaggucccu

SEQ ID NO: 2502667 - RNA, 15 nt, Human
cugccuccccaaccc

SEQ ID NO: 2502668 - RNA, 16 nt, Human
cugccuccccaacccu

SEQ ID NO: 2502669 - RNA, 18 nt, Human
cugccuccccaacccugc

SEQ ID NO: 2502670 - RNA, 19 nt, Human
cugccuccccaacccugcc

SEQ ID NO: 2502671 - RNA, 16 nt, Human
cugccucccauucuga

SEQ ID NO: 2502672 - RNA, 18 nt, Human
cugccuccauucugacca

SEQ ID NO: 2502673 - RNA, 12 nt, Human
cugccuccccaa

SEQ ID NO: 2502674 - RNA, 14 nt, Human
cugccuccccaacc

SEQ ID NO: 2502675 - RNA, 23 nt, Human
gagcaggaagcauucagagagca

SEQ ID NO: 2502676 - RNA, 16 nt, Human
gagcaggaagcauuca

SEQ ID NO: 2502677 - RNA, 23 nt, Human
gagcagcuuuaaacucagggaca

SEQ ID NO: 2502678 - RNA, 22 nt, Human
gagcagcuuuaaacucagggac

SEQ ID NO: 2502679 - RNA, 21 nt, Human
gagcagcuuuaaacucaggga

SEQ ID NO: 2502680 - RNA, 18 nt, Human
gagcagcuuuaaacucag

SEQ ID NO: 2502681 - RNA, 17 nt, Human
gagcagcuuuaaacuca

SEQ ID NO: 2502682 - RNA, 21 nt, Human
gagcagcuucugccacuuccc

SEQ ID NO: 2502683 - RNA, 20 nt, Human
gagcagcuucugccacuucc

SEQ ID NO: 2502684 - RNA, 17 nt, Human
gagcagcuucugccacu

SEQ ID NO: 2502685 - RNA, 16 nt, Human
gagcagcuucugccac

SEQ ID NO: 2502686 - RNA, 15 nt, Human
gagcagcuucaguug

SEQ ID NO: 2502687 - RNA, 22 nt, Human
gagcaggaagcauucagagagc

SEQ ID NO: 2502688 - RNA, 22 nt, Human
gagcaggaccucugaaacccug

SEQ ID NO: 2502689 - RNA, 17 nt, Human
gagcauuacgugagcca

SEQ ID NO: 2502690 - RNA, 12 nt, Human
gagcagagacca

SEQ ID NO: 2502691 - RNA, 18 nt, Human
gagcagcgguuuggggag

SEQ ID NO: 2502692 - RNA, 16 nt, Human
gagcagagaauucucu

SEQ ID NO: 2502693 - RNA, 23 nt, Human
gagcagacuggugagcagacugg

SEQ ID NO: 2502694 - RNA, 15 nt, Human
gagcagacugguggg

SEQ ID NO: 2502695 - RNA, 12 nt, Human
gagcagagacac

SEQ ID NO: 2502696 - RNA, 13 nt, Human
gagcagagacacu

SEQ ID NO: 2502697 - RNA, 21 nt, Human
gagcagagacacuaacgacuu

SEQ ID NO: 2502698 - RNA, 24 nt, Human
gagcagagacaugacucagccugu

SEQ ID NO: 2502699 - RNA, 19 nt, Human
gagccaauuuaaagaaaac

SEQ ID NO: 2502700 - RNA, 19 nt, Human
gagccaaggguucagagac

SEQ ID NO: 2502701 - RNA, 20 nt, Human
gagccagauuucacucuccu

SEQ ID NO: 2502702 - RNA, 23 nt, Human
gagccaaggguucagagacucag

SEQ ID NO: 2502703 - RNA, 14 nt, Human
gagccaaguccaga

SEQ ID NO: 2502704 - RNA, 15 nt, Human
gagcauuagauuucu

SEQ ID NO: 2502705 - RNA, 21 nt, Human
gagcauuagauuucucauuug

SEQ ID NO: 2502706 - RNA, 20 nt, Human
gagcauuacgugagccaggu

SEQ ID NO: 2502707 - RNA, 18 nt, Human
gagcauuacgugagccag

SEQ ID NO: 2502708 - RNA, 21 nt, Human
gagcauuacgugagccaggua

SEQ ID NO: 2502709 - RNA, 17 nt, Human
gagcauugccauucccu

SEQ ID NO: 2502710 - RNA, 23 nt, Human
gagcauuuccaacaccacagaca

SEQ ID NO: 2502711 - RNA, 15 nt, Human
gagcauuggcugaga

SEQ ID NO: 2502712 - RNA, 19 nt, Human
gagcauuguggcugucagc

SEQ ID NO: 2502713 - RNA, 17 nt, Human
gagcauuuagggcaagg

SEQ ID NO: 2502714 - RNA, 21 nt, Human
gagccaagaucgcgccacugc

SEQ ID NO: 2502715 - RNA, 15 nt, Human
gagccaacugcugcu

SEQ ID NO: 2502716 - RNA, 14 nt, Human
gagccaacugcugc

SEQ ID NO: 2502717 - RNA, 20 nt, Human
gagccaacagaagcuuccau

SEQ ID NO: 2502718 - RNA, 23 nt, Human
gagcccaggaguucgaggcugca

SEQ ID NO: 2502719 - RNA, 18 nt, Human
gagcccugguggcagugg

SEQ ID NO: 2502720 - RNA, 13 nt, Human
gagcccagcuggg

SEQ ID NO: 2502721 - RNA, 19 nt, Human
gagcccagcugggucaggc

SEQ ID NO: 2502722 - RNA, 21 nt, Human
gagcccagcugggucaggcag

SEQ ID NO: 2502723 - RNA, 22 nt, Human
gagcccagcugggucaggcagg

SEQ ID NO: 2502724 - RNA, 11 nt, Human
gagcccaggag

SEQ ID NO: 2502725 - RNA, 12 nt, Human
gagcccaggagu

SEQ ID NO: 2502726 - RNA, 22 nt, Human
gagcccagagguaacagaacag

SEQ ID NO: 2502727 - RNA, 21 nt, Human
gagcccagagguaacagaaca

SEQ ID NO: 2502728 - RNA, 22 nt, Human
gagcccagaggagggcagcaga

SEQ ID NO: 2502729 - RNA, 14 nt, Human
gagcccagaggagg

SEQ ID NO: 2502730 - RNA, 23 nt, Human
gagcccagagguaacagaacagc

SEQ ID NO: 2502731 - RNA, 15 nt, Human
gagcccagcccuccc

SEQ ID NO: 2502732 - RNA, 22 nt, Human
gagcccagccauuaccauggag

SEQ ID NO: 2502733 - RNA, 14 nt, Human
gagcccagcucuga

SEQ ID NO: 2502734 - RNA, 21 nt, Human
gagcccagcucugaaaccagu

SEQ ID NO: 2502735 - RNA, 12 nt, Human
gagcccagcucu

SEQ ID NO: 2502736 - RNA, 14 nt, Human
gagcccagcuccaa

SEQ ID NO: 2502737 - RNA, 12 nt, Human
gagcccagcucc

SEQ ID NO: 2502738 - RNA, 13 nt, Human
gagcccagcucca

SEQ ID NO: 2502739 - RNA, 18 nt, Human
gagcccagcccuccccau

SEQ ID NO: 2502740 - RNA, 19 nt, Human
gagccagggucucacuaug

SEQ ID NO: 2502741 - RNA, 18 nt, Human
gagccaguaaacagagga

SEQ ID NO: 2502742 - RNA, 22 nt, Human
gagccagguaaugagggacugg

SEQ ID NO: 2502743 - RNA, 19 nt, Human
gagccagguaaugagggac

SEQ ID NO: 2502744 - RNA, 18 nt, Human
gagccagguaaugaggga

SEQ ID NO: 2502745 - RNA, 15 nt, Human
gagccagcccucccu

SEQ ID NO: 2502746 - RNA, 19 nt, Human
gagcccacuguccugggcc

SEQ ID NO: 2502747 - RNA, 24 nt, Human
gagcccacuguccugggccugcag

SEQ ID NO: 2502748 - RNA, 23 nt, Human
gagcccacuguacuugcucuuga

SEQ ID NO: 2502749 - RNA, 23 nt, Human
gagccaguucaguaccuggagga

SEQ ID NO: 2502750 - RNA, 22 nt, Human
gagccaguucaguaccuggagg

SEQ ID NO: 2502751 - RNA, 19 nt, Human
gagccauauaaguuugaag

SEQ ID NO: 2502752 - RNA, 15 nt, Human
gagccagucccaggg

SEQ ID NO: 2502753 - RNA, 13 nt, Human
gagccagucccag

SEQ ID NO: 2502754 - RNA, 21 nt, Human
gagccaguucaguaccuggag

SEQ ID NO: 2502755 - RNA, 19 nt, Human
gagccaguucaguaccugg

SEQ ID NO: 2502756 - RNA, 23 nt, Human
gagccagcagacauugucagcaa

SEQ ID NO: 2502757 - RNA, 22 nt, Human
gagccagcagacauugucagca

SEQ ID NO: 2502758 - RNA, 20 nt, Human
gagccagcagacauugucag

SEQ ID NO: 2502759 - RNA, 17 nt, Human
gagccagcagacauugu

SEQ ID NO: 2502760 - RNA, 15 nt, Human
gagccagcagacauu

SEQ ID NO: 2502761 - RNA, 12 nt, Human
gagccagcagac

SEQ ID NO: 2502762 - RNA, 23 nt, Human
gagccagauuucacucuccuugg

SEQ ID NO: 2502763 - RNA, 14 nt, Human
gagccagggucuca

SEQ ID NO: 2502764 - RNA, 12 nt, Human
gagccagcccuc

SEQ ID NO: 2502765 - RNA, 13 nt, Human
gagccagcccucc

SEQ ID NO: 2502766 - RNA, 14 nt, Human
gagccagcccuccc

SEQ ID NO: 2502767 - RNA, 21 nt, Human
gagccagcagccuggcucucc

SEQ ID NO: 2502768 - RNA, 16 nt, Human
gagauagccaaggcca

SEQ ID NO: 2502769 - RNA, 23 nt, Human
gagaucaaccccuucgcuccugu

SEQ ID NO: 2502770 - RNA, 14 nt, Human
gagauagccaaggc

SEQ ID NO: 2502771 - RNA, 23 nt, Human
gagauagcauugugaacugacag

SEQ ID NO: 2502772 - RNA, 20 nt, Human
gagauagcauugugaacuga

SEQ ID NO: 2502773 - RNA, 16 nt, Human
gagauagcauugugaa

SEQ ID NO: 2502774 - RNA, 15 nt, Human
gagauagcauuguga

SEQ ID NO: 2502775 - RNA, 12 nt, Human
gagauagcauug

SEQ ID NO: 2502776 - RNA, 16 nt, Human
gagauagaagaacugc

SEQ ID NO: 2502777 - RNA, 19 nt, Human
gagaucacgccacugcacu

SEQ ID NO: 2502778 - RNA, 21 nt, Human
gagauccaaaagaagccccca

SEQ ID NO: 2502779 - RNA, 22 nt, Human
gagauccaaaagaagcccccag

SEQ ID NO: 2502780 - RNA, 20 nt, Human
gagaucauccuuuccagcau

SEQ ID NO: 2502781 - RNA, 16 nt, Human
gagaucauccuuucca

SEQ ID NO: 2502782 - RNA, 18 nt, Human
gagaucaggcucugccuc

SEQ ID NO: 2502783 - RNA, 13 nt, Human
gagaucaggcucu

SEQ ID NO: 2502784 - RNA, 18 nt, Human
gagaucacgccacugcac

SEQ ID NO: 2502785 - RNA, 16 nt, Human
gagaucacgccacugc

SEQ ID NO: 2502786 - RNA, 22 nt, Human
gagaugauacauccaaagcaga

SEQ ID NO: 2502787 - RNA, 17 nt, Human
gagaugaggccgccaug

SEQ ID NO: 2502788 - RNA, 21 nt, Human
gagaugacugaguccucguag

SEQ ID NO: 2502789 - RNA, 16 nt, Human
gagcaaaggcugagaa

SEQ ID NO: 2502790 - RNA, 13 nt, Human
gagcaaaggcuga

SEQ ID NO: 2502791 - RNA, 18 nt, Human
gagaugaugaaaauauuu

SEQ ID NO: 2502792 - RNA, 14 nt, Human
gagcaaagucuaaa

SEQ ID NO: 2502793 - RNA, 22 nt, Human
gagcaaaggcugagaacacugu

SEQ ID NO: 2502794 - RNA, 22 nt, Human
gagcaaaggggucccauagagg

SEQ ID NO: 2502795 - RNA, 19 nt, Human
gagcaaagucuaaaguuua

SEQ ID NO: 2502796 - RNA, 16 nt, Human
gagcaaagucuaaagu

SEQ ID NO: 2502797 - RNA, 14 nt, Human
gagcaaagugaggg

SEQ ID NO: 2502798 - RNA, 20 nt, Human
gagcaaagugaagacacugg

SEQ ID NO: 2502799 - RNA, 12 nt, Human
gagauccuccug

SEQ ID NO: 2502800 - RNA, 17 nt, Human
gagaucccgccucuucu

SEQ ID NO: 2502801 - RNA, 15 nt, Human
gagaugaagcaaaca

SEQ ID NO: 2502802 - RNA, 18 nt, Human
gagaugaagcaaacacau

SEQ ID NO: 2502803 - RNA, 13 nt, Human
gagaugacugagu

SEQ ID NO: 2502804 - RNA, 16 nt, Human
gagaugacugaguccu

SEQ ID NO: 2502805 - RNA, 16 nt, Human
gagaugaauuaaauuu

SEQ ID NO: 2502806 - RNA, 21 nt, Human
gagaugaagagugagagggca

SEQ ID NO: 2502807 - RNA, 20 nt, Human
gagaugaagcaaacacauua

SEQ ID NO: 2502808 - RNA, 22 nt, Human
gagcaccuuagacagucccugc

SEQ ID NO: 2502809 - RNA, 21 nt, Human
gagcaccuuagacagucccug

SEQ ID NO: 2502810 - RNA, 16 nt, Human
gagcaccuuccucacu

SEQ ID NO: 2502811 - RNA, 15 nt, Human
gagcacuaaggugug

SEQ ID NO: 2502812 - RNA, 20 nt, Human
gagcacggccaacaaagcug

SEQ ID NO: 2502813 - RNA, 20 nt, Human
gagcaccuuccucacuucca

SEQ ID NO: 2502814 - RNA, 19 nt, Human
gagcaccuuccucacuucc

SEQ ID NO: 2502815 - RNA, 17 nt, Human
gagcaccuuccucacuu

SEQ ID NO: 2502816 - RNA, 15 nt, Human
gagcacucccaaguc

SEQ ID NO: 2502817 - RNA, 21 nt, Human
gagcacuaaggugugcucuga

SEQ ID NO: 2502818 - RNA, 18 nt, Human
gagcagacuggugagcag

SEQ ID NO: 2502819 - RNA, 19 nt, Human
gagcagacuggugagcaga

SEQ ID NO: 2502820 - RNA, 20 nt, Human
gagcagacuggugagcagac

SEQ ID NO: 2502821 - RNA, 20 nt, Human
gagcacucccaagucuacag

SEQ ID NO: 2502822 - RNA, 13 nt, Human
gagcaagagcugg

SEQ ID NO: 2502823 - RNA, 12 nt, Human
gagcaagagcug

SEQ ID NO: 2502824 - RNA, 14 nt, Human
gagcaagacucugu

SEQ ID NO: 2502825 - RNA, 12 nt, Human
gagcaagacucu

SEQ ID NO: 2502826 - RNA, 19 nt, Human
gagcaaauguuucugcagu

SEQ ID NO: 2502827 - RNA, 16 nt, Human
gagcaaauguuucugc

SEQ ID NO: 2502828 - RNA, 15 nt, Human
gagcaaauguuucug

SEQ ID NO: 2502829 - RNA, 14 nt, Human
gagcaaauguuucu

SEQ ID NO: 2502830 - RNA, 20 nt, Human
gagcaacagagugagacccu

SEQ ID NO: 2502831 - RNA, 13 nt, Human
gagcaacauuuua

SEQ ID NO: 2502832 - RNA, 20 nt, Human
gagcaccuuagacagucccu

SEQ ID NO: 2502833 - RNA, 17 nt, Human
gagcaaugucugugcua

SEQ ID NO: 2502834 - RNA, 16 nt, Human
gagcaaugucugugcu

SEQ ID NO: 2502835 - RNA, 15 nt, Human
gagcaaugucugugc

SEQ ID NO: 2502836 - RNA, 14 nt, Human
gagcaagagcuggc

SEQ ID NO: 2502837 - RNA, 20 nt, Human
gagcaagcauuuauguuuau

SEQ ID NO: 2502838 - RNA, 18 nt, Human
gagcaaguuccuucuggu

SEQ ID NO: 2502839 - RNA, 21 nt, Human
gagcaagucugcaggugcacc

SEQ ID NO: 2502840 - RNA, 16 nt, Human
gagcaagucugcaggu

SEQ ID NO: 2502841 - RNA, 15 nt, Human
gagcaagucugcagg

SEQ ID NO: 2502842 - RNA, 13 nt, Human
gagcaagucugca

SEQ ID NO: 2502843 - RNA, 20 nt, Human
gagcaaggguucccucaaga

SEQ ID NO: 2502844 - RNA, 18 nt, Human
gagagucccagagcagga

SEQ ID NO: 2502845 - RNA, 17 nt, Human
gagagucccagagcagg

SEQ ID NO: 2502846 - RNA, 15 nt, Human
gagagucccagagca

SEQ ID NO: 2502847 - RNA, 22 nt, Human
gagagucccacugccucagguu

SEQ ID NO: 2502848 - RNA, 15 nt, Human
gagaguccucuggau

SEQ ID NO: 2502849 - RNA, 19 nt, Human
gagagucccagagcaggag

SEQ ID NO: 2502850 - RNA, 13 nt, Human
gagaguggcuccu

SEQ ID NO: 2502851 - RNA, 21 nt, Human
gagagucccacugccucaggu

SEQ ID NO: 2502852 - RNA, 20 nt, Human
gagagucccacugccucagg

SEQ ID NO: 2502853 - RNA, 15 nt, Human
gagagucccacugcc

SEQ ID NO: 2502854 - RNA, 15 nt, Human
gagaguauauuaugu

SEQ ID NO: 2502855 - RNA, 17 nt, Human
gagagucauauuuugau

SEQ ID NO: 2502856 - RNA, 15 nt, Human
gagaguagaacagau

SEQ ID NO: 2502857 - RNA, 18 nt, Human
gagaguagccgagagccu

SEQ ID NO: 2502858 - RNA, 20 nt, Human
gagaguagccgagagccugc

SEQ ID NO: 2502859 - RNA, 21 nt, Human
gagaguagccgagagccugcu

SEQ ID NO: 2502860 - RNA, 22 nt, Human
gagaguagccgagagccugcuc

SEQ ID NO: 2502861 - RNA, 22 nt, Human
gagaguucaauggcugcugaag

SEQ ID NO: 2502862 - RNA, 21 nt, Human
gagaguucaauggcugcugaa

SEQ ID NO: 2502863 - RNA, 15 nt, Human
gagauaccagcgagg

SEQ ID NO: 2502864 - RNA, 20 nt, Human
gagaguucaauggcugcuga

SEQ ID NO: 2502865 - RNA, 21 nt, Human
gagagugucuucacggcagga

SEQ ID NO: 2502866 - RNA, 20 nt, Human
gagagugugaaauagacauu

SEQ ID NO: 2502867 - RNA, 21 nt, Human
gagaguggcuccucccggugc

SEQ ID NO: 2502868 - RNA, 16 nt, Human
gagaguggcuccuccc

SEQ ID NO: 2502869 - RNA, 19 nt, Human
gagaggggaacagacugga

SEQ ID NO: 2502870 - RNA, 17 nt, Human
gagaggggaagggccag

SEQ ID NO: 2502871 - RNA, 16 nt, Human
gagaggggaagggcca

SEQ ID NO: 2502872 - RNA, 22 nt, Human
gagaggggaagaguguacuggg

SEQ ID NO: 2502873 - RNA, 21 nt, Human
gagaggggaagaguguacugg

SEQ ID NO: 2502874 - RNA, 20 nt, Human
gagaggggaagaguguacug

SEQ ID NO: 2502875 - RNA, 18 nt, Human
gagaggggaagaguguac

SEQ ID NO: 2502876 - RNA, 22 nt, Human
gagagccugcucccccaccccc

SEQ ID NO: 2502877 - RNA, 22 nt, Human
gagaggggacaaaacccaccuu

SEQ ID NO: 2502878 - RNA, 21 nt, Human
gagaggggacaaaacccaccu

SEQ ID NO: 2502879 - RNA, 18 nt, Human
gagaggggaagggccagu

SEQ ID NO: 2502880 - RNA, 21 nt, Human
gagaggggaauaauagaagaa

SEQ ID NO: 2502881 - RNA, 13 nt, Human
gagaggggcacag

SEQ ID NO: 2502882 - RNA, 16 nt, Human
gagagggugggagugg

SEQ ID NO: 2502883 - RNA, 20 nt, Human
gagagggugggagugggccc

SEQ ID NO: 2502884 - RNA, 16 nt, Human
gagaguacagugagcc

SEQ ID NO: 2502885 - RNA, 19 nt, Human
gagaguacagugagccaag

SEQ ID NO: 2502886 - RNA, 14 nt, Human
gagagggugggagu

SEQ ID NO: 2502887 - RNA, 13 nt, Human
gagagggucugga

SEQ ID NO: 2502888 - RNA, 13 nt, Human
gagagggugacaa

SEQ ID NO: 2502889 - RNA, 18 nt, Human
gagagggucuggagaagc

SEQ ID NO: 2502890 - RNA, 18 nt, Human
gagagggggccaccuccc

SEQ ID NO: 2502891 - RNA, 18 nt, Human
gagagaccucaucaggau

SEQ ID NO: 2502892 - RNA, 17 nt, Human
gagagaccucaucagga

SEQ ID NO: 2502893 - RNA, 15 nt, Human
gagagaccucaucag

SEQ ID NO: 2502894 - RNA, 20 nt, Human
gagagacguguacauagugu

SEQ ID NO: 2502895 - RNA, 17 nt, Human
gagagacguguacauag

SEQ ID NO: 2502896 - RNA, 16 nt, Human
gagagacguguacaua

SEQ ID NO: 2502897 - RNA, 19 nt, Human
gagagacguguacauagug

SEQ ID NO: 2502898 - RNA, 16 nt, Human
gagagaccaggcaaag

SEQ ID NO: 2502899 - RNA, 14 nt, Human
gagagaccaggcaa

SEQ ID NO: 2502900 - RNA, 14 nt, Human
gagagacccaagga

SEQ ID NO: 2502901 - RNA, 15 nt, Human
gagagacccaaggag

SEQ ID NO: 2502902 - RNA, 19 nt, Human
gagagacccaaggaggaaa

SEQ ID NO: 2502903 - RNA, 20 nt, Human
gagagacccaaggaggaaaa

SEQ ID NO: 2502904 - RNA, 18 nt, Human
gagagagaaagccaggca

SEQ ID NO: 2502905 - RNA, 15 nt, Human
gagagagaaagccag

SEQ ID NO: 2502906 - RNA, 12 nt, Human
gagagagaaagc

SEQ ID NO: 2502907 - RNA, 23 nt, Human
gagagagaagugccccugcugcc

SEQ ID NO: 2502908 - RNA, 13 nt, Human
gagagagagagga

SEQ ID NO: 2502909 - RNA, 14 nt, Human
gagagagagagagg

SEQ ID NO: 2502910 - RNA, 14 nt, Human
gagagagagagaga

SEQ ID NO: 2502911 - RNA, 13 nt, Human
gagagagaggaca

SEQ ID NO: 2502912 - RNA, 12 nt, Human
gagagagaggac

SEQ ID NO: 2502913 - RNA, 14 nt, Human
gagagagagaggac

SEQ ID NO: 2502914 - RNA, 13 nt, Human
gagagagagaggu

SEQ ID NO: 2502915 - RNA, 22 nt, Human
gagagagcuucuguugcugccu

SEQ ID NO: 2502916 - RNA, 19 nt, Human
gagagagcuucuguugcug

SEQ ID NO: 2502917 - RNA, 15 nt, Human
gagagagcagcuucu

SEQ ID NO: 2502918 - RNA, 21 nt, Human
gagagcaggcuggcagcucuc

SEQ ID NO: 2502919 - RNA, 17 nt, Human
gagagcaggcuggcagc

SEQ ID NO: 2502920 - RNA, 14 nt, Human
gagagcaggcuggc

SEQ ID NO: 2502921 - RNA, 13 nt, Human
gagagcaggcugg

SEQ ID NO: 2502922 - RNA, 23 nt, Human
gagagcagcuuuaaacucaggga

SEQ ID NO: 2502923 - RNA, 21 nt, Human
gagagcagcuuuaaacucagg

SEQ ID NO: 2502924 - RNA, 22 nt, Human
gagagcagcuucugccacuucc

SEQ ID NO: 2502925 - RNA, 19 nt, Human
gagagcagcuucugccacu

SEQ ID NO: 2502926 - RNA, 18 nt, Human
gagagcagcuucugccac

SEQ ID NO: 2502927 - RNA, 16 nt, Human
gagagcagcuucugcc

SEQ ID NO: 2502928 - RNA, 20 nt, Human
gagagcaacucugagaucua

SEQ ID NO: 2502929 - RNA, 17 nt, Human
gagagcaacucugagau

SEQ ID NO: 2502930 - RNA, 13 nt, Human
gagagcaacucug

SEQ ID NO: 2502931 - RNA, 18 nt, Human
gagagaugggagcuccuc

SEQ ID NO: 2502932 - RNA, 19 nt, Human
gagagagcagcuucugcca

SEQ ID NO: 2502933 - RNA, 13 nt, Human
gagagagcuggag

SEQ ID NO: 2502934 - RNA, 15 nt, Human
gagagcaacauuuua

SEQ ID NO: 2502935 - RNA, 16 nt, Human
gagagcccuucauuug

SEQ ID NO: 2502936 - RNA, 14 nt, Human
gagagccugcuccc

SEQ ID NO: 2502937 - RNA, 17 nt, Human
gagagccugcuccccca

SEQ ID NO: 2502938 - RNA, 21 nt, Human
gagagccugcucccccacccc

SEQ ID NO: 2502939 - RNA, 15 nt, Human
gagagccccagcuga

SEQ ID NO: 2502940 - RNA, 14 nt, Human
gagagccccagcug

SEQ ID NO: 2502941 - RNA, 13 nt, Human
gagagccccagcu

SEQ ID NO: 2502942 - RNA, 13 nt, Human
gagagcccagcca

SEQ ID NO: 2502943 - RNA, 20 nt, Human
gagagcccggcgccccugcc

SEQ ID NO: 2502944 - RNA, 15 nt, Human
gagagcccgggagcu

SEQ ID NO: 2502945 - RNA, 18 nt, Human
gagagccccucacacagc

SEQ ID NO: 2502946 - RNA, 18 nt, Human
gagagaaaauaaaaaguu

SEQ ID NO: 2502947 - RNA, 19 nt, Human
gagagaaaauaaaaaguua

SEQ ID NO: 2502948 - RNA, 20 nt, Human
gagagaaaauaaaaaguuaa

SEQ ID NO: 2502949 - RNA, 21 nt, Human
gagagaaaauaaaaaguuaaa

SEQ ID NO: 2502950 - RNA, 16 nt, Human
gagagaaaauaaaaag

SEQ ID NO: 2502951 - RNA, 17 nt, Human
gagagaaaauaaaaagu

SEQ ID NO: 2502952 - RNA, 19 nt, Human
gagagaaagccaggcaggu

SEQ ID NO: 2502953 - RNA, 18 nt, Human
gagagaaagccaggcagg

SEQ ID NO: 2502954 - RNA, 21 nt, Human
gagagaaagccaggcagguag

SEQ ID NO: 2502955 - RNA, 16 nt, Human
gagagaaagccaggca

SEQ ID NO: 2502956 - RNA, 11 nt, Human
gagagaaagaa

SEQ ID NO: 2502957 - RNA, 18 nt, Human
gagagaaagugggugaga

SEQ ID NO: 2502958 - RNA, 17 nt, Human
gagagaaagugggugag

SEQ ID NO: 2502959 - RNA, 15 nt, Human
gagagaaagugggug

SEQ ID NO: 2502960 - RNA, 22 nt, Human
gagagaaagugggugagaugcu

SEQ ID NO: 2502961 - RNA, 20 nt, Human
gagagaaagugggugagaug

SEQ ID NO: 2502962 - RNA, 22 nt, Human
gagagaaagugugagcaaacua

SEQ ID NO: 2502963 - RNA, 19 nt, Human
gagacuggggggcuugaaa

SEQ ID NO: 2502964 - RNA, 18 nt, Human
gagacuggggggcuugaa

SEQ ID NO: 2502965 - RNA, 16 nt, Human
gagacuggggggcuug

SEQ ID NO: 2502966 - RNA, 14 nt, Human
gagacuggggggcu

SEQ ID NO: 2502967 - RNA, 23 nt, Human
gagacugguccugugugcaguga

SEQ ID NO: 2502968 - RNA, 16 nt, Human
gagacugguccugugu

SEQ ID NO: 2502969 - RNA, 15 nt, Human
gagacugggcugagg

SEQ ID NO: 2502970 - RNA, 17 nt, Human
gagacugggcugaggga

SEQ ID NO: 2502971 - RNA, 20 nt, Human
gagacugggcugagggagcc

SEQ ID NO: 2502972 - RNA, 21 nt, Human
gagacugggcugagggagccu

SEQ ID NO: 2502973 - RNA, 13 nt, Human
gagacugggcuga

SEQ ID NO: 2502974 - RNA, 14 nt, Human
gagacugggcugag

SEQ ID NO: 2502975 - RNA, 21 nt, Human
gagacugggaagauaggcucu

SEQ ID NO: 2502976 - RNA, 14 nt, Human
gagacucuggccuc

SEQ ID NO: 2502977 - RNA, 13 nt, Human
gagacucuggccu

SEQ ID NO: 2502978 - RNA, 12 nt, Human
gagacucuggcc

SEQ ID NO: 2502979 - RNA, 19 nt, Human
gagacucucuuaggagcag

SEQ ID NO: 2502980 - RNA, 20 nt, Human
gagacuggagcaucugacuc

SEQ ID NO: 2502981 - RNA, 13 nt, Human
gagacugggaaga

SEQ ID NO: 2502982 - RNA, 21 nt, Human
gagacuccugcaggcagccag

SEQ ID NO: 2502983 - RNA, 20 nt, Human
gagacuccugcaggcagcca

SEQ ID NO: 2502984 - RNA, 18 nt, Human
gagaccaugcagagcgcc

SEQ ID NO: 2502985 - RNA, 16 nt, Human
gagacaguuucuuagc

SEQ ID NO: 2502986 - RNA, 23 nt, Human
gagacaguugggugagaacaacc

SEQ ID NO: 2502987 - RNA, 19 nt, Human
gagacuccugcaggcagcc

SEQ ID NO: 2502988 - RNA, 21 nt, Human
gagacucgcgacaaugcaaac

SEQ ID NO: 2502989 - RNA, 20 nt, Human
gagacucgcgacaaugcaaa

SEQ ID NO: 2502990 - RNA, 17 nt, Human
gagaccaugcagagcgc

SEQ ID NO: 2502991 - RNA, 13 nt, Human
gagacucugucuc

SEQ ID NO: 2502992 - RNA, 21 nt, Human
gagaaugagagacacacugaa

SEQ ID NO: 2502993 - RNA, 20 nt, Human
gagaaugagagacacacuga

SEQ ID NO: 2502994 - RNA, 23 nt, Human
gagaaugcacaaacagaggccgc

SEQ ID NO: 2502995 - RNA, 15 nt, Human
gagaauggaaaacag

SEQ ID NO: 2502996 - RNA, 20 nt, Human
gagacagcucugcauacuca

SEQ ID NO: 2502997 - RNA, 16 nt, Human
gagaauguaagaacua

SEQ ID NO: 2502998 - RNA, 15 nt, Human
gagaauguaagaacu

SEQ ID NO: 2502999 - RNA, 20 nt, Human
gagaauggcgugaacccggg

SEQ ID NO: 2503000 - RNA, 21 nt, Human
gagaauguagauauugugaag

SEQ ID NO: 2503001 - RNA, 19 nt, Human
gagacaggaaaauccucug

SEQ ID NO: 2503002 - RNA, 20 nt, Human
gagacaggaaaauccucugg

SEQ ID NO: 2503003 - RNA, 21 nt, Human
gagacaggaaaauccucuggc

SEQ ID NO: 2503004 - RNA, 15 nt, Human
gagacaggagggcaa

SEQ ID NO: 2503005 - RNA, 12 nt, Human
gagacaggaagg

SEQ ID NO: 2503006 - RNA, 16 nt, Human
gagacaggaccugacu

SEQ ID NO: 2503007 - RNA, 17 nt, Human
gagaaugucaguaugug

SEQ ID NO: 2503008 - RNA, 19 nt, Human
gagacagcuugaucaaagg

SEQ ID NO: 2503009 - RNA, 21 nt, Human
gagaccaucccugaaggcccc

SEQ ID NO: 2503010 - RNA, 18 nt, Human
gagaccaucccugaaggc

SEQ ID NO: 2503011 - RNA, 18 nt, Human
gagacaguucaagaaagc

SEQ ID NO: 2503012 - RNA, 15 nt, Human
gagacagugggaaau

SEQ ID NO: 2503013 - RNA, 22 nt, Human
gagacaguugggugagaacaac

SEQ ID NO: 2503014 - RNA, 14 nt, Human
gagaccaucccuga

SEQ ID NO: 2503015 - RNA, 17 nt, Human
gagacaguccagccugg

SEQ ID NO: 2503016 - RNA, 22 nt, Human
gagacaggguuuggcugugucu

SEQ ID NO: 2503017 - RNA, 13 nt, Human
gagacaggguuug

SEQ ID NO: 2503018 - RNA, 19 nt, Human
gagacaggguuucaccaug

SEQ ID NO: 2503019 - RNA, 12 nt, Human
gagacaggguuu

SEQ ID NO: 2503020 - RNA, 16 nt, Human
gagacagugggaaaua

SEQ ID NO: 2503021 - RNA, 16 nt, Human
gagacaguucaagaaa

SEQ ID NO: 2503022 - RNA, 14 nt, Human
gagacagugggaaa

SEQ ID NO: 2503023 - RNA, 16 nt, Human
gagacagucaccccag

SEQ ID NO: 2503024 - RNA, 17 nt, Human
gagacagugaucuccau

SEQ ID NO: 2503025 - RNA, 22 nt, Human
gagacaggguuuugccauguug

SEQ ID NO: 2503026 - RNA, 16 nt, Human
gagaagagaaugcaca

SEQ ID NO: 2503027 - RNA, 20 nt, Human
gagaagaaaggugaguuuga

SEQ ID NO: 2503028 - RNA, 21 nt, Human
gagaagaauuuucagacccca

SEQ ID NO: 2503029 - RNA, 12 nt, Human
gagaagagagga

SEQ ID NO: 2503030 - RNA, 15 nt, Human
gagaagacaaaauua

SEQ ID NO: 2503031 - RNA, 19 nt, Human
gagaagagagaaauagccu

SEQ ID NO: 2503032 - RNA, 13 nt, Human
gagaagagcuguu

SEQ ID NO: 2503033 - RNA, 16 nt, Human
gagaagagaggagagg

SEQ ID NO: 2503034 - RNA, 15 nt, Human
gagaagagaggagag

SEQ ID NO: 2503035 - RNA, 16 nt, Human
gagaagcagaggaagg

SEQ ID NO: 2503036 - RNA, 12 nt, Human
gagaagcacugu

SEQ ID NO: 2503037 - RNA, 14 nt, Human
gagaagcagugagc

SEQ ID NO: 2503038 - RNA, 18 nt, Human
gagaagcagugagccgca

SEQ ID NO: 2503039 - RNA, 21 nt, Human
gagaagcaucggagggaauug

SEQ ID NO: 2503040 - RNA, 18 nt, Human
gagaagccacaggccuga

SEQ ID NO: 2503041 - RNA, 17 nt, Human
gagaagccacaggccug

SEQ ID NO: 2503042 - RNA, 13 nt, Human
gagaagccacagg

SEQ ID NO: 2503043 - RNA, 18 nt, Human
gagaagccaaaagauugg

SEQ ID NO: 2503044 - RNA, 17 nt, Human
gagaaugagagacacac

SEQ ID NO: 2503045 - RNA, 22 nt, Human
gagaagccacaggccugagauu

SEQ ID NO: 2503046 - RNA, 20 nt, Human
gagaagccacaggccugaga

SEQ ID NO: 2503047 - RNA, 13 nt, Human
gagaagcaugaaa

SEQ ID NO: 2503048 - RNA, 23 nt, Human
gagaacuuccagauccuggaaau

SEQ ID NO: 2503049 - RNA, 22 nt, Human
gagaacuuccagauccuggaaa

SEQ ID NO: 2503050 - RNA, 19 nt, Human
gagaacuagaaccuggagg

SEQ ID NO: 2503051 - RNA, 24 nt, Human
gagaacgcagcccuagagccugcc

SEQ ID NO: 2503052 - RNA, 16 nt, Human
gagaacgcagcccuag

SEQ ID NO: 2503053 - RNA, 15 nt, Human
gagaacgcagcccua

SEQ ID NO: 2503054 - RNA, 14 nt, Human
gagaacgcagcccu

SEQ ID NO: 2503055 - RNA, 23 nt, Human
gagaacucaucccuaaugcugca

SEQ ID NO: 2503056 - RNA, 15 nt, Human
gagaacuccuagggu

SEQ ID NO: 2503057 - RNA, 18 nt, Human
gagaacugcauauguuuc

SEQ ID NO: 2503058 - RNA, 14 nt, Human
gagaagagaaugca

SEQ ID NO: 2503059 - RNA, 20 nt, Human
gagaagaauuuucagacccc

SEQ ID NO: 2503060 - RNA, 15 nt, Human
gagaacuguggccgu

SEQ ID NO: 2503061 - RNA, 19 nt, Human
gagaacugcauauguuucg

SEQ ID NO: 2503062 - RNA, 23 nt, Human
gagaacugcauauguuucgcuga

SEQ ID NO: 2503063 - RNA, 16 nt, Human
gagaacuuucauuuuu

SEQ ID NO: 2503064 - RNA, 15 nt, Human
gagaacuuucauuuu

SEQ ID NO: 2503065 - RNA, 17 nt, Human
gagaacuuucauuuuuu

SEQ ID NO: 2503066 - RNA, 12 nt, Human
gagaaaugcaua

SEQ ID NO: 2503067 - RNA, 11 nt, Human
gagaaauuauu

SEQ ID NO: 2503068 - RNA, 13 nt, Human
gagaaaugggacu

SEQ ID NO: 2503069 - RNA, 12 nt, Human
gagaaaugaaaa

SEQ ID NO: 2503070 - RNA, 14 nt, Human
gagaaaugagcuug

SEQ ID NO: 2503071 - RNA, 21 nt, Human
gagaaaugaaaaaauauauau

SEQ ID NO: 2503072 - RNA, 22 nt, Human
gagaaccuagggugauauuaac

SEQ ID NO: 2503073 - RNA, 21 nt, Human
gagaaccuagggugauauuaa

SEQ ID NO: 2503074 - RNA, 19 nt, Human
gagaaccuggaguuccuga

SEQ ID NO: 2503075 - RNA, 13 nt, Human
gagaacgcagccc

SEQ ID NO: 2503076 - RNA, 18 nt, Human
gagaaccuaaguuucagu

SEQ ID NO: 2503077 - RNA, 14 nt, Human
gagaaauugacaga

SEQ ID NO: 2503078 - RNA, 22 nt, Human
gagaaccucacgcaccucccau

SEQ ID NO: 2503079 - RNA, 14 nt, Human
gagaaccucaggcu

SEQ ID NO: 2503080 - RNA, 10 nt, Human
gagaaaagaa

SEQ ID NO: 2503081 - RNA, 11 nt, Human
gagaaaagaaa

SEQ ID NO: 2503082 - RNA, 12 nt, Human
gagaaaagaaaa

SEQ ID NO: 2503083 - RNA, 13 nt, Human
gagaaaagaaaaa

SEQ ID NO: 2503084 - RNA, 14 nt, Human
gagaaaagaaaaaa

SEQ ID NO: 2503085 - RNA, 15 nt, Human
gagaaaagaaaaaaa

SEQ ID NO: 2503086 - RNA, 19 nt, Human
gagaaaagaaaaaaaaaga

SEQ ID NO: 2503087 - RNA, 20 nt, Human
gagaaaagaaaaaaaaagaa

SEQ ID NO: 2503088 - RNA, 13 nt, Human
gagaaaauaaaaa

SEQ ID NO: 2503089 - RNA, 14 nt, Human
gagaaaauaaaaag

SEQ ID NO: 2503090 - RNA, 15 nt, Human
gagaaaauaaaaagu

SEQ ID NO: 2503091 - RNA, 16 nt, Human
gagaaaauaaaaaguu

SEQ ID NO: 2503092 - RNA, 11 nt, Human
gagaaaauaaa

SEQ ID NO: 2503093 - RNA, 12 nt, Human
gagaaaauaaaa

SEQ ID NO: 2503094 - RNA, 13 nt, Human
gagaaaagacaug

SEQ ID NO: 2503095 - RNA, 16 nt, Human
gagaaagguugaagca

SEQ ID NO: 2503096 - RNA, 17 nt, Human
gagaaaggggagcccac

SEQ ID NO: 2503097 - RNA, 18 nt, Human
gagaaaggggagcccacu

SEQ ID NO: 2503098 - RNA, 22 nt, Human
gagaaaguacuucuccacccug

SEQ ID NO: 2503099 - RNA, 22 nt, Human
gagaaaacuuauuugagugauu

SEQ ID NO: 2503100 - RNA, 17 nt, Human
gagaaaauaaaaaguua

SEQ ID NO: 2503101 - RNA, 16 nt, Human
gagaaagccaggcagg

SEQ ID NO: 2503102 - RNA, 15 nt, Human
gagaaagccaggcag

SEQ ID NO: 2503103 - RNA, 20 nt, Human
gagaaagccaggcagguagc

SEQ ID NO: 2503104 - RNA, 20 nt, Human
gacuucugucuucacaacag

SEQ ID NO: 2503105 - RNA, 23 nt, Human
gacuucugucuucacaacagauu

SEQ ID NO: 2503106 - RNA, 14 nt, Human
gacuucugccugga

SEQ ID NO: 2503107 - RNA, 13 nt, Human
gacuucugccugg

SEQ ID NO: 2503108 - RNA, 22 nt, Human
gacuucuccaggucucacgggc

SEQ ID NO: 2503109 - RNA, 16 nt, Human
gacuucugccuggaga

SEQ ID NO: 2503110 - RNA, 15 nt, Human
gacuucugccuggag

SEQ ID NO: 2503111 - RNA, 17 nt, Human
gacuucugccuggagac

SEQ ID NO: 2503112 - RNA, 19 nt, Human
gacuucuaaguaaaaccac

SEQ ID NO: 2503113 - RNA, 23 nt, Human
gacuucuaaguaaaaccacagca

SEQ ID NO: 2503114 - RNA, 24 nt, Human
gacuucuaaguaaaaccacagcag

SEQ ID NO: 2503115 - RNA, 14 nt, Human
gacuucuccagguc

SEQ ID NO: 2503116 - RNA, 16 nt, Human
gacuucgacucaggau

SEQ ID NO: 2503117 - RNA, 15 nt, Human
gacuucgacucagga

SEQ ID NO: 2503118 - RNA, 18 nt, Human
gacuuccuugcucucccu

SEQ ID NO: 2503119 - RNA, 18 nt, Human
gacuucgacugugaccug

SEQ ID NO: 2503120 - RNA, 17 nt, Human
gacuucuaaguaaaacc

SEQ ID NO: 2503121 - RNA, 18 nt, Human
gacuucuaaguaaaacca

SEQ ID NO: 2503122 - RNA, 16 nt, Human
gacuucuaaguaaaac

SEQ ID NO: 2503123 - RNA, 17 nt, Human
gacuuccuugcucuccc

SEQ ID NO: 2503124 - RNA, 16 nt, Human
gacuuccuugcucucc

SEQ ID NO: 2503125 - RNA, 14 nt, Human
gacuuccuugcucu

SEQ ID NO: 2503126 - RNA, 16 nt, Human
gacuuccuugagacac

SEQ ID NO: 2503127 - RNA, 20 nt, Human
gacuuccuugagacacggag

SEQ ID NO: 2503128 - RNA, 19 nt, Human
gacuuaagugugcaaaaua

SEQ ID NO: 2503129 - RNA, 15 nt, Human
gacuuccuugagaca

SEQ ID NO: 2503130 - RNA, 19 nt, Human
gacuuaagcacacuugaca

SEQ ID NO: 2503131 - RNA, 14 nt, Human
gacugggggccaga

SEQ ID NO: 2503132 - RNA, 13 nt, Human
gacuuaaagcaga

SEQ ID NO: 2503133 - RNA, 19 nt, Human
gacuuaaaauauuccugca

SEQ ID NO: 2503134 - RNA, 16 nt, Human
gacuuaacggcuccag

SEQ ID NO: 2503135 - RNA, 14 nt, Human
gacuuaacggcucc

SEQ ID NO: 2503136 - RNA, 19 nt, Human
gacuuaacggcuccaggau

SEQ ID NO: 2503137 - RNA, 16 nt, Human
gacuuaacuccuucca

SEQ ID NO: 2503138 - RNA, 20 nt, Human
gacuuaacugcauuuuuaga

SEQ ID NO: 2503139 - RNA, 19 nt, Human
gacuuggucaccagcuccu

SEQ ID NO: 2503140 - RNA, 16 nt, Human
gacuuggucaccagcu

SEQ ID NO: 2503141 - RNA, 20 nt, Human
gacuugggucucauuuagaa

SEQ ID NO: 2503142 - RNA, 20 nt, Human
gacuuggggagauggaguuc

SEQ ID NO: 2503143 - RNA, 18 nt, Human
gagaaaacuuauuugagu

SEQ ID NO: 2503144 - RNA, 16 nt, Human
gagaaaacuuauuuga

SEQ ID NO: 2503145 - RNA, 9 nt, Human
gagaaaaga

SEQ ID NO: 2503146 - RNA, 18 nt, Human
gacuuguauauuuguaca

SEQ ID NO: 2503147 - RNA, 21 nt, Human
gagaaaacgucuugcuuggga

SEQ ID NO: 2503148 - RNA, 16 nt, Human
gacuuguauauuugua

SEQ ID NO: 2503149 - RNA, 19 nt, Human
gacuuguagggaugccuuu

SEQ ID NO: 2503150 - RNA, 14 nt, Human
gacuuggucugauu

SEQ ID NO: 2503151 - RNA, 23 nt, Human
gacuugguguccuuucccuccac

SEQ ID NO: 2503152 - RNA, 15 nt, Human
gacuugcaucgugga

SEQ ID NO: 2503153 - RNA, 18 nt, Human
gacuugcaauuucuaccu

SEQ ID NO: 2503154 - RNA, 13 nt, Human
gacuugcauuuuu

SEQ ID NO: 2503155 - RNA, 15 nt, Human
gacuugcauuuuugc

SEQ ID NO: 2503156 - RNA, 23 nt, Human
gacuugaggauuuugaguaucuc

SEQ ID NO: 2503157 - RNA, 19 nt, Human
gacuugaggauuuugagua

SEQ ID NO: 2503158 - RNA, 19 nt, Human
gacuugacuuuagucugca

SEQ ID NO: 2503159 - RNA, 19 nt, Human
gacuugagaaacaaauaau

SEQ ID NO: 2503160 - RNA, 23 nt, Human
gacuugagaaacaaauaauuugu

SEQ ID NO: 2503161 - RNA, 19 nt, Human
gacuuggcaacagaagcag

SEQ ID NO: 2503162 - RNA, 17 nt, Human
gacuuggcaacagaagc

SEQ ID NO: 2503163 - RNA, 22 nt, Human
gacuugcuguuuuguucugugg

SEQ ID NO: 2503164 - RNA, 20 nt, Human
gacuugcuguuuuguucugu

SEQ ID NO: 2503165 - RNA, 19 nt, Human
gacuugcuguuuuguucug

SEQ ID NO: 2503166 - RNA, 21 nt, Human
gacuuggaggguugguccucu

SEQ ID NO: 2503167 - RNA, 17 nt, Human
gacuucugcuuuccaca

SEQ ID NO: 2503168 - RNA, 21 nt, Human
gacuucuuucaaauugagaga

SEQ ID NO: 2503169 - RNA, 22 nt, Human
gacuucuuucaaauugagagaa

SEQ ID NO: 2503170 - RNA, 18 nt, Human
gacuucuuuucacauucu

SEQ ID NO: 2503171 - RNA, 16 nt, Human
gacuucuuuucacauu

SEQ ID NO: 2503172 - RNA, 15 nt, Human
gacuucuuuucacau

SEQ ID NO: 2503173 - RNA, 12 nt, Human
gacuucuuuuca

SEQ ID NO: 2503174 - RNA, 21 nt, Human
gacuucuuuucacauucuuau

SEQ ID NO: 2503175 - RNA, 19 nt, Human
gacuucuuuucacauucuu

SEQ ID NO: 2503176 - RNA, 22 nt, Human
gacuucuuuucacauucuuaua

SEQ ID NO: 2503177 - RNA, 13 nt, Human
gacuugaaagcau

SEQ ID NO: 2503178 - RNA, 14 nt, Human
gacuugaaagcauc

SEQ ID NO: 2503179 - RNA, 16 nt, Human
gacuugaaagcaucca

SEQ ID NO: 2503180 - RNA, 13 nt, Human
gacuugaaguugu

SEQ ID NO: 2503181 - RNA, 12 nt, Human
gacuugaaguug

SEQ ID NO: 2503182 - RNA, 11 nt, Human
gacuugaaguu

SEQ ID NO: 2503183 - RNA, 17 nt, Human
gacuugaaagcauccau

SEQ ID NO: 2503184 - RNA, 19 nt, Human
gacuugaaagcauccaugu

SEQ ID NO: 2503185 - RNA, 21 nt, Human
gacuugaaagcauccaugugu

SEQ ID NO: 2503186 - RNA, 21 nt, Human
gacuugaauuuucccacugca

SEQ ID NO: 2503187 - RNA, 20 nt, Human
gacuugaauuuucccacugc

SEQ ID NO: 2503188 - RNA, 19 nt, Human
gacuugaauuuucccacug

SEQ ID NO: 2503189 - RNA, 15 nt, Human
gacuugaaguuguua

SEQ ID NO: 2503190 - RNA, 18 nt, Human
gacuugacagaacacugu

SEQ ID NO: 2503191 - RNA, 16 nt, Human
gacuugacagaacacu

SEQ ID NO: 2503192 - RNA, 16 nt, Human
gacugcauuauauuua

SEQ ID NO: 2503193 - RNA, 14 nt, Human
gacugcauuauauu

SEQ ID NO: 2503194 - RNA, 23 nt, Human
gacugaguacguugugcauuugg

SEQ ID NO: 2503195 - RNA, 22 nt, Human
gacugaguccucguagccaucu

SEQ ID NO: 2503196 - RNA, 13 nt, Human
gacugcccggcag

SEQ ID NO: 2503197 - RNA, 23 nt, Human
gacugcauguaccauuugcaugg

SEQ ID NO: 2503198 - RNA, 21 nt, Human
gacugcauguaccauuugcau

SEQ ID NO: 2503199 - RNA, 15 nt, Human
gacugccccgugcag

SEQ ID NO: 2503200 - RNA, 15 nt, Human
gacugcccggcaggg

SEQ ID NO: 2503201 - RNA, 17 nt, Human
gacugccccgugcagac

SEQ ID NO: 2503202 - RNA, 19 nt, Human
gacugccccgugcagacug

SEQ ID NO: 2503203 - RNA, 20 nt, Human
gacugccccgugcagacugg

SEQ ID NO: 2503204 - RNA, 21 nt, Human
gacugccccgugcagacugga

SEQ ID NO: 2503205 - RNA, 23 nt, Human
gacugccccgugcagacuggagg

SEQ ID NO: 2503206 - RNA, 16 nt, Human
gacugccgaccgaggc

SEQ ID NO: 2503207 - RNA, 19 nt, Human
gacugccgaccgaggcugg

SEQ ID NO: 2503208 - RNA, 20 nt, Human
gacugccgaccgaggcugga

SEQ ID NO: 2503209 - RNA, 21 nt, Human
gacugaguacguugugcauuu

SEQ ID NO: 2503210 - RNA, 22 nt, Human
gacugaguacguugugcauuug

SEQ ID NO: 2503211 - RNA, 16 nt, Human
gacucucagucucuga

SEQ ID NO: 2503212 - RNA, 18 nt, Human
gacucucagucucugagc

SEQ ID NO: 2503213 - RNA, 14 nt, Human
gacucucagucucu

SEQ ID NO: 2503214 - RNA, 20 nt, Human
gacucucagucucugagcag

SEQ ID NO: 2503215 - RNA, 12 nt, Human
gacucucuguga

SEQ ID NO: 2503216 - RNA, 13 nt, Human
gacucucugugac

SEQ ID NO: 2503217 - RNA, 14 nt, Human
gacucucaaaucuu

SEQ ID NO: 2503218 - RNA, 17 nt, Human
gacucuaggugcccuug

SEQ ID NO: 2503219 - RNA, 19 nt, Human
gacucuaggugcccuugga

SEQ ID NO: 2503220 - RNA, 20 nt, Human
gacucuaccagacuguguau

SEQ ID NO: 2503221 - RNA, 19 nt, Human
gacucuaccucauaucagu

SEQ ID NO: 2503222 - RNA, 23 nt, Human
gacucuaccucauaucaguuugc

SEQ ID NO: 2503223 - RNA, 17 nt, Human
gacucgcgacaaugcaa

SEQ ID NO: 2503224 - RNA, 14 nt, Human
gacucuaccagacu

SEQ ID NO: 2503225 - RNA, 19 nt, Human
gacucgagaacuuucauuu

SEQ ID NO: 2503226 - RNA, 16 nt, Human
gacucgagaacuuuca

SEQ ID NO: 2503227 - RNA, 18 nt, Human
gacuggggaugugggagg

SEQ ID NO: 2503228 - RNA, 17 nt, Human
gacuggggaugugggag

SEQ ID NO: 2503229 - RNA, 16 nt, Human
gacuggggauguggga

SEQ ID NO: 2503230 - RNA, 17 nt, Human
gacugggcccugccucu

SEQ ID NO: 2503231 - RNA, 23 nt, Human
gacuggggaugugggagggagca

SEQ ID NO: 2503232 - RNA, 20 nt, Human
gacuggggaugugggaggga

SEQ ID NO: 2503233 - RNA, 14 nt, Human
gacuggggggcuug

SEQ ID NO: 2503234 - RNA, 21 nt, Human
gacuguuuuuuccugagcuug

SEQ ID NO: 2503235 - RNA, 14 nt, Human
gacugggcugaggg

SEQ ID NO: 2503236 - RNA, 15 nt, Human
gacugggcugaggga

SEQ ID NO: 2503237 - RNA, 16 nt, Human
gacugggcugagggag

SEQ ID NO: 2503238 - RNA, 21 nt, Human
gacugggcugagggagccugg

SEQ ID NO: 2503239 - RNA, 23 nt, Human
gacugggagccgcagcagcuccc

SEQ ID NO: 2503240 - RNA, 18 nt, Human
gacugggagccgcagcag

SEQ ID NO: 2503241 - RNA, 14 nt, Human
gacugggcccugcc

SEQ ID NO: 2503242 - RNA, 13 nt, Human
gacugggagguag

SEQ ID NO: 2503243 - RNA, 15 nt, Human
gacugggagggccca

SEQ ID NO: 2503244 - RNA, 18 nt, Human
gacuggaagcacagcuuc

SEQ ID NO: 2503245 - RNA, 21 nt, Human
gacuggaagcuaauuugcauu

SEQ ID NO: 2503246 - RNA, 20 nt, Human
gacuggaagcuaauuugcau

SEQ ID NO: 2503247 - RNA, 17 nt, Human
gacuggaaccagggaga

SEQ ID NO: 2503248 - RNA, 22 nt, Human
gacuggauacugcccggggcag

SEQ ID NO: 2503249 - RNA, 15 nt, Human
gacuggauacugccc

SEQ ID NO: 2503250 - RNA, 14 nt, Human
gacuggagcaucug

SEQ ID NO: 2503251 - RNA, 20 nt, Human
gacugcuucccauccuaccc

SEQ ID NO: 2503252 - RNA, 17 nt, Human
gacugcuucccauccua

SEQ ID NO: 2503253 - RNA, 22 nt, Human
gacugcuucccauccuacccuc

SEQ ID NO: 2503254 - RNA, 12 nt, Human
gacugcuuccca

SEQ ID NO: 2503255 - RNA, 16 nt, Human
gacugcuucccauccu

SEQ ID NO: 2503256 - RNA, 15 nt, Human
gacugcuucccaucc

SEQ ID NO: 2503257 - RNA, 13 nt, Human
gacugcuucccau

SEQ ID NO: 2503258 - RNA, 19 nt, Human
gacugcugggacuggccag

SEQ ID NO: 2503259 - RNA, 23 nt, Human
gacugccgaccgaggcuggagcu

SEQ ID NO: 2503260 - RNA, 12 nt, Human
gacugcugggac

SEQ ID NO: 2503261 - RNA, 14 nt, Human
gacugcugggacug

SEQ ID NO: 2503262 - RNA, 16 nt, Human
gacuggaagcacagcu

SEQ ID NO: 2503263 - RNA, 15 nt, Human
gacuggaagcacagc

SEQ ID NO: 2503264 - RNA, 21 nt, Human
gacugcuuuggaccuaaaugg

SEQ ID NO: 2503265 - RNA, 15 nt, Human
gacuggaaccaggga

SEQ ID NO: 2503266 - RNA, 14 nt, Human
gacuggaagcacag

SEQ ID NO: 2503267 - RNA, 15 nt, Human
gacucauucuucugu

SEQ ID NO: 2503268 - RNA, 14 nt, Human
gacucauucuucug

SEQ ID NO: 2503269 - RNA, 14 nt, Human
gacucagccuucag

SEQ ID NO: 2503270 - RNA, 12 nt, Human
gacucagccuuc

SEQ ID NO: 2503271 - RNA, 15 nt, Human
gacucagcccugagg

SEQ ID NO: 2503272 - RNA, 16 nt, Human
gacucagcccugaggu

SEQ ID NO: 2503273 - RNA, 19 nt, Human
gacucagccuucagacaga

SEQ ID NO: 2503274 - RNA, 15 nt, Human
gacucagccuucaga

SEQ ID NO: 2503275 - RNA, 20 nt, Human
gacucagccuucagacagag

SEQ ID NO: 2503276 - RNA, 14 nt, Human
gacucagcucccca

SEQ ID NO: 2503277 - RNA, 18 nt, Human
gacucagacauuggcacc

SEQ ID NO: 2503278 - RNA, 16 nt, Human
gacucagacuccauuu

SEQ ID NO: 2503279 - RNA, 11 nt, Human
gacucagcccu

SEQ ID NO: 2503280 - RNA, 13 nt, Human
gacucagcccuga

SEQ ID NO: 2503281 - RNA, 19 nt, Human
gacucagaagccucugggu

SEQ ID NO: 2503282 - RNA, 17 nt, Human
gacucagacaggaaagg

SEQ ID NO: 2503283 - RNA, 23 nt, Human
gacucagacaggaaagggaaggc

SEQ ID NO: 2503284 - RNA, 14 nt, Human
gacuagaugaugga

SEQ ID NO: 2503285 - RNA, 16 nt, Human
gacuagaugauggaug

SEQ ID NO: 2503286 - RNA, 21 nt, Human
gacuagaugauggaugccaau

SEQ ID NO: 2503287 - RNA, 16 nt, Human
gacuagaggcuugcau

SEQ ID NO: 2503288 - RNA, 17 nt, Human
gacuagagggaccucuc

SEQ ID NO: 2503289 - RNA, 19 nt, Human
gacuagagggaccucuccc

SEQ ID NO: 2503290 - RNA, 20 nt, Human
gacuagagggaccucuccca

SEQ ID NO: 2503291 - RNA, 23 nt, Human
gacuagagggaccucucccaggg

SEQ ID NO: 2503292 - RNA, 21 nt, Human
gacuacaggugugagucacca

SEQ ID NO: 2503293 - RNA, 18 nt, Human
gacuacaggugugaguca

SEQ ID NO: 2503294 - RNA, 22 nt, Human
gacuacccacguucucacaccc

SEQ ID NO: 2503295 - RNA, 14 nt, Human
gacuacauuuagag

SEQ ID NO: 2503296 - RNA, 18 nt, Human
gacuacagucaggaaagg

SEQ ID NO: 2503297 - RNA, 13 nt, Human
gaccucaaccugu

SEQ ID NO: 2503298 - RNA, 16 nt, Human
gacuagaggcagggag

SEQ ID NO: 2503299 - RNA, 17 nt, Human
gacuagaggcagggagg

SEQ ID NO: 2503300 - RNA, 20 nt, Human
gacuagaggcagggagggga

SEQ ID NO: 2503301 - RNA, 22 nt, Human
gacuagaggcagggaggggacu

SEQ ID NO: 2503302 - RNA, 15 nt, Human
gacuagaggcaggga

SEQ ID NO: 2503303 - RNA, 23 nt, Human
gaccuauguccuaaggacacacu

SEQ ID NO: 2503304 - RNA, 22 nt, Human
gaccuauguccuaaggacacac

SEQ ID NO: 2503305 - RNA, 21 nt, Human
gaccuauguccuaaggacaca

SEQ ID NO: 2503306 - RNA, 17 nt, Human
gaccuauuccuccuggg

SEQ ID NO: 2503307 - RNA, 16 nt, Human
gaccuauuccuccugg

SEQ ID NO: 2503308 - RNA, 13 nt, Human
gacuacaggugug

SEQ ID NO: 2503309 - RNA, 13 nt, Human
gaccuacucucau

SEQ ID NO: 2503310 - RNA, 18 nt, Human
gaccuaggauaucuucuc

SEQ ID NO: 2503311 - RNA, 20 nt, Human
gaccuaggauaucuucucca

SEQ ID NO: 2503312 - RNA, 17 nt, Human
gaccuagggaggaccuu

SEQ ID NO: 2503313 - RNA, 21 nt, Human
gaccuagggaggaccuuaucu

SEQ ID NO: 2503314 - RNA, 20 nt, Human
gaccuagggauguucuggcc

SEQ ID NO: 2503315 - RNA, 21 nt, Human
gaccuagggauguucuggccc

SEQ ID NO: 2503316 - RNA, 22 nt, Human
gaccuagggauguucuggcccu

SEQ ID NO: 2503317 - RNA, 15 nt, Human
gaccuaucacuucca

SEQ ID NO: 2503318 - RNA, 23 nt, Human
gaccuagggauguucuggcccuc

SEQ ID NO: 2503319 - RNA, 15 nt, Human
gacuccuaugaucuc

SEQ ID NO: 2503320 - RNA, 15 nt, Human
gacuccucggccugg

SEQ ID NO: 2503321 - RNA, 23 nt, Human
gacuccuaggcaggacaugcuga

SEQ ID NO: 2503322 - RNA, 20 nt, Human
gacuccucggccuggcuccu

SEQ ID NO: 2503323 - RNA, 18 nt, Human
gacuccucggccuggcuc

SEQ ID NO: 2503324 - RNA, 17 nt, Human
gacuccucggccuggcu

SEQ ID NO: 2503325 - RNA, 11 nt, Human
gacuccucugu

SEQ ID NO: 2503326 - RNA, 12 nt, Human
gacuccugcagg

SEQ ID NO: 2503327 - RNA, 21 nt, Human
gacuccugaggacagcugucc

SEQ ID NO: 2503328 - RNA, 20 nt, Human
gacuccugaggacagcuguc

SEQ ID NO: 2503329 - RNA, 19 nt, Human
gacuccugaggacagcugu

SEQ ID NO: 2503330 - RNA, 18 nt, Human
gacuccugaggacagcug

SEQ ID NO: 2503331 - RNA, 14 nt, Human
gacuccucugucca

SEQ ID NO: 2503332 - RNA, 13 nt, Human
gacuccugcaggc

SEQ ID NO: 2503333 - RNA, 23 nt, Human
gacuccugcacacgcuccuuccu

SEQ ID NO: 2503334 - RNA, 13 nt, Human
gacucgcgacaau

SEQ ID NO: 2503335 - RNA, 17 nt, Human
gacuccuggguugagcu

SEQ ID NO: 2503336 - RNA, 11 nt, Human
gacuccugggu

SEQ ID NO: 2503337 - RNA, 14 nt, Human
gacuccugcccugu

SEQ ID NO: 2503338 - RNA, 13 nt, Human
gacuccugcccug

SEQ ID NO: 2503339 - RNA, 16 nt, Human
gacuccugugcaacuu

SEQ ID NO: 2503340 - RNA, 22 nt, Human
gacuccuugagagaccaggcaa

SEQ ID NO: 2503341 - RNA, 21 nt, Human
gacucauuuuaaaaaauggaa

SEQ ID NO: 2503342 - RNA, 11 nt, Human
gacuccaaaga

SEQ ID NO: 2503343 - RNA, 12 nt, Human
gacuccaaagaa

SEQ ID NO: 2503344 - RNA, 15 nt, Human
gacuccaaagaaaug

SEQ ID NO: 2503345 - RNA, 19 nt, Human
gacuccuaggcaggacaug

SEQ ID NO: 2503346 - RNA, 17 nt, Human
gacuccuaggcaggaca

SEQ ID NO: 2503347 - RNA, 20 nt, Human
gacucagcuccccagagucc

SEQ ID NO: 2503348 - RNA, 16 nt, Human
gacuccguuggccacu

SEQ ID NO: 2503349 - RNA, 17 nt, Human
gacuccguuggccacuc

SEQ ID NO: 2503350 - RNA, 23 nt, Human
gacuccggguuugagauggacac

SEQ ID NO: 2503351 - RNA, 22 nt, Human
gacuccggcccuccuacccugc

SEQ ID NO: 2503352 - RNA, 16 nt, Human
gacuccaaagaaaugu

SEQ ID NO: 2503353 - RNA, 18 nt, Human
gacuccaaagaaauguaa

SEQ ID NO: 2503354 - RNA, 18 nt, Human
gacucagcuccccagagu

SEQ ID NO: 2503355 - RNA, 17 nt, Human
gacucagcuccccagag

SEQ ID NO: 2503356 - RNA, 15 nt, Human
gacuccggcccuccu

SEQ ID NO: 2503357 - RNA, 13 nt, Human
gacccaaagacca

SEQ ID NO: 2503358 - RNA, 11 nt, Human
gacccaaagac

SEQ ID NO: 2503359 - RNA, 16 nt, Human
gacccaaaaggcagaa

SEQ ID NO: 2503360 - RNA, 15 nt, Human
gacccacaagaaaug

SEQ ID NO: 2503361 - RNA, 22 nt, Human
gacccacaagaaaugaaagcag

SEQ ID NO: 2503362 - RNA, 12 nt, Human
gacccccaacca

SEQ ID NO: 2503363 - RNA, 18 nt, Human
gacccaauguaggagcug

SEQ ID NO: 2503364 - RNA, 12 nt, Human
gacccaaagacc

SEQ ID NO: 2503365 - RNA, 13 nt, Human
gacccaaggagga

SEQ ID NO: 2503366 - RNA, 21 nt, Human
gacccccaaccaaguggcucc

SEQ ID NO: 2503367 - RNA, 19 nt, Human
gacccaauguaggagcugc

SEQ ID NO: 2503368 - RNA, 13 nt, Human
gacccccacaccu

SEQ ID NO: 2503369 - RNA, 15 nt, Human
gacccccacaccuca

SEQ ID NO: 2503370 - RNA, 14 nt, Human
gacccaaggaggaa

SEQ ID NO: 2503371 - RNA, 12 nt, Human
gacccccacccc

SEQ ID NO: 2503372 - RNA, 13 nt, Human
gacccccaccccu

SEQ ID NO: 2503373 - RNA, 14 nt, Human
gacccccaccccuu

SEQ ID NO: 2503374 - RNA, 15 nt, Human
gacccccaccccuuc

SEQ ID NO: 2503375 - RNA, 16 nt, Human
gacccccaccccuucc

SEQ ID NO: 2503376 - RNA, 17 nt, Human
gacccccaccccuuccc

SEQ ID NO: 2503377 - RNA, 18 nt, Human
gacccccaccccuucccc

SEQ ID NO: 2503378 - RNA, 19 nt, Human
gacccccaccccuucccca

SEQ ID NO: 2503379 - RNA, 21 nt, Human
gacccccaccccuuccccacu

SEQ ID NO: 2503380 - RNA, 22 nt, Human
gacccccaccccuuccccacug

SEQ ID NO: 2503381 - RNA, 18 nt, Human
gacccccacucucauucc

SEQ ID NO: 2503382 - RNA, 19 nt, Human
gacccccacucucauuccc

SEQ ID NO: 2503383 - RNA, 23 nt, Human
gacccccacucucauuccccagg

SEQ ID NO: 2503384 - RNA, 22 nt, Human
gacccugaggcccagagggccu

SEQ ID NO: 2503385 - RNA, 21 nt, Human
gaccccuccaugugggcuagu

SEQ ID NO: 2503386 - RNA, 18 nt, Human
gaccccuccaugugggcu

SEQ ID NO: 2503387 - RNA, 14 nt, Human
gaccccuccaugug

SEQ ID NO: 2503388 - RNA, 23 nt, Human
gacccugaggcccagagggccug

SEQ ID NO: 2503389 - RNA, 20 nt, Human
gacccccagcaacccuccua

SEQ ID NO: 2503390 - RNA, 19 nt, Human
gaccccuccccuaaugccu

SEQ ID NO: 2503391 - RNA, 17 nt, Human
gaccggacuuuucugca

SEQ ID NO: 2503392 - RNA, 16 nt, Human
gaccgcccccuccucu

SEQ ID NO: 2503393 - RNA, 15 nt, Human
gaccgcccccuccuc

SEQ ID NO: 2503394 - RNA, 19 nt, Human
gaccgaacuguuguauaaa

SEQ ID NO: 2503395 - RNA, 17 nt, Human
gaccgaggcuggagcug

SEQ ID NO: 2503396 - RNA, 22 nt, Human
gacccuuuccuuccuucccugg

SEQ ID NO: 2503397 - RNA, 23 nt, Human
gacccuuuccuuccuucccuggc

SEQ ID NO: 2503398 - RNA, 14 nt, Human
gaccgcccccuccu

SEQ ID NO: 2503399 - RNA, 12 nt, Human
gaccgcccccuc

SEQ ID NO: 2503400 - RNA, 22 nt, Human
gaccgccagauggggccucugu

SEQ ID NO: 2503401 - RNA, 20 nt, Human
gaccgccagauggggccucu

SEQ ID NO: 2503402 - RNA, 16 nt, Human
gaccgccagauggggc

SEQ ID NO: 2503403 - RNA, 17 nt, Human
gaccgugaggccagaga

SEQ ID NO: 2503404 - RNA, 16 nt, Human
gaccgugaggccagag

SEQ ID NO: 2503405 - RNA, 18 nt, Human
gaccgugaggccagagac

SEQ ID NO: 2503406 - RNA, 16 nt, Human
gaccuaccucagguug

SEQ ID NO: 2503407 - RNA, 19 nt, Human
gaccuaccucagguugcug

SEQ ID NO: 2503408 - RNA, 20 nt, Human
gacccuuguggucccacccc

SEQ ID NO: 2503409 - RNA, 19 nt, Human
gacccuuguggucccaccc

SEQ ID NO: 2503410 - RNA, 21 nt, Human
gacccuuguggucccacccca

SEQ ID NO: 2503411 - RNA, 23 nt, Human
gacccuuuagccaaacccuuguc

SEQ ID NO: 2503412 - RNA, 14 nt, Human
gacccuuuccuucc

SEQ ID NO: 2503413 - RNA, 20 nt, Human
gacccuuuccuuccuucccu

SEQ ID NO: 2503414 - RNA, 21 nt, Human
gacccuuuccuuccuucccug

SEQ ID NO: 2503415 - RNA, 15 nt, Human
gacccuugugguccc

SEQ ID NO: 2503416 - RNA, 22 nt, Human
gacccugggugggcucugugca

SEQ ID NO: 2503417 - RNA, 19 nt, Human
gacccugggugggcucugu

SEQ ID NO: 2503418 - RNA, 18 nt, Human
gacccugggugggcucug

SEQ ID NO: 2503419 - RNA, 17 nt, Human
gacccugggugggcucu

SEQ ID NO: 2503420 - RNA, 17 nt, Human
gacccugggcagggacu

SEQ ID NO: 2503421 - RNA, 22 nt, Human
gacccugcgaaggggcccuggu

SEQ ID NO: 2503422 - RNA, 12 nt, Human
gacccugucuca

SEQ ID NO: 2503423 - RNA, 21 nt, Human
gacccugggugggcucugugc

SEQ ID NO: 2503424 - RNA, 11 nt, Human
gacccuguaua

SEQ ID NO: 2503425 - RNA, 19 nt, Human
gacccuguauauagcccag

SEQ ID NO: 2503426 - RNA, 17 nt, Human
gacccuguauauagccc

SEQ ID NO: 2503427 - RNA, 11 nt, Human
gaccagagcug

SEQ ID NO: 2503428 - RNA, 24 nt, Human
gaccagacaccuugacagggcaca

SEQ ID NO: 2503429 - RNA, 14 nt, Human
gaccacuguuauca

SEQ ID NO: 2503430 - RNA, 12 nt, Human
gaccacugcaug

SEQ ID NO: 2503431 - RNA, 17 nt, Human
gaccacgugcuaccccc

SEQ ID NO: 2503432 - RNA, 17 nt, Human
gaccacgggaagcaucu

SEQ ID NO: 2503433 - RNA, 21 nt, Human
gaccacugcaugagcuuuuau

SEQ ID NO: 2503434 - RNA, 16 nt, Human
gaccagaagccaaaga

SEQ ID NO: 2503435 - RNA, 22 nt, Human
gaccacggacguuuccaucagg

SEQ ID NO: 2503436 - RNA, 21 nt, Human
gaccacggacguuuccaucag

SEQ ID NO: 2503437 - RNA, 13 nt, Human
gaccacggcucga

SEQ ID NO: 2503438 - RNA, 21 nt, Human
gaccacugcagaagacaguau

SEQ ID NO: 2503439 - RNA, 14 nt, Human
gaccacguuucuaa

SEQ ID NO: 2503440 - RNA, 20 nt, Human
gaccacggacguuuccauca

SEQ ID NO: 2503441 - RNA, 21 nt, Human
gaccacgcuuucuagcuguug

SEQ ID NO: 2503442 - RNA, 22 nt, Human
gaccacgcccguccugccugug

SEQ ID NO: 2503443 - RNA, 14 nt, Human
gaccacgcuuucua

SEQ ID NO: 2503444 - RNA, 20 nt, Human
gaccaccccgccugcccuca

SEQ ID NO: 2503445 - RNA, 19 nt, Human
gaccaccccgccugcccuc

SEQ ID NO: 2503446 - RNA, 21 nt, Human
gacauggcuugccacagcucu

SEQ ID NO: 2503447 - RNA, 18 nt, Human
gaccaccccgccugcccu

SEQ ID NO: 2503448 - RNA, 16 nt, Human
gacaugcgguagccag

SEQ ID NO: 2503449 - RNA, 17 nt, Human
gacaugcgguagccagc

SEQ ID NO: 2503450 - RNA, 16 nt, Human
gacaugggacauuugc

SEQ ID NO: 2503451 - RNA, 18 nt, Human
gacaugggaaaggggaag

SEQ ID NO: 2503452 - RNA, 18 nt, Human
gaccacccuccccucucu

SEQ ID NO: 2503453 - RNA, 17 nt, Human
gaccacccuccccucuc

SEQ ID NO: 2503454 - RNA, 16 nt, Human
gaccacccuccccucu

SEQ ID NO: 2503455 - RNA, 15 nt, Human
gaccacccuccccuc

SEQ ID NO: 2503456 - RNA, 19 nt, Human
gaccacccuccccucucuu

SEQ ID NO: 2503457 - RNA, 20 nt, Human
gaccaccccugccuccaccc

SEQ ID NO: 2503458 - RNA, 19 nt, Human
gaccaccccugccuccacc

SEQ ID NO: 2503459 - RNA, 17 nt, Human
gaccaccccugccucca

SEQ ID NO: 2503460 - RNA, 14 nt, Human
gaccaccccugccu

SEQ ID NO: 2503461 - RNA, 14 nt, Human
gaccacccuccccu

SEQ ID NO: 2503462 - RNA, 22 nt, Human
gaccaccccugccuccacccuc

SEQ ID NO: 2503463 - RNA, 21 nt, Human
gaccacgcccguccugccugu

SEQ ID NO: 2503464 - RNA, 19 nt, Human
gaccacgcccguccugccu

SEQ ID NO: 2503465 - RNA, 17 nt, Human
gaccacgcccguccugc

SEQ ID NO: 2503466 - RNA, 14 nt, Human
gaccaccugcccaa

SEQ ID NO: 2503467 - RNA, 13 nt, Human
gaccaccugccca

SEQ ID NO: 2503468 - RNA, 17 nt, Human
gaccagagcugccaccu

SEQ ID NO: 2503469 - RNA, 15 nt, Human
gaccagagcugccac

SEQ ID NO: 2503470 - RNA, 14 nt, Human
gaccagagcugcca

SEQ ID NO: 2503471 - RNA, 13 nt, Human
gaccagagcugcc

SEQ ID NO: 2503472 - RNA, 19 nt, Human
gaccagagcugccaccugc

SEQ ID NO: 2503473 - RNA, 18 nt, Human
gaccagagcugccaccug

SEQ ID NO: 2503474 - RNA, 11 nt, Human
gaccagacuaa

SEQ ID NO: 2503475 - RNA, 21 nt, Human
gaccagagccccacacggagg

SEQ ID NO: 2503476 - RNA, 20 nt, Human
gaccagccuccaugcugccu

SEQ ID NO: 2503477 - RNA, 22 nt, Human
gaccagccuccaugcugccucc

SEQ ID NO: 2503478 - RNA, 21 nt, Human
gaccagccuccaugcugccuc

SEQ ID NO: 2503479 - RNA, 22 nt, Human
gaccauucuccaccugccaggg

SEQ ID NO: 2503480 - RNA, 21 nt, Human
gaccauucuccaccugccagg

SEQ ID NO: 2503481 - RNA, 17 nt, Human
gaccauucuccaccugc

SEQ ID NO: 2503482 - RNA, 15 nt, Human
gaccauuucaggggu

SEQ ID NO: 2503483 - RNA, 20 nt, Human
gaccauucuccaccugccag

SEQ ID NO: 2503484 - RNA, 19 nt, Human
gaccauucuccaccugcca

SEQ ID NO: 2503485 - RNA, 14 nt, Human
gaccagccucccug

SEQ ID NO: 2503486 - RNA, 11 nt, Human
gaccagccugg

SEQ ID NO: 2503487 - RNA, 12 nt, Human
gaccagccuggc

SEQ ID NO: 2503488 - RNA, 13 nt, Human
gaccagccuggcc

SEQ ID NO: 2503489 - RNA, 22 nt, Human
gaccagccucccugucggccug

SEQ ID NO: 2503490 - RNA, 19 nt, Human
gacagccacggccaggcca

SEQ ID NO: 2503491 - RNA, 18 nt, Human
gacagccacggccaggcc

SEQ ID NO: 2503492 - RNA, 17 nt, Human
gacagccacggccaggc

SEQ ID NO: 2503493 - RNA, 14 nt, Human
gacagccacggcca

SEQ ID NO: 2503494 - RNA, 22 nt, Human
gacagagugagacucugucuca

SEQ ID NO: 2503495 - RNA, 20 nt, Human
gacagagugagacucugucu

SEQ ID NO: 2503496 - RNA, 13 nt, Human
gacagagggggug

SEQ ID NO: 2503497 - RNA, 13 nt, Human
gacagauaacucu

SEQ ID NO: 2503498 - RNA, 20 nt, Human
gacagaucaagcugugagac

SEQ ID NO: 2503499 - RNA, 16 nt, Human
gacagaguaugaacac

SEQ ID NO: 2503500 - RNA, 14 nt, Human
gacagaucaagcug

SEQ ID NO: 2503501 - RNA, 21 nt, Human
gacagaguucacuauaaaugg

SEQ ID NO: 2503502 - RNA, 17 nt, Human
gacagcugccugggauc

SEQ ID NO: 2503503 - RNA, 16 nt, Human
gacagcugccugggau

SEQ ID NO: 2503504 - RNA, 21 nt, Human
gacagccacggccaggccaga

SEQ ID NO: 2503505 - RNA, 20 nt, Human
gacagccacggccaggccag

SEQ ID NO: 2503506 - RNA, 21 nt, Human
gacagcugccugggaucccuc

SEQ ID NO: 2503507 - RNA, 18 nt, Human
gacagcugccugggaucc

SEQ ID NO: 2503508 - RNA, 17 nt, Human
gacagaucaagcuguga

SEQ ID NO: 2503509 - RNA, 16 nt, Human
gacagaucaagcugug

SEQ ID NO: 2503510 - RNA, 19 nt, Human
gacagaucaagcugugaga

SEQ ID NO: 2503511 - RNA, 22 nt, Human
gacagcuugagccgggccccug

SEQ ID NO: 2503512 - RNA, 12 nt, Human
gacagcuuugcu

SEQ ID NO: 2503513 - RNA, 16 nt, Human
gacagcuuugcugcug

SEQ ID NO: 2503514 - RNA, 15 nt, Human
gacagcuuugcugcu

SEQ ID NO: 2503515 - RNA, 18 nt, Human
gacaggaaaauccucugg

SEQ ID NO: 2503516 - RNA, 22 nt, Human
gacagaggggguggccucccaa

SEQ ID NO: 2503517 - RNA, 21 nt, Human
gacagaggggguggccuccca

SEQ ID NO: 2503518 - RNA, 23 nt, Human
gacagaggggguggccucccaac

SEQ ID NO: 2503519 - RNA, 14 nt, Human
gacagagucucacu

SEQ ID NO: 2503520 - RNA, 19 nt, Human
gacagaggggguggccucc

SEQ ID NO: 2503521 - RNA, 18 nt, Human
gacagaggggguggccuc

SEQ ID NO: 2503522 - RNA, 15 nt, Human
gacagaggggguggc

SEQ ID NO: 2503523 - RNA, 17 nt, Human
gacagaggcagccccau

SEQ ID NO: 2503524 - RNA, 19 nt, Human
gacagagccaugcugggaa

SEQ ID NO: 2503525 - RNA, 13 nt, Human
gacagagccaugc

SEQ ID NO: 2503526 - RNA, 19 nt, Human
gacagagaggacuguaggg

SEQ ID NO: 2503527 - RNA, 16 nt, Human
gacagaggcagcccca

SEQ ID NO: 2503528 - RNA, 14 nt, Human
gacagaggcagccc

SEQ ID NO: 2503529 - RNA, 13 nt, Human
gacacccaggacu

SEQ ID NO: 2503530 - RNA, 14 nt, Human
gacacccaggacuu

SEQ ID NO: 2503531 - RNA, 15 nt, Human
gacacccauuuucac

SEQ ID NO: 2503532 - RNA, 19 nt, Human
gacacccauguuucucugg

SEQ ID NO: 2503533 - RNA, 14 nt, Human
gacacccaaagggu

SEQ ID NO: 2503534 - RNA, 22 nt, Human
gacaccaucuuuugugagaugu

SEQ ID NO: 2503535 - RNA, 22 nt, Human
gacaccagccuuucucccaggc

SEQ ID NO: 2503536 - RNA, 19 nt, Human
gacaccaggagucccuggu

SEQ ID NO: 2503537 - RNA, 20 nt, Human
gacaccaggagucccuggua

SEQ ID NO: 2503538 - RNA, 21 nt, Human
gacagagcaagugagacccug

SEQ ID NO: 2503539 - RNA, 16 nt, Human
gacagagaggacugua

SEQ ID NO: 2503540 - RNA, 15 nt, Human
gacagagaggacugu

SEQ ID NO: 2503541 - RNA, 19 nt, Human
gacagagaggacgugggcg

SEQ ID NO: 2503542 - RNA, 18 nt, Human
gacagagaggacgugggc

SEQ ID NO: 2503543 - RNA, 13 nt, Human
gacaucucugcac

SEQ ID NO: 2503544 - RNA, 20 nt, Human
gacaucucaggggccagagg

SEQ ID NO: 2503545 - RNA, 22 nt, Human
gacaucucaggggccagaggaa

SEQ ID NO: 2503546 - RNA, 19 nt, Human
gacaugagugcgugcucag

SEQ ID NO: 2503547 - RNA, 16 nt, Human
gacaugaaugcacacu

SEQ ID NO: 2503548 - RNA, 14 nt, Human
gacaugaucuucuu

SEQ ID NO: 2503549 - RNA, 16 nt, Human
gacaugauuuccuuga

SEQ ID NO: 2503550 - RNA, 17 nt, Human
gacaugauuuccuugaa

SEQ ID NO: 2503551 - RNA, 19 nt, Human
gacaugauuuccuugaaug

SEQ ID NO: 2503552 - RNA, 20 nt, Human
gacaugauuuccuugaaugu

SEQ ID NO: 2503553 - RNA, 14 nt, Human
gacaugauuuccuu

SEQ ID NO: 2503554 - RNA, 14 nt, Human
gacaugauuccuuc

SEQ ID NO: 2503555 - RNA, 16 nt, Human
gacaugauuccuuccu

SEQ ID NO: 2503556 - RNA, 21 nt, Human
gacaugauggagcgcaccugc

SEQ ID NO: 2503557 - RNA, 14 nt, Human
gacaugggaaaggg

SEQ ID NO: 2503558 - RNA, 22 nt, Human
gacaugcgggcugggcagcugu

SEQ ID NO: 2503559 - RNA, 21 nt, Human
gacaugcgggcugggcagcug

SEQ ID NO: 2503560 - RNA, 20 nt, Human
gacaugcgggcugggcagcu

SEQ ID NO: 2503561 - RNA, 18 nt, Human
gacaugcgggcugggcag

SEQ ID NO: 2503562 - RNA, 22 nt, Human
gacaugauuccuuccuguucug

SEQ ID NO: 2503563 - RNA, 15 nt, Human
gacaugcgggcuggg

SEQ ID NO: 2503564 - RNA, 14 nt, Human
gacaugcgggcugg

SEQ ID NO: 2503565 - RNA, 22 nt, Human
gacaugauuuccuugaaugugg

SEQ ID NO: 2503566 - RNA, 24 nt, Human
gacaugauuuccuugaauguggcu

SEQ ID NO: 2503567 - RNA, 14 nt, Human
gacaugcacucagc

SEQ ID NO: 2503568 - RNA, 17 nt, Human
gacauacuugaagggcc

SEQ ID NO: 2503569 - RNA, 18 nt, Human
gacauacuugaagggcca

SEQ ID NO: 2503570 - RNA, 19 nt, Human
gacauacuugaagggccag

SEQ ID NO: 2503571 - RNA, 20 nt, Human
gacauacuugaagggccaga

SEQ ID NO: 2503572 - RNA, 20 nt, Human
gacauagaauuaacacauga

SEQ ID NO: 2503573 - RNA, 22 nt, Human
gacaguuaagagaaaugagcuu

SEQ ID NO: 2503574 - RNA, 14 nt, Human
gacauacuugaagg

SEQ ID NO: 2503575 - RNA, 15 nt, Human
gacauacuugaaggg

SEQ ID NO: 2503576 - RNA, 23 nt, Human
gacaguguugaaaauguucagaa

SEQ ID NO: 2503577 - RNA, 22 nt, Human
gacauacuccuuccaucaaaua

SEQ ID NO: 2503578 - RNA, 16 nt, Human
gacauccucuucugcu

SEQ ID NO: 2503579 - RNA, 13 nt, Human
gacauccucuucu

SEQ ID NO: 2503580 - RNA, 18 nt, Human
gacauccuccucccaccc

SEQ ID NO: 2503581 - RNA, 23 nt, Human
gacauccucuucugcuuaggaga

SEQ ID NO: 2503582 - RNA, 18 nt, Human
gacaucucaggggccaga

SEQ ID NO: 2503583 - RNA, 17 nt, Human
gacaucucaggggccag

SEQ ID NO: 2503584 - RNA, 16 nt, Human
gacaucucaggggcca

SEQ ID NO: 2503585 - RNA, 15 nt, Human
gacaucucaggggcc

SEQ ID NO: 2503586 - RNA, 13 nt, Human
gacaucucagggg

SEQ ID NO: 2503587 - RNA, 22 nt, Human
gacauacuugaagggccagagc

SEQ ID NO: 2503588 - RNA, 23 nt, Human
gacauacuugaagggccagagcc

SEQ ID NO: 2503589 - RNA, 23 nt, Human
gacauccauguuuguaaaacuac

SEQ ID NO: 2503590 - RNA, 22 nt, Human
gacauccauguuuguaaaacua

SEQ ID NO: 2503591 - RNA, 15 nt, Human
gacauccuccuccca

SEQ ID NO: 2503592 - RNA, 16 nt, Human
gacauccguugugcuu

SEQ ID NO: 2503593 - RNA, 23 nt, Human
gacauccccccgccaaaagcugc

SEQ ID NO: 2503594 - RNA, 23 nt, Human
gacaggaccagggauuuccauga

SEQ ID NO: 2503595 - RNA, 15 nt, Human
gacaggaccagggau

SEQ ID NO: 2503596 - RNA, 14 nt, Human
gacaggaccaggga

SEQ ID NO: 2503597 - RNA, 19 nt, Human
gacaggaaaauccucuggc

SEQ ID NO: 2503598 - RNA, 12 nt, Human
gacaggaaaggg

SEQ ID NO: 2503599 - RNA, 17 nt, Human
gacaggaaagggaaggc

SEQ ID NO: 2503600 - RNA, 14 nt, Human
gacaggacagugcu

SEQ ID NO: 2503601 - RNA, 22 nt, Human
gacaggacagugcuucagccug

SEQ ID NO: 2503602 - RNA, 23 nt, Human
gacaggacagugcuucagccuga

SEQ ID NO: 2503603 - RNA, 17 nt, Human
gacagggaggacgcucu

SEQ ID NO: 2503604 - RNA, 14 nt, Human
gacagggaagcuac

SEQ ID NO: 2503605 - RNA, 14 nt, Human
gacaggaccuagga

SEQ ID NO: 2503606 - RNA, 13 nt, Human
gacaggaccugac

SEQ ID NO: 2503607 - RNA, 16 nt, Human
gacagggaagagcaga

SEQ ID NO: 2503608 - RNA, 18 nt, Human
gacagggaggacgcucuc

SEQ ID NO: 2503609 - RNA, 16 nt, Human
gacagggaggugaccc

SEQ ID NO: 2503610 - RNA, 23 nt, Human
gacagggcacaccgggcacucag

SEQ ID NO: 2503611 - RNA, 23 nt, Human
gacagggaugagcauggagcugg

SEQ ID NO: 2503612 - RNA, 21 nt, Human
gacagggaugagcauggagcu

SEQ ID NO: 2503613 - RNA, 14 nt, Human
gacagggaugagca

SEQ ID NO: 2503614 - RNA, 17 nt, Human
gacagggaagcuacagg

SEQ ID NO: 2503615 - RNA, 13 nt, Human
gacagggacccac

SEQ ID NO: 2503616 - RNA, 19 nt, Human
gacagggacccacuucaca

SEQ ID NO: 2503617 - RNA, 24 nt, Human
gacagggcacaccgggcacucaga

SEQ ID NO: 2503618 - RNA, 20 nt, Human
gacaguggauugcauuucuu

SEQ ID NO: 2503619 - RNA, 20 nt, Human
gacagugcuucagccugagg

SEQ ID NO: 2503620 - RNA, 18 nt, Human
gacagugcuucagccuga

SEQ ID NO: 2503621 - RNA, 19 nt, Human
gacagugcuucagccugag

SEQ ID NO: 2503622 - RNA, 14 nt, Human
gacaguuaagagaa

SEQ ID NO: 2503623 - RNA, 13 nt, Human
gacagugggaaau

SEQ ID NO: 2503624 - RNA, 17 nt, Human
gacagugcuucagccug

SEQ ID NO: 2503625 - RNA, 15 nt, Human
gacagugggaaauau

SEQ ID NO: 2503626 - RNA, 22 nt, Human
gaauuggguggggggcuucaua

SEQ ID NO: 2503627 - RNA, 23 nt, Human
gaauuggguggggggcuucauac

SEQ ID NO: 2503628 - RNA, 15 nt, Human
gaauuguaaggaaug

SEQ ID NO: 2503629 - RNA, 17 nt, Human
gaauugggagcuuggga

SEQ ID NO: 2503630 - RNA, 20 nt, Human
gaauuggguggggggcuuca

SEQ ID NO: 2503631 - RNA, 16 nt, Human
gaauugggagcuuggg

SEQ ID NO: 2503632 - RNA, 22 nt, Human
gaauuggaccauccuauuuaac

SEQ ID NO: 2503633 - RNA, 22 nt, Human
gaauugccugcagagagaagcc

SEQ ID NO: 2503634 - RNA, 21 nt, Human
gaauugccugcagagagaagc

SEQ ID NO: 2503635 - RNA, 17 nt, Human
gaauugcuugaaccugg

SEQ ID NO: 2503636 - RNA, 13 nt, Human
gaauuuccucuau

SEQ ID NO: 2503637 - RNA, 12 nt, Human
gaauuucuaaaa

SEQ ID NO: 2503638 - RNA, 16 nt, Human
gaauuguaacuguucu

SEQ ID NO: 2503639 - RNA, 17 nt, Human
gaauuucuaaaaaacag

SEQ ID NO: 2503640 - RNA, 21 nt, Human
gaauuuccucuauugauguac

SEQ ID NO: 2503641 - RNA, 21 nt, Human
gaauuuguaaccucagcucug

SEQ ID NO: 2503642 - RNA, 19 nt, Human
gaauuuguaaccucagcuc

SEQ ID NO: 2503643 - RNA, 18 nt, Human
gaauuuguaaccucagcu

SEQ ID NO: 2503644 - RNA, 17 nt, Human
gaauuuguaaccucagc

SEQ ID NO: 2503645 - RNA, 16 nt, Human
gaauuuguaaccucag

SEQ ID NO: 2503646 - RNA, 22 nt, Human
gaauuuguaaguuuaugucuaa

SEQ ID NO: 2503647 - RNA, 14 nt, Human
gaauuuguaaguuu

SEQ ID NO: 2503648 - RNA, 19 nt, Human
gaauuugcaagucauggcu

SEQ ID NO: 2503649 - RNA, 17 nt, Human
gaauuugagugcucuga

SEQ ID NO: 2503650 - RNA, 19 nt, Human
gaauuugaaugaaaaauuu

SEQ ID NO: 2503651 - RNA, 23 nt, Human
gaauuugaucguuccaguuccca

SEQ ID NO: 2503652 - RNA, 13 nt, Human
gaauuugcugggg

SEQ ID NO: 2503653 - RNA, 19 nt, Human
gaauuuggagacucugugg

SEQ ID NO: 2503654 - RNA, 19 nt, Human
gaauuuggccugcacuaau

SEQ ID NO: 2503655 - RNA, 22 nt, Human
gaauuucuuuugccguuauuaa

SEQ ID NO: 2503656 - RNA, 21 nt, Human
gaauuucuucaacucccugcc

SEQ ID NO: 2503657 - RNA, 14 nt, Human
gaauuugaaugaaa

SEQ ID NO: 2503658 - RNA, 16 nt, Human
gaauuugaaugaaaaa

SEQ ID NO: 2503659 - RNA, 17 nt, Human
gaauuugaaugaaaaau

SEQ ID NO: 2503660 - RNA, 19 nt, Human
gaauuucuucacuguugaa

SEQ ID NO: 2503661 - RNA, 12 nt, Human
gaauuucuuggu

SEQ ID NO: 2503662 - RNA, 20 nt, Human
gaauuucuucacuguugaaa

SEQ ID NO: 2503663 - RNA, 21 nt, Human
gaauuucuugguaagaagccg

SEQ ID NO: 2503664 - RNA, 20 nt, Human
gacaaauucuguuucuugag

SEQ ID NO: 2503665 - RNA, 16 nt, Human
gacaaauucuguuucu

SEQ ID NO: 2503666 - RNA, 17 nt, Human
gacaaauucuguuucuu

SEQ ID NO: 2503667 - RNA, 22 nt, Human
gacaaauguguaucggaugcuu

SEQ ID NO: 2503668 - RNA, 12 nt, Human
gacaaauucugu

SEQ ID NO: 2503669 - RNA, 14 nt, Human
gacaaauucuguuu

SEQ ID NO: 2503670 - RNA, 15 nt, Human
gacaaauucuguuuc

SEQ ID NO: 2503671 - RNA, 21 nt, Human
gacaaaugcugcgcccuuccc

SEQ ID NO: 2503672 - RNA, 22 nt, Human
gacaaaugcugcgcccuucccc

SEQ ID NO: 2503673 - RNA, 17 nt, Human
gacaaaucaagcuucag

SEQ ID NO: 2503674 - RNA, 23 nt, Human
gacaacacucauugaccugaggc

SEQ ID NO: 2503675 - RNA, 22 nt, Human
gacaacacucauugaccugagg

SEQ ID NO: 2503676 - RNA, 12 nt, Human
gacaacagaagu

SEQ ID NO: 2503677 - RNA, 14 nt, Human
gacaacagaaguca

SEQ ID NO: 2503678 - RNA, 17 nt, Human
gacaacagaagucauga

SEQ ID NO: 2503679 - RNA, 22 nt, Human
gacaacagaagucaugaagccc

SEQ ID NO: 2503680 - RNA, 23 nt, Human
gacaacaaauuagguuuuguaca

SEQ ID NO: 2503681 - RNA, 21 nt, Human
gacaacaaauuagguuuugua

SEQ ID NO: 2503682 - RNA, 19 nt, Human
gacaacacugggaaacaga

SEQ ID NO: 2503683 - RNA, 11 nt, Human
gacaacaucug

SEQ ID NO: 2503684 - RNA, 12 nt, Human
gacaacagaagc

SEQ ID NO: 2503685 - RNA, 16 nt, Human
gacaacagacuucuga

SEQ ID NO: 2503686 - RNA, 18 nt, Human
gacaaccaccgcucccca

SEQ ID NO: 2503687 - RNA, 19 nt, Human
gacaaccaccgcuccccag

SEQ ID NO: 2503688 - RNA, 22 nt, Human
gacaaccaccgcuccccagccc

SEQ ID NO: 2503689 - RNA, 17 nt, Human
gacaaccaccgcucccc

SEQ ID NO: 2503690 - RNA, 12 nt, Human
gacaacauuaaa

SEQ ID NO: 2503691 - RNA, 17 nt, Human
gacaaccacuggucugu

SEQ ID NO: 2503692 - RNA, 15 nt, Human
gacaaccacuggucu

SEQ ID NO: 2503693 - RNA, 12 nt, Human
gacaaccaugac

SEQ ID NO: 2503694 - RNA, 19 nt, Human
gacaaccacuggucuguag

SEQ ID NO: 2503695 - RNA, 23 nt, Human
gacaaccaccgcuccccagccca

SEQ ID NO: 2503696 - RNA, 13 nt, Human
gacaacccugcaa

SEQ ID NO: 2503697 - RNA, 20 nt, Human
gacaacccugcaaaggacug

SEQ ID NO: 2503698 - RNA, 18 nt, Human
gacaaccgaugcuccagc

SEQ ID NO: 2503699 - RNA, 19 nt, Human
gacaaccgaugcuccagcc

SEQ ID NO: 2503700 - RNA, 20 nt, Human
gacaaccgaugcuccagcca

SEQ ID NO: 2503701 - RNA, 15 nt, Human
gacaagacuucagua

SEQ ID NO: 2503702 - RNA, 18 nt, Human
gacaacuuugccagcuuu

SEQ ID NO: 2503703 - RNA, 14 nt, Human
gacaacgaggaagc

SEQ ID NO: 2503704 - RNA, 21 nt, Human
gacaaccgaugcuccagccaa

SEQ ID NO: 2503705 - RNA, 17 nt, Human
gacaacguuucagcgac

SEQ ID NO: 2503706 - RNA, 15 nt, Human
gacaacgaggaagcc

SEQ ID NO: 2503707 - RNA, 16 nt, Human
gacaacgaggaagccc

SEQ ID NO: 2503708 - RNA, 16 nt, Human
gacacaagccuucggc

SEQ ID NO: 2503709 - RNA, 14 nt, Human
gacacaaaccugcc

SEQ ID NO: 2503710 - RNA, 17 nt, Human
gacacaaaccugccugg

SEQ ID NO: 2503711 - RNA, 20 nt, Human
gacacaaaccugccuggguu

SEQ ID NO: 2503712 - RNA, 18 nt, Human
gacacaaaccugccuggg

SEQ ID NO: 2503713 - RNA, 13 nt, Human
gacacaacuauuu

SEQ ID NO: 2503714 - RNA, 19 nt, Human
gacacaggcccggcuccag

SEQ ID NO: 2503715 - RNA, 21 nt, Human
gacacaggcccggcuccaggc

SEQ ID NO: 2503716 - RNA, 20 nt, Human
gacacaggcccggcuccagg

SEQ ID NO: 2503717 - RNA, 14 nt, Human
gacacaugcaaggu

SEQ ID NO: 2503718 - RNA, 13 nt, Human
gacacaggcccuc

SEQ ID NO: 2503719 - RNA, 14 nt, Human
gacacaacaacucc

SEQ ID NO: 2503720 - RNA, 23 nt, Human
gacacauguccaagaagcccagg

SEQ ID NO: 2503721 - RNA, 20 nt, Human
gacacauguccaagaagccc

SEQ ID NO: 2503722 - RNA, 15 nt, Human
gacacauguccaaga

SEQ ID NO: 2503723 - RNA, 19 nt, Human
gacacaugcaaggucauuu

SEQ ID NO: 2503724 - RNA, 18 nt, Human
gacaccacacccagccuc

SEQ ID NO: 2503725 - RNA, 17 nt, Human
gacaccacacccagccu

SEQ ID NO: 2503726 - RNA, 16 nt, Human
gacaccacacccagcc

SEQ ID NO: 2503727 - RNA, 15 nt, Human
gacaccacacccagc

SEQ ID NO: 2503728 - RNA, 14 nt, Human
gacaccacacccag

SEQ ID NO: 2503729 - RNA, 21 nt, Human
gacacauucaacccuggagag

SEQ ID NO: 2503730 - RNA, 20 nt, Human
gacacauucaacccuggaga

SEQ ID NO: 2503731 - RNA, 18 nt, Human
gacaccagagcagaugca

SEQ ID NO: 2503732 - RNA, 15 nt, Human
gacaccagagcagau

SEQ ID NO: 2503733 - RNA, 14 nt, Human
gacaccagagcaga

SEQ ID NO: 2503734 - RNA, 13 nt, Human
gacaccagagcag

SEQ ID NO: 2503735 - RNA, 12 nt, Human
gacaccagagca

SEQ ID NO: 2503736 - RNA, 21 nt, Human
gacaccacacccagccucagu

SEQ ID NO: 2503737 - RNA, 20 nt, Human
gacaccacacccagccucag

SEQ ID NO: 2503738 - RNA, 19 nt, Human
gacaccacacccagccuca

SEQ ID NO: 2503739 - RNA, 15 nt, Human
gacaccagccaggcu

SEQ ID NO: 2503740 - RNA, 14 nt, Human
gacaccagccaggc

SEQ ID NO: 2503741 - RNA, 22 nt, Human
gacaccagagcagaugcagaga

SEQ ID NO: 2503742 - RNA, 19 nt, Human
gacaccagagcagaugcag

SEQ ID NO: 2503743 - RNA, 19 nt, Human
gacaccagccaggcucugu

SEQ ID NO: 2503744 - RNA, 17 nt, Human
gacaccagccaggcucu

SEQ ID NO: 2503745 - RNA, 23 nt, Human
gacaccagccaggcucugugcug

SEQ ID NO: 2503746 - RNA, 20 nt, Human
gacaccagccuuucucccag

SEQ ID NO: 2503747 - RNA, 13 nt, Human
gacaauucaugaa

SEQ ID NO: 2503748 - RNA, 16 nt, Human
gacaauucaugaacuu

SEQ ID NO: 2503749 - RNA, 16 nt, Human
gacacaaaaaguagau

SEQ ID NO: 2503750 - RNA, 22 nt, Human
gacaauucuuuauacaacagug

SEQ ID NO: 2503751 - RNA, 15 nt, Human
gacaauucuuuauac

SEQ ID NO: 2503752 - RNA, 13 nt, Human
gacaauucuuuau

SEQ ID NO: 2503753 - RNA, 19 nt, Human
gacaaugugaaaagaaaaa

SEQ ID NO: 2503754 - RNA, 20 nt, Human
gacaaugugaaaagaaaaau

SEQ ID NO: 2503755 - RNA, 12 nt, Human
gacaaugugaaa

SEQ ID NO: 2503756 - RNA, 18 nt, Human
gacaaugugaaaagaaaa

SEQ ID NO: 2503757 - RNA, 22 nt, Human
gacaaugcaaaccaucauugaa

SEQ ID NO: 2503758 - RNA, 14 nt, Human
gacaaugucugaac

SEQ ID NO: 2503759 - RNA, 21 nt, Human
gacaaggauugcuacuguccu

SEQ ID NO: 2503760 - RNA, 19 nt, Human
gacaaggauugcuacuguc

SEQ ID NO: 2503761 - RNA, 21 nt, Human
gacaaggaugaucuaggaaga

SEQ ID NO: 2503762 - RNA, 18 nt, Human
gacaaggauugcuacugu

SEQ ID NO: 2503763 - RNA, 16 nt, Human
gacaaggaaaaaauaa

SEQ ID NO: 2503764 - RNA, 15 nt, Human
gacaagaaaucccug

SEQ ID NO: 2503765 - RNA, 16 nt, Human
gacaagaaaucccugu

SEQ ID NO: 2503766 - RNA, 19 nt, Human
gacaaggaaaggcaaaugc

SEQ ID NO: 2503767 - RNA, 17 nt, Human
gacaaggaaaggcaaau

SEQ ID NO: 2503768 - RNA, 19 nt, Human
gacaaggagaagagcaagg

SEQ ID NO: 2503769 - RNA, 14 nt, Human
gaaugcuguguuaa

SEQ ID NO: 2503770 - RNA, 18 nt, Human
gaaugcuuauagguggcc

SEQ ID NO: 2503771 - RNA, 16 nt, Human
gaaugcuuccuagaag

SEQ ID NO: 2503772 - RNA, 22 nt, Human
gaaugcuuauagguggccucuc

SEQ ID NO: 2503773 - RNA, 18 nt, Human
gaaugcuucugacuucau

SEQ ID NO: 2503774 - RNA, 21 nt, Human
gaaugcuucugacuucauaga

SEQ ID NO: 2503775 - RNA, 17 nt, Human
gaaugcuugaaaaaugu

SEQ ID NO: 2503776 - RNA, 16 nt, Human
gaaugcuugaaaaaug

SEQ ID NO: 2503777 - RNA, 13 nt, Human
gaaugcuugaaaa

SEQ ID NO: 2503778 - RNA, 15 nt, Human
gaaugcuucuucuca

SEQ ID NO: 2503779 - RNA, 17 nt, Human
gaauggcacagcccaaa

SEQ ID NO: 2503780 - RNA, 22 nt, Human
gaauggcacagcccaaagaagg

SEQ ID NO: 2503781 - RNA, 13 nt, Human
gaauggcagcugc

SEQ ID NO: 2503782 - RNA, 20 nt, Human
gaaugcuugaaaaaugugca

SEQ ID NO: 2503783 - RNA, 16 nt, Human
gaauggcagcugccac

SEQ ID NO: 2503784 - RNA, 21 nt, Human
gaaugcacaaacagaggccgc

SEQ ID NO: 2503785 - RNA, 20 nt, Human
gaaugcacacuagccucucc

SEQ ID NO: 2503786 - RNA, 22 nt, Human
gaaugcacacuagccucuccag

SEQ ID NO: 2503787 - RNA, 13 nt, Human
gaaugcuguguua

SEQ ID NO: 2503788 - RNA, 15 nt, Human
gaaugcuguauaugu

SEQ ID NO: 2503789 - RNA, 23 nt, Human
gaaugaaauccugcuucagugua

SEQ ID NO: 2503790 - RNA, 19 nt, Human
gaaugaaauacuguuugag

SEQ ID NO: 2503791 - RNA, 15 nt, Human
gaaugaaauacuguu

SEQ ID NO: 2503792 - RNA, 18 nt, Human
gaaugaaauacuguuuga

SEQ ID NO: 2503793 - RNA, 22 nt, Human
gaaucuggaccccaucugugaa

SEQ ID NO: 2503794 - RNA, 23 nt, Human
gaaucuggaccccaucugugaau

SEQ ID NO: 2503795 - RNA, 12 nt, Human
gaaucuggagac

SEQ ID NO: 2503796 - RNA, 20 nt, Human
gaaugcacaaacagaggccg

SEQ ID NO: 2503797 - RNA, 16 nt, Human
gaaugaaauugcugaa

SEQ ID NO: 2503798 - RNA, 20 nt, Human
gaaugaacacucuuuugcuu

SEQ ID NO: 2503799 - RNA, 13 nt, Human
gaaugaacaaauu

SEQ ID NO: 2503800 - RNA, 21 nt, Human
gaaucuggaccccaucuguga

SEQ ID NO: 2503801 - RNA, 21 nt, Human
gaaugaaagggcccagagagg

SEQ ID NO: 2503802 - RNA, 14 nt, Human
gaaucucugugccu

SEQ ID NO: 2503803 - RNA, 13 nt, Human
gaaucucugugcc

SEQ ID NO: 2503804 - RNA, 15 nt, Human
gaaucucugugccuu

SEQ ID NO: 2503805 - RNA, 18 nt, Human
gaaucucuuuuugcuuuc

SEQ ID NO: 2503806 - RNA, 18 nt, Human
gaaucucugaauuugaga

SEQ ID NO: 2503807 - RNA, 12 nt, Human
gaaaggcuccag

SEQ ID NO: 2503808 - RNA, 12 nt, Human
gaaucagcuucu

SEQ ID NO: 2503809 - RNA, 21 nt, Human
gaaaggcucagucucaggagc

SEQ ID NO: 2503810 - RNA, 22 nt, Human
gaaaggcucagucucaggagca

SEQ ID NO: 2503811 - RNA, 18 nt, Human
gaaaggccuuuaaaauuu

SEQ ID NO: 2503812 - RNA, 14 nt, Human
gaaaggcucagucu

SEQ ID NO: 2503813 - RNA, 18 nt, Human
gaaaggcucagucucagg

SEQ ID NO: 2503814 - RNA, 19 nt, Human
gaaaggcucagucucagga

SEQ ID NO: 2503815 - RNA, 15 nt, Human
gaaaggccuuuaaaa

SEQ ID NO: 2503816 - RNA, 14 nt, Human
gaaaggccuuuaaa

SEQ ID NO: 2503817 - RNA, 19 nt, Human
gaaaggccagcuggcagca

SEQ ID NO: 2503818 - RNA, 21 nt, Human
gaaaggccagcuggcagcaga

SEQ ID NO: 2503819 - RNA, 22 nt, Human
gaaaggccagcuggcagcagag

SEQ ID NO: 2503820 - RNA, 17 nt, Human
gaaaggcauucucugaa

SEQ ID NO: 2503821 - RNA, 12 nt, Human
gaaaggccagcu

SEQ ID NO: 2503822 - RNA, 14 nt, Human
gaaaggccagcugg

SEQ ID NO: 2503823 - RNA, 16 nt, Human
gaaaggccagcuggca

SEQ ID NO: 2503824 - RNA, 17 nt, Human
gaaucauucucgauuua

SEQ ID NO: 2503825 - RNA, 19 nt, Human
gaaucaugugaacccggga

SEQ ID NO: 2503826 - RNA, 21 nt, Human
gaaucaugucaggccugugug

SEQ ID NO: 2503827 - RNA, 20 nt, Human
gaaucaugucaggccugugu

SEQ ID NO: 2503828 - RNA, 17 nt, Human
gaaucaugucaggccug

SEQ ID NO: 2503829 - RNA, 14 nt, Human
gaaucauguaguau

SEQ ID NO: 2503830 - RNA, 13 nt, Human
gaaucauguagua

SEQ ID NO: 2503831 - RNA, 19 nt, Human
gaaucauaugauucugcuu

SEQ ID NO: 2503832 - RNA, 15 nt, Human
gaaucagugcaaaga

SEQ ID NO: 2503833 - RNA, 23 nt, Human
gaaucaggaauauuuuccaaaga

SEQ ID NO: 2503834 - RNA, 21 nt, Human
gaaucaggaauauuuuccaaa

SEQ ID NO: 2503835 - RNA, 20 nt, Human
gaaucaguauugggagccgg

SEQ ID NO: 2503836 - RNA, 19 nt, Human
gaaucaguauaaacaaagu

SEQ ID NO: 2503837 - RNA, 21 nt, Human
gaaucaguauaaacaaaguua

SEQ ID NO: 2503838 - RNA, 11 nt, Human
gaaucauguag

SEQ ID NO: 2503839 - RNA, 19 nt, Human
gaaucauacuuagcaaagu

SEQ ID NO: 2503840 - RNA, 20 nt, Human
gaauccagacccggcugcgu

SEQ ID NO: 2503841 - RNA, 18 nt, Human
gaauccagacccggcugc

SEQ ID NO: 2503842 - RNA, 17 nt, Human
gaaucccaaauuugauu

SEQ ID NO: 2503843 - RNA, 19 nt, Human
gaaucccaaauuugauuga

SEQ ID NO: 2503844 - RNA, 16 nt, Human
gaaucccaaauuugau

SEQ ID NO: 2503845 - RNA, 13 nt, Human
gaauccaugcuug

SEQ ID NO: 2503846 - RNA, 14 nt, Human
gaauccaugcuugg

SEQ ID NO: 2503847 - RNA, 22 nt, Human
gaaucccacccacaugugacac

SEQ ID NO: 2503848 - RNA, 18 nt, Human
gaaucccacccacaugug

SEQ ID NO: 2503849 - RNA, 15 nt, Human
gaaucccaagaccca

SEQ ID NO: 2503850 - RNA, 18 nt, Human
gaaucuacccccagaucc

SEQ ID NO: 2503851 - RNA, 22 nt, Human
gaaucuacccccagauccaagc

SEQ ID NO: 2503852 - RNA, 14 nt, Human
gaaucgcuucucuu

SEQ ID NO: 2503853 - RNA, 16 nt, Human
gaaucuacccaaagga

SEQ ID NO: 2503854 - RNA, 12 nt, Human
gaaucuaccaac

SEQ ID NO: 2503855 - RNA, 14 nt, Human
gaaucgaggaacca

SEQ ID NO: 2503856 - RNA, 16 nt, Human
gaaucgaggaaccaga

SEQ ID NO: 2503857 - RNA, 18 nt, Human
gaaucgaggaaccagagc

SEQ ID NO: 2503858 - RNA, 19 nt, Human
gaaucgaggaaccagagcc

SEQ ID NO: 2503859 - RNA, 15 nt, Human
gaaucuacuaauucc

SEQ ID NO: 2503860 - RNA, 17 nt, Human
gaaucuacccaaaggau

SEQ ID NO: 2503861 - RNA, 13 nt, Human
gaaucuauauuua

SEQ ID NO: 2503862 - RNA, 19 nt, Human
gaauguaaucaauguuucu

SEQ ID NO: 2503863 - RNA, 18 nt, Human
gaauguaaucaauguuuc

SEQ ID NO: 2503864 - RNA, 16 nt, Human
gaauguaaucaauguu

SEQ ID NO: 2503865 - RNA, 13 nt, Human
gaauguaaucaau

SEQ ID NO: 2503866 - RNA, 11 nt, Human
gaauguaauca

SEQ ID NO: 2503867 - RNA, 18 nt, Human
gaauggccuccucccuua

SEQ ID NO: 2503868 - RNA, 17 nt, Human
gaauggccugccuugaa

SEQ ID NO: 2503869 - RNA, 21 nt, Human
gaauggccugccuugaagcca

SEQ ID NO: 2503870 - RNA, 14 nt, Human
gaauguacucuguu

SEQ ID NO: 2503871 - RNA, 20 nt, Human
gaauguagcugguuuccuca

SEQ ID NO: 2503872 - RNA, 15 nt, Human
gaauguagcugguuu

SEQ ID NO: 2503873 - RNA, 16 nt, Human
gaaugucaguaugugg

SEQ ID NO: 2503874 - RNA, 18 nt, Human
gaaugucaguauguggaa

SEQ ID NO: 2503875 - RNA, 13 nt, Human
gaaugucaguaug

SEQ ID NO: 2503876 - RNA, 21 nt, Human
gaauguauauguuuuguggga

SEQ ID NO: 2503877 - RNA, 15 nt, Human
gaauguaucaggaaa

SEQ ID NO: 2503878 - RNA, 17 nt, Human
gaauguaucaggaaaua

SEQ ID NO: 2503879 - RNA, 13 nt, Human
gaaugucagugug

SEQ ID NO: 2503880 - RNA, 19 nt, Human
gaaugucaguauguggaag

SEQ ID NO: 2503881 - RNA, 16 nt, Human
gaauguaucaggaaau

SEQ ID NO: 2503882 - RNA, 14 nt, Human
gaaugugauuuuaa

SEQ ID NO: 2503883 - RNA, 15 nt, Human
gaaugugcagguuug

SEQ ID NO: 2503884 - RNA, 19 nt, Human
gaaugugauuuuaaagagu

SEQ ID NO: 2503885 - RNA, 17 nt, Human
gaaugugauuuuaaaga

SEQ ID NO: 2503886 - RNA, 14 nt, Human
gaaugugaaagcac

SEQ ID NO: 2503887 - RNA, 16 nt, Human
gaaugucuuuugaaua

SEQ ID NO: 2503888 - RNA, 22 nt, Human
gaaugucuuuguuggaaaagaa

SEQ ID NO: 2503889 - RNA, 18 nt, Human
gaauguguacaaagugua

SEQ ID NO: 2503890 - RNA, 21 nt, Human
gaaugugcagguuuguuacau

SEQ ID NO: 2503891 - RNA, 22 nt, Human
gaauguggccccugaacaagaa

SEQ ID NO: 2503892 - RNA, 18 nt, Human
gaauguggcuugagaaau

SEQ ID NO: 2503893 - RNA, 14 nt, Human
gaauguuaagcaga

SEQ ID NO: 2503894 - RNA, 14 nt, Human
gaauguuaaauaaa

SEQ ID NO: 2503895 - RNA, 13 nt, Human
gaauguuaaauaa

SEQ ID NO: 2503896 - RNA, 16 nt, Human
gaauguuaaagucagu

SEQ ID NO: 2503897 - RNA, 11 nt, Human
gaauguucuga

SEQ ID NO: 2503898 - RNA, 15 nt, Human
gaauguucugacauu

SEQ ID NO: 2503899 - RNA, 16 nt, Human
gaauguucugacauua

SEQ ID NO: 2503900 - RNA, 17 nt, Human
gaauguucugacauuaa

SEQ ID NO: 2503901 - RNA, 19 nt, Human
gaauguucugacauuaaca

SEQ ID NO: 2503902 - RNA, 23 nt, Human
gaauguugggacugcuaaauaaa

SEQ ID NO: 2503903 - RNA, 20 nt, Human
gaauguucugacauuaacag

SEQ ID NO: 2503904 - RNA, 15 nt, Human
gaauguuaagcagau

SEQ ID NO: 2503905 - RNA, 18 nt, Human
gaauguuaaauaaauugu

SEQ ID NO: 2503906 - RNA, 16 nt, Human
gaauguuaaauaaauu

SEQ ID NO: 2503907 - RNA, 21 nt, Human
gaauguuaaauaaauuguaua

SEQ ID NO: 2503908 - RNA, 17 nt, Human
gaauguuacauuguuug

SEQ ID NO: 2503909 - RNA, 20 nt, Human
gaauguuacauuguuugucu

SEQ ID NO: 2503910 - RNA, 14 nt, Human
gaauguuuauuccu

SEQ ID NO: 2503911 - RNA, 21 nt, Human
gaauguuuacacucuuuguaa

SEQ ID NO: 2503912 - RNA, 14 nt, Human
gaauguugggacug

SEQ ID NO: 2503913 - RNA, 20 nt, Human
gaauguuuacacucuuugua

SEQ ID NO: 2503914 - RNA, 16 nt, Human
gaauguuuauagcaaa

SEQ ID NO: 2503915 - RNA, 18 nt, Human
gaauucuuacauguuuuc

SEQ ID NO: 2503916 - RNA, 16 nt, Human
gaauugacccacaaga

SEQ ID NO: 2503917 - RNA, 21 nt, Human
gaauugacccacaagaaauga

SEQ ID NO: 2503918 - RNA, 21 nt, Human
gaauucuuaugcuuauaauau

SEQ ID NO: 2503919 - RNA, 18 nt, Human
gaauucuugaaggaaaau

SEQ ID NO: 2503920 - RNA, 19 nt, Human
gaauucuuacauguuuucu

SEQ ID NO: 2503921 - RNA, 22 nt, Human
gaauucuuacauguuuucuuug

SEQ ID NO: 2503922 - RNA, 16 nt, Human
gaauuggagcucgugg

SEQ ID NO: 2503923 - RNA, 20 nt, Human
gaauugccugcagagagaag

SEQ ID NO: 2503924 - RNA, 16 nt, Human
gaauugccugcagaga

SEQ ID NO: 2503925 - RNA, 22 nt, Human
gaauugauuugcauugaacaca

SEQ ID NO: 2503926 - RNA, 18 nt, Human
gaauugauuugcauugaa

SEQ ID NO: 2503927 - RNA, 12 nt, Human
gaauugcauuga

SEQ ID NO: 2503928 - RNA, 13 nt, Human
gaauugcauugac

SEQ ID NO: 2503929 - RNA, 14 nt, Human
gaauugcagaguac

SEQ ID NO: 2503930 - RNA, 15 nt, Human
gauugauaauugcau

SEQ ID NO: 2503931 - RNA, 22 nt, Human
gauugaucggagccuccucucu

SEQ ID NO: 2503932 - RNA, 19 nt, Human
gauugauagaguguuauca

SEQ ID NO: 2503933 - RNA, 15 nt, Human
gauugauuugaagaa

SEQ ID NO: 2503934 - RNA, 17 nt, Human
gauugauuugaagaaca

SEQ ID NO: 2503935 - RNA, 22 nt, Human
gauugaggccugcccucaggga

SEQ ID NO: 2503936 - RNA, 19 nt, Human
gauugagaaggagagaaag

SEQ ID NO: 2503937 - RNA, 16 nt, Human
gauugagucugugcca

SEQ ID NO: 2503938 - RNA, 13 nt, Human
gauugaggccugc

SEQ ID NO: 2503939 - RNA, 18 nt, Human
gauugagaaggagagaaa

SEQ ID NO: 2503940 - RNA, 17 nt, Human
gauugagaaggagagaa

SEQ ID NO: 2503941 - RNA, 16 nt, Human
gauugagaaggagaga

SEQ ID NO: 2503942 - RNA, 13 nt, Human
gauugagaaggag

SEQ ID NO: 2503943 - RNA, 16 nt, Human
gauucucaugccucag

SEQ ID NO: 2503944 - RNA, 14 nt, Human
gauucuccugccuc

SEQ ID NO: 2503945 - RNA, 23 nt, Human
gauugcaggagucccugccauca

SEQ ID NO: 2503946 - RNA, 19 nt, Human
gauugcagguggaacucag

SEQ ID NO: 2503947 - RNA, 17 nt, Human
gauugcaugugacucug

SEQ ID NO: 2503948 - RNA, 22 nt, Human
gauugcauuagaaauagacagu

SEQ ID NO: 2503949 - RNA, 22 nt, Human
gauucacaaugaaaugcucucc

SEQ ID NO: 2503950 - RNA, 18 nt, Human
gauucacaaugaaaugcu

SEQ ID NO: 2503951 - RNA, 15 nt, Human
gauucuauuuauaug

SEQ ID NO: 2503952 - RNA, 20 nt, Human
gauucuauuuauauguacau

SEQ ID NO: 2503953 - RNA, 21 nt, Human
gauucuauuuauauguacaug

SEQ ID NO: 2503954 - RNA, 22 nt, Human
gauucucagggucucugcugcc

SEQ ID NO: 2503955 - RNA, 21 nt, Human
gauucucagggucucugcugc

SEQ ID NO: 2503956 - RNA, 23 nt, Human
gauucucagggucucugcugccg

SEQ ID NO: 2503957 - RNA, 19 nt, Human
gauucucagggucucugcu

SEQ ID NO: 2503958 - RNA, 17 nt, Human
gauucucagggucucug

SEQ ID NO: 2503959 - RNA, 12 nt, Human
gauucucagggu

SEQ ID NO: 2503960 - RNA, 11 nt, Human
gauucucagau

SEQ ID NO: 2503961 - RNA, 21 nt, Human
gauucaaucuguaaacugugu

SEQ ID NO: 2503962 - RNA, 22 nt, Human
gauucaaucuguaaacugugua

SEQ ID NO: 2503963 - RNA, 20 nt, Human
gauucaaucuguaaacugug

SEQ ID NO: 2503964 - RNA, 19 nt, Human
gauucaaucuguaaacugu

SEQ ID NO: 2503965 - RNA, 18 nt, Human
gauuacaggcuccugcca

SEQ ID NO: 2503966 - RNA, 21 nt, Human
gauuacaggcuccugccacca

SEQ ID NO: 2503967 - RNA, 20 nt, Human
gauuacagggaugagccacc

SEQ ID NO: 2503968 - RNA, 18 nt, Human
gauuacagggaugagcca

SEQ ID NO: 2503969 - RNA, 22 nt, Human
gauuuccugcuuugggaagccg

SEQ ID NO: 2503970 - RNA, 17 nt, Human
gauuuccuugaaugugg

SEQ ID NO: 2503971 - RNA, 22 nt, Human
gauuuccuugaauguggcuuga

SEQ ID NO: 2503972 - RNA, 13 nt, Human
gauuuccuugaau

SEQ ID NO: 2503973 - RNA, 15 nt, Human
gauuuaacagaaaug

SEQ ID NO: 2503974 - RNA, 22 nt, Human
gauuuccguuaaaauaccagcc

SEQ ID NO: 2503975 - RNA, 19 nt, Human
gauuugaagaacaugugag

SEQ ID NO: 2503976 - RNA, 20 nt, Human
gauuugaagaacaugugaga

SEQ ID NO: 2503977 - RNA, 13 nt, Human
gauuugacauugc

SEQ ID NO: 2503978 - RNA, 23 nt, Human
gauuucuagaaagccuguucccc

SEQ ID NO: 2503979 - RNA, 19 nt, Human
gauuucgugggucuguuuu

SEQ ID NO: 2503980 - RNA, 20 nt, Human
gauuucgugggucuguuuuc

SEQ ID NO: 2503981 - RNA, 18 nt, Human
gauuugaagaacauguga

SEQ ID NO: 2503982 - RNA, 18 nt, Human
gauuugaugcuguuugac

SEQ ID NO: 2503983 - RNA, 21 nt, Human
gauuugaugcuggagagguua

SEQ ID NO: 2503984 - RNA, 15 nt, Human
gauuugaugcuggag

SEQ ID NO: 2503985 - RNA, 23 nt, Human
gauuugaggagcagcuucaguug

SEQ ID NO: 2503986 - RNA, 22 nt, Human
gauuugaggagcagcuucaguu

SEQ ID NO: 2503987 - RNA, 21 nt, Human
gauuugacuguuuuuacccau

SEQ ID NO: 2503988 - RNA, 18 nt, Human
gauuugacuguuuuuacc

SEQ ID NO: 2503989 - RNA, 14 nt, Human
gauuugacuguuuu

SEQ ID NO: 2503990 - RNA, 16 nt, Human
gauuugagcucagccc

SEQ ID NO: 2503991 - RNA, 13 nt, Human
gauuugacuguuu

SEQ ID NO: 2503992 - RNA, 12 nt, Human
gauuugacuguu

SEQ ID NO: 2503993 - RNA, 16 nt, Human
gauuugaagcaaagca

SEQ ID NO: 2503994 - RNA, 13 nt, Human
gauuuaacagaaa

SEQ ID NO: 2503995 - RNA, 14 nt, Human
gauuuaacagaaau

SEQ ID NO: 2503996 - RNA, 18 nt, Human
gauuguaacguugcugug

SEQ ID NO: 2503997 - RNA, 23 nt, Human
gauuguaaaauagcuuguauagu

SEQ ID NO: 2503998 - RNA, 20 nt, Human
gauuguaaaauagcuuguau

SEQ ID NO: 2503999 - RNA, 12 nt, Human
gauuguaaaaua

SEQ ID NO: 2504000 - RNA, 22 nt, Human
gauuguaaaaaaaaaugccuuu

SEQ ID NO: 2504001 - RNA, 18 nt, Human
gauuguaaaaaaaaaugc

SEQ ID NO: 2504002 - RNA, 12 nt, Human
gauuuaaaucag

SEQ ID NO: 2504003 - RNA, 12 nt, Human
gauugggucuag

SEQ ID NO: 2504004 - RNA, 18 nt, Human
gauugggggcuggugcca

SEQ ID NO: 2504005 - RNA, 17 nt, Human
gauugggggcuggugcc

SEQ ID NO: 2504006 - RNA, 14 nt, Human
gauugggggcuggu

SEQ ID NO: 2504007 - RNA, 18 nt, Human
gauuggguuaugaauauu

SEQ ID NO: 2504008 - RNA, 19 nt, Human
gauugggugggcaggaaaa

SEQ ID NO: 2504009 - RNA, 20 nt, Human
gauugggugggcaggaaaag

SEQ ID NO: 2504010 - RNA, 13 nt, Human
gauuguaaaaaaa

SEQ ID NO: 2504011 - RNA, 17 nt, Human
gauugggccccugccag

SEQ ID NO: 2504012 - RNA, 20 nt, Human
gauuggggaagacuguggcu

SEQ ID NO: 2504013 - RNA, 14 nt, Human
gauugcuaaaugua

SEQ ID NO: 2504014 - RNA, 13 nt, Human
gauugcuaaaugu

SEQ ID NO: 2504015 - RNA, 22 nt, Human
gauugcguggaauugugcugag

SEQ ID NO: 2504016 - RNA, 22 nt, Human
gauuuuaucuuucgcacagcag

SEQ ID NO: 2504017 - RNA, 20 nt, Human
gauuuuaucugugaauucag

SEQ ID NO: 2504018 - RNA, 20 nt, Human
gauuuucuuuaaaagaaugg

SEQ ID NO: 2504019 - RNA, 21 nt, Human
gauuuugaaaucaugaagaua

SEQ ID NO: 2504020 - RNA, 21 nt, Human
gauuuugaaaccaugaagaga

SEQ ID NO: 2504021 - RNA, 24 nt, Human
gauuuucuuuaaaagaaugggcag

SEQ ID NO: 2504022 - RNA, 19 nt, Human
gauuuugauccaagcuggu

SEQ ID NO: 2504023 - RNA, 21 nt, Human
gauuuugaaauuuuuauuaaa

SEQ ID NO: 2504024 - RNA, 17 nt, Human
gauuuuaaucaaguuga

SEQ ID NO: 2504025 - RNA, 19 nt, Human
gauuuuacaauugaaauga

SEQ ID NO: 2504026 - RNA, 15 nt, Human
gauuuuaauuuugaa

SEQ ID NO: 2504027 - RNA, 18 nt, Human
gauuuuacaauugaaaug

SEQ ID NO: 2504028 - RNA, 18 nt, Human
gauuuuacauguggccca

SEQ ID NO: 2504029 - RNA, 14 nt, Human
gauuuuaacucugu

SEQ ID NO: 2504030 - RNA, 16 nt, Human
gauuuuaacucugucu

SEQ ID NO: 2504031 - RNA, 14 nt, Human
gauuugcaaaaaaa

SEQ ID NO: 2504032 - RNA, 15 nt, Human
gauuugcauugaaca

SEQ ID NO: 2504033 - RNA, 18 nt, Human
gauuuuaaucaaguugaa

SEQ ID NO: 2504034 - RNA, 13 nt, Human
gauuuuaauuuug

SEQ ID NO: 2504035 - RNA, 21 nt, Human
gauuuugguauuacacuguau

SEQ ID NO: 2504036 - RNA, 19 nt, Human
gauuuuggccucauuacuu

SEQ ID NO: 2504037 - RNA, 21 nt, Human
gauuuugggguuguguuguca

SEQ ID NO: 2504038 - RNA, 22 nt, Human
gauuuugguuuuguuccccucc

SEQ ID NO: 2504039 - RNA, 19 nt, Human
gauuuugguuuuguucccc

SEQ ID NO: 2504040 - RNA, 16 nt, Human
gauuuuguaacccaga

SEQ ID NO: 2504041 - RNA, 23 nt, Human
gauuuuguaucugcaggcagaca

SEQ ID NO: 2504042 - RNA, 13 nt, Human
gauuuuguaaccc

SEQ ID NO: 2504043 - RNA, 14 nt, Human
gauuuuguuuugcu

SEQ ID NO: 2504044 - RNA, 13 nt, Human
gauuuuguuuugc

SEQ ID NO: 2504045 - RNA, 14 nt, Human
gauuuugaguaucu

SEQ ID NO: 2504046 - RNA, 18 nt, Human
gauuuugauagcaaagcg

SEQ ID NO: 2504047 - RNA, 13 nt, Human
gauuuugccugug

SEQ ID NO: 2504048 - RNA, 15 nt, Human
gauuuugcuguauau

SEQ ID NO: 2504049 - RNA, 18 nt, Human
gauuuugcuguauauuug

SEQ ID NO: 2504050 - RNA, 16 nt, Human
gauuuugcuguagaag

SEQ ID NO: 2504051 - RNA, 22 nt, Human
gauuuuguuuugcuuuuucuga

SEQ ID NO: 2504052 - RNA, 15 nt, Human
gauuuuguuuugcuu

SEQ ID NO: 2504053 - RNA, 14 nt, Human
gauuuuuacacaug

SEQ ID NO: 2504054 - RNA, 21 nt, Human
gcaaacaugggguuggcuggg

SEQ ID NO: 2504055 - RNA, 12 nt, Human
gcaaaccaucau

SEQ ID NO: 2504056 - RNA, 20 nt, Human
gcaaaccacacuggacuccg

SEQ ID NO: 2504057 - RNA, 18 nt, Human
gcaaaccacacuggacuc

SEQ ID NO: 2504058 - RNA, 17 nt, Human
gcaaaccacacuggacu

SEQ ID NO: 2504059 - RNA, 15 nt, Human
gcaaaccacacugga

SEQ ID NO: 2504060 - RNA, 15 nt, Human
gcaaauguggcuccu

SEQ ID NO: 2504061 - RNA, 18 nt, Human
gcaaagggagcagaacug

SEQ ID NO: 2504062 - RNA, 17 nt, Human
gcaaagggagcagaacu

SEQ ID NO: 2504063 - RNA, 16 nt, Human
gcaaaugugaccugug

SEQ ID NO: 2504064 - RNA, 23 nt, Human
gcaaaugugaaucauuuuaccuu

SEQ ID NO: 2504065 - RNA, 18 nt, Human
gcaaagggagcacugggu

SEQ ID NO: 2504066 - RNA, 20 nt, Human
gcaaagggagcacuggguug

SEQ ID NO: 2504067 - RNA, 16 nt, Human
gcaaauugucacagga

SEQ ID NO: 2504068 - RNA, 12 nt, Human
gcaaauguguac

SEQ ID NO: 2504069 - RNA, 22 nt, Human
gcaacaagaccaccacuucgaa

SEQ ID NO: 2504070 - RNA, 21 nt, Human
gcaaauuaauuggcagcagau

SEQ ID NO: 2504071 - RNA, 22 nt, Human
gcaacaauacaugcugcuaauu

SEQ ID NO: 2504072 - RNA, 20 nt, Human
gcaacaagguccucugucag

SEQ ID NO: 2504073 - RNA, 14 nt, Human
gcaacaauuuauga

SEQ ID NO: 2504074 - RNA, 16 nt, Human
gcaacacaagcuggaa

SEQ ID NO: 2504075 - RNA, 19 nt, Human
gcaacacaagcuggaagca

SEQ ID NO: 2504076 - RNA, 17 nt, Human
gcaacacaagcuggaag

SEQ ID NO: 2504077 - RNA, 23 nt, Human
gcaacacaagcuggaagcacaug

SEQ ID NO: 2504078 - RNA, 12 nt, Human
gcaacacacaga

SEQ ID NO: 2504079 - RNA, 21 nt, Human
gcaaagcaccagcuucuccag

SEQ ID NO: 2504080 - RNA, 13 nt, Human
gcaaagcaccagc

SEQ ID NO: 2504081 - RNA, 23 nt, Human
gcaaagcaccagcuucuccaggc

SEQ ID NO: 2504082 - RNA, 22 nt, Human
gcaaagcaccagcuucuccagg

SEQ ID NO: 2504083 - RNA, 21 nt, Human
gcaaagcugaugacaacuucc

SEQ ID NO: 2504084 - RNA, 14 nt, Human
gcaaagcgacguua

SEQ ID NO: 2504085 - RNA, 15 nt, Human
gcaaaggaaggugga

SEQ ID NO: 2504086 - RNA, 14 nt, Human
gcaaaggaaauacc

SEQ ID NO: 2504087 - RNA, 20 nt, Human
gcaaaggaagguggauggcc

SEQ ID NO: 2504088 - RNA, 20 nt, Human
gcaaaggacuguuuuuuccu

SEQ ID NO: 2504089 - RNA, 13 nt, Human
gcaaaggcuggga

SEQ ID NO: 2504090 - RNA, 23 nt, Human
gcaaaggacuguuuuuuccugag

SEQ ID NO: 2504091 - RNA, 17 nt, Human
gcaaaggaguagaaaga

SEQ ID NO: 2504092 - RNA, 18 nt, Human
gcaaagaucaaaauaaaa

SEQ ID NO: 2504093 - RNA, 16 nt, Human
gcaaagaucaaaauaa

SEQ ID NO: 2504094 - RNA, 19 nt, Human
gcaaagaucuguccucagc

SEQ ID NO: 2504095 - RNA, 20 nt, Human
gcaaagaucuguccucagcc

SEQ ID NO: 2504096 - RNA, 21 nt, Human
gcaaagaucuguccucagccu

SEQ ID NO: 2504097 - RNA, 22 nt, Human
gcaaagaucuguccucagccuu

SEQ ID NO: 2504098 - RNA, 15 nt, Human
gcaaaccaucauuga

SEQ ID NO: 2504099 - RNA, 15 nt, Human
gcaaagaucaaaaua

SEQ ID NO: 2504100 - RNA, 14 nt, Human
gcaaagaucaaaau

SEQ ID NO: 2504101 - RNA, 12 nt, Human
gcaaagaucaaa

SEQ ID NO: 2504102 - RNA, 18 nt, Human
gcaaagaggcaagaggcu

SEQ ID NO: 2504103 - RNA, 16 nt, Human
gcaaagauaucucauc

SEQ ID NO: 2504104 - RNA, 22 nt, Human
gcaaaccacacuggacuccggc

SEQ ID NO: 2504105 - RNA, 14 nt, Human
gauguucauuuaga

SEQ ID NO: 2504106 - RNA, 23 nt, Human
gauguucaguguaauuucuuugc

SEQ ID NO: 2504107 - RNA, 20 nt, Human
gauguucaguguaauuucuu

SEQ ID NO: 2504108 - RNA, 15 nt, Human
gauguucaguguaau

SEQ ID NO: 2504109 - RNA, 14 nt, Human
gauguucaguguaa

SEQ ID NO: 2504110 - RNA, 13 nt, Human
gauguucagugua

SEQ ID NO: 2504111 - RNA, 22 nt, Human
gauguucagcacugucccuugc

SEQ ID NO: 2504112 - RNA, 23 nt, Human
gauguugaaugcccacaggcaaa

SEQ ID NO: 2504113 - RNA, 20 nt, Human
gauguuauguaaaaggccaa

SEQ ID NO: 2504114 - RNA, 20 nt, Human
gauguucagcacugucccuu

SEQ ID NO: 2504115 - RNA, 19 nt, Human
gauguucagcacugucccu

SEQ ID NO: 2504116 - RNA, 17 nt, Human
gauguucagcacugucc

SEQ ID NO: 2504117 - RNA, 20 nt, Human
gauguucagauugcuuugau

SEQ ID NO: 2504118 - RNA, 19 nt, Human
gauguucagauugcuuuga

SEQ ID NO: 2504119 - RNA, 14 nt, Human
gauguuggcuggga

SEQ ID NO: 2504120 - RNA, 15 nt, Human
gauguuggcugggaa

SEQ ID NO: 2504121 - RNA, 11 nt, Human
gauguuaacac

SEQ ID NO: 2504122 - RNA, 16 nt, Human
gauguuuaguaaucau

SEQ ID NO: 2504123 - RNA, 18 nt, Human
gauguuuuuaaaaguuuc

SEQ ID NO: 2504124 - RNA, 18 nt, Human
gauguuuaacuuaaucaa

SEQ ID NO: 2504125 - RNA, 23 nt, Human
gauguuuacagguggacacacaa

SEQ ID NO: 2504126 - RNA, 15 nt, Human
gauuaaacuuaaucu

SEQ ID NO: 2504127 - RNA, 21 nt, Human
gauguuuuuaaaaguuucaau

SEQ ID NO: 2504128 - RNA, 20 nt, Human
gauguuuuuaaaaguuucaa

SEQ ID NO: 2504129 - RNA, 22 nt, Human
gauguuuuuaaaaguuucaaug

SEQ ID NO: 2504130 - RNA, 16 nt, Human
gauguuuuucaugaaa

SEQ ID NO: 2504131 - RNA, 16 nt, Human
gauuaaacgugcagac

SEQ ID NO: 2504132 - RNA, 22 nt, Human
gauuacaagcgugagccacugc

SEQ ID NO: 2504133 - RNA, 13 nt, Human
gauuacagaggaa

SEQ ID NO: 2504134 - RNA, 23 nt, Human
gauuacaagcgugagccacugca

SEQ ID NO: 2504135 - RNA, 20 nt, Human
gauuacaggcgugagccacc

SEQ ID NO: 2504136 - RNA, 17 nt, Human
gauuacaggcuccugcc

SEQ ID NO: 2504137 - RNA, 18 nt, Human
gauuacaggcaugugcca

SEQ ID NO: 2504138 - RNA, 16 nt, Human
gauggugcaaugaccu

SEQ ID NO: 2504139 - RNA, 15 nt, Human
gauggugcaaugacc

SEQ ID NO: 2504140 - RNA, 15 nt, Human
gauggucagcucccu

SEQ ID NO: 2504141 - RNA, 24 nt, Human
gaugguguucaaaaaacuuguaaa

SEQ ID NO: 2504142 - RNA, 17 nt, Human
gauggugcaaugaccuu

SEQ ID NO: 2504143 - RNA, 14 nt, Human
gauggugcaaugac

SEQ ID NO: 2504144 - RNA, 12 nt, Human
gauggugcaaug

SEQ ID NO: 2504145 - RNA, 13 nt, Human
gaugguccugggg

SEQ ID NO: 2504146 - RNA, 15 nt, Human
gaugguccuggggcu

SEQ ID NO: 2504147 - RNA, 21 nt, Human
gaugguccuggggcucugugc

SEQ ID NO: 2504148 - RNA, 24 nt, Human
gaugguccuggggcucugugcagg

SEQ ID NO: 2504149 - RNA, 14 nt, Human
gauggucagcuccc

SEQ ID NO: 2504150 - RNA, 23 nt, Human
gauggguucuaauuuuggaugga

SEQ ID NO: 2504151 - RNA, 21 nt, Human
gaugguuccccuguucacucu

SEQ ID NO: 2504152 - RNA, 18 nt, Human
gaugguuccccuguucac

SEQ ID NO: 2504153 - RNA, 13 nt, Human
gaugguuccccug

SEQ ID NO: 2504154 - RNA, 17 nt, Human
gaugguuauuuucuuuu

SEQ ID NO: 2504155 - RNA, 23 nt, Human
gaugguuauuuucuuuucuuuca

SEQ ID NO: 2504156 - RNA, 17 nt, Human
gaugguguuuuggggau

SEQ ID NO: 2504157 - RNA, 17 nt, Human
gauguggaguggggcag

SEQ ID NO: 2504158 - RNA, 12 nt, Human
gauguggcccug

SEQ ID NO: 2504159 - RNA, 13 nt, Human
gauguggcccugg

SEQ ID NO: 2504160 - RNA, 14 nt, Human
gauguggcccuggc

SEQ ID NO: 2504161 - RNA, 21 nt, Human
gauguggcccuggccugcugg

SEQ ID NO: 2504162 - RNA, 19 nt, Human
gauguuaacacauuuugua

SEQ ID NO: 2504163 - RNA, 18 nt, Human
gauguuaacacauuuugu

SEQ ID NO: 2504164 - RNA, 22 nt, Human
gauguggugccugaggucugua

SEQ ID NO: 2504165 - RNA, 20 nt, Human
gauguggugccugaggucug

SEQ ID NO: 2504166 - RNA, 15 nt, Human
gauguggugccugag

SEQ ID NO: 2504167 - RNA, 22 nt, Human
gauguggugaggcaggcuuugu

SEQ ID NO: 2504168 - RNA, 15 nt, Human
gauguggugaggcag

SEQ ID NO: 2504169 - RNA, 23 nt, Human
gauguuacaucacaguguuugca

SEQ ID NO: 2504170 - RNA, 20 nt, Human
gauguuacaucacaguguuu

SEQ ID NO: 2504171 - RNA, 22 nt, Human
gauguuaacacauuuuguauaa

SEQ ID NO: 2504172 - RNA, 21 nt, Human
gauguuaacacauuuuguaua

SEQ ID NO: 2504173 - RNA, 14 nt, Human
gauguuaaccagaa

SEQ ID NO: 2504174 - RNA, 23 nt, Human
gaugugggagggagcagacagga

SEQ ID NO: 2504175 - RNA, 16 nt, Human
gaugugggggaagacc

SEQ ID NO: 2504176 - RNA, 22 nt, Human
gaugugggagggagcagacagg

SEQ ID NO: 2504177 - RNA, 18 nt, Human
gauguggcugcagcagcg

SEQ ID NO: 2504178 - RNA, 16 nt, Human
gauguggcugcagcag

SEQ ID NO: 2504179 - RNA, 20 nt, Human
gauguggcccuggccugcug

SEQ ID NO: 2504180 - RNA, 20 nt, Human
gaugugggggaagaccuggc

SEQ ID NO: 2504181 - RNA, 17 nt, Human
gaugugggucaaggaau

SEQ ID NO: 2504182 - RNA, 13 nt, Human
gaugcuccuuggg

SEQ ID NO: 2504183 - RNA, 23 nt, Human
gaugcucccuccccugcccuggu

SEQ ID NO: 2504184 - RNA, 14 nt, Human
gaugcuccuugggc

SEQ ID NO: 2504185 - RNA, 16 nt, Human
gaugcuccuugggccc

SEQ ID NO: 2504186 - RNA, 21 nt, Human
gaugcuccuugggcccuuuga

SEQ ID NO: 2504187 - RNA, 15 nt, Human
gaugcucuucugugg

SEQ ID NO: 2504188 - RNA, 20 nt, Human
gaugcugacuguacuccucc

SEQ ID NO: 2504189 - RNA, 17 nt, Human
gaugcugacuguacucc

SEQ ID NO: 2504190 - RNA, 20 nt, Human
gaugcugacauucaccugcc

SEQ ID NO: 2504191 - RNA, 21 nt, Human
gaugcugacauucaccugccc

SEQ ID NO: 2504192 - RNA, 20 nt, Human
gaugcugaaacaggagagaa

SEQ ID NO: 2504193 - RNA, 20 nt, Human
gaugcuagaacucccuuuca

SEQ ID NO: 2504194 - RNA, 22 nt, Human
gaugcuagaacucccuuucaac

SEQ ID NO: 2504195 - RNA, 18 nt, Human
gaugcuagaacucccuuu

SEQ ID NO: 2504196 - RNA, 16 nt, Human
gaugccccgucccccu

SEQ ID NO: 2504197 - RNA, 12 nt, Human
gaugccccagag

SEQ ID NO: 2504198 - RNA, 16 nt, Human
gaugccccagagcugu

SEQ ID NO: 2504199 - RNA, 16 nt, Human
gaucagagccgugguc

SEQ ID NO: 2504200 - RNA, 23 nt, Human
gaucagagccgugguccuuuggg

SEQ ID NO: 2504201 - RNA, 22 nt, Human
gaucagaccuuggaucagauga

SEQ ID NO: 2504202 - RNA, 14 nt, Human
gaucagaucugaca

SEQ ID NO: 2504203 - RNA, 14 nt, Human
gaucagagcagcag

SEQ ID NO: 2504204 - RNA, 16 nt, Human
gaucagaccauaaugu

SEQ ID NO: 2504205 - RNA, 15 nt, Human
gaucagaacagcaga

SEQ ID NO: 2504206 - RNA, 19 nt, Human
gaugcccaaagaugcagcc

SEQ ID NO: 2504207 - RNA, 14 nt, Human
gaugccagguucua

SEQ ID NO: 2504208 - RNA, 11 nt, Human
gaugccaggac

SEQ ID NO: 2504209 - RNA, 21 nt, Human
gaugccaguaggcucaacuag

SEQ ID NO: 2504210 - RNA, 22 nt, Human
gaugccagguucuauuuggaau

SEQ ID NO: 2504211 - RNA, 18 nt, Human
gaugccaucugugggcac

SEQ ID NO: 2504212 - RNA, 20 nt, Human
gaugcccaaagaugcagccg

SEQ ID NO: 2504213 - RNA, 15 nt, Human
gaugcccacugagga

SEQ ID NO: 2504214 - RNA, 20 nt, Human
gaugcccagggccacucugc

SEQ ID NO: 2504215 - RNA, 21 nt, Human
gaugcccagggccacucugcc

SEQ ID NO: 2504216 - RNA, 22 nt, Human
gaugcccagggccacucugccu

SEQ ID NO: 2504217 - RNA, 22 nt, Human
gaugcccagagggcccaggcag

SEQ ID NO: 2504218 - RNA, 23 nt, Human
gaugcccagagggcccaggcagg

SEQ ID NO: 2504219 - RNA, 19 nt, Human
gaugcccagagggcccagg

SEQ ID NO: 2504220 - RNA, 20 nt, Human
gaugcccagagggcccaggc

SEQ ID NO: 2504221 - RNA, 18 nt, Human
gaugcccagagggcccag

SEQ ID NO: 2504222 - RNA, 17 nt, Human
gaugcccacugaggaau

SEQ ID NO: 2504223 - RNA, 22 nt, Human
gauggccgggcgcgguggcuca

SEQ ID NO: 2504224 - RNA, 15 nt, Human
gauggccccagcaca

SEQ ID NO: 2504225 - RNA, 14 nt, Human
gauggccccagcac

SEQ ID NO: 2504226 - RNA, 22 nt, Human
gauggcccuucccacuggaggu

SEQ ID NO: 2504227 - RNA, 15 nt, Human
gauggcccuucccac

SEQ ID NO: 2504228 - RNA, 21 nt, Human
gauggcauccugugaaguccu

SEQ ID NO: 2504229 - RNA, 15 nt, Human
gauggcauccuguga

SEQ ID NO: 2504230 - RNA, 22 nt, Human
gauggcaggauggccuggccag

SEQ ID NO: 2504231 - RNA, 21 nt, Human
gauggcaggauggccuggcca

SEQ ID NO: 2504232 - RNA, 15 nt, Human
gaugcugacuaguga

SEQ ID NO: 2504233 - RNA, 21 nt, Human
gaugcugaaacaggagagaaa

SEQ ID NO: 2504234 - RNA, 12 nt, Human
gauggccccagc

SEQ ID NO: 2504235 - RNA, 12 nt, Human
gauggccagugu

SEQ ID NO: 2504236 - RNA, 24 nt, Human
gauggggcccugccuccuuuguga

SEQ ID NO: 2504237 - RNA, 21 nt, Human
gaugggcaacccccagccugc

SEQ ID NO: 2504238 - RNA, 20 nt, Human
gaugggcaacccccagccug

SEQ ID NO: 2504239 - RNA, 20 nt, Human
gaugggagggaggcucaggu

SEQ ID NO: 2504240 - RNA, 15 nt, Human
gaugggagugagaca

SEQ ID NO: 2504241 - RNA, 18 nt, Human
gauggccggagaggaccg

SEQ ID NO: 2504242 - RNA, 13 nt, Human
gauggggcugcac

SEQ ID NO: 2504243 - RNA, 19 nt, Human
gaugggaugguggagggcc

SEQ ID NO: 2504244 - RNA, 20 nt, Human
gaugggaugguggagggcca

SEQ ID NO: 2504245 - RNA, 13 nt, Human
gauggggccucug

SEQ ID NO: 2504246 - RNA, 15 nt, Human
gauggggcugcaccg

SEQ ID NO: 2504247 - RNA, 19 nt, Human
gauggggcugcaccggcug

SEQ ID NO: 2504248 - RNA, 19 nt, Human
gauggggcucccgcccgug

SEQ ID NO: 2504249 - RNA, 16 nt, Human
gauggggucuguaaaa

SEQ ID NO: 2504250 - RNA, 22 nt, Human
gauggggugggguggagaacuc

SEQ ID NO: 2504251 - RNA, 19 nt, Human
gaugggugcuuggaggaag

SEQ ID NO: 2504252 - RNA, 18 nt, Human
gauggguuugacaagguu

SEQ ID NO: 2504253 - RNA, 22 nt, Human
gauggguucuaauuuuggaugg

SEQ ID NO: 2504254 - RNA, 21 nt, Human
gauggguucuaauuuuggaug

SEQ ID NO: 2504255 - RNA, 23 nt, Human
gaugggucugguuugcagagcuu

SEQ ID NO: 2504256 - RNA, 15 nt, Human
gaugggucaguugua

SEQ ID NO: 2504257 - RNA, 21 nt, Human
gaugggucaguuguaucagca

SEQ ID NO: 2504258 - RNA, 21 nt, Human
gaugggucuggcugagcugaa

SEQ ID NO: 2504259 - RNA, 22 nt, Human
gaugggucugguuugcagagcu

SEQ ID NO: 2504260 - RNA, 17 nt, Human
gcacagacccugcccug

SEQ ID NO: 2504261 - RNA, 16 nt, Human
gcacagacccugcccu

SEQ ID NO: 2504262 - RNA, 15 nt, Human
gcacagacccugccc

SEQ ID NO: 2504263 - RNA, 14 nt, Human
gcacagacccugcc

SEQ ID NO: 2504264 - RNA, 22 nt, Human
gcacagaaaauggaagacagcu

SEQ ID NO: 2504265 - RNA, 21 nt, Human
gcacagaaaauggaagacagc

SEQ ID NO: 2504266 - RNA, 23 nt, Human
gcacagaaaauggaagacagcuc

SEQ ID NO: 2504267 - RNA, 21 nt, Human
gcacagaaaccucuacuaaaa

SEQ ID NO: 2504268 - RNA, 20 nt, Human
gcacagaaacacaauauuuu

SEQ ID NO: 2504269 - RNA, 12 nt, Human
gcacagaaggag

SEQ ID NO: 2504270 - RNA, 21 nt, Human
gcacagacccugcccuguggg

SEQ ID NO: 2504271 - RNA, 20 nt, Human
gcacagacccugcccugugg

SEQ ID NO: 2504272 - RNA, 19 nt, Human
gcacagacccugcccugug

SEQ ID NO: 2504273 - RNA, 18 nt, Human
gcacagacccugcccugu

SEQ ID NO: 2504274 - RNA, 22 nt, Human
gcacagacccugcccugugggc

SEQ ID NO: 2504275 - RNA, 17 nt, Human
gcacagagagggggcca

SEQ ID NO: 2504276 - RNA, 15 nt, Human
gcacagagagggggc

SEQ ID NO: 2504277 - RNA, 16 nt, Human
gcacagagaagacaaa

SEQ ID NO: 2504278 - RNA, 18 nt, Human
gcacagacgucccuccac

SEQ ID NO: 2504279 - RNA, 15 nt, Human
gcacagaguuguuac

SEQ ID NO: 2504280 - RNA, 19 nt, Human
gcacagagcucuccagcuc

SEQ ID NO: 2504281 - RNA, 18 nt, Human
gcacagagcucuccagcu

SEQ ID NO: 2504282 - RNA, 17 nt, Human
gcacagagcucuccagc

SEQ ID NO: 2504283 - RNA, 23 nt, Human
gcacagagagggggccaccuccc

SEQ ID NO: 2504284 - RNA, 19 nt, Human
gcacagagagggggccacc

SEQ ID NO: 2504285 - RNA, 20 nt, Human
gcacagaaaauggaagacag

SEQ ID NO: 2504286 - RNA, 22 nt, Human
gcacacuuugccauauuuucac

SEQ ID NO: 2504287 - RNA, 20 nt, Human
gcacacuuggcccaaguggc

SEQ ID NO: 2504288 - RNA, 14 nt, Human
gcacacuuggccca

SEQ ID NO: 2504289 - RNA, 20 nt, Human
gcacacuuugcacugauaua

SEQ ID NO: 2504290 - RNA, 13 nt, Human
gcacacuuugcca

SEQ ID NO: 2504291 - RNA, 14 nt, Human
gcacacuuugccau

SEQ ID NO: 2504292 - RNA, 20 nt, Human
gcacacuccccugcacugga

SEQ ID NO: 2504293 - RNA, 12 nt, Human
gcacacuguagc

SEQ ID NO: 2504294 - RNA, 23 nt, Human
gcacacggggugcgucuccccgg

SEQ ID NO: 2504295 - RNA, 17 nt, Human
gcacacgucauguuucu

SEQ ID NO: 2504296 - RNA, 21 nt, Human
gcacacuccccugcacuggag

SEQ ID NO: 2504297 - RNA, 15 nt, Human
gcacacuccccugca

SEQ ID NO: 2504298 - RNA, 20 nt, Human
gcacacucauccccucacuu

SEQ ID NO: 2504299 - RNA, 20 nt, Human
gcacaccgggcacucagaag

SEQ ID NO: 2504300 - RNA, 19 nt, Human
gcacacgccucccacuggg

SEQ ID NO: 2504301 - RNA, 17 nt, Human
gcacacgccucccacug

SEQ ID NO: 2504302 - RNA, 14 nt, Human
gcacacgccuccca

SEQ ID NO: 2504303 - RNA, 17 nt, Human
gcacaagcuccaagcuc

SEQ ID NO: 2504304 - RNA, 15 nt, Human
gcacaagcuccaagc

SEQ ID NO: 2504305 - RNA, 18 nt, Human
gcacaagcuccaagcucc

SEQ ID NO: 2504306 - RNA, 23 nt, Human
gcacaagcaaaagggugucugag

SEQ ID NO: 2504307 - RNA, 17 nt, Human
gcacaagaagcgugaga

SEQ ID NO: 2504308 - RNA, 24 nt, Human
gcacaagaagcgugagacgccacc

SEQ ID NO: 2504309 - RNA, 11 nt, Human
gcacaagaagc

SEQ ID NO: 2504310 - RNA, 19 nt, Human
gcacaacuuuaagaggaca

SEQ ID NO: 2504311 - RNA, 23 nt, Human
gcacaaauucugucucuggauua

SEQ ID NO: 2504312 - RNA, 14 nt, Human
gcacaaauauuuau

SEQ ID NO: 2504313 - RNA, 15 nt, Human
gcacaaauauuuauu

SEQ ID NO: 2504314 - RNA, 16 nt, Human
gcacaaauauuuauuu

SEQ ID NO: 2504315 - RNA, 19 nt, Human
gcaaugggagcugaggcca

SEQ ID NO: 2504316 - RNA, 20 nt, Human
gcaaugggagcugaggccac

SEQ ID NO: 2504317 - RNA, 16 nt, Human
gcaaugggcacuggga

SEQ ID NO: 2504318 - RNA, 14 nt, Human
gcaaugggcacugg

SEQ ID NO: 2504319 - RNA, 23 nt, Human
gcaaugguguugcccugagugga

SEQ ID NO: 2504320 - RNA, 20 nt, Human
gcaaugguguugcccugagu

SEQ ID NO: 2504321 - RNA, 15 nt, Human
gcaauggcagccuug

SEQ ID NO: 2504322 - RNA, 13 nt, Human
gcaacacacagac

SEQ ID NO: 2504323 - RNA, 18 nt, Human
gcaacggggaggccaagu

SEQ ID NO: 2504324 - RNA, 22 nt, Human
gcaacucaaggacuuugcagcc

SEQ ID NO: 2504325 - RNA, 14 nt, Human
gcaacucaucuuag

SEQ ID NO: 2504326 - RNA, 14 nt, Human
gcaaugugauaaaa

SEQ ID NO: 2504327 - RNA, 22 nt, Human
gcaauguagaggggaaaagaga

SEQ ID NO: 2504328 - RNA, 20 nt, Human
gcaaugucaggaacagaagg

SEQ ID NO: 2504329 - RNA, 15 nt, Human
gcaaugugggcagag

SEQ ID NO: 2504330 - RNA, 19 nt, Human
gcaaugucugagugaaccu

SEQ ID NO: 2504331 - RNA, 22 nt, Human
gcaaugucaggaacagaaggau

SEQ ID NO: 2504332 - RNA, 15 nt, Human
gcaaugucugugcua

SEQ ID NO: 2504333 - RNA, 14 nt, Human
gcaaugucugugcu

SEQ ID NO: 2504334 - RNA, 14 nt, Human
gcaaugugcuacug

SEQ ID NO: 2504335 - RNA, 18 nt, Human
gcaauuccccucugcugc

SEQ ID NO: 2504336 - RNA, 14 nt, Human
gcaauuccccucug

SEQ ID NO: 2504337 - RNA, 21 nt, Human
gcaauuccccucugcugcugu

SEQ ID NO: 2504338 - RNA, 15 nt, Human
gcaauuccgcauuua

SEQ ID NO: 2504339 - RNA, 21 nt, Human
gcaauuaaagugauacugaaa

SEQ ID NO: 2504340 - RNA, 14 nt, Human
gcaauguuuuccuu

SEQ ID NO: 2504341 - RNA, 14 nt, Human
gcaauucuccugcc

SEQ ID NO: 2504342 - RNA, 15 nt, Human
gcaauucuccugccu

SEQ ID NO: 2504343 - RNA, 16 nt, Human
gcaauucuccugccuc

SEQ ID NO: 2504344 - RNA, 17 nt, Human
gcaauucuccugccuca

SEQ ID NO: 2504345 - RNA, 18 nt, Human
gcaauucuccugccucag

SEQ ID NO: 2504346 - RNA, 19 nt, Human
gcaauucuccugccucagc

SEQ ID NO: 2504347 - RNA, 20 nt, Human
gcaauucuccugccucagcc

SEQ ID NO: 2504348 - RNA, 18 nt, Human
gcaauugaauuaaauuag

SEQ ID NO: 2504349 - RNA, 17 nt, Human
gcaauuccgcauuuaau

SEQ ID NO: 2504350 - RNA, 23 nt, Human
gcaauuuaauauuuugcacaguu

SEQ ID NO: 2504351 - RNA, 19 nt, Human
gcaauuuauacaauaucau

SEQ ID NO: 2504352 - RNA, 16 nt, Human
gcaauuuauacaauau

SEQ ID NO: 2504353 - RNA, 14 nt, Human
gcaauugggauggc

SEQ ID NO: 2504354 - RNA, 15 nt, Human
gcaauugcuuaggau

SEQ ID NO: 2504355 - RNA, 20 nt, Human
gcaauuuguuugugcuucua

SEQ ID NO: 2504356 - RNA, 18 nt, Human
gcaauuuguuugugcuuc

SEQ ID NO: 2504357 - RNA, 18 nt, Human
gcaauuuccuuuuuuguu

SEQ ID NO: 2504358 - RNA, 14 nt, Human
gcaauuucauaugc

SEQ ID NO: 2504359 - RNA, 17 nt, Human
gcaauuuauuaaaauga

SEQ ID NO: 2504360 - RNA, 13 nt, Human
gcacaaaacccag

SEQ ID NO: 2504361 - RNA, 23 nt, Human
gcacaaaacccagaccuguuagc

SEQ ID NO: 2504362 - RNA, 23 nt, Human
gcaauuuuuccaugaaguuugaa

SEQ ID NO: 2504363 - RNA, 14 nt, Human
gcacaaacagaggc

SEQ ID NO: 2504364 - RNA, 15 nt, Human
gcaauuuuccuugaa

SEQ ID NO: 2504365 - RNA, 14 nt, Human
gcaauuuuccuuga

SEQ ID NO: 2504366 - RNA, 13 nt, Human
gcaauuuuccuug

SEQ ID NO: 2504367 - RNA, 11 nt, Human
gcaauuuuccu

SEQ ID NO: 2504368 - RNA, 10 nt, Human
gcaauuuucc

SEQ ID NO: 2504369 - RNA, 19 nt, Human
gcaauuuuaauugauuauu

SEQ ID NO: 2504370 - RNA, 20 nt, Human
gcaauuuuccuugaagccga

SEQ ID NO: 2504371 - RNA, 14 nt, Human
gcaauuuuguaacg

SEQ ID NO: 2504372 - RNA, 19 nt, Human
gcaauuuuccuugaagccg

SEQ ID NO: 2504373 - RNA, 17 nt, Human
gcaauuuuccuugaagc

SEQ ID NO: 2504374 - RNA, 18 nt, Human
gcaauuuugcauuugaau

SEQ ID NO: 2504375 - RNA, 16 nt, Human
gcacaaacagaggccg

SEQ ID NO: 2504376 - RNA, 15 nt, Human
gcacaaacagaggcc

SEQ ID NO: 2504377 - RNA, 18 nt, Human
gcacaaacucaccaucug

SEQ ID NO: 2504378 - RNA, 23 nt, Human
gcacaaaauucgaccugauuuac

SEQ ID NO: 2504379 - RNA, 23 nt, Human
gcacaaaaugauggacccaaugc

SEQ ID NO: 2504380 - RNA, 13 nt, Human
gcacaaauauuua

SEQ ID NO: 2504381 - RNA, 22 nt, Human
gcacaaaauucgaccugauuua

SEQ ID NO: 2504382 - RNA, 13 nt, Human
gcacgauuucugu

SEQ ID NO: 2504383 - RNA, 15 nt, Human
gcacgauuucuguuu

SEQ ID NO: 2504384 - RNA, 14 nt, Human
gcaccuucagacuu

SEQ ID NO: 2504385 - RNA, 16 nt, Human
gcaccuuaguggcuuu

SEQ ID NO: 2504386 - RNA, 13 nt, Human
gcaccuuaguggc

SEQ ID NO: 2504387 - RNA, 19 nt, Human
gcaccuuaccaacuuucug

SEQ ID NO: 2504388 - RNA, 19 nt, Human
gcaccuuagacagucccug

SEQ ID NO: 2504389 - RNA, 15 nt, Human
gcaccuuccucacuu

SEQ ID NO: 2504390 - RNA, 14 nt, Human
gcaccuugugucug

SEQ ID NO: 2504391 - RNA, 16 nt, Human
gcaccuuccucacuuc

SEQ ID NO: 2504392 - RNA, 21 nt, Human
gcaccuuagacagucccugcc

SEQ ID NO: 2504393 - RNA, 20 nt, Human
gcaccuuagacagucccugc

SEQ ID NO: 2504394 - RNA, 15 nt, Human
gcaccugucccagaa

SEQ ID NO: 2504395 - RNA, 19 nt, Human
gcaccugucccagaaaaag

SEQ ID NO: 2504396 - RNA, 22 nt, Human
gcaccugucccagaaaaagcau

SEQ ID NO: 2504397 - RNA, 18 nt, Human
gcaccuuaccaacuuucu

SEQ ID NO: 2504398 - RNA, 15 nt, Human
gcaccccaugcuguu

SEQ ID NO: 2504399 - RNA, 14 nt, Human
gcaccaucccuuuu

SEQ ID NO: 2504400 - RNA, 17 nt, Human
gcaccccaugcuguuga

SEQ ID NO: 2504401 - RNA, 13 nt, Human
gcacccccacccu

SEQ ID NO: 2504402 - RNA, 14 nt, Human
gcacccccacccuu

SEQ ID NO: 2504403 - RNA, 15 nt, Human
gcacccccacccuuu

SEQ ID NO: 2504404 - RNA, 18 nt, Human
gcacccccacccuuuggg

SEQ ID NO: 2504405 - RNA, 22 nt, Human
gcaccccagcuggggccaggcu

SEQ ID NO: 2504406 - RNA, 12 nt, Human
gcaccauaacuu

SEQ ID NO: 2504407 - RNA, 21 nt, Human
gcaccuguaaucccagcuacu

SEQ ID NO: 2504408 - RNA, 17 nt, Human
gcaccuggggaguggga

SEQ ID NO: 2504409 - RNA, 15 nt, Human
gcaccuggggagugg

SEQ ID NO: 2504410 - RNA, 19 nt, Human
gcaccuguacucaggaggc

SEQ ID NO: 2504411 - RNA, 21 nt, Human
gcaccuguacucaggaggcug

SEQ ID NO: 2504412 - RNA, 14 nt, Human
gcaccccccaagcu

SEQ ID NO: 2504413 - RNA, 13 nt, Human
gcaccccccuggg

SEQ ID NO: 2504414 - RNA, 14 nt, Human
gcaccccccugggc

SEQ ID NO: 2504415 - RNA, 21 nt, Human
gcaccccccugggcugagaga

SEQ ID NO: 2504416 - RNA, 17 nt, Human
gcaccaaaauaagaaaa

SEQ ID NO: 2504417 - RNA, 18 nt, Human
gcaccaaaauaagaaaag

SEQ ID NO: 2504418 - RNA, 20 nt, Human
gcaccaggcacgaacccacc

SEQ ID NO: 2504419 - RNA, 19 nt, Human
gcacauuuccccagaccug

SEQ ID NO: 2504420 - RNA, 22 nt, Human
gcacauuuccccagaccugagc

SEQ ID NO: 2504421 - RNA, 21 nt, Human
gcacauuuaagagacagucac

SEQ ID NO: 2504422 - RNA, 17 nt, Human
gcacauuuaagagacag

SEQ ID NO: 2504423 - RNA, 23 nt, Human
gcacauuuaagagacagucaccc

SEQ ID NO: 2504424 - RNA, 16 nt, Human
gcacauuuccccagac

SEQ ID NO: 2504425 - RNA, 19 nt, Human
gcaccagggguuucucgca

SEQ ID NO: 2504426 - RNA, 23 nt, Human
gcaccaggguugaccccagagga

SEQ ID NO: 2504427 - RNA, 20 nt, Human
gcaccagggacuaugaaugg

SEQ ID NO: 2504428 - RNA, 18 nt, Human
gcaccagggguuucucgc

SEQ ID NO: 2504429 - RNA, 16 nt, Human
gcaccagggguuucuc

SEQ ID NO: 2504430 - RNA, 21 nt, Human
gcaccaggcacgaacccaccu

SEQ ID NO: 2504431 - RNA, 23 nt, Human
gcaccaggcacgaacccaccugc

SEQ ID NO: 2504432 - RNA, 17 nt, Human
gcacauucuuagaguua

SEQ ID NO: 2504433 - RNA, 12 nt, Human
gcacaugugugc

SEQ ID NO: 2504434 - RNA, 12 nt, Human
gcacauguuucc

SEQ ID NO: 2504435 - RNA, 12 nt, Human
gcacagugauuu

SEQ ID NO: 2504436 - RNA, 13 nt, Human
gcacagugcaucu

SEQ ID NO: 2504437 - RNA, 18 nt, Human
gcacagugcaucucagcc

SEQ ID NO: 2504438 - RNA, 15 nt, Human
gcacagugcaucuca

SEQ ID NO: 2504439 - RNA, 16 nt, Human
gcacagaguuguuaca

SEQ ID NO: 2504440 - RNA, 18 nt, Human
gcacagaguuguuacauu

SEQ ID NO: 2504441 - RNA, 19 nt, Human
gcacagaguuguuacauuu

SEQ ID NO: 2504442 - RNA, 21 nt, Human
gcacagaguuguuacauuuuu

SEQ ID NO: 2504443 - RNA, 22 nt, Human
gcacagaguuguuacauuuuua

SEQ ID NO: 2504444 - RNA, 23 nt, Human
gcacagagcucuccagcuccaag

SEQ ID NO: 2504445 - RNA, 13 nt, Human
gcacagauggauu

SEQ ID NO: 2504446 - RNA, 15 nt, Human
gcacagauggauuug

SEQ ID NO: 2504447 - RNA, 16 nt, Human
gcacagugaagugcug

SEQ ID NO: 2504448 - RNA, 21 nt, Human
gcacaggugggcuucccagug

SEQ ID NO: 2504449 - RNA, 24 nt, Human
gcacagauggauuugccugugcca

SEQ ID NO: 2504450 - RNA, 18 nt, Human
gcacagauggauuugccu

SEQ ID NO: 2504451 - RNA, 19 nt, Human
gcacagauggauuugccug

SEQ ID NO: 2504452 - RNA, 20 nt, Human
gcacaggugggcuucccagu

SEQ ID NO: 2504453 - RNA, 22 nt, Human
gcacagauggauuugccugugc

SEQ ID NO: 2504454 - RNA, 15 nt, Human
gcacugacuucuaag

SEQ ID NO: 2504455 - RNA, 16 nt, Human
gcacgauuucuguuua

SEQ ID NO: 2504456 - RNA, 18 nt, Human
gcacugacuucuaaguaa

SEQ ID NO: 2504457 - RNA, 13 nt, Human
gcacgcacacaca

SEQ ID NO: 2504458 - RNA, 12 nt, Human
gcacgcacacac

SEQ ID NO: 2504459 - RNA, 11 nt, Human
gcacgcacaca

SEQ ID NO: 2504460 - RNA, 10 nt, Human
gcacgcacac

SEQ ID NO: 2504461 - RNA, 15 nt, Human
gcacgcacacacaca

SEQ ID NO: 2504462 - RNA, 14 nt, Human
gcacgcacacacac

SEQ ID NO: 2504463 - RNA, 17 nt, Human
gcacugacugggcauag

SEQ ID NO: 2504464 - RNA, 20 nt, Human
gcacugcugcccagccucca

SEQ ID NO: 2504465 - RNA, 18 nt, Human
gcacugcugcccagccuc

SEQ ID NO: 2504466 - RNA, 15 nt, Human
gcacugcugcccagc

SEQ ID NO: 2504467 - RNA, 14 nt, Human
gcacugcugcccag

SEQ ID NO: 2504468 - RNA, 12 nt, Human
gcacugcugccc

SEQ ID NO: 2504469 - RNA, 13 nt, Human
gcacugaggaaga

SEQ ID NO: 2504470 - RNA, 14 nt, Human
gcacugagcccccc

SEQ ID NO: 2504471 - RNA, 13 nt, Human
gcacugagccccc

SEQ ID NO: 2504472 - RNA, 11 nt, Human
gcacugaggaa

SEQ ID NO: 2504473 - RNA, 21 nt, Human
gcacugagauaccagcgagga

SEQ ID NO: 2504474 - RNA, 15 nt, Human
gcacugagauauuua

SEQ ID NO: 2504475 - RNA, 12 nt, Human
gcacugagcccc

SEQ ID NO: 2504476 - RNA, 11 nt, Human
gcacugagccc

SEQ ID NO: 2504477 - RNA, 13 nt, Human
gcacugagcagag

SEQ ID NO: 2504478 - RNA, 21 nt, Human
gcacugagauauuuauuguuu

SEQ ID NO: 2504479 - RNA, 20 nt, Human
gcacuggcauugucccugug

SEQ ID NO: 2504480 - RNA, 19 nt, Human
gcacuggcauugucccugu

SEQ ID NO: 2504481 - RNA, 21 nt, Human
gcacuguccugcuccacagug

SEQ ID NO: 2504482 - RNA, 14 nt, Human
gcacugguggcccg

SEQ ID NO: 2504483 - RNA, 18 nt, Human
gcacuggguugcagggga

SEQ ID NO: 2504484 - RNA, 16 nt, Human
gcacugggggcagcgg

SEQ ID NO: 2504485 - RNA, 18 nt, Human
gcacuggguugacuuuca

SEQ ID NO: 2504486 - RNA, 22 nt, Human
gcacugcuggguggcccauccc

SEQ ID NO: 2504487 - RNA, 21 nt, Human
gcacugcuggguggcccaucc

SEQ ID NO: 2504488 - RNA, 19 nt, Human
gcacugcuggguggcccau

SEQ ID NO: 2504489 - RNA, 18 nt, Human
gcacugcuggguggccca

SEQ ID NO: 2504490 - RNA, 17 nt, Human
gcacugcuggguggccc

SEQ ID NO: 2504491 - RNA, 15 nt, Human
gcacugcuggguggc

SEQ ID NO: 2504492 - RNA, 14 nt, Human
gcacugcugggugg

SEQ ID NO: 2504493 - RNA, 13 nt, Human
gcacugcugggug

SEQ ID NO: 2504494 - RNA, 23 nt, Human
gcacugcuuccagugaggcucug

SEQ ID NO: 2504495 - RNA, 15 nt, Human
gcacugcugugcugu

SEQ ID NO: 2504496 - RNA, 16 nt, Human
gcacugcuugaggaaa

SEQ ID NO: 2504497 - RNA, 17 nt, Human
gcacugcuugaggaaaa

SEQ ID NO: 2504498 - RNA, 16 nt, Human
gcacuggagugcaggg

SEQ ID NO: 2504499 - RNA, 15 nt, Human
gcacuggagugcagg

SEQ ID NO: 2504500 - RNA, 14 nt, Human
gcacuggagugcag

SEQ ID NO: 2504501 - RNA, 11 nt, Human
gcacugcugug

SEQ ID NO: 2504502 - RNA, 14 nt, Human
gcacuggaguccag

SEQ ID NO: 2504503 - RNA, 17 nt, Human
gcacuggaguccagucu

SEQ ID NO: 2504504 - RNA, 18 nt, Human
gcacuggaguccagucuc

SEQ ID NO: 2504505 - RNA, 16 nt, Human
gcagacacggaucuga

SEQ ID NO: 2504506 - RNA, 23 nt, Human
gcagacacggaucugagaaucuu

SEQ ID NO: 2504507 - RNA, 15 nt, Human
gcagacaccuuggac

SEQ ID NO: 2504508 - RNA, 13 nt, Human
gcagaauaaagca

SEQ ID NO: 2504509 - RNA, 12 nt, Human
gcagaauaaagc

SEQ ID NO: 2504510 - RNA, 23 nt, Human
gcagacacagggacuugaaguug

SEQ ID NO: 2504511 - RNA, 13 nt, Human
gcagacagcagcu

SEQ ID NO: 2504512 - RNA, 14 nt, Human
gcagacagcagcuc

SEQ ID NO: 2504513 - RNA, 16 nt, Human
gcagacagcagcucag

SEQ ID NO: 2504514 - RNA, 17 nt, Human
gcagacagcagcucagg

SEQ ID NO: 2504515 - RNA, 18 nt, Human
gcagacagcagcucaggc

SEQ ID NO: 2504516 - RNA, 19 nt, Human
gcagacagcagcucaggca

SEQ ID NO: 2504517 - RNA, 20 nt, Human
gcagacagcagcucaggcac

SEQ ID NO: 2504518 - RNA, 14 nt, Human
gcagacaggcaagc

SEQ ID NO: 2504519 - RNA, 13 nt, Human
gcagacaggcaag

SEQ ID NO: 2504520 - RNA, 12 nt, Human
gcagacaggcaa

SEQ ID NO: 2504521 - RNA, 14 nt, Human
gcagacaggaggaa

SEQ ID NO: 2504522 - RNA, 21 nt, Human
gcagacagcagcucaggcaca

SEQ ID NO: 2504523 - RNA, 19 nt, Human
gcacuguggguagacacac

SEQ ID NO: 2504524 - RNA, 18 nt, Human
gcagaaggaagacuucau

SEQ ID NO: 2504525 - RNA, 18 nt, Human
gcacugugcucagggcua

SEQ ID NO: 2504526 - RNA, 16 nt, Human
gcacugugcucagggc

SEQ ID NO: 2504527 - RNA, 14 nt, Human
gcacugugcucagg

SEQ ID NO: 2504528 - RNA, 13 nt, Human
gcacugugcucag

SEQ ID NO: 2504529 - RNA, 14 nt, Human
gcacugugcuaaua

SEQ ID NO: 2504530 - RNA, 11 nt, Human
gcacugugcua

SEQ ID NO: 2504531 - RNA, 19 nt, Human
gcacugugacccccagcuc

SEQ ID NO: 2504532 - RNA, 14 nt, Human
gcacugugaaggac

SEQ ID NO: 2504533 - RNA, 16 nt, Human
gcacugugaaggaccc

SEQ ID NO: 2504534 - RNA, 17 nt, Human
gcacugugaaggacccu

SEQ ID NO: 2504535 - RNA, 18 nt, Human
gcacugugaaggacccuu

SEQ ID NO: 2504536 - RNA, 11 nt, Human
gcacugugaag

SEQ ID NO: 2504537 - RNA, 20 nt, Human
gcacugucucaguuucacuu

SEQ ID NO: 2504538 - RNA, 21 nt, Human
gcacuggguugcaggggauug

SEQ ID NO: 2504539 - RNA, 22 nt, Human
gcacuguccugcuccacagugu

SEQ ID NO: 2504540 - RNA, 19 nt, Human
gcacugucucaguuucacu

SEQ ID NO: 2504541 - RNA, 22 nt, Human
gcagaaggggguggugucucca

SEQ ID NO: 2504542 - RNA, 15 nt, Human
gcagaaggggguggu

SEQ ID NO: 2504543 - RNA, 11 nt, Human
gcagaauaaag

SEQ ID NO: 2504544 - RNA, 15 nt, Human
gcagaagggagaagg

SEQ ID NO: 2504545 - RNA, 13 nt, Human
gcagaagggagaa

SEQ ID NO: 2504546 - RNA, 14 nt, Human
gcagaagggggugg

SEQ ID NO: 2504547 - RNA, 22 nt, Human
gcagaaggaagggcauccuucu

SEQ ID NO: 2504548 - RNA, 15 nt, Human
gcagaaggccaagaa

SEQ ID NO: 2504549 - RNA, 14 nt, Human
gcagaaggccaaga

SEQ ID NO: 2504550 - RNA, 20 nt, Human
gaggucagagccugcaguua

SEQ ID NO: 2504551 - RNA, 17 nt, Human
gaggucagagccugcag

SEQ ID NO: 2504552 - RNA, 20 nt, Human
gaggucacuggaaaggggag

SEQ ID NO: 2504553 - RNA, 18 nt, Human
gaggucacuggaaagggg

SEQ ID NO: 2504554 - RNA, 21 nt, Human
gaggucacuggaaaggggaga

SEQ ID NO: 2504555 - RNA, 21 nt, Human
gaggugggccagucuguggau

SEQ ID NO: 2504556 - RNA, 23 nt, Human
gaggucagcaugucuauucagcu

SEQ ID NO: 2504557 - RNA, 23 nt, Human
gaggugggcccaggaccagcugg

SEQ ID NO: 2504558 - RNA, 22 nt, Human
gaggugggcccaggaccagcug

SEQ ID NO: 2504559 - RNA, 15 nt, Human
gaggugggcccagga

SEQ ID NO: 2504560 - RNA, 14 nt, Human
gaggugggcccagg

SEQ ID NO: 2504561 - RNA, 12 nt, Human
gaggugggccca

SEQ ID NO: 2504562 - RNA, 16 nt, Human
gagguguggagccgag

SEQ ID NO: 2504563 - RNA, 17 nt, Human
gagguuccucugccugc

SEQ ID NO: 2504564 - RNA, 16 nt, Human
gagguuccucugccug

SEQ ID NO: 2504565 - RNA, 15 nt, Human
gaggugugggggcug

SEQ ID NO: 2504566 - RNA, 19 nt, Human
gagguuccucugccugccc

SEQ ID NO: 2504567 - RNA, 18 nt, Human
gagguuccucugccugcc

SEQ ID NO: 2504568 - RNA, 22 nt, Human
gaggugucaggcugcuggcgcc

SEQ ID NO: 2504569 - RNA, 18 nt, Human
gaggugucaggcugcugg

SEQ ID NO: 2504570 - RNA, 15 nt, Human
gaggugucaggcugc

SEQ ID NO: 2504571 - RNA, 14 nt, Human
gaggugucaggcug

SEQ ID NO: 2504572 - RNA, 20 nt, Human
gagguguauggagagaaaac

SEQ ID NO: 2504573 - RNA, 19 nt, Human
gagguggucugaauguucu

SEQ ID NO: 2504574 - RNA, 15 nt, Human
gaggugggguuggga

SEQ ID NO: 2504575 - RNA, 13 nt, Human
gagguggucugaa

SEQ ID NO: 2504576 - RNA, 16 nt, Human
gagguggucugaaugu

SEQ ID NO: 2504577 - RNA, 17 nt, Human
gagguggucugaauguu

SEQ ID NO: 2504578 - RNA, 20 nt, Human
gagguggucugaauguucug

SEQ ID NO: 2504579 - RNA, 17 nt, Human
gagguugggaggccauu

SEQ ID NO: 2504580 - RNA, 15 nt, Human
gagguugggaggcca

SEQ ID NO: 2504581 - RNA, 20 nt, Human
gagguugaucagaucugaca

SEQ ID NO: 2504582 - RNA, 19 nt, Human
gagguugcagugagccaag

SEQ ID NO: 2504583 - RNA, 13 nt, Human
gagguugcagugu

SEQ ID NO: 2504584 - RNA, 19 nt, Human
gagguugcagggagccgag

SEQ ID NO: 2504585 - RNA, 15 nt, Human
gagguugcagugagc

SEQ ID NO: 2504586 - RNA, 15 nt, Human
gagguugauaacuuu

SEQ ID NO: 2504587 - RNA, 15 nt, Human
gagguugaagccaag

SEQ ID NO: 2504588 - RNA, 13 nt, Human
gagguugaagcca

SEQ ID NO: 2504589 - RNA, 19 nt, Human
gagguugauaacuuugcuu

SEQ ID NO: 2504590 - RNA, 18 nt, Human
gagguugauaacuuugcu

SEQ ID NO: 2504591 - RNA, 13 nt, Human
gagguugcaggga

SEQ ID NO: 2504592 - RNA, 16 nt, Human
gagguuucaaaccucc

SEQ ID NO: 2504593 - RNA, 14 nt, Human
gagguugggugggc

SEQ ID NO: 2504594 - RNA, 19 nt, Human
gagguugcagugagcugag

SEQ ID NO: 2504595 - RNA, 17 nt, Human
gagguugggguguacua

SEQ ID NO: 2504596 - RNA, 19 nt, Human
gagguuuaggucaagaaga

SEQ ID NO: 2504597 - RNA, 13 nt, Human
gagguuucaguga

SEQ ID NO: 2504598 - RNA, 20 nt, Human
gaguacuacaguccucccau

SEQ ID NO: 2504599 - RNA, 22 nt, Human
gaguaauggguuucauauuucu

SEQ ID NO: 2504600 - RNA, 22 nt, Human
gaguaaucuguguacaaagaaa

SEQ ID NO: 2504601 - RNA, 22 nt, Human
gaguaauccaagcaaaugugaa

SEQ ID NO: 2504602 - RNA, 12 nt, Human
gaguaagagcug

SEQ ID NO: 2504603 - RNA, 13 nt, Human
gaguaaucugugu

SEQ ID NO: 2504604 - RNA, 23 nt, Human
gaguacuacaguccucccaucuc

SEQ ID NO: 2504605 - RNA, 21 nt, Human
gaguacuacaguccucccauc

SEQ ID NO: 2504606 - RNA, 14 nt, Human
gaguaauuuauugu

SEQ ID NO: 2504607 - RNA, 16 nt, Human
gaguaauuuauuguuu

SEQ ID NO: 2504608 - RNA, 19 nt, Human
gaguagaaacugcagggaa

SEQ ID NO: 2504609 - RNA, 20 nt, Human
gaguagaaagacagagcugg

SEQ ID NO: 2504610 - RNA, 17 nt, Human
gaguagaaagacagagc

SEQ ID NO: 2504611 - RNA, 17 nt, Human
gaguaggaagacuuugg

SEQ ID NO: 2504612 - RNA, 13 nt, Human
gaguaggaagacu

SEQ ID NO: 2504613 - RNA, 12 nt, Human
gaguaggaagac

SEQ ID NO: 2504614 - RNA, 22 nt, Human
gaguagcugggacuacaggcac

SEQ ID NO: 2504615 - RNA, 22 nt, Human
gaguagcaaguucuagagaaga

SEQ ID NO: 2504616 - RNA, 18 nt, Human
gaguagauggugaaauuu

SEQ ID NO: 2504617 - RNA, 17 nt, Human
gaguagccgagagccug

SEQ ID NO: 2504618 - RNA, 19 nt, Human
gaguagcugggacuacagg

SEQ ID NO: 2504619 - RNA, 17 nt, Human
gaguagaauugcauuga

SEQ ID NO: 2504620 - RNA, 14 nt, Human
gaguagaauugcau

SEQ ID NO: 2504621 - RNA, 23 nt, Human
gaguagaaaggccuuuaaaauuu

SEQ ID NO: 2504622 - RNA, 17 nt, Human
gaguagaaaggccuuua

SEQ ID NO: 2504623 - RNA, 15 nt, Human
gaguagaaaggccuu

SEQ ID NO: 2504624 - RNA, 22 nt, Human
gaguagaaagacagagcuggga

SEQ ID NO: 2504625 - RNA, 16 nt, Human
gagugacagaggcagc

SEQ ID NO: 2504626 - RNA, 15 nt, Human
gagugacagaggcag

SEQ ID NO: 2504627 - RNA, 20 nt, Human
gagugaagaggggcagcccu

SEQ ID NO: 2504628 - RNA, 19 nt, Human
gagugaagaggggcagccc

SEQ ID NO: 2504629 - RNA, 18 nt, Human
gagugaagaggggcagcc

SEQ ID NO: 2504630 - RNA, 17 nt, Human
gagugaagaggggcagc

SEQ ID NO: 2504631 - RNA, 15 nt, Human
gagugaauaaauguc

SEQ ID NO: 2504632 - RNA, 14 nt, Human
gagugaauaaaugu

SEQ ID NO: 2504633 - RNA, 14 nt, Human
gagugacagaggca

SEQ ID NO: 2504634 - RNA, 17 nt, Human
gagugaagcugggagaa

SEQ ID NO: 2504635 - RNA, 16 nt, Human
gagugaagaggggcag

SEQ ID NO: 2504636 - RNA, 15 nt, Human
gagugaagaggggca

SEQ ID NO: 2504637 - RNA, 16 nt, Human
gagugaaccuaccuuc

SEQ ID NO: 2504638 - RNA, 14 nt, Human
gagugaagaggggc

SEQ ID NO: 2504639 - RNA, 23 nt, Human
gagugaaaccuuuagggcagcuu

SEQ ID NO: 2504640 - RNA, 22 nt, Human
gagugaaaccuuuagggcagcu

SEQ ID NO: 2504641 - RNA, 15 nt, Human
gagugaaccaucauu

SEQ ID NO: 2504642 - RNA, 21 nt, Human
gagugaaaccuuuagggcagc

SEQ ID NO: 2504643 - RNA, 20 nt, Human
gagugaaaccuuuagggcag

SEQ ID NO: 2504644 - RNA, 21 nt, Human
gagucuuggcggcagcagcca

SEQ ID NO: 2504645 - RNA, 20 nt, Human
gagucuugcuaccucaguca

SEQ ID NO: 2504646 - RNA, 15 nt, Human
gagucugaagcagau

SEQ ID NO: 2504647 - RNA, 15 nt, Human
gagucuaucaaucaa

SEQ ID NO: 2504648 - RNA, 13 nt, Human
gagucugaaggcu

SEQ ID NO: 2504649 - RNA, 12 nt, Human
gagucugaaggc

SEQ ID NO: 2504650 - RNA, 14 nt, Human
gagucugaaggcug

SEQ ID NO: 2504651 - RNA, 15 nt, Human
gagucugaaggcugg

SEQ ID NO: 2504652 - RNA, 23 nt, Human
gagucuggugaagcucacuucug

SEQ ID NO: 2504653 - RNA, 23 nt, Human
gagucugaagcagaugcaaagag

SEQ ID NO: 2504654 - RNA, 18 nt, Human
gagucugucucugucaug

SEQ ID NO: 2504655 - RNA, 15 nt, Human
gagucugucucuguc

SEQ ID NO: 2504656 - RNA, 12 nt, Human
gagucugucucu

SEQ ID NO: 2504657 - RNA, 12 nt, Human
gagucugucuca

SEQ ID NO: 2504658 - RNA, 22 nt, Human
gagucuugcuaccucagucagu

SEQ ID NO: 2504659 - RNA, 20 nt, Human
gagucuuggcggcagcagcc

SEQ ID NO: 2504660 - RNA, 19 nt, Human
gaguaggaagacuuuggaa

SEQ ID NO: 2504661 - RNA, 18 nt, Human
gaguaggaagacuuugga

SEQ ID NO: 2504662 - RNA, 21 nt, Human
gaguagccaggguguggcccu

SEQ ID NO: 2504663 - RNA, 21 nt, Human
gaguaguugauguugcauuuu

SEQ ID NO: 2504664 - RNA, 14 nt, Human
gaguauaugcacuu

SEQ ID NO: 2504665 - RNA, 12 nt, Human
gaguauaugcac

SEQ ID NO: 2504666 - RNA, 16 nt, Human
gaguauaggccggucu

SEQ ID NO: 2504667 - RNA, 20 nt, Human
gaguaguugauguugcauuu

SEQ ID NO: 2504668 - RNA, 17 nt, Human
gaguaucaggucuccca

SEQ ID NO: 2504669 - RNA, 23 nt, Human
gaguaucuccucgcaagcugggu

SEQ ID NO: 2504670 - RNA, 22 nt, Human
gaguauguuaagcucuuuauga

SEQ ID NO: 2504671 - RNA, 19 nt, Human
gaguauguguuugugugug

SEQ ID NO: 2504672 - RNA, 23 nt, Human
gaguaucucggaccuuucagcug

SEQ ID NO: 2504673 - RNA, 16 nt, Human
gaguaucugggaacug

SEQ ID NO: 2504674 - RNA, 11 nt, Human
gaguauauguc

SEQ ID NO: 2504675 - RNA, 16 nt, Human
gagucgaggacaggga

SEQ ID NO: 2504676 - RNA, 15 nt, Human
gagucgaggacaggg

SEQ ID NO: 2504677 - RNA, 20 nt, Human
gagucuagaaguuguuuguc

SEQ ID NO: 2504678 - RNA, 22 nt, Human
gagucguggggugugcugggag

SEQ ID NO: 2504679 - RNA, 18 nt, Human
gaguccuuaaacagggca

SEQ ID NO: 2504680 - RNA, 14 nt, Human
gagucgaggacagg

SEQ ID NO: 2504681 - RNA, 12 nt, Human
gaguccucugga

SEQ ID NO: 2504682 - RNA, 13 nt, Human
gaguccucugaau

SEQ ID NO: 2504683 - RNA, 19 nt, Human
gaguccgaaagggacuugg

SEQ ID NO: 2504684 - RNA, 16 nt, Human
gaguccucacucccag

SEQ ID NO: 2504685 - RNA, 17 nt, Human
gaguccucacucccagu

SEQ ID NO: 2504686 - RNA, 14 nt, Human
gaguauuggucucc

SEQ ID NO: 2504687 - RNA, 21 nt, Human
gaguuaagaagcuguuguaca

SEQ ID NO: 2504688 - RNA, 16 nt, Human
gaguuaagaagcuguu

SEQ ID NO: 2504689 - RNA, 12 nt, Human
gaguuaagaccu

SEQ ID NO: 2504690 - RNA, 13 nt, Human
gaguuaagaccug

SEQ ID NO: 2504691 - RNA, 14 nt, Human
gaguuaagaccugg

SEQ ID NO: 2504692 - RNA, 12 nt, Human
gaguuacagaca

SEQ ID NO: 2504693 - RNA, 14 nt, Human
gaguuaagaagcug

SEQ ID NO: 2504694 - RNA, 13 nt, Human
gaguuaagaagcu

SEQ ID NO: 2504695 - RNA, 18 nt, Human
gaguuaacgggugaauaa

SEQ ID NO: 2504696 - RNA, 22 nt, Human
gaguuaaauagaguauaugcac

SEQ ID NO: 2504697 - RNA, 17 nt, Human
gaguuaaaaagggcagg

SEQ ID NO: 2504698 - RNA, 19 nt, Human
gagugucuuaauuaaaaga

SEQ ID NO: 2504699 - RNA, 20 nt, Human
gagugugccugaagucccag

SEQ ID NO: 2504700 - RNA, 13 nt, Human
gaguguguaauuu

SEQ ID NO: 2504701 - RNA, 12 nt, Human
gagugugggaag

SEQ ID NO: 2504702 - RNA, 18 nt, Human
gagugugggaagggagag

SEQ ID NO: 2504703 - RNA, 17 nt, Human
gaguguggaagccggag

SEQ ID NO: 2504704 - RNA, 18 nt, Human
gagugugcuggaggacug

SEQ ID NO: 2504705 - RNA, 15 nt, Human
gagugugcuggagga

SEQ ID NO: 2504706 - RNA, 14 nt, Human
gagugugcuggagg

SEQ ID NO: 2504707 - RNA, 16 nt, Human
gaguguggcuccccuc

SEQ ID NO: 2504708 - RNA, 16 nt, Human
gaguguggcugaggag

SEQ ID NO: 2504709 - RNA, 17 nt, Human
gaguguggcuccccucu

SEQ ID NO: 2504710 - RNA, 21 nt, Human
gagugggguuaucucuguguu

SEQ ID NO: 2504711 - RNA, 21 nt, Human
gagugaagaggggcagcccuu

SEQ ID NO: 2504712 - RNA, 17 nt, Human
gagugacagaggcagcc

SEQ ID NO: 2504713 - RNA, 13 nt, Human
gagugggugaaua

SEQ ID NO: 2504714 - RNA, 15 nt, Human
gaguggguugauuuc

SEQ ID NO: 2504715 - RNA, 18 nt, Human
gaguguacuuaacuauuc

SEQ ID NO: 2504716 - RNA, 17 nt, Human
gaguguaagugugagua

SEQ ID NO: 2504717 - RNA, 20 nt, Human
gaguguaagugugaguaaga

SEQ ID NO: 2504718 - RNA, 16 nt, Human
gaguggucagaacaga

SEQ ID NO: 2504719 - RNA, 21 nt, Human
gaguggucuuucuggagaggu

SEQ ID NO: 2504720 - RNA, 19 nt, Human
gagugguggcucaugccug

SEQ ID NO: 2504721 - RNA, 14 nt, Human
gaguggucuuucug

SEQ ID NO: 2504722 - RNA, 14 nt, Human
gaguguaaguguga

SEQ ID NO: 2504723 - RNA, 20 nt, Human
gaguguagaagcauuccuuc

SEQ ID NO: 2504724 - RNA, 11 nt, Human
gaguguaguga

SEQ ID NO: 2504725 - RNA, 21 nt, Human
gaguguauguagggcauaaug

SEQ ID NO: 2504726 - RNA, 23 nt, Human
gaguguccuaggaguauccucau

SEQ ID NO: 2504727 - RNA, 16 nt, Human
gaguguagaagcauuc

SEQ ID NO: 2504728 - RNA, 15 nt, Human
gaguguagaagcauu

SEQ ID NO: 2504729 - RNA, 14 nt, Human
gaguguagaagcau

SEQ ID NO: 2504730 - RNA, 13 nt, Human
gaguguagaagca

SEQ ID NO: 2504731 - RNA, 13 nt, Human
gaguguacaagua

SEQ ID NO: 2504732 - RNA, 11 nt, Human
gaguguagaag

SEQ ID NO: 2504733 - RNA, 17 nt, Human
gaguuaagaccuggcag

SEQ ID NO: 2504734 - RNA, 21 nt, Human
gaguuaagaccuggcagcucu

SEQ ID NO: 2504735 - RNA, 19 nt, Human
gaguuacagcgagaggcag

SEQ ID NO: 2504736 - RNA, 18 nt, Human
gaguuacagcgagaggca

SEQ ID NO: 2504737 - RNA, 15 nt, Human
gaguuacagacaaag

SEQ ID NO: 2504738 - RNA, 13 nt, Human
gaguuacagacaa

SEQ ID NO: 2504739 - RNA, 20 nt, Human
gaguucaucuugaauuguaa

SEQ ID NO: 2504740 - RNA, 19 nt, Human
gaguucaucuugaauugua

SEQ ID NO: 2504741 - RNA, 14 nt, Human
gaguucaucuugaa

SEQ ID NO: 2504742 - RNA, 20 nt, Human
gaguucauacccuguuacca

SEQ ID NO: 2504743 - RNA, 22 nt, Human
gauaaauggcuuccuggcaaua

SEQ ID NO: 2504744 - RNA, 19 nt, Human
gauaacuagauggugcuga

SEQ ID NO: 2504745 - RNA, 18 nt, Human
gauaaaucagugguuauu

SEQ ID NO: 2504746 - RNA, 17 nt, Human
gaguugaagacagagcu

SEQ ID NO: 2504747 - RNA, 15 nt, Human
gaguugaagacagag

SEQ ID NO: 2504748 - RNA, 21 nt, Human
gaguugaagacagagcuacac

SEQ ID NO: 2504749 - RNA, 20 nt, Human
gaguuacagcgagaggcaga

SEQ ID NO: 2504750 - RNA, 23 nt, Human
gaguugacuugacagaacacugu

SEQ ID NO: 2504751 - RNA, 16 nt, Human
gaucacggcucacugc

SEQ ID NO: 2504752 - RNA, 15 nt, Human
gaucacggcucacug

SEQ ID NO: 2504753 - RNA, 23 nt, Human
gaucacaacgugcauugugcuuc

SEQ ID NO: 2504754 - RNA, 22 nt, Human
gaucacaacgugcauugugcuu

SEQ ID NO: 2504755 - RNA, 21 nt, Human
gaucacaacgugcauugugcu

SEQ ID NO: 2504756 - RNA, 20 nt, Human
gaucacaacgugcauugugc

SEQ ID NO: 2504757 - RNA, 19 nt, Human
gaucacagagacauuccuc

SEQ ID NO: 2504758 - RNA, 17 nt, Human
gaucacagagacauucc

SEQ ID NO: 2504759 - RNA, 16 nt, Human
gaucacagcagcuucu

SEQ ID NO: 2504760 - RNA, 13 nt, Human
gaucacagaggcu

SEQ ID NO: 2504761 - RNA, 22 nt, Human
gaucacuuucucaguuuucaua

SEQ ID NO: 2504762 - RNA, 15 nt, Human
gaucacuuguuguuu

SEQ ID NO: 2504763 - RNA, 18 nt, Human
gaucacuggagcccagga

SEQ ID NO: 2504764 - RNA, 15 nt, Human
gaucagaaauacaga

SEQ ID NO: 2504765 - RNA, 14 nt, Human
gaucagaaauacag

SEQ ID NO: 2504766 - RNA, 17 nt, Human
gaucacuuguuguuuua

SEQ ID NO: 2504767 - RNA, 18 nt, Human
gaucacggcucacugcag

SEQ ID NO: 2504768 - RNA, 17 nt, Human
gaucacuggagcccagg

SEQ ID NO: 2504769 - RNA, 22 nt, Human
gauauaagugcuguauaaaauc

SEQ ID NO: 2504770 - RNA, 21 nt, Human
gauauaagugcuguauaaaau

SEQ ID NO: 2504771 - RNA, 19 nt, Human
gauauaagugcuguauaaa

SEQ ID NO: 2504772 - RNA, 18 nt, Human
gauauaagugcuguauaa

SEQ ID NO: 2504773 - RNA, 15 nt, Human
gauauaagugugugu

SEQ ID NO: 2504774 - RNA, 23 nt, Human
gauauaagugcuguauaaaauca

SEQ ID NO: 2504775 - RNA, 15 nt, Human
gauaucuugaaauga

SEQ ID NO: 2504776 - RNA, 14 nt, Human
gauaugaaaaauau

SEQ ID NO: 2504777 - RNA, 17 nt, Human
gauaucuugaaaugaaa

SEQ ID NO: 2504778 - RNA, 15 nt, Human
gauaugaaaaauaug

SEQ ID NO: 2504779 - RNA, 18 nt, Human
gaucacaacgugcauugu

SEQ ID NO: 2504780 - RNA, 17 nt, Human
gaucacaacgugcauug

SEQ ID NO: 2504781 - RNA, 16 nt, Human
gaucacaacgugcauu

SEQ ID NO: 2504782 - RNA, 15 nt, Human
gaucacaacgugcau

SEQ ID NO: 2504783 - RNA, 13 nt, Human
gaucacaaaaaca

SEQ ID NO: 2504784 - RNA, 17 nt, Human
gauaacuagauggugcu

SEQ ID NO: 2504785 - RNA, 21 nt, Human
gauaugaguuguuuucagacu

SEQ ID NO: 2504786 - RNA, 21 nt, Human
gauaacuuagguggcaagcug

SEQ ID NO: 2504787 - RNA, 21 nt, Human
gauaacugcaauuuuaauuga

SEQ ID NO: 2504788 - RNA, 18 nt, Human
gauaacuguuauuuauaa

SEQ ID NO: 2504789 - RNA, 17 nt, Human
gauaagaaugcugguuu

SEQ ID NO: 2504790 - RNA, 20 nt, Human
gauacaggaaaagcugcuga

SEQ ID NO: 2504791 - RNA, 22 nt, Human
gauaagaaccuuuugagugccu

SEQ ID NO: 2504792 - RNA, 18 nt, Human
gauaacugcaauuuuaau

SEQ ID NO: 2504793 - RNA, 17 nt, Human
gauaacuguuauuuaua

SEQ ID NO: 2504794 - RNA, 20 nt, Human
gauaacuagauggugcugag

SEQ ID NO: 2504795 - RNA, 11 nt, Human
gauaacucucc

SEQ ID NO: 2504796 - RNA, 23 nt, Human
gauacaggaaaagcugcugacag

SEQ ID NO: 2504797 - RNA, 21 nt, Human
gauacaggaaaagcugcugac

SEQ ID NO: 2504798 - RNA, 14 nt, Human
gauagaugugugga

SEQ ID NO: 2504799 - RNA, 22 nt, Human
gauagauguguggacacauugg

SEQ ID NO: 2504800 - RNA, 17 nt, Human
gauaagaccaccaccuc

SEQ ID NO: 2504801 - RNA, 22 nt, Human
gauaagaaugcugguuuuccua

SEQ ID NO: 2504802 - RNA, 22 nt, Human
gauagccaaggccaaaggaagc

SEQ ID NO: 2504803 - RNA, 14 nt, Human
gauagccaaggcca

SEQ ID NO: 2504804 - RNA, 15 nt, Human
gauagcacagacccu

SEQ ID NO: 2504805 - RNA, 16 nt, Human
gauagcacagacccug

SEQ ID NO: 2504806 - RNA, 23 nt, Human
gauagcaaagcgacguuagucgu

SEQ ID NO: 2504807 - RNA, 20 nt, Human
gauagcaagugaauuuuucu

SEQ ID NO: 2504808 - RNA, 16 nt, Human
gauauaaauggcuggu

SEQ ID NO: 2504809 - RNA, 21 nt, Human
gauauaaaugcaauauuaaug

SEQ ID NO: 2504810 - RNA, 22 nt, Human
gauauaaauauauauaaauaua

SEQ ID NO: 2504811 - RNA, 17 nt, Human
gauauaaauauauauaa

SEQ ID NO: 2504812 - RNA, 16 nt, Human
gauauaaauauauaua

SEQ ID NO: 2504813 - RNA, 15 nt, Human
gauauaaauauauau

SEQ ID NO: 2504814 - RNA, 13 nt, Human
gauauaaauauau

SEQ ID NO: 2504815 - RNA, 19 nt, Human
gauauaacuauugcccagg

SEQ ID NO: 2504816 - RNA, 15 nt, Human
gauauaaauggcugg

SEQ ID NO: 2504817 - RNA, 16 nt, Human
gauauaagugcuguau

SEQ ID NO: 2504818 - RNA, 14 nt, Human
gauauaagugcugu

SEQ ID NO: 2504819 - RNA, 20 nt, Human
gauagcuaacauuuuaaaua

SEQ ID NO: 2504820 - RNA, 18 nt, Human
gauagcuaacauuuuaaa

SEQ ID NO: 2504821 - RNA, 20 nt, Human
gauagccuuccguaacccaa

SEQ ID NO: 2504822 - RNA, 16 nt, Human
gauagcuaacauuuua

SEQ ID NO: 2504823 - RNA, 22 nt, Human
gauagcuaacauuuuaaauaaa

SEQ ID NO: 2504824 - RNA, 20 nt, Human
gauagcuuuauuuuuuaagu

SEQ ID NO: 2504825 - RNA, 23 nt, Human
gauagcuucaccccaaucccagc

SEQ ID NO: 2504826 - RNA, 17 nt, Human
gaggggguggccuccca

SEQ ID NO: 2504827 - RNA, 14 nt, Human
gagggguaggcaga

SEQ ID NO: 2504828 - RNA, 18 nt, Human
gagggggcuugaagccaa

SEQ ID NO: 2504829 - RNA, 18 nt, Human
gagggguaggcagagccu

SEQ ID NO: 2504830 - RNA, 21 nt, Human
gagggggcuugaagccaaaga

SEQ ID NO: 2504831 - RNA, 16 nt, Human
gagggguaaaagcuga

SEQ ID NO: 2504832 - RNA, 20 nt, Human
gagggggccaccuccccagg

SEQ ID NO: 2504833 - RNA, 18 nt, Human
gagggggccaccucccca

SEQ ID NO: 2504834 - RNA, 17 nt, Human
gagggggcuugaagcca

SEQ ID NO: 2504835 - RNA, 21 nt, Human
gagggggcuauagcuacagga

SEQ ID NO: 2504836 - RNA, 22 nt, Human
gagggggccaccuccccaggcc

SEQ ID NO: 2504837 - RNA, 16 nt, Human
gaggguaauaaacuua

SEQ ID NO: 2504838 - RNA, 23 nt, Human
gagggguugccacaggccucccu

SEQ ID NO: 2504839 - RNA, 22 nt, Human
gagggguugccacaggccuccc

SEQ ID NO: 2504840 - RNA, 18 nt, Human
gagggguugccacaggcc

SEQ ID NO: 2504841 - RNA, 17 nt, Human
gagggguugccacaggc

SEQ ID NO: 2504842 - RNA, 13 nt, Human
gaggguaaggcug

SEQ ID NO: 2504843 - RNA, 18 nt, Human
gagggguguggcaguggu

SEQ ID NO: 2504844 - RNA, 17 nt, Human
gagggguguggcagugg

SEQ ID NO: 2504845 - RNA, 21 nt, Human
gagggguguggcuccuuccca

SEQ ID NO: 2504846 - RNA, 14 nt, Human
gagggguguggcag

SEQ ID NO: 2504847 - RNA, 18 nt, Human
gaggggucuccaggagga

SEQ ID NO: 2504848 - RNA, 15 nt, Human
gagggcacacacugu

SEQ ID NO: 2504849 - RNA, 12 nt, Human
gagggcagcagg

SEQ ID NO: 2504850 - RNA, 14 nt, Human
gagggcagcagggc

SEQ ID NO: 2504851 - RNA, 15 nt, Human
gagggcagcagggcu

SEQ ID NO: 2504852 - RNA, 12 nt, Human
gagggcacacac

SEQ ID NO: 2504853 - RNA, 22 nt, Human
gagggcaagggccaugcugaag

SEQ ID NO: 2504854 - RNA, 18 nt, Human
gagggcaagggccaugcu

SEQ ID NO: 2504855 - RNA, 19 nt, Human
gagggauuggccgcuuggc

SEQ ID NO: 2504856 - RNA, 21 nt, Human
gagggauucugguuccagggu

SEQ ID NO: 2504857 - RNA, 18 nt, Human
gagggauucugguuccag

SEQ ID NO: 2504858 - RNA, 20 nt, Human
gagggaugcugccugaguca

SEQ ID NO: 2504859 - RNA, 14 nt, Human
gagggauggacuga

SEQ ID NO: 2504860 - RNA, 22 nt, Human
gagggaugaggugcugggaggg

SEQ ID NO: 2504861 - RNA, 19 nt, Human
gagggauggcggguggggg

SEQ ID NO: 2504862 - RNA, 18 nt, Human
gagggauggcgggugggg

SEQ ID NO: 2504863 - RNA, 13 nt, Human
gagggagaagaag

SEQ ID NO: 2504864 - RNA, 17 nt, Human
gaggggcugugggcgug

SEQ ID NO: 2504865 - RNA, 16 nt, Human
gagggccacaugggag

SEQ ID NO: 2504866 - RNA, 18 nt, Human
gagggcaugcgcacaagg

SEQ ID NO: 2504867 - RNA, 22 nt, Human
gagggcaugcgcacaaggcuga

SEQ ID NO: 2504868 - RNA, 23 nt, Human
gaggggcucucagcucagcgcca

SEQ ID NO: 2504869 - RNA, 18 nt, Human
gagggccaagacuuggca

SEQ ID NO: 2504870 - RNA, 17 nt, Human
gaggggcuuucuggaga

SEQ ID NO: 2504871 - RNA, 11 nt, Human
gagggcaggga

SEQ ID NO: 2504872 - RNA, 16 nt, Human
gagggcaguguuuccu

SEQ ID NO: 2504873 - RNA, 16 nt, Human
gagggcagcagggcua

SEQ ID NO: 2504874 - RNA, 19 nt, Human
gagggcagcagggcuaccc

SEQ ID NO: 2504875 - RNA, 20 nt, Human
gagggagggcuccagacaca

SEQ ID NO: 2504876 - RNA, 17 nt, Human
gagggaggaggccaccu

SEQ ID NO: 2504877 - RNA, 20 nt, Human
gagggagggggaaggcaggg

SEQ ID NO: 2504878 - RNA, 16 nt, Human
gagggagugacagagg

SEQ ID NO: 2504879 - RNA, 18 nt, Human
gagggagugacagaggca

SEQ ID NO: 2504880 - RNA, 22 nt, Human
gagggagugacagaggcagccc

SEQ ID NO: 2504881 - RNA, 21 nt, Human
gagggagugacagaggcagcc

SEQ ID NO: 2504882 - RNA, 12 nt, Human
gagggaggggcc

SEQ ID NO: 2504883 - RNA, 13 nt, Human
gagggagggggcu

SEQ ID NO: 2504884 - RNA, 14 nt, Human
gagggaucacaggg

SEQ ID NO: 2504885 - RNA, 15 nt, Human
gagggaucacagggc

SEQ ID NO: 2504886 - RNA, 17 nt, Human
gagggaugaugccacac

SEQ ID NO: 2504887 - RNA, 23 nt, Human
gagggaucacagggccccagaag

SEQ ID NO: 2504888 - RNA, 18 nt, Human
gagggaugaggugcuggg

SEQ ID NO: 2504889 - RNA, 15 nt, Human
gagggaugcugccug

SEQ ID NO: 2504890 - RNA, 17 nt, Human
gagggaugcugccugag

SEQ ID NO: 2504891 - RNA, 22 nt, Human
gaggcuggugcuguggccaggg

SEQ ID NO: 2504892 - RNA, 20 nt, Human
gaggcuggugcuguggccag

SEQ ID NO: 2504893 - RNA, 20 nt, Human
gaggcugggcucccuuccca

SEQ ID NO: 2504894 - RNA, 23 nt, Human
gaggcuguaggacucgcagucag

SEQ ID NO: 2504895 - RNA, 12 nt, Human
gaggcuguagga

SEQ ID NO: 2504896 - RNA, 12 nt, Human
gaggcuguccug

SEQ ID NO: 2504897 - RNA, 14 nt, Human
gaggcuguccugua

SEQ ID NO: 2504898 - RNA, 20 nt, Human
gaggcugucuucucaggcuc

SEQ ID NO: 2504899 - RNA, 21 nt, Human
gaggcugucuucucaggcucu

SEQ ID NO: 2504900 - RNA, 23 nt, Human
gaggcuguggucacagcggaggu

SEQ ID NO: 2504901 - RNA, 22 nt, Human
gaggcugucuucucaggcucug

SEQ ID NO: 2504902 - RNA, 21 nt, Human
gagggagacacuggccccuca

SEQ ID NO: 2504903 - RNA, 13 nt, Human
gagggagaaggga

SEQ ID NO: 2504904 - RNA, 23 nt, Human
gagggagagguggagcaaaguga

SEQ ID NO: 2504905 - RNA, 14 nt, Human
gagggagaggugga

SEQ ID NO: 2504906 - RNA, 13 nt, Human
gagggagagggag

SEQ ID NO: 2504907 - RNA, 22 nt, Human
gagggagagagagagagagagg

SEQ ID NO: 2504908 - RNA, 16 nt, Human
gagggagagagagaga

SEQ ID NO: 2504909 - RNA, 15 nt, Human
gagggagagagagag

SEQ ID NO: 2504910 - RNA, 13 nt, Human
gagggagagagag

SEQ ID NO: 2504911 - RNA, 14 nt, Human
gagggagaagcaug

SEQ ID NO: 2504912 - RNA, 20 nt, Human
gagggagcauagaaggcagg

SEQ ID NO: 2504913 - RNA, 20 nt, Human
gagggagcagacaggaggaa

SEQ ID NO: 2504914 - RNA, 12 nt, Human
gagggagcagac

SEQ ID NO: 2504915 - RNA, 12 nt, Human
gagggagaugga

SEQ ID NO: 2504916 - RNA, 22 nt, Human
gagggagcaaguccuucccuuu

SEQ ID NO: 2504917 - RNA, 19 nt, Human
gagggagggcuccagacac

SEQ ID NO: 2504918 - RNA, 13 nt, Human
gagggaggaggcc

SEQ ID NO: 2504919 - RNA, 12 nt, Human
gagggaggaggc

SEQ ID NO: 2504920 - RNA, 13 nt, Human
gagggaggaaucg

SEQ ID NO: 2504921 - RNA, 24 nt, Human
gagggagcauagaaggcaggugag

SEQ ID NO: 2504922 - RNA, 15 nt, Human
gagggagcuuagcca

SEQ ID NO: 2504923 - RNA, 21 nt, Human
gagguaaggaauaccuguccc

SEQ ID NO: 2504924 - RNA, 16 nt, Human
gagguaacagaacagc

SEQ ID NO: 2504925 - RNA, 15 nt, Human
gagguaacagaacag

SEQ ID NO: 2504926 - RNA, 14 nt, Human
gagguaacagaaca

SEQ ID NO: 2504927 - RNA, 13 nt, Human
gagguaacagaac

SEQ ID NO: 2504928 - RNA, 21 nt, Human
gaggguuuccaugggguagga

SEQ ID NO: 2504929 - RNA, 22 nt, Human
gagguaaaagugugagcaguga

SEQ ID NO: 2504930 - RNA, 21 nt, Human
gagguaacagaacagcuucag

SEQ ID NO: 2504931 - RNA, 18 nt, Human
gagguaacagaacagcuu

SEQ ID NO: 2504932 - RNA, 17 nt, Human
gagguaacagaacagcu

SEQ ID NO: 2504933 - RNA, 24 nt, Human
gagguaaggaauaccugucccccu

SEQ ID NO: 2504934 - RNA, 12 nt, Human
gaggguuccugu

SEQ ID NO: 2504935 - RNA, 20 nt, Human
gaggguuggguucaucugag

SEQ ID NO: 2504936 - RNA, 17 nt, Human
gaggguuguucuccuag

SEQ ID NO: 2504937 - RNA, 18 nt, Human
gaggguuguucuccuaga

SEQ ID NO: 2504938 - RNA, 15 nt, Human
gaggguugggcuggu

SEQ ID NO: 2504939 - RNA, 14 nt, Human
gaggguugggcugg

SEQ ID NO: 2504940 - RNA, 15 nt, Human
gaggguuagggaggg

SEQ ID NO: 2504941 - RNA, 13 nt, Human
gaggucagagccu

SEQ ID NO: 2504942 - RNA, 12 nt, Human
gaggucagagcc

SEQ ID NO: 2504943 - RNA, 23 nt, Human
gaggucaacagagaaggcaggaa

SEQ ID NO: 2504944 - RNA, 15 nt, Human
gaggucaagcccagg

SEQ ID NO: 2504945 - RNA, 16 nt, Human
gaggucaagcccagga

SEQ ID NO: 2504946 - RNA, 17 nt, Human
gaggucaagcccaggag

SEQ ID NO: 2504947 - RNA, 19 nt, Human
gaggucaagcccaggagga

SEQ ID NO: 2504948 - RNA, 20 nt, Human
gaggucaagcccaggaggac

SEQ ID NO: 2504949 - RNA, 19 nt, Human
gaggucaaggcugcaguga

SEQ ID NO: 2504950 - RNA, 24 nt, Human
gaggucaagcccaggaggacugcc

SEQ ID NO: 2504951 - RNA, 17 nt, Human
gaggucacuggaaaggg

SEQ ID NO: 2504952 - RNA, 16 nt, Human
gaggucacuggaaagg

SEQ ID NO: 2504953 - RNA, 15 nt, Human
gaggucacuggaaag

SEQ ID NO: 2504954 - RNA, 22 nt, Human
gaggucacauucaggaagauga

SEQ ID NO: 2504955 - RNA, 21 nt, Human
gaggucacauucaggaagaug

SEQ ID NO: 2504956 - RNA, 19 nt, Human
gaggucacauucaggaaga

SEQ ID NO: 2504957 - RNA, 16 nt, Human
gaggucacauucagga

SEQ ID NO: 2504958 - RNA, 16 nt, Human
gaggucaaguaagaag

SEQ ID NO: 2504959 - RNA, 21 nt, Human
gagguagcuuugagguggaag

SEQ ID NO: 2504960 - RNA, 21 nt, Human
gagguagguggaucaccugag

SEQ ID NO: 2504961 - RNA, 13 nt, Human
gagguaugagguc

SEQ ID NO: 2504962 - RNA, 23 nt, Human
gagguagaguuugaaggagguga

SEQ ID NO: 2504963 - RNA, 19 nt, Human
gagguagaguuugaaggag

SEQ ID NO: 2504964 - RNA, 18 nt, Human
gagguagaguuugaagga

SEQ ID NO: 2504965 - RNA, 17 nt, Human
gagguagaaaagauugg

SEQ ID NO: 2504966 - RNA, 17 nt, Human
gaggucaaggcugcagu

SEQ ID NO: 2504967 - RNA, 15 nt, Human
gaggucaacagagaa

SEQ ID NO: 2504968 - RNA, 16 nt, Human
gaggucaacagagaag

SEQ ID NO: 2504969 - RNA, 22 nt, Human
gaggucaacagagaaggcagga

SEQ ID NO: 2504970 - RNA, 19 nt, Human
gagguauuuaucuuuacuu

SEQ ID NO: 2504971 - RNA, 22 nt, Human
gagguauucaauauccuuugcc

SEQ ID NO: 2504972 - RNA, 22 nt, Human
gagggugucccaaaaagaaagg

SEQ ID NO: 2504973 - RNA, 21 nt, Human
gaggguggugaccucugccug

SEQ ID NO: 2504974 - RNA, 15 nt, Human
gagggugggaguggg

SEQ ID NO: 2504975 - RNA, 14 nt, Human
gaggguggugaccu

SEQ ID NO: 2504976 - RNA, 12 nt, Human
gaggguggaaua

SEQ ID NO: 2504977 - RNA, 20 nt, Human
gaggguggagacuaagcccu

SEQ ID NO: 2504978 - RNA, 13 nt, Human
gaggguggagacu

SEQ ID NO: 2504979 - RNA, 13 nt, Human
gaggguggcaggu

SEQ ID NO: 2504980 - RNA, 18 nt, Human
gagggugggagagcccag

SEQ ID NO: 2504981 - RNA, 19 nt, Human
gagggugggagagcccagc

SEQ ID NO: 2504982 - RNA, 21 nt, Human
gagggugaagugaagacaaug

SEQ ID NO: 2504983 - RNA, 15 nt, Human
gagggugagugcaag

SEQ ID NO: 2504984 - RNA, 14 nt, Human
gagggucugaggaa

SEQ ID NO: 2504985 - RNA, 13 nt, Human
gagggucugagga

SEQ ID NO: 2504986 - RNA, 23 nt, Human
gagggucuugguuccagccugcc

SEQ ID NO: 2504987 - RNA, 24 nt, Human
gagggucuggagaagcagugagcc

SEQ ID NO: 2504988 - RNA, 17 nt, Human
gaggguccuggcuccug

SEQ ID NO: 2504989 - RNA, 15 nt, Human
gagggucuggagaag

SEQ ID NO: 2504990 - RNA, 21 nt, Human
gaggguccuggcuccugaggg

SEQ ID NO: 2504991 - RNA, 15 nt, Human
gaggguccuggcucc

SEQ ID NO: 2504992 - RNA, 19 nt, Human
gaggguccccaccugggac

SEQ ID NO: 2504993 - RNA, 23 nt, Human
gagggucccaagcugggccccag

SEQ ID NO: 2504994 - RNA, 20 nt, Human
gagggucccaagcugggccc

SEQ ID NO: 2504995 - RNA, 19 nt, Human
gagggucccaagcugggcc

SEQ ID NO: 2504996 - RNA, 19 nt, Human
gagggucaggacugugacu

SEQ ID NO: 2504997 - RNA, 18 nt, Human
gagggucccaagcugggc

SEQ ID NO: 2504998 - RNA, 16 nt, Human
gagggucaggaaggau

SEQ ID NO: 2504999 - RNA, 13 nt, Human
gagggucagagag

SEQ ID NO: 2505000 - RNA, 15 nt, Human
gagggucagagagga

SEQ ID NO: 2505001 - RNA, 13 nt, Human
gagggucaggaag

SEQ ID NO: 2505002 - RNA, 15 nt, Human
gagggucaggaagga

SEQ ID NO: 2505003 - RNA, 18 nt, Human
gagcccuguggaugagcc

SEQ ID NO: 2505004 - RNA, 21 nt, Human
gagcccuguggaugagcccuc

SEQ ID NO: 2505005 - RNA, 22 nt, Human
gagcccuguggaugagcccuca

SEQ ID NO: 2505006 - RNA, 18 nt, Human
gagcccuuaucugugcuc

SEQ ID NO: 2505007 - RNA, 22 nt, Human
gagcccuguccugccuaaggcu

SEQ ID NO: 2505008 - RNA, 19 nt, Human
gagcccuuaucugugcuca

SEQ ID NO: 2505009 - RNA, 13 nt, Human
gaggaucucuuga

SEQ ID NO: 2505010 - RNA, 22 nt, Human
gaggaucucuugagccugggag

SEQ ID NO: 2505011 - RNA, 20 nt, Human
gaggaucacuggagcccagg

SEQ ID NO: 2505012 - RNA, 19 nt, Human
gaggaucacuggagcccag

SEQ ID NO: 2505013 - RNA, 21 nt, Human
gaggaugaauguaugugcacu

SEQ ID NO: 2505014 - RNA, 13 nt, Human
gaggaucuggaga

SEQ ID NO: 2505015 - RNA, 17 nt, Human
gaggaucccucucugga

SEQ ID NO: 2505016 - RNA, 16 nt, Human
gaggaucucuugagcc

SEQ ID NO: 2505017 - RNA, 19 nt, Human
gaggaucucuugagccugg

SEQ ID NO: 2505018 - RNA, 19 nt, Human
gaggauggccagugucugu

SEQ ID NO: 2505019 - RNA, 16 nt, Human
gaggauggccaguguc

SEQ ID NO: 2505020 - RNA, 15 nt, Human
gaggauggccagugu

SEQ ID NO: 2505021 - RNA, 20 nt, Human
gaggauuuaagggauggaaa

SEQ ID NO: 2505022 - RNA, 22 nt, Human
gaggauuuaagggauggaaaag

SEQ ID NO: 2505023 - RNA, 20 nt, Human
gaggauugcuugagcucagg

SEQ ID NO: 2505024 - RNA, 17 nt, Human
gaggaugagagcccaga

SEQ ID NO: 2505025 - RNA, 16 nt, Human
gaggaugagagcccag

SEQ ID NO: 2505026 - RNA, 15 nt, Human
gaggaugagagccca

SEQ ID NO: 2505027 - RNA, 14 nt, Human
gaggaugagagccc

SEQ ID NO: 2505028 - RNA, 20 nt, Human
gaggaugagagcccagaggu

SEQ ID NO: 2505029 - RNA, 18 nt, Human
gaggaugagagcccagag

SEQ ID NO: 2505030 - RNA, 22 nt, Human
gaggaugagcucuacccagggc

SEQ ID NO: 2505031 - RNA, 21 nt, Human
gaggaugcagagucagcagaa

SEQ ID NO: 2505032 - RNA, 13 nt, Human
gaggaugagcugg

SEQ ID NO: 2505033 - RNA, 12 nt, Human
gaggauggagag

SEQ ID NO: 2505034 - RNA, 13 nt, Human
gaggauggagaga

SEQ ID NO: 2505035 - RNA, 14 nt, Human
gaggauggagagag

SEQ ID NO: 2505036 - RNA, 14 nt, Human
gaggauggccagug

SEQ ID NO: 2505037 - RNA, 15 nt, Human
gaggauggagagagg

SEQ ID NO: 2505038 - RNA, 19 nt, Human
gaggcagagaaagaagaga

SEQ ID NO: 2505039 - RNA, 17 nt, Human
gaggcagagaaagaaga

SEQ ID NO: 2505040 - RNA, 16 nt, Human
gaggcagagaaagaag

SEQ ID NO: 2505041 - RNA, 22 nt, Human
gaggcagacuucccugaaugua

SEQ ID NO: 2505042 - RNA, 19 nt, Human
gaggcagacagcagcucag

SEQ ID NO: 2505043 - RNA, 20 nt, Human
gaggcagacagcagcucagg

SEQ ID NO: 2505044 - RNA, 21 nt, Human
gaggcagacagcagcucaggc

SEQ ID NO: 2505045 - RNA, 22 nt, Human
gaggcagacagcagcucaggca

SEQ ID NO: 2505046 - RNA, 13 nt, Human
gaggcaagagaau

SEQ ID NO: 2505047 - RNA, 17 nt, Human
gaggauuuuuuucugag

SEQ ID NO: 2505048 - RNA, 13 nt, Human
gaggauuuugagu

SEQ ID NO: 2505049 - RNA, 15 nt, Human
gaggauuucaagccu

SEQ ID NO: 2505050 - RNA, 17 nt, Human
gaggauuucaagccugc

SEQ ID NO: 2505051 - RNA, 22 nt, Human
gaggcaaugggagcugaggcca

SEQ ID NO: 2505052 - RNA, 19 nt, Human
gaggcaaugucaggaacag

SEQ ID NO: 2505053 - RNA, 13 nt, Human
gaggcaagcccug

SEQ ID NO: 2505054 - RNA, 15 nt, Human
gaggcagagagcggu

SEQ ID NO: 2505055 - RNA, 13 nt, Human
gaggcagagagcg

SEQ ID NO: 2505056 - RNA, 12 nt, Human
gaggcagagagc

SEQ ID NO: 2505057 - RNA, 21 nt, Human
gaggcagagaaagaagagaca

SEQ ID NO: 2505058 - RNA, 11 nt, Human
gaggcagagag

SEQ ID NO: 2505059 - RNA, 14 nt, Human
gaggcagaggacag

SEQ ID NO: 2505060 - RNA, 13 nt, Human
gaggcagaggaca

SEQ ID NO: 2505061 - RNA, 11 nt, Human
gaggcagagga

SEQ ID NO: 2505062 - RNA, 22 nt, Human
gaggcagagagcggucucaggc

SEQ ID NO: 2505063 - RNA, 18 nt, Human
gaggcagccccauucugc

SEQ ID NO: 2505064 - RNA, 19 nt, Human
gaggcagccccauucugcc

SEQ ID NO: 2505065 - RNA, 9 nt, Human
gaggcaggg

SEQ ID NO: 2505066 - RNA, 20 nt, Human
gaggcagccccauucugccu

SEQ ID NO: 2505067 - RNA, 21 nt, Human
gaggcagccccauucugccug

SEQ ID NO: 2505068 - RNA, 14 nt, Human
gaggcaggcuccag

SEQ ID NO: 2505069 - RNA, 22 nt, Human
gaggcagggaaguccccaggcc

SEQ ID NO: 2505070 - RNA, 14 nt, Human
gaggcagggaaguc

SEQ ID NO: 2505071 - RNA, 15 nt, Human
gaggcagggagggga

SEQ ID NO: 2505072 - RNA, 17 nt, Human
gaggcagggaggggacu

SEQ ID NO: 2505073 - RNA, 23 nt, Human
gaggccaugggccuccugugugu

SEQ ID NO: 2505074 - RNA, 21 nt, Human
gaggccaugggccuccugugu

SEQ ID NO: 2505075 - RNA, 20 nt, Human
gaggccaugggccuccugug

SEQ ID NO: 2505076 - RNA, 18 nt, Human
gaggccaugggccuccug

SEQ ID NO: 2505077 - RNA, 17 nt, Human
gaggccaugggccuccu

SEQ ID NO: 2505078 - RNA, 14 nt, Human
gaggccaugggccu

SEQ ID NO: 2505079 - RNA, 16 nt, Human
gaggcagggaggggac

SEQ ID NO: 2505080 - RNA, 15 nt, Human
gaggcagggccuugc

SEQ ID NO: 2505081 - RNA, 17 nt, Human
gaggcagggccuugccc

SEQ ID NO: 2505082 - RNA, 18 nt, Human
gaggcagggccuugccca

SEQ ID NO: 2505083 - RNA, 20 nt, Human
gaggcagggccuugcccaga

SEQ ID NO: 2505084 - RNA, 21 nt, Human
gaggcagggccuugcccagag

SEQ ID NO: 2505085 - RNA, 16 nt, Human
gaggcccagagggccu

SEQ ID NO: 2505086 - RNA, 15 nt, Human
gaggcccagagggcc

SEQ ID NO: 2505087 - RNA, 23 nt, Human
gaggccauguuccaauaaacagg

SEQ ID NO: 2505088 - RNA, 19 nt, Human
gaggcccagagggccugca

SEQ ID NO: 2505089 - RNA, 14 nt, Human
gaggcccagagggc

SEQ ID NO: 2505090 - RNA, 13 nt, Human
gaggcccagaggg

SEQ ID NO: 2505091 - RNA, 11 nt, Human
gaggcccagag

SEQ ID NO: 2505092 - RNA, 19 nt, Human
gaggccauugugugagccu

SEQ ID NO: 2505093 - RNA, 20 nt, Human
gaggccaugauucgcccaaa

SEQ ID NO: 2505094 - RNA, 23 nt, Human
gaggccaugauucgcccaaagcc

SEQ ID NO: 2505095 - RNA, 14 nt, Human
gaggcccccagccc

SEQ ID NO: 2505096 - RNA, 19 nt, Human
gaggccccagccucccuga

SEQ ID NO: 2505097 - RNA, 22 nt, Human
gaggccccagccucccugaagc

SEQ ID NO: 2505098 - RNA, 12 nt, Human
gaggccccagcc

SEQ ID NO: 2505099 - RNA, 13 nt, Human
gaggccccagccu

SEQ ID NO: 2505100 - RNA, 14 nt, Human
gaggccccacuggg

SEQ ID NO: 2505101 - RNA, 18 nt, Human
gaggcccaguucacccug

SEQ ID NO: 2505102 - RNA, 20 nt, Human
gaggcccaguucacccugau

SEQ ID NO: 2505103 - RNA, 19 nt, Human
gaggccccaaaggaaaaag

SEQ ID NO: 2505104 - RNA, 14 nt, Human
gaggccccaaagga

SEQ ID NO: 2505105 - RNA, 13 nt, Human
gaggccccaaagg

SEQ ID NO: 2505106 - RNA, 13 nt, Human
gaggcccagggag

SEQ ID NO: 2505107 - RNA, 13 nt, Human
gaggcccaguuca

SEQ ID NO: 2505108 - RNA, 12 nt, Human
gaggcccaggga

SEQ ID NO: 2505109 - RNA, 20 nt, Human
gaggcccuucucuccagccc

SEQ ID NO: 2505110 - RNA, 15 nt, Human
gaggcccuucucucc

SEQ ID NO: 2505111 - RNA, 21 nt, Human
gaggcccuucucuccagcccc

SEQ ID NO: 2505112 - RNA, 23 nt, Human
gaggccccagccucccugaagcc

SEQ ID NO: 2505113 - RNA, 16 nt, Human
gaggcugggcucccuu

SEQ ID NO: 2505114 - RNA, 16 nt, Human
gaggcuggcuggggcc

SEQ ID NO: 2505115 - RNA, 13 nt, Human
gaggcuggcuggg

SEQ ID NO: 2505116 - RNA, 12 nt, Human
gaggcuggcugg

SEQ ID NO: 2505117 - RNA, 12 nt, Human
gaggcuggcagg

SEQ ID NO: 2505118 - RNA, 13 nt, Human
gaggcuggcaggu

SEQ ID NO: 2505119 - RNA, 13 nt, Human
gaggcuggcacag

SEQ ID NO: 2505120 - RNA, 23 nt, Human
gaggcuggauccuagccuuaucc

SEQ ID NO: 2505121 - RNA, 16 nt, Human
gaggcuggaggcaggg

SEQ ID NO: 2505122 - RNA, 17 nt, Human
gaggcuggaggcagggc

SEQ ID NO: 2505123 - RNA, 18 nt, Human
gaggcuggaggcagggcc

SEQ ID NO: 2505124 - RNA, 19 nt, Human
gaggcuggaggcagggccu

SEQ ID NO: 2505125 - RNA, 15 nt, Human
gaggcuggagcuggc

SEQ ID NO: 2505126 - RNA, 15 nt, Human
gaggcuggaggcagg

SEQ ID NO: 2505127 - RNA, 14 nt, Human
gaggcuggaggcag

SEQ ID NO: 2505128 - RNA, 19 nt, Human
gaggcggacguuccagccg

SEQ ID NO: 2505129 - RNA, 14 nt, Human
gaggcgcgggggcc

SEQ ID NO: 2505130 - RNA, 18 nt, Human
gaggcggacguuccagcc

SEQ ID NO: 2505131 - RNA, 21 nt, Human
gaggcgcaugaauuugugaag

SEQ ID NO: 2505132 - RNA, 22 nt, Human
gaggcgcacuuuccuccuggca

SEQ ID NO: 2505133 - RNA, 24 nt, Human
gaggccucuuggaccucugcucug

SEQ ID NO: 2505134 - RNA, 15 nt, Human
gaggccuugagaggc

SEQ ID NO: 2505135 - RNA, 12 nt, Human
gaggccuugcuc

SEQ ID NO: 2505136 - RNA, 19 nt, Human
gaggccuucucugaaggac

SEQ ID NO: 2505137 - RNA, 18 nt, Human
gaggccuucucugaagga

SEQ ID NO: 2505138 - RNA, 18 nt, Human
gaggccuaccccgcagac

SEQ ID NO: 2505139 - RNA, 19 nt, Human
gaggccuaaaaguaaacau

SEQ ID NO: 2505140 - RNA, 18 nt, Human
gaggccuacucuuccauc

SEQ ID NO: 2505141 - RNA, 23 nt, Human
gaggccuauaaugaagcuuuaua

SEQ ID NO: 2505142 - RNA, 22 nt, Human
gaggccucucauuccagaggaa

SEQ ID NO: 2505143 - RNA, 16 nt, Human
gaggccucaguggacu

SEQ ID NO: 2505144 - RNA, 16 nt, Human
gaggccuucucugaag

SEQ ID NO: 2505145 - RNA, 22 nt, Human
gaggccucuuggaccucugcuc

SEQ ID NO: 2505146 - RNA, 21 nt, Human
gaggccucuuggaccucugcu

SEQ ID NO: 2505147 - RNA, 19 nt, Human
gaggccucuuggaccucug

SEQ ID NO: 2505148 - RNA, 18 nt, Human
gaggccucuuggaccucu

SEQ ID NO: 2505149 - RNA, 21 nt, Human
gaggccucaguggacuuucca

SEQ ID NO: 2505150 - RNA, 17 nt, Human
ggaucccucauccucau

SEQ ID NO: 2505151 - RNA, 13 nt, Human
ggaucccucaucc

SEQ ID NO: 2505152 - RNA, 13 nt, Human
ggaucccucaucu

SEQ ID NO: 2505153 - RNA, 18 nt, Human
ggaucccucaucuguccc

SEQ ID NO: 2505154 - RNA, 22 nt, Human
ggaucccucaucugucccuccg

SEQ ID NO: 2505155 - RNA, 17 nt, Human
ggaucccucccccccau

SEQ ID NO: 2505156 - RNA, 22 nt, Human
ggaucccucauccucauaccca

SEQ ID NO: 2505157 - RNA, 15 nt, Human
ggauauaggagagga

SEQ ID NO: 2505158 - RNA, 14 nt, Human
ggauauaaauauau

SEQ ID NO: 2505159 - RNA, 16 nt, Human
ggauauaguuuuacuu

SEQ ID NO: 2505160 - RNA, 20 nt, Human
ggauauaguuuuacuuuuaa

SEQ ID NO: 2505161 - RNA, 13 nt, Human
ggauauaaauaua

SEQ ID NO: 2505162 - RNA, 18 nt, Human
ggauaguugcuccgccuc

SEQ ID NO: 2505163 - RNA, 16 nt, Human
ggauaugcuuaguaau

SEQ ID NO: 2505164 - RNA, 13 nt, Human
ggauauuuucaaa

SEQ ID NO: 2505165 - RNA, 22 nt, Human
ggaucaaaccccgaccaccugc

SEQ ID NO: 2505166 - RNA, 18 nt, Human
ggauacaaaagcauguga

SEQ ID NO: 2505167 - RNA, 21 nt, Human
ggauacgcaucagacagaugg

SEQ ID NO: 2505168 - RNA, 21 nt, Human
ggauacugcagggccaggacu

SEQ ID NO: 2505169 - RNA, 16 nt, Human
ggauacugcagggcca

SEQ ID NO: 2505170 - RNA, 15 nt, Human
ggauacugcagggcc

SEQ ID NO: 2505171 - RNA, 18 nt, Human
ggauacucugucagaugg

SEQ ID NO: 2505172 - RNA, 13 nt, Human
ggauagaugcugg

SEQ ID NO: 2505173 - RNA, 14 nt, Human
ggauagaugcuggc

SEQ ID NO: 2505174 - RNA, 21 nt, Human
ggauaggaguucacuucaucu

SEQ ID NO: 2505175 - RNA, 16 nt, Human
ggauacugcccggggc

SEQ ID NO: 2505176 - RNA, 23 nt, Human
ggagugaguugauagcacagacc

SEQ ID NO: 2505177 - RNA, 12 nt, Human
ggagugcaguga

SEQ ID NO: 2505178 - RNA, 14 nt, Human
ggagugcagugagc

SEQ ID NO: 2505179 - RNA, 18 nt, Human
ggagugcagggaggagag

SEQ ID NO: 2505180 - RNA, 15 nt, Human
ggagugcagggagga

SEQ ID NO: 2505181 - RNA, 20 nt, Human
ggagugcaaugacacagucu

SEQ ID NO: 2505182 - RNA, 13 nt, Human
ggauccuccaggu

SEQ ID NO: 2505183 - RNA, 20 nt, Human
ggauccuauucucaccagga

SEQ ID NO: 2505184 - RNA, 14 nt, Human
ggauccuauucuca

SEQ ID NO: 2505185 - RNA, 20 nt, Human
ggauccuagccuuauccucu

SEQ ID NO: 2505186 - RNA, 18 nt, Human
ggauccuagccuuauccu

SEQ ID NO: 2505187 - RNA, 23 nt, Human
ggauccuauucucaccaggaagg

SEQ ID NO: 2505188 - RNA, 21 nt, Human
ggauccuauucucaccaggaa

SEQ ID NO: 2505189 - RNA, 12 nt, Human
ggauccuccagg

SEQ ID NO: 2505190 - RNA, 21 nt, Human
ggauccgacugcuuuggaccu

SEQ ID NO: 2505191 - RNA, 19 nt, Human
ggauccgacugcuuuggac

SEQ ID NO: 2505192 - RNA, 17 nt, Human
ggauccgacugcuuugg

SEQ ID NO: 2505193 - RNA, 18 nt, Human
ggaucccucugggcacug

SEQ ID NO: 2505194 - RNA, 17 nt, Human
ggaugcagccucacagu

SEQ ID NO: 2505195 - RNA, 16 nt, Human
ggaugcagccucacag

SEQ ID NO: 2505196 - RNA, 21 nt, Human
ggaugauuggaggggggaggu

SEQ ID NO: 2505197 - RNA, 23 nt, Human
ggaugcacagaguuguuacauuu

SEQ ID NO: 2505198 - RNA, 19 nt, Human
ggauuacaagcgugagcca

SEQ ID NO: 2505199 - RNA, 17 nt, Human
ggauggaaugauggguc

SEQ ID NO: 2505200 - RNA, 16 nt, Human
ggauggagagagggga

SEQ ID NO: 2505201 - RNA, 21 nt, Human
ggaugcuccucccuucucuac

SEQ ID NO: 2505202 - RNA, 19 nt, Human
ggauggaaaaggaagacua

SEQ ID NO: 2505203 - RNA, 15 nt, Human
ggaugcuuguacaua

SEQ ID NO: 2505204 - RNA, 16 nt, Human
ggaugcuaacaucuaa

SEQ ID NO: 2505205 - RNA, 16 nt, Human
ggaugcggauggccgg

SEQ ID NO: 2505206 - RNA, 14 nt, Human
ggaugcugccugag

SEQ ID NO: 2505207 - RNA, 21 nt, Human
ggaugcuugccuagggccugg

SEQ ID NO: 2505208 - RNA, 22 nt, Human
ggaugcagugcucgcuguugcu

SEQ ID NO: 2505209 - RNA, 14 nt, Human
ggaugcagugcucg

SEQ ID NO: 2505210 - RNA, 16 nt, Human
ggaugcauggagauag

SEQ ID NO: 2505211 - RNA, 21 nt, Human
ggaugccuuccccugggcccu

SEQ ID NO: 2505212 - RNA, 15 nt, Human
ggaugcauuucucug

SEQ ID NO: 2505213 - RNA, 21 nt, Human
ggaugcauguuuuccagcucc

SEQ ID NO: 2505214 - RNA, 19 nt, Human
ggaugccaagaaguuuaag

SEQ ID NO: 2505215 - RNA, 19 nt, Human
ggaugcagccucacagucc

SEQ ID NO: 2505216 - RNA, 17 nt, Human
ggaugauuggauuauuc

SEQ ID NO: 2505217 - RNA, 16 nt, Human
ggaugcagagucagca

SEQ ID NO: 2505218 - RNA, 18 nt, Human
ggaugcagagucagcaga

SEQ ID NO: 2505219 - RNA, 13 nt, Human
ggaugcagcauua

SEQ ID NO: 2505220 - RNA, 17 nt, Human
ggauuagggagagaaga

SEQ ID NO: 2505221 - RNA, 22 nt, Human
ggauuaaugguccugugaugcu

SEQ ID NO: 2505222 - RNA, 21 nt, Human
ggauggagcccaggcgggagc

SEQ ID NO: 2505223 - RNA, 19 nt, Human
ggauuacaggcuccugcca

SEQ ID NO: 2505224 - RNA, 23 nt, Human
ggauuacaagcgugagccacugc

SEQ ID NO: 2505225 - RNA, 16 nt, Human
ggauucuuccaucuga

SEQ ID NO: 2505226 - RNA, 15 nt, Human
ggauuacccaagcaa

SEQ ID NO: 2505227 - RNA, 16 nt, Human
ggauucuuauggacaa

SEQ ID NO: 2505228 - RNA, 18 nt, Human
ggauugcacguggccucu

SEQ ID NO: 2505229 - RNA, 17 nt, Human
ggauugcacguggccuc

SEQ ID NO: 2505230 - RNA, 15 nt, Human
ggauugcacguggcc

SEQ ID NO: 2505231 - RNA, 18 nt, Human
ggauugauuaugcagaau

SEQ ID NO: 2505232 - RNA, 16 nt, Human
ggauucuuccucccuc

SEQ ID NO: 2505233 - RNA, 17 nt, Human
ggcaacccccagccugc

SEQ ID NO: 2505234 - RNA, 16 nt, Human
ggcaacccccagccug

SEQ ID NO: 2505235 - RNA, 15 nt, Human
ggauuguaaaauggu

SEQ ID NO: 2505236 - RNA, 18 nt, Human
ggauugggggcuggugcc

SEQ ID NO: 2505237 - RNA, 14 nt, Human
ggauugggggcugg

SEQ ID NO: 2505238 - RNA, 16 nt, Human
ggauuggggucccucu

SEQ ID NO: 2505239 - RNA, 17 nt, Human
ggauuggggucccucua

SEQ ID NO: 2505240 - RNA, 18 nt, Human
ggauuggggaagacugug

SEQ ID NO: 2505241 - RNA, 19 nt, Human
ggauuggggaagacugugg

SEQ ID NO: 2505242 - RNA, 17 nt, Human
ggauugcuacuguccua

SEQ ID NO: 2505243 - RNA, 16 nt, Human
ggauugcuaugaauga

SEQ ID NO: 2505244 - RNA, 14 nt, Human
ggauugcugccacu

SEQ ID NO: 2505245 - RNA, 17 nt, Human
ggauugcuugagcccag

SEQ ID NO: 2505246 - RNA, 22 nt, Human
ggauuggauuauuuaauaacau

SEQ ID NO: 2505247 - RNA, 16 nt, Human
ggauuggauuauuuaa

SEQ ID NO: 2505248 - RNA, 15 nt, Human
ggauugcugccacuu

SEQ ID NO: 2505249 - RNA, 17 nt, Human
ggauugggccccugcca

SEQ ID NO: 2505250 - RNA, 18 nt, Human
ggauugggccccugccag

SEQ ID NO: 2505251 - RNA, 20 nt, Human
ggauuggcuuguguguuuca

SEQ ID NO: 2505252 - RNA, 18 nt, Human
ggauuggauuauuuaaua

SEQ ID NO: 2505253 - RNA, 12 nt, Human
ggauuggggaag

SEQ ID NO: 2505254 - RNA, 23 nt, Human
ggcaaugcuggcuguuggcuggg

SEQ ID NO: 2505255 - RNA, 15 nt, Human
ggcaaugcuggcugu

SEQ ID NO: 2505256 - RNA, 18 nt, Human
ggcaaucuauuaauagcu

SEQ ID NO: 2505257 - RNA, 15 nt, Human
ggcaaugauggcaau

SEQ ID NO: 2505258 - RNA, 14 nt, Human
ggcaaugcuggcug

SEQ ID NO: 2505259 - RNA, 23 nt, Human
ggcaaccccaguucugcuccucu

SEQ ID NO: 2505260 - RNA, 22 nt, Human
ggcaaccccaguucugcuccuc

SEQ ID NO: 2505261 - RNA, 23 nt, Human
ggauuguaaaaaaaaaugccuuu

SEQ ID NO: 2505262 - RNA, 22 nt, Human
ggauuguaaaaaaaaaugccuu

SEQ ID NO: 2505263 - RNA, 18 nt, Human
ggcaacccccagccugcu

SEQ ID NO: 2505264 - RNA, 19 nt, Human
ggcaaucauggugcucaga

SEQ ID NO: 2505265 - RNA, 18 nt, Human
ggcaauaguguguucuga

SEQ ID NO: 2505266 - RNA, 21 nt, Human
ggcaauauagcaagaucccau

SEQ ID NO: 2505267 - RNA, 22 nt, Human
ggcacccuucuuuccucuuccc

SEQ ID NO: 2505268 - RNA, 20 nt, Human
ggcacccuucuuuccucuuc

SEQ ID NO: 2505269 - RNA, 17 nt, Human
ggcacccuucuuuccuc

SEQ ID NO: 2505270 - RNA, 12 nt, Human
ggcacccuucuu

SEQ ID NO: 2505271 - RNA, 18 nt, Human
ggcaccggggccucggac

SEQ ID NO: 2505272 - RNA, 14 nt, Human
ggcaccgagaaugu

SEQ ID NO: 2505273 - RNA, 22 nt, Human
ggcacccggccccugcugguuc

SEQ ID NO: 2505274 - RNA, 20 nt, Human
ggcaaugggagcugaggcca

SEQ ID NO: 2505275 - RNA, 21 nt, Human
ggcaaugggagcugaggccac

SEQ ID NO: 2505276 - RNA, 23 nt, Human
ggcacccaccaucaugucuggcu

SEQ ID NO: 2505277 - RNA, 20 nt, Human
ggcacccagugagcacuccc

SEQ ID NO: 2505278 - RNA, 21 nt, Human
ggcacccaccguggaggagga

SEQ ID NO: 2505279 - RNA, 20 nt, Human
ggcacccaccguggaggagg

SEQ ID NO: 2505280 - RNA, 16 nt, Human
ggcacccacccagcac

SEQ ID NO: 2505281 - RNA, 18 nt, Human
ggcaaugucaggaacaga

SEQ ID NO: 2505282 - RNA, 14 nt, Human
ggcacccacccugg

SEQ ID NO: 2505283 - RNA, 13 nt, Human
ggcacccacccug

SEQ ID NO: 2505284 - RNA, 15 nt, Human
ggcaugaagacagau

SEQ ID NO: 2505285 - RNA, 18 nt, Human
ggcaugacacgaauauug

SEQ ID NO: 2505286 - RNA, 22 nt, Human
ggcaugaaguuuccuuggcugg

SEQ ID NO: 2505287 - RNA, 18 nt, Human
ggcaugaacauguacugu

SEQ ID NO: 2505288 - RNA, 14 nt, Human
ggcaugaacaugua

SEQ ID NO: 2505289 - RNA, 13 nt, Human
ggcaugccugugu

SEQ ID NO: 2505290 - RNA, 23 nt, Human
ggcaugaaguuuccuuggcuggu

SEQ ID NO: 2505291 - RNA, 14 nt, Human
ggcaugccugugug

SEQ ID NO: 2505292 - RNA, 16 nt, Human
ggcaugcuggggcaag

SEQ ID NO: 2505293 - RNA, 13 nt, Human
ggcaugcuggggc

SEQ ID NO: 2505294 - RNA, 14 nt, Human
ggcaugcuggggca

SEQ ID NO: 2505295 - RNA, 16 nt, Human
ggcaugccugugugac

SEQ ID NO: 2505296 - RNA, 19 nt, Human
ggcaugcgcacaaggcuga

SEQ ID NO: 2505297 - RNA, 12 nt, Human
ggcaugcugggg

SEQ ID NO: 2505298 - RNA, 18 nt, Human
ggcauggccagguggcca

SEQ ID NO: 2505299 - RNA, 17 nt, Human
ggcauggccagguggcc

SEQ ID NO: 2505300 - RNA, 16 nt, Human
ggcauggcccuggggu

SEQ ID NO: 2505301 - RNA, 13 nt, Human
ggcauggcccugg

SEQ ID NO: 2505302 - RNA, 17 nt, Human
ggcauggcccugggguc

SEQ ID NO: 2505303 - RNA, 16 nt, Human
ggcauggcuccagucu

SEQ ID NO: 2505304 - RNA, 12 nt, Human
ggcauggcccug

SEQ ID NO: 2505305 - RNA, 21 nt, Human
ggcagugggacagggcauggc

SEQ ID NO: 2505306 - RNA, 22 nt, Human
ggcaucuuugccuugggcugcu

SEQ ID NO: 2505307 - RNA, 23 nt, Human
ggcaucuuugccuugggcugcuc

SEQ ID NO: 2505308 - RNA, 16 nt, Human
ggcagugggagcugcc

SEQ ID NO: 2505309 - RNA, 14 nt, Human
ggcagugggagcug

SEQ ID NO: 2505310 - RNA, 13 nt, Human
ggcagugggagcu

SEQ ID NO: 2505311 - RNA, 20 nt, Human
ggcagggucucacucugucg

SEQ ID NO: 2505312 - RNA, 19 nt, Human
ggcagggucucacucuguc

SEQ ID NO: 2505313 - RNA, 23 nt, Human
ggcagggugggauggaggagaag

SEQ ID NO: 2505314 - RNA, 16 nt, Human
ggcagggugggaugga

SEQ ID NO: 2505315 - RNA, 21 nt, Human
ggcagggugggauggaggaga

SEQ ID NO: 2505316 - RNA, 20 nt, Human
ggcagguagccagggggacu

SEQ ID NO: 2505317 - RNA, 15 nt, Human
ggcagguagccaggg

SEQ ID NO: 2505318 - RNA, 14 nt, Human
ggcagguagccagg

SEQ ID NO: 2505319 - RNA, 17 nt, Human
ggcagguaaacuccugu

SEQ ID NO: 2505320 - RNA, 14 nt, Human
ggcagggugacccu

SEQ ID NO: 2505321 - RNA, 13 nt, Human
ggcagcucuccag

SEQ ID NO: 2505322 - RNA, 11 nt, Human
ggcagcucucc

SEQ ID NO: 2505323 - RNA, 16 nt, Human
ggcagcucuccaguca

SEQ ID NO: 2505324 - RNA, 14 nt, Human
ggcagcucuccagu

SEQ ID NO: 2505325 - RNA, 15 nt, Human
ggcagcucuggacag

SEQ ID NO: 2505326 - RNA, 15 nt, Human
ggcagcucaucucug

SEQ ID NO: 2505327 - RNA, 12 nt, Human
ggcagcucagcu

SEQ ID NO: 2505328 - RNA, 21 nt, Human
ggcagcucagagaggguggga

SEQ ID NO: 2505329 - RNA, 13 nt, Human
ggcagcucagaga

SEQ ID NO: 2505330 - RNA, 20 nt, Human
ggcagcuucuauuagccagu

SEQ ID NO: 2505331 - RNA, 19 nt, Human
ggcagcugggcccaacccu

SEQ ID NO: 2505332 - RNA, 18 nt, Human
ggcagcugggcccaaccc

SEQ ID NO: 2505333 - RNA, 22 nt, Human
ggcagcugggcccaacccuguc

SEQ ID NO: 2505334 - RNA, 17 nt, Human
ggcagcuugaggguugg

SEQ ID NO: 2505335 - RNA, 22 nt, Human
ggcagcugcuuuugucuauggg

SEQ ID NO: 2505336 - RNA, 14 nt, Human
ggcagcugggccca

SEQ ID NO: 2505337 - RNA, 13 nt, Human
ggcagcugggccc

SEQ ID NO: 2505338 - RNA, 12 nt, Human
ggcagcugggcc

SEQ ID NO: 2505339 - RNA, 16 nt, Human
ggcagcuggaugagac

SEQ ID NO: 2505340 - RNA, 20 nt, Human
ggcagcucuggacagcccca

SEQ ID NO: 2505341 - RNA, 21 nt, Human
ggcagcucuccagucaggagg

SEQ ID NO: 2505342 - RNA, 23 nt, Human
ggcacuaacguugagccccugga

SEQ ID NO: 2505343 - RNA, 14 nt, Human
ggcacuagccuuug

SEQ ID NO: 2505344 - RNA, 18 nt, Human
ggcacgucaucuaguuuu

SEQ ID NO: 2505345 - RNA, 21 nt, Human
ggcacgcuugcguaugucugu

SEQ ID NO: 2505346 - RNA, 15 nt, Human
ggcacgggcccguga

SEQ ID NO: 2505347 - RNA, 17 nt, Human
ggcacgaacccaccugc

SEQ ID NO: 2505348 - RNA, 18 nt, Human
ggcacgaacccaccugcu

SEQ ID NO: 2505349 - RNA, 19 nt, Human
ggcacgaacccaccugcug

SEQ ID NO: 2505350 - RNA, 20 nt, Human
ggcacgaacccaccugcuga

SEQ ID NO: 2505351 - RNA, 20 nt, Human
ggcacgagcaaagugaagac

SEQ ID NO: 2505352 - RNA, 13 nt, Human
ggcacgcuguggg

SEQ ID NO: 2505353 - RNA, 18 nt, Human
ggcacgcugugggcaggu

SEQ ID NO: 2505354 - RNA, 17 nt, Human
ggcaccuuaguggcuuu

SEQ ID NO: 2505355 - RNA, 17 nt, Human
ggcaccuggggaguggg

SEQ ID NO: 2505356 - RNA, 16 nt, Human
ggcaccuaauccaggc

SEQ ID NO: 2505357 - RNA, 14 nt, Human
ggcaccuggggagu

SEQ ID NO: 2505358 - RNA, 15 nt, Human
ggcaccuaauccagg

SEQ ID NO: 2505359 - RNA, 15 nt, Human
ggcaccgagaauguu

SEQ ID NO: 2505360 - RNA, 14 nt, Human
ggcagcucaccucu

SEQ ID NO: 2505361 - RNA, 12 nt, Human
ggcagcucaccu

SEQ ID NO: 2505362 - RNA, 21 nt, Human
ggcacuagccuuuggcucugg

SEQ ID NO: 2505363 - RNA, 20 nt, Human
ggcacuagccuuuggcucug

SEQ ID NO: 2505364 - RNA, 15 nt, Human
ggcacuagccuuugg

SEQ ID NO: 2505365 - RNA, 16 nt, Human
ggcagcgcccuuccuc

SEQ ID NO: 2505366 - RNA, 21 nt, Human
ggcagcgccaggcugaccaca

SEQ ID NO: 2505367 - RNA, 22 nt, Human
ggcagcgccaggcugaccacag

SEQ ID NO: 2505368 - RNA, 21 nt, Human
ggcagcgcccuuccucuccac

SEQ ID NO: 2505369 - RNA, 20 nt, Human
ggcagcgcccuuccucucca

SEQ ID NO: 2505370 - RNA, 19 nt, Human
ggcagcgcccuuccucucc

SEQ ID NO: 2505371 - RNA, 17 nt, Human
ggcagcgcccuuccucu

SEQ ID NO: 2505372 - RNA, 18 nt, Human
ggcagcgcggggagcccg

SEQ ID NO: 2505373 - RNA, 21 nt, Human
ggcagcguacucaucaucaac

SEQ ID NO: 2505374 - RNA, 17 nt, Human
ggccagcugcuugggcu

SEQ ID NO: 2505375 - RNA, 22 nt, Human
ggccagccuugaccauucucca

SEQ ID NO: 2505376 - RNA, 20 nt, Human
ggccagccuugaccauucuc

SEQ ID NO: 2505377 - RNA, 23 nt, Human
ggccagcugcuugggcuucaucc

SEQ ID NO: 2505378 - RNA, 20 nt, Human
ggccagcugccccagccaga

SEQ ID NO: 2505379 - RNA, 19 nt, Human
ggccagcugccccagccag

SEQ ID NO: 2505380 - RNA, 18 nt, Human
ggccaggcccucugccca

SEQ ID NO: 2505381 - RNA, 18 nt, Human
ggccagcuggcagcagag

SEQ ID NO: 2505382 - RNA, 14 nt, Human
ggccagcuggcagc

SEQ ID NO: 2505383 - RNA, 16 nt, Human
ggccagcuggcagcag

SEQ ID NO: 2505384 - RNA, 17 nt, Human
ggccagcuggcagcaga

SEQ ID NO: 2505385 - RNA, 14 nt, Human
ggccaggcugcucu

SEQ ID NO: 2505386 - RNA, 15 nt, Human
ggccaggcugcucuu

SEQ ID NO: 2505387 - RNA, 11 nt, Human
ggccaggcugc

SEQ ID NO: 2505388 - RNA, 11 nt, Human
ggccaggcucc

SEQ ID NO: 2505389 - RNA, 16 nt, Human
ggccaugggccuccug

SEQ ID NO: 2505390 - RNA, 19 nt, Human
ggccaugguacccccuucu

SEQ ID NO: 2505391 - RNA, 21 nt, Human
ggccaggcugaugggacagaa

SEQ ID NO: 2505392 - RNA, 16 nt, Human
ggccaggcuccuuccu

SEQ ID NO: 2505393 - RNA, 17 nt, Human
ggccauguuccaauaaa

SEQ ID NO: 2505394 - RNA, 13 nt, Human
ggccauguuccaa

SEQ ID NO: 2505395 - RNA, 13 nt, Human
ggccauguccuua

SEQ ID NO: 2505396 - RNA, 20 nt, Human
ggccaugguacccccuucug

SEQ ID NO: 2505397 - RNA, 20 nt, Human
ggccauucuauuguggcaag

SEQ ID NO: 2505398 - RNA, 23 nt, Human
ggccauguuccaauaaacaggag

SEQ ID NO: 2505399 - RNA, 20 nt, Human
ggccauucuccacagcaacc

SEQ ID NO: 2505400 - RNA, 12 nt, Human
ggccauucagca

SEQ ID NO: 2505401 - RNA, 17 nt, Human
ggccacauggggcuggg

SEQ ID NO: 2505402 - RNA, 19 nt, Human
ggccacauggggcugggca

SEQ ID NO: 2505403 - RNA, 13 nt, Human
ggccaccaggcug

SEQ ID NO: 2505404 - RNA, 12 nt, Human
ggccaccaggcu

SEQ ID NO: 2505405 - RNA, 14 nt, Human
ggccaccaggaugg

SEQ ID NO: 2505406 - RNA, 11 nt, Human
ggccaccagga

SEQ ID NO: 2505407 - RNA, 17 nt, Human
ggccaccaccccccacu

SEQ ID NO: 2505408 - RNA, 14 nt, Human
ggccaccacccccc

SEQ ID NO: 2505409 - RNA, 18 nt, Human
ggccaccaccccccacuc

SEQ ID NO: 2505410 - RNA, 24 nt, Human
ggccacccguucugcuggccugga

SEQ ID NO: 2505411 - RNA, 23 nt, Human
ggccacccguucugcuggccugg

SEQ ID NO: 2505412 - RNA, 21 nt, Human
ggccacccguucugcuggccu

SEQ ID NO: 2505413 - RNA, 21 nt, Human
ggccaccaggcuggcgcagcc

SEQ ID NO: 2505414 - RNA, 19 nt, Human
ggccaccaggcuggcgcag

SEQ ID NO: 2505415 - RNA, 16 nt, Human
ggccaccaggcuggcg

SEQ ID NO: 2505416 - RNA, 15 nt, Human
ggccaccaggcuggc

SEQ ID NO: 2505417 - RNA, 14 nt, Human
ggccaccaggcugg

SEQ ID NO: 2505418 - RNA, 19 nt, Human
ggccacgucuuccuucugc

SEQ ID NO: 2505419 - RNA, 18 nt, Human
ggccacgugauguggagg

SEQ ID NO: 2505420 - RNA, 11 nt, Human
ggccacgugcc

SEQ ID NO: 2505421 - RNA, 12 nt, Human
ggccacgugcca

SEQ ID NO: 2505422 - RNA, 17 nt, Human
ggccacuccagaccccu

SEQ ID NO: 2505423 - RNA, 13 nt, Human
ggccacuccgaga

SEQ ID NO: 2505424 - RNA, 23 nt, Human
ggccacucccggcacuccaugcu

SEQ ID NO: 2505425 - RNA, 12 nt, Human
ggccacuccucc

SEQ ID NO: 2505426 - RNA, 20 nt, Human
ggccacuaagcagaggaggg

SEQ ID NO: 2505427 - RNA, 21 nt, Human
ggccacuaagcagaggagggg

SEQ ID NO: 2505428 - RNA, 11 nt, Human
ggccacuaagc

SEQ ID NO: 2505429 - RNA, 18 nt, Human
ggccacgugccaggcccg

SEQ ID NO: 2505430 - RNA, 23 nt, Human
ggccacgugggcaaacaggcagu

SEQ ID NO: 2505431 - RNA, 16 nt, Human
ggccacgugccaggcc

SEQ ID NO: 2505432 - RNA, 17 nt, Human
ggccacgugccaggccc

SEQ ID NO: 2505433 - RNA, 13 nt, Human
ggccagccuggau

SEQ ID NO: 2505434 - RNA, 13 nt, Human
ggccacuccucca

SEQ ID NO: 2505435 - RNA, 22 nt, Human
ggccagccuccgagagggagag

SEQ ID NO: 2505436 - RNA, 14 nt, Human
ggcauggcugggaa

SEQ ID NO: 2505437 - RNA, 18 nt, Human
ggcaugggaaugaauguc

SEQ ID NO: 2505438 - RNA, 17 nt, Human
ggcauuccccaggaggc

SEQ ID NO: 2505439 - RNA, 22 nt, Human
ggcaugggaaugaaugucagug

SEQ ID NO: 2505440 - RNA, 19 nt, Human
ggcauuccccaggaggcca

SEQ ID NO: 2505441 - RNA, 18 nt, Human
ggcauuccccaggaggcc

SEQ ID NO: 2505442 - RNA, 20 nt, Human
ggccacaugagucccagugg

SEQ ID NO: 2505443 - RNA, 18 nt, Human
ggccacaugggaggcuca

SEQ ID NO: 2505444 - RNA, 16 nt, Human
ggccacauggggcugg

SEQ ID NO: 2505445 - RNA, 16 nt, Human
ggccacaugaguccca

SEQ ID NO: 2505446 - RNA, 19 nt, Human
ggccacaugggaggcucac

SEQ ID NO: 2505447 - RNA, 16 nt, Human
ggcauuccccaggagg

SEQ ID NO: 2505448 - RNA, 21 nt, Human
ggcaugggaaagccaccucuc

SEQ ID NO: 2505449 - RNA, 19 nt, Human
ggccacaucaaagaggcug

SEQ ID NO: 2505450 - RNA, 14 nt, Human
ggcccaaggcggcc

SEQ ID NO: 2505451 - RNA, 13 nt, Human
ggcccaaggcggc

SEQ ID NO: 2505452 - RNA, 16 nt, Human
ggcccaacccugucug

SEQ ID NO: 2505453 - RNA, 13 nt, Human
ggcccaacccugu

SEQ ID NO: 2505454 - RNA, 17 nt, Human
ggcccaacccugucugu

SEQ ID NO: 2505455 - RNA, 19 nt, Human
ggcccaagagaugaagagu

SEQ ID NO: 2505456 - RNA, 23 nt, Human
ggcccaacacaauucuucuucca

SEQ ID NO: 2505457 - RNA, 21 nt, Human
ggcccaaaggccuuggacaac

SEQ ID NO: 2505458 - RNA, 15 nt, Human
ggcccaagucccugu

SEQ ID NO: 2505459 - RNA, 14 nt, Human
ggcccaagucccug

SEQ ID NO: 2505460 - RNA, 21 nt, Human
ggcccaaggcggccccucccg

SEQ ID NO: 2505461 - RNA, 17 nt, Human
ggcccaaggcggccccu

SEQ ID NO: 2505462 - RNA, 17 nt, Human
ggcccaccuggccaccu

SEQ ID NO: 2505463 - RNA, 22 nt, Human
ggcccaagucccuguuuucuga

SEQ ID NO: 2505464 - RNA, 21 nt, Human
ggcccaccuuccccagaacca

SEQ ID NO: 2505465 - RNA, 22 nt, Human
ggcccaccuggccaccugaggu

SEQ ID NO: 2505466 - RNA, 19 nt, Human
ggcccaccuggccaccuga

SEQ ID NO: 2505467 - RNA, 18 nt, Human
ggcccaccuggccaccug

SEQ ID NO: 2505468 - RNA, 22 nt, Human
ggcccacguagggcggcacuca

SEQ ID NO: 2505469 - RNA, 22 nt, Human
ggcccacgccuguaaucccagc

SEQ ID NO: 2505470 - RNA, 14 nt, Human
ggcccucucugcuc

SEQ ID NO: 2505471 - RNA, 15 nt, Human
ggcccucucugcucu

SEQ ID NO: 2505472 - RNA, 12 nt, Human
ggcccagagagg

SEQ ID NO: 2505473 - RNA, 15 nt, Human
ggcccagagaagcca

SEQ ID NO: 2505474 - RNA, 11 nt, Human
ggcccagagag

SEQ ID NO: 2505475 - RNA, 17 nt, Human
ggcccucugcccacucc

SEQ ID NO: 2505476 - RNA, 16 nt, Human
ggcccucugcccacuc

SEQ ID NO: 2505477 - RNA, 15 nt, Human
ggcccucugcccacu

SEQ ID NO: 2505478 - RNA, 13 nt, Human
ggcccucugccca

SEQ ID NO: 2505479 - RNA, 20 nt, Human
ggcccucugcccacucccug

SEQ ID NO: 2505480 - RNA, 19 nt, Human
ggcccucugcccacucccu

SEQ ID NO: 2505481 - RNA, 21 nt, Human
ggcccucugcccacucccugc

SEQ ID NO: 2505482 - RNA, 21 nt, Human
ggcccucucugcucugcgugu

SEQ ID NO: 2505483 - RNA, 14 nt, Human
ggcccucuggagug

SEQ ID NO: 2505484 - RNA, 18 nt, Human
ggcccucuggaguggcca

SEQ ID NO: 2505485 - RNA, 19 nt, Human
ggcccucuggaguggccac

SEQ ID NO: 2505486 - RNA, 19 nt, Human
ggcccugacauuggagccu

SEQ ID NO: 2505487 - RNA, 13 nt, Human
ggcccugccuccu

SEQ ID NO: 2505488 - RNA, 13 nt, Human
ggcccugcccugg

SEQ ID NO: 2505489 - RNA, 20 nt, Human
ggcccugcccugguuuccug

SEQ ID NO: 2505490 - RNA, 11 nt, Human
ggcccugcccu

SEQ ID NO: 2505491 - RNA, 22 nt, Human
ggcccugcacuguccugcucca

SEQ ID NO: 2505492 - RNA, 18 nt, Human
ggcccugccaucuuccca

SEQ ID NO: 2505493 - RNA, 20 nt, Human
ggcccugccaucuucccagc

SEQ ID NO: 2505494 - RNA, 12 nt, Human
ggcccugcccug

SEQ ID NO: 2505495 - RNA, 23 nt, Human
ggcccugcacuguccugcuccac

SEQ ID NO: 2505496 - RNA, 21 nt, Human
ggcccugcacuguccugcucc

SEQ ID NO: 2505497 - RNA, 20 nt, Human
ggcccugcacuguccugcuc

SEQ ID NO: 2505498 - RNA, 19 nt, Human
ggcccugcacuguccugcu

SEQ ID NO: 2505499 - RNA, 18 nt, Human
ggcccugcacuguccugc

SEQ ID NO: 2505500 - RNA, 17 nt, Human
ggcccugcacuguccug

SEQ ID NO: 2505501 - RNA, 16 nt, Human
ggcccugcacuguccu

SEQ ID NO: 2505502 - RNA, 15 nt, Human
ggcccugcacugucc

SEQ ID NO: 2505503 - RNA, 14 nt, Human
ggcccugcacuguc

SEQ ID NO: 2505504 - RNA, 18 nt, Human
ggcccugcaccugugcag

SEQ ID NO: 2505505 - RNA, 21 nt, Human
ggcccugaggugugggggcug

SEQ ID NO: 2505506 - RNA, 19 nt, Human
ggcccugcaaaaggacucu

SEQ ID NO: 2505507 - RNA, 22 nt, Human
ggcccugcaaaaggacucucag

SEQ ID NO: 2505508 - RNA, 22 nt, Human
ggcccugaggugugggggcugc

SEQ ID NO: 2505509 - RNA, 19 nt, Human
ggcccugaggugugggggc

SEQ ID NO: 2505510 - RNA, 18 nt, Human
ggcccugagguguggggg

SEQ ID NO: 2505511 - RNA, 17 nt, Human
ggcccugaggugugggg

SEQ ID NO: 2505512 - RNA, 16 nt, Human
ggcccugagguguggg

SEQ ID NO: 2505513 - RNA, 15 nt, Human
ggcccugaggugugg

SEQ ID NO: 2505514 - RNA, 14 nt, Human
ggcccugagcugag

SEQ ID NO: 2505515 - RNA, 14 nt, Human
ggcccugagcucgg

SEQ ID NO: 2505516 - RNA, 19 nt, Human
ggcccugagcucgguggac

SEQ ID NO: 2505517 - RNA, 13 nt, Human
ggcccugagcuga

SEQ ID NO: 2505518 - RNA, 21 nt, Human
ggcccugagcucgguggaccc

SEQ ID NO: 2505519 - RNA, 15 nt, Human
ggcccugccuccuuu

SEQ ID NO: 2505520 - RNA, 14 nt, Human
ggcccugccuccuu

SEQ ID NO: 2505521 - RNA, 14 nt, Human
ggcccugccuucuu

SEQ ID NO: 2505522 - RNA, 22 nt, Human
ggcccugcccugguuuccugcc

SEQ ID NO: 2505523 - RNA, 13 nt, Human
ggcccugccucug

SEQ ID NO: 2505524 - RNA, 10 nt, Human
ggcccugccu

SEQ ID NO: 2505525 - RNA, 16 nt, Human
ggcccaccuggccacc

SEQ ID NO: 2505526 - RNA, 14 nt, Human
ggcccuggccuccc

SEQ ID NO: 2505527 - RNA, 13 nt, Human
ggcccuggccucc

SEQ ID NO: 2505528 - RNA, 17 nt, Human
ggcccuggccuccccug

SEQ ID NO: 2505529 - RNA, 12 nt, Human
ggcccuggccug

SEQ ID NO: 2505530 - RNA, 13 nt, Human
ggcccuggcuccc

SEQ ID NO: 2505531 - RNA, 14 nt, Human
ggcccuggccugcu

SEQ ID NO: 2505532 - RNA, 15 nt, Human
ggcccuggccugcug

SEQ ID NO: 2505533 - RNA, 16 nt, Human
ggcccuggccugcugg

SEQ ID NO: 2505534 - RNA, 17 nt, Human
ggcccuggccugcuggg

SEQ ID NO: 2505535 - RNA, 22 nt, Human
ggcccuggcucccacaggcccu

SEQ ID NO: 2505536 - RNA, 22 nt, Human
ggcccuggccugcugggcucuc

SEQ ID NO: 2505537 - RNA, 20 nt, Human
ggccuagcugcuacaaagaa

SEQ ID NO: 2505538 - RNA, 19 nt, Human
ggccuagcugcuacaaaga

SEQ ID NO: 2505539 - RNA, 16 nt, Human
ggccuagcugcuacaa

SEQ ID NO: 2505540 - RNA, 21 nt, Human
ggccuagcugcuacaaagaag

SEQ ID NO: 2505541 - RNA, 14 nt, Human
ggccuaggccucag

SEQ ID NO: 2505542 - RNA, 24 nt, Human
ggccuacuagagucugaacagcug

SEQ ID NO: 2505543 - RNA, 23 nt, Human
ggccuaccccgcagacaccuugg

SEQ ID NO: 2505544 - RNA, 23 nt, Human
ggccuagcauacguacacauuuu

SEQ ID NO: 2505545 - RNA, 20 nt, Human
ggccuaccccgcagacaccu

SEQ ID NO: 2505546 - RNA, 16 nt, Human
ggccuaccccgcagac

SEQ ID NO: 2505547 - RNA, 18 nt, Human
ggccuacaugcuuuguga

SEQ ID NO: 2505548 - RNA, 23 nt, Human
ggccuacaugcuuugugaacaag

SEQ ID NO: 2505549 - RNA, 19 nt, Human
ggccuaagaguugagcucu

SEQ ID NO: 2505550 - RNA, 20 nt, Human
ggccuacagcuuugaucccu

SEQ ID NO: 2505551 - RNA, 23 nt, Human
ggccuacagcuuugaucccugac

SEQ ID NO: 2505552 - RNA, 17 nt, Human
ggccuacaugcuuugug

SEQ ID NO: 2505553 - RNA, 13 nt, Human
ggccgugcccagg

SEQ ID NO: 2505554 - RNA, 18 nt, Human
ggccguccucccgggccc

SEQ ID NO: 2505555 - RNA, 15 nt, Human
ggccguccucccggg

SEQ ID NO: 2505556 - RNA, 14 nt, Human
ggccguccucccgg

SEQ ID NO: 2505557 - RNA, 13 nt, Human
ggccguccucccg

SEQ ID NO: 2505558 - RNA, 21 nt, Human
ggccguccucccgggcccucc

SEQ ID NO: 2505559 - RNA, 20 nt, Human
ggccguccucccgggcccuc

SEQ ID NO: 2505560 - RNA, 22 nt, Human
ggccguccucccgggcccuccc

SEQ ID NO: 2505561 - RNA, 20 nt, Human
ggccgucuucacucgccccc

SEQ ID NO: 2505562 - RNA, 21 nt, Human
ggccggucugcaagucagagg

SEQ ID NO: 2505563 - RNA, 20 nt, Human
ggccggucugcaagucagag

SEQ ID NO: 2505564 - RNA, 18 nt, Human
ggccggucugcaagucag

SEQ ID NO: 2505565 - RNA, 17 nt, Human
ggccggucugcaaguca

SEQ ID NO: 2505566 - RNA, 13 nt, Human
ggccggggcugag

SEQ ID NO: 2505567 - RNA, 23 nt, Human
ggcccugucccucccaccucugu

SEQ ID NO: 2505568 - RNA, 22 nt, Human
ggcccugucccucccaccucug

SEQ ID NO: 2505569 - RNA, 21 nt, Human
ggcccugucccucccaccucu

SEQ ID NO: 2505570 - RNA, 20 nt, Human
ggcccugucccucccaccuc

SEQ ID NO: 2505571 - RNA, 18 nt, Human
ggcccugucccucccacc

SEQ ID NO: 2505572 - RNA, 17 nt, Human
ggcccugucccucccac

SEQ ID NO: 2505573 - RNA, 16 nt, Human
ggcccugucccuccca

SEQ ID NO: 2505574 - RNA, 12 nt, Human
ggcccugugccu

SEQ ID NO: 2505575 - RNA, 19 nt, Human
ggccgucacuugugggggu

SEQ ID NO: 2505576 - RNA, 12 nt, Human
ggccgucaggac

SEQ ID NO: 2505577 - RNA, 19 nt, Human
ggccgucaggacccaccau

SEQ ID NO: 2505578 - RNA, 17 nt, Human
ggccguaccccacccuc

SEQ ID NO: 2505579 - RNA, 14 nt, Human
ggccguaccccacc

SEQ ID NO: 2505580 - RNA, 22 nt, Human
ggccguaccccacccucagcac

SEQ ID NO: 2505581 - RNA, 23 nt, Human
ggccgguuucgaaguugaugcaa

SEQ ID NO: 2505582 - RNA, 23 nt, Human
ggccggucugcaagucagaggau

SEQ ID NO: 2505583 - RNA, 15 nt, Human
ggccggugugggcug

SEQ ID NO: 2505584 - RNA, 13 nt, Human
ggcccugggcugg

SEQ ID NO: 2505585 - RNA, 12 nt, Human
ggcccugggcug

SEQ ID NO: 2505586 - RNA, 18 nt, Human
ggcccugggcucggaggc

SEQ ID NO: 2505587 - RNA, 16 nt, Human
ggcccugggcucggag

SEQ ID NO: 2505588 - RNA, 15 nt, Human
ggcccugggcuggaa

SEQ ID NO: 2505589 - RNA, 14 nt, Human
ggcccugggcugga

SEQ ID NO: 2505590 - RNA, 21 nt, Human
ggcccugggcucggaggcugc

SEQ ID NO: 2505591 - RNA, 11 nt, Human
ggcccuggggc

SEQ ID NO: 2505592 - RNA, 15 nt, Human
ggcccugggguccca

SEQ ID NO: 2505593 - RNA, 12 nt, Human
ggcccugguccu

SEQ ID NO: 2505594 - RNA, 15 nt, Human
ggcccugucccuccc

SEQ ID NO: 2505595 - RNA, 19 nt, Human
ggcccugguguuucuagca

SEQ ID NO: 2505596 - RNA, 15 nt, Human
ggcccugguccuucc

SEQ ID NO: 2505597 - RNA, 17 nt, Human
ggcccugguccuuccag

SEQ ID NO: 2505598 - RNA, 20 nt, Human
ggccucggacuuagcuggga

SEQ ID NO: 2505599 - RNA, 17 nt, Human
ggccucggacuuagcug

SEQ ID NO: 2505600 - RNA, 19 nt, Human
ggccucaacccucccucag

SEQ ID NO: 2505601 - RNA, 13 nt, Human
ggccggggccggg

SEQ ID NO: 2505602 - RNA, 20 nt, Human
ggccucaaaggcccgcucua

SEQ ID NO: 2505603 - RNA, 15 nt, Human
ggccucaacccuccc

SEQ ID NO: 2505604 - RNA, 22 nt, Human
ggccucaaaguuggggcaggcu

SEQ ID NO: 2505605 - RNA, 16 nt, Human
ggccucaacccucccu

SEQ ID NO: 2505606 - RNA, 17 nt, Human
ggccucaacccucccuc

SEQ ID NO: 2505607 - RNA, 18 nt, Human
ggccucaacccucccuca

SEQ ID NO: 2505608 - RNA, 22 nt, Human
ggccucggacuuagcugggaga

SEQ ID NO: 2505609 - RNA, 13 nt, Human
ggccucggagccu

SEQ ID NO: 2505610 - RNA, 15 nt, Human
ggccucggagccuca

SEQ ID NO: 2505611 - RNA, 16 nt, Human
ggccucgggaccucag

SEQ ID NO: 2505612 - RNA, 23 nt, Human
ggccucgggacaccugcccugcc

SEQ ID NO: 2505613 - RNA, 22 nt, Human
ggccucgggacaccugcccugc

SEQ ID NO: 2505614 - RNA, 16 nt, Human
ggccucgggacaccug

SEQ ID NO: 2505615 - RNA, 19 nt, Human
ggccucggagccucauccg

SEQ ID NO: 2505616 - RNA, 22 nt, Human
ggccucggagccucauccgagg

SEQ ID NO: 2505617 - RNA, 19 nt, Human
ggccucaaaggcccgcucu

SEQ ID NO: 2505618 - RNA, 18 nt, Human
ggccucaaaggcccgcuc

SEQ ID NO: 2505619 - RNA, 19 nt, Human
ggccuauuauauuaaaaua

SEQ ID NO: 2505620 - RNA, 21 nt, Human
ggccuaugcacauauggacuc

SEQ ID NO: 2505621 - RNA, 23 nt, Human
ggccuaucagugugccccccauc

SEQ ID NO: 2505622 - RNA, 20 nt, Human
ggccuaucagugugcccccc

SEQ ID NO: 2505623 - RNA, 18 nt, Human
ggccuaucagugugcccc

SEQ ID NO: 2505624 - RNA, 17 nt, Human
ggccuaucagugugccc

SEQ ID NO: 2505625 - RNA, 16 nt, Human
ggccuaucuaaacugg

SEQ ID NO: 2505626 - RNA, 20 nt, Human
ggccuaugcacauauggacu

SEQ ID NO: 2505627 - RNA, 16 nt, Human
ggccuaucagugugcc

SEQ ID NO: 2505628 - RNA, 15 nt, Human
ggccuaucagugugc

SEQ ID NO: 2505629 - RNA, 20 nt, Human
ggccuauaaugaagcuuuau

SEQ ID NO: 2505630 - RNA, 20 nt, Human
ggccuaggccucagccagag

SEQ ID NO: 2505631 - RNA, 15 nt, Human
ggccuagucccuucc

SEQ ID NO: 2505632 - RNA, 16 nt, Human
ggccucugcacucccc

SEQ ID NO: 2505633 - RNA, 15 nt, Human
ggccucugcacuccc

SEQ ID NO: 2505634 - RNA, 14 nt, Human
ggccucugcacucc

SEQ ID NO: 2505635 - RNA, 13 nt, Human
ggccucugcacuc

SEQ ID NO: 2505636 - RNA, 17 nt, Human
ggccucuuaugggcugg

SEQ ID NO: 2505637 - RNA, 16 nt, Human
ggccucugugccuucu

SEQ ID NO: 2505638 - RNA, 21 nt, Human
ggccucugcaaaggaaauacc

SEQ ID NO: 2505639 - RNA, 21 nt, Human
ggccucucuggccucccaccc

SEQ ID NO: 2505640 - RNA, 18 nt, Human
ggccucuuaugggcuggg

SEQ ID NO: 2505641 - RNA, 19 nt, Human
ggccucuuccgugacguca

SEQ ID NO: 2505642 - RNA, 18 nt, Human
ggccucuucaaauuagaa

SEQ ID NO: 2505643 - RNA, 20 nt, Human
ggccucuguguccuucccug

SEQ ID NO: 2505644 - RNA, 14 nt, Human
ggccucuguguccu

SEQ ID NO: 2505645 - RNA, 18 nt, Human
ggcggcccaagcccgacu

SEQ ID NO: 2505646 - RNA, 17 nt, Human
ggcggccaugauggugc

SEQ ID NO: 2505647 - RNA, 18 nt, Human
ggcggcaggggccuggag

SEQ ID NO: 2505648 - RNA, 16 nt, Human
ggcggcagcagccauc

SEQ ID NO: 2505649 - RNA, 14 nt, Human
ggcggcagcagcca

SEQ ID NO: 2505650 - RNA, 17 nt, Human
ggcggcaggggccugga

SEQ ID NO: 2505651 - RNA, 17 nt, Human
ggcggccccucccgccc

SEQ ID NO: 2505652 - RNA, 11 nt, Human
ggcggcgccgg

SEQ ID NO: 2505653 - RNA, 20 nt, Human
ggcggcuacucagcagcccu

SEQ ID NO: 2505654 - RNA, 21 nt, Human
ggcggcuacucagcagcccuc

SEQ ID NO: 2505655 - RNA, 22 nt, Human
ggcggcuacucagcagcccucc

SEQ ID NO: 2505656 - RNA, 23 nt, Human
ggcggcuacucagcagcccuccu

SEQ ID NO: 2505657 - RNA, 12 nt, Human
ggcggcagcagc

SEQ ID NO: 2505658 - RNA, 15 nt, Human
ggcggcacagccuuc

SEQ ID NO: 2505659 - RNA, 14 nt, Human
ggcggcacagccuu

SEQ ID NO: 2505660 - RNA, 20 nt, Human
ggcggauguugaagugagcu

SEQ ID NO: 2505661 - RNA, 21 nt, Human
ggcggagcuugcagugagccg

SEQ ID NO: 2505662 - RNA, 20 nt, Human
ggcggagcuugcagugagcc

SEQ ID NO: 2505663 - RNA, 23 nt, Human
ggcggagcuggccccgccgccug

SEQ ID NO: 2505664 - RNA, 20 nt, Human
ggcggagcuggccccgccgc

SEQ ID NO: 2505665 - RNA, 17 nt, Human
ggcggagcuggccccgc

SEQ ID NO: 2505666 - RNA, 20 nt, Human
ggcgcuggcccagccggccu

SEQ ID NO: 2505667 - RNA, 18 nt, Human
ggcgcuggcccagccggc

SEQ ID NO: 2505668 - RNA, 16 nt, Human
ggcgcuggcccagccg

SEQ ID NO: 2505669 - RNA, 15 nt, Human
ggcgcuggcccagcc

SEQ ID NO: 2505670 - RNA, 14 nt, Human
ggcgcuggcccagc

SEQ ID NO: 2505671 - RNA, 13 nt, Human
ggcgcuggcccag

SEQ ID NO: 2505672 - RNA, 12 nt, Human
ggcgcuggccca

SEQ ID NO: 2505673 - RNA, 11 nt, Human
ggcgcuggccc

SEQ ID NO: 2505674 - RNA, 16 nt, Human
ggcgcggccagccccg

SEQ ID NO: 2505675 - RNA, 19 nt, Human
ggcggagaguacagugagc

SEQ ID NO: 2505676 - RNA, 17 nt, Human
ggcggacguuccagccg

SEQ ID NO: 2505677 - RNA, 16 nt, Human
ggcggacguuccagcc

SEQ ID NO: 2505678 - RNA, 15 nt, Human
ggcggacguuccagc

SEQ ID NO: 2505679 - RNA, 19 nt, Human
ggcgcuggcccagccggcc

SEQ ID NO: 2505680 - RNA, 20 nt, Human
ggcggacaccuggcccccga

SEQ ID NO: 2505681 - RNA, 15 nt, Human
ggcggagcuggcccc

SEQ ID NO: 2505682 - RNA, 14 nt, Human
ggcggagcuggccc

SEQ ID NO: 2505683 - RNA, 21 nt, Human
ggcggagaguacagugagcca

SEQ ID NO: 2505684 - RNA, 20 nt, Human
ggcggagaguacagugagcc

SEQ ID NO: 2505685 - RNA, 13 nt, Human
ggcggagcuggcc

SEQ ID NO: 2505686 - RNA, 23 nt, Human
ggcgcugccccuggcagccccug

SEQ ID NO: 2505687 - RNA, 21 nt, Human
ggcgcugccccuggcagcccc

SEQ ID NO: 2505688 - RNA, 19 nt, Human
ggcgcugccccuggcagcc

SEQ ID NO: 2505689 - RNA, 18 nt, Human
ggcgcugccccuggcagc

SEQ ID NO: 2505690 - RNA, 18 nt, Human
ggcgccuguagucccagc

SEQ ID NO: 2505691 - RNA, 19 nt, Human
ggcgccggcgggcgggccg

SEQ ID NO: 2505692 - RNA, 13 nt, Human
ggcgccucugcaa

SEQ ID NO: 2505693 - RNA, 21 nt, Human
ggcgccgucuccaggggcugc

SEQ ID NO: 2505694 - RNA, 14 nt, Human
ggcgcggccagccc

SEQ ID NO: 2505695 - RNA, 20 nt, Human
ggcgccuguagucccagcca

SEQ ID NO: 2505696 - RNA, 22 nt, Human
ggcgcgcaccuguaaucccagc

SEQ ID NO: 2505697 - RNA, 23 nt, Human
ggccugucucauccccagggguc

SEQ ID NO: 2505698 - RNA, 20 nt, Human
ggcgccgucuccaggggcug

SEQ ID NO: 2505699 - RNA, 22 nt, Human
ggcgccgcaaaccacacuggac

SEQ ID NO: 2505700 - RNA, 20 nt, Human
ggcgccgcaaaccacacugg

SEQ ID NO: 2505701 - RNA, 19 nt, Human
ggcgccgcaaaccacacug

SEQ ID NO: 2505702 - RNA, 22 nt, Human
ggccugggggcugggcagagga

SEQ ID NO: 2505703 - RNA, 20 nt, Human
ggccugggggcugggcagag

SEQ ID NO: 2505704 - RNA, 14 nt, Human
ggccugggggcugg

SEQ ID NO: 2505705 - RNA, 11 nt, Human
ggccugugagc

SEQ ID NO: 2505706 - RNA, 17 nt, Human
ggccugucucaucccca

SEQ ID NO: 2505707 - RNA, 18 nt, Human
ggccugucucauccccag

SEQ ID NO: 2505708 - RNA, 19 nt, Human
ggccugucucauccccagg

SEQ ID NO: 2505709 - RNA, 20 nt, Human
ggccugucucauccccaggg

SEQ ID NO: 2505710 - RNA, 23 nt, Human
ggccuggggcuccuuucuccagc

SEQ ID NO: 2505711 - RNA, 18 nt, Human
ggccuggggcuccuuucu

SEQ ID NO: 2505712 - RNA, 16 nt, Human
ggccuggggcuccuuu

SEQ ID NO: 2505713 - RNA, 14 nt, Human
ggccuggggcuccu

SEQ ID NO: 2505714 - RNA, 18 nt, Human
ggccugggggcagggaga

SEQ ID NO: 2505715 - RNA, 14 nt, Human
ggccuguccuccaa

SEQ ID NO: 2505716 - RNA, 22 nt, Human
ggccucuugagcaguggcuggu

SEQ ID NO: 2505717 - RNA, 18 nt, Human
ggccucuugagcaguggc

SEQ ID NO: 2505718 - RNA, 16 nt, Human
ggccucuugagcagug

SEQ ID NO: 2505719 - RNA, 13 nt, Human
ggccucuugagca

SEQ ID NO: 2505720 - RNA, 17 nt, Human
ggccugaaagaggcuga

SEQ ID NO: 2505721 - RNA, 23 nt, Human
ggccucuuugucuaaaacaauaa

SEQ ID NO: 2505722 - RNA, 22 nt, Human
ggccucuuggaccucugcucug

SEQ ID NO: 2505723 - RNA, 17 nt, Human
ggccucuuggaccucug

SEQ ID NO: 2505724 - RNA, 13 nt, Human
ggccucuuggcag

SEQ ID NO: 2505725 - RNA, 19 nt, Human
ggccucuugggucccccac

SEQ ID NO: 2505726 - RNA, 23 nt, Human
ggccugaaagaggcugaggccug

SEQ ID NO: 2505727 - RNA, 16 nt, Human
ggccugaaaggagccc

SEQ ID NO: 2505728 - RNA, 22 nt, Human
ggccugaaaggagcccuuaucu

SEQ ID NO: 2505729 - RNA, 13 nt, Human
ggccugaagaguc

SEQ ID NO: 2505730 - RNA, 19 nt, Human
ggccugaagaguccucuga

SEQ ID NO: 2505731 - RNA, 15 nt, Human
ggccuggcuucuccu

SEQ ID NO: 2505732 - RNA, 12 nt, Human
ggccuggcuccu

SEQ ID NO: 2505733 - RNA, 19 nt, Human
ggccuggccugagcuggga

SEQ ID NO: 2505734 - RNA, 23 nt, Human
ggccuggcgggaugggccaccgc

SEQ ID NO: 2505735 - RNA, 22 nt, Human
ggccugaaugcuuauagguggc

SEQ ID NO: 2505736 - RNA, 23 nt, Human
ggccugaagaguccucugaauga

SEQ ID NO: 2505737 - RNA, 23 nt, Human
ggcuagugugguguuuccuggca

SEQ ID NO: 2505738 - RNA, 15 nt, Human
ggcuaguugggcuuc

SEQ ID NO: 2505739 - RNA, 16 nt, Human
ggcuaguugggcuucc

SEQ ID NO: 2505740 - RNA, 22 nt, Human
ggcuagcuucugcuuuucugcc

SEQ ID NO: 2505741 - RNA, 19 nt, Human
ggcuauagcuacaggaagc

SEQ ID NO: 2505742 - RNA, 15 nt, Human
ggcuaugcauuugaa

SEQ ID NO: 2505743 - RNA, 21 nt, Human
ggcuauggggauagaugugug

SEQ ID NO: 2505744 - RNA, 19 nt, Human
ggcuaugggggcacugagg

SEQ ID NO: 2505745 - RNA, 14 nt, Human
ggcucaagcagucu

SEQ ID NO: 2505746 - RNA, 19 nt, Human
ggcucaagcgauucuccug

SEQ ID NO: 2505747 - RNA, 23 nt, Human
ggcucaagcagucuacccaccuc

SEQ ID NO: 2505748 - RNA, 19 nt, Human
ggcuauguauggaauacag

SEQ ID NO: 2505749 - RNA, 13 nt, Human
ggcuauucacaac

SEQ ID NO: 2505750 - RNA, 16 nt, Human
ggcuaggaccccucca

SEQ ID NO: 2505751 - RNA, 15 nt, Human
ggcuagaucaugaag

SEQ ID NO: 2505752 - RNA, 20 nt, Human
ggcuagagugcaguggcaug

SEQ ID NO: 2505753 - RNA, 23 nt, Human
ggcggcugagagccccagcugac

SEQ ID NO: 2505754 - RNA, 20 nt, Human
ggcuagaguccucacuccca

SEQ ID NO: 2505755 - RNA, 14 nt, Human
ggcuagggggagcc

SEQ ID NO: 2505756 - RNA, 20 nt, Human
ggcuagcuucugcuuuucug

SEQ ID NO: 2505757 - RNA, 22 nt, Human
ggcuaggaccccuccauguggg

SEQ ID NO: 2505758 - RNA, 18 nt, Human
ggcggcugagagccccag

SEQ ID NO: 2505759 - RNA, 14 nt, Human
ggcggcugagagcc

SEQ ID NO: 2505760 - RNA, 18 nt, Human
ggcggcucggaggaagcc

SEQ ID NO: 2505761 - RNA, 17 nt, Human
ggcuagagguucaaaga

SEQ ID NO: 2505762 - RNA, 22 nt, Human
ggcuagagguucaaagauauuu

SEQ ID NO: 2505763 - RNA, 13 nt, Human
ggcuagaguccuc

SEQ ID NO: 2505764 - RNA, 14 nt, Human
ggcuagaguccuca

SEQ ID NO: 2505765 - RNA, 18 nt, Human
ggcuagaguccucacucc

SEQ ID NO: 2505766 - RNA, 19 nt, Human
ggcuagaguccucacuccc

SEQ ID NO: 2505767 - RNA, 19 nt, Human
ggcucccacaggcccuucc

SEQ ID NO: 2505768 - RNA, 18 nt, Human
ggcucccacaggcccuuc

SEQ ID NO: 2505769 - RNA, 16 nt, Human
ggcucccacaggcagc

SEQ ID NO: 2505770 - RNA, 17 nt, Human
ggcucccacaggcccuu

SEQ ID NO: 2505771 - RNA, 24 nt, Human
ggcuccagucugcugcccuccauc

SEQ ID NO: 2505772 - RNA, 15 nt, Human
ggcuccagucugcug

SEQ ID NO: 2505773 - RNA, 18 nt, Human
ggcuccagucugcugccc

SEQ ID NO: 2505774 - RNA, 22 nt, Human
ggcuccagucugcugcccucca

SEQ ID NO: 2505775 - RNA, 16 nt, Human
ggcuccaggcuccuuu

SEQ ID NO: 2505776 - RNA, 14 nt, Human
ggcuccaggccagg

SEQ ID NO: 2505777 - RNA, 16 nt, Human
ggcuccaggccagggg

SEQ ID NO: 2505778 - RNA, 11 nt, Human
ggcuccaggcu

SEQ ID NO: 2505779 - RNA, 18 nt, Human
ggcuccaggccagggggc

SEQ ID NO: 2505780 - RNA, 15 nt, Human
ggcuccaggcuccuu

SEQ ID NO: 2505781 - RNA, 19 nt, Human
ggcuccaggagcagccaca

SEQ ID NO: 2505782 - RNA, 13 nt, Human
ggcuccaggagca

SEQ ID NO: 2505783 - RNA, 12 nt, Human
ggcuccaggagc

SEQ ID NO: 2505784 - RNA, 12 nt, Human
ggcuccagcugg

SEQ ID NO: 2505785 - RNA, 21 nt, Human
ggcucaaguccucuuuucuga

SEQ ID NO: 2505786 - RNA, 15 nt, Human
ggcucaaguccucuu

SEQ ID NO: 2505787 - RNA, 16 nt, Human
ggcuccagaugcaggg

SEQ ID NO: 2505788 - RNA, 17 nt, Human
ggcuccagaugcagggc

SEQ ID NO: 2505789 - RNA, 18 nt, Human
ggcuccagaugcagggca

SEQ ID NO: 2505790 - RNA, 19 nt, Human
ggcuccagaugcagggcag

SEQ ID NO: 2505791 - RNA, 22 nt, Human
ggcuccagagggcacucugcuu

SEQ ID NO: 2505792 - RNA, 12 nt, Human
ggcucacacuga

SEQ ID NO: 2505793 - RNA, 18 nt, Human
ggcucacacaccuguagc

SEQ ID NO: 2505794 - RNA, 16 nt, Human
ggcucacaccuguaau

SEQ ID NO: 2505795 - RNA, 24 nt, Human
ggaaugauuaauuaaaacacaaca

SEQ ID NO: 2505796 - RNA, 12 nt, Human
ggaaugcagugg

SEQ ID NO: 2505797 - RNA, 19 nt, Human
ggaaugccugagugccugg

SEQ ID NO: 2505798 - RNA, 18 nt, Human
ggaaugccugagugccug

SEQ ID NO: 2505799 - RNA, 14 nt, Human
ggaaugccugagug

SEQ ID NO: 2505800 - RNA, 19 nt, Human
ggaaguguaacagcugagg

SEQ ID NO: 2505801 - RNA, 23 nt, Human
ggaaugccugagugccuggccaa

SEQ ID NO: 2505802 - RNA, 14 nt, Human
ggaaugcggcaaga

SEQ ID NO: 2505803 - RNA, 16 nt, Human
ggaaugcggcaagaag

SEQ ID NO: 2505804 - RNA, 22 nt, Human
ggaaugcggccgcauucccuga

SEQ ID NO: 2505805 - RNA, 23 nt, Human
ggaaugcggccgcauucccugag

SEQ ID NO: 2505806 - RNA, 13 nt, Human
ggaaugcuccccc

SEQ ID NO: 2505807 - RNA, 23 nt, Human
ggaaugcugcccgcucugcagac

SEQ ID NO: 2505808 - RNA, 23 nt, Human
ggaaugcucccccauccuccccu

SEQ ID NO: 2505809 - RNA, 18 nt, Human
ggaaugcuugaaaaaugu

SEQ ID NO: 2505810 - RNA, 16 nt, Human
ggaaugcuuccuagaa

SEQ ID NO: 2505811 - RNA, 14 nt, Human
ggaaugcuguguua

SEQ ID NO: 2505812 - RNA, 21 nt, Human
ggaauggaaaaagcagaaggc

SEQ ID NO: 2505813 - RNA, 20 nt, Human
ggaauguaacugcugaaaac

SEQ ID NO: 2505814 - RNA, 16 nt, Human
ggaaugggggccucuu

SEQ ID NO: 2505815 - RNA, 15 nt, Human
ggaauguguggccug

SEQ ID NO: 2505816 - RNA, 12 nt, Human
ggaaugggcugu

SEQ ID NO: 2505817 - RNA, 15 nt, Human
ggaauggcacagccc

SEQ ID NO: 2505818 - RNA, 19 nt, Human
ggaauguuugccucugccu

SEQ ID NO: 2505819 - RNA, 21 nt, Human
ggaauguuugggcagaaggga

SEQ ID NO: 2505820 - RNA, 19 nt, Human
ggaauguuugggcagaagg

SEQ ID NO: 2505821 - RNA, 16 nt, Human
ggaauguuaaagucag

SEQ ID NO: 2505822 - RNA, 14 nt, Human
ggaauuaaccuggu

SEQ ID NO: 2505823 - RNA, 16 nt, Human
ggaauuaaccuggugc

SEQ ID NO: 2505824 - RNA, 17 nt, Human
ggaauuaaccuggugcu

SEQ ID NO: 2505825 - RNA, 14 nt, Human
ggaauuauuuuaaa

SEQ ID NO: 2505826 - RNA, 15 nt, Human
ggaauuauuuuaaaa

SEQ ID NO: 2505827 - RNA, 19 nt, Human
ggaauuacauguaaaacau

SEQ ID NO: 2505828 - RNA, 22 nt, Human
ggaauuaaguuaucuuuaaaau

SEQ ID NO: 2505829 - RNA, 20 nt, Human
ggaauuaaccuggugcugga

SEQ ID NO: 2505830 - RNA, 16 nt, Human
ggaauuauuuuaaaag

SEQ ID NO: 2505831 - RNA, 17 nt, Human
ggaauuauuuuaaaaga

SEQ ID NO: 2505832 - RNA, 15 nt, Human
ggaauugauuugcau

SEQ ID NO: 2505833 - RNA, 17 nt, Human
ggaauugauuugcauug

SEQ ID NO: 2505834 - RNA, 18 nt, Human
ggaauugauuugcauuga

SEQ ID NO: 2505835 - RNA, 19 nt, Human
ggaauugauuugcauugaa

SEQ ID NO: 2505836 - RNA, 20 nt, Human
ggaauugacuucgacuguga

SEQ ID NO: 2505837 - RNA, 20 nt, Human
ggaauucaucucucuuuaau

SEQ ID NO: 2505838 - RNA, 22 nt, Human
ggaauuggagcucgugggacag

SEQ ID NO: 2505839 - RNA, 16 nt, Human
ggaauuggagcucgug

SEQ ID NO: 2505840 - RNA, 12 nt, Human
ggaauuguguuu

SEQ ID NO: 2505841 - RNA, 23 nt, Human
ggaauuggguggggggcuucaua

SEQ ID NO: 2505842 - RNA, 14 nt, Human
ggaauugugugaug

SEQ ID NO: 2505843 - RNA, 23 nt, Human
ggaauuucucccagucauuuaau

SEQ ID NO: 2505844 - RNA, 14 nt, Human
ggaauuucccagga

SEQ ID NO: 2505845 - RNA, 15 nt, Human
ggaauuucccaggac

SEQ ID NO: 2505846 - RNA, 16 nt, Human
ggaauuucccaggacc

SEQ ID NO: 2505847 - RNA, 17 nt, Human
ggaauuucccaggaccc

SEQ ID NO: 2505848 - RNA, 18 nt, Human
ggaauuucccaggacccu

SEQ ID NO: 2505849 - RNA, 19 nt, Human
ggaauuucccaggacccug

SEQ ID NO: 2505850 - RNA, 12 nt, Human
ggaauuuguaag

SEQ ID NO: 2505851 - RNA, 18 nt, Human
ggaauuuguaaccucagc

SEQ ID NO: 2505852 - RNA, 17 nt, Human
ggaauuuguaaccucag

SEQ ID NO: 2505853 - RNA, 16 nt, Human
ggaauuuguaaccuca

SEQ ID NO: 2505854 - RNA, 21 nt, Human
ggaauuugcaagucauggcug

SEQ ID NO: 2505855 - RNA, 23 nt, Human
ggacaaaucaagcuucaguuucc

SEQ ID NO: 2505856 - RNA, 18 nt, Human
ggacaaaacccaccuugu

SEQ ID NO: 2505857 - RNA, 15 nt, Human
ggacaaacagcucag

SEQ ID NO: 2505858 - RNA, 19 nt, Human
ggaauuuucaucuaggauu

SEQ ID NO: 2505859 - RNA, 15 nt, Human
ggacaaaacccaccu

SEQ ID NO: 2505860 - RNA, 22 nt, Human
ggacaaaaaugaacugaaguuu

SEQ ID NO: 2505861 - RNA, 19 nt, Human
ggaauuuguaaguuuaugu

SEQ ID NO: 2505862 - RNA, 14 nt, Human
ggaaggcagggagg

SEQ ID NO: 2505863 - RNA, 16 nt, Human
ggaaggcaggaagaga

SEQ ID NO: 2505864 - RNA, 23 nt, Human
ggaaggauuguaaaaaaaaaugc

SEQ ID NO: 2505865 - RNA, 16 nt, Human
ggaaggauuguaaaaa

SEQ ID NO: 2505866 - RNA, 13 nt, Human
ggaaggauuguaa

SEQ ID NO: 2505867 - RNA, 12 nt, Human
ggaaccuccuuu

SEQ ID NO: 2505868 - RNA, 18 nt, Human
ggaaccugacguagcugc

SEQ ID NO: 2505869 - RNA, 13 nt, Human
ggaaccugacccc

SEQ ID NO: 2505870 - RNA, 14 nt, Human
ggaacgagagggga

SEQ ID NO: 2505871 - RNA, 14 nt, Human
ggaacgacugggca

SEQ ID NO: 2505872 - RNA, 13 nt, Human
ggaacgcagauga

SEQ ID NO: 2505873 - RNA, 21 nt, Human
ggaaggcucuucuccccagag

SEQ ID NO: 2505874 - RNA, 19 nt, Human
ggaaggcggggcuucaacc

SEQ ID NO: 2505875 - RNA, 23 nt, Human
ggaagggacaccaagccuuggcu

SEQ ID NO: 2505876 - RNA, 17 nt, Human
ggaaggcugagaggaga

SEQ ID NO: 2505877 - RNA, 14 nt, Human
ggaaggcuggcugg

SEQ ID NO: 2505878 - RNA, 17 nt, Human
ggaaggcuggcugggca

SEQ ID NO: 2505879 - RNA, 22 nt, Human
ggaagggaccaaggcaaggcag

SEQ ID NO: 2505880 - RNA, 20 nt, Human
ggaagggaccaaggcaaggc

SEQ ID NO: 2505881 - RNA, 16 nt, Human
ggaagggaccaaggca

SEQ ID NO: 2505882 - RNA, 15 nt, Human
ggaagggaccaaggc

SEQ ID NO: 2505883 - RNA, 23 nt, Human
ggaagggaccaaggcaaggcagg

SEQ ID NO: 2505884 - RNA, 16 nt, Human
ggaagggacuaggagc

SEQ ID NO: 2505885 - RNA, 14 nt, Human
ggaagggcaaaacc

SEQ ID NO: 2505886 - RNA, 12 nt, Human
ggaagggcagga

SEQ ID NO: 2505887 - RNA, 15 nt, Human
ggaagggcaggaagg

SEQ ID NO: 2505888 - RNA, 23 nt, Human
ggaaggggagauaaggguaucug

SEQ ID NO: 2505889 - RNA, 11 nt, Human
ggaagggccag

SEQ ID NO: 2505890 - RNA, 17 nt, Human
ggaagggcauccuucug

SEQ ID NO: 2505891 - RNA, 21 nt, Human
ggaagggcaggaaggagagcc

SEQ ID NO: 2505892 - RNA, 21 nt, Human
ggaagggccagucugggcugc

SEQ ID NO: 2505893 - RNA, 12 nt, Human
ggaagggccagu

SEQ ID NO: 2505894 - RNA, 16 nt, Human
ggaaggggacccccgc

SEQ ID NO: 2505895 - RNA, 18 nt, Human
ggaagugcuaauuuugaa

SEQ ID NO: 2505896 - RNA, 14 nt, Human
ggaaugauuaauua

SEQ ID NO: 2505897 - RNA, 16 nt, Human
ggaaguguaacagcug

SEQ ID NO: 2505898 - RNA, 17 nt, Human
ggaaguguaacagcuga

SEQ ID NO: 2505899 - RNA, 20 nt, Human
ggaagugacgguuuaauggg

SEQ ID NO: 2505900 - RNA, 18 nt, Human
ggaagugacaaggcccca

SEQ ID NO: 2505901 - RNA, 19 nt, Human
ggaagugacaaggccccag

SEQ ID NO: 2505902 - RNA, 22 nt, Human
ggaagugacaaggccccagaga

SEQ ID NO: 2505903 - RNA, 14 nt, Human
ggaagugaggaagc

SEQ ID NO: 2505904 - RNA, 21 nt, Human
ggaagugacaaggccccagag

SEQ ID NO: 2505905 - RNA, 16 nt, Human
ggaagugaggaagcca

SEQ ID NO: 2505906 - RNA, 21 nt, Human
ggaagugagggucagagagga

SEQ ID NO: 2505907 - RNA, 13 nt, Human
ggaagucaaagca

SEQ ID NO: 2505908 - RNA, 15 nt, Human
ggaaguccaaugugg

SEQ ID NO: 2505909 - RNA, 16 nt, Human
ggaaguccaauguggc

SEQ ID NO: 2505910 - RNA, 17 nt, Human
ggaaguccaauguggca

SEQ ID NO: 2505911 - RNA, 18 nt, Human
ggaagucauccugccaac

SEQ ID NO: 2505912 - RNA, 18 nt, Human
ggaaguccccaggcccca

SEQ ID NO: 2505913 - RNA, 14 nt, Human
ggaaguccucuggg

SEQ ID NO: 2505914 - RNA, 13 nt, Human
ggaaguccucugg

SEQ ID NO: 2505915 - RNA, 21 nt, Human
ggaaguccccaggccccagga

SEQ ID NO: 2505916 - RNA, 23 nt, Human
ggaaguccccaggccccaggaag

SEQ ID NO: 2505917 - RNA, 20 nt, Human
ggaagugaagacuggaagcu

SEQ ID NO: 2505918 - RNA, 14 nt, Human
ggaagucuaggagc

SEQ ID NO: 2505919 - RNA, 23 nt, Human
ggaagugaagagggagaagggau

SEQ ID NO: 2505920 - RNA, 17 nt, Human
ggaagucuaggagcugg

SEQ ID NO: 2505921 - RNA, 17 nt, Human
ggaagugacaaggcccc

SEQ ID NO: 2505922 - RNA, 16 nt, Human
ggaaguacuggagaaa

SEQ ID NO: 2505923 - RNA, 12 nt, Human
ggaaguacugga

SEQ ID NO: 2505924 - RNA, 18 nt, Human
ggaaguacuggagaaaau

SEQ ID NO: 2505925 - RNA, 16 nt, Human
ggaaguaggaaguaaa

SEQ ID NO: 2505926 - RNA, 18 nt, Human
ggaagguuuguauauugu

SEQ ID NO: 2505927 - RNA, 13 nt, Human
ggaaggguggugg

SEQ ID NO: 2505928 - RNA, 18 nt, Human
ggaaggguuuguggcugg

SEQ ID NO: 2505929 - RNA, 23 nt, Human
ggaaguaacaguaacgcagggga

SEQ ID NO: 2505930 - RNA, 19 nt, Human
ggaagguuuggugugugga

SEQ ID NO: 2505931 - RNA, 16 nt, Human
ggaagguggggacagg

SEQ ID NO: 2505932 - RNA, 19 nt, Human
ggaaggucccuuguuucca

SEQ ID NO: 2505933 - RNA, 11 nt, Human
ggaaggugggg

SEQ ID NO: 2505934 - RNA, 16 nt, Human
ggaaggggguccaccc

SEQ ID NO: 2505935 - RNA, 21 nt, Human
ggaaggggcccgugggaguca

SEQ ID NO: 2505936 - RNA, 18 nt, Human
ggaaggggcccgugggag

SEQ ID NO: 2505937 - RNA, 15 nt, Human
ggaaggggccagagg

SEQ ID NO: 2505938 - RNA, 17 nt, Human
ggaaggggccagaggcu

SEQ ID NO: 2505939 - RNA, 22 nt, Human
ggaaggggacccccgcccccug

SEQ ID NO: 2505940 - RNA, 17 nt, Human
ggaaggggacccccgcc

SEQ ID NO: 2505941 - RNA, 17 nt, Human
ggaccuucgggcugugc

SEQ ID NO: 2505942 - RNA, 18 nt, Human
ggaccuucgggcugugcc

SEQ ID NO: 2505943 - RNA, 19 nt, Human
ggaccuucgggcugugccc

SEQ ID NO: 2505944 - RNA, 20 nt, Human
ggaccuucgggcugugcccg

SEQ ID NO: 2505945 - RNA, 17 nt, Human
ggaccuugaacugggua

SEQ ID NO: 2505946 - RNA, 15 nt, Human
ggaccuugaacuggg

SEQ ID NO: 2505947 - RNA, 20 nt, Human
ggacgcuacccgggaagggg

SEQ ID NO: 2505948 - RNA, 19 nt, Human
ggacgcuacccgggaaggg

SEQ ID NO: 2505949 - RNA, 17 nt, Human
ggacgcuacccgggaag

SEQ ID NO: 2505950 - RNA, 14 nt, Human
ggacgccugggggu

SEQ ID NO: 2505951 - RNA, 19 nt, Human
ggacgccugggggugccag

SEQ ID NO: 2505952 - RNA, 14 nt, Human
ggaccuccugagcg

SEQ ID NO: 2505953 - RNA, 15 nt, Human
ggacgccacccagca

SEQ ID NO: 2505954 - RNA, 21 nt, Human
ggaccacugcaugagcuuuua

SEQ ID NO: 2505955 - RNA, 13 nt, Human
ggaccagagcugc

SEQ ID NO: 2505956 - RNA, 14 nt, Human
ggaccacauuuuau

SEQ ID NO: 2505957 - RNA, 13 nt, Human
ggaccacauuuua

SEQ ID NO: 2505958 - RNA, 20 nt, Human
ggaccacagcaaggcaccug

SEQ ID NO: 2505959 - RNA, 21 nt, Human
ggaccacaccucccugaacca

SEQ ID NO: 2505960 - RNA, 22 nt, Human
ggaccaaggcaaggcaggugcc

SEQ ID NO: 2505961 - RNA, 20 nt, Human
ggaccaaggcaaggcaggug

SEQ ID NO: 2505962 - RNA, 19 nt, Human
ggaccaaggcaaggcaggu

SEQ ID NO: 2505963 - RNA, 17 nt, Human
ggaccaaggcaaggcag

SEQ ID NO: 2505964 - RNA, 13 nt, Human
ggaccacaccucc

SEQ ID NO: 2505965 - RNA, 23 nt, Human
ggaccaaggcaaggcaggugccu

SEQ ID NO: 2505966 - RNA, 22 nt, Human
ggaccacaaaaaugaaagcaug

SEQ ID NO: 2505967 - RNA, 19 nt, Human
ggaccagaagccaaagacu

SEQ ID NO: 2505968 - RNA, 19 nt, Human
ggaccucaggugagaagca

SEQ ID NO: 2505969 - RNA, 23 nt, Human
ggaccucaggugagaagcagagg

SEQ ID NO: 2505970 - RNA, 17 nt, Human
ggaccuccccugaggcu

SEQ ID NO: 2505971 - RNA, 14 nt, Human
ggaccuccccugag

SEQ ID NO: 2505972 - RNA, 13 nt, Human
ggaccuccugagc

SEQ ID NO: 2505973 - RNA, 21 nt, Human
ggacagccacggccaggccag

SEQ ID NO: 2505974 - RNA, 20 nt, Human
ggacagccacggccaggcca

SEQ ID NO: 2505975 - RNA, 19 nt, Human
ggacagccacggccaggcc

SEQ ID NO: 2505976 - RNA, 15 nt, Human
ggacagccacggcca

SEQ ID NO: 2505977 - RNA, 17 nt, Human
ggacacucaaaagcugg

SEQ ID NO: 2505978 - RNA, 22 nt, Human
ggacacucaaaagcugggcagg

SEQ ID NO: 2505979 - RNA, 23 nt, Human
ggacagaucaauggcgcagugcc

SEQ ID NO: 2505980 - RNA, 19 nt, Human
ggacagaucaauggcgcag

SEQ ID NO: 2505981 - RNA, 18 nt, Human
ggacagaucaauggcgca

SEQ ID NO: 2505982 - RNA, 15 nt, Human
ggacagaucaauggc

SEQ ID NO: 2505983 - RNA, 16 nt, Human
ggacagaguaugaaca

SEQ ID NO: 2505984 - RNA, 21 nt, Human
ggacagagguuaucuguccca

SEQ ID NO: 2505985 - RNA, 23 nt, Human
ggacagauccagggacugaagcc

SEQ ID NO: 2505986 - RNA, 19 nt, Human
ggacagauccagggacuga

SEQ ID NO: 2505987 - RNA, 20 nt, Human
ggacauugcggacagccacg

SEQ ID NO: 2505988 - RNA, 21 nt, Human
ggacauguuuuuguuuucuuu

SEQ ID NO: 2505989 - RNA, 16 nt, Human
ggacauguuuugauaa

SEQ ID NO: 2505990 - RNA, 16 nt, Human
ggacauuccaagacag

SEQ ID NO: 2505991 - RNA, 17 nt, Human
ggacauguuuugauaaa

SEQ ID NO: 2505992 - RNA, 17 nt, Human
ggacauuccaagacagu

SEQ ID NO: 2505993 - RNA, 18 nt, Human
ggacauggccccugugag

SEQ ID NO: 2505994 - RNA, 21 nt, Human
ggacagcagaagggggagacc

SEQ ID NO: 2505995 - RNA, 14 nt, Human
ggacauggacaagg

SEQ ID NO: 2505996 - RNA, 16 nt, Human
ggacauuugcucaugg

SEQ ID NO: 2505997 - RNA, 14 nt, Human
ggacauuucucuaa

SEQ ID NO: 2505998 - RNA, 20 nt, Human
ggaccaacccuguuuccuga

SEQ ID NO: 2505999 - RNA, 18 nt, Human
ggaccaacccuguuuccu

SEQ ID NO: 2506000 - RNA, 17 nt, Human
ggaccaacccuguuucc

SEQ ID NO: 2506001 - RNA, 16 nt, Human
ggaccaagcaucuugg

SEQ ID NO: 2506002 - RNA, 22 nt, Human
ggaccaacccuguuuccugagu

SEQ ID NO: 2506003 - RNA, 15 nt, Human
ggaccaaggaccccu

SEQ ID NO: 2506004 - RNA, 15 nt, Human
ggaccaaggcaaggc

SEQ ID NO: 2506005 - RNA, 11 nt, Human
ggaccaaggca

SEQ ID NO: 2506006 - RNA, 17 nt, Human
ggaccaaggagaugaag

SEQ ID NO: 2506007 - RNA, 13 nt, Human
ggacgcucucugg

SEQ ID NO: 2506008 - RNA, 14 nt, Human
ggacgcucucuggc

SEQ ID NO: 2506009 - RNA, 22 nt, Human
ggacuggaaccagggagaccga

SEQ ID NO: 2506010 - RNA, 17 nt, Human
ggacuggaaccagggag

SEQ ID NO: 2506011 - RNA, 15 nt, Human
ggacuggaaccaggg

SEQ ID NO: 2506012 - RNA, 14 nt, Human
ggacuggaaccagg

SEQ ID NO: 2506013 - RNA, 17 nt, Human
ggacgcucccugcucca

SEQ ID NO: 2506014 - RNA, 20 nt, Human
ggacgccugggggugccagg

SEQ ID NO: 2506015 - RNA, 21 nt, Human
ggacugugacaggcagcagag

SEQ ID NO: 2506016 - RNA, 20 nt, Human
ggacugugacaggcagcaga

SEQ ID NO: 2506017 - RNA, 19 nt, Human
ggacugugacaggcagcag

SEQ ID NO: 2506018 - RNA, 20 nt, Human
ggacugucuuucagauacau

SEQ ID NO: 2506019 - RNA, 23 nt, Human
ggacuggcuagaguccucacucc

SEQ ID NO: 2506020 - RNA, 22 nt, Human
ggacuggcgaguccagagagga

SEQ ID NO: 2506021 - RNA, 18 nt, Human
ggacuggccucugcugau

SEQ ID NO: 2506022 - RNA, 15 nt, Human
ggacuggccccuggg

SEQ ID NO: 2506023 - RNA, 14 nt, Human
ggacuggccccugg

SEQ ID NO: 2506024 - RNA, 18 nt, Human
ggacuggaaccagggaga

SEQ ID NO: 2506025 - RNA, 15 nt, Human
ggacuggaguggagc

SEQ ID NO: 2506026 - RNA, 17 nt, Human
ggacuggccccuggguc

SEQ ID NO: 2506027 - RNA, 16 nt, Human
ggacuggccccugggu

SEQ ID NO: 2506028 - RNA, 19 nt, Human
ggacuggcuagaguccuca

SEQ ID NO: 2506029 - RNA, 20 nt, Human
ggacuggcuagaguccucac

SEQ ID NO: 2506030 - RNA, 22 nt, Human
ggacuggcuagaguccucacuc

SEQ ID NO: 2506031 - RNA, 16 nt, Human
ggagaagccauugucu

SEQ ID NO: 2506032 - RNA, 12 nt, Human
ggagaagccauu

SEQ ID NO: 2506033 - RNA, 11 nt, Human
ggagaagccau

SEQ ID NO: 2506034 - RNA, 20 nt, Human
ggagaagccacaggccugag

SEQ ID NO: 2506035 - RNA, 13 nt, Human
ggagaagccagga

SEQ ID NO: 2506036 - RNA, 15 nt, Human
ggagaagccaggaau

SEQ ID NO: 2506037 - RNA, 12 nt, Human
ggagaagccagg

SEQ ID NO: 2506038 - RNA, 17 nt, Human
ggacugugugcucagga

SEQ ID NO: 2506039 - RNA, 15 nt, Human
ggagaaucacuugaa

SEQ ID NO: 2506040 - RNA, 19 nt, Human
ggagaaucacuugaacccg

SEQ ID NO: 2506041 - RNA, 17 nt, Human
ggagaagcggcuggcag

SEQ ID NO: 2506042 - RNA, 18 nt, Human
ggagaagcggcuggcagc

SEQ ID NO: 2506043 - RNA, 15 nt, Human
ggagacagccccaga

SEQ ID NO: 2506044 - RNA, 14 nt, Human
ggagacagccccag

SEQ ID NO: 2506045 - RNA, 18 nt, Human
ggagacagcaucaggguu

SEQ ID NO: 2506046 - RNA, 17 nt, Human
ggagacagcaucagggu

SEQ ID NO: 2506047 - RNA, 14 nt, Human
ggagacagcaucag

SEQ ID NO: 2506048 - RNA, 17 nt, Human
ggagaggaaaaguaagg

SEQ ID NO: 2506049 - RNA, 17 nt, Human
ggagacagccccagagc

SEQ ID NO: 2506050 - RNA, 19 nt, Human
ggagacagccccagagcag

SEQ ID NO: 2506051 - RNA, 12 nt, Human
ggagaggaaaga

SEQ ID NO: 2506052 - RNA, 12 nt, Human
ggagaggagaga

SEQ ID NO: 2506053 - RNA, 15 nt, Human
ggagaggagagccag

SEQ ID NO: 2506054 - RNA, 14 nt, Human
ggagaggagagcca

SEQ ID NO: 2506055 - RNA, 13 nt, Human
ggagaggagagcc

SEQ ID NO: 2506056 - RNA, 12 nt, Human
ggagaggagagc

SEQ ID NO: 2506057 - RNA, 18 nt, Human
ggagaggagagaggcaga

SEQ ID NO: 2506058 - RNA, 15 nt, Human
ggagaggagagaggc

SEQ ID NO: 2506059 - RNA, 14 nt, Human
ggagaggagagagg

SEQ ID NO: 2506060 - RNA, 13 nt, Human
ggagaggagagag

SEQ ID NO: 2506061 - RNA, 20 nt, Human
ggagaggagagccagagaag

SEQ ID NO: 2506062 - RNA, 16 nt, Human
ggagaggagagccaga

SEQ ID NO: 2506063 - RNA, 20 nt, Human
ggagaggaugagagcccaga

SEQ ID NO: 2506064 - RNA, 13 nt, Human
ggagaggaugaga

SEQ ID NO: 2506065 - RNA, 20 nt, Human
ggagaggagugacugagcuu

SEQ ID NO: 2506066 - RNA, 18 nt, Human
ggagaagcccgugugaga

SEQ ID NO: 2506067 - RNA, 14 nt, Human
ggagaaucauguga

SEQ ID NO: 2506068 - RNA, 17 nt, Human
ggagaaucaugugaacc

SEQ ID NO: 2506069 - RNA, 17 nt, Human
ggagaagccauugucuu

SEQ ID NO: 2506070 - RNA, 19 nt, Human
ggagaaucaugugaacccg

SEQ ID NO: 2506071 - RNA, 22 nt, Human
ggagaaugucaguauguggaag

SEQ ID NO: 2506072 - RNA, 21 nt, Human
ggagacacaacaacuccuagg

SEQ ID NO: 2506073 - RNA, 17 nt, Human
ggagacacuggccccuc

SEQ ID NO: 2506074 - RNA, 20 nt, Human
ggagacacuggccccucaaa

SEQ ID NO: 2506075 - RNA, 16 nt, Human
ggagaauuuuacugug

SEQ ID NO: 2506076 - RNA, 22 nt, Human
ggagaauuuagguuuuuauuag

SEQ ID NO: 2506077 - RNA, 18 nt, Human
ggagacaagaaaucccug

SEQ ID NO: 2506078 - RNA, 15 nt, Human
ggagacaagaaaucc

SEQ ID NO: 2506079 - RNA, 22 nt, Human
ggagaggcccucuggaguggcc

SEQ ID NO: 2506080 - RNA, 21 nt, Human
ggagaggcuagaaccaagaag

SEQ ID NO: 2506081 - RNA, 21 nt, Human
ggagagggucuggagaagcag

SEQ ID NO: 2506082 - RNA, 23 nt, Human
ggagagggucuggagaagcagug

SEQ ID NO: 2506083 - RNA, 22 nt, Human
ggagaggaugagagcccagagg

SEQ ID NO: 2506084 - RNA, 21 nt, Human
ggagaggaugagagcccagag

SEQ ID NO: 2506085 - RNA, 13 nt, Human
ggagaggccauga

SEQ ID NO: 2506086 - RNA, 11 nt, Human
ggagaggucuu

SEQ ID NO: 2506087 - RNA, 18 nt, Human
ggagaggucuuuuuuaaa

SEQ ID NO: 2506088 - RNA, 14 nt, Human
ggagaggugccagc

SEQ ID NO: 2506089 - RNA, 23 nt, Human
ggagaggucuuuuuuaaaaggaa

SEQ ID NO: 2506090 - RNA, 16 nt, Human
ggagaggugccagcaa

SEQ ID NO: 2506091 - RNA, 15 nt, Human
ggagaggugccagca

SEQ ID NO: 2506092 - RNA, 13 nt, Human
ggagagguggagc

SEQ ID NO: 2506093 - RNA, 21 nt, Human
ggagagguuauaggucacucc

SEQ ID NO: 2506094 - RNA, 18 nt, Human
ggagaguuuccugaaaca

SEQ ID NO: 2506095 - RNA, 22 nt, Human
ggagagucccagagcaggaggc

SEQ ID NO: 2506096 - RNA, 21 nt, Human
ggagaguccccugaaggucug

SEQ ID NO: 2506097 - RNA, 21 nt, Human
ggagagucccagagcaggagg

SEQ ID NO: 2506098 - RNA, 20 nt, Human
ggagagucccagagcaggag

SEQ ID NO: 2506099 - RNA, 17 nt, Human
ggagagucccagagcag

SEQ ID NO: 2506100 - RNA, 17 nt, Human
ggagaguacagugagcc

SEQ ID NO: 2506101 - RNA, 20 nt, Human
ggagaguacagugagccaag

SEQ ID NO: 2506102 - RNA, 23 nt, Human
ggagagguuauaggucacuccug

SEQ ID NO: 2506103 - RNA, 20 nt, Human
ggagauagccccacaggagg

SEQ ID NO: 2506104 - RNA, 21 nt, Human
ggagauagccccacaggaggu

SEQ ID NO: 2506105 - RNA, 23 nt, Human
ggagaguucaauggcugcugaag

SEQ ID NO: 2506106 - RNA, 14 nt, Human
ggagauagggaaag

SEQ ID NO: 2506107 - RNA, 20 nt, Human
ggagaucaaggagaggaggc

SEQ ID NO: 2506108 - RNA, 22 nt, Human
ggagauaucugagggaggaggc

SEQ ID NO: 2506109 - RNA, 22 nt, Human
ggagauauuuauggggggagaa

SEQ ID NO: 2506110 - RNA, 15 nt, Human
ggagauccuccugca

SEQ ID NO: 2506111 - RNA, 13 nt, Human
ggagauccuccug

SEQ ID NO: 2506112 - RNA, 23 nt, Human
ggagauauuuauggggggagaac

SEQ ID NO: 2506113 - RNA, 23 nt, Human
ggagaugaaaucuuacagcuggg

SEQ ID NO: 2506114 - RNA, 19 nt, Human
ggagaugaagcaaacacau

SEQ ID NO: 2506115 - RNA, 18 nt, Human
gcuuuucacugcuggcug

SEQ ID NO: 2506116 - RNA, 14 nt, Human
gcuuuucacugcug

SEQ ID NO: 2506117 - RNA, 23 nt, Human
gcuuuguuuugcacacuuugcca

SEQ ID NO: 2506118 - RNA, 13 nt, Human
gcuuuucacugcu

SEQ ID NO: 2506119 - RNA, 14 nt, Human
gcuuuguuuugcac

SEQ ID NO: 2506120 - RNA, 21 nt, Human
gcuuuguuuguugucagcuga

SEQ ID NO: 2506121 - RNA, 23 nt, Human
gcuuuucacugcuggcugccuua

SEQ ID NO: 2506122 - RNA, 22 nt, Human
gcuuuucacugcuggcugccuu

SEQ ID NO: 2506123 - RNA, 17 nt, Human
gcuuuucacugcugcaa

SEQ ID NO: 2506124 - RNA, 16 nt, Human
gcuuuucacugcugca

SEQ ID NO: 2506125 - RNA, 13 nt, Human
ggaaaaauauuua

SEQ ID NO: 2506126 - RNA, 14 nt, Human
ggaaaaauauuuaa

SEQ ID NO: 2506127 - RNA, 15 nt, Human
ggaaaaauauuuaag

SEQ ID NO: 2506128 - RNA, 18 nt, Human
ggaaaacaugcuacacac

SEQ ID NO: 2506129 - RNA, 12 nt, Human
ggaaaaaugugu

SEQ ID NO: 2506130 - RNA, 15 nt, Human
ggaaaaaugaguaau

SEQ ID NO: 2506131 - RNA, 17 nt, Human
ggaaaaaugagagaagg

SEQ ID NO: 2506132 - RNA, 15 nt, Human
ggaaaaauccagaaa

SEQ ID NO: 2506133 - RNA, 15 nt, Human
ggaaaacauuccauc

SEQ ID NO: 2506134 - RNA, 22 nt, Human
ggaaaacagaacaucauuagaa

SEQ ID NO: 2506135 - RNA, 18 nt, Human
ggaaaacagacucagguu

SEQ ID NO: 2506136 - RNA, 21 nt, Human
ggaaaagaggaguuucgaggu

SEQ ID NO: 2506137 - RNA, 14 nt, Human
ggaaaagcagcucu

SEQ ID NO: 2506138 - RNA, 18 nt, Human
ggaaaagcagcucucccc

SEQ ID NO: 2506139 - RNA, 14 nt, Human
ggaaaagcugcuga

SEQ ID NO: 2506140 - RNA, 20 nt, Human
ggaaaagccaagaggcugca

SEQ ID NO: 2506141 - RNA, 14 nt, Human
ggaaaagccucugu

SEQ ID NO: 2506142 - RNA, 19 nt, Human
ggaaaagcggacaucagcu

SEQ ID NO: 2506143 - RNA, 20 nt, Human
ggaaaagcugcugacagugu

SEQ ID NO: 2506144 - RNA, 18 nt, Human
ggaaaagcugcugacagu

SEQ ID NO: 2506145 - RNA, 21 nt, Human
ggaaaagggucuugggaaaua

SEQ ID NO: 2506146 - RNA, 20 nt, Human
ggaaaagggucuugggaaau

SEQ ID NO: 2506147 - RNA, 20 nt, Human
ggaaaaggcagggagcgagg

SEQ ID NO: 2506148 - RNA, 15 nt, Human
gcuuugugauuuuug

SEQ ID NO: 2506149 - RNA, 15 nt, Human
gcuuucagccucugg

SEQ ID NO: 2506150 - RNA, 16 nt, Human
gcuuugugugauugaa

SEQ ID NO: 2506151 - RNA, 15 nt, Human
gcuuugugugauuga

SEQ ID NO: 2506152 - RNA, 15 nt, Human
gcuuuguaugcacuu

SEQ ID NO: 2506153 - RNA, 19 nt, Human
gcuuucacuauuuccuuua

SEQ ID NO: 2506154 - RNA, 17 nt, Human
gcuuucacuauuuccuu

SEQ ID NO: 2506155 - RNA, 16 nt, Human
gcuuucaauuccguag

SEQ ID NO: 2506156 - RNA, 16 nt, Human
gcuuuagacccugggu

SEQ ID NO: 2506157 - RNA, 15 nt, Human
gcuuuagacccuggg

SEQ ID NO: 2506158 - RNA, 17 nt, Human
gcuuuagacccugggug

SEQ ID NO: 2506159 - RNA, 23 nt, Human
gcuuuaguccuagaggaccugag

SEQ ID NO: 2506160 - RNA, 10 nt, Human
gcuuuauaaa

SEQ ID NO: 2506161 - RNA, 14 nt, Human
gcuuuauaaauaaa

SEQ ID NO: 2506162 - RNA, 23 nt, Human
gcuuuauuuuuuaaguauuuaua

SEQ ID NO: 2506163 - RNA, 21 nt, Human
gcuuucaauuccguagccagc

SEQ ID NO: 2506164 - RNA, 20 nt, Human
gcuuuauacguguagcuaua

SEQ ID NO: 2506165 - RNA, 19 nt, Human
gcuuuauuuuuuaaguauu

SEQ ID NO: 2506166 - RNA, 21 nt, Human
gcuuuauuuuuuaaguauuua

SEQ ID NO: 2506167 - RNA, 20 nt, Human
gcuugaggguugggcuggug

SEQ ID NO: 2506168 - RNA, 18 nt, Human
gcuugaggguugggcugg

SEQ ID NO: 2506169 - RNA, 16 nt, Human
gcuuuacuguuuguua

SEQ ID NO: 2506170 - RNA, 23 nt, Human
gcuuuacugucaaaauaauuuua

SEQ ID NO: 2506171 - RNA, 14 nt, Human
gcuuuagacccugg

SEQ ID NO: 2506172 - RNA, 21 nt, Human
gcuuuagacacuggcugccag

SEQ ID NO: 2506173 - RNA, 23 nt, Human
ggaaaaucagccugcuccagcug

SEQ ID NO: 2506174 - RNA, 14 nt, Human
ggaaaaugaauaau

SEQ ID NO: 2506175 - RNA, 19 nt, Human
ggaaaaucucuuuuugacu

SEQ ID NO: 2506176 - RNA, 14 nt, Human
ggaaaaugcauugu

SEQ ID NO: 2506177 - RNA, 20 nt, Human
ggaaaaugcagcagggaugc

SEQ ID NO: 2506178 - RNA, 16 nt, Human
ggaaaaugcauuguau

SEQ ID NO: 2506179 - RNA, 15 nt, Human
ggaaaaguacauuua

SEQ ID NO: 2506180 - RNA, 18 nt, Human
ggaaaagguuuuauuuug

SEQ ID NO: 2506181 - RNA, 19 nt, Human
ggaaaaucagccugcucca

SEQ ID NO: 2506182 - RNA, 14 nt, Human
ggaaaggcuccagg

SEQ ID NO: 2506183 - RNA, 13 nt, Human
ggaaaggcuccag

SEQ ID NO: 2506184 - RNA, 12 nt, Human
ggaaaggcucca

SEQ ID NO: 2506185 - RNA, 12 nt, Human
ggaaaauuauuu

SEQ ID NO: 2506186 - RNA, 20 nt, Human
ggaaaggcucagucucagga

SEQ ID NO: 2506187 - RNA, 19 nt, Human
ggaaaggcucagucucagg

SEQ ID NO: 2506188 - RNA, 21 nt, Human
ggaaaggcuccaggagcagcc

SEQ ID NO: 2506189 - RNA, 20 nt, Human
ggaaaggcuccaggagcagc

SEQ ID NO: 2506190 - RNA, 19 nt, Human
ggaaaggcuccaggagcag

SEQ ID NO: 2506191 - RNA, 17 nt, Human
ggaaaggcuccaggagc

SEQ ID NO: 2506192 - RNA, 22 nt, Human
ggaaaggcuccaggagcagcca

SEQ ID NO: 2506193 - RNA, 23 nt, Human
ggaaaggcucagucucaggagca

SEQ ID NO: 2506194 - RNA, 15 nt, Human
ggaaaggcucugaaa

SEQ ID NO: 2506195 - RNA, 20 nt, Human
ggaaaggcucugaaagccag

SEQ ID NO: 2506196 - RNA, 19 nt, Human
ggaaaggggagagccugcu

SEQ ID NO: 2506197 - RNA, 18 nt, Human
ggaaaggggagagccugc

SEQ ID NO: 2506198 - RNA, 14 nt, Human
ggaaaggggagagc

SEQ ID NO: 2506199 - RNA, 13 nt, Human
ggaaaggggagag

SEQ ID NO: 2506200 - RNA, 12 nt, Human
ggaaaggggaga

SEQ ID NO: 2506201 - RNA, 19 nt, Human
ggaaaguguaaagcauucc

SEQ ID NO: 2506202 - RNA, 18 nt, Human
ggaaaggggggagcuggg

SEQ ID NO: 2506203 - RNA, 18 nt, Human
ggaaaguguaaagcauuc

SEQ ID NO: 2506204 - RNA, 14 nt, Human
ggaaaggggggagc

SEQ ID NO: 2506205 - RNA, 21 nt, Human
ggaaaggggagagccugcugg

SEQ ID NO: 2506206 - RNA, 21 nt, Human
ggaaaggggcaggccagagcu

SEQ ID NO: 2506207 - RNA, 15 nt, Human
ggaaauaaaaccuuu

SEQ ID NO: 2506208 - RNA, 16 nt, Human
ggaaauaaaaccuuuc

SEQ ID NO: 2506209 - RNA, 18 nt, Human
ggaaauaaaaccuuucaa

SEQ ID NO: 2506210 - RNA, 19 nt, Human
ggaaauaaaaccuuucaaa

SEQ ID NO: 2506211 - RNA, 20 nt, Human
ggaaauaaaaccuuucaaau

SEQ ID NO: 2506212 - RNA, 17 nt, Human
ggaaauaagaaaaauca

SEQ ID NO: 2506213 - RNA, 22 nt, Human
ggaaauaaaaccuuucaaauuu

SEQ ID NO: 2506214 - RNA, 16 nt, Human
ggaaauaccaguucug

SEQ ID NO: 2506215 - RNA, 20 nt, Human
ggaaauaauaaagaugcucu

SEQ ID NO: 2506216 - RNA, 14 nt, Human
ggaaauauauaugu

SEQ ID NO: 2506217 - RNA, 16 nt, Human
ggaaauaucaguuacu

SEQ ID NO: 2506218 - RNA, 17 nt, Human
ggaaaucaaauaugcaa

SEQ ID NO: 2506219 - RNA, 14 nt, Human
ggaaaucaccgaaa

SEQ ID NO: 2506220 - RNA, 21 nt, Human
ggaaaucaccgaaaacguggc

SEQ ID NO: 2506221 - RNA, 14 nt, Human
ggaaauaugaaugc

SEQ ID NO: 2506222 - RNA, 22 nt, Human
ggaaauaucaguuacucagccc

SEQ ID NO: 2506223 - RNA, 23 nt, Human
ggaacagcuaugggagccccagg

SEQ ID NO: 2506224 - RNA, 23 nt, Human
ggaacaucaucaaggcacugccu

SEQ ID NO: 2506225 - RNA, 22 nt, Human
ggaacaucaucaaggcacugcc

SEQ ID NO: 2506226 - RNA, 15 nt, Human
ggaacaucaucaagg

SEQ ID NO: 2506227 - RNA, 21 nt, Human
ggaaccaaagcgaauuuuaaa

SEQ ID NO: 2506228 - RNA, 16 nt, Human
ggaacaggaaacugau

SEQ ID NO: 2506229 - RNA, 23 nt, Human
ggaacaguguuucccauaauuuu

SEQ ID NO: 2506230 - RNA, 23 nt, Human
ggaacaggcucagaucucauggg

SEQ ID NO: 2506231 - RNA, 18 nt, Human
ggaacaguguuucccaua

SEQ ID NO: 2506232 - RNA, 21 nt, Human
ggaaccccccucccacccacc

SEQ ID NO: 2506233 - RNA, 17 nt, Human
ggaaccccccucccacc

SEQ ID NO: 2506234 - RNA, 22 nt, Human
ggaaccccccucccacccaccg

SEQ ID NO: 2506235 - RNA, 15 nt, Human
ggaaccccccuccca

SEQ ID NO: 2506236 - RNA, 18 nt, Human
ggaaccaugaagacagga

SEQ ID NO: 2506237 - RNA, 15 nt, Human
ggaacccagacucag

SEQ ID NO: 2506238 - RNA, 13 nt, Human
ggaacccagacuc

SEQ ID NO: 2506239 - RNA, 14 nt, Human
ggaacccagacuca

SEQ ID NO: 2506240 - RNA, 11 nt, Human
ggaacccagac

SEQ ID NO: 2506241 - RNA, 17 nt, Human
ggaaccagggagaccga

SEQ ID NO: 2506242 - RNA, 19 nt, Human
ggaaccagagccauggacu

SEQ ID NO: 2506243 - RNA, 22 nt, Human
ggaaccaaagcgaauuuuaaaa

SEQ ID NO: 2506244 - RNA, 12 nt, Human
ggaaccagagcc

SEQ ID NO: 2506245 - RNA, 13 nt, Human
ggaaccagagcca

SEQ ID NO: 2506246 - RNA, 13 nt, Human
ggaaccagggaga

SEQ ID NO: 2506247 - RNA, 23 nt, Human
gcuuaguaaugcuacgugugauu

SEQ ID NO: 2506248 - RNA, 18 nt, Human
gcuuaggcagggcucucu

SEQ ID NO: 2506249 - RNA, 22 nt, Human
gcuuaggaugugugcaugugug

SEQ ID NO: 2506250 - RNA, 13 nt, Human
gcuuaggagagac

SEQ ID NO: 2506251 - RNA, 12 nt, Human
gcuuaggagaga

SEQ ID NO: 2506252 - RNA, 19 nt, Human
gcuuagcuuugcucugcca

SEQ ID NO: 2506253 - RNA, 13 nt, Human
gcuuaggcagggc

SEQ ID NO: 2506254 - RNA, 12 nt, Human
gcuuaggauguu

SEQ ID NO: 2506255 - RNA, 17 nt, Human
gcuuagucacugagaca

SEQ ID NO: 2506256 - RNA, 15 nt, Human
gcuuagucacugaga

SEQ ID NO: 2506257 - RNA, 20 nt, Human
gcuuagucacugagacagcc

SEQ ID NO: 2506258 - RNA, 19 nt, Human
gcuuagucacugagacagc

SEQ ID NO: 2506259 - RNA, 16 nt, Human
gcuuaguuuguguguu

SEQ ID NO: 2506260 - RNA, 14 nt, Human
gcuuaguuugugug

SEQ ID NO: 2506261 - RNA, 17 nt, Human
gcuuagucacugccugc

SEQ ID NO: 2506262 - RNA, 15 nt, Human
gcuuagucacugccu

SEQ ID NO: 2506263 - RNA, 12 nt, Human
gcuuaguuugug

SEQ ID NO: 2506264 - RNA, 21 nt, Human
gcuuagucacugagacagccc

SEQ ID NO: 2506265 - RNA, 13 nt, Human
gcuguugcaguga

SEQ ID NO: 2506266 - RNA, 18 nt, Human
gcuguugauuucuuucca

SEQ ID NO: 2506267 - RNA, 20 nt, Human
gcuguugauugcuaaaugua

SEQ ID NO: 2506268 - RNA, 19 nt, Human
gcuguugauugcuaaaugu

SEQ ID NO: 2506269 - RNA, 16 nt, Human
gcuguugauugcuaaa

SEQ ID NO: 2506270 - RNA, 15 nt, Human
gcuguugauugcuaa

SEQ ID NO: 2506271 - RNA, 21 nt, Human
gcuguugaugaggccucuugg

SEQ ID NO: 2506272 - RNA, 12 nt, Human
gcuguugcugaa

SEQ ID NO: 2506273 - RNA, 23 nt, Human
gcuguugcguaacuggcuguguu

SEQ ID NO: 2506274 - RNA, 21 nt, Human
gcuguugcguaacuggcugug

SEQ ID NO: 2506275 - RNA, 13 nt, Human
gcuguugccucau

SEQ ID NO: 2506276 - RNA, 15 nt, Human
gcuguugccucaucu

SEQ ID NO: 2506277 - RNA, 18 nt, Human
gcuguugagcuguuuucc

SEQ ID NO: 2506278 - RNA, 16 nt, Human
gcuguugagcuguuuu

SEQ ID NO: 2506279 - RNA, 15 nt, Human
gcuguugagcuguuu

SEQ ID NO: 2506280 - RNA, 12 nt, Human
gcuguugagcug

SEQ ID NO: 2506281 - RNA, 23 nt, Human
gcuuagcaggagaggagagccag

SEQ ID NO: 2506282 - RNA, 22 nt, Human
gcuuagcaggagaggagagcca

SEQ ID NO: 2506283 - RNA, 21 nt, Human
gcuuagcaggagaggagagcc

SEQ ID NO: 2506284 - RNA, 18 nt, Human
gcuuagcaggagaggaga

SEQ ID NO: 2506285 - RNA, 16 nt, Human
gcuuagcaggagagga

SEQ ID NO: 2506286 - RNA, 11 nt, Human
gcuuagcagga

SEQ ID NO: 2506287 - RNA, 17 nt, Human
gcuuagcuuugcucugc

SEQ ID NO: 2506288 - RNA, 22 nt, Human
gcuuagccuccugaccugaggc

SEQ ID NO: 2506289 - RNA, 18 nt, Human
gcuuagcuuugcucugcc

SEQ ID NO: 2506290 - RNA, 16 nt, Human
gcuuagagccucccuc

SEQ ID NO: 2506291 - RNA, 12 nt, Human
gcuuagagcagu

SEQ ID NO: 2506292 - RNA, 13 nt, Human
gcuuagagacagu

SEQ ID NO: 2506293 - RNA, 18 nt, Human
gcuuagagaauguucucc

SEQ ID NO: 2506294 - RNA, 16 nt, Human
gcuuagagaauguucu

SEQ ID NO: 2506295 - RNA, 23 nt, Human
gcuuagacuucgacucaggaucc

SEQ ID NO: 2506296 - RNA, 21 nt, Human
gcuuagacuucgacucaggau

SEQ ID NO: 2506297 - RNA, 19 nt, Human
gcuuagaccucagccugug

SEQ ID NO: 2506298 - RNA, 23 nt, Human
gcuuagaccucagccugugcugc

SEQ ID NO: 2506299 - RNA, 21 nt, Human
gcugugggcgugagaccugcc

SEQ ID NO: 2506300 - RNA, 22 nt, Human
gcugugggcgugagaccugccc

SEQ ID NO: 2506301 - RNA, 20 nt, Human
gcugugggcgugagaccugc

SEQ ID NO: 2506302 - RNA, 15 nt, Human
gcugucuccagaccc

SEQ ID NO: 2506303 - RNA, 22 nt, Human
gcugucuccagacccccacccc

SEQ ID NO: 2506304 - RNA, 17 nt, Human
gcugugggcagguggga

SEQ ID NO: 2506305 - RNA, 23 nt, Human
gcuguggugugucccccucuguc

SEQ ID NO: 2506306 - RNA, 22 nt, Human
gcuguggggcugguagcucagg

SEQ ID NO: 2506307 - RNA, 18 nt, Human
gcuguggguacagagagg

SEQ ID NO: 2506308 - RNA, 23 nt, Human
gcugugguagggggugucucagg

SEQ ID NO: 2506309 - RNA, 16 nt, Human
gcuguggggcugguag

SEQ ID NO: 2506310 - RNA, 23 nt, Human
gcugugggcaggugggagcuuga

SEQ ID NO: 2506311 - RNA, 18 nt, Human
gcugugggccucaaggac

SEQ ID NO: 2506312 - RNA, 21 nt, Human
gcuguggggcugguagcucag

SEQ ID NO: 2506313 - RNA, 19 nt, Human
gcugugggccucaaggacu

SEQ ID NO: 2506314 - RNA, 22 nt, Human
gcuguucccauguagcccccug

SEQ ID NO: 2506315 - RNA, 14 nt, Human
gcuguucagcuggu

SEQ ID NO: 2506316 - RNA, 13 nt, Human
gcuguucagcugg

SEQ ID NO: 2506317 - RNA, 19 nt, Human
gcugccaaugggagcucau

SEQ ID NO: 2506318 - RNA, 16 nt, Human
gcugccaaugggagcu

SEQ ID NO: 2506319 - RNA, 15 nt, Human
gcugccaaugggagc

SEQ ID NO: 2506320 - RNA, 20 nt, Human
gcugucuacacuaagagaga

SEQ ID NO: 2506321 - RNA, 22 nt, Human
gcugucgauguaggcauucugg

SEQ ID NO: 2506322 - RNA, 13 nt, Human
gcugucuccagac

SEQ ID NO: 2506323 - RNA, 14 nt, Human
gcugucuccagacc

SEQ ID NO: 2506324 - RNA, 20 nt, Human
gcuguccucagguggccaug

SEQ ID NO: 2506325 - RNA, 17 nt, Human
gcuguccuuacccaucu

SEQ ID NO: 2506326 - RNA, 22 nt, Human
gcuguccuuacccaucugcacc

SEQ ID NO: 2506327 - RNA, 21 nt, Human
gcuguccucagguggccaugc

SEQ ID NO: 2506328 - RNA, 15 nt, Human
gcuucauccuccuca

SEQ ID NO: 2506329 - RNA, 12 nt, Human
gcuucauccucc

SEQ ID NO: 2506330 - RNA, 16 nt, Human
gcuucauuuccugugu

SEQ ID NO: 2506331 - RNA, 13 nt, Human
gcuucauuuccug

SEQ ID NO: 2506332 - RNA, 11 nt, Human
gcuucauacag

SEQ ID NO: 2506333 - RNA, 22 nt, Human
gcuucauacagggaugguguuc

SEQ ID NO: 2506334 - RNA, 23 nt, Human
gcuucauacuucaugaaauccug

SEQ ID NO: 2506335 - RNA, 18 nt, Human
gcuucaguggcagcugcu

SEQ ID NO: 2506336 - RNA, 17 nt, Human
gcuucaguggcagcugc

SEQ ID NO: 2506337 - RNA, 18 nt, Human
gcuuaugacaucacuugu

SEQ ID NO: 2506338 - RNA, 22 nt, Human
gcuuaugacaucacuuguacaa

SEQ ID NO: 2506339 - RNA, 23 nt, Human
gcuuaugacaucacuuguacaaa

SEQ ID NO: 2506340 - RNA, 16 nt, Human
gcuucaguggcagcug

SEQ ID NO: 2506341 - RNA, 21 nt, Human
gcuuaguuuguguguugucuc

SEQ ID NO: 2506342 - RNA, 20 nt, Human
gcuuaguuuguguguugucu

SEQ ID NO: 2506343 - RNA, 18 nt, Human
gcuuagucacugccugca

SEQ ID NO: 2506344 - RNA, 12 nt, Human
gcuuauacacuu

SEQ ID NO: 2506345 - RNA, 13 nt, Human
gcuuaucucaggg

SEQ ID NO: 2506346 - RNA, 19 nt, Human
gcuuaucucaggggugugc

SEQ ID NO: 2506347 - RNA, 16 nt, Human
gcuugaggguugggcu

SEQ ID NO: 2506348 - RNA, 12 nt, Human
gcuucugccugc

SEQ ID NO: 2506349 - RNA, 21 nt, Human
gcuucugcacccuccacccug

SEQ ID NO: 2506350 - RNA, 19 nt, Human
gcuucugcacccuccaccc

SEQ ID NO: 2506351 - RNA, 18 nt, Human
gcuucugcacccuccacc

SEQ ID NO: 2506352 - RNA, 17 nt, Human
gcuucugcacccuccac

SEQ ID NO: 2506353 - RNA, 15 nt, Human
gcuucugcacccucc

SEQ ID NO: 2506354 - RNA, 14 nt, Human
gcuucugcacccuc

SEQ ID NO: 2506355 - RNA, 13 nt, Human
gcuucugcacccu

SEQ ID NO: 2506356 - RNA, 21 nt, Human
gcuucugccacuucccaggua

SEQ ID NO: 2506357 - RNA, 19 nt, Human
gcuucugccacuucccagg

SEQ ID NO: 2506358 - RNA, 18 nt, Human
gcuucugccacuucccag

SEQ ID NO: 2506359 - RNA, 16 nt, Human
gcuucugccacuuccc

SEQ ID NO: 2506360 - RNA, 14 nt, Human
gcuucugccacuuc

SEQ ID NO: 2506361 - RNA, 13 nt, Human
gcuucugccacuu

SEQ ID NO: 2506362 - RNA, 12 nt, Human
gcuucugccacu

SEQ ID NO: 2506363 - RNA, 19 nt, Human
gcuucuccgccagccuccu

SEQ ID NO: 2506364 - RNA, 18 nt, Human
gcuucuccgccagccucc

SEQ ID NO: 2506365 - RNA, 17 nt, Human
gcuucuccgccagccuc

SEQ ID NO: 2506366 - RNA, 16 nt, Human
gcuucuccgccagccu

SEQ ID NO: 2506367 - RNA, 15 nt, Human
gcuucuccgccagcc

SEQ ID NO: 2506368 - RNA, 14 nt, Human
gcuucuccgccagc

SEQ ID NO: 2506369 - RNA, 21 nt, Human
gcuucuccgccagccuccucu

SEQ ID NO: 2506370 - RNA, 20 nt, Human
gcuucuccgccagccuccuc

SEQ ID NO: 2506371 - RNA, 22 nt, Human
gcuucucugugaacgauuuaga

SEQ ID NO: 2506372 - RNA, 19 nt, Human
gcuucugaaugcugcuacu

SEQ ID NO: 2506373 - RNA, 19 nt, Human
gcuucucugugaacgauuu

SEQ ID NO: 2506374 - RNA, 12 nt, Human
gcuucugcaccc

SEQ ID NO: 2506375 - RNA, 15 nt, Human
gcuuccagugaggcu

SEQ ID NO: 2506376 - RNA, 19 nt, Human
gcuuccaggaaacuccaca

SEQ ID NO: 2506377 - RNA, 17 nt, Human
gcuucauuuccuguguc

SEQ ID NO: 2506378 - RNA, 23 nt, Human
gcuuccagauugacgacaagugc

SEQ ID NO: 2506379 - RNA, 20 nt, Human
gcuuccagguaucuccagga

SEQ ID NO: 2506380 - RNA, 19 nt, Human
gcuuccagguaucuccagg

SEQ ID NO: 2506381 - RNA, 21 nt, Human
gcuuccaggaaacuccacauc

SEQ ID NO: 2506382 - RNA, 16 nt, Human
gcuuccagugaggcuc

SEQ ID NO: 2506383 - RNA, 18 nt, Human
gcuucucccacuuggcca

SEQ ID NO: 2506384 - RNA, 12 nt, Human
gcuucuccaggc

SEQ ID NO: 2506385 - RNA, 17 nt, Human
gcuucuccagccuggac

SEQ ID NO: 2506386 - RNA, 14 nt, Human
gcuucuccagccug

SEQ ID NO: 2506387 - RNA, 19 nt, Human
gcuucucccacuuggccaa

SEQ ID NO: 2506388 - RNA, 22 nt, Human
gcuuccagguaucuccaggauu

SEQ ID NO: 2506389 - RNA, 21 nt, Human
gcuuccagguaucuccaggau

SEQ ID NO: 2506390 - RNA, 13 nt, Human
gcuucuccagccu

SEQ ID NO: 2506391 - RNA, 22 nt, Human
gcuucucauccugcaggcagcu

SEQ ID NO: 2506392 - RNA, 21 nt, Human
gccucaagugauucuccugcc

SEQ ID NO: 2506393 - RNA, 20 nt, Human
gccucaagugauucuccugc

SEQ ID NO: 2506394 - RNA, 19 nt, Human
gccucaagugauucuccug

SEQ ID NO: 2506395 - RNA, 17 nt, Human
gccucaacccucccuca

SEQ ID NO: 2506396 - RNA, 18 nt, Human
gccucaacccucccucag

SEQ ID NO: 2506397 - RNA, 19 nt, Human
gccucaacccucccucagc

SEQ ID NO: 2506398 - RNA, 21 nt, Human
gccucaacccucccucagccc

SEQ ID NO: 2506399 - RNA, 16 nt, Human
gccucaagucacuccc

SEQ ID NO: 2506400 - RNA, 19 nt, Human
gccuaucagugugcccccc

SEQ ID NO: 2506401 - RNA, 18 nt, Human
gccuaucagugugccccc

SEQ ID NO: 2506402 - RNA, 16 nt, Human
gccuaucagugugccc

SEQ ID NO: 2506403 - RNA, 15 nt, Human
gccuaucagugugcc

SEQ ID NO: 2506404 - RNA, 14 nt, Human
gccuaucagugugc

SEQ ID NO: 2506405 - RNA, 13 nt, Human
gccuaucagugug

SEQ ID NO: 2506406 - RNA, 20 nt, Human
gccuaucagaguugcugcaa

SEQ ID NO: 2506407 - RNA, 23 nt, Human
gccuaucagugugccccccaucc

SEQ ID NO: 2506408 - RNA, 16 nt, Human
gccucaaccuccuggg

SEQ ID NO: 2506409 - RNA, 14 nt, Human
gccucaaccuccug

SEQ ID NO: 2506410 - RNA, 17 nt, Human
gccuaagugcagccccg

SEQ ID NO: 2506411 - RNA, 23 nt, Human
gccgagcucguguauccuggggc

SEQ ID NO: 2506412 - RNA, 21 nt, Human
gccgagcucguguauccuggg

SEQ ID NO: 2506413 - RNA, 20 nt, Human
gccgagccgggccuggggcu

SEQ ID NO: 2506414 - RNA, 16 nt, Human
gccuaaggcugaacuu

SEQ ID NO: 2506415 - RNA, 19 nt, Human
gccgagauagccaaggcca

SEQ ID NO: 2506416 - RNA, 19 nt, Human
gccgagccgggccuggggc

SEQ ID NO: 2506417 - RNA, 17 nt, Human
gccgagccgggccuggg

SEQ ID NO: 2506418 - RNA, 16 nt, Human
gccgagccgggccugg

SEQ ID NO: 2506419 - RNA, 15 nt, Human
gccgagccgggccug

SEQ ID NO: 2506420 - RNA, 22 nt, Human
gccuauauuuuuuguuaaauga

SEQ ID NO: 2506421 - RNA, 16 nt, Human
gccuauaaugaagcuu

SEQ ID NO: 2506422 - RNA, 23 nt, Human
gccuaucaaagaccuugugugua

SEQ ID NO: 2506423 - RNA, 21 nt, Human
gccuauaaugaagcuuuauac

SEQ ID NO: 2506424 - RNA, 14 nt, Human
gccuaaggcugaac

SEQ ID NO: 2506425 - RNA, 22 nt, Human
gccgagcucguguauccugggg

SEQ ID NO: 2506426 - RNA, 16 nt, Human
gccuaaguggcugcug

SEQ ID NO: 2506427 - RNA, 17 nt, Human
gccuaaguggcugcuga

SEQ ID NO: 2506428 - RNA, 15 nt, Human
gccucacccccucgg

SEQ ID NO: 2506429 - RNA, 18 nt, Human
gccucaagucacucccaa

SEQ ID NO: 2506430 - RNA, 22 nt, Human
gccucaacccucccucagcccc

SEQ ID NO: 2506431 - RNA, 23 nt, Human
gccucaacccucccucagccccu

SEQ ID NO: 2506432 - RNA, 21 nt, Human
gccucacaguccuuaccagca

SEQ ID NO: 2506433 - RNA, 18 nt, Human
gccucacuugaauguguc

SEQ ID NO: 2506434 - RNA, 20 nt, Human
gccucacuugaaugugucac

SEQ ID NO: 2506435 - RNA, 22 nt, Human
gccucaccuuggggcuugacuu

SEQ ID NO: 2506436 - RNA, 16 nt, Human
gccucacuugaaugug

SEQ ID NO: 2506437 - RNA, 23 nt, Human
gccucacccccucgggucuccuc

SEQ ID NO: 2506438 - RNA, 22 nt, Human
gccucacccccucgggucuccu

SEQ ID NO: 2506439 - RNA, 16 nt, Human
gccucacccccucggg

SEQ ID NO: 2506440 - RNA, 23 nt, Human
gccucagccucccaaagugcugg

SEQ ID NO: 2506441 - RNA, 16 nt, Human
gccucagccucccaag

SEQ ID NO: 2506442 - RNA, 23 nt, Human
gccucagaauugaucauuuuccc

SEQ ID NO: 2506443 - RNA, 18 nt, Human
gccucagccuccugagua

SEQ ID NO: 2506444 - RNA, 14 nt, Human
gccucagccucccg

SEQ ID NO: 2506445 - RNA, 16 nt, Human
gccucagccuccugag

SEQ ID NO: 2506446 - RNA, 23 nt, Human
gccucaguccuccccucacagcc

SEQ ID NO: 2506447 - RNA, 22 nt, Human
gccucaguccuccccucacagc

SEQ ID NO: 2506448 - RNA, 18 nt, Human
gccucaguccuccccuca

SEQ ID NO: 2506449 - RNA, 16 nt, Human
gccucaguccuccccu

SEQ ID NO: 2506450 - RNA, 15 nt, Human
gccucaguccucccc

SEQ ID NO: 2506451 - RNA, 20 nt, Human
gccucaguaagacgacaagg

SEQ ID NO: 2506452 - RNA, 22 nt, Human
gccucaguaaguaucuggagga

SEQ ID NO: 2506453 - RNA, 15 nt, Human
gccucagucucccuc

SEQ ID NO: 2506454 - RNA, 18 nt, Human
gccucagucucccucccu

SEQ ID NO: 2506455 - RNA, 14 nt, Human
gccucagugccacu

SEQ ID NO: 2506456 - RNA, 12 nt, Human
gccucagugcca

SEQ ID NO: 2506457 - RNA, 20 nt, Human
gccucagcugccucacuucc

SEQ ID NO: 2506458 - RNA, 16 nt, Human
gccucagcugccucac

SEQ ID NO: 2506459 - RNA, 19 nt, Human
gccucagcugccucacuuc

SEQ ID NO: 2506460 - RNA, 14 nt, Human
gccucagcugccuc

SEQ ID NO: 2506461 - RNA, 15 nt, Human
gccucagcugccuca

SEQ ID NO: 2506462 - RNA, 14 nt, Human
gccucagguuccua

SEQ ID NO: 2506463 - RNA, 13 nt, Human
gccucagguuccu

SEQ ID NO: 2506464 - RNA, 16 nt, Human
gccucaggugggccgc

SEQ ID NO: 2506465 - RNA, 15 nt, Human
gccucccgaguagcu

SEQ ID NO: 2506466 - RNA, 23 nt, Human
gccucccgaauagcugggacuac

SEQ ID NO: 2506467 - RNA, 20 nt, Human
gccucggacuuagcugggag

SEQ ID NO: 2506468 - RNA, 21 nt, Human
gccucggacuuagcugggaga

SEQ ID NO: 2506469 - RNA, 16 nt, Human
gccuccccugugcagu

SEQ ID NO: 2506470 - RNA, 20 nt, Human
gccuccccugcugaaggugg

SEQ ID NO: 2506471 - RNA, 15 nt, Human
gccuccccugcugaa

SEQ ID NO: 2506472 - RNA, 23 nt, Human
gccucccacccgaugcugcuuuc

SEQ ID NO: 2506473 - RNA, 18 nt, Human
gccucggcuccugcugca

SEQ ID NO: 2506474 - RNA, 16 nt, Human
gccucggcuccugcug

SEQ ID NO: 2506475 - RNA, 15 nt, Human
gccucggcuccugcu

SEQ ID NO: 2506476 - RNA, 18 nt, Human
gccucggcuuuucucagc

SEQ ID NO: 2506477 - RNA, 21 nt, Human
gccucgggacaccugcccugc

SEQ ID NO: 2506478 - RNA, 23 nt, Human
gccucgggaaccucacucuugcc

SEQ ID NO: 2506479 - RNA, 18 nt, Human
gccucgggaaccucacuc

SEQ ID NO: 2506480 - RNA, 17 nt, Human
gccucggcuccugcugc

SEQ ID NO: 2506481 - RNA, 19 nt, Human
gccucggcuuuucucagcu

SEQ ID NO: 2506482 - RNA, 20 nt, Human
gccucggcuuuucucagcug

SEQ ID NO: 2506483 - RNA, 14 nt, Human
gccucggcuccugc

SEQ ID NO: 2506484 - RNA, 17 nt, Human
gccucggccucccaaag

SEQ ID NO: 2506485 - RNA, 14 nt, Human
gccucggagccuca

SEQ ID NO: 2506486 - RNA, 15 nt, Human
gccucggagccucau

SEQ ID NO: 2506487 - RNA, 17 nt, Human
gccucggagccucaucc

SEQ ID NO: 2506488 - RNA, 23 nt, Human
gccucggagccucauccgaggca

SEQ ID NO: 2506489 - RNA, 21 nt, Human
gccucuaaccccaggccccga

SEQ ID NO: 2506490 - RNA, 20 nt, Human
gccucuaaccccaggccccg

SEQ ID NO: 2506491 - RNA, 23 nt, Human
gccucuaccugacacucccuugg

SEQ ID NO: 2506492 - RNA, 19 nt, Human
gccucuaaccccaggcccc

SEQ ID NO: 2506493 - RNA, 18 nt, Human
gccucuaaccccaggccc

SEQ ID NO: 2506494 - RNA, 17 nt, Human
gccucuaaccccaggcc

SEQ ID NO: 2506495 - RNA, 16 nt, Human
gccucuaaccccaggc

SEQ ID NO: 2506496 - RNA, 13 nt, Human
gccucgggaccuc

SEQ ID NO: 2506497 - RNA, 22 nt, Human
gccucgggacaccugcccugcc

SEQ ID NO: 2506498 - RNA, 15 nt, Human
gccucuaaccccagg

SEQ ID NO: 2506499 - RNA, 23 nt, Human
gccucuagggaccccuccucccu

SEQ ID NO: 2506500 - RNA, 20 nt, Human
gccucuagggaccccuccuc

SEQ ID NO: 2506501 - RNA, 19 nt, Human
gccucuagggaccccuccu

SEQ ID NO: 2506502 - RNA, 18 nt, Human
gccucuagggaccccucc

SEQ ID NO: 2506503 - RNA, 17 nt, Human
gccucuagggaccccuc

SEQ ID NO: 2506504 - RNA, 13 nt, Human
gccucuagggacc

SEQ ID NO: 2506505 - RNA, 15 nt, Human
gccucuccuuuguau

SEQ ID NO: 2506506 - RNA, 14 nt, Human
gccucuccuuugua

SEQ ID NO: 2506507 - RNA, 12 nt, Human
gccucuccuuug

SEQ ID NO: 2506508 - RNA, 22 nt, Human
gccucuccuuguggccugggcc

SEQ ID NO: 2506509 - RNA, 17 nt, Human
gccucuccuuuguauau

SEQ ID NO: 2506510 - RNA, 16 nt, Human
gccucuccuuuguaua

SEQ ID NO: 2506511 - RNA, 23 nt, Human
gccucuccuuuguauauuauuuc

SEQ ID NO: 2506512 - RNA, 19 nt, Human
gccucucugcaggucccua

SEQ ID NO: 2506513 - RNA, 21 nt, Human
gccucuccuuguggccugggc

SEQ ID NO: 2506514 - RNA, 20 nt, Human
gccucuccuuguggccuggg

SEQ ID NO: 2506515 - RNA, 14 nt, Human
gccucucccuggcc

SEQ ID NO: 2506516 - RNA, 15 nt, Human
gccucucccuggccc

SEQ ID NO: 2506517 - RNA, 16 nt, Human
gccucucccuggcccu

SEQ ID NO: 2506518 - RNA, 15 nt, Human
gccucagugccacua

SEQ ID NO: 2506519 - RNA, 21 nt, Human
gccucagucucccuucuccca

SEQ ID NO: 2506520 - RNA, 24 nt, Human
gccucaguccuccccucacagccu

SEQ ID NO: 2506521 - RNA, 22 nt, Human
gccucagucucccuucucccau

SEQ ID NO: 2506522 - RNA, 11 nt, Human
gccucagugga

SEQ ID NO: 2506523 - RNA, 21 nt, Human
gccucaguggacuuuccaccc

SEQ ID NO: 2506524 - RNA, 22 nt, Human
gccucaguggacuuuccacccc

SEQ ID NO: 2506525 - RNA, 21 nt, Human
gccucccaacucaccccagcc

SEQ ID NO: 2506526 - RNA, 22 nt, Human
gccucauauuuaaagacaggga

SEQ ID NO: 2506527 - RNA, 15 nt, Human
gccucauauuuaaag

SEQ ID NO: 2506528 - RNA, 13 nt, Human
gccucauauuuaa

SEQ ID NO: 2506529 - RNA, 14 nt, Human
gccucaguguauuu

SEQ ID NO: 2506530 - RNA, 16 nt, Human
gccucauccgaggcag

SEQ ID NO: 2506531 - RNA, 17 nt, Human
gccucauccgaggcagg

SEQ ID NO: 2506532 - RNA, 23 nt, Human
gccucccaacucaccccagcccc

SEQ ID NO: 2506533 - RNA, 22 nt, Human
gccucccaacucaccccagccc

SEQ ID NO: 2506534 - RNA, 16 nt, Human
gccucccacagugacu

SEQ ID NO: 2506535 - RNA, 14 nt, Human
gccucccacaguga

SEQ ID NO: 2506536 - RNA, 13 nt, Human
gccucccacagug

SEQ ID NO: 2506537 - RNA, 12 nt, Human
gccucccacagu

SEQ ID NO: 2506538 - RNA, 23 nt, Human
gccucccacagugacucgggcuc

SEQ ID NO: 2506539 - RNA, 12 nt, Human
gccucccacccc

SEQ ID NO: 2506540 - RNA, 18 nt, Human
gccucauccgaggcaggg

SEQ ID NO: 2506541 - RNA, 19 nt, Human
gccucauccgaggcagggu

SEQ ID NO: 2506542 - RNA, 13 nt, Human
gccucccacagac

SEQ ID NO: 2506543 - RNA, 19 nt, Human
gccuccccugccaccaggc

SEQ ID NO: 2506544 - RNA, 16 nt, Human
gccuccccugccacca

SEQ ID NO: 2506545 - RNA, 15 nt, Human
gccuccccugccacc

SEQ ID NO: 2506546 - RNA, 14 nt, Human
gccuccccugccac

SEQ ID NO: 2506547 - RNA, 19 nt, Human
gccuccccucuccuuccug

SEQ ID NO: 2506548 - RNA, 21 nt, Human
gccuccccucuccuuccugug

SEQ ID NO: 2506549 - RNA, 14 nt, Human
gccuccccugccag

SEQ ID NO: 2506550 - RNA, 15 nt, Human
gccuccccugccagg

SEQ ID NO: 2506551 - RNA, 17 nt, Human
gccuccccugccagggc

SEQ ID NO: 2506552 - RNA, 18 nt, Human
gccuccccugccagggca

SEQ ID NO: 2506553 - RNA, 21 nt, Human
gccucccgaauagcugggacu

SEQ ID NO: 2506554 - RNA, 21 nt, Human
gccucccacccgaugcugcuu

SEQ ID NO: 2506555 - RNA, 20 nt, Human
gccucccacccgaugcugcu

SEQ ID NO: 2506556 - RNA, 19 nt, Human
gccucccacccgaugcugc

SEQ ID NO: 2506557 - RNA, 18 nt, Human
gccucccacccgaugcug

SEQ ID NO: 2506558 - RNA, 12 nt, Human
gccucccacccg

SEQ ID NO: 2506559 - RNA, 17 nt, Human
gccucccacccccaucu

SEQ ID NO: 2506560 - RNA, 14 nt, Human
gccucccacgacug

SEQ ID NO: 2506561 - RNA, 21 nt, Human
gccucccacgacugcccggca

SEQ ID NO: 2506562 - RNA, 18 nt, Human
gccuccccucuccuuccu

SEQ ID NO: 2506563 - RNA, 12 nt, Human
gccucccacugg

SEQ ID NO: 2506564 - RNA, 14 nt, Human
gccugcagagagaa

SEQ ID NO: 2506565 - RNA, 12 nt, Human
gccugcagagag

SEQ ID NO: 2506566 - RNA, 11 nt, Human
gccugcagaga

SEQ ID NO: 2506567 - RNA, 16 nt, Human
gccugcagacucacug

SEQ ID NO: 2506568 - RNA, 16 nt, Human
gccugcagaauuuggg

SEQ ID NO: 2506569 - RNA, 22 nt, Human
gccugcacggugggccuugcug

SEQ ID NO: 2506570 - RNA, 21 nt, Human
gccugcacggugggccuugcu

SEQ ID NO: 2506571 - RNA, 12 nt, Human
gccugcagagcu

SEQ ID NO: 2506572 - RNA, 15 nt, Human
gccugcagagcugcg

SEQ ID NO: 2506573 - RNA, 15 nt, Human
gccugcuccagcugu

SEQ ID NO: 2506574 - RNA, 21 nt, Human
gccugauugccaagcucagga

SEQ ID NO: 2506575 - RNA, 20 nt, Human
gccugauugccaagcucagg

SEQ ID NO: 2506576 - RNA, 16 nt, Human
gccugcaaacgcugcc

SEQ ID NO: 2506577 - RNA, 17 nt, Human
gccugcaaacgcugccu

SEQ ID NO: 2506578 - RNA, 18 nt, Human
gccugcaaacgcugccug

SEQ ID NO: 2506579 - RNA, 16 nt, Human
gccugcacaauaaaaa

SEQ ID NO: 2506580 - RNA, 19 nt, Human
gccugauugccaagcucag

SEQ ID NO: 2506581 - RNA, 20 nt, Human
gccugauucggcugucucag

SEQ ID NO: 2506582 - RNA, 17 nt, Human
gccugauucggcugucu

SEQ ID NO: 2506583 - RNA, 17 nt, Human
gccugauggggaggguc

SEQ ID NO: 2506584 - RNA, 14 nt, Human
gccugauggaccug

SEQ ID NO: 2506585 - RNA, 13 nt, Human
gccugauggaccu

SEQ ID NO: 2506586 - RNA, 20 nt, Human
gccugaugcucccuccccug

SEQ ID NO: 2506587 - RNA, 22 nt, Human
gccugcuuuucacugcugcaag

SEQ ID NO: 2506588 - RNA, 21 nt, Human
gccugcuuuucacugcugcaa

SEQ ID NO: 2506589 - RNA, 20 nt, Human
gccugcuuuucacugcugca

SEQ ID NO: 2506590 - RNA, 18 nt, Human
gccugcuuuucacugcug

SEQ ID NO: 2506591 - RNA, 22 nt, Human
gccugcuuuuuauggccuguga

SEQ ID NO: 2506592 - RNA, 19 nt, Human
gccugcuuuuuauggccug

SEQ ID NO: 2506593 - RNA, 18 nt, Human
gccugcuuuuuauggccu

SEQ ID NO: 2506594 - RNA, 22 nt, Human
gccugcuggucacagccuccuc

SEQ ID NO: 2506595 - RNA, 16 nt, Human
gccugcucccagcagc

SEQ ID NO: 2506596 - RNA, 15 nt, Human
gccugcucccagcag

SEQ ID NO: 2506597 - RNA, 13 nt, Human
gccugcucccagc

SEQ ID NO: 2506598 - RNA, 18 nt, Human
gccugcagagagaagccu

SEQ ID NO: 2506599 - RNA, 17 nt, Human
gccugcagagagaagcc

SEQ ID NO: 2506600 - RNA, 16 nt, Human
gccugcagagagaagc

SEQ ID NO: 2506601 - RNA, 22 nt, Human
gccugcugugauuccacuacac

SEQ ID NO: 2506602 - RNA, 16 nt, Human
gccugcuuccugucuu

SEQ ID NO: 2506603 - RNA, 17 nt, Human
gccugcucccagcagcc

SEQ ID NO: 2506604 - RNA, 16 nt, Human
gccugcuccagcuguu

SEQ ID NO: 2506605 - RNA, 18 nt, Human
gccugcuccagcuguuca

SEQ ID NO: 2506606 - RNA, 18 nt, Human
gccucugcugauccuccc

SEQ ID NO: 2506607 - RNA, 13 nt, Human
gccucugccuguc

SEQ ID NO: 2506608 - RNA, 19 nt, Human
gccucucgguggccagcag

SEQ ID NO: 2506609 - RNA, 19 nt, Human
gccucugcugauccuccca

SEQ ID NO: 2506610 - RNA, 11 nt, Human
gccucugcugc

SEQ ID NO: 2506611 - RNA, 18 nt, Human
gccugaaguuggagugag

SEQ ID NO: 2506612 - RNA, 22 nt, Human
gccugaagucacacagugaguc

SEQ ID NO: 2506613 - RNA, 21 nt, Human
gccucucugcaggucccuaau

SEQ ID NO: 2506614 - RNA, 20 nt, Human
gccucucugcaggucccuaa

SEQ ID NO: 2506615 - RNA, 18 nt, Human
gccucucugcaggucccu

SEQ ID NO: 2506616 - RNA, 23 nt, Human
gccucucugcaggucccuaauaa

SEQ ID NO: 2506617 - RNA, 12 nt, Human
gccucugccugu

SEQ ID NO: 2506618 - RNA, 18 nt, Human
gccucugccucugacaca

SEQ ID NO: 2506619 - RNA, 15 nt, Human
gccugagucuccugu

SEQ ID NO: 2506620 - RNA, 13 nt, Human
gccugagucuccu

SEQ ID NO: 2506621 - RNA, 23 nt, Human
gccugacccuacuucuuuugcuc

SEQ ID NO: 2506622 - RNA, 13 nt, Human
gccugagucaccu

SEQ ID NO: 2506623 - RNA, 21 nt, Human
gccugacaaccacuggucugu

SEQ ID NO: 2506624 - RNA, 20 nt, Human
gccugacaaccacuggucug

SEQ ID NO: 2506625 - RNA, 22 nt, Human
gccugaaugcuuauagguggcc

SEQ ID NO: 2506626 - RNA, 22 nt, Human
gccugacauuuggaguguuccc

SEQ ID NO: 2506627 - RNA, 21 nt, Human
gccugauccagccucuccccu

SEQ ID NO: 2506628 - RNA, 18 nt, Human
gccugauccagccucucc

SEQ ID NO: 2506629 - RNA, 17 nt, Human
gccugaugacagagcga

SEQ ID NO: 2506630 - RNA, 12 nt, Human
gccugaugacag

SEQ ID NO: 2506631 - RNA, 14 nt, Human
gccugaugcucccu

SEQ ID NO: 2506632 - RNA, 16 nt, Human
gccugaugcucccucc

SEQ ID NO: 2506633 - RNA, 17 nt, Human
gccugaugcucccuccc

SEQ ID NO: 2506634 - RNA, 19 nt, Human
gccugaugcucccuccccu

SEQ ID NO: 2506635 - RNA, 22 nt, Human
gccugauccagccucuccccug

SEQ ID NO: 2506636 - RNA, 16 nt, Human
gccugaucagaccacg

SEQ ID NO: 2506637 - RNA, 20 nt, Human
gccugaucagaccacggcuc

SEQ ID NO: 2506638 - RNA, 15 nt, Human
gccugagugccuggc

SEQ ID NO: 2506639 - RNA, 16 nt, Human
gccugagucuccugug

SEQ ID NO: 2506640 - RNA, 15 nt, Human
gccugauauaaaugc

SEQ ID NO: 2506641 - RNA, 14 nt, Human
gccugauauaaaug

SEQ ID NO: 2506642 - RNA, 17 nt, Human
gccugggcagaaggaag

SEQ ID NO: 2506643 - RNA, 16 nt, Human
gccugggcagaaggaa

SEQ ID NO: 2506644 - RNA, 22 nt, Human
gccuggcccacagcaggugcug

SEQ ID NO: 2506645 - RNA, 21 nt, Human
gccuggcccacagcaggugcu

SEQ ID NO: 2506646 - RNA, 23 nt, Human
gccuggggcuccuuucuccagcc

SEQ ID NO: 2506647 - RNA, 18 nt, Human
gccugggcagaaggaaga

SEQ ID NO: 2506648 - RNA, 17 nt, Human
gccuggggcuggccucc

SEQ ID NO: 2506649 - RNA, 22 nt, Human
gccugggggcagggagaggagu

SEQ ID NO: 2506650 - RNA, 14 nt, Human
gccuggggcuggcc

SEQ ID NO: 2506651 - RNA, 20 nt, Human
gccugggggcugggcagagg

SEQ ID NO: 2506652 - RNA, 21 nt, Human
gccugggggcugggcagagga

SEQ ID NO: 2506653 - RNA, 19 nt, Human
gccuguagucccagccacu

SEQ ID NO: 2506654 - RNA, 19 nt, Human
gccuguagcccacucugcu

SEQ ID NO: 2506655 - RNA, 22 nt, Human
gccuguagcccacucugcucgc

SEQ ID NO: 2506656 - RNA, 14 nt, Human
gccuguagcaguga

SEQ ID NO: 2506657 - RNA, 13 nt, Human
gccuguagcccac

SEQ ID NO: 2506658 - RNA, 14 nt, Human
gccuguaguuagga

SEQ ID NO: 2506659 - RNA, 16 nt, Human
gccuguaguuaggaaa

SEQ ID NO: 2506660 - RNA, 17 nt, Human
gccuguaguuaggaaau

SEQ ID NO: 2506661 - RNA, 18 nt, Human
gccuguaguuaggaaaua

SEQ ID NO: 2506662 - RNA, 19 nt, Human
gccuguaguuaggaaauaa

SEQ ID NO: 2506663 - RNA, 22 nt, Human
gccuguaguuaggaaauaaaac

SEQ ID NO: 2506664 - RNA, 23 nt, Human
gccuguaguuaggaaauaaaacc

SEQ ID NO: 2506665 - RNA, 18 nt, Human
gccuggguggggcugcuc

SEQ ID NO: 2506666 - RNA, 19 nt, Human
gccuggguggggcugcucc

SEQ ID NO: 2506667 - RNA, 20 nt, Human
gccuggguggggcugcuccu

SEQ ID NO: 2506668 - RNA, 15 nt, Human
gccugggugcuggcu

SEQ ID NO: 2506669 - RNA, 17 nt, Human
gccugggugcuggcugc

SEQ ID NO: 2506670 - RNA, 20 nt, Human
gccugggugcuggcugccca

SEQ ID NO: 2506671 - RNA, 21 nt, Human
gccugggugcuggcugcccag

SEQ ID NO: 2506672 - RNA, 15 nt, Human
gccuggguggacaug

SEQ ID NO: 2506673 - RNA, 15 nt, Human
gccuggguggggcug

SEQ ID NO: 2506674 - RNA, 16 nt, Human
gccuggguggggcugc

SEQ ID NO: 2506675 - RNA, 14 nt, Human
gccugggucugugu

SEQ ID NO: 2506676 - RNA, 16 nt, Human
gccugggucugugucu

SEQ ID NO: 2506677 - RNA, 19 nt, Human
gccugggucugugucucuu

SEQ ID NO: 2506678 - RNA, 23 nt, Human
gccugggucugugucucuuuucu

SEQ ID NO: 2506679 - RNA, 23 nt, Human
gccugggugacaaagugagacuc

SEQ ID NO: 2506680 - RNA, 23 nt, Human
gccugggugacagagugagacuc

SEQ ID NO: 2506681 - RNA, 13 nt, Human
gccugggugacag

SEQ ID NO: 2506682 - RNA, 12 nt, Human
gccugggugcug

SEQ ID NO: 2506683 - RNA, 14 nt, Human
gccugggugcuggc

SEQ ID NO: 2506684 - RNA, 20 nt, Human
gccugggugacagagcaaga

SEQ ID NO: 2506685 - RNA, 20 nt, Human
gccugggugacagagugaga

SEQ ID NO: 2506686 - RNA, 20 nt, Human
gccuggccagacacaggccc

SEQ ID NO: 2506687 - RNA, 21 nt, Human
gccuggccagacacaggcccu

SEQ ID NO: 2506688 - RNA, 23 nt, Human
gccuggccagcagguccccagcu

SEQ ID NO: 2506689 - RNA, 15 nt, Human
gccuggccagaugca

SEQ ID NO: 2506690 - RNA, 14 nt, Human
gccuggccagaugc

SEQ ID NO: 2506691 - RNA, 15 nt, Human
gccugggcagaagga

SEQ ID NO: 2506692 - RNA, 17 nt, Human
gccuggccagggccugg

SEQ ID NO: 2506693 - RNA, 23 nt, Human
gccuggccaggcagaucugugcc

SEQ ID NO: 2506694 - RNA, 15 nt, Human
gccuggccaggcaga

SEQ ID NO: 2506695 - RNA, 17 nt, Human
gccuggccaggcagauc

SEQ ID NO: 2506696 - RNA, 16 nt, Human
gccuggccagccuaca

SEQ ID NO: 2506697 - RNA, 21 nt, Human
gccuggccagccuacaauggg

SEQ ID NO: 2506698 - RNA, 14 nt, Human
gccuggccaggagc

SEQ ID NO: 2506699 - RNA, 15 nt, Human
gccuggccaggagcu

SEQ ID NO: 2506700 - RNA, 12 nt, Human
gccuggccaggc

SEQ ID NO: 2506701 - RNA, 19 nt, Human
gccuggccaggagcucuuc

SEQ ID NO: 2506702 - RNA, 15 nt, Human
gccuggccaggcacc

SEQ ID NO: 2506703 - RNA, 13 nt, Human
gccuggccaggca

SEQ ID NO: 2506704 - RNA, 14 nt, Human
gccuggccaggcag

SEQ ID NO: 2506705 - RNA, 14 nt, Human
gccuggauggggcu

SEQ ID NO: 2506706 - RNA, 24 nt, Human
gccuggaguguaugacugcacaug

SEQ ID NO: 2506707 - RNA, 22 nt, Human
gccuggaggccgggugcucagg

SEQ ID NO: 2506708 - RNA, 15 nt, Human
gccuggauggggcug

SEQ ID NO: 2506709 - RNA, 12 nt, Human
gccuggaucucc

SEQ ID NO: 2506710 - RNA, 21 nt, Human
gccuggauauuauucuuguag

SEQ ID NO: 2506711 - RNA, 20 nt, Human
gccuggaugcggauggccgg

SEQ ID NO: 2506712 - RNA, 14 nt, Human
gccuggcaggcugu

SEQ ID NO: 2506713 - RNA, 13 nt, Human
gccuggccagaca

SEQ ID NO: 2506714 - RNA, 14 nt, Human
gccuggccagacac

SEQ ID NO: 2506715 - RNA, 16 nt, Human
gccuggccagacacag

SEQ ID NO: 2506716 - RNA, 17 nt, Human
gccuggccagacacagg

SEQ ID NO: 2506717 - RNA, 13 nt, Human
gccuggccacgcc

SEQ ID NO: 2506718 - RNA, 19 nt, Human
gccuggccaccucucuccu

SEQ ID NO: 2506719 - RNA, 18 nt, Human
gccuggccaccucucucc

SEQ ID NO: 2506720 - RNA, 17 nt, Human
gccuggccaccucucuc

SEQ ID NO: 2506721 - RNA, 16 nt, Human
gccuggccaccucucu

SEQ ID NO: 2506722 - RNA, 15 nt, Human
gccuggccaaaggga

SEQ ID NO: 2506723 - RNA, 14 nt, Human
gccuggccaccucu

SEQ ID NO: 2506724 - RNA, 14 nt, Human
gcccucuccgagcu

SEQ ID NO: 2506725 - RNA, 16 nt, Human
gcccucucugcucugc

SEQ ID NO: 2506726 - RNA, 12 nt, Human
gcccucugccca

SEQ ID NO: 2506727 - RNA, 16 nt, Human
gcccugagcuuucugc

SEQ ID NO: 2506728 - RNA, 19 nt, Human
gcccuccuuguccacccac

SEQ ID NO: 2506729 - RNA, 16 nt, Human
gcccucgcccccgccc

SEQ ID NO: 2506730 - RNA, 17 nt, Human
gcccuccuuguccaccc

SEQ ID NO: 2506731 - RNA, 14 nt, Human
gcccucgcugccag

SEQ ID NO: 2506732 - RNA, 15 nt, Human
gcccucgcugccagc

SEQ ID NO: 2506733 - RNA, 16 nt, Human
gcccucgcugcuucug

SEQ ID NO: 2506734 - RNA, 15 nt, Human
gcccucgcugcuucu

SEQ ID NO: 2506735 - RNA, 17 nt, Human
gcccucgcugccagcuc

SEQ ID NO: 2506736 - RNA, 18 nt, Human
gcccggcuccaggcuccu

SEQ ID NO: 2506737 - RNA, 17 nt, Human
gcccggcuccaggcucc

SEQ ID NO: 2506738 - RNA, 17 nt, Human
gcccucuagggagggac

SEQ ID NO: 2506739 - RNA, 18 nt, Human
gcccucguggccagcccg

SEQ ID NO: 2506740 - RNA, 17 nt, Human
gcccucguggccagccc

SEQ ID NO: 2506741 - RNA, 16 nt, Human
gcccucguggccagcc

SEQ ID NO: 2506742 - RNA, 15 nt, Human
gcccucguggccagc

SEQ ID NO: 2506743 - RNA, 20 nt, Human
gcccucguggccagcccggc

SEQ ID NO: 2506744 - RNA, 19 nt, Human
gcccucguggccagcccgg

SEQ ID NO: 2506745 - RNA, 13 nt, Human
gcccucuaccccu

SEQ ID NO: 2506746 - RNA, 18 nt, Human
gcccucgggcccagcccc

SEQ ID NO: 2506747 - RNA, 17 nt, Human
gcccucgggcccagccc

SEQ ID NO: 2506748 - RNA, 16 nt, Human
gcccucgggcccagcc

SEQ ID NO: 2506749 - RNA, 15 nt, Human
gcccucgggcccagc

SEQ ID NO: 2506750 - RNA, 22 nt, Human
gcccucgggcccagcccccaca

SEQ ID NO: 2506751 - RNA, 20 nt, Human
gcccucgggcccagccccca

SEQ ID NO: 2506752 - RNA, 14 nt, Human
gcccucguggccag

SEQ ID NO: 2506753 - RNA, 18 nt, Human
gcccucgggcgagucacu

SEQ ID NO: 2506754 - RNA, 22 nt, Human
gcccugcacuguccugcuccac

SEQ ID NO: 2506755 - RNA, 21 nt, Human
gcccugcacuguccugcucca

SEQ ID NO: 2506756 - RNA, 20 nt, Human
gcccugcacuguccugcucc

SEQ ID NO: 2506757 - RNA, 19 nt, Human
gcccugcacuguccugcuc

SEQ ID NO: 2506758 - RNA, 18 nt, Human
gcccugcacuguccugcu

SEQ ID NO: 2506759 - RNA, 17 nt, Human
gcccugcacuguccugc

SEQ ID NO: 2506760 - RNA, 16 nt, Human
gcccugcacuguccug

SEQ ID NO: 2506761 - RNA, 15 nt, Human
gcccugcacuguccu

SEQ ID NO: 2506762 - RNA, 14 nt, Human
gcccugcacugucc

SEQ ID NO: 2506763 - RNA, 17 nt, Human
gcccugcaccugugcag

SEQ ID NO: 2506764 - RNA, 16 nt, Human
gcccugcaccugugca

SEQ ID NO: 2506765 - RNA, 21 nt, Human
gcccugcaaaaggacucucag

SEQ ID NO: 2506766 - RNA, 23 nt, Human
gcccugcacuguccugcuccaca

SEQ ID NO: 2506767 - RNA, 19 nt, Human
gcccugcuuugggcugccc

SEQ ID NO: 2506768 - RNA, 21 nt, Human
gcccugcuuugggcugcccug

SEQ ID NO: 2506769 - RNA, 20 nt, Human
gcccugcuuugggcugcccu

SEQ ID NO: 2506770 - RNA, 16 nt, Human
gcccugaguuccuagc

SEQ ID NO: 2506771 - RNA, 18 nt, Human
gcccugaguuccuagcca

SEQ ID NO: 2506772 - RNA, 14 nt, Human
gcccugcaaaagga

SEQ ID NO: 2506773 - RNA, 18 nt, Human
gcccugcaaaaggacucu

SEQ ID NO: 2506774 - RNA, 14 nt, Human
gcccugauuugcug

SEQ ID NO: 2506775 - RNA, 23 nt, Human
gcccugaguggaucuccaaggac

SEQ ID NO: 2506776 - RNA, 22 nt, Human
gcccugaguggaucuccaagga

SEQ ID NO: 2506777 - RNA, 21 nt, Human
gcccugaguggaucuccaagg

SEQ ID NO: 2506778 - RNA, 22 nt, Human
gcccugaguaaucgcuuaaaga

SEQ ID NO: 2506779 - RNA, 24 nt, Human
gcccugaggugugggggcugcagc

SEQ ID NO: 2506780 - RNA, 23 nt, Human
gcccugaggugugggggcugcag

SEQ ID NO: 2506781 - RNA, 22 nt, Human
gcccugaggugugggggcugca

SEQ ID NO: 2506782 - RNA, 21 nt, Human
gcccugaggugugggggcugc

SEQ ID NO: 2506783 - RNA, 15 nt, Human
gcccugagguguggg

SEQ ID NO: 2506784 - RNA, 14 nt, Human
gcccugaggugugg

SEQ ID NO: 2506785 - RNA, 13 nt, Human
gcccugaggugug

SEQ ID NO: 2506786 - RNA, 21 nt, Human
gcccugaggugaaagggagcu

SEQ ID NO: 2506787 - RNA, 22 nt, Human
gcccugaggugaaagggagcua

SEQ ID NO: 2506788 - RNA, 22 nt, Human
gcccuggacugugugcucagga

SEQ ID NO: 2506789 - RNA, 16 nt, Human
gcccuggacugugugc

SEQ ID NO: 2506790 - RNA, 12 nt, Human
gcccuggacugu

SEQ ID NO: 2506791 - RNA, 23 nt, Human
gcccugcuuugggcugcccuggu

SEQ ID NO: 2506792 - RNA, 22 nt, Human
gcccugcuuugggcugcccugg

SEQ ID NO: 2506793 - RNA, 23 nt, Human
gcccuggagccaacugcugcuuu

SEQ ID NO: 2506794 - RNA, 20 nt, Human
gcccuggagccaacugcugc

SEQ ID NO: 2506795 - RNA, 19 nt, Human
gcccuggagccaacugcug

SEQ ID NO: 2506796 - RNA, 20 nt, Human
gcccuggaagccggcggccc

SEQ ID NO: 2506797 - RNA, 18 nt, Human
gcccuggagccaacugcu

SEQ ID NO: 2506798 - RNA, 20 nt, Human
gcccuggaggugccagcaaa

SEQ ID NO: 2506799 - RNA, 18 nt, Human
gcccuggaggugccagca

SEQ ID NO: 2506800 - RNA, 17 nt, Human
gcccuggaggugccagc

SEQ ID NO: 2506801 - RNA, 21 nt, Human
gcccuggagccaacugcugcu

SEQ ID NO: 2506802 - RNA, 23 nt, Human
gcccuggaggugccagcaaagcc

SEQ ID NO: 2506803 - RNA, 22 nt, Human
gcccuggaggugccagcaaagc

SEQ ID NO: 2506804 - RNA, 24 nt, Human
gcccuggaggugccagcaaagccc

SEQ ID NO: 2506805 - RNA, 13 nt, Human
gcccuggaggugg

SEQ ID NO: 2506806 - RNA, 19 nt, Human
gcccuggagucaugccaag

SEQ ID NO: 2506807 - RNA, 15 nt, Human
gcccuggagucaugc

SEQ ID NO: 2506808 - RNA, 20 nt, Human
gcccuggagucaugccaagc

SEQ ID NO: 2506809 - RNA, 14 nt, Human
gcccuggagguggc

SEQ ID NO: 2506810 - RNA, 15 nt, Human
gcccuggagguggcu

SEQ ID NO: 2506811 - RNA, 18 nt, Human
gcccuggagguggcugag

SEQ ID NO: 2506812 - RNA, 20 nt, Human
gcccuggagguggcugagcc

SEQ ID NO: 2506813 - RNA, 18 nt, Human
gcccuggauuucagaaag

SEQ ID NO: 2506814 - RNA, 19 nt, Human
gcccgcccacuguccuggg

SEQ ID NO: 2506815 - RNA, 18 nt, Human
gcccgcccacuguccugg

SEQ ID NO: 2506816 - RNA, 17 nt, Human
gcccgcccacuguccug

SEQ ID NO: 2506817 - RNA, 15 nt, Human
gcccgcccacugucc

SEQ ID NO: 2506818 - RNA, 14 nt, Human
gcccgcccacuguc

SEQ ID NO: 2506819 - RNA, 13 nt, Human
gcccgcccacugu

SEQ ID NO: 2506820 - RNA, 21 nt, Human
gcccgccaagguagccauccc

SEQ ID NO: 2506821 - RNA, 19 nt, Human
gcccgcaugcggcccagga

SEQ ID NO: 2506822 - RNA, 17 nt, Human
gcccgcaugcggcccag

SEQ ID NO: 2506823 - RNA, 13 nt, Human
gcccgagcuggug

SEQ ID NO: 2506824 - RNA, 14 nt, Human
gcccgagcuggugc

SEQ ID NO: 2506825 - RNA, 18 nt, Human
gcccgacuugcuguuuug

SEQ ID NO: 2506826 - RNA, 13 nt, Human
gcccgacuugcug

SEQ ID NO: 2506827 - RNA, 23 nt, Human
gcccgacuugcuguuuuguucug

SEQ ID NO: 2506828 - RNA, 12 nt, Human
gcccgagcuggu

SEQ ID NO: 2506829 - RNA, 19 nt, Human
gcccgacagccuggcacag

SEQ ID NO: 2506830 - RNA, 17 nt, Human
gcccgacagccuggcac

SEQ ID NO: 2506831 - RNA, 16 nt, Human
gcccgacagccuggca

SEQ ID NO: 2506832 - RNA, 12 nt, Human
gccccuuccccc

SEQ ID NO: 2506833 - RNA, 22 nt, Human
gccccuuagcccccacccacuu

SEQ ID NO: 2506834 - RNA, 17 nt, Human
gccccuuagcccccacc

SEQ ID NO: 2506835 - RNA, 20 nt, Human
gccccugcauccccuuggcu

SEQ ID NO: 2506836 - RNA, 14 nt, Human
gccccugcaucccc

SEQ ID NO: 2506837 - RNA, 23 nt, Human
gccccugcauccccuuggcugug

SEQ ID NO: 2506838 - RNA, 16 nt, Human
gccccuuccccauggg

SEQ ID NO: 2506839 - RNA, 15 nt, Human
gccccuuccccaugg

SEQ ID NO: 2506840 - RNA, 15 nt, Human
gccccuucccaucuc

SEQ ID NO: 2506841 - RNA, 19 nt, Human
gccccuucccacucacccc

SEQ ID NO: 2506842 - RNA, 20 nt, Human
gccccuucacuucugaccac

SEQ ID NO: 2506843 - RNA, 21 nt, Human
gccccuucacuucugaccaca

SEQ ID NO: 2506844 - RNA, 23 nt, Human
gccccuucacuucugaccacacu

SEQ ID NO: 2506845 - RNA, 20 nt, Human
gcccggcgcccucuguccug

SEQ ID NO: 2506846 - RNA, 17 nt, Human
gcccggcgcccucuguc

SEQ ID NO: 2506847 - RNA, 15 nt, Human
gcccggcgcccucug

SEQ ID NO: 2506848 - RNA, 14 nt, Human
gcccggcgcccucu

SEQ ID NO: 2506849 - RNA, 17 nt, Human
gcccggcgccccugcca

SEQ ID NO: 2506850 - RNA, 22 nt, Human
gcccggccugcucccagcagcc

SEQ ID NO: 2506851 - RNA, 18 nt, Human
gcccggccugcucccagc

SEQ ID NO: 2506852 - RNA, 15 nt, Human
gcccggccugcuccc

SEQ ID NO: 2506853 - RNA, 14 nt, Human
gcccggccugcucc

SEQ ID NO: 2506854 - RNA, 12 nt, Human
gcccggccagcc

SEQ ID NO: 2506855 - RNA, 18 nt, Human
gcccggccagccaugucu

SEQ ID NO: 2506856 - RNA, 16 nt, Human
gcccggcuccaggcuc

SEQ ID NO: 2506857 - RNA, 18 nt, Human
gcccggcuaauuuuugua

SEQ ID NO: 2506858 - RNA, 18 nt, Human
gcccggcgcccucugucc

SEQ ID NO: 2506859 - RNA, 21 nt, Human
gcccggcgcgguggcucacgc

SEQ ID NO: 2506860 - RNA, 14 nt, Human
gcccggaugcuucu

SEQ ID NO: 2506861 - RNA, 14 nt, Human
gcccgccuggcaga

SEQ ID NO: 2506862 - RNA, 18 nt, Human
gcccgccuggcagaacug

SEQ ID NO: 2506863 - RNA, 17 nt, Human
gcccggauucugggagg

SEQ ID NO: 2506864 - RNA, 15 nt, Human
gcccggauucuggga

SEQ ID NO: 2506865 - RNA, 16 nt, Human
gcccggauucugggag

SEQ ID NO: 2506866 - RNA, 16 nt, Human
gcccgccugccagucc

SEQ ID NO: 2506867 - RNA, 15 nt, Human
gcccgccugccaguc

SEQ ID NO: 2506868 - RNA, 14 nt, Human
gcccgccugccagu

SEQ ID NO: 2506869 - RNA, 13 nt, Human
gcccgccugccag

SEQ ID NO: 2506870 - RNA, 12 nt, Human
gcccgccugcca

SEQ ID NO: 2506871 - RNA, 20 nt, Human
gcccgcccacuguccugggc

SEQ ID NO: 2506872 - RNA, 22 nt, Human
gcccgcccacuguccugggcgc

SEQ ID NO: 2506873 - RNA, 23 nt, Human
gcccgccugccaguccuagcugc

SEQ ID NO: 2506874 - RNA, 18 nt, Human
gcccgccugccaguccua

SEQ ID NO: 2506875 - RNA, 17 nt, Human
gcccgccugccaguccu

SEQ ID NO: 2506876 - RNA, 22 nt, Human
gcccgccugccaguccuagcug

SEQ ID NO: 2506877 - RNA, 13 nt, Human
gcccgccuggcag

SEQ ID NO: 2506878 - RNA, 18 nt, Human
gccccucugcccagcuug

SEQ ID NO: 2506879 - RNA, 16 nt, Human
gccccucugcccagcu

SEQ ID NO: 2506880 - RNA, 15 nt, Human
gccccucugcccagc

SEQ ID NO: 2506881 - RNA, 14 nt, Human
gccccucugcccag

SEQ ID NO: 2506882 - RNA, 21 nt, Human
gccccuguucuggcagaguug

SEQ ID NO: 2506883 - RNA, 15 nt, Human
gccccugccacccug

SEQ ID NO: 2506884 - RNA, 14 nt, Human
gccccugccacccu

SEQ ID NO: 2506885 - RNA, 21 nt, Human
gccccucucccgccagacugu

SEQ ID NO: 2506886 - RNA, 23 nt, Human
gccccuccucugccaccuccccu

SEQ ID NO: 2506887 - RNA, 22 nt, Human
gccccuccucugccaccucccc

SEQ ID NO: 2506888 - RNA, 13 nt, Human
gccccugccaccc

SEQ ID NO: 2506889 - RNA, 12 nt, Human
gccccucugccc

SEQ ID NO: 2506890 - RNA, 11 nt, Human
gccccucugcc

SEQ ID NO: 2506891 - RNA, 19 nt, Human
gccccuccucucugcccua

SEQ ID NO: 2506892 - RNA, 18 nt, Human
gcagacucaguuugucag

SEQ ID NO: 2506893 - RNA, 12 nt, Human
gccccuccucug

SEQ ID NO: 2506894 - RNA, 13 nt, Human
gccccuccucugc

SEQ ID NO: 2506895 - RNA, 14 nt, Human
gccccuccucugcc

SEQ ID NO: 2506896 - RNA, 15 nt, Human
gccccuccucugcca

SEQ ID NO: 2506897 - RNA, 16 nt, Human
gccccuccucugccac

SEQ ID NO: 2506898 - RNA, 17 nt, Human
gccccuccucugccacc

SEQ ID NO: 2506899 - RNA, 18 nt, Human
gccccuccucugccaccu

SEQ ID NO: 2506900 - RNA, 20 nt, Human
gccccuccucugccaccucc

SEQ ID NO: 2506901 - RNA, 21 nt, Human
gccccuccucugccaccuccc

SEQ ID NO: 2506902 - RNA, 18 nt, Human
gccccuccucucugcccu

SEQ ID NO: 2506903 - RNA, 15 nt, Human
gccccucccuucaac

SEQ ID NO: 2506904 - RNA, 14 nt, Human
gccccucccuucaa

SEQ ID NO: 2506905 - RNA, 12 nt, Human
gccccucccuuc

SEQ ID NO: 2506906 - RNA, 15 nt, Human
gcagacucuacagag

SEQ ID NO: 2506907 - RNA, 17 nt, Human
gcagacucaguuuguca

SEQ ID NO: 2506908 - RNA, 13 nt, Human
gcagacucacugu

SEQ ID NO: 2506909 - RNA, 20 nt, Human
gcagacucaauaaaaucaug

SEQ ID NO: 2506910 - RNA, 20 nt, Human
gcagaccuguccuccuggug

SEQ ID NO: 2506911 - RNA, 19 nt, Human
gcagaccuguccuccuggu

SEQ ID NO: 2506912 - RNA, 16 nt, Human
gcagaccuguccuccu

SEQ ID NO: 2506913 - RNA, 14 nt, Human
gcagaccuguccuc

SEQ ID NO: 2506914 - RNA, 23 nt, Human
gcagaccuccccagccccuagcc

SEQ ID NO: 2506915 - RNA, 22 nt, Human
gcagaccuccccagccccuagc

SEQ ID NO: 2506916 - RNA, 17 nt, Human
gcagacaggaggaauca

SEQ ID NO: 2506917 - RNA, 15 nt, Human
gcagacuaugcaaac

SEQ ID NO: 2506918 - RNA, 21 nt, Human
gcagacuagaauucuagugcu

SEQ ID NO: 2506919 - RNA, 14 nt, Human
gcagacgccgggga

SEQ ID NO: 2506920 - RNA, 14 nt, Human
gcccuuuuuaagga

SEQ ID NO: 2506921 - RNA, 21 nt, Human
gcccuuugggaggcugaggcg

SEQ ID NO: 2506922 - RNA, 16 nt, Human
gccgagaucacgccac

SEQ ID NO: 2506923 - RNA, 13 nt, Human
gcccuuucugugu

SEQ ID NO: 2506924 - RNA, 18 nt, Human
gcccuuugagugcagucc

SEQ ID NO: 2506925 - RNA, 12 nt, Human
gcccuuucugug

SEQ ID NO: 2506926 - RNA, 17 nt, Human
gcccuuugggaggcuga

SEQ ID NO: 2506927 - RNA, 14 nt, Human
gcccuuuccucagg

SEQ ID NO: 2506928 - RNA, 13 nt, Human
gcccuuuccucag

SEQ ID NO: 2506929 - RNA, 19 nt, Human
gccgagaucacgccacugc

SEQ ID NO: 2506930 - RNA, 18 nt, Human
gccgagaucacgccacug

SEQ ID NO: 2506931 - RNA, 18 nt, Human
gccgagauugcaccacug

SEQ ID NO: 2506932 - RNA, 17 nt, Human
gccgagauugcaccacu

SEQ ID NO: 2506933 - RNA, 22 nt, Human
gcccuucucuccagccccugga

SEQ ID NO: 2506934 - RNA, 21 nt, Human
gcccuucucuccagccccugg

SEQ ID NO: 2506935 - RNA, 20 nt, Human
gcccuuccucuccacugccu

SEQ ID NO: 2506936 - RNA, 19 nt, Human
gcccuuccucuccacugcc

SEQ ID NO: 2506937 - RNA, 18 nt, Human
gcccuuccucuccacugc

SEQ ID NO: 2506938 - RNA, 16 nt, Human
gcccuuccucuccacu

SEQ ID NO: 2506939 - RNA, 17 nt, Human
gcccuuccucuccacug

SEQ ID NO: 2506940 - RNA, 19 nt, Human
gcccuucucuccagccccu

SEQ ID NO: 2506941 - RNA, 21 nt, Human
gcccuuccucuccacugccuu

SEQ ID NO: 2506942 - RNA, 18 nt, Human
gcccugguggagaaagca

SEQ ID NO: 2506943 - RNA, 14 nt, Human
gcccugguggagaa

SEQ ID NO: 2506944 - RNA, 13 nt, Human
gcccugguggaga

SEQ ID NO: 2506945 - RNA, 17 nt, Human
gcccuggucucagcagc

SEQ ID NO: 2506946 - RNA, 21 nt, Human
gcccugguggagaaagcacug

SEQ ID NO: 2506947 - RNA, 18 nt, Human
gcccugguguuucuagca

SEQ ID NO: 2506948 - RNA, 14 nt, Human
gcccugguuuccug

SEQ ID NO: 2506949 - RNA, 15 nt, Human
gcccugguuuccugc

SEQ ID NO: 2506950 - RNA, 16 nt, Human
gcccugguuucacugg

SEQ ID NO: 2506951 - RNA, 18 nt, Human
gcccugguuucacuggcc

SEQ ID NO: 2506952 - RNA, 20 nt, Human
gcccugguuucacuggccca

SEQ ID NO: 2506953 - RNA, 22 nt, Human
gcccugguuucacuggcccaag

SEQ ID NO: 2506954 - RNA, 17 nt, Human
gcccugguuuccugccc

SEQ ID NO: 2506955 - RNA, 18 nt, Human
gcccugguuuccugcccu

SEQ ID NO: 2506956 - RNA, 19 nt, Human
gcccugguuuccugcccug

SEQ ID NO: 2506957 - RNA, 20 nt, Human
gcccugguuuccugcccugg

SEQ ID NO: 2506958 - RNA, 21 nt, Human
gcccugguuuccugcccuggg

SEQ ID NO: 2506959 - RNA, 23 nt, Human
gcccugguuuccugcccugggag

SEQ ID NO: 2506960 - RNA, 14 nt, Human
gcccugucagugca

SEQ ID NO: 2506961 - RNA, 23 nt, Human
gcccugguggcagugggagcugc

SEQ ID NO: 2506962 - RNA, 22 nt, Human
gcccugguggcagugggagcug

SEQ ID NO: 2506963 - RNA, 21 nt, Human
gcccugguggcagugggagcu

SEQ ID NO: 2506964 - RNA, 20 nt, Human
gcccugguggcagugggagc

SEQ ID NO: 2506965 - RNA, 19 nt, Human
gcccugguggcagugggag

SEQ ID NO: 2506966 - RNA, 18 nt, Human
gcccugguggcaguggga

SEQ ID NO: 2506967 - RNA, 17 nt, Human
gcccugguggcaguggg

SEQ ID NO: 2506968 - RNA, 14 nt, Human
gcccugguggcagu

SEQ ID NO: 2506969 - RNA, 21 nt, Human
gcccuggugcugccacacuuc

SEQ ID NO: 2506970 - RNA, 17 nt, Human
gcccuggugcugccaca

SEQ ID NO: 2506971 - RNA, 16 nt, Human
gcccuggugcugccac

SEQ ID NO: 2506972 - RNA, 15 nt, Human
gcccuggugcugcca

SEQ ID NO: 2506973 - RNA, 16 nt, Human
gcccugguccagggaa

SEQ ID NO: 2506974 - RNA, 17 nt, Human
gcccugguccagggaag

SEQ ID NO: 2506975 - RNA, 18 nt, Human
gcccugguccagggaagc

SEQ ID NO: 2506976 - RNA, 20 nt, Human
gcccugguccagggaagcug

SEQ ID NO: 2506977 - RNA, 23 nt, Human
gcccugguccagggaagcuggcc

SEQ ID NO: 2506978 - RNA, 15 nt, Human
gcccugguccuucca

SEQ ID NO: 2506979 - RNA, 16 nt, Human
gcccuggucucagcag

SEQ ID NO: 2506980 - RNA, 14 nt, Human
gcccuggucucagc

SEQ ID NO: 2506981 - RNA, 18 nt, Human
gcccugguccuuccaggc

SEQ ID NO: 2506982 - RNA, 14 nt, Human
gcccugggcuggaa

SEQ ID NO: 2506983 - RNA, 13 nt, Human
gcccugggcugga

SEQ ID NO: 2506984 - RNA, 12 nt, Human
gcccugggcugg

SEQ ID NO: 2506985 - RNA, 11 nt, Human
gcccugggcug

SEQ ID NO: 2506986 - RNA, 18 nt, Human
gcccugggcuggaaucag

SEQ ID NO: 2506987 - RNA, 16 nt, Human
gcccugggcuggaauc

SEQ ID NO: 2506988 - RNA, 23 nt, Human
gcccugggcucggaggcugcccc

SEQ ID NO: 2506989 - RNA, 16 nt, Human
gcccugguagggcagu

SEQ ID NO: 2506990 - RNA, 21 nt, Human
gcccugggucuaagggguugg

SEQ ID NO: 2506991 - RNA, 13 nt, Human
gcccugguccagg

SEQ ID NO: 2506992 - RNA, 14 nt, Human
gcccugguccaggg

SEQ ID NO: 2506993 - RNA, 21 nt, Human
gcccugggaggcucuggagcc

SEQ ID NO: 2506994 - RNA, 19 nt, Human
gcccugggaggcucuggag

SEQ ID NO: 2506995 - RNA, 18 nt, Human
gcccugggaggcucugga

SEQ ID NO: 2506996 - RNA, 17 nt, Human
gcccugggaggcucugg

SEQ ID NO: 2506997 - RNA, 21 nt, Human
gcccugggcucggaggcugcc

SEQ ID NO: 2506998 - RNA, 19 nt, Human
gcccugggcucggaggcug

SEQ ID NO: 2506999 - RNA, 17 nt, Human
gcccugggcucggaggc

SEQ ID NO: 2507000 - RNA, 16 nt, Human
gcccugggcucggagg

SEQ ID NO: 2507001 - RNA, 15 nt, Human
gcccugggcucggag

SEQ ID NO: 2507002 - RNA, 20 nt, Human
gcccugggccccaccaccua

SEQ ID NO: 2507003 - RNA, 22 nt, Human
gcccugggccccaccaccuagg

SEQ ID NO: 2507004 - RNA, 17 nt, Human
gcccugggccacacuga

SEQ ID NO: 2507005 - RNA, 15 nt, Human
gcccugggccccacc

SEQ ID NO: 2507006 - RNA, 18 nt, Human
gcccugggccccaccacc

SEQ ID NO: 2507007 - RNA, 19 nt, Human
gcccugggccccaccaccu

SEQ ID NO: 2507008 - RNA, 23 nt, Human
gcccugggaggcucuggagccca

SEQ ID NO: 2507009 - RNA, 16 nt, Human
gcccugggaggcagug

SEQ ID NO: 2507010 - RNA, 17 nt, Human
gcccugggaucacugug

SEQ ID NO: 2507011 - RNA, 16 nt, Human
gcccugggaggcucug

SEQ ID NO: 2507012 - RNA, 15 nt, Human
gcccugggaggcucu

SEQ ID NO: 2507013 - RNA, 14 nt, Human
gcccugggaggcuc

SEQ ID NO: 2507014 - RNA, 13 nt, Human
gcccugggaggcu

SEQ ID NO: 2507015 - RNA, 16 nt, Human
gcccuggcugcugccc

SEQ ID NO: 2507016 - RNA, 15 nt, Human
gcccuggcugcugcc

SEQ ID NO: 2507017 - RNA, 14 nt, Human
gcccuggcugcugc

SEQ ID NO: 2507018 - RNA, 12 nt, Human
gcccuggcugcu

SEQ ID NO: 2507019 - RNA, 11 nt, Human
gcccuggcugc

SEQ ID NO: 2507020 - RNA, 12 nt, Human
gcccuggcugac

SEQ ID NO: 2507021 - RNA, 21 nt, Human
gcccuggcugaaggacuguga

SEQ ID NO: 2507022 - RNA, 20 nt, Human
gcccuggcugaaggacugug

SEQ ID NO: 2507023 - RNA, 19 nt, Human
gcccuggcugaaggacugu

SEQ ID NO: 2507024 - RNA, 18 nt, Human
gcccuggcugaaggacug

SEQ ID NO: 2507025 - RNA, 17 nt, Human
gcccuggcugaaggacu

SEQ ID NO: 2507026 - RNA, 16 nt, Human
gcccuggcugaaggac

SEQ ID NO: 2507027 - RNA, 15 nt, Human
gcccuggcugaagga

SEQ ID NO: 2507028 - RNA, 14 nt, Human
gcccuggcugaagg

SEQ ID NO: 2507029 - RNA, 13 nt, Human
gcccuggcugaag

SEQ ID NO: 2507030 - RNA, 22 nt, Human
gcccuggcugcugcccccaccc

SEQ ID NO: 2507031 - RNA, 19 nt, Human
gcccuggcugcugccccca

SEQ ID NO: 2507032 - RNA, 17 nt, Human
gcccuggcugcugcccc

SEQ ID NO: 2507033 - RNA, 11 nt, Human
gcccugggagg

SEQ ID NO: 2507034 - RNA, 14 nt, Human
gcccugggaggcag

SEQ ID NO: 2507035 - RNA, 17 nt, Human
gcccuggccuccccugc

SEQ ID NO: 2507036 - RNA, 16 nt, Human
gcccuggccuccccug

SEQ ID NO: 2507037 - RNA, 14 nt, Human
gcccuggccucccc

SEQ ID NO: 2507038 - RNA, 12 nt, Human
gcccuggccucc

SEQ ID NO: 2507039 - RNA, 17 nt, Human
gcccuggcccugaggug

SEQ ID NO: 2507040 - RNA, 13 nt, Human
gcccuggcccuga

SEQ ID NO: 2507041 - RNA, 12 nt, Human
gcccuggcccug

SEQ ID NO: 2507042 - RNA, 16 nt, Human
gcccuggccagaggcu

SEQ ID NO: 2507043 - RNA, 13 nt, Human
gcccuggccagag

SEQ ID NO: 2507044 - RNA, 14 nt, Human
gcccuggccagagg

SEQ ID NO: 2507045 - RNA, 15 nt, Human
gcccuggccagaggc

SEQ ID NO: 2507046 - RNA, 19 nt, Human
gcccuggcaggaugacccu

SEQ ID NO: 2507047 - RNA, 12 nt, Human
gcccuggcagga

SEQ ID NO: 2507048 - RNA, 10 nt, Human
gcccuggcug

SEQ ID NO: 2507049 - RNA, 12 nt, Human
gcccuggcucug

SEQ ID NO: 2507050 - RNA, 14 nt, Human
gcccuggcucugca

SEQ ID NO: 2507051 - RNA, 20 nt, Human
gcccuggcucccacaggccc

SEQ ID NO: 2507052 - RNA, 19 nt, Human
gcccuggcucccacaggcc

SEQ ID NO: 2507053 - RNA, 15 nt, Human
gcccuggcucccaca

SEQ ID NO: 2507054 - RNA, 24 nt, Human
gcccuggccuccccugccaccagg

SEQ ID NO: 2507055 - RNA, 21 nt, Human
gcccuggccuccccugccacc

SEQ ID NO: 2507056 - RNA, 20 nt, Human
gcccuggccuccccugccac

SEQ ID NO: 2507057 - RNA, 19 nt, Human
gcccuggccuccccugcca

SEQ ID NO: 2507058 - RNA, 18 nt, Human
gcccuggcccugaggugu

SEQ ID NO: 2507059 - RNA, 12 nt, Human
gcccuggccugc

SEQ ID NO: 2507060 - RNA, 13 nt, Human
gcccuggccugcu

SEQ ID NO: 2507061 - RNA, 14 nt, Human
gcccuggccugcug

SEQ ID NO: 2507062 - RNA, 15 nt, Human
gcccuggccugcugg

SEQ ID NO: 2507063 - RNA, 16 nt, Human
gcccuggccugcuggg

SEQ ID NO: 2507064 - RNA, 17 nt, Human
gcccuggccugcugggc

SEQ ID NO: 2507065 - RNA, 23 nt, Human
gccugugagcuaggaauuguguu

SEQ ID NO: 2507066 - RNA, 17 nt, Human
gccugugaacugaacuc

SEQ ID NO: 2507067 - RNA, 19 nt, Human
gccugugcauguaugucuu

SEQ ID NO: 2507068 - RNA, 19 nt, Human
gccugugccacccaccagg

SEQ ID NO: 2507069 - RNA, 12 nt, Human
gccugugcagug

SEQ ID NO: 2507070 - RNA, 14 nt, Human
gccugugaggcagg

SEQ ID NO: 2507071 - RNA, 18 nt, Human
gccugugaggcaggggcg

SEQ ID NO: 2507072 - RNA, 17 nt, Human
gccugugaggugcagag

SEQ ID NO: 2507073 - RNA, 23 nt, Human
gccugugaggugcagagugccca

SEQ ID NO: 2507074 - RNA, 24 nt, Human
gccugugaggugcagagugcccag

SEQ ID NO: 2507075 - RNA, 16 nt, Human
gcgguccacccaggag

SEQ ID NO: 2507076 - RNA, 13 nt, Human
gcggggacagcuc

SEQ ID NO: 2507077 - RNA, 15 nt, Human
gcgggcuuccuccug

SEQ ID NO: 2507078 - RNA, 12 nt, Human
gcggggacagcu

SEQ ID NO: 2507079 - RNA, 19 nt, Human
gcgguccacccaggagccc

SEQ ID NO: 2507080 - RNA, 18 nt, Human
gcgguccacccaggagcc

SEQ ID NO: 2507081 - RNA, 16 nt, Human
gcgggcugggcagcug

SEQ ID NO: 2507082 - RNA, 14 nt, Human
gcgggcucaaggaa

SEQ ID NO: 2507083 - RNA, 14 nt, Human
gcgggcugggcagc

SEQ ID NO: 2507084 - RNA, 21 nt, Human
gcguagaucaccagaauaaac

SEQ ID NO: 2507085 - RNA, 16 nt, Human
gcgucaguauuuuccc

SEQ ID NO: 2507086 - RNA, 21 nt, Human
gcgucagccuccagccucugu

SEQ ID NO: 2507087 - RNA, 18 nt, Human
gcgucagccuccagccuc

SEQ ID NO: 2507088 - RNA, 17 nt, Human
gcgucagccuccagccu

SEQ ID NO: 2507089 - RNA, 16 nt, Human
gcgucagccuccagcc

SEQ ID NO: 2507090 - RNA, 15 nt, Human
gcgucagccuccagc

SEQ ID NO: 2507091 - RNA, 12 nt, Human
gcgucagccucc

SEQ ID NO: 2507092 - RNA, 21 nt, Human
gcguaugucuguuaccauguc

SEQ ID NO: 2507093 - RNA, 11 nt, Human
gcgucagccuc

SEQ ID NO: 2507094 - RNA, 13 nt, Human
gcguaugucuguu

SEQ ID NO: 2507095 - RNA, 18 nt, Human
gcgucccccugccggccg

SEQ ID NO: 2507096 - RNA, 14 nt, Human
gcgucccccugccg

SEQ ID NO: 2507097 - RNA, 19 nt, Human
gcgucccagucucuggcag

SEQ ID NO: 2507098 - RNA, 12 nt, Human
gcgucuuccuga

SEQ ID NO: 2507099 - RNA, 20 nt, Human
gcgucagccuccagccucug

SEQ ID NO: 2507100 - RNA, 18 nt, Human
gcgugagccacugcaccg

SEQ ID NO: 2507101 - RNA, 16 nt, Human
gcgugagccacugcac

SEQ ID NO: 2507102 - RNA, 14 nt, Human
gcgucuuccugagu

SEQ ID NO: 2507103 - RNA, 13 nt, Human
gcgucuuccugag

SEQ ID NO: 2507104 - RNA, 21 nt, Human
gcgucuuccugaguggugcca

SEQ ID NO: 2507105 - RNA, 11 nt, Human
gcgugaaacac

SEQ ID NO: 2507106 - RNA, 12 nt, Human
gcgugaaacaca

SEQ ID NO: 2507107 - RNA, 19 nt, Human
gcgugaaacacaccaggcu

SEQ ID NO: 2507108 - RNA, 20 nt, Human
gcgugaaacacaccaggcug

SEQ ID NO: 2507109 - RNA, 23 nt, Human
gcgugaaacacaccaggcugugg

SEQ ID NO: 2507110 - RNA, 23 nt, Human
gcgugaacccgggaggcggagcu

SEQ ID NO: 2507111 - RNA, 13 nt, Human
gcgugaaggccga

SEQ ID NO: 2507112 - RNA, 15 nt, Human
gcgugaaggccgaga

SEQ ID NO: 2507113 - RNA, 23 nt, Human
gcgugagccacugcaccgggcca

SEQ ID NO: 2507114 - RNA, 13 nt, Human
gcgugacaauaaa

SEQ ID NO: 2507115 - RNA, 16 nt, Human
gcgugaaggccgagaa

SEQ ID NO: 2507116 - RNA, 16 nt, Human
gcgugacucacccaag

SEQ ID NO: 2507117 - RNA, 13 nt, Human
gcgugacucaccc

SEQ ID NO: 2507118 - RNA, 14 nt, Human
gcgugacucaccca

SEQ ID NO: 2507119 - RNA, 18 nt, Human
gcgugaggaugggaagga

SEQ ID NO: 2507120 - RNA, 15 nt, Human
gcgugaucaaagcca

SEQ ID NO: 2507121 - RNA, 15 nt, Human
gcuaaagcccagaga

SEQ ID NO: 2507122 - RNA, 16 nt, Human
gcuaaagcccagagac

SEQ ID NO: 2507123 - RNA, 20 nt, Human
gcuaaauaaaauuuguugca

SEQ ID NO: 2507124 - RNA, 19 nt, Human
gcuaaauaaaauuuguugc

SEQ ID NO: 2507125 - RNA, 13 nt, Human
gcuaaaugugaau

SEQ ID NO: 2507126 - RNA, 21 nt, Human
gcuaaauaaaauuuguugcau

SEQ ID NO: 2507127 - RNA, 19 nt, Human
gcuaaauccuuuacuguua

SEQ ID NO: 2507128 - RNA, 19 nt, Human
gcuaaauggucgcccagga

SEQ ID NO: 2507129 - RNA, 23 nt, Human
gcuaaauggucgcccaggagaca

SEQ ID NO: 2507130 - RNA, 16 nt, Human
gcuaaaugugaaugau

SEQ ID NO: 2507131 - RNA, 18 nt, Human
gcuaaauuacaauuguca

SEQ ID NO: 2507132 - RNA, 22 nt, Human
gcuaaauuacucaggaagaaca

SEQ ID NO: 2507133 - RNA, 14 nt, Human
gcuaaauguaacag

SEQ ID NO: 2507134 - RNA, 17 nt, Human
gcuaaauguaacagucu

SEQ ID NO: 2507135 - RNA, 22 nt, Human
gcuaagagggagggagggcucc

SEQ ID NO: 2507136 - RNA, 21 nt, Human
gcuaagagggagggagggcuc

SEQ ID NO: 2507137 - RNA, 20 nt, Human
gcuaacacacagcucccaua

SEQ ID NO: 2507138 - RNA, 15 nt, Human
gcuaacacuggcccc

SEQ ID NO: 2507139 - RNA, 16 nt, Human
gcuaacacuggccccu

SEQ ID NO: 2507140 - RNA, 17 nt, Human
gcuaacacuggccccua

SEQ ID NO: 2507141 - RNA, 16 nt, Human
gcuaacaccagacaga

SEQ ID NO: 2507142 - RNA, 19 nt, Human
gcuagagguucaaagauau

SEQ ID NO: 2507143 - RNA, 21 nt, Human
gcuagagguucaaagauauuu

SEQ ID NO: 2507144 - RNA, 18 nt, Human
gcuagagguucaaagaua

SEQ ID NO: 2507145 - RNA, 16 nt, Human
gcuacucaagaggcug

SEQ ID NO: 2507146 - RNA, 17 nt, Human
gcuacucaagaggcuga

SEQ ID NO: 2507147 - RNA, 20 nt, Human
gcuacucaagaggcugaggc

SEQ ID NO: 2507148 - RNA, 21 nt, Human
gcuacucaagaggcugaggca

SEQ ID NO: 2507149 - RNA, 19 nt, Human
gcuacguuccuauugucau

SEQ ID NO: 2507150 - RNA, 20 nt, Human
gcuacgugugauuuuucugg

SEQ ID NO: 2507151 - RNA, 19 nt, Human
gcuacgugugauuuuucug

SEQ ID NO: 2507152 - RNA, 17 nt, Human
gcuacgugugauuuuuc

SEQ ID NO: 2507153 - RNA, 18 nt, Human
gcuacguacaugugaggc

SEQ ID NO: 2507154 - RNA, 15 nt, Human
gcuacgugugauuuu

SEQ ID NO: 2507155 - RNA, 14 nt, Human
gcuacuaaugaugu

SEQ ID NO: 2507156 - RNA, 16 nt, Human
gcuacuaaugauguuu

SEQ ID NO: 2507157 - RNA, 18 nt, Human
gcuacuaaugauguuuuc

SEQ ID NO: 2507158 - RNA, 21 nt, Human
gcuacccgggaagggggcugg

SEQ ID NO: 2507159 - RNA, 12 nt, Human
gcuacgccugca

SEQ ID NO: 2507160 - RNA, 13 nt, Human
gcuacccucccug

SEQ ID NO: 2507161 - RNA, 22 nt, Human
gcuacccgcagaguucucagaa

SEQ ID NO: 2507162 - RNA, 17 nt, Human
gcuaagcaaaaugugau

SEQ ID NO: 2507163 - RNA, 23 nt, Human
gcuaagagggagggagggcucca

SEQ ID NO: 2507164 - RNA, 14 nt, Human
gcuaagcauuccaa

SEQ ID NO: 2507165 - RNA, 18 nt, Human
gcuaagauuaucugggga

SEQ ID NO: 2507166 - RNA, 12 nt, Human
gcuaagaugcuc

SEQ ID NO: 2507167 - RNA, 17 nt, Human
gcuaagccccagcaagc

SEQ ID NO: 2507168 - RNA, 19 nt, Human
gcuaagaguguccuaggag

SEQ ID NO: 2507169 - RNA, 15 nt, Human
gcuacccgggaaggg

SEQ ID NO: 2507170 - RNA, 14 nt, Human
gcuacccgggaagg

SEQ ID NO: 2507171 - RNA, 15 nt, Human
gcuaagcuaggaaug

SEQ ID NO: 2507172 - RNA, 19 nt, Human
gcuaagcuaggaaugaaau

SEQ ID NO: 2507173 - RNA, 20 nt, Human
gcuaagccccagcaagcaau

SEQ ID NO: 2507174 - RNA, 18 nt, Human
gcuaagccccagcaagca

SEQ ID NO: 2507175 - RNA, 17 nt, Human
gcuaaggacauuuccca

SEQ ID NO: 2507176 - RNA, 20 nt, Human
gcuaaggacauuucccaggg

SEQ ID NO: 2507177 - RNA, 16 nt, Human
gcuacccgcagaguuc

SEQ ID NO: 2507178 - RNA, 22 nt, Human
gcuaucucccccagccccaucc

SEQ ID NO: 2507179 - RNA, 21 nt, Human
gcuaucucccccagccccauc

SEQ ID NO: 2507180 - RNA, 20 nt, Human
gcuaucucccccagccccau

SEQ ID NO: 2507181 - RNA, 19 nt, Human
gcuaucucccccagcccca

SEQ ID NO: 2507182 - RNA, 23 nt, Human
gcuaucucccccagccccauccu

SEQ ID NO: 2507183 - RNA, 12 nt, Human
gcuagcuucugc

SEQ ID NO: 2507184 - RNA, 16 nt, Human
gcuagcugcagagcca

SEQ ID NO: 2507185 - RNA, 23 nt, Human
gcuaucucucagugaacugugag

SEQ ID NO: 2507186 - RNA, 13 nt, Human
gcuaucucugugu

SEQ ID NO: 2507187 - RNA, 16 nt, Human
gcuaucucugugugca

SEQ ID NO: 2507188 - RNA, 12 nt, Human
gcuaucuuaauu

SEQ ID NO: 2507189 - RNA, 17 nt, Human
gcuaucuggucaaccuc

SEQ ID NO: 2507190 - RNA, 20 nt, Human
gcuaucucugugugcacaaa

SEQ ID NO: 2507191 - RNA, 16 nt, Human
gcuaucuuaauuuugg

SEQ ID NO: 2507192 - RNA, 15 nt, Human
gcuaucuuaauuuug

SEQ ID NO: 2507193 - RNA, 14 nt, Human
gcuaucuuaauuuu

SEQ ID NO: 2507194 - RNA, 12 nt, Human
gcuaugaauuuu

SEQ ID NO: 2507195 - RNA, 18 nt, Human
gcuaucucccccagcccc

SEQ ID NO: 2507196 - RNA, 17 nt, Human
gcuaucucccccagccc

SEQ ID NO: 2507197 - RNA, 16 nt, Human
gcuaucucccccagcc

SEQ ID NO: 2507198 - RNA, 22 nt, Human
gcuagcuccccuccucuccccu

SEQ ID NO: 2507199 - RNA, 21 nt, Human
gcuagcuccccuccucucccc

SEQ ID NO: 2507200 - RNA, 18 nt, Human
gcuagcuccccuccucuc

SEQ ID NO: 2507201 - RNA, 16 nt, Human
gcuagcuccccuccuc

SEQ ID NO: 2507202 - RNA, 16 nt, Human
gcuagaggccugagga

SEQ ID NO: 2507203 - RNA, 18 nt, Human
gcuagaguccucacuccc

SEQ ID NO: 2507204 - RNA, 13 nt, Human
gcuagaggccuga

SEQ ID NO: 2507205 - RNA, 13 nt, Human
gcuagaguccuca

SEQ ID NO: 2507206 - RNA, 16 nt, Human
gcuagaguccucacuc

SEQ ID NO: 2507207 - RNA, 20 nt, Human
gcuagcgcugccgcacccca

SEQ ID NO: 2507208 - RNA, 21 nt, Human
gcuagcgcugccgcaccccag

SEQ ID NO: 2507209 - RNA, 22 nt, Human
gcuagcgcugccgcaccccaga

SEQ ID NO: 2507210 - RNA, 23 nt, Human
gcuagcgcugccgcaccccagag

SEQ ID NO: 2507211 - RNA, 14 nt, Human
gcuagcgcugccgc

SEQ ID NO: 2507212 - RNA, 15 nt, Human
gcuagcgcugccgca

SEQ ID NO: 2507213 - RNA, 14 nt, Human
gcuagcaucccuga

SEQ ID NO: 2507214 - RNA, 18 nt, Human
gcucaggugucccugcac

SEQ ID NO: 2507215 - RNA, 19 nt, Human
gcucagccuggugggccuc

SEQ ID NO: 2507216 - RNA, 20 nt, Human
gcucagccuggugggccucc

SEQ ID NO: 2507217 - RNA, 22 nt, Human
gcucagcggggacagcuccuuc

SEQ ID NO: 2507218 - RNA, 21 nt, Human
gcucagcggggacagcuccuu

SEQ ID NO: 2507219 - RNA, 20 nt, Human
gcucagcggggacagcuccu

SEQ ID NO: 2507220 - RNA, 15 nt, Human
gcucagcggggacag

SEQ ID NO: 2507221 - RNA, 14 nt, Human
gcucagccuggugg

SEQ ID NO: 2507222 - RNA, 15 nt, Human
gcucagccugguggg

SEQ ID NO: 2507223 - RNA, 17 nt, Human
gcucagccuggugggcc

SEQ ID NO: 2507224 - RNA, 18 nt, Human
gcucagccuggugggccu

SEQ ID NO: 2507225 - RNA, 19 nt, Human
gcucaggugucccugcacu

SEQ ID NO: 2507226 - RNA, 15 nt, Human
gcucagcgccagccu

SEQ ID NO: 2507227 - RNA, 16 nt, Human
gcucaguaauuugagg

SEQ ID NO: 2507228 - RNA, 21 nt, Human
gcucaguaauuugaggacaac

SEQ ID NO: 2507229 - RNA, 12 nt, Human
gcucagucccau

SEQ ID NO: 2507230 - RNA, 19 nt, Human
gcucagucucccuuucccu

SEQ ID NO: 2507231 - RNA, 16 nt, Human
gcucagucucccuuuc

SEQ ID NO: 2507232 - RNA, 14 nt, Human
gcucagucucccuu

SEQ ID NO: 2507233 - RNA, 21 nt, Human
gcucagucucaggagcauggg

SEQ ID NO: 2507234 - RNA, 23 nt, Human
gcucagucccaucagagagcgag

SEQ ID NO: 2507235 - RNA, 14 nt, Human
gcucagucucagga

SEQ ID NO: 2507236 - RNA, 17 nt, Human
gcucagucucaggagca

SEQ ID NO: 2507237 - RNA, 20 nt, Human
gcucagucucaggagcaugg

SEQ ID NO: 2507238 - RNA, 17 nt, Human
gcucaguuguagaaugu

SEQ ID NO: 2507239 - RNA, 12 nt, Human
gcucaguuguag

SEQ ID NO: 2507240 - RNA, 16 nt, Human
gcucaguucuagucuc

SEQ ID NO: 2507241 - RNA, 17 nt, Human
gcucaguucagaaucac

SEQ ID NO: 2507242 - RNA, 20 nt, Human
gcucauacaggaaugaagcc

SEQ ID NO: 2507243 - RNA, 23 nt, Human
gcucaguuguagaauguauugua

SEQ ID NO: 2507244 - RNA, 18 nt, Human
gcucauaacggaucagaa

SEQ ID NO: 2507245 - RNA, 22 nt, Human
gcucagugucuggcugcagagc

SEQ ID NO: 2507246 - RNA, 16 nt, Human
gcucaguucagaauca

SEQ ID NO: 2507247 - RNA, 17 nt, Human
gcuccaaacccucgagg

SEQ ID NO: 2507248 - RNA, 18 nt, Human
gcuccaaacccucgaggc

SEQ ID NO: 2507249 - RNA, 16 nt, Human
gcuccaaacccucgag

SEQ ID NO: 2507250 - RNA, 19 nt, Human
gcucauauggggcugggag

SEQ ID NO: 2507251 - RNA, 16 nt, Human
gcucauauuccugcag

SEQ ID NO: 2507252 - RNA, 22 nt, Human
gcucacccccuucuccauccac

SEQ ID NO: 2507253 - RNA, 15 nt, Human
gcucaccccuggagg

SEQ ID NO: 2507254 - RNA, 18 nt, Human
gcucacccccuucuccau

SEQ ID NO: 2507255 - RNA, 20 nt, Human
gcucacccccuucuccaucc

SEQ ID NO: 2507256 - RNA, 16 nt, Human
gcucaccccccacacu

SEQ ID NO: 2507257 - RNA, 19 nt, Human
gcucaccccccacacucac

SEQ ID NO: 2507258 - RNA, 17 nt, Human
gcucaccccccacacuc

SEQ ID NO: 2507259 - RNA, 16 nt, Human
gcucacccccuucucc

SEQ ID NO: 2507260 - RNA, 18 nt, Human
gcucacccagccccaggg

SEQ ID NO: 2507261 - RNA, 20 nt, Human
gcucacccaauaaacauuaa

SEQ ID NO: 2507262 - RNA, 19 nt, Human
gcucaccagccccagugcc

SEQ ID NO: 2507263 - RNA, 17 nt, Human
gcuaugagcuggggaug

SEQ ID NO: 2507264 - RNA, 18 nt, Human
gcucaccagccccagugc

SEQ ID NO: 2507265 - RNA, 23 nt, Human
gcucaccagccccagugcccaca

SEQ ID NO: 2507266 - RNA, 20 nt, Human
gcucaccagccccagugccc

SEQ ID NO: 2507267 - RNA, 17 nt, Human
gcucagcaaaagaugcu

SEQ ID NO: 2507268 - RNA, 20 nt, Human
gcucagcaaaagaugcuucu

SEQ ID NO: 2507269 - RNA, 22 nt, Human
gcucagcaaaagaugcuucuca

SEQ ID NO: 2507270 - RNA, 23 nt, Human
gcucagcaaaagaugcuucucac

SEQ ID NO: 2507271 - RNA, 20 nt, Human
gcucaccccccacacucacu

SEQ ID NO: 2507272 - RNA, 23 nt, Human
gcucagaggguuguucuccuaga

SEQ ID NO: 2507273 - RNA, 12 nt, Human
gcucagccagca

SEQ ID NO: 2507274 - RNA, 13 nt, Human
gcucagccagcac

SEQ ID NO: 2507275 - RNA, 11 nt, Human
gcucagcagcu

SEQ ID NO: 2507276 - RNA, 15 nt, Human
gcucagcccuggagg

SEQ ID NO: 2507277 - RNA, 14 nt, Human
gcucagcccuggag

SEQ ID NO: 2507278 - RNA, 14 nt, Human
gcucagccagcacu

SEQ ID NO: 2507279 - RNA, 20 nt, Human
gcucagcccuggaggugcca

SEQ ID NO: 2507280 - RNA, 16 nt, Human
gcucagcccuggaggu

SEQ ID NO: 2507281 - RNA, 11 nt, Human
gcucagccugg

SEQ ID NO: 2507282 - RNA, 20 nt, Human
gcucccugaagccagccuuc

SEQ ID NO: 2507283 - RNA, 18 nt, Human
gcucccugaagccagccu

SEQ ID NO: 2507284 - RNA, 17 nt, Human
gcucccugaagccagcc

SEQ ID NO: 2507285 - RNA, 16 nt, Human
gcucccugaagccagc

SEQ ID NO: 2507286 - RNA, 15 nt, Human
gcucccugaagccag

SEQ ID NO: 2507287 - RNA, 14 nt, Human
gcucccugaagcca

SEQ ID NO: 2507288 - RNA, 13 nt, Human
gcucccugaagcc

SEQ ID NO: 2507289 - RNA, 12 nt, Human
gcucccugaagc

SEQ ID NO: 2507290 - RNA, 18 nt, Human
gcucccugacugggaguu

SEQ ID NO: 2507291 - RNA, 16 nt, Human
gcucccugacugggag

SEQ ID NO: 2507292 - RNA, 24 nt, Human
gcucccugaagccagccuucuucc

SEQ ID NO: 2507293 - RNA, 19 nt, Human
gcucccucuuggucuuccc

SEQ ID NO: 2507294 - RNA, 17 nt, Human
gcucccucuuggucuuc

SEQ ID NO: 2507295 - RNA, 13 nt, Human
gcucccucugccu

SEQ ID NO: 2507296 - RNA, 23 nt, Human
gcucccucugccugaaccuucca

SEQ ID NO: 2507297 - RNA, 23 nt, Human
gcucccuccccugcccuggucca

SEQ ID NO: 2507298 - RNA, 19 nt, Human
gcucccuccccugcccugg

SEQ ID NO: 2507299 - RNA, 20 nt, Human
gcucccuccccugcccuggu

SEQ ID NO: 2507300 - RNA, 16 nt, Human
gcucccucccaucccu

SEQ ID NO: 2507301 - RNA, 17 nt, Human
gcucccuccccugcccu

SEQ ID NO: 2507302 - RNA, 20 nt, Human
gcuccauuuuuagugaaaua

SEQ ID NO: 2507303 - RNA, 16 nt, Human
gcucccuaccaccucc

SEQ ID NO: 2507304 - RNA, 20 nt, Human
gcucccuaccaccuccccag

SEQ ID NO: 2507305 - RNA, 15 nt, Human
gcucccuaccaccuc

SEQ ID NO: 2507306 - RNA, 20 nt, Human
gcuccaugugcccccucuac

SEQ ID NO: 2507307 - RNA, 18 nt, Human
gcuccaugugcccccucu

SEQ ID NO: 2507308 - RNA, 14 nt, Human
gcuccaucuccacu

SEQ ID NO: 2507309 - RNA, 21 nt, Human
gcuccagcugcucugucuucu

SEQ ID NO: 2507310 - RNA, 20 nt, Human
gcuccagcuguucagcuggu

SEQ ID NO: 2507311 - RNA, 23 nt, Human
gcuccaggcuccuuuagcgccca

SEQ ID NO: 2507312 - RNA, 16 nt, Human
gcuccaggcuccuuua

SEQ ID NO: 2507313 - RNA, 13 nt, Human
gcuccaggcuccu

SEQ ID NO: 2507314 - RNA, 11 nt, Human
gcuccagcugu

SEQ ID NO: 2507315 - RNA, 19 nt, Human
gcuccaagcucccaggcau

SEQ ID NO: 2507316 - RNA, 18 nt, Human
gcuccaagcucccaggca

SEQ ID NO: 2507317 - RNA, 17 nt, Human
gcuccaagcucccaggc

SEQ ID NO: 2507318 - RNA, 16 nt, Human
gcuccaagcucccagg

SEQ ID NO: 2507319 - RNA, 20 nt, Human
gcuccaaggggaaucagaac

SEQ ID NO: 2507320 - RNA, 21 nt, Human
gcuccaaggggaaucagaacu

SEQ ID NO: 2507321 - RNA, 23 nt, Human
gcuccaaggggaaucagaacuca

SEQ ID NO: 2507322 - RNA, 21 nt, Human
gcuccaagcucccaggcauuc

SEQ ID NO: 2507323 - RNA, 17 nt, Human
gcuccagcuggccggga

SEQ ID NO: 2507324 - RNA, 23 nt, Human
gcuccagcuggccgggagccuga

SEQ ID NO: 2507325 - RNA, 16 nt, Human
gcuccacacccucucc

SEQ ID NO: 2507326 - RNA, 19 nt, Human
gcuccacacccucucccag

SEQ ID NO: 2507327 - RNA, 20 nt, Human
gcuccagcugcucugucuuc

SEQ ID NO: 2507328 - RNA, 15 nt, Human
gcuccaagcucccag

SEQ ID NO: 2507329 - RNA, 14 nt, Human
gcuccaagcuccca

SEQ ID NO: 2507330 - RNA, 19 nt, Human
gcuccaagccccaucuucu

SEQ ID NO: 2507331 - RNA, 16 nt, Human
gcuccaagccccaucu

SEQ ID NO: 2507332 - RNA, 13 nt, Human
gcuccaagcuccc

SEQ ID NO: 2507333 - RNA, 15 nt, Human
gcuccaaccugcaaa

SEQ ID NO: 2507334 - RNA, 18 nt, Human
gcuccaaccugcaaagau

SEQ ID NO: 2507335 - RNA, 21 nt, Human
gcuccaaccugcaaagaucug

SEQ ID NO: 2507336 - RNA, 22 nt, Human
gcuccaagaccuguugguucca

SEQ ID NO: 2507337 - RNA, 18 nt, Human
gcuccaagaccuguuggu

SEQ ID NO: 2507338 - RNA, 16 nt, Human
gcuccaagaccuguug

SEQ ID NO: 2507339 - RNA, 16 nt, Human
gcuccaaaugcagcuu

SEQ ID NO: 2507340 - RNA, 19 nt, Human
gcuccaaacccucgaggcg

SEQ ID NO: 2507341 - RNA, 17 nt, Human
gcucgagcaugccugga

SEQ ID NO: 2507342 - RNA, 20 nt, Human
gcucgagcaguccugccuca

SEQ ID NO: 2507343 - RNA, 21 nt, Human
gcucgagcaguccugccucag

SEQ ID NO: 2507344 - RNA, 20 nt, Human
gcucuccaagugccagaggu

SEQ ID NO: 2507345 - RNA, 13 nt, Human
gcucuccaccuca

SEQ ID NO: 2507346 - RNA, 14 nt, Human
gcucuccaccucag

SEQ ID NO: 2507347 - RNA, 15 nt, Human
gcucuccaccucagc

SEQ ID NO: 2507348 - RNA, 16 nt, Human
gcucuccaccucagcc

SEQ ID NO: 2507349 - RNA, 17 nt, Human
gcucuccaccucagccu

SEQ ID NO: 2507350 - RNA, 18 nt, Human
gcucuccaccucagccuu

SEQ ID NO: 2507351 - RNA, 19 nt, Human
gcucuccaccucagccuug

SEQ ID NO: 2507352 - RNA, 17 nt, Human
gcucucccauuuccuga

SEQ ID NO: 2507353 - RNA, 16 nt, Human
gcucuccccugcccug

SEQ ID NO: 2507354 - RNA, 19 nt, Human
gcucuccagucaggaggca

SEQ ID NO: 2507355 - RNA, 15 nt, Human
gcucuccagcuccaa

SEQ ID NO: 2507356 - RNA, 20 nt, Human
gcucuccagucaggaggcau

SEQ ID NO: 2507357 - RNA, 21 nt, Human
gcucuccaccucagccuugga

SEQ ID NO: 2507358 - RNA, 13 nt, Human
gcucuccagcucc

SEQ ID NO: 2507359 - RNA, 20 nt, Human
gcucuccaccucagccuugg

SEQ ID NO: 2507360 - RNA, 14 nt, Human
gcucgaaaacaauu

SEQ ID NO: 2507361 - RNA, 20 nt, Human
gcuccuuuuucucccucugg

SEQ ID NO: 2507362 - RNA, 19 nt, Human
gcuccuuuuucucccucug

SEQ ID NO: 2507363 - RNA, 18 nt, Human
gcuccuuuuucucccucu

SEQ ID NO: 2507364 - RNA, 16 nt, Human
gcuccuuuuucucccu

SEQ ID NO: 2507365 - RNA, 14 nt, Human
gcuccuuuuucucc

SEQ ID NO: 2507366 - RNA, 11 nt, Human
gcuccuugggc

SEQ ID NO: 2507367 - RNA, 21 nt, Human
gcuccuugggaggccccacug

SEQ ID NO: 2507368 - RNA, 22 nt, Human
gcuccuugggaggccccacugg

SEQ ID NO: 2507369 - RNA, 22 nt, Human
gcuccuugggaggaagcagaau

SEQ ID NO: 2507370 - RNA, 21 nt, Human
gcuccuugggaggaagcagaa

SEQ ID NO: 2507371 - RNA, 23 nt, Human
gcuccuugggaggaagcagaaua

SEQ ID NO: 2507372 - RNA, 14 nt, Human
gcuccuugggaggc

SEQ ID NO: 2507373 - RNA, 16 nt, Human
gcucgagcaugccugg

SEQ ID NO: 2507374 - RNA, 16 nt, Human
gcucgaaucucugugc

SEQ ID NO: 2507375 - RNA, 15 nt, Human
gcucgaaucucugug

SEQ ID NO: 2507376 - RNA, 19 nt, Human
gcucgaaucucugugccuu

SEQ ID NO: 2507377 - RNA, 17 nt, Human
gcucgagcaguccugcc

SEQ ID NO: 2507378 - RNA, 18 nt, Human
gcucccuucccaccucuc

SEQ ID NO: 2507379 - RNA, 16 nt, Human
gcucccuucccaccuc

SEQ ID NO: 2507380 - RNA, 21 nt, Human
gcucccuguaaccucuucaga

SEQ ID NO: 2507381 - RNA, 15 nt, Human
gcucccuucccaccu

SEQ ID NO: 2507382 - RNA, 21 nt, Human
gcuccuucuguccuacucugu

SEQ ID NO: 2507383 - RNA, 20 nt, Human
gcuccuugggaggaagcaga

SEQ ID NO: 2507384 - RNA, 19 nt, Human
gcuccuugggaggaagcag

SEQ ID NO: 2507385 - RNA, 18 nt, Human
gcuccuugggaggaagca

SEQ ID NO: 2507386 - RNA, 17 nt, Human
gcuccuugggaggaagc

SEQ ID NO: 2507387 - RNA, 15 nt, Human
gcuccuugacuccuu

SEQ ID NO: 2507388 - RNA, 18 nt, Human
gcucccuuccaccuguca

SEQ ID NO: 2507389 - RNA, 16 nt, Human
gcuccuugggaggaag

SEQ ID NO: 2507390 - RNA, 13 nt, Human
gcuccuugggagg

SEQ ID NO: 2507391 - RNA, 19 nt, Human
gcucccuucccaccucucu

SEQ ID NO: 2507392 - RNA, 21 nt, Human
gcucccuucaucuccagggag

SEQ ID NO: 2507393 - RNA, 13 nt, Human
gcucccuggagcc

SEQ ID NO: 2507394 - RNA, 15 nt, Human
gcuccuucuguccua

SEQ ID NO: 2507395 - RNA, 17 nt, Human
gcucuccgaccagacac

SEQ ID NO: 2507396 - RNA, 13 nt, Human
gcucuccgaccag

SEQ ID NO: 2507397 - RNA, 18 nt, Human
gcucucccgguucuucca

SEQ ID NO: 2507398 - RNA, 19 nt, Human
gcucuccccugcccugcug

SEQ ID NO: 2507399 - RNA, 20 nt, Human
gcucucccgguucuuccagu

SEQ ID NO: 2507400 - RNA, 19 nt, Human
gcucucccgguucuuccag

SEQ ID NO: 2507401 - RNA, 11 nt, Human
gcucucccucu

SEQ ID NO: 2507402 - RNA, 14 nt, Human
gcucucccucuggc

SEQ ID NO: 2507403 - RNA, 15 nt, Human
gcucucccucuggcc

SEQ ID NO: 2507404 - RNA, 17 nt, Human
gcucucccucuggcccu

SEQ ID NO: 2507405 - RNA, 18 nt, Human
gcucucccucuggcccug

SEQ ID NO: 2507406 - RNA, 19 nt, Human
gcucucccucuggcccugc

SEQ ID NO: 2507407 - RNA, 20 nt, Human
gcucucccucuggcccugcc

SEQ ID NO: 2507408 - RNA, 21 nt, Human
gcucucccucuggcccugccu

SEQ ID NO: 2507409 - RNA, 14 nt, Human
gcucucccucuucu

SEQ ID NO: 2507410 - RNA, 23 nt, Human
gcucucccucuggcccugccuuc

SEQ ID NO: 2507411 - RNA, 15 nt, Human
gcucuccucuugcca

SEQ ID NO: 2507412 - RNA, 22 nt, Human
gcucuccucuugccacugccuc

SEQ ID NO: 2507413 - RNA, 19 nt, Human
gcucuccucuugccacugc

SEQ ID NO: 2507414 - RNA, 23 nt, Human
gcucucccucuucucaagugccu

SEQ ID NO: 2507415 - RNA, 21 nt, Human
gcucucccucuucucaagugc

SEQ ID NO: 2507416 - RNA, 16 nt, Human
gcucucccucuucuca

SEQ ID NO: 2507417 - RNA, 15 nt, Human
gcucucccucuucuc

SEQ ID NO: 2507418 - RNA, 24 nt, Human
gcucucccucuucucaagugccuu

SEQ ID NO: 2507419 - RNA, 19 nt, Human
gcucuccucagaagaaaga

SEQ ID NO: 2507420 - RNA, 19 nt, Human
gcucuccgaccagacaccu

SEQ ID NO: 2507421 - RNA, 12 nt, Human
gcucucuggccu

SEQ ID NO: 2507422 - RNA, 13 nt, Human
gcucucuggccuu

SEQ ID NO: 2507423 - RNA, 11 nt, Human
gcucucuggcc

SEQ ID NO: 2507424 - RNA, 17 nt, Human
gcucucugcagccagcc

SEQ ID NO: 2507425 - RNA, 18 nt, Human
gcucucugcagccagccc

SEQ ID NO: 2507426 - RNA, 19 nt, Human
gcucucugcagccagccca

SEQ ID NO: 2507427 - RNA, 20 nt, Human
gcucucugcagccagcccag

SEQ ID NO: 2507428 - RNA, 11 nt, Human
gcucucugcca

SEQ ID NO: 2507429 - RNA, 20 nt, Human
gcucucugcaucuacuccca

SEQ ID NO: 2507430 - RNA, 21 nt, Human
gcucucugcagccagcccagc

SEQ ID NO: 2507431 - RNA, 22 nt, Human
gcucucugcagccagcccagcc

SEQ ID NO: 2507432 - RNA, 19 nt, Human
gcucucggguugugugucu

SEQ ID NO: 2507433 - RNA, 19 nt, Human
gcucucggaacugcaugcu

SEQ ID NO: 2507434 - RNA, 19 nt, Human
gcucucucauugucugugu

SEQ ID NO: 2507435 - RNA, 12 nt, Human
gcucucuccagg

SEQ ID NO: 2507436 - RNA, 21 nt, Human
gcucucggaacugcaugcugc

SEQ ID NO: 2507437 - RNA, 13 nt, Human
gcucucuccagga

SEQ ID NO: 2507438 - RNA, 13 nt, Human
gcucucugcagcc

SEQ ID NO: 2507439 - RNA, 14 nt, Human
gcucucugcagcca

SEQ ID NO: 2507440 - RNA, 15 nt, Human
gcucucugcagccag

SEQ ID NO: 2507441 - RNA, 12 nt, Human
gcucuccuuccu

SEQ ID NO: 2507442 - RNA, 11 nt, Human
gcucuccuucc

SEQ ID NO: 2507443 - RNA, 22 nt, Human
gcucuccuuccuggagcccaga

SEQ ID NO: 2507444 - RNA, 16 nt, Human
gcucuccuuucuuucu

SEQ ID NO: 2507445 - RNA, 14 nt, Human
gcucucuggccuuc

SEQ ID NO: 2507446 - RNA, 15 nt, Human
gcucucuggccuucg

SEQ ID NO: 2507447 - RNA, 19 nt, Human
gcucucuggccuucggccu

SEQ ID NO: 2507448 - RNA, 20 nt, Human
gcucucuggccuucggccuc

SEQ ID NO: 2507449 - RNA, 11 nt, Human
gcucugccucc

SEQ ID NO: 2507450 - RNA, 23 nt, Human
gcucugcccuugguuaggcauug

SEQ ID NO: 2507451 - RNA, 14 nt, Human
gcucugcccuuggu

SEQ ID NO: 2507452 - RNA, 18 nt, Human
gcucucuggccuuuuccu

SEQ ID NO: 2507453 - RNA, 11 nt, Human
gcucucugcug

SEQ ID NO: 2507454 - RNA, 22 nt, Human
gcucugccucccaucacccgcu

SEQ ID NO: 2507455 - RNA, 15 nt, Human
gcucugccucccauc

SEQ ID NO: 2507456 - RNA, 14 nt, Human
gcucugccucccau

SEQ ID NO: 2507457 - RNA, 13 nt, Human
gcucugccuccca

SEQ ID NO: 2507458 - RNA, 18 nt, Human
gcucugcccuuguucccu

SEQ ID NO: 2507459 - RNA, 21 nt, Human
gcucugcccuuguucccuagg

SEQ ID NO: 2507460 - RNA, 13 nt, Human
gcucucugcugua

SEQ ID NO: 2507461 - RNA, 17 nt, Human
gcucugcgugucaccug

SEQ ID NO: 2507462 - RNA, 14 nt, Human
gcucugcuccucuc

SEQ ID NO: 2507463 - RNA, 13 nt, Human
gcucugcuccucu

SEQ ID NO: 2507464 - RNA, 23 nt, Human
gcucugcugacagacacaggccc

SEQ ID NO: 2507465 - RNA, 20 nt, Human
gcucugcugacagacacagg

SEQ ID NO: 2507466 - RNA, 19 nt, Human
gcucugcugacagacacag

SEQ ID NO: 2507467 - RNA, 18 nt, Human
gcucugcugacagacaca

SEQ ID NO: 2507468 - RNA, 14 nt, Human
gcucugcugacaga

SEQ ID NO: 2507469 - RNA, 13 nt, Human
gcucugcugacag

SEQ ID NO: 2507470 - RNA, 21 nt, Human
gcucugcuccucuccccagca

SEQ ID NO: 2507471 - RNA, 19 nt, Human
gcucugcuccucuccccag

SEQ ID NO: 2507472 - RNA, 22 nt, Human
gcucuggacaggcauguucucu

SEQ ID NO: 2507473 - RNA, 21 nt, Human
gcucuggacaggcauguucuc

SEQ ID NO: 2507474 - RNA, 16 nt, Human
gcucuggacaggcaug

SEQ ID NO: 2507475 - RNA, 15 nt, Human
gcucuggacaggcau

SEQ ID NO: 2507476 - RNA, 19 nt, Human
gcucugcuggccuggccgg

SEQ ID NO: 2507477 - RNA, 18 nt, Human
gcucugcuggccuggccg

SEQ ID NO: 2507478 - RNA, 17 nt, Human
gcucugcuggccuggcc

SEQ ID NO: 2507479 - RNA, 15 nt, Human
gcucugcuggccugg

SEQ ID NO: 2507480 - RNA, 14 nt, Human
gcucugcuugacaa

SEQ ID NO: 2507481 - RNA, 21 nt, Human
gcucugcuugacaacaucuga

SEQ ID NO: 2507482 - RNA, 21 nt, Human
gcucugcuggccuggccggca

SEQ ID NO: 2507483 - RNA, 22 nt, Human
gcucugcgugucaccugugcuu

SEQ ID NO: 2507484 - RNA, 13 nt, Human
gcucugcuggccu

SEQ ID NO: 2507485 - RNA, 14 nt, Human
gcucuggacaggca

SEQ ID NO: 2507486 - RNA, 16 nt, Human
gcucuggacagcccca

SEQ ID NO: 2507487 - RNA, 19 nt, Human
gcucuggacagccccaccc

SEQ ID NO: 2507488 - RNA, 21 nt, Human
gcucuggaaaaugugacccag

SEQ ID NO: 2507489 - RNA, 22 nt, Human
gcucuggaaaaugugacccaga

SEQ ID NO: 2507490 - RNA, 14 nt, Human
gcucuggaagagag

SEQ ID NO: 2507491 - RNA, 15 nt, Human
gcucuuucucugcca

SEQ ID NO: 2507492 - RNA, 14 nt, Human
gcucuuucucugcc

SEQ ID NO: 2507493 - RNA, 17 nt, Human
gcucuuucuacucugaa

SEQ ID NO: 2507494 - RNA, 18 nt, Human
gcucuuuccuugcucaac

SEQ ID NO: 2507495 - RNA, 16 nt, Human
gcucuuuccuugcuca

SEQ ID NO: 2507496 - RNA, 15 nt, Human
gcucuuuccuugcuc

SEQ ID NO: 2507497 - RNA, 15 nt, Human
gcucuuuccuccuuc

SEQ ID NO: 2507498 - RNA, 17 nt, Human
gcucuuuccuccuucca

SEQ ID NO: 2507499 - RNA, 14 nt, Human
gcucuuuccuccuu

SEQ ID NO: 2507500 - RNA, 16 nt, Human
gcucuuucucugccag

SEQ ID NO: 2507501 - RNA, 13 nt, Human
gcugacagcugcu

SEQ ID NO: 2507502 - RNA, 14 nt, Human
gcugacagcugcuc

SEQ ID NO: 2507503 - RNA, 17 nt, Human
gcugacagacagcccuc

SEQ ID NO: 2507504 - RNA, 21 nt, Human
gcugacagacacaggcccggc

SEQ ID NO: 2507505 - RNA, 23 nt, Human
gcucuugauaccccccucugucu

SEQ ID NO: 2507506 - RNA, 22 nt, Human
gcucuugauaccccccucuguc

SEQ ID NO: 2507507 - RNA, 21 nt, Human
gcucuucugacuacugggcaa

SEQ ID NO: 2507508 - RNA, 16 nt, Human
gcucuugugaggaaag

SEQ ID NO: 2507509 - RNA, 17 nt, Human
gcucuugaugccuggcg

SEQ ID NO: 2507510 - RNA, 22 nt, Human
gcucuugugguacacacagauu

SEQ ID NO: 2507511 - RNA, 22 nt, Human
gcucuugugcuggauggagccc

SEQ ID NO: 2507512 - RNA, 20 nt, Human
gcucuugugaggaaagucau

SEQ ID NO: 2507513 - RNA, 19 nt, Human
gcucuugugaggaaaguca

SEQ ID NO: 2507514 - RNA, 17 nt, Human
gcucuugugaggaaagu

SEQ ID NO: 2507515 - RNA, 12 nt, Human
gcucuuucaggg

SEQ ID NO: 2507516 - RNA, 14 nt, Human
gcucuuuagccagu

SEQ ID NO: 2507517 - RNA, 13 nt, Human
gcucuuucagggg

SEQ ID NO: 2507518 - RNA, 21 nt, Human
gcucuuuaugaaugaaaaaac

SEQ ID NO: 2507519 - RNA, 19 nt, Human
gcugaccccaaagagccug

SEQ ID NO: 2507520 - RNA, 18 nt, Human
gcugaccccaaagagccu

SEQ ID NO: 2507521 - RNA, 14 nt, Human
gcugacccuccugu

SEQ ID NO: 2507522 - RNA, 17 nt, Human
gcugacccagucccugg

SEQ ID NO: 2507523 - RNA, 19 nt, Human
gcugacccagucccugggg

SEQ ID NO: 2507524 - RNA, 13 nt, Human
gcugacccagccu

SEQ ID NO: 2507525 - RNA, 13 nt, Human
gcugacccagucc

SEQ ID NO: 2507526 - RNA, 15 nt, Human
gcugacccagucccu

SEQ ID NO: 2507527 - RNA, 16 nt, Human
gcugacccagucccug

SEQ ID NO: 2507528 - RNA, 13 nt, Human
gcugacaucugug

SEQ ID NO: 2507529 - RNA, 19 nt, Human
gcugacaguccucuccacc

SEQ ID NO: 2507530 - RNA, 16 nt, Human
gcugacaguccucucc

SEQ ID NO: 2507531 - RNA, 14 nt, Human
gcugacaguccucu

SEQ ID NO: 2507532 - RNA, 15 nt, Human
gcugacagcugcucc

SEQ ID NO: 2507533 - RNA, 17 nt, Human
gcugacagcugcuccua

SEQ ID NO: 2507534 - RNA, 12 nt, Human
gcugacaguccu

SEQ ID NO: 2507535 - RNA, 18 nt, Human
gcugacagcugcuccuag

SEQ ID NO: 2507536 - RNA, 19 nt, Human
gcugacaucuguguuucaa

SEQ ID NO: 2507537 - RNA, 16 nt, Human
gcugacaucuguguuu

SEQ ID NO: 2507538 - RNA, 21 nt, Human
gcugaccaugcucaucugcug

SEQ ID NO: 2507539 - RNA, 22 nt, Human
gcugaccaugcucaucugcugg

SEQ ID NO: 2507540 - RNA, 22 nt, Human
gcugacccagccccuugagaaa

SEQ ID NO: 2507541 - RNA, 14 nt, Human
gcugaccucuguug

SEQ ID NO: 2507542 - RNA, 16 nt, Human
gcugaccucugguggc

SEQ ID NO: 2507543 - RNA, 15 nt, Human
gcugacuagaagggc

SEQ ID NO: 2507544 - RNA, 23 nt, Human
gcugacuagaagggccaguccug

SEQ ID NO: 2507545 - RNA, 22 nt, Human
gcugacccuccuguugcaccca

SEQ ID NO: 2507546 - RNA, 15 nt, Human
gcugacccuccuguu

SEQ ID NO: 2507547 - RNA, 14 nt, Human
gcugaccuccacag

SEQ ID NO: 2507548 - RNA, 15 nt, Human
gcugaccuccacagc

SEQ ID NO: 2507549 - RNA, 16 nt, Human
gcugaccuccacagcu

SEQ ID NO: 2507550 - RNA, 17 nt, Human
gcugaccuccacagcuu

SEQ ID NO: 2507551 - RNA, 13 nt, Human
gcugaccucuggu

SEQ ID NO: 2507552 - RNA, 19 nt, Human
gcugacuguacuccuccca

SEQ ID NO: 2507553 - RNA, 18 nt, Human
gcugacuguacuccuccc

SEQ ID NO: 2507554 - RNA, 23 nt, Human
gcugacucuaggugcccuuggag

SEQ ID NO: 2507555 - RNA, 20 nt, Human
gcugacugauguugagggaa

SEQ ID NO: 2507556 - RNA, 16 nt, Human
gcucuucuccaggcug

SEQ ID NO: 2507557 - RNA, 14 nt, Human
gcucuucuccaggc

SEQ ID NO: 2507558 - RNA, 21 nt, Human
gcucuucuccuuucacaaccu

SEQ ID NO: 2507559 - RNA, 17 nt, Human
gcucuucuccuuucaca

SEQ ID NO: 2507560 - RNA, 23 nt, Human
gcucuucucauuucaccccuccc

SEQ ID NO: 2507561 - RNA, 22 nt, Human
gcucuucucauuucaccccucc

SEQ ID NO: 2507562 - RNA, 13 nt, Human
gcucuucuccuuu

SEQ ID NO: 2507563 - RNA, 16 nt, Human
gcucuugaugccuggc

SEQ ID NO: 2507564 - RNA, 15 nt, Human
gcucuugaugccugg

SEQ ID NO: 2507565 - RNA, 14 nt, Human
gcucuugaugccug

SEQ ID NO: 2507566 - RNA, 23 nt, Human
gcucuucugcccaauuggaggaa

SEQ ID NO: 2507567 - RNA, 13 nt, Human
gcucuucugacua

SEQ ID NO: 2507568 - RNA, 23 nt, Human
gcucuucuccuuucacaaccuuc

SEQ ID NO: 2507569 - RNA, 18 nt, Human
gcucuuccaggcugggag

SEQ ID NO: 2507570 - RNA, 19 nt, Human
gcucuuccaggcugggaga

SEQ ID NO: 2507571 - RNA, 20 nt, Human
gcucuggacagccccacccu

SEQ ID NO: 2507572 - RNA, 22 nt, Human
gcucuggacagccccacccugg

SEQ ID NO: 2507573 - RNA, 16 nt, Human
gcucuggaccagccug

SEQ ID NO: 2507574 - RNA, 22 nt, Human
gcucuggaccaacccuguuucc

SEQ ID NO: 2507575 - RNA, 11 nt, Human
gcucuggacca

SEQ ID NO: 2507576 - RNA, 15 nt, Human
gcucuggaagagagg

SEQ ID NO: 2507577 - RNA, 17 nt, Human
gcucuggaccagccugu

SEQ ID NO: 2507578 - RNA, 20 nt, Human
gcucuucucauuucaccccu

SEQ ID NO: 2507579 - RNA, 16 nt, Human
gcucuucucauuucac

SEQ ID NO: 2507580 - RNA, 15 nt, Human
gcucuucucauuuca

SEQ ID NO: 2507581 - RNA, 14 nt, Human
gcucuucucauuuc

SEQ ID NO: 2507582 - RNA, 12 nt, Human
gcucuucuccag

SEQ ID NO: 2507583 - RNA, 22 nt, Human
gcucuuccaggcugggagagcc

SEQ ID NO: 2507584 - RNA, 12 nt, Human
gcucuucucauu

SEQ ID NO: 2507585 - RNA, 20 nt, Human
gcucuuccgaaaaccaggcc

SEQ ID NO: 2507586 - RNA, 21 nt, Human
gcugagucccaggcugagccu

SEQ ID NO: 2507587 - RNA, 22 nt, Human
gcugagucccaggcugagccuc

SEQ ID NO: 2507588 - RNA, 17 nt, Human
gcugagucccaggcuga

SEQ ID NO: 2507589 - RNA, 21 nt, Human
gcugacuguacuccucccagg

SEQ ID NO: 2507590 - RNA, 15 nt, Human
gcugagucugaaggc

SEQ ID NO: 2507591 - RNA, 16 nt, Human
gcugagucucccaagg

SEQ ID NO: 2507592 - RNA, 15 nt, Human
gcugagucucccaag

SEQ ID NO: 2507593 - RNA, 14 nt, Human
gcugagucucccaa

SEQ ID NO: 2507594 - RNA, 13 nt, Human
gcugagucuccca

SEQ ID NO: 2507595 - RNA, 18 nt, Human
gcugacugauguugaggg

SEQ ID NO: 2507596 - RNA, 18 nt, Human
gcugagucugaaggcugg

SEQ ID NO: 2507597 - RNA, 16 nt, Human
gcugagucugaaggcu

SEQ ID NO: 2507598 - RNA, 19 nt, Human
gcugagucugaaggcuggg

SEQ ID NO: 2507599 - RNA, 17 nt, Human
gcugagucucccaaggc

SEQ ID NO: 2507600 - RNA, 19 nt, Human
gcugaguggcaggggacag

SEQ ID NO: 2507601 - RNA, 17 nt, Human
gcugaguggcaggggac

SEQ ID NO: 2507602 - RNA, 22 nt, Human
gcugagugggggaucacagccu

SEQ ID NO: 2507603 - RNA, 23 nt, Human
gcugagugggggaucacagccuc

SEQ ID NO: 2507604 - RNA, 21 nt, Human
gcugaguggcaggggacagga

SEQ ID NO: 2507605 - RNA, 13 nt, Human
gcugaguuggugu

SEQ ID NO: 2507606 - RNA, 16 nt, Human
gcugauggugcaauga

SEQ ID NO: 2507607 - RNA, 15 nt, Human
gcugauggugcaaug

SEQ ID NO: 2507608 - RNA, 20 nt, Human
gcugaugcugggcugggugc

SEQ ID NO: 2507609 - RNA, 19 nt, Human
gcugaugcugggcugggug

SEQ ID NO: 2507610 - RNA, 16 nt, Human
gcugaugcugggcugg

SEQ ID NO: 2507611 - RNA, 15 nt, Human
gcugaugcugggcug

SEQ ID NO: 2507612 - RNA, 14 nt, Human
gcugaugcugggcu

SEQ ID NO: 2507613 - RNA, 20 nt, Human
gcugaugauuuguuuuugua

SEQ ID NO: 2507614 - RNA, 20 nt, Human
gcugcaguugccagucaccc

SEQ ID NO: 2507615 - RNA, 18 nt, Human
gcugcaguugccagucac

SEQ ID NO: 2507616 - RNA, 20 nt, Human
gcugauguucaguguaauuu

SEQ ID NO: 2507617 - RNA, 21 nt, Human
gcugcaguugccagucacccc

SEQ ID NO: 2507618 - RNA, 17 nt, Human
gcugauguucaguguaa

SEQ ID NO: 2507619 - RNA, 16 nt, Human
gcugauguucagugua

SEQ ID NO: 2507620 - RNA, 15 nt, Human
gcugauguucagugu

SEQ ID NO: 2507621 - RNA, 14 nt, Human
gcugauguucagug

SEQ ID NO: 2507622 - RNA, 13 nt, Human
gcugauguucagu

SEQ ID NO: 2507623 - RNA, 20 nt, Human
gcugauguccucaccacaug

SEQ ID NO: 2507624 - RNA, 23 nt, Human
gcugaugucaauuucuguguugc

SEQ ID NO: 2507625 - RNA, 20 nt, Human
gcugaugucaauuucugugu

SEQ ID NO: 2507626 - RNA, 17 nt, Human
gcugaugucaauuucug

SEQ ID NO: 2507627 - RNA, 23 nt, Human
gcugauggauaaccuauaugauu

SEQ ID NO: 2507628 - RNA, 21 nt, Human
gcugauggugcaaugaccuuu

SEQ ID NO: 2507629 - RNA, 18 nt, Human
gcugauggugcaaugacc

SEQ ID NO: 2507630 - RNA, 18 nt, Human
gcugccaaggccagagug

SEQ ID NO: 2507631 - RNA, 22 nt, Human
gcugccaaggccagaguggccu

SEQ ID NO: 2507632 - RNA, 23 nt, Human
gcugccaaggccagaguggccug

SEQ ID NO: 2507633 - RNA, 22 nt, Human
gcugcauccuccaagaaucuau

SEQ ID NO: 2507634 - RNA, 18 nt, Human
gcugcaugccuggucuuu

SEQ ID NO: 2507635 - RNA, 14 nt, Human
gcugcaugccuggu

SEQ ID NO: 2507636 - RNA, 20 nt, Human
gcugcaugccuggucuuucc

SEQ ID NO: 2507637 - RNA, 22 nt, Human
gcugcauggggugggguagggc

SEQ ID NO: 2507638 - RNA, 18 nt, Human
gcugcauccuccaagaau

SEQ ID NO: 2507639 - RNA, 22 nt, Human
gcugcaucugggauucccacca

SEQ ID NO: 2507640 - RNA, 18 nt, Human
gcugauguucaguguaau

SEQ ID NO: 2507641 - RNA, 22 nt, Human
gcugcaucccccccaccucucc

SEQ ID NO: 2507642 - RNA, 19 nt, Human
guacuucuccacccugcuc

SEQ ID NO: 2507643 - RNA, 18 nt, Human
guacuucuccacccugcu

SEQ ID NO: 2507644 - RNA, 17 nt, Human
guacuucuccacccugc

SEQ ID NO: 2507645 - RNA, 16 nt, Human
guacuucuccacccug

SEQ ID NO: 2507646 - RNA, 22 nt, Human
guacuugaaaucuaggauuauu

SEQ ID NO: 2507647 - RNA, 22 nt, Human
guacuugccuuauuagaguguc

SEQ ID NO: 2507648 - RNA, 14 nt, Human
guacuugcucuuga

SEQ ID NO: 2507649 - RNA, 21 nt, Human
guacuucuccacccugcucuc

SEQ ID NO: 2507650 - RNA, 20 nt, Human
guacuucuccacccugcucu

SEQ ID NO: 2507651 - RNA, 19 nt, Human
guacuugcucuugaugccu

SEQ ID NO: 2507652 - RNA, 18 nt, Human
guacuugcucuugaugcc

SEQ ID NO: 2507653 - RNA, 16 nt, Human
guacuugcucuugaug

SEQ ID NO: 2507654 - RNA, 15 nt, Human
guacuugcucuugau

SEQ ID NO: 2507655 - RNA, 20 nt, Human
guacuuguggacacagcucu

SEQ ID NO: 2507656 - RNA, 16 nt, Human
guacuuguggacacag

SEQ ID NO: 2507657 - RNA, 22 nt, Human
guacuugcucuugaugccuggc

SEQ ID NO: 2507658 - RNA, 21 nt, Human
guacuuggaguauuggggucu

SEQ ID NO: 2507659 - RNA, 11 nt, Human
guacuugucaa

SEQ ID NO: 2507660 - RNA, 14 nt, Human
guacuugucaaaga

SEQ ID NO: 2507661 - RNA, 17 nt, Human
guagaaaggccuuuaaa

SEQ ID NO: 2507662 - RNA, 16 nt, Human
guagaaaggccuuuaa

SEQ ID NO: 2507663 - RNA, 14 nt, Human
guagaaaggccuuu

SEQ ID NO: 2507664 - RNA, 16 nt, Human
guagagcggagaaagg

SEQ ID NO: 2507665 - RNA, 15 nt, Human
guagaggagaaacug

SEQ ID NO: 2507666 - RNA, 21 nt, Human
guagagcuagaacauggagag

SEQ ID NO: 2507667 - RNA, 13 nt, Human
guagaaaagcuau

SEQ ID NO: 2507668 - RNA, 22 nt, Human
guacuuuuaugauguauauuua

SEQ ID NO: 2507669 - RNA, 20 nt, Human
guagaaaagggaacugaaca

SEQ ID NO: 2507670 - RNA, 15 nt, Human
guagaaacugcaggg

SEQ ID NO: 2507671 - RNA, 19 nt, Human
guagaaacugcagggaaaa

SEQ ID NO: 2507672 - RNA, 21 nt, Human
guagaaagacagagcugggau

SEQ ID NO: 2507673 - RNA, 18 nt, Human
guagaaagacagagcugg

SEQ ID NO: 2507674 - RNA, 23 nt, Human
guacuuuauuuucuauaauuuaa

SEQ ID NO: 2507675 - RNA, 16 nt, Human
guacuugucaaagaag

SEQ ID NO: 2507676 - RNA, 15 nt, Human
guacuugucaaagaa

SEQ ID NO: 2507677 - RNA, 17 nt, Human
guacuugucaaagaagg

SEQ ID NO: 2507678 - RNA, 21 nt, Human
guacuuguggacacagcucuu

SEQ ID NO: 2507679 - RNA, 14 nt, Human
guacuuuggaggcc

SEQ ID NO: 2507680 - RNA, 20 nt, Human
guacuuuuaugauguauauu

SEQ ID NO: 2507681 - RNA, 10 nt, Human
guacuuugug

SEQ ID NO: 2507682 - RNA, 19 nt, Human
guaccuuuuaacaccugau

SEQ ID NO: 2507683 - RNA, 23 nt, Human
guaccuuuugaggagccccagcu

SEQ ID NO: 2507684 - RNA, 21 nt, Human
guaccuuuugaggagccccag

SEQ ID NO: 2507685 - RNA, 13 nt, Human
guaccuuuuaaca

SEQ ID NO: 2507686 - RNA, 13 nt, Human
guaccuuugucac

SEQ ID NO: 2507687 - RNA, 15 nt, Human
guacgucugacaggc

SEQ ID NO: 2507688 - RNA, 14 nt, Human
guacgucugacagg

SEQ ID NO: 2507689 - RNA, 15 nt, Human
guacguugugcauuu

SEQ ID NO: 2507690 - RNA, 16 nt, Human
guacguugugcauuug

SEQ ID NO: 2507691 - RNA, 14 nt, Human
guacguugugcauu

SEQ ID NO: 2507692 - RNA, 17 nt, Human
guacgucugacaggcaa

SEQ ID NO: 2507693 - RNA, 17 nt, Human
guacguugugcauuugg

SEQ ID NO: 2507694 - RNA, 17 nt, Human
guacguuuguaugugug

SEQ ID NO: 2507695 - RNA, 14 nt, Human
guacguuuguaugu

SEQ ID NO: 2507696 - RNA, 21 nt, Human
guacguuauuguugacuuauu

SEQ ID NO: 2507697 - RNA, 15 nt, Human
guacguggagaggga

SEQ ID NO: 2507698 - RNA, 15 nt, Human
guacuaaggaaucuu

SEQ ID NO: 2507699 - RNA, 23 nt, Human
guacuaaggaaucuuucugcuuu

SEQ ID NO: 2507700 - RNA, 15 nt, Human
guacuucuccacccu

SEQ ID NO: 2507701 - RNA, 14 nt, Human
guacuucuccaccc

SEQ ID NO: 2507702 - RNA, 22 nt, Human
guacuaacuccuaggaaaauac

SEQ ID NO: 2507703 - RNA, 12 nt, Human
guacuacaauuu

SEQ ID NO: 2507704 - RNA, 15 nt, Human
guacuacaauuuaaa

SEQ ID NO: 2507705 - RNA, 19 nt, Human
guacccucucagcuccagg

SEQ ID NO: 2507706 - RNA, 18 nt, Human
guacccucucagcuccag

SEQ ID NO: 2507707 - RNA, 17 nt, Human
guacccucucagcucca

SEQ ID NO: 2507708 - RNA, 17 nt, Human
guacccuccuggcucuu

SEQ ID NO: 2507709 - RNA, 23 nt, Human
guacccccgcccaggcuggccag

SEQ ID NO: 2507710 - RNA, 20 nt, Human
guacccccgcccaggcuggc

SEQ ID NO: 2507711 - RNA, 19 nt, Human
guacccccgcccaggcugg

SEQ ID NO: 2507712 - RNA, 18 nt, Human
guacccccgcccaggcug

SEQ ID NO: 2507713 - RNA, 14 nt, Human
guacccccuucugg

SEQ ID NO: 2507714 - RNA, 12 nt, Human
guacccccuucu

SEQ ID NO: 2507715 - RNA, 15 nt, Human
guacccccuucuggg

SEQ ID NO: 2507716 - RNA, 23 nt, Human
guaccgccuugcacacucagaag

SEQ ID NO: 2507717 - RNA, 13 nt, Human
guaccuauaaagu

SEQ ID NO: 2507718 - RNA, 15 nt, Human
guacccucuggaggg

SEQ ID NO: 2507719 - RNA, 15 nt, Human
guaccgcaaugugac

SEQ ID NO: 2507720 - RNA, 16 nt, Human
guacccacugcucugg

SEQ ID NO: 2507721 - RNA, 20 nt, Human
guacccagccaucugcccag

SEQ ID NO: 2507722 - RNA, 18 nt, Human
guacccagccaucugccc

SEQ ID NO: 2507723 - RNA, 15 nt, Human
guacccagccaucug

SEQ ID NO: 2507724 - RNA, 12 nt, Human
guacccagccau

SEQ ID NO: 2507725 - RNA, 17 nt, Human
guacauauuuguggaau

SEQ ID NO: 2507726 - RNA, 19 nt, Human
guacauauuuguggaauaa

SEQ ID NO: 2507727 - RNA, 17 nt, Human
guacccccgcccaggcu

SEQ ID NO: 2507728 - RNA, 13 nt, Human
guacccccgccca

SEQ ID NO: 2507729 - RNA, 21 nt, Human
guaccccccaaccccugagga

SEQ ID NO: 2507730 - RNA, 14 nt, Human
guaccccccaaccc

SEQ ID NO: 2507731 - RNA, 14 nt, Human
guaccccacccuca

SEQ ID NO: 2507732 - RNA, 13 nt, Human
guaccccacccuc

SEQ ID NO: 2507733 - RNA, 12 nt, Human
guaccccacccu

SEQ ID NO: 2507734 - RNA, 21 nt, Human
guacccagccaucugcccagg

SEQ ID NO: 2507735 - RNA, 22 nt, Human
guaccccacccucagcaccccu

SEQ ID NO: 2507736 - RNA, 19 nt, Human
guaccccacccucagcacc

SEQ ID NO: 2507737 - RNA, 23 nt, Human
guaccccacccucagcaccccuu

SEQ ID NO: 2507738 - RNA, 18 nt, Human
guaccuauuuucauugua

SEQ ID NO: 2507739 - RNA, 13 nt, Human
guaccucuugagc

SEQ ID NO: 2507740 - RNA, 21 nt, Human
guaccucuugagccuugaacu

SEQ ID NO: 2507741 - RNA, 22 nt, Human
guaccucuugagccuugaacuu

SEQ ID NO: 2507742 - RNA, 14 nt, Human
guaccugaaaagua

SEQ ID NO: 2507743 - RNA, 12 nt, Human
guaccugaaaag

SEQ ID NO: 2507744 - RNA, 14 nt, Human
guaccuauuuucau

SEQ ID NO: 2507745 - RNA, 21 nt, Human
guaccuauaaaguaaagcuaa

SEQ ID NO: 2507746 - RNA, 20 nt, Human
guaccuauaaaguaaagcua

SEQ ID NO: 2507747 - RNA, 19 nt, Human
guaccuauaaaguaaagcu

SEQ ID NO: 2507748 - RNA, 14 nt, Human
guaccuauaaagua

SEQ ID NO: 2507749 - RNA, 23 nt, Human
guaccugaaaaguaacuuggcuu

SEQ ID NO: 2507750 - RNA, 18 nt, Human
guaccugaaaaguaacuu

SEQ ID NO: 2507751 - RNA, 17 nt, Human
guaccugcccccaaucc

SEQ ID NO: 2507752 - RNA, 15 nt, Human
guaccuggaggagga

SEQ ID NO: 2507753 - RNA, 19 nt, Human
guaccuguuccuuagaccu

SEQ ID NO: 2507754 - RNA, 17 nt, Human
guaccuggugaccccuu

SEQ ID NO: 2507755 - RNA, 14 nt, Human
guaccuugaacacu

SEQ ID NO: 2507756 - RNA, 18 nt, Human
guaccuugaacacugggg

SEQ ID NO: 2507757 - RNA, 23 nt, Human
guaccuugaacacugggggaggg

SEQ ID NO: 2507758 - RNA, 16 nt, Human
guacauaugugcugga

SEQ ID NO: 2507759 - RNA, 14 nt, Human
guacauaugugcug

SEQ ID NO: 2507760 - RNA, 18 nt, Human
guacauauguaaaauaaa

SEQ ID NO: 2507761 - RNA, 15 nt, Human
guacccacugcucug

SEQ ID NO: 2507762 - RNA, 22 nt, Human
guacauagccuauauuuacagu

SEQ ID NO: 2507763 - RNA, 15 nt, Human
guacauagccuauau

SEQ ID NO: 2507764 - RNA, 14 nt, Human
guacauagccuaua

SEQ ID NO: 2507765 - RNA, 13 nt, Human
guacauagccuau

SEQ ID NO: 2507766 - RNA, 17 nt, Human
guacauaguuauuuauu

SEQ ID NO: 2507767 - RNA, 18 nt, Human
guacauaguuauuuauuu

SEQ ID NO: 2507768 - RNA, 12 nt, Human
guacauagccua

SEQ ID NO: 2507769 - RNA, 20 nt, Human
guacauaaugcgugcauacc

SEQ ID NO: 2507770 - RNA, 22 nt, Human
guacauacccuggccgcccccu

SEQ ID NO: 2507771 - RNA, 19 nt, Human
guacauacccuggccgccc

SEQ ID NO: 2507772 - RNA, 14 nt, Human
guacauaacugaaa

SEQ ID NO: 2507773 - RNA, 22 nt, Human
guacauaaaggugguaugugug

SEQ ID NO: 2507774 - RNA, 23 nt, Human
guacauaaaggugguaugugugu

SEQ ID NO: 2507775 - RNA, 13 nt, Human
guacaguuuuuau

SEQ ID NO: 2507776 - RNA, 12 nt, Human
guacaguuuuua

SEQ ID NO: 2507777 - RNA, 14 nt, Human
guacagucugucau

SEQ ID NO: 2507778 - RNA, 15 nt, Human
guacagguaagguga

SEQ ID NO: 2507779 - RNA, 15 nt, Human
guacaggcagcacag

SEQ ID NO: 2507780 - RNA, 17 nt, Human
guacaggcagcacagag

SEQ ID NO: 2507781 - RNA, 14 nt, Human
guacagucuuguau

SEQ ID NO: 2507782 - RNA, 13 nt, Human
guacagucuugua

SEQ ID NO: 2507783 - RNA, 19 nt, Human
guacagucuugcagcagga

SEQ ID NO: 2507784 - RNA, 12 nt, Human
guacagucuguc

SEQ ID NO: 2507785 - RNA, 16 nt, Human
guacagucuuguauua

SEQ ID NO: 2507786 - RNA, 19 nt, Human
guacaguucaguuccucuu

SEQ ID NO: 2507787 - RNA, 16 nt, Human
guacaguucaguuccu

SEQ ID NO: 2507788 - RNA, 14 nt, Human
guacaguucaguuc

SEQ ID NO: 2507789 - RNA, 21 nt, Human
guacaguuauuuaugccucug

SEQ ID NO: 2507790 - RNA, 17 nt, Human
guacaguguucuguuua

SEQ ID NO: 2507791 - RNA, 16 nt, Human
guacaguguucuguuu

SEQ ID NO: 2507792 - RNA, 14 nt, Human
guacaguguucugu

SEQ ID NO: 2507793 - RNA, 16 nt, Human
guacaguguguaaagu

SEQ ID NO: 2507794 - RNA, 16 nt, Human
guacaguucuucggga

SEQ ID NO: 2507795 - RNA, 12 nt, Human
guacaguucuuc

SEQ ID NO: 2507796 - RNA, 23 nt, Human
guacaguucaguuccucuuugca

SEQ ID NO: 2507797 - RNA, 22 nt, Human
guacaguucaguuccucuuugc

SEQ ID NO: 2507798 - RNA, 14 nt, Human
guacaguuugcugu

SEQ ID NO: 2507799 - RNA, 16 nt, Human
guacaguuugcuguac

SEQ ID NO: 2507800 - RNA, 15 nt, Human
guacaguuugcugua

SEQ ID NO: 2507801 - RNA, 23 nt, Human
guacaguucuucgggaagagagg

SEQ ID NO: 2507802 - RNA, 22 nt, Human
guacaguucuucgggaagagag

SEQ ID NO: 2507803 - RNA, 18 nt, Human
guacaguuuguuuacaca

SEQ ID NO: 2507804 - RNA, 16 nt, Human
guacaguuuguuuaca

SEQ ID NO: 2507805 - RNA, 19 nt, Human
guacaguuuguuuacacac

SEQ ID NO: 2507806 - RNA, 16 nt, Human
guacagacaacaaacc

SEQ ID NO: 2507807 - RNA, 13 nt, Human
guacagaaagcug

SEQ ID NO: 2507808 - RNA, 20 nt, Human
guacagaauucugcuaccuc

SEQ ID NO: 2507809 - RNA, 15 nt, Human
guacagacagaaaaa

SEQ ID NO: 2507810 - RNA, 12 nt, Human
guacacuuuuuu

SEQ ID NO: 2507811 - RNA, 14 nt, Human
guacagaaagcugc

SEQ ID NO: 2507812 - RNA, 21 nt, Human
guacagagaacuaacacuauu

SEQ ID NO: 2507813 - RNA, 20 nt, Human
guacagagaacuaacacuau

SEQ ID NO: 2507814 - RNA, 17 nt, Human
guacagacguaugcuua

SEQ ID NO: 2507815 - RNA, 19 nt, Human
guacacuguuucaaacuuu

SEQ ID NO: 2507816 - RNA, 20 nt, Human
guacacuguuucaaacuuua

SEQ ID NO: 2507817 - RNA, 21 nt, Human
guacacuguuucaaacuuuac

SEQ ID NO: 2507818 - RNA, 14 nt, Human
guaauugugaaaaa

SEQ ID NO: 2507819 - RNA, 22 nt, Human
guacagagcccacgcccccacu

SEQ ID NO: 2507820 - RNA, 18 nt, Human
guacagagcccacgcccc

SEQ ID NO: 2507821 - RNA, 12 nt, Human
guacagagccca

SEQ ID NO: 2507822 - RNA, 20 nt, Human
guacagcaaggagauuuaca

SEQ ID NO: 2507823 - RNA, 19 nt, Human
guacagaugaaugauaaac

SEQ ID NO: 2507824 - RNA, 18 nt, Human
guacagcuguuuaagaug

SEQ ID NO: 2507825 - RNA, 12 nt, Human
guacaggcagca

SEQ ID NO: 2507826 - RNA, 12 nt, Human
guaaugucacca

SEQ ID NO: 2507827 - RNA, 19 nt, Human
guaaugucaccaccuuccc

SEQ ID NO: 2507828 - RNA, 20 nt, Human
guaaugucaccaccuuccca

SEQ ID NO: 2507829 - RNA, 22 nt, Human
guaaugucaccaccuucccagc

SEQ ID NO: 2507830 - RNA, 13 nt, Human
guaauguuacuga

SEQ ID NO: 2507831 - RNA, 14 nt, Human
guaauguuacugau

SEQ ID NO: 2507832 - RNA, 17 nt, Human
guaauguuacugaucau

SEQ ID NO: 2507833 - RNA, 20 nt, Human
guaauguuacugaucaugca

SEQ ID NO: 2507834 - RNA, 21 nt, Human
guaauguuacugaucaugcau

SEQ ID NO: 2507835 - RNA, 14 nt, Human
guaaugugaauaaa

SEQ ID NO: 2507836 - RNA, 16 nt, Human
guaaugugaauaaauu

SEQ ID NO: 2507837 - RNA, 20 nt, Human
guaaugauauagccagaaaa

SEQ ID NO: 2507838 - RNA, 15 nt, Human
guaaugagggacugg

SEQ ID NO: 2507839 - RNA, 20 nt, Human
guaaugcuacgugugauuuu

SEQ ID NO: 2507840 - RNA, 21 nt, Human
guaaugauauagccagaaaaa

SEQ ID NO: 2507841 - RNA, 18 nt, Human
guaaugcuacgugugauu

SEQ ID NO: 2507842 - RNA, 16 nt, Human
guaaugcuucaaucag

SEQ ID NO: 2507843 - RNA, 20 nt, Human
guaaugcuuagagaauguuc

SEQ ID NO: 2507844 - RNA, 22 nt, Human
guaaugcuacgugugauuuuuc

SEQ ID NO: 2507845 - RNA, 19 nt, Human
guaaugauaacuggaaacu

SEQ ID NO: 2507846 - RNA, 18 nt, Human
guaaugaugucguuugaa

SEQ ID NO: 2507847 - RNA, 14 nt, Human
guaaugagggacug

SEQ ID NO: 2507848 - RNA, 21 nt, Human
guaaugaauuuuuaugauauu

SEQ ID NO: 2507849 - RNA, 15 nt, Human
guaaugaaacuugga

SEQ ID NO: 2507850 - RNA, 20 nt, Human
guaaucuguguacaaagaaa

SEQ ID NO: 2507851 - RNA, 19 nt, Human
guaaugaaccgcugaauau

SEQ ID NO: 2507852 - RNA, 17 nt, Human
guaaugaaccgcugaau

SEQ ID NO: 2507853 - RNA, 22 nt, Human
guaaugaaacaccuucucugga

SEQ ID NO: 2507854 - RNA, 10 nt, Human
guaaugaaac

SEQ ID NO: 2507855 - RNA, 16 nt, Human
guaaugaaacuuggau

SEQ ID NO: 2507856 - RNA, 13 nt, Human
guaaugaaaacca

SEQ ID NO: 2507857 - RNA, 11 nt, Human
guaaugaaaac

SEQ ID NO: 2507858 - RNA, 21 nt, Human
guaagugggguugcaaccacu

SEQ ID NO: 2507859 - RNA, 14 nt, Human
guaagugccuucca

SEQ ID NO: 2507860 - RNA, 13 nt, Human
guaagugccuucc

SEQ ID NO: 2507861 - RNA, 15 nt, Human
guaaucguguccccu

SEQ ID NO: 2507862 - RNA, 22 nt, Human
guaaucuaugaauucuaaguga

SEQ ID NO: 2507863 - RNA, 22 nt, Human
guaaucuccacagucaaagaag

SEQ ID NO: 2507864 - RNA, 18 nt, Human
guaaucguuaugugugua

SEQ ID NO: 2507865 - RNA, 22 nt, Human
guaagugggguugcaaccacug

SEQ ID NO: 2507866 - RNA, 17 nt, Human
guaaucgcuuaaagaug

SEQ ID NO: 2507867 - RNA, 16 nt, Human
guaaucguuaugugug

SEQ ID NO: 2507868 - RNA, 16 nt, Human
guaaucugauggcuuc

SEQ ID NO: 2507869 - RNA, 16 nt, Human
guaaucuguguacaaa

SEQ ID NO: 2507870 - RNA, 12 nt, Human
guaaucugugua

SEQ ID NO: 2507871 - RNA, 20 nt, Human
guaaucucguuucaaaaaca

SEQ ID NO: 2507872 - RNA, 18 nt, Human
guaaucucguuucaaaaa

SEQ ID NO: 2507873 - RNA, 16 nt, Human
guaaucucguuucaaa

SEQ ID NO: 2507874 - RNA, 23 nt, Human
guaauuaguaacauguguuaagu

SEQ ID NO: 2507875 - RNA, 20 nt, Human
guaauuaucgggaacagugu

SEQ ID NO: 2507876 - RNA, 12 nt, Human
guaauuauugug

SEQ ID NO: 2507877 - RNA, 22 nt, Human
guaauuaucgggaacaguguuu

SEQ ID NO: 2507878 - RNA, 19 nt, Human
guaauuaaaagaauuuucc

SEQ ID NO: 2507879 - RNA, 15 nt, Human
guaauuaguaacaug

SEQ ID NO: 2507880 - RNA, 21 nt, Human
guaauuaaguacuauguauca

SEQ ID NO: 2507881 - RNA, 22 nt, Human
guaauguuacugaucaugcauu

SEQ ID NO: 2507882 - RNA, 23 nt, Human
guaauguuacugaucaugcauug

SEQ ID NO: 2507883 - RNA, 14 nt, Human
guaauuaaguacua

SEQ ID NO: 2507884 - RNA, 17 nt, Human
guaauuaaguacuaugu

SEQ ID NO: 2507885 - RNA, 20 nt, Human
guaauuaaguacuauguauc

SEQ ID NO: 2507886 - RNA, 15 nt, Human
guaauucuaaaugaa

SEQ ID NO: 2507887 - RNA, 14 nt, Human
guaauucuaaauga

SEQ ID NO: 2507888 - RNA, 21 nt, Human
guaauuccucucacuaaacuu

SEQ ID NO: 2507889 - RNA, 12 nt, Human
guaauucuaaau

SEQ ID NO: 2507890 - RNA, 22 nt, Human
guaauucuaaaugaauguuuac

SEQ ID NO: 2507891 - RNA, 18 nt, Human
guaauucuaaaugaaugu

SEQ ID NO: 2507892 - RNA, 14 nt, Human
guaauucaagaaaa

SEQ ID NO: 2507893 - RNA, 13 nt, Human
guaauucaagaaa

SEQ ID NO: 2507894 - RNA, 17 nt, Human
guaauuauuuugguacu

SEQ ID NO: 2507895 - RNA, 23 nt, Human
guaauuauugugauuucccgugg

SEQ ID NO: 2507896 - RNA, 21 nt, Human
guaauuaucgggaacaguguu

SEQ ID NO: 2507897 - RNA, 18 nt, Human
guacacuguuucaaacuu

SEQ ID NO: 2507898 - RNA, 22 nt, Human
guaauugcuuacauuuuuacaa

SEQ ID NO: 2507899 - RNA, 17 nt, Human
guaauugcuuacauuuu

SEQ ID NO: 2507900 - RNA, 16 nt, Human
guaauugcuuacauuu

SEQ ID NO: 2507901 - RNA, 15 nt, Human
guaauugcuuacauu

SEQ ID NO: 2507902 - RNA, 23 nt, Human
guaauugcuuacauuuuuacaau

SEQ ID NO: 2507903 - RNA, 13 nt, Human
guaauugugaaaa

SEQ ID NO: 2507904 - RNA, 15 nt, Human
guaauuggaaaggca

SEQ ID NO: 2507905 - RNA, 15 nt, Human
guaauugacaugugc

SEQ ID NO: 2507906 - RNA, 12 nt, Human
guaauugcuuac

SEQ ID NO: 2507907 - RNA, 16 nt, Human
guaauugaauaaaguu

SEQ ID NO: 2507908 - RNA, 15 nt, Human
guaauugaacuuauc

SEQ ID NO: 2507909 - RNA, 23 nt, Human
gguggcccugucccucccaccuc

SEQ ID NO: 2507910 - RNA, 13 nt, Human
gguggcccugucc

SEQ ID NO: 2507911 - RNA, 20 nt, Human
gguggcccgacagccuggca

SEQ ID NO: 2507912 - RNA, 19 nt, Human
gguggcccgacagccuggc

SEQ ID NO: 2507913 - RNA, 18 nt, Human
gguggcccgacagccugg

SEQ ID NO: 2507914 - RNA, 17 nt, Human
gguggcccgacagccug

SEQ ID NO: 2507915 - RNA, 16 nt, Human
gguggcccgacagccu

SEQ ID NO: 2507916 - RNA, 22 nt, Human
gguggcccauccccccucacca

SEQ ID NO: 2507917 - RNA, 13 nt, Human
gguggcccauccc

SEQ ID NO: 2507918 - RNA, 19 nt, Human
gguggcccacgccuguaau

SEQ ID NO: 2507919 - RNA, 20 nt, Human
gguggccgcugaguggcagg

SEQ ID NO: 2507920 - RNA, 21 nt, Human
gguggccgcugaguggcaggg

SEQ ID NO: 2507921 - RNA, 19 nt, Human
gguggccuaagaguugagc

SEQ ID NO: 2507922 - RNA, 13 nt, Human
gguggccucccaa

SEQ ID NO: 2507923 - RNA, 17 nt, Human
gguggccucccaacuca

SEQ ID NO: 2507924 - RNA, 21 nt, Human
gguucaagcgauucuucugcu

SEQ ID NO: 2507925 - RNA, 18 nt, Human
gguucuuucuuccucugc

SEQ ID NO: 2507926 - RNA, 17 nt, Human
gguucuuuggaaggagu

SEQ ID NO: 2507927 - RNA, 15 nt, Human
gguucuuuggaagga

SEQ ID NO: 2507928 - RNA, 21 nt, Human
gguucagccccuccucugcca

SEQ ID NO: 2507929 - RNA, 22 nt, Human
gguucagccccuccucugccac

SEQ ID NO: 2507930 - RNA, 14 nt, Human
gguugaagcaccaa

SEQ ID NO: 2507931 - RNA, 17 nt, Human
gguucuuucuuccucug

SEQ ID NO: 2507932 - RNA, 12 nt, Human
gguucagcuugu

SEQ ID NO: 2507933 - RNA, 16 nt, Human
gguucagagacucagg

SEQ ID NO: 2507934 - RNA, 14 nt, Human
gguucagccccucc

SEQ ID NO: 2507935 - RNA, 16 nt, Human
gguucagccccuccuc

SEQ ID NO: 2507936 - RNA, 17 nt, Human
gguucagccccuccucu

SEQ ID NO: 2507937 - RNA, 18 nt, Human
gguucagccccuccucug

SEQ ID NO: 2507938 - RNA, 19 nt, Human
gguucagccccuccucugc

SEQ ID NO: 2507939 - RNA, 20 nt, Human
gguucagccccuccucugcc

SEQ ID NO: 2507940 - RNA, 23 nt, Human
gguucaagcgauucuucugcuuc

SEQ ID NO: 2507941 - RNA, 22 nt, Human
gguucaagcgauucuucugcuu

SEQ ID NO: 2507942 - RNA, 20 nt, Human
gguucacugcaaccuccgcc

SEQ ID NO: 2507943 - RNA, 19 nt, Human
gguucagaaaugcugccug

SEQ ID NO: 2507944 - RNA, 18 nt, Human
gguucagaaaugcugccu

SEQ ID NO: 2507945 - RNA, 22 nt, Human
gguucagaaaugcugccugccu

SEQ ID NO: 2507946 - RNA, 16 nt, Human
gguucagaaaugcugc

SEQ ID NO: 2507947 - RNA, 14 nt, Human
gguuguauucuuug

SEQ ID NO: 2507948 - RNA, 17 nt, Human
gguuggugcacagugau

SEQ ID NO: 2507949 - RNA, 19 nt, Human
gguuguauuagauguucuc

SEQ ID NO: 2507950 - RNA, 16 nt, Human
gguuggugcacaguga

SEQ ID NO: 2507951 - RNA, 14 nt, Human
gguuggugcacagu

SEQ ID NO: 2507952 - RNA, 18 nt, Human
gguuguauuagauguucu

SEQ ID NO: 2507953 - RNA, 13 nt, Human
gguuggugggggc

SEQ ID NO: 2507954 - RNA, 21 nt, Human
gguugugaggccuggccaggc

SEQ ID NO: 2507955 - RNA, 16 nt, Human
gguugugaggccuggc

SEQ ID NO: 2507956 - RNA, 14 nt, Human
gguugugaggccug

SEQ ID NO: 2507957 - RNA, 13 nt, Human
gguugugaggccu

SEQ ID NO: 2507958 - RNA, 21 nt, Human
gguugucuguuuuuguaacuu

SEQ ID NO: 2507959 - RNA, 20 nt, Human
gguuguauucuuugauguua

SEQ ID NO: 2507960 - RNA, 19 nt, Human
gguuguauucuuugauguu

SEQ ID NO: 2507961 - RNA, 16 nt, Human
gguuguauucuuugau

SEQ ID NO: 2507962 - RNA, 15 nt, Human
gguuguauucuuuga

SEQ ID NO: 2507963 - RNA, 10 nt, Human
gguugucaau

SEQ ID NO: 2507964 - RNA, 22 nt, Human
gguuguauucuuugauguuaac

SEQ ID NO: 2507965 - RNA, 13 nt, Human
gguugucaauauu

SEQ ID NO: 2507966 - RNA, 13 nt, Human
gguuuaacucaga

SEQ ID NO: 2507967 - RNA, 19 nt, Human
gguuuaaacuucucugaag

SEQ ID NO: 2507968 - RNA, 22 nt, Human
gguugugaggccuggccaggca

SEQ ID NO: 2507969 - RNA, 23 nt, Human
gguuuaacucagaucacuacugc

SEQ ID NO: 2507970 - RNA, 20 nt, Human
gguuuaacucagaucacuac

SEQ ID NO: 2507971 - RNA, 18 nt, Human
gguuuaacucagaucacu

SEQ ID NO: 2507972 - RNA, 17 nt, Human
gguuuaacucagaucac

SEQ ID NO: 2507973 - RNA, 14 nt, Human
gguuuaacucagau

SEQ ID NO: 2507974 - RNA, 13 nt, Human
gguuuaagcuguu

SEQ ID NO: 2507975 - RNA, 18 nt, Human
gguuggcaaaaaggcagg

SEQ ID NO: 2507976 - RNA, 19 nt, Human
gguugcuguuuuccucccu

SEQ ID NO: 2507977 - RNA, 20 nt, Human
gguugcuguuuuccucccuu

SEQ ID NO: 2507978 - RNA, 21 nt, Human
gguugcuguuuuccucccuuc

SEQ ID NO: 2507979 - RNA, 21 nt, Human
gguuggaagcuagcuccccuc

SEQ ID NO: 2507980 - RNA, 22 nt, Human
gguuggaagugagggucagaga

SEQ ID NO: 2507981 - RNA, 14 nt, Human
gguugggcuggugu

SEQ ID NO: 2507982 - RNA, 19 nt, Human
gguugguccucuugccucc

SEQ ID NO: 2507983 - RNA, 15 nt, Human
gguuggagagcuaga

SEQ ID NO: 2507984 - RNA, 23 nt, Human
gguugggauugggggcuggugcc

SEQ ID NO: 2507985 - RNA, 17 nt, Human
gguugggcccagaucug

SEQ ID NO: 2507986 - RNA, 19 nt, Human
gguugaagaggugagcacg

SEQ ID NO: 2507987 - RNA, 15 nt, Human
gguucuuuguuuuaa

SEQ ID NO: 2507988 - RNA, 11 nt, Human
gguugaauaaa

SEQ ID NO: 2507989 - RNA, 15 nt, Human
gguugaccccagagg

SEQ ID NO: 2507990 - RNA, 16 nt, Human
gguugaccccagagga

SEQ ID NO: 2507991 - RNA, 18 nt, Human
gguugcagugagccaaga

SEQ ID NO: 2507992 - RNA, 12 nt, Human
gguugccacagg

SEQ ID NO: 2507993 - RNA, 16 nt, Human
gguugcugguugcugu

SEQ ID NO: 2507994 - RNA, 18 nt, Human
gguugcugguugcugugu

SEQ ID NO: 2507995 - RNA, 17 nt, Human
gguugcugguugcugug

SEQ ID NO: 2507996 - RNA, 22 nt, Human
gguugcuguugaugaggccucu

SEQ ID NO: 2507997 - RNA, 18 nt, Human
gguugcuguuuuccuccc

SEQ ID NO: 2507998 - RNA, 18 nt, Human
gguugccacaggccuccc

SEQ ID NO: 2507999 - RNA, 14 nt, Human
gguugccacaggcc

SEQ ID NO: 2508000 - RNA, 13 nt, Human
gguugccacaggc

SEQ ID NO: 2508001 - RNA, 16 nt, Human
gguugcggggggaggg

SEQ ID NO: 2508002 - RNA, 20 nt, Human
gguugccacaggccucccug

SEQ ID NO: 2508003 - RNA, 14 nt, Human
guaaaaccacagca

SEQ ID NO: 2508004 - RNA, 15 nt, Human
guaaaaccacagcag

SEQ ID NO: 2508005 - RNA, 16 nt, Human
guaaaaccacagcagu

SEQ ID NO: 2508006 - RNA, 18 nt, Human
guaaaaccacagcaguug

SEQ ID NO: 2508007 - RNA, 23 nt, Human
guaaaaccacagcaguugaaaag

SEQ ID NO: 2508008 - RNA, 17 nt, Human
guaaaagauaacaagau

SEQ ID NO: 2508009 - RNA, 15 nt, Human
guaaaagacuuuuuu

SEQ ID NO: 2508010 - RNA, 21 nt, Human
guaaaacuacacaucccuaau

SEQ ID NO: 2508011 - RNA, 13 nt, Human
guaaaacugaggc

SEQ ID NO: 2508012 - RNA, 15 nt, Human
guaaaacugaggcac

SEQ ID NO: 2508013 - RNA, 18 nt, Human
guaaaagaacaguaaaca

SEQ ID NO: 2508014 - RNA, 19 nt, Human
guaaaaaaaaaugccuuug

SEQ ID NO: 2508015 - RNA, 13 nt, Human
guaaaaaaaaaug

SEQ ID NO: 2508016 - RNA, 18 nt, Human
guaaaaaaaaaaaaguua

SEQ ID NO: 2508017 - RNA, 18 nt, Human
guaaaaacaaagaaauua

SEQ ID NO: 2508018 - RNA, 20 nt, Human
guaaaaacaaagaaauuaug

SEQ ID NO: 2508019 - RNA, 23 nt, Human
guaaaaaaaaaugccuuugagac

SEQ ID NO: 2508020 - RNA, 20 nt, Human
guaaaaaaaaaugccuuuga

SEQ ID NO: 2508021 - RNA, 18 nt, Human
guaaaaacagcauugcuu

SEQ ID NO: 2508022 - RNA, 23 nt, Human
guaaaaacagcauugcuuucuga

SEQ ID NO: 2508023 - RNA, 19 nt, Human
guaaaaacagcauugcuuu

SEQ ID NO: 2508024 - RNA, 21 nt, Human
guaaaaacagcauugcuuucu

SEQ ID NO: 2508025 - RNA, 13 nt, Human
guaaaaauaaaau

SEQ ID NO: 2508026 - RNA, 14 nt, Human
guaaaaauuaaaaa

SEQ ID NO: 2508027 - RNA, 20 nt, Human
guaaaacaaaaauguaauga

SEQ ID NO: 2508028 - RNA, 14 nt, Human
guaaaaauaaaauu

SEQ ID NO: 2508029 - RNA, 12 nt, Human
guaaaaauacaa

SEQ ID NO: 2508030 - RNA, 20 nt, Human
gguuuuucaauuaaacggau

SEQ ID NO: 2508031 - RNA, 19 nt, Human
gguuuuucaauuaaacgga

SEQ ID NO: 2508032 - RNA, 18 nt, Human
gguuuuucaauuaaacgg

SEQ ID NO: 2508033 - RNA, 17 nt, Human
gguuuuucaauuaaacg

SEQ ID NO: 2508034 - RNA, 12 nt, Human
gguuuuucccug

SEQ ID NO: 2508035 - RNA, 23 nt, Human
gguuuuuguuuguuuccuuuguu

SEQ ID NO: 2508036 - RNA, 16 nt, Human
guaaaaaaaaaaaagu

SEQ ID NO: 2508037 - RNA, 21 nt, Human
gguuuuuuuguacuuuguaca

SEQ ID NO: 2508038 - RNA, 14 nt, Human
gguuuuuuaauaua

SEQ ID NO: 2508039 - RNA, 20 nt, Human
gguuuuuuguguacuuuuug

SEQ ID NO: 2508040 - RNA, 15 nt, Human
gguuuuguuugcuau

SEQ ID NO: 2508041 - RNA, 12 nt, Human
gguuuuguuugc

SEQ ID NO: 2508042 - RNA, 14 nt, Human
gguuuuuacuguua

SEQ ID NO: 2508043 - RNA, 15 nt, Human
gguuuuuauuaguac

SEQ ID NO: 2508044 - RNA, 16 nt, Human
gguuuuucaauuaaac

SEQ ID NO: 2508045 - RNA, 15 nt, Human
gguuuuucaauuaaa

SEQ ID NO: 2508046 - RNA, 14 nt, Human
gguuuuucaauuaa

SEQ ID NO: 2508047 - RNA, 13 nt, Human
gguuuuucaauua

SEQ ID NO: 2508048 - RNA, 12 nt, Human
gguuuuucaauu

SEQ ID NO: 2508049 - RNA, 17 nt, Human
gguuuuguauucucuga

SEQ ID NO: 2508050 - RNA, 18 nt, Human
gguuuuguauucucugag

SEQ ID NO: 2508051 - RNA, 19 nt, Human
gguuuuguauucucugagc

SEQ ID NO: 2508052 - RNA, 14 nt, Human
gguuuuguuccccu

SEQ ID NO: 2508053 - RNA, 16 nt, Human
gguuuuuaaaacccag

SEQ ID NO: 2508054 - RNA, 22 nt, Human
gguuuuguuccccuccuccacu

SEQ ID NO: 2508055 - RNA, 19 nt, Human
gguuuuguuccccuccucc

SEQ ID NO: 2508056 - RNA, 23 nt, Human
gguuuugccauguuggccaggcu

SEQ ID NO: 2508057 - RNA, 17 nt, Human
gguuuuguaagaugcug

SEQ ID NO: 2508058 - RNA, 19 nt, Human
gguuuugcuauuagacugu

SEQ ID NO: 2508059 - RNA, 21 nt, Human
gguuuuggcaaacgcuaaaga

SEQ ID NO: 2508060 - RNA, 20 nt, Human
gguuuuguaagaugcugggu

SEQ ID NO: 2508061 - RNA, 19 nt, Human
gguuuuguaagaugcuggg

SEQ ID NO: 2508062 - RNA, 11 nt, Human
gguuuuguaca

SEQ ID NO: 2508063 - RNA, 13 nt, Human
gguuuuguacaau

SEQ ID NO: 2508064 - RNA, 17 nt, Human
gguuuacaauuuacaaa

SEQ ID NO: 2508065 - RNA, 21 nt, Human
gguuuacaauuuacaaagugu

SEQ ID NO: 2508066 - RNA, 22 nt, Human
gguuuaauccccaguaaaauug

SEQ ID NO: 2508067 - RNA, 19 nt, Human
gguuuaauccccaguaaaa

SEQ ID NO: 2508068 - RNA, 22 nt, Human
gguuuacauucaucucauucca

SEQ ID NO: 2508069 - RNA, 19 nt, Human
gguuuacauucaucucauu

SEQ ID NO: 2508070 - RNA, 23 nt, Human
gguuuacucuguggccaaaggag

SEQ ID NO: 2508071 - RNA, 14 nt, Human
gguuuucuggaugg

SEQ ID NO: 2508072 - RNA, 15 nt, Human
gguuuucuggguguc

SEQ ID NO: 2508073 - RNA, 19 nt, Human
gguuuucgaagcucagccc

SEQ ID NO: 2508074 - RNA, 18 nt, Human
gguuuuccccucccuggg

SEQ ID NO: 2508075 - RNA, 13 nt, Human
gguuuuccccucc

SEQ ID NO: 2508076 - RNA, 12 nt, Human
gguuuucuguuc

SEQ ID NO: 2508077 - RNA, 13 nt, Human
gguuuucuguucu

SEQ ID NO: 2508078 - RNA, 15 nt, Human
gguuuucuguucuuu

SEQ ID NO: 2508079 - RNA, 13 nt, Human
gguuuugacugga

SEQ ID NO: 2508080 - RNA, 14 nt, Human
gguuuucuucccau

SEQ ID NO: 2508081 - RNA, 17 nt, Human
gguuuucuuaaccaucu

SEQ ID NO: 2508082 - RNA, 18 nt, Human
gguuuucuuaaccaucuu

SEQ ID NO: 2508083 - RNA, 13 nt, Human
guaaggaaugauu

SEQ ID NO: 2508084 - RNA, 23 nt, Human
guaaggaauaccugucccccuga

SEQ ID NO: 2508085 - RNA, 21 nt, Human
guaaggaauaccugucccccu

SEQ ID NO: 2508086 - RNA, 20 nt, Human
guaaggaauaccuguccccc

SEQ ID NO: 2508087 - RNA, 13 nt, Human
guaagcucuggcu

SEQ ID NO: 2508088 - RNA, 18 nt, Human
guaaggaauaccuguccc

SEQ ID NO: 2508089 - RNA, 19 nt, Human
guaagcuguuuauuuuaua

SEQ ID NO: 2508090 - RNA, 12 nt, Human
guaagcuguuua

SEQ ID NO: 2508091 - RNA, 17 nt, Human
guaagcucuggcuuucu

SEQ ID NO: 2508092 - RNA, 17 nt, Human
guaagcugcucuauugu

SEQ ID NO: 2508093 - RNA, 15 nt, Human
guaagggaaauagaa

SEQ ID NO: 2508094 - RNA, 20 nt, Human
guaaggcuguguacacugac

SEQ ID NO: 2508095 - RNA, 18 nt, Human
guaagggaaacugccagc

SEQ ID NO: 2508096 - RNA, 17 nt, Human
guaagggaaacugccag

SEQ ID NO: 2508097 - RNA, 23 nt, Human
guaaggcagggucccauuucuca

SEQ ID NO: 2508098 - RNA, 14 nt, Human
guaaggcaugaagg

SEQ ID NO: 2508099 - RNA, 16 nt, Human
guaaggugcaguuccc

SEQ ID NO: 2508100 - RNA, 13 nt, Human
guaaggugcaguu

SEQ ID NO: 2508101 - RNA, 14 nt, Human
guaaggugagggaa

SEQ ID NO: 2508102 - RNA, 12 nt, Human
guaaggugccuu

SEQ ID NO: 2508103 - RNA, 13 nt, Human
guaaguaauuauc

SEQ ID NO: 2508104 - RNA, 23 nt, Human
guaaguaauuaucgggaacagug

SEQ ID NO: 2508105 - RNA, 12 nt, Human
guaagucuuuuu

SEQ ID NO: 2508106 - RNA, 12 nt, Human
guaagugccuuc

SEQ ID NO: 2508107 - RNA, 18 nt, Human
guaaguaccacucaggcc

SEQ ID NO: 2508108 - RNA, 22 nt, Human
guaaguauucuuauuuaaugaa

SEQ ID NO: 2508109 - RNA, 20 nt, Human
guaacuucuuauggaauuga

SEQ ID NO: 2508110 - RNA, 21 nt, Human
guaacuucuuauggaauugau

SEQ ID NO: 2508111 - RNA, 18 nt, Human
guaacuucuuauggaauu

SEQ ID NO: 2508112 - RNA, 13 nt, Human
guaacuguucuug

SEQ ID NO: 2508113 - RNA, 23 nt, Human
guaaauuaacuuuuauaaacuuu

SEQ ID NO: 2508114 - RNA, 19 nt, Human
guaacuguuaaauugcugu

SEQ ID NO: 2508115 - RNA, 14 nt, Human
guaacugugucaug

SEQ ID NO: 2508116 - RNA, 22 nt, Human
guaacuguuaaauugcugugua

SEQ ID NO: 2508117 - RNA, 14 nt, Human
guaacuuuuguaag

SEQ ID NO: 2508118 - RNA, 15 nt, Human
guaacuuuuguaaga

SEQ ID NO: 2508119 - RNA, 17 nt, Human
guaacuuuuguaagaca

SEQ ID NO: 2508120 - RNA, 22 nt, Human
guaagaaaauauuuugucuaaa

SEQ ID NO: 2508121 - RNA, 14 nt, Human
guaagaaaauauuu

SEQ ID NO: 2508122 - RNA, 13 nt, Human
guaagaaaauauu

SEQ ID NO: 2508123 - RNA, 17 nt, Human
guaagaaaagugguugu

SEQ ID NO: 2508124 - RNA, 20 nt, Human
guaagaaagugaagcaaauc

SEQ ID NO: 2508125 - RNA, 23 nt, Human
guaagaaaauauuuugucuaaaa

SEQ ID NO: 2508126 - RNA, 20 nt, Human
guaagaaacacacugaggca

SEQ ID NO: 2508127 - RNA, 12 nt, Human
guaacuuuaugu

SEQ ID NO: 2508128 - RNA, 15 nt, Human
guaacuuuaugugua

SEQ ID NO: 2508129 - RNA, 14 nt, Human
guaacuuuaugugu

SEQ ID NO: 2508130 - RNA, 18 nt, Human
guaacuuggauguagcca

SEQ ID NO: 2508131 - RNA, 16 nt, Human
guaacuuuauguguaa

SEQ ID NO: 2508132 - RNA, 19 nt, Human
guaacuuuuguaaauacac

SEQ ID NO: 2508133 - RNA, 12 nt, Human
guaagaaauacu

SEQ ID NO: 2508134 - RNA, 13 nt, Human
guaagaaauacug

SEQ ID NO: 2508135 - RNA, 17 nt, Human
guaagaaccuugccuga

SEQ ID NO: 2508136 - RNA, 16 nt, Human
guaagaaccuugccug

SEQ ID NO: 2508137 - RNA, 15 nt, Human
guaagaaccuugccu

SEQ ID NO: 2508138 - RNA, 17 nt, Human
guaagaaauacuguaca

SEQ ID NO: 2508139 - RNA, 17 nt, Human
guaagagcaccuuccuc

SEQ ID NO: 2508140 - RNA, 15 nt, Human
guaagacaaagguuu

SEQ ID NO: 2508141 - RNA, 16 nt, Human
guaagacaauccaugu

SEQ ID NO: 2508142 - RNA, 15 nt, Human
guaagaagacaugaa

SEQ ID NO: 2508143 - RNA, 13 nt, Human
guaagaagagacu

SEQ ID NO: 2508144 - RNA, 11 nt, Human
guaagaagccg

SEQ ID NO: 2508145 - RNA, 15 nt, Human
guaagaagagacugg

SEQ ID NO: 2508146 - RNA, 16 nt, Human
guaagaugcuggguug

SEQ ID NO: 2508147 - RNA, 12 nt, Human
guaagaugcugg

SEQ ID NO: 2508148 - RNA, 20 nt, Human
guaagaugcuggguuggugc

SEQ ID NO: 2508149 - RNA, 11 nt, Human
guaagaugcug

SEQ ID NO: 2508150 - RNA, 21 nt, Human
guaagagcaccuuccucacuu

SEQ ID NO: 2508151 - RNA, 20 nt, Human
guaagagcaccuuccucacu

SEQ ID NO: 2508152 - RNA, 14 nt, Human
guaagagcuggugu

SEQ ID NO: 2508153 - RNA, 16 nt, Human
guaagagcuggugucu

SEQ ID NO: 2508154 - RNA, 17 nt, Human
guaagaguguagaagca

SEQ ID NO: 2508155 - RNA, 15 nt, Human
guaagaguguagaag

SEQ ID NO: 2508156 - RNA, 14 nt, Human
guaagaguguagaa

SEQ ID NO: 2508157 - RNA, 22 nt, Human
guaagaguguagaagcauuccu

SEQ ID NO: 2508158 - RNA, 18 nt, Human
guaagaguguagaagcau

SEQ ID NO: 2508159 - RNA, 19 nt, Human
guaagaucguucucugccu

SEQ ID NO: 2508160 - RNA, 14 nt, Human
guaaaucuuuuaca

SEQ ID NO: 2508161 - RNA, 18 nt, Human
guaaaugggggugcauuu

SEQ ID NO: 2508162 - RNA, 19 nt, Human
guaaaugggggugcauuug

SEQ ID NO: 2508163 - RNA, 20 nt, Human
guaaaugggggugcauuuga

SEQ ID NO: 2508164 - RNA, 15 nt, Human
guaaauccuuuuucu

SEQ ID NO: 2508165 - RNA, 16 nt, Human
guaaauccuuuuucuu

SEQ ID NO: 2508166 - RNA, 22 nt, Human
guaaauccuuuuucuuuauaaa

SEQ ID NO: 2508167 - RNA, 16 nt, Human
guaaauuaacuuuuau

SEQ ID NO: 2508168 - RNA, 17 nt, Human
guaaauuaacuuuuaua

SEQ ID NO: 2508169 - RNA, 21 nt, Human
guaaauuaacuuuuauaaacu

SEQ ID NO: 2508170 - RNA, 22 nt, Human
guaaauuaacuuuuauaaacuu

SEQ ID NO: 2508171 - RNA, 24 nt, Human
guaaaugcaucuguccucaugugu

SEQ ID NO: 2508172 - RNA, 17 nt, Human
guaaaugcagcgugaag

SEQ ID NO: 2508173 - RNA, 12 nt, Human
guaaaugaugug

SEQ ID NO: 2508174 - RNA, 20 nt, Human
guaaaugguguacauaaugu

SEQ ID NO: 2508175 - RNA, 16 nt, Human
guaaaugguguacaua

SEQ ID NO: 2508176 - RNA, 22 nt, Human
guaaauggcuuauccagcuggu

SEQ ID NO: 2508177 - RNA, 15 nt, Human
guaaauuaacuuuua

SEQ ID NO: 2508178 - RNA, 17 nt, Human
guaaauguuuagguuuu

SEQ ID NO: 2508179 - RNA, 20 nt, Human
guaaauauauaaauauauau

SEQ ID NO: 2508180 - RNA, 13 nt, Human
guaaauauucuau

SEQ ID NO: 2508181 - RNA, 19 nt, Human
guaaauauauaaauauaua

SEQ ID NO: 2508182 - RNA, 16 nt, Human
guaaauauauaaauau

SEQ ID NO: 2508183 - RNA, 20 nt, Human
guaaauaguuacuccagugc

SEQ ID NO: 2508184 - RNA, 12 nt, Human
guaaauauuuau

SEQ ID NO: 2508185 - RNA, 15 nt, Human
guaaauauucuauau

SEQ ID NO: 2508186 - RNA, 14 nt, Human
guaaauauucuaua

SEQ ID NO: 2508187 - RNA, 11 nt, Human
guaaauauuua

SEQ ID NO: 2508188 - RNA, 17 nt, Human
guaaauaguauuugaga

SEQ ID NO: 2508189 - RNA, 16 nt, Human
guaaauaguauuugag

SEQ ID NO: 2508190 - RNA, 15 nt, Human
guaaauaguauuuga

SEQ ID NO: 2508191 - RNA, 12 nt, Human
guaaauacacca

SEQ ID NO: 2508192 - RNA, 19 nt, Human
guaaauacacaacacacac

SEQ ID NO: 2508193 - RNA, 16 nt, Human
guaaauaaaggaacca

SEQ ID NO: 2508194 - RNA, 14 nt, Human
guaaauaaauuguu

SEQ ID NO: 2508195 - RNA, 18 nt, Human
guaaauaaauuguuugac

SEQ ID NO: 2508196 - RNA, 15 nt, Human
guaaauaaagcccug

SEQ ID NO: 2508197 - RNA, 14 nt, Human
guaaauaaagcccu

SEQ ID NO: 2508198 - RNA, 13 nt, Human
guaaauaaagccc

SEQ ID NO: 2508199 - RNA, 17 nt, Human
guaaagugauaauuucu

SEQ ID NO: 2508200 - RNA, 18 nt, Human
guaaagugauaauuucug

SEQ ID NO: 2508201 - RNA, 23 nt, Human
guaaagugauaauuucuggaauu

SEQ ID NO: 2508202 - RNA, 18 nt, Human
guaaaguuagucuacucu

SEQ ID NO: 2508203 - RNA, 14 nt, Human
guaaaguuagucua

SEQ ID NO: 2508204 - RNA, 13 nt, Human
guaaauaaaaaga

SEQ ID NO: 2508205 - RNA, 22 nt, Human
guaaaguguggucccaacagga

SEQ ID NO: 2508206 - RNA, 21 nt, Human
guaaaguguggucccaacagg

SEQ ID NO: 2508207 - RNA, 11 nt, Human
guaaagugugg

SEQ ID NO: 2508208 - RNA, 17 nt, Human
guaaaagguauuaaauu

SEQ ID NO: 2508209 - RNA, 20 nt, Human
guaaaaggccaaaccucugu

SEQ ID NO: 2508210 - RNA, 16 nt, Human
guaaaauaaaaggucg

SEQ ID NO: 2508211 - RNA, 15 nt, Human
guaaaagugugagca

SEQ ID NO: 2508212 - RNA, 22 nt, Human
guaaaaggccaaaccucuguuc

SEQ ID NO: 2508213 - RNA, 14 nt, Human
guaaaauaaaauua

SEQ ID NO: 2508214 - RNA, 20 nt, Human
ggugaguuugagcugccuuc

SEQ ID NO: 2508215 - RNA, 23 nt, Human
ggugagucuuggcggcagcagcc

SEQ ID NO: 2508216 - RNA, 19 nt, Human
ggugaguuugagcugccuu

SEQ ID NO: 2508217 - RNA, 20 nt, Human
ggugagucuuggcggcagca

SEQ ID NO: 2508218 - RNA, 17 nt, Human
ggugagucuuggcggca

SEQ ID NO: 2508219 - RNA, 18 nt, Human
ggugaguccauucuccca

SEQ ID NO: 2508220 - RNA, 13 nt, Human
ggugagggaugug

SEQ ID NO: 2508221 - RNA, 12 nt, Human
ggugagggaugu

SEQ ID NO: 2508222 - RNA, 15 nt, Human
ggugaggccuugcuc

SEQ ID NO: 2508223 - RNA, 17 nt, Human
ggugaggggcuggcacu

SEQ ID NO: 2508224 - RNA, 20 nt, Human
ggugaggcagugggucccac

SEQ ID NO: 2508225 - RNA, 14 nt, Human
ggugaggcaggcuu

SEQ ID NO: 2508226 - RNA, 15 nt, Human
ggugaggcaauaaaa

SEQ ID NO: 2508227 - RNA, 16 nt, Human
ggugaccucugccuga

SEQ ID NO: 2508228 - RNA, 21 nt, Human
ggugaccccuuuucagcuucu

SEQ ID NO: 2508229 - RNA, 14 nt, Human
ggugaccucugccu

SEQ ID NO: 2508230 - RNA, 13 nt, Human
ggugacaccagcc

SEQ ID NO: 2508231 - RNA, 15 nt, Human
ggucucccucuccug

SEQ ID NO: 2508232 - RNA, 17 nt, Human
ggugacaagauagagag

SEQ ID NO: 2508233 - RNA, 18 nt, Human
ggugacaagauagagagc

SEQ ID NO: 2508234 - RNA, 16 nt, Human
ggugacaccagccuuu

SEQ ID NO: 2508235 - RNA, 13 nt, Human
ggugccccaggac

SEQ ID NO: 2508236 - RNA, 14 nt, Human
ggugccccaggacc

SEQ ID NO: 2508237 - RNA, 15 nt, Human
ggugccccaggacca

SEQ ID NO: 2508238 - RNA, 16 nt, Human
ggugccccaggaccag

SEQ ID NO: 2508239 - RNA, 17 nt, Human
ggugccccaggaccagc

SEQ ID NO: 2508240 - RNA, 20 nt, Human
ggugccccaggaccagcuca

SEQ ID NO: 2508241 - RNA, 21 nt, Human
ggugccccaggaccagcucag

SEQ ID NO: 2508242 - RNA, 22 nt, Human
ggugccccaggaccagcucagg

SEQ ID NO: 2508243 - RNA, 22 nt, Human
ggugcccagcuauaccugugcc

SEQ ID NO: 2508244 - RNA, 15 nt, Human
ggugauauccauucu

SEQ ID NO: 2508245 - RNA, 22 nt, Human
ggugauagguauaaguggugug

SEQ ID NO: 2508246 - RNA, 21 nt, Human
ggugaguuugagcugccuucc

SEQ ID NO: 2508247 - RNA, 23 nt, Human
ggugcccccuccucucccauccc

SEQ ID NO: 2508248 - RNA, 22 nt, Human
ggugcccccuccucucccaucc

SEQ ID NO: 2508249 - RNA, 20 nt, Human
ggugcccccuccucucccau

SEQ ID NO: 2508250 - RNA, 19 nt, Human
ggugcccccuccucuccca

SEQ ID NO: 2508251 - RNA, 17 nt, Human
ggugcccccuccucucc

SEQ ID NO: 2508252 - RNA, 12 nt, Human
ggugcccccucc

SEQ ID NO: 2508253 - RNA, 23 nt, Human
ggugccccaggaccagcucagga

SEQ ID NO: 2508254 - RNA, 22 nt, Human
ggugccccccuugccagacaug

SEQ ID NO: 2508255 - RNA, 19 nt, Human
ggugcccuguucucuacca

SEQ ID NO: 2508256 - RNA, 21 nt, Human
ggugccuaggauugugccugu

SEQ ID NO: 2508257 - RNA, 14 nt, Human
ggugccgccugccc

SEQ ID NO: 2508258 - RNA, 17 nt, Human
ggugcccuuggaggcca

SEQ ID NO: 2508259 - RNA, 18 nt, Human
ggugcccuuggaggccag

SEQ ID NO: 2508260 - RNA, 22 nt, Human
ggugcccuuggaggccagccag

SEQ ID NO: 2508261 - RNA, 13 nt, Human
gguggcagcugcg

SEQ ID NO: 2508262 - RNA, 12 nt, Human
gguggcagcugc

SEQ ID NO: 2508263 - RNA, 13 nt, Human
gguggcagcucac

SEQ ID NO: 2508264 - RNA, 11 nt, Human
gguggcagcug

SEQ ID NO: 2508265 - RNA, 23 nt, Human
gguggcagcugcgguccacccag

SEQ ID NO: 2508266 - RNA, 15 nt, Human
gguggcagcugcggu

SEQ ID NO: 2508267 - RNA, 18 nt, Human
gguggccauuuagccacc

SEQ ID NO: 2508268 - RNA, 17 nt, Human
gguggcaggaccaggac

SEQ ID NO: 2508269 - RNA, 15 nt, Human
gguggcaggaccagg

SEQ ID NO: 2508270 - RNA, 18 nt, Human
gguggcaggaccaggacu

SEQ ID NO: 2508271 - RNA, 16 nt, Human
ggugcucucugccacu

SEQ ID NO: 2508272 - RNA, 14 nt, Human
ggugcucucugcca

SEQ ID NO: 2508273 - RNA, 14 nt, Human
gguggcaggaccag

SEQ ID NO: 2508274 - RNA, 15 nt, Human
ggugcuccaggcagg

SEQ ID NO: 2508275 - RNA, 16 nt, Human
ggugcucagggcugac

SEQ ID NO: 2508276 - RNA, 18 nt, Human
ggugccugagaggcaggc

SEQ ID NO: 2508277 - RNA, 17 nt, Human
ggugccugagaggcagg

SEQ ID NO: 2508278 - RNA, 15 nt, Human
ggugccugagaggca

SEQ ID NO: 2508279 - RNA, 17 nt, Human
ggugccuccaggugugc

SEQ ID NO: 2508280 - RNA, 16 nt, Human
ggugccuccaggugug

SEQ ID NO: 2508281 - RNA, 14 nt, Human
ggugccuccaggug

SEQ ID NO: 2508282 - RNA, 13 nt, Human
ggugccuccaggu

SEQ ID NO: 2508283 - RNA, 15 nt, Human
ggugcgaucuggguu

SEQ ID NO: 2508284 - RNA, 19 nt, Human
ggugcuacaaaaacacagc

SEQ ID NO: 2508285 - RNA, 12 nt, Human
ggugcggcugug

SEQ ID NO: 2508286 - RNA, 22 nt, Human
ggugcggcugugcagccugucc

SEQ ID NO: 2508287 - RNA, 20 nt, Human
ggugcuaaauggucgcccag

SEQ ID NO: 2508288 - RNA, 23 nt, Human
ggugcuaucucccccagccccau

SEQ ID NO: 2508289 - RNA, 21 nt, Human
ggugcuaucucccccagcccc

SEQ ID NO: 2508290 - RNA, 19 nt, Human
ggugcucacaccccauugg

SEQ ID NO: 2508291 - RNA, 15 nt, Human
ggugcucagggcuga

SEQ ID NO: 2508292 - RNA, 22 nt, Human
ggugcuaucucccccagcccca

SEQ ID NO: 2508293 - RNA, 21 nt, Human
ggugcuacaaaaacacagcaa

SEQ ID NO: 2508294 - RNA, 23 nt, Human
ggugcuaaauggucgcccaggag

SEQ ID NO: 2508295 - RNA, 21 nt, Human
ggugcuaaauggucgcccagg

SEQ ID NO: 2508296 - RNA, 22 nt, Human
ggugcuaaauggucgcccagga

SEQ ID NO: 2508297 - RNA, 17 nt, Human
ggucccuaauaaagcug

SEQ ID NO: 2508298 - RNA, 16 nt, Human
ggucccuaauaaagcu

SEQ ID NO: 2508299 - RNA, 13 nt, Human
ggucccuaauaaa

SEQ ID NO: 2508300 - RNA, 12 nt, Human
ggucccuaauaa

SEQ ID NO: 2508301 - RNA, 18 nt, Human
ggucccugcuguguuccc

SEQ ID NO: 2508302 - RNA, 22 nt, Human
ggucccugauaacaaccuggag

SEQ ID NO: 2508303 - RNA, 23 nt, Human
ggucccugauaacaaccuggaga

SEQ ID NO: 2508304 - RNA, 20 nt, Human
ggucccugauaacaaccugg

SEQ ID NO: 2508305 - RNA, 14 nt, Human
ggucccucugugua

SEQ ID NO: 2508306 - RNA, 14 nt, Human
ggucccugguggca

SEQ ID NO: 2508307 - RNA, 18 nt, Human
ggucccuaauaaagcugu

SEQ ID NO: 2508308 - RNA, 21 nt, Human
ggucccgugcagcuucugucc

SEQ ID NO: 2508309 - RNA, 22 nt, Human
ggucucacuauguugcccaggc

SEQ ID NO: 2508310 - RNA, 23 nt, Human
gguccuagaaauuccccacccug

SEQ ID NO: 2508311 - RNA, 13 nt, Human
gguccgugggacg

SEQ ID NO: 2508312 - RNA, 17 nt, Human
gguccuacccauccccg

SEQ ID NO: 2508313 - RNA, 20 nt, Human
gguccuacccauccccgcag

SEQ ID NO: 2508314 - RNA, 22 nt, Human
gguccuaccaauagauucccca

SEQ ID NO: 2508315 - RNA, 21 nt, Human
gguccggacacuccuagagaa

SEQ ID NO: 2508316 - RNA, 20 nt, Human
gguccggacacuccuagaga

SEQ ID NO: 2508317 - RNA, 18 nt, Human
gguccggacacuccuaga

SEQ ID NO: 2508318 - RNA, 17 nt, Human
gguccggacacuccuag

SEQ ID NO: 2508319 - RNA, 23 nt, Human
ggucccuugcagcuaguuuucua

SEQ ID NO: 2508320 - RNA, 17 nt, Human
gguccgguguccuuuuc

SEQ ID NO: 2508321 - RNA, 22 nt, Human
ggucccugguggcagcucaccu

SEQ ID NO: 2508322 - RNA, 13 nt, Human
ggucccugggagg

SEQ ID NO: 2508323 - RNA, 23 nt, Human
ggucccugggaggaaauuugaau

SEQ ID NO: 2508324 - RNA, 21 nt, Human
ggucccuucuuacucacacac

SEQ ID NO: 2508325 - RNA, 19 nt, Human
ggucccuugagaccucagc

SEQ ID NO: 2508326 - RNA, 20 nt, Human
ggucccuugagaccucagcc

SEQ ID NO: 2508327 - RNA, 21 nt, Human
ggucccuugagaccucagcca

SEQ ID NO: 2508328 - RNA, 19 nt, Human
ggucucgaacuccugaccu

SEQ ID NO: 2508329 - RNA, 14 nt, Human
ggucuccuccaccg

SEQ ID NO: 2508330 - RNA, 20 nt, Human
ggucucgaacuccugaccuu

SEQ ID NO: 2508331 - RNA, 22 nt, Human
ggucuccuccaccgccauggcu

SEQ ID NO: 2508332 - RNA, 19 nt, Human
ggucucgcugaugcugggc

SEQ ID NO: 2508333 - RNA, 16 nt, Human
ggucuccuuggaaauc

SEQ ID NO: 2508334 - RNA, 16 nt, Human
ggucugacccacugcu

SEQ ID NO: 2508335 - RNA, 15 nt, Human
ggucugacccacugc

SEQ ID NO: 2508336 - RNA, 16 nt, Human
ggucucacucugucgc

SEQ ID NO: 2508337 - RNA, 12 nt, Human
ggucucacucug

SEQ ID NO: 2508338 - RNA, 19 nt, Human
ggucuccucacucccuucu

SEQ ID NO: 2508339 - RNA, 19 nt, Human
ggucucccucuccugccua

SEQ ID NO: 2508340 - RNA, 17 nt, Human
ggucucccucuccugcc

SEQ ID NO: 2508341 - RNA, 18 nt, Human
ggucucccucuccugccu

SEQ ID NO: 2508342 - RNA, 21 nt, Human
ggucucacuauguugcccagg

SEQ ID NO: 2508343 - RNA, 22 nt, Human
ggucucccucuccugccuacuc

SEQ ID NO: 2508344 - RNA, 16 nt, Human
ggugaacuugguuccc

SEQ ID NO: 2508345 - RNA, 16 nt, Human
ggugaagaaaacuccu

SEQ ID NO: 2508346 - RNA, 23 nt, Human
ggugaaccaugucagcaaaaagc

SEQ ID NO: 2508347 - RNA, 22 nt, Human
ggucugaggggcaacugagucu

SEQ ID NO: 2508348 - RNA, 19 nt, Human
ggugaagaugggaacgcag

SEQ ID NO: 2508349 - RNA, 20 nt, Human
ggugaagagaaccgagcaaa

SEQ ID NO: 2508350 - RNA, 17 nt, Human
ggugaagcuauuuaucu

SEQ ID NO: 2508351 - RNA, 19 nt, Human
ggucugaggaauccagacc

SEQ ID NO: 2508352 - RNA, 21 nt, Human
ggucucgcugaugcugggcug

SEQ ID NO: 2508353 - RNA, 20 nt, Human
ggucucgcugaugcugggcu

SEQ ID NO: 2508354 - RNA, 18 nt, Human
ggugaagugaagacaaug

SEQ ID NO: 2508355 - RNA, 21 nt, Human
ggugaagcucacuucugggcu

SEQ ID NO: 2508356 - RNA, 14 nt, Human
ggugaaggaauaua

SEQ ID NO: 2508357 - RNA, 18 nt, Human
ggugaagcuauuuaucug

SEQ ID NO: 2508358 - RNA, 16 nt, Human
ggugaagggagagcca

SEQ ID NO: 2508359 - RNA, 18 nt, Human
ggugaagggagagccagc

SEQ ID NO: 2508360 - RNA, 14 nt, Human
ggguucuuucuucc

SEQ ID NO: 2508361 - RNA, 20 nt, Human
ggguuggcgcacccuccccu

SEQ ID NO: 2508362 - RNA, 22 nt, Human
ggguuggcgcacccuccccucc

SEQ ID NO: 2508363 - RNA, 20 nt, Human
ggguuggcugggcccagaag

SEQ ID NO: 2508364 - RNA, 19 nt, Human
ggguuggccccugcccggc

SEQ ID NO: 2508365 - RNA, 16 nt, Human
ggguuggccccugccc

SEQ ID NO: 2508366 - RNA, 21 nt, Human
ggguucugccugccagcugca

SEQ ID NO: 2508367 - RNA, 20 nt, Human
ggguucugccugccagcugc

SEQ ID NO: 2508368 - RNA, 16 nt, Human
ggguucuccucucccc

SEQ ID NO: 2508369 - RNA, 18 nt, Human
ggguucuccucuccccuc

SEQ ID NO: 2508370 - RNA, 23 nt, Human
ggguucccuuuuuuggcugcuga

SEQ ID NO: 2508371 - RNA, 14 nt, Human
ggguucccccagcc

SEQ ID NO: 2508372 - RNA, 18 nt, Human
ggguucccuuuccuucca

SEQ ID NO: 2508373 - RNA, 21 nt, Human
ggguucccuuuccuuccaucc

SEQ ID NO: 2508374 - RNA, 22 nt, Human
ggguucuacccaggugcuagga

SEQ ID NO: 2508375 - RNA, 17 nt, Human
ggguucuacccaggugc

SEQ ID NO: 2508376 - RNA, 15 nt, Human
ggguucucacagugg

SEQ ID NO: 2508377 - RNA, 22 nt, Human
gggugcuuuuauagaggcuagc

SEQ ID NO: 2508378 - RNA, 21 nt, Human
gggugcuuuuauagaggcuag

SEQ ID NO: 2508379 - RNA, 20 nt, Human
gggugcuuuuauagaggcua

SEQ ID NO: 2508380 - RNA, 13 nt, Human
ggguggagaagcc

SEQ ID NO: 2508381 - RNA, 12 nt, Human
ggguggagaagc

SEQ ID NO: 2508382 - RNA, 20 nt, Human
ggguggagaacuccuagggu

SEQ ID NO: 2508383 - RNA, 22 nt, Human
ggguggagacugcuucccaucc

SEQ ID NO: 2508384 - RNA, 16 nt, Human
ggguggagaagccauu

SEQ ID NO: 2508385 - RNA, 15 nt, Human
ggguggagaagccau

SEQ ID NO: 2508386 - RNA, 14 nt, Human
ggguggagaagcca

SEQ ID NO: 2508387 - RNA, 14 nt, Human
ggguggaggggugu

SEQ ID NO: 2508388 - RNA, 23 nt, Human
ggguggagacugcuucccauccu

SEQ ID NO: 2508389 - RNA, 16 nt, Human
ggguggaggcuuccug

SEQ ID NO: 2508390 - RNA, 21 nt, Human
ggguggauauaaauauauaua

SEQ ID NO: 2508391 - RNA, 14 nt, Human
ggguggauauaaau

SEQ ID NO: 2508392 - RNA, 13 nt, Human
ggguucauuugug

SEQ ID NO: 2508393 - RNA, 22 nt, Human
ggguuccagcaauucuccugcc

SEQ ID NO: 2508394 - RNA, 19 nt, Human
ggguuccagcaccacacuc

SEQ ID NO: 2508395 - RNA, 14 nt, Human
ggguucauuugugu

SEQ ID NO: 2508396 - RNA, 15 nt, Human
ggguucccccagccc

SEQ ID NO: 2508397 - RNA, 14 nt, Human
ggguagcagcugga

SEQ ID NO: 2508398 - RNA, 13 nt, Human
ggguagcagcugg

SEQ ID NO: 2508399 - RNA, 14 nt, Human
ggguagagcugauc

SEQ ID NO: 2508400 - RNA, 17 nt, Human
ggguagcagcuggacua

SEQ ID NO: 2508401 - RNA, 15 nt, Human
ggguagcagcuggac

SEQ ID NO: 2508402 - RNA, 22 nt, Human
ggguagcagcuggacuacccac

SEQ ID NO: 2508403 - RNA, 22 nt, Human
ggguagcagguaccacugauuu

SEQ ID NO: 2508404 - RNA, 21 nt, Human
ggguagcccgccugccagucc

SEQ ID NO: 2508405 - RNA, 18 nt, Human
ggguagcccgccugccag

SEQ ID NO: 2508406 - RNA, 14 nt, Human
ggguagcccgccug

SEQ ID NO: 2508407 - RNA, 12 nt, Human
ggguagcccgcc

SEQ ID NO: 2508408 - RNA, 19 nt, Human
gggugcugggccccugccu

SEQ ID NO: 2508409 - RNA, 18 nt, Human
gggugcugggccccugcc

SEQ ID NO: 2508410 - RNA, 15 nt, Human
ggguagcuagaggaa

SEQ ID NO: 2508411 - RNA, 22 nt, Human
ggguagcccgccugccaguccu

SEQ ID NO: 2508412 - RNA, 16 nt, Human
ggguagcuagaggaac

SEQ ID NO: 2508413 - RNA, 14 nt, Human
gguacucuccuaga

SEQ ID NO: 2508414 - RNA, 12 nt, Human
gguacucuccua

SEQ ID NO: 2508415 - RNA, 19 nt, Human
gguacuauucugauuacac

SEQ ID NO: 2508416 - RNA, 16 nt, Human
gguacucuccuagaga

SEQ ID NO: 2508417 - RNA, 18 nt, Human
gguaccuugaacacuggg

SEQ ID NO: 2508418 - RNA, 13 nt, Human
gguacccucugga

SEQ ID NO: 2508419 - RNA, 14 nt, Human
gguacccuccuggc

SEQ ID NO: 2508420 - RNA, 14 nt, Human
gguaccuauuuuca

SEQ ID NO: 2508421 - RNA, 12 nt, Human
gguaccuugaac

SEQ ID NO: 2508422 - RNA, 22 nt, Human
gguacuucaaauccuugaagau

SEQ ID NO: 2508423 - RNA, 21 nt, Human
gguacuuguggacacagcucu

SEQ ID NO: 2508424 - RNA, 22 nt, Human
gguacuuuuaugauguauauuu

SEQ ID NO: 2508425 - RNA, 21 nt, Human
gguacuuuuaugauguauauu

SEQ ID NO: 2508426 - RNA, 20 nt, Human
gguacuucaggggcacuuca

SEQ ID NO: 2508427 - RNA, 20 nt, Human
gguacuuguggacacagcuc

SEQ ID NO: 2508428 - RNA, 22 nt, Human
gguacuuguggacacagcucuu

SEQ ID NO: 2508429 - RNA, 19 nt, Human
ggguuggugcacagugauu

SEQ ID NO: 2508430 - RNA, 21 nt, Human
ggguuggguucaucugagcaa

SEQ ID NO: 2508431 - RNA, 21 nt, Human
ggguugugaggccuggccagg

SEQ ID NO: 2508432 - RNA, 18 nt, Human
ggguugguccucuugccu

SEQ ID NO: 2508433 - RNA, 14 nt, Human
ggguugugaggccu

SEQ ID NO: 2508434 - RNA, 15 nt, Human
ggguugugugucugu

SEQ ID NO: 2508435 - RNA, 19 nt, Human
ggguuuaauccccaguaaa

SEQ ID NO: 2508436 - RNA, 23 nt, Human
ggguuuaauccccaguaaaauug

SEQ ID NO: 2508437 - RNA, 22 nt, Human
ggguuuaauccccaguaaaauu

SEQ ID NO: 2508438 - RNA, 12 nt, Human
ggguugggccca

SEQ ID NO: 2508439 - RNA, 14 nt, Human
ggguugggcccaga

SEQ ID NO: 2508440 - RNA, 22 nt, Human
ggguugggcccagaucuggucc

SEQ ID NO: 2508441 - RNA, 15 nt, Human
ggguugggcuggugu

SEQ ID NO: 2508442 - RNA, 16 nt, Human
gguacccccuucuggg

SEQ ID NO: 2508443 - RNA, 21 nt, Human
gguacccagccaucugcccag

SEQ ID NO: 2508444 - RNA, 20 nt, Human
gguacccagccaucugccca

SEQ ID NO: 2508445 - RNA, 12 nt, Human
gguacccagcca

SEQ ID NO: 2508446 - RNA, 19 nt, Human
gguaccccuuucuggcucu

SEQ ID NO: 2508447 - RNA, 17 nt, Human
gguacccacugcucugg

SEQ ID NO: 2508448 - RNA, 16 nt, Human
gguacccacugcucug

SEQ ID NO: 2508449 - RNA, 23 nt, Human
ggguugugaggccuggccaggca

SEQ ID NO: 2508450 - RNA, 20 nt, Human
ggguuucacuguguuagcca

SEQ ID NO: 2508451 - RNA, 20 nt, Human
ggguuucaccauguuggcca

SEQ ID NO: 2508452 - RNA, 23 nt, Human
ggucccccuuccauggacuuugu

SEQ ID NO: 2508453 - RNA, 18 nt, Human
ggucccccuuccauggac

SEQ ID NO: 2508454 - RNA, 13 nt, Human
ggucccccuucca

SEQ ID NO: 2508455 - RNA, 21 nt, Human
gguccccaucaucccagcugc

SEQ ID NO: 2508456 - RNA, 18 nt, Human
gguccccaucaucccagc

SEQ ID NO: 2508457 - RNA, 16 nt, Human
gguccccaucauccca

SEQ ID NO: 2508458 - RNA, 22 nt, Human
ggucccagugggaggggcaggc

SEQ ID NO: 2508459 - RNA, 21 nt, Human
ggucccagugggaggggcagg

SEQ ID NO: 2508460 - RNA, 20 nt, Human
ggucccagugggaggggcag

SEQ ID NO: 2508461 - RNA, 19 nt, Human
ggucccagugggaggggca

SEQ ID NO: 2508462 - RNA, 13 nt, Human
ggucccauccagg

SEQ ID NO: 2508463 - RNA, 12 nt, Human
ggucccauccag

SEQ ID NO: 2508464 - RNA, 23 nt, Human
ggucccagugggaggggcaggcu

SEQ ID NO: 2508465 - RNA, 11 nt, Human
ggucccaucca

SEQ ID NO: 2508466 - RNA, 20 nt, Human
ggucccaucugcagggcccc

SEQ ID NO: 2508467 - RNA, 16 nt, Human
ggucccauccaggcag

SEQ ID NO: 2508468 - RNA, 14 nt, Human
ggucccauccaggc

SEQ ID NO: 2508469 - RNA, 17 nt, Human
ggucccauuucucacug

SEQ ID NO: 2508470 - RNA, 17 nt, Human
ggucccauccaggcagu

SEQ ID NO: 2508471 - RNA, 16 nt, Human
gguccccaccugggac

SEQ ID NO: 2508472 - RNA, 18 nt, Human
ggucccagugggaggggc

SEQ ID NO: 2508473 - RNA, 15 nt, Human
ggucccagugggagg

SEQ ID NO: 2508474 - RNA, 11 nt, Human
ggucccagugg

SEQ ID NO: 2508475 - RNA, 14 nt, Human
ggucccaggcagag

SEQ ID NO: 2508476 - RNA, 15 nt, Human
ggucccagccacccc

SEQ ID NO: 2508477 - RNA, 14 nt, Human
ggucccacucaguc

SEQ ID NO: 2508478 - RNA, 12 nt, Human
ggucccacucag

SEQ ID NO: 2508479 - RNA, 13 nt, Human
ggucccacuuccc

SEQ ID NO: 2508480 - RNA, 12 nt, Human
ggucccacuucc

SEQ ID NO: 2508481 - RNA, 22 nt, Human
ggucccacgaauuugcugggga

SEQ ID NO: 2508482 - RNA, 17 nt, Human
ggucccacuuccccucc

SEQ ID NO: 2508483 - RNA, 14 nt, Human
ggucccagccaccc

SEQ ID NO: 2508484 - RNA, 22 nt, Human
ggucccacucaguccauagcag

SEQ ID NO: 2508485 - RNA, 16 nt, Human
ggucagcguugcaugu

SEQ ID NO: 2508486 - RNA, 23 nt, Human
ggucagcccaaaccaccagaagc

SEQ ID NO: 2508487 - RNA, 22 nt, Human
ggucccaccccacacacgccag

SEQ ID NO: 2508488 - RNA, 22 nt, Human
ggucacucuuccugcaaggacu

SEQ ID NO: 2508489 - RNA, 21 nt, Human
ggucacucuuccugcaaggac

SEQ ID NO: 2508490 - RNA, 15 nt, Human
ggucagccagggcca

SEQ ID NO: 2508491 - RNA, 12 nt, Human
ggucagccaggg

SEQ ID NO: 2508492 - RNA, 18 nt, Human
ggucagccagggccaggg

SEQ ID NO: 2508493 - RNA, 21 nt, Human
ggucagcaugucuauucagcu

SEQ ID NO: 2508494 - RNA, 13 nt, Human
ggucagccagggc

SEQ ID NO: 2508495 - RNA, 16 nt, Human
ggucagagccugcagu

SEQ ID NO: 2508496 - RNA, 15 nt, Human
ggucagagccugcag

SEQ ID NO: 2508497 - RNA, 14 nt, Human
ggucagagccugca

SEQ ID NO: 2508498 - RNA, 13 nt, Human
ggucagagccugc

SEQ ID NO: 2508499 - RNA, 20 nt, Human
ggucacucuggcagcucaga

SEQ ID NO: 2508500 - RNA, 16 nt, Human
ggucacucuggcagcu

SEQ ID NO: 2508501 - RNA, 22 nt, Human
ggucacucuggcagcucagaga

SEQ ID NO: 2508502 - RNA, 12 nt, Human
ggucagagccug

SEQ ID NO: 2508503 - RNA, 12 nt, Human
ggucacucuggc

SEQ ID NO: 2508504 - RNA, 17 nt, Human
ggucacagccuccucug

SEQ ID NO: 2508505 - RNA, 16 nt, Human
ggucacagccuccucu

SEQ ID NO: 2508506 - RNA, 15 nt, Human
ggucacagcggaggu

SEQ ID NO: 2508507 - RNA, 15 nt, Human
ggucacagccuccuc

SEQ ID NO: 2508508 - RNA, 13 nt, Human
ggucacagccucc

SEQ ID NO: 2508509 - RNA, 14 nt, Human
ggucacacacugau

SEQ ID NO: 2508510 - RNA, 20 nt, Human
ggucaaguaagaagacauga

SEQ ID NO: 2508511 - RNA, 22 nt, Human
ggucacaaauccuaaaagaagc

SEQ ID NO: 2508512 - RNA, 17 nt, Human
ggucaauccugugggug

SEQ ID NO: 2508513 - RNA, 20 nt, Human
ggucaauacaguacaggcag

SEQ ID NO: 2508514 - RNA, 17 nt, Human
gguagagauggaggagg

SEQ ID NO: 2508515 - RNA, 20 nt, Human
ggucaagauuuugaaugcuu

SEQ ID NO: 2508516 - RNA, 13 nt, Human
ggucaagcccagg

SEQ ID NO: 2508517 - RNA, 15 nt, Human
ggucaagcccaggag

SEQ ID NO: 2508518 - RNA, 19 nt, Human
ggucaagcccaggaggacu

SEQ ID NO: 2508519 - RNA, 17 nt, Human
ggucaagcccaggagga

SEQ ID NO: 2508520 - RNA, 15 nt, Human
gguagacacacauga

SEQ ID NO: 2508521 - RNA, 23 nt, Human
gguacuuuuaugauguauauuua

SEQ ID NO: 2508522 - RNA, 22 nt, Human
gguagacacacaugaaguccaa

SEQ ID NO: 2508523 - RNA, 23 nt, Human
ggguagagcggagaaaggaaggg

SEQ ID NO: 2508524 - RNA, 23 nt, Human
ggguacuuguggacacagcucuu

SEQ ID NO: 2508525 - RNA, 22 nt, Human
ggguacuuguggacacagcucu

SEQ ID NO: 2508526 - RNA, 19 nt, Human
ggguacuuguggacacagc

SEQ ID NO: 2508527 - RNA, 15 nt, Human
ggguacccacugcuc

SEQ ID NO: 2508528 - RNA, 13 nt, Human
ggguacccacugc

SEQ ID NO: 2508529 - RNA, 20 nt, Human
gggguugccacaggccuccc

SEQ ID NO: 2508530 - RNA, 19 nt, Human
ggguacauuucccugugcu

SEQ ID NO: 2508531 - RNA, 23 nt, Human
ggguaccuugaacacugggggag

SEQ ID NO: 2508532 - RNA, 18 nt, Human
ggguacccacugcucugg

SEQ ID NO: 2508533 - RNA, 21 nt, Human
gggguucgagaccagucuggc

SEQ ID NO: 2508534 - RNA, 23 nt, Human
gggguucagccccuccucugcca

SEQ ID NO: 2508535 - RNA, 20 nt, Human
gggguucauaggucacuggc

SEQ ID NO: 2508536 - RNA, 17 nt, Human
gggguucagccccuccu

SEQ ID NO: 2508537 - RNA, 22 nt, Human
gggguucagccccuccucugcc

SEQ ID NO: 2508538 - RNA, 22 nt, Human
gggguucuuucuuccucugcug

SEQ ID NO: 2508539 - RNA, 20 nt, Human
gggguucuuucuuccucugc

SEQ ID NO: 2508540 - RNA, 23 nt, Human
gggguucccuuuuuuggcugcug

SEQ ID NO: 2508541 - RNA, 14 nt, Human
ggggugccgccugc

SEQ ID NO: 2508542 - RNA, 13 nt, Human
ggggugccgccug

SEQ ID NO: 2508543 - RNA, 17 nt, Human
ggggugccgccugcccg

SEQ ID NO: 2508544 - RNA, 16 nt, Human
gggguucagccccucc

SEQ ID NO: 2508545 - RNA, 19 nt, Human
gggggaagagcacagcccu

SEQ ID NO: 2508546 - RNA, 17 nt, Human
gggggaagagcacagcc

SEQ ID NO: 2508547 - RNA, 22 nt, Human
ggggucuuugugagagugagcu

SEQ ID NO: 2508548 - RNA, 14 nt, Human
ggggugaggagcug

SEQ ID NO: 2508549 - RNA, 15 nt, Human
ggggugaggagcugg

SEQ ID NO: 2508550 - RNA, 18 nt, Human
ggggugacgccugcccuc

SEQ ID NO: 2508551 - RNA, 13 nt, Human
ggggugaggacca

SEQ ID NO: 2508552 - RNA, 18 nt, Human
ggggugauuucagagagg

SEQ ID NO: 2508553 - RNA, 17 nt, Human
ggggugauuucagagag

SEQ ID NO: 2508554 - RNA, 23 nt, Human
ggggugcccccuccucucccauc

SEQ ID NO: 2508555 - RNA, 20 nt, Human
ggggugcccccuccucuccc

SEQ ID NO: 2508556 - RNA, 13 nt, Human
ggggugcccccuc

SEQ ID NO: 2508557 - RNA, 16 nt, Human
ggggugcccacaggcc

SEQ ID NO: 2508558 - RNA, 17 nt, Human
ggggcugggcagaggaa

SEQ ID NO: 2508559 - RNA, 16 nt, Human
ggggcugggcagagga

SEQ ID NO: 2508560 - RNA, 13 nt, Human
ggggcugggacau

SEQ ID NO: 2508561 - RNA, 12 nt, Human
ggggcuggccua

SEQ ID NO: 2508562 - RNA, 17 nt, Human
ggggcuggcacugacug

SEQ ID NO: 2508563 - RNA, 22 nt, Human
ggggcuucaaccuugagacagc

SEQ ID NO: 2508564 - RNA, 12 nt, Human
ggggcuuauuuu

SEQ ID NO: 2508565 - RNA, 17 nt, Human
gggggaacucagaucca

SEQ ID NO: 2508566 - RNA, 17 nt, Human
ggggcuugaagccaaag

SEQ ID NO: 2508567 - RNA, 12 nt, Human
gggggaaagcac

SEQ ID NO: 2508568 - RNA, 15 nt, Human
ggggcuuucuggaga

SEQ ID NO: 2508569 - RNA, 23 nt, Human
ggggcuggguuggcgcacccucc

SEQ ID NO: 2508570 - RNA, 22 nt, Human
ggggcuggguuggcgcacccuc

SEQ ID NO: 2508571 - RNA, 19 nt, Human
ggggcugguagcucaggug

SEQ ID NO: 2508572 - RNA, 22 nt, Human
ggggcuuagggucggaacccaa

SEQ ID NO: 2508573 - RNA, 19 nt, Human
ggggcuggccuuccugccc

SEQ ID NO: 2508574 - RNA, 16 nt, Human
ggggcuggccuuccug

SEQ ID NO: 2508575 - RNA, 19 nt, Human
ggggcuggcggcuacucag

SEQ ID NO: 2508576 - RNA, 19 nt, Human
ggggcuggguuggcgcacc

SEQ ID NO: 2508577 - RNA, 13 nt, Human
ggggcuggguugg

SEQ ID NO: 2508578 - RNA, 10 nt, Human
ggggcugggu

SEQ ID NO: 2508579 - RNA, 12 nt, Human
ggggcaggcuga

SEQ ID NO: 2508580 - RNA, 23 nt, Human
ggggcaggcccugcacuguccug

SEQ ID NO: 2508581 - RNA, 22 nt, Human
ggggcaggcccugcacuguccu

SEQ ID NO: 2508582 - RNA, 21 nt, Human
ggggcaggcccugcacugucc

SEQ ID NO: 2508583 - RNA, 18 nt, Human
ggggcaggcccugcacug

SEQ ID NO: 2508584 - RNA, 16 nt, Human
ggggcaggcccugcac

SEQ ID NO: 2508585 - RNA, 15 nt, Human
ggggcaggcccugca

SEQ ID NO: 2508586 - RNA, 13 nt, Human
ggggcaggcccug

SEQ ID NO: 2508587 - RNA, 23 nt, Human
ggggcagcuucuauuagccaguc

SEQ ID NO: 2508588 - RNA, 19 nt, Human
ggggcagcugccagagaag

SEQ ID NO: 2508589 - RNA, 16 nt, Human
ggggcaggagggcccu

SEQ ID NO: 2508590 - RNA, 14 nt, Human
ggggcaggcacagc

SEQ ID NO: 2508591 - RNA, 13 nt, Human
ggggcaggcacag

SEQ ID NO: 2508592 - RNA, 10 nt, Human
ggggcaggca

SEQ ID NO: 2508593 - RNA, 17 nt, Human
ggggcaggcacagcaca

SEQ ID NO: 2508594 - RNA, 15 nt, Human
ggggcaggcacagca

SEQ ID NO: 2508595 - RNA, 11 nt, Human
ggggcaggcag

SEQ ID NO: 2508596 - RNA, 12 nt, Human
ggggcaggcagu

SEQ ID NO: 2508597 - RNA, 19 nt, Human
ggggcugcuuccuccugga

SEQ ID NO: 2508598 - RNA, 18 nt, Human
ggggcugcuuccuccugg

SEQ ID NO: 2508599 - RNA, 16 nt, Human
ggggcugcuuccuccu

SEQ ID NO: 2508600 - RNA, 15 nt, Human
ggggcugcuggccug

SEQ ID NO: 2508601 - RNA, 20 nt, Human
ggggcugcuccuccagggcc

SEQ ID NO: 2508602 - RNA, 21 nt, Human
ggggcugcugaccuccacagc

SEQ ID NO: 2508603 - RNA, 14 nt, Human
ggggcugcuccucc

SEQ ID NO: 2508604 - RNA, 15 nt, Human
ggggcugcuccucca

SEQ ID NO: 2508605 - RNA, 16 nt, Human
ggggcugcuccuccag

SEQ ID NO: 2508606 - RNA, 14 nt, Human
ggggcagucaccug

SEQ ID NO: 2508607 - RNA, 21 nt, Human
ggggcagggaaggggaggcag

SEQ ID NO: 2508608 - RNA, 13 nt, Human
ggggcugcagcau

SEQ ID NO: 2508609 - RNA, 11 nt, Human
ggggcagucug

SEQ ID NO: 2508610 - RNA, 23 nt, Human
ggggcugcccgcucccagugucu

SEQ ID NO: 2508611 - RNA, 16 nt, Human
ggggcugcccgcuccc

SEQ ID NO: 2508612 - RNA, 15 nt, Human
ggggcugcccgcucc

SEQ ID NO: 2508613 - RNA, 13 nt, Human
ggggcugcccgcu

SEQ ID NO: 2508614 - RNA, 18 nt, Human
gggcuucaguggcagcug

SEQ ID NO: 2508615 - RNA, 17 nt, Human
gggcuucaguggcagcu

SEQ ID NO: 2508616 - RNA, 16 nt, Human
gggcuucaguggcagc

SEQ ID NO: 2508617 - RNA, 15 nt, Human
gggcuucaguggcag

SEQ ID NO: 2508618 - RNA, 16 nt, Human
gggcuucacuguauaa

SEQ ID NO: 2508619 - RNA, 13 nt, Human
gggcuucauacac

SEQ ID NO: 2508620 - RNA, 19 nt, Human
gggcuucauccuccucaga

SEQ ID NO: 2508621 - RNA, 20 nt, Human
gggcuucaguggcagcugcu

SEQ ID NO: 2508622 - RNA, 19 nt, Human
gggcuucaguggcagcugc

SEQ ID NO: 2508623 - RNA, 14 nt, Human
gggcuucugcaccc

SEQ ID NO: 2508624 - RNA, 16 nt, Human
gggcuucuccugaccc

SEQ ID NO: 2508625 - RNA, 13 nt, Human
gggcuucuccuga

SEQ ID NO: 2508626 - RNA, 23 nt, Human
gggcuucccaguggcugcugccc

SEQ ID NO: 2508627 - RNA, 22 nt, Human
gggcuucccaguggcugcugcc

SEQ ID NO: 2508628 - RNA, 21 nt, Human
gggcuucccaguggcugcugc

SEQ ID NO: 2508629 - RNA, 19 nt, Human
gggcuuccucuagaagcca

SEQ ID NO: 2508630 - RNA, 20 nt, Human
gggcuucauccuccucagau

SEQ ID NO: 2508631 - RNA, 19 nt, Human
gggcuucauacacaugaga

SEQ ID NO: 2508632 - RNA, 20 nt, Human
gggcuucccaguggcugcug

SEQ ID NO: 2508633 - RNA, 23 nt, Human
gggcuuccauuugugugugugca

SEQ ID NO: 2508634 - RNA, 17 nt, Human
gggcuuggccugcugug

SEQ ID NO: 2508635 - RNA, 16 nt, Human
gggcuuggccugcugu

SEQ ID NO: 2508636 - RNA, 13 nt, Human
gggcuuggccugc

SEQ ID NO: 2508637 - RNA, 20 nt, Human
gggcuuggggaccagagcug

SEQ ID NO: 2508638 - RNA, 23 nt, Human
gggcuucugcacccuccacccug

SEQ ID NO: 2508639 - RNA, 21 nt, Human
gggcuucugcacccuccaccc

SEQ ID NO: 2508640 - RNA, 19 nt, Human
gggcuucugcacccuccac

SEQ ID NO: 2508641 - RNA, 18 nt, Human
gggcuucugcacccucca

SEQ ID NO: 2508642 - RNA, 17 nt, Human
gggcuucugcacccucc

SEQ ID NO: 2508643 - RNA, 16 nt, Human
gggcuucugcacccuc

SEQ ID NO: 2508644 - RNA, 15 nt, Human
gggcuucugcacccu

SEQ ID NO: 2508645 - RNA, 17 nt, Human
gggcuugaagccaaaga

SEQ ID NO: 2508646 - RNA, 15 nt, Human
gggcuugaagccaaa

SEQ ID NO: 2508647 - RNA, 13 nt, Human
gggcuugaagcca

SEQ ID NO: 2508648 - RNA, 16 nt, Human
gggcuugacuuuugua

SEQ ID NO: 2508649 - RNA, 13 nt, Human
gggcuugacuuuu

SEQ ID NO: 2508650 - RNA, 19 nt, Human
gggcuugcaaguauguuuu

SEQ ID NO: 2508651 - RNA, 18 nt, Human
ggggaugugggagggagc

SEQ ID NO: 2508652 - RNA, 17 nt, Human
ggggcagaacagccgcu

SEQ ID NO: 2508653 - RNA, 16 nt, Human
ggggcagagggcagag

SEQ ID NO: 2508654 - RNA, 13 nt, Human
ggggcagcugacc

SEQ ID NO: 2508655 - RNA, 20 nt, Human
ggggcagcgggggccaggga

SEQ ID NO: 2508656 - RNA, 20 nt, Human
ggggcagcugauacaaauug

SEQ ID NO: 2508657 - RNA, 14 nt, Human
ggggcagcugccag

SEQ ID NO: 2508658 - RNA, 18 nt, Human
ggggcagagggcagaggc

SEQ ID NO: 2508659 - RNA, 22 nt, Human
ggggcagagggcagaggcugga

SEQ ID NO: 2508660 - RNA, 15 nt, Human
ggggcagcccuugcu

SEQ ID NO: 2508661 - RNA, 21 nt, Human
ggggcagccaaacccaugagg

SEQ ID NO: 2508662 - RNA, 13 nt, Human
ggggauagaugug

SEQ ID NO: 2508663 - RNA, 17 nt, Human
ggggaucacagccucug

SEQ ID NO: 2508664 - RNA, 13 nt, Human
ggggaucucaggg

SEQ ID NO: 2508665 - RNA, 23 nt, Human
ggggaucccucccccccaugcac

SEQ ID NO: 2508666 - RNA, 20 nt, Human
ggggaugagagggugcuauc

SEQ ID NO: 2508667 - RNA, 21 nt, Human
ggggaugacuagaggcaggga

SEQ ID NO: 2508668 - RNA, 14 nt, Human
ggggaugugggagg

SEQ ID NO: 2508669 - RNA, 21 nt, Human
ggggaucccucccccccaugc

SEQ ID NO: 2508670 - RNA, 22 nt, Human
ggggaucaucugccgugccugg

SEQ ID NO: 2508671 - RNA, 13 nt, Human
ggggaucacagag

SEQ ID NO: 2508672 - RNA, 13 nt, Human
ggggauaugcuua

SEQ ID NO: 2508673 - RNA, 20 nt, Human
ggggaguuucuuuccugccu

SEQ ID NO: 2508674 - RNA, 20 nt, Human
ggggagugggacagagucug

SEQ ID NO: 2508675 - RNA, 21 nt, Human
gggcuuggggaccagagcugc

SEQ ID NO: 2508676 - RNA, 17 nt, Human
ggggagacugggcugag

SEQ ID NO: 2508677 - RNA, 19 nt, Human
ggggagaacuuacauugug

SEQ ID NO: 2508678 - RNA, 18 nt, Human
ggggagagccugcuggca

SEQ ID NO: 2508679 - RNA, 16 nt, Human
ggggagagccugcugg

SEQ ID NO: 2508680 - RNA, 14 nt, Human
ggggagagccugcu

SEQ ID NO: 2508681 - RNA, 18 nt, Human
ggggagagcaggcuggca

SEQ ID NO: 2508682 - RNA, 18 nt, Human
ggggagacugggcugagg

SEQ ID NO: 2508683 - RNA, 11 nt, Human
ggggagcccac

SEQ ID NO: 2508684 - RNA, 19 nt, Human
ggggagcccacuguccugg

SEQ ID NO: 2508685 - RNA, 11 nt, Human
ggggagcaggg

SEQ ID NO: 2508686 - RNA, 14 nt, Human
ggggagcagagaca

SEQ ID NO: 2508687 - RNA, 13 nt, Human
ggggaguggccac

SEQ ID NO: 2508688 - RNA, 17 nt, Human
ggggaguuaagaccugg

SEQ ID NO: 2508689 - RNA, 21 nt, Human
ggggaguuaagaccuggcagc

SEQ ID NO: 2508690 - RNA, 11 nt, Human
ggggaguggaa

SEQ ID NO: 2508691 - RNA, 17 nt, Human
ggggagucugaagcaga

SEQ ID NO: 2508692 - RNA, 13 nt, Human
ggggaguggaaua

SEQ ID NO: 2508693 - RNA, 19 nt, Human
ggggagugggacagagucu

SEQ ID NO: 2508694 - RNA, 22 nt, Human
ggggagccccuucugcucagcu

SEQ ID NO: 2508695 - RNA, 11 nt, Human
ggggagcccuc

SEQ ID NO: 2508696 - RNA, 18 nt, Human
ggggaggaaacucaccug

SEQ ID NO: 2508697 - RNA, 14 nt, Human
ggggaguaugcaaa

SEQ ID NO: 2508698 - RNA, 16 nt, Human
ggggagucugaagcag

SEQ ID NO: 2508699 - RNA, 14 nt, Human
ggggagggugacag

SEQ ID NO: 2508700 - RNA, 20 nt, Human
ggggagggugacaguggccg

SEQ ID NO: 2508701 - RNA, 20 nt, Human
gggcucugccucccaucacc

SEQ ID NO: 2508702 - RNA, 17 nt, Human
gggcucugccucccauc

SEQ ID NO: 2508703 - RNA, 16 nt, Human
gggcucugccucccau

SEQ ID NO: 2508704 - RNA, 15 nt, Human
gggcucugccuccca

SEQ ID NO: 2508705 - RNA, 13 nt, Human
gggcucugccucc

SEQ ID NO: 2508706 - RNA, 11 nt, Human
gggcucugccc

SEQ ID NO: 2508707 - RNA, 12 nt, Human
gggcucugcccc

SEQ ID NO: 2508708 - RNA, 23 nt, Human
gggcucugccccagaggccucuc

SEQ ID NO: 2508709 - RNA, 15 nt, Human
gggcucugccacccu

SEQ ID NO: 2508710 - RNA, 19 nt, Human
gggcucugccccagcucug

SEQ ID NO: 2508711 - RNA, 23 nt, Human
gggcucugcaauuccccucugcu

SEQ ID NO: 2508712 - RNA, 21 nt, Human
gggcucugcaauuccccucug

SEQ ID NO: 2508713 - RNA, 20 nt, Human
gggcucugcaauuccccucu

SEQ ID NO: 2508714 - RNA, 19 nt, Human
gggcucucugcuguacaua

SEQ ID NO: 2508715 - RNA, 14 nt, Human
gggcucgucuuugc

SEQ ID NO: 2508716 - RNA, 15 nt, Human
gggcucggaggcugc

SEQ ID NO: 2508717 - RNA, 17 nt, Human
gggcucgucuuugcaga

SEQ ID NO: 2508718 - RNA, 14 nt, Human
gggcucggaggcug

SEQ ID NO: 2508719 - RNA, 20 nt, Human
gggcucgccaugccgggggu

SEQ ID NO: 2508720 - RNA, 14 nt, Human
gggcucgccaugcc

SEQ ID NO: 2508721 - RNA, 21 nt, Human
gggcuccuuucuccagccagc

SEQ ID NO: 2508722 - RNA, 20 nt, Human
gggcuccuuucuccagccag

SEQ ID NO: 2508723 - RNA, 22 nt, Human
gggcuccuuucuccagccagca

SEQ ID NO: 2508724 - RNA, 18 nt, Human
gggcuccuuucuccagcc

SEQ ID NO: 2508725 - RNA, 13 nt, Human
gggcucucagcuc

SEQ ID NO: 2508726 - RNA, 23 nt, Human
gggcucucauguuuucaacugcc

SEQ ID NO: 2508727 - RNA, 13 nt, Human
gggcucuccaccu

SEQ ID NO: 2508728 - RNA, 14 nt, Human
gggcucuccaccuc

SEQ ID NO: 2508729 - RNA, 17 nt, Human
gggcucuccaccucagc

SEQ ID NO: 2508730 - RNA, 18 nt, Human
gggcucuccaccucagcc

SEQ ID NO: 2508731 - RNA, 19 nt, Human
gggcucuccaccucagccu

SEQ ID NO: 2508732 - RNA, 21 nt, Human
gggcucuccaccucagccuug

SEQ ID NO: 2508733 - RNA, 18 nt, Human
gggcuccugccuucuguc

SEQ ID NO: 2508734 - RNA, 17 nt, Human
gggcuccugccuucugu

SEQ ID NO: 2508735 - RNA, 22 nt, Human
gggcuccugcacuuacuugcuu

SEQ ID NO: 2508736 - RNA, 18 nt, Human
gggcuccugcacuuacuu

SEQ ID NO: 2508737 - RNA, 11 nt, Human
gggcuccugca

SEQ ID NO: 2508738 - RNA, 13 nt, Human
gggcucccuucau

SEQ ID NO: 2508739 - RNA, 15 nt, Human
gggcuccugugcccu

SEQ ID NO: 2508740 - RNA, 14 nt, Human
gggcuccugugccc

SEQ ID NO: 2508741 - RNA, 21 nt, Human
gggcuccugccuucuguccug

SEQ ID NO: 2508742 - RNA, 11 nt, Human
gggcuccugga

SEQ ID NO: 2508743 - RNA, 12 nt, Human
gggcuccuggaa

SEQ ID NO: 2508744 - RNA, 20 nt, Human
gggcuccuggaaaggcucag

SEQ ID NO: 2508745 - RNA, 23 nt, Human
gggcuccuggaaaggcucagucu

SEQ ID NO: 2508746 - RNA, 14 nt, Human
gggcugacugggac

SEQ ID NO: 2508747 - RNA, 10 nt, Human
gggcugagac

SEQ ID NO: 2508748 - RNA, 23 nt, Human
gggcugaccuuccucgcagagag

SEQ ID NO: 2508749 - RNA, 21 nt, Human
gggcugaccuuccucgcagag

SEQ ID NO: 2508750 - RNA, 20 nt, Human
gggcugacuagaagggccag

SEQ ID NO: 2508751 - RNA, 20 nt, Human
gggcugaccuuccucgcaga

SEQ ID NO: 2508752 - RNA, 16 nt, Human
gggcugaccuuccucg

SEQ ID NO: 2508753 - RNA, 19 nt, Human
gggcugaagguugaagagg

SEQ ID NO: 2508754 - RNA, 17 nt, Human
gggcugaagguugaaga

SEQ ID NO: 2508755 - RNA, 15 nt, Human
gggcucuucucauuu

SEQ ID NO: 2508756 - RNA, 19 nt, Human
gggcucugugggcugcacu

SEQ ID NO: 2508757 - RNA, 18 nt, Human
gggcugaacggggagaaa

SEQ ID NO: 2508758 - RNA, 11 nt, Human
gggcucugugg

SEQ ID NO: 2508759 - RNA, 16 nt, Human
gggcucuggagagaaa

SEQ ID NO: 2508760 - RNA, 16 nt, Human
gggcucugugcaguca

SEQ ID NO: 2508761 - RNA, 16 nt, Human
gggcucugugggcugc

SEQ ID NO: 2508762 - RNA, 14 nt, Human
gggcucugugggcu

SEQ ID NO: 2508763 - RNA, 12 nt, Human
gggcucuucuca

SEQ ID NO: 2508764 - RNA, 20 nt, Human
gggcucugccccagcucugg

SEQ ID NO: 2508765 - RNA, 21 nt, Human
gggcucugccccagcucuggc

SEQ ID NO: 2508766 - RNA, 15 nt, Human
gggcucuggagagaa

SEQ ID NO: 2508767 - RNA, 14 nt, Human
gggcucuggagaga

SEQ ID NO: 2508768 - RNA, 13 nt, Human
gggcucuggagag

SEQ ID NO: 2508769 - RNA, 12 nt, Human
gggcugagggag

SEQ ID NO: 2508770 - RNA, 13 nt, Human
gggcugagggagc

SEQ ID NO: 2508771 - RNA, 23 nt, Human
gggcugagcuggggaccugguac

SEQ ID NO: 2508772 - RNA, 16 nt, Human
gggcugagcugccugu

SEQ ID NO: 2508773 - RNA, 18 nt, Human
gggcugagcccuggcagg

SEQ ID NO: 2508774 - RNA, 16 nt, Human
gggcugagcccuggca

SEQ ID NO: 2508775 - RNA, 17 nt, Human
gggcugagcccuggcag

SEQ ID NO: 2508776 - RNA, 23 nt, Human
gggcugagccccuaccccacacc

SEQ ID NO: 2508777 - RNA, 15 nt, Human
gggcugagccccuac

SEQ ID NO: 2508778 - RNA, 14 nt, Human
gggcugagccccua

SEQ ID NO: 2508779 - RNA, 18 nt, Human
gggcugagagaaccucac

SEQ ID NO: 2508780 - RNA, 13 nt, Human
gggcugagcccug

SEQ ID NO: 2508781 - RNA, 15 nt, Human
gggcugagcccuggc

SEQ ID NO: 2508782 - RNA, 14 nt, Human
gggcugcaccggcu

SEQ ID NO: 2508783 - RNA, 16 nt, Human
gggcugaggugggagg

SEQ ID NO: 2508784 - RNA, 18 nt, Human
gggcuguaaaaugcauga

SEQ ID NO: 2508785 - RNA, 16 nt, Human
gggcugucaucugugc

SEQ ID NO: 2508786 - RNA, 23 nt, Human
gggcugguucuguaauugugugu

SEQ ID NO: 2508787 - RNA, 14 nt, Human
gggcugagggagcc

SEQ ID NO: 2508788 - RNA, 19 nt, Human
gggcuguccaguucccaga

SEQ ID NO: 2508789 - RNA, 17 nt, Human
gggcugucaucugugca

SEQ ID NO: 2508790 - RNA, 12 nt, Human
gggcugugaucg

SEQ ID NO: 2508791 - RNA, 16 nt, Human
gggcuguuggcacuca

SEQ ID NO: 2508792 - RNA, 11 nt, Human
gggcugugcua

SEQ ID NO: 2508793 - RNA, 15 nt, Human
gggcuuaagaaaucu

SEQ ID NO: 2508794 - RNA, 13 nt, Human
gggcuuagagcag

SEQ ID NO: 2508795 - RNA, 14 nt, Human
gggcuucaguggca

SEQ ID NO: 2508796 - RNA, 21 nt, Human
gggcuucaaccuugagacagc

SEQ ID NO: 2508797 - RNA, 24 nt, Human
gggcuuagagcaguuucuguccug

SEQ ID NO: 2508798 - RNA, 14 nt, Human
gggcuuagagcagu

SEQ ID NO: 2508799 - RNA, 23 nt, Human
gggcucccuucccaccucucuca

SEQ ID NO: 2508800 - RNA, 18 nt, Human
gggcucccuucccaccuc

SEQ ID NO: 2508801 - RNA, 17 nt, Human
gggcucccuucccaccu

SEQ ID NO: 2508802 - RNA, 14 nt, Human
gggcucccuuccca

SEQ ID NO: 2508803 - RNA, 13 nt, Human
gggcgcuggccca

SEQ ID NO: 2508804 - RNA, 12 nt, Human
gggcgcuggccc

SEQ ID NO: 2508805 - RNA, 14 nt, Human
gggcucccugacug

SEQ ID NO: 2508806 - RNA, 18 nt, Human
gggcucccugacugggag

SEQ ID NO: 2508807 - RNA, 21 nt, Human
gggcucccuguaaccucuuca

SEQ ID NO: 2508808 - RNA, 13 nt, Human
gggcucccuuccc

SEQ ID NO: 2508809 - RNA, 16 nt, Human
gggcgcgguggcucac

SEQ ID NO: 2508810 - RNA, 23 nt, Human
gggcgcggccagccccggcccug

SEQ ID NO: 2508811 - RNA, 18 nt, Human
gggcgcggccagccccgg

SEQ ID NO: 2508812 - RNA, 20 nt, Human
gggcgcucgcuuccgcaucc

SEQ ID NO: 2508813 - RNA, 12 nt, Human
gggccuugccca

SEQ ID NO: 2508814 - RNA, 14 nt, Human
gggccuugcccaga

SEQ ID NO: 2508815 - RNA, 15 nt, Human
gggccuugcccagag

SEQ ID NO: 2508816 - RNA, 17 nt, Human
gggccuugcccagagau

SEQ ID NO: 2508817 - RNA, 21 nt, Human
gggccuugcgguauccgcccc

SEQ ID NO: 2508818 - RNA, 22 nt, Human
gggccuugcccagagaugccuc

SEQ ID NO: 2508819 - RNA, 22 nt, Human
gggccuuggccuccccugcuga

SEQ ID NO: 2508820 - RNA, 23 nt, Human
gggccuugcuaccucaaggggga

SEQ ID NO: 2508821 - RNA, 16 nt, Human
gggccuuuggcaggug

SEQ ID NO: 2508822 - RNA, 20 nt, Human
gggcgaccccgucacagccu

SEQ ID NO: 2508823 - RNA, 19 nt, Human
gggcgaagcccaggccccu

SEQ ID NO: 2508824 - RNA, 20 nt, Human
gggcgagacuccgucucaaa

SEQ ID NO: 2508825 - RNA, 12 nt, Human
gggcgaggcaga

SEQ ID NO: 2508826 - RNA, 16 nt, Human
gggcgaggcagaggac

SEQ ID NO: 2508827 - RNA, 13 nt, Human
gggcgaggcagag

SEQ ID NO: 2508828 - RNA, 18 nt, Human
gggcgaucgcggcggagc

SEQ ID NO: 2508829 - RNA, 21 nt, Human
gggcgcccaccuccccacgcc

SEQ ID NO: 2508830 - RNA, 14 nt, Human
gggcgcccuggaag

SEQ ID NO: 2508831 - RNA, 18 nt, Human
gggcgagucacugccucu

SEQ ID NO: 2508832 - RNA, 13 nt, Human
gggcgcccaccuc

SEQ ID NO: 2508833 - RNA, 22 nt, Human
gggcgaucgcggcggagcuggc

SEQ ID NO: 2508834 - RNA, 22 nt, Human
gggcgccuguagucccagccac

SEQ ID NO: 2508835 - RNA, 15 nt, Human
gggcgcccuggaagc

SEQ ID NO: 2508836 - RNA, 15 nt, Human
gggcgcggccagccc

SEQ ID NO: 2508837 - RNA, 22 nt, Human
gggcgccgcaaaccacacugga

SEQ ID NO: 2508838 - RNA, 17 nt, Human
gggcccguugaggauga

SEQ ID NO: 2508839 - RNA, 20 nt, Human
gggcccguugucucccuggc

SEQ ID NO: 2508840 - RNA, 18 nt, Human
gggcccguugucucccug

SEQ ID NO: 2508841 - RNA, 16 nt, Human
gggcccguugucuccc

SEQ ID NO: 2508842 - RNA, 14 nt, Human
gggcccucccuugg

SEQ ID NO: 2508843 - RNA, 23 nt, Human
gggcccguugucucccuggcccu

SEQ ID NO: 2508844 - RNA, 22 nt, Human
gggcccguugucucccuggccc

SEQ ID NO: 2508845 - RNA, 21 nt, Human
gggcccguugucucccuggcc

SEQ ID NO: 2508846 - RNA, 19 nt, Human
gggcccuccgacagccccc

SEQ ID NO: 2508847 - RNA, 16 nt, Human
gggcccuccgacagcc

SEQ ID NO: 2508848 - RNA, 23 nt, Human
gggcccuccgacagcccccucug

SEQ ID NO: 2508849 - RNA, 21 nt, Human
gggccuggagauccuccugca

SEQ ID NO: 2508850 - RNA, 12 nt, Human
gggccuggagau

SEQ ID NO: 2508851 - RNA, 16 nt, Human
gggccuggaccugccu

SEQ ID NO: 2508852 - RNA, 14 nt, Human
gggccuggaccugc

SEQ ID NO: 2508853 - RNA, 13 nt, Human
gggccuggaccug

SEQ ID NO: 2508854 - RNA, 16 nt, Human
gggcccucucugcucu

SEQ ID NO: 2508855 - RNA, 12 nt, Human
gggcccuccuga

SEQ ID NO: 2508856 - RNA, 23 nt, Human
gggcccuccugaaacuuacacac

SEQ ID NO: 2508857 - RNA, 21 nt, Human
gggcccgcuugccucggcucc

SEQ ID NO: 2508858 - RNA, 20 nt, Human
gggcccgcuugccucggcuc

SEQ ID NO: 2508859 - RNA, 14 nt, Human
gggcccgcuugccu

SEQ ID NO: 2508860 - RNA, 13 nt, Human
gggcccgcuugcc

SEQ ID NO: 2508861 - RNA, 20 nt, Human
gggcccggccauguccuuag

SEQ ID NO: 2508862 - RNA, 16 nt, Human
gggcccggccagccau

SEQ ID NO: 2508863 - RNA, 23 nt, Human
gggcccgcuugccucggcuccug

SEQ ID NO: 2508864 - RNA, 13 nt, Human
gggcccggccagc

SEQ ID NO: 2508865 - RNA, 17 nt, Human
ggcucccacaggcagcu

SEQ ID NO: 2508866 - RNA, 21 nt, Human
ggcucccacaggcccuuccuc

SEQ ID NO: 2508867 - RNA, 20 nt, Human
ggcucccacaggcccuuccu

SEQ ID NO: 2508868 - RNA, 16 nt, Human
gggccuggcucaggug

SEQ ID NO: 2508869 - RNA, 14 nt, Human
gggccuggcucagg

SEQ ID NO: 2508870 - RNA, 18 nt, Human
gggccuggucguuuucaa

SEQ ID NO: 2508871 - RNA, 22 nt, Human
gggccuggcgggaugggccacc

SEQ ID NO: 2508872 - RNA, 19 nt, Human
gggccuggucccugggagg

SEQ ID NO: 2508873 - RNA, 16 nt, Human
gggccuggucccuggg

SEQ ID NO: 2508874 - RNA, 21 nt, Human
gggccuggauucauuuccugc

SEQ ID NO: 2508875 - RNA, 20 nt, Human
gggccuggauucauuuccug

SEQ ID NO: 2508876 - RNA, 18 nt, Human
gggccuggagcaggccuu

SEQ ID NO: 2508877 - RNA, 10 nt, Human
gggccuggca

SEQ ID NO: 2508878 - RNA, 22 nt, Human
gggccuggcagccgugccuuca

SEQ ID NO: 2508879 - RNA, 12 nt, Human
gggccuggcuca

SEQ ID NO: 2508880 - RNA, 19 nt, Human
gggccuggccugagcuggg

SEQ ID NO: 2508881 - RNA, 20 nt, Human
gggccuggcgggaugggcca

SEQ ID NO: 2508882 - RNA, 14 nt, Human
gucagccuccagcc

SEQ ID NO: 2508883 - RNA, 12 nt, Human
gucagccuccag

SEQ ID NO: 2508884 - RNA, 17 nt, Human
gucagccgggcccugag

SEQ ID NO: 2508885 - RNA, 16 nt, Human
gucagccgggcccuga

SEQ ID NO: 2508886 - RNA, 15 nt, Human
gucagccgggcccug

SEQ ID NO: 2508887 - RNA, 21 nt, Human
gucagccgagccgggccuggg

SEQ ID NO: 2508888 - RNA, 20 nt, Human
gucagccgagccgggccugg

SEQ ID NO: 2508889 - RNA, 16 nt, Human
gucagccgagccgggc

SEQ ID NO: 2508890 - RNA, 19 nt, Human
gucagccuccagccucugu

SEQ ID NO: 2508891 - RNA, 18 nt, Human
gucagccuccagccucug

SEQ ID NO: 2508892 - RNA, 16 nt, Human
gucagccuccagccuc

SEQ ID NO: 2508893 - RNA, 15 nt, Human
gucagccuccagccu

SEQ ID NO: 2508894 - RNA, 16 nt, Human
gucagccucucuccca

SEQ ID NO: 2508895 - RNA, 11 nt, Human
gucagccucuc

SEQ ID NO: 2508896 - RNA, 15 nt, Human
gucagcguugcaugu

SEQ ID NO: 2508897 - RNA, 20 nt, Human
gucagcgugcuuagccuccu

SEQ ID NO: 2508898 - RNA, 21 nt, Human
gucagcgcagguuuaguuuac

SEQ ID NO: 2508899 - RNA, 21 nt, Human
gucagccucucucccagucua

SEQ ID NO: 2508900 - RNA, 20 nt, Human
gucagccucucucccagucu

SEQ ID NO: 2508901 - RNA, 22 nt, Human
gucagccuucccccucccaggg

SEQ ID NO: 2508902 - RNA, 19 nt, Human
gucagcguugcaugucgug

SEQ ID NO: 2508903 - RNA, 18 nt, Human
gucagcguugcaugucgu

SEQ ID NO: 2508904 - RNA, 16 nt, Human
gucagcguugcauguc

SEQ ID NO: 2508905 - RNA, 13 nt, Human
gucauagaaauua

SEQ ID NO: 2508906 - RNA, 22 nt, Human
gucauagaaauuacacccaaag

SEQ ID NO: 2508907 - RNA, 22 nt, Human
gucauacuaucuacucuccuca

SEQ ID NO: 2508908 - RNA, 15 nt, Human
gucauaccaaugaaa

SEQ ID NO: 2508909 - RNA, 16 nt, Human
gucauaccaaugaaaa

SEQ ID NO: 2508910 - RNA, 20 nt, Human
gucauacuaucuacucuccu

SEQ ID NO: 2508911 - RNA, 21 nt, Human
gucauacuaucuacucuccuc

SEQ ID NO: 2508912 - RNA, 16 nt, Human
gucauaccaggccgcc

SEQ ID NO: 2508913 - RNA, 17 nt, Human
gucauacaauccauucu

SEQ ID NO: 2508914 - RNA, 14 nt, Human
gucagcuacuaaug

SEQ ID NO: 2508915 - RNA, 21 nt, Human
gucaccucagagacauacacc

SEQ ID NO: 2508916 - RNA, 23 nt, Human
gucaccugcccagaucccagaag

SEQ ID NO: 2508917 - RNA, 13 nt, Human
gucaccugugcuu

SEQ ID NO: 2508918 - RNA, 22 nt, Human
gucacguggaggagcagugcag

SEQ ID NO: 2508919 - RNA, 22 nt, Human
gucagcaaauuaauuggcagca

SEQ ID NO: 2508920 - RNA, 17 nt, Human
gucagcaaauuaauugg

SEQ ID NO: 2508921 - RNA, 23 nt, Human
gucagcaaaaagcaaaaucauuu

SEQ ID NO: 2508922 - RNA, 20 nt, Human
gucagcagccucccugaaga

SEQ ID NO: 2508923 - RNA, 23 nt, Human
gucagcagccucccugaagacca

SEQ ID NO: 2508924 - RNA, 13 nt, Human
gucagcaggaagc

SEQ ID NO: 2508925 - RNA, 15 nt, Human
gucagccaaauguaa

SEQ ID NO: 2508926 - RNA, 15 nt, Human
gucagccagggccag

SEQ ID NO: 2508927 - RNA, 12 nt, Human
gucagccagggc

SEQ ID NO: 2508928 - RNA, 14 nt, Human
gucagccagggcca

SEQ ID NO: 2508929 - RNA, 11 nt, Human
gucagccaggg

SEQ ID NO: 2508930 - RNA, 13 nt, Human
gucagcccuaggg

SEQ ID NO: 2508931 - RNA, 22 nt, Human
gucagcccuaggguggagagcc

SEQ ID NO: 2508932 - RNA, 23 nt, Human
gucagcccaaaccaccagaagcc

SEQ ID NO: 2508933 - RNA, 22 nt, Human
gucagcccaaaccaccagaagc

SEQ ID NO: 2508934 - RNA, 16 nt, Human
gucagccagggccagg

SEQ ID NO: 2508935 - RNA, 16 nt, Human
gucaugccccccucaa

SEQ ID NO: 2508936 - RNA, 15 nt, Human
gucaugccccccuca

SEQ ID NO: 2508937 - RNA, 19 nt, Human
gucaugcauaaauaugcag

SEQ ID NO: 2508938 - RNA, 18 nt, Human
gucaugcauaaauaugca

SEQ ID NO: 2508939 - RNA, 17 nt, Human
gucaugcauaaauaugc

SEQ ID NO: 2508940 - RNA, 14 nt, Human
gucaugcauaaaua

SEQ ID NO: 2508941 - RNA, 13 nt, Human
gucaugcauaaau

SEQ ID NO: 2508942 - RNA, 18 nt, Human
gucaugcaaaggcuggga

SEQ ID NO: 2508943 - RNA, 17 nt, Human
gucaugcaaaggcuggg

SEQ ID NO: 2508944 - RNA, 16 nt, Human
gucaugcaaaggcugg

SEQ ID NO: 2508945 - RNA, 15 nt, Human
gucaugauggcacca

SEQ ID NO: 2508946 - RNA, 20 nt, Human
gucaugaucucccugccgcc

SEQ ID NO: 2508947 - RNA, 22 nt, Human
gucaugaucucccugccgccuc

SEQ ID NO: 2508948 - RNA, 16 nt, Human
gucaugaucucccugc

SEQ ID NO: 2508949 - RNA, 17 nt, Human
gucaugaucucccugcc

SEQ ID NO: 2508950 - RNA, 18 nt, Human
gucaugaucucccugccg

SEQ ID NO: 2508951 - RNA, 19 nt, Human
gucaugaucucccugccgc

SEQ ID NO: 2508952 - RNA, 18 nt, Human
gucaucuugaccaagcag

SEQ ID NO: 2508953 - RNA, 16 nt, Human
gucaucugguagauuu

SEQ ID NO: 2508954 - RNA, 20 nt, Human
gucaucuugaccaagcagga

SEQ ID NO: 2508955 - RNA, 22 nt, Human
gucaucuugaccaagcaggaag

SEQ ID NO: 2508956 - RNA, 18 nt, Human
gucaucuuuuucucuaaa

SEQ ID NO: 2508957 - RNA, 18 nt, Human
gucaugaacauguuccug

SEQ ID NO: 2508958 - RNA, 22 nt, Human
gucaucuuuuucucuaaaauag

SEQ ID NO: 2508959 - RNA, 14 nt, Human
gucaugaagcccaa

SEQ ID NO: 2508960 - RNA, 18 nt, Human
gucaugagcugagcaggg

SEQ ID NO: 2508961 - RNA, 20 nt, Human
gucaugaauucuuaugcuua

SEQ ID NO: 2508962 - RNA, 16 nt, Human
gucaugagcugagcag

SEQ ID NO: 2508963 - RNA, 14 nt, Human
gucaugaucucccu

SEQ ID NO: 2508964 - RNA, 15 nt, Human
gucaugaucucccug

SEQ ID NO: 2508965 - RNA, 13 nt, Human
gucaucauacaug

SEQ ID NO: 2508966 - RNA, 17 nt, Human
gucaucaggagaaaaag

SEQ ID NO: 2508967 - RNA, 21 nt, Human
gucaucauuguauauaugugu

SEQ ID NO: 2508968 - RNA, 15 nt, Human
gucaucuaguuuuaa

SEQ ID NO: 2508969 - RNA, 12 nt, Human
gucaucuaguuu

SEQ ID NO: 2508970 - RNA, 16 nt, Human
gucaucucagcuggau

SEQ ID NO: 2508971 - RNA, 16 nt, Human
gucaucuaguuuuaaa

SEQ ID NO: 2508972 - RNA, 17 nt, Human
gucaucuccaucagcug

SEQ ID NO: 2508973 - RNA, 19 nt, Human
gucaucuccaucagcugua

SEQ ID NO: 2508974 - RNA, 14 nt, Human
gucaucagccacca

SEQ ID NO: 2508975 - RNA, 16 nt, Human
gucaucacuuuucagu

SEQ ID NO: 2508976 - RNA, 17 nt, Human
gucaucacuuuucagug

SEQ ID NO: 2508977 - RNA, 15 nt, Human
gucaucacuuuucag

SEQ ID NO: 2508978 - RNA, 16 nt, Human
gucauauuuugauuau

SEQ ID NO: 2508979 - RNA, 20 nt, Human
gucauauuuugauuauugua

SEQ ID NO: 2508980 - RNA, 12 nt, Human
gucauauuuuga

SEQ ID NO: 2508981 - RNA, 18 nt, Human
gucauauguaggugucug

SEQ ID NO: 2508982 - RNA, 21 nt, Human
gucauauaagauucauauuua

SEQ ID NO: 2508983 - RNA, 15 nt, Human
gucauagguuaauau

SEQ ID NO: 2508984 - RNA, 22 nt, Human
gucccagagcaggaggccccug

SEQ ID NO: 2508985 - RNA, 14 nt, Human
gucccagccacccc

SEQ ID NO: 2508986 - RNA, 15 nt, Human
gucccagccaccccg

SEQ ID NO: 2508987 - RNA, 16 nt, Human
gucccagccaccccgg

SEQ ID NO: 2508988 - RNA, 18 nt, Human
gucccagccaccccgggc

SEQ ID NO: 2508989 - RNA, 21 nt, Human
gucccagccaccccgggcucu

SEQ ID NO: 2508990 - RNA, 14 nt, Human
gucccagcuacucg

SEQ ID NO: 2508991 - RNA, 23 nt, Human
gucccagccaccccgggcucucu

SEQ ID NO: 2508992 - RNA, 22 nt, Human
gucccagcuacucagaagccug

SEQ ID NO: 2508993 - RNA, 16 nt, Human
gucccacuuccccucc

SEQ ID NO: 2508994 - RNA, 18 nt, Human
gucccacugccucagguu

SEQ ID NO: 2508995 - RNA, 19 nt, Human
gucccacugccucagguuc

SEQ ID NO: 2508996 - RNA, 21 nt, Human
gucccacuuccccuccuaccc

SEQ ID NO: 2508997 - RNA, 17 nt, Human
gucccacuuccccuccu

SEQ ID NO: 2508998 - RNA, 22 nt, Human
gucccagaaaaagcaucauggc

SEQ ID NO: 2508999 - RNA, 16 nt, Human
gucccagagcaggagg

SEQ ID NO: 2509000 - RNA, 19 nt, Human
gucccacuuggcaucagcu

SEQ ID NO: 2509001 - RNA, 20 nt, Human
gucccagaaugccuccugca

SEQ ID NO: 2509002 - RNA, 22 nt, Human
gucccagauuggcucacacuga

SEQ ID NO: 2509003 - RNA, 21 nt, Human
gucccagauuggcucacacug

SEQ ID NO: 2509004 - RNA, 19 nt, Human
gucccagagcaggaggccc

SEQ ID NO: 2509005 - RNA, 18 nt, Human
gucccagagcaggaggcc

SEQ ID NO: 2509006 - RNA, 17 nt, Human
gucccagauuggcucac

SEQ ID NO: 2509007 - RNA, 17 nt, Human
gucccagauacuugggg

SEQ ID NO: 2509008 - RNA, 17 nt, Human
gucccacugccucaggu

SEQ ID NO: 2509009 - RNA, 11 nt, Human
gucccacugcc

SEQ ID NO: 2509010 - RNA, 16 nt, Human
gucccacucaagccaa

SEQ ID NO: 2509011 - RNA, 18 nt, Human
gucccacucaagccaagc

SEQ ID NO: 2509012 - RNA, 21 nt, Human
gucccacucaagccaagcagc

SEQ ID NO: 2509013 - RNA, 22 nt, Human
gucccacucaagccaagcagcc

SEQ ID NO: 2509014 - RNA, 15 nt, Human
gucccacucagucca

SEQ ID NO: 2509015 - RNA, 14 nt, Human
gucccacucagucc

SEQ ID NO: 2509016 - RNA, 14 nt, Human
guccagggcccuga

SEQ ID NO: 2509017 - RNA, 15 nt, Human
guccagggcccugag

SEQ ID NO: 2509018 - RNA, 16 nt, Human
guccagggcccugagc

SEQ ID NO: 2509019 - RNA, 17 nt, Human
guccagggcccugagcu

SEQ ID NO: 2509020 - RNA, 12 nt, Human
gucccacucaag

SEQ ID NO: 2509021 - RNA, 23 nt, Human
guccagggaagagaaagugauuu

SEQ ID NO: 2509022 - RNA, 13 nt, Human
guccagggaagag

SEQ ID NO: 2509023 - RNA, 20 nt, Human
guccaggcugccguggggcc

SEQ ID NO: 2509024 - RNA, 16 nt, Human
guccaggcugccgugg

SEQ ID NO: 2509025 - RNA, 14 nt, Human
guccaggcugccgu

SEQ ID NO: 2509026 - RNA, 13 nt, Human
guccagggaagcu

SEQ ID NO: 2509027 - RNA, 15 nt, Human
guccagggaagcugg

SEQ ID NO: 2509028 - RNA, 20 nt, Human
guccagggaagcuggccgag

SEQ ID NO: 2509029 - RNA, 21 nt, Human
guccagggagcauuuuccucc

SEQ ID NO: 2509030 - RNA, 13 nt, Human
guccaggcugccg

SEQ ID NO: 2509031 - RNA, 15 nt, Human
guccaggcacugaga

SEQ ID NO: 2509032 - RNA, 17 nt, Human
guccaggccccaaaacc

SEQ ID NO: 2509033 - RNA, 21 nt, Human
guccaggaugcuaacaucuaa

SEQ ID NO: 2509034 - RNA, 16 nt, Human
guccacccaggagccc

SEQ ID NO: 2509035 - RNA, 15 nt, Human
guccacccaggagcc

SEQ ID NO: 2509036 - RNA, 23 nt, Human
gucauguuggucaaaagcuggau

SEQ ID NO: 2509037 - RNA, 17 nt, Human
gucauguuccuucaaga

SEQ ID NO: 2509038 - RNA, 13 nt, Human
guccacccaggag

SEQ ID NO: 2509039 - RNA, 14 nt, Human
guccacccaggagc

SEQ ID NO: 2509040 - RNA, 15 nt, Human
gucaugcuuguguua

SEQ ID NO: 2509041 - RNA, 16 nt, Human
gucaugcccuccucuc

SEQ ID NO: 2509042 - RNA, 17 nt, Human
gucaugcccuccucucc

SEQ ID NO: 2509043 - RNA, 18 nt, Human
gucaugcccuccucuccc

SEQ ID NO: 2509044 - RNA, 11 nt, Human
gucaugugacc

SEQ ID NO: 2509045 - RNA, 15 nt, Human
gucaugugacaggua

SEQ ID NO: 2509046 - RNA, 15 nt, Human
gucauggcuuaaugu

SEQ ID NO: 2509047 - RNA, 22 nt, Human
gucauggcugugcccucuugau

SEQ ID NO: 2509048 - RNA, 20 nt, Human
gucauggcuuaauguuuauu

SEQ ID NO: 2509049 - RNA, 20 nt, Human
gucauguaagcugaaaauau

SEQ ID NO: 2509050 - RNA, 21 nt, Human
guccagcucuggaggggaggg

SEQ ID NO: 2509051 - RNA, 16 nt, Human
guccagcucuggaggg

SEQ ID NO: 2509052 - RNA, 14 nt, Human
guccagcucuggag

SEQ ID NO: 2509053 - RNA, 13 nt, Human
guccagcucugga

SEQ ID NO: 2509054 - RNA, 14 nt, Human
guccagacagccug

SEQ ID NO: 2509055 - RNA, 12 nt, Human
guccagacagcc

SEQ ID NO: 2509056 - RNA, 22 nt, Human
guccagaagaauauucaggacu

SEQ ID NO: 2509057 - RNA, 11 nt, Human
guccagacagc

SEQ ID NO: 2509058 - RNA, 12 nt, Human
guccagcucugg

SEQ ID NO: 2509059 - RNA, 15 nt, Human
guccagacagccugu

SEQ ID NO: 2509060 - RNA, 14 nt, Human
guccagcuccaacc

SEQ ID NO: 2509061 - RNA, 17 nt, Human
guccagcugagcgccag

SEQ ID NO: 2509062 - RNA, 18 nt, Human
guccaggaaaugugcaca

SEQ ID NO: 2509063 - RNA, 13 nt, Human
guccaggagccug

SEQ ID NO: 2509064 - RNA, 14 nt, Human
guccagcuugcucu

SEQ ID NO: 2509065 - RNA, 16 nt, Human
guccagcuugcucuuc

SEQ ID NO: 2509066 - RNA, 17 nt, Human
guccagcuugcucuuca

SEQ ID NO: 2509067 - RNA, 14 nt, Human
guccacuguguaua

SEQ ID NO: 2509068 - RNA, 20 nt, Human
guccacugucacuguuucuc

SEQ ID NO: 2509069 - RNA, 23 nt, Human
guccacuguguauagaaguagau

SEQ ID NO: 2509070 - RNA, 21 nt, Human
guccagaagaauauucaggac

SEQ ID NO: 2509071 - RNA, 19 nt, Human
guccagaagaauauucagg

SEQ ID NO: 2509072 - RNA, 17 nt, Human
guccagaagaauauuca

SEQ ID NO: 2509073 - RNA, 15 nt, Human
guccagaagaauauu

SEQ ID NO: 2509074 - RNA, 17 nt, Human
gucaagugcguccacga

SEQ ID NO: 2509075 - RNA, 18 nt, Human
gucaaggcugcuuagaau

SEQ ID NO: 2509076 - RNA, 19 nt, Human
gucaagugaaaaaggagga

SEQ ID NO: 2509077 - RNA, 16 nt, Human
gucaagugaaaaagga

SEQ ID NO: 2509078 - RNA, 18 nt, Human
gucaagugaaaaaggagg

SEQ ID NO: 2509079 - RNA, 17 nt, Human
gucaagaagaagaugga

SEQ ID NO: 2509080 - RNA, 13 nt, Human
gucaagcuccucc

SEQ ID NO: 2509081 - RNA, 14 nt, Human
gucaagcccaggag

SEQ ID NO: 2509082 - RNA, 11 nt, Human
gucaagcacuc

SEQ ID NO: 2509083 - RNA, 14 nt, Human
gucaagauuuugaa

SEQ ID NO: 2509084 - RNA, 15 nt, Human
gucaagcuccuccuc

SEQ ID NO: 2509085 - RNA, 17 nt, Human
gucaagcuccuccuccc

SEQ ID NO: 2509086 - RNA, 19 nt, Human
gucaagcuccuccucccug

SEQ ID NO: 2509087 - RNA, 20 nt, Human
gucaagcuccuccucccugc

SEQ ID NO: 2509088 - RNA, 21 nt, Human
gucaagcuccuccucccugca

SEQ ID NO: 2509089 - RNA, 15 nt, Human
gucaaggaguggcuu

SEQ ID NO: 2509090 - RNA, 19 nt, Human
gucaagagggucugaggaa

SEQ ID NO: 2509091 - RNA, 18 nt, Human
gucaagagggucugagga

SEQ ID NO: 2509092 - RNA, 12 nt, Human
guauuuguuugc

SEQ ID NO: 2509093 - RNA, 12 nt, Human
gucaacuucugg

SEQ ID NO: 2509094 - RNA, 23 nt, Human
guauuuguuugcauaggugaucu

SEQ ID NO: 2509095 - RNA, 17 nt, Human
gucaacuucuggcuccu

SEQ ID NO: 2509096 - RNA, 15 nt, Human
gucaacuucuggcuc

SEQ ID NO: 2509097 - RNA, 17 nt, Human
guauuuuaaaagaauga

SEQ ID NO: 2509098 - RNA, 16 nt, Human
guauuuuaaaagaaug

SEQ ID NO: 2509099 - RNA, 11 nt, Human
guauuugugac

SEQ ID NO: 2509100 - RNA, 20 nt, Human
guauuugggaagugaagacu

SEQ ID NO: 2509101 - RNA, 21 nt, Human
guauuugugacuaauuguaua

SEQ ID NO: 2509102 - RNA, 20 nt, Human
guauuugugacuaauuguau

SEQ ID NO: 2509103 - RNA, 18 nt, Human
guauuugugacuaauugu

SEQ ID NO: 2509104 - RNA, 14 nt, Human
guauuuguuaaugg

SEQ ID NO: 2509105 - RNA, 16 nt, Human
gucaccucagagacau

SEQ ID NO: 2509106 - RNA, 21 nt, Human
gucaccguggaccuuccugcc

SEQ ID NO: 2509107 - RNA, 20 nt, Human
gucaccguggaccuuccugc

SEQ ID NO: 2509108 - RNA, 19 nt, Human
gucaccguggaccuuccug

SEQ ID NO: 2509109 - RNA, 18 nt, Human
gucaccguggaccuuccu

SEQ ID NO: 2509110 - RNA, 23 nt, Human
gucaccggauccuggguggucug

SEQ ID NO: 2509111 - RNA, 14 nt, Human
gucaccucauggaa

SEQ ID NO: 2509112 - RNA, 20 nt, Human
gucaccugaagacucauucu

SEQ ID NO: 2509113 - RNA, 20 nt, Human
gucacccaggcuggagugca

SEQ ID NO: 2509114 - RNA, 20 nt, Human
gucacccaggcuggaguaca

SEQ ID NO: 2509115 - RNA, 23 nt, Human
gucaccaucuuaagagaugccuc

SEQ ID NO: 2509116 - RNA, 16 nt, Human
gucaccaucucaggcc

SEQ ID NO: 2509117 - RNA, 17 nt, Human
gucaccaucucaggcca

SEQ ID NO: 2509118 - RNA, 20 nt, Human
gucaccaucucaggccaccu

SEQ ID NO: 2509119 - RNA, 21 nt, Human
gucaccaucucaggccaccug

SEQ ID NO: 2509120 - RNA, 13 nt, Human
gucaccccggcca

SEQ ID NO: 2509121 - RNA, 15 nt, Human
gucaccccggccacc

SEQ ID NO: 2509122 - RNA, 16 nt, Human
gucacccuccaccucu

SEQ ID NO: 2509123 - RNA, 16 nt, Human
gucaccggauccuggg

SEQ ID NO: 2509124 - RNA, 17 nt, Human
gucaccggauccugggu

SEQ ID NO: 2509125 - RNA, 19 nt, Human
gucaccggauccugggugg

SEQ ID NO: 2509126 - RNA, 15 nt, Human
gucaauaaaauccau

SEQ ID NO: 2509127 - RNA, 14 nt, Human
gucaagugggaucu

SEQ ID NO: 2509128 - RNA, 16 nt, Human
gucaagugggaucugu

SEQ ID NO: 2509129 - RNA, 17 nt, Human
gucaaguuccuuugggu

SEQ ID NO: 2509130 - RNA, 21 nt, Human
gucaauaaaauccauacauuu

SEQ ID NO: 2509131 - RNA, 18 nt, Human
gucaaguugugcuuguuu

SEQ ID NO: 2509132 - RNA, 17 nt, Human
gucaaguugugcuuguu

SEQ ID NO: 2509133 - RNA, 16 nt, Human
gucaaguugugcuugu

SEQ ID NO: 2509134 - RNA, 15 nt, Human
gucaauuacaggaag

SEQ ID NO: 2509135 - RNA, 13 nt, Human
gucaauuacagga

SEQ ID NO: 2509136 - RNA, 16 nt, Human
gucaauuacaggaagu

SEQ ID NO: 2509137 - RNA, 18 nt, Human
gucaaugugcaguguagc

SEQ ID NO: 2509138 - RNA, 15 nt, Human
gucaccaucucaggc

SEQ ID NO: 2509139 - RNA, 15 nt, Human
gucaauguuuucagu

SEQ ID NO: 2509140 - RNA, 14 nt, Human
gucaaugugcagug

SEQ ID NO: 2509141 - RNA, 15 nt, Human
guauuacuucugcua

SEQ ID NO: 2509142 - RNA, 14 nt, Human
guauuacuucugcu

SEQ ID NO: 2509143 - RNA, 13 nt, Human
guauuacuucugc

SEQ ID NO: 2509144 - RNA, 22 nt, Human
guauuacacuguauuuguaucu

SEQ ID NO: 2509145 - RNA, 21 nt, Human
guauuacuagaagaugaauac

SEQ ID NO: 2509146 - RNA, 15 nt, Human
guagagugggagcug

SEQ ID NO: 2509147 - RNA, 23 nt, Human
guagagucaucuccaucagcugu

SEQ ID NO: 2509148 - RNA, 14 nt, Human
guagagguuuuguu

SEQ ID NO: 2509149 - RNA, 15 nt, Human
guagagucaucucca

SEQ ID NO: 2509150 - RNA, 13 nt, Human
guagagugggagc

SEQ ID NO: 2509151 - RNA, 15 nt, Human
guauuauguguguuu

SEQ ID NO: 2509152 - RNA, 14 nt, Human
guauuaugcuucuu

SEQ ID NO: 2509153 - RNA, 12 nt, Human
guauuaugcuuc

SEQ ID NO: 2509154 - RNA, 20 nt, Human
guauuauaaauuauguuuau

SEQ ID NO: 2509155 - RNA, 19 nt, Human
guauuauaggccaaacugg

SEQ ID NO: 2509156 - RNA, 14 nt, Human
guauuauuuuccaa

SEQ ID NO: 2509157 - RNA, 15 nt, Human
guauuauucugcagc

SEQ ID NO: 2509158 - RNA, 17 nt, Human
guauuaugcuucuugga

SEQ ID NO: 2509159 - RNA, 15 nt, Human
guauuaugcuucuug

SEQ ID NO: 2509160 - RNA, 16 nt, Human
guauuaugucucuucu

SEQ ID NO: 2509161 - RNA, 21 nt, Human
guauuauguacucuacugaua

SEQ ID NO: 2509162 - RNA, 16 nt, Human
guauuauucugcagca

SEQ ID NO: 2509163 - RNA, 22 nt, Human
guauuagauguucucuaucauu

SEQ ID NO: 2509164 - RNA, 21 nt, Human
guauuagauguucucuaucau

SEQ ID NO: 2509165 - RNA, 18 nt, Human
guauuagauguucucuau

SEQ ID NO: 2509166 - RNA, 17 nt, Human
guauuagauguucucua

SEQ ID NO: 2509167 - RNA, 15 nt, Human
guauuagauguucuc

SEQ ID NO: 2509168 - RNA, 14 nt, Human
guauuagauguucu

SEQ ID NO: 2509169 - RNA, 13 nt, Human
guauuagauguuc

SEQ ID NO: 2509170 - RNA, 12 nt, Human
guauuagauguu

SEQ ID NO: 2509171 - RNA, 14 nt, Human
guauuauaccuuuu

SEQ ID NO: 2509172 - RNA, 19 nt, Human
guauuauaaauuauguuua

SEQ ID NO: 2509173 - RNA, 18 nt, Human
guauuauaaauuauguuu

SEQ ID NO: 2509174 - RNA, 12 nt, Human
guauuauaaauu

SEQ ID NO: 2509175 - RNA, 22 nt, Human
guauuagggguaauauauugcu

SEQ ID NO: 2509176 - RNA, 19 nt, Human
guauuagggguaauauauu

SEQ ID NO: 2509177 - RNA, 22 nt, Human
guauuugcuuuuuuguuuuggc

SEQ ID NO: 2509178 - RNA, 12 nt, Human
guauuugcuuuu

SEQ ID NO: 2509179 - RNA, 13 nt, Human
guauuugcaguuc

SEQ ID NO: 2509180 - RNA, 21 nt, Human
guauuugagaguucuaaauuu

SEQ ID NO: 2509181 - RNA, 19 nt, Human
guauuugagaguucuaaau

SEQ ID NO: 2509182 - RNA, 14 nt, Human
guauuugaaacuga

SEQ ID NO: 2509183 - RNA, 22 nt, Human
guauuucuaugaaauauuaugu

SEQ ID NO: 2509184 - RNA, 12 nt, Human
guauuucccagc

SEQ ID NO: 2509185 - RNA, 16 nt, Human
guauuuccagugcaau

SEQ ID NO: 2509186 - RNA, 17 nt, Human
guauuucuaugaaauau

SEQ ID NO: 2509187 - RNA, 13 nt, Human
guauuucaaauug

SEQ ID NO: 2509188 - RNA, 11 nt, Human
guauuucagac

SEQ ID NO: 2509189 - RNA, 23 nt, Human
guauuuauuuuccuccccagcag

SEQ ID NO: 2509190 - RNA, 19 nt, Human
guauuuauuuaguauuuau

SEQ ID NO: 2509191 - RNA, 18 nt, Human
guauuuauuuaaaagauu

SEQ ID NO: 2509192 - RNA, 14 nt, Human
guauuuauuuaaaa

SEQ ID NO: 2509193 - RNA, 13 nt, Human
guauuuauuuaaa

SEQ ID NO: 2509194 - RNA, 21 nt, Human
guauuuauuuaaaagauucau

SEQ ID NO: 2509195 - RNA, 17 nt, Human
guauuuauuuuccuccc

SEQ ID NO: 2509196 - RNA, 18 nt, Human
guauuuauuuuccucccc

SEQ ID NO: 2509197 - RNA, 19 nt, Human
guauuuauuuuccucccca

SEQ ID NO: 2509198 - RNA, 20 nt, Human
guauuuauuuuccuccccag

SEQ ID NO: 2509199 - RNA, 22 nt, Human
guauuuauuuuccuccccagca

SEQ ID NO: 2509200 - RNA, 22 nt, Human
guauuuauucaauaaaguauuu

SEQ ID NO: 2509201 - RNA, 20 nt, Human
guauuuauucaauaaaguau

SEQ ID NO: 2509202 - RNA, 19 nt, Human
guauuuauucaauaaagua

SEQ ID NO: 2509203 - RNA, 17 nt, Human
guauuuauucaauaaag

SEQ ID NO: 2509204 - RNA, 23 nt, Human
guauuuauuccauauucauguaa

SEQ ID NO: 2509205 - RNA, 22 nt, Human
guauuuauuccauauucaugua

SEQ ID NO: 2509206 - RNA, 21 nt, Human
guauuuauuccauauucaugu

SEQ ID NO: 2509207 - RNA, 15 nt, Human
guauuuauuccauau

SEQ ID NO: 2509208 - RNA, 23 nt, Human
guauuuauucaauaaaguauuua

SEQ ID NO: 2509209 - RNA, 13 nt, Human
guauuuauuccau

SEQ ID NO: 2509210 - RNA, 22 nt, Human
guauucgugcagcauaugagga

SEQ ID NO: 2509211 - RNA, 16 nt, Human
guauuuauucaauaaa

SEQ ID NO: 2509212 - RNA, 14 nt, Human
guauuuauucaaua

SEQ ID NO: 2509213 - RNA, 13 nt, Human
guauuuauucaau

SEQ ID NO: 2509214 - RNA, 20 nt, Human
guauuccuuuuguguacagu

SEQ ID NO: 2509215 - RNA, 23 nt, Human
guauuccuuuuguguacagugug

SEQ ID NO: 2509216 - RNA, 18 nt, Human
guauuccuuaaauaaacu

SEQ ID NO: 2509217 - RNA, 14 nt, Human
guauuccugccucc

SEQ ID NO: 2509218 - RNA, 19 nt, Human
guauucccauuagaccaag

SEQ ID NO: 2509219 - RNA, 11 nt, Human
guauuuauuca

SEQ ID NO: 2509220 - RNA, 19 nt, Human
guauuccagaccugaagaa

SEQ ID NO: 2509221 - RNA, 22 nt, Human
guauucagugagggucuucuua

SEQ ID NO: 2509222 - RNA, 18 nt, Human
guauucaauauccuuugc

SEQ ID NO: 2509223 - RNA, 13 nt, Human
gucucgcucuguc

SEQ ID NO: 2509224 - RNA, 21 nt, Human
gucucgcugaugcugggcugg

SEQ ID NO: 2509225 - RNA, 20 nt, Human
gucucgcugaugcugggcug

SEQ ID NO: 2509226 - RNA, 19 nt, Human
gucucgcugaugcugggcu

SEQ ID NO: 2509227 - RNA, 18 nt, Human
gucucgcugaugcugggc

SEQ ID NO: 2509228 - RNA, 18 nt, Human
gucucgcucugucaccca

SEQ ID NO: 2509229 - RNA, 17 nt, Human
gucucgcugaugcuggg

SEQ ID NO: 2509230 - RNA, 22 nt, Human
gucucacuugugcaguguugac

SEQ ID NO: 2509231 - RNA, 24 nt, Human
gucucagacucuuuuuguaccugg

SEQ ID NO: 2509232 - RNA, 23 nt, Human
gucucacuguugcccaggcuggc

SEQ ID NO: 2509233 - RNA, 22 nt, Human
gucucacuguugcccaggcugg

SEQ ID NO: 2509234 - RNA, 21 nt, Human
gucucacuguugcccaggcug

SEQ ID NO: 2509235 - RNA, 20 nt, Human
gucucacuguugcccaggcu

SEQ ID NO: 2509236 - RNA, 19 nt, Human
gucucacuguugcccaggc

SEQ ID NO: 2509237 - RNA, 18 nt, Human
gucucacuguugcccagg

SEQ ID NO: 2509238 - RNA, 17 nt, Human
gucucacuguugcccag

SEQ ID NO: 2509239 - RNA, 16 nt, Human
gucucacuguugccca

SEQ ID NO: 2509240 - RNA, 23 nt, Human
gucucacuauguugcccaggcag

SEQ ID NO: 2509241 - RNA, 13 nt, Human
gucucacuguugc

SEQ ID NO: 2509242 - RNA, 21 nt, Human
gucucacuauguugcccaggc

SEQ ID NO: 2509243 - RNA, 20 nt, Human
gucucacuauguugcccagg

SEQ ID NO: 2509244 - RNA, 17 nt, Human
guccuuaccagcagagc

SEQ ID NO: 2509245 - RNA, 16 nt, Human
guccuuaccagcagag

SEQ ID NO: 2509246 - RNA, 15 nt, Human
guccuuaccagcaga

SEQ ID NO: 2509247 - RNA, 17 nt, Human
guccuguggcaggcagc

SEQ ID NO: 2509248 - RNA, 16 nt, Human
guccuguggcaggcag

SEQ ID NO: 2509249 - RNA, 21 nt, Human
guccuguggcaggcagcgcca

SEQ ID NO: 2509250 - RNA, 15 nt, Human
guccuguggcaggca

SEQ ID NO: 2509251 - RNA, 21 nt, Human
guccuguguuuuuucugccac

SEQ ID NO: 2509252 - RNA, 23 nt, Human
guccuuaaacagggcaucuccag

SEQ ID NO: 2509253 - RNA, 20 nt, Human
guccuuaaugauccguucca

SEQ ID NO: 2509254 - RNA, 17 nt, Human
gucguggggugugcugg

SEQ ID NO: 2509255 - RNA, 21 nt, Human
gucguggggugugcugggagc

SEQ ID NO: 2509256 - RNA, 19 nt, Human
gucguggggugugcuggga

SEQ ID NO: 2509257 - RNA, 14 nt, Human
gucgugggugugug

SEQ ID NO: 2509258 - RNA, 13 nt, Human
gucguugugaggg

SEQ ID NO: 2509259 - RNA, 19 nt, Human
gucguugacuuuagggacu

SEQ ID NO: 2509260 - RNA, 17 nt, Human
gucguugacuuuaggga

SEQ ID NO: 2509261 - RNA, 12 nt, Human
gucuaaaaacac

SEQ ID NO: 2509262 - RNA, 14 nt, Human
gucuaaaaauaaaa

SEQ ID NO: 2509263 - RNA, 13 nt, Human
gucuaaaacaaua

SEQ ID NO: 2509264 - RNA, 14 nt, Human
gucuaaaacaauaa

SEQ ID NO: 2509265 - RNA, 16 nt, Human
gucuaaacaaugcuga

SEQ ID NO: 2509266 - RNA, 20 nt, Human
gucuaaaauuuuuaaggacu

SEQ ID NO: 2509267 - RNA, 23 nt, Human
gucuaagauaguaacaaugaaga

SEQ ID NO: 2509268 - RNA, 14 nt, Human
gucuaaagagcuuu

SEQ ID NO: 2509269 - RNA, 10 nt, Human
gucuaaacug

SEQ ID NO: 2509270 - RNA, 21 nt, Human
gucuaaacaaugcugauuugg

SEQ ID NO: 2509271 - RNA, 17 nt, Human
gucuacacuaagagaga

SEQ ID NO: 2509272 - RNA, 21 nt, Human
gucuaaucuagauaucgacuu

SEQ ID NO: 2509273 - RNA, 20 nt, Human
gucuaaggaugcuaaaccuu

SEQ ID NO: 2509274 - RNA, 23 nt, Human
gucuacacuaagagagaaugaga

SEQ ID NO: 2509275 - RNA, 15 nt, Human
gucuacacugugcug

SEQ ID NO: 2509276 - RNA, 21 nt, Human
gucuacccagagaagccccuu

SEQ ID NO: 2509277 - RNA, 20 nt, Human
gucuacccagagaagccccu

SEQ ID NO: 2509278 - RNA, 17 nt, Human
gucuacccagagaagcc

SEQ ID NO: 2509279 - RNA, 13 nt, Human
gucuacccagaga

SEQ ID NO: 2509280 - RNA, 19 nt, Human
gucugaggaauccagaccc

SEQ ID NO: 2509281 - RNA, 18 nt, Human
gucugaggaauccagacc

SEQ ID NO: 2509282 - RNA, 13 nt, Human
gucucuuccccuc

SEQ ID NO: 2509283 - RNA, 14 nt, Human
gucugacccucucc

SEQ ID NO: 2509284 - RNA, 17 nt, Human
gucucuucuccacugga

SEQ ID NO: 2509285 - RNA, 15 nt, Human
gucugacccacugcu

SEQ ID NO: 2509286 - RNA, 14 nt, Human
gucucuucuccacu

SEQ ID NO: 2509287 - RNA, 11 nt, Human
gucucuucaga

SEQ ID NO: 2509288 - RNA, 16 nt, Human
gucucuucuccacugg

SEQ ID NO: 2509289 - RNA, 15 nt, Human
gucucuucuccacug

SEQ ID NO: 2509290 - RNA, 14 nt, Human
gucugacccacugc

SEQ ID NO: 2509291 - RNA, 13 nt, Human
gucugacccacug

SEQ ID NO: 2509292 - RNA, 16 nt, Human
gucucucaugaaccuc

SEQ ID NO: 2509293 - RNA, 15 nt, Human
gucucucaugaaccu

SEQ ID NO: 2509294 - RNA, 12 nt, Human
gucucucagaau

SEQ ID NO: 2509295 - RNA, 14 nt, Human
gucucugugcuuug

SEQ ID NO: 2509296 - RNA, 15 nt, Human
gucucugugagacuc

SEQ ID NO: 2509297 - RNA, 16 nt, Human
gucucggacuaagccu

SEQ ID NO: 2509298 - RNA, 22 nt, Human
gucucggugguaccaggucucc

SEQ ID NO: 2509299 - RNA, 16 nt, Human
gucucggugguaccag

SEQ ID NO: 2509300 - RNA, 23 nt, Human
gucucggguggcuagucagagag

SEQ ID NO: 2509301 - RNA, 16 nt, Human
gucucgcuuuguugcc

SEQ ID NO: 2509302 - RNA, 17 nt, Human
gucucgcuuuguugccc

SEQ ID NO: 2509303 - RNA, 19 nt, Human
gucucgcuuuguugcccag

SEQ ID NO: 2509304 - RNA, 23 nt, Human
gucucgcuuuguugcccaggcug

SEQ ID NO: 2509305 - RNA, 20 nt, Human
gucucuaucauuaaaguucu

SEQ ID NO: 2509306 - RNA, 19 nt, Human
gucucuaucauuaaaguuc

SEQ ID NO: 2509307 - RNA, 18 nt, Human
gucucuaucauuaaaguu

SEQ ID NO: 2509308 - RNA, 17 nt, Human
gucucuaucauuaaagu

SEQ ID NO: 2509309 - RNA, 17 nt, Human
gucucuaugccagcuca

SEQ ID NO: 2509310 - RNA, 23 nt, Human
gucucuaugccagcucaguccca

SEQ ID NO: 2509311 - RNA, 16 nt, Human
gucucuaucauuaaag

SEQ ID NO: 2509312 - RNA, 21 nt, Human
gucugauucccaagcucugcu

SEQ ID NO: 2509313 - RNA, 20 nt, Human
gucugauucccaagcucugc

SEQ ID NO: 2509314 - RNA, 15 nt, Human
gucugcaagaaccug

SEQ ID NO: 2509315 - RNA, 23 nt, Human
gucugcaacuuuaagcagcucuu

SEQ ID NO: 2509316 - RNA, 22 nt, Human
gucugcaacuuuaagcagcucu

SEQ ID NO: 2509317 - RNA, 20 nt, Human
gucugcaacuuuaagcagcu

SEQ ID NO: 2509318 - RNA, 15 nt, Human
gucugcaacuuuaag

SEQ ID NO: 2509319 - RNA, 23 nt, Human
gucugcaaaaugaggaauguaua

SEQ ID NO: 2509320 - RNA, 21 nt, Human
gucugcaaaaugaggaaugua

SEQ ID NO: 2509321 - RNA, 16 nt, Human
gucugauuugugauga

SEQ ID NO: 2509322 - RNA, 24 nt, Human
gucugaucugugcuuuccagcuca

SEQ ID NO: 2509323 - RNA, 23 nt, Human
gucugaucugugcuuuccagcuc

SEQ ID NO: 2509324 - RNA, 22 nt, Human
gucugaucugugcuuuccagcu

SEQ ID NO: 2509325 - RNA, 21 nt, Human
gucugaucugugcuuuccagc

SEQ ID NO: 2509326 - RNA, 20 nt, Human
gucugauuggcucacccaag

SEQ ID NO: 2509327 - RNA, 22 nt, Human
gucugauuucaggauacucugu

SEQ ID NO: 2509328 - RNA, 20 nt, Human
gucugcauuucgguggcuag

SEQ ID NO: 2509329 - RNA, 21 nt, Human
gucugcauuucgguggcuagu

SEQ ID NO: 2509330 - RNA, 16 nt, Human
gucugcaggugcacca

SEQ ID NO: 2509331 - RNA, 13 nt, Human
gucugcaggcagg

SEQ ID NO: 2509332 - RNA, 19 nt, Human
gucugcagcccggcgccac

SEQ ID NO: 2509333 - RNA, 22 nt, Human
gucugcaggauugauuaugcag

SEQ ID NO: 2509334 - RNA, 12 nt, Human
gucugcaggcag

SEQ ID NO: 2509335 - RNA, 17 nt, Human
gucugccacacaaacgu

SEQ ID NO: 2509336 - RNA, 21 nt, Human
gucugccaauuuuugccuuca

SEQ ID NO: 2509337 - RNA, 18 nt, Human
gucugccaccauccugcu

SEQ ID NO: 2509338 - RNA, 18 nt, Human
gucugccaauuuuugccu

SEQ ID NO: 2509339 - RNA, 19 nt, Human
gucugcaagucagaggaug

SEQ ID NO: 2509340 - RNA, 18 nt, Human
gucugcaagucagaggau

SEQ ID NO: 2509341 - RNA, 17 nt, Human
gucugcaagucagagga

SEQ ID NO: 2509342 - RNA, 16 nt, Human
gucugcaagucagagg

SEQ ID NO: 2509343 - RNA, 15 nt, Human
gucugcaagucagag

SEQ ID NO: 2509344 - RNA, 14 nt, Human
gucugcaagucaga

SEQ ID NO: 2509345 - RNA, 13 nt, Human
gucugcaagucag

SEQ ID NO: 2509346 - RNA, 22 nt, Human
gucugcaagauucugaaacauu

SEQ ID NO: 2509347 - RNA, 15 nt, Human
gucugcacccagggg

SEQ ID NO: 2509348 - RNA, 13 nt, Human
gucugcacccagg

SEQ ID NO: 2509349 - RNA, 16 nt, Human
gucugcacaugcagcu

SEQ ID NO: 2509350 - RNA, 21 nt, Human
gucugcaagucagaggauggc

SEQ ID NO: 2509351 - RNA, 22 nt, Human
gucugcacucuaacccuaggca

SEQ ID NO: 2509352 - RNA, 17 nt, Human
gucugcacccaggggug

SEQ ID NO: 2509353 - RNA, 18 nt, Human
gucugcagcccggcgcca

SEQ ID NO: 2509354 - RNA, 19 nt, Human
gucugauucccaagcucug

SEQ ID NO: 2509355 - RNA, 18 nt, Human
gucugauucccaagcucu

SEQ ID NO: 2509356 - RNA, 17 nt, Human
gucugaucugugcuuuc

SEQ ID NO: 2509357 - RNA, 15 nt, Human
gucugaucugugcuu

SEQ ID NO: 2509358 - RNA, 13 nt, Human
gucugaucugugc

SEQ ID NO: 2509359 - RNA, 21 nt, Human
gucugaucgugacgcugaaua

SEQ ID NO: 2509360 - RNA, 20 nt, Human
gucugaucgugacgcugaau

SEQ ID NO: 2509361 - RNA, 19 nt, Human
gucugaucgugacgcugaa

SEQ ID NO: 2509362 - RNA, 14 nt, Human
gucugauauucaaa

SEQ ID NO: 2509363 - RNA, 17 nt, Human
gucugauucccaagcuc

SEQ ID NO: 2509364 - RNA, 14 nt, Human
gucugacugugugu

SEQ ID NO: 2509365 - RNA, 21 nt, Human
gucugaggaauccagacccgg

SEQ ID NO: 2509366 - RNA, 22 nt, Human
gucugaggggcaacugagucug

SEQ ID NO: 2509367 - RNA, 21 nt, Human
gucugagucauggccgggugg

SEQ ID NO: 2509368 - RNA, 14 nt, Human
gucugagucauggc

SEQ ID NO: 2509369 - RNA, 14 nt, Human
gucugagugaaccu

SEQ ID NO: 2509370 - RNA, 22 nt, Human
gucccagugggaggggcaggcu

SEQ ID NO: 2509371 - RNA, 21 nt, Human
gucccagugggaggggcaggc

SEQ ID NO: 2509372 - RNA, 20 nt, Human
gucccagugggaggggcagg

SEQ ID NO: 2509373 - RNA, 19 nt, Human
gucccagugggaggggcag

SEQ ID NO: 2509374 - RNA, 18 nt, Human
gucccagugggaggggca

SEQ ID NO: 2509375 - RNA, 18 nt, Human
gucccagugggaggcgcg

SEQ ID NO: 2509376 - RNA, 17 nt, Human
gucccagugggaggcgc

SEQ ID NO: 2509377 - RNA, 15 nt, Human
gucccagugggaggc

SEQ ID NO: 2509378 - RNA, 14 nt, Human
gucccagugggagg

SEQ ID NO: 2509379 - RNA, 11 nt, Human
gucccaguggg

SEQ ID NO: 2509380 - RNA, 10 nt, Human
gucccagugg

SEQ ID NO: 2509381 - RNA, 17 nt, Human
gucccagucucuggcag

SEQ ID NO: 2509382 - RNA, 17 nt, Human
gucccagguuaucuggg

SEQ ID NO: 2509383 - RNA, 19 nt, Human
gucccaggagcugcccaga

SEQ ID NO: 2509384 - RNA, 21 nt, Human
gucccaggcugagccucaguc

SEQ ID NO: 2509385 - RNA, 12 nt, Human
gucccagugccg

SEQ ID NO: 2509386 - RNA, 18 nt, Human
gucccauaggcccaguga

SEQ ID NO: 2509387 - RNA, 23 nt, Human
gucccagugggaggggcaggcug

SEQ ID NO: 2509388 - RNA, 16 nt, Human
gucccauaggcccagu

SEQ ID NO: 2509389 - RNA, 15 nt, Human
gucccuggggcuagg

SEQ ID NO: 2509390 - RNA, 17 nt, Human
gucccugguggcagcuc

SEQ ID NO: 2509391 - RNA, 13 nt, Human
guccuacucugug

SEQ ID NO: 2509392 - RNA, 16 nt, Human
gucccugguggcagcu

SEQ ID NO: 2509393 - RNA, 22 nt, Human
gucccuggggcuagggggagcc

SEQ ID NO: 2509394 - RNA, 19 nt, Human
gucccugggggaagcccug

SEQ ID NO: 2509395 - RNA, 20 nt, Human
gucccugggggaagcccugg

SEQ ID NO: 2509396 - RNA, 21 nt, Human
gucccugggggaagcccugga

SEQ ID NO: 2509397 - RNA, 22 nt, Human
gucccugggggaagcccuggau

SEQ ID NO: 2509398 - RNA, 23 nt, Human
gucccugggggaagcccuggauu

SEQ ID NO: 2509399 - RNA, 23 nt, Human
guccuacucugugucaggugggg

SEQ ID NO: 2509400 - RNA, 15 nt, Human
guccuacucuguguc

SEQ ID NO: 2509401 - RNA, 15 nt, Human
gucccugguaauaag

SEQ ID NO: 2509402 - RNA, 23 nt, Human
guccuagaaauuccccacccuga

SEQ ID NO: 2509403 - RNA, 13 nt, Human
guccucacacuca

SEQ ID NO: 2509404 - RNA, 20 nt, Human
guccucaaggggccauccug

SEQ ID NO: 2509405 - RNA, 19 nt, Human
guccucaaggggccauccu

SEQ ID NO: 2509406 - RNA, 22 nt, Human
guccucaccccuguccucacug

SEQ ID NO: 2509407 - RNA, 21 nt, Human
guccucaccccuguccucacu

SEQ ID NO: 2509408 - RNA, 20 nt, Human
guccucaccccuguccucac

SEQ ID NO: 2509409 - RNA, 17 nt, Human
guccucaccccuguccu

SEQ ID NO: 2509410 - RNA, 15 nt, Human
guccucaccccuguc

SEQ ID NO: 2509411 - RNA, 14 nt, Human
guccucaccccugu

SEQ ID NO: 2509412 - RNA, 13 nt, Human
guccucaccacau

SEQ ID NO: 2509413 - RNA, 18 nt, Human
guccucacaucuuucaca

SEQ ID NO: 2509414 - RNA, 18 nt, Human
guccucacggugccuuuu

SEQ ID NO: 2509415 - RNA, 23 nt, Human
guccucaccccuguccucacugc

SEQ ID NO: 2509416 - RNA, 14 nt, Human
guccucacucccag

SEQ ID NO: 2509417 - RNA, 16 nt, Human
guccucacucccaguc

SEQ ID NO: 2509418 - RNA, 17 nt, Human
guccucacucccagucc

SEQ ID NO: 2509419 - RNA, 22 nt, Human
guccuaggccacaccaucuccu

SEQ ID NO: 2509420 - RNA, 23 nt, Human
guccuagcuugggaggcuucccc

SEQ ID NO: 2509421 - RNA, 12 nt, Human
guccuaggagua

SEQ ID NO: 2509422 - RNA, 19 nt, Human
guccuaggaguauccucau

SEQ ID NO: 2509423 - RNA, 18 nt, Human
guccuagccacucaggag

SEQ ID NO: 2509424 - RNA, 20 nt, Human
guccuagcugcacagggcag

SEQ ID NO: 2509425 - RNA, 19 nt, Human
guccuagccacucaggagg

SEQ ID NO: 2509426 - RNA, 12 nt, Human
guccucagccuu

SEQ ID NO: 2509427 - RNA, 14 nt, Human
guccucagccuugc

SEQ ID NO: 2509428 - RNA, 21 nt, Human
guccucacugcucccugaagc

SEQ ID NO: 2509429 - RNA, 20 nt, Human
guccucacugcucccugaag

SEQ ID NO: 2509430 - RNA, 20 nt, Human
guccucagagaauuucuacc

SEQ ID NO: 2509431 - RNA, 19 nt, Human
guccucacugcucccugaa

SEQ ID NO: 2509432 - RNA, 18 nt, Human
guccucacugcucccuga

SEQ ID NO: 2509433 - RNA, 18 nt, Human
guccucacucccagucca

SEQ ID NO: 2509434 - RNA, 16 nt, Human
guccucagccuugcca

SEQ ID NO: 2509435 - RNA, 20 nt, Human
guccucagccuugccagaga

SEQ ID NO: 2509436 - RNA, 21 nt, Human
guccucagccuugccagagau

SEQ ID NO: 2509437 - RNA, 13 nt, Human
guccucagcuucu

SEQ ID NO: 2509438 - RNA, 17 nt, Human
guccucagcuucuuaau

SEQ ID NO: 2509439 - RNA, 15 nt, Human
guccucagguggcca

SEQ ID NO: 2509440 - RNA, 14 nt, Human
guccucagguggcc

SEQ ID NO: 2509441 - RNA, 13 nt, Human
guccuccagaagc

SEQ ID NO: 2509442 - RNA, 14 nt, Human
guccuccagaagcc

SEQ ID NO: 2509443 - RNA, 18 nt, Human
guccuccagaagccucug

SEQ ID NO: 2509444 - RNA, 19 nt, Human
guccuccagaagccucugg

SEQ ID NO: 2509445 - RNA, 20 nt, Human
guccuccagaagccucuggc

SEQ ID NO: 2509446 - RNA, 21 nt, Human
guccuccagaagccucuggcu

SEQ ID NO: 2509447 - RNA, 22 nt, Human
guccuccagaagccucuggcua

SEQ ID NO: 2509448 - RNA, 21 nt, Human
guccuccaacaccaagcacag

SEQ ID NO: 2509449 - RNA, 22 nt, Human
guccuccaacaccaagcacagc

SEQ ID NO: 2509450 - RNA, 14 nt, Human
guccuccacaauaa

SEQ ID NO: 2509451 - RNA, 14 nt, Human
guccuccaagccag

SEQ ID NO: 2509452 - RNA, 23 nt, Human
guccucagguggccaugccucag

SEQ ID NO: 2509453 - RNA, 17 nt, Human
guccucagguggccaug

SEQ ID NO: 2509454 - RNA, 16 nt, Human
guccucagguggccau

SEQ ID NO: 2509455 - RNA, 18 nt, Human
guccuggugcucucugcc

SEQ ID NO: 2509456 - RNA, 17 nt, Human
guccuggugcucucugc

SEQ ID NO: 2509457 - RNA, 19 nt, Human
guccuggugcucucugcca

SEQ ID NO: 2509458 - RNA, 16 nt, Human
guccuggugcucucug

SEQ ID NO: 2509459 - RNA, 15 nt, Human
guccuggugcucucu

SEQ ID NO: 2509460 - RNA, 14 nt, Human
guccuggugcucuc

SEQ ID NO: 2509461 - RNA, 12 nt, Human
guccugggcugg

SEQ ID NO: 2509462 - RNA, 11 nt, Human
guccuggugcu

SEQ ID NO: 2509463 - RNA, 16 nt, Human
guccuggugucacuua

SEQ ID NO: 2509464 - RNA, 15 nt, Human
guccuguacauugug

SEQ ID NO: 2509465 - RNA, 13 nt, Human
guccuggugucac

SEQ ID NO: 2509466 - RNA, 11 nt, Human
guccugguguc

SEQ ID NO: 2509467 - RNA, 23 nt, Human
guccuguaguugcguggacucug

SEQ ID NO: 2509468 - RNA, 21 nt, Human
guccuguaguugcguggacuc

SEQ ID NO: 2509469 - RNA, 13 nt, Human
guccugucagugc

SEQ ID NO: 2509470 - RNA, 19 nt, Human
guccugucagugccgccgc

SEQ ID NO: 2509471 - RNA, 16 nt, Human
guccugucagugccgc

SEQ ID NO: 2509472 - RNA, 15 nt, Human
guccugucagugccg

SEQ ID NO: 2509473 - RNA, 14 nt, Human
guccugucagugcc

SEQ ID NO: 2509474 - RNA, 22 nt, Human
guccugucagugccgccgccuc

SEQ ID NO: 2509475 - RNA, 21 nt, Human
guccugucagugccgccgccu

SEQ ID NO: 2509476 - RNA, 18 nt, Human
guccuguccacacccagc

SEQ ID NO: 2509477 - RNA, 15 nt, Human
guccugugaauuucu

SEQ ID NO: 2509478 - RNA, 19 nt, Human
guccugugaaugccacugc

SEQ ID NO: 2509479 - RNA, 22 nt, Human
guccuguccacacccagcucag

SEQ ID NO: 2509480 - RNA, 19 nt, Human
guccuguccacacccagcu

SEQ ID NO: 2509481 - RNA, 18 nt, Human
guccugugaaugccacug

SEQ ID NO: 2509482 - RNA, 19 nt, Human
guccugggcgcccuggaag

SEQ ID NO: 2509483 - RNA, 17 nt, Human
guccugggcgcccugga

SEQ ID NO: 2509484 - RNA, 16 nt, Human
guccugggcgcccugg

SEQ ID NO: 2509485 - RNA, 14 nt, Human
guccugggcgcccu

SEQ ID NO: 2509486 - RNA, 19 nt, Human
guccuggggaaccugaccc

SEQ ID NO: 2509487 - RNA, 20 nt, Human
guccuggggaaccugacccc

SEQ ID NO: 2509488 - RNA, 23 nt, Human
guccugggcgcccuggaagccgg

SEQ ID NO: 2509489 - RNA, 20 nt, Human
guccugggcgcccuggaagc

SEQ ID NO: 2509490 - RNA, 14 nt, Human
guccuggggccucg

SEQ ID NO: 2509491 - RNA, 22 nt, Human
guccuggggccucggagccuca

SEQ ID NO: 2509492 - RNA, 15 nt, Human
guccuggggcucugu

SEQ ID NO: 2509493 - RNA, 16 nt, Human
guccuggggcucugug

SEQ ID NO: 2509494 - RNA, 17 nt, Human
guccuggggcucugugc

SEQ ID NO: 2509495 - RNA, 18 nt, Human
guccugggagugagcugg

SEQ ID NO: 2509496 - RNA, 17 nt, Human
guccugggagugagcug

SEQ ID NO: 2509497 - RNA, 13 nt, Human
guccugggccugc

SEQ ID NO: 2509498 - RNA, 14 nt, Human
guccugggccugca

SEQ ID NO: 2509499 - RNA, 17 nt, Human
guccugggccugcagaa

SEQ ID NO: 2509500 - RNA, 19 nt, Human
guccugggagugagcuggu

SEQ ID NO: 2509501 - RNA, 19 nt, Human
guccuccccuugggcggcu

SEQ ID NO: 2509502 - RNA, 18 nt, Human
guccuccccuugggcggc

SEQ ID NO: 2509503 - RNA, 15 nt, Human
guccuccccuugggc

SEQ ID NO: 2509504 - RNA, 14 nt, Human
guccuccccuuggg

SEQ ID NO: 2509505 - RNA, 12 nt, Human
guccucccgggc

SEQ ID NO: 2509506 - RNA, 21 nt, Human
guccucccgggcccucccuug

SEQ ID NO: 2509507 - RNA, 17 nt, Human
guccucccgggcccucc

SEQ ID NO: 2509508 - RNA, 16 nt, Human
guccucccgggcccuc

SEQ ID NO: 2509509 - RNA, 15 nt, Human
guccucccgggcccu

SEQ ID NO: 2509510 - RNA, 22 nt, Human
guccucccgggcccucccuugg

SEQ ID NO: 2509511 - RNA, 15 nt, Human
guccuggccauccca

SEQ ID NO: 2509512 - RNA, 16 nt, Human
guccuggccaucccac

SEQ ID NO: 2509513 - RNA, 17 nt, Human
guccuggccuggcuucu

SEQ ID NO: 2509514 - RNA, 14 nt, Human
guccuggccuggcu

SEQ ID NO: 2509515 - RNA, 17 nt, Human
guccuggccaucccaca

SEQ ID NO: 2509516 - RNA, 18 nt, Human
guccuggccaucccacaa

SEQ ID NO: 2509517 - RNA, 17 nt, Human
guccuggcaugggaaug

SEQ ID NO: 2509518 - RNA, 16 nt, Human
guccugggagugagcu

SEQ ID NO: 2509519 - RNA, 15 nt, Human
guccugggagugagc

SEQ ID NO: 2509520 - RNA, 20 nt, Human
guccuggccuggcuucuccu

SEQ ID NO: 2509521 - RNA, 11 nt, Human
guccuggcucc

SEQ ID NO: 2509522 - RNA, 14 nt, Human
guccuggcuccuga

SEQ ID NO: 2509523 - RNA, 17 nt, Human
guccuggcuccugaggg

SEQ ID NO: 2509524 - RNA, 19 nt, Human
guccuggcuccugaggggc

SEQ ID NO: 2509525 - RNA, 19 nt, Human
guccugggagaaccucagg

SEQ ID NO: 2509526 - RNA, 20 nt, Human
guccugggagaaccucaggc

SEQ ID NO: 2509527 - RNA, 21 nt, Human
guccugggagaaccucaggcu

SEQ ID NO: 2509528 - RNA, 23 nt, Human
guccucccaucucacacaugagc

SEQ ID NO: 2509529 - RNA, 21 nt, Human
guccucccauccccuggacug

SEQ ID NO: 2509530 - RNA, 20 nt, Human
guccucccauccccuggacu

SEQ ID NO: 2509531 - RNA, 19 nt, Human
guccucccauccccuggac

SEQ ID NO: 2509532 - RNA, 18 nt, Human
guccucccauccccugga

SEQ ID NO: 2509533 - RNA, 15 nt, Human
guccucccccugcca

SEQ ID NO: 2509534 - RNA, 16 nt, Human
guccucccccugccag

SEQ ID NO: 2509535 - RNA, 17 nt, Human
guccucccccugccagu

SEQ ID NO: 2509536 - RNA, 19 nt, Human
guccucccccugccagugc

SEQ ID NO: 2509537 - RNA, 20 nt, Human
guccuccccucacagccucu

SEQ ID NO: 2509538 - RNA, 19 nt, Human
guccuccccucacagccuc

SEQ ID NO: 2509539 - RNA, 18 nt, Human
guccuccccucacagccu

SEQ ID NO: 2509540 - RNA, 17 nt, Human
guccuccccucacagcc

SEQ ID NO: 2509541 - RNA, 22 nt, Human
guccuccccucacagccucuga

SEQ ID NO: 2509542 - RNA, 21 nt, Human
guccuccccucacagccucug

SEQ ID NO: 2509543 - RNA, 13 nt, Human
guccuccccuugg

SEQ ID NO: 2509544 - RNA, 20 nt, Human
guccucccccugccagugcc

SEQ ID NO: 2509545 - RNA, 21 nt, Human
guccucccccugccagugccu

SEQ ID NO: 2509546 - RNA, 11 nt, Human
guccuccccuc

SEQ ID NO: 2509547 - RNA, 22 nt, Human
guccucccccugccagugccuu

SEQ ID NO: 2509548 - RNA, 16 nt, Human
guccuccccucacagc

SEQ ID NO: 2509549 - RNA, 12 nt, Human
guccuccccuca

SEQ ID NO: 2509550 - RNA, 15 nt, Human
guccuccccucacag

SEQ ID NO: 2509551 - RNA, 14 nt, Human
guccucccaucuca

SEQ ID NO: 2509552 - RNA, 13 nt, Human
guccucccaucuc

SEQ ID NO: 2509553 - RNA, 12 nt, Human
guccucccaucu

SEQ ID NO: 2509554 - RNA, 21 nt, Human
guccucccaauuucagacucc

SEQ ID NO: 2509555 - RNA, 17 nt, Human
guccucccauccccugg

SEQ ID NO: 2509556 - RNA, 16 nt, Human
guccucccauccccug

SEQ ID NO: 2509557 - RNA, 20 nt, Human
gugauccacccaccucagcc

SEQ ID NO: 2509558 - RNA, 18 nt, Human
gugauccacccaccucag

SEQ ID NO: 2509559 - RNA, 13 nt, Human
gugaggccagaga

SEQ ID NO: 2509560 - RNA, 15 nt, Human
gugauccacccaccu

SEQ ID NO: 2509561 - RNA, 16 nt, Human
gugaggaccacuccug

SEQ ID NO: 2509562 - RNA, 20 nt, Human
gugaggaauaguugagcccc

SEQ ID NO: 2509563 - RNA, 18 nt, Human
gugaggaaggcaggaaga

SEQ ID NO: 2509564 - RNA, 14 nt, Human
gugaggagcugcug

SEQ ID NO: 2509565 - RNA, 23 nt, Human
gugaggauuaaauaauguaaaua

SEQ ID NO: 2509566 - RNA, 23 nt, Human
gugaggcaaugggagcugaggcc

SEQ ID NO: 2509567 - RNA, 11 nt, Human
gugaggagcug

SEQ ID NO: 2509568 - RNA, 11 nt, Human
gugaggccaga

SEQ ID NO: 2509569 - RNA, 23 nt, Human
gugaggcagugggucccacuucc

SEQ ID NO: 2509570 - RNA, 15 nt, Human
gugaggcaggcuuug

SEQ ID NO: 2509571 - RNA, 12 nt, Human
gugaggcagggg

SEQ ID NO: 2509572 - RNA, 17 nt, Human
gugaggcaggggcggag

SEQ ID NO: 2509573 - RNA, 13 nt, Human
gugaggcaguggg

SEQ ID NO: 2509574 - RNA, 18 nt, Human
gugauccucccaccucag

SEQ ID NO: 2509575 - RNA, 15 nt, Human
gugauccucccaccu

SEQ ID NO: 2509576 - RNA, 14 nt, Human
gugauccacucgcc

SEQ ID NO: 2509577 - RNA, 14 nt, Human
gugauccucccacc

SEQ ID NO: 2509578 - RNA, 22 nt, Human
gugauccucccaccucagccuc

SEQ ID NO: 2509579 - RNA, 20 nt, Human
gugauccucccaccucagcc

SEQ ID NO: 2509580 - RNA, 23 nt, Human
gugauuccacuacaccuggcuga

SEQ ID NO: 2509581 - RNA, 22 nt, Human
gugauuccacuacaccuggcug

SEQ ID NO: 2509582 - RNA, 20 nt, Human
gugauucacagugugaaucu

SEQ ID NO: 2509583 - RNA, 21 nt, Human
gugaucccuagcugugaccuc

SEQ ID NO: 2509584 - RNA, 22 nt, Human
gugaucccuagcugugaccucu

SEQ ID NO: 2509585 - RNA, 23 nt, Human
gugauccucccaccucagccucc

SEQ ID NO: 2509586 - RNA, 22 nt, Human
gugauucuccugccucagccuc

SEQ ID NO: 2509587 - RNA, 20 nt, Human
gugauucuccugccucagcc

SEQ ID NO: 2509588 - RNA, 19 nt, Human
gugauucuccugccucagc

SEQ ID NO: 2509589 - RNA, 18 nt, Human
gugauucuccugccucag

SEQ ID NO: 2509590 - RNA, 17 nt, Human
gugauucuccugccuca

SEQ ID NO: 2509591 - RNA, 16 nt, Human
gugauucuccugccuc

SEQ ID NO: 2509592 - RNA, 20 nt, Human
gugauucucaugccucagcc

SEQ ID NO: 2509593 - RNA, 19 nt, Human
gugauuccuuugaagagga

SEQ ID NO: 2509594 - RNA, 16 nt, Human
gugauucuaaugucuu

SEQ ID NO: 2509595 - RNA, 14 nt, Human
gugauucuccugcc

SEQ ID NO: 2509596 - RNA, 18 nt, Human
gugauuuaauaguguuaa

SEQ ID NO: 2509597 - RNA, 16 nt, Human
gugauuuaauaguguu

SEQ ID NO: 2509598 - RNA, 20 nt, Human
gugauuuaauaguguuaauc

SEQ ID NO: 2509599 - RNA, 12 nt, Human
gugauuuucauu

SEQ ID NO: 2509600 - RNA, 15 nt, Human
gugauuuaauagugu

SEQ ID NO: 2509601 - RNA, 19 nt, Human
gugauuuaagacacuuuuu

SEQ ID NO: 2509602 - RNA, 16 nt, Human
gugauuuugcuguaga

SEQ ID NO: 2509603 - RNA, 17 nt, Human
gugauugggaauaaaua

SEQ ID NO: 2509604 - RNA, 21 nt, Human
gugauugacagcuuugcugcu

SEQ ID NO: 2509605 - RNA, 22 nt, Human
gugauugacagcuuugcugcug

SEQ ID NO: 2509606 - RNA, 23 nt, Human
gugauugacagcuuugcugcuga

SEQ ID NO: 2509607 - RNA, 16 nt, Human
gugauugggacagagg

SEQ ID NO: 2509608 - RNA, 20 nt, Human
gugauugggaauaaauaugc

SEQ ID NO: 2509609 - RNA, 14 nt, Human
gugauuguggaaug

SEQ ID NO: 2509610 - RNA, 19 nt, Human
gugauuguggaauggagau

SEQ ID NO: 2509611 - RNA, 23 nt, Human
gugauuguggaauggagauucag

SEQ ID NO: 2509612 - RNA, 23 nt, Human
gugauucuccugccucagccucc

SEQ ID NO: 2509613 - RNA, 13 nt, Human
gugauucugccuu

SEQ ID NO: 2509614 - RNA, 21 nt, Human
gugauuccuuugaagaggaaa

SEQ ID NO: 2509615 - RNA, 17 nt, Human
gugauugacagcuuugc

SEQ ID NO: 2509616 - RNA, 13 nt, Human
gugauucuccugc

SEQ ID NO: 2509617 - RNA, 23 nt, Human
gugcccaaguuguggugcugaca

SEQ ID NO: 2509618 - RNA, 20 nt, Human
gugcccaagcucagaaggcu

SEQ ID NO: 2509619 - RNA, 16 nt, Human
gugcccaagcucagaa

SEQ ID NO: 2509620 - RNA, 23 nt, Human
gugccauagaguuuaacacaagu

SEQ ID NO: 2509621 - RNA, 20 nt, Human
gugcccaagccagaggcugg

SEQ ID NO: 2509622 - RNA, 19 nt, Human
gugcccaagccagaggcug

SEQ ID NO: 2509623 - RNA, 12 nt, Human
gugcccaagcca

SEQ ID NO: 2509624 - RNA, 17 nt, Human
gugccauagucacaugg

SEQ ID NO: 2509625 - RNA, 23 nt, Human
gugcccaagaauagaugcugacu

SEQ ID NO: 2509626 - RNA, 15 nt, Human
gugccagucgcgcug

SEQ ID NO: 2509627 - RNA, 21 nt, Human
gugcaugcucucugcagccag

SEQ ID NO: 2509628 - RNA, 15 nt, Human
gugcaugcucucugc

SEQ ID NO: 2509629 - RNA, 16 nt, Human
gugcaugcucucugca

SEQ ID NO: 2509630 - RNA, 18 nt, Human
gugcaugcucucugcagc

SEQ ID NO: 2509631 - RNA, 19 nt, Human
gugcaugcucucugcagcc

SEQ ID NO: 2509632 - RNA, 19 nt, Human
gugccagucgcgcugccug

SEQ ID NO: 2509633 - RNA, 18 nt, Human
gugccagucgcgcugccu

SEQ ID NO: 2509634 - RNA, 17 nt, Human
gugccagucgcgcugcc

SEQ ID NO: 2509635 - RNA, 16 nt, Human
gugccagucgcgcugc

SEQ ID NO: 2509636 - RNA, 22 nt, Human
gugccagucgcgcugccugugu

SEQ ID NO: 2509637 - RNA, 21 nt, Human
gugccagucgcgcugccugug

SEQ ID NO: 2509638 - RNA, 18 nt, Human
gugccagucuugugucug

SEQ ID NO: 2509639 - RNA, 20 nt, Human
gugcccacaggaucagucug

SEQ ID NO: 2509640 - RNA, 15 nt, Human
gugcccacaucccag

SEQ ID NO: 2509641 - RNA, 21 nt, Human
gugcccacaggccgcccugcg

SEQ ID NO: 2509642 - RNA, 13 nt, Human
gugcccacaggcc

SEQ ID NO: 2509643 - RNA, 23 nt, Human
gugcccagcuagcugcagagcca

SEQ ID NO: 2509644 - RNA, 18 nt, Human
gugcccagcccggaccuu

SEQ ID NO: 2509645 - RNA, 20 nt, Human
gugcccagcuauaccugugc

SEQ ID NO: 2509646 - RNA, 21 nt, Human
gugcccagcuauaccugugcc

SEQ ID NO: 2509647 - RNA, 22 nt, Human
gugcccagcuauaccugugccu

SEQ ID NO: 2509648 - RNA, 16 nt, Human
gugcccagaauaaguu

SEQ ID NO: 2509649 - RNA, 20 nt, Human
gugcccacaucccaggcuuc

SEQ ID NO: 2509650 - RNA, 20 nt, Human
gugcccagagaugggacugg

SEQ ID NO: 2509651 - RNA, 23 nt, Human
gugcccaccaacaucccauugcc

SEQ ID NO: 2509652 - RNA, 22 nt, Human
gugcccagaacuggacucagga

SEQ ID NO: 2509653 - RNA, 23 nt, Human
gugcccagcuauaccugugccuc

SEQ ID NO: 2509654 - RNA, 19 nt, Human
gugcccaggggcccacagg

SEQ ID NO: 2509655 - RNA, 16 nt, Human
gugcccauuccucacc

SEQ ID NO: 2509656 - RNA, 21 nt, Human
gugcccaugggcacugcuggg

SEQ ID NO: 2509657 - RNA, 20 nt, Human
gugcccaugggcacugcugg

SEQ ID NO: 2509658 - RNA, 19 nt, Human
gugcccaugggcacugcug

SEQ ID NO: 2509659 - RNA, 16 nt, Human
gugcccaugggcacug

SEQ ID NO: 2509660 - RNA, 14 nt, Human
gugcccaugggcac

SEQ ID NO: 2509661 - RNA, 17 nt, Human
gugcccaucccuggaag

SEQ ID NO: 2509662 - RNA, 19 nt, Human
gugccccaggaccagcuca

SEQ ID NO: 2509663 - RNA, 21 nt, Human
gugccccaggaccagcucagg

SEQ ID NO: 2509664 - RNA, 16 nt, Human
gugccccaugccuguc

SEQ ID NO: 2509665 - RNA, 18 nt, Human
gugccccaugccugucca

SEQ ID NO: 2509666 - RNA, 14 nt, Human
gugccccaggacca

SEQ ID NO: 2509667 - RNA, 15 nt, Human
gugccccaggaccag

SEQ ID NO: 2509668 - RNA, 12 nt, Human
gugccccaggac

SEQ ID NO: 2509669 - RNA, 17 nt, Human
gugcccauuccucaccu

SEQ ID NO: 2509670 - RNA, 15 nt, Human
gugcccucgcugcuu

SEQ ID NO: 2509671 - RNA, 20 nt, Human
gugccccccauccuggccca

SEQ ID NO: 2509672 - RNA, 19 nt, Human
gugccccccauccuggccc

SEQ ID NO: 2509673 - RNA, 15 nt, Human
gugcccccacugacc

SEQ ID NO: 2509674 - RNA, 18 nt, Human
gugcccccacugaccaga

SEQ ID NO: 2509675 - RNA, 13 nt, Human
gugcccccacuga

SEQ ID NO: 2509676 - RNA, 21 nt, Human
gugccccaugccuguccagcc

SEQ ID NO: 2509677 - RNA, 17 nt, Human
gugccccccauccuggc

SEQ ID NO: 2509678 - RNA, 19 nt, Human
gugcccccacugaccagaa

SEQ ID NO: 2509679 - RNA, 12 nt, Human
gugcccccagac

SEQ ID NO: 2509680 - RNA, 13 nt, Human
gugcauaccacuu

SEQ ID NO: 2509681 - RNA, 14 nt, Human
gugcauaccacuuu

SEQ ID NO: 2509682 - RNA, 21 nt, Human
gugcauaccacuuuuguucuu

SEQ ID NO: 2509683 - RNA, 14 nt, Human
gugcagucugggug

SEQ ID NO: 2509684 - RNA, 12 nt, Human
gugcagucuggg

SEQ ID NO: 2509685 - RNA, 15 nt, Human
gugcaucucagccca

SEQ ID NO: 2509686 - RNA, 22 nt, Human
gugccagguuuuuggucugacc

SEQ ID NO: 2509687 - RNA, 20 nt, Human
gugccagguuuuuggucuga

SEQ ID NO: 2509688 - RNA, 18 nt, Human
gugcaugcagcaucuaag

SEQ ID NO: 2509689 - RNA, 18 nt, Human
gugcaugaucuugagcaa

SEQ ID NO: 2509690 - RNA, 13 nt, Human
gugcaugcucucu

SEQ ID NO: 2509691 - RNA, 18 nt, Human
gugcaucucagcccacau

SEQ ID NO: 2509692 - RNA, 14 nt, Human
gugcaucucagccc

SEQ ID NO: 2509693 - RNA, 22 nt, Human
gugcaugaagguuucugaaaau

SEQ ID NO: 2509694 - RNA, 18 nt, Human
gugcaaauugucacagga

SEQ ID NO: 2509695 - RNA, 22 nt, Human
gugcaaaguucccuacuuccug

SEQ ID NO: 2509696 - RNA, 23 nt, Human
gugcaaaugucagauacaaugua

SEQ ID NO: 2509697 - RNA, 19 nt, Human
gugcaaaugucagauacaa

SEQ ID NO: 2509698 - RNA, 19 nt, Human
gugauuuaauaguguuaau

SEQ ID NO: 2509699 - RNA, 22 nt, Human
gugcaacaagguccucugucag

SEQ ID NO: 2509700 - RNA, 15 nt, Human
gugcaacagcacugg

SEQ ID NO: 2509701 - RNA, 12 nt, Human
gugcaacagcac

SEQ ID NO: 2509702 - RNA, 23 nt, Human
gugcaacagcacuggcucucucc

SEQ ID NO: 2509703 - RNA, 20 nt, Human
gugcaacagcacuggcucuc

SEQ ID NO: 2509704 - RNA, 14 nt, Human
gugcaacaggguau

SEQ ID NO: 2509705 - RNA, 23 nt, Human
gugcagggaggagguggcagccc

SEQ ID NO: 2509706 - RNA, 19 nt, Human
gugcauaaguuaacuucca

SEQ ID NO: 2509707 - RNA, 22 nt, Human
gugcaguccugggauguggcug

SEQ ID NO: 2509708 - RNA, 12 nt, Human
gugcaguccugg

SEQ ID NO: 2509709 - RNA, 16 nt, Human
gugcaguccugaucag

SEQ ID NO: 2509710 - RNA, 19 nt, Human
gugcaguggcccccacaga

SEQ ID NO: 2509711 - RNA, 14 nt, Human
gugcagucacugga

SEQ ID NO: 2509712 - RNA, 22 nt, Human
gugcaguaucaugcccugugca

SEQ ID NO: 2509713 - RNA, 15 nt, Human
gugcagguggggaga

SEQ ID NO: 2509714 - RNA, 14 nt, Human
gugaauuuuucucu

SEQ ID NO: 2509715 - RNA, 15 nt, Human
gugaauuuuucucua

SEQ ID NO: 2509716 - RNA, 15 nt, Human
gugaaugggaaaaga

SEQ ID NO: 2509717 - RNA, 15 nt, Human
gugaaucagacccua

SEQ ID NO: 2509718 - RNA, 14 nt, Human
gugaaucagagcac

SEQ ID NO: 2509719 - RNA, 18 nt, Human
gugaaucacguaaagcua

SEQ ID NO: 2509720 - RNA, 16 nt, Human
gugaauauuguucaua

SEQ ID NO: 2509721 - RNA, 22 nt, Human
gugaauauuuccauauggauuu

SEQ ID NO: 2509722 - RNA, 16 nt, Human
gugaaucacguaaagc

SEQ ID NO: 2509723 - RNA, 13 nt, Human
gugaaaucauuca

SEQ ID NO: 2509724 - RNA, 17 nt, Human
gugaaauaccagugugg

SEQ ID NO: 2509725 - RNA, 17 nt, Human
gugaaauaguucaaagc

SEQ ID NO: 2509726 - RNA, 21 nt, Human
gugaaauaguucaaagccaag

SEQ ID NO: 2509727 - RNA, 19 nt, Human
gugaaaggaaagagggagg

SEQ ID NO: 2509728 - RNA, 17 nt, Human
gugaaaguacauuugga

SEQ ID NO: 2509729 - RNA, 21 nt, Human
gugaaagggagcuaucaggaa

SEQ ID NO: 2509730 - RNA, 21 nt, Human
gugaaagucagaugcccagag

SEQ ID NO: 2509731 - RNA, 20 nt, Human
gugaaauuauucauaauuau

SEQ ID NO: 2509732 - RNA, 18 nt, Human
gugaaauuauucauaauu

SEQ ID NO: 2509733 - RNA, 21 nt, Human
gugaaauuuauuaguuaauau

SEQ ID NO: 2509734 - RNA, 17 nt, Human
gugaaaucaaaggugcu

SEQ ID NO: 2509735 - RNA, 17 nt, Human
gugaaaccuuuuuuaag

SEQ ID NO: 2509736 - RNA, 14 nt, Human
gugaaaccuuuuuu

SEQ ID NO: 2509737 - RNA, 13 nt, Human
gugaaaccuuuuu

SEQ ID NO: 2509738 - RNA, 23 nt, Human
gugaaaccuuuagggcagcuugc

SEQ ID NO: 2509739 - RNA, 22 nt, Human
gugaaaccuuuagggcagcuug

SEQ ID NO: 2509740 - RNA, 20 nt, Human
gugaaaccuuuagggcagcu

SEQ ID NO: 2509741 - RNA, 19 nt, Human
gugaaaccuuuagggcagc

SEQ ID NO: 2509742 - RNA, 18 nt, Human
gugaaaccuuuagggcag

SEQ ID NO: 2509743 - RNA, 20 nt, Human
gugaaacucguuaauuugua

SEQ ID NO: 2509744 - RNA, 22 nt, Human
gugaaaccuuuuuuaagauuuu

SEQ ID NO: 2509745 - RNA, 21 nt, Human
gugaaaccuuuuuuaagauuu

SEQ ID NO: 2509746 - RNA, 19 nt, Human
gugaaaccuuuuuuaagau

SEQ ID NO: 2509747 - RNA, 18 nt, Human
gugaaaccuuuuuuaaga

SEQ ID NO: 2509748 - RNA, 20 nt, Human
gugaaacugcuuguuuccua

SEQ ID NO: 2509749 - RNA, 21 nt, Human
gugaaacugcuuguuuccuag

SEQ ID NO: 2509750 - RNA, 12 nt, Human
gugaaacuggau

SEQ ID NO: 2509751 - RNA, 19 nt, Human
gugaaagaaaauaacaaua

SEQ ID NO: 2509752 - RNA, 23 nt, Human
gugaaacugcuuguuuccuagca

SEQ ID NO: 2509753 - RNA, 16 nt, Human
gugaaacuuccuaagu

SEQ ID NO: 2509754 - RNA, 19 nt, Human
gugaaacuaacagauaagc

SEQ ID NO: 2509755 - RNA, 20 nt, Human
gugaaagcaucacuugggau

SEQ ID NO: 2509756 - RNA, 14 nt, Human
gugaaaagaaaaau

SEQ ID NO: 2509757 - RNA, 23 nt, Human
gugaaaagaaaaaugagccuggc

SEQ ID NO: 2509758 - RNA, 15 nt, Human
gugaaaacggagcug

SEQ ID NO: 2509759 - RNA, 14 nt, Human
gucugccagccagc

SEQ ID NO: 2509760 - RNA, 15 nt, Human
gucugccagccagca

SEQ ID NO: 2509761 - RNA, 21 nt, Human
gugaaaauagguauacagugg

SEQ ID NO: 2509762 - RNA, 19 nt, Human
gugaaaaguccuugauugu

SEQ ID NO: 2509763 - RNA, 20 nt, Human
gugaaaagagaggauauguu

SEQ ID NO: 2509764 - RNA, 15 nt, Human
gugaaaaugguccag

SEQ ID NO: 2509765 - RNA, 17 nt, Human
gugaaaaugguccagga

SEQ ID NO: 2509766 - RNA, 16 nt, Human
gugaaaaugugugugu

SEQ ID NO: 2509767 - RNA, 14 nt, Human
gugaaaauguacug

SEQ ID NO: 2509768 - RNA, 19 nt, Human
gugaaaauagguauacagu

SEQ ID NO: 2509769 - RNA, 16 nt, Human
gugaaacacaccaggc

SEQ ID NO: 2509770 - RNA, 17 nt, Human
gugaaacacaccaggcu

SEQ ID NO: 2509771 - RNA, 18 nt, Human
gugaaacacaccaggcug

SEQ ID NO: 2509772 - RNA, 20 nt, Human
gugaaacacaccaggcugug

SEQ ID NO: 2509773 - RNA, 23 nt, Human
gugaaacacaccaggcugugggc

SEQ ID NO: 2509774 - RNA, 16 nt, Human
gugaaacccugucucu

SEQ ID NO: 2509775 - RNA, 21 nt, Human
gugaaacacaccaggcugugg

SEQ ID NO: 2509776 - RNA, 12 nt, Human
gugaaacccugu

SEQ ID NO: 2509777 - RNA, 19 nt, Human
gugaccggacuuuucugca

SEQ ID NO: 2509778 - RNA, 15 nt, Human
gugaccggacuuuuc

SEQ ID NO: 2509779 - RNA, 21 nt, Human
gugacccucugaaugguccag

SEQ ID NO: 2509780 - RNA, 13 nt, Human
gugacccucugaa

SEQ ID NO: 2509781 - RNA, 16 nt, Human
gugaccucagcuuuga

SEQ ID NO: 2509782 - RNA, 21 nt, Human
gugaccggacuuuucugcaaa

SEQ ID NO: 2509783 - RNA, 12 nt, Human
gugaccucaggc

SEQ ID NO: 2509784 - RNA, 19 nt, Human
gugaccugaaguucaccau

SEQ ID NO: 2509785 - RNA, 14 nt, Human
gugaccugaaguuc

SEQ ID NO: 2509786 - RNA, 14 nt, Human
gugaccugaggaag

SEQ ID NO: 2509787 - RNA, 16 nt, Human
gugaccugaggaagcg

SEQ ID NO: 2509788 - RNA, 13 nt, Human
gugaccugagggc

SEQ ID NO: 2509789 - RNA, 23 nt, Human
gugaccugaggauuuaagggaug

SEQ ID NO: 2509790 - RNA, 19 nt, Human
gugaccucaggcacuagcc

SEQ ID NO: 2509791 - RNA, 18 nt, Human
gugaccuccacagcuacc

SEQ ID NO: 2509792 - RNA, 18 nt, Human
gugacccggaggccacau

SEQ ID NO: 2509793 - RNA, 15 nt, Human
gugacccggaggcca

SEQ ID NO: 2509794 - RNA, 17 nt, Human
gugaauuuuuuuuuccu

SEQ ID NO: 2509795 - RNA, 16 nt, Human
gugacaagcucacaga

SEQ ID NO: 2509796 - RNA, 16 nt, Human
gugacaacacuugugu

SEQ ID NO: 2509797 - RNA, 16 nt, Human
gugaauuuuucucuaa

SEQ ID NO: 2509798 - RNA, 16 nt, Human
gugacugaauuucuuu

SEQ ID NO: 2509799 - RNA, 18 nt, Human
gugacugaauuucuuuug

SEQ ID NO: 2509800 - RNA, 21 nt, Human
gugacucgggcuccugugccc

SEQ ID NO: 2509801 - RNA, 20 nt, Human
gugacucgggcuccugugcc

SEQ ID NO: 2509802 - RNA, 14 nt, Human
gugacucugaagcu

SEQ ID NO: 2509803 - RNA, 15 nt, Human
gugacugaauuucuu

SEQ ID NO: 2509804 - RNA, 19 nt, Human
gugaccuuccaagagccug

SEQ ID NO: 2509805 - RNA, 23 nt, Human
gugaccuuaguguuucugugcau

SEQ ID NO: 2509806 - RNA, 22 nt, Human
gugaccuuaguguuucugugca

SEQ ID NO: 2509807 - RNA, 20 nt, Human
gugaccuuccaagagccuga

SEQ ID NO: 2509808 - RNA, 19 nt, Human
gugacuccaggagaggagc

SEQ ID NO: 2509809 - RNA, 14 nt, Human
gugacuccaggaga

SEQ ID NO: 2509810 - RNA, 12 nt, Human
gugacuccagga

SEQ ID NO: 2509811 - RNA, 18 nt, Human
gugacucauccucuugaa

SEQ ID NO: 2509812 - RNA, 19 nt, Human
gugacucgggcuccugugc

SEQ ID NO: 2509813 - RNA, 18 nt, Human
gugacucgggcuccugug

SEQ ID NO: 2509814 - RNA, 17 nt, Human
gugacucgggcuccugu

SEQ ID NO: 2509815 - RNA, 23 nt, Human
gugaccugccccgcccagcugca

SEQ ID NO: 2509816 - RNA, 20 nt, Human
gugaccuuaguguuucugug

SEQ ID NO: 2509817 - RNA, 15 nt, Human
gugaccuuaguguuu

SEQ ID NO: 2509818 - RNA, 23 nt, Human
gugaccuguggggauuucuccca

SEQ ID NO: 2509819 - RNA, 16 nt, Human
gugagccaccacgccc

SEQ ID NO: 2509820 - RNA, 15 nt, Human
gugagccaccgugcc

SEQ ID NO: 2509821 - RNA, 15 nt, Human
gugagccaccacgcc

SEQ ID NO: 2509822 - RNA, 15 nt, Human
gugacuguauauaaa

SEQ ID NO: 2509823 - RNA, 17 nt, Human
gugagccaccgugccug

SEQ ID NO: 2509824 - RNA, 21 nt, Human
gugagccaccgugccuggcca

SEQ ID NO: 2509825 - RNA, 13 nt, Human
gugagccacugca

SEQ ID NO: 2509826 - RNA, 16 nt, Human
gugagcagucaggaaa

SEQ ID NO: 2509827 - RNA, 17 nt, Human
gugagcaggcugugagu

SEQ ID NO: 2509828 - RNA, 20 nt, Human
gugacugccccaacuccugg

SEQ ID NO: 2509829 - RNA, 21 nt, Human
gugacugccccaacuccugga

SEQ ID NO: 2509830 - RNA, 17 nt, Human
gugacugcgaucuucag

SEQ ID NO: 2509831 - RNA, 23 nt, Human
gugacugccccaacuccuggaag

SEQ ID NO: 2509832 - RNA, 17 nt, Human
gugacugaucucucgug

SEQ ID NO: 2509833 - RNA, 22 nt, Human
gugacucuuuuuagggccaggc

SEQ ID NO: 2509834 - RNA, 20 nt, Human
gugacucuuuuuagggccag

SEQ ID NO: 2509835 - RNA, 18 nt, Human
gugacucuuuuuagggcc

SEQ ID NO: 2509836 - RNA, 16 nt, Human
gugacucuuuuuaggg

SEQ ID NO: 2509837 - RNA, 21 nt, Human
gugacugauguuacaucacag

SEQ ID NO: 2509838 - RNA, 16 nt, Human
gugacugccccaacuc

SEQ ID NO: 2509839 - RNA, 19 nt, Human
gugaggaagccgcuggggc

SEQ ID NO: 2509840 - RNA, 16 nt, Human
gugaggaagccgcugg

SEQ ID NO: 2509841 - RNA, 11 nt, Human
gugaggaagcc

SEQ ID NO: 2509842 - RNA, 15 nt, Human
gugaggaaagucauu

SEQ ID NO: 2509843 - RNA, 15 nt, Human
gugagcuuugcugcu

SEQ ID NO: 2509844 - RNA, 16 nt, Human
gugagcuuugcugcua

SEQ ID NO: 2509845 - RNA, 14 nt, Human
gugagcuacaaaug

SEQ ID NO: 2509846 - RNA, 22 nt, Human
gugagccaccgugccuggccac

SEQ ID NO: 2509847 - RNA, 16 nt, Human
gugagcuccuaagcca

SEQ ID NO: 2509848 - RNA, 22 nt, Human
gugagcauuguggcugucagca

SEQ ID NO: 2509849 - RNA, 19 nt, Human
guggcagcugcuuuugucu

SEQ ID NO: 2509850 - RNA, 13 nt, Human
guggcagcugcuu

SEQ ID NO: 2509851 - RNA, 12 nt, Human
guggcagcugcu

SEQ ID NO: 2509852 - RNA, 23 nt, Human
guggcagcugcgguccacccagg

SEQ ID NO: 2509853 - RNA, 22 nt, Human
guggcagcugcgguccacccag

SEQ ID NO: 2509854 - RNA, 21 nt, Human
guggcagcugcgguccaccca

SEQ ID NO: 2509855 - RNA, 20 nt, Human
guggaugccugguggcagcu

SEQ ID NO: 2509856 - RNA, 19 nt, Human
guggcagcugcgguccacc

SEQ ID NO: 2509857 - RNA, 17 nt, Human
guggcaggaccaggacu

SEQ ID NO: 2509858 - RNA, 15 nt, Human
guggcaggaccagga

SEQ ID NO: 2509859 - RNA, 13 nt, Human
guggcaggaccag

SEQ ID NO: 2509860 - RNA, 19 nt, Human
guggcaggcagcgccaagc

SEQ ID NO: 2509861 - RNA, 12 nt, Human
guggcaggcagc

SEQ ID NO: 2509862 - RNA, 17 nt, Human
guggcagggcucaggau

SEQ ID NO: 2509863 - RNA, 16 nt, Human
guggcagggcucagga

SEQ ID NO: 2509864 - RNA, 13 nt, Human
guggcagggcuca

SEQ ID NO: 2509865 - RNA, 12 nt, Human
guggcagggcuc

SEQ ID NO: 2509866 - RNA, 23 nt, Human
guggcagggccuagcugcuacaa

SEQ ID NO: 2509867 - RNA, 22 nt, Human
guggcagggccuagcugcuaca

SEQ ID NO: 2509868 - RNA, 18 nt, Human
guggcagggccuagcugc

SEQ ID NO: 2509869 - RNA, 18 nt, Human
guggcaggggacaggagu

SEQ ID NO: 2509870 - RNA, 16 nt, Human
guggcaggggacagga

SEQ ID NO: 2509871 - RNA, 20 nt, Human
guggcaggggacaggagucc

SEQ ID NO: 2509872 - RNA, 23 nt, Human
guggcagguggaggugucaggcu

SEQ ID NO: 2509873 - RNA, 21 nt, Human
guggcaggugaccuucuggga

SEQ ID NO: 2509874 - RNA, 17 nt, Human
guggcagugggagcugc

SEQ ID NO: 2509875 - RNA, 16 nt, Human
guggcagugggagcug

SEQ ID NO: 2509876 - RNA, 11 nt, Human
guggcagucug

SEQ ID NO: 2509877 - RNA, 15 nt, Human
guggcagugggagcu

SEQ ID NO: 2509878 - RNA, 13 nt, Human
guggcucuccagu

SEQ ID NO: 2509879 - RNA, 21 nt, Human
guggcucuacaacugaguccu

SEQ ID NO: 2509880 - RNA, 20 nt, Human
guggccccacccugggcccu

SEQ ID NO: 2509881 - RNA, 19 nt, Human
guggccccacccugggccc

SEQ ID NO: 2509882 - RNA, 18 nt, Human
guggccccacccugggcc

SEQ ID NO: 2509883 - RNA, 23 nt, Human
guggccauuuagccaccaucuuu

SEQ ID NO: 2509884 - RNA, 20 nt, Human
guggcccauccccccucacc

SEQ ID NO: 2509885 - RNA, 17 nt, Human
guggcccauccccccuc

SEQ ID NO: 2509886 - RNA, 13 nt, Human
guggcccaggacc

SEQ ID NO: 2509887 - RNA, 15 nt, Human
guggccccacccugg

SEQ ID NO: 2509888 - RNA, 21 nt, Human
guggcccauccccccucacca

SEQ ID NO: 2509889 - RNA, 15 nt, Human
guggccagccuggau

SEQ ID NO: 2509890 - RNA, 14 nt, Human
guggccagccugga

SEQ ID NO: 2509891 - RNA, 16 nt, Human
guggccagcccggcug

SEQ ID NO: 2509892 - RNA, 15 nt, Human
guggccagcccggcu

SEQ ID NO: 2509893 - RNA, 14 nt, Human
guggccagcccggc

SEQ ID NO: 2509894 - RNA, 13 nt, Human
guggccagcccgg

SEQ ID NO: 2509895 - RNA, 11 nt, Human
guggccagccc

SEQ ID NO: 2509896 - RNA, 13 nt, Human
guggccaggguga

SEQ ID NO: 2509897 - RNA, 14 nt, Human
guggccacucagcu

SEQ ID NO: 2509898 - RNA, 13 nt, Human
guggccacucagc

SEQ ID NO: 2509899 - RNA, 17 nt, Human
guggccaaggagcugcu

SEQ ID NO: 2509900 - RNA, 18 nt, Human
guggccaaggagcugcua

SEQ ID NO: 2509901 - RNA, 19 nt, Human
guggccaaggagcugcuau

SEQ ID NO: 2509902 - RNA, 21 nt, Human
guggccacuccagaccccugg

SEQ ID NO: 2509903 - RNA, 17 nt, Human
guggccagagcugggag

SEQ ID NO: 2509904 - RNA, 23 nt, Human
guggccagagcugggaggcaugg

SEQ ID NO: 2509905 - RNA, 21 nt, Human
guggcagugggagcugccugu

SEQ ID NO: 2509906 - RNA, 19 nt, Human
guggcagugggagcugccu

SEQ ID NO: 2509907 - RNA, 15 nt, Human
guggcaguuuggcaa

SEQ ID NO: 2509908 - RNA, 15 nt, Human
guggcauagcccaga

SEQ ID NO: 2509909 - RNA, 21 nt, Human
guggcagugguuuuggcaaac

SEQ ID NO: 2509910 - RNA, 17 nt, Human
guggcauagcccagaca

SEQ ID NO: 2509911 - RNA, 14 nt, Human
guggcaucaccuua

SEQ ID NO: 2509912 - RNA, 20 nt, Human
guggcaucaccuuaggcagg

SEQ ID NO: 2509913 - RNA, 22 nt, Human
guggcaucaccuuaggcaggga

SEQ ID NO: 2509914 - RNA, 18 nt, Human
guggcaucuuugccuugg

SEQ ID NO: 2509915 - RNA, 20 nt, Human
guggcaucuuugccuugggc

SEQ ID NO: 2509916 - RNA, 21 nt, Human
guggcaucuuugccuugggcu

SEQ ID NO: 2509917 - RNA, 13 nt, Human
guggcauggccac

SEQ ID NO: 2509918 - RNA, 16 nt, Human
guggcaucccaguggc

SEQ ID NO: 2509919 - RNA, 15 nt, Human
guggcauguggccug

SEQ ID NO: 2509920 - RNA, 14 nt, Human
guggcauguggccu

SEQ ID NO: 2509921 - RNA, 18 nt, Human
guggcauguggccugugg

SEQ ID NO: 2509922 - RNA, 17 nt, Human
guggcauguggccugug

SEQ ID NO: 2509923 - RNA, 22 nt, Human
guggcauguucaucguauaaca

SEQ ID NO: 2509924 - RNA, 22 nt, Human
guggcauuggcagcaggugcug

SEQ ID NO: 2509925 - RNA, 18 nt, Human
guggcauuggcagcaggu

SEQ ID NO: 2509926 - RNA, 16 nt, Human
guggcauuggcagcag

SEQ ID NO: 2509927 - RNA, 19 nt, Human
guggcauguggccuguggc

SEQ ID NO: 2509928 - RNA, 19 nt, Human
guggccaaauuauuugugu

SEQ ID NO: 2509929 - RNA, 16 nt, Human
guggccaaggagcugc

SEQ ID NO: 2509930 - RNA, 15 nt, Human
guggccaaggagcug

SEQ ID NO: 2509931 - RNA, 14 nt, Human
guggccaaguucuu

SEQ ID NO: 2509932 - RNA, 23 nt, Human
guggagcccgcacccccacccuu

SEQ ID NO: 2509933 - RNA, 18 nt, Human
guggagccccacacuggg

SEQ ID NO: 2509934 - RNA, 14 nt, Human
guggagccccacac

SEQ ID NO: 2509935 - RNA, 17 nt, Human
guggagcaugggccugg

SEQ ID NO: 2509936 - RNA, 19 nt, Human
guggagcaaagugagggcc

SEQ ID NO: 2509937 - RNA, 22 nt, Human
guggagagggaugaggugcugg

SEQ ID NO: 2509938 - RNA, 14 nt, Human
guggagagcccggc

SEQ ID NO: 2509939 - RNA, 17 nt, Human
guggagagcuggugccc

SEQ ID NO: 2509940 - RNA, 18 nt, Human
guggagaugucuucguac

SEQ ID NO: 2509941 - RNA, 17 nt, Human
guggagaugucuucgua

SEQ ID NO: 2509942 - RNA, 16 nt, Human
guggagaugucuucgu

SEQ ID NO: 2509943 - RNA, 15 nt, Human
guggagaugucuucg

SEQ ID NO: 2509944 - RNA, 18 nt, Human
guggagcaaagugagggc

SEQ ID NO: 2509945 - RNA, 19 nt, Human
guggagaugucuucguaca

SEQ ID NO: 2509946 - RNA, 16 nt, Human
guggagcaugggccug

SEQ ID NO: 2509947 - RNA, 15 nt, Human
guggagaagccauug

SEQ ID NO: 2509948 - RNA, 14 nt, Human
guggagaagccauu

SEQ ID NO: 2509949 - RNA, 13 nt, Human
guggagaagccau

SEQ ID NO: 2509950 - RNA, 12 nt, Human
guggagaagcca

SEQ ID NO: 2509951 - RNA, 19 nt, Human
guggagaagccauugucuu

SEQ ID NO: 2509952 - RNA, 18 nt, Human
guggagaagccauugucu

SEQ ID NO: 2509953 - RNA, 20 nt, Human
guggagaagccauugucuuc

SEQ ID NO: 2509954 - RNA, 13 nt, Human
guggagacagggc

SEQ ID NO: 2509955 - RNA, 11 nt, Human
guggagacugc

SEQ ID NO: 2509956 - RNA, 18 nt, Human
guggagacugcuucccau

SEQ ID NO: 2509957 - RNA, 16 nt, Human
guggagacugcuuccc

SEQ ID NO: 2509958 - RNA, 20 nt, Human
guggagacuggggggcuuga

SEQ ID NO: 2509959 - RNA, 19 nt, Human
guggagacuggggggcuug

SEQ ID NO: 2509960 - RNA, 12 nt, Human
guggagagcugg

SEQ ID NO: 2509961 - RNA, 18 nt, Human
guggagaggcccggccuc

SEQ ID NO: 2509962 - RNA, 14 nt, Human
guggagagcuggug

SEQ ID NO: 2509963 - RNA, 16 nt, Human
guggagagcuggugcc

SEQ ID NO: 2509964 - RNA, 13 nt, Human
guggacuuuuauu

SEQ ID NO: 2509965 - RNA, 16 nt, Human
guggacuuuccacccc

SEQ ID NO: 2509966 - RNA, 17 nt, Human
guggacuuuccaccccc

SEQ ID NO: 2509967 - RNA, 20 nt, Human
guggacuuuccacccccucc

SEQ ID NO: 2509968 - RNA, 22 nt, Human
guggacuuuccacccccucccu

SEQ ID NO: 2509969 - RNA, 20 nt, Human
guggagaaagcacugaccug

SEQ ID NO: 2509970 - RNA, 21 nt, Human
guggagaaacuguagucucag

SEQ ID NO: 2509971 - RNA, 23 nt, Human
guggagaaauaaaaauaccucuu

SEQ ID NO: 2509972 - RNA, 22 nt, Human
guggagaaauaaaaauaccucu

SEQ ID NO: 2509973 - RNA, 22 nt, Human
guggagaaauuccuugauucac

SEQ ID NO: 2509974 - RNA, 20 nt, Human
guggagaagcggcuggcagc

SEQ ID NO: 2509975 - RNA, 22 nt, Human
guggagaagccacaggccugag

SEQ ID NO: 2509976 - RNA, 20 nt, Human
guggagaagccacaggccug

SEQ ID NO: 2509977 - RNA, 17 nt, Human
guggagaagccacaggc

SEQ ID NO: 2509978 - RNA, 16 nt, Human
guggagaacuccuagg

SEQ ID NO: 2509979 - RNA, 22 nt, Human
guggacuuagaaagcaggggcu

SEQ ID NO: 2509980 - RNA, 20 nt, Human
guggacuuagaaagcagggg

SEQ ID NO: 2509981 - RNA, 19 nt, Human
guggacuuagaaagcaggg

SEQ ID NO: 2509982 - RNA, 18 nt, Human
guggacuuagaaagcagg

SEQ ID NO: 2509983 - RNA, 16 nt, Human
guggacuuagaaagca

SEQ ID NO: 2509984 - RNA, 17 nt, Human
guggacuggccccuggg

SEQ ID NO: 2509985 - RNA, 21 nt, Human
guggaaccacugacuacuggc

SEQ ID NO: 2509986 - RNA, 21 nt, Human
guggaaauuaagaagaaacua

SEQ ID NO: 2509987 - RNA, 15 nt, Human
guggaaccaggaacc

SEQ ID NO: 2509988 - RNA, 22 nt, Human
guggaacguuuuuccuguucuu

SEQ ID NO: 2509989 - RNA, 19 nt, Human
guggaucuccaaggaccag

SEQ ID NO: 2509990 - RNA, 18 nt, Human
guggaucuccaaggacca

SEQ ID NO: 2509991 - RNA, 17 nt, Human
guggaucuccaaggacc

SEQ ID NO: 2509992 - RNA, 21 nt, Human
guggaucagagaugcaccacc

SEQ ID NO: 2509993 - RNA, 18 nt, Human
guggaucuguccaaggaa

SEQ ID NO: 2509994 - RNA, 17 nt, Human
guggaucuguccaagga

SEQ ID NO: 2509995 - RNA, 23 nt, Human
guggaucuccaaggaccagguua

SEQ ID NO: 2509996 - RNA, 15 nt, Human
guggaugauguuucg

SEQ ID NO: 2509997 - RNA, 18 nt, Human
guggaugccugguggcag

SEQ ID NO: 2509998 - RNA, 16 nt, Human
guggaugccugguggc

SEQ ID NO: 2509999 - RNA, 17 nt, Human
guggaguucaucuugaa

SEQ ID NO: 2510000 - RNA, 20 nt, Human
guggagucccuuuugcauca

SEQ ID NO: 2510001 - RNA, 13 nt, Human
guggaucacagag

SEQ ID NO: 2510002 - RNA, 16 nt, Human
guggauauaaauauau

SEQ ID NO: 2510003 - RNA, 15 nt, Human
guggauauaaauaua

SEQ ID NO: 2510004 - RNA, 13 nt, Human
guggauauaaaua

SEQ ID NO: 2510005 - RNA, 15 nt, Human
guggaguggggcagu

SEQ ID NO: 2510006 - RNA, 14 nt, Human
guggaucacagagg

SEQ ID NO: 2510007 - RNA, 15 nt, Human
guggaucacagaggc

SEQ ID NO: 2510008 - RNA, 13 nt, Human
guggaucaccuga

SEQ ID NO: 2510009 - RNA, 15 nt, Human
guggaucaccugagg

SEQ ID NO: 2510010 - RNA, 16 nt, Human
guggaucacagaggcu

SEQ ID NO: 2510011 - RNA, 15 nt, Human
guggaggaggccugg

SEQ ID NO: 2510012 - RNA, 17 nt, Human
guggaggaguccaggcc

SEQ ID NO: 2510013 - RNA, 13 nt, Human
guggaggcacuuu

SEQ ID NO: 2510014 - RNA, 14 nt, Human
guggaggcacuuua

SEQ ID NO: 2510015 - RNA, 16 nt, Human
guggaggcugcaguga

SEQ ID NO: 2510016 - RNA, 14 nt, Human
guggaggaggccug

SEQ ID NO: 2510017 - RNA, 19 nt, Human
guggaggaggaaggcaaga

SEQ ID NO: 2510018 - RNA, 17 nt, Human
guggaggaggaaggcaa

SEQ ID NO: 2510019 - RNA, 17 nt, Human
guggaggagcagugcag

SEQ ID NO: 2510020 - RNA, 23 nt, Human
guggaggagcucaggacacuaau

SEQ ID NO: 2510021 - RNA, 20 nt, Human
guggaggagcucaggacacu

SEQ ID NO: 2510022 - RNA, 20 nt, Human
guggaggaaggauuguaaaa

SEQ ID NO: 2510023 - RNA, 19 nt, Human
guggaggaaggauuguaaa

SEQ ID NO: 2510024 - RNA, 16 nt, Human
guggaggaaggauugu

SEQ ID NO: 2510025 - RNA, 15 nt, Human
guggaggaaggauug

SEQ ID NO: 2510026 - RNA, 14 nt, Human
guggaggaaggauu

SEQ ID NO: 2510027 - RNA, 13 nt, Human
guggaggaaggau

SEQ ID NO: 2510028 - RNA, 13 nt, Human
guggagcugccug

SEQ ID NO: 2510029 - RNA, 16 nt, Human
guggaggaaugcuccc

SEQ ID NO: 2510030 - RNA, 17 nt, Human
guggaggaaugcucccc

SEQ ID NO: 2510031 - RNA, 12 nt, Human
guggaggagcag

SEQ ID NO: 2510032 - RNA, 15 nt, Human
guggaggagcagugc

SEQ ID NO: 2510033 - RNA, 23 nt, Human
guggaggaaugcucccccauccu

SEQ ID NO: 2510034 - RNA, 16 nt, Human
guggaggagcucagga

SEQ ID NO: 2510035 - RNA, 16 nt, Human
guggagggcguggagg

SEQ ID NO: 2510036 - RNA, 23 nt, Human
guggagggcacauuccuugccug

SEQ ID NO: 2510037 - RNA, 12 nt, Human
guggaggggugu

SEQ ID NO: 2510038 - RNA, 15 nt, Human
guggaggcuuccugc

SEQ ID NO: 2510039 - RNA, 14 nt, Human
guggaggcuuccug

SEQ ID NO: 2510040 - RNA, 12 nt, Human
guggagggccac

SEQ ID NO: 2510041 - RNA, 13 nt, Human
guggaggcuuccu

SEQ ID NO: 2510042 - RNA, 23 nt, Human
guggagggacaaguggacucagg

SEQ ID NO: 2510043 - RNA, 23 nt, Human
guggagggguguggcagugguuu

SEQ ID NO: 2510044 - RNA, 16 nt, Human
guggagggguguggca

SEQ ID NO: 2510045 - RNA, 15 nt, Human
guggagggguguggc

SEQ ID NO: 2510046 - RNA, 18 nt, Human
guggaggugucaggcugc

SEQ ID NO: 2510047 - RNA, 17 nt, Human
guggaggugucaggcug

SEQ ID NO: 2510048 - RNA, 22 nt, Human
guggaggugucaggcugcuggc

SEQ ID NO: 2510049 - RNA, 21 nt, Human
guggagguuaaggcugaggaa

SEQ ID NO: 2510050 - RNA, 22 nt, Human
guggagguuaaggcugaggaaa

SEQ ID NO: 2510051 - RNA, 22 nt, Human
guggagguugcagugagccaag

SEQ ID NO: 2510052 - RNA, 23 nt, Human
guggagguugcagugagccaaga

SEQ ID NO: 2510053 - RNA, 19 nt, Human
guggagguugcagugagcu

SEQ ID NO: 2510054 - RNA, 14 nt, Human
gugcuucuuucuuu

SEQ ID NO: 2510055 - RNA, 20 nt, Human
gugcuuuccagcucaccccc

SEQ ID NO: 2510056 - RNA, 18 nt, Human
gugcuuuccagcucaccc

SEQ ID NO: 2510057 - RNA, 16 nt, Human
gugcuuuccagcucac

SEQ ID NO: 2510058 - RNA, 15 nt, Human
gugcuuuccagcuca

SEQ ID NO: 2510059 - RNA, 14 nt, Human
gugcuuuccagcuc

SEQ ID NO: 2510060 - RNA, 13 nt, Human
gugcuuuccagcu

SEQ ID NO: 2510061 - RNA, 15 nt, Human
gugcuuuaugcugaa

SEQ ID NO: 2510062 - RNA, 17 nt, Human
gugcuuuaugcugaaac

SEQ ID NO: 2510063 - RNA, 19 nt, Human
gugcuuucuauuguacaga

SEQ ID NO: 2510064 - RNA, 17 nt, Human
gugcuuucuauuguaca

SEQ ID NO: 2510065 - RNA, 13 nt, Human
gugcuuucuauug

SEQ ID NO: 2510066 - RNA, 12 nt, Human
gugcuuucuauu

SEQ ID NO: 2510067 - RNA, 19 nt, Human
gugcuuuccuuuuuuaaaa

SEQ ID NO: 2510068 - RNA, 20 nt, Human
gugcuuuccuuuuuuaaaaa

SEQ ID NO: 2510069 - RNA, 22 nt, Human
gugcuuuccguggcacugcaua

SEQ ID NO: 2510070 - RNA, 16 nt, Human
gugcuugccacagagc

SEQ ID NO: 2510071 - RNA, 20 nt, Human
gugcuuguucccucucccug

SEQ ID NO: 2510072 - RNA, 19 nt, Human
gugcuuguuuacagcacua

SEQ ID NO: 2510073 - RNA, 15 nt, Human
gugcuugugugugug

SEQ ID NO: 2510074 - RNA, 21 nt, Human
gugcuuguuugcucaccuggg

SEQ ID NO: 2510075 - RNA, 22 nt, Human
gugcuuguuugcucaccugggg

SEQ ID NO: 2510076 - RNA, 23 nt, Human
gugcuuguuugcucaccuggggu

SEQ ID NO: 2510077 - RNA, 14 nt, Human
gugcuuuaugcuga

SEQ ID NO: 2510078 - RNA, 18 nt, Human
guggaaaaauagccugcc

SEQ ID NO: 2510079 - RNA, 23 nt, Human
guggaaaagccaagaggcugcag

SEQ ID NO: 2510080 - RNA, 12 nt, Human
guggaaaaauau

SEQ ID NO: 2510081 - RNA, 13 nt, Human
guggaaaaauauu

SEQ ID NO: 2510082 - RNA, 14 nt, Human
guggaaaaauauuu

SEQ ID NO: 2510083 - RNA, 15 nt, Human
guggaaaaauauuua

SEQ ID NO: 2510084 - RNA, 19 nt, Human
gugcuuuuccuauuuguuu

SEQ ID NO: 2510085 - RNA, 17 nt, Human
gugcuuuuccuauuugu

SEQ ID NO: 2510086 - RNA, 19 nt, Human
gugcuuuuauagaggcuag

SEQ ID NO: 2510087 - RNA, 18 nt, Human
gugcuuuuauagaggcua

SEQ ID NO: 2510088 - RNA, 14 nt, Human
gugcuuuucuccaa

SEQ ID NO: 2510089 - RNA, 15 nt, Human
gugcuuuuaaaugca

SEQ ID NO: 2510090 - RNA, 22 nt, Human
gugcuuucuauuguacagaagc

SEQ ID NO: 2510091 - RNA, 20 nt, Human
gugcuuucuauuguacagaa

SEQ ID NO: 2510092 - RNA, 19 nt, Human
guggaaaaaugagagaagg

SEQ ID NO: 2510093 - RNA, 14 nt, Human
guggaaagccucug

SEQ ID NO: 2510094 - RNA, 15 nt, Human
guggaaagccucugc

SEQ ID NO: 2510095 - RNA, 13 nt, Human
guggaaagggugc

SEQ ID NO: 2510096 - RNA, 23 nt, Human
guggaaagccucugcugccaugg

SEQ ID NO: 2510097 - RNA, 20 nt, Human
guggaaagggugcugcuucc

SEQ ID NO: 2510098 - RNA, 22 nt, Human
guggaaagggugcugcuucccu

SEQ ID NO: 2510099 - RNA, 16 nt, Human
guggaaagugaauuug

SEQ ID NO: 2510100 - RNA, 19 nt, Human
guggaaagugaauuugaau

SEQ ID NO: 2510101 - RNA, 17 nt, Human
guggaaauuaagaagaa

SEQ ID NO: 2510102 - RNA, 18 nt, Human
guggaaauuaagaagaaa

SEQ ID NO: 2510103 - RNA, 19 nt, Human
guggaaauuaagaagaaac

SEQ ID NO: 2510104 - RNA, 20 nt, Human
guggaaauuaagaagaaacu

SEQ ID NO: 2510105 - RNA, 18 nt, Human
guggaaaguguaaagcau

SEQ ID NO: 2510106 - RNA, 16 nt, Human
guggaaaguguaaagc

SEQ ID NO: 2510107 - RNA, 15 nt, Human
guggaaaguguaaag

SEQ ID NO: 2510108 - RNA, 13 nt, Human
guggaaaguguaa

SEQ ID NO: 2510109 - RNA, 21 nt, Human
guggaaaguguaaagcauucc

SEQ ID NO: 2510110 - RNA, 20 nt, Human
guggaaaguguaaagcauuc

SEQ ID NO: 2510111 - RNA, 23 nt, Human
guggaaaguguaaagcauuccaa

SEQ ID NO: 2510112 - RNA, 17 nt, Human
gugcuuaagcagaagca

SEQ ID NO: 2510113 - RNA, 22 nt, Human
gugcuuaagcagaagcauuaac

SEQ ID NO: 2510114 - RNA, 21 nt, Human
gugcuuaucccauagccagga

SEQ ID NO: 2510115 - RNA, 11 nt, Human
gugcugugugu

SEQ ID NO: 2510116 - RNA, 22 nt, Human
gugcuguguaaaguuagucuac

SEQ ID NO: 2510117 - RNA, 18 nt, Human
gugcuguguaaaguuagu

SEQ ID NO: 2510118 - RNA, 16 nt, Human
gugcuguguaaaguua

SEQ ID NO: 2510119 - RNA, 15 nt, Human
gugcuguguaaaguu

SEQ ID NO: 2510120 - RNA, 14 nt, Human
gugcuguguaaagu

SEQ ID NO: 2510121 - RNA, 13 nt, Human
gugcuguguaaag

SEQ ID NO: 2510122 - RNA, 12 nt, Human
gugcuguguaaa

SEQ ID NO: 2510123 - RNA, 21 nt, Human
gugcugccacacuucaggcuc

SEQ ID NO: 2510124 - RNA, 18 nt, Human
gugcugcccgucuucagc

SEQ ID NO: 2510125 - RNA, 19 nt, Human
gugcugcccgucuucagcc

SEQ ID NO: 2510126 - RNA, 22 nt, Human
gugcugccauccagguucagcu

SEQ ID NO: 2510127 - RNA, 11 nt, Human
gugcugcccug

SEQ ID NO: 2510128 - RNA, 23 nt, Human
gugcuguggggcugguagcucag

SEQ ID NO: 2510129 - RNA, 19 nt, Human
gugcuguggggcugguagc

SEQ ID NO: 2510130 - RNA, 14 nt, Human
gugcuguggggcug

SEQ ID NO: 2510131 - RNA, 21 nt, Human
gugcugcccgucuucagccua

SEQ ID NO: 2510132 - RNA, 19 nt, Human
gugcuguggccugggcaag

SEQ ID NO: 2510133 - RNA, 15 nt, Human
gugcuuggaggaagg

SEQ ID NO: 2510134 - RNA, 13 nt, Human
gugcuuggaggaa

SEQ ID NO: 2510135 - RNA, 12 nt, Human
gugcuuggagga

SEQ ID NO: 2510136 - RNA, 21 nt, Human
gugcuucuaauauuuauugcu

SEQ ID NO: 2510137 - RNA, 17 nt, Human
gugcuucgggcccuucc

SEQ ID NO: 2510138 - RNA, 13 nt, Human
gugcuucuuucuu

SEQ ID NO: 2510139 - RNA, 14 nt, Human
gugcuucgggcccu

SEQ ID NO: 2510140 - RNA, 16 nt, Human
gugcuuccaaggcaga

SEQ ID NO: 2510141 - RNA, 13 nt, Human
gugcuucagccug

SEQ ID NO: 2510142 - RNA, 15 nt, Human
gugcuucagccugag

SEQ ID NO: 2510143 - RNA, 18 nt, Human
gugcuucagccugaggcu

SEQ ID NO: 2510144 - RNA, 18 nt, Human
gugcuuauguaugaggua

SEQ ID NO: 2510145 - RNA, 15 nt, Human
gugcuucaauuaaua

SEQ ID NO: 2510146 - RNA, 23 nt, Human
gugcugaaugguuuucaaaauaa

SEQ ID NO: 2510147 - RNA, 21 nt, Human
gugcugaacaguggaggaaga

SEQ ID NO: 2510148 - RNA, 19 nt, Human
gugcugaauguugggacug

SEQ ID NO: 2510149 - RNA, 19 nt, Human
gugcugaaugguuuucaaa

SEQ ID NO: 2510150 - RNA, 20 nt, Human
gugcugaaugguuuucaaaa

SEQ ID NO: 2510151 - RNA, 18 nt, Human
gugcucuggacaggcaug

SEQ ID NO: 2510152 - RNA, 17 nt, Human
gugcucuggacaggcau

SEQ ID NO: 2510153 - RNA, 17 nt, Human
gugccuuuugcaccccu

SEQ ID NO: 2510154 - RNA, 16 nt, Human
gugccuuuugcacccc

SEQ ID NO: 2510155 - RNA, 15 nt, Human
gugccuuuugcaccc

SEQ ID NO: 2510156 - RNA, 17 nt, Human
gugcucuucuucuuucu

SEQ ID NO: 2510157 - RNA, 22 nt, Human
gugcugaacaaaaaauaaaaau

SEQ ID NO: 2510158 - RNA, 18 nt, Human
gugccuuuuauagcuauu

SEQ ID NO: 2510159 - RNA, 14 nt, Human
gugccuuuuauagc

SEQ ID NO: 2510160 - RNA, 21 nt, Human
gugccuuugaguuuccucagg

SEQ ID NO: 2510161 - RNA, 16 nt, Human
gugcucuggacaggca

SEQ ID NO: 2510162 - RNA, 15 nt, Human
gugcucuggacaggc

SEQ ID NO: 2510163 - RNA, 21 nt, Human
gugccuuggggacaagagcag

SEQ ID NO: 2510164 - RNA, 21 nt, Human
gugccuuggggaauuuccucu

SEQ ID NO: 2510165 - RNA, 20 nt, Human
gugccuuggggaauuuccuc

SEQ ID NO: 2510166 - RNA, 15 nt, Human
gugccgacagaagga

SEQ ID NO: 2510167 - RNA, 14 nt, Human
gugccgacagaagg

SEQ ID NO: 2510168 - RNA, 22 nt, Human
gugccgagaaggaagccuccca

SEQ ID NO: 2510169 - RNA, 15 nt, Human
gugcccugguggaga

SEQ ID NO: 2510170 - RNA, 23 nt, Human
gugcccugguggagaaagcacug

SEQ ID NO: 2510171 - RNA, 16 nt, Human
gugcccuuggaggcca

SEQ ID NO: 2510172 - RNA, 12 nt, Human
gugcccugcccc

SEQ ID NO: 2510173 - RNA, 19 nt, Human
gugcugagucugaaggcug

SEQ ID NO: 2510174 - RNA, 18 nt, Human
gugcugagucugaaggcu

SEQ ID NO: 2510175 - RNA, 17 nt, Human
gugcugagucugaaggc

SEQ ID NO: 2510176 - RNA, 16 nt, Human
gugcugagucugaagg

SEQ ID NO: 2510177 - RNA, 15 nt, Human
gugcugacggaagcc

SEQ ID NO: 2510178 - RNA, 15 nt, Human
gugcugaccucuggu

SEQ ID NO: 2510179 - RNA, 15 nt, Human
gugcugacggccagg

SEQ ID NO: 2510180 - RNA, 16 nt, Human
gugcugacggccaggg

SEQ ID NO: 2510181 - RNA, 18 nt, Human
gugcugacggccagggag

SEQ ID NO: 2510182 - RNA, 14 nt, Human
gugcugaccucugg

SEQ ID NO: 2510183 - RNA, 18 nt, Human
gugcugacccuccuguug

SEQ ID NO: 2510184 - RNA, 16 nt, Human
gugcugacccuccugu

SEQ ID NO: 2510185 - RNA, 14 nt, Human
gugcugacccuccu

SEQ ID NO: 2510186 - RNA, 15 nt, Human
gugcugacagcugcu

SEQ ID NO: 2510187 - RNA, 16 nt, Human
gugcugacagcugcuc

SEQ ID NO: 2510188 - RNA, 17 nt, Human
gugcugacagcugcucc

SEQ ID NO: 2510189 - RNA, 21 nt, Human
gugcugacggccagggagaag

SEQ ID NO: 2510190 - RNA, 23 nt, Human
gugcugacggccagggagaagcu

SEQ ID NO: 2510191 - RNA, 11 nt, Human
gugcugagaag

SEQ ID NO: 2510192 - RNA, 13 nt, Human
gugcugagaagcu

SEQ ID NO: 2510193 - RNA, 14 nt, Human
gugcugagaagcuu

SEQ ID NO: 2510194 - RNA, 12 nt, Human
gugcugagucug

SEQ ID NO: 2510195 - RNA, 19 nt, Human
gugcugccauccagguuca

SEQ ID NO: 2510196 - RNA, 18 nt, Human
gugcugccauccagguuc

SEQ ID NO: 2510197 - RNA, 20 nt, Human
gugcugaucgugcuaaauuu

SEQ ID NO: 2510198 - RNA, 12 nt, Human
gugcugccacac

SEQ ID NO: 2510199 - RNA, 15 nt, Human
gugcugccauccagg

SEQ ID NO: 2510200 - RNA, 19 nt, Human
gugcugcauuuaaaagaua

SEQ ID NO: 2510201 - RNA, 20 nt, Human
gugcugcauuuaaaagauac

SEQ ID NO: 2510202 - RNA, 12 nt, Human
gugcugcauuua

SEQ ID NO: 2510203 - RNA, 22 nt, Human
gugcugaggccuuaucauucau

SEQ ID NO: 2510204 - RNA, 22 nt, Human
gugcugaucgugcuaaauuuuc

SEQ ID NO: 2510205 - RNA, 23 nt, Human
gugcugaguugguguugacaugu

SEQ ID NO: 2510206 - RNA, 19 nt, Human
uaucugugaaaugcuggca

SEQ ID NO: 2510207 - RNA, 17 nt, Human
uaucugugcgugaaaca

SEQ ID NO: 2510208 - RNA, 18 nt, Human
uaucugugcgugaaacac

SEQ ID NO: 2510209 - RNA, 22 nt, Human
uaucugugcucaggacucagaa

SEQ ID NO: 2510210 - RNA, 20 nt, Human
uaucuguguuuuugaaauau

SEQ ID NO: 2510211 - RNA, 14 nt, Human
uaucugugcucagg

SEQ ID NO: 2510212 - RNA, 19 nt, Human
uaucugugcgugaaacaca

SEQ ID NO: 2510213 - RNA, 20 nt, Human
uaucugugcgugaaacacac

SEQ ID NO: 2510214 - RNA, 23 nt, Human
uaucugucauuugagcagggcuc

SEQ ID NO: 2510215 - RNA, 21 nt, Human
uaucugucauuugagcagggc

SEQ ID NO: 2510216 - RNA, 19 nt, Human
uaucugggugcaugaucuu

SEQ ID NO: 2510217 - RNA, 18 nt, Human
uaucuguaaguuuugaau

SEQ ID NO: 2510218 - RNA, 22 nt, Human
uaucuggucaaccuccuggaca

SEQ ID NO: 2510219 - RNA, 21 nt, Human
uaucugggauucuacuuuaag

SEQ ID NO: 2510220 - RNA, 19 nt, Human
uaucugggauucuacuuua

SEQ ID NO: 2510221 - RNA, 18 nt, Human
uaucugggaacugugccu

SEQ ID NO: 2510222 - RNA, 22 nt, Human
uaucuguauuuaauuuugacac

SEQ ID NO: 2510223 - RNA, 17 nt, Human
uaucuguauuuaauuuu

SEQ ID NO: 2510224 - RNA, 15 nt, Human
uaucuguauuuaauu

SEQ ID NO: 2510225 - RNA, 11 nt, Human
uaucuguauuu

SEQ ID NO: 2510226 - RNA, 16 nt, Human
uaucuguaucucucuc

SEQ ID NO: 2510227 - RNA, 23 nt, Human
uaucuguagugagauagcauugu

SEQ ID NO: 2510228 - RNA, 20 nt, Human
uaucugucauuugagcaggg

SEQ ID NO: 2510229 - RNA, 20 nt, Human
uaugaaguuuuuuuuauaca

SEQ ID NO: 2510230 - RNA, 14 nt, Human
uaucuugaagacuu

SEQ ID NO: 2510231 - RNA, 18 nt, Human
uaugaauaaagacaccua

SEQ ID NO: 2510232 - RNA, 20 nt, Human
uaucuguucuuuaauuuauu

SEQ ID NO: 2510233 - RNA, 19 nt, Human
uaucuguucuuuaauuuau

SEQ ID NO: 2510234 - RNA, 14 nt, Human
uaucuguucuuuaa

SEQ ID NO: 2510235 - RNA, 17 nt, Human
uaucuguuuacaguguu

SEQ ID NO: 2510236 - RNA, 16 nt, Human
uaucuguuuacagugu

SEQ ID NO: 2510237 - RNA, 12 nt, Human
uaucuguucuug

SEQ ID NO: 2510238 - RNA, 17 nt, Human
uaucuguguuuuugaaa

SEQ ID NO: 2510239 - RNA, 13 nt, Human
uaucuuaauuuug

SEQ ID NO: 2510240 - RNA, 20 nt, Human
uaucuuaauuuugguuguau

SEQ ID NO: 2510241 - RNA, 20 nt, Human
uaugacaucacuuguacaaa

SEQ ID NO: 2510242 - RNA, 23 nt, Human
uaugacaucacuuguacaaaaua

SEQ ID NO: 2510243 - RNA, 19 nt, Human
uaugacauucaugccuggc

SEQ ID NO: 2510244 - RNA, 14 nt, Human
uaugacauucaugc

SEQ ID NO: 2510245 - RNA, 24 nt, Human
uaugacaucacuuguacaaaauaa

SEQ ID NO: 2510246 - RNA, 14 nt, Human
uaugaccacacucc

SEQ ID NO: 2510247 - RNA, 19 nt, Human
uaugaccacacuccagcug

SEQ ID NO: 2510248 - RNA, 19 nt, Human
uaugacaucacuuguacaa

SEQ ID NO: 2510249 - RNA, 15 nt, Human
uaugacaguuauacu

SEQ ID NO: 2510250 - RNA, 12 nt, Human
uaugacacaugc

SEQ ID NO: 2510251 - RNA, 21 nt, Human
uaugaauuuaaauauaauucu

SEQ ID NO: 2510252 - RNA, 20 nt, Human
uaugaauuuaaauauaauuc

SEQ ID NO: 2510253 - RNA, 19 nt, Human
uaugaauuuaaauauaauu

SEQ ID NO: 2510254 - RNA, 17 nt, Human
uaugaauuuaaauauaa

SEQ ID NO: 2510255 - RNA, 23 nt, Human
uaugaauuuaaauauaauucugu

SEQ ID NO: 2510256 - RNA, 22 nt, Human
uaugacacaugcaaggucauuu

SEQ ID NO: 2510257 - RNA, 16 nt, Human
uaugacagcugucccu

SEQ ID NO: 2510258 - RNA, 20 nt, Human
uaugacagcugucccuguca

SEQ ID NO: 2510259 - RNA, 22 nt, Human
uaugaaugggcaaaacugaauu

SEQ ID NO: 2510260 - RNA, 21 nt, Human
uaugaaugcccccagcuggcc

SEQ ID NO: 2510261 - RNA, 20 nt, Human
uaugaaugcccccagcuggc

SEQ ID NO: 2510262 - RNA, 17 nt, Human
uaugaauuacauuugua

SEQ ID NO: 2510263 - RNA, 23 nt, Human
uaugaauuacauuuguauaaaau

SEQ ID NO: 2510264 - RNA, 18 nt, Human
uaugaauugaauuaucuu

SEQ ID NO: 2510265 - RNA, 15 nt, Human
uaugaauuuaaauau

SEQ ID NO: 2510266 - RNA, 18 nt, Human
uaugaaucuauuauacug

SEQ ID NO: 2510267 - RNA, 12 nt, Human
uaugaaucuauu

SEQ ID NO: 2510268 - RNA, 22 nt, Human
uaugaaucuaugccaaagauca

SEQ ID NO: 2510269 - RNA, 21 nt, Human
uaugaaucuaugccaaagauc

SEQ ID NO: 2510270 - RNA, 20 nt, Human
uaugaaucuaugccaaagau

SEQ ID NO: 2510271 - RNA, 15 nt, Human
uaugaaucuaugcca

SEQ ID NO: 2510272 - RNA, 13 nt, Human
uaugaaucuaugc

SEQ ID NO: 2510273 - RNA, 19 nt, Human
uaugaaugcccccagcugg

SEQ ID NO: 2510274 - RNA, 23 nt, Human
uaugaaucuauuauacuguauua

SEQ ID NO: 2510275 - RNA, 21 nt, Human
uaugaaucuauuauacuguau

SEQ ID NO: 2510276 - RNA, 12 nt, Human
uaugaauacagg

SEQ ID NO: 2510277 - RNA, 16 nt, Human
uaugaauacagggcau

SEQ ID NO: 2510278 - RNA, 14 nt, Human
uaucuucugauuug

SEQ ID NO: 2510279 - RNA, 12 nt, Human
uaugaauaacau

SEQ ID NO: 2510280 - RNA, 15 nt, Human
uauccuucagccuga

SEQ ID NO: 2510281 - RNA, 14 nt, Human
uauccuucagccug

SEQ ID NO: 2510282 - RNA, 13 nt, Human
uauccugagccau

SEQ ID NO: 2510283 - RNA, 23 nt, Human
uauccuccagguuuuucaauuaa

SEQ ID NO: 2510284 - RNA, 17 nt, Human
uauccuuucuaacaaaa

SEQ ID NO: 2510285 - RNA, 22 nt, Human
uauccuuuguggcaccuuuucu

SEQ ID NO: 2510286 - RNA, 16 nt, Human
uaucgggaacaguguu

SEQ ID NO: 2510287 - RNA, 17 nt, Human
uaucgggaacaguguuu

SEQ ID NO: 2510288 - RNA, 18 nt, Human
uaucguaaaauuaagaaa

SEQ ID NO: 2510289 - RNA, 15 nt, Human
uaucguaaaauuaag

SEQ ID NO: 2510290 - RNA, 21 nt, Human
uaucguaaccagccagauccu

SEQ ID NO: 2510291 - RNA, 17 nt, Human
uaucgggagcagugucu

SEQ ID NO: 2510292 - RNA, 14 nt, Human
uaucgggagcagug

SEQ ID NO: 2510293 - RNA, 15 nt, Human
uaucgggagcagugu

SEQ ID NO: 2510294 - RNA, 18 nt, Human
uaucgggagcagugucuu

SEQ ID NO: 2510295 - RNA, 16 nt, Human
uaucuaaauguugaaa

SEQ ID NO: 2510296 - RNA, 23 nt, Human
uauauuaaaaauauaaaacugcg

SEQ ID NO: 2510297 - RNA, 21 nt, Human
uauauuaaaaauauaaaacug

SEQ ID NO: 2510298 - RNA, 20 nt, Human
uauauuaaaaauauaaaacu

SEQ ID NO: 2510299 - RNA, 19 nt, Human
uauauuaaaaauauaaaac

SEQ ID NO: 2510300 - RNA, 15 nt, Human
uauauuaaaauaagc

SEQ ID NO: 2510301 - RNA, 18 nt, Human
uauauuaaaaauauaaaa

SEQ ID NO: 2510302 - RNA, 17 nt, Human
uauauuaaaaauauaaa

SEQ ID NO: 2510303 - RNA, 15 nt, Human
uauauuaaaaauaua

SEQ ID NO: 2510304 - RNA, 13 nt, Human
uauauuaaaaaua

SEQ ID NO: 2510305 - RNA, 19 nt, Human
uauauguuuuugaaggcag

SEQ ID NO: 2510306 - RNA, 19 nt, Human
uauauguuuuaagaggcag

SEQ ID NO: 2510307 - RNA, 23 nt, Human
uauauguuuaccuuuuaauuaau

SEQ ID NO: 2510308 - RNA, 20 nt, Human
uauauguuuaccuuuuaauu

SEQ ID NO: 2510309 - RNA, 20 nt, Human
uauauguucuaauuaauaaa

SEQ ID NO: 2510310 - RNA, 14 nt, Human
uauauguucacugu

SEQ ID NO: 2510311 - RNA, 23 nt, Human
uauauguguguuuaaauaaagua

SEQ ID NO: 2510312 - RNA, 18 nt, Human
uauauguguuuuucacau

SEQ ID NO: 2510313 - RNA, 16 nt, Human
uauccugaaauuucag

SEQ ID NO: 2510314 - RNA, 17 nt, Human
uauccugaaauuucaga

SEQ ID NO: 2510315 - RNA, 14 nt, Human
uauccugaaauuuc

SEQ ID NO: 2510316 - RNA, 23 nt, Human
uauccucuuuagaguuagacugu

SEQ ID NO: 2510317 - RNA, 22 nt, Human
uauccucuuuagaguuagacug

SEQ ID NO: 2510318 - RNA, 17 nt, Human
uauccucuuuagaguua

SEQ ID NO: 2510319 - RNA, 16 nt, Human
uauccucuuuagaguu

SEQ ID NO: 2510320 - RNA, 14 nt, Human
uauccucuuuagag

SEQ ID NO: 2510321 - RNA, 12 nt, Human
uauccucuguaa

SEQ ID NO: 2510322 - RNA, 20 nt, Human
uauccucugaucuccauggc

SEQ ID NO: 2510323 - RNA, 14 nt, Human
uauccucugaucuc

SEQ ID NO: 2510324 - RNA, 11 nt, Human
uauccucugau

SEQ ID NO: 2510325 - RNA, 13 nt, Human
uaucugccuuuau

SEQ ID NO: 2510326 - RNA, 21 nt, Human
uaucugcaggcagacacggau

SEQ ID NO: 2510327 - RNA, 19 nt, Human
uaucugcaggcagacacgg

SEQ ID NO: 2510328 - RNA, 18 nt, Human
uaucugccuuuauugugu

SEQ ID NO: 2510329 - RNA, 14 nt, Human
uaucugccuuuauu

SEQ ID NO: 2510330 - RNA, 20 nt, Human
uaucugccuuuauuguguuu

SEQ ID NO: 2510331 - RNA, 12 nt, Human
uaucugcugucc

SEQ ID NO: 2510332 - RNA, 11 nt, Human
uaucugcuguc

SEQ ID NO: 2510333 - RNA, 20 nt, Human
uaucugcuucaguggagaau

SEQ ID NO: 2510334 - RNA, 22 nt, Human
uaucugcuguccagacagccug

SEQ ID NO: 2510335 - RNA, 17 nt, Human
uaucugcuguccagaca

SEQ ID NO: 2510336 - RNA, 13 nt, Human
uaucugcugucca

SEQ ID NO: 2510337 - RNA, 19 nt, Human
uaucuggaaguaaccauuu

SEQ ID NO: 2510338 - RNA, 23 nt, Human
uaucugcuuuugguuauaaugug

SEQ ID NO: 2510339 - RNA, 18 nt, Human
uaucuggacaagccaacu

SEQ ID NO: 2510340 - RNA, 23 nt, Human
uaucugggauuaugguuuuguga

SEQ ID NO: 2510341 - RNA, 15 nt, Human
uaucugcaggcagac

SEQ ID NO: 2510342 - RNA, 18 nt, Human
uaucugcaggcagacacg

SEQ ID NO: 2510343 - RNA, 17 nt, Human
uaucugcaggcagacac

SEQ ID NO: 2510344 - RNA, 16 nt, Human
uaucugcaggcagaca

SEQ ID NO: 2510345 - RNA, 13 nt, Human
uaucugaggucac

SEQ ID NO: 2510346 - RNA, 23 nt, Human
uaucugagggaggaggccaccuc

SEQ ID NO: 2510347 - RNA, 18 nt, Human
uaucugagggaggaggcc

SEQ ID NO: 2510348 - RNA, 17 nt, Human
uaucugagggaggaggc

SEQ ID NO: 2510349 - RNA, 15 nt, Human
uaucuaauaccucug

SEQ ID NO: 2510350 - RNA, 16 nt, Human
uaucuaauaccucugu

SEQ ID NO: 2510351 - RNA, 21 nt, Human
uaucuaauauguaacaagcca

SEQ ID NO: 2510352 - RNA, 16 nt, Human
uaucgucacugcuuaa

SEQ ID NO: 2510353 - RNA, 14 nt, Human
uaucuaaauugaau

SEQ ID NO: 2510354 - RNA, 13 nt, Human
uaucuaaauugaa

SEQ ID NO: 2510355 - RNA, 21 nt, Human
uaucuaaauugaauaauggua

SEQ ID NO: 2510356 - RNA, 20 nt, Human
uaucuaaauugaauaauggu

SEQ ID NO: 2510357 - RNA, 17 nt, Human
uaucuaaauugaauaau

SEQ ID NO: 2510358 - RNA, 16 nt, Human
uaucuaaauugaauaa

SEQ ID NO: 2510359 - RNA, 16 nt, Human
uaucuacccagaauua

SEQ ID NO: 2510360 - RNA, 13 nt, Human
uaucuacucuccu

SEQ ID NO: 2510361 - RNA, 20 nt, Human
uaucuaauaccucugugugc

SEQ ID NO: 2510362 - RNA, 16 nt, Human
uaucuacaucuuuuuu

SEQ ID NO: 2510363 - RNA, 21 nt, Human
uaucuacaucuuuuuucacaa

SEQ ID NO: 2510364 - RNA, 14 nt, Human
uaugcacacauuuu

SEQ ID NO: 2510365 - RNA, 13 nt, Human
uaugcacauaugg

SEQ ID NO: 2510366 - RNA, 13 nt, Human
uaugcacacauuu

SEQ ID NO: 2510367 - RNA, 15 nt, Human
uaugcaauauaucua

SEQ ID NO: 2510368 - RNA, 16 nt, Human
uaugcaauuuccuuuu

SEQ ID NO: 2510369 - RNA, 17 nt, Human
uaugcaaggaaggaaag

SEQ ID NO: 2510370 - RNA, 20 nt, Human
uaugcaaggaaggaaagaaa

SEQ ID NO: 2510371 - RNA, 20 nt, Human
uaugcaaauauuuuuuugua

SEQ ID NO: 2510372 - RNA, 14 nt, Human
uaugcaaauauuuu

SEQ ID NO: 2510373 - RNA, 18 nt, Human
uaugcaaucaaaucugcu

SEQ ID NO: 2510374 - RNA, 15 nt, Human
uaugcaaagcacuga

SEQ ID NO: 2510375 - RNA, 22 nt, Human
uaugcaaaaguucugacuugac

SEQ ID NO: 2510376 - RNA, 19 nt, Human
uaugauuuuuuuuucauac

SEQ ID NO: 2510377 - RNA, 13 nt, Human
uaugcaaagcacu

SEQ ID NO: 2510378 - RNA, 14 nt, Human
uaugcaaagcacug

SEQ ID NO: 2510379 - RNA, 12 nt, Human
uaugcaaagcac

SEQ ID NO: 2510380 - RNA, 16 nt, Human
uaugauuuuauuugac

SEQ ID NO: 2510381 - RNA, 17 nt, Human
uaugauuuuuuuuucau

SEQ ID NO: 2510382 - RNA, 14 nt, Human
uaugauuuaauaaa

SEQ ID NO: 2510383 - RNA, 18 nt, Human
uaugauuuaaaacaugua

SEQ ID NO: 2510384 - RNA, 17 nt, Human
uaugauuuaaaacaugu

SEQ ID NO: 2510385 - RNA, 14 nt, Human
uaugauuuaaaaca

SEQ ID NO: 2510386 - RNA, 18 nt, Human
uaugauuuaauaaaauaa

SEQ ID NO: 2510387 - RNA, 17 nt, Human
uaugauuuaauaaaaua

SEQ ID NO: 2510388 - RNA, 18 nt, Human
uaugauuuauaguuugua

SEQ ID NO: 2510389 - RNA, 15 nt, Human
uaugauuuauaguuu

SEQ ID NO: 2510390 - RNA, 14 nt, Human
uaugauuuauaguu

SEQ ID NO: 2510391 - RNA, 17 nt, Human
uaugauuuggaaaauaa

SEQ ID NO: 2510392 - RNA, 15 nt, Human
uaugauuuggaaaau

SEQ ID NO: 2510393 - RNA, 18 nt, Human
uaugauuuggaaaauaaa

SEQ ID NO: 2510394 - RNA, 14 nt, Human
uaugauucugcuuu

SEQ ID NO: 2510395 - RNA, 21 nt, Human
uaugauucagauuguuaucua

SEQ ID NO: 2510396 - RNA, 19 nt, Human
uaugauucugcuuuuacca

SEQ ID NO: 2510397 - RNA, 16 nt, Human
uaugauucccagccag

SEQ ID NO: 2510398 - RNA, 16 nt, Human
uaugauuaguaaagaa

SEQ ID NO: 2510399 - RNA, 14 nt, Human
uaugagcucuucau

SEQ ID NO: 2510400 - RNA, 15 nt, Human
uaugagcucuucaug

SEQ ID NO: 2510401 - RNA, 13 nt, Human
uaugagcugaggg

SEQ ID NO: 2510402 - RNA, 12 nt, Human
uaugagcugagg

SEQ ID NO: 2510403 - RNA, 16 nt, Human
uaugagcucuucaugu

SEQ ID NO: 2510404 - RNA, 16 nt, Human
uaugagcugagggggg

SEQ ID NO: 2510405 - RNA, 23 nt, Human
uaugagcuggggaugucucucau

SEQ ID NO: 2510406 - RNA, 23 nt, Human
uaugagaaaagaggcgucuguau

SEQ ID NO: 2510407 - RNA, 17 nt, Human
uaugagccagacaaaug

SEQ ID NO: 2510408 - RNA, 19 nt, Human
uaugagccagacaaaugga

SEQ ID NO: 2510409 - RNA, 15 nt, Human
uaugagaggcaauga

SEQ ID NO: 2510410 - RNA, 16 nt, Human
uaugagccagacaaau

SEQ ID NO: 2510411 - RNA, 23 nt, Human
uaugacuccagaauuucccaaag

SEQ ID NO: 2510412 - RNA, 17 nt, Human
uaugacuccagaauuuc

SEQ ID NO: 2510413 - RNA, 16 nt, Human
uaugacuucauuaaua

SEQ ID NO: 2510414 - RNA, 20 nt, Human
uaugacuucauuaauaauaa

SEQ ID NO: 2510415 - RNA, 23 nt, Human
uaugacugcuucaugacauuccu

SEQ ID NO: 2510416 - RNA, 17 nt, Human
uaugacugcuucaugac

SEQ ID NO: 2510417 - RNA, 22 nt, Human
uaugacugcuccccagcccugg

SEQ ID NO: 2510418 - RNA, 18 nt, Human
uaugacugcuccccagcc

SEQ ID NO: 2510419 - RNA, 17 nt, Human
uaugacugcuccccagc

SEQ ID NO: 2510420 - RNA, 16 nt, Human
uaugacucccaaauuu

SEQ ID NO: 2510421 - RNA, 16 nt, Human
uaugacuccagaauuu

SEQ ID NO: 2510422 - RNA, 18 nt, Human
uaugacuaaagagagaau

SEQ ID NO: 2510423 - RNA, 19 nt, Human
uaugacuaaagagagaaug

SEQ ID NO: 2510424 - RNA, 20 nt, Human
uaugacuaaagagagaaugu

SEQ ID NO: 2510425 - RNA, 21 nt, Human
uaugacuaaagagagaaugua

SEQ ID NO: 2510426 - RNA, 19 nt, Human
uaugacggaagaacauaga

SEQ ID NO: 2510427 - RNA, 20 nt, Human
uaugacggaagaacauagaa

SEQ ID NO: 2510428 - RNA, 12 nt, Human
uaugacuaaaga

SEQ ID NO: 2510429 - RNA, 13 nt, Human
uaugacuaaagag

SEQ ID NO: 2510430 - RNA, 14 nt, Human
uaugacuaaagaga

SEQ ID NO: 2510431 - RNA, 15 nt, Human
uaugacuaaagagag

SEQ ID NO: 2510432 - RNA, 16 nt, Human
uaugacuaaagagaga

SEQ ID NO: 2510433 - RNA, 17 nt, Human
uaugacuaaagagagaa

SEQ ID NO: 2510434 - RNA, 20 nt, Human
uaugacauucaugccuggcu

SEQ ID NO: 2510435 - RNA, 16 nt, Human
uaugacggaagaacau

SEQ ID NO: 2510436 - RNA, 16 nt, Human
uaugaccuucuaggaa

SEQ ID NO: 2510437 - RNA, 18 nt, Human
uaugaccuucuaggaagc

SEQ ID NO: 2510438 - RNA, 22 nt, Human
uaugcacuuauaauuuuccuaa

SEQ ID NO: 2510439 - RNA, 15 nt, Human
uaugcagaauacuuu

SEQ ID NO: 2510440 - RNA, 20 nt, Human
uaugcacuuauaauuuuccu

SEQ ID NO: 2510441 - RNA, 17 nt, Human
uaugcacgaccuuggga

SEQ ID NO: 2510442 - RNA, 15 nt, Human
uaugcacgaccuugg

SEQ ID NO: 2510443 - RNA, 19 nt, Human
uaugcacuuauaauuuucc

SEQ ID NO: 2510444 - RNA, 22 nt, Human
uaugcaccuugugucuguacac

SEQ ID NO: 2510445 - RNA, 20 nt, Human
uaugcaccuugugucuguac

SEQ ID NO: 2510446 - RNA, 19 nt, Human
uaugcaccuugugucugua

SEQ ID NO: 2510447 - RNA, 18 nt, Human
uaugcaccuugugucugu

SEQ ID NO: 2510448 - RNA, 20 nt, Human
uaugcacauauggacucugc

SEQ ID NO: 2510449 - RNA, 19 nt, Human
uaugcacauauggacucug

SEQ ID NO: 2510450 - RNA, 14 nt, Human
uaugcaccuugugu

SEQ ID NO: 2510451 - RNA, 18 nt, Human
uaugcagagguccacaac

SEQ ID NO: 2510452 - RNA, 14 nt, Human
uaugcagaauguuu

SEQ ID NO: 2510453 - RNA, 22 nt, Human
uaugcagugauauggcagaaga

SEQ ID NO: 2510454 - RNA, 19 nt, Human
uaugcagugauauggcaga

SEQ ID NO: 2510455 - RNA, 19 nt, Human
uaugcaguauugagcacug

SEQ ID NO: 2510456 - RNA, 14 nt, Human
uaugcauaaaguca

SEQ ID NO: 2510457 - RNA, 15 nt, Human
uaugcauaaagucag

SEQ ID NO: 2510458 - RNA, 20 nt, Human
uaugcauauuauuuuauguu

SEQ ID NO: 2510459 - RNA, 17 nt, Human
uaugcaguuuuucagag

SEQ ID NO: 2510460 - RNA, 16 nt, Human
uaugcuucuguuuuau

SEQ ID NO: 2510461 - RNA, 15 nt, Human
uaugcuucuguuuua

SEQ ID NO: 2510462 - RNA, 12 nt, Human
uaugcuucauac

SEQ ID NO: 2510463 - RNA, 13 nt, Human
uaugcuucauaca

SEQ ID NO: 2510464 - RNA, 14 nt, Human
uaugcuucauacag

SEQ ID NO: 2510465 - RNA, 16 nt, Human
uaugcuucauacaggg

SEQ ID NO: 2510466 - RNA, 13 nt, Human
uaugcaugaagua

SEQ ID NO: 2510467 - RNA, 18 nt, Human
uaugcaugaaguaauaug

SEQ ID NO: 2510468 - RNA, 22 nt, Human
uaugcuuauacacuuacacuuu

SEQ ID NO: 2510469 - RNA, 13 nt, Human
uaugcuuauuuua

SEQ ID NO: 2510470 - RNA, 16 nt, Human
uaugcaucuaauaaaa

SEQ ID NO: 2510471 - RNA, 17 nt, Human
uaugcaucuaauaaaaa

SEQ ID NO: 2510472 - RNA, 14 nt, Human
uaugcuuauuuuaa

SEQ ID NO: 2510473 - RNA, 17 nt, Human
uaugcuuauuuuaaaau

SEQ ID NO: 2510474 - RNA, 19 nt, Human
uaugcuuauuuuaaaauuu

SEQ ID NO: 2510475 - RNA, 17 nt, Human
uauggacaaugacccag

SEQ ID NO: 2510476 - RNA, 20 nt, Human
uauggaauuuuucauugaua

SEQ ID NO: 2510477 - RNA, 18 nt, Human
uauggaauugauuugcau

SEQ ID NO: 2510478 - RNA, 23 nt, Human
uauggaauacaguguuauuuucu

SEQ ID NO: 2510479 - RNA, 19 nt, Human
uauggaauugauuugcauu

SEQ ID NO: 2510480 - RNA, 11 nt, Human
uauggaauuga

SEQ ID NO: 2510481 - RNA, 22 nt, Human
uauggaauuacauguaaaacau

SEQ ID NO: 2510482 - RNA, 18 nt, Human
uauggaauuacauguaaa

SEQ ID NO: 2510483 - RNA, 14 nt, Human
uauggaauuacaug

SEQ ID NO: 2510484 - RNA, 14 nt, Human
uauggaauacagug

SEQ ID NO: 2510485 - RNA, 17 nt, Human
uauggaauacaguguua

SEQ ID NO: 2510486 - RNA, 24 nt, Human
uauggaauacaguguuauuuucuu

SEQ ID NO: 2510487 - RNA, 22 nt, Human
uauggaaggguuuguggcuggg

SEQ ID NO: 2510488 - RNA, 22 nt, Human
uauggaagcauauuguuauuau

SEQ ID NO: 2510489 - RNA, 19 nt, Human
uauggaaggguuuguggcu

SEQ ID NO: 2510490 - RNA, 20 nt, Human
uauggaacuucuaauauauu

SEQ ID NO: 2510491 - RNA, 17 nt, Human
uauggaacuucuaauau

SEQ ID NO: 2510492 - RNA, 15 nt, Human
uauggaacuucuaau

SEQ ID NO: 2510493 - RNA, 13 nt, Human
uauggaacuucua

SEQ ID NO: 2510494 - RNA, 17 nt, Human
uauggaacucucuccac

SEQ ID NO: 2510495 - RNA, 19 nt, Human
uauggaacacucugagacu

SEQ ID NO: 2510496 - RNA, 13 nt, Human
uauggaacucucu

SEQ ID NO: 2510497 - RNA, 17 nt, Human
uauggaaauaaauguau

SEQ ID NO: 2510498 - RNA, 21 nt, Human
uauggaaacuguugccagaga

SEQ ID NO: 2510499 - RNA, 18 nt, Human
uauggaacacucugagac

SEQ ID NO: 2510500 - RNA, 17 nt, Human
uauggaacacucugaga

SEQ ID NO: 2510501 - RNA, 16 nt, Human
uauggaacacucugag

SEQ ID NO: 2510502 - RNA, 13 nt, Human
uauggaacacucu

SEQ ID NO: 2510503 - RNA, 15 nt, Human
uaugcuuuaaacauu

SEQ ID NO: 2510504 - RNA, 12 nt, Human
uaugcuuugaau

SEQ ID NO: 2510505 - RNA, 16 nt, Human
uauggaaauaaaugua

SEQ ID NO: 2510506 - RNA, 15 nt, Human
uaugcuuugaaugua

SEQ ID NO: 2510507 - RNA, 17 nt, Human
uaugcuucauacaggga

SEQ ID NO: 2510508 - RNA, 13 nt, Human
uaugcuucuugga

SEQ ID NO: 2510509 - RNA, 13 nt, Human
uauauaaauauau

SEQ ID NO: 2510510 - RNA, 12 nt, Human
uauauaaauaua

SEQ ID NO: 2510511 - RNA, 22 nt, Human
uauauaaauaaauauauauauc

SEQ ID NO: 2510512 - RNA, 19 nt, Human
uauauaaauaaauauauau

SEQ ID NO: 2510513 - RNA, 16 nt, Human
uauauaaauauauaua

SEQ ID NO: 2510514 - RNA, 15 nt, Human
uauauaaauauauau

SEQ ID NO: 2510515 - RNA, 20 nt, Human
uauauaaauauauauaaaua

SEQ ID NO: 2510516 - RNA, 18 nt, Human
uauauaaauaaauauaua

SEQ ID NO: 2510517 - RNA, 16 nt, Human
uauauaaauaaauaua

SEQ ID NO: 2510518 - RNA, 15 nt, Human
uauauaaauaaauau

SEQ ID NO: 2510519 - RNA, 11 nt, Human
uauauaaauaa

SEQ ID NO: 2510520 - RNA, 16 nt, Human
uauaguuuuacuuuua

SEQ ID NO: 2510521 - RNA, 13 nt, Human
uauauaacaaugc

SEQ ID NO: 2510522 - RNA, 15 nt, Human
uauauaaaugcuuuu

SEQ ID NO: 2510523 - RNA, 12 nt, Human
uauauaaaugcu

SEQ ID NO: 2510524 - RNA, 18 nt, Human
uauauaaaugguuaaaag

SEQ ID NO: 2510525 - RNA, 15 nt, Human
uauaucuaucuuaua

SEQ ID NO: 2510526 - RNA, 23 nt, Human
uauauaaauuuuuuuuguuucau

SEQ ID NO: 2510527 - RNA, 13 nt, Human
uauaugcuucugu

SEQ ID NO: 2510528 - RNA, 16 nt, Human
uauaugcuuacugaua

SEQ ID NO: 2510529 - RNA, 17 nt, Human
uauaugcuuacugauau

SEQ ID NO: 2510530 - RNA, 21 nt, Human
uauaugcuuacugauauauuu

SEQ ID NO: 2510531 - RNA, 20 nt, Human
uauaugcucugcauguuaca

SEQ ID NO: 2510532 - RNA, 16 nt, Human
uauaucucucaugcau

SEQ ID NO: 2510533 - RNA, 14 nt, Human
uauaugcuuacuga

SEQ ID NO: 2510534 - RNA, 21 nt, Human
uauaugcucugcauguuacau

SEQ ID NO: 2510535 - RNA, 14 nt, Human
uauauguguaugua

SEQ ID NO: 2510536 - RNA, 18 nt, Human
uauaugugaacauuuauc

SEQ ID NO: 2510537 - RNA, 22 nt, Human
uauauguguguuuaaauaaagu

SEQ ID NO: 2510538 - RNA, 19 nt, Human
uauauguguguuuaaauaa

SEQ ID NO: 2510539 - RNA, 16 nt, Human
uauauguguguuuaaa

SEQ ID NO: 2510540 - RNA, 15 nt, Human
uauauguguguuuaa

SEQ ID NO: 2510541 - RNA, 13 nt, Human
uauaugugugugu

SEQ ID NO: 2510542 - RNA, 19 nt, Human
uauauguguguguauguuu

SEQ ID NO: 2510543 - RNA, 22 nt, Human
uauauguguguguauguuugca

SEQ ID NO: 2510544 - RNA, 22 nt, Human
uauaugugaauccucuucuuua

SEQ ID NO: 2510545 - RNA, 16 nt, Human
uauaugugaugaucua

SEQ ID NO: 2510546 - RNA, 12 nt, Human
uauaugucaaag

SEQ ID NO: 2510547 - RNA, 19 nt, Human
uauacguguagcuauaucu

SEQ ID NO: 2510548 - RNA, 17 nt, Human
uauacguguagcuauau

SEQ ID NO: 2510549 - RNA, 15 nt, Human
uauacguguagcuau

SEQ ID NO: 2510550 - RNA, 14 nt, Human
uauacguguagcua

SEQ ID NO: 2510551 - RNA, 13 nt, Human
uauacguguagcu

SEQ ID NO: 2510552 - RNA, 22 nt, Human
uauacgugaaaauuauuugaaa

SEQ ID NO: 2510553 - RNA, 20 nt, Human
uauacgcagcgugcuuuaaa

SEQ ID NO: 2510554 - RNA, 12 nt, Human
uauacugaagga

SEQ ID NO: 2510555 - RNA, 20 nt, Human
uauacugaaggaaaaacaca

SEQ ID NO: 2510556 - RNA, 15 nt, Human
uauacuaagaaaaga

SEQ ID NO: 2510557 - RNA, 16 nt, Human
uauaccuuugccuugg

SEQ ID NO: 2510558 - RNA, 18 nt, Human
uauacgauaaauaacuuu

SEQ ID NO: 2510559 - RNA, 11 nt, Human
uauacuguaaa

SEQ ID NO: 2510560 - RNA, 12 nt, Human
uauacuguaaag

SEQ ID NO: 2510561 - RNA, 13 nt, Human
uauacuguaaaga

SEQ ID NO: 2510562 - RNA, 14 nt, Human
uauacuguaaagaa

SEQ ID NO: 2510563 - RNA, 15 nt, Human
uauacuguaaagaaa

SEQ ID NO: 2510564 - RNA, 16 nt, Human
uauacuguaaagaaag

SEQ ID NO: 2510565 - RNA, 17 nt, Human
uauacuguaaagaaaga

SEQ ID NO: 2510566 - RNA, 19 nt, Human
uauacuguaaagaaagaga

SEQ ID NO: 2510567 - RNA, 12 nt, Human
uauacugcauac

SEQ ID NO: 2510568 - RNA, 16 nt, Human
uauacugcauacuuuu

SEQ ID NO: 2510569 - RNA, 22 nt, Human
uauacugaaggaaaaacacaag

SEQ ID NO: 2510570 - RNA, 17 nt, Human
uauacugcauacuuuuu

SEQ ID NO: 2510571 - RNA, 10 nt, Human
uauacuguaa

SEQ ID NO: 2510572 - RNA, 16 nt, Human
uauacuggagaagucu

SEQ ID NO: 2510573 - RNA, 22 nt, Human
uauaguugcuugccugauauaa

SEQ ID NO: 2510574 - RNA, 14 nt, Human
uauaguugcuugcc

SEQ ID NO: 2510575 - RNA, 19 nt, Human
uauaguuaggauagcauuu

SEQ ID NO: 2510576 - RNA, 18 nt, Human
uauaguuaggauagcauu

SEQ ID NO: 2510577 - RNA, 22 nt, Human
uauaguuucagauauauaucau

SEQ ID NO: 2510578 - RNA, 18 nt, Human
uauaguuuguacaugcau

SEQ ID NO: 2510579 - RNA, 15 nt, Human
uauaguuuguacaug

SEQ ID NO: 2510580 - RNA, 15 nt, Human
uauaguuuuacuuuu

SEQ ID NO: 2510581 - RNA, 21 nt, Human
uauaguuguggacauuuaaga

SEQ ID NO: 2510582 - RNA, 16 nt, Human
uauaguuuacuauuuu

SEQ ID NO: 2510583 - RNA, 19 nt, Human
uauaguuuauugacaauaa

SEQ ID NO: 2510584 - RNA, 13 nt, Human
uauaguuucagau

SEQ ID NO: 2510585 - RNA, 17 nt, Human
uauaguuuacuauuuua

SEQ ID NO: 2510586 - RNA, 17 nt, Human
uauaguuaggauagcau

SEQ ID NO: 2510587 - RNA, 18 nt, Human
uauaguguaaaauaagaa

SEQ ID NO: 2510588 - RNA, 13 nt, Human
uauaguguaaaau

SEQ ID NO: 2510589 - RNA, 21 nt, Human
uauaguguaaaauaagaauga

SEQ ID NO: 2510590 - RNA, 20 nt, Human
uauacuguaaagaaagagag

SEQ ID NO: 2510591 - RNA, 18 nt, Human
uauaauguuguuauuuaa

SEQ ID NO: 2510592 - RNA, 15 nt, Human
uauaauguuugcuau

SEQ ID NO: 2510593 - RNA, 18 nt, Human
uauaaucccagcacuuug

SEQ ID NO: 2510594 - RNA, 20 nt, Human
uauaaucacuuuuuuccaca

SEQ ID NO: 2510595 - RNA, 19 nt, Human
uauaauguuguuauuuaaa

SEQ ID NO: 2510596 - RNA, 17 nt, Human
uauaauguuguuauuua

SEQ ID NO: 2510597 - RNA, 20 nt, Human
uauaaucuuccauacuucuu

SEQ ID NO: 2510598 - RNA, 18 nt, Human
uauaauucuguacugauu

SEQ ID NO: 2510599 - RNA, 15 nt, Human
uauaccugugccucg

SEQ ID NO: 2510600 - RNA, 19 nt, Human
uauaccugugccucggcuu

SEQ ID NO: 2510601 - RNA, 14 nt, Human
uauaauuguaucgu

SEQ ID NO: 2510602 - RNA, 13 nt, Human
uauaauuguaucg

SEQ ID NO: 2510603 - RNA, 18 nt, Human
uauaauuguaucagaggc

SEQ ID NO: 2510604 - RNA, 12 nt, Human
uauaauuguauc

SEQ ID NO: 2510605 - RNA, 22 nt, Human
uauaauuguaucguauagcugu

SEQ ID NO: 2510606 - RNA, 15 nt, Human
uauaauucacauugu

SEQ ID NO: 2510607 - RNA, 18 nt, Human
uauaauuacauauuugca

SEQ ID NO: 2510608 - RNA, 19 nt, Human
uauaauuaucggaagcagu

SEQ ID NO: 2510609 - RNA, 22 nt, Human
uauaauucuguacauagccuau

SEQ ID NO: 2510610 - RNA, 21 nt, Human
uauaauucuguacauagccua

SEQ ID NO: 2510611 - RNA, 20 nt, Human
uauaauucuguacauagccu

SEQ ID NO: 2510612 - RNA, 19 nt, Human
uauaauucuguacauagcc

SEQ ID NO: 2510613 - RNA, 15 nt, Human
uauaauucuguacau

SEQ ID NO: 2510614 - RNA, 14 nt, Human
uauaauucuguaca

SEQ ID NO: 2510615 - RNA, 13 nt, Human
uauaauucuguac

SEQ ID NO: 2510616 - RNA, 16 nt, Human
uauaauucuguaaaug

SEQ ID NO: 2510617 - RNA, 15 nt, Human
uauaauucuguaaau

SEQ ID NO: 2510618 - RNA, 14 nt, Human
uauaauucuguaaa

SEQ ID NO: 2510619 - RNA, 19 nt, Human
uauaaagaagaacuugcau

SEQ ID NO: 2510620 - RNA, 21 nt, Human
uauaaagccuguauucucaaa

SEQ ID NO: 2510621 - RNA, 17 nt, Human
uauaaagauggcugacu

SEQ ID NO: 2510622 - RNA, 14 nt, Human
uauaaaugcuauuu

SEQ ID NO: 2510623 - RNA, 18 nt, Human
uauaaaugccaaagucuu

SEQ ID NO: 2510624 - RNA, 15 nt, Human
uauaaaugcaauauu

SEQ ID NO: 2510625 - RNA, 20 nt, Human
uauaaaucgcuuuugauaau

SEQ ID NO: 2510626 - RNA, 23 nt, Human
uauaaaucgcuuuugauaaucaa

SEQ ID NO: 2510627 - RNA, 21 nt, Human
uauaaaggaaaaaagagaagu

SEQ ID NO: 2510628 - RNA, 17 nt, Human
uaguugagccccaaguc

SEQ ID NO: 2510629 - RNA, 13 nt, Human
uaguugagcccca

SEQ ID NO: 2510630 - RNA, 12 nt, Human
uaguugagcccc

SEQ ID NO: 2510631 - RNA, 23 nt, Human
uaguugagccagcagacauuguc

SEQ ID NO: 2510632 - RNA, 17 nt, Human
uaguugcaauagaacag

SEQ ID NO: 2510633 - RNA, 14 nt, Human
uaguugcaauugaa

SEQ ID NO: 2510634 - RNA, 16 nt, Human
uaguugcaauugaauu

SEQ ID NO: 2510635 - RNA, 17 nt, Human
uaguugcagaaacauuu

SEQ ID NO: 2510636 - RNA, 19 nt, Human
uaguugcagaaacauuuug

SEQ ID NO: 2510637 - RNA, 23 nt, Human
uaguugcagacucaguuugucag

SEQ ID NO: 2510638 - RNA, 18 nt, Human
uaguugcagacucaguuu

SEQ ID NO: 2510639 - RNA, 22 nt, Human
uaguugcguggacucugcacau

SEQ ID NO: 2510640 - RNA, 18 nt, Human
uauaaacuuuaccuuuuu

SEQ ID NO: 2510641 - RNA, 13 nt, Human
uauaaacuuuaga

SEQ ID NO: 2510642 - RNA, 15 nt, Human
uauaaacuuuagagu

SEQ ID NO: 2510643 - RNA, 22 nt, Human
uauaaacuuuagaguagcauga

SEQ ID NO: 2510644 - RNA, 21 nt, Human
uauaaacuuuagaguagcaug

SEQ ID NO: 2510645 - RNA, 15 nt, Human
uauaaagaacaaggu

SEQ ID NO: 2510646 - RNA, 18 nt, Human
uauaaagaagaacuugca

SEQ ID NO: 2510647 - RNA, 22 nt, Human
uauaaagaacaagguaguuuuu

SEQ ID NO: 2510648 - RNA, 22 nt, Human
uauaauaaaaggaaaagcaaau

SEQ ID NO: 2510649 - RNA, 16 nt, Human
uauaaauuauguuuau

SEQ ID NO: 2510650 - RNA, 14 nt, Human
uauaaauuauguuu

SEQ ID NO: 2510651 - RNA, 14 nt, Human
uauaaauuccucuu

SEQ ID NO: 2510652 - RNA, 14 nt, Human
uauaauaaaaggaa

SEQ ID NO: 2510653 - RNA, 13 nt, Human
uauaauaaaagga

SEQ ID NO: 2510654 - RNA, 22 nt, Human
uauaaauuauguuuauauaaau

SEQ ID NO: 2510655 - RNA, 12 nt, Human
uauaauaaaagg

SEQ ID NO: 2510656 - RNA, 16 nt, Human
uauaaaugcuauuuuu

SEQ ID NO: 2510657 - RNA, 16 nt, Human
uauaaaugguguuuuu

SEQ ID NO: 2510658 - RNA, 20 nt, Human
uauaauauacuauauuuaug

SEQ ID NO: 2510659 - RNA, 15 nt, Human
uauaauauauuugug

SEQ ID NO: 2510660 - RNA, 15 nt, Human
uauaauauccuuugu

SEQ ID NO: 2510661 - RNA, 22 nt, Human
uauaauauuuuuaauuaaauaa

SEQ ID NO: 2510662 - RNA, 22 nt, Human
uauaauauauuuguguauuuaa

SEQ ID NO: 2510663 - RNA, 16 nt, Human
uauaauauauuugugu

SEQ ID NO: 2510664 - RNA, 16 nt, Human
uauaauaaauguacau

SEQ ID NO: 2510665 - RNA, 21 nt, Human
uauaauaaaaggaaaagcaaa

SEQ ID NO: 2510666 - RNA, 17 nt, Human
uauaauauacuauauuu

SEQ ID NO: 2510667 - RNA, 15 nt, Human
uauaauacuguauuu

SEQ ID NO: 2510668 - RNA, 12 nt, Human
uaggaauugacc

SEQ ID NO: 2510669 - RNA, 15 nt, Human
uaggaaucagcaaga

SEQ ID NO: 2510670 - RNA, 14 nt, Human
uaggaaucagcaag

SEQ ID NO: 2510671 - RNA, 17 nt, Human
uaggaaugugaaagcac

SEQ ID NO: 2510672 - RNA, 18 nt, Human
uaggaauuaaguuaucuu

SEQ ID NO: 2510673 - RNA, 21 nt, Human
uaggaauucccagcccaaagc

SEQ ID NO: 2510674 - RNA, 16 nt, Human
uaggaauuguguuuau

SEQ ID NO: 2510675 - RNA, 19 nt, Human
uaggaauucuuuuggggaa

SEQ ID NO: 2510676 - RNA, 18 nt, Human
uaggacaaucaguccccu

SEQ ID NO: 2510677 - RNA, 20 nt, Human
uaggacauaaauuagagguc

SEQ ID NO: 2510678 - RNA, 17 nt, Human
uaggaccaagcaucuug

SEQ ID NO: 2510679 - RNA, 20 nt, Human
uaggacaaucaguccccucc

SEQ ID NO: 2510680 - RNA, 23 nt, Human
guggcugcagcagcgguggccuc

SEQ ID NO: 2510681 - RNA, 15 nt, Human
guggcugcagcagcg

SEQ ID NO: 2510682 - RNA, 18 nt, Human
guggcugaggaggccucc

SEQ ID NO: 2510683 - RNA, 17 nt, Human
guggcugaggaggccuc

SEQ ID NO: 2510684 - RNA, 17 nt, Human
guggcugagccccuguc

SEQ ID NO: 2510685 - RNA, 15 nt, Human
guggcugagccccug

SEQ ID NO: 2510686 - RNA, 21 nt, Human
guggcucugaggugccugucc

SEQ ID NO: 2510687 - RNA, 15 nt, Human
guggcucugcuggcc

SEQ ID NO: 2510688 - RNA, 14 nt, Human
guggcugacccagu

SEQ ID NO: 2510689 - RNA, 15 nt, Human
guggcugacccaguc

SEQ ID NO: 2510690 - RNA, 17 nt, Human
guggcugacccaguccc

SEQ ID NO: 2510691 - RNA, 19 nt, Human
guggcugacccagucccug

SEQ ID NO: 2510692 - RNA, 12 nt, Human
uaggaaucagca

SEQ ID NO: 2510693 - RNA, 18 nt, Human
uaggccuggccagaugca

SEQ ID NO: 2510694 - RNA, 21 nt, Human
uaggccuuccucucuccagau

SEQ ID NO: 2510695 - RNA, 16 nt, Human
uaggccugggugcugg

SEQ ID NO: 2510696 - RNA, 19 nt, Human
uaggccugggugcuggcug

SEQ ID NO: 2510697 - RNA, 13 nt, Human
uaggccugggugc

SEQ ID NO: 2510698 - RNA, 19 nt, Human
uaggcccccacuugccucu

SEQ ID NO: 2510699 - RNA, 14 nt, Human
uaggcccccacuug

SEQ ID NO: 2510700 - RNA, 21 nt, Human
uaggcccccacuugccucuuc

SEQ ID NO: 2510701 - RNA, 15 nt, Human
uaggccuggccagau

SEQ ID NO: 2510702 - RNA, 18 nt, Human
uaggaccaagcaucuugg

SEQ ID NO: 2510703 - RNA, 22 nt, Human
uaggaccaagcaucuugggggg

SEQ ID NO: 2510704 - RNA, 16 nt, Human
uaggccaugggacagg

SEQ ID NO: 2510705 - RNA, 18 nt, Human
uaggccaugggacaggga

SEQ ID NO: 2510706 - RNA, 13 nt, Human
uaggacccuuccc

SEQ ID NO: 2510707 - RNA, 15 nt, Human
uaggcucugcacaga

SEQ ID NO: 2510708 - RNA, 18 nt, Human
uaggcucugcacagaugg

SEQ ID NO: 2510709 - RNA, 21 nt, Human
uaggcucugcacagauggauu

SEQ ID NO: 2510710 - RNA, 19 nt, Human
uagggaaaaaccagcgugu

SEQ ID NO: 2510711 - RNA, 20 nt, Human
uagggaaaaaccagcgugug

SEQ ID NO: 2510712 - RNA, 21 nt, Human
uagggaaaaaccagcguguga

SEQ ID NO: 2510713 - RNA, 23 nt, Human
uaggccuuccucucuccagaugu

SEQ ID NO: 2510714 - RNA, 20 nt, Human
uaggccugggugcuggcugc

SEQ ID NO: 2510715 - RNA, 14 nt, Human
uaggcuauucacaa

SEQ ID NO: 2510716 - RNA, 19 nt, Human
uaggcucagagaugugcac

SEQ ID NO: 2510717 - RNA, 15 nt, Human
uaggcuauucacaac

SEQ ID NO: 2510718 - RNA, 22 nt, Human
uaggcuccugccaguguggaac

SEQ ID NO: 2510719 - RNA, 11 nt, Human
uaggcucugca

SEQ ID NO: 2510720 - RNA, 22 nt, Human
uaggcuccgucaguaucaggcc

SEQ ID NO: 2510721 - RNA, 14 nt, Human
uagguacacagcuc

SEQ ID NO: 2510722 - RNA, 13 nt, Human
uagguaacuucau

SEQ ID NO: 2510723 - RNA, 16 nt, Human
uagguaaauuacaguu

SEQ ID NO: 2510724 - RNA, 15 nt, Human
uagguagauguucag

SEQ ID NO: 2510725 - RNA, 14 nt, Human
uagguagauguuca

SEQ ID NO: 2510726 - RNA, 14 nt, Human
uagguaggguuuaa

SEQ ID NO: 2510727 - RNA, 20 nt, Human
uaggcucugcacagauggau

SEQ ID NO: 2510728 - RNA, 20 nt, Human
uagguauaaguggugugugu

SEQ ID NO: 2510729 - RNA, 14 nt, Human
uagguauacagugg

SEQ ID NO: 2510730 - RNA, 11 nt, Human
uagguauuuug

SEQ ID NO: 2510731 - RNA, 16 nt, Human
uaggucaagaagaaga

SEQ ID NO: 2510732 - RNA, 14 nt, Human
uagguauuucaaaa

SEQ ID NO: 2510733 - RNA, 15 nt, Human
uagguaugaauaagu

SEQ ID NO: 2510734 - RNA, 15 nt, Human
uaggucacuccuggg

SEQ ID NO: 2510735 - RNA, 12 nt, Human
uaggucacuggc

SEQ ID NO: 2510736 - RNA, 18 nt, Human
uaggucaagaagaagaug

SEQ ID NO: 2510737 - RNA, 16 nt, Human
uaggucagugcaaaua

SEQ ID NO: 2510738 - RNA, 21 nt, Human
uaggucacuggcucuccaagu

SEQ ID NO: 2510739 - RNA, 20 nt, Human
uaggucacuggcucuccaag

SEQ ID NO: 2510740 - RNA, 19 nt, Human
uaggucacuggcucuccaa

SEQ ID NO: 2510741 - RNA, 14 nt, Human
uaggucacuggcuc

SEQ ID NO: 2510742 - RNA, 24 nt, Human
uaggucacuggcucuccaagugcc

SEQ ID NO: 2510743 - RNA, 14 nt, Human
uaggucagugaggc

SEQ ID NO: 2510744 - RNA, 15 nt, Human
uagugcaaauuguca

SEQ ID NO: 2510745 - RNA, 14 nt, Human
uagugcaaauuguc

SEQ ID NO: 2510746 - RNA, 14 nt, Human
uagucaaauugugu

SEQ ID NO: 2510747 - RNA, 13 nt, Human
uagucaaauugug

SEQ ID NO: 2510748 - RNA, 12 nt, Human
uagugcagcuga

SEQ ID NO: 2510749 - RNA, 13 nt, Human
uagugcagcugau

SEQ ID NO: 2510750 - RNA, 14 nt, Human
uagugcagcugauu

SEQ ID NO: 2510751 - RNA, 15 nt, Human
uagugcagcugauuu

SEQ ID NO: 2510752 - RNA, 17 nt, Human
uagugcagcugauuuua

SEQ ID NO: 2510753 - RNA, 18 nt, Human
uagugcagcugauuuuaa

SEQ ID NO: 2510754 - RNA, 19 nt, Human
uagugcagcugauuuuaac

SEQ ID NO: 2510755 - RNA, 20 nt, Human
uagugcagcugauuuuaaca

SEQ ID NO: 2510756 - RNA, 22 nt, Human
uagugcagcugauuuuaacaau

SEQ ID NO: 2510757 - RNA, 18 nt, Human
uagucaaaccauaaacuu

SEQ ID NO: 2510758 - RNA, 16 nt, Human
uagucaaauuauguau

SEQ ID NO: 2510759 - RNA, 20 nt, Human
uaguugcaacuuuguauaaa

SEQ ID NO: 2510760 - RNA, 22 nt, Human
uaguugagccagcagacauugu

SEQ ID NO: 2510761 - RNA, 21 nt, Human
uaguugagccagcagacauug

SEQ ID NO: 2510762 - RNA, 20 nt, Human
uaguugagccagcagacauu

SEQ ID NO: 2510763 - RNA, 19 nt, Human
uaguugagccagcagacau

SEQ ID NO: 2510764 - RNA, 17 nt, Human
uaguugagccagcagac

SEQ ID NO: 2510765 - RNA, 23 nt, Human
uaguguuaaucaauuuaaaccca

SEQ ID NO: 2510766 - RNA, 16 nt, Human
uaguguuaaucaauuu

SEQ ID NO: 2510767 - RNA, 15 nt, Human
uaguguuaaucaauu

SEQ ID NO: 2510768 - RNA, 14 nt, Human
uaguguuaaucaau

SEQ ID NO: 2510769 - RNA, 20 nt, Human
uaguguguucugauuagaaa

SEQ ID NO: 2510770 - RNA, 12 nt, Human
uaguguuaauca

SEQ ID NO: 2510771 - RNA, 19 nt, Human
uaguguguucugauuagaa

SEQ ID NO: 2510772 - RNA, 18 nt, Human
uaguguggaaauuaagaa

SEQ ID NO: 2510773 - RNA, 22 nt, Human
uaguguggaaauuaagaagaaa

SEQ ID NO: 2510774 - RNA, 15 nt, Human
uaguguguucugauu

SEQ ID NO: 2510775 - RNA, 13 nt, Human
uagugcuaagugu

SEQ ID NO: 2510776 - RNA, 17 nt, Human
uagugucacuuaccuag

SEQ ID NO: 2510777 - RNA, 12 nt, Human
uagugucuauca

SEQ ID NO: 2510778 - RNA, 17 nt, Human
uagugcggacaaguuuu

SEQ ID NO: 2510779 - RNA, 19 nt, Human
uagugcggacaaguuuuaa

SEQ ID NO: 2510780 - RNA, 16 nt, Human
uagugccuucuaaagg

SEQ ID NO: 2510781 - RNA, 19 nt, Human
uagugccuucuaaaggugu

SEQ ID NO: 2510782 - RNA, 14 nt, Human
uagugcggacaagu

SEQ ID NO: 2510783 - RNA, 23 nt, Human
uagugcccuccacagccgcagcc

SEQ ID NO: 2510784 - RNA, 22 nt, Human
uagugccugagaguauuuaggc

SEQ ID NO: 2510785 - RNA, 17 nt, Human
uagugcccuccacagcc

SEQ ID NO: 2510786 - RNA, 19 nt, Human
uaguauuucuaugaaauau

SEQ ID NO: 2510787 - RNA, 18 nt, Human
uaguauuucuaugaaaua

SEQ ID NO: 2510788 - RNA, 16 nt, Human
uaguaucuagcaauca

SEQ ID NO: 2510789 - RNA, 16 nt, Human
uaguauuucuaugaaa

SEQ ID NO: 2510790 - RNA, 23 nt, Human
uaguauccuccagguuuuucaau

SEQ ID NO: 2510791 - RNA, 22 nt, Human
uaguauccuccagguuuuucaa

SEQ ID NO: 2510792 - RNA, 21 nt, Human
uaguauccuccagguuuuuca

SEQ ID NO: 2510793 - RNA, 20 nt, Human
uaguauccuccagguuuuuc

SEQ ID NO: 2510794 - RNA, 19 nt, Human
uaguauccuccagguuuuu

SEQ ID NO: 2510795 - RNA, 18 nt, Human
uaguauccuccagguuuu

SEQ ID NO: 2510796 - RNA, 17 nt, Human
uaguauccuccagguuu

SEQ ID NO: 2510797 - RNA, 16 nt, Human
uaguauccuccagguu

SEQ ID NO: 2510798 - RNA, 19 nt, Human
uaguaucuagcaaucacaa

SEQ ID NO: 2510799 - RNA, 14 nt, Human
uaguaucuaacaug

SEQ ID NO: 2510800 - RNA, 15 nt, Human
uaguaucuaacaugu

SEQ ID NO: 2510801 - RNA, 13 nt, Human
uaguaucaaaaga

SEQ ID NO: 2510802 - RNA, 19 nt, Human
uaguaguuccugcuacaac

SEQ ID NO: 2510803 - RNA, 14 nt, Human
uaguauaaagaaaa

SEQ ID NO: 2510804 - RNA, 16 nt, Human
uaguauaaagaaaagu

SEQ ID NO: 2510805 - RNA, 19 nt, Human
uaguauacauugucucuaa

SEQ ID NO: 2510806 - RNA, 15 nt, Human
uaguauccuccaggu

SEQ ID NO: 2510807 - RNA, 14 nt, Human
uaguauccuccagg

SEQ ID NO: 2510808 - RNA, 13 nt, Human
uaguauccuccag

SEQ ID NO: 2510809 - RNA, 21 nt, Human
uaguaucaaauauuagaugug

SEQ ID NO: 2510810 - RNA, 20 nt, Human
uaguaucaaauauuagaugu

SEQ ID NO: 2510811 - RNA, 14 nt, Human
uaguaucaaauauu

SEQ ID NO: 2510812 - RNA, 12 nt, Human
uaguauccucca

SEQ ID NO: 2510813 - RNA, 23 nt, Human
uaguaucaaauauuagaugugau

SEQ ID NO: 2510814 - RNA, 19 nt, Human
uaguauaucuggacaagcc

SEQ ID NO: 2510815 - RNA, 16 nt, Human
uaguauaucuggacaa

SEQ ID NO: 2510816 - RNA, 21 nt, Human
uaggugauccacucgccuuca

SEQ ID NO: 2510817 - RNA, 23 nt, Human
uaggugacagagugagacucugu

SEQ ID NO: 2510818 - RNA, 21 nt, Human
uaggugaucucauuuaauccu

SEQ ID NO: 2510819 - RNA, 18 nt, Human
uaggugcuacaaaaacac

SEQ ID NO: 2510820 - RNA, 19 nt, Human
uaggugcccuuggaggcca

SEQ ID NO: 2510821 - RNA, 18 nt, Human
uaguaguaugaugauaca

SEQ ID NO: 2510822 - RNA, 15 nt, Human
uauuaucaacaauag

SEQ ID NO: 2510823 - RNA, 16 nt, Human
uauuaucaugcaaaug

SEQ ID NO: 2510824 - RNA, 18 nt, Human
uauuaucaugcaaaugcu

SEQ ID NO: 2510825 - RNA, 22 nt, Human
uauuaucaugcaaaugcuguau

SEQ ID NO: 2510826 - RNA, 16 nt, Human
uauuauccccauuucu

SEQ ID NO: 2510827 - RNA, 24 nt, Human
uauuaugcccaguuucugccucug

SEQ ID NO: 2510828 - RNA, 14 nt, Human
uauuaugcuucuug

SEQ ID NO: 2510829 - RNA, 13 nt, Human
uauuaugcuucuu

SEQ ID NO: 2510830 - RNA, 21 nt, Human
uauuauggaagauuuuaaauu

SEQ ID NO: 2510831 - RNA, 16 nt, Human
uauuauguuaaaacug

SEQ ID NO: 2510832 - RNA, 17 nt, Human
uauuaugucucuucuga

SEQ ID NO: 2510833 - RNA, 20 nt, Human
uauuauggaggcaggaguuu

SEQ ID NO: 2510834 - RNA, 22 nt, Human
uauuauuucuaggaagaauuuu

SEQ ID NO: 2510835 - RNA, 20 nt, Human
uauuauuucuaggaagaauu

SEQ ID NO: 2510836 - RNA, 19 nt, Human
uauuauuucuaggaagaau

SEQ ID NO: 2510837 - RNA, 16 nt, Human
uauuauuucaauguga

SEQ ID NO: 2510838 - RNA, 14 nt, Human
uauuauuuguguuu

SEQ ID NO: 2510839 - RNA, 15 nt, Human
uauuauuuucaccug

SEQ ID NO: 2510840 - RNA, 12 nt, Human
uauuauuuucca

SEQ ID NO: 2510841 - RNA, 16 nt, Human
uauuauuuucaccugu

SEQ ID NO: 2510842 - RNA, 12 nt, Human
uauuauguguuu

SEQ ID NO: 2510843 - RNA, 16 nt, Human
uauuauugaaauugua

SEQ ID NO: 2510844 - RNA, 12 nt, Human
uauuauuguucu

SEQ ID NO: 2510845 - RNA, 13 nt, Human
uauuauuuauaua

SEQ ID NO: 2510846 - RNA, 21 nt, Human
uauuaugucucuucugagcua

SEQ ID NO: 2510847 - RNA, 15 nt, Human
uauuauuguguguua

SEQ ID NO: 2510848 - RNA, 17 nt, Human
uauuauauuuacaaaug

SEQ ID NO: 2510849 - RNA, 19 nt, Human
uauuauacuguauuaagag

SEQ ID NO: 2510850 - RNA, 15 nt, Human
uauuauacuguauua

SEQ ID NO: 2510851 - RNA, 14 nt, Human
uauuauacuguauu

SEQ ID NO: 2510852 - RNA, 13 nt, Human
uauuauacuguau

SEQ ID NO: 2510853 - RNA, 14 nt, Human
uauuauaccuuuuu

SEQ ID NO: 2510854 - RNA, 19 nt, Human
uauuauaauuuuuuucaau

SEQ ID NO: 2510855 - RNA, 14 nt, Human
uauuauaauuguau

SEQ ID NO: 2510856 - RNA, 15 nt, Human
uauuauacuaagaaa

SEQ ID NO: 2510857 - RNA, 18 nt, Human
uauuauacuaagaaaaga

SEQ ID NO: 2510858 - RNA, 19 nt, Human
uauuauacuaagaaaagau

SEQ ID NO: 2510859 - RNA, 12 nt, Human
uauuauaccuuu

SEQ ID NO: 2510860 - RNA, 13 nt, Human
uauuauaccuuuu

SEQ ID NO: 2510861 - RNA, 15 nt, Human
uauuauaacuuaaaa

SEQ ID NO: 2510862 - RNA, 12 nt, Human
uauuauaauuua

SEQ ID NO: 2510863 - RNA, 15 nt, Human
uauuauaauuuaaug

SEQ ID NO: 2510864 - RNA, 19 nt, Human
uauuaauaaacauucuauc

SEQ ID NO: 2510865 - RNA, 16 nt, Human
uauuauaacuuaaaaa

SEQ ID NO: 2510866 - RNA, 17 nt, Human
uauuaagauuuccaagu

SEQ ID NO: 2510867 - RNA, 15 nt, Human
uauuaagauuuccaa

SEQ ID NO: 2510868 - RNA, 14 nt, Human
uauuaaggaagaca

SEQ ID NO: 2510869 - RNA, 15 nt, Human
uauuaaguuguuaau

SEQ ID NO: 2510870 - RNA, 12 nt, Human
uauguuaaaacu

SEQ ID NO: 2510871 - RNA, 14 nt, Human
uauguguuggcuug

SEQ ID NO: 2510872 - RNA, 21 nt, Human
uauguuaaacuagcauaucug

SEQ ID NO: 2510873 - RNA, 20 nt, Human
uauguuaaacuagcauaucu

SEQ ID NO: 2510874 - RNA, 19 nt, Human
uauguuaaccucaguguca

SEQ ID NO: 2510875 - RNA, 20 nt, Human
uauguuaaccucagugucau

SEQ ID NO: 2510876 - RNA, 22 nt, Human
uauguuaaccucagugucauuu

SEQ ID NO: 2510877 - RNA, 15 nt, Human
uauguguuuuucaca

SEQ ID NO: 2510878 - RNA, 16 nt, Human
uauguguuuuucacau

SEQ ID NO: 2510879 - RNA, 15 nt, Human
uauguguuugugugu

SEQ ID NO: 2510880 - RNA, 17 nt, Human
uauguguuuuucacauu

SEQ ID NO: 2510881 - RNA, 18 nt, Human
uauguuacuacaugcacu

SEQ ID NO: 2510882 - RNA, 18 nt, Human
uauguuaagcucuuuaug

SEQ ID NO: 2510883 - RNA, 14 nt, Human
uauguuaagcucuu

SEQ ID NO: 2510884 - RNA, 19 nt, Human
uauguuaagggaagaauuc

SEQ ID NO: 2510885 - RNA, 15 nt, Human
uauguuaaguuacuu

SEQ ID NO: 2510886 - RNA, 19 nt, Human
uauguuaagcucuuuauga

SEQ ID NO: 2510887 - RNA, 19 nt, Human
uauguuagugcaaauuguc

SEQ ID NO: 2510888 - RNA, 14 nt, Human
uauguuauaucaac

SEQ ID NO: 2510889 - RNA, 19 nt, Human
uauguuacaucuguuuuaa

SEQ ID NO: 2510890 - RNA, 22 nt, Human
uauguuacaucuguuuuaaauu

SEQ ID NO: 2510891 - RNA, 18 nt, Human
uauggagcccuguaauuu

SEQ ID NO: 2510892 - RNA, 15 nt, Human
uauggacucugcaca

SEQ ID NO: 2510893 - RNA, 21 nt, Human
uauggacggugcuccaggcag

SEQ ID NO: 2510894 - RNA, 15 nt, Human
uauggagagaaaaca

SEQ ID NO: 2510895 - RNA, 14 nt, Human
uauggaggcaggag

SEQ ID NO: 2510896 - RNA, 16 nt, Human
uauggacucugcacau

SEQ ID NO: 2510897 - RNA, 21 nt, Human
uauggacuaucugucuggugg

SEQ ID NO: 2510898 - RNA, 12 nt, Human
uauggacucugc

SEQ ID NO: 2510899 - RNA, 18 nt, Human
uauggacuaucugucugg

SEQ ID NO: 2510900 - RNA, 17 nt, Human
uauggacuaucugucug

SEQ ID NO: 2510901 - RNA, 13 nt, Human
uauggacuaucug

SEQ ID NO: 2510902 - RNA, 16 nt, Human
uauggacggugcucca

SEQ ID NO: 2510903 - RNA, 13 nt, Human
uauguguguuuua

SEQ ID NO: 2510904 - RNA, 21 nt, Human
uauguguguuuaaauaaagua

SEQ ID NO: 2510905 - RNA, 20 nt, Human
uauguguguuuaaauaaagu

SEQ ID NO: 2510906 - RNA, 17 nt, Human
uauguguguuuaaauaa

SEQ ID NO: 2510907 - RNA, 14 nt, Human
uauguguguuuaaa

SEQ ID NO: 2510908 - RNA, 13 nt, Human
uauguguguuuaa

SEQ ID NO: 2510909 - RNA, 19 nt, Human
uauggaggcuuugcauaga

SEQ ID NO: 2510910 - RNA, 18 nt, Human
uauggagcucagagaggg

SEQ ID NO: 2510911 - RNA, 17 nt, Human
uauggagcucagagagg

SEQ ID NO: 2510912 - RNA, 13 nt, Human
uauggauaaugcc

SEQ ID NO: 2510913 - RNA, 15 nt, Human
uauggaggauggaga

SEQ ID NO: 2510914 - RNA, 16 nt, Human
uauuaagaaagacuau

SEQ ID NO: 2510915 - RNA, 23 nt, Human
uauuaacaacaauaacacugucu

SEQ ID NO: 2510916 - RNA, 18 nt, Human
uauuaacaaauuauguua

SEQ ID NO: 2510917 - RNA, 23 nt, Human
uauuaacaaacaucacucugcug

SEQ ID NO: 2510918 - RNA, 16 nt, Human
uauuaacaaauuaugu

SEQ ID NO: 2510919 - RNA, 23 nt, Human
uauuaaauauaugauuagccagg

SEQ ID NO: 2510920 - RNA, 19 nt, Human
uauuaaaugcccagccccu

SEQ ID NO: 2510921 - RNA, 17 nt, Human
uauuaaaugcccagccc

SEQ ID NO: 2510922 - RNA, 15 nt, Human
uauuaaaugcccagc

SEQ ID NO: 2510923 - RNA, 21 nt, Human
uauuaaauacagacacuaagu

SEQ ID NO: 2510924 - RNA, 18 nt, Human
uauuaaauacagacacua

SEQ ID NO: 2510925 - RNA, 17 nt, Human
uauuaaauacagacacu

SEQ ID NO: 2510926 - RNA, 13 nt, Human
uauuaaauacaga

SEQ ID NO: 2510927 - RNA, 16 nt, Human
uauguuguguucuaau

SEQ ID NO: 2510928 - RNA, 12 nt, Human
uauguugaauac

SEQ ID NO: 2510929 - RNA, 15 nt, Human
uauguugaauacuuu

SEQ ID NO: 2510930 - RNA, 17 nt, Human
uauguugaagccuuugu

SEQ ID NO: 2510931 - RNA, 21 nt, Human
uauguugcccaggcaggucuu

SEQ ID NO: 2510932 - RNA, 21 nt, Human
uauguuguccaauuguugaca

SEQ ID NO: 2510933 - RNA, 16 nt, Human
uauguuguccaauugu

SEQ ID NO: 2510934 - RNA, 16 nt, Human
uauguugucaaagaga

SEQ ID NO: 2510935 - RNA, 20 nt, Human
uauguugcucagucucccuu

SEQ ID NO: 2510936 - RNA, 17 nt, Human
uauguugcucagucucc

SEQ ID NO: 2510937 - RNA, 14 nt, Human
uauguugcucaguc

SEQ ID NO: 2510938 - RNA, 13 nt, Human
uauguugucaaag

SEQ ID NO: 2510939 - RNA, 20 nt, Human
uauguugccuuuaugguuuc

SEQ ID NO: 2510940 - RNA, 18 nt, Human
uauguugccuuuaugguu

SEQ ID NO: 2510941 - RNA, 14 nt, Human
uauguugccuuuau

SEQ ID NO: 2510942 - RNA, 18 nt, Human
uauguugguagauucuaa

SEQ ID NO: 2510943 - RNA, 17 nt, Human
uauguucuaagaaguga

SEQ ID NO: 2510944 - RNA, 14 nt, Human
uauguucacaccua

SEQ ID NO: 2510945 - RNA, 22 nt, Human
uauguucuuaguggauguucug

SEQ ID NO: 2510946 - RNA, 13 nt, Human
uauguucacuguc

SEQ ID NO: 2510947 - RNA, 13 nt, Human
uauuguugguaau

SEQ ID NO: 2510948 - RNA, 15 nt, Human
uauuguuuaaaauca

SEQ ID NO: 2510949 - RNA, 16 nt, Human
uauuguuuaaaaucau

SEQ ID NO: 2510950 - RNA, 17 nt, Human
uauuguuuaaaaucauu

SEQ ID NO: 2510951 - RNA, 14 nt, Human
uauuguguugugaa

SEQ ID NO: 2510952 - RNA, 17 nt, Human
uauuguuccagcaguuu

SEQ ID NO: 2510953 - RNA, 23 nt, Human
uauuguuccagcaguuuucaagu

SEQ ID NO: 2510954 - RNA, 13 nt, Human
uauuguucccagu

SEQ ID NO: 2510955 - RNA, 17 nt, Human
uauuguucccagugaca

SEQ ID NO: 2510956 - RNA, 21 nt, Human
uauuguucccagugacacuuc

SEQ ID NO: 2510957 - RNA, 18 nt, Human
uauugugucuuuugcaug

SEQ ID NO: 2510958 - RNA, 16 nt, Human
uauugugucuuuugca

SEQ ID NO: 2510959 - RNA, 17 nt, Human
uauuguguguuauuuaa

SEQ ID NO: 2510960 - RNA, 19 nt, Human
uauugugucuuuugcauga

SEQ ID NO: 2510961 - RNA, 19 nt, Human
uauuguguguuauuuaaau

SEQ ID NO: 2510962 - RNA, 13 nt, Human
uauugcccagguu

SEQ ID NO: 2510963 - RNA, 15 nt, Human
uauugcccacgcugg

SEQ ID NO: 2510964 - RNA, 14 nt, Human
uauugcccacgcug

SEQ ID NO: 2510965 - RNA, 13 nt, Human
uauugcccacgcu

SEQ ID NO: 2510966 - RNA, 12 nt, Human
uauugcuggggu

SEQ ID NO: 2510967 - RNA, 11 nt, Human
uauugcugggg

SEQ ID NO: 2510968 - RNA, 22 nt, Human
uauugcugcugguaauuuguau

SEQ ID NO: 2510969 - RNA, 22 nt, Human
uauugcugauggugcaaugacc

SEQ ID NO: 2510970 - RNA, 23 nt, Human
uauugcugauggugcaaugaccu

SEQ ID NO: 2510971 - RNA, 23 nt, Human
uauugcuucuucuccuaugugua

SEQ ID NO: 2510972 - RNA, 21 nt, Human
uauugcuugauacuuuugaca

SEQ ID NO: 2510973 - RNA, 15 nt, Human
uauugcuugcacaaa

SEQ ID NO: 2510974 - RNA, 15 nt, Human
uauugcauuaauuuu

SEQ ID NO: 2510975 - RNA, 21 nt, Human
uauugcaucuguauaaguaag

SEQ ID NO: 2510976 - RNA, 22 nt, Human
uauugcauuuggauuggggucc

SEQ ID NO: 2510977 - RNA, 19 nt, Human
uauugcaguuuaucauuca

SEQ ID NO: 2510978 - RNA, 20 nt, Human
uauugcaguuuaucauucaa

SEQ ID NO: 2510979 - RNA, 17 nt, Human
uauugcaucuguauaag

SEQ ID NO: 2510980 - RNA, 16 nt, Human
uauugcaucuguauaa

SEQ ID NO: 2510981 - RNA, 15 nt, Human
uauugcaucuguaua

SEQ ID NO: 2510982 - RNA, 14 nt, Human
uauugcaucuguau

SEQ ID NO: 2510983 - RNA, 22 nt, Human
uauugcaucuggguagcuguaa

SEQ ID NO: 2510984 - RNA, 15 nt, Human
uauugcaguuauaga

SEQ ID NO: 2510985 - RNA, 15 nt, Human
uauugcauaugcaua

SEQ ID NO: 2510986 - RNA, 22 nt, Human
uauugcacaugucuuaaugaag

SEQ ID NO: 2510987 - RNA, 20 nt, Human
uauugcacaugucuuaauga

SEQ ID NO: 2510988 - RNA, 17 nt, Human
uauugcacaugucuuaa

SEQ ID NO: 2510989 - RNA, 16 nt, Human
uauugcacaugucuua

SEQ ID NO: 2510990 - RNA, 14 nt, Human
uauugcacaugucu

SEQ ID NO: 2510991 - RNA, 12 nt, Human
uauugcacaugu

SEQ ID NO: 2510992 - RNA, 15 nt, Human
uauugcaguuuauca

SEQ ID NO: 2510993 - RNA, 13 nt, Human
uauugcaguuuau

SEQ ID NO: 2510994 - RNA, 11 nt, Human
uauugcaguuu

SEQ ID NO: 2510995 - RNA, 17 nt, Human
uauugcacauuguaaaa

SEQ ID NO: 2510996 - RNA, 13 nt, Human
uauugcacauugu

SEQ ID NO: 2510997 - RNA, 23 nt, Human
uauugcacaugucuuaaugaagu

SEQ ID NO: 2510998 - RNA, 22 nt, Human
uauugcagcgauuaauaacagg

SEQ ID NO: 2510999 - RNA, 14 nt, Human
uauugauaacagca

SEQ ID NO: 2511000 - RNA, 18 nt, Human
uauugauaacagcacuga

SEQ ID NO: 2511001 - RNA, 20 nt, Human
uauugauaugcuuauacacu

SEQ ID NO: 2511002 - RNA, 14 nt, Human
uauucaugcuucuu

SEQ ID NO: 2511003 - RNA, 17 nt, Human
uauuauuuuuuccacau

SEQ ID NO: 2511004 - RNA, 15 nt, Human
uauucaucucaagga

SEQ ID NO: 2511005 - RNA, 14 nt, Human
uauuauuuuccaaa

SEQ ID NO: 2511006 - RNA, 13 nt, Human
uauuauuuuccaa

SEQ ID NO: 2511007 - RNA, 20 nt, Human
uauucauugaagucagaugu

SEQ ID NO: 2511008 - RNA, 13 nt, Human
uauucauguaaac

SEQ ID NO: 2511009 - RNA, 15 nt, Human
uauucauuuaaaaug

SEQ ID NO: 2511010 - RNA, 14 nt, Human
uauucauuuaaaau

SEQ ID NO: 2511011 - RNA, 13 nt, Human
uauucauuuaaaa

SEQ ID NO: 2511012 - RNA, 12 nt, Human
uauucauuuaaa

SEQ ID NO: 2511013 - RNA, 17 nt, Human
uauucauuuaaaaugau

SEQ ID NO: 2511014 - RNA, 16 nt, Human
uauucauuuaaaauga

SEQ ID NO: 2511015 - RNA, 19 nt, Human
uauucauuuaaaaugauua

SEQ ID NO: 2511016 - RNA, 14 nt, Human
uauuuauuacugua

SEQ ID NO: 2511017 - RNA, 22 nt, Human
uauuuauuaaaugcccagcccc

SEQ ID NO: 2511018 - RNA, 23 nt, Human
uauuuauuaaacagauuuuuaca

SEQ ID NO: 2511019 - RNA, 13 nt, Human
uauuuauguuugc

SEQ ID NO: 2511020 - RNA, 21 nt, Human
uauuuaugucuauuuaagccu

SEQ ID NO: 2511021 - RNA, 14 nt, Human
uauuuaugugugag

SEQ ID NO: 2511022 - RNA, 13 nt, Human
uauuucuaugaaa

SEQ ID NO: 2511023 - RNA, 20 nt, Human
uauuuauucaauaaaguauu

SEQ ID NO: 2511024 - RNA, 19 nt, Human
uauuuauucaauaaaguau

SEQ ID NO: 2511025 - RNA, 18 nt, Human
uauuuauucaauaaagua

SEQ ID NO: 2511026 - RNA, 16 nt, Human
uauuuauucaauaaag

SEQ ID NO: 2511027 - RNA, 14 nt, Human
uauuuauuauuuau

SEQ ID NO: 2511028 - RNA, 13 nt, Human
uauuuauuacugu

SEQ ID NO: 2511029 - RNA, 14 nt, Human
uauuuauucaauaa

SEQ ID NO: 2511030 - RNA, 13 nt, Human
uauuuauucaaua

SEQ ID NO: 2511031 - RNA, 12 nt, Human
uauuuauucaau

SEQ ID NO: 2511032 - RNA, 19 nt, Human
uauuuauuauuuucaccug

SEQ ID NO: 2511033 - RNA, 18 nt, Human
uauuugaaucuugucuca

SEQ ID NO: 2511034 - RNA, 16 nt, Human
uauuugaaucuugucu

SEQ ID NO: 2511035 - RNA, 14 nt, Human
uauuugaaucuugu

SEQ ID NO: 2511036 - RNA, 12 nt, Human
uauuugaaucuu

SEQ ID NO: 2511037 - RNA, 20 nt, Human
uauuugaaucuugucucaau

SEQ ID NO: 2511038 - RNA, 19 nt, Human
uauuugaaucuugucucaa

SEQ ID NO: 2511039 - RNA, 21 nt, Human
uauuugaauguaugcuucaua

SEQ ID NO: 2511040 - RNA, 14 nt, Human
uauuugaaggccag

SEQ ID NO: 2511041 - RNA, 19 nt, Human
uauuugaaacugaauguuu

SEQ ID NO: 2511042 - RNA, 22 nt, Human
uauuugaaaacauauaaagcac

SEQ ID NO: 2511043 - RNA, 15 nt, Human
uauuucuaugaaaua

SEQ ID NO: 2511044 - RNA, 14 nt, Human
uauuucuaugaaau

SEQ ID NO: 2511045 - RNA, 14 nt, Human
uauuucuuuguuau

SEQ ID NO: 2511046 - RNA, 19 nt, Human
uauuugaaaacauauaaag

SEQ ID NO: 2511047 - RNA, 13 nt, Human
uauuucuuuguua

SEQ ID NO: 2511048 - RNA, 22 nt, Human
uauuuaaagacagggaagagca

SEQ ID NO: 2511049 - RNA, 14 nt, Human
uauuuaaagacagg

SEQ ID NO: 2511050 - RNA, 11 nt, Human
uauuguuucua

SEQ ID NO: 2511051 - RNA, 14 nt, Human
uauuuaaaugucua

SEQ ID NO: 2511052 - RNA, 12 nt, Human
uauuuaaauguc

SEQ ID NO: 2511053 - RNA, 22 nt, Human
uauuuaaauauuaaauauguua

SEQ ID NO: 2511054 - RNA, 19 nt, Human
uauuuaaaugucuaaugua

SEQ ID NO: 2511055 - RNA, 15 nt, Human
uauuuaacaagaucu

SEQ ID NO: 2511056 - RNA, 20 nt, Human
uauuuaaaugucuaauguau

SEQ ID NO: 2511057 - RNA, 17 nt, Human
uauuuauauauuuauaa

SEQ ID NO: 2511058 - RNA, 18 nt, Human
uauuuauauauuuauaac

SEQ ID NO: 2511059 - RNA, 19 nt, Human
uauuuauauauuuauaacu

SEQ ID NO: 2511060 - RNA, 17 nt, Human
uauuguuuaaagcaacu

SEQ ID NO: 2511061 - RNA, 11 nt, Human
uauuguuuaaa

SEQ ID NO: 2511062 - RNA, 20 nt, Human
uauuguuuaaaaucauuucu

SEQ ID NO: 2511063 - RNA, 24 nt, Human
uauuguuuauucuuuuuaaaguau

SEQ ID NO: 2511064 - RNA, 22 nt, Human
uauuguuuauucuuuuuaaagu

SEQ ID NO: 2511065 - RNA, 22 nt, Human
uauuguuuaaagcaacugucua

SEQ ID NO: 2511066 - RNA, 12 nt, Human
uauuguuucaau

SEQ ID NO: 2511067 - RNA, 18 nt, Human
uauuguuucaauugcauc

SEQ ID NO: 2511068 - RNA, 12 nt, Human
uauuuaaagaca

SEQ ID NO: 2511069 - RNA, 13 nt, Human
uauuuaaagacaa

SEQ ID NO: 2511070 - RNA, 17 nt, Human
uauuuaaagacaaagac

SEQ ID NO: 2511071 - RNA, 18 nt, Human
uauuuaaagacaaagaca

SEQ ID NO: 2511072 - RNA, 17 nt, Human
uauuuauauguacauga

SEQ ID NO: 2511073 - RNA, 15 nt, Human
uauuuauauguacau

SEQ ID NO: 2511074 - RNA, 13 nt, Human
uauuuauauauuu

SEQ ID NO: 2511075 - RNA, 14 nt, Human
uauuuauauuucac

SEQ ID NO: 2511076 - RNA, 15 nt, Human
uauuuauauuucacu

SEQ ID NO: 2511077 - RNA, 16 nt, Human
uauuuauauuucacua

SEQ ID NO: 2511078 - RNA, 13 nt, Human
uauuuaucaguga

SEQ ID NO: 2511079 - RNA, 21 nt, Human
uauuuauauuuuuauuuuauu

SEQ ID NO: 2511080 - RNA, 15 nt, Human
uauuuaucagugaca

SEQ ID NO: 2511081 - RNA, 18 nt, Human
uauuuaucagugacagag

SEQ ID NO: 2511082 - RNA, 12 nt, Human
uauuuaucuuua

SEQ ID NO: 2511083 - RNA, 22 nt, Human
uauuuaucuguguuuuugaaau

SEQ ID NO: 2511084 - RNA, 17 nt, Human
uauuuaucucuauuuaa

SEQ ID NO: 2511085 - RNA, 21 nt, Human
uauuuaucuguaguaaacuau

SEQ ID NO: 2511086 - RNA, 20 nt, Human
uauuuaucugugcaaauccu

SEQ ID NO: 2511087 - RNA, 16 nt, Human
uauuuaucugauuaag

SEQ ID NO: 2511088 - RNA, 21 nt, Human
uauuuaucugauuaaguuguc

SEQ ID NO: 2511089 - RNA, 15 nt, Human
uauuuaucugauuaa

SEQ ID NO: 2511090 - RNA, 16 nt, Human
uauuuaucucuauuua

SEQ ID NO: 2511091 - RNA, 17 nt, Human
uauuuaugggauccugg

SEQ ID NO: 2511092 - RNA, 20 nt, Human
uauuuaugccucuguauuua

SEQ ID NO: 2511093 - RNA, 21 nt, Human
ucaccgaaaacguggcugcuu

SEQ ID NO: 2511094 - RNA, 20 nt, Human
ucaccgaaaacguggcugcu

SEQ ID NO: 2511095 - RNA, 19 nt, Human
ucaccgaaaacguggcugc

SEQ ID NO: 2511096 - RNA, 15 nt, Human
ucaccgaaaacgugg

SEQ ID NO: 2511097 - RNA, 23 nt, Human
ucaccgaaaacguggcugcuuca

SEQ ID NO: 2511098 - RNA, 22 nt, Human
ucaccgaaaacguggcugcuuc

SEQ ID NO: 2511099 - RNA, 17 nt, Human
ucaccgacgcgucuccu

SEQ ID NO: 2511100 - RNA, 15 nt, Human
ucaccgaagccacuu

SEQ ID NO: 2511101 - RNA, 22 nt, Human
ucacccuuugcugugaggcugu

SEQ ID NO: 2511102 - RNA, 15 nt, Human
ucacccuuugcugug

SEQ ID NO: 2511103 - RNA, 13 nt, Human
ucacccuuugcug

SEQ ID NO: 2511104 - RNA, 20 nt, Human
ucaccgcagucgucgcacag

SEQ ID NO: 2511105 - RNA, 19 nt, Human
ucaccgcagucgucgcaca

SEQ ID NO: 2511106 - RNA, 16 nt, Human
ucaccgagugggggca

SEQ ID NO: 2511107 - RNA, 20 nt, Human
ucaccgagaguagccgagag

SEQ ID NO: 2511108 - RNA, 23 nt, Human
ucaccgagaguagccgagagccu

SEQ ID NO: 2511109 - RNA, 13 nt, Human
ucacccugagccc

SEQ ID NO: 2511110 - RNA, 20 nt, Human
ucacccuccaccucuucacc

SEQ ID NO: 2511111 - RNA, 18 nt, Human
ucacccucguuuccagug

SEQ ID NO: 2511112 - RNA, 15 nt, Human
ucacccuccaccucu

SEQ ID NO: 2511113 - RNA, 14 nt, Human
ucacccuccaccuc

SEQ ID NO: 2511114 - RNA, 13 nt, Human
ucacccuccaccu

SEQ ID NO: 2511115 - RNA, 18 nt, Human
ucacccguccagaccuug

SEQ ID NO: 2511116 - RNA, 15 nt, Human
ucacccugccuuauc

SEQ ID NO: 2511117 - RNA, 13 nt, Human
ucacccugccuua

SEQ ID NO: 2511118 - RNA, 21 nt, Human
ucacccugagccccuuccuug

SEQ ID NO: 2511119 - RNA, 19 nt, Human
ucacccugagccccuuccu

SEQ ID NO: 2511120 - RNA, 23 nt, Human
ucacccugauuuaggagaagcca

SEQ ID NO: 2511121 - RNA, 19 nt, Human
ucacccgcuaagagggagg

SEQ ID NO: 2511122 - RNA, 17 nt, Human
ucacccuaccugugccu

SEQ ID NO: 2511123 - RNA, 15 nt, Human
ucacccuaccugugc

SEQ ID NO: 2511124 - RNA, 15 nt, Human
ucacccguccagacc

SEQ ID NO: 2511125 - RNA, 14 nt, Human
ucaccgaaaacgug

SEQ ID NO: 2511126 - RNA, 12 nt, Human
ucacccuuuucu

SEQ ID NO: 2511127 - RNA, 20 nt, Human
ucacccuggggcuaggaaau

SEQ ID NO: 2511128 - RNA, 13 nt, Human
ucacccuguccaa

SEQ ID NO: 2511129 - RNA, 18 nt, Human
ucacccuuaccaugugcc

SEQ ID NO: 2511130 - RNA, 19 nt, Human
ucacccuuaccaugugccu

SEQ ID NO: 2511131 - RNA, 21 nt, Human
ucacccuguccaaacugccua

SEQ ID NO: 2511132 - RNA, 22 nt, Human
ucacauuguauucagaguugau

SEQ ID NO: 2511133 - RNA, 12 nt, Human
ucacauuuaaau

SEQ ID NO: 2511134 - RNA, 18 nt, Human
ucaccaacgucugugcca

SEQ ID NO: 2511135 - RNA, 17 nt, Human
ucaccaacgucugugcc

SEQ ID NO: 2511136 - RNA, 14 nt, Human
ucacauuuauucug

SEQ ID NO: 2511137 - RNA, 21 nt, Human
ucaccaaaucagcugcuacua

SEQ ID NO: 2511138 - RNA, 13 nt, Human
ucaccccuguccu

SEQ ID NO: 2511139 - RNA, 13 nt, Human
ucaccagaauaaa

SEQ ID NO: 2511140 - RNA, 22 nt, Human
ucaccccugguucucaucuuuc

SEQ ID NO: 2511141 - RNA, 21 nt, Human
ucaccccugguucucaucuuu

SEQ ID NO: 2511142 - RNA, 19 nt, Human
ucaccccugguucucaucu

SEQ ID NO: 2511143 - RNA, 18 nt, Human
ucacccgcuaagagggag

SEQ ID NO: 2511144 - RNA, 20 nt, Human
ucaccccuguccucacugcu

SEQ ID NO: 2511145 - RNA, 17 nt, Human
ucaccccuguccucacu

SEQ ID NO: 2511146 - RNA, 16 nt, Human
ucaccccuguccucac

SEQ ID NO: 2511147 - RNA, 14 nt, Human
ucaccccuguccuc

SEQ ID NO: 2511148 - RNA, 19 nt, Human
ucacccgaggcugcccacu

SEQ ID NO: 2511149 - RNA, 16 nt, Human
ucacccgaggcugccc

SEQ ID NO: 2511150 - RNA, 23 nt, Human
ucacauuguaacugaacuucagg

SEQ ID NO: 2511151 - RNA, 20 nt, Human
ucacauucuuauaaauauga

SEQ ID NO: 2511152 - RNA, 16 nt, Human
ucaccacaugugcaca

SEQ ID NO: 2511153 - RNA, 13 nt, Human
ucaccaagcccag

SEQ ID NO: 2511154 - RNA, 13 nt, Human
ucaccaccucucc

SEQ ID NO: 2511155 - RNA, 14 nt, Human
ucaccaccuuccca

SEQ ID NO: 2511156 - RNA, 15 nt, Human
ucaccaccuucccag

SEQ ID NO: 2511157 - RNA, 16 nt, Human
ucaccaccuucccagc

SEQ ID NO: 2511158 - RNA, 18 nt, Human
ucaccaccuucccagcuc

SEQ ID NO: 2511159 - RNA, 21 nt, Human
ucaccacuucaauagaucaaa

SEQ ID NO: 2511160 - RNA, 19 nt, Human
ucacaggagggagggggaa

SEQ ID NO: 2511161 - RNA, 23 nt, Human
ucacagggccccagaaggcaggg

SEQ ID NO: 2511162 - RNA, 23 nt, Human
ucacaggacucugccuccucuuc

SEQ ID NO: 2511163 - RNA, 19 nt, Human
ucacaggacucugccuccu

SEQ ID NO: 2511164 - RNA, 24 nt, Human
ucacaggguugggcccagaucugg

SEQ ID NO: 2511165 - RNA, 19 nt, Human
ucacaggguugggcccaga

SEQ ID NO: 2511166 - RNA, 23 nt, Human
ucacaggguugggcccagaucug

SEQ ID NO: 2511167 - RNA, 13 nt, Human
ucacaccagccau

SEQ ID NO: 2511168 - RNA, 17 nt, Human
ucacagggccccagaag

SEQ ID NO: 2511169 - RNA, 14 nt, Human
ucacaggguugggc

SEQ ID NO: 2511170 - RNA, 16 nt, Human
ucacaggguugggccc

SEQ ID NO: 2511171 - RNA, 17 nt, Human
ucacaggguugggccca

SEQ ID NO: 2511172 - RNA, 21 nt, Human
ucacauucuuauaaauaugaa

SEQ ID NO: 2511173 - RNA, 19 nt, Human
ucacauucuuauaaauaug

SEQ ID NO: 2511174 - RNA, 18 nt, Human
ucacauucuuauaaauau

SEQ ID NO: 2511175 - RNA, 17 nt, Human
ucacauucuuauaaaua

SEQ ID NO: 2511176 - RNA, 15 nt, Human
ucacauucuuauaaa

SEQ ID NO: 2511177 - RNA, 13 nt, Human
ucacauucuuaua

SEQ ID NO: 2511178 - RNA, 23 nt, Human
ucacacaugagcaucaggccagg

SEQ ID NO: 2511179 - RNA, 22 nt, Human
ucacacaugagcaucaggccag

SEQ ID NO: 2511180 - RNA, 23 nt, Human
ucacacagccaggugccuuggag

SEQ ID NO: 2511181 - RNA, 22 nt, Human
ucacacagccaggugccuugga

SEQ ID NO: 2511182 - RNA, 20 nt, Human
ucacacagccaggugccuug

SEQ ID NO: 2511183 - RNA, 19 nt, Human
ucacacagccaggugccuu

SEQ ID NO: 2511184 - RNA, 18 nt, Human
ucacacagccaggugccu

SEQ ID NO: 2511185 - RNA, 13 nt, Human
ucacacacgugag

SEQ ID NO: 2511186 - RNA, 12 nt, Human
ucacacacugau

SEQ ID NO: 2511187 - RNA, 15 nt, Human
ucacacacuuuggcu

SEQ ID NO: 2511188 - RNA, 22 nt, Human
ucacacaggacccccuuccccu

SEQ ID NO: 2511189 - RNA, 21 nt, Human
ucacacaggacccccuucccc

SEQ ID NO: 2511190 - RNA, 20 nt, Human
ucacacaggacccccuuccc

SEQ ID NO: 2511191 - RNA, 19 nt, Human
ucacacaggacccccuucc

SEQ ID NO: 2511192 - RNA, 11 nt, Human
ucacaccagcc

SEQ ID NO: 2511193 - RNA, 22 nt, Human
ucacaccaggcuugccugcagg

SEQ ID NO: 2511194 - RNA, 21 nt, Human
ucacaccaggcuugccugcag

SEQ ID NO: 2511195 - RNA, 18 nt, Human
ucacaggacucugccucc

SEQ ID NO: 2511196 - RNA, 17 nt, Human
ucacaggacucugccuc

SEQ ID NO: 2511197 - RNA, 16 nt, Human
ucacaggacucugccu

SEQ ID NO: 2511198 - RNA, 12 nt, Human
ucacaccagcca

SEQ ID NO: 2511199 - RNA, 19 nt, Human
ucaauuccguagccagcug

SEQ ID NO: 2511200 - RNA, 22 nt, Human
ucaauuccguagccagcugcuc

SEQ ID NO: 2511201 - RNA, 17 nt, Human
ucacaagagcccagcag

SEQ ID NO: 2511202 - RNA, 22 nt, Human
ucacaaggcauucaaguguaca

SEQ ID NO: 2511203 - RNA, 22 nt, Human
ucacaagggcaaacuuuuuccu

SEQ ID NO: 2511204 - RNA, 12 nt, Human
ucacacaccugu

SEQ ID NO: 2511205 - RNA, 20 nt, Human
ucacacacaggcaacugagg

SEQ ID NO: 2511206 - RNA, 21 nt, Human
ucacacacaggcaacugaggc

SEQ ID NO: 2511207 - RNA, 16 nt, Human
ucacaagugaaaaaca

SEQ ID NO: 2511208 - RNA, 22 nt, Human
ucacaagugaaaaacauccaga

SEQ ID NO: 2511209 - RNA, 22 nt, Human
ucacaagacccaaaaggcagaa

SEQ ID NO: 2511210 - RNA, 22 nt, Human
ucaauucccccuggccaccacc

SEQ ID NO: 2511211 - RNA, 14 nt, Human
ucaauuccucuggg

SEQ ID NO: 2511212 - RNA, 17 nt, Human
ucaauucaacacucccu

SEQ ID NO: 2511213 - RNA, 13 nt, Human
ucaauucaacacu

SEQ ID NO: 2511214 - RNA, 14 nt, Human
ucaauuccaccugc

SEQ ID NO: 2511215 - RNA, 18 nt, Human
ucaauguuucuucuaggu

SEQ ID NO: 2511216 - RNA, 22 nt, Human
ucaauguuuaugcaaggaagga

SEQ ID NO: 2511217 - RNA, 23 nt, Human
ucaauguuuaugcaaggaaggaa

SEQ ID NO: 2511218 - RNA, 14 nt, Human
ucaauaaaaucaug

SEQ ID NO: 2511219 - RNA, 16 nt, Human
ucaauaaaaucaugua

SEQ ID NO: 2511220 - RNA, 18 nt, Human
ucaauaaaaucauguaca

SEQ ID NO: 2511221 - RNA, 21 nt, Human
ucaauaaaaucauguacauuu

SEQ ID NO: 2511222 - RNA, 21 nt, Human
ucaauguuuaugcaaggaagg

SEQ ID NO: 2511223 - RNA, 18 nt, Human
ucaauguucauuguaaug

SEQ ID NO: 2511224 - RNA, 16 nt, Human
ucaauguucauuguaa

SEQ ID NO: 2511225 - RNA, 14 nt, Human
ucaauaaaauccau

SEQ ID NO: 2511226 - RNA, 14 nt, Human
ucaaggagaggagg

SEQ ID NO: 2511227 - RNA, 13 nt, Human
ucaauaaaaucau

SEQ ID NO: 2511228 - RNA, 13 nt, Human
ucaauuaaaugua

SEQ ID NO: 2511229 - RNA, 21 nt, Human
ucaauuaaacggauuauuuuu

SEQ ID NO: 2511230 - RNA, 12 nt, Human
ucaauuaaaugu

SEQ ID NO: 2511231 - RNA, 19 nt, Human
ucaauuagaauaguguucu

SEQ ID NO: 2511232 - RNA, 14 nt, Human
ucaauuaaauguag

SEQ ID NO: 2511233 - RNA, 20 nt, Human
ucaauuacugguccaaaaga

SEQ ID NO: 2511234 - RNA, 20 nt, Human
ucaauuaaacggauuauuuu

SEQ ID NO: 2511235 - RNA, 19 nt, Human
ucaauuaaacggauuauuu

SEQ ID NO: 2511236 - RNA, 18 nt, Human
ucaauuaaacggauuauu

SEQ ID NO: 2511237 - RNA, 17 nt, Human
ucaauuaaacggauuau

SEQ ID NO: 2511238 - RNA, 16 nt, Human
ucaauuaaacggauua

SEQ ID NO: 2511239 - RNA, 15 nt, Human
ucaauuaaacggauu

SEQ ID NO: 2511240 - RNA, 14 nt, Human
ucaauuaaacggau

SEQ ID NO: 2511241 - RNA, 13 nt, Human
ucaauuaaacgga

SEQ ID NO: 2511242 - RNA, 15 nt, Human
ucaauguuuucaguu

SEQ ID NO: 2511243 - RNA, 24 nt, Human
ucaauguucauuguaauguuacug

SEQ ID NO: 2511244 - RNA, 11 nt, Human
ucaauuaaacg

SEQ ID NO: 2511245 - RNA, 17 nt, Human
ucaaggauccugagcca

SEQ ID NO: 2511246 - RNA, 16 nt, Human
ucaaggauccugagcc

SEQ ID NO: 2511247 - RNA, 15 nt, Human
ucaaggauccugagc

SEQ ID NO: 2511248 - RNA, 14 nt, Human
ucaaggauccugag

SEQ ID NO: 2511249 - RNA, 13 nt, Human
ucaaggauccuga

SEQ ID NO: 2511250 - RNA, 20 nt, Human
ucaaggacuuucugaagccu

SEQ ID NO: 2511251 - RNA, 18 nt, Human
ucaaggacuugaaagcau

SEQ ID NO: 2511252 - RNA, 19 nt, Human
ucaaggacuugaaagcauc

SEQ ID NO: 2511253 - RNA, 19 nt, Human
ucaagcgauucuucugcuu

SEQ ID NO: 2511254 - RNA, 18 nt, Human
ucaagcgauucuucugcu

SEQ ID NO: 2511255 - RNA, 21 nt, Human
ucaaggaaagggggucccagu

SEQ ID NO: 2511256 - RNA, 18 nt, Human
ucaaggaauaaugggcuu

SEQ ID NO: 2511257 - RNA, 20 nt, Human
ucaaggaaagggggucccag

SEQ ID NO: 2511258 - RNA, 19 nt, Human
ucaaggaaaggggguccca

SEQ ID NO: 2511259 - RNA, 19 nt, Human
ucaagcuucaguuuccugg

SEQ ID NO: 2511260 - RNA, 21 nt, Human
ucaagcgauucuucugcuuca

SEQ ID NO: 2511261 - RNA, 20 nt, Human
ucaagccaccaacauacucc

SEQ ID NO: 2511262 - RNA, 12 nt, Human
ucaagccaccaa

SEQ ID NO: 2511263 - RNA, 21 nt, Human
ucaagccaauccccuccuugg

SEQ ID NO: 2511264 - RNA, 20 nt, Human
ucaagccaauccccuccuug

SEQ ID NO: 2511265 - RNA, 18 nt, Human
ucaagccaauccccuccu

SEQ ID NO: 2511266 - RNA, 17 nt, Human
ucaagccaauccccucc

SEQ ID NO: 2511267 - RNA, 21 nt, Human
ucaagcccagccacguggagc

SEQ ID NO: 2511268 - RNA, 22 nt, Human
ucaagcccagccacguggagcc

SEQ ID NO: 2511269 - RNA, 13 nt, Human
ucaagcccaggag

SEQ ID NO: 2511270 - RNA, 16 nt, Human
ucaagcccaggaggac

SEQ ID NO: 2511271 - RNA, 17 nt, Human
ucaagcgauucuucugc

SEQ ID NO: 2511272 - RNA, 19 nt, Human
ucaaccccuucgcuccugu

SEQ ID NO: 2511273 - RNA, 18 nt, Human
ucaaccccuucgcuccug

SEQ ID NO: 2511274 - RNA, 15 nt, Human
ucaaccuccugggcu

SEQ ID NO: 2511275 - RNA, 20 nt, Human
ucaaccccuucgcuccugug

SEQ ID NO: 2511276 - RNA, 17 nt, Human
ucaaccucuucuggcuc

SEQ ID NO: 2511277 - RNA, 18 nt, Human
ucaaccucuucuggcuca

SEQ ID NO: 2511278 - RNA, 16 nt, Human
ucaaccuccugggcua

SEQ ID NO: 2511279 - RNA, 22 nt, Human
ucaacuccaaacugacucuuaa

SEQ ID NO: 2511280 - RNA, 17 nt, Human
ucaaccugggcaaagcc

SEQ ID NO: 2511281 - RNA, 13 nt, Human
ucaaccugccuga

SEQ ID NO: 2511282 - RNA, 19 nt, Human
ucaaccucuucuggcucaa

SEQ ID NO: 2511283 - RNA, 14 nt, Human
ucaacucccugccc

SEQ ID NO: 2511284 - RNA, 15 nt, Human
ucaacucccugcccc

SEQ ID NO: 2511285 - RNA, 21 nt, Human
ucaacucccugccccccagcc

SEQ ID NO: 2511286 - RNA, 22 nt, Human
ucaacucccugccccccagccc

SEQ ID NO: 2511287 - RNA, 20 nt, Human
ucaacucuccuccagaguca

SEQ ID NO: 2511288 - RNA, 18 nt, Human
ucaacugaccagccucca

SEQ ID NO: 2511289 - RNA, 23 nt, Human
ucaacugaaaagacucaguguuc

SEQ ID NO: 2511290 - RNA, 19 nt, Human
ucaagccaagcagccaagc

SEQ ID NO: 2511291 - RNA, 16 nt, Human
ucaagccaauccccuc

SEQ ID NO: 2511292 - RNA, 20 nt, Human
ucaagccaagcagccaagcu

SEQ ID NO: 2511293 - RNA, 18 nt, Human
ucaaauaugcaaagcacu

SEQ ID NO: 2511294 - RNA, 19 nt, Human
ucaaauaugcaaagcacug

SEQ ID NO: 2511295 - RNA, 15 nt, Human
ucaaauccuugaaga

SEQ ID NO: 2511296 - RNA, 16 nt, Human
ucaaauccuugaagau

SEQ ID NO: 2511297 - RNA, 19 nt, Human
ucaaauggggccagaucca

SEQ ID NO: 2511298 - RNA, 20 nt, Human
ucaaauggggccagauccag

SEQ ID NO: 2511299 - RNA, 20 nt, Human
ucaaaugguaggcauuuccu

SEQ ID NO: 2511300 - RNA, 21 nt, Human
ucaaaugguaggcauuuccua

SEQ ID NO: 2511301 - RNA, 18 nt, Human
ucaaaucuauucagacaa

SEQ ID NO: 2511302 - RNA, 17 nt, Human
ucaaaucuauucagaca

SEQ ID NO: 2511303 - RNA, 16 nt, Human
ucaaaucuauucagac

SEQ ID NO: 2511304 - RNA, 15 nt, Human
ucaaaucuauucaga

SEQ ID NO: 2511305 - RNA, 13 nt, Human
ucaaaucuauuca

SEQ ID NO: 2511306 - RNA, 14 nt, Human
ucaaaucuauucag

SEQ ID NO: 2511307 - RNA, 16 nt, Human
ucaaaucuccaguauu

SEQ ID NO: 2511308 - RNA, 16 nt, Human
ucaaauaugcaaagca

SEQ ID NO: 2511309 - RNA, 17 nt, Human
ucaaauaugcaaagcac

SEQ ID NO: 2511310 - RNA, 12 nt, Human
ucaaagagguuu

SEQ ID NO: 2511311 - RNA, 23 nt, Human
ucaaagagguuuuaaaaaaaucc

SEQ ID NO: 2511312 - RNA, 15 nt, Human
ucaaagagagaaaau

SEQ ID NO: 2511313 - RNA, 20 nt, Human
ucaaagagagaaaauaaaga

SEQ ID NO: 2511314 - RNA, 21 nt, Human
ucaaagaggcugaggcuggca

SEQ ID NO: 2511315 - RNA, 19 nt, Human
ucaaacuggggccucccug

SEQ ID NO: 2511316 - RNA, 14 nt, Human
ucaaacuguagaaa

SEQ ID NO: 2511317 - RNA, 20 nt, Human
ucaaacuguagaaaugauga

SEQ ID NO: 2511318 - RNA, 17 nt, Human
ucaaacuguagaaauga

SEQ ID NO: 2511319 - RNA, 14 nt, Human
ucaaacuuccaguc

SEQ ID NO: 2511320 - RNA, 20 nt, Human
ucaaacugccuuggcuucag

SEQ ID NO: 2511321 - RNA, 22 nt, Human
ucaaacuuccagugcaacacug

SEQ ID NO: 2511322 - RNA, 22 nt, Human
ucaaacaugaaguguguuuccu

SEQ ID NO: 2511323 - RNA, 17 nt, Human
uauuugccaugggcuuc

SEQ ID NO: 2511324 - RNA, 16 nt, Human
uauuugccaugggcuu

SEQ ID NO: 2511325 - RNA, 15 nt, Human
uauuugcauguuacc

SEQ ID NO: 2511326 - RNA, 20 nt, Human
ucaaaccccgaccaccugcc

SEQ ID NO: 2511327 - RNA, 19 nt, Human
ucaaaccccgaccaccugc

SEQ ID NO: 2511328 - RNA, 20 nt, Human
ucaaaccaaaucacugaacu

SEQ ID NO: 2511329 - RNA, 16 nt, Human
ucaaaccauaaacuuc

SEQ ID NO: 2511330 - RNA, 15 nt, Human
ucaaaccauaaacuu

SEQ ID NO: 2511331 - RNA, 19 nt, Human
ucaaacuggggccuccaga

SEQ ID NO: 2511332 - RNA, 20 nt, Human
ucaaacuggggccuccagaa

SEQ ID NO: 2511333 - RNA, 22 nt, Human
ucaaacuggggccuccagaacu

SEQ ID NO: 2511334 - RNA, 23 nt, Human
ucaaacuggggccuccagaacuc

SEQ ID NO: 2511335 - RNA, 14 nt, Human
ucaaacuggggccu

SEQ ID NO: 2511336 - RNA, 16 nt, Human
ucaaacuggggccucc

SEQ ID NO: 2511337 - RNA, 19 nt, Human
ucaaacugaggaauuucac

SEQ ID NO: 2511338 - RNA, 17 nt, Human
ucaaaccuccucuucug

SEQ ID NO: 2511339 - RNA, 20 nt, Human
ucaaaccgcacucacccaug

SEQ ID NO: 2511340 - RNA, 21 nt, Human
ucaaaccauaaacuucauggu

SEQ ID NO: 2511341 - RNA, 18 nt, Human
ucaaaccauaaacuucau

SEQ ID NO: 2511342 - RNA, 23 nt, Human
ucaaaccccgaccaccugcccaa

SEQ ID NO: 2511343 - RNA, 22 nt, Human
ucaaacagucucaggaaaucaa

SEQ ID NO: 2511344 - RNA, 17 nt, Human
ucaaacauauauaacaa

SEQ ID NO: 2511345 - RNA, 21 nt, Human
uauuugcauaacaauuccucu

SEQ ID NO: 2511346 - RNA, 22 nt, Human
uauuugcauaacaauuccucua

SEQ ID NO: 2511347 - RNA, 15 nt, Human
uauuugcauauguau

SEQ ID NO: 2511348 - RNA, 16 nt, Human
uauuugcauguuaccu

SEQ ID NO: 2511349 - RNA, 23 nt, Human
uauuugcaguucaccugcacuua

SEQ ID NO: 2511350 - RNA, 18 nt, Human
uauuugcaguucaccugc

SEQ ID NO: 2511351 - RNA, 16 nt, Human
uauuugcagacuagaa

SEQ ID NO: 2511352 - RNA, 16 nt, Human
uauuugcacuguagcc

SEQ ID NO: 2511353 - RNA, 22 nt, Human
uauuugaauguaugcuucauac

SEQ ID NO: 2511354 - RNA, 23 nt, Human
uauuugaauguaugcuucauaca

SEQ ID NO: 2511355 - RNA, 21 nt, Human
uauuugacaacguuucagcga

SEQ ID NO: 2511356 - RNA, 18 nt, Human
ucuaaaggcuaccuuugu

SEQ ID NO: 2511357 - RNA, 17 nt, Human
ucuaaaggcuaccuuug

SEQ ID NO: 2511358 - RNA, 19 nt, Human
ucuaaaggcuaccuuugua

SEQ ID NO: 2511359 - RNA, 20 nt, Human
ucuaaaggcuaccuuuguau

SEQ ID NO: 2511360 - RNA, 15 nt, Human
ucuaaaguuuacagu

SEQ ID NO: 2511361 - RNA, 13 nt, Human
ucuaaaguuuaca

SEQ ID NO: 2511362 - RNA, 12 nt, Human
ucuaaaguuuac

SEQ ID NO: 2511363 - RNA, 19 nt, Human
ucuaaaguguguuguugcu

SEQ ID NO: 2511364 - RNA, 16 nt, Human
ucguguccccuauccu

SEQ ID NO: 2511365 - RNA, 14 nt, Human
ucgugucucugguc

SEQ ID NO: 2511366 - RNA, 22 nt, Human
ucguguauccuggggcucccuu

SEQ ID NO: 2511367 - RNA, 18 nt, Human
ucuaaagguggugaggca

SEQ ID NO: 2511368 - RNA, 18 nt, Human
ucgugacgcugaauaaau

SEQ ID NO: 2511369 - RNA, 17 nt, Human
ucgugacgcugaauaaa

SEQ ID NO: 2511370 - RNA, 20 nt, Human
ucgugacgcugaauaaaugu

SEQ ID NO: 2511371 - RNA, 21 nt, Human
ucguggagacagggcauuuga

SEQ ID NO: 2511372 - RNA, 18 nt, Human
ucguguauccuggggcuc

SEQ ID NO: 2511373 - RNA, 16 nt, Human
ucguguauccuggggc

SEQ ID NO: 2511374 - RNA, 15 nt, Human
ucguguauccugggg

SEQ ID NO: 2511375 - RNA, 14 nt, Human
ucguguauccuggg

SEQ ID NO: 2511376 - RNA, 13 nt, Human
ucguguauccugg

SEQ ID NO: 2511377 - RNA, 22 nt, Human
ucgugguccccaacagcgacau

SEQ ID NO: 2511378 - RNA, 22 nt, Human
ucguggugaucaauuaaaugua

SEQ ID NO: 2511379 - RNA, 20 nt, Human
ucgugguaggacuguagaaa

SEQ ID NO: 2511380 - RNA, 15 nt, Human
ucgugguaggacugu

SEQ ID NO: 2511381 - RNA, 19 nt, Human
ucguggagaugucuucgua

SEQ ID NO: 2511382 - RNA, 17 nt, Human
ucguggagaugucuucg

SEQ ID NO: 2511383 - RNA, 16 nt, Human
ucguggagaugucuuc

SEQ ID NO: 2511384 - RNA, 20 nt, Human
ucguggcagauaaucagccu

SEQ ID NO: 2511385 - RNA, 21 nt, Human
ucguggcagauaaucagccuc

SEQ ID NO: 2511386 - RNA, 15 nt, Human
ucgugggugugugua

SEQ ID NO: 2511387 - RNA, 22 nt, Human
ucguggguguguguagccaagg

SEQ ID NO: 2511388 - RNA, 14 nt, Human
ucgugguaggacug

SEQ ID NO: 2511389 - RNA, 14 nt, Human
ucggagaagagcug

SEQ ID NO: 2511390 - RNA, 16 nt, Human
ucggagaagagcuguu

SEQ ID NO: 2511391 - RNA, 12 nt, Human
ucggagaagagc

SEQ ID NO: 2511392 - RNA, 18 nt, Human
ucggacuuagcugggaga

SEQ ID NO: 2511393 - RNA, 21 nt, Human
uccuuagcuuagaccucagcc

SEQ ID NO: 2511394 - RNA, 22 nt, Human
uccuuagcuuagaccucagccu

SEQ ID NO: 2511395 - RNA, 18 nt, Human
uccuuagcuuagaccuca

SEQ ID NO: 2511396 - RNA, 19 nt, Human
uccuuagcuuagaccucag

SEQ ID NO: 2511397 - RNA, 20 nt, Human
uccuuagcuuagaccucagc

SEQ ID NO: 2511398 - RNA, 17 nt, Human
uccugucugccagccag

SEQ ID NO: 2511399 - RNA, 21 nt, Human
uccugucugccagccagcagc

SEQ ID NO: 2511400 - RNA, 15 nt, Human
uccuuagaacauuuu

SEQ ID NO: 2511401 - RNA, 20 nt, Human
uccuuagaacauuuuaauuc

SEQ ID NO: 2511402 - RNA, 19 nt, Human
uccuuagagacaucaaaau

SEQ ID NO: 2511403 - RNA, 17 nt, Human
uccuuagaccuuccaua

SEQ ID NO: 2511404 - RNA, 18 nt, Human
ucgugaaacccugucucu

SEQ ID NO: 2511405 - RNA, 14 nt, Human
ucgugaaacccugu

SEQ ID NO: 2511406 - RNA, 20 nt, Human
ucgucuuucccauggggagg

SEQ ID NO: 2511407 - RNA, 18 nt, Human
ucgucuuucccaugggga

SEQ ID NO: 2511408 - RNA, 15 nt, Human
ucgucuuucccaugg

SEQ ID NO: 2511409 - RNA, 19 nt, Human
ucggcccacagcucccacc

SEQ ID NO: 2511410 - RNA, 12 nt, Human
ucggcccacagc

SEQ ID NO: 2511411 - RNA, 16 nt, Human
ucggcccacagcuccc

SEQ ID NO: 2511412 - RNA, 23 nt, Human
ucggcccacagcucccaccccac

SEQ ID NO: 2511413 - RNA, 21 nt, Human
ucgugaccaacuagacauucu

SEQ ID NO: 2511414 - RNA, 19 nt, Human
ucgugaaguauacuguauu

SEQ ID NO: 2511415 - RNA, 10 nt, Human
ucgucuuugc

SEQ ID NO: 2511416 - RNA, 17 nt, Human
ucgugaaguauacugua

SEQ ID NO: 2511417 - RNA, 13 nt, Human
ucgugacaacacu

SEQ ID NO: 2511418 - RNA, 14 nt, Human
ucggagacagugau

SEQ ID NO: 2511419 - RNA, 15 nt, Human
ucggagacagugauc

SEQ ID NO: 2511420 - RNA, 20 nt, Human
ucggagggaauugaggucug

SEQ ID NO: 2511421 - RNA, 22 nt, Human
ucggagggaauugaggucugcu

SEQ ID NO: 2511422 - RNA, 17 nt, Human
ucggaguaucugggaac

SEQ ID NO: 2511423 - RNA, 19 nt, Human
ucggaguaucugggaacug

SEQ ID NO: 2511424 - RNA, 16 nt, Human
ucggauuuggggugga

SEQ ID NO: 2511425 - RNA, 20 nt, Human
ucggaucuggggcucuggga

SEQ ID NO: 2511426 - RNA, 16 nt, Human
ucggcauuucaaaugu

SEQ ID NO: 2511427 - RNA, 16 nt, Human
ucggcagauacugucu

SEQ ID NO: 2511428 - RNA, 14 nt, Human
ucuaccuuccugca

SEQ ID NO: 2511429 - RNA, 21 nt, Human
ucuaccuuccagucaggauga

SEQ ID NO: 2511430 - RNA, 15 nt, Human
ucuaccuuccaguca

SEQ ID NO: 2511431 - RNA, 21 nt, Human
ucuaccuggucucuccuuguu

SEQ ID NO: 2511432 - RNA, 16 nt, Human
ucuaccuucuguaguu

SEQ ID NO: 2511433 - RNA, 14 nt, Human
ucuaccuucuguag

SEQ ID NO: 2511434 - RNA, 16 nt, Human
ucuaccuugaggucuu

SEQ ID NO: 2511435 - RNA, 17 nt, Human
ucuaccuugaggucuuu

SEQ ID NO: 2511436 - RNA, 15 nt, Human
ucuacgcucuccuuu

SEQ ID NO: 2511437 - RNA, 21 nt, Human
ucuacuaaaaagaaggaaaau

SEQ ID NO: 2511438 - RNA, 14 nt, Human
ucuacuaaaaagaa

SEQ ID NO: 2511439 - RNA, 19 nt, Human
ucuacgguguaugguucug

SEQ ID NO: 2511440 - RNA, 16 nt, Human
ucuacgcucuccuuuc

SEQ ID NO: 2511441 - RNA, 17 nt, Human
ucuacgcucuccuuucu

SEQ ID NO: 2511442 - RNA, 20 nt, Human
ucuacuggucuuguggaauu

SEQ ID NO: 2511443 - RNA, 23 nt, Human
ucuacuggucuuguggaauuggg

SEQ ID NO: 2511444 - RNA, 16 nt, Human
ucuacuggucuugugg

SEQ ID NO: 2511445 - RNA, 16 nt, Human
ucuacugggagccuac

SEQ ID NO: 2511446 - RNA, 19 nt, Human
ucuacugggagccuaccca

SEQ ID NO: 2511447 - RNA, 21 nt, Human
ucuacuguauggaauacaaug

SEQ ID NO: 2511448 - RNA, 21 nt, Human
ucuacuuaauccaauggguuu

SEQ ID NO: 2511449 - RNA, 19 nt, Human
ucuacuucugcccuugcca

SEQ ID NO: 2511450 - RNA, 18 nt, Human
ucuaauuuuuauucauaa

SEQ ID NO: 2511451 - RNA, 17 nt, Human
ucuaauuuuuauucaua

SEQ ID NO: 2511452 - RNA, 16 nt, Human
ucuaauuuuuaagcaa

SEQ ID NO: 2511453 - RNA, 22 nt, Human
ucuaaaguuuacaguaaauaaa

SEQ ID NO: 2511454 - RNA, 19 nt, Human
ucuaaaguuuacaguaaau

SEQ ID NO: 2511455 - RNA, 18 nt, Human
ucuaaaguuuacaguaaa

SEQ ID NO: 2511456 - RNA, 17 nt, Human
ucuaaaguuuacaguaa

SEQ ID NO: 2511457 - RNA, 16 nt, Human
ucuaaaguuuacagua

SEQ ID NO: 2511458 - RNA, 18 nt, Human
ucuacaaaauccugauga

SEQ ID NO: 2511459 - RNA, 17 nt, Human
ucuacacuaagagagaa

SEQ ID NO: 2511460 - RNA, 14 nt, Human
ucuacacagagcag

SEQ ID NO: 2511461 - RNA, 19 nt, Human
ucuacaaugugaacuuuau

SEQ ID NO: 2511462 - RNA, 20 nt, Human
ucuacaaugugaacuuuauu

SEQ ID NO: 2511463 - RNA, 15 nt, Human
ucuacaaugugaacu

SEQ ID NO: 2511464 - RNA, 17 nt, Human
ucuacaaugugaacuuu

SEQ ID NO: 2511465 - RNA, 16 nt, Human
ucuacagaggccaugg

SEQ ID NO: 2511466 - RNA, 15 nt, Human
ucuacagaggccaug

SEQ ID NO: 2511467 - RNA, 16 nt, Human
ucuacagagcuucccu

SEQ ID NO: 2511468 - RNA, 17 nt, Human
ucuacagagcuucccug

SEQ ID NO: 2511469 - RNA, 18 nt, Human
ucuacagagcuucccuga

SEQ ID NO: 2511470 - RNA, 19 nt, Human
ucuacagagcuucccugac

SEQ ID NO: 2511471 - RNA, 16 nt, Human
ucuacagacuucucca

SEQ ID NO: 2511472 - RNA, 17 nt, Human
ucuacagacuucuccag

SEQ ID NO: 2511473 - RNA, 18 nt, Human
ucuacagacuucuccaga

SEQ ID NO: 2511474 - RNA, 16 nt, Human
ucuacacauacaugua

SEQ ID NO: 2511475 - RNA, 18 nt, Human
ucuaugaaauauuauguu

SEQ ID NO: 2511476 - RNA, 14 nt, Human
ucuaugacacaugc

SEQ ID NO: 2511477 - RNA, 12 nt, Human
ucuaugagaaaa

SEQ ID NO: 2511478 - RNA, 18 nt, Human
ucuaugaaguauauaaug

SEQ ID NO: 2511479 - RNA, 17 nt, Human
ucuaugaaguauauaau

SEQ ID NO: 2511480 - RNA, 17 nt, Human
ucuaucauuuuuguaca

SEQ ID NO: 2511481 - RNA, 16 nt, Human
ucuaucauuuuuguac

SEQ ID NO: 2511482 - RNA, 15 nt, Human
ucuaucauuuuugua

SEQ ID NO: 2511483 - RNA, 23 nt, Human
ucuaugaacucuguuuucuuucu

SEQ ID NO: 2511484 - RNA, 17 nt, Human
ucuaugacacaugcaag

SEQ ID NO: 2511485 - RNA, 22 nt, Human
ucuaucauuuaauaauauacuu

SEQ ID NO: 2511486 - RNA, 18 nt, Human
ucuaucauuuaauaauau

SEQ ID NO: 2511487 - RNA, 17 nt, Human
ucuaucauuuaauaaua

SEQ ID NO: 2511488 - RNA, 16 nt, Human
ucuaucauuuaauaau

SEQ ID NO: 2511489 - RNA, 15 nt, Human
ucuaucauuuaauaa

SEQ ID NO: 2511490 - RNA, 14 nt, Human
ucuaucauuuaaua

SEQ ID NO: 2511491 - RNA, 13 nt, Human
ucuaucauuuaau

SEQ ID NO: 2511492 - RNA, 12 nt, Human
ucuaucauuuaa

SEQ ID NO: 2511493 - RNA, 14 nt, Human
ucuaucauuaaagu

SEQ ID NO: 2511494 - RNA, 15 nt, Human
ucuaucauuaaaguu

SEQ ID NO: 2511495 - RNA, 15 nt, Human
ucuaucaauagucaa

SEQ ID NO: 2511496 - RNA, 16 nt, Human
ucuaucauuaaaguuc

SEQ ID NO: 2511497 - RNA, 14 nt, Human
ucuaucaccaagga

SEQ ID NO: 2511498 - RNA, 14 nt, Human
ucuaucagagaaaa

SEQ ID NO: 2511499 - RNA, 19 nt, Human
ucuaguggucuuuguaaga

SEQ ID NO: 2511500 - RNA, 18 nt, Human
ucuaguggucuuuguaag

SEQ ID NO: 2511501 - RNA, 17 nt, Human
ucuaguggucuuuguaa

SEQ ID NO: 2511502 - RNA, 16 nt, Human
ucuaguggucuuugua

SEQ ID NO: 2511503 - RNA, 15 nt, Human
ucuaguggucuuugu

SEQ ID NO: 2511504 - RNA, 17 nt, Human
ucuagugcugcugaaga

SEQ ID NO: 2511505 - RNA, 16 nt, Human
ucuagugcugugaaaa

SEQ ID NO: 2511506 - RNA, 19 nt, Human
ucuagugcugugaaaaaaa

SEQ ID NO: 2511507 - RNA, 12 nt, Human
ucuagugggaag

SEQ ID NO: 2511508 - RNA, 23 nt, Human
ucuagugcugugaaaaaaaaaau

SEQ ID NO: 2511509 - RNA, 13 nt, Human
ucuagugcugcug

SEQ ID NO: 2511510 - RNA, 23 nt, Human
ucuagugccuucuaaagguguug

SEQ ID NO: 2511511 - RNA, 13 nt, Human
ucuagugcuguga

SEQ ID NO: 2511512 - RNA, 14 nt, Human
ucuagugcugugaa

SEQ ID NO: 2511513 - RNA, 15 nt, Human
ucuagugcugugaaa

SEQ ID NO: 2511514 - RNA, 14 nt, Human
ucuagugccuucua

SEQ ID NO: 2511515 - RNA, 18 nt, Human
ucuagugccuucuaaagg

SEQ ID NO: 2511516 - RNA, 20 nt, Human
ucuagugcccuccacagccg

SEQ ID NO: 2511517 - RNA, 22 nt, Human
ucuagugcagcugauuuuaaca

SEQ ID NO: 2511518 - RNA, 23 nt, Human
ucuagugcagcugauuuuaacaa

SEQ ID NO: 2511519 - RNA, 14 nt, Human
ucuagugcccucca

SEQ ID NO: 2511520 - RNA, 16 nt, Human
ucuaggaagacuuugg

SEQ ID NO: 2511521 - RNA, 15 nt, Human
ucuaggaagacuuug

SEQ ID NO: 2511522 - RNA, 19 nt, Human
ucuaggaagacuuuggaaa

SEQ ID NO: 2511523 - RNA, 21 nt, Human
ucuaggaagacuuuggaaaga

SEQ ID NO: 2511524 - RNA, 19 nt, Human
ucuagugcagcugauuuua

SEQ ID NO: 2511525 - RNA, 19 nt, Human
ucuccagcugggcucugca

SEQ ID NO: 2511526 - RNA, 17 nt, Human
ucuccagcugggcucug

SEQ ID NO: 2511527 - RNA, 11 nt, Human
ucuccagcugg

SEQ ID NO: 2511528 - RNA, 14 nt, Human
ucuccagcuccaag

SEQ ID NO: 2511529 - RNA, 22 nt, Human
ucuccagcuauaacaguaggga

SEQ ID NO: 2511530 - RNA, 23 nt, Human
ucuccagccuggacccccagcuu

SEQ ID NO: 2511531 - RNA, 22 nt, Human
ucuccagccuggacccccagcu

SEQ ID NO: 2511532 - RNA, 21 nt, Human
ucuccagccuggacccccagc

SEQ ID NO: 2511533 - RNA, 19 nt, Human
ucuccagccuggaccccca

SEQ ID NO: 2511534 - RNA, 15 nt, Human
ucuccagccuggacc

SEQ ID NO: 2511535 - RNA, 14 nt, Human
ucuccagccuggac

SEQ ID NO: 2511536 - RNA, 18 nt, Human
ucuccagccccuggaugc

SEQ ID NO: 2511537 - RNA, 16 nt, Human
ucuccagccccuggau

SEQ ID NO: 2511538 - RNA, 22 nt, Human
ucuccagccccuggaugcagcc

SEQ ID NO: 2511539 - RNA, 23 nt, Human
ucuccagccccuucucagaaucu

SEQ ID NO: 2511540 - RNA, 16 nt, Human
ucuccagccagcaaug

SEQ ID NO: 2511541 - RNA, 15 nt, Human
ucuccagccagcaau

SEQ ID NO: 2511542 - RNA, 22 nt, Human
ucuccagccccuucucagaauc

SEQ ID NO: 2511543 - RNA, 15 nt, Human
ucuccagccccugga

SEQ ID NO: 2511544 - RNA, 14 nt, Human
ucuccagccccugg

SEQ ID NO: 2511545 - RNA, 13 nt, Human
ucuccagccccug

SEQ ID NO: 2511546 - RNA, 12 nt, Human
ucuccagccccu

SEQ ID NO: 2511547 - RNA, 16 nt, Human
ucuccaccugcuccca

SEQ ID NO: 2511548 - RNA, 17 nt, Human
ucuccacucaguugcaa

SEQ ID NO: 2511549 - RNA, 14 nt, Human
ucuccacugccuuc

SEQ ID NO: 2511550 - RNA, 15 nt, Human
ucuccagacccccac

SEQ ID NO: 2511551 - RNA, 19 nt, Human
ucuccagauguuuccagac

SEQ ID NO: 2511552 - RNA, 13 nt, Human
ucuccagccagca

SEQ ID NO: 2511553 - RNA, 12 nt, Human
ucuccagccagc

SEQ ID NO: 2511554 - RNA, 15 nt, Human
ucuccagauguuucc

SEQ ID NO: 2511555 - RNA, 18 nt, Human
ucuccagauguuuccaga

SEQ ID NO: 2511556 - RNA, 14 nt, Human
ucuccagauguuuc

SEQ ID NO: 2511557 - RNA, 19 nt, Human
ucuccagacccccaccccu

SEQ ID NO: 2511558 - RNA, 20 nt, Human
ucuccagacccccaccccuu

SEQ ID NO: 2511559 - RNA, 18 nt, Human
ucucccucagucuggccc

SEQ ID NO: 2511560 - RNA, 23 nt, Human
ucucccucagucuggcccuuccu

SEQ ID NO: 2511561 - RNA, 15 nt, Human
ucuccccugccccca

SEQ ID NO: 2511562 - RNA, 14 nt, Human
ucuccccugccccc

SEQ ID NO: 2511563 - RNA, 12 nt, Human
ucuccccugccc

SEQ ID NO: 2511564 - RNA, 14 nt, Human
ucucccucccuugg

SEQ ID NO: 2511565 - RNA, 23 nt, Human
ucucccucacagcacagagaaga

SEQ ID NO: 2511566 - RNA, 23 nt, Human
ucucccucaacaagggagagacc

SEQ ID NO: 2511567 - RNA, 12 nt, Human
ucucccuccccu

SEQ ID NO: 2511568 - RNA, 18 nt, Human
ucucccuccccugccauu

SEQ ID NO: 2511569 - RNA, 12 nt, Human
ucucccugccgc

SEQ ID NO: 2511570 - RNA, 13 nt, Human
ucucccugccgcc

SEQ ID NO: 2511571 - RNA, 14 nt, Human
ucucccuggcccuc

SEQ ID NO: 2511572 - RNA, 14 nt, Human
ucucccugccgccu

SEQ ID NO: 2511573 - RNA, 15 nt, Human
ucucccugccgccuc

SEQ ID NO: 2511574 - RNA, 17 nt, Human
ucuccaggcacccuucu

SEQ ID NO: 2511575 - RNA, 13 nt, Human
ucuccaggaucca

SEQ ID NO: 2511576 - RNA, 19 nt, Human
ucuccaggauugaagagca

SEQ ID NO: 2511577 - RNA, 21 nt, Human
ucuccagcugggcucugcaau

SEQ ID NO: 2511578 - RNA, 18 nt, Human
ucuccaggaaggcggggc

SEQ ID NO: 2511579 - RNA, 11 nt, Human
ucuccaggcug

SEQ ID NO: 2511580 - RNA, 15 nt, Human
ucuccccagguccag

SEQ ID NO: 2511581 - RNA, 22 nt, Human
ucuccccagguccagcucugga

SEQ ID NO: 2511582 - RNA, 20 nt, Human
ucuccccagguccagcucug

SEQ ID NO: 2511583 - RNA, 19 nt, Human
ucuccccagguccagcucu

SEQ ID NO: 2511584 - RNA, 15 nt, Human
ucuccaggcgccggc

SEQ ID NO: 2511585 - RNA, 15 nt, Human
ucucccccacccccu

SEQ ID NO: 2511586 - RNA, 12 nt, Human
ucucccccaccc

SEQ ID NO: 2511587 - RNA, 23 nt, Human
ucuccaggcacccuucuuuccuc

SEQ ID NO: 2511588 - RNA, 20 nt, Human
ucucccccacccccuccccg

SEQ ID NO: 2511589 - RNA, 19 nt, Human
ucucccccacccccucccc

SEQ ID NO: 2511590 - RNA, 12 nt, Human
ucucccccagcc

SEQ ID NO: 2511591 - RNA, 13 nt, Human
ucuccccucaaag

SEQ ID NO: 2511592 - RNA, 11 nt, Human
ucuccccucaa

SEQ ID NO: 2511593 - RNA, 20 nt, Human
ucucccccugggcucugccc

SEQ ID NO: 2511594 - RNA, 18 nt, Human
ucuccccucagagugcaa

SEQ ID NO: 2511595 - RNA, 23 nt, Human
ucuccccucaaagucugcaacuu

SEQ ID NO: 2511596 - RNA, 16 nt, Human
ucuccccucaaagucu

SEQ ID NO: 2511597 - RNA, 13 nt, Human
ucuccccucagag

SEQ ID NO: 2511598 - RNA, 19 nt, Human
ucuccaccugccagggaca

SEQ ID NO: 2511599 - RNA, 17 nt, Human
ucuccaccugccaggga

SEQ ID NO: 2511600 - RNA, 22 nt, Human
ucuccaccugccagggacagag

SEQ ID NO: 2511601 - RNA, 13 nt, Human
ucuccacuccaga

SEQ ID NO: 2511602 - RNA, 17 nt, Human
ucuccaccucagccuug

SEQ ID NO: 2511603 - RNA, 18 nt, Human
ucuccaccucagccuugg

SEQ ID NO: 2511604 - RNA, 13 nt, Human
ucuccaccugcuc

SEQ ID NO: 2511605 - RNA, 19 nt, Human
ucuccaccucagccuugga

SEQ ID NO: 2511606 - RNA, 16 nt, Human
ucuccaccugccaggg

SEQ ID NO: 2511607 - RNA, 15 nt, Human
ucuccaccugccagg

SEQ ID NO: 2511608 - RNA, 14 nt, Human
ucuccaccugccag

SEQ ID NO: 2511609 - RNA, 23 nt, Human
ucuccaccuaguggcuguccagu

SEQ ID NO: 2511610 - RNA, 22 nt, Human
ucuccaccuaguggcuguccag

SEQ ID NO: 2511611 - RNA, 11 nt, Human
ucuccaccuca

SEQ ID NO: 2511612 - RNA, 12 nt, Human
ucuccaccucag

SEQ ID NO: 2511613 - RNA, 13 nt, Human
ucuccaccucagc

SEQ ID NO: 2511614 - RNA, 14 nt, Human
ucuccaccucagcc

SEQ ID NO: 2511615 - RNA, 15 nt, Human
ucuccaccucagccu

SEQ ID NO: 2511616 - RNA, 16 nt, Human
ucuccaccucagccuu

SEQ ID NO: 2511617 - RNA, 16 nt, Human
ucuccacccugcucuc

SEQ ID NO: 2511618 - RNA, 14 nt, Human
ucuccacccugcuc

SEQ ID NO: 2511619 - RNA, 21 nt, Human
ucuccaccuaguggcugucca

SEQ ID NO: 2511620 - RNA, 16 nt, Human
ucuccaccuaguggcu

SEQ ID NO: 2511621 - RNA, 15 nt, Human
ucuccaccuaguggc

SEQ ID NO: 2511622 - RNA, 14 nt, Human
ucuccaccuagugg

SEQ ID NO: 2511623 - RNA, 17 nt, Human
ucuccacccugcucucc

SEQ ID NO: 2511624 - RNA, 16 nt, Human
ucucaugccucagccu

SEQ ID NO: 2511625 - RNA, 19 nt, Human
ucucaugccucagccuccu

SEQ ID NO: 2511626 - RNA, 13 nt, Human
ucuccacccugcu

SEQ ID NO: 2511627 - RNA, 18 nt, Human
ucucaugccccuggcugg

SEQ ID NO: 2511628 - RNA, 21 nt, Human
ucucaugccccuggcugggac

SEQ ID NO: 2511629 - RNA, 13 nt, Human
ucucaugccucag

SEQ ID NO: 2511630 - RNA, 18 nt, Human
ucucaugaaucugcaaug

SEQ ID NO: 2511631 - RNA, 14 nt, Human
ucucaugaaucugc

SEQ ID NO: 2511632 - RNA, 22 nt, Human
ucucaugaaccucaagcugcau

SEQ ID NO: 2511633 - RNA, 18 nt, Human
ucucagucucugagcagu

SEQ ID NO: 2511634 - RNA, 15 nt, Human
ucucagucucugagc

SEQ ID NO: 2511635 - RNA, 17 nt, Human
ucucagucucugagcag

SEQ ID NO: 2511636 - RNA, 23 nt, Human
ucucaguccaugaagauguagag

SEQ ID NO: 2511637 - RNA, 11 nt, Human
ucucagucucu

SEQ ID NO: 2511638 - RNA, 13 nt, Human
ucucagucucuga

SEQ ID NO: 2511639 - RNA, 21 nt, Human
ucucagucaugcauaaauaug

SEQ ID NO: 2511640 - RNA, 20 nt, Human
ucucagucaugcauaaauau

SEQ ID NO: 2511641 - RNA, 23 nt, Human
ucucagucaugcauaaauaugca

SEQ ID NO: 2511642 - RNA, 13 nt, Human
ucuaugggacuca

SEQ ID NO: 2511643 - RNA, 12 nt, Human
ucuaugggacuc

SEQ ID NO: 2511644 - RNA, 17 nt, Human
ucuaugagaaaagaggc

SEQ ID NO: 2511645 - RNA, 19 nt, Human
ucucagucaugcauaaaua

SEQ ID NO: 2511646 - RNA, 19 nt, Human
ucuaugggacucaaugcac

SEQ ID NO: 2511647 - RNA, 13 nt, Human
ucucaugaaccuc

SEQ ID NO: 2511648 - RNA, 14 nt, Human
ucucaugaaccuca

SEQ ID NO: 2511649 - RNA, 22 nt, Human
ucucaucuuucuugaucaacau

SEQ ID NO: 2511650 - RNA, 13 nt, Human
ucucaucuuucuu

SEQ ID NO: 2511651 - RNA, 12 nt, Human
ucucaucuuucu

SEQ ID NO: 2511652 - RNA, 17 nt, Human
ucucaucugugauuccc

SEQ ID NO: 2511653 - RNA, 18 nt, Human
ucucaucucuucuuuuaa

SEQ ID NO: 2511654 - RNA, 20 nt, Human
ucucaucucuuagcuccccu

SEQ ID NO: 2511655 - RNA, 13 nt, Human
ucucaucugugau

SEQ ID NO: 2511656 - RNA, 19 nt, Human
ucucauaggaaaaguacau

SEQ ID NO: 2511657 - RNA, 16 nt, Human
ucucauaggaaaagua

SEQ ID NO: 2511658 - RNA, 21 nt, Human
ucucauaggaaaaguacauuu

SEQ ID NO: 2511659 - RNA, 17 nt, Human
ucucaucucuuagcucc

SEQ ID NO: 2511660 - RNA, 16 nt, Human
ucucauacucaccuca

SEQ ID NO: 2511661 - RNA, 18 nt, Human
ucucauacucaccucacc

SEQ ID NO: 2511662 - RNA, 17 nt, Human
ucucauacguccaccau

SEQ ID NO: 2511663 - RNA, 15 nt, Human
ucucauacguccacc

SEQ ID NO: 2511664 - RNA, 14 nt, Human
ucucauacguccac

SEQ ID NO: 2511665 - RNA, 13 nt, Human
ucucauagcauua

SEQ ID NO: 2511666 - RNA, 20 nt, Human
ucucauagcauuaacuaauc

SEQ ID NO: 2511667 - RNA, 24 nt, Human
ucucauagcauuaacuaaucuauu

SEQ ID NO: 2511668 - RNA, 15 nt, Human
ucucauccugcaggc

SEQ ID NO: 2511669 - RNA, 13 nt, Human
ucucauccugcag

SEQ ID NO: 2511670 - RNA, 20 nt, Human
uccgcucauacaggaaugaa

SEQ ID NO: 2511671 - RNA, 17 nt, Human
uccgccuucacuccggu

SEQ ID NO: 2511672 - RNA, 14 nt, Human
uccgcuggaggugg

SEQ ID NO: 2511673 - RNA, 12 nt, Human
uccgcuggaggu

SEQ ID NO: 2511674 - RNA, 16 nt, Human
uccgcuuucuacccag

SEQ ID NO: 2511675 - RNA, 20 nt, Human
uccgcuuucuacccagcgag

SEQ ID NO: 2511676 - RNA, 18 nt, Human
uccgcuuucuacccagcg

SEQ ID NO: 2511677 - RNA, 20 nt, Human
uccuaagcuauucaguaaua

SEQ ID NO: 2511678 - RNA, 21 nt, Human
uccuaagcuauucaguaauaa

SEQ ID NO: 2511679 - RNA, 15 nt, Human
uccgauccuuccucc

SEQ ID NO: 2511680 - RNA, 23 nt, Human
uccgaggggcgggacccaggcac

SEQ ID NO: 2511681 - RNA, 20 nt, Human
uccgaggggcgggacccagg

SEQ ID NO: 2511682 - RNA, 15 nt, Human
uccgaggggcgggac

SEQ ID NO: 2511683 - RNA, 12 nt, Human
ucccuuggagcu

SEQ ID NO: 2511684 - RNA, 14 nt, Human
uccgauccuuccuc

SEQ ID NO: 2511685 - RNA, 19 nt, Human
ucccuuggaaaccugcccu

SEQ ID NO: 2511686 - RNA, 18 nt, Human
ucccuuggaaaccugccc

SEQ ID NO: 2511687 - RNA, 20 nt, Human
ucccuugccucaaugccagu

SEQ ID NO: 2511688 - RNA, 23 nt, Human
ucccuuggaaaccugcccugccu

SEQ ID NO: 2511689 - RNA, 20 nt, Human
ucccuuggaaaccugcccug

SEQ ID NO: 2511690 - RNA, 16 nt, Human
uccgccagccuccucu

SEQ ID NO: 2511691 - RNA, 15 nt, Human
uccgccagccuccuc

SEQ ID NO: 2511692 - RNA, 14 nt, Human
uccgccagccuccu

SEQ ID NO: 2511693 - RNA, 13 nt, Human
uccgccagccucc

SEQ ID NO: 2511694 - RNA, 12 nt, Human
uccgccagccuc

SEQ ID NO: 2511695 - RNA, 11 nt, Human
uccgccagccu

SEQ ID NO: 2511696 - RNA, 14 nt, Human
uccgccucuugggu

SEQ ID NO: 2511697 - RNA, 20 nt, Human
uccgcccugcuccucccugg

SEQ ID NO: 2511698 - RNA, 20 nt, Human
uccgccagccuccucuggac

SEQ ID NO: 2511699 - RNA, 18 nt, Human
uccgccagccuccucugg

SEQ ID NO: 2511700 - RNA, 17 nt, Human
uccgccagccuccucug

SEQ ID NO: 2511701 - RNA, 22 nt, Human
uccgcccugcuccucccuggcu

SEQ ID NO: 2511702 - RNA, 17 nt, Human
uccgccucugcuggcac

SEQ ID NO: 2511703 - RNA, 12 nt, Human
ucccuugccuca

SEQ ID NO: 2511704 - RNA, 15 nt, Human
ucccuuccucuuucc

SEQ ID NO: 2511705 - RNA, 16 nt, Human
ucccuuccucuuucca

SEQ ID NO: 2511706 - RNA, 14 nt, Human
ucccuucacauagu

SEQ ID NO: 2511707 - RNA, 23 nt, Human
ucccuucaguacccucucagcuc

SEQ ID NO: 2511708 - RNA, 21 nt, Human
ucccuucaguacccucucagc

SEQ ID NO: 2511709 - RNA, 20 nt, Human
ucccuucaguacccucucag

SEQ ID NO: 2511710 - RNA, 19 nt, Human
ucccuucaguacccucuca

SEQ ID NO: 2511711 - RNA, 18 nt, Human
ucccuucaguacccucuc

SEQ ID NO: 2511712 - RNA, 16 nt, Human
ucccuucaguacccuc

SEQ ID NO: 2511713 - RNA, 22 nt, Human
ucccccuucacaaagcccaagg

SEQ ID NO: 2511714 - RNA, 18 nt, Human
ucccuucaucuccaggga

SEQ ID NO: 2511715 - RNA, 13 nt, Human
ucccuucaucucc

SEQ ID NO: 2511716 - RNA, 17 nt, Human
ucccuucccccauaagc

SEQ ID NO: 2511717 - RNA, 12 nt, Human
ucccuuccccuc

SEQ ID NO: 2511718 - RNA, 21 nt, Human
ucccuuccccucccuggcucc

SEQ ID NO: 2511719 - RNA, 20 nt, Human
ucccuuccccucccuggcuc

SEQ ID NO: 2511720 - RNA, 14 nt, Human
ucccccuucacaaa

SEQ ID NO: 2511721 - RNA, 15 nt, Human
ucccccuucacaaag

SEQ ID NO: 2511722 - RNA, 22 nt, Human
ucccuucaaccauuccccaugg

SEQ ID NO: 2511723 - RNA, 19 nt, Human
ucccuucacauaguuuuua

SEQ ID NO: 2511724 - RNA, 15 nt, Human
ucccccuuccaugga

SEQ ID NO: 2511725 - RNA, 19 nt, Human
ucccccuguccccucagcu

SEQ ID NO: 2511726 - RNA, 16 nt, Human
ucccccuguccccuca

SEQ ID NO: 2511727 - RNA, 15 nt, Human
ucccccuguccccuc

SEQ ID NO: 2511728 - RNA, 21 nt, Human
ucccccuggggcuucuccuga

SEQ ID NO: 2511729 - RNA, 20 nt, Human
ucccccuggggcuucuccug

SEQ ID NO: 2511730 - RNA, 10 nt, Human
ucccccuggg

SEQ ID NO: 2511731 - RNA, 23 nt, Human
ucccccugggcucugccccagcu

SEQ ID NO: 2511732 - RNA, 22 nt, Human
uccccccaucuugcuucccuaa

SEQ ID NO: 2511733 - RNA, 13 nt, Human
ucccccccaugca

SEQ ID NO: 2511734 - RNA, 17 nt, Human
ucccccccaugcacugu

SEQ ID NO: 2511735 - RNA, 18 nt, Human
ucccccccaugcacugug

SEQ ID NO: 2511736 - RNA, 15 nt, Human
uccccccaucuugcu

SEQ ID NO: 2511737 - RNA, 12 nt, Human
uccccccaucuu

SEQ ID NO: 2511738 - RNA, 12 nt, Human
uccccccacugc

SEQ ID NO: 2511739 - RNA, 13 nt, Human
uccccccacugca

SEQ ID NO: 2511740 - RNA, 18 nt, Human
uccccccacugcaggccc

SEQ ID NO: 2511741 - RNA, 19 nt, Human
uccccccacugcaggcccc

SEQ ID NO: 2511742 - RNA, 17 nt, Human
uccccccccuguauagu

SEQ ID NO: 2511743 - RNA, 16 nt, Human
uccccccccuguauag

SEQ ID NO: 2511744 - RNA, 16 nt, Human
uccccccccccuccaa

SEQ ID NO: 2511745 - RNA, 23 nt, Human
uccccccacugcaggccccgcuu

SEQ ID NO: 2511746 - RNA, 18 nt, Human
ucccccccggggcugggu

SEQ ID NO: 2511747 - RNA, 14 nt, Human
ucccccccggggcu

SEQ ID NO: 2511748 - RNA, 12 nt, Human
ucccccugggcu

SEQ ID NO: 2511749 - RNA, 14 nt, Human
ucccccugggcucu

SEQ ID NO: 2511750 - RNA, 15 nt, Human
ucccccugggcucug

SEQ ID NO: 2511751 - RNA, 20 nt, Human
ucccccugggcucugcccca

SEQ ID NO: 2511752 - RNA, 22 nt, Human
ucccccugggcucugccccagc

SEQ ID NO: 2511753 - RNA, 10 nt, Human
uccuccaggu

SEQ ID NO: 2511754 - RNA, 13 nt, Human
uccuccagggcca

SEQ ID NO: 2511755 - RNA, 19 nt, Human
uccuccagggccacgugcc

SEQ ID NO: 2511756 - RNA, 20 nt, Human
uccuccagggccacgugcca

SEQ ID NO: 2511757 - RNA, 23 nt, Human
uccuccagggccacgugccaggc

SEQ ID NO: 2511758 - RNA, 10 nt, Human
uccuccagcu

SEQ ID NO: 2511759 - RNA, 13 nt, Human
uccuccagcuucu

SEQ ID NO: 2511760 - RNA, 14 nt, Human
uccuccagcuucug

SEQ ID NO: 2511761 - RNA, 21 nt, Human
uccuccagggaugaucaacag

SEQ ID NO: 2511762 - RNA, 21 nt, Human
uccuccuccaaaggcccccua

SEQ ID NO: 2511763 - RNA, 12 nt, Human
uccucccaccuc

SEQ ID NO: 2511764 - RNA, 20 nt, Human
uccucccaauuucagacucc

SEQ ID NO: 2511765 - RNA, 21 nt, Human
uccucccaauuucagacuccc

SEQ ID NO: 2511766 - RNA, 12 nt, Human
uccuccauggga

SEQ ID NO: 2511767 - RNA, 19 nt, Human
uccuccaucuccaagaaug

SEQ ID NO: 2511768 - RNA, 17 nt, Human
uccucccaaguggugcc

SEQ ID NO: 2511769 - RNA, 16 nt, Human
uccuccauacucagga

SEQ ID NO: 2511770 - RNA, 16 nt, Human
uccuccaucuccaaga

SEQ ID NO: 2511771 - RNA, 17 nt, Human
uccuccaucgcaguguu

SEQ ID NO: 2511772 - RNA, 19 nt, Human
uccuaucaccuccccuccu

SEQ ID NO: 2511773 - RNA, 14 nt, Human
uccucauuccugaa

SEQ ID NO: 2511774 - RNA, 19 nt, Human
uccucauuugggguagcua

SEQ ID NO: 2511775 - RNA, 21 nt, Human
uccucauuugggguagcuaga

SEQ ID NO: 2511776 - RNA, 23 nt, Human
uccucauuugggguagcuagagg

SEQ ID NO: 2511777 - RNA, 17 nt, Human
uccuccaaaggcccccu

SEQ ID NO: 2511778 - RNA, 23 nt, Human
uccuccaaaggaagucuaggagc

SEQ ID NO: 2511779 - RNA, 17 nt, Human
uccuaucagaaguuucu

SEQ ID NO: 2511780 - RNA, 18 nt, Human
uccucauuagcauuuugc

SEQ ID NO: 2511781 - RNA, 23 nt, Human
uccuccacauccuuucuaaacaa

SEQ ID NO: 2511782 - RNA, 23 nt, Human
uccuccaccgccauggcuuccaa

SEQ ID NO: 2511783 - RNA, 22 nt, Human
uccuccaccgccauggcuucca

SEQ ID NO: 2511784 - RNA, 21 nt, Human
uccuccaccgccauggcuucc

SEQ ID NO: 2511785 - RNA, 18 nt, Human
uccuccaccgccauggcu

SEQ ID NO: 2511786 - RNA, 20 nt, Human
uccuccaccugccguggacu

SEQ ID NO: 2511787 - RNA, 19 nt, Human
uccuccacguucugcucau

SEQ ID NO: 2511788 - RNA, 20 nt, Human
uccuccagcagggaaaaugc

SEQ ID NO: 2511789 - RNA, 23 nt, Human
uccuccaaaggcccccuacgcca

SEQ ID NO: 2511790 - RNA, 18 nt, Human
uccuccaaaggcccccua

SEQ ID NO: 2511791 - RNA, 17 nt, Human
uccuccaacaccaagca

SEQ ID NO: 2511792 - RNA, 20 nt, Human
uccuccaagacacuguggac

SEQ ID NO: 2511793 - RNA, 17 nt, Human
uccuccaagaaucuauc

SEQ ID NO: 2511794 - RNA, 22 nt, Human
uccuccaacaccaagcacagca

SEQ ID NO: 2511795 - RNA, 16 nt, Human
uccuccacauccuuuc

SEQ ID NO: 2511796 - RNA, 15 nt, Human
uccuccacauccuuu

SEQ ID NO: 2511797 - RNA, 21 nt, Human
uccuccaagacacuguggacu

SEQ ID NO: 2511798 - RNA, 12 nt, Human
uccuccaagcca

SEQ ID NO: 2511799 - RNA, 14 nt, Human
uccuccaagccagc

SEQ ID NO: 2511800 - RNA, 23 nt, Human
uccuacaguuggaaauccaucca

SEQ ID NO: 2511801 - RNA, 21 nt, Human
uccuacaguuggaaauccauc

SEQ ID NO: 2511802 - RNA, 13 nt, Human
uccuacagccccu

SEQ ID NO: 2511803 - RNA, 17 nt, Human
uccuacagccccuuuuu

SEQ ID NO: 2511804 - RNA, 16 nt, Human
uccuacagauagucaa

SEQ ID NO: 2511805 - RNA, 16 nt, Human
uccuacaccuaacuca

SEQ ID NO: 2511806 - RNA, 15 nt, Human
uccuacaccuaacuc

SEQ ID NO: 2511807 - RNA, 20 nt, Human
uccuacacccuuggacuuga

SEQ ID NO: 2511808 - RNA, 18 nt, Human
uccuacacccuuggacuu

SEQ ID NO: 2511809 - RNA, 17 nt, Human
uccuacacccuuggacu

SEQ ID NO: 2511810 - RNA, 20 nt, Human
uccuacaagagcagccugug

SEQ ID NO: 2511811 - RNA, 22 nt, Human
uccuacaagagcagccuguggc

SEQ ID NO: 2511812 - RNA, 23 nt, Human
uccuacaagagcagccuguggca

SEQ ID NO: 2511813 - RNA, 12 nt, Human
uccuaaggacac

SEQ ID NO: 2511814 - RNA, 17 nt, Human
uccuaaggacacacuaa

SEQ ID NO: 2511815 - RNA, 16 nt, Human
uccuaaggacacacua

SEQ ID NO: 2511816 - RNA, 18 nt, Human
uccuaaggacacacuaau

SEQ ID NO: 2511817 - RNA, 19 nt, Human
uccuacaagagcagccugu

SEQ ID NO: 2511818 - RNA, 21 nt, Human
uccuauauuguuuucagugua

SEQ ID NO: 2511819 - RNA, 19 nt, Human
uccuaucaccuauuuccau

SEQ ID NO: 2511820 - RNA, 20 nt, Human
uccuaucaagccaguacgug

SEQ ID NO: 2511821 - RNA, 14 nt, Human
uccuaucaccuccc

SEQ ID NO: 2511822 - RNA, 16 nt, Human
uccuaucaccuccccu

SEQ ID NO: 2511823 - RNA, 17 nt, Human
uccuaucaccuccccuc

SEQ ID NO: 2511824 - RNA, 23 nt, Human
uccuauauuguuuucaguguaca

SEQ ID NO: 2511825 - RNA, 12 nt, Human
uccuaguuccac

SEQ ID NO: 2511826 - RNA, 23 nt, Human
uccuagucucuaucauuaaaguu

SEQ ID NO: 2511827 - RNA, 22 nt, Human
uccuagugcuuuccuuuuuuaa

SEQ ID NO: 2511828 - RNA, 14 nt, Human
uccuagugaaagag

SEQ ID NO: 2511829 - RNA, 23 nt, Human
uccuagugaaagaggcagcuuga

SEQ ID NO: 2511830 - RNA, 17 nt, Human
uccuaccccucccagcu

SEQ ID NO: 2511831 - RNA, 16 nt, Human
uccuaccccucccagc

SEQ ID NO: 2511832 - RNA, 15 nt, Human
uccuaccccucccag

SEQ ID NO: 2511833 - RNA, 14 nt, Human
uccuaccccuccca

SEQ ID NO: 2511834 - RNA, 13 nt, Human
uccuaccccuccc

SEQ ID NO: 2511835 - RNA, 12 nt, Human
uccuaccccucc

SEQ ID NO: 2511836 - RNA, 21 nt, Human
uccuaccccaauuccuuguag

SEQ ID NO: 2511837 - RNA, 18 nt, Human
uccuagucucccucacag

SEQ ID NO: 2511838 - RNA, 21 nt, Human
uccuacccucgggcccaccug

SEQ ID NO: 2511839 - RNA, 17 nt, Human
uccuacccucgggccca

SEQ ID NO: 2511840 - RNA, 18 nt, Human
uccuaccccucccagcug

SEQ ID NO: 2511841 - RNA, 18 nt, Human
uccuagguaggguuuaau

SEQ ID NO: 2511842 - RNA, 16 nt, Human
uccuggcacugcuucc

SEQ ID NO: 2511843 - RNA, 13 nt, Human
uccuggcacugcu

SEQ ID NO: 2511844 - RNA, 17 nt, Human
uccuggcaauagucaaa

SEQ ID NO: 2511845 - RNA, 23 nt, Human
uccuggcacccggccccugcugg

SEQ ID NO: 2511846 - RNA, 14 nt, Human
uccuggcccaucag

SEQ ID NO: 2511847 - RNA, 13 nt, Human
uccuggcccauca

SEQ ID NO: 2511848 - RNA, 11 nt, Human
uccuggcccau

SEQ ID NO: 2511849 - RNA, 13 nt, Human
uccuggcccucug

SEQ ID NO: 2511850 - RNA, 17 nt, Human
uccuggcccaucagugu

SEQ ID NO: 2511851 - RNA, 18 nt, Human
uccuggcccaucagugua

SEQ ID NO: 2511852 - RNA, 12 nt, Human
uccuggccucaa

SEQ ID NO: 2511853 - RNA, 11 nt, Human
uccuguagccc

SEQ ID NO: 2511854 - RNA, 13 nt, Human
uccuguagcccua

SEQ ID NO: 2511855 - RNA, 13 nt, Human
uccuggccuggca

SEQ ID NO: 2511856 - RNA, 23 nt, Human
uccuggccuggcacaucagaaag

SEQ ID NO: 2511857 - RNA, 16 nt, Human
uccuggcccucugugu

SEQ ID NO: 2511858 - RNA, 16 nt, Human
uccuggccuggcuucu

SEQ ID NO: 2511859 - RNA, 20 nt, Human
uccuguagaccuagggagga

SEQ ID NO: 2511860 - RNA, 15 nt, Human
uccuguagcaucuuc

SEQ ID NO: 2511861 - RNA, 14 nt, Human
uccuguagcaucuu

SEQ ID NO: 2511862 - RNA, 21 nt, Human
uccuguagagguuuuguuguu

SEQ ID NO: 2511863 - RNA, 23 nt, Human
uccuguagaccuagggaggaccu

SEQ ID NO: 2511864 - RNA, 15 nt, Human
uccugucucuggccu

SEQ ID NO: 2511865 - RNA, 15 nt, Human
uccugucuaacugcu

SEQ ID NO: 2511866 - RNA, 22 nt, Human
uccuguagccuucuguaggaau

SEQ ID NO: 2511867 - RNA, 21 nt, Human
uccuguagccuucuguaggaa

SEQ ID NO: 2511868 - RNA, 12 nt, Human
uccugucugcca

SEQ ID NO: 2511869 - RNA, 13 nt, Human
uccugucugccag

SEQ ID NO: 2511870 - RNA, 14 nt, Human
uccugucugccagc

SEQ ID NO: 2511871 - RNA, 16 nt, Human
uccugucugccagcca

SEQ ID NO: 2511872 - RNA, 16 nt, Human
uccuguagcucucccu

SEQ ID NO: 2511873 - RNA, 22 nt, Human
uccuguagcaucuucuggaguc

SEQ ID NO: 2511874 - RNA, 21 nt, Human
uccuguagcaucuucuggagu

SEQ ID NO: 2511875 - RNA, 19 nt, Human
uccuguagcaucuucugga

SEQ ID NO: 2511876 - RNA, 17 nt, Human
uccuguagcaucuucug

SEQ ID NO: 2511877 - RNA, 16 nt, Human
uccugccuaaggcuga

SEQ ID NO: 2511878 - RNA, 19 nt, Human
uccugccuaaggcugaacu

SEQ ID NO: 2511879 - RNA, 21 nt, Human
uccuggacaugaagauucuuu

SEQ ID NO: 2511880 - RNA, 21 nt, Human
uccuggacauccucuucugcu

SEQ ID NO: 2511881 - RNA, 14 nt, Human
uccuggacauuuuu

SEQ ID NO: 2511882 - RNA, 22 nt, Human
uccuggacauccucuucugcuu

SEQ ID NO: 2511883 - RNA, 22 nt, Human
uccuggacaugaagauucuuuc

SEQ ID NO: 2511884 - RNA, 19 nt, Human
uccuggacauuuuuucagu

SEQ ID NO: 2511885 - RNA, 15 nt, Human
uccuggaggcccagu

SEQ ID NO: 2511886 - RNA, 18 nt, Human
uccuggaggcccaguuca

SEQ ID NO: 2511887 - RNA, 21 nt, Human
uccuggagggaagcacugccu

SEQ ID NO: 2511888 - RNA, 14 nt, Human
uccuggaguucugg

SEQ ID NO: 2511889 - RNA, 19 nt, Human
uccuggagcagaccacccc

SEQ ID NO: 2511890 - RNA, 18 nt, Human
uccuggagcagaccaccc

SEQ ID NO: 2511891 - RNA, 18 nt, Human
uccuggagcccagaggag

SEQ ID NO: 2511892 - RNA, 15 nt, Human
uccuggagcccagag

SEQ ID NO: 2511893 - RNA, 13 nt, Human
uccuggaggccca

SEQ ID NO: 2511894 - RNA, 14 nt, Human
uccuggaggcccag

SEQ ID NO: 2511895 - RNA, 22 nt, Human
uccuggagcccagaggagggca

SEQ ID NO: 2511896 - RNA, 18 nt, Human
uccuggagccuuugaaua

SEQ ID NO: 2511897 - RNA, 17 nt, Human
uccugcccuuaccugcc

SEQ ID NO: 2511898 - RNA, 21 nt, Human
uccugcccugggaggcaguga

SEQ ID NO: 2511899 - RNA, 23 nt, Human
uccugcccuacagaggucucugc

SEQ ID NO: 2511900 - RNA, 14 nt, Human
uccugcccuacaga

SEQ ID NO: 2511901 - RNA, 12 nt, Human
uccugcccuguu

SEQ ID NO: 2511902 - RNA, 11 nt, Human
uccugcccugg

SEQ ID NO: 2511903 - RNA, 12 nt, Human
uccugcccuggg

SEQ ID NO: 2511904 - RNA, 14 nt, Human
uccugcccugggag

SEQ ID NO: 2511905 - RNA, 15 nt, Human
uccugcccugggagg

SEQ ID NO: 2511906 - RNA, 16 nt, Human
uccugccgacuccugg

SEQ ID NO: 2511907 - RNA, 15 nt, Human
uccugccgacuccug

SEQ ID NO: 2511908 - RNA, 14 nt, Human
uccugccgacuccu

SEQ ID NO: 2511909 - RNA, 19 nt, Human
uccugcccuuccucaguuu

SEQ ID NO: 2511910 - RNA, 17 nt, Human
uccugcccuuccucagu

SEQ ID NO: 2511911 - RNA, 16 nt, Human
uccugcccuuccucag

SEQ ID NO: 2511912 - RNA, 15 nt, Human
uccugcccuuccuca

SEQ ID NO: 2511913 - RNA, 18 nt, Human
uccugcccuguuguguau

SEQ ID NO: 2511914 - RNA, 20 nt, Human
uccugcccuuaccugccagg

SEQ ID NO: 2511915 - RNA, 17 nt, Human
uccugccgcagagcugg

SEQ ID NO: 2511916 - RNA, 16 nt, Human
uccugccgcagagcug

SEQ ID NO: 2511917 - RNA, 15 nt, Human
uccugccgcagagcu

SEQ ID NO: 2511918 - RNA, 13 nt, Human
uccugccgcagag

SEQ ID NO: 2511919 - RNA, 20 nt, Human
uccugccgcagagcuggccg

SEQ ID NO: 2511920 - RNA, 18 nt, Human
uccugccgcagagcuggc

SEQ ID NO: 2511921 - RNA, 19 nt, Human
uccugaggcuccacuuggu

SEQ ID NO: 2511922 - RNA, 20 nt, Human
uccugaggcuccacuugguc

SEQ ID NO: 2511923 - RNA, 19 nt, Human
uccugaggacagcuguccu

SEQ ID NO: 2511924 - RNA, 16 nt, Human
uccugcauuugugaaa

SEQ ID NO: 2511925 - RNA, 11 nt, Human
uccugccaaaa

SEQ ID NO: 2511926 - RNA, 11 nt, Human
uccugccacca

SEQ ID NO: 2511927 - RNA, 16 nt, Human
uccugccaccacgccc

SEQ ID NO: 2511928 - RNA, 22 nt, Human
uccugccaccagucacuguccc

SEQ ID NO: 2511929 - RNA, 17 nt, Human
uccugccaccagucacu

SEQ ID NO: 2511930 - RNA, 16 nt, Human
uccugccaccagucac

SEQ ID NO: 2511931 - RNA, 14 nt, Human
uccugccaccaguc

SEQ ID NO: 2511932 - RNA, 13 nt, Human
uccugccaccugc

SEQ ID NO: 2511933 - RNA, 13 nt, Human
uccugccaggcau

SEQ ID NO: 2511934 - RNA, 14 nt, Human
uccugccaggcaug

SEQ ID NO: 2511935 - RNA, 22 nt, Human
uccugcccccugaaacuuauuu

SEQ ID NO: 2511936 - RNA, 21 nt, Human
uccugcccccugaaacuuauu

SEQ ID NO: 2511937 - RNA, 19 nt, Human
uccugcccccugaaacuua

SEQ ID NO: 2511938 - RNA, 17 nt, Human
uccugcccccugaaacu

SEQ ID NO: 2511939 - RNA, 17 nt, Human
uccugccccugagccca

SEQ ID NO: 2511940 - RNA, 18 nt, Human
uccugccccugagcccau

SEQ ID NO: 2511941 - RNA, 12 nt, Human
uccugcccuaca

SEQ ID NO: 2511942 - RNA, 14 nt, Human
uccugccccuguuc

SEQ ID NO: 2511943 - RNA, 16 nt, Human
uccugccccuguucuc

SEQ ID NO: 2511944 - RNA, 10 nt, Human
uccugcccug

SEQ ID NO: 2511945 - RNA, 17 nt, Human
uccugccaguguggaac

SEQ ID NO: 2511946 - RNA, 18 nt, Human
uccugccaccuggggcag

SEQ ID NO: 2511947 - RNA, 20 nt, Human
uccugccaccuggggcaguc

SEQ ID NO: 2511948 - RNA, 12 nt, Human
uccugcccagga

SEQ ID NO: 2511949 - RNA, 13 nt, Human
uccugcccaggag

SEQ ID NO: 2511950 - RNA, 14 nt, Human
uccugcccaggaga

SEQ ID NO: 2511951 - RNA, 16 nt, Human
uccugcccaggagagc

SEQ ID NO: 2511952 - RNA, 18 nt, Human
uccugcccaggagagcca

SEQ ID NO: 2511953 - RNA, 19 nt, Human
uccugcccaggagagccag

SEQ ID NO: 2511954 - RNA, 22 nt, Human
uccugcccaggagagccagccc

SEQ ID NO: 2511955 - RNA, 23 nt, Human
uccugcccaggagagccagcccu

SEQ ID NO: 2511956 - RNA, 15 nt, Human
uccugccccaggccu

SEQ ID NO: 2511957 - RNA, 14 nt, Human
uccugccccaggcc

SEQ ID NO: 2511958 - RNA, 15 nt, Human
uccugcccccugaaa

SEQ ID NO: 2511959 - RNA, 16 nt, Human
uccugcccaguccccc

SEQ ID NO: 2511960 - RNA, 15 nt, Human
uccugcccagucccc

SEQ ID NO: 2511961 - RNA, 14 nt, Human
uccugcccaguccc

SEQ ID NO: 2511962 - RNA, 13 nt, Human
uccugcccagucc

SEQ ID NO: 2511963 - RNA, 21 nt, Human
uccugcccagucccccaaccc

SEQ ID NO: 2511964 - RNA, 17 nt, Human
uccugcccaguccccca

SEQ ID NO: 2511965 - RNA, 18 nt, Human
uccucugucugcccuuca

SEQ ID NO: 2511966 - RNA, 15 nt, Human
uccucugucugcccu

SEQ ID NO: 2511967 - RNA, 19 nt, Human
uccucugugaccaaugucu

SEQ ID NO: 2511968 - RNA, 21 nt, Human
uccucugugaccaaugucuug

SEQ ID NO: 2511969 - RNA, 20 nt, Human
uccucugugaccaaugucuu

SEQ ID NO: 2511970 - RNA, 12 nt, Human
uccucugugaag

SEQ ID NO: 2511971 - RNA, 22 nt, Human
uccucuguuucuccuucugaaa

SEQ ID NO: 2511972 - RNA, 14 nt, Human
uccucugucugccc

SEQ ID NO: 2511973 - RNA, 12 nt, Human
uccucugucugc

SEQ ID NO: 2511974 - RNA, 23 nt, Human
uccucuguccagggcccugagcu

SEQ ID NO: 2511975 - RNA, 12 nt, Human
uccuccucugug

SEQ ID NO: 2511976 - RNA, 22 nt, Human
uccucuguccaggcacugcugc

SEQ ID NO: 2511977 - RNA, 14 nt, Human
uccucuguccaggg

SEQ ID NO: 2511978 - RNA, 16 nt, Human
uccucuguccagggcc

SEQ ID NO: 2511979 - RNA, 20 nt, Human
uccuccucccacccggcugc

SEQ ID NO: 2511980 - RNA, 14 nt, Human
uccuccucccaccc

SEQ ID NO: 2511981 - RNA, 19 nt, Human
uccucccaaguggugccua

SEQ ID NO: 2511982 - RNA, 21 nt, Human
uccucccacccggcugcagag

SEQ ID NO: 2511983 - RNA, 20 nt, Human
uccucccacccggcugcaga

SEQ ID NO: 2511984 - RNA, 11 nt, Human
uccuccucugu

SEQ ID NO: 2511985 - RNA, 13 nt, Human
uccuccucuguga

SEQ ID NO: 2511986 - RNA, 17 nt, Human
uccuccucccugcaucu

SEQ ID NO: 2511987 - RNA, 18 nt, Human
uccuccucccugcaucug

SEQ ID NO: 2511988 - RNA, 13 nt, Human
uccuccucccugc

SEQ ID NO: 2511989 - RNA, 14 nt, Human
uccuccucccugca

SEQ ID NO: 2511990 - RNA, 15 nt, Human
uccuccucccccaga

SEQ ID NO: 2511991 - RNA, 21 nt, Human
uccugacuucaggggcugccc

SEQ ID NO: 2511992 - RNA, 21 nt, Human
uccugagccagauuucacucu

SEQ ID NO: 2511993 - RNA, 22 nt, Human
uccugacuucaggggcugcccg

SEQ ID NO: 2511994 - RNA, 19 nt, Human
uccugacuucaggggcugc

SEQ ID NO: 2511995 - RNA, 16 nt, Human
uccugacuucaggggc

SEQ ID NO: 2511996 - RNA, 19 nt, Human
uccugagaaaaaagguucc

SEQ ID NO: 2511997 - RNA, 24 nt, Human
uccugagaaaaaagguuccgcuug

SEQ ID NO: 2511998 - RNA, 13 nt, Human
uccucuuauuugc

SEQ ID NO: 2511999 - RNA, 20 nt, Human
uccucuuaaaaaauaaaaac

SEQ ID NO: 2512000 - RNA, 15 nt, Human
uccugacucugcccc

SEQ ID NO: 2512001 - RNA, 14 nt, Human
uccugacucugccc

SEQ ID NO: 2512002 - RNA, 19 nt, Human
uccugacucaacauguuac

SEQ ID NO: 2512003 - RNA, 23 nt, Human
uccugacucugcccccugcuggc

SEQ ID NO: 2512004 - RNA, 22 nt, Human
uccugacucugcccccugcugg

SEQ ID NO: 2512005 - RNA, 17 nt, Human
uccugacucugcccccu

SEQ ID NO: 2512006 - RNA, 16 nt, Human
uccugacucugccccc

SEQ ID NO: 2512007 - RNA, 12 nt, Human
uccugagcuugg

SEQ ID NO: 2512008 - RNA, 15 nt, Human
uccugagcuuggcca

SEQ ID NO: 2512009 - RNA, 16 nt, Human
uccugagcuuggccag

SEQ ID NO: 2512010 - RNA, 19 nt, Human
uccugagcuuggccagaag

SEQ ID NO: 2512011 - RNA, 20 nt, Human
uccugagcuuggccagaagg

SEQ ID NO: 2512012 - RNA, 18 nt, Human
uccugaggacagcugucc

SEQ ID NO: 2512013 - RNA, 16 nt, Human
uccugaggacagcugu

SEQ ID NO: 2512014 - RNA, 22 nt, Human
uccugagcuuggccagaagggg

SEQ ID NO: 2512015 - RNA, 16 nt, Human
uccugagaccacagag

SEQ ID NO: 2512016 - RNA, 23 nt, Human
uccugagaauaagaaaguuucac

SEQ ID NO: 2512017 - RNA, 23 nt, Human
uccugagccagugucaggaggaa

SEQ ID NO: 2512018 - RNA, 22 nt, Human
ucccaggacaccacacccagcc

SEQ ID NO: 2512019 - RNA, 21 nt, Human
ucccaggacaccacacccagc

SEQ ID NO: 2512020 - RNA, 19 nt, Human
ucccaggacaccacaccca

SEQ ID NO: 2512021 - RNA, 18 nt, Human
ucccaggacaccacaccc

SEQ ID NO: 2512022 - RNA, 23 nt, Human
ucccaggaacaaucgauggccuu

SEQ ID NO: 2512023 - RNA, 15 nt, Human
ucccaggacaccaca

SEQ ID NO: 2512024 - RNA, 23 nt, Human
ucccaggacaccacacccagccu

SEQ ID NO: 2512025 - RNA, 11 nt, Human
ucccaggaccc

SEQ ID NO: 2512026 - RNA, 24 nt, Human
ucccaggcauuccccaggaggcca

SEQ ID NO: 2512027 - RNA, 23 nt, Human
ucccaggcauuccccaggaggcc

SEQ ID NO: 2512028 - RNA, 12 nt, Human
ucccaggacccu

SEQ ID NO: 2512029 - RNA, 15 nt, Human
ucccaggccaggcuc

SEQ ID NO: 2512030 - RNA, 21 nt, Human
ucccaggccaggcuccuuccu

SEQ ID NO: 2512031 - RNA, 22 nt, Human
ucccagcugugcucuggacagg

SEQ ID NO: 2512032 - RNA, 21 nt, Human
ucccagcugugcucuggacag

SEQ ID NO: 2512033 - RNA, 11 nt, Human
ucccaggaacu

SEQ ID NO: 2512034 - RNA, 16 nt, Human
ucccaggaacugggcc

SEQ ID NO: 2512035 - RNA, 23 nt, Human
ucccagcugugcucuggacaggc

SEQ ID NO: 2512036 - RNA, 24 nt, Human
ucccaugacccaccccugugcucc

SEQ ID NO: 2512037 - RNA, 22 nt, Human
ucccaugacccaccccugugcu

SEQ ID NO: 2512038 - RNA, 21 nt, Human
ucccaugacccaccccugugc

SEQ ID NO: 2512039 - RNA, 20 nt, Human
ucccaugacccaccccugug

SEQ ID NO: 2512040 - RNA, 18 nt, Human
ucccaugacccaccccug

SEQ ID NO: 2512041 - RNA, 17 nt, Human
ucccaugacccaccccu

SEQ ID NO: 2512042 - RNA, 16 nt, Human
ucccaugacccacccc

SEQ ID NO: 2512043 - RNA, 14 nt, Human
ucccaugacccacc

SEQ ID NO: 2512044 - RNA, 19 nt, Human
ucccaugaacacacugugu

SEQ ID NO: 2512045 - RNA, 17 nt, Human
ucccaugaacacacugu

SEQ ID NO: 2512046 - RNA, 16 nt, Human
ucccaugaacacacug

SEQ ID NO: 2512047 - RNA, 14 nt, Human
ucccaugaacacac

SEQ ID NO: 2512048 - RNA, 19 nt, Human
ucccaugagccucagcauc

SEQ ID NO: 2512049 - RNA, 18 nt, Human
ucccaugagccucagcau

SEQ ID NO: 2512050 - RNA, 18 nt, Human
ucccaggccaguaaggga

SEQ ID NO: 2512051 - RNA, 21 nt, Human
ucccaucugugaaaggaaaga

SEQ ID NO: 2512052 - RNA, 16 nt, Human
ucccaggcgccccuuc

SEQ ID NO: 2512053 - RNA, 15 nt, Human
ucccaucuuccaagg

SEQ ID NO: 2512054 - RNA, 18 nt, Human
ucccaccuuggcugcagg

SEQ ID NO: 2512055 - RNA, 20 nt, Human
ucccagcugugcucuggaca

SEQ ID NO: 2512056 - RNA, 17 nt, Human
ucccaccuuggcugcag

SEQ ID NO: 2512057 - RNA, 16 nt, Human
ucccaccuuggcugca

SEQ ID NO: 2512058 - RNA, 22 nt, Human
ucccaccucuucucuuccugua

SEQ ID NO: 2512059 - RNA, 13 nt, Human
ucccaccuuggcu

SEQ ID NO: 2512060 - RNA, 22 nt, Human
ucccaccucugugaccucaggc

SEQ ID NO: 2512061 - RNA, 21 nt, Human
ucccaccucugugaccucagg

SEQ ID NO: 2512062 - RNA, 20 nt, Human
ucccaccucugugaccucag

SEQ ID NO: 2512063 - RNA, 18 nt, Human
ucccaccucugugaccuc

SEQ ID NO: 2512064 - RNA, 22 nt, Human
uccauucacaguucuuugggcc

SEQ ID NO: 2512065 - RNA, 15 nt, Human
uccauuauuuauauu

SEQ ID NO: 2512066 - RNA, 13 nt, Human
ucccaccucugug

SEQ ID NO: 2512067 - RNA, 11 nt, Human
ucccaccucug

SEQ ID NO: 2512068 - RNA, 12 nt, Human
uccauuccagaa

SEQ ID NO: 2512069 - RNA, 18 nt, Human
uccaugugguucuucaaa

SEQ ID NO: 2512070 - RNA, 22 nt, Human
uccauguggagaaaggagugaa

SEQ ID NO: 2512071 - RNA, 13 nt, Human
uccauguggagaa

SEQ ID NO: 2512072 - RNA, 17 nt, Human
uccauguguggacucaa

SEQ ID NO: 2512073 - RNA, 11 nt, Human
uccaugugugu

SEQ ID NO: 2512074 - RNA, 13 nt, Human
uccaugugugugc

SEQ ID NO: 2512075 - RNA, 14 nt, Human
uccaugugugugca

SEQ ID NO: 2512076 - RNA, 17 nt, Human
uccauguugcugccaac

SEQ ID NO: 2512077 - RNA, 15 nt, Human
uccauguugcugcca

SEQ ID NO: 2512078 - RNA, 14 nt, Human
uccauguugcugcc

SEQ ID NO: 2512079 - RNA, 18 nt, Human
uccaugugugugcaagug

SEQ ID NO: 2512080 - RNA, 18 nt, Human
uccauguuaguuuuuacu

SEQ ID NO: 2512081 - RNA, 12 nt, Human
uccauguugcug

SEQ ID NO: 2512082 - RNA, 19 nt, Human
uccauguuaguuuuuacuu

SEQ ID NO: 2512083 - RNA, 19 nt, Human
uccaugugcccccucuacc

SEQ ID NO: 2512084 - RNA, 23 nt, Human
uccaugggcagagcccaagggaa

SEQ ID NO: 2512085 - RNA, 20 nt, Human
uccauggcuuccuccucccu

SEQ ID NO: 2512086 - RNA, 14 nt, Human
uccaugugcccccu

SEQ ID NO: 2512087 - RNA, 20 nt, Human
uccaugugggcuaguugggc

SEQ ID NO: 2512088 - RNA, 22 nt, Human
ucccaccucucucacuccuuga

SEQ ID NO: 2512089 - RNA, 20 nt, Human
uccauuaucauguguaauca

SEQ ID NO: 2512090 - RNA, 15 nt, Human
uccauuaugauucuu

SEQ ID NO: 2512091 - RNA, 11 nt, Human
uccauuauuua

SEQ ID NO: 2512092 - RNA, 12 nt, Human
uccauuauuuau

SEQ ID NO: 2512093 - RNA, 14 nt, Human
uccauuauuuauau

SEQ ID NO: 2512094 - RNA, 16 nt, Human
uccauguuuguaaaac

SEQ ID NO: 2512095 - RNA, 13 nt, Human
uccauguuuguaa

SEQ ID NO: 2512096 - RNA, 19 nt, Human
uccauguuuguaaaacuac

SEQ ID NO: 2512097 - RNA, 22 nt, Human
uccauuaacuuagcauguguug

SEQ ID NO: 2512098 - RNA, 17 nt, Human
uccauuaucauguguaa

SEQ ID NO: 2512099 - RNA, 16 nt, Human
uccauuaucaugugua

SEQ ID NO: 2512100 - RNA, 15 nt, Human
uccauuaucaugugu

SEQ ID NO: 2512101 - RNA, 14 nt, Human
uccauuaucaugug

SEQ ID NO: 2512102 - RNA, 14 nt, Human
uccauuaggauuug

SEQ ID NO: 2512103 - RNA, 13 nt, Human
uccauuaucaugu

SEQ ID NO: 2512104 - RNA, 20 nt, Human
uccauuaacuuagcaugugu

SEQ ID NO: 2512105 - RNA, 22 nt, Human
uccccagagaaaggggagccca

SEQ ID NO: 2512106 - RNA, 23 nt, Human
uccccagagaaaggggagcccac

SEQ ID NO: 2512107 - RNA, 18 nt, Human
uccccagauugcaacagg

SEQ ID NO: 2512108 - RNA, 13 nt, Human
uccccagauugca

SEQ ID NO: 2512109 - RNA, 10 nt, Human
ucccaugugg

SEQ ID NO: 2512110 - RNA, 23 nt, Human
ucccauuaggacaaucagucccc

SEQ ID NO: 2512111 - RNA, 21 nt, Human
ucccauuaggacaaucagucc

SEQ ID NO: 2512112 - RNA, 16 nt, Human
ucccauuagcaaaaau

SEQ ID NO: 2512113 - RNA, 22 nt, Human
ucccauguauuuaucucuauuu

SEQ ID NO: 2512114 - RNA, 22 nt, Human
ucccauguagcccccuggccuc

SEQ ID NO: 2512115 - RNA, 14 nt, Human
ucccaugacccagg

SEQ ID NO: 2512116 - RNA, 20 nt, Human
ucccaugagccucagcaucc

SEQ ID NO: 2512117 - RNA, 22 nt, Human
uccccagcaagugagagcuggg

SEQ ID NO: 2512118 - RNA, 17 nt, Human
uccccagaguuccccau

SEQ ID NO: 2512119 - RNA, 19 nt, Human
uccccagaguccucuauga

SEQ ID NO: 2512120 - RNA, 21 nt, Human
uccccagagcacuggguugca

SEQ ID NO: 2512121 - RNA, 12 nt, Human
uccccagagcac

SEQ ID NO: 2512122 - RNA, 20 nt, Human
uccccagaguuccccaugca

SEQ ID NO: 2512123 - RNA, 18 nt, Human
uccccagaguuccccaug

SEQ ID NO: 2512124 - RNA, 21 nt, Human
uccccagcagggucuuuucau

SEQ ID NO: 2512125 - RNA, 10 nt, Human
uccccagcag

SEQ ID NO: 2512126 - RNA, 21 nt, Human
uccccagcaagugagagcugg

SEQ ID NO: 2512127 - RNA, 20 nt, Human
uccccagcaagugagagcug

SEQ ID NO: 2512128 - RNA, 23 nt, Human
uccccagauugcaacaggcuggg

SEQ ID NO: 2512129 - RNA, 22 nt, Human
uccccagauugcaacaggcugg

SEQ ID NO: 2512130 - RNA, 20 nt, Human
uccccagauugcaacaggcu

SEQ ID NO: 2512131 - RNA, 19 nt, Human
uccccagauugcaacaggc

SEQ ID NO: 2512132 - RNA, 21 nt, Human
ucccccagccccauccucugu

SEQ ID NO: 2512133 - RNA, 20 nt, Human
ucccccagccccauccucug

SEQ ID NO: 2512134 - RNA, 22 nt, Human
ucccccagccccauccucugua

SEQ ID NO: 2512135 - RNA, 12 nt, Human
uccccccacucu

SEQ ID NO: 2512136 - RNA, 21 nt, Human
uccccccacucuccccacacu

SEQ ID NO: 2512137 - RNA, 16 nt, Human
uccccaggaggccagc

SEQ ID NO: 2512138 - RNA, 15 nt, Human
uccccaggaggccag

SEQ ID NO: 2512139 - RNA, 17 nt, Human
ucccccagccccauccu

SEQ ID NO: 2512140 - RNA, 14 nt, Human
uccccaggaggcca

SEQ ID NO: 2512141 - RNA, 18 nt, Human
uccccagcccuggcucug

SEQ ID NO: 2512142 - RNA, 15 nt, Human
uccccagcccuggcu

SEQ ID NO: 2512143 - RNA, 21 nt, Human
uccccagccccuagcccagga

SEQ ID NO: 2512144 - RNA, 13 nt, Human
uccccagcccagg

SEQ ID NO: 2512145 - RNA, 14 nt, Human
uccccagcccaggg

SEQ ID NO: 2512146 - RNA, 15 nt, Human
uccccagcccagggu

SEQ ID NO: 2512147 - RNA, 22 nt, Human
uccccagcccaggguuccccca

SEQ ID NO: 2512148 - RNA, 23 nt, Human
uccccagcccaggguucccccag

SEQ ID NO: 2512149 - RNA, 16 nt, Human
uccccagccccuagcc

SEQ ID NO: 2512150 - RNA, 15 nt, Human
uccccagccccuagc

SEQ ID NO: 2512151 - RNA, 13 nt, Human
uccccagccccua

SEQ ID NO: 2512152 - RNA, 11 nt, Human
uccccagcccc

SEQ ID NO: 2512153 - RNA, 20 nt, Human
uccccagccccuagcccagg

SEQ ID NO: 2512154 - RNA, 19 nt, Human
uccccagccccuagcccag

SEQ ID NO: 2512155 - RNA, 13 nt, Human
uccccagcccugg

SEQ ID NO: 2512156 - RNA, 20 nt, Human
uccccagcauuccagccccu

SEQ ID NO: 2512157 - RNA, 15 nt, Human
uccccagcagguggg

SEQ ID NO: 2512158 - RNA, 23 nt, Human
uccccagcagggucuuuucaucu

SEQ ID NO: 2512159 - RNA, 22 nt, Human
uccccagcagggucuuuucauc

SEQ ID NO: 2512160 - RNA, 19 nt, Human
uccccagcagguggggagg

SEQ ID NO: 2512161 - RNA, 14 nt, Human
uccccagcccagag

SEQ ID NO: 2512162 - RNA, 15 nt, Human
uccccagcccagaga

SEQ ID NO: 2512163 - RNA, 16 nt, Human
uccccagcccagagac

SEQ ID NO: 2512164 - RNA, 17 nt, Human
uccccagcccagagaca

SEQ ID NO: 2512165 - RNA, 10 nt, Human
uccccagccc

SEQ ID NO: 2512166 - RNA, 13 nt, Human
uccccagcccaga

SEQ ID NO: 2512167 - RNA, 12 nt, Human
uccccagcccag

SEQ ID NO: 2512168 - RNA, 14 nt, Human
uccaguuaguucuc

SEQ ID NO: 2512169 - RNA, 16 nt, Human
uccaguucaugagaau

SEQ ID NO: 2512170 - RNA, 18 nt, Human
uccaguucccagaaggca

SEQ ID NO: 2512171 - RNA, 19 nt, Human
uccaguucaugagaaucua

SEQ ID NO: 2512172 - RNA, 22 nt, Human
uccaguuaaaaaaaauuuuaau

SEQ ID NO: 2512173 - RNA, 21 nt, Human
uccaguuaaaaaaaauuuuaa

SEQ ID NO: 2512174 - RNA, 18 nt, Human
uccaguuaauuacauccu

SEQ ID NO: 2512175 - RNA, 13 nt, Human
uccaguucccacu

SEQ ID NO: 2512176 - RNA, 20 nt, Human
uccauaaagaagcaauaaag

SEQ ID NO: 2512177 - RNA, 18 nt, Human
uccauaaagaagcaauaa

SEQ ID NO: 2512178 - RNA, 13 nt, Human
uccauaaagaagc

SEQ ID NO: 2512179 - RNA, 21 nt, Human
uccauaaagaagauguuuaac

SEQ ID NO: 2512180 - RNA, 17 nt, Human
uccauaaagaagauguu

SEQ ID NO: 2512181 - RNA, 20 nt, Human
uccaguuuuuuguuauauag

SEQ ID NO: 2512182 - RNA, 22 nt, Human
uccauaaucuggacuccucugu

SEQ ID NO: 2512183 - RNA, 17 nt, Human
uccauaaccccacccuu

SEQ ID NO: 2512184 - RNA, 14 nt, Human
uccauaaccccacc

SEQ ID NO: 2512185 - RNA, 12 nt, Human
uccauaaucacu

SEQ ID NO: 2512186 - RNA, 16 nt, Human
uccauaaggaauguag

SEQ ID NO: 2512187 - RNA, 23 nt, Human
uccagguuuuucaauuaaacgga

SEQ ID NO: 2512188 - RNA, 22 nt, Human
uccagguuuuucaauuaaacgg

SEQ ID NO: 2512189 - RNA, 21 nt, Human
uccagguuuuucaauuaaacg

SEQ ID NO: 2512190 - RNA, 20 nt, Human
uccagguuuuucaauuaaac

SEQ ID NO: 2512191 - RNA, 19 nt, Human
uccagguuuuucaauuaaa

SEQ ID NO: 2512192 - RNA, 18 nt, Human
uccagguuuuucaauuaa

SEQ ID NO: 2512193 - RNA, 17 nt, Human
uccagguuuuucaauua

SEQ ID NO: 2512194 - RNA, 16 nt, Human
uccagguuuuucaauu

SEQ ID NO: 2512195 - RNA, 24 nt, Human
uccagguuuuucaauuaaacggau

SEQ ID NO: 2512196 - RNA, 15 nt, Human
uccagguuuuucaau

SEQ ID NO: 2512197 - RNA, 14 nt, Human
uccagguuuuucaa

SEQ ID NO: 2512198 - RNA, 13 nt, Human
uccagguuuuuca

SEQ ID NO: 2512199 - RNA, 17 nt, Human
uccagguaucuccagga

SEQ ID NO: 2512200 - RNA, 16 nt, Human
uccagguaucuccagg

SEQ ID NO: 2512201 - RNA, 18 nt, Human
uccagguaucuccaggau

SEQ ID NO: 2512202 - RNA, 20 nt, Human
uccagguuuaagcuguuacu

SEQ ID NO: 2512203 - RNA, 19 nt, Human
uccagguagagggugugua

SEQ ID NO: 2512204 - RNA, 18 nt, Human
uccaggguugaucacacu

SEQ ID NO: 2512205 - RNA, 17 nt, Human
uccagggugugugcucg

SEQ ID NO: 2512206 - RNA, 15 nt, Human
uccagguaucuccag

SEQ ID NO: 2512207 - RNA, 16 nt, Human
uccaggucucacgggc

SEQ ID NO: 2512208 - RNA, 16 nt, Human
uccauggcuuccuccu

SEQ ID NO: 2512209 - RNA, 15 nt, Human
uccauggcuuccucc

SEQ ID NO: 2512210 - RNA, 23 nt, Human
uccauggaaugcuugaaaaaugu

SEQ ID NO: 2512211 - RNA, 22 nt, Human
uccauggaaugcuugaaaaaug

SEQ ID NO: 2512212 - RNA, 18 nt, Human
uccaugggagaaaauaga

SEQ ID NO: 2512213 - RNA, 15 nt, Human
uccaugggcagagcc

SEQ ID NO: 2512214 - RNA, 16 nt, Human
uccaugggcagagccc

SEQ ID NO: 2512215 - RNA, 17 nt, Human
uccaugggcagagccca

SEQ ID NO: 2512216 - RNA, 18 nt, Human
uccaugggcagagcccaa

SEQ ID NO: 2512217 - RNA, 22 nt, Human
uccaugggcagagcccaaggga

SEQ ID NO: 2512218 - RNA, 20 nt, Human
uccaugggccauaugaaaag

SEQ ID NO: 2512219 - RNA, 15 nt, Human
uccauggaaugcuug

SEQ ID NO: 2512220 - RNA, 23 nt, Human
uccaugcuuagucacugccugca

SEQ ID NO: 2512221 - RNA, 22 nt, Human
uccaugcuuagucacugccugc

SEQ ID NO: 2512222 - RNA, 20 nt, Human
uccaugcuuagucacugccu

SEQ ID NO: 2512223 - RNA, 19 nt, Human
uccaugcuuagucacugcc

SEQ ID NO: 2512224 - RNA, 21 nt, Human
uccauggaaugcuugaaaaau

SEQ ID NO: 2512225 - RNA, 18 nt, Human
uccauggaaugcuugaaa

SEQ ID NO: 2512226 - RNA, 17 nt, Human
uccauggaaugcuugaa

SEQ ID NO: 2512227 - RNA, 16 nt, Human
uccauggaaugcuuga

SEQ ID NO: 2512228 - RNA, 15 nt, Human
uccaugcugccucca

SEQ ID NO: 2512229 - RNA, 14 nt, Human
uccaugcugccucc

SEQ ID NO: 2512230 - RNA, 22 nt, Human
uccaugcguguuucugacucug

SEQ ID NO: 2512231 - RNA, 21 nt, Human
uccaugcguguuucugacucu

SEQ ID NO: 2512232 - RNA, 13 nt, Human
uccaucauguccc

SEQ ID NO: 2512233 - RNA, 15 nt, Human
uccaucagaaugaaa

SEQ ID NO: 2512234 - RNA, 14 nt, Human
uccaucaggccacu

SEQ ID NO: 2512235 - RNA, 12 nt, Human
uccaucaugucc

SEQ ID NO: 2512236 - RNA, 18 nt, Human
uccaucaguuagagcuga

SEQ ID NO: 2512237 - RNA, 13 nt, Human
uccaucaucaugu

SEQ ID NO: 2512238 - RNA, 17 nt, Human
uccaucaguuagagcug

SEQ ID NO: 2512239 - RNA, 19 nt, Human
uccaucagguuccaucccg

SEQ ID NO: 2512240 - RNA, 18 nt, Human
uccaucagguuccauccc

SEQ ID NO: 2512241 - RNA, 22 nt, Human
uccaucagcuuaggggcugcug

SEQ ID NO: 2512242 - RNA, 14 nt, Human
uccauauuuauuca

SEQ ID NO: 2512243 - RNA, 15 nt, Human
uccauagagagcaag

SEQ ID NO: 2512244 - RNA, 14 nt, Human
uccauagagagcaa

SEQ ID NO: 2512245 - RNA, 15 nt, Human
uccauacauuugugu

SEQ ID NO: 2512246 - RNA, 21 nt, Human
uccauaaucuggacuccucug

SEQ ID NO: 2512247 - RNA, 13 nt, Human
uccauacucagga

SEQ ID NO: 2512248 - RNA, 15 nt, Human
uccaggagcagccac

SEQ ID NO: 2512249 - RNA, 14 nt, Human
uccaggagcagcca

SEQ ID NO: 2512250 - RNA, 13 nt, Human
uccaggagcagcc

SEQ ID NO: 2512251 - RNA, 12 nt, Human
uccaggagcagc

SEQ ID NO: 2512252 - RNA, 18 nt, Human
uccaggggccccuccagc

SEQ ID NO: 2512253 - RNA, 17 nt, Human
uccaggggccccuccag

SEQ ID NO: 2512254 - RNA, 16 nt, Human
uccagcugccccgggg

SEQ ID NO: 2512255 - RNA, 22 nt, Human
uccaggggcugcuuccuccugg

SEQ ID NO: 2512256 - RNA, 21 nt, Human
uccaggggcugcuuccuccug

SEQ ID NO: 2512257 - RNA, 23 nt, Human
uccaggggcugcuuccuccugga

SEQ ID NO: 2512258 - RNA, 19 nt, Human
uccaggggccccuccagcu

SEQ ID NO: 2512259 - RNA, 20 nt, Human
uccaggggugggacacccug

SEQ ID NO: 2512260 - RNA, 19 nt, Human
uccaggggugggacacccu

SEQ ID NO: 2512261 - RNA, 16 nt, Human
uccagcugagcgccag

SEQ ID NO: 2512262 - RNA, 15 nt, Human
uccagcucuuuccuc

SEQ ID NO: 2512263 - RNA, 18 nt, Human
uccagcucuuuccuccuu

SEQ ID NO: 2512264 - RNA, 23 nt, Human
uccagcugacccugguucucucu

SEQ ID NO: 2512265 - RNA, 21 nt, Human
uccagcucuuuccuccuucca

SEQ ID NO: 2512266 - RNA, 20 nt, Human
uccagcucuggaggggaggg

SEQ ID NO: 2512267 - RNA, 15 nt, Human
uccagcucuggaggg

SEQ ID NO: 2512268 - RNA, 13 nt, Human
uccagcucuggag

SEQ ID NO: 2512269 - RNA, 12 nt, Human
uccagcucugga

SEQ ID NO: 2512270 - RNA, 13 nt, Human
uccagcuccugua

SEQ ID NO: 2512271 - RNA, 21 nt, Human
uccagcuccuccgugcuuccu

SEQ ID NO: 2512272 - RNA, 23 nt, Human
uccagcaccauccgccagggccc

SEQ ID NO: 2512273 - RNA, 22 nt, Human
uccagcaauucuccugccucag

SEQ ID NO: 2512274 - RNA, 14 nt, Human
uccagcaccacacu

SEQ ID NO: 2512275 - RNA, 21 nt, Human
uccagcaauucuccugccuca

SEQ ID NO: 2512276 - RNA, 21 nt, Human
uccacuuggucugugagaugc

SEQ ID NO: 2512277 - RNA, 17 nt, Human
uccacuuggucugugag

SEQ ID NO: 2512278 - RNA, 14 nt, Human
uccaaaguacacug

SEQ ID NO: 2512279 - RNA, 16 nt, Human
uccaaaguacacuguu

SEQ ID NO: 2512280 - RNA, 19 nt, Human
uccacuuucuagccagagg

SEQ ID NO: 2512281 - RNA, 23 nt, Human
uccacuuggucugugagaugcua

SEQ ID NO: 2512282 - RNA, 21 nt, Human
uccacuuucuagccagaggag

SEQ ID NO: 2512283 - RNA, 20 nt, Human
uccacuuucuagccagagga

SEQ ID NO: 2512284 - RNA, 11 nt, Human
uccagaaagaa

SEQ ID NO: 2512285 - RNA, 23 nt, Human
uccagaaagaaaacuuguauuau

SEQ ID NO: 2512286 - RNA, 21 nt, Human
uccagaaacggccauucagca

SEQ ID NO: 2512287 - RNA, 18 nt, Human
uccagaaaaccccagcau

SEQ ID NO: 2512288 - RNA, 19 nt, Human
uccacuuuguuucgugggg

SEQ ID NO: 2512289 - RNA, 18 nt, Human
uccacuuuguuucguggg

SEQ ID NO: 2512290 - RNA, 16 nt, Human
uccacuuuguucuuua

SEQ ID NO: 2512291 - RNA, 13 nt, Human
uccacuuuguucu

SEQ ID NO: 2512292 - RNA, 15 nt, Human
uccacuuuguuucgu

SEQ ID NO: 2512293 - RNA, 23 nt, Human
uccacuuuguuucguggggaggu

SEQ ID NO: 2512294 - RNA, 22 nt, Human
uccacuuuguuucguggggagg

SEQ ID NO: 2512295 - RNA, 20 nt, Human
uccacuuuguuggaaagcag

SEQ ID NO: 2512296 - RNA, 20 nt, Human
uccacuuuuuuuuguauguu

SEQ ID NO: 2512297 - RNA, 22 nt, Human
ucaguauuuuggagaaauuauu

SEQ ID NO: 2512298 - RNA, 20 nt, Human
ucaguauuuuggagaaauua

SEQ ID NO: 2512299 - RNA, 19 nt, Human
ucaguauuuuggagaaauu

SEQ ID NO: 2512300 - RNA, 18 nt, Human
ucaguauuuucccugcua

SEQ ID NO: 2512301 - RNA, 16 nt, Human
ucaguauuuucccugc

SEQ ID NO: 2512302 - RNA, 17 nt, Human
ucaguauuguuuugguu

SEQ ID NO: 2512303 - RNA, 15 nt, Human
ucaguauuguuuugg

SEQ ID NO: 2512304 - RNA, 14 nt, Human
ucaguauuguuuug

SEQ ID NO: 2512305 - RNA, 21 nt, Human
ucaggugcccaucccuggaag

SEQ ID NO: 2512306 - RNA, 24 nt, Human
ucaguauuguuuugguuugcuacu

SEQ ID NO: 2512307 - RNA, 22 nt, Human
ucaguauuguuuugguuugcua

SEQ ID NO: 2512308 - RNA, 23 nt, Human
ucaguauugaagcauuuuauaaa

SEQ ID NO: 2512309 - RNA, 22 nt, Human
ucaguauugaagcauuuuauaa

SEQ ID NO: 2512310 - RNA, 20 nt, Human
ucagguggggcagcuugagg

SEQ ID NO: 2512311 - RNA, 16 nt, Human
ucagucuauccacaga

SEQ ID NO: 2512312 - RNA, 15 nt, Human
ucagucuauccacag

SEQ ID NO: 2512313 - RNA, 18 nt, Human
ucagucuauccacagaga

SEQ ID NO: 2512314 - RNA, 16 nt, Human
ucagucucccucccuu

SEQ ID NO: 2512315 - RNA, 20 nt, Human
ucagucucccuuucccuucu

SEQ ID NO: 2512316 - RNA, 17 nt, Human
ucagucucccuuucccu

SEQ ID NO: 2512317 - RNA, 14 nt, Human
ucagucucccuuuc

SEQ ID NO: 2512318 - RNA, 23 nt, Human
ucagucucccuucucccaugagg

SEQ ID NO: 2512319 - RNA, 20 nt, Human
ucagucucccuucucccaug

SEQ ID NO: 2512320 - RNA, 19 nt, Human
ucagucucccuucucccau

SEQ ID NO: 2512321 - RNA, 14 nt, Human
ucagucucaggagc

SEQ ID NO: 2512322 - RNA, 16 nt, Human
ucagucaauauuuuua

SEQ ID NO: 2512323 - RNA, 13 nt, Human
ucagucacagcca

SEQ ID NO: 2512324 - RNA, 14 nt, Human
ucagucacagccac

SEQ ID NO: 2512325 - RNA, 22 nt, Human
ucaguccuccccucacagccuc

SEQ ID NO: 2512326 - RNA, 23 nt, Human
ucaguauuuuggagaaauuauuu

SEQ ID NO: 2512327 - RNA, 15 nt, Human
ucagucacagccacc

SEQ ID NO: 2512328 - RNA, 23 nt, Human
ucaguccuccccucacagccucu

SEQ ID NO: 2512329 - RNA, 15 nt, Human
ucaguccuuugauca

SEQ ID NO: 2512330 - RNA, 22 nt, Human
ucagucuuucuuagugccugug

SEQ ID NO: 2512331 - RNA, 23 nt, Human
ucagucucccuuucccuucuugg

SEQ ID NO: 2512332 - RNA, 22 nt, Human
ucagucuuuaaucugagaggcc

SEQ ID NO: 2512333 - RNA, 11 nt, Human
ucagugacaga

SEQ ID NO: 2512334 - RNA, 15 nt, Human
ucagugacagaguuc

SEQ ID NO: 2512335 - RNA, 19 nt, Human
ucagugacagaguucacua

SEQ ID NO: 2512336 - RNA, 14 nt, Human
ucagugaggcccag

SEQ ID NO: 2512337 - RNA, 17 nt, Human
ucagugaggcccaggga

SEQ ID NO: 2512338 - RNA, 18 nt, Human
ucagugaggcccagggag

SEQ ID NO: 2512339 - RNA, 19 nt, Human
ucagugauguaccaugaaa

SEQ ID NO: 2512340 - RNA, 14 nt, Human
ucagugcaaagauu

SEQ ID NO: 2512341 - RNA, 23 nt, Human
ucagugcagcccguguggccccu

SEQ ID NO: 2512342 - RNA, 23 nt, Human
ucagucugauucccaagcucugc

SEQ ID NO: 2512343 - RNA, 22 nt, Human
ucagucugauucccaagcucug

SEQ ID NO: 2512344 - RNA, 21 nt, Human
ucagucugauucccaagcucu

SEQ ID NO: 2512345 - RNA, 19 nt, Human
ucagguggggcagcuugag

SEQ ID NO: 2512346 - RNA, 18 nt, Human
ucagguggggcagcuuga

SEQ ID NO: 2512347 - RNA, 16 nt, Human
ucaggugacaugugaa

SEQ ID NO: 2512348 - RNA, 19 nt, Human
ucaggucucccacguggga

SEQ ID NO: 2512349 - RNA, 15 nt, Human
ucaggugacauguga

SEQ ID NO: 2512350 - RNA, 23 nt, Human
ucaggugauccacccaccucagc

SEQ ID NO: 2512351 - RNA, 21 nt, Human
ucaggucucccacgugggaga

SEQ ID NO: 2512352 - RNA, 18 nt, Human
ucaggucagggugaggau

SEQ ID NO: 2512353 - RNA, 12 nt, Human
ucaggucccugc

SEQ ID NO: 2512354 - RNA, 16 nt, Human
ucagguccucagagaa

SEQ ID NO: 2512355 - RNA, 15 nt, Human
ucaggucagggugag

SEQ ID NO: 2512356 - RNA, 16 nt, Human
ucaggugauccaccca

SEQ ID NO: 2512357 - RNA, 23 nt, Human
ucaggugagaagcagaggaagga

SEQ ID NO: 2512358 - RNA, 19 nt, Human
ucaggcugcuggcgccucu

SEQ ID NO: 2512359 - RNA, 17 nt, Human
ucaggcugcuggcgccu

SEQ ID NO: 2512360 - RNA, 12 nt, Human
ucaggcugcugg

SEQ ID NO: 2512361 - RNA, 15 nt, Human
ucaggcugcuggagg

SEQ ID NO: 2512362 - RNA, 16 nt, Human
ucaggcugcuggagga

SEQ ID NO: 2512363 - RNA, 14 nt, Human
ucaggcugcuggcg

SEQ ID NO: 2512364 - RNA, 13 nt, Human
ucaggcugcuggc

SEQ ID NO: 2512365 - RNA, 17 nt, Human
ucaggcugcuggaggaa

SEQ ID NO: 2512366 - RNA, 19 nt, Human
ucaggcugcuggaggaaaa

SEQ ID NO: 2512367 - RNA, 13 nt, Human
ucaggcugaggug

SEQ ID NO: 2512368 - RNA, 21 nt, Human
ucaggcucuucuccuuucaca

SEQ ID NO: 2512369 - RNA, 16 nt, Human
ucaggcucuucuccuu

SEQ ID NO: 2512370 - RNA, 22 nt, Human
ucagggaauuucaggaacuaga

SEQ ID NO: 2512371 - RNA, 18 nt, Human
ucagggacagagacaccu

SEQ ID NO: 2512372 - RNA, 21 nt, Human
ucagggacagagacaccugca

SEQ ID NO: 2512373 - RNA, 23 nt, Human
ucagggacagagacaccugcacc

SEQ ID NO: 2512374 - RNA, 15 nt, Human
ucagggacagagcca

SEQ ID NO: 2512375 - RNA, 14 nt, Human
ucagggacagagcc

SEQ ID NO: 2512376 - RNA, 15 nt, Human
ucagggacaggauga

SEQ ID NO: 2512377 - RNA, 14 nt, Human
ucagggaccaagga

SEQ ID NO: 2512378 - RNA, 15 nt, Human
ucagggaccaaggac

SEQ ID NO: 2512379 - RNA, 20 nt, Human
ucagggaccaaggaccccuc

SEQ ID NO: 2512380 - RNA, 13 nt, Human
ucagggaccacag

SEQ ID NO: 2512381 - RNA, 23 nt, Human
ucagggaccaaggaccccucacc

SEQ ID NO: 2512382 - RNA, 15 nt, Human
ucagggaccacagca

SEQ ID NO: 2512383 - RNA, 14 nt, Human
ucagggaccacagc

SEQ ID NO: 2512384 - RNA, 16 nt, Human
ucagggaccacagcaa

SEQ ID NO: 2512385 - RNA, 12 nt, Human
ucagggaccccu

SEQ ID NO: 2512386 - RNA, 14 nt, Human
ucagggaccccugc

SEQ ID NO: 2512387 - RNA, 21 nt, Human
ucagguauguugccuuuaugg

SEQ ID NO: 2512388 - RNA, 17 nt, Human
ucagguauuaagaaaau

SEQ ID NO: 2512389 - RNA, 15 nt, Human
ucagguauuaagaaa

SEQ ID NO: 2512390 - RNA, 16 nt, Human
ucagggaccccugccc

SEQ ID NO: 2512391 - RNA, 16 nt, Human
ucaggucaggaguucg

SEQ ID NO: 2512392 - RNA, 19 nt, Human
ucagcuccagguggcucug

SEQ ID NO: 2512393 - RNA, 14 nt, Human
ucagcuccaggugg

SEQ ID NO: 2512394 - RNA, 13 nt, Human
ucagcuccagcug

SEQ ID NO: 2512395 - RNA, 14 nt, Human
ucaccuaauguuua

SEQ ID NO: 2512396 - RNA, 21 nt, Human
ucaccuaauguuuaugagcca

SEQ ID NO: 2512397 - RNA, 22 nt, Human
ucaccuaauguuuaugagccag

SEQ ID NO: 2512398 - RNA, 24 nt, Human
ucagcuccagcucaccagccccag

SEQ ID NO: 2512399 - RNA, 23 nt, Human
ucagcuccagcucaccagcccca

SEQ ID NO: 2512400 - RNA, 13 nt, Human
ucaccgugggcuc

SEQ ID NO: 2512401 - RNA, 15 nt, Human
ucaccgugggcuccc

SEQ ID NO: 2512402 - RNA, 16 nt, Human
ucaccgugggcucccu

SEQ ID NO: 2512403 - RNA, 17 nt, Human
ucaccgugggcucccug

SEQ ID NO: 2512404 - RNA, 18 nt, Human
ucaccgugggcucccuga

SEQ ID NO: 2512405 - RNA, 19 nt, Human
ucaccgugggcucccugac

SEQ ID NO: 2512406 - RNA, 22 nt, Human
ucaccuaacucauacugugcug

SEQ ID NO: 2512407 - RNA, 14 nt, Human
ucaccuaacucaua

SEQ ID NO: 2512408 - RNA, 21 nt, Human
ucaccguggaccuuccugcca

SEQ ID NO: 2512409 - RNA, 20 nt, Human
ucaccguggaccuuccugcc

SEQ ID NO: 2512410 - RNA, 19 nt, Human
ucaccguggaccuuccugc

SEQ ID NO: 2512411 - RNA, 18 nt, Human
ucaccguggaccuuccug

SEQ ID NO: 2512412 - RNA, 17 nt, Human
ucaccguggaccuuccu

SEQ ID NO: 2512413 - RNA, 18 nt, Human
ucaccggggugguuuagu

SEQ ID NO: 2512414 - RNA, 23 nt, Human
ucaccggagcuuucaaagaagga

SEQ ID NO: 2512415 - RNA, 15 nt, Human
ucaccggauccuggg

SEQ ID NO: 2512416 - RNA, 23 nt, Human
ucaccgcagucgucgcacagucu

SEQ ID NO: 2512417 - RNA, 22 nt, Human
ucaccgcagucgucgcacaguc

SEQ ID NO: 2512418 - RNA, 14 nt, Human
ucaccggagcuuuc

SEQ ID NO: 2512419 - RNA, 23 nt, Human
ucaggaagcucagggccuggcuc

SEQ ID NO: 2512420 - RNA, 21 nt, Human
ucagcuucauuugugucaaug

SEQ ID NO: 2512421 - RNA, 18 nt, Human
ucagcuucauuuguguca

SEQ ID NO: 2512422 - RNA, 16 nt, Human
ucagcuucauuugugu

SEQ ID NO: 2512423 - RNA, 23 nt, Human
ucagcuucagaauggcauuguac

SEQ ID NO: 2512424 - RNA, 18 nt, Human
ucagcuuaggggcugcug

SEQ ID NO: 2512425 - RNA, 17 nt, Human
ucagcuguacuucgucu

SEQ ID NO: 2512426 - RNA, 16 nt, Human
ucagcuguaguccuca

SEQ ID NO: 2512427 - RNA, 12 nt, Human
ucagcugugaac

SEQ ID NO: 2512428 - RNA, 21 nt, Human
ucagcugugaacauggacucu

SEQ ID NO: 2512429 - RNA, 15 nt, Human
ucagcuguuugucau

SEQ ID NO: 2512430 - RNA, 16 nt, Human
ucagcuguuugucaua

SEQ ID NO: 2512431 - RNA, 23 nt, Human
ucagcucugcaagaauugaagca

SEQ ID NO: 2512432 - RNA, 17 nt, Human
ucagcucugggagagga

SEQ ID NO: 2512433 - RNA, 16 nt, Human
ucagcucugggagagg

SEQ ID NO: 2512434 - RNA, 12 nt, Human
ucagcucuggga

SEQ ID NO: 2512435 - RNA, 11 nt, Human
ucagcucuggg

SEQ ID NO: 2512436 - RNA, 19 nt, Human
ucagcucugggccauucuc

SEQ ID NO: 2512437 - RNA, 22 nt, Human
ucagcucuucugacuuaagugu

SEQ ID NO: 2512438 - RNA, 12 nt, Human
ucagcuguacuu

SEQ ID NO: 2512439 - RNA, 23 nt, Human
ucagcuguaagaagagacuggga

SEQ ID NO: 2512440 - RNA, 18 nt, Human
ucagcucugggagaggau

SEQ ID NO: 2512441 - RNA, 15 nt, Human
ucaggagcccuggga

SEQ ID NO: 2512442 - RNA, 14 nt, Human
ucaggagcccuggg

SEQ ID NO: 2512443 - RNA, 12 nt, Human
ucaggagcccug

SEQ ID NO: 2512444 - RNA, 11 nt, Human
ucaggagcccu

SEQ ID NO: 2512445 - RNA, 18 nt, Human
ucaggaauauuuuccaaa

SEQ ID NO: 2512446 - RNA, 17 nt, Human
ucaggaauauuuuccaa

SEQ ID NO: 2512447 - RNA, 14 nt, Human
ucaggaaugggcug

SEQ ID NO: 2512448 - RNA, 19 nt, Human
ucagcuuccuacccacacc

SEQ ID NO: 2512449 - RNA, 15 nt, Human
ucagcuuccuaccca

SEQ ID NO: 2512450 - RNA, 16 nt, Human
ucaggaaggaugagca

SEQ ID NO: 2512451 - RNA, 17 nt, Human
ucaggaaggaugagcau

SEQ ID NO: 2512452 - RNA, 18 nt, Human
ucaggaaggaugagcauu

SEQ ID NO: 2512453 - RNA, 20 nt, Human
ucaggaaggaugagcauuua

SEQ ID NO: 2512454 - RNA, 22 nt, Human
ucaggagcagccucagaacaaa

SEQ ID NO: 2512455 - RNA, 21 nt, Human
ucaggagcagccucagaacaa

SEQ ID NO: 2512456 - RNA, 10 nt, Human
ucaggagcag

SEQ ID NO: 2512457 - RNA, 18 nt, Human
ucaggagcacaggcagcu

SEQ ID NO: 2512458 - RNA, 12 nt, Human
ucaggacacuaa

SEQ ID NO: 2512459 - RNA, 20 nt, Human
ucaggaucaaaccccgacca

SEQ ID NO: 2512460 - RNA, 15 nt, Human
ucaggauacaugugc

SEQ ID NO: 2512461 - RNA, 14 nt, Human
ucaggauacaugug

SEQ ID NO: 2512462 - RNA, 16 nt, Human
ucaggauacaugugcc

SEQ ID NO: 2512463 - RNA, 18 nt, Human
ucaggauacucugucaga

SEQ ID NO: 2512464 - RNA, 12 nt, Human
ucaggaguuccu

SEQ ID NO: 2512465 - RNA, 20 nt, Human
ucaggaguuagaggccagcc

SEQ ID NO: 2512466 - RNA, 22 nt, Human
ucaggaguuagaggccagccug

SEQ ID NO: 2512467 - RNA, 17 nt, Human
ucaggaguuagaggcca

SEQ ID NO: 2512468 - RNA, 19 nt, Human
ucaggaguuagaggccagc

SEQ ID NO: 2512469 - RNA, 23 nt, Human
ucaggaucucuuagcauuuuaau

SEQ ID NO: 2512470 - RNA, 20 nt, Human
ucaggauacucugucagaug

SEQ ID NO: 2512471 - RNA, 16 nt, Human
ucaggaucaagaaagu

SEQ ID NO: 2512472 - RNA, 17 nt, Human
ucaggaucaagaaagug

SEQ ID NO: 2512473 - RNA, 16 nt, Human
ucaggaugaacccagg

SEQ ID NO: 2512474 - RNA, 15 nt, Human
ucaggaugaacccag

SEQ ID NO: 2512475 - RNA, 17 nt, Human
ucaggaugaacccagga

SEQ ID NO: 2512476 - RNA, 21 nt, Human
ucaggccugggggcugggcag

SEQ ID NO: 2512477 - RNA, 18 nt, Human
ucaggccuauaaccccag

SEQ ID NO: 2512478 - RNA, 22 nt, Human
ucaggccuauaaccccagcucc

SEQ ID NO: 2512479 - RNA, 15 nt, Human
ucaggcucuucuccu

SEQ ID NO: 2512480 - RNA, 23 nt, Human
ucaggcguagaucaccagaauaa

SEQ ID NO: 2512481 - RNA, 21 nt, Human
ucaggcgauccaccugucuca

SEQ ID NO: 2512482 - RNA, 17 nt, Human
ucaggccucccucucuc

SEQ ID NO: 2512483 - RNA, 18 nt, Human
ucaggccucccucucucu

SEQ ID NO: 2512484 - RNA, 20 nt, Human
ucaggcgauccaccugucuc

SEQ ID NO: 2512485 - RNA, 13 nt, Human
ucaggccugugug

SEQ ID NO: 2512486 - RNA, 17 nt, Human
ucauccacugugccaug

SEQ ID NO: 2512487 - RNA, 14 nt, Human
ucauccacugugcc

SEQ ID NO: 2512488 - RNA, 18 nt, Human
ucauccacugugccaugu

SEQ ID NO: 2512489 - RNA, 22 nt, Human
ucauccacuagugcaaaucaua

SEQ ID NO: 2512490 - RNA, 21 nt, Human
ucauccacuagugcaaaucau

SEQ ID NO: 2512491 - RNA, 16 nt, Human
ucaucucauucaaacc

SEQ ID NO: 2512492 - RNA, 20 nt, Human
ucaucucaggccucccucaa

SEQ ID NO: 2512493 - RNA, 16 nt, Human
ucaucuccccaucauu

SEQ ID NO: 2512494 - RNA, 22 nt, Human
ucaucuccagggaguccccucc

SEQ ID NO: 2512495 - RNA, 23 nt, Human
ucaucuccagggaguccccuccc

SEQ ID NO: 2512496 - RNA, 13 nt, Human
ucaucuccaucag

SEQ ID NO: 2512497 - RNA, 16 nt, Human
ucaucuugaccaagca

SEQ ID NO: 2512498 - RNA, 19 nt, Human
ucaucuugaccaagcagga

SEQ ID NO: 2512499 - RNA, 15 nt, Human
ucaucuccugccuuc

SEQ ID NO: 2512500 - RNA, 22 nt, Human
ucaucucccaccuagcagcacc

SEQ ID NO: 2512501 - RNA, 12 nt, Human
ucaucucccacc

SEQ ID NO: 2512502 - RNA, 16 nt, Human
ucaucuccaucagcug

SEQ ID NO: 2512503 - RNA, 17 nt, Human
ucaucuccaucagcugu

SEQ ID NO: 2512504 - RNA, 22 nt, Human
ucaucuuucauuaaaggcuucu

SEQ ID NO: 2512505 - RNA, 21 nt, Human
ucaucuugaccaagcaggaag

SEQ ID NO: 2512506 - RNA, 22 nt, Human
ucaucuugaccaagcaggaagc

SEQ ID NO: 2512507 - RNA, 22 nt, Human
ucaucuugguacuacuagaugu

SEQ ID NO: 2512508 - RNA, 15 nt, Human
ucaucuuguguuuua

SEQ ID NO: 2512509 - RNA, 23 nt, Human
ucaucuugaccaagcaggaagcu

SEQ ID NO: 2512510 - RNA, 23 nt, Human
ucaugguagagaccgagccucug

SEQ ID NO: 2512511 - RNA, 13 nt, Human
ucauggucucagu

SEQ ID NO: 2512512 - RNA, 22 nt, Human
ucaugguagagaccgagccucu

SEQ ID NO: 2512513 - RNA, 14 nt, Human
ucaugggguccaag

SEQ ID NO: 2512514 - RNA, 22 nt, Human
ucauggaaugguuauaaaagug

SEQ ID NO: 2512515 - RNA, 21 nt, Human
ucauggggugaugcugggcug

SEQ ID NO: 2512516 - RNA, 21 nt, Human
ucauggaaugguuauaaaagu

SEQ ID NO: 2512517 - RNA, 12 nt, Human
ucauggaauggu

SEQ ID NO: 2512518 - RNA, 17 nt, Human
ucaugcuucuuccuuac

SEQ ID NO: 2512519 - RNA, 18 nt, Human
ucaugcuuguguuauaac

SEQ ID NO: 2512520 - RNA, 22 nt, Human
ucaucauguaucgcuucaugua

SEQ ID NO: 2512521 - RNA, 20 nt, Human
ucauccacuagugcaaauca

SEQ ID NO: 2512522 - RNA, 19 nt, Human
ucauccacuagugcaaauc

SEQ ID NO: 2512523 - RNA, 20 nt, Human
ucauccaccccaucccuccc

SEQ ID NO: 2512524 - RNA, 18 nt, Human
ucaucauucucugucuca

SEQ ID NO: 2512525 - RNA, 16 nt, Human
ucauccaccccauccc

SEQ ID NO: 2512526 - RNA, 13 nt, Human
ucaucauucucug

SEQ ID NO: 2512527 - RNA, 14 nt, Human
ucaucauucucugu

SEQ ID NO: 2512528 - RNA, 14 nt, Human
ucaucauuccuuga

SEQ ID NO: 2512529 - RNA, 17 nt, Human
ucaucauuccuugagaa

SEQ ID NO: 2512530 - RNA, 21 nt, Human
ucaucaaggcacugccugaug

SEQ ID NO: 2512531 - RNA, 19 nt, Human
ucaucaaggcacugccuga

SEQ ID NO: 2512532 - RNA, 18 nt, Human
ucaucaaggcacugccug

SEQ ID NO: 2512533 - RNA, 17 nt, Human
ucaucaaugaaugaaug

SEQ ID NO: 2512534 - RNA, 19 nt, Human
ucaucaaucauuguacagu

SEQ ID NO: 2512535 - RNA, 16 nt, Human
ucaucaaucauuguac

SEQ ID NO: 2512536 - RNA, 15 nt, Human
ucaucaaucauugua

SEQ ID NO: 2512537 - RNA, 14 nt, Human
ucaucaaucauugu

SEQ ID NO: 2512538 - RNA, 23 nt, Human
ucaucaauugaauggucagcguu

SEQ ID NO: 2512539 - RNA, 24 nt, Human
ucaucaauugaauggucagcguug

SEQ ID NO: 2512540 - RNA, 14 nt, Human
ucaucauccuaagc

SEQ ID NO: 2512541 - RNA, 18 nt, Human
ucaguguaccauuugccu

SEQ ID NO: 2512542 - RNA, 19 nt, Human
ucaguguaccauuugccuc

SEQ ID NO: 2512543 - RNA, 20 nt, Human
ucaguguacauggaauaaca

SEQ ID NO: 2512544 - RNA, 23 nt, Human
ucaguguacccccgcccaggcug

SEQ ID NO: 2512545 - RNA, 22 nt, Human
ucaguguacccccgcccaggcu

SEQ ID NO: 2512546 - RNA, 21 nt, Human
ucaguguauggaaauaaaugu

SEQ ID NO: 2512547 - RNA, 22 nt, Human
ucaguguauggaaauaaaugua

SEQ ID NO: 2512548 - RNA, 21 nt, Human
ucaguguacccccgcccaggc

SEQ ID NO: 2512549 - RNA, 20 nt, Human
ucaguguacccccgcccagg

SEQ ID NO: 2512550 - RNA, 17 nt, Human
ucaguguacccccgccc

SEQ ID NO: 2512551 - RNA, 15 nt, Human
ucagugcagcccgug

SEQ ID NO: 2512552 - RNA, 11 nt, Human
ucauagcagcu

SEQ ID NO: 2512553 - RNA, 16 nt, Human
ucauagacccucucaa

SEQ ID NO: 2512554 - RNA, 23 nt, Human
ucauagaaauguaacuuuuguaa

SEQ ID NO: 2512555 - RNA, 14 nt, Human
ucaguguauuugua

SEQ ID NO: 2512556 - RNA, 12 nt, Human
ucauagcagcuu

SEQ ID NO: 2512557 - RNA, 14 nt, Human
ucauagcacuuccc

SEQ ID NO: 2512558 - RNA, 18 nt, Human
ucauagcagauuuuaauu

SEQ ID NO: 2512559 - RNA, 17 nt, Human
ucaucaaggcacugccu

SEQ ID NO: 2512560 - RNA, 21 nt, Human
uccaaaagaagcccccagcua

SEQ ID NO: 2512561 - RNA, 16 nt, Human
uccaaaccaaauaaaa

SEQ ID NO: 2512562 - RNA, 23 nt, Human
uccaaaauuugaaauauuaaaau

SEQ ID NO: 2512563 - RNA, 15 nt, Human
uccaaaagaagcccc

SEQ ID NO: 2512564 - RNA, 18 nt, Human
uccaaaagaagcccccag

SEQ ID NO: 2512565 - RNA, 14 nt, Human
uccaaaagaagccc

SEQ ID NO: 2512566 - RNA, 12 nt, Human
uccaaaacugcc

SEQ ID NO: 2512567 - RNA, 13 nt, Human
uccaaaacugccu

SEQ ID NO: 2512568 - RNA, 15 nt, Human
uccaaaacuccugcc

SEQ ID NO: 2512569 - RNA, 22 nt, Human
uccaaaaagauuuucagaaaau

SEQ ID NO: 2512570 - RNA, 19 nt, Human
ucauuucaaauacaucuuu

SEQ ID NO: 2512571 - RNA, 22 nt, Human
ucauuuauauagauuauaacuu

SEQ ID NO: 2512572 - RNA, 17 nt, Human
ucauuuauauagauuau

SEQ ID NO: 2512573 - RNA, 15 nt, Human
ucauuuaucccucaa

SEQ ID NO: 2512574 - RNA, 14 nt, Human
ucauuuaugaaaag

SEQ ID NO: 2512575 - RNA, 15 nt, Human
ucauuuaugaaaaga

SEQ ID NO: 2512576 - RNA, 13 nt, Human
uccaaaguacacu

SEQ ID NO: 2512577 - RNA, 20 nt, Human
uccaaagaguagaauugcau

SEQ ID NO: 2512578 - RNA, 14 nt, Human
uccaaaggcccccu

SEQ ID NO: 2512579 - RNA, 23 nt, Human
uccaaaggccauggagagcugga

SEQ ID NO: 2512580 - RNA, 22 nt, Human
uccaaaggccauggagagcugg

SEQ ID NO: 2512581 - RNA, 13 nt, Human
uccaaagagaaaa

SEQ ID NO: 2512582 - RNA, 14 nt, Human
uccaaagaaaugua

SEQ ID NO: 2512583 - RNA, 17 nt, Human
uccaaagaaauguaagg

SEQ ID NO: 2512584 - RNA, 21 nt, Human
uccaaaccuccuguuagcugu

SEQ ID NO: 2512585 - RNA, 16 nt, Human
ucauuaggauggcuag

SEQ ID NO: 2512586 - RNA, 19 nt, Human
ucauuagccugaguagaaa

SEQ ID NO: 2512587 - RNA, 18 nt, Human
ucauuagccugaguagaa

SEQ ID NO: 2512588 - RNA, 17 nt, Human
ucauuguacaguuuguu

SEQ ID NO: 2512589 - RNA, 14 nt, Human
ucauuguacaguuu

SEQ ID NO: 2512590 - RNA, 20 nt, Human
ucauuguaauguuacugauc

SEQ ID NO: 2512591 - RNA, 20 nt, Human
ucauuagccugaguagaaag

SEQ ID NO: 2512592 - RNA, 17 nt, Human
ucauuguaauguuacug

SEQ ID NO: 2512593 - RNA, 19 nt, Human
ucauuguaauguuacugau

SEQ ID NO: 2512594 - RNA, 14 nt, Human
ucauuguagaaaag

SEQ ID NO: 2512595 - RNA, 19 nt, Human
ucauuguacaguuuguuua

SEQ ID NO: 2512596 - RNA, 14 nt, Human
ucauuguauaaaaa

SEQ ID NO: 2512597 - RNA, 15 nt, Human
ucauuguauaaaaau

SEQ ID NO: 2512598 - RNA, 16 nt, Human
ucauuguauaaaaaua

SEQ ID NO: 2512599 - RNA, 15 nt, Human
ucauuguauauaugu

SEQ ID NO: 2512600 - RNA, 17 nt, Human
ucauuguauaaaaauag

SEQ ID NO: 2512601 - RNA, 18 nt, Human
ucauuagacuccuccucc

SEQ ID NO: 2512602 - RNA, 13 nt, Human
ucauuagacuccu

SEQ ID NO: 2512603 - RNA, 12 nt, Human
ucauuagagcag

SEQ ID NO: 2512604 - RNA, 15 nt, Human
ucauuagagcaggcg

SEQ ID NO: 2512605 - RNA, 13 nt, Human
ucauuagagcagg

SEQ ID NO: 2512606 - RNA, 18 nt, Human
ucaugguguaauaagaca

SEQ ID NO: 2512607 - RNA, 17 nt, Human
ucaugguguaauaagac

SEQ ID NO: 2512608 - RNA, 16 nt, Human
ucaugguguaauaaga

SEQ ID NO: 2512609 - RNA, 15 nt, Human
ucaugguguaauaag

SEQ ID NO: 2512610 - RNA, 10 nt, Human
ucauuagaac

SEQ ID NO: 2512611 - RNA, 19 nt, Human
ucaugguguaauaagacau

SEQ ID NO: 2512612 - RNA, 16 nt, Human
ucauuacuuuugaagu

SEQ ID NO: 2512613 - RNA, 14 nt, Human
ucauggugcucaga

SEQ ID NO: 2512614 - RNA, 14 nt, Human
ucauggugaaaaug

SEQ ID NO: 2512615 - RNA, 16 nt, Human
ucauggucucagucau

SEQ ID NO: 2512616 - RNA, 19 nt, Human
ucauggugaaaauguacug

SEQ ID NO: 2512617 - RNA, 14 nt, Human
ucaugguguaauaa

SEQ ID NO: 2512618 - RNA, 13 nt, Human
ucaugguguaaua

SEQ ID NO: 2512619 - RNA, 23 nt, Human
ucaugguggguucaggggacuca

SEQ ID NO: 2512620 - RNA, 18 nt, Human
ucauuguaugauguguug

SEQ ID NO: 2512621 - RNA, 17 nt, Human
ucauuguaugauguguu

SEQ ID NO: 2512622 - RNA, 15 nt, Human
ucauuguaugaugug

SEQ ID NO: 2512623 - RNA, 14 nt, Human
ucauuguaugaugu

SEQ ID NO: 2512624 - RNA, 22 nt, Human
ucauuguauauauguguguuua

SEQ ID NO: 2512625 - RNA, 21 nt, Human
ucauuguauauauguguguuu

SEQ ID NO: 2512626 - RNA, 17 nt, Human
ucauuguauauaugugu

SEQ ID NO: 2512627 - RNA, 16 nt, Human
ucauuguauauaugug

SEQ ID NO: 2512628 - RNA, 23 nt, Human
ucauuguaugauguguugugaua

SEQ ID NO: 2512629 - RNA, 17 nt, Human
ucauuuaaaaugauuag

SEQ ID NO: 2512630 - RNA, 16 nt, Human
ucauuuaaaaugauua

SEQ ID NO: 2512631 - RNA, 14 nt, Human
ucauuuaauaauau

SEQ ID NO: 2512632 - RNA, 11 nt, Human
ucauuuaauaa

SEQ ID NO: 2512633 - RNA, 15 nt, Human
ucauuuaaaaugauu

SEQ ID NO: 2512634 - RNA, 14 nt, Human
ucauuuaaaaugau

SEQ ID NO: 2512635 - RNA, 13 nt, Human
ucauuuaaaauga

SEQ ID NO: 2512636 - RNA, 23 nt, Human
ucauuuaaaaaaaaaauuuguuu

SEQ ID NO: 2512637 - RNA, 23 nt, Human
ucauuguuuauuaacaaauuaug

SEQ ID NO: 2512638 - RNA, 20 nt, Human
ucauuuaauaauauacuugu

SEQ ID NO: 2512639 - RNA, 18 nt, Human
ucauuuaauaauauacuu

SEQ ID NO: 2512640 - RNA, 21 nt, Human
ucauuuaauaauauacuugug

SEQ ID NO: 2512641 - RNA, 20 nt, Human
ucauuuacuguggcuucuua

SEQ ID NO: 2512642 - RNA, 15 nt, Human
ucauuuacuguggcu

SEQ ID NO: 2512643 - RNA, 13 nt, Human
ucauuuacugugg

SEQ ID NO: 2512644 - RNA, 18 nt, Human
ucauuuagucaugugacc

SEQ ID NO: 2512645 - RNA, 19 nt, Human
ucauuuaguuugauuauuc

SEQ ID NO: 2512646 - RNA, 21 nt, Human
ucauuuauaaaaccaucaaaa

SEQ ID NO: 2512647 - RNA, 22 nt, Human
ucauuuauaaagcuaaaauaac

SEQ ID NO: 2512648 - RNA, 19 nt, Human
ucauuuagauugaaaacuu

SEQ ID NO: 2512649 - RNA, 22 nt, Human
ucauuuagaacuugcagcugau

SEQ ID NO: 2512650 - RNA, 16 nt, Human
ucauuuagaacuugca

SEQ ID NO: 2512651 - RNA, 12 nt, Human
ucauuuagaacu

SEQ ID NO: 2512652 - RNA, 21 nt, Human
ucuuguuuuuccacuacugcu

SEQ ID NO: 2512653 - RNA, 13 nt, Human
ucuuguuuuucca

SEQ ID NO: 2512654 - RNA, 20 nt, Human
ucuuguuuuuccacuacugc

SEQ ID NO: 2512655 - RNA, 11 nt, Human
ucuuucaaaac

SEQ ID NO: 2512656 - RNA, 20 nt, Human
ucuuucaaaaccuuuugaaa

SEQ ID NO: 2512657 - RNA, 21 nt, Human
ucuuucaaaaccuuuugaaau

SEQ ID NO: 2512658 - RNA, 23 nt, Human
ucuuucaaaaccuuuugaaauua

SEQ ID NO: 2512659 - RNA, 18 nt, Human
ucuuucaaauugagagaa

SEQ ID NO: 2512660 - RNA, 19 nt, Human
ucuuucaaauugagagaau

SEQ ID NO: 2512661 - RNA, 22 nt, Human
ucuuucaaauugagagaaugga

SEQ ID NO: 2512662 - RNA, 20 nt, Human
ucuuucaaagguagccauca

SEQ ID NO: 2512663 - RNA, 22 nt, Human
ucuuucaaagguagccaucaug

SEQ ID NO: 2512664 - RNA, 17 nt, Human
ucuuucacauuuaaaua

SEQ ID NO: 2512665 - RNA, 21 nt, Human
ucuuucaagcagucgugccug

SEQ ID NO: 2512666 - RNA, 20 nt, Human
ucuuucaagcagucgugccu

SEQ ID NO: 2512667 - RNA, 18 nt, Human
ucuuucaacuugcaucca

SEQ ID NO: 2512668 - RNA, 23 nt, Human
ucuuucacccuuuucuguuugcu

SEQ ID NO: 2512669 - RNA, 15 nt, Human
ucuuucaacuugcau

SEQ ID NO: 2512670 - RNA, 16 nt, Human
ucuuucaagugaaucu

SEQ ID NO: 2512671 - RNA, 19 nt, Human
ucuuucaagugaaucuaaa

SEQ ID NO: 2512672 - RNA, 22 nt, Human
ucuuguuucuuuucacauagcu

SEQ ID NO: 2512673 - RNA, 14 nt, Human
ucuuguuuucaguu

SEQ ID NO: 2512674 - RNA, 20 nt, Human
ucuuguuuauaccuuugccu

SEQ ID NO: 2512675 - RNA, 14 nt, Human
ucuuguuucaauuc

SEQ ID NO: 2512676 - RNA, 21 nt, Human
ucuuguugcucaaaaaaugag

SEQ ID NO: 2512677 - RNA, 22 nt, Human
ucuuguguuuccacagccugca

SEQ ID NO: 2512678 - RNA, 16 nt, Human
ucuuguuaagugcagu

SEQ ID NO: 2512679 - RNA, 22 nt, Human
ucuuguugcucaaaaaaugagc

SEQ ID NO: 2512680 - RNA, 16 nt, Human
ucuuguguguuuauug

SEQ ID NO: 2512681 - RNA, 13 nt, Human
ucuugcuugggaa

SEQ ID NO: 2512682 - RNA, 21 nt, Human
ucuuguguguuuauugucaaa

SEQ ID NO: 2512683 - RNA, 12 nt, Human
ucuuguguuucu

SEQ ID NO: 2512684 - RNA, 20 nt, Human
ucuccucugcugcuggcugg

SEQ ID NO: 2512685 - RNA, 16 nt, Human
ucucccuucauccuuc

SEQ ID NO: 2512686 - RNA, 16 nt, Human
ucuccucuugccacug

SEQ ID NO: 2512687 - RNA, 13 nt, Human
ucuccucuugcca

SEQ ID NO: 2512688 - RNA, 13 nt, Human
ucucccuggcccu

SEQ ID NO: 2512689 - RNA, 12 nt, Human
ucuccucuuaaa

SEQ ID NO: 2512690 - RNA, 14 nt, Human
ucuccucuuaaaaa

SEQ ID NO: 2512691 - RNA, 17 nt, Human
ucuccucuugccacugc

SEQ ID NO: 2512692 - RNA, 22 nt, Human
ucuccucuuaaaaaauaaaaac

SEQ ID NO: 2512693 - RNA, 23 nt, Human
ucuccucuuaaaaaauaaaaacu

SEQ ID NO: 2512694 - RNA, 23 nt, Human
ucuugcaauggcagccuuggcaa

SEQ ID NO: 2512695 - RNA, 18 nt, Human
ucuugcacccgccucucc

SEQ ID NO: 2512696 - RNA, 15 nt, Human
ucuugcacccgccuc

SEQ ID NO: 2512697 - RNA, 14 nt, Human
ucuugcacccgccu

SEQ ID NO: 2512698 - RNA, 23 nt, Human
ucuugcaccccaaagcuuuccug

SEQ ID NO: 2512699 - RNA, 22 nt, Human
ucuugcaccccaaagcuuuccu

SEQ ID NO: 2512700 - RNA, 20 nt, Human
ucuugcacccgccucucccg

SEQ ID NO: 2512701 - RNA, 19 nt, Human
ucuugcacccgccucuccc

SEQ ID NO: 2512702 - RNA, 13 nt, Human
ucuugcaggucuc

SEQ ID NO: 2512703 - RNA, 20 nt, Human
ucuugcaggucucaacccuu

SEQ ID NO: 2512704 - RNA, 14 nt, Human
ucuugcaggucuca

SEQ ID NO: 2512705 - RNA, 14 nt, Human
ucuugcucuuucua

SEQ ID NO: 2512706 - RNA, 17 nt, Human
ucuugcuaccucaguca

SEQ ID NO: 2512707 - RNA, 20 nt, Human
ucuugcuaccucagucagua

SEQ ID NO: 2512708 - RNA, 21 nt, Human
ucuugcucuuucuacucugaa

SEQ ID NO: 2512709 - RNA, 19 nt, Human
ucuugcucuuucuacucug

SEQ ID NO: 2512710 - RNA, 23 nt, Human
ucuugcuucccuaaucuaugguc

SEQ ID NO: 2512711 - RNA, 22 nt, Human
ucuugcuucccuaaucuauggu

SEQ ID NO: 2512712 - RNA, 18 nt, Human
ucuugcuucccuaaucua

SEQ ID NO: 2512713 - RNA, 22 nt, Human
ucuugcugguugucauuuuugc

SEQ ID NO: 2512714 - RNA, 21 nt, Human
ucuugcuaaucagugucucac

SEQ ID NO: 2512715 - RNA, 20 nt, Human
ucuugcuaaucagugucuca

SEQ ID NO: 2512716 - RNA, 19 nt, Human
ucuugcuaaucagugucuc

SEQ ID NO: 2512717 - RNA, 17 nt, Human
ucuugcuaaucaguguc

SEQ ID NO: 2512718 - RNA, 23 nt, Human
ucuugcuaaucagugucucacac

SEQ ID NO: 2512719 - RNA, 22 nt, Human
ucuugcuaaucagugucucaca

SEQ ID NO: 2512720 - RNA, 16 nt, Human
ucuugcuaaucagugu

SEQ ID NO: 2512721 - RNA, 15 nt, Human
ucuugcuaaucagug

SEQ ID NO: 2512722 - RNA, 21 nt, Human
ucuuucagccaagaauucuua

SEQ ID NO: 2512723 - RNA, 20 nt, Human
ucuuucagccaagaauucuu

SEQ ID NO: 2512724 - RNA, 19 nt, Human
ucuuucagccaagaauucu

SEQ ID NO: 2512725 - RNA, 16 nt, Human
ucuuucagccaagaau

SEQ ID NO: 2512726 - RNA, 13 nt, Human
ucuuuccaaagua

SEQ ID NO: 2512727 - RNA, 14 nt, Human
ucuuuccaaaguac

SEQ ID NO: 2512728 - RNA, 23 nt, Human
ucuuucauccacuagugcaaauc

SEQ ID NO: 2512729 - RNA, 21 nt, Human
ucuuucauccacuagugcaaa

SEQ ID NO: 2512730 - RNA, 13 nt, Human
ucuuucauccacu

SEQ ID NO: 2512731 - RNA, 23 nt, Human
ucuuucaucaaucauuguacagu

SEQ ID NO: 2512732 - RNA, 20 nt, Human
ucuuucagggggguugugag

SEQ ID NO: 2512733 - RNA, 21 nt, Human
ucuuucuuuaccugagaccag

SEQ ID NO: 2512734 - RNA, 17 nt, Human
ucuuucuuuaccugaga

SEQ ID NO: 2512735 - RNA, 22 nt, Human
ucuuucuuugggaauauuugaa

SEQ ID NO: 2512736 - RNA, 15 nt, Human
ucuuucuuucuuaga

SEQ ID NO: 2512737 - RNA, 23 nt, Human
ucuuucuuugggaauauuugaau

SEQ ID NO: 2512738 - RNA, 22 nt, Human
ucuuucuuuugauucuuccuaa

SEQ ID NO: 2512739 - RNA, 20 nt, Human
ucuuuccauuggaucucauu

SEQ ID NO: 2512740 - RNA, 10 nt, Human
ucuuuccaga

SEQ ID NO: 2512741 - RNA, 19 nt, Human
ucuuuccauuaugauucuu

SEQ ID NO: 2512742 - RNA, 21 nt, Human
ucuuuccacuccuccuagcca

SEQ ID NO: 2512743 - RNA, 22 nt, Human
ucuuuccacuccuccuagccac

SEQ ID NO: 2512744 - RNA, 22 nt, Human
ucuuuccacggagccacuccuc

SEQ ID NO: 2512745 - RNA, 23 nt, Human
ucuuuccacggagccacuccucu

SEQ ID NO: 2512746 - RNA, 19 nt, Human
ucuuuccacggagccacuc

SEQ ID NO: 2512747 - RNA, 19 nt, Human
ucuuuccacagaagcucca

SEQ ID NO: 2512748 - RNA, 14 nt, Human
ucuuucaugaguuu

SEQ ID NO: 2512749 - RNA, 12 nt, Human
ucuuucaugagu

SEQ ID NO: 2512750 - RNA, 21 nt, Human
ucuuuggacagaagcagcucu

SEQ ID NO: 2512751 - RNA, 17 nt, Human
ucuuuuagcugaugaac

SEQ ID NO: 2512752 - RNA, 24 nt, Human
ucuuuggaaggagugagaucauuu

SEQ ID NO: 2512753 - RNA, 18 nt, Human
ucuuuggaaggagugaga

SEQ ID NO: 2512754 - RNA, 17 nt, Human
ucuuuggaaggagugag

SEQ ID NO: 2512755 - RNA, 19 nt, Human
ucuuuggacagaagcagcu

SEQ ID NO: 2512756 - RNA, 18 nt, Human
ucuuuuaguuuuaguugc

SEQ ID NO: 2512757 - RNA, 22 nt, Human
ucuuuuauaacuaguccuuuac

SEQ ID NO: 2512758 - RNA, 16 nt, Human
ucuuuuaguuuuaguu

SEQ ID NO: 2512759 - RNA, 19 nt, Human
ucuuuuauaacuaguccuu

SEQ ID NO: 2512760 - RNA, 13 nt, Human
ucuuugcuuugcc

SEQ ID NO: 2512761 - RNA, 12 nt, Human
ucuuugcuuugc

SEQ ID NO: 2512762 - RNA, 17 nt, Human
ucuuugcuuugcccagc

SEQ ID NO: 2512763 - RNA, 13 nt, Human
ucuuugcuuugcu

SEQ ID NO: 2512764 - RNA, 23 nt, Human
ucuuugcuuugcuuucugcucag

SEQ ID NO: 2512765 - RNA, 18 nt, Human
ucuuugcuuugcuuucug

SEQ ID NO: 2512766 - RNA, 17 nt, Human
ucuuuggacacucacac

SEQ ID NO: 2512767 - RNA, 17 nt, Human
ucuuugccacccucaug

SEQ ID NO: 2512768 - RNA, 18 nt, Human
ucuuugccacccucaugc

SEQ ID NO: 2512769 - RNA, 20 nt, Human
ucuuugccacccucaugcug

SEQ ID NO: 2512770 - RNA, 11 nt, Human
ucuuugcuuug

SEQ ID NO: 2512771 - RNA, 14 nt, Human
ucuuugccacccuc

SEQ ID NO: 2512772 - RNA, 16 nt, Human
ucuuugccacccucau

SEQ ID NO: 2512773 - RNA, 12 nt, Human
ucuuugcaugga

SEQ ID NO: 2512774 - RNA, 15 nt, Human
ucuuugcauggaauu

SEQ ID NO: 2512775 - RNA, 19 nt, Human
ucuuugauucuccuucagc

SEQ ID NO: 2512776 - RNA, 16 nt, Human
ucuuugauucuccuuc

SEQ ID NO: 2512777 - RNA, 19 nt, Human
ucuuugauguuaacacauu

SEQ ID NO: 2512778 - RNA, 15 nt, Human
ucuuugauucuccuu

SEQ ID NO: 2512779 - RNA, 23 nt, Human
ucuuugauucuccuucagcccuc

SEQ ID NO: 2512780 - RNA, 20 nt, Human
ucuuugauucuccuucagcc

SEQ ID NO: 2512781 - RNA, 17 nt, Human
ucuuugauguuaacaca

SEQ ID NO: 2512782 - RNA, 12 nt, Human
ucuuugccaagu

SEQ ID NO: 2512783 - RNA, 14 nt, Human
ucuuugauaauguu

SEQ ID NO: 2512784 - RNA, 13 nt, Human
ucuuugauaaugu

SEQ ID NO: 2512785 - RNA, 17 nt, Human
ucuuugauaauguuaaa

SEQ ID NO: 2512786 - RNA, 16 nt, Human
ucuuugauaauguuaa

SEQ ID NO: 2512787 - RNA, 21 nt, Human
ucuuugauaauguuaaauuug

SEQ ID NO: 2512788 - RNA, 20 nt, Human
ucuuugauacuuguucaaaa

SEQ ID NO: 2512789 - RNA, 15 nt, Human
ucuuugauguuaaca

SEQ ID NO: 2512790 - RNA, 12 nt, Human
ucuuugauguua

SEQ ID NO: 2512791 - RNA, 22 nt, Human
ucuuugaaauagucugugugaa

SEQ ID NO: 2512792 - RNA, 21 nt, Human
ucuuugaaauagucuguguga

SEQ ID NO: 2512793 - RNA, 16 nt, Human
ugaacuccuggccuca

SEQ ID NO: 2512794 - RNA, 20 nt, Human
ugaaccaccacacccagccc

SEQ ID NO: 2512795 - RNA, 17 nt, Human
ugaaccaccacacccag

SEQ ID NO: 2512796 - RNA, 23 nt, Human
ugaaccacaucuugcucugcuga

SEQ ID NO: 2512797 - RNA, 22 nt, Human
ugaaccaagaacuuuccaggaa

SEQ ID NO: 2512798 - RNA, 19 nt, Human
ugaaccacaucuugcucug

SEQ ID NO: 2512799 - RNA, 12 nt, Human
ugaacauugcau

SEQ ID NO: 2512800 - RNA, 22 nt, Human
ugaacauugcauauaacuuaua

SEQ ID NO: 2512801 - RNA, 12 nt, Human
ugaacaguggag

SEQ ID NO: 2512802 - RNA, 22 nt, Human
ugaacauuuaucaaucaguaua

SEQ ID NO: 2512803 - RNA, 14 nt, Human
ugaacauuuaucaa

SEQ ID NO: 2512804 - RNA, 15 nt, Human
ugaacagcggcugga

SEQ ID NO: 2512805 - RNA, 13 nt, Human
ugaacaauucucu

SEQ ID NO: 2512806 - RNA, 21 nt, Human
ugaacagcggcuggacuugga

SEQ ID NO: 2512807 - RNA, 22 nt, Human
ugaacagcggcuggacuuggag

SEQ ID NO: 2512808 - RNA, 15 nt, Human
ugaacaagucccugu

SEQ ID NO: 2512809 - RNA, 19 nt, Human
ugaacaaguuguuucauug

SEQ ID NO: 2512810 - RNA, 20 nt, Human
ugaacaaguuguuucauuga

SEQ ID NO: 2512811 - RNA, 16 nt, Human
ugaacaaucaaagcac

SEQ ID NO: 2512812 - RNA, 18 nt, Human
ugaacacaaacuguaaau

SEQ ID NO: 2512813 - RNA, 22 nt, Human
ugaacaaguuguuucauugacu

SEQ ID NO: 2512814 - RNA, 12 nt, Human
ugaacaagaauu

SEQ ID NO: 2512815 - RNA, 14 nt, Human
ugaacaagaauugg

SEQ ID NO: 2512816 - RNA, 11 nt, Human
ugaacaagaau

SEQ ID NO: 2512817 - RNA, 18 nt, Human
ugaacaagaauuggaagc

SEQ ID NO: 2512818 - RNA, 12 nt, Human
ugaaauuauuca

SEQ ID NO: 2512819 - RNA, 21 nt, Human
ugaaauuauguauguuuacau

SEQ ID NO: 2512820 - RNA, 19 nt, Human
ugaaauuauguauguuuac

SEQ ID NO: 2512821 - RNA, 23 nt, Human
ugaaauuauguauguuuacauau

SEQ ID NO: 2512822 - RNA, 16 nt, Human
ugaaauucuccuggag

SEQ ID NO: 2512823 - RNA, 15 nt, Human
ugaaauucuccugga

SEQ ID NO: 2512824 - RNA, 14 nt, Human
ugaaauucuccugg

SEQ ID NO: 2512825 - RNA, 23 nt, Human
ugaaauuaagaaggcaaaaaugu

SEQ ID NO: 2512826 - RNA, 22 nt, Human
ugaaauuacuuaucauccacau

SEQ ID NO: 2512827 - RNA, 19 nt, Human
ugaaauuacuuaucaucca

SEQ ID NO: 2512828 - RNA, 20 nt, Human
ugaaauuacuacaaaauuug

SEQ ID NO: 2512829 - RNA, 23 nt, Human
ugaaauuacuacaaaauuugaaa

SEQ ID NO: 2512830 - RNA, 18 nt, Human
ugaaauuauguauguuua

SEQ ID NO: 2512831 - RNA, 17 nt, Human
ugaaauuauguauguuu

SEQ ID NO: 2512832 - RNA, 23 nt, Human
ugaaauuagggcccaauuaauaa

SEQ ID NO: 2512833 - RNA, 15 nt, Human
ugaaauguguuucug

SEQ ID NO: 2512834 - RNA, 17 nt, Human
ugaaauuaaccucucac

SEQ ID NO: 2512835 - RNA, 19 nt, Human
ugaaauuaagaaggcaaaa

SEQ ID NO: 2512836 - RNA, 21 nt, Human
ugaaauuaagaaggcaaaaau

SEQ ID NO: 2512837 - RNA, 14 nt, Human
ugaaauuaaccucu

SEQ ID NO: 2512838 - RNA, 22 nt, Human
ugaaauuaaccauagauguaga

SEQ ID NO: 2512839 - RNA, 18 nt, Human
ugaaauuaaccauagaug

SEQ ID NO: 2512840 - RNA, 19 nt, Human
ugaaauguguuucuguaua

SEQ ID NO: 2512841 - RNA, 13 nt, Human
ugaaauguguuuc

SEQ ID NO: 2512842 - RNA, 16 nt, Human
ugaaauggagguccuu

SEQ ID NO: 2512843 - RNA, 16 nt, Human
ugaaaucaguuacucu

SEQ ID NO: 2512844 - RNA, 17 nt, Human
ugaaaucaguuacucuu

SEQ ID NO: 2512845 - RNA, 16 nt, Human
ugaaauauugacuuuu

SEQ ID NO: 2512846 - RNA, 17 nt, Human
ugaaaggcauucucuga

SEQ ID NO: 2512847 - RNA, 19 nt, Human
ugaaaggcauucucugaag

SEQ ID NO: 2512848 - RNA, 22 nt, Human
ugaaagcuccucgagggcaggg

SEQ ID NO: 2512849 - RNA, 13 nt, Human
ugaaagcuagaga

SEQ ID NO: 2512850 - RNA, 23 nt, Human
ugaaagggaguauuacaaaaaca

SEQ ID NO: 2512851 - RNA, 13 nt, Human
ugaaagggcccag

SEQ ID NO: 2512852 - RNA, 16 nt, Human
ugaaagguacuucaaa

SEQ ID NO: 2512853 - RNA, 16 nt, Human
ugaaagguaauuugag

SEQ ID NO: 2512854 - RNA, 19 nt, Human
ugaaagguuacccuguaac

SEQ ID NO: 2512855 - RNA, 15 nt, Human
ugaaagguacuucaa

SEQ ID NO: 2512856 - RNA, 20 nt, Human
ugaaagggagcuaucaggaa

SEQ ID NO: 2512857 - RNA, 22 nt, Human
ugaaagggagcuaucaggaaca

SEQ ID NO: 2512858 - RNA, 18 nt, Human
ugaaagaggcagcuugaa

SEQ ID NO: 2512859 - RNA, 15 nt, Human
ugaaacccuggacca

SEQ ID NO: 2512860 - RNA, 19 nt, Human
ugaaagaggcugaggccug

SEQ ID NO: 2512861 - RNA, 21 nt, Human
ugaaacccuggaccagugguc

SEQ ID NO: 2512862 - RNA, 21 nt, Human
ugaaagaggcugaggccugga

SEQ ID NO: 2512863 - RNA, 16 nt, Human
ugaaagaguaaaggaa

SEQ ID NO: 2512864 - RNA, 20 nt, Human
ugaaagaguaaaggaaauga

SEQ ID NO: 2512865 - RNA, 17 nt, Human
ugaaagaguaaaggaaa

SEQ ID NO: 2512866 - RNA, 18 nt, Human
ugaaagauggcugugccu

SEQ ID NO: 2512867 - RNA, 23 nt, Human
ugaaagccagcugccgaccagag

SEQ ID NO: 2512868 - RNA, 15 nt, Human
ugaaagcauccaugu

SEQ ID NO: 2512869 - RNA, 17 nt, Human
ugaaagcauccaugugu

SEQ ID NO: 2512870 - RNA, 19 nt, Human
ugaaagauggcugugccuc

SEQ ID NO: 2512871 - RNA, 18 nt, Human
ugaaagcccugagcuuuc

SEQ ID NO: 2512872 - RNA, 14 nt, Human
ugaaagccauuugu

SEQ ID NO: 2512873 - RNA, 13 nt, Human
ugaaagcccaagu

SEQ ID NO: 2512874 - RNA, 19 nt, Human
ugaaaauuuugauguuuua

SEQ ID NO: 2512875 - RNA, 21 nt, Human
ugaaaauuuugauguuuuaag

SEQ ID NO: 2512876 - RNA, 13 nt, Human
ugaaaauuuugau

SEQ ID NO: 2512877 - RNA, 16 nt, Human
ucuuuucacauucuua

SEQ ID NO: 2512878 - RNA, 13 nt, Human
ucuuuucacauuc

SEQ ID NO: 2512879 - RNA, 22 nt, Human
ucuuuucacauagcugucuaga

SEQ ID NO: 2512880 - RNA, 16 nt, Human
ucuuuucacaaauaaa

SEQ ID NO: 2512881 - RNA, 15 nt, Human
ucuuuucacaaauaa

SEQ ID NO: 2512882 - RNA, 14 nt, Human
ucuuuucacaaaua

SEQ ID NO: 2512883 - RNA, 13 nt, Human
ucuuuucacaaau

SEQ ID NO: 2512884 - RNA, 12 nt, Human
ucuuuucacaaa

SEQ ID NO: 2512885 - RNA, 13 nt, Human
ugaaaagcuauua

SEQ ID NO: 2512886 - RNA, 14 nt, Human
ucuuuucacauucu

SEQ ID NO: 2512887 - RNA, 17 nt, Human
ugaaacaagaagccaca

SEQ ID NO: 2512888 - RNA, 16 nt, Human
ugaaacaacuuggaaa

SEQ ID NO: 2512889 - RNA, 14 nt, Human
ugaaacaaagaagg

SEQ ID NO: 2512890 - RNA, 15 nt, Human
ugaaacaacuuggaa

SEQ ID NO: 2512891 - RNA, 13 nt, Human
ugaaacacaaaca

SEQ ID NO: 2512892 - RNA, 23 nt, Human
ugaaacaauacucauaaugugaa

SEQ ID NO: 2512893 - RNA, 21 nt, Human
ugaaacaagauaacugagaau

SEQ ID NO: 2512894 - RNA, 20 nt, Human
ugaaacacaaacaauaguaa

SEQ ID NO: 2512895 - RNA, 16 nt, Human
ugaaacacaccaggcu

SEQ ID NO: 2512896 - RNA, 17 nt, Human
ugaaacacaccaggcug

SEQ ID NO: 2512897 - RNA, 18 nt, Human
ugaaacacaccaggcugu

SEQ ID NO: 2512898 - RNA, 22 nt, Human
ugaaacaacaaauaggaauugu

SEQ ID NO: 2512899 - RNA, 23 nt, Human
ugaaaagcuauuagccaggauca

SEQ ID NO: 2512900 - RNA, 20 nt, Human
ugaaaagcuauuagccagga

SEQ ID NO: 2512901 - RNA, 19 nt, Human
ugaaaagcuauuagccagg

SEQ ID NO: 2512902 - RNA, 17 nt, Human
ugaaaagcuauuagcca

SEQ ID NO: 2512903 - RNA, 14 nt, Human
ugaaacaaagcugc

SEQ ID NO: 2512904 - RNA, 19 nt, Human
ugaaacacaccaggcugug

SEQ ID NO: 2512905 - RNA, 22 nt, Human
ugaaacacaccaggcugugggc

SEQ ID NO: 2512906 - RNA, 14 nt, Human
ugaaacauuuuguc

SEQ ID NO: 2512907 - RNA, 20 nt, Human
ugaaaccaguguuagggaag

SEQ ID NO: 2512908 - RNA, 17 nt, Human
ugaaacccccacacaca

SEQ ID NO: 2512909 - RNA, 18 nt, Human
ugaaacccccacacacac

SEQ ID NO: 2512910 - RNA, 16 nt, Human
ugaaacccccacacac

SEQ ID NO: 2512911 - RNA, 19 nt, Human
ugacagacaggcucuuagc

SEQ ID NO: 2512912 - RNA, 17 nt, Human
ugacagaccacaucuuu

SEQ ID NO: 2512913 - RNA, 18 nt, Human
ugacagaccacaucuuua

SEQ ID NO: 2512914 - RNA, 19 nt, Human
ugacagagugagacucugu

SEQ ID NO: 2512915 - RNA, 23 nt, Human
ugacauaaguauuuaauucaugu

SEQ ID NO: 2512916 - RNA, 17 nt, Human
ugacauacauccaacau

SEQ ID NO: 2512917 - RNA, 17 nt, Human
ugacauaacacuauaaa

SEQ ID NO: 2512918 - RNA, 21 nt, Human
ugacauaacacuauaaagguu

SEQ ID NO: 2512919 - RNA, 17 nt, Human
ugacagagugagacucu

SEQ ID NO: 2512920 - RNA, 14 nt, Human
ugacagagugagac

SEQ ID NO: 2512921 - RNA, 23 nt, Human
ugacagaggcagccccauucugc

SEQ ID NO: 2512922 - RNA, 18 nt, Human
ugacagaggcagccccau

SEQ ID NO: 2512923 - RNA, 17 nt, Human
ugacagaggcagcccca

SEQ ID NO: 2512924 - RNA, 16 nt, Human
ugacagaggcagcccc

SEQ ID NO: 2512925 - RNA, 15 nt, Human
ugacagaggcagccc

SEQ ID NO: 2512926 - RNA, 14 nt, Human
ugacagaggcagcc

SEQ ID NO: 2512927 - RNA, 23 nt, Human
ugacagacacaggcccggcucca

SEQ ID NO: 2512928 - RNA, 20 nt, Human
ugacagacacaggcccggcu

SEQ ID NO: 2512929 - RNA, 15 nt, Human
ugacagacaggcucu

SEQ ID NO: 2512930 - RNA, 14 nt, Human
ugacagacaggcuc

SEQ ID NO: 2512931 - RNA, 16 nt, Human
ugacagacagcccucc

SEQ ID NO: 2512932 - RNA, 13 nt, Human
ugacagaggcagc

SEQ ID NO: 2512933 - RNA, 22 nt, Human
ugaauugccugcagagagaagc

SEQ ID NO: 2512934 - RNA, 16 nt, Human
ugaauugccugcagag

SEQ ID NO: 2512935 - RNA, 19 nt, Human
ugacaacuuugccagcuuu

SEQ ID NO: 2512936 - RNA, 12 nt, Human
ugacaagcucac

SEQ ID NO: 2512937 - RNA, 15 nt, Human
ugacaagcacugcua

SEQ ID NO: 2512938 - RNA, 13 nt, Human
ugacaagccccag

SEQ ID NO: 2512939 - RNA, 15 nt, Human
ugacaagccccaggc

SEQ ID NO: 2512940 - RNA, 20 nt, Human
ugacaagcucacagaccuuu

SEQ ID NO: 2512941 - RNA, 15 nt, Human
ugacaagcucacaga

SEQ ID NO: 2512942 - RNA, 22 nt, Human
ugacaagcuccuggucuugaga

SEQ ID NO: 2512943 - RNA, 17 nt, Human
ugacaagccccaggcag

SEQ ID NO: 2512944 - RNA, 21 nt, Human
ugacaagccccaggcaggcug

SEQ ID NO: 2512945 - RNA, 18 nt, Human
ugacaaggauugcuacug

SEQ ID NO: 2512946 - RNA, 16 nt, Human
ugacaauuuuguacaa

SEQ ID NO: 2512947 - RNA, 16 nt, Human
ugacacaaaccugccu

SEQ ID NO: 2512948 - RNA, 18 nt, Human
ugacaauuuuguacaaau

SEQ ID NO: 2512949 - RNA, 22 nt, Human
ugacaauuuuguacaaauuugu

SEQ ID NO: 2512950 - RNA, 17 nt, Human
ugacaauaaaacauuaa

SEQ ID NO: 2512951 - RNA, 14 nt, Human
ugacaauaaaugug

SEQ ID NO: 2512952 - RNA, 14 nt, Human
ugacaauaauuuca

SEQ ID NO: 2512953 - RNA, 18 nt, Human
ugacaaucaacucuaaua

SEQ ID NO: 2512954 - RNA, 17 nt, Human
ugacaauaauuucaggu

SEQ ID NO: 2512955 - RNA, 15 nt, Human
ugacaaucaacucua

SEQ ID NO: 2512956 - RNA, 13 nt, Human
ugacagaaagcag

SEQ ID NO: 2512957 - RNA, 21 nt, Human
ugacagaacacugucuugaag

SEQ ID NO: 2512958 - RNA, 17 nt, Human
ugacagaacacugucuu

SEQ ID NO: 2512959 - RNA, 16 nt, Human
ugacagaacacugucu

SEQ ID NO: 2512960 - RNA, 20 nt, Human
ugacacuuugccagaaagca

SEQ ID NO: 2512961 - RNA, 22 nt, Human
ugacacuuuaauuaccaaccug

SEQ ID NO: 2512962 - RNA, 15 nt, Human
ugacacuugucccca

SEQ ID NO: 2512963 - RNA, 15 nt, Human
ugacagaacacuguc

SEQ ID NO: 2512964 - RNA, 14 nt, Human
ugacagaacacugu

SEQ ID NO: 2512965 - RNA, 13 nt, Human
ugacagaacacug

SEQ ID NO: 2512966 - RNA, 18 nt, Human
ugacaugggacauuugcu

SEQ ID NO: 2512967 - RNA, 12 nt, Human
ugacauguacag

SEQ ID NO: 2512968 - RNA, 13 nt, Human
ugacauguaacag

SEQ ID NO: 2512969 - RNA, 21 nt, Human
ugacauggugccugagaggca

SEQ ID NO: 2512970 - RNA, 18 nt, Human
ugacauggugccugagag

SEQ ID NO: 2512971 - RNA, 17 nt, Human
ugacauggugccugaga

SEQ ID NO: 2512972 - RNA, 16 nt, Human
ugacauggugccugag

SEQ ID NO: 2512973 - RNA, 15 nt, Human
ugacauggugccuga

SEQ ID NO: 2512974 - RNA, 13 nt, Human
ugacaugucuuuu

SEQ ID NO: 2512975 - RNA, 15 nt, Human
ugacauguacagaga

SEQ ID NO: 2512976 - RNA, 13 nt, Human
ugacauguacaga

SEQ ID NO: 2512977 - RNA, 17 nt, Human
ugacauguacagagaac

SEQ ID NO: 2512978 - RNA, 16 nt, Human
ugacaugucccuacac

SEQ ID NO: 2512979 - RNA, 17 nt, Human
ugacaugggacauuugc

SEQ ID NO: 2512980 - RNA, 16 nt, Human
ugacaugggacauuug

SEQ ID NO: 2512981 - RNA, 16 nt, Human
ugacauauuaugucuu

SEQ ID NO: 2512982 - RNA, 13 nt, Human
ugacaugugaaac

SEQ ID NO: 2512983 - RNA, 12 nt, Human
ugacaugugaaa

SEQ ID NO: 2512984 - RNA, 15 nt, Human
ugaccacagcacagc

SEQ ID NO: 2512985 - RNA, 16 nt, Human
ugaccacagcacagcc

SEQ ID NO: 2512986 - RNA, 17 nt, Human
ugaccacagcacagcca

SEQ ID NO: 2512987 - RNA, 15 nt, Human
ugacaugucuuuucu

SEQ ID NO: 2512988 - RNA, 21 nt, Human
ugaccacauagcaugaggcca

SEQ ID NO: 2512989 - RNA, 18 nt, Human
ugaccacauagcaugagg

SEQ ID NO: 2512990 - RNA, 18 nt, Human
ugaccacaggcaguuacu

SEQ ID NO: 2512991 - RNA, 13 nt, Human
ugaccacaggcag

SEQ ID NO: 2512992 - RNA, 22 nt, Human
ugaccacagcaucauuuugcau

SEQ ID NO: 2512993 - RNA, 14 nt, Human
ugaccacagcacag

SEQ ID NO: 2512994 - RNA, 19 nt, Human
ugaccacagcacagccaac

SEQ ID NO: 2512995 - RNA, 16 nt, Human
ugaccacccuccccuc

SEQ ID NO: 2512996 - RNA, 15 nt, Human
ugaccacccuccccu

SEQ ID NO: 2512997 - RNA, 13 nt, Human
ugaccacccuccc

SEQ ID NO: 2512998 - RNA, 12 nt, Human
ugaccacccucc

SEQ ID NO: 2512999 - RNA, 19 nt, Human
ugaccacccuccccucucu

SEQ ID NO: 2513000 - RNA, 18 nt, Human
ugaccacccuccccucuc

SEQ ID NO: 2513001 - RNA, 21 nt, Human
ugaccacgcuuucuagcuguu

SEQ ID NO: 2513002 - RNA, 20 nt, Human
ugaccacugcagaagacagu

SEQ ID NO: 2513003 - RNA, 19 nt, Human
ugaccagcaccaucucucc

SEQ ID NO: 2513004 - RNA, 15 nt, Human
ugaccacucugucuu

SEQ ID NO: 2513005 - RNA, 23 nt, Human
ugaccacggacguuuccaucagg

SEQ ID NO: 2513006 - RNA, 22 nt, Human
ugaccacggacguuuccaucag

SEQ ID NO: 2513007 - RNA, 21 nt, Human
ugaccacggacguuuccauca

SEQ ID NO: 2513008 - RNA, 20 nt, Human
ugaccacggacguuuccauc

SEQ ID NO: 2513009 - RNA, 22 nt, Human
ugaccacgcuuucuagcuguug

SEQ ID NO: 2513010 - RNA, 16 nt, Human
ugaccaggcauccucc

SEQ ID NO: 2513011 - RNA, 12 nt, Human
ugaccaggccug

SEQ ID NO: 2513012 - RNA, 15 nt, Human
ugaccaggccugggc

SEQ ID NO: 2513013 - RNA, 13 nt, Human
ugaccaggccugg

SEQ ID NO: 2513014 - RNA, 20 nt, Human
ugaccaggccugggccagag

SEQ ID NO: 2513015 - RNA, 15 nt, Human
ugaccagucugaccc

SEQ ID NO: 2513016 - RNA, 22 nt, Human
ugaccaggggugauuucagaga

SEQ ID NO: 2513017 - RNA, 16 nt, Human
ugaccagucugacccu

SEQ ID NO: 2513018 - RNA, 19 nt, Human
ugaccagcaacuugucuuu

SEQ ID NO: 2513019 - RNA, 23 nt, Human
ugaccagccuccaugcugccucc

SEQ ID NO: 2513020 - RNA, 18 nt, Human
ugaccauucuccaccugc

SEQ ID NO: 2513021 - RNA, 17 nt, Human
ugaccauucuccaccug

SEQ ID NO: 2513022 - RNA, 16 nt, Human
ugaccauucuccaccu

SEQ ID NO: 2513023 - RNA, 20 nt, Human
ugaccaguuuaaccugaugc

SEQ ID NO: 2513024 - RNA, 20 nt, Human
ugaccaguugcacuuggccu

SEQ ID NO: 2513025 - RNA, 23 nt, Human
ugaccaguuuaaccugaugcagu

SEQ ID NO: 2513026 - RNA, 21 nt, Human
ugaccaguuuaaccugaugca

SEQ ID NO: 2513027 - RNA, 16 nt, Human
ugaccauacugaggga

SEQ ID NO: 2513028 - RNA, 20 nt, Human
ugaccgugaggccagagaca

SEQ ID NO: 2513029 - RNA, 16 nt, Human
ugaccgugaggccaga

SEQ ID NO: 2513030 - RNA, 14 nt, Human
ugaccgugaggcca

SEQ ID NO: 2513031 - RNA, 13 nt, Human
ugaccgugaggcc

SEQ ID NO: 2513032 - RNA, 22 nt, Human
ugacccuuacagccucugacuu

SEQ ID NO: 2513033 - RNA, 19 nt, Human
ugaccgaaacagcgcuggg

SEQ ID NO: 2513034 - RNA, 20 nt, Human
ugacccuuacagccucugac

SEQ ID NO: 2513035 - RNA, 21 nt, Human
ugacccugcgaaggggcccug

SEQ ID NO: 2513036 - RNA, 20 nt, Human
ugacccuguauauagcccag

SEQ ID NO: 2513037 - RNA, 19 nt, Human
ugacccuguauauagccca

SEQ ID NO: 2513038 - RNA, 18 nt, Human
ugacccuguauauagccc

SEQ ID NO: 2513039 - RNA, 19 nt, Human
ugaccauucuccaccugcc

SEQ ID NO: 2513040 - RNA, 22 nt, Human
ugacccugcgaaggggcccugg

SEQ ID NO: 2513041 - RNA, 23 nt, Human
ugacccugcgaaggggcccuggu

SEQ ID NO: 2513042 - RNA, 17 nt, Human
ugacccuguauauagcc

SEQ ID NO: 2513043 - RNA, 15 nt, Human
ugaacucuuaaucaa

SEQ ID NO: 2513044 - RNA, 21 nt, Human
ugaagauaaguguauuuuuca

SEQ ID NO: 2513045 - RNA, 23 nt, Human
ugaagauaaguguauuuuucaau

SEQ ID NO: 2513046 - RNA, 14 nt, Human
ugaacucuuaauca

SEQ ID NO: 2513047 - RNA, 14 nt, Human
ugaacuccugggcu

SEQ ID NO: 2513048 - RNA, 16 nt, Human
ugaacucugacaacag

SEQ ID NO: 2513049 - RNA, 17 nt, Human
ugaacuccuggccucaa

SEQ ID NO: 2513050 - RNA, 23 nt, Human
ugaaggaauauauggcagaguug

SEQ ID NO: 2513051 - RNA, 22 nt, Human
ugaaggaauauauggcagaguu

SEQ ID NO: 2513052 - RNA, 21 nt, Human
ugaaggaauauauggcagagu

SEQ ID NO: 2513053 - RNA, 20 nt, Human
ugaaggaauauauggcagag

SEQ ID NO: 2513054 - RNA, 15 nt, Human
ugaaggaauauaugg

SEQ ID NO: 2513055 - RNA, 14 nt, Human
ugaaggaauauaug

SEQ ID NO: 2513056 - RNA, 13 nt, Human
ugaaggaauauau

SEQ ID NO: 2513057 - RNA, 20 nt, Human
ugaaggaauaaauugcuccu

SEQ ID NO: 2513058 - RNA, 20 nt, Human
ugaaggacauugcggacagc

SEQ ID NO: 2513059 - RNA, 19 nt, Human
ugaaggacauugcggacag

SEQ ID NO: 2513060 - RNA, 19 nt, Human
ugaaggacacuuccugccu

SEQ ID NO: 2513061 - RNA, 18 nt, Human
ugaaggacacuuccugcc

SEQ ID NO: 2513062 - RNA, 12 nt, Human
ugaaggacccuu

SEQ ID NO: 2513063 - RNA, 20 nt, Human
ugaaggacacuuccugccua

SEQ ID NO: 2513064 - RNA, 22 nt, Human
ugaaggacauugcggacagcca

SEQ ID NO: 2513065 - RNA, 16 nt, Human
ugaaggccccgcccag

SEQ ID NO: 2513066 - RNA, 15 nt, Human
ugaaggccccgccca

SEQ ID NO: 2513067 - RNA, 18 nt, Human
ugaaggcaaaauugcaaa

SEQ ID NO: 2513068 - RNA, 14 nt, Human
ugaaggcaaugcca

SEQ ID NO: 2513069 - RNA, 23 nt, Human
ugaaggacugugacaggcagcag

SEQ ID NO: 2513070 - RNA, 15 nt, Human
ugaaggcagaaagca

SEQ ID NO: 2513071 - RNA, 14 nt, Human
ugaaggacugugac

SEQ ID NO: 2513072 - RNA, 12 nt, Human
ugaaggacugug

SEQ ID NO: 2513073 - RNA, 10 nt, Human
ugaaggacug

SEQ ID NO: 2513074 - RNA, 16 nt, Human
ugaaggagagcccuuc

SEQ ID NO: 2513075 - RNA, 17 nt, Human
ugaaggccccgcccagg

SEQ ID NO: 2513076 - RNA, 18 nt, Human
ugaaggcagaaagcaaaa

SEQ ID NO: 2513077 - RNA, 11 nt, Human
ugaaguccaag

SEQ ID NO: 2513078 - RNA, 14 nt, Human
ugaagucagaugug

SEQ ID NO: 2513079 - RNA, 16 nt, Human
ugaagucagauguggu

SEQ ID NO: 2513080 - RNA, 13 nt, Human
ugaaguccaagca

SEQ ID NO: 2513081 - RNA, 17 nt, Human
ugaagugagcacagccu

SEQ ID NO: 2513082 - RNA, 14 nt, Human
ugaagugaaacugc

SEQ ID NO: 2513083 - RNA, 13 nt, Human
ugaagugaaacug

SEQ ID NO: 2513084 - RNA, 12 nt, Human
ugaagugaaacu

SEQ ID NO: 2513085 - RNA, 23 nt, Human
ugaagugagcugagauugcacca

SEQ ID NO: 2513086 - RNA, 18 nt, Human
ugaagugagcacagccua

SEQ ID NO: 2513087 - RNA, 18 nt, Human
ugaagugcauccaaaggu

SEQ ID NO: 2513088 - RNA, 16 nt, Human
ugaagugcauccaaag

SEQ ID NO: 2513089 - RNA, 23 nt, Human
ugaaguguuaauacuaguuguga

SEQ ID NO: 2513090 - RNA, 17 nt, Human
ugaaguguuaauacuag

SEQ ID NO: 2513091 - RNA, 20 nt, Human
ugaaguguuuuguucuuucu

SEQ ID NO: 2513092 - RNA, 18 nt, Human
ugaaguguguuuccuuca

SEQ ID NO: 2513093 - RNA, 22 nt, Human
ugaaguguguuuccuucagugc

SEQ ID NO: 2513094 - RNA, 18 nt, Human
ugaaguguaggcagacac

SEQ ID NO: 2513095 - RNA, 17 nt, Human
ugaaguguaggcagaca

SEQ ID NO: 2513096 - RNA, 16 nt, Human
ugaaguguaggcagac

SEQ ID NO: 2513097 - RNA, 19 nt, Human
ugaaguguaggcagacaca

SEQ ID NO: 2513098 - RNA, 16 nt, Human
ugaaguguguuuccuu

SEQ ID NO: 2513099 - RNA, 21 nt, Human
ugaaguuagaauuccuucagg

SEQ ID NO: 2513100 - RNA, 19 nt, Human
ugaaguuagaauuccuuca

SEQ ID NO: 2513101 - RNA, 16 nt, Human
ugaaguucaccauuaa

SEQ ID NO: 2513102 - RNA, 15 nt, Human
ugaaguuagaauucc

SEQ ID NO: 2513103 - RNA, 14 nt, Human
ugaaguuagaauuc

SEQ ID NO: 2513104 - RNA, 14 nt, Human
ugaaguuaacagag

SEQ ID NO: 2513105 - RNA, 20 nt, Human
ugaauaaaauuauuuuggau

SEQ ID NO: 2513106 - RNA, 15 nt, Human
ugaauaaaauuauuu

SEQ ID NO: 2513107 - RNA, 20 nt, Human
ugaauaaacuagauuacauu

SEQ ID NO: 2513108 - RNA, 15 nt, Human
ugaauaaaaaugcac

SEQ ID NO: 2513109 - RNA, 14 nt, Human
ugaauaaaaaugca

SEQ ID NO: 2513110 - RNA, 19 nt, Human
ugaauaaaaauauguacaa

SEQ ID NO: 2513111 - RNA, 21 nt, Human
ugaauaaaaacuuugcuaaau

SEQ ID NO: 2513112 - RNA, 19 nt, Human
ugaauaaaauuauuccuuu

SEQ ID NO: 2513113 - RNA, 13 nt, Human
ugaauaaaauuau

SEQ ID NO: 2513114 - RNA, 22 nt, Human
ugaaguuguuacuaacuaaacu

SEQ ID NO: 2513115 - RNA, 20 nt, Human
ugaaguuguuacuaacuaaa

SEQ ID NO: 2513116 - RNA, 18 nt, Human
ugaaguuguuacuaacua

SEQ ID NO: 2513117 - RNA, 14 nt, Human
ugaauaaaaacuuu

SEQ ID NO: 2513118 - RNA, 20 nt, Human
ugaauaaaaacuuugcuaaa

SEQ ID NO: 2513119 - RNA, 15 nt, Human
ugaaguuguuacuaa

SEQ ID NO: 2513120 - RNA, 16 nt, Human
ugaauuaguccuugcu

SEQ ID NO: 2513121 - RNA, 14 nt, Human
ugaauuagcucacu

SEQ ID NO: 2513122 - RNA, 23 nt, Human
ugaauuagaaacauaaauaaaau

SEQ ID NO: 2513123 - RNA, 21 nt, Human
ugaauuagaaacauaaauaaa

SEQ ID NO: 2513124 - RNA, 19 nt, Human
ugaauuagaaacauaaaua

SEQ ID NO: 2513125 - RNA, 21 nt, Human
ugaauguugucuguuuguucu

SEQ ID NO: 2513126 - RNA, 21 nt, Human
ugaauguucugacauuaacag

SEQ ID NO: 2513127 - RNA, 18 nt, Human
ugaauuacauuuguauaa

SEQ ID NO: 2513128 - RNA, 16 nt, Human
ugaauuacauuuguau

SEQ ID NO: 2513129 - RNA, 15 nt, Human
ugaauuacauuugua

SEQ ID NO: 2513130 - RNA, 14 nt, Human
ugaauguucugaca

SEQ ID NO: 2513131 - RNA, 15 nt, Human
ugaauguucugacau

SEQ ID NO: 2513132 - RNA, 16 nt, Human
ugaauguucugacauu

SEQ ID NO: 2513133 - RNA, 17 nt, Human
ugaauguucugacauua

SEQ ID NO: 2513134 - RNA, 18 nt, Human
ugaauguucugacauuaa

SEQ ID NO: 2513135 - RNA, 20 nt, Human
ugaauguucugacauuaaca

SEQ ID NO: 2513136 - RNA, 23 nt, Human
ugaauguucugacauuaacaguu

SEQ ID NO: 2513137 - RNA, 16 nt, Human
ugaauuauuuucucuc

SEQ ID NO: 2513138 - RNA, 21 nt, Human
ugaauuaucuugguugaaaau

SEQ ID NO: 2513139 - RNA, 15 nt, Human
ugaauuaucuauaca

SEQ ID NO: 2513140 - RNA, 20 nt, Human
ugaauucuugguugaggaaa

SEQ ID NO: 2513141 - RNA, 19 nt, Human
ugaauucugcaauguuuuc

SEQ ID NO: 2513142 - RNA, 17 nt, Human
ugaauucagauuuuaaa

SEQ ID NO: 2513143 - RNA, 12 nt, Human
ugaauucagauu

SEQ ID NO: 2513144 - RNA, 22 nt, Human
ugaauucuugguugaggaaaca

SEQ ID NO: 2513145 - RNA, 21 nt, Human
ugaauucuugguugaggaaac

SEQ ID NO: 2513146 - RNA, 17 nt, Human
ugaauucuuaugcuuau

SEQ ID NO: 2513147 - RNA, 20 nt, Human
ugaauugaggggauuaauau

SEQ ID NO: 2513148 - RNA, 14 nt, Human
ugaaugagaaucua

SEQ ID NO: 2513149 - RNA, 15 nt, Human
ugaaugacaacagaa

SEQ ID NO: 2513150 - RNA, 15 nt, Human
ugaaugacaaagagu

SEQ ID NO: 2513151 - RNA, 17 nt, Human
ugaaugacaacagaagc

SEQ ID NO: 2513152 - RNA, 22 nt, Human
ugaaugaggucagcaugucuau

SEQ ID NO: 2513153 - RNA, 17 nt, Human
ugaaugaggucccaggc

SEQ ID NO: 2513154 - RNA, 18 nt, Human
ugaaugaggucccaggca

SEQ ID NO: 2513155 - RNA, 19 nt, Human
ugaaugaggucccaggcag

SEQ ID NO: 2513156 - RNA, 21 nt, Human
ugaaugaaacccccacacaca

SEQ ID NO: 2513157 - RNA, 22 nt, Human
ugaaugaaacccccacacacac

SEQ ID NO: 2513158 - RNA, 14 nt, Human
ugaaugaaauauca

SEQ ID NO: 2513159 - RNA, 11 nt, Human
ugaauguuaaa

SEQ ID NO: 2513160 - RNA, 22 nt, Human
ugaaugaggucccaggcagaga

SEQ ID NO: 2513161 - RNA, 15 nt, Human
ugaaugaucucucug

SEQ ID NO: 2513162 - RNA, 18 nt, Human
ugaaugaucucucugaau

SEQ ID NO: 2513163 - RNA, 18 nt, Human
ugaauguuaaauaaauug

SEQ ID NO: 2513164 - RNA, 16 nt, Human
ugaauguuaaauaaau

SEQ ID NO: 2513165 - RNA, 15 nt, Human
ugaauguuaaauaaa

SEQ ID NO: 2513166 - RNA, 13 nt, Human
ugaauguuaaaua

SEQ ID NO: 2513167 - RNA, 21 nt, Human
ugaauguuaaauaaauuguau

SEQ ID NO: 2513168 - RNA, 20 nt, Human
ugaauguuaaauaaauugua

SEQ ID NO: 2513169 - RNA, 15 nt, Human
ugaauguuauuuguu

SEQ ID NO: 2513170 - RNA, 14 nt, Human
ugaauguuauuugu

SEQ ID NO: 2513171 - RNA, 23 nt, Human
ugaauguuauuuguuauuuucag

SEQ ID NO: 2513172 - RNA, 12 nt, Human
ugaauguucuga

SEQ ID NO: 2513173 - RNA, 23 nt, Human
ugaaucauuuuaccuuugacaaa

SEQ ID NO: 2513174 - RNA, 22 nt, Human
ugaaucauuuuaccuuugacaa

SEQ ID NO: 2513175 - RNA, 14 nt, Human
ugaaucauguagua

SEQ ID NO: 2513176 - RNA, 12 nt, Human
ugaaucauguag

SEQ ID NO: 2513177 - RNA, 19 nt, Human
ugaaucauguaguaucaaa

SEQ ID NO: 2513178 - RNA, 18 nt, Human
ugaaucauguaguaucaa

SEQ ID NO: 2513179 - RNA, 21 nt, Human
ugaaucauguaguaucaaaua

SEQ ID NO: 2513180 - RNA, 15 nt, Human
ugaauaaagacaccu

SEQ ID NO: 2513181 - RNA, 14 nt, Human
ugaauaaagacacc

SEQ ID NO: 2513182 - RNA, 16 nt, Human
ugaaugaaacccccac

SEQ ID NO: 2513183 - RNA, 18 nt, Human
ugaaugaaacccccacac

SEQ ID NO: 2513184 - RNA, 19 nt, Human
ugaaugaaacccccacaca

SEQ ID NO: 2513185 - RNA, 20 nt, Human
ugaaugaaacccccacacac

SEQ ID NO: 2513186 - RNA, 11 nt, Human
ugaaugaaaaa

SEQ ID NO: 2513187 - RNA, 16 nt, Human
ugaaugaaaaauuuaa

SEQ ID NO: 2513188 - RNA, 17 nt, Human
ugaaugaaaaauuuaag

SEQ ID NO: 2513189 - RNA, 18 nt, Human
ugaaugaaaaauuuaagc

SEQ ID NO: 2513190 - RNA, 19 nt, Human
ugaaugaaaaauuuaagca

SEQ ID NO: 2513191 - RNA, 20 nt, Human
ugaaugaaaaauuuaagcau

SEQ ID NO: 2513192 - RNA, 21 nt, Human
ugaaugaaaaauuuaagcauu

SEQ ID NO: 2513193 - RNA, 22 nt, Human
ugaaugaaaaauuuaagcauug

SEQ ID NO: 2513194 - RNA, 15 nt, Human
ugaauccaaacuaau

SEQ ID NO: 2513195 - RNA, 16 nt, Human
ugaauccaaacuaauc

SEQ ID NO: 2513196 - RNA, 20 nt, Human
ugaaucccacccacauguga

SEQ ID NO: 2513197 - RNA, 14 nt, Human
ugaauccaugcuug

SEQ ID NO: 2513198 - RNA, 17 nt, Human
ugaauccaugcuugggu

SEQ ID NO: 2513199 - RNA, 24 nt, Human
ugaaucuugucucaaugcucauaa

SEQ ID NO: 2513200 - RNA, 19 nt, Human
ugaaucuuuccaauaaacc

SEQ ID NO: 2513201 - RNA, 21 nt, Human
ugauucagacagcugccuggg

SEQ ID NO: 2513202 - RNA, 20 nt, Human
ugauucagacagcugccugg

SEQ ID NO: 2513203 - RNA, 19 nt, Human
ugauucagacagcugccug

SEQ ID NO: 2513204 - RNA, 18 nt, Human
ugauucagacagcugccu

SEQ ID NO: 2513205 - RNA, 21 nt, Human
ugauucuccuucagcccucac

SEQ ID NO: 2513206 - RNA, 19 nt, Human
ugauucuccuucagcccuc

SEQ ID NO: 2513207 - RNA, 18 nt, Human
ugauucuccuucagcccu

SEQ ID NO: 2513208 - RNA, 16 nt, Human
ugauucuccuucagcc

SEQ ID NO: 2513209 - RNA, 14 nt, Human
ugauucuccuucag

SEQ ID NO: 2513210 - RNA, 13 nt, Human
ugauucuccuuca

SEQ ID NO: 2513211 - RNA, 12 nt, Human
ugauucuccuuc

SEQ ID NO: 2513212 - RNA, 23 nt, Human
ugauucagacagcugccugggau

SEQ ID NO: 2513213 - RNA, 21 nt, Human
ugauucuccugccucagccuc

SEQ ID NO: 2513214 - RNA, 12 nt, Human
ugauugauuuga

SEQ ID NO: 2513215 - RNA, 17 nt, Human
ugauugagaguaacuua

SEQ ID NO: 2513216 - RNA, 21 nt, Human
ugauugacagcuuugcugcug

SEQ ID NO: 2513217 - RNA, 14 nt, Human
ugauugauuugaag

SEQ ID NO: 2513218 - RNA, 17 nt, Human
ugauugacagcuuugcu

SEQ ID NO: 2513219 - RNA, 19 nt, Human
ugauugacagcuuugcugc

SEQ ID NO: 2513220 - RNA, 12 nt, Human
ugauugacagcu

SEQ ID NO: 2513221 - RNA, 13 nt, Human
ugauugacagcuu

SEQ ID NO: 2513222 - RNA, 22 nt, Human
ugauugaaucugauuggacauu

SEQ ID NO: 2513223 - RNA, 18 nt, Human
ugauugccaagcucagga

SEQ ID NO: 2513224 - RNA, 16 nt, Human
ugauugcuaaauguaa

SEQ ID NO: 2513225 - RNA, 15 nt, Human
ugauugcuaaaugua

SEQ ID NO: 2513226 - RNA, 14 nt, Human
ugauugcuaaaugu

SEQ ID NO: 2513227 - RNA, 13 nt, Human
ugauugcuaaaug

SEQ ID NO: 2513228 - RNA, 20 nt, Human
ugauugcuaaauguaacagu

SEQ ID NO: 2513229 - RNA, 19 nt, Human
ugauugcuaaauguaacag

SEQ ID NO: 2513230 - RNA, 22 nt, Human
ugauugcuaaauguaacagucu

SEQ ID NO: 2513231 - RNA, 22 nt, Human
ugauugaaaauaguaaaugcuu

SEQ ID NO: 2513232 - RNA, 23 nt, Human
ugauucuuuuuaaaguguuucug

SEQ ID NO: 2513233 - RNA, 20 nt, Human
ugauucuugaguuuagugau

SEQ ID NO: 2513234 - RNA, 14 nt, Human
ugauucuuuguuac

SEQ ID NO: 2513235 - RNA, 18 nt, Human
ugauucuuuuuaaagugu

SEQ ID NO: 2513236 - RNA, 19 nt, Human
ugauucuuuguuacaggca

SEQ ID NO: 2513237 - RNA, 15 nt, Human
ugauucuguguguuu

SEQ ID NO: 2513238 - RNA, 17 nt, Human
ugauucugcuuuuacca

SEQ ID NO: 2513239 - RNA, 15 nt, Human
ugauucuugaguuua

SEQ ID NO: 2513240 - RNA, 16 nt, Human
ugauucugcaguaaau

SEQ ID NO: 2513241 - RNA, 22 nt, Human
ugauucugcaguaaaucuuuua

SEQ ID NO: 2513242 - RNA, 23 nt, Human
ugauucuccuucagcccucaccc

SEQ ID NO: 2513243 - RNA, 16 nt, Human
ugauucagaaauugga

SEQ ID NO: 2513244 - RNA, 12 nt, Human
ugauucugccuu

SEQ ID NO: 2513245 - RNA, 13 nt, Human
ugauucugccuuu

SEQ ID NO: 2513246 - RNA, 19 nt, Human
ugauucugcuuuuaccaug

SEQ ID NO: 2513247 - RNA, 13 nt, Human
ugauucugugugu

SEQ ID NO: 2513248 - RNA, 16 nt, Human
ugauuuaaaacaugua

SEQ ID NO: 2513249 - RNA, 15 nt, Human
ugauuuaaaacaugu

SEQ ID NO: 2513250 - RNA, 14 nt, Human
ugauuuaaaacaug

SEQ ID NO: 2513251 - RNA, 16 nt, Human
ugauuguuugcucuga

SEQ ID NO: 2513252 - RNA, 16 nt, Human
ugauugugucucuugg

SEQ ID NO: 2513253 - RNA, 18 nt, Human
ugauuguucgggugugca

SEQ ID NO: 2513254 - RNA, 14 nt, Human
ugauuguuggcaca

SEQ ID NO: 2513255 - RNA, 19 nt, Human
ugauuguucgggugugcaa

SEQ ID NO: 2513256 - RNA, 21 nt, Human
ugauuguggaauggagauuca

SEQ ID NO: 2513257 - RNA, 19 nt, Human
ugauuguuaauuuacagcu

SEQ ID NO: 2513258 - RNA, 17 nt, Human
ugauuguaacguugcug

SEQ ID NO: 2513259 - RNA, 23 nt, Human
ugauuguaaaauagcuuguauag

SEQ ID NO: 2513260 - RNA, 17 nt, Human
ugauuguaaaauagcuu

SEQ ID NO: 2513261 - RNA, 14 nt, Human
ugauuguaaaauag

SEQ ID NO: 2513262 - RNA, 12 nt, Human
ugauuguaaaau

SEQ ID NO: 2513263 - RNA, 17 nt, Human
ugauuggugcaacccuu

SEQ ID NO: 2513264 - RNA, 19 nt, Human
ugauuggugcaacccuuac

SEQ ID NO: 2513265 - RNA, 21 nt, Human
ugauuggugcaacccuuaccc

SEQ ID NO: 2513266 - RNA, 14 nt, Human
ugauuguggaaugg

SEQ ID NO: 2513267 - RNA, 18 nt, Human
ugauuguggaauggagau

SEQ ID NO: 2513268 - RNA, 14 nt, Human
ugauugucagcuac

SEQ ID NO: 2513269 - RNA, 21 nt, Human
ugauuguaacguugcuguggg

SEQ ID NO: 2513270 - RNA, 20 nt, Human
ugauuguaacguugcugugg

SEQ ID NO: 2513271 - RNA, 19 nt, Human
ugauuguaacguugcugug

SEQ ID NO: 2513272 - RNA, 18 nt, Human
ugauuguaacguugcugu

SEQ ID NO: 2513273 - RNA, 23 nt, Human
ugauuguaacguugcugugggaa

SEQ ID NO: 2513274 - RNA, 22 nt, Human
ugauuguaacguugcuguggga

SEQ ID NO: 2513275 - RNA, 21 nt, Human
ugauuggaggggggagguggg

SEQ ID NO: 2513276 - RNA, 15 nt, Human
ugauuggauuauuca

SEQ ID NO: 2513277 - RNA, 14 nt, Human
ugauuggauuauuc

SEQ ID NO: 2513278 - RNA, 23 nt, Human
ugauuggacauuuucuucagaga

SEQ ID NO: 2513279 - RNA, 13 nt, Human
ugauuggaggggg

SEQ ID NO: 2513280 - RNA, 17 nt, Human
ugauugggacagagguu

SEQ ID NO: 2513281 - RNA, 15 nt, Human
ugauugggacagagg

SEQ ID NO: 2513282 - RNA, 22 nt, Human
ugauugggacuggggcugaagg

SEQ ID NO: 2513283 - RNA, 21 nt, Human
ugauugggaauaaauaugccu

SEQ ID NO: 2513284 - RNA, 20 nt, Human
ugauugggaauaaauaugcc

SEQ ID NO: 2513285 - RNA, 18 nt, Human
ugauugggaauaaauaug

SEQ ID NO: 2513286 - RNA, 17 nt, Human
ugauugggaauaaauau

SEQ ID NO: 2513287 - RNA, 16 nt, Human
ugauugggaauaaaua

SEQ ID NO: 2513288 - RNA, 12 nt, Human
ugauugggaaua

SEQ ID NO: 2513289 - RNA, 16 nt, Human
ugauuggcauauaaug

SEQ ID NO: 2513290 - RNA, 21 nt, Human
ugauuggauuauucauuuaaa

SEQ ID NO: 2513291 - RNA, 12 nt, Human
ugauuggcucac

SEQ ID NO: 2513292 - RNA, 19 nt, Human
ugauuggauuauucauuua

SEQ ID NO: 2513293 - RNA, 18 nt, Human
ugauuggauuauucauuu

SEQ ID NO: 2513294 - RNA, 17 nt, Human
ugauuggauuauucauu

SEQ ID NO: 2513295 - RNA, 16 nt, Human
ugauuggauuauucau

SEQ ID NO: 2513296 - RNA, 20 nt, Human
ugauuggcaggaguuggaag

SEQ ID NO: 2513297 - RNA, 19 nt, Human
ugauuaugaauuacauuug

SEQ ID NO: 2513298 - RNA, 17 nt, Human
ugauuaugaauuacauu

SEQ ID NO: 2513299 - RNA, 13 nt, Human
ugauuauauguca

SEQ ID NO: 2513300 - RNA, 18 nt, Human
ugauuagcaaguuacagu

SEQ ID NO: 2513301 - RNA, 16 nt, Human
ugauuaguaaagaaau

SEQ ID NO: 2513302 - RNA, 17 nt, Human
ugauuaguaaagaaaug

SEQ ID NO: 2513303 - RNA, 11 nt, Human
ugauuagauga

SEQ ID NO: 2513304 - RNA, 13 nt, Human
ugauuagcaaguu

SEQ ID NO: 2513305 - RNA, 21 nt, Human
ugauuagaaggcaaguuucua

SEQ ID NO: 2513306 - RNA, 24 nt, Human
ugauuacugucaaggcugcuuaga

SEQ ID NO: 2513307 - RNA, 13 nt, Human
ugauuacugucaa

SEQ ID NO: 2513308 - RNA, 20 nt, Human
ugauguucaguguaauuucu

SEQ ID NO: 2513309 - RNA, 18 nt, Human
ugauguucaguguaauuu

SEQ ID NO: 2513310 - RNA, 21 nt, Human
ugauguucaguguaauuucuu

SEQ ID NO: 2513311 - RNA, 20 nt, Human
ugauguucuuucacccuuuu

SEQ ID NO: 2513312 - RNA, 18 nt, Human
ugauguuaacacauuuug

SEQ ID NO: 2513313 - RNA, 17 nt, Human
ugauguuaacacauuuu

SEQ ID NO: 2513314 - RNA, 16 nt, Human
ugauguuaacacauuu

SEQ ID NO: 2513315 - RNA, 15 nt, Human
ugauguuaacacauu

SEQ ID NO: 2513316 - RNA, 16 nt, Human
ugauguuaaaauucca

SEQ ID NO: 2513317 - RNA, 17 nt, Human
ugauguuaaaauuccau

SEQ ID NO: 2513318 - RNA, 11 nt, Human
ugauguuaaca

SEQ ID NO: 2513319 - RNA, 10 nt, Human
ugauguuaac

SEQ ID NO: 2513320 - RNA, 21 nt, Human
ugauguuaacacauuuuguau

SEQ ID NO: 2513321 - RNA, 20 nt, Human
ugauguuaacacauuuugua

SEQ ID NO: 2513322 - RNA, 22 nt, Human
ugauguuaacacauuuuguaua

SEQ ID NO: 2513323 - RNA, 22 nt, Human
ugauguuaaccagaauaaaguu

SEQ ID NO: 2513324 - RNA, 16 nt, Human
ugauguucaguguaau

SEQ ID NO: 2513325 - RNA, 15 nt, Human
ugauguucaguguaa

SEQ ID NO: 2513326 - RNA, 14 nt, Human
ugauguucagugua

SEQ ID NO: 2513327 - RNA, 13 nt, Human
ugauguucagugu

SEQ ID NO: 2513328 - RNA, 22 nt, Human
ugauguuuagaaacacaacuau

SEQ ID NO: 2513329 - RNA, 17 nt, Human
ugauguugagggaacag

SEQ ID NO: 2513330 - RNA, 16 nt, Human
ugauuaccagggacug

SEQ ID NO: 2513331 - RNA, 14 nt, Human
ugauguuggcuggg

SEQ ID NO: 2513332 - RNA, 13 nt, Human
ugauguuggaaga

SEQ ID NO: 2513333 - RNA, 16 nt, Human
ugauguuggcugggaa

SEQ ID NO: 2513334 - RNA, 15 nt, Human
ugauguuggcuggga

SEQ ID NO: 2513335 - RNA, 14 nt, Human
ugauuacucuuuga

SEQ ID NO: 2513336 - RNA, 16 nt, Human
ugauuacucuuugaga

SEQ ID NO: 2513337 - RNA, 21 nt, Human
ugauucaaucuguaaacugug

SEQ ID NO: 2513338 - RNA, 22 nt, Human
ugauucaaucuguaaacugugu

SEQ ID NO: 2513339 - RNA, 23 nt, Human
ugauucaaucuguaaacugugua

SEQ ID NO: 2513340 - RNA, 12 nt, Human
ugauucaauuca

SEQ ID NO: 2513341 - RNA, 16 nt, Human
ugauucaaucuguaaa

SEQ ID NO: 2513342 - RNA, 17 nt, Human
ugauucaaucuguaaac

SEQ ID NO: 2513343 - RNA, 14 nt, Human
ugauuauuuucaag

SEQ ID NO: 2513344 - RNA, 14 nt, Human
ugauucaacuaaaa

SEQ ID NO: 2513345 - RNA, 23 nt, Human
ugauucaacuaaaaaaaaaaaag

SEQ ID NO: 2513346 - RNA, 23 nt, Human
ugauuauuucacuuuagaugcug

SEQ ID NO: 2513347 - RNA, 16 nt, Human
ugauuauuucacuuua

SEQ ID NO: 2513348 - RNA, 15 nt, Human
ugauuauuucacuuu

SEQ ID NO: 2513349 - RNA, 20 nt, Human
ugauucaacagguuuuccug

SEQ ID NO: 2513350 - RNA, 22 nt, Human
ugauuaugaauuacauuuguau

SEQ ID NO: 2513351 - RNA, 21 nt, Human
ugauuaugaauuacauuugua

SEQ ID NO: 2513352 - RNA, 16 nt, Human
ugauuauuacuggcaa

SEQ ID NO: 2513353 - RNA, 14 nt, Human
ugauuauucagugu

SEQ ID NO: 2513354 - RNA, 16 nt, Human
ugauuauucaguguca

SEQ ID NO: 2513355 - RNA, 16 nt, Human
ugauuauuuauuauuu

SEQ ID NO: 2513356 - RNA, 18 nt, Human
ugauuauuguauuuauuc

SEQ ID NO: 2513357 - RNA, 15 nt, Human
ugauuauuguauuua

SEQ ID NO: 2513358 - RNA, 13 nt, Human
ugauuauuguauu

SEQ ID NO: 2513359 - RNA, 18 nt, Human
ugauuauucugauuccac

SEQ ID NO: 2513360 - RNA, 16 nt, Human
ugauucagacagcugc

SEQ ID NO: 2513361 - RNA, 15 nt, Human
ugauucagacagcug

SEQ ID NO: 2513362 - RNA, 14 nt, Human
ugauucagacagcu

SEQ ID NO: 2513363 - RNA, 13 nt, Human
ugauucagacagc

SEQ ID NO: 2513364 - RNA, 21 nt, Human
ugauucaauucaacacucccu

SEQ ID NO: 2513365 - RNA, 12 nt, Human
ugauucacagug

SEQ ID NO: 2513366 - RNA, 13 nt, Human
ugauucacugcau

SEQ ID NO: 2513367 - RNA, 12 nt, Human
ugauucacugca

SEQ ID NO: 2513368 - RNA, 22 nt, Human
ugauucacccccaaacagugac

SEQ ID NO: 2513369 - RNA, 14 nt, Human
ugauucagaaauug

SEQ ID NO: 2513370 - RNA, 17 nt, Human
ugauucacugcauggcu

SEQ ID NO: 2513371 - RNA, 15 nt, Human
ugauggugguauguu

SEQ ID NO: 2513372 - RNA, 18 nt, Human
ugaugcuucuucagagac

SEQ ID NO: 2513373 - RNA, 18 nt, Human
ugaugcugggcugggugc

SEQ ID NO: 2513374 - RNA, 16 nt, Human
ugaugcugggcugggu

SEQ ID NO: 2513375 - RNA, 20 nt, Human
ugaugcugggcugggugcga

SEQ ID NO: 2513376 - RNA, 17 nt, Human
ugaugcuucuucagaga

SEQ ID NO: 2513377 - RNA, 16 nt, Human
ugaugcuucuucagag

SEQ ID NO: 2513378 - RNA, 14 nt, Human
ugaugguuguacau

SEQ ID NO: 2513379 - RNA, 17 nt, Human
ugaugucaauuucugug

SEQ ID NO: 2513380 - RNA, 17 nt, Human
ugaugguucguucuguu

SEQ ID NO: 2513381 - RNA, 13 nt, Human
ugaugguuguaca

SEQ ID NO: 2513382 - RNA, 14 nt, Human
ugaugguuccccug

SEQ ID NO: 2513383 - RNA, 22 nt, Human
ugaugguguuuuggggaugaga

SEQ ID NO: 2513384 - RNA, 20 nt, Human
ugaugcugugcuaugaauuu

SEQ ID NO: 2513385 - RNA, 18 nt, Human
ugauguguuuauuuauag

SEQ ID NO: 2513386 - RNA, 14 nt, Human
ugauguguuuauuu

SEQ ID NO: 2513387 - RNA, 23 nt, Human
ugauguguugugauagcuaacau

SEQ ID NO: 2513388 - RNA, 14 nt, Human
ugauguuaaaauuc

SEQ ID NO: 2513389 - RNA, 13 nt, Human
ugauguguacauc

SEQ ID NO: 2513390 - RNA, 16 nt, Human
ugauguggugccugag

SEQ ID NO: 2513391 - RNA, 20 nt, Human
ugauguggugaggcaggcuu

SEQ ID NO: 2513392 - RNA, 15 nt, Human
ugauguggugccuga

SEQ ID NO: 2513393 - RNA, 16 nt, Human
ugauguguuaucucuu

SEQ ID NO: 2513394 - RNA, 19 nt, Human
ugaugucaauuucuguguu

SEQ ID NO: 2513395 - RNA, 18 nt, Human
ugaugucaauuucugugu

SEQ ID NO: 2513396 - RNA, 23 nt, Human
ugaugucaauuucuguguugcca

SEQ ID NO: 2513397 - RNA, 14 nt, Human
ugaucuggaaccca

SEQ ID NO: 2513398 - RNA, 13 nt, Human
ugauguccagaag

SEQ ID NO: 2513399 - RNA, 12 nt, Human
ugauguccagaa

SEQ ID NO: 2513400 - RNA, 17 nt, Human
ugaugucaucugucacu

SEQ ID NO: 2513401 - RNA, 19 nt, Human
ugaugucccaacuuguaaa

SEQ ID NO: 2513402 - RNA, 23 nt, Human
ugauguccagaagaauauucagg

SEQ ID NO: 2513403 - RNA, 15 nt, Human
ugauguccagaagaa

SEQ ID NO: 2513404 - RNA, 18 nt, Human
ugaugugggucaaggaau

SEQ ID NO: 2513405 - RNA, 11 nt, Human
ugaugccuggc

SEQ ID NO: 2513406 - RNA, 15 nt, Human
ugaugccugugaacu

SEQ ID NO: 2513407 - RNA, 20 nt, Human
ugaugccugugaacugaacu

SEQ ID NO: 2513408 - RNA, 20 nt, Human
ugaugcuacaggauuugaaa

SEQ ID NO: 2513409 - RNA, 23 nt, Human
ugaugcuacaggauuugaaauug

SEQ ID NO: 2513410 - RNA, 21 nt, Human
ugaugccugugaacugaacuc

SEQ ID NO: 2513411 - RNA, 15 nt, Human
ugaugcugggcuggg

SEQ ID NO: 2513412 - RNA, 14 nt, Human
ugaugcugggcugg

SEQ ID NO: 2513413 - RNA, 13 nt, Human
ugaugcugggcug

SEQ ID NO: 2513414 - RNA, 12 nt, Human
ugaugcugggau

SEQ ID NO: 2513415 - RNA, 11 nt, Human
ugaugcuaaau

SEQ ID NO: 2513416 - RNA, 16 nt, Human
ugaugcuaaauaggag

SEQ ID NO: 2513417 - RNA, 17 nt, Human
ugaucuuuaaaauacac

SEQ ID NO: 2513418 - RNA, 16 nt, Human
ugaucuuugcagacag

SEQ ID NO: 2513419 - RNA, 19 nt, Human
ugaucuuucuuuccuuucu

SEQ ID NO: 2513420 - RNA, 16 nt, Human
ugaugaugugccuggg

SEQ ID NO: 2513421 - RNA, 17 nt, Human
ugaugcaugcacuguuc

SEQ ID NO: 2513422 - RNA, 18 nt, Human
ugaugcaugcacuguucc

SEQ ID NO: 2513423 - RNA, 23 nt, Human
ugaugcaugcacuguucccccug

SEQ ID NO: 2513424 - RNA, 17 nt, Human
ugaugcauuaaaagaaa

SEQ ID NO: 2513425 - RNA, 18 nt, Human
ugaugcauuaaaagaaaa

SEQ ID NO: 2513426 - RNA, 19 nt, Human
ugaugcauuaaaagaaaau

SEQ ID NO: 2513427 - RNA, 21 nt, Human
ugaugcauuaaaagaaaauaa

SEQ ID NO: 2513428 - RNA, 14 nt, Human
ugaugccucccugu

SEQ ID NO: 2513429 - RNA, 15 nt, Human
ugaucucauuuaauc

SEQ ID NO: 2513430 - RNA, 14 nt, Human
ugaucucagguucu

SEQ ID NO: 2513431 - RNA, 19 nt, Human
ugauccacccaccucagcc

SEQ ID NO: 2513432 - RNA, 18 nt, Human
ugauccacccaccucagc

SEQ ID NO: 2513433 - RNA, 17 nt, Human
ugauccacccaccucag

SEQ ID NO: 2513434 - RNA, 15 nt, Human
ugaucuggaacccag

SEQ ID NO: 2513435 - RNA, 17 nt, Human
ugaucuggaacccagac

SEQ ID NO: 2513436 - RNA, 17 nt, Human
ugaucucucgugauuga

SEQ ID NO: 2513437 - RNA, 18 nt, Human
ugaucuggaacccagacu

SEQ ID NO: 2513438 - RNA, 19 nt, Human
ugaucuggaacccagacuc

SEQ ID NO: 2513439 - RNA, 21 nt, Human
ugaucucggcucacugcaacc

SEQ ID NO: 2513440 - RNA, 17 nt, Human
ugaucugguuugacucc

SEQ ID NO: 2513441 - RNA, 22 nt, Human
ugaucucauuuaauccucucaa

SEQ ID NO: 2513442 - RNA, 16 nt, Human
ugaucuccauauguua

SEQ ID NO: 2513443 - RNA, 19 nt, Human
ugaucuccauauguuacac

SEQ ID NO: 2513444 - RNA, 17 nt, Human
ugaucuccauggcuucc

SEQ ID NO: 2513445 - RNA, 21 nt, Human
ugaucuccauauguuacacua

SEQ ID NO: 2513446 - RNA, 20 nt, Human
ugaucuccauggcuuccucc

SEQ ID NO: 2513447 - RNA, 13 nt, Human
ugaucucccugcc

SEQ ID NO: 2513448 - RNA, 18 nt, Human
ugaucucggcucacugca

SEQ ID NO: 2513449 - RNA, 14 nt, Human
ugaucucccugccg

SEQ ID NO: 2513450 - RNA, 15 nt, Human
ugaucucccugccgc

SEQ ID NO: 2513451 - RNA, 16 nt, Human
ugaucucccugccgcc

SEQ ID NO: 2513452 - RNA, 17 nt, Human
ugaucucccugccgccu

SEQ ID NO: 2513453 - RNA, 14 nt, Human
ugaucuuuaaaaua

SEQ ID NO: 2513454 - RNA, 21 nt, Human
ugaucuuggcuuacugcagcc

SEQ ID NO: 2513455 - RNA, 14 nt, Human
ugaucuugugacau

SEQ ID NO: 2513456 - RNA, 15 nt, Human
ugaucuugugacaua

SEQ ID NO: 2513457 - RNA, 20 nt, Human
ugaucuucuuuauaauucua

SEQ ID NO: 2513458 - RNA, 22 nt, Human
ugaucugugcuuuccagcucac

SEQ ID NO: 2513459 - RNA, 21 nt, Human
ugaucugugcuuuccagcuca

SEQ ID NO: 2513460 - RNA, 20 nt, Human
ugaucugugcuuuccagcuc

SEQ ID NO: 2513461 - RNA, 19 nt, Human
ugaucugugcuuuccagcu

SEQ ID NO: 2513462 - RNA, 12 nt, Human
ugaucugugcuu

SEQ ID NO: 2513463 - RNA, 11 nt, Human
ugaucugugcu

SEQ ID NO: 2513464 - RNA, 15 nt, Human
ugaucugugggcaca

SEQ ID NO: 2513465 - RNA, 13 nt, Human
ugaucuguauaua

SEQ ID NO: 2513466 - RNA, 15 nt, Human
ugaucuguauauaca

SEQ ID NO: 2513467 - RNA, 19 nt, Human
ugaucuguauauacaauaa

SEQ ID NO: 2513468 - RNA, 22 nt, Human
ugaucuguauauacaauaacau

SEQ ID NO: 2513469 - RNA, 21 nt, Human
ugauagacacauaugaggggg

SEQ ID NO: 2513470 - RNA, 22 nt, Human
ugauagacacauaugaggggga

SEQ ID NO: 2513471 - RNA, 13 nt, Human
ugauagcaaagcg

SEQ ID NO: 2513472 - RNA, 19 nt, Human
ugauagacacauaugaggg

SEQ ID NO: 2513473 - RNA, 17 nt, Human
ugauaacuuugcuugca

SEQ ID NO: 2513474 - RNA, 14 nt, Human
ugauagcacagacc

SEQ ID NO: 2513475 - RNA, 13 nt, Human
ugauagcacagac

SEQ ID NO: 2513476 - RNA, 17 nt, Human
ugaucagcuuauugucu

SEQ ID NO: 2513477 - RNA, 17 nt, Human
ugaucagcuguuuguca

SEQ ID NO: 2513478 - RNA, 16 nt, Human
ugaucagcuguuuguc

SEQ ID NO: 2513479 - RNA, 23 nt, Human
ugauagcaagugaauuuuucucu

SEQ ID NO: 2513480 - RNA, 24 nt, Human
ugaucagcuuauugucuagugaaa

SEQ ID NO: 2513481 - RNA, 18 nt, Human
ugaucagcuguuugucau

SEQ ID NO: 2513482 - RNA, 16 nt, Human
ugauccacccaccuca

SEQ ID NO: 2513483 - RNA, 15 nt, Human
ugauccaagcugguc

SEQ ID NO: 2513484 - RNA, 14 nt, Human
ugauccaagcuggu

SEQ ID NO: 2513485 - RNA, 13 nt, Human
ugauccaagcugg

SEQ ID NO: 2513486 - RNA, 16 nt, Human
ugaucauuuucccccc

SEQ ID NO: 2513487 - RNA, 17 nt, Human
ugaucauuuucccccca

SEQ ID NO: 2513488 - RNA, 13 nt, Human
ugaucaugcauug

SEQ ID NO: 2513489 - RNA, 14 nt, Human
ugaucaugcauugu

SEQ ID NO: 2513490 - RNA, 15 nt, Human
ugaucaugcauuguu

SEQ ID NO: 2513491 - RNA, 16 nt, Human
ugaucaugcauuguug

SEQ ID NO: 2513492 - RNA, 17 nt, Human
ugaucaugcauuguuga

SEQ ID NO: 2513493 - RNA, 23 nt, Human
ugaucaugcauuguugagguggu

SEQ ID NO: 2513494 - RNA, 18 nt, Human
ugaucauuuuccccccac

SEQ ID NO: 2513495 - RNA, 19 nt, Human
ugaucauuuuccccccacu

SEQ ID NO: 2513496 - RNA, 20 nt, Human
ugaucauuuuccccccacuc

SEQ ID NO: 2513497 - RNA, 21 nt, Human
ugaucauuuuccccccacucu

SEQ ID NO: 2513498 - RNA, 13 nt, Human
ugauccaacuaau

SEQ ID NO: 2513499 - RNA, 22 nt, Human
ugaucauuuuccccccacucuc

SEQ ID NO: 2513500 - RNA, 14 nt, Human
ugauccaacuaaug

SEQ ID NO: 2513501 - RNA, 19 nt, Human
ugagacucgcgacaaugca

SEQ ID NO: 2513502 - RNA, 16 nt, Human
ugagacucgagaacuu

SEQ ID NO: 2513503 - RNA, 15 nt, Human
ugagacucgagaacu

SEQ ID NO: 2513504 - RNA, 12 nt, Human
ugagacucgaga

SEQ ID NO: 2513505 - RNA, 20 nt, Human
ugagacucagacaggaaagg

SEQ ID NO: 2513506 - RNA, 18 nt, Human
ugagacuaugcguuuuua

SEQ ID NO: 2513507 - RNA, 23 nt, Human
ugagacguuuuuggaagaguagu

SEQ ID NO: 2513508 - RNA, 14 nt, Human
ugagacccccacac

SEQ ID NO: 2513509 - RNA, 15 nt, Human
ugagacccccacacc

SEQ ID NO: 2513510 - RNA, 16 nt, Human
ugagacccccacaccu

SEQ ID NO: 2513511 - RNA, 23 nt, Human
ugagaccaguugggagcacugga

SEQ ID NO: 2513512 - RNA, 13 nt, Human
ugagaccacagag

SEQ ID NO: 2513513 - RNA, 21 nt, Human
ugagaccacagagagagggga

SEQ ID NO: 2513514 - RNA, 14 nt, Human
ugagaccacuguua

SEQ ID NO: 2513515 - RNA, 20 nt, Human
ugagacccagcccucauccc

SEQ ID NO: 2513516 - RNA, 21 nt, Human
ugagacccauuccuauuucuu

SEQ ID NO: 2513517 - RNA, 13 nt, Human
ugagacccccaca

SEQ ID NO: 2513518 - RNA, 21 nt, Human
ugagaccaguugggagcacug

SEQ ID NO: 2513519 - RNA, 12 nt, Human
ugagaccaguug

SEQ ID NO: 2513520 - RNA, 18 nt, Human
ugagacccagcccucauc

SEQ ID NO: 2513521 - RNA, 17 nt, Human
ugagaccagccugggca

SEQ ID NO: 2513522 - RNA, 16 nt, Human
ugaccggacuuuucug

SEQ ID NO: 2513523 - RNA, 19 nt, Human
ugaccgcgacuaauuucaa

SEQ ID NO: 2513524 - RNA, 19 nt, Human
ugaccggacuuuucugcaa

SEQ ID NO: 2513525 - RNA, 16 nt, Human
ugaccgugggcggggc

SEQ ID NO: 2513526 - RNA, 22 nt, Human
ugaccucagcuuugauauuuca

SEQ ID NO: 2513527 - RNA, 18 nt, Human
ugaccucaggcacuagcc

SEQ ID NO: 2513528 - RNA, 16 nt, Human
ugaccucagcuuugau

SEQ ID NO: 2513529 - RNA, 21 nt, Human
ugaccucaggugauccaccca

SEQ ID NO: 2513530 - RNA, 20 nt, Human
ugaccucaggugauccaccc

SEQ ID NO: 2513531 - RNA, 19 nt, Human
ugaccucaggcacuagccu

SEQ ID NO: 2513532 - RNA, 19 nt, Human
ugagaacaaccaaaaucuu

SEQ ID NO: 2513533 - RNA, 17 nt, Human
ugagaaauuuauaaacu

SEQ ID NO: 2513534 - RNA, 21 nt, Human
ugagaacccugcguggggaca

SEQ ID NO: 2513535 - RNA, 18 nt, Human
ugagaacccugcgugggg

SEQ ID NO: 2513536 - RNA, 22 nt, Human
ugagaacccugcguggggacag

SEQ ID NO: 2513537 - RNA, 14 nt, Human
ugagaacacuguga

SEQ ID NO: 2513538 - RNA, 12 nt, Human
ugagaacacugu

SEQ ID NO: 2513539 - RNA, 16 nt, Human
ugagaacacugugaaa

SEQ ID NO: 2513540 - RNA, 16 nt, Human
ugagaacccugcgugg

SEQ ID NO: 2513541 - RNA, 23 nt, Human
ugagacucgcgacaaugcaaacc

SEQ ID NO: 2513542 - RNA, 22 nt, Human
ugagacucgcgacaaugcaaac

SEQ ID NO: 2513543 - RNA, 21 nt, Human
ugagacucgcgacaaugcaaa

SEQ ID NO: 2513544 - RNA, 20 nt, Human
ugagacucgcgacaaugcaa

SEQ ID NO: 2513545 - RNA, 17 nt, Human
ugagacucgagaacuuu

SEQ ID NO: 2513546 - RNA, 16 nt, Human
ugagagugaacaaauu

SEQ ID NO: 2513547 - RNA, 17 nt, Human
ugagaguuuuggaugca

SEQ ID NO: 2513548 - RNA, 16 nt, Human
ugagaguuuaguugua

SEQ ID NO: 2513549 - RNA, 15 nt, Human
ugagaguuuuggaug

SEQ ID NO: 2513550 - RNA, 20 nt, Human
ugagagucugcacuuaacaa

SEQ ID NO: 2513551 - RNA, 24 nt, Human
ugagagugucuucacggcaggaca

SEQ ID NO: 2513552 - RNA, 22 nt, Human
ugagagugucuucacggcagga

SEQ ID NO: 2513553 - RNA, 15 nt, Human
ugagcagggcucagc

SEQ ID NO: 2513554 - RNA, 14 nt, Human
ugagcagggcucag

SEQ ID NO: 2513555 - RNA, 13 nt, Human
ugagcagggcuca

SEQ ID NO: 2513556 - RNA, 12 nt, Human
ugagcagggcuc

SEQ ID NO: 2513557 - RNA, 15 nt, Human
ugagaucaaaacggu

SEQ ID NO: 2513558 - RNA, 15 nt, Human
ugagauauuuauugu

SEQ ID NO: 2513559 - RNA, 14 nt, Human
ugagaucagccugg

SEQ ID NO: 2513560 - RNA, 15 nt, Human
ugagaucagccuggg

SEQ ID NO: 2513561 - RNA, 20 nt, Human
ugagcaucaggccaggcccu

SEQ ID NO: 2513562 - RNA, 19 nt, Human
ugagcaucaggccaggccc

SEQ ID NO: 2513563 - RNA, 18 nt, Human
ugagcaucaggccaggcc

SEQ ID NO: 2513564 - RNA, 21 nt, Human
ugagccccaaguccugaagag

SEQ ID NO: 2513565 - RNA, 17 nt, Human
ugagccccaaguccuga

SEQ ID NO: 2513566 - RNA, 14 nt, Human
ugagccccaagucc

SEQ ID NO: 2513567 - RNA, 15 nt, Human
ugagcaucacaguuu

SEQ ID NO: 2513568 - RNA, 23 nt, Human
ugagccccaaguccugaagaggc

SEQ ID NO: 2513569 - RNA, 22 nt, Human
ugagccccaaguccugaagagg

SEQ ID NO: 2513570 - RNA, 22 nt, Human
ugagccccuaccccacaccagg

SEQ ID NO: 2513571 - RNA, 21 nt, Human
ugagccccuaccccacaccag

SEQ ID NO: 2513572 - RNA, 19 nt, Human
ugagccccuaccccacacc

SEQ ID NO: 2513573 - RNA, 22 nt, Human
ugagccccgcagaccuccccag

SEQ ID NO: 2513574 - RNA, 23 nt, Human
ugagccccgcagaccuccccagc

SEQ ID NO: 2513575 - RNA, 17 nt, Human
ugagccccgcagaccuc

SEQ ID NO: 2513576 - RNA, 16 nt, Human
ugagccccgcagaccu

SEQ ID NO: 2513577 - RNA, 23 nt, Human
ugagcccccccaacacugugccc

SEQ ID NO: 2513578 - RNA, 22 nt, Human
ugagcccccccaacacugugcc

SEQ ID NO: 2513579 - RNA, 20 nt, Human
ugagcccccccaacacugug

SEQ ID NO: 2513580 - RNA, 14 nt, Human
ugagcaucacaguu

SEQ ID NO: 2513581 - RNA, 16 nt, Human
ugagcaucaggccagg

SEQ ID NO: 2513582 - RNA, 15 nt, Human
ugagcaguggcuggu

SEQ ID NO: 2513583 - RNA, 14 nt, Human
ugagcaguggcugg

SEQ ID NO: 2513584 - RNA, 13 nt, Human
ugagcaguggcug

SEQ ID NO: 2513585 - RNA, 12 nt, Human
ugagcaguggcu

SEQ ID NO: 2513586 - RNA, 22 nt, Human
ugagcaguggcugguccagggc

SEQ ID NO: 2513587 - RNA, 18 nt, Human
ugagcaguggcuggucca

SEQ ID NO: 2513588 - RNA, 17 nt, Human
ugagcagggcucagcgg

SEQ ID NO: 2513589 - RNA, 16 nt, Human
ugagcagggcucagcg

SEQ ID NO: 2513590 - RNA, 23 nt, Human
ugagcagugaguuacagcgagag

SEQ ID NO: 2513591 - RNA, 20 nt, Human
ugagauauuuauuguuuauu

SEQ ID NO: 2513592 - RNA, 19 nt, Human
ugagcagggcucagcgggg

SEQ ID NO: 2513593 - RNA, 21 nt, Human
ugagccucagcauccuggcac

SEQ ID NO: 2513594 - RNA, 18 nt, Human
ugagccucagcauccugg

SEQ ID NO: 2513595 - RNA, 14 nt, Human
ugagccucagucuc

SEQ ID NO: 2513596 - RNA, 22 nt, Human
ugagccucagcauccuggcacc

SEQ ID NO: 2513597 - RNA, 17 nt, Human
ugagccucagcauccug

SEQ ID NO: 2513598 - RNA, 21 nt, Human
ugagccgagaucacgccacug

SEQ ID NO: 2513599 - RNA, 20 nt, Human
ugagcccucagaacccuugg

SEQ ID NO: 2513600 - RNA, 22 nt, Human
ugagcccucagaacccuuggcu

SEQ ID NO: 2513601 - RNA, 18 nt, Human
ugagcccuguccugccua

SEQ ID NO: 2513602 - RNA, 19 nt, Human
ugagccgagaucacgccac

SEQ ID NO: 2513603 - RNA, 19 nt, Human
ugagccucucaccuguacu

SEQ ID NO: 2513604 - RNA, 19 nt, Human
ugagcuccucugggcagga

SEQ ID NO: 2513605 - RNA, 15 nt, Human
ugagccucucaccug

SEQ ID NO: 2513606 - RNA, 13 nt, Human
ugagccucucacc

SEQ ID NO: 2513607 - RNA, 12 nt, Human
ugagccucugcu

SEQ ID NO: 2513608 - RNA, 14 nt, Human
ugagccucugcucc

SEQ ID NO: 2513609 - RNA, 16 nt, Human
ugagccucugcucccc

SEQ ID NO: 2513610 - RNA, 17 nt, Human
ugagccucugcucccca

SEQ ID NO: 2513611 - RNA, 18 nt, Human
ugagccucugcuccccag

SEQ ID NO: 2513612 - RNA, 14 nt, Human
ugagccugagcaga

SEQ ID NO: 2513613 - RNA, 19 nt, Human
ugagcugccuucccuagcu

SEQ ID NO: 2513614 - RNA, 17 nt, Human
ugagcugccuucccuag

SEQ ID NO: 2513615 - RNA, 16 nt, Human
ugagcugccuucccua

SEQ ID NO: 2513616 - RNA, 16 nt, Human
ugagcucucggaacug

SEQ ID NO: 2513617 - RNA, 15 nt, Human
ugagcugccuucccu

SEQ ID NO: 2513618 - RNA, 12 nt, Human
ugagcugccuuc

SEQ ID NO: 2513619 - RNA, 12 nt, Human
ugagcuggaagg

SEQ ID NO: 2513620 - RNA, 21 nt, Human
ugagcuggaaggagugagagg

SEQ ID NO: 2513621 - RNA, 17 nt, Human
ugagcucuacccagggc

SEQ ID NO: 2513622 - RNA, 18 nt, Human
ugagcucuacccagggcc

SEQ ID NO: 2513623 - RNA, 19 nt, Human
ugagcucuacccagggccu

SEQ ID NO: 2513624 - RNA, 22 nt, Human
ugagcucuacccagggccugca

SEQ ID NO: 2513625 - RNA, 14 nt, Human
ugagcucgguggac

SEQ ID NO: 2513626 - RNA, 20 nt, Human
ugagcucgguggacccaggg

SEQ ID NO: 2513627 - RNA, 21 nt, Human
ugagcucgguggacccaggga

SEQ ID NO: 2513628 - RNA, 16 nt, Human
ugagucccaggagcug

SEQ ID NO: 2513629 - RNA, 22 nt, Human
ugaguccauucucccagguacc

SEQ ID NO: 2513630 - RNA, 20 nt, Human
ugaguccauucucccaggua

SEQ ID NO: 2513631 - RNA, 19 nt, Human
ugaguccauucucccaggu

SEQ ID NO: 2513632 - RNA, 15 nt, Human
ugagucccaggcuga

SEQ ID NO: 2513633 - RNA, 23 nt, Human
ugagguggcacuuuuucauuugc

SEQ ID NO: 2513634 - RNA, 21 nt, Human
ugagguggcacuuuuucauuu

SEQ ID NO: 2513635 - RNA, 17 nt, Human
ugaguccauucucccag

SEQ ID NO: 2513636 - RNA, 21 nt, Human
ugaggugggaggaucucuuga

SEQ ID NO: 2513637 - RNA, 13 nt, Human
ugaguccagaagu

SEQ ID NO: 2513638 - RNA, 19 nt, Human
ugaguccagaaguuugaga

SEQ ID NO: 2513639 - RNA, 19 nt, Human
ugagucgaggacagggagg

SEQ ID NO: 2513640 - RNA, 16 nt, Human
ugagucucccaaggcu

SEQ ID NO: 2513641 - RNA, 15 nt, Human
ugagucucccaaggc

SEQ ID NO: 2513642 - RNA, 23 nt, Human
ugagucucccaaggcugcgucug

SEQ ID NO: 2513643 - RNA, 14 nt, Human
ugagucucuucaga

SEQ ID NO: 2513644 - RNA, 21 nt, Human
ugagucccaggagcugcccag

SEQ ID NO: 2513645 - RNA, 20 nt, Human
ugagucccaggagcugccca

SEQ ID NO: 2513646 - RNA, 17 nt, Human
ugagucguacagaaagc

SEQ ID NO: 2513647 - RNA, 19 nt, Human
ugagucguacagaaagcug

SEQ ID NO: 2513648 - RNA, 18 nt, Human
ugagucgucaucacuuuu

SEQ ID NO: 2513649 - RNA, 18 nt, Human
ugagucugaaggcugggu

SEQ ID NO: 2513650 - RNA, 17 nt, Human
ugagucugaaggcuggg

SEQ ID NO: 2513651 - RNA, 15 nt, Human
ugagucugaaggcug

SEQ ID NO: 2513652 - RNA, 13 nt, Human
ugagucugaaggc

SEQ ID NO: 2513653 - RNA, 15 nt, Human
ugagugaauaaaugu

SEQ ID NO: 2513654 - RNA, 17 nt, Human
ugagugaaccuguauaa

SEQ ID NO: 2513655 - RNA, 23 nt, Human
ugagucuuggcggcagcagccau

SEQ ID NO: 2513656 - RNA, 15 nt, Human
ugagucucuucagaa

SEQ ID NO: 2513657 - RNA, 21 nt, Human
ugagucuuggcggcagcagcc

SEQ ID NO: 2513658 - RNA, 18 nt, Human
ugagucuuggcggcagca

SEQ ID NO: 2513659 - RNA, 17 nt, Human
ugagucuuggcggcagc

SEQ ID NO: 2513660 - RNA, 16 nt, Human
ugagucuuggcggcag

SEQ ID NO: 2513661 - RNA, 15 nt, Human
ugagucuuggcggca

SEQ ID NO: 2513662 - RNA, 16 nt, Human
ugauaacuggaaacuu

SEQ ID NO: 2513663 - RNA, 15 nt, Human
ugauaacuuugcuug

SEQ ID NO: 2513664 - RNA, 14 nt, Human
ugauaacuuugcuu

SEQ ID NO: 2513665 - RNA, 19 nt, Human
ugauaacugcaauuuuaau

SEQ ID NO: 2513666 - RNA, 18 nt, Human
ugauaacuagauggugcu

SEQ ID NO: 2513667 - RNA, 21 nt, Human
ugauaacuagauggugcugag

SEQ ID NO: 2513668 - RNA, 22 nt, Human
ugauaacuagauggugcugaga

SEQ ID NO: 2513669 - RNA, 23 nt, Human
ugauaacuagauggugcugagaa

SEQ ID NO: 2513670 - RNA, 18 nt, Human
ugauaacaaccuggagac

SEQ ID NO: 2513671 - RNA, 17 nt, Human
ugauaacaaccuggaga

SEQ ID NO: 2513672 - RNA, 18 nt, Human
ugaguuuuuucucuuggg

SEQ ID NO: 2513673 - RNA, 19 nt, Human
ugaguuuuuucucuugggc

SEQ ID NO: 2513674 - RNA, 18 nt, Human
ugaguuuucuucugugau

SEQ ID NO: 2513675 - RNA, 20 nt, Human
ugaguuuuguuuuaaaauua

SEQ ID NO: 2513676 - RNA, 18 nt, Human
ugaguuuuuauggggcug

SEQ ID NO: 2513677 - RNA, 13 nt, Human
ugaguuuuugaua

SEQ ID NO: 2513678 - RNA, 18 nt, Human
ugaguuuuugauagcuuu

SEQ ID NO: 2513679 - RNA, 19 nt, Human
ugaguuuuugauagcuuua

SEQ ID NO: 2513680 - RNA, 19 nt, Human
ugaguuuuuauggggcuga

SEQ ID NO: 2513681 - RNA, 17 nt, Human
ugaguuuuuucucuugg

SEQ ID NO: 2513682 - RNA, 20 nt, Human
ugaguuugucgcucaugugu

SEQ ID NO: 2513683 - RNA, 19 nt, Human
ugaguuugucgcucaugug

SEQ ID NO: 2513684 - RNA, 17 nt, Human
ugaguuuucuucuguga

SEQ ID NO: 2513685 - RNA, 18 nt, Human
ugaguuuuauugagaauu

SEQ ID NO: 2513686 - RNA, 20 nt, Human
ugaguugauagcacagaccc

SEQ ID NO: 2513687 - RNA, 16 nt, Human
ugaguugauagcacag

SEQ ID NO: 2513688 - RNA, 22 nt, Human
ugaguucucagggcuccugccu

SEQ ID NO: 2513689 - RNA, 19 nt, Human
ugaguucucagggcuccug

SEQ ID NO: 2513690 - RNA, 18 nt, Human
ugaguucucagggcuccu

SEQ ID NO: 2513691 - RNA, 17 nt, Human
ugaguucucagggcucc

SEQ ID NO: 2513692 - RNA, 16 nt, Human
ugaguucucagggcuc

SEQ ID NO: 2513693 - RNA, 13 nt, Human
ugaguucucaggg

SEQ ID NO: 2513694 - RNA, 14 nt, Human
ugagugagcaugcc

SEQ ID NO: 2513695 - RNA, 22 nt, Human
ugaguuugcuuauguaaucuca

SEQ ID NO: 2513696 - RNA, 13 nt, Human
ugaguuugcuuau

SEQ ID NO: 2513697 - RNA, 23 nt, Human
ugaguuugggccccagaggcugg

SEQ ID NO: 2513698 - RNA, 22 nt, Human
ugaguuugggccccagaggcug

SEQ ID NO: 2513699 - RNA, 14 nt, Human
ugaguuugcccugg

SEQ ID NO: 2513700 - RNA, 22 nt, Human
ugaguuugcccugguuucacug

SEQ ID NO: 2513701 - RNA, 21 nt, Human
ugaguuugagcugccuucccu

SEQ ID NO: 2513702 - RNA, 19 nt, Human
ugaguuugagcugccuucc

SEQ ID NO: 2513703 - RNA, 18 nt, Human
ugaguuugagcugccuuc

SEQ ID NO: 2513704 - RNA, 17 nt, Human
ugaguuugagcugccuu

SEQ ID NO: 2513705 - RNA, 16 nt, Human
ugaguuugagcugccu

SEQ ID NO: 2513706 - RNA, 19 nt, Human
ugaguuucucucacauuac

SEQ ID NO: 2513707 - RNA, 23 nt, Human
ugaguugacuugacagaacacug

SEQ ID NO: 2513708 - RNA, 16 nt, Human
ugaggagcuugaaacc

SEQ ID NO: 2513709 - RNA, 12 nt, Human
ugaggaggaagg

SEQ ID NO: 2513710 - RNA, 13 nt, Human
ugaggaggaagga

SEQ ID NO: 2513711 - RNA, 21 nt, Human
ugaggaggaaggagagaaggg

SEQ ID NO: 2513712 - RNA, 14 nt, Human
ugaggaggccucca

SEQ ID NO: 2513713 - RNA, 16 nt, Human
ugaggaggccuccauc

SEQ ID NO: 2513714 - RNA, 18 nt, Human
ugaggaggaaggagagaa

SEQ ID NO: 2513715 - RNA, 14 nt, Human
ugaggcaggucccc

SEQ ID NO: 2513716 - RNA, 16 nt, Human
ugaggcagguccccag

SEQ ID NO: 2513717 - RNA, 17 nt, Human
ugaggcagguccccaga

SEQ ID NO: 2513718 - RNA, 21 nt, Human
ugaggcagugggucccacuuc

SEQ ID NO: 2513719 - RNA, 19 nt, Human
ugaggcagugggucccacu

SEQ ID NO: 2513720 - RNA, 22 nt, Human
ugagcuggggaccugguacccu

SEQ ID NO: 2513721 - RNA, 20 nt, Human
ugagcuggggaugucucuca

SEQ ID NO: 2513722 - RNA, 13 nt, Human
ugagcugggauga

SEQ ID NO: 2513723 - RNA, 13 nt, Human
ugaggagcugggg

SEQ ID NO: 2513724 - RNA, 20 nt, Human
ugaggagcuggggaucccuc

SEQ ID NO: 2513725 - RNA, 12 nt, Human
ugaggagcuggg

SEQ ID NO: 2513726 - RNA, 17 nt, Human
ugaggagcugcuggcuu

SEQ ID NO: 2513727 - RNA, 13 nt, Human
ugaggagcugcug

SEQ ID NO: 2513728 - RNA, 14 nt, Human
ugaggagcugcugg

SEQ ID NO: 2513729 - RNA, 15 nt, Human
ugaggagcugcuggc

SEQ ID NO: 2513730 - RNA, 16 nt, Human
ugaggagcugcuggcu

SEQ ID NO: 2513731 - RNA, 12 nt, Human
ugaggcauuugu

SEQ ID NO: 2513732 - RNA, 23 nt, Human
ugaggcaucgcaauguaagacuc

SEQ ID NO: 2513733 - RNA, 23 nt, Human
ugaggcagugggucccacuuccc

SEQ ID NO: 2513734 - RNA, 22 nt, Human
ugaggcagugggucccacuucc

SEQ ID NO: 2513735 - RNA, 19 nt, Human
ugaggcauuuguuugaacu

SEQ ID NO: 2513736 - RNA, 20 nt, Human
ugaggcauuuguuugaacug

SEQ ID NO: 2513737 - RNA, 17 nt, Human
ugaggcuaguguggugu

SEQ ID NO: 2513738 - RNA, 21 nt, Human
ugaggcauuuguuugaacuga

SEQ ID NO: 2513739 - RNA, 23 nt, Human
ugaggcuagugugguguuuccug

SEQ ID NO: 2513740 - RNA, 18 nt, Human
ugaggcauugcacaggga

SEQ ID NO: 2513741 - RNA, 17 nt, Human
ugaggcauugcacaggg

SEQ ID NO: 2513742 - RNA, 21 nt, Human
ugaggcucaggggugugccug

SEQ ID NO: 2513743 - RNA, 12 nt, Human
ugaggugggagg

SEQ ID NO: 2513744 - RNA, 13 nt, Human
ugaggugggagga

SEQ ID NO: 2513745 - RNA, 14 nt, Human
ugaggugggagaug

SEQ ID NO: 2513746 - RNA, 20 nt, Human
ugagguggcacuuuuucauu

SEQ ID NO: 2513747 - RNA, 18 nt, Human
ugagguggcacuuuuuca

SEQ ID NO: 2513748 - RNA, 16 nt, Human
ugagguggcacuuuuu

SEQ ID NO: 2513749 - RNA, 23 nt, Human
ugaggucugcucggccgucuuca

SEQ ID NO: 2513750 - RNA, 18 nt, Human
ugaggucucgcugaugcu

SEQ ID NO: 2513751 - RNA, 23 nt, Human
ugaggucucgcugaugcugggcu

SEQ ID NO: 2513752 - RNA, 17 nt, Human
ugaggucucuugaggga

SEQ ID NO: 2513753 - RNA, 18 nt, Human
ugaggucucuugagggag

SEQ ID NO: 2513754 - RNA, 15 nt, Human
ugaggucugaaaugg

SEQ ID NO: 2513755 - RNA, 15 nt, Human
ugaggucugcucggc

SEQ ID NO: 2513756 - RNA, 16 nt, Human
ugaggucugcucggcc

SEQ ID NO: 2513757 - RNA, 14 nt, Human
ugagggagcuuagc

SEQ ID NO: 2513758 - RNA, 17 nt, Human
ugaggucccaggcagag

SEQ ID NO: 2513759 - RNA, 19 nt, Human
ugaggucccaggcagagaa

SEQ ID NO: 2513760 - RNA, 16 nt, Human
ugagggagcuuagcca

SEQ ID NO: 2513761 - RNA, 13 nt, Human
ugaggucccaggc

SEQ ID NO: 2513762 - RNA, 15 nt, Human
ugaggucccaggcag

SEQ ID NO: 2513763 - RNA, 14 nt, Human
ugaggucucgcuga

SEQ ID NO: 2513764 - RNA, 23 nt, Human
ugaggucuaggaacauacuucag

SEQ ID NO: 2513765 - RNA, 18 nt, Human
ugaggcuccacuuggucu

SEQ ID NO: 2513766 - RNA, 20 nt, Human
ugaggcuccacuuggucugu

SEQ ID NO: 2513767 - RNA, 14 nt, Human
ugaggcucugcccu

SEQ ID NO: 2513768 - RNA, 13 nt, Human
ugaggcucugccc

SEQ ID NO: 2513769 - RNA, 17 nt, Human
ugagggaacagagaggu

SEQ ID NO: 2513770 - RNA, 17 nt, Human
ugagggaacagacagga

SEQ ID NO: 2513771 - RNA, 16 nt, Human
ugaggcuccugugcua

SEQ ID NO: 2513772 - RNA, 15 nt, Human
ugaggcuccugugcu

SEQ ID NO: 2513773 - RNA, 21 nt, Human
ugaggcucugacccagugaga

SEQ ID NO: 2513774 - RNA, 20 nt, Human
ugagggaacagacaggagaa

SEQ ID NO: 2513775 - RNA, 22 nt, Human
ugagggaacagacaggagaaau

SEQ ID NO: 2513776 - RNA, 13 nt, Human
ugagggaccagcc

SEQ ID NO: 2513777 - RNA, 13 nt, Human
ugagggacucuga

SEQ ID NO: 2513778 - RNA, 18 nt, Human
ugagggaccagccaagag

SEQ ID NO: 2513779 - RNA, 18 nt, Human
ugagggacuggaaccagg

SEQ ID NO: 2513780 - RNA, 14 nt, Human
ugagggagccuggc

SEQ ID NO: 2513781 - RNA, 24 nt, Human
ugcugggccccugccucucugcag

SEQ ID NO: 2513782 - RNA, 23 nt, Human
ugcugggccccugccucucugca

SEQ ID NO: 2513783 - RNA, 22 nt, Human
ugcugggccccugccucucugc

SEQ ID NO: 2513784 - RNA, 21 nt, Human
ugcugggccccugccucucug

SEQ ID NO: 2513785 - RNA, 19 nt, Human
ugcugggccccugccucuc

SEQ ID NO: 2513786 - RNA, 18 nt, Human
ugcugggccccugccucu

SEQ ID NO: 2513787 - RNA, 17 nt, Human
ugcugggccccugccuc

SEQ ID NO: 2513788 - RNA, 16 nt, Human
ugcugggccccugccu

SEQ ID NO: 2513789 - RNA, 15 nt, Human
ugcugcuucccucug

SEQ ID NO: 2513790 - RNA, 16 nt, Human
ugcugcuucccucugc

SEQ ID NO: 2513791 - RNA, 17 nt, Human
ugcugcuucccucugcc

SEQ ID NO: 2513792 - RNA, 20 nt, Human
ugcugcuucccucugccugu

SEQ ID NO: 2513793 - RNA, 12 nt, Human
ugcugcuugagg

SEQ ID NO: 2513794 - RNA, 16 nt, Human
ugcugcugcugcgccc

SEQ ID NO: 2513795 - RNA, 15 nt, Human
ugcugcugcgcccuu

SEQ ID NO: 2513796 - RNA, 12 nt, Human
ugcugcugcugc

SEQ ID NO: 2513797 - RNA, 20 nt, Human
ugcugggauuacagguguga

SEQ ID NO: 2513798 - RNA, 19 nt, Human
ugcugcuugaggcaacuca

SEQ ID NO: 2513799 - RNA, 14 nt, Human
ugcugggccccugc

SEQ ID NO: 2513800 - RNA, 21 nt, Human
ugcugcuucccucugccuguc

SEQ ID NO: 2513801 - RNA, 14 nt, Human
ugcucuuucucugc

SEQ ID NO: 2513802 - RNA, 13 nt, Human
ugcucuuucucug

SEQ ID NO: 2513803 - RNA, 16 nt, Human
ugcucuuucuacucug

SEQ ID NO: 2513804 - RNA, 12 nt, Human
ugcucuuucucu

SEQ ID NO: 2513805 - RNA, 17 nt, Human
ugcugcauuuaaaagau

SEQ ID NO: 2513806 - RNA, 18 nt, Human
ugcugcauuuaaaagaua

SEQ ID NO: 2513807 - RNA, 19 nt, Human
ugcugcauuuaaaagauac

SEQ ID NO: 2513808 - RNA, 23 nt, Human
ugcugcauuuaaaagauacaguu

SEQ ID NO: 2513809 - RNA, 21 nt, Human
ugcugccaaccauaccuuccu

SEQ ID NO: 2513810 - RNA, 14 nt, Human
ugcugcauuuaaaa

SEQ ID NO: 2513811 - RNA, 17 nt, Human
ugcugccugcuuuuuau

SEQ ID NO: 2513812 - RNA, 15 nt, Human
ugcugccugcuuuuu

SEQ ID NO: 2513813 - RNA, 17 nt, Human
ugcugccaaccauaccu

SEQ ID NO: 2513814 - RNA, 23 nt, Human
ugcugcauuuuaauuuuaaccaa

SEQ ID NO: 2513815 - RNA, 14 nt, Human
ugcugccugaguca

SEQ ID NO: 2513816 - RNA, 22 nt, Human
ugcugccuccccaacccugccc

SEQ ID NO: 2513817 - RNA, 16 nt, Human
ugcugccugccugucu

SEQ ID NO: 2513818 - RNA, 15 nt, Human
ugcugccugccuguc

SEQ ID NO: 2513819 - RNA, 14 nt, Human
ugcugccugccugu

SEQ ID NO: 2513820 - RNA, 13 nt, Human
ugcugccugccug

SEQ ID NO: 2513821 - RNA, 17 nt, Human
ugcugccuucuggauuc

SEQ ID NO: 2513822 - RNA, 13 nt, Human
ugcugccuucugg

SEQ ID NO: 2513823 - RNA, 19 nt, Human
ugcugcuauccugccaaaa

SEQ ID NO: 2513824 - RNA, 17 nt, Human
ugcugggcuugucugua

SEQ ID NO: 2513825 - RNA, 14 nt, Human
ugcugggcuggggc

SEQ ID NO: 2513826 - RNA, 13 nt, Human
ugcugggcugggg

SEQ ID NO: 2513827 - RNA, 11 nt, Human
ugcugggcugg

SEQ ID NO: 2513828 - RNA, 24 nt, Human
ugcugggcugacggugcagucugg

SEQ ID NO: 2513829 - RNA, 21 nt, Human
ugcugggcugacggugcaguc

SEQ ID NO: 2513830 - RNA, 19 nt, Human
ugcugggcugacggugcag

SEQ ID NO: 2513831 - RNA, 10 nt, Human
ugcugggcug

SEQ ID NO: 2513832 - RNA, 23 nt, Human
ugcugggcucuccaccucagccu

SEQ ID NO: 2513833 - RNA, 19 nt, Human
ugcugggcauuuucccaga

SEQ ID NO: 2513834 - RNA, 14 nt, Human
ugcugggcucucca

SEQ ID NO: 2513835 - RNA, 15 nt, Human
ugcugggcucuccac

SEQ ID NO: 2513836 - RNA, 16 nt, Human
ugcugggcucuccacc

SEQ ID NO: 2513837 - RNA, 17 nt, Human
ugcugggcucuccaccu

SEQ ID NO: 2513838 - RNA, 18 nt, Human
ugcugggcucuccaccuc

SEQ ID NO: 2513839 - RNA, 20 nt, Human
ugcugggcucuccaccucag

SEQ ID NO: 2513840 - RNA, 22 nt, Human
ugcugggcucuccaccucagcc

SEQ ID NO: 2513841 - RNA, 20 nt, Human
ugcugggggggauuguaaaa

SEQ ID NO: 2513842 - RNA, 16 nt, Human
ugcugggcugggugcg

SEQ ID NO: 2513843 - RNA, 15 nt, Human
ugcugggcugggugc

SEQ ID NO: 2513844 - RNA, 14 nt, Human
ugcugggcugggug

SEQ ID NO: 2513845 - RNA, 17 nt, Human
ugcugggcuggggccug

SEQ ID NO: 2513846 - RNA, 20 nt, Human
ugcuggggacggggggcccc

SEQ ID NO: 2513847 - RNA, 23 nt, Human
ugcuggggcaagucccugacucu

SEQ ID NO: 2513848 - RNA, 23 nt, Human
ugcuggggacggggggccccagu

SEQ ID NO: 2513849 - RNA, 22 nt, Human
ugcuggggacggggggccccag

SEQ ID NO: 2513850 - RNA, 18 nt, Human
ugcuggggcaagucccug

SEQ ID NO: 2513851 - RNA, 23 nt, Human
ugcuggguuggugcacagugauu

SEQ ID NO: 2513852 - RNA, 21 nt, Human
ugcuggguuggugcacaguga

SEQ ID NO: 2513853 - RNA, 19 nt, Human
ugcuggguuggugcacagu

SEQ ID NO: 2513854 - RNA, 18 nt, Human
ugcuggguuggugcacag

SEQ ID NO: 2513855 - RNA, 17 nt, Human
ugcuggguuggugcaca

SEQ ID NO: 2513856 - RNA, 16 nt, Human
ugcuggguuggugcac

SEQ ID NO: 2513857 - RNA, 14 nt, Human
ugcuggguuggugc

SEQ ID NO: 2513858 - RNA, 22 nt, Human
ugcuggguggcccauccccccu

SEQ ID NO: 2513859 - RNA, 13 nt, Human
ugcuggguguggc

SEQ ID NO: 2513860 - RNA, 20 nt, Human
ugcuggguggcccauccccc

SEQ ID NO: 2513861 - RNA, 16 nt, Human
ugcuggguggcccauc

SEQ ID NO: 2513862 - RNA, 15 nt, Human
ugcuggguggcccau

SEQ ID NO: 2513863 - RNA, 14 nt, Human
ugcuggguggccca

SEQ ID NO: 2513864 - RNA, 13 nt, Human
ugcuggguggccc

SEQ ID NO: 2513865 - RNA, 16 nt, Human
ugcuggguaaacugug

SEQ ID NO: 2513866 - RNA, 17 nt, Human
ugcugguguccugacca

SEQ ID NO: 2513867 - RNA, 16 nt, Human
ugcugguguccugacc

SEQ ID NO: 2513868 - RNA, 15 nt, Human
ugcugguguccugac

SEQ ID NO: 2513869 - RNA, 14 nt, Human
ugcugguguccuga

SEQ ID NO: 2513870 - RNA, 17 nt, Human
ugcuggucacagccucc

SEQ ID NO: 2513871 - RNA, 16 nt, Human
ugcuggucacagccuc

SEQ ID NO: 2513872 - RNA, 22 nt, Human
ugcugguaauuuguaucugaag

SEQ ID NO: 2513873 - RNA, 16 nt, Human
ugcugguccgugggac

SEQ ID NO: 2513874 - RNA, 13 nt, Human
ugcugguccgugg

SEQ ID NO: 2513875 - RNA, 20 nt, Human
ugcuggucacagccuccucu

SEQ ID NO: 2513876 - RNA, 19 nt, Human
ugcuggucacagccuccuc

SEQ ID NO: 2513877 - RNA, 16 nt, Human
ugcuggucacugccau

SEQ ID NO: 2513878 - RNA, 16 nt, Human
ugcuguuaucccugcc

SEQ ID NO: 2513879 - RNA, 21 nt, Human
ugcuguguuugagcucugcag

SEQ ID NO: 2513880 - RNA, 15 nt, Human
ugcuguguuugagcu

SEQ ID NO: 2513881 - RNA, 22 nt, Human
ugcuguucucuugggaacugaa

SEQ ID NO: 2513882 - RNA, 17 nt, Human
ugcuguggugugucccc

SEQ ID NO: 2513883 - RNA, 23 nt, Human
ugcuguggugugucccccucugu

SEQ ID NO: 2513884 - RNA, 12 nt, Human
ugcuguguaaag

SEQ ID NO: 2513885 - RNA, 17 nt, Human
ugcuguguaaaguuagu

SEQ ID NO: 2513886 - RNA, 15 nt, Human
ugcuguguaaaguua

SEQ ID NO: 2513887 - RNA, 14 nt, Human
ugcuguguaaaguu

SEQ ID NO: 2513888 - RNA, 13 nt, Human
ugcuguguaaagu

SEQ ID NO: 2513889 - RNA, 16 nt, Human
ugcuguguaucugaua

SEQ ID NO: 2513890 - RNA, 15 nt, Human
ugcuguguaucugau

SEQ ID NO: 2513891 - RNA, 18 nt, Human
ugcuguguuaaauaaacc

SEQ ID NO: 2513892 - RNA, 11 nt, Human
ugcuguguuaa

SEQ ID NO: 2513893 - RNA, 14 nt, Human
ugcugugugguuug

SEQ ID NO: 2513894 - RNA, 11 nt, Human
ugcuguguggu

SEQ ID NO: 2513895 - RNA, 13 nt, Human
ugcugugugccuu

SEQ ID NO: 2513896 - RNA, 21 nt, Human
ugcuguguaucugauagcucu

SEQ ID NO: 2513897 - RNA, 21 nt, Human
ugcugugggugauauggacag

SEQ ID NO: 2513898 - RNA, 23 nt, Human
ugcuguggggcugguagcucagg

SEQ ID NO: 2513899 - RNA, 18 nt, Human
ugcuguggggcugguagc

SEQ ID NO: 2513900 - RNA, 16 nt, Human
ugcuguggggcuggua

SEQ ID NO: 2513901 - RNA, 15 nt, Human
ugcuguggugugucc

SEQ ID NO: 2513902 - RNA, 16 nt, Human
ugcugugguguguccc

SEQ ID NO: 2513903 - RNA, 22 nt, Human
ugcugugggaacgagaggggaa

SEQ ID NO: 2513904 - RNA, 19 nt, Human
ugcugugggaacgagaggg

SEQ ID NO: 2513905 - RNA, 17 nt, Human
ugcugugggaacgagag

SEQ ID NO: 2513906 - RNA, 14 nt, Human
ugcugugggaacga

SEQ ID NO: 2513907 - RNA, 12 nt, Human
ugcugugggaac

SEQ ID NO: 2513908 - RNA, 18 nt, Human
ugcugguuuuucaguuuu

SEQ ID NO: 2513909 - RNA, 16 nt, Human
ugcugguuuuucaguu

SEQ ID NO: 2513910 - RNA, 20 nt, Human
ugcuguaaauaaaugcuuua

SEQ ID NO: 2513911 - RNA, 20 nt, Human
ugcugguuuuccuaaaugca

SEQ ID NO: 2513912 - RNA, 17 nt, Human
ugcuguaaaaacugugg

SEQ ID NO: 2513913 - RNA, 13 nt, Human
ugcugguuuuagu

SEQ ID NO: 2513914 - RNA, 15 nt, Human
ugcugguugcugugu

SEQ ID NO: 2513915 - RNA, 14 nt, Human
ugcugguugcugug

SEQ ID NO: 2513916 - RNA, 13 nt, Human
ugcugguugcugu

SEQ ID NO: 2513917 - RNA, 22 nt, Human
ugcugguguccugaccacccuc

SEQ ID NO: 2513918 - RNA, 17 nt, Human
ugcugguugcugugugg

SEQ ID NO: 2513919 - RNA, 16 nt, Human
ugcugguugcugugug

SEQ ID NO: 2513920 - RNA, 23 nt, Human
ugcugguugucauuuuugcagua

SEQ ID NO: 2513921 - RNA, 15 nt, Human
ugcugguuuuucagu

SEQ ID NO: 2513922 - RNA, 12 nt, Human
ugcugguuuuuc

SEQ ID NO: 2513923 - RNA, 14 nt, Human
ugcugguuuuccua

SEQ ID NO: 2513924 - RNA, 22 nt, Human
ugcugguuuuccuaaaugcagu

SEQ ID NO: 2513925 - RNA, 15 nt, Human
ugcugguuuuccuaa

SEQ ID NO: 2513926 - RNA, 15 nt, Human
ugccucuaccugaca

SEQ ID NO: 2513927 - RNA, 17 nt, Human
ugccucuaccugacacu

SEQ ID NO: 2513928 - RNA, 23 nt, Human
ugccucgggaaccucacucuugc

SEQ ID NO: 2513929 - RNA, 18 nt, Human
ugccucgggaaccucacu

SEQ ID NO: 2513930 - RNA, 24 nt, Human
ugccucggcuuuucucagcuggau

SEQ ID NO: 2513931 - RNA, 22 nt, Human
ugccucggcuccugcugcacca

SEQ ID NO: 2513932 - RNA, 21 nt, Human
ugccucggcuccugcugcacc

SEQ ID NO: 2513933 - RNA, 20 nt, Human
ugccucggcuccugcugcac

SEQ ID NO: 2513934 - RNA, 20 nt, Human
ugccucggcuuuucucagcu

SEQ ID NO: 2513935 - RNA, 21 nt, Human
ugccucggcuuuucucagcug

SEQ ID NO: 2513936 - RNA, 20 nt, Human
ugccuugcauaauggucaga

SEQ ID NO: 2513937 - RNA, 24 nt, Human
ugccucgggaaccucacucuugcc

SEQ ID NO: 2513938 - RNA, 23 nt, Human
ugccucuaccugacacucccuug

SEQ ID NO: 2513939 - RNA, 13 nt, Human
ugccuuggcucag

SEQ ID NO: 2513940 - RNA, 16 nt, Human
ugccuuggcucagaca

SEQ ID NO: 2513941 - RNA, 17 nt, Human
ugccuuggcucagacau

SEQ ID NO: 2513942 - RNA, 19 nt, Human
ugccuuggcucagacaugu

SEQ ID NO: 2513943 - RNA, 20 nt, Human
ugccuuggagggucccaagc

SEQ ID NO: 2513944 - RNA, 19 nt, Human
ugccuuggagggucccaag

SEQ ID NO: 2513945 - RNA, 21 nt, Human
ugccuuggagggucccaagcu

SEQ ID NO: 2513946 - RNA, 18 nt, Human
ugccuuggaaguugcaug

SEQ ID NO: 2513947 - RNA, 22 nt, Human
ugcgcaggcuggcccugcccug

SEQ ID NO: 2513948 - RNA, 23 nt, Human
ugcgcaggcuggcccugcccugg

SEQ ID NO: 2513949 - RNA, 21 nt, Human
ugcgcaggcuggcccugcccu

SEQ ID NO: 2513950 - RNA, 11 nt, Human
ugccuugggcu

SEQ ID NO: 2513951 - RNA, 15 nt, Human
ugccuugggcugcuc

SEQ ID NO: 2513952 - RNA, 22 nt, Human
ugcgcucagggccaugcugagg

SEQ ID NO: 2513953 - RNA, 21 nt, Human
ugcgcucagggccaugcugag

SEQ ID NO: 2513954 - RNA, 19 nt, Human
ugcgcucagggccaugcug

SEQ ID NO: 2513955 - RNA, 15 nt, Human
ugcgcucagggccau

SEQ ID NO: 2513956 - RNA, 14 nt, Human
ugcgcucagggcca

SEQ ID NO: 2513957 - RNA, 13 nt, Human
ugcgcucagggcc

SEQ ID NO: 2513958 - RNA, 17 nt, Human
ugcgcugacaaccaccg

SEQ ID NO: 2513959 - RNA, 23 nt, Human
ugcgcugacaaccaccgcucccc

SEQ ID NO: 2513960 - RNA, 17 nt, Human
ugcgcgcacaauaguaa

SEQ ID NO: 2513961 - RNA, 23 nt, Human
ugcgcucagggccaugcugaggc

SEQ ID NO: 2513962 - RNA, 20 nt, Human
ugcgcucuagccugggcaac

SEQ ID NO: 2513963 - RNA, 23 nt, Human
ugcgcauucucauggagaaguua

SEQ ID NO: 2513964 - RNA, 19 nt, Human
ugcgcauucucauggagaa

SEQ ID NO: 2513965 - RNA, 17 nt, Human
ugcgcauucucauggag

SEQ ID NO: 2513966 - RNA, 17 nt, Human
ugcgccaccgcccagag

SEQ ID NO: 2513967 - RNA, 13 nt, Human
ugcgcauucucau

SEQ ID NO: 2513968 - RNA, 19 nt, Human
ugcgcaggcuggcccugcc

SEQ ID NO: 2513969 - RNA, 13 nt, Human
ugccuuggcuuca

SEQ ID NO: 2513970 - RNA, 23 nt, Human
ugcgcgugcacguggagagcugg

SEQ ID NO: 2513971 - RNA, 20 nt, Human
ugcgccacuacacuccagcc

SEQ ID NO: 2513972 - RNA, 19 nt, Human
ugcguguguccaugugugu

SEQ ID NO: 2513973 - RNA, 24 nt, Human
ugcguguguagaguuaagaagcug

SEQ ID NO: 2513974 - RNA, 17 nt, Human
ugcguguguccaugugu

SEQ ID NO: 2513975 - RNA, 16 nt, Human
ugcguguuugcacguu

SEQ ID NO: 2513976 - RNA, 14 nt, Human
ugcguguuugcacg

SEQ ID NO: 2513977 - RNA, 13 nt, Human
ugcguuacuaauu

SEQ ID NO: 2513978 - RNA, 21 nt, Human
ugcguguguagaguuaagaag

SEQ ID NO: 2513979 - RNA, 20 nt, Human
ugcguguguagaguuaagaa

SEQ ID NO: 2513980 - RNA, 19 nt, Human
ugcguguguagaguuaaga

SEQ ID NO: 2513981 - RNA, 14 nt, Human
ugcguguguagagu

SEQ ID NO: 2513982 - RNA, 15 nt, Human
ugcggaaucagcuuc

SEQ ID NO: 2513983 - RNA, 12 nt, Human
ugcguguguaga

SEQ ID NO: 2513984 - RNA, 15 nt, Human
ugcggacaaguuuua

SEQ ID NO: 2513985 - RNA, 14 nt, Human
ugcggaaucagcuu

SEQ ID NO: 2513986 - RNA, 18 nt, Human
ugcgugugcgugcaugug

SEQ ID NO: 2513987 - RNA, 14 nt, Human
ugcgcuugcuuuuc

SEQ ID NO: 2513988 - RNA, 18 nt, Human
ugcgcuuuugcuggucac

SEQ ID NO: 2513989 - RNA, 17 nt, Human
ugcgcuuuugcugguca

SEQ ID NO: 2513990 - RNA, 14 nt, Human
ugcuaaaccuuagu

SEQ ID NO: 2513991 - RNA, 13 nt, Human
ugcuaaaccuuag

SEQ ID NO: 2513992 - RNA, 21 nt, Human
ugcuaaaccuuaguacugagu

SEQ ID NO: 2513993 - RNA, 19 nt, Human
ugcuaaaccuuaguacuga

SEQ ID NO: 2513994 - RNA, 17 nt, Human
ugcguuccaugaugcug

SEQ ID NO: 2513995 - RNA, 13 nt, Human
ugcguuuuggaag

SEQ ID NO: 2513996 - RNA, 17 nt, Human
ugcuaaaaaugggacuu

SEQ ID NO: 2513997 - RNA, 15 nt, Human
ugcuaaaaaugggac

SEQ ID NO: 2513998 - RNA, 12 nt, Human
ugcuaaaaaugg

SEQ ID NO: 2513999 - RNA, 19 nt, Human
ugcguuagaaugaggagga

SEQ ID NO: 2514000 - RNA, 23 nt, Human
ugcuaaccacgucugucuucaca

SEQ ID NO: 2514001 - RNA, 20 nt, Human
ugcuaacuagcuuggaaacu

SEQ ID NO: 2514002 - RNA, 22 nt, Human
ugcuaagaagcgagcacugacc

SEQ ID NO: 2514003 - RNA, 17 nt, Human
ugcuaacuuggagcccc

SEQ ID NO: 2514004 - RNA, 19 nt, Human
ugcuaacuuggagccccag

SEQ ID NO: 2514005 - RNA, 22 nt, Human
ugcuaacuagcuuggaaacugg

SEQ ID NO: 2514006 - RNA, 19 nt, Human
ugcuacuuaauuccuuucu

SEQ ID NO: 2514007 - RNA, 22 nt, Human
ugcuacugucucacugaaacau

SEQ ID NO: 2514008 - RNA, 18 nt, Human
ugcuacuuugccuuuugc

SEQ ID NO: 2514009 - RNA, 17 nt, Human
ugcuacuuugccuuuug

SEQ ID NO: 2514010 - RNA, 22 nt, Human
ugcuacuuaauuccuuucucau

SEQ ID NO: 2514011 - RNA, 13 nt, Human
ugcuacuuugccu

SEQ ID NO: 2514012 - RNA, 22 nt, Human
ugcuacuguccuacccacccuc

SEQ ID NO: 2514013 - RNA, 21 nt, Human
ugcuacuguccuacccacccu

SEQ ID NO: 2514014 - RNA, 17 nt, Human
ugcuaagaauauuugaa

SEQ ID NO: 2514015 - RNA, 21 nt, Human
ugcuaagaauauuugaaugua

SEQ ID NO: 2514016 - RNA, 19 nt, Human
ugcuacgugugauuuuucu

SEQ ID NO: 2514017 - RNA, 22 nt, Human
ugcuaagaauauuugaauguau

SEQ ID NO: 2514018 - RNA, 14 nt, Human
ugcuacuacaaaaa

SEQ ID NO: 2514019 - RNA, 15 nt, Human
ugcuacucuguuccu

SEQ ID NO: 2514020 - RNA, 16 nt, Human
ugcuacucuguuccuu

SEQ ID NO: 2514021 - RNA, 15 nt, Human
ugcuacugccaaccu

SEQ ID NO: 2514022 - RNA, 14 nt, Human
ugcuacugccaacc

SEQ ID NO: 2514023 - RNA, 20 nt, Human
ugcuacugauuguuucauug

SEQ ID NO: 2514024 - RNA, 14 nt, Human
ugcuacugauuguu

SEQ ID NO: 2514025 - RNA, 12 nt, Human
ugcucuccucuu

SEQ ID NO: 2514026 - RNA, 22 nt, Human
ugcucucccucuucucaagugc

SEQ ID NO: 2514027 - RNA, 21 nt, Human
ugcucucccucuucucaagug

SEQ ID NO: 2514028 - RNA, 20 nt, Human
ugcucucccgguucuuccag

SEQ ID NO: 2514029 - RNA, 20 nt, Human
ugcucuccccugcccugcug

SEQ ID NO: 2514030 - RNA, 23 nt, Human
ugcucuccgaccagacaccuuga

SEQ ID NO: 2514031 - RNA, 16 nt, Human
ugcucuagugccuucu

SEQ ID NO: 2514032 - RNA, 14 nt, Human
ugcucuagugccuu

SEQ ID NO: 2514033 - RNA, 16 nt, Human
ugcucuccccugcccu

SEQ ID NO: 2514034 - RNA, 17 nt, Human
ugcucuccccugcccug

SEQ ID NO: 2514035 - RNA, 17 nt, Human
ugcucuugaugccuggc

SEQ ID NO: 2514036 - RNA, 18 nt, Human
ugcucuuucaucucugcu

SEQ ID NO: 2514037 - RNA, 18 nt, Human
ugcucuuguccuagcuug

SEQ ID NO: 2514038 - RNA, 19 nt, Human
ugcucuuguccuagcuugg

SEQ ID NO: 2514039 - RNA, 22 nt, Human
ugcucauauugugauucugccu

SEQ ID NO: 2514040 - RNA, 23 nt, Human
ugcucauauugugauucugccuu

SEQ ID NO: 2514041 - RNA, 22 nt, Human
ugcucaguuguagaauguauug

SEQ ID NO: 2514042 - RNA, 21 nt, Human
ugcucauauugugauucugcc

SEQ ID NO: 2514043 - RNA, 16 nt, Human
ugcucauaacggauca

SEQ ID NO: 2514044 - RNA, 21 nt, Human
ugcucaguuguagaauguauu

SEQ ID NO: 2514045 - RNA, 20 nt, Human
ugcucaguuguagaauguau

SEQ ID NO: 2514046 - RNA, 14 nt, Human
ugcucauaacggau

SEQ ID NO: 2514047 - RNA, 19 nt, Human
ugcucaguuguagaaugua

SEQ ID NO: 2514048 - RNA, 18 nt, Human
ugcucaguuguagaaugu

SEQ ID NO: 2514049 - RNA, 17 nt, Human
ugcucaguuguagaaug

SEQ ID NO: 2514050 - RNA, 16 nt, Human
ugcucaguuguagaau

SEQ ID NO: 2514051 - RNA, 15 nt, Human
ugcucaguuguagaa

SEQ ID NO: 2514052 - RNA, 13 nt, Human
ugcucaguuguag

SEQ ID NO: 2514053 - RNA, 18 nt, Human
ugcucaguucagaaucac

SEQ ID NO: 2514054 - RNA, 17 nt, Human
ugcucaguucagaauca

SEQ ID NO: 2514055 - RNA, 23 nt, Human
ugcucaguucagaaucacuucug

SEQ ID NO: 2514056 - RNA, 19 nt, Human
ugcucaggcuugaaaugca

SEQ ID NO: 2514057 - RNA, 23 nt, Human
ugcucgggcccaggccaucuucc

SEQ ID NO: 2514058 - RNA, 16 nt, Human
ugcucgggcccaggcc

SEQ ID NO: 2514059 - RNA, 15 nt, Human
ugcucgggcccaggc

SEQ ID NO: 2514060 - RNA, 14 nt, Human
ugcucgggcccagg

SEQ ID NO: 2514061 - RNA, 19 nt, Human
ugcucgcuguugcugaaua

SEQ ID NO: 2514062 - RNA, 15 nt, Human
ugcucggccgucuuc

SEQ ID NO: 2514063 - RNA, 13 nt, Human
ugcucuagugccu

SEQ ID NO: 2514064 - RNA, 13 nt, Human
ugcucagacagaa

SEQ ID NO: 2514065 - RNA, 15 nt, Human
ugcucaggagcccug

SEQ ID NO: 2514066 - RNA, 21 nt, Human
ugcucacuaccuccucaggga

SEQ ID NO: 2514067 - RNA, 20 nt, Human
ugcucacuaccuccucaggg

SEQ ID NO: 2514068 - RNA, 18 nt, Human
ugcucacuaccuccucag

SEQ ID NO: 2514069 - RNA, 17 nt, Human
ugcucacuaccuccuca

SEQ ID NO: 2514070 - RNA, 13 nt, Human
ugcucacuaccuc

SEQ ID NO: 2514071 - RNA, 23 nt, Human
ugcucaccuggggugugggaggc

SEQ ID NO: 2514072 - RNA, 17 nt, Human
ugcucacauaucuguca

SEQ ID NO: 2514073 - RNA, 19 nt, Human
ugcuaggcgagugccagga

SEQ ID NO: 2514074 - RNA, 12 nt, Human
ugcucaccuggg

SEQ ID NO: 2514075 - RNA, 13 nt, Human
ugcucaccugggg

SEQ ID NO: 2514076 - RNA, 14 nt, Human
ugcucaccuggggu

SEQ ID NO: 2514077 - RNA, 22 nt, Human
ugcucaccuggggugugggagg

SEQ ID NO: 2514078 - RNA, 19 nt, Human
ugcucaggagcccugggag

SEQ ID NO: 2514079 - RNA, 18 nt, Human
ugcucaggagcccuggga

SEQ ID NO: 2514080 - RNA, 20 nt, Human
ugcucaggagcccugggagg

SEQ ID NO: 2514081 - RNA, 14 nt, Human
ugcucagaccagcu

SEQ ID NO: 2514082 - RNA, 13 nt, Human
ugcuagaacuccc

SEQ ID NO: 2514083 - RNA, 14 nt, Human
ugcuagaacucccu

SEQ ID NO: 2514084 - RNA, 15 nt, Human
ugcuagaacucccuu

SEQ ID NO: 2514085 - RNA, 17 nt, Human
ugcuagaacucccuuuc

SEQ ID NO: 2514086 - RNA, 20 nt, Human
ugcuaggaacacuccuucac

SEQ ID NO: 2514087 - RNA, 21 nt, Human
ugcuaggaacacuccuucaca

SEQ ID NO: 2514088 - RNA, 22 nt, Human
ugcuaggaacacuccuucacag

SEQ ID NO: 2514089 - RNA, 18 nt, Human
ugcuaggcgagugccagg

SEQ ID NO: 2514090 - RNA, 17 nt, Human
ugcuaggcgagugccag

SEQ ID NO: 2514091 - RNA, 17 nt, Human
ugccccuccucucugcc

SEQ ID NO: 2514092 - RNA, 18 nt, Human
ugccccuccucucugccc

SEQ ID NO: 2514093 - RNA, 16 nt, Human
ugccccucccuucaac

SEQ ID NO: 2514094 - RNA, 15 nt, Human
ugccccucccuucaa

SEQ ID NO: 2514095 - RNA, 13 nt, Human
ugccccagccaga

SEQ ID NO: 2514096 - RNA, 12 nt, Human
ugccccagccag

SEQ ID NO: 2514097 - RNA, 16 nt, Human
ugccccagaggccucu

SEQ ID NO: 2514098 - RNA, 13 nt, Human
ugccccagaggcc

SEQ ID NO: 2514099 - RNA, 16 nt, Human
ugccccagcccaaguc

SEQ ID NO: 2514100 - RNA, 13 nt, Human
ugccccagcccaa

SEQ ID NO: 2514101 - RNA, 13 nt, Human
ugccccagcucug

SEQ ID NO: 2514102 - RNA, 14 nt, Human
ugccccagcucugg

SEQ ID NO: 2514103 - RNA, 16 nt, Human
ugccccagcucuggcu

SEQ ID NO: 2514104 - RNA, 18 nt, Human
ugccccagcucuggcuuc

SEQ ID NO: 2514105 - RNA, 13 nt, Human
ugccccucccuuc

SEQ ID NO: 2514106 - RNA, 20 nt, Human
ugccccucuccaggcgccgg

SEQ ID NO: 2514107 - RNA, 17 nt, Human
ugccccagcccaagucc

SEQ ID NO: 2514108 - RNA, 19 nt, Human
ugccccuccucucugcccu

SEQ ID NO: 2514109 - RNA, 20 nt, Human
ugccccuccucucugcccua

SEQ ID NO: 2514110 - RNA, 16 nt, Human
ugccccuggcagcccc

SEQ ID NO: 2514111 - RNA, 23 nt, Human
ugccccugagcaaugucugugcu

SEQ ID NO: 2514112 - RNA, 20 nt, Human
ugcccgagcuggugcauuac

SEQ ID NO: 2514113 - RNA, 16 nt, Human
ugcccgagcuggugca

SEQ ID NO: 2514114 - RNA, 19 nt, Human
ugcccgagcuggugcauua

SEQ ID NO: 2514115 - RNA, 13 nt, Human
ugcccgcucccag

SEQ ID NO: 2514116 - RNA, 15 nt, Human
ugcccgcucccagug

SEQ ID NO: 2514117 - RNA, 14 nt, Human
ugcccgcucccagu

SEQ ID NO: 2514118 - RNA, 21 nt, Human
ugcccggagauuggacggccu

SEQ ID NO: 2514119 - RNA, 14 nt, Human
ugcccgagcuggug

SEQ ID NO: 2514120 - RNA, 13 nt, Human
ugcccgagcuggu

SEQ ID NO: 2514121 - RNA, 23 nt, Human
ugccccugcugccuccccaaccc

SEQ ID NO: 2514122 - RNA, 13 nt, Human
ugccccugcugcc

SEQ ID NO: 2514123 - RNA, 14 nt, Human
ugccccugcugccu

SEQ ID NO: 2514124 - RNA, 16 nt, Human
ugccccugcugccucc

SEQ ID NO: 2514125 - RNA, 17 nt, Human
ugccccugcugccuccc

SEQ ID NO: 2514126 - RNA, 14 nt, Human
ugcccggcugcgga

SEQ ID NO: 2514127 - RNA, 12 nt, Human
ugcccggcugcg

SEQ ID NO: 2514128 - RNA, 18 nt, Human
ugcccggcgcccucuguc

SEQ ID NO: 2514129 - RNA, 16 nt, Human
ugcccggcgcccucug

SEQ ID NO: 2514130 - RNA, 17 nt, Human
ugcccgcucccaguguc

SEQ ID NO: 2514131 - RNA, 15 nt, Human
ugcccggcgcccucu

SEQ ID NO: 2514132 - RNA, 18 nt, Human
ugcccggauucugggagg

SEQ ID NO: 2514133 - RNA, 22 nt, Human
ugcccggauucugggaggaagc

SEQ ID NO: 2514134 - RNA, 23 nt, Human
ugcccggagauuggacggccuga

SEQ ID NO: 2514135 - RNA, 15 nt, Human
ugcccggauucuggg

SEQ ID NO: 2514136 - RNA, 16 nt, Human
ugcccggauucuggga

SEQ ID NO: 2514137 - RNA, 17 nt, Human
ugcccggauucugggag

SEQ ID NO: 2514138 - RNA, 19 nt, Human
ugccccaccuuuauuaaaa

SEQ ID NO: 2514139 - RNA, 16 nt, Human
ugccccaaccugcuga

SEQ ID NO: 2514140 - RNA, 17 nt, Human
ugccccaacccccagca

SEQ ID NO: 2514141 - RNA, 20 nt, Human
ugccccaacccccagcaccc

SEQ ID NO: 2514142 - RNA, 16 nt, Human
ugccccaacuccugga

SEQ ID NO: 2514143 - RNA, 13 nt, Human
ugccccaacuccu

SEQ ID NO: 2514144 - RNA, 15 nt, Human
ugccccaacuccugg

SEQ ID NO: 2514145 - RNA, 20 nt, Human
ugccccaccccuccccauua

SEQ ID NO: 2514146 - RNA, 21 nt, Human
ugccccaccuuuauuaaaauc

SEQ ID NO: 2514147 - RNA, 13 nt, Human
ugccccagagcug

SEQ ID NO: 2514148 - RNA, 14 nt, Human
ugccccagagcugu

SEQ ID NO: 2514149 - RNA, 15 nt, Human
ugccccagagcuguu

SEQ ID NO: 2514150 - RNA, 17 nt, Human
ugccccagagcuguuua

SEQ ID NO: 2514151 - RNA, 23 nt, Human
ugccccagagcuguuuauggccu

SEQ ID NO: 2514152 - RNA, 17 nt, Human
ugcccauuccucaccuu

SEQ ID NO: 2514153 - RNA, 14 nt, Human
ugccccaaacaaau

SEQ ID NO: 2514154 - RNA, 15 nt, Human
ugcccauuccucacc

SEQ ID NO: 2514155 - RNA, 16 nt, Human
ugccccaacccccagc

SEQ ID NO: 2514156 - RNA, 15 nt, Human
ugccccaacccccag

SEQ ID NO: 2514157 - RNA, 20 nt, Human
ugccccaaacaaauaugcaa

SEQ ID NO: 2514158 - RNA, 20 nt, Human
ugcccaggcuggcgugcagu

SEQ ID NO: 2514159 - RNA, 23 nt, Human
ugcccaugggcacugcugggugg

SEQ ID NO: 2514160 - RNA, 22 nt, Human
ugcccaugggcacugcugggug

SEQ ID NO: 2514161 - RNA, 21 nt, Human
ugcccaugucgcgcucagcau

SEQ ID NO: 2514162 - RNA, 19 nt, Human
ugcccaggcuggcgugcag

SEQ ID NO: 2514163 - RNA, 18 nt, Human
ugcccaggcuggcgugca

SEQ ID NO: 2514164 - RNA, 11 nt, Human
ugcccagagau

SEQ ID NO: 2514165 - RNA, 12 nt, Human
ugcccagagaug

SEQ ID NO: 2514166 - RNA, 16 nt, Human
ugcccagagaugccuc

SEQ ID NO: 2514167 - RNA, 17 nt, Human
ugcccagagaugccucc

SEQ ID NO: 2514168 - RNA, 18 nt, Human
ugcccagagaugccucca

SEQ ID NO: 2514169 - RNA, 19 nt, Human
ugcccagagaugccuccac

SEQ ID NO: 2514170 - RNA, 20 nt, Human
ugcccagagaugccuccacc

SEQ ID NO: 2514171 - RNA, 21 nt, Human
ugcccagagaugccuccaccg

SEQ ID NO: 2514172 - RNA, 22 nt, Human
ugcccagagaugccuccaccgc

SEQ ID NO: 2514173 - RNA, 15 nt, Human
ugcccagagauggga

SEQ ID NO: 2514174 - RNA, 18 nt, Human
ugcccagagggcccaggc

SEQ ID NO: 2514175 - RNA, 19 nt, Human
ugcccagaaugaggcugcu

SEQ ID NO: 2514176 - RNA, 15 nt, Human
ugcccagaccacacg

SEQ ID NO: 2514177 - RNA, 18 nt, Human
ugcccagaccccucuggc

SEQ ID NO: 2514178 - RNA, 19 nt, Human
ugcccagaccccucuggcc

SEQ ID NO: 2514179 - RNA, 22 nt, Human
ugcccagaccccucuggccagg

SEQ ID NO: 2514180 - RNA, 18 nt, Human
ugccaggccagccuccga

SEQ ID NO: 2514181 - RNA, 17 nt, Human
ugccaggccagccuccg

SEQ ID NO: 2514182 - RNA, 16 nt, Human
ugccaggccagccucc

SEQ ID NO: 2514183 - RNA, 15 nt, Human
ugccaggccagccuc

SEQ ID NO: 2514184 - RNA, 14 nt, Human
ugccaggccagccu

SEQ ID NO: 2514185 - RNA, 20 nt, Human
ugccaggcuagagugcagug

SEQ ID NO: 2514186 - RNA, 11 nt, Human
ugccaggcccg

SEQ ID NO: 2514187 - RNA, 14 nt, Human
ugccaggcccgggg

SEQ ID NO: 2514188 - RNA, 15 nt, Human
ugccuaacaccagcg

SEQ ID NO: 2514189 - RNA, 14 nt, Human
ugccuaacaccagc

SEQ ID NO: 2514190 - RNA, 19 nt, Human
ugccucaagccccagagug

SEQ ID NO: 2514191 - RNA, 15 nt, Human
ugccucaagagaagg

SEQ ID NO: 2514192 - RNA, 14 nt, Human
ugccucaagagaag

SEQ ID NO: 2514193 - RNA, 22 nt, Human
ugccuauucccacaccuccaca

SEQ ID NO: 2514194 - RNA, 13 nt, Human
ugccuauucccac

SEQ ID NO: 2514195 - RNA, 20 nt, Human
ugccuccuccuucccaaagg

SEQ ID NO: 2514196 - RNA, 18 nt, Human
ugccuccugccugccccu

SEQ ID NO: 2514197 - RNA, 14 nt, Human
ugccuccugccugc

SEQ ID NO: 2514198 - RNA, 16 nt, Human
ugccuccucuucaacu

SEQ ID NO: 2514199 - RNA, 14 nt, Human
ugccuccucuucaa

SEQ ID NO: 2514200 - RNA, 19 nt, Human
ugccucggcuccugcugca

SEQ ID NO: 2514201 - RNA, 18 nt, Human
ugccucggcuccugcugc

SEQ ID NO: 2514202 - RNA, 17 nt, Human
ugccucggcuccugcug

SEQ ID NO: 2514203 - RNA, 16 nt, Human
ugccucggcuccugcu

SEQ ID NO: 2514204 - RNA, 15 nt, Human
ugccucggcuccugc

SEQ ID NO: 2514205 - RNA, 14 nt, Human
ugccucggcuccug

SEQ ID NO: 2514206 - RNA, 13 nt, Human
ugccucggcuccu

SEQ ID NO: 2514207 - RNA, 20 nt, Human
ugccucggccucccaaagug

SEQ ID NO: 2514208 - RNA, 13 nt, Human
ugccuccugugua

SEQ ID NO: 2514209 - RNA, 12 nt, Human
ugccuccuccuu

SEQ ID NO: 2514210 - RNA, 14 nt, Human
ugccucacagcugg

SEQ ID NO: 2514211 - RNA, 23 nt, Human
ugccucaaugugaccagggguga

SEQ ID NO: 2514212 - RNA, 19 nt, Human
ugccucaaugugaccaggg

SEQ ID NO: 2514213 - RNA, 18 nt, Human
ugccucaaugugaccagg

SEQ ID NO: 2514214 - RNA, 24 nt, Human
ugccucaaugugaaucagacccua

SEQ ID NO: 2514215 - RNA, 15 nt, Human
ugccucaaugccagu

SEQ ID NO: 2514216 - RNA, 13 nt, Human
ugccucaaugcca

SEQ ID NO: 2514217 - RNA, 16 nt, Human
ugccucaaugccagua

SEQ ID NO: 2514218 - RNA, 22 nt, Human
ugccucaaugugaaucagaccc

SEQ ID NO: 2514219 - RNA, 23 nt, Human
ugccucaaugugaaucagacccu

SEQ ID NO: 2514220 - RNA, 20 nt, Human
ugcccugcccaccuggccuc

SEQ ID NO: 2514221 - RNA, 16 nt, Human
ugcccugcccaccugg

SEQ ID NO: 2514222 - RNA, 22 nt, Human
ugcccggcgcccucuguccuga

SEQ ID NO: 2514223 - RNA, 21 nt, Human
ugcccggcgcccucuguccug

SEQ ID NO: 2514224 - RNA, 20 nt, Human
ugcccggcuaauuuuuguaa

SEQ ID NO: 2514225 - RNA, 14 nt, Human
ugcccugcccaccu

SEQ ID NO: 2514226 - RNA, 15 nt, Human
ugcccugcccaccug

SEQ ID NO: 2514227 - RNA, 18 nt, Human
ugcccuggcccugaggug

SEQ ID NO: 2514228 - RNA, 21 nt, Human
ugcccgggaaggucaccagca

SEQ ID NO: 2514229 - RNA, 17 nt, Human
ugcccuggcccugaggu

SEQ ID NO: 2514230 - RNA, 12 nt, Human
ugcccuggcugc

SEQ ID NO: 2514231 - RNA, 22 nt, Human
ugcccuggcccugagguguggg

SEQ ID NO: 2514232 - RNA, 11 nt, Human
ugcccuggcug

SEQ ID NO: 2514233 - RNA, 17 nt, Human
ugcccuggcugcugccc

SEQ ID NO: 2514234 - RNA, 16 nt, Human
ugcccuggcugcugcc

SEQ ID NO: 2514235 - RNA, 15 nt, Human
ugcccuggcugcugc

SEQ ID NO: 2514236 - RNA, 14 nt, Human
ugcccuggcugcug

SEQ ID NO: 2514237 - RNA, 13 nt, Human
ugcccugggaggc

SEQ ID NO: 2514238 - RNA, 15 nt, Human
ugcccugggaggcag

SEQ ID NO: 2514239 - RNA, 17 nt, Human
ugcccugggaggcagug

SEQ ID NO: 2514240 - RNA, 18 nt, Human
ugcccugggaggcaguga

SEQ ID NO: 2514241 - RNA, 20 nt, Human
ugcccuggcugcugccccca

SEQ ID NO: 2514242 - RNA, 18 nt, Human
ugcccuggcugcugcccc

SEQ ID NO: 2514243 - RNA, 16 nt, Human
ugcccugggaugucca

SEQ ID NO: 2514244 - RNA, 17 nt, Human
ugcccugguuuccugcc

SEQ ID NO: 2514245 - RNA, 18 nt, Human
ugcccugguuuccugccc

SEQ ID NO: 2514246 - RNA, 17 nt, Human
ugcccuggugcugccac

SEQ ID NO: 2514247 - RNA, 21 nt, Human
ugcccugguccagggaagcug

SEQ ID NO: 2514248 - RNA, 16 nt, Human
ugcccuggugcugcca

SEQ ID NO: 2514249 - RNA, 14 nt, Human
ugcccuggugcugc

SEQ ID NO: 2514250 - RNA, 12 nt, Human
ugcccuggugcu

SEQ ID NO: 2514251 - RNA, 17 nt, Human
ugcccugguagggcagu

SEQ ID NO: 2514252 - RNA, 18 nt, Human
ugcccugguccagggaag

SEQ ID NO: 2514253 - RNA, 19 nt, Human
ugcccugguuuccugcccu

SEQ ID NO: 2514254 - RNA, 20 nt, Human
ugcccugguuuccugcccug

SEQ ID NO: 2514255 - RNA, 23 nt, Human
ugcccugguuuccugcccuggga

SEQ ID NO: 2514256 - RNA, 13 nt, Human
ugcccugggccac

SEQ ID NO: 2514257 - RNA, 17 nt, Human
ugccaccuccccuaucc

SEQ ID NO: 2514258 - RNA, 18 nt, Human
ugccaccuccccuaucca

SEQ ID NO: 2514259 - RNA, 21 nt, Human
ugccaccuccccuauccaccc

SEQ ID NO: 2514260 - RNA, 22 nt, Human
ugccaccuccccuauccaccca

SEQ ID NO: 2514261 - RNA, 14 nt, Human
ugccaccucccuga

SEQ ID NO: 2514262 - RNA, 10 nt, Human
ugccaccugc

SEQ ID NO: 2514263 - RNA, 16 nt, Human
ugccaccuggggcagu

SEQ ID NO: 2514264 - RNA, 17 nt, Human
ugccaccuggggcaguc

SEQ ID NO: 2514265 - RNA, 19 nt, Human
ugccaccuggggcagucac

SEQ ID NO: 2514266 - RNA, 22 nt, Human
ugccaacauugccuauuucagu

SEQ ID NO: 2514267 - RNA, 14 nt, Human
ugccaacauugccu

SEQ ID NO: 2514268 - RNA, 13 nt, Human
ugccaacauugcc

SEQ ID NO: 2514269 - RNA, 12 nt, Human
ugccaacauugc

SEQ ID NO: 2514270 - RNA, 22 nt, Human
ugccaaccauaccuuccuuccc

SEQ ID NO: 2514271 - RNA, 19 nt, Human
ugccaaccauaccuuccuu

SEQ ID NO: 2514272 - RNA, 13 nt, Human
ugccaccuccccu

SEQ ID NO: 2514273 - RNA, 20 nt, Human
ugccacccuggggagaaagu

SEQ ID NO: 2514274 - RNA, 21 nt, Human
ugccaacaguguuaggccugg

SEQ ID NO: 2514275 - RNA, 23 nt, Human
ugccaacacucaagaagcaggcu

SEQ ID NO: 2514276 - RNA, 22 nt, Human
ugccaacacucaagaagcaggc

SEQ ID NO: 2514277 - RNA, 21 nt, Human
ugccaacacucaagaagcagg

SEQ ID NO: 2514278 - RNA, 21 nt, Human
ugccaacaauccuagugcuuu

SEQ ID NO: 2514279 - RNA, 20 nt, Human
ugccaacacucaagaagcag

SEQ ID NO: 2514280 - RNA, 20 nt, Human
ugccaacaauccuagugcuu

SEQ ID NO: 2514281 - RNA, 18 nt, Human
ugccaaauuguaguucuu

SEQ ID NO: 2514282 - RNA, 15 nt, Human
ugccaacaauccuag

SEQ ID NO: 2514283 - RNA, 23 nt, Human
ugccaaauuuuggccaaaguguu

SEQ ID NO: 2514284 - RNA, 22 nt, Human
ugccaggaagccagcaggcucu

SEQ ID NO: 2514285 - RNA, 20 nt, Human
ugccaggaagccagcaggcu

SEQ ID NO: 2514286 - RNA, 16 nt, Human
ugccacuaaauugaca

SEQ ID NO: 2514287 - RNA, 14 nt, Human
ugccaggcauggug

SEQ ID NO: 2514288 - RNA, 22 nt, Human
ugccaggacuccccaggccagg

SEQ ID NO: 2514289 - RNA, 21 nt, Human
ugccaggacuccccaggccag

SEQ ID NO: 2514290 - RNA, 23 nt, Human
ugccaggacuccccaggccaggc

SEQ ID NO: 2514291 - RNA, 16 nt, Human
ugccaggacuccccag

SEQ ID NO: 2514292 - RNA, 12 nt, Human
ugccaggacucc

SEQ ID NO: 2514293 - RNA, 20 nt, Human
ugccaggaccagucaaccug

SEQ ID NO: 2514294 - RNA, 13 nt, Human
ugccaggacacgc

SEQ ID NO: 2514295 - RNA, 22 nt, Human
ugccacguuggagaagcccgug

SEQ ID NO: 2514296 - RNA, 21 nt, Human
ugcauggugccccaggaccag

SEQ ID NO: 2514297 - RNA, 22 nt, Human
ugcauggugccccaggaccagc

SEQ ID NO: 2514298 - RNA, 17 nt, Human
ugcauggugccccagga

SEQ ID NO: 2514299 - RNA, 18 nt, Human
ugcauggugccccaggac

SEQ ID NO: 2514300 - RNA, 19 nt, Human
ugcauggugccccaggacc

SEQ ID NO: 2514301 - RNA, 20 nt, Human
ugcauggugccccaggacca

SEQ ID NO: 2514302 - RNA, 21 nt, Human
ugcauuuggugguuucagaaa

SEQ ID NO: 2514303 - RNA, 16 nt, Human
ugcaugguggcaccag

SEQ ID NO: 2514304 - RNA, 17 nt, Human
ugcaugggugaagggag

SEQ ID NO: 2514305 - RNA, 12 nt, Human
ugcaugggagca

SEQ ID NO: 2514306 - RNA, 22 nt, Human
ugcauggcuccagaaaugucua

SEQ ID NO: 2514307 - RNA, 20 nt, Human
ugcauggcuccagaaauguc

SEQ ID NO: 2514308 - RNA, 19 nt, Human
ugcaucagcugcugaaaca

SEQ ID NO: 2514309 - RNA, 23 nt, Human
ugcauggggugggguagggcuga

SEQ ID NO: 2514310 - RNA, 19 nt, Human
ugcaugggcuaaugaagau

SEQ ID NO: 2514311 - RNA, 16 nt, Human
ugcaugggugaaggga

SEQ ID NO: 2514312 - RNA, 23 nt, Human
ugcauggugcaguugacagcagg

SEQ ID NO: 2514313 - RNA, 13 nt, Human
ugcaucagcugcu

SEQ ID NO: 2514314 - RNA, 18 nt, Human
ugccaaauauguccuggg

SEQ ID NO: 2514315 - RNA, 17 nt, Human
ugccaaauauguccugg

SEQ ID NO: 2514316 - RNA, 14 nt, Human
ugccaaagggaaau

SEQ ID NO: 2514317 - RNA, 18 nt, Human
ugccaaagggaaauauca

SEQ ID NO: 2514318 - RNA, 19 nt, Human
ugccaaaggaugugauaua

SEQ ID NO: 2514319 - RNA, 17 nt, Human
ugccaaaggaugugaua

SEQ ID NO: 2514320 - RNA, 16 nt, Human
ugccaaaggaugugau

SEQ ID NO: 2514321 - RNA, 15 nt, Human
ugccaaaggauguga

SEQ ID NO: 2514322 - RNA, 21 nt, Human
ugccaaagaucacuuguuguu

SEQ ID NO: 2514323 - RNA, 14 nt, Human
ugccaaagaucacu

SEQ ID NO: 2514324 - RNA, 20 nt, Human
ugccaaagcuaggguggccc

SEQ ID NO: 2514325 - RNA, 21 nt, Human
ugccaaagcuaggguggcccu

SEQ ID NO: 2514326 - RNA, 22 nt, Human
ugccaaagcuaggguggcccuu

SEQ ID NO: 2514327 - RNA, 23 nt, Human
ugcauuuggugguuucagaaaug

SEQ ID NO: 2514328 - RNA, 16 nt, Human
ugcauuuggucaagau

SEQ ID NO: 2514329 - RNA, 23 nt, Human
ugccaaacaaaaagguucucagg

SEQ ID NO: 2514330 - RNA, 17 nt, Human
ugccaaaaugcucuagu

SEQ ID NO: 2514331 - RNA, 17 nt, Human
ugccaaacaaaaagguu

SEQ ID NO: 2514332 - RNA, 18 nt, Human
ugccaaaaugcucuagug

SEQ ID NO: 2514333 - RNA, 19 nt, Human
ugccaaaaucauuuuaaug

SEQ ID NO: 2514334 - RNA, 15 nt, Human
ugcauuugucuauuc

SEQ ID NO: 2514335 - RNA, 16 nt, Human
ugcauauuguacacuu

SEQ ID NO: 2514336 - RNA, 15 nt, Human
ugcauauuguacacu

SEQ ID NO: 2514337 - RNA, 14 nt, Human
ugcauauuguacac

SEQ ID NO: 2514338 - RNA, 13 nt, Human
ugcauauuguaca

SEQ ID NO: 2514339 - RNA, 22 nt, Human
ugcauauuccuuucuaucauuu

SEQ ID NO: 2514340 - RNA, 16 nt, Human
ugcauauuccuuucua

SEQ ID NO: 2514341 - RNA, 13 nt, Human
ugcauauuccuuu

SEQ ID NO: 2514342 - RNA, 23 nt, Human
ugcauauucuuauguaugugaaa

SEQ ID NO: 2514343 - RNA, 22 nt, Human
ugcaucaauuuuucuuauuuca

SEQ ID NO: 2514344 - RNA, 16 nt, Human
ugcauauuguauuacu

SEQ ID NO: 2514345 - RNA, 15 nt, Human
ugcauauuguauuac

SEQ ID NO: 2514346 - RNA, 19 nt, Human
ugcauauuguacacuuuuu

SEQ ID NO: 2514347 - RNA, 17 nt, Human
ugcauauuguacacuuu

SEQ ID NO: 2514348 - RNA, 14 nt, Human
ugcauauaacuuau

SEQ ID NO: 2514349 - RNA, 15 nt, Human
ugcauauaacuuaua

SEQ ID NO: 2514350 - RNA, 16 nt, Human
ugcauauaacuuauau

SEQ ID NO: 2514351 - RNA, 22 nt, Human
ugcauaguaccaaucauuuuaa

SEQ ID NO: 2514352 - RNA, 19 nt, Human
ugcauaguucccauguuaa

SEQ ID NO: 2514353 - RNA, 18 nt, Human
ugcauauuauuuuauguu

SEQ ID NO: 2514354 - RNA, 13 nt, Human
ugcauauguuucg

SEQ ID NO: 2514355 - RNA, 19 nt, Human
ugcauauguugaauacuuu

SEQ ID NO: 2514356 - RNA, 21 nt, Human
ugcauaguauuccauugugug

SEQ ID NO: 2514357 - RNA, 14 nt, Human
ugcaguucugaaga

SEQ ID NO: 2514358 - RNA, 12 nt, Human
ugcaguucugaa

SEQ ID NO: 2514359 - RNA, 19 nt, Human
ugcaguucuaguuugcauu

SEQ ID NO: 2514360 - RNA, 18 nt, Human
ugcaguucuaguuugcau

SEQ ID NO: 2514361 - RNA, 20 nt, Human
ugcaguucuaguuugcauuc

SEQ ID NO: 2514362 - RNA, 16 nt, Human
ugcaguugccagucac

SEQ ID NO: 2514363 - RNA, 21 nt, Human
ugcauaguaccaaucauuuua

SEQ ID NO: 2514364 - RNA, 20 nt, Human
ugcauaguaccaaucauuuu

SEQ ID NO: 2514365 - RNA, 20 nt, Human
ugcauaggugaucucauuua

SEQ ID NO: 2514366 - RNA, 19 nt, Human
ugcaguuuaucauucaagu

SEQ ID NO: 2514367 - RNA, 12 nt, Human
ugcaguuuccaa

SEQ ID NO: 2514368 - RNA, 17 nt, Human
ugcaguuuaucauucaa

SEQ ID NO: 2514369 - RNA, 16 nt, Human
ugcaguuuaucauuca

SEQ ID NO: 2514370 - RNA, 12 nt, Human
ugcaguuuauca

SEQ ID NO: 2514371 - RNA, 10 nt, Human
ugcaguuuau

SEQ ID NO: 2514372 - RNA, 19 nt, Human
ugcaguuugagacaggaga

SEQ ID NO: 2514373 - RNA, 21 nt, Human
ugcaguggugcgaucuggguu

SEQ ID NO: 2514374 - RNA, 12 nt, Human
ugcagggccagg

SEQ ID NO: 2514375 - RNA, 21 nt, Human
ugcagggccagaccugccugc

SEQ ID NO: 2514376 - RNA, 21 nt, Human
ugcagggcagucauuggcugu

SEQ ID NO: 2514377 - RNA, 20 nt, Human
ugcaguggugcgaucugggu

SEQ ID NO: 2514378 - RNA, 19 nt, Human
ugcagggauugcugccacu

SEQ ID NO: 2514379 - RNA, 13 nt, Human
ugcagggcaguca

SEQ ID NO: 2514380 - RNA, 14 nt, Human
ugcagggcagucau

SEQ ID NO: 2514381 - RNA, 23 nt, Human
ugcagggagcauggcugugagga

SEQ ID NO: 2514382 - RNA, 24 nt, Human
ugcagggaggagguggcagcccug

SEQ ID NO: 2514383 - RNA, 20 nt, Human
ugcaguucccccaaccucag

SEQ ID NO: 2514384 - RNA, 17 nt, Human
ugcaguucuaguuugca

SEQ ID NO: 2514385 - RNA, 21 nt, Human
ugcaguucccccaaccucaga

SEQ ID NO: 2514386 - RNA, 15 nt, Human
ugcaguucagcacca

SEQ ID NO: 2514387 - RNA, 18 nt, Human
ugcaguucagcaccaccc

SEQ ID NO: 2514388 - RNA, 19 nt, Human
ugcaguucagcaccacccu

SEQ ID NO: 2514389 - RNA, 23 nt, Human
ugcagggccaggacugagccccg

SEQ ID NO: 2514390 - RNA, 15 nt, Human
ugcagggccaggacu

SEQ ID NO: 2514391 - RNA, 13 nt, Human
ugcagggccagga

SEQ ID NO: 2514392 - RNA, 14 nt, Human
ugcagugugaaaag

SEQ ID NO: 2514393 - RNA, 21 nt, Human
ugcaguuacacuaaaagguga

SEQ ID NO: 2514394 - RNA, 22 nt, Human
ugauuuaauaguguuaaucaau

SEQ ID NO: 2514395 - RNA, 16 nt, Human
ugauuuaauguuuuca

SEQ ID NO: 2514396 - RNA, 13 nt, Human
ugauuuaauguuu

SEQ ID NO: 2514397 - RNA, 16 nt, Human
ugcaggccugcucagg

SEQ ID NO: 2514398 - RNA, 21 nt, Human
ugcaggccugcucagggacug

SEQ ID NO: 2514399 - RNA, 20 nt, Human
ugcaggcccuggccuccccu

SEQ ID NO: 2514400 - RNA, 21 nt, Human
ugauuuaauaaaauaauucua

SEQ ID NO: 2514401 - RNA, 20 nt, Human
ugauuuaauaaaauaauucu

SEQ ID NO: 2514402 - RNA, 19 nt, Human
ugauuuaauaaaauaauuc

SEQ ID NO: 2514403 - RNA, 17 nt, Human
ugauuuaauaaaauaau

SEQ ID NO: 2514404 - RNA, 15 nt, Human
ugauuuaauaaaaua

SEQ ID NO: 2514405 - RNA, 14 nt, Human
ugauuuaauaaaau

SEQ ID NO: 2514406 - RNA, 13 nt, Human
ugauuuaauaaaa

SEQ ID NO: 2514407 - RNA, 18 nt, Human
ugauuuaagacacuuuuu

SEQ ID NO: 2514408 - RNA, 21 nt, Human
ugauuuaauaguguuaaucaa

SEQ ID NO: 2514409 - RNA, 20 nt, Human
ugauuuaauaguguuaauca

SEQ ID NO: 2514410 - RNA, 18 nt, Human
ugauuuaauaguguuaau

SEQ ID NO: 2514411 - RNA, 17 nt, Human
ugauuuaauaguguuaa

SEQ ID NO: 2514412 - RNA, 23 nt, Human
ugauuuaauaaaauaauucuaaa

SEQ ID NO: 2514413 - RNA, 22 nt, Human
ugauuuaauaaaauaauucuaa

SEQ ID NO: 2514414 - RNA, 13 nt, Human
ugauuuaauagug

SEQ ID NO: 2514415 - RNA, 15 nt, Human
ugcagggaaaauuau

SEQ ID NO: 2514416 - RNA, 20 nt, Human
ugcagggaaaauuauuugca

SEQ ID NO: 2514417 - RNA, 21 nt, Human
ugcagggaaaauuauuugcau

SEQ ID NO: 2514418 - RNA, 22 nt, Human
ugcagggaaaauuauuugcaua

SEQ ID NO: 2514419 - RNA, 18 nt, Human
ugcaggcuggcaccgccu

SEQ ID NO: 2514420 - RNA, 21 nt, Human
ugcaggcuggcaccgccuucu

SEQ ID NO: 2514421 - RNA, 22 nt, Human
ugcaggcuggcaccgccuucuc

SEQ ID NO: 2514422 - RNA, 23 nt, Human
ugcaggcuggcaccgccuucucu

SEQ ID NO: 2514423 - RNA, 13 nt, Human
ugcagggaguccg

SEQ ID NO: 2514424 - RNA, 14 nt, Human
ugcagggagccgag

SEQ ID NO: 2514425 - RNA, 15 nt, Human
uggcagaguugaaga

SEQ ID NO: 2514426 - RNA, 12 nt, Human
uggcagaggagg

SEQ ID NO: 2514427 - RNA, 12 nt, Human
uggcagacagac

SEQ ID NO: 2514428 - RNA, 22 nt, Human
uggcagagcuuggacuggaugc

SEQ ID NO: 2514429 - RNA, 13 nt, Human
uggcagagcuucu

SEQ ID NO: 2514430 - RNA, 21 nt, Human
uggcagaguggauucuugaac

SEQ ID NO: 2514431 - RNA, 19 nt, Human
uggcagaguugaagacaga

SEQ ID NO: 2514432 - RNA, 17 nt, Human
uggcagaguugaagaca

SEQ ID NO: 2514433 - RNA, 18 nt, Human
uggccagaugcaccagcc

SEQ ID NO: 2514434 - RNA, 17 nt, Human
uggccagaugcaccagc

SEQ ID NO: 2514435 - RNA, 16 nt, Human
uggccaggcugcucuu

SEQ ID NO: 2514436 - RNA, 17 nt, Human
uggccaggcugcucuug

SEQ ID NO: 2514437 - RNA, 19 nt, Human
uggccaggccucuuggcag

SEQ ID NO: 2514438 - RNA, 16 nt, Human
uggccagccuggaucu

SEQ ID NO: 2514439 - RNA, 17 nt, Human
uggccagcccggcuggu

SEQ ID NO: 2514440 - RNA, 16 nt, Human
uggccagcccggcugg

SEQ ID NO: 2514441 - RNA, 13 nt, Human
uggccagccuaca

SEQ ID NO: 2514442 - RNA, 14 nt, Human
uggccagccuggau

SEQ ID NO: 2514443 - RNA, 19 nt, Human
uggccagcccggcugguuu

SEQ ID NO: 2514444 - RNA, 20 nt, Human
uggccagcccggcugguuuu

SEQ ID NO: 2514445 - RNA, 15 nt, Human
uggccagcccggcug

SEQ ID NO: 2514446 - RNA, 14 nt, Human
uggccagcccggcu

SEQ ID NO: 2514447 - RNA, 13 nt, Human
uggccagcccggc

SEQ ID NO: 2514448 - RNA, 12 nt, Human
uggccagcccgg

SEQ ID NO: 2514449 - RNA, 11 nt, Human
uggccagcccg

SEQ ID NO: 2514450 - RNA, 23 nt, Human
uggccagccccacagcccacguc

SEQ ID NO: 2514451 - RNA, 20 nt, Human
uggccagccccacagcccac

SEQ ID NO: 2514452 - RNA, 19 nt, Human
uggccagccccacagccca

SEQ ID NO: 2514453 - RNA, 18 nt, Human
uggccagccccacagccc

SEQ ID NO: 2514454 - RNA, 19 nt, Human
uggccagaugcaccagccc

SEQ ID NO: 2514455 - RNA, 18 nt, Human
uggcccagggcccagagc

SEQ ID NO: 2514456 - RNA, 20 nt, Human
uggcccagggcccagagccc

SEQ ID NO: 2514457 - RNA, 21 nt, Human
uggcccagggcccagagccca

SEQ ID NO: 2514458 - RNA, 22 nt, Human
uggcccagggcccagagcccag

SEQ ID NO: 2514459 - RNA, 23 nt, Human
uggcccagggcccagagcccagc

SEQ ID NO: 2514460 - RNA, 17 nt, Human
uggcccagggcccagag

SEQ ID NO: 2514461 - RNA, 20 nt, Human
uggccaggcugcucuugaac

SEQ ID NO: 2514462 - RNA, 13 nt, Human
uggccaggcuggu

SEQ ID NO: 2514463 - RNA, 15 nt, Human
uggcccauccccccu

SEQ ID NO: 2514464 - RNA, 12 nt, Human
uggcccaucccc

SEQ ID NO: 2514465 - RNA, 23 nt, Human
uggcccaucaguguacccccgcc

SEQ ID NO: 2514466 - RNA, 22 nt, Human
uggcccaucaguguacccccgc

SEQ ID NO: 2514467 - RNA, 17 nt, Human
uggcccauccccccuca

SEQ ID NO: 2514468 - RNA, 16 nt, Human
uggcccauccccccuc

SEQ ID NO: 2514469 - RNA, 12 nt, Human
uggcccaucagu

SEQ ID NO: 2514470 - RNA, 12 nt, Human
uggcccaguguc

SEQ ID NO: 2514471 - RNA, 13 nt, Human
uggcccaguguca

SEQ ID NO: 2514472 - RNA, 13 nt, Human
uggcccccugucc

SEQ ID NO: 2514473 - RNA, 16 nt, Human
uggcccccgagcuggg

SEQ ID NO: 2514474 - RNA, 17 nt, Human
uggcccccgagcugggg

SEQ ID NO: 2514475 - RNA, 14 nt, Human
uggcccccgagcug

SEQ ID NO: 2514476 - RNA, 15 nt, Human
uggcccccgagcugg

SEQ ID NO: 2514477 - RNA, 20 nt, Human
uggccccgccgccugguacu

SEQ ID NO: 2514478 - RNA, 15 nt, Human
uggccccgccgccug

SEQ ID NO: 2514479 - RNA, 14 nt, Human
uggcccccuguccu

SEQ ID NO: 2514480 - RNA, 13 nt, Human
uggccccgccgcc

SEQ ID NO: 2514481 - RNA, 20 nt, Human
uggccccugcccggcugcgg

SEQ ID NO: 2514482 - RNA, 22 nt, Human
uggccuaggagauaucugaggg

SEQ ID NO: 2514483 - RNA, 21 nt, Human
uggccccucaaaucguccagc

SEQ ID NO: 2514484 - RNA, 21 nt, Human
uggccuaggagauaucugagg

SEQ ID NO: 2514485 - RNA, 17 nt, Human
uggccuaugcacauaug

SEQ ID NO: 2514486 - RNA, 15 nt, Human
uggccuaugcacaua

SEQ ID NO: 2514487 - RNA, 14 nt, Human
uggccuaugcacau

SEQ ID NO: 2514488 - RNA, 13 nt, Human
uggccuaugcaca

SEQ ID NO: 2514489 - RNA, 17 nt, Human
uggccuauuauauuaaa

SEQ ID NO: 2514490 - RNA, 20 nt, Human
uggccuaugcacauauggac

SEQ ID NO: 2514491 - RNA, 20 nt, Human
uggccuauuauauuaaaaua

SEQ ID NO: 2514492 - RNA, 13 nt, Human
uggccucaacccu

SEQ ID NO: 2514493 - RNA, 16 nt, Human
uggccccugcccggcu

SEQ ID NO: 2514494 - RNA, 15 nt, Human
uggccccugcccggc

SEQ ID NO: 2514495 - RNA, 14 nt, Human
uggccccugcccgg

SEQ ID NO: 2514496 - RNA, 16 nt, Human
uggccccguuucuggu

SEQ ID NO: 2514497 - RNA, 19 nt, Human
uggcccccgagcugggggc

SEQ ID NO: 2514498 - RNA, 19 nt, Human
uggccccuagaaucagccu

SEQ ID NO: 2514499 - RNA, 15 nt, Human
uggccccguuucugg

SEQ ID NO: 2514500 - RNA, 21 nt, Human
uggccccgccgccugguacuc

SEQ ID NO: 2514501 - RNA, 16 nt, Human
uggcuccucccggugc

SEQ ID NO: 2514502 - RNA, 14 nt, Human
uggcuccucccggu

SEQ ID NO: 2514503 - RNA, 14 nt, Human
uggcucccaugacc

SEQ ID NO: 2514504 - RNA, 19 nt, Human
uggcuccucccggugccca

SEQ ID NO: 2514505 - RNA, 18 nt, Human
uggcuccucccggugccc

SEQ ID NO: 2514506 - RNA, 14 nt, Human
uggcuccucucagu

SEQ ID NO: 2514507 - RNA, 14 nt, Human
uggcuccugagggg

SEQ ID NO: 2514508 - RNA, 12 nt, Human
uggcuccucuca

SEQ ID NO: 2514509 - RNA, 22 nt, Human
uggcuccucaaacaguagguug

SEQ ID NO: 2514510 - RNA, 14 nt, Human
uggcuccucaaaca

SEQ ID NO: 2514511 - RNA, 15 nt, Human
uggcugcuucaagga

SEQ ID NO: 2514512 - RNA, 15 nt, Human
uggcugggggccuca

SEQ ID NO: 2514513 - RNA, 11 nt, Human
uggcugcuuca

SEQ ID NO: 2514514 - RNA, 12 nt, Human
uggcugcugccc

SEQ ID NO: 2514515 - RNA, 11 nt, Human
uggcugcugcc

SEQ ID NO: 2514516 - RNA, 13 nt, Human
uggcuccucucag

SEQ ID NO: 2514517 - RNA, 14 nt, Human
uggcugcugacuga

SEQ ID NO: 2514518 - RNA, 20 nt, Human
uggcuccugaggggcaucug

SEQ ID NO: 2514519 - RNA, 20 nt, Human
uggcucccacaggcccuucc

SEQ ID NO: 2514520 - RNA, 17 nt, Human
uggcucccacaggcccu

SEQ ID NO: 2514521 - RNA, 19 nt, Human
uggcucccacaggcagcuu

SEQ ID NO: 2514522 - RNA, 18 nt, Human
uggcucccacaggcagcu

SEQ ID NO: 2514523 - RNA, 17 nt, Human
uggcucccacaggcagc

SEQ ID NO: 2514524 - RNA, 16 nt, Human
uggcucccacaggagu

SEQ ID NO: 2514525 - RNA, 14 nt, Human
uggcucccacaggc

SEQ ID NO: 2514526 - RNA, 20 nt, Human
uggcguagaaguuuuuguac

SEQ ID NO: 2514527 - RNA, 20 nt, Human
uggcuccauugguguugaca

SEQ ID NO: 2514528 - RNA, 15 nt, Human
uggcgggguggggug

SEQ ID NO: 2514529 - RNA, 12 nt, Human
uggcgggugggg

SEQ ID NO: 2514530 - RNA, 15 nt, Human
uggcgggugggggug

SEQ ID NO: 2514531 - RNA, 13 nt, Human
uggcggugccugg

SEQ ID NO: 2514532 - RNA, 19 nt, Human
uggcgggaugggccaccgc

SEQ ID NO: 2514533 - RNA, 16 nt, Human
uggcgggaugggccac

SEQ ID NO: 2514534 - RNA, 17 nt, Human
uggcgggcgccuguagu

SEQ ID NO: 2514535 - RNA, 14 nt, Human
uggcgggcgccugu

SEQ ID NO: 2514536 - RNA, 13 nt, Human
uggcgggccaagg

SEQ ID NO: 2514537 - RNA, 17 nt, Human
uggcgggccaaggacug

SEQ ID NO: 2514538 - RNA, 15 nt, Human
uggcggcagcagcca

SEQ ID NO: 2514539 - RNA, 15 nt, Human
uggcggcuacucagc

SEQ ID NO: 2514540 - RNA, 16 nt, Human
uggcggcuacucagca

SEQ ID NO: 2514541 - RNA, 17 nt, Human
uggcggcuacucagcag

SEQ ID NO: 2514542 - RNA, 21 nt, Human
uggcggcuacucagcagcccu

SEQ ID NO: 2514543 - RNA, 22 nt, Human
uggcggcuacucagcagcccuc

SEQ ID NO: 2514544 - RNA, 23 nt, Human
uggcggcuacucagcagcccucc

SEQ ID NO: 2514545 - RNA, 23 nt, Human
uggcggcagcagccaucauagga

SEQ ID NO: 2514546 - RNA, 14 nt, Human
uggcggcagcagcc

SEQ ID NO: 2514547 - RNA, 16 nt, Human
uggcgcagccaaggcc

SEQ ID NO: 2514548 - RNA, 23 nt, Human
uggcgcugccccuggcagccccu

SEQ ID NO: 2514549 - RNA, 13 nt, Human
uggcgcagccaag

SEQ ID NO: 2514550 - RNA, 12 nt, Human
uggcgcagccaa

SEQ ID NO: 2514551 - RNA, 18 nt, Human
uggcgcacccuccccucc

SEQ ID NO: 2514552 - RNA, 16 nt, Human
uggcgcacccuccccu

SEQ ID NO: 2514553 - RNA, 15 nt, Human
uggcgcacccucccc

SEQ ID NO: 2514554 - RNA, 14 nt, Human
uggcgcacccuccc

SEQ ID NO: 2514555 - RNA, 13 nt, Human
uggcgcacccucc

SEQ ID NO: 2514556 - RNA, 16 nt, Human
uggcgcugccccuggc

SEQ ID NO: 2514557 - RNA, 23 nt, Human
uggcgcagcauauucaggaagcu

SEQ ID NO: 2514558 - RNA, 22 nt, Human
uggcgcagcauauucaggaagc

SEQ ID NO: 2514559 - RNA, 23 nt, Human
uggccuccccugccaccaggcca

SEQ ID NO: 2514560 - RNA, 21 nt, Human
uggccuccccugccaccaggc

SEQ ID NO: 2514561 - RNA, 20 nt, Human
uggccuccccugccaccagg

SEQ ID NO: 2514562 - RNA, 19 nt, Human
uggccuccccugccaccag

SEQ ID NO: 2514563 - RNA, 15 nt, Human
uggccuccccugcug

SEQ ID NO: 2514564 - RNA, 14 nt, Human
uggcgcaagccugu

SEQ ID NO: 2514565 - RNA, 19 nt, Human
uggccucaacccucccuca

SEQ ID NO: 2514566 - RNA, 17 nt, Human
uggccucaacccucccu

SEQ ID NO: 2514567 - RNA, 18 nt, Human
uggccucaacccucccuc

SEQ ID NO: 2514568 - RNA, 13 nt, Human
uggccucagcugc

SEQ ID NO: 2514569 - RNA, 21 nt, Human
uggccuauuauauuaaaauau

SEQ ID NO: 2514570 - RNA, 14 nt, Human
uggccucaacccuc

SEQ ID NO: 2514571 - RNA, 15 nt, Human
uggccucaacccucc

SEQ ID NO: 2514572 - RNA, 16 nt, Human
uggccucaacccuccc

SEQ ID NO: 2514573 - RNA, 20 nt, Human
uggccucaacccucccucag

SEQ ID NO: 2514574 - RNA, 17 nt, Human
uggccucauguggcugg

SEQ ID NO: 2514575 - RNA, 15 nt, Human
uggccucauguggcu

SEQ ID NO: 2514576 - RNA, 13 nt, Human
uggccucaugugg

SEQ ID NO: 2514577 - RNA, 19 nt, Human
uggccucagcugccucacu

SEQ ID NO: 2514578 - RNA, 14 nt, Human
uggccucagcugcc

SEQ ID NO: 2514579 - RNA, 16 nt, Human
uggccucagcugccuc

SEQ ID NO: 2514580 - RNA, 17 nt, Human
uggccucagcugccuca

SEQ ID NO: 2514581 - RNA, 18 nt, Human
uggccucagcugccucac

SEQ ID NO: 2514582 - RNA, 21 nt, Human
uggccucauguggcuggaaga

SEQ ID NO: 2514583 - RNA, 20 nt, Human
uggccucauguggcuggaag

SEQ ID NO: 2514584 - RNA, 19 nt, Human
uggccucauguggcuggaa

SEQ ID NO: 2514585 - RNA, 18 nt, Human
uggccucauguggcugga

SEQ ID NO: 2514586 - RNA, 23 nt, Human
uggccucccaacucaccccagcc

SEQ ID NO: 2514587 - RNA, 17 nt, Human
uggccuccccugccacc

SEQ ID NO: 2514588 - RNA, 15 nt, Human
uggccuccccugcca

SEQ ID NO: 2514589 - RNA, 14 nt, Human
uggccuccccugcc

SEQ ID NO: 2514590 - RNA, 22 nt, Human
uggccucccacccgaugcugcu

SEQ ID NO: 2514591 - RNA, 21 nt, Human
uggccucccacccgaugcugc

SEQ ID NO: 2514592 - RNA, 15 nt, Human
uggccucccacccga

SEQ ID NO: 2514593 - RNA, 14 nt, Human
uggccucccacccg

SEQ ID NO: 2514594 - RNA, 13 nt, Human
uggccucccaccc

SEQ ID NO: 2514595 - RNA, 11 nt, Human
uggccucccac

SEQ ID NO: 2514596 - RNA, 22 nt, Human
uggccucauuacuuuaccaccc

SEQ ID NO: 2514597 - RNA, 18 nt, Human
uggccucccacagacuca

SEQ ID NO: 2514598 - RNA, 17 nt, Human
uggcaaaaauggcuaga

SEQ ID NO: 2514599 - RNA, 20 nt, Human
uggcaaaaggaucuuugugg

SEQ ID NO: 2514600 - RNA, 21 nt, Human
uggcaaaaggaucuuuguggc

SEQ ID NO: 2514601 - RNA, 24 nt, Human
uggcaaacgcuaaagagcccuugc

SEQ ID NO: 2514602 - RNA, 17 nt, Human
uggcaaacgcuaaagag

SEQ ID NO: 2514603 - RNA, 19 nt, Human
uggcaaacucuccaccaca

SEQ ID NO: 2514604 - RNA, 20 nt, Human
uggcaaggcugugcucccug

SEQ ID NO: 2514605 - RNA, 17 nt, Human
uggcaaagcuuuuagaa

SEQ ID NO: 2514606 - RNA, 18 nt, Human
uggcaaagcuuuuagaaa

SEQ ID NO: 2514607 - RNA, 16 nt, Human
uggcaaagcuuuuaga

SEQ ID NO: 2514608 - RNA, 21 nt, Human
uggcaaagccuucauugccuu

SEQ ID NO: 2514609 - RNA, 17 nt, Human
uggcaaacuucagacug

SEQ ID NO: 2514610 - RNA, 13 nt, Human
uggcaaagacaga

SEQ ID NO: 2514611 - RNA, 17 nt, Human
uggcaaagacagaagcc

SEQ ID NO: 2514612 - RNA, 20 nt, Human
uggcaaaacucuacuuaauc

SEQ ID NO: 2514613 - RNA, 20 nt, Human
uggauuuuugacucuggcaa

SEQ ID NO: 2514614 - RNA, 19 nt, Human
uggauuuuugacucuggca

SEQ ID NO: 2514615 - RNA, 16 nt, Human
uggcaaaaaggcagga

SEQ ID NO: 2514616 - RNA, 12 nt, Human
uggcaaaaaggc

SEQ ID NO: 2514617 - RNA, 19 nt, Human
uggaucugugaggggcucu

SEQ ID NO: 2514618 - RNA, 17 nt, Human
uggauuuuugucuugug

SEQ ID NO: 2514619 - RNA, 15 nt, Human
uggcacuaguauuuc

SEQ ID NO: 2514620 - RNA, 20 nt, Human
uggcaauagugggcccuccg

SEQ ID NO: 2514621 - RNA, 18 nt, Human
uggcaauagugggcccuc

SEQ ID NO: 2514622 - RNA, 15 nt, Human
uggcaauaguguguu

SEQ ID NO: 2514623 - RNA, 16 nt, Human
uggcaauaguguguuc

SEQ ID NO: 2514624 - RNA, 20 nt, Human
uggcaauagucaaauugugu

SEQ ID NO: 2514625 - RNA, 23 nt, Human
uggcaaggcugugcucccugguu

SEQ ID NO: 2514626 - RNA, 17 nt, Human
uggcaaggguucaccug

SEQ ID NO: 2514627 - RNA, 15 nt, Human
uggcacuauaaugua

SEQ ID NO: 2514628 - RNA, 16 nt, Human
uggcacuauaauguaa

SEQ ID NO: 2514629 - RNA, 23 nt, Human
uggcagaagacaccagagcagau

SEQ ID NO: 2514630 - RNA, 22 nt, Human
uggcacuaacguugagccccug

SEQ ID NO: 2514631 - RNA, 18 nt, Human
uggcacgucaucuaguuu

SEQ ID NO: 2514632 - RNA, 16 nt, Human
uggcacgucaucuagu

SEQ ID NO: 2514633 - RNA, 17 nt, Human
uggcaauaguguguucu

SEQ ID NO: 2514634 - RNA, 18 nt, Human
uggcaauaguguguucug

SEQ ID NO: 2514635 - RNA, 19 nt, Human
uggcagaauaaucuuuggg

SEQ ID NO: 2514636 - RNA, 20 nt, Human
uggcagaauaaucuuugggu

SEQ ID NO: 2514637 - RNA, 18 nt, Human
uggcagaaugcuagcucu

SEQ ID NO: 2514638 - RNA, 22 nt, Human
uggcagaagacaccagagcaga

SEQ ID NO: 2514639 - RNA, 22 nt, Human
uggcagaauggggugcaugaag

SEQ ID NO: 2514640 - RNA, 15 nt, Human
uggaucugugagggg

SEQ ID NO: 2514641 - RNA, 20 nt, Human
uggaucuguccaaggaaacu

SEQ ID NO: 2514642 - RNA, 18 nt, Human
uggaucuguccaaggaaa

SEQ ID NO: 2514643 - RNA, 16 nt, Human
uggaucuguccaagga

SEQ ID NO: 2514644 - RNA, 21 nt, Human
uggaucugggacccuuuccuu

SEQ ID NO: 2514645 - RNA, 20 nt, Human
uggaucugggacccuuuccu

SEQ ID NO: 2514646 - RNA, 19 nt, Human
uggaucugggacccuuucc

SEQ ID NO: 2514647 - RNA, 23 nt, Human
uggaucugggacccuuuccuucc

SEQ ID NO: 2514648 - RNA, 21 nt, Human
uggauaacuuagguggcaagc

SEQ ID NO: 2514649 - RNA, 15 nt, Human
uggauaaagccacug

SEQ ID NO: 2514650 - RNA, 21 nt, Human
uggaucuccaaggaccagguu

SEQ ID NO: 2514651 - RNA, 19 nt, Human
uggaucuccccacucuagg

SEQ ID NO: 2514652 - RNA, 15 nt, Human
uggaucuccccacuc

SEQ ID NO: 2514653 - RNA, 16 nt, Human
uggauaaagccacuga

SEQ ID NO: 2514654 - RNA, 23 nt, Human
uggaguuuuuguuuggagagcac

SEQ ID NO: 2514655 - RNA, 22 nt, Human
uggaguuuuuguuuggagagca

SEQ ID NO: 2514656 - RNA, 21 nt, Human
uggaguuuuuguuuggagagc

SEQ ID NO: 2514657 - RNA, 17 nt, Human
uggaguuuuaacuguaa

SEQ ID NO: 2514658 - RNA, 21 nt, Human
uggaguuucauguacaagaug

SEQ ID NO: 2514659 - RNA, 23 nt, Human
uggaggaggccugggggcaggga

SEQ ID NO: 2514660 - RNA, 20 nt, Human
uggaggauggagagagggga

SEQ ID NO: 2514661 - RNA, 15 nt, Human
uggaggauggagaga

SEQ ID NO: 2514662 - RNA, 23 nt, Human
uggaggaaggaaacccagcucug

SEQ ID NO: 2514663 - RNA, 21 nt, Human
uggaggaaggaaacccagcuc

SEQ ID NO: 2514664 - RNA, 20 nt, Human
uggagacugguccugugugc

SEQ ID NO: 2514665 - RNA, 19 nt, Human
uggagacugguccugugug

SEQ ID NO: 2514666 - RNA, 20 nt, Human
uggagacuggggggcuugaa

SEQ ID NO: 2514667 - RNA, 20 nt, Human
uggagacugcuucccauccu

SEQ ID NO: 2514668 - RNA, 19 nt, Human
uggagacugcuucccaucc

SEQ ID NO: 2514669 - RNA, 17 nt, Human
uggagacugcuucccau

SEQ ID NO: 2514670 - RNA, 14 nt, Human
uggagacugcuucc

SEQ ID NO: 2514671 - RNA, 12 nt, Human
uggagacugcuu

SEQ ID NO: 2514672 - RNA, 14 nt, Human
uggagacugucuca

SEQ ID NO: 2514673 - RNA, 21 nt, Human
uggaggaggaaggcaagaggg

SEQ ID NO: 2514674 - RNA, 17 nt, Human
uggaggaggaaggcaag

SEQ ID NO: 2514675 - RNA, 16 nt, Human
uggaggaggaaggcaa

SEQ ID NO: 2514676 - RNA, 15 nt, Human
uggaggaggaaggca

SEQ ID NO: 2514677 - RNA, 14 nt, Human
uggaggaggaaggc

SEQ ID NO: 2514678 - RNA, 13 nt, Human
uggaggaggaagg

SEQ ID NO: 2514679 - RNA, 22 nt, Human
uggaggagcuugggggaugacu

SEQ ID NO: 2514680 - RNA, 16 nt, Human
uggaggaggagcaggg

SEQ ID NO: 2514681 - RNA, 12 nt, Human
uggaggaggagg

SEQ ID NO: 2514682 - RNA, 13 nt, Human
uggaggaggaggc

SEQ ID NO: 2514683 - RNA, 14 nt, Human
uggaggaggaggca

SEQ ID NO: 2514684 - RNA, 18 nt, Human
uggaggaggccugggggc

SEQ ID NO: 2514685 - RNA, 15 nt, Human
uggaggaggccuggg

SEQ ID NO: 2514686 - RNA, 15 nt, Human
uggaggaggaggcaa

SEQ ID NO: 2514687 - RNA, 16 nt, Human
uggaggaggaggcaau

SEQ ID NO: 2514688 - RNA, 20 nt, Human
uggaggaaggauuguaaaaa

SEQ ID NO: 2514689 - RNA, 19 nt, Human
uggaggaaggauuguaaaa

SEQ ID NO: 2514690 - RNA, 18 nt, Human
uggaggaaggauuguaaa

SEQ ID NO: 2514691 - RNA, 13 nt, Human
uggaggaaggauu

SEQ ID NO: 2514692 - RNA, 15 nt, Human
uggaggaaugcuccc

SEQ ID NO: 2514693 - RNA, 16 nt, Human
uggaggaaugcucccc

SEQ ID NO: 2514694 - RNA, 17 nt, Human
uggaggaaugcuccccc

SEQ ID NO: 2514695 - RNA, 19 nt, Human
uggaggagcucaggacacu

SEQ ID NO: 2514696 - RNA, 22 nt, Human
uggaggaaugcucccccauccu

SEQ ID NO: 2514697 - RNA, 22 nt, Human
uggaggagcucaggacacuaau

SEQ ID NO: 2514698 - RNA, 20 nt, Human
uggaggagcucaggacacua

SEQ ID NO: 2514699 - RNA, 15 nt, Human
uggacacucagaccu

SEQ ID NO: 2514700 - RNA, 13 nt, Human
ugcuguuugacaa

SEQ ID NO: 2514701 - RNA, 14 nt, Human
ugcuguuuccuuuu

SEQ ID NO: 2514702 - RNA, 11 nt, Human
ugcuguuuccu

SEQ ID NO: 2514703 - RNA, 12 nt, Human
ugcuguuuccuu

SEQ ID NO: 2514704 - RNA, 13 nt, Human
ugcuguuguuucu

SEQ ID NO: 2514705 - RNA, 12 nt, Human
ugcuguuguccc

SEQ ID NO: 2514706 - RNA, 18 nt, Human
ugcuguugauugcuaaau

SEQ ID NO: 2514707 - RNA, 17 nt, Human
ugcuguugauugcuaaa

SEQ ID NO: 2514708 - RNA, 16 nt, Human
ugcuguugauugcuaa

SEQ ID NO: 2514709 - RNA, 15 nt, Human
ugcuguugauugcua

SEQ ID NO: 2514710 - RNA, 12 nt, Human
ugcuguugauug

SEQ ID NO: 2514711 - RNA, 17 nt, Human
ugcuguugauguuuugu

SEQ ID NO: 2514712 - RNA, 19 nt, Human
ugcuguugauuucuuucca

SEQ ID NO: 2514713 - RNA, 22 nt, Human
ugcuguugauugcuaaauguaa

SEQ ID NO: 2514714 - RNA, 20 nt, Human
ugcuguugauugcuaaaugu

SEQ ID NO: 2514715 - RNA, 19 nt, Human
ugcuguugauugcuaaaug

SEQ ID NO: 2514716 - RNA, 21 nt, Human
ugcuguugauuucuuuccaga

SEQ ID NO: 2514717 - RNA, 14 nt, Human
ugcuguugccucau

SEQ ID NO: 2514718 - RNA, 23 nt, Human
uggacauagagagggagaagaag

SEQ ID NO: 2514719 - RNA, 14 nt, Human
uggacauccuccuc

SEQ ID NO: 2514720 - RNA, 19 nt, Human
uggacauagagagggagaa

SEQ ID NO: 2514721 - RNA, 14 nt, Human
uggacauagagagg

SEQ ID NO: 2514722 - RNA, 21 nt, Human
uggacaguaucacugucuuuc

SEQ ID NO: 2514723 - RNA, 15 nt, Human
uggacaguccuggga

SEQ ID NO: 2514724 - RNA, 16 nt, Human
uggacaguccugggag

SEQ ID NO: 2514725 - RNA, 17 nt, Human
uggacaguccugggaga

SEQ ID NO: 2514726 - RNA, 21 nt, Human
uggaccaauagggcugagcuc

SEQ ID NO: 2514727 - RNA, 20 nt, Human
uggaccaauagggcugagcu

SEQ ID NO: 2514728 - RNA, 21 nt, Human
uggaccaacccuguuuccuga

SEQ ID NO: 2514729 - RNA, 19 nt, Human
uggacacuccagugccagc

SEQ ID NO: 2514730 - RNA, 17 nt, Human
uggacacuccagugcca

SEQ ID NO: 2514731 - RNA, 16 nt, Human
uggacacucagaccug

SEQ ID NO: 2514732 - RNA, 14 nt, Human
uggacacuuugaaa

SEQ ID NO: 2514733 - RNA, 21 nt, Human
uggacacuccagugccagcaa

SEQ ID NO: 2514734 - RNA, 14 nt, Human
uggacacuguacaa

SEQ ID NO: 2514735 - RNA, 23 nt, Human
uggacacuuaauacuaccuugaa

SEQ ID NO: 2514736 - RNA, 23 nt, Human
uggacaguaucacugucuuuccu

SEQ ID NO: 2514737 - RNA, 12 nt, Human
uggacaguccug

SEQ ID NO: 2514738 - RNA, 13 nt, Human
uggacaguccugg

SEQ ID NO: 2514739 - RNA, 14 nt, Human
uggacaguccuggg

SEQ ID NO: 2514740 - RNA, 20 nt, Human
uggacacuuugaaauguguu

SEQ ID NO: 2514741 - RNA, 14 nt, Human
uggacaggcuggcu

SEQ ID NO: 2514742 - RNA, 18 nt, Human
uggagacuccugcccugu

SEQ ID NO: 2514743 - RNA, 14 nt, Human
uggagacuccugcc

SEQ ID NO: 2514744 - RNA, 13 nt, Human
uggagacuccugc

SEQ ID NO: 2514745 - RNA, 22 nt, Human
uggagacuccuaggcaggacau

SEQ ID NO: 2514746 - RNA, 19 nt, Human
uggagacuccuaggcagga

SEQ ID NO: 2514747 - RNA, 18 nt, Human
uggagacuccuaggcagg

SEQ ID NO: 2514748 - RNA, 18 nt, Human
uggagacuaagcccuguc

SEQ ID NO: 2514749 - RNA, 19 nt, Human
uggagacuccugcccuguu

SEQ ID NO: 2514750 - RNA, 14 nt, Human
uggagacucugugg

SEQ ID NO: 2514751 - RNA, 19 nt, Human
uggagacucuguggggccu

SEQ ID NO: 2514752 - RNA, 14 nt, Human
uggagaauuauaua

SEQ ID NO: 2514753 - RNA, 15 nt, Human
uggacugaugcuuuu

SEQ ID NO: 2514754 - RNA, 18 nt, Human
uggacuggaaaaucucuu

SEQ ID NO: 2514755 - RNA, 14 nt, Human
uggacuggaagggg

SEQ ID NO: 2514756 - RNA, 21 nt, Human
uggagaagcucccugaaguaa

SEQ ID NO: 2514757 - RNA, 16 nt, Human
uggacuggaguggagc

SEQ ID NO: 2514758 - RNA, 22 nt, Human
uggagaagucuuagacuugaaa

SEQ ID NO: 2514759 - RNA, 14 nt, Human
uggacucagggcag

SEQ ID NO: 2514760 - RNA, 15 nt, Human
uggacucagggcagc

SEQ ID NO: 2514761 - RNA, 18 nt, Human
uggacucagggcagcgcc

SEQ ID NO: 2514762 - RNA, 20 nt, Human
uggacucagggcagcgccag

SEQ ID NO: 2514763 - RNA, 21 nt, Human
uggacuccagacucucuguga

SEQ ID NO: 2514764 - RNA, 19 nt, Human
uggacuccagacucucugu

SEQ ID NO: 2514765 - RNA, 18 nt, Human
uggacuccagacucucug

SEQ ID NO: 2514766 - RNA, 18 nt, Human
uggacucaggaugcccag

SEQ ID NO: 2514767 - RNA, 21 nt, Human
uggacuccagccugccuggca

SEQ ID NO: 2514768 - RNA, 20 nt, Human
uggacuccagccugccuggc

SEQ ID NO: 2514769 - RNA, 14 nt, Human
uggacuccagccug

SEQ ID NO: 2514770 - RNA, 20 nt, Human
uggaccacugcaugagcuuu

SEQ ID NO: 2514771 - RNA, 12 nt, Human
uggaccacugca

SEQ ID NO: 2514772 - RNA, 15 nt, Human
uggaccacugggcaa

SEQ ID NO: 2514773 - RNA, 19 nt, Human
uggaccacugggcaaugau

SEQ ID NO: 2514774 - RNA, 16 nt, Human
uggacucaggaugccc

SEQ ID NO: 2514775 - RNA, 16 nt, Human
uggacugaggccugag

SEQ ID NO: 2514776 - RNA, 15 nt, Human
uggacugaggccuga

SEQ ID NO: 2514777 - RNA, 14 nt, Human
uggacugaggccug

SEQ ID NO: 2514778 - RNA, 11 nt, Human
uggacugaggc

SEQ ID NO: 2514779 - RNA, 18 nt, Human
uggacugaagccugcagg

SEQ ID NO: 2514780 - RNA, 13 nt, Human
uggacugacauuu

SEQ ID NO: 2514781 - RNA, 17 nt, Human
uggacuccggcccuccu

SEQ ID NO: 2514782 - RNA, 17 nt, Human
uggacugaagccugcag

SEQ ID NO: 2514783 - RNA, 19 nt, Human
uggacugaagccugcagga

SEQ ID NO: 2514784 - RNA, 13 nt, Human
uggacuccucugu

SEQ ID NO: 2514785 - RNA, 23 nt, Human
uggacuccagccugccuggcagg

SEQ ID NO: 2514786 - RNA, 22 nt, Human
uggacuccagccugccuggcag

SEQ ID NO: 2514787 - RNA, 14 nt, Human
uggacuccggcccu

SEQ ID NO: 2514788 - RNA, 23 nt, Human
uggucccccuuccauggacuuug

SEQ ID NO: 2514789 - RNA, 18 nt, Human
uggucccccuuccaugga

SEQ ID NO: 2514790 - RNA, 16 nt, Human
uggucccccuuccaug

SEQ ID NO: 2514791 - RNA, 15 nt, Human
uggucccccuuccau

SEQ ID NO: 2514792 - RNA, 17 nt, Human
uggucccugcccucauc

SEQ ID NO: 2514793 - RNA, 13 nt, Human
uggucccugggag

SEQ ID NO: 2514794 - RNA, 14 nt, Human
uggucccugggagg

SEQ ID NO: 2514795 - RNA, 19 nt, Human
ugguccggacacuccuaga

SEQ ID NO: 2514796 - RNA, 16 nt, Human
ugguccggacacuccu

SEQ ID NO: 2514797 - RNA, 12 nt, Human
uggucccugggg

SEQ ID NO: 2514798 - RNA, 19 nt, Human
uggucccugggaggaaauu

SEQ ID NO: 2514799 - RNA, 19 nt, Human
ugguccuaaucuucugaac

SEQ ID NO: 2514800 - RNA, 17 nt, Human
ugguccuaaucuucuga

SEQ ID NO: 2514801 - RNA, 14 nt, Human
ugguccucacacuc

SEQ ID NO: 2514802 - RNA, 20 nt, Human
ugguccgugggacggugccc

SEQ ID NO: 2514803 - RNA, 12 nt, Human
ugguccuaccca

SEQ ID NO: 2514804 - RNA, 15 nt, Human
ugguccgguguccuu

SEQ ID NO: 2514805 - RNA, 23 nt, Human
ugguccugcugcaguugccaguc

SEQ ID NO: 2514806 - RNA, 15 nt, Human
ugguccugcugcagu

SEQ ID NO: 2514807 - RNA, 13 nt, Human
ugguccugcugca

SEQ ID NO: 2514808 - RNA, 15 nt, Human
ugguccucuugccuc

SEQ ID NO: 2514809 - RNA, 20 nt, Human
ugguccucuugccuccugga

SEQ ID NO: 2514810 - RNA, 12 nt, Human
ugguccugacuc

SEQ ID NO: 2514811 - RNA, 19 nt, Human
ugguccugacucaacaugu

SEQ ID NO: 2514812 - RNA, 19 nt, Human
ugguauggaacucucucca

SEQ ID NO: 2514813 - RNA, 21 nt, Human
ugguaugugacaugcgggcug

SEQ ID NO: 2514814 - RNA, 21 nt, Human
uggguaccuauuuucauugua

SEQ ID NO: 2514815 - RNA, 19 nt, Human
uggguauauucauuucaaa

SEQ ID NO: 2514816 - RNA, 13 nt, Human
ugggucaaggaau

SEQ ID NO: 2514817 - RNA, 13 nt, Human
ugguauguuuuca

SEQ ID NO: 2514818 - RNA, 21 nt, Human
ugguauguuuucaggcuagau

SEQ ID NO: 2514819 - RNA, 22 nt, Human
ugguauuguauuuauucaauaa

SEQ ID NO: 2514820 - RNA, 12 nt, Human
ugguaugugugu

SEQ ID NO: 2514821 - RNA, 15 nt, Human
ugguaugugugugua

SEQ ID NO: 2514822 - RNA, 17 nt, Human
ugguauguguguguaug

SEQ ID NO: 2514823 - RNA, 19 nt, Human
ugguauguguguguaugcu

SEQ ID NO: 2514824 - RNA, 23 nt, Human
ugguauuguauuuauucaauaaa

SEQ ID NO: 2514825 - RNA, 21 nt, Human
ugguauguguguguaugcuac

SEQ ID NO: 2514826 - RNA, 16 nt, Human
uggucaaacaaacucu

SEQ ID NO: 2514827 - RNA, 21 nt, Human
uggucaaacaaacucucugaa

SEQ ID NO: 2514828 - RNA, 13 nt, Human
uggucccacucag

SEQ ID NO: 2514829 - RNA, 19 nt, Human
uggucacaggacucugccu

SEQ ID NO: 2514830 - RNA, 14 nt, Human
uggucccccuucca

SEQ ID NO: 2514831 - RNA, 18 nt, Human
uggucccauccaggcagu

SEQ ID NO: 2514832 - RNA, 17 nt, Human
uggucccauccaggcag

SEQ ID NO: 2514833 - RNA, 16 nt, Human
uggucccauccaggca

SEQ ID NO: 2514834 - RNA, 15 nt, Human
uggucccauccaggc

SEQ ID NO: 2514835 - RNA, 13 nt, Human
uggucccauccag

SEQ ID NO: 2514836 - RNA, 18 nt, Human
uggucaaccuccuggaca

SEQ ID NO: 2514837 - RNA, 15 nt, Human
uggucaagauuuuga

SEQ ID NO: 2514838 - RNA, 22 nt, Human
uggucacaggaaguagaggagg

SEQ ID NO: 2514839 - RNA, 16 nt, Human
uggucaaccuccugga

SEQ ID NO: 2514840 - RNA, 14 nt, Human
uggucaaccuccug

SEQ ID NO: 2514841 - RNA, 18 nt, Human
uggucacaggacucugcc

SEQ ID NO: 2514842 - RNA, 17 nt, Human
uggucacaggaaguaga

SEQ ID NO: 2514843 - RNA, 20 nt, Human
uggucaaaccgcacucaccc

SEQ ID NO: 2514844 - RNA, 17 nt, Human
uggucaaaccgcacuca

SEQ ID NO: 2514845 - RNA, 21 nt, Human
uggucaaaccgcacucaccca

SEQ ID NO: 2514846 - RNA, 14 nt, Human
uggucaacacuuaa

SEQ ID NO: 2514847 - RNA, 14 nt, Human
uggucaaaccgcac

SEQ ID NO: 2514848 - RNA, 17 nt, Human
uggucaaaagcuggauu

SEQ ID NO: 2514849 - RNA, 22 nt, Human
uggucaaacaaacucucugaac

SEQ ID NO: 2514850 - RNA, 18 nt, Human
uggucuacacugugcuga

SEQ ID NO: 2514851 - RNA, 17 nt, Human
uggucuacacugugcug

SEQ ID NO: 2514852 - RNA, 16 nt, Human
uggucuacacugugcu

SEQ ID NO: 2514853 - RNA, 15 nt, Human
uggucuacacugugc

SEQ ID NO: 2514854 - RNA, 14 nt, Human
uggugaccucugcc

SEQ ID NO: 2514855 - RNA, 13 nt, Human
uggugaccucugc

SEQ ID NO: 2514856 - RNA, 19 nt, Human
uggucuacacugugcugag

SEQ ID NO: 2514857 - RNA, 16 nt, Human
uggugacaccagccuu

SEQ ID NO: 2514858 - RNA, 18 nt, Human
uggugacaccagccuuuc

SEQ ID NO: 2514859 - RNA, 16 nt, Human
ugguccuggggcucug

SEQ ID NO: 2514860 - RNA, 19 nt, Human
ugguccuggggcucugugc

SEQ ID NO: 2514861 - RNA, 20 nt, Human
ugguccugaggguccccacc

SEQ ID NO: 2514862 - RNA, 14 nt, Human
ugguccugagaccu

SEQ ID NO: 2514863 - RNA, 22 nt, Human
ugguccugacucaacauguuac

SEQ ID NO: 2514864 - RNA, 11 nt, Human
ugguccugggg

SEQ ID NO: 2514865 - RNA, 14 nt, Human
ugguccuggggcuc

SEQ ID NO: 2514866 - RNA, 13 nt, Human
uggucgcccagga

SEQ ID NO: 2514867 - RNA, 14 nt, Human
uggucgcccaggag

SEQ ID NO: 2514868 - RNA, 21 nt, Human
ugguccuuuacacucaggcuu

SEQ ID NO: 2514869 - RNA, 20 nt, Human
ugguccuuuacacucaggcu

SEQ ID NO: 2514870 - RNA, 12 nt, Human
ugguccuuuggg

SEQ ID NO: 2514871 - RNA, 14 nt, Human
ugguccuuuacacu

SEQ ID NO: 2514872 - RNA, 20 nt, Human
ugguccugugugcagugaag

SEQ ID NO: 2514873 - RNA, 23 nt, Human
ugguccuuccaggcccccaccac

SEQ ID NO: 2514874 - RNA, 17 nt, Human
uggucggaaaacaugcu

SEQ ID NO: 2514875 - RNA, 14 nt, Human
uggucggaaaacau

SEQ ID NO: 2514876 - RNA, 15 nt, Human
uggucgcuccugccc

SEQ ID NO: 2514877 - RNA, 13 nt, Human
uggucgcuccugc

SEQ ID NO: 2514878 - RNA, 15 nt, Human
uggucgcccaggaga

SEQ ID NO: 2514879 - RNA, 22 nt, Human
uggugaccucugccugaaguca

SEQ ID NO: 2514880 - RNA, 17 nt, Human
uggugaccucugccuga

SEQ ID NO: 2514881 - RNA, 16 nt, Human
uggugaccucugccug

SEQ ID NO: 2514882 - RNA, 15 nt, Human
uggugaccucugccu

SEQ ID NO: 2514883 - RNA, 21 nt, Human
uggugaccuuccaagagccug

SEQ ID NO: 2514884 - RNA, 22 nt, Human
uggugaccuuccaagagccuga

SEQ ID NO: 2514885 - RNA, 19 nt, Human
uggugacuuuccucuuugg

SEQ ID NO: 2514886 - RNA, 18 nt, Human
uggugacugcgaucuuca

SEQ ID NO: 2514887 - RNA, 17 nt, Human
uggugacccagucagag

SEQ ID NO: 2514888 - RNA, 22 nt, Human
uggugaccccuuuucagcuucu

SEQ ID NO: 2514889 - RNA, 17 nt, Human
uggugagaugcagcugg

SEQ ID NO: 2514890 - RNA, 16 nt, Human
uggugagaugcagcug

SEQ ID NO: 2514891 - RNA, 20 nt, Human
uggugagaugcagcuggaaa

SEQ ID NO: 2514892 - RNA, 17 nt, Human
uggugaggccuugcucc

SEQ ID NO: 2514893 - RNA, 18 nt, Human
uggugaggcaggcuuugu

SEQ ID NO: 2514894 - RNA, 18 nt, Human
uggugagucuuggcggca

SEQ ID NO: 2514895 - RNA, 22 nt, Human
uggugagucuuggcggcagcag

SEQ ID NO: 2514896 - RNA, 20 nt, Human
uggugagucuuggcggcagc

SEQ ID NO: 2514897 - RNA, 17 nt, Human
uggugaucaauuaaaug

SEQ ID NO: 2514898 - RNA, 18 nt, Human
uggugaucaauuaaaugu

SEQ ID NO: 2514899 - RNA, 15 nt, Human
uggugcacagugauu

SEQ ID NO: 2514900 - RNA, 20 nt, Human
uggugauggagguuucauac

SEQ ID NO: 2514901 - RNA, 21 nt, Human
uggugcaaugaccuuucaaua

SEQ ID NO: 2514902 - RNA, 20 nt, Human
uggugccaauggaaccuccu

SEQ ID NO: 2514903 - RNA, 17 nt, Human
uggugccaauggaaccu

SEQ ID NO: 2514904 - RNA, 15 nt, Human
uggugccaauuucaa

SEQ ID NO: 2514905 - RNA, 10 nt, Human
uggugcauua

SEQ ID NO: 2514906 - RNA, 13 nt, Human
uggugcauuacag

SEQ ID NO: 2514907 - RNA, 16 nt, Human
uggugcauuacagaga

SEQ ID NO: 2514908 - RNA, 19 nt, Human
uggugcauuacagagagga

SEQ ID NO: 2514909 - RNA, 15 nt, Human
uggugcagugugaaa

SEQ ID NO: 2514910 - RNA, 18 nt, Human
uggguacuuguggacaca

SEQ ID NO: 2514911 - RNA, 17 nt, Human
uggguacuuguggacac

SEQ ID NO: 2514912 - RNA, 15 nt, Human
uggguauaaaagaug

SEQ ID NO: 2514913 - RNA, 14 nt, Human
uggguauaaaagau

SEQ ID NO: 2514914 - RNA, 16 nt, Human
uggguacuucuugaag

SEQ ID NO: 2514915 - RNA, 19 nt, Human
uggguacuucuugaaggug

SEQ ID NO: 2514916 - RNA, 17 nt, Human
uggguauaaaagauggg

SEQ ID NO: 2514917 - RNA, 15 nt, Human
uggguauauucauuu

SEQ ID NO: 2514918 - RNA, 22 nt, Human
uggggguucuuucuuccucugc

SEQ ID NO: 2514919 - RNA, 20 nt, Human
uggggguucuuucuuccucu

SEQ ID NO: 2514920 - RNA, 15 nt, Human
uggguaccuauuuuc

SEQ ID NO: 2514921 - RNA, 18 nt, Human
uggguaaucgauggggga

SEQ ID NO: 2514922 - RNA, 15 nt, Human
uggguacagagaggu

SEQ ID NO: 2514923 - RNA, 13 nt, Human
ugggggugggcca

SEQ ID NO: 2514924 - RNA, 19 nt, Human
uggggguggaggcuuccug

SEQ ID NO: 2514925 - RNA, 16 nt, Human
ugggggugggccaggc

SEQ ID NO: 2514926 - RNA, 19 nt, Human
uggggguucuuucuuccuc

SEQ ID NO: 2514927 - RNA, 15 nt, Human
uggggguucuuucuu

SEQ ID NO: 2514928 - RNA, 16 nt, Human
ugggggaguggccaca

SEQ ID NO: 2514929 - RNA, 13 nt, Human
uggggggggugcu

SEQ ID NO: 2514930 - RNA, 21 nt, Human
ugggggaguagaucuuucuag

SEQ ID NO: 2514931 - RNA, 19 nt, Human
ugggggagagcaggcuggc

SEQ ID NO: 2514932 - RNA, 17 nt, Human
ugggggagagcaggcug

SEQ ID NO: 2514933 - RNA, 14 nt, Human
ugggggagagcagg

SEQ ID NO: 2514934 - RNA, 13 nt, Human
ugggggagagcag

SEQ ID NO: 2514935 - RNA, 14 nt, Human
ugggggacuuacau

SEQ ID NO: 2514936 - RNA, 21 nt, Human
ugggggacuuacaugauucau

SEQ ID NO: 2514937 - RNA, 18 nt, Human
ugggggacagggcuggcc

SEQ ID NO: 2514938 - RNA, 16 nt, Human
ugggggacagggcugg

SEQ ID NO: 2514939 - RNA, 22 nt, Human
ugggggacagggcuggcccagc

SEQ ID NO: 2514940 - RNA, 15 nt, Human
ugggggacagggcug

SEQ ID NO: 2514941 - RNA, 16 nt, Human
ugggggaagcccugga

SEQ ID NO: 2514942 - RNA, 16 nt, Human
uggggguagcagcugg

SEQ ID NO: 2514943 - RNA, 15 nt, Human
uggggguagcagcug

SEQ ID NO: 2514944 - RNA, 21 nt, Human
uggggguagagcugauccaga

SEQ ID NO: 2514945 - RNA, 18 nt, Human
uggggguagagcugaucc

SEQ ID NO: 2514946 - RNA, 18 nt, Human
uggggguagcagcuggac

SEQ ID NO: 2514947 - RNA, 17 nt, Human
uggggguagcagcugga

SEQ ID NO: 2514948 - RNA, 14 nt, Human
ugggggucugugug

SEQ ID NO: 2514949 - RNA, 18 nt, Human
uggggguggaggcuuccu

SEQ ID NO: 2514950 - RNA, 15 nt, Human
ugggggaguggaaua

SEQ ID NO: 2514951 - RNA, 15 nt, Human
uggggguagagcuga

SEQ ID NO: 2514952 - RNA, 23 nt, Human
uggggggguggccgcugaguggc

SEQ ID NO: 2514953 - RNA, 14 nt, Human
uggggggguggccg

SEQ ID NO: 2514954 - RNA, 13 nt, Human
uggggggguggcc

SEQ ID NO: 2514955 - RNA, 12 nt, Human
ugggggagugga

SEQ ID NO: 2514956 - RNA, 19 nt, Human
ugggggagucugaagcaga

SEQ ID NO: 2514957 - RNA, 16 nt, Human
uggggauagaugugug

SEQ ID NO: 2514958 - RNA, 17 nt, Human
uggggauagaugugugg

SEQ ID NO: 2514959 - RNA, 18 nt, Human
uggggauagaugugugga

SEQ ID NO: 2514960 - RNA, 20 nt, Human
uggggauagauguguggaca

SEQ ID NO: 2514961 - RNA, 14 nt, Human
ugggcuugauucug

SEQ ID NO: 2514962 - RNA, 13 nt, Human
ugggcuugauucu

SEQ ID NO: 2514963 - RNA, 14 nt, Human
ugggcuuggccugc

SEQ ID NO: 2514964 - RNA, 13 nt, Human
ugggcuucaucug

SEQ ID NO: 2514965 - RNA, 12 nt, Human
ugggccuucagg

SEQ ID NO: 2514966 - RNA, 23 nt, Human
ugggcuucccaguggcugcugcc

SEQ ID NO: 2514967 - RNA, 22 nt, Human
ugggcuucccaguggcugcugc

SEQ ID NO: 2514968 - RNA, 21 nt, Human
ugggcuucccaguggcugcug

SEQ ID NO: 2514969 - RNA, 19 nt, Human
ugggcuucccaguggcugc

SEQ ID NO: 2514970 - RNA, 12 nt, Human
ugggcuucccag

SEQ ID NO: 2514971 - RNA, 19 nt, Human
ugggcuuccauuugugugu

SEQ ID NO: 2514972 - RNA, 23 nt, Human
ugggcuuccauuugugugugugc

SEQ ID NO: 2514973 - RNA, 22 nt, Human
uggggccaggcugggucgcccu

SEQ ID NO: 2514974 - RNA, 21 nt, Human
uggggccaggcugggucgccc

SEQ ID NO: 2514975 - RNA, 20 nt, Human
uggggccaguuggucccccu

SEQ ID NO: 2514976 - RNA, 15 nt, Human
uggggccaggucacc

SEQ ID NO: 2514977 - RNA, 18 nt, Human
uggggaucucaggggcug

SEQ ID NO: 2514978 - RNA, 15 nt, Human
ugggggaagcccugg

SEQ ID NO: 2514979 - RNA, 14 nt, Human
uggggaucucaggg

SEQ ID NO: 2514980 - RNA, 15 nt, Human
uggggaucacagaga

SEQ ID NO: 2514981 - RNA, 20 nt, Human
uggggaucccucccccccau

SEQ ID NO: 2514982 - RNA, 20 nt, Human
uggggccaggcugggucgcc

SEQ ID NO: 2514983 - RNA, 23 nt, Human
uggggaugagaaagguugaagca

SEQ ID NO: 2514984 - RNA, 15 nt, Human
uggggaugagaaagg

SEQ ID NO: 2514985 - RNA, 21 nt, Human
uggggaucacagagacauucc

SEQ ID NO: 2514986 - RNA, 13 nt, Human
uggggauaugcuu

SEQ ID NO: 2514987 - RNA, 17 nt, Human
uggggauaaaggagaag

SEQ ID NO: 2514988 - RNA, 15 nt, Human
uggggauauaauacu

SEQ ID NO: 2514989 - RNA, 16 nt, Human
ugggagugggcccaau

SEQ ID NO: 2514990 - RNA, 14 nt, Human
ugggagugggccca

SEQ ID NO: 2514991 - RNA, 11 nt, Human
ugggagugugu

SEQ ID NO: 2514992 - RNA, 13 nt, Human
ugggaguguguaa

SEQ ID NO: 2514993 - RNA, 19 nt, Human
ugggaucacauguggacuu

SEQ ID NO: 2514994 - RNA, 20 nt, Human
uggcugcugcccccaccccg

SEQ ID NO: 2514995 - RNA, 16 nt, Human
uggcugcugcccccac

SEQ ID NO: 2514996 - RNA, 15 nt, Human
uggcugcugccccca

SEQ ID NO: 2514997 - RNA, 14 nt, Human
uggcugcugcccag

SEQ ID NO: 2514998 - RNA, 22 nt, Human
ugggagugaggaugucugggcc

SEQ ID NO: 2514999 - RNA, 20 nt, Human
uggcugggggccucagugcc

SEQ ID NO: 2515000 - RNA, 17 nt, Human
uggcugggggccucagu

SEQ ID NO: 2515001 - RNA, 16 nt, Human
uggcugggggccucag

SEQ ID NO: 2515002 - RNA, 22 nt, Human
ugggcagagcagagaccauccc

SEQ ID NO: 2515003 - RNA, 17 nt, Human
ugggauuacaggcguga

SEQ ID NO: 2515004 - RNA, 18 nt, Human
ugggcagagcagagacca

SEQ ID NO: 2515005 - RNA, 22 nt, Human
ugggauguucagcacugucccu

SEQ ID NO: 2515006 - RNA, 21 nt, Human
ugggauguucagcacuguccc

SEQ ID NO: 2515007 - RNA, 20 nt, Human
ugggauguucagcacugucc

SEQ ID NO: 2515008 - RNA, 16 nt, Human
ugggauguucagcacu

SEQ ID NO: 2515009 - RNA, 22 nt, Human
ugggauuacaagcgugagccac

SEQ ID NO: 2515010 - RNA, 13 nt, Human
ugggauccuccag

SEQ ID NO: 2515011 - RNA, 12 nt, Human
ugggauccucca

SEQ ID NO: 2515012 - RNA, 14 nt, Human
ugggauccuccagg

SEQ ID NO: 2515013 - RNA, 18 nt, Human
ugggaugguggagggcca

SEQ ID NO: 2515014 - RNA, 20 nt, Human
ugggaucccucugggcacug

SEQ ID NO: 2515015 - RNA, 19 nt, Human
ugggauguccacagaugcc

SEQ ID NO: 2515016 - RNA, 23 nt, Human
ugggauguggcugcagcagcggu

SEQ ID NO: 2515017 - RNA, 23 nt, Human
ugggccccugccucucugcaggu

SEQ ID NO: 2515018 - RNA, 21 nt, Human
ugggccccugccucucugcag

SEQ ID NO: 2515019 - RNA, 17 nt, Human
ugggcaggugguggcac

SEQ ID NO: 2515020 - RNA, 20 nt, Human
ugggccccugccucucugca

SEQ ID NO: 2515021 - RNA, 16 nt, Human
ugggcaggugguggca

SEQ ID NO: 2515022 - RNA, 15 nt, Human
ugggcaggugguggc

SEQ ID NO: 2515023 - RNA, 14 nt, Human
ugggcagguggugg

SEQ ID NO: 2515024 - RNA, 15 nt, Human
ugggcaggugggagc

SEQ ID NO: 2515025 - RNA, 13 nt, Human
ugggcccucucug

SEQ ID NO: 2515026 - RNA, 16 nt, Human
ugggcccucucugcuc

SEQ ID NO: 2515027 - RNA, 18 nt, Human
ugggcccucucugcucug

SEQ ID NO: 2515028 - RNA, 11 nt, Human
ugggcccuccu

SEQ ID NO: 2515029 - RNA, 11 nt, Human
ugggccuucag

SEQ ID NO: 2515030 - RNA, 14 nt, Human
ugggccuggcuccc

SEQ ID NO: 2515031 - RNA, 18 nt, Human
ugggcccugccucuguuu

SEQ ID NO: 2515032 - RNA, 13 nt, Human
ugggcccugccuc

SEQ ID NO: 2515033 - RNA, 23 nt, Human
ugggcaggacucagcuccccaga

SEQ ID NO: 2515034 - RNA, 14 nt, Human
ugggcagagcuggc

SEQ ID NO: 2515035 - RNA, 13 nt, Human
ugggcagggagcg

SEQ ID NO: 2515036 - RNA, 23 nt, Human
ugggcagagcagagaccaucccu

SEQ ID NO: 2515037 - RNA, 12 nt, Human
ugggcagagcug

SEQ ID NO: 2515038 - RNA, 14 nt, Human
ugggcagagcccaa

SEQ ID NO: 2515039 - RNA, 13 nt, Human
ugggcagagccca

SEQ ID NO: 2515040 - RNA, 14 nt, Human
ugggauguuucugu

SEQ ID NO: 2515041 - RNA, 22 nt, Human
uuugugguacgaccuuuagauu

SEQ ID NO: 2515042 - RNA, 11 nt, Human
uuuguggggag

SEQ ID NO: 2515043 - RNA, 12 nt, Human
uuuguggcuggg

SEQ ID NO: 2515044 - RNA, 19 nt, Human
uuuguguaauagaaaacug

SEQ ID NO: 2515045 - RNA, 14 nt, Human
uuuguguacagugu

SEQ ID NO: 2515046 - RNA, 23 nt, Human
uuaaauguuuuuuuuuaaagacu

SEQ ID NO: 2515047 - RNA, 21 nt, Human
uuaaauguuuuuuuuuaaaga

SEQ ID NO: 2515048 - RNA, 21 nt, Human
uuaaagacaaagacaaauucu

SEQ ID NO: 2515049 - RNA, 12 nt, Human
uuaaagacagag

SEQ ID NO: 2515050 - RNA, 11 nt, Human
uuaaagacaga

SEQ ID NO: 2515051 - RNA, 14 nt, Human
uuaacuagaauuua

SEQ ID NO: 2515052 - RNA, 12 nt, Human
uuaacuagaauu

SEQ ID NO: 2515053 - RNA, 23 nt, Human
uuaacuaaucuauuggguucauu

SEQ ID NO: 2515054 - RNA, 19 nt, Human
uuaacggcuccaggauuuu

SEQ ID NO: 2515055 - RNA, 17 nt, Human
uuaacggcuccaggauu

SEQ ID NO: 2515056 - RNA, 17 nt, Human
uuaaccuggugcuggau

SEQ ID NO: 2515057 - RNA, 15 nt, Human
uuaaccucugcacua

SEQ ID NO: 2515058 - RNA, 12 nt, Human
uuaaccucugca

SEQ ID NO: 2515059 - RNA, 13 nt, Human
uuaaccugaugca

SEQ ID NO: 2515060 - RNA, 19 nt, Human
uuaaccucagugucauuua

SEQ ID NO: 2515061 - RNA, 13 nt, Human
uuaaccuggugcu

SEQ ID NO: 2515062 - RNA, 21 nt, Human
uuaaccuaugauauuuucugu

SEQ ID NO: 2515063 - RNA, 15 nt, Human
uuaaccucaguguca

SEQ ID NO: 2515064 - RNA, 20 nt, Human
uuaaccuaugauauuuucug

SEQ ID NO: 2515065 - RNA, 17 nt, Human
uuaaccacuucagcuga

SEQ ID NO: 2515066 - RNA, 18 nt, Human
uuaaccaaaggugaagga

SEQ ID NO: 2515067 - RNA, 14 nt, Human
uuaaccaaagguga

SEQ ID NO: 2515068 - RNA, 13 nt, Human
uuaaccaaaggug

SEQ ID NO: 2515069 - RNA, 12 nt, Human
uuaaccaaaggu

SEQ ID NO: 2515070 - RNA, 19 nt, Human
uuaaccaaaaagaccagac

SEQ ID NO: 2515071 - RNA, 14 nt, Human
uuaacauuucaagg

SEQ ID NO: 2515072 - RNA, 13 nt, Human
uuaaccauugucu

SEQ ID NO: 2515073 - RNA, 18 nt, Human
uuaaccauuaaaacugaa

SEQ ID NO: 2515074 - RNA, 17 nt, Human
uuaaccauuaaaacuga

SEQ ID NO: 2515075 - RNA, 16 nt, Human
uuaaccauuaaaacug

SEQ ID NO: 2515076 - RNA, 13 nt, Human
uuaaccagaauaa

SEQ ID NO: 2515077 - RNA, 19 nt, Human
uuaaccauugucuuguucu

SEQ ID NO: 2515078 - RNA, 17 nt, Human
uuaacuugagcuuuaaa

SEQ ID NO: 2515079 - RNA, 12 nt, Human
uuaacuucugcc

SEQ ID NO: 2515080 - RNA, 18 nt, Human
uuaacuuuuauaaacuuu

SEQ ID NO: 2515081 - RNA, 21 nt, Human
uuaagcagauggaaugcugug

SEQ ID NO: 2515082 - RNA, 22 nt, Human
uuaacuugaggguaauaaacuu

SEQ ID NO: 2515083 - RNA, 16 nt, Human
uuaacuuuuauaaacu

SEQ ID NO: 2515084 - RNA, 17 nt, Human
uuaacuuuuauaaacuu

SEQ ID NO: 2515085 - RNA, 16 nt, Human
uuaacuucacauauug

SEQ ID NO: 2515086 - RNA, 18 nt, Human
uuaacuuagcuugaagga

SEQ ID NO: 2515087 - RNA, 18 nt, Human
uuaacuuaacauucugua

SEQ ID NO: 2515088 - RNA, 15 nt, Human
uuaacuuuuauaaac

SEQ ID NO: 2515089 - RNA, 14 nt, Human
uuaacuucucugga

SEQ ID NO: 2515090 - RNA, 22 nt, Human
uuaacuucagagggaaaguaaa

SEQ ID NO: 2515091 - RNA, 22 nt, Human
uuaacuuaaauuuuaauuuauu

SEQ ID NO: 2515092 - RNA, 13 nt, Human
uuaacucugucuu

SEQ ID NO: 2515093 - RNA, 12 nt, Human
uuaacucugucu

SEQ ID NO: 2515094 - RNA, 21 nt, Human
uuaacuagaauuuauucaauu

SEQ ID NO: 2515095 - RNA, 16 nt, Human
uuaacuagaauuuauu

SEQ ID NO: 2515096 - RNA, 15 nt, Human
uuaacuagaauuuau

SEQ ID NO: 2515097 - RNA, 19 nt, Human
uuaacuauuuuauuuucua

SEQ ID NO: 2515098 - RNA, 12 nt, Human
uuaacucagucu

SEQ ID NO: 2515099 - RNA, 22 nt, Human
uuaacucagaucacuacugcag

SEQ ID NO: 2515100 - RNA, 15 nt, Human
uuaacucagaucacu

SEQ ID NO: 2515101 - RNA, 14 nt, Human
uuaacucagaucac

SEQ ID NO: 2515102 - RNA, 23 nt, Human
uuaacuaauaugggcauuguagu

SEQ ID NO: 2515103 - RNA, 12 nt, Human
uuaacucaauau

SEQ ID NO: 2515104 - RNA, 21 nt, Human
uuaaugauaaguaaaugcuag

SEQ ID NO: 2515105 - RNA, 15 nt, Human
uuaauauucuauuaa

SEQ ID NO: 2515106 - RNA, 22 nt, Human
uuaauauucauuguauaaaaau

SEQ ID NO: 2515107 - RNA, 17 nt, Human
uuaaugauaaguaaaug

SEQ ID NO: 2515108 - RNA, 18 nt, Human
uuaauauugauaugcuua

SEQ ID NO: 2515109 - RNA, 22 nt, Human
uuaauauugauaugcuuauaca

SEQ ID NO: 2515110 - RNA, 19 nt, Human
uuaauauaucccagaaauu

SEQ ID NO: 2515111 - RNA, 20 nt, Human
uuaauauaucccagaaauua

SEQ ID NO: 2515112 - RNA, 17 nt, Human
uuaauauagcuauuuuu

SEQ ID NO: 2515113 - RNA, 15 nt, Human
uuaauauagcuauuu

SEQ ID NO: 2515114 - RNA, 23 nt, Human
uuaauauaacugccuuaaaacuu

SEQ ID NO: 2515115 - RNA, 18 nt, Human
uuaagcagcucuugcuaa

SEQ ID NO: 2515116 - RNA, 17 nt, Human
uuaagcagcucuugcua

SEQ ID NO: 2515117 - RNA, 13 nt, Human
uuaagcagcucuu

SEQ ID NO: 2515118 - RNA, 12 nt, Human
uuaagcagcucu

SEQ ID NO: 2515119 - RNA, 15 nt, Human
uuaagccuuuggaaa

SEQ ID NO: 2515120 - RNA, 16 nt, Human
uuaagccuuuggaaac

SEQ ID NO: 2515121 - RNA, 21 nt, Human
uuaagccucauauuuaaagac

SEQ ID NO: 2515122 - RNA, 22 nt, Human
uuaagccucauauuuaaagaca

SEQ ID NO: 2515123 - RNA, 20 nt, Human
uuaagcagcucuugcuaauc

SEQ ID NO: 2515124 - RNA, 17 nt, Human
uuaagcuguuacugucu

SEQ ID NO: 2515125 - RNA, 15 nt, Human
uuaauauaacugccu

SEQ ID NO: 2515126 - RNA, 15 nt, Human
uuaaugugcugugua

SEQ ID NO: 2515127 - RNA, 14 nt, Human
uuaaugugcugugu

SEQ ID NO: 2515128 - RNA, 15 nt, Human
uuaauguagccaugg

SEQ ID NO: 2515129 - RNA, 19 nt, Human
uuaaugugcuguguaaagu

SEQ ID NO: 2515130 - RNA, 18 nt, Human
uuaaugugcuguguaaag

SEQ ID NO: 2515131 - RNA, 17 nt, Human
uuaaugugcuguguaaa

SEQ ID NO: 2515132 - RNA, 16 nt, Human
uuaaugugcuguguaa

SEQ ID NO: 2515133 - RNA, 22 nt, Human
uuaaugugcuguguaaaguuag

SEQ ID NO: 2515134 - RNA, 21 nt, Human
uuaaugugcuguguaaaguua

SEQ ID NO: 2515135 - RNA, 13 nt, Human
uuaauguguauua

SEQ ID NO: 2515136 - RNA, 15 nt, Human
uuaauguagauuuuu

SEQ ID NO: 2515137 - RNA, 17 nt, Human
uuaauggugccuucauu

SEQ ID NO: 2515138 - RNA, 19 nt, Human
uuaauggugccuucauuug

SEQ ID NO: 2515139 - RNA, 20 nt, Human
uuaauggugccuucauuugg

SEQ ID NO: 2515140 - RNA, 18 nt, Human
uuaauguaaucugauggc

SEQ ID NO: 2515141 - RNA, 19 nt, Human
uuaauggggguagcagcug

SEQ ID NO: 2515142 - RNA, 21 nt, Human
uuaauggggguagcagcugga

SEQ ID NO: 2515143 - RNA, 14 nt, Human
uuaaugcacuuucu

SEQ ID NO: 2515144 - RNA, 13 nt, Human
uuaaugcacuuuc

SEQ ID NO: 2515145 - RNA, 12 nt, Human
uuaaugcacuuu

SEQ ID NO: 2515146 - RNA, 11 nt, Human
uuaaugcacuu

SEQ ID NO: 2515147 - RNA, 15 nt, Human
uuaaugcacuuucua

SEQ ID NO: 2515148 - RNA, 19 nt, Human
uuaaugccauuaucccuga

SEQ ID NO: 2515149 - RNA, 18 nt, Human
uuaaugcaucuagauuau

SEQ ID NO: 2515150 - RNA, 20 nt, Human
uuaaugcauguuaggaaaau

SEQ ID NO: 2515151 - RNA, 16 nt, Human
uuacaauguucauccc

SEQ ID NO: 2515152 - RNA, 21 nt, Human
uuacaagcgugagccacugca

SEQ ID NO: 2515153 - RNA, 19 nt, Human
uuacaauucccugcugucg

SEQ ID NO: 2515154 - RNA, 18 nt, Human
uuacaauucccugcuguc

SEQ ID NO: 2515155 - RNA, 13 nt, Human
uuacaauugaaau

SEQ ID NO: 2515156 - RNA, 14 nt, Human
uuacaauugaaaug

SEQ ID NO: 2515157 - RNA, 15 nt, Human
uuacaauugaaauga

SEQ ID NO: 2515158 - RNA, 19 nt, Human
uuacaauuuacaaagugug

SEQ ID NO: 2515159 - RNA, 18 nt, Human
uuacaauuuacaaagugu

SEQ ID NO: 2515160 - RNA, 16 nt, Human
uuacaauuuacaaagu

SEQ ID NO: 2515161 - RNA, 13 nt, Human
uuacaauuuacaa

SEQ ID NO: 2515162 - RNA, 12 nt, Human
uuacaauuuaca

SEQ ID NO: 2515163 - RNA, 13 nt, Human
uuacaauugucau

SEQ ID NO: 2515164 - RNA, 17 nt, Human
uuacaauugaaaugacu

SEQ ID NO: 2515165 - RNA, 23 nt, Human
uuaauguucugaauaauuucuua

SEQ ID NO: 2515166 - RNA, 22 nt, Human
uuaauguucugaauaauuucuu

SEQ ID NO: 2515167 - RNA, 15 nt, Human
uuaauguuuauuccu

SEQ ID NO: 2515168 - RNA, 17 nt, Human
uuaauguuuauuccuga

SEQ ID NO: 2515169 - RNA, 20 nt, Human
uuacaagcgugagccacugc

SEQ ID NO: 2515170 - RNA, 20 nt, Human
uuacaagcccccccuuccac

SEQ ID NO: 2515171 - RNA, 19 nt, Human
uuacaagcccccccuucca

SEQ ID NO: 2515172 - RNA, 17 nt, Human
uuacaagcccccccuuc

SEQ ID NO: 2515173 - RNA, 20 nt, Human
uggugccacaaauaaaaugg

SEQ ID NO: 2515174 - RNA, 18 nt, Human
uggugccacaaauaaaau

SEQ ID NO: 2515175 - RNA, 17 nt, Human
uggugccacaaauaaaa

SEQ ID NO: 2515176 - RNA, 22 nt, Human
uggugccaauggaaccuccuuu

SEQ ID NO: 2515177 - RNA, 21 nt, Human
uggugccagccuuccucugca

SEQ ID NO: 2515178 - RNA, 13 nt, Human
uggugccagccuu

SEQ ID NO: 2515179 - RNA, 14 nt, Human
uggugccagccuuc

SEQ ID NO: 2515180 - RNA, 13 nt, Human
uggugccccagga

SEQ ID NO: 2515181 - RNA, 14 nt, Human
uggugccccaggac

SEQ ID NO: 2515182 - RNA, 16 nt, Human
uggugccccaggacca

SEQ ID NO: 2515183 - RNA, 17 nt, Human
uggugccccaggaccag

SEQ ID NO: 2515184 - RNA, 18 nt, Human
uggugccccaggaccagc

SEQ ID NO: 2515185 - RNA, 19 nt, Human
uggugccccaggaccagcu

SEQ ID NO: 2515186 - RNA, 20 nt, Human
uggugccccaggaccagcuc

SEQ ID NO: 2515187 - RNA, 21 nt, Human
uggugccccaggaccagcuca

SEQ ID NO: 2515188 - RNA, 16 nt, Human
uguuuagaagaagugu

SEQ ID NO: 2515189 - RNA, 19 nt, Human
uguuuagaagaaguguguc

SEQ ID NO: 2515190 - RNA, 23 nt, Human
uggugccccaggaccagcucagg

SEQ ID NO: 2515191 - RNA, 16 nt, Human
uguuuagaguugcaau

SEQ ID NO: 2515192 - RNA, 19 nt, Human
uguuucaaacauauauaac

SEQ ID NO: 2515193 - RNA, 16 nt, Human
uguuuagauaauacac

SEQ ID NO: 2515194 - RNA, 22 nt, Human
uguuucaaacauauauaacaau

SEQ ID NO: 2515195 - RNA, 21 nt, Human
uguuucaaacauauauaacaa

SEQ ID NO: 2515196 - RNA, 17 nt, Human
uguuuagaguugcaauc

SEQ ID NO: 2515197 - RNA, 15 nt, Human
uguuucaaacuuuac

SEQ ID NO: 2515198 - RNA, 21 nt, Human
uguuucaaguggggcucgcca

SEQ ID NO: 2515199 - RNA, 17 nt, Human
uguuucaaguggggcuc

SEQ ID NO: 2515200 - RNA, 16 nt, Human
uguuucaauugcaucu

SEQ ID NO: 2515201 - RNA, 18 nt, Human
uguuucacgaaguuuguu

SEQ ID NO: 2515202 - RNA, 20 nt, Human
uguuucauauugaugugugu

SEQ ID NO: 2515203 - RNA, 21 nt, Human
uguuucuagcacuggccugca

SEQ ID NO: 2515204 - RNA, 21 nt, Human
uguuucuaauaaagaaagcag

SEQ ID NO: 2515205 - RNA, 11 nt, Human
uguuuccuuuu

SEQ ID NO: 2515206 - RNA, 22 nt, Human
uguuucggagacgggaccgggc

SEQ ID NO: 2515207 - RNA, 21 nt, Human
uguuucgcugauauauguguu

SEQ ID NO: 2515208 - RNA, 15 nt, Human
uguuucguggggagg

SEQ ID NO: 2515209 - RNA, 20 nt, Human
uguuucgugaaguauacugu

SEQ ID NO: 2515210 - RNA, 15 nt, Human
uguuucgugaaguau

SEQ ID NO: 2515211 - RNA, 19 nt, Human
uguuucgugaaguauacug

SEQ ID NO: 2515212 - RNA, 22 nt, Human
uguuuccaauguuuagcaaaua

SEQ ID NO: 2515213 - RNA, 21 nt, Human
uguuuccaauguuuagcaaau

SEQ ID NO: 2515214 - RNA, 15 nt, Human
uguuuccaauguuua

SEQ ID NO: 2515215 - RNA, 18 nt, Human
uguuuccaaccuggagua

SEQ ID NO: 2515216 - RNA, 23 nt, Human
uguuuccagacuuccuugagaca

SEQ ID NO: 2515217 - RNA, 14 nt, Human
uguuucauguuuug

SEQ ID NO: 2515218 - RNA, 13 nt, Human
uguuucauguuuu

SEQ ID NO: 2515219 - RNA, 21 nt, Human
uguuucauguuuugugacuau

SEQ ID NO: 2515220 - RNA, 19 nt, Human
uguuucauguuuugugacu

SEQ ID NO: 2515221 - RNA, 22 nt, Human
uguuucauguuuugugacuaua

SEQ ID NO: 2515222 - RNA, 23 nt, Human
uguuuccaauguuuagcaaauac

SEQ ID NO: 2515223 - RNA, 20 nt, Human
uguuuccagacuuccuugag

SEQ ID NO: 2515224 - RNA, 23 nt, Human
uguuuccuggcacugcuuccagu

SEQ ID NO: 2515225 - RNA, 12 nt, Human
uguuuccuucag

SEQ ID NO: 2515226 - RNA, 15 nt, Human
uguuuccuucagugc

SEQ ID NO: 2515227 - RNA, 13 nt, Human
uguuugugcugug

SEQ ID NO: 2515228 - RNA, 14 nt, Human
uguuugugcugugg

SEQ ID NO: 2515229 - RNA, 16 nt, Human
uguuugucuucucccc

SEQ ID NO: 2515230 - RNA, 17 nt, Human
uguuugucuucucccca

SEQ ID NO: 2515231 - RNA, 20 nt, Human
uguuuuaagaggcagggucu

SEQ ID NO: 2515232 - RNA, 13 nt, Human
uguuugugauuga

SEQ ID NO: 2515233 - RNA, 16 nt, Human
uguuugucucauccca

SEQ ID NO: 2515234 - RNA, 16 nt, Human
uguuugucagauauga

SEQ ID NO: 2515235 - RNA, 19 nt, Human
uguuugucugucuucauag

SEQ ID NO: 2515236 - RNA, 17 nt, Human
uguuugucugucuucau

SEQ ID NO: 2515237 - RNA, 16 nt, Human
uguuugguucuggggc

SEQ ID NO: 2515238 - RNA, 20 nt, Human
uguuugguucuggggccccu

SEQ ID NO: 2515239 - RNA, 17 nt, Human
uguuugguauuguauuu

SEQ ID NO: 2515240 - RNA, 16 nt, Human
uguuugguauuguauu

SEQ ID NO: 2515241 - RNA, 22 nt, Human
uguuugguauuguauuuauuca

SEQ ID NO: 2515242 - RNA, 17 nt, Human
uguuugucauuagccug

SEQ ID NO: 2515243 - RNA, 15 nt, Human
uguuugucauuagcc

SEQ ID NO: 2515244 - RNA, 19 nt, Human
uguuuguauaaugaaugag

SEQ ID NO: 2515245 - RNA, 15 nt, Human
uguuuguauguauaa

SEQ ID NO: 2515246 - RNA, 15 nt, Human
uuaaaagaugaaaau

SEQ ID NO: 2515247 - RNA, 18 nt, Human
uuaaaagaugaaaauauu

SEQ ID NO: 2515248 - RNA, 21 nt, Human
uuaaaagauucauuuuuaauc

SEQ ID NO: 2515249 - RNA, 17 nt, Human
uuaaaagauucauuuuu

SEQ ID NO: 2515250 - RNA, 16 nt, Human
uuaaaagauucauuuu

SEQ ID NO: 2515251 - RNA, 21 nt, Human
uuaaaagaugcaauguagagg

SEQ ID NO: 2515252 - RNA, 19 nt, Human
uuaaaauacacacucaaau

SEQ ID NO: 2515253 - RNA, 21 nt, Human
uuaaaauaccagccaguaaau

SEQ ID NO: 2515254 - RNA, 23 nt, Human
uuaaaagggauuacccaagcaaa

SEQ ID NO: 2515255 - RNA, 21 nt, Human
uuaaaagggauuacccaagca

SEQ ID NO: 2515256 - RNA, 22 nt, Human
uuaaaaggauuuuuaucuuucg

SEQ ID NO: 2515257 - RNA, 20 nt, Human
uuaaaaggauuuuuaucuuu

SEQ ID NO: 2515258 - RNA, 17 nt, Human
uuaaaaggauuuuuauc

SEQ ID NO: 2515259 - RNA, 22 nt, Human
uuaaacucagggacagagccau

SEQ ID NO: 2515260 - RNA, 20 nt, Human
uuaaacucagggacagagcc

SEQ ID NO: 2515261 - RNA, 16 nt, Human
uuaaacucagggacag

SEQ ID NO: 2515262 - RNA, 22 nt, Human
uuaaacucuguugcaagugcaa

SEQ ID NO: 2515263 - RNA, 19 nt, Human
uuaaacucuucacaaaauc

SEQ ID NO: 2515264 - RNA, 15 nt, Human
uuaaaauagaaauaa

SEQ ID NO: 2515265 - RNA, 22 nt, Human
uuaaaauagcaacacucuauau

SEQ ID NO: 2515266 - RNA, 19 nt, Human
uuaaacugguauuuuaucu

SEQ ID NO: 2515267 - RNA, 13 nt, Human
uuaaacugguauu

SEQ ID NO: 2515268 - RNA, 22 nt, Human
uuaaacugguauuuuaucuuug

SEQ ID NO: 2515269 - RNA, 12 nt, Human
uuaaacugugua

SEQ ID NO: 2515270 - RNA, 19 nt, Human
uuaaacuguguacauaacu

SEQ ID NO: 2515271 - RNA, 21 nt, Human
uuaaacuguguggacugugau

SEQ ID NO: 2515272 - RNA, 11 nt, Human
uuaaagaaagu

SEQ ID NO: 2515273 - RNA, 20 nt, Human
uuaaacuguguggacuguga

SEQ ID NO: 2515274 - RNA, 21 nt, Human
uuaaaagaauauuuuaacuuc

SEQ ID NO: 2515275 - RNA, 22 nt, Human
uuaaaagaauauuuuaacuucc

SEQ ID NO: 2515276 - RNA, 14 nt, Human
uuaaaagauacagu

SEQ ID NO: 2515277 - RNA, 17 nt, Human
uuaaaagauacaguuac

SEQ ID NO: 2515278 - RNA, 16 nt, Human
uguuuuuuggucuuuu

SEQ ID NO: 2515279 - RNA, 18 nt, Human
uguuuuuuuuuaaagacu

SEQ ID NO: 2515280 - RNA, 22 nt, Human
uuaaaagaaaauaaaaaaaaga

SEQ ID NO: 2515281 - RNA, 23 nt, Human
uuaaaagaaaauaaaaaaaagaa

SEQ ID NO: 2515282 - RNA, 20 nt, Human
uuaaaagaaagccucagaga

SEQ ID NO: 2515283 - RNA, 19 nt, Human
uguuuuuuuuuuccacuua

SEQ ID NO: 2515284 - RNA, 18 nt, Human
uguuuuuuuuuuccacuu

SEQ ID NO: 2515285 - RNA, 17 nt, Human
uguuuuguuuggagaca

SEQ ID NO: 2515286 - RNA, 17 nt, Human
uguuuuguucuuuaaag

SEQ ID NO: 2515287 - RNA, 14 nt, Human
uguuuuuuggucuu

SEQ ID NO: 2515288 - RNA, 18 nt, Human
uguuuuaaggaugcuugu

SEQ ID NO: 2515289 - RNA, 22 nt, Human
uguuuuaagaggcagggucuca

SEQ ID NO: 2515290 - RNA, 16 nt, Human
uguuuuguucuguggu

SEQ ID NO: 2515291 - RNA, 12 nt, Human
uuaguagcaugu

SEQ ID NO: 2515292 - RNA, 13 nt, Human
uuaguagcauguu

SEQ ID NO: 2515293 - RNA, 17 nt, Human
uuaguagagacaggguu

SEQ ID NO: 2515294 - RNA, 19 nt, Human
uuaggcugguggcccagga

SEQ ID NO: 2515295 - RNA, 17 nt, Human
uuaggcugguggcccag

SEQ ID NO: 2515296 - RNA, 18 nt, Human
uuaggcugguggcccagg

SEQ ID NO: 2515297 - RNA, 16 nt, Human
uuaggcugguggccca

SEQ ID NO: 2515298 - RNA, 15 nt, Human
uuaggccuggcacag

SEQ ID NO: 2515299 - RNA, 14 nt, Human
uuaggccuggcaca

SEQ ID NO: 2515300 - RNA, 12 nt, Human
uuaggccuggca

SEQ ID NO: 2515301 - RNA, 18 nt, Human
uuaggccuggcacagugu

SEQ ID NO: 2515302 - RNA, 17 nt, Human
uuaggccuggcacagug

SEQ ID NO: 2515303 - RNA, 16 nt, Human
uuaggccuuccucucu

SEQ ID NO: 2515304 - RNA, 15 nt, Human
uuaggcuauucacaa

SEQ ID NO: 2515305 - RNA, 16 nt, Human
uuaggcuauucacaac

SEQ ID NO: 2515306 - RNA, 18 nt, Human
uuaggcagggauuugagg

SEQ ID NO: 2515307 - RNA, 12 nt, Human
uuaggcagggau

SEQ ID NO: 2515308 - RNA, 19 nt, Human
uuaggcagggauuugagga

SEQ ID NO: 2515309 - RNA, 22 nt, Human
uuaggccaaaaaaauguaagau

SEQ ID NO: 2515310 - RNA, 12 nt, Human
uuaggagaagcc

SEQ ID NO: 2515311 - RNA, 13 nt, Human
uuaggagaagcca

SEQ ID NO: 2515312 - RNA, 23 nt, Human
uuaggaauuaaguuaucuuuaaa

SEQ ID NO: 2515313 - RNA, 19 nt, Human
uuaggaauuaaguuaucuu

SEQ ID NO: 2515314 - RNA, 21 nt, Human
uuaggacaaucaguccccucc

SEQ ID NO: 2515315 - RNA, 16 nt, Human
uuaggagaagccagga

SEQ ID NO: 2515316 - RNA, 17 nt, Human
uuaggagaagccaggaa

SEQ ID NO: 2515317 - RNA, 23 nt, Human
uuaggagauuuuagguguugauu

SEQ ID NO: 2515318 - RNA, 15 nt, Human
uuaggaagagaaacc

SEQ ID NO: 2515319 - RNA, 13 nt, Human
uuaggaaguguaa

SEQ ID NO: 2515320 - RNA, 19 nt, Human
uuaggaaguguaacagcug

SEQ ID NO: 2515321 - RNA, 20 nt, Human
uuaggaaguguaacagcuga

SEQ ID NO: 2515322 - RNA, 21 nt, Human
uuaggaaguguaacagcugag

SEQ ID NO: 2515323 - RNA, 18 nt, Human
uuaggauguugaaaaagu

SEQ ID NO: 2515324 - RNA, 19 nt, Human
uuaggagggaguuaucuaa

SEQ ID NO: 2515325 - RNA, 21 nt, Human
uuaggaguucgagaccagccu

SEQ ID NO: 2515326 - RNA, 13 nt, Human
uuaggcagcagcu

SEQ ID NO: 2515327 - RNA, 23 nt, Human
uuaggcagcagcuuuuaauacag

SEQ ID NO: 2515328 - RNA, 14 nt, Human
uuaggcagggaagu

SEQ ID NO: 2515329 - RNA, 22 nt, Human
uuaggauuuaacagucauuuaa

SEQ ID NO: 2515330 - RNA, 15 nt, Human
uuaggcagauugaaa

SEQ ID NO: 2515331 - RNA, 21 nt, Human
uuaggauuuaacagucauuua

SEQ ID NO: 2515332 - RNA, 14 nt, Human
uuaggauuuaacag

SEQ ID NO: 2515333 - RNA, 16 nt, Human
uuaggaugugugcaug

SEQ ID NO: 2515334 - RNA, 16 nt, Human
uuaguaugaggcauuu

SEQ ID NO: 2515335 - RNA, 15 nt, Human
uuaguaucuaacaug

SEQ ID NO: 2515336 - RNA, 17 nt, Human
uuaguaucuaacaugua

SEQ ID NO: 2515337 - RNA, 18 nt, Human
uuaguaucuaacauguau

SEQ ID NO: 2515338 - RNA, 18 nt, Human
uuaguaugaggcauuugu

SEQ ID NO: 2515339 - RNA, 23 nt, Human
uuaguaucuaacauguaucccaa

SEQ ID NO: 2515340 - RNA, 24 nt, Human
uuagucgugagcucuugugaggaa

SEQ ID NO: 2515341 - RNA, 21 nt, Human
uuagucgugagcucuugugag

SEQ ID NO: 2515342 - RNA, 19 nt, Human
uuagucgugagcucuugug

SEQ ID NO: 2515343 - RNA, 16 nt, Human
uuagucgugagcucuu

SEQ ID NO: 2515344 - RNA, 13 nt, Human
uuaguccuugcuu

SEQ ID NO: 2515345 - RNA, 13 nt, Human
uuagucgugagcu

SEQ ID NO: 2515346 - RNA, 17 nt, Human
uuagucccucaugcaaa

SEQ ID NO: 2515347 - RNA, 22 nt, Human
uuaguauuuauuuaauguuaug

SEQ ID NO: 2515348 - RNA, 13 nt, Human
uuaguauuugcau

SEQ ID NO: 2515349 - RNA, 16 nt, Human
uuaguauuugcauauu

SEQ ID NO: 2515350 - RNA, 14 nt, Human
uuagucaugugacc

SEQ ID NO: 2515351 - RNA, 13 nt, Human
uuagucaugugac

SEQ ID NO: 2515352 - RNA, 13 nt, Human
uuagucacuuuuu

SEQ ID NO: 2515353 - RNA, 23 nt, Human
uuagucacugccugcagaggucu

SEQ ID NO: 2515354 - RNA, 22 nt, Human
uuagucacuuuuuuuuuccaaa

SEQ ID NO: 2515355 - RNA, 22 nt, Human
uuaguuauaguuucagauauau

SEQ ID NO: 2515356 - RNA, 18 nt, Human
uuaguuauaguuucagau

SEQ ID NO: 2515357 - RNA, 15 nt, Human
uuaguuauaguuuca

SEQ ID NO: 2515358 - RNA, 13 nt, Human
uuaguuauaguuu

SEQ ID NO: 2515359 - RNA, 16 nt, Human
uuaguuauagaugucu

SEQ ID NO: 2515360 - RNA, 13 nt, Human
uuaguuaauauau

SEQ ID NO: 2515361 - RNA, 18 nt, Human
uuaguguuucugugcaug

SEQ ID NO: 2515362 - RNA, 17 nt, Human
uuaguguuucugugcau

SEQ ID NO: 2515363 - RNA, 21 nt, Human
uuaguguuuggguauauucau

SEQ ID NO: 2515364 - RNA, 14 nt, Human
uuaguguucauaaa

SEQ ID NO: 2515365 - RNA, 16 nt, Human
uuaguguuucugugca

SEQ ID NO: 2515366 - RNA, 12 nt, Human
uuaguguuucug

SEQ ID NO: 2515367 - RNA, 23 nt, Human
uuagugucacuuaccuagauuua

SEQ ID NO: 2515368 - RNA, 22 nt, Human
uuagucuacucuuaagccaucu

SEQ ID NO: 2515369 - RNA, 21 nt, Human
uuagucuacucuuaagccauc

SEQ ID NO: 2515370 - RNA, 20 nt, Human
uuagucuacucuuaagccau

SEQ ID NO: 2515371 - RNA, 19 nt, Human
uuagucuacucuuaagcca

SEQ ID NO: 2515372 - RNA, 21 nt, Human
uuagucucaguuugugugucu

SEQ ID NO: 2515373 - RNA, 12 nt, Human
uuagucucaguu

SEQ ID NO: 2515374 - RNA, 23 nt, Human
uuagucucaguuugugugucuua

SEQ ID NO: 2515375 - RNA, 22 nt, Human
uuagucucaguuugugugucuu

SEQ ID NO: 2515376 - RNA, 22 nt, Human
uuagucucuuguauuaaacucu

SEQ ID NO: 2515377 - RNA, 18 nt, Human
uuagucucuaaagaguuu

SEQ ID NO: 2515378 - RNA, 22 nt, Human
uuagauaauacaccacuacauu

SEQ ID NO: 2515379 - RNA, 16 nt, Human
uuagaguuaacaauga

SEQ ID NO: 2515380 - RNA, 23 nt, Human
uuagaucaaauacuuuaaaggaa

SEQ ID NO: 2515381 - RNA, 17 nt, Human
uuagauauaacacuaug

SEQ ID NO: 2515382 - RNA, 14 nt, Human
uuagauauaacacu

SEQ ID NO: 2515383 - RNA, 13 nt, Human
uuagaucaaauac

SEQ ID NO: 2515384 - RNA, 21 nt, Human
uuagaugcaguucugaagaag

SEQ ID NO: 2515385 - RNA, 20 nt, Human
uuagaugcaguucugaagaa

SEQ ID NO: 2515386 - RNA, 21 nt, Human
uuagcuaaacggauuccaaag

SEQ ID NO: 2515387 - RNA, 16 nt, Human
uuagcuacuauauaug

SEQ ID NO: 2515388 - RNA, 12 nt, Human
uuagcuaaagga

SEQ ID NO: 2515389 - RNA, 21 nt, Human
uuagcguagcuaagugaaaag

SEQ ID NO: 2515390 - RNA, 18 nt, Human
uuagaguuagacuguugg

SEQ ID NO: 2515391 - RNA, 17 nt, Human
uuagaguuagacuguug

SEQ ID NO: 2515392 - RNA, 14 nt, Human
uuagaguuagacug

SEQ ID NO: 2515393 - RNA, 14 nt, Human
uuagaguugauacu

SEQ ID NO: 2515394 - RNA, 13 nt, Human
uuagaguuagacu

SEQ ID NO: 2515395 - RNA, 12 nt, Human
uuagaguuagac

SEQ ID NO: 2515396 - RNA, 16 nt, Human
uuagagugucuuucca

SEQ ID NO: 2515397 - RNA, 17 nt, Human
uuagagugucuuuccac

SEQ ID NO: 2515398 - RNA, 21 nt, Human
uuagagguuuuaaagugauua

SEQ ID NO: 2515399 - RNA, 19 nt, Human
uuagagguuuuaaagugau

SEQ ID NO: 2515400 - RNA, 13 nt, Human
uuagagguuuuaa

SEQ ID NO: 2515401 - RNA, 20 nt, Human
uuagagguuuuaaagugauu

SEQ ID NO: 2515402 - RNA, 14 nt, Human
uuagagucagccuu

SEQ ID NO: 2515403 - RNA, 21 nt, Human
uuagagcugacacaaaccugc

SEQ ID NO: 2515404 - RNA, 13 nt, Human
uuagagccucccu

SEQ ID NO: 2515405 - RNA, 22 nt, Human
uuagagccaggcacacacugug

SEQ ID NO: 2515406 - RNA, 14 nt, Human
uuagagccucccuc

SEQ ID NO: 2515407 - RNA, 17 nt, Human
uuagaggaaaaaaauga

SEQ ID NO: 2515408 - RNA, 18 nt, Human
uuagaggaaaaaaaugac

SEQ ID NO: 2515409 - RNA, 23 nt, Human
uuagaggaaauaagaaaaaucau

SEQ ID NO: 2515410 - RNA, 22 nt, Human
uuagaggaaauaagaaaaauca

SEQ ID NO: 2515411 - RNA, 20 nt, Human
uuagaggaaauaagaaaaau

SEQ ID NO: 2515412 - RNA, 19 nt, Human
uuagaggaaaaaaaugacu

SEQ ID NO: 2515413 - RNA, 18 nt, Human
uuagagggaggagaauga

SEQ ID NO: 2515414 - RNA, 18 nt, Human
uuagagggagguguuuaa

SEQ ID NO: 2515415 - RNA, 12 nt, Human
uuagaggccagc

SEQ ID NO: 2515416 - RNA, 21 nt, Human
uuagagccaggcacacacugu

SEQ ID NO: 2515417 - RNA, 16 nt, Human
uuagagccaggcacac

SEQ ID NO: 2515418 - RNA, 15 nt, Human
uuagagcauugccau

SEQ ID NO: 2515419 - RNA, 20 nt, Human
uuagagcaguuucuguccug

SEQ ID NO: 2515420 - RNA, 13 nt, Human
uuagagaugaauu

SEQ ID NO: 2515421 - RNA, 21 nt, Human
uuagagcagaugaccccuccc

SEQ ID NO: 2515422 - RNA, 16 nt, Human
uuagcugugugaaaua

SEQ ID NO: 2515423 - RNA, 16 nt, Human
uuagcuguuauuucua

SEQ ID NO: 2515424 - RNA, 17 nt, Human
uuagcuguuauuucuau

SEQ ID NO: 2515425 - RNA, 19 nt, Human
uuagcuguuauuucuauuu

SEQ ID NO: 2515426 - RNA, 21 nt, Human
uuagcuguuauuucuauuuuu

SEQ ID NO: 2515427 - RNA, 16 nt, Human
uuagcuuagaccucag

SEQ ID NO: 2515428 - RNA, 17 nt, Human
uuagcuuagaccucagc

SEQ ID NO: 2515429 - RNA, 18 nt, Human
uuagcuuagaccucagcc

SEQ ID NO: 2515430 - RNA, 21 nt, Human
uuagcuuagaccucagccugu

SEQ ID NO: 2515431 - RNA, 15 nt, Human
uuagcuuugcucugc

SEQ ID NO: 2515432 - RNA, 17 nt, Human
uuagcuuuacuguuugu

SEQ ID NO: 2515433 - RNA, 15 nt, Human
uuagcuuuacuguuu

SEQ ID NO: 2515434 - RNA, 16 nt, Human
uuagcuuuacuguuug

SEQ ID NO: 2515435 - RNA, 21 nt, Human
uuagcuugaaggaucuguuuu

SEQ ID NO: 2515436 - RNA, 17 nt, Human
uuagcuuuuuaauuguu

SEQ ID NO: 2515437 - RNA, 16 nt, Human
uuagcuuuuuaauugu

SEQ ID NO: 2515438 - RNA, 19 nt, Human
uuagcuuugcucugccaac

SEQ ID NO: 2515439 - RNA, 18 nt, Human
uuagcuuuuuaauuguug

SEQ ID NO: 2515440 - RNA, 11 nt, Human
uuaggaaauaa

SEQ ID NO: 2515441 - RNA, 12 nt, Human
uuaggaaauaaa

SEQ ID NO: 2515442 - RNA, 17 nt, Human
uuaggaaaugaaugugu

SEQ ID NO: 2515443 - RNA, 15 nt, Human
uuaggaaaugaaugu

SEQ ID NO: 2515444 - RNA, 19 nt, Human
uuaggaaaugaaugugugu

SEQ ID NO: 2515445 - RNA, 20 nt, Human
uuaggaaauaaaaccuuuca

SEQ ID NO: 2515446 - RNA, 21 nt, Human
uuaggaaauaaaaccuuucaa

SEQ ID NO: 2515447 - RNA, 15 nt, Human
uuaggaaauaaaacc

SEQ ID NO: 2515448 - RNA, 17 nt, Human
uuaggaaauaaaaccuu

SEQ ID NO: 2515449 - RNA, 18 nt, Human
uuaggaaauaaaaccuuu

SEQ ID NO: 2515450 - RNA, 19 nt, Human
uuaggaaauaaaaccuuuc

SEQ ID NO: 2515451 - RNA, 13 nt, Human
uuagcuccugugg

SEQ ID NO: 2515452 - RNA, 20 nt, Human
uuagcucccuguucuugggu

SEQ ID NO: 2515453 - RNA, 18 nt, Human
uuagcuccccuccaaccu

SEQ ID NO: 2515454 - RNA, 14 nt, Human
uuagcuccccucca

SEQ ID NO: 2515455 - RNA, 13 nt, Human
uuagcuccccucc

SEQ ID NO: 2515456 - RNA, 22 nt, Human
uuagcucuuaauuguucauuuu

SEQ ID NO: 2515457 - RNA, 12 nt, Human
uuagcucuuaau

SEQ ID NO: 2515458 - RNA, 19 nt, Human
uuagcucuggaccagccug

SEQ ID NO: 2515459 - RNA, 14 nt, Human
uuagcuccuguggc

SEQ ID NO: 2515460 - RNA, 23 nt, Human
uuagcucuuaauuguucauuuug

SEQ ID NO: 2515461 - RNA, 10 nt, Human
uuagcugagc

SEQ ID NO: 2515462 - RNA, 23 nt, Human
uuagcugaugaacuuauucugua

SEQ ID NO: 2515463 - RNA, 13 nt, Human
uuagcugcagaac

SEQ ID NO: 2515464 - RNA, 13 nt, Human
uuagcuggaaaag

SEQ ID NO: 2515465 - RNA, 12 nt, Human
uuagcuggaaaa

SEQ ID NO: 2515466 - RNA, 17 nt, Human
uuagcugucugcucaga

SEQ ID NO: 2515467 - RNA, 15 nt, Human
uuagcugugugaaau

SEQ ID NO: 2515468 - RNA, 15 nt, Human
uuagcugucugcuca

SEQ ID NO: 2515469 - RNA, 12 nt, Human
uuagcugggaga

SEQ ID NO: 2515470 - RNA, 16 nt, Human
uuagcuggcauuacag

SEQ ID NO: 2515471 - RNA, 20 nt, Human
uuacuaagccacaagaaauu

SEQ ID NO: 2515472 - RNA, 18 nt, Human
uuacuaagccacaagaaa

SEQ ID NO: 2515473 - RNA, 17 nt, Human
uuacuaagccacaagaa

SEQ ID NO: 2515474 - RNA, 21 nt, Human
uuacuaagcauagcaaacaga

SEQ ID NO: 2515475 - RNA, 23 nt, Human
uuacuaagaugacauugcuaaga

SEQ ID NO: 2515476 - RNA, 22 nt, Human
uuacuaagaugacauugcuaag

SEQ ID NO: 2515477 - RNA, 21 nt, Human
uuacuaagaugacauugcuaa

SEQ ID NO: 2515478 - RNA, 22 nt, Human
uuacuaagaagaaaauugcugu

SEQ ID NO: 2515479 - RNA, 13 nt, Human
uuacuaaguuuuu

SEQ ID NO: 2515480 - RNA, 14 nt, Human
uuacuaaguuuuua

SEQ ID NO: 2515481 - RNA, 16 nt, Human
uuacuaauagacaauu

SEQ ID NO: 2515482 - RNA, 20 nt, Human
uuacuaacuaaacucucuuu

SEQ ID NO: 2515483 - RNA, 15 nt, Human
uuacuaacuaaacuc

SEQ ID NO: 2515484 - RNA, 22 nt, Human
uuacuaaagaaagauuacuuag

SEQ ID NO: 2515485 - RNA, 18 nt, Human
uuacuaaagaaagauuac

SEQ ID NO: 2515486 - RNA, 15 nt, Human
uuacuaaagaaagau

SEQ ID NO: 2515487 - RNA, 23 nt, Human
uuacuaaagaaaauaucugaaau

SEQ ID NO: 2515488 - RNA, 21 nt, Human
uuacacaaaacaaaugccaca

SEQ ID NO: 2515489 - RNA, 22 nt, Human
uuacuaaagaaaauaucugaaa

SEQ ID NO: 2515490 - RNA, 15 nt, Human
uuacuaagaagaaaa

SEQ ID NO: 2515491 - RNA, 13 nt, Human
uuacuaagaagaa

SEQ ID NO: 2515492 - RNA, 15 nt, Human
uuacaauuuuuuauc

SEQ ID NO: 2515493 - RNA, 17 nt, Human
uuacaauuuuuuaucau

SEQ ID NO: 2515494 - RNA, 18 nt, Human
uuacaauuuuuuaucaug

SEQ ID NO: 2515495 - RNA, 20 nt, Human
uuacaauuuuuuaucaugca

SEQ ID NO: 2515496 - RNA, 23 nt, Human
uuacaauuuuuuuaauuuuguau

SEQ ID NO: 2515497 - RNA, 22 nt, Human
uuacaauuuuuuuaauuuugua

SEQ ID NO: 2515498 - RNA, 21 nt, Human
uuacaauuuuuuuaauuuugu

SEQ ID NO: 2515499 - RNA, 18 nt, Human
uuacacaaaacaaaugcc

SEQ ID NO: 2515500 - RNA, 16 nt, Human
uuacacaaaacaaaug

SEQ ID NO: 2515501 - RNA, 14 nt, Human
uuacuagguaacuu

SEQ ID NO: 2515502 - RNA, 16 nt, Human
uuacuagguaacuuca

SEQ ID NO: 2515503 - RNA, 17 nt, Human
uuacuagguaacuucau

SEQ ID NO: 2515504 - RNA, 19 nt, Human
uuacuagguaacuucauau

SEQ ID NO: 2515505 - RNA, 21 nt, Human
uuacuaggugcccagaaugag

SEQ ID NO: 2515506 - RNA, 17 nt, Human
uuacuaguuucccuugc

SEQ ID NO: 2515507 - RNA, 19 nt, Human
uuacuaucaugucaaacgu

SEQ ID NO: 2515508 - RNA, 21 nt, Human
uuacuaucaugucaaacguga

SEQ ID NO: 2515509 - RNA, 13 nt, Human
uuacuaugccugu

SEQ ID NO: 2515510 - RNA, 16 nt, Human
uuacuaugcacaauuu

SEQ ID NO: 2515511 - RNA, 22 nt, Human
uuacuaagcuuugccagcugcu

SEQ ID NO: 2515512 - RNA, 14 nt, Human
uuacuaagcuuugc

SEQ ID NO: 2515513 - RNA, 22 nt, Human
uuacuaagccacaagaaauuug

SEQ ID NO: 2515514 - RNA, 21 nt, Human
uuacuaagccacaagaaauuu

SEQ ID NO: 2515515 - RNA, 14 nt, Human
uuacuacaaaauuu

SEQ ID NO: 2515516 - RNA, 20 nt, Human
uuacuacaaaauuugaaauu

SEQ ID NO: 2515517 - RNA, 13 nt, Human
uuacuacaugcac

SEQ ID NO: 2515518 - RNA, 14 nt, Human
uuacuacaugcacu

SEQ ID NO: 2515519 - RNA, 15 nt, Human
uuacuacaguuguuu

SEQ ID NO: 2515520 - RNA, 20 nt, Human
uuacuagaacacagaaagcc

SEQ ID NO: 2515521 - RNA, 16 nt, Human
uuacuagggaucccuc

SEQ ID NO: 2515522 - RNA, 20 nt, Human
uuacuagggaucccucaucu

SEQ ID NO: 2515523 - RNA, 23 nt, Human
uuacuagggaucccucaucuguc

SEQ ID NO: 2515524 - RNA, 13 nt, Human
uuacuagaacaca

SEQ ID NO: 2515525 - RNA, 13 nt, Human
uuacuacugugga

SEQ ID NO: 2515526 - RNA, 13 nt, Human
uuacuacaguugu

SEQ ID NO: 2515527 - RNA, 18 nt, Human
uuacuacaugugggagcu

SEQ ID NO: 2515528 - RNA, 18 nt, Human
uuacuuagguguggggga

SEQ ID NO: 2515529 - RNA, 17 nt, Human
uuacuuaucauccacau

SEQ ID NO: 2515530 - RNA, 23 nt, Human
uuacuuaucauccacauuguuuu

SEQ ID NO: 2515531 - RNA, 22 nt, Human
uuacuuaaagauuuaucaaauc

SEQ ID NO: 2515532 - RNA, 13 nt, Human
uuacuuaccuaaa

SEQ ID NO: 2515533 - RNA, 20 nt, Human
uuacuuagaggaaauaagaa

SEQ ID NO: 2515534 - RNA, 15 nt, Human
uuacuuagaggaaau

SEQ ID NO: 2515535 - RNA, 20 nt, Human
uuacuuaaagauuuaucaaa

SEQ ID NO: 2515536 - RNA, 19 nt, Human
uuacuuaaagauuuaucaa

SEQ ID NO: 2515537 - RNA, 14 nt, Human
uuacuuaaagauuu

SEQ ID NO: 2515538 - RNA, 13 nt, Human
uuacuuaaagauu

SEQ ID NO: 2515539 - RNA, 22 nt, Human
uuacuguuugucuucuccccag

SEQ ID NO: 2515540 - RNA, 21 nt, Human
uuacuguuugucuucucccca

SEQ ID NO: 2515541 - RNA, 15 nt, Human
uuacuguuuguuaug

SEQ ID NO: 2515542 - RNA, 12 nt, Human
uuacuucugcua

SEQ ID NO: 2515543 - RNA, 23 nt, Human
uuacuucuuauacauuugauaaa

SEQ ID NO: 2515544 - RNA, 11 nt, Human
uuacuucugcu

SEQ ID NO: 2515545 - RNA, 19 nt, Human
uuacuucacuuuaauucuc

SEQ ID NO: 2515546 - RNA, 16 nt, Human
uuacuuaucuuaugcc

SEQ ID NO: 2515547 - RNA, 22 nt, Human
uuacuucguguccgacucuucu

SEQ ID NO: 2515548 - RNA, 15 nt, Human
uuacuuccuaucaag

SEQ ID NO: 2515549 - RNA, 19 nt, Human
uuacugucuuuuuucuaaa

SEQ ID NO: 2515550 - RNA, 14 nt, Human
uuacuaugccugug

SEQ ID NO: 2515551 - RNA, 18 nt, Human
uuacuaugccugugucuu

SEQ ID NO: 2515552 - RNA, 19 nt, Human
uuacuauggcccuggccua

SEQ ID NO: 2515553 - RNA, 20 nt, Human
uuacuguggaggaaggauug

SEQ ID NO: 2515554 - RNA, 18 nt, Human
uuacuguggaggaaggau

SEQ ID NO: 2515555 - RNA, 17 nt, Human
uuacuguggaggaagga

SEQ ID NO: 2515556 - RNA, 16 nt, Human
uuacuguggaggaagg

SEQ ID NO: 2515557 - RNA, 16 nt, Human
uuacuguggcuucuua

SEQ ID NO: 2515558 - RNA, 14 nt, Human
uuacuguggaggaa

SEQ ID NO: 2515559 - RNA, 14 nt, Human
uuacugugaaacug

SEQ ID NO: 2515560 - RNA, 17 nt, Human
uuacugucuuuuuucua

SEQ ID NO: 2515561 - RNA, 16 nt, Human
uuacuguuucugucag

SEQ ID NO: 2515562 - RNA, 15 nt, Human
uuacuguuucuguca

SEQ ID NO: 2515563 - RNA, 14 nt, Human
uuacuguuucuguc

SEQ ID NO: 2515564 - RNA, 15 nt, Human
uuacuguugugaccu

SEQ ID NO: 2515565 - RNA, 14 nt, Human
uuacuguugugacc

SEQ ID NO: 2515566 - RNA, 21 nt, Human
uuacuuaaaccgccaaggcug

SEQ ID NO: 2515567 - RNA, 23 nt, Human
uuacuguuaccugaucaaugaca

SEQ ID NO: 2515568 - RNA, 18 nt, Human
uuacuguuagucauuugc

SEQ ID NO: 2515569 - RNA, 23 nt, Human
uuacuguggaggaaggauuguaa

SEQ ID NO: 2515570 - RNA, 13 nt, Human
uuagacauaacaa

SEQ ID NO: 2515571 - RNA, 19 nt, Human
uuagaaaauguuauuuaac

SEQ ID NO: 2515572 - RNA, 14 nt, Human
uuagacagucccug

SEQ ID NO: 2515573 - RNA, 18 nt, Human
uuagacagucccugccaa

SEQ ID NO: 2515574 - RNA, 17 nt, Human
uuagacagucccugcca

SEQ ID NO: 2515575 - RNA, 16 nt, Human
uuagacagucccugcc

SEQ ID NO: 2515576 - RNA, 13 nt, Human
uuagacccugggu

SEQ ID NO: 2515577 - RNA, 15 nt, Human
uuagaccacaaauag

SEQ ID NO: 2515578 - RNA, 18 nt, Human
uuagacuaaggccauuau

SEQ ID NO: 2515579 - RNA, 16 nt, Human
uuagaccucagccugu

SEQ ID NO: 2515580 - RNA, 14 nt, Human
uuagaccucagccu

SEQ ID NO: 2515581 - RNA, 15 nt, Human
uuagaccucagccug

SEQ ID NO: 2515582 - RNA, 11 nt, Human
uuagaccucag

SEQ ID NO: 2515583 - RNA, 12 nt, Human
uuagaccucagc

SEQ ID NO: 2515584 - RNA, 13 nt, Human
uuagaccucagcc

SEQ ID NO: 2515585 - RNA, 23 nt, Human
uuagacuguaggaagaguagcau

SEQ ID NO: 2515586 - RNA, 20 nt, Human
uuagacuguagccuggauau

SEQ ID NO: 2515587 - RNA, 14 nt, Human
uuagacuguagccu

SEQ ID NO: 2515588 - RNA, 20 nt, Human
uuagacuguuggggugggua

SEQ ID NO: 2515589 - RNA, 21 nt, Human
uuagacuucgacucaggaucc

SEQ ID NO: 2515590 - RNA, 13 nt, Human
uuagacuccuccu

SEQ ID NO: 2515591 - RNA, 18 nt, Human
uuagacuacauuuagaga

SEQ ID NO: 2515592 - RNA, 14 nt, Human
uuagacuacauuua

SEQ ID NO: 2515593 - RNA, 19 nt, Human
uuagacucaucuuacugua

SEQ ID NO: 2515594 - RNA, 17 nt, Human
uuagacuugaaauacua

SEQ ID NO: 2515595 - RNA, 21 nt, Human
uuagagaaguauacauaaguu

SEQ ID NO: 2515596 - RNA, 23 nt, Human
uuagagacaguugggugagaaca

SEQ ID NO: 2515597 - RNA, 16 nt, Human
uuacuuuauguuacua

SEQ ID NO: 2515598 - RNA, 20 nt, Human
uuacuuuaccacccccacac

SEQ ID NO: 2515599 - RNA, 15 nt, Human
uuacuuuaccacccc

SEQ ID NO: 2515600 - RNA, 21 nt, Human
uuacuuuccuuuccccagccc

SEQ ID NO: 2515601 - RNA, 18 nt, Human
uuacuuucuguugccaca

SEQ ID NO: 2515602 - RNA, 11 nt, Human
uuacuuucugu

SEQ ID NO: 2515603 - RNA, 14 nt, Human
uuacuugaccuccu

SEQ ID NO: 2515604 - RNA, 19 nt, Human
uuacuugcauugaauauau

SEQ ID NO: 2515605 - RNA, 18 nt, Human
uuacuuuaaaaggagcca

SEQ ID NO: 2515606 - RNA, 17 nt, Human
uuacuuuaaaaggagcc

SEQ ID NO: 2515607 - RNA, 19 nt, Human
uuagaaacacaacuauauu

SEQ ID NO: 2515608 - RNA, 15 nt, Human
uuagacagucccugc

SEQ ID NO: 2515609 - RNA, 21 nt, Human
uuagaaaacauaaucuucugc

SEQ ID NO: 2515610 - RNA, 20 nt, Human
uuagaaaagcaaagggugcu

SEQ ID NO: 2515611 - RNA, 13 nt, Human
uuacuuugugaau

SEQ ID NO: 2515612 - RNA, 17 nt, Human
uuacuuuuaaacaguga

SEQ ID NO: 2515613 - RNA, 14 nt, Human
uuacuuuuaaacug

SEQ ID NO: 2515614 - RNA, 15 nt, Human
uuacuuuuaaacugu

SEQ ID NO: 2515615 - RNA, 14 nt, Human
uuacuuuguguuca

SEQ ID NO: 2515616 - RNA, 16 nt, Human
uuacuuuuaaacugug

SEQ ID NO: 2515617 - RNA, 19 nt, Human
uuacuuuuaaacuguguac

SEQ ID NO: 2515618 - RNA, 23 nt, Human
uuacuuuuauaauaaaaggaaaa

SEQ ID NO: 2515619 - RNA, 15 nt, Human
uuacuuuuaaauguc

SEQ ID NO: 2515620 - RNA, 14 nt, Human
uuacuuuuuaaaau

SEQ ID NO: 2515621 - RNA, 22 nt, Human
uuacuuuuauaauaaaaggaaa

SEQ ID NO: 2515622 - RNA, 22 nt, Human
uuccuucuuugauaauguuaaa

SEQ ID NO: 2515623 - RNA, 19 nt, Human
uuccuucuuugauaauguu

SEQ ID NO: 2515624 - RNA, 14 nt, Human
uuccuucuuugaua

SEQ ID NO: 2515625 - RNA, 13 nt, Human
uuccuucuuugau

SEQ ID NO: 2515626 - RNA, 14 nt, Human
uuccuugaagccga

SEQ ID NO: 2515627 - RNA, 13 nt, Human
uuccuugaagccg

SEQ ID NO: 2515628 - RNA, 12 nt, Human
uuccuucuuuga

SEQ ID NO: 2515629 - RNA, 17 nt, Human
uuccuucuugccuucag

SEQ ID NO: 2515630 - RNA, 18 nt, Human
uuccuggcaauagugugu

SEQ ID NO: 2515631 - RNA, 20 nt, Human
uuccuggcaauaguguguuc

SEQ ID NO: 2515632 - RNA, 22 nt, Human
uuccuggcaauaguguguucug

SEQ ID NO: 2515633 - RNA, 23 nt, Human
uuccuggcaauaguguguucuga

SEQ ID NO: 2515634 - RNA, 20 nt, Human
uuccuugaguugauucagcu

SEQ ID NO: 2515635 - RNA, 22 nt, Human
uuccuugagacacggagcccag

SEQ ID NO: 2515636 - RNA, 17 nt, Human
uuccuugagaaaaacaa

SEQ ID NO: 2515637 - RNA, 13 nt, Human
uuccuugaccagc

SEQ ID NO: 2515638 - RNA, 15 nt, Human
uuccuugaccagcag

SEQ ID NO: 2515639 - RNA, 19 nt, Human
uuccuggacacucagaccu

SEQ ID NO: 2515640 - RNA, 16 nt, Human
uuccugccccaggccu

SEQ ID NO: 2515641 - RNA, 13 nt, Human
uuccugccccagg

SEQ ID NO: 2515642 - RNA, 20 nt, Human
uuccuggacauccucuucug

SEQ ID NO: 2515643 - RNA, 12 nt, Human
uuccuggacauc

SEQ ID NO: 2515644 - RNA, 14 nt, Human
uuccuggcacugcu

SEQ ID NO: 2515645 - RNA, 16 nt, Human
uuccuggagcccagag

SEQ ID NO: 2515646 - RNA, 15 nt, Human
uuccuggagcccaga

SEQ ID NO: 2515647 - RNA, 15 nt, Human
uuccuggcaauagug

SEQ ID NO: 2515648 - RNA, 24 nt, Human
uuccuggacauccucuucugcuua

SEQ ID NO: 2515649 - RNA, 17 nt, Human
uuccugccaggcauggu

SEQ ID NO: 2515650 - RNA, 17 nt, Human
uuccugccaccagucac

SEQ ID NO: 2515651 - RNA, 15 nt, Human
uuccugccaccaguc

SEQ ID NO: 2515652 - RNA, 18 nt, Human
uuccugccaccagucacu

SEQ ID NO: 2515653 - RNA, 12 nt, Human
uuccugccacca

SEQ ID NO: 2515654 - RNA, 14 nt, Human
uuccuccccagcag

SEQ ID NO: 2515655 - RNA, 18 nt, Human
uuccugcauuugugaaau

SEQ ID NO: 2515656 - RNA, 16 nt, Human
uuccugcauuugugaa

SEQ ID NO: 2515657 - RNA, 15 nt, Human
uuccugcauuuguga

SEQ ID NO: 2515658 - RNA, 19 nt, Human
uuccugaugcuucuucaga

SEQ ID NO: 2515659 - RNA, 18 nt, Human
uuccugaugcuucuucag

SEQ ID NO: 2515660 - RNA, 15 nt, Human
uuccugaugcuucuu

SEQ ID NO: 2515661 - RNA, 11 nt, Human
uuccuccccag

SEQ ID NO: 2515662 - RNA, 12 nt, Human
uuccuccccagc

SEQ ID NO: 2515663 - RNA, 13 nt, Human
uuccuccccagca

SEQ ID NO: 2515664 - RNA, 21 nt, Human
uuccuccccauuagagucagc

SEQ ID NO: 2515665 - RNA, 23 nt, Human
uuccuccccauuagagucagccu

SEQ ID NO: 2515666 - RNA, 20 nt, Human
uuccugauaugauuuaaaac

SEQ ID NO: 2515667 - RNA, 22 nt, Human
uucuaaaacuaaauagcaugua

SEQ ID NO: 2515668 - RNA, 19 nt, Human
uucuaaaacuaaauagcau

SEQ ID NO: 2515669 - RNA, 18 nt, Human
uucuaaaacuaaauagca

SEQ ID NO: 2515670 - RNA, 18 nt, Human
uucuaaaaauugugauca

SEQ ID NO: 2515671 - RNA, 14 nt, Human
uucuaaaaaaagaa

SEQ ID NO: 2515672 - RNA, 13 nt, Human
uucuaaaaaacag

SEQ ID NO: 2515673 - RNA, 15 nt, Human
uucguuuauuuucaa

SEQ ID NO: 2515674 - RNA, 13 nt, Human
uucguucuguuua

SEQ ID NO: 2515675 - RNA, 16 nt, Human
uucguuucuguauaca

SEQ ID NO: 2515676 - RNA, 14 nt, Human
uucguuucuguaua

SEQ ID NO: 2515677 - RNA, 17 nt, Human
uucguuuguuuguuuca

SEQ ID NO: 2515678 - RNA, 14 nt, Human
uucgggcugugccc

SEQ ID NO: 2515679 - RNA, 12 nt, Human
uucguucugugg

SEQ ID NO: 2515680 - RNA, 17 nt, Human
uucuaaagcugccagcc

SEQ ID NO: 2515681 - RNA, 13 nt, Human
uucuaaagcugcc

SEQ ID NO: 2515682 - RNA, 18 nt, Human
uucuaaagccuuaagucu

SEQ ID NO: 2515683 - RNA, 13 nt, Human
uucuaaagaugga

SEQ ID NO: 2515684 - RNA, 15 nt, Human
uucuaaagauggaaa

SEQ ID NO: 2515685 - RNA, 20 nt, Human
uuccuuggacucauuuuaaa

SEQ ID NO: 2515686 - RNA, 24 nt, Human
uuccuugagacacggagcccagcc

SEQ ID NO: 2515687 - RNA, 17 nt, Human
uuccuuggacucauuuu

SEQ ID NO: 2515688 - RNA, 13 nt, Human
uuccuuggcuggu

SEQ ID NO: 2515689 - RNA, 23 nt, Human
uuccuuggcucccauucacucuu

SEQ ID NO: 2515690 - RNA, 21 nt, Human
uuccuuggcucccauucacuc

SEQ ID NO: 2515691 - RNA, 15 nt, Human
uuccuuggcucccau

SEQ ID NO: 2515692 - RNA, 23 nt, Human
uuccuuggauaggcuuuuuagua

SEQ ID NO: 2515693 - RNA, 18 nt, Human
uuccuuggcaugccuucc

SEQ ID NO: 2515694 - RNA, 21 nt, Human
uuccuuggcaugccuuccagc

SEQ ID NO: 2515695 - RNA, 14 nt, Human
uuccuuggggcagg

SEQ ID NO: 2515696 - RNA, 15 nt, Human
uuccuuggcuggugc

SEQ ID NO: 2515697 - RNA, 15 nt, Human
uuccuuggggcaggc

SEQ ID NO: 2515698 - RNA, 18 nt, Human
uuccuuggggcaggcagu

SEQ ID NO: 2515699 - RNA, 17 nt, Human
uuccuuggggcaggcag

SEQ ID NO: 2515700 - RNA, 20 nt, Human
uucgggaggucgaggcagga

SEQ ID NO: 2515701 - RNA, 13 nt, Human
uucggcugucuca

SEQ ID NO: 2515702 - RNA, 12 nt, Human
uucgggcugugc

SEQ ID NO: 2515703 - RNA, 13 nt, Human
uucgggcugugcc

SEQ ID NO: 2515704 - RNA, 22 nt, Human
uucgggaagagaggaguucaau

SEQ ID NO: 2515705 - RNA, 14 nt, Human
uucgggaagagagg

SEQ ID NO: 2515706 - RNA, 23 nt, Human
uucgggaagagaggaguucaaug

SEQ ID NO: 2515707 - RNA, 14 nt, Human
uucgggcccugccu

SEQ ID NO: 2515708 - RNA, 15 nt, Human
uucccuccugcuacu

SEQ ID NO: 2515709 - RNA, 15 nt, Human
uucccucucucugac

SEQ ID NO: 2515710 - RNA, 14 nt, Human
uucccucucucuga

SEQ ID NO: 2515711 - RNA, 14 nt, Human
uucccucucccugu

SEQ ID NO: 2515712 - RNA, 23 nt, Human
uucccucugagaauuccaaggag

SEQ ID NO: 2515713 - RNA, 22 nt, Human
uucccucugagaauuccaagga

SEQ ID NO: 2515714 - RNA, 11 nt, Human
uucccucugag

SEQ ID NO: 2515715 - RNA, 13 nt, Human
uucccucugccug

SEQ ID NO: 2515716 - RNA, 14 nt, Human
uucccucugccugu

SEQ ID NO: 2515717 - RNA, 17 nt, Human
uucccucugccuguccc

SEQ ID NO: 2515718 - RNA, 18 nt, Human
uucccucugccugucccu

SEQ ID NO: 2515719 - RNA, 13 nt, Human
uucccugacucau

SEQ ID NO: 2515720 - RNA, 16 nt, Human
uucccugacucauucu

SEQ ID NO: 2515721 - RNA, 12 nt, Human
uucccugaggug

SEQ ID NO: 2515722 - RNA, 16 nt, Human
uucccugaaggaacca

SEQ ID NO: 2515723 - RNA, 20 nt, Human
uucccugaaaacccagagag

SEQ ID NO: 2515724 - RNA, 15 nt, Human
uucccugaauguauu

SEQ ID NO: 2515725 - RNA, 16 nt, Human
uucccucuuuggcucc

SEQ ID NO: 2515726 - RNA, 14 nt, Human
uucccucuuuggcu

SEQ ID NO: 2515727 - RNA, 19 nt, Human
uucccucugcuccuggagc

SEQ ID NO: 2515728 - RNA, 15 nt, Human
uucccucugcuccug

SEQ ID NO: 2515729 - RNA, 21 nt, Human
uucccucugccugucccucuc

SEQ ID NO: 2515730 - RNA, 20 nt, Human
uucccucuuuggcuccccug

SEQ ID NO: 2515731 - RNA, 17 nt, Human
uucccugaaaacccaga

SEQ ID NO: 2515732 - RNA, 19 nt, Human
uucccugaaaacccagaga

SEQ ID NO: 2515733 - RNA, 13 nt, Human
uucccugcuucca

SEQ ID NO: 2515734 - RNA, 22 nt, Human
uucccugcugucgucuuagcaa

SEQ ID NO: 2515735 - RNA, 12 nt, Human
uucccugccugg

SEQ ID NO: 2515736 - RNA, 19 nt, Human
uucccugcauuucugaguu

SEQ ID NO: 2515737 - RNA, 15 nt, Human
uucccugcuuccagg

SEQ ID NO: 2515738 - RNA, 14 nt, Human
uucccugcuuccag

SEQ ID NO: 2515739 - RNA, 12 nt, Human
uucccuggccuu

SEQ ID NO: 2515740 - RNA, 18 nt, Human
uucccugacuccucuaag

SEQ ID NO: 2515741 - RNA, 17 nt, Human
uucccugacacugcggg

SEQ ID NO: 2515742 - RNA, 16 nt, Human
uucccugagucaccag

SEQ ID NO: 2515743 - RNA, 18 nt, Human
uucccugagucaccagga

SEQ ID NO: 2515744 - RNA, 19 nt, Human
uucccugagucaccaggaa

SEQ ID NO: 2515745 - RNA, 10 nt, Human
uucccugcaa

SEQ ID NO: 2515746 - RNA, 14 nt, Human
uucccugccucuca

SEQ ID NO: 2515747 - RNA, 23 nt, Human
uucccugccucucaucaacugaa

SEQ ID NO: 2515748 - RNA, 17 nt, Human
uucccugcuuaaugaaa

SEQ ID NO: 2515749 - RNA, 20 nt, Human
uucccugggcugugcuaccu

SEQ ID NO: 2515750 - RNA, 17 nt, Human
uucccugggcugugcua

SEQ ID NO: 2515751 - RNA, 16 nt, Human
uucccugcuuccagga

SEQ ID NO: 2515752 - RNA, 17 nt, Human
uucccuggccuuucaua

SEQ ID NO: 2515753 - RNA, 16 nt, Human
uucccuggccuuucau

SEQ ID NO: 2515754 - RNA, 23 nt, Human
uucccuggcuuguaacuccacca

SEQ ID NO: 2515755 - RNA, 17 nt, Human
uucccuugaugaagaag

SEQ ID NO: 2515756 - RNA, 22 nt, Human
uucccuucuugguuuccaaagg

SEQ ID NO: 2515757 - RNA, 22 nt, Human
uucccuucuccaucucucuggc

SEQ ID NO: 2515758 - RNA, 20 nt, Human
uucccuucuccaucucucug

SEQ ID NO: 2515759 - RNA, 12 nt, Human
uucccuucucca

SEQ ID NO: 2515760 - RNA, 12 nt, Human
uuccuauaugca

SEQ ID NO: 2515761 - RNA, 21 nt, Human
uuccuauauaguuuauugaca

SEQ ID NO: 2515762 - RNA, 22 nt, Human
uuccuauauaguuuauugacaa

SEQ ID NO: 2515763 - RNA, 13 nt, Human
uuccuauacgcag

SEQ ID NO: 2515764 - RNA, 19 nt, Human
uuccuauacgcagcgugcu

SEQ ID NO: 2515765 - RNA, 19 nt, Human
uuccuauauaguuuauuga

SEQ ID NO: 2515766 - RNA, 23 nt, Human
uucccuugaaauuuuaaacuaua

SEQ ID NO: 2515767 - RNA, 15 nt, Human
uucccuuugugcaca

SEQ ID NO: 2515768 - RNA, 20 nt, Human
uuccuauaauauaauaaaua

SEQ ID NO: 2515769 - RNA, 22 nt, Human
uucccuuugacgccaucccagc

SEQ ID NO: 2515770 - RNA, 21 nt, Human
uucccuuugacgccaucccag

SEQ ID NO: 2515771 - RNA, 20 nt, Human
uucccuuugacgccauccca

SEQ ID NO: 2515772 - RNA, 15 nt, Human
uucccuugagcccuc

SEQ ID NO: 2515773 - RNA, 14 nt, Human
uucccuugagcccu

SEQ ID NO: 2515774 - RNA, 20 nt, Human
uuccuauugugauuugacug

SEQ ID NO: 2515775 - RNA, 14 nt, Human
uuccuauugugauu

SEQ ID NO: 2515776 - RNA, 12 nt, Human
uuccuauuguga

SEQ ID NO: 2515777 - RNA, 20 nt, Human
uuccuauugucauuaaaggu

SEQ ID NO: 2515778 - RNA, 22 nt, Human
uuccuauugugauuugacuguu

SEQ ID NO: 2515779 - RNA, 21 nt, Human
uuccuauugugauuugacugu

SEQ ID NO: 2515780 - RNA, 18 nt, Human
uuccuauugucauuaaag

SEQ ID NO: 2515781 - RNA, 17 nt, Human
uuccuauugucauuaaa

SEQ ID NO: 2515782 - RNA, 13 nt, Human
uuccuauugucau

SEQ ID NO: 2515783 - RNA, 20 nt, Human
uuccuauggcuggccacugc

SEQ ID NO: 2515784 - RNA, 14 nt, Human
uuccuauguaacug

SEQ ID NO: 2515785 - RNA, 21 nt, Human
uuccuauuuguuuucauggug

SEQ ID NO: 2515786 - RNA, 19 nt, Human
uuccuauuuguuuucaugg

SEQ ID NO: 2515787 - RNA, 23 nt, Human
uuccuauuugccaugggcuucac

SEQ ID NO: 2515788 - RNA, 22 nt, Human
uuccuauuugccaugggcuuca

SEQ ID NO: 2515789 - RNA, 20 nt, Human
uuccuauuugccaugggcuu

SEQ ID NO: 2515790 - RNA, 18 nt, Human
uuccuauuugccaugggc

SEQ ID NO: 2515791 - RNA, 15 nt, Human
uuccuauuucuuaua

SEQ ID NO: 2515792 - RNA, 23 nt, Human
uuccuccacauccuuucuaaaca

SEQ ID NO: 2515793 - RNA, 20 nt, Human
uuccucccaaguggugccua

SEQ ID NO: 2515794 - RNA, 23 nt, Human
uuccuccaucuccaagaaugcug

SEQ ID NO: 2515795 - RNA, 14 nt, Human
uuccucaugaauua

SEQ ID NO: 2515796 - RNA, 17 nt, Human
uuccuccacauccuuuc

SEQ ID NO: 2515797 - RNA, 15 nt, Human
uuccuccacauccuu

SEQ ID NO: 2515798 - RNA, 14 nt, Human
uuccuccacauccu

SEQ ID NO: 2515799 - RNA, 16 nt, Human
uuccucauuccugaaa

SEQ ID NO: 2515800 - RNA, 13 nt, Human
uuccucauuagca

SEQ ID NO: 2515801 - RNA, 13 nt, Human
uuccucacuucca

SEQ ID NO: 2515802 - RNA, 17 nt, Human
uuccuauuuucagccca

SEQ ID NO: 2515803 - RNA, 21 nt, Human
uuccucacaccaggcuugccu

SEQ ID NO: 2515804 - RNA, 12 nt, Human
uuccaaaauaau

SEQ ID NO: 2515805 - RNA, 20 nt, Human
uucauuugaguuauuuuaau

SEQ ID NO: 2515806 - RNA, 18 nt, Human
uucauuugagaaguaaac

SEQ ID NO: 2515807 - RNA, 16 nt, Human
uucauuugaugcuaaa

SEQ ID NO: 2515808 - RNA, 14 nt, Human
uucauuuccugccc

SEQ ID NO: 2515809 - RNA, 13 nt, Human
uucauuuccugcc

SEQ ID NO: 2515810 - RNA, 16 nt, Human
uucauuuccugugucu

SEQ ID NO: 2515811 - RNA, 15 nt, Human
uucauuuccuguguc

SEQ ID NO: 2515812 - RNA, 17 nt, Human
uucaugcaaacuuuauu

SEQ ID NO: 2515813 - RNA, 17 nt, Human
uucaugauuuugaaauc

SEQ ID NO: 2515814 - RNA, 14 nt, Human
uucaugcaaugaca

SEQ ID NO: 2515815 - RNA, 20 nt, Human
uucaugcaaggggaaaaucu

SEQ ID NO: 2515816 - RNA, 13 nt, Human
uucaugcauggaa

SEQ ID NO: 2515817 - RNA, 12 nt, Human
uucauuuccugc

SEQ ID NO: 2515818 - RNA, 15 nt, Human
uucaugcaaugacau

SEQ ID NO: 2515819 - RNA, 21 nt, Human
uucaugcaaugacaucuucaa

SEQ ID NO: 2515820 - RNA, 17 nt, Human
uucaucuugaauuguaa

SEQ ID NO: 2515821 - RNA, 13 nt, Human
uucaggaagcuca

SEQ ID NO: 2515822 - RNA, 11 nt, Human
uucaggaagcu

SEQ ID NO: 2515823 - RNA, 20 nt, Human
uucaggaaaagccucugugu

SEQ ID NO: 2515824 - RNA, 19 nt, Human
uucaggaaaagccucugug

SEQ ID NO: 2515825 - RNA, 21 nt, Human
uucaucuugaauuguaaggaa

SEQ ID NO: 2515826 - RNA, 14 nt, Human
uucaggaagaugaa

SEQ ID NO: 2515827 - RNA, 22 nt, Human
uucaucuuggucacauacaauu

SEQ ID NO: 2515828 - RNA, 15 nt, Human
uucaugauuuugaaa

SEQ ID NO: 2515829 - RNA, 23 nt, Human
uucaugauuucauuucaacuguu

SEQ ID NO: 2515830 - RNA, 16 nt, Human
uucaucuuuuguauag

SEQ ID NO: 2515831 - RNA, 22 nt, Human
uucaugaaaauagcucuuucag

SEQ ID NO: 2515832 - RNA, 21 nt, Human
uuccaaagaguagaauugcau

SEQ ID NO: 2515833 - RNA, 17 nt, Human
uuccaaaugaauguugu

SEQ ID NO: 2515834 - RNA, 16 nt, Human
uuccaaaccugacaga

SEQ ID NO: 2515835 - RNA, 21 nt, Human
uuccaaaauaauuuuaagaaa

SEQ ID NO: 2515836 - RNA, 13 nt, Human
uuccaaaauaauu

SEQ ID NO: 2515837 - RNA, 22 nt, Human
uuccaaaaguggccucuuuguc

SEQ ID NO: 2515838 - RNA, 22 nt, Human
uuccaacaaaggguuuuaaugu

SEQ ID NO: 2515839 - RNA, 21 nt, Human
uuccaacaaaggguuuuaaug

SEQ ID NO: 2515840 - RNA, 16 nt, Human
uuccaacaaaggguuu

SEQ ID NO: 2515841 - RNA, 15 nt, Human
uuccaacaaaggguu

SEQ ID NO: 2515842 - RNA, 16 nt, Human
uuccacuacaccuggc

SEQ ID NO: 2515843 - RNA, 12 nt, Human
uuccacuaaccc

SEQ ID NO: 2515844 - RNA, 15 nt, Human
uuccacuacaccugg

SEQ ID NO: 2515845 - RNA, 14 nt, Human
uuccaacaaagggu

SEQ ID NO: 2515846 - RNA, 23 nt, Human
uuccaaauucacaaguuguguuu

SEQ ID NO: 2515847 - RNA, 21 nt, Human
uuccaaauguaauaaacuuua

SEQ ID NO: 2515848 - RNA, 21 nt, Human
uuccaaaugaauguugucugu

SEQ ID NO: 2515849 - RNA, 15 nt, Human
uuccaaauucacaag

SEQ ID NO: 2515850 - RNA, 15 nt, Human
uuccaaauucugcuu

SEQ ID NO: 2515851 - RNA, 19 nt, Human
uuccagauccuggaaauca

SEQ ID NO: 2515852 - RNA, 20 nt, Human
uuccagagaguccucuggau

SEQ ID NO: 2515853 - RNA, 20 nt, Human
uuccagaugccuucuccaga

SEQ ID NO: 2515854 - RNA, 21 nt, Human
uuccagagaguggcuccuccc

SEQ ID NO: 2515855 - RNA, 20 nt, Human
uuccagagaguggcuccucc

SEQ ID NO: 2515856 - RNA, 19 nt, Human
uuccagagaguggcuccuc

SEQ ID NO: 2515857 - RNA, 18 nt, Human
uuccagagaguggcuccu

SEQ ID NO: 2515858 - RNA, 17 nt, Human
uuccagagaguggcucc

SEQ ID NO: 2515859 - RNA, 21 nt, Human
uuccacuccuccuagccaccc

SEQ ID NO: 2515860 - RNA, 17 nt, Human
uuccagagaguccucug

SEQ ID NO: 2515861 - RNA, 11 nt, Human
uuccagagaag

SEQ ID NO: 2515862 - RNA, 16 nt, Human
uuccacugaaguagug

SEQ ID NO: 2515863 - RNA, 15 nt, Human
uuccacuacugcuac

SEQ ID NO: 2515864 - RNA, 16 nt, Human
uuccacuccuccuagc

SEQ ID NO: 2515865 - RNA, 18 nt, Human
uuccacuccuccuagcca

SEQ ID NO: 2515866 - RNA, 22 nt, Human
uuccacuacaccuggcugaggu

SEQ ID NO: 2515867 - RNA, 19 nt, Human
uuccacuacaccuggcuga

SEQ ID NO: 2515868 - RNA, 18 nt, Human
uuccacuacaccuggcug

SEQ ID NO: 2515869 - RNA, 17 nt, Human
uuccacuacaccuggcu

SEQ ID NO: 2515870 - RNA, 20 nt, Human
uuccccaggaggccagccuu

SEQ ID NO: 2515871 - RNA, 19 nt, Human
uuccccaggaggccagccu

SEQ ID NO: 2515872 - RNA, 18 nt, Human
uuccccaggaggccagcc

SEQ ID NO: 2515873 - RNA, 17 nt, Human
uuccccaggaggccagc

SEQ ID NO: 2515874 - RNA, 23 nt, Human
uuccccaugggaagacgaggccc

SEQ ID NO: 2515875 - RNA, 12 nt, Human
uuccccauggga

SEQ ID NO: 2515876 - RNA, 19 nt, Human
uuccccaugucucgacuca

SEQ ID NO: 2515877 - RNA, 17 nt, Human
uuccccaucuucuaaac

SEQ ID NO: 2515878 - RNA, 18 nt, Human
uuccccaucuucuaaacc

SEQ ID NO: 2515879 - RNA, 11 nt, Human
uuccccauggg

SEQ ID NO: 2515880 - RNA, 21 nt, Human
uuccccaggaggccagccuug

SEQ ID NO: 2515881 - RNA, 18 nt, Human
uuccccaggggaaaauga

SEQ ID NO: 2515882 - RNA, 15 nt, Human
uuccccagcccaggg

SEQ ID NO: 2515883 - RNA, 15 nt, Human
uuccccaucuggguc

SEQ ID NO: 2515884 - RNA, 11 nt, Human
uucccucccuu

SEQ ID NO: 2515885 - RNA, 18 nt, Human
uuccccccacucucccca

SEQ ID NO: 2515886 - RNA, 19 nt, Human
uuccccccacucuccccac

SEQ ID NO: 2515887 - RNA, 23 nt, Human
uucccccgccgcuuuucuccucu

SEQ ID NO: 2515888 - RNA, 13 nt, Human
uucccccgccgcu

SEQ ID NO: 2515889 - RNA, 21 nt, Human
uuccccccacucuccccacac

SEQ ID NO: 2515890 - RNA, 17 nt, Human
uucccucccuuccucuu

SEQ ID NO: 2515891 - RNA, 20 nt, Human
uucccucccuuccucuuucc

SEQ ID NO: 2515892 - RNA, 15 nt, Human
uucccccacugauca

SEQ ID NO: 2515893 - RNA, 13 nt, Human
uucccccagcccu

SEQ ID NO: 2515894 - RNA, 14 nt, Human
uucccccagcccug

SEQ ID NO: 2515895 - RNA, 15 nt, Human
uucccccagcccugu

SEQ ID NO: 2515896 - RNA, 20 nt, Human
uucccccagcccuguggaag

SEQ ID NO: 2515897 - RNA, 14 nt, Human
uucccccauagcca

SEQ ID NO: 2515898 - RNA, 12 nt, Human
uuccccccacuc

SEQ ID NO: 2515899 - RNA, 18 nt, Human
uucccccauagccacccc

SEQ ID NO: 2515900 - RNA, 15 nt, Human
uucccccauagccac

SEQ ID NO: 2515901 - RNA, 17 nt, Human
uucccccauagccaccc

SEQ ID NO: 2515902 - RNA, 18 nt, Human
uucccccaccagcuaagg

SEQ ID NO: 2515903 - RNA, 23 nt, Human
uuccccaugguuuuaaucuguau

SEQ ID NO: 2515904 - RNA, 16 nt, Human
uuccccauugccuccu

SEQ ID NO: 2515905 - RNA, 18 nt, Human
uucccccaaccucagacu

SEQ ID NO: 2515906 - RNA, 17 nt, Human
uucccccaaccucagac

SEQ ID NO: 2515907 - RNA, 16 nt, Human
uuccccaggaggccag

SEQ ID NO: 2515908 - RNA, 15 nt, Human
uuccccaggaggcca

SEQ ID NO: 2515909 - RNA, 16 nt, Human
uucccauuugcuccuu

SEQ ID NO: 2515910 - RNA, 14 nt, Human
uucccauuucagcu

SEQ ID NO: 2515911 - RNA, 15 nt, Human
uucccauuucagcug

SEQ ID NO: 2515912 - RNA, 15 nt, Human
uucccauggggaggg

SEQ ID NO: 2515913 - RNA, 14 nt, Human
uucccauggggagg

SEQ ID NO: 2515914 - RNA, 23 nt, Human
uucccauggggagggauucuggu

SEQ ID NO: 2515915 - RNA, 17 nt, Human
uucccauguagcccccu

SEQ ID NO: 2515916 - RNA, 13 nt, Human
uucccauguuaaa

SEQ ID NO: 2515917 - RNA, 17 nt, Human
uucccauuguggcuccu

SEQ ID NO: 2515918 - RNA, 14 nt, Human
uucccauucuugca

SEQ ID NO: 2515919 - RNA, 19 nt, Human
uucccaugacccaggcugg

SEQ ID NO: 2515920 - RNA, 18 nt, Human
uucccaugacccaggcug

SEQ ID NO: 2515921 - RNA, 20 nt, Human
uucccaugacccaggcuggg

SEQ ID NO: 2515922 - RNA, 14 nt, Human
uucccaucugcacc

SEQ ID NO: 2515923 - RNA, 12 nt, Human
uucccaucugca

SEQ ID NO: 2515924 - RNA, 15 nt, Human
uucccaucgcuguca

SEQ ID NO: 2515925 - RNA, 14 nt, Human
uucccaucgcuguc

SEQ ID NO: 2515926 - RNA, 14 nt, Human
uucccauccuaccc

SEQ ID NO: 2515927 - RNA, 13 nt, Human
uucccauccuacc

SEQ ID NO: 2515928 - RNA, 11 nt, Human
uucccauaauu

SEQ ID NO: 2515929 - RNA, 15 nt, Human
uucccauaauuuucu

SEQ ID NO: 2515930 - RNA, 16 nt, Human
uucccauaauuuucuu

SEQ ID NO: 2515931 - RNA, 18 nt, Human
uucccauaauuuucuuca

SEQ ID NO: 2515932 - RNA, 21 nt, Human
uucccauaccacccaaugcug

SEQ ID NO: 2515933 - RNA, 23 nt, Human
uucccaucacuggagcaccaggc

SEQ ID NO: 2515934 - RNA, 13 nt, Human
uuccauucuggaa

SEQ ID NO: 2515935 - RNA, 15 nt, Human
uuccauucuggaagu

SEQ ID NO: 2515936 - RNA, 16 nt, Human
uuccauuccagaauau

SEQ ID NO: 2515937 - RNA, 13 nt, Human
uuccauuccagaa

SEQ ID NO: 2515938 - RNA, 16 nt, Human
uuccauuaugauucuu

SEQ ID NO: 2515939 - RNA, 17 nt, Human
uuccauuggaucucauu

SEQ ID NO: 2515940 - RNA, 16 nt, Human
uuccauuggaucucau

SEQ ID NO: 2515941 - RNA, 20 nt, Human
uuccauucuggauuuuguca

SEQ ID NO: 2515942 - RNA, 20 nt, Human
uuccagcaauucuccugccu

SEQ ID NO: 2515943 - RNA, 21 nt, Human
uuccagcaauucuccugccuc

SEQ ID NO: 2515944 - RNA, 22 nt, Human
uuccagcaauucuccugccuca

SEQ ID NO: 2515945 - RNA, 16 nt, Human
uuccauguugcugcca

SEQ ID NO: 2515946 - RNA, 15 nt, Human
uuccauguugcugcc

SEQ ID NO: 2515947 - RNA, 14 nt, Human
uuccauuaugauuc

SEQ ID NO: 2515948 - RNA, 15 nt, Human
uuccauuaugauucu

SEQ ID NO: 2515949 - RNA, 14 nt, Human
uuccauguggagaa

SEQ ID NO: 2515950 - RNA, 13 nt, Human
uuccauguugcug

SEQ ID NO: 2515951 - RNA, 23 nt, Human
uuauugagaaagagcacuuaaga

SEQ ID NO: 2515952 - RNA, 18 nt, Human
uuauugagaaagagcacu

SEQ ID NO: 2515953 - RNA, 16 nt, Human
uuauugagaaagagca

SEQ ID NO: 2515954 - RNA, 14 nt, Human
uuauugagaaagag

SEQ ID NO: 2515955 - RNA, 13 nt, Human
uuauugagaauuu

SEQ ID NO: 2515956 - RNA, 19 nt, Human
uuauugagaauuuuaaauu

SEQ ID NO: 2515957 - RNA, 15 nt, Human
uuauugcccacgcug

SEQ ID NO: 2515958 - RNA, 21 nt, Human
uuauugcaguuuaucauucaa

SEQ ID NO: 2515959 - RNA, 18 nt, Human
uuauugcaguuuaucauu

SEQ ID NO: 2515960 - RNA, 22 nt, Human
uuauugcaguuuaucauucaag

SEQ ID NO: 2515961 - RNA, 13 nt, Human
uuauugcauuaua

SEQ ID NO: 2515962 - RNA, 21 nt, Human
uuauugcaaaauagcauuugu

SEQ ID NO: 2515963 - RNA, 20 nt, Human
uuauugcaauaaaagugcuu

SEQ ID NO: 2515964 - RNA, 16 nt, Human
uuauugcaguuuauca

SEQ ID NO: 2515965 - RNA, 14 nt, Human
uuauugcaguuuau

SEQ ID NO: 2515966 - RNA, 19 nt, Human
uuauugcagcgauuaauaa

SEQ ID NO: 2515967 - RNA, 13 nt, Human
uuauucuuuuuaa

SEQ ID NO: 2515968 - RNA, 16 nt, Human
uuauucuuuuuaaagu

SEQ ID NO: 2515969 - RNA, 20 nt, Human
uuauucuguagauucugugg

SEQ ID NO: 2515970 - RNA, 13 nt, Human
uuauucuggaguu

SEQ ID NO: 2515971 - RNA, 11 nt, Human
uuauucugcuc

SEQ ID NO: 2515972 - RNA, 19 nt, Human
uuauugacacagaaaaugu

SEQ ID NO: 2515973 - RNA, 23 nt, Human
uuauugacacagaaaauguugag

SEQ ID NO: 2515974 - RNA, 14 nt, Human
uuauugacacagaa

SEQ ID NO: 2515975 - RNA, 22 nt, Human
uuauugacaauaauuucagguu

SEQ ID NO: 2515976 - RNA, 14 nt, Human
uuauugacaauaau

SEQ ID NO: 2515977 - RNA, 18 nt, Human
uuauugacaauaauuuca

SEQ ID NO: 2515978 - RNA, 20 nt, Human
uuauugaaucuauuuaagua

SEQ ID NO: 2515979 - RNA, 18 nt, Human
uuauugaaucuauuuaag

SEQ ID NO: 2515980 - RNA, 18 nt, Human
uuauuacuguaagaaaau

SEQ ID NO: 2515981 - RNA, 17 nt, Human
uuauuacuguaagaaaa

SEQ ID NO: 2515982 - RNA, 19 nt, Human
uuauuccuguauguugucc

SEQ ID NO: 2515983 - RNA, 15 nt, Human
uuauuccuguauguu

SEQ ID NO: 2515984 - RNA, 13 nt, Human
uuauuccuguaug

SEQ ID NO: 2515985 - RNA, 18 nt, Human
uuauuacuguuugucuuc

SEQ ID NO: 2515986 - RNA, 21 nt, Human
uuauuccugauaauaauugau

SEQ ID NO: 2515987 - RNA, 22 nt, Human
uuauuaauuguuuugcacuuuu

SEQ ID NO: 2515988 - RNA, 17 nt, Human
uuauuccuguauguugu

SEQ ID NO: 2515989 - RNA, 13 nt, Human
uuauucuagauua

SEQ ID NO: 2515990 - RNA, 17 nt, Human
uuauucucacuccacca

SEQ ID NO: 2515991 - RNA, 16 nt, Human
uuauuacuguaagaaa

SEQ ID NO: 2515992 - RNA, 14 nt, Human
uuauuaauugcuuu

SEQ ID NO: 2515993 - RNA, 15 nt, Human
uuauuaauugcuuug

SEQ ID NO: 2515994 - RNA, 17 nt, Human
uuauuaaugcacuuucu

SEQ ID NO: 2515995 - RNA, 13 nt, Human
uuauuaaugcacu

SEQ ID NO: 2515996 - RNA, 18 nt, Human
uuauuaaugcacuuucua

SEQ ID NO: 2515997 - RNA, 11 nt, Human
uuauuaaugca

SEQ ID NO: 2515998 - RNA, 17 nt, Human
uuauuaaaguucuguaa

SEQ ID NO: 2515999 - RNA, 22 nt, Human
uuauuaaacguaugcaugugaa

SEQ ID NO: 2516000 - RNA, 20 nt, Human
uuauuaaacguaugcaugug

SEQ ID NO: 2516001 - RNA, 18 nt, Human
uuauuaaacguaugcaug

SEQ ID NO: 2516002 - RNA, 21 nt, Human
uuauuaaacagauuuuuacaa

SEQ ID NO: 2516003 - RNA, 17 nt, Human
uuauggcuauaggugcu

SEQ ID NO: 2516004 - RNA, 21 nt, Human
uuauuaaaaugauuguaaaau

SEQ ID NO: 2516005 - RNA, 20 nt, Human
uuauuaaaaugauuguaaaa

SEQ ID NO: 2516006 - RNA, 19 nt, Human
uuauuaaaaugauuguaaa

SEQ ID NO: 2516007 - RNA, 14 nt, Human
uuauuaaaaugauu

SEQ ID NO: 2516008 - RNA, 12 nt, Human
uuauuaaaaucu

SEQ ID NO: 2516009 - RNA, 16 nt, Human
uuauuaaaaucuuaaa

SEQ ID NO: 2516010 - RNA, 12 nt, Human
uuauggccucag

SEQ ID NO: 2516011 - RNA, 13 nt, Human
uuauggccucagc

SEQ ID NO: 2516012 - RNA, 15 nt, Human
uuauggccucagcug

SEQ ID NO: 2516013 - RNA, 18 nt, Human
uuauggccucagcugccu

SEQ ID NO: 2516014 - RNA, 11 nt, Human
uuauggccuca

SEQ ID NO: 2516015 - RNA, 14 nt, Human
uuaugcuucuugga

SEQ ID NO: 2516016 - RNA, 19 nt, Human
uuaucucuauuuaauauuu

SEQ ID NO: 2516017 - RNA, 12 nt, Human
uuaucucugugu

SEQ ID NO: 2516018 - RNA, 14 nt, Human
uuaucucucugugc

SEQ ID NO: 2516019 - RNA, 17 nt, Human
uuaucuagauacuguau

SEQ ID NO: 2516020 - RNA, 20 nt, Human
uuaucuugaauaauguaaga

SEQ ID NO: 2516021 - RNA, 12 nt, Human
uuaucugugaau

SEQ ID NO: 2516022 - RNA, 12 nt, Human
uuaucuguccca

SEQ ID NO: 2516023 - RNA, 17 nt, Human
uuaucugugaauucaga

SEQ ID NO: 2516024 - RNA, 18 nt, Human
uuaucugugcgugaaaca

SEQ ID NO: 2516025 - RNA, 19 nt, Human
uuaucugugcgugaaacac

SEQ ID NO: 2516026 - RNA, 20 nt, Human
uuaucugggcauagaugcag

SEQ ID NO: 2516027 - RNA, 23 nt, Human
uuaucugggauuaugguuuugug

SEQ ID NO: 2516028 - RNA, 16 nt, Human
uuaguuccucauuagc

SEQ ID NO: 2516029 - RNA, 14 nt, Human
uuaguuccuugagu

SEQ ID NO: 2516030 - RNA, 13 nt, Human
uuaguugcaacuu

SEQ ID NO: 2516031 - RNA, 12 nt, Human
uuaguucccaac

SEQ ID NO: 2516032 - RNA, 21 nt, Human
uuaguucucacuguucccucu

SEQ ID NO: 2516033 - RNA, 16 nt, Human
uuaguucuuuggaaau

SEQ ID NO: 2516034 - RNA, 15 nt, Human
uuaguucuuuguuau

SEQ ID NO: 2516035 - RNA, 16 nt, Human
uuaucuagauacugua

SEQ ID NO: 2516036 - RNA, 20 nt, Human
uuaguuguaucucuuuugaa

SEQ ID NO: 2516037 - RNA, 17 nt, Human
uuaguuuacaaucagcc

SEQ ID NO: 2516038 - RNA, 20 nt, Human
uuaguugcaacuuuguauaa

SEQ ID NO: 2516039 - RNA, 15 nt, Human
uuaguugcuguaugu

SEQ ID NO: 2516040 - RNA, 13 nt, Human
uuaguugcuguau

SEQ ID NO: 2516041 - RNA, 24 nt, Human
uuaucuuucgugauaaacuuugcu

SEQ ID NO: 2516042 - RNA, 17 nt, Human
uuaucuuucgugauaaa

SEQ ID NO: 2516043 - RNA, 15 nt, Human
uuaucuuucgcacag

SEQ ID NO: 2516044 - RNA, 19 nt, Human
uuaucuugggacuggguuu

SEQ ID NO: 2516045 - RNA, 17 nt, Human
uuaugcaaggaaggaaa

SEQ ID NO: 2516046 - RNA, 18 nt, Human
uuaugcaaggaaggaaag

SEQ ID NO: 2516047 - RNA, 22 nt, Human
uuaugcaaggaaggaaagaaag

SEQ ID NO: 2516048 - RNA, 17 nt, Human
uuaucuugguugaaaau

SEQ ID NO: 2516049 - RNA, 14 nt, Human
uuaucuugggacug

SEQ ID NO: 2516050 - RNA, 16 nt, Human
uuaucuuggacugaca

SEQ ID NO: 2516051 - RNA, 17 nt, Human
uuaucuuggacugacau

SEQ ID NO: 2516052 - RNA, 16 nt, Human
uuaucuuuacuuuuaa

SEQ ID NO: 2516053 - RNA, 12 nt, Human
uuaucuuuauau

SEQ ID NO: 2516054 - RNA, 17 nt, Human
uuaucuugucucugggc

SEQ ID NO: 2516055 - RNA, 16 nt, Human
uuaucuugucucuggg

SEQ ID NO: 2516056 - RNA, 16 nt, Human
uuaugcaugaaguaau

SEQ ID NO: 2516057 - RNA, 20 nt, Human
uuaugcaagggacugugugu

SEQ ID NO: 2516058 - RNA, 14 nt, Human
uuaugcauagauaa

SEQ ID NO: 2516059 - RNA, 22 nt, Human
uuaugcaugaaguaauaugcac

SEQ ID NO: 2516060 - RNA, 21 nt, Human
uuauggcacuaguauuucuau

SEQ ID NO: 2516061 - RNA, 16 nt, Human
uuauggaacacucuga

SEQ ID NO: 2516062 - RNA, 13 nt, Human
uuaugcuuuaaac

SEQ ID NO: 2516063 - RNA, 14 nt, Human
uuaugcuuuaaaca

SEQ ID NO: 2516064 - RNA, 11 nt, Human
uuaugcuucuu

SEQ ID NO: 2516065 - RNA, 17 nt, Human
uuaugcugugacacaug

SEQ ID NO: 2516066 - RNA, 14 nt, Human
uuaugcugaguaug

SEQ ID NO: 2516067 - RNA, 16 nt, Human
uuaugcggucuaggga

SEQ ID NO: 2516068 - RNA, 13 nt, Human
uuaugcugaaaca

SEQ ID NO: 2516069 - RNA, 14 nt, Human
uuaugcucaggguc

SEQ ID NO: 2516070 - RNA, 21 nt, Human
uuaugcccaguuucugccucu

SEQ ID NO: 2516071 - RNA, 17 nt, Human
uuaugcccagcguuuga

SEQ ID NO: 2516072 - RNA, 17 nt, Human
uuaugccuuuuuugauc

SEQ ID NO: 2516073 - RNA, 20 nt, Human
uuaugccggaugugcuuuuc

SEQ ID NO: 2516074 - RNA, 17 nt, Human
uuaugccggaugugcuu

SEQ ID NO: 2516075 - RNA, 15 nt, Human
uuaugccuuuuauuu

SEQ ID NO: 2516076 - RNA, 15 nt, Human
uuauugucuagugaa

SEQ ID NO: 2516077 - RNA, 18 nt, Human
uuauugucaaagugguga

SEQ ID NO: 2516078 - RNA, 17 nt, Human
uuauugucaaaguggug

SEQ ID NO: 2516079 - RNA, 21 nt, Human
uuauuguauaaacuaucaguu

SEQ ID NO: 2516080 - RNA, 14 nt, Human
uuauuguauaaacu

SEQ ID NO: 2516081 - RNA, 12 nt, Human
uuauuguacuug

SEQ ID NO: 2516082 - RNA, 17 nt, Human
uuauuguaccucucuua

SEQ ID NO: 2516083 - RNA, 15 nt, Human
uuauuguaccucucu

SEQ ID NO: 2516084 - RNA, 16 nt, Human
uuauuuuaauaauguu

SEQ ID NO: 2516085 - RNA, 15 nt, Human
uuauuuuaauaaugu

SEQ ID NO: 2516086 - RNA, 17 nt, Human
uuauuguguuugucauu

SEQ ID NO: 2516087 - RNA, 16 nt, Human
uuauuguguuugucau

SEQ ID NO: 2516088 - RNA, 15 nt, Human
uuauuguguuuguca

SEQ ID NO: 2516089 - RNA, 16 nt, Human
uuauugugauuucccg

SEQ ID NO: 2516090 - RNA, 22 nt, Human
uuauuguauaaacuaucaguuu

SEQ ID NO: 2516091 - RNA, 12 nt, Human
uuauugcauuug

SEQ ID NO: 2516092 - RNA, 12 nt, Human
uuauugcuguug

SEQ ID NO: 2516093 - RNA, 15 nt, Human
uuauuggcugagaua

SEQ ID NO: 2516094 - RNA, 16 nt, Human
uuauuggcugagauau

SEQ ID NO: 2516095 - RNA, 14 nt, Human
uuauuggcugagau

SEQ ID NO: 2516096 - RNA, 22 nt, Human
uuauuggaauuaaccuggugcu

SEQ ID NO: 2516097 - RNA, 23 nt, Human
uuauugcuugauacuuuugacaa

SEQ ID NO: 2516098 - RNA, 13 nt, Human
uuauugcuuuuau

SEQ ID NO: 2516099 - RNA, 13 nt, Human
uuauuggaauuaa

SEQ ID NO: 2516100 - RNA, 17 nt, Human
uuauuguaacagacauu

SEQ ID NO: 2516101 - RNA, 16 nt, Human
uuauuguaacagacau

SEQ ID NO: 2516102 - RNA, 20 nt, Human
uuauugggcaagugauugaa

SEQ ID NO: 2516103 - RNA, 19 nt, Human
uuauuguacagcuguuuaa

SEQ ID NO: 2516104 - RNA, 20 nt, Human
uuauuguaacagacauuguu

SEQ ID NO: 2516105 - RNA, 19 nt, Human
uuauuguaacagacauugu

SEQ ID NO: 2516106 - RNA, 18 nt, Human
uuauuguaacagacauug

SEQ ID NO: 2516107 - RNA, 14 nt, Human
uuauuguaccucuc

SEQ ID NO: 2516108 - RNA, 12 nt, Human
uuauuguaccuc

SEQ ID NO: 2516109 - RNA, 22 nt, Human
uuauuggcugagauaugaacau

SEQ ID NO: 2516110 - RNA, 19 nt, Human
uuauugggcaagugauuga

SEQ ID NO: 2516111 - RNA, 16 nt, Human
uuauuggaauuaaccu

SEQ ID NO: 2516112 - RNA, 18 nt, Human
uucaaauagggucuaacu

SEQ ID NO: 2516113 - RNA, 19 nt, Human
uucaaauagggucuaacuc

SEQ ID NO: 2516114 - RNA, 17 nt, Human
uucaaauccuugaagau

SEQ ID NO: 2516115 - RNA, 19 nt, Human
uucaacgcagcccugcuuu

SEQ ID NO: 2516116 - RNA, 16 nt, Human
uucaacgcagcccugc

SEQ ID NO: 2516117 - RNA, 20 nt, Human
uucaacgcagcccugcuuug

SEQ ID NO: 2516118 - RNA, 12 nt, Human
uucaacucagac

SEQ ID NO: 2516119 - RNA, 15 nt, Human
uucaacgcagcccug

SEQ ID NO: 2516120 - RNA, 17 nt, Human
uucaacugaccagccuc

SEQ ID NO: 2516121 - RNA, 22 nt, Human
uucaaagcuuuuuccagaggcu

SEQ ID NO: 2516122 - RNA, 16 nt, Human
uucaaagcuugaagau

SEQ ID NO: 2516123 - RNA, 16 nt, Human
uuauuuuauccucugg

SEQ ID NO: 2516124 - RNA, 23 nt, Human
uucaaagccagcguccuccucug

SEQ ID NO: 2516125 - RNA, 21 nt, Human
uucaaagccagcguccuccuc

SEQ ID NO: 2516126 - RNA, 20 nt, Human
uuauuuuauguugcauagaa

SEQ ID NO: 2516127 - RNA, 16 nt, Human
uuauuuuaguuucugu

SEQ ID NO: 2516128 - RNA, 17 nt, Human
uuauuuuaauaauguuu

SEQ ID NO: 2516129 - RNA, 17 nt, Human
uuauuuuaauucaguug

SEQ ID NO: 2516130 - RNA, 12 nt, Human
uuauuuuaagac

SEQ ID NO: 2516131 - RNA, 20 nt, Human
uucagauaaucacaauacau

SEQ ID NO: 2516132 - RNA, 17 nt, Human
uucagauaacuguuauu

SEQ ID NO: 2516133 - RNA, 18 nt, Human
uucagauaacuguuauuu

SEQ ID NO: 2516134 - RNA, 18 nt, Human
uucaggaaaagccucugu

SEQ ID NO: 2516135 - RNA, 23 nt, Human
uucagauaacuguuauuuauaau

SEQ ID NO: 2516136 - RNA, 22 nt, Human
uucagaguugaugguuguacau

SEQ ID NO: 2516137 - RNA, 21 nt, Human
uucagaguugaugguuguaca

SEQ ID NO: 2516138 - RNA, 19 nt, Human
uucagagagcuaaauuaca

SEQ ID NO: 2516139 - RNA, 13 nt, Human
uucagagagcugg

SEQ ID NO: 2516140 - RNA, 14 nt, Human
uucagagagcuggu

SEQ ID NO: 2516141 - RNA, 15 nt, Human
uucagagagcuggua

SEQ ID NO: 2516142 - RNA, 20 nt, Human
uucagagagggcagaggggu

SEQ ID NO: 2516143 - RNA, 15 nt, Human
uucagagaggccuuu

SEQ ID NO: 2516144 - RNA, 23 nt, Human
uucagagcugacacaggaugaag

SEQ ID NO: 2516145 - RNA, 16 nt, Human
uucagacauagaauua

SEQ ID NO: 2516146 - RNA, 21 nt, Human
uucagacagcugccugggauc

SEQ ID NO: 2516147 - RNA, 20 nt, Human
uucagacauagaauuaacac

SEQ ID NO: 2516148 - RNA, 19 nt, Human
uucagagacuccugcaggc

SEQ ID NO: 2516149 - RNA, 18 nt, Human
uucacuauaaaugguguu

SEQ ID NO: 2516150 - RNA, 14 nt, Human
uucacuauuuccuu

SEQ ID NO: 2516151 - RNA, 13 nt, Human
uucacuauuuccu

SEQ ID NO: 2516152 - RNA, 20 nt, Human
uucacuauuuuuauuuauau

SEQ ID NO: 2516153 - RNA, 19 nt, Human
uucacuauuuccuuuauaa

SEQ ID NO: 2516154 - RNA, 13 nt, Human
uucacuccagccu

SEQ ID NO: 2516155 - RNA, 21 nt, Human
uucacuccggugugccugcag

SEQ ID NO: 2516156 - RNA, 22 nt, Human
uucacuccggugugccugcagc

SEQ ID NO: 2516157 - RNA, 13 nt, Human
uucacucuccuug

SEQ ID NO: 2516158 - RNA, 23 nt, Human
uucacuccggugugccugcagcc

SEQ ID NO: 2516159 - RNA, 24 nt, Human
uucacuccggugugccugcagccc

SEQ ID NO: 2516160 - RNA, 20 nt, Human
uucaauaggaaaaacugauu

SEQ ID NO: 2516161 - RNA, 18 nt, Human
uucaauaggaaaaacuga

SEQ ID NO: 2516162 - RNA, 15 nt, Human
uucaauaggaaaaac

SEQ ID NO: 2516163 - RNA, 13 nt, Human
uucaauaggaaaa

SEQ ID NO: 2516164 - RNA, 19 nt, Human
uucaauugcaucucccaga

SEQ ID NO: 2516165 - RNA, 12 nt, Human
uucaauuguaaa

SEQ ID NO: 2516166 - RNA, 14 nt, Human
uucaauuguaaauu

SEQ ID NO: 2516167 - RNA, 16 nt, Human
uucaauuuauucaaga

SEQ ID NO: 2516168 - RNA, 15 nt, Human
uucaauugcaucucc

SEQ ID NO: 2516169 - RNA, 17 nt, Human
uucaauugcaucuccca

SEQ ID NO: 2516170 - RNA, 16 nt, Human
uucaacucagacuagu

SEQ ID NO: 2516171 - RNA, 13 nt, Human
uucaacucagacu

SEQ ID NO: 2516172 - RNA, 14 nt, Human
uucaacugaaaaga

SEQ ID NO: 2516173 - RNA, 15 nt, Human
uucacaaaauuucca

SEQ ID NO: 2516174 - RNA, 19 nt, Human
uucaauuuauucaagaaaa

SEQ ID NO: 2516175 - RNA, 17 nt, Human
uucaauuuauucaagaa

SEQ ID NO: 2516176 - RNA, 19 nt, Human
uucaauuuccaagagcuga

SEQ ID NO: 2516177 - RNA, 17 nt, Human
uucaauuuccaagagcu

SEQ ID NO: 2516178 - RNA, 17 nt, Human
uucaccuguaaaccuga

SEQ ID NO: 2516179 - RNA, 18 nt, Human
uucaccuguaaaccugag

SEQ ID NO: 2516180 - RNA, 21 nt, Human
uucaccuguuuuuaagcuguu

SEQ ID NO: 2516181 - RNA, 19 nt, Human
uucaccuguuuuuaagcug

SEQ ID NO: 2516182 - RNA, 23 nt, Human
uucaccuguuuuuaagcuguuuc

SEQ ID NO: 2516183 - RNA, 22 nt, Human
uucaccuguuuuuaagcuguuu

SEQ ID NO: 2516184 - RNA, 23 nt, Human
uucaccuucguuuacuaugccug

SEQ ID NO: 2516185 - RNA, 14 nt, Human
uucaccuugaagaa

SEQ ID NO: 2516186 - RNA, 13 nt, Human
uucaccuguaaac

SEQ ID NO: 2516187 - RNA, 16 nt, Human
uucaccuguaaaccug

SEQ ID NO: 2516188 - RNA, 12 nt, Human
uucaccugagca

SEQ ID NO: 2516189 - RNA, 15 nt, Human
uucacaaacuuuuau

SEQ ID NO: 2516190 - RNA, 18 nt, Human
uucaccugccccaacucu

SEQ ID NO: 2516191 - RNA, 16 nt, Human
uucaccugauucaacu

SEQ ID NO: 2516192 - RNA, 15 nt, Human
uucacgugguccuaa

SEQ ID NO: 2516193 - RNA, 14 nt, Human
uucacgugcagcuc

SEQ ID NO: 2516194 - RNA, 13 nt, Human
uucacuaaagcag

SEQ ID NO: 2516195 - RNA, 14 nt, Human
uucacuaaagcagu

SEQ ID NO: 2516196 - RNA, 18 nt, Human
uucacggaagagccuugc

SEQ ID NO: 2516197 - RNA, 21 nt, Human
uucaccugauucaacuaaaaa

SEQ ID NO: 2516198 - RNA, 16 nt, Human
uucaccuugggaugau

SEQ ID NO: 2516199 - RNA, 22 nt, Human
uucaccuugggaugaugccuca

SEQ ID NO: 2516200 - RNA, 22 nt, Human
uucacggaaguuuucaaugaug

SEQ ID NO: 2516201 - RNA, 13 nt, Human
uucacggaaguuu

SEQ ID NO: 2516202 - RNA, 21 nt, Human
uuugaaauuguauuacaaauc

SEQ ID NO: 2516203 - RNA, 19 nt, Human
uuucuuguaauuuaaacag

SEQ ID NO: 2516204 - RNA, 23 nt, Human
uuucuugguucauaaaugaauuu

SEQ ID NO: 2516205 - RNA, 22 nt, Human
uuugaacaacuaggcuucagca

SEQ ID NO: 2516206 - RNA, 12 nt, Human
uuucuugccucu

SEQ ID NO: 2516207 - RNA, 15 nt, Human
uuugaagccugcccu

SEQ ID NO: 2516208 - RNA, 18 nt, Human
uuugaagcaguuguguca

SEQ ID NO: 2516209 - RNA, 16 nt, Human
uuugaagcaguugugu

SEQ ID NO: 2516210 - RNA, 15 nt, Human
uuugaacucagaucu

SEQ ID NO: 2516211 - RNA, 15 nt, Human
uuugaacuaauaaaa

SEQ ID NO: 2516212 - RNA, 20 nt, Human
uuugaaggaaacaguuaaua

SEQ ID NO: 2516213 - RNA, 13 nt, Human
uuugaaggaaaca

SEQ ID NO: 2516214 - RNA, 22 nt, Human
uuugaagccugcccuugucuga

SEQ ID NO: 2516215 - RNA, 12 nt, Human
uuugaaggcaaa

SEQ ID NO: 2516216 - RNA, 13 nt, Human
uuugaaggcaaaa

SEQ ID NO: 2516217 - RNA, 18 nt, Human
uuugaagcuacugugugu

SEQ ID NO: 2516218 - RNA, 16 nt, Human
uuugaagcuacugugu

SEQ ID NO: 2516219 - RNA, 19 nt, Human
uuucuuguguguuuauugu

SEQ ID NO: 2516220 - RNA, 19 nt, Human
uuucuugguucauaaauga

SEQ ID NO: 2516221 - RNA, 18 nt, Human
uuucuugguucauaaaug

SEQ ID NO: 2516222 - RNA, 17 nt, Human
uuucuugguucauaaau

SEQ ID NO: 2516223 - RNA, 21 nt, Human
uuucuugcugguugucauuuu

SEQ ID NO: 2516224 - RNA, 14 nt, Human
uuucuuaaccaucu

SEQ ID NO: 2516225 - RNA, 15 nt, Human
uuucuuaaccaucuu

SEQ ID NO: 2516226 - RNA, 21 nt, Human
uuucuugccucuguccccuuc

SEQ ID NO: 2516227 - RNA, 18 nt, Human
uuucuugccucugucccc

SEQ ID NO: 2516228 - RNA, 11 nt, Human
uuucuugcugg

SEQ ID NO: 2516229 - RNA, 12 nt, Human
uuucuuaaauaa

SEQ ID NO: 2516230 - RNA, 23 nt, Human
uuucugaucugaugcaagcaaga

SEQ ID NO: 2516231 - RNA, 18 nt, Human
uuucuuaaaccuucaguu

SEQ ID NO: 2516232 - RNA, 18 nt, Human
uuucuuaaccagaucauu

SEQ ID NO: 2516233 - RNA, 13 nt, Human
uuucuuaaauaau

SEQ ID NO: 2516234 - RNA, 15 nt, Human
uuucuuaaaugggcu

SEQ ID NO: 2516235 - RNA, 20 nt, Human
uuugaggagcagcuucaguu

SEQ ID NO: 2516236 - RNA, 15 nt, Human
uuugaggauauauuu

SEQ ID NO: 2516237 - RNA, 21 nt, Human
uuugaggagcagcuucaguug

SEQ ID NO: 2516238 - RNA, 22 nt, Human
uuugaggagcagcuucaguugu

SEQ ID NO: 2516239 - RNA, 21 nt, Human
uuugaggauauauuuucacuu

SEQ ID NO: 2516240 - RNA, 20 nt, Human
uuugaggauauauuuucacu

SEQ ID NO: 2516241 - RNA, 22 nt, Human
uuugaggauauauuuucacuuu

SEQ ID NO: 2516242 - RNA, 11 nt, Human
uuugaggggcu

SEQ ID NO: 2516243 - RNA, 20 nt, Human
uuugaggcuuucagguuuua

SEQ ID NO: 2516244 - RNA, 16 nt, Human
uuugaggggaaaacac

SEQ ID NO: 2516245 - RNA, 15 nt, Human
uuugaggcugcagcg

SEQ ID NO: 2516246 - RNA, 20 nt, Human
uuugauaaucaacugggcug

SEQ ID NO: 2516247 - RNA, 15 nt, Human
uuugauaaaguuucu

SEQ ID NO: 2516248 - RNA, 13 nt, Human
uuugauaaaguuu

SEQ ID NO: 2516249 - RNA, 21 nt, Human
uuugauaaaguaguaaaaauu

SEQ ID NO: 2516250 - RNA, 20 nt, Human
uuugauaaaguaguaaaaau

SEQ ID NO: 2516251 - RNA, 19 nt, Human
uuugauaaaguuucucaga

SEQ ID NO: 2516252 - RNA, 18 nt, Human
uuugauaaaguuucucag

SEQ ID NO: 2516253 - RNA, 19 nt, Human
uuugauaaaguaguaaaaa

SEQ ID NO: 2516254 - RNA, 14 nt, Human
uuugauaaaguagu

SEQ ID NO: 2516255 - RNA, 16 nt, Human
uuugauaaaauaaaug

SEQ ID NO: 2516256 - RNA, 13 nt, Human
uuugaguucuaca

SEQ ID NO: 2516257 - RNA, 20 nt, Human
uuugaggucaaguaagaaga

SEQ ID NO: 2516258 - RNA, 23 nt, Human
uuugaggucaaguaagaagacau

SEQ ID NO: 2516259 - RNA, 21 nt, Human
uuugaaguguaggcagacaca

SEQ ID NO: 2516260 - RNA, 20 nt, Human
uuugaaguguaggcagacac

SEQ ID NO: 2516261 - RNA, 18 nt, Human
uuugaaguguaggcagac

SEQ ID NO: 2516262 - RNA, 11 nt, Human
uuugaagugua

SEQ ID NO: 2516263 - RNA, 22 nt, Human
uuugaaguguaggcagacacag

SEQ ID NO: 2516264 - RNA, 22 nt, Human
uuugaagucauaccaaugaaaa

SEQ ID NO: 2516265 - RNA, 16 nt, Human
uuugaaguacaauugu

SEQ ID NO: 2516266 - RNA, 22 nt, Human
uuugaaguaaucccgccaccua

SEQ ID NO: 2516267 - RNA, 23 nt, Human
uuugaaguaguuuguauaacuuc

SEQ ID NO: 2516268 - RNA, 19 nt, Human
uuugaaggaggugagggau

SEQ ID NO: 2516269 - RNA, 16 nt, Human
uuugagaucagccugg

SEQ ID NO: 2516270 - RNA, 17 nt, Human
uuugagaucagccuggg

SEQ ID NO: 2516271 - RNA, 16 nt, Human
uuugagaguucuaaau

SEQ ID NO: 2516272 - RNA, 14 nt, Human
uuugagaguucuaa

SEQ ID NO: 2516273 - RNA, 18 nt, Human
uuugaauauaaacacuau

SEQ ID NO: 2516274 - RNA, 17 nt, Human
uuugaauauaaacacua

SEQ ID NO: 2516275 - RNA, 19 nt, Human
uuugauauuaaaggaguua

SEQ ID NO: 2516276 - RNA, 18 nt, Human
uuugaucagguggggagu

SEQ ID NO: 2516277 - RNA, 15 nt, Human
uuugauaauguuaaa

SEQ ID NO: 2516278 - RNA, 14 nt, Human
uuugauaauguuaa

SEQ ID NO: 2516279 - RNA, 12 nt, Human
uuugauaauguu

SEQ ID NO: 2516280 - RNA, 18 nt, Human
uuugauaaucaacugggc

SEQ ID NO: 2516281 - RNA, 17 nt, Human
uuugauauccaaagcug

SEQ ID NO: 2516282 - RNA, 23 nt, Human
uuugauauccaaagcugaauaca

SEQ ID NO: 2516283 - RNA, 19 nt, Human
uuugccacccucaugcugu

SEQ ID NO: 2516284 - RNA, 16 nt, Human
uuugccagcugcugcu

SEQ ID NO: 2516285 - RNA, 14 nt, Human
uuugccagcugcug

SEQ ID NO: 2516286 - RNA, 13 nt, Human
uuugccagcugcu

SEQ ID NO: 2516287 - RNA, 18 nt, Human
uuugccacccucaugcug

SEQ ID NO: 2516288 - RNA, 21 nt, Human
uuugccagaacaguuuguaca

SEQ ID NO: 2516289 - RNA, 14 nt, Human
uuugccaacauugc

SEQ ID NO: 2516290 - RNA, 19 nt, Human
uuuggacccugaggcccag

SEQ ID NO: 2516291 - RNA, 15 nt, Human
uuuggacccugaggc

SEQ ID NO: 2516292 - RNA, 19 nt, Human
uuuggaccuaaauggccuc

SEQ ID NO: 2516293 - RNA, 19 nt, Human
uuuggagacucuguggggc

SEQ ID NO: 2516294 - RNA, 16 nt, Human
uuuggaccuaauccaa

SEQ ID NO: 2516295 - RNA, 14 nt, Human
uuugcuugaaagaa

SEQ ID NO: 2516296 - RNA, 16 nt, Human
uuugcuugaaagaaaa

SEQ ID NO: 2516297 - RNA, 21 nt, Human
uuugcuugcaguagauuuucu

SEQ ID NO: 2516298 - RNA, 20 nt, Human
uuugcuugcaguagauuuuc

SEQ ID NO: 2516299 - RNA, 17 nt, Human
uuugcuugcaguagauu

SEQ ID NO: 2516300 - RNA, 20 nt, Human
uuugccagcugcugcuggau

SEQ ID NO: 2516301 - RNA, 16 nt, Human
uuugcuucucucucua

SEQ ID NO: 2516302 - RNA, 18 nt, Human
uuugguaaggggaauuga

SEQ ID NO: 2516303 - RNA, 18 nt, Human
uuugguacuuauuacugc

SEQ ID NO: 2516304 - RNA, 20 nt, Human
uuugguaaaauacuucuuga

SEQ ID NO: 2516305 - RNA, 14 nt, Human
uuuggguucugccu

SEQ ID NO: 2516306 - RNA, 15 nt, Human
uuuggguucugccug

SEQ ID NO: 2516307 - RNA, 22 nt, Human
uuuggagaaauuauuuaauaaa

SEQ ID NO: 2516308 - RNA, 22 nt, Human
uuuggguuaauauggcucuuca

SEQ ID NO: 2516309 - RNA, 16 nt, Human
uuuggguucugccugc

SEQ ID NO: 2516310 - RNA, 17 nt, Human
uuugguugcuuuaauau

SEQ ID NO: 2516311 - RNA, 14 nt, Human
uuugguugaauaaa

SEQ ID NO: 2516312 - RNA, 15 nt, Human
uuugguugaauaaac

SEQ ID NO: 2516313 - RNA, 21 nt, Human
uuugguucuuaguucucacug

SEQ ID NO: 2516314 - RNA, 18 nt, Human
uuugguuguauucuuuga

SEQ ID NO: 2516315 - RNA, 17 nt, Human
uuugguugaauaaacua

SEQ ID NO: 2516316 - RNA, 20 nt, Human
uuugguucauuaauucuaua

SEQ ID NO: 2516317 - RNA, 12 nt, Human
uuugguucugug

SEQ ID NO: 2516318 - RNA, 14 nt, Human
uuugguucuggggc

SEQ ID NO: 2516319 - RNA, 13 nt, Human
uuugguucugggg

SEQ ID NO: 2516320 - RNA, 13 nt, Human
uuugguucuaaua

SEQ ID NO: 2516321 - RNA, 16 nt, Human
uuuguaaacucaaaau

SEQ ID NO: 2516322 - RNA, 17 nt, Human
uuuguaaacucaaaaua

SEQ ID NO: 2516323 - RNA, 22 nt, Human
uuuguaaacucaaaauauuugu

SEQ ID NO: 2516324 - RNA, 22 nt, Human
uuuguaaaguguggucccaaca

SEQ ID NO: 2516325 - RNA, 17 nt, Human
uuuguaaaguguggucc

SEQ ID NO: 2516326 - RNA, 12 nt, Human
uuuguaaagugu

SEQ ID NO: 2516327 - RNA, 17 nt, Human
uuuguauguaaaugugc

SEQ ID NO: 2516328 - RNA, 16 nt, Human
uuuguauguaaaugug

SEQ ID NO: 2516329 - RNA, 14 nt, Human
uuuguauguauaau

SEQ ID NO: 2516330 - RNA, 15 nt, Human
uuuguauguauaauu

SEQ ID NO: 2516331 - RNA, 13 nt, Human
uuuguaugugugu

SEQ ID NO: 2516332 - RNA, 16 nt, Human
uuuguaugcacuuugu

SEQ ID NO: 2516333 - RNA, 14 nt, Human
uuuguauguaaaug

SEQ ID NO: 2516334 - RNA, 12 nt, Human
uuuguauguaaa

SEQ ID NO: 2516335 - RNA, 22 nt, Human
uuuguaugccaagugagaagau

SEQ ID NO: 2516336 - RNA, 15 nt, Human
uuuguggccucagaa

SEQ ID NO: 2516337 - RNA, 12 nt, Human
uuuguauguuuu

SEQ ID NO: 2516338 - RNA, 10 nt, Human
uuuguauguu

SEQ ID NO: 2516339 - RNA, 18 nt, Human
uuuguauguuuuuuuucu

SEQ ID NO: 2516340 - RNA, 20 nt, Human
uuuccuaaauauauuuuaag

SEQ ID NO: 2516341 - RNA, 12 nt, Human
uuuccacuuugu

SEQ ID NO: 2516342 - RNA, 15 nt, Human
uuuccuaaaugcagu

SEQ ID NO: 2516343 - RNA, 14 nt, Human
uuuccuaaauguuu

SEQ ID NO: 2516344 - RNA, 17 nt, Human
uuuccuaaaugcaguga

SEQ ID NO: 2516345 - RNA, 13 nt, Human
uuuccuaaauguu

SEQ ID NO: 2516346 - RNA, 22 nt, Human
uuuccuaacaggauuagacagu

SEQ ID NO: 2516347 - RNA, 18 nt, Human
uuuccuaacaggauuaga

SEQ ID NO: 2516348 - RNA, 19 nt, Human
uuuccacuccuccuagcca

SEQ ID NO: 2516349 - RNA, 12 nt, Human
uuuccacugaag

SEQ ID NO: 2516350 - RNA, 19 nt, Human
uuuccacgaugaaaaacuu

SEQ ID NO: 2516351 - RNA, 18 nt, Human
uuuccacuccuccuagcc

SEQ ID NO: 2516352 - RNA, 23 nt, Human
uuuccacggagccacuccucuga

SEQ ID NO: 2516353 - RNA, 13 nt, Human
uuuccacuacugc

SEQ ID NO: 2516354 - RNA, 14 nt, Human
uuuccacuacugcu

SEQ ID NO: 2516355 - RNA, 15 nt, Human
uuuccacuacugcua

SEQ ID NO: 2516356 - RNA, 23 nt, Human
uuuccaccacagccagcaccugg

SEQ ID NO: 2516357 - RNA, 18 nt, Human
uuuccaaaaguggccucu

SEQ ID NO: 2516358 - RNA, 15 nt, Human
uuuccacccccuccc

SEQ ID NO: 2516359 - RNA, 22 nt, Human
uuuccacccccucccuggccug

SEQ ID NO: 2516360 - RNA, 15 nt, Human
uuucauuuucugcaa

SEQ ID NO: 2516361 - RNA, 14 nt, Human
uuucauuuucugca

SEQ ID NO: 2516362 - RNA, 18 nt, Human
uuucauuuucugcaagcc

SEQ ID NO: 2516363 - RNA, 17 nt, Human
uuuccaaaaaaauacug

SEQ ID NO: 2516364 - RNA, 20 nt, Human
uuucauuuuuuuccaggcug

SEQ ID NO: 2516365 - RNA, 15 nt, Human
uuucauuuuuuucca

SEQ ID NO: 2516366 - RNA, 15 nt, Human
uuucaggugacaugu

SEQ ID NO: 2516367 - RNA, 13 nt, Human
uuucaggugacau

SEQ ID NO: 2516368 - RNA, 14 nt, Human
uuucagcugugaac

SEQ ID NO: 2516369 - RNA, 21 nt, Human
uuucagcgauguaugcagcua

SEQ ID NO: 2516370 - RNA, 22 nt, Human
uuucaggugacaugugaaaccu

SEQ ID NO: 2516371 - RNA, 20 nt, Human
uuucaggugacaugugaaac

SEQ ID NO: 2516372 - RNA, 19 nt, Human
uuucaggugacaugugaaa

SEQ ID NO: 2516373 - RNA, 16 nt, Human
uuucaggugacaugug

SEQ ID NO: 2516374 - RNA, 19 nt, Human
uuucagguuuuaguuuuua

SEQ ID NO: 2516375 - RNA, 14 nt, Human
uuucagguuuuagu

SEQ ID NO: 2516376 - RNA, 18 nt, Human
uuucagguguuuaguugc

SEQ ID NO: 2516377 - RNA, 18 nt, Human
uuucagguuuuguaaaga

SEQ ID NO: 2516378 - RNA, 19 nt, Human
uuucagguuuuguaaagau

SEQ ID NO: 2516379 - RNA, 20 nt, Human
uuucaguauuagugauguca

SEQ ID NO: 2516380 - RNA, 21 nt, Human
uuucaguauuuuggagaaauu

SEQ ID NO: 2516381 - RNA, 21 nt, Human
uuucagucauauaaaagcuau

SEQ ID NO: 2516382 - RNA, 14 nt, Human
uuucauuugccuau

SEQ ID NO: 2516383 - RNA, 13 nt, Human
uuucauuugccua

SEQ ID NO: 2516384 - RNA, 12 nt, Human
uuucauuucuug

SEQ ID NO: 2516385 - RNA, 14 nt, Human
uuucauuucaacug

SEQ ID NO: 2516386 - RNA, 22 nt, Human
uuucauuugccuauucccacac

SEQ ID NO: 2516387 - RNA, 19 nt, Human
uuucauuugguucauuaau

SEQ ID NO: 2516388 - RNA, 22 nt, Human
uuucaaugugauucuaaugucu

SEQ ID NO: 2516389 - RNA, 13 nt, Human
uuucaauuaaacg

SEQ ID NO: 2516390 - RNA, 12 nt, Human
uuucaauuaaac

SEQ ID NO: 2516391 - RNA, 20 nt, Human
uuucaaugugauucuaaugu

SEQ ID NO: 2516392 - RNA, 14 nt, Human
uuucaaugugauuc

SEQ ID NO: 2516393 - RNA, 13 nt, Human
uuucaaugugauu

SEQ ID NO: 2516394 - RNA, 17 nt, Human
uuucaauuaaacggauu

SEQ ID NO: 2516395 - RNA, 16 nt, Human
uuucaauuaaacggau

SEQ ID NO: 2516396 - RNA, 15 nt, Human
uuucaauuaaacgga

SEQ ID NO: 2516397 - RNA, 14 nt, Human
uuucaauuaaacgg

SEQ ID NO: 2516398 - RNA, 19 nt, Human
uuucaauuaaacggauuau

SEQ ID NO: 2516399 - RNA, 18 nt, Human
uuucaauuaaacggauua

SEQ ID NO: 2516400 - RNA, 15 nt, Human
uuuaugcuuuaaaca

SEQ ID NO: 2516401 - RNA, 16 nt, Human
uuuaugcuuuaaacau

SEQ ID NO: 2516402 - RNA, 17 nt, Human
uuuauggaaucuaccaa

SEQ ID NO: 2516403 - RNA, 21 nt, Human
uuuaugcugaaacagaauacu

SEQ ID NO: 2516404 - RNA, 23 nt, Human
uuuauggaggauggagagagggg

SEQ ID NO: 2516405 - RNA, 21 nt, Human
uuucaaugguuugcaaggaag

SEQ ID NO: 2516406 - RNA, 19 nt, Human
uuuaugagccagacaaaug

SEQ ID NO: 2516407 - RNA, 12 nt, Human
uuuaugagccag

SEQ ID NO: 2516408 - RNA, 17 nt, Human
uuuaugagccagacaaa

SEQ ID NO: 2516409 - RNA, 19 nt, Human
uuuaugccuucuuauugcu

SEQ ID NO: 2516410 - RNA, 21 nt, Human
uuuaugccggaugugcuuuuc

SEQ ID NO: 2516411 - RNA, 18 nt, Human
uuuaugccggaugugcuu

SEQ ID NO: 2516412 - RNA, 20 nt, Human
uuuaugcauuugcauuugcu

SEQ ID NO: 2516413 - RNA, 12 nt, Human
uuuaugcuuuaa

SEQ ID NO: 2516414 - RNA, 16 nt, Human
uuuaugcucaauccau

SEQ ID NO: 2516415 - RNA, 20 nt, Human
uuuaugccuuuuauuucuua

SEQ ID NO: 2516416 - RNA, 18 nt, Human
uuucacauagcugucuag

SEQ ID NO: 2516417 - RNA, 16 nt, Human
uuucacauagcugucu

SEQ ID NO: 2516418 - RNA, 17 nt, Human
uuucagccaagaauucu

SEQ ID NO: 2516419 - RNA, 23 nt, Human
uuucagcgacuccguuggccacu

SEQ ID NO: 2516420 - RNA, 18 nt, Human
uuucagcgacuccguugg

SEQ ID NO: 2516421 - RNA, 22 nt, Human
uuucagcgauguaugcagcuau

SEQ ID NO: 2516422 - RNA, 17 nt, Human
uuucagcgauguaugca

SEQ ID NO: 2516423 - RNA, 13 nt, Human
uuucacaguuuuu

SEQ ID NO: 2516424 - RNA, 14 nt, Human
uuucacauagaugu

SEQ ID NO: 2516425 - RNA, 15 nt, Human
uuucacaguuuuucc

SEQ ID NO: 2516426 - RNA, 13 nt, Human
uuucacagcuccu

SEQ ID NO: 2516427 - RNA, 19 nt, Human
uuucacaguguguuuguga

SEQ ID NO: 2516428 - RNA, 15 nt, Human
uuucaauucucaaaa

SEQ ID NO: 2516429 - RNA, 18 nt, Human
uuucaauugcaucuccca

SEQ ID NO: 2516430 - RNA, 14 nt, Human
uuucaauucucaaa

SEQ ID NO: 2516431 - RNA, 21 nt, Human
uuucaauuaaacggauuauuu

SEQ ID NO: 2516432 - RNA, 22 nt, Human
uuucaauuccaccugcaaucaa

SEQ ID NO: 2516433 - RNA, 20 nt, Human
uuucaauugcaucucccaga

SEQ ID NO: 2516434 - RNA, 19 nt, Human
uuucuaaaucuccaaaaua

SEQ ID NO: 2516435 - RNA, 22 nt, Human
uuucuaaaguaaaaacaaagaa

SEQ ID NO: 2516436 - RNA, 14 nt, Human
uuuccuggugccaa

SEQ ID NO: 2516437 - RNA, 16 nt, Human
uuuccuggugccaauu

SEQ ID NO: 2516438 - RNA, 19 nt, Human
uuuccuggugccaauuuca

SEQ ID NO: 2516439 - RNA, 22 nt, Human
uuuccuggugccaauuucaagu

SEQ ID NO: 2516440 - RNA, 17 nt, Human
uuucuaaaguaaaaaca

SEQ ID NO: 2516441 - RNA, 21 nt, Human
uuucuaacaaaaaaauauauu

SEQ ID NO: 2516442 - RNA, 15 nt, Human
uuucuaaugugugaa

SEQ ID NO: 2516443 - RNA, 19 nt, Human
uuuccuguagccuucugua

SEQ ID NO: 2516444 - RNA, 23 nt, Human
uuuccuguaaaaaaaaaaaaguu

SEQ ID NO: 2516445 - RNA, 13 nt, Human
uuucuaaauguuu

SEQ ID NO: 2516446 - RNA, 14 nt, Human
uuucuaaaguaaaa

SEQ ID NO: 2516447 - RNA, 17 nt, Human
uuucuacaaugugaacu

SEQ ID NO: 2516448 - RNA, 18 nt, Human
uuucuacaaugugaacuu

SEQ ID NO: 2516449 - RNA, 22 nt, Human
uuucuacaaugugaacuuuauu

SEQ ID NO: 2516450 - RNA, 18 nt, Human
uuucuacaguauuaugua

SEQ ID NO: 2516451 - RNA, 20 nt, Human
uuuccucuauugauguacag

SEQ ID NO: 2516452 - RNA, 19 nt, Human
uuuccucuauugauguaca

SEQ ID NO: 2516453 - RNA, 22 nt, Human
uuuccuccugaggcuuuggauu

SEQ ID NO: 2516454 - RNA, 14 nt, Human
uuuccuccuuccau

SEQ ID NO: 2516455 - RNA, 22 nt, Human
uuuccucccuuggguucugaua

SEQ ID NO: 2516456 - RNA, 21 nt, Human
uuuccuccugaggcuuuggau

SEQ ID NO: 2516457 - RNA, 22 nt, Human
uuuccuccgucaccucagagac

SEQ ID NO: 2516458 - RNA, 15 nt, Human
uuuccucccuugggu

SEQ ID NO: 2516459 - RNA, 20 nt, Human
uuuccucccuucugcuacug

SEQ ID NO: 2516460 - RNA, 21 nt, Human
uuuccuaauaaaguucuguac

SEQ ID NO: 2516461 - RNA, 23 nt, Human
uuuccuaauaaaguucuguacuc

SEQ ID NO: 2516462 - RNA, 19 nt, Human
uuuccuaagugauuguaug

SEQ ID NO: 2516463 - RNA, 15 nt, Human
uuuccuaaggcugca

SEQ ID NO: 2516464 - RNA, 17 nt, Human
uuuccuaaggcugcaag

SEQ ID NO: 2516465 - RNA, 24 nt, Human
uuuccuaauaaaguucuguacuca

SEQ ID NO: 2516466 - RNA, 19 nt, Human
uuuccucccuucugcuacu

SEQ ID NO: 2516467 - RNA, 23 nt, Human
uuuccuggcacugcuuccaguga

SEQ ID NO: 2516468 - RNA, 22 nt, Human
uuuccucuuagucgagccaagu

SEQ ID NO: 2516469 - RNA, 19 nt, Human
uuuccuggcacugcuucca

SEQ ID NO: 2516470 - RNA, 19 nt, Human
uuuccucucuuuguucuca

SEQ ID NO: 2516471 - RNA, 23 nt, Human
uuuccucucuuuguucucagcuc

SEQ ID NO: 2516472 - RNA, 22 nt, Human
uuuccucucuuuguucucagcu

SEQ ID NO: 2516473 - RNA, 23 nt, Human
uuucugauaacuagauggugcug

SEQ ID NO: 2516474 - RNA, 14 nt, Human
uuucugaaauaaca

SEQ ID NO: 2516475 - RNA, 20 nt, Human
uuucugaaaauuaacacugc

SEQ ID NO: 2516476 - RNA, 16 nt, Human
uuucugaaaauauaac

SEQ ID NO: 2516477 - RNA, 19 nt, Human
uuucugaaaauuaacacug

SEQ ID NO: 2516478 - RNA, 18 nt, Human
uuucuacccagcgagccc

SEQ ID NO: 2516479 - RNA, 15 nt, Human
uuucuacccagcgag

SEQ ID NO: 2516480 - RNA, 19 nt, Human
uuucuacagugguuuuaua

SEQ ID NO: 2516481 - RNA, 16 nt, Human
uuucuaccauuucaga

SEQ ID NO: 2516482 - RNA, 20 nt, Human
uuucuacccuagccauuccu

SEQ ID NO: 2516483 - RNA, 17 nt, Human
uuucuacccuagccauu

SEQ ID NO: 2516484 - RNA, 15 nt, Human
uuucuacccuagcca

SEQ ID NO: 2516485 - RNA, 21 nt, Human
uuucuacaaugugaacuuuau

SEQ ID NO: 2516486 - RNA, 22 nt, Human
uuucuacccagcgagcccuggu

SEQ ID NO: 2516487 - RNA, 12 nt, Human
uuucucuaggaa

SEQ ID NO: 2516488 - RNA, 20 nt, Human
uuucucuccagccugacuug

SEQ ID NO: 2516489 - RNA, 15 nt, Human
uuucuaccucccaga

SEQ ID NO: 2516490 - RNA, 16 nt, Human
uuucuccuuugauaaa

SEQ ID NO: 2516491 - RNA, 14 nt, Human
uuucuaccucccag

SEQ ID NO: 2516492 - RNA, 13 nt, Human
uuucuaccuccca

SEQ ID NO: 2516493 - RNA, 16 nt, Human
uuucuaccuugagguc

SEQ ID NO: 2516494 - RNA, 17 nt, Human
uuucucgauuuuaucuu

SEQ ID NO: 2516495 - RNA, 22 nt, Human
uuucucuaacuucaaggcccau

SEQ ID NO: 2516496 - RNA, 16 nt, Human
uuucuccuuuguacuu

SEQ ID NO: 2516497 - RNA, 13 nt, Human
uugucuuauauau

SEQ ID NO: 2516498 - RNA, 15 nt, Human
uugucuuauauauau

SEQ ID NO: 2516499 - RNA, 18 nt, Human
uugucuugccuuauuaaa

SEQ ID NO: 2516500 - RNA, 22 nt, Human
uugucuugaaugucuuuugaau

SEQ ID NO: 2516501 - RNA, 15 nt, Human
uugucuugaaugucu

SEQ ID NO: 2516502 - RNA, 14 nt, Human
uugucuugaaagau

SEQ ID NO: 2516503 - RNA, 13 nt, Human
uugucuugaaaga

SEQ ID NO: 2516504 - RNA, 16 nt, Human
uugucuucuccccagg

SEQ ID NO: 2516505 - RNA, 15 nt, Human
uugucuucuccccag

SEQ ID NO: 2516506 - RNA, 15 nt, Human
uugucuuuggacccu

SEQ ID NO: 2516507 - RNA, 13 nt, Human
uugucuuucagga

SEQ ID NO: 2516508 - RNA, 14 nt, Human
uugucuuuaacugu

SEQ ID NO: 2516509 - RNA, 14 nt, Human
uugucuuguucugu

SEQ ID NO: 2516510 - RNA, 24 nt, Human
uugucuuuggacccugaggcccag

SEQ ID NO: 2516511 - RNA, 20 nt, Human
uugucuuuggacccugaggc

SEQ ID NO: 2516512 - RNA, 23 nt, Human
uugucuuuguaaugucaccaccu

SEQ ID NO: 2516513 - RNA, 14 nt, Human
uuguuauuauauaa

SEQ ID NO: 2516514 - RNA, 23 nt, Human
uuguuauugggcaagugauugaa

SEQ ID NO: 2516515 - RNA, 23 nt, Human
uuguuauuauauaauuacauauu

SEQ ID NO: 2516516 - RNA, 18 nt, Human
uuguuuacuuaaagauuu

SEQ ID NO: 2516517 - RNA, 16 nt, Human
uuguuuacuuaaagau

SEQ ID NO: 2516518 - RNA, 22 nt, Human
uuguuuacagcacuacucugug

SEQ ID NO: 2516519 - RNA, 15 nt, Human
uuguuuagaagaagu

SEQ ID NO: 2516520 - RNA, 18 nt, Human
uuguuuagaagaagugug

SEQ ID NO: 2516521 - RNA, 17 nt, Human
uuguuuaaagcaacugu

SEQ ID NO: 2516522 - RNA, 13 nt, Human
uuguuuaaagcaa

SEQ ID NO: 2516523 - RNA, 13 nt, Human
uuguuauuuucag

SEQ ID NO: 2516524 - RNA, 19 nt, Human
uuguucaauaauaaauauu

SEQ ID NO: 2516525 - RNA, 21 nt, Human
uuguuuacagcacuacucugu

SEQ ID NO: 2516526 - RNA, 18 nt, Human
uuguuuaaaaucauuucu

SEQ ID NO: 2516527 - RNA, 17 nt, Human
uuguuuaaaaucauuuc

SEQ ID NO: 2516528 - RNA, 15 nt, Human
uuguuauuuguacag

SEQ ID NO: 2516529 - RNA, 14 nt, Human
uuguuauuuauaac

SEQ ID NO: 2516530 - RNA, 15 nt, Human
uuguuauuuugcaac

SEQ ID NO: 2516531 - RNA, 22 nt, Human
uuguuauuuugcaaccucgcug

SEQ ID NO: 2516532 - RNA, 20 nt, Human
uuguucaaaauauguucuuu

SEQ ID NO: 2516533 - RNA, 17 nt, Human
uuguuucucccccuggg

SEQ ID NO: 2516534 - RNA, 21 nt, Human
uuguuuagaaagaauauucau

SEQ ID NO: 2516535 - RNA, 23 nt, Human
uuguuuacuuaaagauuuaucaa

SEQ ID NO: 2516536 - RNA, 18 nt, Human
uuguuuauaccuuugccu

SEQ ID NO: 2516537 - RNA, 20 nt, Human
uuguuuauucuuuuuaaagu

SEQ ID NO: 2516538 - RNA, 20 nt, Human
uuguuuggggaugagaaagg

SEQ ID NO: 2516539 - RNA, 15 nt, Human
uuguuugguauugua

SEQ ID NO: 2516540 - RNA, 15 nt, Human
uuguuucuuccaaag

SEQ ID NO: 2516541 - RNA, 19 nt, Human
uuguuucuuccaaagcaca

SEQ ID NO: 2516542 - RNA, 13 nt, Human
uuguuucuuccaa

SEQ ID NO: 2516543 - RNA, 21 nt, Human
uuguuugguauuguauuuauu

SEQ ID NO: 2516544 - RNA, 15 nt, Human
uuguuucuuucuagu

SEQ ID NO: 2516545 - RNA, 13 nt, Human
uuguuuguaugua

SEQ ID NO: 2516546 - RNA, 19 nt, Human
uuguuuguauguauaauuc

SEQ ID NO: 2516547 - RNA, 19 nt, Human
uuguuugguauuguauuua

SEQ ID NO: 2516548 - RNA, 16 nt, Human
uuguuugguauuguau

SEQ ID NO: 2516549 - RNA, 22 nt, Human
uuguuuguauguauaauucaaa

SEQ ID NO: 2516550 - RNA, 12 nt, Human
uuguuugugcuu

SEQ ID NO: 2516551 - RNA, 11 nt, Human
uuguuugugcu

SEQ ID NO: 2516552 - RNA, 13 nt, Human
uuguuugucuuua

SEQ ID NO: 2516553 - RNA, 15 nt, Human
uuuaaaacagacacu

SEQ ID NO: 2516554 - RNA, 16 nt, Human
uuuaaaacauguaaua

SEQ ID NO: 2516555 - RNA, 15 nt, Human
uuuaaaacauguaau

SEQ ID NO: 2516556 - RNA, 14 nt, Human
uuuaaaacauguaa

SEQ ID NO: 2516557 - RNA, 12 nt, Human
uuguuuguuuca

SEQ ID NO: 2516558 - RNA, 13 nt, Human
uuguuuguuucaa

SEQ ID NO: 2516559 - RNA, 21 nt, Human
uuguuuguuucucccccuggg

SEQ ID NO: 2516560 - RNA, 20 nt, Human
uuguuuuaaaauuaaagcua

SEQ ID NO: 2516561 - RNA, 18 nt, Human
uuguuuuaaaauuaaagc

SEQ ID NO: 2516562 - RNA, 12 nt, Human
uuuaaaaugucu

SEQ ID NO: 2516563 - RNA, 16 nt, Human
uuuaaaaugagaaauc

SEQ ID NO: 2516564 - RNA, 14 nt, Human
uuuaaaaugauuag

SEQ ID NO: 2516565 - RNA, 12 nt, Human
uuuaaaaugauu

SEQ ID NO: 2516566 - RNA, 12 nt, Human
uuuaaacaaauu

SEQ ID NO: 2516567 - RNA, 20 nt, Human
uuuaaacaaaauagaagcug

SEQ ID NO: 2516568 - RNA, 19 nt, Human
uuuaaaauuuuuuuagaaa

SEQ ID NO: 2516569 - RNA, 18 nt, Human
uuuaaaauuuuuuuagaa

SEQ ID NO: 2516570 - RNA, 17 nt, Human
uuuaaaauuuuaucucu

SEQ ID NO: 2516571 - RNA, 19 nt, Human
uuuaaaauuuaaguaucuu

SEQ ID NO: 2516572 - RNA, 16 nt, Human
uuuaaaauugugaugu

SEQ ID NO: 2516573 - RNA, 20 nt, Human
uuuaaacaugguuacaauca

SEQ ID NO: 2516574 - RNA, 21 nt, Human
uuuaaacaggcccagcauugc

SEQ ID NO: 2516575 - RNA, 15 nt, Human
uuuaaacccauuuua

SEQ ID NO: 2516576 - RNA, 17 nt, Human
uuuaaacccauuuuagu

SEQ ID NO: 2516577 - RNA, 21 nt, Human
uuuaaacccauuuuagucacu

SEQ ID NO: 2516578 - RNA, 23 nt, Human
uuuaaacaaauucauauucuguc

SEQ ID NO: 2516579 - RNA, 14 nt, Human
uuuaaacaaauuca

SEQ ID NO: 2516580 - RNA, 14 nt, Human
uuuaaacaccuccu

SEQ ID NO: 2516581 - RNA, 13 nt, Human
uuuaaacagcagu

SEQ ID NO: 2516582 - RNA, 16 nt, Human
uuuaaacauagaaagu

SEQ ID NO: 2516583 - RNA, 16 nt, Human
uuuaaacaggcccagc

SEQ ID NO: 2516584 - RNA, 15 nt, Human
uuuaaacugauucau

SEQ ID NO: 2516585 - RNA, 22 nt, Human
uuuaaaccucaccuuugugggg

SEQ ID NO: 2516586 - RNA, 13 nt, Human
uuuaacagaaaug

SEQ ID NO: 2516587 - RNA, 23 nt, Human
uuuaacaauuuccuuuauauuua

SEQ ID NO: 2516588 - RNA, 14 nt, Human
uuuaaacuguguac

SEQ ID NO: 2516589 - RNA, 19 nt, Human
uuuaacacaaguccuguga

SEQ ID NO: 2516590 - RNA, 18 nt, Human
uuuaacaccugaugugua

SEQ ID NO: 2516591 - RNA, 17 nt, Human
uuuaacaccugaugugu

SEQ ID NO: 2516592 - RNA, 19 nt, Human
uuuaaaagacaagacuuca

SEQ ID NO: 2516593 - RNA, 16 nt, Human
uuuaaaagacaagacu

SEQ ID NO: 2516594 - RNA, 23 nt, Human
uuuaaaagaaugggcaguuacau

SEQ ID NO: 2516595 - RNA, 18 nt, Human
uuuaaaagaaugggcagu

SEQ ID NO: 2516596 - RNA, 17 nt, Human
uuuaaaagaaugggcag

SEQ ID NO: 2516597 - RNA, 11 nt, Human
uuuaaaacuug

SEQ ID NO: 2516598 - RNA, 17 nt, Human
uuuaaaagaaugauuau

SEQ ID NO: 2516599 - RNA, 14 nt, Human
uuuaaaagaaugau

SEQ ID NO: 2516600 - RNA, 14 nt, Human
uuuaaaacccauuu

SEQ ID NO: 2516601 - RNA, 21 nt, Human
uuuaaaacccauuuaaauuuu

SEQ ID NO: 2516602 - RNA, 13 nt, Human
uuuaaaagauaca

SEQ ID NO: 2516603 - RNA, 20 nt, Human
uuuaaaagauaaauauuaua

SEQ ID NO: 2516604 - RNA, 14 nt, Human
uuuaaaagacacug

SEQ ID NO: 2516605 - RNA, 16 nt, Human
uuuaaaagauucauuu

SEQ ID NO: 2516606 - RNA, 18 nt, Human
uuuaaaagaugcaaugua

SEQ ID NO: 2516607 - RNA, 14 nt, Human
uuuaaaagauucau

SEQ ID NO: 2516608 - RNA, 16 nt, Human
uuuaaaaucauuucug

SEQ ID NO: 2516609 - RNA, 15 nt, Human
uuuaaaaucugucac

SEQ ID NO: 2516610 - RNA, 16 nt, Human
uuuaaaaucuuuucua

SEQ ID NO: 2516611 - RNA, 16 nt, Human
uuuaaaauauuuaucu

SEQ ID NO: 2516612 - RNA, 19 nt, Human
uuuaaaauacacacucaaa

SEQ ID NO: 2516613 - RNA, 20 nt, Human
uuuaaaaguuucaaugugau

SEQ ID NO: 2516614 - RNA, 20 nt, Human
uuuaaaaggauuuuuaucuu

SEQ ID NO: 2516615 - RNA, 15 nt, Human
uuuaaaaguuauuaa

SEQ ID NO: 2516616 - RNA, 17 nt, Human
uuuaaaaguuucaaugu

SEQ ID NO: 2516617 - RNA, 19 nt, Human
uuuaaaaguuauuaauauu

SEQ ID NO: 2516618 - RNA, 11 nt, Human
uuuagacagua

SEQ ID NO: 2516619 - RNA, 21 nt, Human
uuuacccauauccccucuccc

SEQ ID NO: 2516620 - RNA, 18 nt, Human
uuuacccauauccccucu

SEQ ID NO: 2516621 - RNA, 17 nt, Human
uuuacccauauccccuc

SEQ ID NO: 2516622 - RNA, 14 nt, Human
uuuacccauauccc

SEQ ID NO: 2516623 - RNA, 19 nt, Human
uuuagacccuauugcugcu

SEQ ID NO: 2516624 - RNA, 16 nt, Human
uuuagacagucucacu

SEQ ID NO: 2516625 - RNA, 20 nt, Human
uuuagacagucucacuuugu

SEQ ID NO: 2516626 - RNA, 15 nt, Human
uuuagaccauuuauc

SEQ ID NO: 2516627 - RNA, 18 nt, Human
uuuaguugcaacuuugua

SEQ ID NO: 2516628 - RNA, 17 nt, Human
uuuaguugcaacuuugu

SEQ ID NO: 2516629 - RNA, 15 nt, Human
uuuagacuguagccu

SEQ ID NO: 2516630 - RNA, 13 nt, Human
uuuaguuauaguu

SEQ ID NO: 2516631 - RNA, 15 nt, Human
uuuaguuauaguuuc

SEQ ID NO: 2516632 - RNA, 14 nt, Human
uuuaguuauaguuu

SEQ ID NO: 2516633 - RNA, 22 nt, Human
uuuagacccuauugcugcuuga

SEQ ID NO: 2516634 - RNA, 19 nt, Human
uuuauacaccaauugauuu

SEQ ID NO: 2516635 - RNA, 15 nt, Human
uuuauacacauaauu

SEQ ID NO: 2516636 - RNA, 12 nt, Human
uuuauacacaua

SEQ ID NO: 2516637 - RNA, 11 nt, Human
uuuauacacau

SEQ ID NO: 2516638 - RNA, 23 nt, Human
uuuauacaacagugcuaaaaaug

SEQ ID NO: 2516639 - RNA, 19 nt, Human
uuuauacaacagugcuaaa

SEQ ID NO: 2516640 - RNA, 16 nt, Human
uuuauacaauaucauc

SEQ ID NO: 2516641 - RNA, 18 nt, Human
uuuauacaacagugcuaa

SEQ ID NO: 2516642 - RNA, 17 nt, Human
uuuauacaacagugcua

SEQ ID NO: 2516643 - RNA, 16 nt, Human
uuuauacaacagugcu

SEQ ID NO: 2516644 - RNA, 15 nt, Human
uuuauacaacagugc

SEQ ID NO: 2516645 - RNA, 19 nt, Human
uuuauacaaauuagaaaau

SEQ ID NO: 2516646 - RNA, 16 nt, Human
uuuauaaaugcuauuu

SEQ ID NO: 2516647 - RNA, 13 nt, Human
uuuauaaaugcua

SEQ ID NO: 2516648 - RNA, 12 nt, Human
uuuauaaaugcu

SEQ ID NO: 2516649 - RNA, 19 nt, Human
uuuauaaaucgcuuuugau

SEQ ID NO: 2516650 - RNA, 15 nt, Human
uuuauaaaugcuauu

SEQ ID NO: 2516651 - RNA, 14 nt, Human
uuuauaaaugcuau

SEQ ID NO: 2516652 - RNA, 18 nt, Human
uuuauaaacuuuaccuuu

SEQ ID NO: 2516653 - RNA, 17 nt, Human
uuuaguucuuuggaaau

SEQ ID NO: 2516654 - RNA, 11 nt, Human
uuuaguucuuu

SEQ ID NO: 2516655 - RNA, 19 nt, Human
uuuaguugcagaaacauuu

SEQ ID NO: 2516656 - RNA, 15 nt, Human
uuuauaaaucgcuuu

SEQ ID NO: 2516657 - RNA, 18 nt, Human
uuuauaaaucgcuuuuga

SEQ ID NO: 2516658 - RNA, 22 nt, Human
uuuauaaaucgcuuuugauaau

SEQ ID NO: 2516659 - RNA, 20 nt, Human
uuuaguuguaucucuuuuga

SEQ ID NO: 2516660 - RNA, 19 nt, Human
uuuaguugcagacucaguu

SEQ ID NO: 2516661 - RNA, 17 nt, Human
uuuaguuguaucucuuu

SEQ ID NO: 2516662 - RNA, 13 nt, Human
uuuaucuguucuu

SEQ ID NO: 2516663 - RNA, 14 nt, Human
uuuaucuugucucu

SEQ ID NO: 2516664 - RNA, 15 nt, Human
uuuaucuugggacug

SEQ ID NO: 2516665 - RNA, 21 nt, Human
uuuaucuuggacugacauuua

SEQ ID NO: 2516666 - RNA, 16 nt, Human
uuuaucuguaguaaac

SEQ ID NO: 2516667 - RNA, 19 nt, Human
uuuaucuguaguaaacuau

SEQ ID NO: 2516668 - RNA, 20 nt, Human
uuuaugacuucauuaauaau

SEQ ID NO: 2516669 - RNA, 16 nt, Human
uuuaugaauuaaagua

SEQ ID NO: 2516670 - RNA, 18 nt, Human
uuuaugaauuaaaguaau

SEQ ID NO: 2516671 - RNA, 20 nt, Human
uuuaugaaugaaaaaacagu

SEQ ID NO: 2516672 - RNA, 19 nt, Human
uuuauccugaaauuucaga

SEQ ID NO: 2516673 - RNA, 18 nt, Human
uuuauccugaaauuucag

SEQ ID NO: 2516674 - RNA, 18 nt, Human
uuuauccucuuuagaguu

SEQ ID NO: 2516675 - RNA, 13 nt, Human
uuuaucucuauuu

SEQ ID NO: 2516676 - RNA, 13 nt, Human
uuuaucugauuaa

SEQ ID NO: 2516677 - RNA, 17 nt, Human
uuuaucucuauuuaaua

SEQ ID NO: 2516678 - RNA, 14 nt, Human
uuuaucucuauuua

SEQ ID NO: 2516679 - RNA, 17 nt, Human
uuuaucugggauuaugg

SEQ ID NO: 2516680 - RNA, 12 nt, Human
uuuauacauaaa

SEQ ID NO: 2516681 - RNA, 20 nt, Human
uuuauacauaaacaagacca

SEQ ID NO: 2516682 - RNA, 16 nt, Human
uuuauacguguagcua

SEQ ID NO: 2516683 - RNA, 15 nt, Human
uuuauacguguagcu

SEQ ID NO: 2516684 - RNA, 16 nt, Human
uuuauacucuuucugu

SEQ ID NO: 2516685 - RNA, 16 nt, Human
uuuaucccucaccugu

SEQ ID NO: 2516686 - RNA, 21 nt, Human
uuuauccauucaacugaaaau

SEQ ID NO: 2516687 - RNA, 12 nt, Human
uuuaucauuuuc

SEQ ID NO: 2516688 - RNA, 16 nt, Human
uuuauacuguuuacug

SEQ ID NO: 2516689 - RNA, 13 nt, Human
uuuauacuguaua

SEQ ID NO: 2516690 - RNA, 18 nt, Human
uuuauacucuuucuguau

SEQ ID NO: 2516691 - RNA, 20 nt, Human
uuuauacucuuucuguauau

SEQ ID NO: 2516692 - RNA, 16 nt, Human
uuuauacugaaggaaa

SEQ ID NO: 2516693 - RNA, 17 nt, Human
uuuauacguguagcuau

SEQ ID NO: 2516694 - RNA, 15 nt, Human
uuuaauaauguuuca

SEQ ID NO: 2516695 - RNA, 14 nt, Human
uuuaauaauguuuc

SEQ ID NO: 2516696 - RNA, 13 nt, Human
uuuaauaaaccau

SEQ ID NO: 2516697 - RNA, 22 nt, Human
uuuaauaaacacucuugaaaaa

SEQ ID NO: 2516698 - RNA, 23 nt, Human
uuuaauauaaaguaguccuguga

SEQ ID NO: 2516699 - RNA, 17 nt, Human
uuuaauaguguuaauca

SEQ ID NO: 2516700 - RNA, 14 nt, Human
uuuaauaguguuaa

SEQ ID NO: 2516701 - RNA, 12 nt, Human
uuuaauaguguu

SEQ ID NO: 2516702 - RNA, 22 nt, Human
uuuaauaguguuaaucaauuua

SEQ ID NO: 2516703 - RNA, 18 nt, Human
uuuaauaguguuaaucaa

SEQ ID NO: 2516704 - RNA, 15 nt, Human
uuuaauauaaagccu

SEQ ID NO: 2516705 - RNA, 19 nt, Human
uuuaauaauguuucaaaca

SEQ ID NO: 2516706 - RNA, 16 nt, Human
uuuaaccuaugauauu

SEQ ID NO: 2516707 - RNA, 21 nt, Human
uuuaacaccugauguguacau

SEQ ID NO: 2516708 - RNA, 21 nt, Human
uuuaaccaaaggugaaggaau

SEQ ID NO: 2516709 - RNA, 15 nt, Human
uuuaaccaaagguga

SEQ ID NO: 2516710 - RNA, 13 nt, Human
uuuaaccaaaggu

SEQ ID NO: 2516711 - RNA, 12 nt, Human
uuuaaccaaagg

SEQ ID NO: 2516712 - RNA, 19 nt, Human
uuuaaccaaaacaugucuc

SEQ ID NO: 2516713 - RNA, 14 nt, Human
uuuaaccaaaacau

SEQ ID NO: 2516714 - RNA, 14 nt, Human
uuuaacagaaaugu

SEQ ID NO: 2516715 - RNA, 15 nt, Human
uuuaacagaaaugua

SEQ ID NO: 2516716 - RNA, 15 nt, Human
uuuaauaaacacucu

SEQ ID NO: 2516717 - RNA, 14 nt, Human
uuuaauaaacacuc

SEQ ID NO: 2516718 - RNA, 22 nt, Human
uuuaaccauugucuuguucugu

SEQ ID NO: 2516719 - RNA, 20 nt, Human
uuuaaccauuaaaacugaag

SEQ ID NO: 2516720 - RNA, 23 nt, Human
uuuaaccaaaggugaaggaauau

SEQ ID NO: 2516721 - RNA, 17 nt, Human
uuuaaccauuaaaacug

SEQ ID NO: 2516722 - RNA, 18 nt, Human
uuuaauauggguucuuuu

SEQ ID NO: 2516723 - RNA, 15 nt, Human
uuuaauauagcuauu

SEQ ID NO: 2516724 - RNA, 16 nt, Human
uuuaauauagcuauuu

SEQ ID NO: 2516725 - RNA, 14 nt, Human
uuuaauauagcuau

SEQ ID NO: 2516726 - RNA, 20 nt, Human
uuuacagaggacaguauuug

SEQ ID NO: 2516727 - RNA, 13 nt, Human
uuuacagagacag

SEQ ID NO: 2516728 - RNA, 15 nt, Human
uuuaauauuuaaaca

SEQ ID NO: 2516729 - RNA, 13 nt, Human
uuuaauauuuaaa

SEQ ID NO: 2516730 - RNA, 14 nt, Human
uuuaauauuuugca

SEQ ID NO: 2516731 - RNA, 18 nt, Human
uuuaauauuuaaacagca

SEQ ID NO: 2516732 - RNA, 15 nt, Human
uuuaauauugagaaa

SEQ ID NO: 2516733 - RNA, 22 nt, Human
uuuaauauugagaaagaaacua

SEQ ID NO: 2516734 - RNA, 12 nt, Human
uuuaauauuuaa

SEQ ID NO: 2516735 - RNA, 18 nt, Human
uuuacaugaauugcauuu

SEQ ID NO: 2516736 - RNA, 21 nt, Human
uuuacaguuucaaaaacugua

SEQ ID NO: 2516737 - RNA, 18 nt, Human
uuuacagcacuacucugu

SEQ ID NO: 2516738 - RNA, 15 nt, Human
uuuacauacugcugu

SEQ ID NO: 2516739 - RNA, 13 nt, Human
uuuacagcugccu

SEQ ID NO: 2516740 - RNA, 16 nt, Human
uuuacagcacuacucu

SEQ ID NO: 2516741 - RNA, 15 nt, Human
uuuacagcacuacuc

SEQ ID NO: 2516742 - RNA, 17 nt, Human
uuuacagaugaauguau

SEQ ID NO: 2516743 - RNA, 21 nt, Human
uuuacagcacuacucugugcc

SEQ ID NO: 2516744 - RNA, 20 nt, Human
uuuacagccucacuugaaug

SEQ ID NO: 2516745 - RNA, 20 nt, Human
uuuacaugcaauuuauuaaa

SEQ ID NO: 2516746 - RNA, 23 nt, Human
uuuaccagccuccguauuucaga

SEQ ID NO: 2516747 - RNA, 20 nt, Human
uuuaccaugccccugagcaa

SEQ ID NO: 2516748 - RNA, 18 nt, Human
uuuacccaaaaacuaaau

SEQ ID NO: 2516749 - RNA, 19 nt, Human
uuuacccacacacagauaa

SEQ ID NO: 2516750 - RNA, 20 nt, Human
uugauucuccuucagcccuc

SEQ ID NO: 2516751 - RNA, 15 nt, Human
uugcacuccagccug

SEQ ID NO: 2516752 - RNA, 17 nt, Human
uugauucuccuucagcc

SEQ ID NO: 2516753 - RNA, 13 nt, Human
uugauucuccuuc

SEQ ID NO: 2516754 - RNA, 12 nt, Human
uugauucuccuu

SEQ ID NO: 2516755 - RNA, 21 nt, Human
uugaucugcucagcccuggag

SEQ ID NO: 2516756 - RNA, 20 nt, Human
uugaucugcucagcccugga

SEQ ID NO: 2516757 - RNA, 22 nt, Human
uugaucugcucagcccuggagg

SEQ ID NO: 2516758 - RNA, 23 nt, Human
uugauucgguauccccccaucuu

SEQ ID NO: 2516759 - RNA, 19 nt, Human
uugauucauaguaacuucu

SEQ ID NO: 2516760 - RNA, 17 nt, Human
uugauucauaaugacuu

SEQ ID NO: 2516761 - RNA, 13 nt, Human
uugauucauaaug

SEQ ID NO: 2516762 - RNA, 20 nt, Human
uugcacuugugauuauuuau

SEQ ID NO: 2516763 - RNA, 17 nt, Human
uugcacuggaguucuau

SEQ ID NO: 2516764 - RNA, 15 nt, Human
uugcagaaacauuuu

SEQ ID NO: 2516765 - RNA, 17 nt, Human
uugcagaaaagcaccug

SEQ ID NO: 2516766 - RNA, 18 nt, Human
uugcagaaaagcaccugc

SEQ ID NO: 2516767 - RNA, 19 nt, Human
uugcagaaaagcaccugcc

SEQ ID NO: 2516768 - RNA, 20 nt, Human
uugcagaaaagcaccugccg

SEQ ID NO: 2516769 - RNA, 21 nt, Human
uugcacugagggccacacuau

SEQ ID NO: 2516770 - RNA, 16 nt, Human
uugcacugagggccac

SEQ ID NO: 2516771 - RNA, 17 nt, Human
uugcacuugugauuauu

SEQ ID NO: 2516772 - RNA, 13 nt, Human
uugcacugagggc

SEQ ID NO: 2516773 - RNA, 12 nt, Human
uugcacugaggg

SEQ ID NO: 2516774 - RNA, 17 nt, Human
uugcacucuagccuggg

SEQ ID NO: 2516775 - RNA, 22 nt, Human
uugcacucuaaaagguucaggg

SEQ ID NO: 2516776 - RNA, 16 nt, Human
uugcacuccagccugg

SEQ ID NO: 2516777 - RNA, 19 nt, Human
uugcacucuaaaagguuca

SEQ ID NO: 2516778 - RNA, 18 nt, Human
uugcagauucauuuuucu

SEQ ID NO: 2516779 - RNA, 19 nt, Human
uugcagaugacaaaaauuc

SEQ ID NO: 2516780 - RNA, 14 nt, Human
uugcagaugacaaa

SEQ ID NO: 2516781 - RNA, 19 nt, Human
uugcagagacaggaccuga

SEQ ID NO: 2516782 - RNA, 23 nt, Human
uugcagcagugagucucuucaga

SEQ ID NO: 2516783 - RNA, 18 nt, Human
uugcagcacucacacagg

SEQ ID NO: 2516784 - RNA, 12 nt, Human
uugcagcaguga

SEQ ID NO: 2516785 - RNA, 14 nt, Human
uugcagcagugagu

SEQ ID NO: 2516786 - RNA, 23 nt, Human
uugcagacaggcaagcaccuccu

SEQ ID NO: 2516787 - RNA, 13 nt, Human
uugcagacuagaa

SEQ ID NO: 2516788 - RNA, 21 nt, Human
uugcagaaaagcaccugccga

SEQ ID NO: 2516789 - RNA, 20 nt, Human
uugcagacuagaauucuagu

SEQ ID NO: 2516790 - RNA, 19 nt, Human
uugcagacucaguuuguca

SEQ ID NO: 2516791 - RNA, 14 nt, Human
uugcagagacagga

SEQ ID NO: 2516792 - RNA, 20 nt, Human
uugcaguguggugagaucau

SEQ ID NO: 2516793 - RNA, 18 nt, Human
uugcaguuuaucauucaa

SEQ ID NO: 2516794 - RNA, 13 nt, Human
uugcaguuuauca

SEQ ID NO: 2516795 - RNA, 13 nt, Human
uugcaguucaccu

SEQ ID NO: 2516796 - RNA, 16 nt, Human
uugcaguucagcacca

SEQ ID NO: 2516797 - RNA, 20 nt, Human
uugcagccggcacagggucu

SEQ ID NO: 2516798 - RNA, 18 nt, Human
uugcagccggcacagggu

SEQ ID NO: 2516799 - RNA, 18 nt, Human
uugcagcgauuaauaaca

SEQ ID NO: 2516800 - RNA, 19 nt, Human
uugcagcgauuaauaacag

SEQ ID NO: 2516801 - RNA, 12 nt, Human
uugccaggcuag

SEQ ID NO: 2516802 - RNA, 23 nt, Human
uugccaucugcgugacaauaaaa

SEQ ID NO: 2516803 - RNA, 19 nt, Human
uugccauguuggccaggcu

SEQ ID NO: 2516804 - RNA, 18 nt, Human
uugccauguuggccaggc

SEQ ID NO: 2516805 - RNA, 17 nt, Human
uugccauguuggccagg

SEQ ID NO: 2516806 - RNA, 16 nt, Human
uugccauguuggccag

SEQ ID NO: 2516807 - RNA, 19 nt, Human
uugccauauuuucaccauu

SEQ ID NO: 2516808 - RNA, 23 nt, Human
uugccauauugcacaugucuuaa

SEQ ID NO: 2516809 - RNA, 22 nt, Human
uugccagcuuuuccucccuugg

SEQ ID NO: 2516810 - RNA, 20 nt, Human
uugccagcuuuuccucccuu

SEQ ID NO: 2516811 - RNA, 19 nt, Human
uugccagcuuuuccucccu

SEQ ID NO: 2516812 - RNA, 18 nt, Human
uugccagcuuuuccuccc

SEQ ID NO: 2516813 - RNA, 12 nt, Human
uugccagcuuuu

SEQ ID NO: 2516814 - RNA, 19 nt, Human
uugccagcugcugcuggau

SEQ ID NO: 2516815 - RNA, 15 nt, Human
uugccagcugcugcu

SEQ ID NO: 2516816 - RNA, 17 nt, Human
uugccagaaagcauaaa

SEQ ID NO: 2516817 - RNA, 20 nt, Human
uugcaguuuaucauucaagu

SEQ ID NO: 2516818 - RNA, 19 nt, Human
uugcaguuuaucauucaag

SEQ ID NO: 2516819 - RNA, 23 nt, Human
uugcaguuuaucauucaagugua

SEQ ID NO: 2516820 - RNA, 19 nt, Human
uugcauaacaauuccucua

SEQ ID NO: 2516821 - RNA, 16 nt, Human
uugcauaacguauaaa

SEQ ID NO: 2516822 - RNA, 19 nt, Human
uugccagagauccaaaaga

SEQ ID NO: 2516823 - RNA, 14 nt, Human
uugccagagaugga

SEQ ID NO: 2516824 - RNA, 20 nt, Human
uugccagaaagcauaaaauu

SEQ ID NO: 2516825 - RNA, 22 nt, Human
uugccagacauguggugggaca

SEQ ID NO: 2516826 - RNA, 15 nt, Human
uugcauaauaagcua

SEQ ID NO: 2516827 - RNA, 20 nt, Human
uugcauaauaagcuaaagag

SEQ ID NO: 2516828 - RNA, 15 nt, Human
uugccagaaagcaua

SEQ ID NO: 2516829 - RNA, 21 nt, Human
uugaucccuguuacccagaga

SEQ ID NO: 2516830 - RNA, 19 nt, Human
uugaucgccuuucccaggu

SEQ ID NO: 2516831 - RNA, 19 nt, Human
uugaucugcucagcccugg

SEQ ID NO: 2516832 - RNA, 18 nt, Human
uugaucugcucagcccug

SEQ ID NO: 2516833 - RNA, 17 nt, Human
uugaucugcucagcccu

SEQ ID NO: 2516834 - RNA, 17 nt, Human
uugauccagaaagaaaa

SEQ ID NO: 2516835 - RNA, 18 nt, Human
uugaucauuuucccccca

SEQ ID NO: 2516836 - RNA, 19 nt, Human
uugaucauuuuccccccac

SEQ ID NO: 2516837 - RNA, 22 nt, Human
uugaucauuuuccccccacucu

SEQ ID NO: 2516838 - RNA, 21 nt, Human
uugauucagacagcugccugg

SEQ ID NO: 2516839 - RNA, 17 nt, Human
uugauucagacagcugc

SEQ ID NO: 2516840 - RNA, 23 nt, Human
uugauucagacagcugccuggga

SEQ ID NO: 2516841 - RNA, 16 nt, Human
uugauucagcucugca

SEQ ID NO: 2516842 - RNA, 20 nt, Human
uugauaugccuuuucccaac

SEQ ID NO: 2516843 - RNA, 19 nt, Human
uugaggccugcccucaggg

SEQ ID NO: 2516844 - RNA, 14 nt, Human
uugaggcugcagcg

SEQ ID NO: 2516845 - RNA, 13 nt, Human
uugauaugaaaaa

SEQ ID NO: 2516846 - RNA, 16 nt, Human
uugauaugcuuauaca

SEQ ID NO: 2516847 - RNA, 16 nt, Human
uugauaugaaaaauau

SEQ ID NO: 2516848 - RNA, 21 nt, Human
uugauaugaaaaauaugauau

SEQ ID NO: 2516849 - RNA, 17 nt, Human
uugaucaaauucauuuu

SEQ ID NO: 2516850 - RNA, 17 nt, Human
uugaucaacaucuuuuc

SEQ ID NO: 2516851 - RNA, 22 nt, Human
uugaucaacaucuuuucuugcc

SEQ ID NO: 2516852 - RNA, 18 nt, Human
uugaucaacaucuuuucu

SEQ ID NO: 2516853 - RNA, 18 nt, Human
uugaucagaucugacaug

SEQ ID NO: 2516854 - RNA, 14 nt, Human
uugaucaguauaau

SEQ ID NO: 2516855 - RNA, 22 nt, Human
uugauaugaaaaauaugauauu

SEQ ID NO: 2516856 - RNA, 22 nt, Human
uugauauuuucaacgcagcccu

SEQ ID NO: 2516857 - RNA, 22 nt, Human
uugaggauauauuuucacuuug

SEQ ID NO: 2516858 - RNA, 21 nt, Human
uugaggauauauuuucacuuu

SEQ ID NO: 2516859 - RNA, 13 nt, Human
uugaggaguguga

SEQ ID NO: 2516860 - RNA, 18 nt, Human
uugaggauauauuuucac

SEQ ID NO: 2516861 - RNA, 16 nt, Human
uugaggauuuugagua

SEQ ID NO: 2516862 - RNA, 15 nt, Human
uugaggauuuugagu

SEQ ID NO: 2516863 - RNA, 17 nt, Human
uugaggauuuugaguau

SEQ ID NO: 2516864 - RNA, 13 nt, Human
uugaggccaggag

SEQ ID NO: 2516865 - RNA, 19 nt, Human
uugaggaggggcagguaaa

SEQ ID NO: 2516866 - RNA, 16 nt, Human
uugaggagccccagcu

SEQ ID NO: 2516867 - RNA, 19 nt, Human
uugaggagcagcuucaguu

SEQ ID NO: 2516868 - RNA, 12 nt, Human
uugaggagcccc

SEQ ID NO: 2516869 - RNA, 17 nt, Human
uugaggacuauggaaau

SEQ ID NO: 2516870 - RNA, 22 nt, Human
uugagcugaaaugcugcauuuu

SEQ ID NO: 2516871 - RNA, 14 nt, Human
uugagcugaaaugc

SEQ ID NO: 2516872 - RNA, 14 nt, Human
uugagcugagaugg

SEQ ID NO: 2516873 - RNA, 19 nt, Human
uugagccuugaacuuugac

SEQ ID NO: 2516874 - RNA, 18 nt, Human
uugaauuguaacuguucu

SEQ ID NO: 2516875 - RNA, 15 nt, Human
uugagcuauugcugu

SEQ ID NO: 2516876 - RNA, 13 nt, Human
uugagcucagccc

SEQ ID NO: 2516877 - RNA, 19 nt, Human
uugagcucugcagcccagg

SEQ ID NO: 2516878 - RNA, 18 nt, Human
uugagcucucucauuguc

SEQ ID NO: 2516879 - RNA, 23 nt, Human
uugagcucagacccccacucuca

SEQ ID NO: 2516880 - RNA, 15 nt, Human
uugagccuugaacuu

SEQ ID NO: 2516881 - RNA, 16 nt, Human
uugagccuugaacuuu

SEQ ID NO: 2516882 - RNA, 14 nt, Human
uugagccuugaacu

SEQ ID NO: 2516883 - RNA, 14 nt, Human
uugagccugggagg

SEQ ID NO: 2516884 - RNA, 13 nt, Human
uugaauuaucuug

SEQ ID NO: 2516885 - RNA, 18 nt, Human
uugaauuaucuugguuga

SEQ ID NO: 2516886 - RNA, 20 nt, Human
uugaauuaucuugguugaaa

SEQ ID NO: 2516887 - RNA, 22 nt, Human
uugaauuaucuugguugaaaau

SEQ ID NO: 2516888 - RNA, 21 nt, Human
uugaauucuugguugaggaaa

SEQ ID NO: 2516889 - RNA, 15 nt, Human
uugaauuguaacugu

SEQ ID NO: 2516890 - RNA, 20 nt, Human
uugaauugaggggauuaaua

SEQ ID NO: 2516891 - RNA, 23 nt, Human
uugaauguuauuuguuauuuuca

SEQ ID NO: 2516892 - RNA, 20 nt, Human
uugaauguuaaauaaauugu

SEQ ID NO: 2516893 - RNA, 17 nt, Human
uugaauuaaauuaggaa

SEQ ID NO: 2516894 - RNA, 22 nt, Human
uugaauuaaauuaggaauaaau

SEQ ID NO: 2516895 - RNA, 23 nt, Human
uugaauuaauaucccuacaugua

SEQ ID NO: 2516896 - RNA, 23 nt, Human
uugaauuaaauuaggaauaaaua

SEQ ID NO: 2516897 - RNA, 23 nt, Human
uugaauuagaaacauaaauaaaa

SEQ ID NO: 2516898 - RNA, 14 nt, Human
uugaauuagaaaca

SEQ ID NO: 2516899 - RNA, 17 nt, Human
uucuguggaaaguguaa

SEQ ID NO: 2516900 - RNA, 16 nt, Human
uucuguggaaagugua

SEQ ID NO: 2516901 - RNA, 15 nt, Human
uucuguggaaagugu

SEQ ID NO: 2516902 - RNA, 13 nt, Human
uucuguggaaagu

SEQ ID NO: 2516903 - RNA, 19 nt, Human
uucuguggaaaguguaaag

SEQ ID NO: 2516904 - RNA, 18 nt, Human
uucuguggaaaguguaaa

SEQ ID NO: 2516905 - RNA, 20 nt, Human
uucuguggaaaguguaaagc

SEQ ID NO: 2516906 - RNA, 15 nt, Human
uucugugccugaaua

SEQ ID NO: 2516907 - RNA, 16 nt, Human
uucugugccugaauau

SEQ ID NO: 2516908 - RNA, 17 nt, Human
uucugugccugaauauu

SEQ ID NO: 2516909 - RNA, 13 nt, Human
uucugugccugaa

SEQ ID NO: 2516910 - RNA, 19 nt, Human
uucugugagacccccacac

SEQ ID NO: 2516911 - RNA, 14 nt, Human
uucugucuuuagau

SEQ ID NO: 2516912 - RNA, 21 nt, Human
uucuguauacaacccuggcau

SEQ ID NO: 2516913 - RNA, 13 nt, Human
uucuguauacaac

SEQ ID NO: 2516914 - RNA, 24 nt, Human
uucuguauacaacccuggcauuau

SEQ ID NO: 2516915 - RNA, 23 nt, Human
uucuguauacaacccuggcauua

SEQ ID NO: 2516916 - RNA, 15 nt, Human
uucuguauauacuuu

SEQ ID NO: 2516917 - RNA, 16 nt, Human
uucuguauauacuuuu

SEQ ID NO: 2516918 - RNA, 17 nt, Human
uucuguauauacuuuuu

SEQ ID NO: 2516919 - RNA, 24 nt, Human
uucuaaguaaaaccacagcaguug

SEQ ID NO: 2516920 - RNA, 17 nt, Human
uucuaagucuuuccauu

SEQ ID NO: 2516921 - RNA, 12 nt, Human
uucuaagucuuu

SEQ ID NO: 2516922 - RNA, 15 nt, Human
uucuaagucuuucca

SEQ ID NO: 2516923 - RNA, 20 nt, Human
uucuggcagaguugaagaca

SEQ ID NO: 2516924 - RNA, 15 nt, Human
uucuggcagaggagg

SEQ ID NO: 2516925 - RNA, 16 nt, Human
uucuggcuaugcauuu

SEQ ID NO: 2516926 - RNA, 15 nt, Human
uucuggccucccaca

SEQ ID NO: 2516927 - RNA, 14 nt, Human
uucuggccucccac

SEQ ID NO: 2516928 - RNA, 17 nt, Human
uucuucagaagacacug

SEQ ID NO: 2516929 - RNA, 17 nt, Human
uucuucagaucagugcu

SEQ ID NO: 2516930 - RNA, 23 nt, Human
uucuucagccaccucucuuuuuc

SEQ ID NO: 2516931 - RNA, 21 nt, Human
uucuucauaacaauuuuagga

SEQ ID NO: 2516932 - RNA, 18 nt, Human
uucuucauaacaauuuua

SEQ ID NO: 2516933 - RNA, 14 nt, Human
uucuucagccaccu

SEQ ID NO: 2516934 - RNA, 19 nt, Human
uucuuguauuaagaaugaa

SEQ ID NO: 2516935 - RNA, 18 nt, Human
uucuuguauuaagaauga

SEQ ID NO: 2516936 - RNA, 20 nt, Human
uucuucauucaauacaagug

SEQ ID NO: 2516937 - RNA, 21 nt, Human
uucuucauccggcagccugga

SEQ ID NO: 2516938 - RNA, 14 nt, Human
uucuucaugcaaug

SEQ ID NO: 2516939 - RNA, 15 nt, Human
uucuucaugcaauga

SEQ ID NO: 2516940 - RNA, 17 nt, Human
uucuucaugcaaugaca

SEQ ID NO: 2516941 - RNA, 18 nt, Human
uucuucaugcaaugacau

SEQ ID NO: 2516942 - RNA, 22 nt, Human
uucuugugccauagucacaugg

SEQ ID NO: 2516943 - RNA, 22 nt, Human
uucuugugacagauuauacaga

SEQ ID NO: 2516944 - RNA, 14 nt, Human
uucuuuaacuuaau

SEQ ID NO: 2516945 - RNA, 19 nt, Human
uucuugucugauuggcuca

SEQ ID NO: 2516946 - RNA, 14 nt, Human
uucuugucaaaaaa

SEQ ID NO: 2516947 - RNA, 13 nt, Human
uucuugucaaaaa

SEQ ID NO: 2516948 - RNA, 13 nt, Human
uucuucagagacu

SEQ ID NO: 2516949 - RNA, 15 nt, Human
uucuuaucuucugca

SEQ ID NO: 2516950 - RNA, 19 nt, Human
uucuuauucucacuccacc

SEQ ID NO: 2516951 - RNA, 17 nt, Human
uucuuauguugcccagu

SEQ ID NO: 2516952 - RNA, 23 nt, Human
uucuuaugccauguuaauuucau

SEQ ID NO: 2516953 - RNA, 15 nt, Human
uucuuauggaauuga

SEQ ID NO: 2516954 - RNA, 17 nt, Human
uucuuauggaauugauu

SEQ ID NO: 2516955 - RNA, 18 nt, Human
uucuuauggaauugauuu

SEQ ID NO: 2516956 - RNA, 22 nt, Human
uucuuauggaauugauuugcau

SEQ ID NO: 2516957 - RNA, 21 nt, Human
uucuuauguaugugaaaguua

SEQ ID NO: 2516958 - RNA, 19 nt, Human
uucuuaggguuaugauuaa

SEQ ID NO: 2516959 - RNA, 17 nt, Human
uucuuagggaaggauac

SEQ ID NO: 2516960 - RNA, 20 nt, Human
uucuuagcuuuuuaauuguu

SEQ ID NO: 2516961 - RNA, 19 nt, Human
uucuuagcuuuuuaauugu

SEQ ID NO: 2516962 - RNA, 13 nt, Human
uucuuagugacuu

SEQ ID NO: 2516963 - RNA, 15 nt, Human
uucuuagcuuuuuaa

SEQ ID NO: 2516964 - RNA, 23 nt, Human
uucuuagcucuuaauuguucauu

SEQ ID NO: 2516965 - RNA, 13 nt, Human
uucuuagugucac

SEQ ID NO: 2516966 - RNA, 15 nt, Human
uucuuaguagauuuu

SEQ ID NO: 2516967 - RNA, 16 nt, Human
uucuuaucuucugcaa

SEQ ID NO: 2516968 - RNA, 16 nt, Human
uucuuauauaugugaa

SEQ ID NO: 2516969 - RNA, 17 nt, Human
uugaauguuaagcagau

SEQ ID NO: 2516970 - RNA, 14 nt, Human
uugaauguuaagca

SEQ ID NO: 2516971 - RNA, 18 nt, Human
uugaauguuaaauaaauu

SEQ ID NO: 2516972 - RNA, 15 nt, Human
uugaauguuaaauaa

SEQ ID NO: 2516973 - RNA, 13 nt, Human
uugaauguuaaau

SEQ ID NO: 2516974 - RNA, 19 nt, Human
uugaauguggcuugagaaa

SEQ ID NO: 2516975 - RNA, 21 nt, Human
uugaauguggcuugagaaaua

SEQ ID NO: 2516976 - RNA, 22 nt, Human
uugaauguggcuugagaaauau

SEQ ID NO: 2516977 - RNA, 17 nt, Human
uugaaugucuuuugaau

SEQ ID NO: 2516978 - RNA, 23 nt, Human
uugaaugagaugauucagaaggg

SEQ ID NO: 2516979 - RNA, 22 nt, Human
uugaaugagaugauucagaagg

SEQ ID NO: 2516980 - RNA, 21 nt, Human
uugaaugacaacagaagcuuc

SEQ ID NO: 2516981 - RNA, 20 nt, Human
uugaaugacaacagaagcuu

SEQ ID NO: 2516982 - RNA, 20 nt, Human
uugaaugagaugauucagaa

SEQ ID NO: 2516983 - RNA, 16 nt, Human
uugaaugaugccauga

SEQ ID NO: 2516984 - RNA, 12 nt, Human
uugaaugaugcc

SEQ ID NO: 2516985 - RNA, 13 nt, Human
uugaagcauuuua

SEQ ID NO: 2516986 - RNA, 14 nt, Human
uugaagcauuuuau

SEQ ID NO: 2516987 - RNA, 15 nt, Human
uugaagcauuuuaua

SEQ ID NO: 2516988 - RNA, 17 nt, Human
uugaagcauuuuauaaa

SEQ ID NO: 2516989 - RNA, 22 nt, Human
uugaagcauuuuauaaaucgcu

SEQ ID NO: 2516990 - RNA, 20 nt, Human
uugaaugaaaaauuuaagca

SEQ ID NO: 2516991 - RNA, 21 nt, Human
uugaaugaaaaauuuaagcau

SEQ ID NO: 2516992 - RNA, 18 nt, Human
uugaaugacaacagaagc

SEQ ID NO: 2516993 - RNA, 17 nt, Human
uugaaugacaacagaag

SEQ ID NO: 2516994 - RNA, 22 nt, Human
uugaaugaaaaauuuaagcauu

SEQ ID NO: 2516995 - RNA, 23 nt, Human
uugaaugaaaaauuuaagcauug

SEQ ID NO: 2516996 - RNA, 22 nt, Human
uugaagaggaaaaugaauaaua

SEQ ID NO: 2516997 - RNA, 21 nt, Human
uugaagaggaaaaugaauaau

SEQ ID NO: 2516998 - RNA, 13 nt, Human
uugaagaggaaaa

SEQ ID NO: 2516999 - RNA, 20 nt, Human
uugaacuuugaccucugcag

SEQ ID NO: 2517000 - RNA, 17 nt, Human
uugaacuuugaccucug

SEQ ID NO: 2517001 - RNA, 18 nt, Human
uugaacuuugaccucugc

SEQ ID NO: 2517002 - RNA, 15 nt, Human
uugaagcaguugugu

SEQ ID NO: 2517003 - RNA, 18 nt, Human
uugaagcacguacauuuu

SEQ ID NO: 2517004 - RNA, 14 nt, Human
uugaagcacguaca

SEQ ID NO: 2517005 - RNA, 20 nt, Human
uugaagaucguuaguaucua

SEQ ID NO: 2517006 - RNA, 18 nt, Human
uugaagaugcugaaacag

SEQ ID NO: 2517007 - RNA, 15 nt, Human
uugaagaggugagca

SEQ ID NO: 2517008 - RNA, 22 nt, Human
uugaagauaucuugaaaugaaa

SEQ ID NO: 2517009 - RNA, 21 nt, Human
uucuuuaagaauuacagguug

SEQ ID NO: 2517010 - RNA, 12 nt, Human
uucuuuaaugcu

SEQ ID NO: 2517011 - RNA, 18 nt, Human
uucuuuaaugcuuuuaua

SEQ ID NO: 2517012 - RNA, 18 nt, Human
uucuuuccacagaagcuc

SEQ ID NO: 2517013 - RNA, 14 nt, Human
uucuuuaccugaga

SEQ ID NO: 2517014 - RNA, 21 nt, Human
uugaaaaucuuauaauuuaaa

SEQ ID NO: 2517015 - RNA, 21 nt, Human
uucuuuccugaggcugggcuc

SEQ ID NO: 2517016 - RNA, 20 nt, Human
uucuuuccauuaugauucuu

SEQ ID NO: 2517017 - RNA, 12 nt, Human
uucuuuccagag

SEQ ID NO: 2517018 - RNA, 20 nt, Human
uucuuuaccugagaccaguu

SEQ ID NO: 2517019 - RNA, 14 nt, Human
uucuuuccauuaug

SEQ ID NO: 2517020 - RNA, 17 nt, Human
uucuuuccauuaugauu

SEQ ID NO: 2517021 - RNA, 15 nt, Human
uugaacuuugaccuc

SEQ ID NO: 2517022 - RNA, 23 nt, Human
uugaaacaauacucauaauguga

SEQ ID NO: 2517023 - RNA, 15 nt, Human
uugaaacaauacuca

SEQ ID NO: 2517024 - RNA, 16 nt, Human
uugaaacaaagaaggu

SEQ ID NO: 2517025 - RNA, 13 nt, Human
uugaaacagaacc

SEQ ID NO: 2517026 - RNA, 19 nt, Human
uugaaaccaccuuuuauua

SEQ ID NO: 2517027 - RNA, 21 nt, Human
uugaaaauucaaaaaguguuu

SEQ ID NO: 2517028 - RNA, 20 nt, Human
uugaaaauucaaaaaguguu

SEQ ID NO: 2517029 - RNA, 18 nt, Human
uugaaaauucaaaaagug

SEQ ID NO: 2517030 - RNA, 22 nt, Human
uugaaaauuauuuuaaacaaaa

SEQ ID NO: 2517031 - RNA, 20 nt, Human
uugaaaauuauuuuaaacaa

SEQ ID NO: 2517032 - RNA, 19 nt, Human
uugaaaauuauuuuaaaca

SEQ ID NO: 2517033 - RNA, 15 nt, Human
uugaaaauuauuuua

SEQ ID NO: 2517034 - RNA, 18 nt, Human
uugaaaauuaacaugaau

SEQ ID NO: 2517035 - RNA, 21 nt, Human
uugaaaauaagaauagaaaua

SEQ ID NO: 2517036 - RNA, 13 nt, Human
uucuuuccugccu

SEQ ID NO: 2517037 - RNA, 22 nt, Human
uucuuuccucuuccccuugccc

SEQ ID NO: 2517038 - RNA, 21 nt, Human
uucuuucccugcuuaaugaaa

SEQ ID NO: 2517039 - RNA, 18 nt, Human
uugccuuuugcaaacuuu

SEQ ID NO: 2517040 - RNA, 17 nt, Human
uugcgaaugguuccauu

SEQ ID NO: 2517041 - RNA, 13 nt, Human
uugccuuuugcaa

SEQ ID NO: 2517042 - RNA, 18 nt, Human
uugccuuuucuagcccga

SEQ ID NO: 2517043 - RNA, 17 nt, Human
uugccuuuguuuugaug

SEQ ID NO: 2517044 - RNA, 13 nt, Human
uugccuuucucga

SEQ ID NO: 2517045 - RNA, 23 nt, Human
uugccuuuagugaucacagcagc

SEQ ID NO: 2517046 - RNA, 11 nt, Human
uugccuuucuc

SEQ ID NO: 2517047 - RNA, 22 nt, Human
uugccuuuagugaucacagcag

SEQ ID NO: 2517048 - RNA, 21 nt, Human
uugccuugaaccacuucccuc

SEQ ID NO: 2517049 - RNA, 20 nt, Human
uugccuugggcugcuccuca

SEQ ID NO: 2517050 - RNA, 19 nt, Human
uugccuucuucacccagcu

SEQ ID NO: 2517051 - RNA, 17 nt, Human
uugccuucuacuuuuaa

SEQ ID NO: 2517052 - RNA, 18 nt, Human
uugccuugaaccacuucc

SEQ ID NO: 2517053 - RNA, 21 nt, Human
uugccuuccacgcugucucca

SEQ ID NO: 2517054 - RNA, 16 nt, Human
uugccuuaaagaaagu

SEQ ID NO: 2517055 - RNA, 23 nt, Human
uugccuguucaguuacagaaagu

SEQ ID NO: 2517056 - RNA, 14 nt, Human
uugccuucaacuaa

SEQ ID NO: 2517057 - RNA, 17 nt, Human
uugccuuauuaaaguuc

SEQ ID NO: 2517058 - RNA, 16 nt, Human
uugccuuaacuggagc

SEQ ID NO: 2517059 - RNA, 22 nt, Human
uugccuguucaguuacagaaag

SEQ ID NO: 2517060 - RNA, 20 nt, Human
uugccuguucaguuacagaa

SEQ ID NO: 2517061 - RNA, 16 nt, Human
uugccuguucaguuac

SEQ ID NO: 2517062 - RNA, 13 nt, Human
uugccuguucagu

SEQ ID NO: 2517063 - RNA, 12 nt, Human
uugccugugcca

SEQ ID NO: 2517064 - RNA, 22 nt, Human
uugccaugggcuucacuguaua

SEQ ID NO: 2517065 - RNA, 21 nt, Human
uugccaugggcuucacuguau

SEQ ID NO: 2517066 - RNA, 20 nt, Human
uugccaugggcuucacugua

SEQ ID NO: 2517067 - RNA, 19 nt, Human
uugcccaacaccagccccu

SEQ ID NO: 2517068 - RNA, 18 nt, Human
uugcccaacaccagcccc

SEQ ID NO: 2517069 - RNA, 13 nt, Human
uugcccaacacca

SEQ ID NO: 2517070 - RNA, 21 nt, Human
uugcccaacaccagccccugc

SEQ ID NO: 2517071 - RNA, 20 nt, Human
uugcccaacaccagccccug

SEQ ID NO: 2517072 - RNA, 18 nt, Human
uugcccacaccgagggcg

SEQ ID NO: 2517073 - RNA, 21 nt, Human
uugccauguuggccaggcugg

SEQ ID NO: 2517074 - RNA, 20 nt, Human
uugccauguuggccaggcug

SEQ ID NO: 2517075 - RNA, 13 nt, Human
uugcgcuguugcg

SEQ ID NO: 2517076 - RNA, 16 nt, Human
uugcuaagcauuccaa

SEQ ID NO: 2517077 - RNA, 18 nt, Human
uugcuaagcauuccaacu

SEQ ID NO: 2517078 - RNA, 16 nt, Human
uugcuaagaugcucua

SEQ ID NO: 2517079 - RNA, 14 nt, Human
uugcuaagaugcuc

SEQ ID NO: 2517080 - RNA, 13 nt, Human
uugcuaagaugcu

SEQ ID NO: 2517081 - RNA, 20 nt, Human
uugcuaagaugcucuaucuu

SEQ ID NO: 2517082 - RNA, 21 nt, Human
uugcuaagccccagcaagcaa

SEQ ID NO: 2517083 - RNA, 14 nt, Human
uugcugcuugaggc

SEQ ID NO: 2517084 - RNA, 16 nt, Human
uugcugcuugaggcaa

SEQ ID NO: 2517085 - RNA, 13 nt, Human
uugcugcugaagg

SEQ ID NO: 2517086 - RNA, 23 nt, Human
uugcuggacggggacuggggaug

SEQ ID NO: 2517087 - RNA, 21 nt, Human
uugcuggacggggacugggga

SEQ ID NO: 2517088 - RNA, 23 nt, Human
uugcuggacugucauagaaauua

SEQ ID NO: 2517089 - RNA, 21 nt, Human
uugcuggaauaaguucaaauu

SEQ ID NO: 2517090 - RNA, 18 nt, Human
uugcugcuuuuccuuggg

SEQ ID NO: 2517091 - RNA, 23 nt, Human
uugcugcuuuuccuuggggcagg

SEQ ID NO: 2517092 - RNA, 16 nt, Human
uugcugucccuuuucc

SEQ ID NO: 2517093 - RNA, 22 nt, Human
uugcugggagcugaaaaaucac

SEQ ID NO: 2517094 - RNA, 21 nt, Human
uugcugggagcugaaaaauca

SEQ ID NO: 2517095 - RNA, 15 nt, Human
uugcugggagcugaa

SEQ ID NO: 2517096 - RNA, 12 nt, Human
uugcuggcugga

SEQ ID NO: 2517097 - RNA, 16 nt, Human
uugcuggcaaagacag

SEQ ID NO: 2517098 - RNA, 18 nt, Human
uugcugucccuuuuccuu

SEQ ID NO: 2517099 - RNA, 12 nt, Human
uugcugggcuuu

SEQ ID NO: 2517100 - RNA, 20 nt, Human
uugcugggcaguuuuucugu

SEQ ID NO: 2517101 - RNA, 21 nt, Human
uugcugucauaagaaugaaua

SEQ ID NO: 2517102 - RNA, 15 nt, Human
uugcuguccuaggcc

SEQ ID NO: 2517103 - RNA, 19 nt, Human
uugcugugaggcuguccug

SEQ ID NO: 2517104 - RNA, 18 nt, Human
uugcugugaggcuguccu

SEQ ID NO: 2517105 - RNA, 17 nt, Human
uugcugugaggcugucc

SEQ ID NO: 2517106 - RNA, 15 nt, Human
uugcugugaggcugu

SEQ ID NO: 2517107 - RNA, 14 nt, Human
uugcugugaggcug

SEQ ID NO: 2517108 - RNA, 20 nt, Human
uugcugugagcaagaaguca

SEQ ID NO: 2517109 - RNA, 20 nt, Human
uugcugugaauuagcucacu

SEQ ID NO: 2517110 - RNA, 23 nt, Human
uugcuggggacggggggccccag

SEQ ID NO: 2517111 - RNA, 11 nt, Human
uugcuguccua

SEQ ID NO: 2517112 - RNA, 23 nt, Human
uuggaauauuguccauuguccaa

SEQ ID NO: 2517113 - RNA, 13 nt, Human
uuggaauacuuuu

SEQ ID NO: 2517114 - RNA, 17 nt, Human
uuggaauuaaccuggug

SEQ ID NO: 2517115 - RNA, 22 nt, Human
uuggaauuuguaaccucagcuc

SEQ ID NO: 2517116 - RNA, 21 nt, Human
uuggaauuuguaaccucagcu

SEQ ID NO: 2517117 - RNA, 19 nt, Human
uuggaauuuguaaccucag

SEQ ID NO: 2517118 - RNA, 19 nt, Human
uuggaauuaaccuggugcu

SEQ ID NO: 2517119 - RNA, 20 nt, Human
uuggaauuaaccuggugcug

SEQ ID NO: 2517120 - RNA, 17 nt, Human
uuggaaugggcagcuca

SEQ ID NO: 2517121 - RNA, 16 nt, Human
uuggaaugcuucuucu

SEQ ID NO: 2517122 - RNA, 18 nt, Human
uuggaaugggcagcucau

SEQ ID NO: 2517123 - RNA, 18 nt, Human
uuggaauuaaccuggugc

SEQ ID NO: 2517124 - RNA, 16 nt, Human
uuggacagaagcagcu

SEQ ID NO: 2517125 - RNA, 19 nt, Human
uuggacagaagcagcucuu

SEQ ID NO: 2517126 - RNA, 14 nt, Human
uuggacauccuccu

SEQ ID NO: 2517127 - RNA, 16 nt, Human
uuggacaacugcaugg

SEQ ID NO: 2517128 - RNA, 15 nt, Human
uuggacacuguacaa

SEQ ID NO: 2517129 - RNA, 23 nt, Human
uuggacaaucaugaaauaugcau

SEQ ID NO: 2517130 - RNA, 13 nt, Human
uugcugugggaac

SEQ ID NO: 2517131 - RNA, 12 nt, Human
uugcugugggaa

SEQ ID NO: 2517132 - RNA, 19 nt, Human
uugcugugccucccaaaau

SEQ ID NO: 2517133 - RNA, 16 nt, Human
uugcugugccucccaa

SEQ ID NO: 2517134 - RNA, 20 nt, Human
uugcugugaggcuguccugu

SEQ ID NO: 2517135 - RNA, 14 nt, Human
uugcugugccuccc

SEQ ID NO: 2517136 - RNA, 20 nt, Human
uugcuguugauuucuuucca

SEQ ID NO: 2517137 - RNA, 21 nt, Human
uugcuguugaugaggccucuu

SEQ ID NO: 2517138 - RNA, 23 nt, Human
uugcugugggaacgagaggggaa

SEQ ID NO: 2517139 - RNA, 15 nt, Human
uugcugugggaacga

SEQ ID NO: 2517140 - RNA, 20 nt, Human
uugcugugucauaccaggcc

SEQ ID NO: 2517141 - RNA, 19 nt, Human
uugcuguugucccucugcu

SEQ ID NO: 2517142 - RNA, 13 nt, Human
uugcuguuuccuu

SEQ ID NO: 2517143 - RNA, 19 nt, Human
uugcuguuguuucuaaaca

SEQ ID NO: 2517144 - RNA, 20 nt, Human
uuggaagaccccacccaagc

SEQ ID NO: 2517145 - RNA, 15 nt, Human
uugcuguuuccuuuu

SEQ ID NO: 2517146 - RNA, 13 nt, Human
uuggaagagaaag

SEQ ID NO: 2517147 - RNA, 21 nt, Human
uuggaagcuagcuccccuccu

SEQ ID NO: 2517148 - RNA, 23 nt, Human
uuggaagcuagcuccccuccucu

SEQ ID NO: 2517149 - RNA, 22 nt, Human
uuggaagcuagcuccccuccuc

SEQ ID NO: 2517150 - RNA, 17 nt, Human
uuggaagcucugaaguc

SEQ ID NO: 2517151 - RNA, 19 nt, Human
uuggaagcuccgcuuucua

SEQ ID NO: 2517152 - RNA, 21 nt, Human
uuggacccugaggcccagagg

SEQ ID NO: 2517153 - RNA, 19 nt, Human
uuggacccugaggcccaga

SEQ ID NO: 2517154 - RNA, 18 nt, Human
uuggacccugaggcccag

SEQ ID NO: 2517155 - RNA, 15 nt, Human
uuggacccugaggcc

SEQ ID NO: 2517156 - RNA, 14 nt, Human
uuggauuugacauu

SEQ ID NO: 2517157 - RNA, 22 nt, Human
uuggauuugacauugcguuuga

SEQ ID NO: 2517158 - RNA, 18 nt, Human
uuggauuuguuuaaaagg

SEQ ID NO: 2517159 - RNA, 14 nt, Human
uuggauuuguuuaa

SEQ ID NO: 2517160 - RNA, 15 nt, Human
uuggauuguccccga

SEQ ID NO: 2517161 - RNA, 20 nt, Human
uuggcaauaguuugcauaga

SEQ ID NO: 2517162 - RNA, 16 nt, Human
uuggcaauaguuugca

SEQ ID NO: 2517163 - RNA, 17 nt, Human
uuggcaaugccaucauc

SEQ ID NO: 2517164 - RNA, 15 nt, Human
uuggcacagaaacac

SEQ ID NO: 2517165 - RNA, 16 nt, Human
uuggcacagaaacaca

SEQ ID NO: 2517166 - RNA, 21 nt, Human
uuggcaccagacacccaggac

SEQ ID NO: 2517167 - RNA, 23 nt, Human
uuggcaccagacacccaggacuu

SEQ ID NO: 2517168 - RNA, 19 nt, Human
uuggcaccuaauccaggca

SEQ ID NO: 2517169 - RNA, 17 nt, Human
uuggcaccagacaccca

SEQ ID NO: 2517170 - RNA, 20 nt, Human
uuggcaccagacacccagga

SEQ ID NO: 2517171 - RNA, 13 nt, Human
uuggcaccagaca

SEQ ID NO: 2517172 - RNA, 23 nt, Human
uuggcacagaaacacaauauuuu

SEQ ID NO: 2517173 - RNA, 15 nt, Human
uuggcagcaccuguc

SEQ ID NO: 2517174 - RNA, 12 nt, Human
uuggcagcagau

SEQ ID NO: 2517175 - RNA, 23 nt, Human
uuggcacucacagaccuggagcc

SEQ ID NO: 2517176 - RNA, 21 nt, Human
uuggcaccuaauccaggcaga

SEQ ID NO: 2517177 - RNA, 22 nt, Human
uuggcacucacagaccuggagc

SEQ ID NO: 2517178 - RNA, 14 nt, Human
uuggcacucacaga

SEQ ID NO: 2517179 - RNA, 22 nt, Human
uuggcacugagauauuuauugu

SEQ ID NO: 2517180 - RNA, 12 nt, Human
uuggcaggcugg

SEQ ID NO: 2517181 - RNA, 16 nt, Human
uuggcagcucuacucu

SEQ ID NO: 2517182 - RNA, 21 nt, Human
uuggcagcaggugcugcuacc

SEQ ID NO: 2517183 - RNA, 18 nt, Human
uuggcagcaggugcugcu

SEQ ID NO: 2517184 - RNA, 12 nt, Human
uuggcagcaggu

SEQ ID NO: 2517185 - RNA, 14 nt, Human
uuggcagcagauuu

SEQ ID NO: 2517186 - RNA, 22 nt, Human
uuggcagcaggugcugcuaccc

SEQ ID NO: 2517187 - RNA, 18 nt, Human
uuguaugauguguuguga

SEQ ID NO: 2517188 - RNA, 16 nt, Human
uuguaugauguguugu

SEQ ID NO: 2517189 - RNA, 14 nt, Human
uuguaugauguguu

SEQ ID NO: 2517190 - RNA, 13 nt, Human
uuguaugaugugu

SEQ ID NO: 2517191 - RNA, 21 nt, Human
uuguaugauguguugugauag

SEQ ID NO: 2517192 - RNA, 20 nt, Human
uuguaugauguguugugaua

SEQ ID NO: 2517193 - RNA, 20 nt, Human
uuguaugccuuuaaaucugu

SEQ ID NO: 2517194 - RNA, 20 nt, Human
uuguaugauccuaaugaaug

SEQ ID NO: 2517195 - RNA, 22 nt, Human
uuguaugaaagauggcugugcc

SEQ ID NO: 2517196 - RNA, 23 nt, Human
uuguauuuuccaagugugcauau

SEQ ID NO: 2517197 - RNA, 12 nt, Human
uuguauuuucca

SEQ ID NO: 2517198 - RNA, 12 nt, Human
uuguaugccuuu

SEQ ID NO: 2517199 - RNA, 14 nt, Human
uuguauuuuuaaug

SEQ ID NO: 2517200 - RNA, 21 nt, Human
uuguauuuuccaagugugcau

SEQ ID NO: 2517201 - RNA, 15 nt, Human
uuguauuuuuaaugg

SEQ ID NO: 2517202 - RNA, 21 nt, Human
uuguauuuuuuugcaagugaa

SEQ ID NO: 2517203 - RNA, 20 nt, Human
uuguauuuuuuugcaaguga

SEQ ID NO: 2517204 - RNA, 13 nt, Human
uugucaaagagag

SEQ ID NO: 2517205 - RNA, 22 nt, Human
uuguauuuuuuugcaagugaag

SEQ ID NO: 2517206 - RNA, 22 nt, Human
uugucaaacuguagaaaugaug

SEQ ID NO: 2517207 - RNA, 22 nt, Human
uugucaaaguggugagaggcau

SEQ ID NO: 2517208 - RNA, 14 nt, Human
uugucuaugggacu

SEQ ID NO: 2517209 - RNA, 18 nt, Human
uugucuauuuuugucuua

SEQ ID NO: 2517210 - RNA, 18 nt, Human
uugucucccuggcccuca

SEQ ID NO: 2517211 - RNA, 17 nt, Human
uugucuauuuuugucuu

SEQ ID NO: 2517212 - RNA, 16 nt, Human
uugucuauuuuugucu

SEQ ID NO: 2517213 - RNA, 15 nt, Human
uugucuauucuccag

SEQ ID NO: 2517214 - RNA, 19 nt, Human
uugucucccuggcccucaa

SEQ ID NO: 2517215 - RNA, 19 nt, Human
uugucucuaugccagcuca

SEQ ID NO: 2517216 - RNA, 18 nt, Human
uugucuauuaccuguuag

SEQ ID NO: 2517217 - RNA, 20 nt, Human
uugucuaugggacucaaugc

SEQ ID NO: 2517218 - RNA, 22 nt, Human
uugucuuaaaaaguggaaaaau

SEQ ID NO: 2517219 - RNA, 18 nt, Human
uugucugaagucacugca

SEQ ID NO: 2517220 - RNA, 17 nt, Human
uugucugaagucacugc

SEQ ID NO: 2517221 - RNA, 12 nt, Human
uugucucugggc

SEQ ID NO: 2517222 - RNA, 16 nt, Human
uuguaccgcaauguga

SEQ ID NO: 2517223 - RNA, 20 nt, Human
uuguaccccccaaccccuga

SEQ ID NO: 2517224 - RNA, 23 nt, Human
uuguacauuuaugauuuaauaaa

SEQ ID NO: 2517225 - RNA, 15 nt, Human
uuguaccccccaacc

SEQ ID NO: 2517226 - RNA, 13 nt, Human
uuguaccugguga

SEQ ID NO: 2517227 - RNA, 11 nt, Human
uuguaccucuc

SEQ ID NO: 2517228 - RNA, 22 nt, Human
uuguaaacucaaaauauuugua

SEQ ID NO: 2517229 - RNA, 16 nt, Human
uuguaaacucaaaaua

SEQ ID NO: 2517230 - RNA, 15 nt, Human
uuguaaacauguguu

SEQ ID NO: 2517231 - RNA, 14 nt, Human
uuguaaacaugugu

SEQ ID NO: 2517232 - RNA, 20 nt, Human
uuguaaaauggugugaccac

SEQ ID NO: 2517233 - RNA, 18 nt, Human
uuguacuuuagggaagua

SEQ ID NO: 2517234 - RNA, 21 nt, Human
uuguaccccccaaccccugag

SEQ ID NO: 2517235 - RNA, 15 nt, Human
uuguacuguaaagag

SEQ ID NO: 2517236 - RNA, 17 nt, Human
uuguagaauguauugua

SEQ ID NO: 2517237 - RNA, 16 nt, Human
uuguagaauguauugu

SEQ ID NO: 2517238 - RNA, 22 nt, Human
uuguagaaggguuauauuuuac

SEQ ID NO: 2517239 - RNA, 22 nt, Human
uuguagaaguaggaagugaaaa

SEQ ID NO: 2517240 - RNA, 21 nt, Human
uuguaucugcaggcagacacg

SEQ ID NO: 2517241 - RNA, 20 nt, Human
uuguaucucuuuugaaucca

SEQ ID NO: 2517242 - RNA, 17 nt, Human
uuguagcauccucuuua

SEQ ID NO: 2517243 - RNA, 20 nt, Human
uuggcagugagugagccugg

SEQ ID NO: 2517244 - RNA, 14 nt, Human
uuggcaggcuggcc

SEQ ID NO: 2517245 - RNA, 13 nt, Human
uuggcaggcuggc

SEQ ID NO: 2517246 - RNA, 14 nt, Human
uuggcagucugaau

SEQ ID NO: 2517247 - RNA, 22 nt, Human
uuggcuuccuuucuugguucau

SEQ ID NO: 2517248 - RNA, 17 nt, Human
uuggcuuccuuucuugg

SEQ ID NO: 2517249 - RNA, 21 nt, Human
uuggcuuccaugaugguuauu

SEQ ID NO: 2517250 - RNA, 19 nt, Human
uuggcuucuucuuuaggau

SEQ ID NO: 2517251 - RNA, 20 nt, Human
uuggcuuuauccucuuuaga

SEQ ID NO: 2517252 - RNA, 14 nt, Human
uuggcuuuauccuc

SEQ ID NO: 2517253 - RNA, 22 nt, Human
uuggcuuuaaacacccuucaca

SEQ ID NO: 2517254 - RNA, 17 nt, Human
uuggcuuuaaacacccu

SEQ ID NO: 2517255 - RNA, 23 nt, Human
uuggcagugagugagccuggcuc

SEQ ID NO: 2517256 - RNA, 17 nt, Human
uuggcuuacugcagccu

SEQ ID NO: 2517257 - RNA, 23 nt, Human
uuggcuucacggaagagccuugc

SEQ ID NO: 2517258 - RNA, 18 nt, Human
uugggacuggggcugaag

SEQ ID NO: 2517259 - RNA, 22 nt, Human
uugggaccgccagauggggccu

SEQ ID NO: 2517260 - RNA, 14 nt, Human
uugggagacaugug

SEQ ID NO: 2517261 - RNA, 16 nt, Human
uugggaccgccagaug

SEQ ID NO: 2517262 - RNA, 22 nt, Human
uugggacugcuaaauaaaauuu

SEQ ID NO: 2517263 - RNA, 17 nt, Human
uugggagacaugugaca

SEQ ID NO: 2517264 - RNA, 23 nt, Human
uugggacuggguuuggaccccag

SEQ ID NO: 2517265 - RNA, 16 nt, Human
uugggagauauauuuu

SEQ ID NO: 2517266 - RNA, 14 nt, Human
uugggaccccuggu

SEQ ID NO: 2517267 - RNA, 15 nt, Human
uugggaccccuggug

SEQ ID NO: 2517268 - RNA, 16 nt, Human
uugggaccccuggugg

SEQ ID NO: 2517269 - RNA, 20 nt, Human
uugggaccccuggugguuca

SEQ ID NO: 2517270 - RNA, 19 nt, Human
uugggaaugaggcuugcug

SEQ ID NO: 2517271 - RNA, 16 nt, Human
uugggaaugaggcuug

SEQ ID NO: 2517272 - RNA, 18 nt, Human
uugggaauggauccugga

SEQ ID NO: 2517273 - RNA, 19 nt, Human
uugggaauauuugaaucuu

SEQ ID NO: 2517274 - RNA, 17 nt, Human
uugggaauauuugaauc

SEQ ID NO: 2517275 - RNA, 14 nt, Human
uugggaauguuugu

SEQ ID NO: 2517276 - RNA, 11 nt, Human
uugggaauguu

SEQ ID NO: 2517277 - RNA, 16 nt, Human
uugggaauauuugaau

SEQ ID NO: 2517278 - RNA, 15 nt, Human
uugggaauauuugaa

SEQ ID NO: 2517279 - RNA, 17 nt, Human
uugggaauaaauaugcc

SEQ ID NO: 2517280 - RNA, 15 nt, Human
uugggaauaaauaug

SEQ ID NO: 2517281 - RNA, 14 nt, Human
uugggaauaaauau

SEQ ID NO: 2517282 - RNA, 22 nt, Human
uuggcuuuauccucuuuagagu

SEQ ID NO: 2517283 - RNA, 21 nt, Human
uuggcuuuauccucuuuagag

SEQ ID NO: 2517284 - RNA, 21 nt, Human
uugggaaggggacccccgccc

SEQ ID NO: 2517285 - RNA, 20 nt, Human
uuguaaaauauagcuguaca

SEQ ID NO: 2517286 - RNA, 18 nt, Human
uuguaaaauauagcugua

SEQ ID NO: 2517287 - RNA, 14 nt, Human
uuguaaaauauagc

SEQ ID NO: 2517288 - RNA, 13 nt, Human
uuguaaaauauag

SEQ ID NO: 2517289 - RNA, 15 nt, Human
uuggucugugagaug

SEQ ID NO: 2517290 - RNA, 12 nt, Human
uuguaaaauggu

SEQ ID NO: 2517291 - RNA, 13 nt, Human
uuguaaaauggug

SEQ ID NO: 2517292 - RNA, 14 nt, Human
uugguccuuuacac

SEQ ID NO: 2517293 - RNA, 15 nt, Human
uugguaauuauuuug

SEQ ID NO: 2517294 - RNA, 20 nt, Human
uugguacauggccaguguga

SEQ ID NO: 2517295 - RNA, 17 nt, Human
uuggucugggacuuccu

SEQ ID NO: 2517296 - RNA, 20 nt, Human
uuggucugacccacugcuuu

SEQ ID NO: 2517297 - RNA, 19 nt, Human
uugguaacauccuuucuau

SEQ ID NO: 2517298 - RNA, 16 nt, Human
uugguaacauccuuuc

SEQ ID NO: 2517299 - RNA, 20 nt, Human
uugguaaggggaauugagga

SEQ ID NO: 2517300 - RNA, 21 nt, Human
uugguaacauccuuucuauug

SEQ ID NO: 2517301 - RNA, 19 nt, Human
uugguaacacaaauuuuca

SEQ ID NO: 2517302 - RNA, 23 nt, Human
uugguaaauuuccccaacagugu

SEQ ID NO: 2517303 - RNA, 22 nt, Human
uugggauugggggcuggugcca

SEQ ID NO: 2517304 - RNA, 16 nt, Human
uugggagcacuggagu

SEQ ID NO: 2517305 - RNA, 15 nt, Human
uugggagcacuggag

SEQ ID NO: 2517306 - RNA, 11 nt, Human
uugggagcacu

SEQ ID NO: 2517307 - RNA, 22 nt, Human
uugggagcacuggagugcaggg

SEQ ID NO: 2517308 - RNA, 17 nt, Human
uugggagcuugggaaug

SEQ ID NO: 2517309 - RNA, 19 nt, Human
uugggagugagaugccugc

SEQ ID NO: 2517310 - RNA, 15 nt, Human
uugggagugagaugc

SEQ ID NO: 2517311 - RNA, 15 nt, Human
uugggaggcugaggc

SEQ ID NO: 2517312 - RNA, 16 nt, Human
uugggauacugcaggg

SEQ ID NO: 2517313 - RNA, 18 nt, Human
uugggaugaugccucaug

SEQ ID NO: 2517314 - RNA, 21 nt, Human
uugggauugggggcuggugcc

SEQ ID NO: 2517315 - RNA, 16 nt, Human
uugggauugggggcug

SEQ ID NO: 2517316 - RNA, 14 nt, Human
uugggauugggggc

SEQ ID NO: 2517317 - RNA, 21 nt, Human
uugggauuccugacccaggcc

SEQ ID NO: 2517318 - RNA, 18 nt, Human
uugggauuccugacccag

SEQ ID NO: 2517319 - RNA, 16 nt, Human
uugggauuccugaccc

SEQ ID NO: 2517320 - RNA, 13 nt, Human
uugggauuaauau

SEQ ID NO: 2517321 - RNA, 21 nt, Human
auauauuuuuauauuuaguua

SEQ ID NO: 2517322 - RNA, 15 nt, Human
auauauuuuuauauu

SEQ ID NO: 2517323 - RNA, 12 nt, Human
auaucagccuga

SEQ ID NO: 2517324 - RNA, 14 nt, Human
auaucagcaagucu

SEQ ID NO: 2517325 - RNA, 14 nt, Human
auauauuuuucaca

SEQ ID NO: 2517326 - RNA, 15 nt, Human
auauauuuuucacag

SEQ ID NO: 2517327 - RNA, 15 nt, Human
auauauuuuugguug

SEQ ID NO: 2517328 - RNA, 21 nt, Human
auauauuuuucacaguuuuuc

SEQ ID NO: 2517329 - RNA, 20 nt, Human
auauauuuuugguugucaau

SEQ ID NO: 2517330 - RNA, 14 nt, Human
auauauuuuuugua

SEQ ID NO: 2517331 - RNA, 17 nt, Human
auaugcaccuugugucu

SEQ ID NO: 2517332 - RNA, 15 nt, Human
auaugcaccuugugu

SEQ ID NO: 2517333 - RNA, 22 nt, Human
auaugcacacauuuuuuaaaug

SEQ ID NO: 2517334 - RNA, 20 nt, Human
auaucaucagcauaccuuua

SEQ ID NO: 2517335 - RNA, 18 nt, Human
auaucaucagcauaccuu

SEQ ID NO: 2517336 - RNA, 13 nt, Human
auaucaucaguau

SEQ ID NO: 2517337 - RNA, 19 nt, Human
auaucauauugguauucac

SEQ ID NO: 2517338 - RNA, 14 nt, Human
auaucauauuggua

SEQ ID NO: 2517339 - RNA, 22 nt, Human
auaucaguuacucagcccuggg

SEQ ID NO: 2517340 - RNA, 13 nt, Human
auaucaguuugcu

SEQ ID NO: 2517341 - RNA, 20 nt, Human
auaucaguuacucagcccug

SEQ ID NO: 2517342 - RNA, 21 nt, Human
auaucaguuacucagcccugg

SEQ ID NO: 2517343 - RNA, 23 nt, Human
auaucaguuacucagcccugggc

SEQ ID NO: 2517344 - RNA, 22 nt, Human
auaucagccugagucuccugug

SEQ ID NO: 2517345 - RNA, 20 nt, Human
auaucagccugagucuccug

SEQ ID NO: 2517346 - RNA, 14 nt, Human
auaucagccugagu

SEQ ID NO: 2517347 - RNA, 21 nt, Human
auaucagccugagucuccugu

SEQ ID NO: 2517348 - RNA, 17 nt, Human
auaucaguuacucagcc

SEQ ID NO: 2517349 - RNA, 18 nt, Human
auaucaguuacucagccc

SEQ ID NO: 2517350 - RNA, 19 nt, Human
auaucaguuacucagcccu

SEQ ID NO: 2517351 - RNA, 13 nt, Human
auaugcacuuaua

SEQ ID NO: 2517352 - RNA, 14 nt, Human
auaugcacuuauaa

SEQ ID NO: 2517353 - RNA, 17 nt, Human
auaugcagauuuugccc

SEQ ID NO: 2517354 - RNA, 20 nt, Human
auaugcaccuugugucugua

SEQ ID NO: 2517355 - RNA, 19 nt, Human
auaugcaccuugugucugu

SEQ ID NO: 2517356 - RNA, 21 nt, Human
auaugcaccuugugucuguac

SEQ ID NO: 2517357 - RNA, 21 nt, Human
auaucaucagcauaccuuuau

SEQ ID NO: 2517358 - RNA, 16 nt, Human
auaugcucugcauguu

SEQ ID NO: 2517359 - RNA, 17 nt, Human
auaugcucugcauguua

SEQ ID NO: 2517360 - RNA, 20 nt, Human
auauggcagaguuguaaaua

SEQ ID NO: 2517361 - RNA, 19 nt, Human
auauggcagaguuguaaau

SEQ ID NO: 2517362 - RNA, 18 nt, Human
auauggcagaguuguaaa

SEQ ID NO: 2517363 - RNA, 17 nt, Human
auauggcagaguuguaa

SEQ ID NO: 2517364 - RNA, 16 nt, Human
auauggcagaguugua

SEQ ID NO: 2517365 - RNA, 17 nt, Human
auauggcagaagacacc

SEQ ID NO: 2517366 - RNA, 15 nt, Human
auauggcagaagaca

SEQ ID NO: 2517367 - RNA, 12 nt, Human
auauggcagaag

SEQ ID NO: 2517368 - RNA, 19 nt, Human
auauggcaagaaagcuggu

SEQ ID NO: 2517369 - RNA, 18 nt, Human
auauggcaagaaagcugg

SEQ ID NO: 2517370 - RNA, 17 nt, Human
auauggcaagaaagcug

SEQ ID NO: 2517371 - RNA, 15 nt, Human
auauggcaagaaagc

SEQ ID NO: 2517372 - RNA, 13 nt, Human
auauggcaagaaa

SEQ ID NO: 2517373 - RNA, 16 nt, Human
auauggcaaaaauggc

SEQ ID NO: 2517374 - RNA, 23 nt, Human
auauggauuuucuauuguuacuc

SEQ ID NO: 2517375 - RNA, 22 nt, Human
auauggauuuucuauuguuacu

SEQ ID NO: 2517376 - RNA, 13 nt, Human
auauuauguuaaa

SEQ ID NO: 2517377 - RNA, 17 nt, Human
auauuauguguuuccau

SEQ ID NO: 2517378 - RNA, 13 nt, Human
auauggccacagu

SEQ ID NO: 2517379 - RNA, 15 nt, Human
auauggacucugcac

SEQ ID NO: 2517380 - RNA, 18 nt, Human
auaugcugccaaauuuug

SEQ ID NO: 2517381 - RNA, 12 nt, Human
auaugcugcuca

SEQ ID NO: 2517382 - RNA, 22 nt, Human
auaugcugccaaauuuuggcca

SEQ ID NO: 2517383 - RNA, 11 nt, Human
auauggagccc

SEQ ID NO: 2517384 - RNA, 16 nt, Human
auauggacucugcaca

SEQ ID NO: 2517385 - RNA, 18 nt, Human
auauggaugauucagaaa

SEQ ID NO: 2517386 - RNA, 20 nt, Human
auaugcucugcauguuacau

SEQ ID NO: 2517387 - RNA, 16 nt, Human
auaugcaguuuuccuu

SEQ ID NO: 2517388 - RNA, 20 nt, Human
auaugcagugauauggcaga

SEQ ID NO: 2517389 - RNA, 22 nt, Human
auauuauuuuauguugcauaga

SEQ ID NO: 2517390 - RNA, 15 nt, Human
auauuauuuuauguu

SEQ ID NO: 2517391 - RNA, 14 nt, Human
auauuauguuaaaa

SEQ ID NO: 2517392 - RNA, 14 nt, Human
auauuauuuuaugu

SEQ ID NO: 2517393 - RNA, 22 nt, Human
auauggcagaguuguaaauaua

SEQ ID NO: 2517394 - RNA, 23 nt, Human
auauggcagaguuguaaauauau

SEQ ID NO: 2517395 - RNA, 20 nt, Human
auauucaacucauaagacuu

SEQ ID NO: 2517396 - RNA, 19 nt, Human
auauucaggaagcucaggg

SEQ ID NO: 2517397 - RNA, 22 nt, Human
auauucagugcuguggccuggg

SEQ ID NO: 2517398 - RNA, 17 nt, Human
auauucaggaagcucag

SEQ ID NO: 2517399 - RNA, 19 nt, Human
auauucauguaaacaaaau

SEQ ID NO: 2517400 - RNA, 14 nt, Human
auauucauguaaac

SEQ ID NO: 2517401 - RNA, 22 nt, Human
auauucauguaaacaaaauuua

SEQ ID NO: 2517402 - RNA, 14 nt, Human
auauucauuguaua

SEQ ID NO: 2517403 - RNA, 15 nt, Human
auauucauuguauaa

SEQ ID NO: 2517404 - RNA, 16 nt, Human
auauucauuguauaaa

SEQ ID NO: 2517405 - RNA, 20 nt, Human
auauucaugcuucuuccuua

SEQ ID NO: 2517406 - RNA, 18 nt, Human
auauucaugcuucuuccu

SEQ ID NO: 2517407 - RNA, 23 nt, Human
auauucagugcuguggccugggc

SEQ ID NO: 2517408 - RNA, 17 nt, Human
auauuuauaacucauca

SEQ ID NO: 2517409 - RNA, 20 nt, Human
auauuuauaacucaucauaa

SEQ ID NO: 2517410 - RNA, 21 nt, Human
auauuuauaacucaucauaaa

SEQ ID NO: 2517411 - RNA, 22 nt, Human
auauuuauaacucaucauaaaa

SEQ ID NO: 2517412 - RNA, 23 nt, Human
auauuuauaacucaucauaaaau

SEQ ID NO: 2517413 - RNA, 15 nt, Human
auauuuauagucaca

SEQ ID NO: 2517414 - RNA, 15 nt, Human
auauuuauaacucau

SEQ ID NO: 2517415 - RNA, 15 nt, Human
auauuuauauauauu

SEQ ID NO: 2517416 - RNA, 15 nt, Human
auauuuauauauuua

SEQ ID NO: 2517417 - RNA, 14 nt, Human
auauuuauauuuca

SEQ ID NO: 2517418 - RNA, 15 nt, Human
auauuuauauuucac

SEQ ID NO: 2517419 - RNA, 21 nt, Human
auauuuaugucuauuuaagcc

SEQ ID NO: 2517420 - RNA, 19 nt, Human
auauuuauggggggagaac

SEQ ID NO: 2517421 - RNA, 14 nt, Human
auauuuauguagau

SEQ ID NO: 2517422 - RNA, 18 nt, Human
auauuuaugucuauuuaa

SEQ ID NO: 2517423 - RNA, 20 nt, Human
auauuuauguagaugugcau

SEQ ID NO: 2517424 - RNA, 19 nt, Human
auauuucccugaaggaacc

SEQ ID NO: 2517425 - RNA, 19 nt, Human
auauuuaugucuauuuaag

SEQ ID NO: 2517426 - RNA, 21 nt, Human
auauuuccauauggauuuucu

SEQ ID NO: 2517427 - RNA, 18 nt, Human
auauuuccauauggauuu

SEQ ID NO: 2517428 - RNA, 21 nt, Human
auacuuucauccugacucugc

SEQ ID NO: 2517429 - RNA, 13 nt, Human
auacuuugucuga

SEQ ID NO: 2517430 - RNA, 16 nt, Human
auacuuuaaaggaaaa

SEQ ID NO: 2517431 - RNA, 15 nt, Human
auacuuuaaaggaaa

SEQ ID NO: 2517432 - RNA, 14 nt, Human
auacuuuaaaggaa

SEQ ID NO: 2517433 - RNA, 23 nt, Human
auacuuuagugaacguggacucc

SEQ ID NO: 2517434 - RNA, 15 nt, Human
auacuuuagugaacg

SEQ ID NO: 2517435 - RNA, 23 nt, Human
auacuuuaaaggaaaaaauguug

SEQ ID NO: 2517436 - RNA, 12 nt, Human
auacuuuacaug

SEQ ID NO: 2517437 - RNA, 21 nt, Human
auacuuguggacuaaaagaua

SEQ ID NO: 2517438 - RNA, 20 nt, Human
auacuuguggacuaaaagau

SEQ ID NO: 2517439 - RNA, 14 nt, Human
auacuuguggacua

SEQ ID NO: 2517440 - RNA, 13 nt, Human
auacuuguggacu

SEQ ID NO: 2517441 - RNA, 18 nt, Human
auacuugucaauauuuaa

SEQ ID NO: 2517442 - RNA, 17 nt, Human
auacuugucuuguucac

SEQ ID NO: 2517443 - RNA, 23 nt, Human
auacuugaagggccagagccagg

SEQ ID NO: 2517444 - RNA, 13 nt, Human
auacuugagacug

SEQ ID NO: 2517445 - RNA, 22 nt, Human
auacuugaagggccagagccag

SEQ ID NO: 2517446 - RNA, 16 nt, Human
auagcauucucuauca

SEQ ID NO: 2517447 - RNA, 15 nt, Human
auagcauugugaacu

SEQ ID NO: 2517448 - RNA, 16 nt, Human
auagcauugugaacug

SEQ ID NO: 2517449 - RNA, 21 nt, Human
auagcauuuuugauuuaugca

SEQ ID NO: 2517450 - RNA, 19 nt, Human
auagcauuuuugauuuaug

SEQ ID NO: 2517451 - RNA, 18 nt, Human
auagcauuuuugauuuau

SEQ ID NO: 2517452 - RNA, 23 nt, Human
auagcauguauugugucuuuugc

SEQ ID NO: 2517453 - RNA, 16 nt, Human
auagcauguauugugu

SEQ ID NO: 2517454 - RNA, 15 nt, Human
auagcauguauugug

SEQ ID NO: 2517455 - RNA, 14 nt, Human
auagcauguauugu

SEQ ID NO: 2517456 - RNA, 10 nt, Human
auagcaugua

SEQ ID NO: 2517457 - RNA, 22 nt, Human
auagcauguauugugucuuuug

SEQ ID NO: 2517458 - RNA, 18 nt, Human
auagcauguauugugucu

SEQ ID NO: 2517459 - RNA, 13 nt, Human
auagcauuaacua

SEQ ID NO: 2517460 - RNA, 15 nt, Human
auagcauuaacuaau

SEQ ID NO: 2517461 - RNA, 21 nt, Human
auagcauuaacuaaucuauug

SEQ ID NO: 2517462 - RNA, 15 nt, Human
auagcagcuuauuca

SEQ ID NO: 2517463 - RNA, 19 nt, Human
auagcaugacauuucuuug

SEQ ID NO: 2517464 - RNA, 13 nt, Human
auagcauguaaug

SEQ ID NO: 2517465 - RNA, 22 nt, Human
auagcagauuuuaauuuugaau

SEQ ID NO: 2517466 - RNA, 11 nt, Human
auagcacuuuc

SEQ ID NO: 2517467 - RNA, 14 nt, Human
auagcagauuuuaa

SEQ ID NO: 2517468 - RNA, 18 nt, Human
auagcacagacccugccc

SEQ ID NO: 2517469 - RNA, 17 nt, Human
auagcacagacccugcc

SEQ ID NO: 2517470 - RNA, 16 nt, Human
auagcagacaguguuu

SEQ ID NO: 2517471 - RNA, 14 nt, Human
auagcaccagggcu

SEQ ID NO: 2517472 - RNA, 15 nt, Human
auagcacugagcaaa

SEQ ID NO: 2517473 - RNA, 15 nt, Human
auagcacagacccug

SEQ ID NO: 2517474 - RNA, 22 nt, Human
auagaaauaaaggaugugauug

SEQ ID NO: 2517475 - RNA, 20 nt, Human
auagaaauaaauagcuauau

SEQ ID NO: 2517476 - RNA, 19 nt, Human
auagaaauaagugguuauu

SEQ ID NO: 2517477 - RNA, 21 nt, Human
auagaaacucaccauguaaaa

SEQ ID NO: 2517478 - RNA, 22 nt, Human
auagaaagccaaaucaaaauau

SEQ ID NO: 2517479 - RNA, 23 nt, Human
auauacaguaacuuuauguguaa

SEQ ID NO: 2517480 - RNA, 22 nt, Human
auauacaguaacuuuaugugua

SEQ ID NO: 2517481 - RNA, 17 nt, Human
auauacaguaacuuuau

SEQ ID NO: 2517482 - RNA, 16 nt, Human
auauacaguaacuuua

SEQ ID NO: 2517483 - RNA, 14 nt, Human
auauacaguaacuu

SEQ ID NO: 2517484 - RNA, 19 nt, Human
auauacacaggauccuauu

SEQ ID NO: 2517485 - RNA, 15 nt, Human
auauacagcucagaa

SEQ ID NO: 2517486 - RNA, 13 nt, Human
auauacacacagc

SEQ ID NO: 2517487 - RNA, 17 nt, Human
auagccuaggugacaga

SEQ ID NO: 2517488 - RNA, 15 nt, Human
auagccuaggugaca

SEQ ID NO: 2517489 - RNA, 19 nt, Human
auagccuauauuuacagug

SEQ ID NO: 2517490 - RNA, 16 nt, Human
auagccuauauuuaca

SEQ ID NO: 2517491 - RNA, 12 nt, Human
auagccuauauu

SEQ ID NO: 2517492 - RNA, 14 nt, Human
auagccgggcaugg

SEQ ID NO: 2517493 - RNA, 18 nt, Human
auagccgggcaugguggc

SEQ ID NO: 2517494 - RNA, 16 nt, Human
auaguaaccuggguaa

SEQ ID NO: 2517495 - RNA, 19 nt, Human
auaguaacuucuuauggaa

SEQ ID NO: 2517496 - RNA, 21 nt, Human
auaguaacuucuuauggaauu

SEQ ID NO: 2517497 - RNA, 14 nt, Human
auaguaauucucag

SEQ ID NO: 2517498 - RNA, 14 nt, Human
auaguaaaaauaaa

SEQ ID NO: 2517499 - RNA, 22 nt, Human
auagguuuuguuugcuaucuua

SEQ ID NO: 2517500 - RNA, 21 nt, Human
auagguuuuguuugcuaucuu

SEQ ID NO: 2517501 - RNA, 16 nt, Human
auaguaaaauucuacu

SEQ ID NO: 2517502 - RNA, 18 nt, Human
auaguaaaagauaacaag

SEQ ID NO: 2517503 - RNA, 13 nt, Human
auaguaaaaauaa

SEQ ID NO: 2517504 - RNA, 19 nt, Human
auagguuuuguuugcuauc

SEQ ID NO: 2517505 - RNA, 17 nt, Human
auagguuuuguuugcua

SEQ ID NO: 2517506 - RNA, 16 nt, Human
auagguuuuguuugcu

SEQ ID NO: 2517507 - RNA, 21 nt, Human
auauaauaaauguacauuaau

SEQ ID NO: 2517508 - RNA, 21 nt, Human
auauaauaaagcuacugauuu

SEQ ID NO: 2517509 - RNA, 18 nt, Human
auauaauaaagcuacuga

SEQ ID NO: 2517510 - RNA, 21 nt, Human
auauaaguuugaaggaaacag

SEQ ID NO: 2517511 - RNA, 19 nt, Human
auauaaguuugaaggaaac

SEQ ID NO: 2517512 - RNA, 17 nt, Human
auauaaguuugaaggaa

SEQ ID NO: 2517513 - RNA, 21 nt, Human
auaguaccauuuauacaaauu

SEQ ID NO: 2517514 - RNA, 15 nt, Human
auaguagcauacauu

SEQ ID NO: 2517515 - RNA, 14 nt, Human
auauaaguuugaag

SEQ ID NO: 2517516 - RNA, 17 nt, Human
auaguaccaaucauuuu

SEQ ID NO: 2517517 - RNA, 14 nt, Human
auaguaccauuuau

SEQ ID NO: 2517518 - RNA, 19 nt, Human
auaguaccauuuauacaaa

SEQ ID NO: 2517519 - RNA, 14 nt, Human
auaguacuggcaug

SEQ ID NO: 2517520 - RNA, 18 nt, Human
auaguacucuuuguagca

SEQ ID NO: 2517521 - RNA, 21 nt, Human
auauaaugguuucaaagauuc

SEQ ID NO: 2517522 - RNA, 18 nt, Human
auauaaugguuucaaaga

SEQ ID NO: 2517523 - RNA, 15 nt, Human
auauaaugguuucaa

SEQ ID NO: 2517524 - RNA, 21 nt, Human
auauacaaccugcuugggugg

SEQ ID NO: 2517525 - RNA, 18 nt, Human
auauacaauaacauaauu

SEQ ID NO: 2517526 - RNA, 16 nt, Human
auauacaauaacauaa

SEQ ID NO: 2517527 - RNA, 14 nt, Human
auauacaauuauau

SEQ ID NO: 2517528 - RNA, 23 nt, Human
auauaauaugcacacagugcuuu

SEQ ID NO: 2517529 - RNA, 20 nt, Human
auauaauauauuuguguauu

SEQ ID NO: 2517530 - RNA, 17 nt, Human
auauaauauauuugugu

SEQ ID NO: 2517531 - RNA, 21 nt, Human
auaagccagacaucaacagau

SEQ ID NO: 2517532 - RNA, 22 nt, Human
auaagccagacaucaacagaua

SEQ ID NO: 2517533 - RNA, 18 nt, Human
auaaggccuuaauauguu

SEQ ID NO: 2517534 - RNA, 17 nt, Human
auaaggccuuaauaugu

SEQ ID NO: 2517535 - RNA, 21 nt, Human
auaagccuccauuuaguucuu

SEQ ID NO: 2517536 - RNA, 18 nt, Human
auaaggguaucuggugac

SEQ ID NO: 2517537 - RNA, 13 nt, Human
auaagggcagagu

SEQ ID NO: 2517538 - RNA, 15 nt, Human
auaagggcagaguca

SEQ ID NO: 2517539 - RNA, 13 nt, Human
auaauggucagag

SEQ ID NO: 2517540 - RNA, 15 nt, Human
auaaugguaccagau

SEQ ID NO: 2517541 - RNA, 19 nt, Human
auaaugggguccuggccau

SEQ ID NO: 2517542 - RNA, 21 nt, Human
auaagguaccuuucacauaga

SEQ ID NO: 2517543 - RNA, 15 nt, Human
auaauguaaauaaag

SEQ ID NO: 2517544 - RNA, 14 nt, Human
auaaugguuucaaa

SEQ ID NO: 2517545 - RNA, 22 nt, Human
auaauggucccauccaggcagu

SEQ ID NO: 2517546 - RNA, 18 nt, Human
auaaugguugacuggguu

SEQ ID NO: 2517547 - RNA, 17 nt, Human
auaauggucccauccag

SEQ ID NO: 2517548 - RNA, 19 nt, Human
auaaugguaccagauaaaa

SEQ ID NO: 2517549 - RNA, 18 nt, Human
auaaugguaccagauaaa

SEQ ID NO: 2517550 - RNA, 17 nt, Human
auaaugguaccagauaa

SEQ ID NO: 2517551 - RNA, 20 nt, Human
auaauggucccauccaggca

SEQ ID NO: 2517552 - RNA, 18 nt, Human
auaauggucccauccagg

SEQ ID NO: 2517553 - RNA, 14 nt, Human
auaaugguugacug

SEQ ID NO: 2517554 - RNA, 13 nt, Human
auaauguuucaaa

SEQ ID NO: 2517555 - RNA, 14 nt, Human
auaauguuguuauu

SEQ ID NO: 2517556 - RNA, 19 nt, Human
auaauguaaacaauaucag

SEQ ID NO: 2517557 - RNA, 16 nt, Human
auaccccaucauucau

SEQ ID NO: 2517558 - RNA, 20 nt, Human
auacccccugcaaagcccag

SEQ ID NO: 2517559 - RNA, 16 nt, Human
auaccugucccccuga

SEQ ID NO: 2517560 - RNA, 15 nt, Human
auaccugucccccug

SEQ ID NO: 2517561 - RNA, 14 nt, Human
auaccugucccccu

SEQ ID NO: 2517562 - RNA, 21 nt, Human
auacccccugcaaagcccagc

SEQ ID NO: 2517563 - RNA, 13 nt, Human
auaccuguccccc

SEQ ID NO: 2517564 - RNA, 16 nt, Human
auacccacccccaccc

SEQ ID NO: 2517565 - RNA, 14 nt, Human
auacccacccccac

SEQ ID NO: 2517566 - RNA, 13 nt, Human
auacccaccccca

SEQ ID NO: 2517567 - RNA, 22 nt, Human
auacacuuauuggaacucugcu

SEQ ID NO: 2517568 - RNA, 17 nt, Human
auacccacccccaccca

SEQ ID NO: 2517569 - RNA, 17 nt, Human
auacccccugcaaagcc

SEQ ID NO: 2517570 - RNA, 19 nt, Human
auacccccugcaaagccca

SEQ ID NO: 2517571 - RNA, 15 nt, Human
auacccaugaacuua

SEQ ID NO: 2517572 - RNA, 13 nt, Human
auaccccccucug

SEQ ID NO: 2517573 - RNA, 18 nt, Human
auacccauagcuuccaug

SEQ ID NO: 2517574 - RNA, 14 nt, Human
auacaaugcugugc

SEQ ID NO: 2517575 - RNA, 17 nt, Human
auacaaugcugugcccu

SEQ ID NO: 2517576 - RNA, 13 nt, Human
auacacuuacacu

SEQ ID NO: 2517577 - RNA, 22 nt, Human
auacacuuacacuuuaugcaca

SEQ ID NO: 2517578 - RNA, 18 nt, Human
auaauguuucaaacauau

SEQ ID NO: 2517579 - RNA, 19 nt, Human
auaauguuguuauuuaaag

SEQ ID NO: 2517580 - RNA, 19 nt, Human
auaauguuuaauauugaga

SEQ ID NO: 2517581 - RNA, 15 nt, Human
auacaauaucaucca

SEQ ID NO: 2517582 - RNA, 22 nt, Human
auaauguuuaauauugagaaag

SEQ ID NO: 2517583 - RNA, 17 nt, Human
aguuugauuaaauucuu

SEQ ID NO: 2517584 - RNA, 18 nt, Human
aguuugauuaaauucuug

SEQ ID NO: 2517585 - RNA, 20 nt, Human
aguuugauuaaauucuugca

SEQ ID NO: 2517586 - RNA, 22 nt, Human
aguuugauuaaauucuugcaaa

SEQ ID NO: 2517587 - RNA, 21 nt, Human
aguuugaauguuaaauaaauu

SEQ ID NO: 2517588 - RNA, 16 nt, Human
aguuugaauguuaaau

SEQ ID NO: 2517589 - RNA, 16 nt, Human
aguuugauuaaauucu

SEQ ID NO: 2517590 - RNA, 20 nt, Human
aguuugagaucagccugggc

SEQ ID NO: 2517591 - RNA, 18 nt, Human
aguuugagaucagccugg

SEQ ID NO: 2517592 - RNA, 19 nt, Human
aguuugagaucagccuggg

SEQ ID NO: 2517593 - RNA, 19 nt, Human
aguuguuacauuuuuaagu

SEQ ID NO: 2517594 - RNA, 20 nt, Human
aguuguuacauuuuuaagug

SEQ ID NO: 2517595 - RNA, 22 nt, Human
aguuguuacauuuuuaagugcu

SEQ ID NO: 2517596 - RNA, 22 nt, Human
aguuguuacuaacuaaacucuc

SEQ ID NO: 2517597 - RNA, 20 nt, Human
aguuguuacuaacuaaacuc

SEQ ID NO: 2517598 - RNA, 19 nt, Human
aguuguuacuaacuaaacu

SEQ ID NO: 2517599 - RNA, 18 nt, Human
aguuguuacuaacuaaac

SEQ ID NO: 2517600 - RNA, 19 nt, Human
aguugugcuuguuuacagc

SEQ ID NO: 2517601 - RNA, 23 nt, Human
aguugugccuuuuauagcuauua

SEQ ID NO: 2517602 - RNA, 17 nt, Human
aguuucuuagcuuuuua

SEQ ID NO: 2517603 - RNA, 23 nt, Human
aguuguuacuaacuaaacucucu

SEQ ID NO: 2517604 - RNA, 23 nt, Human
aguuucuuuccugccuucuucuu

SEQ ID NO: 2517605 - RNA, 21 nt, Human
aguuucuuuccugccuucuuc

SEQ ID NO: 2517606 - RNA, 19 nt, Human
aguuucuuuccugccuucu

SEQ ID NO: 2517607 - RNA, 18 nt, Human
aguuucuuuccugccuuc

SEQ ID NO: 2517608 - RNA, 13 nt, Human
aguuucuuuggga

SEQ ID NO: 2517609 - RNA, 18 nt, Human
aguuugaaggaaacaguu

SEQ ID NO: 2517610 - RNA, 16 nt, Human
aguuugaaggaaacag

SEQ ID NO: 2517611 - RNA, 15 nt, Human
aguuugaaggaaaca

SEQ ID NO: 2517612 - RNA, 15 nt, Human
aguuugaacuucaua

SEQ ID NO: 2517613 - RNA, 15 nt, Human
aguuugaauguuaaa

SEQ ID NO: 2517614 - RNA, 14 nt, Human
aguuugaauguuaa

SEQ ID NO: 2517615 - RNA, 12 nt, Human
aguuugaauguu

SEQ ID NO: 2517616 - RNA, 21 nt, Human
aguuugaaggaggugagggau

SEQ ID NO: 2517617 - RNA, 13 nt, Human
aguuugcuuagaa

SEQ ID NO: 2517618 - RNA, 14 nt, Human
aguuugcuuagaaa

SEQ ID NO: 2517619 - RNA, 18 nt, Human
aguuuggauucuuaugua

SEQ ID NO: 2517620 - RNA, 16 nt, Human
aguuuggcaaacucuc

SEQ ID NO: 2517621 - RNA, 20 nt, Human
auaaaaagccugcaauuuca

SEQ ID NO: 2517622 - RNA, 16 nt, Human
aguuuggcaauaguuu

SEQ ID NO: 2517623 - RNA, 17 nt, Human
aguuuggcaauaguuug

SEQ ID NO: 2517624 - RNA, 12 nt, Human
auaaaaagcaaa

SEQ ID NO: 2517625 - RNA, 18 nt, Human
aguuuggcaaacucucca

SEQ ID NO: 2517626 - RNA, 15 nt, Human
aguuugagcugccuu

SEQ ID NO: 2517627 - RNA, 14 nt, Human
aguuugagcugccu

SEQ ID NO: 2517628 - RNA, 14 nt, Human
aguuugauuauuca

SEQ ID NO: 2517629 - RNA, 17 nt, Human
aguuugauuauucagug

SEQ ID NO: 2517630 - RNA, 18 nt, Human
aguuugauuauucagugu

SEQ ID NO: 2517631 - RNA, 23 nt, Human
aguuugauuaaauucuugcaaag

SEQ ID NO: 2517632 - RNA, 23 nt, Human
aguuugauuauucagugucacug

SEQ ID NO: 2517633 - RNA, 18 nt, Human
aguuugcuguacuagaga

SEQ ID NO: 2517634 - RNA, 11 nt, Human
aguuugcugua

SEQ ID NO: 2517635 - RNA, 11 nt, Human
aguuugcuuag

SEQ ID NO: 2517636 - RNA, 20 nt, Human
aguuugcacuguaugcugga

SEQ ID NO: 2517637 - RNA, 14 nt, Human
aguuugcuauuaga

SEQ ID NO: 2517638 - RNA, 23 nt, Human
auaaaacauuuuaaauggacaga

SEQ ID NO: 2517639 - RNA, 12 nt, Human
auaaaacccuua

SEQ ID NO: 2517640 - RNA, 11 nt, Human
auaaaaccuuu

SEQ ID NO: 2517641 - RNA, 13 nt, Human
auaaaaccuuuca

SEQ ID NO: 2517642 - RNA, 14 nt, Human
auaaaaccuuucaa

SEQ ID NO: 2517643 - RNA, 15 nt, Human
auaaaaccuuucaaa

SEQ ID NO: 2517644 - RNA, 20 nt, Human
auaaaaccuuucaaauuuca

SEQ ID NO: 2517645 - RNA, 21 nt, Human
auaaaaccuuucaaauuucac

SEQ ID NO: 2517646 - RNA, 22 nt, Human
auaaaaccuuucaaauuucaca

SEQ ID NO: 2517647 - RNA, 23 nt, Human
auaaagaugaucuacucagaaau

SEQ ID NO: 2517648 - RNA, 15 nt, Human
auaaaacuggcuuug

SEQ ID NO: 2517649 - RNA, 14 nt, Human
auaaagaugcucuu

SEQ ID NO: 2517650 - RNA, 15 nt, Human
auaaagaugcucuuu

SEQ ID NO: 2517651 - RNA, 18 nt, Human
auaaagauggcugacuuu

SEQ ID NO: 2517652 - RNA, 20 nt, Human
auaaagaugaucuacucaga

SEQ ID NO: 2517653 - RNA, 17 nt, Human
auaaaacuuugcugcca

SEQ ID NO: 2517654 - RNA, 22 nt, Human
auaaaaagccugcaauuucaua

SEQ ID NO: 2517655 - RNA, 16 nt, Human
auaaaaagcaaaacaa

SEQ ID NO: 2517656 - RNA, 12 nt, Human
auaaaaagcuga

SEQ ID NO: 2517657 - RNA, 13 nt, Human
auaaaaagcaaaa

SEQ ID NO: 2517658 - RNA, 17 nt, Human
auaaaaagcuuccauga

SEQ ID NO: 2517659 - RNA, 21 nt, Human
auaaaaagcuuccaugauucu

SEQ ID NO: 2517660 - RNA, 11 nt, Human
auaaaaaggca

SEQ ID NO: 2517661 - RNA, 12 nt, Human
auaaaaaggcac

SEQ ID NO: 2517662 - RNA, 13 nt, Human
auaaaacauuaau

SEQ ID NO: 2517663 - RNA, 22 nt, Human
auaaaacauuaagaaaaucaua

SEQ ID NO: 2517664 - RNA, 18 nt, Human
auaaaacauuaagaaaau

SEQ ID NO: 2517665 - RNA, 19 nt, Human
auaaaacauuuuaaaugga

SEQ ID NO: 2517666 - RNA, 18 nt, Human
auaaaacauuuuaaaugg

SEQ ID NO: 2517667 - RNA, 13 nt, Human
auaaaacauuuua

SEQ ID NO: 2517668 - RNA, 11 nt, Human
auaaaacauuu

SEQ ID NO: 2517669 - RNA, 18 nt, Human
auaaaacauuuucacaca

SEQ ID NO: 2517670 - RNA, 20 nt, Human
auaaaacauuuucacacaau

SEQ ID NO: 2517671 - RNA, 20 nt, Human
auaacauguaauuaaguacu

SEQ ID NO: 2517672 - RNA, 23 nt, Human
auaacacacagcuaacacacagc

SEQ ID NO: 2517673 - RNA, 14 nt, Human
auaacacacagcua

SEQ ID NO: 2517674 - RNA, 11 nt, Human
auaacacacau

SEQ ID NO: 2517675 - RNA, 12 nt, Human
auaacauguaau

SEQ ID NO: 2517676 - RNA, 14 nt, Human
auaacaauuccucu

SEQ ID NO: 2517677 - RNA, 15 nt, Human
auaacaauuccucua

SEQ ID NO: 2517678 - RNA, 15 nt, Human
auaacaauuguuugg

SEQ ID NO: 2517679 - RNA, 22 nt, Human
auaacaauguuaaggaaacucu

SEQ ID NO: 2517680 - RNA, 13 nt, Human
auaacacacagcu

SEQ ID NO: 2517681 - RNA, 14 nt, Human
auaacacaauauga

SEQ ID NO: 2517682 - RNA, 13 nt, Human
auaacauguaauu

SEQ ID NO: 2517683 - RNA, 18 nt, Human
auaacauguaauuaagua

SEQ ID NO: 2517684 - RNA, 18 nt, Human
auaacaauguuaaggaaa

SEQ ID NO: 2517685 - RNA, 16 nt, Human
auaacaauguuaagga

SEQ ID NO: 2517686 - RNA, 14 nt, Human
auaacaauguuaag

SEQ ID NO: 2517687 - RNA, 13 nt, Human
auaacaauguuaa

SEQ ID NO: 2517688 - RNA, 21 nt, Human
auaacaagguccaagauaccu

SEQ ID NO: 2517689 - RNA, 17 nt, Human
auaacaagguccaagau

SEQ ID NO: 2517690 - RNA, 16 nt, Human
auaacaaugugcucuc

SEQ ID NO: 2517691 - RNA, 21 nt, Human
auaacaaugcuguauuuuaaa

SEQ ID NO: 2517692 - RNA, 20 nt, Human
auaacaaugcuguauuuuaa

SEQ ID NO: 2517693 - RNA, 19 nt, Human
auaacaaugcuguauuuua

SEQ ID NO: 2517694 - RNA, 17 nt, Human
auaacaaugcuguauuu

SEQ ID NO: 2517695 - RNA, 15 nt, Human
auaacaaugcuguau

SEQ ID NO: 2517696 - RNA, 14 nt, Human
auaacaaugaaagu

SEQ ID NO: 2517697 - RNA, 15 nt, Human
auaaauuguuugacc

SEQ ID NO: 2517698 - RNA, 13 nt, Human
auaaauuguuuga

SEQ ID NO: 2517699 - RNA, 14 nt, Human
auaaauuguauauu

SEQ ID NO: 2517700 - RNA, 17 nt, Human
auaaauuguuugaccau

SEQ ID NO: 2517701 - RNA, 14 nt, Human
auaaauuuauuuac

SEQ ID NO: 2517702 - RNA, 15 nt, Human
auaaauuuauuuacu

SEQ ID NO: 2517703 - RNA, 19 nt, Human
auaaauuuauuuacugcua

SEQ ID NO: 2517704 - RNA, 17 nt, Human
auaacaagaucuuucag

SEQ ID NO: 2517705 - RNA, 19 nt, Human
auaacaagaucuuucagga

SEQ ID NO: 2517706 - RNA, 22 nt, Human
auaaaaagaucacuuucucagu

SEQ ID NO: 2517707 - RNA, 16 nt, Human
auaacaagaucuuuca

SEQ ID NO: 2517708 - RNA, 20 nt, Human
auaaauuugguucuaauaga

SEQ ID NO: 2517709 - RNA, 19 nt, Human
auaaauuguauauucacuu

SEQ ID NO: 2517710 - RNA, 18 nt, Human
auaaauuguauauucacu

SEQ ID NO: 2517711 - RNA, 17 nt, Human
auaaauuguauauucac

SEQ ID NO: 2517712 - RNA, 16 nt, Human
auaaauuguauauuca

SEQ ID NO: 2517713 - RNA, 18 nt, Human
auaaagcaauuuuccuug

SEQ ID NO: 2517714 - RNA, 17 nt, Human
auaaagcaauuuuccuu

SEQ ID NO: 2517715 - RNA, 16 nt, Human
auaaagcaauuuuccu

SEQ ID NO: 2517716 - RNA, 15 nt, Human
auaaagcaauuuucc

SEQ ID NO: 2517717 - RNA, 14 nt, Human
auaaagcaauuuuc

SEQ ID NO: 2517718 - RNA, 13 nt, Human
auaaagcaauuuu

SEQ ID NO: 2517719 - RNA, 12 nt, Human
auaaagcaauuu

SEQ ID NO: 2517720 - RNA, 15 nt, Human
auaaagauguuaaaa

SEQ ID NO: 2517721 - RNA, 20 nt, Human
auaaagauuucuugaguuuu

SEQ ID NO: 2517722 - RNA, 11 nt, Human
auaaagcaauu

SEQ ID NO: 2517723 - RNA, 10 nt, Human
auaaagcaau

SEQ ID NO: 2517724 - RNA, 22 nt, Human
auaaagcaacuguuaugaaaua

SEQ ID NO: 2517725 - RNA, 14 nt, Human
agucaugagcugag

SEQ ID NO: 2517726 - RNA, 16 nt, Human
agucaugagcugagca

SEQ ID NO: 2517727 - RNA, 22 nt, Human
agucaugagcugagcagggaga

SEQ ID NO: 2517728 - RNA, 20 nt, Human
agucauguaagcugaaaaua

SEQ ID NO: 2517729 - RNA, 13 nt, Human
agucauggcugug

SEQ ID NO: 2517730 - RNA, 12 nt, Human
agucauggcugu

SEQ ID NO: 2517731 - RNA, 22 nt, Human
agucaugcauaaauaugcagug

SEQ ID NO: 2517732 - RNA, 21 nt, Human
agucaugcauaaauaugcagu

SEQ ID NO: 2517733 - RNA, 19 nt, Human
agucauguuccuucaagau

SEQ ID NO: 2517734 - RNA, 15 nt, Human
agucauguuccuuca

SEQ ID NO: 2517735 - RNA, 13 nt, Human
agucauguuccuu

SEQ ID NO: 2517736 - RNA, 12 nt, Human
agucaugugacc

SEQ ID NO: 2517737 - RNA, 13 nt, Human
agucaugugcauu

SEQ ID NO: 2517738 - RNA, 14 nt, Human
agucauuuuuguuu

SEQ ID NO: 2517739 - RNA, 16 nt, Human
aguccaaauguccucc

SEQ ID NO: 2517740 - RNA, 21 nt, Human
agucaugaucucccugccgcc

SEQ ID NO: 2517741 - RNA, 15 nt, Human
agucaugaucucccu

SEQ ID NO: 2517742 - RNA, 16 nt, Human
agucaugaucucccug

SEQ ID NO: 2517743 - RNA, 17 nt, Human
agucaugaucucccugc

SEQ ID NO: 2517744 - RNA, 18 nt, Human
agucaugaucucccugcc

SEQ ID NO: 2517745 - RNA, 19 nt, Human
agucaugaucucccugccg

SEQ ID NO: 2517746 - RNA, 20 nt, Human
agucaugaucucccugccgc

SEQ ID NO: 2517747 - RNA, 23 nt, Human
agucaugaucucccugccgccuc

SEQ ID NO: 2517748 - RNA, 14 nt, Human
agucaugcauaaau

SEQ ID NO: 2517749 - RNA, 13 nt, Human
agucaugcauaaa

SEQ ID NO: 2517750 - RNA, 20 nt, Human
agucaugcaaaggcugggac

SEQ ID NO: 2517751 - RNA, 19 nt, Human
agucaugcaaaggcuggga

SEQ ID NO: 2517752 - RNA, 18 nt, Human
agucaugcaaaggcuggg

SEQ ID NO: 2517753 - RNA, 17 nt, Human
agucaugcaaaggcugg

SEQ ID NO: 2517754 - RNA, 20 nt, Human
agucaugcauaaauaugcag

SEQ ID NO: 2517755 - RNA, 19 nt, Human
agucaugcauaaauaugca

SEQ ID NO: 2517756 - RNA, 17 nt, Human
agucaugcauaaauaug

SEQ ID NO: 2517757 - RNA, 16 nt, Human
agucaugcauaaauau

SEQ ID NO: 2517758 - RNA, 19 nt, Human
agucaugcguuuaaucaca

SEQ ID NO: 2517759 - RNA, 11 nt, Human
aguccaagcau

SEQ ID NO: 2517760 - RNA, 19 nt, Human
aguccucuuuucugagagg

SEQ ID NO: 2517761 - RNA, 23 nt, Human
aguccaacguggggcagcacaga

SEQ ID NO: 2517762 - RNA, 22 nt, Human
aguccaacguggggcagcacag

SEQ ID NO: 2517763 - RNA, 20 nt, Human
aguccaacguggggcagcac

SEQ ID NO: 2517764 - RNA, 19 nt, Human
aguccaacguggggcagca

SEQ ID NO: 2517765 - RNA, 19 nt, Human
aguccaaauguccuccaga

SEQ ID NO: 2517766 - RNA, 23 nt, Human
aguccaaauguccuccagaagcc

SEQ ID NO: 2517767 - RNA, 19 nt, Human
aguccaaauguuuacaggg

SEQ ID NO: 2517768 - RNA, 18 nt, Human
aguccaacguggggcagc

SEQ ID NO: 2517769 - RNA, 20 nt, Human
aguccuuaccagcagagcac

SEQ ID NO: 2517770 - RNA, 22 nt, Human
aguccugaagaggcgggccagc

SEQ ID NO: 2517771 - RNA, 21 nt, Human
aguccugaagaggcgggccag

SEQ ID NO: 2517772 - RNA, 23 nt, Human
aguccugaagaggcgggccagcc

SEQ ID NO: 2517773 - RNA, 20 nt, Human
aguccugaucagagccgugg

SEQ ID NO: 2517774 - RNA, 20 nt, Human
aguccugcacaguuuucugg

SEQ ID NO: 2517775 - RNA, 22 nt, Human
aguccucuuuucugagaggacu

SEQ ID NO: 2517776 - RNA, 19 nt, Human
aguccugaagaggcgggcc

SEQ ID NO: 2517777 - RNA, 14 nt, Human
aguccugaagaggc

SEQ ID NO: 2517778 - RNA, 13 nt, Human
aguccugaagagg

SEQ ID NO: 2517779 - RNA, 12 nt, Human
aguccugaagag

SEQ ID NO: 2517780 - RNA, 19 nt, Human
aguccaagaggguccuuua

SEQ ID NO: 2517781 - RNA, 18 nt, Human
agugaccugaggaagcgu

SEQ ID NO: 2517782 - RNA, 16 nt, Human
agugaccugaggaagc

SEQ ID NO: 2517783 - RNA, 17 nt, Human
agugaccugaggaagcg

SEQ ID NO: 2517784 - RNA, 18 nt, Human
agugaccucagcuuugau

SEQ ID NO: 2517785 - RNA, 14 nt, Human
agugaccugaggaa

SEQ ID NO: 2517786 - RNA, 15 nt, Human
agugaccugaggaag

SEQ ID NO: 2517787 - RNA, 14 nt, Human
agugacgugcaccu

SEQ ID NO: 2517788 - RNA, 20 nt, Human
agugaauucuugaaggaaaa

SEQ ID NO: 2517789 - RNA, 19 nt, Human
agugaaugcugggacucag

SEQ ID NO: 2517790 - RNA, 15 nt, Human
agugaaugcugggac

SEQ ID NO: 2517791 - RNA, 12 nt, Human
agucuguuuuau

SEQ ID NO: 2517792 - RNA, 19 nt, Human
agucugugugaugaacuuu

SEQ ID NO: 2517793 - RNA, 18 nt, Human
agucugugugaugaacuu

SEQ ID NO: 2517794 - RNA, 15 nt, Human
agucugugugaaggu

SEQ ID NO: 2517795 - RNA, 22 nt, Human
agucugugugaugaacuuucuc

SEQ ID NO: 2517796 - RNA, 21 nt, Human
agucugugugaugaacuuucu

SEQ ID NO: 2517797 - RNA, 17 nt, Human
agugaccucagcuuuga

SEQ ID NO: 2517798 - RNA, 19 nt, Human
agugaauuugaaugaaaaa

SEQ ID NO: 2517799 - RNA, 17 nt, Human
agugaauuuuucucuaa

SEQ ID NO: 2517800 - RNA, 20 nt, Human
agugaauuuuucucuaacuc

SEQ ID NO: 2517801 - RNA, 20 nt, Human
agugaauuugaaugaaaaau

SEQ ID NO: 2517802 - RNA, 15 nt, Human
agugaauuuuucucu

SEQ ID NO: 2517803 - RNA, 16 nt, Human
agugaauuuuucucua

SEQ ID NO: 2517804 - RNA, 21 nt, Human
agugaauugugaccaaguuau

SEQ ID NO: 2517805 - RNA, 13 nt, Human
agugaauuugaau

SEQ ID NO: 2517806 - RNA, 14 nt, Human
agugaauuugaaug

SEQ ID NO: 2517807 - RNA, 15 nt, Human
agugaauuugaauga

SEQ ID NO: 2517808 - RNA, 16 nt, Human
agucugaguaaaaucu

SEQ ID NO: 2517809 - RNA, 20 nt, Human
agucugugccacguguuugu

SEQ ID NO: 2517810 - RNA, 15 nt, Human
agucugauccaggag

SEQ ID NO: 2517811 - RNA, 21 nt, Human
agucugugagauucauucaug

SEQ ID NO: 2517812 - RNA, 17 nt, Human
agucuguggaucagaga

SEQ ID NO: 2517813 - RNA, 14 nt, Human
agucuguggaucag

SEQ ID NO: 2517814 - RNA, 11 nt, Human
agucuguguga

SEQ ID NO: 2517815 - RNA, 12 nt, Human
agucugugugaa

SEQ ID NO: 2517816 - RNA, 16 nt, Human
agucugaauuuuuaaa

SEQ ID NO: 2517817 - RNA, 22 nt, Human
aguccuugaaaauauuuuuuau

SEQ ID NO: 2517818 - RNA, 17 nt, Human
aguccuugaaaauauuu

SEQ ID NO: 2517819 - RNA, 16 nt, Human
aguccuugaaaauauu

SEQ ID NO: 2517820 - RNA, 17 nt, Human
agucugaaggcuggguu

SEQ ID NO: 2517821 - RNA, 19 nt, Human
aguccuuaccagcagagca

SEQ ID NO: 2517822 - RNA, 23 nt, Human
aguccugcacaguuuucuggcug

SEQ ID NO: 2517823 - RNA, 15 nt, Human
aguccuuaccucuuc

SEQ ID NO: 2517824 - RNA, 17 nt, Human
aguccuuaccucuuccg

SEQ ID NO: 2517825 - RNA, 21 nt, Human
aguccuuaccucuuccggaga

SEQ ID NO: 2517826 - RNA, 16 nt, Human
aguccuucaccucacu

SEQ ID NO: 2517827 - RNA, 23 nt, Human
aguccuuaccucuuccggagaug

SEQ ID NO: 2517828 - RNA, 14 nt, Human
aguccuugaaaaua

SEQ ID NO: 2517829 - RNA, 17 nt, Human
aguccuucaccucacug

SEQ ID NO: 2517830 - RNA, 11 nt, Human
aguccuuccac

SEQ ID NO: 2517831 - RNA, 19 nt, Human
aguacuugaaaucuaggau

SEQ ID NO: 2517832 - RNA, 11 nt, Human
aguacuugaaa

SEQ ID NO: 2517833 - RNA, 23 nt, Human
aguacuugggagaccuguaauca

SEQ ID NO: 2517834 - RNA, 20 nt, Human
aguauccuccagguuuuuca

SEQ ID NO: 2517835 - RNA, 19 nt, Human
aguauccuccagguuuuuc

SEQ ID NO: 2517836 - RNA, 17 nt, Human
aguauccuccagguuuu

SEQ ID NO: 2517837 - RNA, 16 nt, Human
aguauccuccagguuu

SEQ ID NO: 2517838 - RNA, 15 nt, Human
aguauccuccagguu

SEQ ID NO: 2517839 - RNA, 14 nt, Human
aguauccuccaggu

SEQ ID NO: 2517840 - RNA, 13 nt, Human
aguauccuccagg

SEQ ID NO: 2517841 - RNA, 14 nt, Human
aguauccacuuugc

SEQ ID NO: 2517842 - RNA, 20 nt, Human
aguaugaggcauuuguuuga

SEQ ID NO: 2517843 - RNA, 21 nt, Human
aguaugaggcauuuguuugaa

SEQ ID NO: 2517844 - RNA, 22 nt, Human
aguauccuccagguuuuucaau

SEQ ID NO: 2517845 - RNA, 21 nt, Human
aguauccuccagguuuuucaa

SEQ ID NO: 2517846 - RNA, 23 nt, Human
aguauccuccagguuuuucaauu

SEQ ID NO: 2517847 - RNA, 19 nt, Human
aguaucuauauauguguau

SEQ ID NO: 2517848 - RNA, 18 nt, Human
aguaucuauauaugugua

SEQ ID NO: 2517849 - RNA, 17 nt, Human
aguaucuauauaugugu

SEQ ID NO: 2517850 - RNA, 16 nt, Human
aguaucuaacauguau

SEQ ID NO: 2517851 - RNA, 23 nt, Human
aguaucuauauauguguauguac

SEQ ID NO: 2517852 - RNA, 22 nt, Human
aguaucuauauauguguaugua

SEQ ID NO: 2517853 - RNA, 23 nt, Human
aguaugaggcauuuguuugaacu

SEQ ID NO: 2517854 - RNA, 17 nt, Human
aguaugaggcauuuguu

SEQ ID NO: 2517855 - RNA, 17 nt, Human
agucaaaacuacaaauc

SEQ ID NO: 2517856 - RNA, 21 nt, Human
agucaaaacagagaugugaua

SEQ ID NO: 2517857 - RNA, 16 nt, Human
agucaaaacucaaaug

SEQ ID NO: 2517858 - RNA, 15 nt, Human
agucaaaaggugccu

SEQ ID NO: 2517859 - RNA, 16 nt, Human
agucaaaaggugccug

SEQ ID NO: 2517860 - RNA, 17 nt, Human
agucaaaaggugccugu

SEQ ID NO: 2517861 - RNA, 20 nt, Human
aguauuuuuuuaucuuggga

SEQ ID NO: 2517862 - RNA, 14 nt, Human
agucaaaacagaga

SEQ ID NO: 2517863 - RNA, 18 nt, Human
agucaauccccucauuca

SEQ ID NO: 2517864 - RNA, 15 nt, Human
agucaaugugcagug

SEQ ID NO: 2517865 - RNA, 14 nt, Human
agucaaugugcagu

SEQ ID NO: 2517866 - RNA, 23 nt, Human
agucaauguuuucaguucucuug

SEQ ID NO: 2517867 - RNA, 22 nt, Human
agucacacaguauuacuucugc

SEQ ID NO: 2517868 - RNA, 16 nt, Human
agucacaagagcccag

SEQ ID NO: 2517869 - RNA, 22 nt, Human
aguacuacaguccucccaucuc

SEQ ID NO: 2517870 - RNA, 19 nt, Human
aguacuacaguccucccau

SEQ ID NO: 2517871 - RNA, 14 nt, Human
aguacuauaauuua

SEQ ID NO: 2517872 - RNA, 23 nt, Human
aguacuaacuccuaggaaaauac

SEQ ID NO: 2517873 - RNA, 16 nt, Human
aguacguugugcauuu

SEQ ID NO: 2517874 - RNA, 17 nt, Human
aguacguugugcauuug

SEQ ID NO: 2517875 - RNA, 18 nt, Human
aguacguugugcauuugg

SEQ ID NO: 2517876 - RNA, 22 nt, Human
aguaagcccuugaagauaucuu

SEQ ID NO: 2517877 - RNA, 22 nt, Human
aguacuucuccacccugcucuc

SEQ ID NO: 2517878 - RNA, 12 nt, Human
aguacuucuuuu

SEQ ID NO: 2517879 - RNA, 17 nt, Human
aguacuucuccacccug

SEQ ID NO: 2517880 - RNA, 12 nt, Human
aguacuauguau

SEQ ID NO: 2517881 - RNA, 14 nt, Human
aguacuauguauca

SEQ ID NO: 2517882 - RNA, 16 nt, Human
aguacuguguacagaa

SEQ ID NO: 2517883 - RNA, 20 nt, Human
aguacuggcugauggaguaa

SEQ ID NO: 2517884 - RNA, 22 nt, Human
aguaaaugcuagguuaauucca

SEQ ID NO: 2517885 - RNA, 11 nt, Human
aguaaaugcua

SEQ ID NO: 2517886 - RNA, 23 nt, Human
aguaaaugcuagguuaauuccaa

SEQ ID NO: 2517887 - RNA, 15 nt, Human
aguaaaucuuuuaca

SEQ ID NO: 2517888 - RNA, 22 nt, Human
aguaaauggcuuauccagcugg

SEQ ID NO: 2517889 - RNA, 19 nt, Human
aguaacaaugaagauaaaa

SEQ ID NO: 2517890 - RNA, 13 nt, Human
aggucuguucuuu

SEQ ID NO: 2517891 - RNA, 15 nt, Human
aggucuguucuuucc

SEQ ID NO: 2517892 - RNA, 16 nt, Human
aggucuguucuuucca

SEQ ID NO: 2517893 - RNA, 14 nt, Human
aguaaauauuucag

SEQ ID NO: 2517894 - RNA, 15 nt, Human
aguacguugugcauu

SEQ ID NO: 2517895 - RNA, 14 nt, Human
aguacguugugcau

SEQ ID NO: 2517896 - RNA, 19 nt, Human
aguaagagcuggugucuga

SEQ ID NO: 2517897 - RNA, 14 nt, Human
aguaagaagacaug

SEQ ID NO: 2517898 - RNA, 15 nt, Human
aguaagaagacauga

SEQ ID NO: 2517899 - RNA, 16 nt, Human
aguaagaagacaugaa

SEQ ID NO: 2517900 - RNA, 12 nt, Human
aguaagagcugg

SEQ ID NO: 2517901 - RNA, 14 nt, Human
aguaagagcuggug

SEQ ID NO: 2517902 - RNA, 23 nt, Human
aguaacaggaaaccacuuaucac

SEQ ID NO: 2517903 - RNA, 17 nt, Human
aguaacaugaggggaca

SEQ ID NO: 2517904 - RNA, 16 nt, Human
aguaagaaaauauuuu

SEQ ID NO: 2517905 - RNA, 14 nt, Human
aguaagaaaauauu

SEQ ID NO: 2517906 - RNA, 20 nt, Human
aguaagaaagugaagcaaau

SEQ ID NO: 2517907 - RNA, 17 nt, Human
aguaagaaccuugccug

SEQ ID NO: 2517908 - RNA, 23 nt, Human
aguaagaaaauauuuugucuaaa

SEQ ID NO: 2517909 - RNA, 21 nt, Human
aguaagaaagugaagcaaauc

SEQ ID NO: 2517910 - RNA, 14 nt, Human
aguaaccauuugca

SEQ ID NO: 2517911 - RNA, 23 nt, Human
aguaaccaucacugguugcacuu

SEQ ID NO: 2517912 - RNA, 13 nt, Human
aguaagaaaauau

SEQ ID NO: 2517913 - RNA, 12 nt, Human
aguaagaaaaua

SEQ ID NO: 2517914 - RNA, 19 nt, Human
aguugaaaagacuccaaag

SEQ ID NO: 2517915 - RNA, 20 nt, Human
aguugaaaagacuccaaaga

SEQ ID NO: 2517916 - RNA, 18 nt, Human
aguugaaaagacuccaaa

SEQ ID NO: 2517917 - RNA, 22 nt, Human
aguucaucuugaauuguaagga

SEQ ID NO: 2517918 - RNA, 22 nt, Human
aguugacaaaaagcucuuacac

SEQ ID NO: 2517919 - RNA, 13 nt, Human
aguugacagcagg

SEQ ID NO: 2517920 - RNA, 17 nt, Human
aguugacaugagauuua

SEQ ID NO: 2517921 - RNA, 20 nt, Human
aguugagccagcagacauug

SEQ ID NO: 2517922 - RNA, 19 nt, Human
aguugagccagcagacauu

SEQ ID NO: 2517923 - RNA, 16 nt, Human
aguugagccagcagac

SEQ ID NO: 2517924 - RNA, 15 nt, Human
aguugagccagcaga

SEQ ID NO: 2517925 - RNA, 22 nt, Human
aguugacuugacagaacacugu

SEQ ID NO: 2517926 - RNA, 16 nt, Human
aguugauacuacaguu

SEQ ID NO: 2517927 - RNA, 17 nt, Human
aguugagugauagagcu

SEQ ID NO: 2517928 - RNA, 20 nt, Human
aguugagucgucaucacuuu

SEQ ID NO: 2517929 - RNA, 16 nt, Human
aguugagccccaaguc

SEQ ID NO: 2517930 - RNA, 12 nt, Human
aguugagcccca

SEQ ID NO: 2517931 - RNA, 11 nt, Human
aguugagcccc

SEQ ID NO: 2517932 - RNA, 21 nt, Human
aguugagccagcagacauugu

SEQ ID NO: 2517933 - RNA, 21 nt, Human
aguugagccccaaguccugaa

SEQ ID NO: 2517934 - RNA, 13 nt, Human
aguugucuaaaca

SEQ ID NO: 2517935 - RNA, 13 nt, Human
aguugucuugucc

SEQ ID NO: 2517936 - RNA, 19 nt, Human
aguugugccuuuuauagcu

SEQ ID NO: 2517937 - RNA, 18 nt, Human
aguugugccuuuuauagc

SEQ ID NO: 2517938 - RNA, 15 nt, Human
aguugugccuuuuau

SEQ ID NO: 2517939 - RNA, 21 nt, Human
aguugugaccuuaguguuucu

SEQ ID NO: 2517940 - RNA, 22 nt, Human
aguugugccuuuuauagcuauu

SEQ ID NO: 2517941 - RNA, 21 nt, Human
aguugugccuuuuauagcuau

SEQ ID NO: 2517942 - RNA, 14 nt, Human
aguugugcuuguuu

SEQ ID NO: 2517943 - RNA, 22 nt, Human
aguugugaguuuaccuuguaua

SEQ ID NO: 2517944 - RNA, 18 nt, Human
aguugugcacauggcuua

SEQ ID NO: 2517945 - RNA, 18 nt, Human
aguugugaccuuaguguu

SEQ ID NO: 2517946 - RNA, 19 nt, Human
aguucaucuugaauuguaa

SEQ ID NO: 2517947 - RNA, 15 nt, Human
aguucaucuugaauu

SEQ ID NO: 2517948 - RNA, 13 nt, Human
aguucaucuugaa

SEQ ID NO: 2517949 - RNA, 18 nt, Human
aguucagguaacaggcag

SEQ ID NO: 2517950 - RNA, 21 nt, Human
aguucaggagucccaaggaaa

SEQ ID NO: 2517951 - RNA, 19 nt, Human
aguucaggagucccaagga

SEQ ID NO: 2517952 - RNA, 20 nt, Human
aguucaggagucccaaggaa

SEQ ID NO: 2517953 - RNA, 14 nt, Human
aguucagcuugggg

SEQ ID NO: 2517954 - RNA, 16 nt, Human
aguucaggagucccaa

SEQ ID NO: 2517955 - RNA, 15 nt, Human
aguucagcaccaccc

SEQ ID NO: 2517956 - RNA, 17 nt, Human
aguucagcaccacccua

SEQ ID NO: 2517957 - RNA, 18 nt, Human
aguucagcaccacccuag

SEQ ID NO: 2517958 - RNA, 13 nt, Human
aguucagcuuggg

SEQ ID NO: 2517959 - RNA, 15 nt, Human
agugccuuauggaac

SEQ ID NO: 2517960 - RNA, 14 nt, Human
agugccuuauggaa

SEQ ID NO: 2517961 - RNA, 13 nt, Human
agugccuuaugga

SEQ ID NO: 2517962 - RNA, 10 nt, Human
agugccuuau

SEQ ID NO: 2517963 - RNA, 18 nt, Human
agugcuaagugugaacug

SEQ ID NO: 2517964 - RNA, 17 nt, Human
agugcuaagugugaacu

SEQ ID NO: 2517965 - RNA, 16 nt, Human
agugcuaagugugaac

SEQ ID NO: 2517966 - RNA, 15 nt, Human
agugcuaagugugaa

SEQ ID NO: 2517967 - RNA, 15 nt, Human
agugcuaauuuugaa

SEQ ID NO: 2517968 - RNA, 16 nt, Human
agugccuuauggaaca

SEQ ID NO: 2517969 - RNA, 14 nt, Human
agugcuaaguguga

SEQ ID NO: 2517970 - RNA, 23 nt, Human
agugccuuaccuccugcccagga

SEQ ID NO: 2517971 - RNA, 21 nt, Human
agugccuuaccuccugcccag

SEQ ID NO: 2517972 - RNA, 22 nt, Human
agugccuuaccuccugcccagg

SEQ ID NO: 2517973 - RNA, 20 nt, Human
agugcucgcuguugcugaau

SEQ ID NO: 2517974 - RNA, 19 nt, Human
agugcucgcuguugcugaa

SEQ ID NO: 2517975 - RNA, 18 nt, Human
agugcucgcuguugcuga

SEQ ID NO: 2517976 - RNA, 17 nt, Human
agugcucgcuguugcug

SEQ ID NO: 2517977 - RNA, 16 nt, Human
agugcucgcuguugcu

SEQ ID NO: 2517978 - RNA, 15 nt, Human
agugcucgcuguugc

SEQ ID NO: 2517979 - RNA, 22 nt, Human
agugcuaagugugaacuggacc

SEQ ID NO: 2517980 - RNA, 19 nt, Human
agugcuaagugugaacugg

SEQ ID NO: 2517981 - RNA, 20 nt, Human
agugcuaauuuugaaaaacu

SEQ ID NO: 2517982 - RNA, 18 nt, Human
agugcuaauuuugaaaaa

SEQ ID NO: 2517983 - RNA, 23 nt, Human
agugcucgcuguugcugaauagg

SEQ ID NO: 2517984 - RNA, 22 nt, Human
agugcucgcuguugcugaauag

SEQ ID NO: 2517985 - RNA, 18 nt, Human
agugcucgcuuucuaugu

SEQ ID NO: 2517986 - RNA, 12 nt, Human
agugcucgcuuu

SEQ ID NO: 2517987 - RNA, 11 nt, Human
agugcucugau

SEQ ID NO: 2517988 - RNA, 12 nt, Human
agugcucugaua

SEQ ID NO: 2517989 - RNA, 20 nt, Human
agugcucgcuuucuauguag

SEQ ID NO: 2517990 - RNA, 16 nt, Human
agugcucugaucccuc

SEQ ID NO: 2517991 - RNA, 17 nt, Human
agugcucugaucccucu

SEQ ID NO: 2517992 - RNA, 21 nt, Human
agugcucugaucccucuacag

SEQ ID NO: 2517993 - RNA, 15 nt, Human
agugcugaacagugg

SEQ ID NO: 2517994 - RNA, 14 nt, Human
agugcugaacagug

SEQ ID NO: 2517995 - RNA, 22 nt, Human
aguggccucaacccucccucag

SEQ ID NO: 2517996 - RNA, 15 nt, Human
aguggccucaacccu

SEQ ID NO: 2517997 - RNA, 20 nt, Human
aguggccucaacccucccuc

SEQ ID NO: 2517998 - RNA, 21 nt, Human
aguggccucaacccucccuca

SEQ ID NO: 2517999 - RNA, 24 nt, Human
agugauccucccaccucagccucc

SEQ ID NO: 2518000 - RNA, 23 nt, Human
agugauccucccaccucagccuc

SEQ ID NO: 2518001 - RNA, 18 nt, Human
agugauccucccaccuca

SEQ ID NO: 2518002 - RNA, 15 nt, Human
agugauccucccacc

SEQ ID NO: 2518003 - RNA, 14 nt, Human
agugauccucccac

SEQ ID NO: 2518004 - RNA, 17 nt, Human
agugauucuccugccuc

SEQ ID NO: 2518005 - RNA, 15 nt, Human
agugauucuccugcc

SEQ ID NO: 2518006 - RNA, 18 nt, Human
agugccuuacacaauggu

SEQ ID NO: 2518007 - RNA, 18 nt, Human
agugauggagcagagcaa

SEQ ID NO: 2518008 - RNA, 14 nt, Human
agugauggagcaga

SEQ ID NO: 2518009 - RNA, 16 nt, Human
agugccuuaccuccug

SEQ ID NO: 2518010 - RNA, 17 nt, Human
agugccuuaccuccugc

SEQ ID NO: 2518011 - RNA, 18 nt, Human
agugccuuaccuccugcc

SEQ ID NO: 2518012 - RNA, 19 nt, Human
agugccuuaccuccugccc

SEQ ID NO: 2518013 - RNA, 20 nt, Human
agugccuuaccuccugccca

SEQ ID NO: 2518014 - RNA, 21 nt, Human
agugauucucaugccucagcc

SEQ ID NO: 2518015 - RNA, 14 nt, Human
agugauucuccugc

SEQ ID NO: 2518016 - RNA, 16 nt, Human
agugauccuuacaagu

SEQ ID NO: 2518017 - RNA, 13 nt, Human
agugaucuccaua

SEQ ID NO: 2518018 - RNA, 14 nt, Human
agugaucuccauau

SEQ ID NO: 2518019 - RNA, 21 nt, Human
agugaucuccauauguuacac

SEQ ID NO: 2518020 - RNA, 21 nt, Human
agugaugcugugcuaugaauu

SEQ ID NO: 2518021 - RNA, 13 nt, Human
agugucuggcugc

SEQ ID NO: 2518022 - RNA, 14 nt, Human
agugucuggcugca

SEQ ID NO: 2518023 - RNA, 14 nt, Human
agugucugggcuga

SEQ ID NO: 2518024 - RNA, 16 nt, Human
agugucuggcacacag

SEQ ID NO: 2518025 - RNA, 19 nt, Human
agugucucaguccaccuga

SEQ ID NO: 2518026 - RNA, 22 nt, Human
agugucucaguccaccugagcu

SEQ ID NO: 2518027 - RNA, 19 nt, Human
agugucugggcugacuggg

SEQ ID NO: 2518028 - RNA, 22 nt, Human
agugucuguaucggagacagug

SEQ ID NO: 2518029 - RNA, 22 nt, Human
agugucugucccgggguccugu

SEQ ID NO: 2518030 - RNA, 13 nt, Human
agugucugugugc

SEQ ID NO: 2518031 - RNA, 22 nt, Human
agugucugugugcaagugugug

SEQ ID NO: 2518032 - RNA, 21 nt, Human
agugggacagggcauggccag

SEQ ID NO: 2518033 - RNA, 19 nt, Human
agugggacagggcauggcc

SEQ ID NO: 2518034 - RNA, 20 nt, Human
agugggaacgugacugcccc

SEQ ID NO: 2518035 - RNA, 15 nt, Human
agugggacagagucu

SEQ ID NO: 2518036 - RNA, 17 nt, Human
agugggaggggcaggcu

SEQ ID NO: 2518037 - RNA, 16 nt, Human
agugggaggggcaggc

SEQ ID NO: 2518038 - RNA, 15 nt, Human
agugggaggggcagg

SEQ ID NO: 2518039 - RNA, 14 nt, Human
agugggaggggcag

SEQ ID NO: 2518040 - RNA, 13 nt, Human
agugggaggggca

SEQ ID NO: 2518041 - RNA, 12 nt, Human
agugggaggggc

SEQ ID NO: 2518042 - RNA, 11 nt, Human
agugggagggg

SEQ ID NO: 2518043 - RNA, 16 nt, Human
agugggaggcgcgagc

SEQ ID NO: 2518044 - RNA, 17 nt, Human
agugggacagagucugg

SEQ ID NO: 2518045 - RNA, 14 nt, Human
aguggccucuuugu

SEQ ID NO: 2518046 - RNA, 15 nt, Human
aguggccucuuuguc

SEQ ID NO: 2518047 - RNA, 21 nt, Human
aguggccucuuugucuaaaac

SEQ ID NO: 2518048 - RNA, 23 nt, Human
aguggccucuuugucuaaaacaa

SEQ ID NO: 2518049 - RNA, 13 nt, Human
aguggccuggcca

SEQ ID NO: 2518050 - RNA, 14 nt, Human
aguggccuggccag

SEQ ID NO: 2518051 - RNA, 15 nt, Human
aguggccuggccagg

SEQ ID NO: 2518052 - RNA, 18 nt, Human
aguggccuggccaggagc

SEQ ID NO: 2518053 - RNA, 19 nt, Human
aguggccuggccaggagcu

SEQ ID NO: 2518054 - RNA, 20 nt, Human
aguggccuggccaggagcuc

SEQ ID NO: 2518055 - RNA, 22 nt, Human
aguggccuggccaggagcucuu

SEQ ID NO: 2518056 - RNA, 23 nt, Human
aguggccuggccaggagcucuuc

SEQ ID NO: 2518057 - RNA, 21 nt, Human
aguggcuuuuuuccuccugug

SEQ ID NO: 2518058 - RNA, 19 nt, Human
aguggcuuuuuuccuccug

SEQ ID NO: 2518059 - RNA, 17 nt, Human
aguggcuuuaaugaaua

SEQ ID NO: 2518060 - RNA, 19 nt, Human
agugucaaugcagccccca

SEQ ID NO: 2518061 - RNA, 21 nt, Human
agugggccaggacaggcccgg

SEQ ID NO: 2518062 - RNA, 17 nt, Human
agugucaaguugugcuu

SEQ ID NO: 2518063 - RNA, 20 nt, Human
agugucaaguugugcuuguu

SEQ ID NO: 2518064 - RNA, 19 nt, Human
agugucaaguugugcuugu

SEQ ID NO: 2518065 - RNA, 18 nt, Human
agugucaaguugugcuug

SEQ ID NO: 2518066 - RNA, 14 nt, Human
agugggccagugug

SEQ ID NO: 2518067 - RNA, 19 nt, Human
agugggaggggcaggcuga

SEQ ID NO: 2518068 - RNA, 18 nt, Human
agugggaggggcaggcug

SEQ ID NO: 2518069 - RNA, 22 nt, Human
agugggaggggcaggcugacau

SEQ ID NO: 2518070 - RNA, 14 nt, Human
agugcucgcuguug

SEQ ID NO: 2518071 - RNA, 20 nt, Human
agugggaucugucacaccag

SEQ ID NO: 2518072 - RNA, 13 nt, Human
agugggccaggac

SEQ ID NO: 2518073 - RNA, 15 nt, Human
agugggccaggacag

SEQ ID NO: 2518074 - RNA, 16 nt, Human
agugggccaggacagg

SEQ ID NO: 2518075 - RNA, 19 nt, Human
agugggccaggacaggccc

SEQ ID NO: 2518076 - RNA, 20 nt, Human
agugggccaggacaggcccg

SEQ ID NO: 2518077 - RNA, 12 nt, Human
agugucuggcug

SEQ ID NO: 2518078 - RNA, 22 nt, Human
agugucucggagggauuccccu

SEQ ID NO: 2518079 - RNA, 14 nt, Human
agugucuaaaaaca

SEQ ID NO: 2518080 - RNA, 15 nt, Human
agugucucacacugg

SEQ ID NO: 2518081 - RNA, 18 nt, Human
agugucucaguccaccug

SEQ ID NO: 2518082 - RNA, 20 nt, Human
agugucauauguaggugucu

SEQ ID NO: 2518083 - RNA, 22 nt, Human
agugucaaguugugcuuguuua

SEQ ID NO: 2518084 - RNA, 20 nt, Human
agugucaucagaagauaacu

SEQ ID NO: 2518085 - RNA, 16 nt, Human
agugucaucagaagau

SEQ ID NO: 2518086 - RNA, 19 nt, Human
agugucauuuaugaaaaga

SEQ ID NO: 2518087 - RNA, 19 nt, Human
agugucacuuaccuagauu

SEQ ID NO: 2518088 - RNA, 21 nt, Human
agugucacuuaccuagauuua

SEQ ID NO: 2518089 - RNA, 14 nt, Human
agugucaggaggaa

SEQ ID NO: 2518090 - RNA, 15 nt, Human
augcugcccugugag

SEQ ID NO: 2518091 - RNA, 14 nt, Human
augcugcccuguga

SEQ ID NO: 2518092 - RNA, 20 nt, Human
augcugauguucaguguaau

SEQ ID NO: 2518093 - RNA, 12 nt, Human
augcugcccugu

SEQ ID NO: 2518094 - RNA, 19 nt, Human
augcugauguucaguguaa

SEQ ID NO: 2518095 - RNA, 18 nt, Human
augcugauguucagugua

SEQ ID NO: 2518096 - RNA, 17 nt, Human
augcugauguucagugu

SEQ ID NO: 2518097 - RNA, 16 nt, Human
augcugauguucagug

SEQ ID NO: 2518098 - RNA, 13 nt, Human
augcugcccugug

SEQ ID NO: 2518099 - RNA, 16 nt, Human
augcugcccugugagu

SEQ ID NO: 2518100 - RNA, 15 nt, Human
augcugccuccagaa

SEQ ID NO: 2518101 - RNA, 12 nt, Human
augcugccucca

SEQ ID NO: 2518102 - RNA, 18 nt, Human
augcugccugccugucug

SEQ ID NO: 2518103 - RNA, 17 nt, Human
augcugccugccugucu

SEQ ID NO: 2518104 - RNA, 15 nt, Human
augcugccugccugu

SEQ ID NO: 2518105 - RNA, 14 nt, Human
augcugccugccug

SEQ ID NO: 2518106 - RNA, 16 nt, Human
augcugcgcccuuccc

SEQ ID NO: 2518107 - RNA, 18 nt, Human
augcugcgcccuucccca

SEQ ID NO: 2518108 - RNA, 17 nt, Human
augcugccuaggcugac

SEQ ID NO: 2518109 - RNA, 19 nt, Human
augcugccuaggcugaccu

SEQ ID NO: 2518110 - RNA, 12 nt, Human
augcugccugag

SEQ ID NO: 2518111 - RNA, 13 nt, Human
augcugccugccu

SEQ ID NO: 2518112 - RNA, 11 nt, Human
augcugccugc

SEQ ID NO: 2518113 - RNA, 13 nt, Human
augcugccugagu

SEQ ID NO: 2518114 - RNA, 15 nt, Human
augcugauguucagu

SEQ ID NO: 2518115 - RNA, 12 nt, Human
augcugauguuc

SEQ ID NO: 2518116 - RNA, 16 nt, Human
augcugauguccucac

SEQ ID NO: 2518117 - RNA, 18 nt, Human
augcugagucucccaagg

SEQ ID NO: 2518118 - RNA, 14 nt, Human
augcugagucuccc

SEQ ID NO: 2518119 - RNA, 22 nt, Human
augcugaguauguuaagcucuu

SEQ ID NO: 2518120 - RNA, 14 nt, Human
augcugauguccuc

SEQ ID NO: 2518121 - RNA, 22 nt, Human
augcugaggccugggccgcugc

SEQ ID NO: 2518122 - RNA, 18 nt, Human
augcugaggccugggccg

SEQ ID NO: 2518123 - RNA, 17 nt, Human
augcugaggccugggcc

SEQ ID NO: 2518124 - RNA, 15 nt, Human
augcugaggccuggg

SEQ ID NO: 2518125 - RNA, 14 nt, Human
augcugaggccugg

SEQ ID NO: 2518126 - RNA, 21 nt, Human
augcugagauuacagguguga

SEQ ID NO: 2518127 - RNA, 23 nt, Human
augcugaauauacagcaggugcu

SEQ ID NO: 2518128 - RNA, 12 nt, Human
augcugaaggga

SEQ ID NO: 2518129 - RNA, 19 nt, Human
augcugacauucaccugcc

SEQ ID NO: 2518130 - RNA, 20 nt, Human
augcugacauucaccugccc

SEQ ID NO: 2518131 - RNA, 21 nt, Human
augcugacuguacuccuccca

SEQ ID NO: 2518132 - RNA, 20 nt, Human
augcugacuguacuccuccc

SEQ ID NO: 2518133 - RNA, 22 nt, Human
augcugacauucaccugcccca

SEQ ID NO: 2518134 - RNA, 19 nt, Human
augcugacuguacuccucc

SEQ ID NO: 2518135 - RNA, 17 nt, Human
auggcuuugugauucaa

SEQ ID NO: 2518136 - RNA, 18 nt, Human
auggcuuuugugcauuau

SEQ ID NO: 2518137 - RNA, 16 nt, Human
auggcuuuugugcauu

SEQ ID NO: 2518138 - RNA, 17 nt, Human
auggcuuuugugcauua

SEQ ID NO: 2518139 - RNA, 19 nt, Human
auggauaaccuauaugauu

SEQ ID NO: 2518140 - RNA, 18 nt, Human
auggauaaccuauaugau

SEQ ID NO: 2518141 - RNA, 22 nt, Human
auggauaaugccggugagaaua

SEQ ID NO: 2518142 - RNA, 21 nt, Human
auggauaaugccggugagaau

SEQ ID NO: 2518143 - RNA, 17 nt, Human
auggauaggcacaggaa

SEQ ID NO: 2518144 - RNA, 18 nt, Human
auggauaggcacaggaaa

SEQ ID NO: 2518145 - RNA, 22 nt, Human
auggauauaguuuuacuuuuaa

SEQ ID NO: 2518146 - RNA, 15 nt, Human
auggcugugaggaug

SEQ ID NO: 2518147 - RNA, 14 nt, Human
auggcugugaggau

SEQ ID NO: 2518148 - RNA, 13 nt, Human
auggcugugagga

SEQ ID NO: 2518149 - RNA, 20 nt, Human
auggcugucucaaaccaagc

SEQ ID NO: 2518150 - RNA, 23 nt, Human
auggcugggaacugcagaccugu

SEQ ID NO: 2518151 - RNA, 22 nt, Human
auggcugggaacugcagaccug

SEQ ID NO: 2518152 - RNA, 21 nt, Human
auggcugggaacugcagaccu

SEQ ID NO: 2518153 - RNA, 23 nt, Human
auggcuggccacugcacagagcu

SEQ ID NO: 2518154 - RNA, 22 nt, Human
auggcuggccacugcacagagc

SEQ ID NO: 2518155 - RNA, 21 nt, Human
auggcuggccacugcacagag

SEQ ID NO: 2518156 - RNA, 16 nt, Human
auggcuggccacugca

SEQ ID NO: 2518157 - RNA, 15 nt, Human
auggcuggccacugc

SEQ ID NO: 2518158 - RNA, 17 nt, Human
auggcugugccucugcc

SEQ ID NO: 2518159 - RNA, 16 nt, Human
auggcugugccucugc

SEQ ID NO: 2518160 - RNA, 15 nt, Human
auggcugugccucug

SEQ ID NO: 2518161 - RNA, 24 nt, Human
auggagguuucauacucuagauuu

SEQ ID NO: 2518162 - RNA, 20 nt, Human
auggaguccagggaagagaa

SEQ ID NO: 2518163 - RNA, 18 nt, Human
auggaggggugguccuga

SEQ ID NO: 2518164 - RNA, 20 nt, Human
auggaggggugguccugacu

SEQ ID NO: 2518165 - RNA, 22 nt, Human
auggaggggugguccugacuca

SEQ ID NO: 2518166 - RNA, 16 nt, Human
auggagggaauaauac

SEQ ID NO: 2518167 - RNA, 15 nt, Human
auggaggccuguccu

SEQ ID NO: 2518168 - RNA, 17 nt, Human
auggaggcagaauccug

SEQ ID NO: 2518169 - RNA, 12 nt, Human
auggaggccugu

SEQ ID NO: 2518170 - RNA, 19 nt, Human
auggaggcacacagcugca

SEQ ID NO: 2518171 - RNA, 16 nt, Human
augcuuguacauaaug

SEQ ID NO: 2518172 - RNA, 15 nt, Human
augcuuguacauaau

SEQ ID NO: 2518173 - RNA, 13 nt, Human
augcuuuaaacau

SEQ ID NO: 2518174 - RNA, 13 nt, Human
augcuuguguuau

SEQ ID NO: 2518175 - RNA, 19 nt, Human
augcugcgcccuuccccag

SEQ ID NO: 2518176 - RNA, 18 nt, Human
augcuuuaggauguacag

SEQ ID NO: 2518177 - RNA, 16 nt, Human
augccuuacucuucuu

SEQ ID NO: 2518178 - RNA, 18 nt, Human
augccuuacucuucuuga

SEQ ID NO: 2518179 - RNA, 18 nt, Human
augccuuccagcacccug

SEQ ID NO: 2518180 - RNA, 16 nt, Human
augccuuccccugggc

SEQ ID NO: 2518181 - RNA, 19 nt, Human
augccuuccagcacccugc

SEQ ID NO: 2518182 - RNA, 14 nt, Human
augccuucuuauug

SEQ ID NO: 2518183 - RNA, 15 nt, Human
augccuucuccagac

SEQ ID NO: 2518184 - RNA, 20 nt, Human
augccuucuuauugcuuuua

SEQ ID NO: 2518185 - RNA, 22 nt, Human
augccuuuaaaguaugaaucua

SEQ ID NO: 2518186 - RNA, 21 nt, Human
augccuuuaaaguaugaaucu

SEQ ID NO: 2518187 - RNA, 17 nt, Human
augccuuuaaaguauga

SEQ ID NO: 2518188 - RNA, 20 nt, Human
augccuuuaaaucugugaug

SEQ ID NO: 2518189 - RNA, 19 nt, Human
augcacagaguuguuacau

SEQ ID NO: 2518190 - RNA, 21 nt, Human
augcacagaguuguuacauuu

SEQ ID NO: 2518191 - RNA, 22 nt, Human
augcacagaguuguuacauuuu

SEQ ID NO: 2518192 - RNA, 14 nt, Human
augcaugugaagaa

SEQ ID NO: 2518193 - RNA, 13 nt, Human
augcaugugaaga

SEQ ID NO: 2518194 - RNA, 17 nt, Human
augcauguccuguaaag

SEQ ID NO: 2518195 - RNA, 13 nt, Human
augcacacauuuu

SEQ ID NO: 2518196 - RNA, 14 nt, Human
augcacacauuuuu

SEQ ID NO: 2518197 - RNA, 15 nt, Human
augcacacauuuuuu

SEQ ID NO: 2518198 - RNA, 22 nt, Human
augcacacaaaacaacccuaga

SEQ ID NO: 2518199 - RNA, 15 nt, Human
augcacacaaaacaa

SEQ ID NO: 2518200 - RNA, 14 nt, Human
augcacacaaaaca

SEQ ID NO: 2518201 - RNA, 21 nt, Human
augcacacagugcuuuccgug

SEQ ID NO: 2518202 - RNA, 20 nt, Human
augcauguuuuccagcuccu

SEQ ID NO: 2518203 - RNA, 22 nt, Human
augcauuauaggaucauuuguu

SEQ ID NO: 2518204 - RNA, 21 nt, Human
augcauucuugguuggcuggc

SEQ ID NO: 2518205 - RNA, 16 nt, Human
augccugagugccugg

SEQ ID NO: 2518206 - RNA, 17 nt, Human
augccugaggguggaga

SEQ ID NO: 2518207 - RNA, 21 nt, Human
augcauuauaggaucauuugu

SEQ ID NO: 2518208 - RNA, 17 nt, Human
augcauuaaaagaaaau

SEQ ID NO: 2518209 - RNA, 20 nt, Human
augcauuaaaagaaaauaaa

SEQ ID NO: 2518210 - RNA, 19 nt, Human
augcauguuuuccagcucc

SEQ ID NO: 2518211 - RNA, 16 nt, Human
augcaugugaagaaag

SEQ ID NO: 2518212 - RNA, 17 nt, Human
augcaugugaagaaagg

SEQ ID NO: 2518213 - RNA, 15 nt, Human
augcauuaaaagaaa

SEQ ID NO: 2518214 - RNA, 16 nt, Human
augcauuaaaagaaaa

SEQ ID NO: 2518215 - RNA, 20 nt, Human
augccuggauggggcugcac

SEQ ID NO: 2518216 - RNA, 17 nt, Human
augccuguccagccugg

SEQ ID NO: 2518217 - RNA, 18 nt, Human
augccuguccagccuggg

SEQ ID NO: 2518218 - RNA, 19 nt, Human
augccuggauggggcugca

SEQ ID NO: 2518219 - RNA, 20 nt, Human
augccugagugccuggccaa

SEQ ID NO: 2518220 - RNA, 19 nt, Human
augccugagugccuggcca

SEQ ID NO: 2518221 - RNA, 19 nt, Human
augccugccccaaacaaau

SEQ ID NO: 2518222 - RNA, 21 nt, Human
augccugauugccaagcucag

SEQ ID NO: 2518223 - RNA, 16 nt, Human
augccugcggaguugu

SEQ ID NO: 2518224 - RNA, 16 nt, Human
augaucuuuaaaauac

SEQ ID NO: 2518225 - RNA, 17 nt, Human
augaucuuugcagacag

SEQ ID NO: 2518226 - RNA, 14 nt, Human
augaucuugugaca

SEQ ID NO: 2518227 - RNA, 15 nt, Human
augaucuugugacau

SEQ ID NO: 2518228 - RNA, 13 nt, Human
augaugaaaauau

SEQ ID NO: 2518229 - RNA, 15 nt, Human
augaugaaaauauuu

SEQ ID NO: 2518230 - RNA, 21 nt, Human
augaucuuugcagacaggcaa

SEQ ID NO: 2518231 - RNA, 19 nt, Human
augaucuuugcagacaggc

SEQ ID NO: 2518232 - RNA, 18 nt, Human
augaucuuugcagacagg

SEQ ID NO: 2518233 - RNA, 22 nt, Human
augcacaaauucugucucugga

SEQ ID NO: 2518234 - RNA, 15 nt, Human
augcacaaauucugu

SEQ ID NO: 2518235 - RNA, 23 nt, Human
augcacaaauucugucucuggau

SEQ ID NO: 2518236 - RNA, 13 nt, Human
augauguauauuu

SEQ ID NO: 2518237 - RNA, 21 nt, Human
augauguagugccucuuucau

SEQ ID NO: 2518238 - RNA, 12 nt, Human
augauguauauu

SEQ ID NO: 2518239 - RNA, 18 nt, Human
augcacaaacagaggccg

SEQ ID NO: 2518240 - RNA, 20 nt, Human
augauguaaguuuaccuaug

SEQ ID NO: 2518241 - RNA, 18 nt, Human
augaugguugcaaaagac

SEQ ID NO: 2518242 - RNA, 16 nt, Human
augauggugcugaccu

SEQ ID NO: 2518243 - RNA, 16 nt, Human
augaugggucaguugu

SEQ ID NO: 2518244 - RNA, 16 nt, Human
augauggguguuuuua

SEQ ID NO: 2518245 - RNA, 15 nt, Human
augauggaugccaau

SEQ ID NO: 2518246 - RNA, 19 nt, Human
augauggaugccaauauua

SEQ ID NO: 2518247 - RNA, 19 nt, Human
augauggcaauuuuguaac

SEQ ID NO: 2518248 - RNA, 21 nt, Human
augaugaucuuuaaaauacac

SEQ ID NO: 2518249 - RNA, 18 nt, Human
augaugaugggaauugug

SEQ ID NO: 2518250 - RNA, 15 nt, Human
augauggagucaggu

SEQ ID NO: 2518251 - RNA, 15 nt, Human
augaugaugggaauu

SEQ ID NO: 2518252 - RNA, 22 nt, Human
augaugauccggauuuaauuug

SEQ ID NO: 2518253 - RNA, 20 nt, Human
augaugauguggaagaacuu

SEQ ID NO: 2518254 - RNA, 18 nt, Human
augaugaucuuuaaaaua

SEQ ID NO: 2518255 - RNA, 15 nt, Human
augaugauccuaggc

SEQ ID NO: 2518256 - RNA, 23 nt, Human
augaugaaaugaggucagagccu

SEQ ID NO: 2518257 - RNA, 12 nt, Human
augaugaaugag

SEQ ID NO: 2518258 - RNA, 15 nt, Human
augaugaaugagaau

SEQ ID NO: 2518259 - RNA, 18 nt, Human
augaugaaaugaggucag

SEQ ID NO: 2518260 - RNA, 19 nt, Human
augaugaaaauauuuaaag

SEQ ID NO: 2518261 - RNA, 20 nt, Human
augaucuuucuuuccuuucu

SEQ ID NO: 2518262 - RNA, 15 nt, Human
augaucuuuucaagu

SEQ ID NO: 2518263 - RNA, 14 nt, Human
auguuugccucugc

SEQ ID NO: 2518264 - RNA, 23 nt, Human
auguuucugcaguagucucugug

SEQ ID NO: 2518265 - RNA, 15 nt, Human
auguuucuucuaggu

SEQ ID NO: 2518266 - RNA, 18 nt, Human
auguuucuuaaaugggcu

SEQ ID NO: 2518267 - RNA, 17 nt, Human
auguuugccucugccuc

SEQ ID NO: 2518268 - RNA, 15 nt, Human
auguuugccucugcc

SEQ ID NO: 2518269 - RNA, 14 nt, Human
auguuuccucuagu

SEQ ID NO: 2518270 - RNA, 22 nt, Human
auguuucugcaguagucucugu

SEQ ID NO: 2518271 - RNA, 17 nt, Human
auguuucucuggcccca

SEQ ID NO: 2518272 - RNA, 19 nt, Human
auguuucucuggccccaag

SEQ ID NO: 2518273 - RNA, 12 nt, Human
auguuucucugg

SEQ ID NO: 2518274 - RNA, 23 nt, Human
auguuucgugaaguauacuguau

SEQ ID NO: 2518275 - RNA, 20 nt, Human
auguuuccucuaguucuuug

SEQ ID NO: 2518276 - RNA, 22 nt, Human
auguuucgcugauauauguguu

SEQ ID NO: 2518277 - RNA, 20 nt, Human
auguuucgugaaguauacug

SEQ ID NO: 2518278 - RNA, 13 nt, Human
auguucucugagg

SEQ ID NO: 2518279 - RNA, 17 nt, Human
auguucucucuucucca

SEQ ID NO: 2518280 - RNA, 17 nt, Human
auguuccuagugaaaga

SEQ ID NO: 2518281 - RNA, 16 nt, Human
auguucucucuucucc

SEQ ID NO: 2518282 - RNA, 14 nt, Human
auguucugggacac

SEQ ID NO: 2518283 - RNA, 17 nt, Human
auguucucugaggacac

SEQ ID NO: 2518284 - RNA, 15 nt, Human
auguucugggacaca

SEQ ID NO: 2518285 - RNA, 21 nt, Human
auguucugugccuguaaacau

SEQ ID NO: 2518286 - RNA, 15 nt, Human
auguguaaggugaac

SEQ ID NO: 2518287 - RNA, 22 nt, Human
auguguaacacagugccuucaa

SEQ ID NO: 2518288 - RNA, 15 nt, Human
auguguaaaauguga

SEQ ID NO: 2518289 - RNA, 15 nt, Human
auguuccuagugaaa

SEQ ID NO: 2518290 - RNA, 16 nt, Human
auguuccuagugaaag

SEQ ID NO: 2518291 - RNA, 14 nt, Human
auguuccacuaacc

SEQ ID NO: 2518292 - RNA, 15 nt, Human
auguuccacuaaccc

SEQ ID NO: 2518293 - RNA, 18 nt, Human
auguguaucggaugcuuu

SEQ ID NO: 2518294 - RNA, 23 nt, Human
auguguagccugugcauguaugu

SEQ ID NO: 2518295 - RNA, 17 nt, Human
auguguagccugugcau

SEQ ID NO: 2518296 - RNA, 16 nt, Human
auguguagccugugca

SEQ ID NO: 2518297 - RNA, 14 nt, Human
auguguagccugug

SEQ ID NO: 2518298 - RNA, 15 nt, Human
auguguagccugugc

SEQ ID NO: 2518299 - RNA, 13 nt, Human
auguguaaguauu

SEQ ID NO: 2518300 - RNA, 13 nt, Human
augguccaggaga

SEQ ID NO: 2518301 - RNA, 16 nt, Human
augguccaggagaagg

SEQ ID NO: 2518302 - RNA, 18 nt, Human
augguccaggagaaggcc

SEQ ID NO: 2518303 - RNA, 19 nt, Human
augguccaggagaaggcca

SEQ ID NO: 2518304 - RNA, 16 nt, Human
auggucccaucugcag

SEQ ID NO: 2518305 - RNA, 20 nt, Human
auggucccauccaggcaguc

SEQ ID NO: 2518306 - RNA, 19 nt, Human
auggucccauccaggcagu

SEQ ID NO: 2518307 - RNA, 18 nt, Human
auggucccauccaggcag

SEQ ID NO: 2518308 - RNA, 17 nt, Human
auggucccauccaggca

SEQ ID NO: 2518309 - RNA, 15 nt, Human
auggucccauccagg

SEQ ID NO: 2518310 - RNA, 14 nt, Human
auggucccauccag

SEQ ID NO: 2518311 - RNA, 13 nt, Human
auggucccaucca

SEQ ID NO: 2518312 - RNA, 20 nt, Human
augguagccaguugaauuua

SEQ ID NO: 2518313 - RNA, 17 nt, Human
augguaggcauuuccua

SEQ ID NO: 2518314 - RNA, 18 nt, Human
augguaggcauuuccuau

SEQ ID NO: 2518315 - RNA, 15 nt, Human
augguaccagauaaa

SEQ ID NO: 2518316 - RNA, 13 nt, Human
augguacuauuua

SEQ ID NO: 2518317 - RNA, 15 nt, Human
augguacccccuucu

SEQ ID NO: 2518318 - RNA, 14 nt, Human
augguacccccuuc

SEQ ID NO: 2518319 - RNA, 17 nt, Human
augguacccccuucugg

SEQ ID NO: 2518320 - RNA, 19 nt, Human
augguacuagggggaagug

SEQ ID NO: 2518321 - RNA, 23 nt, Human
augggugcuuggaggaaggaaac

SEQ ID NO: 2518322 - RNA, 21 nt, Human
augggugcuuggaggaaggaa

SEQ ID NO: 2518323 - RNA, 20 nt, Human
augggugcuuggaggaagga

SEQ ID NO: 2518324 - RNA, 22 nt, Human
auggguuagggaaaacauucca

SEQ ID NO: 2518325 - RNA, 19 nt, Human
auggguguguguuugugug

SEQ ID NO: 2518326 - RNA, 12 nt, Human
augggugugugu

SEQ ID NO: 2518327 - RNA, 13 nt, Human
auggguguguguu

SEQ ID NO: 2518328 - RNA, 22 nt, Human
auggguuuuucccuguacagua

SEQ ID NO: 2518329 - RNA, 16 nt, Human
auggguuggugcuucu

SEQ ID NO: 2518330 - RNA, 14 nt, Human
auggguugcauuug

SEQ ID NO: 2518331 - RNA, 23 nt, Human
augguaaaaguuacuuauucuag

SEQ ID NO: 2518332 - RNA, 14 nt, Human
augguaauuguugc

SEQ ID NO: 2518333 - RNA, 15 nt, Human
augugaacacaucag

SEQ ID NO: 2518334 - RNA, 22 nt, Human
augugaaaaugguccaggagaa

SEQ ID NO: 2518335 - RNA, 16 nt, Human
augugaacagcggcug

SEQ ID NO: 2518336 - RNA, 18 nt, Human
augugaaaucauucauuu

SEQ ID NO: 2518337 - RNA, 17 nt, Human
augugaaaucauucauu

SEQ ID NO: 2518338 - RNA, 16 nt, Human
augucaauuucugugu

SEQ ID NO: 2518339 - RNA, 21 nt, Human
auguauuuauuuaaaagauuc

SEQ ID NO: 2518340 - RNA, 19 nt, Human
augucacaggcagguccag

SEQ ID NO: 2518341 - RNA, 13 nt, Human
augucacagggcc

SEQ ID NO: 2518342 - RNA, 12 nt, Human
augucacagggc

SEQ ID NO: 2518343 - RNA, 19 nt, Human
augucaauuucuguguugc

SEQ ID NO: 2518344 - RNA, 14 nt, Human
augucacagggcca

SEQ ID NO: 2518345 - RNA, 13 nt, Human
augucaccaccuu

SEQ ID NO: 2518346 - RNA, 15 nt, Human
augucaccaccuucc

SEQ ID NO: 2518347 - RNA, 16 nt, Human
augucaccaccuuccc

SEQ ID NO: 2518348 - RNA, 18 nt, Human
augucaccaccuucccag

SEQ ID NO: 2518349 - RNA, 19 nt, Human
augucaccaccuucccagc

SEQ ID NO: 2518350 - RNA, 20 nt, Human
augucaccaccuucccagcu

SEQ ID NO: 2518351 - RNA, 23 nt, Human
augucaccaccuucccagcucuc

SEQ ID NO: 2518352 - RNA, 21 nt, Human
augucaccguggaccuuccug

SEQ ID NO: 2518353 - RNA, 20 nt, Human
augucaccguggaccuuccu

SEQ ID NO: 2518354 - RNA, 19 nt, Human
augucaccggauccugggu

SEQ ID NO: 2518355 - RNA, 20 nt, Human
augucaccggauccugggug

SEQ ID NO: 2518356 - RNA, 18 nt, Human
augugaaaaucaaauaca

SEQ ID NO: 2518357 - RNA, 19 nt, Human
augucuuuuuuuuaaugug

SEQ ID NO: 2518358 - RNA, 21 nt, Human
augugaaaaugguccaggaga

SEQ ID NO: 2518359 - RNA, 14 nt, Human
augugaaaucauuc

SEQ ID NO: 2518360 - RNA, 14 nt, Human
augugaaacauguu

SEQ ID NO: 2518361 - RNA, 23 nt, Human
augucaccguggaccuuccugcc

SEQ ID NO: 2518362 - RNA, 22 nt, Human
augucaccguggaccuuccugc

SEQ ID NO: 2518363 - RNA, 16 nt, Human
augucuuuuuaagcuu

SEQ ID NO: 2518364 - RNA, 16 nt, Human
augucuuuugaauauu

SEQ ID NO: 2518365 - RNA, 18 nt, Human
augucuuuuuaagcuuau

SEQ ID NO: 2518366 - RNA, 23 nt, Human
augucuuuuuaagcuuauuuaau

SEQ ID NO: 2518367 - RNA, 17 nt, Human
augucuuuuuuuuaaug

SEQ ID NO: 2518368 - RNA, 18 nt, Human
augucuuuuuuuuaaugu

SEQ ID NO: 2518369 - RNA, 20 nt, Human
augucuuuuuaagcuuauuu

SEQ ID NO: 2518370 - RNA, 22 nt, Human
augucuuuuuuuuaaugugcug

SEQ ID NO: 2518371 - RNA, 16 nt, Human
augugaaaaucaaaua

SEQ ID NO: 2518372 - RNA, 21 nt, Human
auguaacagccaggaguguua

SEQ ID NO: 2518373 - RNA, 14 nt, Human
auguaacagaaagg

SEQ ID NO: 2518374 - RNA, 13 nt, Human
auguaacagaaag

SEQ ID NO: 2518375 - RNA, 16 nt, Human
auguaacagucugauc

SEQ ID NO: 2518376 - RNA, 13 nt, Human
auguaacagucug

SEQ ID NO: 2518377 - RNA, 14 nt, Human
auguaacuagaauu

SEQ ID NO: 2518378 - RNA, 20 nt, Human
auguaacugcauugagaacu

SEQ ID NO: 2518379 - RNA, 23 nt, Human
auguaacugcauugagaacugca

SEQ ID NO: 2518380 - RNA, 20 nt, Human
auguaaauuuuguaugaaaa

SEQ ID NO: 2518381 - RNA, 15 nt, Human
augguccgguguccu

SEQ ID NO: 2518382 - RNA, 13 nt, Human
auguaacugcuga

SEQ ID NO: 2518383 - RNA, 14 nt, Human
auguaacugcugaa

SEQ ID NO: 2518384 - RNA, 20 nt, Human
auguaauuguuugucuuuaa

SEQ ID NO: 2518385 - RNA, 15 nt, Human
auguaauugaauaaa

SEQ ID NO: 2518386 - RNA, 19 nt, Human
auguauuuauuuaaaagau

SEQ ID NO: 2518387 - RNA, 18 nt, Human
auguauuuauuuaaaaga

SEQ ID NO: 2518388 - RNA, 22 nt, Human
auguauuuauuuaaaagauuca

SEQ ID NO: 2518389 - RNA, 16 nt, Human
auguauuuauuuaaaa

SEQ ID NO: 2518390 - RNA, 14 nt, Human
auguauuuauauuu

SEQ ID NO: 2518391 - RNA, 17 nt, Human
auguauuuauaaauaua

SEQ ID NO: 2518392 - RNA, 21 nt, Human
augucaaucagccuaguugau

SEQ ID NO: 2518393 - RNA, 13 nt, Human
augucacaggcag

SEQ ID NO: 2518394 - RNA, 20 nt, Human
auguauuguaaacauguguu

SEQ ID NO: 2518395 - RNA, 19 nt, Human
auguauuguaaacaugugu

SEQ ID NO: 2518396 - RNA, 11 nt, Human
auguauuguaa

SEQ ID NO: 2518397 - RNA, 11 nt, Human
auguaauuguu

SEQ ID NO: 2518398 - RNA, 21 nt, Human
auguacaaaaucgauuggcuu

SEQ ID NO: 2518399 - RNA, 15 nt, Human
auguauuguaccuuu

SEQ ID NO: 2518400 - RNA, 13 nt, Human
auguauuguaccu

SEQ ID NO: 2518401 - RNA, 12 nt, Human
auguauuguacc

SEQ ID NO: 2518402 - RNA, 21 nt, Human
auguauuguaaacauguguuu

SEQ ID NO: 2518403 - RNA, 19 nt, Human
auguauugugucuuuugca

SEQ ID NO: 2518404 - RNA, 22 nt, Human
auguauugugucuuuugcauga

SEQ ID NO: 2518405 - RNA, 20 nt, Human
auguauugugucuuuugcau

SEQ ID NO: 2518406 - RNA, 14 nt, Human
augaaaacacauuu

SEQ ID NO: 2518407 - RNA, 15 nt, Human
augaaaacacauuuu

SEQ ID NO: 2518408 - RNA, 12 nt, Human
augaaaauauuu

SEQ ID NO: 2518409 - RNA, 13 nt, Human
augaaaauauuua

SEQ ID NO: 2518410 - RNA, 14 nt, Human
augaaaauauuuaa

SEQ ID NO: 2518411 - RNA, 16 nt, Human
augaaaauauuuaaag

SEQ ID NO: 2518412 - RNA, 16 nt, Human
augaaaacacauuuuu

SEQ ID NO: 2518413 - RNA, 22 nt, Human
augaaaaauuuaagcauuguuu

SEQ ID NO: 2518414 - RNA, 21 nt, Human
augaaaaauuuaagcauuguu

SEQ ID NO: 2518415 - RNA, 13 nt, Human
augaggcauuugu

SEQ ID NO: 2518416 - RNA, 14 nt, Human
augaggcauuuguu

SEQ ID NO: 2518417 - RNA, 21 nt, Human
augaggcauuuguuugaacug

SEQ ID NO: 2518418 - RNA, 22 nt, Human
augaggcauuuguuugaacuga

SEQ ID NO: 2518419 - RNA, 21 nt, Human
augacuaaagagagaauguag

SEQ ID NO: 2518420 - RNA, 19 nt, Human
augacuaaagagagaaugu

SEQ ID NO: 2518421 - RNA, 20 nt, Human
augacuaaagagagaaugua

SEQ ID NO: 2518422 - RNA, 23 nt, Human
augacuaaagagagaauguagau

SEQ ID NO: 2518423 - RNA, 21 nt, Human
augacugcuccccagcccugg

SEQ ID NO: 2518424 - RNA, 13 nt, Human
augacugcacaug

SEQ ID NO: 2518425 - RNA, 17 nt, Human
augacuguagaauuugu

SEQ ID NO: 2518426 - RNA, 13 nt, Human
augacuguagaau

SEQ ID NO: 2518427 - RNA, 17 nt, Human
augacugugauuuucag

SEQ ID NO: 2518428 - RNA, 23 nt, Human
augacugcuccccagcccuggcu

SEQ ID NO: 2518429 - RNA, 22 nt, Human
augacugcuccccagcccuggc

SEQ ID NO: 2518430 - RNA, 13 nt, Human
augagggucuugg

SEQ ID NO: 2518431 - RNA, 20 nt, Human
augagggucuugguuccagc

SEQ ID NO: 2518432 - RNA, 11 nt, Human
augagggccac

SEQ ID NO: 2518433 - RNA, 19 nt, Human
augaggggacauuuuggug

SEQ ID NO: 2518434 - RNA, 20 nt, Human
augaggguaucaaauaaaau

SEQ ID NO: 2518435 - RNA, 14 nt, Human
augaggggaggggg

SEQ ID NO: 2518436 - RNA, 13 nt, Human
augaggggagggg

SEQ ID NO: 2518437 - RNA, 15 nt, Human
augaggggcccgagc

SEQ ID NO: 2518438 - RNA, 20 nt, Human
augagggacuggaaccaggg

SEQ ID NO: 2518439 - RNA, 13 nt, Human
augagggacugga

SEQ ID NO: 2518440 - RNA, 17 nt, Human
augacuguuuuuguagu

SEQ ID NO: 2518441 - RNA, 18 nt, Human
augacuguuuuuguagug

SEQ ID NO: 2518442 - RNA, 14 nt, Human
augagggacuggaa

SEQ ID NO: 2518443 - RNA, 16 nt, Human
augagggaucacaggg

SEQ ID NO: 2518444 - RNA, 20 nt, Human
augacgguauuaugcuucuu

SEQ ID NO: 2518445 - RNA, 14 nt, Human
augacuaaaaauau

SEQ ID NO: 2518446 - RNA, 16 nt, Human
augacuaaaaauauua

SEQ ID NO: 2518447 - RNA, 23 nt, Human
augacuaaaaauauuauaacuua

SEQ ID NO: 2518448 - RNA, 11 nt, Human
augacuaaaga

SEQ ID NO: 2518449 - RNA, 12 nt, Human
augacuaaagag

SEQ ID NO: 2518450 - RNA, 13 nt, Human
augacuaaagaga

SEQ ID NO: 2518451 - RNA, 14 nt, Human
augacuaaagagag

SEQ ID NO: 2518452 - RNA, 15 nt, Human
augacuaaagagaga

SEQ ID NO: 2518453 - RNA, 16 nt, Human
augacuaaagagagaa

SEQ ID NO: 2518454 - RNA, 17 nt, Human
augacuaaagagagaau

SEQ ID NO: 2518455 - RNA, 18 nt, Human
augacuaaagagagaaug

SEQ ID NO: 2518456 - RNA, 17 nt, Human
augacccaccccugugc

SEQ ID NO: 2518457 - RNA, 16 nt, Human
augacccaccccugug

SEQ ID NO: 2518458 - RNA, 14 nt, Human
augacccaccccug

SEQ ID NO: 2518459 - RNA, 13 nt, Human
augacccaccccu

SEQ ID NO: 2518460 - RNA, 12 nt, Human
augacccaggcu

SEQ ID NO: 2518461 - RNA, 14 nt, Human
augacccaggcugg

SEQ ID NO: 2518462 - RNA, 15 nt, Human
augacccaggcuggg

SEQ ID NO: 2518463 - RNA, 19 nt, Human
augacccaccccugugcuc

SEQ ID NO: 2518464 - RNA, 16 nt, Human
augacccaggcugggc

SEQ ID NO: 2518465 - RNA, 15 nt, Human
augacggaagaacau

SEQ ID NO: 2518466 - RNA, 16 nt, Human
augacggaagaacaua

SEQ ID NO: 2518467 - RNA, 17 nt, Human
augacgguauuaugcuu

SEQ ID NO: 2518468 - RNA, 16 nt, Human
augacgguauuaugcu

SEQ ID NO: 2518469 - RNA, 19 nt, Human
augacggaagaacauagaa

SEQ ID NO: 2518470 - RNA, 21 nt, Human
augacggaagaacauagaacu

SEQ ID NO: 2518471 - RNA, 12 nt, Human
augacccacccc

SEQ ID NO: 2518472 - RNA, 16 nt, Human
augacccaaagaccaa

SEQ ID NO: 2518473 - RNA, 15 nt, Human
augacccaaagacca

SEQ ID NO: 2518474 - RNA, 13 nt, Human
augacccaaagac

SEQ ID NO: 2518475 - RNA, 19 nt, Human
augaccaguaauugugaaa

SEQ ID NO: 2518476 - RNA, 17 nt, Human
augaccauacugaggga

SEQ ID NO: 2518477 - RNA, 19 nt, Human
augaaguuuccuuggcugg

SEQ ID NO: 2518478 - RNA, 18 nt, Human
augaccacacuccagcug

SEQ ID NO: 2518479 - RNA, 15 nt, Human
augaccacacuccag

SEQ ID NO: 2518480 - RNA, 15 nt, Human
augaaguguuagaua

SEQ ID NO: 2518481 - RNA, 18 nt, Human
augaaguguuagauagaa

SEQ ID NO: 2518482 - RNA, 15 nt, Human
augaaguuguaggua

SEQ ID NO: 2518483 - RNA, 23 nt, Human
augaaguccaagcauuuagaugu

SEQ ID NO: 2518484 - RNA, 20 nt, Human
augaaguccaagcauuuaga

SEQ ID NO: 2518485 - RNA, 17 nt, Human
augaaguauauaauggu

SEQ ID NO: 2518486 - RNA, 18 nt, Human
augaagucguugugaggg

SEQ ID NO: 2518487 - RNA, 16 nt, Human
augaaguauauaaugg

SEQ ID NO: 2518488 - RNA, 14 nt, Human
augaaguauauaau

SEQ ID NO: 2518489 - RNA, 14 nt, Human
augaaaaugucuug

SEQ ID NO: 2518490 - RNA, 14 nt, Human
augaagucucugaa

SEQ ID NO: 2518491 - RNA, 19 nt, Human
augaaguguguuuccuuca

SEQ ID NO: 2518492 - RNA, 23 nt, Human
augaaguguguuuccuucagugc

SEQ ID NO: 2518493 - RNA, 15 nt, Human
augaaaaugucuugu

SEQ ID NO: 2518494 - RNA, 21 nt, Human
augaaguacucauacauguua

SEQ ID NO: 2518495 - RNA, 12 nt, Human
augaaaauguca

SEQ ID NO: 2518496 - RNA, 13 nt, Human
augaaaaugucag

SEQ ID NO: 2518497 - RNA, 15 nt, Human
augaaaaugucagaa

SEQ ID NO: 2518498 - RNA, 13 nt, Human
augaaaaugucuu

SEQ ID NO: 2518499 - RNA, 19 nt, Human
augaaaaugucagaaacca

SEQ ID NO: 2518500 - RNA, 20 nt, Human
augaaaaugcaacaacaugu

SEQ ID NO: 2518501 - RNA, 19 nt, Human
aucuagguuuaacucagau

SEQ ID NO: 2518502 - RNA, 18 nt, Human
aucuagguuuaacucaga

SEQ ID NO: 2518503 - RNA, 17 nt, Human
aucuagguuuaacucag

SEQ ID NO: 2518504 - RNA, 16 nt, Human
aucuagguuuaacuca

SEQ ID NO: 2518505 - RNA, 22 nt, Human
aucuagguuuaacucagaucac

SEQ ID NO: 2518506 - RNA, 20 nt, Human
aucuaggugaggauugauua

SEQ ID NO: 2518507 - RNA, 14 nt, Human
aucuagguuuaacu

SEQ ID NO: 2518508 - RNA, 13 nt, Human
aucuagguuuaac

SEQ ID NO: 2518509 - RNA, 12 nt, Human
aucuagguuuaa

SEQ ID NO: 2518510 - RNA, 21 nt, Human
aucuagugcagcugauuuuaa

SEQ ID NO: 2518511 - RNA, 18 nt, Human
aucuagugcagcugauuu

SEQ ID NO: 2518512 - RNA, 19 nt, Human
aucuagugcagcugauuuu

SEQ ID NO: 2518513 - RNA, 22 nt, Human
aucuagugcagcugauuuuaac

SEQ ID NO: 2518514 - RNA, 13 nt, Human
aucuagugcagcu

SEQ ID NO: 2518515 - RNA, 14 nt, Human
aucuagugcagcug

SEQ ID NO: 2518516 - RNA, 15 nt, Human
aucuagugcagcuga

SEQ ID NO: 2518517 - RNA, 17 nt, Human
aucuagugcagcugauu

SEQ ID NO: 2518518 - RNA, 16 nt, Human
aucuauaaagaagaac

SEQ ID NO: 2518519 - RNA, 13 nt, Human
aucuauaaagaag

SEQ ID NO: 2518520 - RNA, 16 nt, Human
aucuauacauaucuuu

SEQ ID NO: 2518521 - RNA, 14 nt, Human
aucuauuuuggauu

SEQ ID NO: 2518522 - RNA, 14 nt, Human
aucuauuucugaga

SEQ ID NO: 2518523 - RNA, 16 nt, Human
aucuccugccuuccuc

SEQ ID NO: 2518524 - RNA, 17 nt, Human
aucuccugccuuccucc

SEQ ID NO: 2518525 - RNA, 19 nt, Human
aucuccucaaguccccaag

SEQ ID NO: 2518526 - RNA, 20 nt, Human
aucuccucgcaagcugggua

SEQ ID NO: 2518527 - RNA, 21 nt, Human
aucucucaggagcacaggcag

SEQ ID NO: 2518528 - RNA, 18 nt, Human
aucucucaggagcacagg

SEQ ID NO: 2518529 - RNA, 17 nt, Human
aucucucaggagcacag

SEQ ID NO: 2518530 - RNA, 16 nt, Human
aucucucaggagcaca

SEQ ID NO: 2518531 - RNA, 14 nt, Human
aucucucaggagca

SEQ ID NO: 2518532 - RNA, 13 nt, Human
aucucucaggagc

SEQ ID NO: 2518533 - RNA, 17 nt, Human
aucucucagaagggagg

SEQ ID NO: 2518534 - RNA, 18 nt, Human
aucucuauuuaauauuua

SEQ ID NO: 2518535 - RNA, 19 nt, Human
aucucuauuuaauauuuau

SEQ ID NO: 2518536 - RNA, 20 nt, Human
aucuccugccuuccuccugg

SEQ ID NO: 2518537 - RNA, 17 nt, Human
aucucuauuuaauauuu

SEQ ID NO: 2518538 - RNA, 23 nt, Human
aucucucaggagcacaggcagcu

SEQ ID NO: 2518539 - RNA, 22 nt, Human
aucucucaggagcacaggcagc

SEQ ID NO: 2518540 - RNA, 11 nt, Human
aucucucccuc

SEQ ID NO: 2518541 - RNA, 12 nt, Human
aucucuccucca

SEQ ID NO: 2518542 - RNA, 23 nt, Human
aucucucccuccccugccauuuu

SEQ ID NO: 2518543 - RNA, 14 nt, Human
aucucucccucccc

SEQ ID NO: 2518544 - RNA, 15 nt, Human
aucucucccuccccu

SEQ ID NO: 2518545 - RNA, 21 nt, Human
aucuauauguacuugucaaag

SEQ ID NO: 2518546 - RNA, 16 nt, Human
aucuauauguacuugu

SEQ ID NO: 2518547 - RNA, 19 nt, Human
aucuauauauguguaugua

SEQ ID NO: 2518548 - RNA, 18 nt, Human
aucuauauauguguaugu

SEQ ID NO: 2518549 - RNA, 23 nt, Human
aucuauauguacuugucaaagaa

SEQ ID NO: 2518550 - RNA, 22 nt, Human
aucuauauguacuugucaaaga

SEQ ID NO: 2518551 - RNA, 15 nt, Human
aucuauauuuaacaa

SEQ ID NO: 2518552 - RNA, 17 nt, Human
aucuauauauguguaug

SEQ ID NO: 2518553 - RNA, 16 nt, Human
aucuauauauguguau

SEQ ID NO: 2518554 - RNA, 15 nt, Human
aucuauauaugugua

SEQ ID NO: 2518555 - RNA, 20 nt, Human
aucuauauauaauucuguac

SEQ ID NO: 2518556 - RNA, 19 nt, Human
aucuauauauaauucugua

SEQ ID NO: 2518557 - RNA, 15 nt, Human
aucuauauauaauuc

SEQ ID NO: 2518558 - RNA, 14 nt, Human
aucuauauauaauu

SEQ ID NO: 2518559 - RNA, 16 nt, Human
aucuauagaacugaau

SEQ ID NO: 2518560 - RNA, 13 nt, Human
aucuauauauaau

SEQ ID NO: 2518561 - RNA, 15 nt, Human
aucuauuucuaugag

SEQ ID NO: 2518562 - RNA, 15 nt, Human
aucuauuucugagaa

SEQ ID NO: 2518563 - RNA, 22 nt, Human
aucuauuggguucauuauugga

SEQ ID NO: 2518564 - RNA, 16 nt, Human
aucuauuggguucauu

SEQ ID NO: 2518565 - RNA, 17 nt, Human
aucuauuggguucauua

SEQ ID NO: 2518566 - RNA, 19 nt, Human
aucuauuggguucauuauu

SEQ ID NO: 2518567 - RNA, 23 nt, Human
aucuauugcuggcaaagacagaa

SEQ ID NO: 2518568 - RNA, 13 nt, Human
aucuauuuaagua

SEQ ID NO: 2518569 - RNA, 21 nt, Human
aucuucuaaacccaauccaaa

SEQ ID NO: 2518570 - RNA, 18 nt, Human
aucuuccaggugggguga

SEQ ID NO: 2518571 - RNA, 11 nt, Human
aucuucccagc

SEQ ID NO: 2518572 - RNA, 19 nt, Human
aucuuccagaagugugauu

SEQ ID NO: 2518573 - RNA, 18 nt, Human
aucuuccagaagugugau

SEQ ID NO: 2518574 - RNA, 17 nt, Human
aucuuccagaaguguga

SEQ ID NO: 2518575 - RNA, 14 nt, Human
aucuucccucuccc

SEQ ID NO: 2518576 - RNA, 22 nt, Human
aucuucccuagaggguuccugu

SEQ ID NO: 2518577 - RNA, 23 nt, Human
aucuucccagcagggccacuccc

SEQ ID NO: 2518578 - RNA, 20 nt, Human
aucuucccagcagggccacu

SEQ ID NO: 2518579 - RNA, 21 nt, Human
aucuucccuagaggguuccug

SEQ ID NO: 2518580 - RNA, 23 nt, Human
aucucugcacccuggggccugga

SEQ ID NO: 2518581 - RNA, 20 nt, Human
aucucugcacccuggggccu

SEQ ID NO: 2518582 - RNA, 20 nt, Human
aucuggagaccagggagccu

SEQ ID NO: 2518583 - RNA, 21 nt, Human
aucuggagaccagggagccuu

SEQ ID NO: 2518584 - RNA, 22 nt, Human
aucuggagaccagggagccuuu

SEQ ID NO: 2518585 - RNA, 23 nt, Human
aucuggagagcuagaaccuggag

SEQ ID NO: 2518586 - RNA, 22 nt, Human
aucuggagagcuagaaccugga

SEQ ID NO: 2518587 - RNA, 20 nt, Human
aucuggagagcuagaaccug

SEQ ID NO: 2518588 - RNA, 15 nt, Human
aucuggagagcuaga

SEQ ID NO: 2518589 - RNA, 16 nt, Human
aucuggcaacaucuuu

SEQ ID NO: 2518590 - RNA, 22 nt, Human
aucuggauaggagccugcuggu

SEQ ID NO: 2518591 - RNA, 21 nt, Human
aucuggauaggagccugcugg

SEQ ID NO: 2518592 - RNA, 20 nt, Human
aucuggauaggagccugcug

SEQ ID NO: 2518593 - RNA, 18 nt, Human
aucuggauaggagccugc

SEQ ID NO: 2518594 - RNA, 17 nt, Human
aucuggauaggagccug

SEQ ID NO: 2518595 - RNA, 18 nt, Human
aucucugcaaucuucuca

SEQ ID NO: 2518596 - RNA, 21 nt, Human
aucucugcaaucuucucagaa

SEQ ID NO: 2518597 - RNA, 22 nt, Human
aucucugcaggaaauggcugug

SEQ ID NO: 2518598 - RNA, 16 nt, Human
aucucugcuuuggaaa

SEQ ID NO: 2518599 - RNA, 22 nt, Human
aucuggacuccucuguccaggc

SEQ ID NO: 2518600 - RNA, 20 nt, Human
aucucugaagcauguuucau

SEQ ID NO: 2518601 - RNA, 19 nt, Human
aucucugaagcauguuuca

SEQ ID NO: 2518602 - RNA, 17 nt, Human
aucucugaagcauguuu

SEQ ID NO: 2518603 - RNA, 16 nt, Human
aucucugaagcauguu

SEQ ID NO: 2518604 - RNA, 19 nt, Human
aucucucgguuccacgucc

SEQ ID NO: 2518605 - RNA, 20 nt, Human
aucucuccuccaagacacug

SEQ ID NO: 2518606 - RNA, 13 nt, Human
aucucugaagcau

SEQ ID NO: 2518607 - RNA, 17 nt, Human
aucucucuuuaauauaa

SEQ ID NO: 2518608 - RNA, 14 nt, Human
aucuggguagcugu

SEQ ID NO: 2518609 - RNA, 15 nt, Human
aucuggguagcugua

SEQ ID NO: 2518610 - RNA, 17 nt, Human
aucuggguagcuguaag

SEQ ID NO: 2518611 - RNA, 18 nt, Human
aucuggguagcuguaagg

SEQ ID NO: 2518612 - RNA, 21 nt, Human
aucugggugcaugaucuugag

SEQ ID NO: 2518613 - RNA, 18 nt, Human
aucuggguccuugcaccc

SEQ ID NO: 2518614 - RNA, 14 nt, Human
aucuggguccuugc

SEQ ID NO: 2518615 - RNA, 18 nt, Human
aucugggggaguggaaua

SEQ ID NO: 2518616 - RNA, 18 nt, Human
aucugggugcaugaucuu

SEQ ID NO: 2518617 - RNA, 18 nt, Human
aucugggggccucuucug

SEQ ID NO: 2518618 - RNA, 17 nt, Human
aucugggggaguggaau

SEQ ID NO: 2518619 - RNA, 16 nt, Human
aucugggggaguggaa

SEQ ID NO: 2518620 - RNA, 15 nt, Human
aucugggggagugga

SEQ ID NO: 2518621 - RNA, 16 nt, Human
aucuggggcucuggga

SEQ ID NO: 2518622 - RNA, 22 nt, Human
aucugggugcaugaucuugagc

SEQ ID NO: 2518623 - RNA, 21 nt, Human
aucuuauuagggagaaaauuc

SEQ ID NO: 2518624 - RNA, 22 nt, Human
aucuuauuagggagaaaauuca

SEQ ID NO: 2518625 - RNA, 13 nt, Human
aucuuauucacau

SEQ ID NO: 2518626 - RNA, 16 nt, Human
aucuuauuuucaugua

SEQ ID NO: 2518627 - RNA, 23 nt, Human
aucuuauuuucauguauaugugu

SEQ ID NO: 2518628 - RNA, 15 nt, Human
aucuucaauggcuuu

SEQ ID NO: 2518629 - RNA, 15 nt, Human
aucuucaaagcuuga

SEQ ID NO: 2518630 - RNA, 19 nt, Human
aucuucaaagcuugaagau

SEQ ID NO: 2518631 - RNA, 12 nt, Human
aucaccagagag

SEQ ID NO: 2518632 - RNA, 16 nt, Human
aucaccagaauaaacc

SEQ ID NO: 2518633 - RNA, 13 nt, Human
aucaccagaauaa

SEQ ID NO: 2518634 - RNA, 13 nt, Human
aucacauguaugu

SEQ ID NO: 2518635 - RNA, 19 nt, Human
aucaccacaguaaguuccu

SEQ ID NO: 2518636 - RNA, 13 nt, Human
aucaccacaguuu

SEQ ID NO: 2518637 - RNA, 15 nt, Human
aucaccagcccggcc

SEQ ID NO: 2518638 - RNA, 23 nt, Human
aucaccagagagggacugacacc

SEQ ID NO: 2518639 - RNA, 21 nt, Human
aucaccagcccggccugcucc

SEQ ID NO: 2518640 - RNA, 19 nt, Human
aucaccgugggcucccuga

SEQ ID NO: 2518641 - RNA, 20 nt, Human
aucaccgugggcucccugac

SEQ ID NO: 2518642 - RNA, 22 nt, Human
aucaccgugggcucccugacug

SEQ ID NO: 2518643 - RNA, 20 nt, Human
aucaccgacgcgucuccugu

SEQ ID NO: 2518644 - RNA, 22 nt, Human
aucaccgacgcgucuccuguuu

SEQ ID NO: 2518645 - RNA, 20 nt, Human
aucaccgagaguagccgaga

SEQ ID NO: 2518646 - RNA, 11 nt, Human
aucacauguau

SEQ ID NO: 2518647 - RNA, 22 nt, Human
aucacagucuaauuuuuauuca

SEQ ID NO: 2518648 - RNA, 20 nt, Human
aucaccaacgucugugccau

SEQ ID NO: 2518649 - RNA, 13 nt, Human
aucaccagacagg

SEQ ID NO: 2518650 - RNA, 22 nt, Human
aucacaguuuugguugcuuuaa

SEQ ID NO: 2518651 - RNA, 21 nt, Human
aucacaguuuugguugcuuua

SEQ ID NO: 2518652 - RNA, 12 nt, Human
aucacauccugg

SEQ ID NO: 2518653 - RNA, 19 nt, Human
aucacagucuaauuuuuau

SEQ ID NO: 2518654 - RNA, 18 nt, Human
aucacagucuaauuuuua

SEQ ID NO: 2518655 - RNA, 15 nt, Human
aucacaguuuugguu

SEQ ID NO: 2518656 - RNA, 23 nt, Human
aucacaggguugggcccagaucu

SEQ ID NO: 2518657 - RNA, 15 nt, Human
aucacagucuaauuu

SEQ ID NO: 2518658 - RNA, 21 nt, Human
aucacagggccccagaaggca

SEQ ID NO: 2518659 - RNA, 14 nt, Human
aucaaauaugcaaa

SEQ ID NO: 2518660 - RNA, 22 nt, Human
aucaaauauauucagccuggcu

SEQ ID NO: 2518661 - RNA, 14 nt, Human
aucacacuucugug

SEQ ID NO: 2518662 - RNA, 16 nt, Human
aucacacuucugugag

SEQ ID NO: 2518663 - RNA, 18 nt, Human
aucacacuucugugagac

SEQ ID NO: 2518664 - RNA, 11 nt, Human
aucacacacac

SEQ ID NO: 2518665 - RNA, 13 nt, Human
aucacagccucug

SEQ ID NO: 2518666 - RNA, 17 nt, Human
aucacagagacauuccu

SEQ ID NO: 2518667 - RNA, 16 nt, Human
aucacagagacauucc

SEQ ID NO: 2518668 - RNA, 15 nt, Human
aucacagagacauuc

SEQ ID NO: 2518669 - RNA, 14 nt, Human
aucacagagacauu

SEQ ID NO: 2518670 - RNA, 22 nt, Human
aucacagagacauuccuccgag

SEQ ID NO: 2518671 - RNA, 18 nt, Human
aucacagagacauuccuc

SEQ ID NO: 2518672 - RNA, 15 nt, Human
aucacagaggcuucu

SEQ ID NO: 2518673 - RNA, 12 nt, Human
aucacagggccc

SEQ ID NO: 2518674 - RNA, 16 nt, Human
aucacagggccccaga

SEQ ID NO: 2518675 - RNA, 14 nt, Human
aucacagcagcuuc

SEQ ID NO: 2518676 - RNA, 14 nt, Human
aucacagaggcuuc

SEQ ID NO: 2518677 - RNA, 22 nt, Human
aucacagggccccagaaggcag

SEQ ID NO: 2518678 - RNA, 18 nt, Human
aucacaggguugggccca

SEQ ID NO: 2518679 - RNA, 19 nt, Human
aucacaggguugggcccag

SEQ ID NO: 2518680 - RNA, 20 nt, Human
aucacaggguugggcccaga

SEQ ID NO: 2518681 - RNA, 21 nt, Human
auauuucccugaaggaaccaa

SEQ ID NO: 2518682 - RNA, 21 nt, Human
auauuucccuccccuggggac

SEQ ID NO: 2518683 - RNA, 21 nt, Human
auauuuccuuaaacugugugg

SEQ ID NO: 2518684 - RNA, 14 nt, Human
aucaaaauaaaaag

SEQ ID NO: 2518685 - RNA, 18 nt, Human
aucaaaauaaaaagugac

SEQ ID NO: 2518686 - RNA, 15 nt, Human
aucaaaauaaaaagu

SEQ ID NO: 2518687 - RNA, 20 nt, Human
aucaaagagguuuuaaaaaa

SEQ ID NO: 2518688 - RNA, 23 nt, Human
aucaaagagguuuuaaaaaaauc

SEQ ID NO: 2518689 - RNA, 12 nt, Human
aucaaaaugcuu

SEQ ID NO: 2518690 - RNA, 22 nt, Human
aucaaaaugcuuuuuauuucug

SEQ ID NO: 2518691 - RNA, 13 nt, Human
aucaaaaugcuuu

SEQ ID NO: 2518692 - RNA, 14 nt, Human
aucaaauauauuca

SEQ ID NO: 2518693 - RNA, 22 nt, Human
aucaaauacuuuaaaggaaaaa

SEQ ID NO: 2518694 - RNA, 21 nt, Human
aucaaauacuuuaaaggaaaa

SEQ ID NO: 2518695 - RNA, 20 nt, Human
aucaaauacuuuaaaggaaa

SEQ ID NO: 2518696 - RNA, 15 nt, Human
aucaaauacuuuaaa

SEQ ID NO: 2518697 - RNA, 20 nt, Human
aucaaauagaaccacuauga

SEQ ID NO: 2518698 - RNA, 21 nt, Human
aucaaauagaaccacuaugaa

SEQ ID NO: 2518699 - RNA, 23 nt, Human
aucaaagcacuuggacucuugcu

SEQ ID NO: 2518700 - RNA, 17 nt, Human
aucaaagcaaugcauuu

SEQ ID NO: 2518701 - RNA, 14 nt, Human
aucaaauacuuuaa

SEQ ID NO: 2518702 - RNA, 13 nt, Human
aucaaauacuuua

SEQ ID NO: 2518703 - RNA, 16 nt, Human
aucaaagccacacucu

SEQ ID NO: 2518704 - RNA, 16 nt, Human
aucaaagcaaugcauu

SEQ ID NO: 2518705 - RNA, 15 nt, Human
aucaaagcaaugcau

SEQ ID NO: 2518706 - RNA, 12 nt, Human
aucaaagcaaug

SEQ ID NO: 2518707 - RNA, 14 nt, Human
aucaaagccacacu

SEQ ID NO: 2518708 - RNA, 14 nt, Human
aucauguccccaaa

SEQ ID NO: 2518709 - RNA, 12 nt, Human
aucaugugaaau

SEQ ID NO: 2518710 - RNA, 18 nt, Human
aucauguaguaucaaaua

SEQ ID NO: 2518711 - RNA, 17 nt, Human
aucauguaguaucaaau

SEQ ID NO: 2518712 - RNA, 18 nt, Human
aucaugaauguguaacac

SEQ ID NO: 2518713 - RNA, 15 nt, Human
aucaugaauguguaa

SEQ ID NO: 2518714 - RNA, 15 nt, Human
aucauguacauuucu

SEQ ID NO: 2518715 - RNA, 17 nt, Human
aucaugaauuaguuuua

SEQ ID NO: 2518716 - RNA, 20 nt, Human
aucauguccccaaaccugca

SEQ ID NO: 2518717 - RNA, 12 nt, Human
aucaugucccca

SEQ ID NO: 2518718 - RNA, 18 nt, Human
aucaugucaggccugugu

SEQ ID NO: 2518719 - RNA, 19 nt, Human
aucaugucaggccugugug

SEQ ID NO: 2518720 - RNA, 21 nt, Human
aucauguaguaucaaauauua

SEQ ID NO: 2518721 - RNA, 19 nt, Human
aucauguaguaucaaauau

SEQ ID NO: 2518722 - RNA, 14 nt, Human
aucaugucuggcua

SEQ ID NO: 2518723 - RNA, 22 nt, Human
aucagcuugcccuguuaaaaga

SEQ ID NO: 2518724 - RNA, 13 nt, Human
aucagcuuauugu

SEQ ID NO: 2518725 - RNA, 15 nt, Human
aucaccuauuuccau

SEQ ID NO: 2518726 - RNA, 22 nt, Human
aucaccuauuuccauucaacaa

SEQ ID NO: 2518727 - RNA, 14 nt, Human
aucaccuauuucca

SEQ ID NO: 2518728 - RNA, 18 nt, Human
aucaugaagauauuuuuc

SEQ ID NO: 2518729 - RNA, 16 nt, Human
aucaugaaauaugcau

SEQ ID NO: 2518730 - RNA, 15 nt, Human
aucaugaaauaugca

SEQ ID NO: 2518731 - RNA, 16 nt, Human
aucaugaaauuacuua

SEQ ID NO: 2518732 - RNA, 18 nt, Human
aucaugaaauaugcaucu

SEQ ID NO: 2518733 - RNA, 21 nt, Human
aucagcuucuauccuugacuu

SEQ ID NO: 2518734 - RNA, 16 nt, Human
aucagcuguuugucau

SEQ ID NO: 2518735 - RNA, 21 nt, Human
aucaggaaauauauaugugug

SEQ ID NO: 2518736 - RNA, 20 nt, Human
aucaggaaauauauaugugu

SEQ ID NO: 2518737 - RNA, 14 nt, Human
aucaugaaauaugc

SEQ ID NO: 2518738 - RNA, 18 nt, Human
aucccuaaugugugccau

SEQ ID NO: 2518739 - RNA, 16 nt, Human
aucccuaaugcugcag

SEQ ID NO: 2518740 - RNA, 12 nt, Human
aucccuacaugu

SEQ ID NO: 2518741 - RNA, 16 nt, Human
aucccguguucuccuu

SEQ ID NO: 2518742 - RNA, 13 nt, Human
aucccguguucuc

SEQ ID NO: 2518743 - RNA, 23 nt, Human
auccccaggggucccagccaccc

SEQ ID NO: 2518744 - RNA, 17 nt, Human
auccccaccugucuuca

SEQ ID NO: 2518745 - RNA, 15 nt, Human
aucccggcugcccuu

SEQ ID NO: 2518746 - RNA, 19 nt, Human
auccccaggggucccagcc

SEQ ID NO: 2518747 - RNA, 21 nt, Human
auccccaggggucccagccac

SEQ ID NO: 2518748 - RNA, 19 nt, Human
auccucaguuuuugugaaa

SEQ ID NO: 2518749 - RNA, 18 nt, Human
aucccuacauguauugca

SEQ ID NO: 2518750 - RNA, 15 nt, Human
aucccuacauguauu

SEQ ID NO: 2518751 - RNA, 14 nt, Human
aucccuacauguau

SEQ ID NO: 2518752 - RNA, 13 nt, Human
aucccuacaugua

SEQ ID NO: 2518753 - RNA, 22 nt, Human
aucccuacccccuaagagccau

SEQ ID NO: 2518754 - RNA, 14 nt, Human
aucccuacccccua

SEQ ID NO: 2518755 - RNA, 21 nt, Human
aucccuacccccuaagagcca

SEQ ID NO: 2518756 - RNA, 16 nt, Human
auccacucccaggcag

SEQ ID NO: 2518757 - RNA, 19 nt, Human
aucccaugagccucagcau

SEQ ID NO: 2518758 - RNA, 15 nt, Human
aucccauguauuuau

SEQ ID NO: 2518759 - RNA, 23 nt, Human
aucccauguaacagaaagggcaa

SEQ ID NO: 2518760 - RNA, 19 nt, Human
aucccauguaacagaaagg

SEQ ID NO: 2518761 - RNA, 18 nt, Human
aucccauguaacagaaag

SEQ ID NO: 2518762 - RNA, 16 nt, Human
aucccauguaacagaa

SEQ ID NO: 2518763 - RNA, 13 nt, Human
aucccauguaaca

SEQ ID NO: 2518764 - RNA, 14 nt, Human
auccccaaguguga

SEQ ID NO: 2518765 - RNA, 16 nt, Human
auccccaagugugaac

SEQ ID NO: 2518766 - RNA, 12 nt, Human
auccccaauaau

SEQ ID NO: 2518767 - RNA, 18 nt, Human
auccccaagccuggcaag

SEQ ID NO: 2518768 - RNA, 19 nt, Human
auccccaauaauugcagaa

SEQ ID NO: 2518769 - RNA, 21 nt, Human
auccccaauaauugcagaacu

SEQ ID NO: 2518770 - RNA, 11 nt, Human
auccccacccu

SEQ ID NO: 2518771 - RNA, 22 nt, Human
auccccaauaauugcagaacua

SEQ ID NO: 2518772 - RNA, 16 nt, Human
auccccacccugggcu

SEQ ID NO: 2518773 - RNA, 14 nt, Human
auccccacccuggg

SEQ ID NO: 2518774 - RNA, 15 nt, Human
auccccaccugucuu

SEQ ID NO: 2518775 - RNA, 13 nt, Human
auccccacccuug

SEQ ID NO: 2518776 - RNA, 16 nt, Human
aucccauucugcguca

SEQ ID NO: 2518777 - RNA, 16 nt, Human
auccccaagccuggca

SEQ ID NO: 2518778 - RNA, 15 nt, Human
auccaccuccuucuc

SEQ ID NO: 2518779 - RNA, 14 nt, Human
auccaccuccuucu

SEQ ID NO: 2518780 - RNA, 13 nt, Human
auccaccuccuuc

SEQ ID NO: 2518781 - RNA, 22 nt, Human
auccaccuccaucuucuuugca

SEQ ID NO: 2518782 - RNA, 14 nt, Human
auccaccuccaucu

SEQ ID NO: 2518783 - RNA, 12 nt, Human
auccaccuccau

SEQ ID NO: 2518784 - RNA, 10 nt, Human
auccaccucc

SEQ ID NO: 2518785 - RNA, 13 nt, Human
auccacucgccuu

SEQ ID NO: 2518786 - RNA, 21 nt, Human
auccacuagugcaaaucauag

SEQ ID NO: 2518787 - RNA, 19 nt, Human
auccacuagugcaaaucau

SEQ ID NO: 2518788 - RNA, 16 nt, Human
auccacucuacccucc

SEQ ID NO: 2518789 - RNA, 13 nt, Human
auccaccugucuc

SEQ ID NO: 2518790 - RNA, 18 nt, Human
auccaccugucucagccu

SEQ ID NO: 2518791 - RNA, 21 nt, Human
auccaccugucucagccuccc

SEQ ID NO: 2518792 - RNA, 19 nt, Human
auccagacccggcugcgug

SEQ ID NO: 2518793 - RNA, 18 nt, Human
auccacucuacccuccca

SEQ ID NO: 2518794 - RNA, 19 nt, Human
auccacucuacccucccac

SEQ ID NO: 2518795 - RNA, 20 nt, Human
auccacucuacccucccacc

SEQ ID NO: 2518796 - RNA, 21 nt, Human
auccacucuacccucccaccc

SEQ ID NO: 2518797 - RNA, 12 nt, Human
aucgccuuuccc

SEQ ID NO: 2518798 - RNA, 23 nt, Human
aucgcgccacuacacuccagccu

SEQ ID NO: 2518799 - RNA, 22 nt, Human
aucgcggcggagcuggccccgc

SEQ ID NO: 2518800 - RNA, 20 nt, Human
aucgcggcggagcuggcccc

SEQ ID NO: 2518801 - RNA, 23 nt, Human
auccuuguuucaaacacaaaugc

SEQ ID NO: 2518802 - RNA, 16 nt, Human
auccuuguuucaaaca

SEQ ID NO: 2518803 - RNA, 14 nt, Human
auccuuguuucaaa

SEQ ID NO: 2518804 - RNA, 13 nt, Human
auccuuguuucaa

SEQ ID NO: 2518805 - RNA, 12 nt, Human
auccuuguuuca

SEQ ID NO: 2518806 - RNA, 17 nt, Human
auccuuuaaauccuucc

SEQ ID NO: 2518807 - RNA, 17 nt, Human
auccuuuccagcaugag

SEQ ID NO: 2518808 - RNA, 14 nt, Human
auccuuuccagcau

SEQ ID NO: 2518809 - RNA, 22 nt, Human
aucgcaucauugcacucuagcc

SEQ ID NO: 2518810 - RNA, 19 nt, Human
aucgcccuccacaucccug

SEQ ID NO: 2518811 - RNA, 13 nt, Human
auccuuacaaguu

SEQ ID NO: 2518812 - RNA, 14 nt, Human
auccucacugggug

SEQ ID NO: 2518813 - RNA, 17 nt, Human
auccucauacccacccc

SEQ ID NO: 2518814 - RNA, 12 nt, Human
auccucaaucca

SEQ ID NO: 2518815 - RNA, 15 nt, Human
auccucaauccagcu

SEQ ID NO: 2518816 - RNA, 15 nt, Human
auccucacugggugg

SEQ ID NO: 2518817 - RNA, 22 nt, Human
auccuuguauaaaaaaaauagu

SEQ ID NO: 2518818 - RNA, 16 nt, Human
auccuugagucaaaaa

SEQ ID NO: 2518819 - RNA, 20 nt, Human
auccuucaagaacucugggc

SEQ ID NO: 2518820 - RNA, 22 nt, Human
auccuucccugucugccagggc

SEQ ID NO: 2518821 - RNA, 19 nt, Human
auccuucccugucugccag

SEQ ID NO: 2518822 - RNA, 16 nt, Human
agaggaaggggccaga

SEQ ID NO: 2518823 - RNA, 18 nt, Human
agaggaaggggccagagg

SEQ ID NO: 2518824 - RNA, 20 nt, Human
agaggaaggggccagaggcu

SEQ ID NO: 2518825 - RNA, 13 nt, Human
agaggaaugaagu

SEQ ID NO: 2518826 - RNA, 23 nt, Human
agaggaaggggccagaggcucgu

SEQ ID NO: 2518827 - RNA, 22 nt, Human
agaggaaucacucuuguggaug

SEQ ID NO: 2518828 - RNA, 24 nt, Human
agaggaaucagacuucacacugca

SEQ ID NO: 2518829 - RNA, 20 nt, Human
agaggagcgggaccuguggc

SEQ ID NO: 2518830 - RNA, 19 nt, Human
agaggagcgggaccugugg

SEQ ID NO: 2518831 - RNA, 23 nt, Human
agaggagggagcaucagugcccu

SEQ ID NO: 2518832 - RNA, 23 nt, Human
agaggacuuuucuuuguggcuuc

SEQ ID NO: 2518833 - RNA, 20 nt, Human
agaggaggggccgcugccac

SEQ ID NO: 2518834 - RNA, 22 nt, Human
agaggaggggccgcugccaccc

SEQ ID NO: 2518835 - RNA, 20 nt, Human
agaggaguacaggugaagca

SEQ ID NO: 2518836 - RNA, 14 nt, Human
agaggagucagaga

SEQ ID NO: 2518837 - RNA, 14 nt, Human
agaggaggggccgc

SEQ ID NO: 2518838 - RNA, 18 nt, Human
agaggaggggccgcugcc

SEQ ID NO: 2518839 - RNA, 12 nt, Human
agaggaggggcc

SEQ ID NO: 2518840 - RNA, 21 nt, Human
agaggagggcgugacucaccc

SEQ ID NO: 2518841 - RNA, 23 nt, Human
agaggagggcagcagaagggggu

SEQ ID NO: 2518842 - RNA, 19 nt, Human
agaggagggcgugacucac

SEQ ID NO: 2518843 - RNA, 21 nt, Human
agaggagcgggaccuguggcu

SEQ ID NO: 2518844 - RNA, 17 nt, Human
agaggagggaugcugcc

SEQ ID NO: 2518845 - RNA, 22 nt, Human
agaggacuuuucuuuguggcuu

SEQ ID NO: 2518846 - RNA, 21 nt, Human
agaggacuuuucuuuguggcu

SEQ ID NO: 2518847 - RNA, 14 nt, Human
agaggacuuuucuu

SEQ ID NO: 2518848 - RNA, 23 nt, Human
agaggaaucagacuucacacugc

SEQ ID NO: 2518849 - RNA, 16 nt, Human
agagggccugcaaggg

SEQ ID NO: 2518850 - RNA, 13 nt, Human
agagggccugcaa

SEQ ID NO: 2518851 - RNA, 19 nt, Human
agagggccugugggagccu

SEQ ID NO: 2518852 - RNA, 16 nt, Human
agagggccugugggag

SEQ ID NO: 2518853 - RNA, 15 nt, Human
agagggccuguggga

SEQ ID NO: 2518854 - RNA, 13 nt, Human
agaggaguucaau

SEQ ID NO: 2518855 - RNA, 12 nt, Human
agaggaguucaa

SEQ ID NO: 2518856 - RNA, 14 nt, Human
agaggagugcuugu

SEQ ID NO: 2518857 - RNA, 16 nt, Human
agaggagugacugagc

SEQ ID NO: 2518858 - RNA, 19 nt, Human
agaggggguggccucccaa

SEQ ID NO: 2518859 - RNA, 17 nt, Human
agaggggguggccuccc

SEQ ID NO: 2518860 - RNA, 12 nt, Human
agagggcuuccu

SEQ ID NO: 2518861 - RNA, 18 nt, Human
agaggggcuuucuggaga

SEQ ID NO: 2518862 - RNA, 22 nt, Human
agaggggggaagaucaggucau

SEQ ID NO: 2518863 - RNA, 14 nt, Human
agaggggggcugcc

SEQ ID NO: 2518864 - RNA, 12 nt, Human
agagggggccac

SEQ ID NO: 2518865 - RNA, 16 nt, Human
agacgcugugcugccc

SEQ ID NO: 2518866 - RNA, 13 nt, Human
agacucugucuca

SEQ ID NO: 2518867 - RNA, 18 nt, Human
agacucugucucaaaaaa

SEQ ID NO: 2518868 - RNA, 18 nt, Human
agacucugucucagucca

SEQ ID NO: 2518869 - RNA, 16 nt, Human
agacucuguggggccu

SEQ ID NO: 2518870 - RNA, 20 nt, Human
agacugaguacguugugcau

SEQ ID NO: 2518871 - RNA, 22 nt, Human
agacugaccaauauuguacagu

SEQ ID NO: 2518872 - RNA, 16 nt, Human
agacugagcaccugcu

SEQ ID NO: 2518873 - RNA, 21 nt, Human
agacugaccaauauuguacag

SEQ ID NO: 2518874 - RNA, 20 nt, Human
agacugcuguguuugagcuc

SEQ ID NO: 2518875 - RNA, 16 nt, Human
agacugcuucccaucc

SEQ ID NO: 2518876 - RNA, 14 nt, Human
agacugcuucccau

SEQ ID NO: 2518877 - RNA, 19 nt, Human
agacugcuuccaauuuucu

SEQ ID NO: 2518878 - RNA, 17 nt, Human
agacugagcaccugcuu

SEQ ID NO: 2518879 - RNA, 20 nt, Human
agacugcugggacuggccag

SEQ ID NO: 2518880 - RNA, 22 nt, Human
agacugcugggacuggccaggu

SEQ ID NO: 2518881 - RNA, 22 nt, Human
agacugaguacguugugcauuu

SEQ ID NO: 2518882 - RNA, 19 nt, Human
agacugcugggacuggcca

SEQ ID NO: 2518883 - RNA, 13 nt, Human
agacugagcucaa

SEQ ID NO: 2518884 - RNA, 22 nt, Human
agagccucccucaauucccccu

SEQ ID NO: 2518885 - RNA, 15 nt, Human
agagccugagaguga

SEQ ID NO: 2518886 - RNA, 17 nt, Human
agagccgugaugccucc

SEQ ID NO: 2518887 - RNA, 20 nt, Human
agagccauguagaagcugca

SEQ ID NO: 2518888 - RNA, 18 nt, Human
agagccauguagaagcug

SEQ ID NO: 2518889 - RNA, 16 nt, Human
agagccauuuugugaa

SEQ ID NO: 2518890 - RNA, 15 nt, Human
agagcccuucauuug

SEQ ID NO: 2518891 - RNA, 19 nt, Human
agagcccuugccuccccau

SEQ ID NO: 2518892 - RNA, 17 nt, Human
agagccauuuugugaau

SEQ ID NO: 2518893 - RNA, 13 nt, Human
agagccgggaagc

SEQ ID NO: 2518894 - RNA, 16 nt, Human
agagccgggaagcgau

SEQ ID NO: 2518895 - RNA, 14 nt, Human
agagcccuugccuc

SEQ ID NO: 2518896 - RNA, 19 nt, Human
agagagaagugccccugcu

SEQ ID NO: 2518897 - RNA, 11 nt, Human
agagagaagcc

SEQ ID NO: 2518898 - RNA, 15 nt, Human
agagagaagugcccc

SEQ ID NO: 2518899 - RNA, 13 nt, Human
agacuggagggga

SEQ ID NO: 2518900 - RNA, 23 nt, Human
agacuggaggggacgcugguaga

SEQ ID NO: 2518901 - RNA, 15 nt, Human
agacuggauacugcc

SEQ ID NO: 2518902 - RNA, 16 nt, Human
agacuggauacugccc

SEQ ID NO: 2518903 - RNA, 16 nt, Human
agagagaccacuuuuc

SEQ ID NO: 2518904 - RNA, 17 nt, Human
agagagagagacagaga

SEQ ID NO: 2518905 - RNA, 13 nt, Human
agagagagaagug

SEQ ID NO: 2518906 - RNA, 20 nt, Human
agacuggaagcuaauuugca

SEQ ID NO: 2518907 - RNA, 23 nt, Human
agacugcuucccauccuacccuc

SEQ ID NO: 2518908 - RNA, 22 nt, Human
agacugcuucccauccuacccu

SEQ ID NO: 2518909 - RNA, 21 nt, Human
agacugcuucccauccuaccc

SEQ ID NO: 2518910 - RNA, 17 nt, Human
agacugcuucccauccu

SEQ ID NO: 2518911 - RNA, 11 nt, Human
agacuggaagg

SEQ ID NO: 2518912 - RNA, 21 nt, Human
agacuggaagcuaauuugcau

SEQ ID NO: 2518913 - RNA, 14 nt, Human
agacuggagcaucu

SEQ ID NO: 2518914 - RNA, 16 nt, Human
agacuggagcaucuga

SEQ ID NO: 2518915 - RNA, 15 nt, Human
agacuggagcaucug

SEQ ID NO: 2518916 - RNA, 18 nt, Human
agacuggagcaucugacu

SEQ ID NO: 2518917 - RNA, 11 nt, Human
agacuggaggg

SEQ ID NO: 2518918 - RNA, 19 nt, Human
agagccauauaaguuugaa

SEQ ID NO: 2518919 - RNA, 22 nt, Human
agagccauauaaguuugaagga

SEQ ID NO: 2518920 - RNA, 20 nt, Human
agagccauauaaguuugaag

SEQ ID NO: 2518921 - RNA, 16 nt, Human
agagccaugcugggaa

SEQ ID NO: 2518922 - RNA, 19 nt, Human
agagccauggacucuacac

SEQ ID NO: 2518923 - RNA, 13 nt, Human
agagcccaccuug

SEQ ID NO: 2518924 - RNA, 13 nt, Human
agagccagggucu

SEQ ID NO: 2518925 - RNA, 19 nt, Human
agagagggguacauuuccc

SEQ ID NO: 2518926 - RNA, 22 nt, Human
agagaggggaauaauagaagaa

SEQ ID NO: 2518927 - RNA, 19 nt, Human
agagagggggccaccuccc

SEQ ID NO: 2518928 - RNA, 16 nt, Human
agagagggggccaccu

SEQ ID NO: 2518929 - RNA, 14 nt, Human
agagagggggccac

SEQ ID NO: 2518930 - RNA, 15 nt, Human
agagagggcuuuaau

SEQ ID NO: 2518931 - RNA, 14 nt, Human
agagagggcaggca

SEQ ID NO: 2518932 - RNA, 15 nt, Human
agagagggcaggcau

SEQ ID NO: 2518933 - RNA, 15 nt, Human
agagagggcagaggg

SEQ ID NO: 2518934 - RNA, 17 nt, Human
agagagggagguaugga

SEQ ID NO: 2518935 - RNA, 17 nt, Human
agagagggaggcaagcc

SEQ ID NO: 2518936 - RNA, 18 nt, Human
agagagggaggcaagccc

SEQ ID NO: 2518937 - RNA, 16 nt, Human
agagaggccuuguccc

SEQ ID NO: 2518938 - RNA, 19 nt, Human
agagagggagaagaaguca

SEQ ID NO: 2518939 - RNA, 16 nt, Human
agagagggagaagaag

SEQ ID NO: 2518940 - RNA, 15 nt, Human
agagagggagaagaa

SEQ ID NO: 2518941 - RNA, 14 nt, Human
agagaggccuuuug

SEQ ID NO: 2518942 - RNA, 20 nt, Human
agagaggccuuuuggaaugu

SEQ ID NO: 2518943 - RNA, 14 nt, Human
agagagaguguuug

SEQ ID NO: 2518944 - RNA, 14 nt, Human
agagagagaggaca

SEQ ID NO: 2518945 - RNA, 13 nt, Human
agagagagagagg

SEQ ID NO: 2518946 - RNA, 15 nt, Human
agagagagagagagg

SEQ ID NO: 2518947 - RNA, 15 nt, Human
agagagagagagaga

SEQ ID NO: 2518948 - RNA, 15 nt, Human
agagagagaggacag

SEQ ID NO: 2518949 - RNA, 20 nt, Human
agacaaugacuuacuguaca

SEQ ID NO: 2518950 - RNA, 23 nt, Human
agacaaaucuaugccacucagaa

SEQ ID NO: 2518951 - RNA, 16 nt, Human
agacaaauauuuggag

SEQ ID NO: 2518952 - RNA, 16 nt, Human
agacaaaucaaagcag

SEQ ID NO: 2518953 - RNA, 15 nt, Human
agacaaauauuugga

SEQ ID NO: 2518954 - RNA, 12 nt, Human
agacaaauauuu

SEQ ID NO: 2518955 - RNA, 17 nt, Human
agacaaauacucaugug

SEQ ID NO: 2518956 - RNA, 14 nt, Human
agacaaauacucau

SEQ ID NO: 2518957 - RNA, 13 nt, Human
agacaaauacuca

SEQ ID NO: 2518958 - RNA, 20 nt, Human
agacaaauacucauguguau

SEQ ID NO: 2518959 - RNA, 18 nt, Human
agacaaauacucaugugu

SEQ ID NO: 2518960 - RNA, 18 nt, Human
agacaaagguuuuccucu

SEQ ID NO: 2518961 - RNA, 16 nt, Human
agacaaaccagaagca

SEQ ID NO: 2518962 - RNA, 19 nt, Human
agacaaacaccucccagga

SEQ ID NO: 2518963 - RNA, 17 nt, Human
agacaaaccagaagcaa

SEQ ID NO: 2518964 - RNA, 21 nt, Human
agacaaugacuuacuguacau

SEQ ID NO: 2518965 - RNA, 22 nt, Human
agacaaugacuuacuguacaug

SEQ ID NO: 2518966 - RNA, 15 nt, Human
agacagagcuacaca

SEQ ID NO: 2518967 - RNA, 18 nt, Human
agacaaaugcugcgcccu

SEQ ID NO: 2518968 - RNA, 14 nt, Human
agacaaauggagga

SEQ ID NO: 2518969 - RNA, 18 nt, Human
agacaaauggaggaauau

SEQ ID NO: 2518970 - RNA, 20 nt, Human
agacagagucucacuguugc

SEQ ID NO: 2518971 - RNA, 19 nt, Human
agacagagucucacuguug

SEQ ID NO: 2518972 - RNA, 11 nt, Human
agacagagucu

SEQ ID NO: 2518973 - RNA, 13 nt, Human
agacagagcuaca

SEQ ID NO: 2518974 - RNA, 15 nt, Human
agacagagcucacaa

SEQ ID NO: 2518975 - RNA, 21 nt, Human
agacagagcugguugggaaga

SEQ ID NO: 2518976 - RNA, 12 nt, Human
agacagagcugg

SEQ ID NO: 2518977 - RNA, 21 nt, Human
agacagagucucacuguugcc

SEQ ID NO: 2518978 - RNA, 22 nt, Human
agacagauacuccuccaagguu

SEQ ID NO: 2518979 - RNA, 14 nt, Human
agacagaugcccca

SEQ ID NO: 2518980 - RNA, 15 nt, Human
agacagaugccccag

SEQ ID NO: 2518981 - RNA, 16 nt, Human
agacagaugccccaga

SEQ ID NO: 2518982 - RNA, 19 nt, Human
agacagaugccccagagcu

SEQ ID NO: 2518983 - RNA, 12 nt, Human
agacagcagcuc

SEQ ID NO: 2518984 - RNA, 14 nt, Human
agacagcagcucag

SEQ ID NO: 2518985 - RNA, 22 nt, Human
agacagccaacuauggccugug

SEQ ID NO: 2518986 - RNA, 16 nt, Human
agacagcagcucaggc

SEQ ID NO: 2518987 - RNA, 14 nt, Human
agaccagacugugg

SEQ ID NO: 2518988 - RNA, 18 nt, Human
agacagccacauugggca

SEQ ID NO: 2518989 - RNA, 15 nt, Human
agaccacguuucuaa

SEQ ID NO: 2518990 - RNA, 22 nt, Human
agaccagacuguggagaaauaa

SEQ ID NO: 2518991 - RNA, 18 nt, Human
agaccagacuguggagaa

SEQ ID NO: 2518992 - RNA, 17 nt, Human
agaccagacuguggaga

SEQ ID NO: 2518993 - RNA, 16 nt, Human
agaccagacuguggag

SEQ ID NO: 2518994 - RNA, 22 nt, Human
agacgccggggacagaggccug

SEQ ID NO: 2518995 - RNA, 20 nt, Human
agacgccggggacagaggcc

SEQ ID NO: 2518996 - RNA, 13 nt, Human
agacgccugagga

SEQ ID NO: 2518997 - RNA, 15 nt, Human
agacgccugagcuca

SEQ ID NO: 2518998 - RNA, 15 nt, Human
agacgccugaggaac

SEQ ID NO: 2518999 - RNA, 20 nt, Human
agacgccaccauuccuggaa

SEQ ID NO: 2519000 - RNA, 17 nt, Human
agacgccaccauuccug

SEQ ID NO: 2519001 - RNA, 15 nt, Human
agacgccaccauucc

SEQ ID NO: 2519002 - RNA, 19 nt, Human
agacgaugucuucauaccu

SEQ ID NO: 2519003 - RNA, 16 nt, Human
agacgaugucuucaua

SEQ ID NO: 2519004 - RNA, 18 nt, Human
agacccagcccucauccc

SEQ ID NO: 2519005 - RNA, 19 nt, Human
agacccagcccucaucccg

SEQ ID NO: 2519006 - RNA, 17 nt, Human
agacgaugucuucauac

SEQ ID NO: 2519007 - RNA, 14 nt, Human
agacccaaggagga

SEQ ID NO: 2519008 - RNA, 16 nt, Human
agacccaaggaggaaa

SEQ ID NO: 2519009 - RNA, 17 nt, Human
agacccagcccucaucc

SEQ ID NO: 2519010 - RNA, 17 nt, Human
agacccaaaaggcagaa

SEQ ID NO: 2519011 - RNA, 19 nt, Human
agacccaaaaggcagaagc

SEQ ID NO: 2519012 - RNA, 12 nt, Human
agaccagccugg

SEQ ID NO: 2519013 - RNA, 14 nt, Human
agaccagccuggcc

SEQ ID NO: 2519014 - RNA, 13 nt, Human
agaccagccuggc

SEQ ID NO: 2519015 - RNA, 15 nt, Human
agaccagccuggcca

SEQ ID NO: 2519016 - RNA, 12 nt, Human
agaccagcucuu

SEQ ID NO: 2519017 - RNA, 17 nt, Human
agaaugggaauauuuua

SEQ ID NO: 2519018 - RNA, 20 nt, Human
agaaugcuguacaucuauuu

SEQ ID NO: 2519019 - RNA, 14 nt, Human
agaaugcuguacau

SEQ ID NO: 2519020 - RNA, 15 nt, Human
agaaugcuguacauc

SEQ ID NO: 2519021 - RNA, 11 nt, Human
agaaugcugaa

SEQ ID NO: 2519022 - RNA, 16 nt, Human
agaaugauuuuuagau

SEQ ID NO: 2519023 - RNA, 13 nt, Human
agaaugauuucau

SEQ ID NO: 2519024 - RNA, 14 nt, Human
agaaugauuucaug

SEQ ID NO: 2519025 - RNA, 17 nt, Human
agaaugcugaaaccaag

SEQ ID NO: 2519026 - RNA, 12 nt, Human
agaaugcugaaa

SEQ ID NO: 2519027 - RNA, 22 nt, Human
agaaugcugcaggacuugagaa

SEQ ID NO: 2519028 - RNA, 13 nt, Human
agaaugcuguaca

SEQ ID NO: 2519029 - RNA, 13 nt, Human
agaaugcugguuu

SEQ ID NO: 2519030 - RNA, 18 nt, Human
agaaugcugguuuuccua

SEQ ID NO: 2519031 - RNA, 22 nt, Human
agaaugagagacacacugaaga

SEQ ID NO: 2519032 - RNA, 17 nt, Human
agaaugagagacacacu

SEQ ID NO: 2519033 - RNA, 16 nt, Human
agaagugacagggaag

SEQ ID NO: 2519034 - RNA, 15 nt, Human
agaaugaacaaauug

SEQ ID NO: 2519035 - RNA, 22 nt, Human
agaaugcacaaacagaggccgc

SEQ ID NO: 2519036 - RNA, 19 nt, Human
agaaugcacaaacagaggc

SEQ ID NO: 2519037 - RNA, 17 nt, Human
agaaugauuaugaauua

SEQ ID NO: 2519038 - RNA, 14 nt, Human
agaaugagagugug

SEQ ID NO: 2519039 - RNA, 17 nt, Human
agaagugacagggaagc

SEQ ID NO: 2519040 - RNA, 14 nt, Human
agaagugacaggga

SEQ ID NO: 2519041 - RNA, 13 nt, Human
agaagugacaggg

SEQ ID NO: 2519042 - RNA, 16 nt, Human
agaaugaaauacuguu

SEQ ID NO: 2519043 - RNA, 19 nt, Human
agaaugaaauacuguuuga

SEQ ID NO: 2519044 - RNA, 20 nt, Human
agaaugaaauacuguuugag

SEQ ID NO: 2519045 - RNA, 20 nt, Human
agaaugaaauugcugaaaga

SEQ ID NO: 2519046 - RNA, 12 nt, Human
agaagugacagg

SEQ ID NO: 2519047 - RNA, 21 nt, Human
agaagugaaugcugggacuca

SEQ ID NO: 2519048 - RNA, 19 nt, Human
agaagugaaugcugggacu

SEQ ID NO: 2519049 - RNA, 17 nt, Human
agaagugaaugcuggga

SEQ ID NO: 2519050 - RNA, 18 nt, Human
agaaugaaagggcccaga

SEQ ID NO: 2519051 - RNA, 14 nt, Human
agaagucaaaguaa

SEQ ID NO: 2519052 - RNA, 16 nt, Human
agaaguauuauaaauu

SEQ ID NO: 2519053 - RNA, 22 nt, Human
agaagucagagagggugacaag

SEQ ID NO: 2519054 - RNA, 13 nt, Human
agaagucaugaag

SEQ ID NO: 2519055 - RNA, 21 nt, Human
agaagugaaaaucuacacucc

SEQ ID NO: 2519056 - RNA, 17 nt, Human
agaagucaugaagccca

SEQ ID NO: 2519057 - RNA, 16 nt, Human
agaagugaaugcuggg

SEQ ID NO: 2519058 - RNA, 21 nt, Human
agaagguauuccuuuugugua

SEQ ID NO: 2519059 - RNA, 23 nt, Human
agaaggguuuuccacccuggaau

SEQ ID NO: 2519060 - RNA, 21 nt, Human
agaaggguuuuccacccugga

SEQ ID NO: 2519061 - RNA, 22 nt, Human
agaaggguuuuccacccuggaa

SEQ ID NO: 2519062 - RNA, 15 nt, Human
agaaggguccuuccc

SEQ ID NO: 2519063 - RNA, 18 nt, Human
agaaggguccuucccucu

SEQ ID NO: 2519064 - RNA, 20 nt, Human
agaaggguccuucccucucc

SEQ ID NO: 2519065 - RNA, 23 nt, Human
agaaggguccuucccucucccca

SEQ ID NO: 2519066 - RNA, 16 nt, Human
agaaggguuauauuuu

SEQ ID NO: 2519067 - RNA, 19 nt, Human
agaaggguuauauuuuacu

SEQ ID NO: 2519068 - RNA, 20 nt, Human
agaaggguuuuccacccugg

SEQ ID NO: 2519069 - RNA, 18 nt, Human
agaagguuaccaagaagc

SEQ ID NO: 2519070 - RNA, 22 nt, Human
agaagguggguuuucaucaaga

SEQ ID NO: 2519071 - RNA, 21 nt, Human
agaaggugccucaagaauuuc

SEQ ID NO: 2519072 - RNA, 14 nt, Human
agaagguccuuaau

SEQ ID NO: 2519073 - RNA, 20 nt, Human
agaagguccuuaaugauccg

SEQ ID NO: 2519074 - RNA, 20 nt, Human
agaaggucggaggcuuggga

SEQ ID NO: 2519075 - RNA, 21 nt, Human
agaagguccuuaaugauccgu

SEQ ID NO: 2519076 - RNA, 18 nt, Human
agaagagggccuguggga

SEQ ID NO: 2519077 - RNA, 16 nt, Human
agaagagggccugugg

SEQ ID NO: 2519078 - RNA, 14 nt, Human
agaagagggccugu

SEQ ID NO: 2519079 - RNA, 12 nt, Human
agaagagggaga

SEQ ID NO: 2519080 - RNA, 15 nt, Human
agaagagggguuuuu

SEQ ID NO: 2519081 - RNA, 24 nt, Human
agaagagggccugugggagccugc

SEQ ID NO: 2519082 - RNA, 22 nt, Human
agaagagaugggcuuguuuucu

SEQ ID NO: 2519083 - RNA, 22 nt, Human
agaagaggcuggugcuguggcc

SEQ ID NO: 2519084 - RNA, 17 nt, Human
agaagaggcuggugcug

SEQ ID NO: 2519085 - RNA, 20 nt, Human
agaagagaugggcuuguuuu

SEQ ID NO: 2519086 - RNA, 13 nt, Human
agaagauagcagg

SEQ ID NO: 2519087 - RNA, 20 nt, Human
agaaggggguggugucucca

SEQ ID NO: 2519088 - RNA, 13 nt, Human
agaaggggguggu

SEQ ID NO: 2519089 - RNA, 17 nt, Human
agaagggggccaugagg

SEQ ID NO: 2519090 - RNA, 19 nt, Human
agaaguauuauaaauuaug

SEQ ID NO: 2519091 - RNA, 14 nt, Human
agaaguauuauaaa

SEQ ID NO: 2519092 - RNA, 20 nt, Human
agaaguagauuaagagccau

SEQ ID NO: 2519093 - RNA, 13 nt, Human
agaaguagauuaa

SEQ ID NO: 2519094 - RNA, 21 nt, Human
agaaguaggcaugagggauca

SEQ ID NO: 2519095 - RNA, 19 nt, Human
agaaguagauuaagagcca

SEQ ID NO: 2519096 - RNA, 17 nt, Human
agaaguaggcaugaggg

SEQ ID NO: 2519097 - RNA, 13 nt, Human
agaaguauacaua

SEQ ID NO: 2519098 - RNA, 21 nt, Human
agaaguacugcccuuuugugu

SEQ ID NO: 2519099 - RNA, 14 nt, Human
agaaguaacuuacu

SEQ ID NO: 2519100 - RNA, 16 nt, Human
agaagguugcucuaga

SEQ ID NO: 2519101 - RNA, 20 nt, Human
agaagguugcucuagauuga

SEQ ID NO: 2519102 - RNA, 20 nt, Human
agaagguuaccaagaagccu

SEQ ID NO: 2519103 - RNA, 18 nt, Human
agaagguuucagaaagaa

SEQ ID NO: 2519104 - RNA, 20 nt, Human
agaagguuuguguuuuucug

SEQ ID NO: 2519105 - RNA, 19 nt, Human
agaagguuuguguuuuucu

SEQ ID NO: 2519106 - RNA, 17 nt, Human
agaagguuuguguuuuu

SEQ ID NO: 2519107 - RNA, 16 nt, Human
agaagacauguuuuag

SEQ ID NO: 2519108 - RNA, 15 nt, Human
agaagacauguuuua

SEQ ID NO: 2519109 - RNA, 14 nt, Human
agaagacauguuuu

SEQ ID NO: 2519110 - RNA, 13 nt, Human
agaagacauguuu

SEQ ID NO: 2519111 - RNA, 22 nt, Human
agaagacauggagacuccugcc

SEQ ID NO: 2519112 - RNA, 20 nt, Human
agaagacauggagacuccug

SEQ ID NO: 2519113 - RNA, 19 nt, Human
agaagacauggagacuccu

SEQ ID NO: 2519114 - RNA, 16 nt, Human
agaagacauggagacu

SEQ ID NO: 2519115 - RNA, 19 nt, Human
agaagacucuaccagacug

SEQ ID NO: 2519116 - RNA, 14 nt, Human
agaagacccuucuc

SEQ ID NO: 2519117 - RNA, 14 nt, Human
agaagacucuacca

SEQ ID NO: 2519118 - RNA, 19 nt, Human
agaagacauguuuuagaca

SEQ ID NO: 2519119 - RNA, 17 nt, Human
agaagacauguuuuaga

SEQ ID NO: 2519120 - RNA, 21 nt, Human
agaagaccacaaaaauugacu

SEQ ID NO: 2519121 - RNA, 18 nt, Human
agaagacugcauuauauu

SEQ ID NO: 2519122 - RNA, 12 nt, Human
agaagagacagg

SEQ ID NO: 2519123 - RNA, 20 nt, Human
agaagacucuaccagacugu

SEQ ID NO: 2519124 - RNA, 18 nt, Human
agaagagacucuuugcau

SEQ ID NO: 2519125 - RNA, 13 nt, Human
agaagagaggaga

SEQ ID NO: 2519126 - RNA, 15 nt, Human
agaagagagaucaaa

SEQ ID NO: 2519127 - RNA, 15 nt, Human
agaagagagaaauag

SEQ ID NO: 2519128 - RNA, 22 nt, Human
agaagagcuguucacagccaga

SEQ ID NO: 2519129 - RNA, 21 nt, Human
agaagagcuguucacagccag

SEQ ID NO: 2519130 - RNA, 21 nt, Human
agaagagauugugguuucauu

SEQ ID NO: 2519131 - RNA, 21 nt, Human
agaagagaggagaggagagag

SEQ ID NO: 2519132 - RNA, 20 nt, Human
agaagagaggagaggagaga

SEQ ID NO: 2519133 - RNA, 16 nt, Human
agaagagaggagagga

SEQ ID NO: 2519134 - RNA, 15 nt, Human
agaagagaggagagg

SEQ ID NO: 2519135 - RNA, 22 nt, Human
agaagagaggagaggagagagg

SEQ ID NO: 2519136 - RNA, 22 nt, Human
agaagagaguccauauuucaau

SEQ ID NO: 2519137 - RNA, 21 nt, Human
agaagacacugaugggcaacc

SEQ ID NO: 2519138 - RNA, 12 nt, Human
agaagacaugaa

SEQ ID NO: 2519139 - RNA, 23 nt, Human
agaagacaccagagcagaugcag

SEQ ID NO: 2519140 - RNA, 12 nt, Human
agaagacacugc

SEQ ID NO: 2519141 - RNA, 15 nt, Human
agaagacaugaacca

SEQ ID NO: 2519142 - RNA, 14 nt, Human
agaagacauggaga

SEQ ID NO: 2519143 - RNA, 16 nt, Human
agaagacaugaaccaa

SEQ ID NO: 2519144 - RNA, 22 nt, Human
agaagacaccagagcagaugca

SEQ ID NO: 2519145 - RNA, 19 nt, Human
agaagacaccagagcagau

SEQ ID NO: 2519146 - RNA, 18 nt, Human
agaagacaccagagcaga

SEQ ID NO: 2519147 - RNA, 17 nt, Human
agaagacaccagagcag

SEQ ID NO: 2519148 - RNA, 16 nt, Human
agaagacaccagagca

SEQ ID NO: 2519149 - RNA, 15 nt, Human
agaagacaccagagc

SEQ ID NO: 2519150 - RNA, 14 nt, Human
agaagacaccagag

SEQ ID NO: 2519151 - RNA, 13 nt, Human
agaagacacugau

SEQ ID NO: 2519152 - RNA, 19 nt, Human
acuuuccuccugaggcuuu

SEQ ID NO: 2519153 - RNA, 21 nt, Human
acuuuccucuuuggucuacac

SEQ ID NO: 2519154 - RNA, 21 nt, Human
acuuuccucuuagucgagcca

SEQ ID NO: 2519155 - RNA, 17 nt, Human
acuuuccuccuggcaga

SEQ ID NO: 2519156 - RNA, 16 nt, Human
agccaaaccucuguga

SEQ ID NO: 2519157 - RNA, 13 nt, Human
agccaaagaaaaa

SEQ ID NO: 2519158 - RNA, 14 nt, Human
agccaaacucugcc

SEQ ID NO: 2519159 - RNA, 15 nt, Human
agccaaacucugcca

SEQ ID NO: 2519160 - RNA, 17 nt, Human
agcauccuggcacccgg

SEQ ID NO: 2519161 - RNA, 14 nt, Human
agcauccuggcacc

SEQ ID NO: 2519162 - RNA, 18 nt, Human
agccaaagcuaggccugg

SEQ ID NO: 2519163 - RNA, 16 nt, Human
agccaaagcuaggccu

SEQ ID NO: 2519164 - RNA, 11 nt, Human
agccaaagagu

SEQ ID NO: 2519165 - RNA, 12 nt, Human
agccaaagaaaa

SEQ ID NO: 2519166 - RNA, 15 nt, Human
agccaaagauaaucu

SEQ ID NO: 2519167 - RNA, 19 nt, Human
agccaagaucgcgccacug

SEQ ID NO: 2519168 - RNA, 12 nt, Human
agccaaagccaa

SEQ ID NO: 2519169 - RNA, 19 nt, Human
agccaagauugcgccauug

SEQ ID NO: 2519170 - RNA, 17 nt, Human
agccaagcacaguggug

SEQ ID NO: 2519171 - RNA, 16 nt, Human
agccaagcacaguggu

SEQ ID NO: 2519172 - RNA, 14 nt, Human
agccaagcacagug

SEQ ID NO: 2519173 - RNA, 13 nt, Human
agccaagcacagu

SEQ ID NO: 2519174 - RNA, 21 nt, Human
agccaagcacagugguggcag

SEQ ID NO: 2519175 - RNA, 18 nt, Human
agccaagcacaguggugg

SEQ ID NO: 2519176 - RNA, 13 nt, Human
agccaagcagcca

SEQ ID NO: 2519177 - RNA, 16 nt, Human
agccaagcagccaagc

SEQ ID NO: 2519178 - RNA, 15 nt, Human
agccagaggagagag

SEQ ID NO: 2519179 - RNA, 13 nt, Human
agccagaggagag

SEQ ID NO: 2519180 - RNA, 21 nt, Human
agccaagcuagaauucccucu

SEQ ID NO: 2519181 - RNA, 15 nt, Human
agccaagcuccuugg

SEQ ID NO: 2519182 - RNA, 17 nt, Human
agccaagcuccuuggga

SEQ ID NO: 2519183 - RNA, 23 nt, Human
agccaagcuccuugggaggcccc

SEQ ID NO: 2519184 - RNA, 18 nt, Human
agccagaggagagaggac

SEQ ID NO: 2519185 - RNA, 17 nt, Human
agccagaggagagagga

SEQ ID NO: 2519186 - RNA, 14 nt, Human
agccagcaggcucu

SEQ ID NO: 2519187 - RNA, 11 nt, Human
agccagcagcc

SEQ ID NO: 2519188 - RNA, 13 nt, Human
agccagcagccag

SEQ ID NO: 2519189 - RNA, 17 nt, Human
agccagcagacauuguc

SEQ ID NO: 2519190 - RNA, 15 nt, Human
agcccacgcccccac

SEQ ID NO: 2519191 - RNA, 20 nt, Human
agcccacgcccccacuggug

SEQ ID NO: 2519192 - RNA, 14 nt, Human
agcccacgccccca

SEQ ID NO: 2519193 - RNA, 23 nt, Human
agcccacgcccccacuggugaca

SEQ ID NO: 2519194 - RNA, 15 nt, Human
agcccacucugcucg

SEQ ID NO: 2519195 - RNA, 13 nt, Human
agcccacucugcu

SEQ ID NO: 2519196 - RNA, 14 nt, Human
agcccacucugcuc

SEQ ID NO: 2519197 - RNA, 17 nt, Human
agcccacguccugucag

SEQ ID NO: 2519198 - RNA, 15 nt, Human
agcccacguccuguc

SEQ ID NO: 2519199 - RNA, 14 nt, Human
agcccacguccugu

SEQ ID NO: 2519200 - RNA, 21 nt, Human
agcccacguccugucagugcc

SEQ ID NO: 2519201 - RNA, 19 nt, Human
agcccacguccugucagug

SEQ ID NO: 2519202 - RNA, 22 nt, Human
agcccacguccugucagugccg

SEQ ID NO: 2519203 - RNA, 14 nt, Human
agcccaccuuggcu

SEQ ID NO: 2519204 - RNA, 16 nt, Human
agcccaccuuggcuca

SEQ ID NO: 2519205 - RNA, 15 nt, Human
agcccaccccucaac

SEQ ID NO: 2519206 - RNA, 13 nt, Human
agcccaccccccu

SEQ ID NO: 2519207 - RNA, 14 nt, Human
agcccaccccccuc

SEQ ID NO: 2519208 - RNA, 16 nt, Human
agcccaccccccucau

SEQ ID NO: 2519209 - RNA, 17 nt, Human
agcccacacuugagagg

SEQ ID NO: 2519210 - RNA, 16 nt, Human
agccagcaggcucuca

SEQ ID NO: 2519211 - RNA, 16 nt, Human
agcccaauaaaccucu

SEQ ID NO: 2519212 - RNA, 14 nt, Human
agccagcagccagc

SEQ ID NO: 2519213 - RNA, 16 nt, Human
agccagcagccagcuc

SEQ ID NO: 2519214 - RNA, 23 nt, Human
agcccacacuugagaggaugaau

SEQ ID NO: 2519215 - RNA, 15 nt, Human
agcccacacuugaga

SEQ ID NO: 2519216 - RNA, 17 nt, Human
agcccacaaagccuuau

SEQ ID NO: 2519217 - RNA, 16 nt, Human
agcccacaaagccuua

SEQ ID NO: 2519218 - RNA, 22 nt, Human
agccagcagacauugucagcaa

SEQ ID NO: 2519219 - RNA, 16 nt, Human
agcccaaugaaaugaa

SEQ ID NO: 2519220 - RNA, 20 nt, Human
agcccaauauuauaauuuuu

SEQ ID NO: 2519221 - RNA, 16 nt, Human
agcccaauauuauaau

SEQ ID NO: 2519222 - RNA, 15 nt, Human
agcccaauauuauaa

SEQ ID NO: 2519223 - RNA, 20 nt, Human
agccagcagccagcucucag

SEQ ID NO: 2519224 - RNA, 15 nt, Human
agcaggaaaugaaaa

SEQ ID NO: 2519225 - RNA, 21 nt, Human
agcaggaaaugaaaaugucuu

SEQ ID NO: 2519226 - RNA, 21 nt, Human
agcagcuuuuuuuuccccccu

SEQ ID NO: 2519227 - RNA, 22 nt, Human
agcagcuuuaaacucagggaca

SEQ ID NO: 2519228 - RNA, 23 nt, Human
agcaggaaaugaaaaugucuugu

SEQ ID NO: 2519229 - RNA, 21 nt, Human
agcaggaagcauucagagagc

SEQ ID NO: 2519230 - RNA, 13 nt, Human
agcauccuggcac

SEQ ID NO: 2519231 - RNA, 23 nt, Human
agccccaaagucaauuaaaggcu

SEQ ID NO: 2519232 - RNA, 14 nt, Human
agccccaaguccug

SEQ ID NO: 2519233 - RNA, 18 nt, Human
agccccacagcccacguc

SEQ ID NO: 2519234 - RNA, 17 nt, Human
agccccacagcccacgu

SEQ ID NO: 2519235 - RNA, 16 nt, Human
agccccacagcccacg

SEQ ID NO: 2519236 - RNA, 15 nt, Human
agccccacagcccac

SEQ ID NO: 2519237 - RNA, 14 nt, Human
agccccacagccca

SEQ ID NO: 2519238 - RNA, 12 nt, Human
agccccacagcc

SEQ ID NO: 2519239 - RNA, 13 nt, Human
agccccacagccc

SEQ ID NO: 2519240 - RNA, 19 nt, Human
agccccaaguccugaagag

SEQ ID NO: 2519241 - RNA, 15 nt, Human
agccccaaguccuga

SEQ ID NO: 2519242 - RNA, 11 nt, Human
agccccacagc

SEQ ID NO: 2519243 - RNA, 20 nt, Human
agccccacacuggggugccg

SEQ ID NO: 2519244 - RNA, 15 nt, Human
agccccacacggagg

SEQ ID NO: 2519245 - RNA, 21 nt, Human
agcccgggcucugccucccau

SEQ ID NO: 2519246 - RNA, 20 nt, Human
agcccgggcucugccuccca

SEQ ID NO: 2519247 - RNA, 18 nt, Human
agcccgggcucugccucc

SEQ ID NO: 2519248 - RNA, 17 nt, Human
agcccgggcucugccuc

SEQ ID NO: 2519249 - RNA, 21 nt, Human
agcccuccaucuaaacugccc

SEQ ID NO: 2519250 - RNA, 23 nt, Human
agcccuccaucuaaacugccccc

SEQ ID NO: 2519251 - RNA, 20 nt, Human
agccccacagcccacguccu

SEQ ID NO: 2519252 - RNA, 12 nt, Human
agcccuccccau

SEQ ID NO: 2519253 - RNA, 19 nt, Human
agcccuccccauggagcca

SEQ ID NO: 2519254 - RNA, 20 nt, Human
agcccuccccauggagccag

SEQ ID NO: 2519255 - RNA, 21 nt, Human
agcccuccccauggagccagc

SEQ ID NO: 2519256 - RNA, 13 nt, Human
agcccucccugcc

SEQ ID NO: 2519257 - RNA, 12 nt, Human
agcccucccugc

SEQ ID NO: 2519258 - RNA, 19 nt, Human
agccccauucugccugccc

SEQ ID NO: 2519259 - RNA, 18 nt, Human
agccccauucugccugcc

SEQ ID NO: 2519260 - RNA, 17 nt, Human
agccccauucugccugc

SEQ ID NO: 2519261 - RNA, 20 nt, Human
agccccacccaggagggagg

SEQ ID NO: 2519262 - RNA, 23 nt, Human
agccccauccucuguacagagcc

SEQ ID NO: 2519263 - RNA, 17 nt, Human
agccccauccucuguac

SEQ ID NO: 2519264 - RNA, 15 nt, Human
agccccauccucugu

SEQ ID NO: 2519265 - RNA, 12 nt, Human
agccccacccag

SEQ ID NO: 2519266 - RNA, 13 nt, Human
agccccacccagg

SEQ ID NO: 2519267 - RNA, 15 nt, Human
agccccacccaggag

SEQ ID NO: 2519268 - RNA, 16 nt, Human
agccccacccaggagg

SEQ ID NO: 2519269 - RNA, 12 nt, Human
agcacuuaagag

SEQ ID NO: 2519270 - RNA, 20 nt, Human
agcacggccaacaaagcugu

SEQ ID NO: 2519271 - RNA, 17 nt, Human
agcacggacucuuacug

SEQ ID NO: 2519272 - RNA, 18 nt, Human
agcacuuaagagaauauu

SEQ ID NO: 2519273 - RNA, 17 nt, Human
agcacuuaagagaauau

SEQ ID NO: 2519274 - RNA, 15 nt, Human
agcacuuaagagaau

SEQ ID NO: 2519275 - RNA, 13 nt, Human
agcacuuaagaga

SEQ ID NO: 2519276 - RNA, 15 nt, Human
agcacuuauuuaaug

SEQ ID NO: 2519277 - RNA, 16 nt, Human
agcacagacccugccc

SEQ ID NO: 2519278 - RNA, 17 nt, Human
agcacgauuucuguuua

SEQ ID NO: 2519279 - RNA, 19 nt, Human
agcacgauuucuguuuaga

SEQ ID NO: 2519280 - RNA, 21 nt, Human
agcacgauuucuguuuagaua

SEQ ID NO: 2519281 - RNA, 17 nt, Human
agcagcuucaguuguuu

SEQ ID NO: 2519282 - RNA, 16 nt, Human
agcagcuucaguuguu

SEQ ID NO: 2519283 - RNA, 18 nt, Human
agcagcuucaccagagca

SEQ ID NO: 2519284 - RNA, 16 nt, Human
agcagcuucaccagag

SEQ ID NO: 2519285 - RNA, 13 nt, Human
agcagccugagca

SEQ ID NO: 2519286 - RNA, 19 nt, Human
agcagccugagcaacucuu

SEQ ID NO: 2519287 - RNA, 20 nt, Human
agcagccucuccccaggucc

SEQ ID NO: 2519288 - RNA, 18 nt, Human
agcagccucuccccaggu

SEQ ID NO: 2519289 - RNA, 21 nt, Human
agcagccucuccccaggucca

SEQ ID NO: 2519290 - RNA, 16 nt, Human
agcagcuucugccacu

SEQ ID NO: 2519291 - RNA, 15 nt, Human
agcagcuucugccac

SEQ ID NO: 2519292 - RNA, 16 nt, Human
agcagcuuccagauug

SEQ ID NO: 2519293 - RNA, 14 nt, Human
agcagcuuccagau

SEQ ID NO: 2519294 - RNA, 12 nt, Human
agcagcuuccag

SEQ ID NO: 2519295 - RNA, 20 nt, Human
agcagcuuuaaacucaggga

SEQ ID NO: 2519296 - RNA, 19 nt, Human
agcagcuuuaaacucaggg

SEQ ID NO: 2519297 - RNA, 17 nt, Human
agcagcuuuaaacaaau

SEQ ID NO: 2519298 - RNA, 22 nt, Human
agcagcuucugccacuucccag

SEQ ID NO: 2519299 - RNA, 20 nt, Human
agcagcuucugccacuuccc

SEQ ID NO: 2519300 - RNA, 17 nt, Human
agcagcuucugccacuu

SEQ ID NO: 2519301 - RNA, 16 nt, Human
agcagcuuuaaacaaa

SEQ ID NO: 2519302 - RNA, 21 nt, Human
agcacuuggacucuugcucuu

SEQ ID NO: 2519303 - RNA, 20 nt, Human
agcacuuggacucuugcucu

SEQ ID NO: 2519304 - RNA, 18 nt, Human
agcacuuggacucuugcu

SEQ ID NO: 2519305 - RNA, 13 nt, Human
agcacuuggacuc

SEQ ID NO: 2519306 - RNA, 22 nt, Human
agcacuugcaaccgucuguuau

SEQ ID NO: 2519307 - RNA, 13 nt, Human
agcacuugcugua

SEQ ID NO: 2519308 - RNA, 14 nt, Human
agcacuuggagcca

SEQ ID NO: 2519309 - RNA, 17 nt, Human
agcacuuggagccaagg

SEQ ID NO: 2519310 - RNA, 16 nt, Human
agcagcccuccucacc

SEQ ID NO: 2519311 - RNA, 17 nt, Human
agcagcccuccucaccc

SEQ ID NO: 2519312 - RNA, 23 nt, Human
agcagcccuccucaccccgucug

SEQ ID NO: 2519313 - RNA, 15 nt, Human
agcagccucucccca

SEQ ID NO: 2519314 - RNA, 20 nt, Human
agcagccucagaacaaagug

SEQ ID NO: 2519315 - RNA, 16 nt, Human
agcagcccuuggccag

SEQ ID NO: 2519316 - RNA, 22 nt, Human
agcagcccuuggccagaaguca

SEQ ID NO: 2519317 - RNA, 13 nt, Human
agcagcccuuggc

SEQ ID NO: 2519318 - RNA, 19 nt, Human
agcagcccuggagucaugc

SEQ ID NO: 2519319 - RNA, 17 nt, Human
agcagcccuggagucau

SEQ ID NO: 2519320 - RNA, 16 nt, Human
agcagcccuggaguca

SEQ ID NO: 2519321 - RNA, 15 nt, Human
agcagcccuggaguc

SEQ ID NO: 2519322 - RNA, 18 nt, Human
agcagcccuccucacccc

SEQ ID NO: 2519323 - RNA, 19 nt, Human
agcaaugacaucucagggg

SEQ ID NO: 2519324 - RNA, 18 nt, Human
agcaaugacaucucaggg

SEQ ID NO: 2519325 - RNA, 20 nt, Human
agcaaugcccguaaugcuua

SEQ ID NO: 2519326 - RNA, 13 nt, Human
agcaaugcauuuu

SEQ ID NO: 2519327 - RNA, 23 nt, Human
agcaaugauguccagaagaauau

SEQ ID NO: 2519328 - RNA, 20 nt, Human
agcaaugauguccagaagaa

SEQ ID NO: 2519329 - RNA, 19 nt, Human
agcaaugauguccagaaga

SEQ ID NO: 2519330 - RNA, 18 nt, Human
agcaaugauguccagaag

SEQ ID NO: 2519331 - RNA, 21 nt, Human
agcaaugacaucucaggggcc

SEQ ID NO: 2519332 - RNA, 20 nt, Human
agcaaugacaucucaggggc

SEQ ID NO: 2519333 - RNA, 21 nt, Human
agcaauggacgguccgcagaa

SEQ ID NO: 2519334 - RNA, 21 nt, Human
agcaaugcccguaaugcuuag

SEQ ID NO: 2519335 - RNA, 13 nt, Human
agcaaugucugug

SEQ ID NO: 2519336 - RNA, 15 nt, Human
agcaaugccugccca

SEQ ID NO: 2519337 - RNA, 18 nt, Human
agcacaagaagcgugaga

SEQ ID NO: 2519338 - RNA, 13 nt, Human
agcacaagaagcg

SEQ ID NO: 2519339 - RNA, 12 nt, Human
agcacaagaagc

SEQ ID NO: 2519340 - RNA, 11 nt, Human
agcacaagaag

SEQ ID NO: 2519341 - RNA, 19 nt, Human
agcacaacuuuaagaggac

SEQ ID NO: 2519342 - RNA, 15 nt, Human
agcaaugucugugcu

SEQ ID NO: 2519343 - RNA, 14 nt, Human
agcaaugucugugc

SEQ ID NO: 2519344 - RNA, 16 nt, Human
agcaaugucugugcua

SEQ ID NO: 2519345 - RNA, 15 nt, Human
agcacagacccugcc

SEQ ID NO: 2519346 - RNA, 14 nt, Human
agcacagacccugc

SEQ ID NO: 2519347 - RNA, 12 nt, Human
agcacagacccu

SEQ ID NO: 2519348 - RNA, 14 nt, Human
agcacacacuuuug

SEQ ID NO: 2519349 - RNA, 20 nt, Human
agcacacacuuuugguuaag

SEQ ID NO: 2519350 - RNA, 13 nt, Human
agaucuggaaccu

SEQ ID NO: 2519351 - RNA, 14 nt, Human
agaucuggaaccuc

SEQ ID NO: 2519352 - RNA, 12 nt, Human
agaucugguuuu

SEQ ID NO: 2519353 - RNA, 17 nt, Human
agaucuggacuuggcaa

SEQ ID NO: 2519354 - RNA, 17 nt, Human
agaucugguuuugcuau

SEQ ID NO: 2519355 - RNA, 15 nt, Human
agaucugguuuugcu

SEQ ID NO: 2519356 - RNA, 14 nt, Human
agaucuguccucag

SEQ ID NO: 2519357 - RNA, 15 nt, Human
agaucuggaaccuca

SEQ ID NO: 2519358 - RNA, 17 nt, Human
agaucuggaaccucagc

SEQ ID NO: 2519359 - RNA, 19 nt, Human
agaucuggaaccucagccu

SEQ ID NO: 2519360 - RNA, 20 nt, Human
agaucuggaaccucagccug

SEQ ID NO: 2519361 - RNA, 18 nt, Human
agaucugguuuugcuauu

SEQ ID NO: 2519362 - RNA, 18 nt, Human
agaucuguccucagccuu

SEQ ID NO: 2519363 - RNA, 15 nt, Human
agaucuguccucagc

SEQ ID NO: 2519364 - RNA, 17 nt, Human
agaucuguccucagccu

SEQ ID NO: 2519365 - RNA, 17 nt, Human
agaugaagagugagagg

SEQ ID NO: 2519366 - RNA, 19 nt, Human
agaugaacucuuagaaaug

SEQ ID NO: 2519367 - RNA, 19 nt, Human
agaugaagagugagagggc

SEQ ID NO: 2519368 - RNA, 16 nt, Human
agaugaaggagaggca

SEQ ID NO: 2519369 - RNA, 17 nt, Human
agaugaagcaaacacau

SEQ ID NO: 2519370 - RNA, 18 nt, Human
agaugaagcaaacacauu

SEQ ID NO: 2519371 - RNA, 15 nt, Human
agaugaaguuuuaca

SEQ ID NO: 2519372 - RNA, 20 nt, Human
agaugaagagugagagggca

SEQ ID NO: 2519373 - RNA, 19 nt, Human
agaugaagcaaacacauua

SEQ ID NO: 2519374 - RNA, 11 nt, Human
agaguggccug

SEQ ID NO: 2519375 - RNA, 19 nt, Human
agaggggguggaggggugu

SEQ ID NO: 2519376 - RNA, 12 nt, Human
agagggggugga

SEQ ID NO: 2519377 - RNA, 20 nt, Human
agagugauagucuuuugcuu

SEQ ID NO: 2519378 - RNA, 17 nt, Human
agagugauaauacaagu

SEQ ID NO: 2519379 - RNA, 22 nt, Human
agagugauagucuuuugcuuuu

SEQ ID NO: 2519380 - RNA, 13 nt, Human
agagugcaacagu

SEQ ID NO: 2519381 - RNA, 17 nt, Human
agagugcaacaguagca

SEQ ID NO: 2519382 - RNA, 22 nt, Human
agagugcaacaguagcauagga

SEQ ID NO: 2519383 - RNA, 22 nt, Human
agaguggaaugcuuccuagaag

SEQ ID NO: 2519384 - RNA, 17 nt, Human
agagugcgccgagucug

SEQ ID NO: 2519385 - RNA, 21 nt, Human
agagugcgccgagucugucuc

SEQ ID NO: 2519386 - RNA, 13 nt, Human
agagugcccagaa

SEQ ID NO: 2519387 - RNA, 12 nt, Human
agagugcccaga

SEQ ID NO: 2519388 - RNA, 18 nt, Human
agagugcauugugagggu

SEQ ID NO: 2519389 - RNA, 21 nt, Human
agagugcaagccccugcucca

SEQ ID NO: 2519390 - RNA, 21 nt, Human
agaugaguaaaggaguaagaa

SEQ ID NO: 2519391 - RNA, 16 nt, Human
agaugaauacaaacaa

SEQ ID NO: 2519392 - RNA, 22 nt, Human
agaugaauacaaacaauggaaa

SEQ ID NO: 2519393 - RNA, 19 nt, Human
agaugaaguuuuacauugu

SEQ ID NO: 2519394 - RNA, 14 nt, Human
agaugagugagcau

SEQ ID NO: 2519395 - RNA, 16 nt, Human
agaugauacauccaaa

SEQ ID NO: 2519396 - RNA, 20 nt, Human
agaugauacauccaaagcag

SEQ ID NO: 2519397 - RNA, 18 nt, Human
agaugaugaaaauauuua

SEQ ID NO: 2519398 - RNA, 16 nt, Human
agaugaucuacucaga

SEQ ID NO: 2519399 - RNA, 13 nt, Human
agaugaucauuug

SEQ ID NO: 2519400 - RNA, 13 nt, Human
agaugauccauga

SEQ ID NO: 2519401 - RNA, 14 nt, Human
agaugguggcagua

SEQ ID NO: 2519402 - RNA, 17 nt, Human
agauggugcugagaagc

SEQ ID NO: 2519403 - RNA, 15 nt, Human
agauggugaaauuua

SEQ ID NO: 2519404 - RNA, 14 nt, Human
agauggugcugaga

SEQ ID NO: 2519405 - RNA, 21 nt, Human
agauggucacgcaccugggug

SEQ ID NO: 2519406 - RNA, 19 nt, Human
agauggucacgcaccuggg

SEQ ID NO: 2519407 - RNA, 19 nt, Human
agaugguauauuugguacu

SEQ ID NO: 2519408 - RNA, 23 nt, Human
agaugaugaaaauauuuaaaggc

SEQ ID NO: 2519409 - RNA, 13 nt, Human
agaugggugggga

SEQ ID NO: 2519410 - RNA, 19 nt, Human
agauguagaggagaaacug

SEQ ID NO: 2519411 - RNA, 18 nt, Human
agauguagauuuauuuca

SEQ ID NO: 2519412 - RNA, 21 nt, Human
agauguagcaaaacgcaugga

SEQ ID NO: 2519413 - RNA, 15 nt, Human
agauguagauuuauu

SEQ ID NO: 2519414 - RNA, 19 nt, Human
agauguagauaaacucaga

SEQ ID NO: 2519415 - RNA, 16 nt, Human
agauguagaggagaaa

SEQ ID NO: 2519416 - RNA, 22 nt, Human
agaugguuuuauaaucugauuu

SEQ ID NO: 2519417 - RNA, 18 nt, Human
agaugguuugagccugag

SEQ ID NO: 2519418 - RNA, 17 nt, Human
agauguaaaagguauua

SEQ ID NO: 2519419 - RNA, 15 nt, Human
agauucuccugugcu

SEQ ID NO: 2519420 - RNA, 17 nt, Human
agauucugaaacauugc

SEQ ID NO: 2519421 - RNA, 17 nt, Human
agcaaaugucuuccugg

SEQ ID NO: 2519422 - RNA, 20 nt, Human
agcaaaugucuuccuggauu

SEQ ID NO: 2519423 - RNA, 16 nt, Human
agcaaauguggcuccu

SEQ ID NO: 2519424 - RNA, 15 nt, Human
agcaaaugugaccug

SEQ ID NO: 2519425 - RNA, 20 nt, Human
agcaaaggagauuggaagga

SEQ ID NO: 2519426 - RNA, 21 nt, Human
agcaaagcugaugacaacuuc

SEQ ID NO: 2519427 - RNA, 23 nt, Human
agcaaagcugaugacaacuuccc

SEQ ID NO: 2519428 - RNA, 21 nt, Human
agauugcaacaggcugggcuu

SEQ ID NO: 2519429 - RNA, 20 nt, Human
agauugcaacaggcugggcu

SEQ ID NO: 2519430 - RNA, 23 nt, Human
agauugcaacaggcugggcuuca

SEQ ID NO: 2519431 - RNA, 17 nt, Human
agcaaaacuccaucuca

SEQ ID NO: 2519432 - RNA, 21 nt, Human
agauucuuuccugaggcuggg

SEQ ID NO: 2519433 - RNA, 19 nt, Human
agauucuuuccugaggcug

SEQ ID NO: 2519434 - RNA, 20 nt, Human
agauugaaaacuuuucucag

SEQ ID NO: 2519435 - RNA, 19 nt, Human
agauugaaaacuuuucuca

SEQ ID NO: 2519436 - RNA, 24 nt, Human
agcaaaauuuuuucucuaggaaau

SEQ ID NO: 2519437 - RNA, 21 nt, Human
agcaaaauaauuuuaaacaaa

SEQ ID NO: 2519438 - RNA, 21 nt, Human
agcaaaagggugucugagccc

SEQ ID NO: 2519439 - RNA, 18 nt, Human
agcaaaagggugucugag

SEQ ID NO: 2519440 - RNA, 21 nt, Human
agcaaaaccaaauauuccaga

SEQ ID NO: 2519441 - RNA, 18 nt, Human
agcaaaagaugcuucuca

SEQ ID NO: 2519442 - RNA, 22 nt, Human
agcaaagccccaugcuggagcc

SEQ ID NO: 2519443 - RNA, 21 nt, Human
agcaaagccccaugcuggagc

SEQ ID NO: 2519444 - RNA, 23 nt, Human
agcaaagccccaugcuggagccu

SEQ ID NO: 2519445 - RNA, 19 nt, Human
agcaaacuaacuugacuuu

SEQ ID NO: 2519446 - RNA, 13 nt, Human
agcaaacagagga

SEQ ID NO: 2519447 - RNA, 20 nt, Human
agcaaaaucauggaaugguu

SEQ ID NO: 2519448 - RNA, 13 nt, Human
agcaaacacauua

SEQ ID NO: 2519449 - RNA, 23 nt, Human
agcaaaaucauggaaugguuaua

SEQ ID NO: 2519450 - RNA, 13 nt, Human
aggcuaccuuugu

SEQ ID NO: 2519451 - RNA, 14 nt, Human
aggcuaccuuugua

SEQ ID NO: 2519452 - RNA, 15 nt, Human
aggcuaccuuuguau

SEQ ID NO: 2519453 - RNA, 13 nt, Human
aggcugaccacag

SEQ ID NO: 2519454 - RNA, 14 nt, Human
aggcugaccacagc

SEQ ID NO: 2519455 - RNA, 18 nt, Human
aggcugaccaagagagaa

SEQ ID NO: 2519456 - RNA, 19 nt, Human
aggcugaccaagagagaaa

SEQ ID NO: 2519457 - RNA, 20 nt, Human
aggcugaccaagagagaaag

SEQ ID NO: 2519458 - RNA, 22 nt, Human
aggcugaccaagagagaaagaa

SEQ ID NO: 2519459 - RNA, 20 nt, Human
aggcuaaggcguggagcugc

SEQ ID NO: 2519460 - RNA, 23 nt, Human
aggcuaaggcguggagcugccug

SEQ ID NO: 2519461 - RNA, 19 nt, Human
aggcuaaggcguggagcug

SEQ ID NO: 2519462 - RNA, 18 nt, Human
aggcuaaggcguggagcu

SEQ ID NO: 2519463 - RNA, 15 nt, Human
aggcuaaggcgugga

SEQ ID NO: 2519464 - RNA, 19 nt, Human
aggcuaaauuacucaggaa

SEQ ID NO: 2519465 - RNA, 18 nt, Human
aggcuacaauuuucuccc

SEQ ID NO: 2519466 - RNA, 19 nt, Human
aggcuacaauuuucuccca

SEQ ID NO: 2519467 - RNA, 18 nt, Human
aggcuacacugacacugg

SEQ ID NO: 2519468 - RNA, 13 nt, Human
aggcuacacugac

SEQ ID NO: 2519469 - RNA, 23 nt, Human
aggcuacaauuuucucccaggaa

SEQ ID NO: 2519470 - RNA, 22 nt, Human
aggcuacaauuuucucccagga

SEQ ID NO: 2519471 - RNA, 19 nt, Human
aggcuacacugacacuggu

SEQ ID NO: 2519472 - RNA, 14 nt, Human
aggcugaggcuggc

SEQ ID NO: 2519473 - RNA, 15 nt, Human
aggcugaggcuggca

SEQ ID NO: 2519474 - RNA, 16 nt, Human
aggcugaggcuggcac

SEQ ID NO: 2519475 - RNA, 17 nt, Human
aggcugaggcuggcaca

SEQ ID NO: 2519476 - RNA, 18 nt, Human
aggcuggguucugauccu

SEQ ID NO: 2519477 - RNA, 15 nt, Human
aggcugaggccugga

SEQ ID NO: 2519478 - RNA, 14 nt, Human
aggcugaggccugg

SEQ ID NO: 2519479 - RNA, 13 nt, Human
aggcugaggccug

SEQ ID NO: 2519480 - RNA, 17 nt, Human
aggcugaggcaggagga

SEQ ID NO: 2519481 - RNA, 17 nt, Human
aggcugaggccuggacu

SEQ ID NO: 2519482 - RNA, 16 nt, Human
aggcugaggccuggac

SEQ ID NO: 2519483 - RNA, 11 nt, Human
aggcugaggcg

SEQ ID NO: 2519484 - RNA, 21 nt, Human
aggcugaggcggguggaucac

SEQ ID NO: 2519485 - RNA, 16 nt, Human
aggcugaccacagcac

SEQ ID NO: 2519486 - RNA, 17 nt, Human
aggcugaccacagcaca

SEQ ID NO: 2519487 - RNA, 18 nt, Human
aggcugaccacagcacag

SEQ ID NO: 2519488 - RNA, 21 nt, Human
aggcugaccacagcacagcca

SEQ ID NO: 2519489 - RNA, 14 nt, Human
aggcugagacagga

SEQ ID NO: 2519490 - RNA, 13 nt, Human
aggcugagacagg

SEQ ID NO: 2519491 - RNA, 19 nt, Human
aggcugagaacacugugaa

SEQ ID NO: 2519492 - RNA, 16 nt, Human
aggcugagaacacugu

SEQ ID NO: 2519493 - RNA, 22 nt, Human
aggcugaccuugaacuccuggg

SEQ ID NO: 2519494 - RNA, 15 nt, Human
aggcugaggcagaag

SEQ ID NO: 2519495 - RNA, 17 nt, Human
aggcugagacugcggga

SEQ ID NO: 2519496 - RNA, 18 nt, Human
aggcugagacaggagaau

SEQ ID NO: 2519497 - RNA, 15 nt, Human
aggcugagacaggag

SEQ ID NO: 2519498 - RNA, 16 nt, Human
aggcugagacugcggg

SEQ ID NO: 2519499 - RNA, 14 nt, Human
aggcugaggcagga

SEQ ID NO: 2519500 - RNA, 15 nt, Human
aggcugaggcaggag

SEQ ID NO: 2519501 - RNA, 19 nt, Human
aggcugaggcaggagaaug

SEQ ID NO: 2519502 - RNA, 21 nt, Human
agggaccaaggcaaggcaggu

SEQ ID NO: 2519503 - RNA, 17 nt, Human
agggaccaaggcaaggc

SEQ ID NO: 2519504 - RNA, 13 nt, Human
agggaccaaggca

SEQ ID NO: 2519505 - RNA, 12 nt, Human
agggaccaaggc

SEQ ID NO: 2519506 - RNA, 21 nt, Human
agggaccaaggaccccucacc

SEQ ID NO: 2519507 - RNA, 18 nt, Human
aggcuuagucacugagac

SEQ ID NO: 2519508 - RNA, 13 nt, Human
agggaccacagca

SEQ ID NO: 2519509 - RNA, 23 nt, Human
agggaccaaggcaaggcaggugc

SEQ ID NO: 2519510 - RNA, 18 nt, Human
agggaccacacccuguac

SEQ ID NO: 2519511 - RNA, 23 nt, Human
agggaccacagcaaggcaccugc

SEQ ID NO: 2519512 - RNA, 14 nt, Human
agggaccacagcaa

SEQ ID NO: 2519513 - RNA, 14 nt, Human
agggaccagccaag

SEQ ID NO: 2519514 - RNA, 15 nt, Human
agggaccagccaaga

SEQ ID NO: 2519515 - RNA, 12 nt, Human
agggaccccucc

SEQ ID NO: 2519516 - RNA, 20 nt, Human
agggaccagccaagagggcu

SEQ ID NO: 2519517 - RNA, 14 nt, Human
agggaccccuccuc

SEQ ID NO: 2519518 - RNA, 13 nt, Human
agggaccccuccu

SEQ ID NO: 2519519 - RNA, 15 nt, Human
agggaccccuccucc

SEQ ID NO: 2519520 - RNA, 15 nt, Human
agggaccccugcccu

SEQ ID NO: 2519521 - RNA, 15 nt, Human
agggacccuccacca

SEQ ID NO: 2519522 - RNA, 23 nt, Human
agggaccccugcccuugucccac

SEQ ID NO: 2519523 - RNA, 15 nt, Human
agggacugaggggag

SEQ ID NO: 2519524 - RNA, 18 nt, Human
agggacuggaaccaggga

SEQ ID NO: 2519525 - RNA, 15 nt, Human
agggacuggaaccag

SEQ ID NO: 2519526 - RNA, 23 nt, Human
agggacugccagucccccugccc

SEQ ID NO: 2519527 - RNA, 20 nt, Human
aggcuuagcuuugcucugcc

SEQ ID NO: 2519528 - RNA, 19 nt, Human
aggcuuagcuuugcucugc

SEQ ID NO: 2519529 - RNA, 15 nt, Human
aggcuuagcuuugcu

SEQ ID NO: 2519530 - RNA, 17 nt, Human
aggcuuagucacugaga

SEQ ID NO: 2519531 - RNA, 23 nt, Human
aggcuggugcuguggccagggug

SEQ ID NO: 2519532 - RNA, 22 nt, Human
aggcuggugcuguggccagggu

SEQ ID NO: 2519533 - RNA, 13 nt, Human
aggcugguggccc

SEQ ID NO: 2519534 - RNA, 14 nt, Human
aggcugguggccca

SEQ ID NO: 2519535 - RNA, 22 nt, Human
aggcuguaucccaugagccuca

SEQ ID NO: 2519536 - RNA, 21 nt, Human
aggcuguaucccaugagccuc

SEQ ID NO: 2519537 - RNA, 20 nt, Human
aggcuguaucccaugagccu

SEQ ID NO: 2519538 - RNA, 20 nt, Human
aggcuggugcuguggccagg

SEQ ID NO: 2519539 - RNA, 23 nt, Human
aggcuggucucgaacuccugacc

SEQ ID NO: 2519540 - RNA, 17 nt, Human
aggcugaggcagaagaa

SEQ ID NO: 2519541 - RNA, 22 nt, Human
aggcuggucucaaacuccugac

SEQ ID NO: 2519542 - RNA, 20 nt, Human
aggccggcgagcccugugga

SEQ ID NO: 2519543 - RNA, 13 nt, Human
aggcgggccagcc

SEQ ID NO: 2519544 - RNA, 12 nt, Human
aggcgggccagc

SEQ ID NO: 2519545 - RNA, 14 nt, Human
aggcgggaguggag

SEQ ID NO: 2519546 - RNA, 14 nt, Human
aggcgggaaggagg

SEQ ID NO: 2519547 - RNA, 15 nt, Human
aggcgggaaggaggg

SEQ ID NO: 2519548 - RNA, 16 nt, Human
aggcggccccucccgc

SEQ ID NO: 2519549 - RNA, 21 nt, Human
aggcgggaaaagcagcccuug

SEQ ID NO: 2519550 - RNA, 14 nt, Human
aggcgggcucaagg

SEQ ID NO: 2519551 - RNA, 15 nt, Human
aggcgggcggucagg

SEQ ID NO: 2519552 - RNA, 23 nt, Human
aggcgggccagccaggcgggcuc

SEQ ID NO: 2519553 - RNA, 21 nt, Human
aggcgggccagccaggcgggc

SEQ ID NO: 2519554 - RNA, 17 nt, Human
aggcgggccagccaggc

SEQ ID NO: 2519555 - RNA, 16 nt, Human
aggcgggccagccagg

SEQ ID NO: 2519556 - RNA, 15 nt, Human
aggcgggccagccag

SEQ ID NO: 2519557 - RNA, 14 nt, Human
aggcgggccagcca

SEQ ID NO: 2519558 - RNA, 19 nt, Human
aggcuaaggcaggaaaauu

SEQ ID NO: 2519559 - RNA, 18 nt, Human
aggcuaaagcccagagac

SEQ ID NO: 2519560 - RNA, 21 nt, Human
aggcuaaagcccagagacagc

SEQ ID NO: 2519561 - RNA, 19 nt, Human
aggcgucaacgugcauuuu

SEQ ID NO: 2519562 - RNA, 21 nt, Human
aggcggugggcacccacccug

SEQ ID NO: 2519563 - RNA, 14 nt, Human
aggcggugggcacc

SEQ ID NO: 2519564 - RNA, 17 nt, Human
aggcauuccccaggagg

SEQ ID NO: 2519565 - RNA, 18 nt, Human
aggcauuccccaggaggc

SEQ ID NO: 2519566 - RNA, 19 nt, Human
aggcauguucucugaggac

SEQ ID NO: 2519567 - RNA, 18 nt, Human
aggcauguucucugagga

SEQ ID NO: 2519568 - RNA, 20 nt, Human
aggcaugugaugagaggaaa

SEQ ID NO: 2519569 - RNA, 19 nt, Human
aggcaugugaugagaggaa

SEQ ID NO: 2519570 - RNA, 21 nt, Human
aggcaugugaugagaggaaau

SEQ ID NO: 2519571 - RNA, 17 nt, Human
aggcauguucucugagg

SEQ ID NO: 2519572 - RNA, 17 nt, Human
aggcagauugaaaagga

SEQ ID NO: 2519573 - RNA, 16 nt, Human
aggcagauugaaaagg

SEQ ID NO: 2519574 - RNA, 15 nt, Human
aggcagauugaaaag

SEQ ID NO: 2519575 - RNA, 22 nt, Human
aggcagaucugugccccaugcc

SEQ ID NO: 2519576 - RNA, 23 nt, Human
aggcagaucugugccccaugccu

SEQ ID NO: 2519577 - RNA, 19 nt, Human
aggcagcagugugaggcca

SEQ ID NO: 2519578 - RNA, 20 nt, Human
aggcagcagugugaggccag

SEQ ID NO: 2519579 - RNA, 22 nt, Human
aggcagcagugugaggccaggg

SEQ ID NO: 2519580 - RNA, 23 nt, Human
aggcagcagugugaggccagggc

SEQ ID NO: 2519581 - RNA, 13 nt, Human
aggcauggcccug

SEQ ID NO: 2519582 - RNA, 12 nt, Human
aggcauggcccu

SEQ ID NO: 2519583 - RNA, 12 nt, Human
aggcagcauuua

SEQ ID NO: 2519584 - RNA, 16 nt, Human
aggcaugccuguguga

SEQ ID NO: 2519585 - RNA, 17 nt, Human
aggcaugugaugagagg

SEQ ID NO: 2519586 - RNA, 12 nt, Human
aggcauggugga

SEQ ID NO: 2519587 - RNA, 12 nt, Human
aggcauguccug

SEQ ID NO: 2519588 - RNA, 15 nt, Human
aggcauggcccuggg

SEQ ID NO: 2519589 - RNA, 14 nt, Human
aggcauggcccugg

SEQ ID NO: 2519590 - RNA, 21 nt, Human
aggcauggcccugggguccca

SEQ ID NO: 2519591 - RNA, 16 nt, Human
aggcauggcccugggg

SEQ ID NO: 2519592 - RNA, 15 nt, Human
aggcaugguggccca

SEQ ID NO: 2519593 - RNA, 13 nt, Human
aggcagaggacag

SEQ ID NO: 2519594 - RNA, 20 nt, Human
aggcagagagcggucucagg

SEQ ID NO: 2519595 - RNA, 13 nt, Human
aggcagagagcgg

SEQ ID NO: 2519596 - RNA, 11 nt, Human
aggcagagagc

SEQ ID NO: 2519597 - RNA, 22 nt, Human
aggcagagaaucauacuuagca

SEQ ID NO: 2519598 - RNA, 14 nt, Human
aggcagagaaucau

SEQ ID NO: 2519599 - RNA, 17 nt, Human
aggcagauccaggacua

SEQ ID NO: 2519600 - RNA, 15 nt, Human
aggcagaucugugcc

SEQ ID NO: 2519601 - RNA, 16 nt, Human
aggcagaucugugccc

SEQ ID NO: 2519602 - RNA, 20 nt, Human
aggcagaucugugccccaug

SEQ ID NO: 2519603 - RNA, 21 nt, Human
aggcagaucugugccccaugc

SEQ ID NO: 2519604 - RNA, 22 nt, Human
aggcagagaaagaagagacagg

SEQ ID NO: 2519605 - RNA, 21 nt, Human
aggcagagaaagaagagacag

SEQ ID NO: 2519606 - RNA, 19 nt, Human
aggcagagaaagaagagac

SEQ ID NO: 2519607 - RNA, 18 nt, Human
aggcagagaaagaagaga

SEQ ID NO: 2519608 - RNA, 17 nt, Human
aggcagagaaagaagag

SEQ ID NO: 2519609 - RNA, 15 nt, Human
aggcagagaaagaag

SEQ ID NO: 2519610 - RNA, 13 nt, Human
aggcagagaaaga

SEQ ID NO: 2519611 - RNA, 17 nt, Human
aggcacugaagugcuua

SEQ ID NO: 2519612 - RNA, 9 nt, Human
aggcagaga

SEQ ID NO: 2519613 - RNA, 19 nt, Human
aggcacucuguuauuuaga

SEQ ID NO: 2519614 - RNA, 22 nt, Human
aggcagacuucccugaauguau

SEQ ID NO: 2519615 - RNA, 20 nt, Human
aggcacucuguuauuuagac

SEQ ID NO: 2519616 - RNA, 16 nt, Human
aggcacucuguuauuu

SEQ ID NO: 2519617 - RNA, 23 nt, Human
aggcacuagccuuuggcucugga

SEQ ID NO: 2519618 - RNA, 17 nt, Human
aggcacgaacccaccug

SEQ ID NO: 2519619 - RNA, 18 nt, Human
aggcacgaacccaccugc

SEQ ID NO: 2519620 - RNA, 19 nt, Human
aggcacgaacccaccugcu

SEQ ID NO: 2519621 - RNA, 20 nt, Human
aggcacgaacccaccugcug

SEQ ID NO: 2519622 - RNA, 15 nt, Human
aggcacuagccuuug

SEQ ID NO: 2519623 - RNA, 13 nt, Human
aggcacuagccuu

SEQ ID NO: 2519624 - RNA, 21 nt, Human
aggcacgaacccaccugcuga

SEQ ID NO: 2519625 - RNA, 22 nt, Human
aggagaggggaagggccagucu

SEQ ID NO: 2519626 - RNA, 21 nt, Human
aggagaggaugagagcccaga

SEQ ID NO: 2519627 - RNA, 20 nt, Human
aggagaggaugagagcccag

SEQ ID NO: 2519628 - RNA, 19 nt, Human
aggagaggaugagagccca

SEQ ID NO: 2519629 - RNA, 18 nt, Human
aggagaggaugagagccc

SEQ ID NO: 2519630 - RNA, 20 nt, Human
aggagaggcaacauccaaaa

SEQ ID NO: 2519631 - RNA, 23 nt, Human
aggagaggaugagagcccagagg

SEQ ID NO: 2519632 - RNA, 19 nt, Human
aggagaggggaagggccag

SEQ ID NO: 2519633 - RNA, 18 nt, Human
aggagaggggaagggcca

SEQ ID NO: 2519634 - RNA, 21 nt, Human
aggagaggcaacauccaaaau

SEQ ID NO: 2519635 - RNA, 14 nt, Human
aggcaccugcauuu

SEQ ID NO: 2519636 - RNA, 21 nt, Human
aggcaccugcagguugggcca

SEQ ID NO: 2519637 - RNA, 18 nt, Human
aggcaccugcagguuggg

SEQ ID NO: 2519638 - RNA, 14 nt, Human
aggcaccugcaggu

SEQ ID NO: 2519639 - RNA, 19 nt, Human
aggcaccuuaguggcuuuu

SEQ ID NO: 2519640 - RNA, 14 nt, Human
aggcacgaacccac

SEQ ID NO: 2519641 - RNA, 23 nt, Human
aggcccucugcccacucccugca

SEQ ID NO: 2519642 - RNA, 22 nt, Human
aggcccucugcccacucccugc

SEQ ID NO: 2519643 - RNA, 21 nt, Human
aggccaugggcacugugggua

SEQ ID NO: 2519644 - RNA, 21 nt, Human
aggcccucugcccacucccug

SEQ ID NO: 2519645 - RNA, 15 nt, Human
aggcccuggccuccc

SEQ ID NO: 2519646 - RNA, 14 nt, Human
aggcccuggccucc

SEQ ID NO: 2519647 - RNA, 24 nt, Human
aggcccugcacuguccugcuccac

SEQ ID NO: 2519648 - RNA, 23 nt, Human
aggcccugcacuguccugcucca

SEQ ID NO: 2519649 - RNA, 22 nt, Human
aggcccugcacuguccugcucc

SEQ ID NO: 2519650 - RNA, 21 nt, Human
aggcccugcacuguccugcuc

SEQ ID NO: 2519651 - RNA, 19 nt, Human
aggcccugcacuguccugc

SEQ ID NO: 2519652 - RNA, 18 nt, Human
aggcccugcacuguccug

SEQ ID NO: 2519653 - RNA, 17 nt, Human
aggcccugcacuguccu

SEQ ID NO: 2519654 - RNA, 16 nt, Human
aggcccugcacugucc

SEQ ID NO: 2519655 - RNA, 15 nt, Human
aggcccugcacuguc

SEQ ID NO: 2519656 - RNA, 13 nt, Human
aggcccugcacug

SEQ ID NO: 2519657 - RNA, 20 nt, Human
aggcccucuggaguggccac

SEQ ID NO: 2519658 - RNA, 21 nt, Human
aggcccucuggaguggccacu

SEQ ID NO: 2519659 - RNA, 22 nt, Human
aggcccucuggaguggccacua

SEQ ID NO: 2519660 - RNA, 13 nt, Human
aggcccucuggag

SEQ ID NO: 2519661 - RNA, 15 nt, Human
aggcccucuggagug

SEQ ID NO: 2519662 - RNA, 19 nt, Human
aggcccuucucuccagccc

SEQ ID NO: 2519663 - RNA, 15 nt, Human
aggcccuucucucca

SEQ ID NO: 2519664 - RNA, 14 nt, Human
aggcccugucugua

SEQ ID NO: 2519665 - RNA, 13 nt, Human
aggcccugucugu

SEQ ID NO: 2519666 - RNA, 23 nt, Human
aggcccuggccuccccugccacc

SEQ ID NO: 2519667 - RNA, 22 nt, Human
aggcccuggccuccccugccac

SEQ ID NO: 2519668 - RNA, 21 nt, Human
aggcccuggccuccccugcca

SEQ ID NO: 2519669 - RNA, 12 nt, Human
aggcccuucucu

SEQ ID NO: 2519670 - RNA, 22 nt, Human
aggcccuuccucuccacugccu

SEQ ID NO: 2519671 - RNA, 21 nt, Human
aggccgcagcucuugcccuuc

SEQ ID NO: 2519672 - RNA, 19 nt, Human
aggcccuuccucuccacug

SEQ ID NO: 2519673 - RNA, 22 nt, Human
aggccgcagcucuugcccuucc

SEQ ID NO: 2519674 - RNA, 14 nt, Human
aggccgccccagcc

SEQ ID NO: 2519675 - RNA, 19 nt, Human
aggccgccccagccucuga

SEQ ID NO: 2519676 - RNA, 17 nt, Human
aggccgcuagaggccug

SEQ ID NO: 2519677 - RNA, 14 nt, Human
aggccgcuagaggc

SEQ ID NO: 2519678 - RNA, 18 nt, Human
aggccgccccagccucug

SEQ ID NO: 2519679 - RNA, 19 nt, Human
aggccggcgagcccugugg

SEQ ID NO: 2519680 - RNA, 20 nt, Human
aggccgcuguucacccacag

SEQ ID NO: 2519681 - RNA, 20 nt, Human
aggccgcuagaggccugagg

SEQ ID NO: 2519682 - RNA, 18 nt, Human
aggccgcuagaggccuga

SEQ ID NO: 2519683 - RNA, 21 nt, Human
aggccgcuagaggccugagga

SEQ ID NO: 2519684 - RNA, 17 nt, Human
aggccgcuguucaccca

SEQ ID NO: 2519685 - RNA, 20 nt, Human
aggcauuccccaggaggcca

SEQ ID NO: 2519686 - RNA, 19 nt, Human
aggcauuccccaggaggcc

SEQ ID NO: 2519687 - RNA, 23 nt, Human
aggccagcugcuugggcuucauc

SEQ ID NO: 2519688 - RNA, 14 nt, Human
aggcauguccugga

SEQ ID NO: 2519689 - RNA, 14 nt, Human
aggccagcuggcag

SEQ ID NO: 2519690 - RNA, 15 nt, Human
aggccagcuggcagc

SEQ ID NO: 2519691 - RNA, 16 nt, Human
aggccagcuggcagca

SEQ ID NO: 2519692 - RNA, 17 nt, Human
aggccagcuggcagcag

SEQ ID NO: 2519693 - RNA, 18 nt, Human
aggccagcuggcagcaga

SEQ ID NO: 2519694 - RNA, 19 nt, Human
aggccagcuggcagcagag

SEQ ID NO: 2519695 - RNA, 20 nt, Human
aggccagcuggcagcagagu

SEQ ID NO: 2519696 - RNA, 14 nt, Human
aggccaggcccucu

SEQ ID NO: 2519697 - RNA, 13 nt, Human
aggccaggcccuc

SEQ ID NO: 2519698 - RNA, 11 nt, Human
aggccaggagu

SEQ ID NO: 2519699 - RNA, 18 nt, Human
aggccaggccaccaggau

SEQ ID NO: 2519700 - RNA, 17 nt, Human
aggccaggccaccagga

SEQ ID NO: 2519701 - RNA, 16 nt, Human
aggccaggccaccagg

SEQ ID NO: 2519702 - RNA, 14 nt, Human
aggccaggccacca

SEQ ID NO: 2519703 - RNA, 21 nt, Human
aggccaggaguuugagaccag

SEQ ID NO: 2519704 - RNA, 16 nt, Human
aggccauggagagcug

SEQ ID NO: 2519705 - RNA, 22 nt, Human
aggccauggagagcuggagccu

SEQ ID NO: 2519706 - RNA, 21 nt, Human
aggccauggagagcuggagcc

SEQ ID NO: 2519707 - RNA, 18 nt, Human
aggccauggagagcugga

SEQ ID NO: 2519708 - RNA, 17 nt, Human
aggccauggagagcugg

SEQ ID NO: 2519709 - RNA, 15 nt, Human
aggccauggcagaau

SEQ ID NO: 2519710 - RNA, 21 nt, Human
aggccaucugggcuccuccag

SEQ ID NO: 2519711 - RNA, 22 nt, Human
aggccaucugggcuccuccagg

SEQ ID NO: 2519712 - RNA, 19 nt, Human
aggccaucuuccagguggg

SEQ ID NO: 2519713 - RNA, 18 nt, Human
aggccaucuuccaggugg

SEQ ID NO: 2519714 - RNA, 15 nt, Human
aggccaucuuccagg

SEQ ID NO: 2519715 - RNA, 19 nt, Human
aggccaugaaaaaaaugau

SEQ ID NO: 2519716 - RNA, 13 nt, Human
aggccaugaaaaa

SEQ ID NO: 2519717 - RNA, 19 nt, Human
aggccaugauucgcccaaa

SEQ ID NO: 2519718 - RNA, 21 nt, Human
aggccaugauucgcccaaagc

SEQ ID NO: 2519719 - RNA, 14 nt, Human
aggccaggugcagu

SEQ ID NO: 2519720 - RNA, 15 nt, Human
aggccaggugcaggu

SEQ ID NO: 2519721 - RNA, 21 nt, Human
aggccaguaagggaaauagaa

SEQ ID NO: 2519722 - RNA, 19 nt, Human
aggccaggccaccaggaug

SEQ ID NO: 2519723 - RNA, 21 nt, Human
aggccaucaucaguggagcca

SEQ ID NO: 2519724 - RNA, 16 nt, Human
aggccauaaaacaggu

SEQ ID NO: 2519725 - RNA, 21 nt, Human
aggccauccuucccugucugc

SEQ ID NO: 2519726 - RNA, 15 nt, Human
aggccaggcccucug

SEQ ID NO: 2519727 - RNA, 13 nt, Human
aggccaggccagc

SEQ ID NO: 2519728 - RNA, 15 nt, Human
aggccaggccagcug

SEQ ID NO: 2519729 - RNA, 23 nt, Human
aggccagggucacugaaggccug

SEQ ID NO: 2519730 - RNA, 20 nt, Human
agggucucacuauguugccc

SEQ ID NO: 2519731 - RNA, 15 nt, Human
agggucuagggagag

SEQ ID NO: 2519732 - RNA, 16 nt, Human
agggucuagggagaga

SEQ ID NO: 2519733 - RNA, 19 nt, Human
agggucuagggagagaccc

SEQ ID NO: 2519734 - RNA, 23 nt, Human
agggucuagggagagacccuugu

SEQ ID NO: 2519735 - RNA, 23 nt, Human
aggguuuugccauguuggccagg

SEQ ID NO: 2519736 - RNA, 15 nt, Human
aggguuuuccacccu

SEQ ID NO: 2519737 - RNA, 18 nt, Human
aggguuuuccacccugga

SEQ ID NO: 2519738 - RNA, 23 nt, Human
agguaacagaacagcuucagguu

SEQ ID NO: 2519739 - RNA, 22 nt, Human
agguaacagaacagcuucaggu

SEQ ID NO: 2519740 - RNA, 19 nt, Human
aggguuuuccacccuggaa

SEQ ID NO: 2519741 - RNA, 22 nt, Human
aggguuuugccauguuggccag

SEQ ID NO: 2519742 - RNA, 17 nt, Human
aggguuuuaauguagau

SEQ ID NO: 2519743 - RNA, 16 nt, Human
aggguuuuaauguaga

SEQ ID NO: 2519744 - RNA, 14 nt, Human
aggguuuguggcug

SEQ ID NO: 2519745 - RNA, 14 nt, Human
agguaacaggcaga

SEQ ID NO: 2519746 - RNA, 13 nt, Human
agguaacaggcag

SEQ ID NO: 2519747 - RNA, 22 nt, Human
agguacgaaaagaggggaagag

SEQ ID NO: 2519748 - RNA, 16 nt, Human
agguaacaggcagaua

SEQ ID NO: 2519749 - RNA, 13 nt, Human
agguacucuccug

SEQ ID NO: 2519750 - RNA, 14 nt, Human
agguacucuccugg

SEQ ID NO: 2519751 - RNA, 12 nt, Human
agguacuauuau

SEQ ID NO: 2519752 - RNA, 14 nt, Human
aggucccuuguuuc

SEQ ID NO: 2519753 - RNA, 23 nt, Human
aggucccuaauaaagcugugugg

SEQ ID NO: 2519754 - RNA, 15 nt, Human
agguacuaaauaccu

SEQ ID NO: 2519755 - RNA, 23 nt, Human
agguccucugucagucacagcca

SEQ ID NO: 2519756 - RNA, 22 nt, Human
aggucuaggaacauacuucagc

SEQ ID NO: 2519757 - RNA, 17 nt, Human
aggucggaggcuuggga

SEQ ID NO: 2519758 - RNA, 22 nt, Human
aggucgguagguucagccaagg

SEQ ID NO: 2519759 - RNA, 14 nt, Human
agguccucugucag

SEQ ID NO: 2519760 - RNA, 19 nt, Human
agguccucugucagucaca

SEQ ID NO: 2519761 - RNA, 13 nt, Human
agguccucuguca

SEQ ID NO: 2519762 - RNA, 20 nt, Human
agguccucugauacccagag

SEQ ID NO: 2519763 - RNA, 15 nt, Human
agguccucagagaau

SEQ ID NO: 2519764 - RNA, 21 nt, Human
agguccucuacuuaaugagau

SEQ ID NO: 2519765 - RNA, 23 nt, Human
aggucuccuccaccgccauggcu

SEQ ID NO: 2519766 - RNA, 18 nt, Human
aggucuccuccaccgcca

SEQ ID NO: 2519767 - RNA, 11 nt, Human
aggucuccucu

SEQ ID NO: 2519768 - RNA, 12 nt, Human
aggucuccucuu

SEQ ID NO: 2519769 - RNA, 13 nt, Human
aggucuccucuua

SEQ ID NO: 2519770 - RNA, 14 nt, Human
aggucuccucuuaa

SEQ ID NO: 2519771 - RNA, 15 nt, Human
aggucuccucuuaaa

SEQ ID NO: 2519772 - RNA, 17 nt, Human
aggucuccucuuaaaaa

SEQ ID NO: 2519773 - RNA, 16 nt, Human
aggucuggcugcuugc

SEQ ID NO: 2519774 - RNA, 16 nt, Human
aggucuggccucaggu

SEQ ID NO: 2519775 - RNA, 23 nt, Human
aggucuggagaagcucccaggaa

SEQ ID NO: 2519776 - RNA, 23 nt, Human
aggucuccucuuaaaaaauaaaa

SEQ ID NO: 2519777 - RNA, 14 nt, Human
aggucugugcugag

SEQ ID NO: 2519778 - RNA, 11 nt, Human
aggucugugcu

SEQ ID NO: 2519779 - RNA, 15 nt, Human
aggucuccuccaccg

SEQ ID NO: 2519780 - RNA, 13 nt, Human
aggucuccuccac

SEQ ID NO: 2519781 - RNA, 12 nt, Human
aggucuccucca

SEQ ID NO: 2519782 - RNA, 17 nt, Human
aggucucccacguggga

SEQ ID NO: 2519783 - RNA, 13 nt, Human
aggucucacgggc

SEQ ID NO: 2519784 - RNA, 22 nt, Human
aggucucaacccuuuugucugc

SEQ ID NO: 2519785 - RNA, 16 nt, Human
agggauacccauccca

SEQ ID NO: 2519786 - RNA, 21 nt, Human
agggaucaaccagcuaagaaa

SEQ ID NO: 2519787 - RNA, 17 nt, Human
agggauagcacugagca

SEQ ID NO: 2519788 - RNA, 18 nt, Human
agggauauauaagaugga

SEQ ID NO: 2519789 - RNA, 13 nt, Human
agggauagagggg

SEQ ID NO: 2519790 - RNA, 16 nt, Human
agggauagaggggggc

SEQ ID NO: 2519791 - RNA, 22 nt, Human
agggauagcacugagcaaagca

SEQ ID NO: 2519792 - RNA, 13 nt, Human
agggacuuaaaaa

SEQ ID NO: 2519793 - RNA, 17 nt, Human
agggacuuaaaaaacuu

SEQ ID NO: 2519794 - RNA, 12 nt, Human
agggacuuaaaa

SEQ ID NO: 2519795 - RNA, 16 nt, Human
agggaugguguucaaa

SEQ ID NO: 2519796 - RNA, 23 nt, Human
agggaugugaauugccugcagag

SEQ ID NO: 2519797 - RNA, 22 nt, Human
agggaugugaauugccugcaga

SEQ ID NO: 2519798 - RNA, 18 nt, Human
agggauuaaccucugcac

SEQ ID NO: 2519799 - RNA, 17 nt, Human
agggauuaaccucugca

SEQ ID NO: 2519800 - RNA, 18 nt, Human
agggauguucuggcccuc

SEQ ID NO: 2519801 - RNA, 16 nt, Human
agggaucccucaucug

SEQ ID NO: 2519802 - RNA, 19 nt, Human
agggaucccucaucugucc

SEQ ID NO: 2519803 - RNA, 14 nt, Human
agggaugguguuca

SEQ ID NO: 2519804 - RNA, 22 nt, Human
agggaucaaccagcuaagaaaa

SEQ ID NO: 2519805 - RNA, 13 nt, Human
agggaucacaggg

SEQ ID NO: 2519806 - RNA, 14 nt, Human
agggaucacagggc

SEQ ID NO: 2519807 - RNA, 15 nt, Human
agggaucacagggcc

SEQ ID NO: 2519808 - RNA, 15 nt, Human
agggaucccucaucu

SEQ ID NO: 2519809 - RNA, 17 nt, Human
agggaucacagggcccc

SEQ ID NO: 2519810 - RNA, 22 nt, Human
agggaucacagggccccagaag

SEQ ID NO: 2519811 - RNA, 18 nt, Human
agggauuacccaagcaaa

SEQ ID NO: 2519812 - RNA, 17 nt, Human
agggauuacccaagcaa

SEQ ID NO: 2519813 - RNA, 19 nt, Human
agggauuaaccucugcacu

SEQ ID NO: 2519814 - RNA, 19 nt, Human
agggauuuuagucacacgu

SEQ ID NO: 2519815 - RNA, 19 nt, Human
agggauuacccaagcaaaa

SEQ ID NO: 2519816 - RNA, 15 nt, Human
agggauuagggagag

SEQ ID NO: 2519817 - RNA, 20 nt, Human
agggcaacaauaaaauagca

SEQ ID NO: 2519818 - RNA, 22 nt, Human
agggcaacaauacaugcugcua

SEQ ID NO: 2519819 - RNA, 13 nt, Human
agggcaagggcca

SEQ ID NO: 2519820 - RNA, 18 nt, Human
agggccugagccuggcca

SEQ ID NO: 2519821 - RNA, 20 nt, Human
agggccugagccuggccagc

SEQ ID NO: 2519822 - RNA, 22 nt, Human
agggccugaggucuggcugcuu

SEQ ID NO: 2519823 - RNA, 21 nt, Human
agggccugaggucuggcugcu

SEQ ID NO: 2519824 - RNA, 16 nt, Human
agggccugaggucugg

SEQ ID NO: 2519825 - RNA, 14 nt, Human
agggcaagggccau

SEQ ID NO: 2519826 - RNA, 22 nt, Human
agggccugagccuggccagccu

SEQ ID NO: 2519827 - RNA, 14 nt, Human
agggccugcaaggg

SEQ ID NO: 2519828 - RNA, 13 nt, Human
agggccuggccug

SEQ ID NO: 2519829 - RNA, 12 nt, Human
agggccuggccu

SEQ ID NO: 2519830 - RNA, 15 nt, Human
agggccugcaaggga

SEQ ID NO: 2519831 - RNA, 20 nt, Human
agggccugcaggaccugccu

SEQ ID NO: 2519832 - RNA, 22 nt, Human
agggccugcaggaccugccugu

SEQ ID NO: 2519833 - RNA, 23 nt, Human
agggccugcaggaccugccugua

SEQ ID NO: 2519834 - RNA, 14 nt, Human
aggggcccacaggg

SEQ ID NO: 2519835 - RNA, 22 nt, Human
aggggcccaaggcggccccucc

SEQ ID NO: 2519836 - RNA, 20 nt, Human
aggggcccaaggcggccccu

SEQ ID NO: 2519837 - RNA, 17 nt, Human
aggggcccaaggcggcc

SEQ ID NO: 2519838 - RNA, 21 nt, Human
aggggcccacagggaacccug

SEQ ID NO: 2519839 - RNA, 19 nt, Human
aggggcccacagggaaccc

SEQ ID NO: 2519840 - RNA, 19 nt, Human
aggggcccaguccuggccu

SEQ ID NO: 2519841 - RNA, 22 nt, Human
aggggcccaaauucuuucagug

SEQ ID NO: 2519842 - RNA, 20 nt, Human
aggggcagucuggaggggca

SEQ ID NO: 2519843 - RNA, 15 nt, Human
aggggcaucugcccc

SEQ ID NO: 2519844 - RNA, 17 nt, Human
aggggcagucuggaggg

SEQ ID NO: 2519845 - RNA, 18 nt, Human
aggggcagucuggagggg

SEQ ID NO: 2519846 - RNA, 14 nt, Human
aggggcaucugccc

SEQ ID NO: 2519847 - RNA, 12 nt, Human
aggggcaggcug

SEQ ID NO: 2519848 - RNA, 23 nt, Human
aggggcaggcccugcacuguccu

SEQ ID NO: 2519849 - RNA, 19 nt, Human
aggggcaggcccugcacug

SEQ ID NO: 2519850 - RNA, 15 nt, Human
aggggcaggcccugc

SEQ ID NO: 2519851 - RNA, 23 nt, Human
aggggcagguaaacuccuguccu

SEQ ID NO: 2519852 - RNA, 13 nt, Human
aggggcaggcuga

SEQ ID NO: 2519853 - RNA, 15 nt, Human
aggggcagucuggag

SEQ ID NO: 2519854 - RNA, 16 nt, Human
aggggcagucuggagg

SEQ ID NO: 2519855 - RNA, 15 nt, Human
aggggcccgcuugcc

SEQ ID NO: 2519856 - RNA, 14 nt, Human
aggggccuggagau

SEQ ID NO: 2519857 - RNA, 13 nt, Human
aggggccuggaga

SEQ ID NO: 2519858 - RNA, 16 nt, Human
aggggccccuccagcu

SEQ ID NO: 2519859 - RNA, 20 nt, Human
aggggccccguguccugccu

SEQ ID NO: 2519860 - RNA, 18 nt, Human
aggggccccguguccugc

SEQ ID NO: 2519861 - RNA, 17 nt, Human
aggggccccguguccug

SEQ ID NO: 2519862 - RNA, 13 nt, Human
aggggccccugcu

SEQ ID NO: 2519863 - RNA, 20 nt, Human
aggggccccugcuucuccag

SEQ ID NO: 2519864 - RNA, 16 nt, Human
aggggccccugcuucu

SEQ ID NO: 2519865 - RNA, 21 nt, Human
aggggccccugcuucuccagc

SEQ ID NO: 2519866 - RNA, 21 nt, Human
aggggcccgagcagaagcagg

SEQ ID NO: 2519867 - RNA, 19 nt, Human
agggccuggaagacagaga

SEQ ID NO: 2519868 - RNA, 14 nt, Human
agggccuggccuga

SEQ ID NO: 2519869 - RNA, 22 nt, Human
agggccuggguuuucauguuuu

SEQ ID NO: 2519870 - RNA, 21 nt, Human
agggccuggucccugggagga

SEQ ID NO: 2519871 - RNA, 12 nt, Human
agggccuguggg

SEQ ID NO: 2519872 - RNA, 17 nt, Human
agggccuggucccuggg

SEQ ID NO: 2519873 - RNA, 19 nt, Human
agggccugugggagccugc

SEQ ID NO: 2519874 - RNA, 18 nt, Human
agggccugugggagccug

SEQ ID NO: 2519875 - RNA, 12 nt, Human
agggccuugccc

SEQ ID NO: 2519876 - RNA, 14 nt, Human
agggccuugcccag

SEQ ID NO: 2519877 - RNA, 15 nt, Human
agggccuugcccaga

SEQ ID NO: 2519878 - RNA, 16 nt, Human
agggccuugcccagag

SEQ ID NO: 2519879 - RNA, 17 nt, Human
agggccuugcccagaga

SEQ ID NO: 2519880 - RNA, 12 nt, Human
aggggcaggagg

SEQ ID NO: 2519881 - RNA, 13 nt, Human
aggggcaggagga

SEQ ID NO: 2519882 - RNA, 17 nt, Human
aggggcaggcacagcac

SEQ ID NO: 2519883 - RNA, 16 nt, Human
aggggcaggcacagca

SEQ ID NO: 2519884 - RNA, 14 nt, Human
aggggcaggcacag

SEQ ID NO: 2519885 - RNA, 13 nt, Human
aggggcaggcaca

SEQ ID NO: 2519886 - RNA, 18 nt, Human
aggggcaggaggaagggg

SEQ ID NO: 2519887 - RNA, 23 nt, Human
agggcgaggggaggguggcaggu

SEQ ID NO: 2519888 - RNA, 13 nt, Human
agggcgaggggag

SEQ ID NO: 2519889 - RNA, 15 nt, Human
aggggcagcuucuau

SEQ ID NO: 2519890 - RNA, 18 nt, Human
agggccuugcccagagau

SEQ ID NO: 2519891 - RNA, 19 nt, Human
agggccuugcccagagaug

SEQ ID NO: 2519892 - RNA, 13 nt, Human
agggcgagacucc

SEQ ID NO: 2519893 - RNA, 21 nt, Human
agggcgaccccgucacagccu

SEQ ID NO: 2519894 - RNA, 23 nt, Human
agggccuugcccagagaugccuc

SEQ ID NO: 2519895 - RNA, 20 nt, Human
agggcgaacgacaauagcuu

SEQ ID NO: 2519896 - RNA, 22 nt, Human
agggucccugguggcagcucac

SEQ ID NO: 2519897 - RNA, 20 nt, Human
agggucccugguggcagcuc

SEQ ID NO: 2519898 - RNA, 17 nt, Human
agggucccugguggcag

SEQ ID NO: 2519899 - RNA, 16 nt, Human
agggucccugguggca

SEQ ID NO: 2519900 - RNA, 20 nt, Human
aggguccuuuaguaccugaa

SEQ ID NO: 2519901 - RNA, 17 nt, Human
agggucggaacccaagc

SEQ ID NO: 2519902 - RNA, 23 nt, Human
agggucggggaggaaauaccaaa

SEQ ID NO: 2519903 - RNA, 22 nt, Human
agggucggaacccaagcuuaga

SEQ ID NO: 2519904 - RNA, 15 nt, Human
aggguccuccacaau

SEQ ID NO: 2519905 - RNA, 14 nt, Human
aggguccuggcucc

SEQ ID NO: 2519906 - RNA, 18 nt, Human
aggguccuuuaguaccug

SEQ ID NO: 2519907 - RNA, 22 nt, Human
aggguccuucccucuccccaag

SEQ ID NO: 2519908 - RNA, 16 nt, Human
aggguccuggcuccug

SEQ ID NO: 2519909 - RNA, 21 nt, Human
aggggccuggagauccuccug

SEQ ID NO: 2519910 - RNA, 18 nt, Human
aggggccuggagauccuc

SEQ ID NO: 2519911 - RNA, 12 nt, Human
aggggccuggca

SEQ ID NO: 2519912 - RNA, 13 nt, Human
aggggccuggcag

SEQ ID NO: 2519913 - RNA, 21 nt, Human
aggguaucuggugacuuuccu

SEQ ID NO: 2519914 - RNA, 13 nt, Human
aggguauuccaga

SEQ ID NO: 2519915 - RNA, 14 nt, Human
agggucccuggugg

SEQ ID NO: 2519916 - RNA, 12 nt, Human
agggucccuggu

SEQ ID NO: 2519917 - RNA, 22 nt, Human
aggggccuggagauccuccugc

SEQ ID NO: 2519918 - RNA, 21 nt, Human
aggguauggacuaucugucug

SEQ ID NO: 2519919 - RNA, 20 nt, Human
agggucaacaucuuuuacau

SEQ ID NO: 2519920 - RNA, 19 nt, Human
agggucagacgccugagga

SEQ ID NO: 2519921 - RNA, 18 nt, Human
aggaauaugggagaaaua

SEQ ID NO: 2519922 - RNA, 23 nt, Human
aggaauauauggcagaguuguaa

SEQ ID NO: 2519923 - RNA, 22 nt, Human
aggaauaugacggaagaacaua

SEQ ID NO: 2519924 - RNA, 21 nt, Human
aggaauaguugagccccaagu

SEQ ID NO: 2519925 - RNA, 17 nt, Human
aggaauaguugagcccc

SEQ ID NO: 2519926 - RNA, 17 nt, Human
aggaauauauggcagag

SEQ ID NO: 2519927 - RNA, 12 nt, Human
aggaauauaugg

SEQ ID NO: 2519928 - RNA, 20 nt, Human
aggaauaugacggaagaaca

SEQ ID NO: 2519929 - RNA, 18 nt, Human
aggaaucacucuugugga

SEQ ID NO: 2519930 - RNA, 16 nt, Human
aggaaucacucuugug

SEQ ID NO: 2519931 - RNA, 21 nt, Human
aggaaucaagagcugcccucc

SEQ ID NO: 2519932 - RNA, 15 nt, Human
aggaaucacucuugu

SEQ ID NO: 2519933 - RNA, 20 nt, Human
aggaaucaagagcugcccuc

SEQ ID NO: 2519934 - RNA, 19 nt, Human
aggaaucaagagcugcccu

SEQ ID NO: 2519935 - RNA, 17 nt, Human
aggaaucaagagcugcc

SEQ ID NO: 2519936 - RNA, 16 nt, Human
aggaauauuuuccaaa

SEQ ID NO: 2519937 - RNA, 15 nt, Human
aggaauauuuuccaa

SEQ ID NO: 2519938 - RNA, 20 nt, Human
aggaauauuuuccaaagagu

SEQ ID NO: 2519939 - RNA, 16 nt, Human
aggaaucaagagcugc

SEQ ID NO: 2519940 - RNA, 22 nt, Human
aggaaucaugucaggccugugu

SEQ ID NO: 2519941 - RNA, 21 nt, Human
aggaaucaugucaggccugug

SEQ ID NO: 2519942 - RNA, 22 nt, Human
aggaaucagcaagaagauccua

SEQ ID NO: 2519943 - RNA, 15 nt, Human
aggaaucagacuuca

SEQ ID NO: 2519944 - RNA, 24 nt, Human
aggaccagcucaggacagaugcca

SEQ ID NO: 2519945 - RNA, 15 nt, Human
aggaccagcuggggc

SEQ ID NO: 2519946 - RNA, 14 nt, Human
aggaccagcugggg

SEQ ID NO: 2519947 - RNA, 13 nt, Human
aggaccagcuggg

SEQ ID NO: 2519948 - RNA, 23 nt, Human
aggaccagcucaggacagaugcc

SEQ ID NO: 2519949 - RNA, 22 nt, Human
aggaccaggacuauagcccagg

SEQ ID NO: 2519950 - RNA, 19 nt, Human
aggaccagcuggggcgugg

SEQ ID NO: 2519951 - RNA, 12 nt, Human
aggaccaggacu

SEQ ID NO: 2519952 - RNA, 20 nt, Human
aggaccagucaaccugggca

SEQ ID NO: 2519953 - RNA, 19 nt, Human
aggaccagucaaccugggc

SEQ ID NO: 2519954 - RNA, 20 nt, Human
aggacccggaggggccuggc

SEQ ID NO: 2519955 - RNA, 18 nt, Human
aggacccggaggggccug

SEQ ID NO: 2519956 - RNA, 13 nt, Human
aggaccaggacuc

SEQ ID NO: 2519957 - RNA, 16 nt, Human
aggaccaggacucccu

SEQ ID NO: 2519958 - RNA, 17 nt, Human
aggaccaggacucccuc

SEQ ID NO: 2519959 - RNA, 18 nt, Human
aggaccaggacucccucc

SEQ ID NO: 2519960 - RNA, 18 nt, Human
aggaccagggcagggcca

SEQ ID NO: 2519961 - RNA, 13 nt, Human
aggaccaggcaau

SEQ ID NO: 2519962 - RNA, 23 nt, Human
aggaccaggacuauagcccaggu

SEQ ID NO: 2519963 - RNA, 19 nt, Human
aggaccaggacucccuccu

SEQ ID NO: 2519964 - RNA, 21 nt, Human
aggaccaggacucccuccuca

SEQ ID NO: 2519965 - RNA, 22 nt, Human
aggacccggaggggccuggcag

SEQ ID NO: 2519966 - RNA, 21 nt, Human
aggacccggaggggccuggca

SEQ ID NO: 2519967 - RNA, 15 nt, Human
aggacccugaagggg

SEQ ID NO: 2519968 - RNA, 19 nt, Human
aggacccugaaggggccau

SEQ ID NO: 2519969 - RNA, 17 nt, Human
aggagaggaugagagcc

SEQ ID NO: 2519970 - RNA, 15 nt, Human
aggagaggaugagag

SEQ ID NO: 2519971 - RNA, 13 nt, Human
aggagaggaugag

SEQ ID NO: 2519972 - RNA, 18 nt, Human
aggagagaggcagagagc

SEQ ID NO: 2519973 - RNA, 14 nt, Human
aggagagaggcaga

SEQ ID NO: 2519974 - RNA, 13 nt, Human
aggagagaggcag

SEQ ID NO: 2519975 - RNA, 10 nt, Human
aggagagagg

SEQ ID NO: 2519976 - RNA, 20 nt, Human
aggagagagcagcuucugcc

SEQ ID NO: 2519977 - RNA, 15 nt, Human
aggagaggagagggg

SEQ ID NO: 2519978 - RNA, 11 nt, Human
aggagagaccg

SEQ ID NO: 2519979 - RNA, 15 nt, Human
aggagagaagaauga

SEQ ID NO: 2519980 - RNA, 17 nt, Human
aggagagaaggggagga

SEQ ID NO: 2519981 - RNA, 11 nt, Human
aggagagagaa

SEQ ID NO: 2519982 - RNA, 21 nt, Human
aggagagaaggggaggagggc

SEQ ID NO: 2519983 - RNA, 19 nt, Human
aggagagagaaagccaggc

SEQ ID NO: 2519984 - RNA, 18 nt, Human
aggagagagaaagccagg

SEQ ID NO: 2519985 - RNA, 14 nt, Human
aggagagagaaagc

SEQ ID NO: 2519986 - RNA, 12 nt, Human
aggagagagaaa

SEQ ID NO: 2519987 - RNA, 22 nt, Human
aggagagagaaagccaggcagg

SEQ ID NO: 2519988 - RNA, 21 nt, Human
aggagagagaaagccaggcag

SEQ ID NO: 2519989 - RNA, 17 nt, Human
aggagagagcagcuucu

SEQ ID NO: 2519990 - RNA, 19 nt, Human
aggaccugggaccuccccu

SEQ ID NO: 2519991 - RNA, 13 nt, Human
aggaccuggcugc

SEQ ID NO: 2519992 - RNA, 16 nt, Human
aggaccuggcugccau

SEQ ID NO: 2519993 - RNA, 13 nt, Human
aggaccugccugu

SEQ ID NO: 2519994 - RNA, 14 nt, Human
aggaccugccugua

SEQ ID NO: 2519995 - RNA, 14 nt, Human
aggagagaagaaug

SEQ ID NO: 2519996 - RNA, 13 nt, Human
aggagagaagaau

SEQ ID NO: 2519997 - RNA, 12 nt, Human
aggagagaagaa

SEQ ID NO: 2519998 - RNA, 17 nt, Human
aggaccuggcugccaua

SEQ ID NO: 2519999 - RNA, 16 nt, Human
aggaccuguggccaag

SEQ ID NO: 2520000 - RNA, 20 nt, Human
aggaagggcauccuucugcc

SEQ ID NO: 2520001 - RNA, 18 nt, Human
aggaagggcauccuucug

SEQ ID NO: 2520002 - RNA, 16 nt, Human
aggaaggggccagagg

SEQ ID NO: 2520003 - RNA, 18 nt, Human
aggaaggggccagaggcu

SEQ ID NO: 2520004 - RNA, 20 nt, Human
aggaaggggccagaggcucg

SEQ ID NO: 2520005 - RNA, 15 nt, Human
aggaaguaggaagua

SEQ ID NO: 2520006 - RNA, 18 nt, Human
aggaagucaaagcaagga

SEQ ID NO: 2520007 - RNA, 14 nt, Human
aggaaguaggaagu

SEQ ID NO: 2520008 - RNA, 17 nt, Human
aggaagucuaggagcug

SEQ ID NO: 2520009 - RNA, 18 nt, Human
aggaagucuaggagcugg

SEQ ID NO: 2520010 - RNA, 17 nt, Human
aggaagugaaaauaggu

SEQ ID NO: 2520011 - RNA, 19 nt, Human
aggaacuguccagagagca

SEQ ID NO: 2520012 - RNA, 18 nt, Human
aggaacuguccagagagc

SEQ ID NO: 2520013 - RNA, 20 nt, Human
aggaacuguccagagagcaa

SEQ ID NO: 2520014 - RNA, 23 nt, Human
aggaagggaccaaggcaaggcag

SEQ ID NO: 2520015 - RNA, 17 nt, Human
aggaagggaccaaggca

SEQ ID NO: 2520016 - RNA, 16 nt, Human
aggaagggaccaaggc

SEQ ID NO: 2520017 - RNA, 12 nt, Human
aggaagggcaaa

SEQ ID NO: 2520018 - RNA, 17 nt, Human
aggaagggcaggaagga

SEQ ID NO: 2520019 - RNA, 17 nt, Human
aggaacuguccagagag

SEQ ID NO: 2520020 - RNA, 16 nt, Human
aggaacuguccagaga

SEQ ID NO: 2520021 - RNA, 15 nt, Human
aggaacuguccagag

SEQ ID NO: 2520022 - RNA, 22 nt, Human
aggaaggcugagaggagagaga

SEQ ID NO: 2520023 - RNA, 15 nt, Human
aggaaggcugagagg

SEQ ID NO: 2520024 - RNA, 18 nt, Human
aggaauaccugucccccu

SEQ ID NO: 2520025 - RNA, 15 nt, Human
aggaauaccuguccc

SEQ ID NO: 2520026 - RNA, 17 nt, Human
aggaauaauuauuuauu

SEQ ID NO: 2520027 - RNA, 16 nt, Human
aggaauaauuauuuau

SEQ ID NO: 2520028 - RNA, 23 nt, Human
aggaauaaugggcuuagagcagu

SEQ ID NO: 2520029 - RNA, 15 nt, Human
aggaauaaugggcuu

SEQ ID NO: 2520030 - RNA, 22 nt, Human
aggaauaauuauuuauuuaaua

SEQ ID NO: 2520031 - RNA, 18 nt, Human
aggaauaauuauuuauuu

SEQ ID NO: 2520032 - RNA, 22 nt, Human
aggaauaccugucccccugaca

SEQ ID NO: 2520033 - RNA, 14 nt, Human
aggaagugaagaau

SEQ ID NO: 2520034 - RNA, 16 nt, Human
aggaaguguaacagcu

SEQ ID NO: 2520035 - RNA, 18 nt, Human
aggaaguguaacagcuga

SEQ ID NO: 2520036 - RNA, 17 nt, Human
aggaaguguaacagcug

SEQ ID NO: 2520037 - RNA, 19 nt, Human
aggaauaaauugcuccuug

SEQ ID NO: 2520038 - RNA, 13 nt, Human
aggaauaaauaaa

SEQ ID NO: 2520039 - RNA, 19 nt, Human
aggaauaaauaaaaaugga

SEQ ID NO: 2520040 - RNA, 20 nt, Human
aggaauaaauugcuccuuga

SEQ ID NO: 2520041 - RNA, 14 nt, Human
aggaauaaggccuu

SEQ ID NO: 2520042 - RNA, 21 nt, Human
aggaauaaauaaaaauggaua

SEQ ID NO: 2520043 - RNA, 13 nt, Human
aggaaccaaagcg

SEQ ID NO: 2520044 - RNA, 15 nt, Human
aggaaccaaagcgaa

SEQ ID NO: 2520045 - RNA, 15 nt, Human
aggaaccacaccaca

SEQ ID NO: 2520046 - RNA, 17 nt, Human
aggaaccacaccacauc

SEQ ID NO: 2520047 - RNA, 16 nt, Human
aggaaccauaaucaau

SEQ ID NO: 2520048 - RNA, 19 nt, Human
aggaacauaugaaaauaca

SEQ ID NO: 2520049 - RNA, 20 nt, Human
aggaacaaggcaaggcuguc

SEQ ID NO: 2520050 - RNA, 19 nt, Human
aggaacccuuacaguagga

SEQ ID NO: 2520051 - RNA, 21 nt, Human
aggaacuuaaauaaugugaaa

SEQ ID NO: 2520052 - RNA, 22 nt, Human
aggaacugcugggcuuggcagc

SEQ ID NO: 2520053 - RNA, 19 nt, Human
aggaaccuccuccacacca

SEQ ID NO: 2520054 - RNA, 19 nt, Human
aggaacaaggcaaggcugu

SEQ ID NO: 2520055 - RNA, 17 nt, Human
aggaacaaggcaaggcu

SEQ ID NO: 2520056 - RNA, 16 nt, Human
aggaacaaggcaaggc

SEQ ID NO: 2520057 - RNA, 13 nt, Human
aggaacaaggcaa

SEQ ID NO: 2520058 - RNA, 12 nt, Human
aggaacaaggca

SEQ ID NO: 2520059 - RNA, 23 nt, Human
aggaaauugagauuagagggagg

SEQ ID NO: 2520060 - RNA, 15 nt, Human
agcuuuuaugugaaa

SEQ ID NO: 2520061 - RNA, 17 nt, Human
agcuguaaaccagagag

SEQ ID NO: 2520062 - RNA, 17 nt, Human
agcuguaagaagagacu

SEQ ID NO: 2520063 - RNA, 16 nt, Human
agcuguaaaccagaga

SEQ ID NO: 2520064 - RNA, 14 nt, Human
agcuguaaaccaga

SEQ ID NO: 2520065 - RNA, 19 nt, Human
agcuguaaaaagagagaaa

SEQ ID NO: 2520066 - RNA, 15 nt, Human
agcuguaaaaagaga

SEQ ID NO: 2520067 - RNA, 22 nt, Human
agcugguuuccucauuccugaa

SEQ ID NO: 2520068 - RNA, 19 nt, Human
agcuucauuugugucaaug

SEQ ID NO: 2520069 - RNA, 17 nt, Human
agcuucauuugugucaa

SEQ ID NO: 2520070 - RNA, 13 nt, Human
agcuucauuugug

SEQ ID NO: 2520071 - RNA, 15 nt, Human
agcuucaccagagca

SEQ ID NO: 2520072 - RNA, 20 nt, Human
agcuucauuugugucaaugg

SEQ ID NO: 2520073 - RNA, 12 nt, Human
agcuucuccagg

SEQ ID NO: 2520074 - RNA, 19 nt, Human
agcuucauuuccugugucu

SEQ ID NO: 2520075 - RNA, 15 nt, Human
agcuucuccaggcuc

SEQ ID NO: 2520076 - RNA, 14 nt, Human
agcuucuccaggcu

SEQ ID NO: 2520077 - RNA, 23 nt, Human
agcuucuccaggcucuuuggggu

SEQ ID NO: 2520078 - RNA, 12 nt, Human
agcuucuccugu

SEQ ID NO: 2520079 - RNA, 16 nt, Human
agcuucuccuguguga

SEQ ID NO: 2520080 - RNA, 21 nt, Human
agcuucuccugugugauugac

SEQ ID NO: 2520081 - RNA, 13 nt, Human
agcuucucuguga

SEQ ID NO: 2520082 - RNA, 14 nt, Human
agcuucucugugaa

SEQ ID NO: 2520083 - RNA, 17 nt, Human
agcuucugcuuuucugc

SEQ ID NO: 2520084 - RNA, 12 nt, Human
agcuucugcuuu

SEQ ID NO: 2520085 - RNA, 16 nt, Human
agcuuuuaaacccuau

SEQ ID NO: 2520086 - RNA, 23 nt, Human
agcuuuguuuguugucagcugaa

SEQ ID NO: 2520087 - RNA, 19 nt, Human
agcuucugcuuuucugccc

SEQ ID NO: 2520088 - RNA, 18 nt, Human
agcuucugcugggcuggg

SEQ ID NO: 2520089 - RNA, 17 nt, Human
agcuucugcugggcugg

SEQ ID NO: 2520090 - RNA, 16 nt, Human
agcuucugcugggcug

SEQ ID NO: 2520091 - RNA, 15 nt, Human
agcuucugcugggcu

SEQ ID NO: 2520092 - RNA, 14 nt, Human
agcuucugcugggc

SEQ ID NO: 2520093 - RNA, 13 nt, Human
agcuucugcuggg

SEQ ID NO: 2520094 - RNA, 18 nt, Human
agcuucugaggcgcugcu

SEQ ID NO: 2520095 - RNA, 13 nt, Human
agcuucugccacu

SEQ ID NO: 2520096 - RNA, 12 nt, Human
agcuuauuuaau

SEQ ID NO: 2520097 - RNA, 18 nt, Human
agcuucauuuccuguguc

SEQ ID NO: 2520098 - RNA, 19 nt, Human
agcuucauggcagaaggca

SEQ ID NO: 2520099 - RNA, 21 nt, Human
agcuucaccccaaucccagcu

SEQ ID NO: 2520100 - RNA, 18 nt, Human
agcuucacuguaaaauaa

SEQ ID NO: 2520101 - RNA, 18 nt, Human
agcuucaccccaauccca

SEQ ID NO: 2520102 - RNA, 20 nt, Human
agcuucaccccaaucccagc

SEQ ID NO: 2520103 - RNA, 23 nt, Human
agccuggcucccacaggcagcuu

SEQ ID NO: 2520104 - RNA, 22 nt, Human
agccuggcucccacaggcagcu

SEQ ID NO: 2520105 - RNA, 21 nt, Human
agccuggcucccacaggcagc

SEQ ID NO: 2520106 - RNA, 20 nt, Human
agccuggcucccacaggcag

SEQ ID NO: 2520107 - RNA, 22 nt, Human
agccuggcuccaaacccucgag

SEQ ID NO: 2520108 - RNA, 17 nt, Human
agccuggcuucaaauug

SEQ ID NO: 2520109 - RNA, 18 nt, Human
agccuggcuucaaauugu

SEQ ID NO: 2520110 - RNA, 12 nt, Human
agccuggcucuu

SEQ ID NO: 2520111 - RNA, 11 nt, Human
agccuggcucu

SEQ ID NO: 2520112 - RNA, 14 nt, Human
agccuggcuucugg

SEQ ID NO: 2520113 - RNA, 19 nt, Human
agcccucccugccccuccc

SEQ ID NO: 2520114 - RNA, 17 nt, Human
agcccucccugccccuc

SEQ ID NO: 2520115 - RNA, 16 nt, Human
agcccucccugccccu

SEQ ID NO: 2520116 - RNA, 15 nt, Human
agcccucccugcccc

SEQ ID NO: 2520117 - RNA, 23 nt, Human
agcccucccugccccucccuuca

SEQ ID NO: 2520118 - RNA, 22 nt, Human
agcccucccugccccucccuuc

SEQ ID NO: 2520119 - RNA, 20 nt, Human
agccuggcuccaaacccucg

SEQ ID NO: 2520120 - RNA, 13 nt, Human
agccuggcuccaa

SEQ ID NO: 2520121 - RNA, 12 nt, Human
agccugggaggu

SEQ ID NO: 2520122 - RNA, 19 nt, Human
agccugggcagccaggcug

SEQ ID NO: 2520123 - RNA, 20 nt, Human
agccugggcagccaggcugc

SEQ ID NO: 2520124 - RNA, 21 nt, Human
agccuggcuucuggagcccuu

SEQ ID NO: 2520125 - RNA, 23 nt, Human
agccuggcuucuggagcccuugg

SEQ ID NO: 2520126 - RNA, 15 nt, Human
agccuggcuucugga

SEQ ID NO: 2520127 - RNA, 18 nt, Human
agccuggcuucuggagcc

SEQ ID NO: 2520128 - RNA, 19 nt, Human
agccuggcuucuggagccc

SEQ ID NO: 2520129 - RNA, 20 nt, Human
agccuggcuucuggagcccu

SEQ ID NO: 2520130 - RNA, 15 nt, Human
agccugggcgacaga

SEQ ID NO: 2520131 - RNA, 21 nt, Human
agccugggcagccaggcugcc

SEQ ID NO: 2520132 - RNA, 14 nt, Human
agccugggcgacag

SEQ ID NO: 2520133 - RNA, 19 nt, Human
agccuuugguucuggccag

SEQ ID NO: 2520134 - RNA, 18 nt, Human
agccuuuucccucuuugg

SEQ ID NO: 2520135 - RNA, 21 nt, Human
agccuuuggcucuggagacag

SEQ ID NO: 2520136 - RNA, 18 nt, Human
agccuuuggcucuggaga

SEQ ID NO: 2520137 - RNA, 17 nt, Human
agccuuuggcucuggag

SEQ ID NO: 2520138 - RNA, 16 nt, Human
agccuuuggcucugga

SEQ ID NO: 2520139 - RNA, 23 nt, Human
agccuuuggcucuggagacagcc

SEQ ID NO: 2520140 - RNA, 18 nt, Human
agccuuugguucuggcca

SEQ ID NO: 2520141 - RNA, 20 nt, Human
agccuuuggaugaccagaac

SEQ ID NO: 2520142 - RNA, 18 nt, Human
agccuuuggaugaccaga

SEQ ID NO: 2520143 - RNA, 14 nt, Human
agccuggggcuggc

SEQ ID NO: 2520144 - RNA, 15 nt, Human
agccuuuggaaacag

SEQ ID NO: 2520145 - RNA, 20 nt, Human
agcgaccaccccugccucca

SEQ ID NO: 2520146 - RNA, 19 nt, Human
agcgaccaccccugccucc

SEQ ID NO: 2520147 - RNA, 17 nt, Human
agcgaccaccccugccu

SEQ ID NO: 2520148 - RNA, 19 nt, Human
agcgacauagcccaucccu

SEQ ID NO: 2520149 - RNA, 21 nt, Human
agcgacauagcccaucccugc

SEQ ID NO: 2520150 - RNA, 23 nt, Human
agccuuuucccucuuuggcuccc

SEQ ID NO: 2520151 - RNA, 17 nt, Human
agcgacagugagacucu

SEQ ID NO: 2520152 - RNA, 17 nt, Human
agcgacuccguuggcca

SEQ ID NO: 2520153 - RNA, 16 nt, Human
agcgacuccguuggcc

SEQ ID NO: 2520154 - RNA, 22 nt, Human
agcgaccuuccucauccacccc

SEQ ID NO: 2520155 - RNA, 17 nt, Human
agcgaccgcccccuccu

SEQ ID NO: 2520156 - RNA, 16 nt, Human
agcgaccgcccccucc

SEQ ID NO: 2520157 - RNA, 15 nt, Human
agcgaccgcccccuc

SEQ ID NO: 2520158 - RNA, 14 nt, Human
agcgaccgcccccu

SEQ ID NO: 2520159 - RNA, 21 nt, Human
agcgaccaccccugccuccac

SEQ ID NO: 2520160 - RNA, 18 nt, Human
agcgaggucaacagagaa

SEQ ID NO: 2520161 - RNA, 23 nt, Human
agcgaggucaacagagaaggcag

SEQ ID NO: 2520162 - RNA, 19 nt, Human
agcgaggucaacagagaag

SEQ ID NO: 2520163 - RNA, 22 nt, Human
agcgaggucaacagagaaggca

SEQ ID NO: 2520164 - RNA, 14 nt, Human
agcgaguuguggaa

SEQ ID NO: 2520165 - RNA, 21 nt, Human
agcgaguuguggaaagccucu

SEQ ID NO: 2520166 - RNA, 23 nt, Human
agcgauuauuaucuaaagugugu

SEQ ID NO: 2520167 - RNA, 19 nt, Human
agcgauuauuaucuaaagu

SEQ ID NO: 2520168 - RNA, 18 nt, Human
agcgauguaugcagcuau

SEQ ID NO: 2520169 - RNA, 16 nt, Human
agcgauguaugcagcu

SEQ ID NO: 2520170 - RNA, 18 nt, Human
agcgauggucucagaaac

SEQ ID NO: 2520171 - RNA, 19 nt, Human
agcgaugaauuuggagacu

SEQ ID NO: 2520172 - RNA, 18 nt, Human
agcgaugaauuuggagac

SEQ ID NO: 2520173 - RNA, 20 nt, Human
agcgaggagaugcuccuugg

SEQ ID NO: 2520174 - RNA, 15 nt, Human
agcgaggaggcucca

SEQ ID NO: 2520175 - RNA, 19 nt, Human
agcgaggaggcuccagagg

SEQ ID NO: 2520176 - RNA, 19 nt, Human
agcgagcccugguggcagu

SEQ ID NO: 2520177 - RNA, 13 nt, Human
agcgagcccuggu

SEQ ID NO: 2520178 - RNA, 20 nt, Human
agcgacuccguuggccacuc

SEQ ID NO: 2520179 - RNA, 19 nt, Human
agcgacuccguuggccacu

SEQ ID NO: 2520180 - RNA, 21 nt, Human
agcgacuccguuggccacucc

SEQ ID NO: 2520181 - RNA, 16 nt, Human
agcgagagucugucuc

SEQ ID NO: 2520182 - RNA, 16 nt, Human
agcuaaucagcauucu

SEQ ID NO: 2520183 - RNA, 21 nt, Human
agcuaaucagcauucucacuc

SEQ ID NO: 2520184 - RNA, 15 nt, Human
agcuaaaaccugagc

SEQ ID NO: 2520185 - RNA, 15 nt, Human
agcuaaaaugauuuu

SEQ ID NO: 2520186 - RNA, 20 nt, Human
agcuaaaaugauuuuaucug

SEQ ID NO: 2520187 - RNA, 16 nt, Human
agcuaaaaugauuuua

SEQ ID NO: 2520188 - RNA, 14 nt, Human
agcguugcaugucg

SEQ ID NO: 2520189 - RNA, 21 nt, Human
agcguuugaggggcuggccuu

SEQ ID NO: 2520190 - RNA, 14 nt, Human
agcucaauggacug

SEQ ID NO: 2520191 - RNA, 16 nt, Human
agcucaccagccccag

SEQ ID NO: 2520192 - RNA, 19 nt, Human
agcucaaggaaaggccuga

SEQ ID NO: 2520193 - RNA, 23 nt, Human
agcucaagucuucccugaucaag

SEQ ID NO: 2520194 - RNA, 20 nt, Human
agcucaagcaggaaguucaa

SEQ ID NO: 2520195 - RNA, 18 nt, Human
agcucaagucuucccuga

SEQ ID NO: 2520196 - RNA, 13 nt, Human
agcuaauuugcau

SEQ ID NO: 2520197 - RNA, 14 nt, Human
agcuaauuugcauu

SEQ ID NO: 2520198 - RNA, 19 nt, Human
agcuaauucuuugaccugu

SEQ ID NO: 2520199 - RNA, 23 nt, Human
agcuaauguaauaacugugaagu

SEQ ID NO: 2520200 - RNA, 20 nt, Human
agcuaauuugcauuaaauuc

SEQ ID NO: 2520201 - RNA, 22 nt, Human
agcuaauuugcauuaaauucac

SEQ ID NO: 2520202 - RNA, 22 nt, Human
agcucaaagcguggacaggugu

SEQ ID NO: 2520203 - RNA, 13 nt, Human
agcucaaaggcac

SEQ ID NO: 2520204 - RNA, 15 nt, Human
agcucaaaggcacag

SEQ ID NO: 2520205 - RNA, 16 nt, Human
agcucaaaggcacagu

SEQ ID NO: 2520206 - RNA, 21 nt, Human
agcucaccuguugcuuacaau

SEQ ID NO: 2520207 - RNA, 19 nt, Human
agcucaccuguugcuuaca

SEQ ID NO: 2520208 - RNA, 18 nt, Human
agcucaccuguugcuuac

SEQ ID NO: 2520209 - RNA, 17 nt, Human
agcucaccuguugcuua

SEQ ID NO: 2520210 - RNA, 16 nt, Human
agcucaccuguugcuu

SEQ ID NO: 2520211 - RNA, 13 nt, Human
agcucaccccugg

SEQ ID NO: 2520212 - RNA, 21 nt, Human
agcucaccccccacacucacu

SEQ ID NO: 2520213 - RNA, 17 nt, Human
agcucaccccccacacu

SEQ ID NO: 2520214 - RNA, 19 nt, Human
agcucaccucucccuugga

SEQ ID NO: 2520215 - RNA, 18 nt, Human
agcucaccucucccuugg

SEQ ID NO: 2520216 - RNA, 15 nt, Human
agcucaccucucccu

SEQ ID NO: 2520217 - RNA, 15 nt, Human
agcucaccccccaca

SEQ ID NO: 2520218 - RNA, 14 nt, Human
agcucaccccccac

SEQ ID NO: 2520219 - RNA, 21 nt, Human
agcucacccaauaaacauuaa

SEQ ID NO: 2520220 - RNA, 15 nt, Human
agcucaccagcccca

SEQ ID NO: 2520221 - RNA, 12 nt, Human
agcucaccucuc

SEQ ID NO: 2520222 - RNA, 20 nt, Human
agcucaccagccccagugcc

SEQ ID NO: 2520223 - RNA, 19 nt, Human
agcucaccagccccagugc

SEQ ID NO: 2520224 - RNA, 12 nt, Human
agcucagagagg

SEQ ID NO: 2520225 - RNA, 23 nt, Human
agcucagaaggcucuucugacua

SEQ ID NO: 2520226 - RNA, 19 nt, Human
agcucagaaggcucuucug

SEQ ID NO: 2520227 - RNA, 16 nt, Human
agcucagaaggcucuu

SEQ ID NO: 2520228 - RNA, 15 nt, Human
agcucagaaggcucu

SEQ ID NO: 2520229 - RNA, 23 nt, Human
agcucacuucugggcuucaucug

SEQ ID NO: 2520230 - RNA, 13 nt, Human
agcucacuucugg

SEQ ID NO: 2520231 - RNA, 13 nt, Human
agcucacuacccu

SEQ ID NO: 2520232 - RNA, 23 nt, Human
agcucaccuguugcuuacaauuu

SEQ ID NO: 2520233 - RNA, 22 nt, Human
agcucaccuguugcuuacaauu

SEQ ID NO: 2520234 - RNA, 13 nt, Human
agcucacgucaca

SEQ ID NO: 2520235 - RNA, 16 nt, Human
agcucacgucacacuu

SEQ ID NO: 2520236 - RNA, 17 nt, Human
agcucagagagggcagg

SEQ ID NO: 2520237 - RNA, 16 nt, Human
agcucagagagggcag

SEQ ID NO: 2520238 - RNA, 19 nt, Human
agcucagaggcgcacugug

SEQ ID NO: 2520239 - RNA, 21 nt, Human
agcucagagagggcaggcaug

SEQ ID NO: 2520240 - RNA, 22 nt, Human
agcucagaggcgcacugugacc

SEQ ID NO: 2520241 - RNA, 18 nt, Human
agcucagagaggguggga

SEQ ID NO: 2520242 - RNA, 14 nt, Human
agcucagagagggu

SEQ ID NO: 2520243 - RNA, 22 nt, Human
agcucagaauccaagugaacac

SEQ ID NO: 2520244 - RNA, 16 nt, Human
agcucagaauccaagu

SEQ ID NO: 2520245 - RNA, 15 nt, Human
agcucagacccccac

SEQ ID NO: 2520246 - RNA, 16 nt, Human
agcucagacccccacu

SEQ ID NO: 2520247 - RNA, 17 nt, Human
agcucagacccccacuc

SEQ ID NO: 2520248 - RNA, 18 nt, Human
agcucagacccccacucu

SEQ ID NO: 2520249 - RNA, 14 nt, Human
agcucagagagggc

SEQ ID NO: 2520250 - RNA, 20 nt, Human
agcucagacccccacucuca

SEQ ID NO: 2520251 - RNA, 21 nt, Human
agcuccccgcuucugccugca

SEQ ID NO: 2520252 - RNA, 22 nt, Human
agcucagcccaccccccucauu

SEQ ID NO: 2520253 - RNA, 16 nt, Human
agcucagcccaccccc

SEQ ID NO: 2520254 - RNA, 19 nt, Human
agcucagcccaccccccuc

SEQ ID NO: 2520255 - RNA, 20 nt, Human
agcucagcccaccccccuca

SEQ ID NO: 2520256 - RNA, 21 nt, Human
agcucagcccaccccccucau

SEQ ID NO: 2520257 - RNA, 16 nt, Human
agcucagcauuuccac

SEQ ID NO: 2520258 - RNA, 11 nt, Human
agcucagccca

SEQ ID NO: 2520259 - RNA, 14 nt, Human
agcucagcccaccc

SEQ ID NO: 2520260 - RNA, 15 nt, Human
agcucagcccacccc

SEQ ID NO: 2520261 - RNA, 18 nt, Human
agcugcgguccacccagg

SEQ ID NO: 2520262 - RNA, 17 nt, Human
agcugcgguccacccag

SEQ ID NO: 2520263 - RNA, 16 nt, Human
agcugcgguccaccca

SEQ ID NO: 2520264 - RNA, 13 nt, Human
agcugcgguccac

SEQ ID NO: 2520265 - RNA, 20 nt, Human
agcugcgguccacccaggag

SEQ ID NO: 2520266 - RNA, 19 nt, Human
agcugcgguccacccagga

SEQ ID NO: 2520267 - RNA, 15 nt, Human
agcugcgggcugggu

SEQ ID NO: 2520268 - RNA, 12 nt, Human
agcugcugacag

SEQ ID NO: 2520269 - RNA, 17 nt, Human
agcuggucccacucagu

SEQ ID NO: 2520270 - RNA, 16 nt, Human
agcuggucccacucag

SEQ ID NO: 2520271 - RNA, 14 nt, Human
agcugcugacagug

SEQ ID NO: 2520272 - RNA, 13 nt, Human
agcugcugacagu

SEQ ID NO: 2520273 - RNA, 19 nt, Human
agcuggucccacucagucc

SEQ ID NO: 2520274 - RNA, 18 nt, Human
agcuggucccacucaguc

SEQ ID NO: 2520275 - RNA, 22 nt, Human
agcugguuuuuagcggagacgg

SEQ ID NO: 2520276 - RNA, 15 nt, Human
agcugguuuccucau

SEQ ID NO: 2520277 - RNA, 15 nt, Human
agcugguuggagagc

SEQ ID NO: 2520278 - RNA, 21 nt, Human
agcugguuuccucauuccuga

SEQ ID NO: 2520279 - RNA, 16 nt, Human
agcugguugagguuuc

SEQ ID NO: 2520280 - RNA, 13 nt, Human
agcuccccuccuc

SEQ ID NO: 2520281 - RNA, 14 nt, Human
agcuccccuccucu

SEQ ID NO: 2520282 - RNA, 19 nt, Human
agcuccccuccucuccccu

SEQ ID NO: 2520283 - RNA, 14 nt, Human
agcuccuguccucc

SEQ ID NO: 2520284 - RNA, 20 nt, Human
agcuccccucggagaagagc

SEQ ID NO: 2520285 - RNA, 17 nt, Human
agcuccccucggagaag

SEQ ID NO: 2520286 - RNA, 19 nt, Human
agcuccccucggagaagag

SEQ ID NO: 2520287 - RNA, 22 nt, Human
agcuccuguggccccacccugg

SEQ ID NO: 2520288 - RNA, 19 nt, Human
agcuccuguggccccaccc

SEQ ID NO: 2520289 - RNA, 16 nt, Human
agcuccuguggcccca

SEQ ID NO: 2520290 - RNA, 15 nt, Human
agcuccuguggcccc

SEQ ID NO: 2520291 - RNA, 21 nt, Human
agcuccuguccucccaucccc

SEQ ID NO: 2520292 - RNA, 17 nt, Human
agcuccuguccucccau

SEQ ID NO: 2520293 - RNA, 16 nt, Human
agcuccuguccuccca

SEQ ID NO: 2520294 - RNA, 15 nt, Human
agcuccuguccuccc

SEQ ID NO: 2520295 - RNA, 13 nt, Human
agcuccuguggcc

SEQ ID NO: 2520296 - RNA, 12 nt, Human
agcuccuguggc

SEQ ID NO: 2520297 - RNA, 23 nt, Human
agcugaacaauaggcuguuccca

SEQ ID NO: 2520298 - RNA, 22 nt, Human
agcugaacagccaaaugcaugg

SEQ ID NO: 2520299 - RNA, 19 nt, Human
agcugaacccauuuugagu

SEQ ID NO: 2520300 - RNA, 15 nt, Human
agcugaaccugggua

SEQ ID NO: 2520301 - RNA, 17 nt, Human
agcugaagugcauccaa

SEQ ID NO: 2520302 - RNA, 16 nt, Human
agcugaagauuuugga

SEQ ID NO: 2520303 - RNA, 15 nt, Human
agcugaauacauucu

SEQ ID NO: 2520304 - RNA, 18 nt, Human
agcugaauacauucugcu

SEQ ID NO: 2520305 - RNA, 14 nt, Human
agcugagccucuca

SEQ ID NO: 2520306 - RNA, 13 nt, Human
agcugagccucuc

SEQ ID NO: 2520307 - RNA, 12 nt, Human
agcugagcgcca

SEQ ID NO: 2520308 - RNA, 14 nt, Human
agcugagcgccagg

SEQ ID NO: 2520309 - RNA, 15 nt, Human
agcugagcgccagga

SEQ ID NO: 2520310 - RNA, 17 nt, Human
agcugagcgccaggaug

SEQ ID NO: 2520311 - RNA, 16 nt, Human
agcugaggcagcagug

SEQ ID NO: 2520312 - RNA, 17 nt, Human
agcugaggcagcagugu

SEQ ID NO: 2520313 - RNA, 13 nt, Human
agcugaggccaca

SEQ ID NO: 2520314 - RNA, 17 nt, Human
agcugaggccacacuca

SEQ ID NO: 2520315 - RNA, 15 nt, Human
agcugaggcagcagu

SEQ ID NO: 2520316 - RNA, 17 nt, Human
agcugaggcaauucuaa

SEQ ID NO: 2520317 - RNA, 22 nt, Human
aaagcauuugaaugcauuuugu

SEQ ID NO: 2520318 - RNA, 20 nt, Human
aaagcauuugaaugcauuuu

SEQ ID NO: 2520319 - RNA, 19 nt, Human
aaagcauuugaaugcauuu

SEQ ID NO: 2520320 - RNA, 17 nt, Human
aaagcauuugaaugcau

SEQ ID NO: 2520321 - RNA, 23 nt, Human
aaagcauuugaaugcauuuuguu

SEQ ID NO: 2520322 - RNA, 15 nt, Human
aaagccaaagcuagg

SEQ ID NO: 2520323 - RNA, 12 nt, Human
aaagcauuuaua

SEQ ID NO: 2520324 - RNA, 17 nt, Human
aaagccaaacucugcca

SEQ ID NO: 2520325 - RNA, 20 nt, Human
aaagccaaaucaaaauaugu

SEQ ID NO: 2520326 - RNA, 23 nt, Human
aaagccaacagucaaaacagaga

SEQ ID NO: 2520327 - RNA, 19 nt, Human
aaagcauuguaaaugugcu

SEQ ID NO: 2520328 - RNA, 20 nt, Human
aaagcauuguaaaugugcuu

SEQ ID NO: 2520329 - RNA, 15 nt, Human
aaagcauuugaaugc

SEQ ID NO: 2520330 - RNA, 14 nt, Human
aaagcauuugaaug

SEQ ID NO: 2520331 - RNA, 13 nt, Human
aaagcauuugaau

SEQ ID NO: 2520332 - RNA, 15 nt, Human
aaagcauuuauaaau

SEQ ID NO: 2520333 - RNA, 16 nt, Human
aaagcauuuacuuuga

SEQ ID NO: 2520334 - RNA, 17 nt, Human
aaagcauuuacuuugaa

SEQ ID NO: 2520335 - RNA, 17 nt, Human
aaaggcuaccuuuguau

SEQ ID NO: 2520336 - RNA, 14 nt, Human
aaaggcuaccuuug

SEQ ID NO: 2520337 - RNA, 14 nt, Human
aaaggcuccaggag

SEQ ID NO: 2520338 - RNA, 19 nt, Human
aaaggcuagguacacagcu

SEQ ID NO: 2520339 - RNA, 14 nt, Human
aaaggccaaaccuc

SEQ ID NO: 2520340 - RNA, 15 nt, Human
aaaggccaaaccucu

SEQ ID NO: 2520341 - RNA, 16 nt, Human
aaaggcauucucugaa

SEQ ID NO: 2520342 - RNA, 18 nt, Human
aaaggcauucucugaaga

SEQ ID NO: 2520343 - RNA, 22 nt, Human
aaaggcuccaggagcagccaca

SEQ ID NO: 2520344 - RNA, 18 nt, Human
aaaggcucgauuuuguau

SEQ ID NO: 2520345 - RNA, 17 nt, Human
aaaggcucgauuuugua

SEQ ID NO: 2520346 - RNA, 16 nt, Human
aaaggcucgauuuugu

SEQ ID NO: 2520347 - RNA, 17 nt, Human
aaaggccaaaccucugu

SEQ ID NO: 2520348 - RNA, 23 nt, Human
aaaggcucgauuuuguaucugca

SEQ ID NO: 2520349 - RNA, 19 nt, Human
aaaggcucgauuuuguauc

SEQ ID NO: 2520350 - RNA, 20 nt, Human
aaaggcucugaaagccagcu

SEQ ID NO: 2520351 - RNA, 21 nt, Human
aaaggcuccaggagcagccac

SEQ ID NO: 2520352 - RNA, 19 nt, Human
aaaggcucagucucaggag

SEQ ID NO: 2520353 - RNA, 21 nt, Human
aaaggcucagucucaggagca

SEQ ID NO: 2520354 - RNA, 19 nt, Human
aaaggcagaagcaacccaa

SEQ ID NO: 2520355 - RNA, 21 nt, Human
aaagccccaugcuggagccug

SEQ ID NO: 2520356 - RNA, 17 nt, Human
aaaggcauauugcuuuu

SEQ ID NO: 2520357 - RNA, 15 nt, Human
aaaggcauauugcuu

SEQ ID NO: 2520358 - RNA, 21 nt, Human
aaaggcauaagacccuaagcc

SEQ ID NO: 2520359 - RNA, 15 nt, Human
aaagccaagaggcug

SEQ ID NO: 2520360 - RNA, 18 nt, Human
aaagcccaaagugguaua

SEQ ID NO: 2520361 - RNA, 16 nt, Human
aaagcccaaccuccug

SEQ ID NO: 2520362 - RNA, 15 nt, Human
aaagcccaaaguggu

SEQ ID NO: 2520363 - RNA, 18 nt, Human
aaagcccaagggaucugg

SEQ ID NO: 2520364 - RNA, 15 nt, Human
aaagcccagagacag

SEQ ID NO: 2520365 - RNA, 23 nt, Human
aaagcccaagggaucugguccua

SEQ ID NO: 2520366 - RNA, 16 nt, Human
aaagcccauucauucc

SEQ ID NO: 2520367 - RNA, 20 nt, Human
aaagccccaugcuggagccu

SEQ ID NO: 2520368 - RNA, 19 nt, Human
aaagccccaugcuggagcc

SEQ ID NO: 2520369 - RNA, 18 nt, Human
aaagccccaugcuggagc

SEQ ID NO: 2520370 - RNA, 17 nt, Human
aaagccccaugcuggag

SEQ ID NO: 2520371 - RNA, 17 nt, Human
aaagcccauucauucca

SEQ ID NO: 2520372 - RNA, 15 nt, Human
aaagccccaugcugg

SEQ ID NO: 2520373 - RNA, 21 nt, Human
aaauaaauguaucauagaaau

SEQ ID NO: 2520374 - RNA, 16 nt, Human
aaauaaauguaucaua

SEQ ID NO: 2520375 - RNA, 13 nt, Human
aaauaaauuguau

SEQ ID NO: 2520376 - RNA, 19 nt, Human
aaauaaauuguauauucac

SEQ ID NO: 2520377 - RNA, 18 nt, Human
aaauaaauuguauauuca

SEQ ID NO: 2520378 - RNA, 15 nt, Human
aaauaaauuguauau

SEQ ID NO: 2520379 - RNA, 14 nt, Human
aaauaaauuguaua

SEQ ID NO: 2520380 - RNA, 15 nt, Human
aaauaaauguaucau

SEQ ID NO: 2520381 - RNA, 12 nt, Human
aaauaaacacug

SEQ ID NO: 2520382 - RNA, 11 nt, Human
aaauaaauuau

SEQ ID NO: 2520383 - RNA, 15 nt, Human
aaauaaauuguuuga

SEQ ID NO: 2520384 - RNA, 13 nt, Human
aaauaaauuguuu

SEQ ID NO: 2520385 - RNA, 21 nt, Human
aaauaaauuguauauucacuu

SEQ ID NO: 2520386 - RNA, 20 nt, Human
aaauaaauuguauauucacu

SEQ ID NO: 2520387 - RNA, 22 nt, Human
aaauaaauuguauauucacuuu

SEQ ID NO: 2520388 - RNA, 12 nt, Human
aaauaaauuguu

SEQ ID NO: 2520389 - RNA, 19 nt, Human
aaauaaaccucaaaauguc

SEQ ID NO: 2520390 - RNA, 13 nt, Human
aaauaaacacugu

SEQ ID NO: 2520391 - RNA, 23 nt, Human
aaauaaaacauuuuaaauggaca

SEQ ID NO: 2520392 - RNA, 19 nt, Human
aaauaaaauuuguugcaua

SEQ ID NO: 2520393 - RNA, 18 nt, Human
aaauaaacaaauaacaau

SEQ ID NO: 2520394 - RNA, 18 nt, Human
aaauaaaauuuguugcau

SEQ ID NO: 2520395 - RNA, 15 nt, Human
aaauaaaaccuuuca

SEQ ID NO: 2520396 - RNA, 11 nt, Human
aaauaaaaccu

SEQ ID NO: 2520397 - RNA, 12 nt, Human
aaauaaaaccuu

SEQ ID NO: 2520398 - RNA, 13 nt, Human
aaauaaaaccuuu

SEQ ID NO: 2520399 - RNA, 14 nt, Human
aaauaaaaccuuuc

SEQ ID NO: 2520400 - RNA, 20 nt, Human
aaauaaaaauauuguguugu

SEQ ID NO: 2520401 - RNA, 15 nt, Human
aaauaaaaauggaua

SEQ ID NO: 2520402 - RNA, 14 nt, Human
aaauaaaaccagcu

SEQ ID NO: 2520403 - RNA, 22 nt, Human
aaauaaaacauuuucacacaau

SEQ ID NO: 2520404 - RNA, 15 nt, Human
aaauaaaacauuuua

SEQ ID NO: 2520405 - RNA, 13 nt, Human
aaauaaaacauuu

SEQ ID NO: 2520406 - RNA, 18 nt, Human
aaauaaaacauuuucaca

SEQ ID NO: 2520407 - RNA, 16 nt, Human
aaauaaaaauucugaa

SEQ ID NO: 2520408 - RNA, 23 nt, Human
aaauaaaaauuauuauugauuuu

SEQ ID NO: 2520409 - RNA, 12 nt, Human
aaauaaaacauu

SEQ ID NO: 2520410 - RNA, 18 nt, Human
aaagucaauguuuucagu

SEQ ID NO: 2520411 - RNA, 20 nt, Human
aaagucaaaaggugccugug

SEQ ID NO: 2520412 - RNA, 17 nt, Human
aaagucaauguuuucag

SEQ ID NO: 2520413 - RNA, 17 nt, Human
aaaguauuuuccuguaa

SEQ ID NO: 2520414 - RNA, 18 nt, Human
aaagucaaaaggugccug

SEQ ID NO: 2520415 - RNA, 16 nt, Human
aaagucagguccaauu

SEQ ID NO: 2520416 - RNA, 13 nt, Human
aaaggcuguggua

SEQ ID NO: 2520417 - RNA, 21 nt, Human
aaaguauuuuccuguaaaaaa

SEQ ID NO: 2520418 - RNA, 14 nt, Human
aaaguauuuuccug

SEQ ID NO: 2520419 - RNA, 13 nt, Human
aaaguauuuuccu

SEQ ID NO: 2520420 - RNA, 12 nt, Human
aaaguauuuucc

SEQ ID NO: 2520421 - RNA, 19 nt, Human
aaagucaugcaaaggcugg

SEQ ID NO: 2520422 - RNA, 15 nt, Human
aaagugauaauuucu

SEQ ID NO: 2520423 - RNA, 10 nt, Human
aaagugauua

SEQ ID NO: 2520424 - RNA, 23 nt, Human
aaagugaucaauaaaaugugauu

SEQ ID NO: 2520425 - RNA, 21 nt, Human
aaagugauaauuucuggaauu

SEQ ID NO: 2520426 - RNA, 12 nt, Human
aaagugauuucu

SEQ ID NO: 2520427 - RNA, 15 nt, Human
aaagugauuaaacgu

SEQ ID NO: 2520428 - RNA, 23 nt, Human
aaagugcagcuccguuuggcagu

SEQ ID NO: 2520429 - RNA, 15 nt, Human
aaagugccacucauu

SEQ ID NO: 2520430 - RNA, 24 nt, Human
aaagaggugacugggcccugccuc

SEQ ID NO: 2520431 - RNA, 13 nt, Human
aaagaggugugca

SEQ ID NO: 2520432 - RNA, 19 nt, Human
aaagagggcuuccucuaga

SEQ ID NO: 2520433 - RNA, 15 nt, Human
aaagagggcuuccuc

SEQ ID NO: 2520434 - RNA, 14 nt, Human
aaagauaaauauua

SEQ ID NO: 2520435 - RNA, 15 nt, Human
aaagauaaauauuau

SEQ ID NO: 2520436 - RNA, 13 nt, Human
aaagauaaauauu

SEQ ID NO: 2520437 - RNA, 15 nt, Human
aaagauacaguuacu

SEQ ID NO: 2520438 - RNA, 16 nt, Human
aaagauaaauauuaua

SEQ ID NO: 2520439 - RNA, 21 nt, Human
aaagauaaauuauaucaauuu

SEQ ID NO: 2520440 - RNA, 20 nt, Human
aaagauaacaagaucuuuca

SEQ ID NO: 2520441 - RNA, 21 nt, Human
aaagauacagaacucuuucaa

SEQ ID NO: 2520442 - RNA, 22 nt, Human
aaagauaacaagaucuuucagg

SEQ ID NO: 2520443 - RNA, 19 nt, Human
aaagauaaucucucagcuu

SEQ ID NO: 2520444 - RNA, 23 nt, Human
aaagaaccaacaaccucaacugc

SEQ ID NO: 2520445 - RNA, 13 nt, Human
aaagaaacauuug

SEQ ID NO: 2520446 - RNA, 20 nt, Human
aaagaaacccgacagaggga

SEQ ID NO: 2520447 - RNA, 22 nt, Human
aaagaaccaaaaguuuuccuga

SEQ ID NO: 2520448 - RNA, 23 nt, Human
aaagaaacccgacagagggaaga

SEQ ID NO: 2520449 - RNA, 21 nt, Human
aaagaggcugaggccuggacu

SEQ ID NO: 2520450 - RNA, 20 nt, Human
aaagaggcugaggccuggac

SEQ ID NO: 2520451 - RNA, 19 nt, Human
aaagaggcugaggccugga

SEQ ID NO: 2520452 - RNA, 12 nt, Human
aaagaggcugag

SEQ ID NO: 2520453 - RNA, 19 nt, Human
aaagaggcugaggcuggca

SEQ ID NO: 2520454 - RNA, 17 nt, Human
aaagaagaaacgucuau

SEQ ID NO: 2520455 - RNA, 14 nt, Human
aaagaagacauguu

SEQ ID NO: 2520456 - RNA, 12 nt, Human
aaagaagacaug

SEQ ID NO: 2520457 - RNA, 17 nt, Human
aaagaagaacuugcaug

SEQ ID NO: 2520458 - RNA, 19 nt, Human
aaagaagacaacauuaaaa

SEQ ID NO: 2520459 - RNA, 19 nt, Human
aaacugauuuuuuuuuccu

SEQ ID NO: 2520460 - RNA, 13 nt, Human
aaacugauuuuuu

SEQ ID NO: 2520461 - RNA, 19 nt, Human
aaacugaaaaucuaauauu

SEQ ID NO: 2520462 - RNA, 18 nt, Human
aaacugaaaaucuaauau

SEQ ID NO: 2520463 - RNA, 17 nt, Human
aaacugaaaaucuaaua

SEQ ID NO: 2520464 - RNA, 14 nt, Human
aaacugaaaaucua

SEQ ID NO: 2520465 - RNA, 21 nt, Human
aaacugaagcagccucucccc

SEQ ID NO: 2520466 - RNA, 18 nt, Human
aaacugaagcagccucuc

SEQ ID NO: 2520467 - RNA, 13 nt, Human
aaacugaaaaucu

SEQ ID NO: 2520468 - RNA, 12 nt, Human
aaacugaaaauc

SEQ ID NO: 2520469 - RNA, 13 nt, Human
aaacucuuuuccc

SEQ ID NO: 2520470 - RNA, 22 nt, Human
aaacugaagcagccucucccca

SEQ ID NO: 2520471 - RNA, 19 nt, Human
aaacugaggaauuuucuuu

SEQ ID NO: 2520472 - RNA, 20 nt, Human
aaacugauuuuuuuuuccuu

SEQ ID NO: 2520473 - RNA, 18 nt, Human
aaagaaaauucuuggaau

SEQ ID NO: 2520474 - RNA, 13 nt, Human
aaagaaaauaugc

SEQ ID NO: 2520475 - RNA, 14 nt, Human
aaagaaaauaugca

SEQ ID NO: 2520476 - RNA, 17 nt, Human
aaagaaaauaugcaucu

SEQ ID NO: 2520477 - RNA, 15 nt, Human
aaagaaaauaugcau

SEQ ID NO: 2520478 - RNA, 22 nt, Human
aaaccucaaaaugucuaagaua

SEQ ID NO: 2520479 - RNA, 17 nt, Human
aaaccucaaaaugucua

SEQ ID NO: 2520480 - RNA, 19 nt, Human
aaaccuaaguccuuuaugu

SEQ ID NO: 2520481 - RNA, 20 nt, Human
aaaccuaaguccuuuaugug

SEQ ID NO: 2520482 - RNA, 19 nt, Human
aaaccuaaaaaagauauau

SEQ ID NO: 2520483 - RNA, 17 nt, Human
aaaccuaaaaaagauau

SEQ ID NO: 2520484 - RNA, 15 nt, Human
aaaccuaaaaaagau

SEQ ID NO: 2520485 - RNA, 14 nt, Human
aaacucuuuaacuu

SEQ ID NO: 2520486 - RNA, 16 nt, Human
aaacucuuuaacuucu

SEQ ID NO: 2520487 - RNA, 22 nt, Human
aaacucuuaucucagucaugca

SEQ ID NO: 2520488 - RNA, 17 nt, Human
aaacucuugaccucagg

SEQ ID NO: 2520489 - RNA, 19 nt, Human
aaacccuugccaugugcua

SEQ ID NO: 2520490 - RNA, 14 nt, Human
aaacccuucagugc

SEQ ID NO: 2520491 - RNA, 12 nt, Human
aaacccugucuc

SEQ ID NO: 2520492 - RNA, 16 nt, Human
aaacccuugaaaagac

SEQ ID NO: 2520493 - RNA, 17 nt, Human
aaacccaguugccaucu

SEQ ID NO: 2520494 - RNA, 18 nt, Human
aaacccagcucuggucca

SEQ ID NO: 2520495 - RNA, 15 nt, Human
aaacccccacacaca

SEQ ID NO: 2520496 - RNA, 16 nt, Human
aaacccccacacacac

SEQ ID NO: 2520497 - RNA, 22 nt, Human
aaacccccacacacacacacau

SEQ ID NO: 2520498 - RNA, 17 nt, Human
aaacccccuuugugcug

SEQ ID NO: 2520499 - RNA, 21 nt, Human
aaacccugucucuacuaaaaa

SEQ ID NO: 2520500 - RNA, 17 nt, Human
aaaccccaucucuacaa

SEQ ID NO: 2520501 - RNA, 13 nt, Human
aaaccccaucucu

SEQ ID NO: 2520502 - RNA, 22 nt, Human
aaaaguuuacaaguguauauca

SEQ ID NO: 2520503 - RNA, 16 nt, Human
aaaaguuuacaagugu

SEQ ID NO: 2520504 - RNA, 15 nt, Human
aaaauaaaaaaaaga

SEQ ID NO: 2520505 - RNA, 16 nt, Human
aaaauaaaaaaaagaa

SEQ ID NO: 2520506 - RNA, 17 nt, Human
aaaauaaaaaaaagaaa

SEQ ID NO: 2520507 - RNA, 18 nt, Human
aaaauaaaaaaaagaaaa

SEQ ID NO: 2520508 - RNA, 12 nt, Human
aaaaguuuccau

SEQ ID NO: 2520509 - RNA, 13 nt, Human
aaaaguuucaaug

SEQ ID NO: 2520510 - RNA, 12 nt, Human
aaaaguuucaau

SEQ ID NO: 2520511 - RNA, 17 nt, Human
aaaaguuuuauuuuucu

SEQ ID NO: 2520512 - RNA, 18 nt, Human
aaaaguuucaaugugauu

SEQ ID NO: 2520513 - RNA, 16 nt, Human
aaaaguuugccagaag

SEQ ID NO: 2520514 - RNA, 15 nt, Human
aaaauaaaaaacacu

SEQ ID NO: 2520515 - RNA, 21 nt, Human
aaaauaaaaaaaagaaaaaag

SEQ ID NO: 2520516 - RNA, 17 nt, Human
aaaauaaaaaacauaua

SEQ ID NO: 2520517 - RNA, 17 nt, Human
aaaaguuugccagaagu

SEQ ID NO: 2520518 - RNA, 11 nt, Human
aaaauaaaaac

SEQ ID NO: 2520519 - RNA, 21 nt, Human
aaaauaaaaagugacacagca

SEQ ID NO: 2520520 - RNA, 17 nt, Human
aaaauaaaaagugacac

SEQ ID NO: 2520521 - RNA, 12 nt, Human
aaaauaaaaagu

SEQ ID NO: 2520522 - RNA, 20 nt, Human
aaaauaaaaagaucacuuuc

SEQ ID NO: 2520523 - RNA, 21 nt, Human
aaaauaaaaagcgggcacggg

SEQ ID NO: 2520524 - RNA, 13 nt, Human
aaaauaaaaaguu

SEQ ID NO: 2520525 - RNA, 22 nt, Human
aaaauaaaaagugacacagcag

SEQ ID NO: 2520526 - RNA, 18 nt, Human
aaaauauuuugucuaaaa

SEQ ID NO: 2520527 - RNA, 16 nt, Human
aaaauauuuugucuaa

SEQ ID NO: 2520528 - RNA, 12 nt, Human
aaaauauuuugu

SEQ ID NO: 2520529 - RNA, 20 nt, Human
aaaauauuuuuuauauauac

SEQ ID NO: 2520530 - RNA, 20 nt, Human
aaaauauuuugucuaaaaug

SEQ ID NO: 2520531 - RNA, 23 nt, Human
aaaauauuuuuuauauauacagu

SEQ ID NO: 2520532 - RNA, 21 nt, Human
aaaauccacuuuaucuugaau

SEQ ID NO: 2520533 - RNA, 22 nt, Human
aaaaucauuuuauaugucaaag

SEQ ID NO: 2520534 - RNA, 20 nt, Human
aaaaucauuuuauaugucaa

SEQ ID NO: 2520535 - RNA, 19 nt, Human
aaaaucauuuuauauguca

SEQ ID NO: 2520536 - RNA, 20 nt, Human
aaaaucagccaauuauguua

SEQ ID NO: 2520537 - RNA, 19 nt, Human
aaaaucagccaauuauguu

SEQ ID NO: 2520538 - RNA, 18 nt, Human
aaaaucagccaauuaugu

SEQ ID NO: 2520539 - RNA, 17 nt, Human
aaaaucagccaauuaug

SEQ ID NO: 2520540 - RNA, 14 nt, Human
aaaaucagccaauu

SEQ ID NO: 2520541 - RNA, 22 nt, Human
aaaauuauagaugggaaugaag

SEQ ID NO: 2520542 - RNA, 18 nt, Human
aaaauuauagaugggaau

SEQ ID NO: 2520543 - RNA, 13 nt, Human
aaaauuauuuugg

SEQ ID NO: 2520544 - RNA, 19 nt, Human
aaaauuauuuuaaacaaaa

SEQ ID NO: 2520545 - RNA, 18 nt, Human
aaaauuauuuuaaacaaa

SEQ ID NO: 2520546 - RNA, 17 nt, Human
aaaauuauuuuaaacaa

SEQ ID NO: 2520547 - RNA, 13 nt, Human
aaaauuauuugca

SEQ ID NO: 2520548 - RNA, 14 nt, Human
aaaauuauuugcau

SEQ ID NO: 2520549 - RNA, 23 nt, Human
aaaauuauguuugccacuuugca

SEQ ID NO: 2520550 - RNA, 14 nt, Human
aaaauuauuucaga

SEQ ID NO: 2520551 - RNA, 21 nt, Human
aaaauuauuugaaaacauaua

SEQ ID NO: 2520552 - RNA, 19 nt, Human
aaaauuauuucagaaaugu

SEQ ID NO: 2520553 - RNA, 19 nt, Human
aaaauuaggauuucaugau

SEQ ID NO: 2520554 - RNA, 18 nt, Human
aaaauuagccgggcgugg

SEQ ID NO: 2520555 - RNA, 20 nt, Human
aaaauuagaaauuggcugga

SEQ ID NO: 2520556 - RNA, 14 nt, Human
aaaauuagaaauug

SEQ ID NO: 2520557 - RNA, 15 nt, Human
aaaauuagccaagug

SEQ ID NO: 2520558 - RNA, 12 nt, Human
aaaauuaagaaa

SEQ ID NO: 2520559 - RNA, 22 nt, Human
aaaauuaacaugaauauuuagu

SEQ ID NO: 2520560 - RNA, 19 nt, Human
aaaauccauacauuugugu

SEQ ID NO: 2520561 - RNA, 11 nt, Human
aaaauuaaagc

SEQ ID NO: 2520562 - RNA, 20 nt, Human
aaaauuaagaaaggauaaag

SEQ ID NO: 2520563 - RNA, 13 nt, Human
aaaauuaagaaag

SEQ ID NO: 2520564 - RNA, 23 nt, Human
aaaauuaaucugggccagaauuu

SEQ ID NO: 2520565 - RNA, 17 nt, Human
aaaauuaaaucaaccuu

SEQ ID NO: 2520566 - RNA, 14 nt, Human
aaaauuaacacugc

SEQ ID NO: 2520567 - RNA, 22 nt, Human
aaaauuccuuuguguuucuauu

SEQ ID NO: 2520568 - RNA, 17 nt, Human
aaaauuccuauugugau

SEQ ID NO: 2520569 - RNA, 14 nt, Human
aaaauuccuauugu

SEQ ID NO: 2520570 - RNA, 21 nt, Human
aaaauuccaucccaucaucuu

SEQ ID NO: 2520571 - RNA, 15 nt, Human
aaaauucugaaugua

SEQ ID NO: 2520572 - RNA, 16 nt, Human
aaaauucuacuguaug

SEQ ID NO: 2520573 - RNA, 20 nt, Human
aaaauucucagucaguaauu

SEQ ID NO: 2520574 - RNA, 23 nt, Human
aaaauucgaccugauuuacaguu

SEQ ID NO: 2520575 - RNA, 21 nt, Human
aaaauucgaccugauuuacag

SEQ ID NO: 2520576 - RNA, 21 nt, Human
aaacagcgcuggguccacccc

SEQ ID NO: 2520577 - RNA, 18 nt, Human
aaacagcauugcuuucug

SEQ ID NO: 2520578 - RNA, 22 nt, Human
aaacagccgucagccaaaugua

SEQ ID NO: 2520579 - RNA, 23 nt, Human
aaacagccgucagccaaauguaa

SEQ ID NO: 2520580 - RNA, 15 nt, Human
aaacagccucacaga

SEQ ID NO: 2520581 - RNA, 14 nt, Human
aaacagcaguguuc

SEQ ID NO: 2520582 - RNA, 14 nt, Human
aaacagcauugcuu

SEQ ID NO: 2520583 - RNA, 16 nt, Human
aaacagcauugcuuuc

SEQ ID NO: 2520584 - RNA, 17 nt, Human
aaacagcauugcuuucu

SEQ ID NO: 2520585 - RNA, 21 nt, Human
aaacagcauugcuuucugaaa

SEQ ID NO: 2520586 - RNA, 20 nt, Human
aaaauucuguagguucugug

SEQ ID NO: 2520587 - RNA, 13 nt, Human
aaaauucuuggaa

SEQ ID NO: 2520588 - RNA, 17 nt, Human
aaacagggcaucuccag

SEQ ID NO: 2520589 - RNA, 15 nt, Human
aaacaggcccagcau

SEQ ID NO: 2520590 - RNA, 14 nt, Human
aaacaggcccagca

SEQ ID NO: 2520591 - RNA, 13 nt, Human
aaacaggcccagc

SEQ ID NO: 2520592 - RNA, 19 nt, Human
aaacagggcaucuccagga

SEQ ID NO: 2520593 - RNA, 11 nt, Human
aaacaggcagu

SEQ ID NO: 2520594 - RNA, 21 nt, Human
aaacaggcaguuggccagaga

SEQ ID NO: 2520595 - RNA, 17 nt, Human
aaacagcuaaugggaca

SEQ ID NO: 2520596 - RNA, 15 nt, Human
aaacagcguuuaaga

SEQ ID NO: 2520597 - RNA, 11 nt, Human
aaacaggacca

SEQ ID NO: 2520598 - RNA, 12 nt, Human
aaacaggagaga

SEQ ID NO: 2520599 - RNA, 18 nt, Human
aaacaggagacaggaagg

SEQ ID NO: 2520600 - RNA, 17 nt, Human
aaacaggagacaggaag

SEQ ID NO: 2520601 - RNA, 16 nt, Human
aaacaggagacaggaa

SEQ ID NO: 2520602 - RNA, 22 nt, Human
aaccuuuuuuaagauuuuucuc

SEQ ID NO: 2520603 - RNA, 21 nt, Human
aaccuuuuuuaagauuuuucu

SEQ ID NO: 2520604 - RNA, 18 nt, Human
aaccuuuuuuaagauuuu

SEQ ID NO: 2520605 - RNA, 17 nt, Human
aaccuuuuuuaagauuu

SEQ ID NO: 2520606 - RNA, 15 nt, Human
aaccuuuuuuaagau

SEQ ID NO: 2520607 - RNA, 16 nt, Human
aacgagucaauccccu

SEQ ID NO: 2520608 - RNA, 12 nt, Human
aacgaggaagcc

SEQ ID NO: 2520609 - RNA, 23 nt, Human
aacgagaggggaagaguguacug

SEQ ID NO: 2520610 - RNA, 18 nt, Human
aacgacugggcacugcca

SEQ ID NO: 2520611 - RNA, 14 nt, Human
aacgacaauagcuu

SEQ ID NO: 2520612 - RNA, 23 nt, Human
aaccuuuuuuaagauuuuucuca

SEQ ID NO: 2520613 - RNA, 11 nt, Human
aacgaaugaag

SEQ ID NO: 2520614 - RNA, 23 nt, Human
aacgacaaagccaaacucugcca

SEQ ID NO: 2520615 - RNA, 22 nt, Human
aacucaaaugcuuggcuucuca

SEQ ID NO: 2520616 - RNA, 11 nt, Human
aacucaaaugc

SEQ ID NO: 2520617 - RNA, 18 nt, Human
aacucaaauggggccaga

SEQ ID NO: 2520618 - RNA, 21 nt, Human
aacucaaauggggccagaucc

SEQ ID NO: 2520619 - RNA, 22 nt, Human
aacucaaauggggccagaucca

SEQ ID NO: 2520620 - RNA, 23 nt, Human
aacucaaauggggccagauccag

SEQ ID NO: 2520621 - RNA, 17 nt, Human
aacucaaacucuuaaaa

SEQ ID NO: 2520622 - RNA, 21 nt, Human
aacguaugcaugugaagaaag

SEQ ID NO: 2520623 - RNA, 18 nt, Human
aacguaugcaugugaaga

SEQ ID NO: 2520624 - RNA, 16 nt, Human
aacucaaaauauuugu

SEQ ID NO: 2520625 - RNA, 22 nt, Human
aacucaaacugaggaauuucac

SEQ ID NO: 2520626 - RNA, 17 nt, Human
aacucaccccagcccca

SEQ ID NO: 2520627 - RNA, 16 nt, Human
aacucaccccagcccc

SEQ ID NO: 2520628 - RNA, 18 nt, Human
aacucaccccagccccaa

SEQ ID NO: 2520629 - RNA, 14 nt, Human
aacucaccuaacuc

SEQ ID NO: 2520630 - RNA, 22 nt, Human
aacucacccccaaggggcaguc

SEQ ID NO: 2520631 - RNA, 23 nt, Human
aacucauacugugcuggagccac

SEQ ID NO: 2520632 - RNA, 22 nt, Human
aacucauacugugcuggagcca

SEQ ID NO: 2520633 - RNA, 15 nt, Human
aacucaccccagccc

SEQ ID NO: 2520634 - RNA, 22 nt, Human
aacgcuaaagagcccuugccuc

SEQ ID NO: 2520635 - RNA, 21 nt, Human
aacgcuaaagagcccuugccu

SEQ ID NO: 2520636 - RNA, 17 nt, Human
aacgcuaaagagcccuu

SEQ ID NO: 2520637 - RNA, 16 nt, Human
aacgcguguguacacg

SEQ ID NO: 2520638 - RNA, 15 nt, Human
aacguauaaaagccu

SEQ ID NO: 2520639 - RNA, 15 nt, Human
aacucaaaauauuug

SEQ ID NO: 2520640 - RNA, 17 nt, Human
aacguaaccacggaaaa

SEQ ID NO: 2520641 - RNA, 16 nt, Human
aacggggcucuucuca

SEQ ID NO: 2520642 - RNA, 17 nt, Human
aacgggcugcccugcca

SEQ ID NO: 2520643 - RNA, 18 nt, Human
aacggggcucuucucauu

SEQ ID NO: 2520644 - RNA, 15 nt, Human
aacgggguccuucaa

SEQ ID NO: 2520645 - RNA, 12 nt, Human
aacggggagaaa

SEQ ID NO: 2520646 - RNA, 17 nt, Human
aacgguaaauuucugug

SEQ ID NO: 2520647 - RNA, 14 nt, Human
aacgguuaaaacug

SEQ ID NO: 2520648 - RNA, 13 nt, Human
aacgguuaaaacu

SEQ ID NO: 2520649 - RNA, 18 nt, Human
aacugaaugaaaccccca

SEQ ID NO: 2520650 - RNA, 23 nt, Human
aacugaaugaaacccccacacac

SEQ ID NO: 2520651 - RNA, 12 nt, Human
aacugaaugaga

SEQ ID NO: 2520652 - RNA, 20 nt, Human
aacugaauguuuauuccuug

SEQ ID NO: 2520653 - RNA, 22 nt, Human
aacugaauggaagguuuguaua

SEQ ID NO: 2520654 - RNA, 12 nt, Human
aacugaauaaau

SEQ ID NO: 2520655 - RNA, 10 nt, Human
aacugaauaa

SEQ ID NO: 2520656 - RNA, 15 nt, Human
aacugaagucugaaa

SEQ ID NO: 2520657 - RNA, 16 nt, Human
aacugaaguuucacau

SEQ ID NO: 2520658 - RNA, 16 nt, Human
aacugaagucugaaau

SEQ ID NO: 2520659 - RNA, 14 nt, Human
aacugaagucugaa

SEQ ID NO: 2520660 - RNA, 13 nt, Human
aacugaaggagaa

SEQ ID NO: 2520661 - RNA, 15 nt, Human
aacugaaggagaagg

SEQ ID NO: 2520662 - RNA, 14 nt, Human
aacucaucauaaaa

SEQ ID NO: 2520663 - RNA, 15 nt, Human
aacucaucauaaaau

SEQ ID NO: 2520664 - RNA, 21 nt, Human
aacugaagcagccucucccca

SEQ ID NO: 2520665 - RNA, 13 nt, Human
aacugaagccaga

SEQ ID NO: 2520666 - RNA, 20 nt, Human
aacugaagcagccucucccc

SEQ ID NO: 2520667 - RNA, 16 nt, Human
aacucaucauaaaaua

SEQ ID NO: 2520668 - RNA, 17 nt, Human
aacucaucauaaaauaa

SEQ ID NO: 2520669 - RNA, 22 nt, Human
aacucaucccuaaugcugcaga

SEQ ID NO: 2520670 - RNA, 21 nt, Human
aacucaucccuaaugcugcag

SEQ ID NO: 2520671 - RNA, 18 nt, Human
aacucaucauaaaauaaa

SEQ ID NO: 2520672 - RNA, 23 nt, Human
aacugagaugugaacacaucagc

SEQ ID NO: 2520673 - RNA, 13 nt, Human
aacugagcuugga

SEQ ID NO: 2520674 - RNA, 17 nt, Human
aacugagcuuggaagcu

SEQ ID NO: 2520675 - RNA, 13 nt, Human
aacugaggaauuu

SEQ ID NO: 2520676 - RNA, 18 nt, Human
aacugaggaauuucaccu

SEQ ID NO: 2520677 - RNA, 16 nt, Human
aacugaggaauuuucu

SEQ ID NO: 2520678 - RNA, 21 nt, Human
aacugagcuuggaagcuucug

SEQ ID NO: 2520679 - RNA, 12 nt, Human
aacugaggaauu

SEQ ID NO: 2520680 - RNA, 14 nt, Human
aacugagcuccucu

SEQ ID NO: 2520681 - RNA, 18 nt, Human
aacugagcuccucugggc

SEQ ID NO: 2520682 - RNA, 14 nt, Human
aacuguuaugaaau

SEQ ID NO: 2520683 - RNA, 19 nt, Human
aacuguuaaauugcugugu

SEQ ID NO: 2520684 - RNA, 22 nt, Human
aacuguguuucaaguucaaucc

SEQ ID NO: 2520685 - RNA, 19 nt, Human
aacuguguuucaaguucaa

SEQ ID NO: 2520686 - RNA, 22 nt, Human
aacugagcuccucugggcagga

SEQ ID NO: 2520687 - RNA, 15 nt, Human
aacuguuauuuauaa

SEQ ID NO: 2520688 - RNA, 16 nt, Human
aacuguuauuuauaau

SEQ ID NO: 2520689 - RNA, 17 nt, Human
aacuguuauuuauaauc

SEQ ID NO: 2520690 - RNA, 20 nt, Human
aacuguuauuuauaaucacu

SEQ ID NO: 2520691 - RNA, 22 nt, Human
aacuguuauuuauaaucacuuu

SEQ ID NO: 2520692 - RNA, 13 nt, Human
aacuguucccacc

SEQ ID NO: 2520693 - RNA, 15 nt, Human
aacuguucccaccug

SEQ ID NO: 2520694 - RNA, 18 nt, Human
aacuguucccaccugcug

SEQ ID NO: 2520695 - RNA, 18 nt, Human
aacagauuugugaacuca

SEQ ID NO: 2520696 - RNA, 16 nt, Human
aacagauuugugaacu

SEQ ID NO: 2520697 - RNA, 15 nt, Human
aacagauuugugaac

SEQ ID NO: 2520698 - RNA, 14 nt, Human
aacagauuugugaa

SEQ ID NO: 2520699 - RNA, 13 nt, Human
aacagauuuguga

SEQ ID NO: 2520700 - RNA, 14 nt, Human
aacagcguuuaaga

SEQ ID NO: 2520701 - RNA, 20 nt, Human
aacagcggcuggacuuggag

SEQ ID NO: 2520702 - RNA, 16 nt, Human
aacagcuaaugggaca

SEQ ID NO: 2520703 - RNA, 17 nt, Human
aacagauuuuuacaaau

SEQ ID NO: 2520704 - RNA, 14 nt, Human
aacagauuuuuaca

SEQ ID NO: 2520705 - RNA, 13 nt, Human
aacagauuuuuac

SEQ ID NO: 2520706 - RNA, 16 nt, Human
aacagauuuugggguu

SEQ ID NO: 2520707 - RNA, 23 nt, Human
aacagauuugugaacucagccaa

SEQ ID NO: 2520708 - RNA, 22 nt, Human
aacagauuugugaacucagcca

SEQ ID NO: 2520709 - RNA, 21 nt, Human
aacagauuugugaacucagcc

SEQ ID NO: 2520710 - RNA, 13 nt, Human
aacagcgcugggu

SEQ ID NO: 2520711 - RNA, 15 nt, Human
aacauccuacaagac

SEQ ID NO: 2520712 - RNA, 22 nt, Human
aacauccuacaagacacaguga

SEQ ID NO: 2520713 - RNA, 22 nt, Human
aacauccuuucuauugaaaaau

SEQ ID NO: 2520714 - RNA, 22 nt, Human
aacauccuaucaacaacaaggu

SEQ ID NO: 2520715 - RNA, 19 nt, Human
aacauccuucaagaacucu

SEQ ID NO: 2520716 - RNA, 19 nt, Human
aacaggaggacaauucaug

SEQ ID NO: 2520717 - RNA, 18 nt, Human
aacaggaggacaauucau

SEQ ID NO: 2520718 - RNA, 17 nt, Human
aacaggaggacaauuca

SEQ ID NO: 2520719 - RNA, 16 nt, Human
aacaggaggacaauuc

SEQ ID NO: 2520720 - RNA, 16 nt, Human
aacaggauuagacagu

SEQ ID NO: 2520721 - RNA, 15 nt, Human
aacaucccuccuggg

SEQ ID NO: 2520722 - RNA, 22 nt, Human
aacaggaggacaauucaugaac

SEQ ID NO: 2520723 - RNA, 19 nt, Human
aacaggauuagacagucaa

SEQ ID NO: 2520724 - RNA, 18 nt, Human
aacagcucaagucuuccc

SEQ ID NO: 2520725 - RNA, 22 nt, Human
aacagcuaugggagccccaggg

SEQ ID NO: 2520726 - RNA, 22 nt, Human
aacaggaaaggcucgaaauaca

SEQ ID NO: 2520727 - RNA, 23 nt, Human
aacagcguuuaagacuguaauga

SEQ ID NO: 2520728 - RNA, 18 nt, Human
aacagcuaugggagcccc

SEQ ID NO: 2520729 - RNA, 19 nt, Human
aacagcuaugggagcccca

SEQ ID NO: 2520730 - RNA, 10 nt, Human
aacaggaagc

SEQ ID NO: 2520731 - RNA, 22 nt, Human
aacaggaagaucuuaaauuuug

SEQ ID NO: 2520732 - RNA, 14 nt, Human
aacaggaagaucuu

SEQ ID NO: 2520733 - RNA, 10 nt, Human
aacagcucag

SEQ ID NO: 2520734 - RNA, 20 nt, Human
aacaggaaucaagagcugcc

SEQ ID NO: 2520735 - RNA, 20 nt, Human
aacaggaccacaaaaaugaa

SEQ ID NO: 2520736 - RNA, 17 nt, Human
aacaggagacaggaagg

SEQ ID NO: 2520737 - RNA, 19 nt, Human
aacaggagcugggauccua

SEQ ID NO: 2520738 - RNA, 14 nt, Human
aacaggaggacaau

SEQ ID NO: 2520739 - RNA, 21 nt, Human
aacaggagcugggauccuaag

SEQ ID NO: 2520740 - RNA, 12 nt, Human
aacaggagaauu

SEQ ID NO: 2520741 - RNA, 15 nt, Human
aacacuauaaagguu

SEQ ID NO: 2520742 - RNA, 20 nt, Human
aacacuauauggcagugucu

SEQ ID NO: 2520743 - RNA, 14 nt, Human
aacacuagccagac

SEQ ID NO: 2520744 - RNA, 18 nt, Human
aacacuauauggcagugu

SEQ ID NO: 2520745 - RNA, 14 nt, Human
aacacuauauggca

SEQ ID NO: 2520746 - RNA, 14 nt, Human
aaccgcugaauaug

SEQ ID NO: 2520747 - RNA, 21 nt, Human
aaccggauggcggacaccugg

SEQ ID NO: 2520748 - RNA, 21 nt, Human
aaccgcaggaagcugcuccgu

SEQ ID NO: 2520749 - RNA, 18 nt, Human
aaccgcacucacccaugu

SEQ ID NO: 2520750 - RNA, 13 nt, Human
aaccgcaggaagc

SEQ ID NO: 2520751 - RNA, 14 nt, Human
aaccgcaggaagcu

SEQ ID NO: 2520752 - RNA, 15 nt, Human
aaccgcaggaagcug

SEQ ID NO: 2520753 - RNA, 15 nt, Human
aaccgaugcuccagc

SEQ ID NO: 2520754 - RNA, 17 nt, Human
aaccgaugcuccagcca

SEQ ID NO: 2520755 - RNA, 21 nt, Human
aaccgaugcuccagccaaccc

SEQ ID NO: 2520756 - RNA, 20 nt, Human
aaccgaggggcucaggaaaa

SEQ ID NO: 2520757 - RNA, 22 nt, Human
aaccgagcaaagaucaaaauaa

SEQ ID NO: 2520758 - RNA, 13 nt, Human
aaccgaugcucca

SEQ ID NO: 2520759 - RNA, 17 nt, Human
aaccgagcaaagaucaa

SEQ ID NO: 2520760 - RNA, 20 nt, Human
aacccuucuccucuuguaaa

SEQ ID NO: 2520761 - RNA, 18 nt, Human
aacccuucuccucuugua

SEQ ID NO: 2520762 - RNA, 11 nt, Human
aacccuucucc

SEQ ID NO: 2520763 - RNA, 18 nt, Human
aaccauaacaacuucaua

SEQ ID NO: 2520764 - RNA, 13 nt, Human
aaccauaaacuuc

SEQ ID NO: 2520765 - RNA, 21 nt, Human
aaccauaccuuccuucccugg

SEQ ID NO: 2520766 - RNA, 18 nt, Human
aaccauaaacuucauggu

SEQ ID NO: 2520767 - RNA, 15 nt, Human
aacccuguuuuauac

SEQ ID NO: 2520768 - RNA, 16 nt, Human
aacccuguuuuauacu

SEQ ID NO: 2520769 - RNA, 23 nt, Human
aacccuguuuuauacuguacuua

SEQ ID NO: 2520770 - RNA, 20 nt, Human
aacccuguuuuauacuguac

SEQ ID NO: 2520771 - RNA, 22 nt, Human
aacccuguuuuauacuguacuu

SEQ ID NO: 2520772 - RNA, 13 nt, Human
aacccuucagugc

SEQ ID NO: 2520773 - RNA, 23 nt, Human
aacccuuaggacagggucccugc

SEQ ID NO: 2520774 - RNA, 20 nt, Human
aacccuuccccacugcacac

SEQ ID NO: 2520775 - RNA, 21 nt, Human
aacccuuaccccuuagccucc

SEQ ID NO: 2520776 - RNA, 23 nt, Human
aacccuuaccccuuagccucccu

SEQ ID NO: 2520777 - RNA, 17 nt, Human
aaccaguguuguggauu

SEQ ID NO: 2520778 - RNA, 19 nt, Human
aaccaguguuguggauuua

SEQ ID NO: 2520779 - RNA, 23 nt, Human
aaccaguuggcuaggggagcagg

SEQ ID NO: 2520780 - RNA, 13 nt, Human
aaccaguuggcua

SEQ ID NO: 2520781 - RNA, 14 nt, Human
aaccaguuauguga

SEQ ID NO: 2520782 - RNA, 15 nt, Human
aaccauaaaaagcug

SEQ ID NO: 2520783 - RNA, 18 nt, Human
aaccaguuucagguguuu

SEQ ID NO: 2520784 - RNA, 22 nt, Human
aacaugcuacacacugcauguu

SEQ ID NO: 2520785 - RNA, 14 nt, Human
aacaucuauucucu

SEQ ID NO: 2520786 - RNA, 17 nt, Human
aacaucuagcaaauguu

SEQ ID NO: 2520787 - RNA, 21 nt, Human
aacaucugagaaaagcuuuga

SEQ ID NO: 2520788 - RNA, 15 nt, Human
aacauccuuccuucc

SEQ ID NO: 2520789 - RNA, 16 nt, Human
aacaucugaaagccac

SEQ ID NO: 2520790 - RNA, 22 nt, Human
aacauggaacucauuccugccu

SEQ ID NO: 2520791 - RNA, 15 nt, Human
aacauggaaguacua

SEQ ID NO: 2520792 - RNA, 14 nt, Human
aacauggacuugua

SEQ ID NO: 2520793 - RNA, 22 nt, Human
aaccaggagcugcucacuaccu

SEQ ID NO: 2520794 - RNA, 18 nt, Human
aaccagggaagcuguccc

SEQ ID NO: 2520795 - RNA, 19 nt, Human
aaccagggaagcugucccu

SEQ ID NO: 2520796 - RNA, 21 nt, Human
aaccagguuuagacaguauga

SEQ ID NO: 2520797 - RNA, 16 nt, Human
aaccagggagacugca

SEQ ID NO: 2520798 - RNA, 21 nt, Human
aaccagggagccccuuugaug

SEQ ID NO: 2520799 - RNA, 14 nt, Human
aaaugcugccugcc

SEQ ID NO: 2520800 - RNA, 13 nt, Human
aaaugcugccugc

SEQ ID NO: 2520801 - RNA, 14 nt, Human
aaaugcugcauuuu

SEQ ID NO: 2520802 - RNA, 14 nt, Human
aaauggacguguua

SEQ ID NO: 2520803 - RNA, 14 nt, Human
aaaugcuauuuuuu

SEQ ID NO: 2520804 - RNA, 12 nt, Human
aaaugcugaaca

SEQ ID NO: 2520805 - RNA, 15 nt, Human
aaaugcugaacauug

SEQ ID NO: 2520806 - RNA, 17 nt, Human
aaauggacguguuauga

SEQ ID NO: 2520807 - RNA, 15 nt, Human
aaauggacguguuau

SEQ ID NO: 2520808 - RNA, 19 nt, Human
aaauggacauaggacucaa

SEQ ID NO: 2520809 - RNA, 16 nt, Human
aaaugcugccugccug

SEQ ID NO: 2520810 - RNA, 17 nt, Human
aaaugcugcgcccuucc

SEQ ID NO: 2520811 - RNA, 16 nt, Human
aaauggacacugugcc

SEQ ID NO: 2520812 - RNA, 22 nt, Human
aaaucuccaaaauaaaacuuuu

SEQ ID NO: 2520813 - RNA, 12 nt, Human
aaaucucuaaua

SEQ ID NO: 2520814 - RNA, 19 nt, Human
aaaucuccaaaauaaaacu

SEQ ID NO: 2520815 - RNA, 15 nt, Human
aaaucucuaauaugg

SEQ ID NO: 2520816 - RNA, 13 nt, Human
aaaucucuaauau

SEQ ID NO: 2520817 - RNA, 11 nt, Human
aaaucugaaga

SEQ ID NO: 2520818 - RNA, 13 nt, Human
aaaucugaagacc

SEQ ID NO: 2520819 - RNA, 20 nt, Human
aaaucugacccagugccccc

SEQ ID NO: 2520820 - RNA, 14 nt, Human
aaaucugacccagu

SEQ ID NO: 2520821 - RNA, 17 nt, Human
aaaucugaccaaaacaa

SEQ ID NO: 2520822 - RNA, 23 nt, Human
aaaucugugaugauccucauaug

SEQ ID NO: 2520823 - RNA, 19 nt, Human
aaaucugugaugauccuca

SEQ ID NO: 2520824 - RNA, 22 nt, Human
aaaucugcuggaguuucaugua

SEQ ID NO: 2520825 - RNA, 18 nt, Human
aaaucugacccagugccc

SEQ ID NO: 2520826 - RNA, 23 nt, Human
aaaucugcagaaggaaaaaugug

SEQ ID NO: 2520827 - RNA, 20 nt, Human
aaaucugcuggaguuucaug

SEQ ID NO: 2520828 - RNA, 18 nt, Human
aaaucugcuuuuuaaaga

SEQ ID NO: 2520829 - RNA, 14 nt, Human
aaaucuuaacuuga

SEQ ID NO: 2520830 - RNA, 19 nt, Human
aaaucugugccugagaaca

SEQ ID NO: 2520831 - RNA, 19 nt, Human
aaaucuguuugaucccugu

SEQ ID NO: 2520832 - RNA, 18 nt, Human
aaaucuguuugaucccug

SEQ ID NO: 2520833 - RNA, 20 nt, Human
aaaugcuagguuaauuccaa

SEQ ID NO: 2520834 - RNA, 20 nt, Human
aaauguucaucaaugaauga

SEQ ID NO: 2520835 - RNA, 21 nt, Human
aaauguuuuuuuuuaaagacu

SEQ ID NO: 2520836 - RNA, 18 nt, Human
aaauguuuuuuuuuaaag

SEQ ID NO: 2520837 - RNA, 15 nt, Human
aaauguugaauaaaa

SEQ ID NO: 2520838 - RNA, 12 nt, Human
aaauguugaaua

SEQ ID NO: 2520839 - RNA, 21 nt, Human
aaauguugaaaagucaaacug

SEQ ID NO: 2520840 - RNA, 15 nt, Human
aaauguucuuugggg

SEQ ID NO: 2520841 - RNA, 19 nt, Human
aaauuaaaaaaaaaaaacu

SEQ ID NO: 2520842 - RNA, 21 nt, Human
aaauuaaaaaaaaaaaacuuu

SEQ ID NO: 2520843 - RNA, 22 nt, Human
aaauguuuuuuuuuaaagacuu

SEQ ID NO: 2520844 - RNA, 12 nt, Human
aaauuaacuuuu

SEQ ID NO: 2520845 - RNA, 17 nt, Human
aaauuaacuugaguuuu

SEQ ID NO: 2520846 - RNA, 20 nt, Human
aaauuaaccauagauguaga

SEQ ID NO: 2520847 - RNA, 13 nt, Human
aaauuaacuuuua

SEQ ID NO: 2520848 - RNA, 14 nt, Human
aaauuaacuuuuau

SEQ ID NO: 2520849 - RNA, 22 nt, Human
aaauugacacuuaaaaaugguu

SEQ ID NO: 2520850 - RNA, 22 nt, Human
aaauugacagaucaagcuguga

SEQ ID NO: 2520851 - RNA, 15 nt, Human
aaauugacauugcuu

SEQ ID NO: 2520852 - RNA, 13 nt, Human
aaauugagagaau

SEQ ID NO: 2520853 - RNA, 17 nt, Human
aaauugagagaauggaa

SEQ ID NO: 2520854 - RNA, 14 nt, Human
aaauugauguguuu

SEQ ID NO: 2520855 - RNA, 18 nt, Human
aaauugaugggauuuggu

SEQ ID NO: 2520856 - RNA, 20 nt, Human
aaauugguaucaagaaaguc

SEQ ID NO: 2520857 - RNA, 22 nt, Human
aaauugguuggagaauuuaggu

SEQ ID NO: 2520858 - RNA, 22 nt, Human
aacaaaauuuaguuuuuguucu

SEQ ID NO: 2520859 - RNA, 16 nt, Human
aaauugguucuuuauu

SEQ ID NO: 2520860 - RNA, 19 nt, Human
aacaaaauuuguuugaaau

SEQ ID NO: 2520861 - RNA, 15 nt, Human
aacaaaauuucuauu

SEQ ID NO: 2520862 - RNA, 13 nt, Human
aacaaaauuucua

SEQ ID NO: 2520863 - RNA, 12 nt, Human
aacacaucagcu

SEQ ID NO: 2520864 - RNA, 21 nt, Human
aacacaguguuuuuguaaagu

SEQ ID NO: 2520865 - RNA, 20 nt, Human
aacacaguguuuuuguaaag

SEQ ID NO: 2520866 - RNA, 19 nt, Human
aacacaguguuuuuguaaa

SEQ ID NO: 2520867 - RNA, 18 nt, Human
aacacaguguuuuuguaa

SEQ ID NO: 2520868 - RNA, 22 nt, Human
aacacaguguuuuuguaaagug

SEQ ID NO: 2520869 - RNA, 17 nt, Human
aacacccucacacuggg

SEQ ID NO: 2520870 - RNA, 16 nt, Human
aacacccuauauuuug

SEQ ID NO: 2520871 - RNA, 21 nt, Human
aacacccucacacugggacuu

SEQ ID NO: 2520872 - RNA, 19 nt, Human
aacaccuagcuuuauucuu

SEQ ID NO: 2520873 - RNA, 18 nt, Human
aacacccucgaagcgcgc

SEQ ID NO: 2520874 - RNA, 11 nt, Human
aacacuaaccu

SEQ ID NO: 2520875 - RNA, 16 nt, Human
aacaccuccucaugua

SEQ ID NO: 2520876 - RNA, 18 nt, Human
aacacuaacuaugcaugg

SEQ ID NO: 2520877 - RNA, 13 nt, Human
aacaccucccagg

SEQ ID NO: 2520878 - RNA, 23 nt, Human
aacaccucccaggagacaguuca

SEQ ID NO: 2520879 - RNA, 17 nt, Human
aacacuaacaugauuug

SEQ ID NO: 2520880 - RNA, 19 nt, Human
aacaccucugcacaagcug

SEQ ID NO: 2520881 - RNA, 20 nt, Human
aacaaauuagguuuuguaca

SEQ ID NO: 2520882 - RNA, 19 nt, Human
aacaaauuagguuuuguac

SEQ ID NO: 2520883 - RNA, 16 nt, Human
aacacaguguuuuugu

SEQ ID NO: 2520884 - RNA, 19 nt, Human
aacacagugccuucaauaa

SEQ ID NO: 2520885 - RNA, 21 nt, Human
aacacauacaggaagguagaa

SEQ ID NO: 2520886 - RNA, 14 nt, Human
aacaaaugugaagg

SEQ ID NO: 2520887 - RNA, 22 nt, Human
aacacaggcaaaauccuugcuu

SEQ ID NO: 2520888 - RNA, 16 nt, Human
aacaaagguugagaug

SEQ ID NO: 2520889 - RNA, 23 nt, Human
aacaaaguuacuagguaacuuca

SEQ ID NO: 2520890 - RNA, 18 nt, Human
aacaaaggguuuuaaugu

SEQ ID NO: 2520891 - RNA, 13 nt, Human
aacaaaguuacua

SEQ ID NO: 2520892 - RNA, 13 nt, Human
aacaaauaugcaa

SEQ ID NO: 2520893 - RNA, 12 nt, Human
aacaaauaugca

SEQ ID NO: 2520894 - RNA, 22 nt, Human
aacaaaccuguuucugcagcca

SEQ ID NO: 2520895 - RNA, 15 nt, Human
aacaaacuauuucuu

SEQ ID NO: 2520896 - RNA, 14 nt, Human
aacaaacuauuucu

SEQ ID NO: 2520897 - RNA, 16 nt, Human
aacaaacucucugaac

SEQ ID NO: 2520898 - RNA, 14 nt, Human
aagugcugcauuua

SEQ ID NO: 2520899 - RNA, 13 nt, Human
aagugcugcauuu

SEQ ID NO: 2520900 - RNA, 23 nt, Human
aagugcguguguagaguuaagaa

SEQ ID NO: 2520901 - RNA, 22 nt, Human
aagugcguguguagaguuaaga

SEQ ID NO: 2520902 - RNA, 15 nt, Human
aaguagugugcaguu

SEQ ID NO: 2520903 - RNA, 13 nt, Human
aaguaggaaguaa

SEQ ID NO: 2520904 - RNA, 12 nt, Human
aaguaguuugua

SEQ ID NO: 2520905 - RNA, 20 nt, Human
aaguaguuuguauaacuucu

SEQ ID NO: 2520906 - RNA, 15 nt, Human
aaguauacauaaguu

SEQ ID NO: 2520907 - RNA, 12 nt, Human
aaguauacugua

SEQ ID NO: 2520908 - RNA, 18 nt, Human
aaguauacuguauuuuua

SEQ ID NO: 2520909 - RNA, 15 nt, Human
aaguggggacagagc

SEQ ID NO: 2520910 - RNA, 22 nt, Human
aagugggcuugauucugcagua

SEQ ID NO: 2520911 - RNA, 16 nt, Human
aagugggccaggacag

SEQ ID NO: 2520912 - RNA, 12 nt, Human
aagugggcuuga

SEQ ID NO: 2520913 - RNA, 16 nt, Human
aagugggcuugauucu

SEQ ID NO: 2520914 - RNA, 21 nt, Human
aagugggccaggacaggcccg

SEQ ID NO: 2520915 - RNA, 19 nt, Human
aaguggguuauucuggagu

SEQ ID NO: 2520916 - RNA, 19 nt, Human
aagugggugagaugcugga

SEQ ID NO: 2520917 - RNA, 14 nt, Human
aagugggugagaug

SEQ ID NO: 2520918 - RNA, 13 nt, Human
aaguggggcucgc

SEQ ID NO: 2520919 - RNA, 15 nt, Human
aaguggggcucgcca

SEQ ID NO: 2520920 - RNA, 20 nt, Human
aagugggguugcaaccacug

SEQ ID NO: 2520921 - RNA, 18 nt, Human
aaguggggugcugggagg

SEQ ID NO: 2520922 - RNA, 19 nt, Human
aagugggggcagagggcag

SEQ ID NO: 2520923 - RNA, 22 nt, Human
aaguugauaugccuuuucccaa

SEQ ID NO: 2520924 - RNA, 15 nt, Human
aaguucuucuccaau

SEQ ID NO: 2520925 - RNA, 20 nt, Human
aaguucuggaugcauuucuc

SEQ ID NO: 2520926 - RNA, 22 nt, Human
aaguucuuaguugcuguauguc

SEQ ID NO: 2520927 - RNA, 19 nt, Human
aaguucuggaugcauuucu

SEQ ID NO: 2520928 - RNA, 19 nt, Human
aaguucuguacucaaaugu

SEQ ID NO: 2520929 - RNA, 15 nt, Human
aaguucuuaguugcu

SEQ ID NO: 2520930 - RNA, 17 nt, Human
aauaaaauuuguugcau

SEQ ID NO: 2520931 - RNA, 16 nt, Human
aauaaaauuuguugca

SEQ ID NO: 2520932 - RNA, 18 nt, Human
aauaaaauuuuuuuucau

SEQ ID NO: 2520933 - RNA, 19 nt, Human
aauaaaauuuuuuuucaug

SEQ ID NO: 2520934 - RNA, 12 nt, Human
aauaaaauuuuu

SEQ ID NO: 2520935 - RNA, 10 nt, Human
aauaaaccau

SEQ ID NO: 2520936 - RNA, 17 nt, Human
aauaaaccucaaaaugu

SEQ ID NO: 2520937 - RNA, 13 nt, Human
aauaaacaaauaa

SEQ ID NO: 2520938 - RNA, 22 nt, Human
aauaaaauuuuuuuucauguuu

SEQ ID NO: 2520939 - RNA, 20 nt, Human
aaguugcacugauauuuuac

SEQ ID NO: 2520940 - RNA, 18 nt, Human
aaguugcacugauauuuu

SEQ ID NO: 2520941 - RNA, 18 nt, Human
aaguugcacggcugcuga

SEQ ID NO: 2520942 - RNA, 16 nt, Human
aaguugcacggcugcu

SEQ ID NO: 2520943 - RNA, 15 nt, Human
aaguugcacggcugc

SEQ ID NO: 2520944 - RNA, 14 nt, Human
aaguugaugcaauc

SEQ ID NO: 2520945 - RNA, 18 nt, Human
aaguugauggugaugaaa

SEQ ID NO: 2520946 - RNA, 14 nt, Human
aauaaaauuuguug

SEQ ID NO: 2520947 - RNA, 13 nt, Human
aauaaaauuuguu

SEQ ID NO: 2520948 - RNA, 12 nt, Human
aauaaaauuugu

SEQ ID NO: 2520949 - RNA, 11 nt, Human
aauaaaauuug

SEQ ID NO: 2520950 - RNA, 14 nt, Human
aauaaaauuguaaa

SEQ ID NO: 2520951 - RNA, 12 nt, Human
aauaaaauugua

SEQ ID NO: 2520952 - RNA, 15 nt, Human
aauaaaauugcacuu

SEQ ID NO: 2520953 - RNA, 13 nt, Human
aauaauaaagauc

SEQ ID NO: 2520954 - RNA, 16 nt, Human
aauaaaggaugugauu

SEQ ID NO: 2520955 - RNA, 21 nt, Human
aauaaacgauuuaauucucuu

SEQ ID NO: 2520956 - RNA, 19 nt, Human
aauaauaaagaugcucuuu

SEQ ID NO: 2520957 - RNA, 21 nt, Human
aauaauaaagaucauguaaaa

SEQ ID NO: 2520958 - RNA, 18 nt, Human
aauaauaaagaugcucuu

SEQ ID NO: 2520959 - RNA, 14 nt, Human
aauaauaaauauuu

SEQ ID NO: 2520960 - RNA, 19 nt, Human
aauaaagcuguguggcagu

SEQ ID NO: 2520961 - RNA, 11 nt, Human
aauaaagcugu

SEQ ID NO: 2520962 - RNA, 20 nt, Human
aauaaaccucaaaaugucua

SEQ ID NO: 2520963 - RNA, 15 nt, Human
aauaaacgauuuaau

SEQ ID NO: 2520964 - RNA, 12 nt, Human
aauaaacgauuu

SEQ ID NO: 2520965 - RNA, 15 nt, Human
aauaaagcccuggga

SEQ ID NO: 2520966 - RNA, 15 nt, Human
aauaaagccugcuuu

SEQ ID NO: 2520967 - RNA, 18 nt, Human
aauaaagccuucaaacuc

SEQ ID NO: 2520968 - RNA, 19 nt, Human
aauaauguuucaaacauau

SEQ ID NO: 2520969 - RNA, 14 nt, Human
aauaauguuucaaa

SEQ ID NO: 2520970 - RNA, 12 nt, Human
aauaauguuuca

SEQ ID NO: 2520971 - RNA, 14 nt, Human
aauaauauauguuu

SEQ ID NO: 2520972 - RNA, 17 nt, Human
aauaauaugcauuguca

SEQ ID NO: 2520973 - RNA, 19 nt, Human
aauaauauauuuucuguuu

SEQ ID NO: 2520974 - RNA, 17 nt, Human
aauaauauauuuucugu

SEQ ID NO: 2520975 - RNA, 15 nt, Human
aauaauauauuuucu

SEQ ID NO: 2520976 - RNA, 15 nt, Human
aauaauaugcauugu

SEQ ID NO: 2520977 - RNA, 13 nt, Human
aauaauaugcauu

SEQ ID NO: 2520978 - RNA, 12 nt, Human
aauaauaugcau

SEQ ID NO: 2520979 - RNA, 11 nt, Human
aauaauaugca

SEQ ID NO: 2520980 - RNA, 13 nt, Human
aauaauauauguu

SEQ ID NO: 2520981 - RNA, 17 nt, Human
aauaauauauuuuaaau

SEQ ID NO: 2520982 - RNA, 16 nt, Human
aauaauauacuugugg

SEQ ID NO: 2520983 - RNA, 13 nt, Human
aauaauauacuug

SEQ ID NO: 2520984 - RNA, 12 nt, Human
aauaauauacuu

SEQ ID NO: 2520985 - RNA, 14 nt, Human
aauaauacacuaau

SEQ ID NO: 2520986 - RNA, 18 nt, Human
aauaauaccuaagccuuc

SEQ ID NO: 2520987 - RNA, 20 nt, Human
aauaauacauugaauuagaa

SEQ ID NO: 2520988 - RNA, 21 nt, Human
aauaauaauuauccagaguuu

SEQ ID NO: 2520989 - RNA, 11 nt, Human
aauaauaauua

SEQ ID NO: 2520990 - RNA, 11 nt, Human
aauaauaaauc

SEQ ID NO: 2520991 - RNA, 22 nt, Human
aauacuucucaaaccuguuuaa

SEQ ID NO: 2520992 - RNA, 21 nt, Human
aauacuucucaaaccuguuua

SEQ ID NO: 2520993 - RNA, 23 nt, Human
aauacuucucaaaccuguuuaaa

SEQ ID NO: 2520994 - RNA, 12 nt, Human
aauacuguuuga

SEQ ID NO: 2520995 - RNA, 17 nt, Human
aauacuucucaaaccug

SEQ ID NO: 2520996 - RNA, 14 nt, Human
aauacuaccuugaa

SEQ ID NO: 2520997 - RNA, 15 nt, Human
aauacuaccuugaaa

SEQ ID NO: 2520998 - RNA, 16 nt, Human
aauacuaccuugaaaa

SEQ ID NO: 2520999 - RNA, 21 nt, Human
aauaccugucccccugacaac

SEQ ID NO: 2521000 - RNA, 18 nt, Human
aauacgcacuacaugugg

SEQ ID NO: 2521001 - RNA, 16 nt, Human
aauacgcacuacaugu

SEQ ID NO: 2521002 - RNA, 22 nt, Human
aauauaaaaggcaaauguguac

SEQ ID NO: 2521003 - RNA, 23 nt, Human
aauauaaaauaugaagacauaaa

SEQ ID NO: 2521004 - RNA, 14 nt, Human
aauauaaaaggcaa

SEQ ID NO: 2521005 - RNA, 17 nt, Human
aauauaaaacuguacuu

SEQ ID NO: 2521006 - RNA, 18 nt, Human
aauauaaaacugcguuaa

SEQ ID NO: 2521007 - RNA, 14 nt, Human
aauauaaaacugcg

SEQ ID NO: 2521008 - RNA, 23 nt, Human
aauauaaaaggcaaauguguaca

SEQ ID NO: 2521009 - RNA, 14 nt, Human
aauauaaaauauga

SEQ ID NO: 2521010 - RNA, 21 nt, Human
aauaguuuuauuaauaaacau

SEQ ID NO: 2521011 - RNA, 20 nt, Human
aauaguuuuauuaauaaaca

SEQ ID NO: 2521012 - RNA, 22 nt, Human
aauaguuuuauuaauaaacauu

SEQ ID NO: 2521013 - RNA, 11 nt, Human
aauauaaaacu

SEQ ID NO: 2521014 - RNA, 20 nt, Human
aauagaaaacugaaaaucua

SEQ ID NO: 2521015 - RNA, 13 nt, Human
aauagaaacucac

SEQ ID NO: 2521016 - RNA, 22 nt, Human
aauagaaauaaaggaugugauu

SEQ ID NO: 2521017 - RNA, 21 nt, Human
aauagaaacucaccauguaaa

SEQ ID NO: 2521018 - RNA, 15 nt, Human
aauagaagaacaucc

SEQ ID NO: 2521019 - RNA, 16 nt, Human
aauagaaauuuccaga

SEQ ID NO: 2521020 - RNA, 16 nt, Human
aauagaaauaaguggu

SEQ ID NO: 2521021 - RNA, 17 nt, Human
aauagaaauggggaacu

SEQ ID NO: 2521022 - RNA, 13 nt, Human
aauauagaaacac

SEQ ID NO: 2521023 - RNA, 22 nt, Human
aauauagaaacacgaacuuuag

SEQ ID NO: 2521024 - RNA, 14 nt, Human
aauauagaaacacg

SEQ ID NO: 2521025 - RNA, 21 nt, Human
aauauagaucaguuauaagua

SEQ ID NO: 2521026 - RNA, 23 nt, Human
aauauacuuguggacuaaaagau

SEQ ID NO: 2521027 - RNA, 22 nt, Human
aauauacuuguggacuaaaaga

SEQ ID NO: 2521028 - RNA, 17 nt, Human
aauauacuuguggacua

SEQ ID NO: 2521029 - RNA, 16 nt, Human
aauauaggaacuuaaa

SEQ ID NO: 2521030 - RNA, 15 nt, Human
aauauagcuauuuuu

SEQ ID NO: 2521031 - RNA, 16 nt, Human
aauauagcuguacaaa

SEQ ID NO: 2521032 - RNA, 13 nt, Human
aauauagcuauuu

SEQ ID NO: 2521033 - RNA, 13 nt, Human
aauauaacugccu

SEQ ID NO: 2521034 - RNA, 21 nt, Human
aauauaaagauggcugacuuu

SEQ ID NO: 2521035 - RNA, 14 nt, Human
aauauaaacacuau

SEQ ID NO: 2521036 - RNA, 13 nt, Human
aauauaaacacua

SEQ ID NO: 2521037 - RNA, 20 nt, Human
aauauggaacuucuaauaua

SEQ ID NO: 2521038 - RNA, 10 nt, Human
aauaugcuua

SEQ ID NO: 2521039 - RNA, 11 nt, Human
aauaugcuuac

SEQ ID NO: 2521040 - RNA, 14 nt, Human
aauauggaacuuac

SEQ ID NO: 2521041 - RNA, 15 nt, Human
aauauggaacuuaca

SEQ ID NO: 2521042 - RNA, 16 nt, Human
aauauggaacuuacau

SEQ ID NO: 2521043 - RNA, 17 nt, Human
aauauggaacuuacauu

SEQ ID NO: 2521044 - RNA, 17 nt, Human
aauauggaacuucuaau

SEQ ID NO: 2521045 - RNA, 14 nt, Human
aauauggaacuucu

SEQ ID NO: 2521046 - RNA, 20 nt, Human
aauauggaacuuacauuguu

SEQ ID NO: 2521047 - RNA, 24 nt, Human
aauauggaacuuacauuguucaau

SEQ ID NO: 2521048 - RNA, 21 nt, Human
aauauagcuguacaaauauaa

SEQ ID NO: 2521049 - RNA, 20 nt, Human
aauauagcuguacaaauaua

SEQ ID NO: 2521050 - RNA, 19 nt, Human
aauauagcuguacaaauau

SEQ ID NO: 2521051 - RNA, 18 nt, Human
aauauagcuguacaaaua

SEQ ID NO: 2521052 - RNA, 22 nt, Human
aauauagcuguacaaauauaag

SEQ ID NO: 2521053 - RNA, 17 nt, Human
aauaugccuuuuugaag

SEQ ID NO: 2521054 - RNA, 14 nt, Human
aauaugcugccaaa

SEQ ID NO: 2521055 - RNA, 19 nt, Human
aauaugcugccaaauuuug

SEQ ID NO: 2521056 - RNA, 22 nt, Human
aauaugcugccaaauuuuggcc

SEQ ID NO: 2521057 - RNA, 16 nt, Human
aauaugcuggcuggag

SEQ ID NO: 2521058 - RNA, 14 nt, Human
aauaugcuggcugg

SEQ ID NO: 2521059 - RNA, 15 nt, Human
aaucaaauaugcaaa

SEQ ID NO: 2521060 - RNA, 16 nt, Human
aaucaaauaugcaaag

SEQ ID NO: 2521061 - RNA, 22 nt, Human
aaucaaauaugcaaagcacuga

SEQ ID NO: 2521062 - RNA, 18 nt, Human
aauauggaacuucuaaua

SEQ ID NO: 2521063 - RNA, 22 nt, Human
aaucauuucugcaucagcugcu

SEQ ID NO: 2521064 - RNA, 22 nt, Human
aaucauuuggguuaauauggcu

SEQ ID NO: 2521065 - RNA, 14 nt, Human
aaucauuugcuuuu

SEQ ID NO: 2521066 - RNA, 11 nt, Human
aaucauuuguu

SEQ ID NO: 2521067 - RNA, 21 nt, Human
aaucauuucuugggcccuccu

SEQ ID NO: 2521068 - RNA, 22 nt, Human
aaucauuucuugggcccuccug

SEQ ID NO: 2521069 - RNA, 22 nt, Human
aaucauuuuaauuauuauucuu

SEQ ID NO: 2521070 - RNA, 20 nt, Human
aaucauuuuaauuauuauuc

SEQ ID NO: 2521071 - RNA, 19 nt, Human
aaucauuuuaauuauuauu

SEQ ID NO: 2521072 - RNA, 17 nt, Human
aaucauuuuaauuauua

SEQ ID NO: 2521073 - RNA, 16 nt, Human
aaucauuuuaauuauu

SEQ ID NO: 2521074 - RNA, 15 nt, Human
aaucauuuuaauuau

SEQ ID NO: 2521075 - RNA, 18 nt, Human
aaucauuuguucaaagcu

SEQ ID NO: 2521076 - RNA, 19 nt, Human
aaucauuuugccucuuuuc

SEQ ID NO: 2521077 - RNA, 23 nt, Human
aaucauuuuauaugucaaagcag

SEQ ID NO: 2521078 - RNA, 20 nt, Human
aaucauuuuauaugucaaag

SEQ ID NO: 2521079 - RNA, 19 nt, Human
aaucauuuuauaugucaaa

SEQ ID NO: 2521080 - RNA, 20 nt, Human
aaucauuuuacccuuggcuc

SEQ ID NO: 2521081 - RNA, 18 nt, Human
aaugauguccagaagaau

SEQ ID NO: 2521082 - RNA, 15 nt, Human
aaugauguccagaag

SEQ ID NO: 2521083 - RNA, 14 nt, Human
aaugauguccagaa

SEQ ID NO: 2521084 - RNA, 23 nt, Human
aaugauguauguugaagccuuug

SEQ ID NO: 2521085 - RNA, 17 nt, Human
aaugauauauggauaau

SEQ ID NO: 2521086 - RNA, 18 nt, Human
aaugauauagccagaaaa

SEQ ID NO: 2521087 - RNA, 18 nt, Human
aaugauaguaagaaaagu

SEQ ID NO: 2521088 - RNA, 15 nt, Human
aaugauagcuacugu

SEQ ID NO: 2521089 - RNA, 13 nt, Human
aaugauuaauuaa

SEQ ID NO: 2521090 - RNA, 12 nt, Human
aaugauuaauua

SEQ ID NO: 2521091 - RNA, 21 nt, Human
aaugauguguacccaaacgug

SEQ ID NO: 2521092 - RNA, 14 nt, Human
aaugauaacuggaa

SEQ ID NO: 2521093 - RNA, 14 nt, Human
aaugaacaaauuga

SEQ ID NO: 2521094 - RNA, 23 nt, Human
aaugaaauuacuacaaaauuuga

SEQ ID NO: 2521095 - RNA, 14 nt, Human
aaugaaauuguaaa

SEQ ID NO: 2521096 - RNA, 17 nt, Human
aaugaaauuacuacaaa

SEQ ID NO: 2521097 - RNA, 16 nt, Human
aaugauaacuggaaac

SEQ ID NO: 2521098 - RNA, 15 nt, Human
aaugauaacuggaaa

SEQ ID NO: 2521099 - RNA, 21 nt, Human
aaugaacacucuuuugcuuua

SEQ ID NO: 2521100 - RNA, 15 nt, Human
aaugaacacucuuuu

SEQ ID NO: 2521101 - RNA, 18 nt, Human
aaugaacacucuuuugcu

SEQ ID NO: 2521102 - RNA, 18 nt, Human
aaugauacccugaauuug

SEQ ID NO: 2521103 - RNA, 16 nt, Human
aauccauacauuugug

SEQ ID NO: 2521104 - RNA, 18 nt, Human
aauccacucccaggcagc

SEQ ID NO: 2521105 - RNA, 17 nt, Human
aauccacucccaggcag

SEQ ID NO: 2521106 - RNA, 15 nt, Human
aauccacucccaggc

SEQ ID NO: 2521107 - RNA, 23 nt, Human
aauccacccauccuaccaaugca

SEQ ID NO: 2521108 - RNA, 13 nt, Human
aauccagaaagaa

SEQ ID NO: 2521109 - RNA, 17 nt, Human
aauccagaaagaaaaaa

SEQ ID NO: 2521110 - RNA, 17 nt, Human
aauccauacauuugugu

SEQ ID NO: 2521111 - RNA, 21 nt, Human
aauccaucuaaauaccugccc

SEQ ID NO: 2521112 - RNA, 22 nt, Human
aauccagaauugaccuuuugac

SEQ ID NO: 2521113 - RNA, 14 nt, Human
aauccaaacuugga

SEQ ID NO: 2521114 - RNA, 21 nt, Human
aauccaaacuuggauuuuuga

SEQ ID NO: 2521115 - RNA, 13 nt, Human
aauccaaauggcg

SEQ ID NO: 2521116 - RNA, 20 nt, Human
aauccaaauggcgucuggaa

SEQ ID NO: 2521117 - RNA, 17 nt, Human
aauccaacccaugauga

SEQ ID NO: 2521118 - RNA, 22 nt, Human
aauccaagauauuuuaaaaucu

SEQ ID NO: 2521119 - RNA, 18 nt, Human
aauccacaaucugacauu

SEQ ID NO: 2521120 - RNA, 12 nt, Human
aauccacccauc

SEQ ID NO: 2521121 - RNA, 19 nt, Human
aauccaccugccucggccu

SEQ ID NO: 2521122 - RNA, 18 nt, Human
aauccaccugccucggcc

SEQ ID NO: 2521123 - RNA, 19 nt, Human
aaucucguuucaaaaacac

SEQ ID NO: 2521124 - RNA, 18 nt, Human
aaucucguuucaaaaaca

SEQ ID NO: 2521125 - RNA, 16 nt, Human
aaucucguuucaaaaa

SEQ ID NO: 2521126 - RNA, 15 nt, Human
aaucucguuucaaaa

SEQ ID NO: 2521127 - RNA, 23 nt, Human
aaucuggaccccaucugugaaua

SEQ ID NO: 2521128 - RNA, 24 nt, Human
aaucuggaccccaucugugaauaa

SEQ ID NO: 2521129 - RNA, 16 nt, Human
aaucuggacuccucug

SEQ ID NO: 2521130 - RNA, 15 nt, Human
aaucuggacuccucu

SEQ ID NO: 2521131 - RNA, 18 nt, Human
aaucuggacuccucuguc

SEQ ID NO: 2521132 - RNA, 17 nt, Human
aaucuggacuccucugu

SEQ ID NO: 2521133 - RNA, 20 nt, Human
aaucuggacuccucugucca

SEQ ID NO: 2521134 - RNA, 14 nt, Human
aaucuggagaccag

SEQ ID NO: 2521135 - RNA, 23 nt, Human
aauccaucuaaauaccugcccug

SEQ ID NO: 2521136 - RNA, 22 nt, Human
aauccaucuaaauaccugcccu

SEQ ID NO: 2521137 - RNA, 15 nt, Human
aauccaugcuugggu

SEQ ID NO: 2521138 - RNA, 18 nt, Human
aaucuccaaaauaaaacu

SEQ ID NO: 2521139 - RNA, 16 nt, Human
aauccauguaagguau

SEQ ID NO: 2521140 - RNA, 12 nt, Human
aauccauguaag

SEQ ID NO: 2521141 - RNA, 15 nt, Human
aaucuccaguauucu

SEQ ID NO: 2521142 - RNA, 17 nt, Human
aaucucccgcugcugcu

SEQ ID NO: 2521143 - RNA, 23 nt, Human
aaucucgcucugucgcccaggcu

SEQ ID NO: 2521144 - RNA, 19 nt, Human
aaucucccgcugcugcugc

SEQ ID NO: 2521145 - RNA, 15 nt, Human
aaucuccucuuuuau

SEQ ID NO: 2521146 - RNA, 18 nt, Human
aaucucggcucacugcau

SEQ ID NO: 2521147 - RNA, 18 nt, Human
aaucuccucuuuuaucuu

SEQ ID NO: 2521148 - RNA, 18 nt, Human
aaugcccguaaugcuuag

SEQ ID NO: 2521149 - RNA, 19 nt, Human
aaugcccguaaugcuuaga

SEQ ID NO: 2521150 - RNA, 22 nt, Human
aaugcccuuacacuuacuguug

SEQ ID NO: 2521151 - RNA, 18 nt, Human
aaugcccuuacacuuacu

SEQ ID NO: 2521152 - RNA, 22 nt, Human
aaugcccucaggggacuugaau

SEQ ID NO: 2521153 - RNA, 16 nt, Human
aaugcccuuaaaucau

SEQ ID NO: 2521154 - RNA, 20 nt, Human
aaugccucaguguauuugua

SEQ ID NO: 2521155 - RNA, 15 nt, Human
aaugccucaguguau

SEQ ID NO: 2521156 - RNA, 20 nt, Human
aaugccucaaugugaccagg

SEQ ID NO: 2521157 - RNA, 23 nt, Human
aaugccucaguguauuuguauuu

SEQ ID NO: 2521158 - RNA, 21 nt, Human
aaugccucaguguauuuguau

SEQ ID NO: 2521159 - RNA, 12 nt, Human
aaugccuccucc

SEQ ID NO: 2521160 - RNA, 14 nt, Human
aaugccuccucccu

SEQ ID NO: 2521161 - RNA, 15 nt, Human
aaugccuccucccug

SEQ ID NO: 2521162 - RNA, 17 nt, Human
aaugcgcaggcuggccc

SEQ ID NO: 2521163 - RNA, 18 nt, Human
aaugcgcaggcuggcccu

SEQ ID NO: 2521164 - RNA, 19 nt, Human
aaugcgcaggcuggcccug

SEQ ID NO: 2521165 - RNA, 20 nt, Human
aaugcgcaggcuggcccugc

SEQ ID NO: 2521166 - RNA, 15 nt, Human
aaugcgcaggcuggc

SEQ ID NO: 2521167 - RNA, 14 nt, Human
aaugcgcaggcugg

SEQ ID NO: 2521168 - RNA, 16 nt, Human
aaugccugagugccug

SEQ ID NO: 2521169 - RNA, 19 nt, Human
aaugccugagugccuggcc

SEQ ID NO: 2521170 - RNA, 17 nt, Human
aaugccugagugccugg

SEQ ID NO: 2521171 - RNA, 21 nt, Human
aaugcgugcauaccacuuuug

SEQ ID NO: 2521172 - RNA, 23 nt, Human
aaugcgugcauaccacuuuuguu

SEQ ID NO: 2521173 - RNA, 13 nt, Human
aaugcuacuuuau

SEQ ID NO: 2521174 - RNA, 23 nt, Human
aaugcuacgugugauuuuucugg

SEQ ID NO: 2521175 - RNA, 18 nt, Human
aaugcuagcucugagcca

SEQ ID NO: 2521176 - RNA, 19 nt, Human
aaugcuacgugugauuuuu

SEQ ID NO: 2521177 - RNA, 17 nt, Human
aaugcuacgugugauuu

SEQ ID NO: 2521178 - RNA, 16 nt, Human
aaugcuacgugugauu

SEQ ID NO: 2521179 - RNA, 20 nt, Human
aaugcuaaagaaaaagucau

SEQ ID NO: 2521180 - RNA, 18 nt, Human
aaugcuaaagaaaaaguc

SEQ ID NO: 2521181 - RNA, 15 nt, Human
aaugguaugagcuga

SEQ ID NO: 2521182 - RNA, 15 nt, Human
aaugguauagcaaau

SEQ ID NO: 2521183 - RNA, 16 nt, Human
aauggguaucuauauu

SEQ ID NO: 2521184 - RNA, 12 nt, Human
aauggguaauau

SEQ ID NO: 2521185 - RNA, 20 nt, Human
aaugggggccucuucaaauu

SEQ ID NO: 2521186 - RNA, 14 nt, Human
aauggggccagauc

SEQ ID NO: 2521187 - RNA, 22 nt, Human
aauggggccagauccagccugg

SEQ ID NO: 2521188 - RNA, 19 nt, Human
aauggggguagcagcugga

SEQ ID NO: 2521189 - RNA, 18 nt, Human
aauggggguagcagcugg

SEQ ID NO: 2521190 - RNA, 17 nt, Human
aaugggguccuggccau

SEQ ID NO: 2521191 - RNA, 18 nt, Human
aaugggguccuggccauc

SEQ ID NO: 2521192 - RNA, 15 nt, Human
aaugggggugcauuu

SEQ ID NO: 2521193 - RNA, 17 nt, Human
aaugggggugcauuuga

SEQ ID NO: 2521194 - RNA, 17 nt, Human
aauggucccauccaggc

SEQ ID NO: 2521195 - RNA, 16 nt, Human
aaugguccaggguuga

SEQ ID NO: 2521196 - RNA, 14 nt, Human
aaugguccaggguu

SEQ ID NO: 2521197 - RNA, 13 nt, Human
aaugguccagggu

SEQ ID NO: 2521198 - RNA, 15 nt, Human
aaugucacaggcagg

SEQ ID NO: 2521199 - RNA, 18 nt, Human
aauggucagcguugcaug

SEQ ID NO: 2521200 - RNA, 14 nt, Human
aauggucagcguug

SEQ ID NO: 2521201 - RNA, 20 nt, Human
aauggucagcguugcauguc

SEQ ID NO: 2521202 - RNA, 14 nt, Human
aaugguccaggaga

SEQ ID NO: 2521203 - RNA, 19 nt, Human
aaugguccaggagaaggcc

SEQ ID NO: 2521204 - RNA, 16 nt, Human
aaugguauggaacucu

SEQ ID NO: 2521205 - RNA, 18 nt, Human
aaugguaugagcugaggg

SEQ ID NO: 2521206 - RNA, 14 nt, Human
aaugggagcucaug

SEQ ID NO: 2521207 - RNA, 13 nt, Human
aaugggacacuaa

SEQ ID NO: 2521208 - RNA, 23 nt, Human
aaugggcacugggaugagccgcu

SEQ ID NO: 2521209 - RNA, 12 nt, Human
aaugggcacagc

SEQ ID NO: 2521210 - RNA, 18 nt, Human
aaugggcaaaacugaauu

SEQ ID NO: 2521211 - RNA, 17 nt, Human
aauggggccagauccag

SEQ ID NO: 2521212 - RNA, 21 nt, Human
aaugggagcugaggccacacu

SEQ ID NO: 2521213 - RNA, 21 nt, Human
aaugggacuucuuuucacauu

SEQ ID NO: 2521214 - RNA, 20 nt, Human
aaugggacuucuuuucacau

SEQ ID NO: 2521215 - RNA, 18 nt, Human
aaugggacuucuuuucac

SEQ ID NO: 2521216 - RNA, 17 nt, Human
aaugggacuucuuuuca

SEQ ID NO: 2521217 - RNA, 23 nt, Human
aaugcucuuuacuucauggacuu

SEQ ID NO: 2521218 - RNA, 20 nt, Human
aaugcucuggggucuuuuua

SEQ ID NO: 2521219 - RNA, 16 nt, Human
aaugggaauauuuuau

SEQ ID NO: 2521220 - RNA, 13 nt, Human
aaugcucuccuuu

SEQ ID NO: 2521221 - RNA, 14 nt, Human
aaugcucuccuuuc

SEQ ID NO: 2521222 - RNA, 19 nt, Human
aaugcuccuuguuccuaga

SEQ ID NO: 2521223 - RNA, 11 nt, Human
aaugcucuagu

SEQ ID NO: 2521224 - RNA, 21 nt, Human
aaugcucccccauccuccccu

SEQ ID NO: 2521225 - RNA, 22 nt, Human
aaugcucccccauccuccccuu

SEQ ID NO: 2521226 - RNA, 20 nt, Human
aaugcuauuuuuuauuuuac

SEQ ID NO: 2521227 - RNA, 11 nt, Human
aaugcuccccc

SEQ ID NO: 2521228 - RNA, 14 nt, Human
aaugcucccccauc

SEQ ID NO: 2521229 - RNA, 20 nt, Human
aaugcucccccauccucccc

SEQ ID NO: 2521230 - RNA, 12 nt, Human
aaugcucaucug

SEQ ID NO: 2521231 - RNA, 16 nt, Human
aaugcucauaacggau

SEQ ID NO: 2521232 - RNA, 17 nt, Human
aaugcuaggucucggac

SEQ ID NO: 2521233 - RNA, 15 nt, Human
aaugcucagaccagc

SEQ ID NO: 2521234 - RNA, 13 nt, Human
aacuguuguauaa

SEQ ID NO: 2521235 - RNA, 14 nt, Human
aacuguuguauaaa

SEQ ID NO: 2521236 - RNA, 15 nt, Human
aacuguuguauaaau

SEQ ID NO: 2521237 - RNA, 17 nt, Human
aacuguugccagagaug

SEQ ID NO: 2521238 - RNA, 18 nt, Human
aacuguugccagagaugg

SEQ ID NO: 2521239 - RNA, 14 nt, Human
aacuguugauugca

SEQ ID NO: 2521240 - RNA, 16 nt, Human
aacuguuaugaaauaa

SEQ ID NO: 2521241 - RNA, 15 nt, Human
aacuguugccagaga

SEQ ID NO: 2521242 - RNA, 19 nt, Human
aacuguuguauaaauuuau

SEQ ID NO: 2521243 - RNA, 22 nt, Human
aacuguuuagggcccugauuug

SEQ ID NO: 2521244 - RNA, 13 nt, Human
aacuuacacacaa

SEQ ID NO: 2521245 - RNA, 19 nt, Human
aacuuacauuguucaauua

SEQ ID NO: 2521246 - RNA, 20 nt, Human
aacuuacauuguucaauuag

SEQ ID NO: 2521247 - RNA, 21 nt, Human
aacuuacauuguucaauuaga

SEQ ID NO: 2521248 - RNA, 22 nt, Human
aacuuacauuguucaauuagaa

SEQ ID NO: 2521249 - RNA, 23 nt, Human
aacuuacauugugaaacuucugu

SEQ ID NO: 2521250 - RNA, 15 nt, Human
aacuuagaauaaaau

SEQ ID NO: 2521251 - RNA, 16 nt, Human
aacuuagaauaaaauu

SEQ ID NO: 2521252 - RNA, 23 nt, Human
aacuuaccgugagcgacaaagau

SEQ ID NO: 2521253 - RNA, 19 nt, Human
aacuuaccugggcauucuu

SEQ ID NO: 2521254 - RNA, 14 nt, Human
aacuuacuuagugu

SEQ ID NO: 2521255 - RNA, 21 nt, Human
aacuuagaauaaaauuguaaa

SEQ ID NO: 2521256 - RNA, 19 nt, Human
aacuuagaauaaaauugua

SEQ ID NO: 2521257 - RNA, 18 nt, Human
aacuuagaauaaaauugu

SEQ ID NO: 2521258 - RNA, 17 nt, Human
aacuuagaauaaaauug

SEQ ID NO: 2521259 - RNA, 23 nt, Human
aagacaggacagugcuucagccu

SEQ ID NO: 2521260 - RNA, 22 nt, Human
aagacagcuucucauccugcag

SEQ ID NO: 2521261 - RNA, 16 nt, Human
aagacaugucuguucu

SEQ ID NO: 2521262 - RNA, 17 nt, Human
aagacaugucuguucua

SEQ ID NO: 2521263 - RNA, 19 nt, Human
aagacaugucuguucuaca

SEQ ID NO: 2521264 - RNA, 21 nt, Human
aagacauucuuccaaaaagau

SEQ ID NO: 2521265 - RNA, 16 nt, Human
aagacuuuggaaagag

SEQ ID NO: 2521266 - RNA, 15 nt, Human
aagacauuaaaucua

SEQ ID NO: 2521267 - RNA, 17 nt, Human
aagacauguuuuagaca

SEQ ID NO: 2521268 - RNA, 14 nt, Human
aagacauguuuuag

SEQ ID NO: 2521269 - RNA, 13 nt, Human
aagacauguuuua

SEQ ID NO: 2521270 - RNA, 18 nt, Human
aagacauuaaaucuauga

SEQ ID NO: 2521271 - RNA, 13 nt, Human
aagacauugucaa

SEQ ID NO: 2521272 - RNA, 23 nt, Human
aagacagugaaagaaaauaacaa

SEQ ID NO: 2521273 - RNA, 12 nt, Human
aagacaugucug

SEQ ID NO: 2521274 - RNA, 13 nt, Human
aagacaugucugu

SEQ ID NO: 2521275 - RNA, 19 nt, Human
aagacauggagacuccugc

SEQ ID NO: 2521276 - RNA, 22 nt, Human
aagacaggaugggggcuggccu

SEQ ID NO: 2521277 - RNA, 16 nt, Human
aagacauguagguguu

SEQ ID NO: 2521278 - RNA, 19 nt, Human
aagacauggggaggaagga

SEQ ID NO: 2521279 - RNA, 21 nt, Human
aagacagggcugauaagcuaa

SEQ ID NO: 2521280 - RNA, 18 nt, Human
aagacauggagacuccug

SEQ ID NO: 2521281 - RNA, 15 nt, Human
aagagaacuuccaga

SEQ ID NO: 2521282 - RNA, 20 nt, Human
aagagaacccacgaacauuc

SEQ ID NO: 2521283 - RNA, 15 nt, Human
aagacuuuuaugaua

SEQ ID NO: 2521284 - RNA, 20 nt, Human
aagacuuugggauaggaaaa

SEQ ID NO: 2521285 - RNA, 18 nt, Human
aagagaagggcagggcug

SEQ ID NO: 2521286 - RNA, 22 nt, Human
aagagaaccgagcaaagaucaa

SEQ ID NO: 2521287 - RNA, 21 nt, Human
aagagaaccgagcaaagauca

SEQ ID NO: 2521288 - RNA, 16 nt, Human
aagagaaccgagcaaa

SEQ ID NO: 2521289 - RNA, 19 nt, Human
aagacuuugggauaggaaa

SEQ ID NO: 2521290 - RNA, 22 nt, Human
aagagaauauuuuaaguauugc

SEQ ID NO: 2521291 - RNA, 20 nt, Human
aagagaauauuuuaaguauu

SEQ ID NO: 2521292 - RNA, 18 nt, Human
aagagaauauuuuaagua

SEQ ID NO: 2521293 - RNA, 21 nt, Human
aagagaaguuauuuucuacag

SEQ ID NO: 2521294 - RNA, 14 nt, Human
aagagaaguuauuu

SEQ ID NO: 2521295 - RNA, 13 nt, Human
aagagaauauuuu

SEQ ID NO: 2521296 - RNA, 12 nt, Human
aagagaauauuu

SEQ ID NO: 2521297 - RNA, 20 nt, Human
aagagaauauuagcuuuacu

SEQ ID NO: 2521298 - RNA, 18 nt, Human
aagagaggagaggagaga

SEQ ID NO: 2521299 - RNA, 17 nt, Human
aagagaggagaggagag

SEQ ID NO: 2521300 - RNA, 22 nt, Human
aagagagcuuaaugauaauauu

SEQ ID NO: 2521301 - RNA, 15 nt, Human
aagagaggacacaaa

SEQ ID NO: 2521302 - RNA, 15 nt, Human
aagagagauguuuug

SEQ ID NO: 2521303 - RNA, 12 nt, Human
aagagagaaugu

SEQ ID NO: 2521304 - RNA, 13 nt, Human
aagagagaaugua

SEQ ID NO: 2521305 - RNA, 22 nt, Human
aagagacaggagggcaagggcc

SEQ ID NO: 2521306 - RNA, 21 nt, Human
aagagacagucaccccaggac

SEQ ID NO: 2521307 - RNA, 20 nt, Human
aagagacagucaccccagga

SEQ ID NO: 2521308 - RNA, 14 nt, Human
aagagacagucacc

SEQ ID NO: 2521309 - RNA, 21 nt, Human
aagagacaaacaccucccagg

SEQ ID NO: 2521310 - RNA, 19 nt, Human
aagagacaaacaccuccca

SEQ ID NO: 2521311 - RNA, 19 nt, Human
aagagagaaaauaaaaagu

SEQ ID NO: 2521312 - RNA, 20 nt, Human
aagagagaaaauaaaaaguu

SEQ ID NO: 2521313 - RNA, 21 nt, Human
aagagagaaaauaaaaaguua

SEQ ID NO: 2521314 - RNA, 22 nt, Human
aagagagaaaauaaaaaguuaa

SEQ ID NO: 2521315 - RNA, 21 nt, Human
aagagagaaagaaguaggcau

SEQ ID NO: 2521316 - RNA, 23 nt, Human
aagagagaaaauaaaaaguuaaa

SEQ ID NO: 2521317 - RNA, 14 nt, Human
aagagagaaagaag

SEQ ID NO: 2521318 - RNA, 14 nt, Human
aagauuuuucucaa

SEQ ID NO: 2521319 - RNA, 13 nt, Human
aagauuuuucuca

SEQ ID NO: 2521320 - RNA, 23 nt, Human
aagauuuuggaggguccuccaca

SEQ ID NO: 2521321 - RNA, 21 nt, Human
aagauuuuggaggagaaggac

SEQ ID NO: 2521322 - RNA, 18 nt, Human
aagauuuuccuuuuuuau

SEQ ID NO: 2521323 - RNA, 12 nt, Human
aagauuuuccuu

SEQ ID NO: 2521324 - RNA, 21 nt, Human
aagauuuuccuuuuuuauaca

SEQ ID NO: 2521325 - RNA, 15 nt, Human
aagauuuugaaugcu

SEQ ID NO: 2521326 - RNA, 17 nt, Human
aagauuuugaaugcuuc

SEQ ID NO: 2521327 - RNA, 21 nt, Human
aagauuuugaaugcuuccuga

SEQ ID NO: 2521328 - RNA, 19 nt, Human
aagauuuugaaauuuuuau

SEQ ID NO: 2521329 - RNA, 13 nt, Human
aagauuuucagaa

SEQ ID NO: 2521330 - RNA, 15 nt, Human
aagauugcugaaauu

SEQ ID NO: 2521331 - RNA, 22 nt, Human
aagcagaauaaagcaauuuucc

SEQ ID NO: 2521332 - RNA, 21 nt, Human
aagcagaauaaagcaauuuuc

SEQ ID NO: 2521333 - RNA, 20 nt, Human
aagcagaauaaagcaauuuu

SEQ ID NO: 2521334 - RNA, 19 nt, Human
aagcagaauaaagcaauuu

SEQ ID NO: 2521335 - RNA, 18 nt, Human
aagcagaauaaagcaauu

SEQ ID NO: 2521336 - RNA, 17 nt, Human
aagcagaauaaagcaau

SEQ ID NO: 2521337 - RNA, 16 nt, Human
aagcagaauaaagcaa

SEQ ID NO: 2521338 - RNA, 15 nt, Human
aagcagaauaaagca

SEQ ID NO: 2521339 - RNA, 14 nt, Human
aagcagaauaaagc

SEQ ID NO: 2521340 - RNA, 13 nt, Human
aagcagaauaaag

SEQ ID NO: 2521341 - RNA, 12 nt, Human
aagcagaauaaa

SEQ ID NO: 2521342 - RNA, 11 nt, Human
aagcagaauaa

SEQ ID NO: 2521343 - RNA, 12 nt, Human
aagcagaaauac

SEQ ID NO: 2521344 - RNA, 20 nt, Human
aagcagaaaauacagcugga

SEQ ID NO: 2521345 - RNA, 19 nt, Human
aagcacuuggacucuugcu

SEQ ID NO: 2521346 - RNA, 15 nt, Human
aagcacugugcucag

SEQ ID NO: 2521347 - RNA, 16 nt, Human
aagcacugugcucagg

SEQ ID NO: 2521348 - RNA, 13 nt, Human
aagcagaaaauac

SEQ ID NO: 2521349 - RNA, 20 nt, Human
aagcacuuggacucuugcuc

SEQ ID NO: 2521350 - RNA, 18 nt, Human
aagcacuuugggauucuu

SEQ ID NO: 2521351 - RNA, 19 nt, Human
aagccaccaacauacuccc

SEQ ID NO: 2521352 - RNA, 20 nt, Human
aagcaggggcuacaagaggg

SEQ ID NO: 2521353 - RNA, 19 nt, Human
aagcaggggaguaugcaaa

SEQ ID NO: 2521354 - RNA, 18 nt, Human
aagcaggggaguaugcaa

SEQ ID NO: 2521355 - RNA, 17 nt, Human
aagcaggggaguaugca

SEQ ID NO: 2521356 - RNA, 22 nt, Human
aagcaggggcuacaagagggaa

SEQ ID NO: 2521357 - RNA, 21 nt, Human
aagcaggggcuacaagaggga

SEQ ID NO: 2521358 - RNA, 17 nt, Human
aagcagggucugggcag

SEQ ID NO: 2521359 - RNA, 22 nt, Human
aagcagaggaggggccgcugcc

SEQ ID NO: 2521360 - RNA, 14 nt, Human
aagcagaugcaaag

SEQ ID NO: 2521361 - RNA, 16 nt, Human
aagcagaugcaaagag

SEQ ID NO: 2521362 - RNA, 12 nt, Human
aagcagggagga

SEQ ID NO: 2521363 - RNA, 15 nt, Human
aagcagaggaggggc

SEQ ID NO: 2521364 - RNA, 20 nt, Human
aagcagaggaggggccgcug

SEQ ID NO: 2521365 - RNA, 15 nt, Human
aagcagggacuugaa

SEQ ID NO: 2521366 - RNA, 23 nt, Human
aagcagaauaaagcaauuuuccu

SEQ ID NO: 2521367 - RNA, 21 nt, Human
aagcagaggaaggagaggaga

SEQ ID NO: 2521368 - RNA, 12 nt, Human
aagcagaggagg

SEQ ID NO: 2521369 - RNA, 14 nt, Human
aagcagaggagggg

SEQ ID NO: 2521370 - RNA, 17 nt, Human
aagauucaaucccagga

SEQ ID NO: 2521371 - RNA, 18 nt, Human
aagauuagaaugaaaauu

SEQ ID NO: 2521372 - RNA, 13 nt, Human
aagauuagaauga

SEQ ID NO: 2521373 - RNA, 18 nt, Human
aagauuagaagcugaaaa

SEQ ID NO: 2521374 - RNA, 14 nt, Human
aagauagcagggca

SEQ ID NO: 2521375 - RNA, 13 nt, Human
aagauuagaagcu

SEQ ID NO: 2521376 - RNA, 11 nt, Human
aagauuagaag

SEQ ID NO: 2521377 - RNA, 17 nt, Human
aagauuacuuuuucuuu

SEQ ID NO: 2521378 - RNA, 23 nt, Human
aagauucacaccugacucugaaa

SEQ ID NO: 2521379 - RNA, 19 nt, Human
aagauucacaccugacucu

SEQ ID NO: 2521380 - RNA, 15 nt, Human
aagauucagguaugu

SEQ ID NO: 2521381 - RNA, 20 nt, Human
aagauucauauuuacuucuu

SEQ ID NO: 2521382 - RNA, 12 nt, Human
aagauucccaga

SEQ ID NO: 2521383 - RNA, 13 nt, Human
aagauucccagag

SEQ ID NO: 2521384 - RNA, 14 nt, Human
aagauucccagaga

SEQ ID NO: 2521385 - RNA, 21 nt, Human
aagauucauuuuuaaucauga

SEQ ID NO: 2521386 - RNA, 20 nt, Human
aagauucauuuuuaaucaug

SEQ ID NO: 2521387 - RNA, 19 nt, Human
aagauucauuuuuaaucau

SEQ ID NO: 2521388 - RNA, 17 nt, Human
aagauucauccauuuau

SEQ ID NO: 2521389 - RNA, 15 nt, Human
aagauucccagagac

SEQ ID NO: 2521390 - RNA, 18 nt, Human
aagauucccagagacagg

SEQ ID NO: 2521391 - RNA, 17 nt, Human
aagauucuccugugcua

SEQ ID NO: 2521392 - RNA, 12 nt, Human
aagauugcugaa

SEQ ID NO: 2521393 - RNA, 16 nt, Human
aagauucuuucccaau

SEQ ID NO: 2521394 - RNA, 13 nt, Human
aagauucuuuccc

SEQ ID NO: 2521395 - RNA, 19 nt, Human
aaggucuuugguucagcua

SEQ ID NO: 2521396 - RNA, 15 nt, Human
aaggugaaggaauau

SEQ ID NO: 2521397 - RNA, 14 nt, Human
aaggugaaggaaua

SEQ ID NO: 2521398 - RNA, 11 nt, Human
aaggugaagga

SEQ ID NO: 2521399 - RNA, 13 nt, Human
aaggucuuugguu

SEQ ID NO: 2521400 - RNA, 16 nt, Human
aaggucuggccucagg

SEQ ID NO: 2521401 - RNA, 17 nt, Human
aagggcauccuucugcc

SEQ ID NO: 2521402 - RNA, 14 nt, Human
aagggcauccuucu

SEQ ID NO: 2521403 - RNA, 23 nt, Human
aaggucuggagaagcucccagga

SEQ ID NO: 2521404 - RNA, 17 nt, Human
aagguguaacucuaauu

SEQ ID NO: 2521405 - RNA, 20 nt, Human
aagguggugggggugcagau

SEQ ID NO: 2521406 - RNA, 22 nt, Human
aagguggucugcucgggcccag

SEQ ID NO: 2521407 - RNA, 20 nt, Human
aaggugguauguguguguau

SEQ ID NO: 2521408 - RNA, 18 nt, Human
aaggugucagaauaauaa

SEQ ID NO: 2521409 - RNA, 20 nt, Human
aaggugucuuccucccaagu

SEQ ID NO: 2521410 - RNA, 16 nt, Human
aaggugucuuccuccc

SEQ ID NO: 2521411 - RNA, 15 nt, Human
aaggugucuuccucc

SEQ ID NO: 2521412 - RNA, 18 nt, Human
aaggugaaggaauauaug

SEQ ID NO: 2521413 - RNA, 16 nt, Human
aaggugaaggaauaua

SEQ ID NO: 2521414 - RNA, 20 nt, Human
aaggugggcugagcccuggc

SEQ ID NO: 2521415 - RNA, 21 nt, Human
aaggugggcugagcccuggca

SEQ ID NO: 2521416 - RNA, 16 nt, Human
aaggugguaugugugu

SEQ ID NO: 2521417 - RNA, 21 nt, Human
aagguggggucuuugugagag

SEQ ID NO: 2521418 - RNA, 17 nt, Human
aaggugguaugugugug

SEQ ID NO: 2521419 - RNA, 16 nt, Human
aagguggggacaggga

SEQ ID NO: 2521420 - RNA, 23 nt, Human
aaggugggguauuuaccacagca

SEQ ID NO: 2521421 - RNA, 18 nt, Human
aagguuaggauuuaacag

SEQ ID NO: 2521422 - RNA, 17 nt, Human
aagguuaggauuuaaca

SEQ ID NO: 2521423 - RNA, 22 nt, Human
aagguguucauucacuugcauu

SEQ ID NO: 2521424 - RNA, 17 nt, Human
aagguuauuuauuuaaa

SEQ ID NO: 2521425 - RNA, 18 nt, Human
aagguuaccaagaagccu

SEQ ID NO: 2521426 - RNA, 22 nt, Human
aagguuauuuauuuaaaugucu

SEQ ID NO: 2521427 - RNA, 20 nt, Human
aagguuauuuauuuaaaugu

SEQ ID NO: 2521428 - RNA, 17 nt, Human
aagguucacuaaagcag

SEQ ID NO: 2521429 - RNA, 21 nt, Human
aagguucucagguguugccaa

SEQ ID NO: 2521430 - RNA, 21 nt, Human
aagguuccaacuguauauauu

SEQ ID NO: 2521431 - RNA, 16 nt, Human
aagguucccucugaga

SEQ ID NO: 2521432 - RNA, 23 nt, Human
aagguuccgcuuggagcagaggg

SEQ ID NO: 2521433 - RNA, 19 nt, Human
aagguuccaacuguauaua

SEQ ID NO: 2521434 - RNA, 18 nt, Human
aagguuccaacuguauau

SEQ ID NO: 2521435 - RNA, 22 nt, Human
aagguuccaaucagaucuuuau

SEQ ID NO: 2521436 - RNA, 12 nt, Human
aaguagaggagg

SEQ ID NO: 2521437 - RNA, 21 nt, Human
aagguucucuccuccccaagg

SEQ ID NO: 2521438 - RNA, 17 nt, Human
aagguucucauaggaaa

SEQ ID NO: 2521439 - RNA, 19 nt, Human
aaguagacuucauuuuucc

SEQ ID NO: 2521440 - RNA, 23 nt, Human
aaguagacuucauuuuuccuaac

SEQ ID NO: 2521441 - RNA, 15 nt, Human
aaguaggaaaaauaa

SEQ ID NO: 2521442 - RNA, 18 nt, Human
aagggcaaaauucccagg

SEQ ID NO: 2521443 - RNA, 22 nt, Human
aagggauuuuagucacacgugg

SEQ ID NO: 2521444 - RNA, 20 nt, Human
aagggcaacaauaaaauagc

SEQ ID NO: 2521445 - RNA, 21 nt, Human
aagggcaauaccguguugguu

SEQ ID NO: 2521446 - RNA, 19 nt, Human
aagggcagaacacuaaccu

SEQ ID NO: 2521447 - RNA, 18 nt, Human
aagggcagaacacuaacc

SEQ ID NO: 2521448 - RNA, 15 nt, Human
aagggcagagucaca

SEQ ID NO: 2521449 - RNA, 22 nt, Human
aagggcagggcaucuccugugc

SEQ ID NO: 2521450 - RNA, 21 nt, Human
aagggcaggaaggagagccug

SEQ ID NO: 2521451 - RNA, 22 nt, Human
aagggcaggaaggagagccugc

SEQ ID NO: 2521452 - RNA, 14 nt, Human
aagggauggcaaga

SEQ ID NO: 2521453 - RNA, 17 nt, Human
aagggauggcaagaugu

SEQ ID NO: 2521454 - RNA, 18 nt, Human
aagggauuacccaagcaa

SEQ ID NO: 2521455 - RNA, 17 nt, Human
aagggauuacccaagca

SEQ ID NO: 2521456 - RNA, 21 nt, Human
aagggauggaaaaggaagacu

SEQ ID NO: 2521457 - RNA, 24 nt, Human
aagggauggaggucacacugguag

SEQ ID NO: 2521458 - RNA, 20 nt, Human
aagggauuuuagucacacgu

SEQ ID NO: 2521459 - RNA, 17 nt, Human
aagggauuuuagucaca

SEQ ID NO: 2521460 - RNA, 19 nt, Human
aagggauuacccaagcaaa

SEQ ID NO: 2521461 - RNA, 17 nt, Human
aagggacugagaaauuu

SEQ ID NO: 2521462 - RNA, 15 nt, Human
aagggacugagaaau

SEQ ID NO: 2521463 - RNA, 18 nt, Human
aagggacgcuacccggga

SEQ ID NO: 2521464 - RNA, 12 nt, Human
aagggagaagaa

SEQ ID NO: 2521465 - RNA, 13 nt, Human
aagggagaaaaaa

SEQ ID NO: 2521466 - RNA, 20 nt, Human
aagggacuuggaagcuccgc

SEQ ID NO: 2521467 - RNA, 19 nt, Human
aagggauauauaagaugga

SEQ ID NO: 2521468 - RNA, 15 nt, Human
aagggaucugguccu

SEQ ID NO: 2521469 - RNA, 15 nt, Human
aagggauggaaaagg

SEQ ID NO: 2521470 - RNA, 20 nt, Human
aagggauggaaaaggaagac

SEQ ID NO: 2521471 - RNA, 16 nt, Human
aagcgauucuucugcu

SEQ ID NO: 2521472 - RNA, 16 nt, Human
aagcgugagccacugc

SEQ ID NO: 2521473 - RNA, 14 nt, Human
aagcgauucuucug

SEQ ID NO: 2521474 - RNA, 15 nt, Human
aagcgauucuucugc

SEQ ID NO: 2521475 - RNA, 18 nt, Human
aagccagcaggcucucag

SEQ ID NO: 2521476 - RNA, 15 nt, Human
aagccagcaggcucu

SEQ ID NO: 2521477 - RNA, 17 nt, Human
aagccaccucucccuca

SEQ ID NO: 2521478 - RNA, 17 nt, Human
aagccacugaagcuggg

SEQ ID NO: 2521479 - RNA, 13 nt, Human
aagccacugaagc

SEQ ID NO: 2521480 - RNA, 14 nt, Human
aagccacugaagcu

SEQ ID NO: 2521481 - RNA, 18 nt, Human
aagcagguucccaagcuc

SEQ ID NO: 2521482 - RNA, 21 nt, Human
aagccaccaacauacucccau

SEQ ID NO: 2521483 - RNA, 19 nt, Human
aagccagauuuuccugaaa

SEQ ID NO: 2521484 - RNA, 20 nt, Human
aagccaccucucccucaaca

SEQ ID NO: 2521485 - RNA, 13 nt, Human
aagccaccucucc

SEQ ID NO: 2521486 - RNA, 11 nt, Human
aagccaccucu

SEQ ID NO: 2521487 - RNA, 13 nt, Human
aagcacugugcua

SEQ ID NO: 2521488 - RNA, 12 nt, Human
aagcugccagcc

SEQ ID NO: 2521489 - RNA, 11 nt, Human
aagcugccagc

SEQ ID NO: 2521490 - RNA, 22 nt, Human
aagcugccagccgagauagcca

SEQ ID NO: 2521491 - RNA, 14 nt, Human
aagcugcugacagu

SEQ ID NO: 2521492 - RNA, 20 nt, Human
aagcgugagccacugcaccg

SEQ ID NO: 2521493 - RNA, 17 nt, Human
aagcgugagccacugca

SEQ ID NO: 2521494 - RNA, 18 nt, Human
aagcugcaucuagaggcu

SEQ ID NO: 2521495 - RNA, 21 nt, Human
aagcgugagccacugcaccgg

SEQ ID NO: 2521496 - RNA, 23 nt, Human
aaggaaugauuaauuaaaacaca

SEQ ID NO: 2521497 - RNA, 23 nt, Human
aaggaauccacucccaggcagcc

SEQ ID NO: 2521498 - RNA, 22 nt, Human
aaggaauccacucccaggcagc

SEQ ID NO: 2521499 - RNA, 21 nt, Human
aaggaauccacucccaggcag

SEQ ID NO: 2521500 - RNA, 23 nt, Human
aaggaauauauggcagaguugua

SEQ ID NO: 2521501 - RNA, 20 nt, Human
aaggaauccacucccaggca

SEQ ID NO: 2521502 - RNA, 21 nt, Human
aaggaauaugggagaaauagu

SEQ ID NO: 2521503 - RNA, 21 nt, Human
aaggaaucuccaguuuucagu

SEQ ID NO: 2521504 - RNA, 15 nt, Human
aaggaauucuaggca

SEQ ID NO: 2521505 - RNA, 21 nt, Human
aaggaauguagcugguuuccu

SEQ ID NO: 2521506 - RNA, 17 nt, Human
aaggaaucuccaguuuu

SEQ ID NO: 2521507 - RNA, 15 nt, Human
aagcugcccugccca

SEQ ID NO: 2521508 - RNA, 16 nt, Human
aagcugcugacagugu

SEQ ID NO: 2521509 - RNA, 22 nt, Human
aaggaauauauggcagaguugu

SEQ ID NO: 2521510 - RNA, 18 nt, Human
aaggaauauauggcagag

SEQ ID NO: 2521511 - RNA, 23 nt, Human
aagcuggaggacuagaaccugga

SEQ ID NO: 2521512 - RNA, 17 nt, Human
aaggaauauauggcaga

SEQ ID NO: 2521513 - RNA, 19 nt, Human
aagcuggaggacuagaacc

SEQ ID NO: 2521514 - RNA, 14 nt, Human
aagcuggaagcaca

SEQ ID NO: 2521515 - RNA, 21 nt, Human
aagcugcuuuaaaaaaauaca

SEQ ID NO: 2521516 - RNA, 11 nt, Human
aagcuggaagc

SEQ ID NO: 2521517 - RNA, 12 nt, Human
aaggaauuuuau

SEQ ID NO: 2521518 - RNA, 20 nt, Human
aaggaauucuaggcauccca

SEQ ID NO: 2521519 - RNA, 23 nt, Human
aaggacaaaaaugaacugaaguu

SEQ ID NO: 2521520 - RNA, 17 nt, Human
aaggacaaaaaugaacu

SEQ ID NO: 2521521 - RNA, 22 nt, Human
aaggacacagaugaaacacaaa

SEQ ID NO: 2521522 - RNA, 18 nt, Human
aaggacacagaugaaaca

SEQ ID NO: 2521523 - RNA, 14 nt, Human
aaggacacacuaau

SEQ ID NO: 2521524 - RNA, 14 nt, Human
aaggacaauuucaa

SEQ ID NO: 2521525 - RNA, 22 nt, Human
aaggacccggaggggccuggca

SEQ ID NO: 2521526 - RNA, 13 nt, Human
aaggaccuccuga

SEQ ID NO: 2521527 - RNA, 15 nt, Human
aaggcaaaaauguaa

SEQ ID NO: 2521528 - RNA, 21 nt, Human
aaggacuacguuaagggaagg

SEQ ID NO: 2521529 - RNA, 12 nt, Human
aaggcaaaauug

SEQ ID NO: 2521530 - RNA, 13 nt, Human
aaggacuaggguc

SEQ ID NO: 2521531 - RNA, 21 nt, Human
aaggacggccuucaacugaaa

SEQ ID NO: 2521532 - RNA, 14 nt, Human
aaggcagaagcagc

SEQ ID NO: 2521533 - RNA, 14 nt, Human
aaggcacugccuga

SEQ ID NO: 2521534 - RNA, 15 nt, Human
aaggcagaaagcaaa

SEQ ID NO: 2521535 - RNA, 16 nt, Human
aaggcagaaagcaaaa

SEQ ID NO: 2521536 - RNA, 17 nt, Human
aaggcagaaagcaaaau

SEQ ID NO: 2521537 - RNA, 19 nt, Human
aaggcagaaagcaaaauua

SEQ ID NO: 2521538 - RNA, 14 nt, Human
aaggcagccaccag

SEQ ID NO: 2521539 - RNA, 11 nt, Human
aaggcagccac

SEQ ID NO: 2521540 - RNA, 13 nt, Human
aaggcacugccug

SEQ ID NO: 2521541 - RNA, 12 nt, Human
aaggcacugccu

SEQ ID NO: 2521542 - RNA, 21 nt, Human
aaggcacucuguuauuuagac

SEQ ID NO: 2521543 - RNA, 17 nt, Human
aaggcaaaugcccaagg

SEQ ID NO: 2521544 - RNA, 14 nt, Human
aaggcaaaugacuu

SEQ ID NO: 2521545 - RNA, 15 nt, Human
aaggcaaaugacuuu

SEQ ID NO: 2521546 - RNA, 16 nt, Human
aaggcaaaugacuuug

SEQ ID NO: 2521547 - RNA, 16 nt, Human
aaggcaaaugcccaag

SEQ ID NO: 2521548 - RNA, 14 nt, Human
aaggcaaaauugca

SEQ ID NO: 2521549 - RNA, 15 nt, Human
aaggcaaaauugcaa

SEQ ID NO: 2521550 - RNA, 19 nt, Human
aaggcaaaauugcaaaucu

SEQ ID NO: 2521551 - RNA, 15 nt, Human
aaggcaaacccauca

SEQ ID NO: 2521552 - RNA, 20 nt, Human
aaggcaaacccaucaacaaa

SEQ ID NO: 2521553 - RNA, 20 nt, Human
aaggcaaagcacgaaauguu

SEQ ID NO: 2521554 - RNA, 20 nt, Human
acagugauuaccagggacug

SEQ ID NO: 2521555 - RNA, 23 nt, Human
acagugagucgaggacagggagg

SEQ ID NO: 2521556 - RNA, 21 nt, Human
acagugauuaccagggacuga

SEQ ID NO: 2521557 - RNA, 20 nt, Human
acagugcauauuccuuucua

SEQ ID NO: 2521558 - RNA, 13 nt, Human
acagugauuuuuu

SEQ ID NO: 2521559 - RNA, 10 nt, Human
acagugauuu

SEQ ID NO: 2521560 - RNA, 21 nt, Human
acagugcauauuccuuucuau

SEQ ID NO: 2521561 - RNA, 14 nt, Human
acagugggugcccc

SEQ ID NO: 2521562 - RNA, 21 nt, Human
acagugggugccccccuugcc

SEQ ID NO: 2521563 - RNA, 15 nt, Human
acagugguggcaggg

SEQ ID NO: 2521564 - RNA, 13 nt, Human
acagugguggcag

SEQ ID NO: 2521565 - RNA, 15 nt, Human
acaguggguggugga

SEQ ID NO: 2521566 - RNA, 17 nt, Human
acagugguggcagggcc

SEQ ID NO: 2521567 - RNA, 16 nt, Human
acagugguggcagggc

SEQ ID NO: 2521568 - RNA, 18 nt, Human
acagugguuuuauacuga

SEQ ID NO: 2521569 - RNA, 13 nt, Human
acaguguacaguc

SEQ ID NO: 2521570 - RNA, 12 nt, Human
acaguguacagu

SEQ ID NO: 2521571 - RNA, 17 nt, Human
acaguguacagucuugu

SEQ ID NO: 2521572 - RNA, 15 nt, Human
acaguguacagucuu

SEQ ID NO: 2521573 - RNA, 20 nt, Human
acagugguuuuauacugaag

SEQ ID NO: 2521574 - RNA, 23 nt, Human
acagugguggcagggccuagcug

SEQ ID NO: 2521575 - RNA, 22 nt, Human
acagugguuuuauacugaagga

SEQ ID NO: 2521576 - RNA, 18 nt, Human
acaguguacagucuugua

SEQ ID NO: 2521577 - RNA, 21 nt, Human
acagugucugggcugacuggg

SEQ ID NO: 2521578 - RNA, 19 nt, Human
acagugucugggcugacug

SEQ ID NO: 2521579 - RNA, 16 nt, Human
acagugucugggcuga

SEQ ID NO: 2521580 - RNA, 15 nt, Human
acagugucugggcug

SEQ ID NO: 2521581 - RNA, 23 nt, Human
acagugucuguaucggagacagu

SEQ ID NO: 2521582 - RNA, 14 nt, Human
acagcucuguccug

SEQ ID NO: 2521583 - RNA, 23 nt, Human
acagcuccuucuguccuacucug

SEQ ID NO: 2521584 - RNA, 18 nt, Human
acagcuccuucuguccua

SEQ ID NO: 2521585 - RNA, 16 nt, Human
acagcuccuucugucc

SEQ ID NO: 2521586 - RNA, 18 nt, Human
acagaggggguggccucc

SEQ ID NO: 2521587 - RNA, 17 nt, Human
acagaggggguggccuc

SEQ ID NO: 2521588 - RNA, 19 nt, Human
acagaggggguggccuccc

SEQ ID NO: 2521589 - RNA, 15 nt, Human
acagcuccuucuguc

SEQ ID NO: 2521590 - RNA, 23 nt, Human
acaggcaagcaccuccugccucg

SEQ ID NO: 2521591 - RNA, 20 nt, Human
acaggcaagcaccuccugcc

SEQ ID NO: 2521592 - RNA, 12 nt, Human
acagcugccugc

SEQ ID NO: 2521593 - RNA, 13 nt, Human
acagcugccuggg

SEQ ID NO: 2521594 - RNA, 16 nt, Human
acagcugccugcagua

SEQ ID NO: 2521595 - RNA, 17 nt, Human
acagcucuguccuggga

SEQ ID NO: 2521596 - RNA, 16 nt, Human
acagcucuguccuggg

SEQ ID NO: 2521597 - RNA, 13 nt, Human
acagcucuguccu

SEQ ID NO: 2521598 - RNA, 20 nt, Human
acagaggagggcgugacuca

SEQ ID NO: 2521599 - RNA, 23 nt, Human
acagcugagcacauucuggcuca

SEQ ID NO: 2521600 - RNA, 22 nt, Human
acagcugaggucucuugaggga

SEQ ID NO: 2521601 - RNA, 21 nt, Human
acagcugcagagacagagagg

SEQ ID NO: 2521602 - RNA, 17 nt, Human
acagcugcagagacaga

SEQ ID NO: 2521603 - RNA, 15 nt, Human
acagcugcagagaca

SEQ ID NO: 2521604 - RNA, 16 nt, Human
acagcugaggucucuu

SEQ ID NO: 2521605 - RNA, 20 nt, Human
acaggugggcuucccagugg

SEQ ID NO: 2521606 - RNA, 21 nt, Human
acagguggcaggaccaggacu

SEQ ID NO: 2521607 - RNA, 22 nt, Human
acaggugggcuucccaguggcu

SEQ ID NO: 2521608 - RNA, 23 nt, Human
acaggugugagucaccaagccca

SEQ ID NO: 2521609 - RNA, 22 nt, Human
acaggugugagucaccaagccc

SEQ ID NO: 2521610 - RNA, 19 nt, Human
acaggugugaaccaccaca

SEQ ID NO: 2521611 - RNA, 18 nt, Human
acagugagccugaauuuu

SEQ ID NO: 2521612 - RNA, 21 nt, Human
acagugagccugaauuuuguu

SEQ ID NO: 2521613 - RNA, 17 nt, Human
acagguuacaacagauu

SEQ ID NO: 2521614 - RNA, 16 nt, Human
acagguuacaacagau

SEQ ID NO: 2521615 - RNA, 17 nt, Human
acagugagccugaauuu

SEQ ID NO: 2521616 - RNA, 15 nt, Human
acagguuacaacaga

SEQ ID NO: 2521617 - RNA, 14 nt, Human
acagguuacaacag

SEQ ID NO: 2521618 - RNA, 13 nt, Human
acagguuacaaca

SEQ ID NO: 2521619 - RNA, 12 nt, Human
acagguuacaac

SEQ ID NO: 2521620 - RNA, 14 nt, Human
acagguguuuauac

SEQ ID NO: 2521621 - RNA, 22 nt, Human
acagugagucgaggacagggag

SEQ ID NO: 2521622 - RNA, 17 nt, Human
acagugaggugcccagc

SEQ ID NO: 2521623 - RNA, 23 nt, Human
acagugagcuuggaaaggaccag

SEQ ID NO: 2521624 - RNA, 21 nt, Human
acagggccuuuggcaggugca

SEQ ID NO: 2521625 - RNA, 22 nt, Human
acagggcuaagagcuagcgcug

SEQ ID NO: 2521626 - RNA, 19 nt, Human
acaggcaagcaccuccugc

SEQ ID NO: 2521627 - RNA, 14 nt, Human
acaggcaaugcugg

SEQ ID NO: 2521628 - RNA, 21 nt, Human
acaggucuuuccuaaggcugc

SEQ ID NO: 2521629 - RNA, 16 nt, Human
acaggucuucaucgaa

SEQ ID NO: 2521630 - RNA, 19 nt, Human
acaggucuccucuuaaaaa

SEQ ID NO: 2521631 - RNA, 20 nt, Human
acagguggcaggaccaggac

SEQ ID NO: 2521632 - RNA, 19 nt, Human
acagguggcaggaccagga

SEQ ID NO: 2521633 - RNA, 16 nt, Human
acagguggcaggacca

SEQ ID NO: 2521634 - RNA, 15 nt, Human
acagguggcaggacc

SEQ ID NO: 2521635 - RNA, 16 nt, Human
acagguggacacacaa

SEQ ID NO: 2521636 - RNA, 18 nt, Human
acagguggacacacaagg

SEQ ID NO: 2521637 - RNA, 18 nt, Human
acaggucuccucuuaaaa

SEQ ID NO: 2521638 - RNA, 23 nt, Human
acagggcuggcccagcccugcug

SEQ ID NO: 2521639 - RNA, 22 nt, Human
acagggcuggcccagcccugcu

SEQ ID NO: 2521640 - RNA, 21 nt, Human
acagggcuggcccagcccugc

SEQ ID NO: 2521641 - RNA, 20 nt, Human
acagggcuggcccagcccug

SEQ ID NO: 2521642 - RNA, 19 nt, Human
acagggcuggcccagcccu

SEQ ID NO: 2521643 - RNA, 18 nt, Human
acagggcuggcccagccc

SEQ ID NO: 2521644 - RNA, 17 nt, Human
acagggcuggcccagcc

SEQ ID NO: 2521645 - RNA, 16 nt, Human
acagggcuggcccagc

SEQ ID NO: 2521646 - RNA, 15 nt, Human
acagggcuggcccag

SEQ ID NO: 2521647 - RNA, 14 nt, Human
acagggcuggccca

SEQ ID NO: 2521648 - RNA, 13 nt, Human
acagggcuggccc

SEQ ID NO: 2521649 - RNA, 21 nt, Human
acagggcugauaagcuaacac

SEQ ID NO: 2521650 - RNA, 20 nt, Human
acaucaucaaggcacugccu

SEQ ID NO: 2521651 - RNA, 15 nt, Human
acaucaguuacucug

SEQ ID NO: 2521652 - RNA, 18 nt, Human
acaucaguuacucugaag

SEQ ID NO: 2521653 - RNA, 19 nt, Human
acaucaucaaggcacugcc

SEQ ID NO: 2521654 - RNA, 15 nt, Human
acaucaguuuuaacg

SEQ ID NO: 2521655 - RNA, 20 nt, Human
acaucaguuacucugaaggg

SEQ ID NO: 2521656 - RNA, 20 nt, Human
acaucccuuaccugggaaag

SEQ ID NO: 2521657 - RNA, 15 nt, Human
acauccucuucugcu

SEQ ID NO: 2521658 - RNA, 13 nt, Human
acauccucuucug

SEQ ID NO: 2521659 - RNA, 21 nt, Human
acaugauuuccuugaaugugg

SEQ ID NO: 2521660 - RNA, 16 nt, Human
acaugcaaggucauuu

SEQ ID NO: 2521661 - RNA, 15 nt, Human
acauccuacaagaca

SEQ ID NO: 2521662 - RNA, 21 nt, Human
acauccuccacguucugcuca

SEQ ID NO: 2521663 - RNA, 15 nt, Human
acauccuccucccac

SEQ ID NO: 2521664 - RNA, 13 nt, Human
acauccuccuccc

SEQ ID NO: 2521665 - RNA, 14 nt, Human
acauccuccgucca

SEQ ID NO: 2521666 - RNA, 17 nt, Human
acauccuccguccagcc

SEQ ID NO: 2521667 - RNA, 18 nt, Human
acaugccucucucaggcc

SEQ ID NO: 2521668 - RNA, 17 nt, Human
acaugccucucucaggc

SEQ ID NO: 2521669 - RNA, 16 nt, Human
acaugccucucucagg

SEQ ID NO: 2521670 - RNA, 15 nt, Human
acaugccucucucag

SEQ ID NO: 2521671 - RNA, 23 nt, Human
acaugauuuccuugaauguggcu

SEQ ID NO: 2521672 - RNA, 18 nt, Human
acaugcaaggucauuuuu

SEQ ID NO: 2521673 - RNA, 17 nt, Human
acaugcaaggucauuuu

SEQ ID NO: 2521674 - RNA, 14 nt, Human
acaugccacaagga

SEQ ID NO: 2521675 - RNA, 18 nt, Human
acaugccaagcacugugc

SEQ ID NO: 2521676 - RNA, 14 nt, Human
acaugccaagcacu

SEQ ID NO: 2521677 - RNA, 16 nt, Human
acauaagauaaaugug

SEQ ID NO: 2521678 - RNA, 14 nt, Human
acauaagcucagaa

SEQ ID NO: 2521679 - RNA, 15 nt, Human
acauaagauaaaugu

SEQ ID NO: 2521680 - RNA, 22 nt, Human
acauaagcggcguaaguuuaaa

SEQ ID NO: 2521681 - RNA, 19 nt, Human
acauaauuaaauuuugagu

SEQ ID NO: 2521682 - RNA, 15 nt, Human
acauaaguaauucaa

SEQ ID NO: 2521683 - RNA, 20 nt, Human
acauaauuaaaguguccauu

SEQ ID NO: 2521684 - RNA, 14 nt, Human
acaucaggaguuca

SEQ ID NO: 2521685 - RNA, 20 nt, Human
acaucaguggcauggcucca

SEQ ID NO: 2521686 - RNA, 22 nt, Human
acaucaguggcauggcuccagu

SEQ ID NO: 2521687 - RNA, 23 nt, Human
acaucaguggcauggcuccaguc

SEQ ID NO: 2521688 - RNA, 16 nt, Human
acauacaauuauuuuu

SEQ ID NO: 2521689 - RNA, 22 nt, Human
acauacaauuauuuuuacaguu

SEQ ID NO: 2521690 - RNA, 22 nt, Human
acaucagcuggucaaacaaacu

SEQ ID NO: 2521691 - RNA, 20 nt, Human
acauaauucaggaagcagcu

SEQ ID NO: 2521692 - RNA, 21 nt, Human
acauaauuuuuuuuuuuuaac

SEQ ID NO: 2521693 - RNA, 18 nt, Human
acauaauuuuuuauucaa

SEQ ID NO: 2521694 - RNA, 12 nt, Human
acauaauuuuuu

SEQ ID NO: 2521695 - RNA, 15 nt, Human
accagcccggccugc

SEQ ID NO: 2521696 - RNA, 14 nt, Human
accagcccggccug

SEQ ID NO: 2521697 - RNA, 18 nt, Human
accagccccugccccagc

SEQ ID NO: 2521698 - RNA, 16 nt, Human
accagccccugcccca

SEQ ID NO: 2521699 - RNA, 21 nt, Human
accagcccggccugcucccag

SEQ ID NO: 2521700 - RNA, 16 nt, Human
accagcccggccugcu

SEQ ID NO: 2521701 - RNA, 15 nt, Human
accagccccugcccc

SEQ ID NO: 2521702 - RNA, 12 nt, Human
accagccccugc

SEQ ID NO: 2521703 - RNA, 11 nt, Human
accagccccug

SEQ ID NO: 2521704 - RNA, 20 nt, Human
accagccccagugcccacag

SEQ ID NO: 2521705 - RNA, 19 nt, Human
accagccccagugcccaca

SEQ ID NO: 2521706 - RNA, 18 nt, Human
accagccccagugcccac

SEQ ID NO: 2521707 - RNA, 19 nt, Human
accagcagaucccagcuca

SEQ ID NO: 2521708 - RNA, 21 nt, Human
accagcagaucccagcucacg

SEQ ID NO: 2521709 - RNA, 17 nt, Human
accacgauguggcccug

SEQ ID NO: 2521710 - RNA, 18 nt, Human
accacgauguggcccugg

SEQ ID NO: 2521711 - RNA, 15 nt, Human
accagcagaucccag

SEQ ID NO: 2521712 - RNA, 17 nt, Human
accagccccagugccca

SEQ ID NO: 2521713 - RNA, 16 nt, Human
accagccccagugccc

SEQ ID NO: 2521714 - RNA, 13 nt, Human
accagcagagcac

SEQ ID NO: 2521715 - RNA, 12 nt, Human
accagcagagca

SEQ ID NO: 2521716 - RNA, 14 nt, Human
accagcagaaaugc

SEQ ID NO: 2521717 - RNA, 22 nt, Human
accaccuucccagcucucccuc

SEQ ID NO: 2521718 - RNA, 17 nt, Human
accaccuuuuauuacau

SEQ ID NO: 2521719 - RNA, 16 nt, Human
accacgauguggcccu

SEQ ID NO: 2521720 - RNA, 17 nt, Human
accacccuccccucucu

SEQ ID NO: 2521721 - RNA, 16 nt, Human
accacccuccccucuc

SEQ ID NO: 2521722 - RNA, 15 nt, Human
accacccuccccucu

SEQ ID NO: 2521723 - RNA, 14 nt, Human
accacccuccccuc

SEQ ID NO: 2521724 - RNA, 13 nt, Human
accacccuccccu

SEQ ID NO: 2521725 - RNA, 11 nt, Human
accacccuccc

SEQ ID NO: 2521726 - RNA, 21 nt, Human
accacccuccccucucuugca

SEQ ID NO: 2521727 - RNA, 18 nt, Human
accacccuccccucucuu

SEQ ID NO: 2521728 - RNA, 23 nt, Human
accacccuccccucucuugcacc

SEQ ID NO: 2521729 - RNA, 12 nt, Human
accaccugccca

SEQ ID NO: 2521730 - RNA, 13 nt, Human
accaccuucccag

SEQ ID NO: 2521731 - RNA, 14 nt, Human
accaccuucccagc

SEQ ID NO: 2521732 - RNA, 14 nt, Human
accaccuuucagau

SEQ ID NO: 2521733 - RNA, 20 nt, Human
accaccuucccagcucuccc

SEQ ID NO: 2521734 - RNA, 21 nt, Human
accaccuucccagcucucccu

SEQ ID NO: 2521735 - RNA, 15 nt, Human
accaccuucccagcu

SEQ ID NO: 2521736 - RNA, 16 nt, Human
accaccuucccagcuc

SEQ ID NO: 2521737 - RNA, 17 nt, Human
accaccuucccagcucu

SEQ ID NO: 2521738 - RNA, 19 nt, Human
accaccuucccagcucucc

SEQ ID NO: 2521739 - RNA, 20 nt, Human
accaaggcaaggcaggugcc

SEQ ID NO: 2521740 - RNA, 19 nt, Human
accaaggcaaggcaggugc

SEQ ID NO: 2521741 - RNA, 18 nt, Human
accaaggcaaggcaggug

SEQ ID NO: 2521742 - RNA, 22 nt, Human
accaccccgccugcccucaugg

SEQ ID NO: 2521743 - RNA, 20 nt, Human
accaaggcugauuaaaccaa

SEQ ID NO: 2521744 - RNA, 14 nt, Human
accaccccuuccug

SEQ ID NO: 2521745 - RNA, 22 nt, Human
accaccccugccuccacccucu

SEQ ID NO: 2521746 - RNA, 20 nt, Human
accaccccugccuccacccu

SEQ ID NO: 2521747 - RNA, 19 nt, Human
accaccccugccuccaccc

SEQ ID NO: 2521748 - RNA, 15 nt, Human
accaccccugccucc

SEQ ID NO: 2521749 - RNA, 14 nt, Human
accaccccugccuc

SEQ ID NO: 2521750 - RNA, 13 nt, Human
accaccccugccu

SEQ ID NO: 2521751 - RNA, 15 nt, Human
accaccccuuccugu

SEQ ID NO: 2521752 - RNA, 20 nt, Human
accacccuagucccuucccc

SEQ ID NO: 2521753 - RNA, 21 nt, Human
accacccuagucccuuccccu

SEQ ID NO: 2521754 - RNA, 12 nt, Human
acauuucucaau

SEQ ID NO: 2521755 - RNA, 20 nt, Human
acauuuaugauuuaauaaaa

SEQ ID NO: 2521756 - RNA, 19 nt, Human
acauuuaugauuuaauaaa

SEQ ID NO: 2521757 - RNA, 22 nt, Human
acauuuaugauuuaauaaaaua

SEQ ID NO: 2521758 - RNA, 14 nt, Human
accaagaaagcagg

SEQ ID NO: 2521759 - RNA, 11 nt, Human
accaagaagau

SEQ ID NO: 2521760 - RNA, 19 nt, Human
accaagaagccuuuccugu

SEQ ID NO: 2521761 - RNA, 16 nt, Human
accaagaagaugucuu

SEQ ID NO: 2521762 - RNA, 23 nt, Human
acauuucucuaagagaacaaugu

SEQ ID NO: 2521763 - RNA, 18 nt, Human
accaacuuucuguaaacu

SEQ ID NO: 2521764 - RNA, 22 nt, Human
acauuucuccuuugauaaaaua

SEQ ID NO: 2521765 - RNA, 19 nt, Human
accaacuuucuguaaacuc

SEQ ID NO: 2521766 - RNA, 13 nt, Human
accaagagagaaa

SEQ ID NO: 2521767 - RNA, 15 nt, Human
accaagagagaaaga

SEQ ID NO: 2521768 - RNA, 20 nt, Human
accaagagagaaagaaguag

SEQ ID NO: 2521769 - RNA, 24 nt, Human
accaagaagccuuuccuguagccu

SEQ ID NO: 2521770 - RNA, 20 nt, Human
accaagaagccuuuccugua

SEQ ID NO: 2521771 - RNA, 16 nt, Human
accaagacucugaaau

SEQ ID NO: 2521772 - RNA, 19 nt, Human
accaaggcugauuaaacca

SEQ ID NO: 2521773 - RNA, 16 nt, Human
accaaggaccccucac

SEQ ID NO: 2521774 - RNA, 18 nt, Human
accaaggaccccucaccu

SEQ ID NO: 2521775 - RNA, 17 nt, Human
accaaggcaaggcaggu

SEQ ID NO: 2521776 - RNA, 16 nt, Human
accaaggcaaggcagg

SEQ ID NO: 2521777 - RNA, 17 nt, Human
accaaggagaugaagca

SEQ ID NO: 2521778 - RNA, 17 nt, Human
acaugugaaaccuuuuu

SEQ ID NO: 2521779 - RNA, 15 nt, Human
acaugugaaaccuuu

SEQ ID NO: 2521780 - RNA, 14 nt, Human
acaugugaaaccuu

SEQ ID NO: 2521781 - RNA, 13 nt, Human
acaugugaaaccu

SEQ ID NO: 2521782 - RNA, 21 nt, Human
acaugugaaaccuuuuuuaag

SEQ ID NO: 2521783 - RNA, 20 nt, Human
acaugugaaaccuuuuuuaa

SEQ ID NO: 2521784 - RNA, 12 nt, Human
acaugugacaca

SEQ ID NO: 2521785 - RNA, 23 nt, Human
acaugugaaaccuuuuuuaagau

SEQ ID NO: 2521786 - RNA, 14 nt, Human
acaugugacacaua

SEQ ID NO: 2521787 - RNA, 19 nt, Human
acaugccucucucaggcca

SEQ ID NO: 2521788 - RNA, 23 nt, Human
acaugucuuuucuugcaugaggc

SEQ ID NO: 2521789 - RNA, 12 nt, Human
acaugugaaacc

SEQ ID NO: 2521790 - RNA, 21 nt, Human
acaugcauuugaggucaagua

SEQ ID NO: 2521791 - RNA, 17 nt, Human
acauuuccuaaauauau

SEQ ID NO: 2521792 - RNA, 16 nt, Human
acauuuccuaaauaua

SEQ ID NO: 2521793 - RNA, 17 nt, Human
acauuuaugauuuaaua

SEQ ID NO: 2521794 - RNA, 15 nt, Human
acauuuaugauuuaa

SEQ ID NO: 2521795 - RNA, 14 nt, Human
acauuuaugauuua

SEQ ID NO: 2521796 - RNA, 23 nt, Human
acauuuaucaaucaguauaauuc

SEQ ID NO: 2521797 - RNA, 15 nt, Human
acauuucccugugcu

SEQ ID NO: 2521798 - RNA, 21 nt, Human
acauuuagagaacuguggccg

SEQ ID NO: 2521799 - RNA, 15 nt, Human
acauuuauaauguuu

SEQ ID NO: 2521800 - RNA, 20 nt, Human
acauuuauaauguuugcuau

SEQ ID NO: 2521801 - RNA, 22 nt, Human
acauuuaucaaucaguauaauu

SEQ ID NO: 2521802 - RNA, 18 nt, Human
acauuuauaauguuugcu

SEQ ID NO: 2521803 - RNA, 14 nt, Human
acauuuacauguau

SEQ ID NO: 2521804 - RNA, 21 nt, Human
acauuuacauguauuauuuca

SEQ ID NO: 2521805 - RNA, 16 nt, Human
acauuuacauguauua

SEQ ID NO: 2521806 - RNA, 13 nt, Human
accauacuaauua

SEQ ID NO: 2521807 - RNA, 16 nt, Human
accauacuaauuauac

SEQ ID NO: 2521808 - RNA, 21 nt, Human
accauaguaccauuuauacaa

SEQ ID NO: 2521809 - RNA, 23 nt, Human
accauaguaccauuuauacaaau

SEQ ID NO: 2521810 - RNA, 14 nt, Human
accaucaagccacc

SEQ ID NO: 2521811 - RNA, 21 nt, Human
accauacuaauuauacccccu

SEQ ID NO: 2521812 - RNA, 15 nt, Human
accauacugagggac

SEQ ID NO: 2521813 - RNA, 17 nt, Human
accauaggucaccuuua

SEQ ID NO: 2521814 - RNA, 20 nt, Human
accauaguaccauuuauaca

SEQ ID NO: 2521815 - RNA, 15 nt, Human
accaucaagccacca

SEQ ID NO: 2521816 - RNA, 20 nt, Human
accaucagaaacacccucac

SEQ ID NO: 2521817 - RNA, 15 nt, Human
accaucauugaaauc

SEQ ID NO: 2521818 - RNA, 15 nt, Human
accaucagggacagg

SEQ ID NO: 2521819 - RNA, 14 nt, Human
accaucagggacag

SEQ ID NO: 2521820 - RNA, 23 nt, Human
accaucagaaacacccucacacu

SEQ ID NO: 2521821 - RNA, 12 nt, Human
accaucauugaa

SEQ ID NO: 2521822 - RNA, 14 nt, Human
accaucucuuuacc

SEQ ID NO: 2521823 - RNA, 19 nt, Human
accaucauuggaaaugaaa

SEQ ID NO: 2521824 - RNA, 23 nt, Human
accaucauugaaaucuuuuugcu

SEQ ID NO: 2521825 - RNA, 22 nt, Human
accauccacucuacccucccac

SEQ ID NO: 2521826 - RNA, 23 nt, Human
accauccacucuacccucccacc

SEQ ID NO: 2521827 - RNA, 23 nt, Human
accaugaacagaaaacauucuga

SEQ ID NO: 2521828 - RNA, 18 nt, Human
accaugaacagaaaacau

SEQ ID NO: 2521829 - RNA, 15 nt, Human
accaugaagacagga

SEQ ID NO: 2521830 - RNA, 14 nt, Human
accaugaagacagg

SEQ ID NO: 2521831 - RNA, 19 nt, Human
accaugaagagauuuuuca

SEQ ID NO: 2521832 - RNA, 14 nt, Human
accaugaaacaaag

SEQ ID NO: 2521833 - RNA, 21 nt, Human
accaucuuuuccucauuuuca

SEQ ID NO: 2521834 - RNA, 15 nt, Human
accaugaaacaaagc

SEQ ID NO: 2521835 - RNA, 16 nt, Human
acccacaugugacaca

SEQ ID NO: 2521836 - RNA, 15 nt, Human
acccacaugugacac

SEQ ID NO: 2521837 - RNA, 13 nt, Human
acccacagggcua

SEQ ID NO: 2521838 - RNA, 18 nt, Human
acccacaggcccacagua

SEQ ID NO: 2521839 - RNA, 17 nt, Human
acccacccccacccaag

SEQ ID NO: 2521840 - RNA, 13 nt, Human
acccaccccugug

SEQ ID NO: 2521841 - RNA, 12 nt, Human
acccaccccugu

SEQ ID NO: 2521842 - RNA, 16 nt, Human
acccacccagcaccca

SEQ ID NO: 2521843 - RNA, 15 nt, Human
acccacccccaccca

SEQ ID NO: 2521844 - RNA, 15 nt, Human
acccaccaccaugcc

SEQ ID NO: 2521845 - RNA, 17 nt, Human
acccaccccugugcucc

SEQ ID NO: 2521846 - RNA, 16 nt, Human
acccaccccugugcuc

SEQ ID NO: 2521847 - RNA, 15 nt, Human
acccaccccugugcu

SEQ ID NO: 2521848 - RNA, 14 nt, Human
acccaccccugugc

SEQ ID NO: 2521849 - RNA, 15 nt, Human
acccaccgcccuugc

SEQ ID NO: 2521850 - RNA, 20 nt, Human
acccaccgccacaauaaaga

SEQ ID NO: 2521851 - RNA, 15 nt, Human
acccacccuccuuuc

SEQ ID NO: 2521852 - RNA, 15 nt, Human
acccauagcuuccau

SEQ ID NO: 2521853 - RNA, 11 nt, Human
acccauauccc

SEQ ID NO: 2521854 - RNA, 16 nt, Human
acccauagcuuccaug

SEQ ID NO: 2521855 - RNA, 21 nt, Human
acccauauccccucucccccc

SEQ ID NO: 2521856 - RNA, 18 nt, Human
acccaucacgccugugca

SEQ ID NO: 2521857 - RNA, 14 nt, Human
acccaucagaagga

SEQ ID NO: 2521858 - RNA, 18 nt, Human
acccaucagaaggagaag

SEQ ID NO: 2521859 - RNA, 15 nt, Human
acccaucaacaaaaa

SEQ ID NO: 2521860 - RNA, 20 nt, Human
acccauauccccucuccccc

SEQ ID NO: 2521861 - RNA, 19 nt, Human
acccauauccccucucccc

SEQ ID NO: 2521862 - RNA, 15 nt, Human
acccauauccccucu

SEQ ID NO: 2521863 - RNA, 14 nt, Human
acccauauccccuc

SEQ ID NO: 2521864 - RNA, 23 nt, Human
acccauauccuuacccuccuugg

SEQ ID NO: 2521865 - RNA, 13 nt, Human
acccaugcugccc

SEQ ID NO: 2521866 - RNA, 18 nt, Human
acccaugaugagcuccuc

SEQ ID NO: 2521867 - RNA, 17 nt, Human
acccauccccgcagugu

SEQ ID NO: 2521868 - RNA, 19 nt, Human
acccaucagaaggagaagg

SEQ ID NO: 2521869 - RNA, 20 nt, Human
acccaugaugagcuccucuu

SEQ ID NO: 2521870 - RNA, 21 nt, Human
aauuuccuuuauauuuaguga

SEQ ID NO: 2521871 - RNA, 16 nt, Human
aauuuccuuuauauuu

SEQ ID NO: 2521872 - RNA, 21 nt, Human
aauuuccuguuggauuuguuu

SEQ ID NO: 2521873 - RNA, 20 nt, Human
aauuuccuguuggauuuguu

SEQ ID NO: 2521874 - RNA, 22 nt, Human
aauuuccuggugugaagguccu

SEQ ID NO: 2521875 - RNA, 18 nt, Human
aauuuccuggugugaagg

SEQ ID NO: 2521876 - RNA, 18 nt, Human
aauuucgccguugaagag

SEQ ID NO: 2521877 - RNA, 21 nt, Human
aauuucgccguugaagaggaa

SEQ ID NO: 2521878 - RNA, 16 nt, Human
aauuucaaaaugcuuu

SEQ ID NO: 2521879 - RNA, 16 nt, Human
aauuucaccuguaaac

SEQ ID NO: 2521880 - RNA, 14 nt, Human
aauuucacauuaau

SEQ ID NO: 2521881 - RNA, 17 nt, Human
aauuucaaaaauauaac

SEQ ID NO: 2521882 - RNA, 16 nt, Human
aauuucaaaaauauaa

SEQ ID NO: 2521883 - RNA, 15 nt, Human
aauuucaaaaauaua

SEQ ID NO: 2521884 - RNA, 20 nt, Human
aauuuauuuuugcauggcac

SEQ ID NO: 2521885 - RNA, 19 nt, Human
aauuucaaaaauauaacuu

SEQ ID NO: 2521886 - RNA, 12 nt, Human
aauuucaaaaug

SEQ ID NO: 2521887 - RNA, 21 nt, Human
aauuuauuuugucgaauuuuu

SEQ ID NO: 2521888 - RNA, 17 nt, Human
aauuuauuuugucgaau

SEQ ID NO: 2521889 - RNA, 12 nt, Human
aauuuauuuugu

SEQ ID NO: 2521890 - RNA, 15 nt, Human
aauuuauuuuugcau

SEQ ID NO: 2521891 - RNA, 20 nt, Human
aauuucagguuuuguaaaga

SEQ ID NO: 2521892 - RNA, 22 nt, Human
aauuucagguuuuguaaagaug

SEQ ID NO: 2521893 - RNA, 19 nt, Human
aauuucaccuguaaaccug

SEQ ID NO: 2521894 - RNA, 20 nt, Human
aauuucaccuguaaaccuga

SEQ ID NO: 2521895 - RNA, 16 nt, Human
aauuguauagagauau

SEQ ID NO: 2521896 - RNA, 13 nt, Human
aauuucagacucc

SEQ ID NO: 2521897 - RNA, 23 nt, Human
aauuucagacucccauuccugaa

SEQ ID NO: 2521898 - RNA, 20 nt, Human
aauuuauuuaugggauccug

SEQ ID NO: 2521899 - RNA, 17 nt, Human
aauuuauuuauacuauu

SEQ ID NO: 2521900 - RNA, 20 nt, Human
aauuuauuuauacuauuuag

SEQ ID NO: 2521901 - RNA, 22 nt, Human
aauuuauuuccuaguucuguag

SEQ ID NO: 2521902 - RNA, 19 nt, Human
aauuuauuuccuaguucug

SEQ ID NO: 2521903 - RNA, 16 nt, Human
aauuuauuuccuaguu

SEQ ID NO: 2521904 - RNA, 17 nt, Human
aauuuauuuauuaagau

SEQ ID NO: 2521905 - RNA, 16 nt, Human
aauuuauugcuugaua

SEQ ID NO: 2521906 - RNA, 16 nt, Human
aauuuauuuauuaaga

SEQ ID NO: 2521907 - RNA, 22 nt, Human
aauuuauuuauuaagauggauu

SEQ ID NO: 2521908 - RNA, 21 nt, Human
aauuuauucaauuccucuggg

SEQ ID NO: 2521909 - RNA, 18 nt, Human
aauuuauuauugaaauug

SEQ ID NO: 2521910 - RNA, 17 nt, Human
aauuuauuauugaaauu

SEQ ID NO: 2521911 - RNA, 16 nt, Human
aauuuauuauugaaau

SEQ ID NO: 2521912 - RNA, 12 nt, Human
aauuuauucaau

SEQ ID NO: 2521913 - RNA, 16 nt, Human
aauuuauuauuguucu

SEQ ID NO: 2521914 - RNA, 14 nt, Human
aauuuauucaagaa

SEQ ID NO: 2521915 - RNA, 11 nt, Human
aauugucccuu

SEQ ID NO: 2521916 - RNA, 16 nt, Human
aauugucccuuaaaca

SEQ ID NO: 2521917 - RNA, 18 nt, Human
aauugucccuuaaacaaa

SEQ ID NO: 2521918 - RNA, 17 nt, Human
aauuguccguguucaua

SEQ ID NO: 2521919 - RNA, 13 nt, Human
aauuguccccagu

SEQ ID NO: 2521920 - RNA, 14 nt, Human
aauugugauguguc

SEQ ID NO: 2521921 - RNA, 15 nt, Human
aauugugaugugucc

SEQ ID NO: 2521922 - RNA, 11 nt, Human
aauugugaugu

SEQ ID NO: 2521923 - RNA, 12 nt, Human
aauugugaaaaa

SEQ ID NO: 2521924 - RNA, 21 nt, Human
aauugugggucuauuucuagu

SEQ ID NO: 2521925 - RNA, 17 nt, Human
aauugugggucuauuuc

SEQ ID NO: 2521926 - RNA, 16 nt, Human
aauugugggucuauuu

SEQ ID NO: 2521927 - RNA, 14 nt, Human
aauugugucugcag

SEQ ID NO: 2521928 - RNA, 13 nt, Human
aauugugucugca

SEQ ID NO: 2521929 - RNA, 17 nt, Human
aauuuauuauggcacau

SEQ ID NO: 2521930 - RNA, 20 nt, Human
aauugugccgagaaaagcau

SEQ ID NO: 2521931 - RNA, 21 nt, Human
aauuguggggaugaugaaaua

SEQ ID NO: 2521932 - RNA, 14 nt, Human
aauuguaacuguuc

SEQ ID NO: 2521933 - RNA, 16 nt, Human
aauuguaacuguucuu

SEQ ID NO: 2521934 - RNA, 12 nt, Human
aauuguauauuc

SEQ ID NO: 2521935 - RNA, 23 nt, Human
aauuguauagagauaugcagaag

SEQ ID NO: 2521936 - RNA, 24 nt, Human
aauuguaaauugaaucaguauaaa

SEQ ID NO: 2521937 - RNA, 16 nt, Human
aauuguaaggaaugau

SEQ ID NO: 2521938 - RNA, 12 nt, Human
aauuguaaggaa

SEQ ID NO: 2521939 - RNA, 17 nt, Human
aauuguaaauugaauca

SEQ ID NO: 2521940 - RNA, 21 nt, Human
aauuguaaaauuguauagaga

SEQ ID NO: 2521941 - RNA, 18 nt, Human
aauuguaaaauuguauag

SEQ ID NO: 2521942 - RNA, 17 nt, Human
aauuguaaaacugaggc

SEQ ID NO: 2521943 - RNA, 17 nt, Human
aauuguauauucacuuu

SEQ ID NO: 2521944 - RNA, 16 nt, Human
aauuguauauucacuu

SEQ ID NO: 2521945 - RNA, 14 nt, Human
aauuguauauucac

SEQ ID NO: 2521946 - RNA, 13 nt, Human
aauuguauauuca

SEQ ID NO: 2521947 - RNA, 21 nt, Human
aauuguaucagaggccuauaa

SEQ ID NO: 2521948 - RNA, 20 nt, Human
aauuguaucagaggccuaua

SEQ ID NO: 2521949 - RNA, 17 nt, Human
aauuguaucagaggccu

SEQ ID NO: 2521950 - RNA, 22 nt, Human
aauuguaucagaggccuauaau

SEQ ID NO: 2521951 - RNA, 18 nt, Human
aauuguaucauuugaaca

SEQ ID NO: 2521952 - RNA, 19 nt, Human
aauuguaucguauagcugu

SEQ ID NO: 2521953 - RNA, 24 nt, Human
aauuguaucauuugaacaacuagg

SEQ ID NO: 2521954 - RNA, 21 nt, Human
aauuguaucguauagcuguau

SEQ ID NO: 2521955 - RNA, 20 nt, Human
aauuguaucguauagcugua

SEQ ID NO: 2521956 - RNA, 22 nt, Human
aauuguaucguauagcuguauu

SEQ ID NO: 2521957 - RNA, 13 nt, Human
aauuguaucuagu

SEQ ID NO: 2521958 - RNA, 22 nt, Human
aauuguauguuaaguuacuuca

SEQ ID NO: 2521959 - RNA, 12 nt, Human
aauuguauguua

SEQ ID NO: 2521960 - RNA, 20 nt, Human
aauuguaucuagugcagcug

SEQ ID NO: 2521961 - RNA, 23 nt, Human
aauuguaucuagugcagcugauu

SEQ ID NO: 2521962 - RNA, 16 nt, Human
aauuguauuuuaguaa

SEQ ID NO: 2521963 - RNA, 19 nt, Human
aaugucacaggcaggucca

SEQ ID NO: 2521964 - RNA, 16 nt, Human
aaugucacaggcaggu

SEQ ID NO: 2521965 - RNA, 19 nt, Human
aaugucaccaccuucccag

SEQ ID NO: 2521966 - RNA, 20 nt, Human
aaugucaccaccuucccagc

SEQ ID NO: 2521967 - RNA, 19 nt, Human
aauggucccauccaggcag

SEQ ID NO: 2521968 - RNA, 15 nt, Human
aaugucaccaccuuc

SEQ ID NO: 2521969 - RNA, 16 nt, Human
aaugucaccaccuucc

SEQ ID NO: 2521970 - RNA, 18 nt, Human
aaugucaccaccuuccca

SEQ ID NO: 2521971 - RNA, 21 nt, Human
aauuggguggggggcuucaua

SEQ ID NO: 2521972 - RNA, 22 nt, Human
aauuggguggggggcuucauac

SEQ ID NO: 2521973 - RNA, 23 nt, Human
aauuggguggggggcuucauaca

SEQ ID NO: 2521974 - RNA, 18 nt, Human
aauugguaucaagaaagu

SEQ ID NO: 2521975 - RNA, 21 nt, Human
aauugguuggagaauuuaggu

SEQ ID NO: 2521976 - RNA, 15 nt, Human
aauugguucuuuauu

SEQ ID NO: 2521977 - RNA, 18 nt, Human
aauuuugugaagcaaaau

SEQ ID NO: 2521978 - RNA, 16 nt, Human
aauuuugugcccccau

SEQ ID NO: 2521979 - RNA, 17 nt, Human
aauuuugugaagcaaaa

SEQ ID NO: 2521980 - RNA, 16 nt, Human
aauuuugguuguauuc

SEQ ID NO: 2521981 - RNA, 15 nt, Human
aauuuugguuguauu

SEQ ID NO: 2521982 - RNA, 22 nt, Human
aauuuuggccaaaguguuaauc

SEQ ID NO: 2521983 - RNA, 14 nt, Human
aauuuugauguuuu

SEQ ID NO: 2521984 - RNA, 14 nt, Human
aauuuugaugaaca

SEQ ID NO: 2521985 - RNA, 20 nt, Human
aauuuucaguauaauuuaac

SEQ ID NO: 2521986 - RNA, 16 nt, Human
aauuuugaugaacaaa

SEQ ID NO: 2521987 - RNA, 17 nt, Human
aauuuuggccaaagugu

SEQ ID NO: 2521988 - RNA, 18 nt, Human
aauuuucaucuaggauuu

SEQ ID NO: 2521989 - RNA, 21 nt, Human
aauuuucacaugaacauacug

SEQ ID NO: 2521990 - RNA, 17 nt, Human
aauuuucagaccccagc

SEQ ID NO: 2521991 - RNA, 17 nt, Human
aauuuucacaugaacau

SEQ ID NO: 2521992 - RNA, 16 nt, Human
aauuuucacaugaaca

SEQ ID NO: 2521993 - RNA, 14 nt, Human
aauuuucacaugaa

SEQ ID NO: 2521994 - RNA, 19 nt, Human
aauuuucacacacgugaga

SEQ ID NO: 2521995 - RNA, 19 nt, Human
aauuuucaaguaauuguga

SEQ ID NO: 2521996 - RNA, 12 nt, Human
aauuuuauuccu

SEQ ID NO: 2521997 - RNA, 15 nt, Human
aauuuucaaguaauu

SEQ ID NO: 2521998 - RNA, 21 nt, Human
acaaaaugacauuuugccaaa

SEQ ID NO: 2521999 - RNA, 14 nt, Human
acaaaaucuguuua

SEQ ID NO: 2522000 - RNA, 18 nt, Human
aauuuugguuguauucuu

SEQ ID NO: 2522001 - RNA, 22 nt, Human
acaaaaugaaacgcaaccacca

SEQ ID NO: 2522002 - RNA, 13 nt, Human
acaaaaugaaacg

SEQ ID NO: 2522003 - RNA, 16 nt, Human
acaaagaaauuaugug

SEQ ID NO: 2522004 - RNA, 14 nt, Human
acaaagaaauuaug

SEQ ID NO: 2522005 - RNA, 13 nt, Human
acaaacuuuuaua

SEQ ID NO: 2522006 - RNA, 12 nt, Human
acaaagaaauua

SEQ ID NO: 2522007 - RNA, 15 nt, Human
acaagaaaugaaagc

SEQ ID NO: 2522008 - RNA, 16 nt, Human
acaagaaaugaaagca

SEQ ID NO: 2522009 - RNA, 21 nt, Human
acaaggaugaauuaaguuuuu

SEQ ID NO: 2522010 - RNA, 12 nt, Human
acaaccuggaga

SEQ ID NO: 2522011 - RNA, 23 nt, Human
acaaccugcuuggguggagaagc

SEQ ID NO: 2522012 - RNA, 22 nt, Human
acaaccugcuuggguggagaag

SEQ ID NO: 2522013 - RNA, 13 nt, Human
acaaccguuggaa

SEQ ID NO: 2522014 - RNA, 14 nt, Human
acaacccugcaaag

SEQ ID NO: 2522015 - RNA, 19 nt, Human
acaacccugcaaaggacug

SEQ ID NO: 2522016 - RNA, 17 nt, Human
acaacccuguuuuauac

SEQ ID NO: 2522017 - RNA, 16 nt, Human
acaaccucaacugccu

SEQ ID NO: 2522018 - RNA, 18 nt, Human
acaacccuguuuuauacu

SEQ ID NO: 2522019 - RNA, 19 nt, Human
acaaccgaugcuccagcca

SEQ ID NO: 2522020 - RNA, 20 nt, Human
acaaccgaugcuccagccaa

SEQ ID NO: 2522021 - RNA, 22 nt, Human
acaaccgaugcuccagccaacc

SEQ ID NO: 2522022 - RNA, 18 nt, Human
acaaccugaaccuaggag

SEQ ID NO: 2522023 - RNA, 14 nt, Human
acaaccugaaccua

SEQ ID NO: 2522024 - RNA, 15 nt, Human
acaaccucaacugcc

SEQ ID NO: 2522025 - RNA, 13 nt, Human
acaaccugaaccu

SEQ ID NO: 2522026 - RNA, 13 nt, Human
acaagaaaugaaa

SEQ ID NO: 2522027 - RNA, 16 nt, Human
acacgggggcagcuga

SEQ ID NO: 2522028 - RNA, 20 nt, Human
acacgggagccgcuggcaga

SEQ ID NO: 2522029 - RNA, 21 nt, Human
acacggaucugagaaucuuua

SEQ ID NO: 2522030 - RNA, 20 nt, Human
acacggccacaucaaagagg

SEQ ID NO: 2522031 - RNA, 17 nt, Human
acacgggguauuuuagg

SEQ ID NO: 2522032 - RNA, 16 nt, Human
acacgggguauuuuag

SEQ ID NO: 2522033 - RNA, 23 nt, Human
acacgggggcagcugauacaaau

SEQ ID NO: 2522034 - RNA, 20 nt, Human
acacguaaugaaacuuggau

SEQ ID NO: 2522035 - RNA, 19 nt, Human
acacguaccucucaucagu

SEQ ID NO: 2522036 - RNA, 22 nt, Human
acacgguuugaagccuggaaca

SEQ ID NO: 2522037 - RNA, 19 nt, Human
acacgguuugaagccugga

SEQ ID NO: 2522038 - RNA, 16 nt, Human
acacguacuuaaauga

SEQ ID NO: 2522039 - RNA, 21 nt, Human
acacgaauauugcugauggug

SEQ ID NO: 2522040 - RNA, 15 nt, Human
acacgaauauugcug

SEQ ID NO: 2522041 - RNA, 19 nt, Human
acacggaucugagaaucuu

SEQ ID NO: 2522042 - RNA, 17 nt, Human
acacggaucugagaauc

SEQ ID NO: 2522043 - RNA, 16 nt, Human
acacggaucugagaau

SEQ ID NO: 2522044 - RNA, 15 nt, Human
acacggaucugagaa

SEQ ID NO: 2522045 - RNA, 12 nt, Human
acacggccacau

SEQ ID NO: 2522046 - RNA, 14 nt, Human
acacggccacauca

SEQ ID NO: 2522047 - RNA, 14 nt, Human
acacggaggcaucu

SEQ ID NO: 2522048 - RNA, 17 nt, Human
acacggaggcaucugca

SEQ ID NO: 2522049 - RNA, 18 nt, Human
acacggaggcaucugcac

SEQ ID NO: 2522050 - RNA, 16 nt, Human
acacauuuuuuaaaug

SEQ ID NO: 2522051 - RNA, 18 nt, Human
acacauuuuuuaaaugca

SEQ ID NO: 2522052 - RNA, 19 nt, Human
acacauuuuuuaaaugcac

SEQ ID NO: 2522053 - RNA, 15 nt, Human
acaccacuacauucu

SEQ ID NO: 2522054 - RNA, 14 nt, Human
acacgaauauugcu

SEQ ID NO: 2522055 - RNA, 12 nt, Human
acacgaauauug

SEQ ID NO: 2522056 - RNA, 17 nt, Human
acaccacuacauucugu

SEQ ID NO: 2522057 - RNA, 20 nt, Human
acaccacuacauucuguuaa

SEQ ID NO: 2522058 - RNA, 21 nt, Human
acacagcucuucuccaggcug

SEQ ID NO: 2522059 - RNA, 20 nt, Human
acacagcucuucuccaggcu

SEQ ID NO: 2522060 - RNA, 14 nt, Human
acacauuuuuuaaa

SEQ ID NO: 2522061 - RNA, 19 nt, Human
acaauuuuuuuaauuuugu

SEQ ID NO: 2522062 - RNA, 18 nt, Human
acaauuuuuuuaauuuug

SEQ ID NO: 2522063 - RNA, 17 nt, Human
acaauuuuuuuaauuuu

SEQ ID NO: 2522064 - RNA, 14 nt, Human
acaauuuuuuuaau

SEQ ID NO: 2522065 - RNA, 16 nt, Human
acaauuuuuuaucaug

SEQ ID NO: 2522066 - RNA, 22 nt, Human
acaauuuuuuaucaugcauguc

SEQ ID NO: 2522067 - RNA, 19 nt, Human
acacaaaaguuucucuuuu

SEQ ID NO: 2522068 - RNA, 21 nt, Human
acaauuuuuuuaauuuuguau

SEQ ID NO: 2522069 - RNA, 19 nt, Human
acacagcucuucuccaggc

SEQ ID NO: 2522070 - RNA, 22 nt, Human
acaaggauagaugcuggcccag

SEQ ID NO: 2522071 - RNA, 20 nt, Human
acaaggaugaucuaggaaga

SEQ ID NO: 2522072 - RNA, 16 nt, Human
acaaggauugcuacug

SEQ ID NO: 2522073 - RNA, 18 nt, Human
acaauuauaucaguccuc

SEQ ID NO: 2522074 - RNA, 18 nt, Human
acaauuauuuuuacaguu

SEQ ID NO: 2522075 - RNA, 14 nt, Human
acaauuuauuaugg

SEQ ID NO: 2522076 - RNA, 19 nt, Human
acaauuuacaaagugugua

SEQ ID NO: 2522077 - RNA, 17 nt, Human
acaauuuacaaagugug

SEQ ID NO: 2522078 - RNA, 13 nt, Human
acaauuuacaaag

SEQ ID NO: 2522079 - RNA, 21 nt, Human
acaauuguuugggguugaaaa

SEQ ID NO: 2522080 - RNA, 23 nt, Human
acaauuuacaaaguguguauuaa

SEQ ID NO: 2522081 - RNA, 20 nt, Human
acaauuuacaaaguguguau

SEQ ID NO: 2522082 - RNA, 18 nt, Human
acaauuuaugaauugaau

SEQ ID NO: 2522083 - RNA, 13 nt, Human
acaauuuauuaug

SEQ ID NO: 2522084 - RNA, 20 nt, Human
acaauucaugaacuucgcau

SEQ ID NO: 2522085 - RNA, 15 nt, Human
acaauucaugaacuu

SEQ ID NO: 2522086 - RNA, 14 nt, Human
acaauucaugaacu

SEQ ID NO: 2522087 - RNA, 21 nt, Human
acaauuauuuuuacaguucuc

SEQ ID NO: 2522088 - RNA, 15 nt, Human
acaauucccugcugu

SEQ ID NO: 2522089 - RNA, 14 nt, Human
acaauuccaaagga

SEQ ID NO: 2522090 - RNA, 18 nt, Human
acaauuccaaaggaaucu

SEQ ID NO: 2522091 - RNA, 22 nt, Human
acaauuccucuacuaacaauca

SEQ ID NO: 2522092 - RNA, 16 nt, Human
acaauucccugcuguc

SEQ ID NO: 2522093 - RNA, 23 nt, Human
acaauuccucuacuaacaaucag

SEQ ID NO: 2522094 - RNA, 15 nt, Human
acaauucuacauugu

SEQ ID NO: 2522095 - RNA, 13 nt, Human
acaauuuaaagca

SEQ ID NO: 2522096 - RNA, 20 nt, Human
acaauuuaaagcaaaggagu

SEQ ID NO: 2522097 - RNA, 14 nt, Human
acaauuuaaagcaa

SEQ ID NO: 2522098 - RNA, 14 nt, Human
acagacaaagcgug

SEQ ID NO: 2522099 - RNA, 15 nt, Human
acagacacacacacg

SEQ ID NO: 2522100 - RNA, 11 nt, Human
acagacacaca

SEQ ID NO: 2522101 - RNA, 14 nt, Human
acagacacacacac

SEQ ID NO: 2522102 - RNA, 13 nt, Human
acagacacacaca

SEQ ID NO: 2522103 - RNA, 12 nt, Human
acagacacacac

SEQ ID NO: 2522104 - RNA, 16 nt, Human
acagaagucaugaagc

SEQ ID NO: 2522105 - RNA, 14 nt, Human
acagacaacagaag

SEQ ID NO: 2522106 - RNA, 21 nt, Human
acagacaagguagcccuggcc

SEQ ID NO: 2522107 - RNA, 22 nt, Human
acagacaagguagcccuggcca

SEQ ID NO: 2522108 - RNA, 16 nt, Human
acagaagcuccaggua

SEQ ID NO: 2522109 - RNA, 19 nt, Human
acagaagcuucagaaguuu

SEQ ID NO: 2522110 - RNA, 18 nt, Human
acagaagcuucagaaguu

SEQ ID NO: 2522111 - RNA, 13 nt, Human
acagaagcuucca

SEQ ID NO: 2522112 - RNA, 21 nt, Human
acagaagccaggagcaaaugu

SEQ ID NO: 2522113 - RNA, 18 nt, Human
acagaagccaggagcaaa

SEQ ID NO: 2522114 - RNA, 14 nt, Human
acagaagcuucaga

SEQ ID NO: 2522115 - RNA, 13 nt, Human
acagaagcuucag

SEQ ID NO: 2522116 - RNA, 21 nt, Human
acagaagcugaagugcaucca

SEQ ID NO: 2522117 - RNA, 21 nt, Human
acagaagccucacugcaagca

SEQ ID NO: 2522118 - RNA, 23 nt, Human
acagaggccaugggccuccugug

SEQ ID NO: 2522119 - RNA, 21 nt, Human
acagaggccaugggccuccug

SEQ ID NO: 2522120 - RNA, 17 nt, Human
acagaggccaugggccu

SEQ ID NO: 2522121 - RNA, 20 nt, Human
acagaggaugagcucuaccc

SEQ ID NO: 2522122 - RNA, 17 nt, Human
acagaggccauggcaga

SEQ ID NO: 2522123 - RNA, 16 nt, Human
acagaggaugagcucu

SEQ ID NO: 2522124 - RNA, 17 nt, Human
acagaggagagucccag

SEQ ID NO: 2522125 - RNA, 13 nt, Human
acagaggcagccc

SEQ ID NO: 2522126 - RNA, 23 nt, Human
acagaggacaguauuugugggga

SEQ ID NO: 2522127 - RNA, 18 nt, Human
acagaggaagagcaggca

SEQ ID NO: 2522128 - RNA, 22 nt, Human
acagacacacacacgcacgcac

SEQ ID NO: 2522129 - RNA, 18 nt, Human
acagacacacacacgcac

SEQ ID NO: 2522130 - RNA, 17 nt, Human
acagacacacacacgca

SEQ ID NO: 2522131 - RNA, 16 nt, Human
acagacacacacacgc

SEQ ID NO: 2522132 - RNA, 17 nt, Human
acagaggaagagcaggc

SEQ ID NO: 2522133 - RNA, 23 nt, Human
acagacacacacacgcacgcaca

SEQ ID NO: 2522134 - RNA, 14 nt, Human
acagacacacgcac

SEQ ID NO: 2522135 - RNA, 23 nt, Human
acagaaccuuguuauuucucaga

SEQ ID NO: 2522136 - RNA, 17 nt, Human
acagaaccuuguuauuu

SEQ ID NO: 2522137 - RNA, 19 nt, Human
acagaaccuuguuauuucu

SEQ ID NO: 2522138 - RNA, 22 nt, Human
acagaacuaucucagcaucaga

SEQ ID NO: 2522139 - RNA, 22 nt, Human
acagaaccuuguuauuucucag

SEQ ID NO: 2522140 - RNA, 20 nt, Human
acagaacucuuucaaaaccu

SEQ ID NO: 2522141 - RNA, 18 nt, Human
acagaacucuuucaaaac

SEQ ID NO: 2522142 - RNA, 22 nt, Human
acacuguguccuggugcucucu

SEQ ID NO: 2522143 - RNA, 21 nt, Human
acacuguguccuggugcucuc

SEQ ID NO: 2522144 - RNA, 20 nt, Human
acacuguguccuggugcucu

SEQ ID NO: 2522145 - RNA, 19 nt, Human
acacuguguccuggugcuc

SEQ ID NO: 2522146 - RNA, 18 nt, Human
acacuguguccuggugcu

SEQ ID NO: 2522147 - RNA, 13 nt, Human
acacuguguccug

SEQ ID NO: 2522148 - RNA, 11 nt, Human
acacugugucc

SEQ ID NO: 2522149 - RNA, 17 nt, Human
acagaaccccuacauga

SEQ ID NO: 2522150 - RNA, 17 nt, Human
acagaacaucauuagaa

SEQ ID NO: 2522151 - RNA, 16 nt, Human
acagaaccuuguuauu

SEQ ID NO: 2522152 - RNA, 22 nt, Human
acacugugcugagucugaaggc

SEQ ID NO: 2522153 - RNA, 23 nt, Human
acacugugcuuucuauuguacag

SEQ ID NO: 2522154 - RNA, 15 nt, Human
acacugugcuuucua

SEQ ID NO: 2522155 - RNA, 14 nt, Human
acacugugcuuucu

SEQ ID NO: 2522156 - RNA, 22 nt, Human
acacugugcuuucuauuguaca

SEQ ID NO: 2522157 - RNA, 17 nt, Human
acacugugcugagucug

SEQ ID NO: 2522158 - RNA, 23 nt, Human
acacugggagaggugccagcaac

SEQ ID NO: 2522159 - RNA, 15 nt, Human
acacugggggagggg

SEQ ID NO: 2522160 - RNA, 20 nt, Human
acacuggggugccgccugcc

SEQ ID NO: 2522161 - RNA, 16 nt, Human
acacugggggagggga

SEQ ID NO: 2522162 - RNA, 18 nt, Human
acacugggacuugcaaaa

SEQ ID NO: 2522163 - RNA, 19 nt, Human
acacugggacuugcaaaaa

SEQ ID NO: 2522164 - RNA, 13 nt, Human
acacugggacuug

SEQ ID NO: 2522165 - RNA, 14 nt, Human
acacugggaaacag

SEQ ID NO: 2522166 - RNA, 20 nt, Human
acacugggagaaaugaaaaa

SEQ ID NO: 2522167 - RNA, 22 nt, Human
acacugggagaggugccagcaa

SEQ ID NO: 2522168 - RNA, 15 nt, Human
acugcuuuuggucug

SEQ ID NO: 2522169 - RNA, 14 nt, Human
acugcuuuuggucu

SEQ ID NO: 2522170 - RNA, 22 nt, Human
acugcccggcaggguccuagaa

SEQ ID NO: 2522171 - RNA, 22 nt, Human
acugcccgagcuggugcauuac

SEQ ID NO: 2522172 - RNA, 16 nt, Human
acugccaugcagggcc

SEQ ID NO: 2522173 - RNA, 17 nt, Human
acugcccggggcagcug

SEQ ID NO: 2522174 - RNA, 20 nt, Human
acugcccggggcagcugcca

SEQ ID NO: 2522175 - RNA, 20 nt, Human
acugcuuuuggucuguguga

SEQ ID NO: 2522176 - RNA, 16 nt, Human
acugcuuuuggucugu

SEQ ID NO: 2522177 - RNA, 18 nt, Human
acuggaagguggggacag

SEQ ID NO: 2522178 - RNA, 23 nt, Human
acugcccuccagcucuuuccucc

SEQ ID NO: 2522179 - RNA, 13 nt, Human
acuggaaguuuug

SEQ ID NO: 2522180 - RNA, 17 nt, Human
acuggaaguuuugcauu

SEQ ID NO: 2522181 - RNA, 18 nt, Human
acuggaaggggaagggac

SEQ ID NO: 2522182 - RNA, 20 nt, Human
acuggaagcuaauuugcauu

SEQ ID NO: 2522183 - RNA, 20 nt, Human
acugcccuccagcucuuucc

SEQ ID NO: 2522184 - RNA, 21 nt, Human
acugcccggggcagcugccag

SEQ ID NO: 2522185 - RNA, 22 nt, Human
acugcccggggcagcugccaga

SEQ ID NO: 2522186 - RNA, 23 nt, Human
acugccaggccagccuccgagag

SEQ ID NO: 2522187 - RNA, 19 nt, Human
acugccaggccagccuccg

SEQ ID NO: 2522188 - RNA, 18 nt, Human
acugccaggccagccucc

SEQ ID NO: 2522189 - RNA, 18 nt, Human
acugccagucccccugcc

SEQ ID NO: 2522190 - RNA, 15 nt, Human
acugccauaaaacau

SEQ ID NO: 2522191 - RNA, 14 nt, Human
acugccauaaaaca

SEQ ID NO: 2522192 - RNA, 13 nt, Human
acugccauaaaac

SEQ ID NO: 2522193 - RNA, 16 nt, Human
acugccagucucacug

SEQ ID NO: 2522194 - RNA, 19 nt, Human
acugccagucccccugccc

SEQ ID NO: 2522195 - RNA, 22 nt, Human
acugccauaaaacauuaagaaa

SEQ ID NO: 2522196 - RNA, 21 nt, Human
acugccauaaaacauuaagaa

SEQ ID NO: 2522197 - RNA, 23 nt, Human
acugccauaaaacauuaagaaaa

SEQ ID NO: 2522198 - RNA, 15 nt, Human
acugcccggcagggu

SEQ ID NO: 2522199 - RNA, 20 nt, Human
acugauucauaauaaauauc

SEQ ID NO: 2522200 - RNA, 17 nt, Human
acugauuucacaacaga

SEQ ID NO: 2522201 - RNA, 13 nt, Human
acugauuucacaa

SEQ ID NO: 2522202 - RNA, 13 nt, Human
acugauuguuuca

SEQ ID NO: 2522203 - RNA, 22 nt, Human
acugauuuuuuuuuccuucagu

SEQ ID NO: 2522204 - RNA, 21 nt, Human
acugauuuuuuuuuccuucag

SEQ ID NO: 2522205 - RNA, 23 nt, Human
acugauuuuuuuuuccuucagug

SEQ ID NO: 2522206 - RNA, 20 nt, Human
acugauuucacaacagauca

SEQ ID NO: 2522207 - RNA, 15 nt, Human
acugcaaaggcgcag

SEQ ID NO: 2522208 - RNA, 22 nt, Human
acugaugggcaacccccagccu

SEQ ID NO: 2522209 - RNA, 12 nt, Human
acugaugggcaa

SEQ ID NO: 2522210 - RNA, 12 nt, Human
acugaugcuuuu

SEQ ID NO: 2522211 - RNA, 23 nt, Human
acugaccauccacucuacccucc

SEQ ID NO: 2522212 - RNA, 18 nt, Human
acugaugcuuuuagcuca

SEQ ID NO: 2522213 - RNA, 22 nt, Human
acugauggcuaauguacugcau

SEQ ID NO: 2522214 - RNA, 11 nt, Human
acugaugcugc

SEQ ID NO: 2522215 - RNA, 12 nt, Human
acugaugcugcc

SEQ ID NO: 2522216 - RNA, 14 nt, Human
acugaugcugcccc

SEQ ID NO: 2522217 - RNA, 15 nt, Human
acugaugcugccccu

SEQ ID NO: 2522218 - RNA, 19 nt, Human
acugaugcugccccucauc

SEQ ID NO: 2522219 - RNA, 20 nt, Human
acugaugcugccccucaucu

SEQ ID NO: 2522220 - RNA, 15 nt, Human
acugaugcuuagaug

SEQ ID NO: 2522221 - RNA, 13 nt, Human
acugaucucucgu

SEQ ID NO: 2522222 - RNA, 23 nt, Human
acugaccagccuccaugcugccu

SEQ ID NO: 2522223 - RNA, 16 nt, Human
acugaccauccacucu

SEQ ID NO: 2522224 - RNA, 22 nt, Human
acugaccauccacucuacccuc

SEQ ID NO: 2522225 - RNA, 16 nt, Human
acugaaugaaaccccc

SEQ ID NO: 2522226 - RNA, 19 nt, Human
acugaaugaaacccccaca

SEQ ID NO: 2522227 - RNA, 21 nt, Human
acugaaugaaacccccacaca

SEQ ID NO: 2522228 - RNA, 22 nt, Human
acugaaugaaacccccacacac

SEQ ID NO: 2522229 - RNA, 21 nt, Human
acugaauauuuauauuucacu

SEQ ID NO: 2522230 - RNA, 22 nt, Human
acugaauauuuauauuucacua

SEQ ID NO: 2522231 - RNA, 15 nt, Human
acugaauauuuauau

SEQ ID NO: 2522232 - RNA, 18 nt, Human
acugaauauuuauauuuc

SEQ ID NO: 2522233 - RNA, 23 nt, Human
acugacauuguuggccaaagcca

SEQ ID NO: 2522234 - RNA, 22 nt, Human
acugacauuguuggccaaagcc

SEQ ID NO: 2522235 - RNA, 13 nt, Human
acugaccagccuc

SEQ ID NO: 2522236 - RNA, 20 nt, Human
acugaccagccuccaugcug

SEQ ID NO: 2522237 - RNA, 15 nt, Human
acugaccagccucca

SEQ ID NO: 2522238 - RNA, 21 nt, Human
acugaccaauauuguacaguu

SEQ ID NO: 2522239 - RNA, 20 nt, Human
acugaccaauauuguacagu

SEQ ID NO: 2522240 - RNA, 12 nt, Human
acugaccagaac

SEQ ID NO: 2522241 - RNA, 14 nt, Human
acugaccagaacua

SEQ ID NO: 2522242 - RNA, 22 nt, Human
acugaccaauauuguacaguuu

SEQ ID NO: 2522243 - RNA, 14 nt, Human
acucuaauagugcu

SEQ ID NO: 2522244 - RNA, 21 nt, Human
acucuaauagugcuuaaaaau

SEQ ID NO: 2522245 - RNA, 20 nt, Human
acucuaauucccauuuugca

SEQ ID NO: 2522246 - RNA, 21 nt, Human
acucuaauucccauuuugcaa

SEQ ID NO: 2522247 - RNA, 18 nt, Human
acuauuuuuacugccacu

SEQ ID NO: 2522248 - RNA, 13 nt, Human
acuauuuuuacug

SEQ ID NO: 2522249 - RNA, 18 nt, Human
acuauuuuuauuuauauu

SEQ ID NO: 2522250 - RNA, 12 nt, Human
acuauuuuuacu

SEQ ID NO: 2522251 - RNA, 15 nt, Human
acuauuuuaugcaaa

SEQ ID NO: 2522252 - RNA, 16 nt, Human
acuauuuccuuuauaa

SEQ ID NO: 2522253 - RNA, 13 nt, Human
acuauuuccuuua

SEQ ID NO: 2522254 - RNA, 12 nt, Human
acuauuuccuuu

SEQ ID NO: 2522255 - RNA, 21 nt, Human
acuauuucuuauauaugugaa

SEQ ID NO: 2522256 - RNA, 16 nt, Human
acuauuugucuuucag

SEQ ID NO: 2522257 - RNA, 14 nt, Human
acuauuuuaugcaa

SEQ ID NO: 2522258 - RNA, 13 nt, Human
acuauuuuaugca

SEQ ID NO: 2522259 - RNA, 18 nt, Human
acuauuugucuuucagga

SEQ ID NO: 2522260 - RNA, 13 nt, Human
acuauuuuacuuc

SEQ ID NO: 2522261 - RNA, 11 nt, Human
acuauuuuauu

SEQ ID NO: 2522262 - RNA, 17 nt, Human
acuauuuuauuuucuaa

SEQ ID NO: 2522263 - RNA, 20 nt, Human
acucuacuuagcaugucccu

SEQ ID NO: 2522264 - RNA, 19 nt, Human
acucuacuuaauccaaugg

SEQ ID NO: 2522265 - RNA, 22 nt, Human
acucuaauucccauuuugcaaa

SEQ ID NO: 2522266 - RNA, 21 nt, Human
acucuacuuaauccaaugggu

SEQ ID NO: 2522267 - RNA, 21 nt, Human
acucuacuuagcaugucccua

SEQ ID NO: 2522268 - RNA, 21 nt, Human
acucuagaugaaguuuuacau

SEQ ID NO: 2522269 - RNA, 22 nt, Human
acucuagaugaaguuuuacauu

SEQ ID NO: 2522270 - RNA, 19 nt, Human
acucugucucaaaaaaaca

SEQ ID NO: 2522271 - RNA, 15 nt, Human
acucugucucagucc

SEQ ID NO: 2522272 - RNA, 17 nt, Human
acucugucucaguccau

SEQ ID NO: 2522273 - RNA, 19 nt, Human
acucugugucagguggggc

SEQ ID NO: 2522274 - RNA, 21 nt, Human
acucugugucagguggggcag

SEQ ID NO: 2522275 - RNA, 19 nt, Human
acugaaguuucacaugagc

SEQ ID NO: 2522276 - RNA, 20 nt, Human
acucuuaagaagacugcauu

SEQ ID NO: 2522277 - RNA, 16 nt, Human
acugaaguuucacaug

SEQ ID NO: 2522278 - RNA, 15 nt, Human
acugaaguuucacau

SEQ ID NO: 2522279 - RNA, 21 nt, Human
acugaaguuaacagagacaga

SEQ ID NO: 2522280 - RNA, 16 nt, Human
acucuguuauuuagac

SEQ ID NO: 2522281 - RNA, 17 nt, Human
acugaaguuaacagaga

SEQ ID NO: 2522282 - RNA, 15 nt, Human
acucuuaagaagacu

SEQ ID NO: 2522283 - RNA, 14 nt, Human
acucuuaagaagac

SEQ ID NO: 2522284 - RNA, 15 nt, Human
acucuguuauuuaga

SEQ ID NO: 2522285 - RNA, 21 nt, Human
acuggaccacugggcaaugau

SEQ ID NO: 2522286 - RNA, 16 nt, Human
acuggaccacugggca

SEQ ID NO: 2522287 - RNA, 20 nt, Human
acuggaccacugggcaauga

SEQ ID NO: 2522288 - RNA, 16 nt, Human
acuggaaguuuugcau

SEQ ID NO: 2522289 - RNA, 13 nt, Human
acuuaaaaauggu

SEQ ID NO: 2522290 - RNA, 14 nt, Human
acuuaaaaaugguu

SEQ ID NO: 2522291 - RNA, 21 nt, Human
acuuaaaaaugguuuaaaugg

SEQ ID NO: 2522292 - RNA, 20 nt, Human
acuuaaaauauuccugcauu

SEQ ID NO: 2522293 - RNA, 16 nt, Human
acuuaaaaaaugucca

SEQ ID NO: 2522294 - RNA, 15 nt, Human
acuuaaaaaaugucc

SEQ ID NO: 2522295 - RNA, 19 nt, Human
acuucaaauccuugaagau

SEQ ID NO: 2522296 - RNA, 14 nt, Human
acuuaaauaaugug

SEQ ID NO: 2522297 - RNA, 22 nt, Human
acuuaaaauauuccugcauuug

SEQ ID NO: 2522298 - RNA, 13 nt, Human
acuuaaaauauuu

SEQ ID NO: 2522299 - RNA, 13 nt, Human
acuuaaagauuua

SEQ ID NO: 2522300 - RNA, 17 nt, Human
acuuaaaggcuguggua

SEQ ID NO: 2522301 - RNA, 15 nt, Human
acuuaaagauuuauc

SEQ ID NO: 2522302 - RNA, 11 nt, Human
acuuaaagauu

SEQ ID NO: 2522303 - RNA, 20 nt, Human
acuucugccauauucuguug

SEQ ID NO: 2522304 - RNA, 19 nt, Human
acuucagcgguuuauauaa

SEQ ID NO: 2522305 - RNA, 22 nt, Human
acuucaagugcaugcucucugc

SEQ ID NO: 2522306 - RNA, 23 nt, Human
acuucaagugcaugcucucugca

SEQ ID NO: 2522307 - RNA, 16 nt, Human
acuucaaguuaaagug

SEQ ID NO: 2522308 - RNA, 15 nt, Human
acuucaaugauagua

SEQ ID NO: 2522309 - RNA, 18 nt, Human
acuucagcgguuuauaua

SEQ ID NO: 2522310 - RNA, 17 nt, Human
acuucagcgguuuauau

SEQ ID NO: 2522311 - RNA, 20 nt, Human
acuucaaauccuugaagauu

SEQ ID NO: 2522312 - RNA, 13 nt, Human
acuucaaggccca

SEQ ID NO: 2522313 - RNA, 19 nt, Human
acuucaacauuuacaugua

SEQ ID NO: 2522314 - RNA, 19 nt, Human
acuuaaauaaaugucauua

SEQ ID NO: 2522315 - RNA, 16 nt, Human
acuucuuaaaaguugu

SEQ ID NO: 2522316 - RNA, 23 nt, Human
acuuggcucgaaucucugugccu

SEQ ID NO: 2522317 - RNA, 22 nt, Human
acuuggcucgaaucucugugcc

SEQ ID NO: 2522318 - RNA, 11 nt, Human
acuuggcuuuc

SEQ ID NO: 2522319 - RNA, 17 nt, Human
acuucuuauacauuuga

SEQ ID NO: 2522320 - RNA, 18 nt, Human
acuucuuauacauuugau

SEQ ID NO: 2522321 - RNA, 22 nt, Human
acuucugcuuuccacaccuggc

SEQ ID NO: 2522322 - RNA, 19 nt, Human
acuucugugagacccccac

SEQ ID NO: 2522323 - RNA, 20 nt, Human
acuucugugagacccccaca

SEQ ID NO: 2522324 - RNA, 23 nt, Human
acuucugugagacccccacaccu

SEQ ID NO: 2522325 - RNA, 16 nt, Human
acuucugccuggagac

SEQ ID NO: 2522326 - RNA, 12 nt, Human
acuucugccugu

SEQ ID NO: 2522327 - RNA, 19 nt, Human
acuucugcuuuccacaccu

SEQ ID NO: 2522328 - RNA, 16 nt, Human
acuucugcuuuccaca

SEQ ID NO: 2522329 - RNA, 14 nt, Human
acuucugcuuucca

SEQ ID NO: 2522330 - RNA, 13 nt, Human
acuucugccugga

SEQ ID NO: 2522331 - RNA, 12 nt, Human
acuucugccugg

SEQ ID NO: 2522332 - RNA, 13 nt, Human
acuucugccucuu

SEQ ID NO: 2522333 - RNA, 12 nt, Human
acuuuaugcuaa

SEQ ID NO: 2522334 - RNA, 17 nt, Human
acuuuaugcuaagugaa

SEQ ID NO: 2522335 - RNA, 13 nt, Human
acuuuauguguaa

SEQ ID NO: 2522336 - RNA, 21 nt, Human
acuuuaugccggaugugcuuu

SEQ ID NO: 2522337 - RNA, 15 nt, Human
acuuuauuuuguguu

SEQ ID NO: 2522338 - RNA, 22 nt, Human
acuuucaggccacauggcuaaa

SEQ ID NO: 2522339 - RNA, 20 nt, Human
acuuucacauagaugucccu

SEQ ID NO: 2522340 - RNA, 21 nt, Human
acuuucacauagaugucccuu

SEQ ID NO: 2522341 - RNA, 18 nt, Human
acuuucagguacuaaaua

SEQ ID NO: 2522342 - RNA, 21 nt, Human
acuuucagguacuaaauaccu

SEQ ID NO: 2522343 - RNA, 21 nt, Human
acuuuauguguaaauacauaa

SEQ ID NO: 2522344 - RNA, 16 nt, Human
acuuuauguguaaaua

SEQ ID NO: 2522345 - RNA, 23 nt, Human
acuuuaugccggaugugcuuuuc

SEQ ID NO: 2522346 - RNA, 12 nt, Human
acuuuauuaaau

SEQ ID NO: 2522347 - RNA, 15 nt, Human
acuuuauuaaauaca

SEQ ID NO: 2522348 - RNA, 15 nt, Human
acuuucacauagaug

SEQ ID NO: 2522349 - RNA, 17 nt, Human
acuuucacauagauguc

SEQ ID NO: 2522350 - RNA, 22 nt, Human
acuugggaggcugagaugggag

SEQ ID NO: 2522351 - RNA, 13 nt, Human
acuugggacauug

SEQ ID NO: 2522352 - RNA, 13 nt, Human
acuuggcuuucau

SEQ ID NO: 2522353 - RNA, 13 nt, Human
acuugggaauaua

SEQ ID NO: 2522354 - RNA, 20 nt, Human
acuugggagaccuguaauca

SEQ ID NO: 2522355 - RNA, 16 nt, Human
acuugggaggcugagg

SEQ ID NO: 2522356 - RNA, 19 nt, Human
acuaaucugggaagggaag

SEQ ID NO: 2522357 - RNA, 13 nt, Human
acuaaugauguuu

SEQ ID NO: 2522358 - RNA, 19 nt, Human
acuaaucgaacuaugaacu

SEQ ID NO: 2522359 - RNA, 18 nt, Human
acuaaucuauuggguuca

SEQ ID NO: 2522360 - RNA, 20 nt, Human
acuaaucuauuggguucauu

SEQ ID NO: 2522361 - RNA, 22 nt, Human
acuaaucuauuggguucauuau

SEQ ID NO: 2522362 - RNA, 14 nt, Human
acuaaucuuucugc

SEQ ID NO: 2522363 - RNA, 17 nt, Human
acuagggaagauaauau

SEQ ID NO: 2522364 - RNA, 17 nt, Human
acuagggagaagguuuc

SEQ ID NO: 2522365 - RNA, 22 nt, Human
acuaggcccccacuugccucuu

SEQ ID NO: 2522366 - RNA, 23 nt, Human
acuaggcccccacuugccucuuc

SEQ ID NO: 2522367 - RNA, 14 nt, Human
acuaggcucagaga

SEQ ID NO: 2522368 - RNA, 18 nt, Human
acuaguauuucuaugaaa

SEQ ID NO: 2522369 - RNA, 16 nt, Human
acuagggaucccucau

SEQ ID NO: 2522370 - RNA, 18 nt, Human
acuagguaacuucauauu

SEQ ID NO: 2522371 - RNA, 16 nt, Human
acuagguaacuucaua

SEQ ID NO: 2522372 - RNA, 22 nt, Human
acuaggugcccagaaugaggcu

SEQ ID NO: 2522373 - RNA, 19 nt, Human
acuaguauuucuaugaaau

SEQ ID NO: 2522374 - RNA, 19 nt, Human
acuaguaguuccugcuaca

SEQ ID NO: 2522375 - RNA, 16 nt, Human
acuauuguuagucucu

SEQ ID NO: 2522376 - RNA, 22 nt, Human
acuauuucccuugaaauuuuaa

SEQ ID NO: 2522377 - RNA, 13 nt, Human
acuauuggagggu

SEQ ID NO: 2522378 - RNA, 19 nt, Human
acuauuggagggugggaga

SEQ ID NO: 2522379 - RNA, 18 nt, Human
acuauugaaguugcagau

SEQ ID NO: 2522380 - RNA, 17 nt, Human
acuauugcuugcacaaa

SEQ ID NO: 2522381 - RNA, 13 nt, Human
acuauugcccagg

SEQ ID NO: 2522382 - RNA, 11 nt, Human
accugugucuc

SEQ ID NO: 2522383 - RNA, 15 nt, Human
accuguggcucuaca

SEQ ID NO: 2522384 - RNA, 23 nt, Human
accugugaccagcacugucucag

SEQ ID NO: 2522385 - RNA, 19 nt, Human
accuguggggauuucuccc

SEQ ID NO: 2522386 - RNA, 20 nt, Human
accuguggggauuucuccca

SEQ ID NO: 2522387 - RNA, 21 nt, Human
accuguggggauuucucccag

SEQ ID NO: 2522388 - RNA, 22 nt, Human
accuguggggauuucucccagc

SEQ ID NO: 2522389 - RNA, 23 nt, Human
accuguggggauuucucccagcu

SEQ ID NO: 2522390 - RNA, 17 nt, Human
accugugagcccagcug

SEQ ID NO: 2522391 - RNA, 18 nt, Human
accugugagcccagcugg

SEQ ID NO: 2522392 - RNA, 15 nt, Human
accugugagcccagc

SEQ ID NO: 2522393 - RNA, 14 nt, Human
accugugaccagca

SEQ ID NO: 2522394 - RNA, 19 nt, Human
accugugaccagcacuguc

SEQ ID NO: 2522395 - RNA, 19 nt, Human
accuguggccaaguucuua

SEQ ID NO: 2522396 - RNA, 18 nt, Human
accuguggccaaguucuu

SEQ ID NO: 2522397 - RNA, 16 nt, Human
accuguggugcaaaag

SEQ ID NO: 2522398 - RNA, 13 nt, Human
accugugucacua

SEQ ID NO: 2522399 - RNA, 17 nt, Human
acgcaccugccucagga

SEQ ID NO: 2522400 - RNA, 16 nt, Human
acgcaccugccucagg

SEQ ID NO: 2522401 - RNA, 15 nt, Human
acgcacgcacacaca

SEQ ID NO: 2522402 - RNA, 14 nt, Human
acgcacgcacacac

SEQ ID NO: 2522403 - RNA, 13 nt, Human
acgcacgcacaca

SEQ ID NO: 2522404 - RNA, 11 nt, Human
acgcacgcaca

SEQ ID NO: 2522405 - RNA, 19 nt, Human
acgcacgugggucuucagg

SEQ ID NO: 2522406 - RNA, 18 nt, Human
acgcuggagugcagugag

SEQ ID NO: 2522407 - RNA, 21 nt, Human
acgcagcaggaggccaggccg

SEQ ID NO: 2522408 - RNA, 19 nt, Human
acgcuggagugcagugagc

SEQ ID NO: 2522409 - RNA, 14 nt, Human
acgcagcaggaggc

SEQ ID NO: 2522410 - RNA, 19 nt, Human
acgcagaugauccaugagu

SEQ ID NO: 2522411 - RNA, 15 nt, Human
acgcagaugauccau

SEQ ID NO: 2522412 - RNA, 17 nt, Human
acgcagaugauccauga

SEQ ID NO: 2522413 - RNA, 21 nt, Human
acgcacuccaugagcacccca

SEQ ID NO: 2522414 - RNA, 17 nt, Human
acgcacuccaugagcac

SEQ ID NO: 2522415 - RNA, 16 nt, Human
acgcacuccaugagca

SEQ ID NO: 2522416 - RNA, 16 nt, Human
acgcacgcacacacac

SEQ ID NO: 2522417 - RNA, 20 nt, Human
acgcacgugggucuucaggg

SEQ ID NO: 2522418 - RNA, 19 nt, Human
acggacgaaccuugaaaac

SEQ ID NO: 2522419 - RNA, 16 nt, Human
acggacguuuccauca

SEQ ID NO: 2522420 - RNA, 19 nt, Human
acggacacucaaaagcugg

SEQ ID NO: 2522421 - RNA, 15 nt, Human
acggaauaguuggcu

SEQ ID NO: 2522422 - RNA, 20 nt, Human
acggaaguuuucaaugaugg

SEQ ID NO: 2522423 - RNA, 19 nt, Human
acggaaguuuucaaugaug

SEQ ID NO: 2522424 - RNA, 14 nt, Human
acggaaguuuucaa

SEQ ID NO: 2522425 - RNA, 13 nt, Human
acggaaguuuuca

SEQ ID NO: 2522426 - RNA, 15 nt, Human
acggaagagccuugc

SEQ ID NO: 2522427 - RNA, 16 nt, Human
acggaagagccuugcg

SEQ ID NO: 2522428 - RNA, 19 nt, Human
acgcugguagagauggagg

SEQ ID NO: 2522429 - RNA, 20 nt, Human
acgcugguagagauggagga

SEQ ID NO: 2522430 - RNA, 23 nt, Human
acgcugguagagauggaggagga

SEQ ID NO: 2522431 - RNA, 12 nt, Human
acgcugucucca

SEQ ID NO: 2522432 - RNA, 14 nt, Human
acgcugucuccaga

SEQ ID NO: 2522433 - RNA, 15 nt, Human
acgcugucuccagac

SEQ ID NO: 2522434 - RNA, 17 nt, Human
acgcugucuccagaccc

SEQ ID NO: 2522435 - RNA, 21 nt, Human
acgcugguagagauggaggag

SEQ ID NO: 2522436 - RNA, 11 nt, Human
acgcugucucc

SEQ ID NO: 2522437 - RNA, 23 nt, Human
acgcugucccuaguaaaaauaca

SEQ ID NO: 2522438 - RNA, 23 nt, Human
acgucugacaggcaaugcuggcu

SEQ ID NO: 2522439 - RNA, 16 nt, Human
acgucuguaagcugaa

SEQ ID NO: 2522440 - RNA, 13 nt, Human
acgucugucuuca

SEQ ID NO: 2522441 - RNA, 22 nt, Human
acgucugggagaaauugacaga

SEQ ID NO: 2522442 - RNA, 17 nt, Human
acgucugggagaaauug

SEQ ID NO: 2522443 - RNA, 16 nt, Human
acgucugacccucucc

SEQ ID NO: 2522444 - RNA, 22 nt, Human
acgucugacccucuccacccca

SEQ ID NO: 2522445 - RNA, 19 nt, Human
acggagccacuccucugac

SEQ ID NO: 2522446 - RNA, 15 nt, Human
acgucugacaggcaa

SEQ ID NO: 2522447 - RNA, 18 nt, Human
acggagccacuccucuga

SEQ ID NO: 2522448 - RNA, 14 nt, Human
acggagauguuuca

SEQ ID NO: 2522449 - RNA, 19 nt, Human
acggagagcgccugccccu

SEQ ID NO: 2522450 - RNA, 13 nt, Human
acggagagcgccu

SEQ ID NO: 2522451 - RNA, 18 nt, Human
acguggaggagcagugca

SEQ ID NO: 2522452 - RNA, 17 nt, Human
acguggaggagcagugc

SEQ ID NO: 2522453 - RNA, 13 nt, Human
acguggaggagca

SEQ ID NO: 2522454 - RNA, 21 nt, Human
acguggaggaaugcuccccca

SEQ ID NO: 2522455 - RNA, 16 nt, Human
acguggccucuugagc

SEQ ID NO: 2522456 - RNA, 14 nt, Human
acguggcucagcca

SEQ ID NO: 2522457 - RNA, 15 nt, Human
acguggcccagagaa

SEQ ID NO: 2522458 - RNA, 15 nt, Human
acguggcauguggcc

SEQ ID NO: 2522459 - RNA, 12 nt, Human
acguggagaggg

SEQ ID NO: 2522460 - RNA, 14 nt, Human
acgucugucuucac

SEQ ID NO: 2522461 - RNA, 15 nt, Human
acgucugucuucaca

SEQ ID NO: 2522462 - RNA, 19 nt, Human
acgucugucuucacagcuc

SEQ ID NO: 2522463 - RNA, 23 nt, Human
acgucugggagaaauugacagau

SEQ ID NO: 2522464 - RNA, 13 nt, Human
acguggagaggga

SEQ ID NO: 2522465 - RNA, 15 nt, Human
acguggagagggaug

SEQ ID NO: 2522466 - RNA, 16 nt, Human
acguggagcucuuggc

SEQ ID NO: 2522467 - RNA, 14 nt, Human
acguggagagggau

SEQ ID NO: 2522468 - RNA, 13 nt, Human
acuaacuagagca

SEQ ID NO: 2522469 - RNA, 12 nt, Human
acuaacuagagc

SEQ ID NO: 2522470 - RNA, 22 nt, Human
acuaacuaaacucucuuuggga

SEQ ID NO: 2522471 - RNA, 14 nt, Human
acuaacuaaacucu

SEQ ID NO: 2522472 - RNA, 13 nt, Human
acuaacuaaacuc

SEQ ID NO: 2522473 - RNA, 18 nt, Human
acuaacguugagccccug

SEQ ID NO: 2522474 - RNA, 15 nt, Human
acguggcucugcugg

SEQ ID NO: 2522475 - RNA, 14 nt, Human
acguggcucugcug

SEQ ID NO: 2522476 - RNA, 17 nt, Human
acguggcucagccagca

SEQ ID NO: 2522477 - RNA, 19 nt, Human
acguggcucagccagcacu

SEQ ID NO: 2522478 - RNA, 13 nt, Human
acuaaccugaccg

SEQ ID NO: 2522479 - RNA, 15 nt, Human
acuaaccuggguucc

SEQ ID NO: 2522480 - RNA, 14 nt, Human
acuaaccccgggcg

SEQ ID NO: 2522481 - RNA, 20 nt, Human
acuaacuccuaggaaaauac

SEQ ID NO: 2522482 - RNA, 22 nt, Human
acuaauaugggcauuguaguua

SEQ ID NO: 2522483 - RNA, 15 nt, Human
acuaauaugggcauu

SEQ ID NO: 2522484 - RNA, 19 nt, Human
acuaauauuuuaugugaga

SEQ ID NO: 2522485 - RNA, 15 nt, Human
acuaauagacaauuu

SEQ ID NO: 2522486 - RNA, 23 nt, Human
acuaacuaugcauggugccccag

SEQ ID NO: 2522487 - RNA, 15 nt, Human
acuaacuaugcaugg

SEQ ID NO: 2522488 - RNA, 23 nt, Human
acuaacuagagcagcccuggagu

SEQ ID NO: 2522489 - RNA, 14 nt, Human
accugcccugccug

SEQ ID NO: 2522490 - RNA, 13 nt, Human
accugcccugccu

SEQ ID NO: 2522491 - RNA, 16 nt, Human
accugcccugccugag

SEQ ID NO: 2522492 - RNA, 15 nt, Human
accugcccugccuga

SEQ ID NO: 2522493 - RNA, 13 nt, Human
accugugaccagc

SEQ ID NO: 2522494 - RNA, 12 nt, Human
accugcccugcc

SEQ ID NO: 2522495 - RNA, 17 nt, Human
accugcccugcccccac

SEQ ID NO: 2522496 - RNA, 23 nt, Human
accugccccuccucucugcccua

SEQ ID NO: 2522497 - RNA, 18 nt, Human
accugccauuugcacccu

SEQ ID NO: 2522498 - RNA, 19 nt, Human
accugccauuugcacccuc

SEQ ID NO: 2522499 - RNA, 16 nt, Human
accugccagggacaga

SEQ ID NO: 2522500 - RNA, 15 nt, Human
accugccagggacag

SEQ ID NO: 2522501 - RNA, 18 nt, Human
accugccagggacagagg

SEQ ID NO: 2522502 - RNA, 18 nt, Human
accugccagggagacaga

SEQ ID NO: 2522503 - RNA, 13 nt, Human
accugccagggag

SEQ ID NO: 2522504 - RNA, 20 nt, Human
accugccaggcagggguggg

SEQ ID NO: 2522505 - RNA, 18 nt, Human
accugccaggcaggggug

SEQ ID NO: 2522506 - RNA, 21 nt, Human
accugccagggagacagagcu

SEQ ID NO: 2522507 - RNA, 15 nt, Human
accugccauuugcac

SEQ ID NO: 2522508 - RNA, 13 nt, Human
accugccagggac

SEQ ID NO: 2522509 - RNA, 12 nt, Human
accugccaggga

SEQ ID NO: 2522510 - RNA, 11 nt, Human
accugccaggg

SEQ ID NO: 2522511 - RNA, 13 nt, Human
accucugccucaa

SEQ ID NO: 2522512 - RNA, 14 nt, Human
accucugccucaau

SEQ ID NO: 2522513 - RNA, 15 nt, Human
accucugccucaaug

SEQ ID NO: 2522514 - RNA, 15 nt, Human
accugccaggcaggg

SEQ ID NO: 2522515 - RNA, 17 nt, Human
accucuugagccuugaa

SEQ ID NO: 2522516 - RNA, 19 nt, Human
accucuugagccuugaacu

SEQ ID NO: 2522517 - RNA, 20 nt, Human
accucuugagccuugaacuu

SEQ ID NO: 2522518 - RNA, 21 nt, Human
accucuugagccuugaacuuu

SEQ ID NO: 2522519 - RNA, 18 nt, Human
accucugccucagaaaac

SEQ ID NO: 2522520 - RNA, 17 nt, Human
accucugccucagaaaa

SEQ ID NO: 2522521 - RNA, 12 nt, Human
accucugccuca

SEQ ID NO: 2522522 - RNA, 12 nt, Human
accucugccaga

SEQ ID NO: 2522523 - RNA, 19 nt, Human
accgggccacagagaaagu

SEQ ID NO: 2522524 - RNA, 15 nt, Human
accgggccacagaga

SEQ ID NO: 2522525 - RNA, 13 nt, Human
accgguacagaaa

SEQ ID NO: 2522526 - RNA, 14 nt, Human
accgugaggccaga

SEQ ID NO: 2522527 - RNA, 18 nt, Human
accguccucaccccuguc

SEQ ID NO: 2522528 - RNA, 17 nt, Human
accguccucaccccugu

SEQ ID NO: 2522529 - RNA, 15 nt, Human
accguccucaccccu

SEQ ID NO: 2522530 - RNA, 13 nt, Human
accguccucaccc

SEQ ID NO: 2522531 - RNA, 21 nt, Human
accguccucaccccuguccuc

SEQ ID NO: 2522532 - RNA, 12 nt, Human
accguccucacc

SEQ ID NO: 2522533 - RNA, 16 nt, Human
accguccgcccugcuc

SEQ ID NO: 2522534 - RNA, 15 nt, Human
accguccgcccugcu

SEQ ID NO: 2522535 - RNA, 14 nt, Human
accguccgcccugc

SEQ ID NO: 2522536 - RNA, 23 nt, Human
accgucauggcuuaauguuuauu

SEQ ID NO: 2522537 - RNA, 14 nt, Human
accgguggggcugg

SEQ ID NO: 2522538 - RNA, 22 nt, Human
accgucauggcuuaauguuuau

SEQ ID NO: 2522539 - RNA, 17 nt, Human
accguaauaauuauuau

SEQ ID NO: 2522540 - RNA, 18 nt, Human
accggcuggccuggcccc

SEQ ID NO: 2522541 - RNA, 17 nt, Human
accggcuggccuggccc

SEQ ID NO: 2522542 - RNA, 19 nt, Human
accggcuggccuggccccu

SEQ ID NO: 2522543 - RNA, 20 nt, Human
accgggcacucagaagacac

SEQ ID NO: 2522544 - RNA, 15 nt, Human
accggcuggccuggc

SEQ ID NO: 2522545 - RNA, 14 nt, Human
accggcuggccugg

SEQ ID NO: 2522546 - RNA, 14 nt, Human
accggcugcuuuuc

SEQ ID NO: 2522547 - RNA, 20 nt, Human
accggcugcuuuucccuaag

SEQ ID NO: 2522548 - RNA, 14 nt, Human
accggauggcggac

SEQ ID NO: 2522549 - RNA, 18 nt, Human
accggcaauuuccggcca

SEQ ID NO: 2522550 - RNA, 12 nt, Human
acccuguugcua

SEQ ID NO: 2522551 - RNA, 15 nt, Human
acccuguuuccugag

SEQ ID NO: 2522552 - RNA, 14 nt, Human
acccuguuuccuga

SEQ ID NO: 2522553 - RNA, 15 nt, Human
acccuguugcuaagc

SEQ ID NO: 2522554 - RNA, 14 nt, Human
acccuguugcuaag

SEQ ID NO: 2522555 - RNA, 17 nt, Human
acccuguuaccauuuug

SEQ ID NO: 2522556 - RNA, 23 nt, Human
acccugugcugguguccugacca

SEQ ID NO: 2522557 - RNA, 15 nt, Human
acccugugcuggugu

SEQ ID NO: 2522558 - RNA, 14 nt, Human
acccugugcuggug

SEQ ID NO: 2522559 - RNA, 19 nt, Human
acccugugcugguguccug

SEQ ID NO: 2522560 - RNA, 19 nt, Human
acccuuacagccucugacu

SEQ ID NO: 2522561 - RNA, 18 nt, Human
acccuuacagccucugac

SEQ ID NO: 2522562 - RNA, 13 nt, Human
acccuuacaguag

SEQ ID NO: 2522563 - RNA, 22 nt, Human
acccuuaccaugugccugaucc

SEQ ID NO: 2522564 - RNA, 18 nt, Human
acccuuaccaugugccug

SEQ ID NO: 2522565 - RNA, 19 nt, Human
acccuuacaguaggagccc

SEQ ID NO: 2522566 - RNA, 16 nt, Human
acccuguuuuauacug

SEQ ID NO: 2522567 - RNA, 18 nt, Human
acccuuaccccuuagccu

SEQ ID NO: 2522568 - RNA, 19 nt, Human
acccuuaccccuuagccuc

SEQ ID NO: 2522569 - RNA, 22 nt, Human
acccuuaccccuuagccucccu

SEQ ID NO: 2522570 - RNA, 23 nt, Human
acccuuaucaccagcugccucuu

SEQ ID NO: 2522571 - RNA, 23 nt, Human
accggagcuuucaaagaaggaau

SEQ ID NO: 2522572 - RNA, 13 nt, Human
accggauccuggg

SEQ ID NO: 2522573 - RNA, 14 nt, Human
accggauccugggu

SEQ ID NO: 2522574 - RNA, 16 nt, Human
accggauccugggugg

SEQ ID NO: 2522575 - RNA, 17 nt, Human
accggcaauuuccggcc

SEQ ID NO: 2522576 - RNA, 15 nt, Human
accccaacuccagua

SEQ ID NO: 2522577 - RNA, 15 nt, Human
acccaugcugcccug

SEQ ID NO: 2522578 - RNA, 14 nt, Human
acccaugcugcccu

SEQ ID NO: 2522579 - RNA, 22 nt, Human
acccugugauggggcccugccu

SEQ ID NO: 2522580 - RNA, 15 nt, Human
accccaauuccuugu

SEQ ID NO: 2522581 - RNA, 17 nt, Human
accccaauuccuuguag

SEQ ID NO: 2522582 - RNA, 16 nt, Human
accccacacacgccag

SEQ ID NO: 2522583 - RNA, 17 nt, Human
accccaaggagggagau

SEQ ID NO: 2522584 - RNA, 14 nt, Human
accccaaucccagc

SEQ ID NO: 2522585 - RNA, 23 nt, Human
accucagguaaucgaccugccuc

SEQ ID NO: 2522586 - RNA, 15 nt, Human
accucaggugaucca

SEQ ID NO: 2522587 - RNA, 19 nt, Human
accucaggcuuccuuggca

SEQ ID NO: 2522588 - RNA, 18 nt, Human
accucaggugagaagcag

SEQ ID NO: 2522589 - RNA, 23 nt, Human
accucagugccuuccuguuuuuc

SEQ ID NO: 2522590 - RNA, 16 nt, Human
accucagugucauuua

SEQ ID NO: 2522591 - RNA, 21 nt, Human
accucagugucauuuaugaaa

SEQ ID NO: 2522592 - RNA, 16 nt, Human
accucaguucccuugg

SEQ ID NO: 2522593 - RNA, 17 nt, Human
accucaguucccuuggc

SEQ ID NO: 2522594 - RNA, 18 nt, Human
accucaguucccuuggcc

SEQ ID NO: 2522595 - RNA, 19 nt, Human
accucaguucccuuggccu

SEQ ID NO: 2522596 - RNA, 20 nt, Human
accucaguucccuuggccuc

SEQ ID NO: 2522597 - RNA, 21 nt, Human
accucaguucccuuggccuca

SEQ ID NO: 2522598 - RNA, 18 nt, Human
accucaguuuuaucauuu

SEQ ID NO: 2522599 - RNA, 17 nt, Human
accucaguuuuaucauu

SEQ ID NO: 2522600 - RNA, 22 nt, Human
accucaguucccuuggccucag

SEQ ID NO: 2522601 - RNA, 23 nt, Human
accucaguucccuuggccucaga

SEQ ID NO: 2522602 - RNA, 20 nt, Human
accucaucaggaugaaccca

SEQ ID NO: 2522603 - RNA, 18 nt, Human
accucaucaggaugaacc

SEQ ID NO: 2522604 - RNA, 15 nt, Human
accucaucaggauga

SEQ ID NO: 2522605 - RNA, 14 nt, Human
accucaucaggaug

SEQ ID NO: 2522606 - RNA, 19 nt, Human
accucagugucauuuauga

SEQ ID NO: 2522607 - RNA, 13 nt, Human
accucaggccugg

SEQ ID NO: 2522608 - RNA, 12 nt, Human
accucaggccug

SEQ ID NO: 2522609 - RNA, 17 nt, Human
accgugaggccagagac

SEQ ID NO: 2522610 - RNA, 16 nt, Human
accgugaggccagaga

SEQ ID NO: 2522611 - RNA, 22 nt, Human
accucaggccugggggcugggc

SEQ ID NO: 2522612 - RNA, 14 nt, Human
accucaggccuggg

SEQ ID NO: 2522613 - RNA, 18 nt, Human
accgugagcgacaaagau

SEQ ID NO: 2522614 - RNA, 18 nt, Human
accucaggcuuccuuggc

SEQ ID NO: 2522615 - RNA, 22 nt, Human
accucagguaaucgaccugccu

SEQ ID NO: 2522616 - RNA, 14 nt, Human
cugcccugugggcc

SEQ ID NO: 2522617 - RNA, 19 nt, Human
cugccuguugggccaggag

SEQ ID NO: 2522618 - RNA, 18 nt, Human
cugccuguugggccagga

SEQ ID NO: 2522619 - RNA, 14 nt, Human
cugccuguugggcc

SEQ ID NO: 2522620 - RNA, 16 nt, Human
cugccuguugggccag

SEQ ID NO: 2522621 - RNA, 16 nt, Human
cugcuaauuccccaga

SEQ ID NO: 2522622 - RNA, 22 nt, Human
cugccuguuauaacucugcacu

SEQ ID NO: 2522623 - RNA, 21 nt, Human
cugccuguuauaacucugcac

SEQ ID NO: 2522624 - RNA, 21 nt, Human
cugcuaaguauuucccagcac

SEQ ID NO: 2522625 - RNA, 19 nt, Human
cugcuaaguauuucccagc

SEQ ID NO: 2522626 - RNA, 23 nt, Human
cugcuaaguauuucccagcacau

SEQ ID NO: 2522627 - RNA, 16 nt, Human
cugcuaauaaaaccca

SEQ ID NO: 2522628 - RNA, 12 nt, Human
cugcuacaaaga

SEQ ID NO: 2522629 - RNA, 14 nt, Human
cugcuaaucuucag

SEQ ID NO: 2522630 - RNA, 18 nt, Human
cugcuaaucuucagggca

SEQ ID NO: 2522631 - RNA, 19 nt, Human
cugcuacaaagaagacaug

SEQ ID NO: 2522632 - RNA, 18 nt, Human
cugcuacaaagaagacau

SEQ ID NO: 2522633 - RNA, 17 nt, Human
cugcuacaaagaagaca

SEQ ID NO: 2522634 - RNA, 15 nt, Human
cugcuacaaagaaga

SEQ ID NO: 2522635 - RNA, 22 nt, Human
cugcuacaaagaagacauguuu

SEQ ID NO: 2522636 - RNA, 20 nt, Human
cugcuacaaagaagacaugu

SEQ ID NO: 2522637 - RNA, 23 nt, Human
cugcuacaaauacucuuaggaag

SEQ ID NO: 2522638 - RNA, 16 nt, Human
cugcucagcccuggag

SEQ ID NO: 2522639 - RNA, 15 nt, Human
cugcucagcccugga

SEQ ID NO: 2522640 - RNA, 14 nt, Human
cugcucagcccugg

SEQ ID NO: 2522641 - RNA, 18 nt, Human
cugcucagcccuggaggu

SEQ ID NO: 2522642 - RNA, 17 nt, Human
cugcucagcccuggagg

SEQ ID NO: 2522643 - RNA, 13 nt, Human
cugcucagcucug

SEQ ID NO: 2522644 - RNA, 14 nt, Human
cugcucagcucugg

SEQ ID NO: 2522645 - RNA, 16 nt, Human
cugcucagcucugggc

SEQ ID NO: 2522646 - RNA, 22 nt, Human
cugcucagcucugggccauucu

SEQ ID NO: 2522647 - RNA, 21 nt, Human
cugcucagcccuggaggugcc

SEQ ID NO: 2522648 - RNA, 13 nt, Human
cugcucagcuucu

SEQ ID NO: 2522649 - RNA, 13 nt, Human
cugcucagacaga

SEQ ID NO: 2522650 - RNA, 13 nt, Human
cugcucagcagcu

SEQ ID NO: 2522651 - RNA, 13 nt, Human
cugcucagcccug

SEQ ID NO: 2522652 - RNA, 12 nt, Human
cugcucagcccu

SEQ ID NO: 2522653 - RNA, 17 nt, Human
cugcuaccucacugggg

SEQ ID NO: 2522654 - RNA, 15 nt, Human
cugcuaccucacugg

SEQ ID NO: 2522655 - RNA, 13 nt, Human
cugcuaccucacu

SEQ ID NO: 2522656 - RNA, 14 nt, Human
cugcuaccucacug

SEQ ID NO: 2522657 - RNA, 18 nt, Human
cugcuacccucccugcug

SEQ ID NO: 2522658 - RNA, 17 nt, Human
cugcuacccucccugcu

SEQ ID NO: 2522659 - RNA, 16 nt, Human
cugcuacccucccugc

SEQ ID NO: 2522660 - RNA, 13 nt, Human
cugcuacccuccc

SEQ ID NO: 2522661 - RNA, 20 nt, Human
cugcuacccucccugcuguc

SEQ ID NO: 2522662 - RNA, 19 nt, Human
cugcuacccucccugcugu

SEQ ID NO: 2522663 - RNA, 12 nt, Human
cugcuaccucac

SEQ ID NO: 2522664 - RNA, 15 nt, Human
cugcuacagagcaga

SEQ ID NO: 2522665 - RNA, 16 nt, Human
cugcuacacauacagg

SEQ ID NO: 2522666 - RNA, 17 nt, Human
cugcuacccagaaauca

SEQ ID NO: 2522667 - RNA, 22 nt, Human
cugccugggaucccucauccuc

SEQ ID NO: 2522668 - RNA, 18 nt, Human
cugccucgaacuggcugc

SEQ ID NO: 2522669 - RNA, 17 nt, Human
cugccucgaacuggcug

SEQ ID NO: 2522670 - RNA, 15 nt, Human
cugccucgaacuggc

SEQ ID NO: 2522671 - RNA, 15 nt, Human
cugccuguucagcuc

SEQ ID NO: 2522672 - RNA, 14 nt, Human
cugccuguucagcu

SEQ ID NO: 2522673 - RNA, 20 nt, Human
cugccuguuauaacucugca

SEQ ID NO: 2522674 - RNA, 18 nt, Human
cugccuguuauaacucug

SEQ ID NO: 2522675 - RNA, 17 nt, Human
cugccuguuauaacucu

SEQ ID NO: 2522676 - RNA, 23 nt, Human
cugccuguggcgccgucuccagg

SEQ ID NO: 2522677 - RNA, 22 nt, Human
cugccuguggcgccgucuccag

SEQ ID NO: 2522678 - RNA, 12 nt, Human
cugccuguggcg

SEQ ID NO: 2522679 - RNA, 20 nt, Human
cugccugggcuguuggcacu

SEQ ID NO: 2522680 - RNA, 19 nt, Human
cugccugggcuguuggcac

SEQ ID NO: 2522681 - RNA, 18 nt, Human
cugccugggcuguuggca

SEQ ID NO: 2522682 - RNA, 17 nt, Human
cugccugggcuguuggc

SEQ ID NO: 2522683 - RNA, 16 nt, Human
cugccugggcuguugg

SEQ ID NO: 2522684 - RNA, 15 nt, Human
cugccugggcuguug

SEQ ID NO: 2522685 - RNA, 22 nt, Human
cugccuggggcgggccccucau

SEQ ID NO: 2522686 - RNA, 19 nt, Human
cugccuggggcgggccccu

SEQ ID NO: 2522687 - RNA, 24 nt, Human
cugccugggcuguuggcacucaca

SEQ ID NO: 2522688 - RNA, 21 nt, Human
cugccugggcuguuggcacuc

SEQ ID NO: 2522689 - RNA, 20 nt, Human
cugccugguauauccaaaag

SEQ ID NO: 2522690 - RNA, 23 nt, Human
cugccugggaucccucauccuca

SEQ ID NO: 2522691 - RNA, 12 nt, Human
cugccugggcug

SEQ ID NO: 2522692 - RNA, 20 nt, Human
cugcugacagacacaggccc

SEQ ID NO: 2522693 - RNA, 19 nt, Human
cugcugacagacacaggcc

SEQ ID NO: 2522694 - RNA, 18 nt, Human
cugcugacagacacaggc

SEQ ID NO: 2522695 - RNA, 15 nt, Human
cugcugacagacaca

SEQ ID NO: 2522696 - RNA, 23 nt, Human
cugcugacagacacaggcccggc

SEQ ID NO: 2522697 - RNA, 21 nt, Human
cugcugacagacacaggcccg

SEQ ID NO: 2522698 - RNA, 23 nt, Human
cugcugaauuuucacaugaacau

SEQ ID NO: 2522699 - RNA, 13 nt, Human
cugcuuaacuuca

SEQ ID NO: 2522700 - RNA, 15 nt, Human
cugcuuaacuucaca

SEQ ID NO: 2522701 - RNA, 17 nt, Human
cugcuuaacuucacaua

SEQ ID NO: 2522702 - RNA, 13 nt, Human
cugcuucagccuc

SEQ ID NO: 2522703 - RNA, 16 nt, Human
cugcuucagccucccg

SEQ ID NO: 2522704 - RNA, 14 nt, Human
cugcuucagccucc

SEQ ID NO: 2522705 - RNA, 17 nt, Human
cugcuuuuuauggccug

SEQ ID NO: 2522706 - RNA, 22 nt, Human
cugcuuuuuaaagaaugcucuu

SEQ ID NO: 2522707 - RNA, 18 nt, Human
cugcuuuuuauggccugu

SEQ ID NO: 2522708 - RNA, 21 nt, Human
cuggaaaucaggguuaguauu

SEQ ID NO: 2522709 - RNA, 16 nt, Human
cuggaaauauuaagaa

SEQ ID NO: 2522710 - RNA, 20 nt, Human
cuggaacaucaucaaggcac

SEQ ID NO: 2522711 - RNA, 14 nt, Human
cuggaacagauuca

SEQ ID NO: 2522712 - RNA, 21 nt, Human
cuggaacagauucacacuguc

SEQ ID NO: 2522713 - RNA, 15 nt, Human
cuggaaccaucagaa

SEQ ID NO: 2522714 - RNA, 16 nt, Human
cuggaaccaucagaaa

SEQ ID NO: 2522715 - RNA, 13 nt, Human
cuggaacccagac

SEQ ID NO: 2522716 - RNA, 17 nt, Human
cuggaacacuaaugagg

SEQ ID NO: 2522717 - RNA, 23 nt, Human
cuggaaauaucaguuacucagcc

SEQ ID NO: 2522718 - RNA, 14 nt, Human
cuggaacccagacu

SEQ ID NO: 2522719 - RNA, 16 nt, Human
cuggaacccagacuca

SEQ ID NO: 2522720 - RNA, 18 nt, Human
cuggaacccagacucaga

SEQ ID NO: 2522721 - RNA, 19 nt, Human
cuggaacccagacucagac

SEQ ID NO: 2522722 - RNA, 22 nt, Human
cuggaacccagacucagacauu

SEQ ID NO: 2522723 - RNA, 12 nt, Human
cuggaaccucag

SEQ ID NO: 2522724 - RNA, 15 nt, Human
cuggaaccucagccu

SEQ ID NO: 2522725 - RNA, 16 nt, Human
cuggaaccucagccug

SEQ ID NO: 2522726 - RNA, 17 nt, Human
cuggaaccucagccugg

SEQ ID NO: 2522727 - RNA, 18 nt, Human
cuggaaccucagccuggc

SEQ ID NO: 2522728 - RNA, 20 nt, Human
cuggaaccucagccuggcca

SEQ ID NO: 2522729 - RNA, 22 nt, Human
cuggaaccucagccuggccaga

SEQ ID NO: 2522730 - RNA, 23 nt, Human
cuggaaccucagccuggccagac

SEQ ID NO: 2522731 - RNA, 16 nt, Human
cuggaacugucucuca

SEQ ID NO: 2522732 - RNA, 18 nt, Human
cuggaacugucucucaug

SEQ ID NO: 2522733 - RNA, 21 nt, Human
cuggaacucagugugacuccu

SEQ ID NO: 2522734 - RNA, 17 nt, Human
cuggaacucagugugac

SEQ ID NO: 2522735 - RNA, 19 nt, Human
cuggaacugucucucauga

SEQ ID NO: 2522736 - RNA, 15 nt, Human
cuggacuggcuagag

SEQ ID NO: 2522737 - RNA, 21 nt, Human
cuggacuggcuagaguccuca

SEQ ID NO: 2522738 - RNA, 13 nt, Human
cuggacugugugc

SEQ ID NO: 2522739 - RNA, 18 nt, Human
cuggacugucauagaaau

SEQ ID NO: 2522740 - RNA, 17 nt, Human
cuggacugggagguaga

SEQ ID NO: 2522741 - RNA, 16 nt, Human
cuggacugggagguag

SEQ ID NO: 2522742 - RNA, 14 nt, Human
cuggacugggaggu

SEQ ID NO: 2522743 - RNA, 13 nt, Human
cuggacugggagg

SEQ ID NO: 2522744 - RNA, 20 nt, Human
cugagacucgcgacaaugca

SEQ ID NO: 2522745 - RNA, 23 nt, Human
cugagacuccggggagcgcccgc

SEQ ID NO: 2522746 - RNA, 19 nt, Human
cugagacucgcgacaaugc

SEQ ID NO: 2522747 - RNA, 17 nt, Human
cugagacucgcgacaau

SEQ ID NO: 2522748 - RNA, 19 nt, Human
cugagacuccggggagcgc

SEQ ID NO: 2522749 - RNA, 14 nt, Human
cugagacucagaca

SEQ ID NO: 2522750 - RNA, 17 nt, Human
cugagacucagacagga

SEQ ID NO: 2522751 - RNA, 20 nt, Human
cugagacucagacaggaaag

SEQ ID NO: 2522752 - RNA, 21 nt, Human
cugagacucagacaggaaagg

SEQ ID NO: 2522753 - RNA, 21 nt, Human
cugaccuugaacuccugggcu

SEQ ID NO: 2522754 - RNA, 22 nt, Human
cugaccuugaacuccugggcuc

SEQ ID NO: 2522755 - RNA, 18 nt, Human
cugaccuuugucaucuuu

SEQ ID NO: 2522756 - RNA, 22 nt, Human
cugaccugucaugccccccuca

SEQ ID NO: 2522757 - RNA, 23 nt, Human
cugccauauucuguuggccagug

SEQ ID NO: 2522758 - RNA, 22 nt, Human
cugccauauucuguuggccagu

SEQ ID NO: 2522759 - RNA, 21 nt, Human
cugccauauucuguuggccag

SEQ ID NO: 2522760 - RNA, 20 nt, Human
cugccauauucuguuggcca

SEQ ID NO: 2522761 - RNA, 15 nt, Human
cugccagggacagag

SEQ ID NO: 2522762 - RNA, 12 nt, Human
cugccagggaca

SEQ ID NO: 2522763 - RNA, 11 nt, Human
cugccagggac

SEQ ID NO: 2522764 - RNA, 23 nt, Human
cugccaaggccagaguggccugg

SEQ ID NO: 2522765 - RNA, 13 nt, Human
cugccaggccccc

SEQ ID NO: 2522766 - RNA, 22 nt, Human
cugccaggcccccaagccugca

SEQ ID NO: 2522767 - RNA, 17 nt, Human
cugccaucauguuuaca

SEQ ID NO: 2522768 - RNA, 22 nt, Human
cugccaucauguuuacagagga

SEQ ID NO: 2522769 - RNA, 12 nt, Human
cugccauccagg

SEQ ID NO: 2522770 - RNA, 12 nt, Human
cugccccaggcc

SEQ ID NO: 2522771 - RNA, 15 nt, Human
cugccccagcucugg

SEQ ID NO: 2522772 - RNA, 18 nt, Human
cugccccagcucuggcuu

SEQ ID NO: 2522773 - RNA, 19 nt, Human
cugccccagcucuggcuuc

SEQ ID NO: 2522774 - RNA, 23 nt, Human
cugccaucauguuuacagaggac

SEQ ID NO: 2522775 - RNA, 18 nt, Human
cugccaggcccccaagcc

SEQ ID NO: 2522776 - RNA, 21 nt, Human
cugccaggcccccaagccugc

SEQ ID NO: 2522777 - RNA, 16 nt, Human
cugccccagcucuggc

SEQ ID NO: 2522778 - RNA, 14 nt, Human
cugcccccucugcc

SEQ ID NO: 2522779 - RNA, 15 nt, Human
cugcccccucugccc

SEQ ID NO: 2522780 - RNA, 22 nt, Human
cugccccauccuccagcaggga

SEQ ID NO: 2522781 - RNA, 15 nt, Human
cugccccaggccuga

SEQ ID NO: 2522782 - RNA, 13 nt, Human
cugccccauccuc

SEQ ID NO: 2522783 - RNA, 16 nt, Human
cugccccauccuccag

SEQ ID NO: 2522784 - RNA, 17 nt, Human
cugccccauccuccagc

SEQ ID NO: 2522785 - RNA, 18 nt, Human
cugccccauccuccagca

SEQ ID NO: 2522786 - RNA, 21 nt, Human
cugccccauccuccagcaggg

SEQ ID NO: 2522787 - RNA, 14 nt, Human
cugccccaggccug

SEQ ID NO: 2522788 - RNA, 13 nt, Human
cugccccaggccu

SEQ ID NO: 2522789 - RNA, 19 nt, Human
cugccccagggcucccggc

SEQ ID NO: 2522790 - RNA, 22 nt, Human
cugccccucaacucuccuccag

SEQ ID NO: 2522791 - RNA, 14 nt, Human
cugccccucaacuc

SEQ ID NO: 2522792 - RNA, 16 nt, Human
cugcccccucugcccu

SEQ ID NO: 2522793 - RNA, 17 nt, Human
cugcccccucugcccug

SEQ ID NO: 2522794 - RNA, 18 nt, Human
cugcccccucugcccugc

SEQ ID NO: 2522795 - RNA, 19 nt, Human
cugcccccucugcccugcg

SEQ ID NO: 2522796 - RNA, 11 nt, Human
cugccccuccc

SEQ ID NO: 2522797 - RNA, 13 nt, Human
cugccccucccag

SEQ ID NO: 2522798 - RNA, 14 nt, Human
cugccccucccaga

SEQ ID NO: 2522799 - RNA, 15 nt, Human
cugccccucccagaa

SEQ ID NO: 2522800 - RNA, 16 nt, Human
cugccccucccagaac

SEQ ID NO: 2522801 - RNA, 13 nt, Human
cugccccuccccc

SEQ ID NO: 2522802 - RNA, 14 nt, Human
cugccccuccccca

SEQ ID NO: 2522803 - RNA, 22 nt, Human
cugccccucccccaacccccac

SEQ ID NO: 2522804 - RNA, 15 nt, Human
cugccccucccugcu

SEQ ID NO: 2522805 - RNA, 19 nt, Human
cugcccuggugcugccaca

SEQ ID NO: 2522806 - RNA, 18 nt, Human
cugcccuggugcugccac

SEQ ID NO: 2522807 - RNA, 16 nt, Human
cugcccuggugcugcc

SEQ ID NO: 2522808 - RNA, 17 nt, Human
cugcccuggugcugcca

SEQ ID NO: 2522809 - RNA, 18 nt, Human
cugcccugugggccccca

SEQ ID NO: 2522810 - RNA, 16 nt, Human
cugcccugugggcccc

SEQ ID NO: 2522811 - RNA, 15 nt, Human
cugcccugugggccc

SEQ ID NO: 2522812 - RNA, 13 nt, Human
cugcccugugagu

SEQ ID NO: 2522813 - RNA, 12 nt, Human
cugcccugugag

SEQ ID NO: 2522814 - RNA, 13 nt, Human
cugcccuguaccc

SEQ ID NO: 2522815 - RNA, 21 nt, Human
cugcccuguaccccagcacuu

SEQ ID NO: 2522816 - RNA, 22 nt, Human
cugcccugguuuccugcccugg

SEQ ID NO: 2522817 - RNA, 23 nt, Human
cugcccugguuuccugcccuggg

SEQ ID NO: 2522818 - RNA, 21 nt, Human
cugcccuggugcugccacacu

SEQ ID NO: 2522819 - RNA, 20 nt, Human
cugcccuggugcugccacac

SEQ ID NO: 2522820 - RNA, 16 nt, Human
cugcauucuuucugua

SEQ ID NO: 2522821 - RNA, 15 nt, Human
cugcauucuuucugu

SEQ ID NO: 2522822 - RNA, 14 nt, Human
cugcauucuuucug

SEQ ID NO: 2522823 - RNA, 20 nt, Human
cugcauucaggaucaaaccc

SEQ ID NO: 2522824 - RNA, 19 nt, Human
cugcauucugccgugugcc

SEQ ID NO: 2522825 - RNA, 17 nt, Human
cugcauugagaacugca

SEQ ID NO: 2522826 - RNA, 20 nt, Human
cugcauuuaaaagauacagu

SEQ ID NO: 2522827 - RNA, 22 nt, Human
cugcauuuaaaagauacaguua

SEQ ID NO: 2522828 - RNA, 17 nt, Human
cugcauuucgguggcua

SEQ ID NO: 2522829 - RNA, 13 nt, Human
cugcauuucugag

SEQ ID NO: 2522830 - RNA, 18 nt, Human
cugcauuucgguggcuag

SEQ ID NO: 2522831 - RNA, 13 nt, Human
cugcauuugugaa

SEQ ID NO: 2522832 - RNA, 15 nt, Human
cugcauguuugugau

SEQ ID NO: 2522833 - RNA, 13 nt, Human
cugcauguuacau

SEQ ID NO: 2522834 - RNA, 20 nt, Human
cugcauucacccagacagcu

SEQ ID NO: 2522835 - RNA, 21 nt, Human
cugcauucacccagacagcuc

SEQ ID NO: 2522836 - RNA, 22 nt, Human
cugcauucacccagacagcucc

SEQ ID NO: 2522837 - RNA, 15 nt, Human
cugcauuagaaauua

SEQ ID NO: 2522838 - RNA, 23 nt, Human
cugcauuaccgcguuguaaaaua

SEQ ID NO: 2522839 - RNA, 21 nt, Human
cugcauuaccgcguuguaaaa

SEQ ID NO: 2522840 - RNA, 20 nt, Human
cugcauuaccgcguuguaaa

SEQ ID NO: 2522841 - RNA, 17 nt, Human
cugccaaugggagcuca

SEQ ID NO: 2522842 - RNA, 15 nt, Human
cugccaaugggagcu

SEQ ID NO: 2522843 - RNA, 18 nt, Human
cugccaaggccagagugg

SEQ ID NO: 2522844 - RNA, 21 nt, Human
cugccaaggccagaguggccu

SEQ ID NO: 2522845 - RNA, 22 nt, Human
cugccaaggccagaguggccug

SEQ ID NO: 2522846 - RNA, 22 nt, Human
cugccaacuucuucagagcuga

SEQ ID NO: 2522847 - RNA, 15 nt, Human
cugccaaggccagag

SEQ ID NO: 2522848 - RNA, 21 nt, Human
cugccaacuucuucagagcug

SEQ ID NO: 2522849 - RNA, 23 nt, Human
cugccaaccauaccuuccuuccc

SEQ ID NO: 2522850 - RNA, 22 nt, Human
cugccaaccauaccuuccuucc

SEQ ID NO: 2522851 - RNA, 21 nt, Human
cugccaaccauaccuuccuuc

SEQ ID NO: 2522852 - RNA, 15 nt, Human
cugccaaccauaccu

SEQ ID NO: 2522853 - RNA, 22 nt, Human
cugccaaaaugcucuagugccu

SEQ ID NO: 2522854 - RNA, 20 nt, Human
cugccaaauuuuggccaaag

SEQ ID NO: 2522855 - RNA, 21 nt, Human
cugccaaagggaaauaucauu

SEQ ID NO: 2522856 - RNA, 22 nt, Human
cugccaaaggaugugauauaua

SEQ ID NO: 2522857 - RNA, 19 nt, Human
cugccaaaggaugugauau

SEQ ID NO: 2522858 - RNA, 18 nt, Human
cugccaaaggaugugaua

SEQ ID NO: 2522859 - RNA, 16 nt, Human
cugccaaaggauguga

SEQ ID NO: 2522860 - RNA, 14 nt, Human
cugccaaaggaugu

SEQ ID NO: 2522861 - RNA, 15 nt, Human
cugccaaaaugcucu

SEQ ID NO: 2522862 - RNA, 16 nt, Human
cugccaaaaugcucua

SEQ ID NO: 2522863 - RNA, 18 nt, Human
cugcauuuuuagaccauu

SEQ ID NO: 2522864 - RNA, 22 nt, Human
cugcauuugugaaaugauggug

SEQ ID NO: 2522865 - RNA, 17 nt, Human
cugcauuugugaaauga

SEQ ID NO: 2522866 - RNA, 15 nt, Human
cugcauuugugaaau

SEQ ID NO: 2522867 - RNA, 14 nt, Human
cugcauuugugaaa

SEQ ID NO: 2522868 - RNA, 17 nt, Human
cugcauuuucaccccac

SEQ ID NO: 2522869 - RNA, 18 nt, Human
cugcauuuucaccccacc

SEQ ID NO: 2522870 - RNA, 21 nt, Human
cugcauuuugcuauuguaaau

SEQ ID NO: 2522871 - RNA, 20 nt, Human
cugcauuuuauucuggaugg

SEQ ID NO: 2522872 - RNA, 14 nt, Human
cugcauuuugcuau

SEQ ID NO: 2522873 - RNA, 19 nt, Human
cugcauuuuauucuggaug

SEQ ID NO: 2522874 - RNA, 22 nt, Human
cugcauuuuaauuuuaaccaaa

SEQ ID NO: 2522875 - RNA, 21 nt, Human
cugcauuuuaauuuuaaccaa

SEQ ID NO: 2522876 - RNA, 20 nt, Human
cugcauuuuaauuuuaacca

SEQ ID NO: 2522877 - RNA, 9 nt, Human
cugcauuuu

SEQ ID NO: 2522878 - RNA, 14 nt, Human
cugcauuucugagu

SEQ ID NO: 2522879 - RNA, 18 nt, Human
cugguuuccugcccuggg

SEQ ID NO: 2522880 - RNA, 21 nt, Human
cugguuuccugcccugggagg

SEQ ID NO: 2522881 - RNA, 16 nt, Human
cugguuuccugcccug

SEQ ID NO: 2522882 - RNA, 22 nt, Human
cugguuuccugcccugggaggc

SEQ ID NO: 2522883 - RNA, 17 nt, Human
cugguuuggggcgaggc

SEQ ID NO: 2522884 - RNA, 21 nt, Human
cugguuugacuccgcuggagg

SEQ ID NO: 2522885 - RNA, 15 nt, Human
cugguuuggaaugcu

SEQ ID NO: 2522886 - RNA, 19 nt, Human
cuguaggacucgcagucag

SEQ ID NO: 2522887 - RNA, 18 nt, Human
cuguaggaagguuaaugu

SEQ ID NO: 2522888 - RNA, 20 nt, Human
cuguagggagggcggcaggg

SEQ ID NO: 2522889 - RNA, 14 nt, Human
cuguagggaacucu

SEQ ID NO: 2522890 - RNA, 21 nt, Human
cuguaggaagguuaauguuca

SEQ ID NO: 2522891 - RNA, 18 nt, Human
cugucacccuccaccucu

SEQ ID NO: 2522892 - RNA, 14 nt, Human
cugucacccuccac

SEQ ID NO: 2522893 - RNA, 20 nt, Human
cugucacccaggcuggagua

SEQ ID NO: 2522894 - RNA, 13 nt, Human
cugucacccaggc

SEQ ID NO: 2522895 - RNA, 14 nt, Human
cugucacucauugc

SEQ ID NO: 2522896 - RNA, 21 nt, Human
cugucacucauugcugagccu

SEQ ID NO: 2522897 - RNA, 17 nt, Human
cuguagggcuggaccua

SEQ ID NO: 2522898 - RNA, 16 nt, Human
cuguagggcuggaccu

SEQ ID NO: 2522899 - RNA, 15 nt, Human
cuguagggcuggacc

SEQ ID NO: 2522900 - RNA, 14 nt, Human
cuguagggcuggac

SEQ ID NO: 2522901 - RNA, 21 nt, Human
cuguagggagggcggcagggg

SEQ ID NO: 2522902 - RNA, 23 nt, Human
cugucaccaagcucacaguuccu

SEQ ID NO: 2522903 - RNA, 18 nt, Human
cuguagggcuggaccuau

SEQ ID NO: 2522904 - RNA, 14 nt, Human
cugucaccaagcuc

SEQ ID NO: 2522905 - RNA, 23 nt, Human
cuguacuugcucuugaugccugg

SEQ ID NO: 2522906 - RNA, 20 nt, Human
cuguaaaccucucgagggca

SEQ ID NO: 2522907 - RNA, 22 nt, Human
cuguaaaccccuuuaguggcuu

SEQ ID NO: 2522908 - RNA, 21 nt, Human
cuguacuugcucuugaugccu

SEQ ID NO: 2522909 - RNA, 22 nt, Human
cuguacuugcucuugaugccug

SEQ ID NO: 2522910 - RNA, 17 nt, Human
cugguuuggaaugcuuc

SEQ ID NO: 2522911 - RNA, 22 nt, Human
cugguuugacuccgcuggaggu

SEQ ID NO: 2522912 - RNA, 17 nt, Human
cuguaaaauaaaagguc

SEQ ID NO: 2522913 - RNA, 16 nt, Human
cugguuuggggcgagg

SEQ ID NO: 2522914 - RNA, 22 nt, Human
cuguaaaaugcaugauuuugua

SEQ ID NO: 2522915 - RNA, 16 nt, Human
cuguaaaaugaaauua

SEQ ID NO: 2522916 - RNA, 11 nt, Human
cuguaaaaucu

SEQ ID NO: 2522917 - RNA, 10 nt, Human
cuguaaaauc

SEQ ID NO: 2522918 - RNA, 22 nt, Human
cuguaaaaucuuucuuucuuag

SEQ ID NO: 2522919 - RNA, 23 nt, Human
cuguaaaauauacuuaaauggaa

SEQ ID NO: 2522920 - RNA, 15 nt, Human
cuguaaaaugaaauu

SEQ ID NO: 2522921 - RNA, 23 nt, Human
cugucagcuccccucggagaaga

SEQ ID NO: 2522922 - RNA, 16 nt, Human
cugucauuugagcagg

SEQ ID NO: 2522923 - RNA, 18 nt, Human
cugucauuugagcagggc

SEQ ID NO: 2522924 - RNA, 17 nt, Human
cugucauuugagcaggg

SEQ ID NO: 2522925 - RNA, 22 nt, Human
cuguccugauggucagcucccu

SEQ ID NO: 2522926 - RNA, 21 nt, Human
cuguccugauggucagcuccc

SEQ ID NO: 2522927 - RNA, 20 nt, Human
cuguccugauggucagcucc

SEQ ID NO: 2522928 - RNA, 13 nt, Human
cuguccugcucca

SEQ ID NO: 2522929 - RNA, 12 nt, Human
cuguccugccua

SEQ ID NO: 2522930 - RNA, 17 nt, Human
cugucagcgcagguuua

SEQ ID NO: 2522931 - RNA, 19 nt, Human
cuguccugauggucagcuc

SEQ ID NO: 2522932 - RNA, 17 nt, Human
cuguccugauggucagc

SEQ ID NO: 2522933 - RNA, 20 nt, Human
cuguccugacuucaggggcu

SEQ ID NO: 2522934 - RNA, 18 nt, Human
cuguccugaccugucuca

SEQ ID NO: 2522935 - RNA, 23 nt, Human
cugucagccgggcccugaguaau

SEQ ID NO: 2522936 - RNA, 22 nt, Human
cugucagccgggcccugaguaa

SEQ ID NO: 2522937 - RNA, 18 nt, Human
cugucagccgggcccuga

SEQ ID NO: 2522938 - RNA, 17 nt, Human
cugucagccgggcccug

SEQ ID NO: 2522939 - RNA, 16 nt, Human
cugucagccgggcccu

SEQ ID NO: 2522940 - RNA, 13 nt, Human
cugucagccgggc

SEQ ID NO: 2522941 - RNA, 21 nt, Human
cugucagcuccccucggagaa

SEQ ID NO: 2522942 - RNA, 18 nt, Human
cugucagccauuccuguu

SEQ ID NO: 2522943 - RNA, 21 nt, Human
cugucagaugggaagacauga

SEQ ID NO: 2522944 - RNA, 22 nt, Human
cugucagaugggaagacaugaa

SEQ ID NO: 2522945 - RNA, 18 nt, Human
cugucacuuugcucuggg

SEQ ID NO: 2522946 - RNA, 19 nt, Human
cugucacuuugcucugggu

SEQ ID NO: 2522947 - RNA, 17 nt, Human
cugucacuuugcucugg

SEQ ID NO: 2522948 - RNA, 15 nt, Human
cugucacuuugcucu

SEQ ID NO: 2522949 - RNA, 14 nt, Human
cugucacuuugcuc

SEQ ID NO: 2522950 - RNA, 12 nt, Human
cugucacuuugc

SEQ ID NO: 2522951 - RNA, 20 nt, Human
cugucacuguuucucugcug

SEQ ID NO: 2522952 - RNA, 14 nt, Human
cugucacuguuucu

SEQ ID NO: 2522953 - RNA, 19 nt, Human
cugucacuguuucucugcu

SEQ ID NO: 2522954 - RNA, 22 nt, Human
cugucacucauugcugagccuc

SEQ ID NO: 2522955 - RNA, 23 nt, Human
cugucacucauugcugagccucu

SEQ ID NO: 2522956 - RNA, 13 nt, Human
cugucacugcagg

SEQ ID NO: 2522957 - RNA, 16 nt, Human
cugucacccuccaccu

SEQ ID NO: 2522958 - RNA, 16 nt, Human
cugucacugcaggcac

SEQ ID NO: 2522959 - RNA, 19 nt, Human
cugugcuccgugccuccac

SEQ ID NO: 2522960 - RNA, 18 nt, Human
cugugcuccgugccucca

SEQ ID NO: 2522961 - RNA, 17 nt, Human
cugugcuccgugccucc

SEQ ID NO: 2522962 - RNA, 15 nt, Human
cugugcuccgugccu

SEQ ID NO: 2522963 - RNA, 10 nt, Human
cugugcuccg

SEQ ID NO: 2522964 - RNA, 22 nt, Human
cugugcucccugguucugauga

SEQ ID NO: 2522965 - RNA, 23 nt, Human
cugugcucaggacucagaagccu

SEQ ID NO: 2522966 - RNA, 18 nt, Human
cugugcucaggacucaga

SEQ ID NO: 2522967 - RNA, 19 nt, Human
cugugcucaggacucagaa

SEQ ID NO: 2522968 - RNA, 14 nt, Human
cugugcucccuggu

SEQ ID NO: 2522969 - RNA, 14 nt, Human
cugugcucuggaca

SEQ ID NO: 2522970 - RNA, 16 nt, Human
cugugagaugcuagaa

SEQ ID NO: 2522971 - RNA, 17 nt, Human
cugugcucaggacucag

SEQ ID NO: 2522972 - RNA, 20 nt, Human
cugugagacucgagaacuuu

SEQ ID NO: 2522973 - RNA, 18 nt, Human
cugugagacucgagaacu

SEQ ID NO: 2522974 - RNA, 20 nt, Human
cugugagacccccacaccuc

SEQ ID NO: 2522975 - RNA, 23 nt, Human
cugugagacccccacaccucagu

SEQ ID NO: 2522976 - RNA, 16 nt, Human
cugugagacccccaca

SEQ ID NO: 2522977 - RNA, 17 nt, Human
cugugagacccccacac

SEQ ID NO: 2522978 - RNA, 18 nt, Human
cugugagacccccacacc

SEQ ID NO: 2522979 - RNA, 19 nt, Human
cugugagacccccacaccu

SEQ ID NO: 2522980 - RNA, 15 nt, Human
cugugaagagaacca

SEQ ID NO: 2522981 - RNA, 14 nt, Human
cugugaacuugggg

SEQ ID NO: 2522982 - RNA, 15 nt, Human
cugugaacuugggga

SEQ ID NO: 2522983 - RNA, 16 nt, Human
cugugaacuuggggaa

SEQ ID NO: 2522984 - RNA, 24 nt, Human
cugugaaguccuucaccucacuga

SEQ ID NO: 2522985 - RNA, 18 nt, Human
cugugaaguccuucaccu

SEQ ID NO: 2522986 - RNA, 16 nt, Human
cugugaaguccuucac

SEQ ID NO: 2522987 - RNA, 14 nt, Human
cugugaaguaagga

SEQ ID NO: 2522988 - RNA, 15 nt, Human
cugugagacccccac

SEQ ID NO: 2522989 - RNA, 21 nt, Human
cugugaagcauucgagacaga

SEQ ID NO: 2522990 - RNA, 23 nt, Human
cugugaagcauucgagacagaac

SEQ ID NO: 2522991 - RNA, 14 nt, Human
cugugaaggacccu

SEQ ID NO: 2522992 - RNA, 22 nt, Human
cugugaacuuggggaacaaggg

SEQ ID NO: 2522993 - RNA, 17 nt, Human
cuguccugcuccacagu

SEQ ID NO: 2522994 - RNA, 16 nt, Human
cuguccugcuccacag

SEQ ID NO: 2522995 - RNA, 15 nt, Human
cuguccugcuccaca

SEQ ID NO: 2522996 - RNA, 14 nt, Human
cuguccugcuccac

SEQ ID NO: 2522997 - RNA, 19 nt, Human
cuguccugcuccacagugu

SEQ ID NO: 2522998 - RNA, 18 nt, Human
cuguccugcuccacagug

SEQ ID NO: 2522999 - RNA, 13 nt, Human
cuguccugcuggu

SEQ ID NO: 2523000 - RNA, 13 nt, Human
cugucgagacacu

SEQ ID NO: 2523001 - RNA, 18 nt, Human
cugucgagacacuugccu

SEQ ID NO: 2523002 - RNA, 14 nt, Human
cugucgagacacuu

SEQ ID NO: 2523003 - RNA, 15 nt, Human
cugucgauguaggca

SEQ ID NO: 2523004 - RNA, 16 nt, Human
cugucgcccaggcugg

SEQ ID NO: 2523005 - RNA, 13 nt, Human
cugucgcccaguc

SEQ ID NO: 2523006 - RNA, 15 nt, Human
cugggacguggcuca

SEQ ID NO: 2523007 - RNA, 16 nt, Human
cugggacguggcucag

SEQ ID NO: 2523008 - RNA, 17 nt, Human
cugggacguggcucagc

SEQ ID NO: 2523009 - RNA, 20 nt, Human
cugggaccuuuagugguggc

SEQ ID NO: 2523010 - RNA, 13 nt, Human
cugggaccuuuag

SEQ ID NO: 2523011 - RNA, 20 nt, Human
cugggaccugccaggcaggg

SEQ ID NO: 2523012 - RNA, 19 nt, Human
cugggaccugccaggcagg

SEQ ID NO: 2523013 - RNA, 18 nt, Human
cugggaccugccaggcag

SEQ ID NO: 2523014 - RNA, 17 nt, Human
cugggaccugccaggca

SEQ ID NO: 2523015 - RNA, 20 nt, Human
cugggaccuccccugaggcu

SEQ ID NO: 2523016 - RNA, 16 nt, Human
cugggaccuccccuga

SEQ ID NO: 2523017 - RNA, 15 nt, Human
cugggaccuccccug

SEQ ID NO: 2523018 - RNA, 23 nt, Human
cugggacccuuuccuuccuuccc

SEQ ID NO: 2523019 - RNA, 15 nt, Human
cugggacccuuuccu

SEQ ID NO: 2523020 - RNA, 19 nt, Human
cugggacccuuuccuuccu

SEQ ID NO: 2523021 - RNA, 20 nt, Human
cugggacccuuuccuuccuu

SEQ ID NO: 2523022 - RNA, 13 nt, Human
cugggacacaguu

SEQ ID NO: 2523023 - RNA, 12 nt, Human
cugggacacagu

SEQ ID NO: 2523024 - RNA, 10 nt, Human
cugggacagg

SEQ ID NO: 2523025 - RNA, 14 nt, Human
cugggacccuuucc

SEQ ID NO: 2523026 - RNA, 19 nt, Human
cugggacacuuaacagaug

SEQ ID NO: 2523027 - RNA, 23 nt, Human
cugggacacuuaacagaugcaau

SEQ ID NO: 2523028 - RNA, 13 nt, Human
cuggcuccagcug

SEQ ID NO: 2523029 - RNA, 14 nt, Human
cuggcuccagcugg

SEQ ID NO: 2523030 - RNA, 18 nt, Human
cuggcuccagcuggccgg

SEQ ID NO: 2523031 - RNA, 20 nt, Human
cuggcuccagcuggccggga

SEQ ID NO: 2523032 - RNA, 16 nt, Human
cuggcuccaggccagg

SEQ ID NO: 2523033 - RNA, 13 nt, Human
cuggcagcucucc

SEQ ID NO: 2523034 - RNA, 20 nt, Human
cuggcucccacaggcagcuu

SEQ ID NO: 2523035 - RNA, 19 nt, Human
cuggcucccacaggcagcu

SEQ ID NO: 2523036 - RNA, 18 nt, Human
cuggcucccacaggcagc

SEQ ID NO: 2523037 - RNA, 17 nt, Human
cuggcucccacaggcag

SEQ ID NO: 2523038 - RNA, 15 nt, Human
cuggcucccacaggc

SEQ ID NO: 2523039 - RNA, 21 nt, Human
cuggccccucagggucccugg

SEQ ID NO: 2523040 - RNA, 20 nt, Human
cuggccccucagggucccug

SEQ ID NO: 2523041 - RNA, 18 nt, Human
cuggccccucaggguccc

SEQ ID NO: 2523042 - RNA, 17 nt, Human
cuggccccucagggucc

SEQ ID NO: 2523043 - RNA, 19 nt, Human
cuggcuccaaacccucgag

SEQ ID NO: 2523044 - RNA, 20 nt, Human
cuggcuccaaacccucgagg

SEQ ID NO: 2523045 - RNA, 14 nt, Human
cuggcuccagaugc

SEQ ID NO: 2523046 - RNA, 20 nt, Human
cuggcuccagaugcagggca

SEQ ID NO: 2523047 - RNA, 21 nt, Human
cuggcuccagaugcagggcag

SEQ ID NO: 2523048 - RNA, 12 nt, Human
cuggccccucac

SEQ ID NO: 2523049 - RNA, 13 nt, Human
cuggccccucacc

SEQ ID NO: 2523050 - RNA, 15 nt, Human
cuggccccucaccug

SEQ ID NO: 2523051 - RNA, 22 nt, Human
cuggccccucaccugggcaccu

SEQ ID NO: 2523052 - RNA, 19 nt, Human
cuggcucauauuccugcag

SEQ ID NO: 2523053 - RNA, 20 nt, Human
cuggcucauauuccugcagc

SEQ ID NO: 2523054 - RNA, 21 nt, Human
cuggcucauauuccugcagcc

SEQ ID NO: 2523055 - RNA, 22 nt, Human
cuggcucauauuccugcagccu

SEQ ID NO: 2523056 - RNA, 23 nt, Human
cuggcucauauuccugcagccug

SEQ ID NO: 2523057 - RNA, 24 nt, Human
cuggcucauauuccugcagccugg

SEQ ID NO: 2523058 - RNA, 13 nt, Human
cuggcucaucucu

SEQ ID NO: 2523059 - RNA, 17 nt, Human
cuggcagcucuccaguc

SEQ ID NO: 2523060 - RNA, 16 nt, Human
cuggcagcucuccagu

SEQ ID NO: 2523061 - RNA, 15 nt, Human
cuggcagcucuccag

SEQ ID NO: 2523062 - RNA, 14 nt, Human
cuggcagcucucca

SEQ ID NO: 2523063 - RNA, 23 nt, Human
cuggcagcucuccagucaggagg

SEQ ID NO: 2523064 - RNA, 18 nt, Human
cuggcagcucuccaguca

SEQ ID NO: 2523065 - RNA, 12 nt, Human
cuggcagcucug

SEQ ID NO: 2523066 - RNA, 23 nt, Human
cuggcagccucccauccagggcc

SEQ ID NO: 2523067 - RNA, 15 nt, Human
cuggcagcucagaga

SEQ ID NO: 2523068 - RNA, 17 nt, Human
cuggcagcucuggacag

SEQ ID NO: 2523069 - RNA, 18 nt, Human
cuggcagcucuggacagc

SEQ ID NO: 2523070 - RNA, 20 nt, Human
cuggcagcucuggacagccc

SEQ ID NO: 2523071 - RNA, 21 nt, Human
cuggcagcucuggacagcccc

SEQ ID NO: 2523072 - RNA, 18 nt, Human
cuggcaggaugacccugc

SEQ ID NO: 2523073 - RNA, 20 nt, Human
cuggcaggaugacccugcga

SEQ ID NO: 2523074 - RNA, 18 nt, Human
cuggcagggugggaugga

SEQ ID NO: 2523075 - RNA, 22 nt, Human
cuggccccgccgccugguacuc

SEQ ID NO: 2523076 - RNA, 16 nt, Human
cuggccccgccgccug

SEQ ID NO: 2523077 - RNA, 14 nt, Human
cuggccccgccgcc

SEQ ID NO: 2523078 - RNA, 12 nt, Human
cuggccccgccg

SEQ ID NO: 2523079 - RNA, 13 nt, Human
cuggccccucagg

SEQ ID NO: 2523080 - RNA, 17 nt, Human
cuggcagggugggaugg

SEQ ID NO: 2523081 - RNA, 18 nt, Human
cuggccccuagaaucagc

SEQ ID NO: 2523082 - RNA, 20 nt, Human
cuggccccuagaaucagccu

SEQ ID NO: 2523083 - RNA, 23 nt, Human
cuggccccgccgccugguacuca

SEQ ID NO: 2523084 - RNA, 21 nt, Human
cuggagaccaugcagagcgcc

SEQ ID NO: 2523085 - RNA, 20 nt, Human
cuggagaccaugcagagcgc

SEQ ID NO: 2523086 - RNA, 18 nt, Human
cuggagaccaugcagagc

SEQ ID NO: 2523087 - RNA, 21 nt, Human
cuggagacgggugggcggcug

SEQ ID NO: 2523088 - RNA, 18 nt, Human
cuggagacgggugggcgg

SEQ ID NO: 2523089 - RNA, 17 nt, Human
cuggagaccagggagcc

SEQ ID NO: 2523090 - RNA, 18 nt, Human
cuggagaccagggagccu

SEQ ID NO: 2523091 - RNA, 19 nt, Human
cuggagaccagggagccuu

SEQ ID NO: 2523092 - RNA, 19 nt, Human
cuggacugucauagaaauu

SEQ ID NO: 2523093 - RNA, 20 nt, Human
cuggacugucauagaaauua

SEQ ID NO: 2523094 - RNA, 23 nt, Human
cuggagacagccccagagcaggg

SEQ ID NO: 2523095 - RNA, 22 nt, Human
cuggagacagccccagagcagg

SEQ ID NO: 2523096 - RNA, 16 nt, Human
cuggacugugugcuca

SEQ ID NO: 2523097 - RNA, 14 nt, Human
cuggcagcucagag

SEQ ID NO: 2523098 - RNA, 13 nt, Human
cuggcagcucaga

SEQ ID NO: 2523099 - RNA, 19 nt, Human
cuggagacuccuaggcagg

SEQ ID NO: 2523100 - RNA, 18 nt, Human
cuggagacuccuaggcag

SEQ ID NO: 2523101 - RNA, 20 nt, Human
cuggagacuccuaggcagga

SEQ ID NO: 2523102 - RNA, 17 nt, Human
cuggagacuaaccccac

SEQ ID NO: 2523103 - RNA, 12 nt, Human
cuggcagcucag

SEQ ID NO: 2523104 - RNA, 21 nt, Human
cuggugauggagguuucauac

SEQ ID NO: 2523105 - RNA, 21 nt, Human
cuggugagucuuggcggcagc

SEQ ID NO: 2523106 - RNA, 20 nt, Human
cuggugagucuuggcggcag

SEQ ID NO: 2523107 - RNA, 19 nt, Human
cuggugagucuuggcggca

SEQ ID NO: 2523108 - RNA, 17 nt, Human
cuggugaggccuugcuc

SEQ ID NO: 2523109 - RNA, 23 nt, Human
cuggugagucuuggcggcagcag

SEQ ID NO: 2523110 - RNA, 16 nt, Human
cuggugaggccuugcu

SEQ ID NO: 2523111 - RNA, 15 nt, Human
cuggugaggccuugc

SEQ ID NO: 2523112 - RNA, 13 nt, Human
cuggugaggccuu

SEQ ID NO: 2523113 - RNA, 16 nt, Human
cuggugagcagacugg

SEQ ID NO: 2523114 - RNA, 23 nt, Human
cuggugacuuuccucuuuggucu

SEQ ID NO: 2523115 - RNA, 22 nt, Human
cuggugacugcgaucuucagag

SEQ ID NO: 2523116 - RNA, 21 nt, Human
cuggugacugcgaucuucaga

SEQ ID NO: 2523117 - RNA, 21 nt, Human
cuggugacuuuccucuuuggu

SEQ ID NO: 2523118 - RNA, 20 nt, Human
cuggugacuuuccucuuugg

SEQ ID NO: 2523119 - RNA, 15 nt, Human
cuggugacuuuccuc

SEQ ID NO: 2523120 - RNA, 23 nt, Human
cuggguuccuuccucugagccuu

SEQ ID NO: 2523121 - RNA, 18 nt, Human
cuggguuccuuccucuga

SEQ ID NO: 2523122 - RNA, 22 nt, Human
cuggguuccuuccucugagccu

SEQ ID NO: 2523123 - RNA, 13 nt, Human
cuggguuccugca

SEQ ID NO: 2523124 - RNA, 21 nt, Human
cuggguucccuuuccuuccau

SEQ ID NO: 2523125 - RNA, 16 nt, Human
cuggguucccuuuccu

SEQ ID NO: 2523126 - RNA, 20 nt, Human
cuggguucccuuuccuucca

SEQ ID NO: 2523127 - RNA, 22 nt, Human
cuggguuccagcaauucuccug

SEQ ID NO: 2523128 - RNA, 14 nt, Human
cuggguucccuuuc

SEQ ID NO: 2523129 - RNA, 14 nt, Human
cuggguucacugca

SEQ ID NO: 2523130 - RNA, 17 nt, Human
cuggguguggcgcagca

SEQ ID NO: 2523131 - RNA, 13 nt, Human
cuggguggccucg

SEQ ID NO: 2523132 - RNA, 21 nt, Human
cuggguggcccauccccccuc

SEQ ID NO: 2523133 - RNA, 20 nt, Human
cuggguggcccauccccccu

SEQ ID NO: 2523134 - RNA, 16 nt, Human
cuggguggcccauccc

SEQ ID NO: 2523135 - RNA, 15 nt, Human
cuggguggcccaucc

SEQ ID NO: 2523136 - RNA, 14 nt, Human
cuggguggcccauc

SEQ ID NO: 2523137 - RNA, 13 nt, Human
cuggguggcccau

SEQ ID NO: 2523138 - RNA, 12 nt, Human
cuggguggccca

SEQ ID NO: 2523139 - RNA, 21 nt, Human
cuggguggcacugccaugcag

SEQ ID NO: 2523140 - RNA, 16 nt, Human
cuggguguggcgcagc

SEQ ID NO: 2523141 - RNA, 23 nt, Human
cuggguggcaccagcagccugga

SEQ ID NO: 2523142 - RNA, 20 nt, Human
cuggguggcacugccaugca

SEQ ID NO: 2523143 - RNA, 16 nt, Human
cuggguggcacugcca

SEQ ID NO: 2523144 - RNA, 15 nt, Human
cuggguggcacugcc

SEQ ID NO: 2523145 - RNA, 14 nt, Human
cuggguggcacugc

SEQ ID NO: 2523146 - RNA, 19 nt, Human
cuggggccucggagccuca

SEQ ID NO: 2523147 - RNA, 22 nt, Human
cuggggccuaucagugugcccc

SEQ ID NO: 2523148 - RNA, 11 nt, Human
cuggggccucc

SEQ ID NO: 2523149 - RNA, 12 nt, Human
cuggggccucca

SEQ ID NO: 2523150 - RNA, 15 nt, Human
cuggggccuccagaa

SEQ ID NO: 2523151 - RNA, 17 nt, Human
cuggggccuccagaacu

SEQ ID NO: 2523152 - RNA, 22 nt, Human
cuggguggcaccagcagccugg

SEQ ID NO: 2523153 - RNA, 16 nt, Human
cuggggccgaaagaac

SEQ ID NO: 2523154 - RNA, 21 nt, Human
cuggggccuaucagugugccc

SEQ ID NO: 2523155 - RNA, 17 nt, Human
cuggggccuaucagugu

SEQ ID NO: 2523156 - RNA, 16 nt, Human
cuggggcaagucccug

SEQ ID NO: 2523157 - RNA, 12 nt, Human
cuggggccccuu

SEQ ID NO: 2523158 - RNA, 18 nt, Human
cuggggccaggcuggguc

SEQ ID NO: 2523159 - RNA, 22 nt, Human
cuggggaugugggagggagcag

SEQ ID NO: 2523160 - RNA, 17 nt, Human
cuggggaugugggaggg

SEQ ID NO: 2523161 - RNA, 14 nt, Human
cuggggcaaguccc

SEQ ID NO: 2523162 - RNA, 21 nt, Human
cuggggcaagucccugacucu

SEQ ID NO: 2523163 - RNA, 22 nt, Human
cuggggaugucucucaugacca

SEQ ID NO: 2523164 - RNA, 19 nt, Human
cuggggaaauaacagcugu

SEQ ID NO: 2523165 - RNA, 22 nt, Human
cuggggaaauaacagcuguggc

SEQ ID NO: 2523166 - RNA, 18 nt, Human
cuggggauugggccccug

SEQ ID NO: 2523167 - RNA, 22 nt, Human
cuggggauugggccccugccag

SEQ ID NO: 2523168 - RNA, 16 nt, Human
cuggggauugggcccc

SEQ ID NO: 2523169 - RNA, 16 nt, Human
cuggggaugugggagg

SEQ ID NO: 2523170 - RNA, 15 nt, Human
cuggggaugugggag

SEQ ID NO: 2523171 - RNA, 13 nt, Human
cugggcagaccuu

SEQ ID NO: 2523172 - RNA, 17 nt, Human
cugggcagaaggccaag

SEQ ID NO: 2523173 - RNA, 16 nt, Human
cugggcagaaggccaa

SEQ ID NO: 2523174 - RNA, 14 nt, Human
cugggcagaaggcc

SEQ ID NO: 2523175 - RNA, 18 nt, Human
cugggcagaaggaagacu

SEQ ID NO: 2523176 - RNA, 16 nt, Human
cugggcagaaggaaga

SEQ ID NO: 2523177 - RNA, 13 nt, Human
cugggcagaaggc

SEQ ID NO: 2523178 - RNA, 16 nt, Human
cuggggaaccugaccc

SEQ ID NO: 2523179 - RNA, 17 nt, Human
cuggggaaccugacccc

SEQ ID NO: 2523180 - RNA, 15 nt, Human
cuggggaaccugacc

SEQ ID NO: 2523181 - RNA, 17 nt, Human
cuggggaaauaacagcu

SEQ ID NO: 2523182 - RNA, 12 nt, Human
cugggcagcugu

SEQ ID NO: 2523183 - RNA, 17 nt, Human
cugggcagaaggaagac

SEQ ID NO: 2523184 - RNA, 14 nt, Human
cuuuuaugugaaac

SEQ ID NO: 2523185 - RNA, 15 nt, Human
cuuuuauguaguaau

SEQ ID NO: 2523186 - RNA, 18 nt, Human
cuuuuauguaguaauuga

SEQ ID NO: 2523187 - RNA, 22 nt, Human
cuuuuauguaguaauugacaug

SEQ ID NO: 2523188 - RNA, 23 nt, Human
cuuuuauguaguaauugacaugu

SEQ ID NO: 2523189 - RNA, 18 nt, Human
cuuuuaugauguauauuu

SEQ ID NO: 2523190 - RNA, 17 nt, Human
cuuuuaugauguauauu

SEQ ID NO: 2523191 - RNA, 19 nt, Human
cuuuuauagcuauuacugu

SEQ ID NO: 2523192 - RNA, 18 nt, Human
cuuuuauagcuauuacug

SEQ ID NO: 2523193 - RNA, 17 nt, Human
cuuuuauagcuauuacu

SEQ ID NO: 2523194 - RNA, 14 nt, Human
cuuuuauagcuauu

SEQ ID NO: 2523195 - RNA, 12 nt, Human
cuuuuauagcua

SEQ ID NO: 2523196 - RNA, 22 nt, Human
cuuuuauaaaccucuaauuuau

SEQ ID NO: 2523197 - RNA, 16 nt, Human
cuuuuauagaugguca

SEQ ID NO: 2523198 - RNA, 12 nt, Human
cuuuuauacucu

SEQ ID NO: 2523199 - RNA, 17 nt, Human
cuuuuauacucuuucug

SEQ ID NO: 2523200 - RNA, 19 nt, Human
cuuuuauacucuuucugua

SEQ ID NO: 2523201 - RNA, 20 nt, Human
cuuuuauacucuuucuguau

SEQ ID NO: 2523202 - RNA, 13 nt, Human
cuuuuaucaaaca

SEQ ID NO: 2523203 - RNA, 19 nt, Human
cuuuuaucacgauauuauu

SEQ ID NO: 2523204 - RNA, 17 nt, Human
cuuuuauccacuuaccu

SEQ ID NO: 2523205 - RNA, 21 nt, Human
cuuuuaguuuuaguugcagaa

SEQ ID NO: 2523206 - RNA, 22 nt, Human
cuuuuaguuuuaguugcagaaa

SEQ ID NO: 2523207 - RNA, 19 nt, Human
cuuuuaguuguaucucuuu

SEQ ID NO: 2523208 - RNA, 20 nt, Human
cuuuuaguuguaucucuuuu

SEQ ID NO: 2523209 - RNA, 21 nt, Human
cuuuuaguuguaucucuuuug

SEQ ID NO: 2523210 - RNA, 15 nt, Human
cuuuguauauuauuu

SEQ ID NO: 2523211 - RNA, 18 nt, Human
cuuuuaguuguaucucuu

SEQ ID NO: 2523212 - RNA, 10 nt, Human
cuuuguauau

SEQ ID NO: 2523213 - RNA, 13 nt, Human
cuuuuauaaacuu

SEQ ID NO: 2523214 - RNA, 16 nt, Human
cuuuuauaaaccucua

SEQ ID NO: 2523215 - RNA, 14 nt, Human
cuuuuauaaaccuc

SEQ ID NO: 2523216 - RNA, 12 nt, Human
cuuuguauauua

SEQ ID NO: 2523217 - RNA, 21 nt, Human
cuuuguaccccccaaccccug

SEQ ID NO: 2523218 - RNA, 19 nt, Human
cuuuguaccccccaacccc

SEQ ID NO: 2523219 - RNA, 14 nt, Human
cuuuguacccccca

SEQ ID NO: 2523220 - RNA, 12 nt, Human
cuuuguaccccc

SEQ ID NO: 2523221 - RNA, 19 nt, Human
cuuuguaaucguuaugugu

SEQ ID NO: 2523222 - RNA, 23 nt, Human
cuuuguaagaguguagaagcauu

SEQ ID NO: 2523223 - RNA, 21 nt, Human
cuuuguaaucguuaugugugu

SEQ ID NO: 2523224 - RNA, 14 nt, Human
cuuuguacuuugug

SEQ ID NO: 2523225 - RNA, 21 nt, Human
cuuugggcugcccuggugcug

SEQ ID NO: 2523226 - RNA, 20 nt, Human
cuuugggcugcccuggugcu

SEQ ID NO: 2523227 - RNA, 19 nt, Human
cuuugggcugcccuggugc

SEQ ID NO: 2523228 - RNA, 15 nt, Human
cuuugggcugcccug

SEQ ID NO: 2523229 - RNA, 18 nt, Human
cuuugaugucauauggaa

SEQ ID NO: 2523230 - RNA, 17 nt, Human
cuuugggccuggcuccc

SEQ ID NO: 2523231 - RNA, 14 nt, Human
cuuugggcugcccu

SEQ ID NO: 2523232 - RNA, 15 nt, Human
cuuuguaaauuguca

SEQ ID NO: 2523233 - RNA, 23 nt, Human
cuuugguuuuuuucuucuguauu

SEQ ID NO: 2523234 - RNA, 15 nt, Human
cuuugauguuaacac

SEQ ID NO: 2523235 - RNA, 17 nt, Human
cuuugauguuaacacau

SEQ ID NO: 2523236 - RNA, 20 nt, Human
cuuuguaagaguguagaagc

SEQ ID NO: 2523237 - RNA, 19 nt, Human
cuuuguaagaguguagaag

SEQ ID NO: 2523238 - RNA, 18 nt, Human
cuuuguaagaguguagaa

SEQ ID NO: 2523239 - RNA, 17 nt, Human
cuuuguaagaguguaga

SEQ ID NO: 2523240 - RNA, 22 nt, Human
cuuuguaagaguguagaagcau

SEQ ID NO: 2523241 - RNA, 21 nt, Human
cuuuguaagaguguagaagca

SEQ ID NO: 2523242 - RNA, 15 nt, Human
cuuucuagccagagg

SEQ ID NO: 2523243 - RNA, 16 nt, Human
cuuuccuuuccccagc

SEQ ID NO: 2523244 - RNA, 19 nt, Human
cuuuccuuguuccccauca

SEQ ID NO: 2523245 - RNA, 17 nt, Human
cuuuccuuuccccagcc

SEQ ID NO: 2523246 - RNA, 16 nt, Human
cuuuccuuggcuccca

SEQ ID NO: 2523247 - RNA, 14 nt, Human
cuuuccuucuugcc

SEQ ID NO: 2523248 - RNA, 15 nt, Human
cuuuccuugcucaac

SEQ ID NO: 2523249 - RNA, 22 nt, Human
cuuuccuuggcucccauucacu

SEQ ID NO: 2523250 - RNA, 17 nt, Human
cuuuccuuggcucccau

SEQ ID NO: 2523251 - RNA, 17 nt, Human
cuuucuacccagcgagc

SEQ ID NO: 2523252 - RNA, 16 nt, Human
cuuucuagccagagga

SEQ ID NO: 2523253 - RNA, 21 nt, Human
cuuugauaauguuaaauuugu

SEQ ID NO: 2523254 - RNA, 22 nt, Human
cuuugauaauguuaaauuugua

SEQ ID NO: 2523255 - RNA, 22 nt, Human
cuuugauauuuucaacgcagcc

SEQ ID NO: 2523256 - RNA, 15 nt, Human
cuuugaucagguggg

SEQ ID NO: 2523257 - RNA, 21 nt, Human
cuuugaugauuaauucaccuu

SEQ ID NO: 2523258 - RNA, 20 nt, Human
cuuucagccaagaauucuua

SEQ ID NO: 2523259 - RNA, 23 nt, Human
cuuucagccaagaauucuuaaau

SEQ ID NO: 2523260 - RNA, 20 nt, Human
cuuucacaaaauuuuauucc

SEQ ID NO: 2523261 - RNA, 13 nt, Human
cuuucagcuguga

SEQ ID NO: 2523262 - RNA, 14 nt, Human
cuuucagcugugaa

SEQ ID NO: 2523263 - RNA, 20 nt, Human
cuuucagggaauuucaggaa

SEQ ID NO: 2523264 - RNA, 23 nt, Human
cuuucaauaggaaaaacugauuu

SEQ ID NO: 2523265 - RNA, 20 nt, Human
cuuucaaugguuugcaagga

SEQ ID NO: 2523266 - RNA, 22 nt, Human
cuuucaaugguuugcaaggaag

SEQ ID NO: 2523267 - RNA, 21 nt, Human
cuuucaaugguuugcaaggaa

SEQ ID NO: 2523268 - RNA, 21 nt, Human
cuuucaauuccguagccagcu

SEQ ID NO: 2523269 - RNA, 14 nt, Human
cuuucacaaccuuc

SEQ ID NO: 2523270 - RNA, 17 nt, Human
cuuucacaaaauuuuau

SEQ ID NO: 2523271 - RNA, 12 nt, Human
cuuuccugcccc

SEQ ID NO: 2523272 - RNA, 10 nt, Human
cuuuccugcc

SEQ ID NO: 2523273 - RNA, 22 nt, Human
cuuuccugaugguacaggaaag

SEQ ID NO: 2523274 - RNA, 21 nt, Human
cuuuccugcaacucaaggacu

SEQ ID NO: 2523275 - RNA, 19 nt, Human
cuuuccugauggcaggaug

SEQ ID NO: 2523276 - RNA, 22 nt, Human
cuuuccugaggcugggcucccu

SEQ ID NO: 2523277 - RNA, 15 nt, Human
cuuuccuuccauccc

SEQ ID NO: 2523278 - RNA, 11 nt, Human
cuuuccuuccu

SEQ ID NO: 2523279 - RNA, 15 nt, Human
cuuuccuuccuuccc

SEQ ID NO: 2523280 - RNA, 13 nt, Human
cuuuccuucuugc

SEQ ID NO: 2523281 - RNA, 16 nt, Human
cuuuccuuccuucccu

SEQ ID NO: 2523282 - RNA, 19 nt, Human
cuuuccugccccaggccug

SEQ ID NO: 2523283 - RNA, 18 nt, Human
cuuuccugccccaggccu

SEQ ID NO: 2523284 - RNA, 14 nt, Human
cuuuccugccccag

SEQ ID NO: 2523285 - RNA, 13 nt, Human
cuuuccugcccca

SEQ ID NO: 2523286 - RNA, 23 nt, Human
cuuuccuggacacucagaccuga

SEQ ID NO: 2523287 - RNA, 20 nt, Human
cuuuccuggacacucagacc

SEQ ID NO: 2523288 - RNA, 11 nt, Human
cuuuccugccu

SEQ ID NO: 2523289 - RNA, 20 nt, Human
cuuuccuguagccuucugua

SEQ ID NO: 2523290 - RNA, 17 nt, Human
gaaaauuuguuauuuug

SEQ ID NO: 2523291 - RNA, 21 nt, Human
gaaaauuuguuauuuugcaac

SEQ ID NO: 2523292 - RNA, 15 nt, Human
gaaaauugcugugcc

SEQ ID NO: 2523293 - RNA, 22 nt, Human
gaaaauugcugugccucccaaa

SEQ ID NO: 2523294 - RNA, 16 nt, Human
gaaaauugcugugccu

SEQ ID NO: 2523295 - RNA, 15 nt, Human
gaaaacuuuucucag

SEQ ID NO: 2523296 - RNA, 17 nt, Human
gaaaacuuuucucagau

SEQ ID NO: 2523297 - RNA, 16 nt, Human
gaaaacuuuucucaga

SEQ ID NO: 2523298 - RNA, 9 nt, Human
gaaaagaaa

SEQ ID NO: 2523299 - RNA, 10 nt, Human
gaaaagaaaa

SEQ ID NO: 2523300 - RNA, 11 nt, Human
gaaaagaaaaa

SEQ ID NO: 2523301 - RNA, 12 nt, Human
gaaaagaaaaaa

SEQ ID NO: 2523302 - RNA, 17 nt, Human
gaaaagaaaaaaaaaga

SEQ ID NO: 2523303 - RNA, 14 nt, Human
gaaaaacugauuuu

SEQ ID NO: 2523304 - RNA, 23 nt, Human
gaaaaacucugggaaauaagaga

SEQ ID NO: 2523305 - RNA, 20 nt, Human
gaaaaacuuccaugaggcca

SEQ ID NO: 2523306 - RNA, 21 nt, Human
gaaaaugcauuguaucgaugu

SEQ ID NO: 2523307 - RNA, 23 nt, Human
gaaaaugcagcagggaugcccug

SEQ ID NO: 2523308 - RNA, 19 nt, Human
gaaaagaaaaaaaaagaaa

SEQ ID NO: 2523309 - RNA, 20 nt, Human
gaaaagaaaaaaaaagaaaa

SEQ ID NO: 2523310 - RNA, 18 nt, Human
gaaaagaaaaaugagccu

SEQ ID NO: 2523311 - RNA, 21 nt, Human
gaaaauggaagacagcucuua

SEQ ID NO: 2523312 - RNA, 23 nt, Human
gaaaaugcuguauuagucacaga

SEQ ID NO: 2523313 - RNA, 21 nt, Human
gaaaauuccuauugauuuucu

SEQ ID NO: 2523314 - RNA, 15 nt, Human
gaaaauguaugugua

SEQ ID NO: 2523315 - RNA, 18 nt, Human
gaaaauucacuauuggcu

SEQ ID NO: 2523316 - RNA, 21 nt, Human
gaaaaugucagaaaccaguua

SEQ ID NO: 2523317 - RNA, 22 nt, Human
gaaaaugucagaaaccaguuau

SEQ ID NO: 2523318 - RNA, 13 nt, Human
gaaaauucacuau

SEQ ID NO: 2523319 - RNA, 22 nt, Human
gaaaauucaaaaaguguuuauu

SEQ ID NO: 2523320 - RNA, 23 nt, Human
gaaaauggacguguuaugacucc

SEQ ID NO: 2523321 - RNA, 19 nt, Human
gaaaauggacguguuauga

SEQ ID NO: 2523322 - RNA, 17 nt, Human
gaaaauguaagcuguuu

SEQ ID NO: 2523323 - RNA, 19 nt, Human
gaaaauguacugagauuuu

SEQ ID NO: 2523324 - RNA, 18 nt, Human
gaaaauguaagcuguuua

SEQ ID NO: 2523325 - RNA, 12 nt, Human
gaaaauguacug

SEQ ID NO: 2523326 - RNA, 14 nt, Human
gaaaaugguauuuu

SEQ ID NO: 2523327 - RNA, 18 nt, Human
gaaaaugguccaggagaa

SEQ ID NO: 2523328 - RNA, 22 nt, Human
gaaaaugcagcagggaugcccu

SEQ ID NO: 2523329 - RNA, 15 nt, Human
gaaaaaaaagaaagc

SEQ ID NO: 2523330 - RNA, 19 nt, Human
gaaaaaaaaguuucagaga

SEQ ID NO: 2523331 - RNA, 22 nt, Human
gaaaaaaaaguuucagagaagu

SEQ ID NO: 2523332 - RNA, 21 nt, Human
gaaaaaaaaagucagacugcu

SEQ ID NO: 2523333 - RNA, 23 nt, Human
cuuuuuuuuuuuuuaaagacaga

SEQ ID NO: 2523334 - RNA, 21 nt, Human
cuuuuuuuuuuuugagacaga

SEQ ID NO: 2523335 - RNA, 22 nt, Human
cuuuuuuuuuuuuuaaagacag

SEQ ID NO: 2523336 - RNA, 20 nt, Human
gaaaaaaaauguucuuuggg

SEQ ID NO: 2523337 - RNA, 20 nt, Human
gaaaaaaaguuugccagaag

SEQ ID NO: 2523338 - RNA, 13 nt, Human
gaaaaaaaugacu

SEQ ID NO: 2523339 - RNA, 18 nt, Human
gaaaaaaaguuugccaga

SEQ ID NO: 2523340 - RNA, 19 nt, Human
gaaaaaaaucguccaggga

SEQ ID NO: 2523341 - RNA, 17 nt, Human
gaaaaacacaagcaaaa

SEQ ID NO: 2523342 - RNA, 15 nt, Human
gaaaaacacaagcaa

SEQ ID NO: 2523343 - RNA, 19 nt, Human
gaaaaacaaauucaucaaa

SEQ ID NO: 2523344 - RNA, 14 nt, Human
gaaaaacacaagca

SEQ ID NO: 2523345 - RNA, 11 nt, Human
gaaaaacaggu

SEQ ID NO: 2523346 - RNA, 18 nt, Human
gaaaaacaucugaaagcc

SEQ ID NO: 2523347 - RNA, 18 nt, Human
gaaaaacguguugccuug

SEQ ID NO: 2523348 - RNA, 20 nt, Human
cuuuuuuuuuuuugagacag

SEQ ID NO: 2523349 - RNA, 17 nt, Human
cuuuuuuuuucucuuuc

SEQ ID NO: 2523350 - RNA, 15 nt, Human
cuuuuuuuuucucuu

SEQ ID NO: 2523351 - RNA, 16 nt, Human
cuuuuuuuuuccaaaa

SEQ ID NO: 2523352 - RNA, 15 nt, Human
cuuuuuuuuuccaaa

SEQ ID NO: 2523353 - RNA, 22 nt, Human
cuuuuuuuuucucuuucucucc

SEQ ID NO: 2523354 - RNA, 18 nt, Human
cuuuuuuuuucucuuucu

SEQ ID NO: 2523355 - RNA, 19 nt, Human
cuuuuuuuccaucuuuaca

SEQ ID NO: 2523356 - RNA, 23 nt, Human
cuuuuuuggcuuuagacacuggc

SEQ ID NO: 2523357 - RNA, 12 nt, Human
cuuuugugcauu

SEQ ID NO: 2523358 - RNA, 13 nt, Human
cuuuugugcauua

SEQ ID NO: 2523359 - RNA, 23 nt, Human
cuuuuuuggcugcugaaggcucg

SEQ ID NO: 2523360 - RNA, 13 nt, Human
cuuuuuuguuuug

SEQ ID NO: 2523361 - RNA, 20 nt, Human
cuuuuuuggggauaugcuua

SEQ ID NO: 2523362 - RNA, 23 nt, Human
cuuuugcccacacuugggagcaa

SEQ ID NO: 2523363 - RNA, 17 nt, Human
cuuuugccauuaaacuu

SEQ ID NO: 2523364 - RNA, 20 nt, Human
cuuuugcccuucacaguguu

SEQ ID NO: 2523365 - RNA, 15 nt, Human
cuuuugcccuuugau

SEQ ID NO: 2523366 - RNA, 21 nt, Human
cuuuugcccuucacaguguuu

SEQ ID NO: 2523367 - RNA, 16 nt, Human
cuuuugccguuauuaa

SEQ ID NO: 2523368 - RNA, 13 nt, Human
cuuuuggagucag

SEQ ID NO: 2523369 - RNA, 13 nt, Human
cuuuugccauuga

SEQ ID NO: 2523370 - RNA, 15 nt, Human
cuuuugcaucauugu

SEQ ID NO: 2523371 - RNA, 16 nt, Human
cuuuugguuaagucug

SEQ ID NO: 2523372 - RNA, 20 nt, Human
cuuuugguuaagucuguuuu

SEQ ID NO: 2523373 - RNA, 15 nt, Human
cuuuuggcuuccaug

SEQ ID NO: 2523374 - RNA, 20 nt, Human
cuuuuggcccccgagcuggg

SEQ ID NO: 2523375 - RNA, 13 nt, Human
cuuuugguuaagu

SEQ ID NO: 2523376 - RNA, 13 nt, Human
cuuuuguaaaugu

SEQ ID NO: 2523377 - RNA, 15 nt, Human
cuuuuggcauuuuac

SEQ ID NO: 2523378 - RNA, 14 nt, Human
cuuuuggcuuccau

SEQ ID NO: 2523379 - RNA, 15 nt, Human
cuuuuggcacugaga

SEQ ID NO: 2523380 - RNA, 13 nt, Human
cuuuuggcccccg

SEQ ID NO: 2523381 - RNA, 14 nt, Human
cuuuugugaacuuu

SEQ ID NO: 2523382 - RNA, 18 nt, Human
cuuuugucuaugggacuc

SEQ ID NO: 2523383 - RNA, 10 nt, Human
cuuuuguaag

SEQ ID NO: 2523384 - RNA, 13 nt, Human
cuuuuguaagaca

SEQ ID NO: 2523385 - RNA, 20 nt, Human
cuuuuguaagacaaagguuu

SEQ ID NO: 2523386 - RNA, 12 nt, Human
cuuuuguaauuu

SEQ ID NO: 2523387 - RNA, 22 nt, Human
gaaacuuuauucaaguaaaaau

SEQ ID NO: 2523388 - RNA, 14 nt, Human
gaaagacuauucaa

SEQ ID NO: 2523389 - RNA, 15 nt, Human
gaaagacuauucaaa

SEQ ID NO: 2523390 - RNA, 21 nt, Human
gaaagaaaauaccaaggaaca

SEQ ID NO: 2523391 - RNA, 20 nt, Human
gaaagacuaucuaaauguug

SEQ ID NO: 2523392 - RNA, 17 nt, Human
gaaagacuauucaaaca

SEQ ID NO: 2523393 - RNA, 21 nt, Human
gaaaggcuccaggagcagcca

SEQ ID NO: 2523394 - RNA, 22 nt, Human
gaaaggcuccaggagcagccac

SEQ ID NO: 2523395 - RNA, 20 nt, Human
gaaaggcuccaggagcagcc

SEQ ID NO: 2523396 - RNA, 19 nt, Human
gaaaggcucugaaagccag

SEQ ID NO: 2523397 - RNA, 15 nt, Human
gaaaggcucugaaag

SEQ ID NO: 2523398 - RNA, 17 nt, Human
gaaaggcucugaaagcc

SEQ ID NO: 2523399 - RNA, 17 nt, Human
gaaauauuuauuuuaau

SEQ ID NO: 2523400 - RNA, 23 nt, Human
gaaaggugaguuugagcugccuu

SEQ ID NO: 2523401 - RNA, 22 nt, Human
gaaaggugaguuugagcugccu

SEQ ID NO: 2523402 - RNA, 22 nt, Human
gaaagggggucccagugggagg

SEQ ID NO: 2523403 - RNA, 18 nt, Human
gaaagggggucccagugg

SEQ ID NO: 2523404 - RNA, 17 nt, Human
gaaagggggucccagug

SEQ ID NO: 2523405 - RNA, 16 nt, Human
gaaagggggucccagu

SEQ ID NO: 2523406 - RNA, 14 nt, Human
gaaaggggugcuuu

SEQ ID NO: 2523407 - RNA, 23 nt, Human
gaaagggggucccagugggaggg

SEQ ID NO: 2523408 - RNA, 17 nt, Human
gaaaggggucggcugac

SEQ ID NO: 2523409 - RNA, 23 nt, Human
gaaaggguguuuuucuguuuuau

SEQ ID NO: 2523410 - RNA, 19 nt, Human
gaaagggugcugcuucccu

SEQ ID NO: 2523411 - RNA, 15 nt, Human
gaaaggggugcuuuu

SEQ ID NO: 2523412 - RNA, 16 nt, Human
gaaagggugcugcuuc

SEQ ID NO: 2523413 - RNA, 22 nt, Human
gaaagggacuuggaagcuccgc

SEQ ID NO: 2523414 - RNA, 17 nt, Human
gaaaggggggagcuggg

SEQ ID NO: 2523415 - RNA, 22 nt, Human
gaaagggagcuaucaggaacag

SEQ ID NO: 2523416 - RNA, 20 nt, Human
gaaagggacgcuacccggga

SEQ ID NO: 2523417 - RNA, 19 nt, Human
gaaagggacuuggaagcuc

SEQ ID NO: 2523418 - RNA, 19 nt, Human
gaaaucaaauaugcaaagc

SEQ ID NO: 2523419 - RNA, 20 nt, Human
gaaaucaaauaugcaaagca

SEQ ID NO: 2523420 - RNA, 19 nt, Human
gaaaucaccgaaaacgugg

SEQ ID NO: 2523421 - RNA, 13 nt, Human
gaaagguucugcc

SEQ ID NO: 2523422 - RNA, 18 nt, Human
gaaaucaguaauauuuau

SEQ ID NO: 2523423 - RNA, 20 nt, Human
gaaaucaguaauauuuauau

SEQ ID NO: 2523424 - RNA, 22 nt, Human
gaaauauuuauuuuaauaaugu

SEQ ID NO: 2523425 - RNA, 18 nt, Human
gaaauauuuauuuuaaua

SEQ ID NO: 2523426 - RNA, 18 nt, Human
gaaaucaaauaugcaaag

SEQ ID NO: 2523427 - RNA, 18 nt, Human
gaaagguuacccuguaac

SEQ ID NO: 2523428 - RNA, 21 nt, Human
cuuccauaaucuggacuccuc

SEQ ID NO: 2523429 - RNA, 11 nt, Human
cuuccauaauc

SEQ ID NO: 2523430 - RNA, 11 nt, Human
cuuccauaaug

SEQ ID NO: 2523431 - RNA, 22 nt, Human
cuuccauaaugcuacugucuca

SEQ ID NO: 2523432 - RNA, 18 nt, Human
cuuccauaaugcuacugu

SEQ ID NO: 2523433 - RNA, 23 nt, Human
cuuccauaauguauaaagaacaa

SEQ ID NO: 2523434 - RNA, 11 nt, Human
cuuccauaauu

SEQ ID NO: 2523435 - RNA, 11 nt, Human
cuucccaccuc

SEQ ID NO: 2523436 - RNA, 14 nt, Human
cuuccauaugaccu

SEQ ID NO: 2523437 - RNA, 16 nt, Human
cuuccauaugaccuca

SEQ ID NO: 2523438 - RNA, 22 nt, Human
cuuccauagccuaaucccuggg

SEQ ID NO: 2523439 - RNA, 14 nt, Human
cuuccauacagcuc

SEQ ID NO: 2523440 - RNA, 14 nt, Human
cuuccauaauuaug

SEQ ID NO: 2523441 - RNA, 16 nt, Human
cuuccauacagcucua

SEQ ID NO: 2523442 - RNA, 14 nt, Human
cuuccauagccuaa

SEQ ID NO: 2523443 - RNA, 23 nt, Human
cuucccaccucucucacuccuug

SEQ ID NO: 2523444 - RNA, 21 nt, Human
cuucccaccucucucacuccu

SEQ ID NO: 2523445 - RNA, 21 nt, Human
cuucccacccaucgcugugug

SEQ ID NO: 2523446 - RNA, 15 nt, Human
cuucccacucacccc

SEQ ID NO: 2523447 - RNA, 17 nt, Human
cuucccacccaucgcug

SEQ ID NO: 2523448 - RNA, 16 nt, Human
cuucacuguauaaaua

SEQ ID NO: 2523449 - RNA, 13 nt, Human
cuucacuguauaa

SEQ ID NO: 2523450 - RNA, 19 nt, Human
cuucacugccuuugcuccu

SEQ ID NO: 2523451 - RNA, 17 nt, Human
cuucacugccuuugcuc

SEQ ID NO: 2523452 - RNA, 15 nt, Human
cuucacugccuuugc

SEQ ID NO: 2523453 - RNA, 14 nt, Human
cuucacugccuuug

SEQ ID NO: 2523454 - RNA, 13 nt, Human
cuucacugccuuu

SEQ ID NO: 2523455 - RNA, 17 nt, Human
cuucagagacuccugca

SEQ ID NO: 2523456 - RNA, 15 nt, Human
cuucacuguaaaaua

SEQ ID NO: 2523457 - RNA, 14 nt, Human
cuucacuccggugu

SEQ ID NO: 2523458 - RNA, 19 nt, Human
cuucacuccggugugccug

SEQ ID NO: 2523459 - RNA, 22 nt, Human
cuucacuccggugugccugcag

SEQ ID NO: 2523460 - RNA, 23 nt, Human
cuucacuccggugugccugcagc

SEQ ID NO: 2523461 - RNA, 24 nt, Human
cuucacuccggugugccugcagcc

SEQ ID NO: 2523462 - RNA, 15 nt, Human
cuucacucucugaag

SEQ ID NO: 2523463 - RNA, 17 nt, Human
cuucacucgcccccggg

SEQ ID NO: 2523464 - RNA, 20 nt, Human
cuucacgaaguguugcaugg

SEQ ID NO: 2523465 - RNA, 19 nt, Human
cuucacgaaguguugcaug

SEQ ID NO: 2523466 - RNA, 13 nt, Human
cuucacggcagga

SEQ ID NO: 2523467 - RNA, 20 nt, Human
cuucacuccagccuggguga

SEQ ID NO: 2523468 - RNA, 16 nt, Human
cuucacggcaggacaa

SEQ ID NO: 2523469 - RNA, 17 nt, Human
cuucacggcaggacaac

SEQ ID NO: 2523470 - RNA, 17 nt, Human
cuucaguuuccuggucu

SEQ ID NO: 2523471 - RNA, 17 nt, Human
cuucaguuguuuucccg

SEQ ID NO: 2523472 - RNA, 14 nt, Human
cuucaguuguuuuc

SEQ ID NO: 2523473 - RNA, 17 nt, Human
cuucaguuaugauuuuu

SEQ ID NO: 2523474 - RNA, 9 nt, Human
cuucauaca

SEQ ID NO: 2523475 - RNA, 10 nt, Human
cuucauacac

SEQ ID NO: 2523476 - RNA, 19 nt, Human
cuucauaacaauuuuagga

SEQ ID NO: 2523477 - RNA, 15 nt, Human
cuucauaacaauuuu

SEQ ID NO: 2523478 - RNA, 14 nt, Human
cuucauaaaugaag

SEQ ID NO: 2523479 - RNA, 19 nt, Human
cuucagagacuccugcagg

SEQ ID NO: 2523480 - RNA, 18 nt, Human
cuucagagacuccugcag

SEQ ID NO: 2523481 - RNA, 20 nt, Human
cuucagagacuccugcaggc

SEQ ID NO: 2523482 - RNA, 23 nt, Human
cuucacuguauaaauaggagagg

SEQ ID NO: 2523483 - RNA, 17 nt, Human
cuucacuguauaaauag

SEQ ID NO: 2523484 - RNA, 12 nt, Human
cuucaucuggaa

SEQ ID NO: 2523485 - RNA, 13 nt, Human
cuucaucuggaac

SEQ ID NO: 2523486 - RNA, 15 nt, Human
cuucaucuggaacca

SEQ ID NO: 2523487 - RNA, 11 nt, Human
cuucaucugga

SEQ ID NO: 2523488 - RNA, 15 nt, Human
cuucauauugcugag

SEQ ID NO: 2523489 - RNA, 14 nt, Human
cuucaucuggcaac

SEQ ID NO: 2523490 - RNA, 19 nt, Human
cuucaucuggcaacaucuu

SEQ ID NO: 2523491 - RNA, 13 nt, Human
cuucaucuggcaa

SEQ ID NO: 2523492 - RNA, 12 nt, Human
cuucaucuucuc

SEQ ID NO: 2523493 - RNA, 23 nt, Human
cuucaucuggcaacaucuuuauc

SEQ ID NO: 2523494 - RNA, 12 nt, Human
cuucauacaggg

SEQ ID NO: 2523495 - RNA, 13 nt, Human
cuucauacaggga

SEQ ID NO: 2523496 - RNA, 12 nt, Human
cuucauaaucca

SEQ ID NO: 2523497 - RNA, 20 nt, Human
cuucauaccuacauguauuu

SEQ ID NO: 2523498 - RNA, 22 nt, Human
cuucauacagggaugguguuca

SEQ ID NO: 2523499 - RNA, 21 nt, Human
cuucauacuuuuuuucacagu

SEQ ID NO: 2523500 - RNA, 18 nt, Human
cuucauagcagauuuuaa

SEQ ID NO: 2523501 - RNA, 23 nt, Human
cuuccagugaggcucugcccuug

SEQ ID NO: 2523502 - RNA, 22 nt, Human
cuuccagugaggcucugcccuu

SEQ ID NO: 2523503 - RNA, 23 nt, Human
cuuccagugguuugagacacugg

SEQ ID NO: 2523504 - RNA, 19 nt, Human
cuuccaguguccuuagaac

SEQ ID NO: 2523505 - RNA, 13 nt, Human
cuucaugcaugga

SEQ ID NO: 2523506 - RNA, 15 nt, Human
cuucaugcauggaaa

SEQ ID NO: 2523507 - RNA, 18 nt, Human
cuuccaguguccuuagaa

SEQ ID NO: 2523508 - RNA, 17 nt, Human
cuucaugcaaugacauc

SEQ ID NO: 2523509 - RNA, 20 nt, Human
cuucaucuucucagcuccca

SEQ ID NO: 2523510 - RNA, 16 nt, Human
cuucaucuucucagcu

SEQ ID NO: 2523511 - RNA, 15 nt, Human
cuucaucuucucagc

SEQ ID NO: 2523512 - RNA, 17 nt, Human
cuucaucuucucagcuc

SEQ ID NO: 2523513 - RNA, 12 nt, Human
cuucaugacauu

SEQ ID NO: 2523514 - RNA, 12 nt, Human
cuucaugcaaug

SEQ ID NO: 2523515 - RNA, 13 nt, Human
cuucaugcaauga

SEQ ID NO: 2523516 - RNA, 21 nt, Human
cuuccagugaggcucugcccu

SEQ ID NO: 2523517 - RNA, 22 nt, Human
cuucaugcaaugacaucuucaa

SEQ ID NO: 2523518 - RNA, 16 nt, Human
cugugcugaggccuua

SEQ ID NO: 2523519 - RNA, 13 nt, Human
cugugcugaggcc

SEQ ID NO: 2523520 - RNA, 12 nt, Human
cugugcugaggc

SEQ ID NO: 2523521 - RNA, 18 nt, Human
cugugcugacccuccugu

SEQ ID NO: 2523522 - RNA, 19 nt, Human
cugugcugagucugaaggc

SEQ ID NO: 2523523 - RNA, 14 nt, Human
cugugcugagucug

SEQ ID NO: 2523524 - RNA, 17 nt, Human
cugugcugacccuccug

SEQ ID NO: 2523525 - RNA, 14 nt, Human
cugugcugacccuc

SEQ ID NO: 2523526 - RNA, 13 nt, Human
cugugcugacccu

SEQ ID NO: 2523527 - RNA, 22 nt, Human
cugugcuccgugccuccaccac

SEQ ID NO: 2523528 - RNA, 21 nt, Human
cugugcuccgugccuccacca

SEQ ID NO: 2523529 - RNA, 20 nt, Human
cugugcuccgugccuccacc

SEQ ID NO: 2523530 - RNA, 12 nt, Human
cugugcugaguc

SEQ ID NO: 2523531 - RNA, 21 nt, Human
cugugcugaggccuuaucauu

SEQ ID NO: 2523532 - RNA, 20 nt, Human
cuuauggaacacucugagac

SEQ ID NO: 2523533 - RNA, 19 nt, Human
cuuauggaacacucugaga

SEQ ID NO: 2523534 - RNA, 17 nt, Human
cuuauggaacacucuga

SEQ ID NO: 2523535 - RNA, 21 nt, Human
cuuauucaggaaaagccucug

SEQ ID NO: 2523536 - RNA, 17 nt, Human
cuuauuagagugucuuu

SEQ ID NO: 2523537 - RNA, 20 nt, Human
cuuauuagagugucuuucca

SEQ ID NO: 2523538 - RNA, 21 nt, Human
cuuauuagagugucuuuccac

SEQ ID NO: 2523539 - RNA, 17 nt, Human
cuuauuagggagaaaau

SEQ ID NO: 2523540 - RNA, 12 nt, Human
cuuauugcaaaa

SEQ ID NO: 2523541 - RNA, 14 nt, Human
cuuauucuguagau

SEQ ID NO: 2523542 - RNA, 12 nt, Human
cuuauucuguag

SEQ ID NO: 2523543 - RNA, 21 nt, Human
cuucaccuuuguccccaccgc

SEQ ID NO: 2523544 - RNA, 15 nt, Human
cuuauuggaacucug

SEQ ID NO: 2523545 - RNA, 17 nt, Human
cuuauuggaacucugcu

SEQ ID NO: 2523546 - RNA, 18 nt, Human
cuuauuggcagcucuacu

SEQ ID NO: 2523547 - RNA, 15 nt, Human
cuuauuguaccucuc

SEQ ID NO: 2523548 - RNA, 14 nt, Human
cuuauuguaccucu

SEQ ID NO: 2523549 - RNA, 18 nt, Human
cuuauuggaacucugcuu

SEQ ID NO: 2523550 - RNA, 13 nt, Human
cuuauuguaccuc

SEQ ID NO: 2523551 - RNA, 22 nt, Human
cuucaccuuuguccccaccgca

SEQ ID NO: 2523552 - RNA, 18 nt, Human
cuuauuguaccucucuua

SEQ ID NO: 2523553 - RNA, 18 nt, Human
cuucacgaaguguugcau

SEQ ID NO: 2523554 - RNA, 15 nt, Human
cuucacggaagagcc

SEQ ID NO: 2523555 - RNA, 19 nt, Human
cuucacggaagagccuugc

SEQ ID NO: 2523556 - RNA, 16 nt, Human
cuuauggaacacucug

SEQ ID NO: 2523557 - RNA, 13 nt, Human
cuuauggaacacu

SEQ ID NO: 2523558 - RNA, 21 nt, Human
cuuaugccauguuaauuucau

SEQ ID NO: 2523559 - RNA, 22 nt, Human
cuuaugccacgggaaguuuaga

SEQ ID NO: 2523560 - RNA, 15 nt, Human
cuucuuccaucccag

SEQ ID NO: 2523561 - RNA, 14 nt, Human
cuucuuccauccca

SEQ ID NO: 2523562 - RNA, 19 nt, Human
cuucuuccaggugcccagc

SEQ ID NO: 2523563 - RNA, 20 nt, Human
cuucuuccaucccaggacac

SEQ ID NO: 2523564 - RNA, 18 nt, Human
cuucuuccaucccaggac

SEQ ID NO: 2523565 - RNA, 20 nt, Human
cuucuucggggaacuccugg

SEQ ID NO: 2523566 - RNA, 15 nt, Human
cuucuuccugaagcu

SEQ ID NO: 2523567 - RNA, 14 nt, Human
cuucuucccucccu

SEQ ID NO: 2523568 - RNA, 17 nt, Human
cuucuucggggaacucc

SEQ ID NO: 2523569 - RNA, 22 nt, Human
cuucugacccaugcugcccugu

SEQ ID NO: 2523570 - RNA, 21 nt, Human
cuucugacccaugcugcccug

SEQ ID NO: 2523571 - RNA, 17 nt, Human
cuucucaagugccuuaa

SEQ ID NO: 2523572 - RNA, 16 nt, Human
cuucucaagugccuua

SEQ ID NO: 2523573 - RNA, 15 nt, Human
cuucucaagugccuu

SEQ ID NO: 2523574 - RNA, 14 nt, Human
cuucucaagugccu

SEQ ID NO: 2523575 - RNA, 18 nt, Human
cuucucaagugccuuaau

SEQ ID NO: 2523576 - RNA, 20 nt, Human
cuucugacccaugcugcccu

SEQ ID NO: 2523577 - RNA, 23 nt, Human
cuucugacccaugcugcccugug

SEQ ID NO: 2523578 - RNA, 15 nt, Human
cuucugaggacauuc

SEQ ID NO: 2523579 - RNA, 20 nt, Human
cuucugaggacauuccaaga

SEQ ID NO: 2523580 - RNA, 14 nt, Human
cuucugcacccucc

SEQ ID NO: 2523581 - RNA, 13 nt, Human
cuucugcacccuc

SEQ ID NO: 2523582 - RNA, 12 nt, Human
cuucugcacccu

SEQ ID NO: 2523583 - RNA, 19 nt, Human
cuucugcaauugcuuagga

SEQ ID NO: 2523584 - RNA, 17 nt, Human
cuucuguugcugccuca

SEQ ID NO: 2523585 - RNA, 18 nt, Human
cuucuguugcugccucau

SEQ ID NO: 2523586 - RNA, 19 nt, Human
cuucuguugcugccucaug

SEQ ID NO: 2523587 - RNA, 20 nt, Human
cuucuguugcugccucaugc

SEQ ID NO: 2523588 - RNA, 22 nt, Human
cuucugcacccuccacccuguc

SEQ ID NO: 2523589 - RNA, 21 nt, Human
cuucugcacccuccacccugu

SEQ ID NO: 2523590 - RNA, 20 nt, Human
cuucugcacccuccacccug

SEQ ID NO: 2523591 - RNA, 19 nt, Human
cuucugcacccuccacccu

SEQ ID NO: 2523592 - RNA, 18 nt, Human
cuucugcacccuccaccc

SEQ ID NO: 2523593 - RNA, 17 nt, Human
cuucugcacccuccacc

SEQ ID NO: 2523594 - RNA, 16 nt, Human
cuucugcacccuccac

SEQ ID NO: 2523595 - RNA, 15 nt, Human
cuucugcacccucca

SEQ ID NO: 2523596 - RNA, 18 nt, Human
cuucugccacuucccagg

SEQ ID NO: 2523597 - RNA, 17 nt, Human
cuucugccacuucccag

SEQ ID NO: 2523598 - RNA, 16 nt, Human
cuucugccacuuccca

SEQ ID NO: 2523599 - RNA, 14 nt, Human
cuucugccacuucc

SEQ ID NO: 2523600 - RNA, 12 nt, Human
cuucugccacuu

SEQ ID NO: 2523601 - RNA, 11 nt, Human
cuucugccacu

SEQ ID NO: 2523602 - RNA, 17 nt, Human
cuucuucagccaccucu

SEQ ID NO: 2523603 - RNA, 21 nt, Human
cuucuucagccaccucucuuu

SEQ ID NO: 2523604 - RNA, 16 nt, Human
cuucuucagagcugac

SEQ ID NO: 2523605 - RNA, 18 nt, Human
cuucuucagaucagugcu

SEQ ID NO: 2523606 - RNA, 14 nt, Human
cuucuucagagcug

SEQ ID NO: 2523607 - RNA, 23 nt, Human
cuucuucagagacuccugcaggc

SEQ ID NO: 2523608 - RNA, 21 nt, Human
cuucuguugcugccucaugcu

SEQ ID NO: 2523609 - RNA, 20 nt, Human
cuucugccacuucccaggua

SEQ ID NO: 2523610 - RNA, 15 nt, Human
cuucuguugcugccu

SEQ ID NO: 2523611 - RNA, 19 nt, Human
cuuccuccucccuccugcc

SEQ ID NO: 2523612 - RNA, 18 nt, Human
cuuccuccucccuccugc

SEQ ID NO: 2523613 - RNA, 16 nt, Human
cuuccuccucccuccu

SEQ ID NO: 2523614 - RNA, 14 nt, Human
cuuccuccucccuc

SEQ ID NO: 2523615 - RNA, 17 nt, Human
cuuccuccuccccacuu

SEQ ID NO: 2523616 - RNA, 16 nt, Human
cuuccuccuccccacu

SEQ ID NO: 2523617 - RNA, 21 nt, Human
cuuccuccgaggccaguaccu

SEQ ID NO: 2523618 - RNA, 20 nt, Human
cuuccuccgaggccaguacc

SEQ ID NO: 2523619 - RNA, 17 nt, Human
cuuccuccgaggccagu

SEQ ID NO: 2523620 - RNA, 17 nt, Human
cuuccugcaacaccuug

SEQ ID NO: 2523621 - RNA, 15 nt, Human
cuuccuccugggccc

SEQ ID NO: 2523622 - RNA, 14 nt, Human
cuuccugaguucag

SEQ ID NO: 2523623 - RNA, 14 nt, Human
cuuccuccuggaaa

SEQ ID NO: 2523624 - RNA, 13 nt, Human
cuuccuccuggaa

SEQ ID NO: 2523625 - RNA, 12 nt, Human
cuuccuccuggg

SEQ ID NO: 2523626 - RNA, 14 nt, Human
cuuccuccugggcc

SEQ ID NO: 2523627 - RNA, 12 nt, Human
cuuccuccugga

SEQ ID NO: 2523628 - RNA, 21 nt, Human
cuuccuccucccuccugccga

SEQ ID NO: 2523629 - RNA, 22 nt, Human
cuucuaaguaaaaccacagcag

SEQ ID NO: 2523630 - RNA, 23 nt, Human
cuucuaaguaaaaccacagcagu

SEQ ID NO: 2523631 - RNA, 15 nt, Human
cuuccugcaaggacu

SEQ ID NO: 2523632 - RNA, 13 nt, Human
cuuccugcaagga

SEQ ID NO: 2523633 - RNA, 17 nt, Human
cuuccugcauucaccca

SEQ ID NO: 2523634 - RNA, 21 nt, Human
cuuccugccaccagucacugu

SEQ ID NO: 2523635 - RNA, 18 nt, Human
cuuccugccaccagucac

SEQ ID NO: 2523636 - RNA, 16 nt, Human
cuuccugccaccaguc

SEQ ID NO: 2523637 - RNA, 15 nt, Human
cuuccugccaccagu

SEQ ID NO: 2523638 - RNA, 20 nt, Human
cuuccugcauucacccagac

SEQ ID NO: 2523639 - RNA, 21 nt, Human
cuuccugcauucacccagaca

SEQ ID NO: 2523640 - RNA, 13 nt, Human
cuuccugccacca

SEQ ID NO: 2523641 - RNA, 22 nt, Human
cuuccugcauucacccagacag

SEQ ID NO: 2523642 - RNA, 11 nt, Human
cuucuaauaua

SEQ ID NO: 2523643 - RNA, 17 nt, Human
cuuccugccaccugcug

SEQ ID NO: 2523644 - RNA, 21 nt, Human
cuucuacuuuuaaguugcuga

SEQ ID NO: 2523645 - RNA, 13 nt, Human
cuucuacuuuuaa

SEQ ID NO: 2523646 - RNA, 13 nt, Human
cuucuagaaccag

SEQ ID NO: 2523647 - RNA, 18 nt, Human
cuucuaauauauuuuuau

SEQ ID NO: 2523648 - RNA, 15 nt, Human
cuucuaauauauuuu

SEQ ID NO: 2523649 - RNA, 14 nt, Human
cuucuaauauauuu

SEQ ID NO: 2523650 - RNA, 12 nt, Human
cuucuaauauau

SEQ ID NO: 2523651 - RNA, 13 nt, Human
cuucuacuucugc

SEQ ID NO: 2523652 - RNA, 20 nt, Human
cuucuaauauauuuuuauau

SEQ ID NO: 2523653 - RNA, 21 nt, Human
cuucuacuucugcccuugcca

SEQ ID NO: 2523654 - RNA, 19 nt, Human
cuucucaaaccuguuuaaa

SEQ ID NO: 2523655 - RNA, 17 nt, Human
cuucuauuuuguaaacu

SEQ ID NO: 2523656 - RNA, 16 nt, Human
cuucucaaaccuugau

SEQ ID NO: 2523657 - RNA, 22 nt, Human
cuucucaaaccuguuuaaauau

SEQ ID NO: 2523658 - RNA, 12 nt, Human
cuucucaagugc

SEQ ID NO: 2523659 - RNA, 15 nt, Human
cuucucaagauacug

SEQ ID NO: 2523660 - RNA, 15 nt, Human
cuucuauuuuguaaa

SEQ ID NO: 2523661 - RNA, 16 nt, Human
cuucuauuuuguaaac

SEQ ID NO: 2523662 - RNA, 14 nt, Human
cuucuauuuuguaa

SEQ ID NO: 2523663 - RNA, 13 nt, Human
cuucuauuuuauu

SEQ ID NO: 2523664 - RNA, 17 nt, Human
cuucuagaaccaggcaa

SEQ ID NO: 2523665 - RNA, 19 nt, Human
cuucuaggacgccacccag

SEQ ID NO: 2523666 - RNA, 16 nt, Human
cuucuaggacgccacc

SEQ ID NO: 2523667 - RNA, 19 nt, Human
cuucuaggguuauugcauu

SEQ ID NO: 2523668 - RNA, 13 nt, Human
cuucuaggaagcu

SEQ ID NO: 2523669 - RNA, 17 nt, Human
cuuggcgcugccccugg

SEQ ID NO: 2523670 - RNA, 14 nt, Human
cuuggcgcugcccc

SEQ ID NO: 2523671 - RNA, 12 nt, Human
cuuggcgcugcc

SEQ ID NO: 2523672 - RNA, 15 nt, Human
cuuggcagcugaacu

SEQ ID NO: 2523673 - RNA, 18 nt, Human
cuuggcaucacagggcag

SEQ ID NO: 2523674 - RNA, 20 nt, Human
cuuggcgcugccccuggcag

SEQ ID NO: 2523675 - RNA, 21 nt, Human
cuugccuuauuagagugucuu

SEQ ID NO: 2523676 - RNA, 19 nt, Human
cuugccuucuucacccagc

SEQ ID NO: 2523677 - RNA, 12 nt, Human
cuugccuuucuc

SEQ ID NO: 2523678 - RNA, 20 nt, Human
cuugccuucuucacccagcu

SEQ ID NO: 2523679 - RNA, 23 nt, Human
cuuggcacauuuaagagacaguc

SEQ ID NO: 2523680 - RNA, 16 nt, Human
cuuggcaccagacacc

SEQ ID NO: 2523681 - RNA, 19 nt, Human
cuuggcaccagacacccag

SEQ ID NO: 2523682 - RNA, 14 nt, Human
cuugcgcauucuca

SEQ ID NO: 2523683 - RNA, 20 nt, Human
cuugcggaaucacucugucc

SEQ ID NO: 2523684 - RNA, 19 nt, Human
cuugcgcuuuugcugguca

SEQ ID NO: 2523685 - RNA, 19 nt, Human
cuuggcagcaccugucucc

SEQ ID NO: 2523686 - RNA, 20 nt, Human
cuuggcagcaccugucuccu

SEQ ID NO: 2523687 - RNA, 18 nt, Human
cuuggcagccgagcucgu

SEQ ID NO: 2523688 - RNA, 19 nt, Human
cuuggcagcccaggccggg

SEQ ID NO: 2523689 - RNA, 20 nt, Human
cuuggcaccagacacccagg

SEQ ID NO: 2523690 - RNA, 21 nt, Human
cuuggcaccagacacccagga

SEQ ID NO: 2523691 - RNA, 18 nt, Human
cuuggcagcaccugucuc

SEQ ID NO: 2523692 - RNA, 18 nt, Human
cuugccuuauuagagugu

SEQ ID NO: 2523693 - RNA, 20 nt, Human
cuugccuuauuagagugucu

SEQ ID NO: 2523694 - RNA, 22 nt, Human
cuugaugccaguaggcucaacu

SEQ ID NO: 2523695 - RNA, 12 nt, Human
cuugccugcagg

SEQ ID NO: 2523696 - RNA, 13 nt, Human
cuugccugcaggc

SEQ ID NO: 2523697 - RNA, 13 nt, Human
cuugaugaagaag

SEQ ID NO: 2523698 - RNA, 18 nt, Human
cuugaugaccaaaguccu

SEQ ID NO: 2523699 - RNA, 21 nt, Human
cuugaugaccaaaguccuuuu

SEQ ID NO: 2523700 - RNA, 12 nt, Human
cuugaugccugg

SEQ ID NO: 2523701 - RNA, 21 nt, Human
cuugaugcaugcacuguuccc

SEQ ID NO: 2523702 - RNA, 19 nt, Human
cuugaugccaguaggcuca

SEQ ID NO: 2523703 - RNA, 21 nt, Human
cuugaucugcucagcccugga

SEQ ID NO: 2523704 - RNA, 20 nt, Human
cuugaucugcucagcccugg

SEQ ID NO: 2523705 - RNA, 19 nt, Human
cuugaucugcucagcccug

SEQ ID NO: 2523706 - RNA, 18 nt, Human
cuugaucugcucagcccu

SEQ ID NO: 2523707 - RNA, 17 nt, Human
cuugaucugcucagccc

SEQ ID NO: 2523708 - RNA, 16 nt, Human
cuugaucugcucagcc

SEQ ID NO: 2523709 - RNA, 23 nt, Human
cuugauacuaaaaguucuucucc

SEQ ID NO: 2523710 - RNA, 22 nt, Human
cuugauacuaaaaguucuucuc

SEQ ID NO: 2523711 - RNA, 12 nt, Human
cuugaugaagaa

SEQ ID NO: 2523712 - RNA, 23 nt, Human
cuugaucugcucagcccuggagg

SEQ ID NO: 2523713 - RNA, 22 nt, Human
cuugaucugcucagcccuggag

SEQ ID NO: 2523714 - RNA, 15 nt, Human
cuugaucuguauaua

SEQ ID NO: 2523715 - RNA, 20 nt, Human
cuugaucuguauauacaaua

SEQ ID NO: 2523716 - RNA, 22 nt, Human
cuugaucuguauauacaauaac

SEQ ID NO: 2523717 - RNA, 21 nt, Human
cuugauaccccccucugucuu

SEQ ID NO: 2523718 - RNA, 20 nt, Human
cuugauaccccccucugucu

SEQ ID NO: 2523719 - RNA, 19 nt, Human
cuugauaccccccucuguc

SEQ ID NO: 2523720 - RNA, 18 nt, Human
cuugauaccccccucugu

SEQ ID NO: 2523721 - RNA, 17 nt, Human
cuugauaccccccucug

SEQ ID NO: 2523722 - RNA, 16 nt, Human
cuugauaccccccucu

SEQ ID NO: 2523723 - RNA, 21 nt, Human
cuugaguuugucgcucaugug

SEQ ID NO: 2523724 - RNA, 16 nt, Human
cuugaguuuuauuuau

SEQ ID NO: 2523725 - RNA, 16 nt, Human
cuugauaaagggccaa

SEQ ID NO: 2523726 - RNA, 22 nt, Human
cuugaauuuucccacugcaccc

SEQ ID NO: 2523727 - RNA, 16 nt, Human
cuugaguuugucgcuc

SEQ ID NO: 2523728 - RNA, 16 nt, Human
cuugacaaagucaagc

SEQ ID NO: 2523729 - RNA, 19 nt, Human
cuugacaaagucaagccac

SEQ ID NO: 2523730 - RNA, 13 nt, Human
cuugacagggcac

SEQ ID NO: 2523731 - RNA, 15 nt, Human
cuugacagggcacac

SEQ ID NO: 2523732 - RNA, 14 nt, Human
cuugacagggcaca

SEQ ID NO: 2523733 - RNA, 18 nt, Human
cuugaauuguaaggaaug

SEQ ID NO: 2523734 - RNA, 13 nt, Human
cuugaagccaagu

SEQ ID NO: 2523735 - RNA, 19 nt, Human
cuugaagccacugaagcug

SEQ ID NO: 2523736 - RNA, 21 nt, Human
cuugaagccacugaagcuggg

SEQ ID NO: 2523737 - RNA, 19 nt, Human
cuugaauuguaaggaauga

SEQ ID NO: 2523738 - RNA, 21 nt, Human
cuugaauuuucccacugcacc

SEQ ID NO: 2523739 - RNA, 20 nt, Human
cuugaauuuucccacugcac

SEQ ID NO: 2523740 - RNA, 19 nt, Human
cuugaauuuucccacugca

SEQ ID NO: 2523741 - RNA, 18 nt, Human
cuugaauuuucccacugc

SEQ ID NO: 2523742 - RNA, 17 nt, Human
cuugaauuuucccacug

SEQ ID NO: 2523743 - RNA, 20 nt, Human
cuugaauuucuaaaaaacag

SEQ ID NO: 2523744 - RNA, 13 nt, Human
cuugaagaucguu

SEQ ID NO: 2523745 - RNA, 16 nt, Human
cuugaagacuuuucuu

SEQ ID NO: 2523746 - RNA, 19 nt, Human
cuugaagccaaagaaaaau

SEQ ID NO: 2523747 - RNA, 16 nt, Human
cuugaagccaaagaaa

SEQ ID NO: 2523748 - RNA, 15 nt, Human
cuugaagccaaagaa

SEQ ID NO: 2523749 - RNA, 14 nt, Human
cuugaagccaaaga

SEQ ID NO: 2523750 - RNA, 13 nt, Human
cuugaagccaaag

SEQ ID NO: 2523751 - RNA, 12 nt, Human
cuugaagccaaa

SEQ ID NO: 2523752 - RNA, 12 nt, Human
cuugaagcagua

SEQ ID NO: 2523753 - RNA, 20 nt, Human
cuugaagaucguuaguaucu

SEQ ID NO: 2523754 - RNA, 13 nt, Human
cuugaagccacug

SEQ ID NO: 2523755 - RNA, 16 nt, Human
cuugaagccacugaag

SEQ ID NO: 2523756 - RNA, 17 nt, Human
cuugaagccacugaagc

SEQ ID NO: 2523757 - RNA, 18 nt, Human
cuugaagccacugaagcu

SEQ ID NO: 2523758 - RNA, 14 nt, Human
gcagccaggccaca

SEQ ID NO: 2523759 - RNA, 13 nt, Human
gcagccaggccac

SEQ ID NO: 2523760 - RNA, 16 nt, Human
gcagccaggccacaag

SEQ ID NO: 2523761 - RNA, 20 nt, Human
gcagcccaugcccaccugcc

SEQ ID NO: 2523762 - RNA, 17 nt, Human
gcagcccaggccggggu

SEQ ID NO: 2523763 - RNA, 13 nt, Human
gcagcccaugccc

SEQ ID NO: 2523764 - RNA, 15 nt, Human
gcagcccaugcccac

SEQ ID NO: 2523765 - RNA, 17 nt, Human
gcagcccaugcccaccu

SEQ ID NO: 2523766 - RNA, 18 nt, Human
gcagcccaugcccaccug

SEQ ID NO: 2523767 - RNA, 22 nt, Human
gcagcccaugcccaccugccca

SEQ ID NO: 2523768 - RNA, 13 nt, Human
gcagccaccagcg

SEQ ID NO: 2523769 - RNA, 14 nt, Human
gcagagcucugccg

SEQ ID NO: 2523770 - RNA, 16 nt, Human
gcagccacauuccuga

SEQ ID NO: 2523771 - RNA, 23 nt, Human
gcagagcgccgugaguucucagg

SEQ ID NO: 2523772 - RNA, 22 nt, Human
gcagagcgccgugaguucucag

SEQ ID NO: 2523773 - RNA, 20 nt, Human
gcagagcgccgugaguucuc

SEQ ID NO: 2523774 - RNA, 16 nt, Human
gcagagcccaagggaa

SEQ ID NO: 2523775 - RNA, 14 nt, Human
gcagccacuauugu

SEQ ID NO: 2523776 - RNA, 23 nt, Human
gcagccagaccuauuccuccugg

SEQ ID NO: 2523777 - RNA, 12 nt, Human
gcagccaggcca

SEQ ID NO: 2523778 - RNA, 20 nt, Human
gcauaccuuuauugugaucu

SEQ ID NO: 2523779 - RNA, 16 nt, Human
gcauaccuuuauugug

SEQ ID NO: 2523780 - RNA, 14 nt, Human
gcauacguacacau

SEQ ID NO: 2523781 - RNA, 13 nt, Human
gcauaccuuuauu

SEQ ID NO: 2523782 - RNA, 18 nt, Human
gcauaauaagcuaaagag

SEQ ID NO: 2523783 - RNA, 22 nt, Human
gcagucaucuugaccaagcagg

SEQ ID NO: 2523784 - RNA, 19 nt, Human
gcagucauuauccagguaa

SEQ ID NO: 2523785 - RNA, 23 nt, Human
gcagucaucuugaccaagcagga

SEQ ID NO: 2523786 - RNA, 18 nt, Human
gcaguccuggaagccagc

SEQ ID NO: 2523787 - RNA, 20 nt, Human
gcaguccuggaagccagcuu

SEQ ID NO: 2523788 - RNA, 19 nt, Human
gcaguccugaucagagccg

SEQ ID NO: 2523789 - RNA, 17 nt, Human
gcaguccugccucagcc

SEQ ID NO: 2523790 - RNA, 18 nt, Human
gcaguccugccucagccu

SEQ ID NO: 2523791 - RNA, 18 nt, Human
gcagucgucgcacagucu

SEQ ID NO: 2523792 - RNA, 15 nt, Human
gcagucgucgcacag

SEQ ID NO: 2523793 - RNA, 23 nt, Human
gcagucgggggcuggccuaggag

SEQ ID NO: 2523794 - RNA, 21 nt, Human
gcagucgggggcuggccuagg

SEQ ID NO: 2523795 - RNA, 20 nt, Human
gcagucgggggcuggccuag

SEQ ID NO: 2523796 - RNA, 18 nt, Human
gcagucgggggcuggccu

SEQ ID NO: 2523797 - RNA, 17 nt, Human
gcagucgggggcuggcc

SEQ ID NO: 2523798 - RNA, 16 nt, Human
gcagucgggggcuggc

SEQ ID NO: 2523799 - RNA, 15 nt, Human
gcaguuuaucauuca

SEQ ID NO: 2523800 - RNA, 15 nt, Human
gcagucgugccugug

SEQ ID NO: 2523801 - RNA, 22 nt, Human
gcagucgucgcacagucucucu

SEQ ID NO: 2523802 - RNA, 20 nt, Human
gcagucgucgcacagucucu

SEQ ID NO: 2523803 - RNA, 13 nt, Human
gcagucgugccug

SEQ ID NO: 2523804 - RNA, 20 nt, Human
gcaguuuaucauucaagugu

SEQ ID NO: 2523805 - RNA, 16 nt, Human
gcaguuuaucauucaa

SEQ ID NO: 2523806 - RNA, 16 nt, Human
gcaguuucuguccugc

SEQ ID NO: 2523807 - RNA, 20 nt, Human
gcaguuucuguccugcuggu

SEQ ID NO: 2523808 - RNA, 21 nt, Human
gcaguuugccuggugcagugg

SEQ ID NO: 2523809 - RNA, 22 nt, Human
gcauaacguauaaaagccuguu

SEQ ID NO: 2523810 - RNA, 22 nt, Human
gcaguuuuucagaguggaaugc

SEQ ID NO: 2523811 - RNA, 17 nt, Human
gcaguuuucaagucaaa

SEQ ID NO: 2523812 - RNA, 14 nt, Human
gcaguuugggaggu

SEQ ID NO: 2523813 - RNA, 17 nt, Human
gcauaccacuuuuguuc

SEQ ID NO: 2523814 - RNA, 20 nt, Human
gcauaccacuuuuguucuug

SEQ ID NO: 2523815 - RNA, 14 nt, Human
gcaguuuuucugua

SEQ ID NO: 2523816 - RNA, 14 nt, Human
gcauaauaagcuaa

SEQ ID NO: 2523817 - RNA, 22 nt, Human
gcaggcucucaggccagcugcu

SEQ ID NO: 2523818 - RNA, 20 nt, Human
gcaggcucucaggccagcug

SEQ ID NO: 2523819 - RNA, 19 nt, Human
gcagcugcgguccacccag

SEQ ID NO: 2523820 - RNA, 17 nt, Human
gcagcugcgguccaccc

SEQ ID NO: 2523821 - RNA, 23 nt, Human
gcaggcucucaggccagcugcuu

SEQ ID NO: 2523822 - RNA, 18 nt, Human
gcaggcucucaggccagc

SEQ ID NO: 2523823 - RNA, 14 nt, Human
gcaggcuggcccug

SEQ ID NO: 2523824 - RNA, 15 nt, Human
gcaggcuggcccugc

SEQ ID NO: 2523825 - RNA, 16 nt, Human
gcaggcuggcccugcc

SEQ ID NO: 2523826 - RNA, 17 nt, Human
gcaggcuggcccugccc

SEQ ID NO: 2523827 - RNA, 18 nt, Human
gcaggcuggcccugcccu

SEQ ID NO: 2523828 - RNA, 17 nt, Human
gcaggcugucuggccag

SEQ ID NO: 2523829 - RNA, 19 nt, Human
gcaggcuggcccugcccug

SEQ ID NO: 2523830 - RNA, 20 nt, Human
gcaggcuggcccugcccugg

SEQ ID NO: 2523831 - RNA, 21 nt, Human
gcaggcuggcccugcccuggu

SEQ ID NO: 2523832 - RNA, 11 nt, Human
gcaggcugaca

SEQ ID NO: 2523833 - RNA, 15 nt, Human
gcaggcuggcuggcc

SEQ ID NO: 2523834 - RNA, 23 nt, Human
gcaguaccuauaaaguaaagcua

SEQ ID NO: 2523835 - RNA, 16 nt, Human
gcaguaccuauaaagu

SEQ ID NO: 2523836 - RNA, 18 nt, Human
gcaguaagucuuuuuuga

SEQ ID NO: 2523837 - RNA, 15 nt, Human
gcaguaagucuuuuu

SEQ ID NO: 2523838 - RNA, 13 nt, Human
gcaguaauaaaaa

SEQ ID NO: 2523839 - RNA, 22 nt, Human
gcagguugggccauacuggccu

SEQ ID NO: 2523840 - RNA, 23 nt, Human
gcagguugggaaugaggcuugcu

SEQ ID NO: 2523841 - RNA, 22 nt, Human
gcaguagaaggucggaggcuug

SEQ ID NO: 2523842 - RNA, 21 nt, Human
gcaguagaaauaauaugcauu

SEQ ID NO: 2523843 - RNA, 20 nt, Human
gcaguagaaauaauaugcau

SEQ ID NO: 2523844 - RNA, 19 nt, Human
gcaguagaaauaauaugca

SEQ ID NO: 2523845 - RNA, 23 nt, Human
gcagucacuggagguugaagcca

SEQ ID NO: 2523846 - RNA, 14 nt, Human
gcagucacuggagg

SEQ ID NO: 2523847 - RNA, 24 nt, Human
gcagucacguggaggagcagugca

SEQ ID NO: 2523848 - RNA, 17 nt, Human
gcagucacaucucuucc

SEQ ID NO: 2523849 - RNA, 13 nt, Human
gcagucacugaau

SEQ ID NO: 2523850 - RNA, 15 nt, Human
gcaguaugaaaauaa

SEQ ID NO: 2523851 - RNA, 13 nt, Human
gcaguauugagca

SEQ ID NO: 2523852 - RNA, 21 nt, Human
gcaguaucaugcccugugcaa

SEQ ID NO: 2523853 - RNA, 17 nt, Human
gcaguagucucugugcu

SEQ ID NO: 2523854 - RNA, 12 nt, Human
gcaguagucucu

SEQ ID NO: 2523855 - RNA, 12 nt, Human
gcaguaucauga

SEQ ID NO: 2523856 - RNA, 15 nt, Human
gcaguaucaugaagc

SEQ ID NO: 2523857 - RNA, 20 nt, Human
gcaguagauuuucuuuaaaa

SEQ ID NO: 2523858 - RNA, 18 nt, Human
gcaguagauuuucuuuaa

SEQ ID NO: 2523859 - RNA, 15 nt, Human
gcaguagauuuucuu

SEQ ID NO: 2523860 - RNA, 21 nt, Human
gcaguagaggcuauggacagg

SEQ ID NO: 2523861 - RNA, 18 nt, Human
gcaguagagucaucucca

SEQ ID NO: 2523862 - RNA, 20 nt, Human
gcaguagagucaucuccauc

SEQ ID NO: 2523863 - RNA, 10 nt, Human
gcagggaggg

SEQ ID NO: 2523864 - RNA, 13 nt, Human
gcagggagggccu

SEQ ID NO: 2523865 - RNA, 16 nt, Human
gcagguugaggggcuc

SEQ ID NO: 2523866 - RNA, 23 nt, Human
gcagguugggccauacuggccuc

SEQ ID NO: 2523867 - RNA, 19 nt, Human
gcagguugaggggcuccug

SEQ ID NO: 2523868 - RNA, 20 nt, Human
gcagguugaggggcuccugg

SEQ ID NO: 2523869 - RNA, 21 nt, Human
gcagguugaggggcuccugga

SEQ ID NO: 2523870 - RNA, 22 nt, Human
gcagguugaggggcuccuggaa

SEQ ID NO: 2523871 - RNA, 19 nt, Human
gcagggacuugaacccaua

SEQ ID NO: 2523872 - RNA, 13 nt, Human
gcagggaaacagc

SEQ ID NO: 2523873 - RNA, 21 nt, Human
gcagggagcauggcugugagg

SEQ ID NO: 2523874 - RNA, 19 nt, Human
gcagggagcggccggccag

SEQ ID NO: 2523875 - RNA, 16 nt, Human
gcagggaggaagaagc

SEQ ID NO: 2523876 - RNA, 23 nt, Human
gcagggaggaagaagcuuaggca

SEQ ID NO: 2523877 - RNA, 22 nt, Human
gcagggagaggagugacugagc

SEQ ID NO: 2523878 - RNA, 22 nt, Human
gcaggcuuuguuuauagcuugc

SEQ ID NO: 2523879 - RNA, 22 nt, Human
gcagggagccgagaucacgcca

SEQ ID NO: 2523880 - RNA, 21 nt, Human
gcagggaaaauuauuugcaua

SEQ ID NO: 2523881 - RNA, 23 nt, Human
gcaccuaaaccaccagugcccaa

SEQ ID NO: 2523882 - RNA, 21 nt, Human
gcaccuaaaccaccagugccc

SEQ ID NO: 2523883 - RNA, 21 nt, Human
gcaccgucauggcuuaauguu

SEQ ID NO: 2523884 - RNA, 14 nt, Human
gcaccguucugugc

SEQ ID NO: 2523885 - RNA, 19 nt, Human
gcaccuaaaccaccagugc

SEQ ID NO: 2523886 - RNA, 15 nt, Human
gcaccguucugugca

SEQ ID NO: 2523887 - RNA, 15 nt, Human
gcaccuaauccaggc

SEQ ID NO: 2523888 - RNA, 12 nt, Human
gcacugacauug

SEQ ID NO: 2523889 - RNA, 16 nt, Human
gcacugacugggcaua

SEQ ID NO: 2523890 - RNA, 20 nt, Human
gcacuugugauuauuuauua

SEQ ID NO: 2523891 - RNA, 21 nt, Human
gcacuugugauuauuuauuau

SEQ ID NO: 2523892 - RNA, 23 nt, Human
gcacuugugauuauuuauuauuu

SEQ ID NO: 2523893 - RNA, 15 nt, Human
gcacuuguauauacg

SEQ ID NO: 2523894 - RNA, 16 nt, Human
gcacuuguccagcuga

SEQ ID NO: 2523895 - RNA, 17 nt, Human
gcacuugugauuauuua

SEQ ID NO: 2523896 - RNA, 12 nt, Human
gcacuuguauau

SEQ ID NO: 2523897 - RNA, 20 nt, Human
gcacuuuagggcuguaaaau

SEQ ID NO: 2523898 - RNA, 17 nt, Human
gcacuuuccuccuggca

SEQ ID NO: 2523899 - RNA, 16 nt, Human
gcacuuuccuccuggc

SEQ ID NO: 2523900 - RNA, 21 nt, Human
gcacuuucuacaaugugaacu

SEQ ID NO: 2523901 - RNA, 21 nt, Human
gcagaaagguucugcccggga

SEQ ID NO: 2523902 - RNA, 18 nt, Human
gcagaaagguucugcccg

SEQ ID NO: 2523903 - RNA, 15 nt, Human
gcagagcagagacca

SEQ ID NO: 2523904 - RNA, 14 nt, Human
gcagagcagagacc

SEQ ID NO: 2523905 - RNA, 12 nt, Human
gcagagcagaga

SEQ ID NO: 2523906 - RNA, 24 nt, Human
gcagagcaccuuagacagucccug

SEQ ID NO: 2523907 - RNA, 20 nt, Human
gcagagcagagaccaucccu

SEQ ID NO: 2523908 - RNA, 19 nt, Human
gcagagcagagaccauccc

SEQ ID NO: 2523909 - RNA, 21 nt, Human
gcagagcagugggccuggcca

SEQ ID NO: 2523910 - RNA, 18 nt, Human
gcagagcaagucugcagg

SEQ ID NO: 2523911 - RNA, 17 nt, Human
gcagagcaagucugcag

SEQ ID NO: 2523912 - RNA, 16 nt, Human
gcagagcaagucugca

SEQ ID NO: 2523913 - RNA, 14 nt, Human
gcagagcaggggca

SEQ ID NO: 2523914 - RNA, 20 nt, Human
gcagagcaggggcaggguga

SEQ ID NO: 2523915 - RNA, 23 nt, Human
gcagagcaccuuagacagucccu

SEQ ID NO: 2523916 - RNA, 22 nt, Human
gcagagcaccuuagacaguccc

SEQ ID NO: 2523917 - RNA, 19 nt, Human
gcagagcaccuuagacagu

SEQ ID NO: 2523918 - RNA, 23 nt, Human
gcagagauuggaaugggcagcuc

SEQ ID NO: 2523919 - RNA, 22 nt, Human
gcagagauuggaaugggcagcu

SEQ ID NO: 2523920 - RNA, 19 nt, Human
gcagagagccauuuuguga

SEQ ID NO: 2523921 - RNA, 15 nt, Human
gcagagagccauuuu

SEQ ID NO: 2523922 - RNA, 16 nt, Human
gcagagagaagccugu

SEQ ID NO: 2523923 - RNA, 19 nt, Human
gcagagagcggucucaggc

SEQ ID NO: 2523924 - RNA, 21 nt, Human
gcagagagccauuuugugaau

SEQ ID NO: 2523925 - RNA, 15 nt, Human
gcagagaggccaggu

SEQ ID NO: 2523926 - RNA, 14 nt, Human
gcagagagaagccu

SEQ ID NO: 2523927 - RNA, 13 nt, Human
gcagagagaagcc

SEQ ID NO: 2523928 - RNA, 17 nt, Human
gcagaacacuaaccuga

SEQ ID NO: 2523929 - RNA, 12 nt, Human
gcagagagaagc

SEQ ID NO: 2523930 - RNA, 18 nt, Human
gcagaacagccgcuccug

SEQ ID NO: 2523931 - RNA, 21 nt, Human
gcagaacagccgcuccugucu

SEQ ID NO: 2523932 - RNA, 15 nt, Human
gcagaacacuaaccu

SEQ ID NO: 2523933 - RNA, 14 nt, Human
gcagaacacuaacc

SEQ ID NO: 2523934 - RNA, 13 nt, Human
gcagaacacuaac

SEQ ID NO: 2523935 - RNA, 14 nt, Human
gcagaaaucuagaa

SEQ ID NO: 2523936 - RNA, 15 nt, Human
gcagaaaucuagaag

SEQ ID NO: 2523937 - RNA, 13 nt, Human
gauucugagagcu

SEQ ID NO: 2523938 - RNA, 22 nt, Human
gcacaagcuccaagcucccagg

SEQ ID NO: 2523939 - RNA, 21 nt, Human
gcacaagcuccaagcucccag

SEQ ID NO: 2523940 - RNA, 23 nt, Human
gcacaagcuccaagcucccaggc

SEQ ID NO: 2523941 - RNA, 14 nt, Human
gcacaagcugcacc

SEQ ID NO: 2523942 - RNA, 21 nt, Human
gcaauaaagcagcguuucuau

SEQ ID NO: 2523943 - RNA, 16 nt, Human
gcaauaaaucugaccc

SEQ ID NO: 2523944 - RNA, 18 nt, Human
gcaauaaaucugacccag

SEQ ID NO: 2523945 - RNA, 22 nt, Human
gcaagugagagagaugggagcu

SEQ ID NO: 2523946 - RNA, 17 nt, Human
gcaagugagagagaugg

SEQ ID NO: 2523947 - RNA, 20 nt, Human
gcaagugaauuuuucucuaa

SEQ ID NO: 2523948 - RNA, 20 nt, Human
gcaauaaccucaaagugacu

SEQ ID NO: 2523949 - RNA, 19 nt, Human
gcaauaaaucugacccagu

SEQ ID NO: 2523950 - RNA, 21 nt, Human
gcaauaaaucugacccagugc

SEQ ID NO: 2523951 - RNA, 12 nt, Human
gcaauaaaugaa

SEQ ID NO: 2523952 - RNA, 13 nt, Human
gcaagugagagcu

SEQ ID NO: 2523953 - RNA, 21 nt, Human
gcaagugaagguuuacaauuu

SEQ ID NO: 2523954 - RNA, 18 nt, Human
gcaagugaagguuuacaa

SEQ ID NO: 2523955 - RNA, 13 nt, Human
gcaagugaagaaa

SEQ ID NO: 2523956 - RNA, 20 nt, Human
gcaagucugcaggugcacca

SEQ ID NO: 2523957 - RNA, 13 nt, Human
gcaagucugcagg

SEQ ID NO: 2523958 - RNA, 21 nt, Human
gcaagucugcagcccggcgcc

SEQ ID NO: 2523959 - RNA, 17 nt, Human
gcaagucuggaucuggg

SEQ ID NO: 2523960 - RNA, 19 nt, Human
gcaagucucuuuauauggc

SEQ ID NO: 2523961 - RNA, 12 nt, Human
gcaagucugcag

SEQ ID NO: 2523962 - RNA, 14 nt, Human
gcacaguuuucuga

SEQ ID NO: 2523963 - RNA, 17 nt, Human
gcacaguuuucugagaa

SEQ ID NO: 2523964 - RNA, 18 nt, Human
gcacaguuuucugagaaa

SEQ ID NO: 2523965 - RNA, 14 nt, Human
gcacaguuugaaca

SEQ ID NO: 2523966 - RNA, 13 nt, Human
gcacaguuugaac

SEQ ID NO: 2523967 - RNA, 12 nt, Human
gcacaguuugaa

SEQ ID NO: 2523968 - RNA, 18 nt, Human
gcacauauggacucugca

SEQ ID NO: 2523969 - RNA, 13 nt, Human
gcacauauggacu

SEQ ID NO: 2523970 - RNA, 21 nt, Human
gcacaaucucggcucacugca

SEQ ID NO: 2523971 - RNA, 21 nt, Human
gcaauaagaauuuagggagaa

SEQ ID NO: 2523972 - RNA, 22 nt, Human
gcacaaucucggcucacugcau

SEQ ID NO: 2523973 - RNA, 14 nt, Human
gcacaauucuguuu

SEQ ID NO: 2523974 - RNA, 16 nt, Human
gcacaauucuguuuua

SEQ ID NO: 2523975 - RNA, 10 nt, Human
gcacacacac

SEQ ID NO: 2523976 - RNA, 12 nt, Human
gcacacacacaa

SEQ ID NO: 2523977 - RNA, 12 nt, Human
gcacacacacac

SEQ ID NO: 2523978 - RNA, 14 nt, Human
gcacacacacacac

SEQ ID NO: 2523979 - RNA, 16 nt, Human
gcacacacacacacag

SEQ ID NO: 2523980 - RNA, 17 nt, Human
gcacacacacacacagg

SEQ ID NO: 2523981 - RNA, 20 nt, Human
gcacacacacacacaggagg

SEQ ID NO: 2523982 - RNA, 19 nt, Human
gcacacacacacacaggag

SEQ ID NO: 2523983 - RNA, 13 nt, Human
gcacaugccucuc

SEQ ID NO: 2523984 - RNA, 13 nt, Human
gcacaugacucgg

SEQ ID NO: 2523985 - RNA, 17 nt, Human
gcacaucugugucuugu

SEQ ID NO: 2523986 - RNA, 16 nt, Human
gcacaucucugcuuga

SEQ ID NO: 2523987 - RNA, 18 nt, Human
gcacaucugugucuuguu

SEQ ID NO: 2523988 - RNA, 19 nt, Human
gcacaugacaacuuugcca

SEQ ID NO: 2523989 - RNA, 19 nt, Human
gcacaucagcacgauuucu

SEQ ID NO: 2523990 - RNA, 20 nt, Human
gcacaucagcacgauuucug

SEQ ID NO: 2523991 - RNA, 21 nt, Human
gcacaucagcacgauuucugu

SEQ ID NO: 2523992 - RNA, 15 nt, Human
gcacaucagaaagga

SEQ ID NO: 2523993 - RNA, 15 nt, Human
gcacaguuugaacaa

SEQ ID NO: 2523994 - RNA, 14 nt, Human
gcacauauugagca

SEQ ID NO: 2523995 - RNA, 13 nt, Human
gcacaucugcauu

SEQ ID NO: 2523996 - RNA, 21 nt, Human
gcacaucugcauuuucacccc

SEQ ID NO: 2523997 - RNA, 19 nt, Human
gcacaugccucucucaggc

SEQ ID NO: 2523998 - RNA, 18 nt, Human
gcacaugccucucucagg

SEQ ID NO: 2523999 - RNA, 17 nt, Human
gcacaugccucucucag

SEQ ID NO: 2524000 - RNA, 14 nt, Human
gcacaugccucucu

SEQ ID NO: 2524001 - RNA, 21 nt, Human
gcacaugccucucucaggcca

SEQ ID NO: 2524002 - RNA, 20 nt, Human
gcacaugccucucucaggcc

SEQ ID NO: 2524003 - RNA, 22 nt, Human
gcacaugccucucucaggccaa

SEQ ID NO: 2524004 - RNA, 13 nt, Human
gcacccucccucc

SEQ ID NO: 2524005 - RNA, 22 nt, Human
gcacaugcagauggggcucccg

SEQ ID NO: 2524006 - RNA, 15 nt, Human
gcacccuggggccug

SEQ ID NO: 2524007 - RNA, 14 nt, Human
gcacccuggggccu

SEQ ID NO: 2524008 - RNA, 15 nt, Human
gcacccucuauccca

SEQ ID NO: 2524009 - RNA, 19 nt, Human
gcacccucgaugaagccca

SEQ ID NO: 2524010 - RNA, 16 nt, Human
gcacccuccgccuuca

SEQ ID NO: 2524011 - RNA, 21 nt, Human
gcacccuucuuuccucuuccc

SEQ ID NO: 2524012 - RNA, 19 nt, Human
gcacccuucuuuccucuuc

SEQ ID NO: 2524013 - RNA, 18 nt, Human
gcacccuucuuuccucuu

SEQ ID NO: 2524014 - RNA, 21 nt, Human
gcacccuggggccuggaccug

SEQ ID NO: 2524015 - RNA, 20 nt, Human
gcacccuggggccuggaccu

SEQ ID NO: 2524016 - RNA, 17 nt, Human
gcacccuggggccugga

SEQ ID NO: 2524017 - RNA, 17 nt, Human
gcacccuucuuuccucu

SEQ ID NO: 2524018 - RNA, 16 nt, Human
gcacccuucuuuccuc

SEQ ID NO: 2524019 - RNA, 13 nt, Human
gcacaucucugcu

SEQ ID NO: 2524020 - RNA, 19 nt, Human
gcaccggcuggccuggccc

SEQ ID NO: 2524021 - RNA, 14 nt, Human
gcaccgccuucucu

SEQ ID NO: 2524022 - RNA, 23 nt, Human
gcaccggcuggccuggccccuca

SEQ ID NO: 2524023 - RNA, 21 nt, Human
gcaccggcuggccuggccccu

SEQ ID NO: 2524024 - RNA, 18 nt, Human
gcaccggcuggccuggcc

SEQ ID NO: 2524025 - RNA, 17 nt, Human
gcaccgucauggcuuaa

SEQ ID NO: 2524026 - RNA, 13 nt, Human
gcaccgccuucuc

SEQ ID NO: 2524027 - RNA, 14 nt, Human
gcaccguacugugg

SEQ ID NO: 2524028 - RNA, 18 nt, Human
gauucuccuucagcccuc

SEQ ID NO: 2524029 - RNA, 11 nt, Human
gauucuccuuc

SEQ ID NO: 2524030 - RNA, 17 nt, Human
gauucuccuucagcccu

SEQ ID NO: 2524031 - RNA, 13 nt, Human
gauucuccuucag

SEQ ID NO: 2524032 - RNA, 12 nt, Human
gauucuccuuca

SEQ ID NO: 2524033 - RNA, 14 nt, Human
gauuaccagggacu

SEQ ID NO: 2524034 - RNA, 21 nt, Human
gauuacccaagcaaaaucaug

SEQ ID NO: 2524035 - RNA, 14 nt, Human
gauuacccaagcaa

SEQ ID NO: 2524036 - RNA, 15 nt, Human
gauuacauaaucugu

SEQ ID NO: 2524037 - RNA, 15 nt, Human
gauuacauucaguug

SEQ ID NO: 2524038 - RNA, 14 nt, Human
gauuacaugcaugu

SEQ ID NO: 2524039 - RNA, 18 nt, Human
gauuacugccuauuuuaa

SEQ ID NO: 2524040 - RNA, 13 nt, Human
gauuaccuccuga

SEQ ID NO: 2524041 - RNA, 14 nt, Human
gauuaccuccugag

SEQ ID NO: 2524042 - RNA, 17 nt, Human
gauuaccuccugagaaa

SEQ ID NO: 2524043 - RNA, 22 nt, Human
gauuaccuaguagucauuucau

SEQ ID NO: 2524044 - RNA, 12 nt, Human
gauuacucuuug

SEQ ID NO: 2524045 - RNA, 22 nt, Human
gauuagaaugaaaauuguaugu

SEQ ID NO: 2524046 - RNA, 17 nt, Human
gauuagaaugaaaauug

SEQ ID NO: 2524047 - RNA, 14 nt, Human
gauuagaaggcaag

SEQ ID NO: 2524048 - RNA, 17 nt, Human
gauuagaagcugaaaac

SEQ ID NO: 2524049 - RNA, 21 nt, Human
gauuagaaaugaccaauauua

SEQ ID NO: 2524050 - RNA, 23 nt, Human
gauuacucuuugagauagaagaa

SEQ ID NO: 2524051 - RNA, 14 nt, Human
gaugugaacacauc

SEQ ID NO: 2524052 - RNA, 16 nt, Human
gaugugaacacaucag

SEQ ID NO: 2524053 - RNA, 16 nt, Human
gaugcuggcccagggc

SEQ ID NO: 2524054 - RNA, 17 nt, Human
gaugcuggcccagggcc

SEQ ID NO: 2524055 - RNA, 19 nt, Human
gaugcuggcccagggccca

SEQ ID NO: 2524056 - RNA, 21 nt, Human
gaugcuggcccagggcccaga

SEQ ID NO: 2524057 - RNA, 13 nt, Human
gaugcugggcugg

SEQ ID NO: 2524058 - RNA, 12 nt, Human
gaugcugggcug

SEQ ID NO: 2524059 - RNA, 11 nt, Human
gaugcugggau

SEQ ID NO: 2524060 - RNA, 22 nt, Human
gaugcuggcccagggcccagag

SEQ ID NO: 2524061 - RNA, 23 nt, Human
gaugcuggcccagggcccagagc

SEQ ID NO: 2524062 - RNA, 12 nt, Human
gaugugaagcca

SEQ ID NO: 2524063 - RNA, 13 nt, Human
gaugugaagccaa

SEQ ID NO: 2524064 - RNA, 14 nt, Human
gaugugaagccaau

SEQ ID NO: 2524065 - RNA, 23 nt, Human
gaugugaauugccugcagagaga

SEQ ID NO: 2524066 - RNA, 22 nt, Human
gaugugaauugccugcagagag

SEQ ID NO: 2524067 - RNA, 21 nt, Human
gaugugaauugccugcagaga

SEQ ID NO: 2524068 - RNA, 16 nt, Human
gaugcugggcuggcuc

SEQ ID NO: 2524069 - RNA, 23 nt, Human
gaugugaagccaauucagacagg

SEQ ID NO: 2524070 - RNA, 20 nt, Human
gauuacaggugugagccacc

SEQ ID NO: 2524071 - RNA, 14 nt, Human
gauuacauaaucug

SEQ ID NO: 2524072 - RNA, 20 nt, Human
gauuacaggugugaaccacc

SEQ ID NO: 2524073 - RNA, 17 nt, Human
gauuauaacuugucuaa

SEQ ID NO: 2524074 - RNA, 23 nt, Human
gauuagggcauuugagaaaugca

SEQ ID NO: 2524075 - RNA, 14 nt, Human
gauuagcucuggac

SEQ ID NO: 2524076 - RNA, 16 nt, Human
gauuagcucuggacca

SEQ ID NO: 2524077 - RNA, 15 nt, Human
gauuaguaaagaaau

SEQ ID NO: 2524078 - RNA, 19 nt, Human
gauuauguagcaaaauaca

SEQ ID NO: 2524079 - RNA, 20 nt, Human
gauuauuagccagguaaugu

SEQ ID NO: 2524080 - RNA, 15 nt, Human
gauuaugguuuugug

SEQ ID NO: 2524081 - RNA, 16 nt, Human
gauuaugguuuuguga

SEQ ID NO: 2524082 - RNA, 17 nt, Human
gauuaugguuuugugau

SEQ ID NO: 2524083 - RNA, 17 nt, Human
gauuagggagagaagau

SEQ ID NO: 2524084 - RNA, 13 nt, Human
gauuagcucugga

SEQ ID NO: 2524085 - RNA, 12 nt, Human
gauuagcucugg

SEQ ID NO: 2524086 - RNA, 19 nt, Human
gauuagcaaguuacaguga

SEQ ID NO: 2524087 - RNA, 14 nt, Human
gauuagagggaggu

SEQ ID NO: 2524088 - RNA, 13 nt, Human
gauuagagggagg

SEQ ID NO: 2524089 - RNA, 18 nt, Human
gauuagaggcagaucugg

SEQ ID NO: 2524090 - RNA, 20 nt, Human
gauuagagggagguguuuaa

SEQ ID NO: 2524091 - RNA, 17 nt, Human
gauuagagggagguguu

SEQ ID NO: 2524092 - RNA, 15 nt, Human
gauuagaucuuuuaa

SEQ ID NO: 2524093 - RNA, 23 nt, Human
gauuauuucacuuuagaugcuga

SEQ ID NO: 2524094 - RNA, 23 nt, Human
gauuauuuaauaacauuaccuua

SEQ ID NO: 2524095 - RNA, 22 nt, Human
gauuauuuaauaacauuaccuu

SEQ ID NO: 2524096 - RNA, 21 nt, Human
gauuauuuaauaacauuaccu

SEQ ID NO: 2524097 - RNA, 18 nt, Human
gauuauuuaauaacauua

SEQ ID NO: 2524098 - RNA, 17 nt, Human
gauuauuuaauaacauu

SEQ ID NO: 2524099 - RNA, 16 nt, Human
gauuauuuaauaacau

SEQ ID NO: 2524100 - RNA, 15 nt, Human
gauuauuuaauaaca

SEQ ID NO: 2524101 - RNA, 14 nt, Human
gauuauuuaauaac

SEQ ID NO: 2524102 - RNA, 13 nt, Human
gauuauuuaauaa

SEQ ID NO: 2524103 - RNA, 12 nt, Human
gauuauuuaaua

SEQ ID NO: 2524104 - RNA, 17 nt, Human
gauuauuguauuuauuc

SEQ ID NO: 2524105 - RNA, 14 nt, Human
gauuauuaucuaaa

SEQ ID NO: 2524106 - RNA, 23 nt, Human
gauuauuaacuaauaugggcauu

SEQ ID NO: 2524107 - RNA, 14 nt, Human
gauuauuguauuua

SEQ ID NO: 2524108 - RNA, 15 nt, Human
gauuauuuuuucaga

SEQ ID NO: 2524109 - RNA, 23 nt, Human
gauuauuuguuauuuguacaguu

SEQ ID NO: 2524110 - RNA, 14 nt, Human
gauuauuuuuucag

SEQ ID NO: 2524111 - RNA, 22 nt, Human
gauuauuuguuauuuguacagu

SEQ ID NO: 2524112 - RNA, 21 nt, Human
gauuauuuguuauuuguacag

SEQ ID NO: 2524113 - RNA, 22 nt, Human
gauuauuucacuuuagaugcug

SEQ ID NO: 2524114 - RNA, 14 nt, Human
gauuauuucacuuu

SEQ ID NO: 2524115 - RNA, 21 nt, Human
gauuauuuucuacacauacau

SEQ ID NO: 2524116 - RNA, 17 nt, Human
gaucucuugagccuggg

SEQ ID NO: 2524117 - RNA, 12 nt, Human
gaucucuugagc

SEQ ID NO: 2524118 - RNA, 16 nt, Human
gaucucuugagccugg

SEQ ID NO: 2524119 - RNA, 13 nt, Human
gaucuccaaggac

SEQ ID NO: 2524120 - RNA, 19 nt, Human
gaucuccaaggaccagguu

SEQ ID NO: 2524121 - RNA, 16 nt, Human
gaucuccaaggaccag

SEQ ID NO: 2524122 - RNA, 20 nt, Human
gaucuccaaggaccagguua

SEQ ID NO: 2524123 - RNA, 17 nt, Human
gaucuccauauguuaca

SEQ ID NO: 2524124 - RNA, 23 nt, Human
gaucucagugguuaagauuccua

SEQ ID NO: 2524125 - RNA, 21 nt, Human
gaucucauuggacccuuccau

SEQ ID NO: 2524126 - RNA, 13 nt, Human
gaucuccugaccu

SEQ ID NO: 2524127 - RNA, 18 nt, Human
gaucucccugccgccuca

SEQ ID NO: 2524128 - RNA, 20 nt, Human
gaucucccugccgccucaau

SEQ ID NO: 2524129 - RNA, 12 nt, Human
gaucucccugcc

SEQ ID NO: 2524130 - RNA, 19 nt, Human
gaucuccauggcuuccucc

SEQ ID NO: 2524131 - RNA, 13 nt, Human
gaucucccugccg

SEQ ID NO: 2524132 - RNA, 14 nt, Human
gaucucccugccgc

SEQ ID NO: 2524133 - RNA, 15 nt, Human
gaucucccugccgcc

SEQ ID NO: 2524134 - RNA, 22 nt, Human
gauccaugaguuugcccugguu

SEQ ID NO: 2524135 - RNA, 16 nt, Human
gauccauguagcagga

SEQ ID NO: 2524136 - RNA, 19 nt, Human
gauccauguagcaggacug

SEQ ID NO: 2524137 - RNA, 12 nt, Human
gauccagggaca

SEQ ID NO: 2524138 - RNA, 13 nt, Human
gauccagggacag

SEQ ID NO: 2524139 - RNA, 14 nt, Human
gauccagggacaga

SEQ ID NO: 2524140 - RNA, 15 nt, Human
gauccagggacagag

SEQ ID NO: 2524141 - RNA, 18 nt, Human
gauccagggacagaggcc

SEQ ID NO: 2524142 - RNA, 22 nt, Human
gauccagggacagaggccccag

SEQ ID NO: 2524143 - RNA, 16 nt, Human
gauccagggacugaag

SEQ ID NO: 2524144 - RNA, 13 nt, Human
gauccagccuggg

SEQ ID NO: 2524145 - RNA, 21 nt, Human
gauccagccuggggucuggag

SEQ ID NO: 2524146 - RNA, 12 nt, Human
gauccaggacua

SEQ ID NO: 2524147 - RNA, 16 nt, Human
gauauuuugcuuugug

SEQ ID NO: 2524148 - RNA, 22 nt, Human
gauauugucagaguucugcucu

SEQ ID NO: 2524149 - RNA, 15 nt, Human
gauauuuuuuucuuu

SEQ ID NO: 2524150 - RNA, 17 nt, Human
gauauuuuuaucuuuau

SEQ ID NO: 2524151 - RNA, 18 nt, Human
gauauuuuuccauuuuuu

SEQ ID NO: 2524152 - RNA, 16 nt, Human
gauauuuuuucugaau

SEQ ID NO: 2524153 - RNA, 21 nt, Human
gauauuuuuucagaaauaugu

SEQ ID NO: 2524154 - RNA, 18 nt, Human
gaugagaguuuuggaugc

SEQ ID NO: 2524155 - RNA, 13 nt, Human
gaugagaguuuug

SEQ ID NO: 2524156 - RNA, 23 nt, Human
gaugagccgcugugagccccugg

SEQ ID NO: 2524157 - RNA, 13 nt, Human
gaugagccgcugu

SEQ ID NO: 2524158 - RNA, 19 nt, Human
gaugagcccucagaacccu

SEQ ID NO: 2524159 - RNA, 22 nt, Human
gaugagcccucagaacccuugg

SEQ ID NO: 2524160 - RNA, 14 nt, Human
gaugaucuuugcag

SEQ ID NO: 2524161 - RNA, 17 nt, Human
gaugagcauggagcugg

SEQ ID NO: 2524162 - RNA, 16 nt, Human
gaugagcauggagcug

SEQ ID NO: 2524163 - RNA, 15 nt, Human
gaugagcauggagcu

SEQ ID NO: 2524164 - RNA, 17 nt, Human
gaugagcaucccaggau

SEQ ID NO: 2524165 - RNA, 16 nt, Human
gaugagcaucccagga

SEQ ID NO: 2524166 - RNA, 21 nt, Human
gaugagaguuuuggaugcagu

SEQ ID NO: 2524167 - RNA, 15 nt, Human
gaugagcccucagaa

SEQ ID NO: 2524168 - RNA, 12 nt, Human
gaugagcauuua

SEQ ID NO: 2524169 - RNA, 18 nt, Human
gaugagcauuuagggcaa

SEQ ID NO: 2524170 - RNA, 21 nt, Human
gaugagcauuuagggcaagga

SEQ ID NO: 2524171 - RNA, 22 nt, Human
gaugagcauuuagggcaaggag

SEQ ID NO: 2524172 - RNA, 21 nt, Human
gaugaucuuugcagacaggca

SEQ ID NO: 2524173 - RNA, 20 nt, Human
gaugaucuuugcagacaggc

SEQ ID NO: 2524174 - RNA, 12 nt, Human
gaugcuggccca

SEQ ID NO: 2524175 - RNA, 13 nt, Human
gaugcuggcccag

SEQ ID NO: 2524176 - RNA, 14 nt, Human
gaugcuggcccagg

SEQ ID NO: 2524177 - RNA, 15 nt, Human
gaugcuggcccaggg

SEQ ID NO: 2524178 - RNA, 22 nt, Human
gaugcuggaugucugccaauuu

SEQ ID NO: 2524179 - RNA, 20 nt, Human
gaugcuggaugucugccaau

SEQ ID NO: 2524180 - RNA, 17 nt, Human
gaugcuggaugucugcc

SEQ ID NO: 2524181 - RNA, 18 nt, Human
gaugcuggaugcuccuuc

SEQ ID NO: 2524182 - RNA, 21 nt, Human
gaugaugaaaugaggucagag

SEQ ID NO: 2524183 - RNA, 18 nt, Human
gaguuuguguguugucuu

SEQ ID NO: 2524184 - RNA, 12 nt, Human
gaguuugguccc

SEQ ID NO: 2524185 - RNA, 15 nt, Human
gaguuuggucccugg

SEQ ID NO: 2524186 - RNA, 22 nt, Human
gaguuugucgcucaugugugca

SEQ ID NO: 2524187 - RNA, 18 nt, Human
gaguuugucgcucaugug

SEQ ID NO: 2524188 - RNA, 17 nt, Human
gaguuugucgcucaugu

SEQ ID NO: 2524189 - RNA, 18 nt, Human
gaguuugcuauuagagca

SEQ ID NO: 2524190 - RNA, 20 nt, Human
gaguuugggguaugggagag

SEQ ID NO: 2524191 - RNA, 23 nt, Human
gaguggaauaguauccuccaggu

SEQ ID NO: 2524192 - RNA, 22 nt, Human
gaguggaauaguauccuccagg

SEQ ID NO: 2524193 - RNA, 20 nt, Human
gaguggaauaguauccucca

SEQ ID NO: 2524194 - RNA, 13 nt, Human
gaguuggcuggga

SEQ ID NO: 2524195 - RNA, 19 nt, Human
gaguuguaaauauauaaau

SEQ ID NO: 2524196 - RNA, 15 nt, Human
gaguuguaaauauau

SEQ ID NO: 2524197 - RNA, 14 nt, Human
gaguuguaaauaua

SEQ ID NO: 2524198 - RNA, 12 nt, Human
gaguuguaaaua

SEQ ID NO: 2524199 - RNA, 11 nt, Human
gaguugggggu

SEQ ID NO: 2524200 - RNA, 17 nt, Human
gaguggacuggagugga

SEQ ID NO: 2524201 - RNA, 19 nt, Human
gaguggacuguucccugag

SEQ ID NO: 2524202 - RNA, 16 nt, Human
gaguuguuacauuuuu

SEQ ID NO: 2524203 - RNA, 20 nt, Human
gaguuguuacauuuuuaagu

SEQ ID NO: 2524204 - RNA, 17 nt, Human
gagugcaguccugauca

SEQ ID NO: 2524205 - RNA, 18 nt, Human
gagugcaguccugaucag

SEQ ID NO: 2524206 - RNA, 22 nt, Human
gagugcaguccugaucagagcc

SEQ ID NO: 2524207 - RNA, 18 nt, Human
gagugccuuacacaaugg

SEQ ID NO: 2524208 - RNA, 19 nt, Human
gaguggaauaguauccucc

SEQ ID NO: 2524209 - RNA, 14 nt, Human
gagugcgugcucag

SEQ ID NO: 2524210 - RNA, 17 nt, Human
gaguuugagcugccuuc

SEQ ID NO: 2524211 - RNA, 22 nt, Human
gaguuugaaggaggugagggau

SEQ ID NO: 2524212 - RNA, 13 nt, Human
gaguuugcccugg

SEQ ID NO: 2524213 - RNA, 15 nt, Human
gaguuucgagguaga

SEQ ID NO: 2524214 - RNA, 21 nt, Human
gaguuuccucaggcugcugga

SEQ ID NO: 2524215 - RNA, 16 nt, Human
gaguuuccucaggcug

SEQ ID NO: 2524216 - RNA, 20 nt, Human
gaguuuccucaggcugcugg

SEQ ID NO: 2524217 - RNA, 23 nt, Human
gaguuuccucaggcugcuggagg

SEQ ID NO: 2524218 - RNA, 15 nt, Human
gaguuucauguacaa

SEQ ID NO: 2524219 - RNA, 18 nt, Human
gaguuucauguacaagau

SEQ ID NO: 2524220 - RNA, 21 nt, Human
gaguuuagugaucugaacaga

SEQ ID NO: 2524221 - RNA, 20 nt, Human
gaguuucauucuccugccug

SEQ ID NO: 2524222 - RNA, 19 nt, Human
gaguuucauucuccugccu

SEQ ID NO: 2524223 - RNA, 18 nt, Human
gaguuucauucuccugcc

SEQ ID NO: 2524224 - RNA, 15 nt, Human
gaguuuccucaggcu

SEQ ID NO: 2524225 - RNA, 16 nt, Human
gaguuuccaaaaccag

SEQ ID NO: 2524226 - RNA, 16 nt, Human
gaguuuagcuggaaaa

SEQ ID NO: 2524227 - RNA, 16 nt, Human
gaguuguggaaagccu

SEQ ID NO: 2524228 - RNA, 20 nt, Human
gaguuguggaaagccucugc

SEQ ID NO: 2524229 - RNA, 13 nt, Human
gaggucuguucuu

SEQ ID NO: 2524230 - RNA, 14 nt, Human
gaggucuguucuuu

SEQ ID NO: 2524231 - RNA, 19 nt, Human
gaggucugugcugaggccu

SEQ ID NO: 2524232 - RNA, 16 nt, Human
gaggucugugcugagg

SEQ ID NO: 2524233 - RNA, 15 nt, Human
gaggucugugcugag

SEQ ID NO: 2524234 - RNA, 13 nt, Human
gaggucugugcug

SEQ ID NO: 2524235 - RNA, 21 nt, Human
gaggugcagagugcccagaac

SEQ ID NO: 2524236 - RNA, 19 nt, Human
gaggugcagagugcccaga

SEQ ID NO: 2524237 - RNA, 18 nt, Human
gaggucuuuugacaugug

SEQ ID NO: 2524238 - RNA, 18 nt, Human
gaggugcagagugcccag

SEQ ID NO: 2524239 - RNA, 17 nt, Human
gaggucucuugagggag

SEQ ID NO: 2524240 - RNA, 18 nt, Human
gaggucucuugagggagc

SEQ ID NO: 2524241 - RNA, 14 nt, Human
gaggucugaaaugg

SEQ ID NO: 2524242 - RNA, 21 nt, Human
gaggucuguacguuaccucuu

SEQ ID NO: 2524243 - RNA, 17 nt, Human
gaggucuggcugcuugc

SEQ ID NO: 2524244 - RNA, 19 nt, Human
gaggucugcucggccgucu

SEQ ID NO: 2524245 - RNA, 23 nt, Human
gaggucugcucggccgucuucac

SEQ ID NO: 2524246 - RNA, 22 nt, Human
gaggugccagcaacugaauaaa

SEQ ID NO: 2524247 - RNA, 20 nt, Human
gaggugccagcaacugaaua

SEQ ID NO: 2524248 - RNA, 17 nt, Human
gaggugccagcaacuga

SEQ ID NO: 2524249 - RNA, 20 nt, Human
gaggugccagcaaagcccca

SEQ ID NO: 2524250 - RNA, 19 nt, Human
gaggugccagcaaagcccc

SEQ ID NO: 2524251 - RNA, 17 nt, Human
gaggugccagcaaagcc

SEQ ID NO: 2524252 - RNA, 16 nt, Human
gaggugccagcaaagc

SEQ ID NO: 2524253 - RNA, 15 nt, Human
gaggugccagcaaag

SEQ ID NO: 2524254 - RNA, 13 nt, Human
gaggugccagcaa

SEQ ID NO: 2524255 - RNA, 14 nt, Human
gaggugccagcaaa

SEQ ID NO: 2524256 - RNA, 21 nt, Human
gaggugccugucccaccccca

SEQ ID NO: 2524257 - RNA, 15 nt, Human
gaggugccuguccca

SEQ ID NO: 2524258 - RNA, 13 nt, Human
gaggugccugucc

SEQ ID NO: 2524259 - RNA, 11 nt, Human
gaggugggagg

SEQ ID NO: 2524260 - RNA, 23 nt, Human
gaggugggagcaggagauugaga

SEQ ID NO: 2524261 - RNA, 15 nt, Human
gaggugggaggugga

SEQ ID NO: 2524262 - RNA, 18 nt, Human
gaggugggagguggaaga

SEQ ID NO: 2524263 - RNA, 16 nt, Human
gaggugggauaucccu

SEQ ID NO: 2524264 - RNA, 20 nt, Human
gagucaauccccucauucag

SEQ ID NO: 2524265 - RNA, 19 nt, Human
gagucaauccccucauuca

SEQ ID NO: 2524266 - RNA, 15 nt, Human
gagucaaugugcagu

SEQ ID NO: 2524267 - RNA, 12 nt, Human
gaggugggaucc

SEQ ID NO: 2524268 - RNA, 16 nt, Human
gaggugcugggaggga

SEQ ID NO: 2524269 - RNA, 14 nt, Human
gaggugggagcagg

SEQ ID NO: 2524270 - RNA, 15 nt, Human
gaggugggagcagga

SEQ ID NO: 2524271 - RNA, 23 nt, Human
gaggugcuacugacuuucucagc

SEQ ID NO: 2524272 - RNA, 18 nt, Human
gaggugggagcaggagau

SEQ ID NO: 2524273 - RNA, 17 nt, Human
gaggugggagcaggaga

SEQ ID NO: 2524274 - RNA, 20 nt, Human
gaggugggaggaucuuuuga

SEQ ID NO: 2524275 - RNA, 12 nt, Human
gagugagcuggu

SEQ ID NO: 2524276 - RNA, 13 nt, Human
gagucccaccuug

SEQ ID NO: 2524277 - RNA, 13 nt, Human
gagugagccuggc

SEQ ID NO: 2524278 - RNA, 22 nt, Human
gagugaggaauaguugagcccc

SEQ ID NO: 2524279 - RNA, 13 nt, Human
gaguccagucucu

SEQ ID NO: 2524280 - RNA, 21 nt, Human
gagucccaccuuggcugcagg

SEQ ID NO: 2524281 - RNA, 24 nt, Human
gagugagcacuaaggugugcucug

SEQ ID NO: 2524282 - RNA, 12 nt, Human
gagugcagugag

SEQ ID NO: 2524283 - RNA, 11 nt, Human
gagugcaguga

SEQ ID NO: 2524284 - RNA, 19 nt, Human
gagugcaggccugcucagg

SEQ ID NO: 2524285 - RNA, 17 nt, Human
gagugcaggccugcuca

SEQ ID NO: 2524286 - RNA, 14 nt, Human
gagugcaguccuga

SEQ ID NO: 2524287 - RNA, 22 nt, Human
gagugaggguuucugagcugcu

SEQ ID NO: 2524288 - RNA, 21 nt, Human
gagugagggguaaaagcugau

SEQ ID NO: 2524289 - RNA, 18 nt, Human
gagugaggaugucugggc

SEQ ID NO: 2524290 - RNA, 19 nt, Human
gagugagggguaaaagcug

SEQ ID NO: 2524291 - RNA, 14 nt, Human
gagugagggccuga

SEQ ID NO: 2524292 - RNA, 13 nt, Human
gagugagggccug

SEQ ID NO: 2524293 - RNA, 20 nt, Human
gagucccaccuuggcugcag

SEQ ID NO: 2524294 - RNA, 16 nt, Human
gagucccaccuuggcu

SEQ ID NO: 2524295 - RNA, 14 nt, Human
gagucaccaagccc

SEQ ID NO: 2524296 - RNA, 13 nt, Human
gagucaccaagcc

SEQ ID NO: 2524297 - RNA, 22 nt, Human
gaguccacuuuguuucgugggg

SEQ ID NO: 2524298 - RNA, 11 nt, Human
gaguccacucc

SEQ ID NO: 2524299 - RNA, 13 nt, Human
gaguccaggcccc

SEQ ID NO: 2524300 - RNA, 12 nt, Human
gaguccagggaa

SEQ ID NO: 2524301 - RNA, 14 nt, Human
gaguccaggcccca

SEQ ID NO: 2524302 - RNA, 13 nt, Human
gaguccacuuugu

SEQ ID NO: 2524303 - RNA, 16 nt, Human
gauacuugaaaauuaa

SEQ ID NO: 2524304 - RNA, 20 nt, Human
gauaugauuuaaaacaugua

SEQ ID NO: 2524305 - RNA, 14 nt, Human
gauaugauuuaaaa

SEQ ID NO: 2524306 - RNA, 18 nt, Human
gauaugcaguuuuccuua

SEQ ID NO: 2524307 - RNA, 14 nt, Human
gauaugcagaagga

SEQ ID NO: 2524308 - RNA, 17 nt, Human
gauauggcagaagacac

SEQ ID NO: 2524309 - RNA, 15 nt, Human
gauauggcagaagac

SEQ ID NO: 2524310 - RNA, 14 nt, Human
gauauggcagaaga

SEQ ID NO: 2524311 - RNA, 21 nt, Human
gauauggagcccuguaauuuu

SEQ ID NO: 2524312 - RNA, 15 nt, Human
gauauggagcccugu

SEQ ID NO: 2524313 - RNA, 12 nt, Human
gauauggagccc

SEQ ID NO: 2524314 - RNA, 16 nt, Human
gauaugcuuaguaaug

SEQ ID NO: 2524315 - RNA, 14 nt, Human
gauaugcuuaguaa

SEQ ID NO: 2524316 - RNA, 21 nt, Human
gauaugguggguggacagggg

SEQ ID NO: 2524317 - RNA, 16 nt, Human
gauaugggacauuuuu

SEQ ID NO: 2524318 - RNA, 17 nt, Human
gauaugggacauuuuug

SEQ ID NO: 2524319 - RNA, 20 nt, Human
gauauguaccuaacgaagua

SEQ ID NO: 2524320 - RNA, 19 nt, Human
gauauguaaacauaauucu

SEQ ID NO: 2524321 - RNA, 19 nt, Human
gauauuccaugaauguauc

SEQ ID NO: 2524322 - RNA, 21 nt, Human
gauauuccaugaauguaucag

SEQ ID NO: 2524323 - RNA, 20 nt, Human
gauauuccccccacuuaaga

SEQ ID NO: 2524324 - RNA, 15 nt, Human
gauauuauucuugua

SEQ ID NO: 2524325 - RNA, 16 nt, Human
gauauuccaugaaugu

SEQ ID NO: 2524326 - RNA, 18 nt, Human
gauauuccaugaauguau

SEQ ID NO: 2524327 - RNA, 16 nt, Human
gauauuaaaggaguua

SEQ ID NO: 2524328 - RNA, 14 nt, Human
gauacccaucccau

SEQ ID NO: 2524329 - RNA, 13 nt, Human
gauacccauccca

SEQ ID NO: 2524330 - RNA, 21 nt, Human
gauaccccccucugucuugug

SEQ ID NO: 2524331 - RNA, 20 nt, Human
gauacccauagcuuccauga

SEQ ID NO: 2524332 - RNA, 13 nt, Human
gauaccccccucu

SEQ ID NO: 2524333 - RNA, 16 nt, Human
gauacuacaguuuguu

SEQ ID NO: 2524334 - RNA, 22 nt, Human
gauacuaaaaguucuucuccaa

SEQ ID NO: 2524335 - RNA, 16 nt, Human
gauacgcaucagacag

SEQ ID NO: 2524336 - RNA, 20 nt, Human
gauacuaaaaguucuucucc

SEQ ID NO: 2524337 - RNA, 11 nt, Human
gauacuacagu

SEQ ID NO: 2524338 - RNA, 13 nt, Human
gauacgacuuuau

SEQ ID NO: 2524339 - RNA, 15 nt, Human
gacuuucugccugga

SEQ ID NO: 2524340 - RNA, 18 nt, Human
gacuuuugaaaagaggug

SEQ ID NO: 2524341 - RNA, 23 nt, Human
gacuuuuguauagguagauguuc

SEQ ID NO: 2524342 - RNA, 23 nt, Human
gacuuuucuuucagccaagaauu

SEQ ID NO: 2524343 - RNA, 21 nt, Human
gacuuuucuuuguggcuuccu

SEQ ID NO: 2524344 - RNA, 18 nt, Human
gacuuucggaguuggggg

SEQ ID NO: 2524345 - RNA, 12 nt, Human
gacuuuccugca

SEQ ID NO: 2524346 - RNA, 11 nt, Human
gacuuuccugc

SEQ ID NO: 2524347 - RNA, 16 nt, Human
gacuuuccuaaauguu

SEQ ID NO: 2524348 - RNA, 14 nt, Human
gacuuucugccugg

SEQ ID NO: 2524349 - RNA, 12 nt, Human
gacuuucugccu

SEQ ID NO: 2524350 - RNA, 19 nt, Human
gacuuucggaguugggggu

SEQ ID NO: 2524351 - RNA, 23 nt, Human
gacuuucucagccucugaauaug

SEQ ID NO: 2524352 - RNA, 11 nt, Human
gacuuuccucu

SEQ ID NO: 2524353 - RNA, 23 nt, Human
gacuggugcuauaggcuggagaa

SEQ ID NO: 2524354 - RNA, 22 nt, Human
gacuggugcuauaggcuggaga

SEQ ID NO: 2524355 - RNA, 13 nt, Human
gacuuuccacccc

SEQ ID NO: 2524356 - RNA, 15 nt, Human
gacuuuccacccccu

SEQ ID NO: 2524357 - RNA, 16 nt, Human
gacuuuccacccccuc

SEQ ID NO: 2524358 - RNA, 17 nt, Human
gacuuuccacccccucc

SEQ ID NO: 2524359 - RNA, 18 nt, Human
gacuuuccacccccuccc

SEQ ID NO: 2524360 - RNA, 19 nt, Human
gacuuuccacccccucccu

SEQ ID NO: 2524361 - RNA, 20 nt, Human
gacuggugcuauaggcugga

SEQ ID NO: 2524362 - RNA, 19 nt, Human
gacuggugcuauaggcugg

SEQ ID NO: 2524363 - RNA, 17 nt, Human
gacuggugagcagacug

SEQ ID NO: 2524364 - RNA, 16 nt, Human
gacugguaaguaacug

SEQ ID NO: 2524365 - RNA, 23 nt, Human
gacuggguuuggaccccagcugg

SEQ ID NO: 2524366 - RNA, 15 nt, Human
gacugguccugugug

SEQ ID NO: 2524367 - RNA, 14 nt, Human
gacuggugagcaga

SEQ ID NO: 2524368 - RNA, 22 nt, Human
gacuggguuuggaccccagcug

SEQ ID NO: 2524369 - RNA, 21 nt, Human
gacuggguuuggaccccagcu

SEQ ID NO: 2524370 - RNA, 14 nt, Human
gacuggguuucuag

SEQ ID NO: 2524371 - RNA, 16 nt, Human
gacuggguuuaugucc

SEQ ID NO: 2524372 - RNA, 21 nt, Human
gacucuuuuuguaccugguga

SEQ ID NO: 2524373 - RNA, 23 nt, Human
gacugggucucgcuuuguugccc

SEQ ID NO: 2524374 - RNA, 17 nt, Human
gagaagcuuugcccucc

SEQ ID NO: 2524375 - RNA, 16 nt, Human
gagaagcggcuggcag

SEQ ID NO: 2524376 - RNA, 13 nt, Human
gagaagcggcugg

SEQ ID NO: 2524377 - RNA, 15 nt, Human
gagaagcggcuggca

SEQ ID NO: 2524378 - RNA, 21 nt, Human
gagaagcuuuugaauaaaaac

SEQ ID NO: 2524379 - RNA, 22 nt, Human
gagaagcuuuugaauaaaaacu

SEQ ID NO: 2524380 - RNA, 20 nt, Human
gagaaggacccggaggggcc

SEQ ID NO: 2524381 - RNA, 12 nt, Human
gagaaggaagcc

SEQ ID NO: 2524382 - RNA, 22 nt, Human
gagaaggacccggaggggccug

SEQ ID NO: 2524383 - RNA, 14 nt, Human
gagaaggaaggaga

SEQ ID NO: 2524384 - RNA, 21 nt, Human
gagaaggaaggagacucaccu

SEQ ID NO: 2524385 - RNA, 17 nt, Human
gagacccuacaggagag

SEQ ID NO: 2524386 - RNA, 17 nt, Human
gagaccccuggccuccg

SEQ ID NO: 2524387 - RNA, 19 nt, Human
gagacccucguggccuucc

SEQ ID NO: 2524388 - RNA, 16 nt, Human
gagaccccuggccucc

SEQ ID NO: 2524389 - RNA, 15 nt, Human
gagaccccuggccuc

SEQ ID NO: 2524390 - RNA, 14 nt, Human
gagaccccuggccu

SEQ ID NO: 2524391 - RNA, 13 nt, Human
gagaccccuggcc

SEQ ID NO: 2524392 - RNA, 15 nt, Human
gagacccccacaccu

SEQ ID NO: 2524393 - RNA, 23 nt, Human
gagacccccacaccucaguuccc

SEQ ID NO: 2524394 - RNA, 21 nt, Human
gagacccucugccaccagaga

SEQ ID NO: 2524395 - RNA, 15 nt, Human
gagacccucugccac

SEQ ID NO: 2524396 - RNA, 11 nt, Human
gagaccucagc

SEQ ID NO: 2524397 - RNA, 13 nt, Human
gagaccucagcca

SEQ ID NO: 2524398 - RNA, 14 nt, Human
gagaccucagccau

SEQ ID NO: 2524399 - RNA, 21 nt, Human
gagaccucaucaggaugaacc

SEQ ID NO: 2524400 - RNA, 20 nt, Human
gagaccucaucaggaugaac

SEQ ID NO: 2524401 - RNA, 19 nt, Human
gagaccucaucaggaugaa

SEQ ID NO: 2524402 - RNA, 18 nt, Human
gagaccucaucaggauga

SEQ ID NO: 2524403 - RNA, 12 nt, Human
gagaccucauca

SEQ ID NO: 2524404 - RNA, 11 nt, Human
gagaccucauc

SEQ ID NO: 2524405 - RNA, 15 nt, Human
gagaccucagccaug

SEQ ID NO: 2524406 - RNA, 16 nt, Human
gagaccuccugccucc

SEQ ID NO: 2524407 - RNA, 15 nt, Human
gagaccuccugccuc

SEQ ID NO: 2524408 - RNA, 13 nt, Human
gagaccuccugcc

SEQ ID NO: 2524409 - RNA, 11 nt, Human
gagaccugccc

SEQ ID NO: 2524410 - RNA, 12 nt, Human
gagaccugcccc

SEQ ID NO: 2524411 - RNA, 22 nt, Human
gagacguuuuuggaagaguagu

SEQ ID NO: 2524412 - RNA, 23 nt, Human
gagacuaaccccaccacacccuc

SEQ ID NO: 2524413 - RNA, 15 nt, Human
gagacuaagcccugu

SEQ ID NO: 2524414 - RNA, 14 nt, Human
gagacuaagcccug

SEQ ID NO: 2524415 - RNA, 19 nt, Human
gagaccugacaagcacugc

SEQ ID NO: 2524416 - RNA, 18 nt, Human
gagaccugacaagcacug

SEQ ID NO: 2524417 - RNA, 22 nt, Human
gagacuaagcccugucgagaca

SEQ ID NO: 2524418 - RNA, 16 nt, Human
gagacuaagcccuguc

SEQ ID NO: 2524419 - RNA, 16 nt, Human
gagacuagauugccuu

SEQ ID NO: 2524420 - RNA, 18 nt, Human
gagacccagcccucaucc

SEQ ID NO: 2524421 - RNA, 14 nt, Human
gagacccaaggagg

SEQ ID NO: 2524422 - RNA, 12 nt, Human
gagacccccaca

SEQ ID NO: 2524423 - RNA, 13 nt, Human
gagacccccacac

SEQ ID NO: 2524424 - RNA, 14 nt, Human
gagacccccacacc

SEQ ID NO: 2524425 - RNA, 15 nt, Human
gagaaucacuugaac

SEQ ID NO: 2524426 - RNA, 20 nt, Human
gagaaucagaucauuucaaa

SEQ ID NO: 2524427 - RNA, 13 nt, Human
gagaaucacuuga

SEQ ID NO: 2524428 - RNA, 21 nt, Human
gagaaucauacuuagcaaagu

SEQ ID NO: 2524429 - RNA, 14 nt, Human
gagaaucacuugaa

SEQ ID NO: 2524430 - RNA, 19 nt, Human
gagaagugacagggaagcu

SEQ ID NO: 2524431 - RNA, 17 nt, Human
gagaagugacagggaag

SEQ ID NO: 2524432 - RNA, 16 nt, Human
gagaagugacagggaa

SEQ ID NO: 2524433 - RNA, 15 nt, Human
gagaagugacaggga

SEQ ID NO: 2524434 - RNA, 23 nt, Human
gagaagugacagggaagcuacag

SEQ ID NO: 2524435 - RNA, 21 nt, Human
gagaagugacagggaagcuac

SEQ ID NO: 2524436 - RNA, 24 nt, Human
gagaagugacagggaagcuacagg

SEQ ID NO: 2524437 - RNA, 23 nt, Human
gagaagucuuagacuugaaauac

SEQ ID NO: 2524438 - RNA, 20 nt, Human
gagaagugaaugcugggacu

SEQ ID NO: 2524439 - RNA, 19 nt, Human
gagaagugaaugcugggac

SEQ ID NO: 2524440 - RNA, 17 nt, Human
gagaagugaaugcuggg

SEQ ID NO: 2524441 - RNA, 15 nt, Human
gacuaggguccuggg

SEQ ID NO: 2524442 - RNA, 16 nt, Human
gacuaggguccugggg

SEQ ID NO: 2524443 - RNA, 18 nt, Human
gacuaggguccuggggaa

SEQ ID NO: 2524444 - RNA, 22 nt, Human
gacuauauuugggccugcucca

SEQ ID NO: 2524445 - RNA, 21 nt, Human
gacuagggauucaggcugcuu

SEQ ID NO: 2524446 - RNA, 22 nt, Human
gacuaucuaaauguugaaagau

SEQ ID NO: 2524447 - RNA, 13 nt, Human
gacuaucagccca

SEQ ID NO: 2524448 - RNA, 18 nt, Human
gacuaucugucugguggc

SEQ ID NO: 2524449 - RNA, 18 nt, Human
gacuaucaaacugaagcc

SEQ ID NO: 2524450 - RNA, 22 nt, Human
gacuaucaaacugaagccagaa

SEQ ID NO: 2524451 - RNA, 16 nt, Human
gacuaugaaugggcaa

SEQ ID NO: 2524452 - RNA, 20 nt, Human
gacuaugaacuucucucaga

SEQ ID NO: 2524453 - RNA, 19 nt, Human
gacuaugaacuucucucag

SEQ ID NO: 2524454 - RNA, 23 nt, Human
gacuagccccuguggagacuggg

SEQ ID NO: 2524455 - RNA, 16 nt, Human
gacuauuuaacuugag

SEQ ID NO: 2524456 - RNA, 13 nt, Human
gacuauuuaugaa

SEQ ID NO: 2524457 - RNA, 21 nt, Human
gacuaugaaugggcaaaacug

SEQ ID NO: 2524458 - RNA, 14 nt, Human
gacuauucaguuuu

SEQ ID NO: 2524459 - RNA, 21 nt, Human
gacuagccccuguggagacug

SEQ ID NO: 2524460 - RNA, 23 nt, Human
gacuagggaaaugaucaguuuuu

SEQ ID NO: 2524461 - RNA, 14 nt, Human
gacuaggagcacug

SEQ ID NO: 2524462 - RNA, 17 nt, Human
gacuagggauucaggcu

SEQ ID NO: 2524463 - RNA, 18 nt, Human
gacuagggauucaggcug

SEQ ID NO: 2524464 - RNA, 19 nt, Human
gacuagggauucaggcugc

SEQ ID NO: 2524465 - RNA, 20 nt, Human
gacuagggauucaggcugcu

SEQ ID NO: 2524466 - RNA, 15 nt, Human
gacucuggccuccac

SEQ ID NO: 2524467 - RNA, 16 nt, Human
gacucuggcaaagcuu

SEQ ID NO: 2524468 - RNA, 15 nt, Human
gacucugcacauguc

SEQ ID NO: 2524469 - RNA, 14 nt, Human
gacucugcacauga

SEQ ID NO: 2524470 - RNA, 19 nt, Human
gacucugcacaugucuugu

SEQ ID NO: 2524471 - RNA, 17 nt, Human
gacucugaccucuuggc

SEQ ID NO: 2524472 - RNA, 16 nt, Human
gacucuggggacuccg

SEQ ID NO: 2524473 - RNA, 13 nt, Human
gacucuggccucc

SEQ ID NO: 2524474 - RNA, 12 nt, Human
gacucugucuca

SEQ ID NO: 2524475 - RNA, 21 nt, Human
gacucugaaucuuuuucagaa

SEQ ID NO: 2524476 - RNA, 20 nt, Human
gacucugaaucuuuuucaga

SEQ ID NO: 2524477 - RNA, 19 nt, Human
gacucugaagccucuggga

SEQ ID NO: 2524478 - RNA, 18 nt, Human
gacucugaagccucuggg

SEQ ID NO: 2524479 - RNA, 17 nt, Human
gacucugaagccucugg

SEQ ID NO: 2524480 - RNA, 16 nt, Human
gacucugaagccucug

SEQ ID NO: 2524481 - RNA, 15 nt, Human
gacucugaagccucu

SEQ ID NO: 2524482 - RNA, 18 nt, Human
gacucugaaaucugaaga

SEQ ID NO: 2524483 - RNA, 12 nt, Human
gacucugcacau

SEQ ID NO: 2524484 - RNA, 22 nt, Human
gacucugaggcucuuucugggc

SEQ ID NO: 2524485 - RNA, 23 nt, Human
gacucugaccucuuggccacaga

SEQ ID NO: 2524486 - RNA, 19 nt, Human
gacucugaggcucuuucug

SEQ ID NO: 2524487 - RNA, 15 nt, Human
gacucugaaaucuga

SEQ ID NO: 2524488 - RNA, 14 nt, Human
gacucugaaaucug

SEQ ID NO: 2524489 - RNA, 19 nt, Human
gacucucugugaccugccc

SEQ ID NO: 2524490 - RNA, 23 nt, Human
gacucaaaacccaucugggcucc

SEQ ID NO: 2524491 - RNA, 22 nt, Human
gacucaaaacccaucugggcuc

SEQ ID NO: 2524492 - RNA, 15 nt, Human
gacucucugugaccu

SEQ ID NO: 2524493 - RNA, 14 nt, Human
gacucucugugacc

SEQ ID NO: 2524494 - RNA, 16 nt, Human
gacucuuaagaagacu

SEQ ID NO: 2524495 - RNA, 18 nt, Human
gacucuuaagaagacugc

SEQ ID NO: 2524496 - RNA, 17 nt, Human
gacucuuaagaagacug

SEQ ID NO: 2524497 - RNA, 22 nt, Human
gacucugucaauuucccugacu

SEQ ID NO: 2524498 - RNA, 19 nt, Human
gacucuuguuuucaguuuc

SEQ ID NO: 2524499 - RNA, 18 nt, Human
gacucuuugguggcuuug

SEQ ID NO: 2524500 - RNA, 21 nt, Human
gacucuuugguggcuuugcau

SEQ ID NO: 2524501 - RNA, 20 nt, Human
gacucuuugguggcuuugca

SEQ ID NO: 2524502 - RNA, 19 nt, Human
gacucuuugguggcuuugc

SEQ ID NO: 2524503 - RNA, 18 nt, Human
gacucuuuuuguaccugg

SEQ ID NO: 2524504 - RNA, 22 nt, Human
gacucuuuuuagggccaggcag

SEQ ID NO: 2524505 - RNA, 20 nt, Human
gacucuuuuuagggccaggc

SEQ ID NO: 2524506 - RNA, 19 nt, Human
gacucuuuuuagggccagg

SEQ ID NO: 2524507 - RNA, 17 nt, Human
gacucuuuugccauuaa

SEQ ID NO: 2524508 - RNA, 16 nt, Human
gacugaaaaccucucc

SEQ ID NO: 2524509 - RNA, 17 nt, Human
gacugaaaaccucuccu

SEQ ID NO: 2524510 - RNA, 18 nt, Human
gacugaaaaccucuccuc

SEQ ID NO: 2524511 - RNA, 20 nt, Human
gacugaaaaccucuccucau

SEQ ID NO: 2524512 - RNA, 12 nt, Human
gagauuuuccuu

SEQ ID NO: 2524513 - RNA, 12 nt, Human
gagauuuuucau

SEQ ID NO: 2524514 - RNA, 23 nt, Human
gagauuucaucugcucuccuucc

SEQ ID NO: 2524515 - RNA, 18 nt, Human
gagauuucuuguugcuca

SEQ ID NO: 2524516 - RNA, 22 nt, Human
gagauuucaucugcucuccuuc

SEQ ID NO: 2524517 - RNA, 21 nt, Human
gagauuucaucugcucuccuu

SEQ ID NO: 2524518 - RNA, 20 nt, Human
gagauuucaucugcucuccu

SEQ ID NO: 2524519 - RNA, 19 nt, Human
gagauuucaucugcucucc

SEQ ID NO: 2524520 - RNA, 15 nt, Human
gagauuucaagagau

SEQ ID NO: 2524521 - RNA, 17 nt, Human
gagauuucaucugcucu

SEQ ID NO: 2524522 - RNA, 13 nt, Human
gagauuucaucug

SEQ ID NO: 2524523 - RNA, 23 nt, Human
gagauuuaauuaaucaugaaugu

SEQ ID NO: 2524524 - RNA, 20 nt, Human
gagauugagaaggagagaaa

SEQ ID NO: 2524525 - RNA, 18 nt, Human
gagauugagaaggagaga

SEQ ID NO: 2524526 - RNA, 17 nt, Human
gagauugagaaggagag

SEQ ID NO: 2524527 - RNA, 13 nt, Human
gagauugagaagg

SEQ ID NO: 2524528 - RNA, 13 nt, Human
gagauuuacaacu

SEQ ID NO: 2524529 - RNA, 17 nt, Human
gagauucaguuuucauu

SEQ ID NO: 2524530 - RNA, 12 nt, Human
gagaugucuucg

SEQ ID NO: 2524531 - RNA, 16 nt, Human
gagauguaauuguuuu

SEQ ID NO: 2524532 - RNA, 14 nt, Human
gagauguaauuguu

SEQ ID NO: 2524533 - RNA, 15 nt, Human
gagauguagcaaaac

SEQ ID NO: 2524534 - RNA, 21 nt, Human
gagauugcaccacugcacucc

SEQ ID NO: 2524535 - RNA, 18 nt, Human
gagauugcaccacugcac

SEQ ID NO: 2524536 - RNA, 14 nt, Human
gagauguagccccu

SEQ ID NO: 2524537 - RNA, 16 nt, Human
gagauguaaaagguau

SEQ ID NO: 2524538 - RNA, 17 nt, Human
gagauguaaaagguauu

SEQ ID NO: 2524539 - RNA, 14 nt, Human
gagauggggugggg

SEQ ID NO: 2524540 - RNA, 15 nt, Human
gagauggaggaggag

SEQ ID NO: 2524541 - RNA, 15 nt, Human
gagauggccugagaa

SEQ ID NO: 2524542 - RNA, 20 nt, Human
gagaugggaaugagguggga

SEQ ID NO: 2524543 - RNA, 21 nt, Human
gagaugggaaugaggugggag

SEQ ID NO: 2524544 - RNA, 17 nt, Human
gagaugggacugggagg

SEQ ID NO: 2524545 - RNA, 23 nt, Human
gagaugggagcuccucuccugga

SEQ ID NO: 2524546 - RNA, 18 nt, Human
gagaugggcuuguuuucu

SEQ ID NO: 2524547 - RNA, 22 nt, Human
gagaugggagcuccucuccugg

SEQ ID NO: 2524548 - RNA, 15 nt, Human
gagaugggagcuccu

SEQ ID NO: 2524549 - RNA, 14 nt, Human
gagaugggagcucc

SEQ ID NO: 2524550 - RNA, 19 nt, Human
gagaugggacugggagggc

SEQ ID NO: 2524551 - RNA, 20 nt, Human
gagaugaugaaaauauuuaa

SEQ ID NO: 2524552 - RNA, 21 nt, Human
gagaggcaggcauagaggcuu

SEQ ID NO: 2524553 - RNA, 15 nt, Human
gagaggcaggcauag

SEQ ID NO: 2524554 - RNA, 19 nt, Human
gagaugaugaaaauauuua

SEQ ID NO: 2524555 - RNA, 22 nt, Human
gagaggcauccaguaucuugaa

SEQ ID NO: 2524556 - RNA, 14 nt, Human
gagaugcagaggua

SEQ ID NO: 2524557 - RNA, 12 nt, Human
gagaugcagagg

SEQ ID NO: 2524558 - RNA, 21 nt, Human
gagaugcaccaccaagccaag

SEQ ID NO: 2524559 - RNA, 18 nt, Human
gagaugauucagaagggg

SEQ ID NO: 2524560 - RNA, 17 nt, Human
gagaugauucagaaggg

SEQ ID NO: 2524561 - RNA, 18 nt, Human
gagaugcaccaccaagcc

SEQ ID NO: 2524562 - RNA, 21 nt, Human
gagaugaugccaugggcccuc

SEQ ID NO: 2524563 - RNA, 21 nt, Human
gagaugcuggagaagagagga

SEQ ID NO: 2524564 - RNA, 20 nt, Human
gagaugcuggagaagagagg

SEQ ID NO: 2524565 - RNA, 19 nt, Human
gagaugcuggagaagagag

SEQ ID NO: 2524566 - RNA, 19 nt, Human
gagaugccuccaccgcugc

SEQ ID NO: 2524567 - RNA, 13 nt, Human
gagaugcagcugg

SEQ ID NO: 2524568 - RNA, 16 nt, Human
gagaugcagagguaaa

SEQ ID NO: 2524569 - RNA, 23 nt, Human
gagaugcauucuugguuggcugg

SEQ ID NO: 2524570 - RNA, 14 nt, Human
gagaugccuccacc

SEQ ID NO: 2524571 - RNA, 15 nt, Human
gagaugccuccaccg

SEQ ID NO: 2524572 - RNA, 18 nt, Human
gagaugcuggagaagaga

SEQ ID NO: 2524573 - RNA, 20 nt, Human
gagauggaaguugcagugag

SEQ ID NO: 2524574 - RNA, 23 nt, Human
gagauggaacccuuuuggccccc

SEQ ID NO: 2524575 - RNA, 12 nt, Human
gagauggaggag

SEQ ID NO: 2524576 - RNA, 13 nt, Human
gagauggaggagg

SEQ ID NO: 2524577 - RNA, 14 nt, Human
gagauggaggagga

SEQ ID NO: 2524578 - RNA, 18 nt, Human
gagauggaguucuugugc

SEQ ID NO: 2524579 - RNA, 16 nt, Human
gagauggaggaggagg

SEQ ID NO: 2524580 - RNA, 23 nt, Human
gagauggaucaaucaaacccggc

SEQ ID NO: 2524581 - RNA, 16 nt, Human
gagacuccugcaggca

SEQ ID NO: 2524582 - RNA, 15 nt, Human
gagacuccugcaggc

SEQ ID NO: 2524583 - RNA, 15 nt, Human
gagacucaccucugc

SEQ ID NO: 2524584 - RNA, 16 nt, Human
gagacucaccucugcc

SEQ ID NO: 2524585 - RNA, 20 nt, Human
gagacuaugcguuuuuauaa

SEQ ID NO: 2524586 - RNA, 18 nt, Human
gagacuaugcguuuuuau

SEQ ID NO: 2524587 - RNA, 21 nt, Human
gagacuagauuuaugaauaca

SEQ ID NO: 2524588 - RNA, 17 nt, Human
gagacucaccucugccu

SEQ ID NO: 2524589 - RNA, 18 nt, Human
gagacucaccucugccuc

SEQ ID NO: 2524590 - RNA, 19 nt, Human
gagacucaccucugccuca

SEQ ID NO: 2524591 - RNA, 20 nt, Human
gagacucaccucugccucaa

SEQ ID NO: 2524592 - RNA, 23 nt, Human
gagacucaccucugccucaaugu

SEQ ID NO: 2524593 - RNA, 13 nt, Human
gagacucagacag

SEQ ID NO: 2524594 - RNA, 14 nt, Human
gagaggcauccagu

SEQ ID NO: 2524595 - RNA, 16 nt, Human
gagaggcagagagcgg

SEQ ID NO: 2524596 - RNA, 14 nt, Human
gagaggcagagagc

SEQ ID NO: 2524597 - RNA, 13 nt, Human
gagaggcagagag

SEQ ID NO: 2524598 - RNA, 16 nt, Human
gagaggcagagaaaga

SEQ ID NO: 2524599 - RNA, 11 nt, Human
gagaggcaggc

SEQ ID NO: 2524600 - RNA, 12 nt, Human
gagaggcaggca

SEQ ID NO: 2524601 - RNA, 17 nt, Human
gagacuccugcaggcag

SEQ ID NO: 2524602 - RNA, 18 nt, Human
gagacuccugcaggcagc

SEQ ID NO: 2524603 - RNA, 22 nt, Human
gagaggcagacuucccugaaug

SEQ ID NO: 2524604 - RNA, 12 nt, Human
gagaggcagaga

SEQ ID NO: 2524605 - RNA, 15 nt, Human
gagcuggggaccugg

SEQ ID NO: 2524606 - RNA, 13 nt, Human
gagcuggggaccu

SEQ ID NO: 2524607 - RNA, 12 nt, Human
gagcuggggaag

SEQ ID NO: 2524608 - RNA, 19 nt, Human
gagcugggcagaaggccaa

SEQ ID NO: 2524609 - RNA, 22 nt, Human
gagcuggcucugagcgccucca

SEQ ID NO: 2524610 - RNA, 21 nt, Human
gagcugggacacuuaacagau

SEQ ID NO: 2524611 - RNA, 14 nt, Human
gagcugggaggaaa

SEQ ID NO: 2524612 - RNA, 17 nt, Human
gagcugggcagaaggcc

SEQ ID NO: 2524613 - RNA, 18 nt, Human
gagcugggaggcauggcc

SEQ ID NO: 2524614 - RNA, 16 nt, Human
gagcugggauccuaag

SEQ ID NO: 2524615 - RNA, 17 nt, Human
gagcugggaggcauggc

SEQ ID NO: 2524616 - RNA, 12 nt, Human
gagcugggaggc

SEQ ID NO: 2524617 - RNA, 16 nt, Human
gagcugggaggaaaag

SEQ ID NO: 2524618 - RNA, 17 nt, Human
gagcugggaggaaaaga

SEQ ID NO: 2524619 - RNA, 18 nt, Human
gagcugggugucaagagg

SEQ ID NO: 2524620 - RNA, 19 nt, Human
gagcuggggaugucucuca

SEQ ID NO: 2524621 - RNA, 19 nt, Human
gagcuggggaccugguacc

SEQ ID NO: 2524622 - RNA, 18 nt, Human
gagcugggggccaugagc

SEQ ID NO: 2524623 - RNA, 14 nt, Human
gagcuggugcauua

SEQ ID NO: 2524624 - RNA, 16 nt, Human
gagcuggugcauuaca

SEQ ID NO: 2524625 - RNA, 19 nt, Human
gagcugggggccaugagcu

SEQ ID NO: 2524626 - RNA, 24 nt, Human
gagcugggggccaugagcuccaga

SEQ ID NO: 2524627 - RNA, 21 nt, Human
gagcugguaguuaguagcaug

SEQ ID NO: 2524628 - RNA, 11 nt, Human
gagcuggugca

SEQ ID NO: 2524629 - RNA, 21 nt, Human
gagcggagaaaggaagggcug

SEQ ID NO: 2524630 - RNA, 18 nt, Human
gagcggagaaaggaaggg

SEQ ID NO: 2524631 - RNA, 17 nt, Human
gagcgggaccuguggcu

SEQ ID NO: 2524632 - RNA, 16 nt, Human
gagcgggaccuguggc

SEQ ID NO: 2524633 - RNA, 14 nt, Human
gagcgggaccugug

SEQ ID NO: 2524634 - RNA, 14 nt, Human
gagcggucucaggc

SEQ ID NO: 2524635 - RNA, 22 nt, Human
gagcugccuguucagcuccagc

SEQ ID NO: 2524636 - RNA, 21 nt, Human
gagcugccuguucagcuccag

SEQ ID NO: 2524637 - RNA, 17 nt, Human
gagcuggcucugagcgc

SEQ ID NO: 2524638 - RNA, 13 nt, Human
gagcuggcucuga

SEQ ID NO: 2524639 - RNA, 19 nt, Human
gagcugccuucccuagcuu

SEQ ID NO: 2524640 - RNA, 14 nt, Human
gagcugccuucccu

SEQ ID NO: 2524641 - RNA, 23 nt, Human
gagcugccuucccuagcuuuaga

SEQ ID NO: 2524642 - RNA, 13 nt, Human
gagcugccuuccc

SEQ ID NO: 2524643 - RNA, 11 nt, Human
gagcugccuuc

SEQ ID NO: 2524644 - RNA, 16 nt, Human
gagcggucucaggcug

SEQ ID NO: 2524645 - RNA, 20 nt, Human
gagcugccuguucagcucca

SEQ ID NO: 2524646 - RNA, 17 nt, Human
gagccuuccaggggugg

SEQ ID NO: 2524647 - RNA, 16 nt, Human
gagccuuccaggggug

SEQ ID NO: 2524648 - RNA, 15 nt, Human
gagccuuccaggggu

SEQ ID NO: 2524649 - RNA, 14 nt, Human
gagccuuccagggg

SEQ ID NO: 2524650 - RNA, 22 nt, Human
gagccuugaacuuugaccucug

SEQ ID NO: 2524651 - RNA, 19 nt, Human
gagccuugaacuuugaccu

SEQ ID NO: 2524652 - RNA, 22 nt, Human
gagcccccccaacacugugccc

SEQ ID NO: 2524653 - RNA, 17 nt, Human
gagcccccgccccgccc

SEQ ID NO: 2524654 - RNA, 21 nt, Human
gagcccccgccccgccccaca

SEQ ID NO: 2524655 - RNA, 22 nt, Human
gagcccccgccccgccccacau

SEQ ID NO: 2524656 - RNA, 23 nt, Human
gagccuuuucccucuuuggcucc

SEQ ID NO: 2524657 - RNA, 23 nt, Human
gagccuuugguucuggccagaau

SEQ ID NO: 2524658 - RNA, 13 nt, Human
gagcgaaacuccg

SEQ ID NO: 2524659 - RNA, 18 nt, Human
gagccuuugguucuggcc

SEQ ID NO: 2524660 - RNA, 22 nt, Human
gagccuugguguccaccuggcc

SEQ ID NO: 2524661 - RNA, 17 nt, Human
gagccuuuggaugacca

SEQ ID NO: 2524662 - RNA, 19 nt, Human
gagccuugguguccaccug

SEQ ID NO: 2524663 - RNA, 20 nt, Human
gagccuugguguccaccugg

SEQ ID NO: 2524664 - RNA, 22 nt, Human
gagcagggauuaaccucugcac

SEQ ID NO: 2524665 - RNA, 21 nt, Human
gagcagggauuaaccucugca

SEQ ID NO: 2524666 - RNA, 20 nt, Human
gagcagggauuaaccucugc

SEQ ID NO: 2524667 - RNA, 14 nt, Human
gagcagggcucagc

SEQ ID NO: 2524668 - RNA, 22 nt, Human
gagcaggcuggcagcucuccag

SEQ ID NO: 2524669 - RNA, 21 nt, Human
gagcaggcuggcagcucucca

SEQ ID NO: 2524670 - RNA, 20 nt, Human
gagcaggcuggcagcucucc

SEQ ID NO: 2524671 - RNA, 19 nt, Human
gagcaggcuggcagcucuc

SEQ ID NO: 2524672 - RNA, 18 nt, Human
gagcaggcuggcagcucu

SEQ ID NO: 2524673 - RNA, 17 nt, Human
gagcaugggccuggcca

SEQ ID NO: 2524674 - RNA, 13 nt, Human
gagccccagcccc

SEQ ID NO: 2524675 - RNA, 12 nt, Human
gagccccagccc

SEQ ID NO: 2524676 - RNA, 17 nt, Human
gagccccaggccucugu

SEQ ID NO: 2524677 - RNA, 16 nt, Human
gagccccaggccucug

SEQ ID NO: 2524678 - RNA, 13 nt, Human
gagccccaggccu

SEQ ID NO: 2524679 - RNA, 14 nt, Human
gagccccagcugac

SEQ ID NO: 2524680 - RNA, 13 nt, Human
gagccccagcuga

SEQ ID NO: 2524681 - RNA, 19 nt, Human
gagccccagcccccuuugg

SEQ ID NO: 2524682 - RNA, 16 nt, Human
gagccccagcuacccu

SEQ ID NO: 2524683 - RNA, 18 nt, Human
gagccccaggccucugug

SEQ ID NO: 2524684 - RNA, 12 nt, Human
gagccccagggu

SEQ ID NO: 2524685 - RNA, 13 nt, Human
gagccccaggguc

SEQ ID NO: 2524686 - RNA, 14 nt, Human
gagccccagggucu

SEQ ID NO: 2524687 - RNA, 13 nt, Human
gagcccccccaac

SEQ ID NO: 2524688 - RNA, 17 nt, Human
gagccccagugccaagc

SEQ ID NO: 2524689 - RNA, 17 nt, Human
gagccccauuccuggga

SEQ ID NO: 2524690 - RNA, 18 nt, Human
gagccccauuccugggaa

SEQ ID NO: 2524691 - RNA, 16 nt, Human
gagccccauuccuggg

SEQ ID NO: 2524692 - RNA, 12 nt, Human
gagccccagugc

SEQ ID NO: 2524693 - RNA, 14 nt, Human
gagccccagugcca

SEQ ID NO: 2524694 - RNA, 18 nt, Human
gagccccaucagcuccag

SEQ ID NO: 2524695 - RNA, 19 nt, Human
gagccccagggucuucccu

SEQ ID NO: 2524696 - RNA, 24 nt, Human
gagccccagggucuucccuaccuc

SEQ ID NO: 2524697 - RNA, 14 nt, Human
gagcauagaaggca

SEQ ID NO: 2524698 - RNA, 22 nt, Human
gagcaguuucuguccugcuggu

SEQ ID NO: 2524699 - RNA, 16 nt, Human
gagcauagaaggcagg

SEQ ID NO: 2524700 - RNA, 12 nt, Human
gagcaucaggcc

SEQ ID NO: 2524701 - RNA, 17 nt, Human
gagcagugucuuccaua

SEQ ID NO: 2524702 - RNA, 21 nt, Human
gagcauaauaaauggaugagg

SEQ ID NO: 2524703 - RNA, 21 nt, Human
gagcaguuucuguccugcugg

SEQ ID NO: 2524704 - RNA, 20 nt, Human
gagcaguuucuguccugcug

SEQ ID NO: 2524705 - RNA, 18 nt, Human
gagcagugucuuccauaa

SEQ ID NO: 2524706 - RNA, 19 nt, Human
gagcagugucuuccauaau

SEQ ID NO: 2524707 - RNA, 17 nt, Human
gagcaguuucuguccug

SEQ ID NO: 2524708 - RNA, 14 nt, Human
gagcauggagcugg

SEQ ID NO: 2524709 - RNA, 22 nt, Human
gagcaugccuggauggggcugc

SEQ ID NO: 2524710 - RNA, 15 nt, Human
gagcaugggccuggc

SEQ ID NO: 2524711 - RNA, 21 nt, Human
gagcauggcugugaggauggg

SEQ ID NO: 2524712 - RNA, 19 nt, Human
gagcauggcugugaggaug

SEQ ID NO: 2524713 - RNA, 16 nt, Human
gagcauggcugugagg

SEQ ID NO: 2524714 - RNA, 14 nt, Human
gagcauggcuguga

SEQ ID NO: 2524715 - RNA, 17 nt, Human
gagcauggagcuggccg

SEQ ID NO: 2524716 - RNA, 15 nt, Human
gagcauggagcuggc

SEQ ID NO: 2524717 - RNA, 21 nt, Human
gagcauggggauaaaggagaa

SEQ ID NO: 2524718 - RNA, 22 nt, Human
gagcauggggauaaaggagaag

SEQ ID NO: 2524719 - RNA, 22 nt, Human
gagcauguacugagccuuguaa

SEQ ID NO: 2524720 - RNA, 17 nt, Human
gaaguguaggcagacac

SEQ ID NO: 2524721 - RNA, 16 nt, Human
gaaguguaggcagaca

SEQ ID NO: 2524722 - RNA, 11 nt, Human
gaagugugauu

SEQ ID NO: 2524723 - RNA, 23 nt, Human
gaagugugauugggaauaaauau

SEQ ID NO: 2524724 - RNA, 20 nt, Human
gaagugugauugggaauaaa

SEQ ID NO: 2524725 - RNA, 18 nt, Human
gaaguguaggcagacaca

SEQ ID NO: 2524726 - RNA, 17 nt, Human
gaaguguaacagcugag

SEQ ID NO: 2524727 - RNA, 18 nt, Human
gaaguguaacagcugagg

SEQ ID NO: 2524728 - RNA, 15 nt, Human
gaaguguaggcagac

SEQ ID NO: 2524729 - RNA, 23 nt, Human
gaaguguaacagcugaggucucu

SEQ ID NO: 2524730 - RNA, 17 nt, Human
gaagugugggucugugu

SEQ ID NO: 2524731 - RNA, 18 nt, Human
gaagugugggucugugug

SEQ ID NO: 2524732 - RNA, 19 nt, Human
gaagugugggucugugugu

SEQ ID NO: 2524733 - RNA, 22 nt, Human
gaaugaaugucagugugacuga

SEQ ID NO: 2524734 - RNA, 18 nt, Human
gaaugaaugucaguguga

SEQ ID NO: 2524735 - RNA, 14 nt, Human
gaaugaaugucagu

SEQ ID NO: 2524736 - RNA, 11 nt, Human
gaaugaauguc

SEQ ID NO: 2524737 - RNA, 16 nt, Human
gaaugacaacagaagc

SEQ ID NO: 2524738 - RNA, 16 nt, Human
gaaugaauuaaauaaa

SEQ ID NO: 2524739 - RNA, 13 nt, Human
gaaugacaaagag

SEQ ID NO: 2524740 - RNA, 14 nt, Human
gaaugaauuaaaua

SEQ ID NO: 2524741 - RNA, 20 nt, Human
gaaugagagacacacugaag

SEQ ID NO: 2524742 - RNA, 18 nt, Human
gaaugaccuuguugcaug

SEQ ID NO: 2524743 - RNA, 23 nt, Human
gaaugagagacacacugaagaag

SEQ ID NO: 2524744 - RNA, 22 nt, Human
gaaugagagacacacugaagaa

SEQ ID NO: 2524745 - RNA, 11 nt, Human
gaaugagccuc

SEQ ID NO: 2524746 - RNA, 13 nt, Human
gaaugagccucgg

SEQ ID NO: 2524747 - RNA, 22 nt, Human
gaaugagccuacgcugaagaug

SEQ ID NO: 2524748 - RNA, 20 nt, Human
gaaugagccuacgcugaaga

SEQ ID NO: 2524749 - RNA, 14 nt, Human
gaaugagaguguga

SEQ ID NO: 2524750 - RNA, 17 nt, Human
gaaauccauccagaggc

SEQ ID NO: 2524751 - RNA, 14 nt, Human
gaaauccauucaca

SEQ ID NO: 2524752 - RNA, 18 nt, Human
gaaauccagggugguggu

SEQ ID NO: 2524753 - RNA, 13 nt, Human
gaaauccagggug

SEQ ID NO: 2524754 - RNA, 19 nt, Human
gaagcucagggccuggcuc

SEQ ID NO: 2524755 - RNA, 18 nt, Human
gaagcucagggccuggcu

SEQ ID NO: 2524756 - RNA, 17 nt, Human
gaagcucagggccuggc

SEQ ID NO: 2524757 - RNA, 16 nt, Human
gaagcucagggccugg

SEQ ID NO: 2524758 - RNA, 21 nt, Human
gaagcucagggccuggcucag

SEQ ID NO: 2524759 - RNA, 20 nt, Human
gaagcucagggccuggcuca

SEQ ID NO: 2524760 - RNA, 23 nt, Human
gaagcuccacugucacccuccac

SEQ ID NO: 2524761 - RNA, 19 nt, Human
gaagcuccacugucacccu

SEQ ID NO: 2524762 - RNA, 18 nt, Human
gaagcuccacugucaccc

SEQ ID NO: 2524763 - RNA, 16 nt, Human
gaagcuccacugucac

SEQ ID NO: 2524764 - RNA, 15 nt, Human
gaagcuccacuguca

SEQ ID NO: 2524765 - RNA, 14 nt, Human
gaagcuccacuguc

SEQ ID NO: 2524766 - RNA, 13 nt, Human
gaagcuccacugu

SEQ ID NO: 2524767 - RNA, 23 nt, Human
gaagcucagggccuggcucaggu

SEQ ID NO: 2524768 - RNA, 15 nt, Human
gaagcucagggccug

SEQ ID NO: 2524769 - RNA, 14 nt, Human
gaagcucagggccu

SEQ ID NO: 2524770 - RNA, 22 nt, Human
gaagcuacagguuacaacagau

SEQ ID NO: 2524771 - RNA, 21 nt, Human
gaagcuacagguuacaacaga

SEQ ID NO: 2524772 - RNA, 15 nt, Human
gaagcuacugugugu

SEQ ID NO: 2524773 - RNA, 20 nt, Human
gaagcuacugugugugugaa

SEQ ID NO: 2524774 - RNA, 22 nt, Human
gaagcuacugugugugugaaug

SEQ ID NO: 2524775 - RNA, 23 nt, Human
gaagcuacugugugugugaauga

SEQ ID NO: 2524776 - RNA, 23 nt, Human
gaagcuacagguuacaacagauu

SEQ ID NO: 2524777 - RNA, 22 nt, Human
gaagcucagcccaccccccuca

SEQ ID NO: 2524778 - RNA, 21 nt, Human
gaagcucagcccaccccccuc

SEQ ID NO: 2524779 - RNA, 14 nt, Human
gaagcuaauuugca

SEQ ID NO: 2524780 - RNA, 15 nt, Human
gaagcuaauuugcau

SEQ ID NO: 2524781 - RNA, 16 nt, Human
gaagcuaauuugcauu

SEQ ID NO: 2524782 - RNA, 17 nt, Human
gaagcuaauuugcauua

SEQ ID NO: 2524783 - RNA, 19 nt, Human
gaagcuacagguuacaaca

SEQ ID NO: 2524784 - RNA, 15 nt, Human
gaagcuacagguuac

SEQ ID NO: 2524785 - RNA, 14 nt, Human
gaagcuacagguua

SEQ ID NO: 2524786 - RNA, 16 nt, Human
gaagugaggaagccag

SEQ ID NO: 2524787 - RNA, 18 nt, Human
gaagugagcuuugcugcu

SEQ ID NO: 2524788 - RNA, 16 nt, Human
gaagugagcacagccu

SEQ ID NO: 2524789 - RNA, 21 nt, Human
gaagugacuuuggcugcaugc

SEQ ID NO: 2524790 - RNA, 15 nt, Human
gaagugacuuuggcu

SEQ ID NO: 2524791 - RNA, 20 nt, Human
gaagugacuuuggcugcaug

SEQ ID NO: 2524792 - RNA, 13 nt, Human
gaagugacuuugg

SEQ ID NO: 2524793 - RNA, 14 nt, Human
gaagugaggcauug

SEQ ID NO: 2524794 - RNA, 18 nt, Human
gaagugcaaauuugauac

SEQ ID NO: 2524795 - RNA, 14 nt, Human
gaagugcauccaaa

SEQ ID NO: 2524796 - RNA, 13 nt, Human
gaagugccccugc

SEQ ID NO: 2524797 - RNA, 14 nt, Human
gaagugccccugcu

SEQ ID NO: 2524798 - RNA, 15 nt, Human
gaagugccccugcug

SEQ ID NO: 2524799 - RNA, 18 nt, Human
gaagugccccugcugccu

SEQ ID NO: 2524800 - RNA, 22 nt, Human
gaagugccccugcugccucccc

SEQ ID NO: 2524801 - RNA, 15 nt, Human
gaaguggggacagag

SEQ ID NO: 2524802 - RNA, 14 nt, Human
gaaguguaacagcu

SEQ ID NO: 2524803 - RNA, 15 nt, Human
gaaguguaacagcug

SEQ ID NO: 2524804 - RNA, 16 nt, Human
gaaguguaacagcuga

SEQ ID NO: 2524805 - RNA, 20 nt, Human
gaaguggacuggccccuggg

SEQ ID NO: 2524806 - RNA, 18 nt, Human
gaaguggacuggccccug

SEQ ID NO: 2524807 - RNA, 17 nt, Human
gaaguggacuggccccu

SEQ ID NO: 2524808 - RNA, 22 nt, Human
gaaguggaccaggacaggacca

SEQ ID NO: 2524809 - RNA, 16 nt, Human
gaagugggccaggaca

SEQ ID NO: 2524810 - RNA, 18 nt, Human
gaagugggccaggacagg

SEQ ID NO: 2524811 - RNA, 19 nt, Human
gaagugggccaggacaggc

SEQ ID NO: 2524812 - RNA, 21 nt, Human
gaagugggccaggacaggccc

SEQ ID NO: 2524813 - RNA, 20 nt, Human
gaagugcuggcaaccacuaa

SEQ ID NO: 2524814 - RNA, 23 nt, Human
gaagugccccugcugccucccca

SEQ ID NO: 2524815 - RNA, 21 nt, Human
gaagugcuuaguguacuugga

SEQ ID NO: 2524816 - RNA, 16 nt, Human
gaaguggaccaggaca

SEQ ID NO: 2524817 - RNA, 18 nt, Human
gaaguggaccaggacagg

SEQ ID NO: 2524818 - RNA, 20 nt, Human
gaagucuuuguacagacaac

SEQ ID NO: 2524819 - RNA, 19 nt, Human
gaagucuuuguacagacaa

SEQ ID NO: 2524820 - RNA, 18 nt, Human
gaagucuuuguacagaca

SEQ ID NO: 2524821 - RNA, 19 nt, Human
gaagggcagggcugaggcc

SEQ ID NO: 2524822 - RNA, 23 nt, Human
gaagggcaggaaggagagccugc

SEQ ID NO: 2524823 - RNA, 18 nt, Human
gaagggcaucaugcaucu

SEQ ID NO: 2524824 - RNA, 17 nt, Human
gaagugaaugcugggac

SEQ ID NO: 2524825 - RNA, 10 nt, Human
gaagggccag

SEQ ID NO: 2524826 - RNA, 18 nt, Human
gaagugacaaggccccag

SEQ ID NO: 2524827 - RNA, 21 nt, Human
gaagugacaaggccccagaga

SEQ ID NO: 2524828 - RNA, 23 nt, Human
gaagugacaaggccccagagacu

SEQ ID NO: 2524829 - RNA, 12 nt, Human
gaagugacaggg

SEQ ID NO: 2524830 - RNA, 24 nt, Human
gaagugacaaggccccagagacuc

SEQ ID NO: 2524831 - RNA, 18 nt, Human
gaagugacagggaagcua

SEQ ID NO: 2524832 - RNA, 15 nt, Human
gaagugacagggaag

SEQ ID NO: 2524833 - RNA, 14 nt, Human
gaagugacagggaa

SEQ ID NO: 2524834 - RNA, 13 nt, Human
gaagugacaggga

SEQ ID NO: 2524835 - RNA, 21 nt, Human
gaagugacagggaagcuacag

SEQ ID NO: 2524836 - RNA, 20 nt, Human
gaagugacagggaagcuaca

SEQ ID NO: 2524837 - RNA, 22 nt, Human
gaagugacagggaagcuacagg

SEQ ID NO: 2524838 - RNA, 14 nt, Human
gaagugaaacugcu

SEQ ID NO: 2524839 - RNA, 14 nt, Human
gaagucuuuuguuc

SEQ ID NO: 2524840 - RNA, 19 nt, Human
gaagggcauccuucugccu

SEQ ID NO: 2524841 - RNA, 20 nt, Human
gaagggauuuuagucacacg

SEQ ID NO: 2524842 - RNA, 16 nt, Human
gaagugaaugcuggga

SEQ ID NO: 2524843 - RNA, 15 nt, Human
gaagugaaugcuggg

SEQ ID NO: 2524844 - RNA, 14 nt, Human
gaagugaacauuuc

SEQ ID NO: 2524845 - RNA, 17 nt, Human
gaagcuggccgaggguc

SEQ ID NO: 2524846 - RNA, 23 nt, Human
gaagcuggccgaggguccuggcu

SEQ ID NO: 2524847 - RNA, 18 nt, Human
gaagcugcucuggaauuu

SEQ ID NO: 2524848 - RNA, 17 nt, Human
gaagcugcucuggaauu

SEQ ID NO: 2524849 - RNA, 13 nt, Human
gaagcugcuccgu

SEQ ID NO: 2524850 - RNA, 16 nt, Human
gaagcugcccugccca

SEQ ID NO: 2524851 - RNA, 13 nt, Human
gaagcugccugcu

SEQ ID NO: 2524852 - RNA, 14 nt, Human
gaagcugccugcuu

SEQ ID NO: 2524853 - RNA, 15 nt, Human
gaagcucccaggaac

SEQ ID NO: 2524854 - RNA, 14 nt, Human
gaagcucccaggaa

SEQ ID NO: 2524855 - RNA, 17 nt, Human
gaaggcucgagcaugcc

SEQ ID NO: 2524856 - RNA, 16 nt, Human
gaaggcucgagcaugc

SEQ ID NO: 2524857 - RNA, 22 nt, Human
gaagcuguguccuugcaccugc

SEQ ID NO: 2524858 - RNA, 12 nt, Human
gaagcugugucc

SEQ ID NO: 2524859 - RNA, 17 nt, Human
gaagcuguguccuugca

SEQ ID NO: 2524860 - RNA, 20 nt, Human
gaagcuguguccuugcaccu

SEQ ID NO: 2524861 - RNA, 21 nt, Human
gaagcugucauaaaaagacaa

SEQ ID NO: 2524862 - RNA, 23 nt, Human
gaagcuguaguagcccuuucugu

SEQ ID NO: 2524863 - RNA, 15 nt, Human
gaaggcuauggggau

SEQ ID NO: 2524864 - RNA, 17 nt, Human
gaagggaccuugaaggg

SEQ ID NO: 2524865 - RNA, 22 nt, Human
gaagggaccaaggcaaggcagg

SEQ ID NO: 2524866 - RNA, 21 nt, Human
gaagggaccaaggcaaggcag

SEQ ID NO: 2524867 - RNA, 20 nt, Human
gaagggaccaaggcaaggca

SEQ ID NO: 2524868 - RNA, 20 nt, Human
gaagggaccuugaaggguaa

SEQ ID NO: 2524869 - RNA, 18 nt, Human
gaagggaccuugaagggu

SEQ ID NO: 2524870 - RNA, 16 nt, Human
gaagggagaagaaagg

SEQ ID NO: 2524871 - RNA, 15 nt, Human
gaagggaccaaggca

SEQ ID NO: 2524872 - RNA, 21 nt, Human
gaagggagaaggaucuagaau

SEQ ID NO: 2524873 - RNA, 12 nt, Human
gaagggagaagg

SEQ ID NO: 2524874 - RNA, 21 nt, Human
gaagggacuaggagcacugua

SEQ ID NO: 2524875 - RNA, 16 nt, Human
gaagggagagccagcu

SEQ ID NO: 2524876 - RNA, 13 nt, Human
gaagggaggcugg

SEQ ID NO: 2524877 - RNA, 10 nt, Human
gaagggaggu

SEQ ID NO: 2524878 - RNA, 22 nt, Human
gaagggcaggaaggagagccug

SEQ ID NO: 2524879 - RNA, 14 nt, Human
gaagggaggugggg

SEQ ID NO: 2524880 - RNA, 17 nt, Human
gaagggauggauuccaa

SEQ ID NO: 2524881 - RNA, 14 nt, Human
gacauucaccugcc

SEQ ID NO: 2524882 - RNA, 18 nt, Human
gacauuaacaguuuucca

SEQ ID NO: 2524883 - RNA, 19 nt, Human
gacauuaacaguuuuccau

SEQ ID NO: 2524884 - RNA, 22 nt, Human
gacauuaacaguuuuccaugaa

SEQ ID NO: 2524885 - RNA, 23 nt, Human
gacauuaacaguuuuccaugaaa

SEQ ID NO: 2524886 - RNA, 15 nt, Human
gacauucaccugccc

SEQ ID NO: 2524887 - RNA, 16 nt, Human
gacauucaccugcccc

SEQ ID NO: 2524888 - RNA, 17 nt, Human
gacauucaccugcccca

SEQ ID NO: 2524889 - RNA, 19 nt, Human
gacagccuggcacagggca

SEQ ID NO: 2524890 - RNA, 13 nt, Human
gacagccuggcac

SEQ ID NO: 2524891 - RNA, 15 nt, Human
gacagacacacacac

SEQ ID NO: 2524892 - RNA, 13 nt, Human
gacagacacacac

SEQ ID NO: 2524893 - RNA, 11 nt, Human
gacagcuccuu

SEQ ID NO: 2524894 - RNA, 12 nt, Human
gacagcuccacc

SEQ ID NO: 2524895 - RNA, 11 nt, Human
gacagccugua

SEQ ID NO: 2524896 - RNA, 20 nt, Human
gacagccuguggcggugccu

SEQ ID NO: 2524897 - RNA, 22 nt, Human
gacagccuguggcggugccugg

SEQ ID NO: 2524898 - RNA, 23 nt, Human
gacagccuguggcggugccuggg

SEQ ID NO: 2524899 - RNA, 22 nt, Human
gacaggguuuugccauguuggc

SEQ ID NO: 2524900 - RNA, 20 nt, Human
gacaggguuuugccauguug

SEQ ID NO: 2524901 - RNA, 18 nt, Human
gacagcuccacccuggcc

SEQ ID NO: 2524902 - RNA, 16 nt, Human
gacagcucccucugcc

SEQ ID NO: 2524903 - RNA, 14 nt, Human
gacagguaaauuaa

SEQ ID NO: 2524904 - RNA, 23 nt, Human
gacaggguuuggcugugucuaaa

SEQ ID NO: 2524905 - RNA, 17 nt, Human
gacagcucccucugccu

SEQ ID NO: 2524906 - RNA, 18 nt, Human
gacagcucccucugccug

SEQ ID NO: 2524907 - RNA, 17 nt, Human
gacaggucccucaccca

SEQ ID NO: 2524908 - RNA, 16 nt, Human
gacaggugugccgaca

SEQ ID NO: 2524909 - RNA, 14 nt, Human
gacagugaaagaaa

SEQ ID NO: 2524910 - RNA, 23 nt, Human
gacagucuuuggguaccuauuuu

SEQ ID NO: 2524911 - RNA, 15 nt, Human
gacagucuugugcuu

SEQ ID NO: 2524912 - RNA, 23 nt, Human
gacauuaaaucuaugaaguauau

SEQ ID NO: 2524913 - RNA, 12 nt, Human
gacauuaacagu

SEQ ID NO: 2524914 - RNA, 18 nt, Human
gacauguuuuuguuuucu

SEQ ID NO: 2524915 - RNA, 14 nt, Human
gacauuaacaguuu

SEQ ID NO: 2524916 - RNA, 17 nt, Human
gacauuaacaguuuucc

SEQ ID NO: 2524917 - RNA, 13 nt, Human
gacagucucacuu

SEQ ID NO: 2524918 - RNA, 24 nt, Human
gacaguccucuccaccuaguggcu

SEQ ID NO: 2524919 - RNA, 13 nt, Human
gacagucuugugc

SEQ ID NO: 2524920 - RNA, 23 nt, Human
gacaguccugggagaaccucagg

SEQ ID NO: 2524921 - RNA, 15 nt, Human
gacaguccugggaga

SEQ ID NO: 2524922 - RNA, 18 nt, Human
gacaguccugggagaacc

SEQ ID NO: 2524923 - RNA, 17 nt, Human
gacagucaccucaugga

SEQ ID NO: 2524924 - RNA, 17 nt, Human
gacaguccucuccaccu

SEQ ID NO: 2524925 - RNA, 21 nt, Human
gacaggguuuggcugugucua

SEQ ID NO: 2524926 - RNA, 16 nt, Human
gacaguccucuccacc

SEQ ID NO: 2524927 - RNA, 16 nt, Human
gacagucaccccagga

SEQ ID NO: 2524928 - RNA, 14 nt, Human
gacagucaccccag

SEQ ID NO: 2524929 - RNA, 13 nt, Human
gacaguccuggga

SEQ ID NO: 2524930 - RNA, 14 nt, Human
gacaguccugggag

SEQ ID NO: 2524931 - RNA, 15 nt, Human
gacaguauuuguggg

SEQ ID NO: 2524932 - RNA, 22 nt, Human
gacagucaaggaguggcuuacu

SEQ ID NO: 2524933 - RNA, 19 nt, Human
gacagucaaggaguggcuu

SEQ ID NO: 2524934 - RNA, 17 nt, Human
gacagucaaggaguggc

SEQ ID NO: 2524935 - RNA, 16 nt, Human
gacagucaaggagugg

SEQ ID NO: 2524936 - RNA, 23 nt, Human
gacacugugcccagcccggaccu

SEQ ID NO: 2524937 - RNA, 16 nt, Human
gacacugugcccagcc

SEQ ID NO: 2524938 - RNA, 20 nt, Human
gacacugugcccagcccgga

SEQ ID NO: 2524939 - RNA, 16 nt, Human
gacacuuaaaaauggu

SEQ ID NO: 2524940 - RNA, 16 nt, Human
gacacugccacacagg

SEQ ID NO: 2524941 - RNA, 13 nt, Human
gacacuguacaag

SEQ ID NO: 2524942 - RNA, 12 nt, Human
gacacuguacaa

SEQ ID NO: 2524943 - RNA, 15 nt, Human
gacacugaugggcaa

SEQ ID NO: 2524944 - RNA, 13 nt, Human
gacacucugcucu

SEQ ID NO: 2524945 - RNA, 13 nt, Human
gacacugaugggc

SEQ ID NO: 2524946 - RNA, 15 nt, Human
gacacucuggcuggu

SEQ ID NO: 2524947 - RNA, 16 nt, Human
gacacucugcucugcc

SEQ ID NO: 2524948 - RNA, 15 nt, Human
gacacucugcucugc

SEQ ID NO: 2524949 - RNA, 17 nt, Human
gacacucugcucugccc

SEQ ID NO: 2524950 - RNA, 23 nt, Human
gacacugaaauauacacacagca

SEQ ID NO: 2524951 - RNA, 23 nt, Human
gacagcccgggcucugccuccca

SEQ ID NO: 2524952 - RNA, 22 nt, Human
gacagcccgggcucugccuccc

SEQ ID NO: 2524953 - RNA, 21 nt, Human
gacagcccgggcucugccucc

SEQ ID NO: 2524954 - RNA, 12 nt, Human
gacagacacagg

SEQ ID NO: 2524955 - RNA, 17 nt, Human
gacagaagcaggcugga

SEQ ID NO: 2524956 - RNA, 16 nt, Human
gacagaagcaggcugg

SEQ ID NO: 2524957 - RNA, 15 nt, Human
gacagaagcaggcug

SEQ ID NO: 2524958 - RNA, 13 nt, Human
gacagaagcaggc

SEQ ID NO: 2524959 - RNA, 20 nt, Human
gacacuuaauacuaccuuga

SEQ ID NO: 2524960 - RNA, 19 nt, Human
gacacuguuuacaagaaaa

SEQ ID NO: 2524961 - RNA, 22 nt, Human
gacacuguuuacaagaaaaaau

SEQ ID NO: 2524962 - RNA, 23 nt, Human
gacagacaacacugggaaacaga

SEQ ID NO: 2524963 - RNA, 12 nt, Human
gacacacaugaa

SEQ ID NO: 2524964 - RNA, 21 nt, Human
gacacacagcucuguccuggg

SEQ ID NO: 2524965 - RNA, 13 nt, Human
gacacacugaaga

SEQ ID NO: 2524966 - RNA, 16 nt, Human
gacaaacaccucccag

SEQ ID NO: 2524967 - RNA, 15 nt, Human
gacacacgcacacac

SEQ ID NO: 2524968 - RNA, 14 nt, Human
gacacacugaagaa

SEQ ID NO: 2524969 - RNA, 23 nt, Human
gaauuuuggcugugucucccuuc

SEQ ID NO: 2524970 - RNA, 20 nt, Human
gaauuuugugcccccaugua

SEQ ID NO: 2524971 - RNA, 21 nt, Human
gaauuuugugcccccauguaa

SEQ ID NO: 2524972 - RNA, 17 nt, Human
gaauuuucuguguuuug

SEQ ID NO: 2524973 - RNA, 22 nt, Human
gaauuuucuuuuuaauaaaaag

SEQ ID NO: 2524974 - RNA, 14 nt, Human
gaauuuuucucuaa

SEQ ID NO: 2524975 - RNA, 14 nt, Human
gaauuuuuauuauu

SEQ ID NO: 2524976 - RNA, 16 nt, Human
gacaaaaaguuuccau

SEQ ID NO: 2524977 - RNA, 16 nt, Human
gaauuuuucauugaua

SEQ ID NO: 2524978 - RNA, 21 nt, Human
gacaaaaaugaacugaaguuu

SEQ ID NO: 2524979 - RNA, 15 nt, Human
gaauuuuguugcugu

SEQ ID NO: 2524980 - RNA, 22 nt, Human
gaauuuuguuuggacuucuuuu

SEQ ID NO: 2524981 - RNA, 19 nt, Human
gacacacagcucuguccug

SEQ ID NO: 2524982 - RNA, 18 nt, Human
gacacacagcucuguccu

SEQ ID NO: 2524983 - RNA, 17 nt, Human
gacacacagcucugucc

SEQ ID NO: 2524984 - RNA, 15 nt, Human
gacacacagcucugu

SEQ ID NO: 2524985 - RNA, 15 nt, Human
gacaaaacuagagac

SEQ ID NO: 2524986 - RNA, 18 nt, Human
gacaaaaaguuuccauau

SEQ ID NO: 2524987 - RNA, 21 nt, Human
gacaaaaauucaacucagacu

SEQ ID NO: 2524988 - RNA, 14 nt, Human
gacacacagcucug

SEQ ID NO: 2524989 - RNA, 19 nt, Human
gaauuuuggcugugucucc

SEQ ID NO: 2524990 - RNA, 21 nt, Human
gaauuuucuuuguguagcuuu

SEQ ID NO: 2524991 - RNA, 23 nt, Human
gaauuuucuuuguguagcuuugc

SEQ ID NO: 2524992 - RNA, 14 nt, Human
gaauuuucccacug

SEQ ID NO: 2524993 - RNA, 13 nt, Human
gaauuuucugugu

SEQ ID NO: 2524994 - RNA, 14 nt, Human
gaauuuucagaccc

SEQ ID NO: 2524995 - RNA, 23 nt, Human
gaauuuucagaccccagcggcug

SEQ ID NO: 2524996 - RNA, 21 nt, Human
gaauuuuauuuuuugggaaaa

SEQ ID NO: 2524997 - RNA, 22 nt, Human
gaauuuucacaugaacauacug

SEQ ID NO: 2524998 - RNA, 12 nt, Human
gaauuuuaaaag

SEQ ID NO: 2524999 - RNA, 15 nt, Human
gaauuuuaaaagaug

SEQ ID NO: 2525000 - RNA, 21 nt, Human
gaauuuuaaaagaugcaaugu

SEQ ID NO: 2525001 - RNA, 23 nt, Human
gaauuuuaaaagaugcaauguag

SEQ ID NO: 2525002 - RNA, 23 nt, Human
gaauuuuacuguguuucuuuugg

SEQ ID NO: 2525003 - RNA, 15 nt, Human
gaauuuuaagugcuu

SEQ ID NO: 2525004 - RNA, 11 nt, Human
gaauuaguuuu

SEQ ID NO: 2525005 - RNA, 16 nt, Human
gaaugaggucccaggc

SEQ ID NO: 2525006 - RNA, 17 nt, Human
gaaugaggucccaggca

SEQ ID NO: 2525007 - RNA, 18 nt, Human
gaaugaggucccaggcag

SEQ ID NO: 2525008 - RNA, 19 nt, Human
gaaugaggucccaggcaga

SEQ ID NO: 2525009 - RNA, 23 nt, Human
gaaugaggaauaauaaguuaaac

SEQ ID NO: 2525010 - RNA, 13 nt, Human
gaaugaggaggaa

SEQ ID NO: 2525011 - RNA, 14 nt, Human
gaaugaggaggaag

SEQ ID NO: 2525012 - RNA, 17 nt, Human
gaaugaggcuugcugag

SEQ ID NO: 2525013 - RNA, 15 nt, Human
gaaugaggcuugcug

SEQ ID NO: 2525014 - RNA, 14 nt, Human
gaaugaggcuugcu

SEQ ID NO: 2525015 - RNA, 20 nt, Human
gaaugaggaggaaggagaga

SEQ ID NO: 2525016 - RNA, 18 nt, Human
gaaugaggcuugcugaga

SEQ ID NO: 2525017 - RNA, 14 nt, Human
gaaugaggucccag

SEQ ID NO: 2525018 - RNA, 15 nt, Human
gaaugaggucccagg

SEQ ID NO: 2525019 - RNA, 21 nt, Human
gaaugaggucccaggcagaga

SEQ ID NO: 2525020 - RNA, 22 nt, Human
gaaugaggucccaggcagagaa

SEQ ID NO: 2525021 - RNA, 18 nt, Human
gaauuaguccuugcuugg

SEQ ID NO: 2525022 - RNA, 14 nt, Human
gaaugaggugggag

SEQ ID NO: 2525023 - RNA, 13 nt, Human
gaauuuguuauca

SEQ ID NO: 2525024 - RNA, 15 nt, Human
gaauuuuaaaaauga

SEQ ID NO: 2525025 - RNA, 22 nt, Human
gaauuaucuauacauaucuuua

SEQ ID NO: 2525026 - RNA, 20 nt, Human
gaauuugugaagguggaaau

SEQ ID NO: 2525027 - RNA, 20 nt, Human
gaauuaucuugguugaaaau

SEQ ID NO: 2525028 - RNA, 16 nt, Human
ggagcaucagugcccu

SEQ ID NO: 2525029 - RNA, 13 nt, Human
ggagcagugucuu

SEQ ID NO: 2525030 - RNA, 17 nt, Human
ggagcagugucuuccau

SEQ ID NO: 2525031 - RNA, 22 nt, Human
ggagcauccaccuccuucucug

SEQ ID NO: 2525032 - RNA, 19 nt, Human
ggagcauccaccuccuucu

SEQ ID NO: 2525033 - RNA, 18 nt, Human
ggagcauccaccuccuuc

SEQ ID NO: 2525034 - RNA, 17 nt, Human
ggagcauccaccuccuu

SEQ ID NO: 2525035 - RNA, 18 nt, Human
ggagcauagaaggcaggu

SEQ ID NO: 2525036 - RNA, 18 nt, Human
ggagcagugucuuccaua

SEQ ID NO: 2525037 - RNA, 16 nt, Human
ggagcaucucuugagg

SEQ ID NO: 2525038 - RNA, 20 nt, Human
ggagcaucucuugaggccag

SEQ ID NO: 2525039 - RNA, 16 nt, Human
ggagcaucugacucac

SEQ ID NO: 2525040 - RNA, 14 nt, Human
ggagcaucugacuc

SEQ ID NO: 2525041 - RNA, 21 nt, Human
ggagcaucucuugaggccagg

SEQ ID NO: 2525042 - RNA, 16 nt, Human
ggagcaugggccuggc

SEQ ID NO: 2525043 - RNA, 17 nt, Human
ggagcauggcugugagg

SEQ ID NO: 2525044 - RNA, 15 nt, Human
ggagcauggcuguga

SEQ ID NO: 2525045 - RNA, 19 nt, Human
ggagcauuggcugagagac

SEQ ID NO: 2525046 - RNA, 14 nt, Human
ggagcaugggccug

SEQ ID NO: 2525047 - RNA, 20 nt, Human
ggagguggaagaagggagaa

SEQ ID NO: 2525048 - RNA, 20 nt, Human
ggagguggagguugcaguga

SEQ ID NO: 2525049 - RNA, 17 nt, Human
ggagguggaagaaggga

SEQ ID NO: 2525050 - RNA, 22 nt, Human
ggaggugcuuaagcagaagcau

SEQ ID NO: 2525051 - RNA, 19 nt, Human
ggaggugccagcaaagccc

SEQ ID NO: 2525052 - RNA, 14 nt, Human
ggaggugccagcaa

SEQ ID NO: 2525053 - RNA, 20 nt, Human
ggagguggaggcugcaguga

SEQ ID NO: 2525054 - RNA, 19 nt, Human
ggagguggagguugcagug

SEQ ID NO: 2525055 - RNA, 13 nt, Human
ggaggugagggau

SEQ ID NO: 2525056 - RNA, 13 nt, Human
ggaggugccagca

SEQ ID NO: 2525057 - RNA, 14 nt, Human
ggaggugaccccag

SEQ ID NO: 2525058 - RNA, 18 nt, Human
ggaggucgguagguucag

SEQ ID NO: 2525059 - RNA, 17 nt, Human
ggaggucguguauuugg

SEQ ID NO: 2525060 - RNA, 17 nt, Human
ggaggucacuggaaagg

SEQ ID NO: 2525061 - RNA, 22 nt, Human
ggaggucgaccccaaagccccu

SEQ ID NO: 2525062 - RNA, 20 nt, Human
ggaggucaaggcugcaguga

SEQ ID NO: 2525063 - RNA, 21 nt, Human
ggaggucacuggaaaggggag

SEQ ID NO: 2525064 - RNA, 13 nt, Human
ggaggucacugga

SEQ ID NO: 2525065 - RNA, 23 nt, Human
ggaggucacauucaggaagauga

SEQ ID NO: 2525066 - RNA, 20 nt, Human
ggaggucacauucaggaaga

SEQ ID NO: 2525067 - RNA, 19 nt, Human
ggaggucacauucaggaag

SEQ ID NO: 2525068 - RNA, 20 nt, Human
ggagguagagguugugguga

SEQ ID NO: 2525069 - RNA, 22 nt, Human
ggagguauucguaaggauggga

SEQ ID NO: 2525070 - RNA, 23 nt, Human
ggaggguaaaugauguggugccu

SEQ ID NO: 2525071 - RNA, 22 nt, Human
ggagggguugccacaggccucc

SEQ ID NO: 2525072 - RNA, 21 nt, Human
ggagggguugccacaggccuc

SEQ ID NO: 2525073 - RNA, 19 nt, Human
ggagggguugccacaggcc

SEQ ID NO: 2525074 - RNA, 18 nt, Human
ggagggguugccacaggc

SEQ ID NO: 2525075 - RNA, 17 nt, Human
ggagggguugccacagg

SEQ ID NO: 2525076 - RNA, 21 nt, Human
ggagguagcuuugagguggaa

SEQ ID NO: 2525077 - RNA, 22 nt, Human
ggaggggguuugcuggggaacu

SEQ ID NO: 2525078 - RNA, 23 nt, Human
ggagggguaacuugcaccucuga

SEQ ID NO: 2525079 - RNA, 23 nt, Human
ggaggggguuugcuggggaacug

SEQ ID NO: 2525080 - RNA, 18 nt, Human
ggaggggguuugggggcu

SEQ ID NO: 2525081 - RNA, 16 nt, Human
ggagggguugccacag

SEQ ID NO: 2525082 - RNA, 14 nt, Human
ggagggguugccac

SEQ ID NO: 2525083 - RNA, 15 nt, Human
ggagggguguggcuc

SEQ ID NO: 2525084 - RNA, 17 nt, Human
ggagggguguggcagug

SEQ ID NO: 2525085 - RNA, 17 nt, Human
ggaggggugguccugac

SEQ ID NO: 2525086 - RNA, 23 nt, Human
ggaggccccuggcccagcggccc

SEQ ID NO: 2525087 - RNA, 22 nt, Human
ggaggccccuggcccagcggcc

SEQ ID NO: 2525088 - RNA, 19 nt, Human
ggaggccccuggcccagcg

SEQ ID NO: 2525089 - RNA, 18 nt, Human
ggaggccccuggcccagc

SEQ ID NO: 2525090 - RNA, 17 nt, Human
ggaggcccguccggcag

SEQ ID NO: 2525091 - RNA, 18 nt, Human
ggaggccgggugcucagg

SEQ ID NO: 2525092 - RNA, 16 nt, Human
ggaggggggagguggg

SEQ ID NO: 2525093 - RNA, 22 nt, Human
ggaggcgcacuuuccuccuggc

SEQ ID NO: 2525094 - RNA, 18 nt, Human
ggaggccugggggcaggg

SEQ ID NO: 2525095 - RNA, 14 nt, Human
ggaggccugggggc

SEQ ID NO: 2525096 - RNA, 20 nt, Human
ggaggaccagggcagggcca

SEQ ID NO: 2525097 - RNA, 19 nt, Human
ggaggacaauucaugaacu

SEQ ID NO: 2525098 - RNA, 18 nt, Human
ggaggccaagugcaggcu

SEQ ID NO: 2525099 - RNA, 20 nt, Human
ggaggccaaggugggaggau

SEQ ID NO: 2525100 - RNA, 14 nt, Human
ggaggaaggcaaga

SEQ ID NO: 2525101 - RNA, 19 nt, Human
ggaggaaucgaggaaccag

SEQ ID NO: 2525102 - RNA, 20 nt, Human
ggaggaaucgaggaaccaga

SEQ ID NO: 2525103 - RNA, 21 nt, Human
ggaggaaucgaggaaccagag

SEQ ID NO: 2525104 - RNA, 22 nt, Human
ggaggaaucgaggaaccagagc

SEQ ID NO: 2525105 - RNA, 23 nt, Human
ggaggaaucgaggaaccagagcc

SEQ ID NO: 2525106 - RNA, 15 nt, Human
ggaggaaugcucccc

SEQ ID NO: 2525107 - RNA, 16 nt, Human
ggaggaaugcuccccc

SEQ ID NO: 2525108 - RNA, 18 nt, Human
ggaggaaugcucccccau

SEQ ID NO: 2525109 - RNA, 14 nt, Human
ggaggacaauucau

SEQ ID NO: 2525110 - RNA, 13 nt, Human
ggaggacaauuca

SEQ ID NO: 2525111 - RNA, 17 nt, Human
ggaggaaugcuccccca

SEQ ID NO: 2525112 - RNA, 12 nt, Human
ggaggccagccu

SEQ ID NO: 2525113 - RNA, 21 nt, Human
ggaggccaccucuccaagggc

SEQ ID NO: 2525114 - RNA, 12 nt, Human
ggaggccagcca

SEQ ID NO: 2525115 - RNA, 13 nt, Human
ggaggccagccag

SEQ ID NO: 2525116 - RNA, 17 nt, Human
ggaggccccacugggga

SEQ ID NO: 2525117 - RNA, 17 nt, Human
ggaggccccuggcccag

SEQ ID NO: 2525118 - RNA, 16 nt, Human
ggaggccccuggccca

SEQ ID NO: 2525119 - RNA, 16 nt, Human
ggaggccagccaguga

SEQ ID NO: 2525120 - RNA, 11 nt, Human
ggaggccagcc

SEQ ID NO: 2525121 - RNA, 19 nt, Human
ggaggccaccucuccaagg

SEQ ID NO: 2525122 - RNA, 18 nt, Human
ggaggccaccucuccaag

SEQ ID NO: 2525123 - RNA, 14 nt, Human
ggaggccaccucuc

SEQ ID NO: 2525124 - RNA, 12 nt, Human
ggaggccaccuc

SEQ ID NO: 2525125 - RNA, 20 nt, Human
ggaggccaagugcaggcugg

SEQ ID NO: 2525126 - RNA, 18 nt, Human
ggagcuguaaaccagaga

SEQ ID NO: 2525127 - RNA, 18 nt, Human
ggagcugguuagaaaugc

SEQ ID NO: 2525128 - RNA, 23 nt, Human
ggagcugguuagaaaugcagaau

SEQ ID NO: 2525129 - RNA, 19 nt, Human
ggaggaaggaaacccagcu

SEQ ID NO: 2525130 - RNA, 21 nt, Human
ggagcugggacacuuaacaga

SEQ ID NO: 2525131 - RNA, 14 nt, Human
ggagcugggaggaa

SEQ ID NO: 2525132 - RNA, 15 nt, Human
ggagcugggaggaaa

SEQ ID NO: 2525133 - RNA, 21 nt, Human
ggagcuggccgugggccuggg

SEQ ID NO: 2525134 - RNA, 17 nt, Human
ggagcuggcgucugucu

SEQ ID NO: 2525135 - RNA, 17 nt, Human
ggagcuggggaucccuc

SEQ ID NO: 2525136 - RNA, 19 nt, Human
ggagcugggcagaaggcca

SEQ ID NO: 2525137 - RNA, 18 nt, Human
ggagcugggcagaaggcc

SEQ ID NO: 2525138 - RNA, 23 nt, Human
ggaggaaggaaacccagcucugg

SEQ ID NO: 2525139 - RNA, 20 nt, Human
ggaggaaggaaacccagcuc

SEQ ID NO: 2525140 - RNA, 11 nt, Human
ggaggaaggau

SEQ ID NO: 2525141 - RNA, 20 nt, Human
ggagcuucauggcagaaggc

SEQ ID NO: 2525142 - RNA, 21 nt, Human
ggagcuuagccaaugugggag

SEQ ID NO: 2525143 - RNA, 13 nt, Human
ggaggaaggcaag

SEQ ID NO: 2525144 - RNA, 13 nt, Human
ggaggaaggauug

SEQ ID NO: 2525145 - RNA, 13 nt, Human
ggaggaaggagag

SEQ ID NO: 2525146 - RNA, 21 nt, Human
ggaggaaggcuuacacccaca

SEQ ID NO: 2525147 - RNA, 18 nt, Human
ggagcccacuguccuggg

SEQ ID NO: 2525148 - RNA, 20 nt, Human
ggagcccacuguccugggcc

SEQ ID NO: 2525149 - RNA, 22 nt, Human
ggagcccacuguccugggccug

SEQ ID NO: 2525150 - RNA, 23 nt, Human
ggagcccacuguccugggccugc

SEQ ID NO: 2525151 - RNA, 14 nt, Human
ggagcccacugucc

SEQ ID NO: 2525152 - RNA, 17 nt, Human
ggagcccacuguccugg

SEQ ID NO: 2525153 - RNA, 12 nt, Human
ggagccagcucu

SEQ ID NO: 2525154 - RNA, 22 nt, Human
ggagcccacuguacuugcucuu

SEQ ID NO: 2525155 - RNA, 16 nt, Human
ggagcccagcccuccc

SEQ ID NO: 2525156 - RNA, 19 nt, Human
ggagcccagcccuccccau

SEQ ID NO: 2525157 - RNA, 16 nt, Human
ggagcccagcucugaa

SEQ ID NO: 2525158 - RNA, 22 nt, Human
ggagcccaggcgggagcggugg

SEQ ID NO: 2525159 - RNA, 19 nt, Human
ggagcccaggcgggagcgg

SEQ ID NO: 2525160 - RNA, 16 nt, Human
ggagccaauggagacu

SEQ ID NO: 2525161 - RNA, 17 nt, Human
ggagccaaguccagauu

SEQ ID NO: 2525162 - RNA, 23 nt, Human
ggagccaaggguucagagacuca

SEQ ID NO: 2525163 - RNA, 19 nt, Human
ggagcauuuggagagaagg

SEQ ID NO: 2525164 - RNA, 15 nt, Human
ggagcauuuggagag

SEQ ID NO: 2525165 - RNA, 20 nt, Human
ggagccaacagaagcuucca

SEQ ID NO: 2525166 - RNA, 17 nt, Human
ggagccaacugcugcuu

SEQ ID NO: 2525167 - RNA, 16 nt, Human
ggagccaacugcugcu

SEQ ID NO: 2525168 - RNA, 15 nt, Human
ggagccaacugcugc

SEQ ID NO: 2525169 - RNA, 19 nt, Human
ggagccacuccucugacuc

SEQ ID NO: 2525170 - RNA, 21 nt, Human
ggagccacuccucugacucag

SEQ ID NO: 2525171 - RNA, 21 nt, Human
ggagccagcucccucuauuua

SEQ ID NO: 2525172 - RNA, 16 nt, Human
ggagccacuccucuga

SEQ ID NO: 2525173 - RNA, 18 nt, Human
ggagccacuaacuagagc

SEQ ID NO: 2525174 - RNA, 22 nt, Human
ggagccccgaggccuucucuga

SEQ ID NO: 2525175 - RNA, 21 nt, Human
ggagccccuggguggguggug

SEQ ID NO: 2525176 - RNA, 16 nt, Human
ggagccccuggguggg

SEQ ID NO: 2525177 - RNA, 15 nt, Human
ggagccccugggugg

SEQ ID NO: 2525178 - RNA, 14 nt, Human
ggagccccugggug

SEQ ID NO: 2525179 - RNA, 13 nt, Human
ggagcccccgccc

SEQ ID NO: 2525180 - RNA, 13 nt, Human
ggagccccugggu

SEQ ID NO: 2525181 - RNA, 20 nt, Human
ggagcccccgccccgcccca

SEQ ID NO: 2525182 - RNA, 16 nt, Human
ggagccccgaggccuu

SEQ ID NO: 2525183 - RNA, 12 nt, Human
ggagcugccugu

SEQ ID NO: 2525184 - RNA, 13 nt, Human
ggagcugcccaga

SEQ ID NO: 2525185 - RNA, 21 nt, Human
ggagcugccuguucagcucca

SEQ ID NO: 2525186 - RNA, 18 nt, Human
ggagcuggccccgccgcc

SEQ ID NO: 2525187 - RNA, 20 nt, Human
ggagcuggccccgccgccug

SEQ ID NO: 2525188 - RNA, 15 nt, Human
ggagugcagugagcc

SEQ ID NO: 2525189 - RNA, 15 nt, Human
ggaguucugguuccu

SEQ ID NO: 2525190 - RNA, 20 nt, Human
ggaguucgagaccagccugg

SEQ ID NO: 2525191 - RNA, 15 nt, Human
ggaguucgaggcugc

SEQ ID NO: 2525192 - RNA, 20 nt, Human
ggaguucgaggcugcaguca

SEQ ID NO: 2525193 - RNA, 21 nt, Human
ggaguucgaggcugcagucag

SEQ ID NO: 2525194 - RNA, 14 nt, Human
ggaguugaucugga

SEQ ID NO: 2525195 - RNA, 17 nt, Human
ggaguugaucuggaacc

SEQ ID NO: 2525196 - RNA, 21 nt, Human
ggaguugaucuggaacccaga

SEQ ID NO: 2525197 - RNA, 22 nt, Human
ggaguugaucuggaacccagac

SEQ ID NO: 2525198 - RNA, 20 nt, Human
ggaguugaucgccuuuccca

SEQ ID NO: 2525199 - RNA, 23 nt, Human
ggaguugaucgccuuucccaggu

SEQ ID NO: 2525200 - RNA, 16 nt, Human
ggaguucuaugcucuc

SEQ ID NO: 2525201 - RNA, 23 nt, Human
ggaguggaauaguauccuccagg

SEQ ID NO: 2525202 - RNA, 22 nt, Human
ggaguggaauaguauccuccag

SEQ ID NO: 2525203 - RNA, 13 nt, Human
ggaguggagugga

SEQ ID NO: 2525204 - RNA, 18 nt, Human
ggaguucgagaccagccu

SEQ ID NO: 2525205 - RNA, 14 nt, Human
ggaguggccacaga

SEQ ID NO: 2525206 - RNA, 12 nt, Human
ggagugcagugg

SEQ ID NO: 2525207 - RNA, 20 nt, Human
ggaguggaauaguauccucc

SEQ ID NO: 2525208 - RNA, 19 nt, Human
ggaguggaagaagagggag

SEQ ID NO: 2525209 - RNA, 16 nt, Human
ggaguuucuuuccugc

SEQ ID NO: 2525210 - RNA, 13 nt, Human
ggaguuugaggcu

SEQ ID NO: 2525211 - RNA, 21 nt, Human
ggaguuggaagugugugaucu

SEQ ID NO: 2525212 - RNA, 22 nt, Human
ggaguugucaagucucugcugg

SEQ ID NO: 2525213 - RNA, 19 nt, Human
ggaguuugaggcugcagcg

SEQ ID NO: 2525214 - RNA, 20 nt, Human
ggaguuugaggcugcagcga

SEQ ID NO: 2525215 - RNA, 18 nt, Human
ggaguuucuuuccugccu

SEQ ID NO: 2525216 - RNA, 15 nt, Human
ggauaaaaagauguu

SEQ ID NO: 2525217 - RNA, 20 nt, Human
ggaguuuuuguuuggagagc

SEQ ID NO: 2525218 - RNA, 14 nt, Human
ggauaaaaugaggu

SEQ ID NO: 2525219 - RNA, 15 nt, Human
ggauaaagccacuga

SEQ ID NO: 2525220 - RNA, 15 nt, Human
ggauaaaaugagguu

SEQ ID NO: 2525221 - RNA, 14 nt, Human
ggauaaccuauaug

SEQ ID NO: 2525222 - RNA, 21 nt, Human
ggauaagguaccuuucacaua

SEQ ID NO: 2525223 - RNA, 20 nt, Human
ggauaaugcuguugccucau

SEQ ID NO: 2525224 - RNA, 14 nt, Human
ggauccugagccag

SEQ ID NO: 2525225 - RNA, 13 nt, Human
ggauccugagcca

SEQ ID NO: 2525226 - RNA, 14 nt, Human
ggauccuccaggug

SEQ ID NO: 2525227 - RNA, 15 nt, Human
ggauccuccaggugc

SEQ ID NO: 2525228 - RNA, 15 nt, Human
ggaucugugcccaga

SEQ ID NO: 2525229 - RNA, 16 nt, Human
ggaucugugcccagag

SEQ ID NO: 2525230 - RNA, 15 nt, Human
ggaucuucaauggcu

SEQ ID NO: 2525231 - RNA, 23 nt, Human
ggaucuguuguguacguggagag

SEQ ID NO: 2525232 - RNA, 16 nt, Human
ggaucuguccaaggaa

SEQ ID NO: 2525233 - RNA, 15 nt, Human
ggaucuguccaagga

SEQ ID NO: 2525234 - RNA, 19 nt, Human
ggaucugucacaccagcca

SEQ ID NO: 2525235 - RNA, 23 nt, Human
ggaucugggacccuuuccuuccu

SEQ ID NO: 2525236 - RNA, 17 nt, Human
ggaucugguccuaccca

SEQ ID NO: 2525237 - RNA, 21 nt, Human
ggaucugguagggggaaaaug

SEQ ID NO: 2525238 - RNA, 18 nt, Human
ggaucuggggcucuggga

SEQ ID NO: 2525239 - RNA, 17 nt, Human
ggaucuggagaaccuca

SEQ ID NO: 2525240 - RNA, 19 nt, Human
ggaucugggacccuuuccu

SEQ ID NO: 2525241 - RNA, 20 nt, Human
ggaucugccccucccugcuu

SEQ ID NO: 2525242 - RNA, 17 nt, Human
ggaucugccccucccug

SEQ ID NO: 2525243 - RNA, 15 nt, Human
ggaucugccccuccc

SEQ ID NO: 2525244 - RNA, 14 nt, Human
ggaucugccccucc

SEQ ID NO: 2525245 - RNA, 15 nt, Human
ggaucugagaaucuu

SEQ ID NO: 2525246 - RNA, 22 nt, Human
ggauggcccuucccacuggagg

SEQ ID NO: 2525247 - RNA, 16 nt, Human
ggauggccccagcaca

SEQ ID NO: 2525248 - RNA, 16 nt, Human
ggauggccuggccagg

SEQ ID NO: 2525249 - RNA, 21 nt, Human
ggauggccuggccagggccug

SEQ ID NO: 2525250 - RNA, 23 nt, Human
ggauggcggguggggguggaaua

SEQ ID NO: 2525251 - RNA, 18 nt, Human
ggauggcgggugggggug

SEQ ID NO: 2525252 - RNA, 16 nt, Human
ggauggcggguggggg

SEQ ID NO: 2525253 - RNA, 15 nt, Human
ggauggcgggugggg

SEQ ID NO: 2525254 - RNA, 12 nt, Human
ggaugggaagga

SEQ ID NO: 2525255 - RNA, 15 nt, Human
ggaugggaaggaggg

SEQ ID NO: 2525256 - RNA, 15 nt, Human
ggaugggagugagac

SEQ ID NO: 2525257 - RNA, 17 nt, Human
ggaugggaaggagggag

SEQ ID NO: 2525258 - RNA, 16 nt, Human
ggauggggcugcaccg

SEQ ID NO: 2525259 - RNA, 21 nt, Human
ggauguacaaggacagccccu

SEQ ID NO: 2525260 - RNA, 14 nt, Human
ggaugggccaccgc

SEQ ID NO: 2525261 - RNA, 16 nt, Human
ggaugggcugcagcag

SEQ ID NO: 2525262 - RNA, 12 nt, Human
ggauggcaagau

SEQ ID NO: 2525263 - RNA, 18 nt, Human
ggauggauuuccagccaa

SEQ ID NO: 2525264 - RNA, 22 nt, Human
ggauggccagugucugucccgg

SEQ ID NO: 2525265 - RNA, 15 nt, Human
ggauggccagugucu

SEQ ID NO: 2525266 - RNA, 14 nt, Human
ggauggccaguguc

SEQ ID NO: 2525267 - RNA, 15 nt, Human
ggauggcaccagagg

SEQ ID NO: 2525268 - RNA, 14 nt, Human
ggauggccccagca

SEQ ID NO: 2525269 - RNA, 13 nt, Human
ggauggccccagc

SEQ ID NO: 2525270 - RNA, 14 nt, Human
ggauggaggagaag

SEQ ID NO: 2525271 - RNA, 19 nt, Human
ggauggaggggugguccug

SEQ ID NO: 2525272 - RNA, 21 nt, Human
ggauggaggggugguccugac

SEQ ID NO: 2525273 - RNA, 13 nt, Human
ggauggccagugu

SEQ ID NO: 2525274 - RNA, 24 nt, Human
ggcacagaaaauggaagacagcuc

SEQ ID NO: 2525275 - RNA, 13 nt, Human
ggcacacaccugu

SEQ ID NO: 2525276 - RNA, 20 nt, Human
ggcacaauggcuaauuccca

SEQ ID NO: 2525277 - RNA, 21 nt, Human
ggcacagaaacacaauauuuu

SEQ ID NO: 2525278 - RNA, 22 nt, Human
ggcacaaucucggcucacugca

SEQ ID NO: 2525279 - RNA, 22 nt, Human
ggcacaauggcuaauucccaga

SEQ ID NO: 2525280 - RNA, 22 nt, Human
ggcacaagcaaaagggugucug

SEQ ID NO: 2525281 - RNA, 14 nt, Human
ggcaauuuuguaac

SEQ ID NO: 2525282 - RNA, 13 nt, Human
ggcacagccuucu

SEQ ID NO: 2525283 - RNA, 18 nt, Human
ggcacagcggggccccag

SEQ ID NO: 2525284 - RNA, 20 nt, Human
ggcacagcaacucuaagacu

SEQ ID NO: 2525285 - RNA, 16 nt, Human
ggcacagaaaccucua

SEQ ID NO: 2525286 - RNA, 13 nt, Human
ggcaccagacacc

SEQ ID NO: 2525287 - RNA, 16 nt, Human
ggcaccagacacccag

SEQ ID NO: 2525288 - RNA, 16 nt, Human
ggcacagggcaguggg

SEQ ID NO: 2525289 - RNA, 14 nt, Human
ggcacaggcccccu

SEQ ID NO: 2525290 - RNA, 15 nt, Human
ggcacaggcccccuu

SEQ ID NO: 2525291 - RNA, 20 nt, Human
ggaugucugccaauuuuugc

SEQ ID NO: 2525292 - RNA, 13 nt, Human
ggauguucuggga

SEQ ID NO: 2525293 - RNA, 22 nt, Human
ggauguugaaaaaguucugcag

SEQ ID NO: 2525294 - RNA, 16 nt, Human
ggauguucugggacac

SEQ ID NO: 2525295 - RNA, 14 nt, Human
ggaugucugccaau

SEQ ID NO: 2525296 - RNA, 13 nt, Human
ggaugucugggcc

SEQ ID NO: 2525297 - RNA, 15 nt, Human
ggauguucugggaca

SEQ ID NO: 2525298 - RNA, 16 nt, Human
ggauguacauuuccaa

SEQ ID NO: 2525299 - RNA, 21 nt, Human
ggauguaaacagugccugcug

SEQ ID NO: 2525300 - RNA, 18 nt, Human
ggauguauaugucaucuc

SEQ ID NO: 2525301 - RNA, 22 nt, Human
ggauguauccaugggggcaggg

SEQ ID NO: 2525302 - RNA, 23 nt, Human
ggauguauccaugggggcagggc

SEQ ID NO: 2525303 - RNA, 18 nt, Human
ggauguccacagaugccu

SEQ ID NO: 2525304 - RNA, 18 nt, Human
ggaugucacucagaugga

SEQ ID NO: 2525305 - RNA, 17 nt, Human
ggauguccacagaugcc

SEQ ID NO: 2525306 - RNA, 15 nt, Human
ggaugucacagggcc

SEQ ID NO: 2525307 - RNA, 16 nt, Human
ggaugucacagggcca

SEQ ID NO: 2525308 - RNA, 13 nt, Human
ggaugucaccaau

SEQ ID NO: 2525309 - RNA, 19 nt, Human
ggccgcuccagggguggcu

SEQ ID NO: 2525310 - RNA, 16 nt, Human
ggccgcuccaggggug

SEQ ID NO: 2525311 - RNA, 13 nt, Human
ggccgcuccaggg

SEQ ID NO: 2525312 - RNA, 12 nt, Human
ggccgcccccug

SEQ ID NO: 2525313 - RNA, 17 nt, Human
ggccgcugaguggcagg

SEQ ID NO: 2525314 - RNA, 12 nt, Human
ggccgcugccac

SEQ ID NO: 2525315 - RNA, 13 nt, Human
ggccgcugccacc

SEQ ID NO: 2525316 - RNA, 15 nt, Human
ggccgcugccaccca

SEQ ID NO: 2525317 - RNA, 19 nt, Human
ggccgcugccacccaccuc

SEQ ID NO: 2525318 - RNA, 21 nt, Human
ggccgcugccacccaccuccc

SEQ ID NO: 2525319 - RNA, 18 nt, Human
ggccgcagcucuugcccu

SEQ ID NO: 2525320 - RNA, 19 nt, Human
ggccgaucggggcacugca

SEQ ID NO: 2525321 - RNA, 14 nt, Human
ggccgagugagagc

SEQ ID NO: 2525322 - RNA, 23 nt, Human
ggccgcagcucuugcccuucccu

SEQ ID NO: 2525323 - RNA, 22 nt, Human
ggccgcagcucuugcccuuccc

SEQ ID NO: 2525324 - RNA, 21 nt, Human
ggccgcagcucuugcccuucc

SEQ ID NO: 2525325 - RNA, 20 nt, Human
ggccgcagcucuugcccuuc

SEQ ID NO: 2525326 - RNA, 15 nt, Human
ggccgcauucccuga

SEQ ID NO: 2525327 - RNA, 16 nt, Human
ggccgcauucccugag

SEQ ID NO: 2525328 - RNA, 17 nt, Human
ggccgcauucccugagu

SEQ ID NO: 2525329 - RNA, 18 nt, Human
ggccgccccagccucuga

SEQ ID NO: 2525330 - RNA, 18 nt, Human
ggcccuucucuccagccc

SEQ ID NO: 2525331 - RNA, 17 nt, Human
ggcccuuccucuccacu

SEQ ID NO: 2525332 - RNA, 13 nt, Human
ggccgaguccaag

SEQ ID NO: 2525333 - RNA, 16 nt, Human
ggccgaguccaagcug

SEQ ID NO: 2525334 - RNA, 16 nt, Human
ggccgaggguccuggc

SEQ ID NO: 2525335 - RNA, 18 nt, Human
ggccgaggguccuggcuc

SEQ ID NO: 2525336 - RNA, 16 nt, Human
ggccgacggagccggg

SEQ ID NO: 2525337 - RNA, 14 nt, Human
ggccgacggagccg

SEQ ID NO: 2525338 - RNA, 21 nt, Human
ggcccuucacugccuuugcuc

SEQ ID NO: 2525339 - RNA, 15 nt, Human
ggccgagaagcaaga

SEQ ID NO: 2525340 - RNA, 12 nt, Human
ggccgagaagca

SEQ ID NO: 2525341 - RNA, 17 nt, Human
ggcccuucucuccagcc

SEQ ID NO: 2525342 - RNA, 16 nt, Human
ggcccuucucuccagc

SEQ ID NO: 2525343 - RNA, 14 nt, Human
ggcccuuccuuuuc

SEQ ID NO: 2525344 - RNA, 15 nt, Human
ggcccuuccucucca

SEQ ID NO: 2525345 - RNA, 13 nt, Human
ggcccuuccucuc

SEQ ID NO: 2525346 - RNA, 19 nt, Human
ggcccuucccacaggacau

SEQ ID NO: 2525347 - RNA, 20 nt, Human
ggcccuucacugccuuugcu

SEQ ID NO: 2525348 - RNA, 17 nt, Human
ggcccugugccuuggug

SEQ ID NO: 2525349 - RNA, 18 nt, Human
ggccccuuuucacucccu

SEQ ID NO: 2525350 - RNA, 16 nt, Human
ggccccuuuucacucc

SEQ ID NO: 2525351 - RNA, 20 nt, Human
ggccccuuuucacucccucc

SEQ ID NO: 2525352 - RNA, 19 nt, Human
ggccccuuuuuacuccccu

SEQ ID NO: 2525353 - RNA, 23 nt, Human
ggccccugggucagucugguggg

SEQ ID NO: 2525354 - RNA, 23 nt, Human
ggccccugggcuuggccugcugu

SEQ ID NO: 2525355 - RNA, 22 nt, Human
ggccccugggcuuggccugcug

SEQ ID NO: 2525356 - RNA, 21 nt, Human
ggccccugggcuuggccugcu

SEQ ID NO: 2525357 - RNA, 20 nt, Human
ggccccugggcuuggccugc

SEQ ID NO: 2525358 - RNA, 20 nt, Human
ggccccuggcccagcggccc

SEQ ID NO: 2525359 - RNA, 18 nt, Human
ggccccuggcccagcggc

SEQ ID NO: 2525360 - RNA, 17 nt, Human
ggccccuggcccagcgg

SEQ ID NO: 2525361 - RNA, 20 nt, Human
ggccccuugacucuggggac

SEQ ID NO: 2525362 - RNA, 21 nt, Human
ggccccuucacuucugaccac

SEQ ID NO: 2525363 - RNA, 13 nt, Human
ggccccugugagu

SEQ ID NO: 2525364 - RNA, 20 nt, Human
ggccccuucacuucugacca

SEQ ID NO: 2525365 - RNA, 22 nt, Human
ggccccuucacuucugaccaca

SEQ ID NO: 2525366 - RNA, 16 nt, Human
ggcccagggcccagag

SEQ ID NO: 2525367 - RNA, 18 nt, Human
ggcccaggaccagcuggg

SEQ ID NO: 2525368 - RNA, 15 nt, Human
ggcccagggcccaga

SEQ ID NO: 2525369 - RNA, 17 nt, Human
ggcccagggcccagagc

SEQ ID NO: 2525370 - RNA, 18 nt, Human
ggcccagggcccagagcc

SEQ ID NO: 2525371 - RNA, 17 nt, Human
ggcccaggaccagcugg

SEQ ID NO: 2525372 - RNA, 16 nt, Human
ggcccaggaccagcug

SEQ ID NO: 2525373 - RNA, 15 nt, Human
ggcccaggaccagcu

SEQ ID NO: 2525374 - RNA, 21 nt, Human
ggcccagcugggcucugccac

SEQ ID NO: 2525375 - RNA, 22 nt, Human
ggcccaggaccaucauccuacu

SEQ ID NO: 2525376 - RNA, 17 nt, Human
ggcccagcugggcucug

SEQ ID NO: 2525377 - RNA, 15 nt, Human
ggcccagcugggcuc

SEQ ID NO: 2525378 - RNA, 14 nt, Human
ggcccagcugggcu

SEQ ID NO: 2525379 - RNA, 16 nt, Human
ggcccagcucccccgg

SEQ ID NO: 2525380 - RNA, 15 nt, Human
ggcccagcucccccg

SEQ ID NO: 2525381 - RNA, 14 nt, Human
ggcccagcuccccc

SEQ ID NO: 2525382 - RNA, 12 nt, Human
ggcccagcuccc

SEQ ID NO: 2525383 - RNA, 23 nt, Human
ggcccagcggccccucccacaca

SEQ ID NO: 2525384 - RNA, 18 nt, Human
ggcccagcggccccuccc

SEQ ID NO: 2525385 - RNA, 17 nt, Human
ggcccagcggccccucc

SEQ ID NO: 2525386 - RNA, 23 nt, Human
ggccccacccugggcccugggcu

SEQ ID NO: 2525387 - RNA, 21 nt, Human
ggccccacccugggcccuggg

SEQ ID NO: 2525388 - RNA, 17 nt, Human
ggccccacccugggccc

SEQ ID NO: 2525389 - RNA, 15 nt, Human
ggccccacccugggc

SEQ ID NO: 2525390 - RNA, 15 nt, Human
ggccccuggcccagc

SEQ ID NO: 2525391 - RNA, 14 nt, Human
ggccccuggcccag

SEQ ID NO: 2525392 - RNA, 13 nt, Human
ggccccuggccca

SEQ ID NO: 2525393 - RNA, 21 nt, Human
ggccccugcuucuccagccug

SEQ ID NO: 2525394 - RNA, 20 nt, Human
ggccccugcuucuccagccu

SEQ ID NO: 2525395 - RNA, 12 nt, Human
ggccccacuggg

SEQ ID NO: 2525396 - RNA, 19 nt, Human
ggccccagaaggcagggaa

SEQ ID NO: 2525397 - RNA, 11 nt, Human
ggccccagaga

SEQ ID NO: 2525398 - RNA, 12 nt, Human
ggccccagagac

SEQ ID NO: 2525399 - RNA, 13 nt, Human
ggccccagagacu

SEQ ID NO: 2525400 - RNA, 14 nt, Human
ggccccagagacuc

SEQ ID NO: 2525401 - RNA, 18 nt, Human
ggccccagagacucagag

SEQ ID NO: 2525402 - RNA, 23 nt, Human
ggccccagagacucagagggagg

SEQ ID NO: 2525403 - RNA, 19 nt, Human
ggcccagugucaaguugug

SEQ ID NO: 2525404 - RNA, 16 nt, Human
ggcccaguccuggccu

SEQ ID NO: 2525405 - RNA, 21 nt, Human
ggcccaguccuggccuggcuu

SEQ ID NO: 2525406 - RNA, 23 nt, Human
ggcccagugucaaguugugcuug

SEQ ID NO: 2525407 - RNA, 22 nt, Human
ggcccagugucaaguugugcuu

SEQ ID NO: 2525408 - RNA, 13 nt, Human
ggccccacccugg

SEQ ID NO: 2525409 - RNA, 19 nt, Human
ggcccagggcccagagccc

SEQ ID NO: 2525410 - RNA, 21 nt, Human
ggcccagggcccagagcccag

SEQ ID NO: 2525411 - RNA, 22 nt, Human
ggcccagggcccagagcccagc

SEQ ID NO: 2525412 - RNA, 14 nt, Human
ggcccaguccuggc

SEQ ID NO: 2525413 - RNA, 22 nt, Human
ggcccaguaugagcccuagaag

SEQ ID NO: 2525414 - RNA, 17 nt, Human
ggcccaguaugagcccu

SEQ ID NO: 2525415 - RNA, 23 nt, Human
ggcagugggucccacuuccccuc

SEQ ID NO: 2525416 - RNA, 20 nt, Human
ggcagugggucccacuuccc

SEQ ID NO: 2525417 - RNA, 19 nt, Human
ggcauagcccagacacaga

SEQ ID NO: 2525418 - RNA, 15 nt, Human
ggcauagcccagaca

SEQ ID NO: 2525419 - RNA, 21 nt, Human
ggcauagcuccccgcuucugc

SEQ ID NO: 2525420 - RNA, 19 nt, Human
ggcagugggagcugccugu

SEQ ID NO: 2525421 - RNA, 18 nt, Human
ggcagugggagcugccug

SEQ ID NO: 2525422 - RNA, 18 nt, Human
ggcauccaguaucuugaa

SEQ ID NO: 2525423 - RNA, 13 nt, Human
ggcaucacagggc

SEQ ID NO: 2525424 - RNA, 14 nt, Human
ggcaucacagggca

SEQ ID NO: 2525425 - RNA, 16 nt, Human
ggcaucacagggcaga

SEQ ID NO: 2525426 - RNA, 17 nt, Human
ggcaucacagggcagag

SEQ ID NO: 2525427 - RNA, 21 nt, Human
ggcauagcccagacacagaag

SEQ ID NO: 2525428 - RNA, 14 nt, Human
ggcauaggccuggg

SEQ ID NO: 2525429 - RNA, 15 nt, Human
ggcauaggccugggu

SEQ ID NO: 2525430 - RNA, 16 nt, Human
ggcauaggccugggug

SEQ ID NO: 2525431 - RNA, 17 nt, Human
ggcauaggccugggugc

SEQ ID NO: 2525432 - RNA, 22 nt, Human
ggcauauccaccaccucccuca

SEQ ID NO: 2525433 - RNA, 18 nt, Human
ggcauuuuacuguacaga

SEQ ID NO: 2525434 - RNA, 15 nt, Human
ggcauuuuuauuuua

SEQ ID NO: 2525435 - RNA, 21 nt, Human
ggcaucuuugccuugggcugc

SEQ ID NO: 2525436 - RNA, 16 nt, Human
ggcaucuuugccuugg

SEQ ID NO: 2525437 - RNA, 17 nt, Human
ggcaucuuugccuuggg

SEQ ID NO: 2525438 - RNA, 19 nt, Human
ggcaucuuugccuugggcu

SEQ ID NO: 2525439 - RNA, 15 nt, Human
ggcaucugcacccuc

SEQ ID NO: 2525440 - RNA, 14 nt, Human
ggcaucugccccuc

SEQ ID NO: 2525441 - RNA, 22 nt, Human
ggcaucugcacccucgaugaag

SEQ ID NO: 2525442 - RNA, 19 nt, Human
ggcaucugccccuccccca

SEQ ID NO: 2525443 - RNA, 16 nt, Human
ggcaucugccccuccc

SEQ ID NO: 2525444 - RNA, 18 nt, Human
ggcaucugccccuccccc

SEQ ID NO: 2525445 - RNA, 20 nt, Human
ggcauccucagguggucagg

SEQ ID NO: 2525446 - RNA, 21 nt, Human
ggcaucccaguggccucaacc

SEQ ID NO: 2525447 - RNA, 15 nt, Human
ggcaucccaggggac

SEQ ID NO: 2525448 - RNA, 18 nt, Human
ggcaucccaguggccuca

SEQ ID NO: 2525449 - RNA, 18 nt, Human
ggcaucucuaauuggaag

SEQ ID NO: 2525450 - RNA, 16 nt, Human
ggcaucuccugugcau

SEQ ID NO: 2525451 - RNA, 17 nt, Human
ggcaucuccugugcaug

SEQ ID NO: 2525452 - RNA, 15 nt, Human
ggcaucucuaauugg

SEQ ID NO: 2525453 - RNA, 21 nt, Human
ggcaucuccugugcaugggug

SEQ ID NO: 2525454 - RNA, 13 nt, Human
ggcauccugugaa

SEQ ID NO: 2525455 - RNA, 20 nt, Human
ggcauccuuccucacaccag

SEQ ID NO: 2525456 - RNA, 17 nt, Human
ggcagugggagcugccu

SEQ ID NO: 2525457 - RNA, 17 nt, Human
ggcaccagacacccagg

SEQ ID NO: 2525458 - RNA, 18 nt, Human
ggcaccagacacccagga

SEQ ID NO: 2525459 - RNA, 19 nt, Human
ggcaccagacacccaggac

SEQ ID NO: 2525460 - RNA, 20 nt, Human
ggcaccagacacccaggacu

SEQ ID NO: 2525461 - RNA, 15 nt, Human
ggcaccagcagccug

SEQ ID NO: 2525462 - RNA, 22 nt, Human
ggcacugcuuccagugaggcuc

SEQ ID NO: 2525463 - RNA, 22 nt, Human
ggcaccagaggcugcagaaggc

SEQ ID NO: 2525464 - RNA, 19 nt, Human
ggcaccagaggcugcagaa

SEQ ID NO: 2525465 - RNA, 12 nt, Human
ggcaccagaggc

SEQ ID NO: 2525466 - RNA, 16 nt, Human
ggcaccagcagccugg

SEQ ID NO: 2525467 - RNA, 21 nt, Human
ggcacuggcauugucccugug

SEQ ID NO: 2525468 - RNA, 20 nt, Human
ggcacuggcauugucccugu

SEQ ID NO: 2525469 - RNA, 24 nt, Human
ggcacugcuuccagugaggcucug

SEQ ID NO: 2525470 - RNA, 20 nt, Human
ggcacugggaugagccgcug

SEQ ID NO: 2525471 - RNA, 19 nt, Human
ggcacugggaugagccgcu

SEQ ID NO: 2525472 - RNA, 21 nt, Human
ggcacugggaugagccgcugu

SEQ ID NO: 2525473 - RNA, 13 nt, Human
ggccagugucugu

SEQ ID NO: 2525474 - RNA, 19 nt, Human
ggccaguggcuggaucugu

SEQ ID NO: 2525475 - RNA, 16 nt, Human
ggccagugugacaagg

SEQ ID NO: 2525476 - RNA, 16 nt, Human
ggccauacuggccucg

SEQ ID NO: 2525477 - RNA, 15 nt, Human
ggccauacuggccuc

SEQ ID NO: 2525478 - RNA, 23 nt, Human
ggccagugucugucccggggucc

SEQ ID NO: 2525479 - RNA, 22 nt, Human
ggccagugucugucccgggguc

SEQ ID NO: 2525480 - RNA, 23 nt, Human
ggccauacuggccucgccuggcc

SEQ ID NO: 2525481 - RNA, 22 nt, Human
ggccauacuggccucgccuggc

SEQ ID NO: 2525482 - RNA, 17 nt, Human
ggccauagcuccugcuc

SEQ ID NO: 2525483 - RNA, 22 nt, Human
ggccauccggcccccagagcgc

SEQ ID NO: 2525484 - RNA, 19 nt, Human
ggccauccggcccccagag

SEQ ID NO: 2525485 - RNA, 14 nt, Human
ggccaucccacaag

SEQ ID NO: 2525486 - RNA, 20 nt, Human
ggccagggcuauagcucagg

SEQ ID NO: 2525487 - RNA, 19 nt, Human
ggccagggcuauagcucag

SEQ ID NO: 2525488 - RNA, 23 nt, Human
ggccagggccuggaagacagaga

SEQ ID NO: 2525489 - RNA, 19 nt, Human
ggccagggccuggaagaca

SEQ ID NO: 2525490 - RNA, 13 nt, Human
ggccagggcagag

SEQ ID NO: 2525491 - RNA, 23 nt, Human
ggccagggccccucacccugccu

SEQ ID NO: 2525492 - RNA, 13 nt, Human
ggccagggcccug

SEQ ID NO: 2525493 - RNA, 16 nt, Human
ggccagggcccugcag

SEQ ID NO: 2525494 - RNA, 17 nt, Human
ggccagggcccugcaga

SEQ ID NO: 2525495 - RNA, 17 nt, Human
ggccagggccuggaaga

SEQ ID NO: 2525496 - RNA, 12 nt, Human
ggccagggccug

SEQ ID NO: 2525497 - RNA, 18 nt, Human
ggccagggcccugcagag

SEQ ID NO: 2525498 - RNA, 15 nt, Human
ggccaugauggcaac

SEQ ID NO: 2525499 - RNA, 21 nt, Human
ggccaugaggccucaguggac

SEQ ID NO: 2525500 - RNA, 17 nt, Human
ggccaugagcuccagac

SEQ ID NO: 2525501 - RNA, 18 nt, Human
ggccaugagcuccagacc

SEQ ID NO: 2525502 - RNA, 21 nt, Human
ggccaugagcuccagaccccc

SEQ ID NO: 2525503 - RNA, 22 nt, Human
ggccaugagcuccagaccccca

SEQ ID NO: 2525504 - RNA, 18 nt, Human
ggccaugauggcaacaga

SEQ ID NO: 2525505 - RNA, 22 nt, Human
ggccaugauggcaacagaucug

SEQ ID NO: 2525506 - RNA, 21 nt, Human
ggccaugauucgcccaaagcc

SEQ ID NO: 2525507 - RNA, 14 nt, Human
ggccaugccucagc

SEQ ID NO: 2525508 - RNA, 22 nt, Human
ggccaucuuccaggugggguga

SEQ ID NO: 2525509 - RNA, 16 nt, Human
ggccaugagcuccaga

SEQ ID NO: 2525510 - RNA, 19 nt, Human
ggccaucuuccaggugggg

SEQ ID NO: 2525511 - RNA, 18 nt, Human
ggccaucuuccagguggg

SEQ ID NO: 2525512 - RNA, 17 nt, Human
ggccaucuuccaggugg

SEQ ID NO: 2525513 - RNA, 22 nt, Human
ggccaucugggcuccuccaggg

SEQ ID NO: 2525514 - RNA, 23 nt, Human
ggccaucuccacccccagcugcu

SEQ ID NO: 2525515 - RNA, 18 nt, Human
ggccaucuccacccccag

SEQ ID NO: 2525516 - RNA, 19 nt, Human
ggccaucucuggaugccug

SEQ ID NO: 2525517 - RNA, 15 nt, Human
ggccauccuguccca

SEQ ID NO: 2525518 - RNA, 23 nt, Human
ggccauccggcccccagagcgcc

SEQ ID NO: 2525519 - RNA, 20 nt, Human
ggccauccuucccugucugc

SEQ ID NO: 2525520 - RNA, 14 nt, Human
ggccaggcuggucu

SEQ ID NO: 2525521 - RNA, 16 nt, Human
ggccagccccacccag

SEQ ID NO: 2525522 - RNA, 20 nt, Human
ggccagccccacccaggagg

SEQ ID NO: 2525523 - RNA, 11 nt, Human
ggccagccccg

SEQ ID NO: 2525524 - RNA, 23 nt, Human
ggccagccccacagcccacgucc

SEQ ID NO: 2525525 - RNA, 21 nt, Human
ggccagccccacccaggaggg

SEQ ID NO: 2525526 - RNA, 14 nt, Human
ggccagccaggcgg

SEQ ID NO: 2525527 - RNA, 13 nt, Human
ggccagccaggcg

SEQ ID NO: 2525528 - RNA, 16 nt, Human
ggccagccaggcgggc

SEQ ID NO: 2525529 - RNA, 14 nt, Human
ggccagccaugucu

SEQ ID NO: 2525530 - RNA, 15 nt, Human
ggccagccccacagc

SEQ ID NO: 2525531 - RNA, 14 nt, Human
ggccagccccacag

SEQ ID NO: 2525532 - RNA, 13 nt, Human
ggccagccccaca

SEQ ID NO: 2525533 - RNA, 15 nt, Human
ggccagccaugucug

SEQ ID NO: 2525534 - RNA, 19 nt, Human
ggccagccccacagcccac

SEQ ID NO: 2525535 - RNA, 18 nt, Human
ggccagccccacagccca

SEQ ID NO: 2525536 - RNA, 13 nt, Human
ggccagccccacc

SEQ ID NO: 2525537 - RNA, 14 nt, Human
ggccagccccaccc

SEQ ID NO: 2525538 - RNA, 15 nt, Human
ggccagccccaccca

SEQ ID NO: 2525539 - RNA, 12 nt, Human
ggccaggcuggu

SEQ ID NO: 2525540 - RNA, 15 nt, Human
ggccagccccggccc

SEQ ID NO: 2525541 - RNA, 15 nt, Human
ggccagggagaagcu

SEQ ID NO: 2525542 - RNA, 16 nt, Human
ggccagggagaagcuc

SEQ ID NO: 2525543 - RNA, 17 nt, Human
ggccagggagaagcucc

SEQ ID NO: 2525544 - RNA, 18 nt, Human
ggccagggagaagcuccu

SEQ ID NO: 2525545 - RNA, 18 nt, Human
ggccaggcuggucucaaa

SEQ ID NO: 2525546 - RNA, 16 nt, Human
ggccaggcuggucuca

SEQ ID NO: 2525547 - RNA, 18 nt, Human
ggccagaggcccccagcc

SEQ ID NO: 2525548 - RNA, 16 nt, Human
ggccagaggcccccag

SEQ ID NO: 2525549 - RNA, 12 nt, Human
ggccagccaggc

SEQ ID NO: 2525550 - RNA, 11 nt, Human
ggccagccagg

SEQ ID NO: 2525551 - RNA, 12 nt, Human
ggccagcagcuu

SEQ ID NO: 2525552 - RNA, 13 nt, Human
ggccagcagcuug

SEQ ID NO: 2525553 - RNA, 17 nt, Human
ggccagagcugggaggc

SEQ ID NO: 2525554 - RNA, 16 nt, Human
ggccagagcugggagg

SEQ ID NO: 2525555 - RNA, 14 nt, Human
ggccagagcuggga

SEQ ID NO: 2525556 - RNA, 21 nt, Human
ggccagaggaacuguccagag

SEQ ID NO: 2525557 - RNA, 21 nt, Human
ggccagagcugggaggcaugg

SEQ ID NO: 2525558 - RNA, 22 nt, Human
ggccagaggaacuguccagaga

SEQ ID NO: 2525559 - RNA, 14 nt, Human
ggccagagccaggg

SEQ ID NO: 2525560 - RNA, 22 nt, Human
ggccagagcuacccgcagaguu

SEQ ID NO: 2525561 - RNA, 22 nt, Human
ggccagagagccuggugcugcu

SEQ ID NO: 2525562 - RNA, 11 nt, Human
ggccagagcca

SEQ ID NO: 2525563 - RNA, 12 nt, Human
ggccagagccag

SEQ ID NO: 2525564 - RNA, 13 nt, Human
ggccagagccagg

SEQ ID NO: 2525565 - RNA, 21 nt, Human
ggccaaacucaccugccccuc

SEQ ID NO: 2525566 - RNA, 15 nt, Human
ggccaaaccucuguu

SEQ ID NO: 2525567 - RNA, 16 nt, Human
ggccaaaccucuguuc

SEQ ID NO: 2525568 - RNA, 23 nt, Human
ggccagagagccuggugcugcug

SEQ ID NO: 2525569 - RNA, 17 nt, Human
ggccaaacucaccugcc

SEQ ID NO: 2525570 - RNA, 12 nt, Human
ggccaaaccucu

SEQ ID NO: 2525571 - RNA, 18 nt, Human
ggccugaggaugagcugg

SEQ ID NO: 2525572 - RNA, 13 nt, Human
ggccugaggauga

SEQ ID NO: 2525573 - RNA, 21 nt, Human
ggccugaggucucgcugaugc

SEQ ID NO: 2525574 - RNA, 18 nt, Human
ggccugaggucucgcuga

SEQ ID NO: 2525575 - RNA, 22 nt, Human
ggccugaggaugagcuggaagg

SEQ ID NO: 2525576 - RNA, 19 nt, Human
ggccugaggaugagcugga

SEQ ID NO: 2525577 - RNA, 15 nt, Human
ggccugagcugggau

SEQ ID NO: 2525578 - RNA, 12 nt, Human
ggccugagcugg

SEQ ID NO: 2525579 - RNA, 16 nt, Human
ggccggccaggugggc

SEQ ID NO: 2525580 - RNA, 15 nt, Human
ggccggccagguggg

SEQ ID NO: 2525581 - RNA, 14 nt, Human
ggccggccaggugg

SEQ ID NO: 2525582 - RNA, 20 nt, Human
ggccggagucagugccaggu

SEQ ID NO: 2525583 - RNA, 15 nt, Human
ggccggccagccccu

SEQ ID NO: 2525584 - RNA, 22 nt, Human
ggccgcugccacccaccucccu

SEQ ID NO: 2525585 - RNA, 23 nt, Human
ggccgcugccacccaccucccug

SEQ ID NO: 2525586 - RNA, 16 nt, Human
ggccgcuguucaccca

SEQ ID NO: 2525587 - RNA, 19 nt, Human
ggccgcuguucacccacag

SEQ ID NO: 2525588 - RNA, 17 nt, Human
ggccucauguggcugga

SEQ ID NO: 2525589 - RNA, 16 nt, Human
ggccucauguggcugg

SEQ ID NO: 2525590 - RNA, 17 nt, Human
ggccggccaggugggcg

SEQ ID NO: 2525591 - RNA, 15 nt, Human
ggccucauguggcug

SEQ ID NO: 2525592 - RNA, 20 nt, Human
ggccucauguggcuggaaga

SEQ ID NO: 2525593 - RNA, 19 nt, Human
ggccucauguggcuggaag

SEQ ID NO: 2525594 - RNA, 13 nt, Human
ggccuccauccug

SEQ ID NO: 2525595 - RNA, 15 nt, Human
ggccuccagaacuca

SEQ ID NO: 2525596 - RNA, 20 nt, Human
ggccuccagaacucacuggg

SEQ ID NO: 2525597 - RNA, 17 nt, Human
ggccucauuacuuuacc

SEQ ID NO: 2525598 - RNA, 23 nt, Human
ggccuucggccuccauccugagg

SEQ ID NO: 2525599 - RNA, 12 nt, Human
ggccuucucuga

SEQ ID NO: 2525600 - RNA, 22 nt, Human
ggccugugucccaugacccacc

SEQ ID NO: 2525601 - RNA, 21 nt, Human
ggccugugucccaugacccac

SEQ ID NO: 2525602 - RNA, 22 nt, Human
ggccugugugugaaaggaagcu

SEQ ID NO: 2525603 - RNA, 20 nt, Human
ggccugugucccaugaccca

SEQ ID NO: 2525604 - RNA, 21 nt, Human
ggccugugucuaguuguuuga

SEQ ID NO: 2525605 - RNA, 20 nt, Human
ggccugugggagccugcaaa

SEQ ID NO: 2525606 - RNA, 17 nt, Human
ggccugugggagccugc

SEQ ID NO: 2525607 - RNA, 20 nt, Human
ggccuguggccuguguccca

SEQ ID NO: 2525608 - RNA, 18 nt, Human
ggccuguggccugugucc

SEQ ID NO: 2525609 - RNA, 23 nt, Human
ggccuggcccacagcaggugcug

SEQ ID NO: 2525610 - RNA, 20 nt, Human
ggccuguggaucaaauccag

SEQ ID NO: 2525611 - RNA, 18 nt, Human
ggccuggccagggccugg

SEQ ID NO: 2525612 - RNA, 17 nt, Human
ggccuggccagggccug

SEQ ID NO: 2525613 - RNA, 22 nt, Human
ggccuggccagggccuggaaga

SEQ ID NO: 2525614 - RNA, 14 nt, Human
ggccuggccaggca

SEQ ID NO: 2525615 - RNA, 13 nt, Human
ggccuggccaggc

SEQ ID NO: 2525616 - RNA, 23 nt, Human
ggccuggccaggagcucuucagg

SEQ ID NO: 2525617 - RNA, 17 nt, Human
ggccuggagauccuccu

SEQ ID NO: 2525618 - RNA, 15 nt, Human
ggccuggagauccuc

SEQ ID NO: 2525619 - RNA, 14 nt, Human
ggccuggagauccu

SEQ ID NO: 2525620 - RNA, 11 nt, Human
ggccuggagau

SEQ ID NO: 2525621 - RNA, 21 nt, Human
ggccuggccagaugcaccagc

SEQ ID NO: 2525622 - RNA, 19 nt, Human
ggccuggagauccuccugc

SEQ ID NO: 2525623 - RNA, 18 nt, Human
ggccuggagauccuccug

SEQ ID NO: 2525624 - RNA, 14 nt, Human
ggccuggccaggag

SEQ ID NO: 2525625 - RNA, 15 nt, Human
ggccuggccaggagc

SEQ ID NO: 2525626 - RNA, 16 nt, Human
ggccuggccaggagcu

SEQ ID NO: 2525627 - RNA, 17 nt, Human
ggccuggccaggagcuc

SEQ ID NO: 2525628 - RNA, 18 nt, Human
ggccuggccaggagcucu

SEQ ID NO: 2525629 - RNA, 15 nt, Human
ggccugaucagacca

SEQ ID NO: 2525630 - RNA, 18 nt, Human
ggccugaucagaccacgg

SEQ ID NO: 2525631 - RNA, 19 nt, Human
ggccugaggucuggcugcu

SEQ ID NO: 2525632 - RNA, 22 nt, Human
ggccugaggucucgcugaugcu

SEQ ID NO: 2525633 - RNA, 21 nt, Human
ggccugaggucuggcugcuug

SEQ ID NO: 2525634 - RNA, 20 nt, Human
ggccugaucagaccacggcu

SEQ ID NO: 2525635 - RNA, 14 nt, Human
ggccugaugacaga

SEQ ID NO: 2525636 - RNA, 20 nt, Human
ggccugcugggcucuccacc

SEQ ID NO: 2525637 - RNA, 18 nt, Human
ggccugaugacagagcga

SEQ ID NO: 2525638 - RNA, 21 nt, Human
ggccugcugggcucuccaccu

SEQ ID NO: 2525639 - RNA, 22 nt, Human
ggccuggaccugccuccugccu

SEQ ID NO: 2525640 - RNA, 21 nt, Human
ggccuggaccugccuccugcc

SEQ ID NO: 2525641 - RNA, 16 nt, Human
ggccuggaccugccuc

SEQ ID NO: 2525642 - RNA, 15 nt, Human
ggccuggaccugccu

SEQ ID NO: 2525643 - RNA, 21 nt, Human
ggccuggacuuuccugcaacu

SEQ ID NO: 2525644 - RNA, 18 nt, Human
ggccuggacuuuccugca

SEQ ID NO: 2525645 - RNA, 13 nt, Human
ggccuggaccugc

SEQ ID NO: 2525646 - RNA, 17 nt, Human
ggccugcuuccugucuu

SEQ ID NO: 2525647 - RNA, 16 nt, Human
ggccuggaagacagag

SEQ ID NO: 2525648 - RNA, 19 nt, Human
ggccugcugugauuccacu

SEQ ID NO: 2525649 - RNA, 10 nt, Human
ggccugcugu

SEQ ID NO: 2525650 - RNA, 22 nt, Human
ggccugcugggcucuccaccuc

SEQ ID NO: 2525651 - RNA, 23 nt, Human
ggccugcugggcucuccaccuca

SEQ ID NO: 2525652 - RNA, 16 nt, Human
ggccuucucugaagga

SEQ ID NO: 2525653 - RNA, 15 nt, Human
ggccuucucugaagg

SEQ ID NO: 2525654 - RNA, 16 nt, Human
ggccuugaguccccca

SEQ ID NO: 2525655 - RNA, 13 nt, Human
ggccuugcccaga

SEQ ID NO: 2525656 - RNA, 14 nt, Human
ggccuugcccagag

SEQ ID NO: 2525657 - RNA, 22 nt, Human
ggccuugcgguauccgccccca

SEQ ID NO: 2525658 - RNA, 15 nt, Human
ggccuugcccagaga

SEQ ID NO: 2525659 - RNA, 16 nt, Human
ggccuugcccagagau

SEQ ID NO: 2525660 - RNA, 19 nt, Human
ggccuuugagcccacaaag

SEQ ID NO: 2525661 - RNA, 16 nt, Human
ggccuuucugugugug

SEQ ID NO: 2525662 - RNA, 23 nt, Human
ggccuuugagcccacaaagccuu

SEQ ID NO: 2525663 - RNA, 13 nt, Human
ggccuuuggcuuc

SEQ ID NO: 2525664 - RNA, 12 nt, Human
ggccuuguccca

SEQ ID NO: 2525665 - RNA, 22 nt, Human
ggccuuuaaaauuuuuuuagaa

SEQ ID NO: 2525666 - RNA, 14 nt, Human
ggccuuuaaaauuu

SEQ ID NO: 2525667 - RNA, 15 nt, Human
ggcgaaucauuuguu

SEQ ID NO: 2525668 - RNA, 20 nt, Human
ggcgacagagcgagacuccg

SEQ ID NO: 2525669 - RNA, 23 nt, Human
ggcgacagagcgagagucugucu

SEQ ID NO: 2525670 - RNA, 16 nt, Human
ggcgaagcccaggccc

SEQ ID NO: 2525671 - RNA, 18 nt, Human
ggcgacaguuuuccuucu

SEQ ID NO: 2525672 - RNA, 14 nt, Human
ggccuuuggcuuca

SEQ ID NO: 2525673 - RNA, 12 nt, Human
ggccuuuuccua

SEQ ID NO: 2525674 - RNA, 18 nt, Human
ggcgucagccuccagccu

SEQ ID NO: 2525675 - RNA, 17 nt, Human
ggcgucagccuccagcc

SEQ ID NO: 2525676 - RNA, 16 nt, Human
ggcgucagccuccagc

SEQ ID NO: 2525677 - RNA, 14 nt, Human
ggcgucagccucca

SEQ ID NO: 2525678 - RNA, 13 nt, Human
ggcgucagccucc

SEQ ID NO: 2525679 - RNA, 20 nt, Human
ggcgaccccgucacagccuc

SEQ ID NO: 2525680 - RNA, 19 nt, Human
ggcgaccccgucacagccu

SEQ ID NO: 2525681 - RNA, 22 nt, Human
ggcggugggcacccacccuggg

SEQ ID NO: 2525682 - RNA, 21 nt, Human
ggcggugggcacccacccugg

SEQ ID NO: 2525683 - RNA, 11 nt, Human
ggcucagccug

SEQ ID NO: 2525684 - RNA, 23 nt, Human
ggcucagcggggacagcuccuuc

SEQ ID NO: 2525685 - RNA, 22 nt, Human
ggcucagcggggacagcuccuu

SEQ ID NO: 2525686 - RNA, 21 nt, Human
ggcucagcggggacagcuccu

SEQ ID NO: 2525687 - RNA, 23 nt, Human
ggcucagcaaaagaugcuucuca

SEQ ID NO: 2525688 - RNA, 14 nt, Human
ggcucacugccagg

SEQ ID NO: 2525689 - RNA, 13 nt, Human
ggcucacugccag

SEQ ID NO: 2525690 - RNA, 19 nt, Human
ggcucagcaaaagaugcuu

SEQ ID NO: 2525691 - RNA, 15 nt, Human
ggcucagccagcacu

SEQ ID NO: 2525692 - RNA, 10 nt, Human
ggcucagccu

SEQ ID NO: 2525693 - RNA, 12 nt, Human
ggcucagccugg

SEQ ID NO: 2525694 - RNA, 19 nt, Human
ggcgugcaguggugcgauc

SEQ ID NO: 2525695 - RNA, 15 nt, Human
ggcguggagcugccu

SEQ ID NO: 2525696 - RNA, 16 nt, Human
ggcgucuguucccccu

SEQ ID NO: 2525697 - RNA, 20 nt, Human
ggcguggagagcccggcgcc

SEQ ID NO: 2525698 - RNA, 12 nt, Human
ggcguggagcug

SEQ ID NO: 2525699 - RNA, 14 nt, Human
ggcgugcaguggug

SEQ ID NO: 2525700 - RNA, 22 nt, Human
ggcgucagccuccagccucugu

SEQ ID NO: 2525701 - RNA, 20 nt, Human
ggcgucagccuccagccucu

SEQ ID NO: 2525702 - RNA, 19 nt, Human
ggcgucagccuccagccuc

SEQ ID NO: 2525703 - RNA, 16 nt, Human
ggcgucuguauauuuu

SEQ ID NO: 2525704 - RNA, 21 nt, Human
ggcguccgcgcgccagcacag

SEQ ID NO: 2525705 - RNA, 15 nt, Human
ggcgucugucuucaa

SEQ ID NO: 2525706 - RNA, 16 nt, Human
ggcucacugcagccuc

SEQ ID NO: 2525707 - RNA, 17 nt, Human
ggcguggucacugcugu

SEQ ID NO: 2525708 - RNA, 15 nt, Human
ggcguggucacugcu

SEQ ID NO: 2525709 - RNA, 17 nt, Human
ggcguggucaagcacuc

SEQ ID NO: 2525710 - RNA, 19 nt, Human
ggcguggucacugcuguca

SEQ ID NO: 2525711 - RNA, 18 nt, Human
ggcguggucacugcuguc

SEQ ID NO: 2525712 - RNA, 16 nt, Human
ggcgugguggcgggca

SEQ ID NO: 2525713 - RNA, 16 nt, Human
ggcucacugcauccuc

SEQ ID NO: 2525714 - RNA, 19 nt, Human
ggcucacugcauccuccgc

SEQ ID NO: 2525715 - RNA, 17 nt, Human
ggcucacugcagccuca

SEQ ID NO: 2525716 - RNA, 22 nt, Human
gguucccuuugacgccauccca

SEQ ID NO: 2525717 - RNA, 16 nt, Human
gguuccuccccuccuc

SEQ ID NO: 2525718 - RNA, 18 nt, Human
gguuccuauggcuggcca

SEQ ID NO: 2525719 - RNA, 21 nt, Human
gguucccuuugacgccauccc

SEQ ID NO: 2525720 - RNA, 16 nt, Human
gguucccucugagaau

SEQ ID NO: 2525721 - RNA, 13 nt, Human
gguucccucugag

SEQ ID NO: 2525722 - RNA, 17 nt, Human
gguucccuuuccuucca

SEQ ID NO: 2525723 - RNA, 22 nt, Human
gguucccuuuccuuccaucccu

SEQ ID NO: 2525724 - RNA, 23 nt, Human
gguuccagcaauucuccugccuc

SEQ ID NO: 2525725 - RNA, 23 nt, Human
gguucauuucaaauacaucuuug

SEQ ID NO: 2525726 - RNA, 15 nt, Human
gguucaucugagcaa

SEQ ID NO: 2525727 - RNA, 16 nt, Human
gguucauuauuggaau

SEQ ID NO: 2525728 - RNA, 17 nt, Human
gguucauuauuggaauu

SEQ ID NO: 2525729 - RNA, 18 nt, Human
gguucauuauuggaauua

SEQ ID NO: 2525730 - RNA, 19 nt, Human
gguucauuauuggaauuaa

SEQ ID NO: 2525731 - RNA, 16 nt, Human
gguucccccagcccug

SEQ ID NO: 2525732 - RNA, 24 nt, Human
gguuccagcaauucuccugccuca

SEQ ID NO: 2525733 - RNA, 15 nt, Human
gguuccccuguucac

SEQ ID NO: 2525734 - RNA, 17 nt, Human
gguucccguuucuccac

SEQ ID NO: 2525735 - RNA, 21 nt, Human
gguucccccagcccuguggaa

SEQ ID NO: 2525736 - RNA, 21 nt, Human
gguucaggguuggccccugcc

SEQ ID NO: 2525737 - RNA, 18 nt, Human
gguucaggguuggccccu

SEQ ID NO: 2525738 - RNA, 22 nt, Human
ggugugcugggagcuccacucu

SEQ ID NO: 2525739 - RNA, 21 nt, Human
gguucauaggucacuggcucu

SEQ ID NO: 2525740 - RNA, 22 nt, Human
gguucaggguuggccccugccc

SEQ ID NO: 2525741 - RNA, 19 nt, Human
ggugugcugggagcuccac

SEQ ID NO: 2525742 - RNA, 12 nt, Human
ggugugcuggga

SEQ ID NO: 2525743 - RNA, 12 nt, Human
gguguggaagag

SEQ ID NO: 2525744 - RNA, 13 nt, Human
ggugugcucugau

SEQ ID NO: 2525745 - RNA, 21 nt, Human
ggugugcggccuuuggcuuca

SEQ ID NO: 2525746 - RNA, 12 nt, Human
gguuucagaaau

SEQ ID NO: 2525747 - RNA, 13 nt, Human
gguuucagaaaug

SEQ ID NO: 2525748 - RNA, 19 nt, Human
gguuucaccauguugccca

SEQ ID NO: 2525749 - RNA, 19 nt, Human
gguuucaccauguuggcca

SEQ ID NO: 2525750 - RNA, 14 nt, Human
gguuucagaaaugu

SEQ ID NO: 2525751 - RNA, 21 nt, Human
gguuucucgcauaggaccuuu

SEQ ID NO: 2525752 - RNA, 17 nt, Human
gguuucugaguuccugc

SEQ ID NO: 2525753 - RNA, 14 nt, Human
gguuucugagcugc

SEQ ID NO: 2525754 - RNA, 13 nt, Human
gguuucugaaaau

SEQ ID NO: 2525755 - RNA, 16 nt, Human
gguuuagaaagcuugc

SEQ ID NO: 2525756 - RNA, 20 nt, Human
gguuuaggcugguggcccag

SEQ ID NO: 2525757 - RNA, 22 nt, Human
gguuuaggcugguggcccagga

SEQ ID NO: 2525758 - RNA, 17 nt, Human
gguuuaggcugguggcc

SEQ ID NO: 2525759 - RNA, 17 nt, Human
gguucuggggccccuuu

SEQ ID NO: 2525760 - RNA, 20 nt, Human
gguucugccugccagcugca

SEQ ID NO: 2525761 - RNA, 21 nt, Human
gguucugaugaugugccuggg

SEQ ID NO: 2525762 - RNA, 17 nt, Human
gguucuccucuccccuc

SEQ ID NO: 2525763 - RNA, 12 nt, Human
gguucuggcugc

SEQ ID NO: 2525764 - RNA, 19 nt, Human
gguucugccugccagcugc

SEQ ID NO: 2525765 - RNA, 18 nt, Human
gguucuggugugaacuaa

SEQ ID NO: 2525766 - RNA, 12 nt, Human
gguucuggggcc

SEQ ID NO: 2525767 - RNA, 21 nt, Human
gguucuccguuagcuccugug

SEQ ID NO: 2525768 - RNA, 20 nt, Human
gguucuccguuagcuccugu

SEQ ID NO: 2525769 - RNA, 19 nt, Human
gguucuccguuagcuccug

SEQ ID NO: 2525770 - RNA, 18 nt, Human
gguucucccccuuucucu

SEQ ID NO: 2525771 - RNA, 18 nt, Human
gguucucagguguugcca

SEQ ID NO: 2525772 - RNA, 12 nt, Human
gguucucaucuu

SEQ ID NO: 2525773 - RNA, 18 nt, Human
gguuccucugccugcccc

SEQ ID NO: 2525774 - RNA, 23 nt, Human
gguucucacagugggagccaggg

SEQ ID NO: 2525775 - RNA, 19 nt, Human
gguuccuuccucugagccu

SEQ ID NO: 2525776 - RNA, 20 nt, Human
gguuccuuccucugagccuu

SEQ ID NO: 2525777 - RNA, 17 nt, Human
gguuccucugccugccc

SEQ ID NO: 2525778 - RNA, 15 nt, Human
gguuccucugccugc

SEQ ID NO: 2525779 - RNA, 14 nt, Human
gguuccucugccug

SEQ ID NO: 2525780 - RNA, 12 nt, Human
gguuccucugcc

SEQ ID NO: 2525781 - RNA, 22 nt, Human
gguuccuauggcuggccacugc

SEQ ID NO: 2525782 - RNA, 18 nt, Human
ggugugaucgucugacug

SEQ ID NO: 2525783 - RNA, 20 nt, Human
ggugugcaaugucugaguga

SEQ ID NO: 2525784 - RNA, 15 nt, Human
ggugugaucgucuga

SEQ ID NO: 2525785 - RNA, 18 nt, Human
ggugugagucaccaagcc

SEQ ID NO: 2525786 - RNA, 16 nt, Human
ggugugcaccaggguu

SEQ ID NO: 2525787 - RNA, 17 nt, Human
ggugugcaccaggguug

SEQ ID NO: 2525788 - RNA, 15 nt, Human
ggugugcacaucucu

SEQ ID NO: 2525789 - RNA, 16 nt, Human
ggugugcacaucucug

SEQ ID NO: 2525790 - RNA, 18 nt, Human
ggugugcacaucucugcu

SEQ ID NO: 2525791 - RNA, 23 nt, Human
ggugugcacaucucugcuugagu

SEQ ID NO: 2525792 - RNA, 24 nt, Human
ggugugcacguggcauguggccug

SEQ ID NO: 2525793 - RNA, 15 nt, Human
ggugugccugcagcc

SEQ ID NO: 2525794 - RNA, 13 nt, Human
ggugugccugcag

SEQ ID NO: 2525795 - RNA, 14 nt, Human
ggugugccugcagc

SEQ ID NO: 2525796 - RNA, 23 nt, Human
ggugucuccaaccccccagcacu

SEQ ID NO: 2525797 - RNA, 19 nt, Human
ggugucuccaaccccccag

SEQ ID NO: 2525798 - RNA, 20 nt, Human
ggugucuugggcagagcugg

SEQ ID NO: 2525799 - RNA, 23 nt, Human
ggugucuguguuccaaccacuga

SEQ ID NO: 2525800 - RNA, 16 nt, Human
ggugugaccacugcag

SEQ ID NO: 2525801 - RNA, 16 nt, Human
ggugugacugaauuuc

SEQ ID NO: 2525802 - RNA, 15 nt, Human
ggugugaccugaggg

SEQ ID NO: 2525803 - RNA, 16 nt, Human
ggugucugcacccagg

SEQ ID NO: 2525804 - RNA, 20 nt, Human
ggugugaaagucagaugccc

SEQ ID NO: 2525805 - RNA, 21 nt, Human
ggugucgcgccuucucccccc

SEQ ID NO: 2525806 - RNA, 20 nt, Human
ggugucgcgccuucuccccc

SEQ ID NO: 2525807 - RNA, 21 nt, Human
ggugucgcucugcuggccugg

SEQ ID NO: 2525808 - RNA, 16 nt, Human
ggugucgggcaugaca

SEQ ID NO: 2525809 - RNA, 16 nt, Human
gguggggguggaggcu

SEQ ID NO: 2525810 - RNA, 17 nt, Human
ggugucgcgccuucucc

SEQ ID NO: 2525811 - RNA, 15 nt, Human
ggugucgcgccuucu

SEQ ID NO: 2525812 - RNA, 15 nt, Human
gguggggucaugccc

SEQ ID NO: 2525813 - RNA, 19 nt, Human
gguggggucaugcccuccu

SEQ ID NO: 2525814 - RNA, 13 nt, Human
ggugucgggcaug

SEQ ID NO: 2525815 - RNA, 23 nt, Human
gguggggucacucuggcagcuca

SEQ ID NO: 2525816 - RNA, 15 nt, Human
gguggggucacucug

SEQ ID NO: 2525817 - RNA, 17 nt, Human
gguggggggggugcugg

SEQ ID NO: 2525818 - RNA, 23 nt, Human
gguggggguagagcugauccaga

SEQ ID NO: 2525819 - RNA, 12 nt, Human
gguggggcggga

SEQ ID NO: 2525820 - RNA, 18 nt, Human
aaagccuguuuaagagac

SEQ ID NO: 2525821 - RNA, 16 nt, Human
aaagccuguuuaagag

SEQ ID NO: 2525822 - RNA, 21 nt, Human
aaagccuugugucuacagaga

SEQ ID NO: 2525823 - RNA, 17 nt, Human
aaagccuuaucaagugu

SEQ ID NO: 2525824 - RNA, 14 nt, Human
aaagcaugaauggu

SEQ ID NO: 2525825 - RNA, 15 nt, Human
ggugggauccuccag

SEQ ID NO: 2525826 - RNA, 14 nt, Human
ggugggauccucca

SEQ ID NO: 2525827 - RNA, 14 nt, Human
aaagcgaauuuuaa

SEQ ID NO: 2525828 - RNA, 23 nt, Human
aaagccuugugucuacagagaac

SEQ ID NO: 2525829 - RNA, 20 nt, Human
ggugggaggauugcuugagc

SEQ ID NO: 2525830 - RNA, 14 nt, Human
gguggggaggggcg

SEQ ID NO: 2525831 - RNA, 13 nt, Human
gguggggaggggc

SEQ ID NO: 2525832 - RNA, 12 nt, Human
gguggggagggg

SEQ ID NO: 2525833 - RNA, 11 nt, Human
gguggggaggg

SEQ ID NO: 2525834 - RNA, 17 nt, Human
gguggggcagcuugagg

SEQ ID NO: 2525835 - RNA, 14 nt, Human
ggugggccucuggu

SEQ ID NO: 2525836 - RNA, 13 nt, Human
ggugggccucugg

SEQ ID NO: 2525837 - RNA, 16 nt, Human
ggugggccgcaggcgg

SEQ ID NO: 2525838 - RNA, 23 nt, Human
ggugggcccaggaccagcugggg

SEQ ID NO: 2525839 - RNA, 13 nt, Human
gguggggcagcuu

SEQ ID NO: 2525840 - RNA, 22 nt, Human
ggugggcccaggaccagcuggg

SEQ ID NO: 2525841 - RNA, 21 nt, Human
ggugggcccaggaccagcugg

SEQ ID NO: 2525842 - RNA, 20 nt, Human
ggugggcccaggaccagcug

SEQ ID NO: 2525843 - RNA, 18 nt, Human
ggugggcccaggaccagc

SEQ ID NO: 2525844 - RNA, 17 nt, Human
ggugggcccaggaccag

SEQ ID NO: 2525845 - RNA, 12 nt, Human
ggugggcccagg

SEQ ID NO: 2525846 - RNA, 12 nt, Human
ggugggccaggc

SEQ ID NO: 2525847 - RNA, 14 nt, Human
ggugggccaggcug

SEQ ID NO: 2525848 - RNA, 16 nt, Human
ggugggcagguggugg

SEQ ID NO: 2525849 - RNA, 14 nt, Human
ggugggcagguggu

SEQ ID NO: 2525850 - RNA, 16 nt, Human
ggugggccagccccuc

SEQ ID NO: 2525851 - RNA, 20 nt, Human
ggugggccagccccucccac

SEQ ID NO: 2525852 - RNA, 14 nt, Human
ggugggcaggaaaa

SEQ ID NO: 2525853 - RNA, 18 nt, Human
ggugggcacccacccugg

SEQ ID NO: 2525854 - RNA, 19 nt, Human
ggugggauccuccaggugc

SEQ ID NO: 2525855 - RNA, 16 nt, Human
ggugggauggaggaga

SEQ ID NO: 2525856 - RNA, 17 nt, Human
ggugggauggaggagaa

SEQ ID NO: 2525857 - RNA, 17 nt, Human
ggugggcacccacccug

SEQ ID NO: 2525858 - RNA, 22 nt, Human
guaaagauauuuuuaucuuuau

SEQ ID NO: 2525859 - RNA, 23 nt, Human
guaaagagaccuaccucagguug

SEQ ID NO: 2525860 - RNA, 22 nt, Human
guaaagagaccuaccucagguu

SEQ ID NO: 2525861 - RNA, 19 nt, Human
guaaagauauuuuuaucuu

SEQ ID NO: 2525862 - RNA, 21 nt, Human
guaaagagaccuaccucaggu

SEQ ID NO: 2525863 - RNA, 14 nt, Human
guaaagagaccuac

SEQ ID NO: 2525864 - RNA, 14 nt, Human
guaaagacuggcuu

SEQ ID NO: 2525865 - RNA, 22 nt, Human
guaaagaaauuuaaaagacacu

SEQ ID NO: 2525866 - RNA, 19 nt, Human
guaaagacuggcuuuuauu

SEQ ID NO: 2525867 - RNA, 15 nt, Human
guaaagacuggcuuu

SEQ ID NO: 2525868 - RNA, 16 nt, Human
guaaagacuguagaag

SEQ ID NO: 2525869 - RNA, 17 nt, Human
guaacaaugaagauaaa

SEQ ID NO: 2525870 - RNA, 16 nt, Human
guaaauuuaugugaug

SEQ ID NO: 2525871 - RNA, 17 nt, Human
guaaauuuaugugaugg

SEQ ID NO: 2525872 - RNA, 19 nt, Human
guaaauugaaucaguauaa

SEQ ID NO: 2525873 - RNA, 16 nt, Human
guaaagcauuccaaca

SEQ ID NO: 2525874 - RNA, 22 nt, Human
guaaaaugugaagugaaugaaa

SEQ ID NO: 2525875 - RNA, 20 nt, Human
guaaaaugugaagugaauga

SEQ ID NO: 2525876 - RNA, 19 nt, Human
guaaaaugugaagugaaug

SEQ ID NO: 2525877 - RNA, 12 nt, Human
guaaaaugugaa

SEQ ID NO: 2525878 - RNA, 15 nt, Human
guaaaaucuuucuuu

SEQ ID NO: 2525879 - RNA, 14 nt, Human
guaaaaucuuucuu

SEQ ID NO: 2525880 - RNA, 21 nt, Human
guaaaaucuuucuuucuuaga

SEQ ID NO: 2525881 - RNA, 19 nt, Human
guaaaauauuuugaaucaa

SEQ ID NO: 2525882 - RNA, 18 nt, Human
guaaaauauuuugaauca

SEQ ID NO: 2525883 - RNA, 21 nt, Human
guaaaauauuuugaaucaaua

SEQ ID NO: 2525884 - RNA, 21 nt, Human
guaaaauauagcuguacaaau

SEQ ID NO: 2525885 - RNA, 20 nt, Human
guaaaauauagcuguacaaa

SEQ ID NO: 2525886 - RNA, 18 nt, Human
guaaaauauagcuguaca

SEQ ID NO: 2525887 - RNA, 15 nt, Human
guaaaauauuuugaa

SEQ ID NO: 2525888 - RNA, 16 nt, Human
guaaaauauagcugua

SEQ ID NO: 2525889 - RNA, 15 nt, Human
guaaaauauagcugu

SEQ ID NO: 2525890 - RNA, 20 nt, Human
aaauaauuuuuauauuugaa

SEQ ID NO: 2525891 - RNA, 18 nt, Human
aaauaauuuuuauauuug

SEQ ID NO: 2525892 - RNA, 15 nt, Human
aaauaauuuuuauau

SEQ ID NO: 2525893 - RNA, 13 nt, Human
aaauaaugugaaa

SEQ ID NO: 2525894 - RNA, 20 nt, Human
aaauaagugguuauuucuca

SEQ ID NO: 2525895 - RNA, 12 nt, Human
aaauaaugugaa

SEQ ID NO: 2525896 - RNA, 12 nt, Human
aaauaaugucuc

SEQ ID NO: 2525897 - RNA, 13 nt, Human
aaauaaugucucu

SEQ ID NO: 2525898 - RNA, 18 nt, Human
aaauaagggcagagucac

SEQ ID NO: 2525899 - RNA, 18 nt, Human
aaaguuuugaaaagcuau

SEQ ID NO: 2525900 - RNA, 16 nt, Human
aaaguuuugaaaagcu

SEQ ID NO: 2525901 - RNA, 13 nt, Human
aaauaaaaaaaag

SEQ ID NO: 2525902 - RNA, 15 nt, Human
aaauaaaaaaaagaa

SEQ ID NO: 2525903 - RNA, 17 nt, Human
aaauaaaaaaaagaaaa

SEQ ID NO: 2525904 - RNA, 20 nt, Human
aaauaaaaaaaagaaaaaag

SEQ ID NO: 2525905 - RNA, 22 nt, Human
aaauaaaaaaaagaaaaaagag

SEQ ID NO: 2525906 - RNA, 19 nt, Human
aaaguuuugaaaagcuauu

SEQ ID NO: 2525907 - RNA, 14 nt, Human
aaaguuuugaaaag

SEQ ID NO: 2525908 - RNA, 13 nt, Human
aaaguuuugaaaa

SEQ ID NO: 2525909 - RNA, 12 nt, Human
aaaguuuugaaa

SEQ ID NO: 2525910 - RNA, 15 nt, Human
aaaguuuuccugaga

SEQ ID NO: 2525911 - RNA, 16 nt, Human
aaaguuuuauuuuucu

SEQ ID NO: 2525912 - RNA, 15 nt, Human
aaaguuuucccuuga

SEQ ID NO: 2525913 - RNA, 16 nt, Human
aaaguuuguugaaaca

SEQ ID NO: 2525914 - RNA, 17 nt, Human
aaaguuucucagauccu

SEQ ID NO: 2525915 - RNA, 13 nt, Human
aaaguuucucaga

SEQ ID NO: 2525916 - RNA, 12 nt, Human
aaaguuucucag

SEQ ID NO: 2525917 - RNA, 16 nt, Human
aaaguuugcuuagaaa

SEQ ID NO: 2525918 - RNA, 15 nt, Human
aaaguuugcuuagaa

SEQ ID NO: 2525919 - RNA, 13 nt, Human
aaaguuugccaga

SEQ ID NO: 2525920 - RNA, 15 nt, Human
aaaguuugccagaag

SEQ ID NO: 2525921 - RNA, 22 nt, Human
aaaguuuacaguaaauaaauug

SEQ ID NO: 2525922 - RNA, 21 nt, Human
aaaguuuacaguaaauaaauu

SEQ ID NO: 2525923 - RNA, 18 nt, Human
aaaguuuacaguaaauaa

SEQ ID NO: 2525924 - RNA, 15 nt, Human
aaaguuuacaguaaa

SEQ ID NO: 2525925 - RNA, 14 nt, Human
aaaguuuccauaug

SEQ ID NO: 2525926 - RNA, 13 nt, Human
aaaguuuccauau

SEQ ID NO: 2525927 - RNA, 13 nt, Human
aaaguuucaaugu

SEQ ID NO: 2525928 - RNA, 12 nt, Human
aaaguuucaaug

SEQ ID NO: 2525929 - RNA, 23 nt, Human
aaaguuucucuuuucaaaacauu

SEQ ID NO: 2525930 - RNA, 21 nt, Human
aaaguuucucuuuucaaaaca

SEQ ID NO: 2525931 - RNA, 19 nt, Human
aaaguuuacaaguguauau

SEQ ID NO: 2525932 - RNA, 18 nt, Human
aaaguugcacggcugcug

SEQ ID NO: 2525933 - RNA, 23 nt, Human
aaaguucccuacuuccugugacu

SEQ ID NO: 2525934 - RNA, 19 nt, Human
aaaguguggucccaacagg

SEQ ID NO: 2525935 - RNA, 13 nt, Human
aaaguguguauua

SEQ ID NO: 2525936 - RNA, 12 nt, Human
aaaguguguauu

SEQ ID NO: 2525937 - RNA, 22 nt, Human
aaagugugcuuuaugcugaaac

SEQ ID NO: 2525938 - RNA, 23 nt, Human
aaagugugcuuuaugcugaaaca

SEQ ID NO: 2525939 - RNA, 22 nt, Human
aaagugugagcagugaguuaca

SEQ ID NO: 2525940 - RNA, 13 nt, Human
aaagugugcuuua

SEQ ID NO: 2525941 - RNA, 14 nt, Human
aaagugugcuuuau

SEQ ID NO: 2525942 - RNA, 19 nt, Human
aaagugugcuuuaugcuga

SEQ ID NO: 2525943 - RNA, 14 nt, Human
aaagugugagcagu

SEQ ID NO: 2525944 - RNA, 18 nt, Human
aaagugugagcaaacuaa

SEQ ID NO: 2525945 - RNA, 20 nt, Human
aaaguguaaauccuuuuucu

SEQ ID NO: 2525946 - RNA, 23 nt, Human
aaaguguccauugacauguacag

SEQ ID NO: 2525947 - RNA, 22 nt, Human
aaaguguccauugacauguaca

SEQ ID NO: 2525948 - RNA, 21 nt, Human
aaaguguccauugacauguac

SEQ ID NO: 2525949 - RNA, 19 nt, Human
aaaguguccauugacaugu

SEQ ID NO: 2525950 - RNA, 20 nt, Human
aaaguguguuguugcuuuag

SEQ ID NO: 2525951 - RNA, 14 nt, Human
aaaguguguuguug

SEQ ID NO: 2525952 - RNA, 23 nt, Human
aaaguguguauuaaaaaaaacaa

SEQ ID NO: 2525953 - RNA, 22 nt, Human
aaaguguguauuaaaaaaaaca

SEQ ID NO: 2525954 - RNA, 17 nt, Human
aaaguguguauuaaaaa

SEQ ID NO: 2525955 - RNA, 15 nt, Human
aaaguguguauuaaa

SEQ ID NO: 2525956 - RNA, 14 nt, Human
aaaguguguauuaa

SEQ ID NO: 2525957 - RNA, 17 nt, Human
aaaguguguuguugcuu

SEQ ID NO: 2525958 - RNA, 21 nt, Human
aaaguucccuacuuccuguga

SEQ ID NO: 2525959 - RNA, 22 nt, Human
aaaguucauagggucucuucag

SEQ ID NO: 2525960 - RNA, 22 nt, Human
aaaguguaaagcauuccaacaa

SEQ ID NO: 2525961 - RNA, 18 nt, Human
aaaguguaaagcauucca

SEQ ID NO: 2525962 - RNA, 17 nt, Human
aaaguguaaagcauucc

SEQ ID NO: 2525963 - RNA, 16 nt, Human
aaaguguaaagcauuc

SEQ ID NO: 2525964 - RNA, 15 nt, Human
aaaguguaaagcauu

SEQ ID NO: 2525965 - RNA, 13 nt, Human
aaaguguaaagca

SEQ ID NO: 2525966 - RNA, 12 nt, Human
aaaguguaaagc

SEQ ID NO: 2525967 - RNA, 11 nt, Human
aaaguguaaag

SEQ ID NO: 2525968 - RNA, 14 nt, Human
aaagugguuguuag

SEQ ID NO: 2525969 - RNA, 22 nt, Human
aaaguggugcucaguuguagaa

SEQ ID NO: 2525970 - RNA, 21 nt, Human
aaaguggugcucaguuguaga

SEQ ID NO: 2525971 - RNA, 19 nt, Human
aaaguggugcucaguugua

SEQ ID NO: 2525972 - RNA, 21 nt, Human
gguuuggcugugucuaaacug

SEQ ID NO: 2525973 - RNA, 15 nt, Human
gguuuggcugugucu

SEQ ID NO: 2525974 - RNA, 16 nt, Human
aaaguggugcucaguu

SEQ ID NO: 2525975 - RNA, 12 nt, Human
aaaguggugaga

SEQ ID NO: 2525976 - RNA, 17 nt, Human
gguuuggcgggccaagg

SEQ ID NO: 2525977 - RNA, 19 nt, Human
gguuuggcgggccaaggac

SEQ ID NO: 2525978 - RNA, 19 nt, Human
gguuuggaccccagcuggg

SEQ ID NO: 2525979 - RNA, 23 nt, Human
gguuuggccaucucuggaugccu

SEQ ID NO: 2525980 - RNA, 14 nt, Human
gguuuggcgggcca

SEQ ID NO: 2525981 - RNA, 22 nt, Human
gguuucuucaacaggagaauuu

SEQ ID NO: 2525982 - RNA, 15 nt, Human
gguuucuggucucua

SEQ ID NO: 2525983 - RNA, 22 nt, Human
gguuugacuccgcuggaggugg

SEQ ID NO: 2525984 - RNA, 18 nt, Human
gguuugaauauaaacacu

SEQ ID NO: 2525985 - RNA, 17 nt, Human
gguuugaagccuggaac

SEQ ID NO: 2525986 - RNA, 15 nt, Human
gguuugaagccugga

SEQ ID NO: 2525987 - RNA, 15 nt, Human
gguuugaauauaaac

SEQ ID NO: 2525988 - RNA, 20 nt, Human
gguuuggaccccagcuggga

SEQ ID NO: 2525989 - RNA, 12 nt, Human
gguuuggacccc

SEQ ID NO: 2525990 - RNA, 15 nt, Human
gguuuggaaugcuuc

SEQ ID NO: 2525991 - RNA, 18 nt, Human
gguuugcagaugacaaaa

SEQ ID NO: 2525992 - RNA, 14 nt, Human
gguuugcaaggaag

SEQ ID NO: 2525993 - RNA, 16 nt, Human
gguuugccugagggcg

SEQ ID NO: 2525994 - RNA, 13 nt, Human
gguccugagaccu

SEQ ID NO: 2525995 - RNA, 15 nt, Human
gguccucuugccucc

SEQ ID NO: 2525996 - RNA, 13 nt, Human
gguccucugucag

SEQ ID NO: 2525997 - RNA, 21 nt, Human
gguccucugucagucacagcc

SEQ ID NO: 2525998 - RNA, 23 nt, Human
gguccucugucagucacagccac

SEQ ID NO: 2525999 - RNA, 23 nt, Human
gguccugcugcaguugccaguca

SEQ ID NO: 2526000 - RNA, 21 nt, Human
gguccugcugcaguugccagu

SEQ ID NO: 2526001 - RNA, 21 nt, Human
gguccucugauacccagagca

SEQ ID NO: 2526002 - RNA, 14 nt, Human
gguccucagagaau

SEQ ID NO: 2526003 - RNA, 21 nt, Human
gguccucagagaauuucuacc

SEQ ID NO: 2526004 - RNA, 21 nt, Human
aaagcaacuguuaugaaauaa

SEQ ID NO: 2526005 - RNA, 21 nt, Human
aaagcaacugucuauuucugc

SEQ ID NO: 2526006 - RNA, 14 nt, Human
aaagcaagacuguu

SEQ ID NO: 2526007 - RNA, 13 nt, Human
aaagcaaaugucu

SEQ ID NO: 2526008 - RNA, 19 nt, Human
aaagcaacugucuauuucu

SEQ ID NO: 2526009 - RNA, 16 nt, Human
aaagcaaaugugaccu

SEQ ID NO: 2526010 - RNA, 23 nt, Human
aaagauugaaguauuuugcugga

SEQ ID NO: 2526011 - RNA, 19 nt, Human
aaagauugcugaaauuuua

SEQ ID NO: 2526012 - RNA, 21 nt, Human
aaagauugcugaaauuuuaua

SEQ ID NO: 2526013 - RNA, 13 nt, Human
aaagauuuaucaa

SEQ ID NO: 2526014 - RNA, 12 nt, Human
aaagauuuauca

SEQ ID NO: 2526015 - RNA, 15 nt, Human
aaagacuauucaaac

SEQ ID NO: 2526016 - RNA, 23 nt, Human
aaagacuaauuuaaaaaauaacu

SEQ ID NO: 2526017 - RNA, 20 nt, Human
aaagacuaauuuaaaaaaua

SEQ ID NO: 2526018 - RNA, 14 nt, Human
aaagacuaauuuaa

SEQ ID NO: 2526019 - RNA, 13 nt, Human
aaagcaaaggaga

SEQ ID NO: 2526020 - RNA, 13 nt, Human
aaagcaaaugaga

SEQ ID NO: 2526021 - RNA, 13 nt, Human
aaagauuuucaga

SEQ ID NO: 2526022 - RNA, 14 nt, Human
aaagcaaaacaaaa

SEQ ID NO: 2526023 - RNA, 14 nt, Human
aaagauuucuugag

SEQ ID NO: 2526024 - RNA, 15 nt, Human
aaagauuuuaaucaa

SEQ ID NO: 2526025 - RNA, 18 nt, Human
aaagauuuuaaucaaguu

SEQ ID NO: 2526026 - RNA, 14 nt, Human
aaagauuuuaauca

SEQ ID NO: 2526027 - RNA, 14 nt, Human
ggucgcuccugccc

SEQ ID NO: 2526028 - RNA, 13 nt, Human
ggucgcuccugcc

SEQ ID NO: 2526029 - RNA, 12 nt, Human
ggucgcuccugc

SEQ ID NO: 2526030 - RNA, 13 nt, Human
ggucggaaaacau

SEQ ID NO: 2526031 - RNA, 20 nt, Human
ggucgcccuggacugugugc

SEQ ID NO: 2526032 - RNA, 21 nt, Human
gguccuggccaucccacaagu

SEQ ID NO: 2526033 - RNA, 23 nt, Human
gguccuggggcucugugcaggga

SEQ ID NO: 2526034 - RNA, 21 nt, Human
gguccuggagcagaccacccc

SEQ ID NO: 2526035 - RNA, 17 nt, Human
gguccuggagcagacca

SEQ ID NO: 2526036 - RNA, 14 nt, Human
gguccugcugcagu

SEQ ID NO: 2526037 - RNA, 12 nt, Human
gguccuggccau

SEQ ID NO: 2526038 - RNA, 13 nt, Human
gguccuggccauc

SEQ ID NO: 2526039 - RNA, 14 nt, Human
gguccuggccaucc

SEQ ID NO: 2526040 - RNA, 16 nt, Human
gguccuggccauccca

SEQ ID NO: 2526041 - RNA, 12 nt, Human
gguccuggcucc

SEQ ID NO: 2526042 - RNA, 12 nt, Human
gguccuggggcc

SEQ ID NO: 2526043 - RNA, 16 nt, Human
gguccuggcuccugag

SEQ ID NO: 2526044 - RNA, 14 nt, Human
gguccuggcuccug

SEQ ID NO: 2526045 - RNA, 15 nt, Human
gguccuggcuccuga

SEQ ID NO: 2526046 - RNA, 14 nt, Human
gguccuggggccuc

SEQ ID NO: 2526047 - RNA, 12 nt, Human
gguccuggggcu

SEQ ID NO: 2526048 - RNA, 15 nt, Human
gguccuggggcucug

SEQ ID NO: 2526049 - RNA, 22 nt, Human
gguccuggggcucugugcaggg

SEQ ID NO: 2526050 - RNA, 17 nt, Human
ggucuacacugugcuga

SEQ ID NO: 2526051 - RNA, 14 nt, Human
ggucuagggagaga

SEQ ID NO: 2526052 - RNA, 18 nt, Human
ggucuaaagugagcucua

SEQ ID NO: 2526053 - RNA, 11 nt, Human
ggucugugugu

SEQ ID NO: 2526054 - RNA, 17 nt, Human
ggucuguguguguguau

SEQ ID NO: 2526055 - RNA, 22 nt, Human
ggucugugccaaagaagaaucc

SEQ ID NO: 2526056 - RNA, 13 nt, Human
ggucugugucucu

SEQ ID NO: 2526057 - RNA, 18 nt, Human
ggucugugucucuuuucu

SEQ ID NO: 2526058 - RNA, 19 nt, Human
ggucugugucucuuuucuc

SEQ ID NO: 2526059 - RNA, 20 nt, Human
ggucgguagguucagccaag

SEQ ID NO: 2526060 - RNA, 16 nt, Human
ggucggaggcuuggga

SEQ ID NO: 2526061 - RNA, 14 nt, Human
ggucggaccagcuu

SEQ ID NO: 2526062 - RNA, 14 nt, Human
ggucggaaaacaug

SEQ ID NO: 2526063 - RNA, 13 nt, Human
ggucggaccagcu

SEQ ID NO: 2526064 - RNA, 15 nt, Human
ggucggaacccaagc

SEQ ID NO: 2526065 - RNA, 22 nt, Human
ggucgcuuacuuugagugaucc

SEQ ID NO: 2526066 - RNA, 20 nt, Human
ggugcaaugaccuuucaaua

SEQ ID NO: 2526067 - RNA, 19 nt, Human
ggugcaaugaccuuucaau

SEQ ID NO: 2526068 - RNA, 18 nt, Human
ggugcaaugaccuuucaa

SEQ ID NO: 2526069 - RNA, 20 nt, Human
ggucuucccuaccucaggca

SEQ ID NO: 2526070 - RNA, 22 nt, Human
ggucuucccuaccucaggcagg

SEQ ID NO: 2526071 - RNA, 20 nt, Human
ggucuguuuuccuuucucac

SEQ ID NO: 2526072 - RNA, 20 nt, Human
ggucuguuggcaggcuggcc

SEQ ID NO: 2526073 - RNA, 19 nt, Human
ggucuguuggcaggcuggc

SEQ ID NO: 2526074 - RNA, 20 nt, Human
ggucuguguguguguaugug

SEQ ID NO: 2526075 - RNA, 21 nt, Human
ggucuguguguguguaugugg

SEQ ID NO: 2526076 - RNA, 17 nt, Human
ggucuguuuuccuuucu

SEQ ID NO: 2526077 - RNA, 18 nt, Human
ggucuucagccucuuucu

SEQ ID NO: 2526078 - RNA, 20 nt, Human
ggucuucccaggcuggggcu

SEQ ID NO: 2526079 - RNA, 17 nt, Human
ggucuucccaggcuggg

SEQ ID NO: 2526080 - RNA, 17 nt, Human
ggucuucccuaccucag

SEQ ID NO: 2526081 - RNA, 13 nt, Human
ggucuucccaggc

SEQ ID NO: 2526082 - RNA, 14 nt, Human
ggucuucagccauc

SEQ ID NO: 2526083 - RNA, 19 nt, Human
ggucuucagggggccaggu

SEQ ID NO: 2526084 - RNA, 19 nt, Human
ggugccagcaaagccccau

SEQ ID NO: 2526085 - RNA, 18 nt, Human
ggugccagcaaagcccca

SEQ ID NO: 2526086 - RNA, 17 nt, Human
ggugccagcaaagcccc

SEQ ID NO: 2526087 - RNA, 16 nt, Human
ggugccagcaaagccc

SEQ ID NO: 2526088 - RNA, 15 nt, Human
ggugccagcaaagcc

SEQ ID NO: 2526089 - RNA, 13 nt, Human
ggugccagcaaag

SEQ ID NO: 2526090 - RNA, 12 nt, Human
ggugccagcaaa

SEQ ID NO: 2526091 - RNA, 18 nt, Human
ggugccacaaauaaaaug

SEQ ID NO: 2526092 - RNA, 22 nt, Human
ggugccaauggaaccuccuuuc

SEQ ID NO: 2526093 - RNA, 22 nt, Human
ggugccaacaguguuaggccug

SEQ ID NO: 2526094 - RNA, 23 nt, Human
ggugccaauuucaaguuccaagu

SEQ ID NO: 2526095 - RNA, 23 nt, Human
ggugccaaacaaaaagguucuca

SEQ ID NO: 2526096 - RNA, 22 nt, Human
ggucuucuuacaugcauuugag

SEQ ID NO: 2526097 - RNA, 20 nt, Human
ggugccagccuuccucugca

SEQ ID NO: 2526098 - RNA, 15 nt, Human
ggugccagccuuccu

SEQ ID NO: 2526099 - RNA, 14 nt, Human
ggugccagccuucc

SEQ ID NO: 2526100 - RNA, 17 nt, Human
ggugccagcaacugaau

SEQ ID NO: 2526101 - RNA, 19 nt, Human
ggugccagcaacugaauaa

SEQ ID NO: 2526102 - RNA, 15 nt, Human
ggugccagcaacuga

SEQ ID NO: 2526103 - RNA, 14 nt, Human
ggugccagcaacug

SEQ ID NO: 2526104 - RNA, 20 nt, Human
ggugcugggccccugccucu

SEQ ID NO: 2526105 - RNA, 17 nt, Human
ggugccagguuuucugg

SEQ ID NO: 2526106 - RNA, 23 nt, Human
ggugccagccuuccucugcagcu

SEQ ID NO: 2526107 - RNA, 21 nt, Human
ggugccagguuuucugggugu

SEQ ID NO: 2526108 - RNA, 19 nt, Human
ggugcugggccccugccuc

SEQ ID NO: 2526109 - RNA, 23 nt, Human
ggugcuguccucagguggccaug

SEQ ID NO: 2526110 - RNA, 20 nt, Human
ggugcuguccucagguggcc

SEQ ID NO: 2526111 - RNA, 19 nt, Human
ggugcuguccucagguggc

SEQ ID NO: 2526112 - RNA, 15 nt, Human
ggugcuguccucagg

SEQ ID NO: 2526113 - RNA, 20 nt, Human
gguggcaaggcugugcuccc

SEQ ID NO: 2526114 - RNA, 17 nt, Human
gguggcaaggcugugcu

SEQ ID NO: 2526115 - RNA, 13 nt, Human
gguggcaagagcc

SEQ ID NO: 2526116 - RNA, 17 nt, Human
gguggcacaggcccccu

SEQ ID NO: 2526117 - RNA, 16 nt, Human
aaagcagcguuucuau

SEQ ID NO: 2526118 - RNA, 18 nt, Human
aaagcagcguuucuauga

SEQ ID NO: 2526119 - RNA, 22 nt, Human
aaagcagcguuucuaugacaca

SEQ ID NO: 2526120 - RNA, 21 nt, Human
gguggaugccugguggcagcu

SEQ ID NO: 2526121 - RNA, 20 nt, Human
ggugcuuaagcagaagcauu

SEQ ID NO: 2526122 - RNA, 18 nt, Human
ggugcuuaagcagaagca

SEQ ID NO: 2526123 - RNA, 14 nt, Human
gguggauggcccca

SEQ ID NO: 2526124 - RNA, 22 nt, Human
gguggauggccccagcacagcu

SEQ ID NO: 2526125 - RNA, 17 nt, Human
ggugcuuacacaucuca

SEQ ID NO: 2526126 - RNA, 19 nt, Human
ggugcuguggccaggguga

SEQ ID NO: 2526127 - RNA, 16 nt, Human
ggugcuguggccaggg

SEQ ID NO: 2526128 - RNA, 14 nt, Human
gguggaugccuggu

SEQ ID NO: 2526129 - RNA, 13 nt, Human
aaagcaugaaugg

SEQ ID NO: 2526130 - RNA, 20 nt, Human
aaagcaucauggcuaucugu

SEQ ID NO: 2526131 - RNA, 13 nt, Human
aaagcauccaugu

SEQ ID NO: 2526132 - RNA, 16 nt, Human
aaagcaucaccucagg

SEQ ID NO: 2526133 - RNA, 17 nt, Human
aaagcaucaccucaggc

SEQ ID NO: 2526134 - RNA, 18 nt, Human
aaagcaucaccucaggcc

SEQ ID NO: 2526135 - RNA, 16 nt, Human
aaagcaucacuuggga

SEQ ID NO: 2526136 - RNA, 15 nt, Human
aaagcauaaaugcaa

SEQ ID NO: 2526137 - RNA, 18 nt, Human
aaagcagcucuccccuca

SEQ ID NO: 2526138 - RNA, 17 nt, Human
aaagcagggacuugaac

SEQ ID NO: 2526139 - RNA, 19 nt, Human
aaagcaggcagaacucauc

SEQ ID NO: 2526140 - RNA, 17 nt, Human
aaagcaggcagaacuca

SEQ ID NO: 2526141 - RNA, 15 nt, Human
aaagcagcguuucua

SEQ ID NO: 2526142 - RNA, 18 nt, Human
aaagcagcucaaaggcac

SEQ ID NO: 2526143 - RNA, 19 nt, Human
aaagcagcucaaaggcaca

SEQ ID NO: 2526144 - RNA, 15 nt, Human
aaagcagcucucccc

SEQ ID NO: 2526145 - RNA, 20 nt, Human
gguaacaggcagauacagga

SEQ ID NO: 2526146 - RNA, 14 nt, Human
gguaacaggcagau

SEQ ID NO: 2526147 - RNA, 21 nt, Human
gguaacaguucauguuugcuu

SEQ ID NO: 2526148 - RNA, 22 nt, Human
gguaacauccuuucuauugaaa

SEQ ID NO: 2526149 - RNA, 15 nt, Human
gguaauaaacuuaga

SEQ ID NO: 2526150 - RNA, 19 nt, Human
gguaauaaguacuguguac

SEQ ID NO: 2526151 - RNA, 18 nt, Human
gguaacuagggaagauaa

SEQ ID NO: 2526152 - RNA, 13 nt, Human
gguaacaggcaga

SEQ ID NO: 2526153 - RNA, 17 nt, Human
ggguuucuaaagcugcc

SEQ ID NO: 2526154 - RNA, 22 nt, Human
ggguuucugagcugcucugaau

SEQ ID NO: 2526155 - RNA, 20 nt, Human
ggguuucgucauguuggcca

SEQ ID NO: 2526156 - RNA, 17 nt, Human
ggguuucgagaagcugc

SEQ ID NO: 2526157 - RNA, 13 nt, Human
gggugugggaggc

SEQ ID NO: 2526158 - RNA, 13 nt, Human
ggguuuuaaugua

SEQ ID NO: 2526159 - RNA, 21 nt, Human
ggguuuggcugugucuaaacu

SEQ ID NO: 2526160 - RNA, 20 nt, Human
ggguuuuauuguuuaaaauc

SEQ ID NO: 2526161 - RNA, 14 nt, Human
ggguuuuauauuuu

SEQ ID NO: 2526162 - RNA, 19 nt, Human
ggguuuggaccccagcugg

SEQ ID NO: 2526163 - RNA, 18 nt, Human
ggguuuggaccccagcug

SEQ ID NO: 2526164 - RNA, 18 nt, Human
ggguuugaggauaggagu

SEQ ID NO: 2526165 - RNA, 21 nt, Human
ggguuuggaccccagcuggga

SEQ ID NO: 2526166 - RNA, 20 nt, Human
ggguuuggaccccagcuggg

SEQ ID NO: 2526167 - RNA, 20 nt, Human
ggguuuggcgggccaaggac

SEQ ID NO: 2526168 - RNA, 22 nt, Human
ggguuuggcgggccaaggacug

SEQ ID NO: 2526169 - RNA, 20 nt, Human
gguaaucuugcucugcuuga

SEQ ID NO: 2526170 - RNA, 18 nt, Human
gguaaucgaccugccucg

SEQ ID NO: 2526171 - RNA, 14 nt, Human
gguaaucgaccugc

SEQ ID NO: 2526172 - RNA, 17 nt, Human
gguaaucgaccugccuc

SEQ ID NO: 2526173 - RNA, 24 nt, Human
gguacaaccuguucugcuuuccuc

SEQ ID NO: 2526174 - RNA, 23 nt, Human
gguaauuauuuugguacuuuuau

SEQ ID NO: 2526175 - RNA, 22 nt, Human
gguaauuguugcuaaucuucuu

SEQ ID NO: 2526176 - RNA, 23 nt, Human
gguacaaccuguucugcuuuccu

SEQ ID NO: 2526177 - RNA, 15 nt, Human
gguaccaaugcugca

SEQ ID NO: 2526178 - RNA, 17 nt, Human
gguaccagauaaaauua

SEQ ID NO: 2526179 - RNA, 14 nt, Human
gguaccacugauuu

SEQ ID NO: 2526180 - RNA, 15 nt, Human
gguagcuagaggaac

SEQ ID NO: 2526181 - RNA, 20 nt, Human
gguagcccuggccagaggcu

SEQ ID NO: 2526182 - RNA, 17 nt, Human
gguagcuagaggaacca

SEQ ID NO: 2526183 - RNA, 16 nt, Human
gguagcccgccugcca

SEQ ID NO: 2526184 - RNA, 15 nt, Human
gguagcccuggccag

SEQ ID NO: 2526185 - RNA, 18 nt, Human
gguagcccuggccagagg

SEQ ID NO: 2526186 - RNA, 18 nt, Human
gguacauuucccugugcu

SEQ ID NO: 2526187 - RNA, 15 nt, Human
gguacauuucccugu

SEQ ID NO: 2526188 - RNA, 17 nt, Human
ggguggaugccuggugg

SEQ ID NO: 2526189 - RNA, 15 nt, Human
ggguggcaccagcag

SEQ ID NO: 2526190 - RNA, 12 nt, Human
ggggccuggcag

SEQ ID NO: 2526191 - RNA, 11 nt, Human
ggggccuggca

SEQ ID NO: 2526192 - RNA, 13 nt, Human
ggguggaugccug

SEQ ID NO: 2526193 - RNA, 19 nt, Human
gggugggacacccugugau

SEQ ID NO: 2526194 - RNA, 16 nt, Human
ggggccuggaccugcc

SEQ ID NO: 2526195 - RNA, 15 nt, Human
ggggccuggaccugc

SEQ ID NO: 2526196 - RNA, 14 nt, Human
gggugggagagccc

SEQ ID NO: 2526197 - RNA, 19 nt, Human
gggugggagagcccagcca

SEQ ID NO: 2526198 - RNA, 20 nt, Human
ggguggggaccucaggccug

SEQ ID NO: 2526199 - RNA, 15 nt, Human
gggugggcaggaaaa

SEQ ID NO: 2526200 - RNA, 13 nt, Human
gggugggccaggc

SEQ ID NO: 2526201 - RNA, 19 nt, Human
gggugggccaggcugaugg

SEQ ID NO: 2526202 - RNA, 23 nt, Human
ggguggauuuggguuggaaguga

SEQ ID NO: 2526203 - RNA, 17 nt, Human
gggugggauggaggaga

SEQ ID NO: 2526204 - RNA, 16 nt, Human
ggguguggcccugcca

SEQ ID NO: 2526205 - RNA, 12 nt, Human
ggguguggcagu

SEQ ID NO: 2526206 - RNA, 13 nt, Human
gggugugcuggga

SEQ ID NO: 2526207 - RNA, 23 nt, Human
gggugucuugggcagagcuggcu

SEQ ID NO: 2526208 - RNA, 21 nt, Human
gggugugcaaugucugaguga

SEQ ID NO: 2526209 - RNA, 17 nt, Human
gggugugcacaucucug

SEQ ID NO: 2526210 - RNA, 17 nt, Human
ggguguggcgcagcaua

SEQ ID NO: 2526211 - RNA, 21 nt, Human
gggugucuugggcagagcugg

SEQ ID NO: 2526212 - RNA, 15 nt, Human
gggugucuugggcag

SEQ ID NO: 2526213 - RNA, 21 nt, Human
ggguggggucaugcccuccuc

SEQ ID NO: 2526214 - RNA, 16 nt, Human
ggguggucugcaggca

SEQ ID NO: 2526215 - RNA, 13 nt, Human
gggugguccugac

SEQ ID NO: 2526216 - RNA, 18 nt, Human
ggguggggggggugcugg

SEQ ID NO: 2526217 - RNA, 22 nt, Human
ggguggggaauguuugggcaga

SEQ ID NO: 2526218 - RNA, 13 nt, Human
gggugggccucug

SEQ ID NO: 2526219 - RNA, 12 nt, Human
gggugggccucu

SEQ ID NO: 2526220 - RNA, 14 nt, Human
gggugggccaggcu

SEQ ID NO: 2526221 - RNA, 15 nt, Human
ggguggggggggugc

SEQ ID NO: 2526222 - RNA, 12 nt, Human
ggguggugaccu

SEQ ID NO: 2526223 - RNA, 12 nt, Human
ggguggguauaa

SEQ ID NO: 2526224 - RNA, 17 nt, Human
ggguggggucaugcccu

SEQ ID NO: 2526225 - RNA, 23 nt, Human
ggguggggacguccugccaccug

SEQ ID NO: 2526226 - RNA, 16 nt, Human
gggugggguagggcug

SEQ ID NO: 2526227 - RNA, 17 nt, Human
gggugggguagggcuga

SEQ ID NO: 2526228 - RNA, 19 nt, Human
aaagacaaaucaaagcaga

SEQ ID NO: 2526229 - RNA, 16 nt, Human
aaagacaaaucaaagc

SEQ ID NO: 2526230 - RNA, 16 nt, Human
aaagacaaauucuguu

SEQ ID NO: 2526231 - RNA, 17 nt, Human
aaagacaaauucuguuu

SEQ ID NO: 2526232 - RNA, 11 nt, Human
aaagacaauuc

SEQ ID NO: 2526233 - RNA, 17 nt, Human
aaagacaagacuucagu

SEQ ID NO: 2526234 - RNA, 13 nt, Human
aaagacaagacuu

SEQ ID NO: 2526235 - RNA, 19 nt, Human
aaagacaaauucuguuucu

SEQ ID NO: 2526236 - RNA, 22 nt, Human
aaagacaaauucuguuucuuga

SEQ ID NO: 2526237 - RNA, 22 nt, Human
aaagaaugagaaggagucagaa

SEQ ID NO: 2526238 - RNA, 16 nt, Human
aaagaaugaaagagua

SEQ ID NO: 2526239 - RNA, 14 nt, Human
aaagaaugaaagag

SEQ ID NO: 2526240 - RNA, 13 nt, Human
aaagaaugaaaga

SEQ ID NO: 2526241 - RNA, 16 nt, Human
aaagacaauucuuuau

SEQ ID NO: 2526242 - RNA, 15 nt, Human
aaagacaauucuuua

SEQ ID NO: 2526243 - RNA, 13 nt, Human
aaagacaauucuu

SEQ ID NO: 2526244 - RNA, 12 nt, Human
aaagacaauucu

SEQ ID NO: 2526245 - RNA, 19 nt, Human
aaagacaauucuuuauaca

SEQ ID NO: 2526246 - RNA, 17 nt, Human
aaagacaauucuuuaua

SEQ ID NO: 2526247 - RNA, 20 nt, Human
aaagacaauucuuuauacaa

SEQ ID NO: 2526248 - RNA, 19 nt, Human
aaagacaccuacugagugg

SEQ ID NO: 2526249 - RNA, 13 nt, Human
aaagacaccuacu

SEQ ID NO: 2526250 - RNA, 14 nt, Human
aaagacuauucaaa

SEQ ID NO: 2526251 - RNA, 17 nt, Human
aaagacuaucuaaaugu

SEQ ID NO: 2526252 - RNA, 17 nt, Human
aaacuuuaccuuuuuua

SEQ ID NO: 2526253 - RNA, 22 nt, Human
aaacuuuaccuuuuuuauacau

SEQ ID NO: 2526254 - RNA, 15 nt, Human
gguccauagagagca

SEQ ID NO: 2526255 - RNA, 17 nt, Human
gguccauggaaugcuug

SEQ ID NO: 2526256 - RNA, 13 nt, Human
gguccaugggcag

SEQ ID NO: 2526257 - RNA, 21 nt, Human
gguccaggguugaucacacuc

SEQ ID NO: 2526258 - RNA, 13 nt, Human
gguccaggguuga

SEQ ID NO: 2526259 - RNA, 12 nt, Human
aaacuuuacuau

SEQ ID NO: 2526260 - RNA, 14 nt, Human
gguccaugggcaga

SEQ ID NO: 2526261 - RNA, 18 nt, Human
aaacuuuacuaagaugac

SEQ ID NO: 2526262 - RNA, 18 nt, Human
aaacuuuacuauggcccu

SEQ ID NO: 2526263 - RNA, 17 nt, Human
aaagaauacagaaagau

SEQ ID NO: 2526264 - RNA, 15 nt, Human
aaagaaguuugauau

SEQ ID NO: 2526265 - RNA, 15 nt, Human
aaagaauacagaaag

SEQ ID NO: 2526266 - RNA, 18 nt, Human
aaagaaguggggacagag

SEQ ID NO: 2526267 - RNA, 21 nt, Human
aaacuuuacuaagaugacauu

SEQ ID NO: 2526268 - RNA, 19 nt, Human
aaacuuuacuaagaugaca

SEQ ID NO: 2526269 - RNA, 16 nt, Human
gguccacccaggagcc

SEQ ID NO: 2526270 - RNA, 15 nt, Human
gguccacccaggagc

SEQ ID NO: 2526271 - RNA, 13 nt, Human
gguccacccagga

SEQ ID NO: 2526272 - RNA, 12 nt, Human
gguccacccagg

SEQ ID NO: 2526273 - RNA, 23 nt, Human
gguccaggggccccuccagcuug

SEQ ID NO: 2526274 - RNA, 22 nt, Human
gguccaggggccccuccagcuu

SEQ ID NO: 2526275 - RNA, 20 nt, Human
gguccaggggccccuccagc

SEQ ID NO: 2526276 - RNA, 17 nt, Human
gguccaggggccccucc

SEQ ID NO: 2526277 - RNA, 15 nt, Human
gguccaggggccccu

SEQ ID NO: 2526278 - RNA, 16 nt, Human
gguccacccagcaaag

SEQ ID NO: 2526279 - RNA, 12 nt, Human
gguccagggcua

SEQ ID NO: 2526280 - RNA, 11 nt, Human
gguccagggaa

SEQ ID NO: 2526281 - RNA, 21 nt, Human
gguccagggaagcuggccgag

SEQ ID NO: 2526282 - RNA, 16 nt, Human
gguccagggagcaggc

SEQ ID NO: 2526283 - RNA, 12 nt, Human
gguccagggagc

SEQ ID NO: 2526284 - RNA, 17 nt, Human
gguccacccaggagccc

SEQ ID NO: 2526285 - RNA, 17 nt, Human
gguccacaucccgggac

SEQ ID NO: 2526286 - RNA, 20 nt, Human
gguccacaggaagugaagaa

SEQ ID NO: 2526287 - RNA, 12 nt, Human
gguagcuguaag

SEQ ID NO: 2526288 - RNA, 19 nt, Human
gguagcugccccuggcucu

SEQ ID NO: 2526289 - RNA, 13 nt, Human
gguagcucaggug

SEQ ID NO: 2526290 - RNA, 12 nt, Human
gguagcucaggu

SEQ ID NO: 2526291 - RNA, 17 nt, Human
gguagcucaggugggcg

SEQ ID NO: 2526292 - RNA, 15 nt, Human
gguagcugccccugg

SEQ ID NO: 2526293 - RNA, 17 nt, Human
gguagcuuugaggugga

SEQ ID NO: 2526294 - RNA, 21 nt, Human
gguagcuguaaggcaugaagg

SEQ ID NO: 2526295 - RNA, 18 nt, Human
gguagcugccccuggcuc

SEQ ID NO: 2526296 - RNA, 14 nt, Human
gguagcuuuucccu

SEQ ID NO: 2526297 - RNA, 21 nt, Human
gguaugaccuucuaggaagcu

SEQ ID NO: 2526298 - RNA, 22 nt, Human
gguaugaucacggcucacugca

SEQ ID NO: 2526299 - RNA, 14 nt, Human
gguaugcaaucaaa

SEQ ID NO: 2526300 - RNA, 14 nt, Human
gguaugagcugagg

SEQ ID NO: 2526301 - RNA, 16 nt, Human
gguaugagcugagggg

SEQ ID NO: 2526302 - RNA, 15 nt, Human
gguaugagcugaggg

SEQ ID NO: 2526303 - RNA, 15 nt, Human
gguauggaacucucu

SEQ ID NO: 2526304 - RNA, 16 nt, Human
gguccacaacacacag

SEQ ID NO: 2526305 - RNA, 18 nt, Human
gggcugcacucugugccc

SEQ ID NO: 2526306 - RNA, 16 nt, Human
gggcugcacucugugc

SEQ ID NO: 2526307 - RNA, 14 nt, Human
gggcucacacaccu

SEQ ID NO: 2526308 - RNA, 18 nt, Human
gggcucagagugggguag

SEQ ID NO: 2526309 - RNA, 18 nt, Human
gggcugcaugcgggcuuc

SEQ ID NO: 2526310 - RNA, 21 nt, Human
gggcugcaugcgggcuuccuc

SEQ ID NO: 2526311 - RNA, 19 nt, Human
gggcugcagcauguugcug

SEQ ID NO: 2526312 - RNA, 11 nt, Human
gggcugcagca

SEQ ID NO: 2526313 - RNA, 20 nt, Human
gggcugcacucugugcccau

SEQ ID NO: 2526314 - RNA, 19 nt, Human
gggcugcacucugugccca

SEQ ID NO: 2526315 - RNA, 22 nt, Human
gggcugcagcauguugcugagg

SEQ ID NO: 2526316 - RNA, 18 nt, Human
gggcugccaugugaagag

SEQ ID NO: 2526317 - RNA, 10 nt, Human
gggcucagca

SEQ ID NO: 2526318 - RNA, 20 nt, Human
gggcuacccugagcugaggc

SEQ ID NO: 2526319 - RNA, 13 nt, Human
gggcuacaagagg

SEQ ID NO: 2526320 - RNA, 16 nt, Human
gggcucaagcagucua

SEQ ID NO: 2526321 - RNA, 22 nt, Human
gggcugcaccggcuggccuggc

SEQ ID NO: 2526322 - RNA, 18 nt, Human
gggcucagcaaaagaugc

SEQ ID NO: 2526323 - RNA, 15 nt, Human
gggcugcccuggugc

SEQ ID NO: 2526324 - RNA, 16 nt, Human
gggcuggcccagcccu

SEQ ID NO: 2526325 - RNA, 19 nt, Human
gggcuggccucuggcucuc

SEQ ID NO: 2526326 - RNA, 15 nt, Human
gggcuggccuaggag

SEQ ID NO: 2526327 - RNA, 13 nt, Human
gggcuggccuagg

SEQ ID NO: 2526328 - RNA, 17 nt, Human
gggcuggcccagcccug

SEQ ID NO: 2526329 - RNA, 19 nt, Human
gggcuggcccagcccugcu

SEQ ID NO: 2526330 - RNA, 13 nt, Human
gggcugcccugcc

SEQ ID NO: 2526331 - RNA, 14 nt, Human
gggcugcccuggug

SEQ ID NO: 2526332 - RNA, 13 nt, Human
gggcugcccuggu

SEQ ID NO: 2526333 - RNA, 19 nt, Human
gggcugcccgcucccagug

SEQ ID NO: 2526334 - RNA, 18 nt, Human
gggcugcccgcucccagu

SEQ ID NO: 2526335 - RNA, 15 nt, Human
gggcugcccgcuccc

SEQ ID NO: 2526336 - RNA, 14 nt, Human
gggcugcccgcucc

SEQ ID NO: 2526337 - RNA, 22 nt, Human
gggcugcccgcucccagugucu

SEQ ID NO: 2526338 - RNA, 12 nt, Human
gggcugcccugc

SEQ ID NO: 2526339 - RNA, 20 nt, Human
gggcuggguucuacccaggu

SEQ ID NO: 2526340 - RNA, 18 nt, Human
gggcugggagcucugcag

SEQ ID NO: 2526341 - RNA, 16 nt, Human
gggcugggagcucugc

SEQ ID NO: 2526342 - RNA, 17 nt, Human
gggcuggcuucaggagg

SEQ ID NO: 2526343 - RNA, 12 nt, Human
gggcuggcuuca

SEQ ID NO: 2526344 - RNA, 15 nt, Human
gggcuggcucccucu

SEQ ID NO: 2526345 - RNA, 13 nt, Human
gggcuggcucccu

SEQ ID NO: 2526346 - RNA, 15 nt, Human
gggcuggccuuccug

SEQ ID NO: 2526347 - RNA, 19 nt, Human
gggcuggcggcuacucagc

SEQ ID NO: 2526348 - RNA, 22 nt, Human
aaaauuuuuucucuaggaaaua

SEQ ID NO: 2526349 - RNA, 14 nt, Human
aaaauuuguugcau

SEQ ID NO: 2526350 - RNA, 13 nt, Human
aaaauuuguugca

SEQ ID NO: 2526351 - RNA, 14 nt, Human
aaaauuuuuuuaga

SEQ ID NO: 2526352 - RNA, 19 nt, Human
aaaauuuguuugaaaucuu

SEQ ID NO: 2526353 - RNA, 18 nt, Human
aaaauuugaaauuuagcu

SEQ ID NO: 2526354 - RNA, 18 nt, Human
aaaauuuguuauuuugca

SEQ ID NO: 2526355 - RNA, 16 nt, Human
aaaauuugcccuccca

SEQ ID NO: 2526356 - RNA, 20 nt, Human
aaaaugugcuauacugcaua

SEQ ID NO: 2526357 - RNA, 11 nt, Human
aaaauguguaa

SEQ ID NO: 2526358 - RNA, 20 nt, Human
aaaauguguaauuuuguucu

SEQ ID NO: 2526359 - RNA, 16 nt, Human
aaaauguguaauuuug

SEQ ID NO: 2526360 - RNA, 12 nt, Human
aaaaugugugug

SEQ ID NO: 2526361 - RNA, 17 nt, Human
aaaauguguaauuuugu

SEQ ID NO: 2526362 - RNA, 15 nt, Human
aaaauuucuauuaaa

SEQ ID NO: 2526363 - RNA, 17 nt, Human
aaaauuuccaguaccuu

SEQ ID NO: 2526364 - RNA, 23 nt, Human
aaaauuuccaguaccuuugucac

SEQ ID NO: 2526365 - RNA, 13 nt, Human
aaaauuucacauu

SEQ ID NO: 2526366 - RNA, 20 nt, Human
aaaauuucacauuaauauuu

SEQ ID NO: 2526367 - RNA, 22 nt, Human
gggcuggguucuacccaggugc

SEQ ID NO: 2526368 - RNA, 18 nt, Human
gggcugguagcucaggug

SEQ ID NO: 2526369 - RNA, 17 nt, Human
gggcugguagcucaggu

SEQ ID NO: 2526370 - RNA, 23 nt, Human
gggcuggguuggcgcacccuccc

SEQ ID NO: 2526371 - RNA, 22 nt, Human
gggcuggguuggcgcacccucc

SEQ ID NO: 2526372 - RNA, 21 nt, Human
gggcuggguuggcgcacccuc

SEQ ID NO: 2526373 - RNA, 19 nt, Human
gggcuggguuggcgcaccc

SEQ ID NO: 2526374 - RNA, 16 nt, Human
gggcuggguuggcgca

SEQ ID NO: 2526375 - RNA, 20 nt, Human
gggcuggugccagccuuccu

SEQ ID NO: 2526376 - RNA, 14 nt, Human
gggcugguucugua

SEQ ID NO: 2526377 - RNA, 17 nt, Human
gggcuggugccagccuu

SEQ ID NO: 2526378 - RNA, 16 nt, Human
gggcuggugccagccu

SEQ ID NO: 2526379 - RNA, 15 nt, Human
gggcuggugccagcc

SEQ ID NO: 2526380 - RNA, 21 nt, Human
gggcuggugacccagucagag

SEQ ID NO: 2526381 - RNA, 18 nt, Human
aaaaugucuuguguuacc

SEQ ID NO: 2526382 - RNA, 18 nt, Human
aaaaugucuguuaacuua

SEQ ID NO: 2526383 - RNA, 19 nt, Human
aaaaugugacccagauccu

SEQ ID NO: 2526384 - RNA, 18 nt, Human
aaaaugugaauaaaauua

SEQ ID NO: 2526385 - RNA, 21 nt, Human
aaaaugucuguagcuccucaa

SEQ ID NO: 2526386 - RNA, 12 nt, Human
aaaaugugaagu

SEQ ID NO: 2526387 - RNA, 15 nt, Human
aaaaugugauaugua

SEQ ID NO: 2526388 - RNA, 16 nt, Human
aaaaugugacccagau

SEQ ID NO: 2526389 - RNA, 12 nt, Human
aaaaugugauuu

SEQ ID NO: 2526390 - RNA, 13 nt, Human
aaaaugugauuuu

SEQ ID NO: 2526391 - RNA, 17 nt, Human
aaaaugugcaaaacagc

SEQ ID NO: 2526392 - RNA, 18 nt, Human
aaaaugugauuuuucuga

SEQ ID NO: 2526393 - RNA, 19 nt, Human
aaaaugugcuauacugcau

SEQ ID NO: 2526394 - RNA, 19 nt, Human
aaaaugugcaaaacagcgu

SEQ ID NO: 2526395 - RNA, 20 nt, Human
ggggacagcuccuucugucc

SEQ ID NO: 2526396 - RNA, 14 nt, Human
ggggacagcuccuu

SEQ ID NO: 2526397 - RNA, 12 nt, Human
ggggacagcucc

SEQ ID NO: 2526398 - RNA, 19 nt, Human
aaacaugacccuaaaucuu

SEQ ID NO: 2526399 - RNA, 21 nt, Human
aaacaugacccuaaaucuuga

SEQ ID NO: 2526400 - RNA, 12 nt, Human
aaacaugaagug

SEQ ID NO: 2526401 - RNA, 17 nt, Human
aaacauccaauauuuuc

SEQ ID NO: 2526402 - RNA, 19 nt, Human
aaacauccaauauuuucuu

SEQ ID NO: 2526403 - RNA, 18 nt, Human
aaacauccuacaagacac

SEQ ID NO: 2526404 - RNA, 22 nt, Human
aaacauauuuguuaaauauuua

SEQ ID NO: 2526405 - RNA, 23 nt, Human
aaacaucaguuacucugaagggc

SEQ ID NO: 2526406 - RNA, 15 nt, Human
aaacaucuauucucu

SEQ ID NO: 2526407 - RNA, 20 nt, Human
aaacaucuauucucuccaaa

SEQ ID NO: 2526408 - RNA, 11 nt, Human
aaacaucugga

SEQ ID NO: 2526409 - RNA, 22 nt, Human
aaacauccuacaagacacagug

SEQ ID NO: 2526410 - RNA, 18 nt, Human
aaacauccuucaagaacu

SEQ ID NO: 2526411 - RNA, 20 nt, Human
aaacauccuucaagaacucu

SEQ ID NO: 2526412 - RNA, 13 nt, Human
ggggacagggaug

SEQ ID NO: 2526413 - RNA, 16 nt, Human
ggggcaugcuggggca

SEQ ID NO: 2526414 - RNA, 19 nt, Human
ggggcauguauuggccugg

SEQ ID NO: 2526415 - RNA, 18 nt, Human
ggggcauguauuggccug

SEQ ID NO: 2526416 - RNA, 23 nt, Human
ggggcauguauuggccuggaggu

SEQ ID NO: 2526417 - RNA, 16 nt, Human
ggggccacacagaaac

SEQ ID NO: 2526418 - RNA, 23 nt, Human
ggggccagaggaacuguccagag

SEQ ID NO: 2526419 - RNA, 12 nt, Human
ggggccagagga

SEQ ID NO: 2526420 - RNA, 12 nt, Human
ggggccagaggc

SEQ ID NO: 2526421 - RNA, 19 nt, Human
ggggccacuuuugacuagg

SEQ ID NO: 2526422 - RNA, 13 nt, Human
ggggccagaggcu

SEQ ID NO: 2526423 - RNA, 13 nt, Human
ggggccagaucca

SEQ ID NO: 2526424 - RNA, 14 nt, Human
ggggccagauccag

SEQ ID NO: 2526425 - RNA, 17 nt, Human
ggggccagauccagccu

SEQ ID NO: 2526426 - RNA, 12 nt, Human
ggggccucccug

SEQ ID NO: 2526427 - RNA, 19 nt, Human
ggggccagauccagccugg

SEQ ID NO: 2526428 - RNA, 19 nt, Human
ggggccuggagauccuccu

SEQ ID NO: 2526429 - RNA, 14 nt, Human
ggggccuggaccug

SEQ ID NO: 2526430 - RNA, 18 nt, Human
aaacagugccugcugaau

SEQ ID NO: 2526431 - RNA, 13 nt, Human
aaacaguguuuug

SEQ ID NO: 2526432 - RNA, 14 nt, Human
aaacaguuaacuuu

SEQ ID NO: 2526433 - RNA, 18 nt, Human
aaacaguuaacuuucaga

SEQ ID NO: 2526434 - RNA, 23 nt, Human
aaacaguuaacuuucagaagaga

SEQ ID NO: 2526435 - RNA, 22 nt, Human
aaacaucacacacacagacaga

SEQ ID NO: 2526436 - RNA, 14 nt, Human
aaacaucacacaca

SEQ ID NO: 2526437 - RNA, 16 nt, Human
aaacaucaguuacucu

SEQ ID NO: 2526438 - RNA, 19 nt, Human
aaacaucaguuacucugaa

SEQ ID NO: 2526439 - RNA, 20 nt, Human
aaacaucaguuacucugaag

SEQ ID NO: 2526440 - RNA, 22 nt, Human
aaacaucaguuacucugaaggg

SEQ ID NO: 2526441 - RNA, 15 nt, Human
aaacaccuagcuuua

SEQ ID NO: 2526442 - RNA, 18 nt, Human
aaacaccuccucauguac

SEQ ID NO: 2526443 - RNA, 14 nt, Human
aaacaccuagcuuu

SEQ ID NO: 2526444 - RNA, 15 nt, Human
aaacacccucacacu

SEQ ID NO: 2526445 - RNA, 19 nt, Human
aaacaccaacauguuggga

SEQ ID NO: 2526446 - RNA, 17 nt, Human
aaacaccggguuccagc

SEQ ID NO: 2526447 - RNA, 20 nt, Human
aaacagucucaggaaaucaa

SEQ ID NO: 2526448 - RNA, 14 nt, Human
aaacagugagccug

SEQ ID NO: 2526449 - RNA, 12 nt, Human
aaacagugccug

SEQ ID NO: 2526450 - RNA, 16 nt, Human
aaacacauuuuucuua

SEQ ID NO: 2526451 - RNA, 22 nt, Human
aaacaagauuuuaaagacaugu

SEQ ID NO: 2526452 - RNA, 15 nt, Human
aaacaagauuuuaaa

SEQ ID NO: 2526453 - RNA, 19 nt, Human
aaacaagaugcuggauguc

SEQ ID NO: 2526454 - RNA, 12 nt, Human
aaacacauuuuu

SEQ ID NO: 2526455 - RNA, 20 nt, Human
aaacaagcacuaaacaaaga

SEQ ID NO: 2526456 - RNA, 12 nt, Human
aaacaaaaagaa

SEQ ID NO: 2526457 - RNA, 11 nt, Human
aaacaaaaaga

SEQ ID NO: 2526458 - RNA, 13 nt, Human
aaacaaaaacacu

SEQ ID NO: 2526459 - RNA, 17 nt, Human
aaacaaaaagaacaaaa

SEQ ID NO: 2526460 - RNA, 16 nt, Human
aaacaaaaagaacaaa

SEQ ID NO: 2526461 - RNA, 19 nt, Human
aaacaaaaauuaaaauccu

SEQ ID NO: 2526462 - RNA, 16 nt, Human
aaaauuuuuuuagaaa

SEQ ID NO: 2526463 - RNA, 15 nt, Human
aaaauuuuuuuucau

SEQ ID NO: 2526464 - RNA, 16 nt, Human
aaaauuuuuuuucaug

SEQ ID NO: 2526465 - RNA, 17 nt, Human
aaaauuuuuuuucaugu

SEQ ID NO: 2526466 - RNA, 18 nt, Human
aaaauuuuuuuucauguu

SEQ ID NO: 2526467 - RNA, 19 nt, Human
aaaauuuuuuuucauguuu

SEQ ID NO: 2526468 - RNA, 20 nt, Human
aaacaagaccacguuucuaa

SEQ ID NO: 2526469 - RNA, 21 nt, Human
aaacaaaaauuagguauuuug

SEQ ID NO: 2526470 - RNA, 18 nt, Human
aaacaagaccacguuucu

SEQ ID NO: 2526471 - RNA, 17 nt, Human
gggccugagccaagcua

SEQ ID NO: 2526472 - RNA, 15 nt, Human
gggccugagccuggc

SEQ ID NO: 2526473 - RNA, 16 nt, Human
gggccugagccuggcc

SEQ ID NO: 2526474 - RNA, 16 nt, Human
gggccugauggggagg

SEQ ID NO: 2526475 - RNA, 23 nt, Human
gggccugaggucuggcugcuugc

SEQ ID NO: 2526476 - RNA, 18 nt, Human
gggccugcaggaccugcc

SEQ ID NO: 2526477 - RNA, 18 nt, Human
gggccugagccuggccag

SEQ ID NO: 2526478 - RNA, 20 nt, Human
gggccucuuaugggcugggu

SEQ ID NO: 2526479 - RNA, 19 nt, Human
gggccucuuaugggcuggg

SEQ ID NO: 2526480 - RNA, 21 nt, Human
gggccucuuggaaaaagugau

SEQ ID NO: 2526481 - RNA, 23 nt, Human
gggccucuugcggucccuucuua

SEQ ID NO: 2526482 - RNA, 13 nt, Human
gggccuccugugu

SEQ ID NO: 2526483 - RNA, 19 nt, Human
gggccucaaaggcccgcuc

SEQ ID NO: 2526484 - RNA, 21 nt, Human
gggccuccucuguccagggcc

SEQ ID NO: 2526485 - RNA, 14 nt, Human
gggccuccagaacu

SEQ ID NO: 2526486 - RNA, 22 nt, Human
gggccucggacuuagcugggag

SEQ ID NO: 2526487 - RNA, 15 nt, Human
gggccuccugugugu

SEQ ID NO: 2526488 - RNA, 16 nt, Human
gggcuacccugagcug

SEQ ID NO: 2526489 - RNA, 19 nt, Human
gggcuacccugagcugagg

SEQ ID NO: 2526490 - RNA, 15 nt, Human
gggcuacaaggaccc

SEQ ID NO: 2526491 - RNA, 13 nt, Human
gggcuacccugag

SEQ ID NO: 2526492 - RNA, 15 nt, Human
gggcgugguggugag

SEQ ID NO: 2526493 - RNA, 23 nt, Human
gggcuacaccuuagccugcccuc

SEQ ID NO: 2526494 - RNA, 23 nt, Human
gggcuaagagcuagcgcugccgc

SEQ ID NO: 2526495 - RNA, 14 nt, Human
gggcguguuguuuu

SEQ ID NO: 2526496 - RNA, 20 nt, Human
gggcuaagagcuagcgcugc

SEQ ID NO: 2526497 - RNA, 17 nt, Human
gggcgggacccaggcac

SEQ ID NO: 2526498 - RNA, 13 nt, Human
gggcggcugagag

SEQ ID NO: 2526499 - RNA, 15 nt, Human
gggcgggcagcacag

SEQ ID NO: 2526500 - RNA, 15 nt, Human
gggcgggccccucau

SEQ ID NO: 2526501 - RNA, 20 nt, Human
gggcgggcagcacagcaagg

SEQ ID NO: 2526502 - RNA, 14 nt, Human
gggcggggccuugc

SEQ ID NO: 2526503 - RNA, 15 nt, Human
gggcgggaggauguu

SEQ ID NO: 2526504 - RNA, 14 nt, Human
gggcggcacagccu

SEQ ID NO: 2526505 - RNA, 23 nt, Human
gggcgcuggcccagccggccucu

SEQ ID NO: 2526506 - RNA, 19 nt, Human
gggcgcuggcccagccggc

SEQ ID NO: 2526507 - RNA, 18 nt, Human
gggcgcuggcccagccgg

SEQ ID NO: 2526508 - RNA, 17 nt, Human
gggcgcuggcccagccg

SEQ ID NO: 2526509 - RNA, 16 nt, Human
gggcgcuggcccagcc

SEQ ID NO: 2526510 - RNA, 15 nt, Human
gggcgcuggcccagc

SEQ ID NO: 2526511 - RNA, 14 nt, Human
gggcgcuggcccag

SEQ ID NO: 2526512 - RNA, 21 nt, Human
gggcggcaggggccuggagau

SEQ ID NO: 2526513 - RNA, 17 nt, Human
gggcggcaggggccugg

SEQ ID NO: 2526514 - RNA, 14 nt, Human
gggcggcagagagg

SEQ ID NO: 2526515 - RNA, 23 nt, Human
gggccaguuggucccccuuccau

SEQ ID NO: 2526516 - RNA, 22 nt, Human
gggccaguuggucccccuucca

SEQ ID NO: 2526517 - RNA, 18 nt, Human
gggccaguuggucccccu

SEQ ID NO: 2526518 - RNA, 14 nt, Human
gggccaguuggucc

SEQ ID NO: 2526519 - RNA, 14 nt, Human
gggccaugcugaag

SEQ ID NO: 2526520 - RNA, 23 nt, Human
gggccaugauggcaacagaucug

SEQ ID NO: 2526521 - RNA, 15 nt, Human
gggccaugcugaggc

SEQ ID NO: 2526522 - RNA, 14 nt, Human
gggccaugcugagg

SEQ ID NO: 2526523 - RNA, 15 nt, Human
gggccaugcugaagg

SEQ ID NO: 2526524 - RNA, 19 nt, Human
gggccaugagcuccagacc

SEQ ID NO: 2526525 - RNA, 16 nt, Human
gggccauacuggccuc

SEQ ID NO: 2526526 - RNA, 15 nt, Human
gggccauacuggccu

SEQ ID NO: 2526527 - RNA, 14 nt, Human
gggccauacuggcc

SEQ ID NO: 2526528 - RNA, 20 nt, Human
gggccagucugggcugccgg

SEQ ID NO: 2526529 - RNA, 17 nt, Human
gggccauccugucccac

SEQ ID NO: 2526530 - RNA, 15 nt, Human
gggccauagcuccug

SEQ ID NO: 2526531 - RNA, 22 nt, Human
gggccauacuggccucgccugg

SEQ ID NO: 2526532 - RNA, 17 nt, Human
gggccauacuggccucg

SEQ ID NO: 2526533 - RNA, 22 nt, Human
gggccaugauggcaacagaucu

SEQ ID NO: 2526534 - RNA, 18 nt, Human
gggccaugagcuccagac

SEQ ID NO: 2526535 - RNA, 18 nt, Human
gggccgaauccccucccu

SEQ ID NO: 2526536 - RNA, 17 nt, Human
gggcccuuugagugcag

SEQ ID NO: 2526537 - RNA, 23 nt, Human
gggccgcaggcgggaaaagcagc

SEQ ID NO: 2526538 - RNA, 13 nt, Human
gggccgcaggcgg

SEQ ID NO: 2526539 - RNA, 21 nt, Human
gggcccuucacugccuuugcu

SEQ ID NO: 2526540 - RNA, 21 nt, Human
gggcccugguguuucuagcac

SEQ ID NO: 2526541 - RNA, 17 nt, Human
gggccaugcugaggccu

SEQ ID NO: 2526542 - RNA, 19 nt, Human
gggcccugguccuuccagg

SEQ ID NO: 2526543 - RNA, 23 nt, Human
gggccuaucagugugccccccau

SEQ ID NO: 2526544 - RNA, 22 nt, Human
gggccuaucagugugcccccca

SEQ ID NO: 2526545 - RNA, 20 nt, Human
gggccuaucagugugccccc

SEQ ID NO: 2526546 - RNA, 18 nt, Human
gggccuaucagugugccc

SEQ ID NO: 2526547 - RNA, 15 nt, Human
gggccuaucagugug

SEQ ID NO: 2526548 - RNA, 17 nt, Human
gggccuaggccucagcc

SEQ ID NO: 2526549 - RNA, 14 nt, Human
gggccuaucagugu

SEQ ID NO: 2526550 - RNA, 23 nt, Human
gggccuagcugcuacaaagaaga

SEQ ID NO: 2526551 - RNA, 22 nt, Human
gggccuagauccacacacagag

SEQ ID NO: 2526552 - RNA, 14 nt, Human
gggccgugcccagg

SEQ ID NO: 2526553 - RNA, 13 nt, Human
gggccgugcccag

SEQ ID NO: 2526554 - RNA, 17 nt, Human
gggccuacuagagucug

SEQ ID NO: 2526555 - RNA, 17 nt, Human
gggccgugcccaggggc

SEQ ID NO: 2526556 - RNA, 20 nt, Human
gggccuagauccacacacag

SEQ ID NO: 2526557 - RNA, 23 nt, Human
gggccuagauccacacacagagg

SEQ ID NO: 2526558 - RNA, 22 nt, Human
gggccguaccccacccucagca

SEQ ID NO: 2526559 - RNA, 18 nt, Human
gggccagucccugaggca

SEQ ID NO: 2526560 - RNA, 18 nt, Human
gggccagggcccugcaga

SEQ ID NO: 2526561 - RNA, 21 nt, Human
gggccagucccugaggcaggu

SEQ ID NO: 2526562 - RNA, 23 nt, Human
gggccaggggucucccuggagug

SEQ ID NO: 2526563 - RNA, 15 nt, Human
gggccaguccugccu

SEQ ID NO: 2526564 - RNA, 22 nt, Human
gggccagucuguggaucagaga

SEQ ID NO: 2526565 - RNA, 16 nt, Human
gggccagucugggcug

SEQ ID NO: 2526566 - RNA, 15 nt, Human
gggccagucugggcu

SEQ ID NO: 2526567 - RNA, 22 nt, Human
gggccaguccugccuggccagg

SEQ ID NO: 2526568 - RNA, 18 nt, Human
gggccaguccugccuggc

SEQ ID NO: 2526569 - RNA, 19 nt, Human
gggccaguccugccuggcc

SEQ ID NO: 2526570 - RNA, 20 nt, Human
gggccaguccugccuggcca

SEQ ID NO: 2526571 - RNA, 21 nt, Human
gggccaguccugccuggccag

SEQ ID NO: 2526572 - RNA, 15 nt, Human
gggccaggcuggguc

SEQ ID NO: 2526573 - RNA, 14 nt, Human
gggccaggcugggu

SEQ ID NO: 2526574 - RNA, 21 nt, Human
gggccaggcugggucgcccug

SEQ ID NO: 2526575 - RNA, 13 nt, Human
gggccagggcccu

SEQ ID NO: 2526576 - RNA, 14 nt, Human
gggccagggcccug

SEQ ID NO: 2526577 - RNA, 16 nt, Human
gggccagggcccugca

SEQ ID NO: 2526578 - RNA, 14 nt, Human
aaaaugccuuugag

SEQ ID NO: 2526579 - RNA, 12 nt, Human
aaaaugccuuug

SEQ ID NO: 2526580 - RNA, 11 nt, Human
aaaaugccuuu

SEQ ID NO: 2526581 - RNA, 22 nt, Human
aaaaugccucaguguauuugua

SEQ ID NO: 2526582 - RNA, 20 nt, Human
aaaaugccucaguguauuug

SEQ ID NO: 2526583 - RNA, 19 nt, Human
aaaaugccucaguguauuu

SEQ ID NO: 2526584 - RNA, 18 nt, Human
aaaaugccucaguguauu

SEQ ID NO: 2526585 - RNA, 16 nt, Human
aaaaugccucagugua

SEQ ID NO: 2526586 - RNA, 23 nt, Human
aaaaugccuuugagacaguuucu

SEQ ID NO: 2526587 - RNA, 22 nt, Human
aaaaugccuuugagacaguuuc

SEQ ID NO: 2526588 - RNA, 17 nt, Human
aaaaugccuuugagaca

SEQ ID NO: 2526589 - RNA, 15 nt, Human
aaaaugccuuugaga

SEQ ID NO: 2526590 - RNA, 19 nt, Human
gggccagauccagccuggg

SEQ ID NO: 2526591 - RNA, 20 nt, Human
aaaaugcugaacauugcaua

SEQ ID NO: 2526592 - RNA, 15 nt, Human
aaaaugcugaacauu

SEQ ID NO: 2526593 - RNA, 16 nt, Human
aaaaugcugaacauug

SEQ ID NO: 2526594 - RNA, 18 nt, Human
aaaaugcugaacauugca

SEQ ID NO: 2526595 - RNA, 22 nt, Human
gggccagccaggcgggcucaag

SEQ ID NO: 2526596 - RNA, 18 nt, Human
gggccagccaggcgggcu

SEQ ID NO: 2526597 - RNA, 17 nt, Human
gggccagccaggcgggc

SEQ ID NO: 2526598 - RNA, 16 nt, Human
gggccagccaggcggg

SEQ ID NO: 2526599 - RNA, 15 nt, Human
gggccagccaggcgg

SEQ ID NO: 2526600 - RNA, 14 nt, Human
gggccagccaggcg

SEQ ID NO: 2526601 - RNA, 13 nt, Human
gggccagccaggc

SEQ ID NO: 2526602 - RNA, 12 nt, Human
gggccagccagg

SEQ ID NO: 2526603 - RNA, 17 nt, Human
gggccagccccucccac

SEQ ID NO: 2526604 - RNA, 13 nt, Human
gggccagccccuc

SEQ ID NO: 2526605 - RNA, 12 nt, Human
gggccagccccu

SEQ ID NO: 2526606 - RNA, 15 nt, Human
gggccagccccuccc

SEQ ID NO: 2526607 - RNA, 11 nt, Human
gggccaggagc

SEQ ID NO: 2526608 - RNA, 13 nt, Human
gggccaggcuggg

SEQ ID NO: 2526609 - RNA, 17 nt, Human
gggccaggacugagccc

SEQ ID NO: 2526610 - RNA, 14 nt, Human
gggccaggacugag

SEQ ID NO: 2526611 - RNA, 16 nt, Human
gggccaggacaggccc

SEQ ID NO: 2526612 - RNA, 17 nt, Human
gggccaggacaggcccg

SEQ ID NO: 2526613 - RNA, 12 nt, Human
aaaaguauuuuc

SEQ ID NO: 2526614 - RNA, 19 nt, Human
aaaaucuguuugaucccug

SEQ ID NO: 2526615 - RNA, 18 nt, Human
aaaaucuuggcacagaaa

SEQ ID NO: 2526616 - RNA, 17 nt, Human
aaaaucuuggcacagaa

SEQ ID NO: 2526617 - RNA, 19 nt, Human
aaaaguauguuagugcaaa

SEQ ID NO: 2526618 - RNA, 13 nt, Human
aaaaguauauguu

SEQ ID NO: 2526619 - RNA, 14 nt, Human
aaaaguauauguua

SEQ ID NO: 2526620 - RNA, 20 nt, Human
aaaaguagguuuacauucau

SEQ ID NO: 2526621 - RNA, 22 nt, Human
aaaaguauuauuuuccaaaagu

SEQ ID NO: 2526622 - RNA, 20 nt, Human
aaaaguauuauuuuccaaaa

SEQ ID NO: 2526623 - RNA, 14 nt, Human
aaaaguauuauuuu

SEQ ID NO: 2526624 - RNA, 15 nt, Human
aaaaguauauguuag

SEQ ID NO: 2526625 - RNA, 14 nt, Human
aaaaguauuuuccu

SEQ ID NO: 2526626 - RNA, 16 nt, Human
aaaaucuguggugguc

SEQ ID NO: 2526627 - RNA, 20 nt, Human
aaaaugaagguuaggauuua

SEQ ID NO: 2526628 - RNA, 22 nt, Human
aaaaugaaagcaugucucaaua

SEQ ID NO: 2526629 - RNA, 21 nt, Human
aaaaucuuucuuucuuagaaa

SEQ ID NO: 2526630 - RNA, 20 nt, Human
aaaaucuuucuuucuuagaa

SEQ ID NO: 2526631 - RNA, 19 nt, Human
aaaaucuuucuuucuuaga

SEQ ID NO: 2526632 - RNA, 17 nt, Human
aaaaucuuucuuucuua

SEQ ID NO: 2526633 - RNA, 23 nt, Human
aaaaucuuucuuucuuagaaauu

SEQ ID NO: 2526634 - RNA, 22 nt, Human
aaaaucuuucuuucuuagaaau

SEQ ID NO: 2526635 - RNA, 19 nt, Human
aaaaugaaagcaugucuca

SEQ ID NO: 2526636 - RNA, 14 nt, Human
aaaaugagccuggc

SEQ ID NO: 2526637 - RNA, 21 nt, Human
aaaaugagccuggcaagaaug

SEQ ID NO: 2526638 - RNA, 18 nt, Human
aaaaugaggaauguauau

SEQ ID NO: 2526639 - RNA, 16 nt, Human
aaaaugaggaauguau

SEQ ID NO: 2526640 - RNA, 15 nt, Human
aaaaugaggaaugua

SEQ ID NO: 2526641 - RNA, 16 nt, Human
aaaaugaauccuacac

SEQ ID NO: 2526642 - RNA, 15 nt, Human
aaaaugaauccuaca

SEQ ID NO: 2526643 - RNA, 23 nt, Human
aaaaugagcucgcauuugucaau

SEQ ID NO: 2526644 - RNA, 18 nt, Human
aaaaugagguucaacugu

SEQ ID NO: 2526645 - RNA, 23 nt, Human
aaaaugaguuuuuauggggcuga

SEQ ID NO: 2526646 - RNA, 17 nt, Human
aaaaugcccuuaaauca

SEQ ID NO: 2526647 - RNA, 16 nt, Human
aaaaugaggacauguu

SEQ ID NO: 2526648 - RNA, 19 nt, Human
aaaaugaggaauguauaug

SEQ ID NO: 2526649 - RNA, 21 nt, Human
aaaaugaguuaccuacauuuu

SEQ ID NO: 2526650 - RNA, 21 nt, Human
aaaaauaugaccacacuccag

SEQ ID NO: 2526651 - RNA, 23 nt, Human
aaaaauaugaccacacuccagcu

SEQ ID NO: 2526652 - RNA, 19 nt, Human
aaaaauauauuuaaugaua

SEQ ID NO: 2526653 - RNA, 15 nt, Human
aaaaauauauuuaau

SEQ ID NO: 2526654 - RNA, 13 nt, Human
aaaaauauauuua

SEQ ID NO: 2526655 - RNA, 16 nt, Human
aaaaauauuauaacuu

SEQ ID NO: 2526656 - RNA, 20 nt, Human
aaaaauauggaacuucuaau

SEQ ID NO: 2526657 - RNA, 13 nt, Human
aaaaauauuccau

SEQ ID NO: 2526658 - RNA, 11 nt, Human
aaaaauauuua

SEQ ID NO: 2526659 - RNA, 17 nt, Human
aaaaaucauaaacugug

SEQ ID NO: 2526660 - RNA, 16 nt, Human
aaaaaucauguuugcu

SEQ ID NO: 2526661 - RNA, 15 nt, Human
aaaaaucacauccug

SEQ ID NO: 2526662 - RNA, 16 nt, Human
aaaaauccagaaagaa

SEQ ID NO: 2526663 - RNA, 21 nt, Human
gggacauuugcucauggaauu

SEQ ID NO: 2526664 - RNA, 20 nt, Human
gggacauuugcucauggaau

SEQ ID NO: 2526665 - RNA, 12 nt, Human
aaaaauauaaaa

SEQ ID NO: 2526666 - RNA, 14 nt, Human
aaaaauauaacuua

SEQ ID NO: 2526667 - RNA, 14 nt, Human
aaaaauauaaaacu

SEQ ID NO: 2526668 - RNA, 13 nt, Human
aaaaauauaaaac

SEQ ID NO: 2526669 - RNA, 14 nt, Human
gggacagggcucgc

SEQ ID NO: 2526670 - RNA, 16 nt, Human
gggaccaacugggccc

SEQ ID NO: 2526671 - RNA, 13 nt, Human
gggaccaaggacc

SEQ ID NO: 2526672 - RNA, 19 nt, Human
gggacauuugcucauggaa

SEQ ID NO: 2526673 - RNA, 21 nt, Human
gggacagcuccuucuguccua

SEQ ID NO: 2526674 - RNA, 18 nt, Human
gggacagaggccugcccg

SEQ ID NO: 2526675 - RNA, 15 nt, Human
gggacagagucuggg

SEQ ID NO: 2526676 - RNA, 13 nt, Human
gggaaggauacaa

SEQ ID NO: 2526677 - RNA, 15 nt, Human
gggacagaggccugc

SEQ ID NO: 2526678 - RNA, 17 nt, Human
gggacagaggccugccc

SEQ ID NO: 2526679 - RNA, 20 nt, Human
gggaaggaggguuagggagg

SEQ ID NO: 2526680 - RNA, 20 nt, Human
gggaagcuucuuaaaugaga

SEQ ID NO: 2526681 - RNA, 17 nt, Human
gggaaggaggcuggcuu

SEQ ID NO: 2526682 - RNA, 17 nt, Human
gggaaggaacucuggcu

SEQ ID NO: 2526683 - RNA, 21 nt, Human
gggaagcugaggcgggagaau

SEQ ID NO: 2526684 - RNA, 16 nt, Human
gggaagcuacagguua

SEQ ID NO: 2526685 - RNA, 23 nt, Human
gggaagcggagguugcagggagc

SEQ ID NO: 2526686 - RNA, 22 nt, Human
gggacagaggggguggccuccc

SEQ ID NO: 2526687 - RNA, 13 nt, Human
gggacagaggggg

SEQ ID NO: 2526688 - RNA, 23 nt, Human
gggacagaggggguggccuccca

SEQ ID NO: 2526689 - RNA, 16 nt, Human
gggacagcuccuucug

SEQ ID NO: 2526690 - RNA, 22 nt, Human
gggaagagcacagcccucccgc

SEQ ID NO: 2526691 - RNA, 20 nt, Human
gggaagagcacagcccuccc

SEQ ID NO: 2526692 - RNA, 18 nt, Human
gggaagagcacagcccuc

SEQ ID NO: 2526693 - RNA, 16 nt, Human
gggaagagcacagccc

SEQ ID NO: 2526694 - RNA, 15 nt, Human
gggaagagcacagcc

SEQ ID NO: 2526695 - RNA, 14 nt, Human
gggaagagcacagc

SEQ ID NO: 2526696 - RNA, 24 nt, Human
gggaagagaggaguucaaugaucu

SEQ ID NO: 2526697 - RNA, 23 nt, Human
gggaagagaggaguucaaugauc

SEQ ID NO: 2526698 - RNA, 22 nt, Human
gggaagagaggaguucaaugau

SEQ ID NO: 2526699 - RNA, 21 nt, Human
gggaagagaggaguucaauga

SEQ ID NO: 2526700 - RNA, 18 nt, Human
gggaagagaggaguucaa

SEQ ID NO: 2526701 - RNA, 11 nt, Human
gggaagagagg

SEQ ID NO: 2526702 - RNA, 17 nt, Human
gggaagagaggaguuca

SEQ ID NO: 2526703 - RNA, 22 nt, Human
gggaagauaggcucugcacaga

SEQ ID NO: 2526704 - RNA, 22 nt, Human
gggaagcagaauagcaaggugc

SEQ ID NO: 2526705 - RNA, 12 nt, Human
gggaagcccugg

SEQ ID NO: 2526706 - RNA, 17 nt, Human
gggaagaguguacuggg

SEQ ID NO: 2526707 - RNA, 16 nt, Human
gggaagaguguacugg

SEQ ID NO: 2526708 - RNA, 14 nt, Human
gggaagagggggcg

SEQ ID NO: 2526709 - RNA, 15 nt, Human
aaaacucuacuuaau

SEQ ID NO: 2526710 - RNA, 12 nt, Human
aaaacucuacuu

SEQ ID NO: 2526711 - RNA, 22 nt, Human
aaaacucgaggacuguauuugu

SEQ ID NO: 2526712 - RNA, 13 nt, Human
aaaacucauuuuu

SEQ ID NO: 2526713 - RNA, 20 nt, Human
aaaacugcugacuguuuucu

SEQ ID NO: 2526714 - RNA, 19 nt, Human
aaaacucuacuuaauccaa

SEQ ID NO: 2526715 - RNA, 18 nt, Human
aaaacucuacuuaaucca

SEQ ID NO: 2526716 - RNA, 22 nt, Human
aaaacugcugacuguuuucucu

SEQ ID NO: 2526717 - RNA, 23 nt, Human
aaaacugcugacuguuuucucuu

SEQ ID NO: 2526718 - RNA, 17 nt, Human
aaaagaugaaaauauuu

SEQ ID NO: 2526719 - RNA, 13 nt, Human
aaaagaugcuucu

SEQ ID NO: 2526720 - RNA, 15 nt, Human
aaaacccugccccca

SEQ ID NO: 2526721 - RNA, 22 nt, Human
aaaaccccacuacacagucugc

SEQ ID NO: 2526722 - RNA, 21 nt, Human
aaaaccuaaguccuuuaugug

SEQ ID NO: 2526723 - RNA, 20 nt, Human
aaaaccuaaguccuuuaugu

SEQ ID NO: 2526724 - RNA, 13 nt, Human
aaaaccugacaaa

SEQ ID NO: 2526725 - RNA, 22 nt, Human
aaaaccucacccgaggcugccc

SEQ ID NO: 2526726 - RNA, 15 nt, Human
aaaacccagauaaag

SEQ ID NO: 2526727 - RNA, 13 nt, Human
aaaacccagagag

SEQ ID NO: 2526728 - RNA, 12 nt, Human
aaaacccagaga

SEQ ID NO: 2526729 - RNA, 15 nt, Human
aaaacccagagagga

SEQ ID NO: 2526730 - RNA, 13 nt, Human
aaaaccacagcag

SEQ ID NO: 2526731 - RNA, 14 nt, Human
aaaaccacagcagu

SEQ ID NO: 2526732 - RNA, 12 nt, Human
aaaaccacagca

SEQ ID NO: 2526733 - RNA, 21 nt, Human
aaaaccaauguucucucuucu

SEQ ID NO: 2526734 - RNA, 18 nt, Human
aaaacauuaagaaaauca

SEQ ID NO: 2526735 - RNA, 16 nt, Human
aaaacauuaagaaaau

SEQ ID NO: 2526736 - RNA, 15 nt, Human
aaaacauuaagaaaa

SEQ ID NO: 2526737 - RNA, 23 nt, Human
aaaacauuaagaaaaucauauug

SEQ ID NO: 2526738 - RNA, 19 nt, Human
aaaacauuaagaaaaucau

SEQ ID NO: 2526739 - RNA, 16 nt, Human
aaaacauuccauccuu

SEQ ID NO: 2526740 - RNA, 12 nt, Human
aaaacauuguuc

SEQ ID NO: 2526741 - RNA, 13 nt, Human
aaaacauuguucc

SEQ ID NO: 2526742 - RNA, 15 nt, Human
aaaacaugcuacaca

SEQ ID NO: 2526743 - RNA, 14 nt, Human
aaaacauuaagaaa

SEQ ID NO: 2526744 - RNA, 19 nt, Human
aaaacauguaauauaaaga

SEQ ID NO: 2526745 - RNA, 14 nt, Human
aaaacaugguagaa

SEQ ID NO: 2526746 - RNA, 16 nt, Human
aaaacaugguagaauu

SEQ ID NO: 2526747 - RNA, 20 nt, Human
aaaacauaaucuucugccuu

SEQ ID NO: 2526748 - RNA, 24 nt, Human
aaaacauaaucuucugccuucuca

SEQ ID NO: 2526749 - RNA, 17 nt, Human
aaaacauaaucuucugc

SEQ ID NO: 2526750 - RNA, 18 nt, Human
aaaacauaaucuucugcc

SEQ ID NO: 2526751 - RNA, 20 nt, Human
aaaacaguccuucaaacuuc

SEQ ID NO: 2526752 - RNA, 22 nt, Human
aaaaauggaacauaaaauacaa

SEQ ID NO: 2526753 - RNA, 23 nt, Human
aaaaauggaaacauuuauuccuu

SEQ ID NO: 2526754 - RNA, 19 nt, Human
aaaaaugcugaacauugca

SEQ ID NO: 2526755 - RNA, 15 nt, Human
aaaaaugcugaacau

SEQ ID NO: 2526756 - RNA, 16 nt, Human
aaaaaugcugaacauu

SEQ ID NO: 2526757 - RNA, 18 nt, Human
aaaacagguggagaaauu

SEQ ID NO: 2526758 - RNA, 21 nt, Human
aaaacaggucuucaucgaauc

SEQ ID NO: 2526759 - RNA, 18 nt, Human
aaaacaggucaauacagu

SEQ ID NO: 2526760 - RNA, 14 nt, Human
aaaaauggcucaga

SEQ ID NO: 2526761 - RNA, 14 nt, Human
aaaaaucucaaauu

SEQ ID NO: 2526762 - RNA, 22 nt, Human
aaaaaucuaccuucuguaguuu

SEQ ID NO: 2526763 - RNA, 19 nt, Human
aaaaaucuaccuucuguag

SEQ ID NO: 2526764 - RNA, 19 nt, Human
aaaaauccucuuccucuga

SEQ ID NO: 2526765 - RNA, 15 nt, Human
aaaaauccucuuccu

SEQ ID NO: 2526766 - RNA, 18 nt, Human
aaaaaucuaccuucugua

SEQ ID NO: 2526767 - RNA, 22 nt, Human
aaaaaugccuuugagacaguuu

SEQ ID NO: 2526768 - RNA, 21 nt, Human
aaaaaugccuuugagacaguu

SEQ ID NO: 2526769 - RNA, 20 nt, Human
aaaaaugccuuugagacagu

SEQ ID NO: 2526770 - RNA, 19 nt, Human
aaaaaugccuuugagacag

SEQ ID NO: 2526771 - RNA, 24 nt, Human
aaaaaugccuuugagacaguuucu

SEQ ID NO: 2526772 - RNA, 14 nt, Human
aaaaaugcugaaca

SEQ ID NO: 2526773 - RNA, 18 nt, Human
aaaaaugccuuugagaca

SEQ ID NO: 2526774 - RNA, 15 nt, Human
aaaaaugccuuugag

SEQ ID NO: 2526775 - RNA, 14 nt, Human
aaaaaugccuuuga

SEQ ID NO: 2526776 - RNA, 17 nt, Human
gggagggcuccagacac

SEQ ID NO: 2526777 - RNA, 15 nt, Human
gggagggcuccagac

SEQ ID NO: 2526778 - RNA, 14 nt, Human
gggagggcuccaga

SEQ ID NO: 2526779 - RNA, 22 nt, Human
gggaggcucuggagcccacugu

SEQ ID NO: 2526780 - RNA, 18 nt, Human
gggagggcuccagacaca

SEQ ID NO: 2526781 - RNA, 17 nt, Human
gggaggucgaggcagga

SEQ ID NO: 2526782 - RNA, 18 nt, Human
gggaggucgaggcaggag

SEQ ID NO: 2526783 - RNA, 19 nt, Human
gggaggucgaggcaggagg

SEQ ID NO: 2526784 - RNA, 22 nt, Human
gggauguacaaggcgaucccau

SEQ ID NO: 2526785 - RNA, 13 nt, Human
gggauggugcccu

SEQ ID NO: 2526786 - RNA, 18 nt, Human
gggaugguggagggccac

SEQ ID NO: 2526787 - RNA, 14 nt, Human
gggaugucucucau

SEQ ID NO: 2526788 - RNA, 12 nt, Human
gggauggugccc

SEQ ID NO: 2526789 - RNA, 17 nt, Human
gggaugguggagggcca

SEQ ID NO: 2526790 - RNA, 16 nt, Human
gggaugguguucaaaa

SEQ ID NO: 2526791 - RNA, 14 nt, Human
gggaugugggaggg

SEQ ID NO: 2526792 - RNA, 20 nt, Human
gggauguggcugcagcagcg

SEQ ID NO: 2526793 - RNA, 23 nt, Human
gggauguauccaugggggcaggg

SEQ ID NO: 2526794 - RNA, 22 nt, Human
gggaugugaauugccugcagag

SEQ ID NO: 2526795 - RNA, 16 nt, Human
gggauuaaccucugca

SEQ ID NO: 2526796 - RNA, 20 nt, Human
gggauuaauaugaaaacuua

SEQ ID NO: 2526797 - RNA, 22 nt, Human
gggauguucagcacugucccuu

SEQ ID NO: 2526798 - RNA, 13 nt, Human
gggauguucuggc

SEQ ID NO: 2526799 - RNA, 16 nt, Human
gggauguucuggcccu

SEQ ID NO: 2526800 - RNA, 18 nt, Human
gggauggaggagaagaau

SEQ ID NO: 2526801 - RNA, 15 nt, Human
gggaugggccaccgc

SEQ ID NO: 2526802 - RNA, 14 nt, Human
gggaugggccaccg

SEQ ID NO: 2526803 - RNA, 13 nt, Human
gggaugggccacc

SEQ ID NO: 2526804 - RNA, 12 nt, Human
gggaugggaggu

SEQ ID NO: 2526805 - RNA, 16 nt, Human
gggaugggccaccgcc

SEQ ID NO: 2526806 - RNA, 15 nt, Human
gggaugguccugggg

SEQ ID NO: 2526807 - RNA, 16 nt, Human
gggaugguccuggggc

SEQ ID NO: 2526808 - RNA, 16 nt, Human
gggaugcccuggaggu

SEQ ID NO: 2526809 - RNA, 15 nt, Human
gggauggaaaaggaa

SEQ ID NO: 2526810 - RNA, 18 nt, Human
gggauggacugaugcuuu

SEQ ID NO: 2526811 - RNA, 14 nt, Human
gggauggaggagaa

SEQ ID NO: 2526812 - RNA, 15 nt, Human
gggauggaggagaag

SEQ ID NO: 2526813 - RNA, 15 nt, Human
gggaggcucaggucc

SEQ ID NO: 2526814 - RNA, 20 nt, Human
gggaggcggagaguacagug

SEQ ID NO: 2526815 - RNA, 22 nt, Human
gggagaagaaaggugaguuuga

SEQ ID NO: 2526816 - RNA, 13 nt, Human
aaaagcauguaca

SEQ ID NO: 2526817 - RNA, 12 nt, Human
aaaagcauguac

SEQ ID NO: 2526818 - RNA, 19 nt, Human
gggagaaugucaguaugug

SEQ ID NO: 2526819 - RNA, 22 nt, Human
gggagaaugucaguauguggaa

SEQ ID NO: 2526820 - RNA, 12 nt, Human
gggagaagcucc

SEQ ID NO: 2526821 - RNA, 15 nt, Human
gggagaaucauguga

SEQ ID NO: 2526822 - RNA, 14 nt, Human
aaaagcacaagaag

SEQ ID NO: 2526823 - RNA, 19 nt, Human
aaaagcagcccuuggccag

SEQ ID NO: 2526824 - RNA, 14 nt, Human
aaaagcagcuacca

SEQ ID NO: 2526825 - RNA, 16 nt, Human
aaaagcagcucucccc

SEQ ID NO: 2526826 - RNA, 13 nt, Human
aaaagcauaaaug

SEQ ID NO: 2526827 - RNA, 15 nt, Human
aaaagcauaaaugca

SEQ ID NO: 2526828 - RNA, 17 nt, Human
aaaagcagcucuccccu

SEQ ID NO: 2526829 - RNA, 15 nt, Human
aaaagaugcaaugua

SEQ ID NO: 2526830 - RNA, 21 nt, Human
aaaagauggggucuguaaaau

SEQ ID NO: 2526831 - RNA, 13 nt, Human
aaaagauguagau

SEQ ID NO: 2526832 - RNA, 19 nt, Human
aaaagauggggucuguaaa

SEQ ID NO: 2526833 - RNA, 12 nt, Human
aaaagcaagacu

SEQ ID NO: 2526834 - RNA, 14 nt, Human
aaaagcaaaaucau

SEQ ID NO: 2526835 - RNA, 14 nt, Human
aaaagauguagauu

SEQ ID NO: 2526836 - RNA, 14 nt, Human
aaaagcaaaugaga

SEQ ID NO: 2526837 - RNA, 14 nt, Human
aaaagcaagacugu

SEQ ID NO: 2526838 - RNA, 16 nt, Human
aaaagcaauuccaacc

SEQ ID NO: 2526839 - RNA, 21 nt, Human
aaaagcacacucauccccuca

SEQ ID NO: 2526840 - RNA, 15 nt, Human
gggagacaugugaca

SEQ ID NO: 2526841 - RNA, 12 nt, Human
gggagacagcau

SEQ ID NO: 2526842 - RNA, 19 nt, Human
gggagacacuggccccuca

SEQ ID NO: 2526843 - RNA, 14 nt, Human
gggagacacuggcc

SEQ ID NO: 2526844 - RNA, 15 nt, Human
gggagagggucugga

SEQ ID NO: 2526845 - RNA, 11 nt, Human
gggagcacugg

SEQ ID NO: 2526846 - RNA, 17 nt, Human
gggagauucaagggacc

SEQ ID NO: 2526847 - RNA, 16 nt, Human
gggagcacuggagugc

SEQ ID NO: 2526848 - RNA, 14 nt, Human
gggagcacuggagu

SEQ ID NO: 2526849 - RNA, 16 nt, Human
gggagcagacaggagg

SEQ ID NO: 2526850 - RNA, 13 nt, Human
gggagcagagaca

SEQ ID NO: 2526851 - RNA, 17 nt, Human
gggagagugcaggccug

SEQ ID NO: 2526852 - RNA, 16 nt, Human
gggagaggugccagca

SEQ ID NO: 2526853 - RNA, 19 nt, Human
gggagauggaguucuugug

SEQ ID NO: 2526854 - RNA, 19 nt, Human
gggagauggaucaaucaaa

SEQ ID NO: 2526855 - RNA, 11 nt, Human
gggaggcccca

SEQ ID NO: 2526856 - RNA, 16 nt, Human
gggaggccccacuggg

SEQ ID NO: 2526857 - RNA, 17 nt, Human
gggaggccuaggcgggc

SEQ ID NO: 2526858 - RNA, 18 nt, Human
gggaggccccacugggga

SEQ ID NO: 2526859 - RNA, 18 nt, Human
gggaggcggagaguacag

SEQ ID NO: 2526860 - RNA, 21 nt, Human
gggaggcggacguuccagccg

SEQ ID NO: 2526861 - RNA, 20 nt, Human
gggaggcggacguuccagcc

SEQ ID NO: 2526862 - RNA, 14 nt, Human
gggaggcgcgagcc

SEQ ID NO: 2526863 - RNA, 13 nt, Human
gggaggcucaggu

SEQ ID NO: 2526864 - RNA, 20 nt, Human
gggaggcggagcuugcagug

SEQ ID NO: 2526865 - RNA, 19 nt, Human
gggaggccaaggugggagg

SEQ ID NO: 2526866 - RNA, 21 nt, Human
gggagcaggcggugggcaccc

SEQ ID NO: 2526867 - RNA, 18 nt, Human
gggagcaggagauugaga

SEQ ID NO: 2526868 - RNA, 13 nt, Human
gggagcaggagau

SEQ ID NO: 2526869 - RNA, 12 nt, Human
gggagcaggaga

SEQ ID NO: 2526870 - RNA, 21 nt, Human
gggagcaggagauugagaagg

SEQ ID NO: 2526871 - RNA, 15 nt, Human
gggagcaggcggugg

SEQ ID NO: 2526872 - RNA, 14 nt, Human
gggcagaggaaagc

SEQ ID NO: 2526873 - RNA, 22 nt, Human
gggcagagcagagaccaucccu

SEQ ID NO: 2526874 - RNA, 17 nt, Human
gggcagagcagagacca

SEQ ID NO: 2526875 - RNA, 16 nt, Human
gggcagagcagagacc

SEQ ID NO: 2526876 - RNA, 18 nt, Human
gggcaacccccagccugc

SEQ ID NO: 2526877 - RNA, 16 nt, Human
gggcaacccccagccu

SEQ ID NO: 2526878 - RNA, 15 nt, Human
gggauugggccccug

SEQ ID NO: 2526879 - RNA, 15 nt, Human
gggauugcugccacu

SEQ ID NO: 2526880 - RNA, 16 nt, Human
gggauuguaaaauggu

SEQ ID NO: 2526881 - RNA, 17 nt, Human
gggauugcugccacuuu

SEQ ID NO: 2526882 - RNA, 16 nt, Human
gggauugggggcuggu

SEQ ID NO: 2526883 - RNA, 14 nt, Human
gggcaaagccuagu

SEQ ID NO: 2526884 - RNA, 17 nt, Human
gggauuguaaaauggug

SEQ ID NO: 2526885 - RNA, 14 nt, Human
gggauuacaggcgu

SEQ ID NO: 2526886 - RNA, 13 nt, Human
gggauuacaggcu

SEQ ID NO: 2526887 - RNA, 16 nt, Human
gggauuacaggcuccu

SEQ ID NO: 2526888 - RNA, 21 nt, Human
gggauuacaggcuccugccac

SEQ ID NO: 2526889 - RNA, 16 nt, Human
gggauuacccaagcaa

SEQ ID NO: 2526890 - RNA, 15 nt, Human
gggauuacccaagca

SEQ ID NO: 2526891 - RNA, 20 nt, Human
gggauuacaggcgugagcca

SEQ ID NO: 2526892 - RNA, 12 nt, Human
gggauuacaggu

SEQ ID NO: 2526893 - RNA, 15 nt, Human
gggauuacaggugug

SEQ ID NO: 2526894 - RNA, 13 nt, Human
gggcaggcugaca

SEQ ID NO: 2526895 - RNA, 23 nt, Human
gggcaggcccugcacuguccugc

SEQ ID NO: 2526896 - RNA, 22 nt, Human
gggcaggcccugcacuguccug

SEQ ID NO: 2526897 - RNA, 21 nt, Human
gggcaggcccugcacuguccu

SEQ ID NO: 2526898 - RNA, 20 nt, Human
gggcagggaaggggaggcag

SEQ ID NO: 2526899 - RNA, 15 nt, Human
gggcaggcacagcac

SEQ ID NO: 2526900 - RNA, 14 nt, Human
gggcaggcacagca

SEQ ID NO: 2526901 - RNA, 13 nt, Human
gggcaggcacagc

SEQ ID NO: 2526902 - RNA, 12 nt, Human
gggcaggcacag

SEQ ID NO: 2526903 - RNA, 15 nt, Human
gggcaggcaugaagu

SEQ ID NO: 2526904 - RNA, 17 nt, Human
gggcaggcacagcacag

SEQ ID NO: 2526905 - RNA, 11 nt, Human
gggcaggcagu

SEQ ID NO: 2526906 - RNA, 19 nt, Human
gggcaggcccugcacuguc

SEQ ID NO: 2526907 - RNA, 17 nt, Human
gggcaggcccugcacug

SEQ ID NO: 2526908 - RNA, 14 nt, Human
gggcaggcccugca

SEQ ID NO: 2526909 - RNA, 13 nt, Human
gggcaggcccugc

SEQ ID NO: 2526910 - RNA, 15 nt, Human
gggcaggccagagcu

SEQ ID NO: 2526911 - RNA, 12 nt, Human
gggcagggagcg

SEQ ID NO: 2526912 - RNA, 19 nt, Human
aaaagggacugagaaauuu

SEQ ID NO: 2526913 - RNA, 18 nt, Human
aaaagggauuacccaagc

SEQ ID NO: 2526914 - RNA, 23 nt, Human
aaaagggcagggcaucuccugug

SEQ ID NO: 2526915 - RNA, 21 nt, Human
aaaagggucuugggaaauaug

SEQ ID NO: 2526916 - RNA, 19 nt, Human
aaaagggucuugggaaaua

SEQ ID NO: 2526917 - RNA, 19 nt, Human
aaaagggcucuuuagccag

SEQ ID NO: 2526918 - RNA, 19 nt, Human
aaaagguaugcaaucaaau

SEQ ID NO: 2526919 - RNA, 14 nt, Human
aaaagguaaaacuu

SEQ ID NO: 2526920 - RNA, 23 nt, Human
aaaagguaaaacuuuuuauauuu

SEQ ID NO: 2526921 - RNA, 14 nt, Human
gggcagcccuugcu

SEQ ID NO: 2526922 - RNA, 12 nt, Human
gggcagagucac

SEQ ID NO: 2526923 - RNA, 17 nt, Human
gggcagagugagaccca

SEQ ID NO: 2526924 - RNA, 16 nt, Human
gggcagagucacacgg

SEQ ID NO: 2526925 - RNA, 22 nt, Human
gggcaacagagcaagauccugu

SEQ ID NO: 2526926 - RNA, 15 nt, Human
gggcagaggcuggag

SEQ ID NO: 2526927 - RNA, 14 nt, Human
gggcagaggcugga

SEQ ID NO: 2526928 - RNA, 15 nt, Human
gggcagagggcagag

SEQ ID NO: 2526929 - RNA, 20 nt, Human
gggcagagggcagaggcugg

SEQ ID NO: 2526930 - RNA, 16 nt, Human
gggcagaggcuggagg

SEQ ID NO: 2526931 - RNA, 21 nt, Human
gggcagaggcuggaggcaggg

SEQ ID NO: 2526932 - RNA, 23 nt, Human
gggcagaggcuggaggcagggcc

SEQ ID NO: 2526933 - RNA, 14 nt, Human
gggcagagggcaga

SEQ ID NO: 2526934 - RNA, 13 nt, Human
gggcagcgccagg

SEQ ID NO: 2526935 - RNA, 15 nt, Human
gggcagcgccaggcu

SEQ ID NO: 2526936 - RNA, 16 nt, Human
gggcagcgccaggcug

SEQ ID NO: 2526937 - RNA, 19 nt, Human
gggcagcccuugcuuguug

SEQ ID NO: 2526938 - RNA, 16 nt, Human
gggcagcugccagaga

SEQ ID NO: 2526939 - RNA, 18 nt, Human
gggcagcugccagagaag

SEQ ID NO: 2526940 - RNA, 12 nt, Human
gggcagcugcca

SEQ ID NO: 2526941 - RNA, 21 nt, Human
gggcagcgcccuuccucucca

SEQ ID NO: 2526942 - RNA, 20 nt, Human
gggcagcgcccuuccucucc

SEQ ID NO: 2526943 - RNA, 18 nt, Human
gggcagcgcccuuccucu

SEQ ID NO: 2526944 - RNA, 16 nt, Human
gggcagcgcccuuccu

SEQ ID NO: 2526945 - RNA, 23 nt, Human
gggcagcgcccuuccucuccacc

SEQ ID NO: 2526946 - RNA, 14 nt, Human
gcuuuuccuugggg

SEQ ID NO: 2526947 - RNA, 20 nt, Human
gcuuuuccuuggggcaggca

SEQ ID NO: 2526948 - RNA, 21 nt, Human
gcuuuuccuuggggcaggcag

SEQ ID NO: 2526949 - RNA, 14 nt, Human
gcuuuucucagcug

SEQ ID NO: 2526950 - RNA, 22 nt, Human
gcuuuuccuuggggcaggcagu

SEQ ID NO: 2526951 - RNA, 23 nt, Human
gcuuuuccuuggggcaggcagug

SEQ ID NO: 2526952 - RNA, 17 nt, Human
gcuuuucuccucuuucc

SEQ ID NO: 2526953 - RNA, 16 nt, Human
gcuuuucuccucuuuc

SEQ ID NO: 2526954 - RNA, 13 nt, Human
gcuuuucuccucu

SEQ ID NO: 2526955 - RNA, 22 nt, Human
gcuuuuccuuuguuuuuaugaa

SEQ ID NO: 2526956 - RNA, 16 nt, Human
gcuuuucugcccuggc

SEQ ID NO: 2526957 - RNA, 11 nt, Human
gcuuuuggcaa

SEQ ID NO: 2526958 - RNA, 15 nt, Human
gcuuuucugcccugg

SEQ ID NO: 2526959 - RNA, 14 nt, Human
gcuuuucugcccug

SEQ ID NO: 2526960 - RNA, 18 nt, Human
gcuuuugucuaugggacu

SEQ ID NO: 2526961 - RNA, 15 nt, Human
gcuuuuggucugugu

SEQ ID NO: 2526962 - RNA, 13 nt, Human
gcuuuuuccagag

SEQ ID NO: 2526963 - RNA, 17 nt, Human
gcuuuuuauuucugcau

SEQ ID NO: 2526964 - RNA, 21 nt, Human
gcuuuuuauuucugcauaugu

SEQ ID NO: 2526965 - RNA, 22 nt, Human
gcuuuuuaauuguuguuucuuu

SEQ ID NO: 2526966 - RNA, 21 nt, Human
gcuuuuuaauuguuguuucuu

SEQ ID NO: 2526967 - RNA, 20 nt, Human
gcuuuuuaauuguuguuucu

SEQ ID NO: 2526968 - RNA, 19 nt, Human
gcuuuuuauuccuccugcu

SEQ ID NO: 2526969 - RNA, 15 nt, Human
gcuuuuuauuucugc

SEQ ID NO: 2526970 - RNA, 13 nt, Human
gcuuuuuaauugu

SEQ ID NO: 2526971 - RNA, 12 nt, Human
gcuuuugugcau

SEQ ID NO: 2526972 - RNA, 20 nt, Human
gcuuuuuuaucaugugaaau

SEQ ID NO: 2526973 - RNA, 18 nt, Human
gcuuuuuuaucaugugaa

SEQ ID NO: 2526974 - RNA, 21 nt, Human
gcuuuuugagguggcacuuuu

SEQ ID NO: 2526975 - RNA, 18 nt, Human
gcuuuuucugacuccagu

SEQ ID NO: 2526976 - RNA, 14 nt, Human
gcuuuuucugacuc

SEQ ID NO: 2526977 - RNA, 12 nt, Human
gcuuuuucugac

SEQ ID NO: 2526978 - RNA, 11 nt, Human
gcuuuuucuga

SEQ ID NO: 2526979 - RNA, 15 nt, Human
gcuuuuuuaucaugu

SEQ ID NO: 2526980 - RNA, 18 nt, Human
ggaaaauuuuaaaaauac

SEQ ID NO: 2526981 - RNA, 20 nt, Human
gcuuuuugagguggcacuuu

SEQ ID NO: 2526982 - RNA, 16 nt, Human
gcuuuuugucuuuucu

SEQ ID NO: 2526983 - RNA, 17 nt, Human
gcuuuuuuguuuuggcu

SEQ ID NO: 2526984 - RNA, 14 nt, Human
ggaaacaaagcuua

SEQ ID NO: 2526985 - RNA, 12 nt, Human
ggaaacaauaua

SEQ ID NO: 2526986 - RNA, 16 nt, Human
ggaaacaacagcuuua

SEQ ID NO: 2526987 - RNA, 23 nt, Human
ggaaacaaagcuuagcaggagag

SEQ ID NO: 2526988 - RNA, 22 nt, Human
ggaaacaaagcuuagcaggaga

SEQ ID NO: 2526989 - RNA, 13 nt, Human
ggaaacaacagcu

SEQ ID NO: 2526990 - RNA, 16 nt, Human
ggaaacccagcucugg

SEQ ID NO: 2526991 - RNA, 13 nt, Human
ggaaacagacucg

SEQ ID NO: 2526992 - RNA, 18 nt, Human
ggaaaccugcccugccug

SEQ ID NO: 2526993 - RNA, 17 nt, Human
ggaaaccugcccugccu

SEQ ID NO: 2526994 - RNA, 14 nt, Human
ggaaaccugcccug

SEQ ID NO: 2526995 - RNA, 13 nt, Human
ggaaaccugcccu

SEQ ID NO: 2526996 - RNA, 22 nt, Human
ggaaaccugcccugccugaggg

SEQ ID NO: 2526997 - RNA, 19 nt, Human
ggaaaccugcccugccuga

SEQ ID NO: 2526998 - RNA, 12 nt, Human
ggaaaccugccc

SEQ ID NO: 2526999 - RNA, 22 nt, Human
ggaaacagacucgauucauauu

SEQ ID NO: 2527000 - RNA, 17 nt, Human
gcuuugaucccuucuua

SEQ ID NO: 2527001 - RNA, 14 nt, Human
gcuuugaucccuuc

SEQ ID NO: 2527002 - RNA, 14 nt, Human
gcuuugaucccuga

SEQ ID NO: 2527003 - RNA, 15 nt, Human
gcuuugaucccugac

SEQ ID NO: 2527004 - RNA, 15 nt, Human
ggaagacgaggcccu

SEQ ID NO: 2527005 - RNA, 14 nt, Human
ggaagaccuggcaa

SEQ ID NO: 2527006 - RNA, 15 nt, Human
ggaagacgccugagc

SEQ ID NO: 2527007 - RNA, 16 nt, Human
ggaagacgccugagcu

SEQ ID NO: 2527008 - RNA, 16 nt, Human
ggaagacgaggcccuc

SEQ ID NO: 2527009 - RNA, 20 nt, Human
ggaagacuucaucccucugg

SEQ ID NO: 2527010 - RNA, 17 nt, Human
ggaagacuucaucccuc

SEQ ID NO: 2527011 - RNA, 18 nt, Human
ggaagaagggagaagaaa

SEQ ID NO: 2527012 - RNA, 23 nt, Human
ggaagaccccacccaagcuuggc

SEQ ID NO: 2527013 - RNA, 19 nt, Human
ggaagaccccacccaagcu

SEQ ID NO: 2527014 - RNA, 15 nt, Human
ggaagaccccaccca

SEQ ID NO: 2527015 - RNA, 19 nt, Human
ggaagaauuuuaaaaauga

SEQ ID NO: 2527016 - RNA, 14 nt, Human
ggaagaauuuuaaa

SEQ ID NO: 2527017 - RNA, 22 nt, Human
ggaaaugggcagagcagagacc

SEQ ID NO: 2527018 - RNA, 18 nt, Human
ggaaaugggcagagcaga

SEQ ID NO: 2527019 - RNA, 17 nt, Human
ggaaaugggcagagcag

SEQ ID NO: 2527020 - RNA, 16 nt, Human
ggaaaugggcagagca

SEQ ID NO: 2527021 - RNA, 15 nt, Human
ggaaaccuuggugua

SEQ ID NO: 2527022 - RNA, 14 nt, Human
ggaaaugggcagag

SEQ ID NO: 2527023 - RNA, 15 nt, Human
ggaaaugcugggcug

SEQ ID NO: 2527024 - RNA, 18 nt, Human
ggaaaugaucaguuuuuu

SEQ ID NO: 2527025 - RNA, 15 nt, Human
ggaaaugaaagaaag

SEQ ID NO: 2527026 - RNA, 16 nt, Human
ggaaaugaaugugugu

SEQ ID NO: 2527027 - RNA, 21 nt, Human
ggaacaaggcaaggcugucaa

SEQ ID NO: 2527028 - RNA, 17 nt, Human
ggaacaaggcaaggcug

SEQ ID NO: 2527029 - RNA, 15 nt, Human
ggaacaaggcaaggc

SEQ ID NO: 2527030 - RNA, 18 nt, Human
ggaacaaggagucagaca

SEQ ID NO: 2527031 - RNA, 22 nt, Human
ggaaauucccuucaucuggaac

SEQ ID NO: 2527032 - RNA, 23 nt, Human
ggaaauugagauuagagggaggu

SEQ ID NO: 2527033 - RNA, 20 nt, Human
ggaaauucccuucaucugga

SEQ ID NO: 2527034 - RNA, 13 nt, Human
ggaaauggugccu

SEQ ID NO: 2527035 - RNA, 14 nt, Human
ggaaauuaagaaga

SEQ ID NO: 2527036 - RNA, 19 nt, Human
ggaaauucccuucaucugg

SEQ ID NO: 2527037 - RNA, 19 nt, Human
ggaaauuaagaagaaacua

SEQ ID NO: 2527038 - RNA, 15 nt, Human
ggaaauggaauacug

SEQ ID NO: 2527039 - RNA, 22 nt, Human
ggaaauggaaccccaccacugu

SEQ ID NO: 2527040 - RNA, 19 nt, Human
ggaaaugguaugagcugag

SEQ ID NO: 2527041 - RNA, 17 nt, Human
ggaaaugucaacaagua

SEQ ID NO: 2527042 - RNA, 16 nt, Human
ggaagaagggagaaga

SEQ ID NO: 2527043 - RNA, 15 nt, Human
ggaagaagggagaag

SEQ ID NO: 2527044 - RNA, 14 nt, Human
ggaagaagggagaa

SEQ ID NO: 2527045 - RNA, 13 nt, Human
ggaagaagggaga

SEQ ID NO: 2527046 - RNA, 19 nt, Human
ggaagaagcuuaggcaggg

SEQ ID NO: 2527047 - RNA, 18 nt, Human
ggaagaagcuuaggcagg

SEQ ID NO: 2527048 - RNA, 16 nt, Human
ggaagaagagggagag

SEQ ID NO: 2527049 - RNA, 15 nt, Human
ggaagaagagggaga

SEQ ID NO: 2527050 - RNA, 21 nt, Human
ggaagaacggggcucuucuca

SEQ ID NO: 2527051 - RNA, 14 nt, Human
ggaagacaauguga

SEQ ID NO: 2527052 - RNA, 16 nt, Human
ggaagacaaugugaaa

SEQ ID NO: 2527053 - RNA, 14 nt, Human
ggaacugcugggcu

SEQ ID NO: 2527054 - RNA, 23 nt, Human
ggaacuuggggaguuaagaccug

SEQ ID NO: 2527055 - RNA, 15 nt, Human
ggaacugcugggcuu

SEQ ID NO: 2527056 - RNA, 16 nt, Human
ggaagaaauuccugua

SEQ ID NO: 2527057 - RNA, 19 nt, Human
ggaagaaagagaaggagcc

SEQ ID NO: 2527058 - RNA, 16 nt, Human
ggaagaaagagaagga

SEQ ID NO: 2527059 - RNA, 14 nt, Human
ggaagaaaagagcu

SEQ ID NO: 2527060 - RNA, 19 nt, Human
ggaagaaauuccuguagca

SEQ ID NO: 2527061 - RNA, 18 nt, Human
ggaagaaauuccuguagc

SEQ ID NO: 2527062 - RNA, 11 nt, Human
ggaagaacacc

SEQ ID NO: 2527063 - RNA, 23 nt, Human
ggaagaaauuccuguagcaucuu

SEQ ID NO: 2527064 - RNA, 13 nt, Human
ggaagaacauaga

SEQ ID NO: 2527065 - RNA, 14 nt, Human
ggaagaacauagaa

SEQ ID NO: 2527066 - RNA, 16 nt, Human
ggaagaacauagaacu

SEQ ID NO: 2527067 - RNA, 23 nt, Human
ggaacaaggcaaggcugucaauu

SEQ ID NO: 2527068 - RNA, 14 nt, Human
ggaacacacuugga

SEQ ID NO: 2527069 - RNA, 13 nt, Human
ggaacaaucuaaa

SEQ ID NO: 2527070 - RNA, 13 nt, Human
ggaacaccuccuc

SEQ ID NO: 2527071 - RNA, 14 nt, Human
ggaacacggccaca

SEQ ID NO: 2527072 - RNA, 17 nt, Human
ggaacaccauaggucac

SEQ ID NO: 2527073 - RNA, 14 nt, Human
ggaacugcagaccu

SEQ ID NO: 2527074 - RNA, 13 nt, Human
ggaacugcagacc

SEQ ID NO: 2527075 - RNA, 19 nt, Human
ggaacucuggcuuccaggu

SEQ ID NO: 2527076 - RNA, 20 nt, Human
ggaacucuggcuuccaggua

SEQ ID NO: 2527077 - RNA, 16 nt, Human
ggaacugcaugcugcu

SEQ ID NO: 2527078 - RNA, 17 nt, Human
ggaacugcagaccuguc

SEQ ID NO: 2527079 - RNA, 15 nt, Human
ggaacugcagaccug

SEQ ID NO: 2527080 - RNA, 21 nt, Human
ggaacugcagaccuguccucc

SEQ ID NO: 2527081 - RNA, 15 nt, Human
ggaacugcaugcugc

SEQ ID NO: 2527082 - RNA, 15 nt, Human
ggaacacuccuucac

SEQ ID NO: 2527083 - RNA, 19 nt, Human
ggaacacuccuucacagau

SEQ ID NO: 2527084 - RNA, 17 nt, Human
ggaacugaacauuccag

SEQ ID NO: 2527085 - RNA, 22 nt, Human
gcuuccagugaggcucugcccu

SEQ ID NO: 2527086 - RNA, 20 nt, Human
gcuugaccgugaggccagag

SEQ ID NO: 2527087 - RNA, 15 nt, Human
gcuugacaacaucug

SEQ ID NO: 2527088 - RNA, 20 nt, Human
gcuugaagccaaagaaaaau

SEQ ID NO: 2527089 - RNA, 18 nt, Human
gcuugaagccaaagaaaa

SEQ ID NO: 2527090 - RNA, 14 nt, Human
gcuugaagccaagu

SEQ ID NO: 2527091 - RNA, 16 nt, Human
gcuugaagccaaagaa

SEQ ID NO: 2527092 - RNA, 15 nt, Human
gcuugaagccaaaga

SEQ ID NO: 2527093 - RNA, 14 nt, Human
gcuugaagccaaag

SEQ ID NO: 2527094 - RNA, 12 nt, Human
gcuugaagccaa

SEQ ID NO: 2527095 - RNA, 11 nt, Human
gcuugaagcca

SEQ ID NO: 2527096 - RNA, 22 nt, Human
gcuugaagaucguuaguaucua

SEQ ID NO: 2527097 - RNA, 13 nt, Human
gcuugaacccagg

SEQ ID NO: 2527098 - RNA, 21 nt, Human
gcuugaagaucguuaguaucu

SEQ ID NO: 2527099 - RNA, 20 nt, Human
gcuugaaagaaaauaugcau

SEQ ID NO: 2527100 - RNA, 15 nt, Human
gcuucuucagagacu

SEQ ID NO: 2527101 - RNA, 23 nt, Human
gcuucuuaaucuuuucacaaaua

SEQ ID NO: 2527102 - RNA, 22 nt, Human
gcuucuuaaucuuuucacaaau

SEQ ID NO: 2527103 - RNA, 13 nt, Human
gcuugaaagaaaa

SEQ ID NO: 2527104 - RNA, 12 nt, Human
gcuucuucagag

SEQ ID NO: 2527105 - RNA, 21 nt, Human
gcuucuuaaucuuuucacaaa

SEQ ID NO: 2527106 - RNA, 19 nt, Human
gcuucuuaaucuuuucaca

SEQ ID NO: 2527107 - RNA, 22 nt, Human
gcuucuuaauauaacugccuua

SEQ ID NO: 2527108 - RNA, 21 nt, Human
gcuucuuaauauaacugccuu

SEQ ID NO: 2527109 - RNA, 15 nt, Human
gcuuccaugauucua

SEQ ID NO: 2527110 - RNA, 18 nt, Human
gcuuccaugauucuauuu

SEQ ID NO: 2527111 - RNA, 14 nt, Human
gcuuccaugauucu

SEQ ID NO: 2527112 - RNA, 17 nt, Human
gcuuccaugagaacagc

SEQ ID NO: 2527113 - RNA, 17 nt, Human
gcuuccauuugugugug

SEQ ID NO: 2527114 - RNA, 18 nt, Human
gcuuccugacaaucaacu

SEQ ID NO: 2527115 - RNA, 19 nt, Human
gcuuccaugauucuauuua

SEQ ID NO: 2527116 - RNA, 12 nt, Human
gcuuccauucca

SEQ ID NO: 2527117 - RNA, 23 nt, Human
gcuuccagugaggcucugcccuu

SEQ ID NO: 2527118 - RNA, 20 nt, Human
gcuuccugcguccuccucac

SEQ ID NO: 2527119 - RNA, 19 nt, Human
gcuuccuggcaauagucaa

SEQ ID NO: 2527120 - RNA, 19 nt, Human
gcuucuuaauauaacugcc

SEQ ID NO: 2527121 - RNA, 18 nt, Human
gcuugaccuuuaagagaa

SEQ ID NO: 2527122 - RNA, 23 nt, Human
gcuugaccgugaggccagagaca

SEQ ID NO: 2527123 - RNA, 22 nt, Human
gcuugaccuuuaagagaaauga

SEQ ID NO: 2527124 - RNA, 17 nt, Human
gcuuguaaauagcucag

SEQ ID NO: 2527125 - RNA, 14 nt, Human
gcuuuccccugugg

SEQ ID NO: 2527126 - RNA, 12 nt, Human
gcuuuccccugu

SEQ ID NO: 2527127 - RNA, 22 nt, Human
gcuuuccccaugucucgacuca

SEQ ID NO: 2527128 - RNA, 14 nt, Human
gcuugaccugaggc

SEQ ID NO: 2527129 - RNA, 21 nt, Human
gcuuuccccaugucucgacuc

SEQ ID NO: 2527130 - RNA, 19 nt, Human
gcuuguaaauagcucaggu

SEQ ID NO: 2527131 - RNA, 18 nt, Human
gcuuguaaauagcucagg

SEQ ID NO: 2527132 - RNA, 16 nt, Human
gcuuuccucuuccuga

SEQ ID NO: 2527133 - RNA, 22 nt, Human
gcuuuccccuguggggaucuca

SEQ ID NO: 2527134 - RNA, 17 nt, Human
gcuuuccccugugggga

SEQ ID NO: 2527135 - RNA, 16 nt, Human
gcuuuccccugugggg

SEQ ID NO: 2527136 - RNA, 15 nt, Human
gcuuuccccuguggg

SEQ ID NO: 2527137 - RNA, 15 nt, Human
gcuuucccugccucu

SEQ ID NO: 2527138 - RNA, 16 nt, Human
gcuuucccuuaucaaa

SEQ ID NO: 2527139 - RNA, 19 nt, Human
gcuuuccucaucaggccau

SEQ ID NO: 2527140 - RNA, 17 nt, Human
gcuuucuauuguacaga

SEQ ID NO: 2527141 - RNA, 15 nt, Human
gcuuucuauuguaca

SEQ ID NO: 2527142 - RNA, 19 nt, Human
gcuuugagguggaagaggg

SEQ ID NO: 2527143 - RNA, 22 nt, Human
gcuuugagguggaagagggcug

SEQ ID NO: 2527144 - RNA, 18 nt, Human
gcuuucugcucagcuucu

SEQ ID NO: 2527145 - RNA, 19 nt, Human
gcuuucugcucagcuucuc

SEQ ID NO: 2527146 - RNA, 22 nt, Human
gcuuucuggaaaagaggaguuu

SEQ ID NO: 2527147 - RNA, 21 nt, Human
gcuuucugcucagcuucuccu

SEQ ID NO: 2527148 - RNA, 11 nt, Human
gcuuucugucu

SEQ ID NO: 2527149 - RNA, 13 nt, Human
gcuuucuggagag

SEQ ID NO: 2527150 - RNA, 13 nt, Human
gcuuucugcucag

SEQ ID NO: 2527151 - RNA, 20 nt, Human
gcuguacuucgucuucuaau

SEQ ID NO: 2527152 - RNA, 23 nt, Human
gcuguacaucuauuuuggauugu

SEQ ID NO: 2527153 - RNA, 20 nt, Human
gcuguagacauuugcuauga

SEQ ID NO: 2527154 - RNA, 13 nt, Human
gcuguagaaggag

SEQ ID NO: 2527155 - RNA, 12 nt, Human
gcuguacaucua

SEQ ID NO: 2527156 - RNA, 16 nt, Human
gcuguacaucuauuuu

SEQ ID NO: 2527157 - RNA, 20 nt, Human
gcuguacaucuauuuuggau

SEQ ID NO: 2527158 - RNA, 22 nt, Human
gcuguacaucuauuuuggauug

SEQ ID NO: 2527159 - RNA, 20 nt, Human
gcugguuuuguaagaugcug

SEQ ID NO: 2527160 - RNA, 12 nt, Human
gcugguuuuccu

SEQ ID NO: 2527161 - RNA, 14 nt, Human
gcugguuuuccuaa

SEQ ID NO: 2527162 - RNA, 23 nt, Human
gcugguuuuccuaaaugcaguga

SEQ ID NO: 2527163 - RNA, 12 nt, Human
gcuguauuuuaa

SEQ ID NO: 2527164 - RNA, 19 nt, Human
gcuguauuagucacagaga

SEQ ID NO: 2527165 - RNA, 18 nt, Human
gcuguauugaaucaugua

SEQ ID NO: 2527166 - RNA, 17 nt, Human
gcuguauugaaucaugu

SEQ ID NO: 2527167 - RNA, 13 nt, Human
gcuguauucuucu

SEQ ID NO: 2527168 - RNA, 13 nt, Human
gcuguauuuuaaa

SEQ ID NO: 2527169 - RNA, 21 nt, Human
gcugguucggauuuggggugg

SEQ ID NO: 2527170 - RNA, 20 nt, Human
gcugguucggauuuggggug

SEQ ID NO: 2527171 - RNA, 14 nt, Human
gcugguugcugugu

SEQ ID NO: 2527172 - RNA, 13 nt, Human
gcugguugcugug

SEQ ID NO: 2527173 - RNA, 12 nt, Human
gcugguucugua

SEQ ID NO: 2527174 - RNA, 17 nt, Human
gcugguuggagagcuag

SEQ ID NO: 2527175 - RNA, 16 nt, Human
gcugguuggagagcua

SEQ ID NO: 2527176 - RNA, 16 nt, Human
gcugguugcugugugg

SEQ ID NO: 2527177 - RNA, 15 nt, Human
gcugguugcugugug

SEQ ID NO: 2527178 - RNA, 15 nt, Human
gcugguuuccucauu

SEQ ID NO: 2527179 - RNA, 18 nt, Human
gcugguuggagagcuaga

SEQ ID NO: 2527180 - RNA, 24 nt, Human
gcugguugucauuuuugcaguaga

SEQ ID NO: 2527181 - RNA, 23 nt, Human
gcugguucaggguuggccccugc

SEQ ID NO: 2527182 - RNA, 23 nt, Human
gcuggagccuguguaacagcucc

SEQ ID NO: 2527183 - RNA, 22 nt, Human
gcuggagccuguguaacagcuc

SEQ ID NO: 2527184 - RNA, 20 nt, Human
gcuggagugcagugguguga

SEQ ID NO: 2527185 - RNA, 20 nt, Human
gcuggaguucagugguguga

SEQ ID NO: 2527186 - RNA, 16 nt, Human
gcuggaguuucaugua

SEQ ID NO: 2527187 - RNA, 15 nt, Human
gcuggauaaaaugag

SEQ ID NO: 2527188 - RNA, 19 nt, Human
gcuggaucacagcugcuuu

SEQ ID NO: 2527189 - RNA, 14 nt, Human
gcuggauaaaauga

SEQ ID NO: 2527190 - RNA, 23 nt, Human
gcuggaucacagcugcuuucugu

SEQ ID NO: 2527191 - RNA, 13 nt, Human
gcuggaucuguga

SEQ ID NO: 2527192 - RNA, 18 nt, Human
gcugugccacccugggcu

SEQ ID NO: 2527193 - RNA, 17 nt, Human
gcugugccacccugggc

SEQ ID NO: 2527194 - RNA, 15 nt, Human
gcugugccacccugg

SEQ ID NO: 2527195 - RNA, 14 nt, Human
gcugugccacccug

SEQ ID NO: 2527196 - RNA, 13 nt, Human
gcugugccacccu

SEQ ID NO: 2527197 - RNA, 16 nt, Human
gcugugcagccugucc

SEQ ID NO: 2527198 - RNA, 12 nt, Human
gcugugccaccc

SEQ ID NO: 2527199 - RNA, 16 nt, Human
gcugugcccucuugau

SEQ ID NO: 2527200 - RNA, 22 nt, Human
gcugugccacccugggcucugu

SEQ ID NO: 2527201 - RNA, 21 nt, Human
gcugugccacccugggcucug

SEQ ID NO: 2527202 - RNA, 19 nt, Human
gcugugccacccugggcuc

SEQ ID NO: 2527203 - RNA, 17 nt, Human
gcugugccucccaaaau

SEQ ID NO: 2527204 - RNA, 15 nt, Human
gcuguugcugaauag

SEQ ID NO: 2527205 - RNA, 14 nt, Human
gcuguugcugaaua

SEQ ID NO: 2527206 - RNA, 12 nt, Human
gcugugccucug

SEQ ID NO: 2527207 - RNA, 23 nt, Human
gcuguuggccucugcaaaggaaa

SEQ ID NO: 2527208 - RNA, 22 nt, Human
gcuguuggcagugagugagccu

SEQ ID NO: 2527209 - RNA, 20 nt, Human
gcuguuuguuugacaaagaa

SEQ ID NO: 2527210 - RNA, 12 nt, Human
gcuguuugucau

SEQ ID NO: 2527211 - RNA, 16 nt, Human
gcuguuggcagugagu

SEQ ID NO: 2527212 - RNA, 23 nt, Human
gcuguuggcacucacagaccugg

SEQ ID NO: 2527213 - RNA, 22 nt, Human
gcuguuggcacucacagaccug

SEQ ID NO: 2527214 - RNA, 16 nt, Human
gcuguuggcacucaca

SEQ ID NO: 2527215 - RNA, 14 nt, Human
gcuguuggcugggg

SEQ ID NO: 2527216 - RNA, 19 nt, Human
gcuguugcugaauaggcga

SEQ ID NO: 2527217 - RNA, 16 nt, Human
gcuguugcugaauagg

SEQ ID NO: 2527218 - RNA, 13 nt, Human
gcuguuggcacuc

SEQ ID NO: 2527219 - RNA, 13 nt, Human
gcuguugcugaau

SEQ ID NO: 2527220 - RNA, 13 nt, Human
gcuguuggcuggg

SEQ ID NO: 2527221 - RNA, 23 nt, Human
gcuuaauguuuauuccugauaau

SEQ ID NO: 2527222 - RNA, 17 nt, Human
gcuuaauguuuauuccu

SEQ ID NO: 2527223 - RNA, 14 nt, Human
gcuuaauguuuauu

SEQ ID NO: 2527224 - RNA, 16 nt, Human
gcuuaaugcuucuuuc

SEQ ID NO: 2527225 - RNA, 14 nt, Human
gcuuaaugcuucuu

SEQ ID NO: 2527226 - RNA, 12 nt, Human
gcuuaauguuua

SEQ ID NO: 2527227 - RNA, 19 nt, Human
gcuuacaagccagcuggag

SEQ ID NO: 2527228 - RNA, 13 nt, Human
gcuuacaagccag

SEQ ID NO: 2527229 - RNA, 19 nt, Human
gcuguuuuguggauuuuug

SEQ ID NO: 2527230 - RNA, 20 nt, Human
gcuguuuuccucccuucugc

SEQ ID NO: 2527231 - RNA, 21 nt, Human
gcuguuuuccucccuucugcu

SEQ ID NO: 2527232 - RNA, 13 nt, Human
gcuguuuugugga

SEQ ID NO: 2527233 - RNA, 22 nt, Human
gcuguuuuccucccuucugcua

SEQ ID NO: 2527234 - RNA, 16 nt, Human
gcuguuuuccucccuu

SEQ ID NO: 2527235 - RNA, 18 nt, Human
gcuguuuuccucccuucu

SEQ ID NO: 2527236 - RNA, 15 nt, Human
gcuguuuuccucccu

SEQ ID NO: 2527237 - RNA, 21 nt, Human
gcuguuuguuugacaaagaaa

SEQ ID NO: 2527238 - RNA, 21 nt, Human
gcuguuuuaguuaaauuucug

SEQ ID NO: 2527239 - RNA, 17 nt, Human
gcuguuuucccugaccu

SEQ ID NO: 2527240 - RNA, 18 nt, Human
gcuguuuuguucuguggu

SEQ ID NO: 2527241 - RNA, 15 nt, Human
gcuuaaaaaucauug

SEQ ID NO: 2527242 - RNA, 18 nt, Human
gcuuaaugacacuagcua

SEQ ID NO: 2527243 - RNA, 12 nt, Human
gcuuaaugaaaa

SEQ ID NO: 2527244 - RNA, 23 nt, Human
gcuucagguuaucgaaauaacaa

SEQ ID NO: 2527245 - RNA, 14 nt, Human
gcuucaguggagaa

SEQ ID NO: 2527246 - RNA, 15 nt, Human
gcuucaguggcagcu

SEQ ID NO: 2527247 - RNA, 22 nt, Human
gcuucagguuaucgaaauaaca

SEQ ID NO: 2527248 - RNA, 21 nt, Human
gcuucagguuaucgaaauaac

SEQ ID NO: 2527249 - RNA, 20 nt, Human
gcuucagguuaucgaaauaa

SEQ ID NO: 2527250 - RNA, 19 nt, Human
gcuucagguuaucgaaaua

SEQ ID NO: 2527251 - RNA, 12 nt, Human
gcuucagguuau

SEQ ID NO: 2527252 - RNA, 17 nt, Human
gcuucagguuaucgaaa

SEQ ID NO: 2527253 - RNA, 14 nt, Human
gcuucaguggcagc

SEQ ID NO: 2527254 - RNA, 23 nt, Human
gcuucagggcgcacagcaugaga

SEQ ID NO: 2527255 - RNA, 16 nt, Human
gcuucaaaauagagaa

SEQ ID NO: 2527256 - RNA, 13 nt, Human
gcuucaggaggga

SEQ ID NO: 2527257 - RNA, 14 nt, Human
gcuucaaggauccu

SEQ ID NO: 2527258 - RNA, 16 nt, Human
gcuucaaauuguaagc

SEQ ID NO: 2527259 - RNA, 12 nt, Human
gcuuauuuuaaa

SEQ ID NO: 2527260 - RNA, 22 nt, Human
gcuuauuuuuaaaauuuuaaua

SEQ ID NO: 2527261 - RNA, 17 nt, Human
gcuuauuuuuaaaauuu

SEQ ID NO: 2527262 - RNA, 18 nt, Human
gcuucaaccuugagacag

SEQ ID NO: 2527263 - RNA, 18 nt, Human
gcucucaggccagcugcu

SEQ ID NO: 2527264 - RNA, 17 nt, Human
gcucucaggccagcugc

SEQ ID NO: 2527265 - RNA, 19 nt, Human
gcucucaggccagcugcuu

SEQ ID NO: 2527266 - RNA, 20 nt, Human
gcucucaggccagcugcuug

SEQ ID NO: 2527267 - RNA, 11 nt, Human
gcucucagaag

SEQ ID NO: 2527268 - RNA, 13 nt, Human
gcucucagaagcc

SEQ ID NO: 2527269 - RNA, 10 nt, Human
gcucucagcc

SEQ ID NO: 2527270 - RNA, 11 nt, Human
gcucucagcca

SEQ ID NO: 2527271 - RNA, 17 nt, Human
gcucucagccaacgagu

SEQ ID NO: 2527272 - RNA, 16 nt, Human
gcucucagcucagcgc

SEQ ID NO: 2527273 - RNA, 12 nt, Human
gcucucagaagg

SEQ ID NO: 2527274 - RNA, 17 nt, Human
gcucuauuguagcauuu

SEQ ID NO: 2527275 - RNA, 19 nt, Human
gcucucaacccaggagcau

SEQ ID NO: 2527276 - RNA, 18 nt, Human
gcucucaaguuaucaggg

SEQ ID NO: 2527277 - RNA, 22 nt, Human
gcucuaucuugcucuguaaucu

SEQ ID NO: 2527278 - RNA, 21 nt, Human
gcucuaucuugcucuguaauc

SEQ ID NO: 2527279 - RNA, 19 nt, Human
gcucuaucuugcucuguaa

SEQ ID NO: 2527280 - RNA, 12 nt, Human
gcucuagugccu

SEQ ID NO: 2527281 - RNA, 15 nt, Human
gcucuagugccuucu

SEQ ID NO: 2527282 - RNA, 21 nt, Human
gcucuaugggcagaucuaccc

SEQ ID NO: 2527283 - RNA, 18 nt, Human
gcucuaugggcagaucua

SEQ ID NO: 2527284 - RNA, 15 nt, Human
gcucuauguuuacaa

SEQ ID NO: 2527285 - RNA, 16 nt, Human
gcucuauguuuacaaa

SEQ ID NO: 2527286 - RNA, 23 nt, Human
gcucuagauugagagaagagaca

SEQ ID NO: 2527287 - RNA, 21 nt, Human
gcucuagccugggcaacaaca

SEQ ID NO: 2527288 - RNA, 14 nt, Human
gcucuagugggaag

SEQ ID NO: 2527289 - RNA, 14 nt, Human
gcucuagguggggc

SEQ ID NO: 2527290 - RNA, 14 nt, Human
gcucuagccugggc

SEQ ID NO: 2527291 - RNA, 16 nt, Human
gcuccucuccccagcc

SEQ ID NO: 2527292 - RNA, 18 nt, Human
gcuccucuccccagccca

SEQ ID NO: 2527293 - RNA, 19 nt, Human
gcuccucuccccagcccag

SEQ ID NO: 2527294 - RNA, 20 nt, Human
gcuccucuccccagcccaga

SEQ ID NO: 2527295 - RNA, 21 nt, Human
gcuccucuccccagcccagag

SEQ ID NO: 2527296 - RNA, 22 nt, Human
gcuccucuccccagcccagaga

SEQ ID NO: 2527297 - RNA, 18 nt, Human
gcucuacaucuucugccu

SEQ ID NO: 2527298 - RNA, 23 nt, Human
gcuccucuccccagcccagagac

SEQ ID NO: 2527299 - RNA, 19 nt, Human
gcuccucuccccagcaagu

SEQ ID NO: 2527300 - RNA, 16 nt, Human
gcuccucuccccagca

SEQ ID NO: 2527301 - RNA, 20 nt, Human
gcucuacaucuucugccuua

SEQ ID NO: 2527302 - RNA, 19 nt, Human
gcucuacaucuucugccuu

SEQ ID NO: 2527303 - RNA, 14 nt, Human
gcucuacccagggc

SEQ ID NO: 2527304 - RNA, 15 nt, Human
gcucuacccagggcc

SEQ ID NO: 2527305 - RNA, 19 nt, Human
gcucuacugaggugcuaug

SEQ ID NO: 2527306 - RNA, 16 nt, Human
gcucuagacaacccug

SEQ ID NO: 2527307 - RNA, 18 nt, Human
gcucuagacaacccugca

SEQ ID NO: 2527308 - RNA, 19 nt, Human
gcucuagacaacccugcaa

SEQ ID NO: 2527309 - RNA, 18 nt, Human
gcucuacccagggccugc

SEQ ID NO: 2527310 - RNA, 19 nt, Human
gcucuacccagggccugca

SEQ ID NO: 2527311 - RNA, 21 nt, Human
gcucuacuggucuuguggaau

SEQ ID NO: 2527312 - RNA, 21 nt, Human
gcuccagacacauguccaaga

SEQ ID NO: 2527313 - RNA, 18 nt, Human
gcuccagacacaugucca

SEQ ID NO: 2527314 - RNA, 23 nt, Human
gcuccagacacauguccaagaag

SEQ ID NO: 2527315 - RNA, 20 nt, Human
gcuccagaaaugucuaaaug

SEQ ID NO: 2527316 - RNA, 15 nt, Human
gcuccagacccccag

SEQ ID NO: 2527317 - RNA, 14 nt, Human
gcuccagaccccca

SEQ ID NO: 2527318 - RNA, 20 nt, Human
gcuccagagggcacucugcu

SEQ ID NO: 2527319 - RNA, 21 nt, Human
gcuccagagggcacucugcuu

SEQ ID NO: 2527320 - RNA, 17 nt, Human
gcuccagaugcagggca

SEQ ID NO: 2527321 - RNA, 18 nt, Human
gcuccagaugcagggcag

SEQ ID NO: 2527322 - RNA, 19 nt, Human
gcuccagaugcagggcagu

SEQ ID NO: 2527323 - RNA, 21 nt, Human
gcuccagaugcagggcaguca

SEQ ID NO: 2527324 - RNA, 22 nt, Human
gcuccagacguaggggaggggu

SEQ ID NO: 2527325 - RNA, 22 nt, Human
gcuccagaugcagggcagucau

SEQ ID NO: 2527326 - RNA, 12 nt, Human
gcuccagagggc

SEQ ID NO: 2527327 - RNA, 23 nt, Human
gcuccagaccugauccuggaggc

SEQ ID NO: 2527328 - RNA, 21 nt, Human
gcuccagaccugauccuggag

SEQ ID NO: 2527329 - RNA, 22 nt, Human
gcuccagaccugauccuggagg

SEQ ID NO: 2527330 - RNA, 13 nt, Human
gcuccagaccuga

SEQ ID NO: 2527331 - RNA, 20 nt, Human
gcuccagaccugauccugga

SEQ ID NO: 2527332 - RNA, 12 nt, Human
gcuccagaccug

SEQ ID NO: 2527333 - RNA, 17 nt, Human
gcuccagacccccagca

SEQ ID NO: 2527334 - RNA, 23 nt, Human
gcuccagacccccagcaacccuc

SEQ ID NO: 2527335 - RNA, 20 nt, Human
gcuccacuuggucugugaga

SEQ ID NO: 2527336 - RNA, 9 nt, Human
gcuccagac

SEQ ID NO: 2527337 - RNA, 20 nt, Human
gcuccucgagggcagggacu

SEQ ID NO: 2527338 - RNA, 18 nt, Human
gcuccucgagggcaggga

SEQ ID NO: 2527339 - RNA, 17 nt, Human
gcuccucgagggcaggg

SEQ ID NO: 2527340 - RNA, 15 nt, Human
gcuccucgagggcag

SEQ ID NO: 2527341 - RNA, 20 nt, Human
gcuccuccucccugcaucug

SEQ ID NO: 2527342 - RNA, 16 nt, Human
gcuccuccucccugca

SEQ ID NO: 2527343 - RNA, 18 nt, Human
gcuccuccucccugcauc

SEQ ID NO: 2527344 - RNA, 20 nt, Human
gcuccuccgugcuuccucag

SEQ ID NO: 2527345 - RNA, 14 nt, Human
gcuccuccgugcuu

SEQ ID NO: 2527346 - RNA, 14 nt, Human
gcuccuccucccug

SEQ ID NO: 2527347 - RNA, 15 nt, Human
gcuccuccucccugc

SEQ ID NO: 2527348 - RNA, 22 nt, Human
gcuccucuccaggcacccuucu

SEQ ID NO: 2527349 - RNA, 17 nt, Human
gcuccucuccaggcacc

SEQ ID NO: 2527350 - RNA, 16 nt, Human
gcuccucuccaggcac

SEQ ID NO: 2527351 - RNA, 15 nt, Human
gcuccucuccaggca

SEQ ID NO: 2527352 - RNA, 14 nt, Human
gcuccucuccaggc

SEQ ID NO: 2527353 - RNA, 13 nt, Human
gcuccucuccagg

SEQ ID NO: 2527354 - RNA, 12 nt, Human
gcuccucuccag

SEQ ID NO: 2527355 - RNA, 12 nt, Human
gcuccucucagu

SEQ ID NO: 2527356 - RNA, 15 nt, Human
gcuccucuccccagc

SEQ ID NO: 2527357 - RNA, 23 nt, Human
gcuccucccuggcugcccuggcc

SEQ ID NO: 2527358 - RNA, 22 nt, Human
gcuccucccuggcugcccuggc

SEQ ID NO: 2527359 - RNA, 21 nt, Human
gcuccucccuggcugcccugg

SEQ ID NO: 2527360 - RNA, 20 nt, Human
gcuccucccuggcugcccug

SEQ ID NO: 2527361 - RNA, 19 nt, Human
gcuccucccuggcugcccu

SEQ ID NO: 2527362 - RNA, 18 nt, Human
gcuccucccuggcugccc

SEQ ID NO: 2527363 - RNA, 17 nt, Human
gcuccucccuggcugcc

SEQ ID NO: 2527364 - RNA, 16 nt, Human
gcuccucccuggcugc

SEQ ID NO: 2527365 - RNA, 15 nt, Human
gcuccucccuggcug

SEQ ID NO: 2527366 - RNA, 14 nt, Human
gcuccucccuggcu

SEQ ID NO: 2527367 - RNA, 13 nt, Human
gcuccucccuggc

SEQ ID NO: 2527368 - RNA, 22 nt, Human
gcuccucccucugaggcuguag

SEQ ID NO: 2527369 - RNA, 21 nt, Human
gcuccucccucugaggcugua

SEQ ID NO: 2527370 - RNA, 20 nt, Human
gcuccucccucugaggcugu

SEQ ID NO: 2527371 - RNA, 19 nt, Human
gcuccucccucugaggcug

SEQ ID NO: 2527372 - RNA, 23 nt, Human
gcucccagugucuuccugugggg

SEQ ID NO: 2527373 - RNA, 22 nt, Human
gcucccagugucuuccuguggg

SEQ ID NO: 2527374 - RNA, 20 nt, Human
gcucccauucacucuuccag

SEQ ID NO: 2527375 - RNA, 16 nt, Human
gcuccucccggugccc

SEQ ID NO: 2527376 - RNA, 17 nt, Human
gcuccucccucugaggc

SEQ ID NO: 2527377 - RNA, 21 nt, Human
gcucccauucacucuuccaga

SEQ ID NO: 2527378 - RNA, 19 nt, Human
gcuccucccggugcccaag

SEQ ID NO: 2527379 - RNA, 15 nt, Human
gcuccagccuggcuc

SEQ ID NO: 2527380 - RNA, 19 nt, Human
gcuccagcaccauccgcca

SEQ ID NO: 2527381 - RNA, 14 nt, Human
gcuccagccaaccc

SEQ ID NO: 2527382 - RNA, 16 nt, Human
gcuccagccaaccccu

SEQ ID NO: 2527383 - RNA, 17 nt, Human
gcuccagccaaccccug

SEQ ID NO: 2527384 - RNA, 18 nt, Human
gcuccagccaaccccugu

SEQ ID NO: 2527385 - RNA, 22 nt, Human
gcuccagccaaccccuguggag

SEQ ID NO: 2527386 - RNA, 23 nt, Human
gcuccagccaaccccuguggagc

SEQ ID NO: 2527387 - RNA, 14 nt, Human
gcuccagcucacca

SEQ ID NO: 2527388 - RNA, 13 nt, Human
gcuccagcucacc

SEQ ID NO: 2527389 - RNA, 23 nt, Human
gcucccaggcauuccccaggagg

SEQ ID NO: 2527390 - RNA, 17 nt, Human
gcuccagcucaccagcc

SEQ ID NO: 2527391 - RNA, 23 nt, Human
gcucccaggccgagaagccagug

SEQ ID NO: 2527392 - RNA, 22 nt, Human
gcucccaggccgagaagccagu

SEQ ID NO: 2527393 - RNA, 12 nt, Human
gcucccaggccg

SEQ ID NO: 2527394 - RNA, 11 nt, Human
gcucccaggcc

SEQ ID NO: 2527395 - RNA, 20 nt, Human
gcucccagugucuuccugug

SEQ ID NO: 2527396 - RNA, 19 nt, Human
gcucccagugucuuccugu

SEQ ID NO: 2527397 - RNA, 18 nt, Human
gcucccagugucuuccug

SEQ ID NO: 2527398 - RNA, 13 nt, Human
gcucccagugucu

SEQ ID NO: 2527399 - RNA, 15 nt, Human
gcucugcccauccug

SEQ ID NO: 2527400 - RNA, 22 nt, Human
gcucugccacccuaccuguuca

SEQ ID NO: 2527401 - RNA, 18 nt, Human
gcucugccacccuaccug

SEQ ID NO: 2527402 - RNA, 23 nt, Human
gcucugccacccuaccuguucag

SEQ ID NO: 2527403 - RNA, 16 nt, Human
gcucugacagaaagca

SEQ ID NO: 2527404 - RNA, 22 nt, Human
gcucugaucauccacugugcca

SEQ ID NO: 2527405 - RNA, 21 nt, Human
gcucugaucauccacugugcc

SEQ ID NO: 2527406 - RNA, 16 nt, Human
gcucuggagcccacug

SEQ ID NO: 2527407 - RNA, 15 nt, Human
gcucuggagcccacu

SEQ ID NO: 2527408 - RNA, 21 nt, Human
gcucugcccauccugccccug

SEQ ID NO: 2527409 - RNA, 18 nt, Human
gcucuggagacagcccca

SEQ ID NO: 2527410 - RNA, 14 nt, Human
gcucuggagacagc

SEQ ID NO: 2527411 - RNA, 20 nt, Human
gcucucugugggcuggcagu

SEQ ID NO: 2527412 - RNA, 21 nt, Human
gcucugaauuaguccuugcuu

SEQ ID NO: 2527413 - RNA, 23 nt, Human
gcucugaagucacaucacaggac

SEQ ID NO: 2527414 - RNA, 17 nt, Human
gcucugaaagccagcug

SEQ ID NO: 2527415 - RNA, 22 nt, Human
gcucugaagucacaucacagga

SEQ ID NO: 2527416 - RNA, 20 nt, Human
gcucugaucauccacugugc

SEQ ID NO: 2527417 - RNA, 19 nt, Human
gcucucugugggcuggcag

SEQ ID NO: 2527418 - RNA, 19 nt, Human
gcucucuggccuuuuccua

SEQ ID NO: 2527419 - RNA, 16 nt, Human
gcucugaaaccagugu

SEQ ID NO: 2527420 - RNA, 15 nt, Human
gcucugaaagccagc

SEQ ID NO: 2527421 - RNA, 16 nt, Human
gcugaggccugggccg

SEQ ID NO: 2527422 - RNA, 15 nt, Human
gcugaggccugggcc

SEQ ID NO: 2527423 - RNA, 14 nt, Human
gcugaggccugggc

SEQ ID NO: 2527424 - RNA, 13 nt, Human
gcugaggccuggg

SEQ ID NO: 2527425 - RNA, 21 nt, Human
gcugaggccuggacuuuccug

SEQ ID NO: 2527426 - RNA, 14 nt, Human
gcugaggccuggac

SEQ ID NO: 2527427 - RNA, 13 nt, Human
gcugaggccugga

SEQ ID NO: 2527428 - RNA, 12 nt, Human
gcugaggccugg

SEQ ID NO: 2527429 - RNA, 13 nt, Human
gcugagccucugc

SEQ ID NO: 2527430 - RNA, 19 nt, Human
gcugagccucugcucccca

SEQ ID NO: 2527431 - RNA, 20 nt, Human
gcugagccucugcuccccag

SEQ ID NO: 2527432 - RNA, 14 nt, Human
gcugaggccucuca

SEQ ID NO: 2527433 - RNA, 15 nt, Human
gcugagccuggcugg

SEQ ID NO: 2527434 - RNA, 14 nt, Human
gcugagccuggcug

SEQ ID NO: 2527435 - RNA, 14 nt, Human
gcugagccucucac

SEQ ID NO: 2527436 - RNA, 16 nt, Human
gcugagccucagucuc

SEQ ID NO: 2527437 - RNA, 12 nt, Human
gcugagccucag

SEQ ID NO: 2527438 - RNA, 15 nt, Human
gcugagcccuggcag

SEQ ID NO: 2527439 - RNA, 16 nt, Human
gcugagcccuggcagg

SEQ ID NO: 2527440 - RNA, 13 nt, Human
gcugacagacaca

SEQ ID NO: 2527441 - RNA, 21 nt, Human
gcugacacaaaccugccuggg

SEQ ID NO: 2527442 - RNA, 19 nt, Human
gcugacacguccaccccag

SEQ ID NO: 2527443 - RNA, 13 nt, Human
gcugagcccuggc

SEQ ID NO: 2527444 - RNA, 14 nt, Human
gcugagcccuggca

SEQ ID NO: 2527445 - RNA, 16 nt, Human
gcugaagguugaagag

SEQ ID NO: 2527446 - RNA, 15 nt, Human
gcugaagguugaaga

SEQ ID NO: 2527447 - RNA, 20 nt, Human
gcugaagggaccuugaaggg

SEQ ID NO: 2527448 - RNA, 13 nt, Human
gcugaagauggca

SEQ ID NO: 2527449 - RNA, 12 nt, Human
gcugaauaaaug

SEQ ID NO: 2527450 - RNA, 20 nt, Human
gcugaagugcauccaaaggu

SEQ ID NO: 2527451 - RNA, 23 nt, Human
gcugaaggcucgagcaugccugg

SEQ ID NO: 2527452 - RNA, 20 nt, Human
gcugaacuuguuuucuggga

SEQ ID NO: 2527453 - RNA, 15 nt, Human
gcugaacucaugaga

SEQ ID NO: 2527454 - RNA, 18 nt, Human
gcugaagaugaaucaaug

SEQ ID NO: 2527455 - RNA, 17 nt, Human
gcugaacccugugcugg

SEQ ID NO: 2527456 - RNA, 16 nt, Human
gcugaacccugugcug

SEQ ID NO: 2527457 - RNA, 13 nt, Human
gcugaacccugug

SEQ ID NO: 2527458 - RNA, 22 nt, Human
gcugaacccauuuugagugacu

SEQ ID NO: 2527459 - RNA, 21 nt, Human
gcugaacccugugcugguguc

SEQ ID NO: 2527460 - RNA, 20 nt, Human
gcugaacccugugcuggugu

SEQ ID NO: 2527461 - RNA, 16 nt, Human
gcugaacggggagaaa

SEQ ID NO: 2527462 - RNA, 17 nt, Human
gcugaacggggagaaaa

SEQ ID NO: 2527463 - RNA, 17 nt, Human
gcugaauaaaugucuuu

SEQ ID NO: 2527464 - RNA, 16 nt, Human
gcugaauaaaugucuu

SEQ ID NO: 2527465 - RNA, 14 nt, Human
gcugaauaaauguc

SEQ ID NO: 2527466 - RNA, 13 nt, Human
gcugaauaaaugu

SEQ ID NO: 2527467 - RNA, 17 nt, Human
gcugaauacagaggcaa

SEQ ID NO: 2527468 - RNA, 12 nt, Human
gcugaauuuuca

SEQ ID NO: 2527469 - RNA, 14 nt, Human
gcugaauuuucaca

SEQ ID NO: 2527470 - RNA, 18 nt, Human
gcugaauaaaugucuuuu

SEQ ID NO: 2527471 - RNA, 21 nt, Human
gcugaauuuucacaugaacau

SEQ ID NO: 2527472 - RNA, 19 nt, Human
gcugacaaccaccgcuccc

SEQ ID NO: 2527473 - RNA, 20 nt, Human
gcugacacaaaccugccugg

SEQ ID NO: 2527474 - RNA, 19 nt, Human
gcugacacaaaccugccug

SEQ ID NO: 2527475 - RNA, 18 nt, Human
gcugacacaaaccugccu

SEQ ID NO: 2527476 - RNA, 17 nt, Human
gcugacacaaaccugcc

SEQ ID NO: 2527477 - RNA, 21 nt, Human
gcugacaaccaccgcucccca

SEQ ID NO: 2527478 - RNA, 22 nt, Human
gcugacaaccaccgcuccccag

SEQ ID NO: 2527479 - RNA, 23 nt, Human
gcugacaaccaccgcuccccagc

SEQ ID NO: 2527480 - RNA, 18 nt, Human
gcucuguaucaggaccca

SEQ ID NO: 2527481 - RNA, 19 nt, Human
gcucuguaucaggacccag

SEQ ID NO: 2527482 - RNA, 22 nt, Human
gcucuguaucaggacccagagg

SEQ ID NO: 2527483 - RNA, 23 nt, Human
gcucuguaucaggacccagagga

SEQ ID NO: 2527484 - RNA, 16 nt, Human
gcucugucacccaggc

SEQ ID NO: 2527485 - RNA, 23 nt, Human
gcucugucgcccaggcuggagug

SEQ ID NO: 2527486 - RNA, 17 nt, Human
gcucugugcccacccuc

SEQ ID NO: 2527487 - RNA, 14 nt, Human
gcucugugcaggga

SEQ ID NO: 2527488 - RNA, 14 nt, Human
gcucuggagagaaa

SEQ ID NO: 2527489 - RNA, 13 nt, Human
gcucuggagagaa

SEQ ID NO: 2527490 - RNA, 20 nt, Human
gcucuggagacagccccaga

SEQ ID NO: 2527491 - RNA, 19 nt, Human
gcucuggagacagccccag

SEQ ID NO: 2527492 - RNA, 17 nt, Human
gcucuggagcccacugu

SEQ ID NO: 2527493 - RNA, 23 nt, Human
gcucuguaaucucguuucaaaaa

SEQ ID NO: 2527494 - RNA, 19 nt, Human
gcucuguaaucucguuuca

SEQ ID NO: 2527495 - RNA, 18 nt, Human
gcucuguaaucucguuuc

SEQ ID NO: 2527496 - RNA, 19 nt, Human
gcucuggugacaccagccu

SEQ ID NO: 2527497 - RNA, 20 nt, Human
gcucuggugacaccagccuu

SEQ ID NO: 2527498 - RNA, 15 nt, Human
gcucuggagagaaac

SEQ ID NO: 2527499 - RNA, 18 nt, Human
gcucuggugacaccagcc

SEQ ID NO: 2527500 - RNA, 15 nt, Human
gcugaacauugcaua

SEQ ID NO: 2527501 - RNA, 17 nt, Human
gcugaacauugcauaua

SEQ ID NO: 2527502 - RNA, 22 nt, Human
gcugaacaguggaggaagaggg

SEQ ID NO: 2527503 - RNA, 13 nt, Human
gcugaacagugga

SEQ ID NO: 2527504 - RNA, 23 nt, Human
gcugaacacuccaauuaaggauu

SEQ ID NO: 2527505 - RNA, 18 nt, Human
gcugaaacaggagagaaa

SEQ ID NO: 2527506 - RNA, 13 nt, Human
gcugaaagccauu

SEQ ID NO: 2527507 - RNA, 16 nt, Human
gcugaaacaacaaaua

SEQ ID NO: 2527508 - RNA, 20 nt, Human
gcugaaaaccuaaguccuuu

SEQ ID NO: 2527509 - RNA, 16 nt, Human
gcugaaacagaauacu

SEQ ID NO: 2527510 - RNA, 23 nt, Human
gcugaaagaacauggacuuguau

SEQ ID NO: 2527511 - RNA, 16 nt, Human
gcugaaacaggagaga

SEQ ID NO: 2527512 - RNA, 17 nt, Human
gcugaaacaggagagaa

SEQ ID NO: 2527513 - RNA, 14 nt, Human
gcucugugggcugc

SEQ ID NO: 2527514 - RNA, 12 nt, Human
gcucugugggcu

SEQ ID NO: 2527515 - RNA, 21 nt, Human
gcucugugcugacccuccugu

SEQ ID NO: 2527516 - RNA, 19 nt, Human
gcucugugcugacccuccu

SEQ ID NO: 2527517 - RNA, 22 nt, Human
gcucugugcugacccuccuguu

SEQ ID NO: 2527518 - RNA, 18 nt, Human
gcucugugcugacccucc

SEQ ID NO: 2527519 - RNA, 16 nt, Human
gcucugugcugacccu

SEQ ID NO: 2527520 - RNA, 15 nt, Human
gcucugugcugaccc

SEQ ID NO: 2527521 - RNA, 14 nt, Human
gcucugugcugacc

SEQ ID NO: 2527522 - RNA, 21 nt, Human
gcucugugcagucacuggagg

SEQ ID NO: 2527523 - RNA, 19 nt, Human
gcucugugcagucacugga

SEQ ID NO: 2527524 - RNA, 14 nt, Human
gcucugugcaguca

SEQ ID NO: 2527525 - RNA, 24 nt, Human
gcucugugggcugcacucugugcc

SEQ ID NO: 2527526 - RNA, 23 nt, Human
gcucugugggcugcacucugugc

SEQ ID NO: 2527527 - RNA, 16 nt, Human
gcucuguguugccaug

SEQ ID NO: 2527528 - RNA, 20 nt, Human
gcugaaaaaucacauccugg

SEQ ID NO: 2527529 - RNA, 11 nt, Human
gcugaaaauau

SEQ ID NO: 2527530 - RNA, 19 nt, Human
gcugaaaaaucacauccug

SEQ ID NO: 2527531 - RNA, 23 nt, Human
gcugcugucccucccccuugucc

SEQ ID NO: 2527532 - RNA, 22 nt, Human
gcugcugucccucccccuuguc

SEQ ID NO: 2527533 - RNA, 18 nt, Human
gcugcugucccucccccu

SEQ ID NO: 2527534 - RNA, 16 nt, Human
gcugcugucccucccc

SEQ ID NO: 2527535 - RNA, 15 nt, Human
gcugcugucccuccc

SEQ ID NO: 2527536 - RNA, 15 nt, Human
gcugcuggcuugcag

SEQ ID NO: 2527537 - RNA, 19 nt, Human
gcugcugaccuccacagcu

SEQ ID NO: 2527538 - RNA, 16 nt, Human
gcugcugacugauguu

SEQ ID NO: 2527539 - RNA, 12 nt, Human
gcugcugacagu

SEQ ID NO: 2527540 - RNA, 18 nt, Human
gcugcuccuagagggagg

SEQ ID NO: 2527541 - RNA, 16 nt, Human
gcugcuccuagaggga

SEQ ID NO: 2527542 - RNA, 18 nt, Human
gcugcugaccuccacagc

SEQ ID NO: 2527543 - RNA, 16 nt, Human
gcugccccuggcagcc

SEQ ID NO: 2527544 - RNA, 15 nt, Human
gcugccccuggcagc

SEQ ID NO: 2527545 - RNA, 13 nt, Human
gcugccccuggca

SEQ ID NO: 2527546 - RNA, 17 nt, Human
gcugccauccagguuca

SEQ ID NO: 2527547 - RNA, 17 nt, Human
gcugccccuggcagccc

SEQ ID NO: 2527548 - RNA, 15 nt, Human
gcugcuccuagaggg

SEQ ID NO: 2527549 - RNA, 16 nt, Human
gcugcuccccagcagc

SEQ ID NO: 2527550 - RNA, 19 nt, Human
gcugcuccccagcagcgga

SEQ ID NO: 2527551 - RNA, 12 nt, Human
gcugcuccccuc

SEQ ID NO: 2527552 - RNA, 20 nt, Human
gcugcuccccucccuccucu

SEQ ID NO: 2527553 - RNA, 15 nt, Human
gcuggagauguuuua

SEQ ID NO: 2527554 - RNA, 12 nt, Human
gcuggagagguu

SEQ ID NO: 2527555 - RNA, 13 nt, Human
gcuggagagguua

SEQ ID NO: 2527556 - RNA, 21 nt, Human
gcuggagccuguguaacagcu

SEQ ID NO: 2527557 - RNA, 14 nt, Human
gcuggagccugugu

SEQ ID NO: 2527558 - RNA, 13 nt, Human
gcuggagccugug

SEQ ID NO: 2527559 - RNA, 17 nt, Human
gcuggagccuggugccc

SEQ ID NO: 2527560 - RNA, 11 nt, Human
gcuggagccug

SEQ ID NO: 2527561 - RNA, 21 nt, Human
gcuggagccuagaacaggccu

SEQ ID NO: 2527562 - RNA, 10 nt, Human
gcuggagccu

SEQ ID NO: 2527563 - RNA, 15 nt, Human
gcuggagccacuaac

SEQ ID NO: 2527564 - RNA, 19 nt, Human
gcuggagccacuaacuaga

SEQ ID NO: 2527565 - RNA, 16 nt, Human
gcuggagccacuaacu

SEQ ID NO: 2527566 - RNA, 16 nt, Human
gcuggagcccagggag

SEQ ID NO: 2527567 - RNA, 22 nt, Human
gcuggagcccagggagcggaaa

SEQ ID NO: 2527568 - RNA, 15 nt, Human
gcugaggcgggagaa

SEQ ID NO: 2527569 - RNA, 21 nt, Human
gcugaggccuuaucauucauu

SEQ ID NO: 2527570 - RNA, 23 nt, Human
gcugaggccugggccgcugccac

SEQ ID NO: 2527571 - RNA, 20 nt, Human
gcugaggccugggccgcugc

SEQ ID NO: 2527572 - RNA, 17 nt, Human
gcugaggccugggccgc

SEQ ID NO: 2527573 - RNA, 15 nt, Human
gcugaggugggagga

SEQ ID NO: 2527574 - RNA, 21 nt, Human
gcugagguugcgccacuacac

SEQ ID NO: 2527575 - RNA, 23 nt, Human
gcugagguuccucugccugcccc

SEQ ID NO: 2527576 - RNA, 22 nt, Human
gcugagguuccucugccugccc

SEQ ID NO: 2527577 - RNA, 21 nt, Human
gcugagguuccucugccugcc

SEQ ID NO: 2527578 - RNA, 20 nt, Human
gcugagguuccucugccugc

SEQ ID NO: 2527579 - RNA, 19 nt, Human
gcugagguuccucugccug

SEQ ID NO: 2527580 - RNA, 18 nt, Human
gcugagguuccucugccu

SEQ ID NO: 2527581 - RNA, 23 nt, Human
gcugaggcucugacccagugaga

SEQ ID NO: 2527582 - RNA, 16 nt, Human
gcugaggcgggagaau

SEQ ID NO: 2527583 - RNA, 17 nt, Human
gcugagguuccucugcc

SEQ ID NO: 2527584 - RNA, 16 nt, Human
gcugagguuccucugc

SEQ ID NO: 2527585 - RNA, 13 nt, Human
gcugagguuccuc

SEQ ID NO: 2527586 - RNA, 21 nt, Human
gcugaggugucuuaagccuuu

SEQ ID NO: 2527587 - RNA, 23 nt, Human
gcugagucaugaucucccugccg

SEQ ID NO: 2527588 - RNA, 21 nt, Human
gcugaguauguuaagcucuuu

SEQ ID NO: 2527589 - RNA, 17 nt, Human
gcugaguaggaggccuc

SEQ ID NO: 2527590 - RNA, 21 nt, Human
gcugagucaugaucucccugc

SEQ ID NO: 2527591 - RNA, 22 nt, Human
gcugagucaugaucucccugcc

SEQ ID NO: 2527592 - RNA, 13 nt, Human
gcugcagaggggc

SEQ ID NO: 2527593 - RNA, 12 nt, Human
gcugcagagggg

SEQ ID NO: 2527594 - RNA, 22 nt, Human
gcugcagaggccagaggccccc

SEQ ID NO: 2527595 - RNA, 18 nt, Human
gcugcagaggccagaggc

SEQ ID NO: 2527596 - RNA, 15 nt, Human
gcugcagaggccaga

SEQ ID NO: 2527597 - RNA, 19 nt, Human
gcugcagaggggcaggccc

SEQ ID NO: 2527598 - RNA, 15 nt, Human
gcugcagaggggcag

SEQ ID NO: 2527599 - RNA, 16 nt, Human
gcugcagccugcgcca

SEQ ID NO: 2527600 - RNA, 21 nt, Human
gcugcagccugcgccaccgcc

SEQ ID NO: 2527601 - RNA, 15 nt, Human
gcugcagcucaccca

SEQ ID NO: 2527602 - RNA, 20 nt, Human
gcugcagaggggcaggcccu

SEQ ID NO: 2527603 - RNA, 17 nt, Human
gcugcaggacuugagaa

SEQ ID NO: 2527604 - RNA, 13 nt, Human
gcugccauccagg

SEQ ID NO: 2527605 - RNA, 12 nt, Human
gcugccauccag

SEQ ID NO: 2527606 - RNA, 20 nt, Human
gcugcaggggcucuggagag

SEQ ID NO: 2527607 - RNA, 17 nt, Human
gcugcaggggcucugga

SEQ ID NO: 2527608 - RNA, 16 nt, Human
gcugcaggggcucugg

SEQ ID NO: 2527609 - RNA, 15 nt, Human
gcugcaggggcucug

SEQ ID NO: 2527610 - RNA, 13 nt, Human
gcugcaggggcuc

SEQ ID NO: 2527611 - RNA, 11 nt, Human
gcugcaggggc

SEQ ID NO: 2527612 - RNA, 12 nt, Human
gcugcaggggcu

SEQ ID NO: 2527613 - RNA, 16 nt, Human
gcugcagaaggccaag

SEQ ID NO: 2527614 - RNA, 23 nt, Human
gcugcacucugugcccaugggca

SEQ ID NO: 2527615 - RNA, 20 nt, Human
gcugcacugaugcugccccu

SEQ ID NO: 2527616 - RNA, 22 nt, Human
gcugcacucugugcccaugggc

SEQ ID NO: 2527617 - RNA, 16 nt, Human
gcugcacccucaggca

SEQ ID NO: 2527618 - RNA, 21 nt, Human
gcugcagagcagugggccugg

SEQ ID NO: 2527619 - RNA, 19 nt, Human
gcugcagagccacccugug

SEQ ID NO: 2527620 - RNA, 13 nt, Human
gcugcagagccac

SEQ ID NO: 2527621 - RNA, 20 nt, Human
gcugcacucugugcccaugg

SEQ ID NO: 2527622 - RNA, 20 nt, Human
gcugcagagcagugggccug

SEQ ID NO: 2527623 - RNA, 19 nt, Human
gcugcagaaggccaagaau

SEQ ID NO: 2527624 - RNA, 17 nt, Human
gcugcagaaggccaaga

SEQ ID NO: 2527625 - RNA, 18 nt, Human
gcugcagagacagagagg

SEQ ID NO: 2527626 - RNA, 13 nt, Human
gcugcacccucag

SEQ ID NO: 2527627 - RNA, 15 nt, Human
gcugcacccucaggc

SEQ ID NO: 2527628 - RNA, 23 nt, Human
gcugcaccaacccagccgcugcc

SEQ ID NO: 2527629 - RNA, 21 nt, Human
gcugcaccaacccagccgcug

SEQ ID NO: 2527630 - RNA, 17 nt, Human
gccagccccacagccca

SEQ ID NO: 2527631 - RNA, 16 nt, Human
gccagccccacagccc

SEQ ID NO: 2527632 - RNA, 15 nt, Human
gccagccccacagcc

SEQ ID NO: 2527633 - RNA, 14 nt, Human
gccagccccacagc

SEQ ID NO: 2527634 - RNA, 14 nt, Human
gccagcccagccca

SEQ ID NO: 2527635 - RNA, 13 nt, Human
gccagcccagccc

SEQ ID NO: 2527636 - RNA, 13 nt, Human
gccagccaugucu

SEQ ID NO: 2527637 - RNA, 22 nt, Human
gccagccagugaccugaggaag

SEQ ID NO: 2527638 - RNA, 21 nt, Human
gccagccaggcgggcucaagg

SEQ ID NO: 2527639 - RNA, 19 nt, Human
gccagccagugaccugagg

SEQ ID NO: 2527640 - RNA, 18 nt, Human
gccagccaggcgggcuca

SEQ ID NO: 2527641 - RNA, 13 nt, Human
gccagccaggcgg

SEQ ID NO: 2527642 - RNA, 11 nt, Human
gccagccaggc

SEQ ID NO: 2527643 - RNA, 16 nt, Human
gccagccagcagccag

SEQ ID NO: 2527644 - RNA, 19 nt, Human
gccagccagcagccagcuc

SEQ ID NO: 2527645 - RNA, 22 nt, Human
gccaggcacacacugugcuuuc

SEQ ID NO: 2527646 - RNA, 17 nt, Human
gccaggcacacacugug

SEQ ID NO: 2527647 - RNA, 15 nt, Human
gccaggcacacacug

SEQ ID NO: 2527648 - RNA, 23 nt, Human
gccaggcacacacugugcuuucu

SEQ ID NO: 2527649 - RNA, 21 nt, Human
gccaggcacccccuggagaga

SEQ ID NO: 2527650 - RNA, 20 nt, Human
gccaggcacccccuggagag

SEQ ID NO: 2527651 - RNA, 19 nt, Human
gccaggcacccccuggaga

SEQ ID NO: 2527652 - RNA, 14 nt, Human
gccaggauggaaug

SEQ ID NO: 2527653 - RNA, 22 nt, Human
gccaggauggaacacggccaca

SEQ ID NO: 2527654 - RNA, 17 nt, Human
gccagccccacccagga

SEQ ID NO: 2527655 - RNA, 19 nt, Human
gccagccccacagcccacg

SEQ ID NO: 2527656 - RNA, 18 nt, Human
gccagccccacagcccac

SEQ ID NO: 2527657 - RNA, 13 nt, Human
gccagccccaccc

SEQ ID NO: 2527658 - RNA, 14 nt, Human
gccagccccaccca

SEQ ID NO: 2527659 - RNA, 15 nt, Human
gccagccccacccag

SEQ ID NO: 2527660 - RNA, 14 nt, Human
gccaggcccucugc

SEQ ID NO: 2527661 - RNA, 13 nt, Human
gccaggcccucug

SEQ ID NO: 2527662 - RNA, 23 nt, Human
gccaggcccccaagccugcaguc

SEQ ID NO: 2527663 - RNA, 19 nt, Human
gccaggcccccaagccugc

SEQ ID NO: 2527664 - RNA, 16 nt, Human
gccaggcccggggcug

SEQ ID NO: 2527665 - RNA, 17 nt, Human
gccaggcccggggcugg

SEQ ID NO: 2527666 - RNA, 18 nt, Human
gccaggcccggggcuggc

SEQ ID NO: 2527667 - RNA, 19 nt, Human
gccaggccagccuccgaga

SEQ ID NO: 2527668 - RNA, 18 nt, Human
gccaggcccccaagccug

SEQ ID NO: 2527669 - RNA, 14 nt, Human
gccaggccccaggc

SEQ ID NO: 2527670 - RNA, 13 nt, Human
gccaggccagcug

SEQ ID NO: 2527671 - RNA, 13 nt, Human
gccaggccccagg

SEQ ID NO: 2527672 - RNA, 18 nt, Human
gccaggccacaagacccu

SEQ ID NO: 2527673 - RNA, 13 nt, Human
gccaggccacaag

SEQ ID NO: 2527674 - RNA, 17 nt, Human
gccaggcaggggugggg

SEQ ID NO: 2527675 - RNA, 16 nt, Human
gccaggcagggguggg

SEQ ID NO: 2527676 - RNA, 15 nt, Human
gccaggcaggggugg

SEQ ID NO: 2527677 - RNA, 14 nt, Human
gccaggcaggggug

SEQ ID NO: 2527678 - RNA, 19 nt, Human
gccaggcagguagccaggg

SEQ ID NO: 2527679 - RNA, 18 nt, Human
gccaggcaggugccugga

SEQ ID NO: 2527680 - RNA, 14 nt, Human
gccaggcagaucug

SEQ ID NO: 2527681 - RNA, 15 nt, Human
gccaggcagaucugu

SEQ ID NO: 2527682 - RNA, 21 nt, Human
gccaggcagaucugugcccca

SEQ ID NO: 2527683 - RNA, 23 nt, Human
gccaggcagaucugugccccaug

SEQ ID NO: 2527684 - RNA, 21 nt, Human
gccaggccacaagacccuugu

SEQ ID NO: 2527685 - RNA, 15 nt, Human
gccaggccagaggga

SEQ ID NO: 2527686 - RNA, 22 nt, Human
gccaggccagagggagugacag

SEQ ID NO: 2527687 - RNA, 13 nt, Human
gccaggccagccu

SEQ ID NO: 2527688 - RNA, 12 nt, Human
gccaggccagcc

SEQ ID NO: 2527689 - RNA, 15 nt, Human
gccaggccagccucc

SEQ ID NO: 2527690 - RNA, 14 nt, Human
gccaggccagccuc

SEQ ID NO: 2527691 - RNA, 12 nt, Human
gccaggccagcu

SEQ ID NO: 2527692 - RNA, 14 nt, Human
gccaguggcuggau

SEQ ID NO: 2527693 - RNA, 23 nt, Human
gccaguggcuggaucugugaggg

SEQ ID NO: 2527694 - RNA, 21 nt, Human
gccagugccuuaccuccugcc

SEQ ID NO: 2527695 - RNA, 20 nt, Human
gccagugccuuaccuccugc

SEQ ID NO: 2527696 - RNA, 22 nt, Human
gccagugccuuaccuccugccc

SEQ ID NO: 2527697 - RNA, 23 nt, Human
gccagugccuuaccuccugccca

SEQ ID NO: 2527698 - RNA, 13 nt, Human
gccagugucuguc

SEQ ID NO: 2527699 - RNA, 13 nt, Human
gccagugugacaa

SEQ ID NO: 2527700 - RNA, 22 nt, Human
gccaguuauggcuauaggugcu

SEQ ID NO: 2527701 - RNA, 13 nt, Human
gccaguugguccc

SEQ ID NO: 2527702 - RNA, 21 nt, Human
gccagugucugucccgggguc

SEQ ID NO: 2527703 - RNA, 16 nt, Human
gccagugucugucccg

SEQ ID NO: 2527704 - RNA, 15 nt, Human
gccagugucuguccc

SEQ ID NO: 2527705 - RNA, 17 nt, Human
gccagugugaucccaag

SEQ ID NO: 2527706 - RNA, 22 nt, Human
gccagugucugucccggggucc

SEQ ID NO: 2527707 - RNA, 20 nt, Human
gccagugugaucccaagugc

SEQ ID NO: 2527708 - RNA, 17 nt, Human
gccauauuuucaccauu

SEQ ID NO: 2527709 - RNA, 23 nt, Human
gccauauaaguuugaaggaaaca

SEQ ID NO: 2527710 - RNA, 19 nt, Human
gccauauacucuucaagga

SEQ ID NO: 2527711 - RNA, 22 nt, Human
gccauauaaguuugaaggaaac

SEQ ID NO: 2527712 - RNA, 19 nt, Human
gccauauaaguuugaagga

SEQ ID NO: 2527713 - RNA, 18 nt, Human
gccauauaaguuugaagg

SEQ ID NO: 2527714 - RNA, 17 nt, Human
gccauauaaguuugaag

SEQ ID NO: 2527715 - RNA, 16 nt, Human
gccauauaaguuugaa

SEQ ID NO: 2527716 - RNA, 16 nt, Human
gccauagucacauggc

SEQ ID NO: 2527717 - RNA, 16 nt, Human
gccauaugaaaaggcu

SEQ ID NO: 2527718 - RNA, 20 nt, Human
gccauacuggccucgccugg

SEQ ID NO: 2527719 - RNA, 19 nt, Human
gccauacuggccucgccug

SEQ ID NO: 2527720 - RNA, 18 nt, Human
gccauacuggccucgccu

SEQ ID NO: 2527721 - RNA, 17 nt, Human
gccauacuggccucgcc

SEQ ID NO: 2527722 - RNA, 22 nt, Human
gccauacuggccucgccuggcc

SEQ ID NO: 2527723 - RNA, 21 nt, Human
gccauacuggccucgccuggc

SEQ ID NO: 2527724 - RNA, 18 nt, Human
gccauacuuaucucucug

SEQ ID NO: 2527725 - RNA, 15 nt, Human
gccauacuggccucg

SEQ ID NO: 2527726 - RNA, 14 nt, Human
gccauacuggccuc

SEQ ID NO: 2527727 - RNA, 13 nt, Human
gccauacuggccu

SEQ ID NO: 2527728 - RNA, 22 nt, Human
gccauaaaacauuaagaaaauc

SEQ ID NO: 2527729 - RNA, 22 nt, Human
gccauacuuaucucucugugcu

SEQ ID NO: 2527730 - RNA, 21 nt, Human
gccauacuuaucucucugugc

SEQ ID NO: 2527731 - RNA, 20 nt, Human
gccauacuuaucucucugug

SEQ ID NO: 2527732 - RNA, 23 nt, Human
gccauacuggccucgccuggccu

SEQ ID NO: 2527733 - RNA, 16 nt, Human
gccauacuuugucuga

SEQ ID NO: 2527734 - RNA, 15 nt, Human
gccauagcuccugcu

SEQ ID NO: 2527735 - RNA, 12 nt, Human
gccauagcuccu

SEQ ID NO: 2527736 - RNA, 16 nt, Human
gccauagaguuuaaca

SEQ ID NO: 2527737 - RNA, 23 nt, Human
gccauagcuccugcuccacagcc

SEQ ID NO: 2527738 - RNA, 18 nt, Human
gccauagcuccugcucca

SEQ ID NO: 2527739 - RNA, 21 nt, Human
gccaguuggucccccuuccau

SEQ ID NO: 2527740 - RNA, 20 nt, Human
gccaguuggucccccuucca

SEQ ID NO: 2527741 - RNA, 18 nt, Human
gccaguuggucccccuuc

SEQ ID NO: 2527742 - RNA, 16 nt, Human
gccaguuggucccccu

SEQ ID NO: 2527743 - RNA, 23 nt, Human
gccaguuggucccccuuccaugg

SEQ ID NO: 2527744 - RNA, 22 nt, Human
gccaguuggucccccuuccaug

SEQ ID NO: 2527745 - RNA, 21 nt, Human
gccauaaaacauuaagaaaau

SEQ ID NO: 2527746 - RNA, 20 nt, Human
gccauaaaacauuaagaaaa

SEQ ID NO: 2527747 - RNA, 14 nt, Human
gccauaaaacauua

SEQ ID NO: 2527748 - RNA, 13 nt, Human
gccauaaaacauu

SEQ ID NO: 2527749 - RNA, 22 nt, Human
gccauaaaacagguaauauaaa

SEQ ID NO: 2527750 - RNA, 20 nt, Human
gccaguuuuguuuccuuuca

SEQ ID NO: 2527751 - RNA, 22 nt, Human
gccaguucaguaccuggaggag

SEQ ID NO: 2527752 - RNA, 21 nt, Human
gccaguucaguaccuggagga

SEQ ID NO: 2527753 - RNA, 20 nt, Human
gccaguucaguaccuggagg

SEQ ID NO: 2527754 - RNA, 15 nt, Human
gccaguucaguaccu

SEQ ID NO: 2527755 - RNA, 18 nt, Human
gccaguugaauuuaugga

SEQ ID NO: 2527756 - RNA, 19 nt, Human
gcccucaggggacuugaau

SEQ ID NO: 2527757 - RNA, 15 nt, Human
gcccucacccugggg

SEQ ID NO: 2527758 - RNA, 19 nt, Human
gcccucagaacccuuggcu

SEQ ID NO: 2527759 - RNA, 22 nt, Human
gcccucaggucagggugaggau

SEQ ID NO: 2527760 - RNA, 23 nt, Human
gcccucaggucagggugaggaug

SEQ ID NO: 2527761 - RNA, 16 nt, Human
gcccucauggccccuc

SEQ ID NO: 2527762 - RNA, 12 nt, Human
gcccucaucccg

SEQ ID NO: 2527763 - RNA, 18 nt, Human
gccccaacuccuggaagc

SEQ ID NO: 2527764 - RNA, 20 nt, Human
gccccugcuucuccagccug

SEQ ID NO: 2527765 - RNA, 19 nt, Human
gccccugcuucuccagccu

SEQ ID NO: 2527766 - RNA, 18 nt, Human
gccccugcuucuccagcc

SEQ ID NO: 2527767 - RNA, 16 nt, Human
gccccugcuucuccag

SEQ ID NO: 2527768 - RNA, 19 nt, Human
gccccuggacaagcagagg

SEQ ID NO: 2527769 - RNA, 15 nt, Human
gccccuggaugcagc

SEQ ID NO: 2527770 - RNA, 18 nt, Human
gcccuagagccugccugg

SEQ ID NO: 2527771 - RNA, 17 nt, Human
gcccuagagccugccug

SEQ ID NO: 2527772 - RNA, 16 nt, Human
gcccuagagccugccu

SEQ ID NO: 2527773 - RNA, 15 nt, Human
gcccuagagccugcc

SEQ ID NO: 2527774 - RNA, 14 nt, Human
gcccuagagccugc

SEQ ID NO: 2527775 - RNA, 13 nt, Human
gcccuagagccug

SEQ ID NO: 2527776 - RNA, 21 nt, Human
gcccuagagcacacuguagca

SEQ ID NO: 2527777 - RNA, 23 nt, Human
gcccuagagccugccuggagcgu

SEQ ID NO: 2527778 - RNA, 20 nt, Human
gcccuagagccugccuggag

SEQ ID NO: 2527779 - RNA, 19 nt, Human
gcccuagagccugccugga

SEQ ID NO: 2527780 - RNA, 13 nt, Human
gcccuagcuccac

SEQ ID NO: 2527781 - RNA, 12 nt, Human
gcccuaggcucc

SEQ ID NO: 2527782 - RNA, 17 nt, Human
gcccucagaacccuugg

SEQ ID NO: 2527783 - RNA, 18 nt, Human
gcccucagaacccuuggc

SEQ ID NO: 2527784 - RNA, 23 nt, Human
gcccucagaacccuuggcuugcc

SEQ ID NO: 2527785 - RNA, 17 nt, Human
gcccuauuuuugcaaug

SEQ ID NO: 2527786 - RNA, 15 nt, Human
gcccuauuuuugcaa

SEQ ID NO: 2527787 - RNA, 14 nt, Human
gcccucagaacccu

SEQ ID NO: 2527788 - RNA, 17 nt, Human
gcccucacccuggggcu

SEQ ID NO: 2527789 - RNA, 16 nt, Human
gcccucacccuggggc

SEQ ID NO: 2527790 - RNA, 11 nt, Human
gcccuaucugu

SEQ ID NO: 2527791 - RNA, 14 nt, Human
gcccuauggaugug

SEQ ID NO: 2527792 - RNA, 13 nt, Human
gcccuauggaugu

SEQ ID NO: 2527793 - RNA, 21 nt, Human
gcccuagagccugccuggagc

SEQ ID NO: 2527794 - RNA, 17 nt, Human
gcccuaggcuccgucag

SEQ ID NO: 2527795 - RNA, 19 nt, Human
gcccauucauuccauucug

SEQ ID NO: 2527796 - RNA, 23 nt, Human
gcccauucauuccauucuggaag

SEQ ID NO: 2527797 - RNA, 16 nt, Human
gcccauucauuccauu

SEQ ID NO: 2527798 - RNA, 16 nt, Human
gcccauuccucaccuu

SEQ ID NO: 2527799 - RNA, 21 nt, Human
gccccaacucuccccugaccu

SEQ ID NO: 2527800 - RNA, 20 nt, Human
gccccaaguccugaagaggc

SEQ ID NO: 2527801 - RNA, 19 nt, Human
gccccaaguccugaagagg

SEQ ID NO: 2527802 - RNA, 16 nt, Human
gccccaaguccugaag

SEQ ID NO: 2527803 - RNA, 15 nt, Human
gccccaaguccugaa

SEQ ID NO: 2527804 - RNA, 13 nt, Human
gccccaaguccug

SEQ ID NO: 2527805 - RNA, 18 nt, Human
gcccauuucaauucucaa

SEQ ID NO: 2527806 - RNA, 19 nt, Human
gcccauuucaauucucaaa

SEQ ID NO: 2527807 - RNA, 20 nt, Human
gcccauucucucuccugucc

SEQ ID NO: 2527808 - RNA, 20 nt, Human
gcccauuucaauucucaaaa

SEQ ID NO: 2527809 - RNA, 22 nt, Human
gccccaacuccuggaagcugug

SEQ ID NO: 2527810 - RNA, 17 nt, Human
gcccauucucucuccug

SEQ ID NO: 2527811 - RNA, 19 nt, Human
gcccauucucucuccuguc

SEQ ID NO: 2527812 - RNA, 21 nt, Human
gcccauucucucuccugucca

SEQ ID NO: 2527813 - RNA, 14 nt, Human
gcccauucucucuc

SEQ ID NO: 2527814 - RNA, 15 nt, Human
gcccauucucucucc

SEQ ID NO: 2527815 - RNA, 18 nt, Human
gccccugccucucugcag

SEQ ID NO: 2527816 - RNA, 17 nt, Human
gccccugccucucugca

SEQ ID NO: 2527817 - RNA, 22 nt, Human
gccccugcugguucaggguugg

SEQ ID NO: 2527818 - RNA, 15 nt, Human
gccccugcuucucca

SEQ ID NO: 2527819 - RNA, 14 nt, Human
gccccugcuucucc

SEQ ID NO: 2527820 - RNA, 21 nt, Human
gccccugcugguucaggguug

SEQ ID NO: 2527821 - RNA, 16 nt, Human
gccccugccucucugc

SEQ ID NO: 2527822 - RNA, 15 nt, Human
gccccugccucucug

SEQ ID NO: 2527823 - RNA, 15 nt, Human
gccccugcccggcug

SEQ ID NO: 2527824 - RNA, 18 nt, Human
gcccccgggccgacggag

SEQ ID NO: 2527825 - RNA, 20 nt, Human
gcccccgcuguaaugaaaca

SEQ ID NO: 2527826 - RNA, 16 nt, Human
gcccccgcccccggcg

SEQ ID NO: 2527827 - RNA, 13 nt, Human
gcccccgccccgc

SEQ ID NO: 2527828 - RNA, 15 nt, Human
gcccccggcggcgcc

SEQ ID NO: 2527829 - RNA, 13 nt, Human
gcccccggcggcg

SEQ ID NO: 2527830 - RNA, 14 nt, Human
gcccccggcccccu

SEQ ID NO: 2527831 - RNA, 16 nt, Human
gcccccgccccgcccc

SEQ ID NO: 2527832 - RNA, 18 nt, Human
gccccaaucccuuuauua

SEQ ID NO: 2527833 - RNA, 21 nt, Human
gccccaaguccugaagaggcg

SEQ ID NO: 2527834 - RNA, 19 nt, Human
gccccaaucccuuuauuac

SEQ ID NO: 2527835 - RNA, 23 nt, Human
gccccacacuggggugccgccug

SEQ ID NO: 2527836 - RNA, 22 nt, Human
gccccacacuggggugccgccu

SEQ ID NO: 2527837 - RNA, 11 nt, Human
gccccacagcc

SEQ ID NO: 2527838 - RNA, 19 nt, Human
gccccacacuggggugccg

SEQ ID NO: 2527839 - RNA, 16 nt, Human
gccccacacuggggug

SEQ ID NO: 2527840 - RNA, 20 nt, Human
gccccacacggaggcaucug

SEQ ID NO: 2527841 - RNA, 17 nt, Human
gccccaccccagguccu

SEQ ID NO: 2527842 - RNA, 12 nt, Human
gccccacccugg

SEQ ID NO: 2527843 - RNA, 20 nt, Human
gccccccuccuugcucugca

SEQ ID NO: 2527844 - RNA, 16 nt, Human
gccccccuccuugcuc

SEQ ID NO: 2527845 - RNA, 13 nt, Human
gcccccgagcugg

SEQ ID NO: 2527846 - RNA, 14 nt, Human
gcccccgagcuggg

SEQ ID NO: 2527847 - RNA, 22 nt, Human
gcccccgagcugggggccauga

SEQ ID NO: 2527848 - RNA, 11 nt, Human
gcccccgcccc

SEQ ID NO: 2527849 - RNA, 17 nt, Human
gcccaggccccugccac

SEQ ID NO: 2527850 - RNA, 13 nt, Human
gcccaggccccug

SEQ ID NO: 2527851 - RNA, 15 nt, Human
gcccaggccccugcc

SEQ ID NO: 2527852 - RNA, 16 nt, Human
gcccaggcaggucuug

SEQ ID NO: 2527853 - RNA, 14 nt, Human
gcccaggcaggucu

SEQ ID NO: 2527854 - RNA, 22 nt, Human
gcccaggaguuugaggcugcag

SEQ ID NO: 2527855 - RNA, 12 nt, Human
gcccaggcaggu

SEQ ID NO: 2527856 - RNA, 13 nt, Human
gcccaggcagguc

SEQ ID NO: 2527857 - RNA, 14 nt, Human
gccaucaaaaugcu

SEQ ID NO: 2527858 - RNA, 15 nt, Human
gccaucaaaaugcuu

SEQ ID NO: 2527859 - RNA, 16 nt, Human
gccaucaaaaugcuuu

SEQ ID NO: 2527860 - RNA, 18 nt, Human
gccaucaaaaugcuuuuu

SEQ ID NO: 2527861 - RNA, 17 nt, Human
gccaucaacaagaguug

SEQ ID NO: 2527862 - RNA, 19 nt, Human
gccaucaaaaugcuuuuua

SEQ ID NO: 2527863 - RNA, 22 nt, Human
gccaugugcuaguaauuggaaa

SEQ ID NO: 2527864 - RNA, 14 nt, Human
gccaugugccaggu

SEQ ID NO: 2527865 - RNA, 21 nt, Human
gcccaggagagccagcccucc

SEQ ID NO: 2527866 - RNA, 18 nt, Human
gccauguuccaauaaaca

SEQ ID NO: 2527867 - RNA, 18 nt, Human
gcccaggagagccagccc

SEQ ID NO: 2527868 - RNA, 23 nt, Human
gccauguuaauguaaucugaugg

SEQ ID NO: 2527869 - RNA, 19 nt, Human
gcccaggagagccagcccu

SEQ ID NO: 2527870 - RNA, 20 nt, Human
gcccaggagagccagcccuc

SEQ ID NO: 2527871 - RNA, 17 nt, Human
gccugcuccagaccuga

SEQ ID NO: 2527872 - RNA, 21 nt, Human
gccugcuccagaccugauccu

SEQ ID NO: 2527873 - RNA, 18 nt, Human
gccugcgcccaccccgcu

SEQ ID NO: 2527874 - RNA, 13 nt, Human
gccugcuccagcu

SEQ ID NO: 2527875 - RNA, 21 nt, Human
gccugcccuccccagagcacu

SEQ ID NO: 2527876 - RNA, 19 nt, Human
gccugcccuccccagagca

SEQ ID NO: 2527877 - RNA, 22 nt, Human
gccugcccuccccagagcacug

SEQ ID NO: 2527878 - RNA, 13 nt, Human
gccugcccuuguc

SEQ ID NO: 2527879 - RNA, 21 nt, Human
gccugcccuugucugagaugc

SEQ ID NO: 2527880 - RNA, 14 nt, Human
gccugcccuugucu

SEQ ID NO: 2527881 - RNA, 22 nt, Human
gccugcgcccaccccgcucugc

SEQ ID NO: 2527882 - RNA, 20 nt, Human
gccugcgcccaccccgcucu

SEQ ID NO: 2527883 - RNA, 17 nt, Human
gccugcggccugcugga

SEQ ID NO: 2527884 - RNA, 20 nt, Human
gccugcguuuuggaagcucu

SEQ ID NO: 2527885 - RNA, 20 nt, Human
gccugcguucuugugacaga

SEQ ID NO: 2527886 - RNA, 23 nt, Human
gccugcgcccaccccgcucugca

SEQ ID NO: 2527887 - RNA, 12 nt, Human
gccugcuccaga

SEQ ID NO: 2527888 - RNA, 13 nt, Human
gccugcuccagac

SEQ ID NO: 2527889 - RNA, 14 nt, Human
gccugcuccagacc

SEQ ID NO: 2527890 - RNA, 15 nt, Human
gccugcuccagaccu

SEQ ID NO: 2527891 - RNA, 16 nt, Human
gccugcuccagaccug

SEQ ID NO: 2527892 - RNA, 23 nt, Human
gccugcuaauuccccagauugca

SEQ ID NO: 2527893 - RNA, 17 nt, Human
gccugcuaauuccccag

SEQ ID NO: 2527894 - RNA, 18 nt, Human
gccugcccuccccagagc

SEQ ID NO: 2527895 - RNA, 17 nt, Human
gccugcccuccccagag

SEQ ID NO: 2527896 - RNA, 15 nt, Human
gccugcccuccccag

SEQ ID NO: 2527897 - RNA, 14 nt, Human
gccugcccucaggg

SEQ ID NO: 2527898 - RNA, 22 nt, Human
gccugcccucauggccccucug

SEQ ID NO: 2527899 - RNA, 21 nt, Human
gccugcccucauggccccucu

SEQ ID NO: 2527900 - RNA, 20 nt, Human
gccugcccgucucucuccca

SEQ ID NO: 2527901 - RNA, 18 nt, Human
gccugcccgucucucucc

SEQ ID NO: 2527902 - RNA, 20 nt, Human
gccugcccucauggccccuc

SEQ ID NO: 2527903 - RNA, 16 nt, Human
gccugcccguaaacac

SEQ ID NO: 2527904 - RNA, 21 nt, Human
gccugcccguaaacacgccug

SEQ ID NO: 2527905 - RNA, 17 nt, Human
gccugccccucucccgc

SEQ ID NO: 2527906 - RNA, 14 nt, Human
gccugccccucucc

SEQ ID NO: 2527907 - RNA, 18 nt, Human
gccugccccucccagaac

SEQ ID NO: 2527908 - RNA, 13 nt, Human
gccucggacuuag

SEQ ID NO: 2527909 - RNA, 15 nt, Human
gccucgccuggccug

SEQ ID NO: 2527910 - RNA, 14 nt, Human
gccucgccuggccu

SEQ ID NO: 2527911 - RNA, 13 nt, Human
gccucgccuggcc

SEQ ID NO: 2527912 - RNA, 20 nt, Human
gccucgcccaccgcaugccc

SEQ ID NO: 2527913 - RNA, 16 nt, Human
gccucgcccaccgcau

SEQ ID NO: 2527914 - RNA, 15 nt, Human
gccucgcccaccgca

SEQ ID NO: 2527915 - RNA, 14 nt, Human
gccucgcccaccgc

SEQ ID NO: 2527916 - RNA, 23 nt, Human
gccucgcccaccgcaugcccccu

SEQ ID NO: 2527917 - RNA, 20 nt, Human
gccuccagggcuggacugag

SEQ ID NO: 2527918 - RNA, 19 nt, Human
gccuccagggcuggacuga

SEQ ID NO: 2527919 - RNA, 18 nt, Human
gccuccagggcuggacug

SEQ ID NO: 2527920 - RNA, 17 nt, Human
gccuccagggcuggacu

SEQ ID NO: 2527921 - RNA, 16 nt, Human
gccuccagggcuggac

SEQ ID NO: 2527922 - RNA, 16 nt, Human
gccuccauccugaggc

SEQ ID NO: 2527923 - RNA, 20 nt, Human
gccuccauccugaggcucca

SEQ ID NO: 2527924 - RNA, 21 nt, Human
gccuccuuugugaggaagccg

SEQ ID NO: 2527925 - RNA, 20 nt, Human
gccuccuuugugaggaagcc

SEQ ID NO: 2527926 - RNA, 19 nt, Human
gccuccuuugugaggaagc

SEQ ID NO: 2527927 - RNA, 11 nt, Human
gccuccaucuc

SEQ ID NO: 2527928 - RNA, 21 nt, Human
gccuccaggccacauggggcu

SEQ ID NO: 2527929 - RNA, 20 nt, Human
gccuccuuccuugcuguccu

SEQ ID NO: 2527930 - RNA, 22 nt, Human
gccuccaaggaggggcuguaaa

SEQ ID NO: 2527931 - RNA, 23 nt, Human
gccuccaaggaggggcuguaaaa

SEQ ID NO: 2527932 - RNA, 19 nt, Human
gccuccagaacucacuggg

SEQ ID NO: 2527933 - RNA, 11 nt, Human
gccuccagccu

SEQ ID NO: 2527934 - RNA, 17 nt, Human
gccuccagaacucacug

SEQ ID NO: 2527935 - RNA, 14 nt, Human
gccuccagggcugg

SEQ ID NO: 2527936 - RNA, 13 nt, Human
gccuccagggcug

SEQ ID NO: 2527937 - RNA, 22 nt, Human
gccuccaggccacauggggcug

SEQ ID NO: 2527938 - RNA, 12 nt, Human
gccuccagggcu

SEQ ID NO: 2527939 - RNA, 15 nt, Human
gccuccagccucugu

SEQ ID NO: 2527940 - RNA, 14 nt, Human
gccuccagccucug

SEQ ID NO: 2527941 - RNA, 12 nt, Human
gccuccagccuc

SEQ ID NO: 2527942 - RNA, 12 nt, Human
gccuccaggcca

SEQ ID NO: 2527943 - RNA, 19 nt, Human
gccuccaggaaccacacca

SEQ ID NO: 2527944 - RNA, 18 nt, Human
gccuccagcugccccggg

SEQ ID NO: 2527945 - RNA, 17 nt, Human
gccuccaagcuccaucu

SEQ ID NO: 2527946 - RNA, 22 nt, Human
gccuccaaaugccaacuugucc

SEQ ID NO: 2527947 - RNA, 21 nt, Human
gccucauuuagagaggaaaag

SEQ ID NO: 2527948 - RNA, 17 nt, Human
gccuccaaaugccaacu

SEQ ID NO: 2527949 - RNA, 19 nt, Human
gccucauguggcuggaaga

SEQ ID NO: 2527950 - RNA, 21 nt, Human
gccucauuacuuuaccacccc

SEQ ID NO: 2527951 - RNA, 18 nt, Human
gccucauguggcuggaag

SEQ ID NO: 2527952 - RNA, 16 nt, Human
gcgacuuucugccugg

SEQ ID NO: 2527953 - RNA, 14 nt, Human
gcgacuuucugccu

SEQ ID NO: 2527954 - RNA, 17 nt, Human
gcgacuuucugccugga

SEQ ID NO: 2527955 - RNA, 20 nt, Human
gcgagaaccuaaguuucagu

SEQ ID NO: 2527956 - RNA, 18 nt, Human
gcgagacuccgucucaaa

SEQ ID NO: 2527957 - RNA, 14 nt, Human
gcgagacuccgucu

SEQ ID NO: 2527958 - RNA, 16 nt, Human
gcgagaggaggggccc

SEQ ID NO: 2527959 - RNA, 16 nt, Human
gcgagaggcagagaaa

SEQ ID NO: 2527960 - RNA, 15 nt, Human
gcgagaggcagagaa

SEQ ID NO: 2527961 - RNA, 15 nt, Human
gcgagagucccugca

SEQ ID NO: 2527962 - RNA, 23 nt, Human
gcgagauggggugggguggagaa

SEQ ID NO: 2527963 - RNA, 16 nt, Human
gcgagagucugucuca

SEQ ID NO: 2527964 - RNA, 16 nt, Human
gcgaggcagaggacag

SEQ ID NO: 2527965 - RNA, 13 nt, Human
gcgaggcagagga

SEQ ID NO: 2527966 - RNA, 12 nt, Human
gcgaggcagagg

SEQ ID NO: 2527967 - RNA, 16 nt, Human
gcgagcauccuggcca

SEQ ID NO: 2527968 - RNA, 18 nt, Human
gcgaggaggcuccagagg

SEQ ID NO: 2527969 - RNA, 14 nt, Human
gcgaggcagaggac

SEQ ID NO: 2527970 - RNA, 14 nt, Human
gcgaggggagggug

SEQ ID NO: 2527971 - RNA, 13 nt, Human
gcgauucuucugc

SEQ ID NO: 2527972 - RNA, 17 nt, Human
gcgauucuccugccuca

SEQ ID NO: 2527973 - RNA, 20 nt, Human
gcgagugugugcaugugugu

SEQ ID NO: 2527974 - RNA, 16 nt, Human
gcgaggucaacagaga

SEQ ID NO: 2527975 - RNA, 17 nt, Human
gcgaggucaacagagaa

SEQ ID NO: 2527976 - RNA, 18 nt, Human
gcgaggucaacagagaag

SEQ ID NO: 2527977 - RNA, 19 nt, Human
gcgaggucaacagagaagg

SEQ ID NO: 2527978 - RNA, 15 nt, Human
gcgagugccaggacu

SEQ ID NO: 2527979 - RNA, 22 nt, Human
gcgaguauguguuugugugugu

SEQ ID NO: 2527980 - RNA, 22 nt, Human
gcgaggucaacagagaaggcag

SEQ ID NO: 2527981 - RNA, 23 nt, Human
gcgaggucaacagagaaggcagg

SEQ ID NO: 2527982 - RNA, 22 nt, Human
gcgagugccaggacuccccagg

SEQ ID NO: 2527983 - RNA, 21 nt, Human
gcgagugccaggacuccccag

SEQ ID NO: 2527984 - RNA, 17 nt, Human
gcgaguuguggaaagcc

SEQ ID NO: 2527985 - RNA, 16 nt, Human
gcgauccaccugucuc

SEQ ID NO: 2527986 - RNA, 14 nt, Human
gcgauucuucugcu

SEQ ID NO: 2527987 - RNA, 19 nt, Human
gcgauucuggauaaagcca

SEQ ID NO: 2527988 - RNA, 20 nt, Human
gcgauucuggauaaagccac

SEQ ID NO: 2527989 - RNA, 13 nt, Human
gcuaauuugcauu

SEQ ID NO: 2527990 - RNA, 15 nt, Human
gcuaauuugcauuaa

SEQ ID NO: 2527991 - RNA, 20 nt, Human
gcuaauuuauccugaaauuu

SEQ ID NO: 2527992 - RNA, 12 nt, Human
gcuaauuugcau

SEQ ID NO: 2527993 - RNA, 18 nt, Human
gcuaauuuugaaaaacug

SEQ ID NO: 2527994 - RNA, 16 nt, Human
gcuaauuuuucauuuu

SEQ ID NO: 2527995 - RNA, 17 nt, Human
gcguuucuaugacacau

SEQ ID NO: 2527996 - RNA, 19 nt, Human
gcguuuaagacuguaauga

SEQ ID NO: 2527997 - RNA, 20 nt, Human
gcguuguaaaauauagcugu

SEQ ID NO: 2527998 - RNA, 19 nt, Human
gcguuguaaaauauagcug

SEQ ID NO: 2527999 - RNA, 15 nt, Human
gcguugcaugucgug

SEQ ID NO: 2528000 - RNA, 21 nt, Human
gcgugguggaagaggggacag

SEQ ID NO: 2528001 - RNA, 15 nt, Human
gcguuguaaaauaua

SEQ ID NO: 2528002 - RNA, 14 nt, Human
gcguuguaaaauau

SEQ ID NO: 2528003 - RNA, 18 nt, Human
gcuacaaaaacacagcaa

SEQ ID NO: 2528004 - RNA, 19 nt, Human
gcuacaaaaacacagcaag

SEQ ID NO: 2528005 - RNA, 17 nt, Human
gcuacaaaaacacagca

SEQ ID NO: 2528006 - RNA, 15 nt, Human
gcuaauuuuuguaau

SEQ ID NO: 2528007 - RNA, 16 nt, Human
gcuaauuuuuguaauu

SEQ ID NO: 2528008 - RNA, 17 nt, Human
gcuaauuuuuguaauuu

SEQ ID NO: 2528009 - RNA, 22 nt, Human
gcuacaauuuucucccaggaag

SEQ ID NO: 2528010 - RNA, 21 nt, Human
gcuacaauuuucucccaggaa

SEQ ID NO: 2528011 - RNA, 20 nt, Human
gcuacaauuuucucccagga

SEQ ID NO: 2528012 - RNA, 15 nt, Human
gcuacaauuuucucc

SEQ ID NO: 2528013 - RNA, 17 nt, Human
gcuacaacuucagcagu

SEQ ID NO: 2528014 - RNA, 15 nt, Human
gcuacaacuucagca

SEQ ID NO: 2528015 - RNA, 22 nt, Human
gcuacaaagaagacauguuuua

SEQ ID NO: 2528016 - RNA, 23 nt, Human
gcuacuggcaaaaggaucuuugu

SEQ ID NO: 2528017 - RNA, 16 nt, Human
gcuacaaagaagacau

SEQ ID NO: 2528018 - RNA, 15 nt, Human
gcuacaaagaagaca

SEQ ID NO: 2528019 - RNA, 14 nt, Human
gcuacaaagaagac

SEQ ID NO: 2528020 - RNA, 20 nt, Human
gcuacaaagaagacauguuu

SEQ ID NO: 2528021 - RNA, 19 nt, Human
gcuacaaagaagacauguu

SEQ ID NO: 2528022 - RNA, 18 nt, Human
gcuacaaagaagacaugu

SEQ ID NO: 2528023 - RNA, 17 nt, Human
gcuacaaagaagacaug

SEQ ID NO: 2528024 - RNA, 20 nt, Human
gcuacaaauacucuuaggaa

SEQ ID NO: 2528025 - RNA, 15 nt, Human
gcuacugucagcucc

SEQ ID NO: 2528026 - RNA, 18 nt, Human
gcuacuguaauuuuauau

SEQ ID NO: 2528027 - RNA, 22 nt, Human
gcuacuguaauuuuauaugaag

SEQ ID NO: 2528028 - RNA, 19 nt, Human
gcuacuguaaggcaaucau

SEQ ID NO: 2528029 - RNA, 18 nt, Human
gcuacuguaaggcaauca

SEQ ID NO: 2528030 - RNA, 21 nt, Human
gcuacugucucacugaaacau

SEQ ID NO: 2528031 - RNA, 16 nt, Human
gcuacugucucacuga

SEQ ID NO: 2528032 - RNA, 12 nt, Human
gcuacugucuca

SEQ ID NO: 2528033 - RNA, 15 nt, Human
gcuacugugugugug

SEQ ID NO: 2528034 - RNA, 18 nt, Human
gcuacugugugugugaau

SEQ ID NO: 2528035 - RNA, 21 nt, Human
gcuacuuaauuccuuucucau

SEQ ID NO: 2528036 - RNA, 17 nt, Human
gcuacuuaauuccuuuc

SEQ ID NO: 2528037 - RNA, 19 nt, Human
gcuacugugugugugaaug

SEQ ID NO: 2528038 - RNA, 21 nt, Human
gcuacugugugugugaaugaa

SEQ ID NO: 2528039 - RNA, 20 nt, Human
gcuacuguccuacccacccu

SEQ ID NO: 2528040 - RNA, 19 nt, Human
gcuacuguccuacccaccc

SEQ ID NO: 2528041 - RNA, 15 nt, Human
gcuagaaccuggagg

SEQ ID NO: 2528042 - RNA, 20 nt, Human
gcuagaaccuggagagcuag

SEQ ID NO: 2528043 - RNA, 19 nt, Human
gcuagaaccuggagagcua

SEQ ID NO: 2528044 - RNA, 15 nt, Human
gcuagaaccuggaga

SEQ ID NO: 2528045 - RNA, 20 nt, Human
gcuagaaccuggaagggcua

SEQ ID NO: 2528046 - RNA, 19 nt, Human
gcuagaaccuggaagggcu

SEQ ID NO: 2528047 - RNA, 18 nt, Human
gcuagaaccuggaagggc

SEQ ID NO: 2528048 - RNA, 20 nt, Human
gcuagaaccuagaagggcua

SEQ ID NO: 2528049 - RNA, 19 nt, Human
gcuagaaccuagaagggcu

SEQ ID NO: 2528050 - RNA, 18 nt, Human
gcuagaaccuagaagggc

SEQ ID NO: 2528051 - RNA, 20 nt, Human
gcuagaaccaagaagggcua

SEQ ID NO: 2528052 - RNA, 19 nt, Human
gcuagaaccaagaagggcu

SEQ ID NO: 2528053 - RNA, 18 nt, Human
gcuagaaccaagaagggc

SEQ ID NO: 2528054 - RNA, 20 nt, Human
gcuagaaccuguagagcuag

SEQ ID NO: 2528055 - RNA, 19 nt, Human
gcuagaaccuggagggcug

SEQ ID NO: 2528056 - RNA, 17 nt, Human
gcuacuugggaggcuga

SEQ ID NO: 2528057 - RNA, 20 nt, Human
gcuacuucccucacccacuu

SEQ ID NO: 2528058 - RNA, 23 nt, Human
gcuacuuaauuccuuucucaucc

SEQ ID NO: 2528059 - RNA, 18 nt, Human
gcuacuuccuccucccca

SEQ ID NO: 2528060 - RNA, 19 nt, Human
gcuacuuccuccuccccac

SEQ ID NO: 2528061 - RNA, 13 nt, Human
gcuacuugggagg

SEQ ID NO: 2528062 - RNA, 16 nt, Human
gcuacuuugccuuuug

SEQ ID NO: 2528063 - RNA, 21 nt, Human
gcuacuuuauuuauacacugu

SEQ ID NO: 2528064 - RNA, 18 nt, Human
gcuacuugggccauagcu

SEQ ID NO: 2528065 - RNA, 18 nt, Human
gcuagaaauaugauuuua

SEQ ID NO: 2528066 - RNA, 11 nt, Human
gcuagaaauga

SEQ ID NO: 2528067 - RNA, 21 nt, Human
gcggcccagcccggcucccac

SEQ ID NO: 2528068 - RNA, 18 nt, Human
gcggcccagcccggcucc

SEQ ID NO: 2528069 - RNA, 16 nt, Human
gcggcccagcccggcu

SEQ ID NO: 2528070 - RNA, 15 nt, Human
gcggcccagcccggc

SEQ ID NO: 2528071 - RNA, 13 nt, Human
gcggcccagcccg

SEQ ID NO: 2528072 - RNA, 23 nt, Human
gcggcccaagcccgacuugcugu

SEQ ID NO: 2528073 - RNA, 22 nt, Human
gcggcccaagcccgacuugcug

SEQ ID NO: 2528074 - RNA, 22 nt, Human
gcggagugaagaggggcagccc

SEQ ID NO: 2528075 - RNA, 21 nt, Human
gcggagugaagaggggcagcc

SEQ ID NO: 2528076 - RNA, 20 nt, Human
gcggagugaagaggggcagc

SEQ ID NO: 2528077 - RNA, 18 nt, Human
gcggagugaagaggggca

SEQ ID NO: 2528078 - RNA, 14 nt, Human
gcggagugaagagg

SEQ ID NO: 2528079 - RNA, 13 nt, Human
gcggccggccagc

SEQ ID NO: 2528080 - RNA, 19 nt, Human
gcggccgcauucccugagu

SEQ ID NO: 2528081 - RNA, 16 nt, Human
gcggccgcauucccug

SEQ ID NO: 2528082 - RNA, 17 nt, Human
gcggccgcauucccuga

SEQ ID NO: 2528083 - RNA, 18 nt, Human
gcggccgcauucccugag

SEQ ID NO: 2528084 - RNA, 15 nt, Human
gcggccccucccaca

SEQ ID NO: 2528085 - RNA, 14 nt, Human
gcggccccucccac

SEQ ID NO: 2528086 - RNA, 13 nt, Human
gcggccccucccg

SEQ ID NO: 2528087 - RNA, 16 nt, Human
gcggccccucccgccc

SEQ ID NO: 2528088 - RNA, 15 nt, Human
gcggccgcauucccu

SEQ ID NO: 2528089 - RNA, 17 nt, Human
gcguggucacugcuguc

SEQ ID NO: 2528090 - RNA, 18 nt, Human
gcguggucacugcuguca

SEQ ID NO: 2528091 - RNA, 20 nt, Human
gcgugguggacaugcacagc

SEQ ID NO: 2528092 - RNA, 13 nt, Human
gcguggggagggc

SEQ ID NO: 2528093 - RNA, 17 nt, Human
gcguggggacagggcuc

SEQ ID NO: 2528094 - RNA, 16 nt, Human
gcguggucacugcugu

SEQ ID NO: 2528095 - RNA, 16 nt, Human
gcguggagggcguggg

SEQ ID NO: 2528096 - RNA, 23 nt, Human
gcgugaucucggcucacugcaac

SEQ ID NO: 2528097 - RNA, 19 nt, Human
gcguggagggcguggaggg

SEQ ID NO: 2528098 - RNA, 18 nt, Human
gcgugcacacaccagagc

SEQ ID NO: 2528099 - RNA, 14 nt, Human
gcgugcacacacca

SEQ ID NO: 2528100 - RNA, 20 nt, Human
gcgugaucaaagccacacuc

SEQ ID NO: 2528101 - RNA, 19 nt, Human
gcgugaucaaagccacacu

SEQ ID NO: 2528102 - RNA, 15 nt, Human
gcggagaguacagug

SEQ ID NO: 2528103 - RNA, 22 nt, Human
gcggagagaggccuugucccag

SEQ ID NO: 2528104 - RNA, 12 nt, Human
gcggagcuggcc

SEQ ID NO: 2528105 - RNA, 20 nt, Human
gcggagaguacagugagcca

SEQ ID NO: 2528106 - RNA, 16 nt, Human
gcggagaguacaguga

SEQ ID NO: 2528107 - RNA, 22 nt, Human
gcggagaguacagugagccaag

SEQ ID NO: 2528108 - RNA, 21 nt, Human
gcggagguguggagccgaggc

SEQ ID NO: 2528109 - RNA, 16 nt, Human
gcggagcuugcaguga

SEQ ID NO: 2528110 - RNA, 15 nt, Human
gcggagguugcaggg

SEQ ID NO: 2528111 - RNA, 16 nt, Human
gcggagguugcaggga

SEQ ID NO: 2528112 - RNA, 17 nt, Human
gcggagcuggccccgcc

SEQ ID NO: 2528113 - RNA, 14 nt, Human
gcggagcuggcccc

SEQ ID NO: 2528114 - RNA, 14 nt, Human
auguuuguggccuc

SEQ ID NO: 2528115 - RNA, 15 nt, Human
auguuuguggccuca

SEQ ID NO: 2528116 - RNA, 16 nt, Human
auguuuguggccucag

SEQ ID NO: 2528117 - RNA, 17 nt, Human
auguuuguggccucaga

SEQ ID NO: 2528118 - RNA, 14 nt, Human
auguuuguaaaacu

SEQ ID NO: 2528119 - RNA, 23 nt, Human
auguuugggcagaagggagaagg

SEQ ID NO: 2528120 - RNA, 23 nt, Human
auguuuguccugaacacuuuugu

SEQ ID NO: 2528121 - RNA, 10 nt, Human
auguuugugg

SEQ ID NO: 2528122 - RNA, 13 nt, Human
auguuuguggccu

SEQ ID NO: 2528123 - RNA, 18 nt, Human
auguuugggcagaaggga

SEQ ID NO: 2528124 - RNA, 23 nt, Human
auguuugggagacugcugaguca

SEQ ID NO: 2528125 - RNA, 18 nt, Human
auguuugccucugccucu

SEQ ID NO: 2528126 - RNA, 13 nt, Human
auuaauguuaauu

SEQ ID NO: 2528127 - RNA, 12 nt, Human
auuaauguuaau

SEQ ID NO: 2528128 - RNA, 18 nt, Human
auuaauguuaauucagca

SEQ ID NO: 2528129 - RNA, 21 nt, Human
auuaauuuuuuuauuguuuaa

SEQ ID NO: 2528130 - RNA, 22 nt, Human
auuacaaauugcuuacuuugga

SEQ ID NO: 2528131 - RNA, 15 nt, Human
auuacaaauugcuua

SEQ ID NO: 2528132 - RNA, 14 nt, Human
auuacaaauugcuu

SEQ ID NO: 2528133 - RNA, 13 nt, Human
auuacaaauugcu

SEQ ID NO: 2528134 - RNA, 18 nt, Human
auuacagagaggagaaac

SEQ ID NO: 2528135 - RNA, 19 nt, Human
auuacagagaggagaaaca

SEQ ID NO: 2528136 - RNA, 22 nt, Human
auuacaaaaugacauuuugcca

SEQ ID NO: 2528137 - RNA, 22 nt, Human
auuaauuuuuuuauuguuuaaa

SEQ ID NO: 2528138 - RNA, 17 nt, Human
auuaauuggcagcagau

SEQ ID NO: 2528139 - RNA, 16 nt, Human
auuaauuggcagcaga

SEQ ID NO: 2528140 - RNA, 12 nt, Human
auuaauugcuuu

SEQ ID NO: 2528141 - RNA, 13 nt, Human
auuaauugcuuug

SEQ ID NO: 2528142 - RNA, 14 nt, Human
auuaauugcuuuga

SEQ ID NO: 2528143 - RNA, 14 nt, Human
auuaauucuauaag

SEQ ID NO: 2528144 - RNA, 14 nt, Human
auuaauuaaaugca

SEQ ID NO: 2528145 - RNA, 13 nt, Human
auuaauucuauaa

SEQ ID NO: 2528146 - RNA, 19 nt, Human
auuaauucaccuuccagug

SEQ ID NO: 2528147 - RNA, 15 nt, Human
auuacagcuggagaa

SEQ ID NO: 2528148 - RNA, 21 nt, Human
auuacagaugggcaaauuaag

SEQ ID NO: 2528149 - RNA, 20 nt, Human
auuacaggcaccugccacca

SEQ ID NO: 2528150 - RNA, 22 nt, Human
auuacaggcaccugccaccaug

SEQ ID NO: 2528151 - RNA, 16 nt, Human
auuacaggugugaacc

SEQ ID NO: 2528152 - RNA, 17 nt, Human
auuacaggaaguacugg

SEQ ID NO: 2528153 - RNA, 19 nt, Human
auuacagaugggcaaauua

SEQ ID NO: 2528154 - RNA, 17 nt, Human
auuacagaggaaguuau

SEQ ID NO: 2528155 - RNA, 15 nt, Human
auuacagaggaaguu

SEQ ID NO: 2528156 - RNA, 21 nt, Human
auuacagagaggagaaacaca

SEQ ID NO: 2528157 - RNA, 22 nt, Human
auuacagagaggagaaacacau

SEQ ID NO: 2528158 - RNA, 23 nt, Human
auuagauguucucuaucauuuaa

SEQ ID NO: 2528159 - RNA, 21 nt, Human
auuagauguucucuaucauuu

SEQ ID NO: 2528160 - RNA, 19 nt, Human
auuagauguucucuaucau

SEQ ID NO: 2528161 - RNA, 23 nt, Human
auuagauuucucauuugccaaua

SEQ ID NO: 2528162 - RNA, 22 nt, Human
auuagcaauugacugucacugu

SEQ ID NO: 2528163 - RNA, 17 nt, Human
auuagcaguuugcuuug

SEQ ID NO: 2528164 - RNA, 19 nt, Human
auuagcauuugucaacaaa

SEQ ID NO: 2528165 - RNA, 15 nt, Human
auuagccagguaaug

SEQ ID NO: 2528166 - RNA, 22 nt, Human
auuagccaggaucaugguguaa

SEQ ID NO: 2528167 - RNA, 21 nt, Human
auuagccaggaucauggugua

SEQ ID NO: 2528168 - RNA, 15 nt, Human
auuagccaggaucau

SEQ ID NO: 2528169 - RNA, 14 nt, Human
auuagccaggauca

SEQ ID NO: 2528170 - RNA, 17 nt, Human
auuagccacaaaauugg

SEQ ID NO: 2528171 - RNA, 13 nt, Human
auuagccaggauc

SEQ ID NO: 2528172 - RNA, 14 nt, Human
auuagcauuuaguc

SEQ ID NO: 2528173 - RNA, 16 nt, Human
auuagccugaguagaa

SEQ ID NO: 2528174 - RNA, 14 nt, Human
auuagccugaguag

SEQ ID NO: 2528175 - RNA, 17 nt, Human
auuagccagugaaaaac

SEQ ID NO: 2528176 - RNA, 18 nt, Human
auuagccgggcauggugg

SEQ ID NO: 2528177 - RNA, 17 nt, Human
auuagccugaguagaaa

SEQ ID NO: 2528178 - RNA, 12 nt, Human
auuagcucugga

SEQ ID NO: 2528179 - RNA, 19 nt, Human
auuagcucacuuggugaua

SEQ ID NO: 2528180 - RNA, 13 nt, Human
auuagcucuggac

SEQ ID NO: 2528181 - RNA, 19 nt, Human
auucauagcagcuuauuca

SEQ ID NO: 2528182 - RNA, 22 nt, Human
auucauagcagcuuauucacaa

SEQ ID NO: 2528183 - RNA, 19 nt, Human
auucauaaugacuuaagca

SEQ ID NO: 2528184 - RNA, 21 nt, Human
auucauaauuauuauuuggcc

SEQ ID NO: 2528185 - RNA, 15 nt, Human
auucauaaugacuua

SEQ ID NO: 2528186 - RNA, 14 nt, Human
auucauaaugacuu

SEQ ID NO: 2528187 - RNA, 19 nt, Human
auucacaagacccaaaagg

SEQ ID NO: 2528188 - RNA, 18 nt, Human
auucaauuccucugggaa

SEQ ID NO: 2528189 - RNA, 17 nt, Human
auucaauuccucuggga

SEQ ID NO: 2528190 - RNA, 15 nt, Human
auucacaccugacuc

SEQ ID NO: 2528191 - RNA, 11 nt, Human
auucacacugu

SEQ ID NO: 2528192 - RNA, 13 nt, Human
auucaauuguaaa

SEQ ID NO: 2528193 - RNA, 14 nt, Human
auucaauuguaaau

SEQ ID NO: 2528194 - RNA, 13 nt, Human
auucacaauagaa

SEQ ID NO: 2528195 - RNA, 14 nt, Human
auucacaauagaaa

SEQ ID NO: 2528196 - RNA, 22 nt, Human
auucacaaugaaaugcucuccu

SEQ ID NO: 2528197 - RNA, 22 nt, Human
auucaaucuguaaacuguguau

SEQ ID NO: 2528198 - RNA, 23 nt, Human
auucaauguuuaugcaaggaagg

SEQ ID NO: 2528199 - RNA, 22 nt, Human
auucaauguuuaugcaaggaag

SEQ ID NO: 2528200 - RNA, 16 nt, Human
auucaauuccucuggg

SEQ ID NO: 2528201 - RNA, 14 nt, Human
auucaauuccucug

SEQ ID NO: 2528202 - RNA, 23 nt, Human
auuaugcaugaaguaauaugcac

SEQ ID NO: 2528203 - RNA, 17 nt, Human
auuaugcagaauacuuu

SEQ ID NO: 2528204 - RNA, 16 nt, Human
auuaugcagaauacuu

SEQ ID NO: 2528205 - RNA, 18 nt, Human
auuaugaauuacauuugu

SEQ ID NO: 2528206 - RNA, 12 nt, Human
auuaugacaguu

SEQ ID NO: 2528207 - RNA, 14 nt, Human
auuaugacaguuau

SEQ ID NO: 2528208 - RNA, 15 nt, Human
auuaugacaguuaua

SEQ ID NO: 2528209 - RNA, 16 nt, Human
auuaugacaguuauac

SEQ ID NO: 2528210 - RNA, 17 nt, Human
auuaugacaguuauacu

SEQ ID NO: 2528211 - RNA, 19 nt, Human
auuaugacaguuauacugu

SEQ ID NO: 2528212 - RNA, 16 nt, Human
auuaugaguuugcuua

SEQ ID NO: 2528213 - RNA, 20 nt, Human
auuaugagaggcaaugauug

SEQ ID NO: 2528214 - RNA, 21 nt, Human
auuaugaugugggucaaggaa

SEQ ID NO: 2528215 - RNA, 17 nt, Human
auuaugaauuacauuug

SEQ ID NO: 2528216 - RNA, 14 nt, Human
auuaugaauuacau

SEQ ID NO: 2528217 - RNA, 21 nt, Human
auuaggugugacugaauuucu

SEQ ID NO: 2528218 - RNA, 16 nt, Human
auuaggugugacugaa

SEQ ID NO: 2528219 - RNA, 18 nt, Human
auuaggugugacugaauu

SEQ ID NO: 2528220 - RNA, 19 nt, Human
auuagggcauuugagaaau

SEQ ID NO: 2528221 - RNA, 18 nt, Human
auuagggcauuugagaaa

SEQ ID NO: 2528222 - RNA, 17 nt, Human
auuagggagaaaauuca

SEQ ID NO: 2528223 - RNA, 18 nt, Human
auuagggagaaaauucaa

SEQ ID NO: 2528224 - RNA, 20 nt, Human
auuagggagaaaauucaauu

SEQ ID NO: 2528225 - RNA, 23 nt, Human
auuagggagaaaauucaauugua

SEQ ID NO: 2528226 - RNA, 15 nt, Human
auuagggguugcuaa

SEQ ID NO: 2528227 - RNA, 13 nt, Human
auuagguauuuug

SEQ ID NO: 2528228 - RNA, 22 nt, Human
auuagggguugcuaagaagcga

SEQ ID NO: 2528229 - RNA, 16 nt, Human
auuagggagagaagau

SEQ ID NO: 2528230 - RNA, 22 nt, Human
auuaggaaguguaacagcugag

SEQ ID NO: 2528231 - RNA, 13 nt, Human
auuaggaauaaau

SEQ ID NO: 2528232 - RNA, 16 nt, Human
auuaggaauaaauaaa

SEQ ID NO: 2528233 - RNA, 22 nt, Human
auuaggacaaucaguccccucc

SEQ ID NO: 2528234 - RNA, 21 nt, Human
auuaggaaguguaacagcuga

SEQ ID NO: 2528235 - RNA, 15 nt, Human
auuagcuuuacuguu

SEQ ID NO: 2528236 - RNA, 20 nt, Human
auuagcuuuacuguuuguua

SEQ ID NO: 2528237 - RNA, 15 nt, Human
auuaggaaaauaugg

SEQ ID NO: 2528238 - RNA, 20 nt, Human
auuaggaaguguaacagcug

SEQ ID NO: 2528239 - RNA, 16 nt, Human
auuagcugugugaaau

SEQ ID NO: 2528240 - RNA, 20 nt, Human
auuagcugguuggagagcua

SEQ ID NO: 2528241 - RNA, 18 nt, Human
auuguuggcacauccuau

SEQ ID NO: 2528242 - RNA, 21 nt, Human
auuguuguacacagaaauaca

SEQ ID NO: 2528243 - RNA, 20 nt, Human
auuguugguaauuauuuugg

SEQ ID NO: 2528244 - RNA, 12 nt, Human
auuguugcauua

SEQ ID NO: 2528245 - RNA, 22 nt, Human
auuguugagguggucugaaugu

SEQ ID NO: 2528246 - RNA, 23 nt, Human
auuguugagguggucugaauguu

SEQ ID NO: 2528247 - RNA, 22 nt, Human
auuguugacaguucugaagaau

SEQ ID NO: 2528248 - RNA, 21 nt, Human
auuguugacaguucugaagaa

SEQ ID NO: 2528249 - RNA, 16 nt, Human
auuguugagcuauugc

SEQ ID NO: 2528250 - RNA, 19 nt, Human
auuguugagcuauugcugu

SEQ ID NO: 2528251 - RNA, 20 nt, Human
auuguugagguggucugaau

SEQ ID NO: 2528252 - RNA, 21 nt, Human
auuguugagguggucugaaug

SEQ ID NO: 2528253 - RNA, 15 nt, Human
auuguuccaagacau

SEQ ID NO: 2528254 - RNA, 16 nt, Human
auuguuccaagacauu

SEQ ID NO: 2528255 - RNA, 17 nt, Human
auuguuccaagacauug

SEQ ID NO: 2528256 - RNA, 18 nt, Human
auuguuccaagacauugu

SEQ ID NO: 2528257 - RNA, 17 nt, Human
auuguugacaguucuga

SEQ ID NO: 2528258 - RNA, 18 nt, Human
auuguugacaguucugaa

SEQ ID NO: 2528259 - RNA, 20 nt, Human
auuguuccaagacauuguca

SEQ ID NO: 2528260 - RNA, 21 nt, Human
auugcugccacuuuuuaacua

SEQ ID NO: 2528261 - RNA, 14 nt, Human
auugcugccacuuu

SEQ ID NO: 2528262 - RNA, 20 nt, Human
auugcugccccaucagugcu

SEQ ID NO: 2528263 - RNA, 23 nt, Human
auugcugagccucugcuccccag

SEQ ID NO: 2528264 - RNA, 23 nt, Human
auugcugauggugcaaugaccuu

SEQ ID NO: 2528265 - RNA, 12 nt, Human
auugcugcuuga

SEQ ID NO: 2528266 - RNA, 21 nt, Human
auugcugccccaucagugcuc

SEQ ID NO: 2528267 - RNA, 15 nt, Human
auugcugcugguaau

SEQ ID NO: 2528268 - RNA, 19 nt, Human
auugcuggcaaagacagaa

SEQ ID NO: 2528269 - RNA, 20 nt, Human
auugcuggcaaagacagaag

SEQ ID NO: 2528270 - RNA, 22 nt, Human
auugcuucuucuccuaugugua

SEQ ID NO: 2528271 - RNA, 17 nt, Human
auugcuucuucuccuau

SEQ ID NO: 2528272 - RNA, 22 nt, Human
auugcugguucuauuuaaugga

SEQ ID NO: 2528273 - RNA, 21 nt, Human
auugcugguucuauuuaaugg

SEQ ID NO: 2528274 - RNA, 23 nt, Human
auugcugucaaguuccuuugggu

SEQ ID NO: 2528275 - RNA, 18 nt, Human
auugcuggcuggaaggga

SEQ ID NO: 2528276 - RNA, 22 nt, Human
auugcuggcaaagacagaagcc

SEQ ID NO: 2528277 - RNA, 14 nt, Human
auugcugguucuau

SEQ ID NO: 2528278 - RNA, 23 nt, Human
auugcuucuucuccuauguguaa

SEQ ID NO: 2528279 - RNA, 16 nt, Human
auugcuugaaagaaaa

SEQ ID NO: 2528280 - RNA, 17 nt, Human
auugcuugagcccagga

SEQ ID NO: 2528281 - RNA, 18 nt, Human
auugcuugagcccaggag

SEQ ID NO: 2528282 - RNA, 14 nt, Human
auugcuugagcuca

SEQ ID NO: 2528283 - RNA, 19 nt, Human
auugcugauggugcaauga

SEQ ID NO: 2528284 - RNA, 18 nt, Human
auugcugauggugcaaug

SEQ ID NO: 2528285 - RNA, 16 nt, Human
auugcugauggugcaa

SEQ ID NO: 2528286 - RNA, 15 nt, Human
auugcugauggugca

SEQ ID NO: 2528287 - RNA, 18 nt, Human
auugcugaaaaugguauu

SEQ ID NO: 2528288 - RNA, 16 nt, Human
auugcugaaaauggua

SEQ ID NO: 2528289 - RNA, 12 nt, Human
auugcugaaauu

SEQ ID NO: 2528290 - RNA, 12 nt, Human
auugcuccuuga

SEQ ID NO: 2528291 - RNA, 22 nt, Human
auugcugagagaaauauggaac

SEQ ID NO: 2528292 - RNA, 23 nt, Human
auugcugagagaaauauggaacu

SEQ ID NO: 2528293 - RNA, 14 nt, Human
auugcugagccucu

SEQ ID NO: 2528294 - RNA, 16 nt, Human
auugcugagccucugc

SEQ ID NO: 2528295 - RNA, 22 nt, Human
auugcugagccucugcucccca

SEQ ID NO: 2528296 - RNA, 13 nt, Human
auugcugaaauuu

SEQ ID NO: 2528297 - RNA, 16 nt, Human
auugcugaaauuuuau

SEQ ID NO: 2528298 - RNA, 21 nt, Human
auugcugagagaaauauggaa

SEQ ID NO: 2528299 - RNA, 13 nt, Human
auuguaaucacug

SEQ ID NO: 2528300 - RNA, 13 nt, Human
auuguaauguuac

SEQ ID NO: 2528301 - RNA, 15 nt, Human
auuguaauguuacug

SEQ ID NO: 2528302 - RNA, 17 nt, Human
auuguaauguuacugau

SEQ ID NO: 2528303 - RNA, 24 nt, Human
auuguaauguuacugaucaugcau

SEQ ID NO: 2528304 - RNA, 23 nt, Human
auuguaauaggcguaacuaauuu

SEQ ID NO: 2528305 - RNA, 14 nt, Human
auuguaaauaguau

SEQ ID NO: 2528306 - RNA, 12 nt, Human
auuguaaucacu

SEQ ID NO: 2528307 - RNA, 10 nt, Human
auuguaaaua

SEQ ID NO: 2528308 - RNA, 14 nt, Human
auuguaaaauggug

SEQ ID NO: 2528309 - RNA, 18 nt, Human
auugcuugagcucaggag

SEQ ID NO: 2528310 - RNA, 17 nt, Human
auuguaaaauuguauag

SEQ ID NO: 2528311 - RNA, 23 nt, Human
auugcuugaaagaaaauaugcau

SEQ ID NO: 2528312 - RNA, 16 nt, Human
auuguaaacauguguu

SEQ ID NO: 2528313 - RNA, 15 nt, Human
auuguaaacaugugu

SEQ ID NO: 2528314 - RNA, 15 nt, Human
auuguaaaauuguau

SEQ ID NO: 2528315 - RNA, 23 nt, Human
auugugucucuugguccugcugc

SEQ ID NO: 2528316 - RNA, 21 nt, Human
auugugucucuugguccugcu

SEQ ID NO: 2528317 - RNA, 14 nt, Human
auugugucugcagg

SEQ ID NO: 2528318 - RNA, 17 nt, Human
auugugucuuuugcaug

SEQ ID NO: 2528319 - RNA, 16 nt, Human
auugugucuuuugcau

SEQ ID NO: 2528320 - RNA, 15 nt, Human
auugugucuuuugca

SEQ ID NO: 2528321 - RNA, 13 nt, Human
auugugucuuuug

SEQ ID NO: 2528322 - RNA, 18 nt, Human
auugugucuuuugcauga

SEQ ID NO: 2528323 - RNA, 18 nt, Human
auuguucauuuugagcug

SEQ ID NO: 2528324 - RNA, 12 nt, Human
auuguucauuuu

SEQ ID NO: 2528325 - RNA, 18 nt, Human
auuguuccaaaugaaugu

SEQ ID NO: 2528326 - RNA, 20 nt, Human
auuguucauuuugagcugaa

SEQ ID NO: 2528327 - RNA, 12 nt, Human
auuguuccaaga

SEQ ID NO: 2528328 - RNA, 14 nt, Human
auuguuccaagaca

SEQ ID NO: 2528329 - RNA, 16 nt, Human
auuguuagucucuuga

SEQ ID NO: 2528330 - RNA, 13 nt, Human
auugugugauguu

SEQ ID NO: 2528331 - RNA, 12 nt, Human
auugugugaugu

SEQ ID NO: 2528332 - RNA, 21 nt, Human
auucuuucccaauucacaucu

SEQ ID NO: 2528333 - RNA, 13 nt, Human
auucuuuccugag

SEQ ID NO: 2528334 - RNA, 13 nt, Human
auucugaauguac

SEQ ID NO: 2528335 - RNA, 10 nt, Human
auucugaaug

SEQ ID NO: 2528336 - RNA, 20 nt, Human
auucugaccacccuucucau

SEQ ID NO: 2528337 - RNA, 13 nt, Human
auucuucugaacu

SEQ ID NO: 2528338 - RNA, 12 nt, Human
auucuucugcuu

SEQ ID NO: 2528339 - RNA, 11 nt, Human
auucuucugcu

SEQ ID NO: 2528340 - RNA, 16 nt, Human
auucugaaggagcccc

SEQ ID NO: 2528341 - RNA, 17 nt, Human
auucugaagccauuguc

SEQ ID NO: 2528342 - RNA, 15 nt, Human
auucugaaggagccc

SEQ ID NO: 2528343 - RNA, 16 nt, Human
auucugaacaauucuc

SEQ ID NO: 2528344 - RNA, 16 nt, Human
auucauaguaacuucu

SEQ ID NO: 2528345 - RNA, 17 nt, Human
auucauaguaacuucuu

SEQ ID NO: 2528346 - RNA, 18 nt, Human
auucauaguaacuucuua

SEQ ID NO: 2528347 - RNA, 14 nt, Human
auucucuuucaaag

SEQ ID NO: 2528348 - RNA, 11 nt, Human
auucuuuccug

SEQ ID NO: 2528349 - RNA, 13 nt, Human
auucuugaguuua

SEQ ID NO: 2528350 - RNA, 21 nt, Human
auucuucugaacucaaacuga

SEQ ID NO: 2528351 - RNA, 14 nt, Human
auucuucugccuca

SEQ ID NO: 2528352 - RNA, 14 nt, Human
auucuucugcuuca

SEQ ID NO: 2528353 - RNA, 15 nt, Human
auucuugaaggaaaa

SEQ ID NO: 2528354 - RNA, 22 nt, Human
auucuucuuccaacguggccca

SEQ ID NO: 2528355 - RNA, 18 nt, Human
auucuugaaggaaaauga

SEQ ID NO: 2528356 - RNA, 16 nt, Human
auucuugaaagcugug

SEQ ID NO: 2528357 - RNA, 21 nt, Human
auugaguauccuuucaguguu

SEQ ID NO: 2528358 - RNA, 23 nt, Human
auugagguguauggagagaaaac

SEQ ID NO: 2528359 - RNA, 15 nt, Human
auugagucaaauggu

SEQ ID NO: 2528360 - RNA, 21 nt, Human
auugauaagaaccuuuugagu

SEQ ID NO: 2528361 - RNA, 15 nt, Human
auugaguuuucagug

SEQ ID NO: 2528362 - RNA, 16 nt, Human
auugaguuuucagugg

SEQ ID NO: 2528363 - RNA, 19 nt, Human
auugauaacagcacugacu

SEQ ID NO: 2528364 - RNA, 16 nt, Human
auugauaauugcauuc

SEQ ID NO: 2528365 - RNA, 22 nt, Human
auugcuacuguccuacccaccc

SEQ ID NO: 2528366 - RNA, 20 nt, Human
auugcuacuguccuacccac

SEQ ID NO: 2528367 - RNA, 22 nt, Human
auugcuauguuuugacauuuuu

SEQ ID NO: 2528368 - RNA, 17 nt, Human
auugauaugaaaaauau

SEQ ID NO: 2528369 - RNA, 14 nt, Human
auugauaugaaaaa

SEQ ID NO: 2528370 - RNA, 15 nt, Human
auugauaugaaaaau

SEQ ID NO: 2528371 - RNA, 16 nt, Human
auugauaugaaaaaua

SEQ ID NO: 2528372 - RNA, 15 nt, Human
auugcuacuguccua

SEQ ID NO: 2528373 - RNA, 17 nt, Human
auugauaugcuuauaca

SEQ ID NO: 2528374 - RNA, 18 nt, Human
auugauagaguguuauca

SEQ ID NO: 2528375 - RNA, 18 nt, Human
auugauauaaauaaaaca

SEQ ID NO: 2528376 - RNA, 21 nt, Human
auugauauacacggaugacuu

SEQ ID NO: 2528377 - RNA, 19 nt, Human
auugauauaaauaaaacau

SEQ ID NO: 2528378 - RNA, 18 nt, Human
caaagauauuuugcuuug

SEQ ID NO: 2528379 - RNA, 20 nt, Human
caaagauauuuugcuuugug

SEQ ID NO: 2528380 - RNA, 23 nt, Human
auuuuuuuuuccuucagugccuu

SEQ ID NO: 2528381 - RNA, 19 nt, Human
auuuuuuuuucuaagagaa

SEQ ID NO: 2528382 - RNA, 18 nt, Human
auuuuuuuuucuaagaga

SEQ ID NO: 2528383 - RNA, 15 nt, Human
auuuuuuuuucuaag

SEQ ID NO: 2528384 - RNA, 14 nt, Human
auuuuuuuuucuaa

SEQ ID NO: 2528385 - RNA, 19 nt, Human
auuuuuuuuuuaaauuauu

SEQ ID NO: 2528386 - RNA, 20 nt, Human
caaaaaaaaaaaaaaauuag

SEQ ID NO: 2528387 - RNA, 20 nt, Human
caaaagaugcucuucugugg

SEQ ID NO: 2528388 - RNA, 19 nt, Human
caaaagaugcucuucugug

SEQ ID NO: 2528389 - RNA, 16 nt, Human
caaaagaugcuucuca

SEQ ID NO: 2528390 - RNA, 16 nt, Human
caaaagauugcugaaa

SEQ ID NO: 2528391 - RNA, 19 nt, Human
caaaagauugcugaaauuu

SEQ ID NO: 2528392 - RNA, 19 nt, Human
caaaaggaucuuuguggcc

SEQ ID NO: 2528393 - RNA, 20 nt, Human
caaaaggaucuuuguggcca

SEQ ID NO: 2528394 - RNA, 18 nt, Human
caaaagaugcuucucacu

SEQ ID NO: 2528395 - RNA, 15 nt, Human
caaaaggcagaagca

SEQ ID NO: 2528396 - RNA, 21 nt, Human
caaaaggaucuuuguggccaa

SEQ ID NO: 2528397 - RNA, 22 nt, Human
caaaaggaucuuuguggccaag

SEQ ID NO: 2528398 - RNA, 24 nt, Human
caaaaggaucuuuguggccaagga

SEQ ID NO: 2528399 - RNA, 16 nt, Human
caaaagggugucugag

SEQ ID NO: 2528400 - RNA, 13 nt, Human
caaacagccacac

SEQ ID NO: 2528401 - RNA, 19 nt, Human
caaaccaucauugaaaucu

SEQ ID NO: 2528402 - RNA, 21 nt, Human
caaaccaucauugaaaucuuu

SEQ ID NO: 2528403 - RNA, 19 nt, Human
caaacaguagguuggcagu

SEQ ID NO: 2528404 - RNA, 14 nt, Human
caaacaguagguug

SEQ ID NO: 2528405 - RNA, 15 nt, Human
caaauccuugaagau

SEQ ID NO: 2528406 - RNA, 21 nt, Human
caaauccuaugugauuuuaac

SEQ ID NO: 2528407 - RNA, 22 nt, Human
caaauccuaugugauuuuaacu

SEQ ID NO: 2528408 - RNA, 13 nt, Human
caaauccucucca

SEQ ID NO: 2528409 - RNA, 23 nt, Human
caaauccuaugugauuuuaacuc

SEQ ID NO: 2528410 - RNA, 20 nt, Human
caaauggaaaugggcagagc

SEQ ID NO: 2528411 - RNA, 13 nt, Human
caaauggaaagga

SEQ ID NO: 2528412 - RNA, 18 nt, Human
caaaugcuuggcuucuca

SEQ ID NO: 2528413 - RNA, 17 nt, Human
caaaugcuuggcuucuc

SEQ ID NO: 2528414 - RNA, 15 nt, Human
caaaugcuguauucu

SEQ ID NO: 2528415 - RNA, 21 nt, Human
caaauggaaaggagaggaaag

SEQ ID NO: 2528416 - RNA, 22 nt, Human
caaauggaaaugggcagagcag

SEQ ID NO: 2528417 - RNA, 21 nt, Human
caaauggaaaugggcagagca

SEQ ID NO: 2528418 - RNA, 14 nt, Human
caacaagaguuuau

SEQ ID NO: 2528419 - RNA, 14 nt, Human
caacaagggagaga

SEQ ID NO: 2528420 - RNA, 15 nt, Human
caacaagaguuuauu

SEQ ID NO: 2528421 - RNA, 14 nt, Human
caaauggaaaggag

SEQ ID NO: 2528422 - RNA, 14 nt, Human
caacaagagcgaaa

SEQ ID NO: 2528423 - RNA, 16 nt, Human
caacaauaaaauagca

SEQ ID NO: 2528424 - RNA, 13 nt, Human
caacaaguaacuu

SEQ ID NO: 2528425 - RNA, 18 nt, Human
caacaagggagagaccuc

SEQ ID NO: 2528426 - RNA, 15 nt, Human
caacaagggagagac

SEQ ID NO: 2528427 - RNA, 21 nt, Human
caacaagggagagaccucauc

SEQ ID NO: 2528428 - RNA, 14 nt, Human
caacaccagccccu

SEQ ID NO: 2528429 - RNA, 13 nt, Human
caacaccagcccc

SEQ ID NO: 2528430 - RNA, 20 nt, Human
caacaccacagacacacaca

SEQ ID NO: 2528431 - RNA, 19 nt, Human
caacaccacagacacacac

SEQ ID NO: 2528432 - RNA, 18 nt, Human
caacaccacagacacaca

SEQ ID NO: 2528433 - RNA, 17 nt, Human
caacaccacagacacac

SEQ ID NO: 2528434 - RNA, 16 nt, Human
caacaccacagacaca

SEQ ID NO: 2528435 - RNA, 15 nt, Human
caacaccacagacac

SEQ ID NO: 2528436 - RNA, 15 nt, Human
caacaccaagcacag

SEQ ID NO: 2528437 - RNA, 22 nt, Human
caacaccaagcacagcagccug

SEQ ID NO: 2528438 - RNA, 14 nt, Human
caacaccacagaca

SEQ ID NO: 2528439 - RNA, 13 nt, Human
caacaccacagac

SEQ ID NO: 2528440 - RNA, 12 nt, Human
caacaccacaga

SEQ ID NO: 2528441 - RNA, 13 nt, Human
caacaauaacacu

SEQ ID NO: 2528442 - RNA, 17 nt, Human
caacaaucccaaggccc

SEQ ID NO: 2528443 - RNA, 22 nt, Human
caacaauacaugcugcuaauuc

SEQ ID NO: 2528444 - RNA, 13 nt, Human
caacaauaaaaua

SEQ ID NO: 2528445 - RNA, 15 nt, Human
caacaauccuagugc

SEQ ID NO: 2528446 - RNA, 17 nt, Human
caacaauccuagugcuu

SEQ ID NO: 2528447 - RNA, 18 nt, Human
caacaauccuagugcuuu

SEQ ID NO: 2528448 - RNA, 23 nt, Human
caacacgagcaggcuacugucag

SEQ ID NO: 2528449 - RNA, 15 nt, Human
caacacgcaccugcc

SEQ ID NO: 2528450 - RNA, 17 nt, Human
caacacgcaccugccuc

SEQ ID NO: 2528451 - RNA, 22 nt, Human
caacaccagccccugccccagc

SEQ ID NO: 2528452 - RNA, 18 nt, Human
caacaccagccccugccc

SEQ ID NO: 2528453 - RNA, 17 nt, Human
caacaccagccccugcc

SEQ ID NO: 2528454 - RNA, 16 nt, Human
caacacccaucuguuu

SEQ ID NO: 2528455 - RNA, 20 nt, Human
caacaccucugcacaagcug

SEQ ID NO: 2528456 - RNA, 14 nt, Human
caacacuaacauga

SEQ ID NO: 2528457 - RNA, 19 nt, Human
caacacgcaccugccucag

SEQ ID NO: 2528458 - RNA, 15 nt, Human
caaauccuaugugau

SEQ ID NO: 2528459 - RNA, 16 nt, Human
caaauccuaugugauu

SEQ ID NO: 2528460 - RNA, 17 nt, Human
caaauccuaugugauuu

SEQ ID NO: 2528461 - RNA, 18 nt, Human
caaauccuaugugauuuu

SEQ ID NO: 2528462 - RNA, 21 nt, Human
caaauccgaaccuccucugug

SEQ ID NO: 2528463 - RNA, 13 nt, Human
caaauccuaugug

SEQ ID NO: 2528464 - RNA, 16 nt, Human
caaauccgaaccuccu

SEQ ID NO: 2528465 - RNA, 22 nt, Human
caaauccgaaccuccucuguga

SEQ ID NO: 2528466 - RNA, 16 nt, Human
caaauccauccagaau

SEQ ID NO: 2528467 - RNA, 22 nt, Human
caaagucuuaaaauaacuuaua

SEQ ID NO: 2528468 - RNA, 20 nt, Human
caaagucuuaaaauaacuua

SEQ ID NO: 2528469 - RNA, 14 nt, Human
caaagucuguguga

SEQ ID NO: 2528470 - RNA, 20 nt, Human
caaagucugauuugugauga

SEQ ID NO: 2528471 - RNA, 13 nt, Human
caaagucugugug

SEQ ID NO: 2528472 - RNA, 16 nt, Human
caaagugccacucauu

SEQ ID NO: 2528473 - RNA, 22 nt, Human
caaagugccacucauuccugua

SEQ ID NO: 2528474 - RNA, 21 nt, Human
caaagucucuggaauuugaaa

SEQ ID NO: 2528475 - RNA, 14 nt, Human
caaaguagaagucu

SEQ ID NO: 2528476 - RNA, 21 nt, Human
caaaguagaagucuuagaugu

SEQ ID NO: 2528477 - RNA, 22 nt, Human
caaaguacacuguuucaaacuu

SEQ ID NO: 2528478 - RNA, 18 nt, Human
caaaguaaaacuugcugc

SEQ ID NO: 2528479 - RNA, 15 nt, Human
caaagguugagaugu

SEQ ID NO: 2528480 - RNA, 11 nt, Human
caaagguuuuc

SEQ ID NO: 2528481 - RNA, 19 nt, Human
caaagguuuuccucuucua

SEQ ID NO: 2528482 - RNA, 16 nt, Human
caaaguaaaacuugcu

SEQ ID NO: 2528483 - RNA, 17 nt, Human
caaagcagugcaugcug

SEQ ID NO: 2528484 - RNA, 15 nt, Human
caaagcagugcaugc

SEQ ID NO: 2528485 - RNA, 13 nt, Human
caaagguggcucu

SEQ ID NO: 2528486 - RNA, 19 nt, Human
caaaggugaaggaauauau

SEQ ID NO: 2528487 - RNA, 14 nt, Human
caaagguggcucuc

SEQ ID NO: 2528488 - RNA, 18 nt, Human
caaaggugaaggaauaua

SEQ ID NO: 2528489 - RNA, 16 nt, Human
caaaggugaaggaaua

SEQ ID NO: 2528490 - RNA, 13 nt, Human
caaaggugaagga

SEQ ID NO: 2528491 - RNA, 15 nt, Human
caaagcagggucugg

SEQ ID NO: 2528492 - RNA, 14 nt, Human
caaagguauaauuu

SEQ ID NO: 2528493 - RNA, 20 nt, Human
caaagcacugacuucuaagu

SEQ ID NO: 2528494 - RNA, 22 nt, Human
caaagcacugacuucuaaguaa

SEQ ID NO: 2528495 - RNA, 19 nt, Human
caaagcaccaaaauaagaa

SEQ ID NO: 2528496 - RNA, 21 nt, Human
caaagcaccaaaauaagaaaa

SEQ ID NO: 2528497 - RNA, 22 nt, Human
caaagcaccaaaauaagaaaag

SEQ ID NO: 2528498 - RNA, 24 nt, Human
caaagcaccaaaauaagaaaagau

SEQ ID NO: 2528499 - RNA, 17 nt, Human
caaagcaccaaaauaag

SEQ ID NO: 2528500 - RNA, 18 nt, Human
caaagcaccaaaauaaga

SEQ ID NO: 2528501 - RNA, 16 nt, Human
caaagcacaguuugaa

SEQ ID NO: 2528502 - RNA, 22 nt, Human
caaagcacaguguuaaaugaaa

SEQ ID NO: 2528503 - RNA, 17 nt, Human
caaagcacaguuugaac

SEQ ID NO: 2528504 - RNA, 17 nt, Human
caaagcacauugaaaga

SEQ ID NO: 2528505 - RNA, 12 nt, Human
caaagcagccac

SEQ ID NO: 2528506 - RNA, 13 nt, Human
caaagcagccacg

SEQ ID NO: 2528507 - RNA, 22 nt, Human
caaagcaggggaguaugcaaaa

SEQ ID NO: 2528508 - RNA, 21 nt, Human
caaagcaggggaguaugcaaa

SEQ ID NO: 2528509 - RNA, 18 nt, Human
caaagcaggggaguaugc

SEQ ID NO: 2528510 - RNA, 16 nt, Human
caaagcagacagcucc

SEQ ID NO: 2528511 - RNA, 17 nt, Human
caaagcagacagcucca

SEQ ID NO: 2528512 - RNA, 19 nt, Human
caaagcagacagcuccacc

SEQ ID NO: 2528513 - RNA, 23 nt, Human
caaagcacuuggacucuugcucu

SEQ ID NO: 2528514 - RNA, 22 nt, Human
caaagcacuuggacucuugcuc

SEQ ID NO: 2528515 - RNA, 12 nt, Human
caaagcagacag

SEQ ID NO: 2528516 - RNA, 13 nt, Human
caaagcagacagc

SEQ ID NO: 2528517 - RNA, 15 nt, Human
caaagcagacagcuc

SEQ ID NO: 2528518 - RNA, 21 nt, Human
caaagcacuuggacucuugcu

SEQ ID NO: 2528519 - RNA, 21 nt, Human
caaagcaccagcuucuccagg

SEQ ID NO: 2528520 - RNA, 22 nt, Human
caaagcacgaaauguuauuuuu

SEQ ID NO: 2528521 - RNA, 20 nt, Human
caaagcacgaaauguuauuu

SEQ ID NO: 2528522 - RNA, 12 nt, Human
caaagcaccagc

SEQ ID NO: 2528523 - RNA, 18 nt, Human
caaagcacauugaaagag

SEQ ID NO: 2528524 - RNA, 19 nt, Human
caaagcacaguguuaaaug

SEQ ID NO: 2528525 - RNA, 15 nt, Human
caaagcacaguguua

SEQ ID NO: 2528526 - RNA, 14 nt, Human
caaagcacaguguu

SEQ ID NO: 2528527 - RNA, 13 nt, Human
caaagcacagugu

SEQ ID NO: 2528528 - RNA, 16 nt, Human
caaagcaauaauagua

SEQ ID NO: 2528529 - RNA, 14 nt, Human
caaagcaauaauag

SEQ ID NO: 2528530 - RNA, 15 nt, Human
caaagcaaugcauuu

SEQ ID NO: 2528531 - RNA, 18 nt, Human
caaagcaaugcauuuugg

SEQ ID NO: 2528532 - RNA, 13 nt, Human
caaagcaaggaaa

SEQ ID NO: 2528533 - RNA, 15 nt, Human
caaagcaaggaaacu

SEQ ID NO: 2528534 - RNA, 21 nt, Human
caaagauucaaaauugacauu

SEQ ID NO: 2528535 - RNA, 17 nt, Human
caaagauucaaaauuga

SEQ ID NO: 2528536 - RNA, 22 nt, Human
caaagauguuugucagauauga

SEQ ID NO: 2528537 - RNA, 22 nt, Human
caaagauauuuugcuuugugau

SEQ ID NO: 2528538 - RNA, 23 nt, Human
caaagauauuuugcuuugugauu

SEQ ID NO: 2528539 - RNA, 13 nt, Human
caaagaucaaaau

SEQ ID NO: 2528540 - RNA, 16 nt, Human
caaagauguuugucag

SEQ ID NO: 2528541 - RNA, 18 nt, Human
caaagauguuugucagau

SEQ ID NO: 2528542 - RNA, 16 nt, Human
auuugccaauaauaau

SEQ ID NO: 2528543 - RNA, 15 nt, Human
auuugcccuccuccu

SEQ ID NO: 2528544 - RNA, 24 nt, Human
auuugccaugggcuucacuguaua

SEQ ID NO: 2528545 - RNA, 19 nt, Human
auuugccaugggcuucacu

SEQ ID NO: 2528546 - RNA, 15 nt, Human
auuugccaugggcuu

SEQ ID NO: 2528547 - RNA, 16 nt, Human
auuugcauugaacaca

SEQ ID NO: 2528548 - RNA, 21 nt, Human
auuugcauugaacacaaacug

SEQ ID NO: 2528549 - RNA, 22 nt, Human
auuugcauugaacacaaacugu

SEQ ID NO: 2528550 - RNA, 15 nt, Human
auuugccaauaauaa

SEQ ID NO: 2528551 - RNA, 16 nt, Human
auuugcuaugagcugg

SEQ ID NO: 2528552 - RNA, 20 nt, Human
auuugcuaugagcuggggau

SEQ ID NO: 2528553 - RNA, 15 nt, Human
auuugccugugccac

SEQ ID NO: 2528554 - RNA, 22 nt, Human
auuugccuauucccacaccucc

SEQ ID NO: 2528555 - RNA, 14 nt, Human
auuugcccucccau

SEQ ID NO: 2528556 - RNA, 21 nt, Human
auuugccuguuucugcuugcu

SEQ ID NO: 2528557 - RNA, 15 nt, Human
auuugccuugcugga

SEQ ID NO: 2528558 - RNA, 15 nt, Human
auuugcgaaugguuc

SEQ ID NO: 2528559 - RNA, 17 nt, Human
auuugauuucuauucaa

SEQ ID NO: 2528560 - RNA, 13 nt, Human
auuugauuucuau

SEQ ID NO: 2528561 - RNA, 20 nt, Human
auuugauguuuacaggugga

SEQ ID NO: 2528562 - RNA, 13 nt, Human
auuugauugauuu

SEQ ID NO: 2528563 - RNA, 16 nt, Human
auuugauugauuugaa

SEQ ID NO: 2528564 - RNA, 23 nt, Human
auuugauucuguguguuuucaua

SEQ ID NO: 2528565 - RNA, 19 nt, Human
auuugcaagucauggcugu

SEQ ID NO: 2528566 - RNA, 18 nt, Human
auuugcaagucauggcug

SEQ ID NO: 2528567 - RNA, 22 nt, Human
auuugcagcugagagaaaauaa

SEQ ID NO: 2528568 - RNA, 15 nt, Human
auuugcaagggaaaa

SEQ ID NO: 2528569 - RNA, 20 nt, Human
auuugcaagggaaaagucuc

SEQ ID NO: 2528570 - RNA, 21 nt, Human
auuugcauaacaauuccucua

SEQ ID NO: 2528571 - RNA, 22 nt, Human
auuugcauaacaauuccucuac

SEQ ID NO: 2528572 - RNA, 21 nt, Human
auuugcagcugagagaaaaua

SEQ ID NO: 2528573 - RNA, 18 nt, Human
auuugcauuaaauucaca

SEQ ID NO: 2528574 - RNA, 19 nt, Human
auuugcauuaaauucacaa

SEQ ID NO: 2528575 - RNA, 23 nt, Human
auuugcauuaaauucacaaacuu

SEQ ID NO: 2528576 - RNA, 17 nt, Human
auuugcauauguaugac

SEQ ID NO: 2528577 - RNA, 22 nt, Human
auuugcauggcuccagaaaugu

SEQ ID NO: 2528578 - RNA, 21 nt, Human
auuugcauggcuccagaaaug

SEQ ID NO: 2528579 - RNA, 15 nt, Human
auuugcauauguaug

SEQ ID NO: 2528580 - RNA, 16 nt, Human
auuuuaugcaaauauu

SEQ ID NO: 2528581 - RNA, 17 nt, Human
auuuuaugcuuuaaaca

SEQ ID NO: 2528582 - RNA, 12 nt, Human
auuuuaugcuuu

SEQ ID NO: 2528583 - RNA, 21 nt, Human
auuuuaugccuuuuauuucuu

SEQ ID NO: 2528584 - RNA, 14 nt, Human
auuuuaugcaaaua

SEQ ID NO: 2528585 - RNA, 23 nt, Human
auuuuaucuuugauucuccuuca

SEQ ID NO: 2528586 - RNA, 20 nt, Human
auuuuaugccuuuuauuucu

SEQ ID NO: 2528587 - RNA, 17 nt, Human
auuugcucauggaauug

SEQ ID NO: 2528588 - RNA, 14 nt, Human
auuugcucauggaa

SEQ ID NO: 2528589 - RNA, 13 nt, Human
auuugcuccuuuc

SEQ ID NO: 2528590 - RNA, 11 nt, Human
auuugcuuuuu

SEQ ID NO: 2528591 - RNA, 18 nt, Human
auuugcuuuuucaccaga

SEQ ID NO: 2528592 - RNA, 13 nt, Human
auuugcuggggaa

SEQ ID NO: 2528593 - RNA, 23 nt, Human
auuugcugggcuuuuuuuuucuc

SEQ ID NO: 2528594 - RNA, 18 nt, Human
auuugcugggcaguuuuu

SEQ ID NO: 2528595 - RNA, 12 nt, Human
auuuggaaaaua

SEQ ID NO: 2528596 - RNA, 13 nt, Human
auuuggaaaauaa

SEQ ID NO: 2528597 - RNA, 15 nt, Human
auuugugauacaaug

SEQ ID NO: 2528598 - RNA, 17 nt, Human
auuugugauacaaugcu

SEQ ID NO: 2528599 - RNA, 15 nt, Human
auuugugauagcacu

SEQ ID NO: 2528600 - RNA, 17 nt, Human
auuugugauagcacuuu

SEQ ID NO: 2528601 - RNA, 20 nt, Human
auuugugauacaaugcugug

SEQ ID NO: 2528602 - RNA, 18 nt, Human
auuugugauagcacuuuc

SEQ ID NO: 2528603 - RNA, 21 nt, Human
auuugugaugacaacuggaau

SEQ ID NO: 2528604 - RNA, 14 nt, Human
auuugugccagaau

SEQ ID NO: 2528605 - RNA, 22 nt, Human
auuuguuugaacugauaaagau

SEQ ID NO: 2528606 - RNA, 23 nt, Human
auuuguuugaacugauaaagaug

SEQ ID NO: 2528607 - RNA, 13 nt, Human
auuuguuuaaaag

SEQ ID NO: 2528608 - RNA, 14 nt, Human
auuuguuuaaaagg

SEQ ID NO: 2528609 - RNA, 15 nt, Human
auuuguuggaaugaa

SEQ ID NO: 2528610 - RNA, 12 nt, Human
auuuguuuaaaa

SEQ ID NO: 2528611 - RNA, 16 nt, Human
auuuguuuaaaaggau

SEQ ID NO: 2528612 - RNA, 15 nt, Human
auuuguuuaaaagga

SEQ ID NO: 2528613 - RNA, 13 nt, Human
auuuguuggaaug

SEQ ID NO: 2528614 - RNA, 14 nt, Human
auuuguuggaauga

SEQ ID NO: 2528615 - RNA, 11 nt, Human
auuuguugcau

SEQ ID NO: 2528616 - RNA, 20 nt, Human
auuuguugaaauuauguaug

SEQ ID NO: 2528617 - RNA, 18 nt, Human
auuuguugaaauuaugua

SEQ ID NO: 2528618 - RNA, 21 nt, Human
auuuguguaauagaaaacuga

SEQ ID NO: 2528619 - RNA, 22 nt, Human
auuuguguauuuaacagggagg

SEQ ID NO: 2528620 - RNA, 12 nt, Human
auuuguggaaua

SEQ ID NO: 2528621 - RNA, 11 nt, Human
auuuguggaau

SEQ ID NO: 2528622 - RNA, 22 nt, Human
auuuguggggagggauuugggg

SEQ ID NO: 2528623 - RNA, 13 nt, Human
auuuguguaauag

SEQ ID NO: 2528624 - RNA, 14 nt, Human
auuuguguauuuaa

SEQ ID NO: 2528625 - RNA, 17 nt, Human
auuuuauagcuacuaau

SEQ ID NO: 2528626 - RNA, 21 nt, Human
auuuuaugaaagguuuacauu

SEQ ID NO: 2528627 - RNA, 14 nt, Human
auuuguuuucaugg

SEQ ID NO: 2528628 - RNA, 18 nt, Human
auuuuauagcucaguuua

SEQ ID NO: 2528629 - RNA, 19 nt, Human
auuuuauagcucaguuuau

SEQ ID NO: 2528630 - RNA, 22 nt, Human
auuuuauagcucaguuuaucca

SEQ ID NO: 2528631 - RNA, 16 nt, Human
auuuuaugaaugucuu

SEQ ID NO: 2528632 - RNA, 19 nt, Human
auuuuauagcuacuaauuu

SEQ ID NO: 2528633 - RNA, 20 nt, Human
auuuguuugaacugauaaag

SEQ ID NO: 2528634 - RNA, 12 nt, Human
auuuguuugcau

SEQ ID NO: 2528635 - RNA, 15 nt, Human
auuuguuugugcuuc

SEQ ID NO: 2528636 - RNA, 17 nt, Human
auuuguuugugcuucua

SEQ ID NO: 2528637 - RNA, 16 nt, Human
auuuguuugugcuucu

SEQ ID NO: 2528638 - RNA, 18 nt, Human
auuuguuugugcuucuaa

SEQ ID NO: 2528639 - RNA, 13 nt, Human
caccccacccucc

SEQ ID NO: 2528640 - RNA, 22 nt, Human
caccccacccccuucagugccc

SEQ ID NO: 2528641 - RNA, 20 nt, Human
caccccacccucccuggagu

SEQ ID NO: 2528642 - RNA, 19 nt, Human
caccccacccucccuggag

SEQ ID NO: 2528643 - RNA, 15 nt, Human
caccccacccucccu

SEQ ID NO: 2528644 - RNA, 14 nt, Human
caccccacccuucc

SEQ ID NO: 2528645 - RNA, 19 nt, Human
caccccacuuaucccucuc

SEQ ID NO: 2528646 - RNA, 22 nt, Human
caccccacugcaauccugucuu

SEQ ID NO: 2528647 - RNA, 11 nt, Human
caccccagccc

SEQ ID NO: 2528648 - RNA, 24 nt, Human
caccccacuuaucccucuccauaa

SEQ ID NO: 2528649 - RNA, 24 nt, Human
caccugccuguugggccaggagcc

SEQ ID NO: 2528650 - RNA, 19 nt, Human
caccugccuguugggccag

SEQ ID NO: 2528651 - RNA, 13 nt, Human
caccugccucagg

SEQ ID NO: 2528652 - RNA, 14 nt, Human
caccugccucagga

SEQ ID NO: 2528653 - RNA, 20 nt, Human
caccugccucaggacugcga

SEQ ID NO: 2528654 - RNA, 17 nt, Human
caccugccuguugggcc

SEQ ID NO: 2528655 - RNA, 13 nt, Human
caccuuggcugca

SEQ ID NO: 2528656 - RNA, 15 nt, Human
caccuuggcucaagu

SEQ ID NO: 2528657 - RNA, 14 nt, Human
caccuuggcucaag

SEQ ID NO: 2528658 - RNA, 14 nt, Human
caccuuggcugcag

SEQ ID NO: 2528659 - RNA, 16 nt, Human
cacccuccccucucuu

SEQ ID NO: 2528660 - RNA, 15 nt, Human
cacccuccccucucu

SEQ ID NO: 2528661 - RNA, 13 nt, Human
cacccuccccucu

SEQ ID NO: 2528662 - RNA, 14 nt, Human
cacccuccccuccc

SEQ ID NO: 2528663 - RNA, 13 nt, Human
cacccuccccucc

SEQ ID NO: 2528664 - RNA, 12 nt, Human
cacccuccccuc

SEQ ID NO: 2528665 - RNA, 11 nt, Human
cacccuccccu

SEQ ID NO: 2528666 - RNA, 22 nt, Human
cacccucccagaccugccucuu

SEQ ID NO: 2528667 - RNA, 19 nt, Human
cacccuccccucucuugca

SEQ ID NO: 2528668 - RNA, 17 nt, Human
cacccuccccucucuug

SEQ ID NO: 2528669 - RNA, 23 nt, Human
cacccuccccucucuugcacccg

SEQ ID NO: 2528670 - RNA, 13 nt, Human
cacccucccugga

SEQ ID NO: 2528671 - RNA, 23 nt, Human
cacccucccuccgauccuuccuc

SEQ ID NO: 2528672 - RNA, 22 nt, Human
cacccucccuccgauccuuccu

SEQ ID NO: 2528673 - RNA, 17 nt, Human
cacccuccacccugucc

SEQ ID NO: 2528674 - RNA, 16 nt, Human
cacccuccacccuguc

SEQ ID NO: 2528675 - RNA, 14 nt, Human
cacccuccacccug

SEQ ID NO: 2528676 - RNA, 13 nt, Human
cacccuccacccu

SEQ ID NO: 2528677 - RNA, 12 nt, Human
cacccuccaccc

SEQ ID NO: 2528678 - RNA, 22 nt, Human
cacccucagcaccccuuccaug

SEQ ID NO: 2528679 - RNA, 17 nt, Human
cacccucauucuacuga

SEQ ID NO: 2528680 - RNA, 17 nt, Human
cacccuccaccucuuca

SEQ ID NO: 2528681 - RNA, 14 nt, Human
cacccuccaccucu

SEQ ID NO: 2528682 - RNA, 18 nt, Human
cacccuccacccuguccc

SEQ ID NO: 2528683 - RNA, 19 nt, Human
cacccucccagaccugccu

SEQ ID NO: 2528684 - RNA, 20 nt, Human
cacccucccccgccacuccu

SEQ ID NO: 2528685 - RNA, 21 nt, Human
cacccucagcaccccuuccau

SEQ ID NO: 2528686 - RNA, 20 nt, Human
cacccucagcaccccuucca

SEQ ID NO: 2528687 - RNA, 19 nt, Human
cacccucagcaccccuucc

SEQ ID NO: 2528688 - RNA, 13 nt, Human
cacccucaugcug

SEQ ID NO: 2528689 - RNA, 14 nt, Human
cacccucaugcugu

SEQ ID NO: 2528690 - RNA, 16 nt, Human
cacccucaugcugugu

SEQ ID NO: 2528691 - RNA, 21 nt, Human
cacccucaugcugugugacuc

SEQ ID NO: 2528692 - RNA, 14 nt, Human
cacccucaggcagg

SEQ ID NO: 2528693 - RNA, 16 nt, Human
cacccuggggagaaag

SEQ ID NO: 2528694 - RNA, 15 nt, Human
cacccuggggagaaa

SEQ ID NO: 2528695 - RNA, 12 nt, Human
cacccugggcuc

SEQ ID NO: 2528696 - RNA, 18 nt, Human
cacccugaaugguuccau

SEQ ID NO: 2528697 - RNA, 23 nt, Human
cacccugggcccugggcuggaau

SEQ ID NO: 2528698 - RNA, 17 nt, Human
cacccugaaagcccuga

SEQ ID NO: 2528699 - RNA, 16 nt, Human
cacccuccugucuucc

SEQ ID NO: 2528700 - RNA, 14 nt, Human
cacccuccugucuu

SEQ ID NO: 2528701 - RNA, 15 nt, Human
cacccucccuggagu

SEQ ID NO: 2528702 - RNA, 14 nt, Human
cacccucccuggag

SEQ ID NO: 2528703 - RNA, 16 nt, Human
cacccucccuggagug

SEQ ID NO: 2528704 - RNA, 18 nt, Human
cacccuccugucuuccca

SEQ ID NO: 2528705 - RNA, 17 nt, Human
cacccuccugucuuccc

SEQ ID NO: 2528706 - RNA, 16 nt, Human
cacccucuaaauggga

SEQ ID NO: 2528707 - RNA, 22 nt, Human
cacccucugagcuuugcauguu

SEQ ID NO: 2528708 - RNA, 14 nt, Human
cacccucuauccca

SEQ ID NO: 2528709 - RNA, 16 nt, Human
cacccucuaucccaau

SEQ ID NO: 2528710 - RNA, 15 nt, Human
cacccucucccagga

SEQ ID NO: 2528711 - RNA, 18 nt, Human
cacccucugagcuuugca

SEQ ID NO: 2528712 - RNA, 13 nt, Human
cacccucugagcu

SEQ ID NO: 2528713 - RNA, 12 nt, Human
cacccucugagc

SEQ ID NO: 2528714 - RNA, 16 nt, Human
cacccucucccaggac

SEQ ID NO: 2528715 - RNA, 16 nt, Human
caccugccccucaacu

SEQ ID NO: 2528716 - RNA, 15 nt, Human
caccugccccucaac

SEQ ID NO: 2528717 - RNA, 14 nt, Human
caccugccccucaa

SEQ ID NO: 2528718 - RNA, 12 nt, Human
caccucagccuu

SEQ ID NO: 2528719 - RNA, 13 nt, Human
caccucagccuug

SEQ ID NO: 2528720 - RNA, 15 nt, Human
caccucaggccaggu

SEQ ID NO: 2528721 - RNA, 15 nt, Human
caccucagccuugga

SEQ ID NO: 2528722 - RNA, 15 nt, Human
caccugcccccuucu

SEQ ID NO: 2528723 - RNA, 17 nt, Human
caccugcccccuucucc

SEQ ID NO: 2528724 - RNA, 19 nt, Human
caccugcccccuucuccca

SEQ ID NO: 2528725 - RNA, 20 nt, Human
caccugcccccuucucccac

SEQ ID NO: 2528726 - RNA, 21 nt, Human
caccugcccccuucucccaca

SEQ ID NO: 2528727 - RNA, 22 nt, Human
caccugcccccuucucccacac

SEQ ID NO: 2528728 - RNA, 13 nt, Human
caccugccgaccu

SEQ ID NO: 2528729 - RNA, 23 nt, Human
caccugcccccuucucccacacu

SEQ ID NO: 2528730 - RNA, 21 nt, Human
caccugccgaccucguccucc

SEQ ID NO: 2528731 - RNA, 24 nt, Human
caccugccguggacuuggggucag

SEQ ID NO: 2528732 - RNA, 23 nt, Human
caccugccgaccucguccucccc

SEQ ID NO: 2528733 - RNA, 23 nt, Human
caccugccucggccucccaaagu

SEQ ID NO: 2528734 - RNA, 17 nt, Human
cacccugggcucugugg

SEQ ID NO: 2528735 - RNA, 16 nt, Human
cacccugggcucugug

SEQ ID NO: 2528736 - RNA, 15 nt, Human
cacccugggcucugu

SEQ ID NO: 2528737 - RNA, 21 nt, Human
cacccugggcucugggagcag

SEQ ID NO: 2528738 - RNA, 17 nt, Human
caccuaauccaggcaga

SEQ ID NO: 2528739 - RNA, 21 nt, Human
cacccugggcucugugggcug

SEQ ID NO: 2528740 - RNA, 19 nt, Human
cacccugggcucugugggc

SEQ ID NO: 2528741 - RNA, 20 nt, Human
caccuaauccaggcagaucc

SEQ ID NO: 2528742 - RNA, 21 nt, Human
caccuaauccaggcagaucca

SEQ ID NO: 2528743 - RNA, 22 nt, Human
caccuaauccaggcagauccag

SEQ ID NO: 2528744 - RNA, 17 nt, Human
caccuacaguguacagu

SEQ ID NO: 2528745 - RNA, 16 nt, Human
caccuacaguguacag

SEQ ID NO: 2528746 - RNA, 22 nt, Human
cacccugggcucugugggcugc

SEQ ID NO: 2528747 - RNA, 14 nt, Human
caccuaauguuuau

SEQ ID NO: 2528748 - RNA, 20 nt, Human
caccuaauguuuaugagcca

SEQ ID NO: 2528749 - RNA, 21 nt, Human
caccuaauguuuaugagccag

SEQ ID NO: 2528750 - RNA, 13 nt, Human
caccuacagugua

SEQ ID NO: 2528751 - RNA, 18 nt, Human
caccucagccuccugugu

SEQ ID NO: 2528752 - RNA, 14 nt, Human
caccucagccuccc

SEQ ID NO: 2528753 - RNA, 13 nt, Human
caccucagccucc

SEQ ID NO: 2528754 - RNA, 20 nt, Human
caccuacaguguacagucuu

SEQ ID NO: 2528755 - RNA, 12 nt, Human
cacucuuuguaa

SEQ ID NO: 2528756 - RNA, 15 nt, Human
cacucuuuugcuuua

SEQ ID NO: 2528757 - RNA, 23 nt, Human
cacucuuuugcuuuauuccagaa

SEQ ID NO: 2528758 - RNA, 15 nt, Human
cacucuuuguaagag

SEQ ID NO: 2528759 - RNA, 21 nt, Human
cacucuuggagccugcagagc

SEQ ID NO: 2528760 - RNA, 22 nt, Human
cacucuuggagccugcagagcu

SEQ ID NO: 2528761 - RNA, 23 nt, Human
cacucuuggagccugcagagcug

SEQ ID NO: 2528762 - RNA, 22 nt, Human
cacucuuguggauguuuuaauu

SEQ ID NO: 2528763 - RNA, 13 nt, Human
cacuccccugcug

SEQ ID NO: 2528764 - RNA, 12 nt, Human
cacuccccugcu

SEQ ID NO: 2528765 - RNA, 14 nt, Human
cacuccccugcugg

SEQ ID NO: 2528766 - RNA, 15 nt, Human
cacuccccugcuggg

SEQ ID NO: 2528767 - RNA, 14 nt, Human
cacuccccugcacu

SEQ ID NO: 2528768 - RNA, 17 nt, Human
cacuccccugcacugga

SEQ ID NO: 2528769 - RNA, 23 nt, Human
cacugacacugguauuccugccu

SEQ ID NO: 2528770 - RNA, 15 nt, Human
cacugaauuaaucau

SEQ ID NO: 2528771 - RNA, 21 nt, Human
cacugaaugccucaaugugac

SEQ ID NO: 2528772 - RNA, 14 nt, Human
cacugaauauuuau

SEQ ID NO: 2528773 - RNA, 13 nt, Human
cacugaauauuua

SEQ ID NO: 2528774 - RNA, 22 nt, Human
cacugaaguuaacagagacaga

SEQ ID NO: 2528775 - RNA, 20 nt, Human
cacugacacugguauuccug

SEQ ID NO: 2528776 - RNA, 13 nt, Human
cacugacacuggu

SEQ ID NO: 2528777 - RNA, 22 nt, Human
cacugacaccuuugcaggcaug

SEQ ID NO: 2528778 - RNA, 21 nt, Human
cacugacaccuuugcaggcau

SEQ ID NO: 2528779 - RNA, 17 nt, Human
cacugacaccuuugcag

SEQ ID NO: 2528780 - RNA, 16 nt, Human
cacugacaccuuugca

SEQ ID NO: 2528781 - RNA, 14 nt, Human
cacugacaccuuug

SEQ ID NO: 2528782 - RNA, 17 nt, Human
cacugaauuccauuuuu

SEQ ID NO: 2528783 - RNA, 23 nt, Human
cacugaauuaaugacagagccag

SEQ ID NO: 2528784 - RNA, 19 nt, Human
cacugacacaaaaaguaga

SEQ ID NO: 2528785 - RNA, 20 nt, Human
cacuagggcagggacaggau

SEQ ID NO: 2528786 - RNA, 21 nt, Human
cacuagggcagggacaggaua

SEQ ID NO: 2528787 - RNA, 14 nt, Human
cacuaggcuucugg

SEQ ID NO: 2528788 - RNA, 11 nt, Human
cacuccagcug

SEQ ID NO: 2528789 - RNA, 12 nt, Human
cacuccagcugg

SEQ ID NO: 2528790 - RNA, 13 nt, Human
cacuccccugcac

SEQ ID NO: 2528791 - RNA, 15 nt, Human
cacuccagcugggau

SEQ ID NO: 2528792 - RNA, 13 nt, Human
cacuccagcuccu

SEQ ID NO: 2528793 - RNA, 23 nt, Human
cacuccagccugggcgacagagc

SEQ ID NO: 2528794 - RNA, 17 nt, Human
cacuccaauuaaggauu

SEQ ID NO: 2528795 - RNA, 18 nt, Human
cacuccaauuaaggauuu

SEQ ID NO: 2528796 - RNA, 16 nt, Human
cacuccagccugggug

SEQ ID NO: 2528797 - RNA, 21 nt, Human
cacuaggggauauaggagagg

SEQ ID NO: 2528798 - RNA, 23 nt, Human
cacuaggcccccacuugccucuu

SEQ ID NO: 2528799 - RNA, 16 nt, Human
cacucauugcugagcc

SEQ ID NO: 2528800 - RNA, 19 nt, Human
cacucauugcugagccucu

SEQ ID NO: 2528801 - RNA, 21 nt, Human
cacucauugcugagccucugc

SEQ ID NO: 2528802 - RNA, 23 nt, Human
cacucauugcugagccucugcuc

SEQ ID NO: 2528803 - RNA, 19 nt, Human
cacuccaagauauggacac

SEQ ID NO: 2528804 - RNA, 20 nt, Human
cacuaggggauauaggagag

SEQ ID NO: 2528805 - RNA, 13 nt, Human
cacuccaauuaag

SEQ ID NO: 2528806 - RNA, 15 nt, Human
cacuccaauuaagga

SEQ ID NO: 2528807 - RNA, 21 nt, Human
cacugcagaagacaguauggc

SEQ ID NO: 2528808 - RNA, 12 nt, Human
cacugcagccuc

SEQ ID NO: 2528809 - RNA, 20 nt, Human
cacugcacuccagccugggu

SEQ ID NO: 2528810 - RNA, 13 nt, Human
cacugcacuccgg

SEQ ID NO: 2528811 - RNA, 17 nt, Human
cacugcacuccagccug

SEQ ID NO: 2528812 - RNA, 20 nt, Human
cacugcacuccagccugggc

SEQ ID NO: 2528813 - RNA, 15 nt, Human
cacugcacuccagcc

SEQ ID NO: 2528814 - RNA, 16 nt, Human
cacugcacuccagccu

SEQ ID NO: 2528815 - RNA, 18 nt, Human
cacugcacuccagccugg

SEQ ID NO: 2528816 - RNA, 19 nt, Human
cacugcacuccagccuggg

SEQ ID NO: 2528817 - RNA, 19 nt, Human
cacugcacuauagccuagg

SEQ ID NO: 2528818 - RNA, 18 nt, Human
cacuggcugccuccacuc

SEQ ID NO: 2528819 - RNA, 17 nt, Human
cacuggcugccuccacu

SEQ ID NO: 2528820 - RNA, 16 nt, Human
cacuggcugccuccac

SEQ ID NO: 2528821 - RNA, 15 nt, Human
cacuggcugccucca

SEQ ID NO: 2528822 - RNA, 14 nt, Human
cacuggcugccucc

SEQ ID NO: 2528823 - RNA, 13 nt, Human
cacuggcugccuc

SEQ ID NO: 2528824 - RNA, 20 nt, Human
cacuggcugccagcuauuuu

SEQ ID NO: 2528825 - RNA, 18 nt, Human
cacuggcugccagcuauu

SEQ ID NO: 2528826 - RNA, 15 nt, Human
cacuggcugccagcu

SEQ ID NO: 2528827 - RNA, 14 nt, Human
cacuggcugccagc

SEQ ID NO: 2528828 - RNA, 12 nt, Human
cacugccaggcc

SEQ ID NO: 2528829 - RNA, 18 nt, Human
cacugggagaaaugaaaa

SEQ ID NO: 2528830 - RNA, 22 nt, Human
cacuggcugccuccacucccac

SEQ ID NO: 2528831 - RNA, 21 nt, Human
cacuggcugccuccacuccca

SEQ ID NO: 2528832 - RNA, 20 nt, Human
cacuggcugccuccacuccc

SEQ ID NO: 2528833 - RNA, 19 nt, Human
cacuggcugccuccacucc

SEQ ID NO: 2528834 - RNA, 22 nt, Human
cacuggcugucaguaugacauu

SEQ ID NO: 2528835 - RNA, 13 nt, Human
cacuggggcuggc

SEQ ID NO: 2528836 - RNA, 14 nt, Human
cacugggggagggg

SEQ ID NO: 2528837 - RNA, 15 nt, Human
cacugggggagggga

SEQ ID NO: 2528838 - RNA, 18 nt, Human
cacugggggaggggacau

SEQ ID NO: 2528839 - RNA, 21 nt, Human
cacugggggaggggacauuga

SEQ ID NO: 2528840 - RNA, 17 nt, Human
cacugggacuugcaaaa

SEQ ID NO: 2528841 - RNA, 14 nt, Human
cacuggggccuaca

SEQ ID NO: 2528842 - RNA, 23 nt, Human
cacuggcugccuccacucccacu

SEQ ID NO: 2528843 - RNA, 16 nt, Human
cacuggggccuacagc

SEQ ID NO: 2528844 - RNA, 13 nt, Human
cacugggaaacag

SEQ ID NO: 2528845 - RNA, 18 nt, Human
cacugggaaacagaggcu

SEQ ID NO: 2528846 - RNA, 19 nt, Human
cacugcauggcucccacag

SEQ ID NO: 2528847 - RNA, 22 nt, Human
cacugcaugagcuuuuauacua

SEQ ID NO: 2528848 - RNA, 18 nt, Human
cacugcaugagcuuuuau

SEQ ID NO: 2528849 - RNA, 18 nt, Human
cacugcauccuccgccuc

SEQ ID NO: 2528850 - RNA, 11 nt, Human
cacugccacac

SEQ ID NO: 2528851 - RNA, 16 nt, Human
cacugcauguuuguga

SEQ ID NO: 2528852 - RNA, 14 nt, Human
cacugcauccuccg

SEQ ID NO: 2528853 - RNA, 16 nt, Human
cacugcauccuccgcc

SEQ ID NO: 2528854 - RNA, 13 nt, Human
cacugcagccuca

SEQ ID NO: 2528855 - RNA, 13 nt, Human
cacugcaggcccc

SEQ ID NO: 2528856 - RNA, 13 nt, Human
cacugcaggggcc

SEQ ID NO: 2528857 - RNA, 16 nt, Human
cacugcaggccccgcu

SEQ ID NO: 2528858 - RNA, 16 nt, Human
cacugcauaccaaccu

SEQ ID NO: 2528859 - RNA, 22 nt, Human
cacuuguguuuugcaagccaga

SEQ ID NO: 2528860 - RNA, 13 nt, Human
cacuuguuccagc

SEQ ID NO: 2528861 - RNA, 15 nt, Human
cacuuguuccagcuc

SEQ ID NO: 2528862 - RNA, 18 nt, Human
cacuuguuccagcucuuu

SEQ ID NO: 2528863 - RNA, 16 nt, Human
cacuuguuccagcucu

SEQ ID NO: 2528864 - RNA, 17 nt, Human
cacuuguuccagcucuu

SEQ ID NO: 2528865 - RNA, 15 nt, Human
cacuuaucccucucc

SEQ ID NO: 2528866 - RNA, 22 nt, Human
cacuuauauguucuaauuaaua

SEQ ID NO: 2528867 - RNA, 15 nt, Human
cacuuagcuaucaga

SEQ ID NO: 2528868 - RNA, 23 nt, Human
cacuuaggaacguaaucgugucc

SEQ ID NO: 2528869 - RNA, 24 nt, Human
cacuuagaaauugcauuuccugac

SEQ ID NO: 2528870 - RNA, 17 nt, Human
cacuuguacaaaauaaa

SEQ ID NO: 2528871 - RNA, 17 nt, Human
cacuuauucucaagaag

SEQ ID NO: 2528872 - RNA, 16 nt, Human
cacuuaucccucucca

SEQ ID NO: 2528873 - RNA, 20 nt, Human
cacuuauuccccauucuucc

SEQ ID NO: 2528874 - RNA, 12 nt, Human
cacuuaugauuu

SEQ ID NO: 2528875 - RNA, 19 nt, Human
cacuuguguuuugcaagcc

SEQ ID NO: 2528876 - RNA, 14 nt, Human
cacuuguccagcug

SEQ ID NO: 2528877 - RNA, 15 nt, Human
cacuuguccagcuga

SEQ ID NO: 2528878 - RNA, 16 nt, Human
cacuugucaauaaaau

SEQ ID NO: 2528879 - RNA, 16 nt, Human
cacuuguauauacgca

SEQ ID NO: 2528880 - RNA, 13 nt, Human
cacuuguauauac

SEQ ID NO: 2528881 - RNA, 21 nt, Human
cacuuguauauacgcaucuau

SEQ ID NO: 2528882 - RNA, 16 nt, Human
cacuuacacuuuaugc

SEQ ID NO: 2528883 - RNA, 18 nt, Human
cacuuacacuuuaugcac

SEQ ID NO: 2528884 - RNA, 20 nt, Human
cacugguugcacuuaugauu

SEQ ID NO: 2528885 - RNA, 18 nt, Human
cacuuaccuagauuuaca

SEQ ID NO: 2528886 - RNA, 15 nt, Human
cacugguugcacuua

SEQ ID NO: 2528887 - RNA, 13 nt, Human
cacuuaccuucaa

SEQ ID NO: 2528888 - RNA, 14 nt, Human
cacuuaccuucaau

SEQ ID NO: 2528889 - RNA, 15 nt, Human
cacuuaccuucaaua

SEQ ID NO: 2528890 - RNA, 16 nt, Human
cacuuaccuucaauaa

SEQ ID NO: 2528891 - RNA, 17 nt, Human
cacuuaccuucaauaaa

SEQ ID NO: 2528892 - RNA, 18 nt, Human
cacuuaccuucaauaaag

SEQ ID NO: 2528893 - RNA, 19 nt, Human
cacuuaccuucaauaaagu

SEQ ID NO: 2528894 - RNA, 21 nt, Human
cacuuaccuucaauaaaguau

SEQ ID NO: 2528895 - RNA, 22 nt, Human
cacugguucuucuuggucucag

SEQ ID NO: 2528896 - RNA, 20 nt, Human
cacuggugugaccugagggc

SEQ ID NO: 2528897 - RNA, 22 nt, Human
cacugguguggauuaaccugcc

SEQ ID NO: 2528898 - RNA, 23 nt, Human
cacuggugugagggccccugccu

SEQ ID NO: 2528899 - RNA, 19 nt, Human
cacuggugugaccugaggg

SEQ ID NO: 2528900 - RNA, 16 nt, Human
cacuggggcuggcaca

SEQ ID NO: 2528901 - RNA, 23 nt, Human
cacugguggcccgacagccuggc

SEQ ID NO: 2528902 - RNA, 18 nt, Human
cacugggguccuggggcc

SEQ ID NO: 2528903 - RNA, 19 nt, Human
cacugggguccuggggccu

SEQ ID NO: 2528904 - RNA, 15 nt, Human
cacugggguccuggg

SEQ ID NO: 2528905 - RNA, 19 nt, Human
cacugggguccagggagca

SEQ ID NO: 2528906 - RNA, 15 nt, Human
caauaaagcauuuau

SEQ ID NO: 2528907 - RNA, 16 nt, Human
caauaaagcauuuaua

SEQ ID NO: 2528908 - RNA, 14 nt, Human
caauaaagcauuua

SEQ ID NO: 2528909 - RNA, 19 nt, Human
caauaaagcagcguuucua

SEQ ID NO: 2528910 - RNA, 23 nt, Human
caagucccugacucucugugacc

SEQ ID NO: 2528911 - RNA, 20 nt, Human
caagucccugacucucugug

SEQ ID NO: 2528912 - RNA, 21 nt, Human
caagucccugacucucuguga

SEQ ID NO: 2528913 - RNA, 14 nt, Human
caaguccccaagau

SEQ ID NO: 2528914 - RNA, 18 nt, Human
caagucccugacucucug

SEQ ID NO: 2528915 - RNA, 13 nt, Human
caauaaaguauuu

SEQ ID NO: 2528916 - RNA, 19 nt, Human
caauaaagcauuuauaaau

SEQ ID NO: 2528917 - RNA, 12 nt, Human
caauaaaguauc

SEQ ID NO: 2528918 - RNA, 16 nt, Human
caauaaaguaucuaca

SEQ ID NO: 2528919 - RNA, 11 nt, Human
caauaaaguau

SEQ ID NO: 2528920 - RNA, 16 nt, Human
caagcucaggaccagg

SEQ ID NO: 2528921 - RNA, 17 nt, Human
caagcucagaaggcucu

SEQ ID NO: 2528922 - RNA, 21 nt, Human
caagcucagaggcgcacugug

SEQ ID NO: 2528923 - RNA, 15 nt, Human
caagcucagaaggcu

SEQ ID NO: 2528924 - RNA, 16 nt, Human
caagcucaaagcgugg

SEQ ID NO: 2528925 - RNA, 12 nt, Human
caagcucacagu

SEQ ID NO: 2528926 - RNA, 16 nt, Human
caagcucacaguuccu

SEQ ID NO: 2528927 - RNA, 19 nt, Human
caagcucacaguuccucgc

SEQ ID NO: 2528928 - RNA, 20 nt, Human
caagcucacaguuccucgcc

SEQ ID NO: 2528929 - RNA, 21 nt, Human
caagcucacaguuccucgccc

SEQ ID NO: 2528930 - RNA, 22 nt, Human
caagcucacaguuccucgcccu

SEQ ID NO: 2528931 - RNA, 16 nt, Human
caagcuauccuggcuc

SEQ ID NO: 2528932 - RNA, 15 nt, Human
caagcuauccuggcu

SEQ ID NO: 2528933 - RNA, 18 nt, Human
caagcuagaaggccacau

SEQ ID NO: 2528934 - RNA, 17 nt, Human
caagcuagaaggccaca

SEQ ID NO: 2528935 - RNA, 18 nt, Human
caagcuagaaccuggagg

SEQ ID NO: 2528936 - RNA, 17 nt, Human
caagcuagaaccuggag

SEQ ID NO: 2528937 - RNA, 16 nt, Human
caagcuagaaccugga

SEQ ID NO: 2528938 - RNA, 19 nt, Human
caagcucuaucaccaagga

SEQ ID NO: 2528939 - RNA, 19 nt, Human
caagcuccaagccccaucu

SEQ ID NO: 2528940 - RNA, 18 nt, Human
caagcucaggaccaggca

SEQ ID NO: 2528941 - RNA, 22 nt, Human
caagcuccuugggaggccccac

SEQ ID NO: 2528942 - RNA, 13 nt, Human
caagcucugcucc

SEQ ID NO: 2528943 - RNA, 12 nt, Human
caagcuccaagc

SEQ ID NO: 2528944 - RNA, 14 nt, Human
caagcuccaagccc

SEQ ID NO: 2528945 - RNA, 13 nt, Human
caagcuccaagcc

SEQ ID NO: 2528946 - RNA, 17 nt, Human
caagcuccuugggaggc

SEQ ID NO: 2528947 - RNA, 14 nt, Human
caagcucugcuccu

SEQ ID NO: 2528948 - RNA, 13 nt, Human
caagcugcacccu

SEQ ID NO: 2528949 - RNA, 14 nt, Human
caagcugcacccuc

SEQ ID NO: 2528950 - RNA, 18 nt, Human
caagcugcacccucaggc

SEQ ID NO: 2528951 - RNA, 13 nt, Human
caaggcacugccu

SEQ ID NO: 2528952 - RNA, 12 nt, Human
caaggcacugcc

SEQ ID NO: 2528953 - RNA, 13 nt, Human
caagcucucugca

SEQ ID NO: 2528954 - RNA, 17 nt, Human
caagcucuagugggaag

SEQ ID NO: 2528955 - RNA, 20 nt, Human
caagcugcacccucaggcag

SEQ ID NO: 2528956 - RNA, 18 nt, Human
caaggcacugccugaugg

SEQ ID NO: 2528957 - RNA, 16 nt, Human
caaggcacugccugau

SEQ ID NO: 2528958 - RNA, 15 nt, Human
caaggcacugccuga

SEQ ID NO: 2528959 - RNA, 14 nt, Human
caaggcacugccug

SEQ ID NO: 2528960 - RNA, 23 nt, Human
caaggcaggugccuccaggugug

SEQ ID NO: 2528961 - RNA, 22 nt, Human
caaggcaggugccuccaggugu

SEQ ID NO: 2528962 - RNA, 20 nt, Human
caaggcaggugccuccaggu

SEQ ID NO: 2528963 - RNA, 19 nt, Human
caaggcaggugccuccagg

SEQ ID NO: 2528964 - RNA, 18 nt, Human
caaggcaggugccuccag

SEQ ID NO: 2528965 - RNA, 17 nt, Human
caaggcaggugccucca

SEQ ID NO: 2528966 - RNA, 16 nt, Human
caaggcaggugccucc

SEQ ID NO: 2528967 - RNA, 15 nt, Human
caaggcaggugccuc

SEQ ID NO: 2528968 - RNA, 14 nt, Human
caaggcaggugccu

SEQ ID NO: 2528969 - RNA, 13 nt, Human
caaggcaggugcc

SEQ ID NO: 2528970 - RNA, 16 nt, Human
caaggccaaaggaagc

SEQ ID NO: 2528971 - RNA, 15 nt, Human
caaggccaaaggaag

SEQ ID NO: 2528972 - RNA, 18 nt, Human
caaggccaaaggaagcac

SEQ ID NO: 2528973 - RNA, 17 nt, Human
caaggccaaaggaagca

SEQ ID NO: 2528974 - RNA, 16 nt, Human
caaguaugaauaaaga

SEQ ID NO: 2528975 - RNA, 21 nt, Human
caaguaugaauaaagacaccu

SEQ ID NO: 2528976 - RNA, 19 nt, Human
caaguaugaauaaagacac

SEQ ID NO: 2528977 - RNA, 15 nt, Human
caaguaugugagugu

SEQ ID NO: 2528978 - RNA, 13 nt, Human
caagucaagugaa

SEQ ID NO: 2528979 - RNA, 17 nt, Human
caagucaagugaaaaag

SEQ ID NO: 2528980 - RNA, 14 nt, Human
caagucaaauuaau

SEQ ID NO: 2528981 - RNA, 15 nt, Human
caagucaaauuaaua

SEQ ID NO: 2528982 - RNA, 16 nt, Human
caagucaaauuaauaa

SEQ ID NO: 2528983 - RNA, 17 nt, Human
caagucaugugcauuuc

SEQ ID NO: 2528984 - RNA, 19 nt, Human
caagucaaccaauguagaa

SEQ ID NO: 2528985 - RNA, 12 nt, Human
caagucauuuua

SEQ ID NO: 2528986 - RNA, 15 nt, Human
caaguccaaauguuu

SEQ ID NO: 2528987 - RNA, 17 nt, Human
caagucauuuuaacuuu

SEQ ID NO: 2528988 - RNA, 14 nt, Human
caaguccaagcaua

SEQ ID NO: 2528989 - RNA, 22 nt, Human
caaguccagauuuacacuggga

SEQ ID NO: 2528990 - RNA, 21 nt, Human
caaguccagauuuacacuggg

SEQ ID NO: 2528991 - RNA, 20 nt, Human
cacagguucacgugcagcuc

SEQ ID NO: 2528992 - RNA, 15 nt, Human
cacagguguuuauac

SEQ ID NO: 2528993 - RNA, 19 nt, Human
cacagguucaugccaccau

SEQ ID NO: 2528994 - RNA, 21 nt, Human
cacaguauuacuucugcuaca

SEQ ID NO: 2528995 - RNA, 20 nt, Human
cacaguauuacuucugcuac

SEQ ID NO: 2528996 - RNA, 20 nt, Human
cacaggccugagauuucauc

SEQ ID NO: 2528997 - RNA, 19 nt, Human
cacaggccugagauuucau

SEQ ID NO: 2528998 - RNA, 15 nt, Human
cacaggccugagauu

SEQ ID NO: 2528999 - RNA, 14 nt, Human
cacaggccugagau

SEQ ID NO: 2529000 - RNA, 14 nt, Human
cacaggccucccug

SEQ ID NO: 2529001 - RNA, 13 nt, Human
cacaggccucccu

SEQ ID NO: 2529002 - RNA, 12 nt, Human
cacaggccuccc

SEQ ID NO: 2529003 - RNA, 11 nt, Human
cacaggccucc

SEQ ID NO: 2529004 - RNA, 16 nt, Human
cacaggccucccuguu

SEQ ID NO: 2529005 - RNA, 15 nt, Human
cacaggccucccugu

SEQ ID NO: 2529006 - RNA, 13 nt, Human
cacaggccugaga

SEQ ID NO: 2529007 - RNA, 18 nt, Human
cacaggggaaaagaggag

SEQ ID NO: 2529008 - RNA, 17 nt, Human
cacaggggaaaagagga

SEQ ID NO: 2529009 - RNA, 19 nt, Human
cacaggggaaaagaggagu

SEQ ID NO: 2529010 - RNA, 23 nt, Human
cacaggccugagauuucaucugc

SEQ ID NO: 2529011 - RNA, 22 nt, Human
cacaggccugagauuucaucug

SEQ ID NO: 2529012 - RNA, 13 nt, Human
cacagggcuaaga

SEQ ID NO: 2529013 - RNA, 14 nt, Human
cacagggucugcac

SEQ ID NO: 2529014 - RNA, 15 nt, Human
cacagggucugcucu

SEQ ID NO: 2529015 - RNA, 15 nt, Human
cacaggucuuuccua

SEQ ID NO: 2529016 - RNA, 18 nt, Human
cacaggucuuuccuaagg

SEQ ID NO: 2529017 - RNA, 20 nt, Human
cacaggucuuuccuaaggcu

SEQ ID NO: 2529018 - RNA, 18 nt, Human
cacaggugggcuucccag

SEQ ID NO: 2529019 - RNA, 21 nt, Human
cacagccucuuagaugcaguu

SEQ ID NO: 2529020 - RNA, 23 nt, Human
cacagccucugaccccuccucac

SEQ ID NO: 2529021 - RNA, 22 nt, Human
cacagccucugaccccuccuca

SEQ ID NO: 2529022 - RNA, 17 nt, Human
cacagccucuuagaugc

SEQ ID NO: 2529023 - RNA, 20 nt, Human
cacagccucugaccccuccu

SEQ ID NO: 2529024 - RNA, 17 nt, Human
cacagccucugaccccu

SEQ ID NO: 2529025 - RNA, 15 nt, Human
cacagccucugaccc

SEQ ID NO: 2529026 - RNA, 14 nt, Human
cacagccucugacc

SEQ ID NO: 2529027 - RNA, 13 nt, Human
cacagccucugac

SEQ ID NO: 2529028 - RNA, 12 nt, Human
cacagccucuga

SEQ ID NO: 2529029 - RNA, 18 nt, Human
cacagacauucugccagg

SEQ ID NO: 2529030 - RNA, 20 nt, Human
cacagacauucugccaggcc

SEQ ID NO: 2529031 - RNA, 20 nt, Human
cacagcggagguguggagcc

SEQ ID NO: 2529032 - RNA, 23 nt, Human
cacaggcccuuccucuccacugc

SEQ ID NO: 2529033 - RNA, 23 nt, Human
cacaggcccuuuccucaggcaag

SEQ ID NO: 2529034 - RNA, 22 nt, Human
cacaggcccuuuccucaggcaa

SEQ ID NO: 2529035 - RNA, 20 nt, Human
cacaggcccuuuccucaggc

SEQ ID NO: 2529036 - RNA, 19 nt, Human
cacaggcccuuuccucagg

SEQ ID NO: 2529037 - RNA, 18 nt, Human
cacaggcccuuuccucag

SEQ ID NO: 2529038 - RNA, 22 nt, Human
cacaggcccuuccucuccacug

SEQ ID NO: 2529039 - RNA, 19 nt, Human
cacagcgcuggccgggacc

SEQ ID NO: 2529040 - RNA, 22 nt, Human
cacagcgcuggccgggaccccg

SEQ ID NO: 2529041 - RNA, 18 nt, Human
cacagccuucuccacugg

SEQ ID NO: 2529042 - RNA, 17 nt, Human
cacagcgagacuccguc

SEQ ID NO: 2529043 - RNA, 22 nt, Human
cacagaaaauggaagacagcuc

SEQ ID NO: 2529044 - RNA, 20 nt, Human
cacagaaaauggaagacagc

SEQ ID NO: 2529045 - RNA, 19 nt, Human
cacagaaaauggaagacag

SEQ ID NO: 2529046 - RNA, 18 nt, Human
cacagaaaauggaagaca

SEQ ID NO: 2529047 - RNA, 14 nt, Human
cacacaugcauaca

SEQ ID NO: 2529048 - RNA, 15 nt, Human
cacacaugcauacac

SEQ ID NO: 2529049 - RNA, 16 nt, Human
cacacaugcauacaca

SEQ ID NO: 2529050 - RNA, 17 nt, Human
cacacaugcauacacac

SEQ ID NO: 2529051 - RNA, 18 nt, Human
cacacaugcauacacaca

SEQ ID NO: 2529052 - RNA, 19 nt, Human
cacacaugcauacacacac

SEQ ID NO: 2529053 - RNA, 21 nt, Human
cacagaaaauauacuguaaag

SEQ ID NO: 2529054 - RNA, 22 nt, Human
cacacaugagcaucaggccagg

SEQ ID NO: 2529055 - RNA, 21 nt, Human
cacacaugagcaucaggccag

SEQ ID NO: 2529056 - RNA, 19 nt, Human
cacagacauacuaaccagc

SEQ ID NO: 2529057 - RNA, 21 nt, Human
cacagacauacuaaccagcag

SEQ ID NO: 2529058 - RNA, 13 nt, Human
cacagacccugcc

SEQ ID NO: 2529059 - RNA, 11 nt, Human
cacagccucug

SEQ ID NO: 2529060 - RNA, 19 nt, Human
cacagaaaauucuucucca

SEQ ID NO: 2529061 - RNA, 23 nt, Human
cacagaaaauggaagacagcucu

SEQ ID NO: 2529062 - RNA, 18 nt, Human
cacagacauacuaaccag

SEQ ID NO: 2529063 - RNA, 22 nt, Human
cacagaaaauauacuguaaaga

SEQ ID NO: 2529064 - RNA, 13 nt, Human
cacagaaacacaa

SEQ ID NO: 2529065 - RNA, 21 nt, Human
cacagaaacacaauauuuugu

SEQ ID NO: 2529066 - RNA, 18 nt, Human
cacagaaacacaauauuu

SEQ ID NO: 2529067 - RNA, 22 nt, Human
cacacaugaaguccaagcauuu

SEQ ID NO: 2529068 - RNA, 20 nt, Human
cacacaugagcaucaggcca

SEQ ID NO: 2529069 - RNA, 17 nt, Human
cacacaugaaguccaag

SEQ ID NO: 2529070 - RNA, 13 nt, Human
cacacaucaggag

SEQ ID NO: 2529071 - RNA, 23 nt, Human
cacacagugagucgaggacaggg

SEQ ID NO: 2529072 - RNA, 21 nt, Human
cacacagugagucgaggacag

SEQ ID NO: 2529073 - RNA, 15 nt, Human
cacacauacacacac

SEQ ID NO: 2529074 - RNA, 23 nt, Human
cacacauauaaacaucacacaca

SEQ ID NO: 2529075 - RNA, 21 nt, Human
cacacauauaaacaucacaca

SEQ ID NO: 2529076 - RNA, 14 nt, Human
cacacauacacaca

SEQ ID NO: 2529077 - RNA, 23 nt, Human
cacacaguauuacuucugcuaca

SEQ ID NO: 2529078 - RNA, 20 nt, Human
cacacaguauuacuucugcu

SEQ ID NO: 2529079 - RNA, 21 nt, Human
cacacaguauuaagugacagu

SEQ ID NO: 2529080 - RNA, 17 nt, Human
cacacaguauuaaguga

SEQ ID NO: 2529081 - RNA, 23 nt, Human
cacacagggucugcaaggucuuu

SEQ ID NO: 2529082 - RNA, 18 nt, Human
cacacagugagucgagga

SEQ ID NO: 2529083 - RNA, 19 nt, Human
cacacaggggccacccggg

SEQ ID NO: 2529084 - RNA, 12 nt, Human
cacacagggcag

SEQ ID NO: 2529085 - RNA, 20 nt, Human
cacacaggacccccuucccc

SEQ ID NO: 2529086 - RNA, 20 nt, Human
cacacaggcaacugaggcag

SEQ ID NO: 2529087 - RNA, 16 nt, Human
cacacaggcaacugag

SEQ ID NO: 2529088 - RNA, 19 nt, Human
cacacaggcaacugaggca

SEQ ID NO: 2529089 - RNA, 18 nt, Human
cacacagcugggcugugg

SEQ ID NO: 2529090 - RNA, 17 nt, Human
cacacaggacccccuuc

SEQ ID NO: 2529091 - RNA, 19 nt, Human
cacacaggacccccuuccc

SEQ ID NO: 2529092 - RNA, 18 nt, Human
cacacaggacccccuucc

SEQ ID NO: 2529093 - RNA, 13 nt, Human
cacacaggcaacu

SEQ ID NO: 2529094 - RNA, 16 nt, Human
cacacagcucuguccu

SEQ ID NO: 2529095 - RNA, 15 nt, Human
cacacagcugcagag

SEQ ID NO: 2529096 - RNA, 20 nt, Human
cacacagcucuguccuggga

SEQ ID NO: 2529097 - RNA, 17 nt, Human
cacacagcucuguccug

SEQ ID NO: 2529098 - RNA, 21 nt, Human
cacaagagcccagcagggccu

SEQ ID NO: 2529099 - RNA, 23 nt, Human
cacaagcuccaagcucccaggca

SEQ ID NO: 2529100 - RNA, 17 nt, Human
cacaagcuccaagcucc

SEQ ID NO: 2529101 - RNA, 17 nt, Human
cacaagcugcacccuca

SEQ ID NO: 2529102 - RNA, 23 nt, Human
cacaagcugcacccucaggcagg

SEQ ID NO: 2529103 - RNA, 15 nt, Human
cacaagcuccaagcu

SEQ ID NO: 2529104 - RNA, 14 nt, Human
cacaagcuccaagc

SEQ ID NO: 2529105 - RNA, 13 nt, Human
cacaagcuccaag

SEQ ID NO: 2529106 - RNA, 16 nt, Human
cacaagagcccaggcc

SEQ ID NO: 2529107 - RNA, 18 nt, Human
cacaagacugcacaucaa

SEQ ID NO: 2529108 - RNA, 14 nt, Human
caauuuaugaauug

SEQ ID NO: 2529109 - RNA, 21 nt, Human
caauuuauauuuaauaaaauu

SEQ ID NO: 2529110 - RNA, 14 nt, Human
cacaagagcccagg

SEQ ID NO: 2529111 - RNA, 22 nt, Human
caauuuauuaaaaugauuguaa

SEQ ID NO: 2529112 - RNA, 14 nt, Human
caauuuauuaaaau

SEQ ID NO: 2529113 - RNA, 23 nt, Human
caauuuauuaaaaugauuguaaa

SEQ ID NO: 2529114 - RNA, 20 nt, Human
cacaagagcccagcagggcc

SEQ ID NO: 2529115 - RNA, 15 nt, Human
caaugcuguauuuua

SEQ ID NO: 2529116 - RNA, 17 nt, Human
caaugcuguauuuuaaa

SEQ ID NO: 2529117 - RNA, 16 nt, Human
caaugcuguauuuuaa

SEQ ID NO: 2529118 - RNA, 20 nt, Human
caauggagacugucucaaga

SEQ ID NO: 2529119 - RNA, 22 nt, Human
caauggauuugaugcuguuuga

SEQ ID NO: 2529120 - RNA, 19 nt, Human
caauggauuugaugcuguu

SEQ ID NO: 2529121 - RNA, 17 nt, Human
caauggauuugaugcug

SEQ ID NO: 2529122 - RNA, 13 nt, Human
caauggauuugau

SEQ ID NO: 2529123 - RNA, 15 nt, Human
caauucuugccaaau

SEQ ID NO: 2529124 - RNA, 12 nt, Human
caauggcagccu

SEQ ID NO: 2529125 - RNA, 11 nt, Human
caauggcagcc

SEQ ID NO: 2529126 - RNA, 19 nt, Human
caauucuuuauacaacagu

SEQ ID NO: 2529127 - RNA, 16 nt, Human
caauucuuuauacaac

SEQ ID NO: 2529128 - RNA, 18 nt, Human
caauugaacuuaaauaaa

SEQ ID NO: 2529129 - RNA, 23 nt, Human
caauucuuuauacaacagugcua

SEQ ID NO: 2529130 - RNA, 12 nt, Human
caauuuaaagca

SEQ ID NO: 2529131 - RNA, 13 nt, Human
caauucuuuauac

SEQ ID NO: 2529132 - RNA, 12 nt, Human
caauucuuuaua

SEQ ID NO: 2529133 - RNA, 22 nt, Human
caauucuucccuaucuuugcca

SEQ ID NO: 2529134 - RNA, 21 nt, Human
caauucuucccuaucuuugcc

SEQ ID NO: 2529135 - RNA, 20 nt, Human
caauucuucccuaucuuugc

SEQ ID NO: 2529136 - RNA, 17 nt, Human
caauuuacaaagugugu

SEQ ID NO: 2529137 - RNA, 15 nt, Human
caauuuacaaagugu

SEQ ID NO: 2529138 - RNA, 14 nt, Human
caauuuacaaagug

SEQ ID NO: 2529139 - RNA, 13 nt, Human
caauuuacaaagu

SEQ ID NO: 2529140 - RNA, 20 nt, Human
caauuuacaaaguguguauu

SEQ ID NO: 2529141 - RNA, 18 nt, Human
caauuuacaaagugugua

SEQ ID NO: 2529142 - RNA, 21 nt, Human
caauuuacaaaguguguauua

SEQ ID NO: 2529143 - RNA, 13 nt, Human
caauuuaaagcaa

SEQ ID NO: 2529144 - RNA, 14 nt, Human
ccaaaacuccugcc

SEQ ID NO: 2529145 - RNA, 19 nt, Human
ccaaagugcugggauuaca

SEQ ID NO: 2529146 - RNA, 22 nt, Human
ccaaagugcugggauuacaggc

SEQ ID NO: 2529147 - RNA, 22 nt, Human
ccaaagugcugggauuacaggg

SEQ ID NO: 2529148 - RNA, 21 nt, Human
ccaacuugagggcccagagca

SEQ ID NO: 2529149 - RNA, 20 nt, Human
ccaacuugagggcccagagc

SEQ ID NO: 2529150 - RNA, 13 nt, Human
ccaacuuggcuuu

SEQ ID NO: 2529151 - RNA, 11 nt, Human
ccaacuuguaa

SEQ ID NO: 2529152 - RNA, 14 nt, Human
ccaacuuggcuuuc

SEQ ID NO: 2529153 - RNA, 17 nt, Human
ccaacuuguaaauacac

SEQ ID NO: 2529154 - RNA, 23 nt, Human
ccaacuuguauuaaagacagagg

SEQ ID NO: 2529155 - RNA, 18 nt, Human
ccaacuagacauucuguc

SEQ ID NO: 2529156 - RNA, 17 nt, Human
ccaacuagacauucugu

SEQ ID NO: 2529157 - RNA, 16 nt, Human
ccaacuagacauucug

SEQ ID NO: 2529158 - RNA, 19 nt, Human
ccaacuugagggcccagag

SEQ ID NO: 2529159 - RNA, 18 nt, Human
ccaacuucuucagagcug

SEQ ID NO: 2529160 - RNA, 19 nt, Human
ccaacuucuucagagcuga

SEQ ID NO: 2529161 - RNA, 21 nt, Human
ccaacuucauuugaugcuaaa

SEQ ID NO: 2529162 - RNA, 13 nt, Human
ccaacuucccagu

SEQ ID NO: 2529163 - RNA, 23 nt, Human
ccaacuacaaccaagcucucugc

SEQ ID NO: 2529164 - RNA, 22 nt, Human
ccaacuacaaccaagcucucug

SEQ ID NO: 2529165 - RNA, 16 nt, Human
ccaacuacaaccaagc

SEQ ID NO: 2529166 - RNA, 19 nt, Human
ccaacuaacaagaaacuca

SEQ ID NO: 2529167 - RNA, 19 nt, Human
ccaacuaaugccuuacucu

SEQ ID NO: 2529168 - RNA, 20 nt, Human
ccaacuaaugccuuacucuu

SEQ ID NO: 2529169 - RNA, 20 nt, Human
ccaacguggggcagcacaga

SEQ ID NO: 2529170 - RNA, 18 nt, Human
ccaaauuauuuguguaau

SEQ ID NO: 2529171 - RNA, 17 nt, Human
ccaaauuauuuguguaa

SEQ ID NO: 2529172 - RNA, 14 nt, Human
ccaaauuauuugug

SEQ ID NO: 2529173 - RNA, 12 nt, Human
ccaaauuauuug

SEQ ID NO: 2529174 - RNA, 16 nt, Human
ccaacgucugugccau

SEQ ID NO: 2529175 - RNA, 16 nt, Human
ccaacguggggcagca

SEQ ID NO: 2529176 - RNA, 15 nt, Human
ccaacguggggcagc

SEQ ID NO: 2529177 - RNA, 23 nt, Human
ccaaauguuuacagggagccucc

SEQ ID NO: 2529178 - RNA, 18 nt, Human
ccaaauguuuacagggag

SEQ ID NO: 2529179 - RNA, 19 nt, Human
ccaaauguuuacagggagc

SEQ ID NO: 2529180 - RNA, 11 nt, Human
ccaaauuauuu

SEQ ID NO: 2529181 - RNA, 18 nt, Human
ccaaauguucaucaauga

SEQ ID NO: 2529182 - RNA, 22 nt, Human
ccaaaugagggucuugguucca

SEQ ID NO: 2529183 - RNA, 16 nt, Human
ccaaaugaaugaccuu

SEQ ID NO: 2529184 - RNA, 14 nt, Human
ccaaaucuggaagc

SEQ ID NO: 2529185 - RNA, 18 nt, Human
ccaaauccucuccagcua

SEQ ID NO: 2529186 - RNA, 13 nt, Human
ccaaauccucucc

SEQ ID NO: 2529187 - RNA, 23 nt, Human
ccaaauccgaaccuccucuguga

SEQ ID NO: 2529188 - RNA, 17 nt, Human
ccaaauccgaaccuccu

SEQ ID NO: 2529189 - RNA, 21 nt, Human
ccaaauccgaaccuccucugu

SEQ ID NO: 2529190 - RNA, 22 nt, Human
ccaaauccgaaccuccucugug

SEQ ID NO: 2529191 - RNA, 24 nt, Human
ccaaauccgaaccuccucugugaa

SEQ ID NO: 2529192 - RNA, 15 nt, Human
ccaaauccccuaagc

SEQ ID NO: 2529193 - RNA, 22 nt, Human
ccaaagugcugggauuacaggu

SEQ ID NO: 2529194 - RNA, 19 nt, Human
ccaaagugguauagaaaug

SEQ ID NO: 2529195 - RNA, 22 nt, Human
ccaaugcacuuuguucuggcuc

SEQ ID NO: 2529196 - RNA, 20 nt, Human
ccaaugcacuuuguucuggc

SEQ ID NO: 2529197 - RNA, 23 nt, Human
ccaaugcacuuuguucuggcucu

SEQ ID NO: 2529198 - RNA, 16 nt, Human
ccaagcuuggcagccg

SEQ ID NO: 2529199 - RNA, 15 nt, Human
ccaagcuuggcagcc

SEQ ID NO: 2529200 - RNA, 17 nt, Human
ccaagcuuggcagccga

SEQ ID NO: 2529201 - RNA, 23 nt, Human
ccaagcuuguccaacccgaggcc

SEQ ID NO: 2529202 - RNA, 17 nt, Human
ccaacuuucuguaaacu

SEQ ID NO: 2529203 - RNA, 14 nt, Human
ccaacuuucuguaa

SEQ ID NO: 2529204 - RNA, 13 nt, Human
ccaacuuucugua

SEQ ID NO: 2529205 - RNA, 15 nt, Human
ccaagcugugccacc

SEQ ID NO: 2529206 - RNA, 14 nt, Human
ccaagcugugccac

SEQ ID NO: 2529207 - RNA, 22 nt, Human
ccaacuuuguggaugucuuccu

SEQ ID NO: 2529208 - RNA, 13 nt, Human
ccaagcugugcca

SEQ ID NO: 2529209 - RNA, 20 nt, Human
ccaagcuggucccacucagu

SEQ ID NO: 2529210 - RNA, 21 nt, Human
ccaagcugugccacccugggc

SEQ ID NO: 2529211 - RNA, 18 nt, Human
ccaagcugugccacccug

SEQ ID NO: 2529212 - RNA, 17 nt, Human
ccaagcugugccacccu

SEQ ID NO: 2529213 - RNA, 16 nt, Human
ccaagcugugccaccc

SEQ ID NO: 2529214 - RNA, 14 nt, Human
ccaagcuguuuucu

SEQ ID NO: 2529215 - RNA, 17 nt, Human
ccaagcuguuuucuucu

SEQ ID NO: 2529216 - RNA, 18 nt, Human
ccaagcuguuuucuucua

SEQ ID NO: 2529217 - RNA, 22 nt, Human
ccaagcugugccacccugggcu

SEQ ID NO: 2529218 - RNA, 17 nt, Human
ccaagcuuccuuuguuu

SEQ ID NO: 2529219 - RNA, 22 nt, Human
ccaauuaaggauuuuaugcuuu

SEQ ID NO: 2529220 - RNA, 17 nt, Human
ccaauuaggaaguguaa

SEQ ID NO: 2529221 - RNA, 23 nt, Human
ccaauuaggaaguguaacagcug

SEQ ID NO: 2529222 - RNA, 13 nt, Human
ccaauuaaggauu

SEQ ID NO: 2529223 - RNA, 18 nt, Human
ccaauuaaggauuuuaug

SEQ ID NO: 2529224 - RNA, 15 nt, Human
ccaauuaaccagaaa

SEQ ID NO: 2529225 - RNA, 20 nt, Human
ccaauguucucucuucucca

SEQ ID NO: 2529226 - RNA, 23 nt, Human
ccaaugcaugcagccacugugcu

SEQ ID NO: 2529227 - RNA, 21 nt, Human
ccaaugcaugcagccacugug

SEQ ID NO: 2529228 - RNA, 17 nt, Human
ccaaugcaugcagccac

SEQ ID NO: 2529229 - RNA, 13 nt, Human
ccaaugccaaaaa

SEQ ID NO: 2529230 - RNA, 22 nt, Human
ccacacuucaggcucuucuccu

SEQ ID NO: 2529231 - RNA, 20 nt, Human
ccacacuuccuguccagaga

SEQ ID NO: 2529232 - RNA, 21 nt, Human
ccacacuuccuguccagagag

SEQ ID NO: 2529233 - RNA, 12 nt, Human
ccacacuuccug

SEQ ID NO: 2529234 - RNA, 13 nt, Human
ccacacuuccugu

SEQ ID NO: 2529235 - RNA, 16 nt, Human
ccacacuuccugucca

SEQ ID NO: 2529236 - RNA, 18 nt, Human
ccacacuuccuguccaga

SEQ ID NO: 2529237 - RNA, 21 nt, Human
ccaccacuggccaccaggcug

SEQ ID NO: 2529238 - RNA, 20 nt, Human
ccaccacuggccaccaggcu

SEQ ID NO: 2529239 - RNA, 19 nt, Human
ccaccacuggccaccaggc

SEQ ID NO: 2529240 - RNA, 19 nt, Human
ccacacuugagaggaugaa

SEQ ID NO: 2529241 - RNA, 11 nt, Human
ccaccagaagc

SEQ ID NO: 2529242 - RNA, 12 nt, Human
ccaccagaagcc

SEQ ID NO: 2529243 - RNA, 13 nt, Human
ccaccagaagccc

SEQ ID NO: 2529244 - RNA, 17 nt, Human
ccacacuugagaggaug

SEQ ID NO: 2529245 - RNA, 17 nt, Human
ccacagaagccaggagc

SEQ ID NO: 2529246 - RNA, 20 nt, Human
ccacacuuguuccagcucuu

SEQ ID NO: 2529247 - RNA, 21 nt, Human
ccacacuuguuccagcucuuu

SEQ ID NO: 2529248 - RNA, 17 nt, Human
ccaccaucaagccacca

SEQ ID NO: 2529249 - RNA, 16 nt, Human
ccaccaucaagccacc

SEQ ID NO: 2529250 - RNA, 19 nt, Human
ccaccaggccaccucccca

SEQ ID NO: 2529251 - RNA, 13 nt, Human
ccaccaggccacc

SEQ ID NO: 2529252 - RNA, 18 nt, Human
ccaccaggaucccagggg

SEQ ID NO: 2529253 - RNA, 18 nt, Human
ccaccaggaaccucuuca

SEQ ID NO: 2529254 - RNA, 19 nt, Human
ccaccaggagaaccacuac

SEQ ID NO: 2529255 - RNA, 14 nt, Human
ccaccaggaaccuc

SEQ ID NO: 2529256 - RNA, 16 nt, Human
ccaccaggaaccucuu

SEQ ID NO: 2529257 - RNA, 13 nt, Human
ccaccaggagaac

SEQ ID NO: 2529258 - RNA, 14 nt, Human
ccaccaggagaacc

SEQ ID NO: 2529259 - RNA, 14 nt, Human
ccaccagaagccca

SEQ ID NO: 2529260 - RNA, 15 nt, Human
ccaccagaagcccag

SEQ ID NO: 2529261 - RNA, 16 nt, Human
ccaccagaagcccaga

SEQ ID NO: 2529262 - RNA, 18 nt, Human
ccaccagaagcccagaau

SEQ ID NO: 2529263 - RNA, 11 nt, Human
ccaccagccug

SEQ ID NO: 2529264 - RNA, 14 nt, Human
ccaccagccugcac

SEQ ID NO: 2529265 - RNA, 12 nt, Human
ccaccagagcug

SEQ ID NO: 2529266 - RNA, 22 nt, Human
ccaccagagaccguccucaccc

SEQ ID NO: 2529267 - RNA, 21 nt, Human
ccaccagagaccguccucacc

SEQ ID NO: 2529268 - RNA, 20 nt, Human
ccaccagagaccguccucac

SEQ ID NO: 2529269 - RNA, 17 nt, Human
ccaccagagaccguccu

SEQ ID NO: 2529270 - RNA, 23 nt, Human
ccaccacuggccaccaggcuggc

SEQ ID NO: 2529271 - RNA, 23 nt, Human
ccaccagacugacaaauguguau

SEQ ID NO: 2529272 - RNA, 15 nt, Human
ccaccuuggcucaag

SEQ ID NO: 2529273 - RNA, 14 nt, Human
ccaccuuggcucaa

SEQ ID NO: 2529274 - RNA, 13 nt, Human
ccaccguggagga

SEQ ID NO: 2529275 - RNA, 20 nt, Human
ccaccguccgcccugcuccu

SEQ ID NO: 2529276 - RNA, 19 nt, Human
ccaccguccgcccugcucc

SEQ ID NO: 2529277 - RNA, 18 nt, Human
ccaccguccgcccugcuc

SEQ ID NO: 2529278 - RNA, 17 nt, Human
ccaccuaaucaggcuga

SEQ ID NO: 2529279 - RNA, 16 nt, Human
ccaccguggaggagga

SEQ ID NO: 2529280 - RNA, 13 nt, Human
ccaccuuggcuca

SEQ ID NO: 2529281 - RNA, 23 nt, Human
ccaccuacuuuucuuuccucaga

SEQ ID NO: 2529282 - RNA, 17 nt, Human
ccaccguccgcccugcu

SEQ ID NO: 2529283 - RNA, 16 nt, Human
ccaccguccgcccugc

SEQ ID NO: 2529284 - RNA, 15 nt, Human
ccaccguccgcccug

SEQ ID NO: 2529285 - RNA, 14 nt, Human
ccaccguccgcccu

SEQ ID NO: 2529286 - RNA, 13 nt, Human
ccaccguccgccc

SEQ ID NO: 2529287 - RNA, 23 nt, Human
ccaccgggcugggagcucugcag

SEQ ID NO: 2529288 - RNA, 18 nt, Human
ccaccgcagacaggacca

SEQ ID NO: 2529289 - RNA, 13 nt, Human
ccacccugggccc

SEQ ID NO: 2529290 - RNA, 22 nt, Human
ccaccgggcugggagcucugca

SEQ ID NO: 2529291 - RNA, 21 nt, Human
ccaccaggccaccuccccagc

SEQ ID NO: 2529292 - RNA, 13 nt, Human
ccacccugcucuc

SEQ ID NO: 2529293 - RNA, 20 nt, Human
ccaccaucaagccaccaaca

SEQ ID NO: 2529294 - RNA, 20 nt, Human
ccaccaggcugcucagggcu

SEQ ID NO: 2529295 - RNA, 17 nt, Human
ccaccgcagacaggacc

SEQ ID NO: 2529296 - RNA, 14 nt, Human
ccaccgcagacagg

SEQ ID NO: 2529297 - RNA, 21 nt, Human
ccacccuggccgaguccaagc

SEQ ID NO: 2529298 - RNA, 22 nt, Human
ccacccuggccgaguccaagcu

SEQ ID NO: 2529299 - RNA, 20 nt, Human
ccacccuggccgaguccaag

SEQ ID NO: 2529300 - RNA, 11 nt, Human
ccacccuggaa

SEQ ID NO: 2529301 - RNA, 10 nt, Human
ccacccuggg

SEQ ID NO: 2529302 - RNA, 12 nt, Human
ccacccugggac

SEQ ID NO: 2529303 - RNA, 12 nt, Human
ccacccugggcc

SEQ ID NO: 2529304 - RNA, 13 nt, Human
ccacccugggacc

SEQ ID NO: 2529305 - RNA, 15 nt, Human
cauuaggauggcuag

SEQ ID NO: 2529306 - RNA, 12 nt, Human
cauuaucuagau

SEQ ID NO: 2529307 - RNA, 16 nt, Human
cauuaucuagauacug

SEQ ID NO: 2529308 - RNA, 17 nt, Human
cauuaucuagauacugu

SEQ ID NO: 2529309 - RNA, 21 nt, Human
cauuaggaauuaaguuaucuu

SEQ ID NO: 2529310 - RNA, 23 nt, Human
cauuagccugaguagaaaggccu

SEQ ID NO: 2529311 - RNA, 19 nt, Human
cauuagccugaguagaaag

SEQ ID NO: 2529312 - RNA, 18 nt, Human
cauuagccugaguagaaa

SEQ ID NO: 2529313 - RNA, 17 nt, Human
cauuagccugaguagaa

SEQ ID NO: 2529314 - RNA, 14 nt, Human
cauuagccugagua

SEQ ID NO: 2529315 - RNA, 9 nt, Human
cauuagccu

SEQ ID NO: 2529316 - RNA, 23 nt, Human
cauguuccuucaagaucauguac

SEQ ID NO: 2529317 - RNA, 20 nt, Human
cauguuccuucaagaucaug

SEQ ID NO: 2529318 - RNA, 16 nt, Human
cauguuccuucaagau

SEQ ID NO: 2529319 - RNA, 14 nt, Human
cauguuccuucaag

SEQ ID NO: 2529320 - RNA, 18 nt, Human
cauuagcaguuugcuuug

SEQ ID NO: 2529321 - RNA, 15 nt, Human
cauguucucugagga

SEQ ID NO: 2529322 - RNA, 17 nt, Human
cauggcuuaaugcuucu

SEQ ID NO: 2529323 - RNA, 14 nt, Human
cauggcugugagga

SEQ ID NO: 2529324 - RNA, 24 nt, Human
cauggcugggaacugcagaccugu

SEQ ID NO: 2529325 - RNA, 23 nt, Human
cauggcugggaacugcagaccug

SEQ ID NO: 2529326 - RNA, 21 nt, Human
cauggcugggaacugcagacc

SEQ ID NO: 2529327 - RNA, 20 nt, Human
cauggcuuaauguuuauucc

SEQ ID NO: 2529328 - RNA, 17 nt, Human
cauggcuuaauguuuau

SEQ ID NO: 2529329 - RNA, 15 nt, Human
cauggcuuaauguuu

SEQ ID NO: 2529330 - RNA, 18 nt, Human
cauggcuuaaugcuucuu

SEQ ID NO: 2529331 - RNA, 14 nt, Human
cauggcuuccuccu

SEQ ID NO: 2529332 - RNA, 13 nt, Human
cauggcuuccucc

SEQ ID NO: 2529333 - RNA, 19 nt, Human
cauguuccaauaaacagga

SEQ ID NO: 2529334 - RNA, 17 nt, Human
cauguuccaauaaacag

SEQ ID NO: 2529335 - RNA, 16 nt, Human
cauguuccaauaaaca

SEQ ID NO: 2529336 - RNA, 14 nt, Human
cauguuccaauaaa

SEQ ID NO: 2529337 - RNA, 22 nt, Human
cauguucacaccgcugcacuca

SEQ ID NO: 2529338 - RNA, 20 nt, Human
cauguucacaccgcugcacu

SEQ ID NO: 2529339 - RNA, 13 nt, Human
cauguuccuucaa

SEQ ID NO: 2529340 - RNA, 12 nt, Human
cauguuccuuca

SEQ ID NO: 2529341 - RNA, 21 nt, Human
cauguuccucaaaagcacccu

SEQ ID NO: 2529342 - RNA, 16 nt, Human
cauguuccacuaaccc

SEQ ID NO: 2529343 - RNA, 15 nt, Human
cauguuccacuaacc

SEQ ID NO: 2529344 - RNA, 13 nt, Human
cauguuccucaaa

SEQ ID NO: 2529345 - RNA, 14 nt, Human
cauggcuaacuggc

SEQ ID NO: 2529346 - RNA, 16 nt, Human
cauggcuaacuggcga

SEQ ID NO: 2529347 - RNA, 14 nt, Human
cauggcgugucccu

SEQ ID NO: 2529348 - RNA, 19 nt, Human
cauggcgugucccucucgg

SEQ ID NO: 2529349 - RNA, 22 nt, Human
cauggccucuucagaucucuaa

SEQ ID NO: 2529350 - RNA, 22 nt, Human
cauggcugccaaugggagcuca

SEQ ID NO: 2529351 - RNA, 17 nt, Human
cauggcugccaauggga

SEQ ID NO: 2529352 - RNA, 13 nt, Human
cauuaugaugugu

SEQ ID NO: 2529353 - RNA, 21 nt, Human
cauuaugaugugggucaagga

SEQ ID NO: 2529354 - RNA, 13 nt, Human
cauuaugauucuu

SEQ ID NO: 2529355 - RNA, 22 nt, Human
cauuauguccacuguguauaga

SEQ ID NO: 2529356 - RNA, 21 nt, Human
cauuauguccacuguguauag

SEQ ID NO: 2529357 - RNA, 20 nt, Human
cauuauguccacuguguaua

SEQ ID NO: 2529358 - RNA, 19 nt, Human
cauuauguccacuguguau

SEQ ID NO: 2529359 - RNA, 17 nt, Human
cauuauguccacugugu

SEQ ID NO: 2529360 - RNA, 20 nt, Human
cauuauguaaaauguuuuag

SEQ ID NO: 2529361 - RNA, 17 nt, Human
cauuauguaaaauguuu

SEQ ID NO: 2529362 - RNA, 14 nt, Human
cauuaugauucuuu

SEQ ID NO: 2529363 - RNA, 18 nt, Human
cauuaucuagauacugua

SEQ ID NO: 2529364 - RNA, 22 nt, Human
cauuaggacaaucaguccccuc

SEQ ID NO: 2529365 - RNA, 19 nt, Human
cauuaggacaaucaguccc

SEQ ID NO: 2529366 - RNA, 23 nt, Human
cauuaugaugugggucaaggaau

SEQ ID NO: 2529367 - RNA, 22 nt, Human
cauuaugaugugggucaaggaa

SEQ ID NO: 2529368 - RNA, 16 nt, Human
cauucucacuccuacc

SEQ ID NO: 2529369 - RNA, 17 nt, Human
cauucucacuccuaccu

SEQ ID NO: 2529370 - RNA, 16 nt, Human
cauucucauggagaag

SEQ ID NO: 2529371 - RNA, 15 nt, Human
cauucucauggagaa

SEQ ID NO: 2529372 - RNA, 15 nt, Human
cauucuccugccugu

SEQ ID NO: 2529373 - RNA, 13 nt, Human
cauucuccugccu

SEQ ID NO: 2529374 - RNA, 11 nt, Human
cauucuccugc

SEQ ID NO: 2529375 - RNA, 21 nt, Human
cauucucccagguaccagcug

SEQ ID NO: 2529376 - RNA, 23 nt, Human
cauucuccugccuguagcaguga

SEQ ID NO: 2529377 - RNA, 22 nt, Human
cauucuccugccuguagcagug

SEQ ID NO: 2529378 - RNA, 16 nt, Human
cauucuccuuguguua

SEQ ID NO: 2529379 - RNA, 19 nt, Human
cauucucauggagaaguua

SEQ ID NO: 2529380 - RNA, 12 nt, Human
cauucucccagg

SEQ ID NO: 2529381 - RNA, 23 nt, Human
cauucucccagguaccagcugcg

SEQ ID NO: 2529382 - RNA, 15 nt, Human
cauucucccagguac

SEQ ID NO: 2529383 - RNA, 17 nt, Human
cauugccuuaacuggag

SEQ ID NO: 2529384 - RNA, 21 nt, Human
cauugcggacagccacggcca

SEQ ID NO: 2529385 - RNA, 17 nt, Human
cauugcggacagccacg

SEQ ID NO: 2529386 - RNA, 15 nt, Human
cauugcggacagcca

SEQ ID NO: 2529387 - RNA, 14 nt, Human
cauugcggacagcc

SEQ ID NO: 2529388 - RNA, 16 nt, Human
cauugcugagccucug

SEQ ID NO: 2529389 - RNA, 17 nt, Human
cauugcugagccucugc

SEQ ID NO: 2529390 - RNA, 18 nt, Human
cauugcugagccucugcu

SEQ ID NO: 2529391 - RNA, 21 nt, Human
cauugcugagccucugcuccc

SEQ ID NO: 2529392 - RNA, 18 nt, Human
cauugcugggcuugucug

SEQ ID NO: 2529393 - RNA, 22 nt, Human
cauugcugaaaaugguauuuuc

SEQ ID NO: 2529394 - RNA, 16 nt, Human
cauugcugaaaauggu

SEQ ID NO: 2529395 - RNA, 16 nt, Human
cauugcuaagaugcuc

SEQ ID NO: 2529396 - RNA, 14 nt, Human
cauugcugagccuc

SEQ ID NO: 2529397 - RNA, 15 nt, Human
cauugcugagccucu

SEQ ID NO: 2529398 - RNA, 23 nt, Human
cauugcguuugaccuuuuaugua

SEQ ID NO: 2529399 - RNA, 15 nt, Human
cauugcuaagaugcu

SEQ ID NO: 2529400 - RNA, 21 nt, Human
cauugcgcucuagccugggca

SEQ ID NO: 2529401 - RNA, 21 nt, Human
cauugccuuaacuggagcccc

SEQ ID NO: 2529402 - RNA, 13 nt, Human
cauugccuuuucu

SEQ ID NO: 2529403 - RNA, 22 nt, Human
cauuuuuguacaguuugcugua

SEQ ID NO: 2529404 - RNA, 13 nt, Human
cauuuuuguauuu

SEQ ID NO: 2529405 - RNA, 23 nt, Human
cauuuuuguuucuaccucccaga

SEQ ID NO: 2529406 - RNA, 22 nt, Human
cauuuuuguuucuaccucccag

SEQ ID NO: 2529407 - RNA, 20 nt, Human
cauuuuuguauuuuguuuaa

SEQ ID NO: 2529408 - RNA, 17 nt, Human
ccaaaaaaugcuugcuu

SEQ ID NO: 2529409 - RNA, 20 nt, Human
ccaaaaaauucuacaacaca

SEQ ID NO: 2529410 - RNA, 22 nt, Human
ccaaaaaauucuacaacacaca

SEQ ID NO: 2529411 - RNA, 17 nt, Human
ccaaaaagaccagacua

SEQ ID NO: 2529412 - RNA, 16 nt, Human
ccaaaaagaccagacu

SEQ ID NO: 2529413 - RNA, 15 nt, Human
ccaaaaagaccagac

SEQ ID NO: 2529414 - RNA, 17 nt, Human
ccaaaacucuccucugc

SEQ ID NO: 2529415 - RNA, 18 nt, Human
ccaaaacaaacaaacaga

SEQ ID NO: 2529416 - RNA, 15 nt, Human
ccaaaaccacagccc

SEQ ID NO: 2529417 - RNA, 19 nt, Human
ccaaaaagauuuucagaaa

SEQ ID NO: 2529418 - RNA, 12 nt, Human
ccaaaacaaaca

SEQ ID NO: 2529419 - RNA, 21 nt, Human
cauuuccaacaccacagacac

SEQ ID NO: 2529420 - RNA, 20 nt, Human
cauuuccaacaccacagaca

SEQ ID NO: 2529421 - RNA, 16 nt, Human
cauuugguucauuaau

SEQ ID NO: 2529422 - RNA, 20 nt, Human
cauuugguucauuaauucua

SEQ ID NO: 2529423 - RNA, 21 nt, Human
cauuugguucauuaauucuau

SEQ ID NO: 2529424 - RNA, 23 nt, Human
cauuuuucuuagggaaggauaca

SEQ ID NO: 2529425 - RNA, 21 nt, Human
cauuuuuguacaguuugcugu

SEQ ID NO: 2529426 - RNA, 20 nt, Human
cauuuuuguacaguuugcug

SEQ ID NO: 2529427 - RNA, 14 nt, Human
cauuuuuguacagu

SEQ ID NO: 2529428 - RNA, 13 nt, Human
cauuuuuguacag

SEQ ID NO: 2529429 - RNA, 12 nt, Human
cauuuuuguaca

SEQ ID NO: 2529430 - RNA, 17 nt, Human
cauuuuugauuuaugca

SEQ ID NO: 2529431 - RNA, 22 nt, Human
cauuuccaacaccacagacaca

SEQ ID NO: 2529432 - RNA, 20 nt, Human
cauuuuugaauacaggcaua

SEQ ID NO: 2529433 - RNA, 18 nt, Human
cauuuuugaauacaggca

SEQ ID NO: 2529434 - RNA, 22 nt, Human
cauuuggugguuucagaaaugu

SEQ ID NO: 2529435 - RNA, 23 nt, Human
cauuuggugguuucagaaaugug

SEQ ID NO: 2529436 - RNA, 12 nt, Human
cauuuccaagca

SEQ ID NO: 2529437 - RNA, 19 nt, Human
cauuuccaacaccacagac

SEQ ID NO: 2529438 - RNA, 18 nt, Human
cauuuccaacaccacaga

SEQ ID NO: 2529439 - RNA, 13 nt, Human
cauuuccaacacc

SEQ ID NO: 2529440 - RNA, 21 nt, Human
cauuuccaaaugaaugaccuu

SEQ ID NO: 2529441 - RNA, 17 nt, Human
cauuuccaaaugaauga

SEQ ID NO: 2529442 - RNA, 23 nt, Human
cauuucauuguaugauguguugu

SEQ ID NO: 2529443 - RNA, 17 nt, Human
cauuuccaaauucacaa

SEQ ID NO: 2529444 - RNA, 20 nt, Human
cauuucaccccucccuuucu

SEQ ID NO: 2529445 - RNA, 19 nt, Human
cauuucaccccucccuuuc

SEQ ID NO: 2529446 - RNA, 18 nt, Human
cauuucaccccucccuuu

SEQ ID NO: 2529447 - RNA, 17 nt, Human
cauuucaccccucccuu

SEQ ID NO: 2529448 - RNA, 22 nt, Human
cauuucaccccucccuuucucc

SEQ ID NO: 2529449 - RNA, 21 nt, Human
cauuucaccccucccuuucuc

SEQ ID NO: 2529450 - RNA, 23 nt, Human
cauuucaccccucccuuucuccc

SEQ ID NO: 2529451 - RNA, 18 nt, Human
cauuucaaaugugcuguc

SEQ ID NO: 2529452 - RNA, 20 nt, Human
cauuucauuguaugaugugu

SEQ ID NO: 2529453 - RNA, 18 nt, Human
cauuucauuguaugaugu

SEQ ID NO: 2529454 - RNA, 14 nt, Human
cauuucauuuccua

SEQ ID NO: 2529455 - RNA, 18 nt, Human
cauuucauuugugccaga

SEQ ID NO: 2529456 - RNA, 16 nt, Human
cauuucauuguaugau

SEQ ID NO: 2529457 - RNA, 13 nt, Human
cauuucauuguau

SEQ ID NO: 2529458 - RNA, 12 nt, Human
cauuucauugua

SEQ ID NO: 2529459 - RNA, 16 nt, Human
cauuucaauucucaaa

SEQ ID NO: 2529460 - RNA, 15 nt, Human
cauuucaacuguuug

SEQ ID NO: 2529461 - RNA, 16 nt, Human
cauuucaccccucccu

SEQ ID NO: 2529462 - RNA, 15 nt, Human
cauuucaccccuccc

SEQ ID NO: 2529463 - RNA, 14 nt, Human
cauuucaccccucc

SEQ ID NO: 2529464 - RNA, 13 nt, Human
cauuucaccccuc

SEQ ID NO: 2529465 - RNA, 13 nt, Human
cauuuauuuguga

SEQ ID NO: 2529466 - RNA, 18 nt, Human
cauuuauuuuucucauga

SEQ ID NO: 2529467 - RNA, 19 nt, Human
cauuuauuuuuuacauuau

SEQ ID NO: 2529468 - RNA, 17 nt, Human
cauuuauuuuuuacauu

SEQ ID NO: 2529469 - RNA, 23 nt, Human
cauuggcagcaggugcugcuacc

SEQ ID NO: 2529470 - RNA, 21 nt, Human
cauuggcagcaggugcugcua

SEQ ID NO: 2529471 - RNA, 20 nt, Human
cauuggcagcaggugcugcu

SEQ ID NO: 2529472 - RNA, 17 nt, Human
cauuggcagcaggugcu

SEQ ID NO: 2529473 - RNA, 16 nt, Human
cauuggcagcaggugc

SEQ ID NO: 2529474 - RNA, 14 nt, Human
cauuggcagcaggu

SEQ ID NO: 2529475 - RNA, 21 nt, Human
cauuggcaccuaauccaggca

SEQ ID NO: 2529476 - RNA, 17 nt, Human
cauugcuuacacggaug

SEQ ID NO: 2529477 - RNA, 21 nt, Human
cauugcuguugucccucugcu

SEQ ID NO: 2529478 - RNA, 20 nt, Human
cauuggcaccuaauccaggc

SEQ ID NO: 2529479 - RNA, 22 nt, Human
cauugcugugaauuagcucacu

SEQ ID NO: 2529480 - RNA, 21 nt, Human
cauugcugguucuauuuaaug

SEQ ID NO: 2529481 - RNA, 15 nt, Human
cauugcugguucuau

SEQ ID NO: 2529482 - RNA, 15 nt, Human
cauuggcugagagac

SEQ ID NO: 2529483 - RNA, 24 nt, Human
cauuggcagcaggugcugcuaccc

SEQ ID NO: 2529484 - RNA, 19 nt, Human
cauuggcuauuuaaaacuu

SEQ ID NO: 2529485 - RNA, 22 nt, Human
cauuggcuuuauccucuuuaga

SEQ ID NO: 2529486 - RNA, 13 nt, Human
cauuggcuuuauc

SEQ ID NO: 2529487 - RNA, 18 nt, Human
cauuggcuauuuaaaacu

SEQ ID NO: 2529488 - RNA, 14 nt, Human
cauuggcuauuuaa

SEQ ID NO: 2529489 - RNA, 22 nt, Human
cauuggcucuugaacugagcuu

SEQ ID NO: 2529490 - RNA, 16 nt, Human
cauuuauucugcucac

SEQ ID NO: 2529491 - RNA, 23 nt, Human
cauugggcagcgcccuuccucuc

SEQ ID NO: 2529492 - RNA, 22 nt, Human
cauugggcagcgcccuuccucu

SEQ ID NO: 2529493 - RNA, 20 nt, Human
cauugggcagcgcccuuccu

SEQ ID NO: 2529494 - RNA, 19 nt, Human
cauugggcagcgcccuucc

SEQ ID NO: 2529495 - RNA, 23 nt, Human
cauugggaaggggacccccgccc

SEQ ID NO: 2529496 - RNA, 22 nt, Human
caugcaaggucauuuuuuuuaa

SEQ ID NO: 2529497 - RNA, 19 nt, Human
caugcugagucucccaagg

SEQ ID NO: 2529498 - RNA, 17 nt, Human
caugcugagucucccaa

SEQ ID NO: 2529499 - RNA, 15 nt, Human
caugcugagucuccc

SEQ ID NO: 2529500 - RNA, 14 nt, Human
caugcugagucucc

SEQ ID NO: 2529501 - RNA, 19 nt, Human
caugcugaggccugggccg

SEQ ID NO: 2529502 - RNA, 18 nt, Human
caugcugaggccugggcc

SEQ ID NO: 2529503 - RNA, 17 nt, Human
caugcugaggccugggc

SEQ ID NO: 2529504 - RNA, 16 nt, Human
caugcugaggccuggg

SEQ ID NO: 2529505 - RNA, 15 nt, Human
caugcugaggccugg

SEQ ID NO: 2529506 - RNA, 16 nt, Human
caugcaaugacaucuu

SEQ ID NO: 2529507 - RNA, 17 nt, Human
caugcaaggucauuuuu

SEQ ID NO: 2529508 - RNA, 18 nt, Human
caugcaaggucauuuuuu

SEQ ID NO: 2529509 - RNA, 18 nt, Human
caugauucauuuuaacau

SEQ ID NO: 2529510 - RNA, 14 nt, Human
caugauuccuuccu

SEQ ID NO: 2529511 - RNA, 16 nt, Human
caugauuccuuccugu

SEQ ID NO: 2529512 - RNA, 19 nt, Human
caugauuccuuccuguucu

SEQ ID NO: 2529513 - RNA, 14 nt, Human
caugauucuauuua

SEQ ID NO: 2529514 - RNA, 21 nt, Human
caugauucgcccaaagccaga

SEQ ID NO: 2529515 - RNA, 21 nt, Human
caugcugagucucccaaggcu

SEQ ID NO: 2529516 - RNA, 18 nt, Human
caugcugcccugugagua

SEQ ID NO: 2529517 - RNA, 16 nt, Human
caugcugcccugugag

SEQ ID NO: 2529518 - RNA, 19 nt, Human
cauggccuuugcuugaaag

SEQ ID NO: 2529519 - RNA, 22 nt, Human
cauggccuuugcuugaaagaaa

SEQ ID NO: 2529520 - RNA, 12 nt, Human
caugcugccucc

SEQ ID NO: 2529521 - RNA, 20 nt, Human
caugcugagucucccaaggc

SEQ ID NO: 2529522 - RNA, 19 nt, Human
caugcugcuggacaguauc

SEQ ID NO: 2529523 - RNA, 14 nt, Human
caugcugccuccag

SEQ ID NO: 2529524 - RNA, 16 nt, Human
caugaauuaguuuuau

SEQ ID NO: 2529525 - RNA, 20 nt, Human
caugaauucuuaugcuuaua

SEQ ID NO: 2529526 - RNA, 19 nt, Human
caugacaagccccaggcag

SEQ ID NO: 2529527 - RNA, 14 nt, Human
caugacacgaauau

SEQ ID NO: 2529528 - RNA, 14 nt, Human
caugaauuugugaa

SEQ ID NO: 2529529 - RNA, 18 nt, Human
caugaauucuuaugcuua

SEQ ID NO: 2529530 - RNA, 13 nt, Human
caugaauguauca

SEQ ID NO: 2529531 - RNA, 17 nt, Human
caugaauguaucaggaa

SEQ ID NO: 2529532 - RNA, 18 nt, Human
caugaauguaucaggaaa

SEQ ID NO: 2529533 - RNA, 17 nt, Human
caugacccaggcugggc

SEQ ID NO: 2529534 - RNA, 16 nt, Human
caugacccaggcuggg

SEQ ID NO: 2529535 - RNA, 15 nt, Human
caugacccaggcugg

SEQ ID NO: 2529536 - RNA, 13 nt, Human
caugacccaggcu

SEQ ID NO: 2529537 - RNA, 19 nt, Human
caugacccaccccugugcu

SEQ ID NO: 2529538 - RNA, 18 nt, Human
caugacccaccccugugc

SEQ ID NO: 2529539 - RNA, 17 nt, Human
caugacccaccccugug

SEQ ID NO: 2529540 - RNA, 16 nt, Human
caugacccaccccugu

SEQ ID NO: 2529541 - RNA, 15 nt, Human
caugacccaccccug

SEQ ID NO: 2529542 - RNA, 14 nt, Human
caugacccaccccu

SEQ ID NO: 2529543 - RNA, 13 nt, Human
caugacccacccc

SEQ ID NO: 2529544 - RNA, 12 nt, Human
caugacccaccc

SEQ ID NO: 2529545 - RNA, 18 nt, Human
caugaccauacugaggga

SEQ ID NO: 2529546 - RNA, 16 nt, Human
caugauucaugccaau

SEQ ID NO: 2529547 - RNA, 21 nt, Human
caugauucaugccaauuagca

SEQ ID NO: 2529548 - RNA, 13 nt, Human
caugauucauuuu

SEQ ID NO: 2529549 - RNA, 14 nt, Human
caugauucauuuua

SEQ ID NO: 2529550 - RNA, 19 nt, Human
caugacccaggcugggcaa

SEQ ID NO: 2529551 - RNA, 18 nt, Human
caugaccuaguuuuccau

SEQ ID NO: 2529552 - RNA, 12 nt, Human
caugauuagcaa

SEQ ID NO: 2529553 - RNA, 18 nt, Human
caugacacgaauauugcu

SEQ ID NO: 2529554 - RNA, 17 nt, Human
caugacacgaauauugc

SEQ ID NO: 2529555 - RNA, 23 nt, Human
caugacacagcuuuaucaccaga

SEQ ID NO: 2529556 - RNA, 16 nt, Human
caugacauguuauaua

SEQ ID NO: 2529557 - RNA, 22 nt, Human
caugacacagcuuuaucaccag

SEQ ID NO: 2529558 - RNA, 12 nt, Human
caugacacagcu

SEQ ID NO: 2529559 - RNA, 20 nt, Human
caugacaagccccaggcagg

SEQ ID NO: 2529560 - RNA, 23 nt, Human
caugacauuccuaaacuaucuuu

SEQ ID NO: 2529561 - RNA, 19 nt, Human
caugacauguuauauauuu

SEQ ID NO: 2529562 - RNA, 17 nt, Human
caugacauguuauauau

SEQ ID NO: 2529563 - RNA, 17 nt, Human
caugaccacauagcaug

SEQ ID NO: 2529564 - RNA, 13 nt, Human
caugacauuucuu

SEQ ID NO: 2529565 - RNA, 23 nt, Human
caucaggccaggcccucugccca

SEQ ID NO: 2529566 - RNA, 22 nt, Human
caucaggccaggcccucugccc

SEQ ID NO: 2529567 - RNA, 21 nt, Human
caucaggccaggcccucugcc

SEQ ID NO: 2529568 - RNA, 20 nt, Human
caucaggccaggcccucugc

SEQ ID NO: 2529569 - RNA, 14 nt, Human
caucccagccccaa

SEQ ID NO: 2529570 - RNA, 13 nt, Human
caucccagcccca

SEQ ID NO: 2529571 - RNA, 16 nt, Human
caucccagccccaaug

SEQ ID NO: 2529572 - RNA, 16 nt, Human
caucccauugcccugg

SEQ ID NO: 2529573 - RNA, 16 nt, Human
cauccccacccuugga

SEQ ID NO: 2529574 - RNA, 13 nt, Human
caucccauugccc

SEQ ID NO: 2529575 - RNA, 15 nt, Human
caucccauugcccug

SEQ ID NO: 2529576 - RNA, 17 nt, Human
caucccauugcccuggu

SEQ ID NO: 2529577 - RNA, 11 nt, Human
cauccccaggg

SEQ ID NO: 2529578 - RNA, 12 nt, Human
cauccccagggg

SEQ ID NO: 2529579 - RNA, 18 nt, Human
cauccccaggggucccag

SEQ ID NO: 2529580 - RNA, 21 nt, Human
cauccccaggggucccagcca

SEQ ID NO: 2529581 - RNA, 17 nt, Human
caucccauguaacagaa

SEQ ID NO: 2529582 - RNA, 20 nt, Human
caucccaugauguagugccu

SEQ ID NO: 2529583 - RNA, 16 nt, Human
caucccauguaacaga

SEQ ID NO: 2529584 - RNA, 15 nt, Human
caucccauguauuua

SEQ ID NO: 2529585 - RNA, 19 nt, Human
caucccauguaacagaaag

SEQ ID NO: 2529586 - RNA, 12 nt, Human
caucccauugcc

SEQ ID NO: 2529587 - RNA, 18 nt, Human
caucccaugauguagugc

SEQ ID NO: 2529588 - RNA, 17 nt, Human
caucccaugaacacacu

SEQ ID NO: 2529589 - RNA, 19 nt, Human
caucaggaugaacccagga

SEQ ID NO: 2529590 - RNA, 17 nt, Human
caucaggaugaacccag

SEQ ID NO: 2529591 - RNA, 23 nt, Human
cauccuggccuggcacaucagaa

SEQ ID NO: 2529592 - RNA, 14 nt, Human
cauccuggccuggc

SEQ ID NO: 2529593 - RNA, 19 nt, Human
cauccuggcccaucagugu

SEQ ID NO: 2529594 - RNA, 16 nt, Human
cauccuggcccaucag

SEQ ID NO: 2529595 - RNA, 15 nt, Human
cauccuggcccauca

SEQ ID NO: 2529596 - RNA, 12 nt, Human
cauccugugaag

SEQ ID NO: 2529597 - RNA, 20 nt, Human
cauccugucccaccaugcag

SEQ ID NO: 2529598 - RNA, 18 nt, Human
cauccugucccaccaugc

SEQ ID NO: 2529599 - RNA, 15 nt, Human
cauccugucccacca

SEQ ID NO: 2529600 - RNA, 21 nt, Human
cauccuggccuggcacaucag

SEQ ID NO: 2529601 - RNA, 18 nt, Human
cauccuggccuggcacau

SEQ ID NO: 2529602 - RNA, 14 nt, Human
cauccuggcccauc

SEQ ID NO: 2529603 - RNA, 13 nt, Human
cauccuggcccau

SEQ ID NO: 2529604 - RNA, 11 nt, Human
cauccuggccc

SEQ ID NO: 2529605 - RNA, 12 nt, Human
cauccuggccca

SEQ ID NO: 2529606 - RNA, 17 nt, Human
cauccccauccuccagc

SEQ ID NO: 2529607 - RNA, 16 nt, Human
cauccccauccuccag

SEQ ID NO: 2529608 - RNA, 15 nt, Human
cauccccauccucca

SEQ ID NO: 2529609 - RNA, 14 nt, Human
cauccccacucacg

SEQ ID NO: 2529610 - RNA, 23 nt, Human
cauccuggcacccggccccugcu

SEQ ID NO: 2529611 - RNA, 17 nt, Human
caucagcacgauuucug

SEQ ID NO: 2529612 - RNA, 18 nt, Human
caucagcacgauuucugu

SEQ ID NO: 2529613 - RNA, 14 nt, Human
caucagacagaugg

SEQ ID NO: 2529614 - RNA, 23 nt, Human
caucagaaggagaaggaaggaga

SEQ ID NO: 2529615 - RNA, 15 nt, Human
caucagaaggagaag

SEQ ID NO: 2529616 - RNA, 14 nt, Human
caucagaaggagaa

SEQ ID NO: 2529617 - RNA, 17 nt, Human
caucagcugcugaaaca

SEQ ID NO: 2529618 - RNA, 18 nt, Human
caucagcugcugaaacaa

SEQ ID NO: 2529619 - RNA, 15 nt, Human
caucagcugcugaaa

SEQ ID NO: 2529620 - RNA, 13 nt, Human
caucaggccaggc

SEQ ID NO: 2529621 - RNA, 13 nt, Human
caucaggaugaac

SEQ ID NO: 2529622 - RNA, 22 nt, Human
caucaggagaaaaagccuccag

SEQ ID NO: 2529623 - RNA, 19 nt, Human
caucaggagaaaaagccuc

SEQ ID NO: 2529624 - RNA, 15 nt, Human
caucaggacucuugu

SEQ ID NO: 2529625 - RNA, 13 nt, Human
caucaggacucuu

SEQ ID NO: 2529626 - RNA, 23 nt, Human
caucagcuguaagaagagacugg

SEQ ID NO: 2529627 - RNA, 23 nt, Human
caucagcuuaggggcugcugacc

SEQ ID NO: 2529628 - RNA, 20 nt, Human
caucagcuugcccuguuaaa

SEQ ID NO: 2529629 - RNA, 17 nt, Human
caucagcuguaagaaga

SEQ ID NO: 2529630 - RNA, 19 nt, Human
caucagcuguaagaagaga

SEQ ID NO: 2529631 - RNA, 16 nt, Human
caucagagcaaauuug

SEQ ID NO: 2529632 - RNA, 17 nt, Human
caucagagcaaauuugg

SEQ ID NO: 2529633 - RNA, 11 nt, Human
caucugugaau

SEQ ID NO: 2529634 - RNA, 15 nt, Human
caucuuaagagaugc

SEQ ID NO: 2529635 - RNA, 13 nt, Human
caucuuacugaag

SEQ ID NO: 2529636 - RNA, 21 nt, Human
caucuuagguuggcaaaaagg

SEQ ID NO: 2529637 - RNA, 22 nt, Human
caucuuagguuggcaaaaaggc

SEQ ID NO: 2529638 - RNA, 14 nt, Human
caucuuacugaagg

SEQ ID NO: 2529639 - RNA, 15 nt, Human
caucuuacugaaggu

SEQ ID NO: 2529640 - RNA, 22 nt, Human
caucuuacuguaccuguuccuu

SEQ ID NO: 2529641 - RNA, 23 nt, Human
caucuuagagcaaagagccagca

SEQ ID NO: 2529642 - RNA, 19 nt, Human
caucugugaaaggaaagag

SEQ ID NO: 2529643 - RNA, 18 nt, Human
caucugugaaaggaaaga

SEQ ID NO: 2529644 - RNA, 15 nt, Human
caucgaauguguaca

SEQ ID NO: 2529645 - RNA, 13 nt, Human
caucgaaugugua

SEQ ID NO: 2529646 - RNA, 16 nt, Human
caucugucccuccggg

SEQ ID NO: 2529647 - RNA, 17 nt, Human
caucugucccuccggga

SEQ ID NO: 2529648 - RNA, 18 nt, Human
caucugucccuccgggac

SEQ ID NO: 2529649 - RNA, 12 nt, Human
caucuguccuca

SEQ ID NO: 2529650 - RNA, 20 nt, Human
caucugucccuccgggaccu

SEQ ID NO: 2529651 - RNA, 17 nt, Human
caucugucccugccuca

SEQ ID NO: 2529652 - RNA, 12 nt, Human
caucgcaaugua

SEQ ID NO: 2529653 - RNA, 21 nt, Human
caucgaaucuacuaauuccac

SEQ ID NO: 2529654 - RNA, 19 nt, Human
cauccuuuucugcagaggg

SEQ ID NO: 2529655 - RNA, 19 nt, Human
cauccuuucugccucucaa

SEQ ID NO: 2529656 - RNA, 18 nt, Human
cauccuuucugccucuca

SEQ ID NO: 2529657 - RNA, 16 nt, Human
cauccuuucugccucu

SEQ ID NO: 2529658 - RNA, 14 nt, Human
cauccuuuccagca

SEQ ID NO: 2529659 - RNA, 16 nt, Human
cauccuuugcacuguc

SEQ ID NO: 2529660 - RNA, 17 nt, Human
cauccuuuucugcagag

SEQ ID NO: 2529661 - RNA, 14 nt, Human
cauccuugagucaa

SEQ ID NO: 2529662 - RNA, 15 nt, Human
cauccuucugccuuu

SEQ ID NO: 2529663 - RNA, 12 nt, Human
cauccuucugcc

SEQ ID NO: 2529664 - RNA, 18 nt, Human
caguauuuuggagaaauu

SEQ ID NO: 2529665 - RNA, 17 nt, Human
caguauuuuggagaaau

SEQ ID NO: 2529666 - RNA, 18 nt, Human
cagucaccccggccaccu

SEQ ID NO: 2529667 - RNA, 21 nt, Human
caguuuaauccuucuaguuuc

SEQ ID NO: 2529668 - RNA, 16 nt, Human
caguuuaauccuucua

SEQ ID NO: 2529669 - RNA, 13 nt, Human
caguuuaucauuc

SEQ ID NO: 2529670 - RNA, 21 nt, Human
caguuugcagaaaagcaccug

SEQ ID NO: 2529671 - RNA, 22 nt, Human
caguuugcagaaaagcaccugc

SEQ ID NO: 2529672 - RNA, 23 nt, Human
caguuugcagaaaagcaccugcc

SEQ ID NO: 2529673 - RNA, 21 nt, Human
caguuugcuuuguaugcacuu

SEQ ID NO: 2529674 - RNA, 14 nt, Human
caguuugcuuugua

SEQ ID NO: 2529675 - RNA, 19 nt, Human
caguuugcuguacuagaga

SEQ ID NO: 2529676 - RNA, 12 nt, Human
caguuugcugua

SEQ ID NO: 2529677 - RNA, 12 nt, Human
caguuugcuuug

SEQ ID NO: 2529678 - RNA, 17 nt, Human
caguuuggcaaacucuc

SEQ ID NO: 2529679 - RNA, 13 nt, Human
caguuuguauaua

SEQ ID NO: 2529680 - RNA, 21 nt, Human
caguuuguacagacguaugcu

SEQ ID NO: 2529681 - RNA, 19 nt, Human
cauaaucuggacuccucug

SEQ ID NO: 2529682 - RNA, 16 nt, Human
caguuugugugucuua

SEQ ID NO: 2529683 - RNA, 15 nt, Human
caguuugugugucuu

SEQ ID NO: 2529684 - RNA, 16 nt, Human
caguuugucacaugaa

SEQ ID NO: 2529685 - RNA, 14 nt, Human
caguuuguauauac

SEQ ID NO: 2529686 - RNA, 13 nt, Human
caguuugucagac

SEQ ID NO: 2529687 - RNA, 23 nt, Human
caguuugugugucuuaauuauua

SEQ ID NO: 2529688 - RNA, 21 nt, Human
caguuugugugucuuaauuau

SEQ ID NO: 2529689 - RNA, 20 nt, Human
cauaaucuggacuccucugu

SEQ ID NO: 2529690 - RNA, 22 nt, Human
cauaaucuggacuccucugucc

SEQ ID NO: 2529691 - RNA, 21 nt, Human
cauaaucuggacuccucuguc

SEQ ID NO: 2529692 - RNA, 14 nt, Human
cauaaugcgugcau

SEQ ID NO: 2529693 - RNA, 17 nt, Human
cauaaugcgugcauacc

SEQ ID NO: 2529694 - RNA, 18 nt, Human
cauaaucuguacaaugaa

SEQ ID NO: 2529695 - RNA, 21 nt, Human
cauaaucuucugccuucucau

SEQ ID NO: 2529696 - RNA, 22 nt, Human
cauaaucuucugccuucucaug

SEQ ID NO: 2529697 - RNA, 13 nt, Human
cauaaucuucugc

SEQ ID NO: 2529698 - RNA, 15 nt, Human
cauaaucuucugccu

SEQ ID NO: 2529699 - RNA, 23 nt, Human
cauaaucuggacuccucugucca

SEQ ID NO: 2529700 - RNA, 14 nt, Human
caguuguuggccuc

SEQ ID NO: 2529701 - RNA, 15 nt, Human
caguuguuggccucc

SEQ ID NO: 2529702 - RNA, 20 nt, Human
caguuguuggccuccggccu

SEQ ID NO: 2529703 - RNA, 13 nt, Human
caguuguuugaug

SEQ ID NO: 2529704 - RNA, 14 nt, Human
caguuguuuucccg

SEQ ID NO: 2529705 - RNA, 13 nt, Human
caguuguuuuccc

SEQ ID NO: 2529706 - RNA, 16 nt, Human
caguuuaaaaaaauug

SEQ ID NO: 2529707 - RNA, 18 nt, Human
caguuuaaaaaaauuggu

SEQ ID NO: 2529708 - RNA, 20 nt, Human
caguuuaaccugaugcaguc

SEQ ID NO: 2529709 - RNA, 20 nt, Human
cauauuaccacagacauacu

SEQ ID NO: 2529710 - RNA, 21 nt, Human
cauauuaccacagacauacua

SEQ ID NO: 2529711 - RNA, 17 nt, Human
cauauuaccacagacau

SEQ ID NO: 2529712 - RNA, 15 nt, Human
cauaggccugggugc

SEQ ID NO: 2529713 - RNA, 17 nt, Human
cauaggccugggugcug

SEQ ID NO: 2529714 - RNA, 18 nt, Human
cauaggccugggugcugg

SEQ ID NO: 2529715 - RNA, 19 nt, Human
cauaggccugggugcuggc

SEQ ID NO: 2529716 - RNA, 17 nt, Human
cauagggucucuucagg

SEQ ID NO: 2529717 - RNA, 23 nt, Human
cauaggaaaaguacauuuaauac

SEQ ID NO: 2529718 - RNA, 22 nt, Human
cauaggaaaaguacauuuaaua

SEQ ID NO: 2529719 - RNA, 19 nt, Human
cauaggaaaaguacauuua

SEQ ID NO: 2529720 - RNA, 18 nt, Human
cauaggaaaaguacauuu

SEQ ID NO: 2529721 - RNA, 24 nt, Human
cauaggaagggaccaaggcaaggc

SEQ ID NO: 2529722 - RNA, 12 nt, Human
cauaggaaaagu

SEQ ID NO: 2529723 - RNA, 21 nt, Human
cauagcuugauaaagggccaa

SEQ ID NO: 2529724 - RNA, 16 nt, Human
cauagcuaucaagugu

SEQ ID NO: 2529725 - RNA, 21 nt, Human
cauagcuaagaaauaaaacug

SEQ ID NO: 2529726 - RNA, 22 nt, Human
cauagcuaagaaauaaaacugu

SEQ ID NO: 2529727 - RNA, 18 nt, Human
cauaggaccuuuccacca

SEQ ID NO: 2529728 - RNA, 16 nt, Human
cauaggaccuuuccac

SEQ ID NO: 2529729 - RNA, 23 nt, Human
cauaggacucaaaguuucagaga

SEQ ID NO: 2529730 - RNA, 17 nt, Human
cauaggaggcuucuguu

SEQ ID NO: 2529731 - RNA, 13 nt, Human
cauaggcccagug

SEQ ID NO: 2529732 - RNA, 14 nt, Human
cauaggccugggug

SEQ ID NO: 2529733 - RNA, 15 nt, Human
cauagggucucuuca

SEQ ID NO: 2529734 - RNA, 18 nt, Human
cauagcccagacacagaa

SEQ ID NO: 2529735 - RNA, 16 nt, Human
cauagcccagacacag

SEQ ID NO: 2529736 - RNA, 11 nt, Human
cauagcccagu

SEQ ID NO: 2529737 - RNA, 15 nt, Human
cauagccaggaaacu

SEQ ID NO: 2529738 - RNA, 16 nt, Human
cauagcccaucccugc

SEQ ID NO: 2529739 - RNA, 13 nt, Human
cauagcccauccc

SEQ ID NO: 2529740 - RNA, 15 nt, Human
cauagcccaguagac

SEQ ID NO: 2529741 - RNA, 12 nt, Human
cauagcccucac

SEQ ID NO: 2529742 - RNA, 15 nt, Human
cauagcccucacccu

SEQ ID NO: 2529743 - RNA, 19 nt, Human
cauagcccucacccugggg

SEQ ID NO: 2529744 - RNA, 18 nt, Human
cauagcccaucccugccu

SEQ ID NO: 2529745 - RNA, 17 nt, Human
cauagcccaucccugcc

SEQ ID NO: 2529746 - RNA, 23 nt, Human
cauagcccaucccugccugguca

SEQ ID NO: 2529747 - RNA, 18 nt, Human
cauagccuaaucccuggg

SEQ ID NO: 2529748 - RNA, 15 nt, Human
cauagccuauauuua

SEQ ID NO: 2529749 - RNA, 13 nt, Human
cauagccuauauu

SEQ ID NO: 2529750 - RNA, 12 nt, Human
cauagccuauau

SEQ ID NO: 2529751 - RNA, 19 nt, Human
cauagccuaaucccugggc

SEQ ID NO: 2529752 - RNA, 15 nt, Human
cauagccaccccaga

SEQ ID NO: 2529753 - RNA, 15 nt, Human
cauagcauuaacuaa

SEQ ID NO: 2529754 - RNA, 16 nt, Human
cauagcauuaacuaau

SEQ ID NO: 2529755 - RNA, 23 nt, Human
cauagcauuaacuaaucuauugg

SEQ ID NO: 2529756 - RNA, 21 nt, Human
cauagcauagcuagagauugg

SEQ ID NO: 2529757 - RNA, 15 nt, Human
cauagaugcagguga

SEQ ID NO: 2529758 - RNA, 15 nt, Human
cauagcaugacauuu

SEQ ID NO: 2529759 - RNA, 17 nt, Human
cauagcaugacauuucu

SEQ ID NO: 2529760 - RNA, 18 nt, Human
cauagcaugacauuucuu

SEQ ID NO: 2529761 - RNA, 11 nt, Human
cauagcauuaa

SEQ ID NO: 2529762 - RNA, 20 nt, Human
cauagcagcuuauucacaag

SEQ ID NO: 2529763 - RNA, 18 nt, Human
cauagauugagaaguuuu

SEQ ID NO: 2529764 - RNA, 17 nt, Human
cauagauucccugagca

SEQ ID NO: 2529765 - RNA, 18 nt, Human
cauagauucccugagcag

SEQ ID NO: 2529766 - RNA, 14 nt, Human
cauacacacacaca

SEQ ID NO: 2529767 - RNA, 15 nt, Human
cauacacacacacac

SEQ ID NO: 2529768 - RNA, 16 nt, Human
cauacacacacacaca

SEQ ID NO: 2529769 - RNA, 19 nt, Human
cauacacacacacacacag

SEQ ID NO: 2529770 - RNA, 20 nt, Human
cauacacacacacacacagc

SEQ ID NO: 2529771 - RNA, 23 nt, Human
cauagaugucccuuucuuggcca

SEQ ID NO: 2529772 - RNA, 21 nt, Human
cauaaugcgugcauaccacuu

SEQ ID NO: 2529773 - RNA, 20 nt, Human
cauaauuuucuucaugcaau

SEQ ID NO: 2529774 - RNA, 14 nt, Human
cauaauuuucuuca

SEQ ID NO: 2529775 - RNA, 15 nt, Human
cauacaauuccaaac

SEQ ID NO: 2529776 - RNA, 13 nt, Human
cauacaaggccca

SEQ ID NO: 2529777 - RNA, 12 nt, Human
cauacacacaca

SEQ ID NO: 2529778 - RNA, 21 nt, Human
cagagguuaucugucccaggu

SEQ ID NO: 2529779 - RNA, 19 nt, Human
cagagguuaucugucccag

SEQ ID NO: 2529780 - RNA, 18 nt, Human
cagagguuaucuguccca

SEQ ID NO: 2529781 - RNA, 23 nt, Human
cagauacaggaaaagcugcugac

SEQ ID NO: 2529782 - RNA, 23 nt, Human
cagaggugggcaggugguggcac

SEQ ID NO: 2529783 - RNA, 22 nt, Human
cagaggugggcaggugguggca

SEQ ID NO: 2529784 - RNA, 20 nt, Human
cagaggugggcagguggugg

SEQ ID NO: 2529785 - RNA, 17 nt, Human
cagaggugggcaggugg

SEQ ID NO: 2529786 - RNA, 16 nt, Human
cagaggugggcaggug

SEQ ID NO: 2529787 - RNA, 15 nt, Human
cagaggugggcaggu

SEQ ID NO: 2529788 - RNA, 14 nt, Human
cagaggugggcagg

SEQ ID NO: 2529789 - RNA, 13 nt, Human
cagaggugggcag

SEQ ID NO: 2529790 - RNA, 17 nt, Human
cagagguggccagagcu

SEQ ID NO: 2529791 - RNA, 14 nt, Human
cagagguggccaga

SEQ ID NO: 2529792 - RNA, 16 nt, Human
cagaggucugugcuga

SEQ ID NO: 2529793 - RNA, 21 nt, Human
cagagguggccagagcuggga

SEQ ID NO: 2529794 - RNA, 19 nt, Human
cagagguggccagagcugg

SEQ ID NO: 2529795 - RNA, 12 nt, Human
cagaggugggca

SEQ ID NO: 2529796 - RNA, 17 nt, Human
cagagcuggcucugagc

SEQ ID NO: 2529797 - RNA, 13 nt, Human
cagagcuggcucu

SEQ ID NO: 2529798 - RNA, 18 nt, Human
cagagcuggcucugagcg

SEQ ID NO: 2529799 - RNA, 10 nt, Human
cagagcuggg

SEQ ID NO: 2529800 - RNA, 15 nt, Human
cagaggucugugcug

SEQ ID NO: 2529801 - RNA, 14 nt, Human
cagaggucugugcu

SEQ ID NO: 2529802 - RNA, 23 nt, Human
cagaggucucugccggcucuuuc

SEQ ID NO: 2529803 - RNA, 20 nt, Human
cagaggucucugccggcucu

SEQ ID NO: 2529804 - RNA, 19 nt, Human
cagaggucucugccggcuc

SEQ ID NO: 2529805 - RNA, 20 nt, Human
cagagcugggaggcauggcc

SEQ ID NO: 2529806 - RNA, 15 nt, Human
cagaggucucugccg

SEQ ID NO: 2529807 - RNA, 23 nt, Human
cagagcugggaggcauggcccug

SEQ ID NO: 2529808 - RNA, 15 nt, Human
cagagcugggaggca

SEQ ID NO: 2529809 - RNA, 14 nt, Human
cagagcugggaggc

SEQ ID NO: 2529810 - RNA, 13 nt, Human
cagagcugggagg

SEQ ID NO: 2529811 - RNA, 22 nt, Human
cagaucauugugaaauuauuca

SEQ ID NO: 2529812 - RNA, 23 nt, Human
cagaucauuaucagccugugcca

SEQ ID NO: 2529813 - RNA, 12 nt, Human
cagauccagccu

SEQ ID NO: 2529814 - RNA, 19 nt, Human
cagaucauuucaaaacuca

SEQ ID NO: 2529815 - RNA, 13 nt, Human
cagauccagccug

SEQ ID NO: 2529816 - RNA, 14 nt, Human
cagauccagccugg

SEQ ID NO: 2529817 - RNA, 15 nt, Human
cagauccagccuggg

SEQ ID NO: 2529818 - RNA, 17 nt, Human
cagauccagccuggggu

SEQ ID NO: 2529819 - RNA, 22 nt, Human
cagauacuggaaguuuugcauu

SEQ ID NO: 2529820 - RNA, 15 nt, Human
cagauaccucacccu

SEQ ID NO: 2529821 - RNA, 16 nt, Human
cagauaccagccccug

SEQ ID NO: 2529822 - RNA, 17 nt, Human
cagauacauaugagugu

SEQ ID NO: 2529823 - RNA, 14 nt, Human
cagauaccagcccc

SEQ ID NO: 2529824 - RNA, 17 nt, Human
cagauacaugguuguga

SEQ ID NO: 2529825 - RNA, 16 nt, Human
cagaucauugugaaau

SEQ ID NO: 2529826 - RNA, 18 nt, Human
cagauacuggaaguuuug

SEQ ID NO: 2529827 - RNA, 21 nt, Human
cagauacuggaaguuuugcau

SEQ ID NO: 2529828 - RNA, 20 nt, Human
cagagacuccugcaggcagc

SEQ ID NO: 2529829 - RNA, 22 nt, Human
cagagacuccugcaggcagcca

SEQ ID NO: 2529830 - RNA, 21 nt, Human
cagagacuccugcaggcagcc

SEQ ID NO: 2529831 - RNA, 24 nt, Human
cagagagagaagugccccugcugc

SEQ ID NO: 2529832 - RNA, 22 nt, Human
cagagagaggggagaagccugg

SEQ ID NO: 2529833 - RNA, 20 nt, Human
cagagagcaacucugagauc

SEQ ID NO: 2529834 - RNA, 12 nt, Human
cagagagagugu

SEQ ID NO: 2529835 - RNA, 20 nt, Human
cagagagccauuuugugaau

SEQ ID NO: 2529836 - RNA, 19 nt, Human
cagagagccauuuugugaa

SEQ ID NO: 2529837 - RNA, 18 nt, Human
cagagagccauuuuguga

SEQ ID NO: 2529838 - RNA, 15 nt, Human
cagagagccauuuug

SEQ ID NO: 2529839 - RNA, 23 nt, Human
cagagagccauuuugugaaugga

SEQ ID NO: 2529840 - RNA, 21 nt, Human
cagagagccauuuugugaaug

SEQ ID NO: 2529841 - RNA, 19 nt, Human
cagagagccuggugcugcu

SEQ ID NO: 2529842 - RNA, 21 nt, Human
cagagagcggucucaggcugg

SEQ ID NO: 2529843 - RNA, 18 nt, Human
cagagagcggucucaggc

SEQ ID NO: 2529844 - RNA, 20 nt, Human
cagagagccuggugcugcug

SEQ ID NO: 2529845 - RNA, 22 nt, Human
cagagagcggucucaggcuggu

SEQ ID NO: 2529846 - RNA, 12 nt, Human
cagagagcuggu

SEQ ID NO: 2529847 - RNA, 19 nt, Human
cagagagcugguaguuagu

SEQ ID NO: 2529848 - RNA, 13 nt, Human
cagagagcuggua

SEQ ID NO: 2529849 - RNA, 13 nt, Human
cagagaggaauca

SEQ ID NO: 2529850 - RNA, 15 nt, Human
cagagaggaaucaga

SEQ ID NO: 2529851 - RNA, 17 nt, Human
cagagaggacgugggcg

SEQ ID NO: 2529852 - RNA, 16 nt, Human
cagagaggacgugggc

SEQ ID NO: 2529853 - RNA, 22 nt, Human
cagagagggugggagugggccc

SEQ ID NO: 2529854 - RNA, 20 nt, Human
cagagagggugggagugggc

SEQ ID NO: 2529855 - RNA, 14 nt, Human
cagagccugcaguu

SEQ ID NO: 2529856 - RNA, 16 nt, Human
cagagagggugggagu

SEQ ID NO: 2529857 - RNA, 18 nt, Human
cagagaggccaggugcag

SEQ ID NO: 2529858 - RNA, 16 nt, Human
cagagaggccaggugc

SEQ ID NO: 2529859 - RNA, 20 nt, Human
cagagaggccuuuuggaaug

SEQ ID NO: 2529860 - RNA, 13 nt, Human
cagagaggguggg

SEQ ID NO: 2529861 - RNA, 13 nt, Human
cagagaggagaaa

SEQ ID NO: 2529862 - RNA, 16 nt, Human
cagagaggagaaacac

SEQ ID NO: 2529863 - RNA, 17 nt, Human
cagagaggagaaacaca

SEQ ID NO: 2529864 - RNA, 18 nt, Human
cagagaggagaaacacau

SEQ ID NO: 2529865 - RNA, 21 nt, Human
cagagaggagaaacacaucuu

SEQ ID NO: 2529866 - RNA, 22 nt, Human
cagagaggagaaacacaucuuc

SEQ ID NO: 2529867 - RNA, 17 nt, Human
cagagaggagucagaga

SEQ ID NO: 2529868 - RNA, 20 nt, Human
cagagaggagucagagagaa

SEQ ID NO: 2529869 - RNA, 20 nt, Human
cagagaggacuguagggagg

SEQ ID NO: 2529870 - RNA, 18 nt, Human
cagagaggacuguaggga

SEQ ID NO: 2529871 - RNA, 21 nt, Human
cagagaggacgugggcggcag

SEQ ID NO: 2529872 - RNA, 18 nt, Human
cagagaggacgugggcgg

SEQ ID NO: 2529873 - RNA, 22 nt, Human
cagagcgccgugaguucucagg

SEQ ID NO: 2529874 - RNA, 21 nt, Human
cagagcgccgugaguucucag

SEQ ID NO: 2529875 - RNA, 20 nt, Human
cagagcgccgugaguucuca

SEQ ID NO: 2529876 - RNA, 19 nt, Human
cagagcgccgugaguucuc

SEQ ID NO: 2529877 - RNA, 19 nt, Human
cagagcgccccucccuagu

SEQ ID NO: 2529878 - RNA, 15 nt, Human
cagagcgccccuccc

SEQ ID NO: 2529879 - RNA, 23 nt, Human
cagagccuucugaggacauucca

SEQ ID NO: 2529880 - RNA, 20 nt, Human
cagagccuuuggaugaccag

SEQ ID NO: 2529881 - RNA, 19 nt, Human
cagagccuuuggaugacca

SEQ ID NO: 2529882 - RNA, 18 nt, Human
cagagccuuuggaugacc

SEQ ID NO: 2529883 - RNA, 16 nt, Human
cagagccuuuggauga

SEQ ID NO: 2529884 - RNA, 20 nt, Human
cagagcgagagucugucuca

SEQ ID NO: 2529885 - RNA, 22 nt, Human
cagagcuacacaggggaaaaga

SEQ ID NO: 2529886 - RNA, 17 nt, Human
cagagcuacacagggga

SEQ ID NO: 2529887 - RNA, 16 nt, Human
cagagcuacuugggcc

SEQ ID NO: 2529888 - RNA, 9 nt, Human
cagagcugg

SEQ ID NO: 2529889 - RNA, 16 nt, Human
cagagcugcgggcugg

SEQ ID NO: 2529890 - RNA, 20 nt, Human
cagagcuacccgcagaguuc

SEQ ID NO: 2529891 - RNA, 23 nt, Human
cagccgccauugccaccaggaga

SEQ ID NO: 2529892 - RNA, 21 nt, Human
cagccgccauugccaccagga

SEQ ID NO: 2529893 - RNA, 22 nt, Human
cagccgccauugccaccaggag

SEQ ID NO: 2529894 - RNA, 17 nt, Human
cagccgccauugccacc

SEQ ID NO: 2529895 - RNA, 18 nt, Human
cagccgccauugccacca

SEQ ID NO: 2529896 - RNA, 19 nt, Human
cagccgccauugccaccag

SEQ ID NO: 2529897 - RNA, 14 nt, Human
cagccucuccccag

SEQ ID NO: 2529898 - RNA, 12 nt, Human
cagccgcuccug

SEQ ID NO: 2529899 - RNA, 23 nt, Human
cagccgccaugcuccuggcccac

SEQ ID NO: 2529900 - RNA, 21 nt, Human
cagcccugucugaaggacacu

SEQ ID NO: 2529901 - RNA, 11 nt, Human
cagcccugugg

SEQ ID NO: 2529902 - RNA, 13 nt, Human
cagcccuuagcag

SEQ ID NO: 2529903 - RNA, 16 nt, Human
cagcccugucagugca

SEQ ID NO: 2529904 - RNA, 18 nt, Human
cagcccugucagugcagc

SEQ ID NO: 2529905 - RNA, 20 nt, Human
cagcccugucagugcagccc

SEQ ID NO: 2529906 - RNA, 21 nt, Human
cagcccugucagugcagcccg

SEQ ID NO: 2529907 - RNA, 23 nt, Human
cagccucuccccagguccagcuc

SEQ ID NO: 2529908 - RNA, 20 nt, Human
cagccucuccccagguccag

SEQ ID NO: 2529909 - RNA, 19 nt, Human
cagccucuccccaggucca

SEQ ID NO: 2529910 - RNA, 16 nt, Human
cagccucuccccaggu

SEQ ID NO: 2529911 - RNA, 18 nt, Human
cagccucucucccagucu

SEQ ID NO: 2529912 - RNA, 16 nt, Human
cagccucucucccagu

SEQ ID NO: 2529913 - RNA, 15 nt, Human
cagccucucucccag

SEQ ID NO: 2529914 - RNA, 19 nt, Human
cagccucuccccugauuac

SEQ ID NO: 2529915 - RNA, 17 nt, Human
cagccucuccccugauu

SEQ ID NO: 2529916 - RNA, 12 nt, Human
cagccucucucc

SEQ ID NO: 2529917 - RNA, 23 nt, Human
cagccugagcgacagugagacuc

SEQ ID NO: 2529918 - RNA, 22 nt, Human
cagccugagucuccugugccca

SEQ ID NO: 2529919 - RNA, 19 nt, Human
cagccugagucuccugugc

SEQ ID NO: 2529920 - RNA, 18 nt, Human
cagccugagucuccugug

SEQ ID NO: 2529921 - RNA, 17 nt, Human
cagccugagucuccugu

SEQ ID NO: 2529922 - RNA, 16 nt, Human
cagccugagucuccug

SEQ ID NO: 2529923 - RNA, 15 nt, Human
cagccugagucuccu

SEQ ID NO: 2529924 - RNA, 14 nt, Human
cagccugagucucc

SEQ ID NO: 2529925 - RNA, 20 nt, Human
cagccugagucuccugugcc

SEQ ID NO: 2529926 - RNA, 18 nt, Human
cagccugcagacucacug

SEQ ID NO: 2529927 - RNA, 22 nt, Human
cagccucucuugguuuccuucc

SEQ ID NO: 2529928 - RNA, 23 nt, Human
cagccucucucccagucuaccca

SEQ ID NO: 2529929 - RNA, 22 nt, Human
cagccucucucccagucuaccc

SEQ ID NO: 2529930 - RNA, 12 nt, Human
cagccugaggcu

SEQ ID NO: 2529931 - RNA, 15 nt, Human
cagccugaggcugag

SEQ ID NO: 2529932 - RNA, 18 nt, Human
cagccugaggcugagacu

SEQ ID NO: 2529933 - RNA, 19 nt, Human
cagccugaggcugagacug

SEQ ID NO: 2529934 - RNA, 10 nt, Human
cagccugagu

SEQ ID NO: 2529935 - RNA, 23 nt, Human
cagccucucuugguuuccuuccu

SEQ ID NO: 2529936 - RNA, 11 nt, Human
cagccugccac

SEQ ID NO: 2529937 - RNA, 12 nt, Human
cagccugccacu

SEQ ID NO: 2529938 - RNA, 16 nt, Human
cagccugccacucagg

SEQ ID NO: 2529939 - RNA, 17 nt, Human
cagccugccacucaggc

SEQ ID NO: 2529940 - RNA, 20 nt, Human
cagcggccccugcauccccu

SEQ ID NO: 2529941 - RNA, 17 nt, Human
cagcggccccuugacuc

SEQ ID NO: 2529942 - RNA, 17 nt, Human
cagccugcccucuucau

SEQ ID NO: 2529943 - RNA, 19 nt, Human
cagccugccuggcaggcug

SEQ ID NO: 2529944 - RNA, 15 nt, Human
cagccugccuggcag

SEQ ID NO: 2529945 - RNA, 22 nt, Human
cagcgggaauggcagcugccac

SEQ ID NO: 2529946 - RNA, 23 nt, Human
cagcgggaauggcagcugccacg

SEQ ID NO: 2529947 - RNA, 19 nt, Human
cagcgugcuuuaaaaaaua

SEQ ID NO: 2529948 - RNA, 17 nt, Human
cagcggcuggaauuggg

SEQ ID NO: 2529949 - RNA, 16 nt, Human
cagcggcuggacuugg

SEQ ID NO: 2529950 - RNA, 18 nt, Human
cagcggcuggacuuggag

SEQ ID NO: 2529951 - RNA, 16 nt, Human
cagcgggaauggcagc

SEQ ID NO: 2529952 - RNA, 17 nt, Human
cagcguugcaugucgug

SEQ ID NO: 2529953 - RNA, 14 nt, Human
cagcguugcauguc

SEQ ID NO: 2529954 - RNA, 13 nt, Human
cagcguugcaugu

SEQ ID NO: 2529955 - RNA, 16 nt, Human
cagcguuucuaugaca

SEQ ID NO: 2529956 - RNA, 14 nt, Human
cagcguuucuauga

SEQ ID NO: 2529957 - RNA, 22 nt, Human
cagccccucccaccacagcagg

SEQ ID NO: 2529958 - RNA, 13 nt, Human
cagccccucccac

SEQ ID NO: 2529959 - RNA, 14 nt, Human
cagccccucccacc

SEQ ID NO: 2529960 - RNA, 15 nt, Human
cagccccucccacca

SEQ ID NO: 2529961 - RNA, 21 nt, Human
cagccccucccaccacagcag

SEQ ID NO: 2529962 - RNA, 12 nt, Human
cagccccuccuc

SEQ ID NO: 2529963 - RNA, 13 nt, Human
cagccccuccucu

SEQ ID NO: 2529964 - RNA, 14 nt, Human
cagccccuccucug

SEQ ID NO: 2529965 - RNA, 15 nt, Human
cagccccuccucugc

SEQ ID NO: 2529966 - RNA, 16 nt, Human
cagccccuccucugcc

SEQ ID NO: 2529967 - RNA, 17 nt, Human
cagccccuccucugcca

SEQ ID NO: 2529968 - RNA, 19 nt, Human
cagccccuccucugccacc

SEQ ID NO: 2529969 - RNA, 20 nt, Human
cagccccuccucugccaccu

SEQ ID NO: 2529970 - RNA, 16 nt, Human
cagccccucuggucgc

SEQ ID NO: 2529971 - RNA, 14 nt, Human
cagccccucugguc

SEQ ID NO: 2529972 - RNA, 13 nt, Human
cagccccucuggu

SEQ ID NO: 2529973 - RNA, 21 nt, Human
cagccccuccucugccaccuc

SEQ ID NO: 2529974 - RNA, 22 nt, Human
cagccccuccucugccaccucc

SEQ ID NO: 2529975 - RNA, 21 nt, Human
cagccccucuggucgcuccug

SEQ ID NO: 2529976 - RNA, 18 nt, Human
cagccccucuggucgcuc

SEQ ID NO: 2529977 - RNA, 22 nt, Human
cagccccucuggucgcuccugc

SEQ ID NO: 2529978 - RNA, 23 nt, Human
cagccccuccucugccaccuccc

SEQ ID NO: 2529979 - RNA, 11 nt, Human
cagccccucuu

SEQ ID NO: 2529980 - RNA, 19 nt, Human
cagccccugauccugugaa

SEQ ID NO: 2529981 - RNA, 14 nt, Human
cagccccugauccu

SEQ ID NO: 2529982 - RNA, 13 nt, Human
cagccccugcaca

SEQ ID NO: 2529983 - RNA, 23 nt, Human
cagccccucuugccccccacccc

SEQ ID NO: 2529984 - RNA, 15 nt, Human
cagccccucuugccc

SEQ ID NO: 2529985 - RNA, 17 nt, Human
cagccccucuugccccc

SEQ ID NO: 2529986 - RNA, 21 nt, Human
cagccccucuugccccccacc

SEQ ID NO: 2529987 - RNA, 22 nt, Human
cagccccucuugccccccaccc

SEQ ID NO: 2529988 - RNA, 22 nt, Human
cagccccugccccagcccaagu

SEQ ID NO: 2529989 - RNA, 19 nt, Human
cagccccugccccagccca

SEQ ID NO: 2529990 - RNA, 17 nt, Human
cagccccugccccagcc

SEQ ID NO: 2529991 - RNA, 15 nt, Human
cagccccugccccag

SEQ ID NO: 2529992 - RNA, 11 nt, Human
cagccccugcc

SEQ ID NO: 2529993 - RNA, 21 nt, Human
cagccccugauccugugaagu

SEQ ID NO: 2529994 - RNA, 20 nt, Human
cagccccugauccugugaag

SEQ ID NO: 2529995 - RNA, 16 nt, Human
cagcccuggucucagc

SEQ ID NO: 2529996 - RNA, 15 nt, Human
cagcccuggucucag

SEQ ID NO: 2529997 - RNA, 13 nt, Human
cagcccuggucuc

SEQ ID NO: 2529998 - RNA, 12 nt, Human
cagcccuggucu

SEQ ID NO: 2529999 - RNA, 19 nt, Human
cagcccuggucucagcagc

SEQ ID NO: 2530000 - RNA, 18 nt, Human
cagcccuggucucagcag

SEQ ID NO: 2530001 - RNA, 12 nt, Human
cagcccugucag

SEQ ID NO: 2530002 - RNA, 24 nt, Human
cagccccuagcccaggagagagaa

SEQ ID NO: 2530003 - RNA, 23 nt, Human
cagccccuagcccaggagagaga

SEQ ID NO: 2530004 - RNA, 22 nt, Human
cagccccuagcccaggagagag

SEQ ID NO: 2530005 - RNA, 17 nt, Human
cagccccuagcccagga

SEQ ID NO: 2530006 - RNA, 16 nt, Human
cagccccuagcccagg

SEQ ID NO: 2530007 - RNA, 15 nt, Human
cagccccuagcccag

SEQ ID NO: 2530008 - RNA, 13 nt, Human
cagccccuagccc

SEQ ID NO: 2530009 - RNA, 12 nt, Human
cagccccuagcc

SEQ ID NO: 2530010 - RNA, 19 nt, Human
cagccccggcccugggcuc

SEQ ID NO: 2530011 - RNA, 17 nt, Human
cagccccggcccugggc

SEQ ID NO: 2530012 - RNA, 16 nt, Human
cagccccggcccuggg

SEQ ID NO: 2530013 - RNA, 15 nt, Human
cagccccggcccugg

SEQ ID NO: 2530014 - RNA, 19 nt, Human
cagccccgugggguuccuc

SEQ ID NO: 2530015 - RNA, 22 nt, Human
cagcccccuuugggcccaggga

SEQ ID NO: 2530016 - RNA, 15 nt, Human
cagcccccuuugggc

SEQ ID NO: 2530017 - RNA, 18 nt, Human
cagccccgccuccaggcc

SEQ ID NO: 2530018 - RNA, 21 nt, Human
cagcccccuuugggcccaggg

SEQ ID NO: 2530019 - RNA, 20 nt, Human
cagcccccuuugggcccagg

SEQ ID NO: 2530020 - RNA, 19 nt, Human
cagcccccuuugggcccag

SEQ ID NO: 2530021 - RNA, 16 nt, Human
cagccccgcgccuccu

SEQ ID NO: 2530022 - RNA, 18 nt, Human
cagccccgcgccuccuuc

SEQ ID NO: 2530023 - RNA, 22 nt, Human
cagccccauucugccugcccag

SEQ ID NO: 2530024 - RNA, 20 nt, Human
cagccccauucugccugccc

SEQ ID NO: 2530025 - RNA, 19 nt, Human
cagccccauucugccugcc

SEQ ID NO: 2530026 - RNA, 24 nt, Human
cagccccauucugccugcccaggc

SEQ ID NO: 2530027 - RNA, 23 nt, Human
cagccccauucugccugcccagg

SEQ ID NO: 2530028 - RNA, 20 nt, Human
cagcccccacagugcugucu

SEQ ID NO: 2530029 - RNA, 19 nt, Human
cagcccccacagugcuguc

SEQ ID NO: 2530030 - RNA, 17 nt, Human
cagcccccacagugcug

SEQ ID NO: 2530031 - RNA, 13 nt, Human
cagcccccacagu

SEQ ID NO: 2530032 - RNA, 21 nt, Human
cagcccccacugccuuugacc

SEQ ID NO: 2530033 - RNA, 21 nt, Human
cagcccccacagugcugucug

SEQ ID NO: 2530034 - RNA, 23 nt, Human
cagcaguuccggauuggcuugug

SEQ ID NO: 2530035 - RNA, 20 nt, Human
cagcacuggcucucuccagg

SEQ ID NO: 2530036 - RNA, 19 nt, Human
cagcacuggcucucuccag

SEQ ID NO: 2530037 - RNA, 17 nt, Human
cagcauagaaguaacuu

SEQ ID NO: 2530038 - RNA, 18 nt, Human
cagcacuggcucucucca

SEQ ID NO: 2530039 - RNA, 17 nt, Human
cagcacuggcucucucc

SEQ ID NO: 2530040 - RNA, 16 nt, Human
cagcacuggcucucuc

SEQ ID NO: 2530041 - RNA, 14 nt, Human
cagcacuggcucuc

SEQ ID NO: 2530042 - RNA, 17 nt, Human
cagcauauucaggaagc

SEQ ID NO: 2530043 - RNA, 16 nt, Human
cagcauauucaggaag

SEQ ID NO: 2530044 - RNA, 18 nt, Human
cagcauauucaggaagcu

SEQ ID NO: 2530045 - RNA, 20 nt, Human
cagcauaugggggccuggau

SEQ ID NO: 2530046 - RNA, 21 nt, Human
cagcacuggcucucuccagga

SEQ ID NO: 2530047 - RNA, 19 nt, Human
cagcauagcaagacacauc

SEQ ID NO: 2530048 - RNA, 21 nt, Human
cagcacagcuugaccugaggc

SEQ ID NO: 2530049 - RNA, 20 nt, Human
cagcacagcuugaccugagg

SEQ ID NO: 2530050 - RNA, 17 nt, Human
cagcacagcuugaccug

SEQ ID NO: 2530051 - RNA, 16 nt, Human
cagcacagcuugaccu

SEQ ID NO: 2530052 - RNA, 15 nt, Human
cagcacagcuugacc

SEQ ID NO: 2530053 - RNA, 13 nt, Human
cagcacagcuuga

SEQ ID NO: 2530054 - RNA, 18 nt, Human
cagcacagggauccgacu

SEQ ID NO: 2530055 - RNA, 22 nt, Human
cagcacagcuugaccugaggcu

SEQ ID NO: 2530056 - RNA, 13 nt, Human
cagcaccacccua

SEQ ID NO: 2530057 - RNA, 16 nt, Human
cagcacugcuugagga

SEQ ID NO: 2530058 - RNA, 18 nt, Human
cagcacugcuugaggaaa

SEQ ID NO: 2530059 - RNA, 12 nt, Human
cagcacuggcuc

SEQ ID NO: 2530060 - RNA, 19 nt, Human
cagcacugcuugaggaaaa

SEQ ID NO: 2530061 - RNA, 13 nt, Human
cagcacugcccaa

SEQ ID NO: 2530062 - RNA, 14 nt, Human
cagcacugauuuca

SEQ ID NO: 2530063 - RNA, 17 nt, Human
cagcacugaggaagaac

SEQ ID NO: 2530064 - RNA, 15 nt, Human
cagcacugaggaaga

SEQ ID NO: 2530065 - RNA, 13 nt, Human
cagcacugaggaa

SEQ ID NO: 2530066 - RNA, 12 nt, Human
cagcacugagga

SEQ ID NO: 2530067 - RNA, 11 nt, Human
cagcacugagg

SEQ ID NO: 2530068 - RNA, 22 nt, Human
cagcacucacacaggacccccu

SEQ ID NO: 2530069 - RNA, 17 nt, Human
cagcacucacacaggac

SEQ ID NO: 2530070 - RNA, 15 nt, Human
cagcacucacacagg

SEQ ID NO: 2530071 - RNA, 12 nt, Human
cagauugcaugu

SEQ ID NO: 2530072 - RNA, 13 nt, Human
cagauugcaugug

SEQ ID NO: 2530073 - RNA, 15 nt, Human
cagauugcaugugac

SEQ ID NO: 2530074 - RNA, 16 nt, Human
cagauugcaugugacu

SEQ ID NO: 2530075 - RNA, 21 nt, Human
cagauugcaacaggcugggcu

SEQ ID NO: 2530076 - RNA, 18 nt, Human
cagauugcaugugacucu

SEQ ID NO: 2530077 - RNA, 20 nt, Human
cagauugcaugugacucuga

SEQ ID NO: 2530078 - RNA, 23 nt, Human
cagauugcaugugacucugaagc

SEQ ID NO: 2530079 - RNA, 21 nt, Human
cagauugcaugugacucugaa

SEQ ID NO: 2530080 - RNA, 17 nt, Human
cagauuggcucacacug

SEQ ID NO: 2530081 - RNA, 18 nt, Human
cagauuggagaaacccuu

SEQ ID NO: 2530082 - RNA, 18 nt, Human
cagauuucacucuccuug

SEQ ID NO: 2530083 - RNA, 19 nt, Human
cagauuugaacucuucaau

SEQ ID NO: 2530084 - RNA, 16 nt, Human
cagauuucacucuccu

SEQ ID NO: 2530085 - RNA, 15 nt, Human
cagauuucacucucc

SEQ ID NO: 2530086 - RNA, 16 nt, Human
cagauuugagcucagc

SEQ ID NO: 2530087 - RNA, 18 nt, Human
cagauuugggcuggaaca

SEQ ID NO: 2530088 - RNA, 15 nt, Human
cagauuugggcugga

SEQ ID NO: 2530089 - RNA, 14 nt, Human
cagauuugggcugg

SEQ ID NO: 2530090 - RNA, 20 nt, Human
cagauuugcuaauuuauccu

SEQ ID NO: 2530091 - RNA, 13 nt, Human
cagauuugagcuc

SEQ ID NO: 2530092 - RNA, 14 nt, Human
cagauuugagcuca

SEQ ID NO: 2530093 - RNA, 13 nt, Human
cagauuucacucu

SEQ ID NO: 2530094 - RNA, 18 nt, Human
cagauuggcucacacuga

SEQ ID NO: 2530095 - RNA, 16 nt, Human
cagccagcaccuggca

SEQ ID NO: 2530096 - RNA, 14 nt, Human
cagccagcaccugg

SEQ ID NO: 2530097 - RNA, 12 nt, Human
cagccagcagcc

SEQ ID NO: 2530098 - RNA, 11 nt, Human
cagccagcagc

SEQ ID NO: 2530099 - RNA, 15 nt, Human
cagccagcagccagc

SEQ ID NO: 2530100 - RNA, 14 nt, Human
cagccagcagccag

SEQ ID NO: 2530101 - RNA, 23 nt, Human
cagccagcaaugauguccagaag

SEQ ID NO: 2530102 - RNA, 22 nt, Human
cagccagcaaugauguccagaa

SEQ ID NO: 2530103 - RNA, 20 nt, Human
cagccagcaaugauguccag

SEQ ID NO: 2530104 - RNA, 13 nt, Human
cagccagcaauga

SEQ ID NO: 2530105 - RNA, 13 nt, Human
cagccagcaccug

SEQ ID NO: 2530106 - RNA, 12 nt, Human
cagccagcaccu

SEQ ID NO: 2530107 - RNA, 22 nt, Human
cagccagauggacuccagccug

SEQ ID NO: 2530108 - RNA, 17 nt, Human
cagccagauccucuugg

SEQ ID NO: 2530109 - RNA, 21 nt, Human
cagccagaguuccugcggagu

SEQ ID NO: 2530110 - RNA, 20 nt, Human
cagccagaguuccugcggag

SEQ ID NO: 2530111 - RNA, 19 nt, Human
cagccagaguuccugcgga

SEQ ID NO: 2530112 - RNA, 15 nt, Human
cagccagaguuccug

SEQ ID NO: 2530113 - RNA, 19 nt, Human
caggaaaucaaauaugcaa

SEQ ID NO: 2530114 - RNA, 13 nt, Human
caggaaauaaagu

SEQ ID NO: 2530115 - RNA, 21 nt, Human
caggaaagggaaggccccaca

SEQ ID NO: 2530116 - RNA, 13 nt, Human
caggaaauauaua

SEQ ID NO: 2530117 - RNA, 15 nt, Human
caggaaauauauaug

SEQ ID NO: 2530118 - RNA, 16 nt, Human
caggaaauauauaugu

SEQ ID NO: 2530119 - RNA, 17 nt, Human
caggaaauauauaugug

SEQ ID NO: 2530120 - RNA, 21 nt, Human
caggaaaucaaauaugcaaag

SEQ ID NO: 2530121 - RNA, 22 nt, Human
caggaaaucaaauaugcaaagc

SEQ ID NO: 2530122 - RNA, 23 nt, Human
caggaaauauauaugugugugua

SEQ ID NO: 2530123 - RNA, 20 nt, Human
caggaaaagcugcugacagu

SEQ ID NO: 2530124 - RNA, 19 nt, Human
caggaaaagcugcugacag

SEQ ID NO: 2530125 - RNA, 23 nt, Human
caggaaaauuguuugaacccagg

SEQ ID NO: 2530126 - RNA, 22 nt, Human
caggaaaggcuccaggagcagc

SEQ ID NO: 2530127 - RNA, 21 nt, Human
caggaaaggcuccaggagcag

SEQ ID NO: 2530128 - RNA, 23 nt, Human
caggaaaggcuccaggagcagcc

SEQ ID NO: 2530129 - RNA, 17 nt, Human
caggaaagggaaggccc

SEQ ID NO: 2530130 - RNA, 16 nt, Human
caggaaaauccucugg

SEQ ID NO: 2530131 - RNA, 17 nt, Human
caggaaaauccucuggc

SEQ ID NO: 2530132 - RNA, 16 nt, Human
cagcuuauucacaaga

SEQ ID NO: 2530133 - RNA, 17 nt, Human
cagcuuauucacaagac

SEQ ID NO: 2530134 - RNA, 17 nt, Human
cagcuuaggggcugcug

SEQ ID NO: 2530135 - RNA, 15 nt, Human
cagcuguucagcugg

SEQ ID NO: 2530136 - RNA, 16 nt, Human
cagcuguucagcuggu

SEQ ID NO: 2530137 - RNA, 22 nt, Human
cagcuguuagaguccaacgugg

SEQ ID NO: 2530138 - RNA, 13 nt, Human
caggaggccagcc

SEQ ID NO: 2530139 - RNA, 12 nt, Human
caggaggccagc

SEQ ID NO: 2530140 - RNA, 20 nt, Human
caggcaaugcuggcuguugg

SEQ ID NO: 2530141 - RNA, 19 nt, Human
caggcaaugcuggcuguug

SEQ ID NO: 2530142 - RNA, 23 nt, Human
caggcacugagauaccagcgagg

SEQ ID NO: 2530143 - RNA, 17 nt, Human
caggcacugcugcccag

SEQ ID NO: 2530144 - RNA, 16 nt, Human
caggcacugcugccca

SEQ ID NO: 2530145 - RNA, 21 nt, Human
caggcaaugcuggcuguuggc

SEQ ID NO: 2530146 - RNA, 22 nt, Human
caggcacugagauaccagcgag

SEQ ID NO: 2530147 - RNA, 16 nt, Human
caggccaccuccccag

SEQ ID NO: 2530148 - RNA, 15 nt, Human
caggccaccucccca

SEQ ID NO: 2530149 - RNA, 12 nt, Human
caggccaccucc

SEQ ID NO: 2530150 - RNA, 16 nt, Human
caggccaccuccagaa

SEQ ID NO: 2530151 - RNA, 20 nt, Human
caggccaccuccccagcauu

SEQ ID NO: 2530152 - RNA, 19 nt, Human
caggccaccuccccagcau

SEQ ID NO: 2530153 - RNA, 18 nt, Human
caggccaccuccagaaac

SEQ ID NO: 2530154 - RNA, 13 nt, Human
caggccaccugcc

SEQ ID NO: 2530155 - RNA, 15 nt, Human
caggccaccugcccc

SEQ ID NO: 2530156 - RNA, 16 nt, Human
caggccaccugccccc

SEQ ID NO: 2530157 - RNA, 11 nt, Human
caggccaccuc

SEQ ID NO: 2530158 - RNA, 23 nt, Human
caggcacugcugcccagccucca

SEQ ID NO: 2530159 - RNA, 15 nt, Human
caggccagcugcuug

SEQ ID NO: 2530160 - RNA, 13 nt, Human
caggccagcugcu

SEQ ID NO: 2530161 - RNA, 22 nt, Human
caggccaccugcccccuucucc

SEQ ID NO: 2530162 - RNA, 23 nt, Human
caggccaccugcccccuucuccc

SEQ ID NO: 2530163 - RNA, 17 nt, Human
caggccaccugcccccu

SEQ ID NO: 2530164 - RNA, 18 nt, Human
caggccaccugcccccuu

SEQ ID NO: 2530165 - RNA, 19 nt, Human
caggccaccugcccccuuc

SEQ ID NO: 2530166 - RNA, 21 nt, Human
caggccaccugcccccuucuc

SEQ ID NO: 2530167 - RNA, 15 nt, Human
caggccagccuccga

SEQ ID NO: 2530168 - RNA, 13 nt, Human
caggccagccucc

SEQ ID NO: 2530169 - RNA, 12 nt, Human
caggccagccuc

SEQ ID NO: 2530170 - RNA, 11 nt, Human
caggccagccu

SEQ ID NO: 2530171 - RNA, 16 nt, Human
caggccacggcagccu

SEQ ID NO: 2530172 - RNA, 16 nt, Human
caggccaggcccucug

SEQ ID NO: 2530173 - RNA, 15 nt, Human
caggccaggcccucu

SEQ ID NO: 2530174 - RNA, 14 nt, Human
caggccaggcccuc

SEQ ID NO: 2530175 - RNA, 13 nt, Human
caggccaggcccu

SEQ ID NO: 2530176 - RNA, 23 nt, Human
caggccagccuccgagagggaga

SEQ ID NO: 2530177 - RNA, 21 nt, Human
caggccagccuccgagaggga

SEQ ID NO: 2530178 - RNA, 19 nt, Human
caggccagccuccgagagg

SEQ ID NO: 2530179 - RNA, 16 nt, Human
caggccagccuccgag

SEQ ID NO: 2530180 - RNA, 15 nt, Human
caggccagcugccuc

SEQ ID NO: 2530181 - RNA, 14 nt, Human
caggacagaugcca

SEQ ID NO: 2530182 - RNA, 17 nt, Human
caggacagaugccacac

SEQ ID NO: 2530183 - RNA, 13 nt, Human
caggacagaugcc

SEQ ID NO: 2530184 - RNA, 15 nt, Human
caggacacggggcag

SEQ ID NO: 2530185 - RNA, 22 nt, Human
caggacaccacacccagccuca

SEQ ID NO: 2530186 - RNA, 17 nt, Human
caggacccugaaggggc

SEQ ID NO: 2530187 - RNA, 18 nt, Human
caggacccugaaggggcc

SEQ ID NO: 2530188 - RNA, 18 nt, Human
caggaccaggcaauguga

SEQ ID NO: 2530189 - RNA, 14 nt, Human
caggaccaggacua

SEQ ID NO: 2530190 - RNA, 13 nt, Human
caggaccaggacu

SEQ ID NO: 2530191 - RNA, 23 nt, Human
caggaccagcuggggcgugggga

SEQ ID NO: 2530192 - RNA, 16 nt, Human
caggacccugaagggg

SEQ ID NO: 2530193 - RNA, 13 nt, Human
caggaccagggau

SEQ ID NO: 2530194 - RNA, 13 nt, Human
caggaccucaggu

SEQ ID NO: 2530195 - RNA, 21 nt, Human
caggaccuaggauaucuucuc

SEQ ID NO: 2530196 - RNA, 22 nt, Human
caggaccuaggauaucuucucc

SEQ ID NO: 2530197 - RNA, 23 nt, Human
caggaccuaggauaucuucucca

SEQ ID NO: 2530198 - RNA, 20 nt, Human
caggaccucagaguccaggc

SEQ ID NO: 2530199 - RNA, 18 nt, Human
caggaggcaggaccuucg

SEQ ID NO: 2530200 - RNA, 15 nt, Human
caggaggcaggaccu

SEQ ID NO: 2530201 - RNA, 23 nt, Human
caggaggauugcuugagcccagg

SEQ ID NO: 2530202 - RNA, 21 nt, Human
caggaccucagaguccaggcc

SEQ ID NO: 2530203 - RNA, 22 nt, Human
caggaccucagaguccaggccc

SEQ ID NO: 2530204 - RNA, 15 nt, Human
caggaccagcucagg

SEQ ID NO: 2530205 - RNA, 16 nt, Human
caggaccagcucagga

SEQ ID NO: 2530206 - RNA, 17 nt, Human
caggaccagcucaggac

SEQ ID NO: 2530207 - RNA, 19 nt, Human
caggaccagcucaggacag

SEQ ID NO: 2530208 - RNA, 16 nt, Human
caggaccagcuggggc

SEQ ID NO: 2530209 - RNA, 15 nt, Human
caggaccagcugggg

SEQ ID NO: 2530210 - RNA, 14 nt, Human
caggaccagcuggg

SEQ ID NO: 2530211 - RNA, 13 nt, Human
caggaccagcugg

SEQ ID NO: 2530212 - RNA, 12 nt, Human
caggaccagcug

SEQ ID NO: 2530213 - RNA, 20 nt, Human
caggaccagcucaggacaga

SEQ ID NO: 2530214 - RNA, 20 nt, Human
caggacaugcgguagccagc

SEQ ID NO: 2530215 - RNA, 21 nt, Human
caggacaugcgguagccagca

SEQ ID NO: 2530216 - RNA, 22 nt, Human
caggacaugcgguagccagcac

SEQ ID NO: 2530217 - RNA, 14 nt, Human
caggaccagcucag

SEQ ID NO: 2530218 - RNA, 18 nt, Human
caggacaugcgguagcca

SEQ ID NO: 2530219 - RNA, 22 nt, Human
caggacagugcuucagccugag

SEQ ID NO: 2530220 - RNA, 20 nt, Human
caggacagugcuucagccug

SEQ ID NO: 2530221 - RNA, 21 nt, Human
caggacagugcuucagccuga

SEQ ID NO: 2530222 - RNA, 24 nt, Human
caggacagcccuucuuuccacaga

SEQ ID NO: 2530223 - RNA, 23 nt, Human
caggacagcccuucuuuccacag

SEQ ID NO: 2530224 - RNA, 16 nt, Human
caggacagugcuucag

SEQ ID NO: 2530225 - RNA, 13 nt, Human
caggacaggcccg

SEQ ID NO: 2530226 - RNA, 12 nt, Human
caggacaggccc

SEQ ID NO: 2530227 - RNA, 13 nt, Human
caggacaggacca

SEQ ID NO: 2530228 - RNA, 23 nt, Human
caggacaccacacccagccucag

SEQ ID NO: 2530229 - RNA, 12 nt, Human
caggacaggacc

SEQ ID NO: 2530230 - RNA, 23 nt, Human
cagggucucacucugucgcccag

SEQ ID NO: 2530231 - RNA, 16 nt, Human
caggguuggccccugc

SEQ ID NO: 2530232 - RNA, 15 nt, Human
caggguuggccccug

SEQ ID NO: 2530233 - RNA, 22 nt, Human
caggguggacuuagaaagcagg

SEQ ID NO: 2530234 - RNA, 13 nt, Human
cagggugcugugg

SEQ ID NO: 2530235 - RNA, 18 nt, Human
cagggugaugccagguuc

SEQ ID NO: 2530236 - RNA, 20 nt, Human
cagggugcaguaucaugccc

SEQ ID NO: 2530237 - RNA, 16 nt, Human
cagggugaugccaggu

SEQ ID NO: 2530238 - RNA, 15 nt, Human
cagggugaugccagg

SEQ ID NO: 2530239 - RNA, 14 nt, Human
cagggugaggaugg

SEQ ID NO: 2530240 - RNA, 22 nt, Human
cagggugagagcugcucuggaa

SEQ ID NO: 2530241 - RNA, 21 nt, Human
cagggugagagcugcucugga

SEQ ID NO: 2530242 - RNA, 15 nt, Human
cagggugagagcugc

SEQ ID NO: 2530243 - RNA, 14 nt, Human
cagggugagagcug

SEQ ID NO: 2530244 - RNA, 23 nt, Human
cagggucuuuucaucugggaaag

SEQ ID NO: 2530245 - RNA, 22 nt, Human
cagggucuuuucaucugggaaa

SEQ ID NO: 2530246 - RNA, 21 nt, Human
cagggucuuuucaucugggaa

SEQ ID NO: 2530247 - RNA, 17 nt, Human
cagggucuuuucaucug

SEQ ID NO: 2530248 - RNA, 22 nt, Human
cagggucucuagugcugugaaa

SEQ ID NO: 2530249 - RNA, 21 nt, Human
cagggucuucccuaccucagg

SEQ ID NO: 2530250 - RNA, 15 nt, Human
cagggucuuuucauc

SEQ ID NO: 2530251 - RNA, 22 nt, Human
cagggucuucccuaccucaggc

SEQ ID NO: 2530252 - RNA, 19 nt, Human
cagggucucuagugcugug

SEQ ID NO: 2530253 - RNA, 20 nt, Human
cagggucucuagugcuguga

SEQ ID NO: 2530254 - RNA, 21 nt, Human
cagggucucuagugcugugaa

SEQ ID NO: 2530255 - RNA, 21 nt, Human
cagggucucuaccauccccug

SEQ ID NO: 2530256 - RNA, 17 nt, Human
cagucaccccggccacc

SEQ ID NO: 2530257 - RNA, 16 nt, Human
cagucaccccggccac

SEQ ID NO: 2530258 - RNA, 14 nt, Human
cagucaccccggcc

SEQ ID NO: 2530259 - RNA, 14 nt, Human
caguauuuuggaga

SEQ ID NO: 2530260 - RNA, 16 nt, Human
caguauuuucccugcu

SEQ ID NO: 2530261 - RNA, 20 nt, Human
caguauuguuuugguuugcu

SEQ ID NO: 2530262 - RNA, 16 nt, Human
caguauugaagcauuu

SEQ ID NO: 2530263 - RNA, 17 nt, Human
caguauugaagcauuuu

SEQ ID NO: 2530264 - RNA, 20 nt, Human
caguauugaagcauuuuaua

SEQ ID NO: 2530265 - RNA, 15 nt, Human
caguauuugugggga

SEQ ID NO: 2530266 - RNA, 19 nt, Human
caguaaaugggggugcauu

SEQ ID NO: 2530267 - RNA, 19 nt, Human
caguauucuugucaaaaaa

SEQ ID NO: 2530268 - RNA, 16 nt, Human
caguauucuugucaaa

SEQ ID NO: 2530269 - RNA, 12 nt, Human
caguauugaagc

SEQ ID NO: 2530270 - RNA, 14 nt, Human
caguauugaagcau

SEQ ID NO: 2530271 - RNA, 15 nt, Human
caguauugaagcauu

SEQ ID NO: 2530272 - RNA, 15 nt, Human
caguauucuagguag

SEQ ID NO: 2530273 - RNA, 13 nt, Human
caguauucuuguc

SEQ ID NO: 2530274 - RNA, 21 nt, Human
caguauucuagguagugcccu

SEQ ID NO: 2530275 - RNA, 12 nt, Human
caguaaaucuuu

SEQ ID NO: 2530276 - RNA, 20 nt, Human
caguaaaucuuuuacaacug

SEQ ID NO: 2530277 - RNA, 18 nt, Human
caguaaaugggggugcau

SEQ ID NO: 2530278 - RNA, 16 nt, Human
caguaaaauugccaua

SEQ ID NO: 2530279 - RNA, 15 nt, Human
caguaaaauugccau

SEQ ID NO: 2530280 - RNA, 19 nt, Human
caguaaauaaauuguuuga

SEQ ID NO: 2530281 - RNA, 24 nt, Human
caguaaauaaauuguuugaccaug

SEQ ID NO: 2530282 - RNA, 11 nt, Human
caguaaaauug

SEQ ID NO: 2530283 - RNA, 21 nt, Human
caggguuggccccugcccggc

SEQ ID NO: 2530284 - RNA, 17 nt, Human
caggguuggccccugcc

SEQ ID NO: 2530285 - RNA, 14 nt, Human
caggguuggccccu

SEQ ID NO: 2530286 - RNA, 17 nt, Human
caggguggacuuagaaa

SEQ ID NO: 2530287 - RNA, 13 nt, Human
caggguugggccc

SEQ ID NO: 2530288 - RNA, 14 nt, Human
caggguugggccca

SEQ ID NO: 2530289 - RNA, 15 nt, Human
caggguugggcccag

SEQ ID NO: 2530290 - RNA, 16 nt, Human
caggguugggcccaga

SEQ ID NO: 2530291 - RNA, 20 nt, Human
caggguugggcccagaucug

SEQ ID NO: 2530292 - RNA, 14 nt, Human
caggugcugccauc

SEQ ID NO: 2530293 - RNA, 13 nt, Human
caggugcugccau

SEQ ID NO: 2530294 - RNA, 22 nt, Human
caggguuuggcugugucuaaac

SEQ ID NO: 2530295 - RNA, 21 nt, Human
caggguuuggcugugucuaaa

SEQ ID NO: 2530296 - RNA, 20 nt, Human
caggguuuggcugugucuaa

SEQ ID NO: 2530297 - RNA, 20 nt, Human
caggguuucgagaagcugcu

SEQ ID NO: 2530298 - RNA, 19 nt, Human
caggugcucaauaaaugau

SEQ ID NO: 2530299 - RNA, 19 nt, Human
caggguuucgagaagcugc

SEQ ID NO: 2530300 - RNA, 17 nt, Human
caggguuucgagaagcu

SEQ ID NO: 2530301 - RNA, 17 nt, Human
cagggugggauggagga

SEQ ID NO: 2530302 - RNA, 19 nt, Human
caggguuucaccauguugc

SEQ ID NO: 2530303 - RNA, 21 nt, Human
caggguugggcccagaucugg

SEQ ID NO: 2530304 - RNA, 23 nt, Human
cagguucuccguuagcuccugug

SEQ ID NO: 2530305 - RNA, 22 nt, Human
cagguucuccguuagcuccugu

SEQ ID NO: 2530306 - RNA, 19 nt, Human
caggugcugcuacccuccc

SEQ ID NO: 2530307 - RNA, 16 nt, Human
caggugcugcuacccu

SEQ ID NO: 2530308 - RNA, 21 nt, Human
cagguucuccguuagcuccug

SEQ ID NO: 2530309 - RNA, 20 nt, Human
caggugcugacuucaucucc

SEQ ID NO: 2530310 - RNA, 21 nt, Human
caggugcugacuucaucuccc

SEQ ID NO: 2530311 - RNA, 13 nt, Human
caggugcugcuac

SEQ ID NO: 2530312 - RNA, 23 nt, Human
caggugcugacuucaucucccac

SEQ ID NO: 2530313 - RNA, 20 nt, Human
cagguucuucuuccugaagc

SEQ ID NO: 2530314 - RNA, 24 nt, Human
cagguucuccguuagcuccugugg

SEQ ID NO: 2530315 - RNA, 20 nt, Human
caggugcugcuacccucccu

SEQ ID NO: 2530316 - RNA, 18 nt, Human
cagguucuucuuccugaa

SEQ ID NO: 2530317 - RNA, 19 nt, Human
cagguuuuucaauuaaacg

SEQ ID NO: 2530318 - RNA, 18 nt, Human
cagguuuuucaauuaaac

SEQ ID NO: 2530319 - RNA, 18 nt, Human
cagguugcugguugcugu

SEQ ID NO: 2530320 - RNA, 17 nt, Human
cagguuuuucaauuaaa

SEQ ID NO: 2530321 - RNA, 17 nt, Human
cagguugcugguugcug

SEQ ID NO: 2530322 - RNA, 20 nt, Human
cagguugaggggcuccugga

SEQ ID NO: 2530323 - RNA, 21 nt, Human
cagguugaggggcuccuggaa

SEQ ID NO: 2530324 - RNA, 22 nt, Human
cagguugaggggcuccuggaaa

SEQ ID NO: 2530325 - RNA, 23 nt, Human
cagguuuuuggucugacccacug

SEQ ID NO: 2530326 - RNA, 22 nt, Human
cagguuuuucaauuaaacggau

SEQ ID NO: 2530327 - RNA, 21 nt, Human
cagguuuuucaauuaaacgga

SEQ ID NO: 2530328 - RNA, 23 nt, Human
cagguuuuucaauuaaacggauu

SEQ ID NO: 2530329 - RNA, 23 nt, Human
cagggcuggcccagcccugcugg

SEQ ID NO: 2530330 - RNA, 21 nt, Human
cagggcuggcccagcccugcu

SEQ ID NO: 2530331 - RNA, 20 nt, Human
cagggcuggcccagcccugc

SEQ ID NO: 2530332 - RNA, 19 nt, Human
cagggcuggcccagcccug

SEQ ID NO: 2530333 - RNA, 18 nt, Human
cagggcuggcccagcccu

SEQ ID NO: 2530334 - RNA, 17 nt, Human
cagggcuggcccagccc

SEQ ID NO: 2530335 - RNA, 16 nt, Human
cagggcuggcccagcc

SEQ ID NO: 2530336 - RNA, 15 nt, Human
cagggcuggcccagc

SEQ ID NO: 2530337 - RNA, 14 nt, Human
cagggcuggcccag

SEQ ID NO: 2530338 - RNA, 13 nt, Human
cagggcuggccca

SEQ ID NO: 2530339 - RNA, 12 nt, Human
cagggcuggccc

SEQ ID NO: 2530340 - RNA, 23 nt, Human
cagggcuggacugaggccugagc

SEQ ID NO: 2530341 - RNA, 22 nt, Human
cagggcuggacugaggccugag

SEQ ID NO: 2530342 - RNA, 22 nt, Human
cagggcuggcccagcccugcug

SEQ ID NO: 2530343 - RNA, 17 nt, Human
caggccugggccagagu

SEQ ID NO: 2530344 - RNA, 12 nt, Human
caggccugggcc

SEQ ID NO: 2530345 - RNA, 20 nt, Human
caggccuggcaaguggguga

SEQ ID NO: 2530346 - RNA, 17 nt, Human
caggccuggcaaguggg

SEQ ID NO: 2530347 - RNA, 22 nt, Human
caggccugggggcugggcagag

SEQ ID NO: 2530348 - RNA, 20 nt, Human
caggccugggggcugggcag

SEQ ID NO: 2530349 - RNA, 19 nt, Human
caggcuggcgugcaguggu

SEQ ID NO: 2530350 - RNA, 18 nt, Human
caggcuggcgugcagugg

SEQ ID NO: 2530351 - RNA, 23 nt, Human
caggccugggggcugggcagagg

SEQ ID NO: 2530352 - RNA, 17 nt, Human
caggcuggcgugcagug

SEQ ID NO: 2530353 - RNA, 18 nt, Human
caggcugggagagccuuc

SEQ ID NO: 2530354 - RNA, 16 nt, Human
caggcugggagagccu

SEQ ID NO: 2530355 - RNA, 19 nt, Human
caggcugggagagccuucc

SEQ ID NO: 2530356 - RNA, 20 nt, Human
caggcugggagagccuucca

SEQ ID NO: 2530357 - RNA, 18 nt, Human
caggcugggcaaggaggc

SEQ ID NO: 2530358 - RNA, 23 nt, Human
cagggaggagaggggaagggcca

SEQ ID NO: 2530359 - RNA, 22 nt, Human
cagggaggagaggggaagggcc

SEQ ID NO: 2530360 - RNA, 12 nt, Human
cagggaggagag

SEQ ID NO: 2530361 - RNA, 18 nt, Human
cagggaggagguggcagc

SEQ ID NO: 2530362 - RNA, 19 nt, Human
cagggaggagguggcagcc

SEQ ID NO: 2530363 - RNA, 20 nt, Human
cagggaggagguggcagccc

SEQ ID NO: 2530364 - RNA, 21 nt, Human
cagggaggagguggcagcccu

SEQ ID NO: 2530365 - RNA, 22 nt, Human
cagggaggacgcucucuggccu

SEQ ID NO: 2530366 - RNA, 19 nt, Human
cagggaggacgcucucugg

SEQ ID NO: 2530367 - RNA, 14 nt, Human
caggcugggcuuca

SEQ ID NO: 2530368 - RNA, 15 nt, Human
cagggcucagcgggg

SEQ ID NO: 2530369 - RNA, 12 nt, Human
cagggcucagcg

SEQ ID NO: 2530370 - RNA, 20 nt, Human
cagggcucagcggggacagc

SEQ ID NO: 2530371 - RNA, 21 nt, Human
cagggcuggacugaggccuga

SEQ ID NO: 2530372 - RNA, 20 nt, Human
cagggcuggacugaggccug

SEQ ID NO: 2530373 - RNA, 19 nt, Human
cagggcuggacugaggccu

SEQ ID NO: 2530374 - RNA, 19 nt, Human
cagggcucagccugguggg

SEQ ID NO: 2530375 - RNA, 17 nt, Human
cagggagggccugggcc

SEQ ID NO: 2530376 - RNA, 18 nt, Human
cagggagggccugggccc

SEQ ID NO: 2530377 - RNA, 16 nt, Human
cagggagggcuucugc

SEQ ID NO: 2530378 - RNA, 16 nt, Human
cagggaggucauuuug

SEQ ID NO: 2530379 - RNA, 13 nt, Human
cagggaggggacu

SEQ ID NO: 2530380 - RNA, 19 nt, Human
cagggaggggacuauuuau

SEQ ID NO: 2530381 - RNA, 15 nt, Human
cagggcucagccugg

SEQ ID NO: 2530382 - RNA, 16 nt, Human
cagggcucagccuggu

SEQ ID NO: 2530383 - RNA, 21 nt, Human
cagggaggggacuauuuauga

SEQ ID NO: 2530384 - RNA, 12 nt, Human
cagggaggggac

SEQ ID NO: 2530385 - RNA, 16 nt, Human
cagggaggggaagagg

SEQ ID NO: 2530386 - RNA, 15 nt, Human
ccugcaggaccugcc

SEQ ID NO: 2530387 - RNA, 16 nt, Human
ccugcaggaccugccu

SEQ ID NO: 2530388 - RNA, 17 nt, Human
ccugcaggaccugccug

SEQ ID NO: 2530389 - RNA, 18 nt, Human
ccugcaggaccugccugu

SEQ ID NO: 2530390 - RNA, 20 nt, Human
ccugaguagaaaggccuuua

SEQ ID NO: 2530391 - RNA, 14 nt, Human
ccugaguagaaagg

SEQ ID NO: 2530392 - RNA, 13 nt, Human
ccugaguagcugg

SEQ ID NO: 2530393 - RNA, 21 nt, Human
ccugaguagaaaggccuuuaa

SEQ ID NO: 2530394 - RNA, 23 nt, Human
ccugaguaaucgcuuaaagaugu

SEQ ID NO: 2530395 - RNA, 20 nt, Human
ccugaguaaucgcuuaaaga

SEQ ID NO: 2530396 - RNA, 22 nt, Human
ccugaguaaaaaagcugugugc

SEQ ID NO: 2530397 - RNA, 15 nt, Human
ccugagaggcaggca

SEQ ID NO: 2530398 - RNA, 14 nt, Human
ccugagaggcaggc

SEQ ID NO: 2530399 - RNA, 13 nt, Human
ccugagaggcagg

SEQ ID NO: 2530400 - RNA, 12 nt, Human
ccugagaggcag

SEQ ID NO: 2530401 - RNA, 18 nt, Human
ccugagaggcaggcauag

SEQ ID NO: 2530402 - RNA, 17 nt, Human
ccugagaggcaggcaua

SEQ ID NO: 2530403 - RNA, 23 nt, Human
ccugaggugugggggcugcagca

SEQ ID NO: 2530404 - RNA, 22 nt, Human
ccugaggugugggggcugcagc

SEQ ID NO: 2530405 - RNA, 21 nt, Human
ccugaggugugggggcugcag

SEQ ID NO: 2530406 - RNA, 20 nt, Human
ccugagagaaacugagguca

SEQ ID NO: 2530407 - RNA, 19 nt, Human
ccugagaccccuggccucc

SEQ ID NO: 2530408 - RNA, 18 nt, Human
ccugagaccccuggccuc

SEQ ID NO: 2530409 - RNA, 20 nt, Human
ccugagaccccuggccuccg

SEQ ID NO: 2530410 - RNA, 17 nt, Human
ccugagaccccuggccu

SEQ ID NO: 2530411 - RNA, 16 nt, Human
ccugagaccccuggcc

SEQ ID NO: 2530412 - RNA, 15 nt, Human
ccugagaccccuggc

SEQ ID NO: 2530413 - RNA, 21 nt, Human
ccugagaccaguugggagcac

SEQ ID NO: 2530414 - RNA, 22 nt, Human
ccugagaccaguugggagcacu

SEQ ID NO: 2530415 - RNA, 18 nt, Human
ccugagaccacagagaga

SEQ ID NO: 2530416 - RNA, 12 nt, Human
ccugagaccaca

SEQ ID NO: 2530417 - RNA, 21 nt, Human
ccugagacaaauggaggccug

SEQ ID NO: 2530418 - RNA, 20 nt, Human
ccugagacaaauggaggccu

SEQ ID NO: 2530419 - RNA, 19 nt, Human
ccugagacaaauggaggcc

SEQ ID NO: 2530420 - RNA, 22 nt, Human
ccugagaauaagaaaguuucac

SEQ ID NO: 2530421 - RNA, 12 nt, Human
ccugagaagaga

SEQ ID NO: 2530422 - RNA, 15 nt, Human
ccugagacaaaugga

SEQ ID NO: 2530423 - RNA, 22 nt, Human
ccugagaagugucuaaaaacac

SEQ ID NO: 2530424 - RNA, 13 nt, Human
ccugcagccugga

SEQ ID NO: 2530425 - RNA, 15 nt, Human
ccugcagccuggagg

SEQ ID NO: 2530426 - RNA, 16 nt, Human
ccugcagccuggaggc

SEQ ID NO: 2530427 - RNA, 16 nt, Human
ccugcagaauuugggu

SEQ ID NO: 2530428 - RNA, 15 nt, Human
ccugcagacucacug

SEQ ID NO: 2530429 - RNA, 12 nt, Human
ccugcagccugg

SEQ ID NO: 2530430 - RNA, 22 nt, Human
ccugcacuugcagacucuacag

SEQ ID NO: 2530431 - RNA, 19 nt, Human
ccugaguagcuggauuaca

SEQ ID NO: 2530432 - RNA, 15 nt, Human
ccugaguagcuggau

SEQ ID NO: 2530433 - RNA, 19 nt, Human
ccugcacuugcagacucua

SEQ ID NO: 2530434 - RNA, 20 nt, Human
ccugaguagcuggauuacag

SEQ ID NO: 2530435 - RNA, 13 nt, Human
ccucuugagccuu

SEQ ID NO: 2530436 - RNA, 19 nt, Human
ccucuugagccuugaacuu

SEQ ID NO: 2530437 - RNA, 17 nt, Human
ccucuugagcaguggcu

SEQ ID NO: 2530438 - RNA, 16 nt, Human
ccucuugagcaguggc

SEQ ID NO: 2530439 - RNA, 15 nt, Human
ccucuugagcagugg

SEQ ID NO: 2530440 - RNA, 14 nt, Human
ccucuugagcagug

SEQ ID NO: 2530441 - RNA, 16 nt, Human
ccugaccucccucuaa

SEQ ID NO: 2530442 - RNA, 12 nt, Human
ccugaccuccca

SEQ ID NO: 2530443 - RNA, 13 nt, Human
ccugaccucccag

SEQ ID NO: 2530444 - RNA, 16 nt, Human
ccugaccgugggcggg

SEQ ID NO: 2530445 - RNA, 19 nt, Human
ccugacccuguauauagcc

SEQ ID NO: 2530446 - RNA, 17 nt, Human
ccucuuuagaguuagac

SEQ ID NO: 2530447 - RNA, 12 nt, Human
ccucuuuagagu

SEQ ID NO: 2530448 - RNA, 12 nt, Human
ccucuuuaagag

SEQ ID NO: 2530449 - RNA, 17 nt, Human
ccugacccuguauauag

SEQ ID NO: 2530450 - RNA, 24 nt, Human
ccucuugagcaguggcugguccag

SEQ ID NO: 2530451 - RNA, 19 nt, Human
ccucuugagcaguggcugg

SEQ ID NO: 2530452 - RNA, 21 nt, Human
ccucuuggucuucccaggcug

SEQ ID NO: 2530453 - RNA, 13 nt, Human
ccucuuggguuca

SEQ ID NO: 2530454 - RNA, 20 nt, Human
ccucuuguaaauaaagcccu

SEQ ID NO: 2530455 - RNA, 18 nt, Human
ccucuuguaaauaaagcc

SEQ ID NO: 2530456 - RNA, 17 nt, Human
ccucuuguaaauaaagc

SEQ ID NO: 2530457 - RNA, 14 nt, Human
ccucuuguaaauaa

SEQ ID NO: 2530458 - RNA, 13 nt, Human
ccucuuguaaaua

SEQ ID NO: 2530459 - RNA, 12 nt, Human
ccucuuguaaau

SEQ ID NO: 2530460 - RNA, 14 nt, Human
ccugacucucagca

SEQ ID NO: 2530461 - RNA, 15 nt, Human
ccugaccugaggcuc

SEQ ID NO: 2530462 - RNA, 14 nt, Human
ccugaccugucuca

SEQ ID NO: 2530463 - RNA, 18 nt, Human
ccugacucgucugacugu

SEQ ID NO: 2530464 - RNA, 18 nt, Human
ccugaccucccagcccua

SEQ ID NO: 2530465 - RNA, 17 nt, Human
ccugaccucccagcccu

SEQ ID NO: 2530466 - RNA, 15 nt, Human
ccugaccucccagcc

SEQ ID NO: 2530467 - RNA, 14 nt, Human
ccugaccucccagc

SEQ ID NO: 2530468 - RNA, 14 nt, Human
ccugaccugaggcu

SEQ ID NO: 2530469 - RNA, 13 nt, Human
ccugaccugaggc

SEQ ID NO: 2530470 - RNA, 13 nt, Human
ccugacucucugu

SEQ ID NO: 2530471 - RNA, 15 nt, Human
ccugacucucuguga

SEQ ID NO: 2530472 - RNA, 16 nt, Human
ccugacucucugugac

SEQ ID NO: 2530473 - RNA, 17 nt, Human
ccugacucucugugacc

SEQ ID NO: 2530474 - RNA, 14 nt, Human
ccugacucugcccc

SEQ ID NO: 2530475 - RNA, 13 nt, Human
ccugacucugccc

SEQ ID NO: 2530476 - RNA, 12 nt, Human
ccugacucugcc

SEQ ID NO: 2530477 - RNA, 18 nt, Human
ccugacucugaaaucuga

SEQ ID NO: 2530478 - RNA, 13 nt, Human
ccugacucugaaa

SEQ ID NO: 2530479 - RNA, 21 nt, Human
ccugacucgucugacugugug

SEQ ID NO: 2530480 - RNA, 18 nt, Human
ccugacucucugugaccu

SEQ ID NO: 2530481 - RNA, 22 nt, Human
ccugacucugcccccugcuggc

SEQ ID NO: 2530482 - RNA, 17 nt, Human
ccugacucugcccccug

SEQ ID NO: 2530483 - RNA, 16 nt, Human
ccugacucugcccccu

SEQ ID NO: 2530484 - RNA, 15 nt, Human
ccugacucugccccc

SEQ ID NO: 2530485 - RNA, 21 nt, Human
ccugacuggugcuauaggcug

SEQ ID NO: 2530486 - RNA, 13 nt, Human
ccugagaagagag

SEQ ID NO: 2530487 - RNA, 23 nt, Human
ccugacuucaggggcugcccgcu

SEQ ID NO: 2530488 - RNA, 23 nt, Human
ccugacuuggggagauggaguuc

SEQ ID NO: 2530489 - RNA, 22 nt, Human
ccugacuucaggggcugcccgc

SEQ ID NO: 2530490 - RNA, 21 nt, Human
ccugacuucaggggcugcccg

SEQ ID NO: 2530491 - RNA, 19 nt, Human
ccugacuuggggagaugga

SEQ ID NO: 2530492 - RNA, 20 nt, Human
ccugacuucaggggcugccc

SEQ ID NO: 2530493 - RNA, 19 nt, Human
ccugacuucaggggcugcc

SEQ ID NO: 2530494 - RNA, 23 nt, Human
ccugacuggugcuauaggcugga

SEQ ID NO: 2530495 - RNA, 15 nt, Human
ccucugcuucucacg

SEQ ID NO: 2530496 - RNA, 21 nt, Human
ccucugcuggcacauuucccc

SEQ ID NO: 2530497 - RNA, 20 nt, Human
ccucugcugcugucccuccc

SEQ ID NO: 2530498 - RNA, 19 nt, Human
ccucugcugcugucccucc

SEQ ID NO: 2530499 - RNA, 14 nt, Human
ccucugcugcuguc

SEQ ID NO: 2530500 - RNA, 15 nt, Human
ccucugcugccaugg

SEQ ID NO: 2530501 - RNA, 22 nt, Human
ccucucugcaggucccuaauaa

SEQ ID NO: 2530502 - RNA, 21 nt, Human
ccucucugcaggucccuaaua

SEQ ID NO: 2530503 - RNA, 23 nt, Human
ccucucugcaggucccuaauaaa

SEQ ID NO: 2530504 - RNA, 12 nt, Human
ccucucugcccu

SEQ ID NO: 2530505 - RNA, 22 nt, Human
ccucugccugaagucacacagu

SEQ ID NO: 2530506 - RNA, 11 nt, Human
ccucugccugc

SEQ ID NO: 2530507 - RNA, 16 nt, Human
ccucucugcaucugac

SEQ ID NO: 2530508 - RNA, 16 nt, Human
ccucugccugccccgc

SEQ ID NO: 2530509 - RNA, 13 nt, Human
ccucugccugccc

SEQ ID NO: 2530510 - RNA, 12 nt, Human
ccucugccugcc

SEQ ID NO: 2530511 - RNA, 17 nt, Human
ccucugccugcauucug

SEQ ID NO: 2530512 - RNA, 12 nt, Human
ccucugccuguc

SEQ ID NO: 2530513 - RNA, 21 nt, Human
ccucugccugccccgccccca

SEQ ID NO: 2530514 - RNA, 14 nt, Human
ccucugccuguccc

SEQ ID NO: 2530515 - RNA, 15 nt, Human
ccucugccugucccu

SEQ ID NO: 2530516 - RNA, 16 nt, Human
ccucugccugucccuc

SEQ ID NO: 2530517 - RNA, 18 nt, Human
ccucugcuccuggagccu

SEQ ID NO: 2530518 - RNA, 13 nt, Human
ccucugcuccugg

SEQ ID NO: 2530519 - RNA, 17 nt, Human
ccucugccugucccucu

SEQ ID NO: 2530520 - RNA, 14 nt, Human
ccucugcuccccag

SEQ ID NO: 2530521 - RNA, 13 nt, Human
ccucugcucccca

SEQ ID NO: 2530522 - RNA, 18 nt, Human
ccucugcugcuggcuggu

SEQ ID NO: 2530523 - RNA, 17 nt, Human
ccucugcugcuggcugg

SEQ ID NO: 2530524 - RNA, 16 nt, Human
ccucugcugcuggcug

SEQ ID NO: 2530525 - RNA, 15 nt, Human
ccucugcugcuggcu

SEQ ID NO: 2530526 - RNA, 14 nt, Human
ccucugcugcuggc

SEQ ID NO: 2530527 - RNA, 13 nt, Human
ccucugcugcugg

SEQ ID NO: 2530528 - RNA, 21 nt, Human
ccucugcucugaggcuuccag

SEQ ID NO: 2530529 - RNA, 20 nt, Human
ccucugcucugaggcuucca

SEQ ID NO: 2530530 - RNA, 14 nt, Human
ccucugcucugagg

SEQ ID NO: 2530531 - RNA, 22 nt, Human
ccucugcuccuggagccuuuga

SEQ ID NO: 2530532 - RNA, 15 nt, Human
ccucugcugauccuc

SEQ ID NO: 2530533 - RNA, 18 nt, Human
ccucugcugauccuccca

SEQ ID NO: 2530534 - RNA, 22 nt, Human
ccucugcucugaggcuuccaga

SEQ ID NO: 2530535 - RNA, 14 nt, Human
ccucugcugccaug

SEQ ID NO: 2530536 - RNA, 12 nt, Human
ccucucucaggc

SEQ ID NO: 2530537 - RNA, 17 nt, Human
ccucucucacuccuuga

SEQ ID NO: 2530538 - RNA, 15 nt, Human
ccucucucacuccuu

SEQ ID NO: 2530539 - RNA, 14 nt, Human
ccucucucacuccu

SEQ ID NO: 2530540 - RNA, 13 nt, Human
ccucucucacucc

SEQ ID NO: 2530541 - RNA, 12 nt, Human
ccucucucuccg

SEQ ID NO: 2530542 - RNA, 14 nt, Human
ccucucuccuuugc

SEQ ID NO: 2530543 - RNA, 15 nt, Human
ccucucucccagucu

SEQ ID NO: 2530544 - RNA, 14 nt, Human
ccucucucccaguc

SEQ ID NO: 2530545 - RNA, 12 nt, Human
ccucucucccag

SEQ ID NO: 2530546 - RNA, 14 nt, Human
ccucucucaggcca

SEQ ID NO: 2530547 - RNA, 14 nt, Human
ccucucucugacuc

SEQ ID NO: 2530548 - RNA, 13 nt, Human
ccucucucugacu

SEQ ID NO: 2530549 - RNA, 12 nt, Human
ccucucucugac

SEQ ID NO: 2530550 - RNA, 11 nt, Human
ccucucucuga

SEQ ID NO: 2530551 - RNA, 17 nt, Human
ccucucucugacucuca

SEQ ID NO: 2530552 - RNA, 15 nt, Human
ccucucucugacucu

SEQ ID NO: 2530553 - RNA, 12 nt, Human
ccucucucuucu

SEQ ID NO: 2530554 - RNA, 16 nt, Human
ccucucucuucugcuc

SEQ ID NO: 2530555 - RNA, 18 nt, Human
ccucucucuucugcucca

SEQ ID NO: 2530556 - RNA, 19 nt, Human
ccucucucuucugcuccac

SEQ ID NO: 2530557 - RNA, 20 nt, Human
ccucucucuucugcuccacc

SEQ ID NO: 2530558 - RNA, 13 nt, Human
ccucucugcaggu

SEQ ID NO: 2530559 - RNA, 21 nt, Human
ccucucucuucugcuccaccc

SEQ ID NO: 2530560 - RNA, 22 nt, Human
ccucucucuucugcuccacccu

SEQ ID NO: 2530561 - RNA, 15 nt, Human
ccucucugcaggucc

SEQ ID NO: 2530562 - RNA, 20 nt, Human
ccucucugcaggucccuaau

SEQ ID NO: 2530563 - RNA, 12 nt, Human
ccucucugcacc

SEQ ID NO: 2530564 - RNA, 22 nt, Human
ccuggcccucaaggccucccac

SEQ ID NO: 2530565 - RNA, 13 nt, Human
ccuggcccucaag

SEQ ID NO: 2530566 - RNA, 15 nt, Human
ccuggccucugcacu

SEQ ID NO: 2530567 - RNA, 14 nt, Human
ccuggccucugcac

SEQ ID NO: 2530568 - RNA, 13 nt, Human
ccuggccugagcu

SEQ ID NO: 2530569 - RNA, 20 nt, Human
ccuggccgcccccugccccc

SEQ ID NO: 2530570 - RNA, 15 nt, Human
ccuggccgcccccug

SEQ ID NO: 2530571 - RNA, 16 nt, Human
ccuggccucugcacuc

SEQ ID NO: 2530572 - RNA, 14 nt, Human
ccuggccgcccccu

SEQ ID NO: 2530573 - RNA, 12 nt, Human
ccuggccgcccc

SEQ ID NO: 2530574 - RNA, 18 nt, Human
ccuggccgaguccaagcu

SEQ ID NO: 2530575 - RNA, 19 nt, Human
ccuggccgaguccaagcug

SEQ ID NO: 2530576 - RNA, 12 nt, Human
ccuggccucugc

SEQ ID NO: 2530577 - RNA, 15 nt, Human
ccuggcccucugugu

SEQ ID NO: 2530578 - RNA, 13 nt, Human
ccuggcccucugu

SEQ ID NO: 2530579 - RNA, 12 nt, Human
ccuggcccucug

SEQ ID NO: 2530580 - RNA, 23 nt, Human
ccuggcccucaaggccucccaca

SEQ ID NO: 2530581 - RNA, 16 nt, Human
ccuggcccugaggugu

SEQ ID NO: 2530582 - RNA, 15 nt, Human
ccuggcccugaggug

SEQ ID NO: 2530583 - RNA, 19 nt, Human
ccuggcacagugucugggc

SEQ ID NO: 2530584 - RNA, 15 nt, Human
ccuggcacagugucu

SEQ ID NO: 2530585 - RNA, 13 nt, Human
ccuggcacagugu

SEQ ID NO: 2530586 - RNA, 12 nt, Human
ccuggcacagug

SEQ ID NO: 2530587 - RNA, 18 nt, Human
ccuggcacagggcagugg

SEQ ID NO: 2530588 - RNA, 17 nt, Human
ccuggcacagggcagug

SEQ ID NO: 2530589 - RNA, 16 nt, Human
ccuggcacagggcagu

SEQ ID NO: 2530590 - RNA, 23 nt, Human
ccuggcacagugucugggcugac

SEQ ID NO: 2530591 - RNA, 22 nt, Human
ccuggcacagugucugggcuga

SEQ ID NO: 2530592 - RNA, 21 nt, Human
ccuggcacagugucugggcug

SEQ ID NO: 2530593 - RNA, 20 nt, Human
ccuggcacagugucugggcu

SEQ ID NO: 2530594 - RNA, 14 nt, Human
ccuggaggugccag

SEQ ID NO: 2530595 - RNA, 13 nt, Human
ccuggaggugcca

SEQ ID NO: 2530596 - RNA, 21 nt, Human
ccuggaggggcuagaaccuag

SEQ ID NO: 2530597 - RNA, 20 nt, Human
ccuggaggggcuagaaccua

SEQ ID NO: 2530598 - RNA, 22 nt, Human
ccuggaggggcuagaaccuaga

SEQ ID NO: 2530599 - RNA, 21 nt, Human
ccuggaggugccagcaaagcc

SEQ ID NO: 2530600 - RNA, 19 nt, Human
ccuggaggugccagcaaag

SEQ ID NO: 2530601 - RNA, 18 nt, Human
ccuggaggugccagcaaa

SEQ ID NO: 2530602 - RNA, 16 nt, Human
ccuggaggugccagca

SEQ ID NO: 2530603 - RNA, 23 nt, Human
ccuggaggugccagcaaagcccc

SEQ ID NO: 2530604 - RNA, 22 nt, Human
ccuggaggugccagcaaagccc

SEQ ID NO: 2530605 - RNA, 14 nt, Human
ccuggagguggcug

SEQ ID NO: 2530606 - RNA, 21 nt, Human
ccuggagguggcugagccccu

SEQ ID NO: 2530607 - RNA, 18 nt, Human
ccuggagggcuagaacug

SEQ ID NO: 2530608 - RNA, 23 nt, Human
ccuggagggcuagaaccuggaga

SEQ ID NO: 2530609 - RNA, 22 nt, Human
ccuggagggcuagaaccuggag

SEQ ID NO: 2530610 - RNA, 21 nt, Human
ccuggagggcuagaaccugga

SEQ ID NO: 2530611 - RNA, 21 nt, Human
ccuggagggcuagaaccuaga

SEQ ID NO: 2530612 - RNA, 20 nt, Human
ccuggagggcuagaaccuag

SEQ ID NO: 2530613 - RNA, 19 nt, Human
ccuggagggcuagaaccua

SEQ ID NO: 2530614 - RNA, 12 nt, Human
ccuggagggcua

SEQ ID NO: 2530615 - RNA, 18 nt, Human
ccuggaggauugcaggug

SEQ ID NO: 2530616 - RNA, 21 nt, Human
ccuggagggaaugaaccugga

SEQ ID NO: 2530617 - RNA, 17 nt, Human
ccuggaguucugguucc

SEQ ID NO: 2530618 - RNA, 16 nt, Human
ccuggaguucugguuc

SEQ ID NO: 2530619 - RNA, 18 nt, Human
ccuggagucaugccaagc

SEQ ID NO: 2530620 - RNA, 20 nt, Human
ccuggaggugggguugggau

SEQ ID NO: 2530621 - RNA, 22 nt, Human
ccuggaguguaugacugcacau

SEQ ID NO: 2530622 - RNA, 15 nt, Human
ccuggaguauaauau

SEQ ID NO: 2530623 - RNA, 22 nt, Human
ccuggagguggcugagccccug

SEQ ID NO: 2530624 - RNA, 23 nt, Human
ccuggagguggcugagccccugu

SEQ ID NO: 2530625 - RNA, 15 nt, Human
ccuggaguucugguu

SEQ ID NO: 2530626 - RNA, 17 nt, Human
ccuggaugcagccucac

SEQ ID NO: 2530627 - RNA, 14 nt, Human
ccuggaugcagccu

SEQ ID NO: 2530628 - RNA, 19 nt, Human
ccuggaugcagccucacag

SEQ ID NO: 2530629 - RNA, 21 nt, Human
ccuggcacacaucaggaguuc

SEQ ID NO: 2530630 - RNA, 19 nt, Human
ccuggaucuccccacucua

SEQ ID NO: 2530631 - RNA, 22 nt, Human
ccuggauauuauucuuguaguu

SEQ ID NO: 2530632 - RNA, 18 nt, Human
ccuggauauuauucuugu

SEQ ID NO: 2530633 - RNA, 21 nt, Human
ccuggaguguggcugaggagg

SEQ ID NO: 2530634 - RNA, 20 nt, Human
ccuggaguguggcugaggag

SEQ ID NO: 2530635 - RNA, 19 nt, Human
ccuggaguguggcugagga

SEQ ID NO: 2530636 - RNA, 14 nt, Human
ccuggagugcaguu

SEQ ID NO: 2530637 - RNA, 21 nt, Human
ccuggauccaucaggccacuu

SEQ ID NO: 2530638 - RNA, 13 nt, Human
ccuggaugcagcc

SEQ ID NO: 2530639 - RNA, 16 nt, Human
ccuggaucuaccagca

SEQ ID NO: 2530640 - RNA, 22 nt, Human
ccuggaucuaccagcauaaaua

SEQ ID NO: 2530641 - RNA, 16 nt, Human
ccugcccaggccccug

SEQ ID NO: 2530642 - RNA, 15 nt, Human
ccugcccaggccccu

SEQ ID NO: 2530643 - RNA, 14 nt, Human
ccugcccaggcccc

SEQ ID NO: 2530644 - RNA, 20 nt, Human
ccugcuggguguggcgcagc

SEQ ID NO: 2530645 - RNA, 14 nt, Human
ccugcugggugugg

SEQ ID NO: 2530646 - RNA, 22 nt, Human
ccuggagccccugggugggugg

SEQ ID NO: 2530647 - RNA, 21 nt, Human
ccugcugggcucuccaccuca

SEQ ID NO: 2530648 - RNA, 22 nt, Human
ccugcugggcucuccaccucag

SEQ ID NO: 2530649 - RNA, 24 nt, Human
ccugcugggcucuccaccucagcc

SEQ ID NO: 2530650 - RNA, 22 nt, Human
ccuggagcguuucuagcaagug

SEQ ID NO: 2530651 - RNA, 15 nt, Human
ccugcuggguaaacu

SEQ ID NO: 2530652 - RNA, 23 nt, Human
ccugcugggcucuccaccucagc

SEQ ID NO: 2530653 - RNA, 13 nt, Human
ccuggaggcccag

SEQ ID NO: 2530654 - RNA, 14 nt, Human
ccuggaggcccagu

SEQ ID NO: 2530655 - RNA, 16 nt, Human
ccuggaggcccaguuc

SEQ ID NO: 2530656 - RNA, 22 nt, Human
ccuggaggcacugaagugcuua

SEQ ID NO: 2530657 - RNA, 12 nt, Human
ccuggaggccca

SEQ ID NO: 2530658 - RNA, 14 nt, Human
ccuggaggcacuga

SEQ ID NO: 2530659 - RNA, 16 nt, Human
ccuggaggauuucauc

SEQ ID NO: 2530660 - RNA, 17 nt, Human
ccugcuggguaaacugu

SEQ ID NO: 2530661 - RNA, 18 nt, Human
ccuggaggacggccggcu

SEQ ID NO: 2530662 - RNA, 20 nt, Human
ccuggaggaggagcaggggc

SEQ ID NO: 2530663 - RNA, 15 nt, Human
ccuggaggaggagca

SEQ ID NO: 2530664 - RNA, 17 nt, Human
ccugcuggccgccucac

SEQ ID NO: 2530665 - RNA, 16 nt, Human
ccugcuggccgccuca

SEQ ID NO: 2530666 - RNA, 15 nt, Human
ccugcuggccgccuc

SEQ ID NO: 2530667 - RNA, 14 nt, Human
ccugcuggccgccu

SEQ ID NO: 2530668 - RNA, 13 nt, Human
ccugcuggcucuu

SEQ ID NO: 2530669 - RNA, 12 nt, Human
ccugcuggcucu

SEQ ID NO: 2530670 - RNA, 19 nt, Human
ccugcuggccgccucaccc

SEQ ID NO: 2530671 - RNA, 14 nt, Human
ccugcuggccccuc

SEQ ID NO: 2530672 - RNA, 15 nt, Human
ccugcuggccccuca

SEQ ID NO: 2530673 - RNA, 16 nt, Human
ccugcuggccccucac

SEQ ID NO: 2530674 - RNA, 17 nt, Human
ccugcuggccccucacc

SEQ ID NO: 2530675 - RNA, 18 nt, Human
ccugcuggccccucaccu

SEQ ID NO: 2530676 - RNA, 13 nt, Human
ccugcuggccgcc

SEQ ID NO: 2530677 - RNA, 21 nt, Human
ccugcuggccccucaccuggg

SEQ ID NO: 2530678 - RNA, 12 nt, Human
ccugcugggugu

SEQ ID NO: 2530679 - RNA, 19 nt, Human
ccugcuggcucuucugccc

SEQ ID NO: 2530680 - RNA, 17 nt, Human
ccugcuggcucuucugc

SEQ ID NO: 2530681 - RNA, 12 nt, Human
ccugcugggcuc

SEQ ID NO: 2530682 - RNA, 16 nt, Human
ccugcugggcucucca

SEQ ID NO: 2530683 - RNA, 17 nt, Human
ccugcugggcucuccac

SEQ ID NO: 2530684 - RNA, 18 nt, Human
ccugcugggcucuccacc

SEQ ID NO: 2530685 - RNA, 19 nt, Human
ccugcugggcucuccaccu

SEQ ID NO: 2530686 - RNA, 20 nt, Human
ccugcugggcucuccaccuc

SEQ ID NO: 2530687 - RNA, 16 nt, Human
ccugcccaguccccca

SEQ ID NO: 2530688 - RNA, 15 nt, Human
ccugcccaguccccc

SEQ ID NO: 2530689 - RNA, 12 nt, Human
ccugcccagucc

SEQ ID NO: 2530690 - RNA, 23 nt, Human
ccugcccagucccccaaccccag

SEQ ID NO: 2530691 - RNA, 22 nt, Human
ccugcccagucccccaacccca

SEQ ID NO: 2530692 - RNA, 21 nt, Human
ccugcccagucccccaacccc

SEQ ID NO: 2530693 - RNA, 19 nt, Human
ccugcccagucccccaacc

SEQ ID NO: 2530694 - RNA, 22 nt, Human
ccugcccaugucgcgcucagca

SEQ ID NO: 2530695 - RNA, 16 nt, Human
ccugcccaucugggaa

SEQ ID NO: 2530696 - RNA, 23 nt, Human
ccugcccaugucgcgcucagcau

SEQ ID NO: 2530697 - RNA, 16 nt, Human
ccugcccaugggagcu

SEQ ID NO: 2530698 - RNA, 16 nt, Human
ccugcccauuggagag

SEQ ID NO: 2530699 - RNA, 19 nt, Human
ccucccagcugacaguccu

SEQ ID NO: 2530700 - RNA, 16 nt, Human
ccucccagcugacagu

SEQ ID NO: 2530701 - RNA, 12 nt, Human
ccucccagcuga

SEQ ID NO: 2530702 - RNA, 20 nt, Human
ccucccagcccuauggaugu

SEQ ID NO: 2530703 - RNA, 11 nt, Human
ccucccagcug

SEQ ID NO: 2530704 - RNA, 20 nt, Human
ccucccaggcgccccuuccc

SEQ ID NO: 2530705 - RNA, 14 nt, Human
ccucccaggcgccc

SEQ ID NO: 2530706 - RNA, 23 nt, Human
ccucccacagugacucgggcucc

SEQ ID NO: 2530707 - RNA, 13 nt, Human
ccucccacaguga

SEQ ID NO: 2530708 - RNA, 12 nt, Human
ccucccacagug

SEQ ID NO: 2530709 - RNA, 11 nt, Human
ccucccacaca

SEQ ID NO: 2530710 - RNA, 20 nt, Human
ccucccaauuucagacuccc

SEQ ID NO: 2530711 - RNA, 19 nt, Human
ccucccaauuucagacucc

SEQ ID NO: 2530712 - RNA, 17 nt, Human
ccucccaaguggugccu

SEQ ID NO: 2530713 - RNA, 12 nt, Human
ccucccaccaca

SEQ ID NO: 2530714 - RNA, 14 nt, Human
ccucccaccacagc

SEQ ID NO: 2530715 - RNA, 15 nt, Human
ccucccaccacagca

SEQ ID NO: 2530716 - RNA, 21 nt, Human
ccucccagaucggaucuguug

SEQ ID NO: 2530717 - RNA, 13 nt, Human
ccucccacccacc

SEQ ID NO: 2530718 - RNA, 13 nt, Human
ccucccagcccua

SEQ ID NO: 2530719 - RNA, 12 nt, Human
ccucccagcccu

SEQ ID NO: 2530720 - RNA, 19 nt, Human
ccucccagcccuauggaug

SEQ ID NO: 2530721 - RNA, 18 nt, Human
ccucccagcccuauggau

SEQ ID NO: 2530722 - RNA, 12 nt, Human
ccucccagccug

SEQ ID NO: 2530723 - RNA, 23 nt, Human
ccucauguggcuggaagauccug

SEQ ID NO: 2530724 - RNA, 18 nt, Human
ccucauguggcuggaaga

SEQ ID NO: 2530725 - RNA, 15 nt, Human
ccucauuaaugacac

SEQ ID NO: 2530726 - RNA, 17 nt, Human
ccucauuaaugacacuu

SEQ ID NO: 2530727 - RNA, 19 nt, Human
ccucauguucuuaauucuu

SEQ ID NO: 2530728 - RNA, 22 nt, Human
ccuccaagcuccaucuccacuc

SEQ ID NO: 2530729 - RNA, 21 nt, Human
ccuccaagcuccaucuccacu

SEQ ID NO: 2530730 - RNA, 18 nt, Human
ccucauuagcauuuugcu

SEQ ID NO: 2530731 - RNA, 22 nt, Human
ccuccaaucccaccaacccuca

SEQ ID NO: 2530732 - RNA, 22 nt, Human
ccucccaaggggcccaaauucu

SEQ ID NO: 2530733 - RNA, 21 nt, Human
ccuccaaggaggggcuguaaa

SEQ ID NO: 2530734 - RNA, 20 nt, Human
ccuccaaggaggggcuguaa

SEQ ID NO: 2530735 - RNA, 22 nt, Human
ccucauuacuuuaccaccccca

SEQ ID NO: 2530736 - RNA, 15 nt, Human
ccucauguccacugg

SEQ ID NO: 2530737 - RNA, 23 nt, Human
ccucagccgacugcacagcggcc

SEQ ID NO: 2530738 - RNA, 22 nt, Human
ccucagccucccaaguagcugg

SEQ ID NO: 2530739 - RNA, 13 nt, Human
ccucagccuccug

SEQ ID NO: 2530740 - RNA, 22 nt, Human
ccucagccucccgaauagcugg

SEQ ID NO: 2530741 - RNA, 23 nt, Human
ccucagccucccaaagugcuggg

SEQ ID NO: 2530742 - RNA, 17 nt, Human
ccucauguggcuggaag

SEQ ID NO: 2530743 - RNA, 16 nt, Human
ccucauguggcuggaa

SEQ ID NO: 2530744 - RNA, 15 nt, Human
ccucauguggcugga

SEQ ID NO: 2530745 - RNA, 13 nt, Human
ccucauguggcug

SEQ ID NO: 2530746 - RNA, 13 nt, Human
ccucauguucuua

SEQ ID NO: 2530747 - RNA, 20 nt, Human
ccucauguccacugguucuu

SEQ ID NO: 2530748 - RNA, 18 nt, Human
ccucaugugaucacaauu

SEQ ID NO: 2530749 - RNA, 12 nt, Human
ccucagccuccg

SEQ ID NO: 2530750 - RNA, 14 nt, Human
ccucagccuccuga

SEQ ID NO: 2530751 - RNA, 12 nt, Human
ccucaaccucuu

SEQ ID NO: 2530752 - RNA, 17 nt, Human
ccucaaccucuucuggc

SEQ ID NO: 2530753 - RNA, 20 nt, Human
ccucaaccucuucuggcuca

SEQ ID NO: 2530754 - RNA, 18 nt, Human
ccucaacguauuguuucg

SEQ ID NO: 2530755 - RNA, 13 nt, Human
ccucaaccuguga

SEQ ID NO: 2530756 - RNA, 21 nt, Human
ccucaacucaccuaauguuua

SEQ ID NO: 2530757 - RNA, 19 nt, Human
ccucaacguugcuccccau

SEQ ID NO: 2530758 - RNA, 14 nt, Human
ccucaaccugugau

SEQ ID NO: 2530759 - RNA, 23 nt, Human
ccuauuuugaaaaauuccuauug

SEQ ID NO: 2530760 - RNA, 22 nt, Human
ccuauuuugaaaaauuccuauu

SEQ ID NO: 2530761 - RNA, 21 nt, Human
ccuauuuugaaaaauuccuau

SEQ ID NO: 2530762 - RNA, 20 nt, Human
ccuauuuugaaaaauuccua

SEQ ID NO: 2530763 - RNA, 16 nt, Human
ccucaaccuccugggc

SEQ ID NO: 2530764 - RNA, 19 nt, Human
ccuauuuugaaaaauuccu

SEQ ID NO: 2530765 - RNA, 13 nt, Human
ccuauuuucauug

SEQ ID NO: 2530766 - RNA, 17 nt, Human
ccuauuugccaugggcu

SEQ ID NO: 2530767 - RNA, 22 nt, Human
ccuauugugauuugacuguuuu

SEQ ID NO: 2530768 - RNA, 15 nt, Human
ccuauuuuaauaaac

SEQ ID NO: 2530769 - RNA, 18 nt, Human
ccuauuuccauucaacaa

SEQ ID NO: 2530770 - RNA, 15 nt, Human
ccuauuuccccaccc

SEQ ID NO: 2530771 - RNA, 15 nt, Human
ccucaagagaaggca

SEQ ID NO: 2530772 - RNA, 15 nt, Human
ccucaacucuccucc

SEQ ID NO: 2530773 - RNA, 20 nt, Human
ccucaagccaauccccuccu

SEQ ID NO: 2530774 - RNA, 18 nt, Human
ccucaagccaauccccuc

SEQ ID NO: 2530775 - RNA, 16 nt, Human
ccucaagccaaucccc

SEQ ID NO: 2530776 - RNA, 16 nt, Human
ccucaagaaauaaaag

SEQ ID NO: 2530777 - RNA, 17 nt, Human
ccucaagaugaaggcaa

SEQ ID NO: 2530778 - RNA, 15 nt, Human
ccucaagcugcaucu

SEQ ID NO: 2530779 - RNA, 12 nt, Human
ccucaaggacuu

SEQ ID NO: 2530780 - RNA, 13 nt, Human
ccucaaggacuug

SEQ ID NO: 2530781 - RNA, 19 nt, Human
ccucaaggacuugaaagca

SEQ ID NO: 2530782 - RNA, 20 nt, Human
ccucaaggacuugaaagcau

SEQ ID NO: 2530783 - RNA, 21 nt, Human
ccucaaggacuugaaagcauc

SEQ ID NO: 2530784 - RNA, 22 nt, Human
ccucagccucccaaagugcugg

SEQ ID NO: 2530785 - RNA, 11 nt, Human
ccucagccucc

SEQ ID NO: 2530786 - RNA, 14 nt, Human
ccucagccuagacc

SEQ ID NO: 2530787 - RNA, 16 nt, Human
ccucagccuagacccu

SEQ ID NO: 2530788 - RNA, 19 nt, Human
ccucagccuagacccuccu

SEQ ID NO: 2530789 - RNA, 20 nt, Human
ccucagccuagacccuccuc

SEQ ID NO: 2530790 - RNA, 16 nt, Human
ccucaaggccucccac

SEQ ID NO: 2530791 - RNA, 15 nt, Human
ccucaaggccuccca

SEQ ID NO: 2530792 - RNA, 22 nt, Human
ccucaaggacuugaaagcaucc

SEQ ID NO: 2530793 - RNA, 23 nt, Human
ccucaaggacuugaaagcaucca

SEQ ID NO: 2530794 - RNA, 18 nt, Human
ccucaaggccucccacag

SEQ ID NO: 2530795 - RNA, 17 nt, Human
ccucaaggccucccaca

SEQ ID NO: 2530796 - RNA, 19 nt, Human
ccucaaggccucccacagu

SEQ ID NO: 2530797 - RNA, 21 nt, Human
ccucagcccugacccugugga

SEQ ID NO: 2530798 - RNA, 23 nt, Human
ccuagauggcagucacugaauuc

SEQ ID NO: 2530799 - RNA, 17 nt, Human
ccuagauccacacacag

SEQ ID NO: 2530800 - RNA, 19 nt, Human
ccuagauccacacacagag

SEQ ID NO: 2530801 - RNA, 20 nt, Human
ccuagauccacacacagagg

SEQ ID NO: 2530802 - RNA, 17 nt, Human
ccuagcacacacuuuug

SEQ ID NO: 2530803 - RNA, 19 nt, Human
ccuaggagauaucugaggg

SEQ ID NO: 2530804 - RNA, 17 nt, Human
ccuaggagauaucugag

SEQ ID NO: 2530805 - RNA, 12 nt, Human
ccuaggagacca

SEQ ID NO: 2530806 - RNA, 23 nt, Human
ccuaggcaggacaugcugaagcc

SEQ ID NO: 2530807 - RNA, 22 nt, Human
ccuaggcaggacaugcugaagc

SEQ ID NO: 2530808 - RNA, 18 nt, Human
ccuaggcaggacaugcug

SEQ ID NO: 2530809 - RNA, 13 nt, Human
ccuaggcaggaca

SEQ ID NO: 2530810 - RNA, 16 nt, Human
ccuaggauugugccug

SEQ ID NO: 2530811 - RNA, 22 nt, Human
ccuaggagauaucugagggagg

SEQ ID NO: 2530812 - RNA, 20 nt, Human
ccuaggagauaucugaggga

SEQ ID NO: 2530813 - RNA, 20 nt, Human
ccuaggagugccccauucuu

SEQ ID NO: 2530814 - RNA, 23 nt, Human
ccuaauaaagcuguguggcaguc

SEQ ID NO: 2530815 - RNA, 16 nt, Human
ccuaauaaaguucugu

SEQ ID NO: 2530816 - RNA, 21 nt, Human
ccuaauaaaguucuguacuca

SEQ ID NO: 2530817 - RNA, 23 nt, Human
ccuagagguacuuuccacuugau

SEQ ID NO: 2530818 - RNA, 18 nt, Human
ccuagagggaggggccua

SEQ ID NO: 2530819 - RNA, 18 nt, Human
ccuagaguagaguggagg

SEQ ID NO: 2530820 - RNA, 22 nt, Human
ccuagaguagaguggagggagg

SEQ ID NO: 2530821 - RNA, 23 nt, Human
ccuagagugagggccugaggucu

SEQ ID NO: 2530822 - RNA, 14 nt, Human
ccuaauccaggcag

SEQ ID NO: 2530823 - RNA, 15 nt, Human
ccuaauccaggcaga

SEQ ID NO: 2530824 - RNA, 13 nt, Human
ccuaauccaggca

SEQ ID NO: 2530825 - RNA, 17 nt, Human
ccuaaucaggcugaggu

SEQ ID NO: 2530826 - RNA, 14 nt, Human
ccuaauaaagcugu

SEQ ID NO: 2530827 - RNA, 14 nt, Human
ccuaaguggcugcu

SEQ ID NO: 2530828 - RNA, 15 nt, Human
ccuaaguggcugcug

SEQ ID NO: 2530829 - RNA, 16 nt, Human
ccuaaguggcugcuga

SEQ ID NO: 2530830 - RNA, 20 nt, Human
ccuaaguuucaguugauuuu

SEQ ID NO: 2530831 - RNA, 13 nt, Human
ccuaauaaagcug

SEQ ID NO: 2530832 - RNA, 16 nt, Human
ccuaaguccuuuaugu

SEQ ID NO: 2530833 - RNA, 18 nt, Human
ccuaaguccuuuaugugg

SEQ ID NO: 2530834 - RNA, 22 nt, Human
ccuaaggaaaggaauuggcaug

SEQ ID NO: 2530835 - RNA, 13 nt, Human
ccuaaggacacac

SEQ ID NO: 2530836 - RNA, 24 nt, Human
ccuaaggaucucucaggagcacag

SEQ ID NO: 2530837 - RNA, 12 nt, Human
ccuaaggcugca

SEQ ID NO: 2530838 - RNA, 23 nt, Human
ccuaagggacauguuuugauaaa

SEQ ID NO: 2530839 - RNA, 22 nt, Human
ccuaaggcugcaagguuuaggc

SEQ ID NO: 2530840 - RNA, 19 nt, Human
ccuaagggcucaccguggc

SEQ ID NO: 2530841 - RNA, 13 nt, Human
ccuaagccaaggg

SEQ ID NO: 2530842 - RNA, 21 nt, Human
ccuaagccaagggccucuugc

SEQ ID NO: 2530843 - RNA, 22 nt, Human
ccgucucucucccauggagccc

SEQ ID NO: 2530844 - RNA, 19 nt, Human
ccgucucucucccauggag

SEQ ID NO: 2530845 - RNA, 18 nt, Human
ccgucucugguuccuccc

SEQ ID NO: 2530846 - RNA, 17 nt, Human
ccgucugggguucagcc

SEQ ID NO: 2530847 - RNA, 19 nt, Human
ccgucugggguucagcccc

SEQ ID NO: 2530848 - RNA, 20 nt, Human
ccgucugggguucagccccu

SEQ ID NO: 2530849 - RNA, 21 nt, Human
ccgucugggguucagccccuc

SEQ ID NO: 2530850 - RNA, 12 nt, Human
ccuaagaguguu

SEQ ID NO: 2530851 - RNA, 16 nt, Human
ccuaagaguguuuaau

SEQ ID NO: 2530852 - RNA, 18 nt, Human
ccuaagaguugagcucuc

SEQ ID NO: 2530853 - RNA, 22 nt, Human
ccgucugggguucagccccucc

SEQ ID NO: 2530854 - RNA, 23 nt, Human
ccgucugggguucagccccuccu

SEQ ID NO: 2530855 - RNA, 22 nt, Human
ccggcgugguggaagaggggac

SEQ ID NO: 2530856 - RNA, 16 nt, Human
ccggcgugguggaaga

SEQ ID NO: 2530857 - RNA, 16 nt, Human
ccguagguuauuuuca

SEQ ID NO: 2530858 - RNA, 19 nt, Human
ccggcuaauuuuuguauuu

SEQ ID NO: 2530859 - RNA, 17 nt, Human
ccggcuaugggggcacu

SEQ ID NO: 2530860 - RNA, 23 nt, Human
ccggcuaugggggcacugaggac

SEQ ID NO: 2530861 - RNA, 22 nt, Human
ccggcuaugggggcacugagga

SEQ ID NO: 2530862 - RNA, 17 nt, Human
ccgucagccaaauguaa

SEQ ID NO: 2530863 - RNA, 14 nt, Human
ccgucagggcccaa

SEQ ID NO: 2530864 - RNA, 12 nt, Human
ccgucagggccc

SEQ ID NO: 2530865 - RNA, 16 nt, Human
ccgucagggcccaagu

SEQ ID NO: 2530866 - RNA, 20 nt, Human
ccgucaguaucaggccugcc

SEQ ID NO: 2530867 - RNA, 21 nt, Human
ccgucauggcuuaauguuuau

SEQ ID NO: 2530868 - RNA, 15 nt, Human
ccgucauguuccuca

SEQ ID NO: 2530869 - RNA, 16 nt, Human
ccgucauguuccucaa

SEQ ID NO: 2530870 - RNA, 14 nt, Human
ccguccagaccuug

SEQ ID NO: 2530871 - RNA, 17 nt, Human
ccgucauguuccucaaa

SEQ ID NO: 2530872 - RNA, 22 nt, Human
ccguccagccgccauugccacc

SEQ ID NO: 2530873 - RNA, 16 nt, Human
ccguccaggagccugg

SEQ ID NO: 2530874 - RNA, 18 nt, Human
ccguccaggagccugugc

SEQ ID NO: 2530875 - RNA, 21 nt, Human
ccgucucaguguugagccuuu

SEQ ID NO: 2530876 - RNA, 19 nt, Human
ccgucuaguuaacauuuca

SEQ ID NO: 2530877 - RNA, 14 nt, Human
ccgucucucuccca

SEQ ID NO: 2530878 - RNA, 13 nt, Human
ccgucucucuccc

SEQ ID NO: 2530879 - RNA, 21 nt, Human
ccgucuccaggggcugcuucc

SEQ ID NO: 2530880 - RNA, 20 nt, Human
ccgucuccaggggcugcuuc

SEQ ID NO: 2530881 - RNA, 16 nt, Human
ccgucucaugaggggc

SEQ ID NO: 2530882 - RNA, 15 nt, Human
ccguaguucccugaa

SEQ ID NO: 2530883 - RNA, 16 nt, Human
ccguaguucccugaaa

SEQ ID NO: 2530884 - RNA, 14 nt, Human
ccguaguucccuga

SEQ ID NO: 2530885 - RNA, 18 nt, Human
ccggcuaauuuuuguaau

SEQ ID NO: 2530886 - RNA, 13 nt, Human
ccgucacagccuc

SEQ ID NO: 2530887 - RNA, 12 nt, Human
ccguauuucaga

SEQ ID NO: 2530888 - RNA, 22 nt, Human
ccguaguucccugaaaacccag

SEQ ID NO: 2530889 - RNA, 12 nt, Human
ccgucacagccu

SEQ ID NO: 2530890 - RNA, 13 nt, Human
cccuggcagcccc

SEQ ID NO: 2530891 - RNA, 12 nt, Human
cccuggcagccc

SEQ ID NO: 2530892 - RNA, 16 nt, Human
cccucacccugccuua

SEQ ID NO: 2530893 - RNA, 22 nt, Human
cccucacccugagccccuuccu

SEQ ID NO: 2530894 - RNA, 20 nt, Human
cccucacccugagccccuuc

SEQ ID NO: 2530895 - RNA, 13 nt, Human
cccucacccugcc

SEQ ID NO: 2530896 - RNA, 21 nt, Human
cccugcccugugggcccccaa

SEQ ID NO: 2530897 - RNA, 20 nt, Human
cccugcccugugggccccca

SEQ ID NO: 2530898 - RNA, 16 nt, Human
cccugcccugugggcc

SEQ ID NO: 2530899 - RNA, 15 nt, Human
cccugcccugugggc

SEQ ID NO: 2530900 - RNA, 14 nt, Human
cccugcccuguggg

SEQ ID NO: 2530901 - RNA, 15 nt, Human
cccucacccugagcc

SEQ ID NO: 2530902 - RNA, 21 nt, Human
cccucacccacuuuggccucc

SEQ ID NO: 2530903 - RNA, 22 nt, Human
cccucaccccugguucucaucu

SEQ ID NO: 2530904 - RNA, 20 nt, Human
cccucaccccugguucucau

SEQ ID NO: 2530905 - RNA, 13 nt, Human
cccucaccccugg

SEQ ID NO: 2530906 - RNA, 11 nt, Human
cccugcccugu

SEQ ID NO: 2530907 - RNA, 12 nt, Human
cccugcccugug

SEQ ID NO: 2530908 - RNA, 13 nt, Human
cccugcccugugg

SEQ ID NO: 2530909 - RNA, 19 nt, Human
cccucaaaccuccucuucu

SEQ ID NO: 2530910 - RNA, 15 nt, Human
cccucaaaccuccuc

SEQ ID NO: 2530911 - RNA, 21 nt, Human
cccuauuuuuuuucuguuaua

SEQ ID NO: 2530912 - RNA, 21 nt, Human
cccucaaaccuccucuucuga

SEQ ID NO: 2530913 - RNA, 20 nt, Human
cccucaaaccuccucuucug

SEQ ID NO: 2530914 - RNA, 24 nt, Human
cccucaaaccuccucuucugacgu

SEQ ID NO: 2530915 - RNA, 16 nt, Human
cccuauuuccccaccc

SEQ ID NO: 2530916 - RNA, 20 nt, Human
cccuauuuuuuuucuguuau

SEQ ID NO: 2530917 - RNA, 21 nt, Human
cccuauuuaacagggucucua

SEQ ID NO: 2530918 - RNA, 23 nt, Human
cccuauuuaacagggucucuagu

SEQ ID NO: 2530919 - RNA, 17 nt, Human
cccucacagccucugac

SEQ ID NO: 2530920 - RNA, 16 nt, Human
cccucacagccucuga

SEQ ID NO: 2530921 - RNA, 15 nt, Human
cccucacagccucug

SEQ ID NO: 2530922 - RNA, 14 nt, Human
cccucacagccucu

SEQ ID NO: 2530923 - RNA, 14 nt, Human
cccucaccaggggc

SEQ ID NO: 2530924 - RNA, 12 nt, Human
cccucaccaaca

SEQ ID NO: 2530925 - RNA, 18 nt, Human
cccucacagccucugacc

SEQ ID NO: 2530926 - RNA, 13 nt, Human
cccucaccccugc

SEQ ID NO: 2530927 - RNA, 20 nt, Human
cccuggcuuguaacuccacc

SEQ ID NO: 2530928 - RNA, 23 nt, Human
cccuggcuuguaacuccaccaac

SEQ ID NO: 2530929 - RNA, 13 nt, Human
cccuggcuuuuca

SEQ ID NO: 2530930 - RNA, 13 nt, Human
cccuggcuccagg

SEQ ID NO: 2530931 - RNA, 16 nt, Human
cccuggcuccaggcca

SEQ ID NO: 2530932 - RNA, 19 nt, Human
cccuggcugcccuggcccu

SEQ ID NO: 2530933 - RNA, 17 nt, Human
cccuggcucccacaggc

SEQ ID NO: 2530934 - RNA, 14 nt, Human
cccuggcugcugcc

SEQ ID NO: 2530935 - RNA, 13 nt, Human
cccuggcugcugc

SEQ ID NO: 2530936 - RNA, 22 nt, Human
cccuggcugcccuggcccugag

SEQ ID NO: 2530937 - RNA, 20 nt, Human
cccuggcugcccuggcccug

SEQ ID NO: 2530938 - RNA, 18 nt, Human
cccuggcugcugccccca

SEQ ID NO: 2530939 - RNA, 15 nt, Human
cccuggcugcugccc

SEQ ID NO: 2530940 - RNA, 23 nt, Human
cccuggcugggacguggcucagc

SEQ ID NO: 2530941 - RNA, 19 nt, Human
cccuggcuuguaacuccac

SEQ ID NO: 2530942 - RNA, 22 nt, Human
cccuggcugcugcccccacccc

SEQ ID NO: 2530943 - RNA, 16 nt, Human
cccuggcagccccugu

SEQ ID NO: 2530944 - RNA, 14 nt, Human
cccuggcagccccu

SEQ ID NO: 2530945 - RNA, 22 nt, Human
cccuggcaggaugacccugcga

SEQ ID NO: 2530946 - RNA, 20 nt, Human
cccuggcaggaugacccugc

SEQ ID NO: 2530947 - RNA, 23 nt, Human
cccuggccaccaccccccacucu

SEQ ID NO: 2530948 - RNA, 20 nt, Human
cccuggccaccaccccccac

SEQ ID NO: 2530949 - RNA, 23 nt, Human
cccuggcauuauguccacugugu

SEQ ID NO: 2530950 - RNA, 13 nt, Human
cccuggccagagg

SEQ ID NO: 2530951 - RNA, 14 nt, Human
cccuggccagaggc

SEQ ID NO: 2530952 - RNA, 15 nt, Human
cccuggccagaggcu

SEQ ID NO: 2530953 - RNA, 13 nt, Human
cccuggcccucaa

SEQ ID NO: 2530954 - RNA, 21 nt, Human
cccuggcccagcggccccucc

SEQ ID NO: 2530955 - RNA, 13 nt, Human
cccuggccccagg

SEQ ID NO: 2530956 - RNA, 14 nt, Human
cccuggccccagga

SEQ ID NO: 2530957 - RNA, 17 nt, Human
cccuggccuuucauauu

SEQ ID NO: 2530958 - RNA, 15 nt, Human
cccuggccuguucug

SEQ ID NO: 2530959 - RNA, 19 nt, Human
cccuggccuguucuguuuu

SEQ ID NO: 2530960 - RNA, 13 nt, Human
cccuggccugcug

SEQ ID NO: 2530961 - RNA, 14 nt, Human
cccuggccugcugg

SEQ ID NO: 2530962 - RNA, 21 nt, Human
cccuggccugcugggcucucc

SEQ ID NO: 2530963 - RNA, 22 nt, Human
cccuggccugcugggcucucca

SEQ ID NO: 2530964 - RNA, 21 nt, Human
cccuggccucugugccuucuu

SEQ ID NO: 2530965 - RNA, 24 nt, Human
cccugugccuuggugugcuguauc

SEQ ID NO: 2530966 - RNA, 22 nt, Human
cccugugccuaacaccagcguu

SEQ ID NO: 2530967 - RNA, 21 nt, Human
cccugugccuaacaccagcgu

SEQ ID NO: 2530968 - RNA, 20 nt, Human
cccugugccuaacaccagcg

SEQ ID NO: 2530969 - RNA, 22 nt, Human
cccugugcagccgcugagcgag

SEQ ID NO: 2530970 - RNA, 18 nt, Human
cccuucgcuccugugucu

SEQ ID NO: 2530971 - RNA, 16 nt, Human
cccuucgcuccugugu

SEQ ID NO: 2530972 - RNA, 16 nt, Human
cccuucuaccuuccug

SEQ ID NO: 2530973 - RNA, 17 nt, Human
cccugugcuccgugccu

SEQ ID NO: 2530974 - RNA, 16 nt, Human
cccuucuaccugccac

SEQ ID NO: 2530975 - RNA, 17 nt, Human
cccuucuaccugccacu

SEQ ID NO: 2530976 - RNA, 23 nt, Human
cccuucucuguagggaacucugg

SEQ ID NO: 2530977 - RNA, 23 nt, Human
cccuucugacccaugcugcccug

SEQ ID NO: 2530978 - RNA, 22 nt, Human
cccuucugacccaugcugcccu

SEQ ID NO: 2530979 - RNA, 21 nt, Human
cccuucugacccaugcugccc

SEQ ID NO: 2530980 - RNA, 16 nt, Human
ccgccaugcuccuggc

SEQ ID NO: 2530981 - RNA, 21 nt, Human
ccgccauucucaagcccugca

SEQ ID NO: 2530982 - RNA, 14 nt, Human
ccgccauugccacc

SEQ ID NO: 2530983 - RNA, 15 nt, Human
ccgccauggcuucca

SEQ ID NO: 2530984 - RNA, 21 nt, Human
ccgccagggcccacacccccu

SEQ ID NO: 2530985 - RNA, 20 nt, Human
ccgccauucucaagcccugc

SEQ ID NO: 2530986 - RNA, 20 nt, Human
ccgcccaggcuuagucacug

SEQ ID NO: 2530987 - RNA, 15 nt, Human
ccgccauugccacca

SEQ ID NO: 2530988 - RNA, 16 nt, Human
ccgccauugccaccag

SEQ ID NO: 2530989 - RNA, 19 nt, Human
ccgccauugccaccaggag

SEQ ID NO: 2530990 - RNA, 13 nt, Human
ccgcccccagucc

SEQ ID NO: 2530991 - RNA, 13 nt, Human
ccgccccacauuc

SEQ ID NO: 2530992 - RNA, 15 nt, Human
ccgccccagccucug

SEQ ID NO: 2530993 - RNA, 19 nt, Human
ccgcccccaguccccaccc

SEQ ID NO: 2530994 - RNA, 12 nt, Human
ccgcccccuccu

SEQ ID NO: 2530995 - RNA, 14 nt, Human
ccgccccagccucu

SEQ ID NO: 2530996 - RNA, 11 nt, Human
ccgcccccugc

SEQ ID NO: 2530997 - RNA, 17 nt, Human
ccgcccccugcccuccc

SEQ ID NO: 2530998 - RNA, 16 nt, Human
ccgcccccugcccucc

SEQ ID NO: 2530999 - RNA, 16 nt, Human
cccuucugucccucac

SEQ ID NO: 2531000 - RNA, 17 nt, Human
cccuucugucccucaca

SEQ ID NO: 2531001 - RNA, 22 nt, Human
cccuucugggcaucuguucugg

SEQ ID NO: 2531002 - RNA, 21 nt, Human
cccuucugggcaucuguucug

SEQ ID NO: 2531003 - RNA, 20 nt, Human
cccuucugggcaucuguucu

SEQ ID NO: 2531004 - RNA, 13 nt, Human
cccuucugcuacu

SEQ ID NO: 2531005 - RNA, 14 nt, Human
cccuucugcucagc

SEQ ID NO: 2531006 - RNA, 23 nt, Human
cccuucugcucagcucugggcca

SEQ ID NO: 2531007 - RNA, 17 nt, Human
cccuucuuuccacagaa

SEQ ID NO: 2531008 - RNA, 20 nt, Human
ccgaauagcugggacuacag

SEQ ID NO: 2531009 - RNA, 18 nt, Human
ccgacaaccgaugcucca

SEQ ID NO: 2531010 - RNA, 20 nt, Human
ccgacaaccgaugcuccagc

SEQ ID NO: 2531011 - RNA, 20 nt, Human
ccgaaugugcagguuuguua

SEQ ID NO: 2531012 - RNA, 15 nt, Human
ccgacaaccgaugcu

SEQ ID NO: 2531013 - RNA, 13 nt, Human
ccgaccagagccc

SEQ ID NO: 2531014 - RNA, 18 nt, Human
ccgaauccccucccuguc

SEQ ID NO: 2531015 - RNA, 16 nt, Human
ccgaauccccucccug

SEQ ID NO: 2531016 - RNA, 21 nt, Human
cccuucuuggugcuuacacau

SEQ ID NO: 2531017 - RNA, 13 nt, Human
ccgaaugugcagg

SEQ ID NO: 2531018 - RNA, 19 nt, Human
ccgaauccccucccuguca

SEQ ID NO: 2531019 - RNA, 23 nt, Human
ccgaaucucuuuuugcuuucgaa

SEQ ID NO: 2531020 - RNA, 16 nt, Human
ccgacccuugccgucu

SEQ ID NO: 2531021 - RNA, 19 nt, Human
ccgaccgaggcuggagcug

SEQ ID NO: 2531022 - RNA, 12 nt, Human
ccgaccucagcc

SEQ ID NO: 2531023 - RNA, 13 nt, Human
ccgaccucagccu

SEQ ID NO: 2531024 - RNA, 17 nt, Human
ccgccaaggcuggggga

SEQ ID NO: 2531025 - RNA, 14 nt, Human
ccgaccucagccuu

SEQ ID NO: 2531026 - RNA, 15 nt, Human
ccgaccucagccuuc

SEQ ID NO: 2531027 - RNA, 21 nt, Human
ccgaccgaggcuggagcuggc

SEQ ID NO: 2531028 - RNA, 13 nt, Human
ccgaccucguccu

SEQ ID NO: 2531029 - RNA, 19 nt, Human
ccgaccucguccucccccu

SEQ ID NO: 2531030 - RNA, 15 nt, Human
ccgccagccuccucu

SEQ ID NO: 2531031 - RNA, 14 nt, Human
ccgccagccuccuc

SEQ ID NO: 2531032 - RNA, 13 nt, Human
ccgccagccuccu

SEQ ID NO: 2531033 - RNA, 12 nt, Human
ccgccagccucc

SEQ ID NO: 2531034 - RNA, 11 nt, Human
ccgccagccuc

SEQ ID NO: 2531035 - RNA, 19 nt, Human
ccgccagauggggccucug

SEQ ID NO: 2531036 - RNA, 16 nt, Human
ccgccagauggggccu

SEQ ID NO: 2531037 - RNA, 23 nt, Human
ccgccagccuccucuggacggca

SEQ ID NO: 2531038 - RNA, 18 nt, Human
ccgccagccuccucugga

SEQ ID NO: 2531039 - RNA, 12 nt, Human
ccgccaggcgag

SEQ ID NO: 2531040 - RNA, 12 nt, Human
ccgccagggccc

SEQ ID NO: 2531041 - RNA, 16 nt, Human
ccgccacuccugaacc

SEQ ID NO: 2531042 - RNA, 23 nt, Human
ccgccaccuaucucgugggagag

SEQ ID NO: 2531043 - RNA, 17 nt, Human
ccgccaccuaucucgug

SEQ ID NO: 2531044 - RNA, 23 nt, Human
ccgccacauggcuuccuccugcg

SEQ ID NO: 2531045 - RNA, 16 nt, Human
ccgccagacuguuaga

SEQ ID NO: 2531046 - RNA, 23 nt, Human
ccgccaagguagccaucccauga

SEQ ID NO: 2531047 - RNA, 15 nt, Human
ccgcauucccugagu

SEQ ID NO: 2531048 - RNA, 23 nt, Human
ccgcauucccugagucaccagga

SEQ ID NO: 2531049 - RNA, 21 nt, Human
ccgccaaaagcugcucaggga

SEQ ID NO: 2531050 - RNA, 20 nt, Human
ccccucuggucgcuccugcc

SEQ ID NO: 2531051 - RNA, 19 nt, Human
ccccucuggucgcuccugc

SEQ ID NO: 2531052 - RNA, 23 nt, Human
ccccucuggucgcuccugcccac

SEQ ID NO: 2531053 - RNA, 12 nt, Human
ccccucugucca

SEQ ID NO: 2531054 - RNA, 12 nt, Human
ccccucuggucg

SEQ ID NO: 2531055 - RNA, 18 nt, Human
ccccucuggcuccagcug

SEQ ID NO: 2531056 - RNA, 19 nt, Human
ccccucuggcuccagcugg

SEQ ID NO: 2531057 - RNA, 19 nt, Human
cccgggagcugcugcccug

SEQ ID NO: 2531058 - RNA, 17 nt, Human
cccuauugguaaagaau

SEQ ID NO: 2531059 - RNA, 18 nt, Human
cccuauuagagaagagau

SEQ ID NO: 2531060 - RNA, 23 nt, Human
cccgggaggcagagguugcagug

SEQ ID NO: 2531061 - RNA, 22 nt, Human
cccgggaagggggcugggacau

SEQ ID NO: 2531062 - RNA, 18 nt, Human
cccgggacgcagcaggag

SEQ ID NO: 2531063 - RNA, 23 nt, Human
cccgggacgcagggguugcagug

SEQ ID NO: 2531064 - RNA, 17 nt, Human
cccggcucccaccgagg

SEQ ID NO: 2531065 - RNA, 17 nt, Human
cccggccaccugcggug

SEQ ID NO: 2531066 - RNA, 21 nt, Human
cccggcugcagaggccagagg

SEQ ID NO: 2531067 - RNA, 16 nt, Human
cccggcugcagaggcc

SEQ ID NO: 2531068 - RNA, 22 nt, Human
cccggcucgagcaguccugccu

SEQ ID NO: 2531069 - RNA, 16 nt, Human
cccggcuccaggcucc

SEQ ID NO: 2531070 - RNA, 15 nt, Human
cccggcuccaggcuc

SEQ ID NO: 2531071 - RNA, 14 nt, Human
cccggcuccaggcu

SEQ ID NO: 2531072 - RNA, 13 nt, Human
cccggcuccaggc

SEQ ID NO: 2531073 - RNA, 14 nt, Human
cccggccaccugcg

SEQ ID NO: 2531074 - RNA, 13 nt, Human
cccggccaccugc

SEQ ID NO: 2531075 - RNA, 12 nt, Human
cccggcuccagg

SEQ ID NO: 2531076 - RNA, 11 nt, Human
cccggcuccag

SEQ ID NO: 2531077 - RNA, 23 nt, Human
ccccuugcccuugcccugaccuc

SEQ ID NO: 2531078 - RNA, 21 nt, Human
ccccuugcccuugcccugacc

SEQ ID NO: 2531079 - RNA, 19 nt, Human
ccccuugcccuugcccuga

SEQ ID NO: 2531080 - RNA, 18 nt, Human
ccccuugcccuugcccug

SEQ ID NO: 2531081 - RNA, 17 nt, Human
ccccuugcccuugcccu

SEQ ID NO: 2531082 - RNA, 23 nt, Human
ccccuugcccagggcucagccug

SEQ ID NO: 2531083 - RNA, 17 nt, Human
ccccuugcccagggcuc

SEQ ID NO: 2531084 - RNA, 20 nt, Human
ccccuugcccagggcucagc

SEQ ID NO: 2531085 - RNA, 21 nt, Human
ccccuugcccagggcucagcc

SEQ ID NO: 2531086 - RNA, 14 nt, Human
ccccucuguccagg

SEQ ID NO: 2531087 - RNA, 22 nt, Human
ccccucuguccaggcacugaga

SEQ ID NO: 2531088 - RNA, 12 nt, Human
ccccucugucuu

SEQ ID NO: 2531089 - RNA, 15 nt, Human
ccccucuugccccaa

SEQ ID NO: 2531090 - RNA, 14 nt, Human
ccccucuugcccca

SEQ ID NO: 2531091 - RNA, 13 nt, Human
ccccucuugcccc

SEQ ID NO: 2531092 - RNA, 12 nt, Human
ccccucuugccc

SEQ ID NO: 2531093 - RNA, 24 nt, Human
ccccuuucagaugucuucugccug

SEQ ID NO: 2531094 - RNA, 22 nt, Human
ccccuuuccuggacacucagac

SEQ ID NO: 2531095 - RNA, 10 nt, Human
ccccuuuccu

SEQ ID NO: 2531096 - RNA, 23 nt, Human
ccccuuuccuggacacucagacc

SEQ ID NO: 2531097 - RNA, 13 nt, Human
ccccuugggcggc

SEQ ID NO: 2531098 - RNA, 24 nt, Human
ccccuugcccuugcccugaccucc

SEQ ID NO: 2531099 - RNA, 22 nt, Human
ccccuugcucuccccugcccug

SEQ ID NO: 2531100 - RNA, 18 nt, Human
ccccuuguccuuucccuu

SEQ ID NO: 2531101 - RNA, 15 nt, Human
ccccuuguccuuucc

SEQ ID NO: 2531102 - RNA, 15 nt, Human
ccccuugggcggcug

SEQ ID NO: 2531103 - RNA, 21 nt, Human
cccggccaccucugcggaccc

SEQ ID NO: 2531104 - RNA, 20 nt, Human
cccggccaccucugcggacc

SEQ ID NO: 2531105 - RNA, 15 nt, Human
cccggccaccucugc

SEQ ID NO: 2531106 - RNA, 14 nt, Human
cccggccaccucug

SEQ ID NO: 2531107 - RNA, 13 nt, Human
cccggccaccucu

SEQ ID NO: 2531108 - RNA, 12 nt, Human
cccggccaccuc

SEQ ID NO: 2531109 - RNA, 17 nt, Human
cccggcaugggaaagcc

SEQ ID NO: 2531110 - RNA, 23 nt, Human
cccgaauacaaacaccuggacuu

SEQ ID NO: 2531111 - RNA, 20 nt, Human
cccgaauacaaacaccugga

SEQ ID NO: 2531112 - RNA, 14 nt, Human
cccgaauacaaaca

SEQ ID NO: 2531113 - RNA, 14 nt, Human
cccgaauagcuggg

SEQ ID NO: 2531114 - RNA, 16 nt, Human
ccccuuugugcugugg

SEQ ID NO: 2531115 - RNA, 15 nt, Human
ccccuuugugcugug

SEQ ID NO: 2531116 - RNA, 13 nt, Human
ccccuuugugcug

SEQ ID NO: 2531117 - RNA, 12 nt, Human
ccccuuugugcu

SEQ ID NO: 2531118 - RNA, 20 nt, Human
ccccuuugggcccagggaca

SEQ ID NO: 2531119 - RNA, 18 nt, Human
ccccuuugggcccaggga

SEQ ID NO: 2531120 - RNA, 17 nt, Human
ccccuuugggcccaggg

SEQ ID NO: 2531121 - RNA, 16 nt, Human
ccccuuugggcccagg

SEQ ID NO: 2531122 - RNA, 13 nt, Human
ccccuuugggccc

SEQ ID NO: 2531123 - RNA, 20 nt, Human
ccccuuugaugauuaauuca

SEQ ID NO: 2531124 - RNA, 22 nt, Human
ccccuuuucagcuucugcuggg

SEQ ID NO: 2531125 - RNA, 19 nt, Human
ccccuuuucagcuucugcu

SEQ ID NO: 2531126 - RNA, 17 nt, Human
ccccuuuucagcuucug

SEQ ID NO: 2531127 - RNA, 16 nt, Human
ccccuuuucagcuucu

SEQ ID NO: 2531128 - RNA, 16 nt, Human
ccccuuuucugcauuu

SEQ ID NO: 2531129 - RNA, 14 nt, Human
ccccuuuucugcau

SEQ ID NO: 2531130 - RNA, 20 nt, Human
ccccuuuucuuuucuacccu

SEQ ID NO: 2531131 - RNA, 19 nt, Human
ccccuuuucuuuucuaccc

SEQ ID NO: 2531132 - RNA, 17 nt, Human
ccccuuuucuuuucuac

SEQ ID NO: 2531133 - RNA, 15 nt, Human
ccccuuuucuuuucu

SEQ ID NO: 2531134 - RNA, 18 nt, Human
ccccuuuuuacuccccuu

SEQ ID NO: 2531135 - RNA, 19 nt, Human
ccccuuuuuacuccccuug

SEQ ID NO: 2531136 - RNA, 23 nt, Human
ccccuuuucuuuucuacccuagc

SEQ ID NO: 2531137 - RNA, 23 nt, Human
ccccgaggccuucucugaaggac

SEQ ID NO: 2531138 - RNA, 23 nt, Human
ccccgcucugcaugcggcccagc

SEQ ID NO: 2531139 - RNA, 21 nt, Human
ccccgcucugcaugcggccca

SEQ ID NO: 2531140 - RNA, 14 nt, Human
ccccgcucugcaug

SEQ ID NO: 2531141 - RNA, 17 nt, Human
ccccgaggacccagacc

SEQ ID NO: 2531142 - RNA, 13 nt, Human
ccccgcucugcau

SEQ ID NO: 2531143 - RNA, 13 nt, Human
ccccgagcugggg

SEQ ID NO: 2531144 - RNA, 21 nt, Human
cccccaacacugugcccuggu

SEQ ID NO: 2531145 - RNA, 20 nt, Human
cccccaacacugugcccugg

SEQ ID NO: 2531146 - RNA, 12 nt, Human
ccccgagcuggg

SEQ ID NO: 2531147 - RNA, 14 nt, Human
ccccggaguucagu

SEQ ID NO: 2531148 - RNA, 14 nt, Human
ccccggcagacgcc

SEQ ID NO: 2531149 - RNA, 22 nt, Human
ccccgcucugcaugcggcccag

SEQ ID NO: 2531150 - RNA, 14 nt, Human
ccccgcuucugccu

SEQ ID NO: 2531151 - RNA, 15 nt, Human
ccccgcuuguccagc

SEQ ID NO: 2531152 - RNA, 17 nt, Human
ccccgcuuguccagcgc

SEQ ID NO: 2531153 - RNA, 18 nt, Human
ccccgcuuguccagcgcc

SEQ ID NO: 2531154 - RNA, 19 nt, Human
ccccgcuuguccagcgccu

SEQ ID NO: 2531155 - RNA, 15 nt, Human
ccccggccaccucug

SEQ ID NO: 2531156 - RNA, 14 nt, Human
ccccggccaccucu

SEQ ID NO: 2531157 - RNA, 13 nt, Human
ccccggccaccuc

SEQ ID NO: 2531158 - RNA, 12 nt, Human
ccccggccaccu

SEQ ID NO: 2531159 - RNA, 17 nt, Human
ccccggccaccucugcg

SEQ ID NO: 2531160 - RNA, 16 nt, Human
ccccggccaccucugc

SEQ ID NO: 2531161 - RNA, 15 nt, Human
cccauugucccucug

SEQ ID NO: 2531162 - RNA, 18 nt, Human
cccauugucccucugccc

SEQ ID NO: 2531163 - RNA, 14 nt, Human
cccauugucccucu

SEQ ID NO: 2531164 - RNA, 22 nt, Human
cccauuguggucacaggaagua

SEQ ID NO: 2531165 - RNA, 23 nt, Human
cccauuguggucacaggaaguag

SEQ ID NO: 2531166 - RNA, 22 nt, Human
ccccaaaacucuccucugcugc

SEQ ID NO: 2531167 - RNA, 23 nt, Human
ccccaaaacucuccucugcugcu

SEQ ID NO: 2531168 - RNA, 21 nt, Human
ccccaaaacucuccucugcug

SEQ ID NO: 2531169 - RNA, 19 nt, Human
cccauuguggcuccuaucu

SEQ ID NO: 2531170 - RNA, 20 nt, Human
cccauugucccucugcccca

SEQ ID NO: 2531171 - RNA, 15 nt, Human
cccauuguggcuccu

SEQ ID NO: 2531172 - RNA, 21 nt, Human
ccccagacuccaccaagccug

SEQ ID NO: 2531173 - RNA, 20 nt, Human
ccccagacuccaccaagccu

SEQ ID NO: 2531174 - RNA, 19 nt, Human
ccccaaaccugcaagggcu

SEQ ID NO: 2531175 - RNA, 22 nt, Human
ccccaaacaccuuccagcuccu

SEQ ID NO: 2531176 - RNA, 18 nt, Human
ccccaaacaccuuccagc

SEQ ID NO: 2531177 - RNA, 19 nt, Human
ccccaaacgggcugcccug

SEQ ID NO: 2531178 - RNA, 23 nt, Human
ccccgacccuugccgucuaccug

SEQ ID NO: 2531179 - RNA, 15 nt, Human
ccccauuuucugugg

SEQ ID NO: 2531180 - RNA, 16 nt, Human
cccccaacacugugcc

SEQ ID NO: 2531181 - RNA, 20 nt, Human
ccccauuucuauuuauuuac

SEQ ID NO: 2531182 - RNA, 17 nt, Human
ccccauuucuauuuauu

SEQ ID NO: 2531183 - RNA, 22 nt, Human
cccccaaauggaaaugggcaga

SEQ ID NO: 2531184 - RNA, 19 nt, Human
ccccauuucccaucugcac

SEQ ID NO: 2531185 - RNA, 18 nt, Human
ccccauuucccaucugca

SEQ ID NO: 2531186 - RNA, 17 nt, Human
ccccauuucccaucugc

SEQ ID NO: 2531187 - RNA, 16 nt, Human
ccccauuucccaucug

SEQ ID NO: 2531188 - RNA, 22 nt, Human
ccccauuucccaucugcacccc

SEQ ID NO: 2531189 - RNA, 20 nt, Human
ccccauuucccaucugcacc

SEQ ID NO: 2531190 - RNA, 13 nt, Human
ccccauuucuauu

SEQ ID NO: 2531191 - RNA, 18 nt, Human
ccccaucugcccaggacg

SEQ ID NO: 2531192 - RNA, 17 nt, Human
ccccaucugcccaggac

SEQ ID NO: 2531193 - RNA, 14 nt, Human
ccccaucugcccag

SEQ ID NO: 2531194 - RNA, 21 nt, Human
ccccauuuauccaccuccauc

SEQ ID NO: 2531195 - RNA, 17 nt, Human
ccccauuuauccaccuc

SEQ ID NO: 2531196 - RNA, 18 nt, Human
ccccauuuagguuucuga

SEQ ID NO: 2531197 - RNA, 13 nt, Human
ccccaucugccca

SEQ ID NO: 2531198 - RNA, 19 nt, Human
ccccaucucucccuccccu

SEQ ID NO: 2531199 - RNA, 12 nt, Human
ccccaucucucc

SEQ ID NO: 2531200 - RNA, 16 nt, Human
ccccaucucucccucc

SEQ ID NO: 2531201 - RNA, 21 nt, Human
ccccaucucaugccccuggcu

SEQ ID NO: 2531202 - RNA, 23 nt, Human
ccccaucucaugccccuggcugg

SEQ ID NO: 2531203 - RNA, 14 nt, Human
ccccaucucuacua

SEQ ID NO: 2531204 - RNA, 19 nt, Human
ccccagcacccgggcucag

SEQ ID NO: 2531205 - RNA, 15 nt, Human
ccccagcacccgggc

SEQ ID NO: 2531206 - RNA, 13 nt, Human
ccccagcacccgg

SEQ ID NO: 2531207 - RNA, 18 nt, Human
ccccagaggccucucucu

SEQ ID NO: 2531208 - RNA, 22 nt, Human
ccccagcaagugagagcugggu

SEQ ID NO: 2531209 - RNA, 17 nt, Human
ccccauccuggcccauc

SEQ ID NO: 2531210 - RNA, 16 nt, Human
ccccauccuggcccau

SEQ ID NO: 2531211 - RNA, 15 nt, Human
ccccauccuggccca

SEQ ID NO: 2531212 - RNA, 14 nt, Human
ccccauccuggccc

SEQ ID NO: 2531213 - RNA, 13 nt, Human
ccccauccuggcc

SEQ ID NO: 2531214 - RNA, 15 nt, Human
ccccagcacugagga

SEQ ID NO: 2531215 - RNA, 13 nt, Human
ccccagcacugag

SEQ ID NO: 2531216 - RNA, 12 nt, Human
ccccagcacuga

SEQ ID NO: 2531217 - RNA, 11 nt, Human
ccccagcacua

SEQ ID NO: 2531218 - RNA, 19 nt, Human
ccccagcacuaaagcagug

SEQ ID NO: 2531219 - RNA, 21 nt, Human
ccccagcaagugagagcuggg

SEQ ID NO: 2531220 - RNA, 12 nt, Human
ccccagagcugu

SEQ ID NO: 2531221 - RNA, 21 nt, Human
ccccagagcuguuuauggccu

SEQ ID NO: 2531222 - RNA, 22 nt, Human
ccccagagcuguuuauggccuc

SEQ ID NO: 2531223 - RNA, 23 nt, Human
ccccagagcuguuuauggccuca

SEQ ID NO: 2531224 - RNA, 11 nt, Human
ccccagagcug

SEQ ID NO: 2531225 - RNA, 13 nt, Human
ccccagagcacug

SEQ ID NO: 2531226 - RNA, 10 nt, Human
ccccagagac

SEQ ID NO: 2531227 - RNA, 21 nt, Human
ccccagagacucagagggagg

SEQ ID NO: 2531228 - RNA, 15 nt, Human
cccacuucccugggc

SEQ ID NO: 2531229 - RNA, 22 nt, Human
cccacccaagggccuggccuga

SEQ ID NO: 2531230 - RNA, 21 nt, Human
cccacccaagggccuggccug

SEQ ID NO: 2531231 - RNA, 20 nt, Human
cccacccaagggccuggccu

SEQ ID NO: 2531232 - RNA, 15 nt, Human
cccacccccacccaa

SEQ ID NO: 2531233 - RNA, 12 nt, Human
cccacccccacc

SEQ ID NO: 2531234 - RNA, 18 nt, Human
cccacccaagggccuggc

SEQ ID NO: 2531235 - RNA, 17 nt, Human
cccacccccacccaagg

SEQ ID NO: 2531236 - RNA, 18 nt, Human
cccacccccacccccacc

SEQ ID NO: 2531237 - RNA, 22 nt, Human
cccacccacaauccuauucucg

SEQ ID NO: 2531238 - RNA, 13 nt, Human
cccacccccagcu

SEQ ID NO: 2531239 - RNA, 12 nt, Human
cccacccccauc

SEQ ID NO: 2531240 - RNA, 18 nt, Human
cccacccugaaagcccug

SEQ ID NO: 2531241 - RNA, 15 nt, Human
cccacccuccugucu

SEQ ID NO: 2531242 - RNA, 14 nt, Human
cccacccuccuguc

SEQ ID NO: 2531243 - RNA, 13 nt, Human
cccacccuccugu

SEQ ID NO: 2531244 - RNA, 16 nt, Human
cccacccucccuggag

SEQ ID NO: 2531245 - RNA, 19 nt, Human
cccacccuccugucuuccc

SEQ ID NO: 2531246 - RNA, 12 nt, Human
cccacccccuca

SEQ ID NO: 2531247 - RNA, 15 nt, Human
cccacccccaccccc

SEQ ID NO: 2531248 - RNA, 13 nt, Human
cccaccccccuca

SEQ ID NO: 2531249 - RNA, 18 nt, Human
cccacccucccuggagug

SEQ ID NO: 2531250 - RNA, 15 nt, Human
cccacccucccugga

SEQ ID NO: 2531251 - RNA, 14 nt, Human
cccaccccccucau

SEQ ID NO: 2531252 - RNA, 18 nt, Human
cccacucagcuccgugaa

SEQ ID NO: 2531253 - RNA, 16 nt, Human
cccacucaagccaagc

SEQ ID NO: 2531254 - RNA, 17 nt, Human
cccacucaagccaagca

SEQ ID NO: 2531255 - RNA, 19 nt, Human
cccacucaagccaagcagc

SEQ ID NO: 2531256 - RNA, 20 nt, Human
cccacucaagccaagcagcc

SEQ ID NO: 2531257 - RNA, 23 nt, Human
cccacucaagccaagcagccaag

SEQ ID NO: 2531258 - RNA, 20 nt, Human
cccacguucucacacccacc

SEQ ID NO: 2531259 - RNA, 17 nt, Human
cccacguucucacaccc

SEQ ID NO: 2531260 - RNA, 16 nt, Human
cccacguucucacacc

SEQ ID NO: 2531261 - RNA, 18 nt, Human
cccacuagacccacugga

SEQ ID NO: 2531262 - RNA, 21 nt, Human
cccacguucucacacccaccg

SEQ ID NO: 2531263 - RNA, 18 nt, Human
cccacugcacccccuccu

SEQ ID NO: 2531264 - RNA, 17 nt, Human
cccacuccccaccuuca

SEQ ID NO: 2531265 - RNA, 22 nt, Human
cccacugcacccccuccugcug

SEQ ID NO: 2531266 - RNA, 21 nt, Human
cccacugcacccccuccugcu

SEQ ID NO: 2531267 - RNA, 20 nt, Human
cccacugcacccccuccugc

SEQ ID NO: 2531268 - RNA, 19 nt, Human
cccacugcacccccuccug

SEQ ID NO: 2531269 - RNA, 23 nt, Human
cccacugcacccccuccugcugc

SEQ ID NO: 2531270 - RNA, 15 nt, Human
cccacugcaggcccc

SEQ ID NO: 2531271 - RNA, 23 nt, Human
cccacugcaggccccgcuugucc

SEQ ID NO: 2531272 - RNA, 12 nt, Human
cccacugcccac

SEQ ID NO: 2531273 - RNA, 17 nt, Human
cccacugccauaaaaca

SEQ ID NO: 2531274 - RNA, 19 nt, Human
cccacugcaggccccgcuu

SEQ ID NO: 2531275 - RNA, 22 nt, Human
cccacugcccacccccucaagc

SEQ ID NO: 2531276 - RNA, 19 nt, Human
cccacugcccacccccuca

SEQ ID NO: 2531277 - RNA, 17 nt, Human
cccacugcccacccccu

SEQ ID NO: 2531278 - RNA, 16 nt, Human
cccacugcccaccccc

SEQ ID NO: 2531279 - RNA, 15 nt, Human
cccacugccucaggu

SEQ ID NO: 2531280 - RNA, 18 nt, Human
cccacugccuacugcauc

SEQ ID NO: 2531281 - RNA, 16 nt, Human
cccacugccucagguu

SEQ ID NO: 2531282 - RNA, 13 nt, Human
cccacugccugcc

SEQ ID NO: 2531283 - RNA, 12 nt, Human
cccacuuccugu

SEQ ID NO: 2531284 - RNA, 24 nt, Human
cccacuucccugacacugcggggc

SEQ ID NO: 2531285 - RNA, 20 nt, Human
cccacuucccugacacugcg

SEQ ID NO: 2531286 - RNA, 19 nt, Human
cccacuucccugacacugc

SEQ ID NO: 2531287 - RNA, 17 nt, Human
cccacuucccugacacu

SEQ ID NO: 2531288 - RNA, 16 nt, Human
cccacuucccugacac

SEQ ID NO: 2531289 - RNA, 12 nt, Human
cccacuucccug

SEQ ID NO: 2531290 - RNA, 23 nt, Human
cccacuuccccuccuaccccucc

SEQ ID NO: 2531291 - RNA, 19 nt, Human
cccacuuccccuccuaccc

SEQ ID NO: 2531292 - RNA, 17 nt, Human
cccacuuccccuccuac

SEQ ID NO: 2531293 - RNA, 15 nt, Human
cccacuuccccuccu

SEQ ID NO: 2531294 - RNA, 14 nt, Human
cccacuuccccucc

SEQ ID NO: 2531295 - RNA, 23 nt, Human
cccacuguccugggcgcccugga

SEQ ID NO: 2531296 - RNA, 22 nt, Human
cccacuguccugggcgcccugg

SEQ ID NO: 2531297 - RNA, 18 nt, Human
cccacuguccugggcgcc

SEQ ID NO: 2531298 - RNA, 13 nt, Human
cccacugcucccc

SEQ ID NO: 2531299 - RNA, 16 nt, Human
cccacugccugcccac

SEQ ID NO: 2531300 - RNA, 13 nt, Human
cccacugcucugg

SEQ ID NO: 2531301 - RNA, 12 nt, Human
cccacugcucug

SEQ ID NO: 2531302 - RNA, 19 nt, Human
cccacugcuuuuggucugu

SEQ ID NO: 2531303 - RNA, 17 nt, Human
cccacuguccugggcgc

SEQ ID NO: 2531304 - RNA, 14 nt, Human
cccacugccuuuga

SEQ ID NO: 2531305 - RNA, 14 nt, Human
cccacugccugccc

SEQ ID NO: 2531306 - RNA, 15 nt, Human
cccacugccugccca

SEQ ID NO: 2531307 - RNA, 17 nt, Human
cccagcugacauggaaa

SEQ ID NO: 2531308 - RNA, 13 nt, Human
cccagcugcaccu

SEQ ID NO: 2531309 - RNA, 18 nt, Human
cccagcugcaccugccag

SEQ ID NO: 2531310 - RNA, 21 nt, Human
cccagcugcaccugccagccu

SEQ ID NO: 2531311 - RNA, 22 nt, Human
cccagcugcaccugccagccug

SEQ ID NO: 2531312 - RNA, 22 nt, Human
cccagcuuaaaggggcuagagu

SEQ ID NO: 2531313 - RNA, 22 nt, Human
cccagcucuggugagucuuggc

SEQ ID NO: 2531314 - RNA, 20 nt, Human
cccagcucuggugagucuug

SEQ ID NO: 2531315 - RNA, 15 nt, Human
cccagcucuggugag

SEQ ID NO: 2531316 - RNA, 13 nt, Human
cccagcucuggug

SEQ ID NO: 2531317 - RNA, 22 nt, Human
cccagccagauggacuccagcc

SEQ ID NO: 2531318 - RNA, 22 nt, Human
cccagccagaguuccugcggag

SEQ ID NO: 2531319 - RNA, 21 nt, Human
cccagcugacaguccucucca

SEQ ID NO: 2531320 - RNA, 19 nt, Human
cccagcugacaguccucuc

SEQ ID NO: 2531321 - RNA, 17 nt, Human
cccagcugacaguccuc

SEQ ID NO: 2531322 - RNA, 20 nt, Human
cccagcucuucuccccaggu

SEQ ID NO: 2531323 - RNA, 15 nt, Human
cccagcugacaugga

SEQ ID NO: 2531324 - RNA, 22 nt, Human
cccagcugacaguccucuccac

SEQ ID NO: 2531325 - RNA, 12 nt, Human
cccagcugcacc

SEQ ID NO: 2531326 - RNA, 23 nt, Human
cccagcucugguccauagagagc

SEQ ID NO: 2531327 - RNA, 18 nt, Human
cccagccagaguuccugc

SEQ ID NO: 2531328 - RNA, 17 nt, Human
cccagccagaguuccug

SEQ ID NO: 2531329 - RNA, 22 nt, Human
cccagccaccccgggcucucug

SEQ ID NO: 2531330 - RNA, 14 nt, Human
cccagccaccccgg

SEQ ID NO: 2531331 - RNA, 19 nt, Human
cccagccaccccgggcucu

SEQ ID NO: 2531332 - RNA, 13 nt, Human
cccauccucugua

SEQ ID NO: 2531333 - RNA, 22 nt, Human
cccauccuccccuucccugcaa

SEQ ID NO: 2531334 - RNA, 14 nt, Human
cccauccuccccuu

SEQ ID NO: 2531335 - RNA, 15 nt, Human
cccauccuccccuuc

SEQ ID NO: 2531336 - RNA, 16 nt, Human
cccauccuccccuucc

SEQ ID NO: 2531337 - RNA, 18 nt, Human
cccauccuccccuucccu

SEQ ID NO: 2531338 - RNA, 23 nt, Human
cccauccuacccucgggcccacc

SEQ ID NO: 2531339 - RNA, 18 nt, Human
cccauccuacccucgggc

SEQ ID NO: 2531340 - RNA, 22 nt, Human
cccauccuaucagccugucucu

SEQ ID NO: 2531341 - RNA, 14 nt, Human
cccauccuccagca

SEQ ID NO: 2531342 - RNA, 15 nt, Human
cccauccuccagcag

SEQ ID NO: 2531343 - RNA, 16 nt, Human
cccauccuccagcagg

SEQ ID NO: 2531344 - RNA, 18 nt, Human
cccauccuccagcaggga

SEQ ID NO: 2531345 - RNA, 17 nt, Human
cccauccuccagcuucu

SEQ ID NO: 2531346 - RNA, 16 nt, Human
cccauccuccagcuuc

SEQ ID NO: 2531347 - RNA, 15 nt, Human
cccauccuccagcuu

SEQ ID NO: 2531348 - RNA, 14 nt, Human
cccauccuccagcu

SEQ ID NO: 2531349 - RNA, 19 nt, Human
cccauccuccagcuucugg

SEQ ID NO: 2531350 - RNA, 12 nt, Human
cccauccucccc

SEQ ID NO: 2531351 - RNA, 13 nt, Human
cccauccuccccu

SEQ ID NO: 2531352 - RNA, 17 nt, Human
cccaggcuggcgugcag

SEQ ID NO: 2531353 - RNA, 20 nt, Human
cccaggcuggccagccccac

SEQ ID NO: 2531354 - RNA, 19 nt, Human
cccaggcuggccagcccca

SEQ ID NO: 2531355 - RNA, 17 nt, Human
cccaggcuggccagccc

SEQ ID NO: 2531356 - RNA, 16 nt, Human
cccaggcuggccagcc

SEQ ID NO: 2531357 - RNA, 23 nt, Human
cccaggcuggccagccccacagc

SEQ ID NO: 2531358 - RNA, 22 nt, Human
cccaggcuggccagccccacag

SEQ ID NO: 2531359 - RNA, 21 nt, Human
cccagggccagggcccugcag

SEQ ID NO: 2531360 - RNA, 19 nt, Human
cccaggcuggagugcagug

SEQ ID NO: 2531361 - RNA, 15 nt, Human
cccaggcuggccagc

SEQ ID NO: 2531362 - RNA, 13 nt, Human
cccaggcuggcca

SEQ ID NO: 2531363 - RNA, 20 nt, Human
cccaggcuggagugcaaugg

SEQ ID NO: 2531364 - RNA, 13 nt, Human
cccaggcuggcgu

SEQ ID NO: 2531365 - RNA, 22 nt, Human
cccagcuuugcccaacaccagc

SEQ ID NO: 2531366 - RNA, 20 nt, Human
cccaggcuggagugcaauga

SEQ ID NO: 2531367 - RNA, 16 nt, Human
cccaggaaaggcccag

SEQ ID NO: 2531368 - RNA, 18 nt, Human
cccagcuuugcccaacac

SEQ ID NO: 2531369 - RNA, 13 nt, Human
cccagcuuugccc

SEQ ID NO: 2531370 - RNA, 23 nt, Human
cccagcuugggcccagcugggcu

SEQ ID NO: 2531371 - RNA, 22 nt, Human
cccagcuugggcccagcugggc

SEQ ID NO: 2531372 - RNA, 20 nt, Human
cccagcuugggcccagcugg

SEQ ID NO: 2531373 - RNA, 19 nt, Human
cccagcuugggcccagcug

SEQ ID NO: 2531374 - RNA, 15 nt, Human
cccagcuugaaaccu

SEQ ID NO: 2531375 - RNA, 23 nt, Human
cccagcugcaccugccagccugg

SEQ ID NO: 2531376 - RNA, 16 nt, Human
cccagggcccagagcc

SEQ ID NO: 2531377 - RNA, 17 nt, Human
cccagggcccagagccc

SEQ ID NO: 2531378 - RNA, 19 nt, Human
cccagggcccagagcccag

SEQ ID NO: 2531379 - RNA, 20 nt, Human
cccagggcccagagcccagc

SEQ ID NO: 2531380 - RNA, 14 nt, Human
cccagggcccagag

SEQ ID NO: 2531381 - RNA, 15 nt, Human
cccagggcccagagc

SEQ ID NO: 2531382 - RNA, 13 nt, Human
cccagggcccaga

SEQ ID NO: 2531383 - RNA, 22 nt, Human
cccagggccagggcccugcaga

SEQ ID NO: 2531384 - RNA, 15 nt, Human
cccagggccugagcc

SEQ ID NO: 2531385 - RNA, 19 nt, Human
cccagggccugagccuggc

SEQ ID NO: 2531386 - RNA, 13 nt, Human
cccagggccugag

SEQ ID NO: 2531387 - RNA, 22 nt, Human
cccagggcccagagcccagcuc

SEQ ID NO: 2531388 - RNA, 14 nt, Human
cccagggccugcag

SEQ ID NO: 2531389 - RNA, 16 nt, Human
cccagggccugcagga

SEQ ID NO: 2531390 - RNA, 19 nt, Human
cccagggccugcaggaccu

SEQ ID NO: 2531391 - RNA, 20 nt, Human
cccagggccagggcccugca

SEQ ID NO: 2531392 - RNA, 16 nt, Human
cccauagcuuccauga

SEQ ID NO: 2531393 - RNA, 14 nt, Human
cccauauccugccu

SEQ ID NO: 2531394 - RNA, 13 nt, Human
cccauagcuucca

SEQ ID NO: 2531395 - RNA, 19 nt, Human
cccauagugaccggcugcu

SEQ ID NO: 2531396 - RNA, 20 nt, Human
cccauauuuguacaccaaua

SEQ ID NO: 2531397 - RNA, 17 nt, Human
cccauccuacccucggg

SEQ ID NO: 2531398 - RNA, 16 nt, Human
cccauauuucaucgug

SEQ ID NO: 2531399 - RNA, 13 nt, Human
cccauauuucauc

SEQ ID NO: 2531400 - RNA, 20 nt, Human
ccaguuggguggaugccugg

SEQ ID NO: 2531401 - RNA, 19 nt, Human
ccaguuggguggaugccug

SEQ ID NO: 2531402 - RNA, 21 nt, Human
ccaguucaguaccuggaggag

SEQ ID NO: 2531403 - RNA, 20 nt, Human
ccaguucaguaccuggagga

SEQ ID NO: 2531404 - RNA, 19 nt, Human
ccaguucaguaccuggagg

SEQ ID NO: 2531405 - RNA, 17 nt, Human
ccaguucaguaccugga

SEQ ID NO: 2531406 - RNA, 18 nt, Human
ccaguucauugcacuuug

SEQ ID NO: 2531407 - RNA, 17 nt, Human
ccaguucauugcacuuu

SEQ ID NO: 2531408 - RNA, 17 nt, Human
ccaguuggguggaugcc

SEQ ID NO: 2531409 - RNA, 15 nt, Human
ccaguucagcuuggg

SEQ ID NO: 2531410 - RNA, 20 nt, Human
ccaguuauuuuccgcccuca

SEQ ID NO: 2531411 - RNA, 19 nt, Human
ccaguucaaucucccgcug

SEQ ID NO: 2531412 - RNA, 17 nt, Human
ccaguuaugugaaugau

SEQ ID NO: 2531413 - RNA, 13 nt, Human
ccaguucacccug

SEQ ID NO: 2531414 - RNA, 14 nt, Human
ccaguucaggaguc

SEQ ID NO: 2531415 - RNA, 18 nt, Human
ccaguucaggagucccaa

SEQ ID NO: 2531416 - RNA, 21 nt, Human
ccaguucaggagucccaagga

SEQ ID NO: 2531417 - RNA, 20 nt, Human
ccaucccugaaggccccgcc

SEQ ID NO: 2531418 - RNA, 17 nt, Human
ccaucccugaaggcccc

SEQ ID NO: 2531419 - RNA, 15 nt, Human
ccaucccugaaggcc

SEQ ID NO: 2531420 - RNA, 14 nt, Human
ccaucccugaaggc

SEQ ID NO: 2531421 - RNA, 15 nt, Human
ccaugacccaggcug

SEQ ID NO: 2531422 - RNA, 14 nt, Human
ccaugacccaggcu

SEQ ID NO: 2531423 - RNA, 20 nt, Human
ccaugacccaccccugugcu

SEQ ID NO: 2531424 - RNA, 19 nt, Human
ccaugacccaccccugugc

SEQ ID NO: 2531425 - RNA, 17 nt, Human
ccaugacccaggcuggg

SEQ ID NO: 2531426 - RNA, 16 nt, Human
ccaugacccaggcugg

SEQ ID NO: 2531427 - RNA, 18 nt, Human
ccaugacccaggcugggc

SEQ ID NO: 2531428 - RNA, 18 nt, Human
ccaugacccaccccugug

SEQ ID NO: 2531429 - RNA, 17 nt, Human
ccaugacccaccccugu

SEQ ID NO: 2531430 - RNA, 16 nt, Human
ccaugacccaccccug

SEQ ID NO: 2531431 - RNA, 15 nt, Human
ccaugacccaccccu

SEQ ID NO: 2531432 - RNA, 12 nt, Human
ccaugacccacc

SEQ ID NO: 2531433 - RNA, 14 nt, Human
ccaugaccauacug

SEQ ID NO: 2531434 - RNA, 23 nt, Human
ccaucccaggacaccacacccag

SEQ ID NO: 2531435 - RNA, 22 nt, Human
ccaucccaggacaccacaccca

SEQ ID NO: 2531436 - RNA, 21 nt, Human
ccaucccaggacaccacaccc

SEQ ID NO: 2531437 - RNA, 14 nt, Human
ccaucccaggacac

SEQ ID NO: 2531438 - RNA, 17 nt, Human
ccaugaaucaaagacau

SEQ ID NO: 2531439 - RNA, 16 nt, Human
ccaugaaucaaagaca

SEQ ID NO: 2531440 - RNA, 24 nt, Human
ccaucccaggacaccacacccagc

SEQ ID NO: 2531441 - RNA, 19 nt, Human
ccaugaaucgcuucucuuu

SEQ ID NO: 2531442 - RNA, 18 nt, Human
ccaugaaucgcuucucuu

SEQ ID NO: 2531443 - RNA, 17 nt, Human
ccaugaaucgcuucucu

SEQ ID NO: 2531444 - RNA, 15 nt, Human
ccaugaaucgcuucu

SEQ ID NO: 2531445 - RNA, 18 nt, Human
ccaugaauguaucaggaa

SEQ ID NO: 2531446 - RNA, 19 nt, Human
ccaugaauguaucaggaaa

SEQ ID NO: 2531447 - RNA, 15 nt, Human
ccaguuucugccucu

SEQ ID NO: 2531448 - RNA, 14 nt, Human
ccaguuucugccuc

SEQ ID NO: 2531449 - RNA, 12 nt, Human
ccaguuucugcc

SEQ ID NO: 2531450 - RNA, 14 nt, Human
ccaucccagcccca

SEQ ID NO: 2531451 - RNA, 15 nt, Human
ccaucccagccccaa

SEQ ID NO: 2531452 - RNA, 13 nt, Human
ccaucccagcccc

SEQ ID NO: 2531453 - RNA, 23 nt, Human
ccaucccagccuuggcaucuaga

SEQ ID NO: 2531454 - RNA, 15 nt, Human
ccaucccagccuugg

SEQ ID NO: 2531455 - RNA, 14 nt, Human
ccaucccagccuug

SEQ ID NO: 2531456 - RNA, 13 nt, Human
ccaguuugcagaa

SEQ ID NO: 2531457 - RNA, 17 nt, Human
ccaguuuaaccugaugc

SEQ ID NO: 2531458 - RNA, 19 nt, Human
ccaguuuaaucauugccug

SEQ ID NO: 2531459 - RNA, 18 nt, Human
ccaguuuaaccugaugca

SEQ ID NO: 2531460 - RNA, 21 nt, Human
ccaguuucagguguuuaguug

SEQ ID NO: 2531461 - RNA, 23 nt, Human
ccaguucaguaccuggaggagga

SEQ ID NO: 2531462 - RNA, 23 nt, Human
ccaguuggucccccuuccaugga

SEQ ID NO: 2531463 - RNA, 22 nt, Human
ccaguuccuuucaaugguuugc

SEQ ID NO: 2531464 - RNA, 21 nt, Human
ccaguuccuuucaaugguuug

SEQ ID NO: 2531465 - RNA, 20 nt, Human
ccaguugggagcacuggagu

SEQ ID NO: 2531466 - RNA, 18 nt, Human
ccaugucagcaaaaagca

SEQ ID NO: 2531467 - RNA, 22 nt, Human
ccauguauuuaucucuauuuaa

SEQ ID NO: 2531468 - RNA, 16 nt, Human
ccauguauuuaucucu

SEQ ID NO: 2531469 - RNA, 23 nt, Human
ccauguauuuaucucuauuuaau

SEQ ID NO: 2531470 - RNA, 18 nt, Human
ccauguaagguaucaguu

SEQ ID NO: 2531471 - RNA, 17 nt, Human
ccaugucagcaaaaagc

SEQ ID NO: 2531472 - RNA, 13 nt, Human
ccaugucacugug

SEQ ID NO: 2531473 - RNA, 22 nt, Human
ccaugucaccggauccugggug

SEQ ID NO: 2531474 - RNA, 23 nt, Human
ccaugucaccggauccugggugg

SEQ ID NO: 2531475 - RNA, 23 nt, Human
ccaugagccucagcauccuggca

SEQ ID NO: 2531476 - RNA, 21 nt, Human
ccaugagccucagcauccugg

SEQ ID NO: 2531477 - RNA, 17 nt, Human
ccaugagcuccagaccc

SEQ ID NO: 2531478 - RNA, 18 nt, Human
ccaugagcuccagacccc

SEQ ID NO: 2531479 - RNA, 19 nt, Human
ccaugagcuccagaccccc

SEQ ID NO: 2531480 - RNA, 23 nt, Human
ccaugagcuccagacccccagca

SEQ ID NO: 2531481 - RNA, 13 nt, Human
ccaugagcuccag

SEQ ID NO: 2531482 - RNA, 15 nt, Human
ccaugagcuccagac

SEQ ID NO: 2531483 - RNA, 16 nt, Human
ccaugagcuccagacc

SEQ ID NO: 2531484 - RNA, 16 nt, Human
ccauguaacagaaagg

SEQ ID NO: 2531485 - RNA, 15 nt, Human
ccauguaacagaaag

SEQ ID NO: 2531486 - RNA, 14 nt, Human
ccaugguugagaaa

SEQ ID NO: 2531487 - RNA, 18 nt, Human
ccauggugugaucgucug

SEQ ID NO: 2531488 - RNA, 19 nt, Human
ccauggugugaucgucuga

SEQ ID NO: 2531489 - RNA, 20 nt, Human
ccauggucggaaaacaugcu

SEQ ID NO: 2531490 - RNA, 22 nt, Human
ccauggugaauuaaucacuuuu

SEQ ID NO: 2531491 - RNA, 20 nt, Human
ccaugguacccccuucuggg

SEQ ID NO: 2531492 - RNA, 20 nt, Human
ccauggugaauuaaucacuu

SEQ ID NO: 2531493 - RNA, 22 nt, Human
ccaggcacacacugugcuuucu

SEQ ID NO: 2531494 - RNA, 16 nt, Human
ccaggcacacacugug

SEQ ID NO: 2531495 - RNA, 22 nt, Human
ccaggcacccuucuuuccucuu

SEQ ID NO: 2531496 - RNA, 21 nt, Human
ccaggcacccuucuuuccucu

SEQ ID NO: 2531497 - RNA, 14 nt, Human
ccaggcacccuucu

SEQ ID NO: 2531498 - RNA, 13 nt, Human
ccaggcacccuuc

SEQ ID NO: 2531499 - RNA, 18 nt, Human
ccaggcacgaacccaccu

SEQ ID NO: 2531500 - RNA, 19 nt, Human
ccaggcacgaacccaccug

SEQ ID NO: 2531501 - RNA, 20 nt, Human
ccaggcacgaacccaccugc

SEQ ID NO: 2531502 - RNA, 21 nt, Human
ccaggcacccccuggagagaa

SEQ ID NO: 2531503 - RNA, 19 nt, Human
ccaggcacccccuggagag

SEQ ID NO: 2531504 - RNA, 18 nt, Human
ccaggcacccccuggaga

SEQ ID NO: 2531505 - RNA, 17 nt, Human
ccaggcacccccuggag

SEQ ID NO: 2531506 - RNA, 16 nt, Human
ccaggcacccccugga

SEQ ID NO: 2531507 - RNA, 18 nt, Human
ccaggcacugcugcccag

SEQ ID NO: 2531508 - RNA, 16 nt, Human
ccaggcacugcugccc

SEQ ID NO: 2531509 - RNA, 21 nt, Human
ccaggcacgaacccaccugcu

SEQ ID NO: 2531510 - RNA, 22 nt, Human
ccaggcacgaacccaccugcug

SEQ ID NO: 2531511 - RNA, 23 nt, Human
ccaggcacgaacccaccugcuga

SEQ ID NO: 2531512 - RNA, 13 nt, Human
ccaggcagaucca

SEQ ID NO: 2531513 - RNA, 15 nt, Human
ccaggcagauccagg

SEQ ID NO: 2531514 - RNA, 16 nt, Human
ccaggcagauccagga

SEQ ID NO: 2531515 - RNA, 17 nt, Human
ccaggcagauccaggac

SEQ ID NO: 2531516 - RNA, 18 nt, Human
ccaggcagauccaggacu

SEQ ID NO: 2531517 - RNA, 19 nt, Human
ccaggcagauccaggacua

SEQ ID NO: 2531518 - RNA, 13 nt, Human
ccaggcagaucug

SEQ ID NO: 2531519 - RNA, 17 nt, Human
ccaggcagaucugugcc

SEQ ID NO: 2531520 - RNA, 18 nt, Human
ccaggcuggcgugcagug

SEQ ID NO: 2531521 - RNA, 17 nt, Human
ccaggcuggcgugcagu

SEQ ID NO: 2531522 - RNA, 22 nt, Human
ccagggcuggacugaggccuga

SEQ ID NO: 2531523 - RNA, 19 nt, Human
ccaggcuggcgugcagugg

SEQ ID NO: 2531524 - RNA, 16 nt, Human
ccaggcuggcgugcag

SEQ ID NO: 2531525 - RNA, 23 nt, Human
ccaggcuccuuccugucuuccug

SEQ ID NO: 2531526 - RNA, 15 nt, Human
ccaggcuccuuccug

SEQ ID NO: 2531527 - RNA, 22 nt, Human
ccaggcuccuuccugucuuccu

SEQ ID NO: 2531528 - RNA, 18 nt, Human
ccaggcagaucugugccc

SEQ ID NO: 2531529 - RNA, 14 nt, Human
ccaggcuccuuccu

SEQ ID NO: 2531530 - RNA, 21 nt, Human
ccaggcuccuuuagcgcccag

SEQ ID NO: 2531531 - RNA, 20 nt, Human
ccaggcuccuuuagcgccca

SEQ ID NO: 2531532 - RNA, 17 nt, Human
ccaggggugggacaccc

SEQ ID NO: 2531533 - RNA, 14 nt, Human
ccaggggugggaca

SEQ ID NO: 2531534 - RNA, 20 nt, Human
ccaggggugcccccuccucu

SEQ ID NO: 2531535 - RNA, 19 nt, Human
ccaggggugcccccuccuc

SEQ ID NO: 2531536 - RNA, 18 nt, Human
ccaggggugcccccuccu

SEQ ID NO: 2531537 - RNA, 19 nt, Human
ccaggggugggacacccug

SEQ ID NO: 2531538 - RNA, 16 nt, Human
ccaggguagcccgccu

SEQ ID NO: 2531539 - RNA, 14 nt, Human
ccaggguagcccgc

SEQ ID NO: 2531540 - RNA, 13 nt, Human
ccagggguuucuc

SEQ ID NO: 2531541 - RNA, 23 nt, Human
ccaggggugggacacccugugau

SEQ ID NO: 2531542 - RNA, 13 nt, Human
ccaggggugggac

SEQ ID NO: 2531543 - RNA, 20 nt, Human
ccaggggaaaaucagccugc

SEQ ID NO: 2531544 - RNA, 19 nt, Human
ccaggggaaaaucagccug

SEQ ID NO: 2531545 - RNA, 17 nt, Human
ccagggucccucugugu

SEQ ID NO: 2531546 - RNA, 16 nt, Human
ccagggucccucugug

SEQ ID NO: 2531547 - RNA, 18 nt, Human
ccagggucccucugugua

SEQ ID NO: 2531548 - RNA, 13 nt, Human
ccagggucccugg

SEQ ID NO: 2531549 - RNA, 22 nt, Human
ccaggguagcccgccugccagu

SEQ ID NO: 2531550 - RNA, 21 nt, Human
ccaggguagcccgccugccag

SEQ ID NO: 2531551 - RNA, 20 nt, Human
ccaggguagcccgccugcca

SEQ ID NO: 2531552 - RNA, 19 nt, Human
ccaggguagcccgccugcc

SEQ ID NO: 2531553 - RNA, 21 nt, Human
ccagggucacugaaggccugg

SEQ ID NO: 2531554 - RNA, 23 nt, Human
ccaggguagcccgccugccaguc

SEQ ID NO: 2531555 - RNA, 17 nt, Human
ccagggucacugaaggc

SEQ ID NO: 2531556 - RNA, 15 nt, Human
ccagaugcaccagcc

SEQ ID NO: 2531557 - RNA, 17 nt, Human
ccagaugcaccagcccu

SEQ ID NO: 2531558 - RNA, 18 nt, Human
ccagaugcaccagcccuu

SEQ ID NO: 2531559 - RNA, 20 nt, Human
ccagagggccugcaagggag

SEQ ID NO: 2531560 - RNA, 19 nt, Human
ccagagggccugcaaggga

SEQ ID NO: 2531561 - RNA, 18 nt, Human
ccagagggccugcaaggg

SEQ ID NO: 2531562 - RNA, 17 nt, Human
ccagagggccugcaagg

SEQ ID NO: 2531563 - RNA, 16 nt, Human
ccaccuuggcucaagu

SEQ ID NO: 2531564 - RNA, 15 nt, Human
ccagauccuggaaau

SEQ ID NO: 2531565 - RNA, 14 nt, Human
ccagauccucuugg

SEQ ID NO: 2531566 - RNA, 15 nt, Human
ccagauccucuuggu

SEQ ID NO: 2531567 - RNA, 14 nt, Human
ccagauccucacaa

SEQ ID NO: 2531568 - RNA, 17 nt, Human
ccagauccucacaacca

SEQ ID NO: 2531569 - RNA, 18 nt, Human
ccagaucccagaaggacc

SEQ ID NO: 2531570 - RNA, 21 nt, Human
ccagaguuccccaugcagaca

SEQ ID NO: 2531571 - RNA, 19 nt, Human
ccagaguuccccaugcaga

SEQ ID NO: 2531572 - RNA, 18 nt, Human
ccagaguuccccaugcag

SEQ ID NO: 2531573 - RNA, 13 nt, Human
ccagauccagccu

SEQ ID NO: 2531574 - RNA, 14 nt, Human
ccagauccagccug

SEQ ID NO: 2531575 - RNA, 15 nt, Human
ccagauccagccugg

SEQ ID NO: 2531576 - RNA, 16 nt, Human
ccagauccagccuggg

SEQ ID NO: 2531577 - RNA, 13 nt, Human
ccagaucccagaa

SEQ ID NO: 2531578 - RNA, 16 nt, Human
ccagaucccagaagga

SEQ ID NO: 2531579 - RNA, 17 nt, Human
ccagaucccagaaggac

SEQ ID NO: 2531580 - RNA, 16 nt, Human
ccagaguccuuuccaa

SEQ ID NO: 2531581 - RNA, 21 nt, Human
ccagaguccuuuccaaggcuu

SEQ ID NO: 2531582 - RNA, 13 nt, Human
ccagaguggccug

SEQ ID NO: 2531583 - RNA, 14 nt, Human
ccagaguggccugg

SEQ ID NO: 2531584 - RNA, 15 nt, Human
ccagaguggccuggc

SEQ ID NO: 2531585 - RNA, 16 nt, Human
ccagaguggccuggcc

SEQ ID NO: 2531586 - RNA, 17 nt, Human
ccagaguggccuggcca

SEQ ID NO: 2531587 - RNA, 18 nt, Human
ccagaguggccuggccag

SEQ ID NO: 2531588 - RNA, 19 nt, Human
ccagaguggccuggccagg

SEQ ID NO: 2531589 - RNA, 21 nt, Human
ccagaguggccuggccaggag

SEQ ID NO: 2531590 - RNA, 22 nt, Human
ccagaguggccuggccaggagc

SEQ ID NO: 2531591 - RNA, 12 nt, Human
ccagagugugaa

SEQ ID NO: 2531592 - RNA, 18 nt, Human
ccagagugugggaaggga

SEQ ID NO: 2531593 - RNA, 21 nt, Human
ccagagugugggaagggagag

SEQ ID NO: 2531594 - RNA, 23 nt, Human
ccagaguggccuggccaggagcu

SEQ ID NO: 2531595 - RNA, 21 nt, Human
ccagaguggggaugacaugca

SEQ ID NO: 2531596 - RNA, 15 nt, Human
ccagcagccagcucu

SEQ ID NO: 2531597 - RNA, 16 nt, Human
ccagcagccagcucuc

SEQ ID NO: 2531598 - RNA, 18 nt, Human
ccagcagccagcucucag

SEQ ID NO: 2531599 - RNA, 19 nt, Human
ccagcagccagcucucagc

SEQ ID NO: 2531600 - RNA, 20 nt, Human
ccagcagccagcucucagcc

SEQ ID NO: 2531601 - RNA, 15 nt, Human
ccagcaggcucucag

SEQ ID NO: 2531602 - RNA, 13 nt, Human
ccagcaggcucuc

SEQ ID NO: 2531603 - RNA, 24 nt, Human
ccagcagcggaaccgcccaggauc

SEQ ID NO: 2531604 - RNA, 19 nt, Human
ccagcagcgccuuucccaa

SEQ ID NO: 2531605 - RNA, 17 nt, Human
ccagcagcgccuuuccc

SEQ ID NO: 2531606 - RNA, 18 nt, Human
ccagcagcgccuuuccca

SEQ ID NO: 2531607 - RNA, 12 nt, Human
ccagcagcgccu

SEQ ID NO: 2531608 - RNA, 13 nt, Human
ccaggaagccagc

SEQ ID NO: 2531609 - RNA, 14 nt, Human
ccaggaacugggcc

SEQ ID NO: 2531610 - RNA, 12 nt, Human
ccaggaagccag

SEQ ID NO: 2531611 - RNA, 15 nt, Human
ccaggaaaggcucca

SEQ ID NO: 2531612 - RNA, 14 nt, Human
ccaggaaaggcucc

SEQ ID NO: 2531613 - RNA, 16 nt, Human
ccaggaaaggcuccag

SEQ ID NO: 2531614 - RNA, 21 nt, Human
ccagcuuaaaguaaccggaug

SEQ ID NO: 2531615 - RNA, 24 nt, Human
ccaggaaccacaccacaucuaagc

SEQ ID NO: 2531616 - RNA, 14 nt, Human
ccaggaaccuccuc

SEQ ID NO: 2531617 - RNA, 23 nt, Human
ccaggaaacucugcauucuagua

SEQ ID NO: 2531618 - RNA, 19 nt, Human
ccagcuuaaaggggcuaga

SEQ ID NO: 2531619 - RNA, 17 nt, Human
ccagcuguucagcuggu

SEQ ID NO: 2531620 - RNA, 22 nt, Human
ccagcucaauggacuggaaggg

SEQ ID NO: 2531621 - RNA, 22 nt, Human
ccagcuguucugucccuuggag

SEQ ID NO: 2531622 - RNA, 17 nt, Human
ccagcucaauggacugg

SEQ ID NO: 2531623 - RNA, 15 nt, Human
ccagcuacucaggag

SEQ ID NO: 2531624 - RNA, 17 nt, Human
ccagcuacucaggaggc

SEQ ID NO: 2531625 - RNA, 19 nt, Human
ccagcuacucaggaggcug

SEQ ID NO: 2531626 - RNA, 20 nt, Human
ccagcuacucaggaggcuga

SEQ ID NO: 2531627 - RNA, 22 nt, Human
ccagcucaccagccccagugcc

SEQ ID NO: 2531628 - RNA, 16 nt, Human
ccagcuguucagcugg

SEQ ID NO: 2531629 - RNA, 16 nt, Human
ccagcucaccagcccc

SEQ ID NO: 2531630 - RNA, 15 nt, Human
ccagcucaccagccc

SEQ ID NO: 2531631 - RNA, 12 nt, Human
ccagccccugga

SEQ ID NO: 2531632 - RNA, 11 nt, Human
ccagccccugg

SEQ ID NO: 2531633 - RNA, 15 nt, Human
ccagccccugcccca

SEQ ID NO: 2531634 - RNA, 23 nt, Human
ccagccccucuggucgcuccugc

SEQ ID NO: 2531635 - RNA, 22 nt, Human
ccagccccucuggucgcuccug

SEQ ID NO: 2531636 - RNA, 17 nt, Human
ccagccccucuggucgc

SEQ ID NO: 2531637 - RNA, 15 nt, Human
ccagccccucugguc

SEQ ID NO: 2531638 - RNA, 14 nt, Human
ccagccccucuggu

SEQ ID NO: 2531639 - RNA, 20 nt, Human
ccagcuacucaagaggcuga

SEQ ID NO: 2531640 - RNA, 17 nt, Human
ccagcuacaccuuucuc

SEQ ID NO: 2531641 - RNA, 14 nt, Human
ccagcuacucagaa

SEQ ID NO: 2531642 - RNA, 16 nt, Human
ccagcuacucagaagc

SEQ ID NO: 2531643 - RNA, 17 nt, Human
ccagcuacucagaagcc

SEQ ID NO: 2531644 - RNA, 20 nt, Human
ccagcuacucagaagccuga

SEQ ID NO: 2531645 - RNA, 21 nt, Human
ccagcuacucagaagccugag

SEQ ID NO: 2531646 - RNA, 23 nt, Human
ccagcuacucagaagccugaggc

SEQ ID NO: 2531647 - RNA, 13 nt, Human
ccagcuacucagg

SEQ ID NO: 2531648 - RNA, 14 nt, Human
ccagcuacucagga

SEQ ID NO: 2531649 - RNA, 22 nt, Human
ccagcuacccuuuuucuccagc

SEQ ID NO: 2531650 - RNA, 21 nt, Human
ccagcuacccuuuuucuccag

SEQ ID NO: 2531651 - RNA, 16 nt, Human
ccagcuacccuuuuuc

SEQ ID NO: 2531652 - RNA, 20 nt, Human
ccagcuacaccuuucuccuu

SEQ ID NO: 2531653 - RNA, 22 nt, Human
ccagccccugccccagcccaag

SEQ ID NO: 2531654 - RNA, 20 nt, Human
ccagccccugccccagccca

SEQ ID NO: 2531655 - RNA, 18 nt, Human
ccagccccugccccagcc

SEQ ID NO: 2531656 - RNA, 19 nt, Human
ccagcuacaccuuucuccu

SEQ ID NO: 2531657 - RNA, 18 nt, Human
ccagcuacaccuuucucc

SEQ ID NO: 2531658 - RNA, 20 nt, Human
ccuucugacccaugcugccc

SEQ ID NO: 2531659 - RNA, 17 nt, Human
ccuucugacccaugcug

SEQ ID NO: 2531660 - RNA, 16 nt, Human
ccuucugacccaugcu

SEQ ID NO: 2531661 - RNA, 12 nt, Human
ccuucugaccca

SEQ ID NO: 2531662 - RNA, 15 nt, Human
ccuggccugagcugg

SEQ ID NO: 2531663 - RNA, 14 nt, Human
ccuggccugagcug

SEQ ID NO: 2531664 - RNA, 20 nt, Human
ccuggccugagcugggauga

SEQ ID NO: 2531665 - RNA, 14 nt, Human
ccuggccucugugc

SEQ ID NO: 2531666 - RNA, 20 nt, Human
ccuucugaaaaaguauccug

SEQ ID NO: 2531667 - RNA, 22 nt, Human
ccuucugacccaugcugcccug

SEQ ID NO: 2531668 - RNA, 21 nt, Human
ccuucugacccaugcugcccu

SEQ ID NO: 2531669 - RNA, 23 nt, Human
ccuucugacccaugcugcccugu

SEQ ID NO: 2531670 - RNA, 18 nt, Human
ccuucugaggacauucca

SEQ ID NO: 2531671 - RNA, 21 nt, Human
ccuucugaggacauuccaaga

SEQ ID NO: 2531672 - RNA, 12 nt, Human
ccuucugcucag

SEQ ID NO: 2531673 - RNA, 16 nt, Human
ccuucugccugagcuu

SEQ ID NO: 2531674 - RNA, 13 nt, Human
ccuucugcuacug

SEQ ID NO: 2531675 - RNA, 17 nt, Human
ccuucugcucagcucug

SEQ ID NO: 2531676 - RNA, 20 nt, Human
ccuucugcuggauaaaauga

SEQ ID NO: 2531677 - RNA, 22 nt, Human
ccuucuggaauaaggagaauga

SEQ ID NO: 2531678 - RNA, 17 nt, Human
ccuucuggauucuuggc

SEQ ID NO: 2531679 - RNA, 21 nt, Human
ccuucugcuggauaaaaugag

SEQ ID NO: 2531680 - RNA, 17 nt, Human
ccuucuggccucccaca

SEQ ID NO: 2531681 - RNA, 17 nt, Human
ccuucuguaguuuuauc

SEQ ID NO: 2531682 - RNA, 19 nt, Human
ccuucugucccucacagca

SEQ ID NO: 2531683 - RNA, 18 nt, Human
ccuucugucccucacagc

SEQ ID NO: 2531684 - RNA, 16 nt, Human
ccuucuguaguuuuau

SEQ ID NO: 2531685 - RNA, 22 nt, Human
ccuucuguaaagguuuuuggaa

SEQ ID NO: 2531686 - RNA, 22 nt, Human
ccuucugggcaucuguucuggu

SEQ ID NO: 2531687 - RNA, 20 nt, Human
ccuucugggcaucuguucug

SEQ ID NO: 2531688 - RNA, 19 nt, Human
ccuucugggcaucuguucu

SEQ ID NO: 2531689 - RNA, 18 nt, Human
ccuucugggcaucuguuc

SEQ ID NO: 2531690 - RNA, 20 nt, Human
ccuucugggcagaccuugac

SEQ ID NO: 2531691 - RNA, 12 nt, Human
ccuucugggaaa

SEQ ID NO: 2531692 - RNA, 21 nt, Human
ccuucuggauucuuggcccgc

SEQ ID NO: 2531693 - RNA, 20 nt, Human
ccuucuggccucccacagac

SEQ ID NO: 2531694 - RNA, 19 nt, Human
ccuucuggauucuuggccc

SEQ ID NO: 2531695 - RNA, 18 nt, Human
ccuucuggauucuuggcc

SEQ ID NO: 2531696 - RNA, 18 nt, Human
ccuucuggccucccacag

SEQ ID NO: 2531697 - RNA, 15 nt, Human
ccuugcccaccccac

SEQ ID NO: 2531698 - RNA, 11 nt, Human
ccuugcccaga

SEQ ID NO: 2531699 - RNA, 12 nt, Human
ccuugcccagag

SEQ ID NO: 2531700 - RNA, 13 nt, Human
ccuugcccagaga

SEQ ID NO: 2531701 - RNA, 14 nt, Human
ccuugcccagagau

SEQ ID NO: 2531702 - RNA, 19 nt, Human
ccuugcccagagaugccuc

SEQ ID NO: 2531703 - RNA, 21 nt, Human
ccuugcccagagaugccucca

SEQ ID NO: 2531704 - RNA, 23 nt, Human
ccuugcccagagaugccuccacc

SEQ ID NO: 2531705 - RNA, 13 nt, Human
ccuugcccagggc

SEQ ID NO: 2531706 - RNA, 17 nt, Human
ccuugccgucuaccuga

SEQ ID NO: 2531707 - RNA, 15 nt, Human
ccuugcccagggcuc

SEQ ID NO: 2531708 - RNA, 16 nt, Human
ccuugcccagggcuca

SEQ ID NO: 2531709 - RNA, 17 nt, Human
ccuugcccagggcucag

SEQ ID NO: 2531710 - RNA, 18 nt, Human
ccuugcccagggcucagc

SEQ ID NO: 2531711 - RNA, 20 nt, Human
ccuugccgucuaccugaggg

SEQ ID NO: 2531712 - RNA, 16 nt, Human
ccuugccucaaugcca

SEQ ID NO: 2531713 - RNA, 15 nt, Human
ccuugccucaaugcc

SEQ ID NO: 2531714 - RNA, 20 nt, Human
ccuugcccagggcucagccu

SEQ ID NO: 2531715 - RNA, 22 nt, Human
ccuugccuccccauuucccauc

SEQ ID NO: 2531716 - RNA, 17 nt, Human
ccuugccuccccauuuc

SEQ ID NO: 2531717 - RNA, 14 nt, Human
ccuugccuccccau

SEQ ID NO: 2531718 - RNA, 12 nt, Human
ccuugccucccc

SEQ ID NO: 2531719 - RNA, 20 nt, Human
ccuugccucaaugccaguaa

SEQ ID NO: 2531720 - RNA, 19 nt, Human
ccuugccucaaugccagua

SEQ ID NO: 2531721 - RNA, 21 nt, Human
ccuugcuuguugggauuccug

SEQ ID NO: 2531722 - RNA, 23 nt, Human
ccuugccuccccauuucccaucu

SEQ ID NO: 2531723 - RNA, 12 nt, Human
ccuugccuccug

SEQ ID NO: 2531724 - RNA, 22 nt, Human
ccuugcuuggcugcuuggccuu

SEQ ID NO: 2531725 - RNA, 17 nt, Human
ccuuggacauccuccuc

SEQ ID NO: 2531726 - RNA, 16 nt, Human
ccuuggacauccuccu

SEQ ID NO: 2531727 - RNA, 19 nt, Human
ccuuuagccaaacccuugu

SEQ ID NO: 2531728 - RNA, 15 nt, Human
ccuuggaaguuucau

SEQ ID NO: 2531729 - RNA, 22 nt, Human
ccuuggaaguugcauggcauca

SEQ ID NO: 2531730 - RNA, 22 nt, Human
ccuuggaaaccugcccugccug

SEQ ID NO: 2531731 - RNA, 20 nt, Human
ccuuggaaaccugcccugcc

SEQ ID NO: 2531732 - RNA, 23 nt, Human
ccuuggaaaccugcccugccuga

SEQ ID NO: 2531733 - RNA, 17 nt, Human
ccuuggaaaccugcccu

SEQ ID NO: 2531734 - RNA, 19 nt, Human
ccuuggaaaccugcccugc

SEQ ID NO: 2531735 - RNA, 18 nt, Human
ccuuggaaaccugcccug

SEQ ID NO: 2531736 - RNA, 14 nt, Human
ccuugccuccugug

SEQ ID NO: 2531737 - RNA, 23 nt, Human
ccuuuccaccacagccagcaccu

SEQ ID NO: 2531738 - RNA, 13 nt, Human
ccuuuccagcaug

SEQ ID NO: 2531739 - RNA, 19 nt, Human
ccuuuccaccacagccagc

SEQ ID NO: 2531740 - RNA, 22 nt, Human
ccuuuagggcagcuugccccgg

SEQ ID NO: 2531741 - RNA, 20 nt, Human
ccuuuagggcagcuugcccc

SEQ ID NO: 2531742 - RNA, 15 nt, Human
ccuuuagggcagcuu

SEQ ID NO: 2531743 - RNA, 14 nt, Human
ccuuuagggcagcu

SEQ ID NO: 2531744 - RNA, 13 nt, Human
ccuuuagggcagc

SEQ ID NO: 2531745 - RNA, 20 nt, Human
ccuuuagcgcccaguugggu

SEQ ID NO: 2531746 - RNA, 14 nt, Human
ccuuuagcgcccag

SEQ ID NO: 2531747 - RNA, 12 nt, Human
ccuuuccccagc

SEQ ID NO: 2531748 - RNA, 19 nt, Human
ccuuucccaggugcuacac

SEQ ID NO: 2531749 - RNA, 11 nt, Human
ccuuuccauaa

SEQ ID NO: 2531750 - RNA, 16 nt, Human
ccuuuccccagcccag

SEQ ID NO: 2531751 - RNA, 15 nt, Human
ccuuuccccagccca

SEQ ID NO: 2531752 - RNA, 14 nt, Human
ccuuuccccagccc

SEQ ID NO: 2531753 - RNA, 13 nt, Human
ccuuuccccagcc

SEQ ID NO: 2531754 - RNA, 18 nt, Human
ccuuuccccagcccaggg

SEQ ID NO: 2531755 - RNA, 17 nt, Human
ccuuuccccagcccagg

SEQ ID NO: 2531756 - RNA, 23 nt, Human
ccuuuucuuuucuacccuagcca

SEQ ID NO: 2531757 - RNA, 21 nt, Human
ccuuuugaaauuaaccucuca

SEQ ID NO: 2531758 - RNA, 22 nt, Human
ccuuuucuuuucuacccuagcc

SEQ ID NO: 2531759 - RNA, 18 nt, Human
ccuuuucuuuucuacccu

SEQ ID NO: 2531760 - RNA, 20 nt, Human
ccuuuugcaccugcucucuu

SEQ ID NO: 2531761 - RNA, 20 nt, Human
ccuuuugcaccccucccauu

SEQ ID NO: 2531762 - RNA, 19 nt, Human
ccuuuugcaccccucccau

SEQ ID NO: 2531763 - RNA, 18 nt, Human
ccuuuugcaccccuccca

SEQ ID NO: 2531764 - RNA, 17 nt, Human
ccuuuugcaccccuccc

SEQ ID NO: 2531765 - RNA, 23 nt, Human
ccuuuugaaguaguuuguauaac

SEQ ID NO: 2531766 - RNA, 23 nt, Human
ccuuuugaacgcccccccccacc

SEQ ID NO: 2531767 - RNA, 22 nt, Human
ccuuuucugcauuuugcuauug

SEQ ID NO: 2531768 - RNA, 14 nt, Human
ccuuuucugcauuu

SEQ ID NO: 2531769 - RNA, 22 nt, Human
ccuuuucuagcccgaauacaaa

SEQ ID NO: 2531770 - RNA, 15 nt, Human
cgacagugagacucu

SEQ ID NO: 2531771 - RNA, 16 nt, Human
cgacagugagacucug

SEQ ID NO: 2531772 - RNA, 17 nt, Human
ccuuuuuuauacauaaa

SEQ ID NO: 2531773 - RNA, 18 nt, Human
ccuuuuuuauacauaaac

SEQ ID NO: 2531774 - RNA, 14 nt, Human
cgaccaccugccca

SEQ ID NO: 2531775 - RNA, 12 nt, Human
cgaccaccugcc

SEQ ID NO: 2531776 - RNA, 23 nt, Human
cgaccagacaccuugacagggca

SEQ ID NO: 2531777 - RNA, 12 nt, Human
ccuuuuugaagu

SEQ ID NO: 2531778 - RNA, 22 nt, Human
cgacauagcccaucccugccug

SEQ ID NO: 2531779 - RNA, 21 nt, Human
cgaccaccccugccuccaccc

SEQ ID NO: 2531780 - RNA, 16 nt, Human
cgaccaccccugccuc

SEQ ID NO: 2531781 - RNA, 15 nt, Human
cgaccaccccugccu

SEQ ID NO: 2531782 - RNA, 23 nt, Human
cgaccacagggucugcacucuaa

SEQ ID NO: 2531783 - RNA, 14 nt, Human
cgaccacagggucu

SEQ ID NO: 2531784 - RNA, 19 nt, Human
cgacauggacccggagcua

SEQ ID NO: 2531785 - RNA, 12 nt, Human
ccuuuuuuauac

SEQ ID NO: 2531786 - RNA, 21 nt, Human
ccuuuuucucccucuggauca

SEQ ID NO: 2531787 - RNA, 20 nt, Human
ccuuuuucuuuauaaacuuu

SEQ ID NO: 2531788 - RNA, 16 nt, Human
ccuuuuucuuuauaaa

SEQ ID NO: 2531789 - RNA, 18 nt, Human
ccuuuuucucccucugga

SEQ ID NO: 2531790 - RNA, 17 nt, Human
ccuuuuuccuugucccc

SEQ ID NO: 2531791 - RNA, 16 nt, Human
ccuuuuucuccagcug

SEQ ID NO: 2531792 - RNA, 14 nt, Human
ccuuuuuccuuguc

SEQ ID NO: 2531793 - RNA, 13 nt, Human
ccuuuuuccuugu

SEQ ID NO: 2531794 - RNA, 14 nt, Human
ccuuuuucuccagc

SEQ ID NO: 2531795 - RNA, 21 nt, Human
ccuuuuuccccaaagucuuaa

SEQ ID NO: 2531796 - RNA, 13 nt, Human
ccuuuuuccuucc

SEQ ID NO: 2531797 - RNA, 15 nt, Human
ccuuuugucugccuc

SEQ ID NO: 2531798 - RNA, 19 nt, Human
ccuuuuggcccccgagcug

SEQ ID NO: 2531799 - RNA, 20 nt, Human
ccuuuuggcccccgagcugg

SEQ ID NO: 2531800 - RNA, 21 nt, Human
ccuuuuggcccccgagcuggg

SEQ ID NO: 2531801 - RNA, 23 nt, Human
ccuuuuggcccccgagcuggggg

SEQ ID NO: 2531802 - RNA, 19 nt, Human
ccuuuuguaccauggugug

SEQ ID NO: 2531803 - RNA, 18 nt, Human
ccuuuugcuugaaaccaa

SEQ ID NO: 2531804 - RNA, 19 nt, Human
ccuuuugcggaugggaggg

SEQ ID NO: 2531805 - RNA, 12 nt, Human
ccuuuuggcacu

SEQ ID NO: 2531806 - RNA, 12 nt, Human
ccuuuuggcccc

SEQ ID NO: 2531807 - RNA, 17 nt, Human
ccuuuugcaccugcucu

SEQ ID NO: 2531808 - RNA, 14 nt, Human
ccuuuugcaucauu

SEQ ID NO: 2531809 - RNA, 18 nt, Human
cgaccugguuuuuaaaua

SEQ ID NO: 2531810 - RNA, 16 nt, Human
cgaccugccucggccu

SEQ ID NO: 2531811 - RNA, 23 nt, Human
cgaccugauuuacaguuucaaaa

SEQ ID NO: 2531812 - RNA, 18 nt, Human
cgaccugauuuacaguuu

SEQ ID NO: 2531813 - RNA, 16 nt, Human
cgaccccaucugccca

SEQ ID NO: 2531814 - RNA, 15 nt, Human
cgaccccaucugccc

SEQ ID NO: 2531815 - RNA, 14 nt, Human
cgaccccaucugcc

SEQ ID NO: 2531816 - RNA, 13 nt, Human
cgaccgcccccuc

SEQ ID NO: 2531817 - RNA, 20 nt, Human
cgaccgaggcuggagcuggc

SEQ ID NO: 2531818 - RNA, 23 nt, Human
cgaccaccccugccuccacccuc

SEQ ID NO: 2531819 - RNA, 15 nt, Human
cgaccagagccccac

SEQ ID NO: 2531820 - RNA, 12 nt, Human
cgaccucagccu

SEQ ID NO: 2531821 - RNA, 13 nt, Human
cgaccucagccuu

SEQ ID NO: 2531822 - RNA, 14 nt, Human
cgaccucagccuuc

SEQ ID NO: 2531823 - RNA, 15 nt, Human
cgaccucagccuucc

SEQ ID NO: 2531824 - RNA, 12 nt, Human
cgaccucggugg

SEQ ID NO: 2531825 - RNA, 14 nt, Human
cgaccucguccucc

SEQ ID NO: 2531826 - RNA, 16 nt, Human
cgaccucguccucccc

SEQ ID NO: 2531827 - RNA, 19 nt, Human
cgaccucguccucccccug

SEQ ID NO: 2531828 - RNA, 22 nt, Human
cgaccucguccucccccugcca

SEQ ID NO: 2531829 - RNA, 20 nt, Human
cgaccucuccaucuucagcu

SEQ ID NO: 2531830 - RNA, 23 nt, Human
cgaccucguccucccccugccag

SEQ ID NO: 2531831 - RNA, 21 nt, Human
cgccgugaguucucagggcuc

SEQ ID NO: 2531832 - RNA, 19 nt, Human
cgccgugaguucucagggc

SEQ ID NO: 2531833 - RNA, 18 nt, Human
cgccgugaguucucaggg

SEQ ID NO: 2531834 - RNA, 17 nt, Human
cgccgugaguucucagg

SEQ ID NO: 2531835 - RNA, 22 nt, Human
cgccggggacagaggccugccc

SEQ ID NO: 2531836 - RNA, 20 nt, Human
cgccggggacagaggccugc

SEQ ID NO: 2531837 - RNA, 15 nt, Human
cgccgucuccagggg

SEQ ID NO: 2531838 - RNA, 14 nt, Human
cgccuacaggagug

SEQ ID NO: 2531839 - RNA, 23 nt, Human
cgccgugaguucucagggcuccu

SEQ ID NO: 2531840 - RNA, 13 nt, Human
cgccguggcugcg

SEQ ID NO: 2531841 - RNA, 15 nt, Human
cgccucccacugggg

SEQ ID NO: 2531842 - RNA, 11 nt, Human
cgccucccagc

SEQ ID NO: 2531843 - RNA, 14 nt, Human
cgccucccagccug

SEQ ID NO: 2531844 - RNA, 19 nt, Human
cgccucccacuggggucca

SEQ ID NO: 2531845 - RNA, 16 nt, Human
cgccucccacuggggu

SEQ ID NO: 2531846 - RNA, 19 nt, Human
cgccggggacagaggccug

SEQ ID NO: 2531847 - RNA, 17 nt, Human
cgccggggacagaggcc

SEQ ID NO: 2531848 - RNA, 16 nt, Human
cgccggggacagaggc

SEQ ID NO: 2531849 - RNA, 18 nt, Human
cgccggcgggcgggccgg

SEQ ID NO: 2531850 - RNA, 22 nt, Human
cgccggcaaaacuuuggcacug

SEQ ID NO: 2531851 - RNA, 23 nt, Human
cgccggaguccacucccagugcu

SEQ ID NO: 2531852 - RNA, 18 nt, Human
cgccggaguccacuccca

SEQ ID NO: 2531853 - RNA, 17 nt, Human
cgccgcuuuucuccucu

SEQ ID NO: 2531854 - RNA, 18 nt, Human
cgccgccucgcccaccgc

SEQ ID NO: 2531855 - RNA, 20 nt, Human
cgccgccugguacucaagcc

SEQ ID NO: 2531856 - RNA, 22 nt, Human
cgccgccggaguccacucccag

SEQ ID NO: 2531857 - RNA, 23 nt, Human
cgccgcaaaccacacuggacucc

SEQ ID NO: 2531858 - RNA, 22 nt, Human
cgccgcaaaccacacuggacuc

SEQ ID NO: 2531859 - RNA, 21 nt, Human
cgccgcaaaccacacuggacu

SEQ ID NO: 2531860 - RNA, 16 nt, Human
cgccgccucgcccacc

SEQ ID NO: 2531861 - RNA, 13 nt, Human
cgccgccucgccc

SEQ ID NO: 2531862 - RNA, 12 nt, Human
cgccgccucuuu

SEQ ID NO: 2531863 - RNA, 15 nt, Human
cgccgccugguacuc

SEQ ID NO: 2531864 - RNA, 14 nt, Human
cgccgccugguacu

SEQ ID NO: 2531865 - RNA, 14 nt, Human
cgcaggcuggcccu

SEQ ID NO: 2531866 - RNA, 15 nt, Human
cgcaggcuggcccug

SEQ ID NO: 2531867 - RNA, 17 nt, Human
cgcaggcuggcccugcc

SEQ ID NO: 2531868 - RNA, 18 nt, Human
cgcaggcuggcccugccc

SEQ ID NO: 2531869 - RNA, 19 nt, Human
cgcaggcuggcccugcccu

SEQ ID NO: 2531870 - RNA, 20 nt, Human
cgcaggcuggcccugcccug

SEQ ID NO: 2531871 - RNA, 12 nt, Human
cgccaaggcugg

SEQ ID NO: 2531872 - RNA, 13 nt, Human
cgccaaggcuggg

SEQ ID NO: 2531873 - RNA, 16 nt, Human
cgccaaggcuggggga

SEQ ID NO: 2531874 - RNA, 19 nt, Human
cgccaagcaaccugggucc

SEQ ID NO: 2531875 - RNA, 19 nt, Human
cgccgagucugucucuguc

SEQ ID NO: 2531876 - RNA, 18 nt, Human
cgccgagucugucucugu

SEQ ID NO: 2531877 - RNA, 18 nt, Human
cgccgacuuuguaccccc

SEQ ID NO: 2531878 - RNA, 20 nt, Human
cgccgcaaaccacacuggac

SEQ ID NO: 2531879 - RNA, 19 nt, Human
cgccgcaaaccacacugga

SEQ ID NO: 2531880 - RNA, 16 nt, Human
cgaguagcugggacua

SEQ ID NO: 2531881 - RNA, 15 nt, Human
cgaguagcugggacu

SEQ ID NO: 2531882 - RNA, 14 nt, Human
cgaguagcugggac

SEQ ID NO: 2531883 - RNA, 13 nt, Human
cgaguagcuggga

SEQ ID NO: 2531884 - RNA, 18 nt, Human
cgaguuacagacaaagcg

SEQ ID NO: 2531885 - RNA, 17 nt, Human
cgaguuacagacaaagc

SEQ ID NO: 2531886 - RNA, 15 nt, Human
cgagugcucauuuca

SEQ ID NO: 2531887 - RNA, 19 nt, Human
cgagugugugcaugugugu

SEQ ID NO: 2531888 - RNA, 11 nt, Human
cgagugugugc

SEQ ID NO: 2531889 - RNA, 18 nt, Human
cgagugugugcaugugug

SEQ ID NO: 2531890 - RNA, 22 nt, Human
cgagugugaagcuuccuuggcu

SEQ ID NO: 2531891 - RNA, 22 nt, Human
cgccucugcaagggcagaacac

SEQ ID NO: 2531892 - RNA, 22 nt, Human
cgccucgcccaccgcaugcccc

SEQ ID NO: 2531893 - RNA, 19 nt, Human
cgccucgcccaccgcaugc

SEQ ID NO: 2531894 - RNA, 16 nt, Human
cgccucgcccaccgca

SEQ ID NO: 2531895 - RNA, 15 nt, Human
cgccucgcccaccgc

SEQ ID NO: 2531896 - RNA, 21 nt, Human
cgccucucccgucagggccca

SEQ ID NO: 2531897 - RNA, 15 nt, Human
cgccucucccgucag

SEQ ID NO: 2531898 - RNA, 13 nt, Human
cgccucucccguc

SEQ ID NO: 2531899 - RNA, 10 nt, Human
cgccuccccg

SEQ ID NO: 2531900 - RNA, 24 nt, Human
cgccuccccacggccgcuccaggg

SEQ ID NO: 2531901 - RNA, 16 nt, Human
cgccuccccugcccca

SEQ ID NO: 2531902 - RNA, 22 nt, Human
cgccgugaguucucagggcucc

SEQ ID NO: 2531903 - RNA, 15 nt, Human
cgccucccagccugg

SEQ ID NO: 2531904 - RNA, 13 nt, Human
cgccucgcccacc

SEQ ID NO: 2531905 - RNA, 14 nt, Human
cgccucgcccaccg

SEQ ID NO: 2531906 - RNA, 22 nt, Human
cgccuccccgaaacaggcuacu

SEQ ID NO: 2531907 - RNA, 17 nt, Human
cggagcaaacucugcug

SEQ ID NO: 2531908 - RNA, 16 nt, Human
cggagcaaacucugcu

SEQ ID NO: 2531909 - RNA, 19 nt, Human
cggagauuggacggccuga

SEQ ID NO: 2531910 - RNA, 22 nt, Human
cggagccccaggccucuguguc

SEQ ID NO: 2531911 - RNA, 14 nt, Human
cggagccccaggcc

SEQ ID NO: 2531912 - RNA, 12 nt, Human
cggagccccagg

SEQ ID NO: 2531913 - RNA, 18 nt, Human
cggagccacuccucugac

SEQ ID NO: 2531914 - RNA, 21 nt, Human
cggagccacuccucugacuca

SEQ ID NO: 2531915 - RNA, 13 nt, Human
cggagccacuccu

SEQ ID NO: 2531916 - RNA, 17 nt, Human
cggagccacuccucuga

SEQ ID NO: 2531917 - RNA, 11 nt, Human
cggagccacuc

SEQ ID NO: 2531918 - RNA, 12 nt, Human
cggcggcgccgg

SEQ ID NO: 2531919 - RNA, 20 nt, Human
cggcgcuugccacuagggcu

SEQ ID NO: 2531920 - RNA, 18 nt, Human
cggcucacugcagccuca

SEQ ID NO: 2531921 - RNA, 17 nt, Human
cggcucacugcauccuc

SEQ ID NO: 2531922 - RNA, 19 nt, Human
cggcucacugcagccucaa

SEQ ID NO: 2531923 - RNA, 15 nt, Human
cggcucccuggagcc

SEQ ID NO: 2531924 - RNA, 21 nt, Human
cggcucacugcauccuccgcc

SEQ ID NO: 2531925 - RNA, 13 nt, Human
cggcuccugcugc

SEQ ID NO: 2531926 - RNA, 19 nt, Human
cggcuccucggacucugcu

SEQ ID NO: 2531927 - RNA, 12 nt, Human
cggcuccugcug

SEQ ID NO: 2531928 - RNA, 16 nt, Human
cggcucggaggaagcc

SEQ ID NO: 2531929 - RNA, 20 nt, Human
cggcucggaggaagccccca

SEQ ID NO: 2531930 - RNA, 14 nt, Human
cggcuccugugcuu

SEQ ID NO: 2531931 - RNA, 20 nt, Human
cggcucgagcaguccugccu

SEQ ID NO: 2531932 - RNA, 23 nt, Human
cggcuccugcugcaccaacccag

SEQ ID NO: 2531933 - RNA, 17 nt, Human
cggcuccugcugcacca

SEQ ID NO: 2531934 - RNA, 15 nt, Human
cggcuccugcugcac

SEQ ID NO: 2531935 - RNA, 14 nt, Human
cggcuccugcugca

SEQ ID NO: 2531936 - RNA, 13 nt, Human
cggcuccugugcu

SEQ ID NO: 2531937 - RNA, 22 nt, Human
cggagguugggugggccggcuu

SEQ ID NO: 2531938 - RNA, 19 nt, Human
cggagucagugccaggucc

SEQ ID NO: 2531939 - RNA, 15 nt, Human
cggagucagugccag

SEQ ID NO: 2531940 - RNA, 18 nt, Human
cggaguaucugggaacug

SEQ ID NO: 2531941 - RNA, 16 nt, Human
cggagguguggagccg

SEQ ID NO: 2531942 - RNA, 13 nt, Human
cggagguugcagg

SEQ ID NO: 2531943 - RNA, 17 nt, Human
cggagcuaacacuggcc

SEQ ID NO: 2531944 - RNA, 18 nt, Human
cggagcuaacacuggccc

SEQ ID NO: 2531945 - RNA, 20 nt, Human
cggagccgggaaagaagagc

SEQ ID NO: 2531946 - RNA, 22 nt, Human
cggagccucauccgaggcaggg

SEQ ID NO: 2531947 - RNA, 20 nt, Human
cggagccucauccgaggcag

SEQ ID NO: 2531948 - RNA, 21 nt, Human
cggagccucauccgaggcagg

SEQ ID NO: 2531949 - RNA, 18 nt, Human
cggaggggccuggcagcc

SEQ ID NO: 2531950 - RNA, 16 nt, Human
cggaggggccuggcag

SEQ ID NO: 2531951 - RNA, 14 nt, Human
cggagucccaccuu

SEQ ID NO: 2531952 - RNA, 20 nt, Human
cggaguccacucccagugcu

SEQ ID NO: 2531953 - RNA, 16 nt, Human
cggaguccacucccag

SEQ ID NO: 2531954 - RNA, 13 nt, Human
cggcgccaccauc

SEQ ID NO: 2531955 - RNA, 17 nt, Human
cggcgccaccauccugc

SEQ ID NO: 2531956 - RNA, 15 nt, Human
cggcgccaccauccu

SEQ ID NO: 2531957 - RNA, 18 nt, Human
cggcgccccugccaccuc

SEQ ID NO: 2531958 - RNA, 18 nt, Human
cggcgcccucuguccuga

SEQ ID NO: 2531959 - RNA, 17 nt, Human
cggcgcccucuguccug

SEQ ID NO: 2531960 - RNA, 13 nt, Human
cggcgcgguggcu

SEQ ID NO: 2531961 - RNA, 20 nt, Human
cggcgcgguggcucacgccu

SEQ ID NO: 2531962 - RNA, 13 nt, Human
cggcggagcuggc

SEQ ID NO: 2531963 - RNA, 21 nt, Human
cggcggagcuggccccgccgc

SEQ ID NO: 2531964 - RNA, 19 nt, Human
cggcggagcuggccccgcc

SEQ ID NO: 2531965 - RNA, 14 nt, Human
cuaccugaggggcc

SEQ ID NO: 2531966 - RNA, 11 nt, Human
cuaccugaggg

SEQ ID NO: 2531967 - RNA, 19 nt, Human
cuaccugacacucccuugg

SEQ ID NO: 2531968 - RNA, 20 nt, Human
cuaccugacacucccuuggg

SEQ ID NO: 2531969 - RNA, 18 nt, Human
cuagcccaggagagagaa

SEQ ID NO: 2531970 - RNA, 17 nt, Human
cuagcccaggagagaga

SEQ ID NO: 2531971 - RNA, 16 nt, Human
cuagcccaggagagag

SEQ ID NO: 2531972 - RNA, 15 nt, Human
cuagcccaggagaga

SEQ ID NO: 2531973 - RNA, 21 nt, Human
cuagccaccaacucuugcagg

SEQ ID NO: 2531974 - RNA, 15 nt, Human
cuagccaccaacucu

SEQ ID NO: 2531975 - RNA, 22 nt, Human
cuagccaccaacucuugcaggu

SEQ ID NO: 2531976 - RNA, 14 nt, Human
cuagcccaggagag

SEQ ID NO: 2531977 - RNA, 23 nt, Human
cuagcccaggagagagaaagcca

SEQ ID NO: 2531978 - RNA, 22 nt, Human
cuagcccaggagagagaaagcc

SEQ ID NO: 2531979 - RNA, 20 nt, Human
cuagcccaggagagagaaag

SEQ ID NO: 2531980 - RNA, 19 nt, Human
cuagcccaggagagagaaa

SEQ ID NO: 2531981 - RNA, 19 nt, Human
cuagcccauggacuucaca

SEQ ID NO: 2531982 - RNA, 14 nt, Human
cuagcccauggacu

SEQ ID NO: 2531983 - RNA, 13 nt, Human
cuagccccugugg

SEQ ID NO: 2531984 - RNA, 23 nt, Human
cuagccaaaugguuuaacuucug

SEQ ID NO: 2531985 - RNA, 18 nt, Human
cuagccaccgccuccuac

SEQ ID NO: 2531986 - RNA, 17 nt, Human
cuagcauggcugccaau

SEQ ID NO: 2531987 - RNA, 15 nt, Human
cuagaagaugaauac

SEQ ID NO: 2531988 - RNA, 16 nt, Human
cuagaacacagaaagc

SEQ ID NO: 2531989 - RNA, 22 nt, Human
cuagcagugaugaaaaugaauc

SEQ ID NO: 2531990 - RNA, 20 nt, Human
cuagaagaugaauacaaaca

SEQ ID NO: 2531991 - RNA, 23 nt, Human
cuagcagcagggagggcuucugc

SEQ ID NO: 2531992 - RNA, 16 nt, Human
cuagaacucccuuuca

SEQ ID NO: 2531993 - RNA, 17 nt, Human
cuagaacucccuuucaa

SEQ ID NO: 2531994 - RNA, 18 nt, Human
cuagaacucccuuucaac

SEQ ID NO: 2531995 - RNA, 19 nt, Human
cuagaacucccuuucaaca

SEQ ID NO: 2531996 - RNA, 12 nt, Human
cuagcagcaggg

SEQ ID NO: 2531997 - RNA, 22 nt, Human
cuagcagcagggagggcuucug

SEQ ID NO: 2531998 - RNA, 21 nt, Human
cuagaacacaggcaaaauccu

SEQ ID NO: 2531999 - RNA, 22 nt, Human
cuagaacacaggcaaaauccuu

SEQ ID NO: 2532000 - RNA, 18 nt, Human
cuagaacucuccaucuua

SEQ ID NO: 2532001 - RNA, 19 nt, Human
cuagaaauuccccacccug

SEQ ID NO: 2532002 - RNA, 14 nt, Human
cuagaacacaggca

SEQ ID NO: 2532003 - RNA, 19 nt, Human
cuagaacacaggcaaaauc

SEQ ID NO: 2532004 - RNA, 13 nt, Human
cuagaaauuuuuc

SEQ ID NO: 2532005 - RNA, 23 nt, Human
cuagaaauuuuucagaugcuucu

SEQ ID NO: 2532006 - RNA, 16 nt, Human
cuagaaauugacacaa

SEQ ID NO: 2532007 - RNA, 20 nt, Human
cuagaaauugacacaagugg

SEQ ID NO: 2532008 - RNA, 23 nt, Human
cuagaaaugauccccagcuguuu

SEQ ID NO: 2532009 - RNA, 20 nt, Human
cuaguuccaccaucaagcca

SEQ ID NO: 2532010 - RNA, 18 nt, Human
cuaguuccaccaucaagc

SEQ ID NO: 2532011 - RNA, 17 nt, Human
cuagggccaagcccagc

SEQ ID NO: 2532012 - RNA, 18 nt, Human
cuagggccaagcccagca

SEQ ID NO: 2532013 - RNA, 15 nt, Human
cuagggccuggguuu

SEQ ID NO: 2532014 - RNA, 17 nt, Human
cuaggggagcagggggc

SEQ ID NO: 2532015 - RNA, 12 nt, Human
cuaggggagcag

SEQ ID NO: 2532016 - RNA, 19 nt, Human
cuaggggacacuucccucu

SEQ ID NO: 2532017 - RNA, 15 nt, Human
cuagggccacugaag

SEQ ID NO: 2532018 - RNA, 14 nt, Human
cuaguuccaccauc

SEQ ID NO: 2532019 - RNA, 21 nt, Human
cuagggaaaaaccagcgugug

SEQ ID NO: 2532020 - RNA, 13 nt, Human
cuagggaucccuc

SEQ ID NO: 2532021 - RNA, 17 nt, Human
cuagggaucccucaucu

SEQ ID NO: 2532022 - RNA, 22 nt, Human
cuaggcuggggaaguccucugg

SEQ ID NO: 2532023 - RNA, 13 nt, Human
cuaggcuggggaa

SEQ ID NO: 2532024 - RNA, 21 nt, Human
cuaggcuucagcauauuuaua

SEQ ID NO: 2532025 - RNA, 23 nt, Human
cuaggcuucagcauauuuauagc

SEQ ID NO: 2532026 - RNA, 16 nt, Human
cuagggccaagcccag

SEQ ID NO: 2532027 - RNA, 20 nt, Human
cuagggauucaggcugcuug

SEQ ID NO: 2532028 - RNA, 17 nt, Human
cuagggauucaggcugc

SEQ ID NO: 2532029 - RNA, 18 nt, Human
cuagggauucaggcugcu

SEQ ID NO: 2532030 - RNA, 23 nt, Human
cuagggaucccucaucugucccu

SEQ ID NO: 2532031 - RNA, 16 nt, Human
cuagggaguggucuuu

SEQ ID NO: 2532032 - RNA, 19 nt, Human
cuagggauguucuggcccu

SEQ ID NO: 2532033 - RNA, 15 nt, Human
cuagggauucaggcu

SEQ ID NO: 2532034 - RNA, 16 nt, Human
cuagggauucaggcug

SEQ ID NO: 2532035 - RNA, 21 nt, Human
cuagccccuguggagacuggg

SEQ ID NO: 2532036 - RNA, 20 nt, Human
cuagccccuguggagacugg

SEQ ID NO: 2532037 - RNA, 14 nt, Human
cuagccccugugga

SEQ ID NO: 2532038 - RNA, 22 nt, Human
cuagcccauggacuucacauaa

SEQ ID NO: 2532039 - RNA, 16 nt, Human
cuagcccgaauacaaa

SEQ ID NO: 2532040 - RNA, 13 nt, Human
cuagcccucucac

SEQ ID NO: 2532041 - RNA, 18 nt, Human
cuagcccucucacauuua

SEQ ID NO: 2532042 - RNA, 19 nt, Human
cuagcccucucacauuuau

SEQ ID NO: 2532043 - RNA, 13 nt, Human
cuagccgaccuca

SEQ ID NO: 2532044 - RNA, 14 nt, Human
cuagccgaccucag

SEQ ID NO: 2532045 - RNA, 15 nt, Human
cuagccgaccucagc

SEQ ID NO: 2532046 - RNA, 16 nt, Human
cuagccgaccucagcc

SEQ ID NO: 2532047 - RNA, 17 nt, Human
cuagccgaccucagccu

SEQ ID NO: 2532048 - RNA, 18 nt, Human
cuagccgaccucagccuu

SEQ ID NO: 2532049 - RNA, 19 nt, Human
cuagccgaccucagccuuc

SEQ ID NO: 2532050 - RNA, 20 nt, Human
cuagccgaccucagccuucc

SEQ ID NO: 2532051 - RNA, 19 nt, Human
cuagggaaaaaccagcgug

SEQ ID NO: 2532052 - RNA, 17 nt, Human
cuaggcuggagcccagg

SEQ ID NO: 2532053 - RNA, 15 nt, Human
cuaggcuggagccca

SEQ ID NO: 2532054 - RNA, 11 nt, Human
cuaggcugggg

SEQ ID NO: 2532055 - RNA, 20 nt, Human
cuaggcuggagcccagggag

SEQ ID NO: 2532056 - RNA, 21 nt, Human
cuaggcuuaauaccuggguga

SEQ ID NO: 2532057 - RNA, 13 nt, Human
cuagccucuccag

SEQ ID NO: 2532058 - RNA, 22 nt, Human
cuauaaccccagcucccuagga

SEQ ID NO: 2532059 - RNA, 16 nt, Human
cuaguucuguagaaau

SEQ ID NO: 2532060 - RNA, 23 nt, Human
cuaguucuguagaaaugguugua

SEQ ID NO: 2532061 - RNA, 17 nt, Human
cuaguucuguagaaaug

SEQ ID NO: 2532062 - RNA, 22 nt, Human
cuaguuccaccaucaagccacc

SEQ ID NO: 2532063 - RNA, 23 nt, Human
cuaguugaucagcuuauugucua

SEQ ID NO: 2532064 - RNA, 22 nt, Human
cuaguucuuuguucauagccca

SEQ ID NO: 2532065 - RNA, 23 nt, Human
cuauaaauuccucuuugcuuugc

SEQ ID NO: 2532066 - RNA, 19 nt, Human
cuauaaauuccucuuugcu

SEQ ID NO: 2532067 - RNA, 22 nt, Human
cuauaaauuccucuuugcuuug

SEQ ID NO: 2532068 - RNA, 18 nt, Human
cuauaaccccagcucccu

SEQ ID NO: 2532069 - RNA, 15 nt, Human
cuauaaauuccucuu

SEQ ID NO: 2532070 - RNA, 17 nt, Human
cuauaaauuccucuuug

SEQ ID NO: 2532071 - RNA, 18 nt, Human
cuauaaaugguguuuuuu

SEQ ID NO: 2532072 - RNA, 16 nt, Human
cuauaaaugguguuuu

SEQ ID NO: 2532073 - RNA, 23 nt, Human
cuauaaaugguguuuuuuuaaua

SEQ ID NO: 2532074 - RNA, 17 nt, Human
cuauaaaguaaagcuaa

SEQ ID NO: 2532075 - RNA, 14 nt, Human
cuaagucuuuccau

SEQ ID NO: 2532076 - RNA, 20 nt, Human
cuaagugaaauaagccagac

SEQ ID NO: 2532077 - RNA, 23 nt, Human
cuaagugaaauaagccagacauc

SEQ ID NO: 2532078 - RNA, 15 nt, Human
cuacaugaaacagaa

SEQ ID NO: 2532079 - RNA, 16 nt, Human
cuacaugaaacagaaa

SEQ ID NO: 2532080 - RNA, 18 nt, Human
cuacaugaaacagaaaca

SEQ ID NO: 2532081 - RNA, 13 nt, Human
cuacaugagaaca

SEQ ID NO: 2532082 - RNA, 15 nt, Human
cuacaugagguacug

SEQ ID NO: 2532083 - RNA, 14 nt, Human
cuacaugagaacaa

SEQ ID NO: 2532084 - RNA, 17 nt, Human
cuacaugagaacaaaca

SEQ ID NO: 2532085 - RNA, 15 nt, Human
cuaccuccucaggga

SEQ ID NO: 2532086 - RNA, 22 nt, Human
cuacauaaacugacuuuauccu

SEQ ID NO: 2532087 - RNA, 18 nt, Human
cuacauaaacugacuuua

SEQ ID NO: 2532088 - RNA, 17 nt, Human
cuacauaaacugacuuu

SEQ ID NO: 2532089 - RNA, 22 nt, Human
cuacauaaguaauucaagaaaa

SEQ ID NO: 2532090 - RNA, 15 nt, Human
cuacauaaacugacu

SEQ ID NO: 2532091 - RNA, 12 nt, Human
cuacauaaacug

SEQ ID NO: 2532092 - RNA, 23 nt, Human
cuacauaaguaauucaagaaaac

SEQ ID NO: 2532093 - RNA, 14 nt, Human
cuacaugaaacaga

SEQ ID NO: 2532094 - RNA, 20 nt, Human
cuacauaaacugacuuuauc

SEQ ID NO: 2532095 - RNA, 18 nt, Human
cuacauacaauuccaaac

SEQ ID NO: 2532096 - RNA, 18 nt, Human
cuacaguccucccaucuc

SEQ ID NO: 2532097 - RNA, 17 nt, Human
cuacaguccucccaucu

SEQ ID NO: 2532098 - RNA, 16 nt, Human
cuacaguccucccauc

SEQ ID NO: 2532099 - RNA, 15 nt, Human
cuacaguccucccau

SEQ ID NO: 2532100 - RNA, 17 nt, Human
cuacaguguacagucuu

SEQ ID NO: 2532101 - RNA, 16 nt, Human
cuacaguguacagucu

SEQ ID NO: 2532102 - RNA, 17 nt, Human
cuacaacuucagcagua

SEQ ID NO: 2532103 - RNA, 16 nt, Human
cuacaacuucagcagu

SEQ ID NO: 2532104 - RNA, 14 nt, Human
cuacaguguacagu

SEQ ID NO: 2532105 - RNA, 15 nt, Human
cuacaguguacaguc

SEQ ID NO: 2532106 - RNA, 13 nt, Human
cuacaguugaaaa

SEQ ID NO: 2532107 - RNA, 23 nt, Human
cuacaguuaggguugaguuacuu

SEQ ID NO: 2532108 - RNA, 20 nt, Human
cuacaguguacagucuugua

SEQ ID NO: 2532109 - RNA, 22 nt, Human
cuaagugauccucccaccucag

SEQ ID NO: 2532110 - RNA, 20 nt, Human
cuaagugauccucccaccuc

SEQ ID NO: 2532111 - RNA, 18 nt, Human
cuaagugaggaugaaaaa

SEQ ID NO: 2532112 - RNA, 13 nt, Human
cuaagugauauaa

SEQ ID NO: 2532113 - RNA, 16 nt, Human
cuaagucuuuccauug

SEQ ID NO: 2532114 - RNA, 14 nt, Human
cuaagugaaaaggu

SEQ ID NO: 2532115 - RNA, 16 nt, Human
cuaagugauauaaauc

SEQ ID NO: 2532116 - RNA, 14 nt, Human
cuaagugauauaaa

SEQ ID NO: 2532117 - RNA, 19 nt, Human
cuaauuggaagaaauuccu

SEQ ID NO: 2532118 - RNA, 22 nt, Human
cuaauuggaagaaauuccugua

SEQ ID NO: 2532119 - RNA, 21 nt, Human
cuaauuggaagaaauuccugu

SEQ ID NO: 2532120 - RNA, 22 nt, Human
cuaauuggcaugaaggugucau

SEQ ID NO: 2532121 - RNA, 12 nt, Human
cuaauuuaaaaa

SEQ ID NO: 2532122 - RNA, 22 nt, Human
cuaauuguauaacagguuauuu

SEQ ID NO: 2532123 - RNA, 20 nt, Human
cuaauuguauaacagguuau

SEQ ID NO: 2532124 - RNA, 19 nt, Human
cuaauuguauaacagguua

SEQ ID NO: 2532125 - RNA, 14 nt, Human
cuaauuuaaaaaau

SEQ ID NO: 2532126 - RNA, 18 nt, Human
cuaauuguauaacagguu

SEQ ID NO: 2532127 - RNA, 17 nt, Human
cuaauuguauaacaggu

SEQ ID NO: 2532128 - RNA, 16 nt, Human
cuaauuguauaacagg

SEQ ID NO: 2532129 - RNA, 15 nt, Human
cuaauuguauaacag

SEQ ID NO: 2532130 - RNA, 13 nt, Human
cuaauuguauaac

SEQ ID NO: 2532131 - RNA, 19 nt, Human
cuaauuggccucuuuaaga

SEQ ID NO: 2532132 - RNA, 16 nt, Human
cuacaacaagaguuua

SEQ ID NO: 2532133 - RNA, 18 nt, Human
cuacaaccaagcucucug

SEQ ID NO: 2532134 - RNA, 13 nt, Human
cuacaaccaagcu

SEQ ID NO: 2532135 - RNA, 14 nt, Human
cuacaacuucagca

SEQ ID NO: 2532136 - RNA, 20 nt, Human
cuacaaccaagcucucugca

SEQ ID NO: 2532137 - RNA, 14 nt, Human
cuacaacugagucc

SEQ ID NO: 2532138 - RNA, 18 nt, Human
cuacaaagaagacauguu

SEQ ID NO: 2532139 - RNA, 16 nt, Human
cuacaaagaagacaug

SEQ ID NO: 2532140 - RNA, 15 nt, Human
cuacaaagaagacau

SEQ ID NO: 2532141 - RNA, 14 nt, Human
cuacaaagaagaca

SEQ ID NO: 2532142 - RNA, 20 nt, Human
cuacaaagaagacauguuuu

SEQ ID NO: 2532143 - RNA, 19 nt, Human
cuacaaagaagacauguuu

SEQ ID NO: 2532144 - RNA, 10 nt, Human
cuacaaauca

SEQ ID NO: 2532145 - RNA, 20 nt, Human
cuaauuuuuguauuuuucgu

SEQ ID NO: 2532146 - RNA, 21 nt, Human
cuacaaacaaaauuucuauua

SEQ ID NO: 2532147 - RNA, 23 nt, Human
cuacaaaaaauuagaaauuggcu

SEQ ID NO: 2532148 - RNA, 14 nt, Human
cuaauuuuuguaau

SEQ ID NO: 2532149 - RNA, 20 nt, Human
cuaauuuuuguaauuuuagu

SEQ ID NO: 2532150 - RNA, 17 nt, Human
cuaauuuuuauucauaa

SEQ ID NO: 2532151 - RNA, 17 nt, Human
cuaauuuuuaagcaaaa

SEQ ID NO: 2532152 - RNA, 21 nt, Human
cguggugaucaauuaaaugua

SEQ ID NO: 2532153 - RNA, 14 nt, Human
cgugucuguauuua

SEQ ID NO: 2532154 - RNA, 15 nt, Human
cgugugauuuuucug

SEQ ID NO: 2532155 - RNA, 11 nt, Human
cgugugauuuu

SEQ ID NO: 2532156 - RNA, 22 nt, Human
cgugugagaagugaaugcuggg

SEQ ID NO: 2532157 - RNA, 22 nt, Human
cuaaacugcccccucugcccug

SEQ ID NO: 2532158 - RNA, 23 nt, Human
cgugugagaagugaaugcuggga

SEQ ID NO: 2532159 - RNA, 21 nt, Human
cgugugagaagugaaugcugg

SEQ ID NO: 2532160 - RNA, 22 nt, Human
cgugucuguauuuaugugugag

SEQ ID NO: 2532161 - RNA, 16 nt, Human
cuaaacuuccccaucu

SEQ ID NO: 2532162 - RNA, 20 nt, Human
cuaaacuuccccaucuucua

SEQ ID NO: 2532163 - RNA, 23 nt, Human
cuaaacugcccccucugcccugc

SEQ ID NO: 2532164 - RNA, 18 nt, Human
cgugugauuuuucuggag

SEQ ID NO: 2532165 - RNA, 18 nt, Human
cgugugcacacacaccac

SEQ ID NO: 2532166 - RNA, 18 nt, Human
cuaaagagcccuugccuc

SEQ ID NO: 2532167 - RNA, 17 nt, Human
cuaaagagcccuugccu

SEQ ID NO: 2532168 - RNA, 16 nt, Human
cuaaagagcccuugcc

SEQ ID NO: 2532169 - RNA, 15 nt, Human
cuaaagagcccuugc

SEQ ID NO: 2532170 - RNA, 14 nt, Human
cuaaacuuucacac

SEQ ID NO: 2532171 - RNA, 19 nt, Human
cuaaagagagaauguagau

SEQ ID NO: 2532172 - RNA, 13 nt, Human
cuaaacuuucaca

SEQ ID NO: 2532173 - RNA, 14 nt, Human
cgugagaccugccc

SEQ ID NO: 2532174 - RNA, 16 nt, Human
cgugagaccugccccu

SEQ ID NO: 2532175 - RNA, 23 nt, Human
cgugagccaccgugccuggccac

SEQ ID NO: 2532176 - RNA, 21 nt, Human
cgugagacgccaccauuccug

SEQ ID NO: 2532177 - RNA, 23 nt, Human
cgugagagugucuucacggcagg

SEQ ID NO: 2532178 - RNA, 13 nt, Human
cgugagaccugcc

SEQ ID NO: 2532179 - RNA, 20 nt, Human
cgugacugccccaacuccug

SEQ ID NO: 2532180 - RNA, 21 nt, Human
cgugacugccccaacuccugg

SEQ ID NO: 2532181 - RNA, 22 nt, Human
cgugacugccccaacuccugga

SEQ ID NO: 2532182 - RNA, 23 nt, Human
cgugacugccccaacuccuggaa

SEQ ID NO: 2532183 - RNA, 14 nt, Human
cgugacucacccaa

SEQ ID NO: 2532184 - RNA, 15 nt, Human
cgugacucacccaag

SEQ ID NO: 2532185 - RNA, 16 nt, Human
cgugacucacccaagc

SEQ ID NO: 2532186 - RNA, 17 nt, Human
cgugacucacccaagca

SEQ ID NO: 2532187 - RNA, 18 nt, Human
cgugacucacccaagcau

SEQ ID NO: 2532188 - RNA, 13 nt, Human
cgugacugcccca

SEQ ID NO: 2532189 - RNA, 16 nt, Human
cgugacugccccaacu

SEQ ID NO: 2532190 - RNA, 17 nt, Human
cgugacugccccaacuc

SEQ ID NO: 2532191 - RNA, 18 nt, Human
cguggggugugcugggag

SEQ ID NO: 2532192 - RNA, 17 nt, Human
cguggggugugcuggga

SEQ ID NO: 2532193 - RNA, 15 nt, Human
cguggggugugcugg

SEQ ID NO: 2532194 - RNA, 23 nt, Human
cgugagacgccaccauuccugga

SEQ ID NO: 2532195 - RNA, 18 nt, Human
cguggggcagcacagaga

SEQ ID NO: 2532196 - RNA, 14 nt, Human
cgugagccaccgcg

SEQ ID NO: 2532197 - RNA, 20 nt, Human
cguggggcagcacagagagg

SEQ ID NO: 2532198 - RNA, 23 nt, Human
cguggguguguguagccaagguc

SEQ ID NO: 2532199 - RNA, 20 nt, Human
cgugggucuguuuuccuuuc

SEQ ID NO: 2532200 - RNA, 19 nt, Human
cgugggucuguuuuccuuu

SEQ ID NO: 2532201 - RNA, 18 nt, Human
cgugggucuguuuuccuu

SEQ ID NO: 2532202 - RNA, 21 nt, Human
cgugguccccaacagcgacau

SEQ ID NO: 2532203 - RNA, 17 nt, Human
cguggucacugcuguca

SEQ ID NO: 2532204 - RNA, 16 nt, Human
cguggucacugcuguc

SEQ ID NO: 2532205 - RNA, 15 nt, Human
cguggucacugcugu

SEQ ID NO: 2532206 - RNA, 15 nt, Human
cguggucaagcacuc

SEQ ID NO: 2532207 - RNA, 22 nt, Human
cgugggucuucagggggccagg

SEQ ID NO: 2532208 - RNA, 20 nt, Human
cgugaccggacuuuucugca

SEQ ID NO: 2532209 - RNA, 23 nt, Human
cgugaccaacuagacauucuguc

SEQ ID NO: 2532210 - RNA, 17 nt, Human
cgugacagugccuggga

SEQ ID NO: 2532211 - RNA, 18 nt, Human
cgugacauccccacccuu

SEQ ID NO: 2532212 - RNA, 19 nt, Human
cgugacgcugaauaaaugu

SEQ ID NO: 2532213 - RNA, 16 nt, Human
cgugacgcugaauaaa

SEQ ID NO: 2532214 - RNA, 14 nt, Human
cgugacgcugaaua

SEQ ID NO: 2532215 - RNA, 20 nt, Human
cgugacgcugaauaaauguc

SEQ ID NO: 2532216 - RNA, 13 nt, Human
cgugacucaccca

SEQ ID NO: 2532217 - RNA, 18 nt, Human
cgugacagacuccugagg

SEQ ID NO: 2532218 - RNA, 16 nt, Human
cgugacagugccuggg

SEQ ID NO: 2532219 - RNA, 17 nt, Human
cgugacagacuccugag

SEQ ID NO: 2532220 - RNA, 18 nt, Human
cggcugagagccccagcu

SEQ ID NO: 2532221 - RNA, 17 nt, Human
cggcugagagccccagc

SEQ ID NO: 2532222 - RNA, 16 nt, Human
cggcugagagccccag

SEQ ID NO: 2532223 - RNA, 15 nt, Human
cggcugagagcccca

SEQ ID NO: 2532224 - RNA, 20 nt, Human
cggcugagagccccagcuga

SEQ ID NO: 2532225 - RNA, 19 nt, Human
cggcugagagccccagcug

SEQ ID NO: 2532226 - RNA, 14 nt, Human
cggcugagagcccc

SEQ ID NO: 2532227 - RNA, 11 nt, Human
cggcugagagc

SEQ ID NO: 2532228 - RNA, 23 nt, Human
cggcugaccaugcucaucugcug

SEQ ID NO: 2532229 - RNA, 22 nt, Human
cggcugaccaugcucaucugcu

SEQ ID NO: 2532230 - RNA, 16 nt, Human
cggcugaccaugcuca

SEQ ID NO: 2532231 - RNA, 15 nt, Human
cggcugaccaugcuc

SEQ ID NO: 2532232 - RNA, 14 nt, Human
cggcugaccaugcu

SEQ ID NO: 2532233 - RNA, 11 nt, Human
cggcugaccau

SEQ ID NO: 2532234 - RNA, 18 nt, Human
cggcucuuuccuugcuca

SEQ ID NO: 2532235 - RNA, 23 nt, Human
cggcucucuauagcaccagggcu

SEQ ID NO: 2532236 - RNA, 16 nt, Human
cggcucuuuccuugcu

SEQ ID NO: 2532237 - RNA, 18 nt, Human
cggcucuagguggggcgg

SEQ ID NO: 2532238 - RNA, 23 nt, Human
cggcuccugugcuuucccugaac

SEQ ID NO: 2532239 - RNA, 16 nt, Human
cuaagaaagaggagug

SEQ ID NO: 2532240 - RNA, 21 nt, Human
cuaagaaaagauuuuaaucaa

SEQ ID NO: 2532241 - RNA, 20 nt, Human
cuaagaaaagauuuuaauca

SEQ ID NO: 2532242 - RNA, 16 nt, Human
cuaacuucaccauauu

SEQ ID NO: 2532243 - RNA, 16 nt, Human
cuaacuuuccuucauu

SEQ ID NO: 2532244 - RNA, 22 nt, Human
cuaagaaaagauacgacuuuau

SEQ ID NO: 2532245 - RNA, 14 nt, Human
cuaagaaaagauuu

SEQ ID NO: 2532246 - RNA, 15 nt, Human
cuaagaaaagauuuu

SEQ ID NO: 2532247 - RNA, 23 nt, Human
cuaagaaaagauacgacuuuauu

SEQ ID NO: 2532248 - RNA, 15 nt, Human
cuaacuucaccauau

SEQ ID NO: 2532249 - RNA, 12 nt, Human
cuaaccugugac

SEQ ID NO: 2532250 - RNA, 17 nt, Human
cuaaccuggguucccuu

SEQ ID NO: 2532251 - RNA, 22 nt, Human
cuaaagagcccuugccucccca

SEQ ID NO: 2532252 - RNA, 21 nt, Human
cuaaagagcccuugccucccc

SEQ ID NO: 2532253 - RNA, 20 nt, Human
cuaaagagcccuugccuccc

SEQ ID NO: 2532254 - RNA, 19 nt, Human
cuaaagagcccuugccucc

SEQ ID NO: 2532255 - RNA, 23 nt, Human
cuaaagagcccuugccuccccau

SEQ ID NO: 2532256 - RNA, 18 nt, Human
cuaaagaggcugaaagag

SEQ ID NO: 2532257 - RNA, 18 nt, Human
cuaaagaguuuauuuuaa

SEQ ID NO: 2532258 - RNA, 19 nt, Human
cuaaagaguuuauuuuaag

SEQ ID NO: 2532259 - RNA, 15 nt, Human
cucagucucccuuuc

SEQ ID NO: 2532260 - RNA, 14 nt, Human
cucagucucccuuu

SEQ ID NO: 2532261 - RNA, 13 nt, Human
cucagucucugag

SEQ ID NO: 2532262 - RNA, 17 nt, Human
cucagucuggcccuucc

SEQ ID NO: 2532263 - RNA, 18 nt, Human
cucagucuggcccuuccu

SEQ ID NO: 2532264 - RNA, 12 nt, Human
cucaugaaccuc

SEQ ID NO: 2532265 - RNA, 21 nt, Human
cucaugaaccucaagcugcau

SEQ ID NO: 2532266 - RNA, 13 nt, Human
cucaugaaucugc

SEQ ID NO: 2532267 - RNA, 15 nt, Human
cucaucuuucuugau

SEQ ID NO: 2532268 - RNA, 13 nt, Human
cucaucuuucuug

SEQ ID NO: 2532269 - RNA, 12 nt, Human
cucaucuuucuu

SEQ ID NO: 2532270 - RNA, 17 nt, Human
cucaucuucuucaccau

SEQ ID NO: 2532271 - RNA, 18 nt, Human
cucaucuuagugccugag

SEQ ID NO: 2532272 - RNA, 22 nt, Human
cucaucuuucauuaaaggcuuc

SEQ ID NO: 2532273 - RNA, 14 nt, Human
cucagucucugagc

SEQ ID NO: 2532274 - RNA, 20 nt, Human
cucagucucugagcagugaa

SEQ ID NO: 2532275 - RNA, 13 nt, Human
cucagugccacua

SEQ ID NO: 2532276 - RNA, 18 nt, Human
cucaguggcuucaucugu

SEQ ID NO: 2532277 - RNA, 21 nt, Human
cucaguggcuucaucugucaa

SEQ ID NO: 2532278 - RNA, 22 nt, Human
cucaguggacuuuccacccccu

SEQ ID NO: 2532279 - RNA, 16 nt, Human
cucaguggacuuucca

SEQ ID NO: 2532280 - RNA, 19 nt, Human
cucaguggacuuuccaccc

SEQ ID NO: 2532281 - RNA, 20 nt, Human
cucaguggacuuuccacccc

SEQ ID NO: 2532282 - RNA, 17 nt, Human
cucaguguauuuguauu

SEQ ID NO: 2532283 - RNA, 16 nt, Human
cucaguguauuuguau

SEQ ID NO: 2532284 - RNA, 12 nt, Human
cucaguguauuu

SEQ ID NO: 2532285 - RNA, 14 nt, Human
cucagugucauuua

SEQ ID NO: 2532286 - RNA, 17 nt, Human
cucagugucauuuauga

SEQ ID NO: 2532287 - RNA, 18 nt, Human
cucagugucauuuaugaa

SEQ ID NO: 2532288 - RNA, 22 nt, Human
cucagugucauuuaugaaaaga

SEQ ID NO: 2532289 - RNA, 12 nt, Human
cucauguucuua

SEQ ID NO: 2532290 - RNA, 14 nt, Human
cucauguucuuaau

SEQ ID NO: 2532291 - RNA, 18 nt, Human
cucauguucuuaauucuu

SEQ ID NO: 2532292 - RNA, 19 nt, Human
cucauguucuuaauucuua

SEQ ID NO: 2532293 - RNA, 15 nt, Human
cucaugcugaaagcc

SEQ ID NO: 2532294 - RNA, 15 nt, Human
cucaugcuaauauaa

SEQ ID NO: 2532295 - RNA, 21 nt, Human
cucaugccuguaaucccagca

SEQ ID NO: 2532296 - RNA, 18 nt, Human
cucaugccucagccuccu

SEQ ID NO: 2532297 - RNA, 20 nt, Human
cucaugccucagccuccuga

SEQ ID NO: 2532298 - RNA, 13 nt, Human
cucaugcugaaag

SEQ ID NO: 2532299 - RNA, 12 nt, Human
cucaugcugaaa

SEQ ID NO: 2532300 - RNA, 14 nt, Human
cucaugcugaaagc

SEQ ID NO: 2532301 - RNA, 23 nt, Human
cuccaaccccccagcacugagga

SEQ ID NO: 2532302 - RNA, 22 nt, Human
cuccaaccccccagcacugagg

SEQ ID NO: 2532303 - RNA, 21 nt, Human
cuccaaccccccagcacugag

SEQ ID NO: 2532304 - RNA, 20 nt, Human
cuccaaccccccagcacuga

SEQ ID NO: 2532305 - RNA, 19 nt, Human
cuccaaccccccagcacug

SEQ ID NO: 2532306 - RNA, 18 nt, Human
cuccaaccccccagcacu

SEQ ID NO: 2532307 - RNA, 17 nt, Human
cuccaaccccccagcac

SEQ ID NO: 2532308 - RNA, 15 nt, Human
cuccaaccccccagc

SEQ ID NO: 2532309 - RNA, 23 nt, Human
cuccaacaccaagcacagcagcc

SEQ ID NO: 2532310 - RNA, 14 nt, Human
cuccaaccccccag

SEQ ID NO: 2532311 - RNA, 16 nt, Human
cuccaaagucucugga

SEQ ID NO: 2532312 - RNA, 21 nt, Human
cucauggagaagcagaaauac

SEQ ID NO: 2532313 - RNA, 20 nt, Human
cucauggagaagcagaaaua

SEQ ID NO: 2532314 - RNA, 15 nt, Human
cuccaaaggcccccu

SEQ ID NO: 2532315 - RNA, 15 nt, Human
cuccaacaccaagca

SEQ ID NO: 2532316 - RNA, 16 nt, Human
cuccaacaccaagcac

SEQ ID NO: 2532317 - RNA, 18 nt, Human
cuccaacaccaagcacag

SEQ ID NO: 2532318 - RNA, 22 nt, Human
cuccaacaccaagcacagcagc

SEQ ID NO: 2532319 - RNA, 12 nt, Human
cuccaaaugcug

SEQ ID NO: 2532320 - RNA, 15 nt, Human
cuccaaaugagaucu

SEQ ID NO: 2532321 - RNA, 21 nt, Human
cucaggccugggggcugggca

SEQ ID NO: 2532322 - RNA, 20 nt, Human
cucaggccugggggcugggc

SEQ ID NO: 2532323 - RNA, 14 nt, Human
cucaggccuggggg

SEQ ID NO: 2532324 - RNA, 13 nt, Human
cucaggccugggg

SEQ ID NO: 2532325 - RNA, 16 nt, Human
cucaggcccaaagccu

SEQ ID NO: 2532326 - RNA, 15 nt, Human
cucaggccaggugca

SEQ ID NO: 2532327 - RNA, 18 nt, Human
cucaggccaggugcagug

SEQ ID NO: 2532328 - RNA, 22 nt, Human
cucaggccagcugcuugggcuu

SEQ ID NO: 2532329 - RNA, 21 nt, Human
cucaggccagcugcuugggcu

SEQ ID NO: 2532330 - RNA, 20 nt, Human
cucaggccagcugcuugggc

SEQ ID NO: 2532331 - RNA, 14 nt, Human
cucaggccagcugc

SEQ ID NO: 2532332 - RNA, 13 nt, Human
cucagcggggaca

SEQ ID NO: 2532333 - RNA, 13 nt, Human
cucaggccaccug

SEQ ID NO: 2532334 - RNA, 16 nt, Human
cucaggccaccugccc

SEQ ID NO: 2532335 - RNA, 14 nt, Human
cucagcgaaugaau

SEQ ID NO: 2532336 - RNA, 22 nt, Human
cucagccuugccagagauccaa

SEQ ID NO: 2532337 - RNA, 11 nt, Human
cucagccuugg

SEQ ID NO: 2532338 - RNA, 15 nt, Human
cucagccuuggauaa

SEQ ID NO: 2532339 - RNA, 13 nt, Human
cucaggccagcug

SEQ ID NO: 2532340 - RNA, 18 nt, Human
cucaggccaccugccccc

SEQ ID NO: 2532341 - RNA, 19 nt, Human
cucaggccaccugcccccu

SEQ ID NO: 2532342 - RNA, 22 nt, Human
cucaggccaccugcccccuucu

SEQ ID NO: 2532343 - RNA, 23 nt, Human
cucaggccaccugcccccuucuc

SEQ ID NO: 2532344 - RNA, 18 nt, Human
cucagccuugccagagau

SEQ ID NO: 2532345 - RNA, 19 nt, Human
cucagccuugccagagauc

SEQ ID NO: 2532346 - RNA, 20 nt, Human
cucagccuugccagagaucc

SEQ ID NO: 2532347 - RNA, 21 nt, Human
cucagccuugccagagaucca

SEQ ID NO: 2532348 - RNA, 16 nt, Human
cucagccuugccagag

SEQ ID NO: 2532349 - RNA, 17 nt, Human
cucagccuugccagaga

SEQ ID NO: 2532350 - RNA, 15 nt, Human
cucagccuugccaga

SEQ ID NO: 2532351 - RNA, 23 nt, Human
cucagccuuccccuugcccaggg

SEQ ID NO: 2532352 - RNA, 15 nt, Human
cucagccuucagaca

SEQ ID NO: 2532353 - RNA, 15 nt, Human
cucagccuccugugu

SEQ ID NO: 2532354 - RNA, 16 nt, Human
cucagccugugcugcc

SEQ ID NO: 2532355 - RNA, 18 nt, Human
cucagccugugcugcccg

SEQ ID NO: 2532356 - RNA, 17 nt, Human
cucagccuucagacaga

SEQ ID NO: 2532357 - RNA, 16 nt, Human
cucagccuucagacag

SEQ ID NO: 2532358 - RNA, 19 nt, Human
cucagccuucagacagaga

SEQ ID NO: 2532359 - RNA, 22 nt, Human
cucagccuuccccuugcccagg

SEQ ID NO: 2532360 - RNA, 18 nt, Human
cucagccuccucaucugg

SEQ ID NO: 2532361 - RNA, 17 nt, Human
cucagccuccucaucug

SEQ ID NO: 2532362 - RNA, 12 nt, Human
cucagccuggug

SEQ ID NO: 2532363 - RNA, 16 nt, Human
cucagccuggugggcc

SEQ ID NO: 2532364 - RNA, 18 nt, Human
cucagccuggugggccuc

SEQ ID NO: 2532365 - RNA, 19 nt, Human
cucagccuggugggccucc

SEQ ID NO: 2532366 - RNA, 20 nt, Human
cucagccuggugggccuccu

SEQ ID NO: 2532367 - RNA, 13 nt, Human
cucagccugugcu

SEQ ID NO: 2532368 - RNA, 14 nt, Human
cucagccugugcug

SEQ ID NO: 2532369 - RNA, 12 nt, Human
cucagccuccug

SEQ ID NO: 2532370 - RNA, 13 nt, Human
cucagccuccuga

SEQ ID NO: 2532371 - RNA, 22 nt, Human
cucagccuccugaguagcugga

SEQ ID NO: 2532372 - RNA, 14 nt, Human
cucagccuccugag

SEQ ID NO: 2532373 - RNA, 16 nt, Human
cucagccucccaaagu

SEQ ID NO: 2532374 - RNA, 14 nt, Human
cucagccucccaaa

SEQ ID NO: 2532375 - RNA, 17 nt, Human
cuaucccggcugcccuu

SEQ ID NO: 2532376 - RNA, 21 nt, Human
cuaucccaauaggcagacugg

SEQ ID NO: 2532377 - RNA, 17 nt, Human
cuauccacccagcccau

SEQ ID NO: 2532378 - RNA, 21 nt, Human
cucagccucccaaagugcugg

SEQ ID NO: 2532379 - RNA, 23 nt, Human
cucagccucccgaauagcuggga

SEQ ID NO: 2532380 - RNA, 13 nt, Human
cucagccucccag

SEQ ID NO: 2532381 - RNA, 20 nt, Human
cucagccucccagagugcug

SEQ ID NO: 2532382 - RNA, 20 nt, Human
cucagccuccggaguagcug

SEQ ID NO: 2532383 - RNA, 13 nt, Human
cucagccucccga

SEQ ID NO: 2532384 - RNA, 22 nt, Human
cucagccucccaaagugcuggg

SEQ ID NO: 2532385 - RNA, 15 nt, Human
cuaucccggcugccc

SEQ ID NO: 2532386 - RNA, 16 nt, Human
cuaucccggcugcccu

SEQ ID NO: 2532387 - RNA, 13 nt, Human
cucagccucccaa

SEQ ID NO: 2532388 - RNA, 12 nt, Human
cuauccacccag

SEQ ID NO: 2532389 - RNA, 13 nt, Human
cuauccacccagc

SEQ ID NO: 2532390 - RNA, 14 nt, Human
cuauccacccagcc

SEQ ID NO: 2532391 - RNA, 15 nt, Human
cuauccacccagccc

SEQ ID NO: 2532392 - RNA, 16 nt, Human
cuauccacccagccca

SEQ ID NO: 2532393 - RNA, 19 nt, Human
cuauccacccagcccauuc

SEQ ID NO: 2532394 - RNA, 15 nt, Human
cuccgccucccgggu

SEQ ID NO: 2532395 - RNA, 15 nt, Human
cuccgccucugcugg

SEQ ID NO: 2532396 - RNA, 18 nt, Human
cuccgccuucacuccggu

SEQ ID NO: 2532397 - RNA, 19 nt, Human
cuccgccuucacuccggug

SEQ ID NO: 2532398 - RNA, 19 nt, Human
cuccgcuuucuacccagcg

SEQ ID NO: 2532399 - RNA, 21 nt, Human
cuccgccuucacuccggugug

SEQ ID NO: 2532400 - RNA, 14 nt, Human
cuccgcuggaggug

SEQ ID NO: 2532401 - RNA, 16 nt, Human
cuccgccucugcuggc

SEQ ID NO: 2532402 - RNA, 13 nt, Human
cucccccugccag

SEQ ID NO: 2532403 - RNA, 16 nt, Human
cucccccugccagugc

SEQ ID NO: 2532404 - RNA, 17 nt, Human
cucccccugccagugcc

SEQ ID NO: 2532405 - RNA, 18 nt, Human
cucccccugccagugccu

SEQ ID NO: 2532406 - RNA, 19 nt, Human
cucccccugccagugccuu

SEQ ID NO: 2532407 - RNA, 11 nt, Human
cucccccuggg

SEQ ID NO: 2532408 - RNA, 12 nt, Human
cucccccugggc

SEQ ID NO: 2532409 - RNA, 13 nt, Human
cucccccugggcu

SEQ ID NO: 2532410 - RNA, 18 nt, Human
cucccaccuagcagcacc

SEQ ID NO: 2532411 - RNA, 12 nt, Human
cucccaccucag

SEQ ID NO: 2532412 - RNA, 23 nt, Human
cucccacccgaugcugcuuuccc

SEQ ID NO: 2532413 - RNA, 21 nt, Human
cucccacccgaugcugcuuuc

SEQ ID NO: 2532414 - RNA, 20 nt, Human
cucccacccgaugcugcuuu

SEQ ID NO: 2532415 - RNA, 18 nt, Human
cucccacccgaugcugcu

SEQ ID NO: 2532416 - RNA, 19 nt, Human
cucccacccggcugcagag

SEQ ID NO: 2532417 - RNA, 17 nt, Human
cucccacccggcugcag

SEQ ID NO: 2532418 - RNA, 17 nt, Human
cucccacccgaugcugc

SEQ ID NO: 2532419 - RNA, 15 nt, Human
cucccacccgaugcu

SEQ ID NO: 2532420 - RNA, 15 nt, Human
cuccagucugcugcc

SEQ ID NO: 2532421 - RNA, 17 nt, Human
cuccagucugcugcccu

SEQ ID NO: 2532422 - RNA, 20 nt, Human
cuccagucugcugcccucca

SEQ ID NO: 2532423 - RNA, 21 nt, Human
cuccagucugcugcccuccau

SEQ ID NO: 2532424 - RNA, 21 nt, Human
cuccagugagacagcucugca

SEQ ID NO: 2532425 - RNA, 12 nt, Human
cuccagucugcu

SEQ ID NO: 2532426 - RNA, 14 nt, Human
cuccccuccccugc

SEQ ID NO: 2532427 - RNA, 13 nt, Human
cuccccuccccug

SEQ ID NO: 2532428 - RNA, 15 nt, Human
cuccccuccaaccug

SEQ ID NO: 2532429 - RNA, 14 nt, Human
cucccuccucaccu

SEQ ID NO: 2532430 - RNA, 15 nt, Human
cucccuccucaccuc

SEQ ID NO: 2532431 - RNA, 18 nt, Human
cuccccuccccugcugca

SEQ ID NO: 2532432 - RNA, 17 nt, Human
cuccccuccccugcugc

SEQ ID NO: 2532433 - RNA, 16 nt, Human
cuccccuccccugcug

SEQ ID NO: 2532434 - RNA, 15 nt, Human
cuccccuccccugcu

SEQ ID NO: 2532435 - RNA, 14 nt, Human
cuccccucccuccu

SEQ ID NO: 2532436 - RNA, 21 nt, Human
cucccuccgauccuuccuccc

SEQ ID NO: 2532437 - RNA, 16 nt, Human
cuccccgccuguuccc

SEQ ID NO: 2532438 - RNA, 15 nt, Human
cuccccgccuguucc

SEQ ID NO: 2532439 - RNA, 14 nt, Human
cuccccgccuguuc

SEQ ID NO: 2532440 - RNA, 14 nt, Human
cucccccuucuccc

SEQ ID NO: 2532441 - RNA, 13 nt, Human
cucccccuucucc

SEQ ID NO: 2532442 - RNA, 11 nt, Human
cucccccuucu

SEQ ID NO: 2532443 - RNA, 19 nt, Human
cucccccuguccccucagc

SEQ ID NO: 2532444 - RNA, 13 nt, Human
cucccccuguccc

SEQ ID NO: 2532445 - RNA, 12 nt, Human
cucccccugucc

SEQ ID NO: 2532446 - RNA, 23 nt, Human
cucccccugggcucugccccagc

SEQ ID NO: 2532447 - RNA, 19 nt, Human
cuccccucacagccucuga

SEQ ID NO: 2532448 - RNA, 17 nt, Human
cuccccgccuguucccc

SEQ ID NO: 2532449 - RNA, 18 nt, Human
cuccccgccuguuccccc

SEQ ID NO: 2532450 - RNA, 14 nt, Human
cuccccgcuucugc

SEQ ID NO: 2532451 - RNA, 20 nt, Human
cuccccucacagccucugac

SEQ ID NO: 2532452 - RNA, 13 nt, Human
cuccccucagagu

SEQ ID NO: 2532453 - RNA, 16 nt, Human
cuccccucagagugca

SEQ ID NO: 2532454 - RNA, 20 nt, Human
cucccugcaucugaccagca

SEQ ID NO: 2532455 - RNA, 15 nt, Human
cucccuccucugucc

SEQ ID NO: 2532456 - RNA, 12 nt, Human
cucccuccucug

SEQ ID NO: 2532457 - RNA, 17 nt, Human
cucccuccucaccucug

SEQ ID NO: 2532458 - RNA, 18 nt, Human
cucccuccucaccucugg

SEQ ID NO: 2532459 - RNA, 19 nt, Human
cucccuccucaccucugga

SEQ ID NO: 2532460 - RNA, 21 nt, Human
cucccuccucaccucuggacu

SEQ ID NO: 2532461 - RNA, 12 nt, Human
cucccugacccu

SEQ ID NO: 2532462 - RNA, 23 nt, Human
cucccugacccuguauauagccc

SEQ ID NO: 2532463 - RNA, 17 nt, Human
cucccugacccuguaua

SEQ ID NO: 2532464 - RNA, 16 nt, Human
cucccugacccuguau

SEQ ID NO: 2532465 - RNA, 14 nt, Human
cucccugacccugu

SEQ ID NO: 2532466 - RNA, 16 nt, Human
cuccagacccccagca

SEQ ID NO: 2532467 - RNA, 17 nt, Human
cuccagacacaugucca

SEQ ID NO: 2532468 - RNA, 20 nt, Human
cuccagaagccucuggcuag

SEQ ID NO: 2532469 - RNA, 21 nt, Human
cuccagaagccucuggcuaga

SEQ ID NO: 2532470 - RNA, 19 nt, Human
cuccagacacauguccaag

SEQ ID NO: 2532471 - RNA, 21 nt, Human
cuccagaaucuaaagccagug

SEQ ID NO: 2532472 - RNA, 17 nt, Human
cuccagacccaccacac

SEQ ID NO: 2532473 - RNA, 12 nt, Human
cuccagaccccc

SEQ ID NO: 2532474 - RNA, 16 nt, Human
cuccagacccccaccc

SEQ ID NO: 2532475 - RNA, 18 nt, Human
cuccagacccccaccccu

SEQ ID NO: 2532476 - RNA, 21 nt, Human
cuccagacccccaccccuucc

SEQ ID NO: 2532477 - RNA, 22 nt, Human
cuccagacccccaccccuuccc

SEQ ID NO: 2532478 - RNA, 14 nt, Human
cuccagacccccag

SEQ ID NO: 2532479 - RNA, 18 nt, Human
cuccagaauuucccaaag

SEQ ID NO: 2532480 - RNA, 15 nt, Human
cuccagaauuuccca

SEQ ID NO: 2532481 - RNA, 16 nt, Human
cuccagaagccucugg

SEQ ID NO: 2532482 - RNA, 17 nt, Human
cuccagaagccucuggc

SEQ ID NO: 2532483 - RNA, 18 nt, Human
cuccagaagccucuggcu

SEQ ID NO: 2532484 - RNA, 19 nt, Human
cuccagaagccucuggcua

SEQ ID NO: 2532485 - RNA, 14 nt, Human
cuccagaagccucu

SEQ ID NO: 2532486 - RNA, 15 nt, Human
cuccagaagccucug

SEQ ID NO: 2532487 - RNA, 23 nt, Human
cuccagaagauagcuucacccca

SEQ ID NO: 2532488 - RNA, 18 nt, Human
cuccaagaccuucuccuu

SEQ ID NO: 2532489 - RNA, 17 nt, Human
cuccaagaccuucuccu

SEQ ID NO: 2532490 - RNA, 16 nt, Human
cuccaagaccuucucc

SEQ ID NO: 2532491 - RNA, 22 nt, Human
cuccacuuucuagccagaggag

SEQ ID NO: 2532492 - RNA, 15 nt, Human
cuccacuuuguugga

SEQ ID NO: 2532493 - RNA, 15 nt, Human
cuccagaaacggcca

SEQ ID NO: 2532494 - RNA, 22 nt, Human
cuccagaaaugucuaaaugcug

SEQ ID NO: 2532495 - RNA, 19 nt, Human
cuccagaaccgcagaagcc

SEQ ID NO: 2532496 - RNA, 20 nt, Human
cuccagaaccgcagaagccu

SEQ ID NO: 2532497 - RNA, 14 nt, Human
cuccagaagauagc

SEQ ID NO: 2532498 - RNA, 15 nt, Human
cuccagaagauagcu

SEQ ID NO: 2532499 - RNA, 16 nt, Human
cuccagucaggaggca

SEQ ID NO: 2532500 - RNA, 15 nt, Human
cuccagucaggaggc

SEQ ID NO: 2532501 - RNA, 16 nt, Human
cuccaguccaaggaaa

SEQ ID NO: 2532502 - RNA, 18 nt, Human
cuccaggucucacgggca

SEQ ID NO: 2532503 - RNA, 20 nt, Human
cuccaguauucuugucaaaa

SEQ ID NO: 2532504 - RNA, 17 nt, Human
cuccaggucucacgggc

SEQ ID NO: 2532505 - RNA, 16 nt, Human
cuccaggucucacggg

SEQ ID NO: 2532506 - RNA, 22 nt, Human
cuccagguccucuacuuaauga

SEQ ID NO: 2532507 - RNA, 11 nt, Human
cuccaggugca

SEQ ID NO: 2532508 - RNA, 16 nt, Human
cuccagggugugugcu

SEQ ID NO: 2532509 - RNA, 23 nt, Human
cuccaggggcugcuuccuccugg

SEQ ID NO: 2532510 - RNA, 22 nt, Human
cuccaggggcugcuuccuccug

SEQ ID NO: 2532511 - RNA, 15 nt, Human
cuccagggguggcug

SEQ ID NO: 2532512 - RNA, 12 nt, Human
cucgggcccagc

SEQ ID NO: 2532513 - RNA, 21 nt, Human
cucgggcccaccuggccaccu

SEQ ID NO: 2532514 - RNA, 20 nt, Human
cucgggcccaccuggccacc

SEQ ID NO: 2532515 - RNA, 19 nt, Human
cucgggcccaccuggccac

SEQ ID NO: 2532516 - RNA, 18 nt, Human
cucgggcccaccuggcca

SEQ ID NO: 2532517 - RNA, 17 nt, Human
cucgggcccaccuggcc

SEQ ID NO: 2532518 - RNA, 16 nt, Human
cucgggcccaccuggc

SEQ ID NO: 2532519 - RNA, 14 nt, Human
cucgggcccaccug

SEQ ID NO: 2532520 - RNA, 13 nt, Human
cucgggcccaccu

SEQ ID NO: 2532521 - RNA, 19 nt, Human
cucgggaggcugagacagg

SEQ ID NO: 2532522 - RNA, 21 nt, Human
cucgggaggcugagacaggag

SEQ ID NO: 2532523 - RNA, 20 nt, Human
cucgggauuaguacacacuu

SEQ ID NO: 2532524 - RNA, 15 nt, Human
cucgggaggcugaga

SEQ ID NO: 2532525 - RNA, 20 nt, Human
cucgggacaccugcccugcc

SEQ ID NO: 2532526 - RNA, 15 nt, Human
cucgggacaccugcc

SEQ ID NO: 2532527 - RNA, 16 nt, Human
cucgggaaccucacuc

SEQ ID NO: 2532528 - RNA, 12 nt, Human
cucgggaaccuc

SEQ ID NO: 2532529 - RNA, 19 nt, Human
cucggcuuuucucagcugg

SEQ ID NO: 2532530 - RNA, 18 nt, Human
cucggcuuuucucagcug

SEQ ID NO: 2532531 - RNA, 19 nt, Human
cuccgugcuuccucaguua

SEQ ID NO: 2532532 - RNA, 16 nt, Human
cuccgugcuuccucag

SEQ ID NO: 2532533 - RNA, 22 nt, Human
cuccgugccuccaccaccacug

SEQ ID NO: 2532534 - RNA, 21 nt, Human
cuccgugccuccaccaccacu

SEQ ID NO: 2532535 - RNA, 16 nt, Human
cuccgugccuccacca

SEQ ID NO: 2532536 - RNA, 15 nt, Human
cuccgugccuccacc

SEQ ID NO: 2532537 - RNA, 14 nt, Human
cuccgugccuccac

SEQ ID NO: 2532538 - RNA, 13 nt, Human
cuccgugccucca

SEQ ID NO: 2532539 - RNA, 16 nt, Human
cuccguuagcuccugu

SEQ ID NO: 2532540 - RNA, 15 nt, Human
cuccguuagcuccug

SEQ ID NO: 2532541 - RNA, 13 nt, Human
cuccguggagcag

SEQ ID NO: 2532542 - RNA, 18 nt, Human
cuccguccaggagccugg

SEQ ID NO: 2532543 - RNA, 22 nt, Human
cuccguccagccgccauugcca

SEQ ID NO: 2532544 - RNA, 15 nt, Human
cuccguccagccgcc

SEQ ID NO: 2532545 - RNA, 19 nt, Human
cuccguccaggagccuggc

SEQ ID NO: 2532546 - RNA, 20 nt, Human
cuccguccaggagccugugc

SEQ ID NO: 2532547 - RNA, 22 nt, Human
cuccguccaggagccugugccu

SEQ ID NO: 2532548 - RNA, 22 nt, Human
cuccgucuuagaaguggaccag

SEQ ID NO: 2532549 - RNA, 16 nt, Human
cucucaauaugcuuac

SEQ ID NO: 2532550 - RNA, 15 nt, Human
cucucaauaugcuua

SEQ ID NO: 2532551 - RNA, 17 nt, Human
cucucaacccaggagca

SEQ ID NO: 2532552 - RNA, 14 nt, Human
cucucacuccuuga

SEQ ID NO: 2532553 - RNA, 12 nt, Human
cucucacuccuu

SEQ ID NO: 2532554 - RNA, 15 nt, Human
cucucacuccuugaa

SEQ ID NO: 2532555 - RNA, 12 nt, Human
cucucacugucu

SEQ ID NO: 2532556 - RNA, 19 nt, Human
cucucagauuguaccauug

SEQ ID NO: 2532557 - RNA, 19 nt, Human
cucucagaagggaggcugg

SEQ ID NO: 2532558 - RNA, 14 nt, Human
cucucagaagggag

SEQ ID NO: 2532559 - RNA, 17 nt, Human
cucucagaauucuucag

SEQ ID NO: 2532560 - RNA, 22 nt, Human
cucucagagcuacuugggccau

SEQ ID NO: 2532561 - RNA, 21 nt, Human
cucucagagcuacuugggcca

SEQ ID NO: 2532562 - RNA, 20 nt, Human
cucucagagcuacuugggcc

SEQ ID NO: 2532563 - RNA, 16 nt, Human
cucucagaagguauuc

SEQ ID NO: 2532564 - RNA, 20 nt, Human
cucucaaccaccuuucagau

SEQ ID NO: 2532565 - RNA, 22 nt, Human
cucucaaaucuuuuagucauua

SEQ ID NO: 2532566 - RNA, 15 nt, Human
cucuauuuaauauuu

SEQ ID NO: 2532567 - RNA, 14 nt, Human
cucuauuuaauauu

SEQ ID NO: 2532568 - RNA, 13 nt, Human
cucuauuuaauau

SEQ ID NO: 2532569 - RNA, 21 nt, Human
cucuauuguagcauuucuuga

SEQ ID NO: 2532570 - RNA, 17 nt, Human
cucuauuuaauauuuau

SEQ ID NO: 2532571 - RNA, 16 nt, Human
cucuauuuaauauuua

SEQ ID NO: 2532572 - RNA, 13 nt, Human
cucuauuuagcau

SEQ ID NO: 2532573 - RNA, 16 nt, Human
cucuauuuauguuugc

SEQ ID NO: 2532574 - RNA, 17 nt, Human
cucuauuuauguuugca

SEQ ID NO: 2532575 - RNA, 14 nt, Human
cucuauuuagcaug

SEQ ID NO: 2532576 - RNA, 20 nt, Human
cucuauuaagauuuccaagu

SEQ ID NO: 2532577 - RNA, 20 nt, Human
cucuauuguagcauuucuug

SEQ ID NO: 2532578 - RNA, 23 nt, Human
cucuauugauguacagucuguca

SEQ ID NO: 2532579 - RNA, 12 nt, Human
cucuauuuaaua

SEQ ID NO: 2532580 - RNA, 16 nt, Human
cucgggcccaggccau

SEQ ID NO: 2532581 - RNA, 14 nt, Human
cucgggcccaggcc

SEQ ID NO: 2532582 - RNA, 12 nt, Human
cucgggcccagg

SEQ ID NO: 2532583 - RNA, 18 nt, Human
cucgggcccagcccccac

SEQ ID NO: 2532584 - RNA, 16 nt, Human
cucgggcccagccccc

SEQ ID NO: 2532585 - RNA, 15 nt, Human
cucgggcccagcccc

SEQ ID NO: 2532586 - RNA, 14 nt, Human
cucgggcccagccc

SEQ ID NO: 2532587 - RNA, 13 nt, Human
cucgggcccagcc

SEQ ID NO: 2532588 - RNA, 23 nt, Human
cucgggcccaggccaucuuccag

SEQ ID NO: 2532589 - RNA, 20 nt, Human
cucuauguuuacaaauggac

SEQ ID NO: 2532590 - RNA, 18 nt, Human
cucuauuaagauuuccaa

SEQ ID NO: 2532591 - RNA, 15 nt, Human
cucuauguuuacaaa

SEQ ID NO: 2532592 - RNA, 17 nt, Human
cucugaagccucuggga

SEQ ID NO: 2532593 - RNA, 15 nt, Human
cucugaagccucugg

SEQ ID NO: 2532594 - RNA, 17 nt, Human
cucugaagcauguuuca

SEQ ID NO: 2532595 - RNA, 14 nt, Human
cucugaagcauguu

SEQ ID NO: 2532596 - RNA, 20 nt, Human
cucugaagcauguuucaugu

SEQ ID NO: 2532597 - RNA, 15 nt, Human
cucugaaggacauug

SEQ ID NO: 2532598 - RNA, 19 nt, Human
cucucuggccucccacccg

SEQ ID NO: 2532599 - RNA, 18 nt, Human
cucucuggccucccaccc

SEQ ID NO: 2532600 - RNA, 13 nt, Human
cucugaagagugg

SEQ ID NO: 2532601 - RNA, 21 nt, Human
cucugaagaguggguuucaca

SEQ ID NO: 2532602 - RNA, 11 nt, Human
cucugaagcau

SEQ ID NO: 2532603 - RNA, 20 nt, Human
cucucuggccucccacccga

SEQ ID NO: 2532604 - RNA, 18 nt, Human
cucugaagaugaucauuu

SEQ ID NO: 2532605 - RNA, 22 nt, Human
cucugaagaguggguuucacaa

SEQ ID NO: 2532606 - RNA, 23 nt, Human
cucugaagaguggguuucacaag

SEQ ID NO: 2532607 - RNA, 17 nt, Human
cucucuggccucccacc

SEQ ID NO: 2532608 - RNA, 16 nt, Human
cucucuggccucccac

SEQ ID NO: 2532609 - RNA, 15 nt, Human
cucucuggccuccca

SEQ ID NO: 2532610 - RNA, 14 nt, Human
cucucuggccuccc

SEQ ID NO: 2532611 - RNA, 13 nt, Human
cucucuggccucc

SEQ ID NO: 2532612 - RNA, 20 nt, Human
cucuccuccaagacacugug

SEQ ID NO: 2532613 - RNA, 12 nt, Human
cucucuggccuu

SEQ ID NO: 2532614 - RNA, 11 nt, Human
cucucuggccu

SEQ ID NO: 2532615 - RNA, 16 nt, Human
cucuccuccaagacac

SEQ ID NO: 2532616 - RNA, 23 nt, Human
cucuccucaucucuaacagcuca

SEQ ID NO: 2532617 - RNA, 12 nt, Human
cucuccucaucu

SEQ ID NO: 2532618 - RNA, 14 nt, Human
cucuccucaucucu

SEQ ID NO: 2532619 - RNA, 20 nt, Human
cucuccucauguucugcuuu

SEQ ID NO: 2532620 - RNA, 16 nt, Human
cucuccccagcccaga

SEQ ID NO: 2532621 - RNA, 17 nt, Human
cucuccccagcccagag

SEQ ID NO: 2532622 - RNA, 18 nt, Human
cucuccccagcccagaga

SEQ ID NO: 2532623 - RNA, 19 nt, Human
cucuccccagcccagagac

SEQ ID NO: 2532624 - RNA, 16 nt, Human
cucuccccagguccag

SEQ ID NO: 2532625 - RNA, 15 nt, Human
cucuccccaggucca

SEQ ID NO: 2532626 - RNA, 20 nt, Human
cucuccccagcccagagaca

SEQ ID NO: 2532627 - RNA, 22 nt, Human
cucucagccccugauccuguga

SEQ ID NO: 2532628 - RNA, 13 nt, Human
cucuccccagccc

SEQ ID NO: 2532629 - RNA, 15 nt, Human
cucuccccagcccag

SEQ ID NO: 2532630 - RNA, 21 nt, Human
cucucagccccugauccugug

SEQ ID NO: 2532631 - RNA, 11 nt, Human
cucucagccaa

SEQ ID NO: 2532632 - RNA, 23 nt, Human
cucucagccaacgaguaauuuau

SEQ ID NO: 2532633 - RNA, 20 nt, Human
cucuccccagguccagcucu

SEQ ID NO: 2532634 - RNA, 18 nt, Human
cucuccccagguccagcu

SEQ ID NO: 2532635 - RNA, 23 nt, Human
cucuccccagguccagcucugga

SEQ ID NO: 2532636 - RNA, 21 nt, Human
cucuccgaccagacaccuuga

SEQ ID NO: 2532637 - RNA, 15 nt, Human
cucuccggucucucu

SEQ ID NO: 2532638 - RNA, 21 nt, Human
cucuccuagagacagaagcag

SEQ ID NO: 2532639 - RNA, 14 nt, Human
cucuccuagagaca

SEQ ID NO: 2532640 - RNA, 16 nt, Human
cucugaagccucuggg

SEQ ID NO: 2532641 - RNA, 18 nt, Human
cucuguagggaacucugg

SEQ ID NO: 2532642 - RNA, 22 nt, Human
cucuguagggaacucugggguc

SEQ ID NO: 2532643 - RNA, 22 nt, Human
cucuguaucaggacccagagga

SEQ ID NO: 2532644 - RNA, 21 nt, Human
cucuguaaucucguuucaaaa

SEQ ID NO: 2532645 - RNA, 15 nt, Human
cucuuagaugcaguu

SEQ ID NO: 2532646 - RNA, 16 nt, Human
cucuuagaaaugaagg

SEQ ID NO: 2532647 - RNA, 15 nt, Human
cucugucaaugaaaa

SEQ ID NO: 2532648 - RNA, 21 nt, Human
cucuguacagagcccacgccc

SEQ ID NO: 2532649 - RNA, 17 nt, Human
cucuguacagagcccac

SEQ ID NO: 2532650 - RNA, 20 nt, Human
cucugguuuggggcgaggca

SEQ ID NO: 2532651 - RNA, 22 nt, Human
cucugguuuggggcgaggcaga

SEQ ID NO: 2532652 - RNA, 21 nt, Human
cucuguaaaugaaaaaaccca

SEQ ID NO: 2532653 - RNA, 18 nt, Human
cucuguaaucucguuuca

SEQ ID NO: 2532654 - RNA, 16 nt, Human
cucugguuuaauuaca

SEQ ID NO: 2532655 - RNA, 13 nt, Human
cucugguucuuug

SEQ ID NO: 2532656 - RNA, 22 nt, Human
cucugguccggacacuccuaga

SEQ ID NO: 2532657 - RNA, 15 nt, Human
cucugguccauagag

SEQ ID NO: 2532658 - RNA, 19 nt, Human
cucugcugacagacacagg

SEQ ID NO: 2532659 - RNA, 18 nt, Human
cucugcugacagacacag

SEQ ID NO: 2532660 - RNA, 17 nt, Human
cucugcugacagacaca

SEQ ID NO: 2532661 - RNA, 18 nt, Human
cucugguccauagagagc

SEQ ID NO: 2532662 - RNA, 16 nt, Human
cucugguccauagaga

SEQ ID NO: 2532663 - RNA, 19 nt, Human
cucugguccauagagagca

SEQ ID NO: 2532664 - RNA, 14 nt, Human
cucugguuccuccc

SEQ ID NO: 2532665 - RNA, 15 nt, Human
cucugguuaucuaau

SEQ ID NO: 2532666 - RNA, 18 nt, Human
cucugcagcaauaaagca

SEQ ID NO: 2532667 - RNA, 19 nt, Human
cucugcagcaauaaagcag

SEQ ID NO: 2532668 - RNA, 23 nt, Human
cucugcagcaauaaagcagcguu

SEQ ID NO: 2532669 - RNA, 14 nt, Human
cucugcagccagcc

SEQ ID NO: 2532670 - RNA, 23 nt, Human
cucugcacuacuccucugcagug

SEQ ID NO: 2532671 - RNA, 13 nt, Human
cucugcagccagc

SEQ ID NO: 2532672 - RNA, 18 nt, Human
cucugcuccaccacaucc

SEQ ID NO: 2532673 - RNA, 15 nt, Human
cucugcuccaccaca

SEQ ID NO: 2532674 - RNA, 16 nt, Human
cucugcuccaccacau

SEQ ID NO: 2532675 - RNA, 12 nt, Human
cucugcuccacc

SEQ ID NO: 2532676 - RNA, 13 nt, Human
cucugcuccacca

SEQ ID NO: 2532677 - RNA, 14 nt, Human
cucugcuccaccac

SEQ ID NO: 2532678 - RNA, 19 nt, Human
cucugcuacguuccuauug

SEQ ID NO: 2532679 - RNA, 22 nt, Human
cucugcgugucaccugugcuuc

SEQ ID NO: 2532680 - RNA, 16 nt, Human
cucugcacaugucuug

SEQ ID NO: 2532681 - RNA, 15 nt, Human
cucugcacaugucuu

SEQ ID NO: 2532682 - RNA, 22 nt, Human
cucugcacuacugacauguggg

SEQ ID NO: 2532683 - RNA, 20 nt, Human
cucugcacuacugacaugug

SEQ ID NO: 2532684 - RNA, 13 nt, Human
cucugcagcaaua

SEQ ID NO: 2532685 - RNA, 22 nt, Human
cucugcacuacuccucugcagu

SEQ ID NO: 2532686 - RNA, 20 nt, Human
cucugcacuacuccucugca

SEQ ID NO: 2532687 - RNA, 15 nt, Human
cucugcacuacuccu

SEQ ID NO: 2532688 - RNA, 13 nt, Human
cucugcacuacuc

SEQ ID NO: 2532689 - RNA, 18 nt, Human
cucugcacuacugacaug

SEQ ID NO: 2532690 - RNA, 16 nt, Human
cucugcacuacugaca

SEQ ID NO: 2532691 - RNA, 18 nt, Human
cucugcacaugucuugua

SEQ ID NO: 2532692 - RNA, 16 nt, Human
cucugcacccccauau

SEQ ID NO: 2532693 - RNA, 18 nt, Human
cucugcaccguacugugg

SEQ ID NO: 2532694 - RNA, 20 nt, Human
cucuuagaugcaguucugaa

SEQ ID NO: 2532695 - RNA, 21 nt, Human
cucuuagaugcaguucugaag

SEQ ID NO: 2532696 - RNA, 18 nt, Human
cucuuagacuucugcuuu

SEQ ID NO: 2532697 - RNA, 20 nt, Human
cucuugccacugccucuucc

SEQ ID NO: 2532698 - RNA, 19 nt, Human
cucuugccacugccucuuc

SEQ ID NO: 2532699 - RNA, 18 nt, Human
cucuugccacugccucuu

SEQ ID NO: 2532700 - RNA, 17 nt, Human
cucuugccacugccucu

SEQ ID NO: 2532701 - RNA, 23 nt, Human
cucuugccaaccuguaauaaaua

SEQ ID NO: 2532702 - RNA, 22 nt, Human
cucuugccaaccuguaauaaau

SEQ ID NO: 2532703 - RNA, 21 nt, Human
cucuugccaaccuguaauaaa

SEQ ID NO: 2532704 - RNA, 16 nt, Human
cucuugccacugccuc

SEQ ID NO: 2532705 - RNA, 18 nt, Human
cucuugcaggucucaacc

SEQ ID NO: 2532706 - RNA, 20 nt, Human
cucuuggaccucugcucuga

SEQ ID NO: 2532707 - RNA, 19 nt, Human
cucuuggaccucugcucug

SEQ ID NO: 2532708 - RNA, 14 nt, Human
cucuuggagccugc

SEQ ID NO: 2532709 - RNA, 18 nt, Human
cucuuggaccucugcucu

SEQ ID NO: 2532710 - RNA, 17 nt, Human
cucuuggaccucugcuc

SEQ ID NO: 2532711 - RNA, 12 nt, Human
cucuuggaccuc

SEQ ID NO: 2532712 - RNA, 17 nt, Human
cucuuggaaaaagugau

SEQ ID NO: 2532713 - RNA, 16 nt, Human
cucuuggaaaaaguga

SEQ ID NO: 2532714 - RNA, 14 nt, Human
cucuugcucuuucu

SEQ ID NO: 2532715 - RNA, 15 nt, Human
cucuugcucuuucua

SEQ ID NO: 2532716 - RNA, 13 nt, Human
cucuugcucuuuc

SEQ ID NO: 2532717 - RNA, 12 nt, Human
cucuugcucuuu

SEQ ID NO: 2532718 - RNA, 20 nt, Human
cucuugcucaaaaaucuguu

SEQ ID NO: 2532719 - RNA, 19 nt, Human
cucuugcucaaaaaucugu

SEQ ID NO: 2532720 - RNA, 12 nt, Human
cucuugcucaaa

SEQ ID NO: 2532721 - RNA, 22 nt, Human
cucuugcuaaucagugucucac

SEQ ID NO: 2532722 - RNA, 21 nt, Human
cucuugcuaaucagugucuca

SEQ ID NO: 2532723 - RNA, 14 nt, Human
cucuugcuaaucag

SEQ ID NO: 2532724 - RNA, 14 nt, Human
cucuugccuccugg

SEQ ID NO: 2532725 - RNA, 17 nt, Human
cucuugcggucccuucu

SEQ ID NO: 2532726 - RNA, 15 nt, Human
cugaaaaauuccuuu

SEQ ID NO: 2532727 - RNA, 17 nt, Human
cugaaaacacugugcac

SEQ ID NO: 2532728 - RNA, 15 nt, Human
cucuuggagccugca

SEQ ID NO: 2532729 - RNA, 14 nt, Human
cugaaaacaucugg

SEQ ID NO: 2532730 - RNA, 14 nt, Human
cugaaaacccagag

SEQ ID NO: 2532731 - RNA, 15 nt, Human
cugaaaacccagaga

SEQ ID NO: 2532732 - RNA, 19 nt, Human
cugaaaaccuaaguccuuu

SEQ ID NO: 2532733 - RNA, 17 nt, Human
cugaaaacccagagagg

SEQ ID NO: 2532734 - RNA, 17 nt, Human
cugaaaacggcccucuu

SEQ ID NO: 2532735 - RNA, 14 nt, Human
cugaaaaccucucc

SEQ ID NO: 2532736 - RNA, 15 nt, Human
cugaaaaccucuccu

SEQ ID NO: 2532737 - RNA, 17 nt, Human
cugaaaaccucuccuca

SEQ ID NO: 2532738 - RNA, 20 nt, Human
cugaaaaccucuccucaugu

SEQ ID NO: 2532739 - RNA, 17 nt, Human
cugaaggccccgcccag

SEQ ID NO: 2532740 - RNA, 14 nt, Human
cugaaggccccgcc

SEQ ID NO: 2532741 - RNA, 13 nt, Human
cugaaggccccgc

SEQ ID NO: 2532742 - RNA, 21 nt, Human
cugaaggacacuuccugccua

SEQ ID NO: 2532743 - RNA, 20 nt, Human
cugaaggacacuuccugccu

SEQ ID NO: 2532744 - RNA, 19 nt, Human
cugaaggacacuuccugcc

SEQ ID NO: 2532745 - RNA, 18 nt, Human
cugaaggacacuuccugc

SEQ ID NO: 2532746 - RNA, 21 nt, Human
cugaaggacauugcggacagc

SEQ ID NO: 2532747 - RNA, 20 nt, Human
cugaaggacauugcggacag

SEQ ID NO: 2532748 - RNA, 19 nt, Human
cugaaggacauugcggaca

SEQ ID NO: 2532749 - RNA, 16 nt, Human
cugaaaauguaugugu

SEQ ID NO: 2532750 - RNA, 16 nt, Human
cugaaaacggcccucu

SEQ ID NO: 2532751 - RNA, 18 nt, Human
cugaaaagacucaguguu

SEQ ID NO: 2532752 - RNA, 13 nt, Human
cugaaaaugugaa

SEQ ID NO: 2532753 - RNA, 12 nt, Human
cugaaaaugugc

SEQ ID NO: 2532754 - RNA, 13 nt, Human
cugaaaaugugcu

SEQ ID NO: 2532755 - RNA, 21 nt, Human
cugaaaaugugaauaaaauua

SEQ ID NO: 2532756 - RNA, 22 nt, Human
cugaaaauguuuuucugccagg

SEQ ID NO: 2532757 - RNA, 17 nt, Human
cugaaaauuaacacugc

SEQ ID NO: 2532758 - RNA, 16 nt, Human
cugaaaauuaacacug

SEQ ID NO: 2532759 - RNA, 16 nt, Human
cugaagcugccugcuu

SEQ ID NO: 2532760 - RNA, 15 nt, Human
cugaagcugccugcu

SEQ ID NO: 2532761 - RNA, 18 nt, Human
cugaagcugccugcuuuu

SEQ ID NO: 2532762 - RNA, 14 nt, Human
cugaagcugccugc

SEQ ID NO: 2532763 - RNA, 18 nt, Human
cugaaaauucgaaccagg

SEQ ID NO: 2532764 - RNA, 17 nt, Human
cugaaggacacuuccug

SEQ ID NO: 2532765 - RNA, 22 nt, Human
cugaaggaaaaacacaagcaaa

SEQ ID NO: 2532766 - RNA, 21 nt, Human
cugaaggaaaaacacaagcaa

SEQ ID NO: 2532767 - RNA, 18 nt, Human
cugaaggaaaaacacaag

SEQ ID NO: 2532768 - RNA, 22 nt, Human
cugaaggaauaaauugcuccuu

SEQ ID NO: 2532769 - RNA, 11 nt, Human
cugaaggaaaa

SEQ ID NO: 2532770 - RNA, 17 nt, Human
cugaaggaaaaacacaa

SEQ ID NO: 2532771 - RNA, 16 nt, Human
cugaaggaaaaacaca

SEQ ID NO: 2532772 - RNA, 14 nt, Human
cugaaggaaaaaca

SEQ ID NO: 2532773 - RNA, 14 nt, Human
cugacagacacagg

SEQ ID NO: 2532774 - RNA, 12 nt, Human
cugacagacaca

SEQ ID NO: 2532775 - RNA, 17 nt, Human
cugaagguaaaauugaa

SEQ ID NO: 2532776 - RNA, 15 nt, Human
cugacagacacaggc

SEQ ID NO: 2532777 - RNA, 21 nt, Human
cugaagggguucucacagugg

SEQ ID NO: 2532778 - RNA, 17 nt, Human
cugaagggguucucaca

SEQ ID NO: 2532779 - RNA, 15 nt, Human
cugaagguaaaauug

SEQ ID NO: 2532780 - RNA, 14 nt, Human
cugacagaaggacu

SEQ ID NO: 2532781 - RNA, 20 nt, Human
cugaaggggcgucuguuccc

SEQ ID NO: 2532782 - RNA, 23 nt, Human
cugaaggggccaugauggcaaca

SEQ ID NO: 2532783 - RNA, 15 nt, Human
cugaaggggccauga

SEQ ID NO: 2532784 - RNA, 19 nt, Human
cugaaggggccaugauggc

SEQ ID NO: 2532785 - RNA, 11 nt, Human
cugaagggagg

SEQ ID NO: 2532786 - RNA, 12 nt, Human
cugaagggaggu

SEQ ID NO: 2532787 - RNA, 21 nt, Human
cugaccugugagcccagcugg

SEQ ID NO: 2532788 - RNA, 16 nt, Human
cugaccuuccucgcag

SEQ ID NO: 2532789 - RNA, 21 nt, Human
cugaccuuccucgcagagagg

SEQ ID NO: 2532790 - RNA, 20 nt, Human
cugaccuuccucgcagagag

SEQ ID NO: 2532791 - RNA, 18 nt, Human
cugaccuuccucgcagag

SEQ ID NO: 2532792 - RNA, 17 nt, Human
cugaccuuccucgcaga

SEQ ID NO: 2532793 - RNA, 23 nt, Human
cugaccuuccucgcagagaggcc

SEQ ID NO: 2532794 - RNA, 22 nt, Human
cugaccuuccucgcagagaggc

SEQ ID NO: 2532795 - RNA, 20 nt, Human
cugaccuugaacuccugggc

SEQ ID NO: 2532796 - RNA, 23 nt, Human
cugaccugucaugccccccucaa

SEQ ID NO: 2532797 - RNA, 17 nt, Human
cugaccugugagcccag

SEQ ID NO: 2532798 - RNA, 18 nt, Human
cugaccugugagcccagc

SEQ ID NO: 2532799 - RNA, 20 nt, Human
cugaccugugagcccagcug

SEQ ID NO: 2532800 - RNA, 12 nt, Human
cugaccucuggu

SEQ ID NO: 2532801 - RNA, 21 nt, Human
cugaccucccucuaauuuauc

SEQ ID NO: 2532802 - RNA, 17 nt, Human
cugaccuaucacuucca

SEQ ID NO: 2532803 - RNA, 22 nt, Human
cugaccgugggcggggccuugc

SEQ ID NO: 2532804 - RNA, 13 nt, Human
cugaccuccacag

SEQ ID NO: 2532805 - RNA, 14 nt, Human
cugaccuccacagc

SEQ ID NO: 2532806 - RNA, 15 nt, Human
cugaccuccacagcu

SEQ ID NO: 2532807 - RNA, 23 nt, Human
cugacccuuacagccucugacuu

SEQ ID NO: 2532808 - RNA, 20 nt, Human
cugacccuuacagccucuga

SEQ ID NO: 2532809 - RNA, 17 nt, Human
cugacccugguucucuc

SEQ ID NO: 2532810 - RNA, 22 nt, Human
cugacccuuacagccucugacu

SEQ ID NO: 2532811 - RNA, 18 nt, Human
cugaccgaaacagcgcug

SEQ ID NO: 2532812 - RNA, 13 nt, Human
cugaccgugggcg

SEQ ID NO: 2532813 - RNA, 20 nt, Human
cugaccgaaacagcgcuggg

SEQ ID NO: 2532814 - RNA, 20 nt, Human
cugaccucccucuaauuuau

SEQ ID NO: 2532815 - RNA, 18 nt, Human
cugaccucccucuaauuu

SEQ ID NO: 2532816 - RNA, 23 nt, Human
cugaccucccagcccuauggaug

SEQ ID NO: 2532817 - RNA, 22 nt, Human
cugaccucccagcccuauggau

SEQ ID NO: 2532818 - RNA, 18 nt, Human
cugaccucccagcccuau

SEQ ID NO: 2532819 - RNA, 17 nt, Human
cugaccucccagcccua

SEQ ID NO: 2532820 - RNA, 16 nt, Human
cugaccucccagcccu

SEQ ID NO: 2532821 - RNA, 14 nt, Human
cugaccucccagcc

SEQ ID NO: 2532822 - RNA, 13 nt, Human
cugaccucccagc

SEQ ID NO: 2532823 - RNA, 12 nt, Human
cugaccucccag

SEQ ID NO: 2532824 - RNA, 11 nt, Human
cugaccuccca

SEQ ID NO: 2532825 - RNA, 16 nt, Human
cugaccuccacagcuu

SEQ ID NO: 2532826 - RNA, 20 nt, Human
cugacccaugcugcccugug

SEQ ID NO: 2532827 - RNA, 19 nt, Human
cugacccaugcugcccugu

SEQ ID NO: 2532828 - RNA, 17 nt, Human
cugacccaugcugcccu

SEQ ID NO: 2532829 - RNA, 18 nt, Human
cugacccaugcugcccug

SEQ ID NO: 2532830 - RNA, 23 nt, Human
cugacccugcuucaaauauuucc

SEQ ID NO: 2532831 - RNA, 12 nt, Human
cugacccuguau

SEQ ID NO: 2532832 - RNA, 13 nt, Human
cugacccugugga

SEQ ID NO: 2532833 - RNA, 22 nt, Human
cugacccuguauauagcccagc

SEQ ID NO: 2532834 - RNA, 21 nt, Human
cugacccuguauauagcccag

SEQ ID NO: 2532835 - RNA, 20 nt, Human
cugacccuguauauagccca

SEQ ID NO: 2532836 - RNA, 19 nt, Human
cugacccuguauauagccc

SEQ ID NO: 2532837 - RNA, 18 nt, Human
cugacccuguauauagcc

SEQ ID NO: 2532838 - RNA, 15 nt, Human
cugacccuguauaua

SEQ ID NO: 2532839 - RNA, 13 nt, Human
cugacccuguaua

SEQ ID NO: 2532840 - RNA, 20 nt, Human
aacuucauauaugaggacuu

SEQ ID NO: 2532841 - RNA, 21 nt, Human
aacuucaggauaauaaagugu

SEQ ID NO: 2532842 - RNA, 14 nt, Human
aacuguauauauuc

SEQ ID NO: 2532843 - RNA, 19 nt, Human
aacuguagaaaugaugaug

SEQ ID NO: 2532844 - RNA, 17 nt, Human
aacuucagcuguacuuc

SEQ ID NO: 2532845 - RNA, 13 nt, Human
aacuuccaauuua

SEQ ID NO: 2532846 - RNA, 12 nt, Human
aacuucauuuga

SEQ ID NO: 2532847 - RNA, 14 nt, Human
aacuucauuugaug

SEQ ID NO: 2532848 - RNA, 18 nt, Human
aacuuccagauccuggaa

SEQ ID NO: 2532849 - RNA, 18 nt, Human
aacuucccagugaauucu

SEQ ID NO: 2532850 - RNA, 20 nt, Human
aacuucaugucaacuucugg

SEQ ID NO: 2532851 - RNA, 19 nt, Human
aacuuccagguguuacugu

SEQ ID NO: 2532852 - RNA, 17 nt, Human
aacuuccccaucuucua

SEQ ID NO: 2532853 - RNA, 18 nt, Human
aacuuccccaucuucuaa

SEQ ID NO: 2532854 - RNA, 22 nt, Human
aacuuccagguguuacuguaau

SEQ ID NO: 2532855 - RNA, 23 nt, Human
aacuuccugcagguaaacaguuc

SEQ ID NO: 2532856 - RNA, 15 nt, Human
aacuuccugcaggua

SEQ ID NO: 2532857 - RNA, 23 nt, Human
aacuucccgucccauauccugcc

SEQ ID NO: 2532858 - RNA, 22 nt, Human
aacuucccgucccauauccugc

SEQ ID NO: 2532859 - RNA, 22 nt, Human
aacuucuccccugguagaaaga

SEQ ID NO: 2532860 - RNA, 14 nt, Human
aacuggguuccugc

SEQ ID NO: 2532861 - RNA, 15 nt, Human
aacuggguuccugca

SEQ ID NO: 2532862 - RNA, 13 nt, Human
aacugguauuuua

SEQ ID NO: 2532863 - RNA, 19 nt, Human
aacuggucaccaugaaacu

SEQ ID NO: 2532864 - RNA, 22 nt, Human
aacugguauuuuaucuuugauu

SEQ ID NO: 2532865 - RNA, 13 nt, Human
aacuguaaauaaa

SEQ ID NO: 2532866 - RNA, 21 nt, Human
aacugguuuguugcagccaaa

SEQ ID NO: 2532867 - RNA, 14 nt, Human
aacuguaugucaga

SEQ ID NO: 2532868 - RNA, 21 nt, Human
aacuucagcgguuuauauaag

SEQ ID NO: 2532869 - RNA, 14 nt, Human
aacuguagaaauga

SEQ ID NO: 2532870 - RNA, 15 nt, Human
aacuguagaaaugau

SEQ ID NO: 2532871 - RNA, 16 nt, Human
aacuguagaaaugaug

SEQ ID NO: 2532872 - RNA, 17 nt, Human
aacuguagaaaugauga

SEQ ID NO: 2532873 - RNA, 18 nt, Human
aacuguacuuuuaaggca

SEQ ID NO: 2532874 - RNA, 15 nt, Human
aacuguacuucacug

SEQ ID NO: 2532875 - RNA, 13 nt, Human
aacuguacuucac

SEQ ID NO: 2532876 - RNA, 16 nt, Human
gugaugagaggaaauc

SEQ ID NO: 2532877 - RNA, 22 nt, Human
gugaugacaacuggaauaguuu

SEQ ID NO: 2532878 - RNA, 14 nt, Human
gugaugaauacugu

SEQ ID NO: 2532879 - RNA, 22 nt, Human
gugaugaagaaaagugggccag

SEQ ID NO: 2532880 - RNA, 15 nt, Human
gugaugaggggaggg

SEQ ID NO: 2532881 - RNA, 22 nt, Human
gugaugaucagcuguuugucau

SEQ ID NO: 2532882 - RNA, 15 nt, Human
gugaugccacacaga

SEQ ID NO: 2532883 - RNA, 17 nt, Human
gugaugccacacagagu

SEQ ID NO: 2532884 - RNA, 23 nt, Human
gugaugccagguucuauuuggaa

SEQ ID NO: 2532885 - RNA, 18 nt, Human
gugaugccagguucuauu

SEQ ID NO: 2532886 - RNA, 15 nt, Human
gugaugccagguucu

SEQ ID NO: 2532887 - RNA, 19 nt, Human
gugaugccacacagagugg

SEQ ID NO: 2532888 - RNA, 15 nt, Human
aacuucuuauggaau

SEQ ID NO: 2532889 - RNA, 15 nt, Human
aacuucucuggaaag

SEQ ID NO: 2532890 - RNA, 14 nt, Human
aacuucucucagac

SEQ ID NO: 2532891 - RNA, 13 nt, Human
aacuucugccugu

SEQ ID NO: 2532892 - RNA, 16 nt, Human
aacuucuuauggaauu

SEQ ID NO: 2532893 - RNA, 17 nt, Human
aacuucuuauggaauug

SEQ ID NO: 2532894 - RNA, 19 nt, Human
aacuucuuauggaauugau

SEQ ID NO: 2532895 - RNA, 24 nt, Human
aacuucuuauggaauugauuugca

SEQ ID NO: 2532896 - RNA, 14 nt, Human
gugaugagaggaaa

SEQ ID NO: 2532897 - RNA, 19 nt, Human
aacuucuucagagcugaca

SEQ ID NO: 2532898 - RNA, 11 nt, Human
aacuucuucag

SEQ ID NO: 2532899 - RNA, 18 nt, Human
gugauggggcccugccuc

SEQ ID NO: 2532900 - RNA, 17 nt, Human
gugauggggcccugccu

SEQ ID NO: 2532901 - RNA, 16 nt, Human
gugauggggcccugcc

SEQ ID NO: 2532902 - RNA, 14 nt, Human
gugauggggcccug

SEQ ID NO: 2532903 - RNA, 17 nt, Human
gugaugggaaagcauug

SEQ ID NO: 2532904 - RNA, 16 nt, Human
gugaugcucaggcuug

SEQ ID NO: 2532905 - RNA, 13 nt, Human
gugaugcggcaga

SEQ ID NO: 2532906 - RNA, 15 nt, Human
gugaugcugggcugg

SEQ ID NO: 2532907 - RNA, 22 nt, Human
gugaugcgcaugucacggaggg

SEQ ID NO: 2532908 - RNA, 12 nt, Human
gugaugcggcag

SEQ ID NO: 2532909 - RNA, 22 nt, Human
gugaugcuaaagguuguauugc

SEQ ID NO: 2532910 - RNA, 13 nt, Human
gugaugccucccu

SEQ ID NO: 2532911 - RNA, 18 nt, Human
gugcacaucugugucuug

SEQ ID NO: 2532912 - RNA, 14 nt, Human
gugcacagugauuu

SEQ ID NO: 2532913 - RNA, 13 nt, Human
gugcacagugauu

SEQ ID NO: 2532914 - RNA, 22 nt, Human
gugcaugcugucccuuacguga

SEQ ID NO: 2532915 - RNA, 14 nt, Human
gugcaugguggcac

SEQ ID NO: 2532916 - RNA, 16 nt, Human
gugcauguaugucuug

SEQ ID NO: 2532917 - RNA, 13 nt, Human
gugcaugggugaa

SEQ ID NO: 2532918 - RNA, 18 nt, Human
gugcaugggugaagggag

SEQ ID NO: 2532919 - RNA, 21 nt, Human
gugcacacaccagagcccacc

SEQ ID NO: 2532920 - RNA, 22 nt, Human
gugcacagacgucccuccacgu

SEQ ID NO: 2532921 - RNA, 20 nt, Human
gugcacagacgucccuccac

SEQ ID NO: 2532922 - RNA, 20 nt, Human
gugcaauuuguuugugcuuc

SEQ ID NO: 2532923 - RNA, 17 nt, Human
gugcaauuuguuugugc

SEQ ID NO: 2532924 - RNA, 22 nt, Human
gugcaauuguaggggugugugu

SEQ ID NO: 2532925 - RNA, 23 nt, Human
gugcaauuuguuugugcuucuaa

SEQ ID NO: 2532926 - RNA, 21 nt, Human
gugcaauuuguuugugcuucu

SEQ ID NO: 2532927 - RNA, 18 nt, Human
gugcacaaaacccagacc

SEQ ID NO: 2532928 - RNA, 15 nt, Human
gugcacaaauauuua

SEQ ID NO: 2532929 - RNA, 21 nt, Human
gugcaaugucugagugaaccu

SEQ ID NO: 2532930 - RNA, 22 nt, Human
gugcaaugaccuuucaauagga

SEQ ID NO: 2532931 - RNA, 22 nt, Human
gugcaaguguaugcacgugugc

SEQ ID NO: 2532932 - RNA, 17 nt, Human
gugcaagugucugugug

SEQ ID NO: 2532933 - RNA, 20 nt, Human
gugcaagagacucuggccuc

SEQ ID NO: 2532934 - RNA, 19 nt, Human
gugcaagagacucuggccu

SEQ ID NO: 2532935 - RNA, 18 nt, Human
gugcaagagacucuggcc

SEQ ID NO: 2532936 - RNA, 22 nt, Human
gugcaacccaaggacugaggga

SEQ ID NO: 2532937 - RNA, 12 nt, Human
gugcaagagagg

SEQ ID NO: 2532938 - RNA, 20 nt, Human
gugcaaguaugugagugugu

SEQ ID NO: 2532939 - RNA, 22 nt, Human
gugcaagagacucuggccucca

SEQ ID NO: 2532940 - RNA, 15 nt, Human
gugcaagccccugcu

SEQ ID NO: 2532941 - RNA, 19 nt, Human
gugauggggcccugccucc

SEQ ID NO: 2532942 - RNA, 16 nt, Human
gugaugguuccccugu

SEQ ID NO: 2532943 - RNA, 14 nt, Human
gugaugguuccccu

SEQ ID NO: 2532944 - RNA, 23 nt, Human
gugcaaccucuuggccugaucag

SEQ ID NO: 2532945 - RNA, 23 nt, Human
gugcaacccuuaccccuuagccu

SEQ ID NO: 2532946 - RNA, 14 nt, Human
gugcaacccuuacc

SEQ ID NO: 2532947 - RNA, 13 nt, Human
gugcaacccaagg

SEQ ID NO: 2532948 - RNA, 24 nt, Human
gugcaacaggguauggacuaucug

SEQ ID NO: 2532949 - RNA, 15 nt, Human
gugcauuaucuagau

SEQ ID NO: 2532950 - RNA, 19 nt, Human
gugcauuaucuagauacug

SEQ ID NO: 2532951 - RNA, 19 nt, Human
gugcauguguguucaugca

SEQ ID NO: 2532952 - RNA, 23 nt, Human
gugcauguaugucuuggacacug

SEQ ID NO: 2532953 - RNA, 13 nt, Human
gugcaugugugug

SEQ ID NO: 2532954 - RNA, 14 nt, Human
gugcaugugugugc

SEQ ID NO: 2532955 - RNA, 15 nt, Human
gugcaugugugugcu

SEQ ID NO: 2532956 - RNA, 18 nt, Human
gugcaugugugugcucag

SEQ ID NO: 2532957 - RNA, 14 nt, Human
gugcauuacagaga

SEQ ID NO: 2532958 - RNA, 16 nt, Human
gugcauuacagagagg

SEQ ID NO: 2532959 - RNA, 23 nt, Human
gugcauuaucuagauacuguauc

SEQ ID NO: 2532960 - RNA, 21 nt, Human
gugccaauuucaaguuccaag

SEQ ID NO: 2532961 - RNA, 14 nt, Human
gugccaauuucaag

SEQ ID NO: 2532962 - RNA, 23 nt, Human
gugcauuacagagaggagaaaca

SEQ ID NO: 2532963 - RNA, 11 nt, Human
gugccacccug

SEQ ID NO: 2532964 - RNA, 14 nt, Human
gugccacccugggc

SEQ ID NO: 2532965 - RNA, 12 nt, Human
gugccacccugg

SEQ ID NO: 2532966 - RNA, 18 nt, Human
gugccacccaccagggcg

SEQ ID NO: 2532967 - RNA, 21 nt, Human
gugccacccugggcucugugg

SEQ ID NO: 2532968 - RNA, 20 nt, Human
gugccacccugggcucugug

SEQ ID NO: 2532969 - RNA, 16 nt, Human
gugccacccugggcuc

SEQ ID NO: 2532970 - RNA, 15 nt, Human
gugccacccugggcu

SEQ ID NO: 2532971 - RNA, 22 nt, Human
gugccacucaccgaagccacuu

SEQ ID NO: 2532972 - RNA, 22 nt, Human
gugccacccugggcucuguggg

SEQ ID NO: 2532973 - RNA, 17 nt, Human
gugccacugcccgagcu

SEQ ID NO: 2532974 - RNA, 18 nt, Human
gugccacugcccgagcug

SEQ ID NO: 2532975 - RNA, 20 nt, Human
gugccuggguggggcugcuc

SEQ ID NO: 2532976 - RNA, 21 nt, Human
gugccuggguggggcugcucc

SEQ ID NO: 2532977 - RNA, 12 nt, Human
gugccucugccu

SEQ ID NO: 2532978 - RNA, 18 nt, Human
gugccuggguggggcugc

SEQ ID NO: 2532979 - RNA, 20 nt, Human
gugccugucccacccccacc

SEQ ID NO: 2532980 - RNA, 15 nt, Human
gugccugucccaccc

SEQ ID NO: 2532981 - RNA, 21 nt, Human
gugccuguaugcaacaggcac

SEQ ID NO: 2532982 - RNA, 19 nt, Human
gugccuguaugcaacaggc

SEQ ID NO: 2532983 - RNA, 22 nt, Human
gugccuggguggggcugcuccu

SEQ ID NO: 2532984 - RNA, 23 nt, Human
gugccuggguggggcugcuccuc

SEQ ID NO: 2532985 - RNA, 22 nt, Human
gugccuguguccaugcgcucag

SEQ ID NO: 2532986 - RNA, 13 nt, Human
gugccugugucca

SEQ ID NO: 2532987 - RNA, 20 nt, Human
gugccugucuguuacacugg

SEQ ID NO: 2532988 - RNA, 15 nt, Human
gugccugugaggcag

SEQ ID NO: 2532989 - RNA, 16 nt, Human
gugccugugaggcagg

SEQ ID NO: 2532990 - RNA, 17 nt, Human
gugccugugaggcaggg

SEQ ID NO: 2532991 - RNA, 19 nt, Human
gugccacugcccgagcugg

SEQ ID NO: 2532992 - RNA, 20 nt, Human
gugccacugcccgagcuggu

SEQ ID NO: 2532993 - RNA, 21 nt, Human
gugccacugcccgagcuggug

SEQ ID NO: 2532994 - RNA, 22 nt, Human
gugccacugcccgagcuggugc

SEQ ID NO: 2532995 - RNA, 23 nt, Human
gugccacugcccgagcuggugca

SEQ ID NO: 2532996 - RNA, 23 nt, Human
gugccuccaccaccacuggccac

SEQ ID NO: 2532997 - RNA, 13 nt, Human
gugccuccaggug

SEQ ID NO: 2532998 - RNA, 15 nt, Human
gugccuccaggugug

SEQ ID NO: 2532999 - RNA, 21 nt, Human
gugccuccuuccaccucccuc

SEQ ID NO: 2533000 - RNA, 18 nt, Human
gugccuccuuccaccucc

SEQ ID NO: 2533001 - RNA, 22 nt, Human
gugccuccuuccaccucccucc

SEQ ID NO: 2533002 - RNA, 22 nt, Human
gugccucggcuuuucucagcug

SEQ ID NO: 2533003 - RNA, 13 nt, Human
gugccuccuucca

SEQ ID NO: 2533004 - RNA, 13 nt, Human
aacugggaccuuu

SEQ ID NO: 2533005 - RNA, 14 nt, Human
aacugggcugaaca

SEQ ID NO: 2533006 - RNA, 16 nt, Human
aacugggcugaacacu

SEQ ID NO: 2533007 - RNA, 17 nt, Human
aacugggacaggggaga

SEQ ID NO: 2533008 - RNA, 12 nt, Human
aacuggcugugu

SEQ ID NO: 2533009 - RNA, 23 nt, Human
aacuggccggucugcaagucaga

SEQ ID NO: 2533010 - RNA, 21 nt, Human
aacuggccggucugcaaguca

SEQ ID NO: 2533011 - RNA, 17 nt, Human
aacuggccggucugcaa

SEQ ID NO: 2533012 - RNA, 21 nt, Human
aacugggggagggugaaguga

SEQ ID NO: 2533013 - RNA, 22 nt, Human
aacugggggagggugaagugaa

SEQ ID NO: 2533014 - RNA, 21 nt, Human
aacuggguacuuguggacaca

SEQ ID NO: 2533015 - RNA, 16 nt, Human
aacuggguacuugugg

SEQ ID NO: 2533016 - RNA, 19 nt, Human
aacuggacugguucaaaug

SEQ ID NO: 2533017 - RNA, 15 nt, Human
aacuggauuaaacuu

SEQ ID NO: 2533018 - RNA, 19 nt, Human
aacuggacccuguugcuaa

SEQ ID NO: 2533019 - RNA, 18 nt, Human
aacuggacccuguugcua

SEQ ID NO: 2533020 - RNA, 17 nt, Human
aacuggacccuguugcu

SEQ ID NO: 2533021 - RNA, 14 nt, Human
aacuggacccuguu

SEQ ID NO: 2533022 - RNA, 21 nt, Human
aacuggacccuguugcuaagc

SEQ ID NO: 2533023 - RNA, 20 nt, Human
aacuggacccuguugcuaag

SEQ ID NO: 2533024 - RNA, 22 nt, Human
aacuggacccuguugcuaagcc

SEQ ID NO: 2533025 - RNA, 13 nt, Human
aacuggacucagg

SEQ ID NO: 2533026 - RNA, 15 nt, Human
aacuggacucaggau

SEQ ID NO: 2533027 - RNA, 11 nt, Human
aacuggcugca

SEQ ID NO: 2533028 - RNA, 16 nt, Human
aacuggauuaaacuua

SEQ ID NO: 2533029 - RNA, 17 nt, Human
aacuggcaguuuuccau

SEQ ID NO: 2533030 - RNA, 12 nt, Human
aacuggagcccc

SEQ ID NO: 2533031 - RNA, 21 nt, Human
aacuggacucaggaugcccag

SEQ ID NO: 2533032 - RNA, 22 nt, Human
aacuggacucaggaugcccagg

SEQ ID NO: 2533033 - RNA, 17 nt, Human
aacugcuuguuuccuag

SEQ ID NO: 2533034 - RNA, 15 nt, Human
aacugcuuucuuucg

SEQ ID NO: 2533035 - RNA, 21 nt, Human
aacugcuuucuuucguuuguu

SEQ ID NO: 2533036 - RNA, 17 nt, Human
aacuggaauaguuuuuu

SEQ ID NO: 2533037 - RNA, 20 nt, Human
aacuggaagcauguaggaga

SEQ ID NO: 2533038 - RNA, 23 nt, Human
aacugcugacuguuuucucuuga

SEQ ID NO: 2533039 - RNA, 20 nt, Human
aacugcugcuuuuugaggug

SEQ ID NO: 2533040 - RNA, 14 nt, Human
aacugcugcuuuuu

SEQ ID NO: 2533041 - RNA, 20 nt, Human
aacugcugacuguuuucucu

SEQ ID NO: 2533042 - RNA, 21 nt, Human
aacugcugacuguuuucucuu

SEQ ID NO: 2533043 - RNA, 16 nt, Human
aacugcguuaaaggcu

SEQ ID NO: 2533044 - RNA, 23 nt, Human
aacugcugaaaacuagcucguga

SEQ ID NO: 2533045 - RNA, 15 nt, Human
aacugcugacuguuu

SEQ ID NO: 2533046 - RNA, 20 nt, Human
aacugccuacuccaaaaugu

SEQ ID NO: 2533047 - RNA, 13 nt, Human
aacugcaggcccu

SEQ ID NO: 2533048 - RNA, 20 nt, Human
aacugccucgaaacacagaa

SEQ ID NO: 2533049 - RNA, 16 nt, Human
aacugccuuggcuuca

SEQ ID NO: 2533050 - RNA, 17 nt, Human
aacugccuuggcuucag

SEQ ID NO: 2533051 - RNA, 15 nt, Human
aacugccucuuuccu

SEQ ID NO: 2533052 - RNA, 17 nt, Human
aacugccuuaaaacuuu

SEQ ID NO: 2533053 - RNA, 19 nt, Human
aacugcacugucaagauga

SEQ ID NO: 2533054 - RNA, 19 nt, Human
aacugcagaccuguccucc

SEQ ID NO: 2533055 - RNA, 18 nt, Human
aacugcagaccuguccuc

SEQ ID NO: 2533056 - RNA, 17 nt, Human
aacugcagaccuguccu

SEQ ID NO: 2533057 - RNA, 22 nt, Human
aacucugacaacagacuucuga

SEQ ID NO: 2533058 - RNA, 23 nt, Human
aacucugacaacagacuucugaa

SEQ ID NO: 2533059 - RNA, 22 nt, Human
gugagucuuggcggcagcagcc

SEQ ID NO: 2533060 - RNA, 21 nt, Human
gugagucuuggcggcagcagc

SEQ ID NO: 2533061 - RNA, 20 nt, Human
gugagucuuggcggcagcag

SEQ ID NO: 2533062 - RNA, 19 nt, Human
gugagucuuggcggcagca

SEQ ID NO: 2533063 - RNA, 13 nt, Human
gugagugagccug

SEQ ID NO: 2533064 - RNA, 18 nt, Human
gugagugagccuggcucu

SEQ ID NO: 2533065 - RNA, 15 nt, Human
gugagugagccuggc

SEQ ID NO: 2533066 - RNA, 14 nt, Human
gugagugagccugg

SEQ ID NO: 2533067 - RNA, 20 nt, Human
aacucugacaacagacuucu

SEQ ID NO: 2533068 - RNA, 22 nt, Human
gugagucgaggacagggaggug

SEQ ID NO: 2533069 - RNA, 18 nt, Human
gugagucuuggcggcagc

SEQ ID NO: 2533070 - RNA, 17 nt, Human
gugagucuuggcggcag

SEQ ID NO: 2533071 - RNA, 16 nt, Human
gugagucuuggcggca

SEQ ID NO: 2533072 - RNA, 14 nt, Human
gugaggugcccagc

SEQ ID NO: 2533073 - RNA, 21 nt, Human
gugaggugcagagugcccaga

SEQ ID NO: 2533074 - RNA, 15 nt, Human
gugagucgaggacag

SEQ ID NO: 2533075 - RNA, 19 nt, Human
gugaggugcagagugccca

SEQ ID NO: 2533076 - RNA, 18 nt, Human
gugaggguuucugagcug

SEQ ID NO: 2533077 - RNA, 19 nt, Human
gugaggguuucugagcugc

SEQ ID NO: 2533078 - RNA, 18 nt, Human
gugagggucagagaggag

SEQ ID NO: 2533079 - RNA, 13 nt, Human
aacucuuaucuca

SEQ ID NO: 2533080 - RNA, 14 nt, Human
aacucuuaucucag

SEQ ID NO: 2533081 - RNA, 21 nt, Human
aacucuucaaucucuugcacu

SEQ ID NO: 2533082 - RNA, 22 nt, Human
aacucuguugcaagugcaauaa

SEQ ID NO: 2533083 - RNA, 17 nt, Human
aacucuuagaaaugaag

SEQ ID NO: 2533084 - RNA, 19 nt, Human
aacucuguugcaagugcaa

SEQ ID NO: 2533085 - RNA, 15 nt, Human
aacucuuaucucagu

SEQ ID NO: 2533086 - RNA, 18 nt, Human
aacucuucacaaaaucug

SEQ ID NO: 2533087 - RNA, 19 nt, Human
aacugaaaacaagccauga

SEQ ID NO: 2533088 - RNA, 20 nt, Human
aacugaaaagacucaguguu

SEQ ID NO: 2533089 - RNA, 12 nt, Human
aacugaaaaugu

SEQ ID NO: 2533090 - RNA, 19 nt, Human
aacugaaaaucuaauauua

SEQ ID NO: 2533091 - RNA, 12 nt, Human
aacugaaaagac

SEQ ID NO: 2533092 - RNA, 12 nt, Human
aacugaaaucau

SEQ ID NO: 2533093 - RNA, 13 nt, Human
aacugaaagugaa

SEQ ID NO: 2533094 - RNA, 20 nt, Human
gugagaugcuggagaagaga

SEQ ID NO: 2533095 - RNA, 19 nt, Human
gugagaugcuggagaagag

SEQ ID NO: 2533096 - RNA, 18 nt, Human
gugagaugcuggagaaga

SEQ ID NO: 2533097 - RNA, 17 nt, Human
gugagaugcuggagaag

SEQ ID NO: 2533098 - RNA, 15 nt, Human
gugagaugcuggaga

SEQ ID NO: 2533099 - RNA, 18 nt, Human
gugagaugcagcuggaaa

SEQ ID NO: 2533100 - RNA, 16 nt, Human
gugagaugcagcugga

SEQ ID NO: 2533101 - RNA, 15 nt, Human
gugagaugcagcugg

SEQ ID NO: 2533102 - RNA, 15 nt, Human
gugagauguaauugu

SEQ ID NO: 2533103 - RNA, 22 nt, Human
gugaggccagagacacaagccu

SEQ ID NO: 2533104 - RNA, 17 nt, Human
gugaggccagagacaca

SEQ ID NO: 2533105 - RNA, 16 nt, Human
gugagggucccaugug

SEQ ID NO: 2533106 - RNA, 15 nt, Human
gugagggucccaugu

SEQ ID NO: 2533107 - RNA, 17 nt, Human
gugagggagggcuguca

SEQ ID NO: 2533108 - RNA, 19 nt, Human
gugagggguaaaagcugau

SEQ ID NO: 2533109 - RNA, 22 nt, Human
gugagggcuugucauuaccaga

SEQ ID NO: 2533110 - RNA, 15 nt, Human
gugaggccagggcag

SEQ ID NO: 2533111 - RNA, 17 nt, Human
gugaggccagggcagag

SEQ ID NO: 2533112 - RNA, 14 nt, Human
gugaggccagggca

SEQ ID NO: 2533113 - RNA, 21 nt, Human
gugagcaagaagucaaaguaa

SEQ ID NO: 2533114 - RNA, 16 nt, Human
gugaggccuggccagg

SEQ ID NO: 2533115 - RNA, 14 nt, Human
gugaggccuggcca

SEQ ID NO: 2533116 - RNA, 13 nt, Human
gugaggccuggcc

SEQ ID NO: 2533117 - RNA, 11 nt, Human
gugaggccugg

SEQ ID NO: 2533118 - RNA, 13 nt, Human
gugaggccccugg

SEQ ID NO: 2533119 - RNA, 22 nt, Human
gugagaugcuggagaagagagg

SEQ ID NO: 2533120 - RNA, 15 nt, Human
gugaggcccagggag

SEQ ID NO: 2533121 - RNA, 17 nt, Human
gugaacuugggccacug

SEQ ID NO: 2533122 - RNA, 19 nt, Human
gugaacuugggccacugug

SEQ ID NO: 2533123 - RNA, 21 nt, Human
gugagaugcuagaacucccuu

SEQ ID NO: 2533124 - RNA, 14 nt, Human
gugaacuuuuugua

SEQ ID NO: 2533125 - RNA, 15 nt, Human
gugaacuuuauuaaa

SEQ ID NO: 2533126 - RNA, 20 nt, Human
gugaacuuggggaacaaggg

SEQ ID NO: 2533127 - RNA, 23 nt, Human
gugaacucagccaagcacagugg

SEQ ID NO: 2533128 - RNA, 22 nt, Human
gugaacucagccaagcacagug

SEQ ID NO: 2533129 - RNA, 21 nt, Human
gugaacucagccaagcacagu

SEQ ID NO: 2533130 - RNA, 19 nt, Human
gugaacucagccaagcaca

SEQ ID NO: 2533131 - RNA, 18 nt, Human
gugaacucagccaagcac

SEQ ID NO: 2533132 - RNA, 17 nt, Human
gugaacucagccaagca

SEQ ID NO: 2533133 - RNA, 16 nt, Human
gugaacucagccaagc

SEQ ID NO: 2533134 - RNA, 15 nt, Human
gugaacucagccaag

SEQ ID NO: 2533135 - RNA, 16 nt, Human
gugaacugacaggcag

SEQ ID NO: 2533136 - RNA, 13 nt, Human
gugaacugacagg

SEQ ID NO: 2533137 - RNA, 20 nt, Human
gugaacuggacccuguugcu

SEQ ID NO: 2533138 - RNA, 19 nt, Human
gugaacuggacccuguugc

SEQ ID NO: 2533139 - RNA, 22 nt, Human
gugaacuggacccuguugcuaa

SEQ ID NO: 2533140 - RNA, 21 nt, Human
gugaacuggacccuguugcua

SEQ ID NO: 2533141 - RNA, 23 nt, Human
gugaacuggacccuguugcuaag

SEQ ID NO: 2533142 - RNA, 21 nt, Human
gugaacugugaggguaaaggc

SEQ ID NO: 2533143 - RNA, 13 nt, Human
aaccccuguggag

SEQ ID NO: 2533144 - RNA, 16 nt, Human
aacccgaggcccgcau

SEQ ID NO: 2533145 - RNA, 15 nt, Human
aacccgaggcccgca

SEQ ID NO: 2533146 - RNA, 16 nt, Human
aacccgacagagggaa

SEQ ID NO: 2533147 - RNA, 11 nt, Human
aaccccuuucc

SEQ ID NO: 2533148 - RNA, 17 nt, Human
aacccgacagagggaag

SEQ ID NO: 2533149 - RNA, 16 nt, Human
aacccgggaggcagag

SEQ ID NO: 2533150 - RNA, 20 nt, Human
aaccucagccuggccagaca

SEQ ID NO: 2533151 - RNA, 13 nt, Human
aaccucagcucug

SEQ ID NO: 2533152 - RNA, 16 nt, Human
aaccucagccuggcca

SEQ ID NO: 2533153 - RNA, 23 nt, Human
aacccgagucauucguucugugg

SEQ ID NO: 2533154 - RNA, 20 nt, Human
aacccgacagagggaagaaa

SEQ ID NO: 2533155 - RNA, 16 nt, Human
aaccucauugacaaga

SEQ ID NO: 2533156 - RNA, 14 nt, Human
aaccucauucccca

SEQ ID NO: 2533157 - RNA, 21 nt, Human
aaccucauugacaagaacuga

SEQ ID NO: 2533158 - RNA, 21 nt, Human
aaccuccuguuagcuguuauu

SEQ ID NO: 2533159 - RNA, 19 nt, Human
aaccuccuuucucuucucu

SEQ ID NO: 2533160 - RNA, 18 nt, Human
aaccuccuuucucuucuc

SEQ ID NO: 2533161 - RNA, 17 nt, Human
aaccuccuuucucuucu

SEQ ID NO: 2533162 - RNA, 13 nt, Human
aaccuccuuucuc

SEQ ID NO: 2533163 - RNA, 16 nt, Human
aaccucaucuucuuca

SEQ ID NO: 2533164 - RNA, 13 nt, Human
aaccucaguguca

SEQ ID NO: 2533165 - RNA, 18 nt, Human
aaccucagugucauuuau

SEQ ID NO: 2533166 - RNA, 19 nt, Human
aaccucagugucauuuaug

SEQ ID NO: 2533167 - RNA, 21 nt, Human
aaccucagcucugggagagga

SEQ ID NO: 2533168 - RNA, 16 nt, Human
aaccucagcucuggga

SEQ ID NO: 2533169 - RNA, 15 nt, Human
aaccucagcucuggg

SEQ ID NO: 2533170 - RNA, 14 nt, Human
aaccucagcucugg

SEQ ID NO: 2533171 - RNA, 18 nt, Human
aaccucaggcuuccuugg

SEQ ID NO: 2533172 - RNA, 11 nt, Human
aaccugaaaaa

SEQ ID NO: 2533173 - RNA, 14 nt, Human
aaccucgcuggacu

SEQ ID NO: 2533174 - RNA, 19 nt, Human
aaccucgcuggacucucag

SEQ ID NO: 2533175 - RNA, 18 nt, Human
aaccugagccccaaaagg

SEQ ID NO: 2533176 - RNA, 19 nt, Human
aaccugaccccugcucagu

SEQ ID NO: 2533177 - RNA, 20 nt, Human
aaccugaccgugggcggggc

SEQ ID NO: 2533178 - RNA, 17 nt, Human
aaccugacguagcugca

SEQ ID NO: 2533179 - RNA, 16 nt, Human
aaccugaccccugcuc

SEQ ID NO: 2533180 - RNA, 17 nt, Human
aaccugaccccugcuca

SEQ ID NO: 2533181 - RNA, 11 nt, Human
aaccugacccc

SEQ ID NO: 2533182 - RNA, 23 nt, Human
aaccugacagaugucagccgagc

SEQ ID NO: 2533183 - RNA, 20 nt, Human
aaccugacagaugucagccg

SEQ ID NO: 2533184 - RNA, 19 nt, Human
aaccugacaaaaaaaaagu

SEQ ID NO: 2533185 - RNA, 21 nt, Human
aaccugaaaaaaaguuuacaa

SEQ ID NO: 2533186 - RNA, 15 nt, Human
aaccugaaccuagga

SEQ ID NO: 2533187 - RNA, 14 nt, Human
aacccagauaaagg

SEQ ID NO: 2533188 - RNA, 15 nt, Human
aacccagacucagac

SEQ ID NO: 2533189 - RNA, 16 nt, Human
aacccagacucagaca

SEQ ID NO: 2533190 - RNA, 18 nt, Human
aacccagacucagacauu

SEQ ID NO: 2533191 - RNA, 11 nt, Human
aacccagagag

SEQ ID NO: 2533192 - RNA, 12 nt, Human
aacccagagagg

SEQ ID NO: 2533193 - RNA, 22 nt, Human
aacccagaccuguuagcagaca

SEQ ID NO: 2533194 - RNA, 22 nt, Human
aacccaccuuguuggagccugc

SEQ ID NO: 2533195 - RNA, 14 nt, Human
aacccaccugcuga

SEQ ID NO: 2533196 - RNA, 12 nt, Human
aacccagacuca

SEQ ID NO: 2533197 - RNA, 14 nt, Human
aacccagacucaga

SEQ ID NO: 2533198 - RNA, 23 nt, Human
aacccagaccuguuagcagacag

SEQ ID NO: 2533199 - RNA, 22 nt, Human
aaccccaguucugcuccucucc

SEQ ID NO: 2533200 - RNA, 19 nt, Human
aaccccaguucugcuccuc

SEQ ID NO: 2533201 - RNA, 18 nt, Human
aaccccaguucugcuccu

SEQ ID NO: 2533202 - RNA, 16 nt, Human
aaccccaguucugcuc

SEQ ID NO: 2533203 - RNA, 13 nt, Human
aaccccaguucug

SEQ ID NO: 2533204 - RNA, 12 nt, Human
aaccccaguucu

SEQ ID NO: 2533205 - RNA, 16 nt, Human
aacccagccgcugccc

SEQ ID NO: 2533206 - RNA, 14 nt, Human
aaccccaggccccg

SEQ ID NO: 2533207 - RNA, 13 nt, Human
aacccccacacac

SEQ ID NO: 2533208 - RNA, 14 nt, Human
aacccccacacaca

SEQ ID NO: 2533209 - RNA, 12 nt, Human
aacccccacaca

SEQ ID NO: 2533210 - RNA, 23 nt, Human
aaccccaguucugcuccucucca

SEQ ID NO: 2533211 - RNA, 10 nt, Human
aacccagcuc

SEQ ID NO: 2533212 - RNA, 13 nt, Human
aacccagauuuug

SEQ ID NO: 2533213 - RNA, 21 nt, Human
aacccagauuuugcuguauau

SEQ ID NO: 2533214 - RNA, 10 nt, Human
aacccagccg

SEQ ID NO: 2533215 - RNA, 14 nt, Human
aacccagccgcugc

SEQ ID NO: 2533216 - RNA, 15 nt, Human
aacccccacacacac

SEQ ID NO: 2533217 - RNA, 10 nt, Human
aacccccacc

SEQ ID NO: 2533218 - RNA, 11 nt, Human
aacccccaccc

SEQ ID NO: 2533219 - RNA, 12 nt, Human
aacccccacccc

SEQ ID NO: 2533220 - RNA, 13 nt, Human
aacccccacccca

SEQ ID NO: 2533221 - RNA, 15 nt, Human
aacccccaccccaca

SEQ ID NO: 2533222 - RNA, 17 nt, Human
aacccccaccccacacu

SEQ ID NO: 2533223 - RNA, 18 nt, Human
aacccccaccccacacuu

SEQ ID NO: 2533224 - RNA, 19 nt, Human
aaccccccagcacugagga

SEQ ID NO: 2533225 - RNA, 18 nt, Human
aaccccccagcacugagg

SEQ ID NO: 2533226 - RNA, 14 nt, Human
aaccccccagcacu

SEQ ID NO: 2533227 - RNA, 11 nt, Human
aaccccccagc

SEQ ID NO: 2533228 - RNA, 19 nt, Human
aacccccaccccacacuug

SEQ ID NO: 2533229 - RNA, 20 nt, Human
aaccccuggcuccaggccag

SEQ ID NO: 2533230 - RNA, 21 nt, Human
aaccccuacaugaaacagaaa

SEQ ID NO: 2533231 - RNA, 19 nt, Human
aacccccuuugugcugugg

SEQ ID NO: 2533232 - RNA, 18 nt, Human
aacccccuuugugcugug

SEQ ID NO: 2533233 - RNA, 16 nt, Human
aacccccuuugugcug

SEQ ID NO: 2533234 - RNA, 17 nt, Human
aaccccccauuucuucc

SEQ ID NO: 2533235 - RNA, 22 nt, Human
aaccccgucgaggggcucucag

SEQ ID NO: 2533236 - RNA, 20 nt, Human
aaccccggggugcccacagg

SEQ ID NO: 2533237 - RNA, 14 nt, Human
aaccaccagaagcc

SEQ ID NO: 2533238 - RNA, 17 nt, Human
aaccaccagaagcccag

SEQ ID NO: 2533239 - RNA, 21 nt, Human
aaccaccacacccagcccacu

SEQ ID NO: 2533240 - RNA, 12 nt, Human
aaccaucauuga

SEQ ID NO: 2533241 - RNA, 20 nt, Human
aaccaagucaugugcauuuc

SEQ ID NO: 2533242 - RNA, 18 nt, Human
aaccaucauugaaaucuu

SEQ ID NO: 2533243 - RNA, 17 nt, Human
aaccaucauugaaaucu

SEQ ID NO: 2533244 - RNA, 23 nt, Human
aaccauuaaaacugaagucugaa

SEQ ID NO: 2533245 - RNA, 13 nt, Human
aaccauguuuugg

SEQ ID NO: 2533246 - RNA, 16 nt, Human
aaccaucauuauaaac

SEQ ID NO: 2533247 - RNA, 14 nt, Human
aaccauugucuugu

SEQ ID NO: 2533248 - RNA, 24 nt, Human
aaccauugucuuguucugugauga

SEQ ID NO: 2533249 - RNA, 19 nt, Human
aaccauugucuuguucugu

SEQ ID NO: 2533250 - RNA, 18 nt, Human
aaccauugucuuguucug

SEQ ID NO: 2533251 - RNA, 15 nt, Human
aaccauugucuuguu

SEQ ID NO: 2533252 - RNA, 23 nt, Human
aacccaaauguucaucaaugaau

SEQ ID NO: 2533253 - RNA, 22 nt, Human
aacccaaauuacguguacuaca

SEQ ID NO: 2533254 - RNA, 18 nt, Human
aacccaaggacugaggga

SEQ ID NO: 2533255 - RNA, 13 nt, Human
aacccaauaguug

SEQ ID NO: 2533256 - RNA, 19 nt, Human
aacccacaggcccacagua

SEQ ID NO: 2533257 - RNA, 16 nt, Human
aacccaagugggggca

SEQ ID NO: 2533258 - RNA, 14 nt, Human
aacccaauccaaau

SEQ ID NO: 2533259 - RNA, 22 nt, Human
aacccaagguggguagaucacg

SEQ ID NO: 2533260 - RNA, 18 nt, Human
aacccaaguccaagcaua

SEQ ID NO: 2533261 - RNA, 15 nt, Human
aacccaagcuuagaa

SEQ ID NO: 2533262 - RNA, 16 nt, Human
aacccaagcuuagaac

SEQ ID NO: 2533263 - RNA, 16 nt, Human
aacccaacucuccugg

SEQ ID NO: 2533264 - RNA, 22 nt, Human
gucuccuuugcacugagggcca

SEQ ID NO: 2533265 - RNA, 20 nt, Human
gucuccuuugcacugagggc

SEQ ID NO: 2533266 - RNA, 18 nt, Human
gucuccuuugcacugagg

SEQ ID NO: 2533267 - RNA, 16 nt, Human
gucuccuuugcacuga

SEQ ID NO: 2533268 - RNA, 15 nt, Human
gucuccuuugcacug

SEQ ID NO: 2533269 - RNA, 21 nt, Human
gucuccuuucucagccacaaa

SEQ ID NO: 2533270 - RNA, 20 nt, Human
gucuccuuucaccccagggc

SEQ ID NO: 2533271 - RNA, 13 nt, Human
gucucgaacuccu

SEQ ID NO: 2533272 - RNA, 18 nt, Human
gucucgaacuccugaccu

SEQ ID NO: 2533273 - RNA, 18 nt, Human
aaccaagccguggcuucc

SEQ ID NO: 2533274 - RNA, 15 nt, Human
aaccaagcucucugc

SEQ ID NO: 2533275 - RNA, 23 nt, Human
gucuccuuugcacugagggccac

SEQ ID NO: 2533276 - RNA, 18 nt, Human
gucuccuuugcaggcuca

SEQ ID NO: 2533277 - RNA, 19 nt, Human
gucucgaacuccugaccuu

SEQ ID NO: 2533278 - RNA, 16 nt, Human
aaccaagccguggcuu

SEQ ID NO: 2533279 - RNA, 17 nt, Human
aaccaagcucucugcau

SEQ ID NO: 2533280 - RNA, 16 nt, Human
aaccaagucaugugca

SEQ ID NO: 2533281 - RNA, 15 nt, Human
aaccaagucaaguga

SEQ ID NO: 2533282 - RNA, 20 nt, Human
aaccacauuggagauguuua

SEQ ID NO: 2533283 - RNA, 19 nt, Human
aaccaccacacccagccca

SEQ ID NO: 2533284 - RNA, 22 nt, Human
gucuccuuaacacugagcuguc

SEQ ID NO: 2533285 - RNA, 18 nt, Human
gucuccuuucaccccagg

SEQ ID NO: 2533286 - RNA, 16 nt, Human
gucuccuuaacacuga

SEQ ID NO: 2533287 - RNA, 22 nt, Human
gucuccugugcccacaucccag

SEQ ID NO: 2533288 - RNA, 21 nt, Human
gucuccugugcccacauccca

SEQ ID NO: 2533289 - RNA, 13 nt, Human
gucucccuucucc

SEQ ID NO: 2533290 - RNA, 16 nt, Human
gucucccuggcccuca

SEQ ID NO: 2533291 - RNA, 18 nt, Human
gucucccuggcccucaag

SEQ ID NO: 2533292 - RNA, 19 nt, Human
gucucccuucucccaugag

SEQ ID NO: 2533293 - RNA, 15 nt, Human
gucucccuucuccca

SEQ ID NO: 2533294 - RNA, 18 nt, Human
gucucccuuucccuucuu

SEQ ID NO: 2533295 - RNA, 14 nt, Human
gucucccucuccug

SEQ ID NO: 2533296 - RNA, 15 nt, Human
gucucccucuccugc

SEQ ID NO: 2533297 - RNA, 16 nt, Human
gucucccucuccugcc

SEQ ID NO: 2533298 - RNA, 17 nt, Human
gucucccucuccugccu

SEQ ID NO: 2533299 - RNA, 18 nt, Human
gucucccucuccugccua

SEQ ID NO: 2533300 - RNA, 19 nt, Human
gucucccucuccugccuac

SEQ ID NO: 2533301 - RNA, 20 nt, Human
gucucccucuccugccuacu

SEQ ID NO: 2533302 - RNA, 15 nt, Human
gucucccuggcccuc

SEQ ID NO: 2533303 - RNA, 14 nt, Human
gucucccuggcccu

SEQ ID NO: 2533304 - RNA, 13 nt, Human
gucucccuggccc

SEQ ID NO: 2533305 - RNA, 12 nt, Human
gucucccuggcc

SEQ ID NO: 2533306 - RNA, 16 nt, Human
gucucccuggagugca

SEQ ID NO: 2533307 - RNA, 21 nt, Human
gucucccucuccugccuacuc

SEQ ID NO: 2533308 - RNA, 22 nt, Human
gucucccucuccugccuacuca

SEQ ID NO: 2533309 - RNA, 23 nt, Human
aacaguguuucccauaauuuucu

SEQ ID NO: 2533310 - RNA, 20 nt, Human
aacaguguuuuggaauaaaa

SEQ ID NO: 2533311 - RNA, 13 nt, Human
aacaguuaacuuu

SEQ ID NO: 2533312 - RNA, 17 nt, Human
aacaguuaacuuucaga

SEQ ID NO: 2533313 - RNA, 18 nt, Human
aacaguuaacuuucagaa

SEQ ID NO: 2533314 - RNA, 19 nt, Human
aacaguuaauaccauuuuu

SEQ ID NO: 2533315 - RNA, 23 nt, Human
aacaguucauguuugcuucauaa

SEQ ID NO: 2533316 - RNA, 14 nt, Human
aacaguuccuucag

SEQ ID NO: 2533317 - RNA, 16 nt, Human
aacaguucauguuugc

SEQ ID NO: 2533318 - RNA, 20 nt, Human
aacaguuaacuuucagaaga

SEQ ID NO: 2533319 - RNA, 16 nt, Human
aacaguuagcuggagc

SEQ ID NO: 2533320 - RNA, 23 nt, Human
gucuucuaauuucaaaaauauaa

SEQ ID NO: 2533321 - RNA, 15 nt, Human
gucuucuaauuucaa

SEQ ID NO: 2533322 - RNA, 13 nt, Human
gucuucuaauuuc

SEQ ID NO: 2533323 - RNA, 20 nt, Human
gucuucguacaguucuucgg

SEQ ID NO: 2533324 - RNA, 14 nt, Human
gucuucuaaacuuc

SEQ ID NO: 2533325 - RNA, 23 nt, Human
gucuucuaaacuuccccaucuuc

SEQ ID NO: 2533326 - RNA, 14 nt, Human
gucuuuaacuguca

SEQ ID NO: 2533327 - RNA, 14 nt, Human
gucugguuucuaga

SEQ ID NO: 2533328 - RNA, 16 nt, Human
gucuuucacagcuccu

SEQ ID NO: 2533329 - RNA, 15 nt, Human
gucuuucacagcucc

SEQ ID NO: 2533330 - RNA, 17 nt, Human
gucuuuaggcagcagcu

SEQ ID NO: 2533331 - RNA, 16 nt, Human
gucuuucacauuuaaa

SEQ ID NO: 2533332 - RNA, 22 nt, Human
gucuuuggguaccuauuuucau

SEQ ID NO: 2533333 - RNA, 15 nt, Human
gucuuugguucagcu

SEQ ID NO: 2533334 - RNA, 18 nt, Human
gucuuuggacccugaggc

SEQ ID NO: 2533335 - RNA, 16 nt, Human
gucuuuugcuuuuggc

SEQ ID NO: 2533336 - RNA, 13 nt, Human
gucuuuugcauga

SEQ ID NO: 2533337 - RNA, 14 nt, Human
gucuuuugcuuuug

SEQ ID NO: 2533338 - RNA, 13 nt, Human
gucuuuugcuuuu

SEQ ID NO: 2533339 - RNA, 12 nt, Human
gucuuuugcuuu

SEQ ID NO: 2533340 - RNA, 12 nt, Human
gucuuuugcaug

SEQ ID NO: 2533341 - RNA, 19 nt, Human
gucuuuugacauguggaaa

SEQ ID NO: 2533342 - RNA, 15 nt, Human
gucuuuguaagagug

SEQ ID NO: 2533343 - RNA, 14 nt, Human
gucuuuguaagagu

SEQ ID NO: 2533344 - RNA, 13 nt, Human
gucuuuguaagag

SEQ ID NO: 2533345 - RNA, 12 nt, Human
gucuuuguaaga

SEQ ID NO: 2533346 - RNA, 21 nt, Human
gucuuuguaagaguguagaag

SEQ ID NO: 2533347 - RNA, 20 nt, Human
gucuuuguaagaguguagaa

SEQ ID NO: 2533348 - RNA, 22 nt, Human
gucuuuguaagaguguagaagc

SEQ ID NO: 2533349 - RNA, 16 nt, Human
gucuuuguaaugucac

SEQ ID NO: 2533350 - RNA, 18 nt, Human
gucuuuguaaugucacca

SEQ ID NO: 2533351 - RNA, 19 nt, Human
gucuuuguaaugucaccac

SEQ ID NO: 2533352 - RNA, 20 nt, Human
gucuuuguaaugucaccacc

SEQ ID NO: 2533353 - RNA, 14 nt, Human
gucuuuugacaugu

SEQ ID NO: 2533354 - RNA, 16 nt, Human
gucuuuugacaugugg

SEQ ID NO: 2533355 - RNA, 15 nt, Human
aaccuguccuugcac

SEQ ID NO: 2533356 - RNA, 22 nt, Human
aaccuguauaaguggaggcacu

SEQ ID NO: 2533357 - RNA, 15 nt, Human
aaccuguacuucaag

SEQ ID NO: 2533358 - RNA, 13 nt, Human
aaccuguaauaaa

SEQ ID NO: 2533359 - RNA, 14 nt, Human
aaccuguaauaaau

SEQ ID NO: 2533360 - RNA, 14 nt, Human
aaccuggugcugga

SEQ ID NO: 2533361 - RNA, 18 nt, Human
aaccuguaauaaauauga

SEQ ID NO: 2533362 - RNA, 16 nt, Human
aaccuguaauaaauau

SEQ ID NO: 2533363 - RNA, 23 nt, Human
aaccuguacuucaaguuaaagug

SEQ ID NO: 2533364 - RNA, 23 nt, Human
aaccuggucacaggacucugccu

SEQ ID NO: 2533365 - RNA, 16 nt, Human
gucuuuuuaugcauuu

SEQ ID NO: 2533366 - RNA, 20 nt, Human
gucuuuuuaagcuuauuuaa

SEQ ID NO: 2533367 - RNA, 11 nt, Human
aaccuggugcu

SEQ ID NO: 2533368 - RNA, 16 nt, Human
gucuuuuucuggacug

SEQ ID NO: 2533369 - RNA, 15 nt, Human
gucuuuuguucgcau

SEQ ID NO: 2533370 - RNA, 15 nt, Human
gucuuuuuaagcuua

SEQ ID NO: 2533371 - RNA, 20 nt, Human
aaccugagucguacagaaag

SEQ ID NO: 2533372 - RNA, 20 nt, Human
aaccugagccccaaaaggua

SEQ ID NO: 2533373 - RNA, 21 nt, Human
gucugguuuuaacaauuuccu

SEQ ID NO: 2533374 - RNA, 18 nt, Human
gucugguuuuaacaauuu

SEQ ID NO: 2533375 - RNA, 16 nt, Human
gucugguuuuaacaau

SEQ ID NO: 2533376 - RNA, 12 nt, Human
gucuguaaaauc

SEQ ID NO: 2533377 - RNA, 11 nt, Human
gucuguaaaau

SEQ ID NO: 2533378 - RNA, 18 nt, Human
gucuguaaaaucuuucuu

SEQ ID NO: 2533379 - RNA, 15 nt, Human
gucuguaaaaucuuu

SEQ ID NO: 2533380 - RNA, 14 nt, Human
gucuguaaaaucuu

SEQ ID NO: 2533381 - RNA, 13 nt, Human
gucuguaaaaucu

SEQ ID NO: 2533382 - RNA, 12 nt, Human
gucuggcagccu

SEQ ID NO: 2533383 - RNA, 22 nt, Human
gucuggcagccucccauccagg

SEQ ID NO: 2533384 - RNA, 14 nt, Human
gucuggcccuuccu

SEQ ID NO: 2533385 - RNA, 20 nt, Human
gucugucccgggguccugug

SEQ ID NO: 2533386 - RNA, 19 nt, Human
gucugucccgggguccugu

SEQ ID NO: 2533387 - RNA, 16 nt, Human
gucugucccggggucc

SEQ ID NO: 2533388 - RNA, 22 nt, Human
gucugucaugaacauguuccug

SEQ ID NO: 2533389 - RNA, 20 nt, Human
gucuguaucggagacaguga

SEQ ID NO: 2533390 - RNA, 15 nt, Human
gucugucccaccagc

SEQ ID NO: 2533391 - RNA, 14 nt, Human
gucugucucuguca

SEQ ID NO: 2533392 - RNA, 22 nt, Human
gucugucucuccaucuguuugg

SEQ ID NO: 2533393 - RNA, 23 nt, Human
gucugucccgggguccuguggca

SEQ ID NO: 2533394 - RNA, 21 nt, Human
gucugucccgggguccugugg

SEQ ID NO: 2533395 - RNA, 24 nt, Human
gucugucccgggguccuguggcag

SEQ ID NO: 2533396 - RNA, 18 nt, Human
gucuucguacaguucuuc

SEQ ID NO: 2533397 - RNA, 16 nt, Human
gucuucguacaguucu

SEQ ID NO: 2533398 - RNA, 14 nt, Human
gucuucguacaguu

SEQ ID NO: 2533399 - RNA, 13 nt, Human
gucuucguacagu

SEQ ID NO: 2533400 - RNA, 17 nt, Human
gucuucggaaaccuugg

SEQ ID NO: 2533401 - RNA, 15 nt, Human
gucuucggaaaccuu

SEQ ID NO: 2533402 - RNA, 15 nt, Human
gucuuccuucugccu

SEQ ID NO: 2533403 - RNA, 14 nt, Human
gucuuccugugggg

SEQ ID NO: 2533404 - RNA, 15 nt, Human
gucugucuucacagc

SEQ ID NO: 2533405 - RNA, 19 nt, Human
gucuuccugaguggugcca

SEQ ID NO: 2533406 - RNA, 17 nt, Human
gucuuccugcauucacc

SEQ ID NO: 2533407 - RNA, 12 nt, Human
gucuuccugugg

SEQ ID NO: 2533408 - RNA, 20 nt, Human
gucuuccugcauucacccag

SEQ ID NO: 2533409 - RNA, 22 nt, Human
gucuguagagggcccugguguu

SEQ ID NO: 2533410 - RNA, 19 nt, Human
gucuguagagggcccuggu

SEQ ID NO: 2533411 - RNA, 18 nt, Human
gucuguagagggcccugg

SEQ ID NO: 2533412 - RNA, 17 nt, Human
gucuguagagggcccug

SEQ ID NO: 2533413 - RNA, 14 nt, Human
gucuguagagggcc

SEQ ID NO: 2533414 - RNA, 21 nt, Human
gucuguacacguguccuguag

SEQ ID NO: 2533415 - RNA, 20 nt, Human
gucuguacacguguccugua

SEQ ID NO: 2533416 - RNA, 19 nt, Human
gucuguacacguguccugu

SEQ ID NO: 2533417 - RNA, 14 nt, Human
gucuguacacgugu

SEQ ID NO: 2533418 - RNA, 14 nt, Human
gucuguaagcugaa

SEQ ID NO: 2533419 - RNA, 23 nt, Human
gucuguauuuaugugugaggagc

SEQ ID NO: 2533420 - RNA, 19 nt, Human
gucuguauuuaugugugag

SEQ ID NO: 2533421 - RNA, 22 nt, Human
aacucgaggacuguauuuguga

SEQ ID NO: 2533422 - RNA, 20 nt, Human
aacucgaggacuguauuugu

SEQ ID NO: 2533423 - RNA, 19 nt, Human
aacucgaggacuguauuug

SEQ ID NO: 2533424 - RNA, 14 nt, Human
aacucgaggacugu

SEQ ID NO: 2533425 - RNA, 21 nt, Human
aacuccuuuagcagguggucc

SEQ ID NO: 2533426 - RNA, 18 nt, Human
aacuccuuuagcaggugg

SEQ ID NO: 2533427 - RNA, 14 nt, Human
aacuccuguccuuu

SEQ ID NO: 2533428 - RNA, 17 nt, Human
aacucaucugucaccaa

SEQ ID NO: 2533429 - RNA, 22 nt, Human
aacucaucuagguaaauuacag

SEQ ID NO: 2533430 - RNA, 19 nt, Human
aacucauuccugccugucu

SEQ ID NO: 2533431 - RNA, 21 nt, Human
aacucauuccugccugucucc

SEQ ID NO: 2533432 - RNA, 15 nt, Human
aacucauuccugccu

SEQ ID NO: 2533433 - RNA, 12 nt, Human
aacuccuggccu

SEQ ID NO: 2533434 - RNA, 22 nt, Human
aacucauuuccuauguaacugc

SEQ ID NO: 2533435 - RNA, 22 nt, Human
aacucauuccugccugucuccu

SEQ ID NO: 2533436 - RNA, 23 nt, Human
aacucauuccugccugucuccuu

SEQ ID NO: 2533437 - RNA, 23 nt, Human
gugaaccaccacacccagcccac

SEQ ID NO: 2533438 - RNA, 22 nt, Human
gugaaccaccacacccagccca

SEQ ID NO: 2533439 - RNA, 16 nt, Human
gugaaccuaccuucau

SEQ ID NO: 2533440 - RNA, 15 nt, Human
gugaaccaugucagc

SEQ ID NO: 2533441 - RNA, 14 nt, Human
gugaaccuguauaa

SEQ ID NO: 2533442 - RNA, 16 nt, Human
gugaacgauuuagaaa

SEQ ID NO: 2533443 - RNA, 14 nt, Human
gugaacgauuuaga

SEQ ID NO: 2533444 - RNA, 14 nt, Human
gugaacucagccaa

SEQ ID NO: 2533445 - RNA, 15 nt, Human
gugaacguggacucc

SEQ ID NO: 2533446 - RNA, 18 nt, Human
aacucuccuccagaguca

SEQ ID NO: 2533447 - RNA, 15 nt, Human
aacucuccuccagag

SEQ ID NO: 2533448 - RNA, 16 nt, Human
aacucuccucugcugc

SEQ ID NO: 2533449 - RNA, 13 nt, Human
aaccuugccuuuc

SEQ ID NO: 2533450 - RNA, 16 nt, Human
aaccuugagacagcuu
